(19) United States
(12) Patent Application Publication
(10) Pub. No.: US 2004/0127446 A1
(43) Pub. Date: Jul. 1, 2004

(54) Oligonucleotide mediated inhibition of hepatitis B virus and hepatitis C virus replication

(76) Inventors: Lawrence Blatt, San Francisco, CA (US); Dennis Macejak, Arvada, CO (US); James McSwiggen, Boulder, CO (US); David Morrissey, Boulder, CO (US); Pamela Pavco, Lafayette, CO (US); Patrice Lee, Erie, CO (US); Kenneth Draper, Reno, NV (US); Elisabeth Roberts, Federal Heights, CO (US)

Correspondence Address: MCDONNELL BOEHNEN HULBERT & BERGHOFF LLP, 300 S. WACKER DRIVE, 32ND FLOOR, CHICAGO, IL, 60606, US

(21) Appl. No.: 10/669,841

(22) Filed: Sep. 23, 2003

Related U.S. Application Data
(63) Continuation of application No. PCT/US02/09187, filed on Mar. 26, 2002.
(63) Continuation-in-part of application No. 09/817,879, filed on Mar. 26, 2001.
Application No. 09/817,879 is a continuation-in-part of application No. 09/740,332, filed on Dec. 18, 2000.
Application No. 09/740,332 is a continuation-in-part of application No. 09/611,931, filed on Jul. 7, 2000, now abandoned.
Application No. 09/611,931 is a continuation-in-part of application No. 09/504,231, filed on Feb. 15, 2000, now abandoned.
Application No. 09/504,231 is a continuation-in-part of application No. 09/274,553, filed on Mar. 23, 1999, now abandoned.
Application No. 09/274,553 is a continuation-in-part of application No. 09/257,608, filed on Feb. 25, 1999, now abandoned.
(63) Continuation-in-part of application No. 09/877,478, filed on Jun. 8, 2001, now abandoned.
Application No. 09/877,478 is a continuation-in-part of application No. 09/696,347, filed on Oct. 24, 2000, now abandoned.
Application No. 09/696,347 is a continuation-in-part of application No. 09/636,385, filed on Aug. 9, 2000, now abandoned.
Application No. 09/636,385 is a continuation-in-part of application No. 09/531,025, filed on Mar. 20, 2000, now abandoned.
Application No. 09/531,025 is a continuation-in-part of application No. 09/436,430, filed on Nov. 8, 1999.
Application No. 09/436,430 is a continuation of application No. 08/193,627, filed on Feb. 7, 1994, now Pat. No. 6,017,756.
Application No. 08/193,627 is a continuation of application No. 07/882,712, filed on May 14, 1992, now abandoned.
(60) Provisional application No. 60/296,876, filed on Jun. 8, 2001.
(60) Provisional application No. 60/335,059, filed on Oct. 24, 2001.
(60) Provisional application No. 60/337,055, filed on Dec. 5, 2001.
(60) Provisional application No. 60/358,580, filed on Feb. 20, 2002.
(60) Provisional application No. 60/363,124, filed on Mar. 11, 2002.
(60) Provisional application No. 60/100,842, filed on Sep. 18, 1998.
(60) Provisional application No. 60/083,217, filed on Apr. 27, 1998.

(51) Int. Cl. A61K 48/00; C07H 21/02

(52) U.S. Cl. 514/44; 536/23.72

(57) ABSTRACT

The present invention relates to nucleic acid molecules, including antisense and enzymatic nucleic acid molecules, such as hammerhead ribozymes, DNAzymes, Inozymes, Zinzymes, Amberzymes, and G-cleaver ribozymes, which modulate the synthesis, expression and/or stability of an HCV or HBV RNA and methods for their use alone or in combination with other therapies. In addition, nucleic acid decoy molecules and aptamers that bind to HBV reverse transcriptase and/or HBV reverse transcriptase primer sequences and methods for their use alone or in combination with other therapies, are disclosed. Oligonucleotides that specifically bind the Enhancer I region of HBV DNA are further disclosed. The present invention further relates to the use of nucleic acids, such as decoy and aptamer molecules of the invention, to modulate the expression of Hepatitis B virus (HBV) genes and HBV viral replication. Furthermore, HBV animal models and methods of use are disclosed, including methods of screening for compounds and/or potential therapies directed against HBV. The present invention also relates to compounds, including enzymatic nucleic acid molecules, ribozymes, DNAzymes, nuclease activating compounds and chimeras such as 2′,5′-adenylates, that modulate the expression and/or replication of hepatitis C virus (HCV).

[0001] This patent application is a continuation of International Application No. PCT/US02/09187, with international filing date of Mar. 26, 2002, published in English under PCT Article 21(2), which claims the benefit of Macejak et al., USSN (60/296,876), filed Jun. 8, 2001, Macejak et al., USSN (60/335,059), filed Oct. 24, 2001, Morrissey et al., USSN (60/337,055), filed Dec. 5, 2001, Beigelman et al., USSN (60/358,580), filed Feb. 20, 2002, Beigelman et al., USSN (60/363,124), filed Mar. 11, 2002, and which is a continuation-in-part of Blatt et al., USSN (Ser. No. 09/817,879), filed Mar. 26, 2001, which is a continuation-in-part of Blatt et al., USSN (Ser. No. 09/740,332), filed Dec. 18, 2000, which is a continuation-in-part of Blatt et al., USSN (Ser. No. 09/611,931), filed Jul. 7, 2000, which is a continuation-in-part of Blatt et al., USSN (Ser. No. 09/504,321), filed Feb. 15, 2000, which is a continuation-in-part of Blatt et al., USSN (Ser. No. 09/274,553), filed Mar. 23, 1999, which is a continuation-in-part of Blatt et al., USSN (Ser. No. 09/257,608), filed Feb. 24, 1999 (abandoned), which claims the benefit of Blatt et al., USSN (60/100,842), filed Sep. 18, 1998, and McSwiggen et al., USSN (60/083,217) filed Apr. 27, 1998. This patent application is also a continuation-in-part of Draper et al., USSN (Ser. No. 09/877,478) filed Jun. 8, 2001, which is a continuation-in-part of Draper et al., USSN (Ser. No. 09/696,347), filed Oct. 24, 2000, which is a continuation-in-part of Draper et al., USSN (Ser. No. 09/636,385), filed Aug. 9, 2000, which is a continuation-in-part of Draper et al., USSN (Ser. No. 09/531,025), filed Mar. 20, 2000, which is a continuation-in-part of Draper et al., USSN (Ser. No. 09/436,430), filed Nov. 8, 1999, which is a continuation of Draper et al., USSN (Ser. No. 08/193,627), filed Feb. 7, 1994, now U.S. Pat. No. 6,017,756, which is a continuation of Draper et al., USSN (Ser. No. 07/882,712), filed May 14, 1992, now abandoned. All of these listed applications are hereby incorporated by reference herein in their entireties, including the drawings.

### BACKGROUND OF THE INVENTION

[0002] The present invention concerns compounds, compositions, and methods for the study, diagnosis, and treatment of degenerative and disease states related to hepatitis B virus (HBV) and hepatitis C virus (HCV) infection, replication and gene expression. Specifically, the invention relates to nucleic acid molecules used to modulate expression of HBV and HCV. In addition, the instant invention relates to methods, models and systems for screening inhibitors of HBV and HCV replication and propagation.

[0003] The following is a discussion of relevant art pertaining to hepatitis B virus (HBV) and hepatitis C virus (HCV). The discussion is not meant to be complete and is provided only for understanding of the invention that follows. The summary is not an admission that any of the work described below is prior art to the claimed invention.

[0004] In 1989, the Hepatitis C Virus (HCV) was determined to be an RNA virus and was identified as the causative agent of most non-A non-B viral Hepatitis (Choo et al., Science. 1989; 244:359-362). Unlike retroviruses such as HIV, HCV does not go though a DNA replication phase and no integrated forms of the viral genome into the host chromosome have been detected (Houghton et al., Hepatology 1991;14:381-388). Rather, replication of the coding (plus) strand is mediated by the production of a replicative (minus) strand leading to the generation of several copies of plus strand HCV RNA. The genome consists of a single, large, open-reading frame that is translated into a polyprotein (Kato et al., FEBS Letters. 1991; 280: 325-328). This polyprotein subsequently undergoes post-translational cleavage, producing several viral proteins (Leinbach et al., Virology. 1994: 204:163-169).

[0005] Examination of the 9.5-kilobase genome of HCV has demonstrated that the viral nucleic acid can mutate at a high rate (Smith et al., Mol. Evol. 1997 45:238-246). This rate of mutation has led to the evolution of several distinct genotypes of HCV that share approximately 70% sequence identity (Simmonds et al., J. Gen. Virol. 1994;75 :1053-1061). It is important to note that these sequences are evolutionarily quite distant. For example, the genetic identity between humans and primates such as the chimpanzee is approximately 98%. In addition, it has been demonstrated that an HCV infection in an individual patient is composed of several distinct and evolving quasispecies that have 98% identity at the RNA level. Thus, the HCV genome is hypervariable and continuously changing. Although the HCV genome is hypervariable, there are 3 regions of the genome that are highly conserved. These conserved sequences occur in the 5′ and 3′ non-coding regions as well as the 5′-end of the core protein coding region and are thought to be vital for HCV RNA replication as well as translation of the HCV polyprotein. Thus, therapeutic agents that target these conserved HCV genomic regions can have a significant impact over a wide range of HCV genotypes. Moreover, it is unlikely that drug resistance will occur with enzymatic nucleic acids specific to conserved regions of the HCV genome. In contrast, therapeutic modalities that target inhibition of enzymes such as the viral proteases or helicase are likely to result in the selection for drug resistant strains since the RNA for these viral encoded enzymes is located in the hypervariable portion of the HCV genome.

[0006] After initial exposure to HCV, the patient experiences a transient rise in liver enzymes, which indicates the occurrence of inflammatory processes (Alter et al., IN: Seeff L B, Lewis J H, eds. Current Perspectives in Hepatology. New York: Plenum Medical Book Co; 1989:83-89). This elevation in liver enzymes will occur at least 4 weeks after the initial exposure and can last for up to two months (Farci et al., New England Journal of Medicine. 1991:325:98-104). Prior to the rise in liver enzymes, it is possible to detect HCV RNA in the patient's serum using RT-PCR analysis (Takahashi et al., American Journal of Gastroenterology. 1993:88:2:240-243). This stage of the disease is called the acute stage and usually goes undetected since 75% of patients with acute viral hepatitis from HCV infection are asymptomatic. The remaining 25% of these patients develop jaundice or other symptoms of hepatitis.

[0007] Acute HCV infection is a benign disease, however, and as many as 80% of acute HCV patients progress to chronic liver disease as evidenced by persistent elevation of serum alanine aminotransferase (ALT) levels and by continual presence of circulating HCV RNA (Sherlock, Lancet 1992; 339:802). The natural progression of chronic HCV infection over a 10 to 20 year period leads to cirrhosis in 20 to 50% of patients (Davis et al., Infectious Agents and Disease 1993;2:150:154) and progression of HCV infection to hepatocellular carcinoma has been well documented (Liang et al., Hepatology. 1993; 18:1326-1333; Tong et al., Western Journal of Medicine, 1994; Vol. 160, No. 2: 133-138). There have been no studies that have determined sub-populations that are most likely to progress to cirrhosis and/or hepatocellular carcinoma, thus all patients have equal risk of progression.

[0008] It is important to note that the survival for patients diagnosed with hepatocellular carcinoma is only 0.9 to 12.8 months from initial diagnosis (Takahashi et al., American Journal of Gastroenterology. 1993:88:2:240-243). Treatment of hepatocellular carcinoma with chemotherapeutic agents has not proven effective and only 10% of patients will benefit from surgery due to extensive tumor invasion of the liver (Trinchet et al., Presse Medicine. 1994:23:831-833). Given the aggressive nature of primary hepatocellular carcinoma, the only viable treatment alternative to surgery is liver transplantation (Pichlmayr et al., Hepatology. 1994:20:33S-40S).

[0009] Upon progression to cirrhosis, patients with chronic HCV infection present with clinical features, which are common to clinical cirrhosis regardless of the initial cause (D'Amico et al., Digestive Diseases and Sciences. 1986;31:5: 468-475). These clinical features can include: bleeding esophageal varices, ascites, jaundice, and encephalopathy (Zakim D, Boyer T D. Hepatology a textbook of liver disease. Second Edition Volume 1. 1990 W. B. Saunders Company. Philadelphia). In the early stages of cirrhosis, patients are classified as compensated, meaning that although liver tissue damage has occurred, the patient's liver is still able to detoxify metabolites in the blood-stream. In addition, most patients with compensated liver disease are asymptomatic and the minority with symptoms report only minor symptoms such as dyspepsia and weakness. In the later stages of cirrhosis, patients are classified as decompensated meaning that their ability to detoxify metabolites in the bloodstream is diminished and it is at this stage that the clinical features described above will present.

[0010] In 1986, D'Amico et al. described the clinical manifestations and survival rates in 1155 patients with both alcoholic and viral associated cirrhosis (D'Amico supra). Of the 1155 patients, 435 (37%) had compensated disease although 70% were asymptomatic at the beginning of the study. The remaining 720 patients (63%) had decompensated liver disease with 78% presenting with a history of ascites, 31% with jaundice, 17% had bleeding and 16% had encephalopathy. Hepatocellular carcinoma was observed in six (0.5%) patients with compensated disease and in 30 (2.6%) patients with decompensated disease.

[0011] Over the course of six years, the patients with compensated cirrhosis developed clinical features of decompensated disease at a rate of 10% per year. In most cases, ascites was the first presentation of decompensation. In addition, hepatocellular carcinoma developed in 59 patients who initially presented with compensated disease by the end of the six-year study.

[0012] With respect to survival, the D'Amico study indicated that the five-year survival rate for all patients on the study was only 40%. The six-year survival rate for the patients who initially had compensated cirrhosis was 54%, while the six-year survival rate for patients who initially presented with decompensated disease was only 21%. There were no significant differences in the survival rates between the patients who had alcoholic cirrhosis and the patients with viral related cirrhosis. The major causes of death for the patients in the D'Amico study were liver failure in 49%; hepatocellular carcinoma in 22%; and, bleeding in 13% (D'Amico supra).

[0013] Chronic Hepatitis C is a slowly progressing inflammatory disease of the liver, mediated by a virus (HCV) that can lead to cirrhosis, liver failure and/or hepatocellular carcinoma over a period of 10 to 20 years. In the US, it is estimated that infection with HCV accounts for 50,000 new cases of acute hepatitis in the United States each year (NIH Consensus Development Conference Statement on Management of Hepatitis C March 1997). The prevalence of HCV in the United States is estimated at 1.8% and the CDC places the number of chronically infected Americans at approximately 4.5 million people. The CDC also estimates that up to 10,000 deaths per year are caused by chronic HCV infection. The prevalence of HCV in the United States is estimated at 1.8% and the CDC places the number of chronically infected Americans at approximately 4.5 million people. The CDC also estimates that up to 10,000 deaths per year are caused by chronic HCV infection.

[0014] Numerous well controlled clinical trials using interferon (IFN-alpha) in the treatment of chronic HCV infection have demonstrated that treatment three times a week results in lowering of serum ALT values in approximately 50% (range 40% to 70%) of patients by the end of 6 months of therapy (Davis et al., New England Journal of Medicine 1989; 321:1501-1506; Marcellin et al., Hepatology. 1991; 13:393-397; Tong et al., Hepatology 1997:26:747-754; Tong et al., Hepatology 1997 26(6): 1640-1645). However, following cessation of interferon treatment, approximately 50% of the responding patients relapsed, resulting in a “durable” response rate as assessed by normalization of serum ALT concentrations of approximately 20 to 25%.

[0015] In recent years, direct measurement of the HCV RNA has become possible through use of either the branched-DNA or Reverse Transcriptase Polymerase Chain Reaction (RT-PCR) analysis. In general, the RT-PCR methodology is more sensitive and leads to more accurate assessment of the clinical course (Tong et al., supra). Studies that have examined six months of type 1 interferon therapy using changes in HCV RNA values as a clinical endpoint have demonstrated that up to 35% of patients will have a loss of HCV RNA by the end of therapy (Marcellin et al., supra). However, as with the ALT endpoint, about 50% of the patients relapse six months following cessation of therapy resulting in a durable virologic response of only 12% (Marcellin et al., supra). Studies that have examined 48 weeks of therapy have demonstrated that the sustained virological response is up to 25% (NIH consensus statement: 1997). Thus, standard of care for treatment of chronic HCV infection with type 1 interferon is now 48 weeks of therapy using changes in HCV RNA concentrations as the primary assessment of efficacy (Hoofnagle et al., New England Journal of Medicine 1997; 336(5) 347-356).

[0016] Side effects resulting from treatment with type 1 interferons can be divided into four general categories, which include 1. Influenza-like symptoms; 2. Neuropsychiatric; 3. Laboratory abnormalities; and, 4. Miscellaneous (Dusheiko et al., Journal of Viral Hepatitis. 1994:1:3-5). Examples of influenza-like symptoms include; fatigue, fever; myalgia; malaise; appetite loss; tachycardia; rigors; headache and arthralgias. The influenza-like symptoms are usually short-lived and tend to abate after the first four weeks of dosing (Dushieko et al., supra). Neuropsychiatric side effects include: irritability, apathy; mood changes; insomnia; cognitive changes and depression. The most important of these neuropsychiatric side effects is depression and patients who have a history of depression should not be given type 1 interferon. Laboratory abnormalities include; reduction in myeloid cells including granulocytes, platelets and to a lesser extent red blood cells. These changes in blood cell counts rarely lead to any significant clinical sequellae (Dushieko et al., supra). In addition, increases in triglyceride concentrations and elevations in serum alanine and aspartate aminotransferase concentration have been observed. Finally, thyroid abnormalities have been reported. These thyroid abnormalities are usually reversible after cessation of interferon therapy and can be controlled with appropriate medication while on therapy. Miscellaneous side effects include nausea; diarrhea; abdominal and back pain; pruritus; alopecia; and rhinorrhea. In general, most side effects will abate after 4 to 8 weeks of therapy (Dushieko et al., supra).

[0017] Type 1 Interferon is a key constituent of many treatment programs for chronic HCV infection. Treatment with type 1 interferon induces a number of genes and results in an antiviral state within the cell. One of the genes induced is 2′,5′ oligoadenylate synthetase, an enzyme that synthesizes short 2′,5′ oligoadenylate (2-5A) molecules. Nascent 2-5A subsequently activates a latent RNase, RNase L, which in turn nonspecifically degrades viral RNA.

[0018] Chronic hepatitis B is caused by an enveloped virus, commonly known as the hepatitis B virus or HBV. HBV is transmitted via infected blood or other body fluids, especially saliva and semen, during delivery, sexual activity, or sharing of needles contaminated by infected blood. Individuals may be “carriers” and transmit the infection to others without ever having experienced symptoms of the disease. Persons at highest risk are those with multiple sex partners, those with a history of sexually transmitted diseases, parenteral drug users, infants born to infected mothers, “close” contacts or sexual partners of infected persons, and healthcare personnel or other service employees who have contact with blood. Transmission is also possible via tattooing, ear or body piercing, and acupuncture; the virus is also stable on razors, toothbrushes, baby bottles, eating utensils, and some hospital equipment such as respirators, scopes and instruments. There is no evidence that HBsAg positive food handlers pose a health risk in an occupational setting, nor should they be excluded from work. Hepatitis B has never been documented as being a food-borne disease. The average incubation period is 60 to 90 days, with a range of 45 to 180; the number of days appears to be related to the amount of virus to which the person was exposed. However, determining the length of incubation is difficult, since onset of symptoms is insidious. Approximately 50% of patients develop symptoms of acute hepatitis that last from 1 to 4 weeks. Two percent or less of these individuals develop fulminant hepatitis resulting in liver failure and death.

[0019] The determinants of severity include: (1) The size of the dose to which the person was exposed; (2) the person's age with younger patients experiencing a milder form of the disease; (3) the status of the immune system with those who are immunosuppressed experiencing milder cases; and (4) the presence or absence of co-infection with the Delta virus (hepatitis D), with more severe cases resulting from co-infection. In symptomatic cases, clinical signs include loss of appetite, nausea, vomiting, abdominal pain in the right upper quadrant, arthralgia, and tiredness/loss of energy. Jaundice is not experienced in all cases, however, jaundice is more likely to occur if the infection is due to transfusion or percutaneous serum transfer, and it is accompanied by mild pruritus in some patients. Bilirubin elevations are demonstrated in dark urine and clay-colored stools, and liver enlargement may occur accompanied by right upper-quadrant pain. The acute phase of the disease may be accompanied by severe depression, meningitis, Guillain-Barré syndrome, myelitis, encephalitis, agranulocytosis, and/or thrombocytopenia.

[0020] Hepatitis B is generally self-limiting and will resolve in approximately 6 months. Asymptomatic cases can be detected by serologic testing, since the presence of the virus leads to production of large amounts of HBsAg in the blood. This antigen is the first and most useful diagnostic marker for active infections. However, if HBsAg remains positive for 20 weeks or longer, the person is likely to remain positive indefinitely and is now a carrier. While only 10% of persons over age 6 who contract HBV become carriers, 90% of infants infected during the first year of life do so.

[0021] Hepatitis B virus (HBV) infects over 300 million people worldwide (Imperial, 1999, Gastroenterol. Hepatol., 14 (suppl), Si-5). In the United States, approximately 1.25 million individuals are chronic carriers of HBV as evidenced by the fact that they have measurable hepatitis B virus surface antigen HBsAg in their blood. The risk of becoming a chronic HBsAg carrier is dependent upon the mode of acquisition of infection as well as the age of the individual at the time of infection. For those individuals with high levels of viral replication, chronic active hepatitis with progression to cirrhosis, liver failure and hepatocellular carcinoma (HCC) is common, and liver transplantation is the only treatment option for patients with end-stage liver disease from HBV.

[0022] The natural progression of chronic HBV infection over a 10 to 20 year period leads to cirrhosis in 20-to-50% of patients and progression of HBV infection to hepatocellular carcinoma has been well documented. There have been no studies that have determined sub-populations that are most likely to progress to cirrhosis and/or hepatocellular carcinoma, thus all patients have equal risk of progression.

[0023] It is important to note that the survival for patients diagnosed with hepatocellular carcinoma is only 0.9 to 12.8 months from initial diagnosis (Takahashi et al., 1993, American Journal of Gastroenterology, 88, 240-243). Treatment of hepatocellular carcinoma with chemotherapeutic agents has not proven effective and only 10% of patients will benefit from surgery due to extensive tumor invasion of the liver (Trinchet et al., 1994, Presse Medicine, 23, 831-833). Given the aggressive nature of primary hepatocellular carcinoma, the only viable treatment alternative to surgery is liver transplantation (Pichlmayr et al., 1994, Hepatology., 20, 33S-40S).

[0024] Upon progression to cirrhosis, patients with chronic HCV and HBV infection present with clinical features, which are common to clinical cirrhosis regardless of the initial cause (D'Amico et al., 1986, Digestive Diseases and Sciences, 31, 468-475). These clinical features may include: bleeding esophageal varices, ascites, jaundice, and encephalopathy (Zakim D, Boyer T D. Hepatology a textbook of liver disease, Second Edition Volume 1. 1990 W.B. Saunders Company. Philadelphia). In the early stages of cirrhosis, patients are classified as compensated, meaning that although liver tissue damage has occurred, the patient's liver is still able to detoxify metabolites in the blood-stream. In addition, most patients with compensated liver disease are asymptomatic and the minority with symptoms report only minor symptoms such as dyspepsia and weakness. In the later stages of cirrhosis, patients are classified as decompensated meaning that their ability to detoxify metabolites in the bloodstream is diminished and it is at this stage that the clinical features described above will present.

[0025] In 1986, D'Amico et al. described the clinical manifestations and survival rates in 1155 patients with both alcoholic and viral associated cirrhosis (D'Amico supra). Of the 1155 patients, 435 (37%) had compensated disease although 70% were asymptomatic at the beginning of the study. The remaining 720 patients (63%) had decompensated liver disease with 78% presenting with a history of ascites, 31% with jaundice, 17% had bleeding and 16% had encephalopathy. Hepatocellular carcinoma was observed in six (0.5%) patients with compensated disease and in 30 (2.6%) patients with decompensated disease.

[0026] Over the course of six years, the patients with compensated cirrhosis developed clinical features of decompensated disease at a rate of 10% per year. In most cases, ascites was the first presentation of decompensation. In addition, hepatocellular carcinoma developed in 59 patients who initially presented with compensated disease by the end of the six-year study.

[0027] With respect to survival, the D'Amico study indicated that the five-year survival rate for all patients on the study was only 40%. The six-year survival rate for the patients who initially had compensated cirrhosis was 54% while the six-year survival rate for patients who initially presented with decompensated disease was only 21%. There were no significant differences in the survival rates between the patients who had alcoholic cirrhosis and the patients with viral related cirrhosis. The major causes of death for the patients in the D'Amico study were liver failure in 49%; hepatocellular carcinoma in 22%; and, bleeding in 13% (D'Amico supra).

[0028] Hepatitis B virus is a double-stranded circular DNA virus. It is a member of the Hepadnaviridae family. The virus consists of a central core that contains a core antigen (HBcAg) surrounded by an envelope containing a surface protein/surface antigen (HBsAg) and is 42 nm in diameter. It also contains an e antigen (HBeAg), which, along with HBcAg and HBsAg, is helpful in identifying this disease.

[0029] In HBV virions, the genome is found in an incomplete double-stranded form. HBV uses a reverse transcriptase to transcribe a positive-sense full length RNA version of its genome back into DNA. This reverse transcriptase also contains DNA polymerase activity and thus begins replicating the newly synthesized minus-sense DNA strand. However, it appears that the core protein encapsidates the reverse-transcriptase/polymerase before it completes replication.

[0030] From the free-floating form, the virus must first attach itself specifically to a host cell membrane. Viral attachment is one of the crucial steps that determines host and tissue specificity. However, currently there are no in vitro cell-lines that can be infected by HBV. There are some cells lines, such as HepG2, which can support viral replication only upon transient or stable transfection using HBV DNA.

[0031] After attachment, fusion of the viral envelope and host membrane must occur to allow the viral core proteins containing the genome and polymerase to enter the cell. Once inside, the genome is translocated to the nucleus where it is repaired and cyclized.

[0032] The complete closed circular DNA genome of HBV remains in the nucleus and gives rise to four transcripts. These transcripts initiate at unique sites but share the same 3′-ends. The 3.5-kb pregenomic RNA serves as a template for reverse transcription and also encodes the nucleocapsid protein and polymerase. A subclass of this transcript with a 5′-end extension codes for the precore protein that, after processing, is secreted as HBV e antigen. The 2.4-kb RNA encompasses the pre-S1 open reading frame (ORF) that encodes the large surface protein. The 2.1-kb RNA encompasses the pre-S2 and S ORFs that encode the middle and small surface proteins, respectively. The smallest transcript (˜0.8-kb) codes for the X protein, a transcriptional activator.

[0033] Multiplication of the HBV genome begins within the nucleus of an infected cell. RNA polymerase II transcribes the circular HBV DNA into greater-than-full length mRNA. Since the mRNA is longer than the actual complete circular DNA, redundant ends are formed. Once produced, the pregenomic RNA exits the nucleus and enters the cytoplasm.

[0034] The packaging of pregenomic RNA into core particles is triggered by the binding of the HBV polymerase to the 5′ epsilon stem-loop. RNA encapsidation is believed to occur as soon as binding occurs. The HBV polymerase also appears to require associated core protein in order to function. The HBV polymerase initiates reverse transcription from the 5′ epsilon stem-loop three to four base pairs at which point the polymerase and attached nascent DNA are transferred to the 3′ copy of the DR1 region. Once there, the (−)DNA is extended by the HBV polymerase while the RNA template is degraded by the HBV polymerase RNAse H activity. When the HBV polymerase reaches the 5′ end, a small stretch of RNA is left undigested by the RNAse H activity. This segment of RNA is comprised of a small sequence just upstream and including the DR1 region. The RNA oligomer is then translocated and annealed to the DR2 region at the 5′ end of the (−)DNA. It is used as a primer for the (+)DNA synthesis which is also generated by the HBV polymerase. It appears that the reverse transcription as well as plus strand synthesis may occur in the completed core particle.

[0035] Since the pregenomic RNA is required as a template for DNA synthesis, this RNA is an excellent target for nucleic acid based therapeutics. Nucleoside analogues that have been documented to modulate HBV replication target the reverse transcriptase activity needed to convert the pregenomic RNA into DNA. Nucleic acid decoy and aptamer modulation of HBV reverse transcriptase would be expected to result in a similar modulation of HBV replication.

[0036] Current therapeutic goals of treatment are three-fold: to eliminate infectivity and transmission of HBV to others, to arrest the progression of liver disease and improve the clinical prognosis, and to prevent the development of hepatocellular carcinoma (HCC).

[0037] Interferon alpha use is the most common therapy for HBV; however-, recently Lamivudine (3TC®) has been approved by the FDA. Interferon alpha (IFN-alpha) is one treatment for chronic hepatitis B. The standard duration of IFN-alpha therapy is 16 weeks, however, the optimal treatment length is still poorly defined. A complete response (HBV DNA negative HBeAg negative) occurs in approximately 25% of patients. Several factors have been identified that predict a favorable response to therapy including: High ALT, low HBV DNA, being female, and heterosexual orientation.

[0038] There is also a risk of reactivation of the hepatitis B virus even after a successful response, this occurs in around 5% of responders and normally occurs within 1 year.

[0039] Side effects resulting from treatment with type 1 interferons can be divided into four general categories including: Influenza-like symptoms, neuropsychiatric, laboratory abnormalities, and other miscellaneous side effects. Examples of influenza-like symptoms include, fatigue, fever, myalgia, malaise, appetite loss, tachycardia, rigors, headache and arthralgias. The influenza-like symptoms are usually short-lived and tend to abate after the first four weeks of dosing (Dusheiko et al., 1994, Journal of Viral Hepatitis, 1, 3-5). Neuropsychiatric side effects include irritability, apathy, mood changes, insomnia, cognitive changes, and depression. Laboratory abnormalities include the reduction of myeloid cells, including granulocytes, platelets and to a lesser extent, red blood cells. These changes in blood cell counts rarely lead to any significant clinical sequellae. In addition, increases in triglyceride concentrations and elevations in serum alanine and aspartate aminotransferase concentration have been observed. Finally, thyroid abnormalities have been reported. These thyroid abnormalities are usually reversible after cessation of interferon therapy and can be controlled with appropriate medication while on therapy. Miscellaneous side effects include nausea, diarrhea, abdominal and back pain, pruritus, alopecia, and rhinorrhea. In general, most side effects will abate after 4 to 8 weeks of therapy (Dushieko et al, supra).

[0040] Lamivudine (3TC®) is a nucleoside analogue, which is a very potent and specific inhibitor of HBV DNA synthesis. Lamivudine has recently been approved for the treatment of chronic Hepatitis B. Unlike treatment with interferon, treatment with 3TC® does not eliminate the HBV from the patient. Rather, viral replication is controlled and chronic administration results in improvements in liver histology in over 50% of patients. Phase III studies with 3TC®, showed that treatment for one year was associated with reduced liver inflammation and a delay in scarring of the liver. In addition, patients treated with Lamivudine (100 mg per day) had a 98 percent reduction in hepatitis B DNA and a significantly higher rate of seroconversion, suggesting disease improvements after completion of therapy. However, stopping of therapy resulted in a reactivation of HBV replication in most patients. In addition recent reports have documented 3TC® resistance in approximately 30% of patients.

[0041] Current therapies for treating HBV infection, including interferon and nucleoside analogues, are only partially effective. In addition, drug resistance to nucleoside analogues is now emerging, making treatment of chronic Hepatitis B more difficult. Thus, a need exists for effective treatment of this disease that utilizes antiviral modulators that work by mechanisms other than those currently utilized in the treatment of both acute and chronic hepatitis B infections.

[0042] Welch et al., Gene Therapy 1996 3(11): 994-1001 describe in vitro an in vivo studies with two vector expressed hairpin ribozymes targeted against hepatitis C virus.

[0043] Sakamoto et al., J. Clinical Investigation 1996 98(12): 2720-2728 describe intracellular cleavage of hepatitis C virus RNA and inhibition of viral protein translation by certain vector expressed hammerhead ribozymes.

[0044] Lieber et al., J. Virology 1996 70(12): 8782-8791 describe elimination of hepatitis C virus RNA in infected human hepatocytes by adenovirus-mediated expression of certain hammerhead ribozymes.

[0045] Ohkawa et al., 1997, J. Hepatology, 27; 78-84, describe in vitro cleavage of HCV RNA and inhibition of viral protein translation using certain in vitro transcribed hammerhead ribozymes.

[0046] Barber et al., International PCT Publication No. WO 97/32018, describe the use of an adenovirus vector to express certain anti-hepatitis C virus hairpin ribozymes.

[0047] Kay et al., International PCT Publication No. WO 96/18419, describe certain recombinant adenovirus vectors to express anti-HCV hammerhead ribozymes.

[0048] Yamada et al., Japanese Patent Application No. JP 07231784 describe a specific poly-(L)-lysine conjugated hammerhead ribozyme targeted against HCV.

[0049] Draper, U.S. Pat. Nos. 5,610,054 and 5,869,253, describes enzymatic nucleic acid molecules capable of inhibiting replication of HCV.

[0050] Macejak et al., 2000, Hepatology, 31, 769-776, describe enzymatic nucleic acid molecules capable of inhibiting replication of HCV.

[0051] Weifeng and Torrence, 1997, Nucleosides and Nucleotides, 16, 7-9, describe the synthesis of 2-5A antisense chimeras with various non-nucleoside components.

[0052] Torrence et al., U.S. Pat. No. 5,583,032 describe targeted cleavage of RNA using an antisense oligonulceotide linked to a 2′,5′-oligoadenylate activator of RNase L.

[0053] Suhadolnik and Pfleiderer, U.S. Pat. Nos. 5,863,905; 5,700,785; 5,643,889; 5,556,840; 5,550,111; 5,405,939; 5,188,897; 4,924,624; and 4,859,768 describe specific internucleotide phosphorothioate 2′,5′-oligoadenlyates and 2′,5′-oligoadenlyate conjugates.

[0054] Budowsky et al., U.S. Pat. No. 5,962,431 describe a method of treating papillomavirus using specific 2′,5′-oligoadenylates.

[0055] Torrence et al., International PCT publication No. WO 00/14219, describe specific peptide nucleic acid 2′,5′-oligoadenylate chimeric molecules.

[0056] Stinchcomb et al., U.S. Pat. No. 5,817,796, describe C-myb ribozymes having 2′-5′-Linked Adenylate Residues.

[0057] Draper, U.S. Pat. No. 6,017,756, describes the use of ribozymes for the inhibition of Hepatitis B Virus.

[0058] Passman et al., 2000, Biochem. Biophys. Res. Commun., 268(3), 728-733.; Gan et al., 1998, J. Med. Coll. PLA, 13(3), 157-159.; Li et al., 1999, Jiefangiun Yixue Zazhi, 24(2), 99-101.; Putlitz et al., 1999, J. Virol., 73(7), 5381-5387.; Kim et al., 1999, Biochem. Biophys. Res. Commun., 257(3), 759-765.; Xu et al., 1998, Bingdu Xuebao, 14(4), 365-369.; Welch et al., 1997, Gene Ther., 4(7), 736-743.; Goldenberg et al., 1997, International PCT publication No. WO 97/08309, Wands et al., 1997, J. of Gastroenterology and Hepatology, 12(suppl.), S354-S369.; Ruiz et al., 1997, BioTechniques, 22(2), 338-345.; Gan et al., 1996, J. Med. Coll. PLA, 11(3), 171-175.; Beck and Nassal, 1995, Nucleic Acids Res., 23(24), 4954-62.; Goldenberg, 1995, International PCT publication No. WO 95/22600.; Xu et al., 1993, Bingdu Xuebao, 9(4), 331-6.; Wang et al., 1993, Bingdu Xuebao, 9(3), 278-80, all describe ribozymes that are targeted to cleave a specific HBV target site.

[0059] Hunt et al., U.S. Pat. No. 5,859,226, describes specific non-naturally occurring oligonucleotide decoys intended to inhibit the expression of MHC-II genes through binding of the RF-X transcription factor, that can inhibit the expression of certain HBV and CMV viral proteins.

[0060] Kao et al., International PCT Publication No. WO 00/04141, describes linear single stranded nucleic acid molecules capable of specifically binding to viral polymerases and inhibiting the activity of the viral polymerase.

[0061] Lu, International PCT Publication No. WO 99/20641, describes specific triplex-forming oligonucleotides used in treating HBV infection.

### SUMMARY OF THE INVENTION

[0062] This invention relates to enzymatic nucleic acid molecules that can disrupt the function of RNA species of hepatitis B virus (HBV), hepatitis C virus (HCV) and/or those RNA species encoded by HBV or HCV. In particular, applicant provides enzymatic nucleic acid molecules capable of specifically cleaving HBV RNA or HCV RNA and describes the selection and function thereof. Such enzymatic nucleic acid molecules can be used to treat diseases and disorders associated with HBV and HCV infection.

[0063] In one embodiment, the invention features an enzymatic nucleic acid molecule that specifically cleaves RNA derived from hepatitis B virus (HBV), wherein the enzymatic nucleic acid molecule comprises sequence defined as Seq. ID No. 10887.

[0064] In another embodiment, the invention features a composition comprising an enzymatic nucleic acid molecule of the invention and a pharmaceutically acceptable carrier.

[0065] In another embodiment, the invention features a mammalian cell, for example a human cell, comprising an enzymatic nucleic acid molecule contemplated by the invention.

[0066] In one embodiment, the invention features a method for the treatment of cirrhosis, liver failure or hepatocellular carcinoma comprising administering to a patient an enzymatic nucleic acid molecule of the invention under conditions suitable for the treatment.

[0067] In another embodiment, the invention features a method for the treatment of a patient having a condition associated with HBV and/or HCV infection, comprising contacting cells of said patient with an enzymatic nucleic acid molecule of the invention.

[0068] In another embodiment, the invention features a method for the treatment of a patient having a condition associated with HBV and/or HCV infection, comprising contacting cells of said patient with an enzymatic nucleic acid molecule of the invention and further comprising the use of one or more drug therapies, for example, type I interferon or 3TC® (lamivudine), under conditions suitable for said treatment. In another embodiment, the other therapy is administered simultaneously with or separately from the enzymatic nucleic acid molecule.

[0069] In another embodiment, the invention features a method for inhibiting HBV and/or HCV replication in a mammalian cell comprising administering to the cell an enzymatic nucleic acid molecule of the invention under conditions suitable for the inhibition.

[0070] In yet another embodiment, the invention features a method of cleaving a separate HBV and/or HCV RNA comprising contacting an enzymatic nucleic acid molecule of the invention with the separate RNA under conditions suitable for the cleavage of the separate RNA.

[0071] In one embodiment, cleavage by an enzymatic nucleic acid molecule of the invention is carried out in the presence of a divalent cation, for example Mg2+.

[0072] In another embodiment, the enzymatic nucleic acid molecule of the invention is chemically synthesized.

[0073] In another embodiment, the type I interferon contemplated by the invention is interferon alpha, interferon beta, polyethylene glycol interferon, polyethylene glycol interferon alpha 2a, polyethylene glycol interferon alpha 2b, polyethylene glycol consensus interferon.

[0074] In one embodiment, the invention features a composition comprising type I interferon and an enzymatic nucleic acid molecule of the invention and a pharmaceutically acceptable carrier.

[0075] In another embodiment, the invention features a method of administering to a cell, for example a mammalian cell or human cell, an enzymatic nucleic acid molecule of the invention independently or in conjunction with other therapeutic compounds, such as type I interferon or 3TC® (lamivudine), comprising contacting the cell with the enzymatic nucleic acid molecule under conditions suitable for the administration.

[0076] In another embodiment, administration of an enzymatic nucleic acid molecule of the invention is in the presence of a delivery reagent, for example a lipid, cationic lipid, phospholipid, or liposome.

[0077] In another embodiment, the invention features novel nucleic acid-based techniques such as enzymatic nucleic acid molecules and antisense molecules and methods for their use to down regulate or inhibit the expression of HBV RNA and/or replication of HBV.

[0078] In another embodiment, the invention features novel nucleic acid-based techniques such as enzymatic nucleic acid molecules and antisense molecules and methods for their use to down regulate or inhibit the expression of HCV RNA and/or replication of HCV.

[0079] In one embodiment, the invention features the use of one or more of the enzymatic nucleic acid-based techniques to down-regulate or inhibit the expression of the genes encoding HBV and/or HCV viral proteins. Specifically, the invention features the use of enzymatic nucleic acid-based techniques to specifically down-regulate or inhibit the expression of the HBV and/or HCV viral genome.

[0080] In another embodiment, the invention features nucleic acid-based inhibitors (e.g., enzymatic nucleic acid molecules (ribozymes), antisense nucleic acids, triplex DNA, decoys, siRNA, aptamers, and antisense nucleic acids containing RNA cleaving chemical groups) and methods for their use to down regulate or inhibit the expression of RNA (e.g., HBV and/or HCV) capable of progression and/or maintenance of hepatitis, hepatocellular carcinoma, cirrhosis, and/or liver failure.

[0081] In one embodiment, nucleic acid molecules of the invention are used to treat HBV infected cells or an HBV infected patient wherein the HBV is resistant or the patient does not respond to treatment with 3TC® (Lamivudine), either alone or in combination with other therapies under conditions suitable for the treatment.

[0082] In yet another embodiment, the invention features the use of an enzymatic nucleic acid molecule, preferably in the hammerhead, NCH (Inozyme), G-cleaver, amberzyme, zinzyme, and/or DNAzyme motif, to inhibit the expression of HBV and/or HCV RNA.

[0083] The enzymatic nucleic acid molecules described herein exhibit a high degree of specificity for only the viral mRNA in infected cells. Nucleic acid molecules of the instant invention targeted to highly conserved sequence regions allow the treatment of many strains of human HBV and/or HCV with a single compound. No treatment presently exists which specifically attacks expression of the viral gene(s) that are responsible for transformation of hepatocytes by HBV and/or HCV.

[0084] The enzymatic nucleic acid-based modulators of HBV and HCV expression are useful for the prevention of the diseases and conditions including HBV and HCV infection, hepatitis, cancer, cirrhosis, liver failure, and any other diseases or conditions that are related to the levels of HBV and/or HCV in a cell or tissue.

[0085] Preferred target sites are genes required for viral replication, a non-limiting example includes genes for protein synthesis, such as the 5′ most 1500 nucleotides of the HBV pregenomic mRNAs. For sequence references, see Renbao et al., 1987, Sci. Sin., 30, 507. This region controls the translational expression of the core protein (C), X protein (X) and DNA polymerase (P) genes and plays a role in the replication of the viral DNA by serving as a template for reverse transcriptase. Disruption of this region in the RNA results in deficient protein synthesis as well as incomplete DNA synthesis (and inhibition of transcription from the defective genomes). Targeting sequences 5′ of the encapsidation site can result in the inclusion of the disrupted 3′ RNA within the core virion structure and targeting sequences 3′ of the encapsidation site can result in the reduction in protein expression from both the 3′ and 5′ fragments.

[0086] Alternative regions outside of the 5′ most 1500 nucleotides of the pregenomic mRNA also make suitable targets for enzymatic nucleic acid mediated inhibition of HBV replication. Such targets include the mRNA regions that encode the viral S gene. Selection of particular target regions will depend upon the secondary structure of the pregenomic mRNA. Targets in the minor mRNAs can also be used, especially when folding or accessibility assays in these other RNAs reveal additional target sequences that are unavailable in the pregenomic mRNA species.

[0087] A desirable target in the pregenomic RNA is a proposed bipartite stem-loop structure in the 3′-end of the pregenomic RNA which is believed to be critical for viral replication (Kidd and Kidd-Ljunggren, 1996. Nuc. Acid Res. 24:3295-3302). The 5′end of the HBV pregenomic RNA carries a cis-acting encapsidation signal, which has inverted repeat sequences that are thought to form a bipartite stem-loop structure. Due to a terminal redundancy in the pregenomic RNA, the putative stem-loop also occurs at the 3′-end. While it is the 5′ copy which functions in polymerase binding and encapsidation, reverse transcription actually begins from the 3′ stem-loop. To start reverse transcription, a 4 nt primer which is covalently attached to the polymerase is made, using a bulge in the 5′ encapsidation signal as template. This primer is then shifted, by an unknown mechanism, to the DR1 primer binding site in the 3′ stem-loop structure, and reverse transcription proceeds from that point. The 3′ stem-loop, and especially the DR1 primer binding site, appear to be highly effective targets for ribozyme intervention.

[0088] Sequences of the pregenomic RNA are shared by the mRNAs for surface, core, polymerase, and X proteins. Due to the overlapping nature of the HBV transcripts, all share a common 3′-end. Enzymatic nucleic acids targeting of this common 3-end will thus cleave the pregenomic RNA as well as all of the mRNAs for surface, core, polymerase and X proteins.

[0089] At least seven basic varieties of naturally-occurring enzymatic RNAs are known presently. Each can catalyze the hydrolysis of RNA phosphodiester bonds in trans (and thus can cleave other RNA molecules) under physiological conditions. Table I summarizes some of the characteristics of these enzymatic RNA molecules. In general, enzymatic nucleic acids act by first binding to a target RNA. Such binding occurs through the target binding portion of a enzymatic nucleic acid which is held in close proximity to an enzymatic portion of the molecule that acts to cleave the target RNA. Thus, the enzymatic nucleic acid first recognizes and then binds a target RNA through complementary base-pairing, and once bound to the correct site, acts enzymatically to cut the target RNA. Strategic cleavage of such a target RNA will destroy its ability to direct synthesis of an encoded protein. After an enzymatic nucleic acid has bound and cleaved its RNA target, it is released from that RNA to search for another target and can repeatedly bind and cleave new targets. Thus, a single enzymatic nucleic acid molecule is able to cleave many molecules of target RNA. In addition, the enzymatic nucleic acid is a highly specific inhibitor of gene expression, with the specificity of inhibition depending not only on the base-pairing mechanism of binding to the target RNA, but also on the mechanism of target RNA cleavage. Single mismatches, or base-substitutions, near the site of cleavage can completely eliminate catalytic activity of a an enzymatic nucleic acid molecule.

[0090] The enzymatic nucleic acid molecules that cleave the specified sites in HBV-specific RNAs represent a novel therapeutic approach to treat a variety of pathologic indications, including, HBV infection, hepatitis, hepatocellular carcinoma, tumorigenesis, cirrhosis, liver failure and other conditions related to the level of HBV.

[0091] In one of the preferred embodiments of the inventions described herein, the enzymatic nucleic acid molecule is formed in a hammerhead or hairpin motif, but can also be formed in the motif of a hepatitis delta virus, group I intron, group II intron or RNase P RNA (in association with an RNA guide sequence), Neurospora VS RNA, DNAzymes, NCH cleaving motifs, or G-cleavers. Examples of such hammerhead motifs are described by Dreyfus, supra, Rossi et al., 1992, AIDS Research and Human Retroviruses 8, 183. Examples of hairpin motifs are described by Hampel et al., EP0360257, Hampel and Tritz, 1989 Biochemistry 28, 4929, Feldstein et al., 1989, Gene 82, 53, Haseloff and Gerlach, 1989, Gene, 82, 43, Hampel et al., 1990 Nucleic Acids Res. 18, 299; and Chowrira & McSwiggen, U.S. Pat. No. 5,631,359. The hepatitis delta virus motif is described by Perrotta and Been, 1992 Biochemistry 31, 16. The RNase P motif is described by Guerrier-Takada et al., 1983 Cell 35, 849; Forster and Altman, 1990, Science 249, 783; and Li and Altman, 1996, Nucleic Acids Res. 24, 835. The Neurospora VS RNA ribozyme motif is described by Collins (Saville and Collins, 1990 Cell 61, 685-696; Saville and Collins, 1991 Proc. Natl. Acad. Sci. USA 88, 8826-8830; Collins and Olive, 1993 Biochemistry 32, 2795-2799; and Guo and Collins, 1995, EMBO. J. 14, 363). Group II introns are described by Griffin et al., 1995, Chem. Biol. 2, 761; Michels and Pyle, 1995, Biochemistry 34, 2965; and Pyle et al., International PCT Publication No. WO 96/22689. The Group I intron is described by Cech et al., U.S. Pat. No. 4,987,071. DNAzymes are described by Usman et al., International PCT Publication No. WO 95/11304; Chartrand et al., 1995, NAR 23, 4092; Breaker et al., 1995, Chem. Bio. 2, 655; and Santoro et al., 1997, PNAS 94, 4262. NCH cleaving motifs are described in Ludwig & Sproat, International PCT Publication No. WO 98/58058; and G-cleavers are described in Kore et al., 1998, Nucleic Acids Research 26, 4116-4120 and Eckstein et al., International PCT Publication No. WO 99/16871. Additional motifs include the Aptazyme (Breaker et al., WO 98/43993), Amberzyme (Class I motif; FIG. 3; Beigelman et al., International PCT publication No. WO 99/55857) and Zinzyme (Beigelman et al., International PCT publication No. WO 99/55857), all these references are incorporated by reference herein in their totalities, including drawings and can also be used in the present invention. These specific motifs are not limiting in the invention and those skilled in the art will recognize that all that is important in an enzymatic nucleic acid molecule of this invention is that it has a specific substrate binding site which is complementary to one or more of the target gene RNA regions, and that it have nucleotide sequences within or surrounding that substrate binding site which impart an RNA cleaving activity to the molecule (Cech et al., U.S. Pat. No. 4,987,071).

[0092] In preferred embodiments of the present invention, a nucleic acid molecule, e.g., an antisense molecule, a triplex DNA, or a ribozyme, is 13 to 100 nucleotides in length, e.g., in specific embodiments 35, 36, 37, or 38 nucleotides in length (e.g., for particular ribozymes or antisense). In particular embodiments, the nucleic acid molecule is 15-100, 17-100, 20-100, 21-100, 23-100, 25-100, 27-100, 30-100, 32-100, 35-100, 40-100, 50-100, 60-100, 70-100, or 80-100 nucleotides in length. Instead of 100 nucleotides being the upper limit on the length ranges specified above, the upper limit of the length range can be, for example, 30, 40, 50, 60, 70, or 80 nucleotides. Thus, for any of the length ranges, the length range for particular embodiments has lower limit as specified, with an upper limit as specified which is greater than the lower limit. For example, in a particular embodiment, the length range can be 35-50 nucleotides in length. All such ranges are expressly included. Also in particular embodiments, a nucleic acid molecule can have a length which is any of the lengths specified above, for example, 21 nucleotides in length.

[0093] Exemplary enzymatic nucleic acid molecules of the invention targeting HBV are shown in Tables V-XI. For example, enzymatic nucleic acid molecules of the invention are preferably between 15 and 50 nucleotides in length, more preferably between 25 and 40 nucleotides in length, e.g., 34, 36, or 38 nucleotides in length (for example see Jarvis et al., 1996, J. Biol. Chem., 271, 29107-29112). Exemplary DNAzymes of the invention are preferably between 15 and 40 nucleotides in length, more preferably between 25 and 35 nucleotides in length, e.g., 29, 30, 31, or 32 nucleotides in length (see for example Santoro et al., 1998, Biochemistry, 37, 13330-13342; Chartrand et al., 1995, Nucleic Acids Research, 23, 4092-4096). Exemplary antisense molecules of the invention are preferably between 15 and 75 nucleotides in length, more preferably between 20 and 35 nucleotides in length, e.g., 25, 26, 27, or 28 nucleotides in length (see for example Woolf et al., 1992, PNAS., 89, 7305-7309; Milner et al., 1997, Nature Biotechnology, 15, 537-541). Exemplary triplex forming oligonucleotide molecules of the invention are preferably between 10 and 40 nucleotides in length, more preferably between 12 and 25 nucleotides in length, e.g., 18, 19, 20, or 21 nucleotides in length (see for example Maher et al., 1990, Biochemistry, 29, 8820-8826; Strobel and Dervan, 1990, Science, 249, 73-75). Those skilled in the art will recognize that all that is required is for the nucleic acid molecule are of length and conformation sufficient and suitable for the nucleic acid molecule to catalyze a reaction contemplated herein. The length of the nucleic acid molecules of the instant invention are not limiting within the general limits stated.

[0094] In a preferred embodiment, the invention provides a method for producing a class of nucleic acid-based gene inhibiting agents which exhibit a high degree of specificity for the RNA of a desired target. For example, the enzymatic nucleic acid molecule is preferably targeted to a highly conserved sequence region of target RNAs encoding HBV proteins (specifically HBV RNA) such that specific treatment of a disease or condition can be provided with either one or several nucleic acid molecules of the invention. Such nucleic acid molecules can be delivered exogenously to specific tissue or cellular targets as required. Alternatively, the nucleic acid molecules (e.g., ribozymes and antisense) can be expressed from DNA and/or RNA vectors that are delivered to specific cells.

[0095] The enzymatic nucleic acid-based inhibitors of HBV expression are useful for the prevention of the diseases and conditions including HBV infection, hepatitis, cancer, cirrhosis, liver failure, and any other diseases or conditions that are related to the levels of HBV in a cell or tissue.

[0096] The nucleic acid-based inhibitors of the invention are added directly, or can be complexed with cationic lipids, packaged within liposomes, or otherwise delivered to target cells or tissues. The nucleic acid or nucleic acid complexes can be locally administered to relevant tissues ex vivo, or in vivo through injection, infusion pump or stent, with or without their incorporation in biopolymers. In preferred embodiments, the enzymatic nucleic acid HBV inhibitors comprise sequences, which are complementary to the substrate sequences in Tables IV to XI. Examples of such enzymatic nucleic acid molecules also are shown in Tables V to XI. Examples of such enzymatic nucleic acid molecules consist essentially of sequences defined in these tables.

[0097] In yet another embodiment, the invention features antisense nucleic acid molecules including sequences complementary to the HBV substrate sequences shown in Tables IV to XI. Such nucleic acid molecules can include sequences as shown for the binding arms of the enzymatic nucleic acid molecules in Tables V to XI. Similarly, triplex molecules can be provided targeted to the corresponding DNA target regions, and regions containing the DNA equivalent of a target sequence or a sequence complementary to the specified target (substrate) sequence. Typically, antisense molecules are complementary to a target sequence along a single contiguous sequence of the antisense molecule. However, in certain embodiments, an antisense molecule can bind to substrate such that the substrate molecule forms a loop, and/or an antisense molecule can bind such that the antisense molecule forms a loop. Thus, the antisense molecule can be complementary to two (or even more) non-contiguous substrate sequences or two (or even more) non-contiguous sequence portions of an antisense molecule can be complementary to a target sequence or both.

[0098] By “consists essentially of” is meant that the active nucleic acid molecule of the invention, for example, an enzymatic nucleic acid molecule, contains an enzymatic center or core equivalent to those in the examples, and binding arms able to bind RNA such that cleavage at the target site occurs. Other sequences can be present which do not interfere with such cleavage. Thus, a core region can, for example, include one or more loops, stem-loop structure, or linker which does not prevent enzymatic activity. Thus, the underlined regions in the sequences in Tables V and VI can be such a loop, stem-loop, nucleotide linker, and/or non-nucleotide linker and can be represented generally as sequence “X”. For example, a core sequence for a hammerhead enzymatic nucleic acid can comprise a conserved sequence, such as 5′-CUGAUGAG-3′ and 5′-CGAA-3′ connected by “X”, where X is 5′-GCCGUUAGGC-3′ (SEQ ID NO. 16201), or any other Stem II region known in the art, or a nucleotide and/or non-nucleotide linker. Similarly, for other nucleic acid molecules of the instant invention, such as Inozyme, G-cleaver, amberzyme, zinzyme, DNAzyme, antisense, 2-5A antisense, triplex forming nucleic acid, and decoy nucleic acids, other sequences or non-nucleotide linkers can be present that do not interfere with the function of the nucleic acid molecule.

[0099] In another aspect of the invention, enzymatic nucleic acids or antisense molecules that interact with target RNA molecules and inhibit HBV (specifically HBV RNA) activity are expressed from transcription units inserted into DNA or RNA vectors. The recombinant vectors are preferably DNA plasmids or viral vectors. Enzymatic nucleic acid or antisense expressing viral vectors can be constructed based on, but not limited to, adeno-associated virus, retrovirus, adenovirus, or alphavirus. Preferably, the recombinant vectors capable of expressing the enzymatic nucleic acids or antisense are delivered as described above, and persist in target cells. Alternatively, viral vectors can be used that provide for transient expression of enzymatic nucleic acids or antisense. Such vectors can be repeatedly administered as necessary. Once expressed, the enzymatic nucleic acids or antisense bind to the target RNA and inhibit its function or expression. Delivery of enzymatic nucleic acids or antisense expressing vectors can be systemic, such as by intravenous or intramuscular administration, by administration to target cells ex-planted from the patient followed by reintroduction into the patient, or by any other means that allow for introduction into the desired target cell. Antisense DNA can be expressed via the use of a single stranded DNA intracellular expression vector.

[0100] In another embodiment, the invention features nucleic acid-based inhibitors (e.g., enzymatic nucleic acid molecules (ribozymes), antisense nucleic acids, triplex DNA, decoys, aptamers, siRNA, antisense nucleic acids containing RNA cleaving chemical groups) and methods for their use to down regulate or inhibit the expression of RNA (e.g., HBV) capable of progression and/or maintenance of liver disease and failure.

[0101] In another embodiment, the invention features nucleic acid-based techniques (e.g., enzymatic nucleic acid molecules (ribozymes), antisense nucleic acids, triplex DNA, decoys, aptamers, siRNA, antisense nucleic acids containing RNA cleaving chemical groups) and methods for their use to down regulate or inhibit the expression of HBV RNA expression.

[0102] In other embodiments, the invention features a method for the analysis of HBV proteins. This method is useful in determining the efficacy of HBV inhibitors. Specifically, the instant invention features an assay for the analysis of HBsAg proteins and secreted alkaline phosphatase (SEAP) control proteins to determine the efficacy of agents used to modulate HBV expression.

[0103] The method consists of coating a micro-titer plate with an antibody such as anti-HBsAg Mab (for example, Biostride B88-95-31ad,ay) at 0.1 to 10 μg/ml in a buffer (for example, carbonate buffer, such as Na₂CO₃ 15 mM, NaHCO₃ 35 mM, pH 9.5) at 4° C. overnight. The microtiter wells are then washed with PBST or the equivalent thereof, (for example, PBS, 0.05% Tween 20) and blocked for 0.1-24 hr at 37° C. with PBST, 1% BSA or the equivalent thereof. Following washing as above, the wells are dried (for example, at 37° C. for 30 min). Biotinylated goat anti-HBsAg or an equivalent antibody (for example, Accurate YVS1807) is diluted (for example at 1:1000) in PBST and incubated in the wells (for example, 1 hr. at 37° C.). The wells are washed with PBST (for example, 4×). A conjugate, (for example, Streptavidin/Alkaline Phosphatase Conjugate, Pierce 21324) is diluted to 10-10,000 ng/ml in PBST, and incubated in the wells (for example, 1 hr. at 37° C.). After washing as above, a substrate (for example, p-nitrophenyl phosphate substrate, Pierce 37620) is added to the wells, which are then incubated (for example, 1 hr. at 37° C.). The optical density is then determined (for example, at 405 nm). SEAP levels are then assayed, for example, using the Great EscAPe® Detection Kit (Clontech K2041-1), as per the manufacturers instructions. In the above example, incubation times and reagent concentrations can be varied to achieve optimum results, a non-limiting example is described in Example 6.

[0104] Comparison of this HBsAg ELISA method to a commercially available assay from World Diagnostics, Inc. 15271 NW 60^{th} Ave, #201, Miami Lakes, Fla. 33014 (305) 827-3304 (Cat. No. EL10018) demonstrates an increase in sensitivity (signal:noise) of 3-20 fold.

[0105] This invention also relates to nucleic acid molecules directed to disrupt the function of HBV reverse transcriptase. In addition, the invention relates to nucleic acid molecules directed to disrupt the function of the Enhancer I core region of the HBV genomic DNA. In particular, the present invention describes the selection and function of nucleic acid molecules, such as decoys and aptamers, capable of specifically binding to the HBV reverse transcriptase (pol) primer and modulating reverse transcription of the HBV pregenomic RNA. In another embodiment, the present invention relates to nucleic acid molecules, such as decoys, antisense and aptamers, capable of specifically binding to the HBV reverse transcriptase (pol) and modulating reverse transcription of the HBV pregenomic RNA. In yet another embodiment, the present invention relates to nucleic acid molecules capable of specifically binding to the HBV Enhancer I core region and modulating transcription of the HBV genomic DNA. The invention further relates to allosteric enzymatic nucleic acid molecules or “allozymes” that are used to modulate HBV gene expression. Such allozymes are active in the presence of HBV-derived nucleic acids, peptides, and/or proteins such as HBV reverse transcriptase and/or a HBV reverse transcriptase primer sequence, thereby allowing the allozyme to selectively cleave a sequence of HBV DNA or RNA. Allozymes of the invention are also designed to be active in the presence of HBV Enhancer I sequences and/or mutant HBV Enhancer I sequences, thereby allowing the allozyme to selectively cleave a sequence of HBV DNA or RNA. These nucleic acid molecules can be used to treat diseases and disorders associated with HBV infection.

[0106] In one embodiment, the invention features a nucleic acid decoy molecule that specifically binds the hepatitis B virus (HBV) reverse transcriptase primer sequence. In another embodiment, the invention features a nucleic acid decoy molecule that specifically binds the hepatitis B virus (HBV) reverse transcriptase. In yet another embodiment, the invention features a nucleic acid decoy molecule that specifically binds to the HBV Enhancer I core sequence.

[0107] In one embodiment, the invention features a nucleic acid aptamer that specifically binds the hepatitis B virus (HBV) reverse transcriptase primer. In another embodiment, the invention features a nucleic acid aptamer that specifically binds the hepatitis B virus (HBV) reverse transcriptase. In yet another embodiment, the invention features a nucleic acid aptamer molecule that specifically binds to the HBV Enhancer I core sequence.

[0108] In one embodiment, the invention features an allozyme that specifically binds the hepatitis B virus (HBV) reverse transcriptase primer. In another embodiment, the invention features an allozyme that specifically binds the hepatitis B virus (HBV) reverse transcriptase. In yet another embodiment, the invention features an allozyme that specifically binds to the HBV Enhancer I core sequence.

[0109] In yet another embodiment, the invention features a nucleic acid molecule, for example a triplex forming nucleic acid molecule or antisense nucleic acid molecule, that binds the hepatitis B virus (HBV) reverse transcriptase primer. In another embodiment, the invention features a triplex forming nucleic acid molecule or antisense nucleic acid molecule that specifically binds the hepatitis B virus (HBV) reverse transcriptase. In yet another embodiment, the invention features a triplex forming nucleic acid molecule or antisense nucleic acid molecule that specifically binds to the HBV Enhancer I core sequence.

[0110] In another embodiment, a nucleic acid molecule of the invention binds to Hepatocyte Nuclear Factor 3 (HNF3) and/or Hepatocyte Nuclear Factor 4 (HNF4) binding sequence within the HBV Enhancer I region of HBV genomic DNA, for example the plus strand and/or minus strand DNA of the Enhancer I region, and blocks the binding of HNF3 and/or HNF4 to the Enhancer 1 region.

[0111] In another embodiment, the nucleic acid molecule of the invention comprises a sequence having (UUCA)ₙ domain, where n is an integer from 1-10. In another embodiment, the nucleic acid molecules of the invention comprise the sequence of SEQ. ID NOs: 11216-11342.

[0112] In another embodiment, the invention features a composition comprising a nucleic acid molecule of the invention and a pharmaceutically acceptable carrier. In another embodiment, the invention features a mammalian cell, for example a human cell, including a nucleic acid molecule contemplated by the invention.

[0113] In one embodiment, the invention features a method for treatment of HBV infection, cirrhosis, liver failure, or hepatocellular carcinoma, comprising administering to a patient a nucleic acid molecule of the invention under conditions suitable for the treatment.

[0114] In another embodiment, the invention features a method for the treatment of a patient having a condition associated with HBV infection comprising contacting cells of said patient with a nucleic acid molecule of the invention under conditions suitable for such treatment. In another embodiment, the invention features a method for the treatment of a patient having a condition associated with HBV infection comprising contacting cells of said patient with a nucleic acid molecule of the invention, and further comprising the use of one or more drug therapies, for example type I interferon or 3TC® (lamivudine), under conditions suitable for said treatment. In another embodiment, the other therapy is administered simultaneously with or separately from the nucleic acid molecule.

[0115] In another embodiment, the invention features a method for modulating HBV replication in a mammalian cell comprising administering to the cell a nucleic acid molecule of the invention under conditions suitable for the modulation.

[0116] In yet another embodiment, the invention features a method of modulating HBV reverse transcriptase activity comprising contacting a nucleic acid molecule of the invention, for example a decoy or aptamer, with HBV reverse transcriptase under conditions suitable for the modulating of the HBV reverse transcriptase activity.

[0117] In another embodiment, the invention features a method of modulating HBV transcription comprising contacting a nucleic molecule of the invention with a HBV Enhancer I sequence under conditions suitable for the modulation of HBV transcription.

[0118] In one embodiment, a nucleic acid molecule of the invention, for example a decoy or aptamer, is chemically synthesized. In another embodiment, the nucleic acid molecule of the invention comprises at least one nucleic acid sugar modification. In yet another embodiment, the nucleic acid molecule of the invention comprises at least one nucleic acid base modification. In another embodiment, the nucleic acid molecule of the invention comprises at least one nucleic acid backbone modification.

[0119] In another embodiment, the nucleic acid molecule of the invention comprises at least one 2′-O-alkyl, 2′-alkyl, 2′-alkoxylalkyl, 2′-alkylthioalkyl, 2′-amino, 2′-O-amino, or 2′-halo modification and/or any combination thereof with or without 2′-deoxy and/or 2′-ribo nucleotides. In yet another embodiment, the nucleic acid molecule of the invention comprises all 2′-O-alkyl nucleotides, for example, all 2′-O-allyl nucleotides.

[0120] In one embodiment, the nucleic acid molecule of the invention comprises a 5′-cap, 3′-cap, or 5′-3′ cap structure, for example an abasic or inverted abasic moiety.

[0121] In another embodiment, the nucleic acid molecule of the invention is a linear nucleic acid molecule. In another embodiment, the nucleic acid molecule of the invention is a linear nucleic acid molecule that can optionally form a hairpin, loop, stem-loop, or other secondary structure. In yet another embodiment, the nucleic acid molecule of the invention is a circular nucleic acid molecule.

[0122] In one embodiment, the nucleic acid molecule of the invention is a single stranded oligonucleotide. In another embodiment, the nucleic acid molecule of the invention is a double-stranded oligonucleotide.

[0123] In one embodiment, the nucleic acid molecule of the invention comprises an oligonucleotide having between about 3 and about 100 nucleotides. In another embodiment, the nucleic acid molecule of the invention comprises an oligonucleotide having between about 3 and about 24 nucleotides. In another embodiment, the nucleic acid molecule of the invention comprises an oligonucleotide having between about 4 and about 16 nucleotides.

[0124] The nucleic acid decoy molecules and/or aptamers that bind to a reverse transcriptase and/or reverse transcriptase primer and therefore inactivate the reverse transcriptase, represent a novel therapeutic approach to treat a variety of pathologic indications, including, viral infection such as HBV infection, hepatitis, hepatocellular carcinoma, tumorigenesis, cirrhosis, liver failure and others.

[0125] The nucleic acid molecules that bind to a HBV Enhancer I sequence and therefore inactivate HBV transcription, represent a novel therapeutic approach to treat a variety of pathologic indications, including viral infection such as HBV infection, hepatitis, hepatocellular carcinoma, tumorigenesis, cirrhosis, liver failure and others conditions associated with the level of HBV.

[0126] In one embodiment of the present invention, a decoy nucleic acid molecule of the invention is 4 to 50 nucleotides in length, in specific embodiments about 4, 5, 6, 7, 8, 9, 10, 11, 12, 13, 14, 15, or 16 nucleotides in length. In another embodiment, a non-decoy nucleic acid molecule, e.g., an antisense molecule, a triplex DNA, or a ribozyme, is 13 to 100 nucleotides in length, e.g., in specific embodiments 35, 36, 37, or 38 nucleotides in length (e.g., for particular ribozymes or antisense). In particular embodiments, the nucleic acid molecule is 15-100, 17-100, 20-100, 21-100, 23-100, 25-100, 27-100, 30-100, 32-100, 35-100, 40-100, 50-100, 60-100, 70-100, or 80-100 nucleotides in length. Instead of 100 nucleotides being the upper limit on the length ranges specified above, the upper limit of the length range can be, for example, 30, 40, 50, 60, 70, or 80 nucleotides. Thus, for any of the length ranges, the length range for particular embodiments has lower limit as specified, with an upper limit as specified which is greater than the lower limit. For example, in a particular embodiment, the length range can be 35-50 nucleotides in length. All such ranges are expressly included. Also in particular embodiments, a nucleic acid molecule can have a length which is any of the lengths specified above, for example, 21 nucleotides in length.

[0127] Exemplary nucleic acid decoy molecules of the invention are shown in Table XIV. Exemplary synthetic nucleic acid molecules of the invention are shown in Table XV. For example, decoy molecules of the invention are between 4 and 40 nucleotides in length. Exemplary decoys of the invention are 4, 8, 12, or 16 nucleotides in length. In an additional example, enzymatic nucleic acid molecules of the invention are preferably between 15 and 50 nucleotides in length, more preferably between 25 and 40 nucleotides in length, e.g., 34, 36, or 38 nucleotides in length (for example see Jarvis et al., 1996, J. Biol. Chem., 271, 29107-29112). Exemplary DNAzymes of the invention are preferably between 15 and 40 nucleotides in length, more preferably between 25 and 35 nucleotides in length, e.g., 29, 30, 31, or 32 nucleotides in length (see for example Santoro et al., 1998, Biochemistry, 37, 13330-13342; Chartrand et al., 1995, Nucleic Acids Research, 23, 4092-4096). Exemplary antisense molecules of the invention are preferably between 15 and 75 nucleotides in length, more preferably between 20 and 35 nucleotides in length, e.g., 25, 26, 27, or 28 nucleotides in length (see for example Woolf et al., 1992, PNAS., 89, 7305-7309; Milner et al., 1997, Nature Biotechnology, 15, 537-541). Exemplary triplex forming oligonucleotide molecules of the invention are preferably between 10 and 40 nucleotides in length, more preferably between 12 and 25 nucleotides in length, e.g., 18, 19, 20, or 21 nucleotides in length (see for example Maher et al., 1990, Biochemistry, 29, 8820-8826; Strobel and Dervan, 1990, Science, 249, 73-75). Those skilled in the art will recognize that all that is required is that the nucleic acid molecule is of length and conformation sufficient and suitable for the nucleic acid molecule to catalyze a reaction contemplated herein. The length of the nucleic acid molecules of the instant invention are not limiting within the general limits stated.

[0128] In one embodiment, the invention provides a method for producing a class of nucleic acid-based gene modulating agents, which exhibit a high degree of specificity for a viral reverse transcriptase such as HBV reverse transcriptase or reverse transcriptase primer such as a HBV reverse transcriptase primer. For example, the nucleic acid molecule is preferably targeted to a highly conserved nucleic acid binding region of the viral reverse transcriptase such that specific treatment of a disease or condition can be provided with either one or several nucleic acid molecules of the invention. Such nucleic acid molecules can be delivered exogenously to specific tissue or cellular targets as required. Alternatively, the nucleic acid molecules can be expressed from DNA and/or RNA vectors that are delivered to specific cells.

[0129] In another embodiment, the invention provides a method for producing a class of nucleic acid-based gene modulating agents which exhibit a high degree of specificity for a viral enhancer regions such as the HBV Enhancer I core sequence. For example, the nucleic acid molecule is preferably targeted to a highly conserved transcription factor-binding region of the viral Enhancer I sequence such that specific treatment of a disease or condition can be provided with either one or several nucleic acid molecules of the invention. Such nucleic acid molecules can be delivered exogenously to specific tissue or cellular targets as required. Alternatively, the nucleic acid molecules can be expressed from DNA and/or RNA vectors that are delivered to specific cells.

[0130] In a another embodiment the invention provides a method for producing a class of enzymatic cleaving agents which exhibit a high degree of specificity for the RNA of a desired target. The enzymatic nucleic acid molecule, nuclease activating compound or chimera is preferably targeted to a highly conserved sequence region of a target mRNAs encoding HCV or HBV proteins such that specific treatment of a disease or condition can be provided with either one or several enzymatic nucleic acids. Such nucleic acid molecules can be delivered exogenously to specific cells as required. Alternatively, the enzymatic nucleic acid molecules can be expressed from DNA/RNA vectors that are delivered to specific cells. DNAzymes can be synthesized chemically or expressed endogenously in vivo, by means of a single stranded DNA vector or equivalent thereof.

[0131] In another embodiment, the nucleic acid molecule of the invention binds irreversibly to the HBV reverse transcriptase target, for example by covalent attachment of the nucleic molecule to the reverse transcriptase primer sequence. The covalent attachment can be accomplished by introducing chemical modifications into the nucleic acid molecule's (for example, decoy or aptamer) sequence that are capable of forming covalent bonds to the reverse transcriptase primer sequence.

[0132] In another embodiment, the nucleic acid molecule of the invention binds irreversibly to the HBV Enhancer I sequence target, for example, by covalent attachment of the nucleic acid molecule to the HBV Enhancer I sequence. The covalent attachment can be accomplished by introducing chemical modifications into the nucleic acid molecule's sequence that are capable of forming covalent bonds to the reverse transcriptase primer sequence.

[0133] In another embodiment, the type I interferon contemplated by the invention is interferon alpha, interferon beta, consensus interferon, polyethylene glycol interferon, polyethylene glycol interferon alpha 2a, polyethylene glycol interferon alpha 2b, polyethylene glycol consensus interferon.

[0134] In one embodiment, the invention features a composition comprising type I interferon and a nucleic acid molecule of the invention and a pharmaceutically acceptable carrier.

[0135] In another embodiment, the invention features a method of administering to a cell, for example a mammalian cell or human cell, a nucleic acid molecule of the invention independently or in conjunction with other therapeutic compounds, such as type I interferon or 3TC® (lamivudine), comprising contacting the cell with the nucleic acid molecule under conditions suitable for the administration.

[0136] In yet another embodiment, the invention features a method of administering to a cell, for example a mammalian cell or human cell, a nucleic acid molecule of the invention independently or in conjunction with other therapeutic compounds such as enzymatic nucleic acid molecules, antisense molecules, triplex forming oligonucleotides, 2,5-A chimeras, and/or RNAi, comprising contacting the cell with the nucleic acid molecule of the invention under conditions suitable for the administration.

[0137] In another embodiment, administration of a nucleic acid molecule of the invention is administered to a cell or patient in the presence of a delivery reagent, for example a lipid, cationic lipid, phospholipid, or liposome.

[0138] In one embodiment, the invention features novel nucleic acid-based techniques such as nucleic acid decoy molecules and/or aptamers, used alone or in combination with enzymatic nucleic acid molecules, antisense molecules, and/or RNAi, and methods for use to down regulate or modulate the expression of HBV RNA and/or replication of HBV.

[0139] In another embodiment, the invention features the use of one or more of the nucleic acid-based techniques to modulate the expression of the genes encoding HBV viral proteins. Specifically, the invention features the use of nucleic acid-based techniques to specifically modulate the expression of the HBV viral genome.

[0140] In another embodiment, the invention features the use of one or more of the nucleic acid-based techniques to modulate the activity, expression, or level of cellular proteins required for HBV replication. For example, the invention features the use of nucleic acid-based techniques to specifically modulate the activity of cellular proteins required for HBV replication.

[0141] In another embodiment, the invention features nucleic acid-based modulators (e.g., nucleic acid decoy molecules, aptamers, enzymatic nucleic acid molecules (ribozymes), antisense nucleic acids, triplex DNA, antisense nucleic acids containing RNA cleaving chemical groups) and methods for their use to down regulate or modulate reverse transcriptase activity and/or the expression of RNA (e.g., HBV) capable of progression and/or maintenance of HBV infection, hepatocellular carcinoma, liver disease and failure.

[0142] In another embodiment, the invention features nucleic acid-based techniques (e.g., nucleic acid decoy molecules, aptamers, enzymatic nuleic acid molecules (ribozymes), antisense nucleic acid molecules, triplex DNA, antisense nucleic acids containing RNA cleaving chemical groups) and methods for their use to down regulate or modulate reverse transcriptase activity and/or the expression of HBV RNA.

[0143] In another embodiment, the invention features nucleic acid-based modulators (e.g., nucleic acid decoy molecules, aptamers, enzymatic nucleic acid molecules (ribozymes), antisense nucleic acids, triplex DNA, siRNA, dsRNA, antisense nucleic acids containing RNA cleaving chemical groups) and methods for their use to down regulate or modulate Enhancer I mediated transcription activity and/or the expression of DNA (e.g., HBV) capable of progression and/or maintenance of HBV infection, hepatocellular carcinoma, liver disease and failure.

[0144] In another embodiment, the invention features nucleic acid-based techniques (e.g., nucleic acid decoy molecules, aptamers, enzymatic nucleic acid molecules, antisense nucleic acid molecules, triplex DNA, siRNA, antisense nucleic acids containing DNA cleaving chemical groups) and methods for their use to down regulate or modulate Enhancer I mediated transcription activity and/or the expression of HBV DNA.

[0145] In another embodiment, the invention features a nucleic acid sensor molecule having an enzymatic nucleic acid domain and a sensor domain that interacts with an HBV peptide, protein, or polynucleotide sequence, for example, HBV reverse transcriptase, HBV reverse transcriptase primer, or the Enhancer I element of the HBV pregenomic RNA, wherein such interaction results in modulation of the activity of the enzymatic nucleic acid domain of the nucleic acid sensor molecule. In another embodiment, the invention features HBV-specific nucleic acid sensor molecules or allozymes, and methods for their use to down regulate or modulate the expression of HBV RNA capable of progression and/or maintenance of hepatitis, hepatocellular carcinoma, cirrhosis, and/or liver failure. In yet another embodiment, the enzymatic nucleic acid domain of a nucleic acid sensor molecule of the invention is a Hammerhead, Inozyme, G-cleaver, DNAzyme, Zinzyme, Amberzyme, or Hairpin enzymatic nucleic acid molecule.

[0146] In one embodiment, nucleic acid molecules of the invention are used to treat HBV-infected cells or a HBV-infected patient wherein the HBV is resistant or the patient does not respond to treatment with 3TC® (Lamivudine), either alone or in combination with other therapies under conditions suitable for the treatment.

[0147] In another embodiment, nucleic acid molecules of the invention are used to treat HBV-infected cells or a HBV-infected patient, wherein the HBV is resistant or the patient does not respond to treatment with Interferon, for example Infergen®, either alone or in combination with other therapies under conditions suitable for the treatment.

[0148] The invention also relates to in vitro and in vivo systems, including, e.g., mammalian systems for screening inhibitors of HBV. In one embodiment, the invention features a mouse, for example a male or female mouse, implanted with HepG2.2.15 cells, wherein the mouse is susceptible to HBV infection and capable of sustaining HBV DNA expression. One embodiment of the invention provides a mouse implanted with HepG2.2.15 cells, wherein said mouse sustains the propagation of HEPG2.2.15 cells and HBV production.

[0149] In another embodiment, a mouse of the invention has been infected with HBV for at least one week to at least eight weeks, including, for example at least 4 weeks.

[0150] In yet another embodiment, a mouse of the invention, for example a male or female mouse, is an immunocompromised mouse, for example a nu/nu mouse or a scid/scid mouse.

[0151] In one embodiment, the invention features a method of producing a mouse of the invention, comprising injecting, for example by subcutaneous injection, HepG2.2.15 (Sells, et al, 1987, Proc Natl Acad Sci USA., 84, 1005-1009) cells into the mouse under conditions suitable for the propagation of HepG2.2.15 cells in said mouse. HepG2.2.15 cells can be suspended in, for example, Delbecco's PBS solution including calcium and magnesium. In another embodiment, HepG2.2.15 cells are selected for antibiotic resistance and are then introduced into the mouse under conditions suitable for the propagation of HepG2.2.15 cells in said mouse. A non-limiting example of antibiotic resistant HepG2.2.15 cells include G418 antibiotic resistant HepG2.2.15 cells.

[0152] In another embodiment, the invention features a method of screening a compound for therapeutic activity against HBV, comprising administering the compound to a mouse of the invention and monitoring the the levels of HBV produced (e.g. by assaying for HBV DNA levels) in the mouse.

[0153] In one embodiment, a therapeutic compound or therapy contemplated by the invention is a lipid, steroid, peptide, protein, antibody, monoclonal antibody, humanized monoclonal antibody, small molecule, and/or isomers and analogs thereof, and/or a cell.

[0154] In one embodiment, a therapeutic compound or therapy contemplated by the invention is a nucleic acid molecule, for example a nucleic acid molecule, such as an enzymatic nucleic acid molecule, antisense nucleic acid molecule, allozyme, peptide nucleic acid, decoy, triplex oligonucleotide, dsRNA, ssRNA, RNAi, siRNA, aptamer, or 2,5-A chimera used alone or in combination with another therapy, for example antiviral therapy. Antiviral therapy can be, for example, treatment with 3TC® (Lamivudine) or interferon. Interferon can include, for example, consensus interferon or type I interferon. Type I interferon can include interferon alpha, interferon beta, consensus interferon, polyethylene glycol interferon, polyethylene glycol interferon alpha 2a, polyethylene glycol interferon alpha 2b, or polyethylene glycol consensus interferon.

[0155] In one embodiment, the invention features a non-human mammal implanted with HepG2.2.15 cells, wherein the non-human mammal is susceptible to HBV infection and capable of sustaining HBV DNA expression in the implanted HepG2.2.15 cells.

[0156] In another embodiment, a non-human mammal of the invention, for example a male or female non-human mammal, has been infected with HBV for at least one week to at least eight weeks, including for example at least four weeks.

[0157] In yet another embodiment, a non-human mammal of the invention is an immunocompromised mammal, for example a nu/nu mammal or a scid/scid mammal.

[0158] In one embodiment, the invention features a method of producing a non-human mammal comprising HepG2.2.15 cells comprising injecting, for example by subcutaneous injection, HepG2.2.15 cells into the non-human mammal under conditions suitable for the propagation of HepG2.2.15 cells in said non-human mammal.

[0159] In another embodiment, the invention features a method of screening a compound for therapeutic activity against HBV comprising administering the compound to a non-human mammal of the invention and monitoring the levels of HBV produced (e.g. by assaying for HBV DNA levels) in the non-human mammals.

[0160] In one embodiment, a therapeutic compound or therapy contemplated by the invention is a nucleic acid molecule, for example an enzymatic nucleic acid molecule, allozyme, antisense nucleic acid molecule, decoy, triplex oligonucleotide, dsRNA, ssRNA, RNAi, siRNA, or 2,5-A chimera used alone or in combination with another therapy, for example antiviral therapy.

[0161] Methods and chimeric immunocompromised heterologous non-human mammalian hosts, particularly mouse hosts, are provided for the expression of hepatitis B virus (“HBV”). In one embodiment, the chimeric hosts have transplanted viable, HepG2.2.15 cells in an immunocompromised host.

[0162] The non-human mammals contemplated by the invention are immunocompromised in normally inheriting the desired immune incapacity, or the desired immune incapacity can be created. For example, hosts with severe combined immunodeficiency, known as scid/scid hosts, are available. Rodentia, particularly mice, and equine, particularly horses, are presently available as scid/scid hosts, for example scid/scid mice and scid/scid rats. The scid/scid hosts lack functioning lymphocyte types, particularly B-cells and some T-cell types. In the scid/scid mouse hosts, the genetic defect appears to be a non-functioning recombinase, as the germline DNA is not rearranged to produce functioning surface immunoglobulin and T-cell receptors.

[0163] Any immunodeficient non-human mammals, e.g. mouse, can be used to generate the animal models described herein. The term “immunodeficient,” as used herein, refers to a genetic alteration that impairs the animal's ability to mount an effective immune response. In this regard, an “effective immune response” is one which is capable of destroying invading pathogens such as (but not limited to) viruses, bacteria, parasites, malignant cells, and/or a xenogeneic or allogeneic transplant. In one embodiment, the immunodeficient mouse is a severe immunodeficient (SCID) mouse, which lacks recombinase activity that is necessary for the generation of immunoglobulin and functional T cell antigen receptors, and thus does not produce functional B and T lymphocytes. In another embodiment, the immunodeficient mouse is a nude mouse, which contains a genetic defect that results in the absence of a functional thymus, leading to T-cell and B-cell deficiencies. However, mice containing other immunodeficiencies (such as rag-1 or rag-2 knockouts, as described in Chen et al., 1994, Curr. Opin. Immunol, 6, 313-319 and Guidas et al., 1995, J. Exp. Med., 181, 1187-1195, or beige-nude mice, which also lack natural killer cells, as described in Kollmann et al., 1993, J. Exp. Med., 177, 821-832) can also be employed.

[0164] The introduction of HepG2.2.15 cells occurs with a host at an age less than about 25% of its normal lifespan, usually to 20% of the normal lifespan with mice, and the age will generally be of an age of about 3 to 10 weeks, more usually from about 4 to 8 weeks. The mice can be of either sex, can be neutered, and can be otherwise normal, except for the immunocompromised state, or they can have one or more mutations, which can be naturally occurring or as a result of mutagenesis.

[0165] In another embodiment, the mouse model described herein is used to evaluate the effectiveness of the therapeutic compounds and methods. The terms “therapeutic compounds”, “therapeutic methods” and “therapy” as used herein, encompass exogenous factors, such as dietary or environmental conditions, as well as pharmaceutical compositions “drugs” and vaccines. In one embodiment, the therapeutic method is an immunotherapy, which can include the treatment of the HBV bearing animal with populations of HBV-reactive immune cells. The therapeutic method can also, or alternatively, be a gene therapy (i.e., a therapy that involves treatment of the HBV-bearing mouse with a cell population that has been manipulated to express one or more genes, the products of which can possess anti-viral activity), see for example The Development of Human Gene Therapy, Theodore Friedmann, Ed. Cold Spring Harbor Laboratory Press, Cold Spring Harbor, N.Y., 1999. Therapeutic compounds of the invention can comprise a drug or composition with pharmaceutical activity that can be used to treat illness or disease. A therapeutic method can comprise the use of a plurality of compounds in a mixture or a distinct entity. Examples of such compounds include nucleosides, nucleic acids, nucleic acid chimeras, RNA and DNA oligonucleotides, peptide nucleic acids, enzymatic nucleic acid molecules, antisense nucleic acid molecules, decoys, triplex oligonucleotides, ssDNA, dsRNA, ssRNA, siRNA, 2,5-A chimeras, lipids, steroids, peptides, proteins, antibodies, monoclonal antibodies (see for example Hall, 1995, Science, 270, 915-916), small molecules, and/or isomers and analogs thereof.

[0166] The methods of this invention can be used to treat human hepatitis B virus infections, which include productive virus infection, latent or persistent virus infection, and HBV-induced hepatocyte transformation. The utility can be extended to other species of HBV that infect non-human animals where such infections are of veterinary importance.

[0167] Preferred binding sites of the nucleic acid molecules of the invention include, but are not limited, to the primer binding site on HBV reverse transcriptase, the primer binding sequences of the HBV RNA, and/or the HBV Enhancer I region of HBV DNA.

[0168] This invention further relates to nucleic acid molecules that target RNA species of hepatitis C virus (HCV) and/or encoded by the HCV. In one embodiment, applicant describes enzymatic nucleic acid molecules that specifically cleave HCV RNA and the selection and function thereof. The invention further relates to compounds and chimeric molecules comprising nuclease activating activity. The invention also relates to compositions and methods for the cleavage of RNA using these nuclease activating compounds and chimeras. Nucleic acid molecules, nuclease activating compounds and chimeras, and compostions and methods of the invention can be used to treat diseases associated with HCV infection.

[0169] Due to the high sequence variability of the HCV genome, selection of nucleic acid molecules and nuclease activating compounds and chimeras for broad therapeutic applications preferably involve the conserved regions of the HCV genome. Thus, in one embodiment the present invention describes nucleic acid molecules that cleave the conserved regions of the HCV genome. The invention further describes compounds and chimeric molecules that activate cellular nucleases that cleave HCV RNA, including concerved regions of the HCV genome. Examples of conserved regions of the HCV genome include but are not limited to the 5′-Non Coding Region (NCR), the 5′-end of the core protein coding region, and the 3′-NCR. HCV genomic RNA contains an internal ribosome entry site (IRES) in the 5′-NCR which mediates translation independently of a 5′-cap structure (Wang et al., 1993, J. Virol., 67, 3338-44). The full-length sequence of the HCV RNA genome is heterologous among clinically isolated subtypes, of which there are at least 15 (Simmonds, 1995, Hepatology, 21, 570-583), however, the 5′-NCR sequence of HCV is highly conserved across all known subtypes, most likely to preserve the shared IRES mechanism (Okamoto et al., 1991, J. General Virol., 72, 2697-2704). In general, enzymatic nucleic acid molecules and nuclease activating compounds, and chimeras that cleave sites located in the 5′ end of the HCV genome are expected to block translation while nucleic acid molecules and nuclease activating compounds, and chimeras that cleave sites located in the 3′ end of the genome are expected to block RNA replication. Therefore, one nucleic acid molecule, compound, or chimera can be designed to cleave all the different isolates of HCV. Enzymatic nucleic acid molecules and nuclease activating compounds, and chimeras designed against conserved regions of various HCV isolates enable efficient inhibition of HCV replication in diverse patient populations and ensure the effectiveness of the nucleic acid molecules and nuclease activating compounds, and chimeras against HCV quasi species which evolve due to mutations in the non-conserved regions of the HCV genome.

[0170] In one embodiment, the invention features an enzymatic nucleic acid molecule, preferably in the hammerhead, NCH (Inozyme), G-cleaver, amberzyme, zinzyme and/or DNAzyme motif, and the use thereof to down-regulate or inhibit the expression of HCV RNA.

[0171] In another embodiment, the invention features an enzymatic nucleic acid molecule, preferably in the hammerhead, Inozyme, G-cleaver, amberzyme, zinzyme and/or DNAzyme motif, and the use thereof to down-regulate or inhibit the expression of HCV minus strand RNA.

[0172] In yet another embodiment, the invention featues a nuclease activating compound and/or a chimera and the use thereof to down-regulate or inhibit the expression of HCV RNA.

[0173] In another embodiment, the invention featues the use of a nuclease activating compound and/or a chimera to inhibit the expression of HCV minus strand RNA.

[0174] In one embodiment, the invention features a compound having formula I:

[chemical structure]

[0175] wherein X₁ is an integer selected from the group consisting of 1, 2, and 3; X₂ is an integer greater than or equal to 1; R₆ is independently selected from the group including H. OH, NH₂, ONH₂, alkyl, S-alkyl, O-alkyl, O-alkyl-S-alkyl, O-alkoxyalkyl, allyl, O-allyl, and fluoro; each R₁ and R₂ are independently selected from the group consisting of O and S; each R₃ and R₄ are independently selected from the group consisting of O, N, and S; and R₅ is selected from the group consisting of alkyl, alkylamine, an oligonucleotide having any of SEQ ID NOS. 11343-16182, an oligonucleotide having a sequence complementary to a sequence selected from the group including SEQ ID NOS. 2594-7433, and abasic moiety.

[0176] In another embodiment, the abasic moiety of the instant invention is selected from the group consisting of:

[chemical structure]

[0177] wherein R₃ is selected from the group consisting of O, N, and S, and R₇ is independently selected from the group consisting of H, OH, NH2, O—NH2, alkyl, S-alkyl, O-alkyl, O-alkyl-S-alkyl, O-alkoxyalkyl, allyl, O-allyl, fluoro, oligonucleotide, alkyl, alkylamine and abasic moiety.

[0178] In another embodiment, the oligonucleotide R₅ of Formula I having a sequence complementary to a sequence selected from the group consisting of SEQ ID NOS. 2594-7433 is an enzymatic nucleic acid molecule.

[0179] In yet another embodiment, the oligonucleotide R₅ of Formula I having a sequence complementary to a sequence selected from the group consisting of SEQ ID NOS. 2594-7433 is an antisense nucleic acid molecule.

[0180] In another embodiment, the oligonucleotide R₅ of Formula I having a sequence complementary to a sequence selected from the group consisting of SEQ ID NOS. 2594-7433 is an enzymatic nucleic acid molecule selected from the group consisting of Hammerhead, Inozyme, G-cleaver, DNAzyme, Amberzyme, and Zinzyme motifs.

[0181] In another embodiment, the Inozyme enzymatic nucleic acid molecule of the instant invention comprises a stem II region of length greater than or equal to 2 base pairs.

[0182] In one embodiment, the oligonucleotide R₅ of Formula I having a sequence complementary to a sequence selected from the group consisting of SEQ ID NOS. 2594-7433 is an enzymatic nucleic acid comprising between 12 and 100 bases complementary to an RNA derived from HCV.

[0183] In another embodiment, the oligonucleotide R₅ of Formula I having a sequence complementary to a sequence selected from the group consisting of SEQ ID NOS. 2594-7433 is an enzymatic nucleic acid comprising between 14 and 24 bases complementary to said RNA derived from HCV.

[0184] In one embodiment, the oligonucleotide R₅ of Formula I having a sequence complementary to a sequence selected from the group consisting of SEQ ID NOS. 2594-7433 is an antisense nucleic acid comprising between 12 and 100 bases complementary to an RNA derived from HCV.

[0185] In another embodiment, the oligonucleotide R₅ of Formula I having a sequence complementary to a sequence selected from the group consisting of SEQ ID NOS. 2594-7433 is an antisense nucleic acid comprising between 14 and 24 bases complementary to said RNA derived from HCV.

[0186] In another embodiment, the invention features a composition comprising a compound of Formula I, in a pharmaceutically acceptable carrier.

[0187] In yet another embodiment, the invention features a mammalian cell comprising a compound of Formula I. For example, the mammalian cell comprising a compound of Formula I can be a human cell.

[0188] In one embodiment, the invention features a method for the treatment of cirrhosis, liver failure, hepatocellular carcinoma, or a condition associated with HCV infection comprising the step of administering to a patient a compound of Formula I under conditions suitable for said treatment.

[0189] In another embodiment, the invention features a method of treatment of a patient having a condition associated with HCV infection comprising contacting cells of said patient with a compound having Formula I, and further comprising the use of one or more drug therapies under conditions suitable for said treatment. For example, the other therapies of the instant invention can be selected from the group consisting of type I interferon, interferon alpha, interferon beta, consensus interferon, polyethylene glycol interferon, polyethylene glycol interferon alpha 2a, polyethylene glycol interferon alpha 2b, polyethylene glycol consensus interferon, treatment with an enzymatic nucleic acid molecule, and treatment with an antisense molecule.

[0190] In another embodiment, the other therapies of the instant invention, for example type I interferon, interferon alpha, interferon beta, consensus interferon, polyethylene glycol interferon, polyethylene glycol interferon alpha 2a, polyethylene glycol interferon alpha 2b, polyethylene glycol consensus interferon, treatment with an enzymatic nucleic acid molecule, and treatment with an antisense nucleic acid molecule, and the compound having Formula I are administered separately in separate pharmaceutically acceptable carriers.

[0191] In yet another embodiment, the other therapies of the instant invention, for example type I interferon, interferon alpha, interferon beta, consensus interferon, polyethylene glycol interferon, polyethylene glycol interferon alpha 2a, polyethylene glycol interferon alpha 2b, polyethylene glycol consensus interferon, treatment with an enzymatic nucleic acid molecule, and treatment with an antisense nucleic acid molecule, and the compound having Formula I are administered simultaneously in a pharmaceutically acceptable carrier. The invention features a composition comprising a compound of Formula I and one or more of the above-listed compounds in a pharmaceutically acceptable carrier.

[0192] In yet another embodiment, the invention features a method for inhibiting HCV replication in a mammalian cell comprising the step of administering to said cell a compound having Formula I under conditions suitable for said inhibition.

[0193] In another embodiment, the invention features a method of cleaving a separate RNA molecule (i.e., HCV RNA or RNA necessary for HCV replication) comprising contacting a compound having Formula I with the separate RNA molecule under conditions suitable for the cleavage of the separate RNA molecule. In one example, the method of cleaving a separate RNA molecule is carried out in the presence of a divalent cation, for example Mg2+.

[0194] In yet another embodiment, the method of cleaving a separate RNA molecule of the invention is carried out in the presence of a protein nuclease, for example RNAse L.

[0195] In one embodiment, a compound having Formula I is chemically synthesized. In one embodiment, a compound having Formula I comprises at least one 2′-sugar modification, at least one nucleic acid base modification, and/or at least one phosphate modification.

[0196] The nucleic acid-based modulators of the invention are added directly, or can be complexed with cationic lipids, packaged within liposomes, or otherwise delivered to target cells or tissues. The nucleic acid or nucleic acid complexes can be locally administered to relevant tissues ex vivo, or in vivo through injection, infusion pump or stent, with or without their incorporation in biopolymers. In particular embodiments, the nucleic acid molecules of the invention comprise sequences shown in Tables IV-XI, XIV-XV and XVIII-XXIII. Examples of such nucleic acid molecules consist essentially of sequences defined in the tables.

[0197] The nucleic acid-based inhibitors, nuclease activating compounds and chimeras of the invention are added directly, or can be complexed with cationic lipids, packaged within liposomes, or otherwise delivered to target cells or tissues. The nucleic acid or nucleic acid complexes, and nuclease activating compounds or chimeras can be locally administered to relevant tissues ex vivo, or in vivo through injection or infusion pump, with or without their incorporation in biopolymers. In preferred embodiments, the enzymatic nucleic acid inhibitors, and nuclease activating compounds or chimeras comprise sequences, which are complementary to the substrate sequences in Tables XVIII, XIX, XX and XXIII. Examples of such enzymatic nucleic acid molecules also are shown in Tables XVIII, XIX, XX, XXI and XXIII. Examples of such enzymatic nucleic acid molecules consist essentially of sequences defined in these tables. In additional embodiments, the enzymatic nucleic acid inhibitors of the invention that comprise sequences which are complementary to the substrate sequences in Tables XVIII, XIX, XX and XXIII are covalently attached to nuclease activating compound or chimeras of the invention, for example a compound having Formula I.

[0198] In yet another embodiment, the invention features antisense nucleic acid molecules and 2-5A chimera including sequences complementary to the substrate sequences shown in Tables XVIII, XIX, XX and XXIII. Such nucleic acid molecules can include sequences as shown for the binding arms of the enzymatic nucleic acid molecules in Tables XVIII, XIX, XX, XXI and XXIII. Similarly, triplex molecules can be provided targeted to the corresponding DNA target regions, and containing the DNA equivalent of a target sequence or a sequence complementary to the specified target (substrate) sequence. Typically, antisense molecules are complementary to a target sequence along a single contiguous sequence of the antisense molecule. However, in certain embodiments, an antisense molecule can bind to substrate such that the substrate molecule forms a loop, and/or an antisense molecule can bind such that the antisense molecule forms a loop. Thus, the antisense molecule can be complementary to two (or even more) non-contiguous substrate sequences or two (or even more) non-contiguous sequence portions of an antisense molecule can be complementary to a target sequence or both.

[0199] In one embodiment, the invention features nucleic acid molecules and nuclease activating compounds or chimeras that inhibit gene expression and/or viral replication. These chemically or enzymatically synthesized nucleic acid molecules can contain substrate binding domains that bind to accessible regions of their target mRNAs. The nucleic acid molecules also contain domains that catalyze the cleavage of RNA. The enzymatic nucleic acid molecules are preferably molecules of the hammerhead, Inozyme, DNAzyme, Zinzyme, Amberzyme, and/or G-cleaver motifs. Upon binding, the enzymatic nucleic acid molecules cleave the target mRNAs, preventing translation and protein accumulation. In the absence of the expression of the target gene, HCV gene expression and/or replication is inhibited.

[0200] In another aspect, the invention provides mammalian cells containing one or more nucleic acid molecules and/or expression vectors of this invention. The one or more nucleic acid molecules can independently be targeted to the same or different sites.

[0201] In one embodiment, nucleic acid decoys, aptamers, siRNA, enzymatic nucleic acids or antisense molecules that interact with target protein and/or RNA molecules and modulate HBV (specifically HBV reverse transcriptase, or transcription of HBV genomic DNA) activity are expressed from transcription units inserted into DNA or RNA vectors. The recombinant vectors are preferably DNA plasmids or viral vectors. Decoys, aptamers, enzymatic nucleic acid or antisense expressing viral vectors can be constructed based on, but not limited to, adeno-associated virus, retrovirus, adenovirus, or alphavirus. Preferably, the recombinant vectors capable of expressing the decoys, aptamers, enzymatic nucleic acids or antisense are delivered as described above, and persist in target cells. Alternatively, viral vectors can be used that provide for transient expression of decoys, aptamers, siRNA, enzymatic nucleic acids or antisense. Such vectors can be repeatedly administered as necessary. Once expressed, the decoys, aptamers, enzymatic nucleic acids or antisense bind to the target protein and/or RNA and modulate its function or expression. Delivery of decoy, aptamer, siRNA, enzymatic nucleic acid or antisense expressing vectors can be systemic, such as by intravenous or intramuscular administration, by administration to target cells ex-planted from the patient followed by reintroduction into the patient, or by any other means that would allow for introduction into the desired target cell. DNA based nucleic acid molecules of the invention can be expressed via the use of a single stranded DNA intracellular expression vector.

[0202] In one embodiment, nucleic acid molecules and nuclease activating compounds or chimeras are added directly, or can be complexed with cationic lipids, packaged within liposomes, or otherwise delivered to target cells. The nucleic acid or nucleic acid complexes can be locally administered to relevant tissues ex vivo, or in vivo through injection, infusion pump or stent, with or without their incorporation in biopolymers. In another preferred embodiment, the nucleic acid molecule, nuclease activating compound or chimera is administered to the site of HBV or HCV activity (e.g., hepatocytes) in an appropriate liposomal vehicle.

[0203] In another embodiment, nucleic acid molecules that cleave target molecules and inhibit HCV activity are expressed from transcription units inserted into DNA or RNA vectors. The recombinant vectors are preferably DNA plasmids or viral vectors. Nucleic acid molecule expressing viral vectors can be constructed based on, but not limited to, adeno-associated virus, retrovirus, adenovirus, or alphavirus. Preferably, the recombinant vectors capable of expressing the nucleic acid molecules are delivered as described above, and persist in target cells. Alternatively, viral vectors can be used that provide for transient expression of nucleic acid molecules. Such vectors can be repeatedly administered as necessary. Once expressed, the nucleic acid molecules cleave the target mRNA. Delivery of enzymatic nucleic acid molecule expressing vectors can be systemic, such as by intravenous or intramuscular administration, by administration to target cells ex-planted from the patient followed by reintroduction into the patient, or by any other means that would allow for introduction into the desired target cell (for a review see Couture and Stinchcomb, 1996, TIG., 12, 510). In another aspect of the invention, nucleic acid molecules that cleave target molecules and inhibit viral replication are expressed from transcription units inserted into DNA, RNA, or viral vectors. Preferably, the recombinant vectors capable of expressing the nucleic acid molecules are locally delivered as described above, and transiently persist in smooth muscle cells. However, other mammalian cell vectors that direct the expression of RNA can be used for this purpose.

[0204] The nucleic acid molecules of the instant invention, individually, or in combination or in conjunction with other drugs, and/or therapies can be used to treat diseases or conditions discussed herein. For example, to treat a disease or condition associated with the levels of HBV or HCV, the nucleic acid molecules can be administered to a patient or can be administered to other appropriate cells evident to those skilled in the art, individually or in combination with one or more drugs under conditions suitable for the treatment.

[0205] In a further embodiment, the described molecules, such as decoys, aptamers, antisense, enzymatic nucleic acids, or nuclease activating compounds and chimeras can be used in combination with other known treatments to treat conditions or diseases discussed above. For example, the described molecules could be used in combination with one or more known therapeutic agents to treat HBV infection, HCV infection, hepatitis, hepatocellular carcinoma, cancer, cirrhosis, and liver failure. Such therapeutic agents can include, but are not limited to, nucleoside analogs selected from the group comprising Lamivudine (3TC®), L-FMAU, and/or adefovir dipivoxil (for a review of applicable nucleoside analogs, see Colacino and Staschke, 1998, Progress in Drug Research, 50, 259-322). Immunomodulators selected from the group comprising Type 1 Interferon, therapeutic vaccines, steriods, and 2′-5′ oligoadenylates (for a review of 2′-5′ Oligoadenylates, see Charubala and Pfleiderer, 1994, Progress in Molecular and Subcellular Biology, 14, 113-138).

[0206] Nucleic acid molecules, nuclease activating compounds and chimeras of the invention, individually, or in combination or in conjunction with other drugs, can be used to treat diseases or conditions discussed above. For example, to treat a disease or condition associated with HBV or HCV levels, the patient can be treated, or other appropriate cells can be treated, as is evident to those skilled in the art.

[0207] In a further embodiment, the described molecules can be used in combination with other known treatments to treat conditions or diseases discussed above. For example, the described molecules can be used in combination with one or more known therapeutic agents to treat liver failure, hepatocellular carcinoma, cirrhosis, and/or other disease states associated with HBV or HCV infection. Additional known therapeutic agents are those comprising antivirals, interferons, and/or antisense compounds.

[0208] The term “inhibit” or “down-regulate” as used herein refers to the expression of the gene, or level of RNAs or equivalent RNAs encoding one or more protein subunits or components, or activity of one or more protein subunits or components, such as HBV protein or proteins, is reduced below that observed in the absence of the therapies of the invention. In one embodiment, inhibition or down-regulation with enzymatic nucleic acid molecule preferably is below that level observed in the presence of an enzymatically inactive or attenuated molecule that is able to bind to the same site on the target RNA, but is unable to cleave that RNA. In another embodiment, inhibition or down-regulation with antisense oligonucleotides is preferably below that level observed in the presence of, for example, an oligonucleotide with scrambled sequence or with mismatches. In another embodiment, inhibition or down-regulation of HBV with the nucleic acid molecule of the instant invention is greater in the presence of the nucleic acid molecule than in its absence.

[0209] The term “up-regulate” as used herein refers to the expression of the gene, or level of RNAs or equivalent RNAs encoding one or more protein subunits or components, or activity of one or more protein subunits or components, such as HBV or HCV protein or proteins, is greater than that observed in the absence of the therapies of the invention. For example, the expression of a gene, such as HBV or HCV genes, can be increased in order to treat, prevent, ameliorate, or modulate a pathological condition caused or exacerbated by an absence or low level of gene expression.

[0210] The term “modulate” as used herein refers to the expression of the gene, or level of RNAs or equivalent RNAs encoding one or more protein subunits or components, or activity of one or more proteins is up-regulated or down-regulated, such that the expression, level, or activity is greater than or less than that observed in the absence of the therapies of the invention.

[0211] The term “decoy” as used herein refers to a nucleic acid molecule, for example RNA or DNA, or aptamer that is designed to preferentially bind to a predetermined ligand. Such binding can result in the inhibition or activation of a target molecule. A decoy or aptamer can compete with a naturally occurring binding target for the binding of a specific ligand. For example, it has been shown that over-expression of HIV trans-activation response (TAR) RNA can act as a “decoy” and efficiently binds HIV tat protein, thereby preventing it from binding to TAR sequences encoded in the HIV RNA (Sullenger et al., 1990, Cell, 63, 601-608). This is but a specific example and those in the art will recognize that other embodiments can be readily generated using techniques generally known in the art, see for example Gold et al., 1995, Annu. Rev. Biochem., 64, 763; Brody and Gold, 2000, J. Biotechnol., 74, 5; Sun, 2000, Curr. Opin. Mol. Ther., 2, 100; Kusser, 2000, J. Biotechnol., 74, 27; Hermann and Patel, 2000, Science, 287, 820; and Jayasena, 1999, Clinical Chemistry, 45, 1628. Similarly, a decoy can be designed to bind to HBV or HCV proteins and block the binding of HBV or HCV DNA or RNA or a decoy can be designed to bind to HBV or HCV proteins and prevent molecular interaction with the HBV or HCV proteins.

[0212] By “aptamer” or “nucleic acid aptamer” as used herein is meant a nucleic acid molecule that binds specifically to a target molecule wherein the nucleic acid molecule has sequence that is distinct from sequence recognized by the target molecule in its natural setting. Alternately, an aptamer can be a nucleic acid molecule that binds to a target molecule where the target molecule does not naturally bind to a nucleic acid. The target molecule can be any molecule of interest. For example, the aptamer can be used to bind to a ligand-binding domain of a protein, thereby preventing interaction of the naturally occurring ligand with the protein. This is a non-limiting example and those in the art will recognize that other embodiments can be readily generated using techniques generally known in the art, see for example Gold et al., 1995, Annu. Rev. Biochem., 64, 763; Brody and Gold, 2000, J. Biotechnol., 74, 5; Sun, 2000, Curr. Opin. Mol. Ther., 2, 100; Kusser, 2000, J. Biotechnol., 74, 27; Hermann and Patel, 2000, Science, 287, 820; and Jayasena, 1999, Clinical Chemistry, 45, 1628.

[0213] By “enzymatic nucleic acid molecule” is meant a nucleic acid molecule that has complementarity in a substrate binding region to a specified gene target, and also has an enzymatic activity which is active to specifically cleave a target RNA molecule. That is, the enzymatic nucleic acid molecule is able to intermolecularly cleave a RNA molecule and thereby inactivate a target RNA molecule. These complementary regions allow sufficient hybridization of the enzymatic nucleic acid molecule to a target RNA molecule and thus permit cleavage. One hundred percent complementarity is preferred, but complementarity as low as 50-75% may also be useful in this invention (see for example Werner and Uhlenbeck, 1995, Nucleic Acids Research, 23, 2092-2096; Hammann et al., 1999, Antisense and Nucleic Acid Drug Dev., 9, 25-31). The nucleic acids can be modified at the base, sugar, and/or phosphate groups. The term enzymatic nucleic acid is used interchangeably with phrases such as ribozymes, catalytic RNA, enzymatic RNA, catalytic DNA, aptazyme or aptamer-binding ribozyme, regulatable ribozyme, catalytic oligonucleotides, nucleozyme, DNAzyme, RNA enzyme, endoribonuclease, endonuclease, minizyme, leadzyme, oligozyme or DNA enzyme. All of these terminologies describe nucleic acid molecules with enzymatic activity. The specific enzymatic nucleic acid molecules described in the instant application are not limiting in the invention and those skilled in the art will recognize that all that is important in an enzymatic nucleic acid molecule of this invention is that it have a specific substrate binding site which is complementary to one or more of the target nucleic acid regions, and that it have nucleotide sequences within or surrounding that substrate binding site which impart a nucleic acid cleaving activity to the molecule (Cech et al., U.S. Pat. No. 4,987,071; Cech et al., 1988, JAMA 260:20 3030-4).

[0214] By “nucleic acid molecule” as used herein is meant a molecule comprising nucleotides. The nucleic acid can be single, double, or multiple stranded and can comprise modified or unmodified nucleotides or non-nucleotides or various mixtures and combinations thereof.

[0215] By “enzymatic portion” or “catalytic domain” is meant that portion/region of the enzymatic nucleic acid molecule essential for cleavage of a nucleic acid substrate (for example see FIGS. 1-5).

[0216] By “substrate binding arm” or “substrate binding domain” is meant that portion/region of a ribozyme which is complementary to (i.e., able to base-pair with) a portion of its substrate. Generally, such complementarity is 100%, but can be less if desired. For example, as few as 10 bases out of 14 may be base-paired (see for example Werner and Uhlenbeck, 1995, Nucleic Acids Research, 23, 2092-2096; Hammann et al., 1999, Antisense and Nucleic Acid Drug Dev., 9, 25-31). Such arms are shown generally in FIGS. 1-5. That is, these arms contain sequences within a ribozyme which are intended to bring ribozyme and target RNA together through complementary base-pairing interactions. The ribozyme of the invention can have binding arms that are contiguous or non-contiguous and may be of varying lengths. The length of the binding arm(s) are preferably greater than or equal to four nucleotides and of sufficient length to stably interact with the target RNA; specifically 12-100 nucleotides; more specifically 14-24 nucleotides long (see for example Werner and Uhlenbeck, supra; Hamman et al., supra; Hampel et al, EP0360257; Berzal-Herrance et al., 1993, EMBO J., 12, 2567-73). If two binding arms are chosen, the design is such that the length of the binding arms are symmetrical (i.e., each of the binding arms is of the same length; e.g., five and five nucleotides, six and six nucleotides or seven and seven nucleotides long) or asymmetrical (i.e., the binding arms are of different length; e.g., six and three nucleotides; three and six nucleotides long; four and five nucleotides long; four and six nucleotides long; four and seven nucleotides long; and the like).

[0217] By “nuclease activating compound” is meant a compound, for example a compound having Formula I, that activates the cleavage of an RNA by a nuclease. The nuclease can comprise RNAse L. By “nuclease activating chimera” or “chimera” is meant a nuclease activating compound, for example a compound having Formula I, that is attached to a nulceic acid molecule, for example a nucleic acid molecule that binds preferentially to a target RNA. These chimeric nucleic acid molecules can comprise a nuclease activating compound and an antisense nucleic acid molecule, for example a 2′,5′-oligoadenylate antisense chimera, or an enzymatic nucleic acid moleucle, for example a 2′,5′-oligoadenylate enzymatic nucleic acid chimera.

[0218] By “Inozyme” or “NCH” motif or configuration is meant, an enzymatic nucleic acid molecule comprising a motif as is generally described as NCH Rz in Ludwig et al., International PCT Publication No. WO 98/58058 and U.S. patent application Ser. No. 08/878,640. Inozymes possess endonuclease activity to cleave RNA substrates having a cleavage triplet NCH/, where N is a nucleotide, C is cytidine and H is adenosine, uridine or cytidine, and/represents the cleavage site. Inozymes can also possess endonuclease activity to cleave RNA substrates having a cleavage triplet NCN/, where N is a nucleotide, C is cytidine, and/represents the cleavage site.

[0219] By “G-cleaver” motif or configuration is meant, an enzymatic nucleic acid molecule comprising a motif as is generally described in Eckstein et al., U.S. Pat. No. 6,127,173 and in Kore et al., 1998, Nucleic Acids Research 26, 4116-4120. G-cleavers possess endonuclease activity to cleave RNA substrates having a cleavage triplet NYN/, where N is a nucleotide, Y is uridine or cytidine and/represents the cleavage site. G-cleavers can be chemically modified.

[0220] By “zinzyme” motif or configuration is meant, an enzymatic nucleic acid molecule comprising a motif as is generally described in Beigelman et al., International PCT publication No. WO 99/55857 and U.S. patent application Ser. No. 09/918,728. Zinzymes possess endonuclease activity to cleave RNA substrates having a cleavage triplet including but not limited to, YG/Y, where Y is uridine or cytidine, and G is guanosine and/represents the cleavage site. Zinzymes can be chemically modified to increase nuclease stability through various substitutions, including substituting 2′-O-methyl guanosine nucleotides for guanosine nucleotides. In addition, differing nucleotide and/or non-nucleotide linkers can be used to substitute the 5′-gaaa-2′ loop of the motif. Zinzymes represent a non-limiting example of an enzymatic nucleic acid molecule that does not require a ribonucleotide (2′-OH) group within its own nucleic acid sequence for activity.

[0221] By “amberzyme” motif or configuration is meant, an enzymatic nucleic acid molecule comprising a motif as is generally described in Beigelman et al., International PCT publication No. WO 99/55857 and U.S. patent application Ser. No. 09/476,387. Amberzymes possess endonuclease activity to cleave RNA substrates having a cleavage triplet NG/N, where N is a nucleotide, G is guanosine, and/represents the cleavage site. Amberzymes can be chemically modified to increase nuclease stability. In addition, differing nucleoside and/or non-nucleoside linkers can be used to substitute the 5′-gaaa-3′ loops of the motif. Amberzymes represent a non-limiting example of an enzymatic nucleic acid molecule that does not require a ribonucleotide (2′-OH) group within its own nucleic acid sequence for activity.

[0222] By ‘DNAzyme’ is meant, an enzymatic nucleic acid molecule that does not require the presence of a 2′-OH group within its own nucleic acid sequence for activity. In particular embodiments, the enzymatic nucleic acid molecule can have an attached linker or linkers or other attached or associated groups, moieties, or chains containing one or more nucleotides with 2′-OH groups. DNAzymes can be synthesized chemically or expressed endogenously in vivo, by means of a single stranded DNA vector or equivalent thereof. Non-limiting examples of DNAzymes are generally reviewed in Usman et al., U.S. Pat. No., 6,159,714; Chartrand et al., 1995, NAR 23, 4092; Breaker et al., 1995, Chem. Bio. 2, 655; Santoro et al., 1997, PNAS 94, 4262; Breaker, 1999, Nature Biotechnology, 17, 422-423; and Santoro et. al., 2000, J. Am. Chem. Soc., 122, 2433-39. The “10-23” DNAzyme motif is one particular type of DNAzyme that was evolved using in vitro selection as generally described in Joyce et al., U.S. Pat. No. 5,807,718 and Santoro et al., supra. Additional DNAzyme motifs can be selected for using techniques similar to those described in these references, and hence, are within the scope of the present invention.

[0223] By “nucleic acid sensor molecule” or “allozyme” as used herein is meant a nucleic acid molecule comprising an enzymatic domain and a sensor domain, where the enzymatic nucleic acid domain's ability to catalyze a chemical reaction is dependent on the interaction with a target signaling molecule, such as a nucleic acid, polynucleotide, oligonucleotide, peptide, polypeptide, or protein, for example HBV RT, HBV RT primer, or HBV Enhancer I sequence. The introduction of chemical modifications, additional functional groups, and/or linkers, to the nucleic acid sensor molecule can provide enhanced catalytic activity of the nucleic acid sensor molecule, increased binding affinity of the sensor domain to a target nucleic acid, and/or improved nuclease/chemical stability of the nucleic acid sensor molecule, and are hence within the scope of the present invention (see for example Usman et al., U.S. patent application Ser. No. 09/877,526, George et al., U.S. Pat. Nos. 5,834,186 and 5,741,679, Shih et al., U.S. Pat. No. 5,589,332, Nathan et al., U.S. Pat. No. 5,871,914, Nathan and Ellington, International PCT publication No. WO 00/24931, Breaker et al., International PCT Publication Nos. WO 00/26226 and 98/27104, and Sullenger et al., U.S. patent application Ser. No. 09/205,520).

[0224] By “sensor component” or “sensor domain” of the nucleic acid sensor molecule as used herein is meant, a nucleic acid sequence (e.g., RNA or DNA or analogs thereof) which interacts with a target signaling molecule, for example a nucleic acid sequence in one or more regions of a target nucleic acid molecule or more than one target nucleic acid molecule, and which interaction causes the enzymatic nucleic acid component of the nucleic acid sensor molecule to either catalyze a reaction or stop catalyzing a reaction. In the presence of target signaling molecule of the invention, such as HBV RT, HBV RT primer, or HBV Enhancer I sequence, the ability of the sensor component, for example, to modulate the catalytic activity of the nucleic acid sensor molecule, is altered or diminished in a manner that can be detected or measured. The sensor component can comprise recognition properties relating to chemical or physical signals capable of modulating the nucleic acid sensor molecule via chemical or physical changes to the structure of the nucleic acid sensor molecule. The sensor component can be derived from a naturally occurring nucleic acid binding sequence, for example, RNAs that bind to other nucleic acid sequences in vivo. Alternately, the sensor component can be derived from a nucleic acid molecule (aptamer), which is evolved to bind to a nucleic acid sequence within a target nucleic acid molecule. The sensor component can be covalently linked to the nucleic acid sensor molecule, or can be non-covalently associated. A person skilled in the art will recognize that all that is required is that the sensor component is able to selectively modulate the activity of the nucleic acid sensor molecule to catalyze a reaction.

[0225] By “target molecule” or “target signaling molecule” is meant a molecule capable of interacting with a nucleic acid sensor molecule, specifically a sensor domain of a nucleic acid sensor molecule, in a manner that causes the nucleic acid sensor molecule to be active or inactive. The interaction of the signaling agent with a nucleic acid sensor molecule can result in modification of the enzymatic nucleic acid component of the nucleic acid sensor molecule via chemical, physical, topological, or conformational changes to the structure of the molecule, such that the activity of the enzymatic nucleic acid component of the nucleic acid sensor molecule is modulated, for example is activated or inactivated. Signaling agents can comprise target signaling molecules such as macromolecules, ligands, small molecules, metals and ions, nucleic acid molecules including but not limited to RNA and DNA or analogs thereof, proteins, peptides, antibodies, polysaccharides, lipids, sugars, microbial or cellular metabolites, pharmaceuticals, and organic and inorganic molecules in a purified or unpurified form, for example HBV RT or HBV RT primer.

[0226] By “sufficient length” is meant a nucleic acid molecule long enough to provide the intended function under the expected condition. For example, a nucleic acid molecule of the invention needs to be of “sufficient length” to provide stable binding to a target site under the expected binding conditions and environment. In another non-limiting example, for the binding arms of an enzymatic nucleic acid, “sufficient length” means that the binding arm sequence is long enough to provide stable binding to a target site under the expected reaction conditions and environment. The binding arms are not so long as to prevent useful turnover of the nucleic acid molecule. By “stably interact” is meant interaction of the oligonucleotides with target nucleic acid (e.g., by forming hydrogen bonds with complementary nucleotides in the target under physiological conditions) that is sufficient for the intended purpose (e.g., cleavage of target RNA by an enzyme).

[0227] By “equivalent” RNA to HBV or HCV is meant to include those naturally occurring RNA molecules having homology (partial or complete) to HBV or HCV proteins or encoding for proteins with similar function as HBV or HCV in various organisms, including human, rodent, primate, rabbit, pig, protozoans, fungi, plants, and other microorganisms and parasites. The equivalent RNA sequence also includes in addition to the coding region, regions such as 5′-untranslated region, 3′-untranslated region, introns, intron-exon junction and the like.

[0228] The term “component” of HBV or HCV as used herein refers to a peptide or protein subunit expressed from a HBV or HCV gene.

[0229] By “homology” is meant the nucleotide sequence of two or more nucleic acid molecules is partially or completely identical.

[0230] By “antisense nucleic acid”, it is meant a non-enzymatic nucleic acid molecule that binds to target RNA by means of RNA-RNA or RNA-DNA or RNA-PNA (protein nucleic acid; Egholm et al., 1993 Nature 365, 566) interactions and alters the activity of the target RNA (for a review, see Stein and Cheng, 1993 Science 261, 1004 and Woolf et al., U.S. Pat. No. 5,849,902). Typically, antisense molecules are complementary to a target sequence along a single contiguous sequence of the antisense molecule. However, in certain embodiments, an antisense molecule can bind to substrate such that the substrate molecule forms a loop, and/or an antisense molecule can bind such that the antisense molecule forms a loop. Thus, the antisense molecule can be complementary to two or more non-contiguous substrate sequences or two or more non-contiguous sequence portions of an antisense molecule can be complementary to a target sequence, or both. For a review of current antisense strategies, see Schmajuk et al., 1999, J. Biol. Chem., 274, 21783-21789, Delihas et al, 1997, Nature, 15, 751-753, Stein et al., 1997, Antisense N. A. Drug Dev., 7, 151, Crooke, 2000, Methods Enzymol., 313, 3-45; Crooke, 1998, Biotech. Genet. Eng. Rev., 15, 121-157, Crooke, 1997, Ad. Pharmacol., 40, 1-49. Antisense molecules of the instant invention can include 2-5A antisense chimera molecules. In addition, antisense DNA can be used to target RNA by means of DNA-RNA interactions, thereby activating RNase H, which digests the target RNA in the duplex. The antisense oligonucleotides can comprise one or more RNAse H activating region that is capable of activating RNAse H cleavage of a target RNA. Antisense DNA can be synthesized chemically or expressed via the use of a single stranded DNA expression vector or equivalent thereof.

[0231] By “RNase H activating region” is meant a region (generally greater than or equal to 4-25 nucleotides in length, preferably from 5-11 nucleotides in length) of a nucleic acid molecule capable of binding to a target RNA to form a non-covalent complex that is recognized by cellular RNase H enzyme (see for example Arrow et al., U.S. Pat. No. 5,849,902; Arrow et al., U.S. Pat. No. 5,989,912). The RNase H enzyme binds to the nucleic acid molecule-target RNA complex and cleaves the target RNA sequence. The RNase H activating region comprises, for example, phosphodiester, phosphorothioate (for example, at least four of the nucleotides are phosphorothiote substitutions; more specifically, 4-11 of the nucleotides are phosphorothiote substitutions), phosphorodithioate, 5′-thiophosphate, or methylphosphonate backbone chemistry or a combination thereof. In addition to one or more backbone chemistries described above, the RNase H activating region can also comprise a variety of sugar chemistries. For example, the RNase H activating region can comprise deoxyribose, arabino, fluoroarabino or a combination thereof, nucleotide sugar chemistry. Those skilled in the art will recognize that the foregoing are non-limiting examples and that any combination of phosphate, sugar and base chemistry of a nucleic acid that supports the activity of RNase H enzyme is within the scope of the definition of the RNase H activating region and the instant invention.

[0232] By “2-5A antisense” or “2-5A antisense chimera” is meant an antisense oligonucleotide containing a 5′-phosphorylated 2′-5′-linked adenylate residue. These chimeras bind to target RNA in a sequence-specific manner and activate a cellular 2-5A-dependent ribonuclease which, in turn, cleaves the target RNA (Torrence et al., 1993 Proc. Natl. Acad. Sci. USA 90, 1300; Silverman et al., 2000, Methods Enzymol., 313, 522-533; Player and Torrence, 1998, Pharmacol. Ther., 78, 55-113).

[0233] By “triplex nucleic acid” or “triplex oligonucleotide” it is meant a polynucleotide or oligonucleotide that can bind to a double-stranded DNA in a sequence-specific manner to form a triple-strand helix. Formation of such triple helix structure has been shown to modulate transcription of the targeted gene (Duval-Valentin et al., 1992, Proc. Natl. Acad. Sci. USA, 89, 504). Triplex nucleic acid molecules of the invention also include steric blocker nucleic acid molecules that bind to the Enhancer I region of HBV DNA (plus strand and/or minus strand) and prevent translation of HBV genomic DNA.

[0234] The term “single stranded RNA” (ssRNA) as used herein refers to a naturally occurring or synthetic ribonucleic acid molecule comprising a linear single strand, for example a ssRNA can be a messenger RNA (mRNA), transfer RNA (tRNA), ribosomal RNA (rRNA) etc. of a gene.

[0235] The term “single stranded DNA” (ssDNA) as used herein refers to a naturally occurring or synthetic deoxyribonucleic acid molecule comprising a linear single strand, for example, a ssDNA can be a sense or antisense gene sequence or EST (Expressed Sequence Tag).

[0236] The term “allozyme” as used herein refers to an allosteric enzymatic nucleic acid molecule, see for example George et al., U.S. Pat. Nos. 5,834,186 and 5,741,679, Shih et al., U.S. Pat. No. 5,589,332, Nathan et al., U.S. Pat. No. 5,871,914, Nathan and Ellington, International PCT publication No. WO 00/24931, Breaker et al., International PCT Publication Nos. WO 00/26226 and 98/27104, and Sullenger et al., International PCT publication No. WO 99/29842.

[0237] The term “2-5A chimera” as used herein refers to an oligonucleotide containing a 5′-phosphorylated 2′-5′-linked adenylate residue. These chimeras bind to target RNA in a sequence-specific manner and activate a cellular 2-5A-dependent ribonuclease which, in turn, cleaves the target RNA (Torrence et al., 1993 Proc. Natl. Acad. Sci. USA 90, 1300; Silverman et al., 2000, Methods Enzymol., 313, 522-533; Player and Torrence, 1998, Pharmacol. Ther., 78, 55-113).

[0238] The term “double stranded RNA” or “dsRNA” as used herein refers to a double stranded RNA molecule capable of RNA interference “RNAi”, including short interfering RNA “siRNA” see for example Bass, 2001, Nature, 411, 428-429; Elbashir et al., 2001, Nature, 411, 494-498; and Kreutzer et al., International PCT Publication No. WO 00/44895; Zernicka-Goetz et al., International PCT Publication No. WO 01/36646; Fire, International PCT Publication No. WO 99/32619; Plaetinck et al., International PCT Publication No. WO 00/01846; Mello and Fire, International PCT Publication No. WO 01/29058; Deschamps-Depaillette, International PCT Publication No. WO 99/07409; and Li et al., International PCT Publication No. WO 00/44914.

[0239] By “gene” it is meant, a nucleic acid that encodes an RNA, for example, nucleic acid sequences including, but not limited to, structural genes encoding a polypeptide.

[0240] By “complementarity” is meant that a nucleic acid can form hydrogen bond(s) with another nucleic acid sequence by either traditional Watson-Crick or other non-traditional types. In reference to the nucleic molecules of the present invention, the binding free energy for a nucleic acid molecule with its target or complementary sequence is sufficient to allow the relevant function of the nucleic acid to proceed, e.g., ribozyme cleavage, antisense or triple helix modulation. Determination of binding free energies for nucleic acid molecules is well known in the art (see, e.g., Turner et al., 1987, CSH Symp. Quant. Biol. LII pp.123-133; Frier et al., 1986, Proc. Nat. Acad. Sci. USA 83:9373-9377; Turner et al., 1987, J. Am. Chem. Soc. 109:3783-3785). A percent complementarity indicates the percentage of contiguous residues in a nucleic acid molecule that can form hydrogen bonds (e.g., Watson-Crick base pairing) with a second nucleic acid sequence (e.g., 5, 6, 7, 8, 9, 10 out of 10 being 50%, 60%, 70%, 80%, 90%, and 100% complementary). “Perfectly complementary” means that all the contiguous residues of a nucleic acid sequence will hydrogen bond with the same number of contiguous residues in a second nucleic acid sequence.

[0241] As used herein “cell” is used in its usual biological sense, and does not refer to an entire multicellular organism, e.g., specifically does not refer to a human. The cell can be present in an organism, e.g., birds, plants and mammals such as humans, cows, sheep, apes, monkeys, swine, dogs, and cats. The cell can be prokaryotic (e.g., bacterial cell) or eukaryotic (e.g., mammalian or plant cell).

[0242] By “HBV proteins” or “HCV proteins” is meant, a protein or a mutant protein derivative thereof, comprising sequence expressed and/or encoded by the HBV genome.

[0243] By “highly conserved sequence region” is meant a nucleotide sequence of one or more regions in a target gene does not vary significantly from one generation to the other or from one biological system to the other.

[0244] By “highly conserved nucleic acid binding region” is meant an amino acid sequence of one or more regions in a target protein that does not vary significantly from one generation to the other or from one biological system to the other.

[0245] By “related to the levels of HBV” is meant that the reduction of HBV expression (specifically HBV gene) RNA levels and thus reduction in the level of the respective protein will relieve, to some extent, the symptoms of the disease or condition.

[0246] By “related to the levels of HCV” is meant that the reduction of HCV expression (specifically HCV gene) RNA levels and thus reduction in the level of the respective protein will relieve, to some extent, the symptoms of the disease or condition.

[0247] By “RNA” is meant a molecule comprising at least one ribonucleotide residue. By “ribonucleotide” is meant a nucleotide with a hydroxyl group at the 2′ position of a β-D-ribo-furanose moiety.

[0248] By “vector” is meant any nucleic acid- and/or viral-based technique used to express and/or deliver a desired nucleic acid.

[0249] By “patient” is meant an organism, which is a donor or recipient of explanted cells or the cells themselves. “Patient” also refers to an organism to which the nucleic acid molecules of the invention can be administered. In one embodiment, a patient is a mammal or mammalian cells. In another embodiment, a patient is a human or human cells.

[0250] Other features and advantages of the invention will be apparent from the following description of the preferred embodiments thereof, and from the claims.

### DESCRIPTION OF THE PREFERRED EMBODIMENTS

[0251] First the drawings will be described briefly.

### DRAWINGS

[0252] FIG. 1 shows the secondary structure model for seven different classes of enzymatic nucleic acid molecules. Arrow indicates the site of cleavage. --------- indicate the target sequence. Lines interspersed with dots are meant to indicate tertiary interactions. - is meant to indicate base-paired interaction. Group I Intron: P1-P9.0 represent various stem-loop structures (Cech et al., 1994, Nature Struc. Bio., 1, 273). RNase P (M1RNA): EGS represents external guide sequence (Forster et al., 1990, Science, 249, 783; Pace et al., 1990, J. Biol. Chem., 265, 3587). Group II Intron: 5′SS means 5′ splice site; 3′SS means 3′-splice site; IBS means intron binding site; EBS means exon binding site (Pyle et al., 1994, Biochemistry, 33, 2716). VS RNA: I-VI are meant to indicate six stem-loop structures; shaded regions are meant to indicate tertiary interaction (Collins, International PCT Publication No. WO 96/19577). HDV Ribozyme: I-IV are meant to indicate four stem-loop structures (Been et al., U.S. Pat. No. 5,625,047). Hammerhead Ribozyme: I-III are meant to indicate three stem-loop structures; stems I-III can be of any length and may be symmetrical or asymmetrical (Usman et al., 1996, Curr. Op. Struct. Bio., 1, 527). Hairpin Ribozyme: Helix 1, 4 and 5 can be of any length; Helix 2 is between 3 and 8 base-pairs long; Y is a pyrimidine; Helix 2 (H2) is provided with a least 4 base pairs (i.e., n is 1, 2, 3 or 4) and helix 5 can be optionally provided of length 2 or more bases (preferably 3-20 bases, i.e., m is from 1-20 or more). Helix 2 and helix 5 may be covalently linked by one or more bases (i.e., r is ≧1 base). Helix 1, 4 or 5 may also be extended by 2 or more base pairs (e.g., 4-20 base pairs) to stabilize the ribozyme structure, and preferably is a protein binding site. In each instance, each N and N′ independently is any normal or modified base and each dash represents a potential base-pairing interaction. These nucleotides may be modified at the sugar, base or phosphate. Complete base-pairing is not required in the helices, but is preferred. Helix 1 and 4 can be of any size (i.e., o and p is each independently from 0 to any number, e.g., 20) as long as some base-pairing is maintained. Essential bases are shown as specific bases in the structure, but those in the art will recognize that one or more may be modified chemically (abasic, base, sugar and/or phosphate modifications) or replaced with another base without significant effect. Helix 4 can be formed from two separate molecules, i.e., without a connecting loop. The connecting loop when present may be a ribonucleotide with or without modifications to its base, sugar or phosphate. “q”≧is 2 bases. The connecting loop can also be replaced with a non-nucleotide linker molecule. H refers to bases A, U, or C. Y refers to pyrimidine bases. “______” refers to a covalent bond. (Burke et al., 1996, Nucleic Acids & Mol. Biol., 10, 129; Chowrira et al., U.S. Pat. No. 5,631,359).

[0253] FIG. 2 shows examples of chemically stabilized ribozyme motifs. HH Rz, represents hammerhead ribozyme motif (Usman et al., 1996, Curr. Op. Struct. Bio., 1, 527); NCH Rz represents the NCH ribozyme motif (Ludwig & Sproat, International PCT Publication No. WO 98/58058); G-Cleaver, represents G-cleaver ribozyme motif (Kore et al., 1998, Nucleic Acids Research, 26, 4116-4120). N or n, represent independently a nucleotide which may be same or different and have complementarity to each other; rI, represents ribo-Inosine nucleotide; arrow indicates the site of cleavage within the target. Position 4 of the HH Rz and the NCH Rz is shown as having 2′-C-allyl modification, but those skilled in the art will recognize that this position can be modified with other modifications well known in the art, so long as such modifications do not significantly inhibit the activity of the ribozyme.

[0254] FIG. 3 shows an example of the Amberzyme ribozyme motif that is chemically stabilized (see, for example, Beigelman et al., International PCT publication No. WO 99/55857; also referred to as Class I Motif). The Amberzyme motif is a class of enzymatic nucleic acid molecules that do not require the presence of a ribonucleotide (2′-OH) group for activity.

[0255] FIG. 4 shows an example of the Zinzyme A ribozyme motif that is chemically stabilized (see, for example, International PCT publication No. WO 99/55857; also referred to as Class A Motif). The Zinzyme motif is a class of enzymatic nucleic acid molecules that do not require the presence of a ribonucleotide (2′-OH) group for activity.

[0256] FIG. 5 shows an example of a DNAzyme motif described by Santoro et al., 1997, PNAS, 94, 4262.

[0257] FIG. 6 is a bar graph showing the percent change in serum HBV DNA levels following fourteen days of ribozyme treatment in HBV transgenic mice. Ribozymes targeting sites 273 (RPI.18341) and 1833 (RPI.18371) of HBV RNA administerd via continuous s.c. infusion at 10, 30, and 100 mg/kg/day are compared to continuous s.c. infusion administration of scrambled attenuated core ribozyme and saline controls, and orally administered 3TC® (300 mg/kg/day) and saline controls.

[0258] FIG. 7 is a bar graph showing the mean serum HBV DNA levels following fourteen days of ribozyme treatment in HBV transgenic mice. Ribozymes targeting sites 273 (RPI.18341) and 1833 (RPI.18371) of HBV RNA administerd via continuous s.c. infusion at 10, 30, and 100 mg/kg/day are compared to continuous s.c. infusion administration of scrambled attenuated core ribozyme and saline controls, and orally administered 3TC® (300 mg/kg/day) and saline controls.

[0259] FIG. 8 is a bar graph showing the decrease in serum HBV DNA (log) levels following fourteen days of ribozyme treatment in HBV transgenic mice. Ribozymes targeting sites 273 (RPI.18341) and 1833 (RPI.18371) of HBV RNA administerd via continuous s.c. infusion at 10, 30, and 100 mg/kg/day are compared to continuous s.c. infusion administration of scrambled attenuated core ribozyme and saline controls, and orally administered 3TC® (300 mg/kg/day) and saline controls.

[0260] FIG. 9 is a bar graph showing the decrease in HBV DNA in HepG2.2.15 cells after treatment with ribozymes targeting sites 273 (RPI.18341), 1833 (RPI.18371), 1874 (RPI.18372), and 1873 (RPI.18418) of HBV RNA as compared to a scrambled attenuated core ribozyme (RPI.20995).

[0261] FIG. 10 is a bar graph showing reduction in HBsAg levels following treatment of HepG2 cells with anti-HBV arm, stem, and loop-variant ribozymes (RPI.18341, RPI.22644, RPI.22645, RPI.22646, RPI.22647, RPI.22648, RPI.22649, and RPI.22650) targeting site 273 of the HBV pregenomic RNA as compared to a scrambled attenuated core ribozyme (RPI.20599).

[0262] FIG. 11 is a bar graph showing reduction in HBsAg levels following treatment of HepG2 cells with RPI 18341 alone or in combination with Infergen®. At either 500 or 1000 units of Infergen®, the addition of 200 nM of RPI.18341 results in a 75-77% increase in anti-HBV activity as judged by the level of HBsAg secreted from the treated Hep G2 cells. Conversely, the anti-HBV activity of RPI.18341 (at 200 nM) is increased 31-39% when used in combination of 500 or 1000 units of Infergen®.

[0263] FIG. 12 is a bar graph showing reduction in HBsAg levels following treatment of HepG2 cells with RPI 18341 alone or in combination with Lamivudine. At 25 nM Lamivudine (3TC®), the addition of 100 nM of RPI.18341 results in a 48% increase in anti-HBV activity as judged by the level of HBsAg secreted from treated Hep G2 cells. Conversely, the anti-HBV activity of RPI. 18341 (at 100 nM) is increased 31% when used in combination with 25 mM Lamivudine.

[0264] FIG. 13 shows a scheme which outlines the steps involved in HBV reverse transcription. The HBV polymerase/reverse transcriptase binds to the 5′-stem-loop of the HBV pregenomic RNA and synthesizes a primer from the UUCA template. The reverse transcriptase and tetramer primer are translocated to the 3′-DR1 site. The RT primer binds to the UUCA sequence in the DR1 element and minus strand synthesis begins.

[0265] FIG. 14 shows a non-limiting example of inhibition of HBV reverse transcription. A decoy molecule binds to the HBV RT primer, thereby preventing translocation of the RT to the 3′-DR1 site and preventing minus strand synthesis.

[0266] FIG. 15 shows data of a HBV nucleic acid screen of 2′-O-allyl modified nucleic acid molecules. The levels of HbsAg were determined by ELISA. Inhibition of HBV is correlated to HBsAg antigen levels.

[0267] FIG. 16 shows data of a HBV nucleic acid screen of 2′-O-methyl modified nucleic acid molecules. The levels of HbsAg were determined by ELISA. Inhibition of HBV is correlated to HBsAg antigen levels.

[0268] FIG. 17 shows dose response data of 2′-O-methyl modified nucleic acid molecules targeting the HBV reverse transcriptase primer compared to levels of HBsAg.

[0269] FIG. 18 shows data of nucleic acid screen of nucleic acid molecules (200 nM) targeting the HBV Enhancer I core region compared to levels of HBsAg.

[0270] FIG. 19 shows data of nucleic acid screen of nucleic acid molecules (400 nM) targeting the HBV Enhancer I core region compared to levels of HBsAg.

[0271] FIG. 20 shows dose response data of nucleic acid molecules targeting the HBV Enhancer I core region compared to levels of HBsAg.

[0272] FIG. 21 shows a graph depicting HepG2.2.15 tumor growth in athymic nu/nu female mice as tumor volume (mm³) vs time (days).

[0273] FIG. 22 shows a graph depicting HepG2.2.15 tumor growth in athymic nu/nu female mice as tumor volume (mm³) vs time (days). Inoculated HepG2.2.15 cells were selected for antibiotic resistance to G418 before introduction into the mouse.

[0274] FIG. 23 is a schematic representation of the Dual Reporter System utilized to demonstrate enzymatic nucleic acid mediated reduction of luciferase activity in cell culture.

[0275] FIG. 24 shows a schematic view of the secondary structure of the HCV 5′UTR (Brown et al., 1992, Nucleic Acids Res., 20, 5041-45; Honda et al., 1999, J. Virol., 73, 1165-74). Major structural domains are indicated in bold. Enzymatic nucleic acid cleavage sites are indicated by arrows. Solid arrows denote sites amenable to amino-modified enzymatic nucleic acid inhibition. Lead cleavage sites (195 and 330) are indicated with oversized solid arrows.

[0276] FIG. 25 shows a non-limiting example of a nuclease resistant enzymatic nucleic acid molecule. Binding arms are indicated as stem I and stem III. Nucleotide modifications are indicated as follows: 2′-O-methyl nucleotides, lowercase; ribonucleotides, uppercase G, A; 2′-amino-uridine, u; inverted 3′-3′ deoxyabasic, B. The positions of phosphorothioate linkages at the 5′-end of each enzymatic nucleic acid are indicated by subscript “s”. H indicates A, C or U ribonucleotide, N′ indicates A, C G or U ribonucleotide in substrate, n indicates base complementary to the N′. The U4 and U7 positions in the catalytic core are indicated.

[0277] FIG. 26 is a set of bar graphs showing enzymatic nucleic acid mediated inhibition of HCV-luciferase expression in OST7 cells. OST7 cells were transfected with complexes containing reporter plasmids (2 μg/mL), enzymatic nucleic acids (100 nM) and lipid. The ratio of HCV-firefly luciferase luminescence/Renilla luciferase luminescence was determined for each enzymatic nucleic acid tested and was compared to treatment with the ICR, an irrelevant control enzymatic nucleic acid lacking specificity to the HCV 5′UTR (adjusted to 1). Results are reported as the mean of triplicate samples ±SD. In FIG. 26A, OST7 cells were treated with enzymatic nucleic acids (100 nM) targeting conserved sites (indicated by cleavage site) within the HCV 5′UTR. In FIG. 26B, OST7 cells were treated with a subset of enzymatic nucleic acids to lead HCV sites (indicated by cleavage site) and corresponding attenuated core (AC) controls. Percent decrease in firefly/Renilla luciferase ratio after treatment with active enzymatic nucleic acids as compared to treatment with corresponding ACs is shown when the decrease is ≧50% and statistically significant. Similar results were obtained with 50 nM enzymatic nucleic acid.

[0278] FIG. 27 is a series of line graphs showing the dose-dependent inhibition of HCV/luciferase expression following enzymatic nucleic acid treatment. Active enzymatic nucleic acid was mixed with corresponding AC to maintain a 100 nM total oligonucleotide concentration and the same lipid charge ratio. The concentration of active enzymatic nucleic acid for each point is shown. FIGS. 27A-E shows enzymatic nucleic acids targeting sites 79, 81, 142, 195, or 330, respectively. Results are reported as the mean of triplicate samples ±SD.

[0279] FIG. 28 is a set of bar graphs showing reduction of HCV/luciferase RNA and inhibition of HCV-luciferase expression in OST7 cells. OST7 cells were transfected with complexes containing reporter plasmids (2 μg/ml), enzymatic nucleic acids, BACs or SACs (50 mM) and lipid. Results are reported as the mean of triplicate samples ±SD. In FIG. 28A the ratio of HCV-firefly luciferase RNA/Renilla luciferase RNA is shown for each enzymatic nucleic acid or control tested. As compared to paired BAC controls (adjusted to 1), luciferase RNA levels were reduced by 40% and 25% for the site 195 or 330 enzymatic nucleic acids, respectively. In FIG. 28B the ratio of HCV-firefly luciferase luminescence/Renilla luciferase luminescence is shown after treatment with site 195 or 330 enzymatic nucleic acids or paired controls. As compared to paired BAC controls (adjusted to 1), inhibition of protein expression was 70% and 40% for the site 195 or 330 enzymatic nucleic acids, respectively P<0.01.

[0280] FIG. 29 is a set a bar graphs showing interferon (IFN) alpha 2a and 2b dose response in combination with site 195 anti-HCV enzymatic nucleic acid treatment. FIG. 29A shows data for IFN alfa 2a treatment. FIG. 29B shows data for IFN alfa 2b treatment. Viral yield is reported from HeLa cells pretreated with IFN in units/ml (U/ml) as indicated for 4 h prior to infection and then treated with either 200 nM control (SAC) or site 195 anti-HCV enzymatic nucleic acid (195 RZ) for 24 h after infection. Cells were infected with a MOI=0.1 for 30 min and collected at 24 h post infection. Error bars represent the S.D. of the mean of triplicate determinations.

[0281] FIG. 30 is a line graph showing site 195 anti-HCV enzymatic nucleic acid dose response in combination with interferon (IFN) alpha 2a and 2b pretreatment. Viral yield is reported from HeLa cells pretreated for 4 h with or without IFN and treated with doses of site 195 anti-HCV enzymatic nucleic acid (195 RZ) as indicated for 24 h after infection. Anti-HCV enzymatic nucleic acid was mixed with control oligonucleotide (SAC) to maintain a constant 200 nM total dose of nucleic acid for delivery. Cells were infected with a MOI=0.1 for 30 min and collected at 24 h post infection. Error bars represent the S.D. of the mean of triplicate determinations.

[0282] FIG. 31 is a set of bar graphs showing data from consensus interferon (CIFN)/enzymatic nucleic acid combination treatment. FIG. 31A shows CIFN dose response with site 195 anti-HCV enzymatic nucleic acid treatment. Viral yield is reported from cells pretreated with CIFN in units/ml (U/ml) as indicated and treated with either 200 nM control (SAC) or site 195 anti-HCV enzymatic nucleic acid (195 RZ). FIG. 31B shows site 195 anti-HCV enzymatic nucleic acid dose response with CIFN pretreatment. Viral yield is reported from cells pretreated with or without CIFN and treated with concentrations of site 195 anti-HCV enzymatic nucleic acid (195 RZ) as indicated. Anti-HCV enzymatic nucleic acid was mixed with control oligonucleotide (SAC) to maintain a constant 200 nM total dose of nucleic acid for delivery. Cells were infected with a MOI=0.1 for 30 min. and collected at 24 h post infection. Error bars represent the S.D. of the mean of triplicate determinations.

[0283] FIG. 32 is a bar graph showing enzymatic nucleic acid activity and enhanced antiviral effect of an anti-HCV enzymatic nucleic acid targeting site 195 used in combination with consensus interferon (CIFN). Viral yield is reported from cells treated as indicated. BAC, cells were treated with 200 nM BAC (binding attenuated control) for 24 h after infection; CIFN+BAC, cells were treated with 12.5 U/ml CIFN for 4 h prior to infection and with 200 nM BAC for 24 h after infection; 195 RZ, cells were treated with 200 nM site 195 anti-HCV enzymatic nucleic acid for 24 h after infection; CIFN+195 RZ, cells were treated with 12.5 U/ml CIFN for 4 h prior to infection and with 200 nM site 195 anti-HCV enzymatic nucleic acid for 24 h after infection. Cells were infected with a MOI=0.1 for 30 min. Error bars represent the S.D. of the mean of triplicate determinations.

[0284] FIG. 33 is a bar graph showing inhibition of a HCV-PV chimera replication by treatment with zinzyme enzymatic nucleic acid molecules targeting different sites within the HCV 5′-UTR compared to a scrambled attenuated core control (SAC) zinzyme.

[0285] FIG. 34 is a bar graph showing inhibition of a HCV-PV chimera replication by antisense nucleic acid molecules targeting conserved regions of the HCV 5′-UTR compared to scrambled antisense controls.

[0286] FIG. 35 shows the structure of compounds (2-5A) utilized in the study. “X” denotes the position of oxygen (O) in analog I or sulfur (S) in thiophosphate (P═S) analog II. The 2-5A compounds were synthesized, deprotected and purified as described herein utilizing CPG support with 3′-inverted abasic nucleotide. For chain extension 5′-O-(4,4′-dimetoxytrityl)-3′-O-(tert-butyldimethylsilyl)-N-6-benzoyladenosine-2-cyanoethyl-N,N-diisopropyl-phosphoramidite (Chem. Genes Corp., Waltham, Mass.) was employed. Introduction of a 5′-terminal phosphate (analog I) or thiophosphate (analog II) group was performed with “Chemical Phosphorylation Reagent” (Glen Research, Sterling, Va.). Structures of the final compounds were confirmed by MALDI-TOF analysis.

[0287] FIG. 36 is a bar graph showing ribozyme activity and enhanced antiviral effect. (A) Interferon/ribozyme combination treatment. (B) 2-5A/ribozyme combination treatment. HeLa cells seeded in 96-well plates (10,000 cells per well) were pretreated as indicated for 4 hours. For pretreatment, SAC (RPI 17894), RZ (RPI 13919), and 2-5A analog I (RPI 21096) (200 nM) were complexed with lipid cytofectin. Cells were then infected with HCV-PV at a multiplicity of infection of 0.1. Virus inoculum was replaced after 30 minutes with media containing 5% serum and 100 nM RZ or SAC as indicated, complexed with cytofectin RPI.9778. After 20 hours, cells were lysed by 3 freeze/thaw cycles and virus was quantified by plaque assay. Plaque forming units (PFU)/ml are shown as the mean of triplicate samples +SEM. The absolute amount of viral yield in treated cells varied from day to day, presumably due to day to day variations in cell plating and transfection complexation. None, normal media; IFN, 10 U/ml consensus interferon; SAC, scrambled arm attenuated core control (RPI 17894); RZ, anti-HCV ribozyme (RPI 13919); 2-5A, (RPI 21096).

[0288] FIG. 37 is a graph showing the inhibition of viral replication with anti-HCV ribozyme (RPI 13919) or 2-5A (RPI 21096) treatment. HeLa cells were treated as described in FIG. 36 except that there was no pretreatment and 200 nM oligonucleotide was used for treatment. 2-5A P═S contains a 5′-terminal thiophosphate (RPI21095) (see FIG. 35).

[0289] FIG. 38 is a bar graph showing anti-HCV ribozyme in combination with 2-5A treatment. HeLa cells were treated as described in FIG. 37 except concentrations were co-varied as shown to maintain a constant 200 nM total oligonucleotide dose for transfection. Cells treated with 50 nM anti-HCV ribozyme (RPI 13919) (middle bars) were also treated with 150 nM SAC (RPI 17894) or 2-5A (RPI 21096); likewise, cells treated with 100 nM anti-HCV ribozyme (bars at right) were also treated with 100 nM SAC or 2-5A.

### MECHANISM OF ACTION OF NUCLEIC ACID MOLECULES OF THE INVENTION

[0290] Decoy: Nucleic acid decoy molecules are mimetics of naturally occurring nucleic acid molecules or portions of naturally occurring nucleic acid molecules that can be used to modulate the function of a specific protein or a nucleic acid whose activity is dependant on interaction with the naturally occurring nucleic acid molecule. Decoys modulate the function of a target protein or nucleic acid by competing with authentic nucleic acid binding to the ligand of interest. Often, the nucleic acid decoy is a truncated version of a nucleic acid sequence that is recognized, for example by a particular protein, such as a transcription factor or polymerase. Decoys can be chemically modified to increase binding affinity to the target ligand as well as to increase the enzymatic and chemical stability of the decoy. In addition, bridging and non-bridging linkers can be introduced into the decoy sequence to provide additional binding affinity to the target ligand. Decoy molecules of the invention that bind to an HCV or HBV target, such as HBV reverse transcriptase or HBV reverse transcriptase primer, or an enhancer region of the HBV pregenomic RNA, for example the Enhancer I element, modulate the transcription of RNA to DNA and therefore modulate expression of the pregenomic RNA of the virus (see FIGS. 13 and 14).

[0291] Aptamer: Nucleic acid aptamers can be selected to specifically bind to a particular ligand of interest (see for example Gold et al., U.S. Pat. No. 5,567,588 and U.S. Pat. No. 5,475,096, Gold et al., 1995, Annu. Rev. Biochem., 64, 763; Brody and Gold, 2000, J. Biotechnol., 74, 5; Sun, 2000, Curr. Opin. Mol. Ther., 2, 100; Kusser, 2000, J. Biotechnol., 74, 27; Hermann and Patel, 2000, Science, 287, 820; and Jayasena, 1999, Clinical Chemistry, 45, 1628). For example, the use of in vitro selection can be applied to evolve nucleic acid aptamers with binding specificity for HBV RT and/or HBV RT primer. Nucleic acid aptamers can include chemical modifications and linkers as described herein. Aptamer molecules of the invention that bind to a reverse transcriptase or reverse transcriptase primer, such as HBV reverse transcriptase or HBV reverse transcriptase primer, modulate the transcription of RNA to DNA and therefore modulate expression of the pregenomic RNA of the virus.

[0292] Antisense: Antisense molecules can be modified or unmodified RNA, DNA, or mixed polymer oligonucleotides and primarily function by specifically binding to matching sequences resulting in modulation of peptide synthesis (Wu-Pong, November 1994, BioPharm, 20-33). The antisense oligonucleotide binds to target RNA by Watson Crick base-pairing and blocks gene expression by preventing ribosomal translation of the bound sequences either by steric blocking or by activating RNase H enzyme. Antisense molecules can also alter protein synthesis by interfering with RNA processing or transport from the nucleus into the cytoplasm (Mukhopadhyay & Roth, 1996, Crit. Rev. in Oncogenesis 7, 151-190).

[0293] In addition, binding of single stranded DNA to RNA may result in nuclease degradation of the heteroduplex (Wu-Pong, supra; Crooke, supra). To date, the only backbone modified DNA chemistry which will act as substrates for RNase H are phosphorothioates, phosphorodithioates, and borontrifluoridates. Recently, it has been reported that 2′-arabino and 2′-fluoro arabino-containing oligos can also activate RNase H activity.

[0294] A number of antisense molecules have been described that utilize novel configurations of chemically modified nucleotides, secondary structure, and/or RNase H substrate domains (Woolf et al., International PCT Publication No. WO 98/13526; Thompson et al., U.S. S No. 60/082,404 which was filed on Apr. 20, 1998; Hartmann et al., U.S. S No. 60/101,174 which was filed on Sep. 21, 1998) all of these are incorporated by reference herein in their entirety.

[0295] Antisense DNA can be used to target RNA by means of DNA-RNA interactions, thereby activating RNase H, which digests the target RNA in the duplex. Antisense DNA can be chemically synthesized or can be expressed via the use of a single stranded DNA intracellular expression vector or the equivalent thereof.

[0296] Triplex Forming Oligonucleotides (TFO): Single stranded oligonucleotide can be designed to bind to genomic DNA in a sequence specific manner. TFOs can be comprised of pyrimidine-rich oligonucleotides which bind DNA helices through Hoogsteen Base-pairing (Wu-Pong, supra). In addition, TFOs can be chemically modified to increase binding affinity to target DNA sequences. The resulting triple helix composed of the DNA sense, DNA antisense, and TFO disrupts RNA synthesis by RNA polymerase. The TFO mechanism can result in gene expression or cell death since binding may be irreversible (Mukhopadhyay & Roth, supra) 2′-5′ Oligoadenylates: The 2-5A system is an interferon-mediated mechanism for RNA degradation found in higher vertebrates (Mitra et al., 1996, Proc Nat Acad Sci USA 93, 6780-6785). Two types of enzymes, 2-5A synthetase and RNase L, are required for RNA cleavage. The 2-5A synthetases require double stranded RNA to form 2′-5′ oligoadenylates (2-5A). 2-5A then acts as an allosteric effector for utilizing RNase L, which has the ability to cleave single stranded RNA. The ability to form 2-5A structures with double stranded RNA makes this system particularly useful for modulation of viral replication.

[0297] (2′-5′) oligoadenylate structures can be covalently linked to antisense molecules to form chimeric oligonucleotides capable of RNA cleavage (Torrence, supra). These molecules putatively bind and activate a 2-5A-dependent RNase, the oligonucleotide/enzyme complex then binds to a target RNA molecule which can then be cleaved by the RNase enzyme. The covalent attachment of 2′-5′ oligoadenylate structures is not limited to antisense applications, and can be further elaborated to include attachment to nucleic acid molecules of the instant invention.

[0298] RNA interference (RNAi): RNA interference refers to the process of sequence specific post transcriptional gene silencing in animals mediated by short interfering RNAs (siRNA) (Fire et al., 1998, Nature, 391, 806). The corresponding process in plants is commonly referred to as post transcriptional gene silencing or RNA silencing and is also referred to as quelling in fungi. The process of post transcriptional gene silencing is thought to be an evolutionarily conserved cellular defense mechanism used to prevent the expression of foreign genes which is commonly shared by diverse flora and phyla (Fire et al., 1999, Trends Genet., 15, 358). Such protection from foreign gene expression may have evolved in response to the production of double stranded RNAs (dsRNA) derived from viral infection or the random integration of transposon elements into a host genome via a cellular response that specifically destroys homologous single stranded RNA or viral genomic RNA. The presence of dsRNA in cells triggers the RNAi response though a mechanism that has yet to be fully characterized. This mechanism appears to be different from the interferon response that results from dsRNA mediated activation of protein kinase PKR and 2′,5′-oligoadenylate synthetase resulting in non-specific cleavage of mRNA by ribonuclease L.

[0299] The presence of long dsRNAs in cells stimulates the activity of a ribonuclease III enzyme referred to as dicer. Dicer is involved in the processing of the dsRNA into short pieces of dsRNA known as short interfering RNAs (siRNA) (Berstein et al., 2001, Nature, 409, 363). Short interfering RNAs derived from dicer activity are typically about 21-23 nucleotides in length and comprise about 19 base pair duplexes. Dicer has also been implicated in the excision of 21 and 22 nucleotide small temporal RNAs (stRNA) from precursor RNA of conserved structure that are implicated in translational control (Hutvagner et al., 2001, Science, 293, 834). The RNAi response also features an endonuclease complex containing a siRNA, commonly referred to as an RNA-induced silencing complex (RISC), which mediates cleavage of single stranded RNA having sequence homologous to the siRNA. Cleavage of the target RNA takes place in the middle of the region complementary to the guide sequence of the siRNA duplex (Elbashir et al., 2001, Genes Dev., 15, 188).

[0300] Short interfering RNA mediated RNAi has been studied in a variety of systems. Fire et al., 1998, Nature, 391, 806, were the first to observe RNAi in C. Elegans. Wianny and Goetz, 1999, Nature Cell Biol., 2, 70, describes RNAi mediated by dsRNA in mouse embryos. Hammond et al., 2000, Nature, 404, 293, describe RNAi in Drosophila cells transfected with dsRNA. Elbashir et al., 2001, Nature, 411, 494, describe RNAi induced by introduction of duplexes of synthetic 21-nucleotide RNAs in cultured mammalian cells including human embryonic kidney and HeLa cells. Recent work in Drosophila embryonic lysates has revealed certain requirements for siRNA length, structure, chemical composition, and sequence that are essential to mediate efficient RNAi activity. These studies have shown that 21 nucleotide siRNA duplexes are most active when containing two nucleotide 3′-overhangs. Furthermore, substitution of one or both siRNA strands with 2′-deoxy or 2′-O-methyl nucleotides abolishes RNAi activity, whereas substitution of 3′-terminal siRNA nucleotides with deoxy nucleotides was shown to be tolerated. Mismatch sequences in the center of the siRNA duplex were also shown to abolish RNAi activity. In addition, these studies also indicate that the position of the cleavage site in the target RNA is defined by the 5′-end of the siRNA guide sequence rather than the 3′-end (Elbashir et al., 2001, EMBO J., 20, 6877). Other studies have indicated that a 5′-phosphate on the target-complementary strand of a siRNA duplex is required for siRNA activity and that ATP is utilized to maintain the 5′-phosphate moiety on the siRNA (Nykanen et al., 2001, Cell, 107, 309), however siRNA molecules lacking a 5′-phosphate are active when introduced exogenously, suggesting that 5′-phosphorylation of siRNA constructs may occur in vivo.

[0301] Enzymatic Nucleic Acid: Several varieties of naturally occurring enzymatic RNAs are presently known (Doherty and Doudna, 2001, Annu. Rev. Biophys. Biomol. Struct., 30, 457-475; Symons, 1994, Curr. Opin. Struct. Biol., 4, 322-30). In addition, several in vitro selection (evolution) strategies (Orgel, 1979, Proc. R. Soc. London, B 205, 435) have been used to evolve new nucleic acid catalysts capable of catalyzing cleavage and ligation of phosphodiester linkages (Joyce, 1989, Gene, 82, 83-87; Beaudry et al., 1992, Science 257, 635-641; Joyce, 1992, Scientific American 267, 90-97; Breaker et al., 1994, TIBTECH 12, 268; Bartel et al., 1993, Science 261:1411-1418; Szostak, 1993, TIBS 17, 89-93; Kumar et al., 1995, FASEB J., 9, 1183; Breaker, 1996, Curr. Op. Biotech., 7, 442; Santoro et al., 1997, Proc. Natl. Acad. Sci., 94, 4262; Tang et al., 1997, RNA 3, 914; Nakamaye & Eckstein, 1994, supra; Long & Uhlenbeck, 1994, supra; Ishizaka et al., 1995, supra; Vaish et al., 1997, Biochemistry 36, 6495). Each can catalyze a series of reactions including the hydrolysis of phosphodiester bonds in trans (and thus can cleave other RNA molecules) under physiological conditions.

[0302] Nucleic acid molecules of this invention can block HBV or HCV protein expression and can be used to treat disease or diagnose disease associated with the levels of HBV or HCV.

[0303] The enzymatic nature of an enzymatic nucleic acid has significant advantages, such as the concentration of nucleic acid necessary to affect a therapeutic treatment is low. This advantage reflects the ability of the enzymatic nucleic acid molecule to act enzymatically. Thus, a single enzymatic nucleic acid molecule is able to cleave many molecules of target RNA. In addition, the enzymatic nucleic acid molecule is a highly specific modulator, with the specificity of modulation depending not only on the base-pairing mechanism of binding to the target RNA, but also on the mechanism of target RNA cleavage. Single mismatches, or base-substitutions, near the site of cleavage can be chosen to completely eliminate catalytic activity of an enzymatic nucleic acid molecule.

[0304] Nucleic acid molecules having an endonuclease enzymatic activity are able to repeatedly cleave other separate RNA molecules in a nucleotide base sequence-specific manner. With proper design and construction, such enzymatic nucleic acid molecules can be targeted to any RNA transcript, and efficient cleavage achieved in vitro (Zaug et al., 324, Nature 429 1986; Uhlenbeck, 1987 Nature 328, 596; Kim et al., 84 Proc. Natl. Acad. Sci. USA 8788, 1987; Dreyfus, 1988, Einstein Quart. J. Bio. Med., 6, 92; Haseloff and Gerlach, 334 Nature 585, 1988; Cech, 260 JAMA 3030, 1988; and Jefferies et al., 17 Nucleic Acids Research 1371, 1989; Chartrand et al., 1995, Nucleic Acids Research 23, 4092; Santoro et al., 1997, PNAS 94, 4262).

[0305] Because of their sequence specificity, trans-cleaving enzymatic nucleic acid molecules show promise as therapeutic agents for human disease (Usman & McSwiggen, 1995 Ann. Rep. Med. Chem. 30, 285-294; Christoffersen and Marr, 1995 J. Med. Chem. 38, 2023-2037). Enzymatic nucleic acid molecule can be designed to cleave specific RNA targets within the background of cellular RNA. Such a cleavage event renders the RNA non-functional and abrogates protein expression from that RNA. In this manner, synthesis of a protein associated with a disease state can be selectively modulated (Warashina et al., 1999, Chemistry and Biology, 6, 237-250.

[0306] The present invention also features nucleic acid sensor molecules or allozymes having sensor domains comprising nucleic acid decoys and/or aptamers of the invention. Interaction of the nucleic acid sensor molecule's sensor domain with a molecular target, such as HCV or HBV target, e.g., HBV RT and/or HBV RT primer, can activate or inactivate the enzymatic nucleic acid domain of the nucleic acid sensor molecule, such that the activity of the nucleic acid sensor molecule is modulated in the presence of the target-signaling molecule. The nucleic acid sensor molecule can be designed to be active in the presence of the target molecule or alternately, can be designed to be inactive in the presence of the molecular target. For example, a nucleic acid sensor molecule is designed with a sensor domain having the sequence (UUCA)ₙ, where n is an integer from 1-10. In a non-limiting example, interaction of the HBV RT primer with the sensor domain of the nucleic acid sensor molecule can activate the enzymatic nucleic acid domain of the nucleic acid sensor molecule such that the sensor molecule catalyzes a reaction, for example cleavage of HBV RNA. In this example, the nucleic acid sensor molecule is activated in the presence of HBV RT or HBV RT primer, and can be used as a therapeutic to treat HBV infection. Alternately, the reaction can comprise cleavage or ligation of a labeled nucleic acid reporter molecule, providing a useful diagnostic reagent to detect the presence of HBV in a system.

[0307] HCV Target Sites

[0308] Targets for useful nucleic acid molecules and nuclease activating compounds or chimeras can be determined as disclosed in Draper et al., WO 93/23569; Sullivan et al., WO 93/23057; Thompson et al., WO 94/02595; Draper et al., WO 95/04818; McSwiggen et al., U.S. Pat. No. 5,525,468. Rather than repeat the guidance provided in those documents here, below are provided specific examples of such methods, not limiting to those in the art. Nucleic acid molecules and nuclease activating compounds or chimeras to such targets are designed as described in those applications and synthesized to be tested in vitro and in vivo, as also described. Such nucleic acid molecules and nuclease activating compounds or chimeras can also be optimized and delivered as described therein.

[0309] The sequence of HCV RNAs were screened for optimal enzymatic nucleic acid molecule target sites using a computer folding algorithm. Enzymatic nucleic acid cleavage sites were identified. These sites are shown in Tables XVIII, XIX, XX and XXIII (All sequences are 5′ to 3′ in the tables). The nucleotide base position is noted in the tables as that site to be cleaved by the designated type of enzymatic nucleic acid molecule. The nucleotide base position is noted in the tables as that site to be cleaved by the designated type of enzymatic nucleic acid molecule.

[0310] Because HCV RNAs are highly homologous in certain regions, some enzymatic nucleic acid molecule target sites are also homologous. In this case, a single enzymatic nucleic acid molecule will target different classes of HCV RNA. The advantage of one enzymatic nucleic acid molecule that targets several classes of HCV RNA is clear, especially in cases where one or more of these RNAs can contribute to the disease state.

[0311] Enzymatic nucleic acid molecules were designed that could bind and were individually analyzed by computer folding (Jaeger et al., 1989 Proc. Natl. Acad. Sci. USA, 86, 7706) to assess whether the enzymatic nucleic acid molecule sequences fold into the appropriate secondary structure. Those enzymatic nucleic acid molecules with unfavorable intramolecular interactions between the binding arms and the catalytic core are eliminated from consideration. Varying binding arm lengths can be chosen to optimize activity. Generally, at least 5 bases on each arm are able to bind to, or otherwise interact with, the target RNA. Enzymatic nucleic acid molecules were designed to anneal to various sites in the mRNA message. The binding arms are complementary to the target site sequences described above.

[0312] HBV Target Sites

[0313] Targets for useful ribozymes and antisense nucleic acids targeting HBV can be determined as disclosed in Draper et al., WO 93/23569; Sullivan et al., WO 93/23057; Thompson et al., WO 94/02595; Draper et al., WO 95/04818; McSwiggen et al., U.S. Pat. No. 5,525,468. Other examples include the following PCT applications, which concern inactivation of expression of disease-related genes: WO 95/23225, WO 95/13380, WO 94/02595. Rather than repeat the guidance provided in those documents here, below are provided specific examples of such methods, not limiting to those in the art. Ribozymes and antisense to such targets are designed as described in those applications and synthesized to be tested in vitro and in vivo, as also described. The sequence of human HBV RNAs (for example, accession AF100308.1; HBV strain 2-18; additionally, other HBV strains can be screened by one skilled in the art, see Table III for other possible strains) were screened for optimal enzymatic nucleic acid and antisense target sites using a computer-folding algorithm. Antisense, hammerhead, DNAzyme, NCH (Inozyme), amberzyme, zinzyme or G-Cleaver ribozyme binding/cleavage sites were identified. These sites are shown in Tables V to XI (all sequences are 5′ to 3′ in the tables; X can be any base-paired sequence, the actual sequence is not relevant here). The nucleotide base position is noted in the Tables as that site to be cleaved by the designated type of enzymatic nucleic acid molecule. Table IV shows substrate positions selected from Renbo et al., 1987, Sci. Sin., 30, 507, used in Draper, USSN (07/882,712), filed May 14, 1992, entitled “METHOD AND REAGENT FOR INHIBITING HEPATITIS B VIRUS REPLICATION” and Draper et al., International PCT publication No. WO 93/23569, filed Apr. 29, 1993, entitled “METHOD AND REAGENT FOR INHIBITING VIRAL REPLICATION”. While human sequences can be screened and enzymatic nucleic acid molecule and/or antisense thereafter designed, as discussed in Stinchcomb et al., WO 95/23225, mouse targeted ribozymes can be useful to test efficacy of action of the enzymatic nucleic acid molecule and/or antisense prior to testing in humans.

[0314] Antisense, hammerhead, DNAzyme, NCH (Inozyme), amberzyme, zinzyme or G-Cleaver ribozyme binding/cleavage sites were identified, as discussed above. The nucleic acid molecules were individually analyzed by computer folding (Jaeger et al., 1989 Proc. Natl. Acad. Sci. USA, 86, 7706) to assess whether the sequences fold into the appropriate secondary structure. Those nucleic acid molecules with unfavorable intramolecular interactions such as between the binding arms and the catalytic core were eliminated from consideration. Varying binding arm lengths can be chosen to optimize activity.

[0315] Antisense, hammerhead, DNAzyme, NCH, amberzyme, zinzyme or G-Cleaver ribozyme binding/cleavage sites were identified and were designed to anneal to various sites in the RNA target. The binding arms are complementary to the target site sequences described above. The nucleic acid molecules were chemically synthesized. The method of synthesis used follows the procedure for normal DNA/RNA synthesis as described below and in Usman et al., 1987 J. Am. Chem. Soc., 109, 7845; Scaringe et al., 1990 Nucleic Acids Res., 18, 5433; Wincott et al., 1995 Nucleic Acids Res. 23, 2677-2684; and Caruthers et al., 1992, Methods in Enzymology 211,3-19.

[0316] Synthesis of Nucleic acid Molecules

[0317] Synthesis of nucleic acids greater than 100 nucleotides in length is difficult using automated methods, and the therapeutic cost of such molecules is prohibitive. In this invention, small nucleic acid motifs (“small” refers to nucleic acid motifs no more than 100 nucleotides in length, preferably no more than 80 nucleotides in length, and most preferably no more than 50 nucleotides in length; e.g., decoy nucleic acid molecules, aptamer nucleic acid molecules antisense nucleic acid molecules, enzymatic nucleic acid molecules) are preferably used for exogenous delivery. The simple structure of these molecules increases the ability of the nucleic acid to invade targeted regions of protein and/or RNA structure. Exemplary molecules of the instant invention are chemically synthesized, and others can similarly be synthesized.

[0318] Oligonucleotides (e.g., DNA oligonucleotides) are synthesized using protocols known in the art, for example as described in Caruthers et al., 1992, Methods in Enzymology 211, 3-19, Thompson et al., International PCT Publication No. WO 99/54459, Wincott et al., 1995, Nucleic Acids Res. 23, 2677-2684, Wincott et al., 1997, Methods Mol. Bio., 74, 59, Brennan et al., 1998, Biotechnol Bioeng., 61, 33-45, and Brennan, U.S. Pat. No. 6,001,311. The synthesis of oligonucleotides makes use of common nucleic acid protecting and coupling groups, such as dimethoxytrityl at the 5′-end, and phosphoramidites at the 3′-end. In a non-limiting example, small scale syntheses are conducted on a 394 Applied Biosystems, Inc. synthesizer using a 0.2 μmol scale protocol with a 2.5 min coupling step for 2′-O-methylated nucleotides and a 45 sec coupling step for 2′-deoxy nucleotides. Table II outlines the amounts and the contact times of the reagents used in the synthesis cycle. Alternatively, syntheses at the 0.2 μmol scale can be performed on a 96-well plate synthesizer, such as the instrument produced by Protogene (Palo Alto, Calif.) with minimal modification to the cycle. A 33-fold excess (60 μL of 0.11 M=6.6 μmol) of 2′-O-methyl phosphoramidite and a 105-fold excess of S-ethyl tetrazole (60 μL of 0.25 M=15 μmol) can be used in each coupling cycle of 2′-O-methyl residues relative to polymer-bound 5′-hydroxyl. A 22-fold excess (40 μL of 0.11 M=4.4 μmol) of deoxy phosphoramidite and a 70-fold excess of S-ethyl tetrazole (40 μL of 0.25 M=10 μmol) can be used in each coupling cycle of deoxy residues relative to polymer-bound 5′-hydroxyl. Average coupling yields on the 394 Applied Biosystems, Inc. synthesizer, determined by colorimetric quantitation of the trityl fractions, are typically 97.5-99%. Other oligonucleotide synthesis reagents for the 394 Applied Biosystems, Inc. synthesizer include the following: detritylation solution is 3% TCA in methylene chloride (ABI); capping is performed with 16% N-methyl imidazole in THF (ABI) and 10% acetic anhydride/10% 2,6-lutidine in THF (ABI); and oxidation solution is 16.9 mM 12, 49 mM pyridine, 9% water in THF (PERSEPTIVE™). Burdick & Jackson Synthesis Grade acetonitrile is used directly from the reagent bottle. S-Ethyltetrazole solution (0.25 M in acetonitrile) is made up from the solid obtained from American International Chemical, Inc. Alternately, for the introduction of phosphorothioate linkages, Beaucage reagent (3H-1,2-Benzodithiol-3-one 1,1-dioxide, 0.05 M in acetonitrile) is used.

[0319] Deprotection of the DNA-based oligonucleotides is performed as follows: the polymer-bound trityl-on oligoribonucleotide is transferred to a 4 mL glass screw top vial and suspended in a solution of 40% aq. methylamine (1 mL) at 65° C. for 10 min. After cooling to −20° C., the supernatant is removed from the polymer support. The support is washed three times with 1.0 mL of EtOH:MeCN:H₂O/3:1:1, vortexed and the supernatant is then added to the first supernatant. The combined supernatants, containing the oligoribonucleotide, are dried to a white powder.

[0320] The method of synthesis used for normal RNA including certain decoy nucleic acid molecules and enzymatic nucleic acid molecules follows the procedure as described in Usman et al., 1987, J. Am. Chem. Soc., 109, 7845; Scaringe et al., 1990, Nucleic Acids Res., 18, 5433; and Wincott et al., 1995, Nucleic Acids Res. 23, 2677-2684 Wincott et al., 1997, Methods Mol. Bio., 74, 59, and makes use of common nucleic acid protecting and coupling groups, such as dimethoxytrityl at the 5′-end, and phosphoramidites at the 3′-end. In a non-limiting example, small scale syntheses are conducted on a 394 Applied Biosystems, Inc. synthesizer using a 0.2 μmol scale protocol with a 7.5 min coupling step for alkylsilyl protected nucleotides and a 2.5 min coupling step for 2′-O-methylated nucleotides. Table II outlines the amounts and the contact times of the reagents used in the synthesis cycle. Alternatively, syntheses at the 0.2 μmol scale can be done on a 96-well plate synthesizer, such as the instrument produced by Protogene (Palo Alto, Calif.) with minimal modification to the cycle. A 33-fold excess (60 μL of 0.11 M=6.6 μmol) of 2′-O-methyl phosphoramidite and a 75-fold excess of S-ethyl tetrazole (60 μL of 0.25 M=15 μmol) can be used in each coupling cycle of 2′-O-methyl residues relative to polymer-bound 5′-hydroxyl. A 66-fold excess (120 μL of 0.11 M=13.2 μmol) of alkylsilyl (ribo) protected phosphoramidite and a 150-fold excess of S-ethyl tetrazole (120 μL of 0.25 M=30 μmol) can be used in each coupling cycle of ribo residues relative to polymer-bound 5′-hydroxyl. Average coupling yields on the 394 Applied Biosystems, Inc. synthesizer, determined by colorimetric quantitation of the trityl fractions, are typically 97.5-99%. Other oligonucleotide synthesis reagents for the 394 Applied Biosystems, Inc. synthesizer include the following: detritylation solution is 3% TCA in methylene chloride (ABI); capping is performed with 16% N-methyl imidazole in THF (ABI) and 10% acetic anhydride/10% 2,6-lutidine in THF (ABI); oxidation solution is 16.9 mM 12, 49 mM pyridine, 9% water in THF (PERSEPTIVE™). Burdick & Jackson Synthesis Grade acetonitrile is used directly from the reagent bottle. S-Ethyltetrazole solution (0.25 M in acetonitrile) is made up from the solid obtained from American International Chemical, Inc. Alternately, for the introduction of phosphorothioate linkages, Beaucage reagent (3H-1,2-Benzodithiol-3-one 1,1-dioxide0.05 M in acetonitrile) is used.

[0321] Deprotection of the RNA is performed using either a two-pot or one-pot protocol. For the two-pot protocol, the polymer-bound trityl-on oligoribonucleotide is transferred to a 4 mL glass screw top vial and suspended in a solution of 40% aq. methylamine (1 mL) at 65° C. for 10 min. After cooling to −20° C., the supernatant is removed from the polymer support. The support is washed three times with 1.0 mL of EtOH:MeCN:H₂O/3:1:1, vortexed and the supernatant is then added to the first supernatant. The combined supernatants, containing the oligoribonucleotide, are dried to a white powder. The base deprotected oligoribonucleotide is resuspended in anhydrous TEA/HF/NMP solution (300 μL of a solution of 1.5 mL N-methylpyrrolidinone, 750 μL TEA and 1 mL TEA-3HF to provide a 1.4 M HF concentration) and heated to 65° C. After 1.5 h, the oligomer is quenched with 1.5 M NH₄HCO₃.

[0322] Alternatively, for the one-pot protocol, the polymer-bound trityl-on oligoribonucleotide is transferred to a 4 mL glass screw top vial and suspended in a solution of 33% ethanolic methylamine/DMSO: 1/1 (0.8 mL) at 65° C. for 15 min. The vial is brought to r.t. TEA•3HF (0.1 mL) is added and the vial is heated at 65° C. for 15 min. The sample is cooled at −20° C. and then quenched with 1.5 M NH₄HCO₃.

[0323] For purification of the trityl-on oligomers, the quenched NH₄HCO₃ solution is loaded onto a C-18 containing cartridge that had been prewashed with acetonitrile followed by 50 mM TEAA. After washing the loaded cartridge with water, the RNA is detritylated with 0.5% TFA for 13 min. The cartridge is then washed again with water, salt exchanged with 1 M NaCl and washed with water again. The oligonucleotide is then eluted with 30% acetonitrile.

[0324] Inactive hammerhead ribozymes or binding attenuated control (BAC) oligonucleotides are synthesized by substituting a U for G₅ and a U for A₁₄ (numbering from Hertel, K. J., et al., 1992, Nucleic Acids Res., 20, 3252). Similarly, one or more nucleotide substitutions can be introduced in other nucleic acid decoy molecules to inactivate the molecule and such molecules can serve as a negative control.

[0325] The average stepwise coupling yields are typically >98% (Wincott et al., 1995 Nucleic Acids Res. 23, 2677-2684). Those of ordinary skill in the art will recognize that the scale of synthesis can be adapted to be larger or smaller than the example described above including but not limited to 96-well format, all that is important is the ratio of chemicals used in the reaction.

[0326] Alternatively, the nucleic acid molecules of the present invention can be synthesized separately and joined together post-synthetically, for example, by ligation (Moore et al., 1992, Science 256, 9923; Draper et al., International PCT publication No. WO 93/23569; Shabarova et al., 1991, Nucleic Acids Research 19, 4247; Bellon et al., 1997, Nucleosides & Nucleotides, 16, 951; Bellon et al., 1997, Bioconjugate Chem. 8, 204).

[0327] The nucleic acid molecules of the present invention can be modified extensively to enhance stability by modification with nuclease resistant groups, for example, 2′-amino, 2′-C-allyl, 2′-flouro, 2′-O-methyl, 2′-H (for a review see Usman and Cedergren, 1992, TIBS 17, 34; Usman et al., 1994, Nucleic Acids Symp. Ser. 31, 163). Ribozymes can be purified by gel electrophoresis using general methods or can be purified by high pressure liquid chromatography (HPLC; see Wincott et al., supra, the totality of which is hereby incorporated herein by reference) and re-suspended in water.

[0328] The sequences of the nucleic acid molecules that are chemically synthesized, useful in this study, are shown in Tables XI, XV, XX, XXI, XXII and XXIII. The nucleic acid sequences listed in Tables IV-XI, XIV-XV and XVIII-XXIII can be formed of ribonucleotides or other nucleotides or non-nucleotides. Such nucleic acid sequences are equivalent to the sequences described specifically in the Tables.

[0329] Optimizing Activity of the Nucleic Acid Molecule of the Invention

[0330] Chemically synthesizing nucleic acid molecules with modifications (base, sugar and/or phosphate) can prevent their degradation by serum ribonucleases, which can increase their potency (see e.g., Eckstein et al., International Publication No. WO 92/07065; Perrault et al., 1990 Nature 344, 565; Pieken et al., 1991, Science 253, 314; Usman and Cedergren, 1992, Trends in Biochem. Sci. 17, 334; Usman et al., International Publication No. WO 93/15187; and Rossi et al., International Publication No. WO 91/03162; Sproat, U.S. Pat. No. 5,334,711; Gold et al., U.S. Pat. No. 6,300,074; and Burgin et al., supra; all of which are incorporated by reference herein). All of the above references describe various chemical modifications that can be made to the base, phosphate and/or sugar moieties of the nucleic acid molecules described herein. Modifications that enhance their efficacy in cells, and removal of bases from nucleic acid molecules to shorten oligonucleotide synthesis times and reduce chemical requirements are desired.

[0331] There are several examples in the art describing sugar, base and phosphate modifications that can be introduced into nucleic acid molecules with significant enhancement in their nuclease stability and efficacy. For example, oligonucleotides are modified to enhance stability and/or enhance biological activity by modification with nuclease resistant groups, for example, 2′-amino, 2′-C-allyl, 2′-flouro, 2′-O-methyl, 2′-H, nucleotide base modifications (for a review see Usman and Cedergren, 1992, TIBS. 17, 34; Usman et al., 1994, Nucleic Acids Symp. Ser. 31, 163; Burgin et al., 1996, Biochemistry, 35, 14090). Sugar modification of nucleic acid molecules have been extensively described in the art (see Eckstein et al., International Publication PCT No. WO 92/07065; Perrault et al. Nature, 1990, 344, 565-568; Pieken et al. Science, 1991, 253, 314-317; Usman and Cedergren, Trends in Biochem. Sci., 1992, 17, 334-339; Usman et al. International Publication PCT No. WO 93/15187; Sproat, U.S. Pat. No. 5,334,711 and Beigelman et al., 1995, J. Biol. Chem., 270, 25702; Beigelman et al., International PCT publication No. WO 97/26270; Beigelman et al., U.S. Pat. No. 5,716,824; Usman et al., U.S. Pat. No. 5,627,053; Woolf et al., International PCT Publication No. WO 98/13526; Thompson et al., U.S. S No. 60/082,404 which was filed on Apr. 20, 1998; Karpeisky et al., 1998, Tetrahedron Lett., 39, 1131; Earnshaw and Gait, 1998, Biopolymers (Nucleic Acid Sciences), 48, 39-55; Verma and Eckstein, 1998, Annu. Rev. Biochem., 67, 99-134; and Burlina et al, 1997, Bioorg. Med. Chem., 5, 1999-2010; all of the references are hereby incorporated in their totality by reference herein). Such publications describe general methods and strategies to determine the location of incorporation of sugar, base and/or phosphate modifications and the like into ribozymes without modulating catalysis, and are incorporated by reference herein. In view of such teachings, similar modifications can be used as described herein to modify the nucleic acid molecules of the instant invention.

[0332] While chemical modification of oligonucleotide internucleotide linkages with phosphorothioate, phosphorothioate, and/or 5′-methylphosphonate linkages improves stability, excessive modifications can cause some toxicity. Therefore, when designing nucleic acid molecules, the amount of these internucleotide linkages should be minimized. The reduction in the concentration of these linkages should lower toxicity, resulting in increased efficacy and higher specificity of these molecules.

[0333] Nucleic acid molecules having chemical modifications that maintain or enhance activity are provided. Such a nucleic acid is also generally more resistant to nucleases than an unmodified nucleic acid. Accordingly, the in vitro and/or in vivo activity should not be significantly lowered. In cases in which modulation is the goal, therapeutic nucleic acid molecules delivered exogenously should optimally be stable within cells until translation of the target RNA has been modulated long enough to reduce the levels of the undesirable protein. This period of time varies between hours to days depending upon the disease state. Improvements in the chemical synthesis of RNA and DNA (Wincott et al., 1995 Nucleic Acids Res. 23, 2677; Caruthers et al., 1992, Methods in Enzymology 211,3-19 (incorporated by reference herein)) have expanded the ability to modify nucleic acid molecules by introducing nucleotide modifications to enhance their nuclease stability, as described above.

[0334] In one embodiment, nucleic acid molecules of the invention include one or more G-clamp nucleotides. A G-clamp nucleotide is a modified cytosine analog wherein the modifications confer the ability to hydrogen bond both Watson-Crick and Hoogsteen faces of a complementary guanine within a duplex, see for example Lin and Matteucci, 1998, J. Am. Chem. Soc., 120, 8531-8532. A single G-clamp analog substation within an oligonucleotide can result in substantially enhanced helical thermal stability and mismatch discrimination when hybridized to complementary oligonucleotides. The inclusion of such nucleotides in nucleic acid molecules of the invention results in both enhanced affinity and specificity to nucleic acid targets. In another embodiment, nucleic acid molecules of the invention include one or more LNA “locked nucleic acid” nucleotides such as a 2′,4′-C methylene bicyclo nucleotide (see for example Wengel et al., International PCT Publication No. WO 00/66604 and WO 99/14226).

[0335] In another embodiment, the invention features conjugates and/or complexes of nucleic acid molecules targeting HBV or HCV. Such conjugates and/or complexes can be used to facilitate delivery of molecules into a biological system, such as a cell. The conjugates and complexes provided by the instant invention can impart therapeutic activity by transferring therapeutic compounds across cellular membranes, altering the pharmacokinetics, and/or modulating the localization of nucleic acid molecules of the invention. The present invention encompasses the design and synthesis of novel conjugates and complexes for the delivery of molecules, including, but not limited to, small molecules, lipids, phospholipids, nucleosides, nucleotides, nucleic acids, antibodies, toxins, negatively charged polymers and other polymers, for example proteins, peptides, hormones, carbohydrates, polyethylene glycols, or polyamines, across cellular membranes. In general, the transporters described are designed to be used either individually or as part of a multi-component system, with or without degradable linkers. These compounds are expected to improve delivery and/or localization of nucleic acid molecules of the invention into a number of cell types originating from different tissues, in the presence or absence of serum (see Sullenger and Cech, U.S. Pat. No. 5,854,038). Conjugates of the molecules described herein can be attached to biologically active molecules via linkers that are biodegradable, such as biodegradable nucleic acid linker molecules.

[0336] The term “biodegradable nucleic acid linker molecule” as used herein, refers to a nucleic acid molecule that is designed as a biodegradable linker to connect one molecule to another molecule, for example, a biologically active molecule. The stability of the biodegradable nucleic acid linker molecule can be modulated by using various combinations of ribonucleotides, deoxyribonucleotides, and chemically modified nucleotides, for example, 2′-O-methyl, 2′-fluoro, 2′-amino, 2′-O-amino, 2′-C-allyl, 2′-O-allyl, and other 2′-modified or base modified nucleotides. The biodegradable nucleic acid linker molecule can be a dimer, trimer, tetramer or longer nucleic acid molecule, for example, an oligonucleotide of about 2, 3, 4, 5, 6, 7, 8, 9, 10, 11, 12, 13, 14, 15, 16, 17, 18, 19, or 20 nucleotides in length, or can comprise a single nucleotide with a phosphorus-based linkage, for example, a phosphoramidate or phosphodiester linkage. The biodegradable nucleic acid linker molecule can also comprise nucleic acid backbone, nucleic acid sugar, or nucleic acid base modifications.

[0337] The term “biodegradable” as used herein, refers to degradation in a biological system, for example enzymatic degradation or chemical degradation.

[0338] The term “biologically active molecule” as used herein, refers to compounds or molecules that are capable of eliciting or modifying a biological response in a system. Non-limiting examples of biologically active molecules contemplated by the instant invention include therapeutically active molecules such as antibodies, hormones, antivirals, peptides, proteins, chemotherapeutics, small molecules, vitamins, co-factors, nucleosides, nucleotides, oligonucleotides, enzymatic nucleic acids, antisense nucleic acids, triplex forming oligonucleotides, 2,5-A chimeras, siRNA, dsRNA, allozymes, aptamers, decoys and analogs thereof. Biologically active molecules of the invention also include molecules capable of modulating the pharmacokinetics and/or pharmacodynamics of other biologically active molecules, for example, lipids and polymers such as polyamines, polyamides, polyethylene glycol and other polyethers.

[0339] The term “phospholipid” as used herein, refers to a hydrophobic molecule comprising at least one phosphorus group. For example, a phospholipid can comprise a phosphorus-containing group and saturated or unsaturated alkyl group, optionally substituted with OH, COOH, oxo, amine, or substituted or unsubstituted aryl groups.

[0340] Therapeutic nucleic acid molecules (e.g., decoy nucleic acid molecules) delivered exogenously optimally are stable within cells until reverse trascription of the pregenomic RNA has been modulated long enough to reduce the levels of HBV or HCV DNA. The nucleic acid molecules are resistant to nucleases in order to function as effective intracellular therapeutic agents. Improvements in the chemical synthesis of nucleic acid molecules described in the instant invention and in the art have expanded the ability to modify nucleic acid molecules by introducing nucleotide modifications to enhance their nuclease stability as described above.

[0341] In yet another embodiment, nucleic acid molecules having chemical modifications that maintain or enhance enzymatic activity are provided. Such nucleic acids are also generally more resistant to nucleases than unmodified nucleic acids. Thus, in vitro and/or in vivo the activity should not be significantly lowered. As exemplified herein, such nucleic acid molecules are useful in vitro and/or in vivo even if activity over all is reduced 10 fold (Burgin et al., 1996, Biochemistry, 35, 14090).

[0342] Use of the nucleic acid-based molecules of the invention will lead to better treatment of the disease progression by affording the possibility of combination therapies (e.g., multiple antisense, nucleic acid decoy, or nucleic acid aptamer molecules targeted to different genes; nucleic acid molecules coupled with known small molecule modulators ors; or intermittent treatment with combinations of molecules (including different motifs) and/or other chemical or biological molecules). The treatment of patients with nucleic acid molecules may also include combinations of different types of nucleic acid molecules.

[0343] In another aspect the nucleic acid molecules comprise a 5′ and/or a 3′-cap structure.

[0344] By “cap structure” is meant chemical modifications, which have been incorporated at either terminus of the oligonucleotide (see, for example, Wincott et al., WO 97/26270, incorporated by reference herein). These terminal modifications protect the nucleic acid molecule from exonuclease degradation, and may help in delivery and/or localization within a cell. The cap may be present at the 5′-terminus (5′-cap) or at the 3′-terminal (3′-cap) or may be present on both termini. In non-limiting examples: the 5′-cap is selected from the group comprising inverted abasic residue (moiety); 4′,5′-methylene nucleotide; 1-(beta-D-erythrofuranosyl) nucleotide, 4′-thio nucleotide; carbocyclic nucleotide; 1,5-anhydrohexitol nucleotide; L-nucleotides; alpha-nucleotides; modified base nucleotide; phosphorodithioate linkage; threo-pentofuranosyl nucleotide; acyclic 3′,4′-seco nucleotide; acyclic 3,4-dihydroxybutyl nucleotide; acyclic 3,5-dihydroxypentyl nucleotide, 3′-3′-inverted nucleotide moiety; 3′-3′-inverted abasic moiety; 3′-2′-inverted nucleotide moiety; 3′-2′-inverted abasic moiety; 1,4-butanediol phosphate; 3′-phosphoramidate; hexylphosphate; aminohexyl phosphate; 3′-phosphate; 3′-phosphorothioate; phosphorodithioate; or bridging or non-bridging methylphosphonate moiety (for more details, see Wincott et al., International PCT publication No. WO 97/26270, incorporated by reference herein).

[0345] In yet another preferred embodiment, the 3′-cap is selected from a group comprising, 4′,5′-methylene nucleotide; 1-(beta-D-erythrofuranosyl) nucleotide; 4′-thio nucleotide, carbocyclic nucleotide; 5′-amino-alkyl phosphate; 1,3-diamino-2-propyl phosphate; 3-aminopropyl phosphate; 6-aminohexyl phosphate; 1,2-aminododecyl phosphate; hydroxypropyl phosphate; 1,5-anhydrohexitol nucleotide; L-nucleotide; alpha-nucleotide; modified base nucleotide; phosphorodithioate; threo-pentofuranosyl nucleotide; acyclic 3′,4′-seco nucleotide; 3,4-dihydroxybutyl nucleotide; 3,5-dihydroxypentyl nucleotide, 5′-5′-inverted nucleotide moiety; 5′-5′-inverted abasic moiety; 5′-phosphoramidate; 5′-phosphorothioate; 1,4-butanediol phosphate; 5′-amino; bridging and/or non-bridging 5′-phosphoramidate, phosphorothioate and/or phosphorodithioate, bridging or non bridging methylphosphonate and 5′-mercapto moieties (for more details see Beaucage and Iyer, 1993, Tetrahedron 49, 1925; incorporated by reference herein).

[0346] By the term “non-nucleotide” is meant any group or compound which can be incorporated into a nucleic acid chain in the place of one or more nucleotide units, including either sugar and/or phosphate substitutions, and allows the remaining bases to exhibit their enzymatic activity. The group or compound is abasic in that it does not contain a commonly recognized nucleotide base, such as adenosine, guanine, cytosine, uracil or thymine.

[0347] The term “alkyl” as used herein refers to a saturated aliphatic hydrocarbon, including straight-chain, branched-chain “isoalkyl”, and cyclic alkyl groups. The term “alkyl” also comprises alkoxy, alkyl-thio, alkyl-thio-alkyl, alkoxyalkyl, alkylamino, alkenyl, alkynyl, alkoxy, cycloalkenyl, cycloalkyl, cycloalkylalkyl, heterocycloalkyl, heteroaryl, C1-C6 hydrocarbyl, aryl or substituted aryl groups. Preferably, the alkyl group has 1 to 12 carbons. More preferably it is a lower alkyl of from about 1 to 7 carbons, more preferably about 1 to 4 carbons. The alkyl group can be substituted or unsubstituted. When substituted the substituted group(s) preferably comprise hydroxy, oxy, thio, amino, nitro, cyano, alkoxy, alkyl-thio, alkyl-thio-alkyl, alkoxyalkyl, alkylamino, silyl, alkenyl, alkynyl, alkoxy, cycloalkenyl, cycloalkyl, cycloalkylalkyl, heterocycloalkyl, heteroaryl, C1-C6 hydrocarbyl, aryl or substituted aryl groups. The term “alkyl” also includes alkenyl groups containing at least one carbon-carbon double bond, including straight-chain, branched-chain, and cyclic groups. Preferably, the alkenyl group has about 2 to 12 carbons. More preferably it is a lower alkenyl of from about 2 to 7 carbons, more preferably about 2 to 4 carbons. The alkenyl group can be substituted or unsubstituted. When substituted the substituted group(s) preferably comprise hydroxy, oxy, thio, amino, nitro, cyano, alkoxy, alkyl-thio, alkyl-thio-alkyl, alkoxyalkyl, alkylamino, silyl, alkenyl, alkynyl, alkoxy, cycloalkenyl, cycloalkyl, cycloalkylalkyl, heterocycloalkyl, heteroaryl, C1-C6 hydrocarbyl, aryl or substituted aryl groups. The term “alkyl” also includes alkynyl groups containing at least one carbon-carbon triple bond, including straight-chain, branched-chain, and cyclic groups. Preferably, the alkynyl group has about 2 to 12 carbons. More preferably it is a lower alkynyl of from about 2 to 7 carbons, more preferably about 2 to 4 carbons. The alkynyl group can be substituted or unsubstituted. When substituted the substituted group(s) preferably comprise hydroxy, oxy, thio, amino, nitro, cyano, alkoxy, alkyl-thio, alkyl-thio-alkyl, alkoxyalkyl, alkylamino, silyl, alkenyl, alkynyl, alkoxy, cycloalkenyl, cycloalkyl, cycloalkylalkyl, heterocycloalkyl, heteroaryl, C1-C6 hydrocarbyl, aryl or substituted aryl groups. Alkyl groups or moieties of the invention can also include aryl, alkylaryl, carbocyclic aryl, heterocyclic aryl, amide and ester groups. The preferred substituent(s) of aryl groups are halogen, trihalomethyl, hydroxyl, SH, OH, cyano, alkoxy, alkyl, alkenyl, alkynyl, and amino groups. An “alkylaryl” group refers to an alkyl group (as described above) covalently joined to an aryl group (as described above). Carbocyclic aryl groups are groups wherein the ring atoms on the aromatic ring are all carbon atoms. The carbon atoms are optionally substituted. Heterocyclic aryl groups are groups having from about 1 to 3 heteroatoms as ring atoms in the aromatic ring and the remainder of the ring atoms are carbon atoms. Suitable heteroatoms include oxygen, sulfur, and nitrogen, and include furanyl, thienyl, pyridyl, pyrrolyl, N-lower alkyl pyrrolo, pyrimidyl, pyrazinyl, imidazolyl and the like, all optionally substituted. An “amide” refers to an —C(O)—NH—R, where R is either alkyl, aryl, alkylaryl or hydrogen. An “ester” refers to an —C(O)—OR′, where R is either alkyl, aryl, alkylaryl or hydrogen.

[0348] The term “alkoxyalkyl” as used herein refers to an alkyl-O-alkyl ether, for example methoxyethyl or ethoxymethyl.

[0349] The term “alkyl-thio-alkyl” as used herein refers to an alkyl-S-alkyl thioether, for example methylthiomethyl or methylthioethyl.

[0350] The term “amination” as used herein refers to a process in which an amino group or substituted amine is introduced into an organic molecule.

[0351] The term “exocyclic amine protecting moiety” as used herein refers to a nucleobase amino protecting group compatible with oligonucleotide synthesis, for example an acyl or amide group.

[0352] The term “alkenyl” as used herein refers to a straight or branched hydrocarbon of a designed number of carbon atoms containing at least one carbon-carbon double bond. Examples of “alkenyl” include vinyl, allyl, and 2-methyl-3-heptene.

[0353] The term “alkoxy” as used herein refers to an alkyl group of indicated number of carbon atoms attached to the parent molecular moiety through an oxygen bridge. Examples of alkoxy groups include, for example, methoxy, ethoxy, propoxy and isopropoxy.

[0354] The term “alkynyl” as used herein refers to a straight or branched hydrocarbon of a designed number of carbon atoms containing at least one carbon-carbon triple bond. Examples of “alkynyl” include propargyl, propyne, and 3-hexyne.

[0355] The term “aryl” as used herein refers to an aromatic hydrocarbon ring system containing at least one aromatic ring. The aromatic ring can optionally be fused or otherwise attached to other aromatic hydrocarbon rings or non-aromatic hydrocarbon rings. Examples of aryl groups include, for example, phenyl, naphthyl, 1,2,3,4-tetrahydronaphthalene and biphenyl. Preferred examples of aryl groups include phenyl and naphthyl.

[0356] The term “cycloalkenyl” as used herein refers to a C3-C8 cyclic hydrocarbon containing at least one carbon-carbon double bond. Examples of cycloalkenyl include cyclopropenyl, cyclobutenyl, cyclopentenyl, cyclopentadiene, cyclohexenyl, 1,3-cyclohexadiene, cycloheptenyl, cycloheptatrienyl, and cyclooctenyl.

[0357] The term “cycloalkyl” as used herein refers to a C3-C8 cyclic hydrocarbon. Examples of cycloalkyl include cyclopropyl, cyclobutyl, cyclopentyl, cyclohexyl, cycloheptyl and cyclooctyl.

[0358] The term “cycloalkylalkyl,” as used herein, refers to a C3-C7 cycloalkyl group attached to the parent molecular moiety through an alkyl group, as defined above. Examples of cycloalkylalkyl groups include cyclopropylmethyl and cyclopentylethyl.

[0359] The terms “halogen” or “halo” as used herein refers to indicate fluorine, chlorine, bromine, and iodine.

[0360] The term “heterocycloalkyl,” as used herein refers to a non-aromatic ring system containing at least one heteroatom selected from nitrogen, oxygen, and sulfur. The heterocycloalkyl ring can be optionally fused to or otherwise attached to other heterocycloalkyl rings and/or non-aromatic hydrocarbon rings. Preferred heterocycloalkyl groups have from 3 to 7 members. Examples of heterocycloalkyl groups include, for example, piperazine, morpholine, piperidine, tetrahydrofuran, pyrrolidine, and pyrazole. Preferred heterocycloalkyl groups include piperidinyl, piperazinyl, morpholinyl, and pyrolidinyl.

[0361] The term “heteroaryl” as used herein refers to an aromatic ring system containing at least one heteroatom selected from nitrogen, oxygen, and sulfur. The heteroaryl ring can be fused or otherwise attached to one or more heteroaryl rings, aromatic or non-aromatic hydrocarbon rings or heterocycloalkyl rings. Examples of heteroaryl groups include, for example, pyridine, furan, thiophene, 5,6,7,8-tetrahydroisoquinoline and pyrimidine. Preferred examples of heteroaryl groups include thienyl, benzothienyl, pyridyl, quinolyl, pyrazinyl, pyrimidyl, imidazolyl, benzimidazolyl, furanyl, benzofuranyl, thiazolyl, benzothiazolyl, isoxazolyl, oxadiazolyl, isothiazolyl, benzisothiazolyl, triazolyl, tetrazolyl, pyrrolyl, indolyl, pyrazolyl, and benzopyrazolyl.

[0362] The term “C1-C6 hydrocarbyl” as used herein refers to straight, branched, or cyclic alkyl groups having 1-6 carbon atoms, optionally containing one or more carbon-carbon double or triple bonds. Examples of hydrocarbyl groups include, for example, methyl, ethyl, propyl, isopropyl, n-butyl, sec-butyl, tert-butyl, pentyl, 2-pentyl, isopentyl, neopentyl, hexyl, 2-hexyl, 3-hexyl, 3-methylpentyl, vinyl, 2-pentene, cyclopropylmethyl, cyclopropyl, cyclohexylmethyl, cyclohexyl and propargyl. When reference is made herein to C1-C6 hydrocarbyl containing one or two double or triple bonds it is understood that at least two carbons are present in the alkyl for one double or triple bond, and at least four carbons for two double or triple bonds.

[0363] The term “nucleotide” as used herein refers to a heterocyclic nitrogenous base in N-glycosidic linkage with a phosphorylated sugar. Nucleotides are recognized in the art to include natural bases (standard), and modified bases well known in the art. Such bases are generally located at the 1′ position of a nucleotide sugar moiety. Nucleotides generally comprise a base, sugar and a phosphate group. The nucleotides can be unmodified or modified at the sugar, phosphate and/or base moiety, (also referred to interchangeably as nucleotide analogs, modified nucleotides, non-natural nucleotides, non-standard nucleotides and other; see for example, Usman and McSwiggen, supra; Eckstein et al., International PCT Publication No. WO 92/07065; Usman et al., International PCT Publication No. WO 93/15187; Uhlman & Peyman, supra all are hereby incorporated by reference herein. There are several examples of modified nucleic acid bases known in the art as summarized by Limbach et al., 1994, Nucleic Acids Res. 22, 2183. Some of the non-limiting examples of chemically modified and other natural nucleic acid bases that can be introduced into nucleic acids include, for example, inosine, purine, pyridin-4-one, pyridin-2-one, phenyl, pseudouracil, 2,4,6-trimethoxy benzene, 3-methyl uracil, dihydrouridine, naphthyl, aminophenyl, 5-alkylcytidines (e.g., 5-methylcytidine), 5-alkyluridines (e.g., ribothymidine), 5-halouridine (e.g., 5-bromouridine) or 6-azapyrimidines or 6-alkylpyrimidines (e.g. 6-methyluridine), propyne, quesosine, 2-thiouridine, 4-thiouridine, wybutosine, wybutoxosine, 4-acetylcytidine, 5-(carboxyhydroxymethyl)uridine, 5′-carboxymethylaminomethyl-2-thiouridine, 5-carboxymethylaminomethyluridine, beta-D-galactosylqueosine, 1-methyladenosine, 1-methylinosine, 2,2-dimethylguanosine, 3-methylcytidine, 2-methyladenosine, 2-methylguanosine, N6-methyladenosine, 7-methylguanosine, 5-methoxyaminomethyl-2-thiouridine, 5-methylaminomethyluridine, 5-methylcarbonylmethyluridine, 5-methyloxyuridine, 5-methyl-2-thiouridine, 2-methylthio-N-6-isopentenyladenosine, beta-D-mannosylqueosine, uridine-5-oxyacetic acid, 2-thiocytidine, threonine derivatives and others (Burgin et al., 1996, Biochemistry, 35, 14090; Uhlman & Peyman, supra). By “modified bases” in this aspect is meant nucleotide bases other than adenine, guanine, cytosine and uracil at 1′ position or their equivalents; such bases can be used at any position, for example, within the catalytic core of an enzymatic nucleic acid molecule and/or in the substrate-binding regions of the nucleic acid molecule.

[0364] The term “nucleoside” as used herein refers to a heterocyclic nitrogenous base in N-glycosidic linkage with a sugar. Nucleosides are recognized in the art to include natural bases (standard), and modified bases well known in the art. Such bases are generally located at the 1′ position of a nucleoside sugar moiety. Nucleosides generally comprise a base and sugar group. The nucleosides can be unmodified or modified at the sugar, and/or base moiety (also referred to interchangeably as nucleoside analogs, modified nucleosides, non-natural nucleosides, non-standard nucleosides and other; see for example, Usman and McSwiggen, supra; Eckstein et al., International PCT Publication No. WO 92/07065; Usman et al., International PCT Publication No. WO 93/15187; Uhlman & Peyman, supra all are hereby incorporated by reference herein). There are several examples of modified nucleic acid bases known in the art as summarized by Limbach et al., 1994, Nucleic Acids Res. 22, 2183. Some of the non-limiting examples of chemically modified and other natural nucleic acid bases that can be introduced into nucleic acids include, inosine, purine, pyridin-4-one, pyridin-2-one, phenyl, pseudouracil, 2,4,6-trimethoxy benzene, 3-methyl uracil, dihydrouridine, naphthyl, aminophenyl, 5-alkylcytidines (e.g., 5-methylcytidine), 5-alkyluridines (e.g., ribothymidine), 5-halouridine (e.g., 5-bromouridine) or 6-azapyrimidines or 6-alkylpyrimidines (e.g. 6-methyluridine), propyne, quesosine, 2-thiouridine, 4-thiouridine, wybutosine, wybutoxosine, 4-acetylcytidine, 5-(carboxyhydroxymethyl)uridine, 5′-carboxymethylaminomethyl-2-thiouridine, 5-carboxymethylaminomethyluridine, beta-D-galactosylqueosine, 1-methyladenosine, 1-methylinosine, 2,2-dimethylguanosine, 3-methylcytidine, 2-methyladenosine, 2-methylguanosine, N6-methyladenosine, 7-methylguanosine, 5-methoxyaminomethyl-2-thiouridine, 5-methylaminomethyluridine, 5-methylcarbonylmethyluridine, 5-methyloxyuridine, 5-methyl-2-thiouridine, 2-methylthio-N-6-isopentenyladenosine, beta-D-mannosylqueosine, uridine-5-oxyacetic acid, 2-thiocytidine, threonine derivatives and others (Burgin et al., 1996, Biochemistry, 35, 14090; Uhlman & Peyman, supra). By “modified bases” in this aspect is meant nucleoside bases other than adenine, guanine, cytosine and uracil at 1′ position or their equivalents; such bases can be used at any position, for example, within the catalytic core of an enzymatic nucleic acid molecule and/or in the substrate-binding regions of the nucleic acid molecule.

[0365] In one embodiment, the invention features modified nucleic acid molecules with phosphate backbone modifications comprising one or more phosphorothioate, phosphorodithioate, methylphosphonate, morpholino, amidate carbamate, carboxymethyl, acetamidate, polyamide, sulfonate, sulfonamide, sulfamate, formacetal, thioformacetal, and/or alkylsilyl, substitutions. For a review of oligonucleotide backbone modifications see Hunziker and Leumann, 1995, Nucleic Acid Analogues: Synthesis and Properties, in Modern Synthetic Methods, VCH, 331-417, and Mesmaeker et al., 1994, Novel Backbone Replacements for Oligonucleotides, in Carbohydrate Modifications in Antisense Research, ACS, 24-39. These references are hereby incorporated by reference herein.

[0366] The term “abasic” as used herein refers to sugar moieties lacking a base or having other chemical groups in place of a base at the 1′ position, for example a 3′,3′-linked or 5′,5′-linked deoxyabasic ribose derivative (for more details see Wincott et al., International PCT publication No. WO 97/26270).

[0367] The term “unmodified nucleoside” as used herein refers to one of the bases adenine, cytosine, guanine, thymine, uracil joined to the 1′ carbon of β-D-ribo-furanose.

[0368] The term “modified nucleoside” as used herein refers to any nucleotide base which contains a modification in the chemical structure of an unmodified nucleotide base, sugar and/or phosphate.

[0369] In connection with 2′-modified nucleotides as described for the present invention, by “amino” is meant 2′-NH₂ or 2′-O—NH₂, which can be modified or unmodified. Such modified groups are described, for example, in Eckstein et al., U.S. Pat. No. 5,672,695 and Matulic-Adamic et al., WO 98/28317, respectively, which are both incorporated by reference in their entireties.

[0370] Various modifications to nucleic acid (e.g., enzymatic nucleic acid, antisense, decoy, aptamer, siRNA, triplex oligonucleotides, 2,5-A oligonucleotides and other nucleic acid molecules) structure can be made to enhance the utility of these molecules. For example, such modifications can enhance shelf life, half-life in vitro, stability, and ease of introduction of such oligonucleotides to the target site, including e.g., enhancing penetration of cellular membranes and conferring the ability to recognize and bind to targeted cells.

[0371] Use of these molecules can lead to better treatment of the disease progression by affording the possibility of combination therapies (e.g., multiple nucleic acid molecules targeted to different genes, nucleic acid molecules coupled with known small molecule inhibitors, or intermittent treatment with combinations of nucleic acid molecules (including different nucleic acid molecule motifs) and/or other chemical or biological molecules). The treatment of patients with nucleic acid molecules can also include combinations of different types of nucleic acid molecules. Therapies can be devised which include a mixture of enzymatic nucleic acid molecules (including different enzymatic nucleic acid molecule motifs), antisense, decoy, aptamer and/or 2-5A chimera molecules to one or more targets to alleviate symptoms of a disease.

[0372] Administration of Nucleic Acid Molecules

[0373] Methods for the delivery of nucleic acid molecules are described in Akhtar et al., 1992, Trends Cell Bio., 2, 139; Delivery Strategies for Antisense Oligonucleotide Therapeutics, ed. Akhtar, 1995, Maurer et al., 1999, Mol. Membr. Biol., 16, 129-140; Hofland and Huang, 1999, Handb. Exp. Pharmacol., 137, 165-192; and Lee et al., 2000, ACS Symp. Ser., 752, 184-192, Sullivan et al., PCT WO 94/02595, further describes the general methods for delivery of enzymatic nucleic acid molecules. These protocols can be utilized for the delivery of virtually any nucleic acid molecule. Nucleic acid molecules can be administered to cells by a variety of methods known to those of skill in the art, including, but not restricted to, encapsulation in liposomes, by iontophoresis, or by incorporation into other vehicles, such as hydrogels, cyclodextrins, biodegradable nanocapsules, and bioadhesive microspheres, or by proteinaceous vectors (O'Hare and Normand, International PCT Publication No. WO 00/53722). Alternatively, the nucleic acid/vehicle combination is locally delivered by direct injection or by use of an infusion pump. Direct injection of the nucleic acid molecules of the invention, whether subcutaneous, intramuscular, or intradermal, can take place using standard needle and syringe methodologies, or by needle-free technologies such as those described in Conry et al., 1999, Clin. Cancer Res., 5, 2330-2337 and Barry et al., International PCT Publication No. WO 99/31262. The molecules of the instant invention can be used as pharmaceutical agents. Pharmaceutical agents prevent, modulate the occurrence, or treat (alleviate a symptom to some extent, preferably all of the symptoms) of a disease state in a patient.

[0374] Thus, the invention features a pharmaceutical composition comprising one or more nucleic acid(s) of the invention in an acceptable carrier, such as a stabilizer, buffer, and the like. The negatively charged polynucleotides of the invention can be administered (e.g., RNA, DNA or protein) and introduced into a patient by any standard means, with or without stabilizers, buffers, and the like, to form a pharmaceutical composition. When it is desired to use a liposome delivery mechanism, standard protocols for formation of liposomes can be followed. The compositions of the present invention may also be formulated and used as tablets, capsules or elixirs for oral administration, suppositories for rectal administration, sterile solutions, suspensions for injectable administration, and the other compositions known in the art.

[0375] The present invention also includes pharmaceutically acceptable formulations of the compounds described. These formulations include salts of the above compounds, e.g., acid addition salts, for example, salts of hydrochloric, hydrobromic, acetic acid, and benzene sulfonic acid.

[0376] A pharmacological composition or formulation refers to a composition or formulation in a form suitable for administration, e.g., systemic administration, into a cell or patient, including for example a human. Suitable forms, in part, depend upon the use or the route of entry, for example oral, transdermal, or by injection. Such forms should not prevent the composition or formulation from reaching a target cell (i.e., a cell to which the negatively charged nucleic acid is desirable for delivery). For example, pharmacological compositions injected into the blood stream should be soluble. Other factors are known in the art, and include considerations such as toxicity and forms that prevent the composition or formulation from exerting its effect.

[0377] By “systemic administration” is meant in vivo systemic absorption or accumulation of drugs in the blood stream followed by distribution throughout the entire body. Administration routes which lead to systemic absorption include, without limitation: intravenous, subcutaneous, intraperitoneal, inhalation, oral, intrapulmonary and intramuscular. Each of these administration routes expose the desired negatively charged polymers, e.g., nucleic acids, to an accessible diseased tissue. The rate of entry of a drug into the circulation has been shown to be a function of molecular weight or size. The use of a liposome or other drug carrier comprising the compounds of the instant invention can potentially localize the drug, for example, in certain tissue types, such as the tissues of the reticular endothelial system (RES). A liposome formulation that can facilitate the association of drug with the surface of cells, such as, lymphocytes and macrophages is also useful. This approach may provide enhanced delivery of the drug to target cells by taking advantage of the specificity of macrophage and lymphocyte immune recognition of abnormal cells, such as cancer cells.

[0378] By “pharmaceutically acceptable formulation” is meant, a composition or formulation that allows for the effective distribution of the nucleic acid molecules of the instant invention in the physical location most suitable for their desired activity. Nonlimiting examples of agents suitable for formulation with the nucleic acid molecules of the instant invention include: P-glycoprotein inhibitors (such as Pluronic P85), which can enhance entry of drugs into the CNS (Jolliet-Riant and Tillement, 1999, Fundam. Clin. Pharmacol., 13, 16-26); biodegradable polymers, such as poly (DL-lactide-coglycolide) microspheres for sustained release delivery after intracerebral implantation (Emerich, D F et al, 1999, Cell Transplant, 8, 47-58) (Alkermes, Inc. Cambridge, Mass.); and loaded nanoparticles, such as those made of polybutylcyanoacrylate, which can deliver drugs across the blood brain barrier and can alter neuronal uptake mechanisms (Prog Neuropsychopharmacol Biol Psychiatry, 23, 941-949, 1999). Other non-limiting examples of delivery strategies for the nucleic acid molecules of the instant invention include material described in Boado et al., 1998, J. Pharm. Sci., 87, 1308-1315; Tyler et al., 1999, FEBS Lett., 421, 280-284; Pardridge et al., 1995, PNAS USA., 92, 5592-5596; Boado, 1995, Adv. Drug Delivery Rev., 15, 73-107; Aldrian-Herrada et al., 1998, Nucleic Acids Res., 26, 4910-4916; and Tyler et al., 1999, PNAS USA., 96, 7053-7058.

[0379] The invention also features the use of the composition comprising surface-modified liposomes containing poly (ethylene glycol) lipids (PEG-modified, or long-circulating liposomes or stealth liposomes). These formulations offer a method for increasing the accumulation of drugs in target tissues. This class of drug carriers resists opsonization and elimination by the mononuclear phagocytic system (MPS or RES), thereby enabling longer blood circulation times and enhanced tissue exposure for the encapsulated drug (Lasic et al. Chem. Rev. 1995, 95, 2601-2627; Ishiwata et al., Chem. Pharm. Bull. 1995, 43, 1005-1011). Such liposomes have been shown to accumulate selectively in tumors, presumably by extravasation and capture in the neovascularized target tissues (Lasic et al., Science 1995, 267, 1275-1276; Oku et al., 1995, Biochim. Biophys. Acta, 1238, 86-90). The long-circulating liposomes enhance the pharmacokinetics and pharmacodynamics of DNA and RNA, particularly compared to conventional cationic liposomes which are known to accumulate in tissues of the MPS (Liu et al., J. Biol. Chem. 1995, 42, 24864-24870; Choi et al., International PCT Publication No. WO 96/10391; Ansell et al., International PCT Publication No. WO 96/10390; Holland et al., International PCT Publication No. WO 96/10392). Long-circulating liposomes are also likely to protect drugs from nuclease degradation to a greater extent compared to cationic liposomes, based on their ability to avoid accumulation in metabolically aggressive MPS tissues such as the liver and spleen.

[0380] The present invention also includes compositions prepared for storage or administration, which include a pharmaceutically effective amount of the desired compounds in a pharmaceutically acceptable carrier or diluent. Acceptable carriers or diluents for therapeutic use are well known in the pharmaceutical art, and are described, for example, in Remington's Pharmaceutical Sciences, Mack Publishing Co. (A. R. Gennaro edit. 1985) hereby incorporated by reference herein. For example, preservatives, stabilizers, dyes and flavoring agents may be provided. These include sodium benzoate, sorbic acid and esters of p-hydroxybenzoic acid. In addition, antioxidants and suspending agents may be used.

[0381] A pharmaceutically effective dose is that dose required to prevent, inhibit the occurrence of, or treat (alleviate a symptom to some extent, preferably all of the symptoms) a disease state. The pharmaceutically effective dose depends on the type of disease, the composition used, the route of administration, the type of mammal being treated, the physical characteristics of the specific mammal under consideration, concurrent medication, and other factors that those skilled in the medical arts will recognize. Generally, an amount between 0.1 mg/kg and 100 mg/kg body weight/day of active ingredients is administered dependent upon potency of the negatively charged polymer.

[0382] The present invention also includes compositions prepared for storage or administration that include a pharmaceutically effective amount of the desired compounds in a pharmaceutically acceptable carrier or diluent. Acceptable carriers or diluents for therapeutic use are well known in the pharmaceutical art, and are described, for example, in Remington's Pharmaceutical Sciences, Mack Publishing Co. (A. R. Gennaro edit. 1985), hereby incorporated by reference herein. For example, preservatives, stabilizers, dyes and flavoring agents can be provided. These include sodium benzoate, sorbic acid and esters of p-hydroxybenzoic acid. In addition, antioxidants and suspending agents can be used.

[0383] A pharmaceutically effective dose is that dose required to prevent, inhibit the occurrence, or treat (alleviate a symptom to some extent, preferably all of the symptoms) of a disease state. The pharmaceutically effective dose depends on the type of disease, the composition used, the route of administration, the type of mammal being treated, the physical characteristics of the specific mammal under consideration, concurrent medication, and other factors that those skilled in the medical arts will recognize. Generally, an amount between 0.1 mg/kg and 100 mg/kg body weight/day of active ingredients is administered dependent upon potency of the negatively charged polymer.

[0384] The nucleic acid molecules of the invention and formulations thereof can be administered orally, topically, parenterally, by inhalation or spray, or rectally in dosage unit formulations containing conventional non-toxic pharmaceutically acceptable carriers, adjuvants and/or vehicles. The term parenteral as used herein includes percutaneous, subcutaneous, intravascular (e.g., intravenous), intramuscular, or intrathecal injection or infusion techniques and the like. In addition, there is provided a pharmaceutical formulation comprising a nucleic acid molecule of the invention and a pharmaceutically acceptable carrier. One or more nucleic acid molecules of the invention can be present in association with one or more non-toxic pharmaceutically acceptable carriers and/or diluents and/or adjuvants, and if desired other active ingredients. The pharmaceutical compositions containing nucleic acid molecules of the invention can be in a form suitable for oral use, for example, as tablets, troches, lozenges, aqueous or oily suspensions, dispersible powders or granules, emulsion, hard or soft capsules, or syrups or elixirs.

[0385] Compositions intended for oral use can be prepared according to any method known to the art for the manufacture of pharmaceutical compositions and such compositions can contain one or more such sweetening agents, flavoring agents, coloring agents or preservative agents in order to provide pharmaceutically elegant and palatable preparations. Tablets contain the active ingredient in admixture with non-toxic pharmaceutically acceptable excipients that are suitable for the manufacture of tablets. These excipients can be, for example, inert diluents; such as calcium carbonate, sodium carbonate, lactose, calcium phosphate or sodium phosphate; granulating and disintegrating agents, for example, corn starch, or alginic acid; binding agents, for example starch, gelatin or acacia; and lubricating agents, for example magnesium stearate, stearic acid or talc. The tablets can be uncoated or they can be coated by known techniques. In some cases such coatings can be prepared by known techniques to delay disintegration and absorption in the gastrointestinal tract and thereby provide a sustained action over a longer period. For example, a time delay material such as glyceryl monosterate or glyceryl distearate can be employed.

[0386] Formulations for oral use can also be presented as hard gelatin capsules wherein the active ingredient is mixed with an inert solid diluent, for example, calcium carbonate, calcium phosphate or kaolin, or as soft gelatin capsules wherein the active ingredient is mixed with water or an oil medium, for example peanut oil, liquid paraffin or olive oil.

[0387] Aqueous suspensions contain the active materials in admixture with excipients suitable for the manufacture of aqueous suspensions. Such excipients are suspending agents, for example sodium carboxymethylcellulose, methylcellulose, hydropropyl-methylcellulose, sodium alginate, polyvinylpyrrolidone, gum tragacanth and gum acacia; dispersing or wetting agents can be a naturally-occurring phosphatide, for example, lecithin, or condensation products of an alkylene oxide with fatty acids, for example polyoxyethylene stearate, or condensation products of ethylene oxide with long chain aliphatic alcohols, for example heptadecaethyleneoxycetanol, or condensation products of ethylene oxide with partial esters derived from fatty acids and a hexitol such as polyoxyethylene sorbitol monooleate, or condensation products of ethylene oxide with partial esters derived from fatty acids and hexitol anhydrides, for example polyethylene sorbitan monooleate. The aqueous suspensions can also contain one or more preservatives, for example ethyl, or n-propyl p-hydroxybenzoate, one or more coloring agents, one or more flavoring agents, and one or more sweetening agents, such as sucrose or saccharin.

[0388] Oily suspensions can be formulated by suspending the active ingredients in a vegetable oil, for example arachis oil, olive oil, sesame oil or coconut oil, or in a mineral oil such as liquid paraffin. The oily suspensions can contain a thickening agent, for example beeswax, hard paraffin or cetyl alcohol. Sweetening agents and flavoring agents can be added to provide palatable oral preparations. These compositions can be preserved by the addition of an anti-oxidant such as ascorbic acid.

[0389] Dispersible powders and granules suitable for preparation of an aqueous suspension by the addition of water provide the active ingredient in admixture with a dispersing or wetting agent, suspending agent and one or more preservatives. Suitable dispersing or wetting agents or suspending agents are exemplified by those already mentioned above. Additional excipients, for example sweetening, flavoring and coloring agents, can also be present.

[0390] Pharmaceutical compositions of the invention can also be in the form of oil-in-water emulsions. The oily phase can be a vegetable oil or a mineral oil or mixtures of these. Suitable emulsifying agents can be naturally-occurring gums, for example gum acacia or gum tragacanth, naturally-occurring phosphatides, for example soy bean, lecithin, and esters or partial esters derived from fatty acids and hexitol, anhydrides, for example sorbitan monooleate, and condensation products of the said partial esters with ethylene oxide, for example polyoxyethylene sorbitan monooleate. The emulsions can also contain sweetening and flavoring agents.

[0391] Syrups and elixirs can be formulated with sweetening agents, for example glycerol, propylene glycol, sorbitol, glucose or sucrose. Such formulations can also contain a demulcent, a preservative and flavoring and coloring agents. The pharmaceutical compositions can be in the form of a sterile injectable aqueous or oleaginous suspension. This suspension can be formulated according to the known art using those suitable dispersing or wetting agents and suspending agents that have been mentioned above. The sterile injectable preparation can also be a sterile injectable solution or suspension in a non-toxic parentally acceptable diluent or solvent, for example as a solution in 1,3-butanediol. Among the acceptable vehicles and solvents that can be employed are water, Ringer's solution and isotonic sodium chloride solution. In addition, sterile, fixed oils are conventionally employed as a solvent or suspending medium. For this purpose, any bland fixed oil can be employed including synthetic mono-or diglycerides. In addition, fatty acids such as oleic acid find use in the preparation of injectables.

[0392] The nucleic acid molecules of the invention can also be administered in the form of suppositories, e.g., for rectal administration of the drug. These compositions can be prepared by mixing the drug with a suitable non-irritating excipient that is solid at ordinary temperatures but liquid at the rectal temperature and will therefore melt in the rectum to release the drug. Such materials include cocoa butter and polyethylene glycols.

[0393] Nucleic acid molecules of the invention can be administered parenterally in a sterile medium. The drug, depending on the vehicle and concentration used, can either be suspended or dissolved in the vehicle. Advantageously, adjuvants such as local anesthetics, preservatives and buffering agents can be dissolved in the vehicle.

[0394] Dosage levels of the order of from about 0.1 mg to about 140 mg per kilogram of body weight per day are useful in the treatment of the above-indicated conditions (about 0.5 mg to about 7 g per patient per day). The amount of active ingredient that can be combined with the carrier materials to produce a single dosage form varies depending upon the host treated and the particular mode of administration. Dosage unit forms generally contain between from about 1 mg to about 500 mg of an active ingredient.

[0395] It is understood that the specific dose level for any particular patient depends upon a variety of factors including the activity of the specific compound employed, the age, body weight, general health, sex, diet, time of administration, route of administration, and rate of excretion, drug combination and the severity of the particular disease undergoing therapy.

[0396] For administration to non-human animals, the composition can also be added to the animal feed or drinking water. It can be convenient to formulate the animal feed and drinking water compositions so that the animal takes in a therapeutically appropriate quantity of the composition along with its diet. It can also be convenient to present the composition as a premix for addition to the feed or drinking water.

[0397] The nucleic acid molecules of the present invention may also be administered to a patient in combination with other therapeutic compounds to increase the overall therapeutic effect. The use of multiple compounds to treat an indication may increase the beneficial effects while reducing the presence of side effects.

[0398] In one embodiment, the invention compositions suitable for administering nucleic acid molecules of the invention to specific cell types, such as hepatocytes. For example, the asialoglycoprotein receptor (ASGPr) (Wu and Wu, 1987, J. Biol. Chem. 262, 4429-4432) is unique to hepatocytes and binds branched galactose-terminal glycoproteins, such as asialoorosomucoid (ASOR). Binding of such glycoproteins or synthetic glycoconjugates to the receptor takes place with an affinity that strongly depends on the degree of branching of the oligosaccharide chain, for example, triatennary structures are bound with greater affinity than biatenarry or monoatennary chains (Baenziger and Fiete, 1980, Cell, 22, 611-620; Connolly et al., 1982, J. Biol. Chem., 257, 939-945). Lee and Lee, 1987, Glycoconjugate J., 4, 317-328, obtained this high specificity through the use of N-acetyl-D-galactosamine as the carbohydrate moiety, which has higher affinity for the receptor, compared to galactose. This “clustering effect” has also been described for the binding and uptake of mannosyl-terminating glycoproteins or glycoconjugates (Ponpipom et al., 1981, J. Med. Chem., 24, 1388-1395). The use of galactose and galactosamine based conjugates to transport exogenous compounds across cell membranes can provide a targeted delivery approach to the treatment of liver disease such as HBV infection or hepatocellular carcinoma. The use of bioconjugates can also provide a reduction in the required dose of therapeutic compounds required for treatment. Furthermore, therapeutic bioavialability, pharmacodynamics, and pharmacokinetic parameters can be modulated through the use of nucleic acid bioconjugates of the invention.

[0399] Alternatively, certain of the nucleic acid molecules of the instant invention can be expressed within cells from eukaryotic promoters (e.g., Izant and Weintraub, 1985, Science, 229, 345; McGarry and Lindquist, 1986, Proc. Natl. Acad. Sci., USA 83, 399; Scanlon et al., 1991, Proc. Natl. Acad. Sci. USA, 88, 10591-5; Kashani-Sabet et al., 1992, Antisense Res. Dev., 2, 3-15; Dropulic et al., 1992, J. Virol., 66, 1432-41; Weerasinghe et al., 1991, J. Virol., 65, 5531-4; Ojwang et al., 1992, Proc. Natl. Acad. Sci. USA, 89, 10802-6; Chen et al., 1992, Nucleic Acids Res., 20, 4581-9; Sarver et al., 1990 Science, 247, 1222-1225; Thompson et al., 1995, Nucleic Acids Res., 23, 2259; Good et al., 1997, Gene Therapy, 4, 45; all of these references are hereby incorporated in their totalities by reference herein). Those skilled in the art realize that any nucleic acid can be expressed in eukaryotic cells from the appropriate DNA/RNA vector. The activity of such nucleic acids can be augmented by their release from the primary transcript by a ribozyme (Draper et al., PCT WO 93/23569, and Sullivan et al., PCT WO 94/02595; Ohkawa et al., 1992, Nucleic Acids Symp. Ser., 27, 15-6; Taira et al., 1991, Nucleic Acids Res., 19, 5125-30; Ventura et al., 1993, Nucleic Acids Res., 21, 3249-55; Chowrira et al., 1994, J. Biol. Chem., 269, 25856; all of these references are hereby incorporated in their totality by reference herein).

[0400] In another aspect of the invention, RNA molecules of the present invention are preferably expressed from transcription units (see, for example, Couture et al., 1996, TIG., 12, 510) inserted into DNA or RNA vectors. The recombinant vectors are preferably DNA plasmids or viral vectors. Ribozyme expressing viral vectors could be constructed based on, but not limited to, adeno-associated virus, retrovirus, adenovirus, or alphavirus. Preferably, the recombinant vectors capable of expressing the nucleic acid molecules are delivered as described above, and persist in target cells. Alternatively, viral vectors may be used that provide for transient expression of nucleic acid molecules. Such vectors might be repeatedly administered as necessary. Once expressed, the nucleic acid molecule binds to the target mRNA. Delivery of nucleic acid molecule expressing vectors could be systemic, such as by intravenous or intra-muscular administration, by administration to target cells ex-planted from the patient followed by reintroduction into the patient, or by any other means that would allow for introduction into the desired target cell (for a review see Couture et al., 1996, TIG., 12, 510).

[0401] In one aspect, the invention features an expression vector comprising a nucleic acid sequence encoding at least one of the nucleic acid molecules of the instant invention is disclosed. The nucleic acid sequence encoding the nucleic acid molecule of the instant invention is operable linked in a manner which allows expression of that nucleic acid molecule.

[0402] In another aspect the invention features an expression vector comprising: a) a transcription initiation region (e.g., eukaryotic pol I, II or III initiation region); b) a transcription termination region (e.g., eukaryotic pol I, II or III termination region); c) a nucleic acid sequence encoding at least one of the nucleic acid catalyst of the instant invention; and wherein said sequence is operably linked to said initiation region and said termination region, in a manner which allows expression and/or delivery of said nucleic acid molecule. The vector may optionally include an open reading frame (ORF) for a protein operably linked on the 5′ side or the 3′-side of the sequence encoding the nucleic acid catalyst of the invention; and/or an intron (intervening sequences).

[0403] Transcription of the nucleic acid molecule sequences are driven from a promoter for eukaryotic RNA polymerase I (pol I), RNA polymerase II (pol II), or RNA polymerase III (pol III). Transcripts from pol II or pol III promoters will be expressed at high levels in all cells; the levels of a given pol II promoter in a given cell type will depend on the nature of the gene regulatory sequences (enhancers, silencers, etc.) present nearby. Prokaryotic RNA polymerase promoters are also used, providing that the prokaryotic RNA polymerase enzyme is expressed in the appropriate cells (Elroy-Stein and Moss, 1990, Proc. Natl. Acad. Sci. USA, 87, 6743-7; Gao and Huang 1993, Nucleic Acids Res., 21, 2867-72; Lieber et al., 1993, Methods Enzymol., 217, 47-66; Zhou et al., 1990, Mol. Cell. Biol., 10, 4529-37). All of these references are incorporated by reference herein. Several investigators have demonstrated that nucleic acid molecules, such as ribozymes expressed from such promoters can function in mammalian cells (e.g. Kashani-Sabet et al., 1992, Antisense Res. Dev., 2, 3-15; Ojwang et al., 1992, Proc. Natl. Acad. Sci. USA, 89, 10802-6; Chen et al., 1992, Nucleic Acids Res., 20, 4581-9; Yu et al., 1993, Proc. Natl. Acad. Sci. USA, 90, 6340-4; L'Huillier et al., 1992, EMBO J., 11, 4411-8; Lisziewicz et al., 1993, Proc. Natl. Acad. Sci. U.S.A, 90, 8000-4; Thompson et al., 1995, Nucleic Acids Res., 23, 2259; Sullenger & Cech, 1993, Science, 262, 1566). More specifically, transcription units such as the ones derived from genes encoding U6 small nuclear (snRNA), transfer RNA (tRNA) and adenovirus VA RNA are useful in generating high concentrations of desired RNA molecules such as ribozymes in cells (Thompson et al., supra; Couture and Stinchcomb, 1996, supra; Noonberg et al., 1994, Nucleic Acid Res., 22, 2830; Noonberg et al., U.S. Pat. No. 5,624,803; Good et al., 1997, Gene Ther., 4, 45; Beigelman et al., International PCT Publication No. WO 96/18736; all of these publications are incorporated by reference herein). The above ribozyme transcription units can be incorporated into a variety of vectors for introduction into mammalian cells, including but not restricted to, plasmid DNA vectors, viral DNA vectors (such as adenovirus or adeno-associated virus vectors), or viral RNA vectors (such as retroviral or alphavirus vectors) (for a review see Couture and Stinchcomb, 1996, supra).

[0404] In yet another aspect, the invention features an expression vector comprising nucleic acid sequence encoding at least one of the nucleic acid molecules of the invention, in a manner that allows expression of that nucleic acid molecule. The expression vector comprises in one embodiment; a) a transcription initiation region; b) a transcription termination region; c) a nucleic acid sequence encoding at least one said nucleic acid molecule; and wherein said sequence is operably linked to said initiation region and said termination region, in a manner which allows expression and/or delivery of said nucleic acid molecule. In another embodiment, the expression vector comprises: a) a transcription initiation region; b) a transcription termination region; c) an open reading frame; d) a nucleic acid sequence encoding at least one said nucleic acid molecule, wherein said sequence is operably linked to the 3′-end of said open reading frame; and wherein said sequence is operably linked to said initiation region, said open reading frame and said termination region, in a manner which allows expression and/or delivery of said nucleic acid molecule. In yet another embodiment, the expression vector comprises: a) a transcription initiation region; b) a transcription termination region; c) an intron; d) a nucleic acid sequence encoding at least one said nucleic acid molecule; and wherein said sequence is operably linked to said initiation region, said intron and said termination region, in a manner which allows expression and/or delivery of said nucleic acid molecule. In another embodiment, the expression vector comprises: a) a transcription initiation region; b) a transcription termination region; c) an intron; d) an open reading frame; e) a nucleic acid sequence encoding at least one said nucleic acid molecule, wherein said sequence is operably linked to the 3′-end of said open reading frame; and wherein said sequence is operably linked to said initiation region, said intron, said open reading frame and said termination region, in a manner which allows expression and/or delivery of said nucleic acid molecule.

[0405] Interferons

[0406] Type I interferons (IFN) are a class of natural cytokines that includes a family of greater than 25 IFN-α (Pesta, 1986, Methods Enzymol. 119, 3-14) as well as IFN-β, and IFN-ω. Although evolutionarily derived from the same gene (Diaz et al., 1994, Genomics 22, 540-552), there are many differences in the primary sequence of these molecules, implying an evolutionary divergence in biologic activity. All type I IFN share a common pattern of biologic effects that begin with binding of the IFN to the cell surface receptor (Pfeffer & Strulovici, 1992, Transmembrane secondary messengers for IFN-α/p. In: Interferon. Principles and Medical Applications., S. Baron, D. H. Coopenhaver, F. Dianzani, W. R. Fleischmann Jr., T. K. Hughes Jr., G. R. Kimpel, D. W. Niesel, G. J. Stanton, and S. K. Tyring, eds. 151-160). Binding is followed by activation of tyrosine kinases, including the Janus tyrosine kinases and the STAT proteins, which leads to the production of several IFN-stimulated gene products (Johnson et al., 1994, Sci. Am. 270, 68-75). The IFN-stimulated gene products are responsible for the pleotropic biologic effects of type I IFN, including antiviral, antiproliferative, and immunomodulatory effects, cytokine induction, and HLA class I and class II regulation (Pestka et al., 1987, Annu. Rev. Biochem 56, 727). Examples of IFN-stimulated gene products include 2-5-oligoadenylate synthetase (2-5 OAS), β₂-microglobulin, neopterin, p68 kinases, and the Mx protein (Chebath & Revel, 1992 The 2-5 A system: 2-5 A synthetase, isospecies and functions. In: Interferon. Principles and Medical Applications. S. Baron, D. H. Coopenhaver, F. Dianzani, W. R. Jr. Fleischmann, T. K. Jr Hughes, G. R. Kimpel, D. W. Niesel, G. J. Stanton, and S. K. Tyring, eds., pp. 225-236; Samuel, 1992, The RNA-dependent P1/eIF-2α protein kinase. In: Interferon. Principles and Medical Applications. S. Baron, D. H. Coopenhaver, F. Dianzani, W. R. Fleischmann Jr., T. K. Hughes Jr., G. R. Kimpel, D. W. Niesel, G. H. Stanton, and S. K. Tyring, eds. 237-250; Horisberger, 1992, MX protein: function and Mechanism of Action. In: Interferon. Principles and Medical Applications. S. Baron, D. H. Coopenhaver, F. Dianzani, W. R. Fleischmann Jr., T. K. Hughes Jr., G. R. Kimpel, D. W. Niesel, G. H. Stanton, and S. K. Tyring, eds. 215-224). Although all type I IFN have similar biologic effects, not all the activities are shared by each type I IFN, and, in many cases, the extent of activity varies quite substantially for each IFN subtype (Fish et al, 1989, J. Interferon Res. 9, 97-114; Ozes et al., 1992, J. Interferon Res. 12, 55-59). More specifically, investigations into the properties of different subtypes of IFN-α and molecular hybrids of IFN-α have shown differences in pharmacologic properties (Rubinstein, 1987, J. Interferon Res. 7, 545-551). These pharmacologic differences can arise from as few as three amino acid residue changes (Lee et al., 1982, Cancer Res. 42, 1312-1316).

[0407] Eighty-five to 166 amino acids are conserved in the known IFN-α subtypes. Excluding the IFN-α pseudogenes, there are approximately 25 known distinct IFN-α subtypes. Pairwise comparisons of these nonallelic subtypes show primary sequence differences ranging from 2% to 23%. In addition to the naturally occurring IFNs, a non-natural recombinant type I interferon known as consensus interferon (CIFN) has been synthesized as a therapeutic compound (Tong et al., 1997, Hepatology 26, 747-754).

[0408] Interferon is currently in use for at least 12 different indications including infectious and autoimmune diseases and cancer (Borden, 1992, N. Engl. J. Med. 326, 1491-1492). For autoimmune diseases IFN has been utilized for treatment of rheumatoid arthritis, multiple sclerosis, and Crohn's disease. For treatment of cancer IFN has been used alone or in combination with a number of different compounds. Specific types of cancers for which IFN has been used include squamous cell carcinomas, melanomas, hypernephromas, hemangiomas, hairy cell leukemia, and Kaposi's sarcoma. In the treatment of infectious diseases, IFNs increase the phagocytic activity of macrophages and cytotoxicity of lymphocytes and inhibits the propagation of cellular pathogens. Specific indications for which IFN has been used as treatment include: hepatitis B, human papillomavirus types 6 and 11 (i.e. genital warts) (Leventhal et al., 1991, N Engl J Med 325, 613-617), chronic granulomatous disease, and hepatitis C virus.

[0409] Numerous well controlled clinical trials using IFN-alpha in the treatment of chronic HCV infection have demonstrated that treatment three times a week results in lowering of serum ALT values in approximately 50% (range 40% to 70%) of patients by the end of 6 months of therapy (Davis et al., 1989, The new England Journal of Medicine 321, 1501-1506; Marcellin et al., 1991, Hepatology 13, 393-397; Tong et al., 1997, Hepatology 26, 747-754; Tong et al., Hepatology 26, 1640-1645). However, following cessation of interferon treatment, approximately 50% of the responding patients relapsed, resulting in a “durable” response rate as assessed by normalization of serum ALT concentrations of approximately 20 to 25%. In addition, studies that have examined six months of type 1 interferon therapy using changes in HCV RNA values as a clinical endpoint have demonstrated that up to 35% of patients will have a loss of HCV RNA by the end of therapy (Tong et al., 1997, supra). However, as with the ALT endpoint, about 50% of the patients relapse six months following cessation of therapy resulting in a durable virologic response of only 12% (23). Studies that have examined 48 weeks of therapy have demonstrated that the sustained virological response is up to 25%.

[0410] Pegylated interferons, ie. interferons conjugated with polyethylene glycol (PEG), have demonstrated improved characteristics over interferon. Advantages incurred by PEG conjugation can include an improved pharmacokinetic profile compared to interferons lacking PEG, thus imparting more convenient dosing regimes, improved tolerance, and improved antiviral efficacy. Such improvements have been demonstrated in clinical studies of both polyethylene glycol interferon alfa-2a (PEGASYS, Roche) and polyethylene glycol interferon alfa-2b (VIRAFERON PEG, PEG-INTRON, Enzon/Schering Plough).

[0411] Enzymatic nucleic acid molecules in combination with interferons and polyethylene glycol interferons have the potential to improve the effectiveness of treatment of HCV or any of the other indications discussed above. Enzymatic nucleic acid molecules targeting RNAs associated with diseases such as infectious diseases, autoimmune diseases, and cancer, can be used individually or in combination with other therapies such as interferons and polyethylene glycol interferons and to achieve enhanced efficacy.

### EXAMPLES

[0412] The following are non-limiting examples showing the selection, isolation, synthesis and activity of nucleic acids of the instant invention. These examples demonstrate the selection and design of Antisense, Hammerhead, DNAzyme, NCH, Amberzyme, Zinzyme or G-Cleaver ribozyme molecules and binding/cleavage sites within HBV and HCV RNA. The following examples also demonstrate the selection and design of nucleic acid decoy molecules that target HBV reverse transcriptase. The following examples also demonstrate the use of enzymatic nucleic acid molecules that cleave HCV RNA. The methods described herein represent a scheme by which nucleic acid molecules can be derived that cleave other RNA targets required for HCV replication.

### Example 1

### Identification of Potential Target Sites in Human HBV RNA

[0413] The sequence of human HBV was screened for accessible sites using a computer-folding algorithm. Regions of the RNA that did not form secondary folding structures and contained potential ribozyme and/or antisense binding/cleavage sites were identified. The sequences of these cleavage sites are shown in Tables IV-XI.

### Example 2

### Selection of Enzymatic Nucleic Acid Cleavage Sites in Human HBV RNA

[0414] Ribozyme target sites were chosen by analyzing sequences of Human HBV (accession number: AF100308.1) and prioritizing the sites on the basis of folding. Ribozymes were designed that could bind each target and were individually analyzed by computer folding (Christoffersen et al., 1994 J. Mol. Struc. Theochem, 311, 273; Jaeger et al., 1989, Proc. Natl. Acad. Sci. USA, 86, 7706) to assess whether the ribozyme sequences fold into the appropriate secondary structure. Those ribozymes with unfavorable intramolecular interactions between the binding arms and the catalytic core were eliminated from consideration. As noted herein, varying binding arm lengths can be chosen to optimize activity. Generally, at least 5 bases on each arm are able to bind to, or otherwise interact with, the target RNA.

### Example 3

### Chemical Synthesis and Purification of Ribozymes and Antisense for Efficient Cleavage and/or Blocking of HBV RNA

[0415] Ribozymes and antisense constructs were designed to anneal to various sites in the RNA message. The binding arms of the ribozymes are complementary to the target site sequences described above, while the antisense constructs are fully complementary to the target site sequences described above. The ribozymes and antisense constructs were chemically synthesized. The method of synthesis used followed the procedure for normal RNA synthesis as described above and in Usman et al., (1987 J. Am. Chem. Soc., 109, 7845), Scaringe et al., (1990 Nucleic Acids Res., 18, 5433) and Wincott et al., supra, and made use of common nucleic acid protecting and coupling groups, such as dimethoxytrityl at the 5′-end, and phosphoramidites at the 3′-end. The average stepwise coupling yields were typically >98%.

[0416] Ribozymes and antisense constructs were also synthesized from DNA templates using bacteriophage T7 RNA polymerase (Milligan and Uhlenbeck, 1989, Methods Enzymol. 180, 51). Ribozymes and antisense constructs were purified by gel electrophoresis using general methods or were purified by high pressure liquid chromatography (HPLC; see Wincott et al., supra; the totality of which is hereby incorporated herein by reference) and were resuspended in water. The sequences of the chemically synthesized ribozymes used in this study are shown below in Table XI.

### Example 4

### Ribozyme Cleavage of HBV RNA Target In Vitro

[0417] Ribozymes targeted to the human HBV RNA are designed and synthesized as described above. These ribozymes can be tested for cleavage activity in vitro, for example using the following procedure. The target sequences and the nucleotide location within the HBV RNA are given in Tables IV-XI.

[0418] Cleavage Reactions: Full-length or partially full-length, internally-labeled target RNA for ribozyme cleavage assay is prepared by in vitro transcription in the presence of [α-³²P] CTP, passed over a G 50 Sephadex® column by spin chromatography and used as substrate RNA without further purification. Alternately, substrates are 5′-³²P-end labeled using T4 polynucleotide kinase enzyme. Assays are performed by pre-warming a 2× concentration of purified ribozyme in ribozyme cleavage buffer (50 mM Tris-HCl, pH 7.5 at 37° C., 10 mM MgCl₂) and the cleavage reaction was initiated by adding the 2× ribozyme mix to an equal volume of substrate RNA (maximum of 1-5 nM) that was also pre-warmed in cleavage buffer. As an initial screen, assays are carried out for 1 hour at 37° C. using a final concentration of either 40 nM or 1 mM ribozyme, i.e., ribozyme excess. The reaction is quenched by the addition of an equal volume of 95% formamide, 20 mM EDTA, 0.05% bromophenol blue and 0.05% xylene cyanol after which the sample is heated to 95° C. for 2 minutes, quick chilled and loaded onto a denaturing polyacrylamide gel. Substrate RNA and the specific RNA cleavage products generated by ribozyme cleavage are visualized on an autoradiograph of the gel. The percentage of cleavage is determined by Phosphor Imager® quantitation of bands representing the intact substrate and the cleavage products.

### Example 5

### Transfection of HepG2 Cells with psHBV-1 and Ribozymes

[0419] The human hepatocellular carcinoma cell line Hep G2 was grown in Dulbecco's modified Eagle media supplemented with 10% fetal calf serum, 2 mM glutamine, 0.1 mM nonessential amino acids, 1 mM sodium pyruvate, 25 mM Hepes, 100 units penicillin, and 100 μg/ml streptomycin. To generate a replication competent cDNA, prior to transfection the HBV genomic sequences are excised from the bacterial plasmid sequence contained in the psHBV-1 vector (Those skilled in the art understand that other methods may be used to generate a replication competent cDNA). This was done with an EcoRI and Hind III restriction digest. Following completion of the digest, a ligation was performed under dilute conditions (20 μg/ml) to favor intermolecular ligation. The total ligation mixture was then concentrated using Qiagen spin columns.

[0420] Secreted alkaline phosphatase (SEAP) was used to normalize the HBsAg levels to control for transfection variability. The pSEAP2-TK control vector was constructed by ligating a Bgl II-Hind III fragment of the pRL-TK vector (Promega), containing the herpes simplex virus thymidine kinase promoter region, into Bgl II/Hind III digested pSEAP2-Basic (Clontech). Hep G2 cells were plated (3×10⁴ cells/well) in 96-well microtiter plates and incubated overnight. A lipid/DNA/ribozyme complex was formed containing (at final concentrations) cationic lipid (15 μg/ml), prepared psHBV-1 (4.5 μg/ml), pSEAP2-TK (0.5 μg/ml), and ribozyme (100 μM). Following a 15 min. incubation at 37° C., the complexes were added to the plated Hep G2 cells. Media was removed from the cells 96 hr. post-transfection for HBsAg and SEAP analysis.

[0421] Transfection of the human hepatocellular carcinoma cell line, Hep G2, with replication competent HBV DNA results in the expression of HBV proteins and the production of virions. To investigate the potential use of ribozymes for the treatment of chronic HBV infection, a series of ribozymes that target the 3′ terminus of the HBV genome have been synthesized. Ribozymes targeting this region have the potential to cleave all four major HBV RNA transcripts as well as the potential to block the production of HBV DNA by cleavage of the pregenomic RNA. To test the efficacy of these HBV ribozymes, they were co-transfected with HBV genomic DNA into Hep G2 cells, and the subsequent levels of secreted HBV surface antigen (HBsAg) were analyzed by ELISA. To control for variability in transfection efficiency, a control vector which expresses secreted alkaline phosphatase (SEAP), was also co-transfected. The efficacy of the HBV ribozymes was determined by comparing the ratio of HBsAg:SEAP and/or HBeAg:SEAP to that of a scrambled attenuated control (SAC) ribozyme. Twenty-five ribozymes (RPI18341, RPI18356, RPI18363, RPI18364, RPI18365, RPI18366, RPI18367, RPI18368, RPI18369, RPI18370, RPI18371, RPI18372, RPI18373, RPI18374, RPI18303, RPI18405, RPI18406, RPI18407, RPI18408, RPI18409, RPI18410, RPI18411, RPI18418, RPI18419, and RPI18422) have been identified which cause a reduction in the levels of HBsAg and/or HBeAg as compared to the corresponding SAC ribozyme. In addition, loop variant anti-HBV ribozymes targeting site 273 were tested using this system, the results of this study are summarized in FIG. 10. As indicated in the figure, the ribozymes tested demonstrate significant reduction in HepG2 HBsAg levels as compared to a scrambled attenuated core ribozyme control, with RPI 22650 and RPI 22649 showing the greatest decrease in HBsAg levels.

### Example 6

### Analysis of HBsAg and SEAP Levels Following Ribozyme Treatment

[0422] Immulon 4 (Dynax) microtiter wells were coated overnight at 4° C. with anti-HBsAg Mab (Biostride B88-95-31 ad,ay) at 1 μg/ml in Carbonate Buffer (Na2CO3 15 mM, NaHCO3 35 mM, pH 9.5). The wells were then washed 4× with PBST (PBS, 0.05% Tween® 20) and blocked for 1 hr at 37° C. with PBST, 1% BSA. Following washing as above, the wells were dried at 37° C. for 30 min. Biotinylated goat ant-HBsAg (Accurate YVS1807) was diluted 1:1000 in PBST and incubated in the wells for 1 hr. at 37° C. The wells were washed 4× with PBST. Streptavidin/Alkaline Phosphatase Conjugate (Pierce 21324) was diluted to 250 ng/ml in PBST, and incubated in the wells for 1 hr. at 37° C. After washing as above, p-nitrophenyl phosphate substrate (Pierce 37620) was added to the wells, which were then incubated for 1 hr. at 37° C. The optical density at 405 nm was then determined. SEAP levels were assayed using the Great EscAPe® Detection Kit (Clontech K2041-1), as per the manufacturers instructions.

### Example 7

### X-gene Reporter Assay

[0423] The effect of ribozyme treatment on the level of transactivation of a SV40 promoter driven firefly luciferase gene by the HBV X-protein was analyzed in transfected Hep G2 cells. As a control for variability in transfection efficiency, a Renilla luciferase reporter driven by the TK promoter, which is not transactivated by the X protein, was used. Hep G2 cells were plated (3×10⁴ cells/well) in 96-well microtiter plates and incubated overnight. A lipid/DNA/ribozyme complex was formed containing (at final concentrations) cationic lipid (2.4 μg/ml), the X-gene vector pSBDR (2.5 μg/ml), the firefly reporter pSV40HCVluc (0.5 μg/ml), the Renilla luciferase control vector pRL-TK (0.5 μg/ml), and ribozyme (100 μM). Following a 15 min. incubation at 37° C., the complexes were added to the plated Hep G2 cells. Levels of firefly and Renilla luciferase were analyzed 48 hr. post transfection, using Promega's Dual-Luciferase Assay System.

[0424] The HBV X protein is a transactivator of a number of viral and cellular genes. Ribozymes which target the X region were tested for their ability to cause a reduction in X protein transactivation of a firefly luciferase gene driven by the SV40 promoter in transfected Hep G2 cells. As a control for transfection variability, a vector containing the Renilla luciferase gene driven by the TK promotor, which is not activated by the X protein, was included in the co-transfections. The efficacy of the HBV ribozymes was determined by comparing the ratio of firefly luciferase: Renilla luciferase to that of a scrambled attenuated control (SAC) ribozyme. Eleven ribozymes (RPI18365, RPI18367, RPI18368, RPI18371, RPI18372, RPI18373, RPI18405, RPI18406, RPI18411, RPI18418, RPI18423) were identified which cause a reduction in the level of transactivation of a reporter gene by the X protein, as compared to the corresponding SAC ribozyme.

### Example 8

### HBV Transgenic Mouse Study A

[0425] A transgenic mouse strain (founder strain 1.3.32 with a C57B1/6 background) that expresses HBV RNA and forms HBV viremia (Morrey et al., 1999, Antiviral Res., 42, 97-108; Guidotti et al., 1995, J. Virology, 69, 10, 6158-6169) was utilized to study the in vivo activity of ribozymes (RPI.18341, RPI.18371, RPI.18372, and RPI.18418) of the instant invention. This model is predictive in screening for anti-HBV agents. Ribozyme or the equivalent volume of saline was administered via a continuous s.c. infusion using Alzet® mini-osmotic pumps for 14 days. Alzet® pumps were filled with test material(s) in a sterile fashion according to the manufacturer's instructions. Prior to in vivo implantation, pumps were incubated at 37° C. overnight (≧18 hours) to prime the flow modulators. On the day of surgery, animals were lightly anesthetized with a ketamine/xylazine cocktail (94 mg/kg and 6 mg/kg, respectively; 0.3 ml, IP). Baseline blood samples (200 μl) were obtained from each animal via a retro-orbital bleed. For animals in groups 1-5 (Table XII), a 2 cm area near the base of the tail was shaved and cleansed with betadine surgical scrub and sequentially with 70% alcohol. A 1 cm incision in the skin was made with a #15 scalpel blade or a blunt pair of scissors near the base of the tail. Forceps were used to open a pocket rostrally (ie., towards the head) by spreading apart the subcutaneous connective tissue. The pump was inserted with the delivery portal pointing away from the incision. Wounds were closed with sterile 9-mm stainless steel clips or with sterile 4-0 suture. Animals were then allowed to recover from anesthesia on a warm heating pad before being returned to their cage. Wounds were checked daily. Clips or sutures were replaced as needed. Incisions typically healed completely within 7 days post-op. Animals were then deeply anesthetized with the ketamine/xylazine cocktail (150 mg/kg and 10 mg/kg, respectively; 0.5 ml, IP) on day 14 post pump implantation. A midline thoracotomy/laparatomy was performed to expose the abdominal cavity and the thoracic cavity. The left ventricle was cannulated at the base and animals exsanguinated using a 23G needle and 1 ml syringe. Serum was separated, frozen and analyzed for HBV DNA and antigen levels. Experimental groups were compared to the saline control group in respect to percent change from day 0 to day 14. HBV DNA was assayed by quantitative PCR.

[0426] Results

[0427] Table XII is a summary of the group designation and dosage levels used in this HBV transgenic mouse study. Baseline blood samples were obtained via a retroorbital bleed and animals (N=10/group) received anti-HBV ribozymes (100 mg/kg/day) as a continuous SC infusion. After 14 days, animals treated with a ribozyme targeting site 273 (RPI.18341) of the HBV RNA showed a significant reduction in serum HBV DNA concentration, compared to the saline treated animals as measured by a quantitative PCR assay. More specifically, the saline treated animals had a 69% increase in serum HBV DNA concentrations over this 2-week period while treatment with the 273 ribozyme (RPI.18341) resulted in a 60% decrease in serum HBV DNA concentrations. Ribozymes directed against sites 1833 (RPI.18371), 1873 (RPI.18418), and 1874 (RPI.18372) decreased serum HBV DNA concentrations by 49%, 15% and 16%, respectively.

### Example 9

### HBV Transgenic Mouse Study B

[0428] A transgenic mouse strain (founder strain 1.3.32 with a C57B1/6 background) that expresses HBV RNA and forms HBV viremia (Morrey et al., 1999, Antiviral Res., 42, 97-108; Guidotti et al., 1995, J. Virology, 69, 10, 6158-6169) was utilized to study the in vivo activity of ribozymes (RPI.18341 and RPI.18371) of the instant invention. This model is predictive in screening for anti-HBV agents. Ribozyme or the equivalent volume of saline was administered via a continuous s.c. infusion using Alzet® mini-osmotic pumps for 14 days. Alzet® pumps were filled with test material(s) in a sterile fashion according to the manufacturer's instructions. Prior to in vivo implantation, pumps were incubated at 37° C. overnight (≧18 hours) to prime the flow modulators. On the day of surgery, animals were lightly anesthetized with a ketamine/xylazine cocktail (94 mg/kg and 6 mg/kg, respectively; 0.3 ml, IP). Baseline blood samples (200 μl) were obtained from each animal via a retro-orbital bleed. For animals in groups 1-10 (Table XIII), a 2 cm area near the base of the tail was shaved and cleansed with betadine surgical scrub and sequentially with 70% alcohol. A 1 cm incision in the skin was made with a #15 scalpel blade or a blunt pair of scissors near the base of the tail. Forceps were used to open a pocket rostrally (ie., towards the head) by spreading apart the subcutaneous connective tissue. The pump was inserted with the delivery portal pointing away from the incision. Wounds were closed with sterile 9-mm stainless steel clips or with sterile 4-0 suture. Animals were then allowed to recover from anesthesia on a warm heating pad before being returned to their cage. Wounds were checked daily. Clips or sutures were replaced as needed. Incisions typically healed completely within 7 days post-op. Animals were then deeply anesthetized with the ketamine/xylazine cocktail (150 mg/kg and 10 mg/kg, respectively; 0.5 ml, IP) on day 14 post pump implantation. A midline thoracotomy/laparatomy was performed to expose the abdominal cavity and the thoracic cavity. The left ventricle was cannulated at the base and animals exsanguinated using a 23G needle and 1 ml syringe. Serum was separated, frozen and analyzed for HBV DNA and antigen levels. Experimental groups were compared to the saline control group in respect to percent change from day 0 to day 14. HBV DNA was assayed by quantitative PCR. Additionally, mice treated with 3TC® by oral gavage at a dose of 300 mg/kg/day for 14 days (group 11, Table XIII) were used as a positive control.

[0429] Results

[0430] Table XIII is a summary of the group designation and dosage levels used in this HBV transgenic mouse study. Baseline blood samples were obtained via a retroorbital bleed and animals (N=15/group) received anti-HBV ribozymes (100 mg/kg/day, 30 mg/kg/day, 10 mg/kg/day) as a continuous SC infusion. The results of this study are summarized in FIGS. 6, 7, and 8. As FIGS. 6, 7, and 8 demonstrate, Ribozymes directed against sites 273 (RPI.18341) and 1833 (RPI.18371) demonstrate reduction in the serum HBV DNA levels following 14 days of ribozyme treatment in HBV transgenic mice, as compared to scrambled attenuated core (SAC) ribozyme and saline controls. Furthermore, these ribozymes provide similar, and in some cases, greater reduction of serum HBV DNA levels, as compared to the 3TC® positive control, at lower doses than the 3TC® positive control.

### Example 10

### HBV DNA Reduction in HepG2.2.15 Cells

[0431] Ribozyme treatment of HepG2.2.15 cells was performed in a 96-well plate format, with 12 wells for each different ribozyme tested (RPI.18341, RPI.18371, RPI.18372, RPI.18418, RPI.20599SAC). HBV DNA levels in the media collected between 120 and 144 hours following transfection was determined using the Roche Amplicor HBV Assay. Treatment with RPI.18341 targeting site 273 resulted in a significant (P<0.05) decrease in HBV DNA levels of 62% compared to the SAC (RPI.20599). Treatment with RPI.18371 (site 1833) or RPI.18372 (site 1874) resulted in reductions in HBV DNA levels of 55% and 58% respectively, as compared to treatment with the SAC RPI.20599 (see FIG. 9).

### Example 11

### RPI 18341 Combination Treatment with Lamivudine/Infergen®

[0432] The therapeutic use of nucleic acid molecules of the invention either alone or in combination with current therapies, for example lamivudine or type 1 IFN, can lead to improved HBV treatment modalities. To assess the potential of combination therapy, HepG2 cells transfected with a replication competent HBV cDNA, were treated with RPI 18341 (HepBzyme™), Infergen® (Amgen, Thousand Oaks Calif.), and/or Lamivudine (Epivir®: GlaxoSmithKline, Research Triangle Park N.C.) either alone or in combination. Results indicated that combination treatment with either RPI 18341 plus Infergen® or combination of RPI 18341 plus lamivudine results in additive down regulation of HBsAg expression (P<0.001). These studies can be applied to the treatment of lamivudine resistant cells to further assses the potential for combination therapy of RPI 18341 plus currently available therapies for the treatment of chronic Hepatitis B.

[0433] Hep G2 cells were plated (2×104 cells/well) in 96-well microtiter plates and incubated overnight. A cationic lipid/DNA/ribozyme complex was formed containing (at final concentrations) lipid (11-15 μg/mL), re-ligated psHBV-1 (4.5 μg/mL) and ribozyme (100-200 nM) in growth media. Following a 15 min incubation at 37° C., 20 μL of the complex was added to the plated Hep G2 cells in 80 μL of growth media minus antibiotics. For combination treatment with interferon, interferon (Infergen®, Amgen, Thousand Oaks Calif.) was added at 24 hr post-transfection and then incubated for an additional 96 hr. In the case of co-treatment with Lamivudine (3TC®), the ribozyme-containing cell culture media was removed at 120 hr post-transfection, fresh media containing Lamivudine (Epivir®: GlaxoSmithKline, Research Triangle Park N.C.) was added, and then incubated for an additional 48 hours. Treatment with Lamivudine or interferon individually was done on Hep G2 cells transfected with the pSHBV-1 vector alone and then treated identically to the co-treated cells. All transfections were performed in triplicate. Analysis of HBsAg levels was performed using the Diasorin HBsAg ELISA kit.

[0434] Results

[0435] At either 500 or 1000 units of Infergen®, the addition of 200 nM of RPI.18341 results in a 75-77% increase in anti-HBV activity as judged by the level of HBsAg secreted from the treated Hep G2 cells. Conversely, the anti-HBV activity of RPI.18341(at 200 nM) is increased 31-39% when used in combination of 500 or 1000 units of Infergen® (FIG. 11).

[0436] At 25 nM Lamivudine (3TC®), the addition of 100 nM of RPI.18341 results in a 48% increase in anti-HBV activity as judged by the level of HBsAg secreted from treated Hep G2 cells. Conversely, the anti-HBV activity of RPI.18341 (at 100 nM) is increased 31% when used in combination with 25 nM Lamivudine (FIG. 12).

### Example 13

### Modulation of HBV Reverse Transcriptase

[0437] The HBV reverse transcriptase (pol) binds to the 5′ stem-loop structure in the HBV pregenomic RNA and synthesizes a four-nucleotide primer from the template UUCA. The reverse transcriptase then translocates to the 3′ end of the pregenomic RNA where the primer binds to the UUCA sequence within the DR1 element and begins first-strand synthesis of HBV DNA. A number of short oligos, ranging in size from 4 to 16-mers, were designed to act as competitive inhibitors of the HBV reverse transcriptase primer, either by blocking the primer binding sites on the HBV RNA or by acting as a decoy.

[0438] The oligonucleotides and controls were synthesized in all 2′-O-methyl and 2′-O-allyl versions (Table XV). The inverse sequence of all oligos were generated to serve as controls. Primary screening of the competitive inhibitors was completed in the HBsAg transfection/ELISA system, in which the oligo is co-transfeceted with a HBV cDNA vector into Hep G2 cells. Following 4 days of incubation, the levels of HBsAg secreted into the cell culture media were determined by ELISA. Screening of the 2′-O-allyl versions revealed that two of the decoy oligos (RPI.24944 and RPI.24945), consisting of 3× or 4× repeats of the RT primer binding site UUCA, along with the matched inverse controls, displayed considerable activity by decreasing HBsAg levels (FIG. 15). This dramatic decrease in HBsAg levels is not due to cellular toxicity, because a MTS assay showed no difference in proliferation between any of the treated cells. A follow up experiment with a 5× UUCA repeat, the inverse sequence control, and a matched scrambled control, showed that all three oligos decreased HBsAg levels without cellular toxicity. Screening of the 2′-O-methyl versions of the oligos showed no activity from the 3× and 4× UUCA repeat (FIG. 16), also suggesting that the anti-HBV effect is perhaps related to the 2′-O-allyl chemistry rather than to sequence specificity.

[0439] Screening of the 2′-O-methyl oligos did show that the 2′-O-methyl 2× UUCA repeat, RPI.24986, displayed activity in decreasing HBsAg levels as compared to the inverse control, RPI.24950. A dose response experiment showed that at the lower concentrations of 100 and 200 nM, RPI.24986 showed greater activity in decreasing HbsAg levels as compared to the inverse control RPI.24950 (FIG. 17).

### Example 14

### Modulation of HBV Transcription via Oligonucleotides Targeting the Enchancer I Core Region of HBV DNA

[0440] In an effort to block HBV replication, oligonucleotides were designed to bind to two liver-specific factor binding sites in the Enhancer I core region of HBV genomic DNA. Hepatocyte Nuclear Factor 3 (HNF3) and Hepatocyte Nuclear Factor 4 (HNF4) bind to sites in the core region, with the HNF3 site being 5′ to the HNF4 site. The HNF3 and HNF4 sites overlap or are adjacent to binding sites for a number of more ubiquitous factors, and are termed nuclear receptor response elements (NRRE). These elements are critical in regulating HBV transcription and replication in infected hepatocytes, with mutations in the HNF3 and HNF4 binding sites having been demonstrated to greatly reduce the levels of HBV replication (Bock et al., 2000, J. Virology, 74, 2193)

[0441] Oligonucleotides (Table XV) were designed to bind to either the positive or negative strands of the HNF3 or HNF4 binding sites. Scrambled controls were made to match each oligo. Each oligo was synthesized in all 2′-O-methyl/all phosphorothioate, or all 2′-O-allyl/all phosphorothioate chemistries. The initial screening of the oligos was done in the HBsAg transfection/ELISA system in Hep G2 cells. RPI.25654, which targets the negative strand of the HNF4 binding site, shows greater activity in reducing HBsAg levels as compared to RPI.25655, which targets the HNF4 site positive strand, and the scrambled control RPI.25656. This result was observed at both 200 and 400 nM (FIGS. 18 and 19). In a follow-up study, RPI.25654 reduced HBsAg levels in a dose-dependent manner, from 50-200 nM (FIG. 20).

### Example 15

### Transfection of HepG2 Cells with psHBV-1 and Nucleic Acid

[0442] The human hepatocellular carcinoma cell line Hep G2 was grown in Dulbecco's modified Eagle media supplemented with 10% fetal calf serum, 2 mM glutamine, 0.1 mM nonessential amino acids, 1 mM sodium pyruvate, 25 mM Hepes, 100 units penicillin, and 100 μg/ml streptomycin. To generate a replication competent cDNA, prior to transfection the HBV genomic sequences are excised from the bacterial plasmid sequence contained in the psHBV-1 vector This was done with an EcoRI and Hind III restriction digest. Following completion of the digest, a ligation was performed under dilute conditions (20 μg/ml) to favor intermolecular ligation. The total ligation mixture was then concentrated using Qiagen spin columns. One skilled in the art would realize that other methods can be used to generate a replication competent cDNA Secreted alkaline phosphatase (SEAP) was used to normalize the HBsAg levels to control for transfection variability. The pSEAP2-TK control vector was constructed by ligating a Bgl II-Hind III fragment of the pRL-TK vector (Promega), containing the herpes simplex virus thymidine kinase promoter region, into Bgl II/Hind III digested pSEAP2-Basic (Clontech). Hep G2 cells were plated (3×10⁴ cells/well) in 96-well microtiter plates and incubated overnight. A lipid/DNA/nucleic acid complex was formed containing (at final concentrations) cationic lipid (15 μg/ml), prepared psHBV-1 (4.5 μg/ml), pSEAP2-TK (0.5 μg/ml), and nucleic acid (100 μM). Following a 15 min. incubation at 37° C., the complexes were added to the plated Hep G2 cells. Media was removed from the cells 96 hr. post-transfection for HBsAg and SEAP analysis.

[0443] Transfection of the human hepatocellular carcinoma cell line, Hep G2, with replication competent HBV DNA results in the expression of HBV proteins and the production of virions.

### Example 16

### Analysis of HBsAg and SEAP Levels Following Nucleic Acid Treatment

[0444] Immulon 4 (Dynax) microtiter wells were coated overnight at 4° C. with anti-HBsAg Mab (Biostride B88-95-31ad,ay) at 1 μg/ml in Carbonate Buffer (Na2CO3 15 mM, NaHCO3 35 mM, pH 9.5). The wells were then washed 4× with PBST (PBS, 0.05% Tween® 20) and blocked for 1 hr at 37° C. with PBST, 1% BSA. Following washing as above, the wells were dried at 37° C. for 30 min. Biotinylated goat anti-HBsAg (Accurate YVS1807) was diluted 1:1000 in PBST and incubated in the wells for 1 hr. at 37° C. The wells were washed 4× with PBST. Streptavidin/Alkaline Phosphatase Conjugate (Pierce 21324) was diluted to 250 ng/ml in PBST, and incubated in the wells for 1 hr. at 37° C. After washing as above, p-nitrophenyl phosphate substrate (Pierce 37620) was added to the wells, which were then incubated for 1 hr. at 37° C. The optical density at 405 nm was then determined. SEAP levels were assayed using the Great EscAPe® Detection Kit (Clontech K2041-1), as per the manufacturers instructions.

### Example 17

### Analysis of HBV DNA Expression a HepG2.2.15 Murine Model

[0445] The development of new antiviral agents for the treatment of chronic Hepatitis B has been aided by the use of animal models that are permissive to replication of related Hepadnaviridae such as Woodchuck Hepatitis Virus (WHV) and Duck Hepatitis Virus (DHV). In addition, the use of transgenic mice has also been employed. The human hepatoblastoma cell line, HepG2.2.15, implanted as a subcutaneous (SC) tumor, can be used to produce Hepatitis B viremia in mice. This model is useful for evaluating new HBV therapies. Mice bearing HepG2.2.15 SC tumors show HBV viremia. HBV DNA can be detected in serum beginning on Day 35. Maximum serum viral levels reach 1.9×10⁵ copies/mL by day 49. A study also determined that the minimum tumor volume associated with viremia was 300 mm³. Therefore, the HepG2.2.15 cell line grown as a SC tumor produces a useful model of HBV viremia in mice. This new model can be suitable for evaluating new therapeutic regimens for chronic Hepatitis B.

[0446] HepG2.2.15 tumor cells contain a slightly truncated version of viral HBV DNA and sheds HBV particles. The purpose of this study was to identify what time period viral particles are shed from the tumor. Serum was analyzed for presence of HBV DNA over a time course after HepG2.2.15 tumor inoculation in Athymic Ncr nu/nu mice. HepG2.2.15 cells were carried and expanded in DMEM/10% FBS/2.4% HEPES/1% NEAA/1% Glutamine/1% Sodium Pyruvate media. Cells were resuspended in Delbecco's PBS with calcium/magnesium for injection. One hundred microliters of the tumor cell suspension (at a concentration of 1×108 cells/mL) were injected subcutaneously in the flank of NCR nu/nu female mice with a 23 gl needle and 1 cc syringe, thereby giving each mouse 1×10⁷ cells. Tumors were allowed to grow for a period of up to 49 days post tumor cell inoculation. Serum was sampled for analysis on days 1, 7, 14, 35, 42 and 49 post tumor inoculation. Length and width measurements from each tumor were obtained three times per week using a Jamison microcaliper. Tumor volumes were calculated from tumor length/width measurements (tumor volume=0.5[a(b)²] where a=longest axis of the tumor and b=shortest axis of the tumor). Serum was analyzed for the presence of HBV DNA by the Roche Amplicor HBV moniter TM DNA assay.

[0447] Experiment 1

[0448] HepG2.2.15 cells were carried and expanded in DMEM/10% FBS/2.4% HEPES/1% NEAA/1% Glutamine/1% Sodium Pyruvate media. Cells were resuspended in Delbecco's PBS with calcium/magnesium for injection. One hundred microliters of the tumor cell suspension (at a concentration of 1×108 cells/mL) were injected subcutaneously in the flank of NCR nu/nu female mice with a 23 gl needle and 1 cc syringe, thereby giving each mouse 1×10⁷ cells. Tumors were allowed to grow for a period of up to 49 days post tumor cell inoculation. Serum was sampled for analysis on days 1, 7, 14, 35, 42 and 49 post tumor inoculation. Length and width measurements from each tumor were obtained three times per week using a Jamison microcaliper. Tumor volumes were calculated from tumor length/width measurements (tumor volume=0.5[a(b)²] where a=longest axis of the tumor and b=shortest axis of the tumor). Serum was analyzed for the presence of HBV DNA by the Roche Amplicor HBV moniter TM DNA assay.

[0449] Results

[0450] When athymic nu/nu female mice are subcutaneously injected with HepG2.2.15 cells and form tumors, HBV DNA is detected in serum (peak serum level was 1.9×10⁵ copies/mL). There is a positive correlation (rs=0.7, p<0.01) between tumor weight (milligrams) and HB viral copies/mL serum. FIG. 21 shows a plot of HepG2.2.15 tumors in nu/nu female mice as tumor volume vs time. Table XVI shows the concentration of HBV DNA in relation to tumor size in the HepG2.2.15 implanted nu/nu female mice used in the study.

[0451] Experiment 2

[0452] HepG2.2.15 cells were carried and expanded in DMEM/10% FBS/2.4% HEPES/1% NEAA/1% Glutamine/1% Sodium Pyruvate media containing 400 μg/ml G418 antibiotic. G418-resistant cells were resuspended in Dulbecco's PBS with calcium/magnesium for injection. One hundred microliters of the tumor cell suspension (at a concentration of 1×108 cells/mL) were injected subcutaneously in the flank of NCR nu/nu female mice with a 23 gl needle and 1 cc syringe, thereby giving each mouse 1×10⁷ cells. Tumors were allowed to grow for a period of up to 49 days post tumor cell inoculation. Serum was sampled for analysis on day 37 post tumor inoculation. Length and width measurements from each tumor were obtained three times per week using a Jamison microcaliper. Tumor volumes were calculated from tumor length/width measurements (tumor volume=0.5[a(b)²] where a=longest axis of the tumor and b=shortest axis of the tumor). Serum was analyzed for the presence of HBV DNA by the Roche Amplicor HBV moniter TM DNA assay.

[0453] Results

[0454] When athymic nu/nu female mice are subcutaneously injected with G418 antibiotic resistant HepG2.2.15 cells and form tumors, HBV DNA is detected in serum (peak serum level was 4.0×10⁵ copies/mL). There is a positive correlation (rs=0.7, p<0.01) between tumor weight (milligrams) and HB viral copies/mL serum. FIG. 22 shows a plot of HepG2.2.15 tumors in nu/nu female mice as tumor volume vs time. Table XVII shows the concentration of HBV DNA in relation to tumor size in the G418 antibiotic resistant HepG2.2.15 implanted nu/nu female mice used in the study.

### Example 18

### Identification of Potential Enzymatic Nucleic Acid Molecules Cleavage Sites in HCV RNA

[0455] The sequence of HCV RNA was screened for accessible sites using a computer folding algorithm. Regions of the mRNA that did not form secondary folding structures and contained potential enzymatic nucleic acid cleavage sites were identified. The sequences of these cleavage sites are shown in Tables XVIII, XIX, XX and XXIII.

### Example 19

### Selection of Enzymatic Nucleic Acid Molecules Cleavage Sites in HCV RNA

[0456] Enzymatic nucleic acid target sites were chosen by analyzing sequences of Human HCV (Genbank accession Nos: D11168, D50483.1, L38318 and S82227) and prioritizing the sites on the basis of folding. Enzymatic nucleic acid molecules are designed that could bind each target and are individually analyzed by computer folding (Christoffersen et al., 1994 J. Mol. Struc. Theochem, 311, 273; Jaeger et al., 1989, Proc. Natl. Acad. Sci. USA, 86, 7706) to assess whether the enzymatic nucleic acid molecules sequences fold into the appropriate secondary structure. Those enzymatic nucleic acid molecules with unfavorable intramolecular interactions between the binding arms and the catalytic core can be eliminated from consideration. As noted below, varying binding arm lengths can be chosen to optimize activity. Generally, at least 4 bases on each arm are able to bind to, or otherwise interact with, the target RNA.

### Example 20

### Chemical Synthesis and Purification of Enzymatic Nucleic Acids

[0457] Enzymatic nucleic acid molecules can be designed to anneal to various sites in the RNA message. The binding arms of the enzymatic nucleic acid molecules are complementary to the target site sequences described above. The enzymatic nucleic acid molecules can be chemically synthesized using, for example, RNA syntheses such as those described above and those described in Usman et al., (1987 J. Am. Chem. Soc., 109, 7845), Scaringe et al., (1990 Nucleic Acids Res., 18, 5433) and Wincott et al., supra. Such methods make use of common nucleic acid protecting and coupling groups, such as dimethoxytrityl at the 5′-end, and phosphoramidites at the 3′-end. The average stepwise coupling yields are typically >98%. Enzymatic nucleic acid molecules can be modified to enhance stability by modification with nuclease resistant groups, for example, 2′-amino, 2′-C-allyl, 2′-flouro, 2′-O-methyl, 2′-H (for a review see Usman and Cedergren, 1992 TIBS 17, 34).

[0458] Enzymatic nucleic acid molecules can also be synthesized from DNA templates using bacteriophage T7 RNA polymerase (Milligan and Uhlenbeck, 1989, Methods Enzymol. 180, 51). Enzymatic nucleic acid molecules can be purified by gel electrophoresis using known methods, or can be purified by high pressure liquid chromatography (HPLC; See Wincott et al., supra; the totality of which is hereby incorporated herein by reference), and are resuspended in water. The sequences of chemically synthesized enzymatic nucleic acid constructs are shown below in Tables XX, XXI and XXIII. The antisense nucleic acid molecules shown in Table XXII were chemically synthesized.

[0459] Inactive enzymatic nucleic acid molecules, for example inactive hammerhead enzymatic nucleic acids, can be synthesized by substituting the order of G5A6 and substituting a U for A14 (numbering from Hertel et al., 1992 Nucleic Acids Res., 20, 3252).

### Example 21

### Enzymatic Nucleic Acid Cleavage of HCV RNA Target In Vitro

[0460] Enzymatic nucleic acid molecules targeted to the HCV are designed and synthesized as described above. These enzymatic nucleic acid molecules can be tested for cleavage activity in vitro, for example using the following procedure. The target sequences and the nucleotide location within the HCV are given in Tables XVIII, XIX, XX and XXIII.

[0461] Cleavage Reactions: Full-length or partially full-length, internally-labeled target RNA for enzymatic nucleic acid molecule cleavage assay is prepared by in vitro transcription in the presence of [α-³²P] CTP, passed over a G 50 Sephadex column by spin chromatography and used as substrate RNA without further purification. Alternately, substrates are 5′-³²P-end labeled using T4 polynucleotide kinase enzyme. Assays are performed by pre-warming a 2× concentration of purified enzymatic nucleic acid molecule in enzymatic nucleic acid molecule cleavage buffer (50 mM Tris-HCl, pH 7.5 at 37° C., 10 mM MgCl₂) and the cleavage reaction was initiated by adding the 2× enzymatic nucleic acid molecule mix to an equal volume of substrate RNA (maximum of 1-5 nM) that was also pre-warmed in cleavage buffer. As an initial screen, assays are carried out for 1 hour at 37° C. using a final concentration of either 40 nM or 1 mM enzymatic nucleic acid molecule, i.e., enzymatic nucleic acid molecule excess. The reaction is quenched by the addition of an equal volume of 95% formamide, 20 mM EDTA, 0.05% bromophenol blue and 0.05% xylene cyanol after which the sample is heated to 95° C. for 2 minutes, quick chilled and loaded onto a denaturing polyacrylamide gel. Substrate RNA and the specific RNA cleavage products generated by enzymatic nucleic acid molecule cleavage are visualized on an autoradiograph of the gel. The percentage of cleavage is determined by Phosphor Imager® quantitation of bands representing the intact substrate and the cleavage products.

[0462] Alternatively, enzymatic nucleic acid molecules and substrates were synthesized in 96-well format using 0.2 μmol scale. Substrates were 5′-³²P labeled and gel purified using 7.5% polyacrylamide gels, and eluting into water. Assays were done by combining trace substrate with 500 nM enzymatic nucleic acid or greater, and initiated by adding final concentrations of 40 mM Mg⁺², and 50 mM Tris-Cl pH 8.0. For each enzymatic nucleic acid/substrate combination a control reaction was done to ensure cleavage was not the result of non-specific substrate degradation. A single three hour time point was taken and run on a 15% polyacrylamide gel to asses cleavage activity. Gels were dried and scanned using a Molecular Dynamics Phosphorimager and quantified using Molecular Dynamics ImageQuant software. Percent cleaved was determined by dividing values for cleaved substrate bands by full-length (uncleaved) values plus cleaved values and multiplying by 100 (% cleaved=[C/(U+C)]*100). In vitro cleavage data of enzymatic nucleic acid molecules targeting plus and minus strand HCV RNA is shown in Table XXIII.

### Example 22

### Inhibition of Luciferase Activity Using HCV Targeting Enzymatic Nucleic Acids in OST7 Cells

[0463] The capability of enzymatic nucleic acids to inhibit HCV RNA intracellularly was tested using a dual reporter system that utilizes both firefly and Renilla luciferase (FIG. 23). The enzymatic nucleic acids targeted to the 5′ HCV UTR region, which when cleaved, would prevent the translation of the transcript into luciferase.

[0464] Synthesis of Stabilized Enzymatic Nucleic Acids

[0465] Enzymatic nucleic acids were designed to target 15 sites within the 5′UTR of the HCV RNA (FIG. 24) and synthesized as previously described, except that all enzymatic nucleic acids contain two 2′-amino uridines. Enzymatic nucleic acid and paired control sequences for targeted sites used in various examples herein are shown in Table XXI.

[0466] Reporter Plasmids

[0467] The T7/HCV/firefly luciferase plasmid (HCVT7C₁₋₃₄₁, genotype 1a) was graciously provided by Aleem Siddiqui (University of Colorado Health Sciences Center, Denver, Colo.). The T7/HCV/firefly luciferase plasmid contains a T7 bacteriophage promoter upstream of the HCV 5′UTR (nucleotides 1-341)/firefly luciferase fusion DNA. The Renilla luciferase control plasmid (pRLSV40) was purchased from PROMEGA.

[0468] Luciferase Assay

[0469] Dual luciferase assays were carried out according to the manufacturer's instructions (PROMEGA) at 4 hours after co-transfection of reporter plasmids and enzymatic nucleic acids. All data is shown as the average ratio of HCV/firefly luciferase luminescence over Renilla luciferase luminescence as determined by triplicate samples ±SD.

[0470] Cell Culture and Transfections

[0471] OST7 cells were maintained in Dulbecco's modified Eagle's medium (GIBCO BRL) supplemented with 10% fetal calf serum, L-glutamine (2 mM) and penicillin/streptomycin. For transfections, OST7 cells were seeded in black-walled 96-well plates (Packard) at a density of 12,500 cells/well and incubated at 37° C. under 5% CO₂ for 24 hours. Co-transfection of target reporter HCVT7C (0.8 μg/mL), control reporter pRLSV40, (1.2 μg/mL) and enzymatic nucleic acid, (50-200 nM) was achieved by the following method: a 5× mixture of HCVT7C (4 μg/mL), pRLSV40 (6 μg/mL) enzymatic nucleic acid (250-1000 nM) and cationic lipid (28.5 μg/mL) was made in 150 μL of OPTI-MEM (GIBCO BRL) minus serum. Reporter/enzymatic nucleic acid/lipid complexes were allowed to form for 20 min at 37° C. under 5% CO₂. Medium was aspirated from OST7 cells and replaced with 120 μL of OPTI-MEM (GIBCO BRL) minus serum, immediately followed by the addition of 30 μL of 5× reporter/enzymatic nucleic acid/lipid complexes. Cells were incubated with complexes for 4 hours at 37° C. under 5% CO₂.

[0472] IC50 Determinations for Dose Response Curves

[0473] Apparent IC₅₀ values were calculated by linear interpolation. The apparent IC₅₀ is 1/2 the maximal response between the two consecutive points in which approximately 50% inhibition of HCV/luciferase expression is observed on the dose curve.

[0474] Quantitation of RNA Samples

[0475] Total RNA from transfected cells was purified using the Qiagen RNeasy 96 procedure including a DNase I treatment according to the manufacturer's instructions. Real time RT-PCR (Taqman assay) was performed on purified RNA samples using separate primer/probe sets specific for either firefly or Renilla luciferase RNA. Firefly luciferase primers and probe were upper (5′-CGGTCGGTAAAGTTGTTCCATT-3′) (SEQ ID NO. 16202), lower (5′-CCTCTGACACATAATTCGCCTCT-3′) (SEQ ID NO. 16203), and probe (5′-FAM-TGAAGCGAAGGTTGTGGATCTGGATACC-TAMRA-3′) (SEQ ID NO 16204), and Renilla luciferase primers and probe were upper (5′-GTTTATTGAATCGGACCCAGGAT-3′) (SEQ ID NO. 16205), lower (5′-AGGTGCATCTTCTTGCGAAAA-3′) (SEQ ID NO. 16206), and probe (5′-FAM-CTTTTCCAATGCTATTGTTGAAGGTGCCAA-3′) (SEQ ID NO. 16207)-TAMRA, both sets of primers and probes were purchased from Integrated DNA Technologies. RNA levels were determined from a standard curve of amplified RNA purified from a large-scale transfection. RT minus controls established that RNA signals were generated from RNA and not residual plasmid DNA. RT-PCR conditions were: 30 min at 48° C., 10 min at 95° C., followed by 40 cycles of 15 sec at 95° C. and 1 min at 60° C. Reactions were performed on an ABI Prism 7700 sequence detector. Levels of firefly luciferase RNA were normalized to the level of Renilla luciferase RNA present in the same sample. Results are shown as the average of triplicate treatments ±SD.

### Example 23

### Inhibition of HCV 5′UTR-Luciferase Expression by Synthetic Stabilized Enzymatic Nucleic Acids

[0476] The primary sequence of the HCV 5′UTR and characteristic secondary structure (FIG. 24) is highly conserved across all HCV genotypes, thus making it a very attractive target for enzymatic nucleic acid-mediated cleavage. Enzymatic hammerhead nucleic acids, as a generally shown in FIG. 25 and Table XXI (RPI 12249-12254, 12257-12265) were designed and synthesized to target 15 of the most highly conserved sites in the 5′UTR of HCV RNA. These synthetic enzymatic nucleic acids were stabilized against nuclease degradation by the addition of modifications such as 2′-O-methyl nucleotides, 2′-amino-uridines at U4 and U7 core positions, phosphorothioate linkages, and a 3′-inverted abasic cap.

[0477] In order to mimic cytoplasmic transcription of the HCV genome, OST7 cells were transfected with a target reporter plasmid containing a T7 bacteriophage promoter upstream of a HCV 5′UTR/firefly luciferase fusion gene. Cytoplasmic expression of the target reporter is facilitated by high levels of T7 polymerase expressed in the cytoplasm of OST7 cells. Co-transfection of target reporter HCVT7C₁₋₃₄₁ (firefly luciferase), control reporter pRLSV40 (Renilla luciferase) and enzymatic nucleic acid was carried out in the presence of cationic lipid. To determine the background level of luciferase activity, applicant used a control enzymatic nucleic acid that targets an irrelevant, non-HCV sequence. Transfection of reporter plasmids in the presence of this irrelevant control enzymatic nucleic acid (ICR) resulted in a slight decrease of reporter expression when compared to transfection of reporter plasmids alone. Therefore, the ICR was used to control for non-specific effects on reporter expression during treatment with HCV specific enzymatic nucleic acids. Renilla luciferase expression from the pRLSV40 reporter was used to normalize for transfection efficiency and sample recovery.

[0478] Of the 15 amino-modified hammerhead enzymatic nucleic acids tested, 12 significantly inhibited HCV/luciferase expression (>45%, P<0.05) as compared to the ICR (FIG. 26A). These data suggest that most of the HCV 5′UTR sites targeted here are accessible to enzymatic nucleic acid binding and subsequent RNA cleavage. To investigate further the enzymatic nucleic acid-dependent inhibition of HCV/luciferase activity, hammerhead enzymatic nucleic acids designed to cleave after sites 79, 81, 142, 192, 195, 282 or 330 of the HCV 5′UTR were selected for continued study because their anti-HCV activity was the most efficacious over several experiments. A corresponding attenuated core (AC) control was synthesized for each of the 7 active enzymatic nucleic acids (Table XX). Each paired AC control contains similar nucleotide composition to that of its corresponding active enzymatic nucleic acid however, due to scrambled binding arms and changes to the catalytic core, lacks the ability to bind or catalyze the cleavage of HCV RNA. Treatment of OST7 cells with enzymatic nucleic acids designed to cleave after sites 79, 81, 142, 195 or 330 resulted in significant inhibition of HCV/luciferase expression (65%, 50%, 50%, 80% and 80%, respectively) when compared to HCV/luciferase expression in cells treated with corresponding ACs, P<0.05 (FIG. 26B). It should be noted that treatment with either the ICR or ACs for sites 79, 81, 142 or 192 caused a greater reduction of HCV/luciferase expression than treatment with ACs for sites 195, 282 or 330. The observed differences in HCV/luciferase expression after treatment with ACs most likely represents the range of activity due to non-specific effects of oligonucleotide treatment and/or differences in base composition. Regardless of differences in HCV/luciferase expression levels observed as a result of treatment with ACs, active enzymatic nucleic acids designed to cleave after sites 79, 81, 142, 195, or 330 demonstrated similar and potent anti-HCV activity (FIG. 26B).

### Example 24

### Synthetic Stabilized Enzymatic Nucleic Acids Inhibit HCV/Luciferase Expression in a Concentration-Dependent Manner

[0479] In order to characterize enzymatic nucleic acid efficacy in greater detail, these same 5 lead hammerhead enzymatic nucleic acids were tested for their ability to inhibit HCV/luciferase expression over a range of enzymatic nucleic acid concentrations (0 nM-100 nM). For constant transfection conditions, the total concentration of nucleic acid was maintained at 100 nM for all samples by mixing the active enzymatic nucleic acid with its corresponding AC. Moreover, mixing of active enzymatic nucleic acid and AC maintains the lipid to nucleic acid charge ratio. A concentration-dependent inhibition of HCV/luciferase expression was observed after treatment with each of the 5 enzymatic nucleic acids (FIGS. 27A-E). By linear interpolation, the enzymatic nucleic acid concentration resulting in 50% inhibition (apparent IC₅₀) of HCV/luciferase expression ranged from 40-215 nM. The two most efficacious enzymatic nucleic acids were those designed to cleave after sites 195 or 330 with apparent IC₅₀ values of 46 nM and 40 nM, respectively (FIGS. 27D and E).

### Example 25

### An Enzymatic Nucleic Acid Mechanism is Required for the Observed Inhibition of HCV/Luciferase Expression

[0480] To confirm that an enzymatic nucleic acid mechanism of action was responsible for the observed inhibition of HCV/luciferase expression, paired binding-arm attenuated core (BAC) controls (RPI 15291 and 15294) were synthesized for direct comparison to enzymatic nucleic acids targeting sites 195 (RPI 12252) and 330 (RPI 12254). Paired BACs can specifically bind HCV RNA but are unable to promote RNA cleavage because of changes in the catalytic core and, thus, can be used to assess inhibition due to binding alone. Also included in this comparison were paired SAC controls (RPI 15292 and 15295) that contain scrambled binding arms and attenuated catalytic cores, and so lack the ability to bind the target RNA or to catalyze target RNA cleavage.

[0481] Enzymatic nucleic acid cleavage of target RNA should result in both a lower level of HCV/luciferase RNA and a subsequent decrease in HCV/luciferase expression. In order to analyze target RNA levels, a reverse transcriptase/polymerase chain reaction (RT-PCR) assay was employed to quantify HCV/luciferase RNA levels. Primers were designed to amplify the luciferase coding region of the HCV 5′UTR/luciferase RNA. This region was chosen because HCV-targeted enzymatic nucleic acids that might co-purify with cellular RNA would not interfere with RT-PCR amplification of the luciferase RNA region. Primers were also designed to amplify the Renilla luciferase RNA so that Renilla RNA levels could be used to control for transfection efficiency and sample recovery.

[0482] OST7 cells were treated with active enzymatic nucleic acids designed to cleave after sites 195 or 330, paired SACs, or paired BACs. Treatment with enzymatic nucleic acids targeting site 195 or 330 resulted in a significant reduction of HCV/luciferase RNA when compared to their paired SAC controls (P<0.01). In this experiment the site 195 enzymatic nucleic acid was more efficacious than the site 330 enzymatic nucleic acid (FIG. 28A). Treatment with paired BACs that target site 195 or 330 did not reduce HCV/luciferase RNA when compared to the corresponding SACs, thus confirming that the ability to bind alone does not result in a reduction of HCV/luciferase RNA.

[0483] To confirm that enzymatic nucleic acid-mediated cleavage of target RNA is necessary for inhibition of HCV/luciferase expression, HCV/luciferase activity was determined in the same experiment. As expected, significant inhibition of HCV/luciferase expression was observed after treatment with active enzymatic nucleic acids when compared to paired SACs (FIG. 28B). Importantly, treatment with paired BACs did not inhibit HCV/luciferase expression, thus confirming that the ability to bind alone is also not sufficient to inhibit translation. As observed in the RNA assay, the site 195 enzymatic nucleic acid was more efficacious than the site 330 enzymatic nucleic acid in this experiment. However, a correlation between enzymatic nucleic acid-mediated HCV RNA reduction and inhibition of HCV/luciferase translation was observed for enzymatic nucleic acids to both sites. The reduction in target RNA and the necessity for an active enzymatic nucleic acid catalytic core confirm that a enzymatic nucleic acid mechanism is required for the observed reduction in HCV/luciferase protein activity in cells treated with site 195 or site 330 enzymatic nucleic acids.

### Example 26

### Zinzyme Inhibition of Chimeric HCV/Poliovirus Replication

[0484] During HCV infection, viral RNA is present as a potential target for enzymatic nucleic acid cleavage at several processes: un-coating, translation, RNA replication and packaging. Target RNA can be more or less accessible to enzymatic nucleic acid cleavage at any one of these steps. Although the association between the HCV initial ribosome entry site (IRES) and the translation apparatus is mimicked in the HCV 5′UTR/luciferase reporter system, these other viral processes are not represented in the OST7 system. The resulting RNA/protein complexes associated with the target viral RNA are also absent. Moreover, these processes can be coupled in an HCV-infected cell which could further impact target RNA accessibility. Therefore, applicant tested whether enzymatic nucleic acids designed to cleave the HCV 5′UTR could effect a replicating viral system.

[0485] Recently, Lu and Wimmer characterized a HCV-poliovirus chimera in which the poliovirus IRES was replaced by the IRES from HCV (Lu & Wimmer, 1996, Proc. Natl. Acad. Sci. USA. 93, 1412-1417). Poliovirus (PV) is a positive strand RNA virus like HCV, but unlike HCV is non-enveloped and replicates efficiently in cell culture. The HCV-PV chimera expresses a stable, small plaque phenotype relative to wild type PV.

[0486] The following enzymatic nucleic acid molecules (zinzymes) were synthesized and tested for replicative inhibition of an HCV/Poliovirus chimera: RPI 18763, RPI 18812, RPI 18749, RPI 18765, RPI 18792, and RPI 18814 (Table XX). A scrambled attenuated core enzymatic nucleic acid, RPI 18743, was used as a control.

[0487] HeLa cells were infected with the HCV-PV chimera for 30 minutes and immediately treated with enzymatic nucleic acid. HeLa cells were seeded in U-bottom 96-well plates at a density of 9000-10,000 cells/well and incubated at 37° C. under 5% CO₂ for 24 h. Transfection of nucleic acid (200 nM) was achieved by mixing of 10× nucleic acid (2000 nM) and 10× of a cationic lipid (80 μg/ml) in DMEM (Gibco BRL) with 5% fetal bovine serum (FBS). Nucleic acid/lipid complexes were allowed to incubate for 15 minutes at 37° C. under 5% CO₂. Medium was aspirated from cells and replaced with 80 μl of DMEM (Gibco BRL) with 5% FBS serum, followed by the addition of 20 μls of 10× complexes. Cells were incubated with complexes for 24 hours at 37° C. under 5% CO2.

[0488] The yield of HCV-PV from treated cells was quantified by plaque assay. The plaque assays were performed by diluting virus samples in serum-free DMEM (Gibco BRL) and applying 100 μl to HeLa cell monolayers (˜80% confluent) in 6-well plates for 30 minutes. Infected monolayers were overlayed with 3 ml 1.2% agar (Sigma) and incubated at 37° C. under 5% CO2. Two or three days later the overlay was removed, monolayers were stained with 1.2% crystal violet, and plaque forming units were counted. The results for the zinzyme inhibition of HCV-PV replication are shown in FIG. 33.

### Example 27

### Antisense Inhibition of Chimeric HCV/Poliovirus Replication

[0489] Antisense nucleic acid molecules (RPI 17501 and RPI 17498, Table XXII) were tested for replicative inhibition of an HCV/Poliovirus chimera compared to scrambled controls. An antisense nucleic acid molecule is a non-enzymatic nucleic acid molecule that binds to target RNA by means of RNA-RNA or RNA-DNA or RNA-PNA (protein nucleic acid; Egholm et al., 1993 Nature 365, 566) interactions and alters the activity of the target RNA (for a review, see Stein and Cheng, 1993 Science 261, 1004 and Woolf et al., U.S. Pat. No. 5,849,902). Typically, antisense molecules are complementary to a target sequence along a single contiguous sequence of the antisense molecule. However, in certain embodiments, an antisense molecule can bind to substrate such that the substrate molecule forms a loop, and/or an antisense molecule can bind such that the antisense molecule forms a loop. Thus, the antisense molecule can be complementary to two (or even more) non-contiguous substrate sequences or two (or even more) non-contiguous sequence portions of an antisense molecule can be complementary to a target sequence or both. For a review of current antisense strategies, see Schmajuk et al., 1999, J. Biol. Chem., 274, 21783-21789, Delihas et al., 1997, Nature, 15, 751-753, Stein et al., 1997, Antisense N. A. Drug Dev., 7, 151, Crooke, 2000, Methods Enzymol., 313, 3-45; Crooke, 1998, Biotech. Genet. Eng. Rev., 15, 121-157, Crooke, 1997, Ad. Pharmacol., 40, 1-49. In addition, antisense DNA can be used to target RNA by means of DNA-RNA interactions, thereby activating RNase H, which digests the target RNA in the duplex. The antisense oligonucleotides can comprise one or more RNAse H activating region, which is capable of activating RNAse H cleavage of a target RNA. Antisense DNA can be synthesized chemically or expressed via the use of a single stranded DNA expression vector or equivalent thereof. Additionally, antisense molecules can be used in combination with the enzymatic nucleic acid molecules of the instant invention.

[0490] A RNase H activating region is a region (generally greater than or equal to 4-25 nucleotides in length, preferably from 5-11 nucleotides in length) of a nucleic acid molecule capable of binding to a target RNA to form a non-covalent complex that is recognized by cellular RNase H enzyme (see for example Arrow et al., U.S. Pat. No. 5,849,902; Arrow et al., U.S. Pat. No. 5,989,912). The RNase H enzyme binds to the nucleic acid molecule-target RNA complex and cleaves the target RNA sequence. The RNase H activating region comprises, for example, phosphodiester, phosphorothioate (preferably at least four of the nucleotides are phosphorothiote substitutions; more specifically, 4-11 of the nucleotides are phosphorothiote substitutions); phosphorodithioate, 5′-thiophosphate, or methylphosphonate backbone chemistry or a combination thereof. In addition to one or more backbone chemistries described above, the RNase H activating region can also comprise a variety of sugar chemistries. For example, the RNase H activating region can comprise deoxyribose, arabino, fluoroarabino or a combination thereof, nucleotide sugar chemistry. Those skilled in the art will recognize that the foregoing are non-limiting examples and that any combination of phosphate, sugar and base chemistry of a nucleic acid that supports the activity of RNase H enzyme is within the scope of the definition of the RNase H activating region and the instant invention.

[0491] HeLa cells were infected with the HCV-PV chimera for 30 minutes and immediately treated with antisense nucleic acid. HeLa cells were seeded in U-bottom 96-well plates at a density of 9000-10,000 cells/well and incubated at 37° C. under 5% CO₂ for 24 h. Transfection of nucleic acid (200 nM) was achieved by mixing of 10× nucleic acid (2000 nM) and 10× of a cationic lipid (80 μg/ml) in DMEM (Gibco BRL) with 5% fetal bovine serum (FBS). Nucleic acid/lipid complexes were allowed to incubate for 15 minutes at 37° C. under 5% CO₂. Medium was aspirated from cells and replaced with 80 μl of DMEM (Gibco BRL) with 5% FBS serum, followed by the addition of 20 μls of 10× complexes. Cells were incubated with complexes for 24 hours at 37° C. under 5% CO2.

[0492] The yield of HCV-PV from treated cells was quantified by plaque assay. The plaque assays were performed by diluting virus samples in serum-free DMEM (Gibco BRL) and applying 100 μl to HeLa cell monolayers (˜80% confluent) in 6-well plates for 30 minutes. Infected monolayers were overlayed with 3 ml 1.2% agar (Sigma) and incubated at 37° C. under 5% CO2. Two or three days later the overlay was removed, monolayers were stained with 1.2% crystal violet, and plaque forming units were counted. The results for the antisense inhibition of HCV-PV are shown in FIG. 34.

### Example 28

### Nucleic Acid Inhibition of Chimeric HCV/PV in Combination with Interferon

[0493] One of the limiting factors in interferon (IFN) therapy for chronic HCV are the toxic side effects associated with IFN. Applicant has reasoned that lowering the dose of IFN needed can reduce these side effects. Applicant has previously shown that enzymatic nucleic acid molecules targeting HCV RNA have a potent antiviral effect against replication of an HCV-poliovirus (PV) chimera (Macejak et al., 2000, Hepatology, 31, 769-776). In order to determine if the antiviral effect of type 1 IFN could be improved by the addition of anti-HCV enzymatic nucleic acid treatment, a dose response (0 U/ml to 100 U/ml) with IFN alfa 2a or IFN alfa 2b was performed in HeLa cells in combination with 200 nM site 195 anti-HCV enzymatic nucleic acid (RPI 13919) or enzymatic nucleic acid control (SAC) treatment. The SAC control (RPI 17894) is a scrambled binding arm, attenuated core version of the site 195 enzymatic nucleic acid (RPI 13919). IFN dose responses were performed with different pretreatment regimes to find the dynamic range of inhibition in this system. In these studies, HeLa cells were used instead of HepG2 because of more efficient enzymatic nucleic acid delivery (Macejak et al., 2000, Hepatology, 31, 769-776).

[0494] Cells and Virus

[0495] HeLa cells were maintained in DMEM (BioWhittaker, Walkersville, Md.) supplemented with 5% fetal bovine serum. A cloned DNA copy of the HCV-PV chimeric virus was a gift of Dr. Eckard Wimmer (NYU, Stony Brook, N.Y.). An RNA version was generated by in vitro transcription and transfected into HeLa cells to produce infectious virus (Lu and Wimmer, 1996, PNAS USA., 93, 1412-1417).

[0496] Enzymatic Nucleic Acid Synthesis

[0497] Nuclease resistant enzymatic nucleic acids and control oligonucleotides containing 2′-O-methyl-nucleotides, 2′-deoxy-2′-C-allyl uridine, a 3′-inverted abasic cap, and phosphorothioate linkages were chemically synthesized. The anti-HCV enzymatic nucleic acid (RPI 13919) targeting cleavage after nucleotide 195 of the 5′ UTR of HCV is shown in Table XX. Attenuated core controls have nucleotide changes in the core sequence that greatly diminished the enzymatic nucleic acid's cleavage activity. The attenuated controls either contain scrambled binding arms (referred to as SAC, RPI 18743) or maintain binding arms (BAC, RPI 17894) capable of binding to the HCV RNA target.

[0498] Enzymatic Nucleic Acid Delivery

[0499] A cationic lipid was used as a cytofectin agent. HeLa cells were seeded in 96-well plates at a density of 9000-10,000 cells/well and incubated at 37° C. under 5% CO₂ for 24 h. Transfection of enzymatic nucleic acid or control oligonucleotides (200 nM) was achieved by mixing 10× enzymatic nucleic acid or control oligonucleotides (2000 nM) with 10× RPI.9778 (80 μg/ml) in DMEM containing 5% fetal bovine serum (FBS) in U-bottom 96-well plates to make 5× complexes. Enzymatic nucleic acid/lipid complexes were allowed to incubate for 15 min at 37° C. under 5% CO2. Medium was aspirated from cells and replaced with 80 μl of DMEM (Gibco BRL) containing 5% FBS serum, followed by the addition of 20 μl of 5× complexes. Cells were incubated with complexes for 24 h at 37° C. under 5% CO2.

[0500] Interferon/Enzymatic Nucleic Acid Combination Treatment

[0501] Interferon alfa 2a (Roferon®) was purchased from Roche Bioscience (Palo Alto, Calif.). Interferon alfa 2b (Intron A®) was purchased from Schering-Plough Corporation (Madison, N.J.). Consensus interferon (interferon-alfa-con 1) was a generous gift of Amgen, Inc. (Thousand Oaks, Calif.). For the basis of comparison, the manufacturers' specified units were used in the studies reported here; however, the manufacturers' unit definitions of these three IFN preparations are not necessarily the same. Nevertheless, since clinical dosing is based on the manufacturers' specified units, a direct comparison based on these units has relevance to clinical therapeutic indices. HeLa cells were seeded (10,000 cells per well) and incubated at 37° C. under 5% CO2 for 24 h. Cells were then pre-treated with interferon in complete media (DMEM+5% FBS) for 4 h and then infected with HCV-PV at a multiplicity of infection (MOI)=0.1 for 30 min. The viral inoculum was then removed and enzymatic nucleic acid or attenuated control (SAC or BAC) was delivered with the cytofectin formulation (8 μg/ml) in complete media for 24 h as described above. Where indicated for enzymatic nucleic acid dose response studies, active enzymatic nucleic acid was mixed with SAC to maintain a 200 nM total oligonucleotide concentration and the same lipid charge ratio. After 24 h, cells were lysed to release virus by three cycles of freeze/thaw. Virus was quantified by plaque assay and viral yield is reported as mean plaque forming units per ml (pfu/ml)+SD. All experiments were repeated at least twice and the trends in the results reported were reproducible. Significance levels (P values) were determined by the Student's test.

[0502] Plaque Assay

[0503] Virus samples were diluted in serum-free DMEM and 100 μl applied to Vero cell monolayers (˜80% confluent) in 6-well plates for 30 min. Infected monolayers were overlaid with 3 ml 1.2% agar (Sigma Chemical Company, St. Louis, Mo.) and incubated at 37° C. under 5% CO2. When plaques were visible (after two to three days) the overlay was removed, monolayers were stained with 1.2% crystal violet, and plaque forming units were counted.

[0504] Results

[0505] As shown in FIGS. 29A and 29B, treatment with the site 195 (RPI 13919) anti-HCV hammerhead enzymatic nucleic acid alone (0 U/ml IFN) resulted in viral replication that was dramatically reduced compared to SAC-treated cells (85%, P<0.01). For both IFN alfa 2a (FIG. 29A) or IFN alfa 2b (FIG. 29B), treatment with 25 U/ml resulted in a ˜90% inhibition of HCV-PV replication in SAC-treated cells as compared to cells treated with SAC alone (p<0.01 for both observations). The maximal level of inhibition in SAC-treated cells (94%) was achieved by treatment with >50 U/ml of either IFN alfa 2a or IFN alfa 2b (p<0.01 for both observations versus SAC alone). Maximal inhibition could however, be achieved by a 5-fold lower dose of IFN alfa 2a (10 U/ml) if enzymatic nucleic acid targeting site 195 in the 5′ UTR of HCV RNA was given in combination (FIG. 29A, p<0.01). While the additional effect of enzymatic nucleic acid treatment on IFN alfa 2b-treated cells at 10 U/ml was very slight, the combined effect with 25 U/ml IFN alfa 2b was greater in magnitude (FIG. 29B). For both interferons tested, pretreatment with 25 U/ml in combination with 200 nM site 195 anti-HCV enzymatic nucleic acid resulted in an even greater level of inhibition of viral replication (>98%) compared to replication in cells treated with 200 nM SAC alone (P<0.01).

[0506] A dose response of the site 195 anti-HCV enzymatic nucleic acid was also performed in HeLa cells, either with or without 12.5 U/ml IFN alfa 2a or IFN alfa 2b pretreatment. As shown in FIG. 30, enzymatic nucleic acid-mediated inhibition was dose-dependent and a significant inhibition of HCV-PV replication (>75% versus 0 nM enzymatic nucleic acid, P<0.01) could be achieved by treatment with >150 nM anti-HCV enzymatic nucleic acid alone (no IFN). However, in IFN-pretreated cells, the dose of anti-HCV enzymatic nucleic acid needed to achieve this level of inhibition was decreased 3-fold to 50 nM (P<0.01 versus 0 nM enzymatic nucleic acid). In comparison, treatment with the site 195 anti-HCV enzymatic nucleic acid alone at 50 nM resulted in only 40% inhibition of virus replication. Pretreatment with IFN enhanced the antiviral effect of site 195 enzymatic nucleic acid at all enzymatic nucleic acid doses, compared to no IFN pretreatment.

[0507] Interferon-alfacon1, consensus IFN (CIFN), is another type 1 IFN that is used to treat chronic HCV. To determine if a similar enhancement can occur in CIFN-treated cells, a dose response with CIFN was performed in HeLa cells using 0 U/ml to 12.5 U/ml CIFN in combination with 200 nM site 195 anti-HCV enzymatic nucleic acid or SAC treatment (FIG. 31A). Again, in the presence of the site 195 anti-HCV enzymatic nucleic acid alone, viral replication was dramatically reduced compared to SAC-treated cells. As shown in FIG. 31A, treatment with 200 mM anti-HCV enzymatic nucleic acid alone significantly inhibited HCV-PV replication (90% versus SAC treatment, P<0.01). However, pretreatment with concentrations of CIFN from 1 U/ml to 12.5 U/ml in combination with 200 nM anti-HCV enzymatic nucleic acid resulted in even greater inhibition of viral replication (>98%) compared to replication in cells treated with 200 nM SAC alone (P<0.01). It is important to note that pretreatment with 1 U/ml CIFN in SAC-treated cells did not have a significant effect on HCV-poliovirus replication, but in the presence of enzymatic nucleic acid a significant inhibition of replication was observed (>98%, P<0.01). Thus, the dose of CIFN needed to achieve a >98% inhibition could be lowered to 1 U/ml in cells also treated with 200 nM site 195 anti-HCV enzymatic nucleic acid.

[0508] A dose response of site 195 anti-HCV enzymatic nucleic acid was then performed in HeLa cells, either with or without 12.5 U/ml CIFN pretreatment. As shown in FIG. 31B, a significant inhibition of HCV-PV replication (>95% versus 0 mM enzymatic nucleic acid, P<0.01) could be achieved by treatment with ≧150 nM anti-HCV enzymatic nucleic acid alone. However, in CIFN-pretreated cells, the dose of anti-HCV enzymatic nucleic acid needed to achieve this level of inhibition was only 50 nM (P<0.01). In comparison, treatment with the site 195 anti-HCV enzymatic nucleic acid alone at 50 nM resulted in ˜50% inhibition of virus replication. Thus, as was seen with IFN alfa 2a and IFN alfa 2b, the dose of enzymatic nucleic acid could be reduced 3-fold in the presence of CIFN pretreatment to achieve a similar antiviral effect as enzymatic nucleic acid-treatment alone.

[0509] To further explore the combination of lower enzymatic nucleic acid concentration and CIFN, a dose response with 0 U/ml to 12.5 U/ml CIFN was subsequently performed in HeLa cells in combination with 50 nM site 195 anti-HCV enzymatic nucleic acid treatment. In multiple experiments, treatment with 50 nM anti-HCV enzymatic nucleic acid alone inhibited HCV-PV replication 50%-81% compared to viral replication in SAC-treated cells. As for the experiment shown in FIG. 31A, treatment with CIFN alone at 5 U/ml resulted in ˜50% inhibition of viral replication. However, a four hour pretreatment with 5 U/ml CIFN followed by 50 nM anti-HCV enzymatic nucleic acid treatment resulted in 95%-97% inhibition compared to SAC-treated cells (P<0.01).

[0510] To demonstrate that the enhanced antiviral effect of CIFN and enzymatic nucleic acid combination treatment was dependent upon enzymatic nucleic acid cleavage activity, the effect of CIFN in combination with site 195 anti-HCV enzymatic nucleic acid versus the effect of CIFN in combination with a binding competent, attenuated core, control (BAC) was then compared. The BAC can still bind to its specific RNA target, but is greatly diminished in cleavage activity. Pretreatment with 12.5 U/ml CIFN reduced the viral yield −90% (7-fold) in cells treated with BAC (compare CIFN versus BAC in FIG. 32). Cells treated with 200 nM site 195 anti-HCV enzymatic nucleic acid alone produced −95% (17-fold) less virus than BAC-treated cells (195 RZ BAC in FIG. 32). The combination of CIFN pretreatment and 200 nM site 195 anti-HCV enzymatic nucleic acid results in an augmented >98% (300-fold) reduction in viral yield (CIFN+RZ versus control in FIG. 32).

[0511] 2′-5′-Oligoadenylate Inhibition of HCV

[0512] Type 1 Interferon is a key constituent of many effective treatment programs for chronic HCV infection. Treatment with type 1 interferon induces a number of genes and results in an antiviral state within the cell. One of the genes induced is 2′,5′ oligoadenylate synthetase, an enzyme that synthesizes short 2′,5′ oligoadenylate (2-5A) molecules. Nascent 2-5A subsequently activates a latent RNase, RNase L, which in turn nonspecifically degrades viral RNA. As described herein, ribozymes targeting HCV RNA that inhibit the replication of an HCV-poliovirus (HCV-PV) chimera in cell culture and have shown that this antiviral effect is augmented if ribozyme is given in combination with type 1 interferon. In addtion, the 2-5A component of the interferon response can also inhibit replication of the HCV-PV chimera.

[0513] The antiviral effect of anti-HCV ribozyme treatment is enhanced if type 1 interferon is given in combination. Interferon induces a number of gene products including 2′,5′ oligoadenylate (2-5A) synthetase, double-stranded RNA-activated protein kinase (PKR), and the Mx proteins. Mx proteins appear to interfere with nuclear transport of viral complexes and are not thought to play an inhibitory role in HCV infection. On the other hand, the additional 2-5A-mediated RNA degradation (via RNase L) and/or the inhibition of viral translation by PKR in interferon-treated cells can augment the ribozyme-mediated inhibition of HCV-PV replication.

[0514] To investigate the potential role of the 2-5A/RNase L pathway in this enhancement phenomenon, HCV-PV replication was analyzed in HeLa cells treated exogenously with chemically-synthesized analogs of 2-5A (FIG. 35), alone and in combination with the anti-HCV ribozyme (RPI 13919). These results were compared to replication in cells treated with interferon and/or anti-HCV ribozyme. Anti-HCV ribozyme was transfected into cells with a cationic lipid. To control for nonspecific effects due to lipid-mediated transfection, a scrambled arm, attenuated core, oligonucleotide (SAC) (RPI 17894) was transfected for comparison. The SAC is the same base composition as the ribozyme but is greatly attenuated in catalytic activity due to changes in the core sequence and cannot bind specifically to the HCV sequence.

[0515] As shown in FIG. 36A, HeLa cells pretreated with 10 U/ml consensus interferon for 4 hours prior to HCV-PV infection resulted in ˜70% reduction of viral replication in SAC-treated cells. Similarly, HeLa cells treated with 100 nM anti-HCV ribozyme for 20 hours after infection resulted in an ˜80% reduction in viral yield. This antiviral effect was enhanced to ˜98% inhibition in HeLa cells pretreated with interferon for 4 hours before infection and then treated with anti-HCV ribozyme for 20 hours after infection. In parallel, a 2-5A compound (analog I, FIG. 35) that was protected from nuclease digestion at the 3′-end with an inverted abasic moiety was tested. As shown in FIG. 36B, treatment with 200 nM 2-5A analog I for 4 hours prior to HCV-PV infection only slightly inhibited HCV-PV replication (˜20%) in SAC-treated cells. Moreover, the inhibition due to a 20 hour anti-HCV ribozyme treatment was not augmented with a 4 hour pretreatment of 2-5A in combination (compare third bar to fourth bar in FIG. 36B).

[0516] There are several possible possible explanations why the chemically synthesized 2-5A analog was not able to completely activate RNase L. It is possible that the 2-5A analog was not sufficiently stable or that in this experiment the 4 hour pretreatment period was too short for RNase L activation. To test these possibilities, a 2-5A compound containing a 5′-terminal thiophosphate (P═S) for added nuclease resistance, in addition to the 3′-abasic, was also included (analog II, FIG. 35). In addition, a longer 2-5A treatment was used. In this experiment (FIG. 37), HeLa cells were treated with 2-5A or 2-5A (P═S) for 20 hours after HCV-PV infection. Again, anti-HCV ribozyme treatment resulted in >80% inhibition. In contrast to the 20% inhibition of viral replication seen with a 4 hour 2-5A pretreatment, viral replication in cells treated with 2-5A analog I for 20 hours after HCV-PV infection was inhibited by ˜70%. The P═S version (analog II) inhibited HCV-PV replication by −35%. Thus, both 2-5A analogs used here are able to generate an antiviral effect, presumably through RNase L activation. The P═S version, although more resistant to 5′ dephosphorylation, did not yield as great an anti-viral effect. It is possible that combination of the 5′-terminal thiophosphate together with the presence of a 3′-inverted abasic moiety can interfere with RNase L activation. Nevertheless, these results demonstrate potent anti-HCV activity by a nuclease-stabilized 2-5A analog.

[0517] The level of reduction in HCV-PV replication in cells treated with 2-5A analog I for 20 hours was similar to that in cells pretreated with consensus interferon for 4 hours. To determine if this expanded 2-5A treatment regimen would enhance anti-HCV ribozyme efficacy to the same degree as does the interferon pretreatment, HeLa cells infected with HCV-PV were treated with a combination of 2-5A and anti-HCV ribozyme for 20 hours after infection. In this experiment, a 200 mM treatment with anti-HCV ribozyme or 2-5A treatment alone inhibited viral replication by 88% or ˜60%, respectively, compared to SAC treatment (FIG. 38, left three bars). To maintain consistent transfection conditions but vary the concentration of anti-HCV ribozyme or 2-5A, anti-HCV ribozyme was mixed with the SAC to maintain a total dose of 200 nM. A 50 mM treatment with anti-HCV ribozyme inhibited HCV-PV replication by ˜70% (solid middle bar). However, the amount of HCV-PV replication was not further reduced in cells treated with a combination of 50 nM anti-HCV ribozyme and 150 nM 2-5A (striped middle bar). Likewise, cells treated with 100 nM anti-HCV ribozyme inhibited HCV-PV replication by ˜80% whether they were also treated with 100 mM of 2-5A or SAC (right two bars). In contrast, antiviral activity increased from 80% to 98% when 100 nM anti-HCV ribozyme was given in combination with interferon (FIG. 36A). The reasons for the lack of additive or synergistic effects for the ribozyme/2-5A combination therapy is unclear at this time but can be due to that fact that both compounds have a similar mechanism of action (degradation of RNA). Further study is warranted to examine this possibility.

[0518] As a monotherapy, 2-5A treatment generates a similar inhibitory effect on HCV-poliovirus replication as does interferon treatment. If these results are maintained in HCV patients, treatment with 2-5A can not only be efficacious but can also generate less side effects than those observed with interferon if the plethora of interferon-induced genes were not activated.

[0519] HBV Cell Culture Models

[0520] As previously mentioned, HBV does not infect cells in culture. However, transfection of HBV DNA (either as a head-to-tail dimer or as an “overlength” genome of >100%) into HuH7 or Hep G2 hepatocytes results in viral gene expression and production of HBV virions released into the media. Thus, HBV replication competent DNA are co-transfected with ribozymes in cell culture. Such an approach has been used to report intracellular ribozyme activity against HBV (zu Putlitz, et al., 1999, J. Virol., 73, 5381-5387, and Kim et al., 1999, Biochem. Biophys. Res. Commun., 257, 759-765). In addition, stable hepatocyte cell lines have been generated that express HBV. In these cells, only ribozyme need be delivered; however, performance of a delivery screen is required. Intracellular HBV gene expression can be assayed by a Taqman® assay for HBV RNA or by ELISA for HBV protein. Extracellular virus can be assayed by PCR for DNA or ELISA for protein. Antibodies are commercially available for HBV surface antigen and core protein. A secreted alkaline phosphatase expression plasmid can be used to normalize for differences in transfection efficiency and sample recovery.

[0521] HBV Animal Models

[0522] There are several small animal models to study HBV replication. One is the transplantation of HBV-infected liver tissue into irradiated mice. Viremia (as evidenced by measuring HBV DNA by PCR) is first detected 8 days after transplantation and peaks between 18-25 days (Ilan et al., 1999, Hepatology, 29, 553-562).

[0523] Transgenic mice that express HBV have also been used as a model to evaluate potential anti-virals. HBV DNA is detectable in both liver and serum (Guidotti et al., 1995, J. Virology, 69, 10, 6158-6169; Morrey et al., 1999, Antiviral Res., 42, 97-108).

[0524] An additional model is to establish subcutaneous tumors in nude mice with Hep G2 cells transfected with HBV. Tumors develop in about 2 weeks after inoculation and express HBV surface and core antigens. HBV DNA and surface antigen is also detected in the circulation of tumor-bearing mice (Yao et al., 1996, J. Viral Hepat., 3, 19-22).

[0525] In one embodiment, the invention features a mouse, for example a male or female mouse, implanted with HepG2.2.15 cells, wherein the mouse is susceptible to HBV infection and capable of sustaining HBV DNA expression. One embodiment of the invention provides a mouse implanted with HepG2.2.15 cells, wherein said mouse sustains the propagation of HEPG2.2.15 cells and HBV production (see Macejak, U.S. Provisional Patent Application No. 60/296,876).

[0526] Woodchuck hepatitis virus (WHV) is closely related to HBV in its virus structure, genetic organization, and mechanism of replication. As with HBV in humans, persistent WHV infection is common in natural woodchuck populations and is associated with chronic hepatitis and hepatocellular carcinoma (HCC). Experimental studies have established that WHV causes HCC in woodchucks and woodchucks chronically infected with WHV have been used as a model to test a number of anti-viral agents. For example, the nucleoside analogue 3T3 was observed to cause dose dependent reduction in virus (50% reduction after two daily treatments at the highest dose) (Hurwitz et al., 1998. Antimicrob. Agents Chemother., 42, 2804-2809).

[0527] HCV Cell Culture Models

[0528] Although there have been reports of replication of HCV in cell culture (see below), these systems are difficult to replicate and have proven unreliable. Therefore, as was the case for development of other anti-HCV therapeutics such as interferon and ribavirin, after demonstration of safety in animal studies applicant can proceed directly into a clinical feasibility study.

[0529] Several recent reports have documented in vitro growth of HCV in human cell lines (Mizutani et al, Biochem Biophys Res Commun 1996 227(3):822-826; Tagawa et al., Journal of Gasteroenterology and Hepatology 1995 10(5):523-527; Cribier et al., Journal of General Virology 76(10):2485-2491; Seipp et al., Journal of General Virology 1997 78(10)2467-2478; lacovacci et al., Research Virology 1997 148(2):147-151; locavacci et al., Hepatology 1997 26(5) 1328-1337; Ito et al., Journal of General Virology 1996 77(5):1043-1054; Nakajima et al., Journal of Virology 1996 70(5):3325-3329; Mizutani et al., Journal of Virology 1996 70(10):7219-7223; Valli et al., Res Virol 1995 146(4): 285-288; Kato et al., Biochem Biophys Res Comm 1995 206(3):863-869). Replication of HCV has been demonstrated in both T and B cell lines as well as cell lines derived from human hepatocytes. Demonstration of replication was documented using either RT-PCR based assays or the b-DNA assay. It is important to note that the most recent publications regarding HCV cell cultures document replication for up to 6-months.

[0530] Additionally, another recent study has identified more robust strains of hepatitis C virus having adaptive mutations that allow the strains to replicate more vigorously in human cell cult. The mutations that confer this enhanced ability to replicate are located in a specific region of a protein identified as NS5A. Studies performed at Rockefeller University have shown that in certain cell culture systems, infection with the robust strains produces a 10,000-fold increase in the number of infected cells. The greatly increased availability of HCV-infected cells in culture can be used to develop high-throughput screening assays, in which a large number of compounds, such as enzymatic nucleic acid molecules, can be tested to determine their effectiveness.

[0531] In addition to cell lines that can be infected with HCV, several groups have reported the successful transformation of cell lines with cDNA clones of full-length or partial HCV genomes (Harada et al., Journal of General Virology 1995 76(5)1215-1221; Haramatsu et al., Journal of Viral Hepatitis 1997 4S(1):61-67; Dash et al., American Journal of Pathology 1997 151(2):363-373; Mizuno et al., Gasteroenterology 1995 109(6):1933-40; Yoo et al., Journal Of Virology 1995 69(1):32-38).

[0532] HCV Animal Models

[0533] The best characterized animal system for HCV infection is the chimpanzee. Moreover, the chronic hepatitis that results from HCV infection in chimpanzees and humans is very similar. Although clinically relevant, the chimpanzee model suffers from several practical impediments that make use of this model difficult. These include; high cost, long incubation requirements and lack of sufficient quantities of animals. Due to these factors, a number of groups have attempted to develop rodent models of chronic hepatitis C infection. While direct infection has not been possible several groups have reported on the stable transfection of either portions or entire HCV genomes into rodents (Yamamoto et al., Hepatology 1995 22(3): 847-855; Galun et al., Journal of Infectious Disease 1995 172(1):25-30; Koike et al., Journal of general Virology 1995 76(12)3031-3038; Pasquinelli et al., Hepatology 1997 25(3): 719-727; Hayashi et al., Princess Takamatsu Symp 1995 25:1430149; Mariya K, Yotsuyanagi H, Shintani Y, Fujie H, Ishibashi K, Matsuura Y, Miyamura T, Koike K. Hepatitis C virus core protein induces hepatic steatosis in transgenic mice. Journal of General Virology 1997 78(7) 1527-1531; Takehara et al., Hepatology 1995 21(3):746-751; Kawamura et al., Hepatology 1997 25(4): 1014-1021). In addition, transplantation of HCV infected human liver into immunocompromised mice results in prolonged detection of HCV RNA in the animal's blood.

[0534] Vierling, International PCT Publication No. WO 99/16307, describes a method for expressing hepatitis C virus in an in vivo animal model. Viable, HCV infected human hepatocytes are transplanted into a liver parenchyma of a scid/scid mouse host. The scid/scid mouse host is then maintained in a viable state, whereby viable, morphologically intact human hepatocytes persist in the donor tissue and hepatitis C virus is replicated in the persisting human hepatocytes. This model provides an effective means for the study of HCV inhibition by enzymatic nucleic acids in vivo.

[0535] Indications

[0536] Particular degenerative and disease states that can be associated with HBV expression modulation include, but are not limited to, HBV infection, hepatitis, cancer, tumorigenesis, cirrhosis, liver failure and other conditions related to the level of HBV.

[0537] Particular degenerative and disease states that can be associated with HCV expression modulation include, but are not limited to, HCV infection, hepatitis, cancer, tumorigenesis, cirrhosis, liver failure and other conditions related to the level of HCV.

[0538] The present body of knowledge in HBV and HCV research indicates the need for methods to assay HBV or HCV activity and for compounds that can regulate HBV and HCV expression for research, diagnostic, and therapeutic use.

[0539] Lamivudine (3TC®), L-FMAU, adefovir dipivoxil, type 1 Interferon (e.g, interferon alpha, interferon beta, consensus interferon, polyethylene glycol interferon, polyethylene glycol interferon alpha 2a, polyethylene glycol interferon 2b, and polyethylene glycol consensus interferon), therapeutic vaccines, steriods, and 2′-5′ Oligoadenylates are non-limiting examples of pharmaceutical agents that can be combined with or used in conjunction with the nucleic acid molecules (e.g. ribozymes and antisense molecules) of the instant invention. Those skilled in the art will recognize that other drugs or other therapies can similarly and readily be combined with the nucleic acid molecules of the instant invention (e.g. ribozymes and antisense molecules) and are, therefore, within the scope of the instant invention.

[0540] Diagnostic Uses

[0541] The nucleic acid molecules of this invention can be used as diagnostic tools to examine genetic drift and mutations within diseased cells or to detect the presence of HBV or HCV RNA in a cell. For example, the close relationship between enzymatic nucleic acid activity and the structure of the target RNA allows the detection of mutations in any region of the molecule which alters the base-pairing and three-dimensional structure of the target RNA. By using multiple enzymatic nucleic acids described in this invention, one can map nucleotide changes which are important to RNA structure and function in vitro, as well as in cells and tissues. Cleavage of target RNAs with enzymatic nucleic acids can be used to inhibit gene expression and define the role (essentially) of specified gene products in the progression of disease. In this manner, other genetic targets can be defined as important mediators of the disease. These experiments can lead to better treatment of the disease progression by affording the possibility of combinational therapies (e.g., multiple enzymatic nucleic acid molecules targeted to different genes, enzymatic nucleic acid molecules coupled with known small molecule inhibitors, or intermittent treatment with combinations of enzymatic nucleic acid molecules and/or other chemical or biological molecules). Other in vitro uses of enzymatic nucleic acid molecules of this invention are well known in the art, and include detection of the presence of mRNAs associated with HBV or HCV-related condition. Such RNA is detected by determining the presence of a cleavage product after treatment with an enzymatic nucleic acid using standard methodology.

[0542] In a specific example, enzymatic nucleic acid molecules which can cleave only wild-type or mutant forms of the target RNA are used for the assay. The first enzymatic nucleic acid is used to identify wild-type RNA present in the sample and the second enzymatic nucleic acid is used to identify mutant RNA in the sample. As reaction controls, synthetic substrates of both wild-type and mutant RNA can be cleaved by both enzymatic nucleic acid molecules to demonstrate the relative ribozyme efficiencies in the reactions and the absence of cleavage of the “non-targeted” RNA species. The cleavage products from the synthetic substrates can also serve to generate size markers for the analysis of wild-type and mutant RNAs in the sample population. Thus each analysis involves two enzymatic nucleic acid molecules, two substrates and one unknown sample which is combined into six reactions. The presence of cleavage products is determined using an RNAse protection assay so that full-length and cleavage fragments of each RNA can be analyzed in one lane of a polyacrylamide gel. It is not absolutely required to quantify the results to gain insight into the expression of mutant RNAs and putative risk of the desired phenotypic changes in target cells. The expression of mRNA whose protein product is implicated in the development of the phenotype (i.e., HBV or HCV) is adequate to establish risk. If probes of comparable specific activity are used for both transcripts, then a qualitative comparison of RNA levels is adequate and will decrease the cost of the initial diagnosis. Higher mutant form to wild-type ratios are correlated with higher risk whether RNA levels are compared qualitatively or quantitatively.

[0543] Additional Uses

[0544] Potential usefulness of sequence-specific enzymatic nucleic acid molecules of the instant invention have many of the same applications for the study of RNA that DNA restriction endonucleases have for the study of DNA (Nathans et al., 1975 Ann. Rev. Biochem. 44:273). For example, the pattern of restriction fragments can be used to establish sequence relationships between two related RNAs, and large RNAs can be specifically cleaved to fragments of a size more useful for study. The ability to engineer sequence specificity of the enzymatic nucleic acid molecule is ideal for cleavage of RNAs of unknown sequence. Applicant describes the use of nucleic acid molecules to down-regulate gene expression of target genes in bacterial, microbial, fungal, viral, and eukaryotic systems including plant, or mammalian cells.

[0545] All patents and publications mentioned in the specification are indicative of the levels of skill of those skilled in the art to which the invention pertains. All references cited in this disclosure are incorporated by reference to the same extent as if each reference had been incorporated by reference in its entirety individually.

[0546] One skilled in the art would readily appreciate that the present invention is well adapted to carry out the objects and obtain the ends and advantages mentioned, as well as those inherent therein. The methods and compositions described herein as presently representative of preferred embodiments are exemplary and are not intended as limitations on the scope of the invention. Changes therein and other uses will occur to those skilled in the art, which are encompassed within the spirit of the invention, are defined by the scope of the claims.

[0547] It will be readily apparent to one skilled in the art that varying substitutions and modifications may be made to the invention disclosed herein without departing from the scope and spirit of the invention. Thus, such additional embodiments are within the scope of the present invention and the following claims.

[0548] The invention illustratively described herein suitably can be practiced in the absence of any element or elements, limitation or limitations that are not specifically disclosed herein. Thus, for example, in each instance herein any of the terms “comprising”, “consisting essentially of” and “consisting of” may be replaced with either of the other two terms. The terms and expressions which have been employed are used as terms of description and not of limitation, and there is no intention that in the use of such terms and expressions of excluding any equivalents of the features shown and described or portions thereof, but it is recognized that various modifications are possible within the scope of the invention claimed. Thus, it should be understood that although the present invention has been specifically disclosed by preferred embodiments, optional features, modification and variation of the concepts herein disclosed may be resorted to by those skilled in the art, and that such modifications and variations are considered to be within the scope of this invention as defined by the description and the appended claims.

[0549] In addition, where features or aspects of the invention are described in terms of Markush groups or other grouping of alternatives, those skilled in the art will recognize that the invention is also thereby described in terms of any individual member or subgroup of members of the Markush group or other group.

TABLE I
Characteristics of naturally occurring ribozymes

Group I Introns
Size: ˜150 to > 1000 nucleotides.
Requires a U in the target sequence immediately 5′ of the cleavage site.
Binds 4-6 nucleotides at the 5′-side of the cleavage site.
Reaction mechanism: aftack by the 3′-OH of guanosine to generate cleavage
products with 3′-OH and 5′-guanosine.
Additional protein cofactors required in some cases to help folding and
maintenance of the active structure.
Over 300 known members of this class. Found as an intervening sequence in
Tetrahymena thermophila rRNA, fungal mitochondria, chloroplasts, phage T4,
blue-green algae, and others.
Major structural features largely established through phylogenetic comparisons,
mutagenesis, and biochemical studies [ⁱ,ⁱⁱ].
Complete kinetic framework established for one ribozyme [ⁱⁱⁱ,^{iv},^{v},^{vi}].
Studies of ribozyme folding and substrate docking underway [^{vii},^{viii},^{ix}].
Chemical modification investigation of important residues well established [^{xxi}].
The small (4-6 nt) binding site may make this ribozyme too non-specific for
targeted RNA cleavage, however, the Tetrahymena group I intron has been used to repair
a “defective” β-galactosidase message by the ligation of new
β-galactosidase sequences onto the defective message [^{xii}]
RNAse P RNA (M1 RNA)
Size: ˜290 to 400 nucleotides.
RNA portion of a ubiquitous ribonucleoprotein enzyme.
Cleaves tRNA precursors to form mature tRNA [^{xiii}]
Reaction mechanism: possible attack by M²⁺-OH to generate cleavage products
with 3′-OH and 5′-phosphate.
RNAse P is found throughout the prokaryotes and eukaryotes. The RNA
subunit has been sequenced from bacteria, yeast, rodents, and primates.
Recruitment of endogenous RNAse P for therapeutic applications is possible
through hybridization of an External Guide Sequence (EGS) to the target RNA
[^{xiv},^{xv}]
Important phosphate and 2′ OH contacts recently identified [^{xvi},^{xvii}]
Group II Introns
Size: > 1000 nucleotides.
Trans cleavage of target RNAs recently demonstrated [^{xviii},^{xvix}].
Sequence requirements not fully determined.
Reaction mechanism: 2′-OH of an internal adenosine generates cleavage
products with 3′-OH and a “lariat” RNA containing a 3′-5′ and a 2′-5′ branch point.
Only natural ribozyme with demonstrated participation in DNA cleavage [^{xx},^{xxi}]
in addition to RNA cleavage and ligation.
Major structural features largely established through phylogenetic comparisons
[^{xxii}].
Important 2′ OH contacts beginning to be identified [^{xxiii}]
Kinetic framework under development [^{xxiv}]
Neurospora VS RNA
Size: ˜144 nucleotides.
Trans cleavage of hairpin target RNAs recently demonstrated [^{xxv}].
Sequence requirements not fully determined.
Reaction mechanism: attack by 2′-OH 5′ to the scissile bond to generate
cleavage products with 2′,3′-cyclic phosphate and 5′-OH ends.
Binding sites and structural requirements not fully determined.
Only 1 known member of this class. Found in Neurospora VS RNA.
Hammerhead Ribozyme
(see text for references)
Size: ˜13 to 40 nucleotides.
Requires the target sequence UH immediately 5′ of the cleavage site.
Binds a variable number nucleotides on both sides of the cleavage site.
Reaction mechanism: attack by 2′-OH 5′ to the scissile bond to generate
cleavage products with 2′,3′-cyclic phosphate and 5′-OH ends.
14 known members of this class. Found in a number of plant pathogens
(virusoids) that use RNA as the infectious agent.
Essential structural features largely defined, including 2 crystal structures
[^{xxvi},^{xxvii}]
Minimal ligation activity demonstrated (for engineering through in vitro
selection) [^{xxviii}]
Complete kinetic framework established for two or more ribozymes [^{xxix}]
Chemical modification investigation of important residues well established [^{xxx}].
Hairpin Ribozyme
Size: ˜50 nucleotides.
Requires the target sequence GUC immediately 3′of the cleavage site.
Binds 4-6 nucleotides at the 5′-side of the cleavage site and a variable number to
the 3′-side of the cleavage site.
Reaction mechanism: attack by 2′-OH 5′ to the scissile bond to generate
cleavage products with 2′,3′-cyclic phosphate and 5′-OH ends.
3 known members of this class. Found in three plant pathogen (satellite RNAs
of the tobacco ringspot virus, arabis mosaic virus and chicory yellow mottle
virus) which uses RNA as the infectious agent.
Essential structural features largely defined [^{xxxi},^{xxxii},^{xxiii},^{xxxiv}]
Ligation activity (in addition to cleavage activity) makes ribozyme amenable to
engineering through in vitro selection [^{xxxv}]
Complete kinetic framework established for one ribozyme [^{xxxvi}]
Chemical modification investigation of important residues begun [^{xxxvii},^{xxxviii}].
Hepatitis Delta Virus (HDV) Ribozyme
Size: ˜60 nucleotides.
Trans cleavage of target RNAs demonstrated [^{xxxix}].
Binding sites and structural requirements not fully determined, although no
sequences 5′ of cleavage site are required. Folded ribozyme contains a
pseudoknot structure [^{x1}].
Reaction mechanism: attack by 2′-OH 5′ to the scissile bond to generate
cleavage products with 2′,3′-cyclic phosphate and 5′-OH ends.
Only 2 known members of this class. Found in human HDV.
Circular form of HDV is active and shows increased nuclease stability [^{x1i}]
ⁱMichel, Francois; Westhof, Eric. Slippery substrates. Nat. Struct. Biol. (1994), 1(1), 5-7.
ⁱⁱLisacek, Frederique; Diaz, Yolande; Michel, Francois. Automatic identification of group I intron cores in genomic DNA sequences. J. Mol. Biol. (1994), 235 (4), 1206-17.
ⁱⁱⁱHerschlag, Daniel; Cech, Thomas R.. Catalysis of RNA cleavage by the Tetrahymena thermophila ribozyme. 1. Kinetic description of the reaction of an RNA substrate complementary to the active site. Biochemistry (1990), 29 (44), 10159-71.
^{iv}Herschlag, Daniel; Cech, Thomas R.. Catalysis of RNA cleavage by the Tetrahymena thermophila ribozyme. 2. Kinetic description of the reaction of an RNA substrate that forms a mismatch at the active site. Biochemistry (1990), 29 (44), 10172-80.
^{v}Knitt, Deborah S.; Herschlag, Daniel. pH Dependencies of the Tetrahymena Ribozyme Reveal an Unconventional Origin of an Apparent pKa. Biochemistry (1996), 35 (5), 1560-70.
^{vi}Bevilacqua, Philip C.; Sugimoto, Naoki; Turner, Douglas H.. A mechanistic framework for the second step of splicing catalyzed by the Tetrahymena ribozyme. Biochemistry (1996), 35 (2), 648-58.
^{vii}Li, Yi; Bevilacqua, Philip C.; Mathews, David; Turner, Douglas H.. Thermodynamic and activation parameters for binding of a pyrene-labeled substrate by the Tetrahymena ribozyme: docking is not diffusion-controlled and is driven by a favorable entropy change. Biochemistry (1995), 34 (44), 14394-9.
^{viii}Banerjee, Aloke Raj; Turner, Douglas H.. The time dependence of chemical modification reveals slow steps in the folding of a group I ribozyme. Biochemistry (1995), 34 (19), 6504-12.
^{ix}Zarrinkar, Patrick P.; Williamson, James R.. The P9.1-P9.2 peripheral extension helps guide folding of the Tetrahymena ribozyme. Nucleic Acids Res. (1996), 24 (5), 854-8.
^{x}Strobel, Scott A.; Cech, Thomas R.. Minor groove recognition of the conserved G.cntdot.U pair at the Tetrahymena ribozyme reaction site. Science (Washington, D. C.) (1995), 267 (5198), 675-9.
^{xi}Strobel, Scott A.; Cech, Thomas R.. Exocyclic Amine of the Conserved G.cntdot.U Pair at the Cleavage Site of the Tetrahymena Ribozyme Contributes to 5′-Splice Site Selection and Transition State Stabilization. Biochemistry (1996), 35 (4), 1201-11.
^{xii}Sullenger, Bruce A.; Cech, Thomas R.. Ribozyme-mediated repair of defective mRNA by targeted trans-splicing. Nature (London) (1994), 371 (6498), 619-22.
^{xiii}Robertson, H. D.; Altman, S.; Smith, J. D. J. Biol. Chem, 247 5243-5251 (1972).
^{xiv}Forster, Anthony C.; Altman, Sidney. External guide sequences for an RNA enzyme. Science (Washington, D. C., 1883-) (1990), 249 (4970), 783-6.
^{xv}Yuan, Y.; Hwang, E. S.; Altman, S. Targeted cleavage of mRNA by human RNase P. Proc. Natl. Acad. Sci. USA (1992) 89, 8006-10.
^{xvi}Harris, Michael E.; Pace, Norman R.. Identification of phosphates involved in catalysis by the ribozyme RNase P RNA. RNA (1995), 1 (2), 210-18.
^{xvii}Pan, Tao; Loria, Andrew; Zhong, Kun. Probing of tertiary interactions in RNA: 2′-hydroxyl-base contacts between the RNase P RNA and pre-tRNA. Proc. Natl. Acad. Sci. U. S. A. (1995), 92 (26), 12510-14.
^{xviii}Pyle, Anna Marie; Green, Justin B.. Building a Kinetic Framework for Group II Intron Ribozyme Activity: Quantitation of Interdomain Binding and Reaction Rate. Biochemistry (1994), 33 (9), 2716-25.
^{xix}Michels, William J. Jr.; Pyle, Anna Marie. Conversion of a Group II Intron into a New Multiple-Turnover Ribozyme that Selectively Cleaves Oligonucleotides: Elucidation of Reaction Mechanism and Structure/Function Relationships. Biochemistry (1995), 34 (9), 2965-77.
^{xx}Zimmerly, Steven; Guo, Huatao; Eskes, Robert; Yang, Jian; Perlman, Philip S.; Lambowitz, Alan M.. A group II intron RNA is a catalytic component of a DNA endonuclease involved in intron mobility. Cell (Cambridge, Mass.) (1995), 83 (4), 529-38.
^{xxi}Griffin, Edmund A., Jr.; Qin, Zhifeng; Michels, Williams J., Jr.; Pyle, Anna Marie. Group II intron ribozymes that cleave DNA and RNA linkages with similar efficiency, and lack contacts with substrate 2-hydroxyl groups. Chem. Biol. (1995), 2 (11), 761-70.
^{xxii}Michel, Francois; Ferat, Jean Luc. Structure and activities of group II introns. Annu. Rev. Biochem. (1995), 64, 435-61.
^{xxiii}Abramovitz, Dana L.; Friedman, Richard A.; Pyle, Anna Marie. Catalytic role of 2′-hydroxyl groups within a group II intron active site. Science (Washington, D. C.) (1996), 271 (5254), 1410-13.
^{xxiv}Daniels, Danette L.; Michels, William J., Jr.; Pyle, Anna Marie. Two competing pathways for self-splicing by group II introns: a quantitative analysis of in vitro reaction rates and products. J. Mol. Biol. (1996), 256 (1), 3149.
^{xxv}Guo, Hans C. T.; Collins, Richard A.. Efficient trans-cleavage of a stem-loop RNA substrate by a ribozyme derived from Neurospora VS RNA. EMBO J. (1995), 14 (2), 368-76.
^{xxvi}Scott, W. G., Finch, J. T., Aaron, K. The crystal structure of an all RNA hammerhead ribozyme: Aproposed mechanism for RNA catalytic cleavage. Cell, (1995), 81, 991-1002.
^{xxvii}McKay, Structure and function of the hammerhead ribozyme: an unfinished story. RNA, (1996), 2, 395-403.
^{xxviii}Long, D., Uhlenbeck, O., Hertel, K. Ligation with hammerhead ribozymes. U.S. Pat. No. 5,633,133.
^{xxix}Hertel, K. J., Herschlag, D., Uhlenbeck, O. A kinetic and thermodynamic framework for the hammerhead ribozyme reaction. Biochemistry, (1994) 33, 3374-3385.Beigehnan, L., et al, Chemical modifications of hammerhead ribozymes. J. Biol. Chem., (1995) 270, 25702-25708.
^{xxx}Beigelman, L., et al., Chemical modifications of hammerhead ribozymes. J. Biol. Chem., (1995) 270, 25702-25708.
^{xxxi}Hampel, Arnold; Tritz, Richard; Hicks, Margaret; Cruz, Philip. ‘Hairpin’ catalytic RNA model: evidence for helixes and sequence requirement for substrate RNA. Nucleic Acids Res. (1990), 18 (2), 299-304.
^{xxxii}Chowrira, Bliarat M.; Berzal-Herranz, Aifredo; Burke, John M.. Novel guanosine requirement for catalysis by the hairpin ribozyme. Nature (London) (1991), 354 (6351), 320-2.
^{xxxiii}Berzal-Herranz, Alfredo; Joseph, Simpson; Chowrira, Bharat M.; Butcher, Samuel E.; Burke, John M.. Essential nucleotide sequences and secondary structure elements of the hairpin ribozyme. EMBO J. (1993), 12 (6), 2567-73.
^{xxxiv}Joseph, Simpson; Berzal-Herranz, Aifredo; Chowrira, Bharat M.; Butcher, Samuel E.. Substrate selection rules for the hairpin ribozyme determined by in vitro selection, mutation, and analysis of mismatched substrates. Genes Dev. (1993), 7 (1), 130-8.
^{xxxv}Berzal-Herranz, Aifredo; Joseph, Simpson; Burke, John M.. In vitro selection of active hairpin ribozymes by sequential RNA-catalyzed cleavage and ligation reactions. Genes Dev. (1992), 6 (1), 129-34.
^{xxxvi}Hegg, Lisa A.; Fedor, Martha J.. Kinetics and Thermodynamics of Intermolecular Catalysis by Hairpin Ribozymes. Biochemistry (1995), 34 (48), 15813-28.
^{xxxvii}Grasby, Jane A.; Mersmann, Karin; Singh, Mohinder; Gait, Michael J.. Purine Functional Groups in Essential Residues of the Hairpin Ribozyme Required for Catalytic Cleavage of RNA. Biochemistry (1995), 34 (12), 4068-76.
^{xxxviii}Schmidt, Sabine; Beigelman, Leonid; Karpeisky, Alexander; Usman, Nassim; Sorensen, Ulrik S.; Gait, Michael J.. Base and sugar requirements for RNA cleavage of essential nucleoside residues in internal loop B of the hairpin ribozyme: implications for secondary structure. Nucleic Acids Res. (1996), 24 (4), 573-81.
^{xxxix}Perrotta, Anne T.; Been, Michael D.. Cleavage of oligoribonucleotides by a ribozyme derived from the hepatitis .delta. virus RNA sequence. Biochemistry (1992), 31 (1), 16-21.
^{x1}Perrotta, Anne T.; Been, Michael D.. A pseudoknot-like structure required for efficient self-cleavage of hepatitis delta virus RNA. Nature (London) (1991), 350 (6317), 434-6.
^{x1i}Puttaraju, M.; Perrotta, Anne T.; Been, Michael D.. A circular trans-acting hepatitis delta virus ribozyme. Nucleic Acids Res. (1993), 21 (18), 4253-8.

[0550] TABLE II

| | | | | | |
|---|---|---|---|---|---|
| | | | | Wait Time* | |
| Reagent | Equivalents | Amount | Wait Time* DNA | 2′-O-methyl | Wait Time*RNA |

A. 2.5 μmol Synthesis Cycle ABI 394 Instrument

| | | | | | | | | |
|---|---|---|---|---|---|---|---|---|
| Phosphoramidites | 6.5 | 163 | μL | 45 sec | 2.5 | min | 7.5 | min |
| S-Ethyl Tetrazole | 23.8 | 238 | μL | 45 sec | 2.5 | min | 7.5 | min |
| Acetic Anhydride | 100 | 233 | μL | 5 sec | 5 | sec | 5 | sec |
| N-Methyl | 186 | 233 | μL | 5 sec | 5 | sec | 5 | sec |
| Imidazole | | | | | | | | |
| TCA | 176 | 2.3 | mL | 21 sec | 21 | sec | 21 | sec |
| Iodine | 11.2 | 1.7 | mL | 45 sec | 45 | sec | 45 | sec |
| Beaucage | 12.9 | 645 | μL | 100 sec | 300 | sec | 300 | sec |

| | | | | | | |
|---|---|---|---|---|---|---|
| Acetonitrile | NA | 6.67 | mL | NA | NA | NA |

B. 0.2 μmol Synthesis Cycle ABI 394 Instrument

| | | | | | | | | |
|---|---|---|---|---|---|---|---|---|
| Phosphoramidites | 15 | 31 | μL | 45 sec | 233 | sec | 465 | sec |
| S-Ethyl Tetrazole | 38.7 | 31 | μL | 45 sec | 233 | min | 465 | sec |
| Acetic Anhydride | 655 | 124 | μL | 5 sec | 5 | sec | 5 | sec |
| N-Methyl | 1245 | 124 | μL | 5 sec | 5 | sec | 5 | sec |
| Imidazole | | | | | | | | |
| TCA | 700 | 732 | μL | 10 sec | 10 | sec | 10 | sec |
| Iodine | 20.6 | 244 | μL | 15 sec | 15 | sec | 15 | sec |
| Beaucage | 7.7 | 232 | μL | 100 sec | 300 | sec | 300 | sec |

| | | | | | | |
|---|---|---|---|---|---|---|
| Acetonitrile | NA | 2.64 | mL | NA | NA | NA |

| | | | | | |
|---|---|---|---|---|---|
| | Equivalents: | Amount: | | Wait Time* | |
| | DNA/2′-O- | DNA/2′-O- | Wait Time* | 2′-O- | Wait Time* |
| Reagent | methyl/Ribo | methyl/Ribo | DNA | methyl | Ribo |

C. 0.2 μmol Synthesis Cycle 96 well Instrument

| | | | | | | | |
|---|---|---|---|---|---|---|---|
| Phosphoramidites | 22/33/66 | 40/60/120 | μL | 60 sec | 180 | sec | 360 sec |
| S-Ethyl Tetrazole | 70/105/210 | 40/60/120 | μL | 60 sec | 180 | min | 360 sec |
| Acetic Anhydride | 265/265/265 | 50/50/50 | μL | 10 sec | 10 | sec | 10 sec |
| N-Methyl | 502/502/502 | 50/50/50 | μL | 10 sec | 10 | sec | 10 sec |
| Imidazole | | | | | | | |
| TCA | 238/475/475 | 250/500/500 | μL | 15 sec | 15 | sec | 15 sec |
| Iodine | 6.8/6.8/6.8 | 80/80/80 | μL | 30 sec | 30 | sec | 30 sec |
| Beaucage | 34/51/51 | 80/120/120 | | 100 sec | 200 | sec | 200 sec |

| | | | | | | |
|---|---|---|---|---|---|---|
| Acetonitrile | NA | 1150/1150/1150 | μL | NA | NA | NA |

*Wait time does not include contact time during delivery.

[0551] TABLE III
HBV Strains and Accession numbers

| Accession | |
|---|---|
| Number | NAME |
| AF100308.1 | AF100308 Hepatitis B virus strain 2-18, complete |
| AB026815.1 | AB026815 Hepatitis B virus DNA, complete genome, |
| AB033559.1 | AB033559 Hepatitis B virus DNA, complete genome, |
| AB033558.1 | AB033558 Hepatitis B virus DNA, complete genome, |
| AB033557.1 | AB033557 Hepatitis B virus DNA, complete genome, |
| AB033556.1 | AB033556 Hepatitis B virus DNA, complete genome, |
| AB033555.1 | AB033555 Hepatitis B virus DNA, complete genome, |
| AB033554.1 | AB033554 Hepatitis B virus DNA, complete genome, |
| AB033553.1 | AB033553 Hepatitis B virus DNA, complete genome, |
| AB033552.1 | AB033552 Hepatitis B virus DNA, complete genome, |
| AB033551.1 | AB033551 Hepatitis B virus DNA, complete genome, |
| AB033550.1 | AB033550 Hepatitis B virus DNA, complete genome |
| AF143308.1 | AF143308 Hepatitis B virus clone WB1254, complete |
| AF143307.1 | AF143307 Hepatitis B virus clone RM518, complete |
| AF143306.1 | AF143306 Hepatitis B virus clone RM517, complete |
| AF143305.1 | AF143305 Hepatitis B virus clone RM501, complete |
| AF143304.1 | AF143304 Hepatitis B virus clone HD319, complete |
| AF143303.1 | AF143303 Hepatitis B virus clone HD1406, complete |
| AF143302.1 | AF143302 Hepatitis B virus clone HD1402, complete |
| AF143301.1 | AF143301 Hepatitis B virus clone BW1903, complete |
| AF143300.1 | AF143300 Hepatitis B virus clone 7832-G4, complete |
| AF143299.1 | AF143299 Hepatitis B virus clone 7744-G9, complete |
| AF143298.1 | AF143298 Hepatitis B virus clone 7720-G8, complete |
| AB026814.1 | AB026814 Hepatitis B virus DNA, complete genome, |
| AB026813.1 | AB026813 Hepatitis B virus DNA, complete genome, |
| AB026812.1 | AB026812 Hepatitis B virus DNA, complete genome, |
| AB026811.1 | AB026811 Hepatitis B virus DNA, complete genome, |
| AJ131956.1 | HBV131956 Hepatitis B virus complete genome, |
| AF151735.1 | AF151735 Hepatitis B virus, complete genome |
| AF090842.1 | AF090842 Hepatitis B virus strain G5.27295, complete |
| AF090841.1 | AF090841 Hepatitis B virus strain G4.27241, complete |
| AF090840.1 | AF090840 Hepatitis B virus strain G3.27270, complete |
| AF090839.1 | AF090839 Hepatitis B virus strain G2.27246, complete |
| AF090838.1 | AF090838 Hepatitis B virus strain P1.27239, complete |
| Y18858.1 | HBV18858 Hepatitis B virus complete genome, isolate |
| Y18857.1 | HBV18857 Hepatitis B virus complete genome, isolate |
| D12980.1 | HPBCG Hepatitis B virus subtype adr (SRADR) DNA, |
| Y18856.1 | HBV18856 Hepatitis B virus complete genome, isolate |
| Y18855.1 | HBV18855 Hepatitis B virus complete genome, isolate |
| AJ131133.1 | HBV131133 Hepatitis B virus, complete genome, strain |
| X80925.1 | HBVP6PCXX Hepatitis B virus (patient 6) complete |
| X80926.1 | HBVP5PCXX Hepatitis B virus (patient 5) complete |
| X80924.1 | HBVP4PCXX Hepatitis B virus (patient 4) complete |
| AF100309.1 | Hepatitis B virus strain 56, complete genome |
| AF068756.1 | AF068756 Hepatitis B virus, complete genome |
| AF043593.1 | AF043593 Hepatitis B virus isolate 6/89, complete |
| Y07587.1 | HBVAYWGEN Hepatitis B virus, complete genome |
| D28880.1 | D28880 Hepatitis B virus DNA, complete genome, strain |
| X98076.1 | HBVDEFVP3 Hepatitis B virus complete genome with |
| X98075.1 | HBVDEFVP2 Hepatitis B virus complete genome with |
| X98074.1 | HBVDEFVP1 Hepatitis B virus complete genome with |
| X98077.1 | HBVCGWITY Hepatitis B virus complete genome, |
| | wild type |
| X98072.1 | HBVCGINSC Hepatitis B virus complete genome with |
| X98073.1 | HBVCGINCX Hepatitis B virus complete genome with |
| U95551.1 | U95551 Hepatitis B virus subtype ayw, complete genome |
| D23684.1 | HPBC6T588 Hepatitis B virus (C6-TKB588) complete |
| | genome |
| D23683.1 | HPBC5HKO2 Hepatitis B virus (C5-HBVKO2) complete |
| | genome |
| D23682.1 | HPBB5HKO1 Hepatitis B virus (B5-HBVKO1) complete |
| | genome |
| D23681.1 | HPBC4HST2 Hepatitis B virus (C4-HBVST2) complete |
| | genome |
| D23680.1 | HPBB4HST1 Hepatitis B virus (B4-HBVST1) complete |
| | genome |
| D00331.1 | HPBADW3 Hepatitis B virus genome, complete genome |
| D00330.1 | HPBADW2 Hepatitis B virus genome, complete genome |
| D50489.1 | HPBA11A Hepatitis B virus DNA, complete genome |
| D23679.1 | HPBA3HMS2 Hepatitis B virus (A3-HBVMS2) complete |
| | genome |
| D23678.1 | HPBA2HYS2 Hepatitis B virus (A2-HBVYS2) complete |
| | genome |
| D23677.1 | HPBA1HKK2 Hepatitis B virus (A1-HBVKK2) complete |
| | genome |
| D16665.1 | HPBADRM Hepatitis B virus DNA, complete genome |
| D00329.1 | HPBADW1 Hepatitis B virus (HBV) genome, complete |
| | genome |
| X97851.1 | HBVP6CSX Hepatitis B virus (patient 6) complete genome |
| X97850.1 | HBVP4CSX Hepatitis B virus (patient 4) complete genome |
| X97849.1 | HBVP3CSX Hepatitis B virus (patient 3) complete genome |
| X97848.1 | HBVP2CSX Hepatitis B virus (patient 2) complete genome |
| X51970.1 | HVHEPB Hepatitis B virus (HBV 991) complete genome |
| M38636.1 | HPBCGADR Hepatitis B virus, subtype adr, complete |
| | genome |
| X59795.1 | HBVAYWMCG Hepatitis B virus (ayw subtype mutant) |
| M38454.1 | HPBADR1CG Hepatitis B virus, complete genome |
| M32138.1 | HPBHBVAA Hepatitis B virus variant HBV-alpha1, |
| | complete |
| J02203.1 | HPBAYW Human hepatitis B virus (subtype ayw), |
| | complete |
| M12906.1 | HPBADRA Hepatitis B virus subtype adr, complete |
| | genome |
| M54923.1 | HPBADWZ Hepatitis B virus (subtype adw), complete |
| | genome |
| L27106.1 | HPBMUT Hepatitis B virus mutant complete genome |

[0552] TABLE IV

HBV Substrate Sequence

| NT Position* | SUBSTRATE | SEQ ID |
|---|---|---|
| 82 | CUAUCGUCCCCUUCUUCAUC | 1. |
| 101 | CUACCGUUCCGGCC | 2. |
| 159 | CUUCUCAUCU | 3. |
| 184 | CUUCCCUUCACCAC | 4. |
| 269 | GACUCUCAGAAUGUCAACGAC | 5. |
| 381 | CUGUAGGCAUAAAUGGUCUG | 6. |
| 401 | GUUCACCAGCACCAUGCAACUUUUU | 7. |
| 424 | UUUCACGUCUGCCUAAUCAUC | 8. |
| 524 | AUUUGGAGCUUC | 9. |
| 562 | CUGACUUCUUUCCUUCUAUUC | 10. |
| 649 | CUCACCAUACCGCACUCA | 11. |
| 667 | GGCAAGCUAUUCUGUG | 12. |
| 717 | GGAAGUAAUUUGGAAGAC | 13. |
| 758 | CAGCUAUGUCAAUGUUAA | 14. |
| 783 | CUAAAAUCGGCCUAAAAUCAGAC | 15. |
| 812 | CAUUUCCUGUCUCACUUUUGGAAGAG | 16. |
| 887 | UCCUGCUUACAGAC | 17. |
| 922 | CAACACUUCCGGAAACUACUGUUGUUAG | 18. |
| 989 | CUCGCCUCGCAGACGAAGGUCUC | 19. |
| 1009 | CAAUCGCCGCGUCGCAGAAG | 20. |
| 1031 | AUCUCAAUCUCGGGAAUCUCAA | 21. |
| 1052 | AUGUUAGUAUCCCUUGGACUC | 22. |
| 1072 | CAUAAGGUGGGAAACUUUACUG | 23. |
| 1109 | CUGUACCUAUUCUUUAAAUCC | 24. |
| 1127 | CUGAGUGGCAAACUCCC | 25. |
| 1271 | CCAAAUAUCUGCCCUUGGACAA | 26. |
| 1297 | AUUAAACCAUAUUAUCCUGAACA | 27. |
| 1319 | AUGCAGUUAAUCAUUACUUCAAAACUA | 28. |
| 1340 | AAACUAGGCAUEJA | 29. |
| 1370 | AGGCGGGCAUUCUAUAUAAGAGAG | 30. |
| 1393 | GAAACUACGCGCAGCGCCUCAUUUUGU | 31. |
| 1412 | CAUUUUGUGGGUCACCAUA | 32. |
| 1441 | CAAGAGCUACAGCAUGGG | 33. |

LOCUS HPBADR1CG 3221 bp DNA circular VRL 06 MAR. 1995
DEFINITION Hepatitis B virus, complete genome.
ACCESSION M38454
*The nucleotide number referred to in that table is the position of the 5′ end of the oligo in this sequence.

[0553] TABLE V

HUMAN HBV HAMMERHEAD RIBOZYME AND TARGET SEQUENCE

| | | | | |
|---|---|---|---|---|
| | | Seq | | Seq |
| Pos | Substrate | ID | Hammerhead | ID |

| | | | | |
|---|---|---|---|---|
| 13 | CCACCACU U UCCACCAA | 34 | UUGGUGGA CUGAUGAG GCCGUUAGGC CGAA AGUGGUGG | 7434 |
| 14 | CACCACUU U CCACCAAA | 34 | UUUGGUGG CUGAUGAG GCCGUUAGGC CGAA AAGUGGUG | 7435 |
| 15 | ACCACUUU C CACCAAAC | 36 | GUUUGGUG CUGAUGAG GCCGUUAGGC CGAA AAAGUGGU | 7436 |
| 25 | ACCAAACU C UUCAAGAU | 37 | AUCUUGAA CUGAUGAG GCCGUUAGGC CGAA AGUUUGGU | 7437 |
| 27 | CAAACUCU U CAAGAUCC | 38 | GGAUCUUG CUGAUGAG GCCGUUAGGC CGAA AGAGUUUG | 7438 |
| 28 | AAACUCUU C AAGAUCCC | 39 | GGGAUCUU CUGAUGAG GCCGUUAGGC CGAA AAGAGUUU | 7439 |
| 34 | UUCAAGAU C CCAGAGUC | 40 | GACUCUGG CUGAUGAG GCCGUUAGGC CGAA AUCUUGAA | 7440 |
| 42 | CCCAGAGU C AGGGCCCU | 41 | AGGGCCCU CUGAUGAG GCCGUUAGGC CGAA ACUCUGGG | 7441 |
| 53 | GGCCCUGU A CUUUCCUG | 42 | CAGGAAAG CUGAUGAG GCCGUUAGGC CGAA ACAGGGCC | 7442 |
| 56 | CCUGUACU U UCCUGCUG | 43 | CAGCAGGA CUGAUGAG GCCGUUAGGC CGAA AGUACAGG | 7443 |
| 57 | CUGUACUU U CCUGCUGG | 44 | CCAGCAGG CUGAUGAG GCCGUUAGGC CGAA AAGUACAG | 7444 |
| 58 | UGUACUUU C CUGCUGGU | 45 | ACCAGCAG CUGAUGAG GCCGUUAGGC CGAA AAAGUACA | 7445 |
| 71 | UGGUGGCU C CAGUUCAG | 46 | CUGAACUG CUGAUGAG GCCGUUAGGC CGAA AGCCACCA | 7446 |
| 76 | GCUCCAGU U CAGGAACA | 47 | UGUUCCUG CUGAUGAG GCCGUUAGGC CGAA ACUGGAGC | 7447 |
| 77 | CUCCAGUU C AGGAACAG | 48 | CUGUUCCU CUGAUGAG GCCGUUAGGC CGAA AACUGGAG | 7448 |
| 97 | GCCCUGCU C AGAAUACU | 49 | AGUAUUCU CUGAUGAG GCCGUUAGGC CGAA AGCAGGGC | 7449 |
| 103 | CUCAGAAU A CUGUCUCU | 50 | AGAGACAG CUGAUGAG GCCGUUAGGC CGAA AUUCUGAG | 7450 |
| 108 | AAUACUGU C UCUGCCAU | 51 | AUGGCAGA CUGAUGAG GCCGUUAGGC CGAA ACAGUAUU | 7451 |
| 110 | UACUGUCU C UGCCAUAU | 52 | AUAUGGCA CUGAUGAG GCCGUUAGGC CGAA AGACAGUA | 7452 |
| 117 | UCUGCCAU A UCGUCAAU | 53 | AUUGACGA CUGAUGAG GCCGUUAGGC CGAA AUGGCAGA | 7453 |
| 119 | UGCCAUAU C GUCAAUCU | 54 | AGAUUGAC CUGAUGAG GCCGUUAGGC CGAA AUAUGGCA | 7454 |
| 122 | CAUAUCGU C AAUCUUAU | 55 | AUAAGAUU CUGAUGAG GCCGUUAGGC CGAA ACGAUAUG | 7455 |
| 126 | UCGUCAAU C UUAUCGAA | 56 | UUCGAUAA CUGAUGAG GCCGUUAGGC CGAA AUUGACGA | 7456 |
| 128 | GUCAAUCU U AUCGAAGA | 57 | UCUUCGAU CUGAUGAG GCCGUUAGGC CGAA AGAUUGAC | 7457 |
| 129 | UCAAUCUU A UCGAAGAC | 58 | GUCUUCGA CUGAUGAG GCCGUUAGGC CGAA AAGAUUGA | 7458 |
| 131 | AAUCUUAU C GAAGACUG | 59 | CAGUCUUC CUGAUGAG GCCGUUAGGC CGAA AUAAGAUU | 7459 |
| 150 | GACCCUGU A CCGAACAU | 60 | AUGUUCGG CUGAUGAG GCCGUUAGGC CGAA ACAGGGUC | 7460 |
| 168 | GAGAACAU C GCAUCAGG | 61 | CCUGAUGC CUGAUGAG GCCGUUAGGC CGAA AUGUUCUC | 7461 |
| 173 | CAUCGCAU C AGGACUCC | 62 | GGAGUCCU CUGAUGAG GCCGUUAGGC CGAA AUGCGAUG | 7462 |
| 180 | UCAGGACU C CUAGGACC | 63 | GGUCCUAG CUGAUGAG GCCGUUAGGC CGAA AGUCCUGA | 7463 |
| 183 | GGACUCCU A GGACCCCU | 64 | AGGGGUCC CUGAUGAG GCCGUUAGGC CGAA AGGAGUCC | 7464 |
| 195 | CCCCUGCU C GUGUUACA | 65 | UGUAACAC CUGAUGAG GCCGUUAGGC CGAA AGCAGGGG | 7465 |
| 200 | GCUCGUGU U ACAGGCGG | 66 | CCGCCUGU CUGAUGAG GCCGUUAGGC CGAA ACACGAGC | 7466 |
| 201 | CUCGUGUU A CAGGCGGG | 67 | CCCGCCUG CUGAUGAG GCCGUUAGGC CGAA AACACGAG | 7467 |
| 212 | GGCGGGGU U UUUCUUGU | 68 | ACAAGAAA CUGAUGAG GCCGUUAGGC CGAA ACCCCGCC | 7468 |
| 213 | GCGGGGUU U UUCUUGUU | 69 | AACAAGAA CUGAUGAG GCCGUUAGGC CGAA AACCCCGC | 7469 |
| 214 | CGGGGUUU U UCUUGUUG | 70 | CAACAAGA CUGAUGAG GCCGUUAGGC CGAA AAACCCCG | 7470 |
| 215 | GGGGUUUU U CUUGUUGA | 71 | UCAACAAG CUGAUGAG GCCGUUAGGC CGAA AAAACCCC | 7471 |
| 216 | GGGUUUUU C UUGUUGAC | 72 | GUCAACAA CUGAUGAG GCCGUUAGGC CGAA AAAAACCC | 7472 |
| 218 | GUUUUUCU U GUUGACAA | 73 | UUGUCAAC CUGAUGAG GCCGUUAGGC CGAA AGAAAAAC | 7473 |
| 221 | UUUCUUGU U GACAAAAA | 74 | UUUUUGUC CUGAUGAG GCCGUUAGGC CGAA ACAAGAAA | 7474 |
| 231 | ACAAAAAU C CUCACAAU | 75 | AUUGUGAG CUGAUGAG GCCGUUAGGC CGAA AUUUUUGU | 7475 |
| 234 | AAAAUCCU C ACAAUACC | 76 | GGUAUUGU CUGAUGAG GCCGUUAGGC CGAA AGGAUUUU | 7476 |
| 240 | CUCACAAU A CCACAGAG | 77 | CUCUGUGG CUGAUGAG GCCGUUAGGC CGAA AUUGUGAG | 7477 |
| 250 | CACAGAGU C UAGACUCG | 78 | CGAGUCUA CUGAUGAG GCCGUUAGGC CGAA ACUCUGUG | 7478 |
| 252 | CAGAGUCU A GACUCGUG | 79 | CACGAGUC CUGAUGAG GCCGUUAGGC CGAA AGACUCUG | 7479 |
| 257 | UCUAGACU C GUGGUGGA | 80 | UCCACCAC CUGAUGAG GCCGUUAGGC CGAA AGUCUAGA | 7480 |
| 268 | GGUGGACU U CUCUCAAU | 81 | AUUGAGAG CUGAUGAG GCCGUUAGGC CGAA AGUCCACC | 7481 |
| 269 | GUGGACUU C UCUCAAUU | 82 | AAUUGAGA CUGAUGAG GCCGUUAGGC CGAA AAGUCCAC | 7482 |
| 271 | GGACUUCU C UCAAUUUU | 83 | AAAAUUGA CUGAUGAG GCCGUUAGGC CGAA AGAAGUCC | 7483 |
| 273 | ACUUCUCU C AAUUUUCU | 84 | AGAAAAUU CUGAUGAG GCCGUUAGGC CGAA AGAGAAGU | 7484 |
| 277 | CUCUCAAU U UUCUAGGG | 85 | CCCUAGAA CUGAUGAG GCCGUUAGGC CGAA AUUGAGAG | 7485 |
| 278 | UCUCAAUU U UCUAGGGG | 86 | CCCCUAGA CUGAUGAG GCCGUUAGGC CGAA AAUUGAGA | 7486 |
| 279 | CUCAAUUU U CUAGGGGG | 87 | CCCCCUAG CUGAUGAG GCCGUUAGGC CGAA AAAUUGAG | 7487 |
| 280 | UCAAUUUU C UAGGGGGA | 88 | UCCCCCUA CUGAUGAG GCCGUUAGGC CGAA AAAAUUGA | 7488 |
| 282 | AAUUUUCU A GGGGGAAC | 89 | GUUCCCCC CUGAUGAG GCCGUUAGGC CGAA AGAAAAUU | 7489 |
| 301 | CCGUGUGU C UUGGCCAA | 90 | UUGGCCAA CUGAUGAG GCCGUUAGGC CGAA ACACACGG | 7490 |
| 303 | GUGUGUCU U GGCCAAAA | 91 | UUUUGGCC CUGAUGAG GCCGUUAGGC CGAA AGACACAC | 7491 |
| 313 | GCCAAAAU U CGCAGUCC | 92 | GGACUGCG CUGAUGAG GCCGUUAGGC CGAA AUUUUGGC | 7492 |
| 314 | CCAAAAUU C GCAGUCCC | 93 | GGGACUGC CUGAUGAG GCCGUUAGGC CGAA AAUUUUGG | 7493 |
| 320 | UUCGCAGU C CCAAAUCU | 94 | AGAUUUGG CUGAUGAG GCCGUUAGGC CGAA ACUGCGAA | 7494 |
| 327 | UCCCAAAU C UCCAGUCA | 95 | UGACUGGA CUGAUGAG GCCGUUAGGC CGAA AUUUGGGA | 7495 |
| 329 | CCAAAUCU C CAGUCACU | 96 | AGUGACUG CUGAUGAG GCCGUUAGGC CGAA AGAUUUGG | 7496 |
| 334 | UCUCCAGU C ACUCACCA | 97 | UGGUGAGU CUGAUGAG GCCGUUAGGC CGAA ACUGGAGA | 7497 |
| 338 | CAGUCACU C ACCAACCU | 98 | AGGUUGGU CUGAUGAG GCCGUUAGGC CGAA AGUGACUG | 7498 |
| 349 | CAACCUGU U GUCCUCCA | 99 | UGGAGGAC CUGAUGAG GCCGUUAGGC CGAA ACAGGUUG | 7499 |
| 352 | CCUGUUGU C CUCCAAUU | 100 | AAUUGGAG CUGAUGAG GCCGUUAGGC CGAA ACAACAGG | 7500 |
| 355 | GUUGUCCU C CAAUUUGU | 101 | ACAAAUUG CUGAUGAG GCCGUUAGGC CGAA AGGACAAC | 7501 |
| 360 | CCUCCAAU U UGUCCUGG | 102 | CCAGGACA CUGAUGAG GCCGUUAGGC CGAA AUUGGAGG | 7502 |
| 361 | CUCCAAUU U GUCCUGGU | 103 | ACCAGGAC CUGAUGAG GCCGUUAGGC CGAA AAUUGGAG | 7503 |
| 364 | CAAUUUGU C CUGGUUAU | 104 | AUAACCAG CUGAUGAG GCCGUUAGGC CGAA ACAAAUUG | 7504 |
| 370 | GUCCUGGU U AUCGCUGG | 105 | CCAGCGAU CUGAUGAG GCCGUUAGGC CGAA ACCAGGAC | 7505 |
| 371 | UCCUGGUU A UCGCUGGA | 106 | UCCAGCGA CUGAUGAG GCCGUUAGGC CGAA AACCAGGA | 7506 |
| 373 | CUGGUUAU C GCUGGAUG | 107 | CAUCCAGC CUGAUGAG GCCGUUAGGC CGAA AUAACCAG | 7507 |
| 385 | GGAUGUGU C UGCGGCGU | 108 | ACGCCGCA CUGAUGAG GCCGUUAGGC CGAA ACACAUCC | 7508 |
| 394 | UGCGGCGU U UUAUCAUC | 109 | GAUGAUAA CUGAUGAG GCCGUUAGGC CGAA ACGCCGCA | 7509 |
| 395 | GCGGCGUU U UAUCAUCU | 110 | AGAUGAUA CUGAUGAG GCCGUUAGGC CGAA AACGCCGC | 7510 |
| 396 | CGGCGUUU U AUCAUCUU | 111 | AAGAUGAU CUGAUGAG GCCGUUAGGC CGAA AAACGCCG | 7511 |
| 397 | GGCGUUUU A UCAUCUUC | 112 | GAAGAUGA CUGAUGAG GCCGUUAGGC CGAA AAAACGCC | 7512 |
| 399 | CGUUUUAU C AUCUUCCU | 113 | AGGAAGAU CUGAUGAG GCCGUUAGGC CGAA AUAAAACG | 7513 |
| 402 | UUUAUCAU C UUCCUCUG | 114 | CAGAGGAA CUGAUGAG GCCGUUAGGC CGAA AUGAUAAA | 7514 |
| 404 | UAUCAUCU U CCUCUGCA | 115 | UGCAGAGG CUGAUGAG GCCGUUAGGC CGAA AGAUGAUA | 7515 |
| 405 | AUCAUCUU C CUCUGCAU | 116 | AUGCAGAG CUGAUGAG GCCGUUAGGC CGAA AAGAUGAU | 7516 |
| 408 | AUCUUCCU C UGCAUCCU | 117 | AGGAUGCA CUGAUGAG GCCGUUAGGC CGAA AGGAAGAU | 7517 |
| 414 | CUCUGCAU C CUGCUGCU | 118 | AGCAGCAG CUGAUGAG GCCGUUAGGC CGAA AUGCAGAG | 7518 |
| 423 | CUGCUGCU A UGCCUCAU | 119 | AUGAGGCA CUGAUGAG GCCGUUAGGC CGAA AGCAGCAG | 7519 |
| 429 | CUAUGCCU C AUCUUCUU | 120 | AAGAAGAU CUGAUGAG GCCGUUAGGC CGAA AGGCAUAG | 7520 |
| 432 | UGCCUCAU C UUCUUGUU | 121 | AACAAGAA CUGAUGAG GCCGUUAGGC CGAA AUGAGGCA | 7521 |
| 434 | CCUCAUCU U CUUGUUGG | 122 | CCAACAAG CUGAUGAG GCCGUUAGGC CGAA AGAUGAGG | 7522 |
| 435 | CUCAUCUU C UUGUUGGU | 123 | ACCAACAA CUGAUGAG GCCGUUAGGC CGAA AAGAUGAG | 7523 |
| 437 | CAUCUUCU U GUUGGUUC | 124 | GAACCAAC CUGAUGAG GCCGUUAGGC CGAA AGAAGAUG | 7524 |
| 440 | CUUCUUGU U GGUUCUUC | 125 | GAAGAACC CUGAUGAG GCCGUUAGGC CGAA ACAAGAAG | 7525 |
| 444 | UUGUUGGU U CUUCUGGA | 126 | UCCAGAAG CUGAUGAG GCCGUUAGGC CGAA ACCAACAA | 7526 |
| 445 | UGUUGGUU C UUCUGGAC | 127 | GUCCAGAA CUGAUGAG GCCGUUAGGC CGAA AACCAACA | 7527 |
| 447 | UUGGUUCU U CUGGACUA | 128 | UAGUCCAG CUGAUGAG GCCGUUAGGC CGAA AGAACCAA | 7528 |
| 448 | UGGUUCUU C UGGACUAU | 129 | AUAGUCCA CUGAUGAG GCCGUUAGGC CGAA AAGAACCA | 7529 |
| 455 | UCUGGACU A UCAAGGUA | 130 | UACCUUGA CUGAUGAG GCCGUUAGGC CGAA AGUCCAGA | 7530 |
| 457 | UGGACUAU C AAGGUAUG | 131 | CAUACCUU CUGAUGAG GCCGUUAGGC CGAA AUAGUCCA | 7531 |
| 463 | AUCAAGGU A UGUUGCCC | 132 | GGGCAACA CUGAUGAG GCCGUUAGGC CGAA ACCUUGAU | 7532 |
| 467 | AGGUAUGU U GCCCGUUU | 133 | AAACGGGC CUGAUGAG GCCGUUAGGC CGAA ACAUACCU | 7533 |
| 474 | UUGCCCGU U UGUCCUCU | 134 | AGAGGACA CUGAUGAG GCCGUUAGGC CGAA ACGGGCAA | 7534 |
| 475 | UGCCCGUU U GUCCUCUA | 135 | UAGAGGAC CUGAUGAG GCCGUUAGGC CGAA AACGGGCA | 7535 |
| 478 | CCGUUUGU C CUCUAAUU | 136 | AAUUAGAG CUGAUGAG GCCGUUAGGC CGAA ACAAACGG | 7536 |
| 481 | UUUGUCCU C UAAUUCCA | 137 | UGGAAUUA CUGAUGAG GCCGUUAGGC CGAA AGGACAAA | 7537 |
| 483 | UGUCCUCU A AUUCCAGG | 138 | CCUGGAAU CUGAUGAG GCCGUUAGGC CGAA AGAGGACA | 7538 |
| 486 | CCUCUAAU U CCAGGAUC | 139 | GAUCCUGG CUGAUGAG GCCGUUAGGC CGAA AUUAGAGG | 7539 |
| 487 | CUCUAAUU C CAGGAUCA | 140 | UGAUCCUG CUGAUGAG GCCGUUAGGC CGAA AAUUAGAG | 7540 |
| 494 | UCCAGGAU C AUCAACAA | 141 | UUGUUGAU CUGAUGAG GCCGUUAGGC CGAA AUCCUGGA | 7541 |
| 497 | AGGAUCAU C AACAACCA | 142 | UGGUUGUU CUGAUGAG GCCGUUAGGC CGAA AUGAUCCU | 7542 |
| 535 | GCACAACU C CUGCUCAA | 143 | UUGAGCAG CUGAUGAG GCCGUUAGGC CGAA AGUUGUGC | 7543 |
| 541 | CUCCUGCU C AAGGAACC | 144 | GGUUCCUU CUGAUGAG GCCGUUAGGC CGAA AGCAGGAG | 7544 |
| 551 | AGGAACCU C UAUGUUUC | 145 | GAAACAUA CUGAUGAG GCCGUUAGGC CGAA AGGUUCCU | 7545 |
| 553 | GAACCUCU A UGUUUCCC | 146 | GGGAAACA CUGAUGAG GCCGUUAGGC CGAA AGAGGUUC | 7546 |
| 557 | CUCUAUGU U UCCCUCAU | 147 | AUGAGGGA CUGAUGAG GCCGUUAGGC CGAA ACAUAGAG | 7547 |
| 558 | UCUAUGUU U CCCUCAUG | 148 | CAUGAGGG CUGAUGAG GCCGUUAGGC CGAA AACAUAGA | 7548 |
| 559 | CUAUGUUU C CCUCAUGU | 149 | ACAUGAGG CUGAUGAG GCCGUUAGGC CGAA AAACAUAG | 7549 |
| 563 | GUUUCCCU C AUGUUGCU | 150 | AGCAACAU CUGAUGAG GCCGUUAGGC CGAA AGGGAAAC | 7550 |
| 568 | CCUCAUGU U GCUGUACA | 151 | UGUACAGC CUGAUGAG GCCGUUAGGC CGAA ACAUGAGG | 7551 |
| 574 | GUUGCUGU A CAAAACCU | 152 | AGGUUUUG CUGAUGAG GCCGUUAGGC CGAA ACAGCAAC | 7552 |
| 583 | CAAAACCU A CGGACGGA | 153 | UCCGUCCG CUGAUGAG GCCGUUAGGC CGAA AGGUUUUG | 7553 |
| 604 | GCACCUGU A UUCCCAUC | 154 | GAUGGGAA CUGAUGAG GCCGUUAGGC CGAA ACAGGUGC | 7554 |
| 606 | ACCUGUAU U CCCAUCCC | 155 | GGGAUGGG CUGAUGAG GCCGUUAGGC CGAA AUACAGGU | 7555 |
| 607 | CCUGUAUU C CCAUCCCA | 156 | UGGGAUGG CUGAUGAG GCCGUUAGGC CGAA AAUACAGG | 7556 |
| 612 | AUUCCCAU C CCAUCAUC | 157 | GAUGAUGG CUGAUGAG GCCGUUAGGC CGAA AUGGGAAU | 7557 |
| 617 | CAUCCCAU C AUCUUGGG | 158 | CCCAAGAU CUGAUGAG GCCGUUAGGC CGAA AUGGGAUG | 7558 |
| 620 | CCCAUCAU C UUGGGCUU | 159 | AAGCCCAA CUGAUGAG GCCGUUAGGC CGAA AUGAUGGG | 7559 |
| 622 | CAUCAUCU U GGGCUUUC | 160 | GAAAGCCC CUGAUGAG GCCGUUAGGC CGAA AGAUGAUG | 7560 |
| 628 | CUUGGGCU U UCGCAAAA | 161 | UUUUGCGA CUGAUGAG GCCGUUAGGC CGAA AGCCCAAG | 7561 |
| 629 | UUGGGCUU U CGCAAAAU | 162 | AUUUUGCG CUGAUGAG GCCGUUAGGC CGAA AAGCCCAA | 7562 |
| 630 | UGGGCUUU C GCAAAAUA | 163 | UAUUUUGC CUGAUGAG GCCGUUAGGC CGAA AAAGCCCA | 7563 |
| 638 | CGCAAAAU A CCUAUGGG | 164 | CCCAUAGG CUGAUGAG GCCGUUAGGC CGAA AUUUUGCG | 7564 |
| 642 | AAAUACCU A UGGGAGUG | 165 | CACUCCCA CUGAUGAG GCCGUUAGGC CGAA AGGUAUUU | 7565 |
| 656 | GUGGGCCU C AGUCCGUU | 166 | AACGGACU CUGAUGAG GCCGUUAGGC CGAA AGGCCCAC | 7566 |
| 660 | GCCUCAGU C CGUUUCUC | 167 | GAGAAACG CUGAUGAG GCCGUUAGGC CGAA ACUGAGGC | 7567 |
| 664 | CAGUCCGU U UCUCUUGG | 168 | CCAAGAGA CUGAUGAG GCCGUUAGGC CGAA ACGGACUG | 7568 |
| 665 | AGUCCGUU U CUCUUGGC | 169 | GCCAAGAG CUGAUGAG GCCGUUAGGC CGAA AACGGACU | 7569 |
| 666 | GUCCGUUU C UCUUGGCU | 170 | AGCCAAGA CUGAUGAG GCCGUUAGGC CGAA AAACGGAC | 7570 |
| 668 | CCGUUUCU C UUGGCUCA | 171 | UGAGCCAA CUGAUGAG GCCGUUAGGC CGAA AGAAACGG | 7571 |
| 670 | GUUUCUCU U GGCUCAGU | 172 | ACUGAGCC CUGAUGAG GCCGUUAGGC CGAA AGAGAAAC | 7572 |
| 675 | UCUUGGCU C AGUUUACU | 173 | AGUAAACU CUGAUGAG GCCGUUAGGC CGAA AGCCAAGA | 7573 |
| 679 | GGCUCAGU U UACUAGUG | 174 | CACUAGUA CUGAUGAG GCCGUUAGGC CGAA ACUGAGCC | 7574 |
| 680 | GCUCAGUU U ACUAGUGC | 175 | GCACUAGU CUGAUGAG GCCGUUAGGC CGAA AACUGAGC | 7575 |
| 681 | CUCAGUUU A CUAGUGCC | 176 | GGCACUAG CUGAUGAG GCCGUUAGGC CGAA AAACUGAG | 7576 |
| 684 | AGUUUACU A GUGCCAUU | 177 | AAUGGCAC CUGAUGAG GCCGUUAGGC CGAA AGUAAACU | 7577 |
| 692 | AGUGCCAU U UGUUCAGU | 178 | ACUGAACA CUGAUGAG GCCGUUAGGC CGAA AUGGCACU | 7578 |
| 693 | GUGCCAUU U GUUCAGUG | 179 | CACUGAAC CUGAUGAG GCCGUUAGGC CGAA AAUGGCAC | 7579 |
| 696 | CCAUUUGU U CAGUGGUU | 180 | AACCACUG CUGAUGAG GCCGUUAGGC CGAA ACAAAUGG | 7580 |
| 697 | CAUUUGUU C AGUGGUUC | 181 | GAACCACU CUGAUGAG GCCGUUAGGC CGAA AACAAAUG | 7581 |
| 704 | UCAGUGGU U CGUAGGGC | 182 | GCCCUACG CUGAUGAG GCCGUUAGGC CGAA ACCACUGA | 7582 |
| 705 | CAGUGGUU C GUAGGGCU | 183 | AGCCCUAC CUGAUGAG GCCGUUAGGC CGAA AACCACUG | 7583 |
| 708 | UGGUUCGU A GGGCUUUC | 184 | GAAAGCCC CUGAUGAG GCCGUUAGGC CGAA ACGAACCA | 7584 |
| 714 | GUAGGGCU U UCCCCCAC | 185 | GUGGGGGA CUGAUGAG GCCGUUAGGC CGAA AGCCCUAC | 7585 |
| 715 | UAGGGCUU U CCCCCACU | 186 | AGUGGGGG CUGAUGAG GCCGUUAGGC CGAA AAGCCCUA | 7586 |
| 716 | AGGGCUUU C CCCCACUG | 187 | CAGUGGGG CUGAUGAG GCCGUUAGGC CGAA AAAGCCCU | 7587 |
| 726 | CCCACUGU C UGGCUUUC | 188 | GAAAGCCA CUGAUGAG GCCGUUAGGC CGAA ACAGUGGG | 7588 |
| 732 | GUCUGGCU U UCAGUUAU | 189 | AUAACUGA CUGAUGAG GCCGUUAGGC CGAA AGCCAGAC | 7589 |
| 733 | UCUGGCUU U CAGUUAUA | 190 | UAUAACUG CUGAUGAG GCCGUUAGGC CGAA AAGCCAGA | 7590 |
| 734 | CUGGCUUU C AGUUAUAU | 191 | AUAUAACU CUGAUGAG GCCGUUAGGC CGAA AAAGCCAG | 7591 |
| 738 | CUUUCAGU U AUAUGGAU | 192 | AUCCAUAU CUGAUGAG GCCGUUAGGC CGAA ACUGAAAG | 7592 |
| 739 | UUUCAGUU A UAUGGAUG | 193 | CAUCCAUA CUGAUGAG GCCGUUAGGC CGAA AACUGAAA | 7593 |
| 741 | UCAGUUAU A UGGAUGAU | 194 | AUCAUCCA CUGAUGAG GCCGUUAGGC CGAA AUAACUGA | 7594 |
| 755 | GAUGUGGU U UUGGGGGC | 195 | GCCCCCAA CUGAUGAG GCCGUUAGGC CGAA ACCACAUC | 7595 |
| 756 | AUGUGGUU U UGGGGGCC | 196 | GGCCCCCA CUGAUGAG GCCGUUAGGC CGAA AACCACAU | 7596 |
| 757 | UGUGGUUU U GGGGGCCA | 197 | UGGCCCCC CUGAUGAG GCCGUUAGGC CGAA AAACCACA | 7597 |
| 769 | GGCCAAGU C UGUACAAC | 198 | GUUGUACA CUGAUGAG GCCGUUAGGC CGAA ACUUGGCC | 7598 |
| 773 | AAGUCUGU A CAACAUCU | 199 | AGAUGUUG CUGAUGAG GCCGUUAGGC CGAA ACAGACUU | 7599 |
| 780 | UACAACAU C UUGAGUCC | 200 | GGACUCAA CUGAUGAG GCCGUUAGGC CGAA AUGUUGUA | 7600 |
| 782 | CAACAUCU U GAGUCCCU | 201 | AGGGACUC CUGAUGAG GCCGUUAGGC CGAA AGAUGUUG | 7601 |
| 787 | UCUUGAGU C CCUUUAUG | 202 | CAUAAAGG CUGAUGAG GCCGUUAGGC CGAA ACUCAAGA | 7602 |
| 791 | GAGUCCCU U UAUGCCGC | 203 | GCGGCAUA CUGAUGAG GCCGUUAGGC CGAA AGGGACUC | 7603 |
| 792 | AGUCCCUU U AUGCCGCU | 204 | AGCGGCAU CUGAUGAG GCCGUUAGGC CGAA AAGGGACU | 7604 |
| 793 | GUCCCUUU A UGCCGCUG | 205 | CAGCGGCA CUGAUGAG GCCGUUAGGC CGAA AAAGGGAC | 7605 |
| 803 | GCCGCUGU U ACCAAUUU | 206 | AAAUUGGU CUGAUGAG GCCGUUAGGC CGAA ACAGCGGC | 7606 |
| 804 | CCGCUGUU A CCAAUUUU | 207 | AAAAUUGG CUGAUGAG GCCGUUAGGC CGAA AACAGCGG | 7607 |
| 810 | UUACCAAU U UUCUUUUG | 208 | CAAAAGAA CUGAUGAG GCCGUUAGGC CGAA AUUGGUAA | 7608 |
| 811 | UACCAAUU U UCUUUUGU | 209 | ACAAAAGA CUGAUGAG GCCGUUAGGC CGAA AAUUGGUA | 7609 |
| 812 | ACCAAUUU U CUUUUGUC | 210 | GACAAAAG CUGAUGAG GCCGUUAGGC CGAA AAAUUGGU | 7610 |
| 813 | CCAAUUUU C UUUUGUCU | 211 | AGACAAAA CUGAUGAG GCCGUUAGGC CGAA AAAAUUGG | 7611 |
| 815 | AAUUUUCU U UUGUCUUU | 212 | AAAGACAA CUGAUGAG GCCGUUAGGC CGAA AGAAAAUU | 7612 |
| 816 | AUUUUCUU U UGUCUUUG | 213 | CAAAGACA CUGAUGAG GCCGUUAGGC CGAA AAGAAAAU | 7613 |
| 817 | UUUUCUUU U GUCUUUGG | 214 | CCAAAGAC CUGAUGAG GCCGUUAGGC CGAA AAAGAAAA | 7614 |
| 820 | UCUUUUGU C UUUGGGUA | 215 | UACCCAAA CUGAUGAG GCCGUUAGGC CGAA ACAAAAGA | 7615 |
| 822 | UUUUGUCU U UGGGUAUA | 216 | UAUACCCA CUGAUGAG GCCGUUAGGC CGAA AGACAAAA | 7616 |
| 823 | UUUGUCUU U GGGUAUAC | 217 | GUAUACCC CUGAUGAG GCCGUUAGGC CGAA AAGACAAA | 7617 |
| 828 | CUUUGGGU A UACAUUUA | 218 | UAAAUGUA CUGAUGAG GCCGUUAGGC CGAA ACCCAAAG | 7618 |
| 830 | UUGGGUAU A CAUUUAAA | 219 | UUUAAAUG CUGAUGAG GCCGUUAGGC CGAA AUACCCAA | 7619 |
| 834 | GUAUACAU U UAAACCCU | 220 | AGGGUUUA CUGAUGAG GCCGUUAGGC CGAA AUGUAUAC | 7620 |
| 835 | UAUACAUU U AAACCCUC | 221 | GAGGGUUU CUGAUGAG GCCGUUAGGC CGAA AAUGUAUA | 7621 |
| 836 | AUACAUUU A AACCCUCA | 222 | UGAGGGUU CUGAUGAG GCCGUUAGGC CGAA AAAUGUAU | 7622 |
| 843 | UAAACCCU C ACAAAACA | 223 | UGUUUUGU CUGAUGAG GCCGUUAGGC CGAA AGGGUUUA | 7623 |
| 865 | AUGGGGAU A UUCCCUUA | 224 | UAAGGGAA CUGAUGAG GCCGUUAGGC CGAA AUCCCCAU | 7624 |
| 867 | GGGGAUAU U CCCUUAAC | 225 | GUUAAGGG CUGAUGAG GCCGUUAGGC CGAA AUAUCCCC | 7625 |
| 868 | GGGAUAUU C CCUUAACU | 226 | AGUUAAGG CUGAUGAG GCCGUUAGGC CGAA AAUAUCCC | 7626 |
| 872 | UAUUCCCU U AACUUCAU | 227 | AUGAAGUU CUGAUGAG GCCGUUAGGC CGAA AGGGAAUA | 7627 |
| 873 | AUUCCCUU A ACUUCAUG | 228 | CAUGAAGU CUGAUGAG GCCGUUAGGC CGAA AAGGGAAU | 7628 |
| 877 | CCUUAACU U CAUGGGAU | 229 | AUCCCAUG CUGAUGAG GCCGUUAGGC CGAA AGUUAAGG | 7629 |
| 878 | CUUAACUU C AUGGGAUA | 230 | UAUCCCAU CUGAUGAG GCCGUUAGGC CGAA AAGUUAAG | 7630 |
| 886 | CAUGGGAU A UGUAAUUG | 231 | CAAUUACA CUGAUGAG GCCGUUAGGC CGAA AUCCCAUG | 7631 |
| 890 | GGAUAUGU A AUUGGGAG | 232 | CUCCCAAU CUGAUGAG GCCGUUAGGC CGAA ACAUAUCC | 7632 |
| 893 | UAUGUAAU U GGGAGUUG | 233 | CAACUCCC CUGAUGAG GCCGUUAGGC CGAA AUUACAUA | 7633 |
| 900 | UUGGGAGU U GGGGCACA | 234 | UGUGCCCC CUGAUGAG GCCGUUAGGC CGAA ACUCCCAA | 7634 |
| 910 | GGGCACAU U GCCACAGG | 235 | CCUGUGGC CUGAUGAG GCCGUUAGGC CGAA AUGUGCCC | 7635 |
| 924 | AGGAACAU A UUGUACAA | 236 | UUGUACAA CUGAUGAG GCCGUUAGGC CGAA AUGUUCCU | 7636 |
| 926 | GAACAUAU U GUACAAAA | 237 | UUUUGUAC CUGAUGAG GCCGUUAGGC CGAA AUAUGUUC | 7637 |
| 929 | CAUAUUGU A CAAAAAAU | 238 | AUUUUUUG CUGAUGAG GCCGUUAGGC CGAA ACAAUAUG | 7638 |
| 938 | CAAAAAAU C AAAAUGUG | 239 | CACAUUUU CUGAUGAG GCCGUUAGGC CGAA AUUUUUUG | 7639 |
| 948 | AAAUGUGU U UUAGGAAA | 240 | UUUCCUAA CUGAUGAG GCCGUUAGGC CGAA ACACAUUU | 7640 |
| 949 | AAUGUGUU U UAGGAAAC | 241 | GUUUCCUA CUGAUGAG GCCGUUAGGC CGAA AACACAUU | 7641 |
| 950 | AUGUGUUU U AGGAAACU | 242 | AGUUUCCU CUGAUGAG GCCGUUAGGC CGAA AAACACAU | 7642 |
| 951 | UGUGUUUU A GGAAACUU | 243 | AAGUUUCC CUGAUGAG GCCGUUAGGC CGAA AAAACACA | 7643 |
| 959 | AGGAAACU U CCUGUAAA | 244 | UUUACAGG CUGAUGAG GCCGUUAGGC CGAA AGUUUCCU | 7644 |
| 960 | GGAAACUU C CUGUAAAC | 245 | GUUUACAG CUGAUGAG GCCGUUAGGC CGAA AAGUUUCC | 7645 |
| 965 | CUUCCUGU A AACAGGCC | 246 | GGCCUGUU CUGAUGAG GCCGUUAGGC CGAA ACAGGAAG | 7646 |
| 975 | ACAGGCCU A UUGAUUGG | 247 | CCAAUCAA CUGAUGAG GCCGUUAGGC CGAA AGGCCUGU | 7647 |
| 977 | AGGCCUAU U GAUUGGAA | 248 | UUCCAAUC CUGAUGAG GCCGUUAGGC CGAA AUAGGCCU | 7648 |
| 981 | CUAUUGAU U GGAAAGUA | 249 | UACUUUCC CUGAUGAG GCCGUUAGGC CGAA AUCAAUAG | 7649 |
| 989 | UGGAAAGU A UGUCAACG | 250 | CGUUGACA CUGAUGAG GCCGUUAGGC CGAA ACUUUCCA | 7650 |
| 993 | AAGUAUGU C AACGAAUU | 251 | AAUUCGUU CUGAUGAG GCCGUUAGGC CGAA ACAUACUU | 7651 |
| 1001 | CAACGAAU U GUGGGUCU | 252 | AGACCCAC CUGAUGAG GCCGUUAGGC CGAA AUUCGUUG | 7652 |
| 1008 | UUGUGGGU C UUUUGGGG | 253 | CCCCAAAA CUGAUGAG GCCGUUAGGC CGAA ACCCACAA | 7653 |
| 1010 | GUGGGUCU U UUGGGGUU | 254 | AACCCCAA CUGAUGAG GCCGUUAGGC CGAA AGACCCAC | 7654 |
| 1011 | UGGGUCUU U UGGGGUUU | 255 | AAACCCCA CUGAUGAG GCCGUUAGGC CGAA AAGACCCA | 7655 |
| 1012 | GGGUCUUU U GGGGUUUG | 256 | CAAACCCC CUGAUGAG GCCGUUAGGC CGAA AAAGACCC | 7656 |
| 1018 | UUUGGGGU U UGCCGCCC | 257 | GGGCGGCA CUGAUGAG GCCGUUAGGC CGAA ACCCCAAA | 7657 |
| 1019 | UUGGGGUU U GCCGCCCC | 258 | GGGGCGGC CUGAUGAG GCCGUUAGGC CGAA AACCCCAA | 7658 |
| 1029 | CCGCCCCU U UCACGCAA | 259 | UUGCGUGA CUGAUGAG GCCGUUAGGC CGAA AGGGGCGG | 7659 |
| 1030 | CGCCCCUU U CACGCAAU | 260 | AUUGCGUG CUGAUGAG GCCGUUAGGC CGAA AAGGGGCG | 7660 |
| 1031 | GCCCCUUU C ACGCAAUG | 261 | CAUUGCGU CUGAUGAG GCCGUUAGGC CGAA AAAGGGGC | 7661 |
| 1045 | AUGUGGAU A UUCUGCUU | 262 | AAGCAGAA CUGAUGAG GCCGUUAGGC CGAA AUCCACAU | 7662 |
| 1047 | GUGGAUAU U CUGCUUUA | 263 | UAAAGCAG CUGAUGAG GCCGUUAGGC CGAA AUAUCCAC | 7663 |
| 1048 | UGGAUAUU C UGCUUUAA | 264 | UUAAAGCA CUGAUGAG GCCGUUAGGC CGAA AAUAUCCA | 7664 |
| 1053 | AUUCUGCU U UAAUGCCU | 265 | AGGCAUUA CUGAUGAG GCCGUUAGGC CGAA AGCAGAAU | 7665 |
| 1054 | UUCUGCUU U AAUGCCUU | 266 | AAGGCAUU CUGAUGAG GCCGUUAGGC CGAA AAGCAGAA | 7666 |
| 1055 | UCUGCUUU A AUGCCUUU | 267 | AAAGGCAU CUGAUGAG GCCGUUAGGC CGAA AAAGCAGA | 7667 |
| 1062 | UAAUGCCU U UAUAUGCA | 268 | UGCAUAUA CUGAUGAG GCCGUUAGGC CGAA AGGCAUUA | 7668 |
| 1063 | AAUGCCUU U AUAUGCAU | 269 | AUGCAUAU CUGAUGAG GCCGUUAGGC CGAA AAGGCAUU | 7669 |
| 1064 | AUGCCUUU A UAUGCAUG | 270 | CAUGCAUA CUGAUGAG GCCGUUAGGC CGAA AAAGGCAU | 7670 |
| 1066 | GCCUUUAU A UGCAUGCA | 271 | UGCAUGCA CUGAUGAG GCCGUUAGGC CGAA AUAAAGGC | 7671 |
| 1076 | GCAUGCAU A CAAGCAAA | 272 | UUUGCUUG CUGAUGAG GCCGUUAGGC CGAA AUGCAUGC | 7672 |
| 1092 | AACAGGCU U UUACUUUC | 273 | GAAAGUAA CUGAUGAG GCCGUUAGGC CGAA AGCCUGUU | 7673 |
| 1093 | ACAGGCUU U UACUUUCU | 274 | AGAAAGUA CUGAUGAG GCCGUUAGGC CGAA AAGCCUGU | 7674 |
| 1094 | CAGGCUUU U ACUUUCUC | 275 | GAGAAAGU CUGAUGAG GCCGUUAGGC CGAA AAAGCCUG | 7675 |
| 1095 | AGGCUUUU A CUUUCUCG | 276 | CGAGAAAG CUGAUGAG GCCGUUAGGC CGAA AAAAGCCU | 7676 |
| 1098 | CUUUUACU U UCUCGCCA | 277 | UGGCGAGA CUGAUGAG GCCGUUAGGC CGAA AGUAAAAG | 7677 |
| 1099 | UUUUACUU U CUCGCCAA | 278 | UUGGCGAG CUGAUGAG GCCGUUAGGC CGAA AAGUAAAA | 7678 |
| 1100 | UUUACUUU C UCGCCAAC | 279 | GUUGGCGA CUGAUGAG GCCGUUAGGC CGAA AAAGUAAA | 7679 |
| 1102 | UACUUUCU C GCCAACUU | 280 | AAGUUGGC CUGAUGAG GCCGUUAGGC CGAA AGAAAGUA | 7680 |
| 1110 | CGCCAACU U ACAAGGCC | 281 | GGCCUUGU CUGAUGAG GCCGUUAGGC CGAA AGUUGGCG | 7681 |
| 1111 | GCCAACUU A CAAGGCCU | 282 | AGGCCUUG CUGAUGAG GCCGUUAGGC CGAA AAGUUGGC | 7682 |
| 1120 | CAAGGCCU U UCUAAGUA | 283 | UACUUAGA CUGAUGAG GCCGUUAGGC CGAA AGGCCUUG | 7683 |
| 1121 | AAGGCCUU U CUAAGUAA | 284 | UUACUUAG CUGAUGAG GCCGUUAGGC CGAA AAGGCCUU | 7684 |
| 1122 | AGGCCUUU C UAAGUAAA | 285 | UUUACUUA CUGAUGAG GCCGUUAGGC CGAA AAAGGCCU | 7685 |
| 1124 | GCCUUUCU A AGUAAACA | 286 | UGUUUACU CUGAUGAG GCCGUUAGGC CGAA AGAAAGGC | 7686 |
| 1128 | UUCUAAGU A AACAGUAU | 287 | AUACUGUU CUGAUGAG GCCGUUAGGC CGAA ACUUAGAA | 7687 |
| 1135 | UAAACAGU A UGUGAACC | 288 | GGUUCACA CUGAUGAG GCCGUUAGGC CGAA ACUGUUUA | 7688 |
| 1145 | GUGAACCU U UACCCCGU | 289 | ACGGGGUA CUGAUGAG GCCGUUAGGC CGAA AGGUUCAC | 7689 |
| 1146 | UGAACCUU U ACCCCGUU | 290 | AACGGGGU CUGAUGAG GCCGUUAGGC CGAA AAGGUUCA | 7690 |
| 1147 | GAACCUUU A CCCCGUUG | 291 | CAACGGGG CUGAUGAG GCCGUUAGGC CGAA AAAGGUUC | 7691 |
| 1154 | UACCCCGU U GCUCGGCA | 292 | UGCCGAGC CUGAUGAG GCCGUUAGGC CGAA ACGGGGUA | 7692 |
| 1158 | CCGUUGCU C GGCAACGG | 293 | CCGUUGCC CUGAUGAG GCCGUUAGGC CGAA AGCAACGG | 7693 |
| 1173 | GGCCUGGU C UAUGCCAA | 294 | UUGGCAUA CUGAUGAG GCCGUUAGGC CGAA ACCAGGCC | 7694 |
| 1175 | CCUGGUCU A UGCCAAGU | 295 | ACUUGGCA CUGAUGAG GCCGUUAGGC CGAA AGACCAGG | 7695 |
| 1186 | CCAAGUGU U UGCUGACG | 296 | CGUCAGCA CUGAUGAG GCCGUUAGGC CGAA ACACUUGG | 7696 |
| 1187 | CAAGUGUU U GCUGACGC | 297 | GCGUCAGC CUGAUGAG GCCGUUAGGC CGAA AACACUUG | 7697 |
| 1209 | CCACUGGU U GGGGCUUG | 298 | CAAGCCCC CUGAUGAG GCCGUUAGGC CGAA ACCAGUGG | 7698 |
| 1216 | UUGGGGCU U GGCCAUAG | 299 | CUAUGGCC CUGAUGAG GCCGUUAGGC CGAA AGCCCCAA | 7699 |
| 1223 | UUGGCCAU A GGCCAUCA | 300 | UGAUGGCC CUGAUGAG GCCGUUAGGC CGAA AUGGCCAA | 7700 |
| 1230 | UAGGCCAU C AGCGCAUG | 301 | CAUGCGCU CUGAUGAG GCCGUUAGGC CGAA AUGGCCUA | 7701 |
| 1249 | UGGAACCU U UGUGUCUC | 302 | GAGACACA CUGAUGAG GCCGUUAGGC CGAA AGGUUCCA | 7702 |
| 1250 | GGAACCUU U GUGUCUCC | 303 | GGAGACAC CUGAUGAG GCCGUUAGGC CGAA AAGGUUCC | 7703 |
| 1255 | CUUUGUGU C UCCUCUGC | 304 | GCAGAGGA CUGAUGAG GCCGUUAGGC CGAA ACACAAAG | 7704 |
| 1257 | UUGUGUCU C CUCUGCCG | 305 | CGGCAGAG CUGAUGAG GCCGUUAGGC CGAA AGACACAA | 7705 |
| 1260 | UGUCUCCU C UGCCGAUC | 306 | GAUCGGCA CUGAUGAG GCCGUUAGGC CGAA AGGAGACA | 7706 |
| 1268 | CUGCCGAU C CAUACCGC | 307 | GCGGUAUG CUGAUGAG GCCGUUAGGC CGAA AUCGGCAG | 7707 |
| 1272 | CGAUCCAU A CCGCGGAA | 308 | UUCCGCGG CUGAUGAG GCCGUUAGGC CGAA AUGGAUCG | 7708 |
| 1283 | GCGGAACU C CUAGCCGC | 309 | GCGGCUAG CUGAUGAG GCCGUUAGGC CGAA AGUUCCGC | 7709 |
| 1286 | GAACUCCU A GCCGCUUG | 310 | CAAGCGGC CUGAUGAG GCCGUUAGGC CGAA AGGAGUUC | 7710 |
| 1293 | UAGCCGCU U GUUUUGCU | 311 | AGCAAAAC CUGAUGAG GCCGUUAGGC CGAA AGCGGCUA | 7711 |
| 1296 | CCGCUUGU U UUGCUCGC | 312 | GCGAGCAA CUGAUGAG GCCGUUAGGC CGAA ACAAGCGG | 7712 |
| 1297 | CGCUUGUU U UGCUCGCA | 313 | UGCGAGCA CUGAUGAG GCCGUUAGGC CGAA AACAAGCG | 7713 |
| 1298 | GCUUGUUU U GCUCGCAG | 314 | CUGCGAGC CUGAUGAG GCCGUUAGGC CGAA AAACAAGC | 7714 |
| 1302 | GUUUUGCU C GCAGCAGG | 315 | CCUGCUGC CUGAUGAG GCCGUUAGGC CGAA AGCAAAAC | 7715 |
| 1312 | CAGCAGGU C UGGGGCAA | 316 | UUGCCCCA CUGAUGAG GCCGUUAGGC CGAA ACCUGCUG | 7716 |
| 1325 | GCAAAACU C AUCGGGAC | 317 | GUCCCGAU CUGAUGAG GCCGUUAGGC CGAA AGUUUUGC | 7717 |
| 1328 | AAACUCAU C GGGACUGA | 318 | UCAGUCCC CUGAUGAG GCCGUUAGGC CGAA AUGAGUUU | 7718 |
| 1341 | CUGACAAU U CUGUCGUG | 319 | CACGACAG CUGAUGAG GCCGUUAGGC CGAA AUUGUCAG | 7719 |
| 1342 | UGACAAUU C UGUCGUGC | 320 | GCACGACA CUGAUGAG GCCGUUAGGC CGAA AAUUGUCA | 7720 |
| 1346 | AAUUCUGU C GUGCUCUC | 321 | GAGAGCAC CUGAUGAG GCCGUUAGGC CGAA ACAGAAUU | 7721 |
| 1352 | GUCGUGCU C UCCCGCAA | 322 | UUGCGGGA CUGAUGAG GCCGUUAGGC CGAA AGCACGAC | 7722 |
| 1354 | CGUGCUCU C CCGCAAAU | 323 | AUUUGCGG CUGAUGAG GCCGUUAGGC CGAA AGAGCACG | 7723 |
| 1363 | CCGCAAAU A UACAUCAU | 324 | AUGAUGUA CUGAUGAG GCCGUUAGGC CGAA AUUUGCGG | 7724 |
| 1365 | GCAAAUAU A CAUCAUUU | 325 | AAAUGAUG CUGAUGAG GCCGUUAGGC CGAA AUAUUUGC | 7725 |
| 1369 | AUAUACAU C AUUUCCAU | 326 | AUGGAAAU CUGAUGAG GCCGUUAGGC CGAA AUGUAUAU | 7726 |
| 1372 | UACAUCAU U UCCAUGGC | 327 | GCCAUGGA CUGAUGAG GCCGUUAGGC CGAA AUGAUGUA | 7727 |
| 1373 | ACAUCAUU U CCAUGGCU | 328 | AGCCAUGG CUGAUGAG GCCGUUAGGC CGAA AAUGAUGU | 7728 |
| 1374 | CAUCAUUU C CAUGGCUG | 329 | CAGCCAUG CUGAUGAG GCCGUUAGGC CGAA AAAUGAUG | 7729 |
| 1385 | UGGCUGCU A GGCUGUGC | 330 | GCACAGCC CUGAUGAG GCCGUUAGGC CGAA AGCAGCCA | 7730 |
| 1406 | AACUGGAU C CUACGCGG | 331 | CCGCGUAG CUGAUGAG GCCGUUAGGC CGAA AUCCAGUU | 7731 |
| 1409 | UGGAUCCU A CGCGGGAC | 332 | GUCCCGCG CUGAUGAG GCCGUUAGGC CGAA AGGAUCCA | 7732 |
| 1420 | CGGGACGU C CUUUGUUU | 333 | AAACAAAG CUGAUGAG GCCGUUAGGC CGAA ACGUCCCG | 7733 |
| 1423 | GACGUCCU U UGUUUACG | 334 | CGUAAACA CUGAUGAG GCCGUUAGGC CGAA AGGACGUC | 7734 |
| 1424 | ACGUCCUU U GUUUACGU | 335 | ACGUAAAC CUCAUGAG GCCGUUAGGC CGAA AAGGACGU | 7735 |
| 1427 | UCCUUUGU U UACGUCCC | 336 | GGGACGUA CUGAUGAG GCCGUUAGGC CGAA ACAAAGGA | 7736 |
| 1428 | CCUUUGUU U ACGUCCCG | 337 | CGGGACGU CUGAUGAG GCCGUUAGGC CGAA AACAAAGG | 7737 |
| 1429 | CUUUGUUU A CGUCCCGU | 338 | ACGGGACG CUGAUGAG GCCGUUAGGC CGAA AAACAAAG | 7738 |
| 1433 | GUUUACGU C CCGUCGGC | 339 | GCCGACGG CUGAUGAG GCCGUUAGGC CGAA ACGUAAAC | 7739 |
| 1438 | CGUCCCGU C GGCGCUGA | 340 | UCAGCGCC CUGAUGAG GCCGUUAGGC CGAA ACGGGACG | 7740 |
| 1449 | CGCUGAAU C CCGCGGAC | 341 | GUCCGCGG CUGAUGAG GCCGUUAGGC CGAA AUUCAGCG | 7741 |
| 1465 | CGACCCCU C CCGGGGCC | 342 | GGCCCCGG CUGAUGAG GCCGUUAGGC CGAA AGGGGUCG | 7742 |
| 1477 | GGGCCGCU U GGGGCUCU | 343 | AGAGCCCC CUGAUGAG GCCGUUAGGC CGAA AGCGGCCC | 7743 |
| 1484 | UUGGGGCU C UACCGCCC | 344 | GGGCGGUA CUGAUGAG GCCGUUAGGC CGAA AGCCCCAA | 7744 |
| 1486 | GGGGCUCU A CCGCCCGC | 345 | GCGGGCGG CUGAUGAG GCCGUUAGGC CGAA AGAGCCCC | 7745 |
| 1496 | CGCCCGCU U CUCCGCCU | 346 | AGGCGGAG CUGAUGAG GCCGUUAGGC CGAA AGCGGGCG | 7746 |
| 1497 | GCCCGCUU C UCCGCCUA | 347 | UAGGCGGA CUGAUGAG GCCGUUAGGC CGAA AAGCGGGC | 7747 |
| 1499 | CCGCUUCU C CGCCUAUU | 348 | AAUAGGCG CUGAUGAG GCCGUUAGGC CGAA AGAAGCGG | 7748 |
| 1505 | CUCCGCCU A UUGUACCG | 349 | CGGUACAA CUGAUGAG GCCGUUAGGC CGAA AGGCGGAG | 7749 |
| 1507 | CCGCCUAU U GUACCGAC | 350 | GUCGGUAC CUGAUGAG GCCGUUAGGC CGAA AUAGGCGG | 7750 |
| 1510 | CCUAUUGU A CCGACCGU | 351 | ACGGUCGG CUGAUGAG GCCGUUAGGC CGAA ACAAUAGG | 7751 |
| 1519 | CCGACCGU C CACGGGGC | 352 | GCCCCGUG CUGAUGAG GCCGUUAGGC CGAA ACGGUCGG | 7752 |
| 1534 | GCGCACCU C UCUUUACG | 353 | CGUAAAGA CUGAUGAG GCCGUUAGGC CGAA AGGUGCGC | 7753 |
| 1536 | GCACCUCU C UUUACGCG | 354 | CGCGUAAA CUGAUGAG GCCGUUAGGC CGAA AGAGGUGC | 7754 |
| 1538 | ACCUCUCU U UACGCGGA | 355 | UCCGCGUA CUGAUGAG GCCGUUAGGC CGAA AGAGAGGU | 7755 |
| 1539 | CCUCUCUU U ACGCGGAC | 356 | GUCCGCGU CUGAUGAG GCCGUUAGGC CGAA AAGAGAGG | 7756 |
| 1540 | CUCUCUUU A CGCGGACU | 357 | AGUCCGCG CUGAUGAG GCCGUUAGGC CGAA AAAGAGAG | 7757 |
| 1549 | CGCGGACU C CCCGUCUG | 358 | CAGACGGG CUGAUGAG GCCGUUAGGC CGAA AGUCCGCG | 7758 |
| 1555 | CUCCCCGU C UGUGCCUU | 359 | AAGGCACA CUGAUGAG GCCGUUAGGC CGAA ACGGGGAG | 7759 |
| 1563 | CUGUGCCU U CUCAUCUG | 360 | CAGAUGAG CUGAUGAG GCCGUUAGGC CGAA AGGCACAG | 7760 |
| 1564 | UGUGCCUU C UCAUCUGC | 361 | GCAGAUGA CUGAUGAG GCCGUUAGGC CGAA AAGGCACA | 7761 |
| 1566 | UGCCUUCU C AUCUGCCG | 362 | CGGCAGAU CUGAUGAG GCCGUUAGGC CGAA AGAAGGCA | 7762 |
| 1569 | CUUCUCAU C UGCCGGAC | 363 | GUCCGGCA CUGAUGAG GCCGUUAGGC CGAA AUGAGAAG | 7763 |
| 1588 | UGUGCACU U CGCUUCAC | 364 | GUGAAGCG CUGAUGAG GCCGUUAGGC CGAA AGUGCACA | 7764 |
| 1589 | GUGCACUU C GCUUCACC | 365 | GGUGAAGC CUGAUGAG GCCGUUAGGC CGAA AAGUGCAC | 7765 |
| 1593 | ACUUCGCU U CACCUCUG | 366 | CAGAGGUG CUGAUGAG GCCGUUAGGC CGAA AGCGAAGU | 7766 |
| 1594 | CUUCGCUU C ACCUCUGC | 367 | GCAGAGGU CUGAUGAG GCCGUUAGGC CGAA AAGCGAAG | 7767 |
| 1599 | CUUCACCU C UGCACGUC | 368 | GACGUGCA CUGAUGAG GCCGUUAGGC CGAA AGGUGAAG | 7768 |
| 1607 | CUGCACGU C GCAUGGAG | 369 | CUCCAUGC CUGAUGAG GCCGUUAGGC CGAA ACGUGCAG | 7769 |
| 1651 | CCCAAGGU C UUGCAUAA | 370 | UUAUGCAA CUGAUGAG GCCGUUAGGC CGAA ACCUUGGG | 7770 |
| 1653 | CAAGGUCU U GCAUAAGA | 371 | UCUUAUGC CUGAUGAG GCCGUUAGGC CGAA AGACCUUG | 7771 |
| 1658 | UCUUGCAU A AGAGGACU | 372 | AGUCCUCU CUGAUGAG GCCGUUAGGC CGAA AUGCAAGA | 7772 |
| 1667 | AGAGGACU C UUGGACUU | 373 | AAGUCCAA CUGAUGAG GCCGUUAGGC CGAA AGUCCUCU | 7773 |
| 1669 | AGGACUCU U GGACUUUC | 374 | GAAAGUCC CUGAUGAG GCCGUUAGGC CGAA AGAGUCCU | 7774 |
| 1675 | CUUGGACU U UCAGCAAU | 375 | AUUGCUGA CUGAUGAG GCCGUUAGGC CGAA AGUCCAAG | 7775 |
| 1676 | UUGGACUU U CAGCAAUG | 376 | CAUUGCUG CUGAUGAG GCCGUUAGGC CGAA AAGUCCAA | 7776 |
| 1677 | UGGACUUU C AGCAAUGU | 377 | ACAUUGCU CUGAUGAG GCCGUUAGGC CGAA AAAGUCCA | 7777 |
| 1686 | AGCAAUGU C AACGACCG | 378 | CGGUCGUU CUGAUGAG GCCGUUAGGC CGAA ACAUUGCU | 7778 |
| 1699 | ACCGACCU U GAGGCAUA | 379 | UAUGCCUC CUGAUGAG GCCGUUAGGC CGAA AGGUCGGU | 7779 |
| 1707 | UGAGGCAU A CUUCAAAG | 380 | CUUUGAAG CUGAUGAG GCCGUUAGGC CGAA AUGCCUCA | 7780 |
| 1710 | GGCAUACU U CAAAGACU | 381 | AGUCUUUG CUGAUGAG GCCGUUAGGC CGAA AGUAUGCC | 7781 |
| 1711 | GCAUACUU C AAAGACUG | 382 | CAGUCUUU CUGAUGAG GCCGUUAGGC CGAA AAGUAUGC | 7782 |
| 1725 | CUGUGUGU U UAAUGAGU | 383 | ACUCAUUA CUGAUGAG GCCGUUAGGC CGAA ACACACAG | 7783 |
| 1726 | UGUGUGUU U AAUGAGUG | 384 | CACUCAUU CUGAUGAG GCCGUUAGGC CGAA AACACACA | 7784 |
| 1727 | GUGUGUUU A AUGAGUGG | 385 | CCACUCAU CUGAUGAG GCCGUUAGGC CGAA AAACACAC | 7785 |
| 1743 | GGAGGAGU U GGGGGAGG | 386 | CCUCCCCC CUGAUGAG GCCGUUAGGC CGAA ACUCCUCC | 7786 |
| 1756 | GAGGAGGU U AGGUUAAA | 387 | UUUAACCU CUGAUGAG GCCGUUAGGC CGAA ACCUCCUC | 7787 |
| 1757 | AGGAGGUU A GGUUAAAG | 388 | CUUUAACC CUGAUGAG GCCGUUAGGC CGAA AACCUCCU | 7788 |
| 1761 | GGUUAGGU U AAAGGUCU | 389 | AGACCUUU CUGAUGAG GCCGUUAGGC CGAA ACCUAACC | 7789 |
| 1762 | GUUAGGUU A AAGGUCUU | 390 | AAGACCUU CUGAUGAG GCCGUUAGGC CGAA AACCUAAC | 7790 |
| 1768 | UUAAAGGU C UUUGUACU | 391 | AGUACAAA CUGAUGAG GCCGUUAGGC CGAA ACCUUUAA | 7791 |
| 1770 | AAAGGUCU U UGUACUAG | 392 | CUAGUACA CUGAUGAG GCCGUUAGGC CGAA AGACCUUU | 7792 |
| 1771 | AAGGUCUU U GUACUAGG | 393 | CCUAGUAC CUGAUGAG GCCGUUAGGC CGAA AAGACCUU | 7793 |
| 1774 | GUCUUUGU A CUAGGAGG | 394 | CCUCCUAG CUGAUGAG GCCGUUAGGC CGAA ACAAAGAC | 7794 |
| 1777 | UUUGUACU A GGAGGCUG | 395 | CAGCCUCC CUGAUGAG GCCGUUAGGC CGAA AGUACAAA | 7795 |
| 1787 | GAGGCUGU A GGCAUAAA | 396 | UUUAUGCC CUGAUGAG GCCGUUAGGC CGAA ACAGCCUC | 7796 |
| 1793 | GUAGGCAU A AAUUGGUG | 397 | CACCAAUU CUGAUGAG GCCGUUAGGC CGAA AUGCCUAC | 7797 |
| 1797 | GCAUAAAU U GGUGUGUU | 398 | AACACACC CUGAUGAG GCCGUUAGGC CGAA AUUUAUGC | 7798 |
| 1805 | UGGUGUGU U CACCAGCA | 399 | UGCUGGUG CUGAUGAG GCCGUUAGGC CGAA ACACACCA | 7799 |
| 1806 | GGUGUGUU C ACCAGCAC | 400 | GUGCUGGU CUGAUGAG GCCGUUAGGC CGAA AACACACC | 7800 |
| 1824 | AUGCAACU U UUUCACCU | 401 | AGGUGAAA CUGAUGAG GCCGUUAGGC CGAA AGUUGCAU | 7801 |
| 1825 | UGCAACUU U UUCACCUC | 402 | GAGGUGAA CUGAUGAG GCCGUUAGGC CGAA AAGUUGCA | 7802 |
| 1826 | GCAACUUU U UCACCUCU | 403 | AGAGGUGA CUGAUGAG GCCGUuAGGC CGAA AAAGUUGC | 7803 |
| 1827 | CAACUUUU U CACCUCUG | 404 | CAGAGGUG CUGAUGAG GCCGUUAGGC CGAA AAAAGUUG | 7804 |
| 1828 | AACUUUUU C ACCUCUGC | 405 | GCAGAGGU CUGAUGAG GCCGUUAGGC CGAA AAAAAGUU | 7805 |
| 1833 | UUUCACCU C UGCCUAAU | 406 | AUUAGGCA CUGAUGAG GCCGUUAGGC CGAA AGGUGAAA | 7806 |
| 1839 | CUCUGCCU A AUCAUCUC | 407 | GAGAUGAU CUGAUGAG GCCGUUAGGC CGAA AGGCAGAG | 7807 |
| 1842 | UGCCUAAU C AUCUCAUG | 408 | CAUGAGAU CUGAUGAG GCCGUUAGGC CGAA AUUAGGCA | 7808 |
| 1845 | CUAAUCAU C UCAUGUUC | 409 | GAACAUGA CUGAUGAG GCCGUUAGGC CGAA AUGAUUAG | 7809 |
| 1847 | AAUCAUCU C AUGUUCAU | 410 | AUGAACAU CUGAUGAG GCCGUUAGGC CGAA AGAUGAUU | 7810 |
| 1852 | UCUCAUGU U CAUGUCCU | 411 | AGGACAUG CUGAUGAG GCCGUUAGGC CGAA ACAUGAGA | 7811 |
| 1853 | CUCAUGUU C AUGUCCUA | 412 | UAGGACAU CUGAUGAG GCCGUUAGGC CGAA AACAUGAG | 7812 |
| 1858 | GUUCAUGU C CUACUGUU | 413 | AACAGUAG CUGAUGAG GCCGUUAGGC CGAA ACAUGAAC | 7813 |
| 1861 | CAUGUCCU A CUGUUCAA | 414 | UUGAACAG CUGAUGAG GCCGUUAGGC CGAA AGGACAUG | 7814 |
| 1866 | CCUACUGU U CAAGCCUC | 415 | GAGGCUUG CUGAUGAG GCCGUUAGGC CGAA ACAGUAGG | 7815 |
| 1867 | CUACUGUU C AAGCCUCC | 416 | GGAGGCUU CUGAUGAG GCCGUUAGGC CGAA AACAGUAG | 7816 |
| 1874 | UCAAGCCU C CAAGCUGU | 417 | ACAGCUUG CUGAUGAG GCCGUUAGGC CGAA AGGCUUGA | 7817 |
| 1887 | CUGUGCCU U GGGUGGCU | 418 | AGCCACCC CUGAUGAG GCCGUUAGGC CGAA AGGCACAG | 7818 |
| 1896 | GGGUGGCU U UGGGGCAU | 419 | AUGCCCCA CUGAUGAG GCCGUUAGGC CGAA AGCCACCC | 7819 |
| 1897 | GGUGGCUU U GGGGCAUG | 420 | CAUGCCCC CUGAUGAG GCCGUUAGGC CGAA AAGCCACC | 7820 |
| 1911 | AUGGACAU U GACCCGUA | 421 | UACGGGUC CUGAUGAG GCCGUUAGGC CGAA AUGUCCAU | 7821 |
| 1919 | UGACCCGU A UAAAGAAU | 422 | AUUCUUUA CUGAUGAG GCCGUUAGGC CGAA ACGGGUCA | 7822 |
| 1921 | ACCCGUAU A AAGAAUUU | 423 | AAAUUCUU CUGAUGAG GCCGUUAGGC CGAA AUACGGGU | 7823 |
| 1928 | UAAAGAAU U UGGAGCUU | 424 | AAGCUCCA CUGAUGAG GCCGUUAGGC CGAA AUUCUUUA | 7824 |
| 1929 | AAAGAAUU U GGAGCUUC | 425 | GAAGCUCC CUGAUGAG GCCGUUAGGC CGAA AAUUCUUU | 7825 |
| 1936 | UUGGAGCU U CUGUGGAG | 426 | CUCCACAG CUGAUGAG GCCGUUAGGC CGAA AGCUCCAA | 7826 |
| 1937 | UGGAGCUU C UGUGGAGU | 427 | ACUCCACA CUGAUGAG GCCGUUAGGC CGAA AAGCUCCA | 7827 |
| 1946 | UGUGGAGU U ACUCUCUU | 428 | AAGAGAGU CUGAUGAG GCCGUUAGGC CGAA ACUCCACA | 7828 |
| 1947 | GUGGAGUU A CUCUCUUU | 429 | AAAGAGAG CUGAUGAG GCCGUUAGGC CGAA AACUCCAC | 7829 |
| 1950 | GAGUUACU C UCUUUUUU | 430 | AAAAAAGA CUGAUGAG GCCGUUAGGC CGAA AGUAACUC | 7830 |
| 1952 | GUUACUCU C UUUUUUGC | 431 | GCAAAAAA CUGAUGAG GCCGUUAGGC CGAA AGAGUAAC | 7831 |
| 1954 | UACUCUCU U UUUUGCCU | 432 | AGGCAAUU CUGAUGAG GCCGUUAGGC CGAA AGAGAGUA | 7832 |
| 1955 | ACUCUCUU U UUUGCCUU | 433 | AAGGCAAA CUGAUGAG GCCGUUAGGC CGAA AAGAGAGU | 7833 |
| 1956 | CUCUCUUU U UUGCCUUC | 434 | GAAGGCAA CUGAUGAG GCCGUUAGGC CGAA AAAGAGAG | 7834 |
| 1957 | UCUCUUUU U UGCCUUCU | 435 | AGAAGGCA CUGAUGAG GCCGUUAGGC CGAA AAAAGAGA | 7835 |
| 1958 | CUCUUUUU U GCCUUCUG | 436 | CAGAAGGC CUGAUGAG GCCGUUAGGC CGAA AAAAAGAG | 7836 |
| 1963 | UUUUGCCU U CUGACUUC | 437 | GAACUCAG CUGAUGAG GCCGUUAGGC CGAA AGGCAAAA | 7837 |
| 1964 | UUUGCCUU C UGACUUCU | 438 | AGAAGUCA CUGAUGAG GCCGUUAGGC CGAA AAGGCAAA | 7838 |
| 1970 | UUCUGACU U CUUUCCUU | 439 | AAGGAAAG CUGAUGAG GCCGUUAGGC CGAA AGUCAGAA | 7839 |
| 1971 | UCUGACUU C UUUCCUUC | 440 | GAAGGAAA CUGAUGAG GCCGUUAGGC CGAA AAGUCAGA | 7840 |
| 1973 | UGACUUCU U UCCUUCUA | 441 | UAGAAGGA CUGAUGAG GCCGUUAGGC CGAA AGAAGUCA | 7841 |
| 1974 | GACUUCUU U CCUUCUAU | 442 | AUAGAAGG CUGAUGAG GCCGUUAGGC CGAA AAGAAGUC | 7842 |
| 1975 | ACUUCUUU C CUUCUAUU | 443 | AAUAGAAG CUGAUGAG GCCGUUAGGC CGAA AAAGAAGU | 7843 |
| 1978 | UCUUUCCU U CUAUUCGA | 444 | UCGAAUAG CUGAUGAG GCCGUUAGGC CGAA AGGAAAGA | 7844 |
| 1979 | CUUUCCUU C UAUUCGAG | 445 | CUCGAAUA CUGAUGAG GCCGUUAGGC CGAA AAGGAAAG | 7845 |
| 1981 | UUCCUUCU A UUCGAGAU | 446 | AUCUCGAA CUGAUGAG GCCGUUAGGC CGAA AGAAGGAA | 7846 |
| 1983 | CCUUCUAU U CGAGAUCU | 447 | AGAUCUCG CUGAUGAG GCCGUUAGGC CGAA AUAGAAGG | 7847 |
| 1984 | CUUCUAUU C GAGAUCUC | 448 | GAGAUCUC CUGAUGAG GCCGUUAGGC CGAA AAUAGAAG | 7848 |
| 1990 | UUCGAGAU C UCCUCGAC | 449 | GUCGAGGA CUGAUGAG GCCGUUAGGC CGAA AUCUCGAA | 7849 |
| 1992 | CGAGAUCU C CUCGACAC | 450 | GUGUCGAG CUGAUGAG GCCGUUAGGC CGAA AGAUCUCG | 7850 |
| 1995 | GAUCUCCU C GACACCGC | 451 | GCGGUGUC CUGAUGAG GCCGUUAGGC CGAA AGGAGAUC | 7851 |
| 2006 | CACCGCCU C UGCUCUGU | 452 | ACAGAGCA CUGAUGAG GCCGUUAGGC CGAA AGGCGGUG | 7852 |
| 2011 | CCUCUGCU C UGUAUCGG | 453 | CCGAUACA CUGAUGAG GCCGUUAGGC CGAA AGCAGAGG | 7853 |
| 2015 | UGCUCUGU A UCGGGGGG | 454 | CCCCCCGA CUGAUGAG GCCGUUAGGC CGAA ACAGAGCA | 7854 |
| 2017 | CUCUGUAU C GGGGGGCC | 455 | GGCCCCCC CUGAUGAG GCCGUUAGGC CGAA AUACAGAG | 7855 |
| 2027 | GGGGGCCU U AGAGUCUC | 456 | GAGACUCU CUGAUGAG GCCGUUAGGC CGAA AGGCCCCC | 7856 |
| 2028 | GGGGCCUU A GAGUCUCC | 457 | GGAGACUC CUGAUGAG GCCGUUAGGC CGAA AAGGCCCC | 7857 |
| 2033 | CUUAGAGU C UCCGGAAC | 458 | GUUCCGGA CUGAUGAG GCCGUUAGGC CGAA ACUCUAAG | 7858 |
| 2035 | UAGAGUCU C CGGAACAU | 459 | AUGUUCCG CUGAUGAG GCCGUUAGGC CGAA AGACUCUA | 7859 |
| 2044 | CGGAACAU U GUUCACCU | 460 | AGGUGAAC CUGAUGAG GCCGUUAGGC CGAA AUGUUCCG | 7860 |
| 2047 | AACAUUGU U CACCUCAC | 461 | GUGAGGUG CUGAUGAG GCCGUUAGGC CGAA ACAAUGUU | 7861 |
| 2048 | ACAUUGUU C ACCUCACC | 462 | GGUGAGGU CUGAUGAG GCCGUUAGGC CGAA AACAAUGU | 7862 |
| 2053 | GUUCACCU C ACCAUACG | 463 | CGUAUGGU CUGAUGAG GCCGUUAGGC CGAA AGGUGAAC | 7863 |
| 2059 | CUCACCAU A CGGCACUC | 464 | GAGUGCCG CUGAUGAG GCCGUUAGGC CGAA AUGGUGAG | 7864 |
| 2067 | ACGGCACU C AGGCAAGC | 465 | GCUUGCCU CUGAUGAG GCCGUUAGGC CGAA AGUGCCGU | 7865 |
| 2077 | GGCAAGCU A UUCUGUGU | 466 | ACACAGAA CUGAUGAG GCCGUUAGGC CGAA AGCUUGCC | 7866 |
| 2079 | CAAGCUAU U CUGUGUUG | 467 | CAACACAG CUGAUGAG GCCGUUAGGC CGAA AUAGCUUG | 7867 |
| 2080 | AAGCUAUU C UGUGUUGG | 468 | CCAACACA CUGAUGAG GCCGUUAGGC CGAA AAUAGCUU | 7868 |
| 2086 | UUCUGUGU U GGGGUGAG | 469 | CUCACCCC CUGAUGAG GCCGUUAGGC CGAA UCACAGAA | 7869 |
| 2096 | GGGUGAGU U GAUGAAUC | 470 | GAUUCAUC CUGAUGAG GCCGUUAGGC CGAA ACUCACCC | 7870 |
| 2104 | UGAUGAAU C UAGCCACC | 471 | GGUGGCUA CUGAUGAG GCCGUUAGGC CGAA AUUCAUCA | 7871 |
| 2106 | AUGAAUCU A GCCACCUG | 472 | CAGGUGGC CUGAUGAG GCCGUUAGGC CGAA AGAUUCAU | 7872 |
| 2125 | UGGGAAGU A AUUUGGAA | 473 | UUCCAAAU CUGAUGAG GCCGUUAGGC CGAA ACUUCCCA | 7873 |
| 2128 | GAAGUAAU U UGGAAGAU | 474 | AUCUUCCA CUGAUGAG GCCGUUAGGC CGAA AUUACUUC | 7874 |
| 2129 | AAGUAAUU U GGAAGAUC | 475 | GAUCUUCC CUGAUGAG GCCGUUAGGC CGAA AAUUACUU | 7875 |
| 2137 | UGGAAGAU C CAGCAUCC | 476 | GGAUGCUG CUGAUGAG GCCGUUAGGC CGAA AUCUUCCA | 7876 |
| 2144 | UCCAGCAU C CAGGGAAU | 477 | AUUCCCUG CUGAUGAG GCCGUUAGGC CGAA AUGCUGGA | 7877 |
| 2153 | CAGGGAAU U AGUAGUCA | 478 | UGACUACU CUGAUGAG GCCGUUAGGC CGAA AUUCCCUG | 7878 |
| 2154 | AGGGAAUU A GUAGUCAG | 479 | CUGACUAC CUGAUGAG GCCGUUAGGC CGAA AAUUCCCU | 7879 |
| 2157 | GAAUUAGU A GUCAGCUA | 480 | UAGCUGAC CUGAUGAG GCCGUUAGGC CGAA ACUAAUUC | 7880 |
| 2160 | UUAGUAGU C AGCUAUGU | 481 | ACAUAGCU CUGAUGAG GCCGUUAGGC CGAA ACUACUAA | 7881 |
| 2165 | AGUCAGCU A UGUCAACG | 482 | CGUUGACA CUGAUGAG GCCGUUAGGC CGAA AGCUGACU | 7882 |
| 2169 | AGCUAUGU C AACGUUAA | 483 | UUAACGUU CUGAUGAG GCCGUUAGGC CGAA ACAUAGCU | 7883 |
| 2175 | GUCAACGU U AAUAUGGG | 484 | CCCAUAUU CUGAUGAG GCCGUUAGGC CGAA ACGUUGAC | 7884 |
| 2176 | UCAACGUU A AUAUGGGC | 485 | GCCCAUAU CUGAUGAG GCCGUUAGGC CGAA AACGUUGA | 7885 |
| 2179 | ACGUUAAU A UGGGCCUA | 486 | UAGGCCCA CUGAUGAG GCCGUUAGGC CGAA AUUAACGU | 7886 |
| 2187 | AUGGGCCU A AAAAUCAG | 487 | CUGAUUUU CUGAUGAG GCCGUUAGGC CGAA AGGCCCAU | 7887 |
| 2193 | CUAAAAAU C AGACAACU | 488 | AGUUGUCU CUGAUGAG GCCGUUAGGC CGAA AUUUUUAG | 7888 |
| 2202 | AGACAACU A UUGUGGUU | 489 | AACCACAA CUGAUGAG GCCGUUAGGC CGAA AGUUGUCU | 7889 |
| 2204 | ACAACUAU U GUGGUUUC | 490 | GAAACCAC CUGAUGAG GCCGUUAGGC CGAA AUAGUUGU | 7890 |
| 2210 | AUUGUGGU U UCACAUUU | 491 | AAAUGUGA CUGAUGAG GCCGUUAGGC CGAA ACCACAAU | 7891 |
| 2211 | UUGUGGUU U CACAUUUC | 492 | GAAAUGUG CUGAUGAG GCCGUUAGGC CGAA AACCACAA | 7892 |
| 2212 | UGUGGUUU C ACAUUUCC | 493 | GGAAAUGU CUGAUGAG GCCGUUAGGC CGAA AAACCACA | 7893 |
| 2217 | UUUCACAU U UCCUGUCU | 494 | AGACAGGA CUGAUGAG GCCGUUAGGC CGAA AUGUGAAA | 7894 |
| 2218 | UUCACAUU U CCUGUCUU | 495 | AAGACAGG CUGAUGAG GCCGUUAGGC CGAA AAUGUGAA | 7895 |
| 2219 | UCACAUUU C CUGUCUUA | 496 | UAAGACAG CUGAUGAG GCCGUUAGGC CGAA AAAUGUGA | 7896 |
| 2224 | UUUCCUGU C UUACUUUU | 497 | AAAGUAAU CUGAUGAG GCCGUUAGGC CGAA ACAGGAAA | 7897 |
| 2226 | UCCUGUCU U ACUUUUGG | 498 | CCAAAAGU CUGAUGAG GCCGUUAGGC CGAA AGACAGGA | 7898 |
| 2227 | CCUGUCUU A CUUUUGGG | 499 | CCCAAAAG CUGAUGAG GCCGUUAGGC CGAA AAGACAGG | 7899 |
| 2230 | GUCUUACU U UUGGGCGA | 500 | UCGCCCAA CUGAUGAG GCCGUUAGGC CGAA AGUAAGAC | 7900 |
| 2231 | UCUUACUU U UGGGCGAG | 501 | CUCGCCCA CUGAUGAG GCCGUUAGGC CGAA AAGUAAGA | 7901 |
| 2232 | CUUACUUU U GGGCGAGA | 502 | UCUCGCCC CUGAUGAG GCCGUUAGGC CGAA AAAGUAAG | 7902 |
| 2247 | GAAACUGU U CUUGAAUA | 503 | UAUUCAAG CUGAUGAG GCCGUUAGGC CGAA ACAGUUUC | 7903 |
| 2248 | AAACUGUU C UUGAAUAU | 504 | AUAUUCAA CUGAUGAG GCCGUUAGGC CGAA AACAGUUU | 7904 |
| 2250 | ACUGUUCU U GAAUAUUU | 505 | AAAUAUUC CUGAUGAG GCCGUUAGGC CGAA AGAACAGU | 7905 |
| 2255 | UCUUGAAU A UUUGGUGU | 506 | ACACCAAA CUGAUGAG GCCGUUAGGC CGAA AUUCAAGA | 7906 |
| 2257 | UUGAAUAU U UGGUGUCU | 507 | AGACACCA CUGAUGAG GCCGUUAGGC CGAA AUAUUCAA | 7907 |
| 2258 | UGAAUAUU U GGUGUCUU | 508 | AAGACACC CUGAUGAG GCCGUUAGGC CGAA AAUAUUCA | 7908 |
| 2264 | UUUGGUGU C UUUUGGAG | 509 | CUCCAAAA CUGAUGAG GCCGUUAGGC CGAA ACACCAAA | 7909 |
| 2266 | UGGUGUCU U UUGGAGUG | 510 | CACUCCAA CUGAUGAG GCCGUUAGGC CGAA AGACACCA | 7910 |
| 2267 | GGUGUCUU U UGGAGUGU | 511 | ACACUCCA CUGAUGAG GCCGUUAGGC CGAA AAGACACC | 7911 |
| 2268 | GUGUCUUU U GGAGUGUG | 512 | CACACUCC CUGAUGAG GCCGUUAGGC CGAA AAAGACAC | 7912 |
| 2280 | GUGUGGAU U CGCACUCC | 513 | GGAGUGCG CUGAUGAG GCCGUUAGGC CGAA AUCCACAC | 7913 |
| 2281 | UGUGGAUU C GCACUCCU | 514 | AGGAGUGC CUGAUGAG GCCGUUAGGC CGAA AAUCCACA | 7914 |
| 2287 | UUCGCACU C CUCCUGCA | 515 | UCCAGGAG CUGAUGAG GCCGUUAGGC CGAA AGUGCGAA | 7915 |
| 2290 | GCACUCCU C CUGCAUAU | 516 | AUAUGCAG CUGAUGAG GCCGUUAGGC CGAA AGGAGUGC | 7916 |
| 2297 | UCCUGCAU A UAGACCAC | 517 | GUGGUCUA CUGAUGAG GCCGUUAGGC CGAA AUGCAGGA | 7917 |
| 2299 | CUGCAUAU A GACCACCA | 518 | UGGUGGUC CUGAUGAG GCCGUUAGGC CGAA AUAUGCAG | 7918 |
| 2317 | AUGCCCCU A UCUUAUCA | 519 | UGAUAAGA CUGAUGAG GCCGUUAGGC CGAA AGGGGCAU | 7919 |
| 2319 | GCCCCUAU C UUAUCAAC | 520 | GUUGAUAA CUGAUGAG GCCGUUAGGC CGAA AUAGGGGC | 7920 |
| 2321 | CCCUAUCU U AUCAACAC | 521 | GUGUUGAU CUGAUGAG GCCGUUAGGC CGAA AGAUAGGG | 7921 |
| 2322 | CCUAUCUU A UCAACACU | 522 | AGUGUUGA CUGAUGAG GCCGUUAGGC CGAA AAGAUAGG | 7922 |
| 2324 | UAUCUUAU C AACACUUC | 523 | GAAGUGUU CUGAUGAG GCCGUUAGGC CGAA AUAAGAUA | 7923 |
| 2331 | UCAACACU U CCGGAAAC | 524 | GUUUCCGG CUGAUGAG GCCGUUAGGC CGAA AGUGUUGA | 7924 |
| 2332 | CAACACUU C CGGAAACU | 525 | AGUUUCCG CUGAUGAG GCCGUUAGGC CGAA AAGUGUUG | 7925 |
| 2341 | CGGAAACU A CUGUUGUU | 526 | AACAACAG CUGAUGAG GCCGUUAGGC CGAA AGUUUCCG | 7926 |
| 2346 | ACUACUGU U GUUAGACG | 527 | CGUCUAAC CUGAUGAG GCCGUUAGGC CGAA ACAGUAGU | 7927 |
| 2349 | ACUGUUGU U AGACGAAG | 528 | CUUCGUCU CUGAUGAG GCCGUUAGGC CGAA ACAACAGU | 7928 |
| 2350 | CUGUUGUU A GACGAAGA | 529 | UCUUCGUC CUGAUGAG GCCGUUAGGC CGAA AACAACAG | 7929 |
| 2366 | AGGCAGGU C CCCUAGAA | 530 | UUCUAGGG CUGAUGAG GCCGUUAGGC CGAA ACCUGCCU | 7930 |
| 2371 | GGUCCCCU A GAAGAAGA | 531 | UCUUCUUC CUGAUGAG GCCGUUAGGC CGAA AGGGGACC | 7931 |
| 2383 | GAAGAACU C CCUCGCCU | 532 | AGGCGAGG CUGAUGAG GCCGUUAGGC CGAA AGUUCUUC | 7932 |
| 2387 | AACUCCCU C GCCUCGCA | 533 | UGCGAGGC CUGAUGAG GCCGUUAGGC CGAA AGGGAGUU | 7933 |
| 2392 | CCUCGCCU C GCAGACGA | 534 | UCGUCUGC CUGAUGAG GCCGUUAGGC CGAA AGGCGAGG | 7934 |
| 2405 | ACGAAGGU C UCAAUCGC | 535 | GCGAUUGA CUGAUGAG GCCGUUAGGC CGAA ACCUUCGU | 7935 |
| 2407 | GAAGGUCU C AAUCGCCG | 536 | CGGCGAUU CUGAUGAG GCCGUUAGGC CGAA AGACCUUC | 7936 |
| 2411 | GUCUCAAU C GCCGCGUC | 537 | GACGCGGC CUGAUGAG GCCGUUAGGC CGAA AUUGAGAC | 7937 |
| 2419 | CGCCGCGU C GCAGAAGA | 538 | UCUUCUGC CUGAUGAG GCCGUUAGGC CGAA ACGCGGCG | 7938 |
| 2429 | CAGAAGAU C UCAAUCUC | 539 | GAGAUUGA CUGAUGAG GCCGUUAGGC CGAA AUCUUCUG | 7939 |
| 2431 | GAAGAUCU C AAUCUCGG | 540 | CCGAGAUU CUGAUGAG GCCGUUAGGC CGAA AGAUCUUC | 7940 |
| 2435 | AUCUCAAU C UCGGGAAU | 541 | AUUCCCGA CUGAUGAG GCCGUUAGGC CGAA AUUGAGAU | 7941 |
| 2437 | CUCAAUCU C GGGAAUCU | 542 | AGAUUCCC CUGAUGAG GCCGUUAGGC CGAA AGAUUGAG | 7942 |
| 2444 | UCGGGAAU C UCAAUGUU | 543 | AACAUUGA CUGAUGAG GCCGUUAGGC CGAA AUUCCCGA | 7943 |
| 2446 | GGGAAUCU C AAUGUUAG | 544 | CUAACAUU CUGAUGAG GCCGUUAGGC CGAA AGAUUCCC | 7944 |
| 2452 | CUCAAUGU U AGUAUUCC | 545 | GGAAUACU CUGAUGAG GCCGUUAGGC CGAA ACAUUGAG | 7945 |
| 2453 | UCAAUGUU A GUAUUCCU | 546 | AGGAAUAC CUGAUGAG GCCGUUAGGC CGAA AACAUUGA | 7946 |
| 2456 | AUGUUAGU A UUCCUUGG | 547 | CCAAGGAA CUGAUGAG GCCGUUAGGC CGAA ACUAACAU | 7947 |
| 2458 | GUUAGUAU U CCUUGGAC | 548 | GUCCAAGG CUGAUGAG GCCGUUAGGC CGAA AUACUAAC | 7948 |
| 2459 | UUAGUAUU C CUUGGACA | 549 | UGUCCAAG CUGAUGAG GCCGUUAGGC CGAA AAUACUAA | 7949 |
| 2462 | GUAUUCCU U GGACACAU | 550 | AUGUGUCC CUGAUGAG GCCGUUAGGC CGAA AGGAAUAC | 7950 |
| 2471 | GGACACAU A AGGUGGGA | 551 | UCCCACCU CUGAUGAG GCCGUUAGGC CGAA AUGUGUCC | 7951 |
| 2484 | GGGAAACU U UACGGGGC | 552 | GCCCCGUA CUGAUGAG GCCGUUAGGC CGAA AGUUUCCC | 7952 |
| 2485 | GGAAACUU U ACGGGGCU | 553 | AGCCCCGU CUGAUGAG GCCGUUAGGC CGAA AAGUUUCC | 7953 |
| 2486 | GAAACUUU A CGGGGCUU | 554 | AAGCCCCG CUGAUGAG GCCGUUAGGC CGAA AAAGUUUC | 7954 |
| 2494 | ACGGGGCU U UAUUCUUC | 555 | GAAGAAUA CUGAUGAG GCCGUUAGGC CGAA AGCCCCGU | 7955 |
| 2495 | CGGGGCUU U AUUCUUCU | 556 | AGAAGAAU CUGAUGAG GCCGUUAGGC CGAA AAGCCCCG | 7956 |
| 2496 | GGGGCUUU A UUCUUCUA | 557 | UAGAAGAA CUGAUGAG GCCGUUAGGC CGAA AAAGCCCC | 7957 |
| 2498 | GGCUUUAU U CUUCUACG | 558 | CGUAGAAG CUGAUGAG GCCGUUAGGC CGAA AUAAAGCC | 7958 |
| 2499 | GCUUUAUU C UUCUACGG | 559 | CCGUAGAA CUGAUGAG GCCGUUAGGC CGAA AAUAAAGC | 7959 |
| 2501 | UUUAUUCU U CUACGGUA | 560 | UACCGUAG CUGAUGAG GCCGUUAGGC CGAA AGAAUAAA | 7960 |
| 2502 | UUAUUCUU C UACGGUAC | 561 | GUACCGUA CUGAUGAG GCCGUUAGGC CGAA AAGAAUAA | 7961 |
| 2504 | AUUCUUCU A CGGUACCU | 562 | AGGUACCG CUGAUGAG GCCGUUAGGC CGAA AGAAGAAU | 7962 |
| 2509 | UCUACGGU A CCUUGCUU | 563 | AAGCAAGG CUGAUGAG GCCGUUAGGC CGAA ACCGUAGA | 7963 |
| 2513 | CGGUACCU U GCUUUAAU | 564 | AUUAAAGC CUGAUGAG GCCGUUAGGC CGAA AGGUACCG | 7964 |
| 2517 | ACCUUGCU U UAAUCCUA | 565 | UAGGAUUA CUGAUGAG GCCGUUAGGC CGAA AGCAAGGU | 7965 |
| 2518 | CCUUGCUU U AAUCCUAA | 566 | UUAGGAUU CUGAUGAG GCCGUUAGGC CGAA AAGCAAGG | 7966 |
| 2519 | CUUGCUUU A AUCCUAAA | 567 | UUUAGGAU CUGAUGAG GCCGUUAGGC CGAA AAAGCAAG | 7967 |
| 2522 | GCUUUAAU C CUAAAUGG | 568 | CCAUUUAG CUGAUGAG GCCGUUAGGC CGAA AUUAAAGC | 7968 |
| 2525 | UUAAUCCU A AAUGGCAA | 569 | UUGCCAUU CUGAUGAG GCCGUUAGGC CGAA AGGAUUAA | 7969 |
| 2537 | GGCAAACU C CUUCUUUU | 570 | AAAAGAAG CUGAUGAG GCCGUUAGGC CGAA AGUUUGCC | 7970 |
| 2540 | AAACUCCU U CUUUUCCU | 571 | AGGAAAAG CUGAUGAG GCCGUUAGGC CGAA AGGAGUUU | 7971 |
| 2541 | AACUCCUU C UUUUCCUG | 572 | CAGGAAAA CUGAUGAG GCCGUUAGGC CGAA AAGGAGUU | 7972 |
| 2543 | CUCCUUCU U UUCCUGAC | 573 | GUCAGGAA CUGAUGAG GCCGUUAGGC CGAA AGAAGGAG | 7973 |
| 2544 | UCCUUCUU U UCCUGACA | 574 | UGUCAGGA CUGAUGAG GCCGUUAGGC CGAA AAGAAGGA | 7974 |
| 2545 | CCUUCUUU U CCUGACAU | 575 | AUGUCAGG CUGAUGAG GCCGUUAGGC CGAA AAAGAAGG | 7975 |
| 2546 | CUUCUUUU C CUGACAUU | 576 | AAUGUCAG CUGAUGAG GCCGUUAGGC CGAA AAAAGAAG | 7976 |
| 2554 | CCUGACAU U CAUUUGCA | 577 | UGCAAAUG CUGAUGAG GCCGUUAGGC CGAA AUGUCAGG | 7977 |
| 2555 | CUGACAUU C AUUUGCAG | 578 | CUGCAAAU CUGAUGAG GCCGUUAGGC CGAA AAUGUCAG | 7978 |
| 2558 | ACAUUCAU U UGCAGGAG | 579 | CUCCUGCA CUGAUGAG GCCGUUAGGC CGAA AUGAAUGU | 7979 |
| 2559 | CAUUCAUU U GCAGGAGG | 580 | CCUCCUGC CUGAUGAG GCCGUUAGGC CGAA AAUGAAUG | 7980 |
| 2572 | GAGGACAU U GUUGAUAG | 581 | CUAUCAAC CUGAUGAG GCCGUUAGGC CGAA AUGUCCUC | 7981 |
| 2575 | GACAUUGU U GAUAGAUG | 582 | CAUCUAUC CUGAUGAG GCCGUUAGGC CGAA ACAAUGUC | 7982 |
| 2579 | UUGUUGAU A GAUGUAAG | 583 | CUUACAUC CUGAUGAG GCCGUUAGGC CGAA AUCAACAA | 7983 |
| 2585 | AUAGAUGU A AGCAAUUU | 584 | AAAUUGCU CUGAUGAG GCCGUUAGGC CGAA ACAUCUAU | 7984 |
| 2592 | UAAGCAAU U UGUGGGGC | 585 | GCCCCACA CUGAUGAG GCCGUUAGGC CGAA AUUGCUUA | 7985 |
| 2593 | AAGCAAUU U GUGGGGCC | 586 | GGCCCCAC CUGAUGAG GCCGUUAGGC CGAA AAUUGCUU | 7986 |
| 2605 | GGGCCCCU U ACAGUAAA | 587 | UUUACUGU CUGAUGAG GCCGUUAGGC CGAA AGGGGCCC | 7987 |
| 2606 | GGCCCCUU A CAGUAAAU | 588 | AUUUACUG CUGAUGAG GCCGUUAGGC CGAA AAGGGGCC | 7988 |
| 2611 | CUUACAGU A AAUGAAAA | 589 | UUUUCAUU CUGAUGAG GCCGUUAGGC CGAA ACUGUAAG | 7989 |
| 2629 | AGGAGACU U AAAUUAAC | 590 | GUUAAUUU CUGAUGAG GCCGUUAGGC CGAA AGUCUCCU | 7990 |
| 2630 | GGAGACUU A AAUUAACU | 591 | AGUUAAUU CUGAUGAG GCCGUUAGGC CGAA AAGUCUCC | 7991 |
| 2634 | ACUUAAAU U AACUAUGC | 592 | GCAUAGUU CUGAUGAG GCCGUUAGGC CGAA AUUUAAGU | 7992 |
| 2635 | CUUAAAUU A ACUAUGCC | 593 | GGCAUAGU CUGAUGAG GCCGUUAGGC CGAA AAUUUAAG | 7993 |
| 2639 | AAUUAACU A UGCCUGCU | 594 | AGCAGGCA CUGAUGAG GCCGUUAGGC CGAA AGUUAAUU | 7994 |
| 2648 | UGCCUGCU A GGUUUUAU | 595 | AUAAAACC CUGAUGAG GCCGUUAGGC CGAA AGCAGGCA | 7995 |
| 2652 | UGCUAGGU U UUAUCCCA | 596 | UGGGAUAA CUGAUGAG GCCGUUAGGC CGAA ACCUAGCA | 7996 |
| 2653 | GCUAGGUU U UAUCCCAA | 597 | UUGGGAUA CUGAUGAG GCCGUUAGGC CGAA AACCUAGC | 7997 |
| 2654 | CUAGGUUU U AUCCCAAU | 598 | AUUGGGAU CUGAUGAG GCCGUUAGGC CGAA AAACCUAG | 7998 |
| 2655 | UAGGUUUU A UCCCAAUG | 599 | CAUUGGGA CUGAUGAG GCCGUUAGGC CGAA AAAACCUA | 7999 |
| 2657 | GGUUUUAU C CCAAUGUU | 600 | AACAUUGG CUGAUGAG GCCGUUAGGC CGAA AUAAAACC | 8000 |
| 2665 | CCCAAUGU U ACUAAAUA | 601 | UAUUUAGU CUGAUGAG GCCGUUAGGC CGAA ACAUUGGG | 8001 |
| 2666 | CCAAUGUU A CUAAAUAU | 602 | AUAUUUAG CUGAUGAG GCCGUUAGGC CGAA AACAUUGG | 8002 |
| 2669 | AUGUUACU A AAUAUUUG | 603 | CAAAUAUU CUGAUGAG GCCGUUAGGC CGAA AGUAACAU | 8003 |
| 2673 | UACUAAAU A UUUGCCCU | 604 | AGGGCAAA CUGAUGAG GCCGUUAGGC CGAA AUUUAGUA | 8004 |
| 2675 | CUAAAUAU U UGCCCUUA | 605 | UAAGGGCA CUGAUGAG GCCGUUAGGC CGAA AUAUUUAG | 8005 |
| 2676 | UAAAUAUU U GCCCUUAG | 606 | CUAAGGGC CUGAUGAG GCCGUUAGGC CGAA AAUAUUUA | 8006 |
| 2682 | UUUGCCCU U AGAUAAAG | 607 | CUUUAUCU CUGAUGAG GCCGUUAGGC CGAA AGGGCAAA | 8007 |
| 2683 | UUGCCCUU A GAUAAAGG | 608 | CCUUUAUC CUGAUGAG GCCGUUAGGC CGAA AAGGGCAA | 8008 |
| 2687 | CCUUAGAU A AAGGGAUC | 609 | GAUCCCUU CUGAUGAG GCCGUUAGGC CGAA AUCUAAGG | 8009 |
| 2695 | AAAGGGAU C AAACCGUA | 610 | UACGGUUU CUGAUGAG GCCGUUAGGC CGAA AUCCCUUU | 8010 |
| 2703 | CAAACCGU A UUAUCCAG | 611 | CUGGAUAA CUGAUGAG GCCGUUAGGC CGAA ACGGUUUG | 8011 |
| 2705 | AACCGUAU U AUCCAGAG | 612 | CUCUGGAU CUGAUGAG GCCGUUAGGC CGAA AUACGGUU | 8012 |
| 2706 | ACCGUAUU A UCCAGAGU | 613 | ACUCUGGA CUGAUGAG GCCGUUAGGC CGAA AAUACGGU | 8013 |
| 2708 | CGUAUUAU C CAGAGUAU | 614 | AUACUCUG CUGAUGAG GCCGUUAGGC CGAA AUAAUACG | 8014 |
| 2715 | UCCAGAGU A UGUAGUUA | 615 | UAACUACA CUGAUGAG GCCGUUAGGC CGAA ACUCUGGA | 8015 |
| 2719 | GAGUAUGU A GUUAAUCA | 616 | UGAUUAAC CUGAUGAG GCCGUUAGGC CGAA ACAUACUC | 8016 |
| 2722 | UAUGUAGU U AAUCAUUA | 617 | UAAUGAUU CUGAUGAG GCCGUUAGGC CGAA ACUACAUA | 8017 |
| 2723 | AUGUAGUU A AUCAUUAC | 618 | GUAAUGAU CUGAUGAG GCCGUUAGGC CGAA AACUACAU | 8018 |
| 2726 | UAGUUAAU C AUUACUUC | 619 | GAAGUAAU CUGAUGAG GCCGUUAGGC CGAA AUUAACUA | 8019 |
| 2729 | UUAAUCAU U ACUUCCAG | 620 | CUGGAAGU CUGAUGAG GCCGUUAGGC CGAA AUGAUUAA | 8020 |
| 2730 | UAAUCAUU A CUUCCAGA | 621 | UCUGGAAG CUGAUGAG GCCGUUAGGC CGAA AAUGAUUA | 8021 |
| 2733 | UCAUUACU U CCAGACGC | 622 | GCGUCUGG CUGAUGAG GCCGUUAGGC CGAA AGUAAUGA | 8022 |
| 2734 | CAUUACUU C CAGACGCG | 623 | CGCGUCUG CUGAUGAG GCCGUUAGGC CGAA AAGUAAUG | 8023 |
| 2747 | CGCGACAU U AUUUACAC | 624 | GUGUAAAU CUGAUGAG GCCGUUAGGC CGAA AUGUCGCG | 8024 |
| 2748 | GCGACAUU A UUUACACA | 625 | UGUGUAAA CUGAUGAG GCCGUUAGGC CGAA AAUGUCGC | 8025 |
| 2750 | GACAUUAU U UACACACU | 626 | AGUGUGUA CUGAUGAG GCCGUUAGGC CGAA AUAAUGUC | 8026 |
| 2751 | ACAUUAUU U ACACACUC | 627 | GAGUGUGU CUGAUGAG GCCGUUAGGC CGAA AAUAAUGU | 8027 |
| 2752 | CAUUAUUU A CACACUCU | 628 | AGAGUGUG CUGAUGAG GCCGUUAGGC CGAA AAAUAAUG | 8028 |
| 2759 | UACACACU C UUUGGAAG | 629 | CUUCCAAA CUGAUGAG GCCGUUAGGC CGAA AGUGUGUA | 8029 |
| 2761 | CACACUCU U UGGAAGGC | 630 | GCCUUCCA CUGAUGAG GCCGUUAGGC CGAA AGAGUGUG | 8030 |
| 2762 | ACACUCUU U GGAAGGCG | 631 | CGCCUUCC CUGAUGAG GCCGUUAGGC CGAA AAGAGUGU | 8031 |
| 2776 | GCGGGGAU C UUAUAUAA | 632 | UUAUAUAA CUGAUGAG GCCGUUAGGC CGAA AUCCCCGC | 8032 |
| 2778 | GGGGAUCU U AUAUAAAA | 633 | UUUUAUAU CUGAUGAG GCCGUUAGGC CGAA AGAUCCCC | 8033 |
| 2779 | GGGAUCUU A UAUAAAAG | 634 | CUUUUAUA CUGAUGAG GCCGUUAGGC CGAA AAGAUCCC | 8034 |
| 2781 | GAUCUUAU A UAAAAGAG | 635 | CUCUUUUA CUGAUGAG GCCGUUAGGC CGAA AUAAGAUC | 8035 |
| 2783 | UCUUAUAU A AAAGAGAG | 636 | CUCUCUUU CUGAUGAG GCCGUUAGGC CGAA AUAUAAGA | 8036 |
| 2793 | AAGAGAGU C CACACGUA | 637 | UACGUGUG CUGAUGAG GCCGUUAGGC CGAA ACUCUCUU | 8037 |
| 2801 | CCACACGU A GCGCCUCA | 638 | UGAGGCGC CUGAUGAG GCCGUUAGGC CGAA ACGUGUGG | 8038 |
| 2808 | UAGCGCCU C AUUUUGCG | 639 | CGCAAAAU CUGAUGAG GCCGUUAGGC CGAA AGGCGCUA | 8039 |
| 2811 | CGCCUCAU U UUGCGGGU | 640 | ACCCGCAA CUGAUGAG GCCGUUAGGC CGAA AUGAGGCG | 8040 |
| 2812 | GCCUCAUU U UGCGGGUC | 641 | GACCCGCA CUGAUGAG GCCGUUAGGC CGAA AAUGAGGC | 8041 |
| 2813 | CCUCAUUU U GCGGGUCA | 642 | UGACCCGC CUGAUGAG GCCGUUAGGC CGAA AAAUGAGG | 8042 |
| 2820 | UUGCGGGU C ACCAUAUU | 643 | AAUAUGGU CUGAUGAG GCCGUUAGGC CGAA ACCCGCAA | 8043 |
| 2826 | GUCACCAU A UUCUUGGG | 644 | CCCAAGAA CUGAUGAG GCCGUUAGGC CGAA AUGGUGAC | 8044 |
| 2828 | CACCAUAU U CUUGGGAA | 645 | UUCCCAAG CUGAUGAG GCCGUUAGGC CGAA AUAUGGUG | 8045 |
| 2829 | ACCAUAUU C UUGGGAAC | 646 | GUUCCCAA CUGAUGAG GCCGUUAGGC CGAA AAUAUGGU | 8046 |
| 2831 | CAUAUUCU U GGGAACAA | 647 | UUGUUCCC CUGAUGAG GCCGUUAGGC CGAA AGAAUAUG | 8047 |
| 2843 | AACAAGAU C UACAGCAU | 648 | AUGCUGUA CUGAUGAG GCCGUUAGGC CGAA AUCUUGUU | 8048 |
| 2845 | CAAGAUCU A CAGCAUGG | 649 | CCAUGCUG CUGAUGAG GCCGUUAGGC CGAA AGAUCUUG | 8049 |
| 2859 | UGGGAGGU U GGUCUUCC | 650 | GGAAGACC CUGAUGAG GCCGUUAGGC CGAA ACCUCCCA | 8050 |
| 2863 | AGGUUGGU C UUCCAAAC | 651 | GUUUGGAA CUGAUGAG GCCGUUAGGC CGAA ACCAACCU | 8051 |
| 2865 | GUUGGUCU U CCAAACCU | 652 | AGGUUUGG CUGAUGAG GCCGUUAGGC CGAA AGACCAAC | 8052 |
| 2866 | UUGGUCUU C CAAACCUC | 653 | GAGGUUUG CUGAUGAG GCCGUUAGGC CGAA AAGACCAA | 8053 |
| 2874 | CCAAACCU C GAAAAGGC | 654 | GCCUUUUC CUGAUGAG GCCGUUAGGC CGAA AGGUUUGG | 8054 |
| 2895 | GGACAAAU C UUUCUGUC | 655 | GACAGAAA CUGAUGAG GCCGUUAGGC CGAA AUUUGUCC | 8055 |
| 2897 | ACAAAUCU U UCUGUCCC | 656 | GGGACAGA CUGAUGAG GCCGUUAGGC CGAA AGAUUUGU | 8056 |
| 2898 | CAAAUCUU U CUGUCCCC | 657 | GGGGACAG CUGAUGAG GCCGUUAGGC CGAA AAGAUUUG | 8057 |
| 2899 | AAAUCUUU C UGUCCCCA | 658 | UGGGGACA CUGAUGAG GCCGUUAGGC CGAA AAAGAUUU | 8058 |
| 2903 | CUUUCUGU C CCCAAUCC | 659 | GGAUUGGG CUGAUGAG GCCGUUAGGC CGAA ACAGAAAG | 8059 |
| 2910 | UCCCCAAU C CCCUGGGA | 660 | UCCCAGGG CUGAUGAG GCCGUUAGGC CGAA AUUGGGGA | 8060 |
| 2920 | CCUGGGAU U CUUCCCCG | 661 | CGGGGAAG CUGAUGAG GCCGUUAGGC CGAA AUCCCAGG | 8061 |
| 2921 | CUGGGAUU C UUCCCCGA | 662 | UCGGGGAA CUGAUGAG GCCGUUAGGC CGAA AAUCCCAG | 8062 |
| 2923 | GGGAUUCU U CCCCGAUC | 663 | GAUCGGGG CUGAUGAG GCCGUUAGGC CGAA AGAAUCCC | 8063 |
| 2924 | GGAUUCUU C CCCGAUCA | 664 | UGAUCGGG CUGAUGAG GCCGUUAGGC CGAA AAGAAUCC | 8064 |
| 2931 | UCCCCGAU C AUCAGUUG | 665 | CAACUGAU CUGAUGAG GCCGUUAGGC CGAA AUCGGGGA | 8065 |
| 2934 | CCGAUCAU C AGUUGGAC | 666 | GUCCAACU CUGAUGAG GCCGUUAGGC CGAA AUGAUCGG | 8066 |
| 2938 | UCAUCAGU U GGACCCUG | 667 | CAGGGUCC CUGAUGAG GCCGUUAGGC CGAA ACUGAUGA | 8067 |
| 2950 | CCCUGCAU U CAAAGCCA | 668 | UGGCUUUG CUGAUGAG GCCGUUAGGC CGAA AUGCAGGG | 8068 |
| 2951 | CCUGCAUU C AAAGCCAA | 669 | UUGGCUUU CUGAUGAG GCCGUUAGGC CGAA AAUGCAGG | 8069 |
| 2962 | AGCCAACU C AGUAAAUC | 670 | GAUUUACU CUGAUGAG GCCGUUAGGC CGAA AGUUGGCU | 8070 |
| 2966 | AACUCAGU A AAUCCAGA | 671 | UCUGGAUU CUGAUGAG GCCGUUAGGC CGAA ACUGAGUU | 8071 |
| 2970 | CAGUAAAU C CAGAUUGG | 672 | CCAAUCUG CUGAUGAG GCCGUUAGGC CGAA AUUUACUG | 8072 |
| 2976 | AUCCAGAU U GGGACCUC | 673 | GAGGUCCC CUGAUGAG GCCGUUAGGC CGAA AUCUGGAU | 8073 |
| 2984 | UGGGACCU C AACCCGCA | 674 | UGCGGGUU CUGAUGAG GCCGUUAGGC CGAA AGGUCCCA | 8074 |
| 3037 | GGGAGCAU U CGGGCCAG | 675 | CUGGCCCG CUGAUGAG GCCGUUAGGC CGAA AUGCUCCC | 8075 |
| 3038 | GGAGCAUU C GGGCCAGG | 676 | CCUGGCCC CUGAUGAG GCCGUUAGGC CGAA AAUGCUCC | 8076 |
| 3049 | GCCAGGGU U CACCCCUC | 677 | GAGGGGUG CUGAUGAG GCCGUUAGGC CGAA ACCCUGGC | 8077 |
| 3050 | CCAGGGUU C ACCCCUCC | 678 | GGAGGGGU CUGAUGAG GCCGUUAGGC CGAA AACCCUGG | 8078 |
| 3057 | UCACCCCU C CCCAUGGG | 679 | CCCAUGGG CUGAUGAG GCCGUUAGGC CGAA AGGGGUGA | 8079 |
| 3073 | GGGACUGU U GGGGUGGA | 680 | UCCACCCC CUGAUGAG GCCGUUAGGC CGAA ACAGUCCC | 8080 |
| 3087 | GGAGCCCU C ACGCUCAG | 681 | CUGAGCGU CUGAUGAG GCCGUUAGGC CGAA AGGGCUCC | 8081 |
| 3093 | CUCACGCU C AGGGCCUA | 682 | UAGGCCCU CUGAUGAG GCCGUUAGGC CGAA AGCGUGAG | 8082 |
| 3101 | CAGGGCCU A CUCACAAC | 683 | GUUGUGAG CUGAUGAG GCCGUUAGGC CGAA AGGCCCUG | 8083 |
| 3104 | GGCCUACU C ACAACUGU | 684 | ACAGUUGU CUGAUGAG GCCGUUAGGC CGAA AGUAGGCC | 8084 |
| 3123 | CAGCAGCU C CUCCUCCU | 685 | AGGAGGAG CUGAUGAG GCCGUUAGGC CGAA AGCUGCUG | 8085 |
| 3126 | CAGCUCCU C CUCCUGCC | 686 | GGCAGGAG CUGAUGAG GCCGUUAGGC CGAA AGGAGCUG | 8086 |
| 3129 | CUCCUCCU C CUGCCUCC | 687 | GGAGGCAG CUGAUGAG GCCGUUAGGC CGAA AGGAGGAG | 8087 |
| 3136 | UCCUGCCU C CACCAAUC | 688 | GAUUGGUG CUGAUGAG GCCGUUAGGC CGAA AGGCAGGA | 8088 |
| 3144 | CCACCAAU C GGCAGUCA | 689 | UGACUGCC CUGAUGAG GCCGUUAGGC CGAA AUUGGUGG | 8089 |
| 3151 | UCGGCAGU C AGGAAGGC | 690 | GCCUUCCU CUGAUGAG GCCGUUAGGC CGAA ACUGCCGA | 8090 |
| 3165 | GGCAGCCU A CUCCCUUA | 691 | UAAGGGAG CUGAUGAG GCCGUUAGGC CGAA AGGCUGCC | 8091 |
| 3168 | AGCCUACU C CCUUAUCU | 692 | AGAUAAGG CUGAUGAG GCCGUUAGGC CGAA AGUAGGCU | 8092 |
| 3172 | UACUCCCU U AUCUCCAC | 693 | GUGGAGAU CUGAUGAG GCCGUUAGGC CGAA AGGGAGUA | 8093 |
| 3173 | ACUCCCUU A UCUCCACC | 694 | GGUGGAGA CUGAUGAG GCCGUUAGGC CGAA AAGGGAGU | 8094 |
| 3175 | UCCCUUAU C UCCACCUC | 695 | GAGGUGGA CUGAUGAG GCCGUUAGGC CGAA AUAAGGGA | 8095 |
| 3177 | CCUUAUCU C CACCUCUA | 696 | UAGAGGUG CUGAUGAG GCCGUUAGGC CGAA AGAUAAGG | 8096 |
| 3183 | CUCCACCU C UAAGGGAC | 697 | GUCCCUUA CUGAUGAG GCCGUUAGGC CGAA AGGUGGAG | 8097 |
| 3185 | CCACCUCU A AGGGACAC | 698 | GUGUCCCU CUGAUGAG GCCGUUAGGC CGAA AGAGGUGG | 8098 |
| 3195 | GGGACACU C AUCCUCAG | 699 | CUGAGGAU CUGAUGAG GCCGUUAGGC CGAA AGUGUCCC | 8099 |
| 3198 | ACACUCAU C CUCAGGCC | 700 | GGCCUGAG CUGAUGAG GCCGUUAGGC CGAA AUGAGUGU | 8100 |
| 3201 | CUCAUCCU C AGGCCAUG | 701 | CAUGGCCU CUGAUGAG GCCGUUAGGC CGAA AGGAUGAG | 8101 |

Input Sequence = AF100308.
Cut Site = UH/.
Stem Length = 8.
Core Sequence = CUGAUGAG GCCGUUAGGC CGAA
AF100308 (Hepatitis B virus strain 2-18, 3215 bp)
Underlined region can be any X sequence or linker, as described herein.

[0554] TABLE VI

HUMAN HBV INOZYME AND SUBSTRATE SEQUENCE

| | | | | |
|---|---|---|---|---|
| Pos | Substrate | Seq ID | Inozyme | Seq ID |

| | | | | |
|---|---|---|---|---|
| 9 | AACUCCAC C ACUUUCCA | 702 | UGGAAAGU CUGAUGAG GCCGUUAGGC CGAA IUGGAGUU | 8102 |
| 10 | ACUCCACC A CUUUCCAC | 703 | GUGGAAAG CUGAUGAG GCCGUUAGGC CGAA IGUGGAGU | 8103 |
| 12 | UCCACCAC U UUCCACCA | 704 | UGGUGGAA CUGAUGAG GCCGUUAGGC CGAA IUGGUGGA | 8104 |
| 16 | CCACUUUC C ACCAAACU | 705 | AGUUUGGU CUGAUGAG GCCGUUAGGC CGAA IAAAGUGG | 8105 |
| 17 | CACUUUCC A CCAAACUC | 706 | GAGUUUGG CUGAUGAG GCCGUUAGGC CGAA IGAAAGUG | 8106 |
| 19 | CUUUCCAC C AAACUCUU | 707 | AAGAGUUU CUGAUGAG GCCGUUAGGC CGAA IUGGAAAG | 8107 |
| 20 | UUUCCACC A AACUCUUC | 708 | GAAGAGUU CUGAUGAG GCCGUUAGGC CGAA IGUGGAAA | 8108 |
| 24 | CACCAAAC U CUUCAAGA | 709 | UCUUGAAG CUGAUGAG GCCGUUAGGC CGAA IUUUGGUG | 8109 |
| 26 | CCAAACUC U UCAAGAUC | 710 | GAUCUUGA CUGAUGAG GCCGUUAGGC CGAA IAGUUUGG | 8110 |
| 29 | AACUCUUC A AGAUCCCA | 711 | UGGGAUCU CUGAUGAG GCCGUUAGGC CGAA IAAGAGUU | 8111 |
| 35 | UCAAGAUC C CAGAGUCA | 712 | UGACUCUG CUGAUGAG GCCGUUAGGC CGAA IAUCUUGA | 8112 |
| 36 | CAAGAUCC C AGAGUCAG | 713 | CUGACUCU CUGAUGAG GCCGUUAGGC CGAA IGAUCUUG | 8113 |
| 37 | AAGAUCCC A GAGUCAGG | 714 | CCUGACUC CUGAUGAG GCCGUUAGGC CGAA IGGAUCUU | 8114 |
| 43 | CCAGAGUC A GGGCCCUG | 715 | CAGGGCCC CUGAUGAG GCCGUUAGGC CGAA IACUCUGG | 8115 |
| 48 | GUCAGGGC C CUGUACUU | 716 | AAGUACAG CUGAUGAG GCCGUUAGGC CGAA ICCCUGAC | 8116 |
| 49 | UCAGGGCC C UGUACUUU | 717 | AAAGUACA CUGAUGAG GCCGUUAGGC CGAA IGCCCUGA | 8117 |
| 50 | CAGGGCCC U GUACUUUC | 718 | GAAAGUAC CUGAUGAG GCCGUUAGGC CGAA IGGCCCUG | 8118 |
| 55 | CCCUGUAC U UUCCUGCU | 719 | AGCAGGAA CUGAUGAG GCCGUUAGGC CGAA IUACAGGG | 8119 |
| 59 | GUACUUUC C UGCUGGUG | 720 | CACCAGCA CUGAUGAG GCCGUUAGGC CGAA IAAAGUAC | 8120 |
| 60 | UACUUUCC U GCUGGUGG | 721 | CCACCAGC CUGAUGAG GCCGUUAGGC CGAA IGAAAGUA | 8121 |
| 63 | UUUCCUGC U GGUGGCUC | 722 | GAGCCACC CUGAUGAG GCCGUUAGGC CGAA ICAGGAAA | 8122 |
| 70 | CUGGUGGC U CCAGUUCA | 723 | UGAACUGG CUGAUGAG GCCGUUAGGC CGAA ICCACCAG | 8123 |
| 72 | GGUGGCUC C AGUUCAGG | 724 | CCUGAACU CUGAUGAG GCCGUUAGGC CGAA IAGCCACC | 8124 |
| 73 | GUGGCUCC A GUUCAGGA | 725 | UCCUGAAC CUGAUGAG GCCGUUAGGC CGAA IGAGCCAC | 8125 |
| 78 | UCCAGUUC A GGAACAGU | 726 | ACUGUUCC CUGAUGAG GCCGUUAGGC CGAA IAACUGGA | 8126 |
| 84 | UCAGGAAC A GUGAGCCC | 727 | GGGCUCAC CUGAUGAG GCCGUUAGGC CGAA IUUCCUGA | 8127 |
| 91 | CAGUGAGC C CUGCUCAG | 728 | CUGAGCAG CUGAUGAG GCCGUUAGGC CGAA ICUCACUG | 8128 |
| 92 | AGUGAGCC C UGCUCAGA | 729 | UCUGAGCA CUGAUGAG GCCGUUAGGC CGAA IGCUCACU | 8129 |
| 93 | GUGAGCCC U GCUCAGAA | 730 | UUCUGAGC CUGAUGAG GCCGUUAGGC CGAA IGGCUCAC | 8130 |
| 96 | AGCCCUGC U CAGAAUAC | 731 | GUAUUCUG CUGAUGAG GCCGUUAGGC CGAA ICAGGGCU | 8131 |
| 98 | CCCUGCUC A GAAUACUG | 732 | CAGUAUUC CUGAUGAG GCCGUUAGGC CGAA IAGCAGGG | 8132 |
| 105 | CAGAAUAC U GUCUCUGC | 733 | GCAGAGAC CUGAUGAG GCCGUUAGGC CGAA IUAUUCUG | 8133 |
| 109 | AUACUGUC U CUGCCAUA | 734 | UAUGGCAG CUGAUGAG GCCGUUAGGC CGAA IACAGUAU | 8134 |
| 111 | ACUGUCUC U GCCAUAUC | 735 | GAUAUGGC CUGAUGAG GCCGUUAGGC CGAA IAGACAGU | 8135 |
| 114 | GUCUCUGC C AUAUCGUC | 736 | GACGAUAU CUGAUGAG GCCGUUAGGC CGAA ICAGAGAC | 8136 |
| 115 | UCUCUGCC A UAUCGUCA | 737 | UGACGAUA CUGAUGAG GCCGUUAGGC CGAA IGCAGAGA | 8137 |
| 123 | AUAUCGUC A AUCUUAUC | 738 | GAUAAGAU CUGAUGAG GCCGUUAGGC CGAA IACGAUAU | 8138 |
| 127 | CGUCAAUC U UAUCGAAG | 739 | CUUCGAUA CUGAUGAG GCCGUUAGGC CGAA IAUUGACG | 8139 |
| 138 | UCGAAGAC U GGGGACCC | 740 | GGGUCCCC CUGAUGAG GCCGUUAGGC CGAA IUCUUCGA | 8140 |
| 145 | CUGGGGAC C CUGUACCG | 741 | CGGUACAG CUGAUGAG GCCGUUAGGC CGAA IUCCCCAG | 8141 |
| 146 | UGGGGACC C UGUACCGA | 742 | UCGGUACA CUGAUGAG GCCGUUAGGC CGAA IGUCCCCA | 8142 |
| 147 | GGGGACCC U GUACCGAA | 743 | UUCGGUAC CUGAUGAG GCCGUUAGGC CGAA IGGUCCCC | 8143 |
| 152 | CCCUGUAC C GAACAUGG | 744 | CCAUGUUC CUGAUGAG GCCGUUAGGC CGAA IUACAGGG | 8144 |
| 157 | UACCGAAC A UGGAGAAC | 745 | GUUCUCCA CUGAUGAG GCCGUUAGGC CGAA IUUCGGUA | 8145 |
| 166 | UGGAGAAC A UCGCAUCA | 746 | UGAUGCGA CUGAUGAG GCCGUUAGGC CGAA IUUCUCCA | 8146 |
| 171 | AACAUCGC A UCAGGACU | 747 | AGUCCUGA CUGAUGAG GCCGUUAGGC CGAA ICGAUGUU | 8147 |
| 174 | AUCGCAUC A GGACUCCU | 748 | AGGAGUCC CUGAUGAG GCCGUUAGGC CGAA IAUGCGAU | 8148 |
| 179 | AUCAGGAC U CCUAGGAC | 749 | GUCCUAGG CUGAUGAG GCCGUUAGGC CGAA IUCCUGAU | 8149 |
| 181 | CAGGACUC C UAGGACCC | 750 | GGGUCCUA CUGAUGAG GCCGUUAGGC CGAA IAGUCCUG | 8150 |
| 182 | AGGACUCC U AGGACCCC | 751 | GGGGUCCU CUGAUGAG GCCGUUAGGC CGAA IGAGUCCU | 8151 |
| 188 | CCUAGGAC C CCUGCUCG | 752 | CGAGCAGG CUGAUGAG GCCGUUAGGC CGAA IUCCUAGG | 8152 |
| 189 | CUAGGACC C CUGCUCGU | 753 | ACGAGCAG CUGAUGAG GCCGUUAGGC CGAA IGUCCUAG | 8153 |
| 190 | UAGGACCC C UGCUCGUG | 754 | CACGAGCA CUGAUGAG GCCGUUAGGC CGAA IGGUCCUA | 8154 |
| 191 | AGGACCCC U GCUCGUGU | 755 | ACACGAGC CUGAUGAG GCCGUUAGGC CGAA IGGGUCCU | 8155 |
| 194 | ACCCCUGC U CGUGUUAC | 756 | GUAACACG CUGAUGAG GCCGUUAGGC CGAA ICAGGGGU | 8156 |
| 203 | CGUGUUAC A GGCGGGGU | 757 | ACCCCGCC CUGAUGAG GCCGUUAGGC CGAA IUAACACG | 8157 |
| 217 | GGUUUUUC U UGUUGACA | 758 | UGUCAACA CUGAUGAG GCCGUUAGGC CGAA IAAAAACC | 8158 |
| 225 | UUGUUGAC A AAAAUCCU | 759 | AGGAUUUU CUGAUGAG GCCGUUAGGC CGAA IUCAACAA | 8159 |
| 232 | CAAAAAUC C UCACAAUA | 760 | UAUUGUGA CUGAUGAG GCCGUUAGGC CGAA IAUUUUUG | 8160 |
| 233 | AAAAAUCC U CACAAUAC | 761 | GUAUUGUG CUGAUGAG GCCGUUAGGC CGAA IGAUUUUU | 8161 |
| 235 | AAAUCCUC A CAAUACCA | 762 | UGGUAUUG CUGAUGAG GCCGUUAGGC CGAA IAGGAUUU | 8162 |
| 237 | AUCCUCAC A AUACCACA | 763 | UGUGGUAU CUGAUGAG GCCGUUAGGC CGAA IUGAGGAU | 8163 |
| 242 | CACAAUAC C ACAGAGUC | 764 | GACUCUGU CUGAUGAG GCCGUUAGGC CGAA IUAUUGUG | 8164 |
| 243 | ACAAUACC A CAGAGUCU | 765 | AGACUCUG CUGAUGAG GCCGUUAGGC CGAA IGUAUUGU | 8165 |
| 245 | AAUACCAC A GAGUCUAG | 766 | CUAGACUC CUGAUGAG GCCGUUAGGC CGAA IUGGUAUU | 8166 |
| 251 | ACAGAGUC U AGACUCGU | 767 | ACGAGUCU CUGAUGAG GCCGUUAGGC CGAA IACUCUGU | 8167 |
| 256 | GUCUAGAC U CGUGGUGG | 768 | CCACCACG CUGAUGAG GCCGUUAGGC CGAA IUCUAGAC | 8168 |
| 267 | UGGUGGAC U UCUCUCAA | 769 | UUGAGAGA CUGAUGAG GCCGUUAGGC CGAA IUCCACCA | 8169 |
| 270 | UGGACUUC U CUCAAUUU | 770 | AAAUUGAG CUGAUGAG GCCGUUAGGC CGAA IAAGUCCA | 8170 |
| 272 | GACUUCUC U CAAUUUUC | 771 | GAAAAUUG CUGAUGAG GCCGUUAGGC CGAA IAGAAGUC | 8171 |
| 274 | CUUCUCUC A AUUUUCUA | 772 | UAGAAAAU CUGAUGAG GCCGUUAGGC CGAA IAGAGAAG | 8172 |
| 281 | CAAUUUUC U AGGGGGAA | 773 | UUCCCCCU CUGAUGAG GCCGUUAGGC CGAA IAAAAUUG | 8173 |
| 291 | GGGGGAAC A CCCGUGUG | 774 | CACACGGG CUGAUGAG GCCGUUAGGC CGAA IUUCCCCC | 8174 |
| 293 | GGGAACAC C CGUGUGUC | 775 | GACACACG CUGAUGAG GCCGUUAGGC CGAA IUGUUCCC | 8175 |
| 294 | GGAACACC C GUGUGUCU | 776 | AGACACAC CUGAUGAG GCCGUUAGGC CGAA IGUGUUCC | 8176 |
| 302 | CGUGUGUC U UGGCCAAA | 777 | UUUGGCCA CUGAUGAG GCCGUUAGGC CGAA IACACACG | 8177 |
| 307 | GUCUUGGC C AAAAUUCG | 778 | CGAAUUUU CUGAUGAG GCCGUUAGGC CGAA ICCAAGAC | 8178 |
| 308 | UCUUGGCC A AAAUUCGC | 779 | GCGAAUUU CUGAUGAG GCCGUUAGGC CGAA IGCCAAGA | 8179 |
| 317 | AAAUUCGC A GUCCCAAA | 780 | UUUGGGAC CUGAUGAG GCCGUUAGGC CGAA ICGAAUUU | 8180 |
| 321 | UCGCAGUC C CAAAUCUC | 781 | GAGAUUUG CUGAUGAG GCCGUUAGGC CGAA IACUGCGA | 8181 |
| 322 | CGCAGUCC C AAAUCUCC | 782 | GGAGAUUU CUGAUGAG GCCGUUAGGC CGAA IGACUGCG | 8182 |
| 323 | GCAGUCCC A AAUCUCCA | 783 | UGGAGAUU CUGAUGAG GCCGUUAGGC CGAA IGGACUGC | 8183 |
| 328 | CCCAAAUC U CCAGUCAC | 784 | GUGACUGG CUGAUGAG GCCGUUAGGC CGAA IAUUUGGG | 8184 |
| 330 | CAAAUCUC C AGUCACUC | 785 | GAGUGACU CUGAUGAG GCCGUUAGGC CGAA IAGAUUUG | 8185 |
| 331 | AAAUCUCC A GUCACUCA | 786 | UGAGUGAC CUGAUGAG GCCGUUAGGC CGAA IGAGAUUU | 8186 |
| 335 | CUCCAGUC A CUCACCAA | 787 | UUGGUGAG CUGAUGAG GCCGUUAGGC CGAA IACUGGAG | 8187 |
| 337 | CCAGUCAC U CACCAACC | 788 | GGUUGGUG CUGAUGAG GCCGUUAGGC CGAA IUGACUGG | 8188 |
| 339 | AGUCACUC A CCAACCUG | 789 | CAGGUUGG CUGAUGAG GCCGUUAGGC CGAA IAGUGACU | 8189 |
| 341 | UCACUCAC C AACCUGUU | 790 | AACAGGUU CUGAUGAG GCCGUUAGGC CGAA IUGAGUGA | 8190 |
| 342 | CACUCACC A ACCUGUUG | 791 | CAACAGGU CUGAUGAG GCCGUUAGGC CGAA IGUGAGUG | 8191 |
| 345 | UCACCAAC C UGUUGUCC | 792 | GGACAACA CUGAUGAG GCCGUUAGGC CGAA IUUGGUGA | 8192 |
| 346 | CACCAACC U GUUGUCCU | 793 | AGGACAAC CUGAUGAG GCCGUUAGGC CGAA IGUUGGUG | 8193 |
| 353 | CUGUUGUC C UCCAAUUU | 794 | AAAUUGGA CUGAUGAG GCCGUUAGGC CGAA IACAACAG | 8194 |
| 354 | UGUUGUCC U CCAAUUUG | 795 | CAAAUUGG CUGAUGAG GCCGUUAGGC CGAA IGACAACA | 8195 |
| 356 | UUGUCCUC C AAUUUGUC | 796 | GACAAAUU CUGAUGAG GCCGUUAGGC CGAA IAGGACAA | 8196 |
| 357 | UGUCCUCC A AUUUGUCC | 797 | GGACAAAU CUGAUGAG GCCGUUAGGC CGAA IGAGGACA | 8197 |
| 365 | AAUUUGUC C UGGUUAUC | 798 | GAUAACCA CUGAUGAG GCCGUUAGGC CGAA IACAAAUU | 8198 |
| 366 | AUUUGUCC U GGUUAUCG | 799 | CGAUAACC CUGAUGAG GCCGUUAGGC CGAA IGACAAAU | 8199 |
| 376 | GUUAUCGC U GGAUGUGU | 800 | ACACAUCC CUGAUGAG GCCGUUAGGC CGAA ICGAUAAC | 8200 |
| 386 | GAUGUGUC U GCGGCGUU | 801 | AACGCCGC CUGAUGAG GCCGUUAGGC CGAA IACACAUC | 8201 |
| 400 | GUUUUAUC A UCUUCCUC | 802 | GAGGAAGA CUGAUGAG GCCGUUAGGC CGAA IAUAAAAC | 8202 |
| 403 | UUAUCAUC U UCCUCUGC | 803 | GCAGAGGA CUGAUGAG GCCGUUAGGC CGAA IAUGAUAA | 8203 |
| 406 | UCAUCUUC C UCUGCAUC | 804 | GAUGCAGA CUGAUGAG GCCGUUAGGC CGAA IAAGAUGA | 8204 |
| 407 | CAUCUUCC U CUGCAUCC | 805 | GGAUGCAG CUGAUGAG GCCGUUAGGC CGAA IGAAGAUG | 8205 |
| 409 | UCUUCCUC U GCAUCCUG | 806 | CAGGAUGC CUGAUGAG GCCGUUAGGC CGAA IAGGAAGA | 8206 |
| 412 | UCCUCUGC A UCCUGCUG | 807 | CAGCAGGA CUGAUGAG GCCGUUAGGC CGAA ICAGAGGA | 8207 |
| 415 | UCUGCAUC C UGCUGCUA | 808 | UAGCAGCA CUGAUGAG GCCGUUAGGC CGAA IAUGCAGA | 8208 |
| 416 | CUGCAUCC U GCUGCUAU | 809 | AUAGCAGC CUGAUGAG GCCGUUAGGC CGAA IGAUGCAG | 8209 |
| 419 | CAUCCUGC U GCUAUGCC | 810 | GGCAUAGC CUGAUGAG GCCGUUAGGC CGAA ICAGGAUG | 8210 |
| 422 | CCUGCUGC U AUGCCUCA | 811 | UGAGGCAU CUGAUGAG GCCGUUAGGC CGAA ICAGCAGG | 8211 |
| 427 | UGCUAUGC C UCAUCUUC | 812 | GAAGAUGA CUGAUGAG GCCGUUAGGC CGAA ICAUAGCA | 8212 |
| 428 | GCUAUGCC U CAUCUUCU | 813 | AGAAGAUG CUGAUGAG GCCGUUAGGC CGAA IGCAUAGC | 8213 |
| 430 | UAUGCCUC A UCUUCUUG | 814 | CAAGAAGA CUGAUGAG GCCGUUAGGC CGAA IAGGCAUA | 8214 |
| 433 | GCCUCAUC U UCUUGUUG | 815 | CAACAAGA CUGAUGAG GCCGUUAGGC CGAA IAUGAGGC | 8215 |
| 436 | UCAUCUUC U UGUUGGUU | 816 | AACCAACA CUGAUGAG GCCGUUAGGC CGAA IAAGAUGA | 8216 |
| 446 | GUUGGUUC U UCUGGACU | 817 | AGUCCAGA CUGAUGAG GCCGUUAGGC CGAA IAACCAAC | 8217 |
| 449 | GGUUCUUC U GGACUAUC | 818 | GAUAGUCC CUGAUGAG GCCGUUAGGC CGAA IAAGAACC | 8218 |
| 454 | UUCUGGAC U AUCAAGGU | 819 | ACCUUGAU CUGAUGAG GCCGUUAGGC CGAA IUCCAGAA | 8219 |
| 458 | GGACUAUC A AGGUAUGU | 820 | ACAUACCU CUGAUGAG GCCGUUAGGC CGAA IAUAGUCC | 8220 |
| 470 | UAUGUUGC C CGUUUGUC | 821 | GACAAACG CUGAUGAG GCCGUUAGGC CGAA ICAACAUA | 8221 |
| 471 | AUGUUGCC C GUUUGUCC | 822 | GGACAAAC CUGAUGAG GCCGUUAGGC CGAA IGCAACAU | 8222 |
| 479 | CGUUUGUC C UCUAAUUC | 823 | GAAUUAGA CUGAUGAG GCCGUUAGGC CGAA IACAAACG | 8223 |
| 480 | GUUUGUCC U CUAAUUCC | 824 | GGAAUUAG CUGAUGAG GCCGUUAGGC CGAA IGACAAAC | 8224 |
| 482 | UUGUCCUC U AAUUCCAG | 825 | CUGGAAUU CUGAUGAG GCCGUUAGGC CGAA IAGGACAA | 8225 |
| 488 | UCUAAUUC C AGGAUCAU | 826 | AUGAUCCU CUGAUGAG GCCGUUAGGC CGAA IAAUUAGA | 8226 |
| 489 | CUAAUUCC A GGAUCAUC | 827 | GAUGAUCC CUGAUGAG GCCGUUAGGC CGAA IGAAUUAG | 8227 |
| 495 | CCAGGAUC A UCAACAAC | 828 | GUUGUUGA CUGAUGAG GCCGUUAGGC CGAA IAUCCUGG | 8228 |
| 498 | GGAUCAUC A ACAACCAG | 829 | CUGGUUGU CUGAUGAG GCCGUUAGGC CGAA IAUGAUCC | 8229 |
| 501 | UCAUCAAC A ACCAGCAC | 830 | GUGCUGGU CUGAUGAG GCCGUUAGGC CGAA IUUGAUGA | 8230 |
| 504 | UCAACAAC C AGCACCGG | 831 | CCGGUGCU CUGAUGAG GCCGUUAGGC CGAA IUUGUUGA | 8231 |
| 505 | CAACAACC A GCACCGGA | 832 | UCCGGUGC CUGAUGAG GCCGUUAGGC CGAA IGUUGUUG | 8232 |
| 508 | CAACCAGC A CCGGACCA | 833 | UGGUCCGG CUGAUGAG GCCGUUAGGC CGAA ICUGGUUG | 8233 |
| 510 | ACCAGCAC C GGACCAUG | 834 | CAUGGUCC CUGAUGAG GCCGUUAGGC CGAA IUGCUGGU | 8234 |
| 515 | CACCGGAC C AUGCAAAA | 835 | UUUUGCAU CUGAUGAG GCCGUUAGGC CGAA IUCCGGUG | 8235 |
| 516 | ACCGGACC A UGCAAAAC | 836 | GUUUUGCA CUGAUGAG GCCGUUAGGC CGAA IGUCCGGU | 8236 |
| 520 | GACCAUGC A AAACCUGC | 837 | GCAGGUUU CUGAUGAG GCCGUUAGGC CGAA ICAUGGUC | 8237 |
| 525 | UGCAAAAC C UGCACAAC | 838 | GUUGUGCA CUGAUGAG GCCGUUAGGC CGAA IUUUUGCA | 8238 |
| 526 | GCAAAACC U GCACAACU | 839 | AGUUGUGC CUGAUGAG GCCGUUAGGC CGAA IGUUUUGC | 8239 |
| 529 | AAACCUGC A CAACUCCU | 840 | AGGAGUUG CUGAUGAG GCCGUUAGGC CGAA ICAGGUUU | 8240 |
| 531 | ACCUGCAC A ACUCCUGC | 841 | GCAGGAGU CUGAUGAG GCCGUUAGGC CGAA IUGCAGGU | 8241 |
| 534 | UGCACAAC U CCUGCUCA | 842 | UGAGCAGG CUGAUGAG GCCGUUAGGC CGAA IUUGUGCA | 8242 |
| 536 | CACAACUC C UGCUCAAG | 843 | CUUGAGCA CUGAUGAG GCCGUUAGGC CGAA IAGUUGUG | 8243 |
| 537 | ACAACUCC U GCUCAAGG | 844 | CCUUGAGC CUGAUGAG GCCGUUAGGC CGAA IGAGUUGU | 8244 |
| 540 | ACUCCUGC U CAAGGAAC | 845 | GUUCCUUG CUGAUGAG GCCGUUAGGC CGAA ICAGGAGU | 8245 |
| 542 | UCCUGCUC A AGGAACCU | 846 | AGGUUCCU CUGAUGAG GCCGUUAGGC CGAA IAGCAGGA | 8246 |
| 549 | CAAGGAAC C UCUAUGUU | 847 | AACAUAGA CUGAUGAG GCCGUUAGGC CGAA IUUCCUUG | 8247 |
| 550 | AAGGAACC U CUAUGUUU | 848 | AAACAUAG CUGAUGAG GCCGUUAGGC CGAA IGUUCCUU | 8248 |
| 552 | GGAACCUC U AUGUUUCC | 849 | GGAAACAU CUGAUGAG GCCGUUAGGC CGAA IAGGUUCC | 8249 |
| 560 | UAUGUUUC C CUCAUGUU | 850 | AACAUGAG CUGAUGAC GCCGUUAGGC CGAA IAAACAUA | 8250 |
| 561 | AUGUUUCC C UCAUGUUG | 851 | CAACAUGA CUGAUGAG GCCGUUAGGC CGAA IGAAACAU | 8251 |
| 562 | UGUUUCCC U CAUGUUGC | 852 | GCAACAUG CUGAUGAG GCCGUUAGGC CGAA IGGAAACA | 8252 |
| 564 | UUUCCCUC A UGUUGCUG | 853 | CAGCAACA CUGAUGAG GCCGUUAGGC CGAA IAGGGAAA | 8253 |
| 571 | CAUGUUGC U GUACAAAA | 854 | UUUUGUAC CUGAUGAG GCCGUUAGGC CGAA ICAACAUG | 8254 |
| 576 | UGCUGUAC A AAACCUAC | 855 | GUAGGUUU CUGAUGAG GCCGUUAGGC CGAA IUACAGCA | 8255 |
| 581 | UACAAAAC C UACGGACG | 856 | CGUCCGUA CUGAUGAG GCCGUUAGGC CGAA IUUUUGUA | 8256 |
| 582 | ACAAAACC U ACGGACGG | 857 | CCGUCCGU CUGAUGAG GCCGUUAGGC CGAA IGUUUUGU | 8257 |
| 595 | ACGGAAAC U GCACCUGU | 858 | ACAGGUGC CUGAUGAG GCCGUUAGGC CGAA IUUUCCGU | 8258 |
| 598 | GAAACUGC A CCUGUAUU | 859 | AAUACAGG CUGAUGAG GCCGUUAGGC CGAA ICAGUUUC | 8259 |
| 600 | AACUGCAC C UGUAUUCC | 860 | GGAAUACA CUGAUGAG GCCGUUAGGC CGAA IUGCAGUU | 8260 |
| 601 | ACUGCACC U GUAUUCCC | 861 | GGGAAUAC CUGAUGAG GCCGUUAGGC CGAA IGUGCAGU | 8261 |
| 608 | CUGUAUUC C CAUCCCAU | 862 | AUGGGAUG CUGAUGAG GCCGUUAGGC CGAA IAAUACAG | 8262 |
| 609 | UGUAUUCC C AUCCCAUC | 863 | GAUGGGAU CUGAUGAG GCCGUUAGGC CGAA IGAAUACA | 8263 |
| 610 | GUAUUCCC A UCCCAUCA | 864 | UGAUGGGA CUGAUGAG GCCGUUAGGC CGAA IGGAAUAC | 8264 |
| 613 | UUCCCAUC C CAUCAUCU | 865 | AGAUGAUG CUGAUGAG GCCGUUAGGC CGAA IAUGGGAA | 8265 |
| 614 | UCCCAUCC C AUCAUCUU | 866 | AAGAUGAU CUGAUGAG GCCGUUAGGC CGAA IGAUGGGA | 8266 |
| 615 | CCCAUCCC A UCAUCUUG | 867 | CAAGAUGA CUGAUGAG GCCGUUAGGC CGAA IGGAUGGG | 8267 |
| 618 | AUCCCAUC A UCUUGGGC | 868 | GCCCAAGA CUGAUGAG GCCGUUAGGC CGAA IAUGGGAU | 8268 |
| 621 | CCAUCAUC U UGGGCUUU | 869 | AAAGCCCA CUGAUGAG GCCGUUAGGC CGAA IAUGAUGG | 8269 |
| 627 | UCUUGGGC U UUCGCAAA | 870 | UUUGCGAA CUGAUGAG GCCGUUAGGC CGAA ICCCAAGA | 8270 |
| 633 | GCUUUCGC A AAAUACCU | 871 | AGGUAUUU CUGAUGAG GCCGUUAGGC CGAA ICGAAAGC | 8271 |
| 640 | CAAAAUAC C UAUGGGAG | 872 | CUCCCAUA CUGAUGAG GCCGUUAGGC CGAA IUAUUUUG | 8272 |
| 641 | AAAAUACC U AUGGGAGU | 873 | ACUCCCAU CUGAUGAG GCCGUUAGGC CGAA IGUAUUUU | 8273 |
| 654 | GAGUGGGC C UCAGUCCG | 874 | CGGACUGA CUGAUGAG GCCGUUAGGC CGAA ICCCACUC | 8274 |
| 655 | AGUGGGCC U CAGUCCGU | 875 | ACGGACUG CUGAUGAG GCCGUUAGGC CGAA IGCCCACU | 8275 |
| 657 | UGGGCCUC A GUCCGUUU | 876 | AAACGGAC CUGAUGAG GCCGUUAGGC CGAA IAGGCCCA | 8276 |
| 661 | CCUCAGUC C GUUUCUCU | 877 | AGAGAAAC CUGAUGAG GCCGUUAGGC CGAA IACUGAGG | 8277 |
| 667 | UCCGUUUC U CUUGGCUC | 878 | GAGCCAAG CUGAUGAG GCCGUUAGGC CGAA IAAACGGA | 8278 |
| 669 | CGUUUCUC U UGGCUCAG | 879 | CUGAGCCA CUGAUGAG GCCGUUAGGC CGAA IAGAAACG | 8279 |
| 674 | CUCUUGGC U CAGUUUAC | 880 | GUAAACUG CUGAUGAG GCCGUUAGGC CGAA ICCAAGAG | 8280 |
| 676 | CUUGGCUC A GUUUACUA | 881 | UAGUAAAC CUGAUGAG GCCGUUAGGC CGAA IAGCCAAG | 8281 |
| 683 | CAGUUUAC U AGUGCCAU | 882 | AUGGCACU CUGAUGAG GCCGUUAGGC CGAA IUAAACUG | 8282 |
| 689 | ACUAGUGC C AUUUGUUC | 883 | GAACAAAU CUGAUGAG GCCGUUAGGC CGAA ICACUAGU | 8283 |
| 690 | CUAGUGCC A UUUGUUCA | 884 | UGAACAAA CUGAUGAG GCCGUUAGGC CGAA IGCACUAG | 8284 |
| 698 | AUUUGUUC A GUGGUUCG | 885 | CGAACCAC CUGAUGAG GCCGUUAGGC CGAA IAACAAAU | 8285 |
| 713 | CGUAGGGC U UUCCCCCA | 886 | UGGGGGAA CUGAUGAG GCCGUUAGGC CGAA ICCCUACG | 8286 |
| 717 | GGGCUUUC C CCCACUGU | 887 | ACAGUGGG CUGAUGAG GCCGUUAGGC CGAA IAAAGCCC | 8287 |
| 718 | GGCUUUCC C CCACUGUC | 888 | GACAGUGG CUGAUGAG GCCGUUAGGC CGAA IGAAAGCC | 8288 |
| 719 | GCUUUCCC C CACUGUCU | 889 | AGACAGUG CUGAUGAG GCCGUUAGGC CGAA IGGAAAGC | 8289 |
| 720 | CUUUCCCC C ACUGUCUG | 890 | CAGACAGU CUGAUGAG GCCGUUAGGC CGAA IGGGAAAG | 8290 |
| 721 | UUUCCCCC A CUGUCUGG | 891 | CCAGACAG CUGAUGAG GCCGUUAGGC CGAA IGGGGAAA | 8291 |
| 723 | UCCCCCAC U GUCUGGCU | 892 | AGCCAGAC CUGAUGAG GCCGUUAGGC CGAA IUGGGGGA | 8292 |
| 727 | CCACUGUC U GGCUUUCA | 893 | UGAAAGCC CUGAUGAG GCCGUUAGGC CGAA IACAGUGG | 8293 |
| 731 | UGUCUGGC U UUCAGUUA | 894 | UAACUGAA CUGAUGAG GCCGUUAGGC CGAA ICCAGACA | 8294 |
| 735 | UGGCUUUC A GUUAUAUG | 895 | CAUAUAAC CUGAUGAG GCCGUUAGGC CGAA IAAAGCCA | 8295 |
| 764 | UUGGGGGC C AAGUCUGU | 896 | ACAGACUU CUGAUGAG GCCGUUAGGC CGAA ICCCCCAA | 8296 |
| 765 | UGGGGGCC A AGUCUGUA | 897 | UACAGACU CUGAUGAG GCCGUUAGGC CGAA IGCCCCCA | 8297 |
| 770 | GCCAAGUC U GUACAACA | 898 | UGUUGUAC CUGAUGAG GCCGUUAGGC CGAA IACUUGGC | 8298 |
| 775 | GUCUGUAC A ACAUCUUG | 899 | CAAGAUGU CUGAUGAG GCCGUUAGGC CGAA IUACAGAC | 8299 |
| 778 | UGUACAAC A UCUUGAGU | 900 | ACUCAAGA CUGAUGAG GCCGUUAGGC CGAA IUUGUACA | 8300 |
| 781 | ACAACAUC U UGAGUCCC | 901 | GGGACUCA CUGAUGAG GCCGUUAGGC CGAA IAUGUUGU | 8301 |
| 788 | CUUGAGUC C CUUUAUGC | 902 | GCAUAAAG CUGAUGAG GCCGUUAGGC CGAA IACUCAAG | 8302 |
| 789 | UUGAGUCC C UUUAUGCC | 903 | GGCAUAAA CUGAUGAG GCCGUUAGGC CGAA IGACUCAA | 8303 |
| 790 | UGAGUCCC U UUAUGCCG | 904 | CGGCAUAA CUGAUGAG GCCGUUAGGC CGAA IGGACUCA | 8304 |
| 797 | CUUUAUGC C GCUGUUAC | 905 | GUAACAGC CUGAUGAG GCCGUUAGGC CGAA ICAUAAAG | 8305 |
| 800 | UAUGCCGC U GUUACCAA | 906 | UUGGUAAC CUGAUGAG GCCGUUAGGC CGAA ICGGCAUA | 8306 |
| 806 | GCUGUUAC C AAUUUUCU | 907 | AGAAAAUU CUGAUGAG GCCGUUAGGC CGAA IUAACAGC | 8307 |
| 807 | CUGUUACC A AUUUUCUU | 908 | AAGAAAAU CUGAUGAG GCCGUUAGGC CGAA IGUAACAG | 8308 |
| 814 | CAAUUUUC U UUUGUCUU | 909 | AAGACAAA CUGAUGAG GCCGUUAGGC CGAA IAAAAUUG | 8309 |
| 821 | CUUUUGUC U UUGGGUAU | 910 | AUACCCAA CUGAUGAG GCCGUUAGGC CGAA IACAAAAG | 8310 |
| 832 | GGGUAUAC A UUUAAACC | 911 | GGUUUAAA CUGAUGAG GCCGUUAGGC CGAA IUAUACCC | 8311 |
| 840 | AUUUAAAC C CUCACAAA | 912 | UUUGUGAG CUGAUGAG GCCGUUAGGC CGAA IUUUAAAU | 8312 |
| 841 | UUUAAACC C UCACAAAA | 913 | UUUUGUGA CUGAUGAG GCCGUUAGGC CGAA IGUUUAAA | 8313 |
| 842 | UUAAACCC U CACAAAAC | 914 | GUUUUGUG CUGAUGAG GCCGUUAGGC CGAA IGGUUUAA | 8314 |
| 844 | AAACCCUC A CAAAACAA | 915 | UUGUUUUG CUGAUGAG GCCGUUAGGC CGAA IAGGGUUU | 8315 |
| 846 | ACCCUCAC A AAACAAAA | 916 | UUUUGUUU CUGAUGAG GCCGUUAGGC CGAA IUGAGGGU | 8316 |
| 851 | CACAAAAC A AAAAGAUG | 917 | CAUCUUUU CUGAUGAG GCCGUUAGGC CGAA IUUUUGUG | 8317 |
| 869 | GGAUAUUC C CUUAACUU | 918 | AAGUUAAG CUGAUGAG GCCGUUAGGC CGAA IAAUAUCC | 8318 |
| 870 | GAUAUUCC C UUAACUUC | 919 | GAAGUUAA CUGAUGAG GCCGUUAGGC CGAA IGAAUAUC | 8319 |
| 871 | AUAUUCCC U UAACUUCA | 920 | UGAAGUUA CUGAUGAG GCCGUUAGGC CGAA IGGAAUAU | 8320 |
| 876 | CCCUUAAC U UCAUGGGA | 921 | UCCCAUGA CUGAUGAG GCCGUUAGGC CGAA IUUAAGGG | 8321 |
| 879 | UUAACUUC A UGGGAUAU | 922 | AUAUCCCA CUGAUGAG GCCGUUAGGC CGAA IAAGUUAA | 8322 |
| 906 | GUUGGGGC A CAUUGCCA | 923 | UGGCAAUG CUGAUGAG GCCGUUAGGC CGAA ICCCCAAC | 8323 |
| 908 | UGGGGCAC A UUGCCACA | 924 | UGUGGCAA CUGAUGAG GCCGUUAGGC CGAA IUGCCCCA | 8324 |
| 913 | CACAUUGC C ACAGGAAC | 925 | GUUCCUGU CUGAUGAG GCCGUUAGGC CGAA ICAAUGUG | 8325 |
| 914 | ACAUUGCC A CAGGAACA | 926 | UGUUCCUG CUGAUGAG GCCGUUAGGC CGAA IGCAAUGU | 8326 |
| 916 | AUUGCCAC A GGAACAUA | 927 | UAUGUUCC CUGAUGAG GCCGUUAGGC CGAA IUGGCAAU | 8327 |
| 922 | ACAGGAAC A UAUUGUAC | 928 | GUACAAUA CUGAUGAG GCCGUUAGGC CGAA IUUCCUGU | 8328 |
| 931 | UAUUGUAC A AAAAAUCA | 929 | UGAUUUUU CUGAUGAG GCCGUUAGGC CGAA IUACAAUA | 8329 |
| 939 | AAAAAAUC A AAAUGUGU | 930 | ACACAUUU CUGAUGAG GCCGUUAGGC CGAA IAUUUUUU | 8330 |
| 958 | UAGGAAAC U UCCUGUAA | 931 | UUACAGGA CUGAUGAG GCCGUUAGGC CGAA IUUUCCUA | 8331 |
| 961 | GAAACUUC C UGUAAACA | 932 | UGUUUACA CUGAUGAG GCCGUUAGGC CGAA IAAGUUUC | 8332 |
| 962 | AAACUUCC U GUAAACAG | 933 | CUGUUUAC CUGAUGAG GCCGUUAGGC CGAA IGAAGUUU | 8333 |
| 969 | CUGUAAAC A GGCCUAUU | 934 | AAUAGGCC CUGAUGAG GCCGUUAGGC CGAA IUUUACAG | 8334 |
| 973 | AAACAGGC C UAUUGAUU | 935 | AAUCAAUA CUGAUGAG GCCGUUAGGC CGAA ICCUGUUU | 8335 |
| 974 | AACAGGCC U AUUGAUUG | 936 | CAAUCAAU CUGAUGAG GCCGUUAGGC CGAA IGCCUGUU | 8336 |
| 994 | AGUAUGUC A ACGAAUUG | 937 | CAAUUCGU CUGAUGAG GCCGUUAGGC CGAA IACAUACU | 8337 |
| 1009 | UGUGGGUC U UUUGGGGU | 938 | ACCCCAAA CUGAUGAG GCCGUUAGGC CGAA IACCCACA | 8338 |
| 1022 | GGGUUUGC C GCCCCUUU | 939 | AAAGGGGC CUGAUGAG GCCGUUAGGC CGAA ICAAACCC | 8339 |
| 1025 | UUUGCCGC C CCUUUCAC | 940 | GUGAAAGG CUGAUGAG GCCGUUAGGC CGAA ICGGCAAA | 8340 |
| 1026 | UUGCCGCC C CUUUCACG | 941 | CGUGAAAG CUGAUGAG GCCGUUAGGC CGAA IGCGGCAA | 8341 |
| 1027 | UGCCGCCC C UUUCACGC | 942 | GCGUGAAA CUGAUGAG GCCGUUAGGC CGAA IGGCGGCA | 8342 |
| 1028 | GCCGCCCC U UUCACGCA | 943 | UGCGUGAA CUGAUGAG GCCGUUAGGC CGAA IGGGCGGC | 8343 |
| 1032 | CCCCUUUC A CGCAAUGU | 944 | ACAUUGCG CUGAUGAG GCCGUUAGGC CGAA IAAAGGGG | 8344 |
| 1036 | UUUCACGC A AUGUGGAU | 945 | AUCCACAU CUGAUGAG GCCGUUAGGC CGAA ICGUGAAA | 8345 |
| 1049 | GGAUAUUC U GCUUUAAU | 946 | AUUAAAGC CUGAUGAG GCCGUUAGGC CGAA IAAUAUCC | 8346 |
| 1052 | UAUUCUGC U UUAAUGCC | 947 | GGCAUUAA CUGAUGAG GCCGUUAGGC CGAA ICAGAAUA | 8347 |
| 1060 | UUUAAUGC C UUUAUAUG | 948 | CAUAUAAA CUGAUGAG GCCGUUAGGC CGAA ICAUUAAA | 8348 |
| 1061 | UUAAUGCC U UUAUAUGC | 949 | GCAUAUAA CUGAUGAG GCCGUUAGGC CGAA IGCAUUAA | 8349 |
| 1070 | UUAUAUGC A UGCAUACA | 950 | UGUAUGCA CUGAUGAG GCCGUUAGGC CGAA ICAUAUAA | 8350 |
| 1074 | AUGCAUGC A UACAAGCA | 951 | UGCUUGUA CUGAUGAG GCCGUUAGGC CGAA ICAUGCAU | 8351 |
| 1078 | AUGCAUAC A AGCAAAAC | 952 | GUUUUGCU CUGAUCAG GCCGUUAGGC CGAA IUAUGCAU | 8352 |
| 1082 | AUACAAGC A AAACAGGC | 953 | GCCUGUUU CUGAUGAG GCCGUUAGGC CGAA ICUUGUAU | 8353 |
| 1087 | AGCAAAAC A GGCUUUUA | 954 | UAAAAGCC CUGAUGAG GCCGUUAGGC CGAA IUUUUGCU | 8354 |
| 1091 | AAACAGGC U UUUACUUU | 955 | AAAGUAAA CUGAUGAG GCCGUUAGGC CGAA ICCUGUUU | 8355 |
| 1097 | GCUUUUAC U UUCUCGCC | 956 | GGCGAGAA CUGAUGAG GCCGUUAGGC CGAA IUAAAAGC | 8356 |
| 1101 | UUACUUUC U CGCCAACU | 957 | AGUUGGCG CUGAUGAG GCCGUUAGGC CGAA IAAAGUAA | 8357 |
| 1105 | UUUCUCGC C AACUUACA | 958 | UGUAAGUU CUGAUGAG GCCGUUAGGC CGAA ICGAGAAA | 8358 |
| 1106 | UUCUCGCC A ACUUACAA | 959 | UUGUAAGU CUGAUGAG GCCGUUAGGC CGAA IGCGAGAA | 8359 |
| 1109 | UCGCCAAC U UACAAGGC | 960 | GCCUUGUA CUGAUGAG GCCGUUAGGC CGAA IUUGGCGA | 8360 |
| 1113 | CAACUUAC A AGGCCUUU | 961 | AAAGGCCU CUGAUGAG GCCGUUAGGC CGAA IUAAGUUG | 8361 |
| 1118 | UACAAGGC C UUUCUAAG | 962 | CUUAGAAA CUGAUGAG GCCGUUAGGC CGAA ICCUUGUA | 8362 |
| 1119 | ACAAGGCC U UUCUAAGU | 963 | ACUUAGAA CUGAUGAG GCCGUUAGGC CGAA IGCCUUGU | 8363 |
| 1123 | GGCCUUUC U AAGUAAAC | 964 | GUUUACUU CUGAUGAG GCCGUUAGGC CGAA IAAAGGCC | 8364 |
| 1132 | AAGUAAAC A GUAUGUGA | 965 | UCACAUAC CUGAUGAG GCCGUUAGGC CGAA IUUUACUU | 8365 |
| 1143 | AUGUGAAC C UUUACCCC | 966 | GGGGUAAA CUGAUGAG GCCGUUAGGC CGAA IUUCACAU | 8366 |
| 1144 | UGUGAACC U UUACCCCG | 967 | CGGGGUAA CUGAUGAG GCCGUUAGGC CGAA IGUUCACA | 8367 |
| 1149 | ACCUUUAC C CCGUUGCU | 968 | AGCAACGG CUGAUGAG GCCGUUAGGC CGAA IUAAAGGU | 8368 |
| 1150 | CCUUUACC C CGUUGCUC | 969 | GAGCAACG CUGAUGAG GCCGUUAGGC CGAA IGUAAAGG | 8369 |
| 1151 | CUUUACCC C GUUGCUCG | 970 | CGAGCAAC CUGAUGAG GCCGUUAGGC CGAA IGGUAAAG | 8370 |
| 1157 | CCCGUUGC U CGGCAACG | 971 | CGUUGCCG CUGAUGAG GCCGUUAGGC CGAA ICAACGGG | 8371 |
| 1162 | UGCUCGGC A ACGGCCUG | 972 | CAGGCCGU CUGAUGAG GCCGUUAGGC CGAA ICCGAGCA | 8372 |
| 1168 | GCAACGGC C UGGUCUAU | 973 | AUAGACCA CUGAUGAG GCCGUUAGGC CGAA ICCGUUGC | 8373 |
| 1169 | CAACGGCC U GGUCUAUG | 974 | CAUAGACC CUGAUGAG GCCGUUAGGC CGAA IGCCGUUG | 8374 |
| 1174 | GCCUGGUC U AUGCCAAG | 975 | CUUGGCAU CUGAUGAG GCCGUUAGGC CGAA IACCAGGC | 8375 |
| 1179 | GUCUAUGC C AAGUGUUU | 976 | AAACACUU CUGAUGAG GCCGUUAGGC CGAA ICAUAGAC | 8376 |
| 1180 | UCUAUGCC A AGUGUUUG | 977 | CAAACACU CUGAUGAG GCCGUUAGGC CGAA IGCAUAGA | 8377 |
| 1190 | GUGUUUGC U GACGCAAC | 978 | GUUGCGUC CUGAUGAG GCCGUUAGGC CGAA ICAAACAC | 8378 |
| 1196 | GCUGACGC A ACCCCCAC | 979 | GUGGGGGU CUGAUGAG GCCGUUAGGC CGAA ICGUCAGC | 8379 |
| 1199 | GACGCAAC C CCCACUGG | 980 | CCAGUGGG CUGAUGAG GCCGUUAGGC CGAA IUUGCGUC | 8380 |
| 1200 | ACGCAACC C CCACUGGU | 981 | ACCAGUGG CUGAUGAG GCCGUUAGGC CGAA IGUUGCGU | 8381 |
| 1201 | CGCAACCC C CACUGGUU | 982 | AACCAGUG CUGAUGAG GCCGUUAGGC CGAA IGGUUGCG | 8382 |
| 1202 | GCAACCCC C ACUGGUUG | 983 | CAACCAGU CUGAUGAG GCCGUUAGGC CGAA IGGGUUGC | 8383 |
| 1203 | CAACCCCC A CUGGUUGG | 984 | CCAACCAG CUGAUGAG GCCGUUAGGC CGAA IGGGGUUG | 8384 |
| 1205 | ACCCCCAC U GGUUGGGG | 985 | CCCCAACC CUGAUGAG GCCGUUAGGC CGAA IUGGGGGU | 8385 |
| 1215 | GUUGGGGC U UGGCCAUA | 986 | UAUGGCCA CUGAUGAG GCCGUUAGGC CGAA ICCCCAAC | 8386 |
| 1220 | GGCUUGGC C AUAGGCCA | 987 | UGGCCUAU CUGAUGAG GCCGUUAGGC CGAA ICCAAGCC | 8387 |
| 1221 | GCUUGGCC A UAGGCCAU | 988 | AUGGCCUA CUGAUGAG GCCGUUAGGC CGAA IGCCAAGC | 8388 |
| 1227 | CCAUAGGC C AUCAGCGC | 989 | GCGCUGAU CUGAUGAG GCCGUUAGGC CGAA ICCUAUGG | 8389 |
| 1228 | CAUAGGCC A UCAGCGCA | 990 | UGCGCUGA CUGAUGAG GCCGUUAGGC CGAA IGCCUAUG | 8390 |
| 1231 | AGGCCAUC A GCGCAUGC | 991 | GCAUGCGC CUGAUGAG GCCGUUAGGC CGAA IAUGGCCU | 8391 |
| 1236 | AUCAGCGC A UGCGUGGA | 992 | UCCACGCA CUGAUGAG GCCGUUAGGC CGAA ICGCUGAU | 8392 |
| 1247 | CGUGGAAC C UUUGUGUC | 993 | GACACAAA CUGAUGAG GCCGUUAGGC CGAA IUUCCACG | 8393 |
| 1248 | GUGGAACC U UUGUGUCU | 994 | AGACACAA CUGAUGAG GCCGUUAGGC CGAA IGUUCCAC | 8394 |
| 1256 | UUUGUGUC U CCUCUGCC | 995 | GGCAGAGG CUGAUGAG GCCGUUAGGC CGAA IACACAAA | 8395 |
| 1258 | UGUGUCUC C UCUGCCGA | 996 | UCGGCAGA CUGAUGAG GCCGUUAGGC CGAA IAGACACA | 8396 |
| 1259 | GUGUCUCC U CUGCCGAU | 997 | AUCGGCAG CUGAUGAG GCCGUUAGGC CGAA IGAGACAC | 8397 |
| 1261 | GUCUCCUC U GCCGAUCC | 998 | GGAUCGGC CUGAUGAG GCCGUUAGGC CGAA IAGGAGAC | 8398 |
| 1264 | UCCUCUGC C GAUCCAUA | 999 | UAUGGAUC CUGAUGAG GCCGUUAGGC CGAA ICAGAGGA | 8399 |
| 1269 | UGCCGAUC C AUACCGCG | 1000 | CGCGGUAU CUGAUGAG GCCGUUAGGC CGAA IAUCGGCA | 8400 |
| 1270 | GCCGAUCC A UACCGCGG | 1001 | CCGCGGUA CUGAUGAG GCCGUUAGGC CGAA IGAUCGGC | 8401 |
| 1274 | AUCCAUAC C GCGGAACU | 1002 | AGUUCCGC CUGAUGAG GCCGUUAGGC CGAA IUAUGGAU | 8402 |
| 1282 | CGCGGAAC U CCUAGCCG | 1003 | CGGCUAGG CUGAUGAG GCCGUUAGGC CGAA IUUCCGCG | 8403 |
| 1284 | CGGAACUC C UAGCCGCU | 1004 | AGCGGCUA CUGAUGAG GCCGUUAGGC CGAA IAGUUCCG | 8404 |
| 1285 | GGAACUCC U AGCCGCUU | 1005 | AAGCGGCU CUGAUGAG GCCGUUAGGC CGAA IGAGUUCC | 8405 |
| 1289 | CUCCUAGC C GCUUGUUU | 1006 | AAACAAGC CUGAUGAG GCCGUUAGGC CGAA ICUAGGAG | 8406 |
| 1292 | CUAGCCGC U UGUUUUGC | 1007 | GCAAAACA CUGAUGAG GCCGUUAGGC CGAA ICGGCUAG | 8407 |
| 1301 | UGUUUUGC U CGCAGCAG | 1008 | CUGCUGCG CUGAUGAG GCCGUUAGGC CGAA ICAAAACA | 8408 |
| 1305 | UUGCUCGC A GCAGGUCU | 1009 | AGACCUGC CUGAUGAG GCCGUUAGGC CGAA ICGAGCAA | 8409 |
| 1308 | CUCGCAGC A GGUCUGGG | 1010 | CCCAGACC CUGAUGAG GCCGUUAGGC CGAA ICUGCGAG | 8410 |
| 1313 | AGCAGGUC U GGGGCAAA | 1011 | UUUGCCCC CUGAUGAG GCCGUUAGGC CGAA IACCUGCU | 8411 |
| 1319 | UCUGGGGC A AAACUCAU | 1012 | AUGAGUUU CUGAUGAG GCCGUUAGGC CGAA ICCCCAGA | 8412 |
| 1324 | GGCAAAAC U CAUCGGGA | 1013 | UCCCGAUG CUGAUGAG GCCGUUAGGC CGAA IUUUUGCC | 8413 |
| 1326 | CAAAACUC A UCGGGACU | 1014 | AGUCCCGA CUGAUGAG GCCGUUAGGC CGAA IAGUUUUG | 8414 |
| 1334 | AUCGGGAC U GACAAUUC | 1015 | GAAUUGUC CUGAUGAG GCCGUUAGGC CGAA IUCCCGAU | 8415 |
| 1338 | GGACUGAC A AUUCUGUC | 1016 | GACAGAAU CUGAUGAG GCCGUUAGGC CGAA IUCAGUCC | 8416 |
| 1343 | GACAAUUC U GUCGUGCU | 1017 | AGCACGAC CUGAUGAG GCCGUUAGGC CGAA IAAUUGUC | 8417 |
| 1351 | UGUCGUGC U CUCCCGCA | 1018 | UGCGGGAG CUGAUGAG GCCGUUAGGC CGAA ICACGACA | 8418 |
| 1353 | UCGUGCUC U CCCGCAAA | 1019 | UUUGCGGG CUGAUGAG GCCGUUAGGC CGAA IAGCACGA | 8419 |
| 1355 | GUGCUCUC C CGCAAAUA | 1020 | UAUUUGCG CUGAUGAG GCCGUUAGGC CGAA IAGAGCAC | 8420 |
| 1356 | UGCUCUCC C GCAAAUAU | 1021 | AUAUUUGC CUGAUGAG GCCGUUAGGC CGAA IGAGAGCA | 8421 |
| 1359 | UCUCCCGC A AAUAUACA | 1022 | UGUAUAUU CUGAUGAG GCCGUUAGGC CGAA ICGGGAGA | 8422 |
| 1367 | AAAUAUAC A UCAUUUCC | 1023 | GGAAAUGA CUGAUGAG GCCGUUAGGC CGAA IUAUAUUU | 8423 |
| 1370 | UAUACAUC A UUUCCAUG | 1024 | CAUGGAAA CUGAUGAG GCCGUUAGGC CGAA IAUGUAUA | 8424 |
| 1375 | AUCAUUUC C AUGGCUGC | 1025 | GCAGCCAU CUGAUGAG GCCGUUAGGC CGAA IAAAUGAU | 8425 |
| 1376 | UCAUUUCC A UGGCUGCU | 1026 | AGCAGCCA CUGAUGAG GCCGUUAGGC CGAA IGAAAUGA | 8426 |
| 1381 | UCCAUGGC U GCUAGGCU | 1027 | AGCCUAGC CUGAUGAG GCCGUUAGGC CGAA ICCAUGGA | 8427 |
| 1384 | AUGGCUGC U AGGCUGUG | 1028 | CACAGCCU CUGAUGAG GCCGUUAGGC CGAA ICAGCCAU | 8428 |
| 1389 | UGCUAGGC U GUGCUGCC | 1029 | GGCAGCAC CUGAUGAG GCCGUUAGGC CGAA ICCUAGCA | 8429 |
| 1394 | GGCUGUGC U GCCAACUG | 1030 | CAGUUGGC CUGAUGAG GCCGUUAGGC CGAA ICACAGCC | 8430 |
| 1397 | UGUGCUGC C AACUGGAU | 1031 | AUCCAGUU CUGAUGAG GCCGUUAGGC CGAA ICAGCACA | 8431 |
| 1398 | GUGCUGCC A ACUGGAUC | 1032 | GAUCCAGU CUGAUGAG GCCGUUAGGC CGAA IGCAGCAC | 8432 |
| 1401 | CUGCCAAC U GGAUCCUA | 1033 | UAGGAUCC CUGAUGAG GCCGUUAGGC CGAA IUUGGCAG | 8433 |
| 1407 | ACUGGAUC C UACGCGGG | 1034 | CCCGCGUA CUGAUGAG GCCGUUAGGC CGAA IAUCCAGU | 8434 |
| 1408 | CUGGAUCC U ACGCGGGA | 1035 | UCCCGCGU CUGAUGAG GCCGUUAGGC CGAA IGAUCCAG | 8435 |
| 1421 | GGGACGUC C UUUGUUUA | 1036 | UAAACAAA CUGAUGAG GCCGUUAGGC CGAA IACGUCCC | 8436 |
| 1422 | GGACGUCC U UUGUUUAC | 1037 | GUAAACAA CUGAUGAG GCCGUUAGGC CGAA IGACGUCC | 8437 |
| 1434 | UUUACGUC C CGUCGGCG | 1038 | CGCCGACG CUGAUGAG GCCGUUAGGC CGAA IACGUAAA | 8438 |
| 1435 | UUACGUCC C GUCGGCGC | 1039 | GCGCCGAC CUGAUGAG GCCGUUAGGC CGAA IGACGUAA | 8439 |
| 1444 | GUCGGCGC U GAAUCCCG | 1040 | CGGGAUUC CUGAUGAG GCCGUUAGGC CGAA ICGCCGAC | 8440 |
| 1450 | GCUGAAUC C CGCGGACG | 1041 | CGUCCGCG CUGAUGAG GCCGUUAGGC CGAA IAUUCAGC | 8441 |
| 1451 | CUGAAUCC C GCGGACGA | 1042 | UCGUCCGC CUGAUGAG GCCGUUAGGC CGAA IGAUUCAG | 8442 |
| 1461 | CGGACGAC C CCUCCCGG | 1043 | CCGGGAGG CUGAUGAG GCCGUUAGGC CGAA IUCGUCCG | 8443 |
| 1462 | GGACGACC C CUCCCGGG | 1044 | CCCGGGAG CUGAUGAG GCCGUUAGGC CGAA IGUCGUCC | 8444 |
| 1463 | GACGACCC C UCCCGGGG | 1045 | CCCCGGGA CUGAUGAG GCCGUUAGGC CGAA IGGUCGUC | 8445 |
| 1464 | ACGACCCC U CCCGGGGC | 1046 | GCCCCGGG CUGAUGAG GCCGUUAGGC CGAA IGGGUCGU | 8446 |
| 1466 | GACCCCUC C CGGGGCCG | 1047 | CGGCCCCG CUGAUGAG GCCGUUAGGC CGAA IAGGGGUC | 8447 |
| 1467 | ACCCCUCC C GGGGCCGC | 1048 | GCGGCCCC CUGAUGAG GCCGUUAGGC CGAA IGAGGGGU | 8448 |
| 1473 | CCCGGGGC C GCUUGGGG | 1049 | CCCCAAGC CUGAUGAG GCCGUUAGGC CGAA ICCCCGGG | 8449 |
| 1476 | GGGGCCGC U UGGGGCUC | 1050 | GAGCCCCA CUGAUGAG GCCGUUAGGC CGAA ICGGCCCC | 8450 |
| 1483 | CUUGGGGC U CUACCGCC | 1051 | GGCGGUAG CUGAUGAG GCCGUUAGGC CGAA ICCCCAAG | 8451 |
| 1485 | UGGGGCUC U ACCGCCCG | 1052 | CGGGCGGU CUGAUGAG GCCGUUAGGC CGAA IAGCCCCA | 8452 |
| 1488 | GGCUCUAC C GCCCGCUU | 1053 | AAGCGGGC CUGAUGAG GCCGUUAGGC CGAA IUAGAGCC | 8453 |
| 1491 | UCUACCGC C CGCUUCUC | 1054 | GAGAAGCG CUGAUGAG GCCGUUAGGC CGAA ICGGUAGA | 8454 |
| 1492 | CUACCGCC C GCUUCUCC | 1055 | GGAGAAGC CUGAUGAG GCCGUUAGGC CGAA IGCGGUAG | 8455 |
| 1495 | CCGCCCGC U UCUCCGCC | 1056 | GGCGGAGA CUGAUGAG GCCGUUAGGC CGAA ICGGGCGG | 8456 |
| 1498 | CCCGCUUC U CCGCCUAU | 1057 | AUAGGCGG CUGAUGAG GCCGUUAGGC CGAA IAAGCGGG | 8457 |
| 1500 | CGCUUCUC C GCCUAUUG | 1058 | CAAUAGGC CUGAUGAG GCCGUUAGGC CGAA IAGAAGCG | 8458 |
| 1503 | UUCUCCGC C UAUUGUAC | 1059 | GUACAAUA CUGAUGAG GCCGUUAGGC CGAA ICGGAGAA | 8459 |
| 1504 | UCUCCGCC U AUUGUACC | 1060 | GGUACAAU CUGAUGAG GCCGUUAGGC CGAA IGCGGAGA | 8460 |
| 1512 | UAUUGUAC C GACCGUCC | 1061 | GGACGGUC CUGAUGAG GCCGUUAGGC CGAA IUACAAUA | 8461 |
| 1516 | GUACCGAC C GUCCACGG | 1062 | CCGUGGAC CUGAUGAG GCCGUUAGGC CGAA IUCGGUAC | 8462 |
| 1520 | CGACCGUC C ACGGGGCG | 1063 | CGCCCCGU CUGAUGAG GCCGUUAGGC CGAA IACGGUCG | 8463 |
| 1521 | GACCGUCC A CGGGGCGC | 1064 | GCGCCCCG CUGAUGAG GCCGUUAGGC CGAA IGACGGUC | 8464 |
| 1530 | CGGGGCGC A CCUCUCUU | 1065 | AAGAGAGG CUGAUGAG GCCGUUAGGC CGAA ICGCCCCG | 8465 |
| 1532 | GGGCGCAC C UCUCUUUA | 1066 | UAAAGAGA CUGAUGAG GCCGUUAGGC CGAA IUGCGCCC | 8466 |
| 1533 | GGCGCACC U CUCUUUAC | 1067 | GUAAAGAG CUGAUGAG GCCGUUAGGC CGAA IGUGCGCC | 8467 |
| 1535 | CGCACCUC U CUUUACGC | 1068 | GCGUAAAG CUGAUGAG GCCGUUAGGC CGAA IAGGUGCG | 8468 |
| 1537 | CACCUCUC U UUACGCGG | 1069 | CCGCGUAA CUGAUGAG GCCGUUAGGC CGAA IAGAGGUG | 8469 |
| 1548 | ACGCGGAC U CCCCGUCU | 1070 | AGACGGGG CUGAUGAG GCCGUUAGGC CGAA IUCCGCGU | 8470 |
| 1550 | GCGGACUC C CCGUCUGU | 1071 | ACAGACGG CUGAUGAG GCCGUUAGGC CGAA IAGUCCGC | 8471 |
| 1551 | CGGACUCC C CGUCUGUG | 1072 | CACAGACG CUGAUGAG GCCGUUAGGC CGAA IGAGUCCG | 8472 |
| 1552 | GGACUCCC C GUCUGUGC | 1073 | GCACAGAC CUGAUGAG GCCGUUAGGC CGAA IGGAGUCC | 8473 |
| 1556 | UCCCCGUC U GUGCCUUC | 1074 | GAAGGCAC CUGAUGAG GCCGUUAGGC CGAA IACGGGGA | 8474 |
| 1561 | GUCUGUGC C UUCUCAUC | 1075 | GAUGAGAA CUGAUGAG GCCGUUAGGC CGAA ICACAGAC | 8475 |
| 1562 | UCUGUGCC U UCUCAUCU | 1076 | AGAUGAGA CUGAUGAG GCCGUUAGGC CGAA IGCACAGA | 8476 |
| 1565 | GUGCCUUC U CAUCUGCC | 1077 | GGCAGAUG CUGAUGAG GCCGUUAGGC CGAA IAAGGCAC | 8477 |
| 1567 | GCCUUCUC A UCUGCCGG | 1078 | CCGGCAGA CUGAUGAG GCCGUUAGGC CGAA IAGAAGGC | 8478 |
| 1570 | UUCUCAUC U GCCGGACC | 1079 | GGUCCGGC CUGAUGAG GCCGUUAGGC CGAA IAUGAGAA | 8479 |
| 1573 | UCAUCUGC C GGACCGUG | 1080 | CACGGUCC CUGAUGAG GCCGUUAGGC CGAA ICAGAUGA | 8480 |
| 1578 | UGCCGGAC C GUGUCCAC | 1081 | GUGCACAC CUGAUGAG GCCGUUAGGC CGAA IUCCGGCA | 8481 |
| 1585 | CCGUGUGC A CUUCGCUU | 1082 | AAGCGAAG CUGAUGAG GCCGUUAGGC CGAA ICACACGG | 8482 |
| 1587 | GUGUGCAC U UCGCUUCA | 1083 | UGAAGCGA CUGAUGAG GCCGUUAGGC CGAA IUGCACAC | 8483 |
| 1592 | CACUUCGC U UCACCUCU | 1084 | AGAGGUGA CUGAUGAG GCCGUUAGGC CGAA ICGAAGUG | 8484 |
| 1595 | UUCGCUUC A CCUCUGCA | 1085 | UGCAGAGG CUGAUGAG GCCGUUAGGC CGAA IAAGCGAA | 8485 |
| 1597 | CGCUUCAC C UCUGCACG | 1086 | CGUGCAGA CUGAUGAG GCCGUUAGGC CGAA IUGAAGCG | 8486 |
| 1598 | GCUUCACC U CUGCACGU | 1087 | ACGUGCAG CUGAUGAG GCCGUUAGGC CGAA IGUGAAGC | 8487 |
| 1600 | UUCACCUC U GCACGUCG | 1088 | CGACGUGC CUGAUGAG GCCGUUAGGC CGAA IAGGUGAA | 8488 |
| 1603 | ACCUCUGC A CGUCGCAU | 1089 | AUGCGACG CUGAUGAG GCCGUUAGGC CGAA ICAGAGGU | 8489 |
| 1610 | CACGUCGC A UGGAGACC | 1090 | GGUCUCCA CUGAUGAG GCCGUUAGGC CGAA ICGACGUG | 8490 |
| 1618 | AUGGAGAC C ACCGUGAA | 1091 | UUCACGGU CUGAUGAG GCCGUUAGGC CGAA IUCUCCAU | 8491 |
| 1619 | UGGAGACC A CCGUGAAC | 1092 | GUUCACGG CUGAUGAG GCCGUUAGGC CGAA IGUCUCCA | 8492 |
| 1621 | GAGACCAC C GUGAACGC | 1093 | GCGUUCAC CUGAUGAG GCCGUUAGGC CGAA IUGGUCUC | 8493 |
| 1630 | GUGAACGC C CACAGGAA | 1094 | UUCCUGUG CUGAUGAG GCCGUUAGGC CGAA ICGUUCAC | 8494 |
| 1631 | UGAACGCC C ACAGGAAC | 1095 | GUUCCUGU CUGAUGAG GCCGUUAGGC CGAA IGCGUUCA | 8495 |
| 1632 | GAACGCCC A CAGGAACC | 1096 | GGUUCCUG CUGAUGAG GCCGUUAGGC CGAA IGGCGUUC | 8496 |
| 1634 | ACGCCCAC A GGAACCUG | 1097 | CAGGUUCC CUGAUGAG GCCGUUAGGC CGAA IUGGGCGU | 8497 |
| 1640 | ACAGGAAC C UGCCCAAG | 1098 | CUUGGGCA CUGAUGAG GCCGUUAGGC CGAA IUUCCUGU | 8498 |
| 1641 | CAGGAACC U GCCCAAGG | 1099 | CCUUGGGC CUGAUGAG GCCGUUAGGC CGAA IGUUCCUG | 8499 |
| 1644 | GAACCUGC C CAAGGUCU | 1100 | AGACCUUG CUGAUGAG GCCGUUAGGC CGAA ICAGGUUC | 8500 |
| 1645 | AACCUGCC C AAGGUCUU | 1101 | AAGACCUU CUGAUGAG GCCGUUAGGC CGAA IGCAGGUU | 8501 |
| 1646 | ACCUGCCC A AGGUCUUG | 1102 | CAAGACCU CUGAUGAG GCCGUUAGGC CGAA IGGCAGGU | 8502 |
| 1652 | CCAAGGUC U UGCAUAAG | 1103 | CUUAUGCA CUGAUGAG GCCGUUAGGC CGAA IACCUUGG | 8503 |
| 1656 | GGUCUUGC A UAAGAGGA | 1104 | UCCUCUUA CUGAUGAG GCCGUUAGGC CGAA ICAAGACC | 8504 |
| 1666 | AAGAGGAC U CUUGGACU | 1105 | AGUCCAAG CUGAUGAG GCCGUUAGGC CGAA IUCCUCUU | 8505 |
| 1668 | GAGGACUC U UGGACUUU | 1106 | AAAGUCCA CUGAUGAG GCCGUUAGGC CGAA IAGUCCUC | 8506 |
| 1674 | UCUUGGAC U UUCAGCAA | 1107 | UUGCUGAA CUGAUGAG GCCGUUAGGC CGAA IUCCAAGA | 8507 |
| 1678 | GGACUUUC A GCAAUGUC | 1108 | GACAUUGC CUGAUGAG GCCGUUAGGC CGAA IAAAGUCC | 8508 |
| 1681 | CUUUCAGC A AUGUCAAC | 1109 | GUUGACAU CUGAUGAG GCCGUUAGGC CGAA ICUGAAAG | 8509 |
| 1687 | GCAAUGUC A ACGACCGA | 1110 | UCGGUCGU CUGAUGAG GCCGUUAGGC CGAA IACAUUGC | 8510 |
| 1693 | UCAACGAC C GACCUUGA | 1111 | UCAAGGUC CUGAUGAG GCCGUUAGGC CGAA IUCGUUGA | 8511 |
| 1697 | CGACCGAC C UUGAGGCA | 1112 | UGCCUCAA CUGAUGAG GCCGUUAGGC CGAA IUCGGUCG | 8512 |
| 1698 | GACCGACC U UGAGGCAU | 1113 | AUGCCUCA CUGAUGAG GCCGUUAGGC CGAA IGUCGGUC | 8513 |
| 1705 | CUUGAGGC A UACUUCAA | 1114 | UUGAAGUA CUGAUGAG GCCGUUAGGC CGAA ICCUCAAG | 8514 |
| 1709 | AGGCAUAC U UCAAAGAC | 1115 | GUCUUUGA CUGAUGAG GCCGUUAGGC CGAA IUAUGCCU | 8515 |
| 1712 | CAUACUUC A AAGACUGU | 1116 | ACAGUCUU CUGAUGAG GCCGUUAGGC CGAA IAAGUAUG | 8516 |
| 1718 | UCAAAGAC U GUGUGUUU | 1117 | AAACACAC CUGAUGAG GCCGUUAGGC CGAA IUCUUUGA | 8517 |
| 1769 | UAAAGGUC U UUGUACUA | 1118 | UAGUACAA CUGAUGAG GCCGUUAGGC CGAA IACCUUUA | 8518 |
| 1776 | CUUUGUAC U AGGAGGCU | 1119 | AGCCUCCU CUGAUGAG GCCGUUAGGC CGAA IUACAAAG | 8519 |
| 1784 | UAGGAGGC U GUAGGCAU | 1120 | AUGCCUAC CUGAUGAG GCCGUUAGGC CGAA ICCUCCUA | 8520 |
| 1791 | CUGUAGGC A UAAAUUGG | 1121 | CCAAUUUA CUGAUGAG GCCGUUAGGC CGAA ICCUACAG | 8521 |
| 1807 | GUGUGUUC A CCAGCACC | 1122 | GGUGCUGG CUGAUGAG GCCGUUAGGC CGAA IAACACAC | 8522 |
| 1809 | GUGUUCAC C AGCACCAU | 1123 | AUGGUGCU CUGAUGAG GCCGUUAGGC CGAA IUGAACAC | 8523 |
| 1810 | UGUUCACC A GCACCAUG | 1124 | CAUGGUGC CUGAUGAG GCCGUUAGGC CGAA IGUGAACA | 8524 |
| 1813 | UCACCAGC A CCAUGCAA | 1125 | UUGCAUGG CUGAUGAG GCCGUUAGGC CGAA ICUGGUGA | 8525 |
| 1815 | ACCAGCAC C AUGCAACU | 1126 | AGUUGCAU CUGAUGAG GCCGUUAGGC CGAA IUGCUGGU | 8526 |
| 1816 | CCAGCACC A UGCAACUU | 1127 | AAGUUGCA CUGAUGAG GCCGUUAGGC CGAA IGUGCUGG | 8527 |
| 1820 | CACCAUGC A ACUUUUUC | 1128 | GAAAAAGU CUGAUGAG GCCGUUAGGC CGAA ICAUGGUG | 8528 |
| 1823 | CAUGCAAC U UUUUCACC | 1129 | GGUGAAAA CUGAUGAG GCCGUUAGGC CGAA IUUGCAUG | 8529 |
| 1829 | ACUUUUUC A CCUCUGCC | 1130 | GGCAGAGG CUGAUGAG GCCGUUAGGC CGAA IAAAAAGU | 8530 |
| 1831 | UUUUUCAC C UCUGCCUA | 1131 | UAGGCAGA CUGAUGAG GCCGUUAGGC CGAA IUGAAAAA | 8531 |
| 1832 | UUUUCACC U CUGCCUAA | 1132 | UUAGGCAG CUGAUGAG GCCGUUAGGC CGAA IGUGAAAA | 8532 |
| 1834 | UUCACCUC U GCCUAAUC | 1133 | GAUUAGGC CUGAUGAG GCCGUUAGGC CGAA IAGGUGAA | 8533 |
| 1837 | ACCUCUGC C UAAUCAUC | 1134 | GAUGAUUA CUGAUGAG GCCGUUAGGC CGAA ICAGAGGU | 8534 |
| 1838 | CCUCUGCC U AAUCAUCU | 1135 | AGAUGAUU CUGAUGAG GCCGUUAGGC CGAA IGCAGAGG | 8535 |
| 1843 | GCCUAAUC A UCUCAUGU | 1136 | ACAUGAGA CUGAUGAG GCCGUUAGGC CGAA IAUUAGGC | 8536 |
| 1846 | UAAUCAUC U CAUGUUCA | 1137 | UGAACAUG CUGAUGAG GCCGUUAGGC CGAA IAUGAUUA | 8537 |
| 1848 | AUCAUCUC A UGUUCAUG | 1138 | CAUGAACA CUGAUGAG GCCGUUAGGC CGAA IAGAUGAU | 8538 |
| 1854 | UCAUGUUC A UGUCCUAC | 1139 | GUAGGACA CUGAUGAG GCCGUUAGGC CGAA IAACAUGA | 8539 |
| 1859 | UUCAUGUC C UACUGUUC | 1140 | GAACAGUA CUGAUGAG GCCGUUAGGC CGAA IACAUGAA | 8540 |
| 1860 | UCAUGUCC U ACUGUUCA | 1141 | UGAACAGU CUGAUGAG GCCGUUAGGC CGAA IGACAUGA | 8541 |
| 1863 | UGUCCUAC U GUUCAAGC | 1142 | GCUUGAAC CUGAUGAG GCCGUUAGGC CGAA IUAGGACA | 8542 |
| 1868 | UACUGUUC A AGCCUCCA | 1143 | UGGAGGCU CUGAUGAG GCCGUUAGGC CGAA IAACAGUA | 8543 |
| 1872 | GUUCAAGC C UCCAAGCU | 1144 | AGCUUGGA CUGAUGAG GCCGUUAGGC CGAA ICUUGAAC | 8544 |
| 1873 | UUCAAGCC U CCAAGCUG | 1145 | CAGCUUGG CUGAUGAG GCCGUUAGGC CGAA IGCUUGAA | 8545 |
| 1875 | CAAGCCUC C AAGCUGUG | 1146 | CACAGCUU CUGAUGAG GCCGUUAGGC CGAA IAGGCUUG | 8546 |
| 1876 | AAGCCUCC A AGCUGUGC | 1147 | GCACAGCU CUGAUGAG GCCGUUAGGC CGAA IGAGGCUU | 8547 |
| 1880 | CUCCAAGC U GUGCCUUG | 1148 | CAAGGCAC CUGAUGAG GCCGUUAGGC CGAA ICUUGGAG | 8548 |
| 1885 | AGCUGUGC C UUGGGUGG | 1149 | CCACCCAA CUGAUGAG GCCGUUAGGC CGAA ICACAGCU | 8549 |
| 1886 | GCUGUGCC U UGGGUGGC | 1150 | GCCACCCA CUGAUGAG GCCGUUAGGC CGAA IGCACAGC | 8550 |
| 1895 | UGGGUGGC U UUGGGGCA | 1151 | UGCCCCAA CUGAUGAG GCCGUUAGGC CGAA ICCACCCA | 8551 |
| 1903 | UUUGGGGC A UGGACAUU | 1152 | AAUGUCCA CUGAUGAG GCCGUUAGGC CGAA ICCCCAAA | 8552 |
| 1909 | GCAUGGAC A UUGACCCG | 1153 | CGGGUCAA CUGAUGAG GCCGUUAGGC CGAA IUCCAUGC | 8553 |
| 1915 | ACAUUGAC C CGUAUAAA | 1154 | UUUAUACG CUGAUGAG GCCGUUAGGC CGAA IUCAAUGU | 8554 |
| 1916 | CAUUGACC C GUAUAAAG | 1155 | CUUUAUAC CUGAUGAG GCCGUUAGGC CGAA IGUCAAUG | 8555 |
| 1935 | UUUGGAGC U UCUGUGGA | 1156 | UCCACAGA CUGAUGAG GCCGUUAGGC CGAA ICUCCAAA | 8556 |
| 1938 | GGAGCUUC U GUGGAGUU | 1157 | AACUCCAC CUGAUGAG GCCGUUAGGC CGAA IAAGCUCC | 8557 |
| 1949 | GGAGUUAC U CUCUUUUU | 1158 | AAAAAGAG CUGAUGAG GCCGUUAGGC CGAA IUAACUCC | 8558 |
| 1951 | AGUUACUC U CUUUUUUG | 1159 | CAAAAAAG CUGAUGAG GCCGUUAGGC CGAA IAGUAACU | 8559 |
| 1953 | UUACUCUC U UUUUUGCC | 1160 | GGCAAAAA CUGAUGAG GCCGUUAGGC CGAA IAGAGUAA | 8560 |
| 1961 | UUUUUUGC C UUCUGACU | 1161 | AGUCAGAA CUGAUGAG GCCGUUAGGC CGAA ICAAAAAA | 8561 |
| 1962 | UUUUUGCC U UCUGACUU | 1162 | AAGUCAGA CUGAUGAG GCCGUUAGGC CGAA IGCAAAAA | 8562 |
| 1965 | UUGCCUUC U GACUUCUU | 1163 | AAGAAGUC CUGAUGAG GCCGUUAGGC CGAA IAAGGCAA | 8563 |
| 1969 | CUUCUGAC U UCUUUCCU | 1164 | AGGAAAGA CUGAUGAG GCCGUUAGGC CGAA IUCAGAAG | 8564 |
| 1972 | CUGACUUC U UUCCUUCU | 1165 | AGAAGGAA CUGAUGAG GCCGUUAGGC CGAA IAAGUCAG | 8565 |
| 1976 | CUUCUUUC C UUCUAUUC | 1166 | GAAUAGAA CUGAUGAG GCCGUUAGGC CGAA IAAAGAAG | 8566 |
| 1977 | UUCUUUCC U UCUAUUCG | 1167 | CGAAUAGA CUGAUGAG GCCGUUAGGC CGAA IGAAAGAA | 8567 |
| 1980 | UUUCCUUC U AUUCGAGA | 1168 | UCUCGAAU CUGAUGAG GCCGUUAGGC CGAA IAAGGAAA | 8568 |
| 1991 | UCGAGAUC U CCUCGACA | 1169 | UGUCGAGG CUGAUGAG GCCGUUAGGC CGAA IAUCUCGA | 8569 |
| 1993 | GAGAUCUC C UCGACACC | 1170 | GGUGUCGA CUGAUGAG GCCGUUAGGC CGAA IAGAUCUC | 8570 |
| 1994 | AGAUCUCC U CGACACCG | 1171 | CGGUGUCG CUGAUGAG GCCGUUAGGC CGAA IGAGAUCU | 8571 |
| 1999 | UCCUCGAC A CCGCCUCU | 1172 | AGAGGCGG CUGAUGAG GCCGUUAGGC CGAA IUCGAGGA | 8572 |
| 2001 | CUCGACAC C GCCUCUGC | 1173 | GCAGAGGC CUGAUGAG GCCGUUAGGC CGAA IUGUCGAG | 8573 |
| 2004 | GACACCGC C UCUGCUCU | 1174 | AGAGCAGA CUGAUGAG GCCGUUAGGC CGAA ICGGUGUC | 8574 |
| 2005 | ACACCGCC U CUGCUCUG | 1175 | CAGAGCAG CUGAUGAG GCCGUUAGGC CGAA IGCGGUGU | 8575 |
| 2007 | ACCGCCUC U GCUCUGUA | 1176 | UACAGAGC CUGAUGAG GCCGUUAGGC CGAA IAGGCGGU | 8576 |
| 2010 | GCCUCUGC U CUGUAUCG | 1177 | CGAUACAG CUGAUGAG GCCGUUAGGC CGAA ICAGAGGC | 8577 |
| 2012 | CUCUGCUC U GUAUCGGG | 1178 | CCCGAUAC CUGAUGAG GCCGUUAGGC CGAA IAGCAGAG | 8578 |
| 2025 | CGGGGGGC C UUAGAGUC | 1179 | GACUCUAA CUGAUGAG GCCGUUAGGC CGAA ICCCCCCG | 8579 |
| 2026 | GGGGGGCC U UAGAGUCU | 1180 | AGACUCUA CUGAUGAG GCCGUUAGGC CGAA IGCCCCCC | 8580 |
| 2034 | UUAGAGUC U CCGGAACA | 1181 | UGUUCCGG CUGAUGAG GCCGUUAGGC CGAA IACUCUAA | 8581 |
| 2036 | AGAGUCUC C GGAACAUU | 1182 | AAUGUUCC CUGAUGAG GCCGUUAGGC CGAA IAGACUCU | 8582 |
| 2042 | UCCGGAAC A UUGUUCAC | 1183 | GUGAACAA CUGAUGAG GCCGUUAGGC CGAA IUUCCGGA | 8583 |
| 2049 | CAUUGUUC A CCUCACCA | 1184 | UGGUGAGG CUGAUGAG GCCGUUAGGC CGAA IAACAAUG | 8584 |
| 2051 | UUGUUCAC C UCACCAUA | 1185 | UAUGGUGA CUGAUGAG GCCGUUAGGC CGAA IUGAACAA | 8585 |
| 2052 | UGUUCACC U CACCAUAC | 1186 | GUAUGGUG CUGAUGAG GCCGUUAGGC CGAA IGUGAACA | 8586 |
| 2054 | UUCACCUC A CCAUACGG | 1187 | CCGUAUGG CUGAUGAG GCCGUUAGGC CGAA IAGGUGAA | 8587 |
| 2056 | CACCUCAC C AUACGGCA | 1188 | UGCCGUAU CUGAUGAG GCCGUUAGGC CGAA IUGAGGUG | 8588 |
| 2057 | ACCUCACC A UACGGCAC | 1189 | GUGCCGUA CUGAUGAG GCCGUUAGGC CGAA IGUGAGGU | 8589 |
| 2064 | CAUACGGC A CUCAGGCA | 1190 | UGCCUGAG CUGAUGAG GCCGUUAGGC CGAA ICCGUAUG | 8590 |
| 2066 | UACGGCAC U CAGGCAAG | 1191 | CUUGCCUG CUGAUGAG GCCGUUAGGC CGAA IUGCCGUA | 8591 |
| 2068 | CGGCACUC A GGCAAGCU | 1192 | AGCUUGCC CUGAUGAG GCCGUUAGGC CGAA IAGUGCCG | 8592 |
| 2072 | ACUCAGGC A AGCUAUUC | 1193 | GAAUAGCU CUGAUGAG GCCGUUAGGC CGAA ICCUGAGU | 8593 |
| 2076 | AGGCAAGC U AUUCUGUG | 1194 | CACAGAAU CUGAUGAG GCCGUUAGGC CGAA ICUUGCCU | 8594 |
| 2081 | AGCUAUUC U GUGUUGGG | 1195 | CCCAACAC CUGAUGAG GCCGUUAGGC CGAA IAAUAGCU | 8595 |
| 2105 | GAUGAAUC U AGCCACCU | 1196 | AGGUGGCU CUGAUGAG GCCGUUAGGC CGAA IAUUCAUC | 8596 |
| 2109 | AAUCUAGC C ACCUGGGU | 1197 | ACCCAGGU CUGAUGAG GCCGUUAGGC CGAA ICUAGAUU | 8597 |
| 2110 | AUCUAGCC A CCUGGGUG | 1198 | CACCCAGG CUGAUGAG GCCGUUAGGC CGAA IGCUAGAU | 8598 |
| 2112 | CUAGCCAC C UGGGUGGG | 1199 | CCCACCCA CUGAUGAG GCCGUUAGGC CGAA IUGGCUAG | 8599 |
| 2113 | UAGCCACC U GGGUGGGA | 1200 | UCCCACCC CUGAUGAG GCCGUUAGGC CGAA IGUGGCUA | 8600 |
| 2138 | GGAAGAUC C AGCAUCCA | 1201 | UGGAUGCU CUGAUGAG GCCGUUAGGC CGAA IAUCUUCC | 8601 |
| 2139 | GAAGAUCC A GCAUCCAG | 1202 | CUGGAUGC CUGAUGAG GCCGUUAGGC CGAA IGAUCUUC | 8602 |
| 2142 | GAUCCAGC A UCCAGGGA | 1203 | UCCCUGGA CUGAUGAG GCCGUUAGGC CGAA ICUGGAUC | 8603 |
| 2145 | CCAGCAUC C AGGGAAUU | 1204 | AAUUCCCU CUGAUGAG GCCGUUAGGC CGAA IAUGCUGG | 8604 |
| 2146 | CAGCAUCC A GGGAAUUA | 1205 | UAAUUCCC CUGAUGAG GCCGUUAGGC CGAA IGAUGCUG | 8605 |
| 2161 | UAGUAGUC A GCUAUGUC | 1206 | GACAUAGC CUGAUGAG GCCGUUAGGC CGAA IACUACUA | 8606 |
| 2164 | UAGUCAGC U AUGUCAAC | 1207 | GUUGACAU CUGAUGAG GCCGUUAGGC CGAA ICUGACUA | 8607 |
| 2170 | GCUAUGUC A ACGUUAAU | 1208 | AUUAACGU CUGAUGAG GCCGUUAGGC CGAA IACAUAGC | 8608 |
| 2185 | AUAUGGGC C UAAAAAUC | 1209 | GAUUUUUA CUGAUGAG GCCGUUAGGC CGAA ICCCAUAU | 8609 |
| 2186 | UAUGGGCC U AAAAAUCA | 1210 | UGAUUUUU CUGAUGAG GCCGUUAGGC CGAA IGCCCAUA | 8610 |
| 2194 | UAAAAAUC A GACAACUA | 1211 | UAGUUGUC CUGAUGAG GCCGUUAGGC CGAA IAUUUUUA | 8611 |
| 2198 | AAUCAGAC A ACUAUUGU | 1212 | ACAAUAGU CUGAUGAG GCCGUUAGGC CGAA IUCUGAUU | 8612 |
| 2201 | CAGACAAC U AUUGUGGU | 1213 | ACCACAAU CUGAUGAG GCCGUUAGGC CGAA IUUGUCUG | 8613 |
| 2213 | GUGGUUUC A CAUUUCCU | 1214 | AGGAAAUG CUGAUGAG GCCGUUAGGC CGAA IAAACCAC | 8614 |
| 2215 | GGUUUCAC A UUUCCUGU | 1215 | ACAGGAAA CUGAUGAG GCCGUUAGGC CGAA IUGAAACC | 8615 |
| 2220 | CACAUUUC C UGUCUUAC | 1216 | GUAAGACA CUGAUGAG GCCGUUAGGC CGAA IAAAUGUG | 8616 |
| 2221 | ACAUUUCC U GUCUUACU | 1217 | AGUAAGAC CUGAUGAG GCCGUUAGGC CGAA IGAAAUGU | 8617 |
| 2225 | UUCCUGUC U UACUUUUG | 1218 | CAAAAGUA CUGAUGAG GCCGUUAGGC CGAA IACAGGAA | 8618 |
| 2229 | UGUCUUAC U UUUGGGCG | 1219 | CGCCCAAA CUGAUGAG GCCGUUAGGC CGAA IUAAGACA | 8619 |
| 2244 | CGAGAAAC U GUUCUUGA | 1220 | UCAAGAAC CUGAUGAG GCCGUUAGGC CGAA IUUUCUCG | 8620 |
| 2249 | AACUGUUC U UGAAUAUU | 1221 | AAUAUUCA CUGAUGAG GCCGUUAGGC CGAA IAACAGUU | 8621 |
| 2265 | UUGGUGUC U UUUGGAGU | 1222 | ACUCCAAA CUGAUGAG GCCGUUAGGC CGAA IACACCAA | 8622 |
| 2284 | GGAUUCGC A CUCCUCCU | 1223 | AGGAGGAG CUGAUGAG GCCGUUAGGC CGAA ICGAAUCC | 8623 |
| 2286 | AUUCGCAC U CCUCCUGC | 1224 | GCAGGAGG CUGAUGAG GCCGUUAGGC CGAA IUGCGAAU | 8624 |
| 2288 | UCGCACUC C UCCUGCAU | 1225 | AUGCAGGA CUGAUGAG GCCGUUAGGC CGAA IAGUGCGA | 8625 |
| 2289 | CGCACUCC U CCUGCAUA | 1226 | UAUGCAGG CUGAUGAG GCCGUUAGGC CGAA IGAGUGCG | 8626 |
| 2291 | CACUCCUC C UGCAUAUA | 1227 | UAUAUGCA CUGAUGAG GCCGUUAGGC CGAA IAGGAGUG | 8627 |
| 2292 | ACUCCUCC U GCAUAUAG | 1228 | CUAUAUGC CUGAUGAG GCCGUUAGGC CGAA IGAGGAGU | 8628 |
| 2295 | CCUCCUGC A UAUAGACC | 1229 | GGUCUAUA CUGAUGAG GCCGUUAGGC CGAA ICAGGAGG | 8629 |
| 2303 | AUAUAGAC C ACCAAAUG | 1230 | CAUUUGGU CUGAUGAG GCCGUUAGGC CGAA IUCUAUAU | 8630 |
| 2304 | UAUAGACC A CCAAAUGC | 1231 | GCAUUUGG CUGAUGAG GCCGUUAGGC CGAA IGUCUAUA | 8631 |
| 2306 | UAGACCAC C AAAUGCCC | 1232 | GGGCAUUU CUGAUGAG GCCGUUAGGC CGAA IUGGUCUA | 8632 |
| 2307 | AGACCACC A AAUGCCCC | 1233 | GGGGCAUU CUGAUGAG GCCGUUAGGC CGAA IGUGGUCU | 8633 |
| 2313 | CCAAAUGC C CCUAUCUU | 1234 | AAGAUAGG CUGAUGAG GCCGUUAGGC CGAA ICAUUUGG | 8634 |
| 2314 | CAAAUGCC C CUAUCUUA | 1235 | UAAGAUAG CUGAUGAG GCCGUUAGGC CGAA IGCAUUUG | 8635 |
| 2315 | AAAUGCCC C UAUCUUAU | 1236 | AUAAGAUA CUGAUGAG GCCGUUAGGC CGAA IGGCAUUU | 8636 |
| 2316 | AAUGCCCC U AUCUUAUC | 1237 | GAUAAGAU CUGAUGAG GCCGUUAGGC CGAA IGGGCAUU | 8637 |
| 2320 | CCCCUAUC U UAUCAACA | 1238 | UGUUGAUA CUGAUGAG GCCGUUAGGC CGAA IAUAGGGG | 8638 |
| 2325 | AUCUUAUC A ACACUUCC | 1239 | GGAAGUGU CUGAUGAG GCCGUUAGGC CGAA IAUAAGAU | 8639 |
| 2328 | UUAUCAAC A CUUCCGGA | 1240 | UCCGGAAG CUGAUGAG GCCGUUAGGC CGAA IUUGAUAA | 8640 |
| 2330 | AUCAACAC U UCCGGAAA | 1241 | UUUCCGGA CUGAUGAG GCCGUUAGGC CGAA IUGUUGAU | 8641 |
| 2333 | AACACUUC C GGAAACUA | 1242 | UAGUUUCC CUGAUGAG GCCGUUAGGC CGAA IAAGUGUU | 8642 |
| 2340 | CCGGAAAC U ACUGUUGU | 1243 | ACAACAGU CUGAUGAG GCCGUUAGGC CGAA IUUUCCGG | 8643 |
| 2343 | GAAACUAC U GUUGUUAG | 1244 | CUAACAAC CUGAUGAG GCCGUUAGGC CGAA IUAGUUUC | 8644 |
| 2362 | GAAGAGGC A GGUCCCCU | 1245 | AGGGGACC CUGAUGAG GCCGUUAGGC CGAA ICCUCUUC | 8645 |
| 2367 | GGCAGGUC C CCUAGAAG | 1246 | CUUCUAGG CUGAUGAG GCCGUUAGGC CGAA IACCUGCC | 8646 |
| 2368 | GCAGGUCC C CUAGAAGA | 1247 | UCUUCUAG CUGAUGAG GCCGUUAGGC CGAA IGACCUGC | 8647 |
| 2369 | CAGGUCCC C UAGAAGAA | 1248 | UUCUUCUA CUGAUGAG GCCGUUAGGC CGAA IGGACCUG | 8648 |
| 2370 | AGGUCCCC U AGAAGAAG | 1249 | CUUCUUCU CUGAUGAG GCCGUUAGGC CGAA IGGGACCU | 8649 |
| 2382 | AGAAGAAC U CCCUCGCC | 1250 | GGCGAGGG CUGAUGAG GCCGUUAGGC CGAA IUUCUUCU | 8650 |
| 2384 | AAGAACUC C CUCGCCUC | 1251 | GAGGCGAG CUGAUGAG GCCGUUAGGC CGAA IAGUUCUU | 8651 |
| 2385 | AGAACUCC C UCGCCUCG | 1252 | CGAGGCGA CUGAUGAG GCCGUUAGGC CGAA IGAGUUCU | 8652 |
| 2386 | GAACUCCC U CGCCUCGC | 1253 | GCGAGGCG CUGAUGAG GCCGUUAGGC CGAA IGGAGUUC | 8653 |
| 2390 | UCCCUCGC C UCGCAGAC | 1254 | GUCUGCGA CUGAUGAG GCCGUUAGGC CGAA ICGAGGGA | 8654 |
| 2391 | CCCUCGCC U CGCAGACG | 1255 | CGUCUGCG CUGAUGAG GCCGUUAGGC CGAA IGCGAGGG | 8655 |
| 2395 | CGCCUCGC A GACGAAGG | 1256 | CCUUCGUC CUGAUGAG GCCGUUAGGC CGAA ICGAGGCG | 8656 |
| 2406 | CGAAGGUC U CAAUCGCC | 1257 | GGCGAUUG CUGAUGAG GCCGUUAGGC CGAA IACCUUCG | 8657 |
| 2408 | AAGGUCUC A AUCGCCGC | 1258 | GCGGCGAU CUGAUGAG GCCGUUAGGC CGAA IAGACCUU | 8658 |
| 2414 | UCAAUCGC C GCGUCGCA | 1259 | UGCGACGC CUGAUGAG GCCGUUAGGC CGAA ICGAUUGA | 8659 |
| 2422 | CGCGUCGC A GAAGAUCU | 1260 | AGAUCUUC CUGAUGAG GCCGUUAGGC CGAA ICGACGCG | 8660 |
| 2430 | AGAAGAUC U CAAUCUCG | 1261 | CGAGAUUG CUGAUGAG GCCGUUAGGC CGAA IAUCUUCU | 8661 |
| 2432 | AAGAUCUC A AUCUCGGG | 1262 | CCCGAGAU CUGAUGAG GCCGUUAGGC CGAA IAGAUCUU | 8662 |
| 2436 | UCUCAAUC U CGGGAAUC | 1263 | GAUUCCCG CUGAUGAG GCCGUUAGGC CGAA IAUUGAGA | 8663 |
| 2445 | CGGGAAUC U CAAUGUUA | 1264 | UAACAUUG CUGAUGAG GCCGUUAGGC CGAA IAUUCCCG | 8664 |
| 2447 | GGAAUCUC A AUGUUAGU | 1265 | ACUAACAU CUGAUGAG GCCGUUAGGC CGAA IAGAUUCC | 8665 |
| 2460 | UAGUAUUC C UUGGACAC | 1266 | GUGUCCAA CUGAUGAG GCCGUUAGGC CGAA IAAUACUA | 8666 |
| 2461 | AGUAUUCC U UGGACACA | 1267 | UGUGUCCA CUGAUGAG GCCGUUAGGC CGAA IGAAUACU | 8667 |
| 2467 | CCUUGGAC A CAUAAGGU | 1268 | ACCUUAUG CUGAUGAG GCCGUUAGGC CGAA IUCCAAGG | 8668 |
| 2469 | UUGGACAC A UAAGGUGG | 1269 | CCACCUUA CUGAUGAG GCCGUUAGGC CGAA IUGUCCAA | 8669 |
| 2483 | UGGGAAAC U UUACGGGG | 1270 | CCCCGUAA CUGAUGAG GCCGUUAGGC CGAA IUUUCCCA | 8670 |
| 2493 | UACGGGGC U UUAUUCUU | 1271 | AAGAAUAA CUGAUGAG GCCGUUAGGC CGAA ICCCCGUA | 8671 |
| 2500 | CUUUAUUC U UCUACGGU | 1272 | ACCGUAGA CUGAUGAG GCCGUUAGGC CGAA IAAUAAAG | 8672 |
| 2503 | UAUUCUUC U ACGGUACC | 1273 | GGUACCGU CUGAUGAG GCCGUUAGGC CGAA IAAGAAUA | 8673 |
| 2511 | UACGGUAC C UUGCUUUA | 1274 | UAAAGCAA CUGAUGAG GCCGUUAGGC CGAA IUACCGUA | 8674 |
| 2512 | ACGGUACC U UGCUUUAA | 1275 | UUAAAGCA CUGAUGAG GCCGUUAGGC CGAA IGUACCGU | 8675 |
| 2516 | UACCUUGC U UUAAUCCU | 1276 | AGGAUUAA CUGAUGAG GCCGUUAGGC CGAA ICAAGGUA | 8676 |
| 2523 | CUUUAAUC C UAAAUGGC | 1277 | GCCAUUUA CUGAUGAG GCCGUUAGGC CGAA IAUUAAAG | 8677 |
| 2524 | UUUAAUCC U AAAUGGCA | 1278 | UGCCAUUU CUGAUGAG GCCGUUAGGC CGAA IGAUUAAA | 8678 |
| 2532 | UAAAUGGC A AACUCCUU | 1279 | AAGGAGUU CUGAUGAG GCCGUUAGGC CGAA ICCAUUUA | 8679 |
| 2536 | UGGCAAAC U CCUUCUUU | 1280 | AAAGAAGG CUGAUGAG GCCGUUAGGC CGAA IUUUGCCA | 8680 |
| 2538 | GCAAACUC C UUCUUUUC | 1281 | GAAAAGAA CUGAUGAG GCCGUUAGGC CGAA IAGUUUGC | 8681 |
| 2539 | CAAACUCC U UCUUUUCC | 1282 | GGAAAAGA CUGAUGAG GCCGUUAGGC CGAA IGAGUUUG | 8682 |
| 2542 | ACUCCUUC U UUUCCUGA | 1283 | UCAGGAAA CUGAUGAG GCCGUUAGGC CGAA IAAGGAGU | 8683 |
| 2547 | UUCUUUUC C UGACAUUC | 1284 | GAAUGUCA CUGAUGAG GCCGUUAGGC CGAA IAAAAGAA | 8684 |
| 2548 | UCUUUUCC U GACAUUCA | 1285 | UGAAUGUC CUGAUGAG GCCGUUAGGC CGAA IGAAAAGA | 8685 |
| 2552 | UUCCUGAC A UUCAUUUG | 1286 | CAAAUGAA CUGAUGAG GCCGUUAGGC CGAA IUCAGGAA | 8686 |
| 2556 | UGACAUUC A UUUGCAGG | 1287 | CCUGCAAA CUGAUGAG GCCGUUAGGC CGAA IAAUGUCA | 8687 |
| 2562 | UCAUUUGC A GGAGGACA | 1288 | UGUCCUCC CUGAUGAG GCCGUUAGGC CGAA ICAAAUGA | 8688 |
| 2570 | AGGAGGAC A UUGUUGAU | 1289 | AUCAACAA CUGAUGAG GCCGUUAGGC CGAA IUCCUCCU | 8689 |
| 2589 | AUGUAAGC A AUUUGUGG | 1290 | CCACAAAU CUGAUGAG GCCGUUAGGC CGAA ICUUACAU | 8690 |
| 2601 | UGUGGGGC C CCUUACAG | 1291 | CUGUAAGG CUGAUGAG GCCGUUAGGC CGAA ICCCCACA | 8691 |
| 2602 | GUGGGGCC C CUUACAGU | 1292 | ACUGUAAG CUGAUGAG GCCGUUAGGC CGAA IGCCCCAC | 8692 |
| 2603 | UGGGGCCC C UUACAGUA | 1293 | UACUGUAA CUGAUGAG GCCGUUAGGC CGAA IGGCCCCA | 8693 |
| 2604 | GGGGCCCC U UACAGUAA | 1294 | UUACUGUA CUGAUGAG GCCGUUAGGC CGAA IGGGCCCC | 8694 |
| 2608 | CCCCUUAC A GUAAAUGA | 1295 | UCAUUUAC CUGAUGAG GCCGUUAGGC CGAA IUAAGGGG | 8695 |
| 2621 | AUGAAAAC A GGAGACUU | 1296 | AAGUCUCC CUGAUGAG GCCGUUAGGC CGAA IUUUUCAU | 8696 |
| 2628 | CAGGAGAC U UAAAUUAA | 1297 | UUAAUUUA CUGAUGAG GCCGUUAGGC CGAA IUCUCCUG | 8697 |
| 2638 | AAAUUAAC U AUGCCUGC | 1298 | GCAGGCAU CUGAUGAG GCCGUUAGGC CGAA IUUAAUUU | 8698 |
| 2643 | AACUAUGC C UGCUAGGU | 1299 | ACCUAGCA CUGAUGAG GCCGUUAGGC CGAA ICAUAGUU | 8699 |
| 2644 | ACUAUGCC U GCUAGGUU | 1300 | AACCUAGC CUGAUGAG GCCGUUAGGC CGAA IGCAUAGU | 8700 |
| 2647 | AUGCCUGC U AGGUUUUA | 1301 | UAAAACCU CUGAUGAG GCCGUUAGGC CGAA ICAGGCAU | 8701 |
| 2658 | GUUUUAUC C CAAUGUUA | 1302 | UAACAUUG CUGAUGAG GCCGUUAGGC CGAA IAUAAAAC | 8702 |
| 2659 | UUUUAUCC C AAUGUUAC | 1303 | GUAACAUU CUGAUGAG GCCGUUAGGC CGAA IGAUAAAA | 8703 |
| 2660 | UUUAUCCC A AUGUUACU | 1304 | AGUAACAU CUGAUGAG GCCGUUAGGC CGAA IGGAUAAA | 8704 |
| 2668 | AAUGUUAC U AAAUAUUU | 1305 | AAAUAUUU CUGAUGAG GCCGUUAGGC CGAA IUAACAUU | 8705 |
| 2679 | AUAUUUGC C CUUAGAUA | 1306 | UAUCUAAG CUGAUGAG GCCGUUAGGC CGAA ICAAAUAU | 8706 |
| 2680 | UAUUUGCC C UUAGAUAA | 1307 | UUAUCUAA CUGAUGAG GCCGUUAGGC CGAA IGCAAAUA | 8707 |
| 2681 | AUUUGCCC U UAGAUAAA | 1308 | UUUAUCUA CUGAUGAG GCCGUUAGGC CGAA IGGCAAAU | 8708 |
| 2696 | AAGGGAUC A AACCGUAU | 1309 | AUACGGUU CUGAUGAG GCCGUUAGGC CGAA IAUCCCUU | 8709 |
| 2700 | GAUCAAAC C GUAUUAUC | 1310 | GAUAAUAC CUGAUGAG GCCGUUAGGC CGAA IUUUGAUC | 8710 |
| 2709 | GUAUUAUC C AGAGUAUG | 1311 | CAUACUCU CUGAUGAG GCCGUUAGGC CGAA IAUAAUAC | 8711 |
| 2710 | UAUUAUCC A GAGUAUGU | 1312 | ACAUACUC CUGAUGAG GCCGUUAGGC CGAA IGAUAAUA | 8712 |
| 2727 | AGUUAAUC A UUACUUCC | 1313 | GGAAGUAA CUGAUGAG GCCGUUAGGC CGAA IAUUAACU | 8713 |
| 2732 | AUCAUUAC U UCCAGACG | 1314 | CGUCUGGA CUGAUGAG GCCGUUAGGC CGAA IUAAUGAU | 8714 |
| 2735 | AUUACUUC C AGACGCGA | 1315 | UCGCGUCU CUGAUGAG GCCGUUAGGC CGAA IAAGUAAU | 8715 |
| 2736 | UUACUUCC A GACGCGAC | 1316 | GUCGCGUC CUGAUGAG GCCGUUAGGC CGAA IGAAGUAA | 8716 |
| 2745 | GACGCGAC A UUAUUUAC | 1317 | GUAAAUAA CUGAUGAG GCCGUUAGGC CGAA IUCGCGUC | 8717 |
| 2754 | UUAUUUAC A CACUCUUU | 1318 | AAAGAGUG CUGAUGAG GCCGUUAGGC CGAA IUAAAUAA | 8718 |
| 2756 | AUUUACAC A CUCUUUGG | 1319 | CCAAAGAG CUGAUGAG GCCGUUAGGC CGAA IUGUAAAU | 8719 |
| 2758 | UUACACAC U CUUUGGAA | 1320 | UUCCAAAG CUGAUGAG GCCGUUAGGC CGAA IUGUGUAA | 8720 |
| 2760 | ACACACUC U UUGGAAGG | 1321 | CCUUCCAA CUGAUGAG GCCGUUAGGC CGAA IAGUGUGU | 8721 |
| 2777 | CGGGGAUC U UAUAUAAA | 1322 | UUUAUAUA CUGAUGAG GCCGUUAGGC CGAA IAUCCCCG | 8722 |
| 2794 | AGAGAGUC C ACACGUAG | 1323 | CUACGUGU CUGAUGAG GCCGUUAGGC CGAA IACUCUCU | 8723 |
| 2795 | GAGAGUCC A CACGUAGC | 1324 | GCUACGUG CUGAUGAG GCCGUUAGGC CGAA IGACUCUC | 8724 |
| 2797 | GAGUCCAC A CGUAGCGC | 1325 | GCGCUACG CUGAUGAG GCCGUUAGGC CGAA IUGGACUC | 8725 |
| 2806 | CGUAGCGC C UCAUUUUG | 1326 | CAAAAUGA CUGAUGAG GCCGUUAGGC CGAA ICGCUACG | 8726 |
| 2807 | GUAGCGCC U CAUUUUGC | 1327 | GCAAAAUG CUGAUGAG GCCGUUAGGC CGAA IGCGCUAC | 8727 |
| 2809 | AGCGCCUC A UUUUGCGG | 1328 | CCGCAAAA CUGAUGAG GCCGUUAGGC CGAA IAGGCGCU | 8728 |
| 2821 | UGCGGGUC A CCAUAUUC | 1329 | GAAUAUGG CUGAUGAG GCCGUUAGGC CGAA IACCCGCA | 8729 |
| 2823 | CGGGUCAC C AUAUUCUU | 1330 | AAGAAUAU CUGAUGAG GCCGUUAGGC CGAA IUGACCCG | 8730 |
| 2824 | GGGUCACC A UAUUCUUG | 1331 | CAAGAAUA CUGAUGAG GCCGUUAGGC CGAA IGUGACCC | 8731 |
| 2830 | CCAUAUUC U UGGGAACA | 1332 | UGUUCCCA CUGAUGAG GCCGUUAGGC CGAA IAAUAUGG | 8732 |
| 2838 | UUGGGAAC A AGAUCUAC | 1333 | GUAGAUCU CUGAUGAG GCCGUUAGGC CGAA IUUCCCAA | 8733 |
| 2844 | ACAAGAUC U ACAGCAUG | 1334 | CAUGCUGU CUGAUGAG GCCGUUAGGC CGAA IAUCUUGU | 8734 |
| 2847 | AGAUCUAC A GCAUGGGA | 1335 | UCCCAUGC CUGAUGAG GCCGUUAGGC CGAA IUAGAUCU | 8735 |
| 2850 | UCUACAGC A UGGGAGGU | 1336 | ACCUCCCA CUGAUGAG GCCGUUAGGC CGAA ICUGUAGA | 8736 |
| 2864 | GGUUGGUC U UCCAAACC | 1337 | GGUUUGGA CUGAUGAG GCCGUUAGGC CGAA IACCAACC | 8737 |
| 2867 | UGGUCUUC C AAACCUCG | 1338 | CGAGGUUU CUGAUGAG GCCGUUAGGC CGAA IAAGACCA | 8738 |
| 2868 | GGUCUUCC A AACCUCGA | 1339 | UCGAGGUU CUGAUGAG GCCGUUAGGC CGAA IGAAGACC | 8739 |
| 2872 | UUCCAAAC C UCGAAAAG | 1340 | CUUUUCGA CUGAUGAG GCCGUUAGGC CGAA IUUUGGAA | 8740 |
| 2873 | UCCAAACC U CGAAAAGG | 1341 | CCUUUUCG CUGAUGAG GCCGUUAGGC CGAA IGUUUGGA | 8741 |
| 2883 | GAAAAGGC A UGGGGACA | 1342 | UGUCCCCA CUGAUGAG GCCGUUAGGC CGAA ICCUUUUC | 8742 |
| 2891 | AUGGGGAC A AAUCUUUC | 1343 | GAAAGAUU CUGAUGAG GCCGUUAGGC CGAA IUCCCCAU | 8743 |
| 2896 | GACAAAUC U UUCUGUCC | 1344 | GGACAGAA CUGAUGAG GCCGUUAGGC CGAA IAUUUGUC | 8744 |
| 2900 | AAUCUUUC U GUCCCCAA | 1345 | UUGGGGAC CUGAUGAG GCCGUUAGGC CGAA IAAAGAUU | 8745 |
| 2904 | UUUCUGUC C CCAAUCCC | 1346 | GGGAUUGG CUGAUGAG GCCGUUAGGC CGAA IACAGAAA | 8746 |
| 2905 | UUCUGUCC C CAAUCCCC | 1347 | GGGGAUUG CUGAUGAG GCCGUUAGGC CGAA IGACAGAA | 8747 |
| 2906 | UCUGUCCC C AAUCCCCU | 1348 | AGGGGAUU CUGAUGAG GCCGUUAGGC CGAA IGGACAGA | 8748 |
| 2907 | CUGUCCCC A AUCCCCUG | 1349 | CAGGGGAU CUGAUGAG GCCGUUAGGC CGAA IGGGACAG | 8749 |
| 2911 | CCCCAAUC C CCUGGGAU | 1350 | AUCCCAGG CUGAUGAG GCCGUUAGGC CGAA IAUUGGGG | 8750 |
| 2912 | CCCAAUCC C CUGGGAUU | 1351 | AAUCCCAG CUGAUGAG GCCGUUAGGC CGAA IGAUUGGG | 8751 |
| 2913 | CCAAUCCC C UGGGAUUC | 1352 | GAAUCCCA CUGAUGAG GCCGUUAGGC CGAA IGGAUUGG | 8752 |
| 2914 | CAAUCCCC U GGGAUUCU | 1353 | AGAAUCCC CUGAUGAG GCCGUUAGGC CGAA IGGGAUUG | 8753 |
| 2922 | UGGGAUUC U UCCCCGAU | 1354 | AUCGGGGA CUGAUGAG GCCGUUAGGC CGAA IAAUCCCA | 8754 |
| 2925 | GAUUCUUC C CCGAUCAU | 1355 | AUGAUCGG CUGAUGAG GCCGUUAGGC CGAA IAAGAAUC | 8755 |
| 2926 | AUUCUUCC C CGAUCAUC | 1356 | GAUGAUCG CUGAUGAG GCCGUUAGGC CGAA IGAAGAAU | 8756 |
| 2927 | UUCUUCCC C GAUCAUCA | 1357 | UGAUGAUC CUGAUGAG GCCGUUAGGC CGAA IGGAAGAA | 8757 |
| 2932 | CCCCGAUC A UCAGUUGG | 1358 | CCAACUGA CUGAUGAG GCCGUUAGGC CGAA IAUCGGGG | 8758 |
| 2935 | CGAUCAUC A GUUGGACC | 1359 | GGUCCAAC CUGAUGAG GCCGUUAGGC CGAA IAUGAUCG | 8759 |
| 2943 | AGUUGGAC C CUGCAUUC | 1360 | GAAUGCAG CUGAUCAG GCCGUUAGGC CGAA IUCCAACU | 8760 |
| 2944 | GUUGGACC C UGCAUUCA | 1361 | UGAAUGCA CUGAUGAG GCCGUUAGGC CGAA IGUCCAAC | 8762 |
| 2945 | UUGGACCC U GCAUUCAA | 1362 | UUGAAUGC CUGAUGAG GCCGUUAGGC CGAA IGGUCCAA | 8762 |
| 2948 | GACCCUGC A UUCAAAGC | 1363 | GCUUUGAA CUGAUGAG GCCGUUAGGC CGAA ICAGGGUC | 8763 |
| 2952 | CUGCAUUC A AAGCCAAC | 1364 | GUUGGCUU CUGAUGAG GCCGUUAGGC CGAA IAAUGCAG | 8764 |
| 2957 | UUCAAAGC C AACUCAGU | 1365 | ACUGAGUU CUGAUGAG GCCGUUAGGC CGAA ICUUUGAA | 8765 |
| 2958 | UCAAAGCC A ACUCAGUA | 1366 | UACUGAGU CUGAUGAG GCCGUUAGGC CGAA IGCUUUGA | 8766 |
| 2961 | AAGCCAAC U CAGUAAAU | 1367 | AUUUACUG CUGAUGAG GCCGUUAGGC CGAA IUUGGCUU | 8767 |
| 2963 | GCCAACUC A GUAAAUCC | 1368 | GGAUUUAC CUGAUGAG GCCGUUAGGC CGAA IAGUUGGC | 8768 |
| 2971 | AGUAAAUC C AGAUUGGG | 1369 | CCCAAUCU CUGAUGAG GCCGUUAGGC CGAA IAUUUACU | 8769 |
| 2972 | GUAAAUCC A GAUUGGGA | 1370 | UCCCAAUC CUGAUGAG GCCGUUAGGC CGAA IGAUUUAC | 8770 |
| 2982 | AUUGGGAC C UCAACCCG | 1371 | CGGGUUGA CUGAUGAG GCCGUUAGGC CGAA IUCCCAAU | 8771 |
| 2983 | UUGGGACC U CAACCCGC | 1372 | GCGGGUUG CUGAUGAG GCCGUUAGGC CGAA IGUCCCAA | 8772 |
| 2985 | GGGACCUC A ACCCGCAC | 1373 | GUGCGGGU CUGAUGAG GCCGUUAGGC CGAA IAGGUCCC | 8773 |
| 2988 | ACCUCAAC C CGCACAAG | 1374 | CUUGUGCG CUGAUGAG GCCGUUAGGC CGAA IUUGAGGU | 8774 |
| 2989 | CCUCAACC C GCACAAGG | 1375 | CCUUGUGC CUGAUGAG GCCGUUAGGC CGAA IGUUGAGG | 8775 |
| 2992 | CAACCCGC A CAAGGACA | 1376 | UGUCCUUG CUGAUGAG GCCGUUAGGC CGAA ICGGGUUG | 8776 |
| 2994 | ACCCGCAC A AGGACAAC | 1377 | GUUGUCCU CUGAUGAG GCCGUUAGGC CGAA IUGCGGGU | 8777 |
| 3000 | ACAAGGAC A ACUGGCCG | 1378 | CGGCCAGU CUGAUGAG GCCGUUAGGC CGAA IUCCUUGU | 8778 |
| 3003 | AGGACAAC U GGCCGGAC | 1379 | GUCCGGCC CUGAUGAG GCCGUUAGGC CGAA IUUGUCCU | 8779 |
| 3007 | CAACUGGC C GGACGCCA | 1380 | UGGCGUCC CUGAUGAG GCCGUUAGGC CGAA ICCAGUUG | 8780 |
| 3014 | CCGGACGC C AACAAGGU | 1381 | ACCUUGUU CUGAUGAG GCCGUUAGGC CGAA ICGUCCGG | 8781 |
| 3015 | CGGACGCC A ACAAGGUG | 1382 | CACCUUGU CUGAUGAG GCCGUUAGGC CGAA IGCGUCCG | 8782 |
| 3018 | ACGCCAAC A AGGUGGGA | 1383 | UCCCACCU CUGAUGAG GCCGUUAGGC CGAA IUUGGCGU | 8783 |
| 3035 | GUGGGAGC A UUCGGGCC | 1384 | GGCCCGAA CUGAUGAG GCCGUUAGGC CGAA ICUCCCAC | 8784 |
| 3043 | AUUCGGGC C AGGGUUCA | 1385 | UGAACCCU CUGAUGAG GCCGUUAGGC CGAA ICCCGAAU | 8785 |
| 3044 | UUCGGGCC A GGGUUCAC | 1386 | GUGAACCC CUGAUGAG GCCGUUAGGC CGAA IGCCCGAA | 8786 |
| 3051 | CAGGGUUC A CCCCUCCC | 1387 | GGGAGGGG CUGAUGAG GCCGUUAGGC CGAA IAACCCUG | 8787 |
| 3053 | GGGUUCAC C CCUCCCCA | 1388 | UGGGGAGG CUGAUGAG GCCGUUAGGC CGAA IUGAACCC | 8788 |
| 3054 | GGUUCACC C CUCCCCAU | 1389 | AUGGGGAG CUGAUGAG GCCGUUAGGC CGAA IGUGAACC | 8789 |
| 3055 | GUUCACCC C UCCCCAUG | 1390 | CAUGGGGA CUGAUGAG GCCGUUAGGC CGAA IGGUGAAC | 8790 |
| 3056 | UUCACCCC U CCCCAUGG | 1391 | CCAUGGGG CUGAUGAG GCCGUUAGGC CGAA IGGGUGAA | 8791 |
| 3058 | CACCCCUC C CCAUGGGG | 1392 | CCCCAUGG CUGAUGAG GCCGUUAGGC CGAA IAGGGGUG | 8792 |
| 3059 | ACCCCUCC C CAUGGGGG | 1393 | CCCCCAUG CUGAUGAG GCCGUUAGGC CGAA IGAGGGGU | 8793 |
| 3060 | CCCCUCCC C AUGGGGGA | 1394 | UCCCCCAU CUGAUGAG GCCGUUAGGC CGAA IGGAGGGG | 8794 |
| 3061 | CCCUCCCC A UGGGGGAC | 1395 | GUCCCCCA CUGAUGAG GCCGUUAGGC CGAA IGGGAGGG | 8795 |
| 3070 | UGGGGGAC U GUUGGGGU | 1396 | ACCCCAAC CUGAUGAG GCCGUUAGGC CGAA IUCCCCCA | 8796 |
| 3084 | GGUGGAGC C CUCACGCU | 1397 | AGCGUGAG CUGAUGAG GCCGUUAGGC CGAA ICUCCACC | 8797 |
| 3085 | GUGGAGCC C UCACGCUC | 1398 | GAGCGUGA CUGAUGAG GCCGUUAGGC CGAA IGCUCCAC | 8798 |
| 3086 | UGGAGCCC U CACGCUCA | 1399 | UGAGCGUG CUGAUGAG GCCGUUAGGC CGAA IGGCUCCA | 8799 |
| 3088 | GAGCCCUC A CGCUCAGG | 1400 | CCUGAGCG CUGAUGAG GCCGUUAGGC CGAA IAGGGCUC | 8800 |
| 3092 | CCUCACGC U CAGGGCCU | 1401 | AGGCCCUG CUGAUGAG GCCGUUAGGC CGAA ICGUGAGG | 8801 |
| 3094 | UCACGCUC A GGGCCUAC | 1402 | GUAGGCCC CUGAUGAG GCCGUUAGGC CGAA IAGCGUGA | 8802 |
| 3099 | CUCAGGGC C UACUCACA | 1403 | UGUGAGUA CUGAUGAG GCCGUUAGGC CGAA ICCCUGAG | 8803 |
| 3100 | UCAGGGCC U ACUCACAA | 1404 | UUGUGAGU CUGAUGAG GCCGUUAGGC CGAA IGCCCUGA | 8804 |
| 3103 | GGGCCUAC U CACAACUG | 1405 | CAGUUGUG CUGAUGAG GCCGUUAGGC CGAA IUAGGCCC | 8805 |
| 3105 | GCCUACUC A CAACUGUG | 1406 | CACAGUUG CUGAUGAG GCCGUUAGGC CGAA IAGUAGGC | 8806 |
| 3107 | CUACUCAC A ACUGUGCC | 1407 | GGCACAGU CUGAUGAG GCCGUUAGGC CGAA IUGAGUAG | 8807 |
| 3110 | CUCACAAC U GUGCCAGC | 1408 | GCUGGCAC CUGAUGAG GCCGUUAGGC CGAA IUUGUGAG | 8808 |
| 3115 | AACUGUGC C AGCAGCUC | 1409 | GAGCUGCU CUGAUGAG GCCGUUAGGC CGAA ICACAGUU | 8809 |
| 3116 | ACUGUGCC A GCAGCUCC | 1410 | GGAGCUGC CUGAUGAG GCCGUUAGGC CGAA IGCACAGU | 8810 |
| 3119 | GUGCCAGC A GCUCCUCC | 1411 | GCAGGAGC CUGAUQAG GCCGUUAGGC CGAA ICUGGCAC | 8811 |
| 3122 | CCAGCAGC U CCUCCUCC | 1412 | GGAGGAGG CUGAUGAG GCCGUUAGGC CGAA ICUGCUGG | 8812 |
| 3124 | AGCAGCUC C UCCUCCUG | 1413 | CAGGAGGA CUGAUGAG GCCGUUAGGC CGAA IAGCUGCU | 8813 |
| 3125 | GCAGCUCC U CCUCCUGC | 1414 | GCAGGAGG CUGAUGAG GCCGUUAGGC CGAA IGAGCUGC | 8814 |
| 3127 | AGCUCCUC C UCCUGCCU | 1415 | AGGCAGGA CUGAUGAG GCCGUUAGGC CGAA IAGGAGCU | 8815 |
| 3128 | GCUCCUCC U CCUGCCUC | 1416 | GAGGCAGG CUGAUGAG GCCGUUAGGC CGAA IGAGGAGC | 8816 |
| 3130 | UCCUCCUC C UGCCUCCA | 1417 | UGGAGGCA CUGAUGAG GCCGUUAGGC CGAA IAGGAGGA | 8817 |
| 3131 | CCUCCUCC U GCCUCCAC | 1418 | GUGGAGGC CUGAUGAG GCCGUUAGGC CGAA IGAGGAGG | 8818 |
| 3134 | CCUCCUGC C UCCACCAA | 1419 | UUGGUGGA CUGAUGAG GCCGUUAGGC CGAA ICAGGAGG | 8819 |
| 3135 | CUCCUGCC U CCACCAAU | 1420 | AUUGGUGO CUGAUGAG GCCGUUAGGC CGAA IGCAGGAG | 8820 |
| 3137 | CCUGCCUC C ACCAAUCG | 1421 | CGAUUGGU CUGAUGAG GCCGUUAGGC CGAA IAGGCAGG | 8821 |
| 3138 | CUGCCUCC A CCAAUCGG | 1422 | CCGAUUGG CUGAUGAG GCCGUUAGGC CGAA IGAGGCAG | 8822 |
| 3140 | GCCUCCAC C AAUCGGCA | 1423 | UGCCGAUU CUGAUGAG GCCGUUAGGC CGAA IUGGAGGC | 8823 |
| 3141 | CCUCCACC A AUCGGCAG | 1424 | CUGCCGAU CUGAUGAG GCCGUUAGGC CGAA IGUGGAGG | 8824 |
| 3148 | CAAUCGGC A GUCAGGAA | 1425 | UUCCUGAC CUGAUGAG GCCGUUAGGC CGAA ICCGAUUG | 8825 |
| 3152 | CGGCAGUC A GGAAGGCA | 1426 | UGCCUUCC CUGAUGAG GCCGUUAGGC CGAA IACUGCCG | 8826 |
| 3160 | AGGAAGGC A GCCUACUC | 1427 | GAGUAGGC CUGAUGAG GCCGUUAGGC CGAA ICCUUCCU | 8827 |
| 3163 | AAGGCAGC C UACUCCCU | 1428 | AGGGAGUA CUGAUGAG GCCGUUAGGC CGAA ICUGCCUU | 8828 |
| 3164 | AGGCAGCC U ACUCCCUU | 1429 | AAGGGAGU CUGAUGAG GCCGUUAGGC CGAA IGCUGCCU | 8829 |
| 3167 | CAGCCUAC U CCCUUAUC | 1430 | GAUAAGGG CUGAUGAG GCCGUUAGGC CGAA IUAGGCUG | 8830 |
| 3169 | GCCUACUC C CUUAUCUC | 1431 | GAGAUAAG CUGAUGAG GCCGUUAGGC CGAA IAGUAGGC | 8831 |
| 3170 | CCUACUCC C UUAUCUCC | 1432 | GGAGAUAA CUGAUGAG GCCGUUAGGC CGAA IGAGUAGG | 8832 |
| 3171 | CUACUCCC U UAUCUCCA | 1433 | UGGAGAUA CUGAUGAG GCCGUUAGGC CGAA IGGAGUAG | 8833 |
| 3176 | CCCUUAUC U CCACCUCU | 1434 | AGAGGUGG CUGAUGAG GCCGUUAGGC CGAA IAUAAGGG | 8834 |
| 3178 | CUUAUCUC C ACCUCUAA | 1435 | UUAGAGGU CUGAUGAG GCCGUUAGGC CGAA IAGAUAAG | 8835 |
| 3179 | UUAUCUCC A CCUCUAAG | 1436 | CUUAGAGG CUGAUGAG GCCGUUAGGC CGAA IGAGAUAA | 8836 |
| 3181 | AUCUCCAC C UCUAAGGG | 1437 | CCCUUAGA CUGAUGAG GCCGUUAGGC CGAA IUGGAGAU | 8837 |
| 3182 | UCUCCACC U CUAAGGGA | 1438 | UCCCUUAG CUGAUGAG GCCGUUAGGC CGAA IGUGGAGA | 8838 |
| 3184 | UCCACCUC U AAGGGACA | 1439 | UGUCCCUU CUGAUGAG GCCGUUAGGC CGAA IAGGUGGA | 8839 |
| 3192 | UAAGGGAC A CUCAUCCU | 1440 | AGGAUGAG CUGAUGAG GCCGUUAGGC CGAA IUCCCUUA | 8840 |
| 3194 | AGGGACAC U CAUCCUCA | 1441 | UGAGGAUG CUGAUGAG GCCGUUAGGC CGAA IUGUCCCU | 8841 |
| 3196 | GGACACUC A UCCUCAGG | 1442 | CCUGAGGA CUGAUGAG GCCGUUAGGC CGAA IAGUGUCC | 8842 |
| 3199 | CACUCAUC C UCAGGCCA | 1443 | UGGCCUGA CUGAUGAG GCCGUUAGGC CGAA IAUGAGUG | 8843 |
| 3200 | ACUCAUCC U CAGGCCAU | 1444 | AUGGCCUG CUGAUGAG GCCGUUAGGC CGAA IGAUGAGU | 8844 |
| 3202 | UCAUCCUC A GGCCAUGC | 1445 | GCAUGGCC CUGAUGAG GCCGUUAGGC CGAA IAGGAUGA | 8845 |
| 3206 | CCUCAGGC C AUGCAGUG | 1446 | CACUGCAU CUGAUGAG GCCGUUAGGC CGAA ICCUGAGG | 8846 |
| 3207 | CUCAGGCC A UGCAGUGG | 1447 | CCACUGCA CUGAUGAG GCCGUUAGGC CGAA IGCCUGAG | 8847 |

Input Sequence = AF100308.
Cut Site = CH/.
Stem Length = 8.
Core Sequence = CUGAUGAG X CGAA (X = GCCGUUAGGC or other stem II)
AF100308 (Hepatitis B virus strain 2-18, 3215 bp)
Underlined region can be any X sequence or linker, as described herein.
“I” stands for Inosime

[0555] TABLE VII

HUMAN HBV G-CLEAVER AND SUBSTRATE SEQUENCE

| | | | | |
|---|---|---|---|---|
| Pos | Substrate | Seq ID | G-cleaver | Seq ID |

| | | | | |
|---|---|---|---|---|
| 61 | ACUUUCCU G CUGGUGGC | 1448 | GCCACCAG UGAUG GCAUGCACUAUGC GCG AGGAAAGU | 8848 |
| 87 | GGAACAGU G AGCCCUGC | 1449 | GCAGGGCU UGAUG GCAUGCACUAUGC GCG ACUGUUCC | 8849 |
| 94 | UGAGCCCU G CUCAGAAU | 1450 | AUUCUGAG UGAUG GCAUGCACUAUGC GCG AGGGCUCA | 8850 |
| 112 | CUGUCUCU G CCAUAUCG | 1451 | CGAUAUGG UGAUG GCAUGCACUAUGC GCG AGAGACAG | 8851 |
| 132 | AUCUUAUC G AAGACUGG | 1452 | CCAGUCUU UGAUG GCAUGCACUAUGC GCG GAUAAGAU | 8852 |
| 153 | CCUGUACC G AACAUGGA | 1453 | UCCAUGUU UGAUG GCAUGCACUAUGC GCG GGUACAGG | 8853 |
| 169 | AGAACAUC G CAUCAGGA | 1454 | UCCUGAUG UGAUG GCAUGCACUAUGC GCG GAUGUUCU | 8854 |
| 192 | GGACCCCU G CUCGUGUU | 1455 | AACACGAG UGAUG GCAUGCACUAUGC GCG AGGGGUCC | 8855 |
| 222 | UUCUUGUU G ACAAAAAU | 1456 | AUUUUUGU UGAUG GCAUGCACUAUGC GCG AACAAGAA | 8856 |
| 315 | CAAAAUUC G CAGUCCCA | 1457 | UGGGACUG UGAUG GCAUGCACUAUGC GCG GAAUUUUG | 8857 |
| 374 | UGGUUAUC G CUGGAUGU | 1458 | ACAUCCAG UGAUG GCAUGCACUAUGC GCG GAUAACCA | 8858 |
| 387 | AUGUGUCU G CGGCGUUU | 1459 | AAACGCCG UGAUG GCAUGCACUAUGC GCG AGACACAU | 8859 |
| 410 | CUUCCUCU G CAUCCUGC | 1460 | GCAGGAUG UGAUG GCAUGCACUAUGC GCG AGAGGAAG | 8860 |
| 417 | UGCAUCCU G CUGCUAUG | 1461 | CAUAGCAG UGAUG GCAUGCACUAUGC GCG AGGAUGCA | 8861 |
| 420 | AUCCUGCU G CUAUGCCU | 1462 | AGGCAUAG UGAUG GCAUGCACUAUGC GCG AGCAGGAU | 8862 |
| 425 | GCUGCUAU G CCUCAUCU | 1463 | AGAUGAGG UGAUG GCAUGCACUAUGC GCG AUAGCAGC | 8863 |
| 468 | GGUAUGUU G CCCGUUUG | 1464 | CAAACGGG UGAUG GCAUGCACUAUGC GCG AACAUACC | 8864 |
| 518 | CGGACCAU G CAAAACCU | 1465 | AGGUUUUG UGAUG GCAUGCACUAUGC GCG AUGGUCCG | 8865 |
| 527 | CAAAACCU G CACAACUC | 1466 | GAGUUGUG UGAUG GCAUGCACUAUGC GCG AGGUUUUG | 8866 |
| 538 | CAACUCCU G CUCAAGGA | 1467 | UCCUUGAG UGAUG GCAUGCACUAUGC GCG AGGAGUUG | 8867 |
| 569 | CUCAUGUU G CUGUACAA | 1468 | UUGUACAG UGAUG GCAUGCACUAUGC GCG AACAUGAG | 8868 |
| 596 | CGGAAACU G CACCUGUA | 1469 | UACAGGUG UGAUG GCAUGCACUAUGC GCG AGUUUCCG | 8869 |
| 631 | GGGCUUUC G CAAAAUAC | 1470 | GUAUUUUG UGAUG GCAUGCACUAUGC GCG GAAAGCCC | 8870 |
| 687 | UUACUAGU G CCAUUUGU | 1471 | ACAAAUGG UGAUG GCAUGCACUAUGC GCG ACUAGUAA | 8871 |
| 747 | AUAUGGAU G AUGUGGUU | 1472 | AACCACAU UGAUG GCAUGCACUAUGC GCG AUCCAUAU | 8872 |
| 783 | AACAUCUU G AGUCCCUU | 1473 | AAGGGACU UGAUG GCAUGCACUAUGC GCG AAGAUGUU | 8873 |
| 795 | CCCUUUAU G CCGCUGUU | 1474 | AACAGCGG UGAUG GCAUGCACUAUGC GCG AUAAAGGG | 8874 |
| 798 | UUUAUGCC G CUGUUACC | 1475 | GGUAACAG UGAUG GCAUGCACUAUGC GCG GGCAUAAA | 8875 |
| 911 | GGCACAUU G CCACAGGA | 1476 | UCCUGUGG UGAUG GCAUGCACUAUGC GCG AAUGUGCC | 8876 |
| 978 | GGCCUAUU G AUUGGAAA | 1477 | UUUCCAAU UGAUG GCAUGCACUAUGC GCG AAUAGGCC | 8877 |
| 997 | AUGUCAAC G AAUUGUGG | 1478 | CCACAAUU UGAUG GCAUGCACUAUGC GCG GUUGACAU | 8878 |
| 1020 | UGGGGUUU G CCGCCCCU | 1479 | AGGGGCGG UGAUG GCAUGCACUAUGC GCG AAACCCCA | 8879 |
| 1023 | GGUUUGCC G CCCCUUUC | 1480 | GAAAGGGG UGAUG GCAUGCACUAUGC GCG GGCAAACC | 8880 |
| 1034 | CCUUUCAC G CAAUGUGG | 1481 | CCACAUUG UGAUG GCAUGCACUAUGC GCG GUGAAAGG | 8881 |
| 1050 | GAUAUUCU G CUUUAAUG | 1482 | CAUUAAAG UGAUG GCAUGCACUAUGC GCG AGAAUAUC | 8882 |
| 1058 | GCUUUAAU G CCUUUAUA | 1483 | UAUAAAGG UGAUG GCAUGCACUAUGC GCG AUUAAAGC | 8883 |
| 1068 | CUUUAUAU G CAUGCAUA | 1484 | UAUGCAUG UGAUG GCAUGCACUAUGC GCG AUAUAAAG | 8884 |
| 1072 | AUAUGCAU G CAUACAAG | 1485 | CUUGUAUG UGAUG GCAUGCACUAUGC GCG AUGCAUAU | 8885 |
| 1103 | ACUUUCUC G CCAACUUA | 1486 | UAAGUUGG UGAUG GCAUGCACUAUGC GCG GAGAAAGU | 8886 |
| 1139 | CAGUAUGU G AACCUUUA | 1487 | UAAAGGUU UGAUG GCAUGCACUAUGC GCG ACAUACUG | 8887 |
| 1155 | ACCCCGUU G CUCGGCAA | 1488 | UUGCCGAG UGAUG GCAUGCACUAUGC GCG AACGGGGU | 8888 |
| 1177 | UGGUCUAU G CCAAGUGU | 1489 | ACACUUGG UGAUG GCAUGCACUAUGC GCG AUAGACCA | 8889 |
| 1188 | AAGUGUUU G CUGACGCA | 1490 | UGCGUCAG UGAUG GCAUGCACUAUGC GCG AAACACUU | 8890 |
| 1191 | UGUUUGCU G ACGCAACC | 1491 | GGUUGCGU UGAUG GCAUGCACUAUGC GCG AGCAAACA | 8891 |
| 1194 | UUGCUGAC G CAACCCCC | 1492 | GGGGGUUG UGAUG GCAUGCACUAUGC GCG GUCAGCAA | 8892 |
| 1234 | CCAUCAGC G CAUGCGUG | 1493 | CACGCAUG UGAUG GCAUGCACUAUGC GCG GCUGAUGG | 8893 |
| 1238 | CAGCGCAU G CGUGGAAC | 1494 | GUUCCACG UGAUG GCAUGCACUAUGC GCG AUGCGCUG | 8894 |
| 1262 | UCUCCUCU G CCGAUCCA | 1495 | UGGAUCGG UGAUG GCAUGCACUAUGC GCG AGAGGAGA | 8895 |
| 1265 | CCUCUGCC G AUCCAUAC | 1496 | GUAUGGAU UGAUG GCAUGCACUAUGC GCG GGCAGAGG | 8896 |
| 1275 | UCCAUACC G CGGAACUC | 1497 | GAGUUCCG UGAUG GCAUGCACUAUGC GCG GGUAUGGA | 8897 |
| 1290 | UCCUAGCC G CUUGUUUU | 1498 | AAAACAAG UGAUG GCAUGCACUAUGC GCG GGCUAGGA | 8898 |
| 1299 | CUUGUUUU G CUCGCAGC | 1499 | GCUGCGAG UGAUG GCAUGCACUAUGC GCG AAAACAAG | 8899 |
| 1303 | UUUUGCUC G CAGCAGGU | 1500 | ACCUGCUG UGAUG GCAUGCACUAUGC GCG GAGCAAAA | 8900 |
| 1335 | UCGGGACU G ACAAUUCU | 1501 | AGAAUUGU UGAUG GCAUGCACUAUGC GCG AGUCCCGA | 8901 |
| 1349 | UCUGUCGU G CUCUCCCG | 1502 | CGGGAGAG UGAUG GCAUGCACUAUGC GCG ACGACAGA | 8902 |
| 1357 | GCUCUCCC G CAAAUAUA | 1503 | UAUAUUUG UGAUG GCAUGCACUAUGC GCG GGGAGAGC | 8903 |
| 1382 | CCAUGGCU G CUAGGCUG | 1504 | CAGCCUAG UGAUG GCAUGCACUAUGC GCG AGCCAUGG | 8904 |
| 1392 | UAGGCUGU G CUGCCAAC | 1505 | GUUGGCAG UGAUG GCAUGCACUAUGC GCG ACAGCCUA | 8905 |
| 1395 | GCUGUGCU G CCAACUGG | 1506 | CCAGUUGG UGAUG GCAUGCACUAUGC GCG AGCACAGC | 8906 |
| 1411 | GAUCCUAC G CGGGACGU | 1507 | ACGUCCCG UGAUG GCAUGCACUAUGC GCG GUAGGAUC | 8907 |
| 1442 | CCGUCGGC G CUGAAUCC | 1508 | GGAUUCAG UGAUG GCAUGCACUAUGC GCG GCCGACGG | 8908 |
| 1445 | UCGGCGCU G AAUCCCGC | 1509 | GCGGGAUU UGAUG GCAUGCACUAUGC GCG AGCGCCGA | 8909 |
| 1452 | UGAAUCCC G CGGACGAC | 1510 | GUCGUCCG UGAUG GCAUGCACUAUGC GCG GGGAUUCA | 8910 |
| 1458 | CCGCGGAC G ACCCCUCC | 1511 | GGAGGGGU UGAUG GCAUGCACUAUGC GCG GUCCGCGG | 8911 |
| 1474 | CCGGGGCC G CUUGGGGC | 1512 | GCCCCAAG UGAUG GCAUGCACUAUGC GCG GGCCCCGG | 8912 |
| 1489 | GCUCUACC G CCCGCUUC | 1513 | GAAGCGGG UGAUG GCAUGCACUAUGC GCG GGUAGAGC | 8913 |
| 1493 | UACCGCCC G CUUCUCCG | 1514 | CGGAGAAG UGAUG GCAUGCACUAUGC GCG GGGCGGUA | 8914 |
| 1501 | GCUUCUCC G CCUAUUGU | 1515 | ACAAUAGG UGAUG GCAUGCACUAUGC GCG GGAGAAGC | 8915 |
| 1513 | AUUGUACC G ACCGUCCA | 1516 | UGGACGGU UGAUG GCAUGCACUAUGC GCG GGUACAAU | 8916 |
| 1528 | CACGGGGC G CACCUCUC | 1517 | GAGAGGUG UGAUG GCAUGCACUAUGC GCG GCCCCGUG | 8917 |
| 1542 | CUCUUUAC G CGGACUCC | 1518 | GGAGUCCG UGAUG GCAUGCACUAUGC GCG GUAAAGAG | 8918 |
| 1559 | CCGUCUGU G CCUUCUCA | 1519 | UGAGAAGG UGAUG GCAUGCACUAUGC GCG ACAGACGG | 8919 |
| 1571 | UCUCAUCU G CCGGACCG | 1520 | CGGUCCGG UGAUG GCAUGCACUAUGC GCG AGAUGAGA | 8920 |
| 1583 | GACCGUGU G CACUUCGC | 1521 | GCGAAGUG UGAUG GCAUGCACUAUGC GCG ACACGGUC | 8921 |
| 1590 | UGCACUUC G CUUCACCU | 1522 | AGGUGAAG UGAUG GCAUGCACUAUGC GCG GAAGUGCA | 8922 |
| 1601 | UCACCUCU G CACGUCGC | 1523 | GCGACGUG UGAUG GCAUGCACUAUGC GCG AGAGGUGA | 8923 |
| 1608 | UGCACGUC G CAUGGAGA | 1524 | UCUCCAUG UGAUG GCAUGCACUAUGC GCG GACGUGCA | 8924 |
| 1624 | ACCACCGU G AACGCCCA | 1525 | UGGGCGUU UGAUG GCAUGCACUAUGC GCG ACGGUGGU | 8925 |
| 1628 | CCGUGAAC G CCCACAGG | 1526 | CCUGUGGG UGAUG GCAUGCACUAUGC GCG GUUCACGG | 8926 |
| 1642 | AGGAACCU G CCCAAGGU | 1527 | ACCUUGGG UGAUG GCAUGCACUAUGC GCG AGGUUCCU | 8927 |
| 1654 | AAGGUCUU G CAUAAGAG | 1528 | CUCUUAUG UGAUG GCAUGCACUAUGC GCG AAGACCUU | 8928 |
| 1690 | AUGUCAAC G ACCGACCU | 1529 | AGGUCGGU UGAUG GCAUGCACUAUGC GCG GUUGACAU | 8929 |
| 1694 | CAACGACC G ACCUUGAG | 1530 | CUCAAGGU UGAUG GCAUGCACUAUGC GCG GGUCGUUG | 8930 |
| 1700 | CCGACCUU G AGGCAUAC | 1531 | GUAUGCCU UGAUG GCAUGCACUAUGC GCG AAGGUCGG | 8931 |
| 1730 | UGUUUAAU G AGUGGGAG | 1532 | CUCCCACU UGAUG GCAUGCACUAUGC GCG AUUAAACA | 8932 |
| 1818 | AGCACCAU G CAACUUUU | 1533 | AAAAGUUG UGAUG GCAUGCACUAUGC GCG AUGGUGCU | 8933 |
| 1835 | UCACCUCU G CCUAAUCA | 1534 | UGAUUAGG UGAUG GCAUGCACUAUGC GCG AGAGGUGA | 8934 |
| 1883 | CAAGCUGU G CCUUGGGU | 1535 | ACCCAAGG UGAUG GCAUGCACUAUGC GCG ACAGCUUG | 8935 |
| 1912 | UGGACAUU G ACCCGUAU | 1536 | AUACGGGU UGAUG GCAUGCACUAUGC GCG AAUGUCCA | 8936 |
| 1959 | UCUUUUUU G CCUUCUGA | 1537 | UCAGAAGG UGAUG GCAUGCACUAUGC GCG AAAAAAGA | 8937 |
| 1966 | UGCCUUCU G ACUUCUUU | 1538 | AAAGAAGU UGAUG GCAUGCACUAUGC GCG AGAAGGCA | 8938 |
| 1985 | UUCUAUUC G AGAUCUCC | 1539 | GGAGAUCU UGAUG GCAUGCACUAUGC GCG GAAUAGAA | 8939 |
| 1996 | AUCUCCUC G ACACCGCC | 1540 | GGCGGUGU UGAUG GCAUGCACUAUGC GCG GAGGAGAU | 8940 |
| 2002 | UCGACACC G CCUCUGCU | 1541 | AGCAGAGG UGAUG GCAUGCACUAUGC GCG GGUGUCGA | 8941 |
| 2008 | CCGCCUCU G CUCUGUAU | 1542 | AUACAGAG UGAUG GCAUGCACUAUGC GCG AGAGGCGG | 8942 |
| 2092 | GUUGGGGU G AGUUGAUG | 1543 | CAUCAACU UGAUG GCAUGCACUAUGC GCG ACCCCAAC | 8943 |
| 2097 | GGUGAGUU G AUGAAUCU | 1544 | AGAUUCAU UGAUG GCAUGCACUAUGC GCG AACUCACC | 8944 |
| 2100 | GAGUUGAU G AAUCUAGC | 1545 | GCUAGAUU UGAUG GCAUGCACUAUGC GCG AUCAACUC | 8945 |
| 2237 | UUUUGGGC G AGAAACUG | 1546 | CAGUUUCU UGAUG GCAUGCACUAUGC GCG GCCCAAAA | 8946 |
| 2251 | CUGUUCUU G AAUAUUUG | 1547 | CAAAUAUU UGAUG GCAUGCACUAUGC GCG AAGAACAG | 8947 |
| 2282 | GUGGAUUC G CACUCCUC | 1548 | GAGGAGUG UGAUG GCAUGCACUAUGC GCG GAAUCCAC | 8948 |
| 2293 | CUCCUCCU G CAUAUAGA | 1549 | UCUAUAUG UGAUG GCAUGCACUAUGC GCG AGGAGGAG | 8949 |
| 2311 | CACCAAAU G CCCCUAUC | 1550 | GAUAGGGG UGAUG GCAUGCACUAUGC GCG AUUUGGUG | 8950 |
| 2354 | UGUUAGAC G AAGAGGCA | 1551 | UGCCUCUU UGAUG GCAUGCACUAUGC GCG GUCUAACA | 8951 |
| 2388 | ACUCCCUC G CCUCGCAG | 1552 | CUGCGAGG UGAUG GCAUGCACUAUGC GCG GAGGGAGU | 8952 |
| 2393 | CUCGCCUC G CAGACGAA | 1553 | UUCGUCUG UGAUG GCAUGCACUAUGC GCG GAGGCGAG | 8953 |
| 2399 | UCGCAGAC G AAGGUCUC | 1554 | GAGACCUU UGAUG GCAUGCACUAUGC GCG GUCUGCGA | 8954 |
| 2412 | UCUCAAUC G CCGCGUCG | 1555 | CGACGCGG UGAUG GCAUGCACUAUGC GCG GAUUGAGA | 8955 |
| 2415 | CAAUCGCC G CGUCGCAG | 1556 | CUGCGACG UGAUG GCAUGCACUAUGC GCG GGCGAUUG | 8956 |
| 2420 | GCCGCGUC G CAGAAGAU | 1557 | AUCUUCUG UGAUG GCAUGCACUAUGC GCG GACGCGGC | 8957 |
| 2514 | GGUACCUU G CUUUAAUC | 1558 | GAUUAAAG UGAUG GCAUGCACUAUGC GCG AAGGUACC | 8958 |
| 2549 | CUUUUCCU G ACAUUCAU | 1559 | AUGAAUGU UGAUG GCAUGCACUAUGC GCG AGGAAAAG | 8959 |
| 2560 | AUUCAUUU G CAGGAGGA | 1560 | UCCUCCUG UGAUG GCAUGCACUAUGC GCG AAAUGAAU | 8960 |
| 2576 | ACAUUGUU G AUAGAUGU | 1561 | ACAUCUAU UGAUG GCAUGCACUAUGC GCG AACAAUGU | 8961 |
| 2615 | CAGUAAAU G AAAACAGG | 1562 | CCUGUUUU UGAUG GCAUGCACUAUGC GCG AUUUACUG | 8962 |
| 2641 | UUAACUAU G CCUGCUAG | 1563 | CUAGCAGG UGAUG GCAUGCACUAUGC GCG AUAGUUAA | 8963 |
| 2645 | CUAUGCCU G CUAGGUUU | 1564 | AAACCUAG UGAUG GCAUGCACUAUGC GCG AGGCAUAG | 8964 |
| 2677 | AAAUAUUU G CCCUUAGA | 1565 | UCUAAGGG UGAUG GCAUGCACUAUGC GCG AAAUAUUU | 8965 |
| 2740 | UUCCAGAC G CGACAUUA | 1566 | UAAUGUCG UGAUG GCAUGCACUAUGC GCG GUCUGGAA | 8966 |
| 2742 | CCAGACGC G ACAUUAUU | 1567 | AAUAAUGU UGAUG GCAUGCACUAUGC GCG GCGUCUGG | 8967 |
| 2804 | CACGUAGC G CCUCAUUU | 1568 | AAAUGAGG UGAUG GCAUGCACUAUGC GCG GCUACGUG | 8968 |
| 2814 | CUCAUUUU G CGGGUCAC | 1569 | GUGACCCG UGAUG GCAUGCACUAUGC GCG AAAAUGAG | 8969 |
| 2875 | CAAACCUC G AAAAGGCA | 1570 | UGCCUUUU UGAUG GCAUGCACUAUGC GCG GAGGUUUG | 8970 |
| 2928 | UCUUCCCC G AUCAUCAG | 1571 | CUGAUGAU UGAUG GCAUGCACUAUGC GCG GGGGAAGA | 8971 |
| 2946 | UGGACCCU G CAUUCAAA | 1572 | UUUGAAUG UGAUG GCAUGCACUAUGC GCG AGGGUCCA | 8972 |
| 2990 | CUCAACCC G CACAAGGA | 1573 | UCCUUGUG UGAUG GCAUGCACUAUGC GCG GGGUUGAG | 8973 |
| 3012 | GGCCGGAC G CCAACAAG | 1574 | CUUGUUGG UGAUG GCAUGCACUAUGC GCG GUCCGGCC | 8974 |
| 3090 | GCCCUCAC G CUCAGGGC | 1575 | GCCCUGAG UGAUG GCAUGCACUAUGC GCG GUGAGGGC | 8975 |
| 3113 | ACAACUGU G CCAGCAGC | 1576 | GCUGCUGG UGAUG GCAUGCACUAUGC GCG ACAGUUGU | 8976 |
| 3132 | CUCCUCCU G CCUCCACC | 1577 | GGUGGAGG UGAUG GCAUGCACUAUGC GCG AGGAGGAG | 8977 |
| 51 | AGGGCCCU G UACUUUCC | 1578 | GGAAAGUA UGAUG GCAUGCACUAUGC GCG AGGGCCCU | 8978 |
| 106 | AGAAUACU G UCUCUGCC | 1579 | GGCAGAGA UGAUG GCAUGCACUAUGC GCG AGUAUUCU | 8979 |
| 148 | GGGACCCU G UACCGAAC | 1580 | GUUCGGUA UGAUG GCAUGCACUAUGC GCG AGGGUCCC | 8980 |
| 198 | CUGCUCGU G UUACAGGC | 1581 | GCCUGUAA UGAUG GCAUGCACUAUGC GCG ACGAGCAG | 8981 |
| 219 | UUUUUCUU G UUGACAAA | 1582 | UUUGUCAA UGAUG GCAUGCACUAUGC GCG AAGAAAAA | 8982 |
| 297 | ACACCCGU G UGUCUUGG | 1583 | CCAAGACA UGAUG GCAUGCACUAUGC GCG ACGGGUGU | 8983 |
| 299 | ACCCGUGU G UCUUGGCC | 1584 | GGCCAAGA UGAUG GCAUGCACUAUGC GCG ACACGGGU | 8984 |
| 347 | ACCAACCU G UUGUCCUC | 1585 | GAGGACAA UGAUG GCAUGCACUAUGC GCG AGGUUGGU | 8985 |
| 350 | AACCUGUU G UCCUCCAA | 1586 | UUGGAGGA UGAUG GCAUGCACUAUGC GCG AACAGGUU | 8986 |
| 362 | UCCAAUUU G UCCUGGUU | 1587 | AACCAGGA UGAUG GCAUGCACUAUGC GCG AAAUUGGA | 8987 |
| 381 | CGCUGGAU G UGUCUGCG | 1588 | CGCAGACA UGAUG GCAUGCACUAUGC GCG AUCCAGCG | 8988 |
| 383 | CUGGAUGU G UCUGCGGC | 1589 | GCCGCAGA UGAUG GCAUGCACUAUGC GCG ACAUCCAG | 8989 |
| 438 | AUCUUCUU G UUGGUUCU | 1590 | AGAACCAA UGAUG GCAUGCACUAUGC GCG AAGAAGAU | 8990 |
| 465 | CAAGGUAU G UUGCCCGU | 1591 | ACGGGCAA UGAUG GCAUGCACUAUGC GCG AUACCUUG | 8991 |
| 476 | GCCCGUUU G UCCUCUAA | 1592 | UUAGAGGA UGAUG GCAUGCACUAUGC GCG AAACGGGC | 8992 |
| 555 | ACCUCUAU G UUUCCCUC | 1593 | GAGGGAAA UGAUG GCAUGCACUAUGC GCG AUAGAGGU | 8993 |
| 566 | UCCCUCAU G UUGCUGUA | 1594 | UACAGCAA UGAUG GCAUGCACUAUGC GCG AUGAGGGA | 8994 |
| 572 | AUGUUGCU G UACAAAAC | 1595 | GUUUUGUA UGAUG GCAUGCACUAUGC GCG AGCAACAU | 8995 |
| 602 | CUGCACCU G UAUUCCCA | 1596 | UGGGAAUA UGAUG GCAUGCACUAUGC GCG AGGUGCAG | 8996 |
| 694 | UGCCAUUU G UUCAGUGG | 1597 | CCACUGAA UGAUG GCAUGCACUAUGC GCG AAAUGGCA | 8997 |
| 724 | CCCCCACU G UCUGGCUU | 1598 | AAGCCAGA UGAUG GCAUGCACUAUGC GCG AGUGGGGG | 8998 |
| 750 | UGGAUGAU G UGGUUUUG | 1599 | CAAAACCA UGAUG GCAUGCACUAUGC GCG AUCAUCCA | 8999 |
| 771 | CCAAGUCU G UACAACAU | 1600 | AUGUUGUA UGAUG GCAUGCACUAUGC GCG AGACUUGG | 9000 |
| 801 | AUGCCGCU G UUACCAAU | 1601 | AUUGGUAA UGAUG GCAUGCACUAUGC GCG AGCGGCAU | 9001 |
| 818 | UUUCUUUU G UCUUUGGG | 1602 | CCCAAAGA UGAUG GCAUGCACUAUGC GCG AAAAGAAA | 9002 |
| 888 | UGGGAUAU G UAAUUGGG | 1603 | CCCAAUUA UGAUG GCAUGCACUAUGC GCG AUAUCCCA | 9003 |
| 927 | AACAUAUU G UACAAAAA | 1604 | UUUUUGUA UGAUG GCAUGCACUAUGC GCG AAUAUGUU | 9004 |
| 944 | AUCAAAAU G UGUUUUAG | 1605 | CUAAAACA UGAUG GCAUGCACUAUGC GCG AUUUUGAU | 9005 |
| 946 | CAAAAUGU G UUUUAGGA | 1606 | UCCUAAAA UGAUG GCAUGCACUAUGC GCG ACAUUUUG | 9006 |
| 963 | AACUUCCU G UAAACAGG | 1607 | CCUGUUUA UGAUG GCAUGCACUAUGC GCG AGGAAGUU | 9007 |
| 991 | GAAAGUAU G UCAACGAA | 1608 | UUCGUUGA UGAUG GCAUGCACUAUGC GCG AUACUUUC | 9008 |
| 1002 | AACGAAUU G UGGGUCUU | 1609 | AAGACCCA UGAUG GCAUGCACUAUGC GCG AAUUCGUU | 9009 |
| 1039 | CACGCAAU G UGGAUAUU | 1610 | AAUAUCCA UGAUG GCAUGCACUAUGC GCG AUUGCGUG | 9010 |
| 1137 | AACAGUAU G UGAACCUU | 1611 | AAGGUUCA UGAUG GCAUGCACUAUGC GCG AUACUGUU | 9011 |
| 1184 | UGCCAAGU G UUUGCUGA | 1612 | UCAGCAAA UGAUG GCAUGCACUAUGC GCG ACUUGGCA | 9012 |
| 1251 | GAACCUUU G UGUCUCCU | 1613 | AGGAGACA UGAUG GCAUGCACUAUGC GCG AAAGGUUC | 9013 |
| 1253 | ACCUUUGU G UCUCCUCU | 1614 | AGAGGAGA UGAUG GCAUGCACUAUGC GCG ACAAAGGU | 9014 |
| 1294 | AGCCGCUU G UUUUGCUC | 1615 | GAGCAAAA UGAUG GCAUGCACUAUGC GCG AAGCGCCU | 9015 |
| 1344 | ACAAUUCU G UCGUGCUC | 1616 | GAGCACGA UGAUG GCAUGCACUAUGC GCG AGAAUUGU | 9016 |
| 1390 | GCUAGGCU G UGCUGCCA | 1617 | UGGCAGCA UGAUG GCAUGCACUAUGC GCG AGCCUAGC | 9017 |
| 1425 | CGUCCUUU G UUUACGUC | 1618 | GACGUAAA UGAUG GCAUGCACUAUGC GCG AAAGGACG | 9018 |
| 1508 | CGCCUAUU G UACCGACC | 1619 | GGUCGGUA UGAUG GCAUGCACUAUGC GCG AAUAGGCG | 9019 |
| 1557 | CCCCGUCU G UGCCUUCU | 1620 | AGAAGGCA UGAUG GCAUGCACUAUGC GCG AGACGGGG | 9020 |
| 1581 | CGGACCGU G UGCACUUC | 1621 | GAAGUGCA UGAUG GCAUGCACUAUGC GCG ACGGUCCG | 9021 |
| 1684 | UCAGCAAU G UCAACGAC | 1622 | GUCGUUGA UGAUG GCAUGCACUAUGC GCG AUUGCUGA | 9022 |
| 1719 | CAAAGACU G UGUGUUUA | 1623 | UAAACACA UGAUG GCAUGCACUAUGC GCG AGUCUUUG | 9023 |
| 1721 | AAGACUGU G UGUUUAAU | 1624 | AUUAAACA UGAUG GCAUGCACUAUGC GCG ACAGUCUU | 9024 |
| 1723 | GACUGUGU G UUUAAUGA | 1625 | UCAUUAAA UGAUG GCAUGCACUAUGC GCG ACACAGUC | 9025 |
| 1772 | AGGUCUUU G UACUAGGA | 1626 | UCCUAGUA UGAUG GCAUGCACUAUGC GCG AAAGACCU | 9026 |
| 1785 | AGGAGGCU G UAGGCAUA | 1627 | UAUGCCUA UGAUG GCAUGCACUAUGC GCG AGCCUCCU | 9027 |
| 1801 | AAAUUGGU G UGUUCACC | 1628 | GGUGAACA UGAUG GCAUGCACUAUGC GCG ACCAAUUU | 9028 |
| 1803 | AUUGGUGU G UUCACCAG | 1629 | CUGGUGAA UGAUG GCAUGCACUAUGC GCG ACACCAAU | 9029 |
| 1850 | CAUCUCAU G UUCAUGUC | 1630 | GACAUGAA UGAUG GCAUGCACUAUGC GCG AUGAGAUG | 9030 |
| 1856 | AUGUUCAU G UCCUACUG | 1631 | CAGUAGGA UGAUG GCAUGCACUAUGC GCG AUGAACAU | 9031 |
| 1864 | GUCCUACU G UUCAAGCC | 1632 | GGCUUGAA UGAUG GCAUGCACUAUGC GCG AGUAGGAC | 9032 |
| 1881 | UCCAAGCU G UGCCUUGG | 1633 | CCAAGGCA UGAUG GCAUGCACUAUGC GCG AGCUUGGA | 9033 |
| 1939 | GAGCUUCU G UGGAGUUA | 1634 | UAACUCCA UGAUG GCAUGCACUAUGC GCG AGAAGCUC | 9034 |
| 2013 | UCUGCUCU G UAUCGGGG | 1635 | CCCCGAUA UGAUG GCAUGCACUAUGC GCG AGAGCAGA | 9035 |
| 2045 | GGAACAUU G UUCACCUC | 1636 | GAGGUGAA UGAUG GCAUGCACUAUGC GCG AAUGUUCC | 9036 |
| 2082 | GCUAUUCU G UGUUGGGG | 1637 | CCCCAACA UGAUG GCAUGCACUAUGC GCG AGAAUAGC | 9037 |
| 2084 | UAUUCUGU G UUGGGGUG | 1638 | CACCCCAA UGAUG GCAUGCACUAUGC GCG ACAGAAUA | 9038 |
| 2167 | UCAGCUAU G UCAACGUU | 1639 | AACGUUGA UGAUG GCAUGCACUAUGC GCG AUAGCUGA | 9039 |
| 2205 | CAACUAUU G UGGUUUCA | 1640 | UGAAACCA UGAUG GCAUGCACUAUGC GCG AAUAGUUG | 9040 |
| 2222 | CAUUUCCU G UCUUACUU | 1641 | AAGUAAGA UGAUG GCAUGCACUAUGC GCG AGGAAAUG | 9041 |
| 2245 | GAGAAACU G UUCUUGAA | 1642 | UUCAAGAA UGAUG GCAUGCACUAUGC GCG AGUUUCUC | 9042 |
| 2262 | UAUUUGGU G UCUUUUGG | 1643 | CCAAAAGA UGAUG GCAUGCACUAUGC GCG ACCAAAUA | 9043 |
| 2274 | UUUGGAGU G UGGAUUCG | 1644 | CGAAUCCA UGAUG GCAUGCACUAUGC GCG ACUCCAAA | 9044 |
| 2344 | AAACUACU G UUGUUAGA | 1645 | UCUAACAA UGAUG GCAUGCACUAUGC GCG AGUAGUUU | 9045 |
| 2347 | CUACUGUU G UUAGACGA | 1646 | UCGUCUAA UGAUG GCAUGCACUAUGC GCG AACAGUAG | 9046 |
| 2450 | AUCUCAAU G UUAGUAUU | 1647 | AAUACUAA UGAUG GCAUGCACUAUGC GCG AUUGAGAU | 9047 |
| 2573 | AGGACAUU G UUGAUAGA | 1648 | UCUAUCAA UGAUG GCAUGCACUAUGC GCG AAUGUCCU | 9048 |
| 2583 | UGAUAGAU G UAAGCAAU | 1649 | AUUGCUUA UGAUG GCAUGCACUAUGC GCG AUCUAUCA | 9049 |
| 2594 | AGCAAUUU G UGGGGCCC | 1650 | GGGCCCCA UGAUG GCAUGCACUAUGC GCG AAAUUGCU | 9050 |
| 2663 | AUCCCAAU G UUACUAAA | 1651 | UUUAGUAA UGAUG GCAUGCACUAUGC GCG AUUGGGAU | 9051 |
| 2717 | CAGAGUAU G UAGUUAAU | 1652 | AUUAACUA UGAUG GCAUGCACUAUGC GCG AUACUCUG | 9052 |
| 2901 | AUCUUUCU G UCCCCAAU | 1653 | AUUGGGGA UGAUG GCAUGCACUAUGC GCG AGAAAGAU | 9053 |
| 3071 | GGGGGACU G UUGGGGUG | 1654 | CACCCCAA UGAUG GCAUGCACUAUGC GCG AGUCCCCC | 9054 |
| 3111 | UCACAACU G UGCCAGCA | 1655 | UGCUGGCA UGAUG GCAUGCACUAUGC GCG AGUUGUGA | 9055 |

Input Sequence = AF100308.
Cut Site = YG/M or UG/U.
Stem Length = 8.
Core Sequence = UGAUG GCAUGCACUAUGC GCG
AF100308 (Hepatitis B virus strain 2-18, 3215 bp)

[0556] TABLE VIII

HUMAN HBV ZINZYME AND SUBSTRATE SEQUENCE

| | | | | |
|---|---|---|---|---|
| Pos | Substrate | Seq ID | Zinzyme | Seq ID |

| | | | | |
|---|---|---|---|---|
| 61 | ACUUUCCU G CUGGUGGC | 1448 | GCCACCAG GCcgaaagGCGaGuCaaGGuCu AGGAAAGU | 9056 |
| 94 | UGAGCCCU G CUCAGAAU | 1450 | AUUCUGAG GCcgaaagGCGaGuCaaGGuCu AGGGCUCA | 9057 |
| 112 | CUGUCUCU G CCAUAUCG | 1451 | CGAUAUGG GCcgaaagGCGaGuCaaGGuCu AGAGACAG | 9058 |
| 169 | AGAACAUC G CAUCAGGA | 1454 | UCCUGAUG GCcgaaagGCGaGuCaaGGuCu GAUGUUCU | 9059 |
| 192 | GGACCCCU G CUCGUGUU | 1455 | AACACGAG GCcgaaagGCGaGuCaaGGuCu AGGGGUCC | 9060 |
| 315 | CAAAAUUC G CAGUCCCA | 1457 | UGGGACUG GCcgaaagGCGaGuCaaGGuCu GAAUUUUG | 9061 |
| 374 | UGGUUAUC G CUGGAUGU | 1458 | ACAUCCAG GCcgaaagGCGaGuCaaGGuCu GAUAACCA | 9062 |
| 387 | AUGUGUCU G CGGCGUUU | 1459 | AAACGCCG GCcgaaagGCGaGuCaaGGuCu AGACACAU | 9063 |
| 410 | CUUCCUCU G CAUCCUGC | 1460 | GCAGGAUG GCcgaaagGCGaGuCaaGGuCu AGAGGAAG | 9064 |
| 417 | UGCAUCCU G CUGCUAUG | 1461 | CAUAGCAG GCcgaaagGCGaGuCaaGGuCu AGGAUGCA | 9065 |
| 420 | AUCCUGCU G CUAUGCCU | 1462 | AGGCAUAG GCcgaaagGCGaGuCaaGGuCu AGCAGGAU | 9066 |
| 425 | GCUGCUAU G CCUCAUCU | 1463 | AGAUGAGG GCcgaaagGCGaGuCaaGGuCu AUAGCAGC | 9067 |
| 468 | GGUAUGUU G CCCGUUUG | 1464 | CAAACGGG GCcgaaagGCGaGuCaaGGuCu AACAUACC | 9068 |
| 518 | CGGACCAU G CAAAACCU | 1465 | AGGUUUUG GCcgaaagGCGaGuCaaGGuCu AUGGUCCG | 9069 |
| 527 | CAAAACCU G CACAACUC | 1466 | GAGUUGUG GCcgaaagGCGaGuCaaGGuCu AGGUUUUG | 9070 |
| 538 | CAACUCCU G CUCAAGGA | 1467 | UCCUUGAG GCcgaaagGCGaGuCaaGGuCu AGGAGUUG | 9071 |
| 569 | CUCAUGUU G CUGUACAA | 1468 | UUGUACAG GCcgaaagGCGaGuCaaGGuCu AACAUGAG | 9072 |
| 596 | CGGAAACU G CACCUGUA | 1469 | UACAGGUG GCcgaaagGCGaGuCaaGGuCu AGUUUCCG | 9073 |
| 631 | GGGCUUUC G CAAAAUAC | 1470 | GUAUUUUG GCcgaaagGCGaGuCaaGGuCu GAAAGCCC | 9074 |
| 687 | UUACUAGU G CCAUUUGU | 1471 | ACAAAUGG GCcgaaagGCGaGuCaaGGuCu ACUAGUAA | 9075 |
| 795 | CCCUUUAU G CCGCUGUU | 1474 | AACAGCGG GCcgaaagGCGaGuCaaGGuCu AUAAAGGG | 9076 |
| 798 | UUUAUGCC G CUGUUACC | 1475 | GGUAACAG GCcgaaagGCGaGuCaaGGuCu GGCAUAAA | 9077 |
| 911 | GGCACAUU G CCACAGGA | 1476 | UCCUGUGG GCcgaaagGCGaGuCaaGGuCu AAUGUGCC | 9078 |
| 1020 | UGGGGUUU G CCGCCCCU | 1479 | AGGGGCGG GCcgaaagGCGaGuCaaGGuCu AAACCCCA | 9079 |
| 1023 | GGUUUGCC G CCCCUUUC | 1480 | GAAAGGGG GCcgaaagGCGaGuCaaGGuCu GGCAAACC | 9080 |
| 1034 | CCUUUCAC G CAAUGUGG | 1481 | CCACAUUG GCcgaaagGCGaGuCaaGGuCu GUGAAAGG | 9081 |
| 1050 | GAUAUUCU G CUUUAAUG | 1482 | CAUUAAAG GCcgaaagGCGaGuCaaGGuCu AGAAUAUC | 9082 |
| 1058 | GCUUUAAU G CCUUUAUA | 1483 | UAUAAAGG GCcgaaagGCGaGuCaaGGuCu AUUAAAGC | 9083 |
| 1068 | CUUUAUAU G CAUGCAUA | 1484 | UAUGCAUG GCcgaaagGCGaGuCaaGGuCu AUAUAAAG | 9084 |
| 1072 | AUAUGCAU G CAUACAAG | 1485 | CUUGUAUG GCcgaaagGCGaGuCaaGGuCu AUGCAUAU | 9085 |
| 1103 | ACUUUCUC G CCAACUUA | 1486 | UAAGUUGG GCcgaaagGCGaGuCaaGGuCu GAGAAAGU | 9086 |
| 1155 | ACCCCGUU G CUCGGCAA | 1488 | UUGCCGAG GCcgaaagGCGaGuCaaGGuCu AACGGGGU | 9087 |
| 1177 | UGGUCUAU G CCAAGUGU | 1489 | ACACUUGG GCcgaaagGCGaGuCaaGGuCu AUAGACCA | 9088 |
| 1188 | AAGUGUUU G CUGACGCA | 1490 | UGCGUCAG GCcgaaagGCGaGuCaaGGuCu AAACACUU | 9089 |
| 1194 | UUGCUGAC G CAACCCCC | 1492 | GGGGGUUG GCcgaaagGCGaGuCaaGGuCu GUCAGCAA | 9090 |
| 1234 | CCAUCAGC G CAUGCGUG | 1493 | CACGCAUG GCcgaaagGCGaGuCaaGGuCu GCUGAUGG | 9091 |
| 1238 | CAGCGCAU G CGUGGAAC | 1494 | GUUCCACG GCcgaaagGCGaGuCaaGGuCu AUGCGCUG | 9092 |
| 1262 | UCUCCUCU G CCGAUCCA | 1495 | UGGAUCGG GCcgaaagGCGaGuCaaGGuCu AGAGGAGA | 9093 |
| 1275 | UCCAUACC G CGGAACUC | 1497 | GAGUUCCG GCcgaaagGCGaGuCaaGGuCu GGUAUGGA | 9094 |
| 1290 | UCCUAGCC G CUUGUUUU | 1498 | AAAACAAG GCcgaaagGCGaGuCaaGGuCu GGCUAGGA | 9095 |
| 1299 | CUUGUUUU G CUCGCAGC | 1499 | GCUGCGAG GCcgaaagGCGaGuCaaGGuCu AAAACAAG | 9096 |
| 1303 | UUUUGCUC G CAGCAGGU | 1500 | ACCUGCUG GCcgaaagGCGaGuCaaGGuCu GAGCAAAA | 9097 |
| 1349 | UCUGUCGU G CUCUCCCG | 1502 | CGGGAGAG GCcgaaagGCGaGuCaaGGuCu ACGACAGA | 9098 |
| 1357 | GCUCUCCC G CAAAUAUA | 1503 | UAUAUUUG GCcgaaagGCGaGuCaaGGuCu GGGAGAGC | 9099 |
| 1382 | CCAUGGCU G CUAGGCUG | 1504 | CAGCCUAG GCcgaaagGCGaGuCaaGGuCu AGCCAUGG | 9100 |
| 1392 | UAGGCUGU G CUGCCAAC | 1505 | GUUGGCAG GCcgaaagGCGaGuCaaGGuCu ACAGCCUA | 9101 |
| 1395 | GCUGUGCU G CCAACUGG | 1506 | CCAGUUGG GCcgaaagGCGaGuCaaGGuCu AGCACAGC | 9102 |
| 1411 | GAUCCUAC G CGGGACGU | 1507 | ACGUCCCG GCcgaaagGCGaGuCaaGGuCu GUAGGAUC | 9103 |
| 1442 | CCGUCGGC G CUGAAUCC | 1508 | GGAUUCAG GCcgaaagGCGaGuCaaGGuCu GCCGACGG | 9104 |
| 1452 | UGAAUCCC G CGGACGAC | 1510 | GUCGUCCG GCcgaaagGCGaGuCaaGGuCu GGGAUUCA | 9105 |
| 1474 | CCGGGGCC G CUUGGGGC | 1512 | GCCCCAAG GCcgaaagGCGaGuCaaGGuCu GGCCCCGG | 9106 |
| 1489 | GCUCUACC G CCCGCUUC | 1513 | GAAGCGGG GCcgaaagGCGaGuCaaGGuCu GGUAGAGC | 9107 |
| 1493 | UACCGCCC G CUUCUCCG | 1514 | CGGAGAAG GCcgaaagGCGaGuCaaGGuCu GGGCGGUA | 9108 |
| 1501 | GCUUCUCC G CCUAUUGU | 1515 | ACAAUAGG GCcgaaagGCGaGuCaaGGuCu GGAGAAGC | 9109 |
| 1528 | CACGGGGC G CACCUCUC | 1517 | GAGAGGUG GCcgaaagGCGaGuCaaGGuCu GCCCCGUG | 9110 |
| 1542 | CUCUUUAC G CGGACUCC | 1518 | GGAGUCCG GCcgaaagGCGaGuCaaGGuCu GUAAAGAG | 9111 |
| 1559 | CCGUCUGU G CCUUCUCA | 1519 | UGAGAAGG GCcgaaagGCGaGuCaaGGuCu ACAGACGG | 9112 |
| 1571 | UCUCAUCU G CCGGACCG | 1520 | CGGUCCGG GCcgaaagGCGaGuCaaGGuCu AGAUGAGA | 9113 |
| 1583 | GACCGUGU G CACUUCGC | 1521 | GCGAAGUG GCcgaaagGCGaGuCaaGGuCu ACACGGUC | 9114 |
| 1590 | UGCACUUC G CUUCACCU | 1522 | AGGUGAAG GCcgaaagGCGaGuCaaGGuCu GAAGUGCA | 9115 |
| 1601 | UCACCUCU G CACGUCGC | 1523 | GCGACGUG GCcgaaagGCGaGuCaaGGuCu AGAGGUGA | 9116 |
| 1608 | UGCACGUC G CAUGGAGA | 1524 | UCUCCAUG GCcgaaagGCGaGuCaaGGuCu GACGUGCA | 9117 |
| 1628 | CCGUGAAC G CCCACAGG | 1526 | CCUGUGGG GCcgaaagGCGaGuCaaGGuCu GUUCACGG | 9118 |
| 1642 | AGGAACCU G CCCAAGGU | 1527 | ACCUUGGG GCcgaaagGCGaGuCaaGGuCu AGGUUCCU | 9119 |
| 1654 | AAGGUCUU G CAUAAGAG | 1528 | CUCUUAUG GCcgaaagGCGaGuCaaGGuCu AAGACCUU | 9120 |
| 1818 | AGCACCAU G CAACUUUU | 1533 | AAAAGUUG GCcgaaagGCGaGuCaaGGuCu AUGGUGCU | 9121 |
| 1835 | UCACCUCU G CCUAAUCA | 1534 | UGAUUAGG GCcgaaagGCGaGuCaaGGuCu AGAGGUGA | 9122 |
| 1883 | CAAGCUGU G CCUUGGGU | 1535 | ACCCAAGG GCcgaaagGCGaGuCaaGGuCu ACAGCUUG | 9123 |
| 1959 | UCUUUUUU G CCUUCUGA | 1537 | UCAGAAGG GCcgaaagGCGaGuCaaGGuCu AAAAAACA | 9124 |
| 2002 | UCGACACC G CCUCUGCU | 1541 | AGCAGAGG GCcgaaagGCGaGuCaaGGuCu GGUGUCGA | 9125 |
| 2008 | CCGCCUCU G CUCUGUAU | 1542 | AUACAGAG GCcgaaagGCGaGuCaaGGuCu AGAGGCGG | 9126 |
| 2282 | GUGGAUUC G CACUCCUC | 1548 | GAGGAGUG GCcgaaagGCGaGuCaaGGuCu GAAUCCAC | 9127 |
| 2293 | CUCCUCCU G CAUAUAGA | 1549 | UCUAUAUG GCcgaaagGCGaGuCaaGGuCu AGGAGGAG | 9128 |
| 2311 | CACCAAAU G CCCCUAUC | 1550 | GAUAGGGG GCcgaaagGCGaGuCaaGGuCu AUUUGGUG | 9129 |
| 2388 | ACUCCCUC G CCUCGCAG | 1552 | CUGCGAGG GCcgaaagGCGaGuCaaGGuCu GAGGGAGU | 9130 |
| 2393 | CUCGCCUC G CAGACGAA | 1553 | UUCGUCUG GCcgaaagGCGaGuCaaGGuCu GAGGCGAG | 9131 |
| 2412 | UCUCAAUC G CCGCGUCG | 1555 | CGACGCGG GCcgaaagGCGaGuCaaGGuCu GAUUGAGA | 9132 |
| 2415 | CAAUCGCC G CGUCGCAG | 1556 | CUGCGACG GCcgaaagGCGaGuCaaGGuCu GGCGAUUG | 9133 |
| 2420 | GCCGCGUC G CAGAAGAU | 1557 | AUCUUCUG GCcgaaagGCGaGuCaaGGuCu GACGCGGC | 9134 |
| 2514 | GGUACCUU G CUUUAAUC | 1558 | GAUUAAAG GCcgaaagGCGaGuCaaGGuCu AAGGUACC | 9135 |
| 2560 | AUUCAUUU G CAGGAGGA | 1560 | UCCUCCUG GCcgaaagGCGaGuCaaGGuCu AAAUGAAU | 9136 |
| 2641 | UUAACUAU G CCUGCUAG | 1563 | CUAGCAGG GCcgaaagGCGaGuCaaGGuCu AUAGUUAA | 9137 |
| 2645 | CUAUGCCU G CUAGGUUU | 1564 | AAACCUAG GCcgaaagGCGaGuCaaGGuCu AGGCAUAG | 9138 |
| 2677 | AAAUAUUU G CCCUUAGA | 1565 | UCUAAGGG GCcgaaagGCGaGuCaaGGuCu AAAUAUUU | 9139 |
| 2740 | UUCCAGAC G CGACAUUA | 1566 | UAAUGUCG GCcgaaagGCGaGuCaaGGuCu GUCUGGAA | 9140 |
| 2804 | CACGUAGC G CCUCAUUU | 1568 | AAAUGAGG GCcgaaagGCGaGuCaaGGuCu GCUACGUC | 9141 |
| 2814 | CUCAUUUU G CGGGUCAC | 1569 | GUGACCCG GCcgaaagGCGaGuCaaGGuCu AAAAUGAG | 9142 |
| 2946 | UGGACCCU G CAUUCAAA | 1572 | UUUGAAUG GCcgaaagGCGaGuCaaGGuCu AGGGUCCA | 9143 |
| 2990 | CUCAACCC G CACAAGGA | 1573 | UCCUUGUG GCcgaaagGCGaGuCaaGGuCu GGGUUGAG | 9144 |
| 3012 | GGCCGGAC G CCAACAAG | 1574 | CUUGUUGG GCcgaaagGCGaGuCaaGGuCu GUCCGGCC | 9145 |
| 3090 | GCCCUCAC G CUCAGGGC | 1575 | GCCCUGAG GCcgaaagGCGaGuCaaGGuCu GUGAGGGC | 9146 |
| 3113 | ACAACUGU G CCAGCAGC | 1576 | GCUGCUGG GCcgaaagGCGaGuCaaGGuCu ACAGUUGU | 9147 |
| 3132 | CUCCUCCU G CCUCCACC | 1577 | GGUGGAGG GCcgaaagGCGaGuCaaGGuCu AGGAGGAG | 9148 |
| 51 | AGGGCCCU G UACUUUCC | 1578 | GGAAAGUA GCcgaaagGCGaGuCaaGGuCu AGGGCCCU | 9149 |
| 106 | AGAAUACU G UCUCUGCC | 1579 | GGCAGAGA GCcgaaagGCGaGuCaaGGuCu AGUAUUCU | 9150 |
| 148 | GGGACCCU G UACCGAAC | 1580 | GUUCGGUA GCcgaaagGCGaGuCaaGGuCu AGGGUCCC | 9151 |
| 198 | CUGCUCGU G UUACAGGC | 1581 | GCCUGUAA GCcgaaagGCGaGuCaaGGuCu ACGAGCAG | 9152 |
| 219 | UUUUUCUU G UUGACAAA | 1582 | UUUGUCAA GCcgaaagGCGaGuCaaGGuCu AAGAAAAA | 9153 |
| 297 | ACACCCGU G UGUCUUGG | 1583 | CCAAGACA GCcgaaagGCGaGuCaaGGuCu ACGGGUGU | 9154 |
| 299 | ACCCGUGU G UCUUGGCC | 1584 | GGCCAAGA GCcgaaagGCGaGuCaaGGuCu ACACGGGU | 9155 |
| 347 | ACCAACCU G UUGUCCUC | 1585 | GAGGACAA GCcgaaagGCGaGuCaaGGuCu AGGUUGGU | 9156 |
| 350 | AACCUGUU G UCCUCCAA | 1586 | UUGGAGGA GCcgaaagGCGaGuCaaGGuCu AACAGGUU | 9157 |
| 362 | UCCAAUUU G UCCUGGUU | 1587 | AACCAGGA GCcgaaagGCGaGuCaaGGuCu AAAUUGGA | 9158 |
| 381 | CGCUGGAU G UGUCUGCG | 1588 | CGCAGACA GCcgaaagGCGaGuCaaGGuCu AUCCAGCG | 9159 |
| 383 | CUGGAUGU G UCUGCGGC | 1589 | GCCGCAGA GCcgaaagGCGaGuCaaGGuCu ACAUCCAG | 9160 |
| 438 | AUCUUCUU G UUGGUUCU | 1590 | AGAACCAA GCcgaaagGCGaGuCaaGGuCu AAGAAGAU | 9161 |
| 465 | CAAGGUAU G UUGCCCGU | 1591 | ACGGGCAA GCcgaaagGCGaGuCaaGGuCu AUACCUUG | 9162 |
| 476 | GCCCGUUU G UCCUCUAA | 1592 | UUAGAGGA GCcgaaagGCGaGuCaaGGuCu AAACGGGC | 9163 |
| 555 | ACCUCUAU G UUUCCCUC | 1593 | GAGGGAAA GCcgaaagGCGaGuCaaGGuCu AUAGAGGU | 9164 |
| 566 | UCCCUCAU G UUGCUGUA | 1594 | UACAGCAA GCcgaaagGCGaGuCaaGGuCu AUGAGGGA | 9165 |
| 572 | AUGUUGCU G UACAAAAC | 1595 | GUUUUGUA GCcgaaagGCGaGuCaaGGuCu AGCAACAU | 9166 |
| 602 | CUGCACCU G UAUUCCCA | 1596 | UGGGAAUA GCcgaaagGCGaGuCaaGGuCu AGGUGCAG | 9167 |
| 694 | UGCCAUUU G UUCAGUGG | 1597 | CCACUGAA GCcgaaagGCGaGuCaaGGuCu AAAUGGCA | 9168 |
| 724 | CCCCCACU G UCUGGCUU | 1598 | AAGCCAGA GCcgaaagGCGaGuCaaGGuCu AGUGGGGG | 9169 |
| 750 | UGGAUGAU G UGGUUUUG | 1599 | CAAAACCA GCcgaaagGCGaGuCaaGGuCu AUCAUCCA | 9170 |
| 771 | CCAAGUCU G UACAACAU | 1600 | AUGUUGUA GCcgaaagGCGaGuCaaGGuCu AGACUUGG | 9171 |
| 801 | AUGCCGCU G UUACCAAU | 1601 | AUUGGUAA GCcgaaagGCGaGuCaaGGuCu AGCGGCAU | 9172 |
| 818 | UUUCUUUU G UCUUUGGG | 1602 | CCCAAAGA GCcgaaagGCGaGuCaaGGuCu AAAAGAAA | 9173 |
| 888 | UGGGAUAU G UAAUUGGG | 1603 | CCCAAUUA GCcgaaagGCGaGuCaaGGuCu AUAUCCCA | 9174 |
| 927 | AACAUAUU G UACAAAAA | 1604 | UUUUUGUA GCcgaaagGCGaGuCaaGGuCu AAUAUGUU | 9175 |
| 944 | AUCAAAAU G UGUUUUAG | 1605 | CUAAAACA GCcgaaagGCGaGuCaaGGuCu AUUUUGAU | 9176 |
| 946 | CAAAAUGU G UUUUAGGA | 1606 | UCCUAAAA GCcgaaagGCGaGuCaaGGuCu ACAUUUUG | 9177 |
| 963 | AACUUCCU G UAAACAGG | 1607 | CCUGUUUA GCcgaaagGCGaGuCaaGGuCu AGGAAGUU | 9178 |
| 991 | GAAAGUAU G UCAACGAA | 1608 | UUCGUUGA GCcgaaagGCGaGuCaaGGuCu AUACUUUC | 9179 |
| 1002 | AACGAAUU G UGGGUCUU | 1609 | AAGACCCA GCcgaaagGCGaGuCaaGGuCu AAUUCGUU | 9180 |
| 1039 | CACGCAAU G UGGAUAUU | 1610 | AAUAUCCA GCcgaaagGCGaGuCaaGGuCu AUUGCGUG | 9181 |
| 1137 | AACAGUAU G UGAACCUU | 1611 | AAGGUUCA GCcgaaagGCGaGuCaaGGuCu AUACUGUU | 9182 |
| 1184 | UGCCAAGU G UUUGCUGA | 1612 | UCAGCAAA GCcgaaagGCGaGuCaaGGuCu ACUUGGCA | 9183 |
| 1251 | GAACCUUU G UGUCUCCU | 1613 | AGGAGACA GCcgaaagGCGaGuCaaGGuCu AAAGGUUC | 9184 |
| 1253 | ACCUUUGU G UCUCCUCU | 1614 | AGAGGAGA GCcgaaagGCGaGuCaaGGuCu ACAAAGGU | 9185 |
| 1294 | AGCCGCUU G UUUUGCUC | 1615 | GAGCAAAA GCcgaaagGCGaGuCaaGGuCu AAGCGGCU | 9186 |
| 1344 | ACAAUUCU G UCGUGCUC | 1616 | GAGCACGA GCcgaaagGCGaGuCaaGGuCu AGAAUUGU | 9187 |
| 1390 | GCUAGGCU G UGCUGCCA | 1617 | UGGCAGCA GCcgaaagGCGaGuCaaGGuCu AGCCUAGC | 9188 |
| 1425 | CGUCCUUU G UUUACGUC | 1618 | GACGUAAA GCcgaaagGCGaGuCaaGGuCu AAAGGACG | 9189 |
| 1508 | CGCCUAUU G UACCGACC | 1619 | GGUCGGUA GCcgaaagGCGaGuCaaGGuCu AAUAGGCG | 9190 |
| 1557 | CCCCGUCU G UGCCUUCU | 1620 | AGAAGGCA GCcgaaagGCGaGuCaaGGuCu AGACGGGG | 9191 |
| 1581 | CGGACCGU G UGCACUUC | 1621 | GAAGUGCA GCcgaaagGCGaGuCaaGGuCu ACGGUCCG | 9192 |
| 1684 | UCAGCAAU G UCAACGAC | 1622 | GUCGUUGA GCcgaaagGCGaGuCaaGGuCu AUUGCUGA | 9193 |
| 1719 | CAAAGACU G UGUGUUUA | 1623 | UAAACACA GCcgaaagGCGaGuCaaGGuCu AGUCUUUG | 9194 |
| 1721 | AAGACUGU G UGUUUAAU | 1624 | AUUAAACA GCcgaaagGCGaGuCaaGGuCu ACAGUCUU | 9195 |
| 1723 | GACUGUGU G UUUAAUGA | 1625 | UCAUUAAA GCcgaaagGCGaGuCaaGGuCu ACACAGUC | 9196 |
| 1772 | AGGUCUUU G UACUAGGA | 1626 | UCCUAGUA GCcgaaagGCGaGuCaaGGuCu AAAGACCU | 9197 |
| 1785 | AGGAGGCU G UAGGCAUA | 1627 | UAUGCCUA GCcgaaagGCGaGuCaaGGuCu AGCCUCCU | 9198 |
| 1801 | AAAUUGGU G UGUUCACC | 1628 | GGUGAACA GCcgaaagGCGaGuCaaGGuCu ACCAAUUU | 9199 |
| 1803 | AUUGGUGU G UUCACCAG | 1629 | CUGGUGAA GCcgaaagGCGaGuCaaGGuCu ACACCAAU | 9200 |
| 1850 | CAUCUCAU G UUCAUGUC | 1630 | GACAUGAA GCcgaaagGCGaGuCaaGGuCu AUGAGAUG | 9201 |
| 1856 | AUGUUCAU G UCCUACUG | 1631 | CAGUAGGA GCcgaaagGCGaGuCaaGGuCu AUGAACAU | 9202 |
| 1864 | GUCCUACU G UUCAAGCC | 1632 | GGCUUGAA GCcgaaagGCGaGuCaaGGuCu AGUAGGAC | 9203 |
| 1881 | UCCAAGCU G UGCCUUGG | 1633 | CCAAGGCA GCcgaaagGCGaGuCaaGGuCu AGCUUGGA | 9204 |
| 1939 | GAGCUUCU G UGGAGUUA | 1634 | UAACUCCA GCcgaaagGCGaGuCaaGGuCu AGAAGCUC | 9205 |
| 2013 | UCUGCUCU G UAUCGGGG | 1635 | CCCCGAUA GCcgaaagGCGaGuCaaGGuCu AGAGCAGA | 9206 |
| 2045 | GGAACAUU G UUCACCUC | 1636 | GAGGUGAA GCcgaaagGCGaGuCaaGGuCu AAUGUUCC | 9207 |
| 2082 | GCUAUUCU G UGUUGGGG | 1637 | CCCCAACA GCcgaaagGCGaGuCaaGGuCu AGAAUAGC | 9208 |
| 2084 | UAUUCUGU G UUGGGGUG | 1638 | CACCCCAA GCcgaaagGCGaGuCaaGGuCu ACAGAAUA | 9209 |
| 2167 | UCAGCUAU G UCAACGUU | 1639 | AACGUUGA GCcgaaagGCGaGuCaaGGuCu AUAGCUGA | 9210 |
| 2205 | CAACUAUU G UGGUUUCA | 1640 | UGAAACCA GCcgaaagGCGaGuCaaGGuCu AAUAGUUG | 9211 |
| 2222 | CAUUUCCU G UCUUACUU | 1641 | AAGUAAGA GCcgaaagGCGaGuCaaGGuCu AGGAAAUG | 9212 |
| 2245 | GAGAAACU G UUCUUGAA | 1642 | UUCAAGAA GCcgaaagGCGaGuCaaGGuCu AGUUUCUC | 9213 |
| 2262 | UAUUUGGU G UCUUUUGG | 1643 | CCAAAAGA GCcgaaagGCGaGuCaaGGuCu ACCAAAUA | 9214 |
| 2274 | UUUGGAGU G UGGAUUCG | 1644 | CGAAUCCA GCcgaaagGCGaGuCaaGGuCu ACUCCAAA | 9215 |
| 2344 | AAACUACU G UUGUUAGA | 1645 | UCUAACAA GCcgaaagGCGaGuCaaGGuCu AGUAGUUU | 9216 |
| 2347 | CUACUGUU G UUAGACGA | 1646 | UCGUCUAA GCcgaaagGCGaGuCaaGGuCu AACAGUAG | 9217 |
| 2450 | AUCUCAAU G UUAGUAUU | 1647 | AAUACUAA GCcgaaagGCGaGuCaaGGuCu AUUGAGAU | 9218 |
| 2573 | AGGACAUU G UUGAUAGA | 1648 | UCUAUCAA GCcgaaagGCGaGuCaaGGuCu AAUGUCCU | 9219 |
| 2583 | UGAUAGAU G UAAGCAAU | 1649 | AUUGCUUA GCcgaaagGCGaGuCaaGGuCu AUCUAUCA | 9220 |
| 2594 | AGCAAUUU G UGGGGCCC | 1650 | GGGCCCCA GCcgaaagGCGaGuCaaGGuCu AAAUUGCU | 9221 |
| 2663 | AUCCCAAU G UUACUAAA | 1651 | UUUAGUAA GCcgaaagGCGaGuCaaGGuCu AUUGGGAU | 9222 |
| 2717 | CAGAGUAU G UAGUUAAU | 1652 | AUUAACUA GCcgaaagGCGaGuCaaGGuCu AUACUCUG | 9223 |
| 2901 | AUCUUUCU G UCCCCAAU | 1653 | AUUGGGGA GCcgaaagGCGaGuCaaGGuCu AGAAAGAU | 9224 |
| 3071 | GGGGGACU G UUGGGGUG | 1654 | CACCCCAA GCcgaaagGCGaGuCaaGGuCu AGUCCCCC | 9225 |
| 3111 | UCACAACU G UGCCAGCA | 1655 | UGCUGGCA GCcgaaagGCGaGuCaaGGuCu AGUUGUGA | 9226 |
| 40 | AUCCCAGA G UCAGGGCC | 1656 | GGCCCUGA GCcgaaagGCGaGuCaaGGuCu UCUGGGAU | 9227 |
| 46 | GAGUCAGG G CCCUGUAC | 1657 | GUACAGGG GCcgaaagGCGaGuCaaGGuCu CCUGACUC | 9228 |
| 65 | UCCUGCUG G UGGCUCCA | 1658 | UGGAGCCA GCcgaaagGCGaGuCaaGGuCu CAGCAGGA | 9229 |
| 68 | UGCUGGUG G CUCCAGUU | 1659 | AACUGGAG GCcgaaagGCGaGuCaaGGuCu CACCAGCA | 9230 |
| 74 | UGGCUCCA G UUCAGGAA | 1660 | UUCCUGAA GCcgaaagGCGaGuCaaGGuCu UGGAGCCA | 9231 |
| 85 | CAGGAACA G UGAGCCCU | 1661 | AGGGCUCA GCcgaaagGCGaGuCaaGGuCu UGUUCCUG | 9232 |
| 89 | AACAGUGA G CCCUGCUC | 1662 | GAGCAGGG GCcgaaagGCGaGuCaaGGuCu UCACUGUU | 9233 |
| 120 | GCCAUAUC G UCAAUCUU | 1663 | AAGAUUGA GCcgaaagGCGaGuCaaGGuCu GAUAUGGC | 9234 |
| 196 | CCCUGCUC G UGUUACAG | 1664 | CUGUAACA GCcgaaagGCGaGuCaaGGuCu GAGCAGGG | 9235 |
| 205 | UGUUACAG G CGGGGUUU | 1665 | AAACCCCG GCcgaaagGCGaGuCaaGGuCu CUGUAACA | 9236 |
| 210 | CAGGCGGG G UUUUUCUU | 1666 | AAGAAAAA GCcgaaagGCGaGuCaaGGuCu CCCGCCUG | 9237 |
| 248 | ACCACAGA G UCUAGACU | 1667 | AGUCUAGA GCcgaaagGCGaGuCaaGGuCu UCUGUGGU | 9238 |
| 258 | CUAGACUC G UGGUGGAC | 1668 | GUCCACCA GCcgaaagGCGaGuCaaGGuCu GAGUCUAG | 9239 |
| 261 | GACUCGUG G UGGACUUC | 1669 | GAAGUCCA GCcgaaagGCGaGuCaaGGuCu CACGAGUC | 9240 |
| 295 | GAACACCC G UGUGUCUU | 1670 | AAGACACA GCcgaaagGCGaGuCaaGGuCu GGGUGUUC | 9241 |
| 305 | GUGUCUUG G CCAAAAUU | 1671 | AAUUUUGG GCcgaaagGCGaGuCaaGGuCu CAAGACAC | 9242 |
| 318 | AAUUCGCA G UCCCAAAU | 1672 | AUUUGGGA GCcgaaagGCGaGuCaaGGuCu UGCGAAUU | 9243 |
| 332 | AAUCUCCA G UCACUCAC | 1673 | GUGAGUGA GCcgaaagGCGaGuCaaGGuCu UGGAGAUU | 9244 |
| 368 | UUGUCCUG G UUAUCGCU | 1674 | AGCGAUAA GCcgaaagGCGaGuCaaGGuCu CAGGACAA | 9245 |
| 390 | UGUCUGCG G CGUUUUAU | 1675 | AUAAAACG GCcgaaagGCGaGuCaaGGuCu CGCAGACA | 9246 |
| 392 | UCUGCGGC G UUUUAUCA | 1676 | UGAUAAAA GCcgaaagGCGaGuCaaGGuCu GCCGCAGA | 9247 |
| 442 | UCUUGUUG G UUCUUCUG | 1677 | CAGAAGAA GCcgaaagGCGaGuCaaGGuCu CAACAAGA | 9248 |
| 461 | CUAUCAAG G UAUGUUGC | 1678 | GCAACAUA GCcgaaagGCGaGuCaaGGuCu CUUGAUAG | 9249 |
| 472 | UGUUGCCC G UUUGUCCU | 1679 | AGGACAAA GCcgaaagGCGaGuCaaGGuCu GGGCAACA | 9250 |
| 506 | AACAACCA G CACCGGAC | 1680 | GUCCGGUG GCcgaaagGCGaGuCaaGGuCu UGGUUGUU | 9251 |
| 625 | CAUCUUGG G CUUUCGCA | 1681 | UGCGAAAG GCcgaaagGCGaGuCaaGGuCu CCAAGAUG | 9252 |
| 648 | CUAUGGGA G UGGGCCUC | 1682 | GAGGCCCA GCcgaaagGCGaGuCaaGGuCu UCCCAUAG | 9253 |
| 652 | GGGAGUGG G CCUCAGUC | 1683 | GACUGAGG GCcgaaagGCGaGuCaaGGuCu CCACUCCC | 9254 |
| 658 | GGGCCUCA G UCCGUUUC | 1684 | GAAACGGA GCcgaaagGCGaGuCaaGGuCu UGAGGCCC | 9255 |
| 662 | CUCAGUCC G UUUCUCUU | 1685 | AAGAGAAA GCcgaaagGCGaGuCaaGGuCu GGACUGAG | 9256 |
| 672 | UUCUCUUG G CUCAGUUU | 1686 | AAACUGAG GCcgaaagGCGaGuCaaGGuCu CAAGAGAA | 9257 |
| 677 | UUGGCUCA G UUUACUAG | 1687 | CUAGUAAA GCcgaaagGCGaGuCaaGGuCu UGAGCCAA | 9258 |
| 685 | GUUUACUA G UGCCAUUU | 1688 | AAAUGGCA GCcgaaagGCGaGuCaaGGuCu UAGUAAAC | 9259 |
| 699 | UUUGUUCA G UGGUUCGU | 1689 | ACGAACCA GCcgaaagGCGaGuCaaGGuCu UGAACAAA | 9260 |
| 702 | GUUCAGUG G UUCGUAGG | 1690 | CCUACGAA GCcgaaagGCGaGuCaaGGuCu CACUGAAC | 9261 |
| 706 | AGUGGUUC G UAGGGCUU | 1691 | AAGCCCUA GCcgaaagGCGaGuCaaGGuCu GAACCACU | 9262 |
| 711 | UUCGUAGG G CUUUCCCC | 1692 | GGGGAAAG GCcgaaagGCGaGuCaaGGuCu CCUACGAA | 9263 |
| 729 | ACUGUCUG G CUUUCAGU | 1693 | ACUGAAAG GCcgaaagGCGaGuCaaGGuCu CAGACAGU | 9264 |
| 736 | GGCUUUCA G UUAUAUGG | 1694 | CCAUAUAA GCcgaaagGCGaGuCaaGGuCu UGAAAGCC | 9265 |
| 753 | AUGAUGUG G UUUUGGGG | 1695 | CCCCAAAA GCcgaaagGCGaGuCaaGGuCu CACAUCAU | 9266 |
| 762 | UUUUGGGG G CCAAGUCU | 1696 | AGACUUGG GCcgaaagGCGaGuCaaGGuCu CCCCAAAA | 9267 |
| 767 | GGGGCCAA G UCUGUACA | 1697 | UGUACAGA GCcgaaagGCGaGuCaaGGuCu UUGGCCCC | 9268 |
| 785 | CAUCUUGA G UCCCUUUA | 1698 | UAAAGGGA GCcgaaagGCGaGuCaaGGuCu UCAAGAUG | 9269 |
| 826 | GUCUUUGG G UAUACAUU | 1699 | AAUGUAUA GCcgaaagGCGaGuCaaGGuCu CCAAAGAC | 9270 |
| 898 | AAUUGGGA G UUGGGGCA | 1700 | UGCCCCAA GCcgaaagGCGaGuCaaGGuCu UCCCAAUU | 9271 |
| 904 | GAGUUGGG G CACAUUGC | 1701 | GCAAUGUG GCcgaaagGCGaGuCaaGGuCu CCCAACUC | 9272 |
| 971 | GUAAACAG G CCUAUUGA | 1702 | UCAAUAGG GCcgaaagGCGaGuCaaGGuCu CUGUUUAC | 9273 |
| 987 | AUUGGAAA G UAUGUCAA | 1703 | UUGACAUA GCcgaaagGCGaGuCaaGGuCu UUUCCAAU | 9274 |
| 1006 | AAUUGUGG G UCUUUUGG | 1704 | CCAAAAGA GCcgaaagGCGaGuCaaGGuCu CCACAAUU | 9275 |
| 1016 | CUUUUGGG G UUUGCCGC | 1705 | GCGGCAAA GCcgaaagGCGaGuCaaGGuCu CCCAAAAG | 9276 |
| 1080 | GCAUACAA G CAAAACAG | 1706 | CUGUUUUG GCcgaaagGCGaGuCaaGGuCu UUGUAUGC | 9277 |
| 1089 | CAAAACAG G CUUUUACU | 1707 | AGUAAAAG GCcgaaagGCGaGuCaaGGuCu CUGUUUUG | 9278 |
| 1116 | CUUACAAG G CCUUUCUA | 1708 | UAGAAAGG GCcgaaagGCGaGuCaaGGuCu CUUGUAAG | 9279 |
| 1126 | CUUUCUAA G UAAACAGU | 1709 | ACUGUUUA GCcgaaagGCGaGuCaaGGuCu UUAGAAAG | 9280 |
| 1133 | AGUAAACA G UAUGUGAA | 1710 | UUCACAUA GCcgaaagGCGaGuCaaGGuCu UGUUUACU | 9281 |
| 1152 | UUUACCCC G UUGCUCGG | 1711 | CCGAGCAA GCcgaaagGCGaGuCaaGGuCu GGGGUAAA | 9282 |
| 1160 | GUUGCUCG G CAACGGCC | 1712 | GGCCGUUG GCcgaaagGCGaGuCaaGGuCu CGAGCAAC | 9283 |
| 1166 | CGGCAACG G CCUGGUCU | 1713 | AGACCAGG GCcgaaagGCGaGuCaaGGuCu CGUUGCCG | 9284 |
| 1171 | ACGGCCUG G UCUAUGCC | 1714 | GGCAUAGA GCcgaaagGCGaGuCaaGGuCu CAGGCCGU | 9285 |
| 1182 | UAUGCCAA G UGUUUGCU | 1715 | AGCAAACA GCcgaaagGCGaGuCaaGGuCu UUGGCAUA | 9286 |
| 1207 | CCCCACUG G UUGGGGCU | 1716 | AGCCCCAA GCcgaaagGCGaGuCaaGGuCu CAGUGGGG | 9287 |
| 1213 | UGGUUGGG G CUUGGCCA | 1717 | UGGCCAAG GCcgaaagGCGaGuCaaGGuCu CCCAACCA | 9288 |
| 1218 | GGGGCUUG G CCAUAGGC | 1718 | GCCUAUGG GCcgaaagGCGaGuCaaGGuCu CAAGCCCC | 9289 |
| 1225 | CCCCAUAG G CCAUCAGC | 1719 | GCUGAUGG GCcgaaagGCGaGuCaaGGuCu CUAUGGCC | 9290 |
| 1232 | GGCCAUCA G CGCAUGCG | 1720 | CGCAUGCG GCcgaaagGCGaGuCaaGGuCu UGAUGGCC | 9291 |
| 1240 | GCGCAUGC G UGGAACCU | 1721 | AGGUUCCA GCcgaaagGCGaGuCaaGGuCu GCAUGCGC | 9292 |
| 1287 | AACUCCUA G CCGCUUGU | 1722 | ACAAGCGG GCcgaaagGCGaGuCaaGGuCu UAGGAGUU | 9293 |
| 1306 | UGCUCGCA G CAGGUCUG | 1723 | CAGACCUG GCcgaaagGCGaGuCaaGGuCu UGCGAGCA | 9294 |
| 1310 | CGCAGCAG G UCUGGGGC | 1724 | GCCCCAGA GCcgaaagGCGaGuCaaGGuCu CUGCUGCG | 9295 |
| 1317 | GGUCUGGG G CAAAACUC | 1725 | GAGUUUUG GCcgaaagGCGaGuCaaGGuCu CCCAGACC | 9296 |
| 1347 | AUUCUGUC G UGCUCUCC | 1726 | GGAGAGCA GCcgaaagGCGaGuCaaGGuCu GACAGAAU | 9297 |
| 1379 | UUUCCAUG G CUGCUAGG | 1727 | CCUAGCAG GCcgaaagGCGaGuCaaGGuCu CAUGGAAA | 9298 |
| 1387 | GCUGCUAG G CUGUGCUG | 1728 | CAGCACAG GCcgaaagGCGaGuCaaGGuCu CUAGCAGC | 9299 |
| 1418 | CGCGGGAC G UCCUUUGU | 1729 | ACAAAGGA GCcgaaagGCGaGuCaaGGuCu GUCCCGCG | 9300 |
| 1431 | UUGUUUAC G UCCCGUCG | 1730 | CGACGGGA GCcgaaagGCGaGuCaaGGuCu GUAAACAA | 9301 |
| 1436 | UACGUCCC G UCGGCGCU | 1731 | AGCGCCGA GCcgaaagGCGaGuCaaGGuCu GGGACGUA | 9302 |
| 1440 | UCCCGUCG G CGCUGAAU | 1732 | AUUCAGCG GCcgaaagGCGaGuCaaGGuCu CGACGGGA | 9303 |
| 1471 | CUCCCGGG G CCGCUUGG | 1733 | CCAAGCGG GCcgaaagGCGaGuCaaGGuCu CCCGGGAG | 9304 |
| 1481 | CGCUUGGG G CUCUACCG | 1734 | CGGUAGAG GCcgaaagGCGaGuCaaGGuCu CCCAAGCG | 9305 |
| 1517 | UACCGACC G UCCACGGG | 1735 | CCCGUGGA GCcgaaagGCGaGuCaaGGuCu GGUCGGUA | 9306 |
| 1526 | UCCACGGG G CGCACCUC | 1736 | GAGGUGCG GCcgaaagGCGaGuCaaGGuCu CCCGUGGA | 9307 |
| 1553 | GACUCCCC G UCUGUGCC | 1737 | GGCACAGA GCcgaaagGCGaGuCaaGGuCu GGGGAGUC | 9308 |
| 1579 | GCCGGACC G UGUGCACU | 1738 | AGUGCACA GCcgaaagGCGaGuCaaGGuCu GGUCCGGC | 9309 |
| 1605 | CUCUGCAC G UCGCAUGG | 1739 | CCAUGCGA GCcgaaagGCGaGuCaaGGuCu GUGCAGAG | 9310 |
| 1622 | AGACCACC G UGAACGCC | 1740 | GGCGUUCA GCcgaaagGCGaGuCaaGGuCu GGUGGUCU | 9311 |
| 1649 | UGCCCAAG G UCUUGCAU | 1741 | AUGCAAGA GCcgaaagGCGaGuCaaGGuCu CUUGGGCA | 9312 |
| 1679 | GACUUUCA G CAAUGUCA | 1742 | UGACAUUG GCcgaaagGCGaGuCaaGGuCu UGAAAGUC | 9313 |
| 1703 | ACCUUGAG G CAUACUUC | 1743 | GAAGUAUG GCcgaaagGCGaGuCaaGGuCu CUCAAGGU | 9314 |
| 1732 | UUUAAUGA G UGGGAGGA | 1744 | UCCUCCCA GCcgaaagGCGaGuCaaGGuCu UCAUUAAA | 9315 |
| 1741 | UGGGAGGA G UUGGGGGA | 1745 | UCCCCCAA GCcgaaagGCGaGuCaaGGuCu UCCUCCCA | 9316 |
| 1754 | GGGAGGAG G UUAGGUUA | 1746 | UAACCUAA GCcgaaagGCGaGuCaaGGuCu CUCCUCCC | 9317 |
| 1759 | GAGGUUAG G UUAAAGGU | 1747 | ACCUUUAA GCcgaaagGCGaGuCaaGGuCu CUAACCUC | 9318 |
| 1766 | GGUUAAAG G UCUUUGUA | 1748 | UACAAAGA GCcgaaagGCGaGuCaaGGuCu CUUUAACC | 9319 |
| 1782 | ACUAGGAG G CUGUAGGC | 1749 | GCCUACAG GCcgaaagGCGaGuCaaGGuCu CUCCUAGU | 9320 |
| 1789 | GGCUGUAG G CAUAAAUU | 1750 | AAUUUAUG GCcgaaagGCGaGuCaaGGuCu CUACAGCC | 9321 |
| 1799 | AUAAAUUG G UGUGUUCA | 1751 | UGAACACA GCcgaaagGCGaGuCaaGGuCu CAAUUUAU | 9322 |
| 1811 | GUUCACCA G CACCAUGC | 1752 | GCAUGGUG GCcgaaagGCGaGuCaaGGuCu UGGUGAAC | 9323 |
| 1870 | CUGUUCAA G CCUCCAAG | 1753 | CUUGGAGG GCcgaaagGCGaGuCaaGGuCu UUGAACAG | 9324 |
| 1878 | GCCUCCAA G CUGUGCCU | 1754 | AGGCACAG GCcgaaagGCGaGuCaaGGuCu UUGGAGGC | 9325 |
| 1890 | UGCCUUGG G UGGCUUUG | 1755 | CAAAGCCA GCcgaaagGCGaGuCaaGGuCu CCAAGGCA | 9326 |
| 1893 | CUUGGGUG G CUUUGGGG | 1756 | CCCCAAAG GCcgaaagGCGaGuCaaGGuCu CACCCAAG | 9327 |
| 1901 | GCUUUGGG G CAUGGACA | 1757 | UGUCCAUG GCcgaaagGCGaGuCaaGGuCu CCCAAAGC | 9328 |
| 1917 | AUUGACCC G UAUAAAGA | 1758 | UCUUUAUA GCcgaaagGCGaGuCaaGGuCu GGGUCAAU | 9329 |
| 1933 | AAUUUGGA G CUUCUGUG | 1759 | CACAGAAG GCcgaaagGCGaGuCaaGGuCu UCCAAAUU | 9330 |
| 1944 | UCUGUGGA G UUACUCUC | 1760 | GAGAGUAA GCcgaaagGCGaGuCaaGGuCu UCCACAGA | 9331 |
| 2023 | AUCGGGGG G CCUUAGAG | 1761 | CUCUAAGG GCcgaaagGCGaGuCaaGGuCu CCCCCGAU | 9332 |
| 2031 | GCCUUAGA G UCUCCGGA | 1762 | UCCGGAGA GCcgaaagGCGaGuCaaGGuCu UCUAAGGC | 9333 |
| 2062 | ACCAUACG G CACUCAGG | 1763 | CCUGAGUG GCcgaaagGCGaGuCaaGGuCu CGUAUGGU | 9334 |
| 2070 | GCACUCAG G CAAGCUAU | 1764 | AUAGCUUG GCcgaaagGCGaGuCaaGGuCu CUGAGUGC | 9335 |
| 2074 | UCAGGCAA G CUAUUCUG | 1765 | CAGAAUAG GCcgaaagGCGaGuCaaGGuCu UUGCCUGA | 9336 |
| 2090 | GUGUUGGG G UGAGUUGA | 1766 | UCAACUCA GCcgaaagGCGaGuCaaGGuCu CCCAACAC | 9337 |
| 2094 | UGGGGUGA G UUGAUGAA | 1767 | UUCAUCAA GCcgaaagGCGaGuCaaGGuCu UCACCCCA | 9338 |
| 2107 | UGAAUCUA G CCACCUGG | 1768 | CCAGGUGG GCcgaaagGCGaGuCaaGGuCu UAGAUUCA | 9339 |
| 2116 | CCACCUGG G UGGGAAGU | 1769 | ACUUCCCA GCcgaaagGCGaGuCaaGGuCu CCAGGUGG | 9340 |
| 2123 | GGUGGGAA G UAAUUUGG | 1770 | CCAAAUUA GCcgaaagGCGaGuCaaGGuCu UUCCCACC | 9341 |
| 2140 | AAGAUCCA G CAUCCAGG | 1771 | CCUGGAUG GCcgaaagGCGaGuCaaGGuCu UGGAUCUU | 9342 |
| 2155 | GGGAAUUA G UAGUCAGC | 1772 | GCUGACUA GCcgaaagGCGaGuCaaGGuCu UAAUUCCC | 9343 |
| 2158 | AAUUAGUA G UCAGCUAU | 1773 | AUAGCUGA GCcgaaagGCGaGuCaaGGuCu UACUAAUU | 9344 |
| 2162 | AGUAGUCA G CUAUGUCA | 1774 | UGACAUAG GCcgaaagGCGaGuCaaGGuCu UGACUACU | 9345 |
| 2173 | AUGUCAAC G UUAAUAUG | 1775 | CAUAUUAA GCcgaaagGCGaGuCaaGGuCu GUUGACAU | 9346 |
| 2183 | UAAUAUGG G CCUAAAAA | 1776 | UUUUUAGG GCcgaaagGCGaGuCaaGGuCu CCAUAUUA | 9347 |
| 2208 | CUAUUGUG G UUUCACAU | 1777 | AUGUGAAA GCcgaaagGCGaGuCaaGGuCu CACAAUAG | 9348 |
| 2235 | ACUUUUGG G CGAGAAAC | 1778 | GUUUCUCG GCcgaaagGCGaGuCaaGGuCu CCAAAAGU | 9349 |
| 2260 | AAUAUUUG G UGUCUUUU | 1779 | AAAAGACA GCcgaaagGCGaGuCaaGGuCu CAAAUAUU | 9350 |
| 2272 | CUUUUGGA G UGUGGAUU | 1780 | AAUCCACA GCcgaaagGCGaGuCaaGGuCu UCCAAAAG | 9351 |
| 2360 | ACGAAGAG G CAGGUCCC | 1781 | GGGACCUG GCcgaaagGCGaGuCaaGGuCu CUCUUCGU | 9352 |
| 2364 | AGAGGCAG G UCCCCUAG | 1782 | CUAGGGGA GCcgaaagGCGaGuCaaGGuCu CUGCCUCU | 9353 |
| 2403 | AGACGAAG G UCUCAAUC | 1783 | GAUUGAGA GCcgaaagGCGaGuCaaGGuCu CUUCGUCU | 9354 |
| 2417 | AUCGCCGC G UCGCAGAA | 1784 | UUCUGCGA GCcgaaagGCGaGuCaaGGuCu GCGGCGAU | 9355 |
| 2454 | CAAUGUUA G UAUUCCUU | 1785 | AAGGAAUA GCcgaaagGCGaGuCaaGGuCu UAACAUUG | 9356 |
| 2474 | CACAUAAG G UGGGAAAC | 1786 | GUUUCCCA GCcgaaagGCGaGuCaaGGuCu CUUAUGUG | 9357 |
| 2491 | UUUACGGG G CUUUAUUC | 1787 | GAAUAAAG GCcgaaagGCGaGuCaaGGuCu CCCGUAAA | 9358 |
| 2507 | CUUCUACG G UACCUUGC | 1788 | GCAAGGUA GCcgaaagGCGaGuCaaGGuCu CGUAGAAG | 9359 |
| 2530 | CCUAAAUG G CAAACUCC | 1789 | GGAGUUUG GCcgaaagGCGaGuCaaGGuCu CAUUUAGG | 9360 |
| 2587 | AGAUGUAA G CAAUUUGU | 1790 | ACAAAUUG GCcgaaagGCGaGuCaaGGuCu UUACAUCU | 9361 |
| 2599 | UUUGUGGG G CCCCUUAC | 1791 | GUAAGGGG GCcgaaagGCGaGuCaaGGuCu CCCACAAA | 9362 |
| 2609 | CCCUUACA G UAAAUGAA | 1792 | UUCAUUUA GCcgaaagGCGaGuCaaGGuCu UGUAAGGG | 9363 |
| 2650 | CCUGCUAG G UUUUAUCC | 1793 | GGAUAAAA GCcgaaagGCGaGuCaaGGuCu CUAGCAGG | 9364 |
| 2701 | AUCAAACC G UAUUAUCC | 1794 | GGAUAAUA GCcgaaagGCGaGuCaaGGuCu GGUUUGAU | 9365 |
| 2713 | UAUCCAGA G UAUGUAGU | 1795 | ACUACAUA GCcgaaagGCGaGuCaaGGuCu UCUGGAUA | 9366 |
| 2720 | AGUAUGUA G UUAAUCAU | 1796 | AUGAUUAA GCcgaaagGCGaGuCaaGGuCu UACAUACU | 9367 |
| 2768 | UUUGGAAG G CGGGGAUC | 1797 | GAUCCCCG GCcgaaagGCGaGuCaaGGuCu CUUCCAAA | 9368 |
| 2791 | AAAAGAGA G UCCACACG | 1798 | CGUGUGGA GCcgaaagGCGaGuCaaGGuCu UCUCUUUU | 9369 |
| 2799 | GUCCACAC G UAGCGCCU | 1799 | AGGCGCUA GCcgaaagGCGaGuCaaGGuCu GUGUGGAC | 9370 |
| 2802 | CACACGUA G CGCCUCAU | 1800 | AUGAGGCG GCcgaaagGCGaGuCaaGGuCu UACGUGUG | 9371 |
| 2818 | UUUUGCGG G UCACCAUA | 1801 | UAUGGUGA GCcgaaagGCGaGuCaaGGuCu CCGCAAAA | 9372 |
| 2848 | GAUCUACA G CAUGGGAG | 1802 | CUCCCAUG GCcgaaagGCGaGuCaaGGuCu UGUAGAUC | 9373 |
| 2857 | CAUGGGAG G UUGGUCUU | 1803 | AAGACCAA GCcgaaagGCGaGuCaaGGuCu CUCCCAUG | 9374 |
| 2861 | GGAGGUUG G UCUUCCAA | 1804 | UUGGAAGA GCcgaaagGCGaGuCaaGGuCu CAACCUCC | 9375 |
| 2881 | UCGAAAAG G CAUGGGGA | 1805 | UCCCCAUG GCcgaaagGCGaGuCaaGGuCu CUUUUCGA | 9376 |
| 2936 | GAUCAUCA G UUGGACCC | 1806 | GGGUCCAA GCcgaaagGCGaGuCaaGGuCu UGAUGAUC | 9377 |
| 2955 | CAUUCAAA G CCAACUCA | 1807 | UGAGUUGG GCcgaaagGCGaGuCaaGGuCu UUUGAAUG | 9378 |
| 2964 | CCAACUCA G UAAAUCCA | 1808 | UGGAUUUA GCcgaaagGCGaGuCaaGGuCu UGAGUUGG | 9379 |
| 3005 | GACAACUG G CCGGACGC | 1809 | GCGUCCGG GCcgaaagGCGaGuCaaGGuCu CAGUUGUC | 9380 |
| 3021 | CCAACAAG G UGGGAGUG | 1810 | CACUCCCA GCcgaaagGCGaGuCaaGGuCu CUUGUUGG | 9381 |
| 3027 | AGGUGGGA G UGGGAGCA | 1811 | UGCUCCCA GCcgaaagGCGaGuCaaGGuCu UCCCACCU | 9382 |
| 3033 | GAGUGGGA G CAUUCGGG | 1812 | CCCGAAUG GCcgaaagGCGaGuCaaGGuCu UCCCACUC | 9383 |
| 3041 | GCAUUCGG G CCAGGGUU | 1813 | AACCCUGG GCcgaaagGCGaGuCaaGGuCu CCGAAUGC | 9384 |
| 3047 | GGGCCAGG G UUCACCCC | 1814 | GGGGUGAA GCcgaaagGCGaGuCaaGGuCu CCUGGCCC | 9385 |
| 3077 | CUGUUGGG G UGGAGCCC | 1815 | GGGCUCCA GCcgaaagGCGaGuCaaGGuCu CCCAACAG | 9386 |
| 3082 | GGGGUGGA G CCCUCACG | 1816 | CGUGAGGG GCcgaaagGCGaGuCaaGGuCu UCCACCCC | 9387 |
| 3097 | CGCUCAGG G CCUACUCA | 1817 | UGAGUAGG GCcgaaagGCGaGuCaaGGuCu CCUGAGCG | 9388 |
| 3117 | CUGUGCCA G CAGCUCCU | 1818 | AGGAGCUG GCcgaaagGCGaGuCaaGGuCu UGGCACAG | 9389 |
| 3120 | UGCCAGCA G CUCCUCCU | 1819 | AGGAGGAG GCcgaaagGCGaGuCaaGGuCu UGCUGGCA | 9390 |
| 3146 | ACCAAUCG G CAGUCAGG | 1820 | CCUGACUG GCcgaaagGCGaGuCaaGGuCu CGAUUGGU | 9391 |
| 3149 | AAUCGGCA G UCAGGAAG | 1821 | CUUCCUGA GCcgaaagGCGaGuCaaGGuCu UGCCGAUU | 9392 |
| 3158 | UCAGGAAG G CAGCCUAC | 1822 | GUAGGCUG GCcgaaagGCGaGuCaaGGuCu CUUCCUGA | 9393 |
| 3161 | GGAAGGCA G CCUACUCC | 1823 | GGAGUAGG GCcgaaagGCGaGuCaaGGuCu UGCCUUCC | 9394 |
| 3204 | AUCCUCAG G CCAUGCAG | 1824 | CUGCAUGG GCcgaaagGCGaGuCaaGGuCu CUGAGGAU | 9395 |

Input Sequence = AF100308.
Cut Site = YG/M or UG/U.
Stem Length = 8.
Core Sequence = GCcgaaagGCGaGuCaaGGuCu
AF100308 (Hepatitis B virus strain 2-18, 3215 bp)

[0557] TABLE IX

HUMAN HBV DNAZYME AND SUBSTRATE SEQUENCE

| | | | | |
|---|---|---|---|---|
| Pos | Substrate | Seq ID | DNAzyme | Seq ID |

| | | | | |
|---|---|---|---|---|
| 508 | CAACCAGC A CCGGACCA | 833 | TGGTCCGG GGCTAGCTACAACGA GCTGGTTG | 9396 |
| 1632 | GAACGCCC A CAGGAACC | 1096 | GGTTCCTG GGCTAGCTACAACGA GGGCGTTC | 9397 |
| 2992 | CAACCCGC A CAAGGACA | 1376 | TGTCCTTG GGCTAGCTACAACGA GCGGGTTG | 9398 |
| 61 | ACUUUCCU G CUGGUGGC | 1448 | GCCACCAG GGCTAGCTACAACGA AGGAAAGT | 9399 |
| 94 | UGAGCCCU G CUCAGAAU | 1450 | ATTCTGAG GGCTAGCTACAACGA AGGGCTCA | 9400 |
| 112 | CUGUCUCU G CCAUAUCG | 1451 | CGATATGG GGCTAGCTACAACGA AGAGACAG | 9401 |
| 169 | AGAACAUC G CAUCAGGA | 1454 | TCCTGATG GGCTAGCTACAACGA GATGTTCT | 9402 |
| 192 | GGACCCCU G CUCGUGUU | 1455 | AACACGAG GGCTAGCTACAACGA AGGGGTCC | 9403 |
| 315 | CAAAAUUC G CAGUCCCA | 1457 | TGGGACTG GGCTAGCTACAACGA GAATTTTG | 9404 |
| 374 | UGGUUAUC G CUGGAUGU | 1458 | ACATCCAG GGCTAGCTACAACGA GATAACCA | 9405 |
| 387 | AUGUGUCU G CGGCGUUU | 1459 | AAACGCCG GGCTAGCTACAACGA AGACACAT | 9406 |
| 410 | CUUCCUCU G CAUCCUGC | 1460 | GCAGGATG GGCTAGCTACAACGA AGAGGAAG | 9407 |
| 417 | UGCAUCCU G CUGCUAUG | 1461 | CATAGCAG GGCTAGCTACAACGA AGGATGCA | 9408 |
| 420 | AUCCUGCU G CUAUGCCU | 1462 | AGGCATAG GGCTAGCTACAACGA AGCAGGAT | 9409 |
| 425 | GCUGCUAU G CCUCAUCU | 1463 | AGATGAGG GGCTAGCTACAACGA ATAGCAGC | 9410 |
| 468 | GGUAUGUU G CCCGUUUG | 1464 | CAAACGGG GGCTAGCTACAACGA AACATACC | 9411 |
| 518 | CGGACCAU G CAAAACCU | 1465 | AGGTTTTG GGCTAGCTACAACGA ATGGTCCG | 9412 |
| 527 | CAAAACCU G CACAACUC | 1466 | GAGTTGTG GGCTAGCTACAACGA AGGTTTTG | 9413 |
| 538 | CAACUCCU G CUCAAGGA | 1467 | TCCTTGAG GGCTAGCTACAACGA AGGAGTTG | 9414 |
| 569 | CUCAUGUU G CUGUACAA | 1468 | TTGTACAG GGCTAGCTACAACGA AACATGAG | 9415 |
| 596 | CGGAAACU G CACCUGUA | 1469 | TACAGGTG GGCTAGCTACAACGA AGTTTCCG | 9416 |
| 631 | GGGCUUUC G CAAAAUAC | 1470 | GTATTTTG GGCTAGCTACAACGA GAAAGCCC | 9417 |
| 687 | UUACUAGU G CCAUUUGU | 1471 | ACAAATGG GGCTAGCTACAACGA ACTAGTAA | 9418 |
| 795 | CCCUUUAU G CCGCUGUU | 1474 | AACAGCGG GGCTAGCTACAACGA ATAAAGGG | 9419 |
| 798 | UUUAUGCC G CUGUUACC | 1475 | GGTAACAG GGCTAGCTACAACGA GGCATAAA | 9420 |
| 911 | GGCACAUU G CCACAGGA | 1476 | TCCTGTGG GGCTAGCTACAACGA AATGTGCC | 9421 |
| 1020 | UGGGGUUU G CCGCCCCU | 1479 | AGGGGCGG GGCTAGCTACAACGA AAACCCCA | 9422 |
| 1023 | GGUUUGCC G CCCCUUUC | 1480 | GAAAGGGG GGCTAGCTACAACGA GGCAAACC | 9423 |
| 1034 | CCUUUCAC G CAAUGUGG | 1481 | CCACATTG GGCTAGCTACAACGA GTGAAAGG | 9424 |
| 1050 | GAUAUUCU G CUUUAAUG | 1482 | CATTAAAG GGCTAGCTACAACGA AGAATATC | 9425 |
| 1058 | GCUUUAAU G CCUUUAUA | 1483 | TATAAAGG GGCTAGCTACAACGA ATTAAAGC | 9426 |
| 1068 | CUUUAUAU G CAUGCAUA | 1484 | TATGCATG GGCTAGCTACAACGA ATATAAAG | 9427 |
| 1072 | AUAUGCAU G CAUACAAG | 1485 | CTTGTATG GGCTAGCTACAACGA ATGCATAT | 9428 |
| 1103 | ACUUUCUC G CCAACUUA | 1486 | TAAGTTGG GGCTAGCTACAACGA GAGAAAGT | 9429 |
| 1155 | ACCCCGUU G CUCGGCAA | 1488 | TTGCCGAG GGCTAGCTACAACGA AACGGGGT | 9430 |
| 1177 | UGGUCUAU G CCAAGUGU | 1489 | ACACTTGG GGCTAGCTACAACGA ATAGACCA | 9431 |
| 1188 | AAGUGUUU G CUGACGCA | 1490 | TGCGTCAG GGCTAGCTACAACGA AAACACTT | 9432 |
| 1194 | UUGCUGAC G CAACCCCC | 1492 | GGGGGTTG GGCTAGCTACAACGA GTCAGCAA | 9433 |
| 1234 | CCAUCAGC G CAUGCGUG | 1493 | CACGCATG GGCTAGCTACAACGA GCTGATGG | 9434 |
| 1238 | CAGCGCAU G CGUGGAAC | 1494 | GTTCCACG GGCTAGCTACAACGA ATGCGCTG | 9435 |
| 1262 | UCUCCUCU G CCGAUCCA | 1495 | TGGATCGG GGCTAGCTACAACGA AGAGGAGA | 9436 |
| 1275 | UCCAUACC G CGGAACUC | 1497 | GAGTTCCG GGCTAGCTACAACGA GGTATGGA | 9437 |
| 1290 | UCCUAGCC G CUUGUUUU | 1498 | AAAACAAG GGCTAGCTACAACGA GGCTAGGA | 9438 |
| 1299 | CUUGUUUU G CUCGCAGC | 1499 | GCTGCGAG GGCTAGCTACAACGA AAAACAAG | 9439 |
| 1303 | UUUUGCUC G CAGCAGGU | 1500 | ACCTGCTG GGCTAGCTACAACGA GAGCAAAA | 9440 |
| 1349 | UCUGUCGU G CUCUCCCG | 1502 | CGGGAGAG GGCTAGCTACAACGA ACGACAGA | 9441 |
| 1357 | GCUCUCCC G CAAAUAUA | 1503 | TATATTTG GGCTAGCTACAACGA GGGAGAGC | 9442 |
| 1382 | CCAUGGCU G CUAGGCUG | 1504 | CAGCCTAG GGCTAGCTACAACGA AGCCATGG | 9443 |
| 1392 | UAGGCUGU G CUGCCAAC | 1505 | GTTGGCAG GGCTAGCTACAACGA ACAGCCTA | 9444 |
| 1395 | GCUGUGCU G CCAACUGG | 1506 | CCAGTTGG GGCTAGCTACAACGA AGCACAGC | 9445 |
| 1411 | GAUCCUAC G CGGGACGU | 1507 | ACGTCCCG GGCTAGCTACAACGA GTAGGATC | 9446 |
| 1442 | CCGUCGGC G CUGAAUCC | 1508 | GGATTCAG GGCTAGCTACAACGA GCCGACGG | 9447 |
| 1452 | UGAAUCCC G CGGACGAC | 1510 | GTCGTCCG GGCTAGCTACAACGA GGGATTCA | 9448 |
| 1474 | CCGGGGCC G CUUGGGGC | 1512 | GCCCCAAG GGCTAGCTACAACGA GGCCCCGG | 9449 |
| 1489 | GCUCUACC G CCCGCUUC | 1513 | GAAGCGGG GGCTAGCTACAACGA GGTAGAGC | 9450 |
| 1493 | UACCGCCC G CUUCUCCG | 1514 | CGGAGAAG GGCTAGCTACAACGA GGGCGGTA | 9451 |
| 1501 | GCUUCUCC G CCUAUUGU | 1515 | ACAATAGG GGCTAGCTACAACGA GGAGAAGC | 9452 |
| 1528 | CACGGGGC G CACCUCUC | 1517 | CAGAGGTG GGCTAGCTACAACGA GCCCCGTG | 9453 |
| 1542 | CUCUUUAC G CGGACUCC | 1518 | GGACTCCG GGCTAGCTACAACGA GTAAAGAG | 9454 |
| 1559 | CCGUCUGU G CCUUCUCA | 1519 | TGAGAAGG GGCTAGCTACAACGA ACAGACGG | 9455 |
| 1571 | UCUCAUCU G CCGGACCG | 1520 | CGGTCCGG GGCTAGCTACAACGA AGATGAGA | 9456 |
| 1583 | GACCGUGU G CACUUCGC | 1521 | GCGAAGTG GGCTAGCTACAACGA ACACGGTC | 9457 |
| 1590 | UGCACUUC G CUUCACCU | 1522 | AGGTGAAG GGCTAGCTACAACGA GAAGTGCA | 9458 |
| 1601 | UCACCUCU G CACGUCGC | 1523 | GCGACGTG GGCTAGCTACAACGA AGAGGTGA | 9459 |
| 1608 | UGCACGUC G CAUGGAGA | 1524 | TCTCCATG GGCTAGCTACAACGA GACGTGCA | 9460 |
| 1628 | CCGUGAAC G CCCACAGG | 1526 | CCTGTGGG GGCTAGCTACAACGA GTTCACGG | 9461 |
| 1642 | AGGAACCU G CCCAAGGU | 1527 | ACCTTGGG GGCTAGCTACAACGA AGGTTCCT | 9462 |
| 1654 | AAGGUCUU G CAUAAGAG | 1528 | CTCTTATG GGCTAGCTACAACGA AAGACCTT | 9463 |
| 1818 | AGCACCAU G CAACUUUU | 1533 | AAAAGTTG GGCTAGCTACAACGA ATGGTGCT | 9464 |
| 1835 | UCACCUCU G CCUAAUCA | 1534 | TGATTAGG GGCTAGCTACAACGA AGAGGTGA | 9465 |
| 1883 | CAAGCUGU G CCUUGGGU | 1535 | ACCCAAGG GGCTAGCTACAACGA ACAGCTTG | 9466 |
| 1959 | UCUUUUUU G CCUUCUGA | 1537 | TCAGAAGG GGCTAGCTACAACGA AAAAAAGA | 9467 |
| 2002 | UCGACACC G CCUCUGCU | 1541 | AGCAGAGG GGCTAGCTACAACGA GGTGTCGA | 9468 |
| 2008 | CCGCCUCU G CUCUGUAU | 1542 | ATACAGAG GGCTAGCTACAACGA AGAGGCGG | 9469 |
| 2282 | GUGGAUUC G CACUCCUC | 1548 | GAGGAGTG GGCTAGCTACAACGA GAATCCAC | 9470 |
| 2293 | CUCCUCCU G CAUAUAGA | 1549 | TCTATATG GGCTAGCTACAACGA AGGAGGAG | 9471 |
| 2311 | CACCAAAU G CCCCUAUC | 1550 | GATAGGGG GGCTAGCTACAACGA ATTTGGTG | 9472 |
| 2388 | ACUCCCUC G CCUCGCAG | 1552 | CTGCGAGG GGCTAGCTACAACGA GAGGGAGT | 9473 |
| 2393 | CUCGCCUC G CAGACGAA | 1553 | TTCGTCTG GGCTAGCTACAACGA GAGGCGAG | 9474 |
| 2412 | UCUCAAUC G CCGCGUCG | 1555 | CGACGCGG GGCTAGCTACAACGA GATTGAGA | 9475 |
| 2415 | CAAUCGCC G CGUCGCAG | 1556 | CTGCGACG GGCTAGCTACAACGA GGCGATTG | 9476 |
| 2420 | GCCGCGUC G CAGAAGAU | 1557 | ATCTTCTG GGCTAGCTACAACGA GACGCGGC | 9477 |
| 2514 | GGUACCUU G CUUUAAUC | 1558 | GATTAAAG GGCTAGCTACAACGA AAGGTACC | 9478 |
| 2560 | AUUCAUUU G CAGGAGGA | 1560 | TCCTCCTG GGCTAGCTACAACGA AAATGAAT | 9479 |
| 2641 | UUAACUAU G CCUGCUAG | 1563 | CTAGCAGG GGCTAGCTACAACGA ATAGTTAA | 9480 |
| 2645 | CUAUGCCU G CUAGGUUU | 1564 | AAACCTAG GGCTAGCTACAACGA AGGCATAG | 9481 |
| 2677 | AAAUAUUU G CCCUUAGA | 1565 | TCTAAGGG GGCTAGCTACAACGA AAATATTT | 9482 |
| 2740 | UUCCAGAC G CGACAUUA | 1566 | TAATGTCG GGCTAGCTACAACGA GTCTGGAA | 9483 |
| 2804 | CACGUAGC G CCUCAUUU | 1568 | AAATGAGG GGCTAGCTACAACGA GCTACGTG | 9484 |
| 2814 | CUCAUUUU G CGGGUCAC | 1569 | GTGACCCG GGCTAGCTACAACGA AAAATGAG | 9485 |
| 2946 | UGGACCCU G CAUUCAAA | 1572 | TTTGAATG GGCTAGCTACAACGA AGGGTCCA | 9486 |
| 2990 | CUCAACCC G CACAAGGA | 1573 | TCCTTGTG GGCTAGCTACAACGA GGGTTGAG | 9487 |
| 3012 | GGCCGGAC G CCAACAAG | 1574 | CTTGTTGG GGCTAGCTACAACGA GTCCGGCC | 9488 |
| 3090 | GCCCUCAC G CUCAGGGC | 1575 | GCCCTGAG GGCTAGCTACAACGA GTGAGGGC | 9489 |
| 3113 | ACAACUGU G CCAGCAGC | 1576 | GCTGCTGG GGCTAGCTACAACGA ACAGTTGT | 9490 |
| 3132 | CUCCUCCU G CCUCCACC | 1577 | GGTGGAGG GGCTAGCTACAACGA AGGAGGAG | 9491 |
| 51 | AGGGCCCU G UACUUUCC | 1578 | GGAAAGTA GGCTAGCTACAACGA AGGGCCCT | 9492 |
| 106 | AGAAUACU G UCUCUGCC | 1579 | GGCAGAGA GGCTAGCTACAACGA AGTATTCT | 9493 |
| 148 | GGGACCCU G UACCGAAC | 1580 | GTTCGGTA GGCTAGCTACAACGA AGGGTCCC | 9494 |
| 198 | CUGCUCGU G UUACAGGC | 1581 | GCCTGTAA GGCTAGCTACAACGA ACGAGCAG | 9495 |
| 219 | UUUUUCUU G UUGACAAA | 1582 | TTTGTCAA GGCTAGCTACAACGA AAGAAAAA | 9496 |
| 297 | ACACCCGU G UGUCUUGG | 1583 | CCAAGACA GGCTAGCTACAACGA ACGGGTGT | 9497 |
| 299 | ACCCGUGU G UCUUGGCC | 1584 | GGCCAAGA GGCTAGCTACAACGA ACACGGGT | 9498 |
| 347 | ACCAACCU G UUGUCCUC | 1585 | GAGGACAA GGCTAGCTACAACGA AGGTTGGT | 9499 |
| 350 | AACCUGUU G UCCUCCAA | 1586 | TTGGAGGA GGCTAGCTACAACGA AACAGGTT | 9500 |
| 362 | UCCAAUUU G UCCUGGUU | 1587 | AACCAGGA GGCTAGCTACAACGA AAATTGGA | 9501 |
| 381 | CGCUGGAU G UGUCUGCG | 1588 | CGCAGACA GGCTAGCTACAACGA ATCCAGCG | 9502 |
| 383 | CUGGAUGU G UCUGCGGC | 1589 | GCCGCAGA GGCTAGCTACAACGA ACATCCAG | 9503 |
| 438 | AUCUUCUU G UUGGUUCU | 1590 | AGAACCAA GGCTAGCTACAACGA AAGAAGAT | 9504 |
| 465 | CAAGGUAU G UUGCCCGU | 1591 | ACGGGCAA GGCTAGCTACAACGA ATACCTTG | 9505 |
| 476 | GCCCGUUU G UCCUCUAA | 1592 | TTAGAGGA GGCTAGCTACAACGA AAACGGGC | 9506 |
| 555 | ACCUCUAU G UUUCCCUC | 1593 | GAGGGAAA GGCTAGCTACAACGA ATAGAGGT | 9507 |
| 566 | UCCCUCAU G UUGCUGUA | 1594 | TACAGCAA GGCTAGCTACAACGA ATGAGGGA | 9508 |
| 572 | AUGUUGCU G UACAAAAC | 1595 | GTTTTGTA GGCTAGCTACAACGA AGCAACAT | 9509 |
| 602 | CUGCACCU G UAUUCCCA | 1596 | TGGGAATA GGCTAGCTACAACGA AGGTGCAG | 9510 |
| 694 | UGCCAUUU G UUCAGUGG | 1597 | CCACTGAA GGCTAGCTACAACGA AAATGGCA | 9511 |
| 724 | CCCCCACU G UCUGGCUU | 1598 | AAGCCAGA GGCTAGCTACAACGA AGTGGGGG | 9512 |
| 750 | UGGAUGAU G UGGUUUUG | 1599 | CAAAACCA GGCTAGCTACAACGA ATCATCCA | 9513 |
| 771 | CCAAGUCU G UACAACAU | 1600 | ATGTTGTA GGCTAGCTACAACGA AGACTTGG | 9514 |
| 801 | AUGCCGCU G UUACCAAU | 1601 | ATTGGTAA GGCTAGCTACAACGA AGCGGCAT | 9515 |
| 818 | UUUCUUUU G UCUUUGGG | 1602 | CCCAAAGA GGCTAGCTACAACGA AAAACAAA | 9516 |
| 888 | UGGGAUAU G UAAUUGGG | 1603 | CCCAATTA GGCTAGCTACAACGA ATATCCCA | 9517 |
| 927 | AACAUAUU G UACAAAAA | 1604 | TTTTTGTA GGCTAGCTACAACGA AATATGTT | 9518 |
| 944 | AUCAAAAU G UGUUUUAG | 1605 | CTAAAACA GGCTAGCTACAACGA ATTTTGAT | 9519 |
| 946 | CAAAAUGU G UUUUAGGA | 1606 | TCCTAAAA GGCTAGCTACAACGA ACATTTTG | 9520 |
| 963 | AACUUCCU G UAAACAGG | 1607 | CCTGTTTA GGCTAGCTACAACGA AGGAAGTT | 9521 |
| 991 | GAAAGUAU G UCAACGAA | 1608 | TTCGTTGA GGCTAGCTACAACGA ATACTTTC | 9522 |
| 1002 | AACGAAUU G UGGGUCUU | 1609 | AAGACCCA GGCTAGCTACAACGA AATTCGTT | 9523 |
| 1039 | CACGCAAU G UGGAUAUU | 1610 | AATATCCA GGCTAGCTACAACGA ATTGCGTG | 9524 |
| 1137 | AACAGUAU G UGAACCUU | 1611 | AAGGTTCA GGCTAGCTACAACGA ATACTGTT | 9525 |
| 1184 | UGCCAAGU G UUUGCUGA | 1612 | TCAGCAAA GGCTAGCTACAACGA ACTTGGCA | 9526 |
| 1251 | GAACCUUU G UGUCUCCU | 1613 | AGGAGACA GGCTAGCTACAACGA AAAGGTTC | 9527 |
| 1253 | ACCUUUGU G UCUCCUCU | 1614 | AGAGGAGA GGCTAGCTACAACGA ACAAAGGT | 9528 |
| 1294 | AGCCGCUU G UUUUGCUC | 1615 | GAGCAAAA GGCTAGCTACAACGA AAGCGGCT | 9529 |
| 1344 | ACAAUUCU G UCGUGCUC | 1616 | GAGCACGA GGCTAGCTACAACGA AGAATTGT | 9530 |
| 1390 | GCUAGGCU G UGCUGCCA | 1617 | TGGCAGCA GGCTAGCTACAACGA AGCCTAGC | 9531 |
| 1425 | CGUCCUUU G UUUACGUC | 1618 | GACGTAAA GGCTAGCTACAACGA AAAGGACG | 9532 |
| 1508 | CGCCUAUU G UACCGACC | 1619 | GGTCGGTA GGCTAGCTACAACGA AATAGGCG | 9533 |
| 1557 | CCCCGUCU G UGCCUUCU | 1620 | AGAAGGCA GGCTAGCTACAACGA AGACGGGG | 9534 |
| 1581 | CGGACCGU G UGCACUUC | 1621 | GAAGTGCA GGCTAGCTACAACGA ACGGTCCG | 9535 |
| 1684 | UCAGCAAU G UCAACGAC | 1622 | GTCGTTGA GGCTAGCTACAACGA ATTGCTGA | 9536 |
| 1719 | CAAAGACU G UGUGUUUA | 1623 | TAAACACA GGCTAGCTACAACGA AGTCTTTG | 9537 |
| 1721 | AAGACUGU G UGUUUAAU | 1624 | ATTAAACA GGCTAGCTACAACGA ACAGTCTT | 9538 |
| 1723 | GACUGUGU G UUUAAUGA | 1625 | TCATTAAA GGCTAGCTACAACGA ACACAGTC | 9539 |
| 1772 | AGGUCUUU G UACUAGGA | 1626 | TCCTAGTA GGCTAGCTACAACGA AAAGACCT | 9540 |
| 1785 | AGGAGGCU G UAGGCAUA | 1627 | TATGCCTA GGCTAGCTACAACGA AGCCTCCT | 9541 |
| 1801 | AAAUUGGU G UGUUCACC | 1628 | GGTGAACA GGCTAGCTACAACGA ACCAATTT | 9542 |
| 1803 | AUUGGUGU G UUCACCAG | 1629 | CTGGTGAA GGCTAGCTACAACGA ACACCAAT | 9543 |
| 1850 | CAUCUCAU G UUCAUGUC | 1630 | GACATGAA GGCTAGCTACAACGA ATGAGATG | 9544 |
| 1856 | AUGUUCAU G UCCUACUG | 1631 | CAGTAGGA GGCTAGCTACAACGA ATGAACAT | 9545 |
| 1864 | GUCCUACU G UUCAAGCC | 1632 | GGCTTGAA GGCTAGCTACAACGA AGTAGGAC | 9546 |
| 1881 | UCCAAGCU G UGCCUUGG | 1633 | CCAAGGCA GGCTAGCTACAACGA AGCTTGGA | 9547 |
| 1939 | GAGCUUCU G UGGAGUUA | 1634 | TAACTCCA GGCTAGCTACAACGA AGAAGCTC | 9548 |
| 2013 | UCUGCUCU G UAUCGGGG | 1635 | CCCCGATA GGCTAGCTACAACGA AGAGCAGA | 9549 |
| 2045 | GGAACAUU G UUCACCUC | 1636 | GAGGTGAA GGCTAGCTACAACGA AATGTTCC | 9550 |
| 2082 | GCUAUUCU G UGUUGGGG | 1637 | CCCCAACA GGCTAGCTACAACGA AGAATAGC | 9551 |
| 2084 | UAUUCUGU G UUGGGGUG | 1638 | CACCCCAA GGCTAGCTACAACGA ACAGAATA | 9552 |
| 2167 | UCAGCUAU G UCAACGUU | 1639 | AACGTTGA GGCTAGCTACAACGA ATAGCTGA | 9553 |
| 2205 | CAACUAUU G UGGUUUCA | 1640 | TGAAACCA GGCTAGCTACAACGA AATAGTTG | 9554 |
| 2222 | CAUUUCCU G UCUUACUU | 1641 | AAGTAAGA GGCTAGCTACAACGA AGGAAATG | 9555 |
| 2245 | GAGAAACU G UUCUUGAA | 1642 | TTCAAGAA GGCTAGCTACAACGA AGTTTCTC | 9556 |
| 2262 | UAUUUGGU G UCUUUUGG | 1643 | CCAAAAGA GGCTAGCTACAACGA ACCAAATA | 9557 |
| 2274 | UUUGGAGU G UGGAUUCG | 1644 | CGAATCCA GGCTAGCTACAACGA ACTCCAAA | 9558 |
| 2344 | AAACUACU G UUGUUAGA | 1645 | TCTAACAA GGCTAGCTACAACGA AGTAGTTT | 9559 |
| 2347 | CUACUGUU G UUAGACGA | 1646 | TCGTCTAA GGCTAGCTACAACGA AACAGTAG | 9560 |
| 2450 | AUCUCAAU G UUAGUAUU | 1647 | AATACTAA GGCTAGCTACAACGA ATTGAGAT | 9561 |
| 2573 | AGGACAUU G UUGAUAGA | 1648 | TCTATCAA GGCTAGCTACAACGA AATGTCCT | 9562 |
| 2583 | UGAUAGAU G UAAGCAAU | 1649 | ATTGCTTA GGCTAGCTACAACGA ATCTATCA | 9563 |
| 2594 | AGCAAUUU G UGGGGCCC | 1650 | GGGCCCCA GGCTAGCTACAACGA AAATTGCT | 9564 |
| 2663 | AUCCCAAU G UUACUAAA | 1651 | TTTAGTAA GGCTAGCTACAACGA ATTGGGAT | 9565 |
| 2717 | CAGAGUAU G UAGUUAAU | 1652 | ATTAACTA GGCTAGCTACAACGA ATACTCTG | 9566 |
| 2901 | AUCUUUCU G UCCCCAAU | 1653 | ATTGGGGA GGCTAGCTACAACGA AGAAAGAT | 9567 |
| 3071 | GGGGGACU G UUGGGGUG | 1654 | CACCCCAA GGCTAGCTACAACGA AGTCCCCC | 9568 |
| 3111 | UCACAACU G UGCCAGCA | 1655 | TGCTGGCA GGCTAGCTACAACGA AGTTGTGA | 9569 |
| 40 | AUCCCAGA G UCAGGGCC | 1656 | GGCCCTGA GGCTAGCTACAACGA TCTGGGAT | 9570 |
| 46 | GAGUCAGG G CCCUGUAC | 1657 | GTACAGGG GGCTAGCTACAACGA CCTGACTC | 9571 |
| 65 | UCCUGCUG G UGGCUCCA | 1658 | TGGAGCCA GGCTAGCTACAACGA CAGCAGGA | 9572 |
| 68 | UGCUGGUG G CUCCAGUU | 1659 | AACTGGAG GGCTAGCTACAACGA CACCAGCA | 9573 |
| 74 | UGGCUCCA G UUCAGGAA | 1660 | TTCCTGAA GGCTAGCTACAACGA TGGAGCCA | 9574 |
| 85 | CAGGAACA G UGAGCCCU | 1661 | AGGGCTCA GGCTAGCTACAACGA TGTTCCTG | 9575 |
| 89 | AACAGUGA G CCCUGCUC | 1662 | GAGCAGGG GGCTAGCTACAACGA TCACTGTT | 9576 |
| 120 | GCCAUAUC G UCAAUCUU | 1663 | AAGATTGA GGCTAGCTACAACGA GATATGGC | 9577 |
| 196 | CCCUGCUC G UGUUACAG | 1664 | CTGTAACA GGCTAGCTACAACGA GAGCAGGG | 9578 |
| 205 | UGUUACAG G CGGGGUUU | 1665 | AAACCCCG GGCTAGCTACAACGA CTGTAACA | 9579 |
| 210 | CAGGCGGG G UUUUUCUU | 1666 | AAGAAAAA GGCTAGCTACAACGA CCCGCCTG | 9580 |
| 248 | ACCACAGA G UCUAGACU | 1667 | AGTCTAGA GGCTAGCTACAACGA TCTGTGGT | 9581 |
| 258 | CUAGACUC G UGGUGGAC | 1668 | GTCCACCA GGCTAGCTACAACGA GAGTCTAG | 9582 |
| 261 | GACUCGUG G UGGACUUC | 1669 | GAAGTCCA GGCTAGCTACAACGA CACGAGTC | 9583 |
| 295 | GAACACCC G UGUGUCUU | 1670 | AAGACACA GGCTAGCTACAACGA GGGTGTTC | 9584 |
| 305 | GUGUCUUG G CCAAAAUU | 1671 | AATTTTGG GGCTAGCTACAACGA CAAGACAC | 9585 |
| 318 | AAUUCGCA G UCCCAAAU | 1672 | ATTTGGGA GGCTAGCTACAACGA TGCGAATT | 9586 |
| 332 | AAUCUCCA G UCACUCAC | 1673 | GTGAGTGA GGCTAGCTACAACGA TGGAGATT | 9587 |
| 368 | UUGUCCUG G UUAUCGCU | 1674 | AGCGATAA GGCTAGCTACAACGA CAGGACAA | 9588 |
| 390 | UGUCUGCG G CGUUUUAU | 1675 | ATAAAACG GGCTAGCTACAACGA CGCAGACA | 9589 |
| 392 | UCUGCGGC G UUUUAUCA | 1676 | TGATAAAA GGCTAGCTACAACGA GCCGCAGA | 9590 |
| 442 | UCUUGUUG G UUCUUCUG | 1677 | CAGAAGAA GGCTAGCTACAACGA CAACAAGA | 9591 |
| 461 | CUAUCAAG G UAUGUUGC | 1678 | GCAACATA GGCTAGCTACAACGA CTTGATAG | 9592 |
| 472 | UGUUGCCC G UUUGUCCU | 1679 | AGGACAAA GGCTAGCTACAACGA GGGCAACA | 9593 |
| 506 | AACAACCA G CACCGGAC | 1680 | GTCCGGTG GGCTAGCTACAACGA TGGTTGTT | 9594 |
| 625 | CAUCUUGG G CUUUCGCA | 1681 | TGCGAAAG GGCTAGCTACAACGA CCAAGATG | 9595 |
| 648 | CUAUGGGA G UGGGCCUC | 1682 | GAGGCCCA GGCTAGCTACAACGA TCCCATAG | 9596 |
| 652 | GGGAGUGG G CCUCAGUC | 1683 | GACTGAGG GGCTAGCTACAACGA CCACTCCC | 9597 |
| 658 | GGGCCUCA G UCCGUUUC | 1684 | GAAACGGA GGCTAGCTACAACGA TGAGGCCC | 9598 |
| 662 | CUCAGUCC G UUUCUCUU | 1685 | AAGAGAAA GGCTAGCTACAACGA GGACTGAG | 9599 |
| 672 | UUCUCUUG G CUCAGUUU | 1686 | AAACTGAG GGCTAGCTACAACGA CAAGAGAA | 9600 |
| 677 | UUGGCUCA G UUUACUAG | 1687 | CTAGTAAA GGCTAGCTACAACGA TGAGCCAA | 9601 |
| 685 | GUUUACUA G UGCCAUUU | 1688 | AAATGGCA GGCTAGCTACAACGA TAGTAAAC | 9602 |
| 699 | UUUGUUCA G UGGUUCGU | 1689 | ACGAACCA GGCTAGCTACAACGA TGAACAAA | 9603 |
| 702 | GUUCAGUG G UUCGUAGG | 1690 | CCTACGAA GGCTAGCTACAACGA CACTGAAC | 9604 |
| 706 | AGUGGUUC G UAGGGCUU | 1691 | AAGCCCTA GGCTAGCTACAACGA GAACCACT | 9605 |
| 711 | UUCGUAGG G CUUUCCCC | 1692 | GGGGAAAG GGCTAGCTACAACGA CCTACGAA | 9606 |
| 729 | ACUGUCUG G CUUUCAGU | 1693 | ACTGAAAG GGCTAGCTACAACGA CAGACAGT | 9607 |
| 736 | GGCUUUCA G UUAUAUGG | 1694 | CCATATAA GGCTAGCTACAACGA TGAAAGCC | 9608 |
| 753 | AUGAUGUG G UUUUGGGG | 1695 | CCCCAAAA GGCTAGCTACAACGA CACATCAT | 9609 |
| 762 | UUUUGGGG G CCAAGUCU | 1696 | AGACTTGG GGCTAGCTACAACGA CCCCAAAA | 9610 |
| 767 | GGGGCCAA G UCUGUACA | 1697 | TGTACAGA GGCTAGCTACAACGA TTGGCCCC | 9611 |
| 785 | CAUCUUGA G UCCCUUUA | 1698 | TAAAGGGA GGCTAGCTACAACGA TCAAGATG | 9612 |
| 826 | GUCUUUGG G UAUACAUU | 1699 | AATGTATA GGCTAGCTACAACGA CCAAAGAC | 9613 |
| 898 | AAUUGGGA G UUGGGGCA | 1700 | TGCCCCAA GGCTAGCTACAACGA TCCCAATT | 9614 |
| 904 | GAGUUGGG G CACAUUGC | 1701 | GCAATGTG GGCTAGCTACAACGA CCCAACTC | 9615 |
| 971 | GUAAACAG G CCUAUUGA | 1702 | TCAATAGG GGCTAGCTACAACGA CTGTTTAC | 9616 |
| 987 | AUUGGAAA G UAUGUCAA | 1703 | TTGACATA GGCTAGCTACAACGA TTTCCAAT | 9617 |
| 1006 | AAUUGUGG G UCUUUUGG | 1704 | CCAAAAGA GGCTAGCTACAACGA CCACAATT | 9618 |
| 1016 | CUUUUGGG G UUUGCCGC | 1705 | GCGGCAAA GGCTAGCTACAACGA CCCAAAAG | 9619 |
| 1080 | GCAUACAA G CAAAACAG | 1706 | CTGTTTTG GGCTAGCTACAACGA TTGTATGC | 9620 |
| 1089 | CAAAACAG G CUUUUACU | 1707 | AGTAAAAG GGCTAGCTACAACGA CTGTTTTG | 9621 |
| 1116 | CUUACAAG G CCUUUCUA | 1708 | TAGAAAGG GGCTAGCTACAACGA CTTGTAAG | 9622 |
| 1126 | CUUUCUAA G UAAACAGU | 1709 | ACTGTTTA GGCTAGCTACAACGA TTAGAAAG | 9623 |
| 1133 | AGUAAACA G UAUGUGAA | 1710 | TTCACATA GGCTAGCTACAACGA TGTTTACT | 9624 |
| 1152 | UUUACCCC G UUGCUCGG | 1711 | CCGAGCAA GGCTAGCTACAACGA GGGGTAAA | 9625 |
| 1160 | GUUGCUCG G CAACGGCC | 1712 | GGCCGTTG GGCTAGCTACAACGA CGAGCAAC | 9626 |
| 1166 | CGGCAACG G CCUGGUCU | 1713 | AGACCAGG GGCTAGCTACAACGA CGTTGCCG | 9627 |
| 1171 | ACGGCCUG G UCUAUGCC | 1714 | GGCATAGA GGCTAGCTACAACGA CAGGCCGT | 9628 |
| 1182 | UAUGCCAA G UGUUUGCU | 1715 | AGCAAACA GGCTAGCTACAACGA TTGGCATA | 9629 |
| 1207 | CCCCACUG G UUGGGGCU | 1716 | AGCCCCAA GGCTAGCTACAACGA CAGTGGGG | 9630 |
| 1213 | UGGUUGGG G CUUGGCCA | 1717 | TGGCCAAG GGCTAGCTACAACGA CCCAACCA | 9631 |
| 1218 | GGGGCUUG G CCAUAGGC | 1718 | GCCTATGG GGCTAGCTACAACGA CAAGCCCC | 9632 |
| 1225 | GGCCAUAG G CCAUCAGC | 1719 | GCTGATGG GGCTAGCTACAACGA CTATGGCC | 9633 |
| 1232 | GGCCAUCA G CGCAUGCG | 1720 | CGCATGCG GGCTAGCTACAACGA TGATGGCC | 9634 |
| 1240 | GCGCAUGC G UGGAACCU | 1721 | AGGTTCCA GGCTAGCTACAACGA GCATGCGC | 9635 |
| 1287 | AACUCCUA G CCGCUUGU | 1722 | ACAAGCGG GGCTAGCTACAACGA TAGGAGTT | 9636 |
| 1306 | UGCUCGCA G CAGGUCUG | 1723 | CAGACCTG GGCTAGCTACAACGA TGCGAGCA | 9637 |
| 1310 | CGCAGCAG G UCUGGGGC | 1724 | GCCCCAGA GGCTAGCTACAACGA CTGCTGCG | 9638 |
| 1317 | GGUCUGGG G CAAAACUC | 1725 | GAGTTTTG GGCTAGCTACAACGA CCCAGACC | 9639 |
| 1347 | AUUCUGUC G UGCUCUCC | 1726 | GGAGAGCA GGCTAGCTACAACGA GACAGAAT | 9640 |
| 1379 | UUUCCAUG G CUGCUAGG | 1727 | CCTAGCAG GGCTAGCTACAACGA CATGGAAA | 9641 |
| 1387 | GCUGCUAG G CUGUGCUG | 1728 | CAGCACAG GGCTAGCTACAACGA CTAGCAGC | 9642 |
| 1418 | CGCGGGAC G UCCUUUGU | 1729 | ACAAAGGA GGCTAGCTACAACGA GTCCCGCG | 9643 |
| 1431 | UUGUUUAC G UCCCGUCG | 1730 | CGACGGGA GGCTAGCTACAACGA GTAAACAA | 9644 |
| 1436 | UACGUCCC G UCGGCGCU | 1731 | AGCGCCGA GGCTAGCTACAACGA GGGACGTA | 9645 |
| 1440 | UCCCGUCG G CGCUGAAU | 1732 | ATTCAGCG GGCTAGCTACAACGA CGACGGGA | 9646 |
| 1471 | CUCCCGGG G CCGCUUGG | 1733 | CCAAGCGG GGCTAGCTACAACGA CCCGGGAG | 9647 |
| 1481 | CGCUUGGG G CUCUACCG | 1734 | CGGTAGAG GGCTAGCTACAACGA CCCAAGCG | 9648 |
| 1517 | UACCGACC G UCCACGGG | 1735 | CCCGTGGA GGCTAGCTACAACGA GGTCGGTA | 9649 |
| 1526 | UCCACGGG G CGCACCUC | 1736 | GAGGTGCG GGCTAGCTACAACGA CCCGTGGA | 9650 |
| 1553 | GACUCCCC G UCUGUGCC | 1737 | GGCACAGA GGCTAGCTACAACGA GGGGAGTC | 9651 |
| 1579 | GCCGGACC G UGUGCACU | 1738 | AGTGCACA GGCTAGCTACAACGA GGTCCGGC | 9652 |
| 1605 | CUCUGCAC G UCGCAUGG | 1739 | CCATGCGA GGCTAGCTACAACGA GTGCAGAG | 9653 |
| 1622 | AGACCACC G UGAACGCC | 1740 | GGCGTTCA GGCTAGCTACAACGA GGTGGTCT | 9654 |
| 1649 | UGCCCAAG G UCUUGCAU | 1741 | ATGCAAGA GGCTAGCTACAACGA CTTGGGCA | 9655 |
| 1679 | GACUUUCA G CAAUGUCA | 1742 | TGACATTG GGCTAGCTACAACGA TGAAAGTC | 9656 |
| 1703 | ACCUUGAG G CAUACUUC | 1743 | GAAGTATG GGCTAGCTACAACGA CTCAAGGT | 9657 |
| 1732 | UUUAAUGA G UGGGAGGA | 1744 | TCCTCCCA GGCTAGCTACAACGA TCATTAAA | 9658 |
| 1741 | UGGGAGGA G UUGGGGGA | 1745 | TCCCCCAA GGCTAGCTACAACGA TCCTCCCA | 9659 |
| 1754 | GGGAGGAG G UUAGGUUA | 1746 | TAACCTAA GGCTAGCTACAACGA CTCCTCCC | 9660 |
| 1759 | GAGGUUAG G UUAAAGGU | 1747 | ACCTTTAA GGCTAGCTACAACGA CTAACCTC | 9661 |
| 1766 | GGUUAAAG G UCUUUGUA | 1748 | TACAAAGA GGCTAGCTACAACGA CTTTAACC | 9662 |
| 1782 | ACUAGGAG G CUGUAGGC | 1749 | GCCTACAG GGCTAGCTACAACGA CTCCTAGT | 9663 |
| 1789 | GGCUGUAG G CAUAAAUU | 1750 | AATTTATG GGCTAGCTACAACGA CTACAGCC | 9664 |
| 1799 | AUAAAUUG G UGUGUUCA | 1751 | TGAACACA GGCTAGCTACAACGA CAATTTAT | 9665 |
| 1811 | GUUCACCA G CACCAUGC | 1752 | GCATGGTG GGCTAGCTACAACGA TGGTGAAC | 9666 |
| 1870 | CUGUUCAA G CCUCCAAG | 1753 | CTTGGAGG GGCTAGCTACAACGA TTGAACAG | 9667 |
| 1878 | GCCUCCAA G CUGUGCCU | 1754 | AGGCACAG GGCTAGCTACAACGA TTGGAGGC | 9668 |
| 1890 | UGCCUUGG G UGGCUUUG | 1755 | CAAAGCCA GGCTAGCTACAACGA CCAAGGCA | 9669 |
| 1893 | CUIGGGUG G CUUUGGGG | 1756 | CCCCAAAG GGCTAGCTACAACGA CACCCAAG | 9670 |
| 1901 | GCUUUGGG G CAUGGACA | 1757 | TGTCCATG GGCTAGCTACAACGA CCCAAAGC | 9671 |
| 1917 | AUUGACCC G UAUAAAGA | 1758 | TCTTTATA GGCTAGCTACAACGA GGGTCAAT | 9672 |
| 1933 | AAUUUGGA G CUUCUGUG | 1759 | CACAGAAG GGCTAGCTACAACGA TCCAAATT | 9673 |
| 1944 | UCUGUGGA G UUACUCUC | 1760 | GAGAGTAA GGCTAGCTACAACGA TCCACAGA | 9674 |
| 2023 | AUCGGGGG G CCUUAGAG | 1761 | CTCTAAGG GGCTAGCTACAACGA CCCCCGAT | 9675 |
| 2031 | GCCUUAGA G UCUCCGGA | 1762 | TCCGGAGA GGCTAGCTACAACGA TCTAAGGC | 9676 |
| 2062 | ACCAUACG G CACUCAGG | 1763 | CCTGAGTG GGCTAGCTACAACGA CGTATGGT | 9677 |
| 2070 | GCACUCAG G CAAGCUAU | 1764 | ATAGCTTG GGCTAGCTACAACGA CTGAGTGC | 9678 |
| 2074 | UCAGGCAA G CUAUUCUG | 1765 | CAGAATAG GGCTAGCTACAACGA TTGCCTGA | 9679 |
| 2090 | GUGUUGGG G UGAGUUGA | 1766 | TCAACTCA GGCTAGCTACAACGA CCCAACAC | 9680 |
| 2094 | UGGGGUGA G UUGAUGAA | 1767 | TTCATCAA GGCTAGCTACAACGA TCACCCCA | 9681 |
| 2107 | UGAAUCUA G CCACCUGG | 1768 | CCAGGTGG GGCTAGCTACAACGA TAGATTCA | 9682 |
| 2116 | CCACCUGG G UGGGAAGU | 1769 | ACTTCCCA GGCTAGCTACAACGA CCAGGTGG | 9683 |
| 2123 | GGUGGGAA G UAAUUUGG | 1770 | CCAAATTA GGCTAGCTACAACGA TTCCCACC | 9684 |
| 2140 | AAGAUCCA G CAUCCAGG | 1771 | CCTGGATG GGCTAGCTACAACGA TGGATCTT | 9685 |
| 2155 | GGGAAUUA G UAGUCAGC | 1772 | GCTGACTA GGCTAGCTACAACGA TAATTCCC | 9686 |
| 2158 | AAUUAGUA G UCAGCUAU | 1773 | ATAGCTGA GGCTAGCTACAACGA TACTAATT | 9687 |
| 2162 | AGUAGUCA G CUAUGUCA | 1774 | TGACATAG GGCTAGCTACAACGA TGACTACT | 9688 |
| 2173 | AUGUCAAC G UUAAUAUG | 1775 | CATATTAA GGCTAGCTACAACGA GTTGACAT | 9689 |
| 2183 | UAAUAUGG G CCUAAAAA | 1776 | TTTTTAGG GGCTAGCTACAACGA CCATATTA | 9690 |
| 2208 | CUAUUGUG G UUUCACAU | 1777 | ATGTGAAA GGCTAGCTACAACGA CACAATAG | 9691 |
| 2235 | ACUUUUGG G CGAGAAAC | 1778 | GTTTCTCG GGCTAGCTACAACGA CCAAAAGT | 9692 |
| 2260 | AAUAUUUG G UGUCUUUU | 1779 | AAAAGACA GGCTAGCTACAACGA CAAATATT | 9693 |
| 2272 | CUUUUGGA G UGUGGAUU | 1780 | AATCCACA GGCTAGCTACAACGA TCCAAAAG | 9694 |
| 2360 | ACGAAGAG G CAGGUCCC | 1781 | GGGACCTG GGCTAGCTACAACGA CTCTTCGT | 9695 |
| 2364 | AGAGGCAG G UCCCCUAG | 1782 | CTAGGGGA GGCTAGCTACAACGA CTGCCTCT | 9696 |
| 2403 | AGACGAAG G UCUCAAUC | 1783 | GATTGAGA GGCTAGCTACAACGA CTTCGTCT | 9697 |
| 2417 | AUCGCCGC G UCGCAGAA | 1784 | TTCTGCGA GGCTAGCTACAACGA GCGGCGAT | 9698 |
| 2454 | CAAUGUUA G UAUUCCUU | 1785 | AAGGAATA GGCTAGCTACAACGA TAACATTG | 9699 |
| 2474 | CACAUAAG G UGGGAAAC | 1786 | GTTTCCCA GGCTAGCTACAACGA CTTATGTG | 9700 |
| 2491 | UUUACGGG G CUUUAUUC | 1787 | GAATAAAG GGCTAGCTACAACGA CCCGTAAA | 9701 |
| 2507 | CUUCUACG G UACCUUGC | 1788 | GCAAGGTA GGCTAGCTACAACGA CGTAGAAG | 9702 |
| 2530 | CCUAAAUG G CAAACUCC | 1789 | GGAGTTTG GGCTAGCTACAACGA CATTTAGG | 9703 |
| 2587 | AGAUGUAA G CAAUUUGU | 1790 | ACAAATTG GGCTAGCTACAACGA TTACATCT | 9704 |
| 2599 | UUUGUGGG G CCCCUUAC | 1791 | GTAAGGGG GGCTAGCTACAACGA CCCACAAA | 9705 |
| 2609 | CCCUUACA G UAAAUGAA | 1792 | TTCATTTA GGCTAGCTACAACGA TGTAAGGG | 9706 |
| 2650 | CCUGCUAG G UUUUAUCC | 1793 | GGATAAAA GGCTAGCTACAACGA CTAGCAGG | 9707 |
| 2701 | AUCAAACC G UAUUAUCC | 1794 | GGATAATA GGCTAGCTACAACGA GGTTTGAT | 9708 |
| 2713 | UAUCCAGA G UAUGUAGU | 1795 | ACTACATA GGCTAGCTACAACGA TCTGGATA | 9709 |
| 2720 | AGUAUGUA G UUAAUCAU | 1796 | ATGATTAA GGCTAGCTACAACGA TACATACT | 9710 |
| 2768 | UUUGGAAG G CGGGGAUC | 1797 | GATCCCCG GGCTAGCTACAACGA CTTCCAAA | 9711 |
| 2791 | AAAAGAGA G UCCACACG | 1798 | CGTGTGGA GGCTAGCTACAACGA TCTCTTTT | 9712 |
| 2799 | GUCCACAC G UAGCGCCU | 1799 | AGGCGCTA GGCTAGCTACAACGA GTGTGGAC | 9713 |
| 2802 | CACACGUA G CGCCUCAU | 1800 | ATGAGGCG GGCTAGCTACAACGA TACGTGTG | 9714 |
| 2818 | UUUUGCGG G UCACCAUA | 1801 | TATGGTGA GGCTAGCTACAACGA CCGCAAAA | 9715 |
| 2848 | GAUCUACA G CAUGGGAG | 1802 | CTCCCATG GGCTAGCTACAACGA TGTAGATC | 9716 |
| 2857 | CAUGGGAG G UUGGUCUU | 1803 | AAGACCAA GGCTAGCTACAACGA CTCCCATG | 9717 |
| 2861 | GGAGGUUG G UCUUCCAA | 1804 | TTGGAAGA GGCTAGCTACAACGA CAACCTCC | 9718 |
| 2881 | UCGAAAAG G CAUGGGGA | 1805 | TCCCCATG GGCTAGCTACAACGA CTTTTCGA | 9719 |
| 2936 | GAUCAUCA G UUGGACCC | 1806 | GGGTCCAA GGCTAGCTACAACGA TGATGATC | 9720 |
| 2955 | CAUUCAAA G CCAACUCA | 1807 | TGAGTTGG GGCTAGCTACAACGA TTTGAATG | 9721 |
| 2964 | CCAACUCA G UAAAUCCA | 1808 | TGGATTTA GGCTAGCTACAACGA TGAGTTGG | 9722 |
| 3005 | GACAACUG G CCGGACGC | 1809 | GCGTCCGG GGCTAGCTACAACGA CAGTTGTC | 9723 |
| 3021 | CCAACAAG G UGGGAGUG | 1810 | CACTCCCA GGCTAGCTACAACGA CTTGTTGG | 9724 |
| 3027 | AGGUGGGA G UGGGAGCA | 1811 | TGCTCCCA GGCTAGCTACAACGA TCCCACCT | 9725 |
| 3033 | GAGUGGGA G CAUUCGGG | 1812 | CCCGAATG GGCTAGCTACAACGA TCCCACTC | 9726 |
| 3041 | GCAUUCGG G CCAGGGUU | 1813 | AACCCTGG GGCTAGCTACAACGA CCGAATGC | 9727 |
| 3047 | GGGCCAGG G UUCACCCC | 1814 | GGGGTGAA GGCTAGCTACAACGA CCTGGCCC | 9728 |
| 3077 | CUGUUGGG G UGGAGCCC | 1815 | GGGCTCCA GGCTAGCTACAACGA CCCAACAG | 9729 |
| 3082 | GGGGUGGA G CCCUCACG | 1816 | CGTGAGGG GGCTAGCTACAACGA TCCACCCC | 9730 |
| 3097 | CGCUCAGG G CCUACUCA | 1817 | TGAGTAGG GGCTAGCTACAACGA CCTGAGCG | 9731 |
| 3117 | CUGUGCCA G CAGCUCCU | 1818 | AGGAGCTG GGCTAGCTACAACGA TGGCACAG | 9732 |
| 3120 | UGCCAGCA G CUCCUCCU | 1819 | AGGAGGAG GGCTAGCTACAACGA TGCTGGCA | 9733 |
| 3146 | ACCAAUCG G CAGUCAGG | 1820 | CCTGACTG GGCTAGCTACAACGA CGATTGGT | 9734 |
| 3149 | AAUCGGCA G UCAGGAAG | 1821 | CTTCCTGA GGCTAGCTACAACGA TGCCGATT | 9735 |
| 3158 | UCAGGAAG G CAGCCUAC | 1822 | GTAGGCTG GGCTAGCTACAACGA CTTCCTGA | 9736 |
| 3161 | GGAAGGCA G CCUACUCC | 1823 | GGAGTAGG GGCTAGCTACAACGA TGCCTTCC | 9737 |
| 3204 | AUCCUCAG G CCAUGCAG | 1824 | CTGCATGG GGCTAGCTACAACGA CTGAGGAT | 9738 |
| 10 | ACUCCACC A CUUUCCAC | 703 | GTGGAAAG GGCTAGCTACAACGA GGTGGAGT | 9739 |
| 17 | CACUUUCC A CCAAACUC | 706 | GAGTTTGG GGCTAGCTACAACGA GGAAAGTG | 9740 |
| 22 | UCCACCAA A CUCUUCAA | 1825 | TTGAAGAG GGCTAGCTACAACGA TTGGTGGA | 9741 |
| 32 | UCUUCAAG A UCCCAGAG | 1826 | CTCTGGGA GGCTAGCTACAACGA CTTGAAGA | 9742 |
| 53 | GGCCCUGU A CUUUCCUG | 42 | CAGGAAAG GGCTAGCTACAACGA ACAGGGCC | 9743 |
| 82 | GUUCAGGA A CAGUGAGC | 1827 | GCTCACTG GGCTAGCTACAACGA TCCTGAAC | 9744 |
| 101 | UGCUCAGA A UACUGUCU | 1828 | AGACAGTA GGCTAGCTACAACGA TCTGAGCA | 9745 |
| 103 | CUCAGAAU A CUGUCUCU | 50 | AGAGACAG GGCTAGCTACAACGA ATTCTGAG | 9746 |
| 115 | UCUCUGCC A UAUCGUCA | 733 | TGACGATA GGCTAGCTACAACGA GGCAGAGA | 9747 |
| 117 | UCUGCCAU A UCGUCAAU | 53 | ATTGACGA GGCTAGCTACAACGA ATGGCAGA | 9748 |
| 124 | UAUCGUCA A UCUUAUCG | 1829 | CGATAAGA GGCTAGCTACAACGA TGACGATA | 9749 |
| 129 | UCAAUCUU A UCGAAGAC | 58 | GTCTTCGA GGCTAGCTACAACGA AAGATTGA | 9750 |
| 136 | UAUCGAAG A CUGGGGAC | 1830 | GTCCCCAG GGCTAGCTACAACGA CTTCGATA | 9751 |
| 143 | GACUGGGG A CCCUGUAC | 1831 | GTACAGGG GGCTAGCTACAACGA CCCCAGTC | 9752 |
| 150 | CACCCUGU A CCGAACAU | 60 | ATGTTCGG GGCTAGCTACAACGA ACAGGGTC | 9753 |
| 155 | UGUACCGA A CAUGGAGA | 1832 | TCTCCATG GGCTAGCTACAACGA TCGGTACA | 9754 |
| 157 | UACCGAAC A UGGAGAAC | 745 | GTTCTCCA GGCTAGCTACAACGA GTTCGGTA | 9755 |
| 164 | CAUGGAGA A CAUCGCAU | 1833 | ATGCGATG GGCTAGCTACAACGA TCTCCATG | 9756 |
| 166 | UGGAGAAC A UCGCAUCA | 746 | TGATGCGA GGCTAGCTACAACGA GTTCTCCA | 9757 |
| 171 | AACAUCGC A UCAGGACU | 747 | AGTCCTGA GGCTAGCTACAACGA GCGATGTT | 9758 |
| 177 | GCAUCAGG A CUCCUAGG | 1834 | CCTAGGAG GGCTAGCTACAACGA CCTGATGC | 9759 |
| 186 | CUCCUAGG A CCCCUGCU | 1835 | AGCAGGGG GGCTAGCTACAACGA CCTAGGAG | 9760 |
| 201 | CUCGUGUU A CAGGCGGG | 67 | CCCGCCTG GGCTAGCTACAACGA AACACGAG | 9761 |
| 223 | UCUUGUUG A CAAAAAUC | 1836 | GATTTTTG GGCTAGCTACAACGA CAACAAGA | 9762 |
| 229 | UGACAAAA A UCCUCACA | 1837 | TGTGAGGA GGCTAGCTACAACGA TTTTGTCA | 9763 |
| 235 | AAAUCCUC A CAAUACCA | 762 | TGGTATTG GGCTAGCTACAACGA GAGGATTT | 9764 |
| 238 | UCCUCACA A UACCACAG | 1838 | CTGTGGTA GGCTAGCTACAACGA TGTGAGGA | 9765 |
| 240 | CUCACAAU A CCACAGAG | 77 | CTCTGTGG GGCTAGCTACAACGA ATTGTGAG | 9766 |
| 243 | ACAAUACC A CAGAGUCU | 765 | AGACTCTG GGCTAGCTACAACGA GGTATTGT | 9767 |
| 254 | GAGUCUAG A CUCGUGGU | 1839 | ACCACGAG GGCTAGCTACAACGA CTAGACTC | 9768 |
| 265 | CGUGGUGG A CUUCUCUC | 1840 | GAGAGAAG GGCTAGCTACAACGA CCACCACG | 9769 |
| 275 | UUCUCUCA A UUUUCUAG | 1841 | CTAGAAAA GGCTAGCTACAACGA TGAGAGAA | 9770 |
| 289 | UAGGGGGA A CACCCGUG | 1842 | CACGGGTG GGCTAGCTACAACGA TCCCCCTA | 9771 |
| 291 | GGGGGAAC A CCCGUGUG | 774 | CACACGGG GGCTAGCTACAACGA GTTCCCCC | 9772 |
| 311 | UGGCCAAA A UUCGCAGU | 1843 | ACTGCGAA GGCTAGCTACAACGA TTTGGCCA | 9773 |
| 325 | AGUCCCAA A UCUCCAGU | 1844 | ACTGGAGA GGCTAGCTACAACGA TTGGGACT | 9774 |
| 335 | CUCCAGUC A CUCACCAA | 787 | TTGGTGAG GGCTAGCTACAACGA GACTGGAG | 9775 |
| 339 | AGUCACUC A CCAACCUG | 789 | CAGGTTGG GGCTAGCTACAACGA GAGTGACT | 9776 |
| 343 | ACUCACCA A CCUGUUGU | 1845 | ACAACAGG GGCTAGCTACAACGA TGGTGAGT | 9777 |
| 358 | GUCCUCCA A UUUGUCCU | 1846 | AGGACAAA GGCTAGCTACAACGA TGGAGGAC | 9778 |
| 371 | UCCUGGUU A UCGCUGGA | 106 | TCCAGCGA GGCTAGCTACAACGA AACCAGGA | 9779 |
| 379 | AUCGCUGG A UGUGUCUG | 1847 | CAGACACA GGCTAGCTACAACGA CCAGCGAT | 9780 |
| 397 | GGCGUUUU A UCAUCUUC | 112 | GAAGATGA GGCTAGCTACAACGA AAAACGCC | 9781 |
| 400 | GUUUUAUC A UCUUCCUC | 802 | GAGGAAGA GGCTAGCTACAACGA GATAAAAC | 9782 |
| 412 | UCCUCUGC A UCCUGCUG | 807 | CAGCAGGA GGCTAGCTACAACGA GCAGAGGA | 9783 |
| 423 | CUGCUGCU A UGCCUCAU | 119 | ATGAGGCA GGCTAGCTACAACGA AGCAGCAG | 9784 |
| 430 | UAUGCCUC A UCUUCUUG | 814 | CAAGAAGA GGCTAGCTACAACGA GAGGCATA | 9785 |
| 452 | UCUUCUGG A CUAUCAAG | 1848 | CTTGATAG GGCTAGCTACAACGA CCAGAAGA | 9786 |
| 455 | UCUGGACU A UCAAGGUA | 130 | TACCTTGA GGCTAGCTACAACGA AGTCCAGA | 9787 |
| 463 | AUCAAGGU A UGUUGCCC | 132 | GGGCAACA GGCTAGCTACAACGA ACCTTGAT | 9788 |
| 484 | GUCCUCUA A UUCCAGGA | 1849 | TCCTGGAA GGCTAGCTACAACGA TAGAGGAC | 9789 |
| 492 | AUUCCAGG A UCAUCAAC | 1850 | GTTGATGA GGCTAGCTACAACGA CCTGGAAT | 9790 |
| 495 | CCAGGAUC A UCAACAAC | 828 | GTTGTTGA GGCTAGCTACAACGA GATCCTGG | 9791 |
| 499 | GAUCAUCA A CAACCAGC | 1851 | GCTGGTTG GGCTAGCTACAACGA TGATGATC | 9792 |
| 502 | CAUCAACA A CCAGCACC | 1852 | GGTGCTGG GGCTAGCTACAACGA TGTTGATG | 9793 |
| 513 | AGCACCGG A CCAUGCAA | 1853 | TTGCATGG GGCTAGCTACAACGA CCGGTGCT | 9794 |
| 516 | ACCGGACC A UGCAAAAC | 836 | GTTTTGCA GGCTAGCTACAACGA GGTCCGGT | 9795 |
| 523 | CAUGCAAA A CCUGCACA | 1854 | TGTGCAGG GGCTAGCTACAACGA TTTGCATG | 9796 |
| 529 | AAACCUGC A CAACUCCU | 840 | AGGAGTTG GGCTAGCTACAACGA GCAGGTTT | 9797 |
| 532 | CCUGCACA A CUCCUGCU | 1855 | AGCAGGAG GGCTAGCTACAACGA TGTGCAGG | 9798 |
| 547 | CUCAAGGA A CCUCUAUG | 1856 | CATAGAGG GGCTAGCTACAACGA TCCTTGAG | 9799 |
| 553 | GAACCUCU A UGUUUCCC | 146 | GGGAAACA GGCTAGCTACAACGA AGAGGTTC | 9800 |
| 564 | UUUCCCUC A UGUUGCUG | 853 | CAGCAACA GGCTAGCTACAACGA GAGGGAAA | 9801 |
| 574 | GUUGCUGU A CAAAACCU | 152 | AGGTTTTG GGCTAGCTACAACGA ACAGCAAC | 9802 |
| 579 | UGUACAAA A CCUACGGA | 1857 | TCCGTAGG GGCTAGCTACAACGA TTTGTACA | 9803 |
| 583 | CAAAACCU A CGGACGGA | 153 | TCCGTCCG GGCTAGCTACAACGA AGGTTTTG | 9804 |
| 587 | ACCUACGG A CGGAAACU | 1858 | AGTTTCCG GGCTAGCTACAACGA CCGTAGGT | 9805 |
| 593 | GGACGGAA A CUGCACCU | 1859 | AGGTGCAG GGCTAGCTACAACGA TTCCGTCC | 9806 |
| 598 | GAAACUGC A CCUGUAUU | 859 | AATACAGG GGCTAGCTACAACGA GCAGTTTC | 9807 |
| 604 | GCACCUGU A UUCCCAUC | 154 | GATGGGAA GGCTAGCTACAACGA ACAGGTGC | 9808 |
| 610 | GUAUUCCC A UCCCAUCA | 864 | TGATGGGA GGCTAGCTACAACGA GGGAATAC | 9809 |
| 615 | CCCAUCCC A UCAUCUUG | 867 | CAAGATGA GGCTAGCTACAACGA GGGATGGG | 9810 |
| 618 | AUCCCAUC A UCUUGGGC | 868 | GCCCAAGA GGCTAGCTACAACGA GATGGGAT | 9811 |
| 636 | UUCGCAAA A UACCUAUG | 1860 | CATAGGTA GGCTAGCTACAACGA TTTGCGAA | 9812 |
| 638 | CGCAAAAU A CCUAUGGG | 164 | CCCATAGG GGCTAGCTACAACGA ATTTTGCG | 9813 |
| 642 | AAAUACCU A UGGGAGUG | 165 | CACTCCCA GGCTAGCTACAACGA AGGTATTT | 9814 |
| 681 | CUCAGUUU A CUAGUGCC | 176 | GGCACTAG GGCTAGCTACAACGA AAACTGAG | 9815 |
| 690 | CUAGUGCC A UUUGUUCA | 884 | TGAACAAA GGCTAGCTACAACGA GGCACTAG | 9816 |
| 721 | UUUCCCCC A CUGUCUGG | 891 | CCAGACAG GGCTAGCTACAACGA GGGGGAAA | 9817 |
| 739 | UUUCAGUU A UAUGGAUG | 193 | CATCCATA GGCTAGCTACAACGA AACTGAAA | 9818 |
| 741 | UCAGUUAU A UGGAUGAU | 194 | ATCATCCA GGCTAGCTACAACGA ATAACTGA | 9819 |
| 745 | UUAUAUGG A UGAUGUGG | 1861 | CCACATCA GGCTAGCTACAACGA CCATATAA | 9820 |
| 748 | UAUGGAUG A UGUGGUUU | 1862 | AAACCACA GGCTAGCTACAACGA CATCCATA | 9821 |
| 773 | AAGUCUGU A CAACAUCU | 199 | AGATGTTG GGCTAGCTACAACGA ACAGACTT | 9822 |
| 776 | UCUGUACA A CAUCUUGA | 1863 | TCAAGATG GGCTAGCTACAACGA TGTACAGA | 9823 |
| 778 | UGUACAAC A UCUUGAGU | 900 | ACTCAAGA GGCTAGCTACAACGA GTTGTACA | 9824 |
| 793 | GUCCCUUU A UGCCGCUG | 205 | CAGCGGCA GGCTAGCTACAACGA AAAGGGAC | 9825 |
| 804 | CCGCUGUU A CCAAUUUU | 207 | AAAATTGG GGCTAGCTACAACGA AACAGCGG | 9826 |
| 808 | UGUUACCA A UUUUCUUU | 1864 | AAAGAAAA GGCTAGCTACAACGA TGGTAACA | 9827 |
| 828 | CUUUGGGU A UACAUUUA | 218 | TAAATGTA GGCTAGCTACAACGA ACCCAAAG | 9828 |
| 830 | UUGGGUAU A CAUUUAAA | 219 | TTTAAATG GGCTAGCTACAACGA ATACCCAA | 9829 |
| 832 | GGGUAUAC A UUUAAACC | 911 | GGTTTAAA GGCTAGCTACAACGA GTATACCC | 9830 |
| 838 | ACAUUUAA A CCCUCACA | 1865 | TGTGAGGG GGCTAGCTACAACGA TTAAATGT | 9831 |
| 844 | AAACCCUC A CAAAACAA | 915 | TTGTTTTG GGCTAGCTACAACGA GAGGGTTT | 9832 |
| 849 | CUCACAAA A CAAAAAGA | 1866 | TCTTTTTG GGCTAGCTACAACGA TTTGTGAG | 9833 |
| 857 | ACAAAAAG A UGGGGAUA | 1867 | TATCCCCA GGCTAGCTACAACGA CTTTTTGT | 9834 |
| 863 | AGAUGGGG A UAUUCCCU | 1868 | AGGGAATA GGCTAGCTACAACGA CCCCATCT | 9835 |
| 865 | AUGGGGAU A UUCCCUUA | 224 | TAAGGGAA GGCTAGCTACAACGA ATCCCCAT | 9836 |
| 874 | UUCCCUUA A CUUCAUGG | 1869 | CCATGAAG GGCTAGCTACAACGA TAAGGGAA | 9837 |
| 879 | UUAACUUC A UGGGAUAU | 922 | ATATCCCA GGCTAGCTACAACGA GAAGTTAA | 9838 |
| 884 | UUCAUGGG A UAUGUAAU | 1870 | ATTACATA GGCTAGCTACAACGA CCCATGAA | 9839 |
| 886 | CAUGGGAU A UGUAAUUG | 231 | CAATTACA GGCTAGCTACAACGA ATCCCATG | 9840 |
| 891 | GAUAUGUA A UUGGGAGU | 1871 | ACTCCCAA GGCTAGCTACAACGA TACATATC | 9841 |
| 906 | GUUGGGGC A CAUUGCCA | 923 | TGGCAATG GGCTAGCTACAACGA GCCCCAAC | 9842 |
| 908 | UGGGGCAC A UUGCCACA | 924 | TGTGGCAA GGCTAGCTACAACGA GTGCCCCA | 9843 |
| 914 | ACAUUGCC A CAGGAACA | 926 | TGTTCCTG GGCTAGCTACAACGA GGCAATGT | 9844 |
| 920 | CCACAGGA A CAUAUUGU | 1872 | ACAATATG GGCTAGCTACAACGA TCCTGTGG | 9845 |
| 922 | ACAGGAAC A UAUUGUAC | 928 | GTACAATA GGCTAGCTACAACGA GTTCCTGT | 9846 |
| 924 | AGGAACAU A UUGUACAA | 236 | TTGTACAA GGCTAGCTACAACGA ATGTTCCT | 9847 |
| 929 | CAUAUUGU A CAAAAAAU | 238 | ATTTTTTG GGCTAGCTACAACGA ACAATATG | 9848 |
| 936 | UACAAAAA A UCAAAAUG | 1873 | CATTTTGA GGCTAGCTACAACGA TTTTTGTA | 9849 |
| 942 | AAAUCAAA A UGUGUUUU | 1874 | AAAACACA GGCTAGCTACAACGA TTTGATTT | 9850 |
| 956 | UUUAGGAA A CUUCCUGU | 1875 | ACAGGAAG GGCTAGCTACAACGA TTCCTAAA | 9851 |
| 967 | UCCUGUAA A CAGGCCUA | 1876 | TAGGCCTG GGCTAGCTACAACGA TTACAGGA | 9852 |
| 975 | ACAGGCCU A UUGAUUGG | 247 | CCAATCAA GGCTAGCTACAACGA AGGCCTGT | 9853 |
| 979 | GCCUAUUG A UUGGAAAG | 1877 | CTTTCCAA GGCTAGCTACAACGA CAATAGGC | 9854 |
| 989 | UGGAAAGU A UGUCAACG | 250 | CGTTGACA GGCTAGCTACAACGA ACTTTCCA | 9855 |
| 995 | GUAUGUCA A CGAAUUGU | 1878 | ACAATTCG GGCTAGCTACAACGA TGACATAC | 9856 |
| 999 | GUCAACGA A UUGUGGGU | 1879 | ACCCACAA GGCTAGCTACAACGA TCGTTGAC | 9857 |
| 1032 | CCCCUUUC A CGCAAUGU | 944 | ACATTGCG GGCTAGCTACAACGA GAAAGGGG | 9858 |
| 1037 | UUCACGCA A UGUGGAUA | 1880 | TATCCACA GGCTAGCTACAACGA TGCGTGAA | 9859 |
| 1043 | CAAUGUGG A UAUUCUGC | 1881 | GCAGAATA GGCTAGCTACAACGA CCACATTG | 9860 |
| 1045 | AUGUGGAU A UUCUGCUU | 262 | AAGCAGAA GGCTAGCTACAACGA ATCCACAT | 9861 |
| 1056 | CUGCUUUA A UGCCUUUA | 1882 | TAAAGGCA GGCTAGCTACAACGA TAAAGCAG | 9862 |
| 1064 | AUGCCUUU A UAUGCAUG | 270 | CATGCATA GGCTAGCTACAACGA AAAGGCAT | 9863 |
| 1066 | GCCUUUAU A UGCAUGCA | 271 | TGCATGCA GGCTAGCTACAACGA ATAAAGGC | 9864 |
| 1070 | UUAUAUGC A UGCAUACA | 950 | TGTATGCA GGCTAGCTACAACGA GCATATAA | 9865 |
| 1074 | AUGCAUGC A UACAAGCA | 951 | TGCTTGTA GGCTAGCTACAACGA GCATGCAT | 9866 |
| 1076 | GCAUGCAU A CAAGCAAA | 272 | TTTGCTTG GGCTAGCTACAACGA ATGCATGC | 9867 |
| 1085 | CAAGCAAA A CAGGCUUU | 1883 | AAAGCCTG GGCTAGCTACAACGA TTTGCTTG | 9868 |
| 1095 | AGGCUUUU A CUUUCUCG | 276 | CGAGAAAG GGCTAGCTACAACGA AAAAGCCT | 9869 |
| 1107 | UCUCGCCA A CUUACAAG | 1884 | CTTGTAAG GGCTAGCTACAACGA TGGCGAGA | 9870 |
| 1111 | GCCAACUU A CAAGGCCU | 282 | AGGCCTTG GGCTAGCTACAACGA AAGTTGGC | 9871 |
| 1130 | CUAAGUAA A CAGUAUGU | 1885 | ACATACTG GGCTAGCTACAACGA TTACTTAG | 9872 |
| 1135 | UAAACAGU A UGUGAACC | 288 | GGTTCACA GGCTAGCTACAACGA ACTGTTTA | 9873 |
| 1141 | GUAUGUGA A CCUUUACC | 1886 | GGTAAAGG GGCTAGCTACAACGA TCACATAC | 9874 |
| 1147 | GAACCUUU A CCCCGUUG | 291 | CAACGGGG GGCTAGCTACAACGA AAAGGTTC | 9875 |
| 1163 | GCUCGGCA A CGGCCUGG | 1887 | CCAGGCCG GGCTAGCTACAACGA TGCCGAGC | 9876 |
| 1175 | CCUGGUCU A UGCCAAGU | 295 | ACTTGGCA GGCTAGCTACAACGA AGACCAGG | 9877 |
| 1192 | GUUUGCUG A CGCAACCC | 1888 | GGGTTGCG GGCTAGCTACAACGA CAGCAAAC | 9878 |
| 1197 | CUGACGCA A CCCCCACU | 1889 | AGTGGGGG GGCTAGCTACAACGA TGCGTCAG | 9879 |
| 1203 | CAACCCCC A CUGGUUGG | 984 | CCAACCAG GGCTAGCTACAACGA GGGGGTTG | 9880 |
| 1221 | GCUUGGCC A UAGGCCAU | 988 | ATGGCCTA GGCTAGCTACAACGA GGCCAAGC | 9881 |
| 1228 | CAUAGGCC A UCAGCGCA | 990 | TGCGCTGA GGCTAGCTACAACGA GGCCTATG | 9882 |
| 1236 | AUCAGCGC A UGCGUGGA | 992 | TCCACGCA GGCTAGCTACAACGA GCGCTGAT | 9883 |
| 1245 | UGCGUGGA A CCUUUGUG | 1890 | CACAAAGG GGCTAGCTACAACGA TCCACGCA | 9884 |
| 1266 | CUCUGCCG A UCCAUACC | 1891 | GGTATGGA GGCTAGCTACAACGA CGGCAGAG | 9885 |
| 1270 | GCCGAUCC A UACCGCGG | 1001 | CCGCGGTA GGCTAGCTACAACGA GGATCGGC | 9886 |
| 1272 | CGAUCCAU A CCGCGGAA | 308 | TTCCGCGG GGCTAGCTACAACGA ATGGATCG | 9887 |
| 1280 | ACCGCGGA A CUCCUAGC | 1892 | GCTAGGAG GGCTAGCTACAACGA TCCGCGGT | 9888 |
| 1322 | GGGGCAAA A CUCAUCGG | 1893 | CCGATGAG GGCTAGCTACAACGA TTTGCCCC | 9889 |
| 1326 | CAAAACUC A UCGGGACU | 1014 | AGTCCCGA GGCTAGCTACAACGA GAGTTTTG | 9890 |
| 1332 | UCAUCGGG A CUGACAAU | 1894 | ATTGTCAG GGCTAGCTACAACGA CCCGATGA | 9891 |
| 1336 | CGGGACUG A CAAUUCUG | 1895 | CAGAATTG GGCTAGCTACAACGA CAGTCCCG | 9892 |
| 1339 | GACUGACA A UUCUGUCG | 1896 | CGACAGAA GGCTAGCTACAACGA TGTCAGTC | 9893 |
| 1361 | UCCCGCAA A UAUACAUC | 1897 | GATGTATA GGCTAGCTACAACGA TTGCGGGA | 9894 |
| 1363 | CCGCAAAU A UACAUCAU | 324 | ATGATGTA GGCTAGCTACAACGA ATTTGCGG | 9895 |
| 1365 | GCAAAUAU A CAUCAUUU | 325 | AAATGATG GGCTAGCTACAACGA ATATTTGC | 9896 |
| 1367 | AAAUAUAC A UCAUUUCC | 1023 | GGAAATGA GGCTAGCTACAACGA GTATATTT | 9897 |
| 1370 | UAUACAUC A UUUCCAUG | 1024 | CATGGAAA GGCTAGCTACAACGA GATGTATA | 9898 |
| 1376 | UCAUUUCC A UGGCUGCU | 1026 | AGCAGCCA GGCTAGCTACAACGA GGAAATGA | 9899 |
| 1399 | UGCUGCCA A CUGGAUCC | 1898 | GGATCCAG GGCTAGCTACAACGA TGGCAGCA | 9900 |
| 1404 | CCAACUGG A UCCUACGC | 1899 | GCGTAGGA GGCTAGCTACAACGA CCAGTTGG | 9901 |
| 1409 | UGGAUCCU A CGCGGGAC | 332 | GTCCCGCG GGCTAGCTACAACGA AGGATCCA | 9902 |
| 1416 | UACGCGGG A CGUCCUUU | 1900 | AAAGGACG GGCTAGCTACAACGA CCCGCGTA | 9903 |
| 1429 | CUUUGUUU A CGUCCCGU | 338 | ACGGGACG GGCTAGCTACAACGA AAACAAAG | 9904 |
| 1447 | GGCGCUGA A UCCCGCGG | 1901 | CCGCGGGA GGCTAGCTACAACGA TCAGCGCC | 9905 |
| 1456 | UCCCGCGG A CGACCCCU | 1902 | AGGGGTCG GGCTAGCTACAACGA CCGCGGGA | 9906 |
| 1459 | CGCGGACG A CCCCUCCC | 1903 | GGGAGGGG GGCTAGCTACAACGA CGTCCGCG | 9907 |
| 1486 | GGGGCUCU A CCGCCCGC | 345 | GCGGGCGG GGCTAGCTACAACGA AGAGCCCC | 9908 |
| 1505 | CUCCGCCU A UUGUACCG | 349 | CGGTACAA GGCTAGCTACAACGA AGGCGGAG | 9909 |
| 1510 | CCUAUUGU A CCGACCGU | 351 | ACGGTCGG GGCTAGCTACAACGA ACAATAGG | 9910 |
| 1514 | UUGUACCG A CCGUCCAC | 1904 | GTGGACGG GGCTAGCTACAACGA CGGTACAA | 9911 |
| 1521 | GACCGUCC A CGGGGCGC | 1064 | GCGCCCCG GGCTAGCTACAACGA GGACGGTC | 9912 |
| 1530 | CGGGGCGC A CCUCUCUU | 1065 | AAGAGAGG GGCTAGCTACAACGA GCGCCCCG | 9913 |
| 1540 | CUCUCUUU A CGCGGACU | 357 | AGTCCGCG GGCTAGCTACAACGA AAAGAGAG | 9914 |
| 1546 | UUACGCGG A CUCCCCGU | 1905 | ACGGGGAG GGCTAGCTACAACGA CCGCGTAA | 9915 |
| 1567 | GCCUUCUC A UCUGCCGG | 1078 | CCGGCAGA GGCTAGCTACAACGA GAGAAGGC | 9916 |
| 1576 | UCUGCCGG A CCGUGUGC | 1906 | GCACACGG GGCTAGCTACAACGA CCGGCAGA | 9917 |
| 1585 | CCGUGUGC A CUUCGCUU | 1082 | AAGCGAAG GGCTAGCTACAACGA GCACACGG | 9918 |
| 1595 | UUCGCUUC A CCUCUGCA | 1085 | TGCAGAGG GGCTAGCTACAACGA GAAGCGAA | 9919 |
| 1603 | ACCUCUGC A CGUCGCAU | 1089 | ATGCGACG GGCTACCTACAACGA GCAGAGGT | 9920 |
| 1610 | CACGUCGC A UGGAGACC | 1090 | GGTCTCCA GGCTAGCTACAACGA GCGACGTG | 9921 |
| 1616 | GCAUGGAG A CCACCGUG | 1907 | CACGGTGG GGCTAGCTACAACGA CTCCATGC | 9922 |
| 1619 | UGGAGACC A CCGUGAAC | 1092 | GTTCACGG GGCTAGCTACAACGA GGTCTCCA | 9923 |
| 1626 | CACCGUGA A CGCCCACA | 1908 | TGTGGGCG GGCTAGCTACAACGA TCACGGTG | 9924 |
| 1638 | CCACAGGA A CCUGCCCA | 1909 | TGGGCAGG GGCTAGCTACAACGA TCCTGTGG | 9925 |
| 1656 | GGUCUUGC A UAAGAGGA | 1104 | TCCTCTTA GGCTAGCTACAACGA GCAAGACC | 9926 |
| 1664 | AUAAGAGG A CUCUUGGA | 1910 | TCCAAGAG GGCTAGCTACAACGA CCTCTTAT | 9927 |
| 1672 | ACUCUUGG A CUUUCAGC | 1911 | GCTGAAAG GGCTAGCTACAACGA CCAAGAGT | 9928 |
| 1682 | UUUCAGCA A UGUCAACG | 1912 | CGTTGACA GGCTAGCTACAACGA TGCTGAAA | 9929 |
| 1688 | CAAUGUCA A CGACCGAC | 1913 | GTCGGTCG GGCTAGCTACAACGA TGACATTG | 9930 |
| 1691 | UGUCAACG A CCGACCUU | 1914 | AAGGTCGG GGCTAGCTACAACGA CGTTGACA | 9931 |
| 1695 | AACGACCG A CCUUGAGG | 1915 | CCTCAAGG GGCTAGCTACAACGA CGGTCGTT | 9932 |
| 1705 | CUUGAGGC A UACUUCAA | 1114 | TTGAAGTA GGCTAGCTACAACGA GCCTCAAG | 9933 |
| 1707 | UGAGGCAU A CUUCAAAG | 380 | CTTTGAAG GGCTAGCTACAACGA ATGCCTCA | 9934 |
| 1716 | CUUCAAAG A CUGUGUGU | 1916 | ACACACAG GGCTAGCTACAACGA CTTTGAAG | 9935 |
| 1728 | UGUGUUUA A UGAGUGGG | 1917 | CCCACTCA GGCTAGCTACAACGA TAAACACA | 9936 |
| 1774 | GUCUUUGU A CUAGGAGG | 394 | CCTCCTAG GGCTAGCTACAACGA ACAAAGAC | 9937 |
| 1791 | CUGUAGGC A UAAAUUGG | 1121 | CCAATTTA GGCTAGCTACAACGA GCCTACAG | 9938 |
| 1795 | AGGCAUAA A UUGGUGUG | 1918 | CACACCAA GGCTAGCTACAACGA TTATGCCT | 9939 |
| 1807 | GUGUGUUC A CCAGCACC | 1122 | GGTGCTGG GGCTAGCTACAACGA GAACACAC | 9940 |
| 1813 | UCACCAGC A CCAUGCAA | 1125 | TTGCATGG GGCTAGCTACAACGA GCTGGTGA | 9941 |
| 1816 | CCAGCACC A UGCAACUU | 1127 | AAGTTGCA GGCTAGCTACAACGA GGTGCTGG | 9942 |
| 1821 | ACCAUGCA A CUUUUUCA | 1919 | TGAAAAAG GGCTAGCTACAACGA TGCATGGT | 9943 |
| 1829 | ACUUUUUC A CCUCUGCC | 1130 | GGCAGAGG GGCTAGCTACAACGA GAAAAAGT | 9944 |
| 1840 | UCUGCCUA A UCAUCUCA | 1920 | TGAGATGA GGCTAGCTACAACGA TAGGCAGA | 9945 |
| 1843 | GCCUAAUC A UCUCAUGU | 1136 | ACATGAGA GGCTAGCTACAACGA GATTAGGC | 9946 |
| 1848 | AUCAUCUC A UGUUCAUG | 1138 | CATGAACA GGCTAGCTACAACGA GAGATGAT | 9947 |
| 1854 | UCAUGUUC A UGUCCUAC | 1139 | GTAGGACA GGCTAGCTACAACGA GAACATGA | 9948 |
| 1861 | CAUGUCCU A CUGUUCAA | 414 | TTGAACAG GGCTAGCTACAACGA AGGACATG | 9949 |
| 1903 | UUUGGGGC A UGGACAUU | 1152 | AATGTCCA GGCTAGCTACAACGA GCCCCAAA | 9950 |
| 1907 | GGGCAUGG A CAUUGACC | 1921 | GGTCAATG GGCTAGCTACAACGA CCATGCCC | 9951 |
| 1909 | GCAUGGAC A UUGACCCG | 1153 | CGGGTCAA GGCTAGCTACAACGA GTCCATGC | 9952 |
| 1913 | GGACAUUG A CCCGUAUA | 1922 | TATACGGG GGCTAGCTACAACGA CAATGTCC | 9953 |
| 1919 | UGACCCGU A UAAAGAAU | 422 | ATTCTTTA GGCTAGCTACAACGA ACGGGTCA | 9954 |
| 1926 | UAUAAAGA A UUUGGAGC | 1923 | GCTCCAAA GGCTAGCTACAACGA TCTTTATA | 9955 |
| 1947 | GUGGAGUU A CUCUCUUU | 429 | AAAGAGAG GGCTAGCTACAACGA AACTCCAC | 9956 |
| 1967 | GCCUUCUG A CUUCUUUC | 1924 | GAAAGAAG GGCTAGCTACAACGA CAGAAGGC | 9957 |
| 1981 | UUCCUUCU A UUCGAGAU | 446 | ATCTCGAA GGCTAGCTACAACGA AGAAGGAA | 9958 |
| 1988 | UAUUCGAG A UCUCCUCG | 1925 | CGAGGAGA GGCTAGCTACAACGA CTCGAATA | 9959 |
| 1997 | UCUCCUCG A CACCGCCU | 1926 | AGGCGGTG GGCTAGCTACAACGA CGAGGAGA | 9960 |
| 1999 | UCCUCGAC A CCGCCUCU | 1172 | AGAGGCGG GGCTAGCTACAACGA GTCGAGGA | 9961 |
| 2015 | UGCUCUGU A UCGGGGGG | 454 | CCCCCCGA GGCTAGCTACAACGA ACAGAGCA | 9962 |
| 2040 | UCUCCGGA A CAUUGUUC | 1927 | GAACAATG GGCTAGCTACAACGA TCCGGAGA | 9963 |
| 2042 | UCCGGAAC A UUGUUCAC | 1183 | GTGAACAA GGCTAGCTACAACGA GTTCCGGA | 9964 |
| 2049 | CAUUGUUC A CCUCACCA | 1184 | TGGTGAGG GGCTAGCTACAACGA GAACAATG | 9965 |
| 2054 | UUCACCUC A CCAUACGG | 1187 | CCGTATGG GGCTAGCTACAACGA GAGGTGAA | 9966 |
| 2057 | ACCUCACC A UACGGCAC | 1189 | GTGCCGTA GGCTAGCTACAACGA GGTGAGGT | 9967 |
| 2059 | CUCACCAU A CGGCACUC | 464 | GAGTGCCG GGCTAGCTACAACGA ATGGTGAG | 9968 |
| 2064 | CAUACGGC A CUCAGGCA | 1190 | TGCCTGAC GGCTAGCTACAACGA GCCGTATG | 9969 |
| 2077 | GGCAAGCU A UUCUGUGU | 466 | ACACAGAA GGCTAGCTACAACGA AGCTTGCC | 9970 |
| 2098 | GUGAGUUG A UGAAUCUA | 1928 | TAGATTCA GGCTAGCTACAACGA CAACTCAC | 9971 |
| 2102 | GUUGAUGA A UCUAGCCA | 1929 | TGGCTAGA GGCTAGCTACAACGA TCATCAAC | 9972 |
| 2110 | AUCUAGCC A CCUGGGUG | 1198 | CACCCAGG GGCTAGCTACAACGA GGCTAGAT | 9973 |
| 2126 | GGGAAGUA A UUUGGAAG | 1930 | CTTCCAAA GGCTAGCTACAACGA TACTTCCC | 9974 |
| 2135 | UUUGGAAG A UCCAGCAU | 1931 | ATGCTGGA GGCTAGCTACAACGA CTTCCAAA | 9975 |
| 2142 | GAUCCAGC A UCCAGGGA | 1203 | TCCCTGGA GGCTAGCTACAACGA GCTGGATC | 9976 |
| 2151 | UCCAGGGA A UUAGUAGU | 1932 | ACTACTAA GGCTAGCTACAACGA TCCCTGGA | 9977 |
| 2165 | AGUCAGCU A UGUCAACG | 482 | CGTTGACA GGCTAGCTACAACGA AGCTGACT | 9978 |
| 2171 | CUAUGUCA A CGUUAAUA | 1933 | TATTAACG GGCTAGCTACAACGA TGACATAG | 9979 |
| 2177 | CAACGUUA A UAUGGGCC | 1934 | GGCCCATA GGCTAGCTACAACGA TAACGTTG | 9980 |
| 2179 | ACGUUAAU A UGGGCCUA | 486 | TAGGCCCA GGCTAGCTACAACGA ATTAACGT | 9981 |
| 2191 | GCCUAAAA A UCAGACAA | 1935 | TTGTCTGA GGCTAGCTACAACGA TTTTAGGC | 9982 |
| 2196 | AAAAUCAG A CAACUAUU | 1936 | AATAGTTG GGCTAGCTACAACGA CTGATTTT | 9983 |
| 2199 | AUCAGACA A CUAUUGUG | 1937 | CACAATAG GGCTAGCTACAACGA TGTCTGAT | 9984 |
| 2202 | AGACAACU A UUGUGGUU | 489 | AACCACAA GGCTAGCTACAACGA AGTTGTCT | 9985 |
| 2213 | GUGGUUUC A CAUUUCCU | 1214 | AGGAAATG GGCTAGCTACAACGA GAAACCAC | 9986 |
| 2215 | GGUUUCAC A UUUCCUGU | 1215 | ACAGGAAA GGCTAGCTACAACGA GTGAAACC | 9987 |
| 2227 | CCUGUCUU A CUUUUGGG | 499 | CCCAAAAG GGCTAGCTACAACGA AAGACAGG | 9988 |
| 2242 | GGCGAGAA A CUGUUCUU | 1938 | AAGAACAG GGCTAGCTACAACGA TTCTCGCC | 9989 |
| 2253 | GUUCUUGA A UAUUUGGU | 1939 | ACCAAATA GGCTAGCTACAACGA TCAAGAAC | 9990 |
| 2255 | UCUUGAAU A UUUGGUGU | 506 | ACACCAAA GGCTAGCTACAACGA ATTCAAGA | 9991 |
| 2278 | GAGUGUGG A UUCGCACU | 1940 | AGTGCGAA GGCTAGCTACAACGA CCACACTC | 9992 |
| 2284 | GGAUUCGC A CUCCUCCU | 1223 | AGGAGGAG GGCTAGCTACAACGA GCGAATCC | 9993 |
| 2295 | CCUCCUGC A UAUAGACC | 1229 | GGTCTATA GGCTAGCTACAACGA GCAGGAGG | 9994 |
| 2297 | UCCUGCAU A UAGACCAC | 517 | GTGGTCTA GGCTAGCTACAACGA ATGCAGGA | 9995 |
| 2301 | GCAUAUAG A CCACCAAA | 1941 | TTTGGTGG GGCTAGCTACAACGA CTATATGC | 9996 |
| 2304 | UAUAGACC A CCAAAUGC | 1231 | GCATTTGG GGCTAGCTACAACGA GGTCTATA | 9997 |
| 2309 | ACCACCAA A UGCCCCUA | 1942 | TAGGGGCA GGCTAGCTACAACGA TTGGTGGT | 9998 |
| 2317 | AUGCCCCU A UCUUAUCA | 519 | TGATAAGA GGCTAGCTACAACGA AGGGGCAT | 9999 |
| 2322 | CCUAUCUU A UCAACACU | 522 | AGTGTTGA GGCTAGCTACAACGA AAGATAGG | 10000 |
| 2326 | UCUUAUCA A CACUUCCG | 1943 | CGGAAGTG GGCTAGCTACAACGA TGATAAGA | 10001 |
| 2328 | UUAUCAAC A CUUCCGGA | 1240 | TCCGGAAG GGCTAGCTACAACGA GTTGATAA | 10002 |
| 2338 | UUCCGGAA A CUACUGUU | 1944 | AACAGTAG GGCTAGCTACAACGA TTCCGGAA | 10003 |
| 2341 | CGGAAACU A CUGUUGUU | 526 | AACAACAG GGCTAGCTACAACGA AGTTTCCG | 10004 |
| 2352 | GUUGUUAG A CGAAGAGG | 1945 | CCTCTTCG GGCTAGCTACAACGA CTAACAAC | 10005 |
| 2380 | GAAGAAGA A CUCCCUCG | 1946 | CGAGGGAG GGCTAGCTACAACGA TCTTCTTC | 10006 |
| 2397 | CCUCGCAG A CGAAGGUC | 1947 | GACCTTCG GGCTAGCTACAACGA CTGCGAGG | 10007 |
| 2409 | AGGUCUCA A UCGCCGCG | 1948 | CGCGGCGA GGCTAGCTACAACGA TGAGACCT | 10008 |
| 2427 | CGCAGAAG A UCUCAAUC | 1949 | GATTGAGA GGCTAGCTACAACGA CTTCTGCG | 10009 |
| 2433 | AGAUCUCA A UCUCGGGA | 1950 | TCCCGAGA GGCTAGCTACAACGA TGAGATCT | 10010 |
| 2442 | UCUCGGGA A UCUCAAUG | 1951 | CATTGAGA GGCTAGCTACAACGA TCCCGAGA | 10011 |
| 2448 | GAAUCUCA A UGUUAGUA | 1952 | TACTAACA GGCTAGCTACAACGA TGAGATTC | 10012 |
| 2456 | AUGUUAGU A UUCCUUGG | 547 | CCAAGGAA GGCTAGCTACAACGA ACTAACAT | 10013 |
| 2465 | UUCCUUGG A CACAUAAG | 1953 | CTTATGTG GGCTAGCTACAACGA CCAAGGAA | 10014 |
| 2467 | CCUUGGAC A CAUAAGGU | 1268 | ACCTTATG GGCTAGCTACAACGA GTCCAAGG | 10015 |
| 2469 | UUGGACAC A UAAGGUGG | 1269 | CCACCTTA GGCTAGCTACAACGA GTGTCCAA | 10016 |
| 2481 | GGUGGGAA A CUUUACGG | 1954 | CCGTAAAG GGCTAGCTACAACGA TTCCCACC | 10017 |
| 2486 | GAAACUUU A CGGGGCUU | 554 | AAGCCCCG GGCTAGCTACAACGA AAAGTTTC | 10018 |
| 2496 | GGGGCUUU A UUCUUCUA | 557 | TAGAAGAA GGCTAGCTACAACGA AAAGCCCC | 10019 |
| 2504 | AUUCUUCU A CGGUACCU | 562 | AGGTACCG GGCTAGCTACAACGA AGAAGAAT | 10020 |
| 2509 | UCUACGGU A CCUUGCUU | 563 | AAGCAAGG GGCTAGCTACAACGA ACCGTAGA | 10021 |
| 2520 | UUGCUUUA A UCCUAAAU | 1955 | ATTTAGGA GGCTAGCTACAACGA TAAAGCAA | 10022 |
| 2527 | AAUCCUAA A UGGCAAAC | 1956 | GTTTGCCA GGCTAGCTACAACGA TTAGGATT | 10023 |
| 2534 | AAUGGCAA A CUCCUUCU | 1957 | AGAAGGAG GGCTAGCTACAACGA TTGCCATT | 10024 |
| 2550 | UUUUCCUG A CAUUCAUU | 1958 | AATGAATG GGCTAGCTACAACGA CAGGAAAA | 10025 |
| 2552 | UUCCUGAC A UUCAUUUG | 1286 | CAAATGAA GGCTAGCTACAACGA GTCAGGAA | 10026 |
| 2556 | UGACAUUC A UUUGCAGG | 1287 | CCTGCAAA GGCTAGCTACAACGA GAATGTCA | 10027 |
| 2568 | GCAGGAGG A CAUUGUUG | 1959 | CAACAATG GGCTAGCTACAACGA CCTCCTGC | 10028 |
| 2570 | AGGAGGAC A UUGUUGAU | 1289 | ATCAACAA GGCTAGCTACAACGA GTCCTCCT | 10029 |
| 2577 | CAUUGUUG A UAGAUGUA | 1960 | TACATCTA GGCTAGCTACAACGA CAACAATG | 10030 |
| 2581 | GUUGAUAG A UGUAAGCA | 1961 | TGCTTACA GGCTAGCTACAACGA CTATCAAC | 10031 |
| 2590 | UGUAAGCA A UUUGUGGG | 1962 | CCCACAAA GGCTAGCTACAACGA TGCTTACA | 10032 |
| 2606 | GGCCCCUU A CAGUAAAU | 588 | ATTTACTG GGCTAGCTACAACGA AAGGGGCC | 10033 |
| 2613 | UACAGUAA A UGAAAACA | 1963 | TGTTTTCA GGCTAGCTACAACGA TTACTGTA | 10034 |
| 2619 | AAAUGAAA A CAGGAGAC | 1964 | GTCTCCTG GGCTAGCTACAACGA TTTCATTT | 10035 |
| 2626 | AACAGGAG A CUUAAAUU | 1965 | AATTTAAG GGCTAGCTACAACGA CTCCTGTT | 10036 |
| 2632 | AGACUUAA A UUAACUAU | 1966 | ATAGTTAA GGCTAGCTACAACGA TTAAGTCT | 10037 |
| 2636 | UUAAAUUA A CUAUGCCU | 1967 | AGGCATAG GGCTAGCTACAACGA TAATTTAA | 10038 |
| 2639 | AAUUAACU A UGCCUGCU | 594 | AGCAGGCA GGCTAGCTACAACGA AGTTAATT | 10039 |
| 2655 | UAGGUUUU A UCCCAAUG | 599 | CATTGGGA GGCTAGCTACAACGA AAAACCTA | 10040 |
| 2661 | UUAUCCCA A UGUUACUA | 1968 | TAGTAACA GGCTAGCTACAACGA TGGGATAA | 10041 |
| 2666 | CCAAUGUU A CUAAAUAU | 602 | ATATTTAG GGCTAGCTACAACGA AACATTGG | 10042 |
| 2671 | GUUACUAA A UAUUUGCC | 1969 | GGCAAATA GGCTAGCTACAACGA TTAGTAAC | 10043 |
| 2673 | UACUAAAU A UUUGCCCU | 604 | AGGGCAAA GGCTAGCTACAACGA ATTTAGTA | 10044 |
| 2685 | GCCCUUAG A UAAAGGGA | 1970 | TCCCTTTA GGCTAGCTACAACGA CTAAGGGC | 10045 |
| 2693 | AUAAAGGG A UCAAACCG | 1971 | CGGTTTGA GGCTAGCTACAACGA CCCTTTAT | 10046 |
| 2698 | GGGAUCAA A CCGUAUUA | 1972 | TAATACGG GGCTAGCTACAACGA TTGATCCC | 10047 |
| 2703 | CAAACCGU A UUAUCCAG | 611 | CTGGATAA GGCTAGCTACAACGA ACGGTTTG | 10048 |
| 2706 | ACCGUAUU A UCCAGAGU | 613 | ACTCTGGA GGCTAGCTACAACGA AATACGGT | 10049 |
| 2715 | UCCAGAGU A UGUAGUUA | 615 | TAACTACA GGCTAGCTACAACGA ACTCTGGA | 10050 |
| 2724 | UGUAGUUA A UCAUUACU | 1973 | AGTAATGA GGCTAGCTACAACGA TAACTACA | 10051 |
| 2727 | AGUUAAUC A UUACUUCC | 1313 | GGAAGTAA GGCTAGCTACAACGA GATTAACT | 10052 |
| 2730 | UAAUCAUU A CUUCCAGA | 621 | TCTGGAAG GGCTAGCTACAACGA AATGATTA | 10053 |
| 2738 | ACUUCCAG A CGCGACAU | 1974 | ATGTCGCG GGCTAGCTACAACGA CTGGAAGT | 10054 |
| 2743 | CAGACGCG A CAUUAUUU | 1975 | AAATAATG GGCTAGCTACAACGA CGCGTCTG | 10055 |
| 2745 | GACGCGAC A UUAUUUAC | 1317 | GTAAATAA GGCTAGCTACAACGA GTCGCGTC | 10056 |
| 2748 | GCGACAUU A UUUACACA | 625 | TGTGTAAA GGCTAGCTACAACGA AATGTCGC | 10057 |
| 2752 | CAUUAUUU A CACACUCU | 628 | AGAGTGTG GGCTAGCTACAACGA AAATAATG | 10058 |
| 2754 | UUAUUUAC A CACUCUUU | 1318 | AAAGAGTG GGCTAGCTACAACGA GTAAATAA | 10059 |
| 2756 | AUUUACAC A CUCUUUGG | 1319 | CCAAAGAG GGCTAGCTACAACGA GTGTAAAT | 10060 |
| 2774 | AGGCGGGG A UCUUAUAU | 1976 | ATATAAGA GGCTAGCTACAACGA CCCCGCCT | 10061 |
| 2779 | GGGAUCUU A UAUAAAAG | 634 | CTTTTATA GGCTAGCTACAACGA AAGATCCC | 10062 |
| 2781 | GAUCUUAU A UAAAAGAG | 635 | CTCTTTTA GGCTAGCTACAACGA ATAAGATC | 10063 |
| 2795 | GAGAGUCC A CACGUAGC | 1324 | GCTACGTG GGCTAGCTACAACGA GCACTCTC | 10064 |
| 2797 | CAGUCCAC A CGUAGCGC | 1325 | GCGCTACG GGCTAGCTACAACGA GTGGACTC | 10065 |
| 2809 | AGCGCCUC A UUUUGCGG | 1328 | CCGCAAAA GGCTAGCTACAACGA GAGGCGCT | 10066 |
| 2821 | UGCGGGUC A CCAUAUUC | 1329 | GAATATGG GGCTAGCTACAACGA GACCCGCA | 10067 |
| 2824 | GGGUCACC A UAUUCUUG | 1331 | CAAGAATA GGCTAGCTACAACGA GGTGACCC | 10068 |
| 2826 | GUCACCAU A UUCUUGGG | 644 | CCCAAGAA GGCTAGCTACAACGA ATGGTGAC | 10069 |
| 2836 | UCUUGGGA A CAAGAUCU | 1977 | AGATCTTG GGCTAGCTACAACGA TCCCAAGA | 10070 |
| 2841 | GGAACAAG A UCUACAGC | 1978 | GCTGTAGA GGCTAGCTACAACGA CTTGTTCC | 10071 |
| 2845 | CAAGAUCU A CAGCAUGG | 649 | CCATGCTG GGCTAGCTACAACGA AGATCTTG | 10072 |
| 2850 | UCUACAGC A UGGGAGGU | 1336 | ACCTCCCA GGCTAGCTACAACGA GCTGTAGA | 10073 |
| 2870 | UCUUCCAA A CCUCGAAA | 1979 | TTTCGAGG GGCTAGCTACAACGA TTGGAAGA | 10074 |
| 2883 | GAAAAGGC A UGGGGACA | 1342 | TGTCCCCA GGCTAGCTACAACGA GCCTTTTC | 10075 |
| 2889 | GCAUGGGG A CAAAUCUU | 1980 | AAGATTTG GGCTAGCTACAACGA CCCCATGC | 10076 |
| 2893 | GGGGACAA A UCUUUCUG | 1981 | CAGAAAGA GGCTAGCTACAACGA TTGTCCCC | 10077 |
| 2908 | UCUCCCCA A UCCCCUGG | 1982 | CCAGGGGA GGCTAGCTACAACGA TGGGGACA | 10078 |
| 2918 | CCCCUGGG A UUCUUCCC | 1983 | GGGAAGAA GGCTAGCTACAACGA CCCAGGGG | 10079 |
| 2929 | CUUCCCCG A UCAUCAGU | 1984 | ACTGATGA GGCTAGCTACAACGA CGGGGAAG | 10080 |
| 2932 | CCCCGAUC A UCAGUUGG | 1358 | CCAACTGA GGCTAGCTACAACGA GATCGGGG | 10081 |
| 2941 | UCAGUUGG A CCCUGCAU | 1985 | ATGCAGGG GGCTAGCTACAACGA CCAACTGA | 10082 |
| 2948 | GACCCUGC A UUCAAAGC | 1363 | GCTTTGAA GGCTAGCTACAACGA GCAGGGTC | 10083 |
| 2959 | CAAAGCCA A CUCAGUAA | 1986 | TTACTGAG GGCTAGCTACAACGA TGGCTTTG | 10084 |
| 2968 | CUCAGUAA A UCCAGAUU | 1987 | AATCTGGA GGCTAGCTACAACGA TTACTGAG | 10085 |
| 2974 | AAAUCCAG A UUGGGACC | 1988 | GGTCCCAA GGCTAGCTACAACGA CTGGATTT | 10086 |
| 2980 | AGAUUGGG A CCUCAACC | 1989 | GGTTGAGG GGCTAGCTACAACGA CCCAATCT | 10087 |
| 2986 | GGACCUCA A CCCGCACA | 1990 | TGTGCGGG GGCTAGCTACAACGA TGAGGTCC | 10088 |
| 2998 | GCACAAGG A CAACUGGC | 1991 | GCCAGTTG GGCTAGCTACAACGA CCTTGTGC | 10089 |
| 3001 | CAAGGACA A CUGGCCGG | 1992 | CCGGCCAG GGCTAGCTACAACGA TGTCCTTG | 10090 |
| 3010 | CUGGCCGG A CGCCAACA | 1993 | TGTTGGCG GGCTAGCTACAACGA CCGGCCAG | 10091 |
| 3016 | GGACGCCA A CAAGGUGG | 1994 | CCACCTTG GGCTAGCTACAACGA TGGCGTCC | 10092 |
| 3035 | GUGGGAGC A UUCGGGCC | 1384 | GGCCCGAA GGCTAGCTACAACGA GCTCCCAC | 10093 |
| 3051 | CAGGGUUC A CCCCUCCC | 1387 | GGGAGGGG GGCTAGCTACAACGA GAACCCTG | 10094 |
| 3061 | CCCUCCCC A UGGGGGAC | 1395 | GTCCCCCA GGCTAGCTACAACGA GGGGAGGG | 10095 |
| 3068 | CAUGGGGG A CUGUUGGG | 1995 | CCCAACAG GGCTAGCTACAACGA CCCCCATG | 10096 |
| 3088 | GAGCCCUC A CGCUCAGG | 1400 | CCTGAGCG GGCTAGCTACAACGA GAGGGCTC | 10097 |
| 3101 | CAGGGCCU A CUCACAAC | 683 | GTTGTGAG GGCTAGCTACAACGA AGGCCCTG | 10098 |
| 3105 | GCCUACUC A CAACUGUG | 1406 | CACAGTTG GGCTAGCTACAACGA GAGTAGGC | 10099 |
| 3108 | UACUCACA A CUGUGCCA | 1996 | TGGCACAG GGCTAGCTACAACGA TGTGAGTA | 10100 |
| 3138 | CUGCCUCC A CCAAUCGG | 1422 | CCGATTGG GGCTAGCTACAACGA GGAGGCAG | 10101 |
| 3142 | CUCCACCA A UCGGCAGU | 1997 | ACTGCCGA GGCTAGCTACAACGA TGGTGGAG | 10102 |
| 3165 | GGCAGCCU A CUCCCUUA | 691 | TAAGGGAG GGCTAGCTACAACGA AGGCTGCC | 10103 |
| 3173 | ACUCCCUU A UCUCCACC | 694 | GGTGGAGA GGCTAGCTACAACGA AAGGGAGT | 10104 |
| 3179 | UUAUCUCC A CCUCUAAG | 1436 | CTTAGAGG GGCTAGCTACAACGA GGAGATAA | 10105 |
| 3190 | UCUAAGGG A CACUCAUC | 1998 | GATGAGTG GGCTAGCTACAACGA CCCTTAGA | 10106 |
| 3192 | UAAGGGAC A CUCAUCCU | 1440 | AGGATGAG GGCTAGCTACAACGA GTCCCTTA | 10107 |
| 3196 | GGACACUC A UCCUCAGG | 1442 | CCTGAGGA GGCTAGCTACAACGA GAGTGTCC | 10108 |
| 3207 | CUCAGGCC A UGCAGUGG | 1447 | CCACTGCA GGCTAGCTACAACGA GGCCTGAG | 10109 |

Input Sequence = AF100308.
Cut Site = YG/M or UG/U.
Stem Length = 8.
Core Sequence = GGCTAGCTACAACGA
AF100308 (Hepatitis B virus strain 2-18, 3215 bp)

[0558] TABLE X

HUMAN HBV AMBERZYME AND SUBSTRATE SEQUENCE

| | | | | |
|---|---|---|---|---|
| Pos | Substrate | Seq ID | Amberzyme | Seq ID |

| | | | | |
|---|---|---|---|---|
| 61 | ACUUUCCU G CUGGUGGC | 1448 | GCCACCAG GGAGGAAACUCC CU UCAAGGACAUCGUCCGGG AGGAAAGU | 10110 |
| 87 | GGAACAGU G AGCCCUGC | 1449 | GCAGGGCU GGAGGAAACUCC CU UCAAGGACAUCGUCCGGG ACUGUUCC | 10111 |
| 94 | UGAGCCCU G CUCAGAAU | 1450 | AUUCUGAG GGAGGAAACUCC CU UCAAGGACAUCGUCCGGG AGGGCUCA | 10112 |
| 112 | CUGUCUCU G CCAUAUCG | 1451 | CGAUAUGG GGAGGAAACUCC CU UCAAGGACAUCGUCCGGG AGAGACAG | 10113 |
| 132 | AUCUUAUC G AAGACUGG | 1452 | CCAGUCUU GGAGGAAACUCC CU UCAAGGACAUCGUCCGGG GAUAAGAU | 10114 |
| 153 | CCUGUACC G AACAUGGA | 1453 | UCCAUGUU GGAGGAAACUCC CU UCAAGGACAUCGUCCGGG GGUACAGG | 10115 |
| 169 | AGAACAUC G CAUCAGGA | 1454 | UCCUGAUG GGAGGAAACUCC CU UCAAGGACAUCGUCCGGG GAUGUUCU | 10116 |
| 192 | GGACCCCU G CUCGUGUU | 1455 | AACACGAG GGAGGAAACUCC CU UCAAGGACAUCGUCCGGG AGGGGUCC | 10117 |
| 222 | UUCUUGUU G ACAAAAAU | 1456 | AUUUUUGU GGAGGAAACUCC CU UCAAGGACAUCGUCCGGG AACAAGAA | 10118 |
| 315 | CAAAAUUC G CAGUCCCA | 1457 | UGGGACUG GGAGGAAACUCC CU UCAAGGACAUCGUCCGGG GAAUUUUG | 10119 |
| 374 | UGGUUAUC G CUGGAUGU | 1458 | ACAUCCAG GGAGGAAACUCC CU UCAAGGACAUCGUCCGGG GAUAACCA | 10120 |
| 387 | AUGUGUCU G CGGCGUUU | 1459 | AAACGCCG GGAGGAAACUCC CU UCAAGGACAUCGUCCGGG AGACACAU | 10121 |
| 410 | CUUCCUCU G CAUCCUGC | 1460 | GCAGGAUG GGAGGAAACUCC CU UCAAGGACAUCGUCCGGG AGAGGAAG | 10122 |
| 417 | UGCAUCCU G CUGCUAUG | 1461 | CAUAGCAG GGAGGAAACUCC CU UCAAGGACAUCGUCCGGG AGGAUGCA | 10123 |
| 420 | AUCCUGCU G CUAUGCCU | 1462 | AGGCAUAG GGAGGAAACUCC CU UCAAGGACAUCGUCCGGG AGCAGGAU | 10124 |
| 425 | GCUGCUAU G CCUCAUCU | 1463 | AGAUGAGG GGAGGAAACUCC CU UCAAGGACAUCGUCCGGG AUAGCAGC | 10125 |
| 468 | GGUAUGUU G CCCGUUUG | 1464 | CAAACGGG GGAGGAAACUCC CU UCAAGGACAUCGUCCGGG AACAUACC | 10126 |
| 518 | CGGACCAU G CAAAACCU | 1465 | AGGUUUUG GGAGGAAACUCC CU UCAAGGACAUCGUCCGGG AUGGUCCG | 10127 |
| 527 | CAAAACCU G CACAACUC | 1466 | GAGUUGUG GGAGGAAACUCC CU UCAAGGACAUCGUCCGGG AGGUUUUG | 10128 |
| 538 | CAACUCCU G CUCAAGGA | 1467 | UCCUUGAG GGAGGAAACUCC CU UCAAGGACAUCGUCCGGG AGGAGUUG | 10129 |
| 569 | CUCAUGUU G CUGUACAA | 1468 | UUGUACAG GGAGGAAACUCC CU UCAAGGACAUCGUCCGGG AACAUGAG | 10130 |
| 596 | CGGAAACU G CACCUGUA | 1469 | UACAGGUG GGAGGAAACUCC CU UCAAGGACAUCGUCCGGG AGUUUCCG | 10131 |
| 631 | GGGCUUUC G CAAAAUAC | 1470 | GUAUUUUG GGAGGAAACUCC CU UCAAGGACAUCGUCCGGG GAAAGCCC | 10132 |
| 687 | UUACUAGU G CCAUUUGU | 1471 | ACAAAUGG GGAGGAAACUCC CU UCAAGGACAUCGUCCGGG ACUAGUAA | 10133 |
| 747 | AUAUGGAU G AUGUGGUU | 1472 | AACCACAU GGAGGAAACUCC CU UCAAGGACAUCGUCCGGG AUCCAUAU | 10134 |
| 783 | AACAUCUU G AGUCCCUU | 1473 | AAGGGACU GGAGGAAACUCC CU UCAAGGACAUCGUCCGGG AAGAUGUU | 10135 |
| 795 | CCCUUUAU G CCGCUGUU | 1474 | AACAGCGG GGAGGAAACUCC CU UCAAGGACAUCGUCCGGG AUAAAGGG | 10136 |
| 798 | UUUAUGCC G CUGUUACC | 1475 | GGUAACAG GGAGGAAACUCC CU UCAAGGACAUCGUCCGGG GGCAUAAA | 10137 |
| 911 | GGCACAUU G CCACAGGA | 1476 | UCCUGUGG GGAGGAAACUCC CU UCAAGGACAUCGUCCGGG AAUGUGCC | 10138 |
| 978 | GGCCUAUU G AUUGGAAA | 1477 | UUUCCAAU GGAGGAAACUCC CU UCAAGGACAUCGUCCGGG AAUAGGCC | 10139 |
| 997 | AUGUCAAC G AAUUGUGG | 1478 | CCACAAUU GGAGGAAACUCC CU UCAAGGACAUCGUCCGGG GUUGACAU | 10140 |
| 1020 | UGGGGUUU G CCGCCCCU | 1479 | AGGGGCGG GGAGGAAACUCC CU UCAAGGACAUCGUCCGGG AAACCCCA | 10141 |
| 1023 | GGUUUGCC G CCCCUUUC | 1480 | GAAAGGGG GGAGGAAACUCC CU UCAAGGACAUCGUCCGGG GGCAAACC | 10142 |
| 1034 | CCUUUCAC G CAAUGUGG | 1481 | CCACAUUG GGAGGAAACUCC CU UCAAGGACAUCGUCCGGG GUGAAAGG | 10143 |
| 1050 | GAUAUUCU G CUUUAAUG | 1482 | CAUUAAAG GGAGGAAACUCC CU UCAAGGACAUCGUCCGGG AGAAUAUC | 10144 |
| 1058 | GCUUUAAU G CCUUUAUA | 1483 | UAUAAAGG GGAGGAAACUCC CU UCAAGGACAUCGUCCGGG AUUAAAGC | 10145 |
| 1068 | CUUUAUAU G CAUGCAUA | 1484 | UAUGCAUG GGAGGAAACUCC CU UCAAGGACAUCGUCCGGG AUAUAAAG | 10146 |
| 1072 | AUAUGCAU G CAUACAAG | 1485 | CUUGUAUG GGAGGAAACUCC CU UCAAGGACAUCGUCCGGG AUGCAUAU | 10147 |
| 1103 | ACUUUCUC G CCAACUUA | 1486 | UAAGUUGG GGAGGAAACUCC CU UCAAGGACAUCGUCCGGG GAGAAAGU | 10148 |
| 1139 | CAGUAUGU G AACCUUUA | 1487 | UAAAGGUU GGAGGAAACUCC CU UCAAGGACAUCGUCCGGG ACAUACUG | 10149 |
| 1155 | ACCCCGUU G CUCGGCAA | 1488 | UUGCCGAG GGAGGAAACUCC CU UCAAGGACAUCGUCCGGG AACGGGGU | 10150 |
| 1177 | UGGUCUAU G CCAAGUGU | 1489 | ACACUUGG GGAGGAAACUCC CU UCAAGGACAUCGUCCGGG AUAGACCA | 10151 |
| 1188 | AAGUGUUU G CUGACGCA | 1490 | UGCGUCAG GGAGGAAACUCC CU UCAAGGACAUCGUCCGGG AAACACUU | 10152 |
| 1191 | UGUUUGCU G ACGCAACC | 1491 | GGUUGCGU GGAGGAAACUCC CU UCAAGGACAUCGUCCGGG AGCAAACA | 10153 |
| 1194 | UUGCUGAC G CAACCCCC | 1492 | GGGGGUUG GGAGGAAACUCC CU UCAAGGACAUCGUCCGGG GUCAGCAA | 10154 |
| 1234 | CCAUCAGC G CAUGCGUG | 1493 | CACGCAUG GGAGGAAACUCC CU UCAAGGACAUCGUCCGGG GCUGAUGG | 10155 |
| 1238 | CAGCGCAU G CGUGGAAC | 1494 | GUUCCACG GGAGGAAACUCC CU UCAAGGACAUCGUCCGGG AUGCGCUG | 10156 |
| 1262 | UCUCCUCU G CCGAUCCA | 1495 | UGGAUCGG GGAGGAAACUCC CU UCAAGGACAUCGUCCGGG AGAGGAGA | 10157 |
| 1265 | CCUCUGCC G AUCCAUAC | 1496 | GUAUGGAU GGAGGAAACUCC CU UCAAGGACAUCGUCCGGG GGCAGAGG | 10158 |
| 1275 | UCCAUACC G CGGAACUC | 1497 | GAGUUCCG GGAGGAAACUCC CU UCAAGGACAUCGUCCGGG GGUAUGGA | 10159 |
| 1290 | UCCUAGCC G CUUGUUUU | 1498 | AAAACAAG GGAGGAAACUCC CU UCAAGGACAUCGUCCGGG GGCUAGGA | 10160 |
| 1299 | CUUGUUUU G CUCGCAGC | 1499 | GCUGCGAG GGAGGAAACUCC CU UCAAGGACAUCGUCCGGG AAAACAAG | 10161 |
| 1303 | UUUUGCUC G CAGCAGGU | 1500 | ACCUGCUG GGAGGAAACUCC CU UCAAGGACAUCGUCCGGG GAGCAAAA | 10162 |
| 1335 | UCGGGACU G ACAAUUCU | 1501 | AGAAUUGU GGAGGAAACUCC CU UCAAGGACAUCGUCCGGG AGUCCCGA | 10163 |
| 1349 | UCUGUCGU G CUCUCCCG | 1502 | CGGGAGAG GGAGGAAACUCC CU UCAAGGACAUCGUCCGGG ACGACAGA | 10164 |
| 1357 | GCUCUCCC G CAAAUAUA | 1503 | UAUAUUUG GGAGGAAACUCC CU UCAAGGACAUCGUCCGGG GGGAGAGC | 10165 |
| 1382 | CCAUGGCU G CUAGGCUG | 1504 | CAGCCUAG GGAGGAAACUCC CU UCAAGGACAUCGUCCGGG AGCCAUGG | 10166 |
| 1392 | UAGGCUGU G CUGCCAAC | 1505 | GUUGGCAG GGAGGAAACUCC CU UCAAGGACAUCGUCCGGG ACAGCCUA | 10167 |
| 1395 | GCUGUGCU G CCAACUGG | 1506 | CCAGUUGG GGAGGAAACUCC CU UCAAGGACAUCGUCCGGG AGCACAGC | 10168 |
| 1411 | GAUCCUAC G CGGGACGU | 1507 | ACGUCCCG GGAGGAAACUCC CU UCAAGGACAUCGUCCGGG GUAGGAUC | 10169 |
| 1442 | CCGUCGGC G CUGAAUCC | 1508 | GGAUUCAG GGAGGAAACUCC CU UCAAGGACAUCGUCCGGG GCCGACGG | 10170 |
| 1445 | UCGGCGCU G AAUCCCGC | 1509 | GCGGGAUU GGAGGAAACUCC CU UCAAGGACAUCGUCCGGG AGCGCCGA | 10171 |
| 1452 | UGAAUCCC G CGGACGAC | 1510 | GUCGUCCG GGAGGAAACUCC CU UCAAGGACAUCGUCCGGG GGGAUUCA | 10172 |
| 1458 | CCGCGGAC G ACCCCUCC | 1511 | GGAGGGGU GGAGGAAACUCC CU UCAAGGACAUCGUCCGGG GUCCGCGG | 10173 |
| 1474 | CCGGGGCC G CUUGGGGC | 1512 | GCCCCAAG GGAGGAAACUCC CU UCAAGGACAUCGUCCGGG GGCCCCGG | 10174 |
| 1489 | GCUCUACC G CCCGCUUC | 1513 | GAAGCGGG GGAGGAAACUCC CU UCAAGGACAUCGUCCGGG GGUAGAGC | 10175 |
| 1493 | UACCGCCC G CUUCUCCG | 1514 | CGGAGAAG GGAGGAAACUCC CU UCAAGGACAUCGUCCGGG GGGCGGUA | 10176 |
| 1501 | GCUUCUCC G CCUAUUGU | 1515 | ACAAUAGG GGAGGAAACUCC CU UCAAGGACAUCGUCCGGG GGAGAAGC | 10177 |
| 1513 | AUUGUACC G ACCGUCCA | 1516 | UGGACGGU GGAGGAAACUCC CU UCAAGGACAUCGUCCGGG GGUACAAU | 10178 |
| 1528 | CACGGGGC G CACCUCUC | 1517 | GAGAGGUG GGAGGAAACUCC CU UCAAGGACAUCGUCCGGG GCCCCGUG | 10179 |
| 1542 | CUCUUUAC G CGGACUCC | 1518 | GGAGUCCG GGAGGAAACUCC CU UCAAGGACAUCGUCCGGG GUAAAGAG | 10180 |
| 1559 | CCGUCUGU G CCUUCUCA | 1519 | UGAGAAGG GGAGGAAACUCC CU UCAAGGACAUCGUCCGGG ACAGACGG | 10181 |
| 1571 | UCUCAUCU G CCGGACCG | 1520 | CGGUCCGG GGAGGAAACUCC CU UCAAGGACAUCGUCCGGG AGAUGAGA | 10182 |
| 1583 | GACCGUGU G CACUUCGC | 1521 | GCGAAGUG GGAGGAAACUCC CU UCAAGGACAUCGUCCGGG ACACGGUC | 10183 |
| 1590 | UGCACUUC G CUUCACCU | 1522 | AGGUGAAG GGAGGAAACUCC CU UCAAGGACAUCGUCCGGG GAAGUGCA | 10184 |
| 1601 | UCACCUCU G CACGUCGC | 1523 | GCGACGUG GGAGGAAACUCC CU UCAAGGACAUCGUCCGGG AGAGGUGA | 10185 |
| 1608 | UGCACGUC G CAUGGAGA | 1524 | UCUCCAUG GGAGGAAACUCC CU UCAAGGACAUCGUCCGGG GACGUGCA | 10186 |
| 1624 | ACCACCGU G AACGCCCA | 1525 | UGGGCGUU GGAGGAAACUCC CU UCAAGGACAUCGUCCGGG ACGGUGGU | 10187 |
| 1628 | CCGUGAAC G CCCACAGG | 1526 | CCUGUGGG GGAGGAAACUCC CU UCAAGGACAUCGUCCGGG GUUCACGG | 10188 |
| 1642 | AGGAACCU G CCCAAGGU | 1527 | ACCUUGGG GGAGGAAACUCC CU UCAAGGACAUCGUCCGGG AGGUUCCU | 10189 |
| 1654 | AAGGUCUU G CAUAAGAG | 1528 | CUCUUAUG GGAGGAAACUCC CU UCAAGGACAUCGUCCGGG AAGACCUU | 10190 |
| 1690 | AUGUCAAC G ACCGACCU | 1529 | AGGUCGGU GGAGGAAACUCC CU UCAAGGACAUCGUCCGGG GUUGACAU | 10191 |
| 1694 | CAACGACC G ACCUUGAG | 1530 | CUCAAGGU GGAGGAAACUCC CU UCAAGGACAUCGUCCGGG GGUCGUUG | 10192 |
| 1700 | CCGACCUU G AGGCAUAC | 1531 | GUAUGCCU GGAGGAAACUCC CU UCAAGGACAUCGUCCGGG AAGGUCGG | 10193 |
| 1730 | UCUUUAAU G AGUGGGAG | 1532 | CUCCCACU GGAGGAAACUCC CU UCAAGGACAUCGUCCGGG AUUAAACA | 10194 |
| 1818 | AGCACCAU G CAACUUUU | 1533 | AAAAGUUG GGAGGAAACUCC CU UCAAGGACAUCGUCCGGG AUGGUGCU | 10195 |
| 1835 | UCACCUCU G CCUAAUCA | 1534 | UGAUUAGG GGAGGAAACUCC CU UCAAGGACAUCGUCCGGG AGAGGUGA | 10196 |
| 1883 | CAAGCUGU G CCUUGGGU | 1535 | ACCCAAGG GGAGGAAACUCC CU UCAAGGACAUCGUCCGGG ACAGCUUG | 10197 |
| 1912 | UGGACAUU G ACCCGUAU | 1536 | AUACGGGU GGAGGAAACUCC CU UCAAGGACAUCGUCCGGG AAUGUCCA | 10198 |
| 1959 | UCUUUUUU G CCUUCUGA | 1537 | UCAGAAGG GGAGGAAACUCC CU UCAAGGACAUCGUCCGGG AAAAAAGA | 10199 |
| 1966 | UGCCUUCU G ACUUCUUU | 1538 | AAAGAAGU GGAGGAAACUCC CU UCAAGGACAUCGUCCGGG AGAAGGCA | 10200 |
| 1985 | UUCUAUUC G AGAUCUCC | 1539 | GGAGAUCU GGAGGAAACUCC CU UCAAGGACAUCGUCCGGG GAAUAGAA | 10201 |
| 1996 | AUCUCCUC G ACACCGCC | 1540 | GGCGGUGU GGAGGAAACUCC CU UCAAGGACAUCGUCCGGG GAGGAGAU | 10202 |
| 2002 | UCGACACC G CCUCUGCU | 1541 | AGCAGAGG GGAGGAAACUCC CU UCAAGGACAUCGUCCGGG GGUGUCGA | 10203 |
| 2008 | CCGCCUCU G CUCUGUAU | 1542 | AUACAGAG GGAGGAAACUCC CU UCAAGGACAUCGUCCGGG AGAGGCGG | 10204 |
| 2092 | GUUGGGGU G AGUUGAUG | 1543 | CAUCAACU GGAGGAAACUCC CU UCAAGGACAUCGUCCGGG ACCCCAAC | 10205 |
| 2097 | GGUGAGUU G AUGAAUCU | 1544 | AGAUUCAU GGAGGAAACUCC CU UCAAGGACAUCGUCCGGG AACUCACC | 10206 |
| 2100 | GAGUUGAU G AAUCUAGC | 1545 | GCUAGAUU GGAGGAAACUCC CU UCAAGGACAUCGUCCGGG AUCAACUC | 10207 |
| 2237 | UUUUGGGC G AGAAACUG | 1546 | CAGUUUCU GGAGGAAACUCC CU UCAAGGACAUCGUCCGGG GCCCAAAA | 10208 |
| 2251 | CUGUUCUU G AAUAUUUG | 1547 | CAAAUAUU GGAGGAAACUCC CU UCAAGGACAUCGUCCGGG AAGAACAG | 10209 |
| 2282 | GUGGAUUC G CACUCCUC | 1548 | GAGGAGUG GGAGGAAACUCC CU UCAAGGACAUCGUCCGGG GAAUCCAC | 10210 |
| 2293 | CUCCUCCU G CAUAUAGA | 1549 | UCUAUAUG GGAGGAAACUCC CU UCAAGGACAUCGUCCGGG AGGAGGAG | 10211 |
| 2311 | CACCAAAU G CCCCUAUC | 1550 | GAUAGGGG GGAGGAAACUCC CU UCAAGGACAUCGUCCGGG AUUUGGUG | 10212 |
| 2354 | UGUUAGAC G AAGAGGCA | 1551 | UGCCUCUU GGAGGAAACUCC CU UCAAGGACAUCGUCCGGG GUCUAACA | 10213 |
| 2388 | ACUCCCUC G CCUCGCAG | 1552 | CUGCGAGG GGAGGAAACUCC CU UCAAGGACAUCGUCCGGG GAGGGAGU | 10214 |
| 2393 | CUCGCCUC G CAGACGAA | 1553 | UUCGUCUG GGAGGAAACUCC CU UCAAGGACAUCGUCCGGG GAGGCGAG | 10215 |
| 2399 | UCGCAGAC G AAGGUCUC | 1554 | GAGACCUU GGAGGAAACUCC CU UCAAGGACAUCGUCCGGG GUCUGCGA | 10216 |
| 2412 | UCUCAAUC G CCGCGUCG | 1555 | CGACGCGG GGAGGAAACUCC CU UCAAGGACAUCGUCCGGG GAUUGAGA | 10217 |
| 2415 | CAAUCGCC G CGUCGCAG | 1556 | CUGCGACG GGAGGAAACUCC CU UCAAGGACAUCGUCCGGG GGCGAUUG | 10218 |
| 2420 | GCCGCGUC G CAGAAGAU | 1557 | AUCUUCUG GGAGGAAACUCC CU UCAAGGACAUCGUCCGGG GACGCGGC | 10219 |
| 2514 | GGUACCUU G CUUUAAUC | 1558 | GAUUAAAG GGAGGAAACUCC CU UCAAGGACAUCGUCCGGG AAGGUACC | 10220 |
| 2549 | CUUUUCCU G ACAUUCAU | 1559 | AUGAAUGU GGAGGAAACUCC CU UCAAGGACAUCGUCCGGG AGGAAAAG | 10221 |
| 2560 | AUUCAUUU G CAGGAGGA | 1560 | UCCUCCUG GGAGGAAACUCC CU UCAAGGACAUCGUCCGGG AAAUGAAU | 10222 |
| 2576 | ACAUUGUU G AUAGAUGU | 1561 | ACAUCUAU GGAGGAAACUCC CU UCAAGGACAUCGUCCGGG AACAAUGU | 10223 |
| 2615 | CAGUAAAU G AAAACAGG | 1562 | CCUGUUUU GGAGGAAACUCC CU UCAAGGACAUCGUCCGGG AUUUACUG | 10224 |
| 2641 | UUAACUAU G CCUGCUAG | 1563 | CUAGCAGG GGAGGAAACUCC CU UCAAGGACAUCGUCCGGG AUAGUUAA | 10225 |
| 2645 | CUAUGCCU G CUAGGUUU | 1564 | AAACCUAG GGAGGAAACUCC CU UCAAGGACAUCGUCCGGG AGGCAUAG | 10226 |
| 2677 | AAAUAUUU G CCCUUAGA | 1565 | UCUAAGGG GGAGGAAACUCC CU UCAAGGACAUCGUCCGGG AAAUAUUU | 10227 |
| 2740 | UUCCAGAC G CGACAUUA | 1566 | UAAUGUCG GGAGGAAACUCC CU UCAAGGACAUCGUCCGGG GUCUGGAA | 10228 |
| 2742 | CCAGACGC G ACAUUAUU | 1567 | AAUAAUGU GGAGGAAACUCC CU UCAAGGACAUCGUCCGGG GCGUCUGG | 10229 |
| 2804 | CACGUAGC G CCUCAUUU | 1568 | AAAUGAGG GGAGGAAACUCC CU UCAAGGACAUCGUCCGGG GCUACGUG | 10230 |
| 2814 | CUCAUUUU G CGGGUCAC | 1569 | GUGACCCG GGAGGAAACUCC CU UCAAGGACAUCGUCCGGG AAAAUGAG | 10231 |
| 2875 | CAAACCUC G AAAAGGCA | 1570 | UGCCUUUU GGAGGAAACUCC CU UCAAGGACAUCGUCCGGG GAGGUUUG | 10232 |
| 2928 | UCUUCCCC G AUCAUCAG | 1571 | CUGAUGAU GGAGGAAACUCC CU UCAAGGACAUCGUCCGGG GGGGAAGA | 10233 |
| 2946 | UGGACCCU G CAUUCAAA | 1572 | UUUGAAUG GGAGGAAACUCC CU UCAAGGACAUCGUCCGGG AGGGUCCA | 10234 |
| 2990 | CUCAACCC G CACAAGGA | 1573 | UCCUUGUG GGAGGAAACUCC CU UCAAGGACAUCGUCCGGG GGGUUGAG | 10235 |
| 3012 | GGCCGGAC G CCAACAAG | 1574 | CUUGUUGG GGAGGAAACUCC CU UCAAGGACAUCGUCCGGG GUCCGGCC | 10236 |
| 3090 | GCCCUCAC G CUCAGGGC | 1575 | GCCCUGAG GGAGGAAACUCC CU UCAAGGACAUCGUCCGGG GUGAGGGC | 10237 |
| 3113 | ACAACUGU G CCAGCAGC | 1576 | GCUGCUGG GGAGGAAACUCC CU UCAAGGACAUCGUCCGGG ACAGUUGU | 10238 |
| 3132 | CUCCUCCU G CCUCCACC | 1577 | GGUGGAGG GGAGGAAACUCC CU UCAAGGACAUCGUCCGGG AGGAGGAG | 10239 |
| 51 | AGGGCCCU G UACUUUCC | 1578 | GGAAAGUA GGAGGAAACUCC CU UCAAGGACAUCGUCCGGG AGGGCCCU | 10240 |
| 106 | AGAAUACU G UCUCUGCC | 1579 | GGCAGAGA GGAGGAAACUCC CU UCAAGGACAUCGUCCGGG AGUAUUCU | 10241 |
| 148 | GGGACCCU G UACCGAAC | 1580 | GUUCGGUA GGAGGAAACUCC CU UCAAGGACAUCGUCCGGG AGGGUCCC | 10242 |
| 198 | CUGCUCGU G UUACAGGC | 1581 | GCCUGUAA GGAGGAAACUCC CU UCAAGGACAUCGUCCGGG ACGAGCAG | 10243 |
| 219 | UUUUUCUU G UUUGUCAA | 1582 | UUUGUCAA GGAGGAAACUCC CU UCAAGGACAUCGUCCGGG AAGAAAAA | 10244 |
| 297 | ACACCCGU G UGUCUUGG | 1583 | CCAAGACA GGAGGAAACUCC CU UCAAGGACAUCGUCCGGG ACGGGUGU | 10245 |
| 299 | ACCCGUGU G UCUUGGCC | 1584 | GGCCAAGA GGAGGAAACUCC CU UCAAGGACAUCGUCCGGG ACACGGGU | 10246 |
| 347 | ACCAACCU G UUGUCCUC | 1585 | GAGGACAA GGAGGAAACUCC CU UCAAGGACAUCGUCCGGG AGGUUGGU | 10247 |
| 350 | AACCUGUU G UCCUCCAA | 1586 | UUGGAGGA GGAGGAAACUCC CU UCAAGGACAUCGUCCGGG AACAGGUU | 10248 |
| 362 | UCCAAUUU G UCCUGGUU | 1587 | AACCAGGA GGAGGAAACUCC CU UCAAGGACAUCGUCCGGG AAAUUGGA | 10249 |
| 381 | CGCUGGAU G UGUCUGCG | 1588 | CGCAGACA GGAGGAAACUCC CU UCAAGGACAUCGUCCGGG AUCCAGCG | 10250 |
| 383 | CUGGAUGU G UCUGCGGC | 1589 | GCCGCAGA GGAGGAAACUCC CU UCAAGGACAUCGUCCGGG ACAUCCAG | 10251 |
| 438 | AUCUUCUU G UUGGUUCU | 1590 | AGAACCAA GGAGGAAACUCC CU UCAAGGACAUCGUCCGGG AAGAAGAU | 10252 |
| 465 | CAAGGUAU G UUGCCCGU | 1591 | ACGGGCAA GGAGGAAACUCC CU UCAAGGACAUCGUCCGGG AUACCUUG | 10253 |
| 476 | GCCCGUUU G UCCUCUAA | 1592 | UUAGAGGA GGAGGAAACUCC CU UCAAGGACAUCGUCCGGG AAACGGGC | 10254 |
| 555 | ACCUCUAU G UUUCCCUC | 1593 | GAGGGAAA GGAGGAAACUCC CU UCAAGGACAUCGUCCGGG AUAGAGGU | 10255 |
| 566 | UCCCUCAU G UUGCUGUA | 1594 | UACAGCAA GGAGGAAACUCC CU UCAAGGACAUCGUCCGGG AUGAGGGA | 10256 |
| 572 | AUGUUGCU G UACAAAAC | 1595 | GUUUUGUA GGAGGAAACUCC CU UCAAGGACAUCGUCCGGG AGCAACAU | 10257 |
| 602 | CUGCACCU G UAUUCCCA | 1596 | UGGGAAUA GGAGGAAACUCC CU UCAAGGACAUCGUCCGGG AGGUGCAG | 10258 |
| 694 | UGCCAUUU G UUCAGUGG | 1597 | CCACUGAA GGAGGAAACUCC CU UCAAGGACAUCGUCCGGG AAAUGGCA | 10259 |
| 724 | CCCCCACU G UCUGGCUU | 1598 | AAGCCAGA GGAGGAAACUCC CU UCAAGGACAUCGUCCGGG AGUGGGGG | 10260 |
| 750 | UGGAUGAU G UGGUUUUG | 1599 | CAAAACCA GGAGGAAACUCC CU UCAAGGACAUCGUCCGGG AUCAUCCA | 10261 |
| 771 | CCAAGUCU G UACAACAU | 1600 | AUGUUGUA GGAGGAAACUCC CU UCAAGGACAUCGUCCGGG AGACUUGG | 10262 |
| 801 | AUGCCGCU G UUACCAAU | 1601 | AUUGGUAA GGAGGAAACUCC CU UCAAGGACAUCGUCCGGG AGCGGCAU | 10263 |
| 818 | UUUCUUUU G UCUUUGGG | 1602 | CCCAAAGA GGAGGAAACUCC CU UCAAGGACAUCGUCCGGG AAAAGAAA | 10264 |
| 888 | UGGGAUAU G UAAUUGGG | 1603 | CCCAAUUA GGAGGAAACUCC CU UCAAGGACAUCGUCCGGG AUAUCCCA | 10265 |
| 927 | AACAUAUU G UACAAAAA | 1604 | UUUUUGUA GGAGGAAACUCC CU UCAAGGACAUCGUCCGGG AAUAUGUU | 10266 |
| 944 | AUCAAAAU G UGUUUUAG | 1605 | CUAAAACA GGAGGAAACUCC CU UCAAGGACAUCGUCCGGG AUUUUGAU | 10267 |
| 946 | CAAAAUGU G UUUUAGGA | 1606 | UCCUAAAA GGAGGAAACUCC CU UCAAGGACAUCGUCCGGG ACAUUUUG | 10268 |
| 963 | AACUUCCU G UAAACAGG | 1607 | CCUGUUUA GGAGGAAACUCC CU UCAAGGACAUCGUCCGGG AGGAAGUU | 10269 |
| 991 | GAAAGUAU G UCAACGAA | 1608 | UUCGUUGA GGAGGAAACUCC CU UCAAGGACAUCGUCCGGG AUACUUUC | 10270 |
| 1002 | AACGAAUU G UGGGUCUU | 1609 | AAGACCCA GGAGGAAACUCC CU UCAAGGACAUCGUCCGGG AAUUCGUU | 10271 |
| 1039 | CACGCAAU G UGGAUAUU | 1610 | AAUAUCCA GGAGGAAACUCC CU UCAAGGACAUCGUCCGGG AUUGCGUG | 10272 |
| 1137 | AACAGUAU G UGAACCUU | 1611 | AAGGUUCA GGAGGAAACUCC CU UCAAGGACAUCGUCCGGG AUACUGUU | 10273 |
| 1184 | UGCCAAGU G UUUGCUGA | 1612 | UCAGCAAA GGAGGAAACUCC CU UCAAGGACAUCGUCCGGG ACUUGGCA | 10274 |
| 1251 | GAACCUUU G UGUCUCCU | 1613 | AGGAGACA GGAGGAAACUCC CU UCAAGGACAUCGUCCGGG AAAGGUUC | 10275 |
| 1253 | ACCUUUGU G UCUCCUCU | 1614 | AGAGGAGA GGAGGAAACUCC CU UCAAGGACAUCGUCCGGG ACAAAGGU | 10276 |
| 1294 | AGCCGCUU G UUUUGCUC | 1615 | GAGCAAAA GGAGGAAACUCC CU UCAAGGACAUCGUCCGGG AAGCGGCU | 10277 |
| 1344 | ACAAUUCU G UCGUGCUC | 1616 | GAGCACGA GGAGGAAACUCC CU UCAAGGACAUCGUCCGGG AGAAUUGU | 10278 |
| 1390 | GCUAGGCU G UGCUGCCA | 1617 | UGGCAGCA GGAGGAAACUCC CU UCAAGGACAUCGUCCGGG AGCCUAGC | 10279 |
| 1425 | CGUCCUUU G UUUACGUC | 1618 | GACGUAAA GGAGGAAACUCC CU UCAAGGACAUCGUCCGGG AAAGGACG | 10280 |
| 1508 | CGCCUAUU G UACCGACC | 1619 | GGUCGGUA GGAGGAAACUCC CU UCAAGGACAUCGUCCGGG AAUAGGCG | 10281 |
| 1557 | CCCCGUCU G UGCCUUCU | 1620 | AGAAGGCA GGAGGAAACUCC CU UCAAGGACAUCGUCCGGG AGACGGGG | 10282 |
| 1581 | CGGACCGU G UGCACUUC | 1621 | GAAGUGCA GGAGGAAACUCC CU UCAAGGACAUCGUCCGGG ACGGUCCG | 10283 |
| 1684 | UCAGCAAU G UCAACGAC | 1622 | GUCGUUGA GGAGGAAACUCC CU UCAAGGACAUCGUCCGGG AUUGCUGA | 10284 |
| 1719 | CAAAGACU G UGUGUUUA | 1623 | UAAACACA GGAGGAAACUCC CU UCAAGGACAUCGUCCGGG AGUCUUUG | 10285 |
| 1721 | AAGACUGU G UGUUUAAU | 1624 | AUUAAACA GGAGGAAACUCC CU UCAAGGACAUCGUCCGGG ACAGUCUU | 10286 |
| 1723 | GACUGUGU G UUUAAUGA | 1625 | UCAUUAAA GGAGGAAACUCC CU UCAAGGACAUCGUCCGGG ACACAGUC | 10287 |
| 1772 | AGGUCUUU G UACUAGGA | 1626 | UCCUAGUA GGAGGAAACUCC CU UCAAGGACAUCGUCCGGG AAAGACCU | 10288 |
| 1785 | AGGAGGCU G UAGGCAUA | 1627 | UAUGCCUA GGAGGAAACUCC CU UCAAGGACAUCGUCCGGG AGCCUCCU | 10289 |
| 1801 | AAAUUGGU G UGUUCACC | 1628 | GGUGAACA GGAGGAAACUCC CU UCAAGGACAUCGUCCGGG ACCAAUUU | 10290 |
| 1803 | AUUGGUGU G UUCACCAG | 1629 | CUGGUGAA GGAGGAAACUCC CU UCAAGGACAUCGUCCGGG ACACCAAU | 10291 |
| 1850 | CAUCUCAU G UUCAUGUC | 1630 | GACAUGAA GGAGGAAACUCC CU UCAAGGACAUCGUCCGGG AUGAGAUG | 10292 |
| 1856 | AUGUUCAU G UCCUACUG | 1631 | CAGUAGGA GGAGGAAACUCC CU UCAAGGACAUCGUCCGGG AUGAACAU | 10293 |
| 1864 | GUCCUACU G UUCAAGCC | 1632 | GGCUUGAA GGAGGAAACUCC CU UCAAGGACAUCGUCCGGG AGUAGGAC | 10294 |
| 1881 | UCCAAGCU G UGCCUUGG | 1633 | CCAAGGCA GGAGGAAACUCC CU UCAAGGACAUCGUCCGGG AGCUUGGA | 10295 |
| 1939 | GAGCUUCU G UGGAGUUA | 1634 | UAACUCCA GGAGGAAACUCC CU UCAAGGACAUCGUCCGGG AGAAGCUC | 10296 |
| 2013 | UCUGCUCU G UAUCGGGG | 1635 | CCCCGAUA GGAGGAAACUCC CU UCAAGGACAUCGUCCGGG AGAGCAGA | 10297 |
| 2045 | GGAACAUU G UUCACCUC | 1636 | GAGGUGAA GGAGGAAACUCC CU UCAAGGACAUCGUCCGGG AAUGUUCC | 10298 |
| 2082 | GCUAUUCU G UGUUGGGG | 1637 | CCCCAACA GGAGGAAACUCC CU UCAAGGACAUCGUCCGGG AGAAUAGC | 10299 |
| 2084 | UAUUCUGU G UUGGGGUG | 1638 | CACCCCAA GGAGGAAACUCC CU UCAAGGACAUCGUCCGGG ACAGAAUA | 10300 |
| 2167 | UCAGCUAU G UCAACGUU | 1639 | AACGUUGA GGAGGAAACUCC CU UCAAGGACAUCGUCCGGG AUAGCUGA | 10301 |
| 2205 | CAACUAUU G UGGUUUCA | 1640 | UGAAACCA GGAGGAAACUCC CU UCAAGGACAUCGUCCGGG AAUAGUUG | 10302 |
| 2222 | CAUUUCCU G UCUUACUU | 1641 | AAGUAAGA GGAGGAAACUCC CU UCAAGGACAUCGUCCGGG AGGAAAUG | 10303 |
| 2245 | GAGAAACU G UUCUUGAA | 1642 | UUCAAGAA GGAGGAAACUCC CU UCAAGGACAUCGUCCGGG AGUUUCUC | 10304 |
| 2262 | UAUUUGGU G UCUUUUGG | 1643 | CCAAAAGA GGAGGAAACUCC CU UCAAGGACAUCGUCCGGG ACCAAAUA | 10305 |
| 2274 | UUUGGAGU G UGGAUUCG | 1644 | CGAAUCCA GGAGGAAACUCC CU UCAAGGACAUCGUCCGGG ACUCCAAA | 10306 |
| 2344 | AAACUACU G UUGUUAGA | 1645 | UCUAACAA GGAGGAAACUCC CU UCAAGGACAUCGUCCGGG AGUAGUUU | 10307 |
| 2347 | CUACUGUU G UUAGACGA | 1646 | UCGUCUAA GGAGGAAACUCC CU UCAAGGACAUCGUCCGGG AACAGUAG | 10308 |
| 2450 | AUCUCAAU G UUAGUAUU | 1647 | AAUACUAA GGAGGAAACUCC CU UCAAGGACAUCGUCCGGG AUUGAGAU | 10309 |
| 2573 | AGGACAUU G UUGAUAGA | 1648 | UCUAUCAA GGAGGAAACUCC CU UCAAGGACAUCGUCCGGG AAUGUCCU | 10310 |
| 2583 | UGAUAGAU G UAAGCAAU | 1649 | AUUGCUUA GGAGGAAACUCC CU UCAAGGACAUCGUCCGGG AUCUAUCA | 10311 |
| 2594 | AGCAAUUU G UGGGGCCC | 1650 | GGGCCCCA GGAGGAAACUCC CU UCAAGGACAUCGUCCGGG AAAUUGCU | 10312 |
| 2663 | AUCCCAAU G UUACUAAA | 1651 | UUUAGUAA GGAGGAAACUCC CU UCAAGGACAUCGUCCGGG AUUGGGAU | 10313 |
| 2717 | CAGAGUAU G UAGUUAAU | 1652 | AUUAACUA GGAGGAAACUCC CU UCAAGGACAUCGUCCGGG AUACUCUG | 10314 |
| 2901 | AUCUUUCU G UCCCCAAU | 1653 | AUUGGGGA GGAGGAAACUCC CU UCAAGGACAUCGUCCGGG AGAAAGAU | 10315 |
| 3071 | GGGGGACU G UUGGGGUG | 1654 | CACCCCAA GGAGGAAACUCC CU UCAAGGACAUCGUCCGGG AGUCCCCC | 10316 |
| 3111 | UCACAACU G UGCCAGCA | 1655 | UGCUGGCA GGAGGAAACUCC CU UCAAGGACAUCGUCCGGG AGUUGUGA | 10317 |
| 40 | AUCCCAGA G UCAGGGCC | 1656 | GGCCCUGA GGAGGAAACUCC CU UCAAGGACAUCGUCCGGG UCUGGGAU | 10318 |
| 46 | GAGUCAGG G CCCUGUAC | 1657 | GUACAGGG GGAGGAAACUCC CU UCAAGGACAUCGUCCGGG CCUGACUC | 10319 |
| 65 | UCCUGCUG G UGGCUCCA | 1658 | UGGAGCCA GGAGGAAACUCC CU UCAAGGACAUCGUCCGGG CAGCAGGA | 10320 |
| 68 | UGCUGGUG G CUCCAGUU | 1659 | AACUGGAG GGAGGAAACUCC CU UCAAGGACAUCGUCCGGG CACCAGCA | 10321 |
| 74 | UGGCUCCA G UUCAGGAA | 1660 | UUCCUGAA GGAGGAAACUCC CU UCAAGGACAUCGUCCGGG UGGAGCCA | 10322 |
| 85 | CAGGAACA G UGAGCCCU | 1661 | AGGGCUCA GGAGGAAACUCC CU UCAAGGACAUCGUCCGGG UGUUCCUG | 10323 |
| 89 | AACAGUGA G CCCUGCUC | 1662 | GAGCAGGG GGAGGAAACUCC CU UCAAGGACAUCGUCCGGG UCACUGUU | 10324 |
| 120 | GCCAUAUC G UCAAUCUU | 1663 | AAGAUUGA GGAGGAAACUCC CU UCAAGGACAUCGUCCGGG GAUAUGGC | 10325 |
| 196 | CCCUGCUC G UGUUACAG | 1664 | CUGUAACA GGAGGAAACUCC CU UCAAGGACAUCGUCCGGG GAGCAGGG | 10326 |
| 205 | UGUUACAG G CGGGGUUU | 1665 | AAACCCCG GGAGGAAACUCC CU UCAAGGACAUCGUCCGGG CUGUAACA | 10327 |
| 210 | CAGGCGGG G UUUUUCUU | 1666 | AAGAAAAA GGAGGAAACUCC CU UCAAGGACAUCGUCCGGG CCCGCCUG | 10328 |
| 248 | ACCACAGA G UCUAGACU | 1667 | AGUCUAGA GGAGGAAACUCC CU UCAAGGACAUCGUCCGGG UCUGUGGU | 10329 |
| 258 | CUAGACUC G UGGUGGAC | 1668 | GUCCACCA GGAGGAAACUCC CU UCAAGGACAUCGUCCGGG GAGUCUAG | 10330 |
| 261 | GACUCGUG G UGGACUUC | 1669 | GAAGUCCA GGAGGAAACUCC CU UCAAGGACAUCGUCCGGG CACGAGUC | 10331 |
| 295 | GAACACCC G UGUGUCUU | 1670 | AAGACACA GGAGGAAACUCC CU UCAAGGACAUCGUCCGGG GGGUGUUC | 10332 |
| 305 | GUGUCUUG G CCAAAAUU | 1671 | AAUUUUGG GGAGGAAACUCC CU UCAAGGACAUCGUCCGGG CAAGACAC | 10333 |
| 318 | AAUUCGCA G UCCCAAAU | 1672 | AUUUGGGA GGAGGAAACUCC CU UCAAGGACAUCGUCCGGG UGCGAAUU | 10334 |
| 332 | AAUCUCCA G UCACUCAC | 1673 | GUGAGUGA GGAGGAAACUCC CU UCAAGGACAUCGUCCGGG UGGAGAUU | 10335 |
| 368 | UUGUCCUG G UUAUCGCU | 1674 | AGCGAUAA GGAGGAAACUCC CU UCAAGGACAUCGUCCGGG CAGGACAA | 10336 |
| 390 | UGUCUGCG G CGUUUUAU | 1675 | AUAAAACG GGAGGAAACUCC CU UCAAGGACAUCGUCCGGG CGCAGACA | 10337 |
| 392 | UCUGCGGC G UUUUAUCA | 1676 | UGAUAAAA GGAGGAAACUCC CU UCAAGGACAUCGUCCGGG GCCGCAGA | 10338 |
| 442 | UCUUGUUG G UUCUUCUG | 1677 | CAGAAGAA GGAGGAAACUCC CU UCAAGGACAUCGUCCGGG CAACAAGA | 10339 |
| 461 | CUAUCAAG G UAUGUUGC | 1678 | GCAACAUA GGAGGAAACUCC CU UCAAGGACAUCGUCCGGG CUUGAUAG | 10340 |
| 472 | UGUUGCCC G UUUGUCCU | 1679 | AGGACAAA GGAGGAAACUCC CU UCAAGGACAUCGUCCGGG GGGCAACA | 10341 |
| 506 | AACAACCA G CACCGGAC | 1680 | GUCCGGUG GGAGGAAACUCC CU UCAAGGACAUCGUCCGGG UGGUUGUU | 10342 |
| 625 | CAUCUUGG G CUUUCGCA | 1681 | UGCGAAAG GGAGGAAACUCC CU UCAAGGACAUCGUCCGGG CCAAGAUG | 10343 |
| 648 | CUAUGGGA G UGGGCCUC | 1682 | GAGGCCCA GGAGGAAACUCC CU UCAAGGACAUCGUCCGGG UCCCAUAG | 10344 |
| 652 | GGGAGUGG G CCUCAGUC | 1683 | GACUGAGG GGAGGAAACUCC CU UCAAGGACAUCGUCCGGG CCACUCCC | 10345 |
| 658 | GGGCCUCA G UCCGUUUC | 1684 | GAAACGGA GGAGGAAACUCC CU UCAAGGACAUCGUCCGGG UGAGGCCC | 10346 |
| 662 | CUCAGUCC G UUUCUCUU | 1685 | AAGAGAAA GGAGGAAACUCC CU UCAAGGACAUCGUCCGGG GGACUGAG | 10347 |
| 672 | UUCUCUUG G CUCAGUUU | 1686 | AAACUGAG GGAGGAAACUCC CU UCAAGGACAUCGUCCGGG CAAGAGAA | 10348 |
| 677 | UUGGCUCA G UUUACUAG | 1687 | CUAGUAAA GGAGGAAACUCC CU UCAAGGACAUCGUCCGGG UGAGCCAA | 10349 |
| 685 | GUUUACUA G UGCCAUUU | 1688 | AAAUGGCA GGAGGAAACUCC CU UCAAGGACAUCGUCCGGG UAGUAAAC | 10350 |
| 699 | UUUGUUCA G UGGUUCGU | 1689 | ACGAACCA GGAGGAAACUCC CU UCAAGGACAUCGUCCGGG UGAACAAA | 10351 |
| 702 | GUUCAGUG G UUCGUAGG | 1690 | CCUACGAA GGAGGAAACUCC CU UCAAGGACAUCGUCCGGG CACUGAAC | 10352 |
| 706 | AGUGGUUC G UAGGGCUU | 1691 | AAGCCCUA GGAGGAAACUCC CU UCAAGGACAUCGUCCGGG GAACCACU | 10353 |
| 711 | UUCGUAGG G CUUUCCCC | 1692 | GGGGAAAG GGAGGAAACUCC CU UCAAGGACAUCGUCCGGG CCUACGAA | 10354 |
| 729 | ACUGUCUG G CUUUCAGU | 1693 | ACUGAAAG GGAGGAAACUCC CU UCAAGGACAUCGUCCGGG CAGACAGU | 10355 |
| 736 | GGCUUUCA G UUAUAUGG | 1694 | CCAUAUAA GGAGGAAACUCC CU UCAAGGACAUCGUCCGGG UGAAAGCC | 10356 |
| 753 | AUGAUGUG G UUUUGGGG | 1695 | CCCCAAAA GGAGGAAACUCC CU UCAAGGACAUCGUCCGGG CACAUCAU | 10357 |
| 762 | UUUUGGGG G CCAAGUCU | 1696 | AGACUUGG GGAGGAAACUCC CU UCAAGGACAUCGUCCGGG CCCCAAAA | 10358 |
| 767 | GGGGCCAA G UGUGUACA | 1697 | UGUACAGA GGAGGAAACUCC CU UCAAGGACAUCGUCCGGG UUGGCCCC | 10359 |
| 785 | CAUCUUGA G UCCCUUUA | 1698 | UAAAGGGA GGAGGAAACUCC CU UCAAGGACAUCGUCCGGG UCAAGAUG | 10360 |
| 826 | GUCUUUGG G UAUACAUU | 1699 | AAUGUAUA GGAGGAAACUCC CU UCAAGGACAUCGUCCGGG CCAAAGAC | 10361 |
| 898 | AAUUGGGA G UUGGGGCA | 1700 | UGCCCCAA GGAGGAAACUCC CU UCAAGGACAUCGUCCGGG UCCCAAUU | 10362 |
| 904 | GAGUUGGG G CACAUUGC | 1701 | GCAAUGUG GGAGGAAACUCC CU UCAAGGACAUCGUCCGGG CCCAACUC | 10363 |
| 971 | GUAAACAG G CCUAUUGA | 1702 | UCAAUAGG GGAGGAAACUCC CU UCAAGGACAUCGUCCGGG CUGUUUAC | 10364 |
| 987 | AUUGGAAA G UAUGUCAA | 1703 | UUGACAUA GGAGGAAACUCC CU UCAAGGACAUCGUCCGGG UUUCCAAU | 10365 |
| 1006 | AAUUGUGG G UCUUUUGG | 1704 | CCAAAAGA GGAGGAAACUCC CU UCAAGGACAUCGUCCGGG CCACAAUU | 10366 |
| 1016 | CUUUUGGG G UUUGCCGC | 1705 | GCGGCAAA GGAGGAAACUCC CU UCAAGGACAUCGUCCGGG CCCAAAAG | 10367 |
| 1080 | GCAUACAA G CAAAACAG | 1706 | CUGUUUUG GGAGGAAACUCC CU UCAAGGACAUCGUCCGGG UUGUAUGC | 10368 |
| 1089 | CAAAACAG G CUUUUACU | 1707 | AGUAAAAG GGAGGAAACUCC CU UCAAGGACAUCGUCCGGG CUGUUUUG | 10369 |
| 1116 | CUUACAAG G CCUUUCUA | 1708 | UAGAAAGG GGAGGAAACUCC CU UCAAGGACAUCGUCCGGG CUUGUAAG | 10370 |
| 1126 | CUUUCUAA G UAAACAGU | 1709 | ACUGUUUA GGAGGAAACUCC CU UCAAGGACAUCGUCCGGG UUAGAAAG | 10371 |
| 1133 | AGUAAACA G UAUGUGAA | 1710 | UUCACAUA GGAGGAAACUCC CU UCAAGGACAUCGUCCGGG UGUUUACU | 10372 |
| 1152 | UUUACCCC G UUGCUCGG | 1711 | CCGAGCAA GGAGGAAACUCC CU UCAAGGACAUCGUCCGGG GGGGUAAA | 10373 |
| 1160 | GUUGCUCG G CAACGGCC | 1712 | GGCCGUUG GGAGGAAACUCC CU UCAAGGACAUCGUCCGGG CGAGCAAC | 10374 |
| 1166 | CGGCAACG G CCUGGUCU | 1713 | AGACCAGG GGAGGAAACUCC CU UCAAGGACAUCGUCCGGG CGUUGCCG | 10375 |
| 1171 | ACGGCCUG G UCUAUGCC | 1714 | GGCAUAGA GGAGGAAACUCC CU UCAAGGACAUCGUCCGGG CAGGCCGU | 10376 |
| 1182 | UAUGCCAA G UGUUUGCU | 1715 | AGCAAACA GGAGGAAACUCC CU UCAAGGACAUCGUCCGGG UUGGCAUA | 10377 |
| 1207 | CCCCACUG G UUGGGGCU | 1716 | AGCCCCAA GGAGGAAACUCC CU UCAAGGACAUCGUCCGGG CAGUGGGG | 10378 |
| 1213 | UGGUUGGG G CUUGGCCA | 1717 | UGGCCAAG GGAGGAAACUCC CU UCAAGGACAUCGUCCGGG CCCAACCA | 10379 |
| 1218 | GGGGCUUG G CCAUAGGC | 1718 | GCCUAUGG GGAGGAAACUCC CU UCAAGGACAUCGUCCGGG CAAGCCCC | 10380 |
| 1225 | GGCCAUAG G CCAUCAGC | 1719 | GCUGAUGG GGAGGAAACUCC CU UCAAGGACAUCGUCCGGG CUAUGGCC | 10381 |
| 1232 | GGCCAUCA G CGCAUGCG | 1720 | CGCAUGCG GGAGGAAACUCC CU UCAAGGACAUCGUCCGGG UGAUGGCC | 10382 |
| 1240 | GCGCAUGC G UGGAACCU | 1721 | AGGUUCCA GGAGGAAACUCC CU UCAAGGACAUCGUCCGGG GCAUGCGC | 10383 |
| 1287 | AACUCCUA G CCGCUUGU | 1722 | ACAAGCGG GGAGGAAACUCC CU UCAAGGACAUCGUCCGGG UAGGAGUU | 10384 |
| 1306 | UGCUCGCA G CAGGUCUG | 1723 | CAGACCUG GGAGGAAACUCC CU UCAAGGACAUCGUCCGGG UGCGAGCA | 10385 |
| 1310 | CGCAGCAG G UCUGGGGC | 1724 | GCCCCAGA GGAGGAAACUCC CU UCAAGGACAUCGUCCGGG CUGCUGCG | 10386 |
| 1317 | GGUCUGGG G CAAAACUC | 1725 | GAGUUUUG GGAGGAAACUCC CU UCAAGGACAUCGUCCGGG CCCAGACC | 10387 |
| 1347 | AUUCUGUC G UGCUCUCC | 1726 | GGAGAGCA GGAGGAAACUCC CU UCAAGGACAUCGUCCGGG GACAGAAU | 10388 |
| 1379 | UUUCCAUG G CUGCUAGG | 1727 | CCUAGCAG GGAGGAAACUCC CU UCAAGGACAUCGUCCGGG CAUGGAAA | 10389 |
| 1387 | GCUGCUAG G CUGUGCUG | 1728 | CAGCACAG GGAGGAAACUCC CU UCAAGGACAUCGUCCGGG CUAGCAGC | 10390 |
| 1418 | CGCGGGAC G UCCUUUGU | 1729 | ACAAAGGA GGAGGAAACUCC CU UCAAGGACAUCGUCCGGG GUCCCGCG | 10391 |
| 1431 | UUGUUUAC G UCCCGUCG | 1730 | CGACGGGA GGAGGAAACUCC CU UCAAGGACAUCGUCCGGG GUAAACAA | 10392 |
| 1436 | UACGUCCC G UCGGCGCU | 1731 | AGCGCCGA GGAGGAAACUCC CU UCAAGGACAUCGUCCGGG GGGACGUA | 10393 |
| 1440 | UCCCGUCG G CGCUGAAU | 1732 | AUUCAGCG GGAGGAAACUCC CU UCAAGGACAUCGUCCGGG CGACGGGA | 10394 |
| 1471 | CUCCCGGG G CCGCUUGG | 1733 | CCAAGCGG GGAGGAAACUCC CU UCAAGGACAUCGUCCGGG CCCGGGAG | 10395 |
| 1481 | CGCUUGGG G CUCUACCG | 1734 | CGGUAGAG GGAGGAAACUCC CU UCAAGGACAUCGUCCGGG CCCAAGCG | 10396 |
| 1517 | UACCGACC G UCCACGGG | 1735 | CCCGUGGA GGAGGAAACUCC CU UCAAGGACAUCGUCCGGG GGUCGGUA | 10397 |
| 1526 | UCCACGGG G CGCACCUC | 1736 | GAGGUGCG GGAGGAAACUCC CU UCAAGGACAUCGUCCGGG CCCGUGGA | 10398 |
| 1553 | GACUCCCC G UCUGUGCC | 1737 | GGCACAGA GGAGGAAACUCC CU UCAAGGACAUCGUCCGGG GGGGAGUC | 10399 |
| 1579 | GCCGGACC G UGUGCACU | 1738 | AGUGCACA GGAGGAAACUCC CU UCAAGGACAUCGUCCGGG GGUCCGGC | 10400 |
| 1605 | CUCUGCAC G UCGCAUGG | 1739 | CCAUGCGA GGAGGAAACUCC CU UCAAGGACAUCGUCCGGG GUGCAGAG | 10401 |
| 1622 | AGACCACC G UGAACGCC | 1740 | GGCGUUCA GGAGGAAACUCC CU UCAAGGACAUCGUCCGGG GGUGGUCU | 10402 |
| 1649 | UGCCCAAG G UCUUGCAU | 1741 | AUGCAAGA GGAGGAAACUCC CU UCAAGGACAUCGUCCGGG CUUGGGCA | 10403 |
| 1679 | GACUUUCA G CAAUGUCA | 1742 | UGACAUUG GGAGGAAACUCC CU UCAAGGACAUCGUCCGGG UGAAAGUC | 10404 |
| 1703 | ACCUUGAG G CAUACUUC | 1743 | GAAGUAUG GGAGGAAACUCC CU UCAAGGACAUCGUCCGGG CUCAAGGU | 10405 |
| 1732 | UUUAAUGA G UGGGAGGA | 1744 | UCCUCCCA GGAGGAAACUCC CU UCAAGGACAUCGUCCGGG UCAUUAAA | 10406 |
| 1741 | UGGGAGGA G UUGGGGGA | 1745 | UCCCCCAA GGAGGAAACUCC CU UCAAGGACAUCGUCCGGG UCCUCCCA | 10407 |
| 1754 | GGGAGGAG G UUAGGUUA | 1746 | UAACCUAA GGAGGAAACUCC CU UCAAGGACAUCGUCCGGG CUCCUCCC | 10408 |
| 1759 | GAGGUUAG G UUAAAGGU | 1747 | ACCUUUAA GGAGGAAACUCC CU UCAAGGACAUCGUCCGGG CUAACCUC | 10409 |
| 1766 | GGUUAAAG G UCUUUGUA | 1748 | UACAAAGA GGAGGAAACUCC CU UCAAGGACAUCGUCCGGG CUUUAACC | 10410 |
| 1782 | ACUAGGAG G CUGUAGGC | 1749 | GCCUACAG GGAGGAAACUCC CU UCAAGGACAUCGUCCGGG CUCCUAGU | 10411 |
| 1789 | GGCUGUAG G CAUAAAUU | 1750 | AAUUUAUG GGAGGAAACUCC CU UCAAGGACAUCGUCCGGG CUACAGCC | 10412 |
| 1799 | AUAAAUUG G UGUGUUCA | 1751 | UGAACACA GGAGGAAACUCC CU UCAAGGACAUCGUCCGGG CAAUUUAU | 10413 |
| 1811 | GUUCACCA G CACCAUGC | 1752 | GCAUGGUG GGAGGAAACUCC CU UCAAGGACAUCGUCCGGG UGGUGAAC | 10414 |
| 1870 | CUGUUCAA G CCUCCAAG | 1753 | CUUGGAGG GGAGGAAACUCC CU UCAAGGACAUCGUCCGGG UUGAACAG | 10415 |
| 1878 | GCCUCCAA G CUGUGCCU | 1754 | AGGCACAG GGAGGAAACUCC CU UCAAGGACAUCGUCCGGG UUGGAGGC | 10416 |
| 1890 | UGCCUUGG G UGGCUUUG | 1755 | CAAAGCCA GGAGGAAACUCC CU UCAAGGACAUCGUCCGGG CCAAGGCA | 10417 |
| 1893 | CUUGGGUG G CUUUGGGG | 1756 | CCCCAAAG GGAGGAAACUCC CU UCAAGGACAUCGUCCGGG CACCCAAG | 10418 |
| 1901 | GCUUUGGG G CAUGGACA | 1757 | UGUCCAUG GGAGGAAACUCC CU UCAAGGACAUCGUCCGGG CCCAAAGC | 10419 |
| 1917 | AUUGACCC G UAUAAAGA | 1758 | UCUUUAUA GGAGGAAACUCC CU UCAAGGACAUCGUCCGGG GGGUCAAU | 10420 |
| 1933 | AAUUUGGA G CUUCUGUG | 1759 | CACAGAAG GGAGGAAACUCC CU UCAAGGACAUCGUCCGGG UCCAAAUU | 10421 |
| 1944 | UCUGUGGA G UUACUCUC | 1760 | GAGAGUAA GGAGGAAACUCC CU UCAAGGACAUCGUCCGGG UCCACAGA | 10422 |
| 2023 | AUCGGGGG G CCUUAGAG | 1761 | CUCUAAGG GGAGGAAACUCC CU UCAAGGACAUCGUCCGGG CCCCCGAU | 10423 |
| 2031 | GCCUUAGA G UCUCCGGA | 1762 | UCCGGAGA GGAGGAAACUCC CU UCAAGGACAUCGUCCGGG UCUAAGGC | 10424 |
| 2062 | ACCAUACG G CACUCAGG | 1763 | CCUGAGUG GGAGGAAACUCC CU UCAAGGACAUCGUCCGGG CGUAUGGU | 10425 |
| 2070 | GCACUCAG G CAAGCUAU | 1764 | AUAGCUUG GGAGGAAACUCC CU UCAAGGACAUCGUCCGGG CUGAGUGC | 10426 |
| 2074 | UCAGGCAA G CUAUUCUG | 1765 | CAGAAUAG GGAGGAAACUCC CU UCAAGGACAUCGUCCGGG UUGCCUGA | 10427 |
| 2090 | GUGUUGGG G UGAGUUGA | 1766 | UCAACUCA GGAGGAAACUCC CU UCAAGGACAUCGUCCGGG CCCAACAC | 10428 |
| 2094 | UGGGGUGA G UUGAUGAA | 1767 | UUCAUCAA GGAGGAAACUCC CU UCAAGGACAUCGUCCGGG UCACCCCA | 10429 |
| 2107 | UGAAUCUA G CCACCUGG | 1768 | CCAGGUGG GGAGGAAACUCC CU UCAAGGACAUCGUCCGGG UAGAUUCA | 10430 |
| 2116 | CCACCUGG G UGGGAAGU | 1769 | ACUUCCCA GGAGGAAACUCC CU UCAAGGACAUCGUCCGGG CCAGGUGG | 10431 |
| 2123 | GGUGGGAA G UAAUUUGG | 1770 | CCAAAUUA GGAGGAAACUCC CU UCAAGGACAUCGUCCGGG UUCCCACC | 10432 |
| 2140 | AAGAUCCA G CAUCCAGG | 1771 | CCUGGAUG GGAGGAAACUCC CU UCAAGGACAUCGUCCGGG UGGAUCUU | 10433 |
| 2155 | GGGAAUUA G UAGUCAGC | 1772 | GCUGACUA GGAGGAAACUCC CU UCAAGGACAUCGUCCGGG UAAUUCCC | 10434 |
| 2158 | AAUUAGUA G UCAGCUAU | 1773 | AUAGCUGA GGAGGAAACUCC CU UCAAGGACAUCGUCCGGG UACUAAUU | 10435 |
| 2162 | AGUAGUCA G CUAUGUCA | 1774 | UGACAUAG GGAGGAAACUCC CU UCAAGGACAUCGUCCGGG UGACUACU | 10436 |
| 2173 | AUGUCAAC G UUAAUAUG | 1775 | CAUAUUAA GGAGGAAACUCC CU UCAAGGACAUCGUCCGGG GUUGACAU | 10437 |
| 2183 | UAAUAUGG G CCUAAAAA | 1776 | UUUUUAGG GGAGGAAACUCC CU UCAAGGACAUCGUCCGGG CCAUAUUA | 10438 |
| 2208 | CUAUUGUG G UUUCACAU | 1777 | AUGUGAAA GGAGGAAACUCC CU UCAAGGACAUCGUCCGGG CACAAUAG | 10439 |
| 2235 | ACUUUUGG G CGAGAAAC | 1778 | GUUUCUCG GGAGGAAACUCC CU UCAAGGACAUCGUCCGGG CCAAAAGU | 10440 |
| 2260 | AAUAUUUG G UGUCUUUU | 1779 | AAAAGACA GGAGGAAACUCC CU UCAAGGACAUCGUCCGGG CAAAUAUU | 10441 |
| 2272 | CUUUUGGA G UGUGGAUU | 1780 | AAUCCACA GGAGGAAACUCC CU UCAAGGACAUCGUCCGGG UCCAAAAG | 10442 |
| 2360 | ACGAAGAG G CAGGUCCC | 1781 | GGGACCUG GGAGGAAACUCC CU UCAAGGACAUCGUCCGGG CUCUUCGU | 10443 |
| 2364 | AGAGGCAG G UCCCCUAG | 1782 | CUAGGGGA GGAGGAAACUCC CU UCAAGGACAUCGUCCGGG CUGCCUCU | 10444 |
| 2403 | AGACGAAG G UCUCAAUC | 1783 | GAUUGAGA GGAGGAAACUCC CU UCAAGGACAUCGUCCGGG CUUCGUCU | 10445 |
| 2417 | AUCGCCGC G UCGCAGAA | 1784 | UUCUGCGA GGAGGAAACUCC CU UCAAGGACAUCGUCCGGG GCGGCGAU | 10446 |
| 2454 | CAAUGUUA G UAUUCCUU | 1785 | AAGGAAUA GGAGGAAACUCC CU UCAAGGACAUCGUCCGGG UAACAUUG | 10447 |
| 2474 | CACAUAAG G UGGGAAAC | 1786 | GUUUCCCA GGAGGAAACUCC CU UCAAGGACAUCGUCCGGG CUUAUGUG | 10448 |
| 2491 | UUUACGGG G CUUUAUUC | 1787 | GAAUAAAG GGAGGAAACUCC CU UCAAGGACAUCGUCCGGG CCCGUAAA | 10449 |
| 2507 | CUUCUACG G UACCUUGC | 1788 | GCAAGGUA GGAGGAAACUCC CU UCAAGGACAUCGUCCGGG CGUAGAAG | 10450 |
| 2530 | CCUAAAUG G CAAACUCC | 1789 | GGAGUUUG GGAGGAAACUCC CU UCAAGGACAUCGUCCGGG CAUUUAGG | 10451 |
| 2587 | AGAUGUAA G CAAUUUGU | 1790 | ACAAAUUG GGAGGAAACUCC CU UCAAGGACAUCGUCCGGG UUACAUCU | 10452 |
| 2599 | UUUGUGGG G CCCCUUAC | 1791 | GUAAGGGG GGAGGAAACUCC CU UCAAGGACAUCGUCCGGG CCCACAAA | 10453 |
| 2609 | CCCUUACA G UAAAUGAA | 1792 | UUCAUUUA GGAGGAAACUCC CU UCAAGGACAUCGUCCGGG UGUAAGGG | 10454 |
| 2650 | CCUGCUAG G UUUUAUCC | 1793 | GGAUAAAA GGAGGAAACUCC CU UCAAGGACAUCGUCCGGG CUAGCAGG | 10455 |
| 2701 | AUCAAACC G UAUUAUCC | 1794 | GGAUAAUA GGAGGAAACUCC CU UCAAGGACAUCGUCCGGG GGUUUGAU | 10456 |
| 2713 | UAUCCAGA G UAUGUAGU | 1795 | ACUACAUA GGAGGAAACUCC CU UCAAGGACAUCGUCCGGG UCUGGAUA | 10457 |
| 2720 | AGUAUGUA G UUAAUCAU | 1796 | AUGAUUAA GGAGGAAACUCC CU UCAAGGACAUCGUCCGGG UACAUACU | 10458 |
| 2768 | UUUGGAAG G CGGGGAUC | 1797 | GAUCCCCG GGAGGAAACUCC CU UCAAGGACAUCGUCCGGG CUUCCAAA | 10459 |
| 2791 | AAAAGAGA G UCCACACG | 1798 | CGUGUGGA GGAGGAAACUCC CU UCAAGGACAUCGUCCGGG UCUCUUUU | 10460 |
| 2799 | GUCCACAC G UAGCGCCU | 1799 | AGGCGCUA GGAGGAAACUCC CU UCAAGGACAUCGUCCGGG GUGUGGAC | 10461 |
| 2802 | CACACGUA G CGCCUCAU | 1800 | AUGAGGCG GGAGGAAACUCC CU UCAAGGACAUCGUCCGGG UACGUGUG | 10462 |
| 2818 | UUUUGCGG G UCACCAUA | 1801 | UAUGGUGA GGAGGAAACUCC CU UCAAGGACAUCGUCCGGG CCGCAAAA | 10463 |
| 2848 | GAUCUACA G CAUGGGAG | 1802 | CUCCCAUG GGAGGAAACUCC CU UCAAGGACAUCGUCCGGG UGUAGAUC | 10464 |
| 2857 | CAUGGGAG G UUGGUCUU | 1803 | AAGACCAA GGAGGAAACUCC CU UCAAGGACAUCGUCCGGG CUCCCAUG | 10465 |
| 2861 | GGAGGUUG G UCUUCCAA | 1804 | UUGGAAGA GGAGGAAACUCC CU UCAAGGACAUCGUCCGGG CAACCUCC | 10466 |
| 2881 | UCGAAAAG G CAUGGGGA | 1805 | UCCCCAUG GGAGGAAACUCC CU UCAAGGACAUCGUCCGGG CUUUUCGA | 10467 |
| 2936 | GAUCAUCA G UUGGACCC | 1806 | GGGUCCAA GGAGGAAACUCC CU UCAAGGACAUCGUCCGGG UGAUGAUC | 10468 |
| 2955 | CAUUCAAA G CCAACUCA | 1807 | UGAGUUGG GGAGGAAACUCC CU UCAAGGACAUCGUCCGGG UUUGAAUG | 10469 |
| 2964 | CCAACUCA G UAAAUCCA | 1808 | UGGAUUUA GGAGGAAACUCC CU UCAAGGACAUCGUCCGGG UGAGUUGG | 10470 |
| 3005 | GACAACUG G CCGGACGC | 1809 | GCGUCCGG GGAGGAAACUCC CU UCAAGGACAUCGUCCGGG CAGUUGUC | 10471 |
| 3021 | CCAACAAG G UGGGAGUG | 1810 | CACUCCCA GGAGGAAACUCC CU UCAAGGACAUCGUCCGGG CUUGUUGG | 10472 |
| 3027 | AGGUGGGA G UGGGAGCA | 1811 | UGCUCCCA GGAGGAAACUCC CU UCAAGGACAUCGUCCGGG UCCCACCU | 10473 |
| 3033 | GAGUGGGA G CAUUCGGG | 1812 | CCCGAAUG GGAGGAAACUCC CU UCAAGGACAUCGUCCGGG UCCCACUC | 10474 |
| 3041 | GCAUUCGG G CCAGGGUU | 1813 | AACCCUGG GGAGGAAACUCC CU UCAAGGACAUCGUCCGGG CCGAAUGC | 10475 |
| 3047 | GGGCCAGG G UUCACCCC | 1814 | GGGGUGAA GGAGGAAACUCC CU UCAAGGACAUCGUCCGGG CCUGGCCC | 10476 |
| 3077 | CUGUUGGG G UGGAGCCC | 1815 | GGGCUCCA GGAGGAAACUCC CU UCAAGGACAUCGUCCGGG CCCAACAG | 10477 |
| 3082 | GGGGUGGA G CCCUCACG | 1816 | CGUGAGGG GGAGGAAACUCC CU UCAAGGACAUCGUCCGGG UCCACCCC | 10478 |
| 3097 | CGCUCAGG G CCUACUCA | 1817 | UGAGUAGG GGAGGAAACUCC CU UCAAGGACAUCGUCCGGG CCUGAGCG | 10479 |
| 3117 | CUGUGCCA G CAGCUCCU | 1818 | AGGAGCUG GGAGGAAACUCC CU UCAAGGACAUCGUCCGGG UGGCACAG | 10480 |
| 3120 | UGCCAGCA G CUCCUCCU | 1819 | AGGAGGAG GGAGGAAACUCC CU UCAAGGACAUCGUCCGGG UGCUGGCA | 10481 |
| 3146 | ACCAAUCG G CAGUCAGG | 1820 | CCUGACUG GGAGGAAACUCC CU UCAAGGACAUCGUCCGGG CGAUUGGU | 10482 |
| 3149 | AAUCGGCA G UCAGGAAG | 1821 | CUUCCUGA GGAGGAAACUCC CU UCAAGGACAUCGUCCGGG UGCCGAUU | 10483 |
| 3158 | UCAGGAAG G CAGCCUAC | 1822 | GUAGGCUG GGAGGAAACUCC CU UCAAGGACAUCGUCCGGG CUUCCUGA | 10484 |
| 3161 | GGAAGGCA G CCUACUCC | 1823 | GGAGUAGG GGAGGAAACUCC CU UCAAGGACAUCGUCCGGG UGCCUUCC | 10485 |
| 3204 | AUCCUCAG G CCAUGCAG | 1824 | CUGCAUGG GGAGGAAACUCC CU UCAAGGACAUCGUCCGGG CUGAGGAU | 10486 |
| 31 | CUCUUCAA G AUCCCAGA | 1999 | UCUGGGAU GGAGGAAACUCC CU UCAAGGACAUCGUCCGGG UUGAAGAG | 10487 |
| 38 | AGAUCCCA G AGUCAGGG | 2000 | CCCUGACU GGAGGAAACUCC CU UCAAGGACAUCGUCCGGG UGGGAUCU | 10488 |
| 44 | CAGAGUCA G GGCCCUGU | 2001 | ACAGGGCC GGAGGAAACUCC CU UCAAGGACAUCGUCCGGG UGACUCUG | 10489 |
| 45 | AGAGUCAG G GCCCUGUA | 2002 | UACAGGGC GGAGGAAACUCC CU UCAAGGACAUCGUCCGGG CUGACUCU | 10490 |
| 64 | UUCCUGCU G GUGGCUCC | 2003 | GGAGCCAC GGAGGAAACUCC CU UCAAGGACAUCGUCCGGG AGCAGGAA | 10491 |
| 67 | CUGCUGGU G GCUCCAGU | 2004 | ACUGGAGC GGAGGAAACUCC CU UCAAGGACAUCGUCCGGG ACCAGCAG | 10492 |
| 79 | CCAGUUCA G GAACAGUG | 2005 | CACUGUUC GGAGGAAACUCC CU UCAAGGACAUCGUCCGGG UGAACUGG | 10493 |
| 80 | CAGUUCAG G AACAGUGA | 2006 | UCACUGUU GGAGGAAACUCC CU UCAAGGACAUCGUCCGGG CUGAACUG | 10494 |
| 99 | CCUGCUCA G AAUACUGU | 2007 | ACAGUAUU GGAGGAAACUCC CU UCAAGGACAUCGUCCGGG UGAGCAGG | 10495 |
| 135 | UUAUCGAA G ACUGGGGA | 2008 | UCCCCAGU GGAGGAAACUCC CU UCAAGGACAUCGUCCGGG UUCGAUAA | 10496 |
| 139 | CGAAGACU G GGGACCCU | 2009 | AGGGUCCC GGAGGAAACUCC CU UCAAGGACAUCGUCCGGG AGUCUUCG | 10497 |
| 140 | GAAGACUG G GGACCCUG | 2010 | CAGGGUCC GGAGGAAACUCC CU UCAAGGACAUCGUCCGGG CAGUCUUC | 10498 |
| 141 | AAGACUGG G GACCCUGU | 2011 | ACAGGGUC GGAGGAAACUCC CU UCAAGGACAUCGUCCGGG CCAGUCUU | 10499 |
| 142 | AGACUGGG G ACCCUGUA | 2012 | UACAGGGU GGAGGAAACUCC CU UCAAGGACAUCGUCCGGG CCCAGUCU | 10500 |
| 159 | CCGAACAU G GAGAACAU | 2013 | AUGUUCUC GGAGGAAACUCC CU UCAAGGACAUCGUCCGGG AUGUUCGG | 10501 |
| 160 | CGAACAUG G AGAACAUC | 2014 | GAUGUUCU GGAGGAAACUCC CU UCAAGGACAUCGUCCGGG CAUGUUCG | 10502 |
| 162 | AACAUGGA G AACAUCGC | 2015 | GCGAUGUU GGAGGAAACUCC CU UCAAGGACAUCGUCCGGG UCCAUGUU | 10503 |
| 175 | UCGCAUCA G GACUCCUA | 2016 | UAGGAGUC GGAGGAAACUCC CU UCAAGGACAUCGUCCGGG UGAUGCGA | 10504 |
| 176 | CGCAUCAG G ACUCCUAG | 2017 | CUAGGAGU GGAGGAAACUCC CU UCAAGGACAUCGUCCGGG CUGAUGCG | 10505 |
| 184 | GACUCCUA G GACCCCUG | 2018 | CAGGGGUC GGAGGAAACUCC CU UCAAGGACAUCGUCCGGG UAGGAGUC | 10506 |
| 185 | ACUCCUAG G ACCCCUGC | 2019 | GCAGGGGU GGAGGAAACUCC CU UCAAGGACAUCGUCCGGG CUAGGAGU | 10507 |
| 204 | GUGUUACA G GCGGGGUU | 2020 | AACCCCGC GGAGGAAACUCC CU UCAAGGACAUCGUCCGGG UGUAACAC | 10508 |
| 207 | UUACAGGC G GGGUUUUU | 2021 | AAAAACCC GGAGGAAACUCC CU UCAAGGACAUCGUCCGGG GCCUGUAA | 10509 |
| 208 | UACAGGCG G GGUUUUUC | 2022 | GAAAAACC GGAGGAAACUCC CU UCAAGGACAUCGUCCGGG CGCCUGUA | 10510 |
| 209 | ACAGGCGG G GUUUUUCU | 2023 | AGAAAAAC GGAGGAAACUCC CU UCAAGGACAUCGUCCGGG CCGCCUGU | 10511 |
| 246 | AUACCACA G AGUCUAGA | 2024 | UCUAGACU GGAGGAAACUCC CU UCAAGGACAUCGUCCGGG UGUGGUAU | 10512 |
| 253 | AGAGUCUA G ACUCGUGG | 2025 | CCACGAGU GGAGGAAACUCC CU UCAAGGACAUCGUCCGGG UAGACUCU | 10513 |
| 260 | AGACUCGU G GUGGACUU | 2026 | AAGUCCAC GGAGGAAACUCC CU UCAAGGACAUCGUCCGGG ACGAGUCU | 10514 |
| 263 | CUCGUGGU G GACUUCUC | 2027 | GAGAAGUC GGAGGAAACUCC CU UCAAGGACAUCGUCCGGG ACCACGAG | 10515 |
| 264 | UCGUGGUG G ACUUCUCU | 2028 | AGAGAAGU GGAGGAAACUCC CU UCAAGGACAUCGUCCGGG CACCACGA | 10516 |
| 283 | AUUUUCUA G GGGGAACA | 2029 | UGUUCCCC GGAGGAAACUCC CU UCAAGGACAUCGUCCGGG UAGAAAAU | 10517 |
| 284 | UUUUCUAG G GGGAACAC | 2030 | GUGUUCCC GGAGGAAACUCC CU UCAAGGACAUCGUCCGGG CUAGAAAA | 10518 |
| 285 | UUUCUAGG G GGAACACC | 2031 | GGUCUUCC GGAGGAAACUCC CU UCAAGGACAUCGUCCGGG CCUAGAAA | 10519 |
| 286 | UUCUAGGG G GAACACCC | 2032 | GGGUGUUC GGAGGAAACUCC CU UCAAGGACAUCGUCCGGG CCCUAGAA | 10520 |
| 287 | UCUAGGGG G AACACCCG | 2033 | CGGGUGUU GGAGGAAACUCC CU UCAAGGACAUCGUCCGGG CCCCUAGA | 10521 |
| 304 | UGUGUCUU G GCCAAAAU | 2034 | AUUUUGGC GGAGGAAACUCC CU UCAAGGACAUCGUCCGGG AAGACACA | 10522 |
| 367 | UUUGUCCU G GUUAUCGC | 2035 | GCGAUAAC GGAGGAAACUCC CU UCAAGGACAUCGUCCGGG AGGACAAA | 10523 |
| 377 | UUAUCGCU G GAUGUGUC | 2036 | GACACAUC GGAGGAAACUCC CU UCAAGGACAUCGUCCGGG AGCGAUAA | 10524 |
| 378 | UAUCGCUG G AUGUGUCU | 2037 | AGACACAU GGAGGAAACUCC CU UCAAGGACAUCGUCCGGG CAGCGAUA | 10525 |
| 389 | CUGUCUGC G GCGUUUUA | 2038 | UAAAACGC GGAGGAAACUCC CU UCAAGGACAUCGUCCGGG GCAGACAC | 10526 |
| 441 | UUCUUGUU G GUUCUUCU | 2039 | AGAAGAAC GGAGGAAACUCC CU UCAAGGACAUCGUCCGGG AACAAGAA | 10527 |
| 450 | GUUCUUCU G GACUAUCA | 2040 | UGAUAGUC GGAGGAAACUCC CU UCAAGGACAUCGUCCGGG AGAAGAAC | 10528 |
| 451 | UUCUUCUG G ACUAUCAA | 2041 | UUGAUAGU GGAGGAAACUCC CU UCAAGGACAUCGUCCGGG CAGAAGAA | 10529 |
| 460 | ACUAUCAA G GUAUGUUG | 2042 | CAACAUAC GGAGGAAACUCC CU UCAAGGACAUCGUCCGGG UUGAUAGU | 10530 |
| 490 | UAAUUCCA G GAUCAUCA | 2043 | UGAUGAUC GGAGGAAACUCC CU UCAAGGACAUCGUCCGGG UGGAAUUA | 10531 |
| 491 | AAUUCCAG G AUCAUCAA | 2044 | UUGAUGAU GGAGGAAACUCC CU UCAAGGACAUCGUCCGGG CUGGAAUU | 10532 |
| 511 | CCAGCACC G GACCAUGC | 2045 | GGAUGGUC GGAGGAAACUCC CU UCAAGGACAUCGUCCGGG GGUGCUGG | 10533 |
| 512 | CAGCACCG G ACCAUGCA | 2046 | UGCAUGGU GGAGGAAACUCC CU UCAAGGACAUCGUCCGGG CGGUGCUG | 10534 |
| 544 | CUGCUCAA G GAACCUCU | 2047 | AGAGGUUC GGAGGAAACUCC CU UCAAGGACAUCGUCCGGG UUGAGCAG | 10535 |
| 545 | UGCUCAAG G AACCUCUA | 2048 | UAGAGGUU GGAGGAAACUCC CU UCAAGGACAUCGUCCGGG CUUGAGCA | 10536 |
| 585 | AAACCUAC G GACGGAAA | 2049 | UUUCCGUC GGAGGAAACUCC CU UCAAGGACAUCGUCCGGG GUAGGUUU | 10537 |
| 586 | AACCUACG G ACGGAAAC | 2050 | GUUUCCGU GGAGGAAACUCC CU UCAAGGACAUCGUCCGGG CGUAGGUU | 10538 |
| 589 | CUACGGAC G GAAACUGC | 2051 | GCAGUUUC GGAGGAAACUCC CU UCAAGGACAUCGUCCGGG GUCCGUAG | 10539 |
| 590 | UACGGACG G AAACUGCA | 2052 | UGCAGUUU GGAGGAAACUCC CU UCAAGGACAUCGUCCGGG CGUCCGUA | 10540 |
| 623 | AUCAUCUU G GGCUUUCG | 2053 | CGAAAGCC GGAGGAAACUCC CU UCAAGGACAUCGUCCGGG AAGAUGAU | 10541 |
| 624 | UCAUCUUG G GCUUUCGC | 2054 | GCGAAAGC GGAGGAAACUCC CU UCAAGGACAUCGUCCGGG CAAGAUGA | 10542 |
| 644 | AUACCUAU G GGAGUGGG | 2055 | CCCACUCC GGAGGAAACUCC CU UCAAGGACAUCGUCCGGG AUAGGUAU | 10543 |
| 645 | UACCUAUG G GAGUGGGC | 2056 | GCCCACUC GGAGGAAACUCC CU UCAAGGACAUCGUCCGGG CAUAGGUA | 10544 |
| 646 | ACCUAUGG G AGUGGGCC | 2057 | GGCCCACU GGAGGAAACUCC CU UCAAGGACAUCGUCCGGG CCAUAGGU | 10545 |
| 650 | AUGGGAGU G GGCCUCAG | 2058 | CUGAGGCC GGAGGAAACUCC CU UCAAGGACAUCGUCCGGG ACUCCCAU | 10546 |
| 651 | UGGGAGUG G GCCUCAGU | 2059 | ACUGAGGC GGAGGAAACUCC CU UCAAGGACAUCGUCCGGG CACUCCCA | 10547 |
| 671 | UUUCUCUU G GCUCAGUU | 2060 | AACUGAGC GGAGGAAACUCC CU UCAAGGACAUCGUCCGGG AAGAGAAA | 10548 |
| 701 | UGUUCAGU G GUUCGUAG | 2061 | CUACGAAC GGAGGAAACUCC CU UCAAGGACAUCGUCCGGG ACUGAACA | 10549 |
| 709 | GGUUCGUA G GGCUUUCC | 2062 | GGAAAGCC GGAGGAAACUCC CU UCAAGGACAUCGUCCGGG UACGAACC | 10550 |
| 710 | GUUCGUAG G GCUUUCCC | 2063 | GGGAAAGC GGAGGAAACUCC CU UCAAGGACAUCGUCCGGG CUACGAAC | 10551 |
| 728 | CACUGUCU G GCUUUCAG | 2064 | CUGAAAGC GGAGGAAACUCC CU UCAAGGACAUCGUCCGGG AGACAGUG | 10552 |
| 743 | AGUUAUAU G GAUGAUGU | 2065 | ACAUCAUC GGAGGAAACUCC CU UCAAGGACAUCGUCCGGG AUAUAACU | 10553 |
| 744 | GUUAUAUG G AUGAUGUG | 2066 | CACAUCAU GGAGGAAACUCC CU UCAAGGACAUCGUCCGGG CAUAUAAC | 10554 |
| 752 | GAUGAUGU G GUUUUGGG | 2067 | CCCAAAAC GGAGGAAACUCC CU UCAAGGACAUCGUCCGGG ACAUCAUC | 10555 |
| 758 | GUGGUUUU G GGGGCCAA | 2068 | UUGGCCCC GGAGGAAACUCC CU UCAAGGACAUCGUCCGGG AAAACCAC | 10556 |
| 759 | UGGUUUUG G GGGCCAAG | 2069 | CUUGGCCC GGAGGAAACUCC CU UCAAGGACAUCGUCCGGG CAAAACCA | 10557 |
| 760 | GUUUUUGG G GGCCAAGU | 2070 | ACUUGGCC GGAGGAAACUCC CU UCAAGGACAUCGUCCGGG CCAAAACC | 10558 |
| 761 | GUUUUGGG G GCCAAGUC | 2071 | GACUUGGC GGAGGAAACUCC CU UCAAGGACAUCGUCCGGG CCCAAAAC | 10559 |
| 824 | UUGUCUUU G GGUAUACA | 2072 | UGUAUACC GGAGGAAACUCC CU UCAAGGACAUCGUCCGGG AAAGACAA | 10560 |
| 825 | UGUCUUUG G GUAUACAU | 2073 | AUGUAUAC GGAGGAAACUCC CU UCAAGGACAUCGUCCGGG CAAAGACA | 10561 |
| 856 | AACAAAAA G AUGGGGAU | 2074 | AUCCCCAU GGAGGAAACUCC CU UCAAGGACAUCGUCCGGG UUUUUGUU | 10562 |
| 859 | AAAAAGAU G GGGAUAUU | 2075 | AAUAUCCC GGAGGAAACUCC CU UCAAGGACAUCGUCCGGG AUCUUUUU | 10563 |
| 860 | AAAAGAUG G GGAUAUUC | 2076 | GAAUAUCC GGAGGAAACUCC CU UCAAGGACAUCGUCCGGG CAUCUUUU | 10564 |
| 861 | AAAGAUGG G GAUAUUCC | 2077 | GGAAUAUC GGAGGAAACUCC CU UCAAGGACAUCGUCCGGG CCAUCUUU | 10565 |
| 862 | AAGAUGGG G AUAUUCCC | 2078 | GGGAAUAU GGAGGAAACUCC CU UCAAGGACAUCGUCCGGG CCCAUCUU | 10566 |
| 881 | AACUUCAU G GGAUAUGU | 2079 | ACAUAUCC GGAGGAAACUCC CU UCAAGGACAUCGUCCGGG AUGAAGUU | 10567 |
| 882 | ACUUCAUG G GAUAUGUA | 2080 | UACAUAUC GGAGGAAACUCC CU UCAAGGACAUCGUCCGGG CAUGAAGU | 10568 |
| 883 | CUUCAUGG G AUAUGUAA | 2081 | UUACAUAU GGAGGAAACUCC CU UCAAGGACAUCGUCCGGG CCAUGAAG | 10569 |
| 894 | AUGUAAUU G GGAGUUGG | 2082 | CCAACUCC GGAGGAAACUCC CU UCAAGGACAUCGUCCGGG AAUUACAU | 10570 |
| 895 | UGUAAUUG G GAGUUGGG | 2083 | CCCAACUC GGAGGAAACUCC CU UCAAGGACAUCGUCCGGG CAAUUACA | 10571 |
| 896 | GUAAUUGG G AGUUGGGG | 2084 | CCCCAACU GGAGGAAACUCC CU UCAAGGACAUCGUCCGGG CCAAUUAC | 10572 |
| 901 | UGGGAGUU G GGGCACAU | 2085 | AUGUGCCC GGAGGAAACUCC CU UCAAGGACAUCGUCCGGG AACUCCCA | 10573 |
| 902 | GGGAGUUG G GGCACAUU | 2086 | AAUGUGCC GGAGGAAACUCC CU UCAAGGACAUCGUCCGGG CAACUCCC | 10574 |
| 903 | GGAGUUGG G GCACAUUG | 2087 | CAAUGUGC GGAGGAAACUCC CU UCAAGGACAUCGUCCGGG CCAACUCC | 10575 |
| 917 | UUGCCACA G GAACAUAU | 2088 | AUAUGUUC GGAGGAAACUCC CU UCAAGGACAUCGUCCGGG UGUGGCAA | 10576 |
| 918 | UGCCACAG G AACAUAUU | 2089 | AAUAUGUU GGAGGAAACUCC CU UCAAGGACAUCGUCCGGG CUGUGGCA | 10577 |
| 952 | GUGUUUUA G GAAACUUC | 2090 | GAAGUUUC GGAGGAAACUCC CU UCAAGGACAUCGUCCGGG UAAAACAC | 10578 |
| 953 | UGUUUUAG G AAACUUCC | 2091 | GGAAGUUU GGAGGAAACUCC CU UCAAGGACAUCGUCCGGG CUAAAACA | 10579 |
| 970 | UGUAAACA G GCCUAUUG | 2092 | CAAUAGGC GGAGGAAACUCC CU UCAAGGACAUCGUCCGGG UGUUUACA | 10580 |
| 982 | UAUUGAUU G GAAAGUAU | 2093 | AUACUUUC GGAGGAAACUCC CU UCAAGGACAUCGUCCGGG AAUCAAUA | 10581 |
| 983 | AUUGAUUG G AAAGUAUG | 2094 | CAUACUUU GGAGGAAACUCC CU UCAAGGACAUCGUCCGGG CAAUCAAU | 10582 |
| 1004 | CGAAUUGU G GGUCUUUU | 2095 | AAAAGACC GGAGGAAACUCC CU UCAAGGACAUCGUCCGGG ACAAUUCG | 10583 |
| 1005 | GAAUUGUG G GUCUUUUG | 2096 | CAAAAGAC GGAGGAAACUCC CU UCAAGGACAUCGUCCGGG CACAAUUC | 10584 |
| 1013 | GGUCUUUU G GGGUUUGC | 2097 | GCAAACCC GGAGGAAACUCC CU UCAAGGACAUCGUCCGGG AAAAGACC | 10585 |
| 1014 | GUCUUUUG G GGUUUGCC | 2098 | GGCAAACC GGAGGAAACUCC CU UCAAGGACAUCGUCCGGG CAAAAGAC | 10586 |
| 1015 | UCUUUUGG G GUUUGCCG | 2099 | CGGCAAAC GGAGGAAACUCC CU UCAAGGACAUCGUCCGGG CCAAAAGA | 10587 |
| 1041 | CGCAAUGU G GAUAUUCU | 2100 | AGAAUAUC GGAGGAAACUCC CU UCAAGGACAUCGUCCGGG ACAUUGCG | 10588 |
| 1042 | GCAAUGUG G AUAUUCUG | 2101 | CAGAAUAU GGAGGAAACUCC CU UCAAGGACAUCGUCCGGG CACAUUGC | 10589 |
| 1088 | GCAAAACA G GCUUUUAC | 2102 | GUAAAAGC GGAGGAAACUCC CU UCAAGGACAUCGUCCGGG UGUUUUGC | 10590 |
| 1115 | ACUUACAA G GCCUUUCU | 2103 | AGAAAGGC GGAGGAAACUCC CU UCAAGGACAUCGUCCGGG UUGUAAGU | 10591 |
| 1159 | CGUUGCUC G GCAACGGC | 2104 | GCCGUUGC GGAGGAAACUCC CU UCAAGGACAUCGUCCGGG GAGCAACG | 10592 |
| 1165 | UCGGCAAC G GCCUGGUC | 2105 | GACCAGGC GGAGGAAACUCC CU UCAAGGACAUCGUCCGGG GUUGCCGA | 10593 |
| 1170 | AACGGCCU G GUCUAUGC | 2106 | GCAUAGAC GGAGGAAACUCC CU UCAAGGACAUCGUCCGGG AGGCCGUU | 10594 |
| 1206 | CCCCCACU G GUUGGGGC | 2107 | GCCCCAAC GGAGGAAACUCC CU UCAAGGACAUCGUCCGGG AGUGGGGG | 10595 |
| 1210 | CACUGGUU G GGGCUUGG | 2108 | CCAAGCCC GGAGGAAACUCC CU UCAAGGACAUCGUCCGGG AACCAGUG | 10596 |
| 1211 | ACUGGUUG G GGCUUGGC | 2109 | GCCAAGCC GGAGGAAACUCC CU UCAAGGACAUCGUCCGGG CAACCAGU | 10597 |
| 1212 | CUGGUUGG G GCUUGGCC | 2110 | GGCCAAGC GGAGGAAACUCC CU UCAAGGACAUCGUCCGGG CCAACCAG | 10598 |
| 1217 | UGGGGCUU G GCCAUAGG | 2111 | CCUAUGGC GGAGGAAACUCC CU UCAAGGACAUCGUCCGGG AAGCCCCA | 10599 |
| 1224 | UGGCCAUA G GCCAUCAG | 2112 | CUGAUGGC GGAGGAAACUCC CU UCAAGGACAUCGUCCGGG UAUGGCCA | 10600 |
| 1242 | GCAUGCGU G GAACCUUU | 2113 | AAAGGUUC GGAGGAAACUCC CU UCAAGGACAUCGUCCGGG ACGCAUGC | 10601 |
| 1243 | CAUGCGUG G AACCUUUG | 2114 | CAAAGGUU GGAGGAAACUCC CU UCAAGGACAUCGUCCGGG CACGCAUG | 10602 |
| 1277 | CAUACCGC G GAACUCCU | 2115 | AGGAGUUC GGAGGAAACUCC CU UCAAGGACAUCGUCCGGG GCGGUAUG | 10603 |
| 1278 | AUACCGCG G AACUCCUA | 2116 | UAGGAGUU GGAGGAAACUCC CU UCAAGGACAUCGUCCGGG CGCGGUAU | 10604 |
| 1309 | UCGCAGCA G GUCUGGGG | 2117 | CCCCAGAC GGAGGAAACUCC CU UCAAGGACAUCGUCCGGG UGCUGCGA | 10605 |
| 1314 | GCAGGUCU G GGGCAAAA | 2118 | UUUUGCCC GGAGGAAACUCC CU UCAAGGACAUCGUCCGGG AGACCUGC | 10606 |
| 1315 | CAGGUCUG G GGCAAAAC | 2119 | GUUUUGCC GGAGGAAACUCC CU UCAAGGACAUCGUCCGGG CAGACCUG | 10607 |
| 1316 | AGGUCUGG G GCAAAACU | 2120 | AGUUUUGC GGAGGAAACUCC CU UCAAGGACAUCGUCCGGG CCAGACCU | 10608 |
| 1329 | AACUCAUC G GGACUGAC | 2121 | GUCAGUCC GGAGGAAACUCC CU UCAAGGACAUCGUCCGGG GAUGAGUU | 10609 |
| 1330 | ACUCAUCG G GACUGACA | 2122 | UGUCAGUC GGAGGAAACUCC CU UCAAGGACAUCGUCCGGG CGAUGAGU | 10610 |
| 1331 | CUCAUCGG G ACUGACAA | 2123 | UUGUCAGU GGAGGAAACUCC CU UCAAGGACAUCGUCCGGG CCGAUGAG | 10611 |
| 1378 | AUUUCCAU G GCUGCUAG | 2124 | CUAGCAGC GGAGGAAACUCC CU UCAAGGACAUCGUCCGGG AUGGAAAU | 10612 |
| 1386 | GGCUGCUA G GCUGUGCU | 2125 | AGCACAGC GGAGGAAACUCC CU UCAAGGACAUCGUCCGGG UAGCAGCC | 10613 |
| 1402 | UGCCAACU G GAUCCUAC | 2126 | GUAGGAUC GGAGGAAACUCC CU UCAAGGACAUCGUCCGGG AGUUGGCA | 10614 |
| 1403 | GCCAACUG G AUCCUACG | 2127 | CGUAGGAU GGAGGAAACUCC CU UCAAGGACAUCGUCCGGG CAGUUGGC | 10615 |
| 1413 | UCCUACGC G GGACGUCC | 2128 | GGACGUCC GGAGGAAACUCC CU UCAAGGACAUCGUCCGGG GCGUAGGA | 10616 |
| 1414 | CCUACGCG G GACGUCCU | 2129 | AGGACGUC GGAGGAAACUCC CU UCAAGGACAUCGUCCGGG CGCGUAGG | 10617 |
| 1415 | CUACGCGG G ACGUCCUU | 2130 | AAGGACGU GGAGGAAACUCC CU UCAAGGACAUCGUCCGGG CCGCGUAG | 10618 |
| 1439 | GUCCCGUC G GCGCUGAA | 2131 | UUCAGCGC GGAGGAAACUCC CU UCAAGGACAUCGUCCGGG GACGGGAC | 10619 |
| 1454 | AAUCCCGC G GACGACCC | 2132 | GGGUCGUC GGAGGAAACUCC CU UCAAGGACAUCGUCCGGG GCGGGAUU | 10620 |
| 1455 | AUCCCGCG G ACGACCCC | 2133 | GGGGUCGU GGAGGAAACUCC CU UCAAGGACAUCGUCCGGG CGCGGGAU | 10621 |
| 1468 | CCCCUCCC G GGGCCGCU | 2134 | AGCGGCCC GGAGGAAACUCC CU UCAAGGACAUCGUCCGGG GGGAGGGG | 10622 |
| 1469 | CCCUCCCG G GGCCGCUU | 2135 | AAGCGGCC GGAGGAAACUCC CU UCAAGGACAUCGUCCGGG CGGGAGGG | 10623 |
| 1470 | CCUCCCGG G GCCGCUUG | 2136 | CAAGCGGC GGAGGAAACUCC CU UCAAGGACAUCGUCCGGG CCGGGAGG | 10624 |
| 1478 | GGCCGCUU G GGGCUCUA | 2137 | UAGAGCCC GGAGGAAACUCC CU UCAAGGACAUCGUCCGGG AAGCGGCC | 10625 |
| 1479 | GCCGCUUG G GGCUCUAC | 2138 | GUAGAGCC GGAGGAAACUCC CU UCAAGGACAUCGUCCGGG CAAGCGGC | 10626 |
| 1480 | CCGCUUGG G GCUCUACC | 2139 | GGUAGAGC GGAGGAAACUCC CU UCAAGGACAUCGUCCGGG CCAAGCGG | 10627 |
| 1523 | CCGUCCAC G GGGCGCAC | 2140 | GUGCGCCC GGAGGAAACUCC CU UCAAGGACAUCGUCCGGG GUGGACGG | 10628 |
| 1524 | CGUCCACG G GGCGCACC | 2141 | GGUGCGCC GGAGGAAACUCC CU UCAAGGACAUCGUCCGGG CGUGGACG | 10629 |
| 1525 | GUCCACGG G GCGCACCU | 2142 | AGGUGCGC GGAGGAAACUCC CU UCAAGGACAUCGUCCGGG CCGUGGAC | 10630 |
| 1544 | CUUUACGC G GACUCCCC | 2143 | GGGGAGUC GGAGGAAACUCC CU UCAAGGACAUCGUCCGGG GCGUAAAG | 10631 |
| 1545 | UUUACGCG G ACUCCCCG | 2144 | CGGGGAGU GGAGGAAACUCC CU UCAAGGACAUCGUCCGGG CGCGUAAA | 10632 |
| 1574 | CAUCUGCC G GACCGUGU | 2145 | ACACGGUC GGAGGAAACUCC CU UCAAGGACAUCGUCCGGG GGCAGAUG | 10633 |
| 1575 | AUCUGCCG G ACCGUGUG | 2146 | CACACGGU GGAGGAAACUCC CU UCAAGGACAUCGUCCGGG CGGCAGAU | 10634 |
| 1612 | CGUCGCAU G GAGACCAC | 2147 | GUGGUCUC GGAGGAAACUCC CU UCAAGGACAUCGUCCGGG AUGCGACG | 10635 |
| 1613 | GUCGCAUG G AGACCACC | 2148 | GGUGGUCU GGAGGAAACUCC CU UCAAGGACAUCGUCCGGG CAUGCGAC | 10636 |
| 1615 | CGCAUGGA G ACCACCGU | 2149 | ACGGUGGU GGAGGAAACUCC CU UCAAGGACAUCGUCCGGG UCCAUGCG | 10637 |
| 1635 | CGCCCACA G GAACCUGC | 2150 | GCAGGUUC GGAGGAAACUCC CU UCAAGGACAUCGUCCGGG UGUGGGCG | 10638 |
| 1636 | GCCCACAG G AACCUGCC | 2151 | GGCAGGUU GGAGGAAACUCC CU UCAAGGACAUCGUCCGGG CUGUGGGC | 10639 |
| 1648 | CUGCCCAA G GUCUUGCA | 2152 | UGCAAGAC GGAGGAAACUCC CU UCAAGGACAUCGUCCGGG UUGGGCAG | 10640 |
| 1660 | UUGCAUAA G AGGACUCU | 2153 | AGAGUCCU GGAGGAAACUCC CU UCAAGGACAUCGUCCGGG UUAUGCAA | 10641 |
| 1662 | GCAUAAGA G GACUCUUG | 2154 | CAAGAGUC GGAGGAAACUCC CU UCAAGGACAUCGUCCGGG UCUUAUGC | 10642 |
| 1663 | CAUAAGAG G ACUCUUGG | 2155 | CCAAGAGU GGAGGAAACUCC CU UCAAGGACAUCGUCCGGG CUCUUAUG | 10643 |
| 1670 | GGACUCUU G GACUUUCA | 2156 | UGAAAGUC GGAGGAAACUCC CU UCAAGGACAUCGUCCGGG AAGAGUCC | 10644 |
| 1671 | GACUCUUG G ACUUUCAG | 2157 | CUGAAAGU GGAGGAAACUCC CU UCAAGGACAUCGUCCGGG CAAGAGUC | 10645 |
| 1702 | GACCUUGA G GCAUACUU | 2158 | AAGUAUGC GGAGGAAACUCC CU UCAAGGACAUCGUCCGGG UCAAGGUC | 10646 |
| 1715 | ACUUCAAA G ACUGUGUG | 2159 | CACACAGU GGAGGAAACUCC CU UCAAGGACAUCGUCCGGG UUUGAAGU | 10647 |
| 1734 | UAAUGAGU G GGAGGAGU | 2160 | ACUCCUCC GGAGGAAACUCC CU UCAAGGACAUCGUCCGGG ACUCAUUA | 10648 |
| 1735 | AAUGAGUG G GAGGAGUU | 2161 | AACUCCUC GGAGGAAACUCC CU UCAAGGACAUCGUCCGGG CACUCAUU | 10649 |
| 1736 | AUGAGUGG G AGGAGUUG | 2162 | CAACUCCU GGAGGAAACUCC CU UCAAGGACAUCGUCCGGG CCACUCAU | 10650 |
| 1738 | GAGUGGGA G GAGUUGGG | 2163 | CCCAACUC GGAGGAAACUCC CU UCAAGGACAUCGUCCGGG UCCCACUC | 10651 |
| 1739 | AGUGGGAG G AGUUGGGG | 2164 | CCCCAACU GGAGGAAACUCC CU UCAAGGACAUCGUCCGGG CUCCCACU | 10652 |
| 1744 | GAGGAGUU G GGGGAGGA | 2165 | UCCUCCCC GGAGGAAACUCC CU UCAAGGACAUCGUCCGGG AACUCCUC | 10653 |
| 1745 | AGGAGUUG G GGGAGGAG | 2166 | CUCCUCCC GGAGGAAACUCC CU UCAAGGACAUCGUCCGGG CAACUCCU | 10654 |
| 1746 | GGAGUUGG G GGAGGAGG | 2167 | CCUCCUCC GGAGGAAACUCC CU UCAAGGACAUCGUCCGGG CCAACUCC | 10655 |
| 1747 | GAGUUGGG G GAGGAGGU | 2168 | ACCUCCUC GGAGGAAACUCC CU UCAAGGACAUCGUCCGGG CCCAACUC | 10656 |
| 1748 | AGUUGGGG G AGGAGGUU | 2169 | AACCUCCU GGAGGAAACUCC CU UCAAGGACAUCGUCCGGG CCCCAACU | 10657 |
| 1750 | UUGGGGGA G GAGGUUAG | 2170 | CUAACCUC GGAGGAAACUCC CU UCAAGGACAUCGUCCGGG UCCCCCAA | 10658 |
| 1751 | UGGGGGAG G AGGUUAGG | 2171 | CCUAACCU GGAGGAAACUCC CU UCAAGGACAUCGUCCGGG CUCCCCCA | 10659 |
| 1753 | GGGGAGGA G GUUAGGUU | 2172 | AACCUAAC GGAGGAAACUCC CU UCAAGGACAUCGUCCGGG UCCUCCCC | 10660 |
| 1758 | GGAGGUUA G GUUAAAGG | 2173 | CCUUUAAC GGAGGAAACUCC CU UCAAGGACAUCGUCCGGG UAACCUCC | 10661 |
| 1765 | AGGUUAAA G GUCUUUGU | 2174 | ACAAAGAC GGAGGAAACUCC CU UCAAGGACAUCGUCCGGG UUUAACCU | 10662 |
| 1778 | UUGUACUA G GAGGCUGU | 2175 | ACAGCCUC GGAGGAAACUCC CU UCAAGGACAUCGUCCGGG UAGUACAA | 10663 |
| 1779 | UGUACUAG G AGGCUGUA | 2176 | UACAGCCU GGAGGAAACUCC CU UCAAGGACAUCGUCCGGG CUAGUACA | 10664 |
| 1781 | UACUAGGA G GCUGUAGG | 2177 | CCUACAGC GGAGGAAACUCC CU UCAAGGACAUCGUCCGGG UCCUAGUA | 10665 |
| 1788 | AGGCUGUA G GCAUAAAU | 2178 | AUUUAUGC GGAGGAAACUCC CU UCAAGGACAUCGUCCGGG UACAGCCU | 10666 |
| 1798 | CAUAAAUU G GUGUGUUC | 2179 | GAACACAC GGAGGAAACUCC CU UCAAGGACAUCGUCCGGG AAUUUAUG | 10667 |
| 1888 | UGUGCCUU G GGUGGCUU | 2180 | AAGCCACC GGAGGAAACUCC CU UCAAGGACAUCGUCCGGG AAGGCACA | 10668 |
| 1889 | GUGCCUUG G GUGGCUUU | 2181 | AAAGCCAC GGAGGAAACUCC CU UCAAGGACAUCGUCCGGG CAAGGCAC | 10669 |
| 1892 | CCUUGGGU G GCUUUGGG | 2182 | CCCAAAGC GGAGGAAACUCC CU UCAAGGACAUCGUCCGGG ACCCAAGG | 10670 |
| 1898 | GUGGCUUU G GGGCAUGG | 2183 | CCAUGCCC GGAGGAAACUCC CU UCAAGGACAUCGUCCGGG AAAGCCAC | 10671 |
| 1899 | UGGCUUUG G GGCAUGGA | 2184 | UCCAUGCC GGAGGAAACUCC CU UCAAGGACAUCGUCCGGG CAAAGCCA | 10672 |
| 1900 | GGCUUUGG G GCAUGGAC | 2185 | GUCCAUGC GGAGGAAACUCC CU UCAAGGACAUCGUCCGGG CCAAAGCC | 10673 |
| 1905 | UGGGGCAU G GACAUUGA | 2186 | UCAAUGUC GGAGGAAACUCC CU UCAAGGACAUCGUCCGGG AUGCCCCA | 10674 |
| 1906 | GGGGCAUG G ACAUUGAC | 2187 | GUCAAUGU GGAGGAAACUCC CU UCAAGGACAUCGUCCGGG CAUGCCCC | 10675 |
| 1924 | CGUAUAAA G AAUUUGGA | 2188 | UCCAAAUU GGAGGAAACUCC CU UCAAGGACAUCGUCCGGG UUUAUACG | 10676 |
| 1930 | AAGAAUUU G GAGCUUCU | 2189 | AGAAGCUC GGAGGAAACUCC CU UCAAGGACAUCGUCCGGG AAAUUCUU | 10677 |
| 1931 | AGAAUUUG G AGCUUCUG | 2190 | CAGAAGCU GGAGGAAACUCC CU UCAAGGACAUCGUCCGGG CAAAUUCU | 10678 |
| 1941 | GCUUCUGU G GAGUUACU | 2191 | AGUAACUC GGAGGAAACUCC CU UCAAGGACAUCGUCCGGG ACAGAAGC | 10679 |
| 1942 | CUUCUGUG G AGUUACUC | 2192 | GAGUAACU GGAGGAAACUCC CU UCAAGGACAUCGUCCGGG CACAGAAG | 10680 |
| 1987 | CUAUUCGA G AUCUCCUC | 2193 | GAGGAGAU GGAGGAAACUCC CU UCAAGGACAUCGUCCGGG UCGAAUAG | 10681 |
| 2018 | UCUGUAUC G GGGGGCCU | 2194 | AGGCCCCC GGAGGAAACUCC CU UCAAGGACAUCGUCCGGG GAUACAGA | 10682 |
| 2019 | CUGUAUCG G GGGCCCUU | 2195 | AAGGCCCC GGAGGAAACUCC CU UCAAGGACAUCGUCCGGG CGAUACAG | 10683 |
| 2020 | UGUAUCGG G GGGCCUUA | 2196 | UAAGGCCC GGAGGAAACUCC CU UCAAGGACAUCGUCCGGG CCGAUACA | 10684 |
| 2021 | GUAUCGGG G GGCCUUAG | 2197 | CUAAGGCC GGAGGAAACUCC CU UCAAGGACAUCGUCCGGG CCCGAUAC | 10685 |
| 2022 | UAUCGGGG G GCCUUAGA | 2198 | UCUAAGGC GGAGGAAACUCC CU UCAAGGACAUCGUCCGGG CCCCGAUA | 10686 |
| 2029 | GGGCCUUA G AGUCUCCC | 2199 | CGGAGACU GGAGGAAACUCC CU UCAAGGACAUCGUCCGGG UAAGGCCC | 10687 |
| 2037 | GAGUCUCC G GAACAUUG | 2200 | CAAUGUUC GGAGGAAACUCC CU UCAAGGACAUCGUCCGGG GGAGACUC | 10688 |
| 2038 | AGUCUCCG G AACAUUGU | 2201 | ACAAUGUU GGAGGAAACUCC CU UCAAGGACAUCGUCCGGG CGGAGACU | 10689 |
| 2061 | CACCAUAC G GCACUCAG | 2202 | CUGAGUGC GGAGGAAACUCC CU UCAAGGACAUCGUCCGGG GUAUGGUG | 10690 |
| 2069 | GGCACUCA G GCAAGCUA | 2203 | UAGCUUGC GGAGGAAACUCC CU UCAAGGACAUCGUCCGGG UGAGUGCC | 10691 |
| 2087 | UCUGUGUU G GGGUGAGU | 2204 | ACUCACCC GGAGGAAACUCC CU UCAAGGACAUCGUCCGGG AACACAGA | 10692 |
| 2088 | CUGUGUUG G GGUGAGUU | 2205 | AACUCACC GGAGGAAACUCC CU UCAAGGACAUCGUCCGGG CAACACAG | 10693 |
| 2089 | UGUGUUGG G GUGAGUUG | 2206 | CAACUCAC GGAGGAAACUCC CU UCAAGGACAUCGUCCGGG CCAACACA | 10694 |
| 2114 | AGCCACCU G GGUGGGAA | 2207 | UUCCCACC GGAGGAAACUCC CU UCAAGGACAUCGUCCGGG AGGUGGCU | 10695 |
| 2115 | GCCACCUG G GUGGGAAG | 2208 | CUUCCCAC GGAGGAAACUCC CU UCAAGGACAUCGUCCGGG CAGGUGGC | 10696 |
| 2118 | ACCUGGGU G GGAAGUAA | 2209 | UUACUUCC GGAGGAAACUCC CU UCAAGGACAUCGUCCGGG ACCCAGGU | 10697 |
| 2119 | CCUGGGUG G GAAGUAAU | 2210 | AUUACUUC GGAGGAAACUCC CU UCAAGGACAUCGUCCGGG CACCCAGG | 10698 |
| 2120 | CUGGGUGG G AAGUAAUU | 2211 | AAUUACUU GGAGGAAACUCC CU UCAAGGACAUCGUCCGGG CCACCCAG | 10699 |
| 2130 | AGUAAUUU G GAAGAUCC | 2212 | GGAUCUUC GGAGGAAACUCC CU UCAAGGACAUCGUCCGGG AAAUUACU | 10700 |
| 2131 | GUAAUUUG G AAGAUCCA | 2213 | UGGAUCUU GGAGGAAACUCC CU UCAAGGACAUCGUCCGGG CAAAUUAC | 10701 |
| 2134 | AUUUGGAA G AUCCAGCA | 2214 | UGCUGGAU GGAGGAAACUCC CU UCAAGGACAUCGUCCGGG UUCCAAAU | 10702 |
| 2147 | AGCAUCCA G GGAAUUAG | 2215 | CUAAUUCC GGAGGAAACUCC CU UCAAGGACAUCGUCCGGG UGGAUGCU | 10703 |
| 2148 | GCAUCCAG G GAAUUAGU | 2216 | ACUAAUUC GGAGGAAACUCC CU UCAAGGACAUCGUCCGGG CUGGAUGC | 10704 |
| 2149 | CAUCCAGG G AAUUAGUA | 2217 | UACUAAUU GGAGGAAACUCC CU UCAAGGACAUCGUCCGGG CCUGGAUG | 10705 |
| 2181 | GUUAAUAU G GGCCUAAA | 2218 | UUUAGGCC GGAGGAAACUCC CU UCAAGGACAUCGUCCGGG AUAUUAAC | 10706 |
| 2182 | UUAAUAUG G GCCUAAAA | 2219 | UUUUAGGC GGAGGAAACUCC CU UCAAGGACAUCGUCCGGG CAUAUUAA | 10707 |
| 2195 | AAAAAUCA G ACAACUAU | 2220 | AUAGUUGU GGAGGAAACUCC CU UCAAGGACAUCGUCCGGG UGAUUUUU | 10708 |
| 2207 | ACUAUUGU G GUUUCACA | 2221 | UGUGAAAC GGAGGAAACUCC CU UCAAGGACAUCGUCCGGG ACAAUAGU | 10709 |
| 2233 | UUACUUUU G GGCGAGAA | 2222 | UUCUCGCC GGAGGAAACUCC CU UCAAGGACAUCGUCCGGG AAAAGUAA | 10710 |
| 2234 | UACUUUUG G GCGAGAAA | 2223 | UUUCUCGC GGAGGAAACUCC CU UCAAGGACAUCGUCCGGG CAAAAGUA | 10711 |
| 2239 | UUGGGCGA G AAACUGUU | 2224 | AACAGUUU GGAGGAAACUCC CU UCAAGGACAUCGUCCGGG UCGCCCAA | 10712 |
| 2259 | GAAUAUUU G GUGUCUUU | 2225 | AAAGACAC GGAGGAAACUCC CU UCAAGGACAUCGUCCGGG AAAUAUUC | 10713 |
| 2269 | UGUCUUUU G GAGUGUGG | 2226 | CCACACUC GGAGGAAACUCC CU UCAAGGACAUCGUCCGGG AAAAGACA | 10714 |
| 2270 | GUCUUUUG G AGUGUGGA | 2227 | UCCACACU GGAGGAAACUCC CU UCAAGGACAUCGUCCGGG CAAAAGAC | 10715 |
| 2276 | UGGAGUGU G GAUUCGCA | 2228 | UGCGAAUC GGAGGAAACUCC CU UCAAGGACAUCGUCCGGG ACACUCCA | 10716 |
| 2277 | GGAGUGUG G AUUCGCAC | 2229 | GUGCGAAU GGAGGAAACUCC CU UCAAGGACAUCGUCCGGG CACACUCC | 10717 |
| 2300 | UGCAUAUA G ACCACCAA | 2230 | UUGGUGGU GGAGGAAACUCC CU UCAAGGACAUCGUCCGGG UAUAUGCA | 10718 |
| 2334 | ACACUUCC G GAAACUAC | 2231 | GUAGUUUC GGAGGAAACUCC CU UCAAGGACAUCGUCCGGG GGAAGUGU | 10719 |
| 2335 | CACUUCCG G AAACUACU | 2232 | AGUAGUUU GGAGGAAACUCC CU UCAAGGACAUCGUCCGGG CGGAAGUG | 10720 |
| 2351 | UGUUGUUA G ACGAAGAG | 2233 | CUCUUCGU GGAGGAAACUCC CU UCAAGGACAUCGUCCGGG UAACAACA | 10721 |
| 2357 | UAGACGAA G AGGCAGGU | 2234 | ACCUGCCU GGAGGAAACUCC CU UCAAGGACAUCGUCCGGG UUCGUCUA | 10722 |
| 2359 | GACGAAGA G GCAGGUCC | 2235 | GGACCUGC GGAGGAAACUCC CU UCAAGGACAUCGUCCGGG UCUUCGUC | 10723 |
| 2363 | AAGAGGCA G GUCCCCUA | 2236 | UAGGGGAC GGAGGAAACUCC CU UCAAGGACAUCGUCCGGG UGCCUCUU | 10724 |
| 2372 | GUCCCCUA G AAGAAGAA | 2237 | UUCUUCUU GGAGGAAACUCC CU UCAAGGACAUCGUCCGGG UAGGGGAC | 10725 |
| 2375 | CCCUAGAA G AAGAACUC | 2238 | GAGUUCUU GGAGGAAACUCC CU UCAAGGACAUCGUCCGGG UUCUAGGG | 10726 |
| 2378 | UAGAAGAA G AACUCCCU | 2239 | AGGGAGUU GGAGGAAACUCC CU UCAAGGACAUCGUCCGGG UUCUUCUA | 10727 |
| 2396 | GCCUCGCA G ACGAAGGU | 2240 | ACCUUCGU GGAGGAAACUCC CU UCAAGGACAUCGUCCGGG UGCGAGGC | 10728 |
| 2402 | CAGACGAA G GUCUCAAU | 2241 | AUUGAGAC GGAGGAAACUCC CU UCAAGGACAUCGUCCGGG UUCGUCUG | 10729 |
| 2423 | GCGUCGCA G AAGAUCUC | 2242 | GAGAUCUU GGAGGAAACUCC CU UCAAGGACAUCGUCCGGG UGCGACGC | 10730 |
| 2426 | UCGCAGAA G AUCUCAAU | 2243 | AUUGAGAU GGAGGAAACUCC CU UCAAGGACAUCGUCCGGG UUCUGCGA | 10731 |
| 2438 | UCAAUCUC G GGAAUCUC | 2244 | GAGAUUCC GGAGGAAACUCC CU UCAAGGACAUCGUCCGGG GAGAUUGA | 10732 |
| 2439 | CAAUCUCG G GAAUCUCA | 2245 | UGAGAUUC GGAGGAAACUCC CU UCAAGGACAUCGUCCGGG CGAGAUUG | 10733 |
| 2440 | AAUCUCGG G AAUCUCAA | 2246 | UUGAGAUU GGAGGAAACUCC CU UCAAGGACAUCGUCCGGG CCGAGAUU | 10734 |
| 2463 | UAUUCCUU G GACACAUA | 2247 | UAUGUGUC GGAGGAAACUCC CU UCAAGGACAUCGUCCGGG AAGGAAUA | 10735 |
| 2464 | AUUCCUUG G ACACAUAA | 2248 | UUAUGUGU GGAGGAAACUCC CU UCAAGGACAUCGUCCGGG CAAGGAAU | 10736 |
| 2473 | ACACAUAA G GUGGGAAA | 2249 | UUUCCCAC GGAGGAAACUCC CU UCAAGGACAUCGUCCGGG UUAUGUGU | 10737 |
| 2476 | CAUAAGGU G GGAAACUU | 2250 | AAGUUUCC GGAGGAAACUCC CU UCAAGGACAUCGUCCGGG ACCUUAUG | 10738 |
| 2477 | AUAAGGUG G GAAACUUU | 2251 | AAAGUUUC GGAGGAAACUCC CU UCAAGGACAUCGUCCGGG CACCUUAU | 10739 |
| 2478 | UAAGGUGG G AAACUUUA | 2252 | UAAAGUUU GGAGGAAACUCC CU UCAAGGACAUCGUCCGGG CCACCUUA | 10740 |
| 2488 | AACUUUAC G GGGCUUUA | 2253 | UAAAGCCC GGAGGAAACUCC CU UCAAGGACAUCGUCCGGG GUAAAGUU | 10741 |
| 2489 | ACUUUACG G GGCUUUAU | 2254 | AUAAAGCC GGAGGAAACUCC CU UCAAGGACAUCGUCCGGG CGUAAAGU | 10742 |
| 2490 | CUUUACGG G GCUUUAUU | 2255 | AAUAAAGC GGAGGAAACUCC CU UCAAGGACAUCGUCCGGG CCGUAAAG | 10743 |
| 2506 | UCUUCUAC G GUACCUUG | 2256 | CAAGGUAC GGAGGAAACUCC CU UCAAGGACAUCGUCCGGG GUAGAAGA | 10744 |
| 2529 | UCCUAAAU G GCAAACUC | 2257 | GAGUUUGC GGAGGAAACUCC CU UCAAGGACAUCGUCCGGG AUUUAGGA | 10745 |
| 2563 | CAUUUGCA G GAGGACAU | 2258 | AUGUCCUC GGAGGAAACUCC CU UCAAGGACAUCGUCCGGG UGCAAAUG | 10746 |
| 2564 | AUUUGCAG G AGGACAUU | 2259 | AAUGUCCU GGAGGAAACUCC CU UCAAGGACAUCGUCCGGG CUGCAAAU | 10747 |
| 2566 | UUGCAGGA G GACAUUGU | 2260 | ACAAUGUC GGAGGAAACUCC CU UCAAGGACAUCGUCCGGG UCCUGCAA | 10748 |
| 2567 | UGCAGGAG G ACAUUGUU | 2261 | AACAAUGU GGAGGAAACUCC CU UCAAGGACAUCGUCCGGG CUCCUGCA | 10749 |
| 2580 | UGUUGAUA G AUGUAAGC | 2262 | GCUUACAU GGAGGAAACUCC CU UCAAGGACAUCGUCCGGG UAUCAACA | 10750 |
| 2596 | CAAUUUGU G GGGCCCCU | 2263 | AGGGGCCC GGAGGAAACUCC CU UCAAGGACAUCGUCCGGG ACAAAUUG | 10751 |
| 2597 | AAUUUGUG G GGCCCCUU | 2264 | AAGGGGCC GGAGGAAACUCC CU UCAAGGACAUCGUCCGGG CACAAAUU | 10752 |
| 2598 | AUUUGUGG G GCCCCUUA | 2265 | UAAGGGGC GGAGGAAACUCC CU UCAAGGACAUCGUCCGGG CCACAAAU | 10753 |
| 2622 | UGAAAACA G GAGACUUA | 2266 | UAAGUCUC GGAGGAAACUCC CU UCAAGGACAUCGUCCGGG UGUUUUCA | 10754 |
| 2623 | GAAAACAG G AGACUUAA | 2267 | UUAAGUCU GGAGGAAACUCC CU UCAAGGACAUCGUCCGGG CUGUUUUC | 10755 |
| 2625 | AAACAGGA G ACUUAAAU | 2268 | AUUUAAGU GGAGGAAACUCC CU UCAAGGACAUCGUCCGGG UCCUGUUU | 10756 |
| 2649 | GCCUGCUA G GUUUUAUC | 2269 | GAUAAAAC GGAGGAAACUCC CU UCAAGGACAUCGUCCGGG UAGCAGGC | 10757 |
| 2684 | UGCCCUUA G AUAAAGGG | 2270 | CCCUUUAU GGAGGAAACUCC CU UCAAGGACAUCGUCCGGG UAAGGGCA | 10758 |
| 2690 | UAGAUAAA G GGAUCAAA | 2271 | UUUGAUCC GGAGGAAACUCC CU UCAAGGACAUCGUCCGGG UUUAUCUA | 10759 |
| 2691 | AGAUAAAG G GAUCAAAC | 2272 | GUUUGAUC GGAGGAAACUCC CU UCAAGGACAUCGUCCGGG CUUUAUCU | 10760 |
| 2692 | GAUAAAGG G AUCAAACC | 2273 | GGUUUGAU GGAGGAAACUCC CU UCAAGGACAUCGUCCGGG CCUUUAUC | 10761 |
| 2711 | AUUAUCCA G AGUAUGUA | 2274 | UACAUACU GGAGGAAACUCC CU UCAAGGACAUCGUCCGGG UGGAUAAU | 10762 |
| 2737 | UACUUCCA G ACGCGACA | 2275 | UGUCGCGU GGAGGAAACUCC CU UCAAGGACAUCGUCCGGG UGGAAGUA | 10763 |
| 2763 | CACUCUUU G GAAGGCGG | 2276 | CCGCCUUC GGAGGAAACUCC CU UCAAGGACAUCGUCCGGG AAAGAGUG | 10764 |
| 2764 | ACUCUUUG G AAGGCGGG | 2277 | CCCGCCUU GGAGGAAACUCC CU UCAAGGACAUCGUCCGGG CAAAGAGU | 10765 |
| 2767 | CUUUGGAA G GCGGGGAU | 2278 | AUCCCCGC GGAGGAAACUCC CU UCAAGGACAUCGUCCGGG UUCCAAAG | 10766 |
| 2770 | UGGAAGGC G GGGAUCUU | 2279 | AAGAUCCC GGAGGAAACUCC CU UCAAGGACAUCGUCCGGG GCCUUCCA | 10767 |
| 2771 | GGAAGGCG G GGAUCUUA | 2280 | UAAGAUCC GGAGGAAACUCC CU UCAAGGACAUCGUCCGGG CGCCUUCC | 10768 |
| 2772 | GAAGGCGG G GAUCUUAU | 2281 | AUAAGAUC GGAGGAAACUCC CU UCAAGGACAUCGUCCGGG CCGCCUUC | 10769 |
| 2773 | AAGGCGGG G AUCUUAUA | 2282 | UAUAAGAU GGAGGAAACUCC CU UCAAGGACAUCGUCCGGG CCCGCCUU | 10770 |
| 2787 | AUAUAAAA G AGAGUCCA | 2283 | UGGACUCU GGAGGAAACUCC CU UCAAGGACAUCGUCCGGG UUUUAUAU | 10771 |
| 2789 | AUAAAAGA G AGUCCACA | 2284 | UGUGGACU GGAGGAAACUCC CU UCAAGGACAUCGUCCGGG UCUUUUAU | 10772 |
| 2816 | CAUUUUGC G GGUCACCA | 2285 | UGGUGACC GGAGGAAACUCC CU UCAAGGACAUCGUCCGGG GCAAAAUG | 10773 |
| 2817 | AUUUUGCG G GUCACCAU | 2286 | AUGGUGAC GGAGGAAACUCC CU UCAAGGACAUCGUCCGGG CGCAAAAU | 10774 |
| 2832 | AUAUUCUU G GGAACAAG | 2287 | CUUGUUCC GGAGGAAACUCC CU UCAAGGACAUCGUCCGGG AAGAAUAU | 10775 |
| 2833 | UAUUCUUG G GAACAAGA | 2288 | UCUUGUUC GGAGGAAACUCC CU UCAAGGACAUCGUCCGGG CAAGAAUA | 10776 |
| 2834 | AUUCUUGG G AACAAGAU | 2289 | AUCUUGUU GGAGGAAACUCC CU UCAAGGACAUCGUCCGGG CCAAGAAU | 10777 |
| 2840 | GGGAACAA G AUCUACAG | 2290 | CUGUAGAU GGAGGAAACUCC CU UCAAGGACAUCGUCCGGG UUGUUCCC | 10778 |
| 2852 | UACAGCAU G GGAGGUUG | 2291 | CAACCUCC GGAGGAAACUCC CU UCAAGGACAUCGUCCGGG AUGCUGUA | 10779 |
| 2853 | ACAGCAUG G GAGGUUGG | 2292 | CCAACCUC GGAGGAAACUCC CU UCAAGGACAUCGUCCGGG CAUGCUGU | 10780 |
| 2854 | CAGCAUGG G AGGUUGGU | 2293 | ACCAACCU GGAGGAAACUCC CU UCAAGGACAUCGUCCGGG CCAUGCUG | 10781 |
| 2856 | GCAUGGGA G GUUGGUCU | 2294 | AGACCAAC GGAGGAAACUCC CU UCAAGGACAUCGUCCGGG UCCCAUGC | 10782 |
| 2860 | GGGAGGUU G GUCUUCCA | 2295 | UGGAAGAC GGAGGAAACUCC CU UCAAGGACAUCGUCCGGG AACCUCCC | 10783 |
| 2880 | CUCGAAAA G GCAUGGGG | 2296 | CCCCAUGC GGAGGAAACUCC CU UCAAGGACAUCGUCCGGG UUUUCGAG | 10784 |
| 2885 | AAAGGCAU G GGGACAAA | 2297 | UUUGUCCC GGAGGAAACUCC CU UCAAGGACAUCGUCCGGG AUGCCUUU | 10785 |
| 2886 | AAGGCAUG G GGACAAAU | 2298 | AUUUGUCC GGAGGAAACUCC CU UCAAGGACAUCGUCCGGG CAUGCCUU | 10786 |
| 2887 | AGGCAUGG G GACAAAUC | 2299 | GAUUUGUC GGAGGAAACUCC CU UCAAGGACAUCGUCCGGG CCAUGCCU | 10787 |
| 2888 | GGCAUGGG G ACAAAUCU | 2300 | AGAUUUGU GGAGGAAACUCC CU UCAAGGACAUCGUCCGGG CCCAUGCC | 10788 |
| 2915 | AAUCCCCU G GGAUUCUU | 2301 | AAGAAUCC GGAGGAAACUCC CU UCAAGGACAUCGUCCGGG AGGGGAUU | 10789 |
| 2916 | AUCCCCUG G GAUUCUUC | 2302 | GAAGAAUC GGAGGAAACUCC CU UCAAGGACAUCGUCCGGG CAGGGGAU | 10790 |
| 2917 | UCCCCUGG G AUUCUUCC | 2303 | GGAAGAAU GGAGGAAACUCC CU UCAAGGACAUCGUCCGGG CCAGGGGA | 10791 |
| 2939 | CAUCAGUU G GACCCUGC | 2304 | GCAGGGUC GGAGGAAACUCC CU UCAAGGACAUCGUCCGGG AACUGAUG | 10792 |
| 2940 | AUCAGUUG G ACCCUGCA | 2305 | UGCAGGGU GGAGGAAACUCC CU UCAAGGACAUCGUCCGGG CAACUGAU | 10793 |
| 2973 | UAAAUCCA G AUUGGGAC | 2306 | GUCCCAAU GGAGGAAACUCC CU UCAAGGACAUCGUCCGGG UGGAUUUA | 10794 |
| 2977 | UCCAGAUU G GGACCUCA | 2307 | UGAGGUCC GGAGGAAACUCC CU UCAAGGACAUCGUCCGGG AAUCUGGA | 10795 |
| 2978 | CCAGAUUG G GACCUCAA | 2308 | UUGAGGUC GGAGGAAACUCC CU UCAAGGACAUCGUCCGGG CAAUCUGG | 10796 |
| 2979 | CAGAUUGG G ACCUCAAC | 2309 | GUUGAGGU GGAGGAAACUCC CU UCAAGGACAUCGUCCGGG CCAAUCUG | 10797 |
| 2996 | CCGCACAA G GACAACUG | 2310 | CAGUUGUC GGAGGAAACUCC CU UCAAGGACAUCGUCCGGG UUGUGCGG | 10798 |
| 2997 | CGCACAAG G ACAACUGG | 2311 | CCAGUUGU GGAGGAAACUCC CU UCAAGGACAUCGUCCGGG CUUGUGCG | 10799 |
| 3004 | GGACAACU G GCCGGACG | 2312 | CGUCCGGC GGAGGAAACUCC CU UCAAGGACAUCGUCCGGG AGUUGUCC | 10800 |
| 3008 | AACUGGCC G GACGCCAA | 2313 | UUGGCGUC GGAGGAAACUCC CU UCAAGGACAUCGUCCGGG GGCCAGUU | 10801 |
| 3009 | ACUGGCCG G ACGCCAAC | 2314 | GUUGGCGU GGAGGAAACUCC CU UCAAGGACAUCGUCCGGG CGGCCAGU | 10802 |
| 3020 | GCCAACAA G GUGGGAGU | 2315 | ACUCCCAC GGAGGAAACUCC CU UCAAGGACAUCGUCCGGG UUGUUGGC | 10803 |
| 3023 | AACAAGGU G GGAGUGGG | 2316 | CCCACUCC GGAGGAAACUCC CU UCAAGGACAUCGUCCGGG ACCUUGUU | 10804 |
| 3024 | ACAAGGUG G GAGUGGGA | 2317 | UCCCACUC GGAGGAAACUCC CU UCAAGGACAUCGUCCGGG CACCUUGU | 10805 |
| 3025 | CAAGGUGG G AGUGGGAG | 2318 | CUCCCACU GGAGGAAACUCC CU UCAAGGACAUCGUCCGGG CCACCUUG | 10806 |
| 3029 | GUGGGAGU G GGAGCAUU | 2319 | AAUGCUCC GGAGGAAACUCC CU UCAAGGACAUCGUCCGGG ACUCCCAC | 10807 |
| 3030 | UGGGAGUG G GAGCAUUC | 2320 | GAAUGCUC GGAGGAAACUCC CU UCAAGGACAUCGUCCGGG CACUCCCA | 10808 |
| 3031 | GGGAGUGG G AGCAUUCG | 2321 | CGAAUGCU GGAGGAAACUCC CU UCAAGGACAUCGUCCGGG CCACUCCC | 10809 |
| 3039 | GAGCAUUC G GGCCAGGG | 2322 | CCCUGGCC GGAGGAAACUCC CU UCAAGGACAUCGUCCGGG GAAUGCUC | 10810 |
| 3040 | AGCAUUCG G GCCAGGGU | 2323 | ACCCUGGC GGAGGAAACUCC CU UCAAGGACAUCGUCCGGG CGAAUGCU | 10811 |
| 3045 | UCGGGCCA G GGUUCACC | 2324 | GGUGAACC GGAGGAAACUCC CU UCAAGGACAUCGUCCGGG UGGCCCGA | 10812 |
| 3046 | CGGGCCAG G GUUCACCC | 2325 | GGGUGAAC GGAGGAAACUCC CU UCAAGGACAUCGUCCGGG CUGGCCCG | 10813 |
| 3063 | CUCCCCAU G GGGGACUG | 2326 | CAGUCCCC GGAGGAAACUCC CU UCAAGGACAUCGUCCGGG AUGGGGAG | 10814 |
| 3064 | UCCCCAUG G GGGACUGU | 2327 | ACAGUCCC GGAGGAAACUCC CU UCAAGGACAUCGUCCGGG CAUGGGGA | 10815 |
| 3065 | CCCCAUGG G GGACUGUU | 2328 | AACAGUCC GGAGGAAACUCC CU UCAAGGACAUCGUCCGGG CCAUGGGG | 10816 |
| 3066 | CCCAUGGG G GACUGUUG | 2329 | CAACAGUC GGAGGAAACUCC CU UCAAGGACAUCGUCCGGG CCCAUGGG | 10817 |
| 3067 | CCAUGGGG G ACUGUUGG | 2330 | CCAACAGU GGAGGAAACUCC CU UCAAGGACAUCGUCCGGG CCCCAUGG | 10818 |
| 3074 | GGACUGUU G GGGUGGAG | 2331 | CUCCACCC GGAGGAAACUCC CU UCAAGGACAUCGUCCGGG AACAGUCC | 10819 |
| 3075 | GACUGUUG G GGUGGAGC | 2332 | GCUCCACC GGAGGAAACUCC CU UCAAGGACAUCGUCCGGG CAACAGUC | 10820 |
| 3076 | ACUGUUGG G GUGGAGCC | 2333 | GGCUCCAC GGAGGAAACUCC CU UCAAGGACAUCGUCCGGG CCAACAGU | 10821 |
| 3079 | GUUGGGGU G GAGCCCUC | 2334 | GAGGGCUC GGAGGAAACUCC CU UCAAGGACAUCGUCCGGG ACCCCAAC | 10822 |
| 3080 | UUGGGGUG G AGCCCUCA | 2335 | UGAGGGCU GGAGGAAACUCC CU UCAAGGACAUCGUCCGGG CACCCCAA | 10823 |
| 3095 | CACGCUCA G GGCCUACU | 2336 | AGUAGGCC GGAGGAAACUCC CU UCAAGGACAUCGUCCGGG UGAGCGUG | 10824 |
| 3096 | ACGCUCAG G GCCUACUC | 2337 | GAGUAGGC GGAGGAAACUCC CU UCAAGGACAUCGUCCGGG CUGAGCGU | 10825 |
| 3145 | CACCAAUC G GCAGUCAG | 2338 | CUGACUGC GGAGGAAACUCC CU UCAAGGACAUCGUCCGGG GAUUGGUG | 10826 |
| 3153 | GGCAGUCA G GAAGGCAG | 2339 | CUGCCUUC GGAGGAAACUCC CU UCAAGGACAUCGUCCGGG UGACUGCC | 10827 |
| 3154 | GCAGUCAG G AAGGCAGC | 2340 | GCUGCCUU GGAGGAAACUCC CU UCAAGGACAUCGUCCGGG CUGACUGC | 10828 |
| 3157 | GUCAGGAA G GCAGCCUA | 2341 | UAGGCUGC GGAGGAAACUCC CU UCAAGGACAUCGUCCGGG UUCCUGAC | 10829 |
| 3187 | ACCUCUAA G GGACACUC | 2342 | GAGUGUCC GGAGGAAACUCC CU UCAAGGACAUCGUCCGGG UUAGAGGU | 10830 |
| 3188 | CCUCUAAG G GACACUCA | 2343 | UGAGUGUC GGAGGAAACUCC CU UCAAGGACAUCGUCCGGG CUUAGAGG | 10831 |
| 3189 | CUCUAAGG G ACACUCAU | 2344 | AUGAGUGU GGAGGAAACUCC CU UCAAGGACAUCGUCCGGG CCUUAGAG | 10832 |
| 3203 | CAUCCUCA G GCCAUGCA | 2345 | UGCAUGGC GGAGGAAACUCC CU UCAAGGACAUCGUCCGGG UGAGGAUG | 10833 |

Input Sequence = AF100308.
Cut Site = YG/M or UG/U.
Stem Length = 8.
Core Sequence = GGAGGAAACUCC CU UCAAGGACAUCGUCCGGG
AF100308 (Hepatitis B virus strain 2-18, 3215 bp)

[0559] TABLE XI

| Human HBV Enzymatic Nucleic Acid and Target Sequence | | | | | | | |
|---|---|---|---|---|---|---|---|
| | | Seq | | | | Seq | |
| Pos | SUBSTRATE | ID | RPI# | Ribozyme Alias | ENZYMATIC NUCLEIC ACID | ID | |
| 313 | CCAAAAU U CGCAGUC | 2346 | 18157 | HBV-313 Rz-7 RNA | GACUGCG CUGAUGAGGCCGUUAGGCCGAA AUUUUGG B | 10834 | |
| 327 | CCCAAAU C UCCAGUC | 2347 | 18158 | HBV-327 Rz-7 RNA | GACUGGA CUGAUGAGGCCGUUAGGCCGAA AUUUGGG B | 10835 | |
| 334 | CUCCAGU C ACUCACC | 2348 | 18159 | HBV-334 Rz-7 RNA | GGUGAGU CUGAUGAGGCCGUUAGGCCGAA ACUGGAG B | 10836 | |
| 408 | UCUUCCU C UGCAUCC | 2349 | 18160 | HBV-408 Rz-7 RNA | GGAUGCA CUGAUGAGGCCGUUAGGCCGAA AGGAAGA B | 10837 | |
| 557 | UCUAUGU U UCCCUCA | 2350 | 18161 | HBV-557 Rz-7 RNA | UGAGGGA CUGAUGAGGCCGUUAGGCCGAA ACAUAGA B | 10838 | |
| 1255 | UUUGUGU C UCCUCUG | 2351 | 18162 | HBV-1255 Rz-7 RNA | CAGAGGA CUGAUGAGGCCGUUAGGCCGAA ACACAAA B | 10839 | |
| 1538 | CCUCUCU U UACGCGG | 2352 | 18163 | HBV-1538 Rz-7 RNA | CCGCGUA CUGAUGAGGCCGUUAGGCCGAA AGAGAGG B | 10840 | |
| 1756 | AGGAGGU U AGGUUAA | 2353 | 18164 | HBV-1756 Rz-7 RNA | UUAACCU CUGAUGAGGCCGUUAGGCCGAA ACCUCCU B | 10841 | |
| 1861 | AUGUCCU A CUGUUCA | 2354 | 18165 | HBV-1861 Rz-7 RNA | UGAACAG CUGAUGAGGCCGUUAGGCCGAA AGGACAU B | 10842 | |
| 2504 | UUCUUCU A CGGUACC | 2355 | 18166 | HBV-2504 Rz-7 RNA | GGUACCG CUGAUGAGGCCGUUAGGCCGAA AGAAGAA B | 10843 | |
| 10 | CUCCACC A CUUUCCA | 2356 | 18197 | HBV-10 CHz-7 RNA | UGGAAAG CUGAUGAGGCCGUUAGGCCGAA GGUGGAG B | 10844 | |
| 335 | UCCAGUC A CUCACCA | 2357 | 18198 | HBV-335 CHz-7 RNA | UGGUGAG CUGAUGAGGCCGUUAGGCCGAA GACUGGA B | 10845 | |
| 1258 | GUGUCUC C UCUGCCG | 2358 | 18199 | HBV-1258 CHz-7 RNA | CGGCAGA CUGAUGAGGCCGUUAGGCCGAA GAGACAC B | 10846 | |
| 2307 | GACCACC A AAUGCCC | 2359 | 18200 | HBV-2307 CHz-7 RNA | GGGCAUU CUGAUGAGGCCGUUAGGCCGAA GGUGGUC B | 10847 | |
| 347 | UCACCAACCU G UUGUC | 2360 | 18216 | HBV-347 GCl.Rz-5/10 RNA | GACAA UGAUGGCAUGCACUAUGCGCG AGGUUGGUGA B | 10848 | |
| 350 | CCAACCUGUU G UCCUC | 2361 | 18217 | HBV-350 GCl.Rz-5/10 RNA | GAGGA UGAUGGCAUGCACUAUGCGCG AACAGGUUGG B | 10849 | |
| 1508 | UCCGCCUAUU G UACCG | 2362 | 18218 | HBV-1508 GCl.Rz-5/10 RNA | CGGUA UGAUGGCAUGCACUAUGCGCG AAUAGGCGGA B | 10850 | |
| 234 | AAUCCU C ACAAUA | 2363 | 18334 | HBV-234 Rz-6 allyl stab1 | uₛaₛuₛuₛgu cUGAuGaggccguuaggccGaa Aggauu B | 10851 | |
| 252 | GAGUCU A GACUCG | 2364 | 18335 | HBV-252 Rz-6 allyl stab1 | cₛgₛaₛgₛuc cUGAuGaggccguuaggccGaa Agacuc B | 10852 | |
| 268 | UGGACU U CUCUCA | 2365 | 18337 | HBV-268 Rz-6 allyl stab1 | uₛgₛaₛgₛag cUGAuGaggccguuaggccGaa Agucca B | 10853 | |
| 280 | AAUUUU C UAGGGG | 2366 | 18345 | HBV-280 Rz-6 allyl stab1 | cₛcₛcₛcₛua cUGAuGaggccguuaggccGaa Aaaauu B | 10854 | |
| 313 | CAAAAU U CGCAGU | 2367 | 18346 | HBV-313 Rz-6 allyl stab1 | aₛcₛuₛgₛcg cUGAuGaggccguuaggccGaa Auuuug B | 10855 | |
| 395 | GGCGUU U UAUCAU | 2368 | 18350 | HBV-395 Rz-6 allyl stab1 | aₛuₛgₛaₛua cUGAuGaggccguuaggccGaa Aacgcc B | 10856 | |
| 402 | UAUCAU C UUCCUC | 2369 | 18351 | HBV-402 Rz-6 allyl stab1 | gₛaₛgₛgₛaa cUGAuGaggccguuaggccGaa Augaua B | 10857 | |
| 607 | UGUAUU C CCAUCC | 2370 | 18355 | HBV-607 Rz-6 allyl stab1 | gₛgₛaₛuₛgg cUGAuGaggccguuaggccGaa Aauaca B | 10858 | |
| 697 | UUUGUU C AGUGGU | 2371 | 18362 | HBV-697 Rz-6 allyl stab1 | aₛcₛcₛaₛcu cUGAuGaggccguuaggccGaa Aacaaa B | 10859 | |
| 1539 | UCUCUU U ACGCGG | 2372 | 18366 | HBV-1539 Rz-6 allyl stab1 | cₛcₛgₛcₛgu cUGAuGaggccguuaggccGaa Aagaga B | 10860 | |
| 1599 | UCACCU C UGCACG | 2373 | 18367 | HBV-1599 Rz-6 allyl stab1 | cₛgₛuₛgₛca cUGAuGaggccguuaggccGaa Agguga B | 10861 | |
| 1607 | GCACGU C GCAUGG | 2374 | 18368 | HBV-1607 Rz-6 allyl stab1 | cₛcₛaₛuₛgc cUGAuGaggccguuaggccGaa Acgugc B | 10862 | |
| 1833 | UCACCU C UGCCUA | 2375 | 18371 | HBV-1833 Rz-6 allyl stab1 | uₛaₛgₛgₛca cUGAuGaggccguuaggccGaa Agguga B | 10863 | |
| 2383 | AGAACU C CCUCGC | 2376 | 18374 | HBV-2383 Rz-6 allyl stab1 | gₛcₛgₛaₛgg cUGAuGaggccguuaggccGaa Aguucu B | 10864 | |
| 2429 | GAAGAU C UCAAUC | 2377 | 18376 | HBV-2429 Rz-6 allyl stab1 | gₛaₛuₛuₛga cUGAuGaggccguuaggccGaa Aucuuc B | 10865 | |
| 2831 | UAUUCU U GGGAAC | 2378 | 18379 | HBV-2831 Rz-6 allyl stab1 | gₛuₛuₛcₛcc cUGAuGaggccguuaggccGaa Agaaua B | 10866 | |
| 430 | UGCCUC A UCUUCU | 2379 | 18391 | HBV-430 CHz-6 allyl stab1 | aₛgₛaₛaₛga cUGAuGaggccguuaggccGaa Iaggca B | 10867 | |
| 676 | UGGCUC A GUUUAC | 2380 | 18396 | HBV-676 CHz-6 allyl stab1 | gₛuₛaₛaₛac cUGAuGaggccguuaggccGaa Iagcca B | 10868 | |
| 683 | GUUUAC U AGUGCC | 2381 | 18397 | HBV-683 CHz-6 allyl stab1 | gₛgₛcₛaₛcu cUGAuGaggccguuaggccGaa Iuaaac B | 10869 | |
| 1150 | UUUACC C CGUUGC | 2382 | 18402 | HBV-1150 CHz-6 allyl stab1 | gₛcₛaₛaₛcg cUGAuGaggccguuaggccGaa Iguaaa B | 10870 | |
| 1200 | GCAACC C CCACUG | 2383 | 18403 | HBV-1200 CHz-6 allyl stab1 | cₛaₛgₛuₛgg cUGAuGaggccguuaggccGaa Iguugc B | 10871 | |
| 1201 | CAACCC C CACUGG | 2384 | 18404 | HBV-1201 CHz-6 allyl stab1 | cₛcₛaₛgₛug cUGAuGaggccguuaggccGaa Igguug B | 10872 | |
| 1444 | CGGCGC U GAAUCC | 2385 | 18405 | HBV-1444 CHz-6 allyl stab1 | gₛgₛaₛuₛuc cUGAuGaggccguuaggccGaa Icgccg B | 10873 | |
| 1451 | GAAUCC C GCGGAC | 2386 | 18406 | HBV-1451 CHz-6 allyl stab1 | gₛuₛcₛcₛgc cUGAuGaggccguuaggccGaa Igauuc B | 10874 | |
| 1533 | CGCACC U CUCUUU | 2387 | 18407 | HBV-1533 CHz-6 allyl stab1 | aₛaₛaₛgₛag cUGAuGaggccguuaggccGaa Igugcg B | 10875 | |
| 1600 | CACCUC U GCACGU | 2388 | 18410 | HBV-1600 CHz-6 allyl stab1 | aₛcₛgₛuₛgc cUGAuGaggccguuaggccGaa Iaggug B | 10876 | |
| 1698 | CCGACC U UGAGGC | 2389 | 18411 | HBV-1698 CHz-6 allyl stab1 | gₛcₛcₛuₛca cUGAuGaggccguuaggccGaa Igucgg B | 10877 | |
| 1784 | GGAGGC U GUAGGC | 2390 | 18412 | HBV-1784 CHz-6 allyl stab1 | gₛcₛcₛuₛac cUGAuGaggccguuaggccGaa Iccucc B | 10878 | |
| 1829 | UUUUUC A CCUCUG | 2391 | 18414 | HBV-1829 CHz-6 allyl stab1 | cₛaₛgₛaₛgg cUGAuGaggccguuaggccGaa Iaaaaa B | 10879 | |
| 1876 | GCCUCC A AGCUGU | 2392 | 18420 | HBV-1876 CHz-6 allyl stab1 | aₛcₛaₛgₛcu cUGAuGaggccguuaggccGaa Igaggc B | 10880 | |
| 1880 | CCAAGC U GUGCCU | 2393 | 18422 | HBV-1880 CHz-6 allyl stab1 | aₛgₛgₛcₛac cUGAuGaggccguuaggccGaa Icuugg B | 10881 | |
| 218 | UUUUUCU U GUUGACA | 2394 | 18333 | HBV-218 Rz-7 allyl stab1 | uₛgₛuₛcₛaac cUGAuGaggccguuaggccGaa Agaaaaa B | 10882 | |
| 257 | CUAGACU C GUGGUGG | 2395 | 18336 | HBV-257 Rz-7 allyl stab1 | cₛcₛaₛcₛcac cUGAuGaggccguuaggccGaa Agucuag B | 10883 | |
| 268 | GUGGACU U CUCUCAA | 2396 | 18338 | HBV-268 Rz-7 allyl stab1 | uₛuₛgₛaₛgag cUGAuGaggccguuaggccGaa Aguccac B | 10884 | |
| 269 | UGGACUU C UCUCAAU | 2397 | 18339 | HBV-269 Rz-7 allyl stab1 | aₛuₛuₛgₛaga cUGAuGaggccguuaggccGaa Aagucca B | 10885 | |
| 271 | GACUUCU C UCAAUUU | 2398 | 18340 | HBV-271 Rz-7 allyl stab1 | aₛaₛaₛuₛuga cUGAuGaggccguuaggccGaa Agaaguc B | 10886 | |
| 273 | CUUCUCU C AAUUUUC | 2399 | 18341 | HBV-273 Rz-7 allyl stab1 | gₛaₛaₛaₛauu cUGAuGaggccguuaggccGaa Agagaag B | 10887 | |
| 277 | UCUCAAU U UUCUAGG | 2400 | 18342 | HBV-277 Rz-7 allyl stab1 | cₛcₛuₛaₛgaa cUGAuGaggccguuaggccGaa Auugaga B | 10888 | |
| 278 | CUCAAUU U UCUAGGG | 2401 | 18343 | HBV-278 Rz-7 allyl stab1 | cₛcₛcₛuₛaga cUGAuGaggccguuaggccGaa Aauugag B | 10889 | |
| 279 | UCAAUUU U CUAGGGG | 2402 | 18344 | HBV-279 Rz-7 allyl stab1 | cₛcₛcₛcₛuag cUGAuGaggccguuaggccGaa Aaauuga B | 10890 | |
| 314 | CAAAAUU C GCAGUCC | 2403 | 18347 | HBV-314 Rz-7 allyl stab1 | gₛgₛaₛcₛugc cUGAuGaggccguuaggccGaa Aauuuug B | 10891 | |
| 385 | GAUGUGU C UGCGGCG | 2404 | 18348 | HBV-385 Rz-7 allyl stab1 | cₛgₛcₛcₛgca cUGAuGaggccguuaggccGaa Acacauc B | 10892 | |
| 394 | GCGGCGU U UUAUCAU | 2405 | 18349 | HBV-394 Rz-7 allyl stab1 | aₛuₛgₛaₛuaa cUGAuGaggccguuaggccGaa Acgccgc B | 10893 | |
| 402 | UUAUCAU C UUCCUCU | 2406 | 18352 | HBV-402 Rz-7 allyl stab1 | aₛgₛaₛgₛgaa cUGAuGaggccguuaggccGaa Augauaa B | 10894 | |
| 423 | UGCUGCU A UGCCUCA | 2407 | 18353 | HBV-423 Rz-7 allyl stab1 | uₛgₛaₛgₛgca cUGAuGaggccguuaggccGaa Agcagca B | 10895 | |
| 429 | UAUGCCU C AUCUUCU | 2408 | 18354 | HBV-429 Rz-7 allyl stab1 | aₛgₛaₛaₛgau cUGAuGaggccguuaggccGaa Aggcaua B | 10896 | |
| 679 | GCUCAGU U UACUAGU | 2409 | 18356 | HBV-679 Rz-7 allyl stab1 | aₛcₛuₛaₛgua cUGAuGaggccguuaggccGaa Acugagc B | 10897 | |
| 680 | CUCAGUU U ACUAGUG | 2410 | 18357 | HBV-680 Rz-7 allyl stab1 | cₛaₛcₛuₛagu cUGAuGaggccguuaggccGaa Aacugag B | 10898 | |
| 681 | UCAGUUU A CUAGUGC | 2411 | 18358 | HBV-681 Rz-7 allyl stab1 | gₛcₛaₛcₛuag cUGAuGaggccguuaggccGaa Aaacuga B | 10899 | |
| 684 | GUUUACU A GUGCCAU | 2412 | 18359 | HBV-684 Rz-7 allyl stab1 | aₛuₛgₛgₛcac cUGAuGaggccguuaggccGaa Aguaaac B | 10900 | |
| 692 | GUGCCAU U UGUUCAG | 2413 | 18360 | HBV-692 Rz-7 allyl stab1 | cₛuₛgₛaₛaca cUGAuGaggccguuaggccGaa Auggcac B | 10901 | |
| 693 | UGCCAUU U GUUCAGU | 2414 | 18361 | HBV-693 Rz-7 allyl stab1 | aₛcₛuₛgₛaac cUGAuGaggccguuaggccGaa Aauggca B | 10902 | |
| 1534 | CGCACCU C UCUUUAC | 2415 | 18363 | HBV-1534 Rz-7 allyl stab1 | gₛuₛaₛaₛaga cUGAuGaggccguuaggccGaa Aggugcg B | 10903 | |
| 1536 | CACCUCU C UUUACGC | 2416 | 18364 | HBV-1536 Rz-7 allyl stab1 | gₛcₛgₛuₛaaa cUGAuGaggccguuaggccGaa Agaggug B | 10904 | |
| 1538 | CCUCUCU U UACGCGG | 2352 | 18365 | HBV-1538 Rz-7 allyl stab1 | cₛcₛgₛcₛgua cUGAuGaggccguuaggccGaa Agagagg B | 10905 | |
| 1787 | AGGCUGU A GGCAUAA | 2417 | 18369 | HBV-1787 Rz-7 allyl stab1 | uₛuₛaₛuₛgcc cUGAuGaggccguuaggccGaa Acagccu B | 10906 | |
| 1793 | UAGGCAU A AAUUGGU | 2418 | 18370 | HBV-1793 Rz-7 allyl stab1 | aₛcₛcₛaₛauu cUGAuGaggccguuaggccGaa Augccua B | 10907 | |
| 1874 | CAAGCCU C CAAGCUG | 2419 | 18372 | HBV-1874 Rz-7 allyl stab1 | cₛaₛgₛcₛuug cUGAuGaggccguuaggccGaa Aggcuug B | 10908 | |
| 1887 | UGUGCCU U GGGUGGC | 2420 | 18373 | HBV-1887 Rz-7 allyl stab1 | gₛcₛcₛaₛccc cUGAuGaggccguuaggccGaa Aggcaca B | 10909 | |
| 2383 | AAGAACU C CCUCGCC | 2421 | 18375 | HBV-2383 Rz-7 allyl stab1 | gₛgₛcₛgₛagg cUGAuGaggccguuaggccGaa Aguucuu B | 10910 | |
| 2828 | ACCAUAU U CUUGGGA | 2422 | 18377 | HBV-2828 Rz-7 allyl stab1 | uₛcₛcₛcₛaag cUGAuGaggccguuaggccGaa Auauggu B | 10911 | |
| 2829 | CCAUAUU C UUGGGAA | 2423 | 18378 | HBV-2829 Rz-7 allyl stab1 | uₛuₛcₛcₛcaa cUGAuGaggccguuaggccGaa Aauaugg B | 10912 | |
| 2831 | AUAUUCU U GGGAACA | 2424 | 18380 | HBV-2831 Rz-7 allyl stab1 | uₛgₛuₛuₛccc cUGAuGaggccguuaggccGaa Agaauau B | 10913 | |
| 256 | UCUAGAC U CGUGGUG | 2425 | 18381 | HBV-256 CHz-7 allyl stab1 | cₛaₛcₛcₛacg cUGAuGaggccguuaggccGaa Iucuaga B | 10914 | |
| 267 | GGUGGAC U UCUCUCA | 2426 | 18382 | HBV-267 CHz-7 allyl stab1 | uₛgₛaₛgₛaga cUGAuGaggccguuaggccGaa Iuccacc B | 10915 | |
| 270 | GGACUUC U CUCAAUU | 2427 | 18383 | HBV-270 CHz-7 allyl stab1 | aₛaₛuₛuₛgag cUGAuGaggccguuaggccGaa Iaagucc B | 10916 | |
| 272 | ACUUCUC U CAAUUUU | 2428 | 18384 | HBV-272 CHz-7 allyl stab1 | aₛaₛaₛaₛuug cUGAuGaggccguuaggccGaa Iagaagu B | 10917 | |
| 274 | UUCUCUC A AUUUUCU | 2429 | 18385 | HBV-274 CHz-7 allyl stab1 | aₛgₛaₛaₛaau cUGAuGaggccguuaggccGaa Iagagaa B | 10918 | |
| 386 | AUGUGUC U GCGGCGU | 2430 | 18386 | HBV-386 CHz-7 allyl stab1 | aₛcₛgₛcₛcgc cUGAuGaggccguuaggccGaa Iacacau B | 10919 | |
| 419 | AUCCUGC U GCUAUGC | 2431 | 18387 | HBV-419 CHz-7 allyl stab1 | gₛcₛaₛuₛagc cUGAuGaggccguuaggccGaa Icaggau B | 10920 | |
| 422 | CUGCUGC U AUGCCUC | 2432 | 18388 | HBV-422 CHz-7 allyl stab1 | gₛaₛgₛgₛcau cUGAuGaggccguuaggccGaa Icagcag B | 10921 | |
| 427 | GCUAUGC C UCAUCUU | 2433 | 18389 | HBV-427 CHz-7 allyl stab1 | aₛaₛgₛaₛuga cUGAuGaggccguuaggccGaa Icauagc B | 10922 | |
| 428 | CUAUGCC U CAUCUUC | 2434 | 18390 | HBV-428 CHz-7 allyl stab1 | gₛaₛaₛgₛaug cUGAuGaggccguuaggccGaa Igcauag B | 10923 | |
| 430 | AUGCCUC A UCUUCUU | 2435 | 18392 | HBV-430 CHz-7 allyl stab1 | aₛaₛgₛaₛaga cUGAuGaggccguuaggccGaa Iaggcau B | 10924 | |
| 608 | UGUAUUC C CAUCCCA | 2436 | 18393 | HBV-608 CHz-7 allyl stab1 | uₛgₛgₛgₛaug cUGAuGaggccguuaggccGaa Iaauaca B | 10925 | |
| 609 | GUAUUCC C AUCCCAU | 2437 | 18394 | HBV-609 CHz-7 allyl stab1 | aₛuₛgₛgₛgau cUGAuGaggccguuaggccGaa Igaauac B | 10926 | |
| 669 | GUUUCUC U UGGCUCA | 2438 | 18395 | HBV-669 CHz-7 allyl stab1 | uₛgₛaₛgₛcca cUGAuGaggccguuaggccGaa Iagaaac B | 10927 | |
| 689 | CUAGUGC C AUUUGUU | 2439 | 18398 | HBV-689 CHz-7 allyl stab1 | aₛaₛcₛaₛaau cUGAuGaggccguuaggccGaa Icacuag B | 10928 | |
| 690 | UAGUGCC A UUUGUUC | 2440 | 18399 | HBV-690 CHz-7 allyl stab1 | gₛaₛaₛcₛaaa cUGAuGaggccguuaggccGaa Igcacua B | 10929 | |
| 718 | GCUUUCC C CCACUGU | 2441 | 18400 | HBV-718 CHz-7 allyl stab1 | aₛcₛaₛgₛugg cUGAuGaggccguuaggccGaa Igaaagc B | 10930 | |
| 1149 | CCUUUAC C CCGUUGC | 2442 | 18401 | HBV-1149 CHz-7 allyl stab1 | gₛcₛaₛaₛcgg cUGAuGaggccguuaggccGaa Iuaaagg B | 10931 | |
| 1535 | GCACCUC U CUUUACG | 2443 | 18408 | HBV-1535 CHz-7 allyl stab1 | cₛgₛuₛaₛaag cUGAuGaggccguuaggccGaa Iaggugc B | 10932 | |
| 1537 | ACCUCUC U UUACGCG | 2444 | 18409 | HBV-1537 CHz-7 allyl stab1 | cₛgₛcₛgₛuaa cUGAuGaggccguuaggccGaa Iagaggu B | 10933 | |
| 1791 | UGUAGGC A UAAAUUG | 2445 | 18413 | HBV-1791 CHz-7 allyl stab1 | cₛaₛaₛuₛuua cUGAuGaggccguuaggccGaa Iccuaca B | 10934 | |
| 1831 | UUUUCAC C UCUGCCU | 2446 | 18415 | HBV-1831 CHz-7 allyl stab1 | aₛgₛgₛcₛaga cUGAuGaggccguuaggccGaa Iugaaaa B | 10935 | |
| 1832 | UUUCACC U CUGCCUA | 2447 | 18416 | HBV-1832 CHz-7 allyl stab1 | uₛaₛgₛgₛcag cUGAuGaggccguuaggccGaa Igugaaa B | 10936 | |
| 1872 | UUCAAGC C UCCAAGC | 2448 | 18417 | HBV-1872 CHz-7 allyl stab1 | gₛcₛuₛuₛgga cUGAuGaggccguuaggccGaa Icuugaa B | 10937 | |
| 1873 | UCAAGCC U CCAAGCU | 2449 | 18418 | HBV-1873 CHz-7 allyl stab1 | aₛgₛcₛuₛugg cUGAuGaggccguuaggccGaa Igcuuga B | 10938 | |
| 1875 | AAGCCUC C AAGCUGU | 2450 | 18419 | HBV-1875 CHz-7 allyl stab1 | aₛcₛaₛgₛcuu cUGAuGaggccguuaggccGaa Iaggcuu B | 10939 | |
| 1876 | AGCCUCC A AGCUGUG | 2451 | 18421 | HBV-1876 CHz-7 allyl stab1 | cₛaₛcₛaₛgcu cUGAuGaggccguuaggccGaa Igaggcu B | 10940 | |
| 1880 | UCCAAGC U GUGCCUU | 2452 | 18423 | HBV-1880 CHz-7 allyl stab1 | aₛaₛgₛgₛcac cUGAuGaggccguuaggccGaa Icuugga B | 10941 | |
| 2382 | GAAGAAC U CCCUCGC | 2453 | 18424 | HBV-2382 CHz-7 allyl stab1 | gₛcₛgₛaₛggg cUGAuGaggccguuaggccGaa Iuucuuc B | 10942 | |
| 2384 | AGAACUC C CUCGCCU | 2454 | 18425 | HBV-2384 CHz-7 allyl stab1 | aₛgₛgₛcₛgag cUGAuGaggccguuaggccGaa Iaguucu B | 10943 | |
| 2385 | GAACUCC C UCGCCUC | 2455 | 18426 | HBV-2385 CHz-7 allyl stab1 | gₛaₛgₛgₛcga cUGAuGaggccguuaggccGaa Igaguuc B | 10944 | |
| 2422 | GCGUCGC A GAAGAUC | 2456 | 18427 | HBV-2422 CHz-7 allyl stab1 | gₛaₛuₛcₛuuc cUGAuGaggccguuaggccGaa Icgacgc B | 10945 | |
| 2830 | CAUAUUC U UGGGAAC | 2457 | 18428 | HBV-2830 CHz-7 allyl stab1 | gₛuₛuₛcₛcca cUGAuGaggccguuaggccGaa Iaauaug B | 10946 | |
| 234 | AAUCCU C ACAAUA | 2363 | 19179 | HBV-234 Rz-6 amino stab1 | uₛaₛuₛuₛgu cUGAUGaggccguuaggccGaa Aggauu B | 10947 | |
| 252 | GAGUCU A GACUCG | 2364 | 19180 | HBV-252 Rz-6 amino stab1 | cₛgₛaₛgₛuc cUGAUGaggccguuaggccGaa Agacuc B | 10948 | |
| 268 | UGGACU U CUCUCA | 2365 | 19182 | HBV-268 Rz-6 amino stab1 | uₛgₛaₛgₛag cUGAUGaggccguuaggccGaa Agucca B | 10949 | |
| 280 | AAUUUU C UAGGGG | 2366 | 19190 | HBV-280 Rz-6 amino stab1 | cₛcₛcₛcₛua cUGAUGaggccguuaggccGaa Aaaauu B | 10950 | |
| 313 | CAAAAU U CGCAGU | 2367 | 19191 | HBV-313 Rz-6 amino stab1 | aₛcₛuₛgₛcg cUGAUGaggccguuaggccGaa Auuuug B | 10951 | |
| 395 | GGCGUU U UAUCAU | 2368 | 19195 | HBV-395 Rz-6 amino stab1 | aₛuₛgₛaₛua cUGAUGaggccguuaggccGaa Aacgcc B | 10952 | |
| 402 | UAUCAU C UUCCUC | 2369 | 19196 | HBV-402 Rz-6 amino stab1 | gₛaₛgₛgₛaa cUGAUGaggccguuaggccGaa Augaua B | 10953 | |
| 607 | UGUAUU C CCAUCC | 2370 | 19200 | HBV-607 Rz-6 amino stab1 | gₛgₛaₛuₛgg cUGAUGaggccguuaggccGaa Aauaca B | 10954 | |
| 697 | UUUGUU C AGUGGU | 2371 | 19207 | HBV-697 Rz-6 amino stab1 | aₛcₛcₛaₛcu cUGAUGaggccguuaggccGaa Aacaaa B | 10955 | |
| 1539 | UCUCUU U ACGCGG | 2372 | 19211 | HBV-1539 Rz-6 amino stab1 | cₛcₛgₛcₛgu cUGAUGaggccguuaggccGaa Aagaga B | 10956 | |
| 1599 | UCACCU C UGCACG | 2373 | 19212 | HBV-1599 Rz-6 amino stab1 | cₛgₛuₛgₛca cUGAUGaggccguuaggccGaa Agguga B | 10957 | |
| 1607 | GCACGU C GCAUGG | 2374 | 19213 | HBV-1607 Rz-6 amino stab1 | cₛcₛaₛuₛgc cUGAUGaggccguuaggccGaa Acgugc B | 10958 | |
| 1833 | UCACCU C UGCCUA | 2375 | 19216 | HBV-1833 Rz-6 amino stab1 | uₛaₛgₛgₛca cUGAUGaggccguuaggccGaa Agguga B | 10959 | |
| 2383 | AGAACU C CCUCGC | 2376 | 19219 | HBV-2383 Rz-6 amino stab1 | gₛcₛgₛaₛgg cUGAUGaggccguuaggccGaa Aguucu B | 10960 | |
| 2429 | GAAGAU C UCAAUC | 2377 | 19221 | HBV-2429 Rz-6 amino stab1 | gₛaₛuₛuₛga cUGAUGaggccguuaggccGaa Aucuuc B | 10961 | |
| 2831 | UAUUCU U GGGAAC | 2378 | 19224 | HBV-2831 Rz-6 amino stab1 | gₛuₛuₛcₛcc cUGAUGaggccguuaggccGaa Agaaua B | 10962 | |
| 430 | UGCCUC A UCUUCU | 2379 | 19236 | HBV-430 CHz-6 amino stab1 | aₛgₛaₛaₛga cUGAUGaggccguuaggccGaa Iaggca B | 10963 | |
| 676 | UGGCUC A GUUUAC | 2380 | 19241 | HBV-676 CHz-6 amino stab1 | gₛuₛaₛaₛac cUGAUGaggccguuaggccGaa Iagcca B | 10964 | |
| 683 | GUUUAC U AGUGCC | 2381 | 19242 | HBV-683 CHz-6 amino stab1 | gₛgₛcₛaₛcu cUGAUGaggccguuaggccGaa Iuaaac B | 10965 | |
| 1150 | UUUACC C CGUUGC | 2382 | 19247 | HBV-1150 CHz-6 amino stab1 | gₛcₛaₛaₛcg cUGAUGaggccguuaggccGaa Iguaaa B | 10966 | |
| 1200 | GCAACC C CCACUG | 2383 | 19248 | HBV-1200 CHz-6 amino stab1 | cₛaₛgₛuₛgg cUGAUGaggccguuaggccGaa Iguugc B | 10967 | |
| 1201 | CAACCC C CACUGG | 2384 | 19249 | HBV-1201 CHz-6 amino stab1 | cₛcₛaₛgₛug cUGAUGaggccguuaggccGaa Igguug B | 10968 | |
| 1444 | CGGCGC U GAAUCC | 2385 | 19250 | HBV-1444 CHz-6 amino stab1 | gₛgₛaₛuₛuc cUGAUGaggccguuaggccGaa Icgccg B | 10969 | |
| 1451 | GAAUCC C GCGGAC | 2386 | 19251 | HBV-1451 CHz-6 amino stab1 | gₛuₛcₛcₛgc cUGAUGaggccguuaggccGaa Igauuc B | 10970 | |
| 1533 | CGCACC U CUCUUU | 2387 | 19252 | HBV-1533 CHz-6 amino stab1 | aₛaₛaₛgₛag cUGAUGaggccguuaggccGaa Igugcg B | 10971 | |
| 1600 | CACCUC U GCACGU | 2388 | 19255 | HBV-1600 CHz-6 amino stab1 | aₛcₛgₛuₛgc cUGAUGaggccguuaggccGaa Iaggug B | 10972 | |
| 1698 | CCGACC U UGAGGC | 2389 | 19256 | HBV-1698 CHz-6 amino stab1 | gₛcₛcₛuₛca cUGAUGaggccguuaggccGaa Igucgg B | 10973 | |
| 1784 | GGAGGC U GUAGGC | 2390 | 19257 | HBV-1784 CHz-6 amino stab1 | gₛcₛcₛuₛac cUGAUGaggccguuaggccGaa Iccucc B | 10974 | |
| 1829 | UUUUUC A CCUCUG | 2391 | 19259 | HBV-1829 CHz-6 amino stab1 | cₛaₛgₛaₛgg cUGAUGaggccguuaggccGaa Iaaaaa B | 10975 | |
| 1876 | GCCUCC A AGCUGU | 2392 | 19265 | HBV-1876 CHz-6 amino stab1 | aₛcₛaₛgₛcu cUGAUGaggccguuaggccGaa Igaggc B | 10976 | |
| 1880 | CCAAGC U GUGCCU | 2393 | 19267 | HBV-1880 CHz-6 amino stab1 | aₛgₛgₛcₛac cUGAUGaggccguuaggccGaa Icuugg B | 10977 | |
| 218 | UUUUCU U GUUGACA | 2394 | 19178 | HBV-218 Rz-7 amino stab1 | uₛgₛuₛcₛaac cUGAUGaggccguuaggccGaa Agaaaaa B | 10978 | |
| 257 | CUAGACU C GUGGUGG | 2395 | 19181 | HBV-257 Rz-7 amino stab1 | cₛcₛaₛcₛcac cUGAUGaggccguuaggccGaa Agucuag B | 10979 | |
| 268 | GUGGACU U CUCUCAA | 2396 | 19183 | HBV-268 Rz-7 amino stab1 | uₛuₛgₛaₛgag cUGAUGaggccguuaggccGaa Aguccac B | 10980 | |
| 269 | UGGACUU C UCUCAAU | 2397 | 19184 | HBV-269 Rz-7 amino stab1 | aₛuₛuₛgₛaga cUGAUGaggccguuaggccGaa Aagucca B | 10981 | |
| 271 | GACUUCU C UCAAUUU | 2398 | 19185 | HBV-271 Rz-7 amino stab1 | aₛaₛaₛuₛuga cUGAUGaggccguuaggccGaa Agaaguc B | 10982 | |
| 273 | CUUCUCU C AAUUUUC | 2399 | 19186 | HBV-273 Rz-7 amino stab1 | gₛaₛaₛaₛauu cUGAUGaggccguuaggccGaa Agagaag B | 10983 | |
| 277 | UCUCAAU U UUCUAGG | 2400 | 19187 | HBV-277 Rz-7 amino stab1 | cₛcₛuₛaₛgaa cUGAUGaggccguuaggccGaa Auugaga B | 10984 | |
| 278 | CUCAAUU U UCUAGGG | 2401 | 19188 | HBV-278 Rz-7 amino stab1 | cₛcₛcₛuₛaga cUGAUGaggccguuaggccGaa Aauugag B | 10985 | |
| 279 | UCAAUUU U CUAGGGG | 2402 | 19189 | HBV-279 Rz-7 amino stab1 | cₛcₛcₛcₛuag cUGAUGaggccguuaggccGaa Aaauuga B | 10986 | |
| 314 | CAAAAUU C GCAGUCC | 2403 | 19192 | HBV-314 Rz-7 amino stab1 | gₛgₛaₛcₛugc cUGAUGaggccguuaggccGaa Aauuuug B | 10987 | |
| 385 | GAUGUGU C UGCGGCG | 2404 | 19193 | HBV-385 Rz-7 amino stab1 | cₛgₛcₛcₛgca cUGAUGaggccguuaggccGaa Acacauc B | 10988 | |
| 394 | GCGGCGU U UUAUCAU | 2405 | 19194 | HBV-394 Rz-7 amino stab1 | aₛuₛgₛaₛuaa cUGAUGaggccguuaggccGaa Acgccgc B | 10989 | |
| 402 | UUAUCAU C UUCCUCU | 2406 | 19197 | HBV-402 Rz-7 amino stab1 | aₛgₛaₛgₛgaa cUGAUGaggccguuaggccGaa Augauaa B | 10990 | |
| 423 | UGCUGCU A UGCCUCA | 2407 | 19198 | HBV-423 Rz-7 amino stab1 | uₛgₛaₛgₛgca cUGAUGaggccguuaggccGaa Agcagca B | 10991 | |
| 429 | UAUGCCU C AUCUUCU | 2408 | 19199 | HBV-429 Rz-7 amino stab1 | aₛgₛaₛaₛgau cUGAUGaggccguuaggccGaa Aggcaua B | 10992 | |
| 679 | GCUCAGU U UACUAGU | 2409 | 19201 | HBV-679 Rz-7 amino stab1 | aₛcₛuₛaₛgua cUGAUGaggccguuaggccGaa Acugagc B | 10993 | |
| 680 | CUCAGUU U ACUAGUG | 2410 | 19202 | HBV-680 Rz-7 amino stab1 | cₛaₛcₛuₛagu cUGAUGaggccguuaggccGaa Aacugag B | 10994 | |
| 681 | UCAGUUU A CUAGUGC | 2411 | 19203 | HBV-681 Rz-7 amino stab1 | gₛcₛaₛcₛuag cUGAUGaggccguuaggccGaa Aaacuga B | 10995 | |
| 684 | GUUUACU A GUGCCAU | 2412 | 19204 | HBV-684 Rz-7 amino stab1 | aₛuₛgₛgₛcac cUGAUGaggccguuaggccGaa Aguaaac B | 10996 | |
| 692 | GUGCCAU U UGUUCAG | 2413 | 19205 | HBV-692 Rz-7 amino stab1 | cₛuₛgₛaₛaca cUGAUGaggccguuaggccGaa Auggcac B | 10997 | |
| 693 | UGCCAUU U GUUCAGU | 2414 | 19206 | HBV-693 Rz-7 amino stab1 | aₛcₛuₛgₛaac cUGAUGaggccguuaggccGaa Aauggca B | 10998 | |
| 1534 | CGCACCU C UCUUUAC | 2415 | 19208 | HBV-1534 Rz-7 amino stab1 | gₛuₛaₛaₛaga cUGAUGaggccguuaggccGaa Aggugcg B | 10999 | |
| 1536 | CACCUCU C UUUACGC | 2416 | 19209 | HBV-1536 Rz-7 amino stab1 | gₛcₛgₛuₛaaa cUGAUGaggccguuaggccGaa Agaggug B | 11000 | |
| 1538 | CCUCUCU U UACGCGG | 2352 | 19210 | HBV-1538 Rz-7 amino stab1 | cₛcₛgₛcₛgua cUGAUGaggccguuaggccGaa Agagagg B | 11001 | |
| 1787 | AGGCUGU A GGCAUAA | 2417 | 19214 | HBV-1787 Rz-7 amino stab1 | uₛuₛaₛuₛgcc cUGAUGaggccguuaggccGaa Acagccu B | 11002 | |
| 1793 | UAGGCAU A AAUUGGU | 2418 | 19215 | HBV-1793 Rz-7 amino stab1 | aₛcₛcₛaₛauu cUGAUGaggccguuaggccGaa Augccua B | 11003 | |
| 1874 | CAAGCCU C CAAGCUG | 2419 | 19217 | HBV-1874 Rz-7 amino stab1 | cₛaₛgₛcₛuug cUGAUGaggccguuaggccGaa Aggcuug B | 11004 | |
| 1887 | UGUGCCU U GGGUGGC | 2420 | 19218 | HBV-1887 Rz-7 amino stab1 | gₛcₛcₛaₛccc cUGAUGaggccguuaggccGaa Aggcaca B | 11005 | |
| 2383 | AAGAACU C CCUCGCC | 2421 | 19220 | HBV-2383 Rz-7 amino stab1 | gₛgₛcₛgₛagg cUGAUGaggccguuaggccGaa Aguucuu B | 11006 | |
| 2828 | ACCAUAU U CUUGGGA | 2422 | 19222 | HBV-2828 Rz-7 amino stab1 | uₛcₛcₛcₛaag cUGAUGaggccguuaggccGaa Auauggu B | 11007 | |
| 2829 | CCAUAUU C UUGGGAA | 2423 | 19223 | HBV-2829 Rz-7 amino stab1 | uₛuₛcₛcₛcaa cUGAUGaggccguuaggccGaa Aauaugg B | 11008 | |
| 2831 | AUAUUCU U GGGAACA | 2424 | 19225 | HBV-2831 Rz-7 amino stab1 | uₛgₛuₛuₛccc cUGAUGaggccguuaggccGaa Agaauau B | 11009 | |
| 256 | UCUAGAC U CGUGGUG | 2425 | 19226 | HBV-256 CHz-7 amino stab1 | cₛaₛcₛcₛacg cUGAUGaggccguuaggccGaa Iucuaga B | 11010 | |
| 267 | GGUGGAC U UCUCUCA | 2426 | 19227 | HBV-267 CHz-7 amino stab1 | uₛgₛaₛgₛaga cUGAUGaggccguuaggccGaa Iuccacc B | 11011 | |
| 270 | GGACUUC U CUCAAUU | 2427 | 19228 | HBV-270 CHz-7 amino stab1 | aₛaₛuₛuₛgag cUGAUGaggccguuaggccGaa Iaagucc B | 11012 | |
| 272 | ACUUCUC U CAAUUUU | 2428 | 19229 | HBV-272 CHz-7 amino stab1 | aₛaₛaₛaₛuug cUGAUGaggccguuaggccGaa Iagaagu B | 11013 | |
| 274 | UUCUCUC A AUUUUCU | 2429 | 19230 | HBV-274 CHz-7 amino stab1 | aₛgₛaₛaₛaau cUGAUGaggccguuaggccGaa Iagagaa B | 11014 | |
| 386 | AUGUGUC U GCGGCGU | 2430 | 19231 | HBV-386 CHz-7 amino stab1 | aₛcₛgₛcₛcgc cUGAUGaggccguuaggccGaa Iacacau B | 11015 | |
| 419 | AUCCUGC U GCUAUGC | 2431 | 19232 | HBV-419 CHz-7 amino stab1 | gₛcₛaₛuₛagc cUGAUGaggccguuaggccGaa Icaggau B | 11016 | |
| 422 | CUGCUGC U AUGCCUC | 2432 | 19233 | HBV-422 CHz-7 amino stab1 | gₛaₛgₛgₛcau cUGAUGaggccguuaggccGaa Icagcag B | 11017 | |
| 427 | GCUAUGC C UCAUCUU | 2433 | 19234 | HBV-427 CHz-7 amino stab1 | aₛaₛgₛaₛuga cUGAUGaggccguuaggccGaa Icauagc B | 11018 | |
| 428 | CUAUGCC U CAUCUUC | 2434 | 19235 | HBV-428 CHz-7 amino stab1 | gₛaₛaₛgₛaug cUGAUGaggccguuaggccGaa Igcauag B | 11019 | |
| 430 | AUGCCUC A UCUUCUU | 2435 | 19237 | HBV-430 CHz-7 amino stab1 | aₛaₛgₛaₛaga cUGAUGaggccguuaggccGaa Iaggcau B | 11020 | |
| 608 | UGUAUUC C CAUCCCA | 2436 | 19238 | HBV-608 CHz-7 amino stab1 | uₛgₛgₛgₛaug cUGAUGaggccguuaggccGaa Iaauaca B | 11021 | |
| 609 | GUAUUCC C AUCCCAU | 2437 | 19239 | HBV-609 CHz-7 amino stab1 | aₛuₛgₛgₛgau cUGAUGaggccguuaggccGaa Igaauac B | 11022 | |
| 669 | GUUUCUC U UGGCUCA | 2438 | 19240 | HBV-669 CHz-7 amino stab1 | uₛgₛaₛgₛcca cUGAUGaggccguuaggccGaa Iagaaac B | 11023 | |
| 689 | CUAGUGC C AUUUGUU | 2439 | 19243 | HBV-689 CHz-7 amino stab1 | aₛaₛcₛaₛaau cUGAUGaggccguuaggccGaa Icacuag B | 11024 | |
| 690 | UAGUGCC A UUUGUUC | 2440 | 19244 | HBV-690 CHz-7 amino stab1 | gₛaₛaₛcₛaaa cUGAUGaggccguuaggccGaa Igcacua B | 11025 | |
| 718 | GCUUUCC C CCACUGU | 2441 | 19245 | HBV-718 CHz-7 amino stab1 | aₛcₛaₛgₛugg cUGAUGaggccguuaggccGaa Igaaagc B | 11026 | |
| 1149 | CCUUUAC C CCGUUGC | 2442 | 19246 | HBV-1149 CHz-7 amino stab1 | gₛcₛaₛaₛcgg cUGAUGaggccguuaggccGaa Iuaaagg B | 11027 | |
| 1535 | GCACCUC U CUUUACG | 2443 | 19253 | HBV-1535 CHz-7 amino stab1 | cₛgₛuₛaₛaag cUGAUGaggccguuaggccGaa Iaggugc B | 11028 | |
| 1537 | ACCUCUC U UUACGCG | 2444 | 19254 | HBV-1537 CHz-7 amino stab1 | cₛgₛcₛgₛuaa cUGAUGaggccguuaggccGaa Iagaggu B | 11029 | |
| 1791 | UGUAGGC A UAAAUUG | 2445 | 19258 | HBV-1791 CHz-7 amino stab1 | cₛaₛaₛuₛuua cUGAUGaggccguuaggccGaa Iccuaca B | 11030 | |
| 1831 | UUUUCAC C UCUGCCU | 2446 | 19260 | HBV-1831 CHz-7 amino stab1 | aₛgₛgₛcₛaga cUGAUGaggccguuaggccGaa Iugaaaa B | 11031 | |
| 1832 | UUUCACC U CUGCCUA | 2447 | 19261 | HBV-1832 CHz-7 amino stab1 | uₛaₛgₛgₛcag cUGAUGaggccguuaggccGaa Igugaaa B | 11032 | |
| 1872 | UUCAAGC C UCCAAGC | 2448 | 19262 | HBV-1872 CHz-7 amino stab1 | gₛcₛuₛuₛgga cUGAUGaggccguuaggccGaa Icuugaa B | 11033 | |
| 1873 | UCAAGCC U CCAAGCU | 2449 | 19263 | HBV-1873 CHz-7 amino stab1 | aₛgₛcₛuₛugg cUGAUGaggccguuaggccGaa Igcuuga B | 11034 | |
| 1875 | AAGCCUC C AAGCUGU | 2450 | 19264 | HBV-1875 CHz-7 amino stab1 | aₛcₛaₛgₛcuu cUGAUGaggccguuaggccGaa Iaggcuu B | 11035 | |
| 1876 | AGCCUCC A AGCUGUG | 2451 | 19266 | HBV-1876 CHz-7 amino stab1 | cₛaₛcₛaₛgcu cUGAUGaggccguuaggccGaa Igaggcu B | 11036 | |
| 1880 | UCCAAGC U GUGCCUU | 2452 | 19268 | HBV-1880 CHz-7 amino stab1 | aₛaₛgₛgₛcac cUGAUGaggccguuaggccGaa Icuugga B | 11037 | |
| 2382 | GAAGAAC U CCCUCGC | 2453 | 19269 | HBV-2382 CHz-7 amino stab1 | gₛcₛgₛaₛggg cUGAUGaggccguuaggccGaa Iuucuuc B | 11038 | |
| 2384 | AGAACUC C CUCGCCU | 2454 | 19270 | HBV-2384 CHz-7 amino stab1 | aₛgₛgₛcₛgag cUGAUGaggccguuaggccGaa Iaguucu B | 11039 | |
| 2385 | GAACUCC C UCGCCUC | 2455 | 19271 | HBV-2385 CHz-7 amino stab1 | gₛaₛgₛgₛcga cUGAUGaggccguuaggccGaa Igaguuc B | 11040 | |
| 2422 | GCGUCGC A GAAGAUC | 2456 | 19272 | HBV-2422 CHz-7 amino stab1 | gₛaₛuₛcₛuuc cUGAUGaggccguuaggccGaa Icgacgc B | 11041 | |
| 2830 | CAUAUUC U UGGGAAC | 2457 | 19273 | HBV-2830 CHz-7 amino stab1 | gₛuₛuₛcₛcca cUGAUGaggccguuaggccGaa Iaauaug B | 11042 | |
| 315 | GCCAAAAUUC G CAGUC | 2458 | 20079 | HBV-315 GCl.Rz-5/10 stab2 | gₛaₛcₛg uGAUₛg gcauGcacuaugc gcg gaauuuuggc B | 11043 | |
| 381 | AUCGCUGGAU G UGUCU | 2459 | 20080 | HBV-381 GCl.Rz-5/10 stab2 | aₛgₛaₛa uGAUₛg gcauGcacuaugc gcg auccagcgau B | 11044 | |
| 476 | UUGCCCGUUU G UCCUC | 2460 | 20081 | HBV-476 GCl.Rz-5/10 stab2 | gₛaₛgₛa uGAUₛg gcauGcacuaugc gcg aaacgggcaa B | 11045 | |
| 694 | AGUGCCAUUU G UUCAG | 2461 | 20082 | HBV-694 GCl.Rz-5/10 stab2 | cₛuₛgₛa uGAUₛg gcauGcacuaugc gcg aaauggcacu B | 11046 | |
| 1265 | CUCCUCUGCC G AUCCA | 2462 | 20083 | HBV-1265 GCl.Rz-5/10 stab2 | uₛgₛgₛu uGAUₛg gcauGcacuaugc gcg ggcagaggag B | 11047 | |
| 1601 | CUUCACCUCU G CACGU | 2463 | 20084 | HBV-1601 GCl.Rz-5/10 stab2 | aₛcₛgₛg uGAUₛg gcauGcacuaugc gcg agaggugaag B | 11048 | |
| 1881 | CCUCCAAGCU G UGCCU | 2464 | 20085 | HBV-1881 GCl.Rz-5/10 stab2 | aₛgₛgₛa uGAUₛg gcauGcacuaugc gcg agcuuggagg B | 11049 | |
| 1883 | UCCAAGCUGU G CCUUG | 2465 | 20086 | HBV-1883 GCl.Rz-5/10 stab2 | cₛaₛaₛg uGAUₛg gcauGcacuaugc gcg acagcuugga B | 11050 | |
| 2388 | GAACUCCCUC G CCUCG | 2466 | 20087 | HBV-2388 GCl.Rz-5/10 stab2 | cₛgₛaₛg uGAUₛg gcauGcacuaugc gcg gagggaguuc B | 11051 | |
| 381 | GCUGGAU G UGUCUGC | 2467 | 20091 | HBV-381 Zin.Rz-7 amino stab2 | gₛcₛaₛgₛaca GccgaaagGCGaGugaGGuCu auccagc B | | |
| 392 | CUGCGGC G UUUUAUC | 2468 | 20092 | HBV-392 Zin.Rz-7 amino stab2 | gₛaₛuₛaₛaaa GccgaaagGCGaGugaGGuCu gccgcag B | | |
| 420 | UCCUGCU G CUAUGCC | 2469 | 20093 | HBV-420 Zin.Rz-7 amino stab2 | gₛgₛcₛaₛuag GccgaaagGCGaGugaGGuCu agcagga B | | |
| 648 | UAUGGGA G UGGGCCU | 2470 | 20094 | HBV-648 Zin.Rz-7 amino stab2 | aₛgₛgₛcₛcca GccgaaagGCGaGugaGGuCu ucccaua B | | |
| 711 | UCGUAGG G CUUUCCC | 2471 | 20095 | HBV-711 Zin.Rz-7 amino stab2 | gₛgₛgₛaₛaag GccgaaagGCGaGugaGGuCu ccuacga B | | |
| 1262 | CUCCUCU G CCGAUCC | 2472 | 20096 | HBV-1262 Zin.Rz-7 amino stab2 | gₛgₛaₛuₛcgg GccgaaagGCGaGugaGGuCu agaggag B | | |
| 1835 | CACCUCU G CCUAAUC | 2473 | 20097 | HBV-1835 Zin.Rz-7 amino stab2 | gₛaₛuₛuₛagg GccgaaagGCGaGugaGGuCu agaggug B | | |
| 2388 | CUCCCUC G CCUCGCA | 2474 | 20098 | HBV-2388 Zin.Rz-7 amino stab2 | uₛgₛcₛgₛagg GccgaaagGCGaGugaGGuCu gagggag B | | |
| 192 | GACCCCU G CUCGUGU | 2475 | 20099 | HBV-192 Zin.Rz-7 amino stab2 | aₛcₛaₛcₛgag GccgaaagGCGaGugaGGuCu agggguc B | | |
| 198 | UGCUCGU C UUACAGG | 2476 | 20100 | HBV-198 Zin.Rz-7 amino stab2 | cₛcₛuₛgₛuaa GccgaaagGCGaGugaGGuCu acgagca B | | |
| 315 | AAAAUUC G CAGUCCC | 2477 | 20101 | HBV-315 Zin.Rz-7 amino stab2 | gₛgₛgₛaₛcug GccgaaagGCGaGugaGGuCu gaauuuu B | | |
| 383 | GGAUGU G UCUGCG | 2478 | 20102 | HBV-383 Zin.Rz-6 amino stab2 | cₛgₛcₛaₛga GccgaaagGCGaGugaGGuCu acaucc B | | |
| 383 | UGGAUGU G UCUGCGG | 2479 | 20103 | HBV-383 Zin.Rz-7 amino stab2 | cₛcₛgₛcₛaga GccgaaagGCGaGugaGGuCu acaucca B | | |
| 387 | GUGUCU G CGGCGU | 2480 | 20104 | HBV-387 Zin.Rz-6 amino stab2 | aₛcₛgₛcₛcg GccgaaagGCGaGugaGGuCu agacac B | | |
| 390 | GUCUGCG G CGUUUUA | 2481 | 20105 | HBV-390 Zin.Rz-7 amino stab2 | uₛaₛaₛaₛacg GccgaaagGCGaGugaGGuCu cgcagac B | | |
| 392 | UGCGGC G UUUUAU | 2482 | 20106 | HBV-392 Zin.Rz-6 amino stab2 | aₛuₛaₛaₛaa GccgaaagGCGaGugaGGuCu gccgca B | | |
| 425 | UGCUAU G CCUCAU | 2483 | 20107 | HBV-425 Zin.Rz-6 amino stab2 | aₛuₛgₛaₛgg GccgaaagGCGaGugaGGuCu auagca B | | |
| 425 | CUGCUAU G CCUCAUC | 2484 | 20108 | HBV-425 Zin.Rz-7 amino stab2 | gₛaₛuₛgₛagg GccgaaagGCGaGugaGGuCu auagcag B | | |
| 468 | GUAUGUU G CCCGUUU | 2485 | 20109 | HBV-468 Zin.Rz-7 amino stab2 | aₛaₛaₛcₛggg GccgaaagGCGaGugaGGuCu aacauac B | | |
| 476 | CCCGUUU G UCCUCUA | 2486 | 20110 | HBV-476 Zin.Rz-7 amino stab2 | uₛaₛgₛaₛgga GccgaaagGCGaGugaGGuCu aaacggg B | | |
| 648 | AUGGGA G UGGGCC | 2487 | 20111 | HBV-648 Zin.Rz-6 amino stab2 | gₛgₛcₛcₛca GccgaaagGCGaGugaGGuCu ucccau B | | |
| 694 | GCCAUUU G UUCAGUG | 2488 | 20112 | HBV-694 Zin.Rz-7 amino stab2 | cₛaₛcₛuₛgaa GccgaaagGCGaGugaGGuCu aaauggc B | | |
| 699 | UUGUUCA G UGGUUCG | 2489 | 20113 | HBV-699 Zin.Rz-7 amino stab2 | cₛgₛaₛaₛcca GccgaaagGCGaGugaGGuCu ugaacaa B | | |
| 1262 | UCCUCU G CCGAUC | 2490 | 20114 | HBV-1262 Zin.Rz-6 amino stab2 | gₛaₛuₛcₛgg GccgaaagGCGaGugaGGuCu agagga B | | |
| 1440 | CCCGUCG G CGCUGAA | 2491 | 20115 | HBV-1440 Zin.Rz-7 amino stab2 | uₛuₛcₛaₛgcg GccgaaagGCGaGugaGGuCu cgacggg B | | |
| 1526 | CACGGG G CGCACC | 2492 | 20116 | HBV-1526 Zin.Rz-6 amino stab2 | gₛgₛuₛgₛcg GccgaaagGCGaGugaGGuCu cccgug B | | |
| 1526 | CCACGGG G CGCACCU | 2493 | 20117 | HBV-1526 Zin.Rz-7 amino stab2 | aₛgₛgₛuₛgcg GccgaaagGCGaGugaGGuCu cccgugg B | | |
| 1557 | CCCGUCU G UGCCUUC | 2494 | 20118 | HBV-1557 Zin.Rz-7 amino stab2 | gₛaₛaₛgₛgca GccgaaagGCGaGugaGGuCu agacggg B | | |
| 1559 | CGUCUGU G CCUUCUC | 2495 | 20119 | HBV-1559 Zin.Rz-7 amino stab2 | gₛaₛgₛaₛagg GccgaaagGCGaGugaGGuCu acagacg B | | |
| 1590 | GCACUUC G CUUCACC | 2496 | 20120 | HBV-1590 Zin.Rz-7 amino stab2 | gₛgₛuₛgₛaag GccgaaagGCGaGugaGGuCu gaagugc B | | |
| 1835 | ACCUCU G CCUAAU | 2497 | 20121 | HBV-1835 Zin.Rz-6 amino stab2 | aₛuₛuₛaₛgg GccgaaagGCGaGugaGGuCu agaggu B | | |
| 2311 | ACCAAAU G CCCCUAU | 2498 | 20122 | HBV-2311 Zin.Rz-7 amino stab2 | aₛuₛaₛgₛggg GccgaaagGCGaGugaGGuCu auuuggu B | | |
| 2420 | CCGCGUC G CAGAAGA | 2499 | 20123 | HBV-2420 Zin.Rz-7 amino stab2 | uₛcₛuₛuₛcug GccgaaagGCGaGugaGGuCu gacgcgg B | | |
| 65 | CCUGCUG G UGGCUCC | 2500 | 20124 | HBV-65 Zin.Rz-7 amino stab2 | gₛgₛaₛgₛcca GccgaaagGCGaGugaGGuCu cagcagg B | | |
| 192 | ACCCCU G CUCGUG | 2501 | 20125 | HBV-192 Zin.Rz-6 amino stab2 | cₛaₛcₛgₛag GccgaaagGCGaGugaGGuCu aggggu B | | |
| 198 | GCUCGU G UUACAG | 2502 | 20126 | HBV-198 Zin.Rz-6 amino stab2 | cₛuₛgₛuₛaa GccgaaagGCGaGugaGGuCu acgagc B | | |
| 258 | UAGACUC G UGGUGGA | 2503 | 20127 | HBV-258 Zin.Rz-7 amino stab2 | uₛcₛcₛaₛcca GccgaaagGCGaGugaGGuCu gagucua B | | |
| 261 | ACUCGUG G UGGACUU | 2504 | 20128 | HBV-261 Zin.Rz-7 amino stab2 | aₛaₛgₛuₛcca GccgaaagGCGaGugaGGuCu cacgagu B | | |
| 315 | AAAUUC G CAGUCC | 2505 | 20129 | HBV-315 Zin.Rz-6 amino stab2 | gₛgₛaₛcₛug GccgaaagGCGaGugaGGuCu gaauuu B | | |
| 381 | CUGGAU G UGUCUG | 2506 | 20130 | HBV-381 Zin.Rz-6 amino stab2 | cₛaₛgₛaₛca GccgaaagGCGaGugaGGuCu auccag B | | |
| 387 | UGUGUCU G CGGCGUU | 2507 | 20131 | HBV-387 Zin.Rz-7 amino stab2 | aₛaₛcₛgₛccg GccgaaagGCGaGugaGGuCu agacaca B | | |
| 390 | UCUGCG G CGUUUU | 2508 | 20132 | HBV-390 Zin.Rz-6 amino stab2 | aₛaₛaₛaₛcg GccgaaagGCGaGugaGGuCu cgcaga B | | |
| 417 | CAUCCU G CUGCUA | 2509 | 20133 | HBV-417 Zin.Rz-6 amino stab2 | uₛaₛgₛcₛag GccgaaagGCGaGugaGGuCu aggaug B | | |
| 420 | CCUGCU G CUAUGC | 2510 | 20134 | HBV-420 Zin.Rz-6 amino stab2 | gₛcₛaₛuₛag GccgaaagGCGaGugaGGuCu agcagg B | | |
| 468 | UAUGUU G CCCGUU | 2511 | 20135 | HBV-468 Zin.Rz-6 amino stab2 | aₛaₛcₛgₛgg GccgaaagGCGaGugaGGuCu aacaua B | | |
| 476 | CCGUUU G UCCUCU | 2512 | 20136 | HBV-476 Zin.Rz-6 amino stab2 | aₛgₛaₛgₛga GccgaaagGCGaGugaGGuCu aaacgg B | | |
| 677 | GGCUCA G UUUACU | 2513 | 20137 | HBV-677 Zin.Rz-6 amino stab2 | aₛgₛuₛaₛaa GccgaaagGCGaGugaGGuCu ugagcc B | | |
| 677 | UGGCUCA G UUUACUA | 2514 | 20138 | HBV-677 Zin.Rz-7 amino stab2 | uₛaₛgₛuₛaaa GccgaaagGCGaGugaGGuCu ugagcca B | | |
| 685 | UUACUA G UGCCAU | 2515 | 20139 | HBV-685 Zin.Rz-6 amino stab2 | aₛuₛgₛgₛca GccgaaagGCGaGugaGGuCu uaguaa B | | |
| 685 | UUUACUA G UGCCAUU | 2516 | 20140 | HBV-685 Zin.Rz-7 amino stab2 | aₛaₛuₛgₛgca GccgaaagGCGaGugaGGuCu uaguaaa B | | |
| 687 | UACUAGU G CCAUUUG | 2517 | 20141 | HBV-687 Zin.Rz-7 amino stab2 | cₛaₛaₛaₛugg GccgaaagGCGaGugaGGuCu acuagua B | | |
| 699 | UGUUCA G UGGUUC | 2518 | 20142 | HBV-699 Zin.Rz-6 amino stab2 | gₛaₛaₛcₛca GccgaaagGCGaGugaGGuCu ugaaca B | | |
| 702 | UCAGUG G UUCGUA | 2519 | 20143 | HBV-702 Zin.Rz-6 amino stab2 | uₛaₛcₛgₛaa GccgaaagGCGaGugaGGuCu cacuga B | | |
| 702 | UUCAGUG G UUCGUAG | 2520 | 20144 | HBV-702 Zin.Rz-7 amino stab2 | cₛuₛaₛcₛgaa GccgaaagGCGaGugaGGuCu cacugaa B | | |
| 711 | CGUAGG G CUUUCC | 2521 | 20145 | HBV-711 Zin.Rz-6 amino stab2 | gₛgₛaₛaₛag GccgaaagGCGaGugaGGuCu ccuacg B | | |
| 1006 | UUGUGG G UCUUUU | 2522 | 20146 | HBV-1006 Zin.Rz-6 amino stab2 | aₛaₛaₛaₛga GccgaaagGCGaGugaGGuCu ccacaa B | | |
| 1103 | UUUCUC G CCAACU | 2523 | 20147 | HBV-1103 Zin.Rz-6 amino stab2 | aₛgₛuₛuₛgg GccgaaagGCGaGugaGGuCu gagaaa B | | |
| 1103 | CUUUCUC G CCAACUU | 2524 | 20148 | HBV-1103 Zin.Rz-7 amino stab2 | aₛaₛgₛuₛugg GccgaaagGCGaGugaGGuCu gagaaag B | | |
| 1184 | GCCAAGU G UUUGCUG | 2525 | 20149 | HBV-1184 Zin.Rz-7 amino stab2 | cₛaₛgₛcₛaaa GccgaaagGCGaGugaGGuCu acuuggc B | | |
| 1440 | CCGUCG G CGCUGA | 2526 | 20150 | HBV-1440 Zin.Rz-6 amino stab2 | uₛcₛaₛgₛcg GccgaaagGCGaGugaGGuCu cgacgg B | | |
| 1442 | GUCGGC G CUGAAU | 2527 | 20151 | HBV-1442 Zin.Rz-6 amino stab2 | aₛuₛuₛcₛag GccgaaagGCGaGugaGGuCu gccgac B | | |
| 1442 | CGUCGGC G CUGAAUC | 2528 | 20152 | HBV-1442 Zin.Rz-7 amino stab2 | gₛaₛuₛuₛcag GccgaaagGCGaGugaGGuCu gccgacg B | | |
| 1553 | CUCCCC G UCUGUG | 2529 | 20153 | HBV-1553 Zin.Rz-6 amino stab2 | cₛaₛcₛaₛga GccgaaagGCGaGugaGGuCu ggggag B | | |
| 1557 | CCGUCU G UGCCUU | 2530 | 20154 | HBV-1557 Zin.Rz-6 amino stab2 | aₛaₛgₛgₛca GccgaaagGCGaGugaGGuCu agacgg B | | |
| 1559 | GUCUGU G CCUUCU | 2531 | 20155 | HBV-1559 Zin.Rz-6 amino stab2 | aₛgₛaₛaₛgg GccgaaagGCGaGugaGGuCu acagac B | | |
| 1583 | CCGUGU G CACUUC | 2532 | 20156 | HBV-1583 Zin.Rz-6 amino stab2 | gₛaₛaₛgₛug GccgaaagGCGaGugaGGuCu acacgg B | | |
| 1590 | CACUUC G CUUCAC | 2533 | 20157 | HBV-1590 Zin.Rz-6 amino stab2 | gₛuₛgₛaₛag GccgaaagGCGaGugaGGuCu gaagug B | | |
| 1622 | ACCACC G UGAACG | 2534 | 20158 | HBV-1622 Zin.Rz-6 amino stab2 | cₛgₛuₛuₛca GccgaaagGCGaGugaGGuCu gguggu B | | |
| 1870 | UGUUCAA G CCUCCAA | 2535 | 20159 | HBV-1870 Zin.Rz-7 amino stab2 | uₛuₛgₛgₛagg GccgaaagGCGaGugaGGuCu uugaaca B | | |
| 1881 | CCAAGCU G UGCCUUG | 2536 | 20160 | HBV-1881 Zin.Rz-7 amino stab2 | cₛaₛaₛgₛgca GccgaaagGCGaGugaGGuCu agcuugg B | | |
| 1883 | AGCUGU G CCUUGG | 2537 | 20161 | HBV-1883 Zin.Rz-6 amino stab2 | cₛcₛaₛaₛgg GccgaaagGCGaGugaGGuCu acagcu B | | |
| 1883 | AAGCUGU G CCUUGGG | 2538 | 20162 | HBV-1883 Zin.Rz-7 amino stab2 | cₛcₛcₛaₛagg GccgaaagGCGaGugaGGuCu acagcuu B | | |
| 2311 | CCAAAU G CCCCUA | 2539 | 20163 | HBV-2311 Zin.Rz-6 amino stab2 | uₛaₛgₛgₛgg GccgaaagGCGaGugaGGuCu auuugg B | | |
| 2347 | ACUGUU G UUAGAC | 2540 | 20164 | HBV-2347 Zin.Rz-6 amino stab2 | gₛuₛcₛuₛaa GccgaaagGCGaGugaGGuCu aacagu B | | |
| 2364 | AGGCAG G UCCCCU | 2541 | 20165 | HBV-2364 Zin.Rz-6 amino stab2 | aₛgₛgₛgₛga GccgaaagGCGaGugaGGuCu cugccu B | | |
| 2364 | GAGGCAG G UCCCCUA | 2542 | 20166 | HBV-2364 Zin.Rz-7 amino stab2 | uₛaₛgₛgₛgga GccgaaagGCGaGugaGGuCu cugccuc B | | |
| 2388 | UCCCUC G CCUCGC | 2543 | 20167 | HBV-2388 Zin.Rz-6 amino stab2 | gₛcₛgₛaₛgg GccgaaagGCGaGugaGGuCu gaggga B | | |
| 2393 | CGCCUC G CAGACG | 2544 | 20168 | HBV-2393 Zin.Rz-6 amino stab2 | cₛgₛuₛcₛug GccgaaagGCGaGugaGGuCu gaggcg B | | |
| 2417 | CGCCGC G UCGCAG | 2545 | 20169 | HBV-2417 Zin.Rz-6 amino stab2 | cₛuₛgₛcₛga GccgaaagGCGaGugaGGuCu gcggcg B | | |
| 2420 | CGCGUC G CAGAAG | 2546 | 20170 | HBV-2420 Zin.Rz-6 amino stab2 | cₛuₛuₛcₛug GccgaaagGCGaGugaGGuCu gacgcg B | | |
| 2474 | CAUAAG G UGGGAA | 2547 | 20171 | HBV-2474 Zin.Rz-6 amino stab2 | uₛuₛcₛcₛca GccgaaagGCGaGugaGGuCu cuuaug B | | |
| 381 | GCUGGAU G UGUCUGC | 2467 | 20172 | HBV-381 Amb.Rz-7 stab2 | gₛcₛaₛgₛaca gga L ucCCUUCaagga L ucCGGG auccagc B | 11133 | |
| 648 | UAUGGGA G UGGGCCU | 2470 | 20173 | HBV-648 Amb.Rz-7 stab2 | aₛgₛgₛcₛcca gga L ucCCUUCaagga L ucCGGG ucccaua B | 11134 | |
| 198 | UGCUCGU G UUACAGG | 2476 | 20174 | HBV-198 Amb.Rz-7 stab2 | cₛcₛuₛgₛuaa gga L ucCCUUCaagga L ucCGGG acgagca B | 11135 | |
| 377 | UAUCGCU G GAUGUGU | 2548 | 20175 | HBV-377 Amb.Rz-7 stab2 | aₛcₛaₛcₛauc gga L ucCCUUCaagga L ucCGGG agcgaua B | 11136 | |
| 378 | AUCGCUG G AUGUGUC | 2549 | 20176 | HBV-378 Amb.Rz-7 stab2 | gₛaₛcₛaₛcau gga L ucCCUUCaagga L ucCGGG cagcgau B | 11137 | |
| 383 | UGGAUGU G UCUGCGG | 2479 | 20177 | HBV-383 Amb.Rz-7 stab2 | cₛcₛgₛcₛaga gga L ucCCUUCaagga L ucCGGG acaucca B | 11138 | |
| 383 | GGAUGU G UCUGCG | 2478 | 20178 | HBV-383 Amb.Rz-6 stab2 | cₛgₛcₛaₛga gga L ucCCUUCaagga L ucCGGG acaucc B | 11139 | |
| 648 | AUGGGA G UGGGCC | 2487 | 20179 | HBV-648 Amb.Rz-6 stab2 | gₛgₛcₛcₛca gga L ucCCUUCaagga L ucCGGG ucccau B | 11140 | |
| 650 | UGGGAGU G GGCCUCA | 2550 | 20180 | HBV-650 Amb.Rz-7 stab2 | uₛgₛaₛgₛgcc gga L ucCCUUCaagga L ucCGGG acuccca B | 11141 | |
| 650 | GGGAGU G GGCCUC | 2551 | 20181 | HBV-650 Amb.Rz-6 stab2 | gₛaₛgₛgₛcc gga L ucCCUUCaagga L ucCGGG acuccc B | 11142 | |
| 694 | GCCAUUU G UUCAGUG | 2488 | 20182 | HBV-694 Amb.Rz-7 stab2 | cₛaₛcₛuₛgaa gga L ucCCUUCaagga L ucCGGG aaauggc B | 11143 | |
| 699 | UUGUUCA G UGGUUCG | 2489 | 20183 | HBV-699 Amb.Rz-7 stab2 | cₛgₛaₛaₛcca gga L ucCCUUCaagga L ucCGGG ugaacaa B | 11144 | |
| 701 | GUUCAGU G GUUCGUA | 2552 | 20184 | HBV-701 Amb.Rz-7 stab2 | uₛaₛcₛgₛaac gga L ucCCUUCaagga L ucCGGG acugaac B | 11145 | |
| 710 | UUCGUAG G GCUUUCC | 2553 | 20185 | HBV-710 Amb.Rz-7 stab2 | gₛgₛaₛaₛagc gga L ucCCUUCaagga L ucCGGG cuacgaa B | 11146 | |
| 1525 | CCACGG G GCGCAC | 2554 | 20186 | HBV-1525 Amb.Rz-6 stab2 | gₛuₛgₛcₛgc gga L ucCCUUCaagga L ucCGGG ccgugg B | 11147 | |
| 1624 | CACCGU G AACGCC | 2555 | 20187 | HBV-1624 Amb.Rz-6 stab2 | gₛgₛcₛgₛuu gga L ucCCUUCaagga L ucCGGG acggug B | 11148 | |
| 2069 | CACUCA G GCAAGC | 2556 | 20188 | HBV-2069 Amb.Rz-6 stab2 | gₛcₛuₛuₛgc gga L ucCCUUCaagga L ucCGGG ugagug B | 11149 | |
| 2375 | CCUAGAA G AAGAACU | 2557 | 20189 | HBV-2375 Amb.Rz-7 stab2 | aₛgₛuₛuₛcuu gga L ucCCUUCaagga L ucCGGG uucuagg B | 11150 | |
| 2476 | AUAAGGU G GGAAACU | 2558 | 20190 | HBV-2476 Amb.Rz-7 stab2 | aₛgₛuₛuₛucc gga L ucCCUUCaagga L ucCGGG accuuau B | 11151 | |
| 65 | CCUGCUG G UGGCUCC | 2500 | 20191 | HBV-65 Amb.Rz-7 stab2 | gₛgₛaₛgₛcca gga L ucCCUUCaagga L ucCGGG cagcagg B | 11152 | |
| 67 | GCUGGU G GCUCCA | 2559 | 20192 | HBV-67 Amb.Rz-6 stab2 | uₛgₛgₛaₛgc gga L ucCCUUCaagga L ucCGGG accagc B 11153 | | |
| 198 | GCUCGU G UUACAG | 2502 | 20193 | HBV-198 Amb.Rz-6 stab2 | cₛuₛgₛuₛaa gga L ucCCUUCaagga L ucCGGG acgagc B | 11154 | |
| 260 | GACUCGU G GUGGACU | 2560 | 20194 | HBV-260 Amb.Rz-7 stab2 | aₛgₛuₛcₛcac gga L ucCCUUCaagga L ucCGGG acgaguc B | 11155 | |
| 263 | UCGUGGU G GACUUCU | 2561 | 20195 | HBV-263 Amb.Rz-7 stab2 | aₛgₛaₛaₛguc gga L ucCCUUCaagga L ucCGGG accacga B | 11156 | |
| 377 | AUCGCU G GAUGUG | 2562 | 20196 | HBV-377 Amb.Rz-6 stab2 | cₛaₛcₛaₛuc gga L ucCCUUCaagga L ucCGGG agcgau B | 11157 | |
| 378 | UCGCUG G AUGUGU | 2563 | 20197 | HBV-378 Amb.Rz-6 stab2 | aₛcₛaₛcₛau gga L ucCCUUCaagga L ucCGGG cagcga B | 11158 | |
| 476 | CCGUUU G UCCUCU | 2512 | 20198 | HBV-476 Amb.Rz-6 stab2 | aₛgₛaₛgₛga gga L ucCCUUCaagga L ucCGGG aaacgg B | 11159 | |
| 651 | GGGAGUG G GCCUCAG | 2564 | 20199 | HBV-651 Amb.Rz-7 stab2 | cₛuₛgₛaₛggc gga L ucCCUUCaagga L ucCGGG cacuccc B | 11160 | |
| 677 | UGGCUCA G UUUACUA | 2514 | 20200 | HBV-677 Amb.Rz-7 stab2 | uₛaₛgₛuₛaaa gga L ucCCUUCaagga L ucCGGG ugagcca B | 11161 | |
| 685 | UUUACUA G UGCCAUU | 2516 | 20201 | HBV-685 Amb.Rz-7 stab2 | aₛaₛuₛgₛgca gga L ucCCUUCaagga L ucCGGG uaguaaa B | 11162 | |
| 702 | UUCAGUG G UUCGUAG | 2520 | 20202 | HBV-702 Amb.Rz-7 stab2 | cₛuₛaₛcₛgaa gga L ucCCUUCaagga L ucCGGG cacugaa B | 11163 | |
| 709 | GUUCGUA G GGCUUUC | 2565 | 20203 | HBV-709 Amb.Rz-7 stab2 | gₛaₛaₛaₛgcc gga L ucCCUUCaagga L ucCGGG uacgaac B | 11164 | |
| 710 | UCGUAG G GCUUUC | 2566 | 20204 | HBV-710 Amb.Rz-6 stab2 | gₛaₛaₛaₛgc gga L ucCCUUCaagga L ucCGGG cuacga B | 11165 | |
| 747 | UAUGGAU G AUGUGGU | 2567 | 20205 | HBV-747 Amb.Rz-7 stab2 | aₛcₛcₛaₛcau gga L ucCCUUCaagga L ucCGGG auccaua B | 11166 | |
| 1557 | CCGUCU G UGCCUU | 2530 | 20206 | HBV-1557 Amb.Rz-6 stab2 | aₛaₛgₛgₛca gga L ucCCUUCaagga L ucCGGG agacgg B | 11167 | |
| 1881 | CCAAGCU G UGCCUUG | 2536 | 20207 | HBV-1881 Amb.Rz-7 stab2 | cₛaₛaₛgₛgca gga L ucCCUUCaagga L ucCGGG agcuugg B | 11168 | |
| 2347 | ACUGUU G UUAGAC | 2540 | 20208 | HBV-2347 Amb.Rz-6 stab2 | gₛuₛcₛuₛaa gga L ucCCUUCaagga L ucCGGG aacagu B | 11169 | |
| 2375 | CUAGAA G AAGAAC | 2568 | 20209 | HBV-2375 Amb.Rz-6 stab2 | gₛuₛuₛcₛuu gga L ucCCUUCaagga L ucCGGG uucuag B | 11170 | |
| 2378 | GAAGAA G AACUCC | 2569 | 20210 | HBV-2378 Amb.Rz-6 stab2 | gₛgₛaₛgₛuu gga L ucCCUUCaagga L ucCGGG uucuuc B | 11171 | |
| 2423 | CGUCGCA G AAGAUCU | 2570 | 20211 | HBV-2423 Amb.Rz-7 stab2 | aₛgₛaₛuₛcuu gga L ucCCUUCaagga L ucCGGG ugcgacg B | 11172 | |
| 2426 | GCAGAA G AUCUCA | 2571 | 20212 | HBV-2426 Amb.Rz-6 stab2 | uₛgₛaₛgₛau gga L ucCCUUCaagga L ucCGGG uucugc B | 11173 | |
| 2426 | CGCAGAA G AUCUCAA | 2572 | 20213 | HBV-2426 Amb.Rz-7 stab2 | uₛuₛgₛaₛgau gga L ucCCUUCaagga L ucCGGG uucugcg B | 11174 | |
| 2476 | UAAGGU G GGAAAC | 2573 | 20214 | HBV-2476 Amb.Rz-6 stab2 | gₛuₛuₛuₛcc gga L ucCCUUCaagga L ucCGGG accuua B | 11175 | |
| 2477 | UAAGGUG G GAAACUU | 2574 | 20215 | HBV-2477 Amb.Rz-7 stab2 | aₛaₛgₛuₛuuc gga L ucCCUUCaagga L ucCGGG caccuua B | 11176 | |
| 2477 | AAGGUG G GAAACU | 2575 | 20216 | HBV-2477 Amb.Rz-6 stab2 | aₛgₛuₛuₛuc gga L ucCCUUCaagga L ucCGGG caccuu B | 11177 | |
| 1607 | UGCACGU C GCAUGGA | 2576 | 20697 | HBV-1607 Rz-7 allyl stab1 (7/4) | uₛcₛcₛaₛugc cUGAuGaggccguuaggccGaa Acgugca B | | |
| 1887 | GUGCCU U GGGUGG | 2577 | 20698 | HBV-1887 Rz-6 allyl stab1 (6/4) | cₛcₛaₛcₛcc cUGAuGaggccguuaggccGaa Aggcac B | | |
| 1607 | GCACGU C GCAUGG | 2374 | 20699 | HBV-1607 Rz-6 allyl stab1 (6/3) | cₛcₛaₛuₛgc cUGAuGaggcguuagccGaa Acgugc B | | |
| 1607 | UGCACGU C GCAUGGA | 2576 | 20700 | HBV-1607 Rz-7 allyl stab1 (7/3) | uₛcₛcₛaₛugc cUGAuGaggcguuagccGaa Acgugca B | | |
| 1887 | GUGCCU U GGGUGG | 2577 | 20701 | HBV-1887 Rz-6 allyl stab1 (6/3) | cₛcₛaₛcₛcc cUGAuGaggcguuagccGaa Aggcac B | | |
| 1887 | UGUGCCU U GGGUGGC | 2420 | 20702 | HBV-1887 Rz-7 allyl stab1 (7/3) | gₛcₛcₛaₛccc cUGAuGaggcguuagccGaa Aggcaca B | | |
| 313 | CCAAAAU U CGCAGUC | 2346 | 22798 | HBV-313 Rz-7 Ome stab1 | gacugcg CUGAUGAggccguuaggccGAA Auuuugg B | 11184 | |
| 408 | UCUUCCU C UGCAUCC | 2349 | 22799 | HBV-408 Rz-7 Ome stab1 | ggaugca CUGAUGAggccguuaggccGAA Aggaaga B | 11185 | |
| 1756 | AGGAGGU U AGGUUAA | 2353 | 22800 | HBV-1756 Rz-7 Ome stab1 | uuaaccu CUGAUGAggccguuaggccGAA Accuccu B | 11186 | |
| 10 | CUCCACC A CUUUCCA | 2356 | 22770 | HBV-10 CHz-7 Ome stab1 | uggaaag CUGAUGAggccguuaggccGAA Iguggag B | 11187 | |
| 335 | UCCAGUC A CUCACCA | 2357 | 22771 | HBV-335 CHz-7 Ome stab1 | uggugag CUGAUGAggccguuaggccGAA Iacugga B | 11188 | |
| 273 | CUUCUCU C AAUUUUC | 2399 | | 22645 | HBV-273 Rz-7 allyl stab1 (7/3-GUUA) | gₛaₛaₛaₛauu cUGAuGagccguuaggcGaa Agagaag B | 11189 |
| 273 | CUUCUCU C AAUUUUC | 2399 | 22646 | HBV-273 Rz-7 allyl stab1 (7/4-GUUA) | gₛaₛaₛaₛauu cUGAuGaggccguuaggccGaa Agagaag B | 11190 | |
| 273 | CUUCUCU C AAUUUUC | 2399 | 22648 | HBV-273 Rz-7 allyl stab1 (7/3-GAAA) | gₛaₛaₛaₛauu cUGAuGagccgaaaggcGaa Agagaag B | 11191 | |
| 273 | CUUCUCU C AAUUUUC | 2578 | 22650 | HBV-273 Rz-7 allyl stab1 (7/4-GAAA) | gₛaₛaₛaₛauu cUGAuGaggccgaaaggccGaa Agagaag B | 11192 | |
| 273 | UUCUCU C AAUUUU | | 22644 | HBV-273 Rz-6 allyl stab1 (6/3-GUUA) | aₛaₛaₛaₛuu cUGAuGagccguuaggcGaa Agagaa B | 11193 | |
| 273 | UUCUCU C AAUUUU | | 22647 | HBV-273 Rz-6 allyl stab1 (6/3-GAAA) | aₛaₛaₛaₛuu cUGAuGagccgaaaggcGaa Agagaa B | 11194 | |
| 273 | UUCUCU C AAUUUU | 2579 | 22649 | HBV-273 Rz-6 allyl stab1 (6/4-GAAA) | aₛaₛaₛaₛuu cUGAuGaggccgaaaggccGaa Agagaa B | 11195 | |
| 350 | ACCUGUU G UCCUCCA | 2580 | 22714 | HBV-350 GCl.Rz-7 5ribo stab3 | uggagga uGAUg gcauGcacuaugc gCg aacaggu B | 11196 | |
| 1253 | CCUUUGU G UCUCCUC | 2581 | 22715 | HBV-1253 GCl.Rz-7 5ribo stab3 | gaggaga uGAUg gcauGcacuaugc gCg acaaagg B | 11197 | |
| 1856 | UGUUCAU G UCCUACU | 2582 | 22716 | HBV-1856 GCl.Rz-7 5ribo stab3 | aguagga uGAUg gcauGcacuaugc gCg augaaca B | 11198 | |
| 1966 | GCCUUCU G ACUUCUU | 2583 | 22717 | HBV-1966 GCl.Rz-7 5ribo stab3 | aagaagu uGAUg gcauGcacuaugc gCg agaaggc B | 11199 | |
| 3132 | UCCUCCU G CCUCCAC | 2584 | 22718 | HBV-3132 GCl.Rz-7 5ribo stab3 | guggagg uGAUg gcauGcacuaugc gCg aggagga B | 11200 | |
| 332 | AUCUCCA G UCACUCA | 2579 | 22742 | HBV-332 Zin.Rz-7 amino stab4 | ugaguga gccgaaaggCgagugaGGuCu uggagau B | 11201 | |
| 350 | ACCUGUU G UCCUCCA | 2585 | 22743 | HBV-350 Zin.Rz-7 amino stab4 | uggagga gccgaaaggCgagugaGGuCu aacaggu B | 11202 | |
| 410 | UUCCUCU G CAUCCUG | 2580 | 22744 | HBV-410 Zin.Rz-7 amino stab4 | caggaug gccgaaaggCgagugaGGuCu agaggaa B | 11203 | |
| 1253 | CCUUUGU G UCUCCUC | 2586 | 22745 | HBV-1253 Zin.Rz-7 amino stab4 | gaggaga gccgaaaggCgagugaGGuCu acaaagg B | 11204 | |
| 1754 | GGAGGAG G UUAGGUU | 2587 | 22746 | HBV-1754 Zin.Rz-7 amino stab4 | aaccuaa gccgaaaggCgagugaGGuCu cuccucc B | 11205 | |
| 407 | AUCUUCC U CUGCAUC | 2588 | 22772 | HBV-407 CHz-7 Ome stab1 | gaugcag CUGAUGAggccguuaggccGAA Igaagau B | 11206 | |
| 1848 | UCAUCUC A UGUUCAU | 2589 | 22773 | HBV-1848 CHz-7 Ome stab1 | augaaca CUGAUGAggccguuaggccGAA Iagauga B | 11207 | |
| 3124 | GCAGCUC C UCCUCCU | 2590 | 22774 | HBV-3124 CHz-7 Ome stab1 | aggagga CUGAUGAggccguuaggccGAA Iagcugc B | 11208 | |
| 2165 | GUCAGCU A UGUCAAC | 2591 | 22801 | HBV-2165 Rz-7 Ome stab1 | guugaca CUGAUGAggccguuaggccGAA Agcugac B | 11209 | |
| 2706 | CCGUAUU A UCCAGAG | 2579 | 22802 | HBV-2706 Rz-7 Ome stab1 | cucugga CUGAUGAggccguuaggccGAA Aauacgg B | 11210 | |
| 350 | ACCUGUU G UCCUCCA | 2584 | 22966 | HBV-350 Dz-7 stab3 | uggagga GGCTAGCTACAACGA aacaggu B | 11211 | |
| 332 | AUCUCCA G UCACUCA | 2592 | 22967 | HBV-332 Dz-7 stab3 | ugaguga GGCTAGCTACAACGA uggagau B | 11212 | |
| 1840 | CUGCCUA A UCAUCUC | 2593 | 22968 | HBV-1840 Dz-7 stab3 | gagauga GGCTAGCTACAACGA uaggcag B | 11213 | |
| 358 | UCCUCCA A UUUGUCC | 2580 | 22969 | HBV-358 Dz-7 stab3 | ggacaaa GGCTAGCTACAACGA uggagga B | 11214 | |
| 1253 | CCUUUGU G UCUCCUC | 2346 | 22970 | HBV-1253 Dz-7 stab3 | gaggaga GGCTAGCTACAACGA acaaagg B | 11215 | |
| | | | 20599 | SAC | cₛgₛaₛuₛgu cUAGuGacccgaaagggGaa AagaggB | 10834 | |

UPPER CASE = RIBO
UNDERLINE = DEOXY
lower case = 2′-O-methyl
I = inosine
s = phosphorothioate linkage
B= inverted deoxyabasic residue
U= 2′-deoxy-2′-C-allyl Uridine
U = 2′-deoxy-2′-amino Uridine
C = 2′-deoxy-2′-amino Cytidine

[0560] TABLE XII
Group Designation and Dosage levels
for HBV transgenic mouse study

| | | | Number | Duration of |
|---|---|---|---|---|
| Group | Compound | Dose | of Mice | Treatment |
| 1 | RPI.18341 | 100 mg/kg/day* | 10 F | 14 days |
| | (site 273) | | | |
| 2 | RPI.18371 | 100 mg/kg/day* | 10 F | 14 days |
| | (site 1833) | | | |
| 3 | RPI.18418 | 100 mg/kg/day* | 10 F | 14 days |
| | (site 1873) | | | |
| 4 | RPI.18372 | 100 mg/kg/day* | 10 F | 14 days |
| | (site 1874) | | | |
| 5 | Saline control | 100 mg/kg/day* | 10 F | 14 days |
| 6 | Untreated | | 10 F | 0 days |

*administered via sc infusion using Alzet ® mini-osmotic pumps

[0561] TABLE XIII
GROUP DESIGNATION AND DOSAGE LEVELS FOR HBV
TRANSGENIC MOUSE STUDY

| | | | | Duration |
|---|---|---|---|---|
| | | | Number | of |
| Group | Compound | Dose | of Mice | Treatment |
| 1 | RPI.18341 | 100 mg/kg/day* | 15 (M or F) | 14 days |
| | (site 273) | | | |
| 2 | RPI.18341 | 30 mg/kg/day* | 15 (M or F) | 14 days |
| | (site 273) | | | |
| 3 | RPI.18341 | 10 mg/kg/day* | 15 (M or F) | 14 days |
| | (site 273) | | | |
| 4 | RPI.18371 | 100 mg/kg/day* | 15 (M or F) | 14 days |
| | site 1833 | | | |
| 5 | RPI.18371 | 30 mg/kg/day* | 15 (M or F) | 14 days |
| | site 1833 | | | |
| 6 | RPI.18371 | 10 mg/kg/day* | 15 (M or F) | 14 days |
| | site 1833 | | | |
| 7 | SAC (RPI.20599) | 100 mg/kg/day* | 15 (M or F) | 14 days |
| 8 | SAC (RPI.20599) | 30 mg/kg/day* | 15 (M or F) | 14 days |
| 9 | SAC (RPI.20599) | 10 mg/kg/day* | 15 (M or F) | 14 days |
| 10 | Saline control | 12 μl/day* | 15 (M or F) | 14 days |
| 11 | 3TC ® control | 50 mg/kg/day, | 15 (M or F) | 14 days |
| | | PO | | |

*administered via sc infusion using Alzet ® mini-osmotic pumps

[0562] TABLE XIV
HBV RT primer Decoy sequences

| | | |
|---|---|---|
| | | Seq ID |
| Length | Decoy Sequence | No. |

| | | |
|---|---|---|
| 4 | AUUC | 11216 |
| 4 | CAUU | 11217 |
| 4 | UCAU | 11218 |
| 4 | UUCA | 11219 |
| 5 | AUUCA | 11220 |
| 5 | CAUUC | 11221 |
| 5 | UCAUU | 11222 |
| 5 | UUCAU | 11223 |
| 6 | AUUCAU | 11224 |
| 6 | CAUUCA | 11225 |
| 6 | UCAUUC | 11226 |
| 6 | UUCAUU | 11227 |
| 7 | AUUCAUU | 11228 |
| 7 | CAUUCAU | 11229 |
| 7 | UCAUUCA | 11230 |
| 7 | UUCAUUC | 11231 |
| 8 | AUUCAUUC | 11232 |
| 8 | CAUUCAUU | 11233 |
| 8 | UCAUUCAU | 11234 |
| 8 | UUCAUUCA | 11235 |
| 9 | AUUCAUUCA | 11236 |
| 9 | CAUUCAUUC | 11237 |
| 9 | UCAUUCAUU | 11238 |
| 9 | UUCAUUCAU | 11239 |
| 10 | AUUCAUUCAU | 11240 |
| 10 | CAUUCAUUCA | 11241 |
| 10 | UCAUUCAUUC | 11242 |
| 10 | UUCAUUCAUU | 11243 |
| 11 | AUUCAUUCAUU | 11244 |
| 11 | CAUUCAUUCAU | 11245 |
| 11 | UCAUUCAUUCA | 11246 |
| 11 | UUCAUUCAUUC | 11247 |
| 12 | AUUCAUUCAUUC | 11248 |
| 12 | CAUUCAUUCAUU | 11249 |
| 12 | UCAUUCAUUCAU | 11250 |
| 12 | UUCAUUCAUUCA | 11251 |
| 13 | AUUCAUUCAUUCA | 11252 |
| 13 | CAUUCAUUCAUUC | 11253 |
| 13 | UCAUUCAUUCAUU | 11254 |
| 13 | UUCAUUCAUUCAU | 11255 |
| 14 | AUUCAUUCAUUCAU | 11256 |
| 14 | CAUUCAUUCAUUCA | 11257 |
| 14 | UCAUUCAUUCAUUC | 11258 |
| 14 | UUCAUUCAUUCAUU | 11259 |
| 15 | AUUCAUUCAUUCAUU | 11260 |
| 15 | CAUUCAUUCAUUCAU | 11261 |
| 15 | UCAUUCAUUCAUUCA | 11262 |
| 15 | UUCAUUCAUUCAUUC | 11263 |
| 16 | AUUCAUUCAUUCAUUC | 11264 |
| 16 | CAUUCAUUCAUUCAUU | 11265 |
| 16 | UCAUUCAUUCAUUCAU | 11266 |
| 16 | UUCAUUCAUUCAUUCA | 11267 |
| 17 | AUUCAUUCAUUCAUUCA | 11268 |
| 17 | CAUUCAUUCAUUCAUUC | 11269 |
| 17 | UCAUUCAUUCAUUCAUU | 11270 |
| 17 | UUCAUUCAUUCAUUCAU | 11271 |
| 18 | AUUCAUUCAUUCAUUCAU | 11272 |
| 18 | CAUUCAUUCAUUCAUUCA | 11273 |
| 18 | UCAUUCAUUCAUUCAUUC | 11274 |
| 18 | UUCAUUCAUUCAUUCAUU | 11275 |
| 19 | AUUCAUUCAUUCAUUCAUU | 11276 |
| 19 | CAUUCAUUCAUUCAUUCAU | 11277 |
| 19 | UCAUUCAUUCAUUCAUUCA | 11278 |
| 19 | UUCAUUCAUUCAUUCAUUC | 11279 |
| 20 | AUUCAUUCAUUCAUUCAUUC | 11280 |
| 20 | CAUUCAUUCAUUCAUUCAUU | 11281 |
| 20 | UCAUUCAUUCAUUCAUUCAU | 11282 |
| 20 | UUCAUUCAUUCAUUCAUUCA | 11283 |
| 21 | AUUCAUUCAUUCAUUCAUUCA | 11284 |
| 21 | CAUUCAUUCAUUCAUUCAUUC | 11285 |
| 21 | UCAUUCAUUCAUUCAUUCAUU | 11286 |
| 21 | UUCAUUCAUUCAUUCAUUCAU | 11287 |
| 22 | CAUUCAUUCAUUCAUUCAUUCA | 11288 |
| 22 | UCAUUCAUUCAUUCAUUCAUUC | 11289 |
| 22 | UUCAUUCAUUCAUUCAUUCAUU | 11290 |
| 23 | UCAUUCAUUCAUUCAUUCAUUCA | 11291 |
| 23 | UUCAUUCAUUCAUUCAUUCAUUC | 11292 |
| 24 | UUCAUUCAUUCAUUCAUUCAUUCA | 11293 |

[0563] TABLE XV

Synthetic Nucleic acid molecules

| | | | |
|---|---|---|---|
| RPI# | Alias | Sequence | SeqID |

| | | | |
|---|---|---|---|
| 24961 | HBV DR1 2′Oallyl P═S | gₛcₛaₛgₛaₛgₛgₛuₛgₛaₛaₛB | 11294 |
| 24997 | HBV DR1 2′Oallyl P═S control | aₛaₛgₛuₛgₛgₛaₛgₛaₛcₛgₛB | 11295 |
| | HBV 1866-1869 1 × 2′Oallyl | | |
| 24956 | P═S | uₛuₛcₛaₛB | 11296 |
| | HBV 1866-1869 1 × 2′Oallyl | | |
| 24992 | P═S control | aₛcₛuₛuₛB | 11297 |
| | HBV 1866-1869 2 × 2′Oallyl | | |
| 24941 | P═S | uₛuₛcₛaₛuₛuₛcₛaₛB | 11298 |
| | HBV 1866-1869 2 × 2′Oallyl | | |
| 24959 | P═S control | aₛcₛuₛuₛaₛcₛuₛuₛB | 11299 |
| | HBV 1866-1869 3 × 2′Oallyl | | |
| 24944 | P═S | uₛuₛcₛaₛuₛuₛcₛaₛuₛuₛcₛaₛB | 11300 |
| | HBV 1866-1869 3 × 2′Oallyl | | |
| 24962 | P═S control | aₛcₛuₛuₛaₛcₛuₛuₛaₛcₛuₛuₛB | 11301 |
| | HBV 1866-1869 4 × 2′Oallyl | | |
| 24945 | P═S | uₛuₛcₛaₛuₛuₛcₛaₛuₛuₛcₛaₛuₛuₛcₛaₛB | 11302 |
| | HBV 1866-1869 4 × 2′Oallyl | | |
| 24963 | P═S control | aₛcₛuₛuₛaₛcₛuₛuₛaₛcₛuₛuₛaₛcₛuₛuₛB | 11303 |
| 24938 | HBV 1866-1869 2′Oallyl P═S | uₛgₛaₛaₛB | 11304 |
| | HBV 1866-1869 2′Oallyl P═S | | |
| 24974 | control | aₛaₛgₛuₛB | 11305 |
| 24940 | HBV 1866-1872 2′Oallyl P═S | gₛcₛuₛuₛgₛaₛaₛB | 11306 |
| | HBV 1866-1872 2′Oallyl P═S | | |
| 24958 | control | aₛaₛgₛuₛuₛcₛgₛB | 11307 |
| 24943 | HBV 1866-1876 2′Oallyl P═S | gₛgₛaₛgₛgₛcₛuₛuₛgₛaₛaB | 11308 |
| | HBV 1866-1876 2′Oallyl P═S | | |
| 24979 | control | aₛaₛgₛuₛuₛcₛgₛgₛaₛgₛgₛB | 11309 |
| | | gₛaₛaₛauu cUGAuGaggccguuaggccGaa | |
| 18341 | HBV-273 UH.Rz-7 allyl stab1 | Agagaag B | 10887 |
| | HBV-273 UH.Rz-7 allyl stab1 | aₛaₛuₛgₛagg cUAGuGacgccguuaggcgGaa | |
| 24588 | inact3 scram1 (GUUA SAC) | Aaaugaa B | 11310 |
| 24929 | HBV 1866-1969 2′Omethyl | ugaaB | 11311 |
| | HBV 1866-1969 2′Omethyl | | |
| 24965 | control | aaguB | 11312 |
| 24934 | HBV 1866-1876 2′Omethyl | ggaggcuugaaB | 11313 |
| | HBV 1866-1876 2′Omethyl | | |
| 24970 | control | aaguucggaggB | 11314 |
| 24976 | HBV 1866-1872 2′Omethyl | gcuugaaB | 11315 |
| | HBV 1866-1872 2′Omethyl | | |
| 24949 | control | aaguucgB | 11316 |
| 24952 | HBV DR1 2′Omethyl | gcagaggugaaB | 11317 |
| 24988 | HBV DR1 2′Omethyl control | aaguggagacgB | 11318 |
| 24947 | HBV 1866-1869 1 × 2′Omethyl | uucaB | 11319 |
| | HBV 1866-1869 1 × 2′Omethyl | | |
| 24983 | control | acuuB | 11320 |
| 24986 | HBV 1866-1869 2 × 2′Omethyl | uucauucaB | 11321 |
| | HBV 1866-1869 2 × 2′Omethyl | | |
| 24950 | control | acuuacuuB | 11322 |
| 24989 | HBV 1866-1869 3 × 2′Omethyl | uucauucauucaB | 11323 |
| | HBV 1866-1869 3 × 2′Omethyl | | |
| 24953 | control | acuuacuuacuuB | 11324 |
| 24936 | HBV 1866-1869 4 × 2′Omethyl | uucauucauucauucaB | 11325 |
| | HBV 1866-1869 4 × 2′Omethyl | | |
| 24954 | control | acuuacuuacuuacuuB | 11326 |
| 25639 | HBV 5′ EnI pos OMe P═S | B uₛuₛuₛcₛuₛaₛaₛgₛuₛaₛaₛaₛcₛaₛgₛu B | 11327 |
| 25640 | HBV 5′ EnI neg OMe P═S | B aₛcₛuₛgₛuₛuₛuₛaₛcₛuₛuₛaₛgₛaₛaₛa B | 11328 |
| 25641 | HBV 5′ EnI sc OMe P═S | B aₛaₛgₛuₛaₛaₛcₛuₛcₛuₛaₛuₛgₛuₛuₛa B | 11329 |
| | | B | |
| | | uₛaₛcₛaₛuₛgₛaₛaₛcₛcₛuₛuₛuₛaₛcₛcₛcₛc | |
| 25642 | HBV 3′ EnI pos OMe P═S | B | 11330 |
| | | B gₛgₛgₛuₛaₛaₛaₛgₛgₛuₛuₛcₛaₛuₛgₛuₛa | |
| 25643 | HBV 3′ EnI neg OMe P═S | B | 11331 |
| | | B | |
| | | aₛcₛcₛuₛaₛuₛcₛgₛcₛcₛuₛaₛcₛuₛcₛuₛaₛa | |
| 25644 | HBV 3′ EnI pos sc OMe P═S | B | 11332 |
| | | B uₛgₛaₛuₛaₛgₛcₛgₛgₛaₛuₛgₛaₛgₛaₛuₛu | |
| 25645 | HBV 5′ EnI neg sc OMe P═S | B | 11333 |
| 25646 | HBV DR1 pos OMe P═s | B uₛuₛcₛaₛcₛcₛuₛcₛuₛgₛc B | 11334 |
| 25651 | HBV 5′ EnI pos Oallyl P═S | B uₛuₛuₛcₛuₛaₛaₛgₛuₛaₛaₛaₛcₛaₛgₛu B | 11335 |
| 25652 | HBV 5′ EnI neg Oallyl P═S | B aₛcₛuₛgₛuₛuₛuₛaₛcₛuₛuₛaₛgₛaₛaₛa B | 11336 |
| 25653 | HBV 5′ EnI sc Oallyl P═S | B aₛaₛgₛuₛaₛaₛcₛuₛcₛuₛaₛuₛgₛuₛuₛa B | 11337 |
| | | B | |
| | | uₛaₛcₛaₛuₛgₛaₛaₛcₛcₛuₛuₛuₛaₛcₛcₛcₛc | |
| 25654 | HBV 3′ EnI pos Oallyl P═S | B | 11338 |
| | | B gₛgₛgₛuₛaₛaₛaₛgₛgₛuₛuₛcₛaₛuₛgₛuₛa | |
| 25655 | HBV 3′ EnI neg Oallyl P═S | B | 11339 |
| | | B | |
| | | aₛcₛcₛuₛaₛuₛcₛgₛcₛcₛuₛaₛcₛuₛcₛuₛaₛa | |
| 25656 | HBV 3′ EnI pos sc Oallyl P═S | B | 11340 |
| | | B uₛgₛaₛuₛaₛgₛcₛgₛgₛaₛuₛgₛaₛgₛaₛuₛu | |
| 25657 | HBV 5′ EnI neg sc Oallyl P═S | B | 11341 |
| 25658 | HBV DR1 pos Oallyl P═S | B uₛuₛcₛaₛcₛcₛuₛcₛuₛgₛc B | 11342 |

a, g, c, u = all 2′-O-allyl
a, g, c, u = 2′-O-methyl
U = 2′-C-allyl Uridine
S = phosphorothioate
B = inverted deoxyabasic

[0564] TABLE XVI
Comparison of Tumor Weight to HBV
DNA concentration in mice
inoculated with HepG2.2.15 cells

| Time point | HBV DNA | Tumor weight |
|---|---|---|
| (days) | copies/mL serum | (milligrams) |
| 1 | Below detection | No tumor |
| 1 | Below detection | No tumor |
| 1 | Below detection | No tumor |
| 1 | Below detection | No tumor |
| 7 | Below detection | No tumor |
| 7 | Below detection | No tumor |
| 7 | Below detection | No tumor |
| 7 | Below detection | No tumor |
| 14 | Below detection | No tumor |
| 14 | Below detection | No tumor |
| 14 | Below detection | No tumor |
| 14 | Below detection | No tumor |
| 35 | 356 | 33 |
| 35 | 125083 | 167 |
| 35 | 578 | No tumor |
| 35 | 386 | 56 |
| 42 | 493 | No tumor |
| 42 | 114431 | 790 |
| 42 | 94025 | 359 |
| 42 | 111882 | 647 |
| 49 | 189885 | 816 |
| 49 | Below detection | No tumor |
| 49 | 293 | 90 |
| 49 | 41477 | 2521 |

[0565] TABLE XVII
Comparison of Tumor Weight to
HBV DNA concentration in mice
inoculated with G418 resistant HepG2.2.15 cells

| Time point | HBV DNA copies/mL | Tumor weight |
|---|---|---|
| (days) | serum | (milligrams) |
| 37 | 7000 | 1120.0 |
| 37 | no sample | no sample |
| 37 | 400000 | 1962.3 |
| 37 | 26000 | 558.5 |
| 37 | 380000 | 2286.0 |
| 37 | 100 | 317.2 |
| 37 | 52000 | 1429.0 |
| 37 | 100 | 427.4 |
| 37 | 26000 | 813.2 |
| 37 | 1400 | 631.6 |
| 37 | 186000 | 1101.5 |
| 37 | 134000 | 1573.0 |
| 37 | 17800 | 1040.0 |
| 37 | 16600 | 1327.2 |
| 37 | 8200 | 275.7 |
| 37 | 68000 | 632.8 |
| 37 | 24000 | 1090.0 |
| 37 | 58000 | 1082.7 |
| 37 | 12400 | 1116.3 |
| 37 | 100 | 763.3 |

[0566] TABLE XVIII

HCV DNAzyme and Substrate Sequence

| | | | | |
|---|---|---|---|---|
| | | SEQ | | SEQ |
| Pos | Substrate | ID | DNAZYME | ID |

| | | | | |
|---|---|---|---|---|
| 10 | UGGGGGCG A CACUCCAC | 2594 | GTGGAGTG GGCTAGCTACAACGA CGCCCCCA | 11343 |
| 12 | GGGGCGAC A CUCCACCA | 2595 | TGGTGGAG GCCTAGCTACAACGA GTCGCCCC | 11344 |
| 17 | GACACUCC A CCAUAGAU | 2596 | ATCTATGG GGCTAGCTACAACGA CGAGTGTC | 11345 |
| 20 | ACUCCACC A UAGAUCAC | 2597 | GTGATCTA GGCTAGCTACAACGA GGTGGAGT | 11346 |
| 24 | CACCAUAG A UCACUCCC | 2598 | GGGAGTGA GGCTAGCTACAACGA CTATGGTG | 11347 |
| 27 | CAUAGAUC A CUCCCCUG | 2599 | CAGGGGAG GGCTAGCTACAACGA GATCTATG | 11348 |
| 35 | ACUCCCCU G UGAGGAAC | 2600 | GTTCCTCA GGCTAGCTACAACGA AGGGGAGT | 11349 |
| 42 | UGUGAGGA A CUACUGUC | 2601 | GACAGTAG GGCTAGCTACAACGA TCCTCACA | 11350 |
| 45 | GAGGAACU A CUGUCUUC | 2602 | GAAGACAG GGCTAGCTACAACGA AGTTCCTC | 11351 |
| 48 | GAACUACU G UCUUCACG | 2603 | CGTGAAGA GGCTAGCTACAACGA AGTAGTTC | 11352 |
| 54 | CUGUCUUC A CGCAGAAA | 2604 | TTTCTGCG GGCTAGCTACAACGA GAAGACAG | 11353 |
| 56 | GUCUUCAC G CAGAAAGC | 2605 | GCTTTCTG GGCTAGCTACAACGA GTGAAGAC | 11354 |
| 63 | CGCAGAAA G CGUCUAGC | 2606 | GCTAGACG GGCTAGCTACAACGA TTTCTGCG | 11355 |
| 65 | CAGAAAGC G UCUAGCCA | 2607 | TGGCTAGA GGCTAGCTACAACGA GCTTTCTG | 11356 |
| 70 | AGCGUCUA G CCAUGGCG | 2608 | CGCCATGG GGCTAGCTACAACGA TAGACGCT | 11357 |
| 73 | GUCUAGCC A UGGCGUUA | 2609 | TAACGCCA GGCTAGCTACAACGA GGCTAGAC | 11358 |
| 76 | UAGCCAUG G CGUUAGUA | 2610 | TACTAACG GGCTAGCTACAACGA CATGGCTA | 11359 |
| 78 | GCCAUGGC G UUAGUAUG | 2611 | CATACTAA GGCTAGCTACAACGA GCCATGGC | 11360 |
| 82 | UGGCGUUA G UAUGAGUG | 2612 | CACTCATA GGCTAGCTACAACGA TAACGCCA | 11361 |
| 84 | GCGUUAGU A UGAGUGUC | 2613 | GACACTCA GGCTAGCTACAACGA ACTAACGC | 11362 |
| 88 | UAGUAUGA G UGUCGUGC | 2614 | GCACGACA GGCTAGCTACAACGA TCATACTA | 11363 |
| 90 | GUAUGAGU G UCGUGCAG | 2615 | CTGCACGA GGCTAGCTACAACGA ACTCATAC | 11364 |
| 93 | UGAGUGUC G UGCAGCCU | 2616 | AGGCTGCA GGCTAGCTACAACGA GACACTCA | 11365 |
| 95 | AGUGUCGU G CAGCCUCC | 2617 | GGAGGCTG GGCTAGCTACAACGA ACGACACT | 11366 |
| 98 | GUCGUGCA G CCUCCAGG | 2618 | CCTGGAGG GGCTAGCTACAACGA TGCACGAC | 11367 |
| 107 | CCUCCAGG A CCCCCCCU | 2619 | AGGGGGGG GGCTAGCTACAACGA CCTGGAGG | 11368 |
| 125 | CCGGGAGA G CCAUAGUG | 2620 | CACTATGG GGCTAGCTACAACGA TCTCCCGG | 11369 |
| 128 | GGAGAGCC A UAGUGGUC | 2621 | GACCACTA GGCTAGCTACAACGA GGCTCTCC | 11370 |
| 131 | GAGCCAUA G UGGUCUGC | 2622 | GCAGACCA GGCTAGCTACAACGA TATGGCTC | 11371 |
| 134 | CCAUAGUG G UCUGCGGA | 2623 | TCCGCAGA GGCTAGCTACAACGA CACTATGG | 11372 |
| 138 | AGUGGUCU G CGGAACCG | 2624 | CGGTTCCG GGCTAGCTACAACGA AGACCACT | 11373 |
| 143 | UCUGCGGA A CCGGUGAG | 2625 | CTCACCGG GGCTAGCTACAACGA TCCGCAGA | 11374 |
| 147 | CGGAACCG G UGAGUACA | 2626 | TGTACTCA GGCTAGCTACAACGA CGGTTCCG | 11375 |
| 151 | ACCGGUGA G UACACCGG | 2627 | CCGGTGTA GGCTAGCTACAACGA TCACCGGT | 11376 |
| 153 | CGGUGAGU A CACCGGAA | 2628 | TTCCGGTG GGCTAGCTACAACGA ACTCACCG | 11377 |
| 155 | GUGAGUAC A CCGGAAUU | 2629 | AATTCCGG GGCTAGCTACAACGA GTACTCAC | 11378 |
| 161 | ACACCGGA A UUGCCAGG | 2630 | CCTGGCAA GGCTAGCTACAACGA TCCGGTGT | 11379 |
| 164 | CCGGAAUU G CCAGGACG | 2631 | CGTCCTGG GGCTAGCTACAACGA AATTCCGG | 11380 |
| 170 | UUGCCAGG A CGACCGGG | 2632 | CCCGGTCG GGCTAGCTACAACGA CCTGGCAA | 11381 |
| 173 | CCAGGACG A CCGGGUCC | 2633 | GGACCCGG GGCTAGCTACAACGA CGTCCTGG | 11382 |
| 178 | ACGACCGG G UCCUUUCU | 2634 | AGAAAGGA GGCTAGCTACAACGA CCGGTCGT | 11383 |
| 190 | UUUCUUGG A UCAACCCG | 2635 | CGGGTTGA GGCTAGCTACAACGA CCAAGAAA | 11384 |
| 194 | UUGGAUCA A CCCGCUCA | 2636 | TGAGCGGG GGCTAGCTACAACGA TGATCCAA | 11385 |
| 198 | AUCAACCC G CUCAAUGC | 2637 | GCATTGAG GGCTAGCTACAACGA GGGTTGAT | 11386 |
| 203 | CCCGCUCA A UGCCUGGA | 2638 | TCCAGGCA GGCTAGCTACAACGA TGAGCGGG | 11387 |
| 205 | CGCUCAAU G CCUGGAGA | 2639 | TCTCCAGG GGCTAGCTACAACGA ATTGAGCG | 11388 |
| 213 | GCCUGGAG A UUUGGGCG | 2640 | CGCCCAAA GGCTAGCTACAACGA CTCCAGGC | 11389 |
| 219 | AGAUUUGG G CGUGCCCC | 2641 | GGGGCACG GGCTAGCTACAACGA CCAAATCT | 11390 |
| 221 | AUUUGGGC G UGCCCCCG | 2642 | CGGGGGCA GGCTAGCTACAACGA GCCCAAAT | 11391 |
| 223 | UUGGGCGU G CCCCCGCG | 2643 | CGCGGGGG GGCTAGCTACAACGA ACGCCCAA | 11392 |
| 229 | GUGCCCCC G CGAGACUG | 2644 | CAGTCTCG GGCTAGCTACAACGA GGGGGCAC | 11393 |
| 234 | CCCGCGAG A CUGCUAGC | 2645 | GCTAGCAG GGCTAGCTACAACGA CTCGCGGG | 11394 |
| 237 | GCGAGACU G CUAGCCGA | 2646 | TCGGCTAG GGCTAGCTACAACGA AGTCTCGC | 11395 |
| 241 | GACUGCUA G CCGAGUAG | 2647 | CTACTCGG GGCTAGCTACAACGA TAGCAGTC | 11396 |
| 246 | CUAGCCGA G UAGUGUUG | 2648 | CAACACTA GGCTAGCTACAACGA TCGGCTAG | 11397 |
| 249 | GCCGAGUA G UGUUGGGU | 2649 | ACCCAACA GGCTAGCTACAACGA TACTCGGC | 11398 |
| 251 | CGAGUAGU G UUGGGUCG | 2650 | CGACCCAA GGCTAGCTACAACGA ACTACTCG | 11399 |
| 256 | AGUGUUGG G UCGCGAAA | 2651 | TTTCGCGA GGCTAGCTACAACGA CCAACACT | 11400 |
| 259 | GUUGGGUC G CGAAAGGC | 2652 | GCCTTTCG GGCTAGCTACAACGA GACCCAAC | 11401 |
| 266 | CGCGAAAG G CCUUGUGG | 2653 | CCACAAGG GGCTAGCTACAACGA CTTTCGCG | 11402 |
| 271 | AAGGCCUU G UGGUACUG | 2654 | CAGTACCA GGCTAGCTACAACGA AAGGCCTT | 11403 |
| 274 | GCCUUGUG G UACUGCCU | 2655 | AGGCAGTA GGCTAGCTACAACGA CACAAGGC | 11404 |
| 276 | CUUGUGGU A CUGCCUGA | 2656 | TCAGGCAG GGCTAGCTACAACGA ACCACAAG | 11405 |
| 279 | GUGGUACU G CCUGAUAG | 2657 | CTATCAGG GGCTAGCTACAACGA AGTACCAC | 11406 |
| 284 | ACUGCCUG A UAGGGUGC | 2658 | GCACCCTA GGCTAGCTACAACGA CAGGCAGT | 11407 |
| 289 | CUGAUAGG G UGCUUGCG | 2659 | CGCAAGCA GGCTAGCTACAACGA CCTATCAG | 11408 |
| 291 | GAUAGGGU G CUUGCGAG | 2660 | CTCGCAAG GGCTAGCTACAACGA ACCCTATC | 11409 |
| 295 | GGGUGCUU G CGAGUGCC | 2661 | GGCACTCG GGCTAGCTACAACGA AAGCACCC | 11410 |
| 299 | GCUUGCGA G UGCCCCGG | 2662 | CCGGGGCA GGCTAGCTACAACGA TCGCAAGC | 11411 |
| 301 | UUGCGAGU G CCCCGGGA | 2663 | TCCCGGGG GGCTAGCTACAACGA ACTCGCAA | 11412 |
| 311 | CCCGGGAG G UCUCGUAG | 2664 | CTACGAGA GGCTAGCTACAACGA CTCCCGGG | 11413 |
| 316 | GAGGUCUC G UAGACCGU | 2665 | ACGGTCTA GGCTAGCTACAACGA GAGACCTC | 11414 |
| 320 | UCUCGUAG A CCGUGCAC | 2666 | GTGCACGG GGCTAGCTACAACGA CTACGAGA | 11415 |
| 323 | CGUAGACC G UGCACCAU | 2667 | ATGGTGCA GGCTAGCTACAACGA GGTCTACG | 11416 |
| 325 | UAGACCGU G CACCAUGA | 2668 | TCATGGTG GGCTAGCTACAACGA ACGGTCTA | 11417 |
| 327 | GACCGUGC A CCAUGAGC | 2669 | GCTCATGG GGCTAGCTACAACGA GCACGGTC | 11418 |
| 330 | CGUGCACC A UGAGCACG | 2670 | CGTGCTCA GGCTAGCTACAACGA GGTGCACG | 11419 |
| 334 | CACCAUGA G CACGAAUC | 2671 | GATTCGTG GGCTAGCTACAACGA TCATGGTG | 11420 |
| 336 | CCAUGAGC A CGAAUCCU | 2672 | AGGATTCG GGCTAGCTACAACGA GCTCATGG | 11421 |
| 340 | GAGCACGA A UCCUAAAC | 2673 | GTTTAGGA GGCTAGCTACAACGA TCGTGCTC | 11422 |
| 347 | AAUCCUAA A CCUCAAAG | 2674 | CTTTGAGG GGCTAGCTACAACGA TTAGGATT | 11423 |
| 360 | AAAGAAAA A CCAAACGU | 2675 | ACGTTTGG GGCTAGCTACAACGA TTTTCTTT | 11424 |
| 365 | AAAACCAA A CGUAACAC | 2676 | GTGTTACG GGCTAGCTACAACGA TTGGTTTT | 11425 |
| 367 | AACCAAAC G UAACACCA | 2677 | TGGTGTTA GGCTAGCTACAACGA GTTTGGTT | 11426 |
| 370 | CAAACGUA A CACCAACC | 2678 | GGTTGGTG GGCTAGCTACAACGA TACGTTTG | 11427 |
| 372 | AACGUAAC A CCAACCGC | 2679 | GCGGTTGG GGCTAGCTACAACGA GTTACGTT | 11428 |
| 376 | UAACACCA A CCGCCGCC | 2680 | GGCGGCGG GGCTAGCTACAACGA TGGTGTTA | 11429 |
| 379 | CACCAACC G CCGCCCAC | 2681 | GTGGGCGG GGCTAGCTACAACGA GGTTGGTG | 11430 |
| 382 | CAACCGCC G CCCACAGG | 2682 | CCTGTGGG GGCTAGCTACAACGA GGCGGTTG | 11431 |
| 386 | CGCCGCCC A CAGGACGU | 2683 | ACGTCCTG GGCTAGCTACAACGA GGGCGGCG | 11432 |
| 391 | CCCACAGG A CGUCAAGU | 2684 | ACTTGACG GGCTAGCTACAACGA CCTGTGGG | 11433 |
| 393 | CACAGGAC G UCAAGUUC | 2685 | GAACTTGA GGCTAGCTACAACGA GTCCTGTG | 11434 |
| 398 | GACGUCAA G UUCCCGGG | 2686 | CCCGGGAA GGCTAGCTACAACGA TTGACGTC | 11435 |
| 406 | GUUCCCGG G CGGUGGUC | 2687 | GACCACCG GGCTAGCTACAACGA CCGGGAAC | 11436 |
| 409 | CCCGGGCG G UGGUCAGA | 2688 | TCTGACCA GGCTAGCTACAACGA CGCCCGGG | 11437 |
| 412 | GGGCGGUG G UCAGAUCG | 2689 | CGATCTGA GGCTAGCTACAACGA CACCGCCC | 11438 |
| 417 | GUGGUCAG A UCGUUGGU | 2690 | ACCAACGA GGCTAGCTACAACGA CTGACCAC | 11439 |
| 420 | GUCAGAUC G UUGGUGGA | 2691 | TCCACCAA GGCTAGCTACAACGA GATCTGAC | 11440 |
| 424 | GAUCGUUG G UGGAGUUU | 2692 | AAACTCCA GGCTAGCTACAACGA CAACGATC | 11441 |
| 429 | UUGGUGGA G UUUACCUG | 2693 | CAGGTAAA GGCTAGCTACAACGA TCCACCAA | 11442 |
| 433 | UGGAGUUU A CCUGUUGC | 2694 | GCAACAGG GGCTAGCTACAACGA AAACTCCA | 11443 |
| 437 | GUUUACCU G UUGCCGCG | 2695 | CGCGGCAA GGCTAGCTACAACGA AGGTAAAC | 11444 |
| 440 | UACCUGUU G CCGCGCAG | 2696 | CTGCGCGG GGCTAGCTACAACGA AACAGGTA | 11445 |
| 443 | CUGUUGCC G CGCAGGGG | 2697 | CCCCTGCG GGCTAGCTACAACGA GGCAACAG | 11446 |
| 445 | GUUGCCGC G CAGGGGCC | 2698 | GGCCCCTG GGCTAGCTACAACGA GCGGCAAC | 11447 |
| 451 | GCGCAGGG G CCCCAGGU | 2699 | ACCTGGGG GGCTAGCTACAACGA CCCTGCGC | 11448 |
| 458 | GGCCCCAG G UUGGGUGU | 2700 | ACACCCAA GGCTAGCTACAACGA CTGGGGCC | 11449 |
| 463 | CAGGUUGG G UGUGCGCG | 2701 | CGCGCACA GGCTAGCTACAACGA CCAACCTG | 11450 |
| 465 | GGUUGGGU G UGCGCGCG | 2702 | CGCGCGCA GGCTAGCTACAACGA ACCCAACC | 11451 |
| 467 | UUGGGUGU G CGCGCGAC | 2703 | GTCGCGCG GGCTAGCTACAACGA ACACCCAA | 11452 |
| 469 | GGGUGUGC G CGCGACUA | 2704 | TAGTCGCG GGCTAGCTACAACGA GCACACCC | 11453 |
| 471 | GUGUGCGC G CGACUAGG | 2705 | CCTAGTCG GGCTAGCTACAACGA GCGCACAC | 11454 |
| 474 | UGCGCGCG A CUAGGAAG | 2706 | CTTCCTAG GGCTAGCTACAACGA CGCGCGCA | 11455 |
| 483 | CUAGGAAG A CUUCCGAG | 2707 | CTCGGAAG GGCTAGCTACAACGA CTTCCTAG | 11456 |
| 491 | ACUUCCGA G CGGUCGCA | 2708 | TGCGACCG GGCTAGCTACAACGA TCGGAAGT | 11457 |
| 494 | UCCGAGCG G UCGCAACC | 2709 | GGTTGCGA GGCTAGCTACAACGA CGCTCGGA | 11458 |
| 497 | GAGCGGUC G CAACCUCG | 2710 | CGAGGTTG GGCTAGCTACAACGA GACCGCTC | 11459 |
| 500 | CGGUCGCA A CCUCGUGG | 2711 | CCACGAGG GGCTAGCTACAACGA TGCGACCG | 11460 |
| 505 | GCAACCUC G UGGAAGGC | 2712 | GCCTTCCA GGCTAGCTACAACGA GAGGTTGC | 11461 |
| 512 | CGUGGAAG G CGACAACC | 2713 | GGTTGTCG GGCTAGCTACAACGA CTTCCACG | 11462 |
| 515 | GGAAGGCG A CAACCUAU | 2714 | ATAGGTTG GGCTAGCTACAACGA CGCCTTCC | 11463 |
| 518 | AGGCGACA A CCUAUCCC | 2715 | GGGATAGG GGCTAGCTACAACGA TGTCGCCT | 11464 |
| 522 | GACAACCU A UCCCCAAG | 2716 | CTTGGGGA GGCTAGCTACAACGA AGGTTGTC | 11465 |
| 531 | UCCCCAAG G CUCGCCGG | 2717 | CCGGCGAG GGCTAGCTACAACGA CTTGGGGA | 11466 |
| 535 | CAAGGCUC G CCGGCCCG | 2718 | CGGGCCGG GGCTAGCTACAACGA GAGCCTTG | 11467 |
| 539 | GCUCGCCG G CCCGAGGG | 2719 | CCCTCGGG GGCTAGCTACAACGA CGGCGAGC | 11468 |
| 547 | GCCCGAGG G CAGGGCCU | 2720 | AGGCCCTG GGCTAGCTACAACGA CCTCGGGC | 11469 |
| 552 | AGGGCAGG G CCUGGGCU | 2721 | AGCCCAGG GGCTAGCTACAACGA CCTGCCCT | 11470 |
| 558 | GGGCCUGG G CUCAGCCC | 2722 | GGGCTGAG GGCTAGCTACAACGA CCAGGCCC | 11471 |
| 563 | UGGGCUCA G CCCGGGUA | 2723 | TACCCGGG GGCTAGCTACAACGA TGAGCCCA | 11472 |
| 569 | CAGCCCGG G UACCCUUG | 2724 | CAAGGGTA GGCTAGCTACAACGA CCGGGCTG | 11473 |
| 571 | GCCCGGGU A CCCUUGGC | 2725 | GCCAAGGG GGCTAGCTACAACGA ACCCGGGC | 11474 |
| 578 | UACCCUUG G CCCCUCUA | 2726 | TAGAGGGG GGCTAGCTACAACGA CAAGGGTA | 11475 |
| 586 | GCCCCUCU A UGGCAAUG | 2727 | CATTGCCA GGCTAGCTACAACGA AGAGGGGC | 11476 |
| 589 | CCUCUAUG G CAAUGAGG | 2728 | CCTCATTG GGCTAGCTACAACGA CATAGAGG | 11477 |
| 592 | CUAUGGCA A UGAGGGCU | 2729 | AGCCCTCA GGCTAGCTACAACGA TGCCATAG | 11478 |
| 598 | CAAUGAGG G CUUAGGGU | 2730 | ACCCTAAG GGCTAGCTACAACGA CCTCATTG | 11479 |
| 605 | GGCUUAGG G UGGGCAGG | 2731 | CCTGCCCA GGCTAGCTACAACGA CCTAAGCC | 11480 |
| 609 | UAGGGUGG G CAGGAUGG | 2732 | CCATCCTG GGCTAGCTACAACGA CCACCCTA | 11481 |
| 614 | UGGGCAGG A UGGCUCCU | 2733 | AGGAGCCA GGCTAGCTACAACGA CCTGCCCA | 11482 |
| 617 | GCAGGAUG G CUCCUGUC | 2734 | GACAGGAG GGCTAGCTACAACGA CATCCTGC | 11483 |
| 623 | UGGCUCCU G UCACCCCG | 2735 | CGGGGTGA GGCTAGCTACAACGA AGGAGCCA | 11484 |
| 626 | CUCCUGUC A CCCCGCGG | 2736 | CCGCGGGG GGCTAGCTACAACGA GACAGGAG | 11485 |
| 631 | GUCACCCC G CGGCUCCC | 2737 | GGGAGCCG GGCTAGCTACAACGA GGGGTGAC | 11486 |
| 634 | ACCCCGCG G CUCCCGGC | 2738 | GCCGGGAG GGCTAGCTACAACGA CGCGGGGT | 11487 |
| 641 | GGCUCCCG G CCUAGUUG | 2739 | CAACTAGG GGCTAGCTACAACGA CGGGAGCC | 11488 |
| 646 | CCGGCCUA G UUGGGGCC | 2740 | GGCCCCAA GGCTAGCTACAACGA TAGGCCGG | 11489 |
| 652 | UAGUUGGG G CCCCACGG | 2741 | CCGTGGGG GGCTAGCTACAACGA CCCAACTA | 11490 |
| 657 | GGGGCCCC A CGGACCCC | 2742 | GGGGTCCG GGCTAGCTACAACGA GGGGCCCC | 11491 |
| 661 | CCCCACGG A CCCCCGGC | 2743 | GCCGGGGG GGCTAGCTACAACGA CCGTGGGG | 11492 |
| 668 | GACCCCCG G CGUAGGUC | 2744 | GACCTACG GGCTAGCTACAACGA CGGGGGTC | 11493 |
| 670 | CCCCCGGC G UAGGUCGC | 2745 | GCGACCTA GGCTAGCTACAACGA GCCGGGGG | 11494 |
| 674 | CGGCGUAG G UCGCGUAA | 2746 | TTACGCGA GGCTAGCTACAACGA CTACGCCG | 11495 |
| 677 | CGUAGGUC G CGUAACUU | 2747 | AAGTTACG GGCTAGCTACAACGA GACCTACG | 11496 |
| 679 | UAGGUCGC G UAACUUGG | 2748 | CCAAGTTA GGCTAGCTACAACGA GCGACCTA | 11497 |
| 682 | GUCGCGUA A CUUGGGUA | 2749 | TACCCAAG GGCTAGCTACAACGA TACGCGAC | 11498 |
| 688 | UAACUUGG G UAAGGUCA | 2750 | TGACCTTA GGCTAGCTACAACGA CCAAGTTA | 11499 |
| 693 | UGGGUAAG G UCAUCGAU | 2751 | ATCGATGA GGCTAGCTACAACGA CTTACCCA | 11500 |
| 696 | GUAAGGUC A UCGAUACC | 2752 | GGTATCGA GGCTAGCTACAACGA GACCTTAC | 11501 |
| 700 | GGUCAUCG A UACCCUCA | 2753 | TGAGGGTA GGCTAGCTACAACGA CGATGACC | 11502 |
| 702 | UCAUCGAU A CCCUCACA | 2754 | TGTGAGGG GGCTAGCTACAACGA ATCGATGA | 11503 |
| 708 | AUACCCUC A CAUGCGGC | 2755 | GCCGCATG GGCTAGCTACAACGA GAGGGTAT | 11504 |
| 710 | ACCCUCAC A UGCGGCUU | 2756 | AAGCCGCA GGCTAGCTACAACGA GTGAGGGT | 11505 |
| 712 | CCUCACAU G CGGCUUCG | 2757 | CGAAGCCG GGCTAGCTACAACGA ATGTGAGG | 11506 |
| 715 | CACAUGCG G CUUCGCCG | 2758 | CGGCGAAG GGCTAGCTACAACGA CGCATGTG | 11507 |
| 720 | GCGGCUUC G CCGACCUC | 2759 | GAGGTCGG GGCTAGCTACAACGA GAAGCCGC | 11508 |
| 724 | CUUCGCCG A CCUCAUGG | 2760 | CCATGAGG GGCTAGCTACAACGA CGGCGAAG | 11509 |
| 729 | CCGACCUC A UGGGGUAC | 2761 | GTACCCCA GGCTAGCTACAACGA GAGGTCGG | 11510 |
| 734 | CUCAUGGG G UACAUUCC | 2762 | GGAATGTA GGCTAGCTACAACGA CCCATGAG | 11511 |
| 736 | CAUGGGGU A CAUUCCGC | 2763 | GCGGAATG GGCTAGCTACAACGA ACCCCATG | 11512 |
| 738 | UGGGGUAC A UUCCGCUC | 2764 | GAGCGGAA GGCTAGCTACAACGA GTACCCCA | 11513 |
| 743 | UACAUUCC G CUCGUCGG | 2765 | CCGACGAG GGCTAGCTACAACGA GGAATGTA | 11514 |
| 747 | UUCCGCUC G UCGGCGCC | 2766 | GGCGCCGA GGCTAGCTACAACGA GAGCGGAA | 11515 |
| 751 | GCUCGUCG G CGCCCCCU | 2767 | AGGGGGCG GGCTAGCTACAACGA CGACGAGC | 11516 |
| 753 | UCGUCGGC G CCCCCUUG | 2768 | CAAGGGGG GGCTAGCTACAACGA GCCGACGA | 11517 |
| 766 | CUUGGGAG G CACUGCCA | 2769 | TGGCAGTG GGCTAGCTACAACGA CTCCCAAG | 11518 |
| 768 | UGGGAGGC A CUGCCAGG | 2770 | CCTGGCAG GGCTAGCTACAACGA GCCTCCCA | 11519 |
| 771 | GAGGCACU G CCAGGGCC | 2771 | GGCCCTGG GGCTAGCTACAACGA AGTGCCTC | 11520 |
| 777 | CUGCCAGG G CCCUGGCG | 2772 | CGCCAGGG GGCTAGCTACAACGA CCTGGCAG | 11521 |
| 783 | GGGCCCUG G CGCAUGGC | 2773 | GCCATGCG GGCTAGCTACAACGA CAGGGCCC | 11522 |
| 785 | GCCCUGGC G CAUGGCGU | 2774 | ACGCCATG GGCTAGCTACAACGA GCCAGGGC | 11523 |
| 787 | CCUGGCGC A UGGCGUCC | 2775 | GGACGCCA GGCTAGCTACAACGA GCGCCAGG | 11524 |
| 790 | GGCGCAUG G CGUCCGGG | 2776 | CCCGGACG GGCTAGCTACAACGA CATGCGCC | 11525 |
| 792 | CGCAUGGC G UCCGGGUU | 2777 | AACCCGGA GGCTAGCTACAACGA GCCATGCG | 11526 |
| 798 | GCGUCCGG G UUCUGGAA | 2778 | TTCCAGAA GGCTAGCTACAACGA CCGGACGC | 11527 |
| 808 | UCUGGAAG A CGGCGUGA | 2779 | TCACGCCG GGCTAGCTACAACGA CTTCCAGA | 11528 |
| 811 | GGAAGACG G CGUGAACU | 2780 | AGTTCACG GGCTAGCTACAACGA CGTCTTCC | 11529 |
| 813 | AAGACGGC G UGAACUAU | 2781 | ATAGTTCA GGCTAGCTACAACGA GCCGTCTT | 11530 |
| 817 | CGGCGUGA A CUAUGCAA | 2782 | TTGCATAG GGCTAGCTACAACGA TCACGCCG | 11531 |
| 820 | CGUGAACU A UGCAACAG | 2783 | CTGTTGCA GGCTAGCTACAACGA AGTTCACG | 11532 |
| 822 | UGAACUAU G CAACAGGG | 2784 | CCCTGTTG GGCTAGCTACAACGA ATAGTTCA | 11533 |
| 825 | ACUAUGCA A CAGGGAAU | 2785 | ATTCCCTG GGCTAGCTACAACGA TGCATAGT | 11534 |
| 832 | AACAGGGA A UCUGCCCG | 2786 | CGGGCAGA GGCTAGCTACAACGA TCCCTGTT | 11535 |
| 836 | GGGAAUCU G CCCGGUUG | 2787 | CAACCGGG GGCTAGCTACAACGA AGATTCCC | 11536 |
| 841 | UCUGCCCG G UUGCUCUU | 2788 | AAGAGCAA GGCTAGCTACAACGA CGGGCAGA | 11537 |
| 844 | GCCCGGUU G CUCUUUCU | 2789 | AGAAAGAG GGCTAGCTACAACGA AACCGGGC | 11538 |
| 855 | CUUUCUCU A UCUUCCUC | 2790 | GAGGAAGA GGCTAGCTACAACGA AGAGAAAG | 11539 |
| 867 | UCCUCUUG G CUCUGCUG | 2791 | CAGCAGAG GGCTAGCTACAACGA CAAGAGGA | 11540 |
| 872 | UUGGCUCU G CUGCCCUG | 2792 | CAGGGCAG GGCTAGCTACAACGA AGAGCCAA | 11541 |
| 875 | GCUCUGCU G CCCUGUCU | 2793 | AGACAGGG GGCTAGCTACAACGA AGCAGAGC | 11542 |
| 880 | GCUGCCCU G UCUGACCA | 2794 | TGGTCAGA GGCTAGCTACAACGA AGGGCAGC | 11543 |
| 885 | CCUGUCUG A CCAUCCCA | 2795 | TGGGATGG GGCTAGCTACAACGA CAGACAGG | 11544 |
| 888 | GUCUGACC A UCCCAGCC | 2796 | GGCTGGGA GGCTAGCTACAACGA GGTCAGAC | 11545 |
| 894 | CCAUCCCA G CCUCCGCU | 2797 | AGCGGAGG GGCTAGCTACAACGA TGGGATGG | 11546 |
| 900 | CAGCCUCC G CUUAUGAG | 2798 | CTCATAAG GGCTAGCTACAACGA GGAGGCTG | 11547 |
| 904 | CUCCGCUU A UGAGGUGU | 2799 | ACACCTCA GGCTAGCTACAACGA AAGCGGAG | 11548 |
| 909 | CUUAUGAG G UGUGCAAC | 2800 | GTTGCACA GGCTAGCTACAACGA CTCATAAG | 11549 |
| 911 | UAUGAGGU G UGCAACGC | 2801 | GCGTTGCA GGCTAGCTACAACGA ACCTCATA | 11550 |
| 913 | UGAGGUGU G CAACGCGU | 2802 | ACGCGTTG GGCTAGCTACAACGA ACACCTCA | 11551 |
| 916 | GGUGUGCA A CGCGUCCG | 2803 | CGGACGCG GGCTAGCTACAACGA TGCACACC | 11552 |
| 918 | UGUGCAAC G CGUCCGGG | 2804 | CCCGGACG GGCTAGCTACAACGA GTTGCACA | 11553 |
| 920 | UGCAACGC G UCCGGGCU | 2805 | AGCCCGGA GGCTAGCTACAACGA GCGTTGCA | 11554 |
| 926 | GCGUCCGG G CUGUACCA | 2806 | TGGTACAG GGCTAGCTACAACGA CCGGACGC | 11555 |
| 929 | UCCGGGCU G UACCAUGU | 2807 | ACATGGTA GGCTAGCTACAACGA AGCCCGGA | 11556 |
| 931 | CGGGCUGU A CCAUGUCA | 2808 | TGACATGG GGCTAGCTACAACGA ACAGCCCG | 11557 |
| 934 | GCUGUACC A UGUCACGA | 2809 | TCGTGACA GGCTAGCTACAACGA GGTACAGC | 11558 |
| 936 | UGUACCAU G UCACGAAC | 2810 | GTTCGTGA GGCTAGCTACAACGA ATGGTACA | 11559 |
| 939 | ACCAUGUC A CGAACGAU | 2811 | ATCGTTCG GGCTAGCTACAACGA GACATGGT | 11560 |
| 943 | UGUCACGA A CGAUUGCU | 2812 | AGCAATCG GGCTAGCTACAACGA TCGTGACA | 11561 |
| 946 | CACGAACG A UUGCUCCA | 2813 | TGGAGCAA GGCTAGCTACAACGA CGTTCGTG | 11562 |
| 949 | GAACGAUU G CUCCAACU | 2814 | AGTTGGAG GGCTAGCTACAACGA AATCGTTC | 11563 |
| 955 | UUGCUCCA A CUCAAGCA | 2815 | TGCTTGAG GGCTAGCTACAACGA TGGAGCAA | 11564 |
| 961 | CAACUCAA G CAUUGUGU | 2816 | ACACAATG GGCTAGCTACAACCA TTGAGTTG | 11565 |
| 963 | ACUCAAGC A UUGUGUAU | 2817 | ATACACAA GGCTAGCTACAACGA GCTTGAGT | 11566 |
| 966 | CAAGCAUU G UGUAUGAG | 2818 | CTCATACA GGCTAGCTACAACGA AATGCTTG | 11567 |
| 968 | AGCAUUGU G UAUGAGGC | 2819 | GCCTCATA GGCTAGCTACAACGA ACAATGCT | 11568 |
| 970 | CAUUGUGU A UGAGGCAG | 2820 | CTGCCTCA GGCTAGCTACAACGA ACACAATG | 11569 |
| 975 | UGUAUGAG G CAGAGGAC | 2821 | GTCCTCTG GGCTAGCTACAACGA CTCATACA | 11570 |
| 982 | GGCAGAGG A CAUGAUCA | 2822 | TGATCATG GGCTAGCTACAACGA CCTCTGCC | 11571 |
| 984 | CAGAGGAC A UGAUCAUG | 2823 | CATGATCA GGCTAGCTACAACGA GTCCTCTG | 11572 |
| 987 | AGGACAUG A UCAUGCAC | 2824 | GTGCATGA GGCTAGCTACAACGA CATGTCCT | 11573 |
| 990 | ACAUGAUC A UGCACACC | 2825 | GGTGTGCA GGCTAGCTACAACGA GATCATGT | 11574 |
| 992 | AUGAUCAU G CACACCCC | 2826 | GGGGTGTG GGCTAGCTACAACGA ATGATCAT | 11575 |
| 994 | GAUCAUGC A CACCCCGG | 2827 | CCGGGGTG GGCTAGCTACAACGA GCATGATC | 11576 |
| 996 | UCAUGCAC A CCCCGGGG | 2828 | CCCCGGGG GGCTAGCTACAACGA GTGCATGA | 11577 |
| 1004 | ACCCCGGG G UGCGUGCC | 2829 | GGCACGCA GGCTAGCTACAACGA CCCGGGGT | 11578 |
| 1006 | CCCGGGGU G CGUGCCCU | 2830 | AGGGCACG GGCTAGCTACAACGA ACCCCGGG | 11579 |
| 1008 | CGGGGUGC G UGCCCUGC | 2831 | GCAGGGCA GGCTAGCTACAACGA GCACCCCG | 11580 |
| 1010 | GGGUGCGU G CCCUGCGU | 2832 | ACGCAGGG GGCTAGCTACAACGA ACGCACCC | 11581 |
| 1015 | CGUGCCCU G CGUUCGGG | 2833 | CCCGAACG GGCTAGCTACAACGA AGGGCACG | 11582 |
| 1017 | UGCCCUGC G UUCGGGAG | 2834 | CTCCCGAA GGCTAGCTACAACGA GCAGGGCA | 11583 |
| 1027 | UCGGGAGA A CAACUCCU | 2835 | AGGAGTTG GGCTAGCTACAACGA TCTCCCGA | 11584 |
| 1030 | GGAGAACA A CUCCUCCC | 2836 | GGGAGGAG GGCTAGCTACAACGA TGTTCTCC | 11585 |
| 1039 | CUCCUCCC G CUGCUGGG | 2837 | CCCAGCAG GGCTAGCTACAACGA GGGAGGAG | 11586 |
| 1042 | CUCCCGCU G CUGGGUAG | 2838 | CTACCCAG GGCTAGCTACAACGA AGCGGGAG | 11587 |
| 1047 | GCUGCUGG G UAGCGCUC | 2839 | GAGCGCTA GGCTAGCTACAACGA CCAGCAGC | 11588 |
| 1050 | GCUGGGUA G CGCUCACU | 2840 | AGTGAGCG GGCTAGCTACAACGA TACCCAGC | 11589 |
| 1052 | UGGGUAGC G CUCACUCC | 2841 | GGAGTGAG GGCTAGCTACAACGA GCTACCCA | 11590 |
| 1056 | UAGCGCUC A CUCCCACG | 2842 | CGTGGGAG GGCTAGCTACAACGA GAGCGCTA | 11591 |
| 1062 | UCACUCCC A CGCUCGCG | 2843 | CGCGAGCG GGCTAGCTACAACGA GGGAGTGA | 11592 |
| 1064 | ACUCCCAC G CUCGCGGC | 2844 | GCCGCGAG GGCTAGCTACAACGA GTGGGAGT | 11593 |
| 1068 | CCACGCUC G CGGCCAGG | 2845 | CCTGGCCG GGCTAGCTACAACGA GAGCGTGG | 11594 |
| 1071 | CGCUCGCG G CCAGGAAU | 2846 | ATTCCTGG GGCTAGCTACAACGA CGCGAGCG | 11595 |
| 1078 | GGCCAGGA A UGCCAGCA | 2847 | TGCTGGCA GGCTAGCTACAACGA TCCTGGCC | 11596 |
| 1080 | CCAGGAAU G CCAGCAUC | 2848 | GATGCTGG GGCTAGCTACAACGA ATTCCTGG | 11597 |
| 1084 | GAAUGCCA G CAUCCCCA | 2849 | TGGGGATG GGCTAGCTACAACGA TGGCATTC | 11598 |
| 1086 | AUGCCAGC A UCCCCACU | 2850 | AGTGGGGA GGCTAGCTACAACGA GCTGGCAT | 11599 |
| 1092 | GCAUCCCC A CUACGACG | 2851 | CGTCGTAG GGCTAGCTACAACGA GGGGATGC | 11600 |
| 1095 | UCCCCACU A CGACGAUA | 2852 | TATCGTCG GGCTAGCTACAACGA AGTGGGGA | 11601 |
| 1098 | CCACUACG A CGAUACGG | 2853 | CCGTATCG GGCTAGCTACAACGA CGTAGTGG | 11602 |
| 1101 | CUACGACG A UACGGCGU | 2854 | ACGCCGTA GGCTAGCTACAACGA CGTCGTAG | 11603 |
| 1103 | ACGACGAU A CGGCGUCA | 2855 | TGACGCCG GGCTAGCTACAACGA ATCGTCGT | 11604 |
| 1106 | ACGAUACG G CGUCACGU | 2856 | ACGTGACG GGCTAGCTACAACGA CGTATCGT | 11605 |
| 1108 | GAUACGGC G UCACGUCG | 2857 | CGACGTGA GGCTAGCTACAACGA GCCGTATC | 11606 |
| 1111 | ACGGCGUC A CGUCGAUU | 2858 | AATCGACG GGCTAGCTACAACGA GACGCCGT | 11607 |
| 1113 | GGCGUCAC G UCGAUUUG | 2859 | CAAATCGA GGCTAGCTACAACGA GTGACGCC | 11608 |
| 1117 | UCACGUCG A UUUGCUCG | 2860 | CGAGCAAA GGCTAGCTACAACGA CGACGTGA | 11609 |
| 1121 | GUCGAUUU G CUCGUUGG | 2861 | CCAACGAG GGCTAGCTACAACGA AAATCGAC | 11610 |
| 1125 | AUUUGCUC G UUGGGGCG | 2862 | CGCCCCAA GGCTAGCTACAACGA GAGCAAAT | 11611 |
| 1131 | UCGUUGGG G CGGCUGCU | 2863 | AGCAGCCG GGCTAGCTACAACGA CCCAACGA | 11612 |
| 1134 | UUGGGGCG G CUGCUUUC | 2864 | GAAAGCAG GGCTAGCTACAACGA CGCCCCAA | 11613 |
| 1137 | GGGCGGCU G CUUUCUGC | 2865 | GCAGAAAG GGCTAGCTACAACGA AGCCGCCC | 11614 |
| 1144 | UGCUUUCU G CUCUGCUA | 2866 | TAGCAGAG GGCTAGCTACAACGA AGAAAGCA | 11615 |
| 1149 | UCUGCUCU G CUAUGUAC | 2867 | GTACATAG GGCTAGCTACAACGA AGAGCAGA | 11616 |
| 1152 | GCUCUGCU A UGUACGUG | 2868 | CACGTACA GGCTAGCTACAACGA AGCAGAGC | 11617 |
| 1154 | UCUGCUAU G UACGUGGG | 2869 | CCCACGTA GGCTAGCTACAACGA ATAGCAGA | 11618 |
| 1156 | UGCUAUGU A CGUGGGGG | 2870 | CCCCCACG GGCTAGCTACAACGA ACATAGCA | 11619 |
| 1158 | CUAUGUAC G UGGGGGAU | 2871 | ATCCCCCA GGCTAGCTACAACGA GTACATAG | 11620 |
| 1165 | CGUGGGGG A UCUCUGCG | 2872 | CGCAGAGA GGCTAGCTACAACGA CCCCCACG | 11621 |
| 1171 | GGAUCUCU G CGGAUCUG | 2873 | CAGATCCG GGCTAGCTACAACGA AGAGATCC | 11622 |
| 1175 | CUCUGCGG A UCUGUCUU | 2874 | AAGACAGA GGCTAGCTACAACGA CCGCAGAG | 11623 |
| 1179 | GCGGAUCU G UCUUCCUC | 2875 | GAGGAAGA GGCTAGCTACAACGA AGATCCGC | 11624 |
| 1188 | UCUUCCUC G UCUCUCAG | 2876 | CTGAGAGA GGCTAGCTACAACGA GAGGAAGA | 11625 |
| 1196 | GUCUCUCA G CUGUUCAC | 2877 | GTGAACAG GGCTAGCTACAACGA TGAGAGAC | 11626 |
| 1199 | UCUCAGCU G UUCACCUU | 2878 | AAGGTGAA GGCTAGCTACAACGA AGCTGAGA | 11627 |
| 1203 | AGCUGUUC A CCUUCUCG | 2879 | CGAGAAGG GGCTAGCTACAACGA GAACAGCT | 11628 |
| 1211 | ACCUUCUC G CCUCGCCG | 2880 | CGGCGAGG GGCTAGCTACAACGA GAGAAGGT | 11629 |
| 1216 | CUCGCCUC G CCGGUAUG | 2881 | CATACCGG GGCTAGCTACAACGA GAGGCGAG | 11630 |
| 1220 | CCUCGCCG G UAUGAGAC | 2882 | GTCTCATA GGCTAGCTACAACGA CGGCGAGG | 11631 |
| 1222 | UCGCCGGU A UGAGACAG | 2883 | CTGTCTCA GGCTAGCTACAACGA ACCGGCGA | 11632 |
| 1227 | GGUAUGAG A CAGUACAG | 2884 | CTGTACTG GGCTAGCTACAACGA CTCATACC | 11633 |
| 1230 | AUGAGACA G UACAGGAC | 2885 | GTCCTGTA GGCTAGCTACAACGA TGTCTCAT | 11634 |
| 1232 | GAGACAGU A CAGGACUG | 2886 | CAGTCCTG GGCTAGCTACAACGA ACTGTCTC | 11635 |
| 1237 | AGUACAGG A CUGUAAUU | 2887 | AATTACAG GGCTAGCTACAACGA CCTGTACT | 11636 |
| 1240 | ACAGGACU G UAAUUGCU | 2888 | AGCAATTA GGCTAGCTACAACGA AGTCCTGT | 11637 |
| 1243 | GGACUGUA A UUGCUCGA | 2889 | TCGAGCAA GGCTAGCTACAACGA TACAGTCC | 11638 |
| 1246 | CUGUAAUU G CUCGAUCU | 2890 | AGATCGAG GGCTAGCTACAACGA AATTACAG | 11639 |
| 1251 | AUUGCUCG A UCUAUCCC | 2891 | GGGATAGA GGCTAGCTACAACGA CGAGCAAT | 11640 |
| 1255 | CUCGAUCU A UCCCGGCC | 2892 | GGCCGGGA GGCTAGCTACAACGA AGATCGAG | 11641 |
| 1261 | CUAUCCCG G CCACGUAU | 2893 | ATACGTGG GGCTAGCTACAACGA CGGGATAG | 11642 |
| 1264 | UCCCGGCC A CGUAUCAG | 2894 | CTGATACG GGCTAGCTACAACGA GGCCGGGA | 11643 |
| 1266 | CCGGCCAC G UAUCAGGC | 2895 | GCCTGATA GGCTAGCTACAACGA GTGGCCGG | 11644 |
| 1268 | GGCCACGU A UCAGGCCA | 2896 | TGGCCTGA GGCTAGCTACAACGA ACGTGGCC | 11645 |
| 1273 | CGUAUCAG G CCAUCGCA | 2897 | TGCGATGG GGCTAGCTACAACGA CTGATACG | 11646 |
| 1276 | AUCAGGCC A UCGCAUGG | 2898 | CCATGCGA GGCTAGCTACAACGA GGCCTGAT | 11647 |
| 1279 | AGGCCAUC G CAUGGCUU | 2899 | AAGCCATG GGCTAGCTACAACGA GATGGCCT | 11648 |
| 1281 | GCCAUCGC A UGGCUUGG | 2900 | CCAAGCCA GGCTAGCTACAACGA GCGATGGC | 11649 |
| 1284 | AUCGCAUG G CUUGGGAU | 2901 | ATCCCAAG GGCTAGCTACAACGA CATGCGAT | 11650 |
| 1291 | GGCUUGGG A UAUGAUGA | 2902 | TCATCATA GGCTAGCTACAACGA CCCAAGCC | 11651 |
| 1293 | CUUGGGAU A UGAUGAUG | 2903 | CATCATCA GGCTAGCTACAACGA ATCCCAAG | 11652 |
| 1296 | GGGAUAUG A UGAUGAAU | 2904 | ATTCATCA GGCTAGCTACAACGA CATATCCC | 11653 |
| 1299 | AUAUGAUG A UGAAUUGG | 2905 | CCAATTCA GGCTAGCTACAACGA CATCATAT | 11654 |
| 1303 | GAUGAUGA A UUGGUCAC | 2906 | GTGACCAA GGCTAGCTACAACGA TCATCATC | 11655 |
| 1307 | AUGAAUUG G UCACCUAC | 2907 | GTAGGTGA GGCTAGCTACAACGA CAATTCAT | 11656 |
| 1310 | AAUUGGUC A CCUACAAC | 2908 | GTTGTAGG GGCTAGCTACAACGA GACCAATT | 11657 |
| 1314 | GGUCACCU A CAACAGCC | 2909 | GGCTGTTG GGCTAGCTACAACGA AGGTGACC | 11658 |
| 1317 | CACCUACA A CAGCCCUA | 2910 | TAGGGCTG GGCTAGCTACAACGA TGTAGGTG | 11659 |
| 1320 | CUACAACA G CCCUAGUG | 2911 | CACTAGGG GGCTAGCTACAACGA TGTTGTAG | 11660 |
| 1326 | CAGCCCUA G UGGUAUCG | 2912 | CGATACCA GGCTAGCTACAACGA TAGGGCTG | 11661 |
| 1329 | CCCUAGUG G UAUCGCAG | 2913 | CTGCGATA GGCTAGCTACAACGA CACTAGGG | 11662 |
| 1331 | CUAGUGGU A UCGCAGUU | 2914 | AACTGCGA GGCTAGCTACAACGA ACCACTAG | 11663 |
| 1334 | GUGGUAUC G CAGUUGCU | 2915 | AGCAACTG GGCTAGCTACAACGA GATACCAC | 11664 |
| 1337 | GUAUCGCA G UUGCUCCG | 2916 | CGGAGCAA GGCTAGCTACAACGA TGCGATAC | 11665 |
| 1340 | UCGCAGUU G CUCCGGAU | 2917 | ATCCGGAG GGCTAGCTACAACGA AACTGCGA | 11666 |
| 1347 | UGCUCCGG A UCCCACAA | 2918 | TTGTGGGA GGCTAGCTACAACGA CCGGAGCA | 11667 |
| 1352 | CGGAUCCC A CAAGCCGU | 2919 | ACGGCTTG GGCTAGCTACAACGA GGGATCCG | 11668 |
| 1356 | UCCCACAA G CCGUCGUG | 2920 | CACGACGG GGCTAGCTACAACGA TTGTGGGA | 11669 |
| 1359 | CACAAGCC G UCGUGGAC | 2921 | GTCCACGA GGCTAGCTACAACGA GGCTTGTG | 11670 |
| 1362 | AAGCCGUC G UGGACAUG | 2922 | CATGTCCA GGCTAGCTACAACGA GACGGCTT | 11671 |
| 1366 | CGUCGUGG A CAUGGUGG | 2923 | CCACCATG GGCTAGCTACAACGA CCACGACG | 11672 |
| 1368 | UCGUGGAC A UGGUGGCG | 2924 | CGCCACCA GGCTAGCTACAACGA GTCCACGA | 11673 |
| 1371 | UGGACAUG G UGGCGGGG | 2925 | CCCCGCCA GGCTAGCTACAACGA CATGTCCA | 11674 |
| 1374 | ACAUGGUG G CGGGGGCC | 2926 | GGCCCCCG GGCTAGCTACAACGA CACCATGT | 11675 |
| 1380 | UGGCGGGG G CCCACUGG | 2927 | CCAGTGGG GGCTAGCTACAACGA CCCCGCCA | 11676 |
| 1384 | GGGGGCCC A CUGGGGAG | 2928 | CTCCCCAG GGCTAGCTACAACGA GGGCCCCC | 11677 |
| 1392 | ACUGGGGA G UCCUGGCG | 2929 | CGCCAGGA GGCTAGCTACAACGA TCCCCAGT | 11678 |
| 1398 | GAGUCCUG G CGGGCCUU | 2930 | AAGGCCCG GGCTAGCTACAACGA CAGGACTC | 11679 |
| 1402 | CCUGGCGG G CCUUGCCU | 2931 | AGGCAAGG GGCTAGCTACAACGA CCGCCAGG | 11680 |
| 1407 | CGGGCCUU G CCUAUUAU | 2932 | ATAATAGG GGCTAGCTACAACGA AAGGCCCG | 11681 |
| 1411 | CCUUGCCU A UUAUUCCA | 2933 | TGGAATAA GGCTAGCTACAACGA AGGCAAGG | 11682 |
| 1414 | UGCCUAUU A UUCCAUGG | 2934 | CCATGGAA GGCTAGCTACAACGA AATAGGCA | 11683 |
| 1419 | AUUAUUCC A UGGUGGGG | 2935 | CCCCACCA GGCTAGCTACAACGA GGAATAAT | 11684 |
| 1422 | AUUCCAUG G UGGGGAAC | 2936 | GTTCCCCA GGCTAGCTACAACGA CATGGAAT | 11685 |
| 1429 | GGUGGGGA A CUGGGCUA | 2937 | TAGCCCAG GGCTAGCTACAACGA TCCCCACC | 11686 |
| 1434 | GGAACUGG G CUAAGGUG | 2938 | CACCTTAG GGCTAGCTACAACGA CCAGTTCC | 11687 |
| 1440 | GGGCUAAG G UGUUGAUU | 2939 | AATCAACA GGCTAGCTACAACGA CTTAGCCC | 11688 |
| 1442 | GCUAAGGU G UUGAUUGU | 2940 | ACAATCAA GGCTAGCTACAACGA ACCTTAGC | 11689 |
| 1446 | AGGUGUUG A UUGUGAUG | 2941 | CATCACAA GGCTAGCTACAACGA CAACACCT | 11690 |
| 1449 | UGUUGAUU G UGAUGCUA | 2942 | TAGCATCA GGCTAGCTACAACGA AATCAACA | 11691 |
| 1452 | UGAUUGUG A UGCUACUC | 2943 | GAGTAGCA GGCTAGCTACAACGA CACAATCA | 11692 |
| 1454 | AUUGUGAU G CUACUCUU | 2944 | AAGAGTAG GGCTAGCTACAACGA ATCACAAT | 11693 |
| 1457 | GUGAUGCU A CUCUUUGC | 2945 | GCAAAGAG GGCTAGCTACAACGA AGCATCAC | 11694 |
| 1464 | UACUCUUU G CCGGCGUU | 2946 | AACGCCGG GGCTAGCTACAACGA AAAGAGTA | 11695 |
| 1468 | CUUUGCCG G CGUUGACG | 2947 | CGTCAACG GGCTAGCTACAACGA CGGCAAAG | 11696 |
| 1470 | UUGCCGGC G UUGACGGG | 2948 | CCCGTCAA GGCTAGCTACAACGA GCCGGCAA | 11697 |
| 1474 | CGGCGUUG A CGGGGACA | 2949 | TGTCCCCG GGCTAGCTACAACGA CAACGCCG | 11698 |
| 1480 | UGACGGGG A CACCUACA | 2950 | TGTAGGTG GGCTAGCTACAACGA CCCCGTCA | 11699 |
| 1482 | ACGGGGAC A CCUACACG | 2951 | CGTGTAGG GGCTAGCTACAACGA GTCCCCGT | 11700 |
| 1486 | GGACACCU A CACGACAG | 2952 | CTGTCGTG GGCTAGCTACAACGA AGGTGTCC | 11701 |
| 1488 | ACACCUAC A CGACAGGG | 2953 | CCCTGTCG GGCTAGCTACAACGA GTAGGTGT | 11702 |
| 1491 | CCUACACG A CAGGGGGG | 2954 | CCCCCCTG GGCTAGCTACAACGA CGTGTAGG | 11703 |
| 1500 | CAGGGGGG G CGCAGGGC | 2955 | GCCCTGCG GGCTAGCTACAACGA CCCCCCTG | 11704 |
| 1502 | GGGGGGGC G CAGGGCCA | 2956 | TGGCCCTG GGCTAGCTACAACGA GCCCCCCC | 11705 |
| 1507 | GGCGCAGG G CCACACCA | 2957 | TGGTGTGG GGCTAGCTACAACGA CCTGCGCC | 11706 |
| 1510 | GCAGGGCC A CACCACUA | 2958 | TAGTGGTG GGCTAGCTACAACGA GGCCCTGC | 11707 |
| 1512 | AGGGCCAC A CCACUAGU | 2959 | ACTAGTGG GGCTAGCTACAACGA GTGGCCCT | 11708 |
| 1515 | GCCACACC A CUAGUAGG | 2960 | CCTACTAG GGCTAGCTACAACGA GGTGTGGC | 11709 |
| 1519 | CACCACUA G UAGGGUGG | 2961 | CCACCCTA GGCTAGCTACAACGA TAGTGGTG | 11710 |
| 1524 | CUAGUAGG G UGGCAUCC | 2962 | GGATGCCA GGCTAGCTACAACGA CCTACTAG | 11711 |
| 1527 | GUAGGGUG G CAUCCCUC | 2963 | GAGGGATG GGCTAGCTACAACGA CACCCTAC | 11712 |
| 1529 | AGGGUGGC A UCCCUCUU | 2964 | AAGAGGGA GGCTAGCTACAACGA GCCACCCT | 11713 |
| 1539 | CCCUCUUU A CAUCUGGA | 2965 | TCCAGATG GGCTAGCTACAACGA AAAGAGGG | 11714 |
| 1541 | CUCUUUAC A UCUGGAGC | 2966 | GCTCCAGA GGCTAGCTACAACGA GTAAAGAG | 11715 |
| 1548 | CAUCUGGA G CAUCUCAG | 2967 | CTGAGATG GGCTAGCTACAACGA TCCAGATG | 11716 |
| 1550 | UCUGGAGC A UCUCAGAA | 2968 | TTCTGAGA GGCTAGCTACAACGA GCTCCAGA | 11717 |
| 1558 | AUCUCAGA A UAUCCAGC | 2969 | GCTGGATA GGCTAGCTACAACGA TCTGAGAT | 11718 |
| 1560 | CUCAGAAU A UCCAGCUU | 2970 | AAGCTGGA GGCTAGCTACAACGA ATTCTGAG | 11719 |
| 1565 | AAUAUCCA G CUUAUUAA | 2971 | TTAATAAG GGCTAGCTACAACGA TGGATATT | 11720 |
| 1569 | UCCAGCUU A UUAACACC | 2972 | GGTGTTAA GGCTAGCTACAACGA AAGCTGGA | 11721 |
| 1573 | GCUUAUUA A CACCAACG | 2973 | CGTTGGTG GGCTACCTACAACGA TAATAAGC | 11722 |
| 1575 | UUAUUAAC A CCAACGGC | 2974 | GCCGTTGG GGCTAGCTACAACGA GTTAATAA | 11723 |
| 1579 | UAACACCA A CGGCAGCU | 2975 | AGCTGCCG GGCTAGCTACAACGA TGGTGTTA | 11724 |
| 1582 | CACCAACG G CAGCUGGC | 2976 | GCCAGCTG GGCTAGCTACAACGA CGTTGGTG | 11725 |
| 1585 | CAACGGCA G CUGGCACA | 2977 | TGTGCCAG GGCTAGCTACAACGA TGCCGTTG | 11726 |
| 1589 | GGCAGCUG G CACAUUAA | 2978 | TTAATGTG GGCTAGCTACAACGA CAGCTGCC | 11727 |
| 1591 | CAGCUGGC A CAUUAACA | 2979 | TGTTAATG GGCTAGCTACAACGA GCCAGCTG | 11728 |
| 1593 | GCUGGCAC A UUAACAGG | 2980 | CCTGTTAA GGCTAGCTACAACGA GTGCCAGC | 11729 |
| 1597 | GCACAUUA A CAGGACUG | 2981 | CAGTCCTG GGCTAGCTACAACGA TAATGTGC | 11730 |
| 1602 | UUAACAGG A CUGCCCUG | 2982 | CAGGGCAG GGCTAGCTACAACGA CCTGTTAA | 11731 |
| 1605 | ACAGGACU G CCCUGAAC | 2983 | GTTCAGGG GGCTAGCTACAACGA AGTCCTGT | 11732 |
| 1612 | UGCCCUGA A CUGCAAUG | 2984 | CATTGCAG GGCTAGCTACAACGA TCAGGGCA | 11733 |
| 1615 | CCUGAACU G CAAUGACU | 2985 | AGTCATTG GGCTAGCTACAACGA AGTTCAGG | 11734 |
| 1618 | GAACUGCA A UGACUCCC | 2986 | GGGAGTCA GGCTAGCTACAACGA TGCAGTTC | 11735 |
| 1621 | CUGCAAUG A CUCCCUCC | 2987 | GGAGGGAG GGCTAGCTACAACGA CATTGCAG | 11736 |
| 1632 | CCCUCCAA A CCGGGUUC | 2988 | GAACCCGG GGCTAGCTACAACGA TTGGAGGG | 11737 |
| 1637 | CAAACCGG G UUCAUUGC | 2989 | GCAATGAA GGCTAGCTACAACGA CCGGTTTG | 11738 |
| 1641 | CCGGGUUC A UUGCUGCA | 2990 | TGCAGCAA GGCTAGCTACAACGA GAACCCGG | 11739 |
| 1644 | GGUUCAUU G CUGCACUG | 2991 | CAGTGCAG GGCTAGCTACAACGA AATGAACC | 11740 |
| 1647 | UCAUUGCU G CACUGUUC | 2992 | GAACAGTG GGCTAGCTACAACGA AGCAATGA | 11741 |
| 1649 | AUUGCUGC A CUGUUCUA | 2993 | TAGAACAG GGCTAGCTACAACGA GCAGCAAT | 11742 |
| 1652 | GCUGCACU G UUCUAUGC | 2994 | GCATAGAA GGCTAGCTACAACGA AGTGCAGC | 11743 |
| 1657 | ACUGUUCU A UGCACACA | 2995 | TGTGTGCA GGCTAGCTACAACGA AGAACAGT | 11744 |
| 1659 | UGUUCUAU G CACACAGG | 2996 | CCTGTGTG GGCTAGCTACAACGA ATAGAACA | 11745 |
| 1661 | UUCUAUGC A CACAGGUU | 2997 | AACCTGTG GGCTAGCTACAACGA GCATAGAA | 11746 |
| 1663 | CUAUGCAC A CAGGUUCA | 2998 | TGAACCTG GGCTAGCTACAACGA GTGCATAG | 11747 |
| 1667 | GCACACAG G UUCAACUC | 2999 | GAGTTGAA GGCTAGCTACAACGA CTGTGTGC | 11748 |
| 1672 | CAGGUUCA A CUCGUCCG | 3000 | CGGACGAG GGCTAGCTACAACGA TGAACCTG | 11749 |
| 1676 | UUCAACUC G UCCGGAUG | 3001 | CATCCGGA GGCTAGCTACAACGA GAGTTGAA | 11750 |
| 1682 | UCGUCCGG A UGCCCACA | 3002 | TGTGGGCA GGCTAGCTACAACGA CCGGACGA | 11751 |
| 1684 | GUCCGGAU G CCCACAGC | 3003 | GCTGTGGG GGCTAGCTACAACGA ATCCGGAC | 11752 |
| 1688 | GGAUGCCC A CAGCGCUU | 3004 | AAGCGCTG GGCTAGCTACAACGA GGGCATCC | 11753 |
| 1691 | UGCCCACA G CGCUUGGC | 3005 | GCCAAGCG GGCTAGCTACAACGA TGTGGGCA | 11754 |
| 1693 | CCCACAGC G CUUGGCCA | 3006 | TGGCCAAG GGCTAGCTACAACGA GCTGTGGG | 11755 |
| 1698 | AGCGCUUG G CCAGCUGC | 3007 | GCAGCTGG GGCTAGCTACAACGA CAAGCGCT | 11756 |
| 1702 | CUUGGCCA G CUGCCGCU | 3008 | AGCGGCAG GGCTAGCTACAACGA TGGCCAAG | 11757 |
| 1705 | GGCCAGCU G CCGCUCCA | 3009 | TGGAGCGG GGCTAGCTACAACGA AGCTGGCC | 11758 |
| 1708 | CAGCUGCC G CUCCAUUG | 3010 | CAATGGAG GGCTAGCTACAACGA GGCAGCTG | 11759 |
| 1713 | GCCGCUCC A UUGACAAG | 3011 | CTTGTCAA GGCTAGCTACAACGA GGAGCGGC | 11760 |
| 1717 | CUCCAUUG A CAAGUUCG | 3012 | CGAACTTG GGCTAGCTACAACGA CAATGGAG | 11761 |
| 1721 | AUUGACAA G UUCGCUCA | 3013 | TGAGCGAA GGCTAGCTACAACGA TTGTCAAT | 11762 |
| 1725 | ACAAGUUC G CUCAGGGG | 3014 | CCCCTGAG GGCTAGCTACAACGA GAACTTGT | 11763 |
| 1733 | GCUCAGGG G UGGGGUCC | 3015 | GGACCCCA GGCTAGCTACAACGA CCCTGAGC | 11764 |
| 1738 | GGGGUGGG G UCCUAUCA | 3016 | TGATAGGA GGCTAGCTACAACGA CCCACCCC | 11765 |
| 1743 | GGGGUCCU A UCACCUAC | 3017 | GTAGGTGA GGCTAGCTACAACGA AGGACCCC | 11766 |
| 1746 | GUCCUAUC A CCUACACC | 3018 | GGTGTAGG GGCTAGCTACAACGA GATAGGAC | 11767 |
| 1750 | UAUCACCU A CACCGAGG | 3019 | CCTCGGTG GGCTAGCTACAACGA AGGTGATA | 11768 |
| 1752 | UCACCUAC A CCGAGGGC | 3020 | GCCCTCGG GGCTAGCTACAACGA GTAGGTGA | 11769 |
| 1759 | CACCGAGG G CCACAACU | 3021 | AGTTGTGG GGCTAGCTACAACGA CCTCGGTG | 11770 |
| 1762 | CGAGGGCC A CAACUCGG | 3022 | CCGAGTTG GGCTAGCTACAACGA GGCCCTCG | 11771 |
| 1765 | GGGCCACA A CUCGGACC | 3023 | GGTCCGAG GGCTAGCTACAACGA TGTGGCCC | 11772 |
| 1771 | CAACUCGG A CCAGAGGC | 3024 | GCCTCTGG GGCTAGCTACAACGA CCGAGTTG | 11773 |
| 1778 | GACCAGAG G CCCUAUUG | 3025 | CAATAGGG GGCTAGCTACAACGA CTCTGGTC | 11774 |
| 1783 | GAGGCCCU A UUGCUGGC | 3026 | GCCAGCAA GGCTAGCTACAACGA AGGGCCTC | 11775 |
| 1786 | GCCCUAUU G CUGGCACU | 3027 | AGTGCCAG GGCTAGCTACAACGA AATAGGGC | 11776 |
| 1790 | UAUUGCUG G CACUACGC | 3028 | GCGTAGTG GGCTAGCTACAACGA CAGCAATA | 11777 |
| 1792 | UUGCUGGC A CUACGCAC | 3029 | GTGCGTAG GGCTAGCTACAACGA GCCAGCAA | 11778 |
| 1795 | CUGGCACU A CGCACCGC | 3030 | GCGGTGCG GGCTAGCTACAACGA AGTGCCAG | 11779 |
| 1797 | GGCACUAC G CACCGCGG | 3031 | CCGCGGTG GGCTAGCTACAACGA GTAGTGCC | 11780 |
| 1799 | CACUACGC A CCGCGGCC | 3032 | GGCCGCGG GGCTAGCTACAACGA GCGTAGTG | 11781 |
| 1802 | UACGCACC G CGGCCGUG | 3033 | CACGGCCG GGCTAGCTACAACGA GGTGCGTA | 11782 |
| 1805 | GCACCGCG G CCGUGUGG | 3034 | CCACACGG GGCTAGCTACAACGA CGCGGTGC | 11783 |
| 1808 | CCGCGGCC G UGUGGUAU | 3035 | ATACCACA GGCTAGCTACAACGA GGCCGCGG | 11784 |
| 1810 | GCGGCCGU G UGGUAUCG | 3036 | CGATACCA GGCTAGCTACAACGA ACGGCCGC | 11785 |
| 1813 | GCCGUGUG G UAUCGUAC | 3037 | GTACGATA GGCTAGCTACAACGA CACACGGC | 11786 |
| 1815 | CGUGUGGU A UCGUACCC | 3038 | GGGTACGA GGCTAGCTACAACGA ACCACACG | 11787 |
| 1818 | GUGGUAUC G UACCCGCA | 3039 | TGCGGGTA GGCTAGCTACAACGA GATACCAC | 11788 |
| 1820 | GGUAUCGU A CCCGCAUC | 3040 | GATGCGGG GGCTAGCTACAACGA ACGATACC | 11789 |
| 1824 | UCGUACCC G CAUCGCAG | 3041 | CTGCGATG GGCTAGCTACAACGA GGGTACGA | 11790 |
| 1826 | GUACCCGC A UCGCAGGU | 3042 | ACCTGCGA GGCTAGCTACAACGA GCGGGTAC | 11791 |
| 1829 | CCCGCAUC G CAGGUAUG | 3043 | CATACCTG GGCTAGCTACAACGA GATGCGGG | 11792 |
| 1833 | CAUCGCAG G UAUGUGGU | 3044 | ACCACATA GGCTAGCTACAACGA CTGCGATG | 11793 |
| 1835 | UCGCAGGU A UGUGGUCC | 3045 | GGACCACA GGCTAGCTACAACGA ACCTGCGA | 11794 |
| 1837 | GCAGGUAU G UGGUCCAG | 3046 | CTGGACCA GGCTAGCTACAACGA ATACCTGC | 11795 |
| 1840 | GGUAUGUG G UCCAGUGU | 3047 | ACACTGGA GGCTAGCTACAACGA CACATACC | 11796 |
| 1845 | GUGGUCCA G UGUAUUGC | 3048 | GCAATACA GGCTAGCTACAACGA TGGACCAC | 11797 |
| 1847 | GGUCCAGU G UAUUGCUU | 3049 | AAGCAATA GGCTAGCTACAACGA ACTGGACC | 11798 |
| 1849 | UCCAGUGU A UUGCUUCA | 3050 | TGAAGCAA GGCTAGCTACAACGA ACACTGGA | 11799 |
| 1852 | AGUGUAUU G CUUCACCC | 3051 | GGGTGAAG GGCTAGCTACAACGA AATACACT | 11800 |
| 1857 | AUUGCUUC A CCCCAAGC | 3052 | GCTTGGGG GGCTAGCTACAACGA GAAGCAAT | 11801 |
| 1864 | CACCCCAA G CCCUGUUG | 3053 | CAACAGGG GGCTAGCTACAACGA TTGGGGTG | 11802 |
| 1869 | CAAGCCCU G UUGUGGUG | 3054 | CACCACAA GGCTAGCTACAACGA AGGGCTTG | 11803 |
| 1872 | GCCCUGUU G UGGUGGGG | 3055 | CCCCACCA GGCTAGCTACAACGA AACAGGGC | 11804 |
| 1875 | CUGUUGUG G UGGGGACG | 3056 | CGTCCCCA GGCTAGCTACAACGA CACAACAG | 11805 |
| 1881 | UGGUGGGG A CGACCGAC | 3057 | GTCGGTCG GGCTAGCTACAACGA CCCCACCA | 11806 |
| 1884 | UGGGGACG A CCGACCGU | 3058 | ACGGTCGG GGCTAGCTACAACGA CGTCCCCA | 11807 |
| 1888 | GACGACCG A CCGUUUCG | 3059 | CGAAACGG GGCTAGCTACAACGA CGGTCGTC | 11808 |
| 1891 | GACCGACC G UUUCGGCG | 3060 | CGCCGAAA GGCTAGCTACAACGA GGTCGGTC | 11809 |
| 1897 | CCGUUUCG G CGCCCCCA | 3061 | TGGGGGCG GGCTAGCTACAACGA CGAAACGG | 11810 |
| 1899 | GUUUCGGC G CCCCCACG | 3062 | CGTGGGGG GGCTAGCTACAACGA GCCGAAAC | 11811 |
| 1905 | GCGCCCCC A CGUAUAAC | 3063 | GTTATACG GGCTAGCTACAACGA GGGGGCGC | 11812 |
| 1907 | GCCCCCAC G UAUAACUG | 3064 | CAGTTATA GGCTAGCTACAACGA GTGGGGGC | 11813 |
| 1909 | CCCCACGU A UAACUGGG | 3065 | CCCAGTTA GGCTAGCTACAACGA ACGTGGGG | 11814 |
| 1912 | CACGUAUA A CUGGGGGG | 3066 | CCCCCCAG GGCTAGCTACAACGA TATACGTG | 11815 |
| 1920 | ACUGGGGG G CGAACGAG | 3067 | CTCGTTCG GGCTAGCTACAACGA CCCCCAGT | 11816 |
| 1924 | GGGGGCGA A CGAGACGG | 3068 | CCGTCTCG GGCTAGCTACAACGA TCGCCCCC | 11817 |
| 1929 | CGAACGAG A CGGACGUG | 3069 | CACGTCCG GGCTAGCTACAACGA CTCGTTCG | 11818 |
| 1933 | CGAGACGG A CGUGCUGC | 3070 | GCAGCACG GGCTAGCTACAACGA CCGTCTCG | 11819 |
| 1935 | AGACGGAC G UGCUGCUC | 3071 | GAGCAGCA GGCTAGCTACAACGA GTCCGTCT | 11820 |
| 1937 | ACGGACGU G CUGCUCCU | 3072 | AGGAGCAG GGCTAGCTACAACGA ACGTCCGT | 11821 |
| 1940 | GACGUGCU G CUCCUCAA | 3073 | TTGAGGAG GGCTAGCTACAACGA AGCACGTC | 11822 |
| 1948 | GCUCCUCA A CAACACGC | 3074 | GCGTGTTG GGCTAGCTACAACGA TGAGGAGC | 11823 |
| 1951 | CCUCAACA A CACGCGGC | 3075 | GCCGCGTG GGCTAGCTACAACGA TGTTGAGG | 11824 |
| 1953 | UCAACAAC A CGCGGCCG | 3076 | CGGCCGCG GGCTAGCTACAACGA GTTGTTGA | 11825 |
| 1955 | AACAACAC G CGGCCGCC | 3077 | GGCGGCCG GGCTAGCTACAACGA GTGTTGTT | 11826 |
| 1958 | AACACGCG G CCGCCGCA | 3078 | TGCGGCGG GGCTAGCTACAACGA CGCGTGTT | 11827 |
| 1961 | ACGCGGCC G CCGCAAGG | 3079 | CCTTGCGG GGCTAGCTACAACGA GGCCGCGT | 11828 |
| 1964 | CGGCCGCC G CAAGGCAA | 3080 | TTGCCTTG GGCTAGCTACAACGA GGCGGCCG | 11829 |
| 1969 | GCCGCAAG G CAACUGGU | 3081 | ACCAGTTG GGCTAGCTACAACGA CTTGCGGC | 11830 |
| 1972 | GCAAGGCA A CUGGUUCG | 3082 | CGAACCAG GGCTAGCTACAACGA TGCCTTGC | 11831 |
| 1976 | GGCAACUG G UUCGGCUG | 3083 | CAGCCGAA GGCTAGCTACAACGA CAGTTGCC | 11832 |
| 1981 | CUGGUUCG G CUGCACAU | 3084 | ATGTGCAG GGCTAGCTACAACGA CGAACCAG | 11833 |
| 1984 | GUUCGGCU G CACAUGGA | 3085 | TCCATGTG GGCTAGCTACAACGA AGCCGAAC | 11834 |
| 1986 | UCGGCUGC A CAUGGAUG | 3086 | CATCCATG GGCTAGCTACAACGA GCAGCCGA | 11835 |
| 1988 | GGCUGCAC A UGGAUGAA | 3087 | TTCATCCA GGCTAGCTACAACGA GTGCAGCC | 11836 |
| 1992 | GCACAUGG A UGAAUGGC | 3088 | GCCATTCA GGCTAGCTACAACGA CCATGTGC | 11837 |
| 1996 | AUGGAUGA A UGGCACUG | 3089 | CAGTGCCA GGCTAGCTACAACGA TCATCCAT | 11838 |
| 1999 | GAUGAAUG G CACUGGGU | 3090 | ACCCAGTG GGCTAGCTACAACGA CATTCATC | 11839 |
| 2001 | UGAAUGGC A CUGGGUUC | 3091 | GAACCCAG GGCTAGCTACAACGA GCCATTCA | 11840 |
| 2006 | GGCACUGG G UUCACCAA | 3092 | TTGGTGAA GGCTAGCTACAACGA CCAGTGCC | 11841 |
| 2010 | CUGGGUUC A CCAAGACG | 3093 | CGTCTTGG GGCTAGCTACAACGA GAACCCAG | 11842 |
| 2016 | UCACCAAG A CGUGCGGG | 3094 | CCCGCACG GGCTAGCTACAACGA CTTGGTGA | 11843 |
| 2018 | ACCAAGAC G UGCGGGGG | 3095 | CCCCCGCA GGCTAGCTACAACGA GTCTTGGT | 11844 |
| 2020 | CAAGACGU G CGGGGGCC | 3096 | GGCCCCCG GGCTAGCTACAACGA ACGTCTTG | 11845 |
| 2026 | GUGCGGGG G CCCCCCGU | 3097 | ACGGGGGG GGCTAGCTACAACGA CCCCGCAC | 11846 |
| 2033 | GGCCCCCC G UGCAACAU | 3098 | ATGTTGCA GGCTAGCTACAACGA GGGGGGCC | 11847 |
| 2035 | CCCCCCGU G CAACAUCG | 3099 | CGATGTTG GGCTAGCTACAACGA ACGGGGGG | 11848 |
| 2038 | CCCGUGCA A CAUCGGGG | 3100 | CCCCGATG GGCTAGCTACAACGA TGCACGGG | 11849 |
| 2040 | CGUGCAAC A UCGGGGGG | 3101 | CCCCCCGA GGCTAGCTACAACGA GTTGCACG | 11850 |
| 2049 | UCGGGGGG G CCGGUAAC | 3102 | GTTACCGG GGCTAGCTACAACGA CCCCCCGA | 11851 |
| 2053 | GGGGGCCG G UAACGACA | 3103 | TGTCGTTA GGCTAGCTACAACGA CGGCCCCC | 11852 |
| 2056 | GGCCGGUA A CGACACCU | 3104 | AGGTGTCG GGCTAGCTACAACGA TACCGGCC | 11853 |
| 2059 | CGGUAACG A CACCUUAA | 3105 | TTAAGGTG GGCTAGCTACAACGA CGTTACCG | 11854 |
| 2061 | GUAACGAC A CCUUAACC | 3106 | GGTTAAGG GGCTAGCTACAACGA GTCGTTAC | 11855 |
| 2067 | ACACCUUA A CCUGCCCC | 3107 | GGGGCAGG GGCTAGCTACAACGA TAAGGTGT | 11856 |
| 2071 | CUUAACCU G CCCCACGG | 3108 | CCGTGGGG GGCTAGCTACAACGA AGGTTAAG | 11857 |
| 2076 | CCUGCCCC A CGGACUGC | 3109 | GCAGTCCG GGCTAGCTACAACGA GGGGCAGG | 11858 |
| 2080 | CCCCACGG A CUGCUUCC | 3110 | GGAAGCAG GGCTAGCTACAACGA CCGTGGGG | 11859 |
| 2083 | CACGGACU G CUUCCGGA | 3111 | TCCGGAAG GGCTAGCTACAACGA AGTCCGTG | 11860 |
| 2093 | UUCCGGAA G CACCCCGA | 3112 | TCGGGGTG GGCTAGCTACAACGA TTCCGGAA | 11861 |
| 2095 | CCGGAAGC A CCCCGAGG | 3113 | CCTCGGGG GGCTAGCTACAACGA GCTTCCGG | 11862 |
| 2103 | ACCCCGAG G CCACUUAC | 3114 | GTAAGTGG GGCTAGCTACAACGA CTCGGGGT | 11863 |
| 2106 | CCGAGGCC A CUUACGCA | 3115 | TGCGTAAG GGCTAGCTACAACGA GGCCTCGG | 11864 |
| 2110 | GGCCACUU A CGCAAAGU | 3116 | ACTTTGCG GGCTAGCTACAACGA AAGTGGCC | 11865 |
| 2112 | CCACUUAC G CAAAGUGC | 3117 | GCACTTTG GGCTAGCTACAACGA GTAAGTGG | 11866 |
| 2117 | UACGCAAA G UGCGGUUC | 3118 | GAACCGCA GGCTAGCTACAACGA TTTGCGTA | 11867 |
| 2119 | CGCAAAGU G CGGUUCGG | 3119 | CCGAACCG GGCTAGCTACAACGA ACTTTGCG | 11868 |
| 2122 | AAAGUGCG G UUCGGCGC | 3120 | GCCCCGAA GGCTAGCTACAACGA CGCACTTT | 11869 |
| 2129 | GGUUCGGC G CCUUGGUU | 3121 | AACCAAGG GGCTAGCTACAACGA CCCGAACC | 11870 |
| 2135 | GGGCCUUG G UUAACACC | 3122 | GGTGTTAA GGCTAGCTACAACGA CAAGGCCC | 11871 |
| 2139 | CUUGGUUA A CACCUAGA | 3123 | TCTAGGTG GGCTAGCTACAACGA TAACCAAG | 11872 |
| 2141 | UGGUUAAC A CCUAGAUG | 3124 | CATCTAGG GGCTAGCTACAACGA GTTAACCA | 11873 |
| 2147 | ACACCUAG A UGCAUAGU | 3125 | ACTATGCA GGCTAGCTACAACGA CTAGGTGT | 11874 |
| 2149 | ACCUAGAU G CAUAGUUG | 3126 | CAACTATG GGCTAGCTACAACGA ATCTAGGT | 11875 |
| 2151 | CUAGAUGC A UAGUUGAC | 3127 | GTCAACTA GGCTAGCTACAACGA GCATCTAG | 11876 |
| 2154 | GAUGCAUA G UUGACUAC | 3128 | GTAGTCAA GGCTAGCTACAACGA TATGCATC | 11877 |
| 2158 | CAUAGUUG A CUACCCAU | 3129 | ATGGGTAG GGCTAGCTACAACGA CAACTATG | 11878 |
| 2161 | AGUUGACU A CCCAUACA | 3130 | TGTATGGG GGCTAGCTACAACGA AGTCAACT | 11879 |
| 2165 | GACUACCC A UACAGGCU | 3131 | AGCCTGTA GGCTAGCTACAACGA GGGTAGTC | 11880 |
| 2167 | CUACCCAU A CAGGCUUU | 3132 | AAAGCCTG GGCTAGCTACAACGA ATGGGTAG | 11881 |
| 2171 | CCAUACAG G CUUUGGCA | 3133 | TGCCAAAG GGCTAGCTACAACGA CTGTATGG | 11882 |
| 2177 | AGGCUUUG G CACUACCC | 3134 | GGGTAGTG GGCTAGCTACAACGA CAAAGCCT | 11883 |
| 2179 | GCUUUGGC A CUACCCCU | 3135 | AGGGGTAG GGCTAGCTACAACGA GCCAAAGC | 11884 |
| 2182 | UUGGCACU A CCCCUGCA | 3136 | TGCAGGGG GGCTAGCTACAACGA AGTGCCAA | 11885 |
| 2188 | CUACCCCU G CACUGUCA | 3137 | TGACAGTG GGCTAGCTACAACGA AGGGGTAG | 11886 |
| 2190 | ACCCCUGC A CUGUCAAU | 3138 | ATTGACAG GGCTAGCTACAACGA GCAGGGGT | 11887 |
| 2193 | CCUGCACU G UCAAUUUU | 3139 | AAAATTGA GGCTAGCTACAACGA AGTGCAGG | 11888 |
| 2197 | CACUGUCA A UUUUUCCA | 3140 | TGGAAAAA GGCTAGCTACAACGA TGACAGTG | 11889 |
| 2205 | AUUUUUCC A UCUUUAAG | 3141 | CTTAAAGA GGCTAGCTACAACGA GGAAAAAT | 11890 |
| 2214 | UCUUUAAG G UUAGGAUG | 3142 | CATCCTAA GGCTAGCTACAACGA CTTAAAGA | 11891 |
| 2220 | AGGUUAGG A UGUAUGUG | 3143 | CACATACA GGCTAGCTACAACGA CCTAACCT | 11892 |
| 2222 | GUUAGGAU G UAUGUGGG | 3144 | CCCACATA GGCTAGCTACAACGA ATCCTAAC | 11893 |
| 2224 | UAGGAUGU A UGUGGGGG | 3145 | CCCCCACA GGCTAGCTACAACGA ACATCCTA | 11894 |
| 2226 | GGAUGUAU G UGGGGGGC | 3146 | GCCCCCCA GGCTAGCTACAACGA ATACATCC | 11895 |
| 2233 | UGUGGGGG G CGUGGAGC | 3147 | GCTCCACG GGCTAGCTACAACGA CCCCCACA | 11896 |
| 2235 | UGGGGGGC G UGGAGCAC | 3148 | GTGCTCCA GGCTAGCTACAACGA GCCCCCCA | 11897 |
| 2240 | GGCGUGGA G CACAGGCU | 3149 | AGCCTGTG GGCTAGCTACAACGA TCCACGCC | 11898 |
| 2242 | CGUGGAGC A CAGGCUCA | 3150 | TGAGCCTG GGCTAGCTACAACGA GCTCCACG | 11899 |
| 2246 | GAGCACAG G CUCACCGC | 3151 | GCGGTGAG GGCTAGCTACAACGA CTGTGCTC | 11900 |
| 2250 | ACAGGCUC A CCGCCGCA | 3152 | TGCGGCGG GGCTAGCTACAACGA GAGCCTGT | 11901 |
| 2253 | GGCUCACC G CCGCAUGC | 3153 | GCATGCGG GGCTAGCTACAACGA GGTGAGCC | 11902 |
| 2256 | UCACCGCC G CAUGCAAU | 3154 | ATTGCATG GGCTAGCTACAACGA GGCGGTGA | 11903 |
| 2258 | ACCGCCGC A UGCAAUUG | 3155 | CAATTGCA GGCTAGCTACAACGA GCGGCGGT | 11904 |
| 2260 | CGCCGCAU G CAAUUGGA | 3156 | TCCAATTG GGCTAGCTACAACGA ATGCGGCG | 11905 |
| 2263 | CGCAUGCA A UUGGACUC | 3157 | GAGTCCAA GGCTAGCTACAACGA TGCATGCG | 11906 |
| 2268 | GCAAUUGG A CUCGAGGA | 3158 | TCCTCGAG GGCTAGCTACAACGA CCAATTGC | 11907 |
| 2279 | CGAGGAGA G CGUUGUGA | 3159 | TCACAACG GGCTAGCTACAACGA TCTCCTCG | 11908 |
| 2281 | AGGAGAGC G UUGUGAUU | 3160 | AATCACAA GGCTAGCTACAACGA GCTCTCCT | 11909 |
| 2284 | AGAGCGUU G UGAUUUGG | 3161 | CCAAATCA GGCTAGCTACAACGA AACGCTCT | 11910 |
| 2287 | GCGUUGUG A UUUGGAGG | 3162 | CCTCCAAA GGCTAGCTACAACGA CACAACGC | 11911 |
| 2296 | UUUGGAGG A CAGGGACA | 3163 | TGTCCCTG GGCTAGCTACAACGA CCTCCAAA | 11912 |
| 2302 | GGACAGGG A CAGAUCAG | 3164 | CTGATCTG GGCTAGCTACAACGA CCCTGTCC | 11913 |
| 2306 | AGGGACAG A UCAGAGCU | 3165 | AGCTCTGA GGCTAGCTACAACGA CTGTCCCT | 11914 |
| 2312 | AGAUCAGA G CUCAGCCC | 3166 | GGGCTGAG GGCTAGCTACAACGA TCTGATCT | 11915 |
| 2317 | AGAGCUCA G CCCGCUGC | 3167 | GCAGCGGG GGCTAGCTACAACGA TGAGCTCT | 11916 |
| 2321 | CUCAGCCC G CUGCUGUU | 3168 | AACAGCAG GGCTAGCTACAACGA GGGCTGAG | 11917 |
| 2324 | AGCCCGCU G CUGUUGUC | 3169 | GACAACAG GGCTAGCTACAACGA AGCGGGCT | 11918 |
| 2327 | CCGCUGCU G UUGUCCAC | 3170 | GTGGACAA GGCTAGCTACAACGA AGCAGCGG | 11919 |
| 2330 | CUGCUGUU G UCCACUAC | 3171 | GTAGTGGA GGCTAGCTACAACGA AACAGCAG | 11920 |
| 2334 | UGUUGUCC A CUACAGAG | 3172 | CTCTGTAG GGCTAGCTACAACGA GGACAACA | 11921 |
| 2337 | UGUCCACU A CAGAGUGG | 3173 | CCACTCTG GGCTAGCTACAACGA AGTGGACA | 11922 |
| 2342 | ACUACAGA G UGGCAAAU | 3174 | ATTTGCCA GGCTAGCTACAACGA TCTGTAGT | 11923 |
| 2345 | ACAGAGUG G CAAAUACU | 3175 | AGTATTTG GGCTAGCTACAACGA CACTCTGT | 11924 |
| 2349 | AGUGGCAA A UACUGCCC | 3176 | GGGCAGTA GGCTAGCTACAACGA TTGCCACT | 11925 |
| 2351 | UGGCAAAU A CUGCCCUG | 3177 | CAGGGCAG GGCTAGCTACAACGA ATTTGCCA | 11926 |
| 2354 | CAAAUACU G CCCUGCUC | 3178 | GAGCAGGG GGCTAGCTACAACGA AGTATTTG | 11927 |
| 2359 | ACUGCCCU G CUCCUUCA | 3179 | TGAAGGAG GGCTAGCTACAACGA AGGGCAGT | 11928 |
| 2367 | GCUCCUUC A CCACCCUA | 3180 | TAGGGTGG GGCTAGCTACAACGA GAAGGAGC | 11929 |
| 2370 | CCUUCACC A CCCUACCG | 3181 | CGGTAGGG GGCTAGCTACAACGA GGTGAAGG | 11930 |
| 2375 | ACCACCCU A CCGGCUCU | 3182 | AGAGCCGG GGCTAGCTACAACGA AGGGTGGT | 11931 |
| 2379 | CCCUACCG G CUCUGUCC | 3183 | GGACAGAG GGCTAGCTACAACGA CGGTAGGG | 11932 |
| 2384 | CCGGCUCU G UCCACUGG | 3184 | CCAGTGGA GGCTAGCTACAACGA AGAGCCGG | 11933 |
| 2388 | CUCUGUCC A CUGGUUUG | 3185 | CAAACCAG GGCTAGCTACAACGA GGACAGAG | 11934 |
| 2392 | GUCCACUG G UUUGAUCC | 3186 | GGATCAAA GGCTAGCTACAACGA CAGTGGAC | 11935 |
| 2397 | CUGGUUUG A UCCAUCUC | 3187 | GAGATGGA GGCTAGCTACAACGA CAAACCAG | 11936 |
| 2401 | UUUGAUCC A UCUCCACC | 3188 | GGTGGAGA GGCTAGCTACAACGA GGATCAAA | 11937 |
| 2407 | CCAUCUCC A CCAGAACA | 3189 | TGTTCTGG GGCTAGCTACAACGA GGAGATGG | 11938 |
| 2413 | CCACCAGA A CAUCGUGG | 3190 | CCACGATG GGCTAGCTACAACGA TCTGGTGG | 11939 |
| 2415 | ACCAGAAC A UCGUGGAC | 3191 | GTCCACGA GGCTAGCTACAACGA GTTCTGGT | 11940 |
| 2418 | AGAACAUC G UGGACGUG | 3192 | CACGTCCA GGCTAGCTACAACGA GATGTTCT | 11941 |
| 2422 | CAUCGUGG A CGUGCAAU | 3193 | ATTGCACG GGCTAGCTACAACGA CCACGATG | 11942 |
| 2424 | UCGUGGAC G UGCAAUAC | 3194 | GTATTGCA GGCTAGCTACAACGA GTCCACGA | 11943 |
| 2426 | GUGGACGU G CAAUACCU | 3195 | AGGTATTG GGCTAGCTACAACGA ACGTCCAC | 11944 |
| 2429 | GACGUGCA A UACCUGUA | 3196 | TACAGGTA GGCTAGCTACAACGA TGCACGTC | 11945 |
| 2431 | CGUGCAAU A CCUGUACG | 3197 | CGTACAGG GGCTAGCTACAACGA ATTGCACG | 11946 |
| 2435 | CAAUACCU G UACGGUGU | 3198 | ACACCGTA GGCTAGCTACAACGA AGGTATTG | 11947 |
| 2437 | AUACCUGU A CGGUGUAG | 3199 | CTACACCG GGCTAGCTACAACGA ACAGGTAT | 11948 |
| 2440 | CCUGUACG G UGUAGGGU | 3200 | ACCCTACA GGCTAGCTACAACGA CGTACAGG | 11949 |
| 2442 | UGUACGGU G UAGGGUCA | 3201 | TGACCCTA GGCTAGCTACAACGA ACCGTACA | 11950 |
| 2447 | GGUGUAGG G UCAGCGGU | 3202 | ACCGCTGA GGCTAGCTACAACGA CCTACACC | 11951 |
| 2451 | UAGGGUCA G CGGUUGUC | 3203 | GACAACCG GGCTAGCTACAACGA TGACCCTA | 11952 |
| 2454 | GGUCAGCG G UUGUCUCC | 3204 | GGAGACAA GGCTAGCTACAACGA CGCTGACC | 11953 |
| 2457 | CAGCGGUU G UCUCCUUC | 3205 | GAAGGAGA GGCTAGCTACAACGA AACCGCTG | 11954 |
| 2466 | UCUCCUUC G CAAUCAAA | 3206 | TTTGATTG GGCTAGCTACAACGA GAAGGAGA | 11955 |
| 2469 | CCUUCGCA A UCAAAUGG | 3207 | CCATTTGA GGCTAGCTACAACGA TGCGAAGG | 11956 |
| 2474 | GCAAUCAA A UGGGAGUA | 3208 | TACTCCCA GGCTAGCTACAACGA TTGATTGC | 11957 |
| 2480 | AAAUGGGA G UAUGUCCU | 3209 | AGGACATA GGCTAGCTACAACGA TCCCATTT | 11958 |
| 2482 | AUGGGAGU A UGUCCUGU | 3210 | ACAGGACA GGCTAGCTACAACGA ACTCCCAT | 11959 |
| 2484 | GGGAGUAU G UCCUGUUG | 3211 | CAACAGGA GGCTAGCTACAACGA ATACTCCC | 11960 |
| 2489 | UAUGUCCU G UUGCUUUU | 3212 | AAAAGCAA GGCTAGCTACAACGA AGGACATA | 11961 |
| 2492 | GUCCUGUU G CUUUUCCU | 3213 | AGGAAAAG GGCTAGCTACAACGA AACAGGAC | 11962 |
| 2508 | UUCUCCUG G CAGACGCG | 3214 | CGCGTCTG GGCTAGCTACAACGA CAGGAGAA | 11963 |
| 2512 | CCUGGCAG A CGCGCGCG | 3215 | CGCGCGCG GGCTAGCTACAACGA CTGCCAGG | 11964 |
| 2514 | UGGCAGAC G CGCGCGUC | 3216 | GACGCGCG GGCTAGCTACAACGA GTCTGCCA | 11965 |
| 2516 | GCAGACGC G CGCGUCUG | 3217 | CAGACGCG GGCTAGCTACAACGA GCGTCTGC | 11966 |
| 2518 | AGACGCGC G CGUCUGUG | 3218 | CACAGACG GGCTAGCTACAACGA GCGCGTCT | 11967 |
| 2520 | ACGCGCGC G UCUGUGCC | 3219 | GGCACAGA GGCTAGCTACAACGA GCGCGCGT | 11968 |
| 2524 | GCGCGUCU G UGCCUGUU | 3220 | AACAGGCA GGCTAGCTACAACGA AGACGCGC | 11969 |
| 2526 | GCGUCUGU G CCUGUUUG | 3221 | CAAACAGG GGCTAGCTACAACGA ACAGACGC | 11970 |
| 2530 | CUGUGCCU G UUUGUGGA | 3222 | TCCACAAA GGCTAGCTACAACGA AGGCACAG | 11971 |
| 2534 | GCCUGUUU G UGGAUGAU | 3223 | ATCATCCA GGCTAGCTACAACGA AAACAGGC | 11972 |
| 2538 | GUUUGUGG A UGAUGCUG | 3224 | CAGCATCA GGCTAGCTACAACGA CCACAAAC | 11973 |
| 2541 | UGUGGAUG A UGCUGUUG | 3225 | CAACAGCA GGCTAGCTACAACGA CATCCACA | 11974 |
| 2543 | UGGAUGAU G CUGUUGGU | 3226 | ACCAACAG GGCTAGCTACAACGA ATCATCCA | 11975 |
| 2546 | AUGAUGCU G UUGGUAGC | 3227 | GCTACCAA GGCTAGCTACAACGA AGCATCAT | 11976 |
| 2550 | UGCUGUUG G UAGCCCAG | 3228 | CTGGGCTA GGCTAGCTACAACGA CAACAGCA | 11977 |
| 2553 | UGUUGGUA G CCCAGGCC | 3229 | GGCCTGGG GGCTAGCTACAACGA TACCAACA | 11978 |
| 2559 | UAGCCCAG G CCGAGGCU | 3230 | ACCCTCGG GGCTAGCTACAACGA CTGGGCTA | 11979 |
| 2565 | AGGCCGAG G CUGCCCUA | 3231 | TAGGGCAG GGCTAGCTACAACGA CTCGGCCT | 11980 |
| 2568 | CCGAGGCU G CCCUAGAG | 3232 | CTCTAGGG GCCTAGCTACAACGA AGCCTCGG | 11981 |
| 2578 | CCUAGAGA A CCUGGUGG | 3233 | CCACCAGG GGCTAGCTACAACGA TCTCTAGG | 11982 |
| 2583 | AGAACCUG G UGGUCCUC | 3234 | GAGGACCA GGCTAGCTACAACGA CAGGTTCT | 11983 |
| 2586 | ACCUGGUG G UCCUCAAU | 3235 | ATTGAGGA GGCTAGCTACAACGA CACCAGGT | 11984 |
| 2593 | GGUCCUCA A UGCAGCAU | 3236 | ATGCTGCA GGCTAGCTACAACGA TGAGGACC | 11985 |
| 2595 | UCCUCAAU G CAGCAUCC | 3237 | GGATGCTG GGCTAGCTACAACGA ATTGAGGA | 11986 |
| 2598 | UCAAUGCA G CAUCCUUG | 3238 | CAAGGATG GGCTAGCTACAACGA TGCATTGA | 11987 |
| 2600 | AAUGCAGC A UCCUUGGC | 3239 | GCCAAGGA GGCTAGCTACAACGA GCTGCATT | 11988 |
| 2607 | CAUCCUUG G CCGGAGUG | 3240 | CACTCCGG GGCTAGCTACAACGA CAAGGATG | 11989 |
| 2613 | UGGCCGGA G UGCAUGGC | 3241 | GCCATGCA GGCTAGCTACAACGA TCCGGCCA | 11990 |
| 2615 | GCCGGAGU G CAUGGCAU | 3242 | ATGCCATG GGCTAGCTACAACGA ACTCCGGC | 11991 |
| 2617 | CGGAGUGC A UGGCAUCC | 3243 | GGATGCCA GGCTAGCTACAACGA GCACTCCG | 11992 |
| 2620 | AGUGCAUG G CAUCCUCU | 3244 | AGAGGATG GGCTAGCTACAACGA CATGCACT | 11993 |
| 2622 | UGCAUGGC A UCCUCUCC | 3245 | GGAGAGGA GGCTAGCTACAACGA GCCATGCA | 11994 |
| 2637 | CCUUCCUC G UGUUCUUC | 3246 | GAAGAACA GGCTAGCTACAACGA GAGGAAGG | 11995 |
| 2639 | UUCCUCGU G UUCUUCUG | 3247 | CAGAAGAA GGCTAGCTACAACGA ACGAGGAA | 11996 |
| 2647 | GUUCUUCU G UGCUGCCU | 3248 | AGGCAGCA GGCTAGCTACAACCA AGAAGAAC | 11997 |
| 2649 | UCUUCUGU G CUGCCUGG | 3249 | CCAGGCAG GGCTAGCTACAACGA ACAGAAGA | 11998 |
| 2652 | UCUGUGCU G CCUGGUAC | 3250 | GTACCAGG GGCTAGCTACAACGA AGCACAGA | 11999 |
| 2657 | GCUGCCUG G UACAUCAA | 3251 | TTGATGTA GGCTAGCTACAACGA CAGGCAGC | 12000 |
| 2659 | UGCCUGGU A CAUCAAAG | 3252 | CTTTGATG GGCTAGCTACAACGA ACCAGGCA | 12001 |
| 2661 | CCUGGUAC A UCAAAGGC | 3253 | GCCTTTGA GGCTAGCTACAACGA GTACCAGG | 12002 |
| 2668 | CAUCAAAG G CAAGCUGG | 3254 | CCAGCTTG GGCTAGCTACAACGA CTTTGATG | 12003 |
| 2672 | AAAGGCAA G CUGGUCCC | 3255 | GGGACCAG GGCTAGCTACAACGA TTGCCTTT | 12004 |
| 2676 | GCAAGCUG G UCCCUGGG | 3256 | CCCAGGGA GGCTAGCTACAACGA CAGCTTGC | 12005 |
| 2685 | UCCCUGGG G CGGCAUAU | 3257 | ATATGCCG GGCTAGCTACAACGA CCCAGGGA | 12006 |
| 2688 | CUGGGGCG G CAUAUGCU | 3258 | AGCATATG GGCTAGCTACAACGA CGCCCCAG | 12007 |
| 2690 | GGGGCGGC A UAUGCUCU | 3259 | AGAGCATA GGCTAGCTACAACGA GCCGCCCC | 12008 |
| 2692 | GGCGGCAU A UGCUCUCU | 3260 | AGAGAGCA GGCTAGCTACAACGA ATGCCGCC | 12009 |
| 2694 | CGGCAUAU G CUCUCUAC | 3261 | GTAGAGAG GGCTAGCTACAACGA ATATGCCG | 12010 |
| 2701 | UGCUCUCU A CGGCGUAU | 3262 | ATACGCCG GGCTAGCTACAACGA AGAGAGCA | 12011 |
| 2704 | UCUCUACG G CGUAUGGC | 3263 | GCCATACG GGCTAGCTACAACGA CGTAGAGA | 12012 |
| 2706 | UCUACGGC G UAUGGCCG | 3264 | CGGCCATA GGCTAGCTACAACGA GCCGTAGA | 12013 |
| 2708 | UACGGCGU A UGGCCGCU | 3265 | AGCGGCCA GGCTAGCTACAACGA ACGCCGTA | 12014 |
| 2711 | GGCGUAUG G CCGCUACU | 3266 | AGTAGCGG GGCTAGCTACAACGA CATACGCC | 12015 |
| 2714 | GUAUGGCC G CUACUCCU | 3267 | AGGAGTAG GGCTAGCTACAACGA GGCCATAC | 12016 |
| 2717 | UGGCCGCU A CUCCUGCU | 3268 | AGCAGGAG GGCTAGCTACAACGA AGCGGCCA | 12017 |
| 2723 | CUACUCCU G CUCCUGCU | 3269 | AGCAGGAG GGCTAGCTACAACGA AGGAGTAG | 12018 |
| 2729 | CUGCUCCU G CUGGCGUU | 3270 | AACGCCAG GGCTAGCTACAACGA AGGAGCAG | 12019 |
| 2733 | UCCUGCUG G CGUUACCA | 3271 | TGGTAACG GGCTAGCTACAACGA CAGCAGGA | 12020 |
| 2735 | CUGCUGGC G UUACCACC | 3272 | GGTGGTAA GGCTAGCTACAACGA GCCAGCAG | 12021 |
| 2738 | CUGGCGUU A CCACCACG | 3273 | CGTGGTGG GGCTAGCTACAACGA AACGCCAG | 12022 |
| 2741 | GCGUUACC A CCACGGGC | 3274 | GCCCGTGG GGCTAGCTACAACGA GGTAACGC | 12023 |
| 2744 | UUACCACC A CGGGCGUA | 3275 | TACGCCCG GGCTAGCTACAACGA GGTGGTAA | 12024 |
| 2748 | CACCACGG G CGUACGCC | 3276 | GGCGTACG GGCTAGCTACAACGA CCGTGGTG | 12025 |
| 2750 | CCACGGGC G UACGCCAU | 3277 | ATGGCGTA GGCTAGCTACAACGA GCCCGTGG | 12026 |
| 2752 | ACGGGCGU A CGCCAUGG | 3278 | CCATGGCG GGCTAGCTACAACGA ACGCCCGT | 12027 |
| 2754 | GGGCGUAC G CCAUGGAC | 3279 | GTCCATGG GGCTAGCTACAACGA GTACGCCC | 12028 |
| 2757 | CGUACGCC A UGGACCGG | 3280 | CCGGTCCA GGCTAGCTACAACGA GGCGTACG | 12029 |
| 2761 | CGCCAUGG A CCGGGAGA | 3281 | TCTCCCGG GGCTAGCTACAACGA CCATGGCG | 12030 |
| 2769 | ACCGGGAG A UGGCCGCA | 3282 | TGCGGCCA GGCTAGCTACAACGA CTCCCGGT | 12031 |
| 2772 | GGGAGAUG G CCGCAUCG | 3283 | CGATGCGG GGCTAGCTACAACGA CATCTCCC | 12032 |
| 2775 | AGAUGGCC G CAUCGUGC | 3284 | GCACGATG GGCTAGCTACAACGA GGCCATCT | 12033 |
| 2777 | AUGGCCGC A UCGUGCGG | 3285 | CCGCACGA GGCTAGCTACAACGA GCGGCCAT | 12034 |
| 2780 | GCCGCAUC G UGCGGAGG | 3286 | CCTCCGCA GGCTAGCTACAACGA GATGCGGC | 12035 |
| 2782 | CGCAUCGU G CGGAGGCG | 3287 | CGCCTCCG GGCTAGCTACAACGA ACGATGCG | 12036 |
| 2788 | GUGCGGAG G CGUGGUUU | 3288 | AAACCACG GGCTAGCTACAACGA CTCCGCAC | 12037 |
| 2790 | GCGGAGGC G UGGUUUUU | 3289 | AAAAACCA GGCTAGCTACAACGA GCCTCCGC | 12038 |
| 2793 | GAGGCGUG G UUUUUGUA | 3290 | TACAAAAA GGCTAGCTACAACGA CACGCCTC | 12039 |
| 2799 | UGGUUUUU G UAGGUCUA | 3291 | TAGACCTA GGCTAGCTACAACGA AAAAACCA | 12040 |
| 2803 | UUUUGUAG G UCUAGCAC | 3292 | GTGCTAGA GGCTAGCTACAACGA CTACAAAA | 12041 |
| 2808 | UAGGUCUA G CACUCUUG | 3293 | CAAGAGTG GGCTAGCTACAACGA TAGACCTA | 12042 |
| 2810 | GGUCUAGC A CUCUUGAC | 3294 | GTCAAGAG GGCTAGCTACAACGA GCTAGACC | 12043 |
| 2817 | CACUCUUG A CCUUGUCA | 3295 | TGACAAGG GGCTAGCTACAACGA CAAGAGTG | 12044 |
| 2822 | UUGACCUU G UCACCAUA | 3296 | TATGGTGA GGCTAGCTACAACGA AAGGTCAA | 12045 |
| 2825 | ACCUUGUC A CCAUACUA | 3297 | TAGTATGG GGCTAGCTACAACGA GACAAGGT | 12046 |
| 2828 | UUGUCACC A UACUACAA | 3298 | TTGTAGTA GGCTAGCTACAACGA GGTGACAA | 12047 |
| 2830 | GUCACCAU A CUACAAAG | 3299 | CTTTGTAG GGCTAGCTACAACGA ATGGTGAC | 12048 |
| 2833 | ACCAUACU A CAAAGUGU | 3300 | ACACTTTG GGCTAGCTACAACGA AGTATGGT | 12049 |
| 2838 | ACUACAAA G UGUUCCUC | 3301 | GAGGAACA GGCTAGCTACAACGA TTTGTAGT | 12050 |
| 2840 | UACAAAGU G UUCCUCGC | 3302 | GCGAGGAA GGCTAGCTACAACGA ACTTTGTA | 12051 |
| 2847 | UGUUCCUC G CUAGGCUC | 3303 | GAGCCTAG GGCTAGCTACAACGA GAGGAACA | 12052 |
| 2852 | CUCGCUAG G CUCAUAUG | 3304 | CATATGAG GGCTAGCTACAACGA CTAGCGAG | 12053 |
| 2856 | CUAGGCUC A UAUGGUGG | 3305 | CCACCATA GGCTAGCTACAACGA GAGCCTAG | 12054 |
| 2858 | AGGCUCAU A UGGUGGUU | 3306 | AACCACCA GGCTAGCTACAACGA ATGAGCCT | 12055 |
| 2861 | CUCAUAUG G UGGUUGCA | 3307 | TGCAACCA GGCTAGCTACAACGA CATATGAG | 12056 |
| 2864 | AUAUGGUG G UUGCAAUA | 3308 | TATTGCAA GGCTAGCTACAACGA CACCATAT | 12057 |
| 2867 | UGGUGGUU G CAAUACCU | 3309 | AGGTATTG GGCTAGCTACAACGA AACCACCA | 12058 |
| 2870 | UGGUUGCA A UACCUUAU | 3310 | ATAAGGTA GGCTAGCTACAACGA TGCAACCA | 12059 |
| 2872 | GUUGCAAU A CCUUAUCA | 3311 | TGATAAGG GGCTAGCTACAACGA ATTGCAAC | 12060 |
| 2877 | AAUACCUU A UCACCAGA | 3312 | TCTGGTGA GGCTAGCTACAACGA AAGGTATT | 12061 |
| 2880 | ACCUUAUC A CCAGAGCC | 3313 | GGCTCTGG GGCTAGCTACAACGA GATAAGGT | 12062 |
| 2886 | UCACCAGA G CCGAGGCG | 3314 | CGCCTCGG GGCTAGCTACAACGA TCTGGTGA | 12063 |
| 2892 | GAGCCGAG G CGCAGUUG | 3315 | CAACTGCG GGCTAGCTACAACGA CTCGGCTC | 12064 |
| 2894 | GCCGAGGC G CAGUUGCA | 3316 | TGCAACTG GGCTAGCTACAACGA GCCTCGGC | 12065 |
| 2897 | GAGGCGCA G UUGCAAGU | 3317 | ACTTGCAA GGCTAGCTACAACGA TGCGCCTC | 12066 |
| 2900 | GCGCAGUU G CAAGUGUG | 3318 | CACACTTG GGCTAGCTACAACGA AACTGCGC | 12067 |
| 2904 | AGUUGCAA G UGUGGAUC | 3319 | GATCCACA GGCTAGCTACAACGA TTGCAACT | 12068 |
| 2906 | UUGCAAGU G UGGAUCCC | 3320 | GGGATCCA GGCTAGCTACAACGA ACTTGCAA | 12069 |
| 2910 | AAGUGUGG A UCCCCCCC | 3321 | GGGGGGGA GGCTAGCTACAACGA CCACACTT | 12070 |
| 2923 | CCCCCUCA A CGUUCGGG | 3322 | CCCGAACG GGCTAGCTACAACGA TGAGGGGG | 12071 |
| 2925 | CCCUCAAC G UUCGGGGG | 3323 | CCCCCGAA GGCTAGCTACAACGA GTTGAGGG | 12072 |
| 2936 | CGGGGGGG G CGCGGUGC | 3324 | GCACCGCG GGCTAGCTACAACGA CCCCCCCG | 12073 |
| 2938 | GGGGGGGC G CGGUGCCA | 3325 | TGGCACCG GGCTAGCTACAACGA GCCCCCCC | 12074 |
| 2941 | GGGGCGCG G UGCCAUCA | 3326 | TGATGGCA GGCTAGCTACAACGA CGCGCCCC | 12075 |
| 2943 | GGCGCGGU G CCAUCAUU | 3327 | AATGATGG GGCTAGCTACAACGA ACCGCGCC | 12076 |
| 2946 | GCGGUGCC A UCAUUCUC | 3328 | GAGAATGA GGCTAGCTACAACGA GGCACCGC | 12077 |
| 2949 | GUGCCAUC A UUCUCCUC | 3329 | GAGCAGAA GGCTAGCTACAACGA GATGGCAC | 12078 |
| 2958 | UUCUCCUC A CGUGUGUG | 3330 | CACACACG GGCTAGCTACAACGA GAGGAGAA | 12079 |
| 2960 | CUCCUCAC G UGUGUGGU | 3331 | ACCACACA GGCTAGCTACAACGA GTGAGGAG | 12080 |
| 2962 | CCUCACGU G UGUGGUCC | 3332 | GGACCACA GGCTAGCTACAACGA ACGTGAGG | 12081 |
| 2964 | UCACGUGU G UGGUCCAC | 3333 | GTGGACCA GGCTAGCTACAACGA ACACGTGA | 12082 |
| 2967 | CGUGUGUG G UCCACCCA | 3334 | TGGGTGGA GGCTAGCTACAACGA CACACACG | 12083 |
| 2971 | UGUGGUCC A CCCAGAGC | 3335 | GCTCTGGG GGCTAGCTACAACGA GGACCACA | 12084 |
| 2978 | CACCCAGA G CUAAUCUU | 3336 | AAGATTAG GGCTAGCTACAACGA TCTGGGTG | 12085 |
| 2982 | CAGAGCUA A UCUUUGAC | 3337 | GTCAAAGA GGCTAGCTACAACGA TAGCTCTG | 12086 |
| 2989 | AAUCUUUG A CAUCACCA | 3338 | TGGTGATG GGCTAGCTACAACGA CAAAGATT | 12087 |
| 2991 | UCUUUGAC A UCACCAAA | 3339 | TTTGGTGA GGCTAGCTACAACGA GTCAAAGA | 12088 |
| 2994 | UUGACAUC A CCAAAAUU | 3340 | AATTTTGG GGCTAGCTACAACGA GATGTCAA | 12089 |
| 3000 | UCACCAAA A UUAUGCUC | 3341 | GAGCATAA GGCTAGCTACAACGA TTTGGTGA | 12090 |
| 3003 | CCAAAAUU A UGCUCGCC | 3342 | GGCGAGCA GGCTAGCTACAACGA AATTTTGG | 12091 |
| 3005 | AAAAUUAU G CUCGCCAU | 3343 | ATGGCGAG GGCTAGCTACAACGA ATAATTTT | 12092 |
| 3009 | UUAUGCUC G CCAUACUC | 3344 | GAGTATGG GGCTAGCTACAACGA GAGCATAA | 12093 |
| 3012 | UGCUCGCC A UACUCGGC | 3345 | GCCGAGTA GGCTAGCTACAACGA GGCGAGCA | 12094 |
| 3014 | CUCGCCAU A CUCGGCCC | 3346 | GGGCCGAG GGCTAGCTACAACGA ATGGCGAG | 12095 |
| 3019 | CAUACUCG G CCCGCUCA | 3347 | TGAGCGGG GGCTAGCTACAACGA CGAGTATG | 12096 |
| 3023 | CUCGGCCC G CUCAUGGU | 3348 | ACCATGAG GGCTAGCTACAACGA GGGCCGAG | 12097 |
| 3027 | GCCCGCUC A UGGUGCUC | 3349 | GAGCACCA GGCTAGCTACAACGA GAGCGGGC | 12098 |
| 3030 | CGCUCAUG G UGCUCCAG | 3350 | CTGGAGCA GGCTAGCTACAACGA CATGAGCG | 12099 |
| 3032 | CUCAUGGU G CUCCAGGC | 3351 | GCCTGGAG GGCTAGCTACAACGA ACCATGAG | 12100 |
| 3039 | UGCUCCAG G CUGGUAUA | 3352 | TATACCAG GGCTAGCTACAACGA CTGGAGCA | 12101 |
| 3043 | CCAGGCUG G UAUAGCAA | 3353 | TTGCTATA GGCTAGCTACAACGA CAGCCTGG | 12102 |
| 3045 | AGGCUGGU A UAGCAAAA | 3354 | TTTTGCTA GGCTAGCTACAACGA ACCAGCCT | 12103 |
| 3048 | CUGGUAUA G CAAAAGUG | 3355 | CACTTTTG GGCTAGCTACAACGA TATACCAG | 12104 |
| 3054 | UAGCAAAA G UGCCGGAC | 3356 | GTCCGGCA GGCTAGCTACAACGA TTTTGCTA | 12105 |
| 3056 | GCAAAAGU G CCGGACUU | 3357 | AAGTCCGG GGCTAGCTACAACGA ACTTTTGC | 12106 |
| 3061 | AGUGCCGG A CUUUGUGC | 3358 | GCACAAAG GGCTAGCTACAACGA CCGGCACT | 12107 |
| 3066 | CGGACUUU G UGCGGGCU | 3359 | AGCCCGCA GGCTAGCTACAACGA AAAGTCCG | 12108 |
| 3068 | GACUUUGU G CGGGCUCA | 3360 | TGAGCCCG GGCTAGCTACAACGA ACAAAGTC | 12109 |
| 3072 | UUGUGCGG G CUCAAGGG | 3361 | CCCTTGAG GGCTAGCTACAACGA CCGCACAA | 12110 |
| 3081 | CUCAAGGG G UCAUCCGU | 3362 | ACGGATGA GGCTAGCTACAACGA CCCTTGAG | 12111 |
| 3084 | AAGGGGUC A UCCGUGAA | 3363 | TTCACGGA GGCTAGCTACAACGA GACCCCTT | 12112 |
| 3088 | GGUCAUCC G UGAAUGCA | 3364 | TGCATTCA GGCTAGCTACAACGA GGATGACC | 12113 |
| 3092 | AUCCGUGA A UGCAUUUU | 3365 | AAAATGCA GGCTAGCTACAACGA TCACGGAT | 12114 |
| 3094 | CCGUGAAU G CAUUUUGG | 3366 | CCAAAATG GGCTAGCTACAACGA ATTCACGG | 12115 |
| 3096 | GUGAAUGC A UUUUGGUG | 3367 | CACCAAAA GGCTAGCTACAACGA GCATTCAC | 12116 |
| 3102 | GCAUUUUG G UGCGGAAA | 3368 | TTTCCGCA GGCTAGCTACAACGA CAAAATGC | 12117 |
| 3104 | AUUUUGGU G CGGAAAGU | 3369 | ACTTTCCG GGCTAGCTACAACGA ACCAAAAT | 12118 |
| 3111 | UGCGGAAA G UCGGUGGG | 3370 | CCCACCGA GGCTAGCTACAACGA TTTCCGCA | 12119 |
| 3115 | GAAAGUCG G UGGGGGGC | 3371 | GCCCCCCA GGCTAGCTACAACGA CGACTTTC | 12120 |
| 3122 | GGUGGGGG G CAAUAUGU | 3372 | ACATATTG GGCTAGCTACAACGA CCCCCACC | 12121 |
| 3125 | GGGGGGCA A UAUGUCCA | 3373 | TGGACATA GGCTAGCTACAACGA TGCCCCCC | 12122 |
| 3127 | GGGGCAAU A UGUCCAAA | 3374 | TTTGGACA GGCTAGCTACAACGA ATTGCCCC | 12123 |
| 3129 | GGCAAUAU G UCCAAAUG | 3375 | CATTTGGA GGCTAGCTACAACGA ATATTGCC | 12124 |
| 3135 | AUGUCCAA A UGGCCUUC | 3376 | GAAGGCCA GGCTAGCTACAACGA TTGGACAT | 12125 |
| 3138 | UCCAAAUG G CCUUCAUG | 3377 | CATGAAGG GGCTAGCTACAACGA CATTTGGA | 12126 |
| 3144 | UGGCCUUC A UGAAGUUG | 3378 | CAACTTCA GGCTAGCTACAACGA GAAGGCCA | 12127 |
| 3149 | UUCAUGAA G UUGGCCCA | 3379 | TCGGCCAA GGCTAGCTACAACGA TTCATGAA | 12128 |
| 3153 | UGAAGUUG G CCGAAUUG | 3380 | CAATTCGG GGCTAGCTACAACGA CAACTTCA | 12129 |
| 3158 | UUGGCCGA A UUGAAAGG | 3381 | CCTTTCAA GGCTAGCTACAACGA TCGGCCAA | 12130 |
| 3166 | AUUGAAAG G UACGUCCG | 3382 | CGGACGTA GGCTAGCTACAACGA CTTTCAAT | 12131 |
| 3168 | UGAAAGGU A CGUCCGUC | 3383 | GACGGACG GGCTAGCTACAACGA ACCTTTCA | 12132 |
| 3170 | AAAGGUAC G UCCGUCUA | 3384 | TAGACGGA GGCTAGCTACAACGA GTACCTTT | 12133 |
| 3174 | GUACGUCC G UCUAUGAC | 3385 | GTCATAGA GGCTAGCTACAACGA GGACGTAC | 12134 |
| 3178 | GUCCGUCU A UGACCACC | 3386 | GGTGGTCA GGCTAGCTACAACGA AGACGGAC | 12135 |
| 3181 | CGUCUAUG A CCACCUCA | 3387 | TGAGGTGG GGCTAGCTACAACGA CATAGACG | 12136 |
| 3184 | CUAUGACC A CCUCACUC | 3388 | GAGTGAGG GGCTAGCTACAACGA GGTCATAG | 12137 |
| 3189 | ACCACCUC A CUCCACUG | 3389 | CAGTGGAG GGCTAGCTACAACGA GAGGTGGT | 12138 |
| 3194 | CUCACUCC A CUGCAGGA | 3390 | TCCTGCAG GGCTAGCTACAACGA GGAGTGAG | 12139 |
| 3197 | ACUCCACU G CAGGACUG | 3391 | CAGTCCTG GGCTAGCTACAACGA AGTGGAGT | 12140 |
| 3202 | ACUGCAGG A CUGGGCCC | 3392 | GGGCCCAG GGCTAGCTACAACGA CCTGCAGT | 12141 |
| 3207 | AGGACUGG G CCCACACA | 3393 | TGTGTGGG GGCTAGCTACAACGA CCAGTCCT | 12142 |
| 3211 | CUGGGCCC A CACAGGUC | 3394 | GACCTGTG GGCTAGCTACAACGA GGGCCCAG | 12143 |
| 3213 | GGGCCCAC A CAGGUCUA | 3395 | TAGACCTG GGCTAGCTACAACGA GTGGGCCC | 12144 |
| 3217 | CCACACAG G UCUACGAG | 3396 | CTCGTAGA GGCTAGCTACAACGA CTGTGTGG | 12145 |
| 3221 | ACAGGUCU A CGAGACCU | 3397 | AGGTCTCG GGCTAGCTACAACGA AGACCTGT | 12146 |
| 3226 | UCUACGAG A CCUGGCGG | 3398 | CCGCCAGG GGCTAGCTACAACGA CTCGTAGA | 12147 |
| 3231 | GAGACCUG G CGGUAGCG | 3399 | CGCTACCG GGCTAGCTACAACGA CAGGTCTC | 12148 |
| 3234 | ACCUGGCG G UAGCGGUC | 3400 | GACCGCTA GGCTAGCTACAACGA CGCCAGGT | 12149 |
| 3237 | UGGCGGUA G CGGUCGAG | 3401 | CTCGACCG GGCTAGCTACAACGA TACCGCCA | 12150 |
| 3240 | CGGUAGCG G UCGAGCCC | 3402 | GGGCTCGA GGCTAGCTACAACGA CGCTACCG | 12151 |
| 3245 | GCGGUCGA G CCCGUCGU | 3403 | ACGACGGG GGCTAGCTACAACGA TCGACCGC | 12152 |
| 3249 | UCGAGCCC G UCGUCUUC | 3404 | GAAGACGA GGCTAGCTACAACGA GGGCTCGA | 12153 |
| 3252 | AGCCCGUC G UCUUCUCC | 3405 | GGAGAAGA GGCTAGCTACAACGA GACGGGCT | 12154 |
| 3262 | CUUCUCCG A CAUGGAAA | 3406 | TTTCCATG GGCTAGCTACAACGA CGGAGAAG | 12155 |
| 3264 | UCUCCGAC A UGGAAAUC | 3407 | GATTTCCA GGCTAGCTACAACGA GTCGGAGA | 12156 |
| 3270 | ACAUGGAA A UCAAGAUC | 3408 | GATCTTGA GGCTAGCTACAACGA TTCCATGT | 12157 |
| 3276 | AAAUCAAG A UCAUCACC | 3409 | GGTGATGA GGCTAGCTACAACGA CTTGATTT | 12158 |
| 3279 | UCAAGAUC A UCACCUGG | 3410 | CCAGGTGA GGCTAGCTACAACGA GATCTTGA | 12159 |
| 3282 | AGAUCAUC A CCUGGGGG | 3411 | CCCCCAGG GGCTAGCTACAACGA GATGATCT | 12160 |
| 3295 | GGGGGGAG A CACCGCGG | 3412 | CCGCGGTG GGCTAGCTACAACGA CTCCCCCC | 12161 |
| 3297 | GGGGAGAC A CCGCGGCG | 3413 | CGCCGCGG GGCTAGCTACAACGA GTCTCCCC | 12162 |
| 3300 | GAGACACC G CGGCGUGU | 3414 | ACACGCCG GGCTAGCTACAACGA GGTGTCTC | 12163 |
| 3303 | ACACCGCG G CGUGUGGG | 3415 | CCCACACG GGCTAGCTACAACGA CGCGGTGT | 12164 |
| 3305 | ACCGCGGC G UGUGGGGA | 3416 | TCCCCACA GGCTAGCTACAACGA GCCGCGGT | 12165 |
| 3307 | CGCGGCGU G UGGGGACA | 3417 | TGTCCCCA GGCTAGCTACAACGA ACGCCGCG | 12166 |
| 3313 | GUGUGGGG A CAUCAUUA | 3418 | TAATGATG GGCTAGCTACAACGA CCCCACAC | 12167 |
| 3315 | GUGGGGAC A UCAUUAUG | 3419 | CATAATGA GGCTAGCTACAACGA GTCCCCAC | 12168 |
| 3318 | GGGACAUC A UUAUGGGU | 3420 | ACCCATAA GGCTAGCTACAACGA GATGTCCC | 12169 |
| 3321 | ACAUCAUU A UGGGUCUA | 3421 | TAGACCCA GGCTAGCTACAACGA AATGATGT | 12170 |
| 3325 | CAUUAUGG G UCUACCUG | 3422 | CAGGTAGA GGCTAGCTACAACGA CCATAATG | 12171 |
| 3329 | AUGGGUCU A CCUGUCUC | 3423 | GAGACAGG GGCTAGCTACAACGA AGACCCAT | 12172 |
| 3333 | GUCUACCU G UCUCCGCC | 3424 | GGCGGAGA GGCTAGCTACAACGA AGGTAGAC | 12173 |
| 3339 | CUGUCUCC G CCCGAAGG | 3425 | CCTTCGGG GGCTAGCTACAACGA GGAGACAG | 12174 |
| 3357 | GGAGGGAG A UACUCCUA | 3426 | TAGGAGTA GGCTAGCTACAACGA CTCCCTCC | 12175 |
| 3359 | AGGGAGAU A CUCCUAGG | 3427 | CCTAGGAG GGCTAGCTACAACGA ATCTCCCT | 12176 |
| 3368 | CUCCUAGG A CCAGCCGA | 3428 | TCGGCTGG GGCTAGCTACAACGA CCTAGGAG | 12177 |
| 3372 | UAGGACCA G CCGACAGU | 3429 | ACTGTCGG GGCTAGCTACAACGA TGGTCCTA | 12178 |
| 3376 | ACCAGCCG A CAGUCUUG | 3430 | CAAGACTG GGCTAGCTACAACGA CGGCTGGT | 12179 |
| 3379 | AGCCGACA G UCUUGAGG | 3431 | CCTCAAGA GGCTAGCTACAACGA TGTCGGCT | 12180 |
| 3389 | CUUGAGGG G CAGGGGUG | 3432 | CACCCCTG GGCTAGCTACAACGA CCCTCAAG | 12181 |
| 3395 | GGGCAGGG G UGGCGACU | 3433 | AGTCGCCA GGCTAGCTACAACGA CCCTGCCC | 12182 |
| 3398 | CAGGGGUG G CGACUCCU | 3434 | AGGAGTCG GGCTAGCTACAACGA CACCCCTG | 12183 |
| 3401 | GGGUGGCG A CUCCUCGC | 3435 | GCGAGGAG GGCTAGCTACAACGA CGCCACCC | 12184 |
| 3408 | GACUCCUC G CGCCCAUU | 3436 | AATGGGCG GGCTAGCTACAACGA GAGGAGTC | 12185 |
| 3410 | CUCCUCGC G CCCAUUAC | 3437 | GTAATGGG GGCTAGCTACAACGA GCGAGGAG | 12186 |
| 3414 | UCGCGCCC A UUACGGCC | 3438 | GGCCGTAA GGCTAGCTACAACGA GGGCGCGA | 12187 |
| 3417 | CGCCCAUU A CGGCCUAC | 3439 | GTAGGCCG GGCTAGCTACAACGA AATGGGCG | 12188 |
| 3420 | CCAUUACG G CCUACUCC | 3440 | GGAGTAGG GGCTAGCTACAACGA CGTAATGG | 12189 |
| 3424 | UACGGCCU A CUCCCAAC | 3441 | GTTGGGAG GGCTAGCTACAACGA AGGCCGTA | 12190 |
| 3431 | UACUCCCA A CAGACGCG | 3442 | CGCGTCTG GGCTAGCTACAACGA TGGGAGTA | 12191 |
| 3435 | CCCAACAG A CGCGGGGC | 3443 | GCCCCGCG GGCTAGCTACAACGA CTGTTGGG | 12192 |
| 3437 | CAACAGAC G CGGGGCCU | 3444 | AGGCCCCG GGCTAGCTACAACGA GTCTGTTG | 12193 |
| 3442 | GACGCGGG G CCUGUUUG | 3445 | CAAACAGG GGCTAGCTACAACGA CCCGCGTC | 12194 |
| 3446 | CGGGGCCU G UUUGGCUG | 3446 | CAGCCAAA GGCTAGCTACAACGA AGGCCCCG | 12195 |
| 3451 | CCUGUUUG G CUGCAUUA | 3447 | TAATGCAG GGCTAGCTACAACGA CAAACAGG | 12196 |
| 3454 | GUUUGGCU G CAUUAUCA | 3448 | TGATAATG GGCTAGCTACAACGA AGCCAAAC | 12197 |
| 3456 | UUGGCUGC A UUAUCACC | 3449 | GGTGATAA GGCTAGCTACAACGA GCAGCCAA | 12198 |
| 3459 | GCUGCAUU A UCACCAGC | 3450 | GCTGGTGA GGCTAGCTACAACGA AATGCAGC | 12199 |
| 3462 | GCAUUAUC A CCAGCCUC | 3451 | GAGGCTGG GGCTAGCTACAACGA GATAATGC | 12200 |
| 3466 | UAUCACCA G CCUCACGG | 3452 | CCGTGAGG GGCTAGCTACAACGA TGGTGATA | 12201 |
| 3471 | CCAGCCUC A CGGGCCGG | 3453 | CCGGCCCG GGCTAGCTACAACGA GAGGCTGG | 12202 |
| 3475 | CCUCACGG G CCGGGACA | 3454 | TGTCCCGG GGCTAGCTACAACGA CCGTGAGG | 12203 |
| 3481 | GGGCCGGG A CAAGAACC | 3455 | GGTTCTTG GGCTAGCTACAACGA CCCGGCCC | 12204 |
| 3487 | GGACAAGA A CCAAGUCG | 3456 | CGACTTGG GGCTAGCTACAACGA TCTTGTCC | 12205 |
| 3492 | AGAACCAA G UCGAGGGG | 3457 | CCCCTCGA GGCTAGCTACAACGA TTGGTTCT | 12206 |
| 3504 | AGGGGGAA G UUCAAGUG | 3458 | CACTTGAA GGCTAGCTACAACGA TTCCCCCT | 12207 |
| 3510 | AAGUUCAA G UGGUUUCC | 3459 | GGAAACCA GGCTAGCTACAACGA TTGAACTT | 12208 |
| 3513 | UUCAAGUG G UUUCCACC | 3460 | GGTGGAAA GGCTAGCTACAACGA CACTTGAA | 12209 |
| 3519 | UGGUUUCC A CCGCGACG | 3461 | CGTCGCGG GGCTAGCTACAACGA GGAAACCA | 12210 |
| 3522 | UUUCCACC G CGACGCAG | 3462 | CTGCGTCG GGCTAGCTACAACGA GGTGGAAA | 12211 |
| 3525 | CCACCGCG A CGCAGUCU | 3463 | AGACTGCG GGCTAGCTACAACGA CGCGGTGG | 12212 |
| 3527 | ACCGCGAC G CAGUCUUU | 3464 | AAAGACTG GGCTAGCTACAACGA GTCGCGGT | 12213 |
| 3530 | GCGACGCA G UCUUUCCU | 3465 | AGGAAAGA GGCTAGCTACAACGA TGCGTCGC | 12214 |
| 3540 | CUUUCCUA G CGACCUGC | 3466 | GCAGGTCC GGCTAGCTACAACGA TAGGAAAG | 12215 |
| 3543 | UCCUAGCG A CCUGCGUC | 3467 | GACGCAGG GGCTAGCTACAACGA CGCTAGGA | 12216 |
| 3547 | AGCGACCU G CGUCAACG | 3468 | CGTTGACG GGCTAGCTACAACGA AGGTCGCT | 12217 |
| 3549 | CGACCUGC G UCAACGGC | 3469 | GCCGTTGA GGCTAGCTACAACGA GCAGGTCG | 12218 |
| 3553 | CUGCGUCA A CGGCGUGU | 3470 | ACACGCCG GGCTAGCTACAACGA TGACGCAG | 12219 |
| 3556 | CGUCAACG G CGUGUGCU | 3471 | AGCACACG GGCTAGCTACAACGA CGTTGACG | 12220 |
| 3558 | UCAACGGC G UGUGCUGG | 3472 | CCAGCACA GGCTAGCTACAACGA GCCGTTGA | 12221 |
| 3560 | AACGGCGU G UGCUGGAC | 3473 | GTCCAGCA GGCTAGCTACAACGA ACGCCGTT | 12222 |
| 3562 | CGGCGUGU G CUGGACUG | 3474 | CAGTCCAG GGCTAGCTACAACGA ACACGCCG | 12223 |
| 3567 | UGUGCUGG A CUGUCUAC | 3475 | GTAGACAG GGCTAGCTACAACGA CCAGCACA | 12224 |
| 3570 | GCUGGACU G UCUACCAC | 3476 | GTGGTAGA GGCTAGCTACAACGA AGTCCAGC | 12225 |
| 3574 | GACUGUCU A CCACGGCG | 3477 | CGCCGTGG GGCTAGCTACAACGA AGACAGTC | 12226 |
| 3577 | UGUCUACC A CGGCGCCG | 3478 | CGGCGCCG GGCTAGCTACAACGA GGTAGACA | 12227 |
| 3580 | CUACCACG G CGCCGGCU | 3479 | AGCCGGCG GGCTAGCTACAACGA CGTGGTAG | 12228 |
| 3582 | ACCACGGC G CCGGCUCA | 3480 | TGAGCCGG GGCTAGCTACAACGA GCCGTGGT | 12229 |
| 3586 | CGGCGCCG G CUCAAAGA | 3481 | TCTTTGAG GGCTAGCTACAACGA CGGCGCCG | 12230 |
| 3594 | GCUCAAAG A CCCUAGCC | 3482 | GGCTAGGG GGCTAGCTACAACGA CTTTGAGC | 12231 |
| 3600 | AGACCCUA G CCGGCCCA | 3483 | TGGGCCGG GGCTAGCTACAACGA TAGGGTCT | 12232 |
| 3604 | CCUAGCCG G CCCAAAGG | 3484 | CCTTTGGG GGCTAGCTACAACGA CGGCTAGG | 12233 |
| 3613 | CCCAAAGG G UCCAAUCA | 3485 | TGATTGGA GGCTAGCTACAACGA CCTTTGGG | 12234 |
| 3618 | AGGGUCCA A UCACCCAA | 3486 | TTGGGTGA GGCTAGCTACAACGA TGGACCCT | 12235 |
| 3621 | GUCCAAUC A CCCAAAUG | 3487 | CATTTGGG GGCTAGCTACAACGA GATTGGAC | 12236 |
| 3627 | UCACCCAA A UGUACACC | 3488 | GGTGTACA GGCTAGCTACAACGA TTGGGTGA | 12237 |
| 3629 | ACCCAAAU G UACACCAA | 3489 | TTGGTGTA GGCTAGCTACAACGA ATTTGGGT | 12238 |
| 3631 | CCAAAUGU A CACCAAUG | 3490 | CATTGGTG GGCTAGCTACAACGA ACATTTGG | 12239 |
| 3633 | AAAUGUAC A CCAAUGUA | 3491 | TACATTGG GGCTAGCTACAACGA GTACATTT | 12240 |
| 3637 | GUACACCA A UGUAGACC | 3492 | GGTCTACA GGCTAGCTACAACGA TGGTGTAC | 12241 |
| 3639 | ACACCAAU G UAGACCAG | 3493 | CTGGTCTA GGCTAGCTACAACGA ATTGGTGT | 12242 |
| 3643 | CAAUGUAG A CCAGGACC | 3494 | GGTCCTGG GGCTAGCTACAACGA CTACATTG | 12243 |
| 3649 | AGACCAGG A CCUCGUCG | 3495 | CGACGAGG GGCTAGCTACAACGA CCTGGTCT | 12244 |
| 3654 | AGGACCUC G UCGGAUGG | 3496 | CCATCCGA GGCTAGCTACAACGA GAGGTCCT | 12245 |
| 3659 | CUCGUCGG A UGGCCGGC | 3497 | GCCGGCCA GGCTAGCTACAACGA CCGACGAG | 12246 |
| 3662 | GUCGGAUG G CCGGCGCC | 3498 | GGCGCCGG GGCTAGCTACAACGA CATCCGAC | 12247 |
| 3666 | GAUGGCCG G CGCCCCCC | 3499 | GGGGGGCG GGCTAGCTACAACGA CGGCCATC | 12248 |
| 3668 | UGGCCGGC G CCCCCCGG | 3500 | CCGGGGGG GGCTAGCTACAACGA GCCGGCCA | 12249 |
| 3678 | CCCCCGGA G CGCGGUCC | 3501 | GGACCGCG GGCTAGCTACAACGA TCCGGGGG | 12250 |
| 3680 | CCCGGAGC G CGGUCCUU | 3502 | AAGGACCG GGCTAGCTACAACGA GCTCCGGG | 12251 |
| 3683 | GGAGCGCG G UCCUUGAC | 3503 | GTCAAGGA GGCTAGCTACAACGA CGCGCTCC | 12252 |
| 3690 | GGUCCUUG A CACCAUGC | 3504 | GCATGGTG GGCTAGCTACAACGA CAAGGACC | 12253 |
| 3692 | UCCUUGAC A CCAUGCAC | 3505 | GTGCATGG GGCTAGCTACAACGA GTCAAGGA | 12254 |
| 3695 | UUGACACC A UGCACCUG | 3506 | CAGGTGCA GGCTAGCTACAACGA GGTGTCAA | 12255 |
| 3697 | GACACCAU G CACCUGCG | 3507 | CGCAGGTG GGCTAGCTACAACGA ATGGTGTC | 12256 |
| 3699 | CACCAUGC A CCUGCGGC | 3508 | GCCGCAGG GGCTAGCTACAACGA GCATGGTG | 12257 |
| 3703 | AUGCACCU G CGGCGGCU | 3509 | AGCCGCCG GGCTAGCTACAACGA AGGTGCAT | 12258 |
| 3706 | CACCUGCG G CGGCUCGG | 3510 | CCGAGCCG GGCTAGCTACAACGA CGCAGGTG | 12259 |
| 3709 | CUGCGGCG G CUCGGACC | 3511 | GGTCCGAG GGCTAGCTACAACGA CGCCGCAG | 12260 |
| 3715 | CGGCUCGG A CCUUUACU | 3512 | AGTAAAGG GGCTAGCTACAACGA CCGAGCCG | 12261 |
| 3721 | GGACCUUU A CUUGGUCA | 3513 | TGACCAAG GGCTAGCTACAACGA AAAGGTCC | 12262 |
| 3726 | UUUACUUG G UCACGAGA | 3514 | TCTCGTGA GGCTAGCTACAACGA CAAGTAAA | 12263 |
| 3729 | ACUUGGUC A CGAGACAC | 3515 | GTGTCTCG GGCTAGCTACAACGA GACCAAGT | 12264 |
| 3734 | GUCACGAG A CACGCUGA | 3516 | TCAGCGTG GGCTAGCTACAACGA CTCGTGAC | 12265 |
| 3736 | CACGAGAC A CGCUGAUG | 3517 | CATCAGCG GGCTAGCTACAACGA GTCTCGTG | 12266 |
| 3738 | CGAGACAC G CUGAUGUC | 3518 | GACATCAG GGCTAGCTACAACGA GTGTCTCG | 12267 |
| 3742 | ACACGCUG A UGUCAUUC | 3519 | GAATGACA GGCTAGCTACAACGA CAGCGTGT | 12268 |
| 3744 | ACGCUGAU G UCAUUCCG | 3520 | CGGAATGA GGCTAGCTACAACGA ATCAGCGT | 12269 |
| 3747 | CUGAUGUC A UUCCGGUG | 3521 | CACCGGAA GGCTAGCTACAACGA GACATCAG | 12270 |
| 3753 | UCAUUCCG G UGCGCCGG | 3522 | CCGGCGCA GGCTAGCTACAACGA CGGAATGA | 12271 |
| 3755 | AUUCCGGU G CGCCGGCG | 3523 | CGCCGGCG GGCTAGCTACAACGA ACCGGAAT | 12272 |
| 3757 | UCCGGUGC G CCGGCGGG | 3524 | CCCGCCGG GGCTAGCTACAACGA GCACCGGA | 12273 |
| 3761 | GUGCGCCG G CGGGGUGA | 3525 | TCACCCCG GGCTAGCTACAACGA CGGCGCAC | 12274 |
| 3766 | CCGGCGGG G UGACAGCA | 3526 | TGCTGTCA GGCTAGCTACAACGA CCCGCCGG | 12275 |
| 3769 | GCGGGGUG A CAGCAGGG | 3527 | CCCTGCTG GGCTAGCTACAACGA CACCCCGC | 12276 |
| 3772 | GGGUGACA G CAGGGGGA | 3528 | TCCCCCTG GGCTAGCTACAACGA TGTCACCC | 12277 |
| 3781 | CAGGGGGA G CUUACUAU | 3529 | ATAGTAAG GGCTAGCTACAACGA TCCCCCTG | 12278 |
| 3785 | GGGAGCUU A CUAUCCCC | 3530 | GGGGATAG GGCTAGCTACAACGA AAGCTCCC | 12279 |
| 3788 | AGCUUACU A UCCCCCAG | 3531 | CTGGGGGA GGCTAGCTACAACGA AGTAAGCT | 12280 |
| 3797 | UCCCCCAG G CCCAUCUC | 3532 | GAGATGGG GGCTAGCTACAACGA CTGGGGGA | 12281 |
| 3801 | CCAGGCCC A UCUCCUAC | 3533 | GTAGGAGA GGCTAGCTACAACGA GGGCCTGG | 12282 |
| 3808 | CAUCUCCU A CUUGAAGG | 3534 | CCTTCAAG GGCTAGCTACAACGA AGGAGATG | 12283 |
| 3817 | CUUGAAGG G CUCCUCGG | 3535 | CCGAGGAG GGCTAGCTACAACGA CCTTCAAG | 12284 |
| 3826 | CUCCUCGG G CGGUCCAC | 3536 | GTGGACCG GGCTAGCTACAACGA CCGAGGAG | 12285 |
| 3829 | CUCGGGCG G UCCACUGC | 3537 | GCAGTGGA GGCTAGCTACAACGA CGCCCGAG | 12286 |
| 3833 | GGCGGUCC A CUGCUCUG | 3538 | CAGAGCAG GGCTAGCTACAACGA GGACCGCC | 12287 |
| 3836 | GGUCCACU G CUCUGCCC | 3539 | GGGCAGAG GGCTAGCTACAACGA AGTGGACC | 12288 |
| 3841 | ACUGCUCU G CCCUUCGG | 3540 | CCGAAGGG GGCTAGCTACAACGA AGAGCAGT | 12289 |
| 3851 | CCUUCGGG G CACGUUGU | 3541 | ACAACGTG GGCTAGCTACAACGA CCCGAAGG | 12290 |
| 3853 | UUCGGGGC A CGUUGUGG | 3542 | CCACAACG GGCTAGCTACAACGA GCCCCGAA | 12291 |
| 3855 | CGGGGCAC G UUGUGGGC | 3543 | GCCCACAA GGCTAGCTACAACGA GTGCCCCG | 12292 |
| 3858 | GGCACGUU G UGGGCAUC | 3544 | GATGCCCA GGCTAGCTACAACGA AACGTGCC | 12293 |
| 3862 | CGUUGUGG G CAUCUUCC | 3545 | GGAAGATG GGCTAGCTACAACGA CCACAACG | 12294 |
| 3864 | UUGUGGGC A UCUUCCGG | 3546 | CCGGAAGA GGCTAGCTACAACGA GCCCACAA | 12295 |
| 3873 | UCUUCCGG G CUGCUGUG | 3547 | CACAGCAG GGCTAGCTACAACGA CCGGAAGA | 12296 |
| 3876 | UCCGGGCU G CUGUGUGC | 3548 | GCACACAG GGCTAGCTACAACGA AGCCCGGA | 12297 |
| 3879 | GGGCUGCU G UGUGCACC | 3549 | GGTGCACA GGCTAGCTACAACGA AGCAGCCC | 12298 |
| 3881 | GCUGCUGU G UGCACCCG | 3550 | CGGGTGCA GGCTAGCTACAACGA ACAGCAGC | 12299 |
| 3883 | UGCUGUGU G CACCCGGG | 3551 | CCCGGGTG GGCTAGCTACAACGA ACACAGCA | 12300 |
| 3885 | CUGUGUGC A CCCGGGGG | 3552 | CCCCCGGG GGCTAGCTACAACGA GCACACAG | 12301 |
| 3894 | CCCGGGGG G UUGCGAAG | 3553 | CTTCGCAA GGCTAGCTACAACGA CCCCCGGG | 12302 |
| 3897 | GGGGGGUU G CGAAGGCG | 3554 | CGCCTTCG GGCTAGCTACAACGA AACCCCCC | 12303 |
| 3903 | UUGCGAAG G CGGUGGAC | 3555 | GTCCACCG GGCTAGCTACAACGA CTTCGCAA | 12304 |
| 3906 | CGAAGGCG G UGGACUUU | 3556 | AAAGTCCA GGCTAGCTACAACGA CGCCTTCG | 12305 |
| 3910 | GGCGGUGG A CUUUGUAC | 3557 | GTACAAAG GGCTAGCTACAACGA CCACCGCC | 12306 |
| 3915 | UGGACUUU G UACCCGUU | 3558 | AACGGGTA GGCTAGCTACAACGA AAAGTCCA | 12307 |
| 3917 | GACUUUGU A CCCGUUGA | 3559 | TCAACGGG GGCTAGCTACAACGA ACAAAGTC | 12308 |
| 3921 | UUGUACCC G UUCAGUCU | 3560 | AGACTCAA GGCTAGCTACAACGA GGGTACAA | 12309 |
| 3926 | CCCGUUGA G UCUAUGGA | 3561 | TCCATAGA GGCTAGCTACAACGA TCAACGGG | 12310 |
| 3930 | UUGAGUCU A UGGAAACU | 3562 | AGTTTCCA GGCTAGCTACAACGA AGACTCAA | 12311 |
| 3936 | CUAUGGAA A CUACCAUG | 3563 | CATGGTAG GGCTAGCTACAACGA TTCCATAG | 12312 |
| 3939 | UGGAAACU A CCAUGCGG | 3564 | CCGCATGG GGCTAGCTACAACGA AGTTTCCA | 12313 |
| 3942 | AAACUACC A UGCCGUCC | 3565 | GGACCGCA GGCTAGCTACAACGA GGTAGTTT | 12314 |
| 3944 | ACUACCAU G CGGUCCCC | 3566 | GGGGACCG GGCTAGCTACAACGA ATGGTAGT | 12315 |
| 3947 | ACCAUGCG G UCCCCGGU | 3567 | ACCGGGGA GGCTAGCTACAACGA CGCATGGT | 12316 |
| 3954 | GGUCCCCG G UCUUCACG | 3568 | CGTGAAGA GGCTAGCTACAACGA CGGGGACC | 12317 |
| 3960 | CGGUCUUC A CGGACAAC | 3569 | GTTGTCCG GGCTAGCTACAACGA GAAGACCG | 12318 |
| 3964 | CUUCACGG A CAACUCGU | 3570 | ACGAGTTG GGCTAGCTACAACGA CCGTGAAG | 12319 |
| 3967 | CACGGACA A CUCGUCCC | 3571 | GGGACGAG GGCTAGCTACAACGA TGTCCGTG | 12320 |
| 3971 | GACAACUC G UCCCCCCC | 3572 | GGGGGGGA GGCTAGCTACAACGA GAGTTGTC | 12321 |
| 3981 | CCCCCCCA G CCGUACCG | 3573 | CGGTACGG GGCTAGCTACAACGA TGGGGGGG | 12322 |
| 3984 | CCCCAGCC G UACCGCAG | 3574 | CTGCGGTA GGCTAGCTACAACGA GGCTGGGG | 12323 |
| 3986 | CCAGCCGU A CCGCAGAC | 3575 | GTCTGCGG GGCTAGCTACAACGA ACGGCTGG | 12324 |
| 3989 | GCCGUACC G CAGACAUU | 3576 | AATGTCTG GGCTAGCTACAACGA GGTACGGC | 12325 |
| 3993 | UACCGCAG A CAUUCCAA | 3577 | TTGGAATG GGCTAGCTACAACGA CTGCGGTA | 12326 |
| 3995 | CCGCAGAC A UUCCAAGU | 3578 | ACTTGGAA GGCTAGCTACAACGA GTCTGCGG | 12327 |
| 4002 | CAUUCCAA G UGGCCCAC | 3579 | GTGGGCCA GGCTAGCTACAACGA TTGGAATG | 12328 |
| 4005 | UCCAAGUG G CCCACCUA | 3580 | TAGGTGGG GGCTAGCTACAACGA CACTTGGA | 12329 |
| 4009 | AGUGGCCC A CCUACACG | 3581 | CGTGTAGG GGCTAGCTACAACGA GGGCCACT | 12330 |
| 4013 | GCCCACCU A CACGCUCC | 3582 | GGAGCGTG GGCTAGCTACAACGA AGGTGGGC | 12331 |
| 4015 | CCACCUAC A CGCUCCCA | 3583 | TGGGAGCG GGCTAGCTACAACGA GTAGGTGG | 12332 |
| 4017 | ACCUACAC G CUCCCACU | 3584 | AGTGGGAG GGCTAGCTACAACGA GTGTAGGT | 12333 |
| 4023 | ACGCUCCC A CUGGCAGC | 3585 | GCTGCCAG GGCTAGCTACAACGA GGGAGCGT | 12334 |
| 4027 | UCCCACUG G CAGCGGCA | 3586 | TGCCGCTG GGCTAGCTACAACGA CAGTGGGA | 12335 |
| 4030 | CACUGGCA G CGGCAAGA | 3587 | TCTTGCCG GGCTAGCTACAACGA TGCCAGTG | 12336 |
| 4033 | UGGCAGCG G CAAGAGCA | 3588 | TGCTCTTG GGCTAGCTACAACGA CGCTGCCA | 12337 |
| 4039 | CGGCAAGA G CACUAAGG | 3589 | CCTTAGTG GGCTAGCTACAACGA TCTTGCCG | 12338 |
| 4041 | GCAAGAGC A CUAAGGUA | 3590 | TACCTTAG GGCTAGCTACAACGA GCTCTTGC | 12339 |
| 4047 | GCACUAAG G UACCGGCU | 3591 | AGCCGGTA GGCTAGCTACAACGA CTTAGTGC | 12340 |
| 4049 | ACUAAGGU A CCGGCUGC | 3592 | GCAGCCGG GGCTAGCTACAACGA ACCTTAGT | 12341 |
| 4053 | AGGUACCG G CUGCAUAU | 3593 | ATATGCAG GGCTAGCTACAACGA CGGTACCT | 12342 |
| 4056 | UACCGGCU G CAUAUGCA | 3594 | TGCATATG GGCTAGCTACAACGA AGCCGGTA | 12343 |
| 4058 | CCGGCUGC A UAUGCAGC | 3595 | GCTGCATA GGCTAGCTACAACGA GCAGCCGG | 12344 |
| 4060 | GGCUGCAU A UGCAGCCC | 3596 | GGGCTGCA GGCTAGCTACAACGA ATGCAGCC | 12345 |
| 4062 | CUGCAUAU G CAGCCCAA | 3597 | TTGGGCTG GGCTAGCTACAACGA ATATGCAG | 12346 |
| 4065 | CAUAUGCA G CCCAAGGG | 3598 | CCCTTGGG GGCTAGCTACAACGA TGCATATG | 12347 |
| 4073 | GCCCAAGG G UACAAAGU | 3599 | ACTTTGTA GGCTAGCTACAACGA CCTTGGGC | 12348 |
| 4075 | CCAAGGGU A CAAAGUGC | 3600 | GCACTTTG GGCTAGCTACAACGA ACCCTTGG | 12349 |
| 4080 | GGUACAAA G UGCUCGUC | 3601 | GACGAGCA GGCTAGCTACAACGA TTTGTACC | 12350 |
| 4082 | UACAAAGU G CUCGUCCU | 3602 | AGGACGAG GGCTAGCTACAACGA ACTTTGTA | 12351 |
| 4086 | AAGUGCUC G UCCUAAAU | 3603 | ATTTAGGA GGCTAGCTACAACGA GAGCACTT | 12352 |
| 4093 | CGUCCUAA A UCCGUCCG | 3604 | CGGACGGA GGCTAGCTACAACGA TTAGGACG | 12353 |
| 4097 | CUAAAUCC G UCCGUUAC | 3605 | GTAACGGA GGCTAGCTACAACGA GGATTTAG | 12354 |
| 4101 | AUCCGUCC G UUACCGCC | 3606 | GGCGGTAA GGCTAGCTACAACGA GGACGGAT | 12355 |
| 4104 | CGUCCGUU A CCGCCACC | 3607 | GGTGGCGG GGCTAGCTACAACGA AACGGACG | 12356 |
| 4107 | CCGUUACC G CCACCUUA | 3608 | TAAGGTGG GGCTAGCTACAACGA GGTAACGG | 12357 |
| 4110 | UUACCGCC A CCUUAGGG | 3609 | CCCTAAGG GGCTAGCTACAACGA GGCGGTAA | 12358 |
| 4118 | ACCUUAGG G UUUGGGGC | 3610 | GCCCCAAA GGCTAGCTACAACGA CCTAAGGT | 12359 |
| 4125 | GGUUUGGG G CGUAUAUG | 3611 | CATATACG GGCTAGCTACAACGA CCCAAACC | 12360 |
| 4127 | UUUGGGGC G UAUAUGUC | 3612 | GACATATA GGCTAGCTACAACGA GCCCCAAA | 12361 |
| 4129 | UGGGGCGU A UAUGUCUA | 3613 | TAGACATA GGCTAGCTACAACGA ACGCCCCA | 12362 |
| 4131 | GGGCGUAU A UGUCUAAG | 3614 | CTTAGACA GGCTAGCTACAACGA ATACGCCC | 12363 |
| 4133 | GCGUAUAU G UCUAAGGC | 3615 | GCCTTAGA GGCTAGCTACAACGA ATATACGC | 12364 |
| 4140 | UGUCUAAG G CACACGGU | 3616 | ACCGTGTG GGCTAGCTACAACGA CTTAGACA | 12365 |
| 4142 | UCUAAGGC A CACGGUGU | 3617 | ACACCGTG GGCTAGCTACAACGA GCCTTAGA | 12366 |
| 4144 | UAAGGCAC A CGGUGUCG | 3618 | CGACACCG GGCTAGCTACAACGA GTGCCTTA | 12367 |
| 4147 | GGCACACG G UGUCGAUC | 3619 | GATCGACA GGCTAGCTACAACGA CGTGTGCC | 12368 |
| 4149 | CACACGGU G UCGAUCCU | 3620 | AGGATCGA GGCTAGCTACAACGA ACCGTGTG | 12369 |
| 4153 | CGGUGUCG A UCCUAACA | 3621 | TGTTAGGA GGCTAGCTACAACGA CGACACCG | 12370 |
| 4159 | CGAUCCUA A CAUCAGAA | 3622 | TTCTGATG GGCTAGCTACAACGA TAGGATCG | 12371 |
| 4161 | AUCCUAAC A UCAGAACU | 3623 | AGTTCTGA GGCTAGCTACAACGA GTTAGGAT | 12372 |
| 4167 | ACAUCAGA A CUGGGGUA | 3624 | TACCCCAG GGCTAGCTACAACGA TCTGATGT | 12373 |
| 4173 | GAACUGGG G UAAGGACC | 3625 | GGTCCTTA GGCTAGCTACAACGA CCCAGTTC | 12374 |
| 4179 | GGGUAAGG A CCAUCACC | 3626 | GGTGATGG GGCTAGCTACAACGA CCTTACCC | 12375 |
| 4182 | UAAGGACC A UCACCACG | 3627 | CGTGGTGA GGCTAGCTACAACGA GGTCCTTA | 12376 |
| 4185 | GGACCAUC A CCACGGGC | 3628 | GCCCGTGG GGCTAGCTACAACGA GATGGTCC | 12377 |
| 4188 | CCAUCACC A CGGGCGCC | 3629 | GGCGCCCG GGCTAGCTACAACGA GGTGATGG | 12378 |
| 4192 | CACCACGG G CGCCCCCA | 3630 | TGGGGGCG GGCTAGCTACAACGA CCGTGGTG | 12379 |
| 4194 | CCACGGGC G CCCCCAUC | 3631 | GATGGGGG GGCTAGCTACAACGA GCCCGTGG | 12380 |
| 4200 | GCGCCCCC A UCACGUAC | 3632 | GTACGTGA GGCTAGCTACAACGA GGGGGCGC | 12381 |
| 4203 | CCCCCAUC A CGUACUCC | 3633 | GGAGTACG GGCTAGCTACAACGA GATGGGGG | 12382 |
| 4205 | CCCAUCAC G UACUCCAC | 3634 | GTGGAGTA GGCTAGCTACAACGA GTGATGGG | 12383 |
| 4207 | CAUCACGU A CUCCACCU | 3635 | AGGTGGAG GGCTAGCTACAACGA ACGTGATG | 12384 |
| 4212 | CGUACUCC A CCUAUGGC | 3636 | GCCATAGG GGCTAGCTACAACGA GGAGTACG | 12385 |
| 4216 | CUCCACCU A UGGCAAGU | 3637 | ACTTGCCA GGCTAGCTACAACGA AGGTGGAG | 12386 |
| 4219 | CACCUAUG G CAAGUUCC | 3638 | GGAACTTG GGCTAGCTACAACGA CATAGGTG | 12387 |
| 4223 | UAUGGCAA G UUCCUUGC | 3639 | GCAAGGAA GGCTAGCTACAACGA TTGCCATA | 12388 |
| 4230 | AGUUCCUU G CCGACGGU | 3640 | ACCGTCGG GGCTAGCTACAACGA AAGGAACT | 12389 |
| 4234 | CCUUGCCG A CGGUGGUU | 3641 | AACCACCG GGCTAGCTACAACGA CGGCAAGG | 12390 |
| 4237 | UGCCGACG G UGGUUGCU | 3642 | AGCAACCA GGCTAGCTACAACGA CGTCGGCA | 12391 |
| 4240 | CGACGGUG G UUGCUCUG | 3643 | CAGAGCAA GGCTAGCTACAACGA CACCGTCG | 12392 |
| 4243 | CGGUGGUU G CUCUGGGG | 3644 | CCCCAGAG GGCTAGCTACAACGA AACCACCG | 12393 |
| 4252 | CUCUGGGG G CCCCUAUG | 3645 | CATAGCCG GGCTAGCTACAACGA CCCCAGAG | 12394 |
| 4254 | CUGGGGGC G CCUAUGAC | 3646 | GTCATAGG GGCTAGCTACAACGA GCCCCCAG | 12395 |
| 4258 | GGGCGCCU A UGACAUCA | 3647 | TGATGTCA GGCTAGCTACAACGA AGGCGCCC | 12396 |
| 4261 | CGCCUAUG A CAUCAUAA | 3648 | TTATGATG GGCTAGCTACAACGA CATAGGCG | 12397 |
| 4263 | CCUAUGAC A UCAUAAUG | 3649 | CATTATGA GGCTAGCTACAACGA GTCATAGG | 12398 |
| 4266 | AUGACAUC A UAAUGUGU | 3650 | ACACATTA GGCTAGCTACAACGA GATGTCAT | 12399 |
| 4269 | ACAUCAUA A UGUGUGAU | 3651 | ATCACACA GGCTAGCTACAACGA TATGATGT | 12400 |
| 4271 | AUCAUAAU G UGUGAUGA | 3652 | TCATCACA GGCTAGCTACAACGA ATTATGAT | 12401 |
| 4273 | CAUAAUGU G UGAUGAGU | 3653 | ACTCATCA GGCTAGCTACAACGA ACATTATG | 12402 |
| 4276 | AAUGUGUG A UGAGUGCC | 3654 | GGCACTCA GGCTAGCTACAACGA CACACATT | 12403 |
| 4280 | UGUGAUGA G UGCCACUC | 3655 | GAGTGGCA GGCTAGCTACAACGA TCATCACA | 12404 |
| 4282 | UGAUGAGU G CCACUCAA | 3656 | TTGAGTGG GGCTAGCTACAACGA ACTCATCA | 12405 |
| 4285 | UGAGUGCC A CUCAAUUG | 3657 | CAATTGAG GGCTAGCTACAACGA GGCACTCA | 12406 |
| 4290 | GCCACUCA A UUGACUCG | 3658 | CGAGTCAA GGCTAGCTACAACGA TGAGTGGC | 12407 |
| 4294 | CUCAAUUG A CUCGACUU | 3659 | AAGTCGAG GGCTAGCTACAACGA CAATTGAG | 12408 |
| 4299 | UUGACUCG A CUUCCAUU | 3660 | AATGGAAG GGCTAGCTACAACGA CGAGTCAA | 12409 |
| 4305 | CGACUUCC A UUUUGGGC | 3661 | GCCCAAAA GGCTAGCTACAACGA GGAAGTCG | 12410 |
| 4312 | CAUUUUGG G CAUCGGCA | 3662 | TGCCGATG GGCTAGCTACAACGA CCAAAATG | 12411 |
| 4314 | UUUUGGGC A UCGGCACA | 3663 | TGTGCCGA GGCTAGCTACAACGA GCCCAAAA | 12412 |
| 4318 | GGGCAUCG G CACAGUCC | 3664 | GGACTGTG GGCTAGCTACAACGA CGATGCCC | 12413 |
| 4320 | GCAUCGGC A CAGUCCUG | 3665 | CAGGACTG GGCTAGCTACAACGA GCCGATGC | 12414 |
| 4323 | UCGGCACA G UCCUGGAC | 3666 | GTCCAGGA GGCTAGCTACAACGA TGTGCCGA | 12415 |
| 4330 | AGUCCUGG A CCAAGCGG | 3667 | CCGCTTGG GGCTAGCTACAACGA CCAGGACT | 12416 |
| 4335 | UGGACCAA G CGGAGACG | 3668 | CGTCTCCG GGCTAGCTACAACGA TTGGTCCA | 12417 |
| 4341 | AAGCGGAG A CGGCUGGA | 3669 | TCCAGCCG GGCTAGCTACAACGA CTCCGCTT | 12418 |
| 4344 | CGGAGACG G CUGGAGCG | 3670 | CGCTCCAG GGCTAGCTACAACGA CGTCTCCG | 12419 |
| 4350 | CGGCUGGA G CGCGGCUC | 3671 | GAGCCGCG GGCTAGCTACAACGA TCCAGCCG | 12420 |
| 4352 | GCUGGAGC G CGGCUCGU | 3672 | ACGAGCCG GGCTAGCTACAACGA GCTCCAGC | 12421 |
| 4355 | GGAGCGCG G CUCGUCGU | 3673 | ACGACGAG GGCTAGCTACAACGA CGCGCTCC | 12422 |
| 4359 | CGCGGCUC G UCGUGCUC | 3674 | GAGCACGA GGCTAGCTACAACGA GAGCCGCG | 12423 |
| 4362 | GGCUCGUC G UGCUCGCC | 3675 | GGCGAGCA GGCTAGCTACAACGA GACGAGCC | 12424 |
| 4364 | CUCGUCGU G CUCGCCAC | 3676 | GTGGCGAG GGCTAGCTACAACGA ACGACGAG | 12425 |
| 4368 | UCGUGCUC G CCACCGCU | 3677 | AGCGGTGG GGCTAGCTACAACGA GAGCACGA | 12426 |
| 4371 | UGCUCGCC A CCGCUACG | 3678 | CGTAGCGG GGCTAGCTACAACGA GGCGAGCA | 12427 |
| 4374 | UCGCCACC G CUACGCCU | 3679 | AGGCGTAG GGCTAGCTACAACGA GGTGGCGA | 12428 |
| 4377 | CCACCGCU A CGCCUCCG | 3680 | CGGAGGCG GGCTAGCTACAACGA AGCGGTGG | 12429 |
| 4379 | ACCGCUAC G CCUCCGGG | 3681 | CCCGGAGG GGCTAGCTACAACGA GTAGCGGT | 12430 |
| 4388 | CCUCCGGG A UCGGUCAC | 3682 | GTGACCGA GGCTAGCTACAACGA CCCGGAGG | 12431 |
| 4392 | CGGGAUCG G UCACCGUG | 3683 | CACGGTGA GGCTAGCTACAACGA CGATCCCG | 12432 |
| 4395 | GAUCGGUC A CCGUGCCA | 3684 | TGGCACGG GGCTAGCTACAACGA GACCGATC | 12433 |
| 4398 | CGGUCACC G UGCCACAU | 3685 | ATGTGGCA GGCTAGCTACAACGA GGTGACCG | 12434 |
| 4400 | GUCACCGU G CCACAUCC | 3686 | GGATGTGG GGCTAGCTACAACGA ACGGTGAC | 12435 |
| 4403 | ACCGUGCC A CAUCCCAA | 3687 | TTGGGATG GGCTAGCTACAACGA GGCACGGT | 12436 |
| 4405 | CGUGCCAC A UCCCAACA | 3688 | TGTTGGGA GGCTAGCTACAACGA GTGGCACG | 12437 |
| 4411 | ACAUCCCA A CAUCGAGG | 3689 | CCTCGATG GGCTAGCTACAACGA TGGGATGT | 12438 |
| 4413 | AUCCCAAC A UCGAGGAG | 3690 | CTCCTCGA GGCTAGCTACAACGA GTTGGGAT | 12439 |
| 4422 | UCGAGGAG A UAGCCUUG | 3691 | CAAGGCTA GGCTAGCTACAACGA CTCCTCGA | 12440 |
| 4425 | AGGAGAUA G CCUUGUCC | 3692 | GGACAAGG GGCTAGCTACAACGA TATCTCCT | 12441 |
| 4430 | AUAGCCUU G UCCAACAC | 3693 | GTGTTGGA GGCTAGCTACAACGA AAGGCTAT | 12442 |
| 4435 | CUUGUCCA A CACCGGAG | 3694 | CTCCGGTG GGCTAGCTACAACGA TGGACAAG | 12443 |
| 4437 | UGUCCAAC A CCGGAGAG | 3695 | CTCTCCGG GGCTAGCTACAACGA GTTGGACA | 12444 |
| 4446 | CCGGAGAG A UCCCCUUC | 3696 | GAAGGGGA GGCTAGCTACAACGA CTCTCCGG | 12445 |
| 4456 | CCCCUUCU A UGGCAAAG | 3697 | CTTTGCCA GGCTAGCTACAACGA AGAAGGGG | 12446 |
| 4459 | CUUCUAUG G CAAAGCCA | 3698 | TGGCTTTG GGCTAGCTACAACGA CATAGAAG | 12447 |
| 4464 | AUGGCAAA G CCAUCCCC | 3699 | GGGGATGG GGCTAGCTACAACGA TTTGCCAT | 12448 |
| 4467 | GCAAAGCC A UCCCCAUC | 3700 | GATGGGGA GGCTAGCTACAACGA GGCTTTGC | 12449 |
| 4473 | CCAUCCCC A UCGAGACC | 3701 | GGTCTCGA GGCTAGCTACAACGA GGGGATGG | 12450 |
| 4479 | CCAUCGAG A CCAUCAAA | 3702 | TTTGATGG GGCTAGCTACAACGA CTCGATGG | 12451 |
| 4482 | UCGAGACC A UCAAAGGG | 3703 | CCCTTTGA GGCTAGCTACAACGA GGTCTCGA | 12452 |
| 4496 | GGGGGGAG G CAUCUCAU | 3704 | ATGAGATG GGCTAGCTACAACGA CTCCCCCC | 12453 |
| 4498 | GGGGAGGC A UCUCAUCU | 3705 | AGATGAGA GGCTAGCTACAACGA GCCTCCCC | 12454 |
| 4503 | GGCAUCUC A UCUUCUGC | 3706 | GCAGAAGA GGCTAGCTACAACGA GAGATGCC | 12455 |
| 4510 | CAUCUUCU G CCAUUCCA | 3707 | TGGAATGG GGCTAGCTACAACGA AGAAGATG | 12456 |
| 4513 | CUUCUGCC A UUCCAAGA | 3708 | TCTTGGAA GGCTAGCTACAACGA GGCAGAAG | 12457 |
| 4526 | AAGAAGAA A UGUGACGA | 3709 | TCGTCACA GGCTAGCTACAACGA TTCTTCTT | 12458 |
| 4528 | GAAGAAAU G UGACGAGC | 3710 | GCTCGTCA GGCTAGCTACAACGA ATTTCTTC | 12459 |
| 4531 | GAAAUGUG A CGAGCUCG | 3711 | CGAGCTCG GGCTAGCTACAACGA CACATTTC | 12460 |
| 4535 | UGUGACGA G CUCGCUGC | 3712 | GCAGCGAG GGCTAGCTACAACGA TCGTCACA | 12461 |
| 4539 | ACGAGCUC G CUGCAAAG | 3713 | CTTTGCAG GGCTAGCTACAACGA GAGCTCGT | 12462 |
| 4542 | AGCUCGCU G CAAAGCUG | 3714 | CAGCTTTG GGCTAGCTACAACGA AGCGAGCT | 12463 |
| 4547 | GCUGCAAA G CUGUCGGG | 3715 | CCCGACAG GGCTAGCTACAACGA TTTGCAGC | 12464 |
| 4550 | GCAAAGCU G UCGGGCCU | 3716 | AGGCCCGA GGCTAGCTACAACGA AGCTTTGC | 12465 |
| 4555 | GCUGUCGG G CCUCGGAC | 3717 | GTCCGAGG GGCTAGCTACAACGA CCGACAGC | 12466 |
| 4562 | GGCCUCGG A CUUAACGC | 3718 | GCGTTAAG GGCTAGCTACAACGA CCGAGGCC | 12467 |
| 4567 | CGGACUUA A CGCUGUAG | 3719 | CTACAGCG GGCTAGCTACAACGA TAAGTCCG | 12468 |
| 4569 | GACUUAAC G CUGUAGCG | 3720 | CGCTACAG GGCTAGCTACAACGA GTTAAGTC | 12469 |
| 4572 | UUAACGCU G UAGCGUAU | 3721 | ATACGCTA GGCTAGCTACAACGA AGCGTTAA | 12470 |
| 4575 | ACGCUGUA G CGUAUUAC | 3722 | GTAATACG GGCTAGCTACAACGA TACAGCGT | 12471 |
| 4577 | GCUGUAGC G UAUUACCG | 3723 | CGGTAATA GGCTAGCTACAACGA GCTACAGC | 12472 |
| 4579 | UGUAGCGU A UUACCGGG | 3724 | CCCGGTAA GGCTAGCTACAACGA ACGCTACA | 12473 |
| 4582 | AGCGUAUU A CCGGGGUC | 3725 | GACCCCGG GGCTAGCTACAACGA AATACGCT | 12474 |
| 4588 | UUACCGGG G UCUCGACG | 3726 | CGTCGAGA GGCTAGCTACAACGA CCCGGTAA | 12475 |
| 4594 | GGGUCUCG A CGUGUCCG | 3727 | CGGACACG GGCTAGCTACAACGA CGAGACCC | 12476 |
| 4596 | GUCUCGAC G UGUCCGUC | 3728 | GACGGACA GGCTAGCTACAACGA GTCGAGAC | 12477 |
| 4598 | CUCGACGU G UCCGUCAU | 3729 | ATGACGGA GGCTAGCTACAACGA ACGTCGAG | 12478 |
| 4602 | ACGUGUCC G UCAUACCG | 3730 | CGGTATGA GGCTAGCTACAACGA GGACACGT | 12479 |
| 4605 | UGUCCGUC A UACCGGCC | 3731 | GGCCGGTA GGCTAGCTACAACGA GACGGACA | 12480 |
| 4607 | UCCGUCAU A CCGGCCAG | 3732 | CTGGCCGG GGCTAGCTACAACGA ATGACGGA | 12481 |
| 4611 | UCAUACCG G CCAGCGGG | 3733 | CCCGCTGG GGCTAGCTACAACGA CGGTATGA | 12482 |
| 4615 | ACCGGCCA G CGGGGACG | 3734 | CGTCCCCG GGCTAGCTACAACGA TGGCCGGT | 12483 |
| 4621 | CAGCGGGG A CGUCGUUG | 3735 | CAACGACG GGCTAGCTACAACGA CCCCGCTG | 12484 |
| 4623 | GCGGGGAC G UCGUUGUC | 3736 | GACAACGA GGCTAGCTACAACGA GTCCCCGC | 12485 |
| 4626 | GGGACGUC G UUGUCGUG | 3737 | CACGACAA GGCTAGCTACAACGA GACGTCCC | 12486 |
| 4629 | ACGUCGUU G UCGUGGCA | 3738 | TGCCACGA GGCTAGCTACAACGA AACGACGT | 12487 |
| 4632 | UCGUUGUC G UGGCAACA | 3739 | TGTTGCCA GGCTAGCTACAACGA GACAACGA | 12488 |
| 4635 | UUGUCGUG G CAACAGAC | 3740 | GTCTGTTG GGCTAGCTACAACGA CACGACAA | 12489 |
| 4638 | UCGUGGCA A CAGACGCU | 3741 | AGCGTCTG GGCTAGCTACAACGA TGCCACGA | 12490 |
| 4642 | GGCAACAG A CGCUCUAA | 3742 | TTAGAGCG GGCTAGCTACAACGA CTGTTGCC | 12491 |
| 4644 | CAACAGAC G CUCUAAUG | 3743 | CATTAGAG GGCTAGCTACAACGA GTCTGTTG | 12492 |
| 4650 | ACGCUCUA A UGACGGGC | 3744 | GCCCGTCA GGCTAGCTACAACGA TAGAGCGT | 12493 |
| 4653 | CUCUAAUG A CGGGCUAU | 3745 | ATAGCCCG GGCTAGCTACAACGA CATTAGAG | 12494 |
| 4657 | AAUGACGG G CUAUACCG | 3746 | CGGTATAG GGCTAGCTACAACGA CCGTCATT | 12495 |
| 4660 | GACGGGCU A UACCGGCG | 3747 | CGCCGGTA GGCTAGCTACAACGA AGCCCGTC | 12496 |
| 4662 | CGGGCUAU A CCGGCGAU | 3748 | ATCGCCGG GGCTAGCTACAACGA ATAGCCCG | 12497 |
| 4666 | CUAUACCG G CGAUUUUG | 3749 | CAAAATCG GGCTAGCTACAACGA CGGTATAG | 12498 |
| 4669 | UACCGGCG A UUUUGACU | 3750 | AGTCAAAA GGCTAGCTACAACGA CGCCGGTA | 12499 |
| 4675 | CGAUUUUG A CUCGGUGA | 3751 | TCACCGAG GGCTAGCTACAACGA CAAAATCG | 12500 |
| 4680 | UUGACUCG G UGAUCGAC | 3752 | GTCGATCA GGCTAGCTACAACGA CGAGTCAA | 12501 |
| 4683 | ACUCGGUG A UCGACUGU | 3753 | ACAGTCGA GGCTAGCTACAACGA CACCGAGT | 12502 |
| 4687 | GGUGAUCG A CUGUAAUA | 3754 | TATTACAG GGCTAGCTACAACGA CGATCACC | 12503 |
| 4690 | GAUCGACU G UAAUACAU | 3755 | ATGTATTA GGCTAGCTACAACGA AGTCGATC | 12504 |
| 4693 | CGACUGUA A UACAUGUG | 3756 | CACATGTA GGCTAGCTACAACGA TACAGTCG | 12505 |
| 4695 | ACUGUAAU A CAUGUGUC | 3757 | GACACATG GGCTAGCTACAACGA ATTACAGT | 12506 |
| 4697 | UGUAAUAC A UGUGUCAC | 3758 | GTGACACA GGCTAGCTACAACGA GTATTACA | 12507 |
| 4699 | UAAUACAU G UGUCACCC | 3759 | GGGTGACA GGCTAGCTACAACGA ATGTATTA | 12508 |
| 4701 | AUACAUGU G UCACCCAA | 3760 | TTGGGTGA GGCTAGCTACAACGA ACATGTAT | 12509 |
| 4704 | CAUGUGUC A CCCAAACA | 3761 | TGTTTCGG GCCTAGCTACAACGA GACACATG | 12510 |
| 4710 | UCACCCAA A CAGUCGAC | 3762 | GTCGACTG GGCTAGCTACAACGA TTGGGTGA | 12511 |
| 4713 | CCCAAACA G UCGACUUC | 3763 | GAAGTCGA GGCTAGCTACAACGA TGTTTGCG | 12512 |
| 4717 | AACAGUCG A CUUCAGCU | 3764 | AGCTGAAG GGCTAGCTACAACGA CGACTGTT | 12513 |
| 4723 | CGACUUCA G CUUGGACC | 3765 | GGTCCAAG GGCTAGCTACAACGA TGAAGTCG | 12514 |
| 4729 | CAGCUUGG A CCCUACCU | 3766 | AGGTAGGG GGCTAGCTACAACGA CCAAGCTG | 12515 |
| 4734 | UGGACCCU A CCUUCACC | 3767 | GGTGAAGG GGCTAGCTACAACGA AGGGTCCA | 12516 |
| 4740 | CUACCUUC A CCAUUGAG | 3768 | CTCAATGG GGCTAGCTACAACGA GAAGGTAG | 12517 |
| 4743 | CCUUCACC A UUGAGACG | 3769 | CGTCTCAA GGCTAGCTACAACGA GGTGAAGG | 12518 |
| 4749 | CCAUUGAG A CGACGACC | 3770 | GGTCGTCG GGCTAGCTACAACGA CTCAATGG | 12519 |
| 4752 | UUGAGACG A CGACCGUG | 3771 | CACGGTCG GGCTAGCTACAACGA CGTCTCAA | 12520 |
| 4755 | AGACGACG A CCGUGCCC | 3772 | GGGCACGG GGCTAGCTACAACGA CGTCGTCT | 12521 |
| 4758 | CGACGACC G UGCCCCAA | 3773 | TTGGGGCA GGCTAGCTACAACGA GGTCGTCG | 12522 |
| 4760 | ACGACCGU G CCCCAAGA | 3774 | TCTTGGGG GGCTAGCTACAACGA ACGGTCGT | 12523 |
| 4768 | GCCCCAAG A CGCAGUGU | 3775 | ACACTGCG GGCTAGCTACAACGA CTTGGGGC | 12524 |
| 4770 | CCCAAGAC G CAGUGUCC | 3776 | GGACACTG GGCTAGCTACAACGA GTCTTGGG | 12525 |
| 4773 | AAGACGCA G UGUCCCGC | 3777 | GCGGGACA GGCTAGCTACAACGA TGCGTCTT | 12526 |
| 4775 | GACGCAGU G UCCCGCUC | 3778 | GAGCGGGA GGCTAGCTACAACGA ACTGCGTC | 12527 |
| 4780 | AGUGUCCC G CUCGCAGA | 3779 | TCTGCGAG GGCTAGCTACAACGA GGGACACT | 12528 |
| 4784 | UCCCGCUC G CAGAGGCG | 3780 | CGCCTCTG GGCTAGCTACAACGA GAGCGGGA | 12529 |
| 4790 | UCGCAGAG G CGAGGUAG | 3781 | CTACCTCG GGCTAGCTACAACGA CTCTGCGA | 12530 |
| 4795 | GAGGCGAG G UAGGACCG | 3782 | CGGTCCTA GGCTAGCTACAACGA CTCGCCTC | 12531 |
| 4800 | GAGGUAGG A CCGGUAGG | 3783 | CCTACCGG GGCTAGCTACAACGA CCTACCTC | 12532 |
| 4804 | UAGGACCG G UAGGGGCA | 3784 | TGCCCCTA GGCTAGCTACAACGA CGGTCCTA | 12533 |
| 4810 | CGGUAGGG G CAGGAGAG | 3785 | CTCTCCTG GGCTAGCTACAACGA CCCTACCG | 12534 |
| 4819 | CAGGAGAG G CAUAUACA | 3786 | TGTATATG GGCTAGCTACAACGA CTCTCCTG | 12535 |
| 4821 | GGAGAGGC A UAUACAGG | 3787 | CCTGTATA GGCTAGCTACAACGA GCCTCTCC | 12536 |
| 4823 | AGAGGCAU A UACAGGUU | 3788 | AACCTGTA GGCTAGCTACAACGA ATGCCTCT | 12537 |
| 4825 | AGGCAUAU A CAGGUUUG | 3789 | CAAACCTG GGCTAGCTACAACGA ATATGCCT | 12538 |
| 4829 | AUAUACAG G UUUGUGAC | 3790 | GTCACAAA GGCTAGCTACAACGA CTGTATAT | 12539 |
| 4833 | ACAGGUUU G UGACUCCA | 3791 | TGGAGTCA GGCTAGCTACAACGA AAACCTGT | 12540 |
| 4836 | GGUUUGUG A CUCCAGGA | 3792 | TCCTGGAG GGCTAGCTACAACGA CACAAACC | 12541 |
| 4847 | CCAGGAGA G CGGCCUUC | 3793 | GAAGGCCG GGCTAGCTACAACGA TCTCCTGG | 12542 |
| 4850 | GGAGAGCG G CCUUCGGG | 3794 | CCCGAAGG GGCTAGCTACAACGA CGCTCTCC | 12543 |
| 4858 | GCCUUCGG G CAUGUUCG | 3795 | CGAACATG GGCTAGCTACAACGA CCGAAGGC | 12544 |
| 4860 | CUUCGGGC A UGUUCGAC | 3796 | GTCGAACA GGCTAGCTACAACGA GCCCGAAG | 12545 |
| 4862 | UCGGGCAU G UUCGACUC | 3797 | GAGTCGAA GGCTAGCTACAACGA ATGCCCGA | 12546 |
| 4867 | CAUGUUCG A CUCCUCGG | 3798 | CCGAGGAG GGCTAGCTACAACGA CGAACATG | 12547 |
| 4875 | ACUCCUCG G UCCUGUGU | 3799 | ACACAGGA GGCTAGCTACAACGA CGAGGAGT | 12548 |
| 4880 | UCGGUCCU G UGUGAGUG | 3800 | CACTCACA GGCTAGCTACAACGA AGGACCGA | 12549 |
| 4882 | GGUCCUGU G UGAGUGCU | 3801 | AGCACTCA GGCTAGCTACAACGA ACAGGACC | 12550 |
| 4886 | CUGUGUGA G UGCUAUGA | 3802 | TCATAGCA GGCTAGCTACAACGA TCACACAG | 12551 |
| 4888 | GUGUGAGU G CUAUGACG | 3803 | CGTCATAG GGCTAGCTACAACGA ACTCACAC | 12552 |
| 4891 | UGAGUGCU A UGACGCGG | 3804 | CCGCGTCA GGCTAGCTACAACGA AGCACTCA | 12553 |
| 4894 | GUGCUAUG A CGCGGGAU | 3805 | ATCCCGCG GGCTAGCTACAACGA CATAGCAC | 12554 |
| 4896 | GCUAUGAC G CGGGAUGU | 3806 | ACATCCCG GGCTAGCTACAACGA GTCATAGC | 12555 |
| 4901 | GACGCGGG A UGUGCUUG | 3807 | CAAGCACA GGCTAGCTACAACGA CCCGCGTC | 12556 |
| 4903 | CGCGGGAU G UGCUUGGU | 3808 | ACCAAGCA GGCTAGCTACAACGA ATCCCGCG | 12557 |
| 4905 | CGGGAUGU G CUUGGUAC | 3809 | GTACCAAG GGCTAGCTACAACGA ACATCCCG | 12558 |
| 4910 | UGUGCUUG G UACGAGCU | 3810 | AGCTCGTA GGCTAGCTACAACGA CAAGCACA | 12559 |
| 4912 | UGCUUGGU A CGAGCUCA | 3811 | TGAGCTCG GGCTAGCTACAACGA ACCAAGCA | 12560 |
| 4916 | UGGUACGA G CUCACGCC | 3812 | GGCGTGAG GGCTAGCTACAACGA TCGTACCA | 12561 |
| 4920 | ACGAGCUC A CGCCCGCC | 3813 | GGCGGGCG GGCTAGCTACAACGA GAGCTCGT | 12562 |
| 4922 | GAGCUCAC G CCCGCCGA | 3814 | TCGGCGGG GGCTAGCTACAACGA GTGAGCTC | 12563 |
| 4926 | UCACGCCC G CCGAGACC | 3815 | GGTCTCGG GGCTAGCTACAACGA GGGCGTGA | 12564 |
| 4932 | CCGCCGAG A CCUCCGUU | 3816 | AACGGAGG GGCTAGCTACAACGA CTCGGCGG | 12565 |
| 4938 | AGACCUCC G UUAGGUUG | 3817 | CAACCTAA GGCTAGCTACAACGA GGAGGTCT | 12566 |
| 4943 | UCCGUUAG G UUGCGGGC | 3818 | GCCCGCAA GGCTAGCTACAACGA CTAACGGA | 12567 |
| 4946 | GUUAGGUU G CGGGCUUA | 3819 | TAAGCCCG GGCTAGCTACAACGA AACCTAAC | 12568 |
| 4950 | GGUUGCGG G CUUACCUA | 3820 | TAGGTAAG GGCTAGCTACAACGA CCGCAACC | 12569 |
| 4954 | GCGGGCUU A CCUAAAUA | 3821 | TATTTAGG GGCTAGCTACAACGA AAGCCCGC | 12570 |
| 4960 | UUACCUAA A UACACCAG | 3822 | CTGGTGTA GGCTAGCTACAACGA TTAGGTAA | 12571 |
| 4962 | ACCUAAAU A CACCAGGG | 3823 | CCCTGGTG GGCTAGCTACAACGA ATTTAGGT | 12572 |
| 4964 | CUAAAUAC A CCAGGGUU | 3824 | AACCCTGG GGCTAGCTACAACGA GTATTTAG | 12573 |
| 4970 | ACACCAGG G UUGCCCUU | 3825 | AAGGGCAA GGCTAGCTACAACGA CCTGGTGT | 12574 |
| 4973 | CCAGGGUU G CCCUUCUG | 3826 | CAGAAGGG GGCTAGCTACAACGA AACCCTGG | 12575 |
| 4981 | GCCCUUCU G CCAGGACC | 3827 | GGTCCTGG GGCTAGCTACAACGA AGAAGGGC | 12576 |
| 4987 | CUGCCAGG A CCAUCUGG | 3828 | CCAGATGG GGCTAGCTACAACGA CCTGGCAG | 12577 |
| 4990 | CCAGGACC A UCUGGAGU | 3829 | ACTCCAGA GGCTAGCTACAACGA GGTCCTGG | 12578 |
| 4997 | CAUCUGGA G UUCUGGGA | 3830 | TCCCAGAA GGCTAGCTACAACGA TCCAGATG | 12579 |
| 5008 | CUGGGAGG G UGUCUUCA | 3831 | TGAAGACA GGCTAGCTACAACGA CCTCCCAG | 12580 |
| 5010 | GGGAGGGU G UCUUCACA | 3832 | TGTGAAGA GGCTAGCTACAACGA ACCCTCCC | 12581 |
| 5016 | GUGUCUUC A CAGGCCUC | 3833 | GAGGCCTG GGCTAGCTACAACGA GAAGACAC | 12582 |
| 5020 | CUUCACAG G CCUCACCC | 3834 | GGGTGAGG GGCTAGCTACAACGA CTGTGAAG | 12583 |
| 5025 | CAGGCCUC A CCCACAUA | 3835 | TATGTGGG GGCTAGCTACAACGA GAGGCCTG | 12584 |
| 5029 | CCUCACCC A CAUAGAUG | 3836 | CATCTATG GGCTAGCTACAACGA GGGTGAGG | 12585 |
| 5031 | UCACCCAC A UAGAUGCC | 3837 | GGCATCTA GGCTAGCTACAACGA GTGGGTGA | 12586 |
| 5035 | CCACAUAG A UGCCCACU | 3838 | AGTGGGCA GGCTAGCTACAACGA CTATGTGG | 12587 |
| 5037 | ACAUAGAU G CCCACUUC | 3839 | GAAGTGGG GGCTAGCTACAACGA ATCTATGT | 12588 |
| 5041 | AGAUGCCC A CUUCUUGU | 3840 | ACAAGAAG GGCTAGCTACAACGA GGGCATCT | 12589 |
| 5048 | CACUUCUU G UCCCAGAC | 3841 | GTCTGGGA GGCTAGCTACAACGA AAGAAGTG | 12590 |
| 5055 | UGUCCCAG A CCAAGCAG | 3842 | CTGCTTGG GGCTAGCTACAACGA CTGGGACA | 12591 |
| 5060 | CAGACCAA G CAGGCAGG | 3843 | CCTGCCTG GGCTAGCTACAACGA TTGGTCTG | 12592 |
| 5064 | CCAAGCAG G CAGGAGAA | 3844 | TTCTCCTG GGCTAGCTACAACGA CTGCTTGG | 12593 |
| 5074 | AGGAGAAA A CCUCCCCU | 3845 | AGGGGAGG GGCTAGCTACAACGA TTTCTCCT | 12594 |
| 5083 | CCUCCCCU A CCUGGUAG | 3846 | CTACCAGG GGCTAGCTACAACGA AGGGGAGG | 12595 |
| 5088 | CCUACCUG G UAGCAUAC | 3847 | GTATGCTA GGCTAGCTACAACGA CAGGTAGG | 12596 |
| 5091 | ACCUGGUA G CAUACCAA | 3848 | TTGGTATG GGCTAGCTACAACGA TACCAGGT | 12597 |
| 5093 | CUGGUAGC A UACCAAGC | 3849 | GCTTGGTA GGCTAGCTACAACGA GCTACCAG | 12598 |
| 5095 | GGUAGCAU A CCAAGCCA | 3850 | TGGCTTGG GGCTAGCTACAACGA ATGCTACC | 12599 |
| 5100 | CAUACCAA G CCACAGUG | 3851 | CACTGTGG GGCTAGCTACAACGA TTGGTATG | 12600 |
| 5103 | ACCAAGCC A CAGUGUGC | 3852 | GCACACTG GGCTAGCTACAACGA GGCTTGGT | 12601 |
| 5106 | AAGCCACA G UGUGCGCC | 3853 | GGCGCACA GGCTAGCTACAACGA TGTGGCTT | 12602 |
| 5108 | GCCACAGU G UGCGCCAG | 3854 | CTGGCGCA GGCTAGCTACAACGA ACTGTGGC | 12603 |
| 5110 | CACAGUGU G CGCCAGGG | 3855 | CCCTGGCG GGCTAGCTACAACGA ACACTGTG | 12604 |
| 5112 | CAGUGUGC G CCAGGGCU | 3856 | AGCCCTGG GGCTAGCTACAACGA GCACACTG | 12605 |
| 5118 | GCGCCAGG G CUCAGGCU | 3857 | AGCCTGAG GGCTAGCTACAACGA CCTGGCGC | 12606 |
| 5124 | GGGCUCAG G CUCCACCC | 3858 | GGGTGGAG GGCTAGCTACAACGA CTGAGCCC | 12607 |
| 5129 | CAGGCUCC A CCCCCAUC | 3859 | GATGGGGG GGCTAGCTACAACGA GGAGCCTG | 12608 |
| 5135 | CCACCCCC A UCGUGGGA | 3860 | TCCCACGA GGCTAGCTACAACGA GGGGGTGG | 12609 |
| 5138 | CCCCCAUC G UGGGAUCA | 3861 | TGATCCCA GGCTAGCTACAACGA GATGGGGG | 12610 |
| 5143 | AUCGUGGG A UCAAAUGU | 3862 | ACATTTGA GGCTAGCTACAACGA CCCACGAT | 12611 |
| 5148 | GGGAUCAA A UGUGGAAG | 3863 | CTTCCACA GGCTAGCTACAACGA TTGATCCC | 12612 |
| 5150 | GAUCAAAU G UGGAAGUG | 3864 | CACTTCCA GGCTAGCTACAACGA ATTTGATC | 12613 |
| 5156 | AUGUGGAA G UGUCUCAC | 3865 | GTGAGACA GGCTAGCTACAACGA TTCCACAT | 12614 |
| 5158 | GUGGAAGU G UCUCACAC | 3866 | GTGTGAGA GGCTAGCTACAACGA ACTTCCAC | 12615 |
| 5163 | AGUGUCUC A CACGGCUA | 3867 | TAGCCGTG GGCTAGCTACAACGA GAGACACT | 12616 |
| 5165 | UGUCUCAC A CGGCUAAA | 3868 | TTTAGCCG GGCTAGCTACAACGA GTGAGACA | 12617 |
| 5168 | CUCACACG G CUAAAGCC | 3869 | GGCTTTAG GGCTAGCTACAACGA CGTGTGAG | 12618 |
| 5174 | CGGCUAAA G CCUACGCU | 3870 | AGCGTAGG GGCTAGCTACAACGA TTTAGCCG | 12619 |
| 5178 | UAAAGCCU A CGCUACAC | 3871 | GTGTAGCG GGCTAGCTACAACGA AGGCTTTA | 12620 |
| 5180 | AAGCCUAC G CUACACGG | 3872 | CCGTGTAG GGCTAGCTACAACGA GTAGGCTT | 12621 |
| 5183 | CCUACGCU A CACGGGCC | 3873 | GGCCCGTG GGCTAGCTACAACGA AGCGTAGG | 12622 |
| 5185 | UACGCUAC A CGGGCCAA | 3874 | TTGGCCCG GGCTAGCTACAACGA GTAGCGTA | 12623 |
| 5189 | CUACACGG G CCAACACC | 3875 | GGTGTTGG GGCTAGCTACAACGA CCGTGTAG | 12624 |
| 5193 | ACGGGCCA A CACCCCUG | 3876 | CAGGGGTG GGCTAGCTACAACGA TGGCCCGT | 12625 |
| 5195 | GGGCCAAC A CCCCUGCU | 3877 | AGCAGGGG GGCTAGCTACAACGA GTTGGCCC | 12626 |
| 5201 | ACACCCCU G CUGUAUAG | 3878 | CTATACAC GGCTACCTACAACGA AGGGGTGT | 12627 |
| 5204 | CCCCUGCU G UAUAGGCU | 3879 | AGCCTATA GGCTAGCTACAACGA AGCAGGGG | 12628 |
| 5206 | CCUGCUGU A UAGGCUAG | 3880 | CTAGCCTA GGCTAGCTACAACCA ACAGCAGG | 12629 |
| 5210 | CUGUAUAG G CUAGGAGC | 3881 | GCTCCTAG GGCTAGCTACAACGA CTATACAG | 12630 |
| 5217 | GGCUAGGA G CCGUCCAA | 3882 | TTGGACGG GGCTAGCTACAACGA TCCTAGCC | 12631 |
| 5220 | UAGGAGCC G UCCAAAAU | 3883 | ATTTTGGA GGCTAGCTACAACGA GGCTCCTA | 12632 |
| 5227 | CGUCCAAA A UGAUGUCA | 3884 | TGACATCA GGCTAGCTACAACGA TTTGGACG | 12633 |
| 5230 | CCAAAAUG A UGUCACCC | 3885 | GGGTGACA GGCTAGCTACAACGA CATTTTGG | 12634 |
| 5232 | AAAAUGAU G UCACCCUC | 3886 | GAGGGTGA GGCTAGCTACAACGA ATCATTTT | 12635 |
| 5235 | AUGAUGUC A CCCUCACA | 3887 | TGTGAGGG GGCTAGCTACAACGA GACATCAT | 12636 |
| 5241 | UCACCCUC A CACACCCC | 3888 | GGGGTGTG GGCTAGCTACAACGA GAGGGTGA | 12637 |
| 5243 | ACCCUCAC A CACCCCAU | 3889 | ATGGGGTG GGCTAGCTACAACGA GTGAGGGT | 12638 |
| 5245 | CCUCACAC A CCCCAUAA | 3890 | TTATGGGG GGCTAGCTACAACGA GTGTGAGG | 12639 |
| 5250 | CACACCCC A UAACCAAA | 3891 | TTTGGTTA GGCTAGCTACAACGA GGGGTGTG | 12640 |
| 5253 | ACCCCAUA A CCAAAUAC | 3892 | GTATTTGG GGCTAGCTACAACGA TATGGGGT | 12641 |
| 5258 | AUAACCAA A UACAUCAU | 3893 | ATGATGTA GGCTAGCTACAACGA TTGGTTAT | 12642 |
| 5260 | AACCAAAU A CAUCAUCA | 3894 | TCATGATG GGCTAGCTACAACGA ATTTGGTT | 12643 |
| 5262 | CCAAAUAC A UCAUGACA | 3895 | TGTCATGA GGCTAGCTACAACGA GTATTTGG | 12644 |
| 5265 | AAUACAUC A UGACAUGC | 3896 | GCATGTCA GGCTAGCTACAACGA GATGTATT | 12645 |
| 5268 | ACAUCAUG A CAUGCAUG | 3897 | CATGCATG GGCTAGCTACAACGA CATGATGT | 12646 |
| 5270 | AUCAUGAC A UGCAUGUC | 3898 | GACATGCA GGCTAGCTACAACGA GTCATGAT | 12647 |
| 5272 | CAUGACAU G CAUGUCGG | 3899 | CCGACATG GGCTAGCTACAACGA ATGTCATG | 12648 |
| 5274 | UGACAUGC A UGUCGGCU | 3900 | AGCCGACA GGCTAGCTACAACGA GCATGTCA | 12649 |
| 5276 | ACAUGCAU G UCGGCUGA | 3901 | TCAGCCGA GGCTAGCTACAACGA ATGCATGT | 12650 |
| 5280 | GCAUGUCG G CUGACCUG | 3902 | CAGGTCAG GGCTAGCTACAACGA CGACATGC | 12651 |
| 5284 | GUCGGCUG A CCUGGAGG | 3903 | CCTCCAGG GGCTAGCTACAACGA CAGCCGAC | 12652 |
| 5292 | ACCUGGAG G UCGUCACC | 3904 | GGTGACGA GGCTAGCTACAACGA CTCCAGGT | 12653 |
| 5295 | UGGAGGUC G UCACCAGC | 3905 | GCTGGTGA GGCTAGCTACAACGA GACCTCCA | 12654 |
| 5298 | AGGUCGUC A CCAGCACC | 3906 | GGTGCTGG GGCTAGCTACAACGA GACGACCT | 12655 |
| 5302 | CGUCACCA G CACCUGGG | 3907 | CCCAGGTG GGCTAGCTACAACGA TGGTGACG | 12656 |
| 5304 | UCACCAGC A CCUGGGUG | 3908 | CACCCAGG GGCTAGCTACAACGA GCTGGTGA | 12657 |
| 5310 | GCACCUGG G UGCUAGUA | 3909 | TACTAGCA GGCTAGCTACAACGA CCAGGTGC | 12658 |
| 5312 | ACCUGGGU G CUAGUAGG | 3910 | CCTACTAG GGCTAGCTACAACGA ACCCAGGT | 12659 |
| 5316 | GGGUGCUA G UAGGUGGC | 3911 | GCCACCTA GGCTAGCTACAACGA TAGCACCC | 12660 |
| 5320 | GCUAGUAG G UGGCGUCC | 3912 | GGACGCCA GGCTAGCTACAACGA CTACTAGC | 12661 |
| 5323 | AGUAGGUG G CGUCCUGG | 3913 | CCAGGACG GGCTAGCTACAACGA CACCTACT | 12662 |
| 5325 | UAGGUGGC G UCCUGGCA | 3914 | TGCCAGGA GGCTAGCTACAACGA GCCACCTA | 12663 |
| 5331 | GCGUCCUG G CAGCUCUG | 3915 | CAGAGCTG GGCTAGCTACAACGA CAGGACGC | 12664 |
| 5334 | UCCUGGCA G CUCUGACC | 3916 | GGTCAGAG GGCTAGCTACAACGA TGCCAGGA | 12665 |
| 5340 | CAGCUCUG A CCGCGUAU | 3917 | ATACGCGG GGCTAGCTACAACGA CAGAGCTG | 12666 |
| 5343 | CUCUGACC G CGUAUUGC | 3918 | GCAATACG GGCTAGCTACAACGA GGTCAGAG | 12667 |
| 5345 | CUGACCGC G UAUUGCCU | 3919 | AGGCAATA GGCTAGCTACAACGA GCGGTCAG | 12668 |
| 5347 | GACCGCGU A UUGCCUGA | 3920 | TCAGGCAA GGCTAGCTACAACGA ACGCGGTC | 12669 |
| 5350 | CGCGUAUU G CCUGACGA | 3921 | TCGTCAGG GGCTAGCTACAACGA AATACGCG | 12670 |
| 5355 | AUUGCCUG A CGACAGGC | 3922 | GCCTGTCG GGCTAGCTACAACGA CAGGCAAT | 12671 |
| 5358 | GCCUGACG A CAGGCAGC | 3923 | GCTGCCTG GGCTAGCTACAACGA CGTCAGGC | 12672 |
| 5362 | GACGACAG G CAGCGUGG | 3924 | CCACGCTG GGCTAGCTACAACGA CTGTCGTC | 12673 |
| 5365 | GACAGGCA G CGUGGUCA | 3925 | TGACCACG GGCTAGCTACAACGA TGCCTGTC | 12674 |
| 5367 | CAGGCAGC G UGGUCAUU | 3926 | AATGACCA GGCTAGCTACAACGA GCTGCCTG | 12675 |
| 5370 | GCAGCGUG G UCAUUGUG | 3927 | CACAATGA GGCTAGCTACAACGA CACGCTGC | 12676 |
| 5373 | GCGUGGUC A UUGUGGGC | 3928 | GCCCACAA GGCTAGCTACAACGA GACCACGC | 12677 |
| 5376 | UGGUCAUU G UGGGCAGA | 3929 | TCTGCCCA GGCTAGCTACAACGA AATGACCA | 12678 |
| 5380 | CAUUGUGG G CAGAAUCA | 3930 | TGATTCTG GGCTAGCTACAACGA CCACAATG | 12679 |
| 5385 | UGGGCAGA A UCAUCUUG | 3931 | CAAGATGA GGCTAGCTACAACGA TCTGCCCA | 12680 |
| 5388 | GCAGAAUC A UCUUGUCC | 3932 | GGACAAGA GGCTAGCTACAACGA GATTCTGC | 12681 |
| 5393 | AUCAUCUU G UCCGGGAA | 3933 | TTCCCGGA GGCTAGCTACAACGA AAGATGAT | 12682 |
| 5402 | UCCGGGAA G CCGGCUGU | 3934 | ACAGCCGG GGCTAGCTACAACGA TTCCCGGA | 12683 |
| 5406 | GGAAGCCG G CUGUUAUC | 3935 | GATAACAG GGCTAGCTACAACGA CGGCTTCC | 12684 |
| 5409 | AGCCGGCU G UUAUCCCC | 3936 | GGGGATAA GGCTAGCTACAACGA AGCCGGCT | 12685 |
| 5412 | CGGCUGUU A UCCCCGAC | 3937 | GTCGGGGA GGCTAGCTACAACGA AACAGCCG | 12686 |
| 5419 | UAUCCCCG A CAGGGAGG | 3938 | CCTCCCTG GGCTAGCTACAACGA CGGGGATA | 12687 |
| 5427 | ACAGGGAG G CUCUCUAC | 3939 | GTAGAGAG GGCTAGCTACAACGA CTCCCTGT | 12688 |
| 5434 | GGCUCUCU A CCAGGAGU | 3940 | ACTCCTGG GGCTAGCTACAACGA AGAGAGCC | 12689 |
| 5441 | UACCAGGA G UUCGAUGA | 3941 | TCATCGAA GGCTAGCTACAACGA TCCTGGTA | 12690 |
| 5446 | GGAGUUCG A UGAGAUGG | 3942 | CCATCTCA GGCTAGCTACAACGA CGAACTCC | 12691 |
| 5451 | UCGAUGAG A UGGAGGAG | 3943 | CTCCTCCA GGCTAGCTACAACGA CTCATCGA | 12692 |
| 5459 | AUGGAGGA G UGUGCCUC | 3944 | GAGGCACA GGCTAGCTACAACGA TCCTCCAT | 12693 |
| 5461 | GGAGGAGU G UGCCUCAC | 3945 | GTGAGGCA GGCTAGCTACAACGA ACTCCTCC | 12694 |
| 5463 | AGGAGUGU G CCUCACAC | 3946 | GTGTGAGG GGCTAGCTACAACGA ACACTCCT | 12695 |
| 5468 | UGUGCCUC A CACCUCCC | 3947 | GGGAGGTG GGCTAGCTACAACGA GAGGCACA | 12696 |
| 5470 | UGCCUCAC A CCUCCCUU | 3948 | AAGGGAGG GGCTAGCTACAACGA GTGAGGCA | 12697 |
| 5479 | CCUCCCUU A CAUCGAAC | 3949 | GTTCGATG GGCTAGCTACAACGA AAGGGAGG | 12698 |
| 5481 | UCCCUUAC A UCGAACAG | 3950 | CTGTTCGA GGCTAGCTACAACGA GTAAGGGA | 12699 |
| 5486 | UACAUCGA A CAGGGGAU | 3951 | ATCCCCTG GGCTAGCTACAACGA TCGATGTA | 12700 |
| 5493 | AACAGGGG A UGCAGCUC | 3952 | GAGCTGCA GGCTAGCTACAACGA CCCCTGTT | 12701 |
| 5495 | CAGGGGAU G CAGCUCGC | 3953 | GCGAGCTG GGCTAGCTACAACGA ATCCCCTG | 12702 |
| 5498 | GGGAUGCA G CUCGCCGA | 3954 | TCGGCGAG GGCTAGCTACAACGA TGCATCCC | 12703 |
| 5502 | UGCAGCUC G CCGAGCAG | 3955 | CTGCTCGG GGCTAGCTACAACGA GAGCTGCA | 12704 |
| 5507 | CUCGCCGA G CAGUUCAA | 3956 | TTGAACTG GGCTAGCTACAACGA TCGGCGAG | 12705 |
| 5510 | GCCGAGCA G UUCAAGCA | 3957 | TGCTTGAA GGCTAGCTACAACGA TGCTCGGC | 12706 |
| 5516 | CAGUUCAA G CAGAAGGC | 3958 | GCCTTCTG GGCTAGCTACAACGA TTGAACTG | 12707 |
| 5523 | AGCAGAAG G CGCUCGGA | 3959 | TCCGAGCG GGCTAGCTACAACGA CTTCTGCT | 12708 |
| 5525 | CAGAAGGC G CUCGGAUU | 3960 | AATCCGAG GGCTAGCTACAACGA GCCTTCTG | 12709 |
| 5531 | GCGCUCGG A UUGCUGCA | 3961 | TGCAGCAA GGCTAGCTACAACGA CCGAGCGC | 12710 |
| 5534 | CUCGGAUU G CUGCAAAC | 3962 | GTTTGCAG GGCTAGCTACAACGA AATCCGAG | 12711 |
| 5537 | GGAUUGCU G CAAACAGC | 3963 | GCTGTTTG GGCTAGCTACAACGA AGCAATCC | 12712 |
| 5541 | UGCUGCAA A CAGCCACC | 3964 | GGTGGCTG GGCTAGCTACAACGA TTGCAGCA | 12713 |
| 5544 | UGCAAACA G CCACCAAC | 3965 | GTTGGTGG GGCTAGCTACAACGA TGTTTGCA | 12714 |
| 5547 | AAACAGCC A CCAACCAA | 3966 | TTGGTTGG GGCTAGCTACAACGA GGCTGTTT | 12715 |
| 5551 | AGCCACCA A CCAAGCGG | 3967 | CCGCTTGG GGCTAGCTACAACGA TGGTGGCT | 12716 |
| 5556 | CCAACCAA G CGGAGGCU | 3968 | AGCCTCCG GGCTAGCTACAACGA TTGGTTGG | 12717 |
| 5562 | AAGCGGAG G CUGCUGCU | 3969 | AGCAGCAG GGCTAGCTACAACGA CTCCGCTT | 12718 |
| 5565 | CGGAGGCU G CUGCUCCC | 3970 | GGGAGCAG GGCTAGCTACAACGA AGCCTCCG | 12719 |
| 5568 | AGGCUGCU G CUCCCGUG | 3971 | CACGGGAG GGCTAGCTACAACGA AGCAGCCT | 12720 |
| 5574 | CUGCUCCC G UGGUGGAA | 3972 | TTCCACCA GGCTAGCTACAACGA GGGAGCAG | 12721 |
| 5577 | CUCCCGUG G UGGAAUCC | 3973 | GGATTCCA GGCTAGCTACAACGA CACGGGAG | 12722 |
| 5582 | GUGGUGGA A UCCAAGUG | 3974 | CACTTGGA GGCTAGCTACAACGA TCCACCAC | 12723 |
| 5588 | GAAUCCAA G UGGCGAGC | 3975 | GCTCGCCA GGCTAGCTACAACGA TTGGATTC | 12724 |
| 5591 | UCCAAGUG G CGAGCCCU | 3976 | AGGGCTCG GGCTAGCTACAACGA CACTTGGA | 12725 |
| 5595 | AGUGGCGA G CCCUUGAG | 3977 | CTCAAGGG GGCTAGCTACAACGA TCGCCACT | 12726 |
| 5604 | CCCUUGAG G CUUUCUGG | 3978 | CCAGAAAG GGCTAGCTACAACGA CTCAAGGG | 12727 |
| 5613 | CUUUCUGG G CGAAGCAC | 3979 | GTGCTTCG GGCTAGCTACAACGA CCAGAAAG | 12728 |
| 5618 | UGGGCGAA G CACAUGUG | 3980 | CACATGTG GGCTAGCTACAACGA TTCGCCCA | 12729 |
| 5620 | GGCGAAGC A CAUGUGGA | 3981 | TCCACATG GGCTAGCTACAACGA GCTTCGCC | 12730 |
| 5622 | CGAAGCAC A UGUGGAAU | 3982 | ATTCCACA GGCTAGCTACAACGA GTGCTTCG | 12731 |
| 5624 | AAGCACAU G UGGAAUUU | 3983 | AAATTCCA GGCTAGCTACAACGA ATGTGCTT | 12732 |
| 5629 | CAUGUGGA A UUUCAUCA | 3984 | TGATGAAA GGCTAGCTACAACGA TCCACATG | 12733 |
| 5634 | GGAAUUUC A UCAGCGGG | 3985 | CCCGCTGA GGCTAGCTACAACGA GAAATTCC | 12734 |
| 5638 | UUUCAUCA G CGGGAUAC | 3986 | GTATCCCG GGCTAGCTACAACGA TGATGAAA | 12735 |
| 5643 | UCAGCGGG A UACAGUAC | 3987 | GTACTGTA GGCTAGCTACAACGA CCCGCTGA | 12736 |
| 5645 | AGCGGGAU A CAGUACCU | 3988 | AGGTACTG GGCTAGCTACAACGA ATCCCGCT | 12737 |
| 5648 | GGGAUACA G UACCUAGC | 3989 | GCTAGGTA GGCTAGCTACAACGA TGTATCCC | 12738 |
| 5650 | GAUACAGU A CCUAGCAG | 3990 | CTGCTAGG GGCTAGCTACAACGA ACTGTATC | 12739 |
| 5655 | AGUACCUA G CAGGCUUG | 3991 | CAAGCCTG GGCTAGCTACAACGA TAGGTACT | 12740 |
| 5659 | CCUAGCAG G CUUGUCCA | 3992 | TGGACAAG GGCTAGCTACAACGA CTGCTAGG | 12741 |
| 5663 | GCAGGCUU G UCCACUCU | 3993 | AGAGTGGA GGCTAGCTACAACGA AAGCCTGC | 12742 |
| 5667 | GCUUGUCC A CUCUGCCU | 3994 | AGGCAGAG GGCTAGCTACAACGA GGACAAGC | 12743 |
| 5672 | UCCACUCU G CCUGGGAA | 3995 | TTCCCAGG GGCTAGCTACAACGA AGAGTGGA | 12744 |
| 5680 | GCCUGGGA A CCCCGCGA | 3996 | TCGCGGGG GGCTAGCTACAACGA TCCCAGOC | 12745 |
| 5685 | GGAACCCC G CGAUAGCA | 3997 | TGCTATCG GGCTAGCTACAACGA GGGGTTCC | 12746 |
| 5688 | ACCCCGCG A UAGCAUCA | 3998 | TGATGCTA GGCTAGCTACAACGA CGCGGGGT | 12747 |
| 5691 | CCGCGAUA G CAUCAUUG | 3999 | CAATGATG GGCTAGCTACAACGA TATCGCGG | 12748 |
| 5693 | GCGAUAGC A UCAUUGAU | 4000 | ATCAATGA GGCTAGCTACAACGA GCTATCGC | 12749 |
| 5696 | AUAGCAUC A UUGAUGGC | 4001 | GCCATCAA GGCTAGCTACAACGA GATGCTAT | 12750 |
| 5700 | CAUCAUUG A UGGCAUUC | 4002 | GAATGCCA GGCTAGCTACAACGA CAATGATG | 12751 |
| 5703 | CAUUGAUG G CAUUCACA | 4003 | TGTGAATG GGCTAGCTACAACGA CATCAATG | 12752 |
| 5705 | UUGAUGGC A UUCACAGC | 4004 | GCTGTGAA GGCTAGCTACAACGA GCCATCAA | 12753 |
| 5709 | UGGCAUUC A CAGCCUCC | 4005 | GGAGGCTG GGCTAGCTACAACGA GAATGCCA | 12754 |
| 5712 | CAUUCACA G CCUCCAUC | 4006 | GATGGAGG GGCTAGCTACAACGA TGTGAATG | 12755 |
| 5718 | CAGCCUCC A UCACCAGC | 4007 | GCTGGTGA GGCTAGCTACAACGA GGAGGCTG | 12756 |
| 5721 | CCUCCAUC A CCAGCCCG | 4008 | CGGGCTGG GGCTAGCTACAACGA GATGGAGG | 12757 |
| 5725 | CAUCACCA G CCCGCUCA | 4009 | TGAGCGGG GGCTAGCTACAACGA TGGTGATG | 12758 |
| 5729 | ACCAGCCC G CUCACCAC | 4010 | GTGGTGAG GGCTAGCTACAACGA GGGCTGGT | 12759 |
| 5733 | GCCCGCUC A CCACCCAA | 4011 | TTGGGTGG GGCTAGCTACAACGA GAGCGGGC | 12760 |
| 5736 | CGCUCACC A CCCAAAGC | 4012 | GCTTTGGG GGCTAGCTACAACGA GGTGAGCG | 12761 |
| 5743 | CACCCAAA G CACCCUCC | 4013 | GGAGGGTG GGCTAGCTACAACGA TTTGGGTG | 12762 |
| 5745 | CCCAAAGC A CCCUCCUG | 4014 | CAGGAGGG GGCTAGCTACAACGA GCTTTGGG | 12763 |
| 5753 | ACCCUCCU G UUCAACAU | 4015 | ATGTTGAA GGCTAGCTACAACGA AGGAGGGT | 12764 |
| 5758 | CCUGUUCA A CAUCUUGG | 4016 | CCAAGATG GGCTAGCTACAACGA TGAACAGG | 12765 |
| 5760 | UGUUCAAC A UCUUGGGA | 4017 | TCCCAAGA GGCTAGCTACAACGA GTTGAACA | 12766 |
| 5771 | UUGGGAGG G UGGGUGGC | 4018 | GCCACCCA GGCTAGCTACAACGA CCTCCCAA | 12767 |
| 5775 | GAGGGUGG G UGGCCGCC | 4019 | GGCGGCCA GGCTAGCTACAACGA CCACCCTC | 12768 |
| 5778 | GGUGGGUG G CCGCCCAA | 4020 | TTGGGCGG GGCTAGCTACAACGA CACCCACC | 12769 |
| 5781 | GGGUGGCC G CCCAACUC | 4021 | GAGTTGGG GGCTAGCTACAACGA GGCCACCC | 12770 |
| 5786 | GCCGCCCA A CUCGCUCC | 4022 | GGAGCGAG GGCTAGCTACAACGA TGGGCGGC | 12771 |
| 5790 | CCCAACUC G CUCCCCCC | 4023 | GGGGGGAG GGCTAGCTACAACGA GAGTTGGG | 12772 |
| 5802 | CCCCCAGA G CCGUUUCG | 4024 | CGAAACGG GGCTAGCTACAACGA TCTGGGGG | 12773 |
| 5805 | CCAGAGCC G UUUCGGCC | 4025 | GGCCGAAA GGCTAGCTACAACGA GGCTCTGG | 12774 |
| 5811 | CCGUUUCG G CCUUCGUG | 4026 | CACGAAGG GGCTAGCTACAACGA CGAAACGG | 12775 |
| 5817 | CGGCCUUC G UGGGCGCC | 4027 | GGCGCCCA GGCTAGCTACAACGA GAAGGCCG | 12776 |
| 5821 | CUUCGUGG G CGCCGGCA | 4028 | TGCCGGCG GGCTAGCTACAACGA CCACGAAG | 12777 |
| 5823 | UCGUGGGC G CCGGCAUC | 4029 | GATGCCGG GGCTAGCTACAACGA GCCCACGA | 12778 |
| 5827 | GGGCGCCG G CAUCGCUG | 4030 | CAGCGATG GGCTAGCTACAACGA CGGCGCCC | 12779 |
| 5829 | GCGCCGGC A UCGCUGGC | 4031 | GCCAGCGA GGCTAGCTACAACGA GCCGGCGC | 12780 |
| 5832 | CCGGCAUC G CUGGCGCG | 4032 | CGCGCCAG GGCTAGCTACAACGA GATGCCGG | 12781 |
| 5836 | CAUCGCUG G CGCGGCUG | 4033 | CAGCCGCG GGCTAGCTACAACGA CAGCGATG | 12782 |
| 5838 | UCGCUGGC G CGGCUGUU | 4034 | AACAGCCG GGCTAGCTACAACGA GCCAGCGA | 12783 |
| 5841 | CUGGCGCG G CUGUUGGC | 4035 | GCCAACAG GGCTAGCTACAACGA CGCGCCAG | 12784 |
| 5844 | GCGCGGCU G UUGGCAGC | 4036 | GCTGCCAA GGCTAGCTACAACGA AGCCGCGC | 12785 |
| 5848 | GGCUGUUG G CAGCAUAG | 4037 | CTATGCTG GGCTAGCTACAACGA CAACAGCC | 12786 |
| 5851 | UGUUGGCA G CAUAGGCC | 4038 | GGCCTATG GGCTAGCTACAACGA TGCCAACA | 12787 |
| 5853 | UUGGCAGC A UAGGCCUU | 4039 | AAGGCCTA GGCTAGCTACAACGA GCTGCCAA | 12788 |
| 5857 | CAGCAUAG G CCUUGGGA | 4040 | TCCCAAGG GGCTAGCTACAACGA CTATGCTG | 12789 |
| 5868 | UUGGGAAG G UGCUUGUA | 4041 | TACAAGCA GGCTAGCTACAACGA CTTCCCAA | 12790 |
| 5870 | GGGAAGGU G CUUGUAGA | 4042 | TCTACAAG GGCTAGCTACAACGA ACCTTCCC | 12791 |
| 5874 | AGGUGCUU G UAGACAUU | 4043 | AATGTCTA GGCTAGCTACAACGA AAGCACCT | 12792 |
| 5878 | GCUUGUAG A CAUUCUGG | 4044 | CCAGAATG GGCTAGCTACAACGA CTACAAGC | 12793 |
| 5880 | UUGUAGAC A UUCUGGCG | 4045 | CGCCAGAA GGCTAGCTACAACGA GTCTACAA | 12794 |
| 5886 | ACAUUCUG G CGGGCUAU | 4046 | ATAGCCCG GGCTAGCTACAACCA CAGAATGT | 12795 |
| 5890 | UCUGGCGC G CUAUGGAG | 4047 | CTCCATAG GGCTAGCTACAACGA CCGCCAGA | 12796 |
| 5893 | GGCGGGCU A UGGAGCAG | 4048 | CTGCTCCA GGCTAGCTACAACGA AGCCCGCC | 12797 |
| 5898 | GCUAUGCA G CAGGAGUG | 4049 | CACTCCTG GGCTAGCTACAACGA TCCATAGC | 12798 |
| 5904 | GAGCAGGA G UGGCGGGU | 4050 | ACCCGCCA GGCTAGCTACAACGA TCCTGCTC | 12799 |
| 5907 | CAGGAGUG G CGGGUGCU | 4051 | AGCACCCG GGCTAGCTACAACGA CACTCCTG | 12800 |
| 5911 | AGUGGCGG G UGCUCUCG | 4052 | CGAGAGCA GGCTAGCTACAACGA CCGCCACT | 12801 |
| 5913 | UGGCGGGU G CUCUCGUG | 4053 | CACGAGAG GGCTAGCTACAACGA ACCCGCCA | 12802 |
| 5919 | GUGCUCUC G UGGCCUUC | 4054 | GAAGGCCA GGCTAGCTACAACGA GAGAGCAC | 12803 |
| 5922 | CUCUCCUG G CCUUCAAG | 4055 | CTTGAAGG GGCTAGCTACAACGA CACGAGAG | 12804 |
| 5931 | CCUUCAAG G UCAUGAGC | 4056 | GCTCATGA GGCTAGCTACAACGA CTTGAAGG | 12805 |
| 5934 | UCAAGGUC A UGAGCGGG | 4057 | CCCGCTCA GGCTAGCTACAACGA GACCTTGA | 12806 |
| 5938 | GGUCAUGA G CGGGGAGA | 4058 | TCTCCCCG GGCTAGCTACAACGA TCATGACC | 12807 |
| 5946 | GCGGGGAG A UGCCUUCU | 4059 | AGAAGGCA GGCTAGCTACAACGA CTCCCCGC | 12808 |
| 5948 | GGGGAGAU G CCUUCUAC | 4060 | GTAGAAGG GGCTAGCTACAACGA ATCTCCCC | 12809 |
| 5955 | UGCCUUCU A CCGAGGAC | 4061 | GTCCTCGG GGCTAGCTACAACGA AGAAGGCA | 12810 |
| 5962 | UACCGAGG A CCUGGUCA | 4062 | TGACCAGG GGCTAGCTACAACGA CCTCGGTA | 12811 |
| 5967 | AGGACCUG G UCAACUUA | 4063 | TAAGTTGA GGCTAGCTACAACGA CAGGTCCT | 12812 |
| 5971 | CCUGGUCA A CUUACUCC | 4064 | GGAGTAAG GGCTAGCTACAACGA TGACCAGG | 12813 |
| 5975 | GUCAACUU A CUCCCUGC | 4065 | GCAGGGAG GGCTAGCTACAACGA AAGTTGAC | 12814 |
| 5982 | UACUCCCU G CCAUCCUC | 4066 | GAGGATGG GGCTAGCTACAACGA AGGGAGTA | 12815 |
| 5985 | UCCCUGCC A UCCUCUCU | 4067 | AGAGAGGA GGCTAGCTACAACGA GGCAGGGA | 12816 |
| 5998 | CUCUCCUG G CGCCCUGG | 4068 | CCAGGGCG GGCTAGCTACAACGA CAGGAGAG | 12817 |
| 6000 | CUCCUGGC G CCCUGGUC | 4069 | GACCAGGG GGCTAGCTACAACGA GCCAGGAG | 12818 |
| 6006 | GCGCCCUG G UCGUCGGG | 4070 | CCCGACGA GGCTAGCTACAACGA CAGGGCGC | 12819 |
| 6009 | CCCUGGUC G UCGGGGUG | 4071 | CACCCCGA GGCTAGCTACAACGA GACCAGGG | 12820 |
| 6015 | UCGUCGGG G UGGUGUGC | 4072 | GCACACCA GGCTAGCTACAACGA CCCGACGA | 12821 |
| 6018 | UCGGGGUG G UGUGCGCA | 4073 | TGCGCACA GGCTAGCTACAACGA CACCCCGA | 12822 |
| 6020 | GGGGUGGU G UGCGCAGC | 4074 | GCTGCGCA GGCTAGCTACAACGA ACCACCCC | 12823 |
| 6022 | GGUGGUGU G CGCAGCGA | 4075 | TCGCTGCG GGCTAGCTACAACGA ACACCACC | 12824 |
| 6024 | UGGUGUGC G CAGCGAUA | 4076 | TATCGCTG GGCTAGCTACAACGA GCACACCA | 12825 |
| 6027 | UGUGCGCA G CGAUACUG | 4077 | CAGTATCG GGCTAGCTACAACGA TGCGCACA | 12826 |
| 6030 | GCGCAGCG A UACUGCGU | 4078 | ACGCAGTA GGCTAGCTACAACGA CGCTGCGC | 12827 |
| 6032 | GCAGCGAU A CUGCGUCG | 4079 | CGACGCAG GGCTAGCTACAACGA ATCGCTGC | 12828 |
| 6035 | GCGAUACU G CGUCGGCA | 4080 | TGCCGACG GGCTAGCTACAACGA AGTATCGC | 12829 |
| 6037 | GAUACUGC G UCGGCAUG | 4081 | CATGCCGA GGCTAGCTACAACGA GCAGTATC | 12830 |
| 6041 | CUGCGUCG G CAUGUGGG | 4082 | CCCACATG GGCTAGCTACAACGA CGACGCAG | 12831 |
| 6043 | GCGUCGGC A UGUGGGCC | 4083 | GGCCCACA GGCTAGCTACAACGA GCCGACGC | 12832 |
| 6045 | GUCGGCAU G UGGGCCCA | 4084 | TGGGCCCA GGCTAGCTACAACGA ATGCCGAC | 12833 |
| 6049 | GCAUGUGG G CCCAGGAG | 4085 | CTCCTGGG GGCTAGCTACAACGA CCACATGC | 12834 |
| 6061 | AGGAGAGG G CGCUGUGC | 4086 | GCACAGCG GGCTAGCTACAACGA CCTCTCCT | 12835 |
| 6063 | GAGAGGGC G CUGUGCAG | 4087 | CTGCACAG GGCTAGCTACAACGA GCCCTCTC | 12836 |
| 6066 | AGGGCGCU G UGCAGUGG | 4088 | CCACTGCA GGCTAGCTACAACGA AGCGCCCT | 12837 |
| 6068 | GGCGCUGU G CAGUGGAU | 4089 | ATCCACTG GGCTAGCTACAACGA ACAGCGCC | 12838 |
| 6071 | GCUGUGCA G UGGAUGAA | 4090 | TTCATCCA GGCTAGCTACAACGA TGCACAGC | 12839 |
| 6075 | UGCAGUGG A UGAAUCGG | 4091 | CCGATTCA GGCTAGCTACAACGA CCACTGCA | 12840 |
| 6079 | GUGGAUGA A UCGGCUGA | 4092 | TCAGCCGA GGCTAGCTACAACGA TCATCCAC | 12841 |
| 6083 | AUGAAUCG G CUGAUAGC | 4093 | GCTATCAG GGCTAGCTACAACGA CGATTCAT | 12842 |
| 6087 | AUCGGCUG A UAGCGUUC | 4094 | GAACGCTA GGCTAGCTACAACGA CAGCCGAT | 12843 |
| 6090 | GGCUGAUA G CGUUCGCU | 4095 | AGCGAACG GGCTAGCTACAACGA TATCAGCC | 12844 |
| 6092 | CUGAUAGC G UUCGCUUC | 4096 | GAAGCGAA GGCTAGCTACAACGA GCTATCAG | 12845 |
| 6096 | UAGCGUUC G CUUCGCGG | 4097 | CCGCGAAG GGCTAGCTACAACGA GAACGCTA | 12846 |
| 6101 | UUCGCUUC G CGGGGCAA | 4098 | TTGCCCCG GGCTAGCTACAACGA GAAGCGAA | 12847 |
| 6106 | UUCGCGGG G CAACCAUG | 4099 | CATGGTTG GGCTAGCTACAACGA CCCGCGAA | 12848 |
| 6109 | GCGGGGCA A CCAUGUCU | 4100 | AGACATGG GGCTAGCTACAACGA TGCCCCGC | 12849 |
| 6112 | GGGCAACC A UGUCUCCC | 4101 | GGGAGACA GGCTAGCTACAACGA GGTTGCCC | 12850 |
| 6114 | GCAACCAU G UCUCCCCC | 4102 | GGGGGAGA GGCTAGCTACAACGA ATGGTTGC | 12851 |
| 6123 | UCUCCCCC A CGCACUAU | 4103 | ATAGTGCG GGCTAGCTACAACGA GGGGGAGA | 12852 |
| 6125 | UCCCCCAC G CACUAUGU | 4104 | ACATAGTG GGCTAGCTACAACGA GTGGGGGA | 12853 |
| 6127 | CCCCACGC A CUAUGUGC | 4105 | GCACATAG GGCTAGCTACAACGA GCGTGGGG | 12854 |
| 6130 | CACGCACU A UGUGCCUG | 4106 | CAGGCACA GGCTAGCTACAACGA AGTGCGTG | 12855 |
| 6132 | CGCACUAU G UGCCUGAG | 4107 | CTCAGGCA GGCTAGCTACAACGA ATAGTGCG | 12856 |
| 6134 | CACUAUGU G CCUGAGAG | 4108 | CTCTCAGG GGCTAGCTACAACGA ACATAGTG | 12857 |
| 6142 | GCCUGAGA G CGACGCAG | 4109 | CTGCGTCG GGCTAGCTACAACGA TCTCAGGC | 12858 |
| 6145 | UGAGAGCG A CGCAGCGG | 4110 | CCGCTGCG GGCTAGCTACAACGA CGCTCTCA | 12859 |
| 6147 | AGAGCGAC G CAGCGGCG | 4111 | CGCCGCTG GGCTAGCTACAACGA GTCGCTCT | 12860 |
| 6150 | GCGACGCA G CGGCGCGC | 4112 | GCGCGCCG GGCTAGCTACAACGA TGCGTCGC | 12861 |
| 6153 | ACGCAGCG G CGCGCGUC | 4113 | GACGCGCG GGCTAGCTACAACGA CGCTGCGT | 12862 |
| 6155 | GCAGCGGC G CGCGUCAC | 4114 | GTGACGCG GGCTAGCTACAACGA GCCGCTGC | 12863 |
| 6157 | AGCGGCGC G CGUCACAC | 4115 | GTGTGACG GGCTAGCTACAACGA GCGCCGCT | 12864 |
| 6159 | CGGCGCGC G UCACACAA | 4116 | TTGTGTGA GGCTAGCTACAACGA GCGCGCCG | 12865 |
| 6162 | CGCGCGUC A CACAAAUC | 4117 | GATTTGTG GGCTAGCTACAACGA GACGCGCG | 12866 |
| 6164 | CGCGUCAC A CAAAUCCU | 4118 | AGGATTTG GGCTAGCTACAACGA GTGACGCG | 12867 |
| 6168 | UCACACAA A UCCUCUCC | 4119 | GGAGAGGA GGCTAGCTACAACGA TTGTGTGA | 12868 |
| 6178 | CCUCUCCA G CCUCACCA | 4120 | TGGTGAGG GGCTAGCTACAACGA TGGAGAGG | 12869 |
| 6183 | CCAGCCUC A CCAUCACU | 4121 | AGTGATGG GGCTAGCTACAACGA GAGGCTGG | 12870 |
| 6186 | GCCUCACC A UCACUCAG | 4122 | CTGAGTGA GGCTAGCTACAACGA GGTGAGGC | 12871 |
| 6189 | UCACCAUC A CUCAGCUG | 4123 | CAGCTGAG GGCTAGCTACAACGA GATGGTGA | 12872 |
| 6194 | AUCACUCA G CUGCUGAG | 4124 | CTCAGCAG GGCTAGCTACAACGA TGAGTGAT | 12873 |
| 6197 | ACUCAGCU G CUGAGGAG | 4125 | CTCCTCAG GGCTAGCTACAACGA AGCTGAGT | 12874 |
| 6206 | CUGAGGAG G CUCCAUCA | 4126 | TGATGGAG GGCTAGCTACAACGA CTCCTCAG | 12875 |
| 6211 | GAGGCUCC A UCAGUGGA | 4127 | TCCACTGA GGCTAGCTACAACGA GGAGCCTC | 12876 |
| 6215 | CUCCAUCA G UGGAUCAA | 4128 | TTGATCCA GGCTAGCTACAACGA TGATGGAG | 12877 |
| 6219 | AUCAGUGG A UCAAUGAG | 4129 | CTCATTGA GGCTAGCTACAACGA CCACTGAT | 12878 |
| 6223 | GUGGAUCA A UGAGGACU | 4130 | AGTCCTCA GGCTAGCTACAACGA TGATCCAC | 12879 |
| 6229 | CAAUGAGG A CUGCUCCA | 4131 | TGGAGCAG GGCTAGCTACAACGA CCTCATTG | 12880 |
| 6232 | UGAGGACU G CUCCACGC | 4132 | GCGTGGAG GGCTAGCTACAACGA AGTCCTCA | 12881 |
| 6237 | ACUGCUCC A CGCCAUGU | 4133 | ACATGGCG GGCTAGCTACAACGA GGAGCAGT | 12882 |
| 6239 | UGCUCCAC G CCAUGUUC | 4134 | GAACATGG GGCTAGCTACAACGA GTGGAGCA | 12883 |
| 6242 | UCCACGCC A UGUUCCGG | 4135 | CCGGAACA GGCTAGCTACAACGA GGCGTGGA | 12884 |
| 6244 | CACGCCAU G UUCCGGCU | 4136 | AGCCGGAA GGCTAGCTACAACGA ATGGCGTG | 12885 |
| 6250 | AUGUUCCG G CUCGUGGC | 4137 | GCCACGAG GGCTAGCTACAACGA CGGAACAT | 12886 |
| 6254 | UCCGGCUC G UGGCUAAG | 4138 | CTTAGCCA GGCTAGCTACAACGA GAGCCGGA | 12887 |
| 6257 | GGCUCGUG G CUAAGGGA | 4139 | TCCCTTAG GGCTAGCTACAACGA CACGAGCC | 12888 |
| 6265 | GCUAAGGG A UGUUUGGG | 4140 | CCCAAACA GGCTAGCTACAACGA CCCTTAGC | 12889 |
| 6267 | UAAGGGAU G UUUGGGAC | 4141 | GTCCCAAA GGCTAGCTACAACGA ATCCCTTA | 12890 |
| 6274 | UGUUUGGG A CUGGAUAU | 4142 | ATATCCAG GGCTAGCTACAACGA CCCAAACA | 12891 |
| 6279 | GGGACUGG A UAUGCACG | 4143 | CGTGCATA GGCTAGCTACAACGA CCAGTCCC | 12892 |
| 6281 | GACUGGAU A UGCACGGU | 4144 | ACCOTGCA GGCTAGCTACAACGA ATCCAGTC | 12893 |
| 6283 | CUGGAUAU G CACGGUGU | 4145 | ACACCGTG GGCTAGCTACAACGA ATATCCAG | 12894 |
| 6285 | GGAUAUGC A CGGUGUUG | 4146 | CAACACCG GGCTAGCTACAACGA GCATATCC | 12895 |
| 6288 | UAUGCACG G UGUUGACU | 4147 | AGTCAACA GGCTAGCTACAACGA CGTGCATA | 12896 |
| 6290 | UGCACGGU G UUGACUGA | 4148 | TCAGTCAA GGCTAGCTACAACGA ACCGTGCA | 12897 |
| 6294 | CGGUGUUG A CUGACUUC | 4149 | GAAGTCAG GGCTAGCTACAACGA CAACACCG | 12898 |
| 6298 | GUUGACUG A CUUCAAGA | 4150 | TCTTGAAG GGCTAGCTACAACGA CAGTCAAC | 12899 |
| 6306 | ACUUCAAG A CCUGGCUU | 4151 | AAGCCAGG GGCTAGCTACAACGA CTTGAAGT | 12900 |
| 6311 | AAGACCUG G CUUCAGUC | 4152 | GACTGAAG GGCTAGCTACAACGA CAGGTCTT | 12901 |
| 6317 | UGGCUUCA G UCCAAGCU | 4153 | AGCTTGGA GGCTAGCTACAACGA TGAAGCCA | 12902 |
| 6323 | CAGUCCAA G CUCCUGCC | 4154 | GGCAGGAG GGCTAGCTACAACGA TTGGACTG | 12903 |
| 6329 | AAGCUCCU G CCGCGGUU | 4155 | AACCGCGG GGCTAGCTACAACGA AGGAGCTT | 12904 |
| 6332 | CUCCUGCC G CGGUUGCC | 4156 | GGCAACCG GGCTAGCTACAACGA GGCAGGAG | 12905 |
| 6335 | CUGCCGCG G UUGCCGGG | 4157 | CCCGGCAA GGCTAGCTACAACGA CGCGGCAG | 12906 |
| 6338 | CCGCGGUU G CCGGGAGU | 4158 | ACTCCCGG GGCTAGCTACAACGA AACCGCGG | 12907 |
| 6345 | UGCCCGGA G UCCCUUUC | 4159 | GAAAGGGA GGCTAGCTACAACGA TCCCGGCA | 12908 |
| 6359 | UUCUUCUC A UGCCAACG | 4160 | CGTTGGCA GGCTAGCTACAACGA GAGAAGAA | 12909 |
| 6361 | CUUCUCAU G CCAACGUG | 4161 | CACGTTGG GGCTAGCTACAACGA ATGAGAAG | 12910 |
| 6365 | UCAUGCCA A CGUGGGUA | 4162 | TACCCACG GGCTAGCTACAACGA TGGCATGA | 12911 |
| 6367 | AUGCCAAC G UGGGUACA | 4163 | TGTACCCA GGCTAGCTACAACGA GTTGGCAT | 12912 |
| 6371 | CAACGUGG G UACAGGGG | 4164 | CCCCTGTA GGCTAGCTACAACGA CCACGTTG | 12913 |
| 6373 | ACGUGGGU A CAGGGGGG | 4165 | CCCCCCTG GGCTAGCTACAACGA ACCCACGT | 12914 |
| 6381 | ACAGGGGG G UCUGGCGG | 4166 | CCGCCAGA GGCTAGCTACAACGA CCCCCTGT | 12915 |
| 6386 | GGGGUCUG G CGGGGAGA | 4167 | TCTCCCCG GGCTAGCTACAACGA CAGACCCC | 12916 |
| 6394 | GCGGGGAG A CGGUAUCA | 4168 | TGATACCG GGCTAGCTACAACGA CTCCCCGC | 12917 |
| 6397 | GGGAGACG G UAUCAUGC | 4169 | GCATGATA GGCTAGCTACAACGA CGTCTCCC | 12918 |
| 6399 | GAGACGGU A UCAUGCAA | 4170 | TTGCATGA GGCTAGCTACAACGA ACCGTCTC | 12919 |
| 6402 | ACGGUAUC A UGCAAACC | 4171 | GGTTTGCA GGCTAGCTACAACGA GATACCGT | 12920 |
| 6404 | GGUAUCAU G CAAACCAC | 4172 | GTGGTTTG GGCTAGCTACAACGA ATGATACC | 12921 |
| 6408 | UCAUGCAA A CCACCUGC | 4173 | GCAGGTGG GGCTAGCTACAACGA TTGCATGA | 12922 |
| 6411 | UGCAAACC A CCUGCCCA | 4174 | TGGGCAGG GGCTAGCTACAACGA GGTTTGCA | 12923 |
| 6415 | AACCACCU G CCCAUGCG | 4175 | CGCATGGG GGCTAGCTACAACGA AGGTGGTT | 12924 |
| 6419 | ACCUGCCC A UGCGGAGC | 4176 | GCTCCGCA GGCTAGCTACAACGA GGGCAGGT | 12925 |
| 6421 | CUGCCCAU G CGGAGCGC | 4177 | GCGCTCCG GGCTAGCTACAACGA ATGGGCAG | 12926 |
| 6426 | CAUGCGGA G CGCAGAUC | 4178 | GATCTGCG GGCTAGCTACAACGA TCCGCATG | 12927 |
| 6428 | UGCGGAGC G CAGAUCAC | 4179 | GTGATCTG GGCTAGCTACAACGA GCTCCGCA | 12928 |
| 6432 | GAGCGCAG A UCACUGGA | 4180 | TCCAGTGA GGCTAGCTACAACGA CTGCGCTC | 12929 |
| 6435 | CGCAGAUC A CUGGACAU | 4181 | ATGTCCAG GGCTAGCTACAACGA GATCTGCG | 12930 |
| 6440 | AUCACUGG A CAUGUCAA | 4182 | TTGACATG GGCTAGCTACAACGA CCAGTGAT | 12931 |
| 6442 | CACUGGAC A UGUCAAGA | 4183 | TCTTGACA GGCTAGCTACAACGA GTCCAGTG | 12932 |
| 6444 | CUGGACAU G UCAAGAAC | 4184 | GTTCTTGA GGCTAGCTACAACGA ATGTCCAG | 12933 |
| 6451 | UGUCAAGA A CGGUUCCA | 4185 | TGGAACCG GGCTAGCTACAACGA TCTTGACA | 12934 |
| 6454 | CAAGAACG G UUCCAUGA | 4186 | TCATGGAA GGCTAGCTACAACGA CGTTCTTG | 12935 |
| 6459 | ACGGUUCC A UGAGGAUC | 4187 | GATCCTCA GGCTAGCTACAACGA GGAACCGT | 12936 |
| 6465 | CCAUGAGG A UCGUCGGG | 4188 | CCCGACGA GGCTAGCTACAACGA CCTCATGG | 12937 |
| 6468 | UGAGGAUC G UCGGGCCU | 4189 | AGGCCCGA GGCTAGCTACAACGA GATCCTCA | 12938 |
| 6473 | AUCGUCGG G CCUAAGAC | 4190 | GTCTTAGG GGCTAGCTACAACGA CCGACGAT | 12939 |
| 6480 | GGCCUAAG A CCUGUAGC | 4191 | GCTACAGG GGCTAGCTACAACGA CTTAGGCC | 12940 |
| 6484 | UAAGACCU G UAGCAACA | 4192 | TGTTGCTA GGCTAGCTACAACGA AGGTCTTA | 12941 |
| 6487 | GACCUGUA G CAACACGU | 4193 | ACGTGTTG GGCTAGCTACAACGA TACAGGTC | 12942 |
| 6490 | CUGUAGCA A CACGUGGC | 4194 | GCCACGTG GGCTAGCTACAACGA TGCTACAG | 12943 |
| 6492 | GUAGCAAC A CGUGGCAU | 4195 | ATGCCACG GGCTAGCTACAACGA GTTGCTAC | 12944 |
| 6494 | AGCAACAC G UGGCAUGG | 4196 | CCATGCCA GGCTAGCTACAACGA GTGTTGCT | 12945 |
| 6497 | AACACGUG G CAUGGAAC | 4197 | GTTCCATG GGCTAGCTACAACGA CACGTGTT | 12946 |
| 6499 | CACGUGGC A UGGAACAU | 4198 | ATGTTCCA GGCTAGCTACAACGA GCCACGTG | 12947 |
| 6504 | GGCAUGGA A CAUUCCCC | 4199 | GGGGAATG GGCTAGCTACAACGA TCCATGCC | 12948 |
| 6506 | CAUGGAAC A UUCCCCAU | 4200 | ATGGGGAA GGCTAGCTACAACGA GTTCCATG | 12949 |
| 6513 | CAUUCCCC A UCAACGCA | 4201 | TGCGTTGA GGCTAGCTACAACGA GGGGAATG | 12950 |
| 6517 | CCCCAUCA A CGCAUACA | 4202 | TGTATGCG GGCTAGCTACAACGA TGATGGGG | 12951 |
| 6519 | CCAUCAAC G CAUACACC | 4203 | GGTGTATG GGCTAGCTACAACGA GTTGATGG | 12952 |
| 6521 | AUCAACGC A UACACCAC | 4204 | GTGGTGTA GGCTAGCTACAACGA GCGTTGAT | 12953 |
| 6523 | CAACGCAU A CACCACGG | 4205 | CCGTGGTG GGCTAGCTACAACGA ATGCGTTG | 12954 |
| 6525 | ACGCAUAC A CCACGGGC | 4206 | GCCCGTGG GGCTAGCTACAACGA GTATGCGT | 12955 |
| 6528 | CAUACACC A CGGGCCCC | 4207 | GGGGCCCG GGCTAGCTACAACGA GGTGTATG | 12956 |
| 6532 | CACCACGG G CCCCUGCA | 4208 | TGCAGGGG GGCTAGCTACAACGA CCGTGGTG | 12957 |
| 6538 | GGCCCCCU G CACACCCU | 4209 | AGGGTGTG GGCTAGCTACAACGA AGGGGCCC | 12958 |
| 6540 | GCCCCUGC A CACCCUCC | 4210 | GGAGGGTG GGCTAGCTACAACGA GCAGGGGC | 12959 |
| 6542 | CCCUGCAC A CCCUCCCC | 4211 | GGGGAGGG GGCTAGCTACAACGA GTGCAGGG | 12960 |
| 6552 | CCUCCCCG G CGCCAAAC | 4212 | GTTTGGCG GGCTAGCTACAACGA CGGGGAGG | 12961 |
| 6554 | UCCCCGGC G CCAAACUA | 4213 | TAGTTTGG GGCTAGCTACAACGA GCCGGGGA | 12962 |
| 6559 | GGCGCCAA A CUAUUCUA | 4214 | TAGAATAG GGCTAGCTACAACGA TTGGCGCC | 12963 |
| 6562 | GCCAAACU A UUCUAGGG | 4215 | CCCTAGAA GGCTAGCTACAACGA AGTTTGGC | 12964 |
| 6570 | AUUCUAGG G CGCUAUGG | 4216 | CCATAGCG GGCTAGCTACAACGA CCTAGAAT | 12965 |
| 6572 | UCUAGGGC G CUAUGGCG | 4217 | CGCCATAG GGCTAGCTACAACGA GCCCTAGA | 12966 |
| 6575 | AGGGCGCU A UGGCGGGU | 4218 | ACCCGCCA GGCTAGCTACAACGA AGCGCCCT | 12967 |
| 6578 | GCGCUAUG G CGGGUGGC | 4219 | GCCACCCG GGCTAGCTACAACGA CATAGCGC | 12968 |
| 6582 | UAUGGCGG G UGGCCGCU | 4220 | AGCGGCCA GGCTAGCTACAACGA CCGCCATA | 12969 |
| 6585 | GGCGGGUG G CCGCUGAG | 4221 | CTCAGCGG GGCTAGCTACAACGA CACCCGCC | 12970 |
| 6588 | GGGUGGCC G CUGAGGAG | 4222 | CTCCTCAG GGCTAGCTACAACGA GGCCACCC | 12971 |
| 6596 | GCUGAGGA G UACGUGGA | 4223 | TCCACGTA GGCTAGCTACAACGA TCCTCAGC | 12972 |
| 6598 | UGAGGAGU A CGUGGAGG | 4224 | CCTCCACG GGCTAGCTACAACGA ACTCCTCA | 12973 |
| 6600 | AGGAGUAC G UGGAGGUU | 4225 | AACCTCCA GGCTAGCTACAACGA GTACTCCT | 12974 |
| 6606 | ACGUGGAG G UUACGCGG | 4226 | CCGCGTAA GGCTAGCTACAACGA CTCCACGT | 12975 |
| 6609 | UGGAGGUU A CGCGGGUG | 4227 | CACCCGCG GGCTAGCTACAACGA AACCTCCA | 12976 |
| 6611 | GAGGUUAC G CGGGUGGG | 4228 | CCCACCCG GGCTAGCTACAACGA GTAACCTC | 12977 |
| 6615 | UUACGCGG G UGGGGGAU | 4229 | ATCCCCCA GGCTAGCTACAACGA CCGCGTAA | 12978 |
| 6622 | GGUGGGGG A UUUCCACU | 4230 | AGTGGAAA GGCTAGCTACAACGA CCCCCACC | 12979 |
| 6628 | GGAUUUCC A CUACGUGA | 4231 | TCACGTAG GGCTAGCTACAACGA GGAAATCC | 12980 |
| 6631 | UUUCCACU A CGUGACGG | 4232 | CCGTCACG GGCTAGCTACAACGA AGTGGAAA | 12981 |
| 6633 | UCCACUAC G UGACGGGC | 4233 | GCCCGTCA GGCTAGCTACAACGA GTAGTGGA | 12982 |
| 6636 | ACUACGUG A CGGGCAUG | 4234 | CATGCCCG GGCTAGCTACAACGA CACGTAGT | 12983 |
| 6640 | CGUGACGG G CAUGACCA | 4235 | TGGTCATG GGCTAGCTACAACGA CCGTCACG | 12984 |
| 6642 | UGACGGGC A UGACCACU | 4236 | AGTGGTCA GGCTAGCTACAACGA GCCCGTCA | 12985 |
| 6645 | CGGGCAUG A CCACUGAC | 4237 | GTCAGTGG GGCTAGCTACAACGA CATGCCCG | 12986 |
| 6648 | GCAUGACC A CUGACAAC | 4238 | GTTGTCAG GGCTAGCTACAACGA GGTCATGC | 12987 |
| 6652 | GACCACUG A CAACGUAA | 4239 | TTACGTTG GGCTAGCTACAACGA CAGTGGTC | 12988 |
| 6655 | CACUGACA A CGUAAAAU | 4240 | ATTTTACG GGCTAGCTACAACGA TGTCAGTG | 12989 |
| 6657 | CUGACAAC G UAAAAUGC | 4241 | GCATTTTA GGCTAGCTACAACGA GTTGTCAG | 12990 |
| 6662 | AACGUAAA A UGCCCGUG | 4242 | CACGGGCA GGCTAGCTACAACGA TTTACGTT | 12991 |
| 6664 | CGUAAAAU G CCCGUGCC | 4243 | GGCACGGG GGCTAGCTACAACGA ATTTTACG | 12992 |
| 6668 | AAAUGCCC G UGCCAGGU | 4244 | ACCTGGCA GGCTAGCTACAACGA GGGCATTT | 12993 |
| 6670 | AUGCCCGU G CCAGGUUC | 4245 | GAACCTGG GGCTAGCTACAACGA ACGGGCAT | 12994 |
| 6675 | CGUGCCAG G UUCCGCCC | 4246 | GGGCGGAA GGCTAGCTACAACGA CTGGCACG | 12995 |
| 6680 | CAGGUUCC G CCCCCCGA | 4247 | TCGGGGGG GGCTAGCTACAACGA GGAACCTG | 12996 |
| 6689 | CCCCCCGA A UUCUUCAC | 4248 | GTGAAGAA GGCTAGCTACAACGA TCGGGGGG | 12997 |
| 6696 | AAUUCUUC A CGGAAGUG | 4249 | CACTTCCG GGCTAGCTACAACGA GAAGAATT | 12998 |
| 6702 | UCACGGAA G UGGAUGGG | 4250 | CCCATCCA GGCTAGCTACAACGA TTCCGTGA | 12999 |
| 6706 | GGAAGUGG A UGGGGUAC | 4251 | GTACCCCA GGCTAGCTACAACGA CCACTTCC | 13000 |
| 6711 | UGGAUGGG G UACGCCUG | 4252 | CAGGCGTA GGCTAGCTACAACGA CCCATCCA | 13001 |
| 6713 | GAUGGGGU A CGCCUGCA | 4253 | TGCAGGCG GGCTAGCTACAACGA ACCCCATC | 13002 |
| 6715 | UGGGGUAC G CCUGCACA | 4254 | TGTGCAGG GGCTAGCTACAACGA GTACCCCA | 13003 |
| 6719 | GUACGCCU G CACAGAAA | 4255 | TTTCTGTG GGCTAGCTACAACGA AGGCGTAC | 13004 |
| 6721 | ACGCCUGC A CAGAAACG | 4256 | CGTTTCTG GGCTAGCTACAACGA GCAGGCGT | 13005 |
| 6727 | GCACAGAA A CGCUCCGG | 4257 | CCGGAGCG GGCTAGCTACAACGA TTCTGTGC | 13006 |
| 6729 | ACAGAAAC G CUCCGGCG | 4258 | CGCCGGAG GGCTAGCTACAACGA GTTTCTGT | 13007 |
| 6735 | ACGCUCCG G CGUGUGGA | 4259 | TCCACACG GGCTAGCTACAACGA CGGAGCGT | 13008 |
| 6737 | GCUCCGGC G UGUGGACC | 4260 | GGTCCACA GGCTAGCTACAACGA GCCGGAGC | 13009 |
| 6739 | UCCGGCGU G UGGACCUC | 4261 | GAGGTCCA GGCTAGCTACAACGA ACGCCGGA | 13010 |
| 6743 | GCGUGUGG A CCUCUCCU | 4262 | AGGAGAGG GGCTAGCTACAACGA CCACACGC | 13011 |
| 6752 | CCUCUCCU A CGGGAGGA | 4263 | TCCTCCCG GGCTAGCTACAACGA AGGAGAGG | 13012 |
| 6762 | GGGAGGAG G UCACAUUC | 4264 | GAATGTGA GGCTAGCTACAACGA CTCCTCCC | 13013 |
| 6765 | AGGAGGUC A CAUUCCAG | 4265 | CTGGAATG GGCTAGCTACAACGA GACCTCCT | 13014 |
| 6767 | GAGGUCAC A UUCCAGGU | 4266 | ACCTGGAA GGCTAGCTACAACGA GTGACCTC | 13015 |
| 6774 | CAUUCCAG G UCGGGCUC | 4267 | GAGCCCGA GGCTAGCTACAACGA CTGGAATG | 13016 |
| 6779 | CAGGUCGG G CUCAACCA | 4268 | TGGTTGAG GGCTAGCTACAACGA CCGACCTG | 13017 |
| 6784 | CGGGCUCA A CCAAUACC | 4269 | GGTATTGG GGCTAGCTACAACGA TGAGCCCG | 13018 |
| 6788 | CUCAACCA A UACCUGGU | 4270 | ACCAGGTA GGCTAGCTACAACGA TGGTTGAG | 13019 |
| 6790 | CAACCAAU A CCUGGUUG | 4271 | CAACCAGG GGCTAGCTACAACGA ATTGGTTG | 13020 |
| 6795 | AAUACCUG G UUGGGUCA | 4272 | TGACCCAA GGCTAGCTACAACGA CAGGTATT | 13021 |
| 6800 | CUGGUUGG G UCACAGCU | 4273 | AGCTGTGA GGCTAGCTACAACGA CCAACCAG | 13022 |
| 6803 | GUUGGGUC A CAGCUCCC | 4274 | GGGAGCTG GGCTAGCTACAACGA GACCCAAC | 13023 |
| 6806 | GGGUCACA G CUCCCAUG | 4275 | CATGGGAG GGCTAGCTACAACGA TGTGACCC | 13024 |
| 6812 | CAGCUCCC A UGCGAGCC | 4276 | GGCTCGCA GGCTAGCTACAACGA GGGAGCTG | 13025 |
| 6814 | GCUCCCAU G CGAGCCCG | 4277 | CGGGCTCG GGCTAGCTACAACGA ATGGGAGC | 13026 |
| 6818 | CCAUGCGA G CCCGAACC | 4278 | GGTTCGGG GGCTAGCTACAACGA TCGCATGG | 13027 |
| 6824 | GAGCCCGA A CCGGAUGU | 4279 | ACATCCGG GGCTAGCTACAACGA TCGGGCTC | 13028 |
| 6829 | CGAACCGG A UGUACCAG | 4280 | CTGCTACA GGCTAGCTACAACGA CCGGTTCG | 13029 |
| 6831 | AACCGGAU G UAGCAGUG | 4281 | CACTGCTA GGCTAGCTACAACGA ATCCGGTT | 13030 |
| 6834 | CGGAUGUA G CAGUGCUC | 4282 | GAGCACTC GGCTAGCTACAACGA TACATCCG | 13031 |
| 6837 | AUGUAGCA G UGCUCACG | 4283 | CGTGAGCA GGCTAGCTACAACGA TGCTACAT | 13032 |
| 6839 | GUAGCAGU G CUCACGUC | 4284 | GACGTGAG GGCTAGCTACAACGA ACTGCTAC | 13033 |
| 6843 | CAGUCCUC A CGUCCAUG | 4285 | CATGGACG GGCTAGCTACAACGA GAGCACTG | 13034 |
| 6845 | GUGCUCAC G UCCAUGCU | 4286 | AGCATGGA GGCTAGCTACAACGA GTGAGCAC | 13035 |
| 6849 | UCACGUCC A UGCUCACC | 4287 | GGTGAGCA GGCTAGCTACAACGA GGACGTGA | 13036 |
| 6851 | ACGUCCAU G CUCACCGA | 4288 | TCGGTGAG GGCTAGCTACAACGA ATGGACGT | 13037 |
| 6855 | CCAUGCUC A CCGACCCC | 4289 | GGGGTCGG GGCTAGCTACAACGA GAGCATGG | 13038 |
| 6859 | GCUCACCG A CCCCUCCC | 4290 | GGGAGGGG GGCTAGCTACAACGA CGGTGAGC | 13039 |
| 6868 | CCCCUCCC A CAUUACAG | 4291 | CTGTAATG GGCTAGCTACAACGA GGGAGGGG | 13040 |
| 6870 | CCUCCCAC A UUACAGGA | 4292 | TCCTGTAA GGCTAGCTACAACGA GTGGGAGG | 13041 |
| 6873 | CCCACAUU A CAGGAGAG | 4293 | CTCTCCTG GGCTAGCTACAACGA AATGTGGG | 13042 |
| 6882 | CAGGAGAG A CGGCUAAG | 4294 | CTTAGCCG GGCTAGCTACAACGA CTCTCCTG | 13043 |
| 6885 | GAGAGACG G CUAAGCGU | 4295 | ACGCTTAG GGCTAGCTACAACGA CGTCTCTC | 13044 |
| 6890 | ACGGCUAA G CGUAGGCU | 4296 | AGCCTACG GGCTAGCTACAACGA TTAGCCGT | 13045 |
| 6892 | GGCUAAGC G UAGGCUGG | 4297 | CCAGCCTA GGCTAGCTACAACGA GCTTAGCC | 13046 |
| 6896 | AAGCGUAG G CUGGCCAG | 4298 | CTGGCCAG GGCTAGCTACAACGA CTACGCTT | 13047 |
| 6900 | GUAGGCUG G CCAGGGGG | 4299 | CCCCCTGG GGCTAGCTACAACGA CAGCCTAC | 13048 |
| 6908 | GCCAGGGG G UCUCCCCC | 4300 | GGGGGAGA GGCTAGCTACAACGA CCCCTGGC | 13049 |
| 6924 | CCUCCUUG G CCAGCUCC | 4301 | GGAGCTGG GGCTAGCTACAACGA CAAGGAGG | 13050 |
| 6928 | CUUGGCCA G CUCCUCAG | 4302 | CTGAGGAG GGCTAGCTACAACGA TGGCCAAG | 13051 |
| 6936 | GCUCCUCA G CUAGCCAG | 4303 | CTGGCTAG GGCTAGCTACAACGA TGAGGAGC | 13052 |
| 6940 | CUCAGCUA G CCAGCUGU | 4304 | ACAGCTGG GGCTAGCTACAACGA TAGCTGAG | 13053 |
| 6944 | GCUAGCCA G CUGUCUGC | 4305 | GCAGACAG GGCTAGCTACAACGA TGGCTAGC | 13054 |
| 6947 | AGCCAGCU G UCUGCGCC | 4306 | GGCGCAGA GGCTAGCTACAACGA AGCTGGCT | 13055 |
| 6951 | AGCUGUCU G CGCCUUCU | 4307 | AGAAGGCG GGCTAGCTACAACGA AGACAGCT | 13056 |
| 6953 | CUGUCUGC G CCUUCUUC | 4308 | GAAGAAGG GGCTAGCTACAACGA GCAGACAG | 13057 |
| 6966 | CUUCGAAG G CGACAUAC | 4309 | GTATGTCG GGCTAGCTACAACGA CTTCGAAG | 13058 |
| 6969 | CGAAGGCG A CAUACAUU | 4310 | AATGTATG GGCTAGCTACAACGA CGCCTTCG | 13059 |
| 6971 | AAGGCGAC A UACAUUAC | 4311 | GTAATGTA GGCTAGCTACAACGA GTCGCCTT | 13060 |
| 6973 | GGCGACAU A CAUUACCC | 4312 | GGGTAATG GGCTAGCTACAACGA ATGTCGCC | 13061 |
| 6975 | CGACAUAC A UUACCCAA | 4313 | TTGGGTAA GGCTAGCTACAACGA GTATGTCG | 13062 |
| 6978 | CAUACAUU A CCCAAUAU | 4314 | ATATTGGG GGCTAGCTACAACGA AATGTATG | 13063 |
| 6983 | AUUACCCA A UAUGACUC | 4315 | GAGTCATA GGCTAGCTACAACGA TGGGTAAT | 13064 |
| 6985 | UACCCAAU A UGACUCCC | 4316 | GGGAGTCA GGCTAGCTACAACGA ATTGGGTA | 13065 |
| 6988 | CCAAUAUG A CUCCCCAG | 4317 | CTGGGGAG GGCTAGCTACAACGA CATATTGG | 13066 |
| 6997 | CUCCCCAG A CUUUGACC | 4318 | GGTCAAAG GGCTAGCTACAACGA CTGGGGAG | 13067 |
| 7003 | AGACUUUG A CCUCAUCG | 4319 | CGATGAGG GGCTAGCTACAACGA CAAAGTCT | 13068 |
| 7008 | UUGACCUC A UCGAGGCC | 4320 | GGCCTCGA GGCTAGCTACAACGA GAGGTCAA | 13069 |
| 7014 | UCAUCGAG G CCAACCUC | 4321 | GAGGTTGG GGCTAGCTACAACGA CTCGATGA | 13070 |
| 7018 | CGAGGCCA A CCUCCUGU | 4322 | ACAGGAGG GGCTAGCTACAACGA TGGCCTCG | 13071 |
| 7025 | AACCUCCU G UGGCGGCA | 4323 | TGCCGCCA GGCTAGCTACAACGA AGGAGGTT | 13072 |
| 7028 | CUCCUGUG G CGGCAGGA | 4324 | TCCTGCCG GGCTAGCTACAACGA CACAGGAG | 13073 |
| 7031 | CUGUGGCG G CAGGAGAU | 4325 | ATCTCCTG GGCTAGCTACAACGA CGCCACAG | 13074 |
| 7038 | GGCAGGAG A UGGGCGGU | 4326 | ACCGCCCA GGCTAGCTACAACGA CTCCTGCC | 13075 |
| 7042 | GGAGAUGG G CGGUAACA | 4327 | TGTTACCG GGCTAGCTACAACGA CCATCTCC | 13076 |
| 7045 | GAUGGGCG G UAACAUCA | 4328 | TGATGTTA GGCTAGCTACAACGA CGCCCATC | 13077 |
| 7048 | GGGCGCUA A CAUCACUC | 4329 | GAGTCATG GGCTAGCTACAACGA TACCGCCC | 13078 |
| 7050 | GCCGUAAC A UCACUCGC | 4330 | GCGAGTGA GGCTAGCTACAACGA GTTACCGC | 13079 |
| 7053 | GUAACAUC A CUCGCGUG | 4331 | CACGCGAG GGCTAGCTACAACGA GATGTTAC | 13080 |
| 7057 | CAUCACUC G CCUGGAGU | 4332 | ACTCCACG GGCTAGCTACAACGA GAGTGATG | 13081 |
| 7059 | UCACUCGC G UCCAGUCA | 4333 | TGACTCCA GGCTAGCTACAACGA GCGAGTGA | 13082 |
| 7064 | CGCGUGGA G UCAGAGAA | 4334 | TTCTCTGA GGCTAGCTACAACGA TCCACGCG | 13083 |
| 7072 | GUCAGAGA A UAAGGUAG | 4335 | CTACCTTA GGCTAGCTACAACGA TCTCTGAC | 13084 |
| 7077 | AGAAUAAG G UAGUUACC | 4336 | GGTAACTA GGCTAGCTACAACGA CTTATTCT | 13085 |
| 7080 | AUAAGGUA G UUACCCUG | 4337 | CAGGGTAA GGCTAGCTACAACGA TACCTTAT | 13086 |
| 7083 | AGGUAGUU A CCCUGGAC | 4338 | GTCCAGGG GGCTAGCTACAACGA AACTACCT | 13087 |
| 7090 | UACCCUGG A CUCUUUUG | 4339 | CAAAAGAG GGCTAGCTACAACGA CCAGGGTA | 13088 |
| 7099 | CUCUUUUG A CCCGCUUC | 4340 | GAAGCGGG GGCTAGCTACAACGA CAAAAGAG | 13089 |
| 7103 | UUUGACCC G CUUCGAGC | 4341 | GCTCGAAG GGCTAGCTACAACGA GGGTCAAA | 13090 |
| 7110 | CGCUUCGA G CGGAGGAG | 4342 | CTCCTCCG GGCTAGCTACAACGA TCGAAGCG | 13091 |
| 7120 | GGAGGAGG A UGAGAGAG | 4343 | CTCTCTCA GGCTAGCTACAACGA CCTCCTCC | 13092 |
| 7131 | AGAGAGAG G UGUCCAUU | 4344 | AATGGACA GGCTAGCTACAACGA CTCTCTCT | 13093 |
| 7133 | AGAGAGGU G UCCAUUCC | 4345 | GGAATGGA GGCTAGCTACAACGA ACCTCTCT | 13094 |
| 7137 | AGGUGUCC A UUCCGGCG | 4346 | CGCCGGAA GGCTAGCTACAACGA GGACACCT | 13095 |
| 7143 | CCAUUCCG G CGGAGAUC | 4347 | GATCTCCG GGCTAGCTACAACGA CGGAATGG | 13096 |
| 7149 | CGGCGGAG A UCCUGCGG | 4348 | CCGCAGGA GGCTAGCTACAACGA CTCCGCCG | 13097 |
| 7154 | GAGAUCCU G CGGAAAUC | 4349 | GATTTCCG GGCTAGCTACAACGA AGGATCTC | 13098 |
| 7160 | CUGCGGAA A UCCAAGAA | 4350 | TTCTTGGA GGCTAGCTACAACGA TTCCGCAG | 13099 |
| 7169 | UCCAAGAA G UUUCCUUC | 4351 | GAAGGAAA GGCTAGCTACAACGA TTCTTGGA | 13100 |
| 7179 | UUCCUUCA G CGUUACCC | 4352 | GGGTAACG GGCTAGCTACAACGA TGAAGGAA | 13101 |
| 7181 | CCUUCAGC G UUACCCAU | 4353 | ATGGGTAA GGCTAGCTACAACGA GCTGAAGG | 13102 |
| 7184 | UCAGCGUU A CCCAUAUG | 4354 | CATATGGG GGCTAGCTACAACGA AACGCTGA | 13103 |
| 7188 | CGUUACCC A UAUGGGCA | 4355 | TGCCCATA GGCTAGCTACAACGA GGGTAACG | 13104 |
| 7190 | UUACCCAU A UGGGCACG | 4356 | CGTGCCCA GGCTAGCTACAACGA ATGGGTAA | 13105 |
| 7194 | CCAUAUGG G CACGCCCG | 4357 | CGGGCGTG GGCTAGCTACAACGA CCATATGG | 13106 |
| 7196 | AUAUGGGC A CGCCCGGA | 4358 | TCCGGGCG GGCTAGCTACAACGA GCCCATAT | 13107 |
| 7198 | AUGGGCAC G CCCGGAUU | 4359 | AATCCGGG GGCTAGCTACAACGA GTGCCCAT | 13108 |
| 7204 | ACGCCCGG A UUACAACC | 4360 | GGTTGTAA GGCTAGCTACAACGA CCGGGCGT | 13109 |
| 7207 | CCCGGAUU A CAACCCUC | 4361 | GAGGGTTG GGCTAGCTACAACGA AATCCGGG | 13110 |
| 7210 | GGAUUACA A CCCUCCAC | 4362 | GTGGAGGG GGCTAGCTACAACGA TGTAATCC | 13111 |
| 7217 | AACCCUCC A CUACUAGA | 4363 | TCTAGTAG GGCTAGCTACAACGA GGAGGGTT | 13112 |
| 7220 | CCUCCACU A CUAGAGCC | 4364 | GGCTCTAG GGCTAGCTACAACGA AGTGGAGG | 13113 |
| 7226 | CUACUAGA G CCCUGGAA | 4365 | TTCCAGGG GGCTAGCTACAACGA TCTAGTAG | 13114 |
| 7237 | CUGGAAAG A CCCAGACU | 4366 | AGTCTGGG GGCTAGCTACAACGA CTTTCCAG | 13115 |
| 7243 | AGACCCAG A CUACGUCC | 4367 | GGACGTAG GGCTAGCTACAACGA CTGGGTCT | 13116 |
| 7246 | CCCAGACU A CGUCCCUC | 4368 | GAGGGACG GGCTAGCTACAACGA AGTCTGGG | 13117 |
| 7248 | CAGACUAC G UCCCUCCG | 4369 | CGGAGGGA GGCTAGCTACAACGA GTAGTCTG | 13118 |
| 7257 | UCCCUCCG G UGGUACAC | 4370 | GTGTACCA GGCTAGCTACAACGA CGGAGGGA | 13119 |
| 7260 | CUCCGGUG G UACACGGG | 4371 | CCCGTGTA GGCTAGCTACAACGA CACCGGAG | 13120 |
| 7262 | CCGGUGGU A CACGGGUG | 4372 | CACCCGTG GGCTAGCTACAACGA ACCACCGG | 13121 |
| 7264 | GGUGGUAC A CGGGUGCC | 4373 | GGCACCCG GGCTAGCTACAACGA GTACCACC | 13122 |
| 7268 | GUACACGG G UGCCCAUU | 4374 | AATGGGCA GGCTAGCTACAACGA CCGTGTAC | 13123 |
| 7270 | ACACGGGU G CCCAUUGC | 4375 | GCAATGGG GGCTAGCTACAACGA ACCCGTGT | 13124 |
| 7274 | GGGUGCCC A UUGCCACC | 4376 | GGTGGCAA GGCTAGCTACAACGA GGGCACCC | 13125 |
| 7277 | UGCCCAUU G CCACCUGC | 4377 | GCAGGTGG GGCTAGCTACAACGA AATGGGCA | 13126 |
| 7280 | CCAUUGCC A CCUGCCAA | 4378 | TTGGCAGG GGCTAGCTACAACGA GGCAATGG | 13127 |
| 7284 | UGCCACCU G CCAAGGCC | 4379 | GGCCTTGG GGCTAGCTACAACGA AGGTGGCA | 13128 |
| 7290 | CUGCCAAG G CCCCUCCA | 4380 | TGGAGGGG GGCTAGCTACAACGA CTTGGCAG | 13129 |
| 7299 | CCCCUCCA A UACCACCU | 4381 | AGGTGGTA GGCTAGCTACAACGA TGGAGGGG | 13130 |
| 7301 | CCUCCAAU A CCACCUCC | 4382 | GGAGGTGG GGCTAGCTACAACGA ATTGGAGG | 13131 |
| 7304 | CCAAUACC A CCUCCACG | 4383 | CGTGGAGG GGCTAGCTACAACGA GGTATTGG | 13132 |
| 7310 | CCACCUCC A CGGAGGAA | 4384 | TTCCTCCG GGCTAGCTACAACGA GGAGGTGG | 13133 |
| 7323 | GGAAGAGG A CGGUUGUU | 4385 | AACAACCG GGCTAGCTACAACGA CCTCTTCC | 13134 |
| 7326 | AGAGGACG G UUGUUCUG | 4386 | CAGAACAA GGCTAGCTACAACGA CGTCCTCT | 13135 |
| 7329 | GGACGGUU G UUCUGACA | 4387 | TGTCAGAA GGCTAGCTACAACGA AACCGTCC | 13136 |
| 7335 | UUGUUCUG A CAGAGUCC | 4388 | GGACTCTG GGCTAGCTACAACGA CAGAACAA | 13137 |
| 7340 | CUGACAGA G UCCACCGU | 4389 | ACGGTGGA GGCTAGCTACAACGA TCTGTCAG | 13138 |
| 7344 | CAGAGUCC A CCGUGUCU | 4390 | AGACACGG GGCTAGCTACAACGA GGACTCTG | 13139 |
| 7347 | AGUCCACC G UGUCUUCU | 4391 | AGAAGACA GGCTAGCTACAACGA GGTGGACT | 13140 |
| 7349 | UCCACCGU G UCUUCUGC | 4392 | GCAGAAGA GGCTAGCTACAACGA ACGGTGGA | 13141 |
| 7356 | UGUCUUCU G CCUUGGCG | 4393 | CGCCAAGG GGCTAGCTACAACGA AGAAGACA | 13142 |
| 7362 | CUGCCUUG G CGGAGCUC | 4394 | GAGCTCCG GGCTAGCTACAACGA CAAGGCAG | 13143 |
| 7367 | UUGGCGGA G CUCGCCAC | 4395 | GTGGCGAG GGCTAGCTACAACGA TCCGCCAA | 13144 |
| 7371 | CGGAGCUC G CCACAAAG | 4396 | CTTTGTGG GGCTAGCTACAACGA GAGCTCCG | 13145 |
| 7374 | AGCUCGCC A CAAAGACC | 4397 | GGTCTTTG GGCTAGCTACAACGA GGCGAGCT | 13146 |
| 7380 | CCACAAAG A CCUUCGGC | 4398 | GCCGAAGG GGCTAGCTACAACGA CTTTGTGG | 13147 |
| 7387 | GACCUUCG G CAGCUCUG | 4399 | CAGAGCTG GGCTAGCTACAACGA CGAAGGTC | 13148 |
| 7390 | CUUCGGCA G CUCUGAAU | 4400 | ATTCAGAG GGCTAGCTACAACGA TGCCGAAG | 13149 |
| 7397 | AGCUCUGA A UCAUCGGC | 4401 | GCCGATGA GGCTAGCTACAACGA TCAGAGCT | 13150 |
| 7400 | UCUGAAUC A UCGGCCGC | 4402 | GCGGCCGA GGCTAGCTACAACGA GATTCAGA | 13151 |
| 7404 | AAUCAUCG G CCGCUGAU | 4403 | ATCAGCGG GGCTAGCTACAACGA CGATGATT | 13152 |
| 7407 | CAUCGGCC G CUGAUAGA | 4404 | TCTATCAG GGCTAGCTACAACGA GGCCGATG | 13153 |
| 7411 | GGCCGCUG A UAGAGGUA | 4405 | TACCTCTA GGCTAGCTACAACGA CAGCGGCC | 13154 |
| 7417 | UGAUAGAG G UACGGCAA | 4406 | TTGCCGTA GGCTAGCTACAACGA CTCTATCA | 13155 |
| 7419 | AUAGAGGU A CGGCAACC | 4407 | GGTTGCCG GGCTAGCTACAACGA ACCTCTAT | 13156 |
| 7422 | GAGGUACG G CAACCGCC | 4408 | GGCGGTTG GGCTAGCTACAACGA CGTACCTC | 13157 |
| 7425 | GUACGGCA A CCGCCCCC | 4409 | GGGGGCGG GGCTAGCTACAACGA TGCCGTAC | 13158 |
| 7428 | CGGCAACC G CCCCCCCC | 4410 | GGGGGGGG GGCTAGCTACAACGA GGTTGCCG | 13159 |
| 7438 | CCCCCCCG A CCAGACCU | 4411 | AGGTCTGG GGCTAGCTACAACGA CGGGGGGG | 13160 |
| 7443 | CCGACCAG A CCUCCAAU | 4412 | ATTGGAGG GGCTAGCTACAACGA CTGGTCGG | 13161 |
| 7450 | GACCUCCA A UGACGGUG | 4413 | CACCGTCA GGCTAGCTACAACGA TGGAGGTC | 13162 |
| 7453 | CUCCAAUG A CGGUGACG | 4414 | CGTCACCG GGCTAGCTACAACGA CATTGGAG | 13163 |
| 7456 | CAAUGACG G UGACGCAG | 4415 | CTGCGTCA GGCTAGCTACAACGA CGTCATTG | 13164 |
| 7459 | UGACGGUG A CGCAGGAU | 4416 | ATCCTGCG GGCTAGCTACAACGA CACCGTCA | 13165 |
| 7461 | ACGGUGAC G CAGGAUCC | 4417 | GGATCCTG GGCTAGCTACAACGA GTCACCGT | 13166 |
| 7466 | GACGCAGG A UCCGACGU | 4418 | ACGTCGGA GGCTAGCTACAACGA CCTGCGTC | 13167 |
| 7471 | AGGAUCCG A CGUUGAGU | 4419 | ACTCAACG GGCTAGCTACAACGA CGGATCCT | 13168 |
| 7473 | GAUCCGAC G UUGAGUCG | 4420 | CGACTCAA GGCTAGCTACAACGA GTCGGATC | 13169 |
| 7478 | GACGUUGA G UCGUACUC | 4421 | GAGTACGA GGCTAGCTACAACGA TCAACGTC | 13170 |
| 7481 | GUUGAGUC G UACUCCUC | 4422 | GAGGAGTA GGCTAGCTACAACGA GACTCAAC | 13171 |
| 7483 | UGAGUCGU A CUCCUCUA | 4423 | TAGAGGAG GGCTAGCTACAACGA ACGACTCA | 13172 |
| 7491 | ACUCCUCU A UGCCCCCC | 4424 | GGGGGGCA GGCTAGCTACAACGA AGAGGAGT | 13173 |
| 7493 | UCCUCUAU G CCCCCCCU | 4425 | AGGGGGGG GGCTAGCTACAACGA ATAGAGGA | 13174 |
| 7511 | GAGGGGGA G CCGGGGGA | 4426 | TCCCCCGG GGCTAGCTACAACGA TCCCCCTC | 13175 |
| 7519 | GCCGGGGG A UCCCGAUC | 4427 | GATCGGGA GGCTAGCTACAACGA CCCCCGGC | 13176 |
| 7525 | GGAUCCCG A UCUCAGCG | 4428 | CGCTGAGA GGCTAGCTACAACGA CGGGATCC | 13177 |
| 7531 | CGAUCUCA G CGACGGGU | 4429 | ACCCGTCG GGCTAGCTACAACGA TGAGATCG | 13178 |
| 7534 | UCUCAGCG A CGGGUCUU | 4430 | AAGACCCG GGCTAGCTACAACGA CGCTGAGA | 13179 |
| 7538 | AGCGACGG G UCUUGGUC | 4431 | GACCAAGA GGCTAGCTACAACGA CCGTCGCT | 13180 |
| 7544 | GGGUCUUG G UCUACCGU | 4432 | ACGGTAGA GGCTAGCTACAACGA CAAGACCC | 13181 |
| 7548 | CUUGGUCU A CCGUGAGC | 4433 | GCTCACGG GGCTAGCTACAACGA AGACCAAG | 13182 |
| 7551 | GGUCUACC G UGAGCGAA | 4434 | TTCGCTCA GGCTAGCTACAACGA GGTAGACC | 13183 |
| 7555 | UACCGUGA G CGAAGAGG | 4435 | CCTCTTCG GGCTAGCTACAACGA TCACGGTA | 13184 |
| 7563 | GCGAAGAG G CUGGCGAG | 4436 | CTCGCCAG GGCTAGCTACAACGA CTCTTCGC | 13185 |
| 7567 | AGAGGCUG G CGAGGAUG | 4437 | CATCCTCG GGCTAGCTACAACGA CAGCCTCT | 13186 |
| 7573 | UGGCGAGG A UGUCGUCU | 4438 | AGACGACA GGCTAGCTACAACGA CCTCGCCA | 13187 |
| 7575 | GCGAGGAU G UCGUCUGC | 4439 | GCAGACGA GGCTAGCTACAACGA ATCCTCGC | 13188 |
| 7578 | AGGAUGUC G UCUGCUGC | 4440 | GCAGCAGA GGCTAGCTACAACGA GACATCCT | 13189 |
| 7582 | UGUCGUCU G CUGCUCGA | 4441 | TCGAGCAG GGCTAGCTACAACGA ACACGACA | 13190 |
| 7585 | CGUCUGCU G CUCGAUGU | 4442 | ACATCGAG GGCTAGCTACAACGA AGCAGACG | 13191 |
| 7590 | GCUGCUCG A UGUCCUAC | 4443 | GTAGGACA GGCTAGCTACAACGA CGAGCAGC | 13192 |
| 7592 | UGCUCGAU G UCCUACAC | 4444 | GTGTAGGA GGCTAGCTACAACGA ATCGAGCA | 13193 |
| 7597 | GAUGUCCU A CACAUGGA | 4445 | TCCATGTG GGCTAGCTACAACGA AGGACATC | 13194 |
| 7599 | UGUCCUAC A CAUGGACG | 4446 | CGTCCATG GGCTAGCTACAACGA GTAGGACA | 13195 |
| 7601 | UCCUACAC A UGGACGGG | 4447 | CCCGTCCA GGCTAGCTACAACGA GTGTAGGA | 13196 |
| 7605 | ACACAUGG A CGGGCGCC | 4448 | GGCGCCCG GGCTAGCTACAACGA CCATGTGT | 13197 |
| 7609 | AUGGACGG G CGCCCUGA | 4449 | TCAGGGCG GGCTAGCTACAACGA CCGTCCAT | 13198 |
| 7611 | GGACGGGC G CCCUGAUC | 4450 | GATCAGGG GGCTAGCTACAACGA GCCCGTCC | 13199 |
| 7617 | GCGCCCUG A UCACGCCA | 4451 | TGGCGTGA GGCTAGCTACAACGA CAGGGCGC | 13200 |
| 7620 | CCCUGAUC A CGCCAUGC | 4452 | GCATGGCG GGCTAGCTACAACGA GATCAGGG | 13201 |
| 7622 | CUGAUCAC G CCAUGCGC | 4453 | GCGCATGG GGCTAGCTACAACGA GTGATCAG | 13202 |
| 7625 | AUCACGCC A UGCGCUGC | 4454 | GCAGCGCA GGCTAGCTACAACGA GGCGTGAT | 13203 |
| 7627 | CACGCCAU G CGCUGCGG | 4455 | CCGCAGCG GGCTAGCTACAACGA ATGGCGTG | 13204 |
| 7629 | CGCCAUGC G CUGCGGAG | 4456 | CTCCGCAG GGCTAGCTACAACGA GCATGGCG | 13205 |
| 7632 | CAUGCGCU G CGGAGGAA | 4457 | TTCCTCCG GGCTAGCTACAACGA AGCGCATG | 13206 |
| 7642 | GGAGGAAA G CAAGUUGC | 4458 | GCAACTTG GGCTAGCTACAACGA TTTCCTCC | 13207 |
| 7646 | GAAAGCAA G UUGCCCAU | 4459 | ATGGGCAA GGCTAGCTACAACGA TTGCTTTC | 13208 |
| 7649 | AGCAAGUU G CCCAUCAA | 4460 | TTGATGGG GGCTAGCTACAACGA AACTTGCT | 13209 |
| 7653 | ACUUGCCC A UCAACGCG | 4461 | CGCGTTGA GGCTAGCTACAACGA GGGCAACT | 13210 |
| 7657 | GCCCAUCA A CGCGUUGA | 4462 | TCAACGCG GGCTAGCTACAACCA TGATGCGC | 13211 |
| 7659 | CCAUCAAC G CGUUGAGC | 4463 | GCTCAACG GGCTAGCTACAACGA GTTGATGG | 13212 |
| 7661 | AUCAACGC G UUGAGCAA | 4464 | TTGCTCAA GGCTAGCTACAACGA GCGTTGAT | 13213 |
| 7666 | CGCGUUGA G CAACUCUU | 4465 | AAGAGTTG GGCTAGCTACAACGA TCAACGCG | 13214 |
| 7669 | GUUGAGCA A CUCUUUGC | 4466 | GCAAAGAG GGCTAGCTACAACGA TGCTCAAC | 13215 |
| 7676 | AACUCUUU G CUGCGUCA | 4467 | TGACGCAG GGCTAGCTACAACGA AAAGAGTT | 13216 |
| 7679 | UCUUUGCU G CGUCACCA | 4468 | TGGTGACG GGCTAGCTACAACGA AGCAAAGA | 13217 |
| 7681 | UUUGCUGC G UCACCACA | 4469 | TGTGGTGA GGCTAGCTACAACGA GCAGCAAA | 13218 |
| 7684 | GCUGCGUC A CCACAACA | 4470 | TGTTGTGG GGCTAGCTACAACGA GACGCAGC | 13219 |
| 7687 | GCGUCACC A CAACAUGG | 4471 | CCATGTTG GGCTAGCTACAACGA GGTGACGC | 13220 |
| 7690 | UCACCACA A CAUGGUCU | 4472 | AGACCATG GGCTAGCTACAACGA TGTGGTGA | 13221 |
| 7692 | ACCACAAC A UGGUCUAC | 4473 | GTAGACCA GGCTAGCTACAACGA GTTGTGGT | 13222 |
| 7695 | ACAACAUG G UCUACGCU | 4474 | AGCGTAGA GGCTAGCTACAACGA CATGTTGT | 13223 |
| 7699 | CAUGGUCU A CGCUACAA | 4475 | TTGTAGCG GGCTAGCTACAACGA AGACCATG | 13224 |
| 7701 | UGGUCUAC G CUACAACA | 4476 | TGTTGTAG GGCTAGCTACAACGA GTAGACCA | 13225 |
| 7704 | UCUACGCU A CAACAUCU | 4477 | AGATGTTG GGCTAGCTACAACGA AGCGTAGA | 13226 |
| 7707 | ACGCUACA A CAUCUCGC | 4478 | GCGAGATG GGCTAGCTACAACGA TGTAGCGT | 13227 |
| 7709 | GCUACAAC A UCUCGCAG | 4479 | CTGCGAGA GGCTAGCTACAACGA GTTGTAGC | 13228 |
| 7714 | AACAUCUC G CAGCGCAA | 4480 | TTGCGCTG GGCTAGCTACAACGA GAGATGTT | 13229 |
| 7717 | AUCUCGCA G CGCAAGCC | 4481 | GGCTTGCG GGCTAGCTACAACGA TGCGAGAT | 13230 |
| 7719 | CUCGCAGC G CAAGCCAG | 4482 | CTGGCTTG GGCTAGCTACAACGA GCTGCGAG | 13231 |
| 7723 | CAGCGCAA G CCAGCGGC | 4483 | GCCGCTGG GGCTAGCTACAACGA TTGCGCTG | 13232 |
| 7727 | GCAAGCCA G CGGCAGAA | 4484 | TTCTGCCG GGCTAGCTACAACGA TGGCTTGC | 13233 |
| 7730 | AGCCAGCG G CAGAAGAA | 4485 | TTCTTCTG GGCTAGCTACAACGA CGCTGGCT | 13234 |
| 7740 | AGAAGAAG G UCACCUUU | 4486 | AAAGGTGA GGCTAGCTACAACGA CTTCTTCT | 13235 |
| 7743 | AGAAGGUC A CCUUUGAC | 4487 | GTCAAAGG GGCTAGCTACAACGA GACCTTCT | 13236 |
| 7750 | CACCUUUG A CAGACUGC | 4488 | GCAGTCTG GGCTAGCTACAACGA CAAAGGTG | 13237 |
| 7754 | UUUGACAG A CUGCAAGU | 4489 | ACTTGCAG GGCTAGCTACAACGA CTGTCAAA | 13238 |
| 7757 | GACAGACU G CAAGUCCU | 4490 | AGGACTTG GGCTAGCTACAACGA AGTCTGTC | 13239 |
| 7761 | GACUGCAA G UCCUGGAC | 4491 | GTCCAGGA GGCTAGCTACAACGA TTGCAGTC | 13240 |
| 7768 | AGUCCUGG A CGACCACU | 4492 | AGTGGTCG GGCTAGCTACAACGA CCAGGACT | 13241 |
| 7771 | CCUGGACG A CCACUACC | 4493 | GGTAGTGG GGCTAGCTACAACGA CGTCCAGG | 13242 |
| 7774 | GGACGACC A CUACCGGG | 4494 | CCCGGTAG GGCTAGCTACAACGA GGTCGTCC | 13243 |
| 7777 | CGACCACU A CCGGGACG | 4495 | CGTCCCGG GGCTAGCTACAACGA AGTGGTCG | 13244 |
| 7783 | CUACCGGG A CGUGCUCA | 4496 | TGAGCACG GGCTAGCTACAACGA CCCGGTAG | 13245 |
| 7785 | ACCGGGAC G UGCUCAAG | 4497 | CTTGAGCA GGCTAGCTACAACGA GTCCCGGT | 13246 |
| 7787 | CGGGACGU G CUCAAGGA | 4498 | TCCTTGAG GGCTAGCTACAACGA ACGTCCCG | 13247 |
| 7797 | UCAAGGAG A UGAAGGCG | 4499 | CGCCTTCA GGCTAGCTACAACGA CTCCTTGA | 13248 |
| 7803 | AGAUGAAG G CGAAGGCG | 4500 | CGCCTTCG GGCTAGCTACAACGA CTTCATCT | 13249 |
| 7809 | AGGCGAAG G CGUCCACA | 4501 | TGTGGACG GGCTAGCTACAACGA CTTCGCCT | 13250 |
| 7811 | GCGAAGGC G UCCACAGU | 4502 | ACTGTGGA GGCTAGCTACAACGA GCCTTCGC | 13251 |
| 7815 | AGGCGUCC A CACUUAAG | 4503 | CTTAACTG GGCTAGCTACAACGA GGACGCCT | 13252 |
| 7818 | CGUCCACA G UUAAGGCU | 4504 | AGCCTTAA GGCTAGCTACAACGA TGTGGACG | 13253 |
| 7824 | CACUUAAG G CUAAACUU | 4505 | AAGTTTAG GGCTAGCTACAACGA CTTAACTG | 13254 |
| 7829 | AAGGCUAA A CUUCUAUC | 4506 | GATAGAAG GGCTAGCTACAACGA TTAGCCTT | 13255 |
| 7835 | AAACUUCU A UCCGUAGA | 4507 | TCTACGGA GGCTAGCTACAACGA AGAAGTTT | 13256 |
| 7839 | UUCUAUCC G UAGAGGAA | 4508 | TTCCTCTA GGCTAGCTACAACGA GGATAGAA | 13257 |
| 7848 | UAGAGGAA G CCUGCAGA | 4509 | TCTGCAGG GGCTAGCTACAACGA TTCCTCTA | 13258 |
| 7852 | GGAAGCCU G CAGACUGA | 4510 | TCAGTCTG GGCTAGCTACAACGA AGGCTTCC | 13259 |
| 7856 | GCCUCCAG A CUGACGCC | 4511 | GGCGTCAG GGCTAGCTACAACGA CTGCAGGC | 13260 |
| 7860 | GCAGACUG A CGCCCCCA | 4512 | TGGGGGCG GGCTAGCTACAACGA CAGTCTGC | 13261 |
| 7862 | AGACUGAC G CCCCCACA | 4513 | TGTGGGGG GGCTAGCTACAACGA GTCAGTCT | 13262 |
| 7868 | ACGCCCCC A CAUUCGGC | 4514 | GCCGAATG GGCTAGCTACAACGA CGGGGCGT | 13263 |
| 7870 | GCCCCCAC A UUCGGCCA | 4515 | TGGCCGAA GGCTAGCTACAACGA GTGGGGGC | 13264 |
| 7875 | CACAUUCG G CCAGGUCC | 4516 | GGACCTGG GGCTAGCTACAACGA CGAATGTG | 13265 |
| 7880 | UCGGCCAG G UCCAAAUU | 4517 | AATTTGGA GGCTAGCTACAACGA CTGGCCGA | 13266 |
| 7886 | AGGUCCAA A UUUGGUUA | 4518 | TAACCAAA GGCTAGCTACAACGA TTGGACCT | 13267 |
| 7891 | CAAAUUUG G UUAUGGGG | 4519 | CCCCATAA GGCTAGCTACAACGA CAAATTTG | 13268 |
| 7894 | AUUUGGUU A UGGGGCAA | 4520 | TTGCCCCA GGCTAGCTACAACGA AACCAAAT | 13269 |
| 7899 | GUUAUGGG G CAAAGGAC | 4521 | GTCCTTTG GGCTAGCTACAACGA CCCATAAC | 13270 |
| 7906 | GGCAAAGG A CGUCCGGA | 4522 | TCCGGACG GGCTAGCTACAACGA CCTTTGCC | 13271 |
| 7908 | CAAAGGAC G UCCGGAAC | 4523 | GTTCCGGA GGCTAGCTACAACGA GTCCTTTG | 13272 |
| 7915 | CGUCCGGA A CCUAUCCA | 4524 | TGGATAGG GGCTAGCTACAACGA TCCGGACG | 13273 |
| 7919 | CGGAACCU A UCCAGCGG | 4525 | CCGCTGGA GGCTAGCTACAACGA AGGTTCCG | 13274 |
| 7924 | CCUAUCCA G CGGGGCCG | 4526 | CGGCCCCG GGCTAGCTACAACGA TGGATAGG | 13275 |
| 7929 | CCAGCGGG G CCGUCAAC | 4527 | GTTGACGG GGCTAGCTACAACGA CCCGCTGG | 13276 |
| 7932 | GCGGGGCC G UCAACCAC | 4528 | GTGGTTGA GGCTAGCTACAACGA GGCCCCGC | 13277 |
| 7936 | GGCCGUCA A CCACAUCC | 4529 | GGATGTGG GGCTAGCTACAACGA TGACGGCC | 13278 |
| 7939 | CGUCAACC A CAUCCGCU | 4530 | AGCGGATG GGCTAGCTACAACGA GGTTGACG | 13279 |
| 7941 | UCAACCAC A UCCGCUCC | 4531 | GGAGCGGA GGCTAGCTACAACGA GTGGTTGA | 13280 |
| 7945 | CCACAUCC G CUCCGUGU | 4532 | ACACGGAG GGCTAGCTACAACGA GGATGTGG | 13281 |
| 7950 | UCCGCUCC G UGUGGAAG | 4533 | CTTCCACA GGCTAGCTACAACGA GGAGCGGA | 13282 |
| 7952 | CGCUCCGU G UGGAAGGA | 4534 | TCCTTCCA GGCTAGCTACAACGA ACGGAGCG | 13283 |
| 7960 | GUGGAAGG A CUUGCUGG | 4535 | CCAGCAAG GGCTAGCTACAACGA CCTTCCAC | 13284 |
| 7964 | AAGGACUU G CUGGAAGA | 4536 | TCTTCCAG GGCTAGCTACAACGA AAGTCCTT | 13285 |
| 7972 | GCUGGAAG A CACUGAGA | 4537 | TCTCAGTG GGCTAGCTACAACGA CTTCCAGC | 13286 |
| 7974 | UGGAAGAC A CUGAGACA | 4538 | TGTCTCAG GGCTAGCTACAACGA GTCTTCCA | 13287 |
| 7980 | ACACUGAG A CACCAAUU | 4539 | AATTGGTG GGCTAGCTACAACGA CTCAGTGT | 13288 |
| 7982 | ACUGAGAC A CCAAUUGA | 4540 | TCAATTGG GGCTAGCTACAACGA GTCTCAGT | 13289 |
| 7986 | AGACACCA A UUGAUACC | 4541 | GGTATCAA GGCTAGCTACAACGA TGGTGTCT | 13290 |
| 7990 | ACCAAUUG A UACCACCA | 4542 | TGGTGGTA GGCTAGCTACAACGA CAATTGGT | 13291 |
| 7992 | CAAUUGAU A CCACCAUC | 4543 | GATGGTGG GGCTAGCTACAACGA ATCAATTG | 13292 |
| 7995 | UUGAUACC A CCAUCAUG | 4544 | CATGATGG GGCTAGCTACAACGA GGTATCAA | 13293 |
| 7998 | AUACCACC A UCAUGGCA | 4545 | TGCCATGA GGCTAGCTACAACGA GGTGGTAT | 13294 |
| 8001 | CCACCAUC A UGGCAAAA | 4546 | TTTTGCCA GGCTAGCTACAACGA GATGGTGG | 13295 |
| 8004 | CCAUCAUG G CAAAAAAU | 4547 | ATTTTTTG GGCTAGCTACAACGA CATGATGG | 13296 |
| 8011 | GGCAAAAA A UGAGGUUU | 4548 | AAACCTCA GGCTAGCTACAACGA TTTTTGCC | 13297 |
| 8016 | AAAAUGAG G UUUUCUGC | 4549 | GCAGAAAA GGCTAGCTACAACGA CTCATTTT | 13298 |
| 8023 | GGUUUUCU G CGUCCAAC | 4550 | GTTGGACG GGCTAGCTACAACGA AGAAAACC | 13299 |
| 8025 | UUUUCUGC G UCCAACCA | 4551 | TGGTTGGA GGCTAGCTACAACGA GCAGAAAA | 13300 |
| 8030 | UGCGUCCA A CCAGAGAA | 4552 | TTCTCTGG GGCTAGCTACAACGA TGGACGCA | 13301 |
| 8044 | GAAAGGAG G CCGCAAGC | 4553 | GCTTGCGG GGCTAGCTACAACGA CTCCTTTC | 13302 |
| 8047 | AGGAGGCC G CAAGCCAG | 4554 | CTGGCTTG GGCTAGCTACAACGA GGCCTCCT | 13303 |
| 8051 | GGCCGCAA G CCAGCUCG | 4555 | CGAGCTGG GGCTAGCTACAACGA TTGCGGCC | 13304 |
| 8055 | GCAAGCCA G CUCGCCUU | 4556 | AAGGCGAG GGCTAGCTACAACGA TGGCTTGC | 13305 |
| 8059 | GCCAGCUC G CCUUAUCG | 4557 | CGATAAGG GGCTAGCTACAACGA GAGCTGGC | 13306 |
| 8064 | CUCGCCUU A UCGUGUUC | 4558 | GAACACGA GGCTAGCTACAACGA AAGGCGAG | 13307 |
| 8067 | GCCUUAUC G UGUUCCCA | 4559 | TGGGAACA GGCTAGCTACAACGA GATAAGGC | 13308 |
| 8069 | CUUAUCGU G UUCCCAGA | 4560 | TCTGCGAA GGCTAGCTACAACGA ACGATAAG | 13309 |
| 8077 | GUUCCCAG A CUUGGGGG | 4561 | CCCCCAAG GGCTAGCTACAACGA CTGGGAAC | 13310 |
| 8085 | ACUUGGGG G UUCGUGUG | 4562 | CACACGAA GGCTAGCTACAACGA CCCCAAGT | 13311 |
| 8089 | GGGGGUUC G UGUGUGCG | 4563 | CGCACACA GGCTAGCTACAACGA GAACCCCC | 13312 |
| 8091 | GGGUUCGU G UGUGCGAG | 4564 | CTCGCACA GGCTAGCTACAACGA ACGAACCC | 13313 |
| 8093 | GUUCGUGU G UGCGAGAA | 4565 | TTCTCGCA GGCTAGCTACAACGA ACACGAAC | 13314 |
| 8095 | UCGUGUGU G CGAGAAAA | 4566 | TTTTCTCG GGCTAGCTACAACGA ACACACGA | 13315 |
| 8103 | GCGAGAAA A UGGCCCUU | 4567 | AAGGGCCA GGCTAGCTACAACGA TTTCTCGC | 13316 |
| 8106 | AGAAAAUG G CCCUUUAC | 4568 | GTAAAGGG GGCTAGCTACAACGA CATTTTCT | 13317 |
| 8113 | GGCCCUUU A CGACGUGG | 4569 | CCACGTCG GGCTAGCTACAACGA AAAGGGCC | 13318 |
| 8116 | CCUUUACG A CGUGGUCU | 4570 | AGACCACG GGCTAGCTACAACGA CGTAAAGG | 13319 |
| 8118 | UUUACGAC G UGGUCUCC | 4571 | GGAGACCA GGCTAGCTACAACGA GTCGTAAA | 13320 |
| 8121 | ACGACGUG G UCUCCACC | 4572 | GGTGGAGA GGCTAGCTACAACGA CACGTCGT | 13321 |
| 8127 | UGGUCUCC A CCCUUCCU | 4573 | AGGAAGGG GGCTAGCTACAACGA GGAGACCA | 13322 |
| 8139 | UUCCUCAG G CCGUGAUG | 4574 | CATCACGG GGCTAGCTACAACGA CTGAGGAA | 13323 |
| 8142 | CUCAGGCC G UGAUGGGC | 4575 | GCCCATCA GGCTAGCTACAACGA GGCCTGAG | 13324 |
| 8145 | AGGCCGUG A UGGGCUCU | 4576 | AGAGCCCA GGCTAGCTACAACGA CACGGCCT | 13325 |
| 8149 | CGUGAUGG G CUCUUCAU | 4577 | ATGAAGAG GGCTAGCTACAACGA CCATCACG | 13326 |
| 8156 | GGCUCUUC A UACCGAUU | 4578 | AATCCGTA GGCTAGCTACAACGA GAAGAGCC | 13327 |
| 8158 | CUCUUCAU A CGGAUUCC | 4579 | GGAATCCG GGCTAGCTACAACGA ATGAAGAG | 13328 |
| 8162 | UCAUACGG A UUCCAGUA | 4580 | TACTGGAA GGCTAGCTACAACGA CCGTATGA | 13329 |
| 8168 | GGAUUCCA G UACUCUCC | 4581 | GGAGAGTA GGCTAGCTACAACGA TGGAATCC | 13330 |
| 8170 | AUUCCAGU A CUCUCCUG | 4582 | CAGGAGAG GGCTAGCTACAACGA ACTGGAAT | 13331 |
| 8180 | UCUCCUGG G CAGCGGGU | 4583 | ACCCGCTG GGCTAGCTACAACGA CCAGGAGA | 13332 |
| 8183 | CCUGGGCA G CGGGUUGA | 4584 | TCAACCCG GGCTAGCTACAACGA TGCCCAGG | 13333 |
| 8187 | GGCAGCGG G UUGAGUUC | 4585 | GAACTCAA GGCTAGCTACAACGA CCGCTGCC | 13334 |
| 8192 | CGGGUUGA G UUCCUGGU | 4586 | ACCAGGAA GGCTAGCTACAACGA TCAACCCG | 13335 |
| 8199 | AGUUCCUG G UGAAUGCC | 4587 | GGCATTCA GGCTAGCTACAACGA CAGGAACT | 13336 |
| 8203 | CCUGGUGA A UGCCUGGA | 4588 | TCCAGGCA GGCTAGCTACAACGA TCACCAGG | 13337 |
| 8205 | UGGUGAAU G CCUGGAAA | 4589 | TTTCCAGG GGCTAGCTACAACGA ATTCACCA | 13338 |
| 8213 | GCCUGGAA A UCAAAGAA | 4590 | TTCTTTGA GGCTAGCTACAACGA TTCCAGGC | 13339 |
| 8222 | UCAAAGAA A UGCCCUAU | 4591 | ATAGGGCA GGCTAGCTACAACGA TTCTTTGA | 13340 |
| 8224 | AAAGAAAU G CCCUAUGG | 4592 | CCATAGGG GGCTAGCTACAACGA ATTTCTTT | 13341 |
| 8229 | AAUGCCCU A UGGGCUUU | 4593 | AAAGCCCA GGCTAGCTACAACGA AGGGCATT | 13342 |
| 8233 | CCCUAUGG G CUUUGCAU | 4594 | ATGCAAAG GGCTAGCTACAACGA CCATAGGG | 13343 |
| 8238 | UGGGCUUU G CAUAUGAC | 4595 | GTCATATG GGCTAGCTACAACGA AAAGCCCA | 13344 |
| 8240 | GGCUUUGC A UAUGACAC | 4596 | GTGTCATA GGCTAGCTACAACGA GCAAAGCC | 13345 |
| 8242 | CUUUGCAU A UGACACCC | 4597 | GGGTGTCA GGCTAGCTACAACGA ATGCAAAG | 13346 |
| 8245 | UGCAUAUG A CACCCGCU | 4598 | AGCGGGTG GGCTAGCTACAACGA CATATGCA | 13347 |
| 8247 | CAUAUGAC A CCCGCUGU | 4599 | ACAGCGGG GGCTAGCTACAACGA GTCATATG | 13348 |
| 8251 | UGACACCC G CUGUUUCG | 4600 | CGAAACAG GGCTAGCTACAACGA GGGTGTCA | 13349 |
| 8254 | CACCCGCU G UUUCGACU | 4601 | AGTCGAAA GGCTAGCTACAACGA AGCGGGTG | 13350 |
| 8260 | CUGUUUCG A CUCAACAG | 4602 | CTGTTGAG GGCTAGCTACAACGA CGAAACAG | 13351 |
| 8265 | UCGACUCA A CAGUCACC | 4603 | GGTGACTG GGCTAGCTACAACGA TGAGTCGA | 13352 |
| 8268 | ACUCAACA G UCACCGAG | 4604 | CTCGGTGA GGCTAGCTACAACGA TGTTGAGT | 13353 |
| 8271 | CAACAGUC A CCGAGAGU | 4605 | ACTCTCGG GGCTAGCTACAACGA GACTGTTG | 13354 |
| 8278 | CACCGAGA G UGACAUCC | 4606 | GGATGTCA GGCTAGCTACAACGA TCTCGGTG | 13355 |
| 8281 | CGAGAGUG A CAUCCGUG | 4607 | CACGGATG GGCTAGCTACAACGA CACTCTCG | 13356 |
| 8283 | AGAGUGAC A UCCGUGUC | 4608 | GACACGGA GGCTAGCTACAACGA GTCACTCT | 13357 |
| 8287 | UGACAUCC G UGUCGAGG | 4609 | CCTCGACA GGCTAGCTACAACGA GGATGTCA | 13358 |
| 8289 | ACAUCCGU G UCCAGGAG | 4610 | CTCCTCGA GGCTAGCTACAACGA ACGGATGT | 13359 |
| 8297 | GUCGAGGA G UCAAUUUA | 4611 | TAAATTGA GGCTAGCTACAACGA TCCTCGAC | 13360 |
| 8301 | AGGAGUCA A UUUACCAA | 4612 | TTGGTAAA GGCTAGCTACAACGA TGACTCCT | 13361 |
| 8305 | GUCAAUUU A CCAAUGUU | 4613 | AACATTGG GGCTAGCTACAACGA AAATTGAC | 13362 |
| 8309 | AUUUACCA A UGUUGUGA | 4614 | TCACAACA GGCTAGCTACAACGA TGGTAAAT | 13363 |
| 8311 | UUACCAAU G UUGUGACU | 4615 | AGTCACAA GGCTAGCTACAACGA ATTGGTAA | 13364 |
| 8314 | CCAAUGUU G UGACUUGG | 4616 | CCAAGTCA GGCTAGCTACAACGA AACATTGG | 13365 |
| 8317 | AUGUUGUG A CUUGGCCC | 4617 | GGGCCAAG GGCTAGCTACAACGA CACAACAT | 13366 |
| 8322 | GUGACUUG G CCCCCGAA | 4618 | TTCGGGGG GGCTAGCTACAACGA CAAGTCAC | 13367 |
| 8331 | CCCCCGAA G CCAGACAG | 4619 | CTGTCTGG GGCTAGCTACAACGA TTCGGGGG | 13368 |
| 8336 | GAAGCCAG A CAGGCCAU | 4620 | ATGGCCTG GGCTAGCTACAACGA CTGGCTTC | 13369 |
| 8340 | CCAGACAG G CCAUAAGG | 4621 | CCTTATGG GGCTAGCTACAACGA CTGTCTGG | 13370 |
| 8343 | GACAGGCC A UAAGGUCG | 4622 | CGACCTTA GGCTAGCTACAACGA GGCCTGTC | 13371 |
| 8348 | GCCAUAAG G UCGCUCAC | 4623 | GTGAGCGA GGCTAGCTACAACGA CTTATGGC | 13372 |
| 8351 | AUAAGGUC G CUCACAGA | 4624 | TCTGTGAG GGCTAGCTACAACGA GACCTTAT | 13373 |
| 8355 | GGUCGCUC A CAGAGCGG | 4625 | CCGCTCTG GGCTAGCTACAACGA GAGCGACC | 13374 |
| 8360 | CUCACAGA G CGGCUUUA | 4626 | TAAAGCCG GGCTAGCTACAACGA TCTGTGAG | 13375 |
| 8363 | ACAGAGCG G CUUUAUAU | 4627 | ATATAAAG GGCTAGCTACAACGA CGCTCTGT | 13376 |
| 8368 | GCGGCUUU A UAUCGGGG | 4628 | CCCCGATA GGCTAGCTACAACGA AAAGCCGC | 13377 |
| 8370 | GGCUUUAU A UCGGGGGU | 4629 | ACCCCCGA GGCTAGCTACAACGA ATAAAGCC | 13378 |
| 8377 | UAUCGGGG G UCCUCUGA | 4630 | TCAGAGGA GGCTAGCTACAACGA CCCCGATA | 13379 |
| 8385 | GUCCUCUG A CUAAUUCA | 4631 | TGAATTAG GGCTAGCTACAACGA CAGAGGAC | 13380 |
| 8389 | UCUGACUA A UUCAAAAG | 4632 | CTTTTGAA GGCTAGCTACAACGA TAGTCAGA | 13381 |
| 8399 | UCAAAAGG G CAGAACUG | 4633 | CAGTTCTG GGCTAGCTACAACGA CCTTTTGA | 13382 |
| 8404 | AGGGCAGA A CUGCGGUU | 4634 | AACCGCAG GGCTAGCTACAACGA TCTGCCCT | 13383 |
| 8407 | GCAGAACU G CGGUUAUC | 4635 | GATAACCG GGCTAGCTACAACGA AGTTCTGC | 13384 |
| 8410 | GAACUGCG G UUAUCGCC | 4636 | GGCGATAA GGCTAGCTACAACGA CGCAGTTC | 13385 |
| 8413 | CUGCGGUU A UCGCCGGU | 4637 | ACCGGCGA GGCTAGCTACAACGA AACCGCAG | 13386 |
| 8416 | CGGUUAUC G CCGGUGCC | 4638 | GGCACCGG GGCTAGCTACAACGA GATAACCG | 13387 |
| 8420 | UAUCGCCG G UGCCGCGC | 4639 | GCGCGGCA GGCTAGCTACAACGA CGGCGATA | 13388 |
| 8422 | UCGCCGGU G CCGCGCGA | 4640 | TCGCGCGG GGCTAGCTACAACGA ACCGGCGA | 13389 |
| 8425 | CCGGUGCC G CGCGAGCG | 4641 | CGCTCGCG GGCTAGCTACAACGA GGCACCGG | 13390 |
| 8427 | GGUGCCGC G CGAGCGGC | 4642 | GCCGCTCG GGCTAGCTACAACGA GCGGCACC | 13391 |
| 8431 | CCGCGCGA G CGGCGUGC | 4643 | GCACGCCG GGCTAGCTACAACGA TCGCGCGG | 13392 |
| 8434 | CGCGAGCG G CGUGCUGA | 4644 | TCAGCACG GGCTAGCTACAACGA CGCTCGCG | 13393 |
| 8436 | CGAGCGGC G UGCUGACG | 4645 | CGTCAGCA GGCTAGCTACAACGA GCCGCTCG | 13394 |
| 8438 | AGCGGCGU G CUGACGAC | 4646 | GTCGTCAG GGCTAGCTACAACGA ACGCCGCT | 13395 |
| 8442 | GCGUGCUG A CGACCAGC | 4647 | GCTGGTCG GGCTAGCTACAACGA CAGCACGC | 13396 |
| 8445 | UGCUGACG A CCAGCUGU | 4648 | ACAGCTGG GGCTAGCTACAACGA CGTCAGCA | 13397 |
| 8449 | GACGACCA G CUGUGGUA | 4649 | TACCACAG GGCTAGCTACAACGA TGGTCGTC | 13398 |
| 8452 | GACCAGCU G UGGUAAUA | 4650 | TATTACCA GGCTAGCTACAACGA AGCTGGTC | 13399 |
| 8455 | CAGCUGUG G UAAUACCC | 4651 | GGGTATTA GGCTAGCTACAACGA CACAGCTG | 13400 |
| 8458 | CUGUGGUA A UACCCUCA | 4652 | TGAGGGTA GGCTAGCTACAACGA TACCACAG | 13401 |
| 8460 | GUGGUAAU A CCCUCACA | 4653 | TGTGAGGG GGCTAGCTACAACGA ATTACCAC | 13402 |
| 8466 | AUACCCUC A CAUGUUAC | 4654 | GTAACATG GGCTAGCTACAACGA GAGGGTAT | 13403 |
| 8468 | ACCCUCAC A UGUUACUU | 4655 | AAGTAACA GGCTAGCTACAACGA GTGAGGGT | 13404 |
| 8470 | CCUCACAU G UUACUUGA | 4656 | TCAAGTAA GGCTAGCTACAACGA ATGTGAGG | 13405 |
| 8473 | CACAUGUU A CUUGAAAG | 4657 | CTTTCAAG GGCTAGCTACAACGA AACATGTG | 13406 |
| 8481 | ACUUGAAA G CCUCUGCG | 4658 | CGCAGAGG GGCTAGCTACAACGA TTTCAAGT | 13407 |
| 8487 | AAGCCUCU G CGGCCUGU | 4659 | ACAGGCCG GGCTAGCTACAACGA AGAGGCTT | 13408 |
| 8490 | CCUCUGCG G CCUGUCGA | 4660 | TCGACAGG GGCTAGCTACAACGA CGCAGAGG | 13409 |
| 8494 | UGCGGCCU G UCGAGCUG | 4661 | CAGCTCGA GGCTAGCTACAACGA AGGCCGCA | 13410 |
| 8499 | CCUGUCGA G CUGCGAAG | 4662 | CTTCGCAG GGCTAGCTACAACGA TCGACAGG | 13411 |
| 8502 | GUCGAGCU G CGAAGCUC | 4663 | GAGCTTCG GGCTAGCTACAACGA AGCTCGAC | 13412 |
| 8507 | GCUGCGAA G CUCCAGGA | 4664 | TCCTGGAG GGCTAGCTACAACGA TTCGCAGC | 13413 |
| 8515 | GCUCCAGG A CUGCACGA | 4665 | TCGTGCAG GGCTAGCTACAACGA CCTGGAGC | 13414 |
| 8518 | CCAGGACU G CACGAUGC | 4666 | GCATCGTG GGCTAGCTACAACGA AGTCCTGG | 13415 |
| 8520 | AGGACUGC A CGAUGCUC | 4667 | GAGCATCG GGCTAGCTACAACGA GCAGTCCT | 13416 |
| 8523 | ACUGCACG A UGCUCGUG | 4668 | CACGAGCA GGCTAGCTACAACGA CGTGCAGT | 13417 |
| 8525 | UGCACGAU G CUCCUGUG | 4669 | CACACGAG GGCTAGCTACAACGA ATCGTGCA | 13418 |
| 8529 | CGAUGCUC G UGUGUGGA | 4670 | TCCACACA GGCTAGCTACAACGA GAGCATCG | 13419 |
| 8531 | AUGCUCGU G UGUGGAGA | 4671 | TCTCCACA GGCTAGCTACAACGA ACGAGCAT | 13420 |
| 8533 | GCUCGUGU G UGGAGACG | 4672 | CGTCTCCA GGCTAGCTACAACGA ACACGAGC | 13421 |
| 8539 | GUGUGGAG A CGACCUGG | 4673 | CCAGGTCG GGCTAGCTACAACGA CTCCACAC | 13422 |
| 8542 | UGGAGACG A CCUGGUCG | 4674 | CGACCAGG GGCTAGCTACAACGA CGTCTCCA | 13423 |
| 8547 | ACGACCUG G UCGUUAUC | 4675 | GATAACGA GGCTAGCTACAACGA CAGGTCGT | 13424 |
| 8550 | ACCUGGUC G UUAUCUGU | 4676 | ACAGATAA GGCTAGCTACAACGA GACCAGGT | 13425 |
| 8553 | UGGUCGUU A UCUGUGAA | 4677 | TTCACAGA GGCTAGCTACAACGA AACGACCA | 13426 |
| 8557 | CGUUAUCU G UGAAAGUG | 4678 | CACTTTCA GGCTAGCTACAACGA AGATAACG | 13427 |
| 8563 | CUGUGAAA G UGCGGGGA | 4679 | TCCCCGCA GGCTAGCTACAACGA TTTCACAG | 13428 |
| 8565 | GUGAAAGU G CGGGGACC | 4680 | GGTCCCCG GGCTAGCTACAACGA ACTTTCAC | 13429 |
| 8571 | GUGCGGGG A CCCAAGAG | 4681 | CTCTTGGG GGCTAGCTACAACGA CCCCGCAC | 13430 |
| 8581 | CCAAGAGG A CGCGGCGA | 4682 | TCGCCGCG GGCTAGCTACAACGA CCTCTTGG | 13431 |
| 8583 | AAGAGGAC G CGGCGAGC | 4683 | GCTCGCCG GGCTAGCTACAACGA GTCCTCTT | 13432 |
| 8586 | AGGACGCG G CGAGCCUA | 4684 | TAGGCTCG GGCTAGCTACAACGA CGCGTCCT | 13433 |
| 8590 | CGCGGCGA G CCUACGAG | 4685 | CTCGTAGG GGCTAGCTACAACGA TCGCCGCG | 13434 |
| 8594 | GCGAGCCU A CGAGUCUU | 4686 | AAGACTCG GGCTAGCTACAACGA AGGCTCGC | 13435 |
| 8598 | GCCUACGA G UCUUCACG | 4687 | CGTGAAGA GGCTAGCTACAACGA TCGTAGGC | 13436 |
| 8604 | GAGUCUUC A CGGAGGCU | 4688 | AGCCTCCG GGCTAGCTACAACGA GAAGACTC | 13437 |
| 8610 | UCACGGAG G CUAUGACU | 4689 | AGTCATAG GGCTAGCTACAACGA CTCCGTGA | 13438 |
| 8613 | CGGAGGCU A UGACUAGG | 4690 | CCTAGTCA GGCTAGCTACAACGA AGCCTCCG | 13439 |
| 8616 | AGGCUAUG A CUAGGUAC | 4691 | GTACCTAG GGCTAGCTACAACGA CATAGCCT | 13440 |
| 8621 | AUGACUAG G UACUCUGC | 4692 | GCAGAGTA GGCTAGCTACAACGA CTAGTCAT | 13441 |
| 8623 | GACUAGGU A CUCUGCCC | 4693 | GGGCAGAG GGCTAGCTACAACGA ACCTAGTC | 13442 |
| 8628 | GGUACUCU G CCCCCCCC | 4694 | GGGGGGGG GGCTAGCTACAACGA AGAGTACC | 13443 |
| 8641 | CCCCGGGG A CCCGCCCC | 4695 | GGGGCGGG GGCTAGCTACAACGA CCCCGGGG | 13444 |
| 8645 | GGGGACCC G CCCCAACC | 4696 | GGTTGGGG GGCTAGCTACAACGA GGGTCCCC | 13445 |
| 8651 | CCGCCCCA A CCGGAAUA | 4697 | TATTCCGG GGCTAGCTACAACGA TGGGGCGG | 13446 |
| 8657 | CAACCGGA A UACGACUU | 4698 | AAGTCGTA GGCTAGCTACAACGA TCCGGTTG | 13447 |
| 8659 | ACCGGAAU A CGACUUGG | 4699 | CCAAGTCG GGCTAGCTACAACGA ATTCCGGT | 13448 |
| 8662 | GGAAUACG A CUUGGAGU | 4700 | ACTCCAAG GGCTAGCTACAACGA CGTATTCC | 13449 |
| 8669 | GACUUGGA G UUGAUAAC | 4701 | GTTATCAA GGCTAGCTACAACGA TCCAAGTC | 13450 |
| 8673 | UGGAGUUG A UAACAUCA | 4702 | TGATGTTA GGCTAGCTACAACGA CAACTCCA | 13451 |
| 8676 | AGUUGAUA A CAUCAUGC | 4703 | GCATGATG GGCTAGCTACAACGA TATCAACT | 13452 |
| 8678 | UUGAUAAC A UCAUGCUC | 4704 | GAGCATGA GGCTAGCTACAACGA GTTATCAA | 13453 |
| 8681 | AUAACAUC A UGCUCCUC | 4705 | GAGGAGCA GGCTAGCTACAACGA GATGTTAT | 13454 |
| 8683 | AACAUCAU G CUCCUCCA | 4706 | TGGAGGAG GGCTAGCTACAACGA ATGATGTT | 13455 |
| 8692 | CUCCUCCA A CGUAUCAG | 4707 | CTGATACG GGCTAGCTACAACGA TGGAGGAG | 13456 |
| 8694 | CCUCCAAC G UAUCAGUU | 4708 | AACTGATA GGCTAGCTACAACGA GTTGGAGG | 13457 |
| 8696 | UCCAACGU A UCAGUUGC | 4709 | GCAACTGA GGCTAGCTACAACGA ACGTTGGA | 13458 |
| 8700 | ACGUAUCA G UUGCACAC | 4710 | GTGTGCAA GGCTAGCTACAACGA TGATACGT | 13459 |
| 8703 | UAUCAGUU G CACACGAU | 4711 | ATCGTGTG GGCTAGCTACAACGA AACTGATA | 13460 |
| 8705 | UCAGUUGC A CACGAUGC | 4712 | GCATCGTG GGCTAGCTACAACGA GCAACTGA | 13461 |
| 8707 | AGUUGCAC A CGAUGCAU | 4713 | ATGCATCG GGCTAGCTACAACGA GTGCAACT | 13462 |
| 8710 | UGCACACG A UGCAUCUG | 4714 | CAGATGCA GGCTAGCTACAACGA CGTGTGCA | 13463 |
| 8712 | CACACGAU G CAUCUGGC | 4715 | GCCAGATG GGCTAGCTACAACGA ATCGTGTG | 13464 |
| 8714 | CACGAUGC A UCUGGCAA | 4716 | TTGCCAGA GGCTAGCTACAACGA GCATCGTG | 13465 |
| 8719 | UGCAUCUG G CAAAAGGG | 4717 | CCCTTTTG GGCTAGCTACAACGA CAGATGCA | 13466 |
| 8727 | GCAAAAGG G UGUACUAC | 4718 | GTAGTACA GGCTAGCTACAACGA CCTTTTGC | 13467 |
| 8729 | AAAAGGGU G UACUACCU | 4719 | AGGTAGTA GGCTAGCTACAACGA ACCCTTTT | 13468 |
| 8731 | AAGGGUGU A CUACCUCA | 4720 | TGAGGTAG GGCTAGCTACAACGA ACACCCTT | 13469 |
| 8734 | GGUGUACU A CCUCACCC | 4721 | GGGTGAGG GGCTAGCTACAACGA AGTACACC | 13470 |
| 8739 | ACUACCUC A CCCGUGAC | 4722 | GTCACGGG GGCTAGCTACAACGA GAGGTAGT | 13471 |
| 8743 | CCUCACCC G UGACCCCA | 4723 | TGGGGTCA GGCTAGCTACAACGA GGGTGAGG | 13472 |
| 8746 | CACCCGUG A CCCCACCA | 4724 | TGGTGGGG GGCTAGCTACAACGA CACGGGTG | 13473 |
| 8751 | GUGACCCC A CCACCCCC | 4725 | GGGGGTGG GGCTAGCTACAACGA GGGGTCAC | 13474 |
| 8754 | ACCCCACC A CCCCCCUU | 4726 | AAGGGGGG GGCTAGCTACAACGA GGTGGGGT | 13475 |
| 8763 | CCCCCCUU G CGCGGGCU | 4727 | AGCCCGCG GGCTAGCTACAACGA AAGGGGGG | 13476 |
| 8765 | CCCCUUGC G CGGGCUGC | 4728 | GCAGCCCG GGCTAGCTACAACGA GCAAGGGG | 13477 |
| 8769 | UUGCGCGG G CUGCGUGG | 4729 | CCACGCAG GGCTAGCTACAACGA CCGCGCAA | 13478 |
| 8772 | CGCGGGCU G CGUGGGAG | 4730 | CTCCCACG GGCTAGCTACAACGA AGCCCGCG | 13479 |
| 8774 | CGGGCUGC G UGGUAGAC | 4731 | GTCTCCCA GGCTAGCTACAACGA GCAGCCCG | 13480 |
| 8781 | CGUGGGAG A CAGCUAGA | 4732 | TCTAGCTG GGCTAGCTACAACGA CTCCCACG | 13481 |
| 8784 | GGGAGACA G CUAGAAGC | 4733 | GCTTCTAG GGCTAGCTACAACGA TGTCTCCC | 13482 |
| 8791 | AGCUAGAA G CACUCCAG | 4734 | CTGGAGTG GGCTAGCTACAACGA TTCTAGCT | 13483 |
| 8793 | CUAGAAGC A CUCCAGUC | 4735 | GACTGGAG GGCTAGCTACAACGA GCTTCTAG | 13484 |
| 8799 | GCACUCCA G UCAACUCC | 4736 | GGAGTTGA GGCTAGCTACAACGA TGGAGTGC | 13485 |
| 8803 | UCCAGUCA A CUCCUGGC | 4737 | GCCAGGAG GGCTAGCTACAACGA TGACTGGA | 13486 |
| 8810 | AACUCCUG G CUAGGCAA | 4738 | TTGCCTAG GGCTAGCTACAACGA CAGGAGTT | 13487 |
| 8815 | CUGGCUAG G CAACAUCA | 4739 | TGATGTTG GGCTAGCTACAACGA CTAGCCAG | 13488 |
| 8818 | GCUAGGCA A CAUCAUCA | 4740 | TGATGATG GGCTAGCTACAACGA TGCCTAGC | 13489 |
| 8820 | UAGGCAAC A UCAUCAUG | 4741 | CATGATGA GGCTAGCTACAACGA GTTGCCTA | 13490 |
| 8823 | GCAACAUC A UCAUGUUU | 4742 | AAACATGA GGCTAGCTACAACGA GATGTTGC | 13491 |
| 8826 | ACAUCAUC A UGUUUGCA | 4743 | TGCAAACA GGCTAGCTACAACGA GATGATGT | 13492 |
| 8828 | AUCAUCAU G UUUGCACC | 4744 | GGTGCAAA GGCTAGCTACAACGA ATGATGAT | 13493 |
| 8832 | UCAUGUUU G CACCCACU | 4745 | AGTGGGTG GGCTAGCTACAACGA AAACATGA | 13494 |
| 8834 | AUGUUUGC A CCCACUCU | 4746 | AGAGTGGG GGCTAGCTACAACGA GCAAACAT | 13495 |
| 8838 | UUGCACCC A CUCUAUGG | 4747 | CCATAGAG GGCTAGCTACAACGA GGGTGCAA | 13496 |
| 8843 | CCCACUCU A UGGGUAAG | 4748 | CTTACCCA GGCTAGCTACAACGA AGAGTGGG | 13497 |
| 8847 | CUCUAUGG G UAAGGAUG | 4749 | CATCCTTA GGCTAGCTACAACGA CCATAGAG | 13498 |
| 8853 | GGGUAAGG A UGAUUCUG | 4750 | CAGAATCA GGCTAGCTACAACGA CCTTACCC | 13499 |
| 8856 | UAAGGAUG A UUCUGAUG | 4751 | CATCAGAA GGCTAGCTACAACGA CATCCTTA | 13500 |
| 8862 | UGAUUCUG A UGACUCAC | 4752 | GTGAGTCA GGCTAGCTACAACGA CAGAATCA | 13501 |
| 8865 | UUCUGAUG A CUCACUUC | 4753 | GAAGTGAG GGCTAGCTACAACGA CATCAGAA | 13502 |
| 8869 | GAUGACUC A CUUCUUCU | 4754 | AGAAGAAG GGCTAGCTACAACGA GAGTCATC | 13503 |
| 8880 | UCUUCUCC A UCCUUCUA | 4755 | TAGAAGGA GGCTAGCTACAACGA GGAGAAGA | 13504 |
| 8889 | UCCUUCUA G CCCAGGAG | 4756 | CTCCTGGG GGCTAGCTACAACGA TAGAAGGA | 13505 |
| 8897 | GCCCAGGA G CAACUUGA | 4757 | TCAAGTTG GGCTAGCTACAACGA TCCTGGGC | 13506 |
| 8900 | CAGGAGCA A CUUGAGAA | 4758 | TTCTCAAG GGCTAGCTACAACGA TGCTCCTG | 13507 |
| 8910 | UUGAGAAA G CCCUAGAC | 4759 | GTCTAGGG GGCTAGCTACAACGA TTTCTCAA | 13508 |
| 8917 | AGCCCUAG A CUGCCAGA | 4760 | TCTGGCAG GGCTAGCTACAACGA CTAGGGCT | 13509 |
| 8920 | CCUAGACU G CCAGAUCU | 4761 | AGATCTGG GGCTAGCTACAACGA AGTCTAGG | 13510 |
| 8925 | ACUGCCAG A UCUACGGG | 4762 | CCCGTAGA GGCTAGCTACAACGA CTGGCAGT | 13511 |
| 8929 | CCAGAUCU A CGGGGCUU | 4763 | AAGCCCCG GGCTAGCTACAACGA AGATCTGG | 13512 |
| 8934 | UCUACGGG G CUUGUUAC | 4764 | GTAACAAG GGCTAGCTACAACGA CCCGTAGA | 13513 |
| 8938 | CGGGGCUU G UUACUCCA | 4765 | TGGAGTAA GGCTAGCTACAACGA AAGCCCCG | 13514 |
| 8941 | GGCUUGUU A CUCCAUUG | 4766 | CAATGCAG GGCTAGCTACAACGA AACAAGCC | 13515 |
| 8946 | GUUACUCC A UUGAGCCA | 4767 | TGGCTCAA GGCTAGCTACAACGA GGAGTAAC | 13516 |
| 8951 | UCCAUUGA G CCACUUGA | 4768 | TCAAGTGG GGCTAGCTACAACGA TCAATGGA | 13517 |
| 8954 | AUUGAGCC A CUUGACCU | 4769 | AGGTCAAG GGCTAGCTACAACGA GGCTCAAT | 13518 |
| 8959 | GCCACUUG A CCUACCUC | 4770 | GAGGTAGG GGCTAGCTACAACGA CAAGTGGC | 13519 |
| 8963 | CUUGACCU A CCUCAGAU | 4771 | ATCTGAGG GGCTAGCTACAACGA AGGTCAAG | 13520 |
| 8970 | UACCUCAG A UCAUUCAG | 4772 | CTGAATGA GGCTAGCTACAACGA CTGAGGTA | 13521 |
| 8973 | CUCAGAUC A UUCAGCGA | 4773 | TCGCTGAA GGCTAGCTACAACGA GATCTGAG | 13522 |
| 8978 | AUCAUUCA G CGACUCCA | 4774 | TGGAGTCG GGCTAGCTACAACGA TGAATGAT | 13523 |
| 8981 | AUUCAGCG A CUCCAUGG | 4775 | CCATGGAG GGCTAGCTACAACGA CGCTGAAT | 13524 |
| 8986 | GCGACUCC A UGGUCUUA | 4776 | TAAGACCA GGCTAGCTACAACGA GGAGTCGC | 13525 |
| 8989 | ACUCCAUG G UCUUAGCG | 4777 | CGCTAAGA GGCTAGCTACAACGA CATGGAGT | 13526 |
| 8995 | UGGUCUUA G CGCAUUUU | 4778 | AAAATGCG GGCTAGCTACAACGA TAAGACCA | 13527 |
| 8997 | GUCUUAGC G CAUUUUCA | 4779 | TGAAAATG GGCTAGCTACAACGA GCTAAGAC | 13528 |
| 8999 | CUUAGCGC A UUUUCACU | 4780 | AGTGAAAA GGCTAGCTACAACGA GCGCTAAG | 13529 |
| 9005 | GCAUUUUC A CUCCAUAG | 4781 | CTATGGAG GGCTAGCTACAACGA GAAAATGC | 13530 |
| 9010 | UUCACUCC A UAGUUACU | 4782 | AGTAACTA GGCTAGCTACAACGA GGAGTGAA | 13531 |
| 9013 | ACUCCAUA G UUACUCCC | 4783 | GGGAGTAA GGCTAGCTACAACGA TATGGAGT | 13532 |
| 9016 | CCAUAGUU A CUCCCCAG | 4784 | CTGGGGAG GGCTAGCTACAACGA AACTATGG | 13533 |
| 9025 | CUCCCCAG G UGAAAUCA | 4785 | TGATTTCA GGCTAGCTACAACGA CTGGGGAG | 13534 |
| 9030 | CAGGUGAA A UCAAUAGG | 4786 | CCTATTGA GGCTAGCTACAACGA TTCACCTG | 13535 |
| 9034 | UGAAAUCA A UAGGGUGG | 4787 | CCACCCTA GGCTAGCTACAACGA TGATTTCA | 13536 |
| 9039 | UCAAUAGG G UGGCAUCA | 4788 | TGATGCCA GGCTAGCTACAACGA CCTATTGA | 13537 |
| 9042 | AUAGGGUG G CAUCAUGC | 4789 | GCATGATG GGCTAGCTACAACGA CACCCTAT | 13538 |
| 9044 | AGGGUGGC A UCAUGCCU | 4790 | AGGCATGA GGCTAGCTACAACGA GCCACCCT | 13539 |
| 9047 | GUGGCAUC A UGCCUCAG | 4791 | CTGAGGCA GGCTAGCTACAACGA GATGCCAC | 13540 |
| 9049 | GGCAUCAU G CCUCAGGA | 4792 | TCCTGAGG GGCTAGCTACAACGA ATGATGCC | 13541 |
| 9059 | CUCAGGAA A CUUGGGGU | 4793 | ACCCCAAG GGCTAGCTACAACGA TTCCTGAG | 13542 |
| 9066 | AACUUGGG G UACCACCC | 4794 | GGGTGGTA GGCTAGCTACAACGA CCCAAGTT | 13543 |
| 9068 | CUUGGGGU A CCACCCUU | 4795 | AAGGGTGG GGCTAGCTACAACGA ACCCCAAG | 13544 |
| 9071 | GGGGUACC A CCCUUGCG | 4796 | CGCAAGGG GGCTAGCTACAACGA GGTACCCC | 13545 |
| 9077 | CCACCCUU G CGAACCUG | 4797 | CAGGTTCG GGCTAGCTACAACGA AAGGGTGG | 13546 |
| 9081 | CCUUGCGA A CCUGGAGA | 4798 | TCTCCAGG GGCTAGCTACAACGA TCGCAAGG | 13547 |
| 9089 | ACCUGGAG A CAUCGGGC | 4799 | GCCCGATG GGCTAGCTACAACGA CTCCAGGT | 13548 |
| 9091 | CUGGAGAC A UCGGGCCA | 4800 | TGGCCCGA GGCTAGCTACAACGA GTCTCCAG | 13549 |
| 9096 | GACAUCGG G CCAGAAGU | 4801 | ACTTCTGG GGCTAGCTACAACGA CCGATGTC | 13550 |
| 9103 | GGCCAGAA G UGUUCGCG | 4802 | CGCGAACA GGCTAGCTACAACGA TTCTGGCC | 13551 |
| 9105 | CCAGAAGU G UUCGCGCU | 4803 | AGCGCGAA GGCTAGCTACAACGA ACTTCTGG | 13552 |
| 9109 | AAGUGUUC G CGCUAAGC | 4804 | GCTTAGCG GGCTAGCTACAACGA GAACACTT | 13553 |
| 9111 | GUGUUCGC G CUAAGCUA | 4805 | TAGCTTAG GGCTAGCTACAACGA GCGAACAC | 13554 |
| 9116 | CGCGCUAA G CUACUGUC | 4806 | GACAGTAG GGCTAGCTACAACGA TTAGCGCG | 13555 |
| 9119 | GCUAAGCU A CUGUCCCA | 4807 | TGGGACAG GGCTAGCTACAACGA AGCTTAGC | 13556 |
| 9122 | AAGCUACU G UCCCAGGG | 4808 | CCCTGGGA GGCTAGCTACAACGA AGTAGCTT | 13557 |
| 9138 | GGGGGAGG G CCGCCACC | 4809 | GGTGGCGG GGCTAGCTACAACGA CCTCCCCC | 13558 |
| 9141 | GGAGGGCC G CCACCUGU | 4810 | ACAGGTGG GGCTAGCTACAACGA GGCCCTCC | 13559 |
| 9144 | GGGCCGCC A CCUGUGGC | 4811 | GCCACAGG GGCTAGCTACAACGA GGCGGCCC | 13560 |
| 9148 | CGCCACCU G UGGCAGGU | 4812 | ACCTGCCA GGCTAGCTACAACGA AGGTGGCG | 13561 |
| 9151 | CACCUGUG G CAGGUACC | 4813 | GGTACCTG GGCTAGCTACAACGA CACAGGTG | 13562 |
| 9155 | UGUGGCAG G UACCUCUU | 4814 | AAGAGGTA GGCTAGCTACAACGA CTGCCACA | 13563 |
| 9157 | UGGCAGGU A CCUCUUCA | 4815 | TGAAGAGG GGCTAGCTACAACGA ACCTGCCA | 13564 |
| 9166 | CCUCUUCA A CUGGGCAG | 4816 | CTGCCCAG GGCTAGCTACAACGA TGAAGAGG | 13565 |
| 9171 | UCAACUGG G CAGUAAAG | 4817 | CTTTACTG GGCTAGCTACAACGA CCAGTTGA | 13566 |
| 9174 | ACUGGGCA G UAAAGACC | 4818 | GGTCTTTA GGCTAGCTACAACGA TGCCCAGT | 13567 |
| 9180 | CAGUAAAG A CCAAACUC | 4819 | GAGTTTGG GGCTAGCTACAACGA CTTTACTG | 13568 |
| 9185 | AAGACCAA A CUCAAACU | 4820 | AGTTTGAG GGCTAGCTACAACGA TTGGTCTT | 13569 |
| 9191 | AAACUCAA A CUCACUCC | 4821 | GGAGTGAG GGCTAGCTACAACGA TTGAGTTT | 13570 |
| 9195 | UCAAACUC A CUCCAAUC | 4822 | GATTGGAG GGCTAGCTACAACGA GAGTTTGA | 13571 |
| 9201 | UCACUCCA A UCCCAGCU | 4823 | AGCTGGGA GGCTAGCTACAACGA TGGAGTGA | 13572 |
| 9207 | CAAUCCCA G CUGCGUCU | 4824 | AGACGCAG GGCTAGCTACAACGA TGGGATTG | 13573 |
| 9210 | UCCCAGCU G CGUCUCAG | 4825 | CTGAGACG GGCTAGCTACAACGA AGCTGGGA | 13574 |
| 9212 | CCAGCUGC G UCUCAGUU | 4826 | AACTGAGA GGCTAGCTACAACGA GCAGCTGG | 13575 |
| 9218 | GCGUCUCA G UUGGACUU | 4827 | AAGTCCAA GGCTAGCTACAACGA TGAGACGC | 13576 |
| 9223 | UCAGUUGG A CUUGUCCA | 4828 | TGGACAAG GGCTAGCTACAACGA CCAACTGA | 13577 |
| 9227 | UUGGACUU G UCCAACUG | 4829 | CAGTTGGA GGCTAGCTACAACGA AAGTCCAA | 13578 |
| 9232 | CUUGUCCA A CUGGUUCG | 4830 | CGAACCAG GGCTAGCTACAACGA TGGACAAG | 13579 |
| 9236 | UCCAACUG G UUCGUUGC | 4831 | GCAACGAA GGCTAGCTACAACGA CAGTTGGA | 13580 |
| 9240 | ACUGGUUC G UUGCUGGC | 4832 | GCCAGCAA GGCTACCTACAACGA GAACCAGT | 13581 |
| 9243 | GGUUCGUU G CUGGCUAC | 4833 | GTACCCAG GGCTAGCTACAACGA AACGAACC | 13582 |
| 9247 | CGUUGCUG G CUACAGCG | 4834 | CGCTGTAG GGCTAGCTACAACGA CAGCAACG | 13583 |
| 9250 | UGCUGGCU A CAGCGGGG | 4835 | CCCCGCTG GGCTAGCTACAACGA AGCCAGCA | 13584 |
| 9253 | UGGCUACA G CGGGGGAG | 4836 | CTCCCCCG GGCTAGCTACAACGA TGTAGCCA | 13585 |
| 9262 | CGGGGGAG A CGUGUAUC | 4837 | GATACACG GGCTAGCTACAACGA CTCCCCCG | 13586 |
| 9264 | GGGGAGAC G UGUAUCAC | 4838 | GTGATACA GGCTAGCTACAACGA GTCTCCCC | 13587 |
| 9266 | GGAGACGU G UAUCACAG | 4839 | CTGTGATA GGCTAGCTACAACGA ACGTCTCC | 13588 |
| 9268 | AGACGUGU A UCACAGCC | 4840 | GGCTGTGA GGCTAGCTACAACGA ACACGTCT | 13589 |
| 9271 | CGUGUAUC A CAGCCUGU | 4841 | ACAGGCTG GGCTAGCTACAACGA GATACACG | 13590 |
| 9274 | GUAUCACA G CCUGUCUC | 4842 | GAGACAGG GGCTAGCTACAACGA TGTGATAC | 13591 |
| 9278 | CACAGCCU G UCUCGUGC | 4843 | GCACGAGA GGCTAGCTACAACGA AGGCTGTG | 13592 |
| 9283 | CCUGUCUC G UGCCCGAC | 4844 | GTCGGGCA GGCTAGCTACAACGA GAGACAGG | 13593 |
| 9285 | UGUCUCGU G CCCGACCC | 4845 | GGGTCGGG GGCTAGCTACAACGA ACGAGACA | 13594 |
| 9290 | CGUGCCCG A CCCCGCUG | 4846 | CAGCGGGG GGCTAGCTACAACGA CGGGCACG | 13595 |
| 9295 | CCGACCCC G CUGGUUCA | 4847 | TGAACCAG GGCTAGCTACAACGA GGGGTCGG | 13596 |
| 9299 | CCCCGCUG G UUCAUGCU | 4848 | AGCATGAA GGCTAGCTACAACGA CAGCGGGG | 13597 |
| 9303 | GCUGGUUC A UGCUUUGC | 4849 | GCAAAGCA GGCTAGCTACAACGA GAACCAGC | 13598 |
| 9305 | UGGUUCAU G CUUUGCCU | 4850 | AGGCAAAG GGCTAGCTACAACGA ATGAACCA | 13599 |
| 9310 | CAUGCUUU G CCUACUCC | 4851 | GGAGTAGG GGCTAGCTACAACGA AAAGCATG | 13600 |
| 9314 | CUUUGCCU A CUCCUACU | 4852 | AGTAGGAG GGCTAGCTACAACGA AGGCAAAG | 13601 |
| 9320 | CUACUCCU A CUCUCCGU | 4853 | ACGGAGAG GGCTAGCTACAACGA AGGAGTAG | 13602 |
| 9327 | UACUCUCC G UAGGGGUA | 4854 | TACCCCTA GGCTAGCTACAACGA GGAGAGTA | 13603 |
| 9333 | CCGUAGGG G UAGGCAUC | 4855 | GATGCCTA GGCTAGCTACAACGA CCCTACGG | 13604 |
| 9337 | AGGGGUAG G CAUCUACC | 4856 | GGTAGATG GGCTAGCTACAACGA CTACCCCT | 13605 |
| 9339 | GGGUAGGC A UCUACCUG | 4857 | CAGGTAGA GGCTAGCTACAACGA GCCTACCC | 13606 |
| 9343 | AGGCAUCU A CCUGCUCC | 4858 | GGAGCAGG GGCTAGCTACAACGA AGATGCCT | 13607 |
| 9347 | AUCUACCU G CUCCCCAA | 4859 | TTGGGGAG GGCTAGCTACAACGA AGGTAGAT | 13608 |
| 9355 | GCUCCCCA A CCGAUGAA | 4860 | TTCATCGG GGCTAGCTACAACGA TGGGGAGC | 13609 |
| 9359 | CCCAACCG A UGAACAGG | 4861 | CCTGTTCA GGCTAGCTACAACGA CGGTTGGG | 13610 |
| 9363 | ACCGAUGA A CAGGGAGC | 4862 | GCTCCCTG GGCTAGCTACAACGA TCATCGGT | 13611 |
| 9370 | AACAGGGA G CUAAACAC | 4863 | GTGTTTAG GGCTAGCTACAACGA TCCCTGTT | 13612 |
| 9375 | GGAGCUAA A CACUCCAG | 4864 | CTGGAGTG GGCTAGCTACAACGA TTAGCTCC | 13613 |
| 9377 | AGCUAAAC A CUCCAGGC | 4865 | GCCTGGAG GGCTAGCTACAACGA GTTTAGCT | 13614 |
| 9384 | CACUCCAG G CCAAUAGG | 4866 | CCTATTGG GGCTAGCTACAACGA CTGGAGTG | 13615 |
| 9388 | CCACGCCA A UAGGCCAU | 4867 | ATGGCCTA GGCTAGCTACAACGA TGGCCTGG | 13616 |
| 9392 | GCCAAUAG G CCAUCCCG | 4868 | CGGGATGG GGCTAGCTACAACGA CTATTGGC | 13617 |
| 9395 | AAUAGGCC A UCCCGUUU | 4869 | AAACGGGA GGCTAGCTACAACGA GGCCTATT | 13618 |
| 9400 | GCCAUCCC G UUUUUUUU | 4870 | AAAAAAAA GGCTAGCTACAACGA GGGATGGC | 13619 |

Input Sequence = HPCK1S1.
Cut Site = R/Y
Arm Length = 8.
Core Sequence = GGCTAGCTACAACGA
HPCK1S1 Hepatitis C virus (strain HCV-1b, clone HCV-K1-S1), complete genome; acc# gi|1030702|dbj|D50483.1; 9410 nt

[0567] TABLE XIX

HCV minus strand DNAzyme and Substrate Sequence

| | | | | |
|---|---|---|---|---|
| Pos | Substrate | Seq ID | DNAzyme | Seq ID |

| | | | | |
|---|---|---|---|---|
| 9413 | AAAAAAAA A CGGGAUGG | 4871 | CCATCCCG GGCTAGCTACAACGA TTTTTTTT | 13620 |
| 9408 | AAAACGGG A UGGCCUAU | 4872 | ATAGGCCA GGCTAGCTACAACGA CCCGTTTT | 13621 |
| 9405 | ACGGGAUG G CCUAUUGG | 4873 | CCAATAGG GGCTAGCTACAACGA CATCCCGT | 13622 |
| 9401 | GAUGGCCU A UUGGCCUG | 4874 | CAGGCCAA GGCTAGCTACAACGA AGGCCATC | 13623 |
| 9397 | GCCUAUUG G CCUGGAGU | 4875 | ACTCCAGG GGCTAGCTACAACGA CAATAGGC | 13624 |
| 9390 | GGCCUGGA G UGUUUAGC | 4876 | GCTAAACA GGCTAGCTACAACGA TCCAGGCC | 13625 |
| 9388 | CCUGGAGU G UUUAGCUC | 4877 | GAGCTAAA GGCTAGCTACAACGA ACTCCAGG | 13626 |
| 9383 | AGUGUUUA G CUCCCUGU | 4878 | ACAGGGAG GGCTAGCTACAACGA TAAACACT | 13627 |
| 9376 | AGCUCCCU G UUCAUCGG | 4879 | CCGATGAA GGCTAGCTACAACGA AGGGAGCT | 13628 |
| 9372 | CCCUGUUC A UCGGUUGG | 4880 | CCAACCGA GGCTAGCTACAACGA GAACAGGG | 13629 |
| 9368 | GUUCAUCG G UUGGGGAG | 4881 | CTCCCCAA GGCTAGCTACAACGA CGATGAAC | 13630 |
| 9360 | GUUGGGGA G CAGGUAGA | 4882 | TCTACCTG GGCTAGCTACAACGA TCCCCAAC | 13631 |
| 9356 | GGGAGCAG G UAGAUGCC | 4883 | GGCATCTA GGCTAGCTACAACGA CTGCTCCC | 13632 |
| 9352 | GCAGGUAG A UGCCUACC | 4884 | GGTAGGCA GGCTAGCTACAACGA CTACCTGC | 13633 |
| 9350 | AGGUAGAU G CCUACCCC | 4885 | GGGGTAGG GGCTAGCTACAACGA ATCTACCT | 13634 |
| 9346 | AGAUGCCU A CCCCUACG | 4886 | CGTAGGGG GGCTAGCTACAACGA AGGCATCT | 13635 |
| 9340 | CUACCCCU A CGGAGAGU | 4887 | ACTCTCCG GGCTAGCTACAACGA AGGGGTAG | 13636 |
| 9333 | UACGGAGA G UAGGAGUA | 4888 | TACTCCTA GGCTAGCTACAACGA TCTCCGTA | 13637 |
| 9327 | GAGUAGGA G UAGGCAAA | 4889 | TTTGCCTA GGCTAGCTACAACGA TCCTACTC | 13638 |
| 9323 | AGGAGUAG G CAAAGCAU | 4890 | ATGCTTTG GGCTAGCTACAACGA CTACTCCT | 13639 |
| 9318 | UAGGCAAA G CAUGAACC | 4891 | GGTTCATG GGCTAGCTACAACGA TTTGCCTA | 13640 |
| 9316 | GGCAAAGC A UGAACCAG | 4892 | CTGGTTCA GGCTAGCTACAACGA GCTTTGCC | 13641 |
| 9312 | AAGCAUGA A CCAGCGGG | 4893 | CCCGCTGG GGCTAGCTACAACGA TCATGCTT | 13642 |
| 9308 | AUGAACCA G CGGGGUCG | 4894 | CGACCCCG GGCTAGCTACAACGA TGGTTCAT | 13643 |
| 9303 | CCAGCGGG G UCGGGCAC | 4895 | GTGCCCGA GGCTAGCTACAACGA CCCGCTGG | 13644 |
| 9298 | GGGGUCGG G CACGAGAC | 4896 | GTCTCGTG GGCTAGCTACAACGA CCGACCCC | 13645 |
| 9296 | GGUCGGGC A CGAGACAG | 4897 | CTGTCTCG GGCTAGCTACAACGA GCCCGACC | 13646 |
| 9291 | GGCACGAG A CAGGCUGU | 4898 | ACAGCCTG GGCTAGCTACAACGA CTCGTGCC | 13647 |
| 9287 | CGAGACAG G CUGUGAUA | 4899 | TATCACAG GGCTAGCTACAACGA CTGTCTCG | 13648 |
| 9284 | GACAGGCU G UGAUACAC | 4900 | GTGTATCA GGCTAGCTACAACGA AGCCTGTC | 13649 |
| 9281 | AGGCUGUG A UACACGUC | 4901 | GACGTGTA GGCTAGCTACAACGA CACAGCCT | 13650 |
| 9279 | GCUGUGAU A CACGUCUC | 4902 | GAGACGTG GGCTAGCTACAACGA ATCACAGC | 13651 |
| 9277 | UGUGAUAC A CGUCUCCC | 4903 | GGGAGACG GGCTAGCTACAACGA GTATCACA | 13652 |
| 9275 | UGAUACAC G UCUCCCCC | 4904 | GGGGGAGA GGCTAGCTACAACGA GTGTATCA | 13653 |
| 9266 | UCUCCCCC G CUGUAGCC | 4905 | GGCTACAG GGCTAGCTACAACGA GGGGGAGA | 13654 |
| 9263 | CCCCCGCU G UAGCCAGC | 4906 | GCTGGCTA GGCTAGCTACAACGA AGCGGGGG | 13655 |
| 9260 | CCGCUGUA G CCAGCAAC | 4907 | GTTGCTGG GGCTAGCTACAACGA TACAGCGG | 13656 |
| 9256 | UGUAGCCA G CAACGAAC | 4908 | GTTCGTTG GGCTAGCTACAACGA TGGCTACA | 13657 |
| 9253 | AGCCAGCA A CGAACCAG | 4909 | CTGGTTCG GGCTAGCTACAACGA TGCTGGCT | 13658 |
| 9249 | AGCAACGA A CCAGUUGG | 4910 | CCAACTGG GGCTAGCTACAACGA TCGTTGCT | 13659 |
| 9245 | ACGAACCA G UUGGACAA | 4911 | TTGTCCAA GGCTAGCTACAACGA TGGTTCGT | 13660 |
| 9240 | CCAGUUGG A CAAGUCCA | 4912 | TGGACTTG GGCTAGCTACAACGA CCAACTGG | 13661 |
| 9236 | UUGGACAU G UCCAACUG | 4913 | CAGTTGGA GGCTAGCTACAACGA TTGTCCAA | 13662 |
| 9231 | CAAGUCCA A CUGAGACG | 4914 | CGTCTCAG GGCTAGCTACAACGA TGGACTTG | 13663 |
| 9225 | CAACUGAG A CGCAGCUG | 4915 | CAGCTGCG GGCTAGCTACAACGA CTCAGTTG | 13664 |
| 9223 | ACUGAGAC G CAGCUGGG | 4916 | CCCAGCTG GGCTAGCTACAACGA GTCTCAGT | 13665 |
| 9220 | GAGACGCA G CUGGGAUU | 4917 | AATCCCAG GGCTAGCTACAACGA TGCGTCTC | 13666 |
| 9214 | CAGCUGGG A UUGGAGUG | 4918 | CACTCCAA GGCTAGCTACAACGA CCCAGCTG | 13667 |
| 9208 | GGAUUGGA G UGAGUUUG | 4919 | CAAACTCA GGCTAGCTACAACGA TCCAATCC | 13668 |
| 9204 | UGGAGUGA G UUUGAGUU | 4920 | AACTCAAA GGCTAGCTACAACGA TCACTCCA | 13669 |
| 9198 | GAGUUUGA G UUUGGUCU | 4921 | AGACCAAA GGCTAGCTACAACGA TCAAACTC | 13670 |
| 9193 | UGAGUUUG G UCUUUACU | 4922 | AGTAAAGA GGCTAGCTACAACGA CAAACTCA | 13671 |
| 9187 | UGGUCUUU A CUGCCCAG | 4923 | CTGGGCAG GGCTAGCTACAACGA AAAGACCA | 13672 |
| 9184 | UCUUUACU G CCCAGUUG | 4924 | CAACTGGG GGCTAGCTACAACGA AGTAAAGA | 13673 |
| 9179 | ACUGCCCA G UUGAAGAG | 4925 | CTCTTCAA GGCTAGCTACAACGA TGGGCAGT | 13674 |
| 9170 | UUGAAGAG G UACCUGCC | 4926 | GGCAGGTA GGCTAGCTACAACGA CTCTTCAA | 13675 |
| 9168 | GAAGAGGU A CCUGCCAC | 4927 | GTGGCAGG GGCTAGCTACAACGA ACCTCTTC | 13676 |
| 9164 | AGGUACCU G CCACAGGU | 4928 | ACCTGTGG GGCTAGCTACAACGA AGGTACCT | 13677 |
| 9161 | UACCUGCC A CAGGUGGC | 4929 | GCCACCTG GGCTAGCTACAACGA GGCAGGTA | 13678 |
| 9157 | UGCCACAG G UGGCGGCC | 4930 | GGCCGCCA GGCTAGCTACAACGA CTGTGGCA | 13679 |
| 9154 | CACAGGUG G CGGCCCUC | 4931 | GAGGGCCG GGCTAGCTACAACGA CACCTGTG | 13680 |
| 9151 | AGGUGGCG G CCCUCCCC | 4932 | GGGGAGGG GGCTAGCTACAACGA CGCCACCT | 13681 |
| 9135 | CCCCUGGG A CAGUAGCU | 4933 | AGCTACTG GGCTAGCTACAACGA CCCAGGGG | 13682 |
| 9132 | CUGGGACA G UAGCUUAG | 4934 | CTAAGCTA GGCTAGCTACAACGA TGTCCCAG | 13683 |
| 9129 | GGACAGUA G CUUAGCGC | 4935 | GCGCTAAG GGCTAGCTACAACGA TACTGTCC | 13684 |
| 9124 | GUAGCUUA G CGCGAACA | 4936 | TGTTCGCG GGCTAGCTACAACGA TAAGCTAC | 13685 |
| 9122 | AGCUUAGC G CGAACACU | 4937 | AGTGTTCG GGCTAGCTACAACGA GCTAAGCT | 13686 |
| 9118 | UAGCGCGA A CACUUCUG | 4938 | CAGAAGTG GGCTAGCTACAACGA TCGCGCTA | 13687 |
| 9116 | GCGCGAAC A CUUCUGGC | 4939 | GCCAGAAG GGCTAGCTACAACGA GTTCGCGC | 13688 |
| 9109 | CACUUCUG G CCCGAUGU | 4940 | ACATCGGG GGCTAGCTACAACGA CAGAAGTG | 13689 |
| 9104 | CUGGCCCG A UGUCUCCA | 4941 | TGGAGACA GGCTAGCTACAACGA CGGGCCAG | 13690 |
| 9102 | GGCCCGAU G UCUCCAGG | 4942 | CCTGGAGA GGCTAGCTACAACGA ATCGGGCC | 13691 |
| 9094 | GUCUCCAG G UUCGCAAG | 4943 | CTTGCGAA GGCTAGCTACAACGA CTGGAGAC | 13692 |
| 9090 | CCAGGUUC G CAAGGGUG | 4944 | CACCCTTG GGCTAGCTACAACGA GAACCTGG | 13693 |
| 9084 | UCGCAAGG G UGGUACCC | 4945 | GGGTACCA GGCTAGCTACAACGA CCTTGCGA | 13694 |
| 9081 | CAAGGGUG G UACCCCAA | 4946 | TTGGGGTA GGCTAGCTACAACGA CACCCTTG | 13695 |
| 9079 | AGGGUGGU A CCCCAAGU | 4947 | ACTTGGGG GGCTAGCTACAACGA ACCACCCT | 13696 |
| 9072 | UACCCCAA G UUUCCUGA | 4948 | TCAGGAAA GGCTAGCTACAACGA TTGGGGTA | 13697 |
| 9062 | UUCCUGAG G CAUGAUGC | 4949 | GCATCATG GGCTAGCTACAACGA CTCAGGAA | 13698 |
| 9060 | CCUGAGGC A UGAUGCCA | 4950 | TGGCATCA GGCTAGCTACAACGA GCCTCAGG | 13699 |
| 9057 | GAGGCAUG A UGCCACCC | 4951 | GGGTGGCA GGCTAGCTACAACGA CATGCCTC | 13700 |
| 9055 | GGCAUGAU G CCACCCUA | 4952 | TAGGGTGG GGCTAGCTACAACGA ATCATGCC | 13701 |
| 9052 | AUGAUGCC A CCCUAUUG | 4953 | CAATAGGG GGCTAGCTACAACGA GGCATCAT | 13702 |
| 9047 | GCCACCCU A UUGAUUUC | 4954 | GAAATCAA GGCTAGCTACAACGA AGGGTGGC | 13703 |
| 9043 | CCCUAUUG A UUUCACCU | 4955 | AGGTGAAA GGCTAGCTACAACGA CAATAGGG | 13704 |
| 9038 | UUGAUUUC A CCUGGGGA | 4956 | TCCCCAGG GGCTAGCTACAACGA GAAATCAA | 13705 |
| 9029 | CCUGGGGA G UAACUAUG | 4957 | CATAGTTA GGCTAGCTACAACGA TCCCCAGG | 13706 |
| 9026 | GGGGAGUA A CUAUGGAG | 4958 | CTCCATAG GGCTAGCTACAACGA TACTCCCC | 13707 |
| 9023 | GAGUAACU A UGGAGUGA | 4959 | TCACTCCA GGCTAGCTACAACGA AGTTACTC | 13708 |
| 9018 | ACUAUGGA G UGAAAAUG | 4960 | CATTTTCA GGCTAGCTACAACGA TCCATAGT | 13709 |
| 9012 | GAGUGAAA A UGCGCUAA | 4961 | TTAGCGCA GGCTAGCTACAACGA TTTCACTC | 13710 |
| 9010 | GUGAAAAU G CGCUAAGA | 4962 | TCTTAGCG GGCTAGCTACAACGA ATTTTCAC | 13711 |
| 9008 | GAAAAUGC G CUAAGACC | 4963 | GGTCTTAG GGCTAGCTACAACGA GCATTTTC | 13712 |
| 9002 | GCGCUAAG A CCAUGGAG | 4964 | CTCCATGG GGCTAGCTACAACGA CTTAGCGC | 13713 |
| 8999 | CUAAGACC A UGGAGUCG | 4965 | CGACTCCA GGCTAGCTACAACGA GGTCTTAG | 13714 |
| 8994 | ACCAUGGA G UCGCUGAA | 4966 | TTCAGCGA GGCTAGCTACAACGA TCCATGGT | 13715 |
| 8991 | AUGGAGUC G CUGAAUGA | 4967 | TCATTCAG GGCTAGCTACAACGA GACTCCAT | 13716 |
| 8986 | GUCGCUGA A UGAUCUGA | 4968 | TCAGATCA GGCTAGCTACAACGA TCAGCGAC | 13717 |
| 8983 | GCUGAAUG A UCUGAGGU | 4969 | ACCTCAGA GGCTAGCTACAACGA CATTCAGC | 13718 |
| 8976 | GAUCUGAG G UAGGUCAA | 4970 | TTGACCTA GGCTAGCTACAACGA CTCAGATC | 13719 |
| 8972 | UGAGGUAG G UCAAGUGG | 4971 | CCACTTGA GGCTAGCTACAACGA CTACCTCA | 13720 |
| 8967 | UAGGUCAA G UGGCUCAA | 4972 | TTGAGCCA GGCTAGCTACAACGA TTGACCTA | 13721 |
| 8964 | GUCAAGUG G CUCAAUGG | 4973 | CCATTGAG GGCTAGCTACAACGA CACTTGAC | 13722 |
| 8959 | GUGGCUCA A UGGAGUAA | 4974 | TTACTCCA GGCTAGCTACAACGA TGAGCCAC | 13723 |
| 8954 | UCAAUGGA G UAACAAGC | 4975 | GCTTGTTA GGCTAGCTACAACGA TCCATTGA | 13724 |
| 8951 | AUGGAGUA A CAAGCCCC | 4976 | GGGGCTTG GGCTAGCTACAACGA TACTCCAT | 13725 |
| 8947 | AGUAACAA G CCCCGUAG | 4977 | CTACGGGG GGCTAGCTACAACGA TTGTTACT | 13726 |
| 8942 | CAAGCCCC G UAGAUCUG | 4978 | CAGATCTA GGCTAGCTACAACGA GGGGCTTG | 13727 |
| 8938 | CCCCGUAG A UCUGGCAG | 4979 | CTGCCAGA GGCTAGCTACAACGA CTACGGGG | 13728 |
| 8933 | UAGAUCUG G CAGUCUAG | 4980 | CTAGACTG GGCTAGCTACAACGA CAGATCTA | 13729 |
| 8930 | AUCUGGCA G UCUAGGGC | 4981 | GCCCTAGA GGCTAGCTACAACGA TGCCAGAT | 13730 |
| 8923 | AGUCUAGG G CUUUCUCA | 4982 | TGAGAAAG GGCTAGCTACAACGA CCTAGACT | 13731 |
| 8913 | UUUCUCAA G UUGCUCCU | 4983 | AGGAGCAA GGCTAGCTACAACGA TTGAGAAA | 13732 |
| 8910 | CUCAAGUU G CUCCUGGG | 4984 | CCCAGGAG GGCTAGCTACAACGA AACTTGAG | 13733 |
| 8902 | GCUCCUGG G CUAGAAGG | 4985 | CCTTCTAG GGCTAGCTACAACGA CCAGGAGC | 13734 |
| 8893 | CUAGAAGG A UGGAGAAG | 4986 | CTTCTCCA GGCTAGCTACAACGA CCTTCTAG | 13735 |
| 8882 | GAGAAGAA G UGAGUCAU | 4987 | ATGACTCA GGCTAGCTACAACGA TTCTTCTC | 13736 |
| 8878 | AGAAGUGA G UCAUCAGA | 4988 | TCTGATGA GGCTAGCTACAACGA TCACTTCT | 13737 |
| 8875 | AGUGAGUC A UCAGAAUC | 4989 | GATTCTGA GGCTAGCTACAACGA GACTCACT | 13738 |
| 8869 | UCAUCAGA A UCAUCCUU | 4990 | AAGGATGA GGCTAGCTACAACGA TCTGATGA | 13739 |
| 8866 | UCAGAAUC A UCCUUACC | 4991 | GGTAAGGA GGCTAGCTACAACGA GATTCTGA | 13740 |
| 8860 | UCAUCCUU A CCCAUAGA | 4992 | TCTATGGG GGCTAGCTACAACGA AAGGATGA | 13741 |
| 8856 | CCUUACCC A UAGAGUGG | 4993 | CCACTCTA GGCTAGCTACAACGA GGGTAAGG | 13742 |
| 8851 | CCCAUAGA G UGGGUGCA | 4994 | TGCACCCA GGCTAGCTACAACGA TCTATGGG | 13743 |
| 8847 | UAGAGUGG G UGCAAACA | 4995 | TGTTTGCA GGCTAGCTACAACGA CCACTCTA | 13744 |
| 8845 | GAGUGGGU G CAAACAUG | 4996 | CATGTTTG GGCTAGCTACAACGA ACCCACTC | 13745 |
| 8841 | GGGUGCAA A CAUGAUGA | 4997 | TCATCATG GGCTAGCTACAACGA TTGCACCC | 13746 |
| 8839 | GUGCAAAC A UGAUGAUG | 4998 | CATCATCA GGCTAGCTACAACGA GTTTGCAC | 13747 |
| 8836 | CAAACAUG A UGAUGUUG | 4999 | CAACATCA GGCTAGCTACAACGA CATGTTTG | 13748 |
| 8833 | ACAUGAUG A UGUUGCCU | 5000 | AGGCAACA GGCTAGCTACAACGA CATCATGT | 13749 |
| 8831 | AUGAUGAU G UUGCCUAG | 5001 | CTAGGCAA GGCTAGCTACAACGA ATCATCAT | 13750 |
| 8828 | AUGAUGUU G CCUAGCCA | 5002 | TGGCTAGG GGCTAGCTACAACGA AACATCAT | 13751 |
| 8823 | GUUGCCUA G CCAGGAGU | 5003 | ACTCCTGG GGCTAGCTACAACGA TAGGCAAC | 13752 |
| 8816 | AGCCAGGA G UUGACUGG | 5004 | CCAGTCAA GGCTAGCTACAACGA TCCTGGCT | 13753 |
| 8812 | AGGAGUUG A CUGGAGUG | 5005 | CACTCCAG GGCTAGCTACAACGA CAACTCCT | 13754 |
| 8806 | UGACUGGA G UGCUUCUA | 5006 | TAGAAGCA GGCTAGCTACAACGA TCCAGTCA | 13755 |
| 8804 | ACUGGAGU G CUUCUAGC | 5007 | GCTAGAAG GGCTAGCTACAACGA ACTCCAGT | 13756 |
| 8797 | UGCUUCUA G CUGUCUCC | 5008 | GGAGACAG GGCTAGCTACAACGA TAGAAGCA | 13757 |
| 8794 | UUCUAGCU G UCUCCCAC | 5009 | GTGGGAGA GGCTAGCTACAACGA AGCTAGAA | 13758 |
| 8787 | UGUCUCCC A CGCAGCCC | 5010 | GGGCTGCG GGCTAGCTACAACGA GGGAGACA | 13759 |
| 8785 | UCUCCCAC G CAGCCCGC | 5011 | GCGGGCTG GGCTAGCTACAACGA GTGGGAGA | 13760 |
| 8782 | CCCACGCA G CCCGCGCA | 5012 | TGCGCGGG GGCTAGCTACAACGA TGCGTGGG | 13761 |
| 8778 | CGCAGCCC G CGCAAGGG | 5013 | CCCTTGCG GGCTAGCTACAACGA GGGCTGCG | 13762 |
| 8776 | CAGCCCGC G CAAGGGGG | 5014 | CCCCCTTG GGCTAGCTACAACGA GCGGGCTG | 13763 |
| 8767 | CAAGGGGG G UGGUGGGG | 5015 | CCCCACCA GGCTAGCTACAACGA CCCCCTTG | 13764 |
| 8764 | GGGGGGUG G UGGGGUCA | 5016 | TGACCCCA GGCTAGCTACAACGA CACCCCCC | 13765 |
| 8759 | GUGGUGGG G UCACGGGU | 5017 | ACCCGTGA GGCTAGCTACAACGA CCCACCAC | 13766 |
| 8756 | GUGGGGUC A CGGGUGAG | 5018 | CTCACCCG GGCTAGCTACAACGA GACCCCAC | 13767 |
| 8752 | GGUCACGG G UGAGGUAG | 5019 | CTACCTCA GGCTAGCTACAACGA CCGTGACC | 13768 |
| 8747 | CGGGUGAG G UAGUACAC | 5020 | GTGTACTA GGCTAGCTACAACGA CTCACCCG | 13769 |
| 8744 | GUGAGGUA G UACACCCU | 5021 | AGGGTGTA GGCTAGCTACAACGA TACCTCAC | 13770 |
| 8742 | GAGGUAGU A CACCCUUU | 5022 | AAAGGGTG GGCTAGCTACAACGA ACTACCTC | 13771 |
| 8740 | GGUAGUAC A CCCUUUUG | 5023 | CAAAAGGG GGCTAGCTACAACGA GTACTACC | 13772 |
| 8732 | ACCCUUUU G CCAGAUGC | 5024 | GCATCTGG GGCTAGCTACAACGA AAAAGGGT | 13773 |
| 8727 | UUUGCCAG A UGCAUCGU | 5025 | ACGATGCA GGCTAGCTACAACGA CTGGCAAA | 13774 |
| 8725 | UGCCAGAU G CAUCGUGU | 5026 | ACACGATG GGCTAGCTACAACGA ATCTGGCA | 13775 |
| 8723 | CCAGAUGC A UCGUGUGC | 5027 | GCACACGA GGCTAGCTACAACGA GCATCTGG | 13776 |
| 8720 | GAUGCAUC G UGUGCAAC | 5028 | GTTGCACA GGCTAGCTACAACGA GATGCATC | 13777 |
| 8718 | UGCAUCGU G UGCAACUG | 5029 | CAGTTGCA GGCTAGCTACAACGA ACGATGCA | 13778 |
| 8716 | CAUCGUGU G CAACUGAU | 5030 | ATCAGTTG GGCTAGCTACAACGA ACACGATG | 13779 |
| 8713 | CGUGUGCA A CUGAUACG | 5031 | CGTATCAG GGCTAGCTACAACGA TGCACACG | 13780 |
| 8709 | UGCAACUG A UACGUUGG | 5032 | CCAACGTA GGCTAGCTACAACGA CAGTTGCA | 13781 |
| 8707 | CAACUGAU A CGUUGGAG | 5033 | CTCCAACG GGCTAGCTACAACGA ATCAGTTG | 13782 |
| 8705 | ACUCAUAC G UUGGAGGA | 5034 | TCCTCCAA GGCTAGCTACAACGA GTATCAGT | 13783 |
| 8696 | UUGCAGGA G CAUGAUGU | 5035 | ACATCATG GGCTAGCTACAACGA TCCTCCAA | 13784 |
| 8694 | GGAGGAGC A UGAUGUUA | 5036 | TAACATCA GGCTAGCTACAACGA GCTCCTCC | 13785 |
| 8691 | GGAGCAUG A UGUUAUCA | 5037 | TGATAACA GGCTAGCTACAACGA CATGCTCC | 13786 |
| 8689 | AGCAUGAU G UUAUCAAC | 5038 | GTTGATAA GGCTAGCTACAACGA ATCATGCT | 13787 |
| 8686 | AUGAUGUU A UCAACUCC | 5039 | GGAGTTGA GGCTAGCTACAACGA AACATCAT | 13788 |
| 8682 | UGUUAUCA A CUCCAAGU | 5040 | ACTTGGAG GGCTAGCTACAACGA TGATAACA | 13789 |
| 8675 | AACUCCAA G UCGUAUUC | 5041 | GAATACGA GGCTAGCTACAACGA TTGGAGTT | 13790 |
| 8672 | UCCAAGUC G UAUUCCGG | 5042 | CCGGAATA GGCTAGCTACAACGA CACTTGGA | 13791 |
| 8670 | CAAGUCGU A UUCCGGUU | 5043 | AACCGGAA GGCTAGCTACAACGA ACGACTTG | 13792 |
| 8664 | GUAUUCCG G UUGGGGCG | 5044 | CGCCCCAA GGCTAGCTACAACGA CGGAATAC | 13793 |
| 8658 | CGGUUGGG G CGGGUCCC | 5045 | GGGACCCG GGCTAGCTACAACGA CCCAACCG | 13794 |
| 8654 | UGGGGCGG G UCCCCGGG | 5046 | CCCGGGGA GGCTAGCTACAACGA CCGCCCCA | 13795 |
| 8641 | CGGGGGGG G CAGAGUAC | 5047 | GTACTCTG GGCTAGCTACAACGA CCCCCCCG | 13796 |
| 8636 | GGGGCAGA G UACCUAGU | 5048 | ACTAGGTA GGCTAGCTACAACGA TCTGCCCC | 13797 |
| 8634 | GGCAGAGU A CCUAGUCA | 5049 | TGACTAGG GGCTAGCTACAACGA ACTCTGCC | 13798 |
| 8629 | AGUACCUA G UCAUAGCC | 5050 | GGCTATGA GGCTAGCTACAACGA TAGGTACT | 13799 |
| 8626 | ACCUAGUC A UAGCCUCC | 5051 | GGAGGCTA GGCTAGCTACAACGA GACTAGGT | 13800 |
| 8623 | UAGUCAUA G CCUCCGUG | 5052 | CACGGAGG GGCTAGCTACAACGA TATGACTA | 13801 |
| 8617 | UAGCCUCC G UGAAGACU | 5053 | AGTCTTCA GGCTAGCTACAACGA GGAGGCTA | 13802 |
| 8611 | CCGUGAAG A CUCGUAGG | 5054 | CCTACGAG GGCTAGCTACAACGA CTTCACGG | 13803 |
| 8607 | GAAGACUC G UAGGCUCG | 5055 | CGAGCCTA GGCTAGCTACAACGA GAGTCTTC | 13804 |
| 8603 | ACUCGUAG G CUCGCCGC | 5056 | GCGGCGAG GGCTAGCTACAACGA CTACGAGT | 13805 |
| 8599 | GUAGGCUC G CCGCGUCC | 5057 | GGACGCGG GGCTAGCTACAACGA GAGCCTAC | 13806 |
| 8596 | GGCUCGCC G CGUCCUCU | 5058 | AGAGGACG GGCTAGCTACAACGA GGCGAGCC | 13807 |
| 8594 | CUCGCCGC G UCCUCUUG | 5059 | CAAGAGGA GGCTAGCTACAACGA GCGGCGAG | 13808 |
| 8584 | CCUCUUGG G UCCCCGCA | 5060 | TGCGGGGA GGCTAGCTACAACGA CCAAGAGG | 13809 |
| 8578 | GGGUCCCC G CACUUUCA | 5061 | TGAAAGTG GGCTAGCTACAACGA GGGGACCC | 13810 |
| 8576 | GUCCCCGC A CUUUCACA | 5062 | TGTGAAAG GGCTAGCTACAACGA GCGGGGAC | 13811 |
| 8570 | GCACUUUC A CAGAUAAC | 5063 | GTTATCTG GGCTAGCTACAACGA GAAAGTGC | 13812 |
| 8566 | UUUCACAG A UAACGACC | 5064 | GGTCGTTA GGCTAGCTACAACGA CTGTGAAA | 13813 |
| 8563 | CACAGAUA A CGACCAGG | 5065 | CCTGGTCG GGCTAGCTACAACGA TATCTGTG | 13814 |
| 8560 | AGAUAACG A CCAGGUCG | 5066 | CGACCTGG GGCTAGCTACAACGA CGTTATCT | 13815 |
| 8555 | ACGACCAG G UCGUCUCC | 5067 | GGAGACGA GGCTAGCTACAACGA CTGGTCGT | 13816 |
| 8552 | ACCAGGUC G UCUCCACA | 5068 | TGTGGAGA GGCTAGCTACAACGA GACCTGGT | 13817 |
| 8546 | UCGUCUCC A CACACGAG | 5069 | CTCGTGTG GGCTAGCTACAACGA GGAGACGA | 13818 |
| 8544 | GUCUCCAC A CACGAGCA | 5070 | TGCTCGTG GGCTAGCTACAACGA GTGGAGAC | 13819 |
| 8542 | CUCCACAC A CGAGCAUC | 5071 | GATGCTCG GGCTAGCTACAACGA GTGTGGAG | 13820 |
| 8538 | ACACACGA G CAUCGUGC | 5072 | GCACGATG GGCTAGCTACAACGA TCGTGTGT | 13821 |
| 8536 | ACACGAGC A UCGUGCAG | 5073 | CTGCACGA GGCTAGCTACAACGA GCTCGTGT | 13822 |
| 8533 | CGAGCAUC G UGCAGUCC | 5074 | GGACTGCA GGCTAGCTACAACGA GATGCTCG | 13823 |
| 8531 | AGCAUCGU G CAGUCCUG | 5075 | CAGGACTG GGCTAGCTACAACGA ACGATGCT | 13824 |
| 8528 | AUCGUGCA G UCCUGGAG | 5076 | CTCCAGGA GGCTAGCTACAACGA TGCACGAT | 13825 |
| 8520 | GUCCUGGA G CUUCGCAG | 5077 | CTGCGAAG GGCTAGCTACAACGA TCCAGGAC | 13826 |
| 8515 | GGAGCUUC G CAGCUCGA | 5078 | TCGAGCTG GGCTAGCTACAACGA GAAGCTCC | 13827 |
| 8512 | GCUUCGCA G CUCGACAG | 5079 | CTGTCGAG GGCTAGCTACAACGA TGCGAAGC | 13828 |
| 8507 | GCAGCUCG A CAGGCCGC | 5080 | GCGGCCTG GGCTAGCTACAACGA CGAGCTGC | 13829 |
| 8503 | CUCGACAG G CCGCAGAG | 5081 | CTCTGCGG GGCTAGCTACAACGA CTGTCGAG | 13830 |
| 8500 | GACAGGCC G CAGAGGCU | 5082 | AGCCTCTG GGCTAGCTACAACGA GGCCTGTC | 13831 |
| 8494 | CCGCAGAG G CUUUCAAG | 5083 | CTTGAAAG GGCTAGCTACAACGA CTCTGCGG | 13832 |
| 8486 | GCUUUCAA G UAACAUGU | 5084 | ACATGTTA GGCTAGCTACAACGA TTGAAAGC | 13833 |
| 8483 | UUCAAGUA A CAUGUGAG | 5085 | CTCACATG GGCTAGCTACAACGA TACTTGAA | 13834 |
| 8481 | CAAGUAAC A UGUGAGGG | 5086 | CCCTCACA GGCTAGCTACAACGA GTTACTTG | 13835 |
| 8479 | AGUAACAU G UGAGGGUA | 5087 | TACCCTCA GGCTAGCTACAACGA ATGTTACT | 13836 |
| 8473 | AUGUGAGG G UAUUACCA | 5088 | TGGTAATA GGCTAGCTACAACGA CCTCACAT | 13837 |
| 8471 | GUGAGGGU A UUACCACA | 5089 | TGTGGTAA GGCTAGCTACAACGA ACCCTCAC | 13838 |
| 8468 | AGGGUAUU A CCACAGCU | 5090 | AGCTGTGG GGCTAGCTACAACGA AATACCCT | 13839 |
| 8465 | GUAUUACC A CAGCUGGU | 5091 | ACCAGCTG GGCTAGCTACAACGA GGTAATAC | 13840 |
| 8462 | UUACCACA G CUGGUCGU | 5092 | ACGACCAG GGCTAGCTACAACGA TGTGGTAA | 13841 |
| 8458 | CACAGCUG G UCGUCAGC | 5093 | GCTGACGA GGCTAGCTACAACGA CAGCTGTG | 13842 |
| 8455 | AGCUGGUC G UCAGCACG | 5094 | CGTGCTGA GGCTAGCTACAACGA GACCAGCT | 13843 |
| 8451 | GGUCGUCA G CACGCCGC | 5095 | GCGGCGTG GGCTAGCTACAACGA TGACGACC | 13844 |
| 8449 | UCGUCAGC A CGCCGCUC | 5096 | GAGCGGCG GGCTAGCTACAACGA GCTGACGA | 13845 |
| 8447 | GUCAGCAC G CCGCUCGC | 5097 | GCGAGCCG GGCTAGCTACAACGA GTGCTGAC | 13846 |
| 8444 | AGCACGCC G CUCGCGCG | 5098 | CGCGCGAG GGCTAGCTACAACGA GGCGTGCT | 13847 |
| 8440 | CGCCGCUC G CGCGGCAC | 5099 | GTCCCGCG GGCTAGCTACAACGA GAGCGGCG | 13848 |
| 8438 | CCGCUCGC G CGGCACCG | 5100 | CGGTGCCG GGCTAGCTACAACGA GCGAGCGG | 13849 |
| 8435 | CUCGCCCG G CACCCCCG | 5101 | CGCCGCTG GGCTAGCTACAACGA CGCGCCAG | 13850 |
| 8433 | CGCGCGGC A CCGGCGAU | 5102 | ATCGCCGG GGCTAGCTACAACGA GCCGCGCG | 13851 |
| 8429 | CGGCACCG G CGAUAACC | 5103 | GCTTATCG GGCTAGCTACAACGA CGGTGCCG | 13852 |
| 8426 | CACCGGCG A UAACCGCA | 5104 | TGCGGTTA GGCTAGCTACAACGA CGCCCCTG | 13853 |
| 8423 | CGGCGAUA A CCGCACUU | 5105 | AACTGCCC GGCTAGCTACAACGA TATCGCCG | 13854 |
| 8420 | CGAUAACC G CAGUUCUG | 5106 | CAGAACTG GGCTAGCTACAACGA GGTTATCG | 13855 |
| 8417 | UAACCGCA G UUCUGCCC | 5107 | GGGCACAA GGCTAGCTACAACGA TGCGGTTA | 13856 |
| 8412 | GCACUUCU G CCCUUUUG | 5108 | CAAAACCG GGCTAGCTACAACGA ACAACTGC | 13857 |
| 8402 | CCUUUUGA A UUAGUCAG | 5109 | CTGACTAA GGCTAGCTACAACGA TCAAAAGG | 13858 |
| 8398 | UUGAAUUA G UCAGAGGA | 5110 | TCCTCTGA GGCTAGCTACAACGA TAATTCAA | 13859 |
| 8390 | GUCAGAGG A CCCCCGAU | 5111 | ATCGGGGG GGCTAGCTACAACGA CCTCTGAC | 13860 |
| 8383 | GACCCCCG A UAUAAAGC | 5112 | GCTTTATA GGCTAGCTACAACGA CGGGGGTC | 13861 |
| 8381 | CCCCCGAU A UAAAGCCG | 5113 | CGGCTTTA GGCTAGCTACAACGA ATCGGGGG | 13862 |
| 8376 | GAUAUAAA G CCGCUCUG | 5114 | CAGAGCGG GGCTAGCTACAACGA TTTATATC | 13863 |
| 8373 | AUAAAGCC G CUCUGUGA | 5115 | TCACAGAG GGCTAGCTACAACGA GGCTTTAT | 13864 |
| 8368 | GCCGCUCU G UGAGCGAC | 5116 | GTCGCTCA GGCTAGCTACAACGA AGAGCGGC | 13865 |
| 8364 | CUCUGUGA G CGACCUUA | 5117 | TAAGGTCG GGCTAGCTACAACGA TCACAGAG | 13866 |
| 8361 | UGUGAGCG A CCUUAUGG | 5118 | CCATAAGG GGCTAGCTACAACGA CGCTCACA | 13867 |
| 8356 | GCGACCUU A UGGCCUGU | 5119 | ACAGGCCA GGCTAGCTACAACGA AAGGTCGC | 13868 |
| 8353 | ACCUUAUG G CCUGUCUG | 5120 | CAGACAGG GGCTAGCTACAACGA CATAAGGT | 13869 |
| 8349 | UAUGGCCU G UCUGGCUU | 5121 | AAGCCAGA GGCTAGCTACAACGA AGGCCATA | 13870 |
| 8344 | CCUGUCUG G CUUCGGGG | 5122 | CCCCGAAG GGCTAGCTACAACGA CAGACAGG | 13871 |
| 8335 | CUUCGGGG G CCAAGUCA | 5123 | TGACTTGG GGCTAGCTACAACGA CCCCGAAG | 13872 |
| 8330 | GGGGCCAA G UCACAACA | 5124 | TGTTGTGA GGCTAGCTACAACGA TTGGCCCC | 13873 |
| 8327 | GCCAAGUC A CAACAUUG | 5125 | CAATGTTG GGCTAGCTACAACGA GACTTGGC | 13874 |
| 8324 | AAGUCACA A CAUUGGUA | 5126 | TACCAATG GGCTAGCTACAACGA TGTGACTT | 13875 |
| 8322 | GUCACAAC A UUGGUAAA | 5127 | TTTACCAA GGCTAGCTACAACGA GTTGTGAC | 13876 |
| 8318 | CAACAUUG G UAAAUUGA | 5128 | TCAATTTA GGCTAGCTACAACGA CAATGTTG | 13877 |
| 8314 | AUUGGUAA A UUGACUCC | 5129 | GGAGTCAA GGCTAGCTACAACGA TTACCAAT | 13878 |
| 8310 | GUAAAUUG A CUCCUCGA | 5130 | TCGAGGAG GGCTAGCTACAACGA CAATTTAC | 13879 |
| 8302 | ACUCCUCG A CACGGAUG | 5131 | CATCCGTG GGCTAGCTACAACGA CGAGGAGT | 13880 |
| 8300 | UCCUCGAC A CGGAUGUC | 5132 | GACATCCG GGCTAGCTACAACGA GTCGAGGA | 13881 |
| 8296 | CGACACGG A UGUCACUC | 5133 | GAGTGACA GGCTAGCTACAACGA CCGTGTCG | 13882 |
| 8294 | ACACGGAU G UCACUCUC | 5134 | GAGAGTGA GGCTAGCTACAACGA ATCCGTGT | 13883 |
| 8291 | CGGAUGUC A CUCUCGGU | 5135 | ACCGAGAG GGCTAGCTACAACGA GACATCCG | 13884 |
| 8284 | CACUCUCG G UGACUGUU | 5136 | AACAGTCA GGCTAGCTACAACGA CGAGAGTG | 13885 |
| 8281 | UCUCGGUG A CUGUUGAG | 5137 | CTCAACAG GGCTAGCTACAACGA CACCGAGA | 13886 |
| 8278 | CGGUGACU G UUGAGUCG | 5138 | CGACTCAA GGCTAGCTACAACGA AGTCACCG | 13887 |
| 8273 | ACUGUUGA G UCGAAACA | 5139 | TGTTTCGA GGCTAGCTACAACGA TCAACAGT | 13888 |
| 8267 | GAGUCGAA A CAGCGGGU | 5140 | ACCCGCTG GGCTAGCTACAACGA TTCGACTC | 13889 |
| 8264 | UCGAAACA G CGGGUGUC | 5141 | GACACCCG GGCTAGCTACAACGA TGTTTCGA | 13890 |
| 8260 | AACAGCGG G UGUCAUAU | 5142 | ATATGACA GGCTAGCTACAACGA CCGCTGTT | 13891 |
| 8258 | CAGCGGGU G UCAUAUGC | 5143 | GCATATGA GGCTAGCTACAACGA ACCCGCTG | 13892 |
| 8255 | CGGGUGUC A UAUGCAAA | 5144 | TTTGCATA GGCTAGCTACAACGA GACACCCG | 13893 |
| 8253 | GGUGUCAU A UGCAAAGC | 5145 | GCTTTGCA GGCTAGCTACAACGA ATGACACC | 13894 |
| 8251 | UGUCAUAU G CAAAGCCC | 5146 | GGGCTTTG GGCTAGCTACAACGA ATATGACA | 13895 |
| 8246 | UAUGCAAA G CCCAUAGG | 5147 | CCTATGGG GGCTAGCTACAACGA TTTGCATA | 13896 |
| 8242 | CAAAGCCC A UAGGGCAU | 5148 | ATGCCCTA GGCTAGCTACAACGA GGGCTTTG | 13897 |
| 8237 | CCCAUAGG G CAUUUCUU | 5149 | AAGAAATG GGCTAGCTACAACGA CCTATGGG | 13898 |
| 8235 | CAUAGGGC A UUUCUUUG | 5150 | CAAAGAAA GGCTAGCTACAACGA GCCCTATG | 13899 |
| 8226 | UUUCUUUG A UUUCCAGG | 5151 | CCTGGAAA GGCTAGCTACAACGA CAAAGAAA | 13900 |
| 8218 | AUUUCCAG G CAUUCACC | 5152 | GGTGAATG GGCTAGCTACAACGA CTGGAAAT | 13901 |
| 8216 | UUCCAGGC A UUCACCAG | 5153 | CTGGTGAA GGCTAGCTACAACGA GCCTGGAA | 13902 |
| 8212 | AGGCAUUC A CCAGGAAC | 5154 | GTTCCTGG GGCTAGCTACAACGA GAATGCCT | 13903 |
| 8205 | CACCAGGA A CUCAACCC | 5155 | GGGTTGAG GGCTAGCTACAACGA TCCTGGTG | 13904 |
| 8200 | GGAACUCA A CCCGCUGC | 5156 | GCAGCGGG GGCTAGCTACAACGA TGAGTTCC | 13905 |
| 8196 | CUCAACCC G CUGCCCAG | 5157 | CTGGGCAG GGCTAGCTACAACGA GGGTTGAG | 13906 |
| 8193 | AACCCGCU G CCCAGGAG | 5158 | CTCCTGGG GGCTAGCTACAACGA AGCGGGTT | 13907 |
| 8183 | CCAGGAGA G UACUGGAA | 5159 | TTCCAGTA GGCTAGCTACAACGA TCTCCTGG | 13908 |
| 8181 | AGGAGAGU A CUGGAAUC | 5160 | GATTCCAG GGCTAGCTACAACGA ACTCTCCT | 13909 |
| 8175 | GUACUGGA A UCCGUAUG | 5161 | CATACGGA GGCTAGCTACAACGA TCCAGTAC | 13910 |
| 8171 | UGGAAUCC G UAUGAAGA | 5162 | TCTTCATA GGCTAGCTACAACGA GGATTCCA | 13911 |
| 8169 | GAAUCCGU A UGAAGAGC | 5163 | GCTCTTCA GGCTAGCTACAACGA ACGGATTC | 13912 |
| 8162 | UAUGAAGA G CCCAUCAC | 5164 | GTGATGGG GGCTAGCTACAACGA TCTTCATA | 13913 |
| 8158 | AAGAGCCC A UCACGGCC | 5165 | GGCCGTGA GGCTAGCTACAACGA GGGCTCTT | 13914 |
| 8155 | AGCCCAUC A CGGCCUGA | 5166 | TCAGGCCG GGCTAGCTACAACGA GATGGGCT | 13915 |
| 8152 | CCAUCACG G CCUGAGGA | 5167 | TCCTCAGG GGCTAGCTACAACGA CGTGATGG | 13916 |
| 8140 | GAGGAAGG G UGGAGACC | 5168 | GGTCTCCA GGCTAGCTACAACGA CCTTCCTC | 13917 |
| 8134 | GGGUGGAG A CCACGUCG | 5169 | CGACGTGG GGCTAGCTACAACGA CTCCACCC | 13918 |
| 8131 | UGGAGACC A CGUCGUAA | 5170 | TTACGACG GGCTAGCTACAACGA GGTCTCCA | 13919 |
| 8129 | GAGACCAC G UCGUAAAG | 5171 | CTTTACGA GGCTAGCTACAACGA GTGGTCTC | 13920 |
| 8126 | ACCACGUC G UAAAGGGC | 5172 | GCCCTTTA GGCTAGCTACAACGA GACGTGGT | 13921 |
| 8119 | CGUAAAGG G CCAUUUUC | 5173 | GAAAATGG GGCTAGCTACAACGA CCTTTACG | 13922 |
| 8116 | AAAGGGCC A UUUUCUCG | 5174 | CGAGAAAA GGCTAGCTACAACGA GGCCCTTT | 13923 |
| 8108 | AUUVUCUC G CACACACG | 5175 | CGTGTGTG GGCTAGCTACAACGA GAGAAAAT | 13924 |
| 8106 | UUUCUCGC A CACACGAA | 5176 | TTCGTGTG GGCTAGCTACAACGA GCGAGAAA | 13925 |
| 8104 | UCUCGCAC A CACGAACC | 5177 | GGTTCGTG GGCTAGCTACAACGA GTGCGAGA | 13926 |
| 8102 | UCGCACAC A CGAACCCC | 5178 | GGGGTTCG GGCTAGCTACAACGA GTGTGCGA | 13927 |
| 8098 | ACACACGA A CCCCCAAG | 5179 | CTTGGGGG GGCTAGCTACAACGA TCGTGTGT | 13928 |
| 8090 | ACCCCCAA G UCUGGGAA | 5180 | TTCCCAGA GGCTAGCTACAACGA TTGGGGGT | 13929 |
| 8082 | GUCUGGGA A CACGAUAA | 5181 | TTATCGTG GGCTAGCTACAACGA TCCCAGAC | 13930 |
| 8080 | CUGGGAAC A CGAUAAGG | 5182 | CCTTATCG GGCTAGCTACAACGA GTTCCCAG | 13931 |
| 8077 | GGAACACG A UAAGGCGA | 5183 | TCGCCTTA GGCTAGCTACAACGA CGTGTTCC | 13932 |
| 8072 | ACGAUAAG G CGAGCUGG | 5184 | CCAGCTCG GGCTAGCTACAACGA CTTATCGT | 13933 |
| 8068 | UAAGGCGA G CUGGCUUG | 5185 | CAAGCCAG GGCTAGCTACAACGA TCGCCTTA | 13934 |
| 8064 | GCGAGCUG G CUUGCGGC | 5186 | GCCGCAAG GGCTAGCTACAACGA CAGCTCGC | 13935 |
| 8060 | GCUGGCUU G CGGCCUCC | 5187 | GGAGGCCG GGCTAGCTACAACGA AAGCCAGC | 13936 |
| 8057 | GGCUUGCG G CCUCCUUU | 5188 | AAAGGAGG GGCTAGCTACAACGA CGCAAGCC | 13937 |
| 8043 | UUUCUCUG G UUGGACGC | 5189 | GCGTCCAA GGCTAGCTACAACGA CAGAGAAA | 13938 |
| 8038 | CUGGUUGG A CGCAGAAA | 5190 | TTTCTGCG GGCTAGCTACAACGA CCAACCAG | 13939 |
| 8036 | GGUUGGAC G CAGAAAAC | 5191 | GTTTTCTG GGCTAGCTACAACGA GTCCAACC | 13940 |
| 8029 | CGCAGAAA A CCUCAUUU | 5192 | AAATGAGG GGCTAGCTACAACGA TTTCTGCG | 13941 |
| 8024 | AAAACCUC A UUUUUUGC | 5193 | GCAAAAAA GGCTAGCTACAACGA GAGGTTTT | 13942 |
| 8017 | CAUUUUUU G CCAUGAUG | 5194 | CATCATGG GGCTAGCTACAACGA AAAAAATG | 13943 |
| 8014 | UUUUUGCC A UGAUGGUG | 5195 | CACCATCA GGCTAGCTACAACGA GGCAAAAA | 13944 |
| 8011 | UUGCCAUG A UGGUGGUA | 5196 | TACCACCA GGCTAGCTACAACGA CATGGCAA | 13945 |
| 8008 | CCAUGAUG G UGGUAUCA | 5197 | TGATACCA GGCTAGCTACAACGA CATCATGG | 13946 |
| 8005 | UGAUGGUG G UAUCAAUU | 5198 | AATTGATA GGCTAGCTACAACGA CACCATCA | 13947 |
| 8003 | AUGGUGGU A UCAAUUGG | 5199 | CCAATTGA GGCTAGCTACAACGA ACCACCAT | 13948 |
| 7999 | UGGUAUCA A UUGGUGUC | 5200 | GACACCAA GGCTAGCTACAACGA TGATACCA | 13949 |
| 7995 | AUCAAUUG G UGUCUCAG | 5201 | CTGAGACA GGCTAGCTACAACGA CAATTGAT | 13950 |
| 7993 | CAAUUGGU G UCUCAGUG | 5202 | CACTGAGA GGCTAGCTACAACGA ACCAATTG | 13951 |
| 7987 | GUGUCUCA G UGUCUUCC | 5203 | GGAAGACA GGCTAGCTACAACGA TGAGACAC | 13952 |
| 7985 | GUCUCAGU G UCUUCCAG | 5204 | CTGGAAGA GGCTAGCTACAACGA ACTGAGAC | 13953 |
| 7977 | GUCUUCCA G CAAGUCCU | 5205 | AGGACTTG GGCTAGCTACAACGA TGGAAGAC | 13954 |
| 7973 | UCCAGCAA G UCCUUCCA | 5206 | TGGAAGGA GGCTAGCTACAACGA TTGCTGGA | 13955 |
| 7965 | GUCCUUCC A CACGGAGC | 5207 | GCTCCGTG GGCTAGCTACAACGA GGAAGGAC | 13956 |
| 7963 | CCUUCCAC A CGGAGCGG | 5208 | CCGCTCCG GGCTAGCTACAACGA GTGGAAGG | 13957 |
| 7958 | CACACGGA G CGGAUGUG | 5209 | CACATCCG GGCTAGCTACAACGA TCCGTGTG | 13958 |
| 7954 | CGGAGCGG A UGUGGUUG | 5210 | CAACCACA GGCTAGCTACAACGA CCGCTCCG | 13959 |
| 7952 | GAGCGGAU G UGGUUGAC | 5211 | GTCAACCA GGCTAGCTACAACGA ATCCGCTC | 13960 |
| 7949 | CGGAUGUG G UUGACGGC | 5212 | GCCGTCAA GGCTAGCTACAACGA CACATCCG | 13961 |
| 7945 | UGUGGUUG A CGGCCCCG | 5213 | CGGGGCCG GGCTAGCTACAACGA CAACCACA | 13962 |
| 7942 | GGUUGACG G CCCCGCUG | 5214 | CAGCGGGG GGCTAGCTACAACGA CGTCAACC | 13963 |
| 7937 | ACGGCCCC G CUGGAUAG | 5215 | CTATCCAG GGCTAGCTACAACGA GGGGCCGT | 13964 |
| 7932 | CCCGCUGG A UAGGUUCC | 5216 | GGAACCTA GGCTAGCTACAACGA CCAGCGGG | 13965 |
| 7928 | CUGGAUAG G UUCCGGAC | 5217 | GTCCGGAA GGCTAGCTACAACGA CTATCCAG | 13966 |
| 7921 | GGUUCCGG A CGUCCUUU | 5218 | AAAGGACG GGCTAGCTACAACGA CCGGAACC | 13967 |
| 7919 | UUCCGGAC G UCCUUUGC | 5219 | GCAAAGGA GGCTAGCTACAACGA GTCCGGAA | 13968 |
| 7912 | CGUCCUUU G CCCCAUAA | 5220 | TTATGGGG GGCTAGCTACAACGA AAAGGACG | 13969 |
| 7907 | UUUGCCCC A UAACCAAA | 5221 | TTTGGTTA GGCTAGCTACAACGA GGGGCAAA | 13970 |
| 7904 | GCCCCAUA A CCAAAUUU | 5222 | AAATTTGG GGCTAGCTACAACGA TATGGGGC | 13971 |
| 7899 | AUAACCAA A UUUGGACC | 5223 | GGTCCAAA GGCTAGCTACAACGA TTGGTTAT | 13972 |
| 7893 | AAAUUUGG A CCUGGCCG | 5224 | CGGCCAGG GGCTAGCTACAACGA CCAAATTT | 13973 |
| 7888 | UGGACCUG G CCGAAUGU | 5225 | ACATTCGG GGCTAGCTACAACGA CAGGTCCA | 13974 |
| 7883 | CUGGCCGA A UGUGGGGG | 5226 | CCCCCACA GGCTAGCTACAACGA TCGGCCAG | 13975 |
| 7881 | GGCCGAAU G UGGGGGCG | 5227 | CGCCCCCA GGCTAGCTACAACGA ATTCGGCC | 13976 |
| 7875 | AUGUGGGG G CGUCAGUC | 5228 | GACTGACG GGCTAGCTACAACGA CCCCACAT | 13977 |
| 7873 | GUGGGGGC G UCAGUCUG | 5229 | CAGACTGA GGCTAGCTACAACGA GCCCCCAC | 13978 |
| 7869 | GGGCGUCA G UCUGCAGG | 5230 | CCTGCAGA GGCTAGCTACAACGA TGACGCCC | 13979 |
| 7865 | GUCAGUCU G CAGGCUUC | 5231 | GAAGCCTG GGCTAGCTACAACGA AGACTGAC | 13980 |
| 7861 | GUCUGCAG G CUUCCUCU | 5232 | AGAGGAAG GGCTAGCTACAACGA CTGCAGAC | 13981 |
| 7852 | CUUCCUCU A CGGAUAGA | 5233 | TCTATCCG GGCTAGCTACAACGA AGAGGAAG | 13982 |
| 7848 | CUCUACGG A UAGAAGUU | 5234 | AACTTCTA GGCTAGCTACAACGA CCGTAGAG | 13983 |
| 7842 | GGAUAGAA G UUUAGCCU | 5235 | AGGCTAAA GGCTAGCTACAACGA TTCTATCC | 13984 |
| 7837 | GAAGUUUA G CCUUAACU | 5236 | AGTTAAGG GGCTAGCTACAACGA TAAACTTC | 13985 |
| 7831 | UAGCCUUA A CUGUGGAC | 5237 | GTCCACAG GGCTAGCTACAACGA TAAGGCTA | 13986 |
| 7828 | CCUUAACU G UGGACGCC | 5238 | GGCGTCCA GGCTAGCTACAACGA AGTTAAGG | 13987 |
| 7824 | AACUGUGG A CGCCUUCG | 5239 | CGAAGGCG GGCTAGCTACAACGA CCACAGTT | 13988 |
| 7822 | CUGUGGAC G CCUUCGCC | 5240 | GGCGAAGG GGCTAGCTACAACGA GTCCACAG | 13989 |
| 7816 | ACGCCUUC G CCUUCAUC | 5241 | GATGAAGG GGCTAGCTACAACGA GAAGGCGT | 13990 |
| 7810 | UCGCCUUC A UCUCCUUG | 5242 | CAAGGAGA GGCTAGCTACAACGA GAAGGCGA | 13991 |
| 7800 | CUCCUUGA G CACGUCCC | 5243 | GGGACGTG GGCTAGCTACAACGA TCAAGGAG | 13992 |
| 7798 | CCUUGAGC A CGUCCCGG | 5244 | CCGGGACG GGCTAGCTACAACGA GCTCAAGG | 13993 |
| 7796 | UUGAGCAC G UCCCGGUA | 5245 | TACCGGGA GGCTAGCTACAACGA GTGCTCAA | 13994 |
| 7790 | ACGUCCCG G UAGUGGUC | 5246 | GACCACTA GGCTAGCTACAACGA CGGGACGT | 13995 |
| 7787 | UCCCGGUA G UGGUCGUC | 5247 | GACGACCA GGCTAGCTACAACGA TACCGGGA | 13996 |
| 7784 | CGGUAGUG G UCGUCCAG | 5248 | CTGGACGA GGCTAGCTACAACGA CACTACCG | 13997 |
| 7781 | UAGUGGUC G UCCAGGAC | 5249 | GTCCTGGA GGCTAGCTACAACGA GACCACTA | 13998 |
| 7774 | CGUCCAGG A CUUGCAGU | 5250 | ACTGCAAG GGCTAGCTACAACGA CCTGGACG | 13999 |
| 7770 | CAGGACUU G CAGUCUGU | 5251 | ACAGACTG GGCTAGCTACAACGA AAGTCCTG | 14000 |
| 7767 | GACUUGCA G UCUGUCAA | 5252 | TTGACAGA GGCTAGCTACAACGA TGCAAGTC | 14001 |
| 7763 | UGCAGUCU G UCAAAGGU | 5253 | ACCTTTGA GGCTAGCTACAACGA AGACTGCA | 14002 |
| 7756 | UGUCAAAG G UGACCUUC | 5254 | GAAGGTCA GGCTAGCTACAACGA CTTTGACA | 14003 |
| 7753 | CAAAGGUG A CCUUCUUC | 5255 | GAAGAAGG GGCTAGCTACAACGA CACCTTTG | 14004 |
| 7743 | CUUCUUCU G CCGCUGGC | 5256 | GCCAGCGG GGCTAGCTACAACGA AGAAGAAG | 14005 |
| 7740 | CUUCUGCC G CUGGCUUG | 5257 | CAAGCCAG GGCTAGCTACAACGA GGCAGAAG | 14006 |
| 7736 | UGCCGCUG G CUUGCGCU | 5258 | AGCGCAAG GGCTAGCTACAACGA CAGCGGCA | 14007 |
| 7732 | GCUGGCUU G CGCUGCGA | 5259 | TCGCAGCG GGCTAGCTACAACGA AAGCCAGC | 14008 |
| 7730 | UGGCUUGC G CUGCGAGA | 5260 | TCTCGCAG GGCTAGCTACAACGA GCAAGCCA | 14009 |
| 7727 | CUUGCGCU G CGAGAUGU | 5261 | ACATCTCG GGCTAGCTACAACGA AGCGCAAG | 14010 |
| 7722 | GCUGCGAG A UGUUGUAG | 5262 | CTACAACA GGCTAGCTACAACGA CTCGCAGC | 14011 |
| 7720 | UGCGAGAU G UUGUAGCG | 5263 | CGCTACAA GGCTAGCTACAACGA ATCTCGCA | 14012 |
| 7717 | GAGAUGUU G UAGCGUAG | 5264 | CTACGCTA GGCTAGCTACAACGA AACATCTC | 14013 |
| 7714 | AUGUUGUA G CGUAGACC | 5265 | GGTCTACG GGCTAGCTACAACGA TACAACAT | 14014 |
| 7712 | GUUGUAGC G UAGACCAU | 5266 | ATGGTCTA GGCTAGCTACAACGA GCTACAAC | 14015 |
| 7708 | UAGCGUAG A CCAUGUUG | 5267 | CAACATGG GGCTAGCTACAACGA CTACGCTA | 14016 |
| 7705 | CGUAGACC A UGUUGUGG | 5268 | CCACAACA GGCTAGCTACAACGA GGTCTACG | 14017 |
| 7703 | UAGACCAU G UUGUGGUG | 5269 | CACCACAA GGCTAGCTACAACGA ATGGTCTA | 14018 |
| 7700 | ACCAUGUU G UGGUGACG | 5270 | CGTCACCA GGCTAGCTACAACGA AACATGGT | 14019 |
| 7697 | AUGUUGUG G UGACGCAG | 5271 | CTGCGTCA GGCTAGCTACAACGA CACAACAT | 14020 |
| 7694 | UUGUGGUG A CGCAGCAA | 5272 | TTGCTGCG GGCTAGCTACAACGA CACCACAA | 14021 |
| 7692 | GUGGUGAC G CAGCAAAG | 5273 | CTTTGCTG GGCTAGCTACAACGA GTCACCAC | 14022 |
| 7689 | GUGACGCA G CAAAGAGU | 5274 | ACTCTTTG GGCTAGCTACAACGA TGCGTCAC | 14023 |
| 7682 | AGCAAAGA G UUGCUCAA | 5275 | TTGAGCAA GGCTAGCTACAACGA TCTTTGCT | 14024 |
| 7679 | AAAGAGUU G CUCAACGC | 5276 | GCGTTGAG GGCTAGCTACAACGA AACTCTTT | 14025 |
| 7674 | GUUGCUCA A CGCGUUGA | 5277 | TCAACGCG GGCTAGCTACAACGA TGAGCAAC | 14026 |
| 7672 | UGCUCAAC G CGUUGAUG | 5278 | CATCAACG GGCTAGCTACAACGA GTTGAGCA | 14027 |
| 7670 | CUCAACGC G UUGAUGGG | 5279 | CCCATCAA GGCTAGCTACAACGA GCGTTGAG | 14028 |
| 7666 | ACGCGUUG A UGGGCAAC | 5280 | GTTGCCCA GGCTAGCTACAACGA CAACGCGT | 14029 |
| 7662 | GUUGAUGG G CAACUUGC | 5281 | GCAAGTTG GGCTAGCTACAACGA CCATCAAC | 14030 |
| 7659 | GAUGGGCA A CUUGCUUU | 5282 | AAAGCAAG GGCTAGCTACAACGA TGCCCATC | 14031 |
| 7655 | GGCAACUU G CUUUCCUC | 5283 | GAGGAAAG GGCTAGCTACAACGA AAGTTGCC | 14032 |
| 7645 | UUUCCUCC G CAGCGCAU | 5284 | ATGCGCTG GGCTAGCTACAACGA GGAGGAAA | 14033 |
| 7642 | CCUCCGCA G CGCAUGGC | 5285 | GCCATGCG GGCTAGCTACAACGA TGCGGAGG | 14034 |
| 7640 | UCCGCAGC G CAUGGCGU | 5286 | ACGCCATG GGCTAGCTACAACGA GCTGCGGA | 14035 |
| 7638 | CGCAGCGC A UGGCGUGA | 5287 | TCACGCCA GGCTAGCTACAACGA GCGCTGCG | 14036 |
| 7635 | AGCGCAUG G CGUGAUCA | 5288 | TGATCACG GGCTAGCTACAACGA CATGCGCT | 14037 |
| 7633 | CGCAUGGC G UGAUCAGG | 5289 | CCTGATCA GGCTAGCTACAACGA GCCATGCG | 14038 |
| 7630 | AUGGCGUG A UCAGGGCG | 5290 | CGCCCTGA GGCTAGCTACAACGA CACGCCAT | 14039 |
| 7624 | UGAUCAGG G CGCCCGUC | 5291 | GACGGGCG GGCTAGCTACAACGA CCTGATCA | 14040 |
| 7622 | AUCAGGGC G CCCGUCCA | 5292 | TGGACGGG GGCTAGCTACAACGA GCCCTGAT | 14041 |
| 7618 | GGGCGCCC G UCCAUGUG | 5293 | CACATGGA GGCTAGCTACAACGA GGGCGCCC | 14042 |
| 7614 | GCCCGUCC A UGUGUAGG | 5294 | CCTACACA GGCTAGCTACAACGA GGACGGGC | 14043 |
| 7612 | CCGUCCAU G UGUAGGAC | 5295 | GTCCTACA GGCTAGCTACAACGA ATGGACGG | 14044 |
| 7610 | GUCCAUGU G UAGGACAU | 5296 | ATGTCCTA GGCTAGCTACAACGA ACATGGAC | 14045 |
| 7605 | UGUGUAGG A CAUCGAGC | 5297 | GCTCGATG GGCTAGCTACAACGA CCTACACA | 14046 |
| 7603 | UGUAGGAC A UCGAGCAG | 5298 | CTGCTCGA GGCTAGCTACAACGA GTCCTACA | 14047 |
| 7598 | GACAUCGA G CAGCAGAC | 5299 | GTCTGCTG GGCTAGCTACAACGA TCGATGTC | 14048 |
| 7595 | AUCGAGCA G CAGACGAC | 5300 | GTCGTCTG GGCTAGCTACAACGA TGCTCGAT | 14049 |
| 7591 | AGCAGCAG A CGACAUCC | 5301 | GGATGTCG GGCTAGCTACAACGA CTGCTGCT | 14050 |
| 7588 | AGCAGACG A CAUCCUCG | 5302 | CGAGGATG GGCTAGCTACAACGA CGTCTGCT | 14051 |
| 7586 | CAGACGAC A UCCUCGCC | 5303 | GGCGAGGA GGCTAGCTACAACGA GTCGTCTG | 14052 |
| 7580 | ACAUCCUC G CCAGCCUC | 5304 | GAGGCTGG GGCTAGCTACAACGA GAGGATGT | 14053 |
| 7576 | CCUCGCCA G CCUCUUCG | 5305 | CGAAGAGG GGCTAGCTACAACGA TGGCGAGG | 14054 |
| 7568 | GCCUCUUC G CUCACGGU | 5306 | ACCGTGAG GGCTAGCTACAACGA GAAGAGGC | 14055 |
| 7564 | CUUCGCUC A CGGUAGAC | 5307 | GTCTACCG GGCTAGCTACAACGA GAGCGAAG | 14056 |
| 7561 | CGCUCACG G UAGACCAA | 5308 | TTGGTCTA GGCTAGCTACAACGA CGTGAGCG | 14057 |
| 7557 | CACGGUAG A CCAAGACC | 5309 | GGTCTTGG GGCTAGCTACAACGA CTACCGTG | 14058 |
| 7551 | AGACCAAG A CCCGUCGC | 5310 | GCGACGGG GGCTAGCTACAACGA CTTGGTCT | 14059 |
| 7547 | CAAGACCC G UCGCUGAG | 5311 | CTCAGCGA GGCTAGCTACAACGA GGGTCTTG | 14060 |
| 7544 | GACCCGUC G CUGAGAUC | 5312 | GATCTCAG GGCTAGCTACAACGA GACGGGTC | 14061 |
| 7538 | UCGCUGAG A UCGGGAUC | 5313 | GATCCCGA GGCTAGCTACAACGA CTCAGCGA | 14062 |
| 7532 | AGAUCGGG A UCCCCCGG | 5314 | CCGGGGGA GGCTAGCTACAACGA CCCGATCT | 14063 |
| 7524 | AUCCCCCG G CUCCCCCU | 5315 | AGGGGGAG GGCTAGCTACAACGA CGGGGGAT | 14064 |
| 7506 | AAGGGGGG G CAUAGAGG | 5316 | CCTCTATG GGCTAGCTACAACGA CCCCCCTT | 14065 |
| 7504 | GGGGGGGC A UAGAGGAG | 5317 | CTCCTCTA GGCTAGCTACAACGA GCCCCCCC | 14066 |
| 7496 | AUAGAGGA G UACGACUC | 5318 | GAGTCGTA GGCTAGCTACAACGA TCCTCTAT | 14067 |
| 7494 | AGAGGAGU A CGACUCAA | 5319 | TTGAGTCG GGCTAGCTACAACGA ACTCCTCT | 14068 |
| 7491 | GGAGUACG A CUCAACGU | 5320 | ACGTTGAG GGCTAGCTACAACGA CGTACTCC | 14069 |
| 7486 | ACGACUCA A CGUCGGAU | 5321 | ATCCGACG GGCTAGCTACAACGA TGAGTCGT | 14070 |
| 7484 | GACUCAAC G UCGGAUCC | 5322 | GGATCCGA GGCTAGCTACAACGA GTTGAGTC | 14071 |
| 7479 | AACGUCGG A UCCUGCGU | 5323 | ACGCAGGA GGCTAGCTACAACGA CCGACGTT | 14072 |
| 7474 | CGGAUCCU G CGUCACCG | 5324 | CGGTGACG GGCTAGCTACAACGA AGGATCCG | 14073 |
| 7472 | GAUCCUGC G UCACCGUC | 5325 | GACGGTGA GGCTAGCTACAACGA GCAGGATC | 14074 |
| 7469 | CCUGCGUC A CCGUCAUU | 5326 | AATGACGG GGCTAGCTACAACGA GACGCAGG | 14075 |
| 7466 | GCGUCACC G UCAUUGGA | 5327 | TCCAATGA GGCTAGCTACAACGA GGTGACGC | 14076 |
| 7463 | UCACCGUC A UUGGAGGU | 5328 | ACCTCCAA GGCTAGCTACAACGA GACGGTGA | 14077 |
| 7456 | CAUUGGAG G UCUGGUCG | 5329 | CGACCAGA GGCTAGCTACAACGA CTCCAATG | 14078 |
| 7451 | GAGGUCUG G UCGGGGGG | 5330 | CCCCCCGA GGCTAGCTACAACGA CAGACCTC | 14079 |
| 7441 | CGGGGGGG G CGGUUGCC | 5331 | GGCAACCG GGCTAGCTACAACGA CCCCCCCG | 14080 |
| 7438 | GGGGGGCG G UUGCCGUA | 5332 | TACGGCAA GGCTAGCTACAACGA CGCCCCCC | 14081 |
| 7435 | GGGCGGUU G CCGUACCU | 5333 | AGGTACGG GGCTAGCTACAACGA AACCGCCC | 14082 |
| 7432 | CGGUUGCC G UACCUCUA | 5334 | TAGAGGTA GGCTAGCTACAACGA GGCAACCG | 14083 |
| 7430 | GUUGCCGU A CCUCUAUC | 5335 | GATAGAGG GGCTAGCTACAACGA ACGGCAAC | 14084 |
| 7424 | GUACCUCU A UCAGCGGC | 5336 | GCCGCTGA GGCTAGCTACAACGA AGAGGTAC | 14085 |
| 7420 | CUCUAUCA G CGGCCGAU | 5337 | ATCGGCCG GGCTAGCTACAACGA TGATAGAG | 14086 |
| 7417 | UAUCAGCG G CCGAUGAU | 5338 | ATCATCGG GGCTAGCTACAACGA CGCTGATA | 14087 |
| 7413 | AGCGGCCG A UGAUUCAG | 5339 | CTGAATCA GGCTAGCTACAACGA CGGCCGCT | 14088 |
| 7410 | GGCCGAUG A UUCAGAGC | 5340 | GCTCTGAA GGCTAGCTACAACGA CATCGGCC | 14089 |
| 7403 | GAUUCAGA G CUGCCGAA | 5341 | TTCGGCAG GGCTAGCTACAACGA TCTGAATC | 14090 |
| 7400 | UCAGAGCU G CCGAAGGU | 5342 | ACCTTCGG GGCTAGCTACAACGA AGCTCTGA | 14091 |
| 7393 | UGCCGAAG G UCUUUGUG | 5343 | CACAAAGA GGCTAGCTACAACGA CTTCGGCA | 14092 |
| 7387 | AGGUCUUU G UGGCGAGC | 5344 | GCTCGCCA GGCTAGCTACAACGA AAAGACCT | 14093 |
| 7384 | UCUUUGUG G CGAGCUCC | 5345 | GGAGCTCG GGCTAGCTACAACGA CACAAAGA | 14094 |
| 7380 | UGUGGCGA G CUCCGCCA | 5346 | TGGCGGAG GGCTAGCTACAACGA TCGCCACA | 14095 |
| 7375 | CGAGCUCC G CCAAGGCA | 5347 | TGCCTTGG GGCTAGCTACAACGA GGAGCTCG | 14096 |
| 7369 | CCGCCAAG G CAGAAGAC | 5348 | GTCTTCTG GGCTAGCTACAACGA CTTGGCGG | 14097 |
| 7362 | GGCAGAAG A CACGGUGG | 5349 | CCACCGTG GGCTAGCTACAACGA CTTCTGCC | 14098 |
| 7360 | CAGAAGAC A CGGUGGAC | 5350 | GTCCACCG GGCTAGCTACAACGA GTCTTCTG | 14099 |
| 7357 | AAGACACG G UGGACUCU | 5351 | AGAGTCCA GGCTAGCTACAACGA CGTGTCTT | 14100 |
| 7353 | CACGGUGG A CUCUGUCA | 5352 | TGACAGAG GGCTAGCTACAACGA CCACCGTG | 14101 |
| 7348 | UGGACUCU G UCAGAACA | 5353 | TGTTCTGA GGCTAGCTACAACGA AGAGTCCA | 14102 |
| 7342 | CUGUCAGA A CAACCGUC | 5354 | GACGGTTG GGCTAGCTACAACGA TCTGACAG | 14103 |
| 7339 | UCAGAACA A CCGUCCUC | 5355 | GAGGACGG GGCTAGCTACAACGA TGTTCTGA | 14104 |
| 7336 | GAACAACC G UCCUCUUC | 5356 | GAAGAGGA GGCTAGCTACAACGA GGTTGTTC | 14105 |
| 7323 | CUUCCUCC G UGGAGGUG | 5357 | CACCTCCA GGCTAGCTACAACGA GGAGGAAG | 14106 |
| 7317 | CCGUGGAG G UGGUAUUG | 5358 | CAATACCA GGCTAGCTACAACGA CTCCACGG | 14107 |
| 7314 | UGGAGGUG G UAUUGGAG | 5359 | CTCCAATA GGCTAGCTACAACGA CACCTCCA | 14108 |
| 7312 | GAGGUGGU A UUGGAGGG | 5360 | CCCTCCAA GGCTAGCTACAACGA ACCACCTC | 14109 |
| 7303 | UUGGAGGG G CCUUGGCA | 5361 | TGCCAAGG GGCTAGCTACAACGA CCCTCCAA | 14110 |
| 7297 | GGGCCUUG G CAGGUGGC | 5362 | GCCACCTG GGCTAGCTACAACGA CAAGGCCC | 14111 |
| 7293 | CUUGGCAG G UGGCAAUG | 5363 | CATTGCCA GGCTAGCTACAACGA CTGCCAAG | 14112 |
| 7290 | GGCAGGUG G CAAUGGGC | 5364 | GCCCATTG GGCTAGCTACAACGA CACCTGCC | 14113 |
| 7287 | AGGUGGCA A UGGGCACC | 5365 | GGTGCCCA GGCTAGCTACAACGA TGCCACCT | 14114 |
| 7283 | GGCAAUGG G CACCCGUG | 5366 | CACGGGTG GGCTAGCTACAACGA CCATTGCC | 14115 |
| 7281 | CAAUGGGC A CCCGUGUA | 5367 | TACACGGG GGCTAGCTACAACGA GCCCATTG | 14116 |
| 7277 | GGGCACCC G UGUACCAC | 5368 | GTGGTACA GGCTAGCTACAACGA GGGTGCCC | 14117 |
| 7275 | GCACCCGU G UACCACCG | 5369 | CGGTGGTA GGCTAGCTACAACGA ACGGGTGC | 14118 |
| 7273 | ACCCGUGU A CCACCGGA | 5370 | TCCGGTGG GGCTAGCTACAACGA ACACGGGT | 14119 |
| 7270 | CGUGUACC A CCGGAGGG | 5371 | CCCTCCGG GGCTAGCTACAACGA GGTACACG | 14120 |
| 7261 | CCGGAGGG A CGUAGUCU | 5372 | AGACTACG GGCTAGCTACAACGA CCCTCCGG | 14121 |
| 7259 | GGAGGGAC G UAGUCUGG | 5373 | CCAGACTA GGCTAGCTACAACGA GTCCCTCC | 14122 |
| 7256 | GGGACGUA G UCUGGGUC | 5374 | GACCCAGA GGCTAGCTACAACGA TACGTCCC | 14123 |
| 7250 | UAGUCUGG G UCUUUCCA | 5375 | TGGAAAGA GGCTAGCTACAACGA CCAGACTA | 14124 |
| 7239 | UUUCCAGG G CUCUAGUA | 5376 | TACTAGAG GGCTAGCTACAACGA CCTGGAAA | 14125 |
| 7233 | GGGCUCUA G UAGUGGAG | 5377 | CTCCACTA GGCTAGCTACAACGA TAGAGCCC | 14126 |
| 7230 | CUCUAGUA G UGGAGGGU | 5378 | ACCCTCCA GGCTAGCTACAACGA TACTAGAG | 14127 |
| 7223 | AGUGGAGG G UUGUAAUC | 5379 | GATTACAA GGCTAGCTACAACGA CCTCCACT | 14128 |
| 7220 | GGAGGGUU G UAAUCCGG | 5380 | CCGGATTA GGCTAGCTACAACGA AACCCTCC | 14129 |
| 7217 | GGGUUGUA A UCCGGGCG | 5381 | CGCCCGGA GGCTAGCTACAACGA TACAACCC | 14130 |
| 7211 | UAAUCCGG G CGUGCCCA | 5382 | TGGGCACG GGCTAGCTACAACGA CCGGATTA | 14131 |
| 7209 | AUCCGGGC G UGCCCAUA | 5383 | TATGGGCA GGCTAGCTACAACGA GCCCGGAT | 14132 |
| 7207 | CCGGGCGU G CCCAUAUG | 5384 | CATATGGG GGCTAGCTACAACGA ACGCCCGG | 14133 |
| 7203 | GCGUGCCC A UAUGGGUA | 5385 | TACCCATA GGCTAGCTACAACGA GGGCACGC | 14134 |
| 7201 | GUGCCCAU A UGGGUAAC | 5386 | GTTACCCA GGCTAGCTACAACGA ATGGGCAC | 14135 |
| 7197 | CCAUAUGG G UAACGCUG | 5387 | CAGCGTTA GGCTAGCTACAACGA CCATATGG | 14136 |
| 7194 | UAUGGGUA A CGCUGAAG | 5388 | CTTCAGCG GGCTAGCTACAACGA TACCCATA | 14137 |
| 7192 | UGGGUAAC G CUGAAGGA | 5389 | TCCTTCAG GGCTAGCTACAACGA GTTACCCA | 14138 |
| 7182 | UGAAGGAA A CUUCUUGG | 5390 | CCAAGAAG GGCTAGCTACAACGA TTCCTTCA | 14139 |
| 7173 | CUUCUUGG A UUUCCGCA | 5391 | TGCGGAAA GGCTAGCTACAACGA CCAAGAAG | 14140 |
| 7167 | GGAUUUCC G CAGGAUCU | 5392 | AGATCCTG GGCTAGCTACAACGA GGAAATCC | 14141 |
| 7162 | UCCGCAGG A UCUCCGCC | 5393 | GGCGGAGA GGCTAGCTACAACGA CCTGCGGA | 14142 |
| 7156 | GGAUCUCC G CCGGAAUG | 5394 | CATTCCGG GGCTAGCTACAACGA GGAGATCC | 14143 |
| 7150 | CCGCCGGA A UGGACACC | 5395 | GGTGTCCA GGCTAGCTACAACGA TCCGGCGG | 14144 |
| 7146 | CGGAAUGG A CACCUCUC | 5396 | GAGAGGTG GGCTAGCTACAACGA CCATTCCG | 14145 |
| 7144 | GAAUGGAC A CCUCUCUC | 5397 | GAGAGAGG GGCTAGCTACAACGA GTCCATTC | 14146 |
| 7133 | UCUCUCUC A UCCUCCUC | 5398 | GAGGAGGA GGCTAGCTACAACGA GAGAGAGA | 14147 |
| 7123 | CCUCCUCC G CUCGAAGC | 5399 | GCTTCGAG GGCTAGCTACAACGA GGAGGAGG | 14148 |
| 7116 | CGCUCGAA G CGGGUCAA | 5400 | TTGACCCG GGCTAGCTACAACGA TTCGAGCG | 14149 |
| 7112 | CGAAGCGG G UCAAAAGA | 5401 | TCTTTTGA GGCTAGCTACAACGA CCGCTTCG | 14150 |
| 7103 | UCAAAAGA G UCCAGGGU | 5402 | ACCCTGGA GGCTAGCTACAACGA TCTTTTGA | 14151 |
| 7096 | AGUCCAGG G UAACUACC | 5403 | GGTAGTTA GGCTAGCTACAACGA CCTGGACT | 14152 |
| 7093 | CCAGGGUA A CUACCUUA | 5404 | TAAGGTAG GGCTAGCTACAACGA TACCCTGG | 14153 |
| 7090 | GGGUAACU A CCUUAUUC | 5405 | GAATAAGG GGCTAGCTACAACGA AGTTACCC | 14154 |
| 7085 | ACUACCUU A UUCUCUGA | 5406 | TCAGAGAA GGCTAGCTACAACGA AAGGTAGT | 14155 |
| 7077 | AUUCUCUG A CUCCACGC | 5407 | GCGTGGAG GGCTAGCTACAACGA CAGAGAAT | 14156 |
| 7072 | CUGACUCC A CGCGAGUG | 5408 | CACTCGCG GGCTAGCTACAACGA GGAGTCAG | 14157 |
| 7070 | GACUCCAC G CGAGUGAU | 5409 | ATCACTCG GGCTAGCTACAACGA GTGGAGTC | 14158 |
| 7066 | CCACGCGA G UGAUGUUA | 5410 | TAACATCA GGCTAGCTACAACGA TCGCGTGG | 14159 |
| 7063 | CGCGAGUG A UGUUACCG | 5411 | CGGTAACA GGCTAGCTACAACGA CACTCGCG | 14160 |
| 7061 | CGAGUGAU G UUACCGCC | 5412 | GGCGGTAA GGCTAGCTACAACGA ATCACTCG | 14161 |
| 7058 | GUGAUGUU A CCGCCCAU | 5413 | ATGGGCGG GGCTAGCTACAACGA AACATCAC | 14162 |
| 7055 | AUGUUACC G CCCAUCUC | 5414 | GAGATGGG GGCTAGCTACAACGA GGTAACAT | 14163 |
| 7051 | UACCGCCC A UCUCCUGC | 5415 | GCAGGAGA GGCTAGCTACAACGA GGGCGGTA | 14164 |
| 7044 | CAUCUCCU G CCGCCACA | 5416 | TGTGGCGG GGCTAGCTACAACGA AGGAGATG | 14165 |
| 7041 | CUCCUGCC G CCACAGGA | 5417 | TCCTGTGG GGCTAGCTACAACGA GGCAGGAG | 14166 |
| 7038 | CUGCCGCC A CAGGAGGU | 5418 | ACCTCCTG GGCTAGCTACAACGA GGCGGCAG | 14167 |
| 7031 | CACAGGAG G UUGGCCUC | 5419 | GAGGCCAA GGCTAGCTACAACGA CTCCTGTG | 14168 |
| 7027 | GGAGGUUG G CCUCGAUG | 5420 | CATCGAGG GGCTAGCTACAACGA CAACCTCC | 14169 |
| 7021 | UGGCCUCG A UGAGGUCA | 5421 | TGACCTCA GGCTAGCTACAACGA CGAGGCCA | 14170 |
| 7016 | UCGAUGAG G UCAAAGUC | 5422 | GACTTTGA GGCTAGCTACAACGA CTCATCGA | 14171 |
| 7010 | AGGUCAAA G UCUGGGGA | 5423 | TCCCCAGA GGCTAGCTACAACGA TTTGACCT | 14172 |
| 7001 | UCUGGGGA G UCAUAUUG | 5424 | CAATATGA GGCTAGCTACAACGA TCCCCAGA | 14173 |
| 6998 | GGGGAGUC A UAUUGGGU | 5425 | ACCCAATA GGCTAGCTACAACGA GACTCCCC | 14174 |
| 6996 | GGAGUCAU A UUGGGUAA | 5426 | TTACCCAA GGCTAGCTACAACGA ATGACTCC | 14175 |
| 6991 | CAUAUUGG G UAAUGUAU | 5427 | ATACATTA GGCTAGCTACAACGA CCAATATG | 14176 |
| 6988 | AUUGGGUA A UGUAUGUC | 5428 | GACATACA GGCTAGCTACAACGA TACCCAAT | 14177 |
| 6986 | UGGGUAAU G UAUGUCGC | 5429 | GCGACATA GGCTAGCTACAACGA ATTACCCA | 14178 |
| 6984 | GGUAAUGU A UGUCGCCU | 5430 | AGGCGACA GGCTAGCTACAACGA ACATTACC | 14179 |
| 6982 | UAAUGUAU G UCGCCUUC | 5431 | GAAGGCGA GGCTAGCTACAACGA ATACATTA | 14180 |
| 6979 | UGUAUGUC G CCUUCGAA | 5432 | TTCGAAGG GGCTAGCTACAACGA GACATACA | 14181 |
| 6966 | CGAAGAAG G CGCAGACA | 5433 | TGTCTGCG GGCTAGCTACAACGA CTTCTTCG | 14182 |
| 6964 | AAGAAGGC G CAGACAGC | 5434 | GCTGTCTG GGCTAGCTACAACGA GCCTTCTT | 14183 |
| 6960 | AGGCGCAG A CAGCUGGC | 5435 | GCCAGCTG GGCTAGCTACAACGA CTGCGCCT | 14184 |
| 6957 | CGCAGACA G CUGGCUAG | 5436 | CTAGCCAG GGCTAGCTACAACGA TGTCTGCG | 14185 |
| 6953 | GACAGCUG G CUAGCUGA | 5437 | TCAGCTAG GGCTAGCTACAACGA CAGCTGTC | 14186 |
| 6949 | GCUGGCUA G CUGAGGAG | 5438 | CTCCTCAG GGCTAGCTACAACGA TAGCCAGC | 14187 |
| 6941 | GCUGAGGA G CUGGCCAA | 5439 | TTGGCCAG GGCTAGCTACAACGA TCCTCAGC | 14188 |
| 6937 | AGGAGCUG G CCAAGGAG | 5440 | CTCCTTGG GGCTAGCTACAACGA CAGCTCCT | 14189 |
| 6921 | GGGGGGAG A CCCCCUGG | 5441 | CCAGGGGG GGCTAGCTACAACGA CTCCCCCC | 14190 |
| 6913 | ACCCCCUG G CCAGCCUA | 5442 | TAGGCTGG GGCTAGCTACAACGA CAGGGGGT | 14191 |
| 6909 | CCUGGCCA G CCUACGCU | 5443 | AGCGTAGG GGCTAGCTACAACGA TGGCCAGG | 14192 |
| 6905 | GCCAGCCU A CGCUUAGC | 5444 | GCTAAGCG GGCTAGCTACAACGA AGGCTGGC | 14193 |
| 6903 | CAGCCUAC G CUUAGCCG | 5445 | CGGCTAAG GGCTAGCTACAACGA GTAGGCTG | 14194 |
| 6898 | UACGCUUA G CCGUCUCU | 5446 | AGAGACGG GGCTAGCTACAACGA TAAGCGTA | 14195 |
| 6895 | GCUUAGCC G UCUCUCCU | 5447 | AGGAGAGA GGCTAGCTACAACGA GGCTAAGC | 14196 |
| 6886 | UCUCUCCU G UAAUGUGG | 5448 | CCACATTA GGCTAGCTACAACGA AGGAGAGA | 14197 |
| 6883 | CUCCUGUA A UGUGGGAG | 5449 | CTCCCACA GGCTAGCTACAACGA TACAGGAG | 14198 |
| 6881 | CCUGUAAU G UGGGAGGG | 5450 | CCCTCCCA GGCTAGCTACAACGA ATTACAGG | 14199 |
| 6872 | UGGGAGGG G UCGGUGAG | 5451 | CTCACCGA GGCTAGCTACAACGA CCCTCCCA | 14200 |
| 6868 | AGGGGUCG G UGAGCAUG | 5452 | CATGCTCA GGCTAGCTACAACGA CGACCCCT | 14201 |
| 6864 | GUCGGUGA G CAUGGACG | 5453 | CGTCCATG GGCTAGCTACAACGA TCACCGAC | 14202 |
| 6862 | CGGUGAGC A UGGACGUG | 5454 | CACGTCCA GGCTAGCTACAACGA GCTCACCG | 14203 |
| 6858 | GAGCAUGG A CGUGAGCA | 5455 | TGCTCACG GGCTAGCTACAACGA CCATGCTC | 14204 |
| 6856 | GCAUGGAC G UGAGCACU | 5456 | AGTGCTCA GGCTAGCTACAACGA GTCCATGC | 14205 |
| 6852 | GGACGUGA G CACUGCUA | 5457 | TAGCAGTG GGCTAGCTACAACGA TCACGTCC | 14206 |
| 6850 | ACGUGAGC A CUGCUACA | 5458 | TGTAGCAG GGCTAGCTACAACGA GCTCACGT | 14207 |
| 6847 | UGAGCACU G CUACAUCC | 5459 | GGATGTAG GGCTAGCTACAACGA AGTGCTCA | 14208 |
| 6844 | GCACUGCU A CAUCCGGU | 5460 | ACCGGATG GGCTAGCTACAACGA AGCAGTGC | 14209 |
| 6842 | ACUGCUAC A UCCGGUUC | 5461 | GAACCGGA GGCTAGCTACAACGA GTAGCAGT | 14210 |
| 6837 | UACAUCCG G UUCGGGCU | 5462 | AGCCCGAA GGCTAGCTACAACGA CGGATGTA | 14211 |
| 6831 | CGGUUCGG G CUCGCAUG | 5463 | CATGCGAG GGCTAGCTACAACGA CCGAACCG | 14212 |
| 6827 | UCGGGCUC G CAUGGGAG | 5464 | CTCCCATG GGCTAGCTACAACGA GAGCCCGA | 14213 |
| 6825 | GGGCUCGC A UGGGAGCU | 5465 | AGCTCCCA GGCTAGCTACAACGA GCGAGCCC | 14214 |
| 6819 | GCAUGGGA G CUGUGACC | 5466 | GGTCACAG GGCTAGCTACAACGA TCCCATGC | 14215 |
| 6816 | UGGGAGCU G UGACCCAA | 5467 | TTGGGTCA GGCTAGCTACAACGA AGCTCCCA | 14216 |
| 6813 | GAGCUGUG A CCCAACCA | 5468 | TGGTTGGG GGCTAGCTACAACGA CACAGCTC | 14217 |
| 6808 | GUGACCCA A CCAGGUAU | 5469 | ATACCTGG GGCTAGCTACAACGA TGGGTCAC | 14218 |
| 6803 | CCAACCAG G UAUUGGUU | 5470 | AACCAATA GGCTAGCTACAACGA CTGGTTGG | 14219 |
| 6801 | AACCAGGU A UUGGUUGA | 5471 | TCAACCAA GGCTAGCTACAACGA ACCTGGTT | 14220 |
| 6797 | AGGUAUUG G UUGAGCCC | 5472 | GGGCTCAA GGCTAGCTACAACGA CAATACCT | 14221 |
| 6792 | UUGGUUGA G CCCGACCU | 5473 | AGGTCGGG GGCTAGCTACAACGA TCAACCAA | 14222 |
| 6787 | UGAGCCCG A CCUGGAAU | 5474 | ATTCCAGG GGCTAGCTACAACGA CGGGCTCA | 14223 |
| 6780 | GACCUGGA A UGUGACCU | 5475 | AGGTCACA GGCTAGCTACAACGA TCCAGGTC | 14224 |
| 6778 | CCUGGAAU G UGACCUCC | 5476 | GGAGGTCA GGCTAGCTACAACGA ATTCCAGG | 14225 |
| 6775 | GGAAUGUG A CCUCCUCC | 5477 | GGAGGAGG GGCTAGCTACAACGA CACATTCC | 14226 |
| 6765 | CUCCUCCC G UAGGAGAG | 5478 | CTCTCCTA GGCTAGCTACAACGA GGGAGGAG | 14227 |
| 6756 | UAGGAGAG G UCCACACG | 5479 | CGTGTGGA GGCTAGCTACAACGA CTCTCCTA | 14228 |
| 6752 | AGAGGUCC A CACGCCGG | 5480 | CCGGCGTG GGCTAGCTACAACGA GGACCTCT | 14229 |
| 6750 | AGGUCCAC A CGCCGGAG | 5481 | CTCCGGCG GGCTAGCTACAACGA GTGGACCT | 14230 |
| 6748 | GUCCACAC G CCGGAGCG | 5482 | CGCTCCGG GGCTAGCTACAACGA GTGTGGAC | 14231 |
| 6742 | ACGCCGGA G CGUUUCUG | 5483 | CAGAAACG GGCTAGCTACAACGA TCCGGCGT | 14232 |
| 6740 | GCCGGAGC G UUUCUGUG | 5484 | CACAGAAA GGCTAGCTACAACGA GCTCCGGC | 14233 |
| 6734 | GCGUUUCU G UGCAGGCG | 5485 | CGCCTGCA GGCTAGCTACAACGA AGAAACGC | 14234 |
| 6732 | GUUUCUGU G CAGGCGUA | 5486 | TACGCCTG GGCTAGCTACAACGA ACAGAAAC | 14235 |
| 6728 | CUGUGCAG G CGUACCCC | 5487 | GGGGTACG GGCTAGCTACAACGA CTGCACAG | 14236 |
| 6726 | GUGCAGGC G UACCCCAU | 5488 | ATGGGGTA GGCTAGCTACAACGA GCCTGCAC | 14237 |
| 6724 | GCAGGCGU A CCCCAUCC | 5489 | GGATGGGG GGCTAGCTACAACGA ACGCCTGC | 14238 |
| 6719 | CGUACCCC A UCCACUUC | 5490 | GAAGTGGA GGCTAGCTACAACGA GGGGTACG | 14239 |
| 6715 | CCCCAUCC A CUUCCGUG | 5491 | CACGGAAG GGCTAGCTACAACGA GGATGGGG | 14240 |
| 6709 | CCACUUCC G UGAAGAAU | 5492 | ATTCTTCA GGCTAGCTACAACGA GGAAGTGG | 14241 |
| 6702 | CGUGAAGA A UUCGGGGG | 5493 | CCCCCGAA GGCTAGCTACAACGA TCTTCACG | 14242 |
| 6693 | UUCGGGGG G CGGAACCU | 5494 | AGGTTCCG GGCTAGCTACAACGA CCCCCGAA | 14243 |
| 6688 | GGGGCGGA A CCUGGCAC | 5495 | GTGCCAGG GGCTAGCTACAACGA TCCGCCCC | 14244 |
| 6683 | GGAACCUG G CACGGGCA | 5496 | TGCCCGTG GGCTAGCTACAACGA CAGGTTCC | 14245 |
| 6681 | AACCUGGC A CGGGCAUU | 5497 | AATGCCCG GGCTAGCTACAACGA GCCAGGTT | 14246 |
| 6677 | UGGCACGG G CAUUUUAC | 5498 | GTAAAATG GGCTAGCTACAACGA CCGTGCCA | 14247 |
| 6675 | GCACGGGC A UUUUACGU | 5499 | ACGTAAAA GGCTAGCTACAACGA GCCCGTGC | 14248 |
| 6670 | GGCAUUUU A CGUUGUCA | 5500 | TGACAACG GGCTAGCTACAACGA AAAATGCC | 14249 |
| 6668 | CAUUUUAC G UUGUCAGU | 5501 | ACTGACAA GGCTAGCTACAACGA GTAAAATG | 14250 |
| 6665 | UUUACGUU G UCAGUGGU | 5502 | ACCACTGA GGCTAGCTACAACGA AACGTAAA | 14251 |
| 6661 | CGUUGUCA G UGGUCAUG | 5503 | CATGACCA GGCTAGCTACAACGA TGACAACG | 14252 |
| 6658 | UGUCAGUG G UCAUGCCC | 5504 | GGGCATGA GGCTAGCTACAACGA CACTGACA | 14253 |
| 6655 | CAGUGGUC A UGCCCGUC | 5505 | GACGGGCA GGCTAGCTACAACGA GACCACTG | 14254 |
| 6653 | GUGGUCAU G CCCGUCAC | 5506 | GTGACGGG GGCTAGCTACAACGA ATGACCAC | 14255 |
| 6649 | UCAUGCCC G UCACGUAG | 5507 | CTACGTGA GGCTAGCTACAACGA GGGCATGA | 14256 |
| 6646 | UGCCCGUC A CGUAGUGG | 5508 | CCACTACG GGCTAGCTACAACGA GACGGGCA | 14257 |
| 6644 | CCCGUCAC G UAGUGGAA | 5509 | TTCCACTA GGCTAGCTACAACGA GTGACGGG | 14258 |
| 6641 | GUCACGUA G UGGAAAUC | 5510 | GATTTCCA GGCTAGCTACAACGA TACGTGAC | 14259 |
| 6635 | UAGUGGAA A UCCCCCAC | 5511 | GTGGGGGA GGCTAGCTACAACGA TTCCACTA | 14260 |
| 6628 | AAUCCCCC A CCCGCGUA | 5512 | TACGCGGG GGCTAGCTACAACGA GGGGGATT | 14261 |
| 6624 | CCCCACCC G CGUAACCU | 5513 | AGGTTACG GGCTAGCTACAACGA GGGTGGGG | 14262 |
| 6622 | CCACCCGC G UAACCUCC | 5514 | GGAGGTTA GGCTAGCTACAACGA GCGGGTGG | 14263 |
| 6619 | CCCGCGUA A CCUCCACG | 5515 | CGTGGAGG GGCTAGCTACAACGA TACGCGGG | 14264 |
| 6613 | UAACCUCC A CGUACUCC | 5516 | GGAGTACG GGCTAGCTACAACGA GGAGGTTA | 14265 |
| 6611 | ACCUCCAC G UACUCCUC | 5517 | GAGGAGTA GGCTAGCTACAACGA GTGGAGGT | 14266 |
| 6609 | CUCCACGU A CUCCUCAG | 5518 | CTGAGGAG GGCTAGCTACAACGA ACGTGGAG | 14267 |
| 6601 | ACUCCUCA G CGGCCACC | 5519 | GGTGGCCG GGCTAGCTACAACGA TGAGGAGT | 14268 |
| 6598 | CCUCAGCG G CCACCCGC | 5520 | GCGGGTGG GGCTAGCTACAACGA CGCTGAGG | 14269 |
| 6595 | CAGCGGCC A CCCGCCAU | 5521 | ATGGCGGG GGCTAGCTACAACGA GGCCGCTG | 14270 |
| 6591 | GGCCACCC G CCAUAGCG | 5522 | CGCTATGG GGCTAGCTACAACGA GGGTGGCC | 14271 |
| 6588 | CACCCGCC A UAGCGCCC | 5523 | GGGCGCTA GGCTAGCTACAACGA GGCGGGTG | 14272 |
| 6585 | CCGCCAUA G CGCCCUAG | 5524 | CTAGGGCG GGCTAGCTACAACGA TATGGCGG | 14273 |
| 6583 | GCCAUAGC G CCCUAGAA | 5525 | TTCTAGGG GGCTAGCTACAACGA GCTATGGC | 14274 |
| 6575 | GCCCUAGA A UAGUUUGG | 5526 | CCAAACTA GGCTAGCTACAACGA TCTAGGGC | 14275 |
| 6572 | CUAGAAUA G UUUGGCGC | 5527 | GCGCCAAA GGCTAGCTACAACGA TATTCTAG | 14276 |
| 6567 | AUAGUUUG G CGCCGGGG | 5528 | CCCCGGCC GGCTAGCTACAACGA CAAACTAT | 14277 |
| 6565 | AGUUUGGC G CCGGGGAG | 5529 | CTCCCCGG GGCTAGCTACAACGA GCCAAACT | 14278 |
| 6555 | CGGGGAGG G UGUGCAGG | 5530 | CCTGCACA GGCTAGCTACAACGA CCTCCCCG | 14279 |
| 6553 | GGGAGGGU G UGCAGGGG | 5531 | CCCCTGCA GGCTAGCTACAACGA ACCCTCCC | 14280 |
| 6551 | GAGGGUGU G CAGGGGCC | 5532 | GGCCCCTG GGCTAGCTACAACGA ACACCCTC | 14281 |
| 6545 | GUGCAGGG G CCCGUGGU | 5533 | ACCACGGG GGCTAGCTACAACGA CCCTGCAC | 14282 |
| 6541 | AGGGGCCC G UGGUGUAU | 5534 | ATACACCA GGCTAGCTACAACGA GGGCCCCT | 14283 |
| 6538 | GGCCCGUG G UGUAUGCG | 5535 | CGCATACA GGCTAGCTACAACGA CACGGGCC | 14284 |
| 6536 | CCCGUGGU G UAUGCGUU | 5536 | AACGCATA GGCTAGCTACAACGA ACCACGGG | 14285 |
| 6534 | CGUGGUGU A UGCGUUGA | 5537 | TCAACGCA GGCTAGCTACAACGA ACACCACG | 14286 |
| 6532 | UGGUGUAU G CGUUGAUG | 5538 | CATCAACG GGCTAGCTACAACGA ATACACCA | 14287 |
| 6530 | GUGUAUGC G UUGAUGGG | 5539 | CCCATCAA GGCTAGCTACAACGA GCATACAC | 14288 |
| 6526 | AUGCGUUG A UGGGGAAU | 5540 | ATTCCCCA GGCTAGCTACAACGA CAACGCAT | 14289 |
| 6519 | GAUGGGGA A UGUUCCAU | 5541 | ATGGAACA GGCTAGCTACAACGA TCCCCATC | 14290 |
| 6517 | UGGGGAAU G UUCCAUGC | 5542 | GCATGGAA GGCTAGCTACAACGA ATTCCCCA | 14291 |
| 6512 | AAUGUUCC A UGCCACGU | 5543 | ACGTGGCA GGCTAGCTACAACGA GGAACATT | 14292 |
| 6510 | UGUUCCAU G CCACGUGU | 5544 | ACACGTGG GGCTAGCTACAACGA ATGGAACA | 14293 |
| 6507 | UCCAUGCC A CGUGUUGC | 5545 | GCAACACG GGCTAGCTACAACGA GGCATGGA | 14294 |
| 6505 | CAUGCCAC G UGUUGCUA | 5546 | TAGCAACA GGCTAGCTACAACGA GTGGCATG | 14295 |
| 6503 | UGCCACGU G UUGCUACA | 5547 | TGTAGCAA GGCTAGCTACAACGA ACGTGGCA | 14296 |
| 6500 | CACGUGUU G CUACAGGU | 5548 | ACCTGTAG GGCTAGCTACAACGA AACACGTG | 14297 |
| 6497 | GUGUUGCU A CAGGUCUU | 5549 | AAGACCTG GGCTAGCTACAACGA AGCAACAC | 14298 |
| 6493 | UGCUACAG G UCUUAGGC | 5550 | GCCTAAGA GGCTAGCTACAACGA CTGTAGCA | 14299 |
| 6486 | GGUCUUAG G CCCGACGA | 5551 | TCGTCGGG GGCTAGCTACAACGA CTAAGACC | 14300 |
| 6481 | UAGGCCCG A CGAUCCUC | 5552 | GAGGATCG GGCTAGCTACAACGA CGGGCCTA | 14301 |
| 6478 | GCCCGACG A UCCUCAUG | 5553 | CATGAGGA GGCTAGCTACAACGA CGTCGGGC | 14302 |
| 6472 | CGAUCCUC A UGGAACCG | 5554 | CGGTTCCA GGCTAGCTACAACGA GAGGATCG | 14303 |
| 6467 | CUCAUGGA A CCGUUCUU | 5555 | AAGAACGG GGCTAGCTACAACGA TCCATGAG | 14304 |
| 6464 | AUGGAACC G UUCUUGAC | 5556 | GTCAAGAA GGCTAGCTACAACGA GGTTCCAT | 14305 |
| 6457 | CGUUCUUG A CAUGUCCA | 5557 | TGGACATG GGCTAGCTACAACGA CAAGAACG | 14306 |
| 6455 | UUCUUGAC A UGUCCAGU | 5558 | ACTGGACA GGCTAGCTACAACGA GTCAAGAA | 14307 |
| 6453 | CUUGACAU G UCCAGUGA | 5559 | TCACTGGA GGCTAGCTACAACGA ATGTCAAG | 14308 |
| 6448 | CAUGUCCA G UGAUCUGC | 5560 | GCAGATCA GGCTAGCTACAACGA TGGACATG | 14309 |
| 6445 | GUCCAGUG A UCUGCGCU | 5561 | AGCGCAGA GGCTAGCTACAACGA CACTGGAC | 14310 |
| 6441 | AGUGAUCU G CGCUCCGC | 5562 | GCGGAGCG GGCTAGCTACAACGA AGATCACT | 14311 |
| 6439 | UGAUCUGC G CUCCGCAU | 5563 | ATGCGGAG GGCTAGCTACAACGA GCAGATCA | 14312 |
| 6434 | UGCGCUCC G CAUGGGCA | 5564 | TGCCCATG GGCTAGCTACAACGA GGAGCGCA | 14313 |
| 6432 | CGCUCCGC A UGGGCAGG | 5565 | CCTGCCCA GGCTAGCTACAACGA GCGGAGCG | 14314 |
| 6428 | CCGCAUGG G CAGGUGGU | 5566 | ACCACCTG GGCTAGCTACAACGA CCATGCGG | 14315 |
| 6424 | AUGGGCAG G UGGUUUGC | 5567 | GCAAACCA GGCTAGCTACAACGA CTGCCCAT | 14316 |
| 6421 | GGCAGGUG G UUUGCAUG | 5568 | CATGCAAA GGCTAGCTACAACGA CACCTGCC | 14317 |
| 6417 | GGUGGUUU G CAUGAUAC | 5569 | GTATCATG GGCTAGCTACAACGA AAACCACC | 14318 |
| 6415 | UGGUUUGC A UGAUACCG | 5570 | CGGTATCA GGCTAGCTACAACGA GCAAACCA | 14319 |
| 6412 | UUUGCAUG A UACCGUCU | 5571 | AGACGGTA GGCTAGCTACAACGA CATGCAAA | 14320 |
| 6410 | UGCAUGAU A CCGUCUCC | 5572 | GGAGACGG GGCTAGCTACAACGA ATCATGCA | 14321 |
| 6407 | AUGAUACC G UCUCCCCG | 5573 | CGGGGAGA GGCTAGCTACAACGA GGTATCAT | 14322 |
| 6399 | GUCUCCCC G CCAGACCC | 5574 | GGGTCTGG GGCTAGCTACAACGA GGGGAGAC | 14323 |
| 6394 | CCCGCCAG A CCCCCCUG | 5575 | CAGGGGGG GGCTAGCTACAACGA CTGGCGGG | 14324 |
| 6386 | ACCCCCCU G UACCCACG | 5576 | CGTGGGTA GGCTAGCTACAACGA AGGGGGGT | 14325 |
| 6384 | CCCCCUGU A CCCACGUU | 5577 | AACGTGGG GGCTAGCTACAACGA ACAGGGGG | 14326 |
| 6380 | CUGUACCC A CGUUGGCA | 5578 | TGCCAACG GGCTAGCTACAACGA GGGTACAG | 14327 |
| 6378 | GUACCCAC G UUGGCAUG | 5579 | CATGCCAA GGCTAGCTACAACGA GTGGGTAC | 14328 |
| 6374 | CCACGUUG G CAUGAGAA | 5580 | TTCTCATG GGCTAGCTACAACGA CAACGTGG | 14329 |
| 6372 | ACGUUGGC A UGAGAAGA | 5581 | TCTTCTCA GGCTAGCTACAACGA GCCAACGT | 14330 |
| 6358 | AGAAAGGG A CUCCCGGC | 5582 | GCCGGGAG GGCTAGCTACAACGA CCCTTTCT | 14331 |
| 6351 | GACUCCCG G CAACCGCG | 5583 | CGCGGTTG GGCTAGCTACAACGA CGGGAGTC | 14332 |
| 6348 | UCCCGGCA A CCGCGGCA | 5584 | TGCCGCGG GGCTAGCTACAACGA TGCCGGGA | 14333 |
| 6345 | CGGCAACC G CGGCAGGA | 5585 | TCCTGCCG GGCTAGCTACAACGA GGTTGCCG | 14334 |
| 6342 | CAACCGCG G CAGGAGCU | 5586 | AGCTCCTG GGCTAGCTACAACGA CGCGGTTG | 14335 |
| 6336 | CGGCAGGA G CUUGGACU | 5587 | AGTCCAAG GGCTAGCTACAACGA TCCTGCCG | 14336 |
| 6330 | GAGCUUGG A CUGAAGCC | 5588 | GGCTTCAG GGCTAGCTACAACGA CCAAGCTC | 14337 |
| 6324 | GGACUGAA G CCAGGUCU | 5589 | AGACCTGG GGCTAGCTACAACGA TTCAGTCC | 14338 |
| 6319 | GAAGCCAG G UCUUGAAG | 5590 | CTTCAAGA GGCTAGCTACAACGA CTGGCTTC | 14339 |
| 6311 | GUCUUGAA G UCAGUCAA | 5591 | TTGACTGA GGCTAGCTACAACGA TTCAAGAC | 14340 |
| 6307 | UGAAGUCA G UCAACACC | 5592 | GGTGTTGA GGCTAGCTACAACGA TGACTTCA | 14341 |
| 6303 | GUCAGUCA A CACCGUGC | 5593 | GCACGGTG GGCTAGCTACAACGA TGACTGAC | 14342 |
| 6301 | CAGUCAAC A CCGUGCAU | 5594 | ATGCACGG GGCTAGCTACAACGA GTTGACTG | 14343 |
| 6298 | UCAACACC G UGCAUAUC | 5595 | GATATGCA GGCTAGCTACAACGA GGTGTTGA | 14344 |
| 6296 | AACACCGU G CAUAUCCA | 5596 | TGGATATG GGCTAGCTACAACGA ACGGTGTT | 14345 |
| 6294 | CACCGUGC A UAUCCAGU | 5597 | ACTGGATA GGCTAGCTACAACGA GCACGGTG | 14346 |
| 6292 | CCGUGCAU A UCCAGUCC | 5598 | GGACTGGA GGCTAGCTACAACGA ATGCACGG | 14347 |
| 6287 | CAUAUCCA G UCCCAAAC | 5599 | GTTTGGGA GGCTAGCTACAACGA TGGATATG | 14348 |
| 6280 | AGUCCCAA A CAUCCCUU | 5600 | AAGGGATG GGCTAGCTACAACGA TTGGGACT | 14349 |
| 6278 | UCCCAAAC A UCCCUUAG | 5601 | CTAAGGGA GGCTAGCTACAACGA GTTTGGGA | 14350 |
| 6270 | AUCCCUUA G CCACGAGC | 5602 | GCTCGTGG GGCTAGCTACAACGA TAAGGGAT | 14351 |
| 6267 | CCUUAGCC A CGAGCCGG | 5603 | CCGGCTCG GGCTAGCTACAACGA GGCTAAGG | 14352 |
| 6263 | AGCCACGA G CCGGAACA | 5604 | TGTTCCGG GGCTAGCTACAACGA TCGTGGCT | 14353 |
| 6257 | GAGCCGGA A CAUGGCGU | 5605 | ACGCCATG GGCTAGCTACAACGA TCCGGCTC | 14354 |
| 6255 | GCCGGAAC A UGGCGUGG | 5606 | CCACGCCA GGCTAGCTACAACGA GTTCCGGC | 14355 |
| 6252 | GGAACAUG G CGUGGAGC | 5607 | GCTCCACG GGCTAGCTACAACGA CATGTTCC | 14356 |
| 6250 | AACAUGGC G UGGAGCAG | 5608 | CTGCTCCA GGCTAGCTACAACGA GCCATGTT | 14357 |
| 6245 | GGCGUGGA G CAGUCCUC | 5609 | GAGGACTG GGCTAGCTACAACGA TCCACGCC | 14358 |
| 6242 | GUGGAGCA G UCCUCAUU | 5610 | AATGAGGA GGCTAGCTACAACGA TGCTCCAC | 14359 |
| 6236 | CAGUCCUC A UUGAUCCA | 5611 | TGGATCAA GGCTAGCTACAACGA GAGGACTG | 14360 |
| 6232 | CCUCAUUG A UCCACUGA | 5612 | TCAGTGGA GGCTAGCTACAACGA CAATGAGG | 14361 |
| 6228 | AUUGAUCC A CUGAUGGA | 5613 | TCCATCAG GGCTAGCTACAACGA GGATCAAT | 14362 |
| 6224 | AUCCACUG A UGGAGCCU | 5614 | AGGCTCCA GGCTAGCTACAACGA CAGTGGAT | 14363 |
| 6219 | CUGAUGGA G CCUCCUCA | 5615 | TGAGGAGG GGCTAGCTACAACGA TCCATCAG | 14364 |
| 6210 | CCUCCUCA G CAGCUGAG | 5616 | CTCAGCTG GGCTAGCTACAACGA TGAGGAGG | 14365 |
| 6207 | CCUCAGCA G CUGAGUGA | 5617 | TCACTCAG GGCTAGCTACAACGA TGCTGAGG | 14366 |
| 6202 | GCAGCUGA G UGAUGGUG | 5618 | CACCATCA GGCTAGCTACAACGA TCAGCTGC | 14367 |
| 6199 | GCUGAGUG A UGGUGAGG | 5619 | CCTCACCA GGCTAGCTACAACGA CACTCAGC | 14368 |
| 6196 | GAGUGAUG G UGAGGCUG | 5620 | CAGCCTCA GGCTAGCTACAACGA CATCACTC | 14369 |
| 6191 | AUGGUGAG G CUGGAGAG | 5621 | CTCTCCAG GGCTAGCTACAACGA CTCACCAT | 14370 |
| 6181 | UGGAGAGG A UUUGUGUG | 5622 | CACACAAA GGCTAGCTACAACGA CCTCTCCA | 14371 |
| 6177 | GAGGAUUU G UGUGACGC | 5623 | GCGTCACA GGCTAGCTACAACGA AAATCCTC | 14372 |
| 6175 | GGAUUUGU G UGACGCGC | 5624 | GCGCGTCA GGCTAGCTACAACGA ACAAATCC | 14373 |
| 6172 | UUUGUGUG A CGCGCGCC | 5625 | GGCGCGCG GGCTAGCTACAACGA CACACAAA | 14374 |
| 6170 | UGUGUGAC G CGCGCCGC | 5626 | GCGGCGCG GGCTAGCTACAACGA GTCACACA | 14375 |
| 6168 | UGUGACGC G CGCCGCUG | 5627 | CAGCGGCG GGCTAGCTACAACGA GCGTCACA | 14376 |
| 6166 | UGACGCGC G CCGCUGCG | 5628 | CGCAGCGG GGCTAGCTACAACGA GCGCGTCA | 14377 |
| 6163 | CGCGCGCC G CUGCGUCG | 5629 | CGACGCAG GGCTAGCTACAACGA GGCGCGCG | 14378 |
| 6160 | GCGCCGCU G CGUCGCUC | 5630 | GAGCGACG GGCTAGCTACAACGA AGCGGCGC | 14379 |
| 6158 | GCCGCUGC G UCGCUCUC | 5631 | GAGAGCGA GGCTAGCTACAACGA GCAGCGGC | 14380 |
| 6155 | GCUGCGUC G CUCUCAGG | 5632 | CCTGAGAG GGCTAGCTACAACGA GACGCAGC | 14381 |
| 6147 | GCUCUCAG G CACAUAGU | 5633 | ACTATGTG GGCTAGCTACAACGA CTGAGAGC | 14382 |
| 6145 | UCUCAGGC A CAUAGUGC | 5634 | GCACTATG GGCTAGCTACAACGA GCCTGAGA | 14383 |
| 6143 | UCAGGCAC A UAGUGCGU | 5635 | ACGCACTA GGCTAGCTACAACGA GTGCCTGA | 14384 |
| 6140 | GGCACAUA G UGCGUGGG | 5636 | CCCACGCA GGCTAGCTACAACGA TATGTGCC | 14385 |
| 6138 | CACAUAGU G CGUGGGGG | 5637 | CCCCCACG GGCTAGCTACAACGA ACTATGTG | 14386 |
| 6136 | CAUAGUGC G UGGGGGAG | 5638 | CTCCCCCA GGCTAGCTACAACGA GCACTATG | 14387 |
| 6127 | UGGGGGAG A CAUGGUUG | 5639 | CAACCATG GGCTAGCTACAACGA CTCCCCCA | 14388 |
| 6125 | GGGGAGAC A UGGUUGCC | 5640 | GGCAACCA GGCTAGCTACAACGA GTCTCCCC | 14389 |
| 6122 | GAGACAUG G UUGCCCCG | 5641 | CGGGGCAA GGCTAGCTACAACGA CATGTCTC | 14390 |
| 6119 | ACAUGGUU G CCCCGCGA | 5642 | TCGCGGGG GGCTAGCTACAACGA AACCATGT | 14391 |
| 6114 | GUUGCCCC G CGAAGCGA | 5643 | TCGCTTCG GGCTAGCTACAACGA GGGGCAAC | 14392 |
| 6109 | CCCGCGAA G CGAACGCU | 5644 | AGCGTTCG GGCTAGCTACAACGA TTCGCGGG | 14393 |
| 6105 | CGAAGCGA A CGCUAUCA | 5645 | TGATAGCG GGCTAGCTACAACGA TCGCTTCG | 14394 |
| 6103 | AAGCGAAC G CUAUCAGC | 5646 | GCTGATAG GGCTAGCTACAACGA GTTCGCTT | 14395 |
| 6100 | CGAACGCU A UCAGCCGA | 5647 | TCGGCTGA GGCTAGCTACAACGA AGCGTTCG | 14396 |
| 6096 | CGCUAUCA G CCGAUUCA | 5648 | TGAATCGG GGCTAGCTACAACGA TGATAGCG | 14397 |
| 6092 | AUCAGCCG A UUCAUCCA | 5649 | TGGATGAA GGCTAGCTACAACGA CGGCTGAT | 14398 |
| 6088 | GCCGAUUC A UCCACUGC | 5650 | GCAGTGGA GGCTAGCTACAACGA GAATCGGC | 14399 |
| 6084 | AUUCAUCC A CUGCACAG | 5651 | CTGTGCAG GGCTAGCTACAACGA GGATGAAT | 14400 |
| 6081 | CAUCCACU G CACAGCGC | 5652 | GCGCTGTG GGCTAGCTACAACGA AGTGGATG | 14401 |
| 6079 | UCCACUGC A CAGCGCCC | 5653 | GGGCGCTG GGCTAGCTACAACGA GCAGTGGA | 14402 |
| 6076 | ACUGCACA G CGCCCUCU | 5654 | AGAGGGCG GGCTAGCTACAACGA TGTGCAGT | 14403 |
| 6074 | UGCACAGC G CCCUCUCC | 5655 | GGAGAGGG GGCTAGCTACAACGA GCTGTGCA | 14404 |
| 6062 | UCUCCUGG G CCCACAUG | 5656 | CATGTGGG GGCTAGCTACAACGA CCAGGAGA | 14405 |
| 6058 | CUGGGCCC A CAUGCCGA | 5657 | TCGGCATG GGCTAGCTACAACGA GGGCCCAG | 14406 |
| 6056 | GGGCCCAC A UGCCGACG | 5658 | CGTCGGCA GGCTAGCTACAACGA GTGGGCCC | 14407 |
| 6054 | GCCCACAU G CCGACGCA | 5659 | TGCGTCGG GGCTAGCTACAACGA ATGTGGGC | 14408 |
| 6050 | ACAUGCCG A CGCAGUAU | 5660 | ATACTGCG GGCTAGCTACAACGA CGGCATGT | 14409 |
| 6048 | AUGCCGAC G CAGUAUCG | 5661 | CGATACTG GGCTAGCTACAACGA GTCGGCAT | 14410 |
| 6045 | CCGACGCA G UAUCGCUG | 5662 | CAGCGATA GGCTAGCTACAACGA TGCGTCGG | 14411 |
| 6043 | GACGCAGU A UCGCUGCG | 5663 | CGCAGCGA GGCTAGCTACAACGA ACTGCGTC | 14412 |
| 6040 | GCAGUAUC G CUGCGCAC | 5664 | GTGCGCAG GGCTAGCTACAACGA GATACTGC | 14413 |
| 6037 | GUAUCGCU G CGCACACC | 5665 | GGTGTGCG GGCTAGCTACAACGA AGCGATAC | 14414 |
| 6035 | AUCGCUGC G CACACCAC | 5666 | GTGGTGTG GGCTAGCTACAACGA GCAGCGAT | 14415 |
| 6033 | CGCUGCGC A CACCACCC | 5667 | GGGTGGTG GGCTAGCTACAACGA GCGCAGCG | 14416 |
| 6031 | CUGCGCAC A CCACCCCG | 5668 | CGGGGTGG GGCTAGCTACAACGA GTGCGCAG | 14417 |
| 6028 | CGCACACC A CCCCGACG | 5669 | CGTCGGGG GGCTAGCTACAACGA GGTGTGCG | 14418 |
| 6022 | CCACCCCG A CGACCAGG | 5670 | CCTGGTCG GGCTAGCTACAACGA CGGGGTGG | 14419 |
| 6019 | CCCCGACG A CCAGGGCG | 5671 | CGCCCTGG GGCTAGCTACAACGA CGTCGGGG | 14420 |
| 6013 | CGACCAGG G CGCCAGGA | 5672 | TCCTGGCG GGCTAGCTACAACGA CCTGGTCG | 14421 |
| 6011 | ACCAGGGC G CCAGGAGA | 5673 | TCTCCTGG GGCTAGCTACAACGA GCCCTGGT | 14422 |
| 5998 | GAGAGAGG A UGGCAGGG | 5674 | CCCTGCCA GGCTAGCTACAACGA CCTCTCTC | 14423 |
| 5995 | AGAGGAUG G CAGGGAGU | 5675 | ACTCCCTG GGCTAGCTACAACGA CATCCTCT | 14424 |
| 5988 | GGCAGGGA G UAAGUUGA | 5676 | TCAACTTA GGCTAGCTACAACGA TCCCTGCC | 14425 |
| 5984 | GGGAGUAA G UUGACCAG | 5677 | CTGGTCAA GGCTAGCTACAACGA TTACTCCC | 14426 |
| 5980 | GUAAGUUG A CCAGGUCC | 5678 | GGACCTGG GGCTAGCTACAACGA CAACTTAC | 14427 |
| 5975 | UUGACCAG G UCCUCGGU | 5679 | ACCGAGGA GGCTAGCTACAACGA CTGGTCAA | 14428 |
| 5968 | GGUCCUCG G UAGAAGGC | 5680 | GCCTTCTA GGCTAGCTACAACGA CGAGGACC | 14429 |
| 5961 | GGUAGAAG G CAUCUCCC | 5681 | GGGAGATG GGCTAGCTACAACGA CTTCTACC | 14430 |
| 5959 | UAGAAGGC A UCUCCCCG | 5682 | CGGGGAGA GGCTAGCTACAACGA GCCTTCTA | 14431 |
| 5951 | AUCUCCCC G CUCAUGAC | 5683 | GTCATGAG GGCTAGCTACAACGA GGGGAGAT | 14432 |
| 5947 | CCCCGCUC A UGACCUUG | 5684 | CAAGGTCA GGCTAGCTACAACGA GAGCGGGG | 14433 |
| 5944 | CGCUCAUG A CCUUGAAG | 5685 | CTTCAAGG GGCTAGCTACAACGA CATGAGCG | 14434 |
| 5935 | CCUUGAAG G CCACGAGA | 5686 | TCTCGTGG GGCTAGCTACAACGA CTTCAAGG | 14435 |
| 5932 | UGAAGGCC A CGAGAGCA | 5687 | TGCTCTCG GGCTAGCTACAACGA GGCCTTCA | 14436 |
| 5926 | CCACGAGA G CACCCGCC | 5688 | GGCGGGTG GGCTAGCTACAACGA TCTCGTGG | 14437 |
| 5924 | ACGAGAGC A CCCGCCAC | 5689 | GTGGCGGG GGCTAGCTACAACGA GCTCTCGT | 14438 |
| 5920 | GAGCACCC G CCACUCCU | 5690 | AGGAGTGG GGCTAGCTACAACGA GGGTGCTC | 14439 |
| 5917 | CACCCGCC A CUCCUGCU | 5691 | AGCAGGAG GGCTAGCTACAACGA GGCGGGTG | 14440 |
| 5911 | CCACUCCU G CUCCAUAG | 5692 | CTATGGAG GGCTAGCTACAACGA AGGAGTGG | 14441 |
| 5906 | CCUGCUCC A UAGCCCGC | 5693 | GCGGGCTA GGCTAGCTACAACGA GGAGCAGG | 14442 |
| 5903 | GCUCCAUA G CCCGCCAG | 5694 | CTGGCGGG GGCTAGCTACAACGA TATGGAGC | 14443 |
| 5899 | CAUAGCCC G CCAGAAUG | 5695 | CATTCTGG GGCTAGCTACAACGA GGGCTATG | 14444 |
| 5893 | CCGCCAGA A UGUCUACA | 5696 | TGTAGACA GGCTAGCTACAACGA TCTGGCGG | 14445 |
| 5891 | GCCAGAAU G UCUACAAG | 5697 | CTTGTAGA GGCTAGCTACAACGA ATTCTGGC | 14446 |
| 5887 | GAAUGUCU A CAAGCACC | 5698 | GGTGCTTG GGCTAGCTACAACGA AGACATTC | 14447 |
| 5883 | GUCUACAA G CACCUUCC | 5699 | GGAAGGTG GGCTAGCTACAACGA TTGTAGAC | 14448 |
| 5881 | CUACAAGC A CCUUCCCA | 5700 | TGGGAAGG GGCTAGCTACAACGA GCTTGTAG | 14449 |
| 5870 | UUCCCAAG G CCUAUGCU | 5701 | AGCATAGG GGCTAGCTACAACGA CTTGGGAA | 14450 |
| 5866 | CAAGGCCU A UGCUGCCA | 5702 | TGGCAGCA GGCTAGCTACAACGA AGGCCTTG | 14451 |
| 5864 | AGGCCUAU G CUGCCAAC | 5703 | GTTGGCAG GGCTAGCTACAACGA ATAGGCCT | 14452 |
| 5861 | CCUAUGCU G CCAACAGC | 5704 | GCTGTTGG GGCTAGCTACAACGA AGCATAGG | 14453 |
| 5857 | UGCUGCCA A CAGCCGCG | 5705 | CGCGGCTG GGCTAGCTACAACGA TGGCAGCA | 14454 |
| 5854 | UGCCAACA G CCGCGCCA | 5706 | TGGCGCGG GGCTAGCTACAACGA TGTTGGCA | 14455 |
| 5851 | CAACAGCC G CGCCAGCG | 5707 | CGCTGGCG GGCTAGCTACAACGA GGCTGTTG | 14456 |
| 5849 | ACAGCCGC G CCAGCGAU | 5708 | ATCGCTGG GGCTAGCTACAACGA GCGGCTGT | 14457 |
| 5845 | CCGCGCCA G CGAUGCCG | 5709 | CGGCATCG GGCTAGCTACAACGA TGGCGCGG | 14458 |
| 5842 | CGCCAGCG A UGCCGGCG | 5710 | CGCCGGCA GGCTAGCTACAACGA CGCTGGCG | 14459 |
| 5840 | CCAGCGAU G CCGGCGCC | 5711 | GGCGCCGG GGCTAGCTACAACGA ATCGCTGG | 14460 |
| 5836 | CGAUGCCG G CGCCCACG | 5712 | CGTGGGCG GGCTAGCTACAACGA CGGCATCG | 14461 |
| 5834 | AUGCCGGC G CCCACGAA | 5713 | TTCGTGGG GGCTAGCTACAACGA GCCGGCAT | 14462 |
| 5830 | CGGCGCCC A CGAAGGCC | 5714 | GGCCTTCG GGCTAGCTACAACGA GGGCGCCG | 14463 |
| 5824 | CCACGAAG G CCGAAACG | 5715 | CGTTTCGG GGCTAGCTACAACGA CTTCGTGG | 14464 |
| 5818 | AGGCCGAA A CGGCUCUG | 5716 | CAGAGCCG GGCTAGCTACAACGA TTCGGCCT | 14465 |
| 5815 | CCGAAACG G CUCUGGGG | 5717 | CCCCAGAG GGCTAGCTACAACGA CGTTTCGG | 14466 |
| 5803 | UGGGGGGA G CGAGUUGG | 5718 | CCAACTCG GGCTAGCTACAACGA TCCCCCCA | 14467 |
| 5799 | GGGAGCGA G UUGGGCGG | 5719 | CCGCCCAA GGCTAGCTACAACGA TCGCTCCC | 14468 |
| 5794 | CGAGUUGG G CGGCCACC | 5720 | GGTGGCCG GGCTAGCTACAACGA CCAACTCG | 14469 |
| 5791 | GUUGGGCG G CCACCCAC | 5721 | GTGGGTGG GGCTAGCTACAACGA CGCCCAAC | 14470 |
| 5788 | GGGCGGCC A CCCACCCU | 5722 | AGGGTGGG GGCTAGCTACAACGA GGCCGCCC | 14471 |
| 5784 | GGCCACCC A CCCUCCCA | 5723 | TGGGAGGG GGCTAGCTACAACGA GGGTGGCC | 14472 |
| 5773 | CUCCCAAG A UGUUGAAC | 5724 | GTTCAACA GGCTAGCTACAACGA CTTGGGAG | 14473 |
| 5771 | CCCAAGAU G UUGAACAG | 5725 | CTGTTCAA GGCTAGCTACAACGA ATCTTGGG | 14474 |
| 5766 | GAUGUUGA A CAGGAGGG | 5726 | CCCTCCTG GGCTAGCTACAACGA TCAACATC | 14475 |
| 5758 | ACAGGAGG G UGCUUUGG | 5727 | CCAAAGCA GGCTAGCTACAACGA CCTCCTGT | 14476 |
| 5756 | AGGAGGGU G CUUUGGGU | 5728 | ACCCAAAG GGCTAGCTACAACGA ACCCTCCT | 14477 |
| 5749 | UGCUUUGG G UGGUGAGC | 5729 | GCTCACCA GGCTAGCTACAACGA CCAAAGCA | 14478 |
| 5746 | UUUGGGUG G UGAGCGGG | 5730 | CCCGCTCA GGCTAGCTACAACGA CACCCAAA | 14479 |
| 5742 | GGUGGUGA G CGGGCUGG | 5731 | CCAGCCCG GGCTAGCTACAACGA TCACCACC | 14480 |
| 5738 | GUGAGCGG G CUGGUGAU | 5732 | ATCACCAG GGCTAGCTACAACGA CCGCTCAC | 14481 |
| 5734 | GCGGGCUG G UGAUGGAG | 5733 | CTCCATCA GGCTAGCTACAACGA CAGCCCGC | 14482 |
| 5731 | GGCUGGUG A UGGAGGCU | 5734 | AGCCTCCA GGCTAGCTACAACGA CACCAGCC | 14483 |
| 5725 | UGAUGGAG G CUGUGAAU | 5735 | ATTCACAG GGCTAGCTACAACGA CTCCATCA | 14484 |
| 5722 | UGGAGGCU G UGAAUGCC | 5736 | GGCATTCA GGCTAGCTACAACGA AGCCTCCA | 14485 |
| 5718 | GGCUGUGA A UGCCAUCA | 5737 | TGATGGCA GGCTAGCTACAACGA TCACAGCC | 14486 |
| 5716 | CUGUGAAU G CCAUCAAU | 5738 | ATTGATGG GGCTAGCTACAACGA ATTCACAG | 14487 |
| 5713 | UGAAUGCC A UCAAUGAU | 5739 | ATCATTGA GGCTAGCTACAACGA GGCATTCA | 14488 |
| 5709 | UGCCAUCA A UGAUGCUA | 5740 | TAGCATCA GGCTAGCTACAACGA TGATGGCA | 14489 |
| 5706 | CAUCAAUG A UGCUAUCG | 5741 | CGATAGCA GGCTAGCTACAACGA CATTGATG | 14490 |
| 5704 | UCAAUGAU G CUAUCGCG | 5742 | CGCGATAG GGCTAGCTACAACGA ATCATTGA | 14491 |
| 5701 | AUGAUGCU A UCGCGGGG | 5743 | CCCCGCGA GGCTAGCTACAACGA AGCATCAT | 14492 |
| 5698 | AUGCUAUC G CGGGGUUC | 5744 | GAACCCCG GGCTAGCTACAACGA GATAGCAT | 14493 |
| 5693 | AUCGCGGG G UUCCCAGG | 5745 | CCTGGGAA GGCTAGCTACAACGA CCCGCGAT | 14494 |
| 5685 | GUUCCCAG G CAGAGUGG | 5746 | CCACTCTG GGCTAGCTACAACGA CTGGGAAC | 14495 |
| 5680 | CAGGCAGA G UGGACAAG | 5747 | CTTGTCCA GGCTAGCTACAACGA TCTGCCTG | 14496 |
| 5676 | CAGAGUGG A CAAGCCUG | 5748 | CAGGCTTG GGCTAGCTACAACGA CCACTCTG | 14497 |
| 5672 | GUGGACAA G CCUGCUAG | 5749 | CTAGCAGG GGCTAGCTACAACGA TTGTCCAC | 14498 |
| 5668 | ACAAGCCU G CUAGGUAC | 5750 | GTACCTAG GGCTAGCTACAACGA AGGCTTGT | 14499 |
| 5663 | CCUGCUAG G UACUGUAU | 5751 | ATACAGTA GGCTAGCTACAACGA CTAGCAGG | 14500 |
| 5661 | UGCUAGGU A CUGUAUCC | 5752 | GGATACAG GGCTAGCTACAACGA ACCTAGCA | 14501 |
| 5658 | UAGGUACU G UAUCCCGC | 5753 | GCGGGATA GGCTAGCTACAACGA AGTACCTA | 14502 |
| 5656 | GGUACUGU A UCCCGCUG | 5754 | CAGCGGGA GGCTAGCTACAACGA ACAGTACC | 14503 |
| 5651 | UGUAUCCC G CUGAUGAA | 5755 | TTCATCAG GGCTAGCTACAACGA GGGATACA | 14504 |
| 5647 | UCCCGCUG A UGAAAUUC | 5756 | GAATTTCA GGCTAGCTACAACGA CAGCGGGA | 14505 |
| 5642 | CUGAUGAA A UUCCACAU | 5757 | ATGTGGAA GGCTAGCTACAACGA TTCATCAG | 14506 |
| 5637 | GAAAUUCC A CAUGUGCU | 5758 | AGCACATG GGCTAGCTACAACGA GGAATTTC | 14507 |
| 5635 | AAUUCCAC A UGUGCUUC | 5759 | GAAGCACA GGCTAGCTACAACGA GTGGAATT | 14508 |
| 5633 | UUCCACAU G UGCUUCGC | 5760 | GCGAAGCA GGCTAGCTACAACGA ATGTGGAA | 14509 |
| 5631 | CCACAUGU G CUUCGCCC | 5761 | GGGCGAAG GGCTAGCTACAACGA ACATGTGG | 14510 |
| 5626 | UGUGCUUC G CCCAGAAA | 5762 | TTTCTGGG GGCTAGCTACAACGA GAAGCACA | 14511 |
| 5617 | CCCAGAAA G CCUCAAGG | 5763 | CCTTGAGG GGCTAGCTACAACGA TTTCTGGG | 14512 |
| 5608 | CCUCAAGG G CUCGCCAC | 5764 | GTGGCGAG GGCTAGCTACAACGA CCTTGAGG | 14513 |
| 5604 | AAGGGCUC G CCACUUGG | 5765 | CCAAGTGG GGCTAGCTACAACGA GAGCCCTT | 14514 |
| 5601 | GGCUCGCC A CUUGGAUU | 5766 | AATCCAAG GGCTAGCTACAACGA GGCGAGCC | 14515 |
| 5595 | CCACUUGG A UUCCACCA | 5767 | TGGTGGAA GGCTAGCTACAACGA CCAAGTGG | 14516 |
| 5590 | UGGAUUCC A CCACGGGA | 5768 | TCCCGTGG GGCTAGCTACAACGA GGAATCCA | 14517 |
| 5587 | AUUCCACC A CGGGAGCA | 5769 | TGCTCCCG GGCTAGCTACAACGA GGTGGAAT | 14518 |
| 5581 | CCACGGGA G CAGCAGCC | 5770 | GGCTGCTG GGCTAGCTACAACGA TCCCGTGG | 14519 |
| 5578 | CGGGAGCA G CAGCCUCC | 5771 | GGAGGCTG GGCTAGCTACAACGA TGCTCCCG | 14520 |
| 5575 | GAGCAGCA G CCUCCGCU | 5772 | AGCGGAGG GGCTAGCTACAACGA TGCTGCTC | 14521 |
| 5569 | CAGCCUCC G CUUGGUUG | 5773 | CAACCAAG GGCTAGCTACAACGA GGAGGCTG | 14522 |
| 5564 | UCCGCUUG G UUGGUGGC | 5774 | GCCACCAA GGCTAGCTACAACGA CAAGCGGA | 14523 |
| 5560 | CUUGGUUG G UGGCUGUU | 5775 | AACAGCCA GGCTAGCTACAACGA CAACCAAG | 14524 |
| 5557 | GGUUGGUG G CUGUUUGC | 5776 | GCAAACAG GGCTAGCTACAACGA CACCAACC | 14525 |
| 5554 | UGGUGGCU G UUUGCAGC | 5777 | GCTGCAAA GGCTAGCTACAACGA AGCCACCA | 14526 |
| 5550 | GGCUGUUU G CAGCAAUC | 5778 | GATTGCTG GGCTAGCTACAACGA AAACAGCC | 14527 |
| 5547 | UGUUUGCA G CAAUCCGA | 5779 | TCGGATTG GGCTAGCTACAACGA TGCAAACA | 14528 |
| 5544 | UUGCAGCA A UCCGAGCG | 5780 | CGCTCGGA GGCTAGCTACAACGA TGCTGCAA | 14529 |
| 5538 | CAAUCCGA G CGCCUUCU | 5781 | AGAAGGCG GGCTAGCTACAACGA TCGGATTG | 14530 |
| 5536 | AUCCGAGC G CCUUCUGC | 5782 | GCAGAAGG GGCTAGCTACAACGA GCTCGGAT | 14531 |
| 5529 | CGCCUUCU G CUUGAACU | 5783 | AGTTCAAG GGCTAGCTACAACGA AGAAGGCG | 14532 |
| 5523 | CUGCUUGA A CUGCUCGG | 5784 | CCGAGCAG GGCTAGCTACAACGA TCAAGCAG | 14533 |
| 5520 | CUUGAACU G CUCGGCGA | 5785 | TCGCCGAG GGCTAGCTACAACGA AGTTCAAG | 14534 |
| 5515 | ACUGCUCG G CGAGCUGC | 5786 | GCAGCTCG GGCTAGCTACAACGA CGAGCAGT | 14535 |
| 5511 | CUCGGCGA G CUGCAUCC | 5787 | GGATGCAG GGCTAGCTACAACGA TCGCCGAG | 14536 |
| 5508 | GGCGAGCU G CAUCCCCU | 5788 | AGGGGATG GGCTAGCTACAACGA AGCTCGCC | 14537 |
| 5506 | CGAGCUGC A UCCCCUGU | 5789 | ACAGGGGA GGCTAGCTACAACGA GCAGCTCG | 14538 |
| 5499 | CAUCCCCU G UUCGAUGU | 5790 | ACATCGAA GGCTAGCTACAACGA AGGGGATG | 14539 |
| 5494 | CCUGUUCG A UGUAAGGG | 5791 | CCCTTACA GGCTAGCTACAACGA CGAACAGG | 14540 |
| 5492 | UGUUCGAU G UAAGGGAG | 5792 | CTCCCTTA GGCTAGCTACAACGA ATCGAACA | 14541 |
| 5483 | UAAGGGAG G UGUGAGGC | 5793 | GCCTCACA GGCTAGCTACAACGA CTCCCTTA | 14542 |
| 5481 | AGGGAGGU G UGAGGCAC | 5794 | GTGCCTCA GGCTAGCTACAACGA ACCTCCCT | 14543 |
| 5476 | GGUGUGAG G CACACUCC | 5795 | GGAGTGTG GGCTAGCTACAACGA CTCACACC | 14544 |
| 5474 | UGUGAGGC A CACUCCUC | 5796 | GAGGAGTG GGCTAGCTACAACGA GCCTCACA | 14545 |
| 5472 | UGAGGCAC A CUCCUCCA | 5797 | TGGAGGAG GGCTAGCTACAACGA GTGCCTCA | 14546 |
| 5464 | ACUCCUCC A UCUCAUCG | 5798 | CGATGAGA GGCTAGCTACAACGA GGAGGAGT | 14547 |
| 5459 | UCCAUCUC A UCGAACUC | 5799 | GAGTTCGA GGCTAGCTACAACGA GAGATGGA | 14548 |
| 5454 | CUCAUCGA A CUCCUGGU | 5800 | ACCAGGAG GGCTAGCTACAACGA TCGATGAG | 14549 |
| 5447 | AACUCCUG G UAGAGAGC | 5801 | GCTCTCTA GGCTAGCTACAACGA CAGGAGTT | 14550 |
| 5440 | GGUAGAGA G CCUCCCUG | 5802 | CAGGGAGG GGCTAGCTACAACGA TCTCTACC | 14551 |
| 5432 | GCCUCCCU G UCGGGGAU | 5803 | ATCCCCGA GGCTAGCTACAACGA AGGGAGGC | 14552 |
| 5425 | UGUCGGGG A UAACAGCC | 5804 | GGCTGTTA GGCTAGCTACAACGA CCCCGACA | 14553 |
| 5422 | CGGGGAUA A CAGCCGGC | 5805 | GCCGGCTG GGCTAGCTACAACGA TATCCCCG | 14554 |
| 5419 | GGAUAACA G CCGGCUUC | 5806 | GAAGCCGG GGCTAGCTACAACGA TGTTATCC | 14555 |
| 5415 | AACAGCCG G CUUCCCGG | 5807 | CCGGGAAG GGCTAGCTACAACGA CGGCTGTT | 14556 |
| 5406 | CUUCCCGG A CAAGAUGA | 5808 | TCATCTTG GGCTAGCTACAACGA CCGGGAAG | 14557 |
| 5401 | CGGACAAG A UGAUUCUG | 5809 | CAGAATCA GGCTAGCTACAACGA CTTGTCCG | 14558 |
| 5398 | ACAAGAUG A UUCUGCCC | 5810 | GGGCAGAA GGCTAGCTACAACGA CATCTTGT | 14559 |
| 5393 | AUGAUUCU G CCCACAAU | 5811 | ATTGTGGG GGCTAGCTACAACGA AGAATCAT | 14560 |
| 5389 | UUCUGCCC A CAAUGACC | 5812 | GGTCATTG GGCTAGCTACAACGA GGGCAGAA | 14561 |
| 5386 | UGCCCACA A UGACCACG | 5813 | CGTGGTCA GGCTAGCTACAACGA TGTGGGCA | 14562 |
| 5383 | CCACAAUG A CCACGCUG | 5814 | CAGCGTGG GGCTAGCTACAACGA CATTGTGG | 14563 |
| 5380 | CAAUGACC A CGCUGCCU | 5815 | AGGCAGCG GGCTAGCTACAACGA GGTCATTG | 14564 |
| 5378 | AUGACCAC G CUGCCUGU | 5816 | ACAGGCAG GGCTAGCTACAACGA GTGGTCAT | 14565 |
| 5375 | ACCACGCU G CCUGUCGU | 5817 | ACGACAGG GGCTAGCTACAACGA AGCGTGGT | 14566 |
| 5371 | CGCUGCCU G UCGUCAGG | 5818 | CCTGACGA GGCTAGCTACAACGA AGGCAGCG | 14567 |
| 5368 | UGCCUGUC G UCAGGCAA | 5819 | TTGCCTGA GGCTAGCTACAACGA GACAGGCA | 14568 |
| 5363 | GUCGUCAG G CAAUACGC | 5820 | GCGTATTG GGCTAGCTACAACGA CTGACGAC | 14569 |
| 5360 | GUCAGGCA A UACGCGGU | 5821 | ACCGCGTA GGCTAGCTACAACGA TGCCTGAC | 14570 |
| 5358 | CAGGCAAU A CGCGGUCA | 5822 | TGACCGCG GGCTAGCTACAACGA ATTGCCTG | 14571 |
| 5356 | GGCAAUAC G CGGUCAGA | 5823 | TCTGACCG GGCTAGCTACAACGA GTATTGCC | 14572 |
| 5353 | AAUACGCG G UCAGAGCU | 5824 | AGCTCTGA GGCTAGCTACAACGA CGCGTATT | 14573 |
| 5347 | CGGUCAGA G CUGCCAGG | 5825 | CCTGGCAG GGCTAGCTACAACGA TCTGACCG | 14574 |
| 5344 | UCAGAGCU G CCAGGACG | 5826 | CGTCCTGG GGCTAGCTACAACGA AGCTCTGA | 14575 |
| 5338 | CUGCCAGG A CGCCACCU | 5827 | AGGTGGCG GGCTAGCTACAACGA CCTGGCAG | 14576 |
| 5336 | GCCAGGAC G CCACCUAC | 5828 | GTAGGTGG GGCTAGCTACAACGA GTCCTGGC | 14577 |
| 5333 | AGGACGCC A CCUACUAG | 5829 | CTAGTAGG GGCTAGCTACAACGA GGCGTCCT | 14578 |
| 5329 | CGCCACCU A CUAGCACC | 5830 | GGTGCTAG GGCTAGCTACAACGA AGGTGGCG | 14579 |
| 5325 | ACCUACUA G CACCCAGG | 5831 | CCTGGGTG GGCTAGCTACAACGA TAGTAGGT | 14580 |
| 5323 | CUACUAGC A CCCAGGUG | 5832 | CACCTGGG GGCTAGCTACAACGA GCTAGTAG | 14581 |
| 5317 | GCACCCAG G UGCUGGUG | 5833 | CACCAGCA GGCTAGCTACAACGA CTGGGTGC | 14582 |
| 5315 | ACCCAGGU G CUGGUGAC | 5834 | GTCACCAG GGCTAGCTACAACGA ACCTGGGT | 14583 |
| 5311 | AGGUGCUG G UGACGACC | 5835 | GGTCGTCA GGCTAGCTACAACGA CAGCACCT | 14584 |
| 5308 | UGCUGGUG A CGACCUCC | 5836 | GGAGGTCG GGCTAGCTACAACGA CACCAGCA | 14585 |
| 5305 | UGGUGACG A CCUCCAGG | 5837 | CCTGGAGG GGCTAGCTACAACGA CGTCACCA | 14586 |
| 5297 | ACCUCCAG G UCAGCCGA | 5838 | TCGGCTGA GGCTAGCTACAACGA CTGGAGGT | 14587 |
| 5293 | CCAGGUCA G CCGACAUG | 5839 | CATGTCGG GGCTAGCTACAACGA TGACCTGG | 14588 |
| 5289 | GUCAGCCG A CAUGCAUG | 5840 | CATGCATG GGCTAGCTACAACGA CGGCTGAC | 14589 |
| 5287 | CAGCCGAC A UGCAUGUC | 5841 | GACATGCA GGCTAGCTACAACGA GTCGGCTG | 14590 |
| 5285 | GCCGACAU G CAUGUCAU | 5842 | ATGACATG GGCTAGCTACAACGA ATGTCGGC | 14591 |
| 5283 | CGACAUGC A UGUCAUGA | 5843 | TCATGACA GGCTAGCTACAACGA GCATGTCG | 14592 |
| 5281 | ACAUGCAU G UCAUGAUG | 5844 | CATCATGA GGCTAGCTACAACGA ATGCATGT | 14593 |
| 5278 | UGCAUGUC A UGAUGUAU | 5845 | ATACATCA GGCTAGCTACAACGA GACATGCA | 14594 |
| 5275 | AUGUCAUG A UGUAUUUG | 5846 | CAAATACA GGCTAGCTACAACGA CATGACAT | 14595 |
| 5273 | GUCAUGAU G UAUUUGGU | 5847 | ACCAAATA GGCTAGCTACAACGA ATCATGAC | 14596 |
| 5271 | CAUGAUGU A UUUGGUUA | 5848 | TAACCAAA GGCTAGCTACAACGA ACATCATG | 14597 |
| 5266 | UGUAUUUG G UUAUGGGG | 5849 | CCCCATAA GGCTAGCTACAACGA CAAATACA | 14598 |
| 5263 | AUUUGGUU A UGGGGUGU | 5850 | ACACCCCA GGCTAGCTACAACGA AACCAAAT | 14599 |
| 5258 | GUUAUGGG G UGUGUGAG | 5851 | CTCACACA GGCTAGCTACAACGA CCCATAAC | 14600 |
| 5256 | UAUGGGGU G UGUGAGGG | 5852 | CCCTCACA GGCTAGCTACAACGA ACCCCATA | 14601 |
| 5254 | UGGGGUGU G UGAGGGUG | 5853 | CACCCTCA GGCTAGCTACAACGA ACACCCCA | 14602 |
| 5248 | GUGUGAGG G UGACAUCA | 5854 | TGATGTCA GGCTAGCTACAACGA CCTCACAC | 14603 |
| 5245 | UGAGGGUG A CAUCAUUU | 5855 | AAATGATG GGCTAGCTACAACGA CACCCTCA | 14604 |
| 5243 | AGGGUGAC A UCAUUUUG | 5856 | CAAAATGA GGCTAGCTACAACGA GTCACCCT | 14605 |
| 5240 | GUGACAUC A UUUUGGAC | 5857 | GTCCAAAA GGCTAGCTACAACGA GATGTCAC | 14606 |
| 5233 | CAUUUUGG A CGGCUCCU | 5858 | AGGAGCCG GGCTAGCTACAACGA CCAAAATG | 14607 |
| 5230 | UUUGGACG G CUCCUAGC | 5859 | GCTAGGAG GGCTAGCTACAACGA CGTCCAAA | 14608 |
| 5223 | GGCUCCUA G CCUAUACA | 5860 | TGTATAGG GGCTAGCTACAACGA TAGGAGCC | 14609 |
| 5219 | CCUAGCCU A UACAGCAG | 5861 | CTGCTGTA GGCTAGCTACAACGA AGGCTAGG | 14610 |
| 5217 | UAGCCUAU A CAGCAGGG | 5862 | CCCTGCTG GGCTAGCTACAACGA ATAGGCTA | 14611 |
| 5214 | CCUAUACA G CAGGGGUG | 5863 | CACCCCTG GGCTAGCTACAACGA TGTATAGG | 14612 |
| 5208 | CAGCAGGG G UGUUGGCC | 5864 | GGCCAACA GGCTAGCTACAACGA CCCTGCTG | 14613 |
| 5206 | GCAGGGGU G UUGGCCCG | 5865 | CGGGCCAA GGCTAGCTACAACGA ACCCCTGC | 14614 |
| 5202 | GGGUGUUG G CCCGUGUA | 5866 | TACACGGG GGCTAGCTACAACGA CAACACCC | 14615 |
| 5198 | GUUGGCCC G UGUAGCGU | 5867 | ACGCTACA GGCTAGCTACAACGA GGGCCAAC | 14616 |
| 5196 | UGGCCCGU G UAGCGUAG | 5868 | CTACGCTA GGCTAGCTACAACGA ACGGGCCA | 14617 |
| 5193 | CCCGUGUA G CGUAGGCU | 5869 | AGCCTACG GGCTAGCTACAACGA TACACGGG | 14618 |
| 5191 | CGUGUAGC G UAGGCUUU | 5870 | AAAGCCTA GGCTAGCTACAACGA GCTACACG | 14619 |
| 5187 | UAGCGUAG G CUUUAGCC | 5871 | GGCTAAAG GGCTAGCTACAACGA CTACGCTA | 14620 |
| 5181 | AGGCUUUA G CCGUGUGA | 5872 | TCACACGG GGCTAGCTACAACGA TAAAGCCT | 14621 |
| 5178 | CUUUAGCC G UGUGAGAC | 5873 | GTCTCACA GGCTAGCTACAACGA GGCTAAAG | 14622 |
| 5176 | UUAGCCGU G UGAGACAC | 5874 | GTGTCTCA GGCTAGCTACAACGA ACGGCTAA | 14623 |
| 5171 | CGUGUGAG A CACUUCCA | 5875 | TGGAAGTG GGCTAGCTACAACGA CTCACACG | 14624 |
| 5169 | UGUGAGAC A CUUCCACA | 5876 | TGTGGAAG GGCTAGCTACAACGA GTCTCACA | 14625 |
| 5163 | ACACUUCC A CAUUUGAU | 5877 | ATCAAATG GGCTAGCTACAACGA GGAAGTGT | 14626 |
| 5161 | ACUUCCAC A UUUGAUCC | 5878 | GGATCAAA GGCTAGCTACAACGA GTGGAAGT | 14627 |
| 5156 | CACAUUUG A UCCCACGA | 5879 | TCGTGGGA GGCTAGCTACAACGA CAAATGTG | 14628 |
| 5151 | UUGAUCCC A CGAUGGGG | 5880 | CCCCATCG GGCTAGCTACAACGA GGGATCAA | 14629 |
| 5148 | AUCCCACG A UGGGGGUG | 5881 | CACCCCCA GGCTAGCTACAACGA CGTGGGAT | 14630 |
| 5142 | CGAUGGGG G UGGAGCCU | 5882 | AGGCTCCA GGCTAGCTACAACGA CCCCATCG | 14631 |
| 5137 | GGGGUGGA G CCUGAGCC | 5883 | GGCTCAGG GGCTAGCTACAACGA TCCACCCC | 14632 |
| 5131 | GAGCCUGA G CCCUGGCG | 5884 | CGCCAGGG GGCTAGCTACAACGA TCAGGCTC | 14633 |
| 5125 | GAGCCCUG G CGCACACU | 5885 | AGTGTGCG GGCTAGCTACAACGA CAGGGCTC | 14634 |
| 5123 | GCCCUGGC G CACACUGU | 5886 | ACAGTGTG GGCTAGCTACAACGA GCCAGGGC | 14635 |
| 5121 | CCUGGCGC A CACUGUGG | 5887 | CCACAGTG GGCTAGCTACAACGA GCGCCAGG | 14636 |
| 5119 | UGGCGCAC A CUGUGGCU | 5888 | AGCCACAG GGCTAGCTACAACGA GTGCGCCA | 14637 |
| 5116 | CGCACACU G UGGCUUGG | 5889 | CCAAGCCA GGCTAGCTACAACGA AGTGTGCG | 14638 |
| 5113 | ACACUGUG G CUUGGUAU | 5890 | ATACCAAG GGCTAGCTACAACGA CACAGTGT | 14639 |
| 5108 | GUGGCUUG G UAUGCUAC | 5891 | GTAGCATA GGCTAGCTACAACGA CAAGCCAC | 14640 |
| 5106 | GGCUUGGU A UGCUACCA | 5892 | TGGTAGCA GGCTAGCTACAACGA ACCAAGCC | 14641 |
| 5104 | CUUGGUAU G CUACCAGG | 5893 | CCTGGTAG GGCTAGCTACAACGA ATACCAAG | 14642 |
| 5101 | GGUAUGCU A CCAGGUAG | 5894 | CTACCTGG GGCTAGCTACAACGA AGCATACC | 14643 |
| 5096 | GCUACCAG G UAGGGGAG | 5895 | CTCCCCTA GGCTAGCTACAACGA CTGGTAGC | 14644 |
| 5087 | UAGGGGAG G UUUUCUCC | 5896 | GGAGAAAA GGCTAGCTACAACGA CTCCCCTA | 14645 |
| 5077 | UUUCUCCU G CCUGCUUG | 5897 | CAAGCAGG GGCTAGCTACAACGA AGGAGAAA | 14646 |
| 5073 | UCCUGCCU G CUUGGUCU | 5898 | AGACCAAG GGCTAGCTACAACGA AGGCAGGA | 14647 |
| 5068 | CCUGCUUG G UCUGGGAC | 5899 | GTCCCAGA GGCTAGCTACAACGA CAAGCAGG | 14648 |
| 5061 | GGUCUGGG A CAAGAAGU | 5900 | ACTTCTTG GGCTAGCTACAACGA CCCAGACC | 14649 |
| 5054 | GACAAGAA G UGGGCAUC | 5901 | GATGCCCA GGCTAGCTACAACGA TTCTTGTC | 14650 |
| 5050 | AGAAGUGG G CAUCUAUG | 5902 | CATAGATG GGCTAGCTACAACGA CCACTTCT | 14651 |
| 5048 | AAGUGGGC A UCUAUGUG | 5903 | CACATAGA GGCTAGCTACAACGA GCCCACTT | 14652 |
| 5044 | GGGCAUCU A UGUGGGUG | 5904 | CACCCACA GGCTAGCTACAACGA AGATGCCC | 14653 |
| 5042 | GCAUCUAU G UGGGUGAG | 5905 | CTCACCCA GGCTAGCTACAACGA ATAGATGC | 14654 |
| 5038 | CUAUGUGG G UGAGGCCU | 5906 | AGGCCTCA GGCTAGCTACAACGA CCACATAG | 14655 |
| 5033 | UGGGUGAG G CCUGUGAA | 5907 | TTCACAGG GGCTAGCTACAACGA CTCACCCA | 14656 |
| 5029 | UGAGGCCU G UGAAGACA | 5908 | TGTCTTCA GGCTAGCTACAACGA AGGCCTCA | 14657 |
| 5023 | CUGUGAAG A CACCCUCC | 5909 | GGAGGGTG GGCTAGCTACAACGA CTTCACAG | 14658 |
| 5021 | GUGAAGAC A CCCUCCCA | 5910 | TGGGAGGG GGCTAGCTACAACGA GTCTTCAC | 14659 |
| 5010 | CUCCCAGA A CUCCAGAU | 5911 | ATCTGGAG GGCTAGCTACAACGA TCTGGGAG | 14660 |
| 5003 | AACUCCAG A UGGUCCUG | 5912 | CAGGACCA GGCTAGCTACAACGA CTGGAGTT | 14661 |
| 5000 | UCCAGAUG G UCCUGGCA | 5913 | TGCCAGGA GGCTAGCTACAACGA CATCTGGA | 14662 |
| 4994 | UGGUCCUG G CAGAAGGG | 5914 | CCCTTCTG GGCTAGCTACAACGA CAGGACCA | 14663 |
| 4986 | GCAGAAGG G CAACCCUG | 5915 | CAGGGTTG GGCTAGCTACAACGA CCTTCTGC | 14664 |
| 4983 | GAAGGGCA A CCCUGGUG | 5916 | CACCAGGG GGCTAGCTACAACGA TGCCCTTC | 14665 |
| 4977 | CAACCCUG G UGUAUUUA | 5917 | TAAATACA GGCTAGCTACAACGA CAGGGTTG | 14666 |
| 4975 | ACCCUGGU G UAUUUAGG | 5918 | CCTAAATA GGCTAGCTACAACGA ACCAGGGT | 14667 |
| 4973 | CCUGGUGU A UUUAGGUA | 5919 | TACCTAAA GGCTAGCTACAACGA ACACCAGG | 14668 |
| 4967 | GUAUUUAG G UAAGCCCG | 5920 | CGGGCTTA GGCTAGCTACAACGA CTAAATAC | 14669 |
| 4963 | UUAGGUAA G CCCGCAAC | 5921 | GTTGCGGG GGCTAGCTACAACGA TTACCTAA | 14670 |
| 4959 | GUAAGCCC G CAACCUAA | 5922 | TTAGGTTG GGCTAGCTACAACGA GGGCTTAC | 14671 |
| 4956 | AGCCCGCA A CCUAACGG | 5923 | CCGTTAGG GGCTAGCTACAACGA TGCGGGCT | 14672 |
| 4951 | GCAACCUA A CGGAGGUC | 5924 | GACCTCCG GGCTAGCTACAACGA TAGGTTGC | 14673 |
| 4945 | UAACGGAG G UCUCGGCG | 5925 | CGCCGAGA GGCTAGCTACAACGA CTCCGTTA | 14674 |
| 4939 | AGGUCUCG G CGGGCGUG | 5926 | CACGCCCG GGCTAGCTACAACGA CGAGACCT | 14675 |
| 4935 | CUCGGCGG G CGUGAGCU | 5927 | AGCTCACG GGCTAGCTACAACGA CCGCCGAG | 14676 |
| 4933 | CGGCGGGC G UGAGCUCG | 5928 | CGAGCTCA GGCTAGCTACAACGA GCCCGCCG | 14677 |
| 4929 | GGGCGUGA G CUCGUACC | 5929 | GGTACGAG GGCTAGCTACAACGA TCACGCCC | 14678 |
| 4925 | GUGAGCUC G UACCAAGC | 5930 | GCTTGGTA GGCTAGCTACAACGA GAGCTCAC | 14679 |
| 4923 | GAGCUCGU A CCAAGCAC | 5931 | GTGCTTGG GGCTAGCTACAACGA ACGAGCTC | 14680 |
| 4918 | CGUACCAA G CACAUCCC | 5932 | GGGATGTG GGCTAGCTACAACGA TTGGTACG | 14681 |
| 4916 | UACCAAGC A CAUCCCGC | 5933 | GCGGGATG GGCTAGCTACAACGA GCTTGGTA | 14682 |
| 4914 | CCAAGCAC A UCCCGCGU | 5934 | ACGCGGGA GGCTAGCTACAACGA GTGCTTGG | 14683 |
| 4909 | CACAUCCC G CGUCAUAG | 5935 | CTATGACG GGCTAGCTACAACGA GGGATGTG | 14684 |
| 4907 | CAUCCCGC G UCAUAGCA | 5936 | TGCTATGA GGCTAGCTACAACGA GCGGGATG | 14685 |
| 4904 | CCCGCGUC A UAGCACUC | 5937 | GAGTGCTA GGCTAGCTACAACGA GACGCGGG | 14686 |
| 4901 | GCGUCAUA G CACUCACA | 5938 | TGTGAGTG GGCTAGCTACAACGA TATGACGC | 14687 |
| 4899 | GUCAUAGC A CUCACACA | 5939 | TGTGTGAG GGCTAGCTACAACGA GCTATGAC | 14688 |
| 4895 | UAGCACUC A CACAGGAC | 5940 | GTCCTGTG GGCTAGCTACAACGA GAGTGCTA | 14689 |
| 4893 | GCACUCAC A CAGGACCG | 5941 | CGGTCCTG GGCTAGCTACAACGA GTGAGTGC | 14690 |
| 4888 | CACACAGG A CCGAGGAG | 5942 | CTCCTCGG GGCTAGCTACAACGA CCTGTGTG | 14691 |
| 4880 | ACCGAGGA G UCGAACAU | 5943 | ATGTTCGA GGCTAGCTACAACGA TCCTCGGT | 14692 |
| 4875 | GGAGUCGA A CAUGCCCG | 5944 | CGGGCATG GGCTAGCTACAACGA TCGACTCC | 14693 |
| 4873 | AGUCGAAC A UGCCCGAA | 5945 | TTCGGGCA GGCTAGCTACAACGA GTTCGACT | 14694 |
| 4871 | UCGAACAU G CCCGAAGG | 5946 | CCTTCGGG GGCTAGCTACAACGA ATGTTCGA | 14695 |
| 4863 | GCCCGAAG G CCGCUCUC | 5947 | GAGAGCGG GGCTAGCTACAACGA CTTCGGGC | 14696 |
| 4860 | CGAAGGCC G CUCUCCUG | 5948 | CAGGAGAG GGCTAGCTACAACGA GGCCTTCG | 14697 |
| 4849 | CUCCUGGA G UCACAAAC | 5949 | GTTTGTGA GGCTAGCTACAACGA TCCAGGAG | 14698 |
| 4846 | CUGGAGUC A CAAACCUG | 5950 | CAGGTTTG GGCTAGCTACAACGA GACTCCAG | 14699 |
| 4842 | AGUCACAA A CCUGUAUA | 5951 | TATACAGG GGCTAGCTACAACGA TTGTGACT | 14700 |
| 4838 | ACAAACCU G UAUAUGCC | 5952 | GGCATATA GGCTAGCTACAACGA AGGTTTGT | 14701 |
| 4836 | AAACCUGU A UAUGCCUC | 5953 | GAGGCATA GGCTAGCTACAACGA ACAGGTTT | 14702 |
| 4834 | ACCUGUAU A UGCCUCUC | 5954 | GAGAGGCA GGCTAGCTACAACGA ATACAGGT | 14703 |
| 4832 | CUGUAUAU G CCUCUCCU | 5955 | AGGAGAGG GGCTAGCTACAACGA ATATACAG | 14704 |
| 4823 | CCUCUCCU G CCCCUACC | 5956 | GGTAGGGG GGCTAGCTACAACGA AGGAGAGG | 14705 |
| 4817 | CUGCCCCU A CCGGUCCU | 5957 | AGGACCGG GGCTAGCTACAACGA AGGGGCAG | 14706 |
| 4813 | CCCUACCG G UCCUACCU | 5958 | AGGTAGGA GGCTAGCTACAACGA CGGTAGGG | 14707 |
| 4808 | CCGGUCCU A CCUCGCCU | 5959 | AGGCGAGG GGCTAGCTACAACGA AGGACCGG | 14708 |
| 4803 | CCUACCUC G CCUCUGCG | 5960 | CGCAGAGG GGCTAGCTACAACGA GAGGTAGG | 14709 |
| 4797 | UCGCCUCU G CGAGCGGG | 5961 | CCCGCTCG GGCTAGCTACAACGA AGAGGCGA | 14710 |
| 4793 | CUCUGCGA G CGGGACAC | 5962 | GTGTCCCG GGCTAGCTACAACGA TCGCAGAG | 14711 |
| 4788 | CGAGCGGG A CACUGCGU | 5963 | ACGCAGTG GGCTAGCTACAACGA CCCGCTCG | 14712 |
| 4786 | AGCGGGAC A CUGCGUCU | 5964 | AGACGCAG GGCTAGCTACAACGA GTCCCGCT | 14713 |
| 4783 | GGGACACU G CGUCUUGG | 5965 | CCAAGACG GGCTAGCTACAACGA AGTGTCCC | 14714 |
| 4781 | GACACUGC G UCUUGGGG | 5966 | CCCCAAGA GGCTAGCTACAACGA GCAGTGTC | 14715 |
| 4773 | GUCUUGGG G CACGGUCG | 5967 | CGACCGTG GGCTAGCTACAACGA CCCAAGAC | 14716 |
| 4771 | CUUGGGGC A CGGUCGUC | 5968 | GACGACCG GGCTAGCTACAACGA GCCCCAAG | 14717 |
| 4768 | GGGGCACG G UCGUCGUC | 5969 | GACGACGA GGCTAGCTACAACGA CGTGCCCC | 14718 |
| 4765 | GCACGGUC G UCGUCUCA | 5970 | TGAGACGA GGCTAGCTACAACGA GACCGTGC | 14719 |
| 4762 | CGGUCGUC G UCUCAAUG | 5971 | CATTGAGA GGCTAGCTACAACGA GACGACCG | 14720 |
| 4756 | UCGUCUCA A UGGUGAAG | 5972 | CTTCACCA GGCTAGCTACAACGA TGAGACGA | 14721 |
| 4753 | UCUCAAUG G UGAAGGUA | 5973 | TACCTTCA GGCTAGCTACAACGA CATTGAGA | 14722 |
| 4747 | UGGUGAAG G UAGGGUCC | 5974 | GGACCCTA GGCTAGCTACAACGA CTTCACCA | 14723 |
| 4742 | AAGGUAGG G UCCAAGCU | 5975 | AGCTTGGA GGCTAGCTACAACGA CCTACCTT | 14724 |
| 4736 | GGGUCCAA G CUGAAGUC | 5976 | GACTTCAG GGCTAGCTACAACGA TTGGACCC | 14725 |
| 4730 | AAGCUGAA G UCGACUGU | 5977 | ACAGTCGA GGCTAGCTACAACGA TTCAGCTT | 14726 |
| 4726 | UGAAGUCG A CUGUUUGG | 5978 | CCAAACAG GGCTAGCTACAACGA CGACTTCA | 14727 |
| 4723 | AGUCGACU G UUUGGGUG | 5979 | CACCCAAA GGCTAGCTACAACGA AGTCGACT | 14728 |
| 4717 | CUGUUUGG G UGACACAU | 5980 | ATGTGTCA GGCTAGCTACAACGA CCAAACAG | 14729 |
| 4714 | UUUGGGUG A CACAUGUA | 5981 | TACATGTG GGCTAGCTACAACGA CACCCAAA | 14730 |
| 4712 | UGGGUGAC A CAUGUAUU | 5982 | AATACATG GGCTAGCTACAACGA GTCACCCA | 14731 |
| 4710 | GGUGACAC A UGUAUUAC | 5983 | GTAATACA GGCTAGCTACAACGA GTGTCACC | 14732 |
| 4708 | UGACACAU G UAUUACAG | 5984 | CTGTAATA GGCTAGCTACAACGA ATGTGTCA | 14733 |
| 4706 | ACACAUGU A UUACAGUC | 5985 | GACTGTAA GGCTAGCTACAACGA ACATGTGT | 14734 |
| 4703 | CAUGUAUU A CAGUCGAU | 5986 | ATCGACTG GGCTAGCTACAACGA AATACATG | 14735 |
| 4700 | GUAUUACA G UCGAUCAC | 5987 | GTGATCGA GGCTAGCTACAACGA TGTAATAC | 14736 |
| 4696 | UACAGUCG A UCACCGAG | 5988 | CTCGGTGA GGCTAGCTACAACGA CGACTGTA | 14737 |
| 4693 | AGUCGAUC A CCGAGUCA | 5989 | TGACTCGG GGCTAGCTACAACGA GATCGACT | 14738 |
| 4688 | AUCACCGA G UCAAAAUC | 5990 | GATTTTGA GGCTAGCTACAACGA TCGGTGAT | 14739 |
| 4682 | GAGUCAAA A UCGCCGGU | 5991 | ACCGGCGA GGCTAGCTACAACGA TTTGACTC | 14740 |
| 4679 | UCAAAAUC G CCGGUAUA | 5992 | TATACCGG GGCTAGCTACAACGA GATTTTGA | 14741 |
| 4675 | AAUCGCCG G UAUAGCCC | 5993 | GGGCTATA GGCTAGCTACAACGA CGGCGATT | 14742 |
| 4673 | UCGCCGGU A UAGCCCGU | 5994 | ACGGGCTA GGCTAGCTACAACGA ACCGGCGA | 14743 |
| 4670 | CCGGUAUA G CCCGUCAU | 5995 | ATGACGGG GGCTAGCTACAACGA TATACCGG | 14744 |
| 4666 | UAUAGCCC G UCAUUAGA | 5996 | TCTAATGA GGCTAGCTACAACGA GGGCTATA | 14745 |
| 4663 | AGCCCGUC A UUAGAGCG | 5997 | CGCTCTAA GGCTAGCTACAACGA GACGGGCT | 14746 |
| 4657 | UCAUUAGA G CGUCUGUU | 5998 | AACAGACG GGCTAGCTACAACGA TCTAATGA | 14747 |
| 4655 | AUUAGAGC G UCUGUUGC | 5999 | GCAACAGA GGCTAGCTACAACGA GCTCTAAT | 14748 |
| 4651 | GAGCGUCU G UUGCCACG | 6000 | CGTGGCAA GGCTAGCTACAACGA AGACGCTC | 14749 |
| 4648 | CGUCUGUU G CCACGACA | 6001 | TGTCGTGG GGCTAGCTACAACGA AACAGACG | 14750 |
| 4645 | CUGUUGCC A CGACAACG | 6002 | CGTTGTCG GGCTAGCTACAACGA GGCAACAG | 14751 |
| 4642 | UUGCCACG A CAACGACG | 6003 | CGTCGTTG GGCTAGCTACAACGA CGTGGCAA | 14752 |
| 4639 | CCACGACA A CGACGUCC | 6004 | GGACGTCG GGCTAGCTACAACGA TGTCGTGG | 14753 |
| 4636 | CGACAACG A CGUCCCCG | 6005 | CGGGGACG GGCTAGCTACAACGA CGTTGTCG | 14754 |
| 4634 | ACAACGAC G UCCCCGCU | 6006 | AGCGGGGA GGCTAGCTACAACGA GTCGTTGT | 14755 |
| 4628 | ACGUCCCC G CUGGCCGG | 6007 | CCGGCCAG GGCTAGCTACAACGA GGGGACGT | 14756 |
| 4624 | CCCCGCUG G CCGGUAUG | 6008 | CATACCGG GGCTAGCTACAACGA CAGCGGGG | 14757 |
| 4620 | GCUGGCCG G UAUGACGG | 6009 | CCGTCATA GGCTAGCTACAACGA CGGCCAGC | 14758 |
| 4618 | UGGCCGGU A UGACGGAC | 6010 | GTCCGTCA GGCTAGCTACAACGA ACCGGCCA | 14759 |
| 4615 | CCGGUAUG A CGGACACG | 6011 | CGTGTCCG GGCTAGCTACAACGA CATACCGG | 14760 |
| 4611 | UAUGACGG A CACGUCGA | 6012 | TCGACGTG GGCTAGCTACAACGA CCGTCATA | 14761 |
| 4609 | UGACGGAC A CGUCGAGA | 6013 | TCTCGACG GGCTAGCTACAACGA GTCCGTCA | 14762 |
| 4607 | ACGGACAC G UCGAGACC | 6014 | GGTCTCGA GGCTAGCTACAACGA GTGTCCGT | 14763 |
| 4601 | ACGUCGAG A CCCCGGUA | 6015 | TACCGGGG GGCTAGCTACAACGA CTCGACGT | 14764 |
| 4595 | AGACCCCG G UAAUACGC | 6016 | GCGTATTA GGCTAGCTACAACGA CGGGGTCT | 14765 |
| 4592 | CCCCGGUA A UACGCUAC | 6017 | GTAGCGTA GGCTAGCTACAACGA TACCGGGG | 14766 |
| 4590 | CCGGUAAU A CGCUACAG | 6018 | CTGTAGCG GGCTAGCTACAACGA ATTACCGG | 14767 |
| 4588 | GGUAAUAC G CUACAGCG | 6019 | CGCTGTAG GGCTAGCTACAACGA GTATTACC | 14768 |
| 4585 | AAUACGCU A CAGCGUUA | 6020 | TAACGCTG GGCTAGCTACAACGA AGCGTATT | 14769 |
| 4582 | ACGCUACA G CGUUAAGU | 6021 | ACTTAACG GGCTAGCTACAACGA TGTAGCGT | 14770 |
| 4580 | GCUACAGC G UUAAGUCC | 6022 | GGACTTAA GGCTAGCTACAACGA GCTGTAGC | 14771 |
| 4575 | AGCGUUAA G UCCGAGGC | 6023 | GCCTCGGA GGCTAGCTACAACGA TTAACGCT | 14772 |
| 4568 | AGUCCGAG G CCCGACAG | 6024 | CTGTCGGG GGCTAGCTACAACGA CTCGGACT | 14773 |
| 4563 | GAGGCCCG A CAGCUUUG | 6025 | CAAAGCTG GGCTAGCTACAACGA CGGGCCTC | 14774 |
| 4560 | GCCCGACA G CUUUGCAG | 6026 | CTGCAAAG GGCTAGCTACAACGA TGTCGGGC | 14775 |
| 4555 | ACAGCUUU G CAGCGAGC | 6027 | GCTCGCTG GGCTAGCTACAACGA AAAGCTGT | 14776 |
| 4552 | GCUUUGCA G CGAGCUCG | 6028 | CGAGCTCG GGCTAGCTACAACGA TGCAAAGC | 14777 |
| 4548 | UGCAGCGA G CUCGUCAC | 6029 | GTGACGAG GGCTAGCTACAACGA TCGCTGCA | 14778 |
| 4544 | GCGAGCUC G UCACAUUU | 6030 | AAATGTGA GGCTAGCTACAACGA GAGCTCGC | 14779 |
| 4541 | AGCUCGUC A CAUUUCUU | 6031 | AAGAAATG GGCTAGCTACAACGA GACGAGCT | 14780 |
| 4539 | CUCGUCAC A UUUCUUCU | 6032 | AGAAGAAA GGCTAGCTACAACGA GTGACGAG | 14781 |
| 4526 | UUCUUGGA A UGGCAGAA | 6033 | TTCTGCCA GGCTAGCTACAACGA TCCAAGAA | 14782 |
| 4523 | UUGGAAUG G CAGAAGAU | 6034 | ATCTTCTG GGCTAGCTACAACGA CATTCCAA | 14783 |
| 4516 | GGCAGAAG A UGAGAUGC | 6035 | GCATCTCA GGCTAGCTACAACGA CTTCTGCC | 14784 |
| 4511 | AAGAUGAG A UGCCUCCC | 6036 | GGGAGGCA GGCTAGCTACAACGA CTCATCTT | 14785 |
| 4509 | GAUGAGAU G CCUCCCCC | 6037 | GGGGGAGG GGCTAGCTACAACGA ATCTCATC | 14786 |
| 4495 | CCCCUUUG A UGGUCUCG | 6038 | CGAGACCA GGCTAGCTACAACGA CAAAGGGG | 14787 |
| 4492 | CUUUGAUG G UCUCGAUG | 6039 | CATCGAGA GGCTAGCTACAACGA CATCAAAG | 14788 |
| 4486 | UGGUCUCG A UGGGGAUG | 6040 | CATCCCCA GGCTAGCTACAACGA CGAGACCA | 14789 |
| 4480 | CGAUGGGG A UGGCUUUG | 6041 | CAAAGCCA GGCTAGCTACAACGA CCCCATCG | 14790 |
| 4477 | UGGGGAUG G CUUUGCCA | 6042 | TGGCAAAG GGCTAGCTACAACGA CATCCCCA | 14791 |
| 4472 | AUGGCUUU G CCAUAGAA | 6043 | TTCTATGG GGCTAGCTACAACGA AAAGCCAT | 14792 |
| 4469 | GCUUUGCC A UAGAAGGG | 6044 | CCCTTCTA GGCTAGCTACAACGA GGCAAAGC | 14793 |
| 4459 | AGAAGGGG A UCUCUCCG | 6045 | CGGAGAGA GGCTAGCTACAACGA CCCCTTCT | 14794 |
| 4450 | UCUCUCCG G UGUUGGAC | 6046 | GTCCAACA GGCTAGCTACAACGA CGGAGAGA | 14795 |
| 4448 | UCUCCGGU G UUGGACAA | 6047 | TTGTCCAA GGCTAGCTACAACGA ACCGGAGA | 14796 |
| 4443 | GGUGUUGG A CAAGGCUA | 6048 | TAGCCTTG GGCTAGCTACAACGA CCAACACC | 14797 |
| 4438 | UGGACAAG G CUAUCUCC | 6049 | GGAGATAG GGCTAGCTACAACGA CTTGTCCA | 14798 |
| 4435 | ACAAGGCU A UCUCCUCG | 6050 | CGAGGAGA GGCTAGCTACAACGA AGCCTTGT | 14799 |
| 4426 | UCUCCUCG A UGUUGGGA | 6051 | TCCCAACA GGCTAGCTACAACGA CGAGGAGA | 14800 |
| 4424 | UCCUCGAU G UUGGGAUG | 6052 | CATCCCAA GGCTAGCTACAACGA ATCGAGGA | 14801 |
| 4418 | AUGUUGGG A UGUGGCAC | 6053 | GTGCCACA GGCTAGCTACAACGA CCCAACAT | 14802 |
| 4416 | GUUGGGAU G UGGCACGG | 6054 | CCGTGCCA GGCTAGCTACAACGA ATCCCAAC | 14803 |
| 4413 | GGGAUGUG G CACGGUGA | 6055 | TCACCGTG GGCTAGCTACAACGA CACATCCC | 14804 |
| 4411 | GAUGUGGC A CGGUGACC | 6056 | GGTCACCG GGCTAGCTACAACGA GCCACATC | 14805 |
| 4408 | GUGGCACG G UGACCGAU | 6057 | ATCGGTCA GGCTAGCTACAACGA CGTGCCAC | 14806 |
| 4405 | GCACGGUG A CCGAUCCC | 6058 | GGGATCGG GGCTAGCTACAACGA CACCGTGC | 14807 |
| 4401 | GGUGACCG A UCCCGGAG | 6059 | CTCCGGGA GGCTAGCTACAACGA CGGTCACC | 14808 |
| 4392 | UCCCGGAG G CGUAGCGG | 6060 | CCGCTACG GGCTAGCTACAACGA CTCCGGGA | 14809 |
| 4390 | CCGGAGGC G UAGCGGUG | 6061 | CACCGCTA GGCTAGCTACAACGA GCCTCCGG | 14810 |
| 4387 | GAGGCGUA G CGGUGGCG | 6062 | CGCCACCG GGCTAGCTACAACGA TACGCCTC | 14811 |
| 4384 | GCGUAGCG G UGGCGAGC | 6063 | GCTCGCCA GGCTAGCTACAACGA CGCTACGC | 14812 |
| 4381 | UAGCGGUG G CGAGCACG | 6064 | CGTGCTCG GGCTAGCTACAACGA CACCGCTA | 14813 |
| 4377 | GGUGGCGA G CACGACGA | 6065 | TCGTCGTG GGCTAGCTACAACGA TCGCCACC | 14814 |
| 4375 | UGGCGAGC A CGACGAGC | 6066 | GCTCGTCG GGCTAGCTACAACGA GCTCGCCA | 14815 |
| 4372 | CGAGCACG A CGAGCCGC | 6067 | GCGGCTCG GGCTAGCTACAACGA CGTGCTCG | 14816 |
| 4368 | CACGACGA G CCGCGCUC | 6068 | GAGCGCGG GGCTAGCTACAACGA TCGTCGTG | 14817 |
| 4365 | GACGAGCC G CGCUCCAG | 6069 | CTGGAGCG GGCTAGCTACAACGA GGCTCGTC | 14818 |
| 4363 | CGAGCCGC G CUCCAGCC | 6070 | GGCTGGAG GGCTAGCTACAACGA GCGGCTCG | 14819 |
| 4357 | GCGCUCCA G CCGUCUCC | 6071 | GGAGACGG GGCTAGCTACAACGA TGGAGCGC | 14820 |
| 4354 | CUCCAGCC G UCUCCGCU | 6072 | AGCGGAGA GGCTAGCTACAACGA GGCTGGAG | 14821 |
| 4348 | CCGUCUCC G CUUGGUCC | 6073 | GGACCAAG GGCTAGCTACAACGA GGAGACGG | 14822 |
| 4343 | UCCGCUUG G UCCAGGAC | 6074 | GTCCTGGA GGCTAGCTACAACGA CAAGCGGA | 14823 |
| 4336 | GGUCCAGG A CUGUGCCG | 6075 | CGGCACAG GGCTAGCTACAACGA CCTGGACC | 14824 |
| 4333 | CCAGGACU G UGCCGAUG | 6076 | CATCGGCA GGCTAGCTACAACGA AGTCCTGG | 14825 |
| 4331 | AGGACUGU G CCGAUGCC | 6077 | GGCATCGG GGCTAGCTACAACGA ACAGTCCT | 14826 |
| 4327 | CUGUGCCG A UGCCCAAA | 6078 | TTTGGGCA GGCTAGCTACAACGA CGGCACAG | 14827 |
| 4325 | GUGCCGAU G CCCAAAAU | 6079 | ATTTTGGG GGCTAGCTACAACGA ATCGGCAC | 14828 |
| 4318 | UGCCCAAA A UGGAAGUC | 6080 | GACTTCCA GGCTAGCTACAACGA TTTGGGCA | 14829 |
| 4312 | AAAUGGAA G UCGAGUCA | 6081 | TGACTCGA GGCTAGCTACAACGA TTCCATTT | 14830 |
| 4307 | GAAGUCGA G UCAAUUGA | 6082 | TCAATTGA GGCTAGCTACAACGA TCGACTTC | 14831 |
| 4303 | UCGAGUCA A UUGAGUGG | 6083 | CCACTCAA GGCTAGCTACAACGA TGACTCGA | 14832 |
| 4298 | UCAAUUGA G UGGCACUC | 6084 | GAGTGCCA GGCTAGCTACAACGA TCAATTGA | 14833 |
| 4295 | AUUGAGUG G CACUCAUC | 6085 | GATGAGTG GGCTAGCTACAACGA CACTCAAT | 14834 |
| 4293 | UGAGUGGC A CUCAUCAC | 6086 | GTGATGAG GGCTAGCTACAACGA GCCACTCA | 14835 |
| 4289 | UGGCACUC A UCACACAU | 6087 | ATGTGTGA GGCTAGCTACAACGA GAGTGCCA | 14836 |
| 4286 | CACUCAUC A CACAUUAU | 6088 | ATAATGTG GGCTAGCTACAACGA GATGAGTG | 14837 |
| 4284 | CUCAUCAC A CAUUAUGA | 6089 | TCATAATG GGCTAGCTACAACGA GTGATGAG | 14838 |
| 4282 | CAUCACAC A UUAUGAUG | 6090 | CATCATAA GGCTAGCTACAACGA GTGTGATG | 14839 |
| 4279 | CACACAUU A UGAUGUCA | 6091 | TGACATCA GGCTAGCTACAACGA AATGTGTG | 14840 |
| 4276 | ACAUUAUG A UGUCAUAG | 6092 | CTATGACA GGCTAGCTACAACGA CATAATGT | 14841 |
| 4274 | AUUAUGAU G UCAUAGGC | 6093 | GCCTATGA GGCTAGCTACAACGA ATCATAAT | 14842 |
| 4271 | AUGAUGUC A UAGGCGCC | 6094 | GGCGCCTA GGCTAGCTACAACGA GACATCAT | 14843 |
| 4267 | UGUCAUAG G CGCCCCCA | 6095 | TGGGGGCG GGCTAGCTACAACGA CTATGACA | 14844 |
| 4265 | UCAUAGGC G CCCCCAGA | 6096 | TCTGGGGG GGCTAGCTACAACGA GCCTATGA | 14845 |
| 4256 | CCCCCAGA G CAACCACC | 6097 | GGTGGTTG GGCTAGCTACAACGA TCTGGGGG | 14846 |
| 4253 | CCAGAGCA A CCACCGUC | 6098 | GACGGTGG GGCTAGCTACAACGA TGCTCTGG | 14847 |
| 4250 | GAGCAACC A CCGUCGGC | 6099 | GCCGACGG GGCTAGCTACAACGA GGTTGCTC | 14848 |
| 4247 | CAACCACC G UCGGCAAG | 6100 | CTTGCCGA GGCTAGCTACAACGA GGTGGTTG | 14849 |
| 4243 | CACCGUCG G CAAGGAAC | 6101 | GTTCCTTG GGCTAGCTACAACGA CGACGGTG | 14850 |
| 4236 | GGCAAGGA A CUUGCCAU | 6102 | ATGGCAAG GGCTAGCTACAACGA TCCTTGCC | 14851 |
| 4232 | AGGAACUU G CCAUAGGU | 6103 | ACCTATGG GGCTAGCTACAACGA AAGTTCCT | 14852 |
| 4229 | AACUUGCC A UAGGUGGA | 6104 | TCCACCTA GGCTAGCTACAACGA GGCAAGTT | 14853 |
| 4225 | UGCCAUAG G UGGAGUAC | 6105 | GTACTCCA GGCTAGCTACAACGA CTATGGCA | 14854 |
| 4220 | UAGGUGGA G UACGUGAU | 6106 | ATCACGTA GGCTAGCTACAACGA TCCACCTA | 14855 |
| 4218 | GGUGGAGU A CGUGAUGG | 6107 | CCATCACG GGCTAGCTACAACGA ACTCCACC | 14856 |
| 4216 | UGGAGUAC G UGAUGGGG | 6108 | CCCCATCA GGCTAGCTACAACGA GTACTCCA | 14857 |
| 4213 | AGUACGUG A UGGGGGCG | 6109 | CGCCCCCA GGCTAGCTACAACGA CACGTACT | 14858 |
| 4207 | UGAUGGGG G CGCCCGUG | 6110 | CACGGGCG GGCTAGCTACAACGA CCCCATCA | 14859 |
| 4205 | AUGGGGGC G CCCGUGGU | 6111 | ACCACGGG GGCTAGCTACAACGA GCCCCCAT | 14860 |
| 4201 | GGGCGCCC G UGGUGAUG | 6112 | CATCACCA GGCTAGCTACAACGA GGGCGCCC | 14861 |
| 4198 | CGCCCGUG G UGAUGGUC | 6113 | GACCATCA GGCTAGCTACAACGA CACGGGCG | 14862 |
| 4195 | CCGUGGUG A UGGUCCUU | 6114 | AAGGACCA GGCTAGCTACAACGA CACCACGG | 14863 |
| 4192 | UGGUGAUG G UCCUUACC | 6115 | GGTAAGGA GGCTAGCTACAACGA CATCACCA | 14864 |
| 4186 | UGGUCCUU A CCCCAGUU | 6116 | AACTGGGG GGCTAGCTACAACGA AAGGACCA | 14865 |
| 4180 | UUACCCCA G UUCUGAUG | 6117 | CATCAGAA GGCTAGCTACAACGA TGGGGTAA | 14866 |
| 4174 | CAGUUCUG A UGUUAGGA | 6118 | TCCTAACA GGCTAGCTACAACGA CAGAACTG | 14867 |
| 4172 | GUUCUGAU G UUAGGAUC | 6119 | GATCCTAA GGCTAGCTACAACGA ATCAGAAC | 14868 |
| 4166 | AUGUUAGG A UCGACACC | 6120 | GGTGTCGA GGCTAGCTACAACGA CCTAACAT | 14869 |
| 4162 | UAGGAUCG A CACCGUGU | 6121 | ACACGGTG GGCTAGCTACAACGA CGATCCTA | 14870 |
| 4160 | GGAUCGAC A CCGUGUGC | 6122 | GCACACGG GGCTAGCTACAACGA GTCGATCC | 14871 |
| 4157 | UCGACACC G UGUGCCUU | 6123 | AAGGCACA GGCTAGCTACAACGA GGTGTCGA | 14872 |
| 4155 | GACACCGU G UGCCUUAG | 6124 | CTAAGGCA GGCTAGCTACAACGA ACGGTGTC | 14873 |
| 4153 | CACCGUGU G CCUUAGAC | 6125 | GTCTAAGG GGCTAGCTACAACGA ACACGGTG | 14874 |
| 4146 | UGCCUUAG A CAUAUACG | 6126 | CGTATATG GGCTAGCTACAACGA CTAAGGCA | 14875 |
| 4144 | CCUUAGAC A UAUACGCC | 6127 | GGCGTATA GGCTAGCTACAACGA GTCTAAGG | 14876 |
| 4142 | UUAGACAU A UACGCCCC | 6128 | GGGGCGTA GGCTAGCTACAACGA ATGTCTAA | 14877 |
| 4140 | AGACAUAU A CGCCCCAA | 6129 | TTGGGGCG GGCTAGCTACAACGA ATATGTCT | 14878 |
| 4138 | ACAUAUAC G CCCCAAAC | 6130 | GTTTGGGG GGCTAGCTACAACGA GTATATGT | 14879 |
| 4131 | CGCCCCAA A CCCUAAGG | 6131 | CCTTAGGG GGCTAGCTACAACGA TTGGGGCG | 14880 |
| 4123 | ACCCUAAG G UGGCGGUA | 6132 | TACCGCCA GGCTAGCTACAACGA CTTAGGGT | 14881 |
| 4120 | CUAAGGUG G CGGUAACG | 6133 | CGTTACCG GGCTAGCTACAACGA CACCTTAG | 14882 |
| 4117 | AGGUGGCG G UAACGGAC | 6134 | GTCCGTTA GGCTAGCTACAACGA CGCCACCT | 14883 |
| 4114 | UGGCGGUA A CGGACGGA | 6135 | TCCGTCCG GGCTAGCTACAACGA TACCGCCA | 14884 |
| 4110 | GGUAACGG A CGGAUUUA | 6136 | TAAATCCG GGCTAGCTACAACGA CCGTTACC | 14885 |
| 4106 | ACGGACGG A UUUAGGAC | 6137 | GTCCTAAA GGCTAGCTACAACGA CCGTCCGT | 14886 |
| 4099 | GAUUUAGG A CGAGCACU | 6138 | AGTGCTCG GGCTAGCTACAACGA CCTAAATC | 14887 |
| 4095 | UAGGACGA G CACUUUGU | 6139 | ACAAAGTG GGCTAGCTACAACGA TCGTCCTA | 14888 |
| 4093 | GGACGAGC A CUUUGUAC | 6140 | GTACAAAG GGCTAGCTACAACGA GCTCGTCC | 14889 |
| 4088 | AGCACUUU G UACCCUUG | 6141 | CAAGGGTA GGCTAGCTACAACGA AAAGTGCT | 14890 |
| 4086 | CACUUUGU A CCCUUGGG | 6142 | CCCAAGGG GGCTAGCTACAACGA ACAAAGTG | 14891 |
| 4078 | ACCCUUGG G CUGCAUAU | 6143 | ATATGCAG GGCTAGCTACAACGA CCAAGGGT | 14892 |
| 4075 | CUUGGGCU G CAUAUGCA | 6144 | TGCATATG GGCTAGCTACAACGA AGCCCAAG | 14893 |
| 4073 | UGGGCUGC A UAUGCAGC | 6145 | GCTGCATA GGCTAGCTACAACGA GCAGCCCA | 14894 |
| 4071 | GGCUGCAU A UGCAGCCG | 6146 | CGGCTGCA GGCTAGCTACAACGA ATGCAGCC | 14895 |
| 4069 | CUGCAUAU G CAGCCGGU | 6147 | ACCGGCTG GGCTAGCTACAACGA ATATGCAG | 14896 |
| 4066 | CAUAUGCA G CCGGUACC | 6148 | GGTACCGG GGCTAGCTACAACGA TGCATATG | 14897 |
| 4062 | UGCAGCCG G UACCUUAG | 6149 | CTAAGGTA GGCTAGCTACAACGA CGGCTGCA | 14898 |
| 4060 | CAGCCGGU A CCUUAGUG | 6150 | CACTAAGG GGCTAGCTACAACGA ACCGGCTG | 14899 |
| 4054 | GUACCUUA G UGCUCUUG | 6151 | CAAGAGCA GGCTAGCTACAACGA TAAGGTAC | 14900 |
| 4052 | ACCUUAGU G CUCUUGCC | 6152 | GGCAAGAG GGCTAGCTACAACGA ACTAAGGT | 14901 |
| 4046 | GUGCUCUU G CCGCUGCC | 6153 | GGCAGCGG GGCTAGCTACAACGA AAGAGCAC | 14902 |
| 4043 | CUCUUGCC G CUGCCAGU | 6154 | ACTGGCAG GGCTAGCTACAACGA GGCAAGAG | 14903 |
| 4040 | UUGCCGCU G CCAGUGGG | 6155 | CCCACTGG GGCTAGCTACAACGA AGCGGCAA | 14904 |
| 4036 | CGCUGCCA G UGGGAGCG | 6156 | CGCTCCCA GGCTAGCTACAACGA TGGCAGCG | 14905 |
| 4030 | CAGUGGGA G CGUGUAGG | 6157 | CCTACACG GGCTAGCTACAACGA TCCCACTG | 14906 |
| 4028 | GUGGGAGC G UGUAGGUG | 6158 | CACCTACA GGCTAGCTACAACGA GCTCCCAC | 14907 |
| 4026 | GGGAGCGU G UAGGUGGG | 6159 | CCCACCTA GGCTAGCTACAACGA ACGCTCCC | 14908 |
| 4022 | GCGUGUAG G UGGGCCAC | 6160 | GTGGCCCA GGCTAGCTACAACGA CTACACGC | 14909 |
| 4018 | GUAGGUGG G CCACUUGG | 6161 | CCAAGTGG GGCTAGCTACAACGA CCACCTAC | 14910 |
| 4015 | GGUGGGCC A CUUGGAAU | 6162 | ATTCCAAG GGCTAGCTACAACGA GGCCCACC | 14911 |
| 4008 | CACUUGGA A UGUCUGCG | 6163 | CGCAGACA GGCTAGCTACAACGA TCCAAGTG | 14912 |
| 4006 | CUUGGAAU G UCUGCGGU | 6164 | ACCGCAGA GGCTAGCTACAACGA ATTCCAAG | 14913 |
| 4002 | GAAUGUCU G CGGUACGG | 6165 | CCGTACCG GGCTAGCTACAACGA AGACATTC | 14914 |
| 3999 | UGUCUGCG G UACGGCUG | 6166 | CAGCCGTA GGCTAGCTACAACGA CGCAGACA | 14915 |
| 3997 | UCUGCGGU A CGGCUGGG | 6167 | CCCAGCCG GGCTAGCTACAACGA ACCGCAGA | 14916 |
| 3994 | GCGGUACG G CUGGGGGG | 6168 | CCCCCCAG GGCTAGCTACAACGA CGTACCGC | 14917 |
| 3984 | UGGGGGGG A CGAGUUGU | 6169 | ACAACTCG GGCTAGCTACAACGA CCCCCCCA | 14918 |
| 3980 | GGGGACGA G UUGUCCGU | 6170 | ACGGACAA GGCTAGCTACAACGA TCGTCCCC | 14919 |
| 3977 | GACGAGUU G UCCGUGAA | 6171 | TTCACGGA GGCTAGCTACAACGA AACTCGTC | 14920 |
| 3973 | AGUUGUCC G UGAAGACC | 6172 | GGTCTTCA GGCTAGCTACAACGA GGACAACT | 14921 |
| 3967 | CCGUGAAG A CCGGGGAC | 6173 | GTCCCCGG GGCTAGCTACAACGA CTTCACGG | 14922 |
| 3960 | GACCGGGG A CCGCAUGG | 6174 | CCATGCGG GGCTAGCTACAACGA CCCCGGTC | 14923 |
| 3957 | CGGGGACC G CAUGGUAG | 6175 | CTACCATG GGCTAGCTACAACGA GGTCCCCG | 14924 |
| 3955 | GGGACCGC A UGGUAGUU | 6176 | AACTACCA GGCTAGCTACAACGA GCGGTCCC | 14925 |
| 3952 | ACCGCAUG G UAGUUUCC | 6177 | GGAAACTA GGCTAGCTACAACGA CATGCGGT | 14926 |
| 3949 | GCAUGGUA G UUUCCAUA | 6178 | TATGGAAA GGCTAGCTACAACGA TACCATGC | 14927 |
| 3943 | UAGUUUCC A UAGACUCA | 6179 | TGAGTCTA GGCTAGCTACAACGA GGAAACTA | 14928 |
| 3939 | UUCCAUAG A CUCAACGG | 6180 | CCGTTGAG GGCTAGCTACAACGA CTATGGAA | 14929 |
| 3934 | UAGACUCA A CGGGUACA | 6181 | TGTACCCG GGCTAGCTACAACGA TGAGTCTA | 14930 |
| 3930 | CUCAACGG G UACAAAGU | 6182 | ACTTTGTA GGCTAGCTACAACGA CCGTTGAG | 14931 |
| 3928 | CAACGGGU A CAAAGUCC | 6183 | GGACTTTG GGCTAGCTACAACGA ACCCGTTG | 14932 |
| 3923 | GGUACAAA G UCCACCGC | 6184 | GCGGTGGA GGCTAGCTACAACGA TTTGTACC | 14933 |
| 3919 | CAAAGUCC A CCGCCUUC | 6185 | GAAGGCGG GGCTAGCTACAACGA GGACTTTG | 14934 |
| 3916 | AGUCCACC G CCUUCGCA | 6186 | TGCGAAGG GGCTAGCTACAACGA GGTGGACT | 14935 |
| 3910 | CCGCCUUC G CAACCCCC | 6187 | GGGGGTTG GGCTAGCTACAACGA GAAGGCGG | 14936 |
| 3907 | CCUUCGCA A CCCCCCGG | 6188 | CCGGGGGG GGCTAGCTACAACGA TGCGAAGG | 14937 |
| 3898 | CCCCCCGG G UGCACACA | 6189 | TGTGTGCA GGCTAGCTACAACGA CCGGGGGG | 14938 |
| 3896 | CCCCGGGU G CACACAGC | 6190 | GCTGTGTG GGCTAGCTACAACGA ACCCGGGG | 14939 |
| 3894 | CCGGGUGC A CACAGCAG | 6191 | CTGCTGTG GGCTAGCTACAACGA GCACCCGG | 14940 |
| 3892 | GGGUGCAC A CAGCAGCC | 6192 | GGCTGCTG GGCTAGCTACAACGA GTGCACCC | 14941 |
| 3889 | UGCACACA G CAGCCCGG | 6193 | CCGGGCTG GGCTAGCTACAACGA TGTGTGCA | 14942 |
| 3886 | ACACAGCA G CCCGGAAG | 6194 | CTTCCGGG GGCTAGCTACAACGA TGCTGTGT | 14943 |
| 3877 | CCCGGAAG A UGCCCACA | 6195 | TGTGGGCA GGCTAGCTACAACGA CTTCCGGG | 14944 |
| 3875 | CGGAAGAU G CCCACAAC | 6196 | GTTGTGGG GGCTAGCTACAACGA ATCTTCCG | 14945 |
| 3871 | AGAUGCCC A CAACGUGC | 6197 | GCACGTTG GGCTAGCTACAACGA GGGCATCT | 14946 |
| 3868 | UGCCCACA A CGUGCCCC | 6198 | GGGGCACG GGCTAGCTACAACGA TGTGGGCA | 14947 |
| 3866 | CCCACAAC G UGCCCCGA | 6199 | TCGGGGCA GGCTAGCTACAACGA GTTGTGGG | 14948 |
| 3864 | CACAACGU G CCCCGAAG | 6200 | CTTCGGGG GGCTAGCTACAACGA ACGTTGTG | 14949 |
| 3854 | CCCGAAGG G CAGAGCAG | 6201 | CTGCTCTG GGCTAGCTACAACGA CCTTCGGG | 14950 |
| 3849 | AGGGCAGA G CAGUGGAC | 6202 | GTCCACTG GGCTAGCTACAACGA TCTGCCCT | 14951 |
| 3846 | GCAGAGCA G UGGACCGC | 6203 | GCGGTCCA GGCTAGCTACAACGA TGCTCTGC | 14952 |
| 3842 | AGCAGUGG A CCGCCCGA | 6204 | TCGGGCGG GGCTAGCTACAACGA CCACTGCT | 14953 |
| 3839 | AGUGGACC G CCCGAGGA | 6205 | TCCTCGGG GGCTAGCTACAACGA GGTCCACT | 14954 |
| 3830 | CCCGAGGA G CCCUUCAA | 6206 | TTGAAGGG GGCTAGCTACAACGA TCCTCGGG | 14955 |
| 3821 | CCCUUCAA G UAGGAGAU | 6207 | ATCTCCTA GGCTAGCTACAACGA TTGAAGGG | 14956 |
| 3814 | AGUAGGAG A UGGGCCUG | 6208 | CAGGCCCA GGCTAGCTACAACGA CTCCTACT | 14957 |
| 3810 | GGAGAUGG G CCUGGGGG | 6209 | CCCCCAGG GGCTAGCTACAACGA CCATCTCC | 14958 |
| 3801 | CCUGGGGG A UAGUAAGC | 6210 | GCTTACTA GGCTAGCTACAACGA CCCCCAGG | 14959 |
| 3798 | GGGGGAUA G UAAGCUCC | 6211 | GGAGCTTA GGCTAGCTACAACGA TATCCCCC | 14960 |
| 3794 | GAUAGUAA G CUCCCCCU | 6212 | AGGGGGAG GGCTAGCTACAACGA TTACTATC | 14961 |
| 3785 | CUCCCCCU G CUGUCACC | 6213 | GGTGACAG GGCTAGCTACAACGA AGGGGGAG | 14962 |
| 3782 | CCCCUGCU G UCACCCCG | 6214 | CGGGGTGA GGCTAGCTACAACGA AGCAGGGG | 14963 |
| 3779 | CUGCUGUC A CCCCGCCG | 6215 | CGGCGGGG GGCTAGCTACAACGA GACAGCAG | 14964 |
| 3774 | GUCACCCC G CCGGCGCA | 6216 | TGCGCCGG GGCTAGCTACAACGA GGGGTGAC | 14965 |
| 3770 | CCCCGCCG G CGCACCGG | 6217 | CCGGTGCG GGCTAGCTACAACGA CGGCGGGG | 14966 |
| 3768 | CCGCCGGC G CACCGGAA | 6218 | TTCCGGTG GGCTAGCTACAACGA GCCGGCGG | 14967 |
| 3766 | GCCGGCGC A CCGGAAUG | 6219 | CATTCCGG GGCTAGCTACAACGA GCGCCGGC | 14968 |
| 3760 | GCACCGGA A UGACAUCA | 6220 | TGATGTCA GGCTAGCTACAACGA TCCGGTGC | 14969 |
| 3757 | CCGGAAUG A CAUCAGCG | 6221 | CGCTGATG GGCTAGCTACAACGA CATTCCGG | 14970 |
| 3755 | GGAAUGAC A UCAGCGUG | 6222 | CACGCTGA GGCTAGCTACAACGA GTCATTCC | 14971 |
| 3751 | UGACAUCA G CGUGUCUC | 6223 | GAGACACG GGCTAGCTACAACGA TGATGTCA | 14972 |
| 3749 | ACAUCAGC G UGUCUCGU | 6224 | ACGAGACA GGCTAGCTACAACGA GCTGATGT | 14973 |
| 3747 | AUCAGCGU G UCUCGUGA | 6225 | TCACGAGA GGCTAGCTACAACGA ACGCTGAT | 14974 |
| 3742 | CGUGUCUC G UGACCAAG | 6226 | CTTGGTCA GGCTAGCTACAACGA GAGACACG | 14975 |
| 3739 | GUCUCGUG A CCAAGUAA | 6227 | TTACTTGG GGCTAGCTACAACGA CACGAGAC | 14976 |
| 3734 | GUGACCAA G UAAAGGUC | 6228 | GACCTTTA GGCTAGCTACAACGA TTGGTCAC | 14977 |
| 3728 | AAGUAAAG G UCCGAGCC | 6229 | GGCTCGGA GGCTAGCTACAACGA CTTTACTT | 14978 |
| 3722 | AGGUCCGA G CCGCCGCA | 6230 | TGCGGCGG GGCTAGCTACAACGA TCGGACCT | 14979 |
| 3719 | UCCGAGCC G CCGCAGGU | 6231 | ACCTGCGG GGCTAGCTACAACGA GGCTCGGA | 14980 |
| 3716 | GAGCCGCC G CAGGUGCA | 6232 | TGCACCTG GGCTAGCTACAACGA GGCGGCTC | 14981 |
| 3712 | CGCCGCAG G UGCAUGGU | 6233 | ACCATGCA GGCTAGCTACAACGA CTGCGGCG | 14982 |
| 3710 | CCGCAGGU G CAUGGUGU | 6234 | ACACCATG GGCTAGCTACAACGA ACCTGCGG | 14983 |
| 3708 | GCAGGUGC A UGGUGUCA | 6235 | TGACACCA GGCTAGCTACAACGA GCACCTGC | 14984 |
| 3705 | GGUGCAUG G UGUCAAGG | 6236 | CCTTGACA GGCTAGCTACAACGA CATGCACC | 14985 |
| 3703 | UGCAUGGU G UCAAGGAC | 6237 | GTCCTTGA GGCTAGCTACAACGA ACCATGCA | 14986 |
| 3696 | UGUCAAGG A CCGCGCUC | 6238 | GAGCGCGG GGCTAGCTACAACGA CCTTGACA | 14987 |
| 3693 | CAAGGACC G CGCUCCGG | 6239 | CCGGAGCG GGCTAGCTACAACGA GGTCCTTG | 14988 |
| 3691 | AGGACCGC G CUCCGGGG | 6240 | CCCCGGAG GGCTAGCTACAACGA GCGGTCCT | 14989 |
| 3681 | UCCGGGGG G CGCCGGCC | 6241 | GGCCGGCG GGCTAGCTACAACGA CCCCCGGA | 14990 |
| 3679 | CGGGGGGC G CCGGCCAU | 6242 | ATGGCCGG GGCTAGCTACAACGA GCCCCCCG | 14991 |
| 3675 | GGGCGCCG G CCAUCCGA | 6243 | TCGGATGG GGCTAGCTACAACGA CGGCGCCC | 14992 |
| 3672 | CGCCGGCC A UCCGACGA | 6244 | TCGTCGGA GGCTAGCTACAACGA GGCCGGCG | 14993 |
| 3667 | GCCAUCCG A CGAGGUCC | 6245 | GGACCTCG GGCTAGCTACAACGA CGGATGGC | 14994 |
| 3662 | CCGACGAG G UCCUGGUC | 6246 | GACCAGGA GGCTAGCTACAACGA CTCGTCGG | 14995 |
| 3656 | AGGUCCUG G UCUACAUU | 6247 | AATGTAGA GGCTAGCTACAACGA CAGGACCT | 14996 |
| 3652 | CCUGGUCU A CAUUGGUG | 6248 | CACCAATG GGCTAGCTACAACGA AGACCAGG | 14997 |
| 3650 | UGGUCUAC A UUGGUGUA | 6249 | TACACCAA GGCTAGCTACAACGA GTAGACCA | 14998 |
| 3646 | CUACAUUG G UGUACAUU | 6250 | AATGTACA GGCTAGCTACAACGA CAATGTAG | 14999 |
| 3644 | ACAUUGGU G UACAUUUG | 6251 | CAAATGTA GGCTAGCTACAACGA ACCAATGT | 15000 |
| 3642 | AUUGGUGU A CAUUUGGG | 6252 | CCCAAATG GGCTAGCTACAACGA ACACCAAT | 15001 |
| 3640 | UGGUGUAC A UUUGGGUG | 6253 | CACCCAAA GGCTAGCTACAACGA GTACACCA | 15002 |
| 3634 | ACAUUUGG G UGAUUGGA | 6254 | TCCAATCA GGCTAGCTACAACGA CCAAATGT | 15003 |
| 3631 | UUUGGGUG A UUGGACCC | 6255 | GGGTCCAA GGCTAGCTACAACGA CACCCAAA | 15004 |
| 3626 | GUGAUUGG A CCCUUUGG | 6256 | CCAAAGGG GGCTAGCTACAACGA CCAATCAC | 15005 |
| 3617 | CCCUUUGG G CCGGCUAG | 6257 | CTAGCCGG GGCTAGCTACAACGA CCAAAGGG | 15006 |
| 3613 | UUGGGCCG G CUAGGGUC | 6258 | GACCCTAG GGCTAGCTACAACGA CGGCCCAA | 15007 |
| 3607 | CGGCUAGG G UCUUUGAG | 6259 | CTCAAAGA GGCTAGCTACAACGA CCTAGCCG | 15008 |
| 3599 | GUCUUUGA G CCGGCGCC | 6260 | GGCGCCGG GGCTAGCTACAACGA TCAAAGAC | 15009 |
| 3595 | UUGAGCCG G CGCCGUGG | 6261 | CCACGGCG GGCTAGCTACAACGA CGGCTCAA | 15010 |
| 3593 | GAGCCGGC G CCGUGGUA | 6262 | TACCACGG GGCTAGCTACAACGA GCCGGCTC | 15011 |
| 3590 | CCGGCGCC G UGGUAGAC | 6263 | GTCTACCA GGCTAGCTACAACGA GGCGCCGG | 15012 |
| 3587 | GCGCCGUG G UAGACAGU | 6264 | ACTGTCTA GGCTAGCTACAACGA CACGGCGC | 15013 |
| 3583 | CGUGGUAG A CAGUCCAG | 6265 | CTGGACTG GGCTAGCTACAACGA CTACCACG | 15014 |
| 3580 | GGUAGACA G UCCAGCAC | 6266 | GTGCTGGA GGCTAGCTACAACGA TGTCTACC | 15015 |
| 3575 | ACAGUCCA G CACACGCC | 6267 | GGCGTGTG GGCTAGCTACAACGA TGGACTGT | 15016 |
| 3573 | AGUCCAGC A CACGCCGU | 6268 | ACGGCGTG GGCTAGCTACAACGA GCTGGACT | 15017 |
| 3571 | UCCAGCAC A CGCCGUUG | 6269 | CAACGGCG GGCTAGCTACAACGA GTGCTGGA | 15018 |
| 3569 | CAGCACAC G CCGUUGAC | 6270 | GTCAACGG GGCTAGCTACAACGA GTGTGCTG | 15019 |
| 3566 | CACACGCC G UUGACGCA | 6271 | TGCGTCAA GGCTAGCTACAACGA GGCGTGTG | 15020 |
| 3562 | CGCCGUUG A CGCAGGUC | 6272 | GACCTGCG GGCTAGCTACAACGA CAACGGCG | 15021 |
| 3560 | CCGUUGAC G CAGGUCGC | 6273 | GCGACCTG GGCTAGCTACAACGA GTCAACGG | 15022 |
| 3556 | UGACGCAG G UCGCUAGG | 6274 | CCTAGCGA GGCTAGCTACAACGA CTGCGTCA | 15023 |
| 3553 | CGCAGGUC G CUAGGAAA | 6275 | TTTCCTAG GGCTAGCTACAACGA GACCTGCG | 15024 |
| 3543 | UAGGAAAG A CUGCGUCG | 6276 | CGACGCAG GGCTAGCTACAACGA CTTTCCTA | 15025 |
| 3540 | GAAAGACU G CGUCGCGG | 6277 | CCGCGACG GGCTAGCTACAACGA AGTCTTTC | 15026 |
| 3538 | AAGACUGC G UCGCGGUG | 6278 | CACCGCGA GGCTAGCTACAACGA GCAGTCTT | 15027 |
| 3535 | ACUGCGUC G CGGUGGAA | 6279 | TTCCACCG GGCTAGCTACAACGA GACGCAGT | 15028 |
| 3532 | GCGUCGCG G UGGAAACC | 6280 | GGTTTCCA GGCTAGCTACAACGA CGCGACGC | 15029 |
| 3526 | CGGUGGAA A CCACUUGA | 6281 | TCAAGTGG GGCTAGCTACAACGA TTCCACCG | 15030 |
| 3523 | UGGAAACC A CUUGAACU | 6282 | AGTTCAAG GGCTAGCTACAACGA GGTTTCCA | 15031 |
| 3517 | CCACUUGA A CUUCCCCC | 6283 | GGGGGAAG GGCTAGCTACAACGA TCAAGTGG | 15032 |
| 3505 | CCCCCUCG A CUUGGUUC | 6284 | GAACCAAG GGCTAGCTACAACGA CGAGGGGG | 15033 |
| 3500 | UCGACUUG G UUCUUGUC | 6285 | GACAAGAA GGCTAGCTACAACGA CAAGTCGA | 15034 |
| 3494 | UGGUUCUU G UCCCGGCC | 6286 | GGCCGGGA GGCTAGCTACAACGA AAGAACCA | 15035 |
| 3488 | UUGUCCCG G CCCGUGAG | 6287 | CTCACGGG GGCTAGCTACAACGA CGGGACAA | 15036 |
| 3484 | CCCGGCCC G UGAGGCUG | 6288 | CAGCCTCA GGCTAGCTACAACGA GGGCCGGG | 15037 |
| 3479 | CCCGUGAG G CUGGUGAU | 6289 | ATCACCAG GGCTAGCTACAACGA CTCACGGG | 15038 |
| 3475 | UGAGGCUG G UGAUAAUG | 6290 | CATTATCA GGCTAGCTACAACGA CAGCCTCA | 15039 |
| 3472 | GGCUGGUG A UAAUGCAG | 6291 | CTGCATTA GGCTAGCTACAACGA CACCAGCC | 15040 |
| 3469 | UGGUGAUA A UGCAGCCA | 6292 | TGGCTGCA GGCTAGCTACAACGA TATCACCA | 15041 |
| 3467 | GUGAUAAU G CAGCCAAA | 6293 | TTTGGCTG GGCTAGCTACAACGA ATTATCAC | 15042 |
| 3464 | AUAAUGCA G CCAAACAG | 6294 | CTGTTTGG GGCTAGCTACAACGA TGCATTAT | 15043 |
| 3459 | GCAGCCAA A CAGGCCCC | 6295 | GGGGCCTG GGCTAGCTACAACGA TTGGCTGC | 15044 |
| 3455 | CCAAACAG G CCCCGCGU | 6296 | ACGCGGGG GGCTAGCTACAACGA CTGTTTGG | 15045 |
| 3450 | CAGGCCCC G CGUCUGUU | 6297 | AACAGACG GGCTAGCTACAACGA GGGGCCTG | 15046 |
| 3448 | GGCCCCGC G UCUGUUGG | 6298 | CCAACAGA GGCTAGCTACAACGA GCGGGGCC | 15047 |
| 3444 | CCGCGUCU G UUGGGAGU | 6299 | ACTCCCAA GGCTAGCTACAACGA AGACGCGG | 15048 |
| 3437 | UGUUGGGA G UAGGCCGU | 6300 | ACGGCCTA GGCTAGCTACAACGA TCCCAACA | 15049 |
| 3433 | GGGAGUAG G CCGUAAUG | 6301 | CATTACGG GGCTAGCTACAACGA CTACTCCC | 15050 |
| 3430 | AGUAGGCC G UAAUGGGC | 6302 | GCCCATTA GGCTAGCTACAACGA GGCCTACT | 15051 |
| 3427 | AGGCCGUA A UGGGCGCG | 6303 | CGCGCCCA GGCTAGCTACAACGA TACGGCCT | 15052 |
| 3423 | CGUAAUGG G CGCGAGGA | 6304 | TCCTCGCG GGCTAGCTACAACGA CCATTACG | 15053 |
| 3421 | UAAUGGGC G CGAGGAGU | 6305 | ACTCCTCG GGCTAGCTACAACGA GCCCATTA | 15054 |
| 3414 | CGCGAGGA G UCGCCACC | 6306 | GGTGGCGA GGCTAGCTACAACGA TCCTCGCG | 15055 |
| 3411 | GAGGAGUC G CCACCCCU | 6307 | AGGGGTGG GGCTAGCTACAACGA GACTCCTC | 15056 |
| 3408 | GAGUCGCC A CCCCUGCC | 6308 | GGCAGGGG GGCTAGCTACAACGA GGCGACTC | 15057 |
| 3402 | CCACCCCU G CCCCUCAA | 6309 | TTGAGGGG GGCTAGCTACAACGA AGGGGTGG | 15058 |
| 3392 | CCCUCAAG A CUGUCGGC | 6310 | GCCGACAG GGCTAGCTACAACGA CTTGAGGG | 15059 |
| 3389 | UCAAGACU G UCGGCUGG | 6311 | CCAGCCGA GGCTAGCTACAACGA AGTCTTGA | 15060 |
| 3385 | GACUGUCG G CUGGUCCU | 6312 | AGGACCAG GGCTAGCTACAACGA CGACAGTC | 15061 |
| 3381 | GUCGGCUG G UCCUAGGA | 6313 | TCCTAGGA GGCTAGCTACAACGA CAGCCGAC | 15062 |
| 3372 | UCCUAGGA G UAUCUCCC | 6314 | GGGAGATA GGCTAGCTACAACGA TCCTAGGA | 15063 |
| 3370 | CUAGGAGU A UCUCCCUC | 6315 | GAGGGAGA GGCTAGCTACAACGA ACTCCTAG | 15064 |
| 3352 | CCCUUCGG G CGGAGACA | 6316 | TGTCTCCG GGCTAGCTACAACGA CCGAAGGG | 15065 |
| 3346 | GGGCGGAG A CAGGUAGA | 6317 | TCTACCTG GGCTAGCTACAACGA CTCCGCCC | 15066 |
| 3342 | GGAGACAG G UAGACCCA | 6318 | TGGGTCTA GGCTAGCTACAACGA CTGTCTCC | 15067 |
| 3338 | ACAGGUAG A CCCAUAAU | 6319 | ATTATGGG GGCTAGCTACAACGA CTACCTGT | 15068 |
| 3334 | GUAGACCC A UAAUGAUG | 6320 | CATCATTA GGCTAGCTACAACGA GGGTCTAC | 15069 |
| 3331 | GACCCAUA A UGAUGUCC | 6321 | GGACATCA GGCTAGCTACAACGA TATGGGTC | 15070 |
| 3328 | CCAUAAUG A UGUCCCCA | 6322 | TGGGGACA GGCTAGCTACAACGA CATTATGG | 15071 |
| 3326 | AUAAUGAU G UCCCCACA | 6323 | TGTGGGGA GGCTAGCTACAACGA ATCATTAT | 15072 |
| 3320 | AUGUCCCC A CACGCCGC | 6324 | GCGGCGTG GGCTAGCTACAACGA GGGGACAT | 15073 |
| 3318 | GUCCCCAC A CGCCGCGG | 6325 | CCGCGGCG GGCTAGCTACAACGA GTGGGGAC | 15074 |
| 3316 | CCCCACAC G CCGCGGUG | 6326 | CACCGCGG GGCTAGCTACAACGA GTGTGGGG | 15075 |
| 3313 | CACACGCC G CGGUGUCU | 6327 | AGACACCG GGCTAGCTACAACGA GGCGTGTG | 15076 |
| 3310 | ACGCCGCG G UGUCUCCC | 6328 | GGGAGACA GGCTAGCTACAACGA CGCGGCGT | 15077 |
| 3308 | GCCGCGGU G UCUCCCCC | 6329 | GGGGGAGA GGCTAGCTACAACGA ACCGCGGC | 15078 |
| 3295 | CCCCCCAG G UGAUGAUC | 6330 | GATCATCA GGCTAGCTACAACGA CTGGGGGG | 15079 |
| 3292 | CCCAGGUG A UGAUCUUG | 6331 | CAAGATCA GGCTAGCTACAACGA CACCTGGG | 15080 |
| 3289 | AGGUGAUG A UCUUGAUU | 6332 | AATCAAGA GGCTAGCTACAACGA CATCACCT | 15081 |
| 3283 | UGAUCUUG A UUUCCAUG | 6333 | CATGGAAA GGCTAGCTACAACGA CAAGATCA | 15082 |
| 3277 | UGAUUUCC A UGUCGGAG | 6334 | CTCCGACA GGCTAGCTACAACGA GGAAATCA | 15083 |
| 3275 | AUUUCCAU G UCGGAGAA | 6335 | TTCTCCGA GGCTAGCTACAACGA ATGGAAAT | 15084 |
| 3265 | CGGAGAAG A CGACGGGC | 6336 | GCCCGTCG GGCTAGCTACAACGA CTTCTCCG | 15085 |
| 3262 | AGAAGACG A CGGGCUCG | 6337 | CGAGCCCG GGCTAGCTACAACGA CGTCTTCT | 15086 |
| 3258 | GACGACGG G CUCGACCG | 6338 | CGGTCGAG GGCTAGCTACAACGA CCGTCGTC | 15087 |
| 3253 | CGGGCUCG A CCGCUACC | 6339 | GGTAGCGG GGCTAGCTACAACGA CGAGCCCG | 15088 |
| 3250 | GCUCGACC G CUACCGCC | 6340 | GGCGGTAG GGCTAGCTACAACGA GGTCGAGC | 15089 |
| 3247 | CGACCGCU A CCGCCAGG | 6341 | CCTGGCGG GGCTAGCTACAACGA AGCGGTCG | 15090 |
| 3244 | CCGCUACC G CCAGGUCU | 6342 | AGACCTGG GGCTAGCTACAACGA GGTAGCGG | 15091 |
| 3239 | ACCGCCAG G UCUCGUAG | 6343 | CTACGAGA GGCTAGCTACAACGA CTGGCGGT | 15092 |
| 3234 | CAGGUCUC G UAGACCUG | 6344 | CAGGTCTA GGCTAGCTACAACGA GAGACCTG | 15093 |
| 3230 | UCUCGUAG A CCUGUGUG | 6345 | CACACAGG GGCTAGCTACAACGA CTACGAGA | 15094 |
| 3226 | GUAGACCU G UGUGGGCC | 6346 | GGCCCACA GGCTAGCTACAACGA AGGTCTAC | 15095 |
| 3224 | AGACCUGU G UGGGCCCA | 6347 | TGGGCCCA GGCTAGCTACAACGA ACAGGTCT | 15096 |
| 3220 | CUGUGUGG G CCCAGUCC | 6348 | GGACTGGG GGCTAGCTACAACGA CCACACAG | 15097 |
| 3215 | UGGGCCCA G UCCUGCAG | 6349 | CTGCAGGA GGCTAGCTACAACGA TGGGCCCA | 15098 |
| 3210 | CCAGUCCU G CAGUGGAG | 6350 | CTCCACTG GGCTAGCTACAACGA AGGACTGG | 15099 |
| 3207 | GUCCUGCA G UGGAGUGA | 6351 | TCACTCCA GGCTAGCTACAACGA TGCAGGAC | 15100 |
| 3202 | GCAGUGGA G UGAGGUGG | 6352 | CCACCTCA GGCTAGCTACAACGA TCCACTGC | 15101 |
| 3197 | GGAGUGAG G UGGUCAUA | 6353 | TATGACCA GGCTAGCTACAACGA CTCACTCC | 15102 |
| 3194 | GUGAGGUG G UCAUAGAC | 6354 | GTCTATGA GGCTAGCTACAACGA CACCTCAC | 15103 |
| 3191 | AGGUGGUC A UAGACGGA | 6355 | TCCGTCTA GGCTAGCTACAACGA GACCACCT | 15104 |
| 3187 | GGUCAUAG A CGGACGUA | 6356 | TACGTCCG GGCTAGCTACAACGA CTATGACC | 15105 |
| 3183 | AUAGACGG A CGUACCUU | 6357 | AAGGTACG GGCTAGCTACAACGA CCGTCTAT | 15106 |
| 3181 | AGACGGAC G UACCUUUC | 6358 | GAAAGGTA GGCTAGCTACAACGA GTCCGTCT | 15107 |
| 3179 | ACGGACGU A CCUUUCAA | 6359 | TTGAAAGG GGCTAGCTACAACGA ACGTCCGT | 15108 |
| 3171 | ACCUUUCA A UUCGGCCA | 6360 | TGGCCGAA GGCTAGCTACAACGA TGAAAGGT | 15109 |
| 3166 | UCAAUUCG G CCAACUUC | 6361 | GAAGTTGG GGCTAGCTACAACGA CGAATTGA | 15110 |
| 3162 | UUCGGCCA A CUUCAUGA | 6362 | TCATGAAG GGCTAGCTACAACGA TGGCCGAA | 15111 |
| 3157 | CCAACUUC A UGAAGGCC | 6363 | GGCCTTCA GGCTAGCTACAACGA GAAGTTGG | 15112 |
| 3151 | UCAUGAAG G CCAUUUGG | 6364 | CCAAATGG GGCTAGCTACAACGA CTTCATGA | 15113 |
| 3148 | UGAAGGCC A UUUGGACA | 6365 | TGTCCAAA GGCTAGCTACAACGA GGCCTTCA | 15114 |
| 3142 | CCAUUUGG A CAUAUUGC | 6366 | GCAATATG GGCTAGCTACAACGA CCAAATGG | 15115 |
| 3140 | AUUUGGAC A UAUUGCCC | 6367 | GGGCAATA GGCTAGCTACAACGA GTCCAAAT | 15116 |
| 3138 | UUGGACAU A UUGCCCCC | 6368 | GGGGGCAA GGCTAGCTACAACGA ATGTCCAA | 15117 |
| 3135 | GACAUAUU G CCCCCCAC | 6369 | GTGGGGGG GGCTAGCTACAACGA AATATGTC | 15118 |
| 3128 | UGCCCCCC A CCGACUUU | 6370 | AAAGTCGG GGCTAGCTACAACGA GGGGGGCA | 15119 |
| 3124 | CCCCACCG A CUUUCCGC | 6371 | GCGGAAAG GGCTAGCTACAACGA CGGTGGGG | 15120 |
| 3117 | GACUUUCC G CACCAAAA | 6372 | TTTTGGTG GGCTAGCTACAACGA GGAAAGTC | 15121 |
| 3115 | CUUUCCGC A CCAAAAUG | 6373 | CATTTTGG GGCTAGCTACAACGA GCGGAAAG | 15122 |
| 3109 | GCACCAAA A UGCAUUCA | 6374 | TGAATGCA GGCTAGCTACAACGA TTTGGTGC | 15123 |
| 3107 | ACCAAAAU G CAUUCACG | 6375 | CGTGAATG GGCTAGCTACAACGA ATTTTGGT | 15124 |
| 3105 | CAAAAUGC A UUCACGGA | 6376 | TCCGTGAA GGCTAGCTACAACGA GCATTTTG | 15125 |
| 3101 | AUGCAUUC A CGGAUGAC | 6377 | GTCATCCG GGCTAGCTACAACGA GAATGCAT | 15126 |
| 3097 | AUUCACGG A UGACCCCU | 6378 | AGGGGTCA GGCTAGCTACAACGA CCGTGAAT | 15127 |
| 3094 | CACGGAUG A CCCCUUGA | 6379 | TCAAGGGG GGCTAGCTACAACGA CATCCGTG | 15128 |
| 3085 | CCCCUUGA G CCCGCACA | 6380 | TGTGCGGG GGCTAGCTACAACGA TCAAGGGG | 15129 |
| 3081 | UUGAGCCC G CACAAAGU | 6381 | ACTTTGTG GGCTAGCTACAACGA GGGCTCAA | 15130 |
| 3079 | GAGCCCGC A CAAAGUCC | 6382 | GGACTTTG GGCTAGCTACAACGA GCGGGCTC | 15131 |
| 3074 | CGCACAAA G UCCGGCAC | 6383 | GTGCCGGA GGCTAGCTACAACGA TTTGTGCG | 15132 |
| 3069 | AAAGUCCG G CACUUUUG | 6384 | CAAAAGTG GGCTAGCTACAACGA CGGACTTT | 15133 |
| 3067 | AGUCCGGC A CUUUUGCU | 6385 | AGCAAAAG GGCTAGCTACAACGA GCCGGACT | 15134 |
| 3061 | GCACUUUU G CUAUACCA | 6386 | TGGTATAG GGCTAGCTACAACGA AAAAGTGC | 15135 |
| 3058 | CUUUUGCU A UACCAGCC | 6387 | GGCTGGTA GGCTAGCTACAACGA AGCAAAAG | 15136 |
| 3056 | UUUGCUAU A CCAGCCUG | 6388 | CAGGCTGG GGCTAGCTACAACGA ATAGCAAA | 15137 |
| 3052 | CUAUACCA G CCUGGAGC | 6389 | GCTCCAGG GGCTAGCTACAACGA TGGTATAG | 15138 |
| 3045 | AGCCUGGA G CACCAUGA | 6390 | TCATGGTG GGCTAGCTACAACGA TCCAGGCT | 15139 |
| 3043 | CCUGGAGC A CCAUGAGC | 6391 | GCTCATGG GGCTAGCTACAACGA GCTCCAGG | 15140 |
| 3040 | GGAGCACC A UGAGCGGG | 6392 | CCCGCTCA GGCTAGCTACAACGA GGTGCTCC | 15141 |
| 3036 | CACCAUGA G CGGGCCGA | 6393 | TCGGCCCG GGCTAGCTACAACGA TCATGGTG | 15142 |
| 3032 | AUGAGCGG G CCGAGUAU | 6394 | ATACTCGG GGCTAGCTACAACGA CCGCTCAT | 15143 |
| 3027 | CGGGCCGA G UAUGGCGA | 6395 | TCGCCATA GGCTAGCTACAACGA TCGGCCCG | 15144 |
| 3025 | GGCCGAGU A UGGCGAGC | 6396 | GCTCGCCA GGCTAGCTACAACGA ACTCGGCC | 15145 |
| 3022 | CGAGUAUG G CGAGCAUA | 6397 | TATGCTCG GGCTAGCTACAACGA CATACTCG | 15146 |
| 3018 | UAUGGCGA G CAUAAUUU | 6398 | AAATTATG GGCTAGCTACAACGA TCGCCATA | 15147 |
| 3016 | UGGCGAGC A UAAUUUUG | 6399 | CAAAATTA GGCTAGCTACAACGA GCTCGCCA | 15148 |
| 3013 | CGAGCAUA A UUUUGGUG | 6400 | CACCAAAA GGCTAGCTACAACGA TATGCTCG | 15149 |
| 3007 | UAAUUUUG G UGAUGUCA | 6401 | TGACATCA GGCTAGCTACAACGA CAAAATTA | 15150 |
| 3004 | UUUUGGUG A UGUCAAAG | 6402 | CTTTGACA GGCTAGCTACAACGA CACCAAAA | 15151 |
| 3002 | UUGGUGAU G UCAAAGAU | 6403 | ATCTTTGA GGCTAGCTACAACGA ATCACCAA | 15152 |
| 2995 | UGUCAAAG A UUAGCUCU | 6404 | AGAGCTAA GGCTAGCTACAACGA CTTTGACA | 15153 |
| 2991 | AAAGAUUA G CUCUGGGU | 6405 | ACCCAGAG GGCTAGCTACAACGA TAATCTTT | 15154 |
| 2984 | AGCUCUGG G UGGACCAC | 6406 | GTGGTCCA GGCTAGCTACAACGA CCAGAGCT | 15155 |
| 2980 | CUGGGUGG A CCACACAC | 6407 | GTGTGTGG GGCTAGCTACAACGA CCACCCAG | 15156 |
| 2977 | GGUGGACC A CACACGUG | 6408 | CACGTGTG GGCTAGCTACAACGA GGTCCACC | 15157 |
| 2975 | UGGACCAC A CACGUGAG | 6409 | CTCACGTG GGCTAGCTACAACGA GTGGTCCA | 15158 |
| 2973 | GACCACAC A CGUGAGGA | 6410 | TCCTCACG GGCTAGCTACAACGA GTGTGGTC | 15159 |
| 2971 | CCACACAC G UGAGGAGA | 6411 | TCTCCTCA GGCTAGCTACAACGA GTGTGTGG | 15160 |
| 2962 | UGAGGAGA A UGAUGGCA | 6412 | TGCCATCA GGCTAGCTACAACGA TCTCCTCA | 15161 |
| 2959 | GGAGAAUG A UGGCACCG | 6413 | CGGTGCCA GGCTAGCTACAACGA CATTCTCC | 15162 |
| 2956 | GAAUGAUG G CACCGCGC | 6414 | GCGCGGTG GGCTAGCTACAACGA CATCATTC | 15163 |
| 2954 | AUGAUGGC A CCGCGCCC | 6415 | GGGCGCGG GGCTAGCTACAACGA GCCATCAT | 15164 |
| 2951 | AUGGCACC G CGCCCCCC | 6416 | GGGGGGCG GGCTAGCTACAACGA GGTGCCAT | 15165 |
| 2949 | GGCACCGC G CCCCCCCC | 6417 | GGGGGGGG GGCTAGCTACAACGA GCGGTGCC | 15166 |
| 2938 | CCCCCCGA A CGUUGAGG | 6418 | CCTCAACG GGCTAGCTACAACGA TCGGGGGG | 15167 |
| 2936 | CCCCGAAC G UUGAGGGG | 6419 | CCCCTCAA GGCTAGCTACAACGA GTTCGGGG | 15168 |
| 2923 | GGGGGGGG A UCCACACU | 6420 | AGTGTGGA GGCTAGCTACAACGA CCCCCCCC | 15169 |
| 2919 | GGGGAUCC A CACUUGCA | 6421 | TGCAAGTG GGCTAGCTACAACGA GGATCCCC | 15170 |
| 2917 | GGAUCCAC A CUUGCAAC | 6422 | GTTGCAAG GGCTAGCTACAACGA GTGGATCC | 15171 |
| 2913 | CCACACUU G CAACUGCG | 6423 | CGCAGTTG GGCTAGCTACAACGA AAGTGTGG | 15172 |
| 2910 | CACUUGCA A CUGCGCCU | 6424 | AGGCGCAG GGCTAGCTACAACGA TGCAAGTG | 15173 |
| 2907 | UUGCAACU G CGCCUCGG | 6425 | CCGAGGCG GGCTAGCTACAACGA AGTTGCAA | 15174 |
| 2905 | GCAACUGC G CCUCGGCU | 6426 | AGCCGAGG GGCTAGCTACAACGA GCAGTTGC | 15175 |
| 2899 | GCGCCUCG G CUCUGGUG | 6427 | CACCAGAG GGCTAGCTACAACGA CGAGGCGC | 15176 |
| 2893 | CGGCUCUG G UGAUAAGG | 6428 | CCTTATCA GGCTAGCTACAACGA CAGAGCCG | 15177 |
| 2890 | CUCUGGUG A UAAGGUAU | 6429 | ATACCTTA GGCTAGCTACAACGA CACCAGAG | 15178 |
| 2885 | GUGAUAAG G UAUUGCAA | 6430 | TTGCAATA GGCTAGCTACAACGA CTTATCAC | 15179 |
| 2883 | GAUAAGGU A UUGCAACC | 6431 | GGTTGCAA GGCTAGCTACAACGA ACCTTATC | 15180 |
| 2880 | AAGGUAUU G CAACCACC | 6432 | GGTGGTTG GGCTAGCTACAACGA AATACCTT | 15181 |
| 2877 | GUAUUGCA A CCACCAUA | 6433 | TATGGTGG GGCTAGCTACAACGA TGCAATAC | 15182 |
| 2874 | UUGCAACC A CCAUAUGA | 6434 | TCATATGG GGCTAGCTACAACGA GGTTGCAA | 15183 |
| 2871 | CAACCACC A UAUGAGCC | 6435 | GGCTCATA GGCTAGCTACAACGA GGTGGTTG | 15184 |
| 2869 | ACCACCAU A UGAGCCUA | 6436 | TAGGCTCA GGCTAGCTACAACGA ATGGTGGT | 15185 |
| 2865 | CCAUAUGA G CCUAGCGA | 6437 | TCGCTAGG GGCTAGCTACAACGA TCATATGG | 15186 |
| 2860 | UGAGCCUA G CGAGGAAC | 6438 | GTTCCTCG GGCTAGCTACAACGA TAGGCTCA | 15187 |
| 2853 | AGCGAGGA A CACUUUGU | 6439 | ACAAAGTG GGCTAGCTACAACGA TCCTCGCT | 15188 |
| 2851 | CGAGGAAC A CUUUGUAG | 6440 | CTACAAAG GGCTAGCTACAACGA GTTCCTCG | 15189 |
| 2846 | AACACUUU G UAGUAUGG | 6441 | CCATACTA GGCTAGCTACAACGA AAAGTGTT | 15190 |
| 2843 | ACUUUGUA G UAUGGUGA | 6442 | TCACCATA GGCTAGCTACAACGA TACAAAGT | 15191 |
| 2841 | UUUGUAGU A UGGUGACA | 6443 | TGTCACCA GGCTAGCTACAACGA ACTACAAA | 15192 |
| 2838 | GUAGUAUG G UGACAAGG | 6444 | CCTTGTCA GGCTAGCTACAACGA CATACTAC | 15193 |
| 2835 | GUAUGGUG A CAAGGUCA | 6445 | TGACCTTG GGCTAGCTACAACGA CACCATAC | 15194 |
| 2830 | GUGACAAG G UCAAGAGU | 6446 | ACTCTTGA GGCTAGCTACAACGA CTTGTCAC | 15195 |
| 2823 | GGUCAAGA G UGCUAGAC | 6447 | GTCTAGCA GGCTAGCTACAACGA TCTTGACC | 15196 |
| 2821 | UCAAGAGU G CUAGACCU | 6448 | AGGTCTAG GGCTAGCTACAACGA ACTCTTGA | 15197 |
| 2816 | AGUGCUAG A CCUACAAA | 6449 | TTTGTAGG GGCTAGCTACAACGA CTAGCACT | 15198 |
| 2812 | CUAGACCU A CAAAAACC | 6450 | GGTTTTTG GGCTAGCTACAACGA AGGTCTAG | 15199 |
| 2806 | CUACAAAA A CCACGCCU | 6451 | AGGCGTGG GGCTAGCTACAACGA TTTTGTAG | 15200 |
| 2803 | CAAAAACC A CGCCUCCG | 6452 | CGGAGGCG GGCTAGCTACAACGA GGTTTTTG | 15201 |
| 2801 | AAAACCAC G CCUCCGCA | 6453 | TGCGGAGG GGCTAGCTACAACGA GTGGTTTT | 15202 |
| 2795 | ACGCCUCC G CACGAUGC | 6454 | GCATCGTG GGCTAGCTACAACGA GGAGGCGT | 15203 |
| 2793 | GCCUCCGC A CGAUGCGG | 6455 | CCGCATCG GGCTAGCTACAACGA GCGGAGGC | 15204 |
| 2790 | UCCGCACG A UGCGGCCA | 6456 | TGGCCGCA GGCTAGCTACAACGA CGTGCGGA | 15205 |
| 2788 | CGCACGAU G CGGCCAUC | 6457 | GATGGCCG GGCTAGCTACAACGA ATCGTGCG | 15206 |
| 2785 | ACGAUGCG G CCAUCUCC | 6458 | GGAGATGG GGCTAGCTACAACGA CGCATCGT | 15207 |
| 2782 | AUGCGGCC A UCUCCCGG | 6459 | CCGGGAGA GGCTAGCTACAACGA GGCCGCAT | 15208 |
| 2774 | AUCUCCCG G UCCAUGGC | 6460 | GCCATGGA GGCTAGCTACAACGA CGGGAGAT | 15209 |
| 2770 | CCCGGUCC A UGGCGUAC | 6461 | GTACGCCA GGCTAGCTACAACGA GGACCGGG | 15210 |
| 2767 | GGUCCAUG G CGUACGCC | 6462 | GGCGTACG GGCTAGCTACAACGA CATGGACC | 15211 |
| 2765 | UCCAUGGC G UACGCCCG | 6463 | CGGGCGTA GGCTAGCTACAACGA GCCATGGA | 15212 |
| 2763 | CAUGGCGU A CGCCCGUG | 6464 | CACGGGCG GGCTAGCTACAACGA ACGCCATG | 15213 |
| 2761 | UGGCGUAC G CCCGUGGU | 6465 | ACCACGGG GGCTAGCTACAACGA GTACGCCA | 15214 |
| 2757 | GUACGCCC G UGGUGGUA | 6466 | TACCACCA GGCTAGCTACAACGA GGGCGTAC | 15215 |
| 2754 | CGCCCGUG G UGGUAACG | 6467 | CGTTACCA GGCTAGCTACAACGA CACGGGCG | 15216 |
| 2751 | CCGUGGUG G UAACGCCA | 6468 | TGGCGTTA GGCTAGCTACAACGA CACCACGG | 15217 |
| 2748 | UGGUGGUA A CGCCAGCA | 6469 | TGCTGGCG GGCTAGCTACAACGA TACCACCA | 15218 |
| 2746 | GUGGUAAC G CCAGCAGG | 6470 | CCTGCTGG GGCTAGCTACAACGA GTTACCAC | 15219 |
| 2742 | UAACGCCA G CAGGAGCA | 6471 | TGCTCCTG GGCTAGCTACAACGA TGGCGTTA | 15220 |
| 2736 | CAGCAGGA G CAGGAGUA | 6472 | TACTCCTG GGCTAGCTACAACGA TCCTGCTG | 15221 |
| 2730 | GAGCAGGA G UAGCGGCC | 6473 | GGCCGCTA GGCTAGCTACAACGA TCCTGCTC | 15222 |
| 2727 | CAGGAGUA G CGGCCAUA | 6474 | TATGGCCG GGCTAGCTACAACGA TACTCCTG | 15223 |
| 2724 | GAGUAGCG G CCAUACGC | 6475 | GCGTATGG GGCTAGCTACAACGA CGCTACTC | 15224 |
| 2721 | UAGCGGCC A UACGCCGU | 6476 | ACGGCGTA GGCTAGCTACAACGA GGCCGCTA | 15225 |
| 2719 | GCGGCCAU A CGCCGUAG | 6477 | CTACGGCG GGCTAGCTACAACGA ATGGCCGC | 15226 |
| 2717 | GGCCAUAC G CCGUAGAG | 6478 | CTCTACGG GGCTAGCTACAACGA GTATGGCC | 15227 |
| 2714 | CAUACGCC G UAGAGAGC | 6479 | GCTCTCTA GGCTAGCTACAACGA GGCGTATG | 15228 |
| 2707 | CGUAGAGA G CAUAUGCC | 6480 | GGCATATG GGCTAGCTACAACGA TCTCTACG | 15229 |
| 2705 | UAGAGAGC A UAUGCCGC | 6481 | GCGGCATA GGCTAGCTACAACGA GCTCTCTA | 15230 |
| 2703 | GAGAGCAU A UGCCGCCC | 6482 | GGGCGGCA GGCTAGCTACAACGA ATGCTCTC | 15231 |
| 2701 | GAGCAUAU G CCGCCCCA | 6483 | TGGGGCGG GGCTAGCTACAACGA ATATGCTC | 15232 |
| 2698 | CAUAUGCC G CCCCAGGG | 6484 | CCCTGGGG GGCTAGCTACAACGA GGCATATG | 15233 |
| 2689 | CCCCAGGG A CCAGCUUG | 6485 | CAAGCTGG GGCTAGCTACAACGA CCCTGGGG | 15234 |
| 2685 | AGGGACCA G CUUGCCUU | 6486 | AAGGCAAG GGCTAGCTACAACGA TGGTCCCT | 15235 |
| 2681 | ACCAGCUU G CCUUUGAU | 6487 | ATCAAAGG GGCTAGCTACAACGA AAGCTGGT | 15236 |
| 2674 | UGCCUUUG A UGUACCAG | 6488 | CTGGTACA GGCTAGCTACAACGA CAAAGGCA | 15237 |
| 2672 | CCUUUGAU G UACCAGGC | 6489 | GCCTGGTA GGCTAGCTACAACGA ATCAAAGG | 15238 |
| 2670 | UUUGAUGU A CCAGGCAG | 6490 | CTGCCTGG GGCTAGCTACAACGA ACATCAAA | 15239 |
| 2665 | UGUACCAG G CAGCACAG | 6491 | CTGTGCTG GGCTAGCTACAACGA CTGGTACA | 15240 |
| 2662 | ACCAGGCA G CACAGAAG | 6492 | CTTCTGTG GGCTAGCTACAACGA TGCCTGGT | 15241 |
| 2660 | CAGGCAGC A CAGAAGAA | 6493 | TTCTTCTG GGCTAGCTACAACGA GCTGCCTG | 15242 |
| 2652 | ACAGAAGA A CACGAGGA | 6494 | TCCTCGTG GGCTAGCTACAACGA TCTTCTGT | 15243 |
| 2650 | AGAAGAAC A CGAGGAAG | 6495 | CTTCCTCG GGCTAGCTACAACGA GTTCTTCT | 15244 |
| 2635 | AGGAGAGG A UGCCAUGC | 6496 | GCATGGCA GGCTAGCTACAACGA CCTCTCCT | 15245 |
| 2633 | GAGAGGAU G CCAUGCAC | 6497 | GTGCATGG GGCTAGCTACAACGA ATCCTCTC | 15246 |
| 2630 | AGGAUGCC A UGCACUCC | 6498 | GGAGTGCA GGCTAGCTACAACGA GGCATCCT | 15247 |
| 2628 | GAUGCCAU G CACUCCGG | 6499 | CCGGAGTG GGCTAGCTACAACGA ATGGCATC | 15248 |
| 2626 | UGCCAUGC A CUCCGGCC | 6500 | GGCCGGAG GGCTAGCTACAACGA GCATGGCA | 15249 |
| 2620 | GCACUCCG G CCAAGGAU | 6501 | ATCCTTGG GGCTAGCTACAACGA CGGAGTGC | 15250 |
| 2613 | GGCCAAGG A UGCUGCAU | 6502 | ATGCAGCA GGCTAGCTACAACGA CCTTGGCC | 15251 |
| 2611 | CCAAGGAU G CUGCAUUG | 6503 | CAATGCAG GGCTAGCTACAACGA ATCCTTGG | 15252 |
| 2608 | AGGAUGCU G CAUUGAGG | 6504 | CCTCAATG GGCTAGCTACAACGA AGCATCCT | 15253 |
| 2606 | GAUGCUGC A UUGAGGAC | 6505 | GTCCTCAA GGCTAGCTACAACGA GCAGCATC | 15254 |
| 2599 | CAUUGAGG A CCACCAGG | 6506 | CCTGGTGG GGCTAGCTACAACGA CCTCAATG | 15255 |
| 2596 | UGAGGACC A CCAGGUUC | 6507 | GAACCTGG GGCTAGCTACAACGA GGTCCTCA | 15256 |
| 2591 | ACCACCAG G UUCUCUAG | 6508 | CTAGAGAA GGCTAGCTACAACGA CTGGTGGT | 15257 |
| 2581 | UCUCUAGG G CAGCCUCG | 6509 | CGAGGCTG GGCTAGCTACAACGA CCTAGAGA | 15258 |
| 2578 | CUAGGGCA G CCUCGGCC | 6510 | GGCCGAGG GGCTAGCTACAACGA TGCCCTAG | 15259 |
| 2572 | CAGCCUCG G CCUGGGCU | 6511 | AGCCCAGG GGCTAGCTACAACGA CGAGGCTG | 15260 |
| 2566 | CGGCCUGG G CUACCAAC | 6512 | GTTGGTAG GGCTAGCTACAACGA CCAGGCCG | 15261 |
| 2563 | CCUGGGCU A CCAACAGC | 6513 | GCTGTTGG GGCTAGCTACAACGA AGCCCAGG | 15262 |
| 2559 | GGCUACCA A CAGCAUCA | 6514 | TGATGCTG GGCTAGCTACAACGA TGGTAGCC | 15263 |
| 2556 | UACCAACA G CAUCAUCC | 6515 | GGATGATG GGCTAGCTACAACGA TGTTGGTA | 15264 |
| 2554 | CCAACAGC A UCAUCCAC | 6516 | GTGGATGA GGCTAGCTACAACGA GCTGTTGG | 15265 |
| 2551 | ACAGCAUC A UCCACAAA | 6517 | TTTGTGGA GGCTAGCTACAACGA GATGCTGT | 15266 |
| 2547 | CAUCAUCC A CAAACAGG | 6518 | CCTGTTTG GGCTAGCTACAACGA GGATGATG | 15267 |
| 2543 | AUCCACAA A CAGGCACA | 6519 | TGTGCCTG GGCTAGCTACAACGA TTGTGGAT | 15268 |
| 2539 | ACAAACAG G CACAGACG | 6520 | CGTCTGTG GGCTAGCTACAACGA CTGTTTGT | 15269 |
| 2537 | AAACAGGC A CAGACGCG | 6521 | CGCGTCTG GGCTAGCTACAACGA GCCTGTTT | 15270 |
| 2533 | AGGCACAG A CGCGCGCG | 6522 | CGCGCGCG GGCTAGCTACAACGA CTGTGCCT | 15271 |
| 2531 | GCACAGAC G CGCGCGUC | 6523 | GACGCGCG GGCTAGCTACAACGA GTCTGTGC | 15272 |
| 2529 | ACAGACGC G CGCGUCUG | 6524 | CAGACGCG GGCTAGCTACAACGA GCGTCTGT | 15273 |
| 2527 | AGACGCGC G CGUCUGCC | 6525 | GGCAGACG GGCTAGCTACAACGA GCGCGTCT | 15274 |
| 2525 | ACGCGCGC G UCUGCCAG | 6526 | CTGGCAGA GGCTAGCTACAACGA GCGCGCGT | 15275 |
| 2521 | GCGCGUCU G CCAGGAGA | 6527 | TCTCCTGG GGCTAGCTACAACGA AGACGCGC | 15276 |
| 2505 | AAGGAAAA G CAACAGGA | 6528 | TCCTGTTG GGCTAGCTACAACGA TTTTCCTT | 15277 |
| 2502 | GAAAAGCA A CAGGACAU | 6529 | ATGTCCTG GGCTAGCTACAACGA TGCTTTTC | 15278 |
| 2497 | GCAACAGG A CAUACUCC | 6530 | GGAGTATG GGCTAGCTACAACGA CCTGTTGC | 15279 |
| 2495 | AACAGGAC A UACUCCCA | 6531 | TGGGAGTA GGCTAGCTACAACGA GTCCTGTT | 15280 |
| 2493 | CAGGACAU A CUCCCAUU | 6532 | AATGGGAG GGCTAGCTACAACGA ATGTCCTG | 15281 |
| 2487 | AUACUCCC A UUUGAUUG | 6533 | CAATCAAA GGCTAGCTACAACGA GGGAGTAT | 15282 |
| 2482 | CCCAUUUG A UUGCGAAG | 6534 | CTTCGCAA GGCTAGCTACAACGA CAAATGGG | 15283 |
| 2479 | AUUUGAUU G CGAAGGAG | 6535 | CTCCTTCG GGCTAGCTACAACGA AATCAAAT | 15284 |
| 2470 | CGAAGGAG A CAACCGCU | 6536 | AGCGGTTG GGCTAGCTACAACGA CTCCTTCC | 15285 |
| 2467 | AGGAGACA A CCGCUGAC | 6537 | GTCAGCGG GGCTAGCTACAACGA TGTCTCCT | 15286 |
| 2464 | AGACAACC G CUGACCCU | 6538 | AGGGTCAG GGCTAGCTACAACGA GGTTGTCT | 15287 |
| 2460 | AACCGCUG A CCCUACAC | 6539 | GTGTAGGG GGCTAGCTACAACGA CAGCGGTT | 15288 |
| 2455 | CUGACCCU A CACCGUAC | 6540 | GTACGGTG GGCTAGCTACAACGA AGGGTCAG | 15289 |
| 2453 | GACCCUAC A CCGUACAG | 6541 | CTGTACGG GGCTAGCTACAACGA GTAGGGTC | 15290 |
| 2450 | CCUACACC G UACAGGUA | 6542 | TACCTGTA GGCTAGCTACAACGA GGTGTAGG | 15291 |
| 2448 | UACACCGU A CAGGUAUU | 6543 | AATACCTG GGCTAGCTACAACGA ACGGTGTA | 15292 |
| 2444 | CCGUACAG G UAUUGCAC | 6544 | GTGCAATA GGCTAGCTACAACGA CTGTACGG | 15293 |
| 2442 | GUACAGGU A UUGCACGU | 6545 | ACGTGCAA GGCTAGCTACAACGA ACCTGTAC | 15294 |
| 2439 | CAGGUAUU G CACGUCCA | 6546 | TGGACGTG GGCTAGCTACAACGA AATACCTG | 15295 |
| 2437 | GGUAUUGC A CGUCCACG | 6547 | CGTGGACG GGCTAGCTACAACGA GCAATACC | 15296 |
| 2435 | UAUUGCAC G UCCACGAU | 6548 | ATCGTGGA GGCTAGCTACAACGA GTGCAATA | 15297 |
| 2431 | GCACGUCC A CGAUGUUC | 6549 | GAACATCG GGCTAGCTACAACGA GGACGTGC | 15298 |
| 2428 | CGUCCACG A UGUUCUGG | 6550 | CCAGAACA GGCTAGCTACAACGA CGTGGACG | 15299 |
| 2426 | UCCACGAU G UUCUGGUG | 6551 | CACCAGAA GGCTAGCTACAACGA ATCGTGGA | 15300 |
| 2420 | AUGUUCUG G UGGAGAUG | 6552 | CATCTCCA GGCTAGCTACAACGA CAGAACAT | 15301 |
| 2414 | UGGUGGAG A UGGAUCAA | 6553 | TTGATCCA GGCTAGCTACAACGA CTCCACCA | 15302 |
| 2410 | GGAGAUGG A UCAAACCA | 6554 | TGGTTTGA GGCTAGCTACAACGA CCATCTCC | 15303 |
| 2405 | UGGAUCAA A CCAGUGGA | 6555 | TCCACTGG GGCTAGCTACAACGA TTGATCCA | 15304 |
| 2401 | UCAAACCA G UGGACAGA | 6556 | TCTGTCCA GGCTAGCTACAACGA TGGTTTGA | 15305 |
| 2397 | ACCAGUGG A CAGAGCCG | 6557 | CGGCTCTG GGCTAGCTACAACGA CCACTGGT | 15306 |
| 2392 | UGGACAGA G CCGGUAGG | 6558 | CCTACCGG GGCTAGCTACAACGA TCTGTCCA | 15307 |
| 2388 | CAGAGCCG G UAGGGUGG | 6559 | CCACCCTA GGCTAGCTACAACGA CGGCTCTG | 15308 |
| 2383 | CCGGUAGG G UGGUGAAG | 6560 | CTTCACCA GGCTAGCTACAACGA CCTACCGG | 15309 |
| 2380 | GUAGGGUG G UGAAGGAG | 6561 | CTCCTTCA GGCTAGCTACAACGA CACCCTAC | 15310 |
| 2372 | GUGAAGGA G CAGGGCAG | 6562 | CTGCCCTG GGCTAGCTACAACGA TCCTTCAC | 15311 |
| 2367 | GGAGCAGG G CAGUAUUU | 6563 | AAATACTG GGCTAGCTACAACGA CCTGCTCC | 15312 |
| 2364 | GCAGGGCA G UAUUUGCC | 6564 | GGCAAATA GGCTAGCTACAACGA TGCCCTGC | 15313 |
| 2362 | AGGGCAGU A UUUGCCAC | 6565 | GTGGCAAA GGCTAGCTACAACGA ACTGCCCT | 15314 |
| 2358 | CAGUAUUU G CCACUCUG | 6566 | CAGAGTGG GGCTAGCTACAACGA AAATACTG | 15315 |
| 2355 | UAUUUGCC A CUCUGUAG | 6567 | CTACAGAG GGCTAGCTACAACGA GGCAAATA | 15316 |
| 2350 | GCCACUCU G UAGUGGAC | 6568 | GTCCACTA GGCTAGCTACAACGA AGAGTGGC | 15317 |
| 2347 | ACUCUGUA G UGGACAAC | 6569 | GTTGTCCA GGCTAGCTACAACGA TACAGAGT | 15318 |
| 2343 | UGUAGUGG A CAACAGCA | 6570 | TGCTGTTG GGCTAGCTACAACGA CCACTACA | 15319 |
| 2340 | AGUGGACA A CAGCAGCG | 6571 | CGCTGCTG GGCTAGCTACAACGA TGTCCACT | 15320 |
| 2337 | GGACAACA G CAGCGGGC | 6572 | GCCCGCTG GGCTAGCTACAACGA TGTTGTCC | 15321 |
| 2334 | CAACAGCA G CGGGCUGA | 6573 | TCAGCCCG GGCTAGCTACAACGA TGCTGTTG | 15322 |
| 2330 | AGCAGCGG G CUGAGCUC | 6574 | GAGCTCAG GGCTAGCTACAACGA CCGCTGCT | 15323 |
| 2325 | CGGGCUGA G CUCUGAUC | 6575 | GATCAGAG GGCTAGCTACAACGA TCAGCCCG | 15324 |
| 2319 | GAGCUCUG A UCUGUCCC | 6576 | GGGACAGA GGCTAGCTACAACGA CAGAGCTC | 15325 |
| 2315 | UCUGAUCU G UCCCUGUC | 6577 | GACAGGGA GGCTAGCTACAACGA AGATCAGA | 15326 |
| 2309 | CUGUCCCU G UCCUCCAA | 6578 | TTGGAGGA GGCTAGCTACAACGA AGGGACAG | 15327 |
| 2300 | UCCUCCAA A UCACAACG | 6579 | CGTTGTGA GGCTAGCTACAACGA TTGGAGGA | 15328 |
| 2297 | UCCAAAUC A CAACGCUC | 6580 | GAGCGTTG GGCTAGCTACAACGA GATTTGGA | 15329 |
| 2294 | AAAUCACA A CGCUCUCC | 6581 | GGAGAGCG GGCTAGCTACAACGA TGTGATTT | 15330 |
| 2292 | AUCACAAC G CUCUCCUC | 6582 | GAGGAGAG GGCTAGCTACAACGA GTTGTGAT | 15331 |
| 2281 | CUCCUCGA G UCCAAUUG | 6583 | CAATTGGA GGCTAGCTACAACGA TCGAGGAG | 15332 |
| 2276 | CGAGUCCA A UUGCAUGC | 6584 | GCATGCAA GGCTAGCTACAACGA TGGACTCG | 15333 |
| 2273 | GUCCAAUU G CAUGCGGC | 6585 | GCCGCATG GGCTAGCTACAACGA AATTGGAC | 15334 |
| 2271 | CCAAUUGC A UGCGGCGG | 6586 | CCGCCGCA GGCTAGCTACAACGA GCAATTGG | 15335 |
| 2269 | AAUUGCAU G CGGCGGUG | 6587 | CACCGCCG GGCTAGCTACAACGA ATGCAATT | 15336 |
| 2266 | UGCAUGCG G CGGUGAGC | 6588 | GCTCACCG GGCTAGCTACAACGA CGCATGCA | 15337 |
| 2263 | AUGCGGCG G UGAGCCUG | 6589 | CAGGCTCA GGCTAGCTACAACGA CGCCGCAT | 15338 |
| 2259 | GGCGGUGA G CCUGUGCU | 6590 | AGCACAGG GGCTAGCTACAACGA TCACCGCC | 15339 |
| 2255 | GUGAGCCU G UGCUCCAC | 6591 | GTGGAGCA GGCTAGCTACAACGA AGGCTCAC | 15340 |
| 2253 | GAGCCUGU G CUCCACGC | 6592 | GCGTGGAG GGCTAGCTACAACGA ACAGGCTC | 15341 |
| 2248 | UGUGCUCC A CGCCCCCC | 6593 | GGGGGGCG GGCTAGCTACAACGA GGAGCACA | 15342 |
| 2246 | UGCUCCAC G CCCCCCAC | 6594 | GTGGGGGG GGCTAGCTACAACGA GTGGAGCA | 15343 |
| 2239 | CGCCCCCC A CAUACAUC | 6595 | GATGTATG GGCTAGCTACAACGA GGGGGGCG | 15344 |
| 2237 | CCCCCCAC A UACAUCCU | 6596 | AGGATGTA GGCTAGCTACAACGA GTGGGGGG | 15345 |
| 2235 | CCCCACAU A CAUCCUAA | 6597 | TTAGGATG GGCTAGCTACAACGA ATGTGGGG | 15346 |
| 2233 | CCACAUAC A UCCUAACC | 6598 | GGTTAGGA GGCTAGCTACAACGA GTATGTGG | 15347 |
| 2227 | ACAUCCUA A CCUUAAAG | 6599 | CTTTAAGG GGCTAGCTACAACGA TAGGATGT | 15348 |
| 2218 | CCUUAAAG A UGGAAAAA | 6600 | TTTTTCCA GGCTAGCTACAACGA CTTTAAGG | 15349 |
| 2210 | AUGGAAAA A UUGACAGU | 6601 | ACTGTCAA GGCTAGCTACAACGA TTTTCCAT | 15350 |
| 2206 | AAAAAUUG A CAGUGCAG | 6602 | CTGCACTG GGCTAGCTACAACGA CAATTTTT | 15351 |
| 2203 | AAUUGACA G UGCAGGGG | 6603 | CCCCTGCA GGCTAGCTACAACGA TGTCAATT | 15352 |
| 2201 | UUGACAGU G CAGGGGUA | 6604 | TACCCCTG GGCTAGCTACAACGA ACTGTCAA | 15353 |
| 2195 | GUGCAGGG G UAGUGCCA | 6605 | TGGCACTA GGCTAGCTACAACGA CCCTGCAC | 15354 |
| 2192 | CAGGGGUA G UGCCAAAG | 6606 | CTTTGGCA GGCTAGCTACAACGA TACCCCTG | 15355 |
| 2190 | GGGGUAGU G CCAAAGCC | 6607 | GGCTTTGG GGCTAGCTACAACGA ACTACCCC | 15356 |
| 2184 | GUGCCAAA G CCUGUAUG | 6608 | CATACAGG GGCTAGCTACAACGA TTTGGCAC | 15357 |
| 2180 | CAAAGCCU G UAUGGGUA | 6609 | TACCCATA GGCTAGCTACAACGA AGGCTTTG | 15358 |
| 2178 | AAGCCUGU A UGGGUAGU | 6610 | ACTACCCA GGCTAGCTACAACGA ACAGGCTT | 15359 |
| 2174 | CUGUAUGG G UAGUCAAC | 6611 | GTTGACTA GGCTAGCTACAACGA CCATACAG | 15360 |
| 2171 | UAUGGGUA G UCAACUAU | 6612 | ATAGTTGA GGCTAGCTACAACGA TACCCATA | 15361 |
| 2167 | GGUAGUCA A CUAUGCAU | 6613 | ATGCATAG GGCTAGCTACAACGA TGACTACC | 15362 |
| 2164 | AGUCAACU A UGCAUCUA | 6614 | TAGATGCA GGCTAGCTACAACGA AGTTGACT | 15363 |
| 2162 | UCAACUAU G CAUCUAGG | 6615 | CCTAGATG GGCTAGCTACAACGA ATAGTTGA | 15364 |
| 2160 | AACUAUGC A UCUAGGUG | 6616 | CACCTAGA GGCTAGCTACAACGA GCATAGTT | 15365 |
| 2154 | GCAUCUAG G UGUUAACC | 6617 | GGTTAACA GGCTAGCTACAACGA CTAGATGC | 15366 |
| 2152 | AUCUAGGU G UUAACCAA | 6618 | TTGGTTAA GGCTAGCTACAACGA ACCTAGAT | 15367 |
| 2148 | AGGUGUUA A CCAAGGCC | 6619 | GGCCTTGG GGCTAGCTACAACGA TAACACCT | 15368 |
| 2142 | UAACCAAG G CCCCGAAC | 6620 | GTTCGGGG GGCTAGCTACAACGA CTTGGTTA | 15369 |
| 2135 | GGCCCCGA A CCGCACUU | 6621 | AAGTGCGG GGCTAGCTACAACGA TCGGGGCC | 15370 |
| 2132 | CCCGAACC G CACUUUGC | 6622 | GCAAAGTG GGCTAGCTACAACGA GGTTCGGG | 15371 |
| 2130 | CGAACCGC A CUUUGCGU | 6623 | ACGCAAAG GGCTAGCTACAACGA GCGGTTCG | 15372 |
| 2125 | CGCACUUU G CGUAAGUG | 6624 | CACTTACG GGCTAGCTACAACGA AAAGTGCG | 15373 |
| 2123 | CACUUUGC G UAAGUGGC | 6625 | GCCACTTA GGCTAGCTACAACGA GCAAAGTG | 15374 |
| 2119 | UUGCGUAA G UGGCCUCG | 6626 | CGAGGCCA GGCTAGCTACAACGA TTACGCAA | 15375 |
| 2116 | CGUAAGUG G CCUCGGGG | 6627 | CCCCGAGG GGCTAGCTACAACGA CACTTACG | 15376 |
| 2108 | GCCUCGGG G UGCUUCCG | 6628 | CGGAAGCA GGCTAGCTACAACGA CCCGAGGC | 15377 |
| 2106 | CUCGGGGU G CUUCCGGA | 6629 | TCCGGAAG GGCTAGCTACAACGA ACCCCGAG | 15378 |
| 2096 | UUCCGGAA G CAGUCCGU | 6630 | ACGGACTG GGCTAGCTACAACGA TTCCGGAA | 15379 |
| 2093 | CGGAAGCA G UCCGUGGG | 6631 | CCCACGGA GGCTAGCTACAACGA TGCTTCCG | 15380 |
| 2089 | AGCAGUCC G UGGGGCAG | 6632 | CTGCCCCA GGCTAGCTACAACGA GGACTGCT | 15381 |
| 2084 | UCCGUGGG G CAGGUUAA | 6633 | TTAACCTG GGCTAGCTACAACGA CCCACGGA | 15382 |
| 2080 | UGGGGCAG G UUAAGGUG | 6634 | CACCTTAA GGCTAGCTACAACGA CTGCCCCA | 15383 |
| 2074 | AGGUUAAG G UGUCGUUA | 6635 | TAACGACA GGCTAGCTACAACGA CTTAACCT | 15384 |
| 2072 | GUUAAGGU G UCGUUACC | 6636 | GGTAACGA GGCTAGCTACAACGA ACCTTAAC | 15385 |
| 2069 | AAGGUGUC G UUACCGGC | 6637 | GCCGGTAA GGCTAGCTACAACGA GACACCTT | 15386 |
| 2066 | GUGUCGUU A CCGGCCCC | 6638 | GGGGCCGG GGCTAGCTACAACGA AACGACAC | 15387 |
| 2062 | CGUUACCG G CCCCCCCG | 6639 | CGGGGGGG GGCTAGCTACAACGA CGGTAACG | 15388 |
| 2053 | CCCCCCCG A UGUUGCAC | 6640 | GTGCAACA GGCTAGCTACAACGA CGGGGGGG | 15389 |
| 2051 | CCCCCGAU G UUGCACGG | 6641 | CCGTGCAA GGCTAGCTACAACGA ATCGGGGG | 15390 |
| 2048 | CCGAUGUU G CACGGGGG | 6642 | CCCCCGTG GGCTAGCTACAACGA AACATCGG | 15391 |
| 2046 | GAUGUUGC A CGGGGGGC | 6643 | GCCCCCCG GGCTAGCTACAACGA GCAACATC | 15392 |
| 2039 | CACGGGGG G CCCCCGCA | 6644 | TGCGGGGG GGCTAGCTACAACGA CCCCCGTG | 15393 |
| 2033 | GGGCCCCC G CACGUCUU | 6645 | AAGACGTG GGCTAGCTACAACGA GGGGGCCC | 15394 |
| 2031 | GCCCCCGC A CGUCUUGG | 6646 | CCAAGACG GGCTAGCTACAACGA GCGGGGGC | 15395 |
| 2029 | CCCCGCAC G UCUUGGUG | 6647 | CACCAAGA GGCTAGCTACAACGA GTGCGGGG | 15396 |
| 2023 | ACGUCUUG G UGAACCCA | 6648 | TGGGTTCA GGCTAGCTACAACGA CAAGACGT | 15397 |
| 2019 | CUUGGUGA A CCCAGUGC | 6649 | GCACTGGG GGCTAGCTACAACGA TCACCAAG | 15398 |
| 2014 | UGAACCCA G UGCCAUUC | 6650 | GAATGGCA GGCTAGCTACAACGA TGGGTTCA | 15399 |
| 2012 | AACCCAGU G CCAUUCAU | 6651 | ATGAATGG GGCTAGCTACAACGA ACTGGGTT | 15400 |
| 2009 | CCAGUGCC A UUCAUCCA | 6652 | TGGATGAA GGCTAGCTACAACGA GGCACTGG | 15401 |
| 2005 | UGCCAUUC A UCCAUGUG | 6653 | CACATGGA GGCTAGCTACAACGA GAATGGCA | 15402 |
| 2001 | AUUCAUCC A UGUGCAGC | 6654 | GCTGCACA GGCTAGCTACAACGA GGATGAAT | 15403 |
| 1999 | UCAUCCAU G UGCAGCCG | 6655 | CGGCTGCA GGCTAGCTACAACGA ATGGATGA | 15404 |
| 1997 | AUCCAUGU G CAGCCGAA | 6656 | TTCGGCTG GGCTAGCTACAACGA ACATGGAT | 15405 |
| 1994 | CAUGUGCA G CCGAACCA | 6657 | TGGTTCGG GGCTAGCTACAACGA TGCACATG | 15406 |
| 1989 | GCAGCCGA A CCAGUUGC | 6658 | GCAACTGG GGCTAGCTACAACGA TCGGCTGC | 15407 |
| 1985 | CCGAACCA G UUGCCUUG | 6659 | CAAGGCAA GGCTAGCTACAACGA TGGTTCGG | 15408 |
| 1982 | AACCAGUU G CCUUGCGG | 6660 | CCGCAAGG GGCTAGCTACAACGA AACTGGTT | 15409 |
| 1977 | GUUGCCUU G CGGCGGCC | 6661 | GGCCGCCG GGCTAGCTACAACGA AAGGCAAC | 15410 |
| 1974 | GCCUUGCG G CGGCCGCG | 6662 | CGCGGCCG GGCTAGCTACAACGA CGCAAGGC | 15411 |
| 1971 | UUGCGGCG G CCGCGUGU | 6663 | ACACGCGG GGCTAGCTACAACGA CGCCGCAA | 15412 |
| 1968 | CGGCGGCC G CGUGUUGU | 6664 | ACAACACG GGCTAGCTACAACGA GGCCGCCG | 15413 |
| 1966 | GCGGCCGC G UGUUGUUG | 6665 | CAACAACA GGCTAGCTACAACGA GCGGCCGC | 15414 |
| 1964 | GGCCGCGU G UUGUUGAG | 6666 | CTCAACAA GGCTAGCTACAACGA ACGCGGCC | 15415 |
| 1961 | CGCGUGUU G UUGAGGAG | 6667 | CTCCTCAA GGCTAGCTACAACGA AACACGCG | 15416 |
| 1953 | GUUGAGGA G CAGCACGU | 6668 | ACGTGCTG GGCTAGCTACAACGA TCCTCAAC | 15417 |
| 1950 | GAGGAGCA G CACGUCCG | 6669 | CGGACGTG GGCTAGCTACAACGA TGCTCCTC | 15418 |
| 1948 | GGAGCAGC A CGUCCGUC | 6670 | GACGGACG GGCTAGCTACAACGA GCTGCTCC | 15419 |
| 1946 | AGCAGCAC G UCCGUCUC | 6671 | GAGACGGA GGCTAGCTACAACGA GTGCTGCT | 15420 |
| 1942 | GCACGUCC G UCUCGUUC | 6672 | GAACGAGA GGCTAGCTACAACGA GGACGTGC | 15421 |
| 1937 | UCCGUCUC G UUCGCCCC | 6673 | GGGGCGAA GGCTAGCTACAACGA GAGACGGA | 15422 |
| 1933 | UCUCGUUC G CCCCCCAG | 6674 | CTGGGGGG GGCTAGCTACAACGA GAACGAGA | 15423 |
| 1925 | GCCCCCCA G UUAUACGU | 6675 | ACGTATAA GGCTAGCTACAACGA TGGGGGGC | 15424 |
| 1922 | CCCCAGUU A UACGUGGG | 6676 | CCCACGTA GGCTAGCTACAACGA AACTGGGG | 15425 |
| 1920 | CCAGUUAU A CGUGGGGG | 6677 | CCCCCACG GGCTAGCTACAACGA ATAACTGG | 15426 |
| 1918 | AGUUAUAC G UGGGGGCG | 6678 | CGCCCCCA GGCTAGCTACAACGA GTATAACT | 15427 |
| 1912 | ACGUGGGG G CGCCGAAA | 6679 | TTTCGGCG GGCTAGCTACAACGA CCCCACGT | 15428 |
| 1910 | GUGGGGGC G CCGAAACG | 6680 | CGTTTCGG GGCTAGCTACAACGA GCCCCCAC | 15429 |
| 1904 | GCGCCGAA A CGGUCGGU | 6681 | ACCGACCG GGCTAGCTACAACGA TTCGGCGC | 15430 |
| 1901 | CCGAAACG G UCGGUCGU | 6682 | ACGACCGA GGCTAGCTACAACGA CGTTTCGG | 15431 |
| 1897 | AACGGUCG G UCGUCCCC | 6683 | GGGGACGA GGCTAGCTACAACGA CGACCGTT | 15432 |
| 1894 | GGUCGGUC G UCCCCACC | 6684 | GGTGGGGA GGCTAGCTACAACGA GACCGACC | 15433 |
| 1888 | UCGUCCCC A CCACAACA | 6685 | TGTTGTGG GGCTAGCTACAACGA GGGGACGA | 15434 |
| 1885 | UCCCCACC A CAACAGGG | 6686 | CCCTGTTG GGCTAGCTACAACGA GGTGGGGA | 15435 |
| 1882 | CCACCACA A CAGGGCUU | 6687 | AAGCCCTG GGCTAGCTACAACGA TGTGGTGG | 15436 |
| 1877 | ACAACAGG G CUUGGGGU | 6688 | ACCCCAAG GGCTAGCTACAACGA CCTGTTGT | 15437 |
| 1870 | GGCUUGGG G UGAAGCAA | 6689 | TTGCTTCA GGCTAGCTACAACGA CCCAAGCC | 15438 |
| 1865 | GGGGUGAA G CAAUACAC | 6690 | GTGTATTG GGCTAGCTACAACGA TTCACCCC | 15439 |
| 1862 | GUGAAGCA A UACACUGG | 6691 | CCAGTGTA GGCTAGCTACAACGA TGCTTCAC | 15440 |
| 1860 | GAAGCAAU A CACUGGAC | 6692 | GTCCAGTG GGCTAGCTACAACGA ATTGCTTC | 15441 |
| 1858 | AGCAAUAC A CUGGACCA | 6693 | TGGTCCAG GGCTAGCTACAACGA GTATTGCT | 15442 |
| 1853 | UACACUGG A CCACAUAC | 6694 | GTATGTGG GGCTAGCTACAACGA CCAGTGTA | 15443 |
| 1850 | ACUGGACC A CAUACCUG | 6695 | CAGGTATG GGCTAGCTACAACGA GGTCCAGT | 15444 |
| 1848 | UGGACCAC A UACCUGCG | 6696 | CGCAGGTA GGCTAGCTACAACGA GTGGTCCA | 15445 |
| 1846 | GACCACAU A CCUGCGAU | 6697 | ATCGCAGG GGCTAGCTACAACGA ATGTGGTC | 15446 |
| 1842 | ACAUACCU G CGAUGCGG | 6698 | CCGCATCG GGCTAGCTACAACGA AGGTATGT | 15447 |
| 1839 | UACCUGCG A UGCGGGUA | 6699 | TACCCGCA GGCTAGCTACAACGA CGCAGGTA | 15448 |
| 1837 | CCUGCGAU G CGGGUACG | 6700 | CGTACCCG GGCTAGCTACAACGA ATCGCAGG | 15449 |
| 1833 | CGAUGCGG G UACGAUAC | 6701 | GTATCGTA GGCTAGCTACAACGA CCGCATCG | 15450 |
| 1831 | AUGCGGGU A CGAUACCA | 6702 | TGGTATCG GGCTAGCTACAACGA ACCCGCAT | 15451 |
| 1828 | CGGGUACG A UACCACAC | 6703 | GTGTGGTA GGCTAGCTACAACGA CGTACCCG | 15452 |
| 1826 | GGUACGAU A CCACACGG | 6704 | CCGTGTGG GGCTAGCTACAACGA ATCGTACC | 15453 |
| 1823 | ACGAUACC A CACGGCCG | 6705 | CGGCCGTG GGCTAGCTACAACGA GGTATCGT | 15454 |
| 1821 | GAUACCAC A CGGCCGCG | 6706 | CGCGGCCG GGCTAGCTACAACGA GTGGTATC | 15455 |
| 1818 | ACCACACG G CCGCGGUG | 6707 | CACCGCGG GGCTAGCTACAACGA CGTGTGGT | 15456 |
| 1815 | ACACGGCC G CGGUGCGU | 6708 | ACGCACCG GGCTAGCTACAACGA GGCCGTGT | 15457 |
| 1812 | CGGCCGCG G UGCGUAGU | 6709 | ACTACGCA GGCTAGCTACAACGA CGCGGCCG | 15458 |
| 1810 | GCCGCGGU G CGUAGUGC | 6710 | GCACTACG GGCTAGCTACAACGA ACCGCGGC | 15459 |
| 1808 | CGCGGUGC G UAGUGCCA | 6711 | TGGCACTA GGCTAGCTACAACGA GCACCGCG | 15460 |
| 1805 | GGUGCGUA G UGCCAGCA | 6712 | TGCTGGCA GGCTAGCTACAACGA TACGCACC | 15461 |
| 1803 | UGCGUAGU G CCAGCAAU | 6713 | ATTGCTGG GGCTAGCTACAACGA ACTACGCA | 15462 |
| 1799 | UAGUGCCA G CAAUAGGG | 6714 | CCCTATTG GGCTAGCTACAACGA TGGCACTA | 15463 |
| 1796 | UGCCAGCA A UAGGGCCU | 6715 | AGGCCCTA GGCTAGCTACAACGA TGCTGGCA | 15464 |
| 1791 | GCAAUAGG G CCUCUGGU | 6716 | ACCAGAGG GGCTAGCTACAACGA CCTATTGC | 15465 |
| 1784 | GGCCUCUG G UCCGAGUU | 6717 | AACTCGGA GGCTAGCTACAACGA CAGAGGCC | 15466 |
| 1778 | UGGUCCGA G UUGUGGCC | 6718 | GGCCACAA GGCTAGCTACAACGA TCGGACCA | 15467 |
| 1775 | UCCGAGUU G UGGCCCUC | 6719 | GAGGGCCA GGCTAGCTACAACGA AACTCGGA | 15468 |
| 1772 | GAGUUGUG G CCCUCGGU | 6720 | ACCGAGGG GGCTAGCTACAACGA CACAACTC | 15469 |
| 1765 | GGCCCUCG G UGUAGGUG | 6721 | CACCTACA GGCTAGCTACAACGA CGAGGGCC | 15470 |
| 1763 | CCCUCGGU G UAGGUGAU | 6722 | ATCACCTA GGCTAGCTACAACGA ACCGAGGG | 15471 |
| 1759 | CGGUGUAG G UGAUAGGA | 6723 | TCCTATCA GGCTAGCTACAACGA CTACACCG | 15472 |
| 1756 | UGUAGGUG A UAGGACCC | 6724 | GGGTCCTA GGCTAGCTACAACGA CACCTACA | 15473 |
| 1751 | GUGAUAGG A CCCCACCC | 6725 | GGGTGGGG GGCTAGCTACAACGA CCTATCAC | 15474 |
| 1746 | AGGACCCC A CCCCUGAG | 6726 | CTCAGGGG GGCTAGCTACAACGA GGGGTCCT | 15475 |
| 1738 | ACCCCUGA G CGAACUUG | 6727 | CAAGTTCG GGCTAGCTACAACGA TCAGGGGT | 15476 |
| 1734 | CUGAGCGA A CUUGUCAA | 6728 | TTGACAAG GGCTAGCTACAACGA TCGCTCAG | 15477 |
| 1730 | GCGAACUU G UCAAUGGA | 6729 | TCCATTGA GGCTAGCTACAACGA AAGTTCGC | 15478 |
| 1726 | ACUUGUCA A UGGAGCGG | 6730 | CCGCTCCA GGCTAGCTACAACGA TGACAAGT | 15479 |
| 1721 | UCAAUGGA G CGGCAGCU | 6731 | AGCTGCCG GGCTAGCTACAACGA TCCATTGA | 15480 |
| 1718 | AUGGAGCG G CAGCUGGC | 6732 | GCCAGCTG GGCTAGCTACAACGA CGCTCCAT | 15481 |
| 1715 | GAGCGGCA G CUGGCCAA | 6733 | TTGGCCAG GGCTAGCTACAACGA TGCCGCTC | 15482 |
| 1711 | GGCAGCUG G CCAAGCGC | 6734 | GCGCTTGG GGCTAGCTACAACGA CAGCTGCC | 15483 |
| 1706 | CUGGCCAA G CGCUGUGG | 6735 | CCACAGCG GGCTAGCTACAACGA TTGGCCAG | 15484 |
| 1704 | GGCCAAGC G CUGUGGGC | 6736 | GCCCACAG GGCTAGCTACAACGA GCTTGGCC | 15485 |
| 1701 | CAAGCGCU G UGGGCAUC | 6737 | GATGCCCA GGCTAGCTACAACGA AGCGCTTG | 15486 |
| 1697 | CGCUGUGG G CAUCCGGA | 6738 | TCCGGATG GGCTAGCTACAACGA CCACAGCG | 15487 |
| 1695 | CUGUGGGC A UCCGGACG | 6739 | CGTCCGGA GGCTAGCTACAACGA GCCCACAG | 15488 |
| 1689 | GCAUCCGG A CGAGUUGA | 6740 | TCAACTCG GGCTAGCTACAACGA CCGGATGC | 15489 |
| 1685 | CCGGACGA G UUGAACCU | 6741 | AGGTTCAA GGCTAGCTACAACGA TCGTCCGG | 15490 |
| 1680 | CGAGUUGA A CCUGUGUG | 6742 | CACACAGG GGCTAGCTACAACGA TCAACTCG | 15491 |
| 1676 | UUGAACCU G UGUGCAUA | 6743 | TATGCACA GGCTAGCTACAACGA AGGTTCAA | 15492 |
| 1674 | GAACCUGU G UGCAUAGA | 6744 | TCTATGCA GGCTAGCTACAACGA ACAGGTTC | 15493 |
| 1672 | ACCUGUGU G CAUAGAAC | 6745 | GTTCTATG GGCTAGCTACAACGA ACACAGGT | 15494 |
| 1670 | CUGUGUGC A UAGAACAG | 6746 | CTGTTCTA GGCTAGCTACAACGA GCACACAG | 15495 |
| 1665 | UGCAUAGA A CAGUGCAG | 6747 | CTGCACTG GGCTAGCTACAACGA TCTATGCA | 15496 |
| 1662 | AUAGAACA G UGCAGCAA | 6748 | TTGCTGCA GGCTAGCTACAACGA TGTTCTAT | 15497 |
| 1660 | AGAACAGU G CAGCAAUG | 6749 | CATTGCTG GGCTAGCTACAACGA ACTGTTCT | 15498 |
| 1657 | ACAGUGCA G CAAUGAAC | 6750 | GTTCATTG GGCTAGCTACAACGA TGCACTGT | 15499 |
| 1654 | GUGCAGCA A UGAACCCG | 6751 | CGGGTTCA GGCTAGCTACAACGA TGCTGCAC | 15500 |
| 1650 | AGCAAUGA A CCCGGUUU | 6752 | AAACCGGG GGCTAGCTACAACGA TCATTGCT | 15501 |
| 1645 | UGAACCCG G UUUGGAGG | 6753 | CCTCCAAA GGCTAGCTACAACGA CGGGTTCA | 15502 |
| 1634 | UGGAGGGA G UCAUUGCA | 6754 | TGCAATGA GGCTAGCTACAACGA TCCCTCCA | 15503 |
| 1631 | AGGGAGUC A UUGCAGUU | 6755 | AACTGCAA GGCTAGCTACAACGA GACTCCCT | 15504 |
| 1628 | GAGUCAUU G CAGUUCAG | 6756 | CTGAACTG GGCTAGCTACAACGA AATGACTC | 15505 |
| 1625 | UCAUUGCA G UUCAGGGC | 6757 | GCCCTGAA GGCTAGCTACAACGA TGCAATGA | 15506 |
| 1618 | AGUUCAGG G CAGUCCUG | 6758 | CAGGACTG GGCTAGCTACAACGA CCTGAACT | 15507 |
| 1615 | UCAGGGCA G UCCUGUUA | 6759 | TAACAGGA GGCTAGCTACAACGA TGCCCTGA | 15508 |
| 1610 | GCAGUCCU G UUAAUGUG | 6760 | CACATTAA GGCTAGCTACAACGA AGGACTGC | 15509 |
| 1606 | UCCUGUUA A UGUGCCAG | 6761 | CTGGCACA GGCTAGCTACAACGA TAACAGGA | 15510 |
| 1604 | CUGUUAAU G UGCCAGCU | 6762 | AGCTGGCA GGCTAGCTACAACGA ATTAACAG | 15511 |
| 1602 | GUUAAUGU G CCAGCUGC | 6763 | GCAGCTGG GGCTAGCTACAACGA ACATTAAC | 15512 |
| 1598 | AUGUGCCA G CUGCCGUU | 6764 | AACGGCAG GGCTAGCTACAACGA TGGCACAT | 15513 |
| 1595 | UGCCAGCU G CCGUUGGU | 6765 | ACCAACGG GGCTAGCTACAACGA AGCTGGCA | 15514 |
| 1592 | CAGCUGCC G UUGGUGUU | 6766 | AACACCAA GGCTAGCTACAACGA GGCAGCTG | 15515 |
| 1588 | UGCCGUUG G UGUUAAUA | 6767 | TATTAACA GGCTAGCTACAACGA CAACGGCA | 15516 |
| 1586 | CCGUUGGU G UUAAUAAG | 6768 | CTTATTAA GGCTAGCTACAACGA ACCAACGG | 15517 |
| 1582 | UGGUGUUA A UAAGCUGG | 6769 | CCAGCTTA GGCTAGCTACAACGA TAACACCA | 15518 |
| 1578 | GUUAAUAA G CUGGAUAU | 6770 | ATATCCAG GGCTAGCTACAACGA TTATTAAC | 15519 |
| 1573 | UAAGCUGG A UAUUCUGA | 6771 | TCAGAATA GGCTAGCTACAACGA CCAGCTTA | 15520 |
| 1571 | AGCUGGAU A UUCUGAGA | 6772 | TCTCAGAA GGCTAGCTACAACGA ATCCAGCT | 15521 |
| 1563 | AUUCUGAG A UGCUCCAG | 6773 | CTGGAGCA GGCTAGCTACAACGA CTCAGAAT | 15522 |
| 1561 | UCUGAGAU G CUCCAGAU | 6774 | ATCTGGAG GGCTAGCTACAACGA ATCTCAGA | 15523 |
| 1554 | UGCUCCAG A UGUAAAGA | 6775 | TCTTTACA GGCTAGCTACAACGA CTGGAGCA | 15524 |
| 1552 | CUCCAGAU G UAAAGAGG | 6776 | CCTCTTTA GGCTAGCTACAACGA ATCTGGAG | 15525 |
| 1542 | AAAGAGGG A UGCCACCC | 6777 | GGGTGGCA GGCTAGCTACAACGA CCCTCTTT | 15526 |
| 1540 | ACACCCAU G GGAGGGUA | 6778 | TAGGGTGG GGCTAGCTACAACGA ATCCCTCT | 15527 |
| 1537 | GGGAUGCC A CCCUACUA | 6779 | TAGTAGGG GGCTAGCTACAACGA GGCATCCC | 15528 |
| 1532 | GCCACCCU A CUAGUGGU | 6780 | ACCACTAG GGCTAGCTACAACGA AGGGTGGC | 15529 |
| 1528 | CCCUACUA G UGGUGUGG | 6781 | CCACACCA GGCTAGCTACAACGA TAGTAGGG | 15530 |
| 1525 | UACUAGUG G UGUGGCCC | 6782 | GGGCCACA GGCTAGCTACAACGA CACTAGTA | 15531 |
| 1523 | CUAGUGGU G UGGCCCUG | 6783 | CAGGGCCA GGCTAGCTACAACGA ACCACTAG | 15532 |
| 1520 | GUGGUGUG G CCCUGCGC | 6784 | GCGCAGGG GGCTAGCTACAACGA CACACCAC | 15533 |
| 1515 | GUGGCCCU G CGCCCCCC | 6785 | GGGGGGCG GGCTAGCTACAACGA AGGGCCAC | 15534 |
| 1513 | GGCCCUGC G CCCCCCCU | 6786 | AGGGGGGG GGCTAGCTACAACGA GCAGGGCC | 15535 |
| 1504 | CCCCCCCU G UCGUGUAG | 6787 | CTACACGA GGCTAGCTACAACGA AGGGGGGG | 15536 |
| 1501 | CCCCUGUC G UGUAGGUG | 6788 | CACCTACA GGCTAGCTACAACGA GACAGGGG | 15537 |
| 1499 | CCUGUCGU G UAGGUGUC | 6789 | GACACCTA GGCTAGCTACAACGA ACGACAGG | 15538 |
| 1495 | UCGUGUAG G UGUCCCCG | 6790 | CGGGGACA GGCTAGCTACAACGA CTACACGA | 15539 |
| 1493 | GUGUAGGU G UCCCCGUC | 6791 | GACGGGGA GGCTAGCTACAACGA ACCTACAC | 15540 |
| 1487 | GUGUCCCC G UCAACGCC | 6792 | GGCGTTGA GGCTAGCTACAACGA GGGGACAC | 15541 |
| 1483 | CCCCGUCA A CGCCGGCA | 6793 | TGCCGGCG GGCTAGCTACAACGA TGACGGGG | 15542 |
| 1481 | CCGUCAAC G CCGGCAAA | 6794 | TTTGCCGG GGCTAGCTACAACGA GTTGACGG | 15543 |
| 1477 | CAACGCCG G CAAAGAGU | 6795 | ACTCTTTG GGCTAGCTACAACGA CGGCGTTG | 15544 |
| 1470 | GGCAAAGA G UAGCAUCA | 6796 | TGATGCTA GGCTAGCTACAACGA TCTTTGCC | 15545 |
| 1467 | AAAGAGUA G CAUCACAA | 6797 | TTGTGATG GGCTAGCTACAACGA TACTCTTT | 15546 |
| 1465 | AGAGUAGC A UCACAAUG | 6798 | GATTGTGA GGCTAGCTACAACGA GCTACTCT | 15547 |
| 1462 | GUAGCAUC A CAAUCAAC | 6799 | GTTGATTG GGCTAGCTACAACGA GATGCTAC | 15548 |
| 1459 | GCAUCACA A UCAACACC | 6800 | GGTGTTGA GGCTAGCTACAACGA TGTGATGC | 15549 |
| 1455 | CACAAUCA A CACCUUAG | 6801 | CTAAGGTG GGCTAGCTACAACGA TGATTGTG | 15550 |
| 1453 | CAAUCAAC A CCUUAGCC | 6802 | GGCTAAGG GGCTAGCTACAACGA GTTGATTG | 15551 |
| 1447 | ACACCUUA G CCCAGUUC | 6803 | GAACTGGG GGCTAGCTACAACGA TAAGGTGT | 15552 |
| 1442 | UUAGCCCA G UUCCCCAC | 6804 | GTGGGGAA GGCTAGCTACAACGA TGGGCTAA | 15553 |
| 1435 | AGUUCCCC A CCAUGGAA | 6805 | TTCCATGG GGCTAGCTACAACGA GGGGAACT | 15554 |
| 1432 | UCCCCACC A UGGAAUAA | 6806 | TTATTCCA GGCTAGCTACAACGA GGTGGGGA | 15555 |
| 1427 | ACCAUGGA A UAAUAGGC | 6807 | GCCTATTA GGCTAGCTACAACGA TCCATGGT | 15556 |
| 1424 | AUGGAAUA A UAGGCAAG | 6808 | CTTGCCTA GGCTAGCTACAACGA TATTCCAT | 15557 |
| 1420 | AAUAAUAG G CAAGGCCC | 6809 | GGGCCTTG GGCTAGCTACAACGA CTATTATT | 15558 |
| 1415 | UAGGCAAG G CCCGCCAG | 6810 | CTGGCGGG GGCTAGCTACAACGA CTTGCCTA | 15559 |
| 1411 | CAAGGCCC G CCAGGACU | 6811 | AGTCCTGG GGCTAGCTACAACGA GGGCCTTG | 15560 |
| 1405 | CCGCCAGG A CUCCCCAG | 6812 | CTGGGGAG GGCTAGCTACAACGA CCTGGCGG | 15561 |
| 1397 | ACUCCCCA G UGGGCCCC | 6813 | GGGGCCCA GGCTAGCTACAACGA TGGGGAGT | 15562 |
| 1393 | CCCAGUGG G CCCCCGCC | 6814 | GGCGGGGG GGCTAGCTACAACGA CCACTGGG | 15563 |
| 1387 | GGGCCCCC G CCACCAUG | 6815 | CATGGTGG GGCTAGCTACAACGA GGGGGCCC | 15564 |
| 1384 | CCCCCGCC A CCAUGUCC | 6816 | GGACATGG GGCTAGCTACAACGA GGCGGGGG | 15565 |
| 1381 | CCGCCACC A UGUCCACG | 6817 | CGTGGACA GGCTAGCTACAACGA GGTGGCGG | 15566 |
| 1379 | GCCACCAU G UCCACGAC | 6818 | GTCGTGGA GGCTAGCTACAACGA ATGGTGGC | 15567 |
| 1375 | CCAUGUCC A CGACGGCU | 6819 | AGCCGTCG GGCTAGCTACAACGA GGACATGG | 15568 |
| 1372 | UGUCCACG A CGGCUUGU | 6820 | ACAAGCCG GGCTAGCTACAACGA CGTGGACA | 15569 |
| 1369 | CCACGACG G CUUGUGGG | 6821 | CCCACAAG GGCTAGCTACAACGA CGTCGTGG | 15570 |
| 1365 | GACGGCUU G UGGGAUCC | 6822 | GGATCCCA GGCTAGCTACAACGA AAGCCGTC | 15571 |
| 1360 | CUUGUGGG A UCCGGAGC | 6823 | GCTCCGGA GGCTAGCTACAACGA CCCACAAG | 15572 |
| 1353 | GAUCCGGA G CAACUGCG | 6824 | CGCAGTTG GGCTAGCTACAACGA TCCGGATC | 15573 |
| 1350 | CCGGAGCA A CUGCGAUA | 6825 | TATCGCAG GGCTAGCTACAACGA TGCTCCGG | 15574 |
| 1347 | GAGCAACU G CGAUACCA | 6826 | TGGTATCG GGCTAGCTACAACGA AGTTGCTC | 15575 |
| 1344 | CAACUGCG A UACCACUA | 6827 | TAGTGGTA GGCTAGCTACAACGA CGCAGTTG | 15576 |
| 1342 | ACUGCGAU A CCACUAGG | 6828 | CCTAGTGG GGCTAGCTACAACGA ATCGCAGT | 15577 |
| 1339 | GCGAUACC A CUAGGGCU | 6829 | AGCCCTAG GGCTAGCTACAACGA GGTATCGC | 15578 |
| 1333 | CCACUAGG G CUGUUGUA | 6830 | TACAACAG GGCTAGCTACAACGA CCTAGTGG | 15579 |
| 1330 | CUAGGGCU G UUGUAGGU | 6831 | ACCTACAA GGCTAGCTACAACGA AGCCCTAG | 15580 |
| 1327 | GGGCUGUU G UAGGUGAC | 6832 | GTCACCTA GGCTAGCTACAACGA AACAGCCC | 15581 |
| 1323 | UGUUGUAG G UGACCAAU | 6833 | ATTGGTCA GGCTAGCTACAACGA CTACAACA | 15582 |
| 1320 | UGUAGGUG A CCAAUUCA | 6834 | TCAATTGG GGCTAGCTACAACGA CACCTACA | 15583 |
| 1316 | GGUGACCA A UUCAUCAU | 6835 | ATGATGAA GGCTAGCTACAACGA TGGTCACC | 15584 |
| 1312 | ACCAAUUC A UCAUCAUA | 6836 | TATGATGA GGCTAGCTACAACGA GAATTGGT | 15585 |
| 1309 | AAUUCAUC A UCAUAUCC | 6837 | GGATATGA GGCTAGCTACAACGA GATGAATT | 15586 |
| 1306 | UCAUCAUC A UAUCCCAA | 6838 | TTGGGATA GGCTAGCTACAACGA GATGATGA | 15587 |
| 1304 | AUCAUCAU A UCCCAAGC | 6839 | GCTTGGGA GGCTAGCTACAACGA ATGATGAT | 15588 |
| 1297 | UAUCCCAA G CCAUGCGA | 6840 | TCGCATGG GGCTAGCTACAACGA TTGGGATA | 15589 |
| 1294 | CCCAAGCC A UGCGAUGG | 6841 | CCATCGCA GGCTAGCTACAACGA GGCTTGGG | 15590 |
| 1292 | CAAGCCAU G CGAUGGCC | 6842 | GGCCATCG GGCTAGCTACAACGA ATGGCTTG | 15591 |
| 1289 | GCCAUGCG A UGGCCUGA | 6843 | TCAGGCCA GGCTAGCTACAACGA CGCATGGC | 15592 |
| 1286 | AUGCGAUG G CCUGAUAC | 6844 | GTATCAGG GGCTAGCTACAACGA CATCGCAT | 15593 |
| 1281 | AUGGCCUG A UACGUGGC | 6845 | GCCACGTA GGCTAGCTACAACGA CAGGCCAT | 15594 |
| 1279 | GGCCUGAU A CGUGGCCG | 6846 | CGGCCACG GGCTAGCTACAACGA ATCAGGCC | 15595 |
| 1277 | CCUGAUAC G UGGCCGGG | 6847 | CCCGGCCA GGCTAGCTACAACGA GTATCAGG | 15596 |
| 1274 | GAUACGUG G CCGGGAUA | 6848 | TATCCCGG GGCTAGCTACAACGA CACGTATC | 15597 |
| 1268 | UGGCCGGG A UAGAUCGA | 6849 | TCGATCTA GGCTAGCTACAACGA CCCGGCCA | 15598 |
| 1264 | CGGGAUAG A UCGAGCAA | 6850 | TTGCTCGA GGCTAGCTACAACGA CTATCCCG | 15599 |
| 1259 | UAGAUCGA G CAAUUACA | 6851 | TGTAATTG GGCTAGCTACAACGA TCGATCTA | 15600 |
| 1256 | AUCGAGCA A UUACAGUC | 6852 | GACTGTAA GGCTAGCTACAACGA TGCTCGAT | 15601 |
| 1253 | GAGCAAUU A CAGUCCUG | 6853 | CAGGACTG GGCTAGCTACAACGA AATTGCTC | 15602 |
| 1250 | CAAUUACA G UCCUGUAC | 6854 | GTACAGGA GGCTAGCTACAACGA TGTAATTG | 15603 |
| 1245 | ACAGUCCU G UACUGUCU | 6855 | AGACAGTA GGCTAGCTACAACGA AGGACTGT | 15604 |
| 1243 | AGUCCUGU A CUGUCUCA | 6856 | TGAGACAG GGCTAGCTACAACGA ACAGGACT | 15605 |
| 1240 | CCUGUACU G UCUCAUAC | 6857 | GTATGAGA GGCTAGCTACAACGA AGTACAGG | 15606 |
| 1235 | ACUGUCUC A UACCGGCG | 6858 | CGCCGGTA GGCTAGCTACAACGA GAGACAGT | 15607 |
| 1233 | UGUCUCAU A CCGGCGAG | 6859 | CTCGCCGG GGCTAGCTACAACGA ATGAGACA | 15608 |
| 1229 | UCAUACCG G CGAGGCGA | 6860 | TCGCCTCG GGCTAGCTACAACGA CGGTATGA | 15609 |
| 1224 | CCGGCGAG G CGAGAAGG | 6861 | CCTTCTCG GGCTAGCTACAACGA CTCGCCGG | 15610 |
| 1216 | GCGAGAAG G UGAACAGC | 6862 | GCTGTTCA GGCTAGCTACAACGA CTTCTCGC | 15611 |
| 1212 | GAAGGUGA A CAGCUGAG | 6863 | CTCAGCTG GGCTAGCTACAACGA TCACCTTC | 15612 |
| 1209 | GGUGAACA G CUGAGAGA | 6864 | TCTCTCAG GGCTAGCTACAACGA TGTTCACC | 15613 |
| 1201 | GCUGAGAG A CGAGGAAG | 6865 | CTTCCTCG GGCTAGCTACAACGA CTCTCAGC | 15614 |
| 1192 | CGAGGAAG A CAGAUCCG | 6866 | CGGATCTG GGCTAGCTACAACGA CTTCCTCG | 15615 |
| 1188 | GAAGACAG A UCCGCAGA | 6867 | TCTGCGGA GGCTAGCTACAACGA CTGTCTTC | 15616 |
| 1184 | ACAGAUCC G CAGAGAUC | 6868 | GATCTCTG GGCTAGCTACAACGA GGATCTGT | 15617 |
| 1178 | CCGCAGAG A UCCCCCAC | 6869 | GTGGGGGA GGCTAGCTACAACGA CTCTGCGG | 15618 |
| 1171 | GAUCCCCC A CGUACAUA | 6870 | TATGTACC GGCTAGCTACAACGA GGGGGATC | 15619 |
| 1169 | UCCCCCAC G UACAUAGC | 6871 | GCTATGTA GGCTAGCTACAACGA GTGGGGGA | 15620 |
| 1167 | CCCCACGU A CAUAGCAG | 6872 | CTGCTATG GGCTAGCTACAACGA ACGTGGGG | 15621 |
| 1165 | CCACGUAC A UAGCAGAG | 6873 | CTCTGCTA GGCTAGCTACAACGA GTACGTGG | 15622 |
| 1162 | CGUACAUA G CAGAGCAG | 6874 | CTGCTCTG GGCTAGCTACAACGA TATGTACG | 15623 |
| 1157 | AUAGCAGA G CAGAAAGC | 6875 | GCTTTCTG GGCTAGCTACAACGA TCTGCTAT | 15624 |
| 1150 | AGCAGAAA G CAGCCGCC | 6876 | GGCGGCTG GGCTAGCTACAACGA TTTCTGCT | 15625 |
| 1147 | AGAAAGCA G CCGCCCCA | 6877 | TGGGGCGG GGCTAGCTACAACGA TGCTTTCT | 15626 |
| 1144 | AAGCAGCC G CCCCAACG | 6878 | CGTTGGGG GGCTAGCTACAACGA GGCTGCTT | 15627 |
| 1138 | CCGCCCCA A CGAGCAAA | 6879 | TTTGCTCG GGCTAGCTACAACGA TGGGGCGG | 15628 |
| 1134 | CCCAACGA G CAAAUCGA | 6880 | TCGATTTG GGCTAGCTACAACGA TCGTTGGG | 15629 |
| 1130 | ACGAGCAA A UCGACGUG | 6881 | CACGTCGA GGCTAGCTACAACGA TTGCTCGT | 15630 |
| 1126 | GCAAAUCG A CGUGACGC | 6882 | GCGTCACG GGCTAGCTACAACGA CGATTTGC | 15631 |
| 1124 | AAAUCGAC G UGACGCCG | 6883 | CGGCGTCA GGCTAGCTACAACGA GTCGATTT | 15632 |
| 1121 | UCGACGUG A CGCCGUAU | 6884 | ATACGGCG GGCTAGCTACAACGA CACGTCGA | 15633 |
| 1119 | GACGUGAC G CCGUAUCG | 6885 | CGATACGG GGCTAGCTACAACGA GTCACGTC | 15634 |
| 1116 | GUGACGCC G UAUCGUCG | 6886 | CGACGATA GGCTAGCTACAACGA GGCGTCAC | 15635 |
| 1114 | GACGCCGU A UCGUCGUA | 6887 | TACGACGA GGCTAGCTACAACGA ACGGCGTC | 15636 |
| 1111 | GCCGUAUC G UCGUAGUG | 6888 | CACTACGA GGCTAGCTACAACGA GATACGGC | 15637 |
| 1108 | GUAUCGUC G UAGUGGGG | 6889 | CCCCACTA GGCTAGCTACAACGA GACGATAC | 15638 |
| 1105 | UCGUCGUA G UGGGGAUG | 6890 | CATCCCCA GGCTAGCTACAACGA TACGACGA | 15639 |
| 1099 | UAGUGGGG A UGCUGGCA | 6891 | TGCCAGCA GGCTAGCTACAACGA CCCCACTA | 15640 |
| 1097 | GUGGGGAU G CUGGCAUU | 6892 | AATGCCAG GGCTAGCTACAACGA ATCCCCAC | 15641 |
| 1093 | GGAUGCUG G CAUUCCUG | 6893 | CAGGAATG GGCTAGCTACAACGA CAGCATCC | 15642 |
| 1091 | AUGCUGGC A UUCCUGGC | 6894 | GCCAGGAA GGCTAGCTACAACGA GCCAGCAT | 15643 |
| 1084 | CAUUCCUG G CCGCGAGC | 6895 | GCTCGCGG GGCTAGCTACAACGA CAGGAATG | 15644 |
| 1081 | UCCUGGCC G CGAGCGUG | 6896 | CACGCTCG GGCTAGCTACAACGA GGCCAGGA | 15645 |
| 1077 | GGCCGCGA G CGUGGGAG | 6897 | CTCCCACG GGCTAGCTACAACGA TCGCGGCC | 15646 |
| 1075 | CCGCGAGC G UGGGAGUG | 6898 | CACTCCCA GGCTAGCTACAACGA GCTCGCGG | 15647 |
| 1069 | GCGUGGGA G UGAGCGCU | 6899 | AGCGCTCA GGCTAGCTACAACGA TCCCACGC | 15648 |
| 1065 | GGGAGUGA G CGCUACCC | 6900 | GGGTAGCG GGCTAGCTACAACGA TCACTCCC | 15649 |
| 1063 | GAGUGAGC G CUACCCAG | 6901 | CTGGGTAG GGCTAGCTACAACGA GCTCACTC | 15650 |
| 1060 | UGAGCGCU A CCCAGCAG | 6902 | CTGCTGGG GGCTAGCTACAACGA AGCGCTCA | 15651 |
| 1055 | GCUACCCA G CAGCGGGA | 6903 | TCCCGCTG GGCTAGCTACAACGA TGGGTAGC | 15652 |
| 1052 | ACCCAGCA G CGGGAGGA | 6904 | TCCTCCCG GGCTAGCTACAACGA TGCTGGGT | 15653 |
| 1043 | CGGGAGGA G UUGUUCUC | 6905 | GAGAACAA GGCTAGCTACAACGA TCCTCCCG | 15654 |
| 1040 | GAGGAGUU G UUCUCCCG | 6906 | CGGGAGAA GGCTAGCTACAACGA AACTCCTC | 15655 |
| 1030 | UCUCCCGA A CGCAGGGC | 6907 | GCCCTGCG GGCTAGCTACAACGA TCGGGAGA | 15656 |
| 1028 | UCCCGAAC G CAGGGCAC | 6908 | GTGCCCTG GGCTAGCTACAACGA GTTCGGGA | 15657 |
| 1023 | AACGCAGG G CACGCACC | 6909 | GGTGCGTG GGCTAGCTACAACGA CCTGCGTT | 15658 |
| 1021 | CGCAGGGC A CGCACCCC | 6910 | GGGGTGCG GGCTAGCTACAACGA GCCCTGCG | 15659 |
| 1019 | CAGGGCAC G CACCCCGG | 6911 | CCGGGGTG GGCTAGCTACAACGA GTGCCCTG | 15660 |
| 1017 | GGGCACGC A CCCCGGGG | 6912 | CCCCGGGG GGCTAGCTACAACGA GCGTGCCC | 15661 |
| 1009 | ACCCCGGG G UGUGCAUG | 6913 | CATGCACA GGCTAGCTACAACGA CCCGGGGT | 15662 |
| 1007 | CCCGGGGU G UGCAUGAU | 6914 | ATCATGCA GGCTAGCTACAACGA ACCCCGGG | 15663 |
| 1005 | CGGGGUGU G CAUGAUCA | 6915 | TGATCATG GGCTAGCTACAACGA ACACCCCG | 15664 |
| 1003 | GGGUGUGC A UGAUCAUG | 6916 | CATGATCA GGCTAGCTACAACGA GCACACCC | 15665 |
| 1000 | UGUGCAUG A UCAUGUCC | 6917 | GGACATGA GGCTAGCTACAACGA CATGCACA | 15666 |
| 997 | GCAUGAUC A UGUCCUCU | 6918 | AGAGGACA GGCTAGCTACAACGA GATCATGC | 15667 |
| 995 | AUGAUCAU G UCCUCUGC | 6919 | GCAGAGGA GGCTAGCTACAACGA ATGATCAT | 15668 |
| 988 | UGUCCUCU G CCUCAUAC | 6920 | GTATGAGG GGCTAGCTACAACGA AGAGGACA | 15669 |
| 983 | UCUGCCUC A UACACAAU | 6921 | ATTGTGTA GGCTAGCTACAACGA GAGGCAGA | 15670 |
| 981 | UGCCUCAU A CACAAUGC | 6922 | GCATTGTG GGCTAGCTACAACGA ATGAGGCA | 15671 |
| 979 | CCUCAUAC A CAAUGCUU | 6923 | AAGCATTG GGCTAGCTACAACGA GTATGAGG | 15672 |
| 976 | CAUACACA A UGCUUGAG | 6924 | CTCAAGCA GGCTAGCTACAACGA TGTGTATG | 15673 |
| 974 | UACACAAU G CUUGAGUU | 6925 | AACTCAAG GGCTAGCTACAACGA ATTGTGTA | 15674 |
| 968 | AUGCUUGA G UUGGAGCA | 6926 | TGCTCCAA GGCTAGCTACAACGA TCAAGCAT | 15675 |
| 962 | GAGUUGGA G CAAUCGUU | 6927 | AACGATTG GGCTAGCTACAACGA TCCAACTC | 15676 |
| 959 | UUGGAGCA A UCGUUCGU | 6928 | ACGAACGA GGCTAGCTACAACGA TGCTCCAA | 15677 |
| 956 | GAGCAAUC G UUCGUGAC | 6929 | GTCACGAA GGCTAGCTACAACGA GATTGCTC | 15678 |
| 952 | AAUCGUUC G UGACAUGG | 6930 | CCATGTCA GGCTAGCTACAACGA GAACGATT | 15679 |
| 949 | CGUUCGUG A CAUGGUAC | 6931 | GTACCATG GGCTAGCTACAACGA CACGAACG | 15680 |
| 947 | UUCGUGAC A UGGUACAG | 6932 | CTGTACCA GGCTAGCTACAACGA GTCACGAA | 15681 |
| 944 | GUGACAUG G UACAGCCC | 6933 | GGGCTGTA GGCTAGCTACAACGA CATGTCAC | 15682 |
| 942 | GACAUGGU A CAGCCCGG | 6934 | CCGGGCTG GGCTAGCTACAACGA ACCATGTC | 15683 |
| 939 | AUGGUACA G CCCGGACG | 6935 | CGTCCGGG GGCTAGCTACAACGA TGTACCAT | 15684 |
| 933 | CAGCCCGG A CGCGUUGC | 6936 | GCAACGCG GGCTAGCTACAACGA CCGGGCTG | 15685 |
| 931 | GCCCGGAC G CGUUGCAC | 6937 | GTGCAACG GGCTAGCTACAACGA GTCCGGGC | 15686 |
| 929 | CCGGACGC G UUGCACAC | 6938 | GTGTGCAA GGCTAGCTACAACGA GCGTCCGG | 15687 |
| 926 | GACGCGUU G CACACCUC | 6939 | GAGGTGTG GGCTAGCTACAACGA AACGCGTC | 15688 |
| 924 | CGCGUUGC A CACCUCAU | 6940 | ATGAGGTG GGCTAGCTACAACGA GCAACGCG | 15689 |
| 922 | CGUUGCAC A CCUCAUAA | 6941 | TTATGAGG GGCTAGCTACAACGA GTGCAACG | 15690 |
| 917 | CACACCUC A UAAGCGGA | 6942 | TCCGCTTA GGCTAGCTACAACGA GAGGTGTG | 15691 |
| 913 | CCUCAUAA G CGGAGGCU | 6943 | AGCCTCCG GGCTAGCTACAACGA TTATGAGG | 15692 |
| 907 | AAGCGGAG G CUGGGAUG | 6944 | CATCCCAG GGCTAGCTACAACGA CTCCGCTT | 15693 |
| 901 | AGGCUGGG A UGGUCAGA | 6945 | TCTGACCA GGCTAGCTACAACGA CCCAGCCT | 15694 |
| 898 | CUGGGAUG G UCAGACAG | 6946 | CTGTCTGA GGCTAGCTACAACGA CATCCCAG | 15695 |
| 893 | AUGGUCAG A CAGGGCAG | 6947 | CTGCCCTG GGCTAGCTACAACGA CTGACCAT | 15696 |
| 888 | CAGACAGG G CAGCAGAG | 6948 | CTCTGCTG GGCTAGCTACAACGA CCTGTCTG | 15697 |
| 885 | ACAGGGCA G CAGAGCCA | 6949 | TGGCTCTG GGCTAGCTACAACGA TGCCCTGT | 15698 |
| 880 | GCAGCAGA G CCAAGAGG | 6950 | CCTCTTGG GGCTAGCTACAACGA TCTGCTGC | 15699 |
| 868 | AGAGGAAG A UAGAGAAA | 6951 | TTTCTCTA GGCTAGCTACAACGA CTTCCTCT | 15700 |
| 857 | GAGAAAGA G CAACCGGG | 6952 | CCCGGTTG GGCTAGCTACAACGA TCTTTCTC | 15701 |
| 854 | AAAGAGCA A CCGGGCAG | 6953 | CTGCCCGG GGCTAGCTACAACGA TGCTCTTT | 15702 |
| 849 | GCAACCGG G CAGAUUCC | 6954 | GGAATCTG GGCTAGCTACAACGA CCGGTTGC | 15703 |
| 845 | CCGGGCAG A UUCCCUGU | 6955 | ACAGGGAA GGCTAGCTACAACGA CTGCCCGG | 15704 |
| 838 | GAUUCCCU G UUGCAUAG | 6956 | CTATGCAA GGCTAGCTACAACGA AGGGAATC | 15705 |
| 835 | UCCCUGUU G CAUAGUUC | 6957 | GAACTATG GGCTAGCTACAACGA AACAGGGA | 15706 |
| 833 | CCUGUUGC A UAGUUCAC | 6958 | GTGAACTA GGCTAGCTACAACGA GCAACAGG | 15707 |
| 830 | GUUGCAUA G UUCACGCC | 6959 | GGCGTGAA GGCTAGCTACAACGA TATGCAAC | 15708 |
| 826 | CAUAGUUC A CGCCGUCU | 6960 | AGACGGCG GGCTAGCTACAACGA GAACTATG | 15709 |
| 824 | UAGUUCAC G CCGUCUUC | 6961 | GAAGACGG GGCTAGCTACAACGA GTGAACTA | 15710 |
| 821 | UUCACGCC G UCUUCCAG | 6962 | CTGGAAGA GGCTAGCTACAACGA GGCGTGAA | 15711 |
| 811 | CUUCCAGA A CCCGGACG | 6963 | CGTCCGGG GGCTAGCTACAACGA TCTGGAAG | 15712 |
| 805 | GAACCCGG A CGCCAUGC | 6964 | GCATGGCG GGCTAGCTACAACGA CCGGGTTC | 15713 |
| 803 | ACCCGGAC G CCAUGCGC | 6965 | GCGCATGG GGCTAGCTACAACGA GTCCGGGT | 15714 |
| 800 | CGGACGCC A UGCGCCAG | 6966 | CTGGCGCA GGCTAGCTACAACGA GGCGTCCG | 15715 |
| 798 | GACGCCAU G CGCCAGGG | 6967 | CCCTGGCG GGCTAGCTACAACGA ATGGCGTC | 15716 |
| 796 | CGCCAUGC G CCAGGGCC | 6968 | GGCCCTGG GGCTAGCTACAACGA GCATGGCG | 15717 |
| 790 | GCGCCAGG G CCCUGGCA | 6969 | TGCCAGGG GGCTAGCTACAACGA CCTGGCGC | 15718 |
| 784 | GGGCCCUG G CAGUGCCU | 6970 | AGGCACTG GGCTAGCTACAACGA CAGGGCCC | 15719 |
| 781 | CCCUGGCA G UGCCUCCC | 6971 | GGGAGGCA GGCTAGCTACAACGA TGCCAGGG | 15720 |
| 779 | CUGGCAGU G CCUCCCAA | 6972 | TTGGGAGG GGCTAGCTACAACGA ACTGCCAG | 15721 |
| 766 | CCAAGGGG G CGCCGACG | 6973 | CGTCGGCG GGCTAGCTACAACGA CCCCTTGG | 15722 |
| 764 | AAGGGGGC G CCGACGAG | 6974 | CTCGTCGG GGCTAGCTACAACGA GCCCCCTT | 15723 |
| 760 | GGGCGCCG A CGAGCGGA | 6975 | TCCGCTCG GGCTAGCTACAACGA CGGCGCCC | 15724 |
| 756 | GCCGACGA G CGGAAUGU | 6976 | ACATTCCG GGCTAGCTACAACGA TCGTCGGC | 15725 |
| 751 | CGAGCGGA A UGUACCCC | 6977 | GGGGTACA GGCTAGCTACAACGA TCCGCTCG | 15726 |
| 749 | AGCGGAAU G UACCCCAU | 6978 | ATGGGGTA GGCTAGCTACAACGA ATTCCGCT | 15727 |
| 747 | CGGAAUGU A CCCCAUGA | 6979 | TCATGGGG GGCTAGCTACAACGA ACATTCCG | 15728 |
| 742 | UGUACCCC A UGAGGUCG | 6980 | CGACCTCA GGCTAGCTACAACGA GGGGTACA | 15729 |
| 737 | CCCAUGAG G UCGGCGAA | 6981 | TTCGCCGA GGCTAGCTACAACGA CTCATGGG | 15730 |
| 733 | UGAGGUCG G CGAAGCCG | 6982 | CGGCTTCG GGCTAGCTACAACGA CGACCTCA | 15731 |
| 728 | UCGGCGAA G CCGCAUGU | 6983 | ACATGCGG GGCTAGCTACAACGA TTCGCCGA | 15732 |
| 725 | GCGAAGCC G CAUGUGAG | 6984 | CTCACATG GGCTAGCTACAACGA GGCTTCGC | 15733 |
| 723 | GAAGCCGC A UGUGAGGG | 6985 | CCCTCACA GGCTAGCTACAACGA GCGGCTTC | 15734 |
| 721 | AGCCGCAU G UGAGGGUA | 6986 | TACCCTCA GGCTAGCTACAACGA ATGCGGCT | 15735 |
| 715 | AUGUGAGG G UAUCGAUG | 6987 | CATCGATA GGCTAGCTACAACGA CCTCACAT | 15736 |
| 713 | GUGAGGGU A UCGAUGAC | 6988 | GTCATCGA GGCTAGCTACAACGA ACCCTCAC | 15737 |
| 709 | GGGUAUCG A UGACCUUA | 6989 | TAAGGTCA GGCTAGCTACAACGA CGATACCC | 15738 |
| 706 | UAUCGAUG A CCUUACCC | 6990 | GGGTAAGG GGCTAGCTACAACGA CATCGATA | 15739 |
| 701 | AUGACCUU A CCCAAGUU | 6991 | AACTTGGG GGCTAGCTACAACGA AAGGTCAT | 15740 |
| 695 | UUACCCAA G UUACGCGA | 6992 | TCGCGTAA GGCTAGCTACAACGA TTGGGTAA | 15741 |
| 692 | CCCAACUU A CGCGACCU | 6993 | AGGTCGCG GGCTAGCTACAACGA AACTTGGG | 15742 |
| 690 | GAACUUAG G CGACCUAC | 6994 | GTAGGTCG GGCTAGCTACAACGA GTAACTTG | 15743 |
| 687 | GUUACGCG A CCUACGCC | 6995 | GGCGTAGG GGCTAGCTACAACGA CGCGTAAC | 15744 |
| 683 | CGCGACCU A CGCCGGGG | 6996 | CCCCGGCG GGCTAGCTACAACGA AGGTCGCG | 15745 |
| 681 | CGACCUAC G CCGGGGGU | 6997 | ACCCCCGG GGCTAGCTACAACGA GTAGGTCG | 15746 |
| 674 | CGCCGGGG G UCCGUGGG | 6998 | CCCACGGA GGCTAGCTACAACGA CCCCGGCG | 15747 |
| 670 | GGGGGUCC G UGGGGCCC | 6999 | GGGCCCCA GGCTAGCTACAACGA GGACCCCC | 15748 |
| 665 | UCCGUGGG G CCCCAACU | 7000 | AGTTGGGG GGCTAGCTACAACGA CCCACGGA | 15749 |
| 659 | GGGCCCCA A CUAGGCCG | 7001 | CGGCCTAG GGCTAGCTACAACGA TGGGGCCC | 15750 |
| 654 | CCAACUAG G CCGGGAGC | 7002 | GCTCCCGG GGCTAGCTACAACGA CTAGTTGG | 15751 |
| 647 | GGCCGGGA G CCGCGGGG | 7003 | CCCCGCGG GGCTAGCTACAACGA TCCCGGCC | 15752 |
| 644 | CGGGAGCC G CGGGGUGA | 7004 | TCACCCCG GGCTAGCTACAACGA GGCTCCCG | 15753 |
| 639 | GCCGCGGG G UGACAGGA | 7005 | TCCTGTCA GGCTAGCTACAACGA CCCGCGGC | 15754 |
| 636 | GCGGGGUG A CAGGAGCC | 7006 | GGCTCCTG GGCTAGCTACAACGA CACCCCGC | 15755 |
| 630 | UGACAGGA G CCAUCCUG | 7007 | CAGGATGG GGCTAGCTACAACGA TCCTGTCA | 15756 |
| 627 | CAGGAGCC A UCCUGCCC | 7008 | GGGCAGGA GGCTAGCTACAACGA GGCTCCTG | 15757 |
| 622 | GCCAUCCU G CCCACCCU | 7009 | AGGGTGGG GGCTAGCTACAACGA AGGATGGC | 15758 |
| 618 | UCCUGCCC A CCCUAAGC | 7010 | GCTTAGGG GGCTAGCTACAACGA GGGCAGGA | 15759 |
| 611 | CACCCUAA G CCCUCAUU | 7011 | AATGAGGG GGCTAGCTACAACGA TTAGGGTG | 15760 |
| 605 | AAGCCCUC A UUGCCAUA | 7012 | TATGGCAA GGCTAGCTACAACGA GAGGGCTT | 15761 |
| 602 | CCCUCAUU G CCAUAGAG | 7013 | CTCTATGG GGCTAGCTACAACGA AATGAGGG | 15762 |
| 599 | UCAUUGCC A UAGAGGGG | 7014 | CCCCTCTA GGCTAGCTACAACGA GGCAATGA | 15763 |
| 591 | AUAGAGGG G CCAAGGGU | 7015 | ACCCTTGG GGCTAGCTACAACGA CCCTCTAT | 15764 |
| 584 | GGCCAAGG G UACCCGGG | 7016 | CCCGGGTA GGCTAGCTACAACGA CCTTGGCC | 15765 |
| 582 | CCAAGGGU A CCCGGGCU | 7017 | AGCCCGGG GGCTAGCTACAACGA ACCCTTGG | 15766 |
| 576 | GUACCCGG G CUGAGCCC | 7018 | GGGCTCAG GGCTAGCTACAACGA CCGGGTAC | 15767 |
| 571 | CGGGCUGA G CCCAGGCC | 7019 | GGCCTGGG GGCTAGCTACAACGA TCAGCCCG | 15768 |
| 565 | GAGCCCAG G CCCUGCCC | 7020 | GGGCAGGG GGCTAGCTACAACGA CTGGGCTC | 15769 |
| 560 | CAGGCCCU G CCCUCGGG | 7021 | CCCGAGGG GGCTAGCTACAACGA AGGGCCTG | 15770 |
| 552 | GCCCUCGG G CCGGCGAG | 7022 | CTCGCCGG GGCTAGCTACAACGA CCGAGGGC | 15771 |
| 548 | UCGGGCCG G CGAGCCUU | 7023 | AAGGCTCG GGCTAGCTACAACGA CGGCCCGA | 15772 |
| 544 | GCCGGCGA G CCUUGGGG | 7024 | CCCCAAGG GGCTAGCTACAACGA TCGCCGGC | 15773 |
| 535 | CCUUGGGG A UAGGUUGU | 7025 | ACAACCTA GGCTAGCTACAACGA CCCCAAGG | 15774 |
| 531 | GGGGAUAG G UUGUCGCC | 7026 | GGCGACAA GGCTAGCTACAACGA CTATCCCC | 15775 |
| 528 | GAUAGGUU G UCGCCUUC | 7027 | GAAGGCGA GGCTAGCTACAACGA AACCTATC | 15776 |
| 525 | AGGUUGUC G CCUUCCAC | 7028 | GTGGAAGG GGCTAGCTACAACGA GACAACCT | 15777 |
| 518 | CGCCUUCC A CGAGGUUG | 7029 | CAACCTCG GGCTAGCTACAACGA GGAAGGCG | 15778 |
| 513 | UCCACGAG G UUGCGACC | 7030 | GGTCGCAA GGCTAGCTACAACGA CTCGTGGA | 15779 |
| 510 | ACGAGGUU G CGACCGCU | 7031 | AGCGGTCG GGCTAGCTACAACGA AACCTCGT | 15780 |
| 507 | AGGUUGCG A CCGCUCGG | 7032 | CCGAGCGG GGCTAGCTACAACGA CGCAACCT | 15781 |
| 504 | UUGCGACC G CUCGGAAG | 7033 | CTTCCGAG GGCTAGCTACAACGA GGTCGCAA | 15782 |
| 496 | GCUCGGAA G UCUUCCUA | 7034 | TAGGAAGA GGCTAGCTACAACGA TTCCGAGC | 15783 |
| 487 | UCUUCCUA G UCGCGCGC | 7035 | GCGCGCGA GGCTAGCTACAACGA TAGGAAGA | 15784 |
| 484 | UCCUAGUC G CGCGCACA | 7036 | TGTGCGCG GGCTAGCTACAACGA GACTAGGA | 15785 |
| 482 | CUAGUCGC G CGCACACC | 7037 | GGTGTGCG GGCTAGCTACAACGA GCGACTAG | 15786 |
| 480 | AGUCGCGC G CACACCCA | 7038 | TGGGTGTG GGCTAGCTACAACGA GCGCGACT | 15787 |
| 478 | UCGCGCGC A CACCCAAC | 7039 | GTTGGGTG GGCTAGCTACAACGA GCGCGCGA | 15788 |
| 476 | GCGCGCAC A CCCAACCU | 7040 | AGGTTGGG GGCTAGCTACAACGA GTGCGCGC | 15789 |
| 471 | CACACCCA A CCUGGGGC | 7041 | GCCCCAGG GGCTAGCTACAACGA TGGGTGTG | 15790 |
| 464 | AACCUGGG G CCCCUGCG | 7042 | CGCAGGGG GGCTAGCTACAACGA CCCAGGTT | 15791 |
| 458 | GGGCCCCU G CGCGGCAA | 7043 | TTGCCGCG GGCTAGCTACAACGA AGGGGCCC | 15792 |
| 456 | GCCCCUGC G CGGCAACA | 7044 | TGTTGCCG GGCTAGCTACAACGA GCAGGGGC | 15793 |
| 453 | CCUGCGCG G CAACAGGU | 7045 | ACCTGTTG GGCTAGCTACAACGA CGCGCAGG | 15794 |
| 450 | GCGCGGCA A CAGGUAAA | 7046 | TTTACCTG GGCTAGCTACAACGA TGCCGCGC | 15795 |
| 446 | GGCAACAG G UAAACUCC | 7047 | GGAGTTTA GGCTAGCTACAACGA CTGTTGCC | 15796 |
| 442 | ACAGGUAA A CUCCACCA | 7048 | TGGTGGAG GGCTAGCTACAACGA TTACCTGT | 15797 |
| 437 | UAAACUCC A CCAACGAU | 7049 | ATCGTTGG GGCTAGCTACAACGA GGAGTTTA | 15798 |
| 433 | CUCCACCA A CGAUCUGA | 7050 | TCAGATCG GGCTAGCTACAACGA TGGTGGAG | 15799 |
| 430 | CACCAACG A UCUGACCA | 7051 | TGGTCAGA GGCTAGCTACAACGA CGTTGGTG | 15800 |
| 425 | ACGAUCUG A CCACCGCC | 7052 | GGCGGTGG GGCTAGCTACAACGA CAGATCGT | 15801 |
| 422 | AUCUGACC A CCGCCCGG | 7053 | CCGGGCGG GGCTAGCTACAACGA GGTCAGAT | 15802 |
| 419 | UGACCACC G CCCGGGAA | 7054 | TTCCCGGG GGCTAGCTACAACGA GGTGGTCA | 15803 |
| 411 | GCCCGGGA A CUUGACGU | 7055 | ACGTCAAG GGCTAGCTACAACGA TCCCGGGC | 15804 |
| 406 | GGAACUUG A CGUCCUGU | 7056 | ACAGGACG GGCTAGCTACAACGA CAAGTTCC | 15805 |
| 404 | AACUUGAC G UCCUGUGG | 7057 | CCACAGGA GGCTAGCTACAACGA GTCAAGTT | 15806 |
| 399 | GACGUCCU G UGGGCGGC | 7058 | GCCGCCCA GGCTAGCTACAACGA AGGACGTC | 15807 |
| 395 | UCCUGUGG G CGGCGGUU | 7059 | AACCGCCG GGCTAGCTACAACGA CCACAGGA | 15808 |
| 392 | UGUGGGCG G CGGUUGGU | 7060 | ACCAACCG GGCTAGCTACAACGA CGCCCACA | 15809 |
| 389 | GGGCGGCG G UUGGUGUU | 7061 | AACACCAA GGCTAGCTACAACGA CGCCGCCC | 15810 |
| 385 | GGCGGUUG G UGUUACGU | 7062 | ACGTAACA GGCTAGCTACAACGA CAACCGCC | 15811 |
| 383 | CGGUUGGU G UUACGUUU | 7063 | AAACGTAA GGCTAGCTACAACGA ACCAACCG | 15812 |
| 380 | UUGGUGUU A CGUUUGGU | 7064 | ACCAAACG GGCTAGCTACAACGA AACACCAA | 15813 |
| 378 | GGUGUUAC G UUUGGUUU | 7065 | AAACCAAA GGCTAGCTACAACGA GTAACACC | 15814 |
| 373 | UACGUUUG G UUUUUCUU | 7066 | AAGAAAAA GGCTAGCTACAACGA CAAACGTA | 15815 |
| 360 | UCUUUGAG G UUUAGGAU | 7067 | ATCCTAAA GGCTAGCTACAACGA CTCAAAGA | 15816 |
| 353 | GGUUUAGG A UUCGUGCU | 7068 | AGCACGAA GGCTAGCTACAACGA CCTAAACC | 15817 |
| 349 | UAGGAUUC G UGCUCAUG | 7069 | CATGAGCA GGCTAGCTACAACGA GAATCCTA | 15818 |
| 347 | GGAUUCGU G CUCAUGGU | 7070 | ACCATGAG GGCTAGCTACAACGA ACGAATCC | 15819 |
| 343 | UCGUGCUC A UGGUGCAC | 7071 | GTGCACCA GGCTAGCTACAACGA GAGCACGA | 15820 |
| 340 | UGCUCAUG G UGCACGGU | 7072 | ACCGTGCA GGCTAGCTACAACGA CATGAGCA | 15821 |
| 338 | CUCAUGGU G CACGGUCU | 7073 | AGACCGTG GGCTAGCTACAACGA ACCATGAG | 15822 |
| 336 | CAUGGUGC A CGGUCUAC | 7074 | GTAGACCG GGCTAGCTACAACGA GCACCATG | 15823 |
| 333 | GGUGCACG G UCUACGAG | 7075 | CTCGTAGA GGCTAGCTACAACGA CGTGCACC | 15824 |
| 329 | CACGGUCU A CGAGACCU | 7076 | AGGTCTCG GGCTAGCTACAACGA AGACCGTG | 15825 |
| 324 | UCUACGAG A CCUCCCGG | 7077 | CCGGGAGG GGCTAGCTACAACGA CTCGTAGA | 15826 |
| 314 | CUCCCGGG G CACUCGCA | 7078 | TGCGAGTG GGCTAGCTACAACGA CCCGGGAG | 15827 |
| 312 | CCCGGGGC A CUCGCAAG | 7079 | CTTGCGAG GGCTAGCTACAACGA GCCCCGGG | 15828 |
| 308 | GGGCACUC G CAAGCACC | 7080 | GGTGCTTG GGCTAGCTACAACGA GAGTGCCC | 15829 |
| 304 | ACUCGCAA G CACCCUAU | 7081 | ATAGGGTG GGCTAGCTACAACGA TTGCGAGT | 15830 |
| 302 | UCGCAAGC A CCCUAUCA | 7082 | TGATAGGG GGCTAGCTACAACGA GCTTGCGA | 15831 |
| 297 | AGCACCCU A UCAGGCAG | 7083 | CTGCCTGA GGCTAGCTACAACGA AGGGTGCT | 15832 |
| 292 | CCUAUCAG G CAGUACCA | 7084 | TGGTACTG GGCTAGCTACAACGA CTGATAGG | 15833 |
| 289 | AUCAGGCA G UACCACAA | 7085 | TTGTGGTA GGCTAGCTACAACGA TGCCTGAT | 15834 |
| 287 | CAGGCAGU A CCACAAGG | 7086 | CCTTGTGG GGCTAGCTACAACGA ACTGCCTG | 15835 |
| 284 | CGACUAGG A CAAGGCCU | 7087 | AGGCCTTG GGCTAGCTACAACGA GGTACTGC | 15836 |
| 279 | ACCACAAG G CCUUUCGC | 7088 | GCGAAAGG GGCTAGCTACAACGA CTTGTGGT | 15837 |
| 272 | GGCCUUUC G CGACCCAA | 7089 | TTGGGTCG GGCTAGCTACAACGA GAAAGGCC | 15838 |
| 269 | CUUUCGCG A CCCAACAC | 7090 | GTGTTGGG GGCTAGCTACAACGA CGCGAAAG | 15839 |
| 264 | GCGACCCA A CACUACUC | 7091 | GAGTAGTG GGCTAGCTACAACGA TGGGTCGC | 15840 |
| 262 | GACCCAAC A CUACUCGG | 7092 | CCGAGTAG GGCTAGCTACAACGA GTTGGGTC | 15841 |
| 259 | CCAACACU A CUCGGCUA | 7093 | TAGCCGAG GGCTAGCTACAACGA AGTGTTGG | 15842 |
| 254 | ACUACUCG G CUAGCAGU | 7094 | ACTGCTAG GGCTAGCTACAACGA CGAGTAGT | 15843 |
| 250 | CUCGGCUA G CAGUCUCG | 7095 | CGAGACTG GGCTAGCTACAACGA TAGCCGAG | 15844 |
| 247 | GGCUAGCA G UCUCGCGG | 7096 | CCGCGAGA GGCTAGCTACAACGA TGCTAGCC | 15845 |
| 242 | GCAGUCUC G CGGGGGCA | 7097 | TGCCCCCG GGCTAGCTACAACGA GAGACTGC | 15846 |
| 236 | UCGCGGGG G CACGCCCA | 7098 | TGGGCGTG GGCTAGCTACAACGA CCCCGCGA | 15847 |
| 234 | GCGGGGGC A CGCCCAAA | 7099 | TTTGGGCG GGCTAGCTACAACGA GCCCCCGC | 15848 |
| 232 | GGGGGCAC G CCCAAAUC | 7100 | GATTTGGG GGCTAGCTACAACGA GTGCCCCC | 15849 |
| 226 | ACGCCCAA A UCUCCAGG | 7101 | CCTGGAGA GGCTAGCTACAACGA TTGGGCGT | 15850 |
| 218 | AUCUCCAG G CAUUGAGC | 7102 | GCTCAATG GGCTAGCTACAACGA CTGGAGAT | 15851 |
| 216 | CUCCAGGC A UUGAGCGG | 7103 | CCGCTCAA GGCTAGCTACAACGA GCCTGGAG | 15852 |
| 211 | GGCAUUGA G CGGGUUGA | 7104 | TCAACCCG GGCTAGCTACAACGA TCAATGCC | 15853 |
| 207 | UUGAGCGG G UUGAUCCA | 7105 | TGGATCAA GGCTAGCTACAACGA CCGCTCAA | 15854 |
| 203 | GCGGGUUG A UCCAAGAA | 7106 | TTCTTGGA GGCTAGCTACAACGA CAACCCGC | 15855 |
| 191 | AAGAAAGG A CCCGGUCG | 7107 | CGACCGGG GGCTAGCTACAACGA CCTTTCTT | 15856 |
| 186 | AGGACCCG G UCGUCCUG | 7108 | CAGGACGA GGCTAGCTACAACGA CGGGTCCT | 15857 |
| 183 | ACCCGGUC G UCCUGGCA | 7109 | TGCCAGGA GGCTAGCTACAACGA GACCGGGT | 15858 |
| 177 | UCGUCCUG G CAAUUCCG | 7110 | CGGAATTG GGCTAGCTACAACGA CAGGACGA | 15859 |
| 174 | UCCUGGCA A UUCCGGUG | 7111 | CACCGGAA GGCTAGCTACAACGA TGCCAGGA | 15860 |
| 168 | CAAUUCCG G UGUACUCA | 7112 | TGAGTACA GGCTAGCTACAACGA CGGAATTG | 15861 |
| 166 | AUUCCGGU G UACUCACC | 7113 | GGTGAGTA GGCTAGCTACAACGA ACCGGAAT | 15862 |
| 164 | UCCGGUGU A CUCACCGG | 7114 | CCGGTGAG GGCTAGCTACAACGA ACACCGGA | 15863 |
| 160 | GUGUACUC A CCGGUUCC | 7115 | GGAACCGG GGCTAGCTACAACGA GAGTACAC | 15864 |
| 156 | ACUCACCG G UUCCGCAG | 7116 | CTGCGGAA GGCTAGCTACAACGA CGGTGAGT | 15865 |
| 151 | CCGGUUCC G CAGACCAC | 7117 | GTGGTCTG GGCTAGCTACAACGA GGAACCGG | 15866 |
| 147 | UUCCGCAG A CCACUAUG | 7118 | CATAGTGG GGCTAGCTACAACGA CTGCGGAA | 15867 |
| 144 | CGCAGACC A CUAUGGCU | 7119 | AGCCATAG GGCTAGCTACAACGA GGTCTGCG | 15868 |
| 141 | AGACCACU A UGGCUCUC | 7120 | GAGAGCCA GGCTAGCTACAACGA AGTGGTCT | 15869 |
| 138 | CCACUAUG G CUCUCCCG | 7121 | CGGGAGAG GGCTAGCTACAACGA CATAGTGG | 15870 |
| 120 | GAGGGGGG G UCCUGGAG | 7122 | CTCCAGGA GGCTAGCTACAACGA CCCCCCTC | 15871 |
| 111 | UCCUGGAG G CUGCACGA | 7123 | TCGTGCAG GGCTAGCTACAACGA CTCCAGGA | 15872 |
| 108 | UGGAGGCU G CACGACAC | 7124 | GTGTCGTG GGCTAGCTACAACGA AGCCTCCA | 15873 |
| 106 | GAGGCUGC A CGACACUC | 7125 | GAGTGTCG GGCTAGCTACAACGA GCAGCCTC | 15874 |
| 103 | GCUGCACG A CACUCAUA | 7126 | TATGAGTG GGCTAGCTACAACGA CGTGCAGC | 15875 |
| 101 | UGCACGAC A CUCAUACU | 7127 | AGTATGAG GGCTAGCTACAACGA GTCGTGCA | 15876 |
| 97 | CGACACUC A UACUAACG | 7128 | CGTTAGTA GGCTAGCTACAACGA GAGTGTCG | 15877 |
| 95 | ACACUCAU A CUAACGCC | 7129 | GGCGTTAG GGCTAGCTACAACGA ATGAGTGT | 15878 |
| 91 | UCAUACUA A CGCCAUGG | 7130 | CCATGGCG GGCTAGCTACAACGA TAGTATGA | 15879 |
| 89 | AUACUAAC G CCAUGGCU | 7131 | AGCCATGG GGCTAGCTACAACGA GTTAGTAT | 15880 |
| 86 | CUAACGCC A UGGCUAGA | 7132 | TCTAGCCA GGCTAGCTACAACGA GGCGTTAG | 15881 |
| 83 | ACGCCAUG G CUAGACGC | 7133 | GCGTCTAG GGCTAGCTACAACGA CATGGCGT | 15882 |
| 78 | AUGGCUAG A CGCUUUCU | 7134 | AGAAAGCG GGCTAGCTACAACGA CTAGCCAT | 15883 |
| 76 | GGCUAGAC G CUUUCUGC | 7135 | GCAGAAAG GGCTAGCTACAACGA GTCTAGCC | 15884 |
| 69 | CGCUUUCU G CGUGAAGA | 7136 | TCTTCACG GGCTAGCTACAACGA AGAAAGCG | 15885 |
| 67 | CUUUCUGC G UGAAGACA | 7137 | TGTCTTCA GGCTAGCTACAACGA GCAGAAAG | 15886 |
| 61 | GCGUGAAG A CAGUAGUU | 7138 | AACTACTG GGCTAGCTACAACGA CTTCACGC | 15887 |
| 58 | UGAAGACA G UAGUUCCU | 7139 | AGGAACTA GGCTAGCTACAACGA TGTCTTCA | 15888 |
| 55 | AGACAGUA G UUCCUCAC | 7140 | GTGAGGAA GGCTAGCTACAACGA TACTGTCT | 15889 |
| 48 | AGUUCCUC A CAGGGGAG | 7141 | CTCCCCTG GGCTAGCTACAACGA GAGGAACT | 15890 |
| 40 | ACAGGGGA G UGAUCUAU | 7142 | ATAGATCA GGCTAGCTACAACGA TCCCCTCT | 15891 |
| 37 | GGGGAGUG A UCUAUGGU | 7143 | ACCATAGA GGCTAGCTACAACGA CACTCCCC | 15892 |
| 33 | AGUGAUCU A UGGUGGAG | 7144 | CTCCACCA GGCTAGCTACAACGA AGATCACT | 15893 |
| 30 | GAUCUAUG G UGGAGUGU | 7145 | ACACTCCA GGCTAGCTACAACGA CATAGATC | 15894 |
| 25 | AUGGUGGA G UGUCGCCC | 7146 | GGGCGACA GGCTAGCTACAACGA TCCACCAT | 15895 |
| 23 | GGUGGAGU G UCGCCCCC | 7147 | GGGGGCGA GGCTAGCTACAACGA ACTCCACC | 15896 |

Input Sequence = HPCK1S1.
Cut Site = R/Y
Arm Length = 8.
Core Sequence = GGCTAGCTACAACGA
HPCK1S1 Hepatitis G virus (strain HCV-1b, clone HCV-K1-S1), complete genome; acc# gi|1030702|dbj|D50483.1; 9410 nt

[0568] TABLE XX

| Synthetic anti-HCV nucleic acid molecule and Target Sequences | | | | | | | |
|---|---|---|---|---|---|---|---|
| ref pos | Ref Seq | Target | Seq ID | RPI# | NUCLEIC ACID | Seq ID | Nucleic Acid Alias |
| 195 | HCV+ | GGGUCCU U UCUUGCA | 7148 | 15364 | c_{S}c_{S}a_{S}a_{S}ga cUGAuGaggcgaaagccGaa uuAggacc B | 15897 | Hammerhead |
| 342 | HCV+ | AGACCGUGCAUCAUGAGCAC | 7149 | 17501 | GₛTₛGₛC_{S}TₛC_{S}A_{S}TₛGₛA_{S}TₛGₛC_{S}A_{S}C_{S}GₛGₛTₛC_{S}T | 15898 | Antisense |
| 195 | HCV+ | GGGUCCU U UCUUGGA | 7148 | 17558 | C_{S}C_{S}a_{S}a_{S}ga cUGAuGaggcguuagccGaZ Aggacc B | 15899 | Hammerhead |
| 195 | HCV+ | GGGUCCU U UCUUGGA | 7148 | 17559 | C_{S}c_{S}a_{S}a_{S}ga cUGAuGaggcguuagccGaa AggaZc B | 15900 | Hammerhead |
| 195 | HCV+ | GGGUCCU U UCUUGGA | 7148 | 17560 | Z5C_{S}a_{S}a_{S}ga cUGAuGaggcguuagccGaa Aggace B | 15901 | Hammerhead |
| 195 | HCV+ | GGGUCCU U UCUUGGA | 7148 | 17561 | Z C_{S}a_{S}a_{S}ga cUGAuGaggcguuagccCaa Aggacc B | 15902 | Hammerhead |
| 195 | HCV+ | GGGUCCU U UCUUGGA | 7148 | 18012 | ccaaga cUGAuGaggcguuagccGaa Aggaca B | 15903 | Hammerhead |
| 82 | HCV+ | GCGUCUA G CCAUGGC | 7150 | 18744 | g_{S}C_{S}C_{S}a_{S}ugg GccgaaagGCGaGucaaGGuCu uagacgc B | 15904 | Zinzyme |
| 100 | HCV+ | AGUAUGA G UGUCGUG | 7151 | 18745 | C_{S}a_{S}C_{S}g_{S}aca GccgaaagGCGaGucaaGGuCu ucauacu B | 15905 | Zinzyme |
| 102 | HCV+ | UAUGAGU G UCGUGCA | 7152 | 18746 | u_{S}g_{S}C_{S}a_{S}cga GccgaaagGCGaGucaaGGuCu acucaua B | 15906 | Zinzyme |
| 105 | HCV+ | GAGUGUC G UGCAGCC | 7153 | 18747 | g_{S}g_{S}C_{S}u_{S}gca GccgaaagGCGaGucaaGGuCu gacacuc B | 15907 | Zinzyme |
| 107 | HCV+ | GUGUCGU G CAGCCUC | 7154 | 18748 | g_{S}a_{S}g8g_{S}cug GccgaaagGCGaGucaaGGuCu acgacac B | 15908 | Zinzyme |
| 146 | HCV+ | CAUAGUG G UCUGCGG | 7155 | 18749 | C_{S}C_{S}g_{S}C_{S}aga GccgaaagGCGaGucaaGGuCu cacuaug B | 15909 | Zinzyme |
| 190 | HCV+ | CGACCGG G UCCUUUC | 7156 | 18750 | g_{S}a_{S}a_{S}a_{S}gga GccgaaagGCGaGucaaGGuCu ccggucg B | 15910 | Zinzyme |
| 217 | HCV+ | GCUCAAU G CCUGGAG | 7157 | 18751 | C_{S}u_{S}C_{S}C_{S}agg GccgaaagGCGaGucaaGGuCu auugagc B | 15911 | Zinzyme |
| 231 | HCV+ | GAUUUGG C CGUGCCC | 7158 | 18752 | g_{S}g_{S}g_{S}C_{S}acg GccgaaagGCCaGucaaGGuCu ccaaauc B | 15912 | Zinzyme |
| 258 | HCV+ | UAGCCGA C UAGUGUU | 7159 | 18753 | asascsascua GccgaaagGCGaGucaaGGuCu ucggcua B | 15913 | Zinzyme |
| 307 | HCV+ | GGUGCUU G CGAGUGC | 7160 | 18754 | g_{S}c_{S}a_{S}c9ucg GccgaaagGCGaGucaaGGuCu aagcacc B | 15914 | Zinzyme |
| 77 | HCV+ | GAAAGC G UCUAGC | 7161 | 18755 | g_{S}C_{S}u_{S}a_{S}ga GccgaaagGCGaGucaaGGuCu gcuuuc B | 15915 | Zinzyme |
| 77 | HCV+ | AGAAAGC G UCUAGCC | 7162 | 18756 | g_{S}g_{S}C_{S}u_{S}aga GccgaaagGCGaGucaaGGuCu gcuuucu B | 15916 | Zinzyme |
| 88 | HCV+ | AGCCAUG C CGUUAGU | 7163 | 18757 | a_{S}C_{S}u6a_{S}acg GccgaaagGCGaGucaaGGuCu cauggcu B | 15917 | Zinzyme |
| 94 | HCV+ | CGCGUUA C UAUGAGU | 7164 | 18758 | ascsuscsaua GccgaaagGCGaGucaaGGucu uaacgcc B | 15918 | Zinzyme |
| 102 | HCV+ | AUGAGU G UCGUGC | 7165 | 18759 | g_{S}C_{S}a_{S}c_{S}ga CccgaaagGCGaCucaaGGuCu acucau B | 15919 | Zinzyme |
| 105 | HCV+ | AGUGUC G UGCAGC | 7166 | 18760 | g_{S}c_{S}u_{S}g_{S}ca GccgaaagGCGaGucaaGGuCu gacacu B | 15920 | Zinzyme |
| 110 | HCV+ | UCGUGCA C CCUCCAG | 7167 | 18761 | C_{S}u_{S}g_{S}g_{S}agg GccgaaagCCGaGucaaGGuCu ugcacga B | 15921 | Zinzyme |
| 137 | HCV+ | GGGAGA G CCAUAG | 7168 | 18762 | C_{S}u_{S}a_{S}u_{S}gg GccgaaagGCGaGucaaGGuCu ucuccc B | 15922 | Zinzyme |
| 137 | HCV+ | CGGGAGA G CCAUAGU | 7169 | 18763 | a_{S}C_{S}u_{S}a_{S}ugg GccgaaagGCGaGucaaGGuCu ucucccg B | 15923 | Zinzyme |
| 146 | HCV+ | AUAGUG G UCUGCG | 7170 | 18764 | C_{S}g_{S}C_{S}a_{S}ga GccgaaagGCGaGucaaGGuCu cacuau B | 15924 | Zinzyme |
| 150 | HCV+ | GUGGUCU G CGGAACC | 7171 | 18765 | g_{S}g_{S}u_{S}u_{S}ccg GccgaaagGCGaGucaaGGuCu agaccac B | 15925 | Zinzyme |
| 176 | HCV+ | CGGAAUU C CCAGGAC | 7172 | 18766 | g_{S}u_{S}C_{S}c_{S}ugg GccgaaagCCCaCucaaGGuCu aauuccg B | 15926 | Zinzyme |
| 190 | HCV+ | GACCGG GUCCUUU | 7173 | 18767 | a_{S}a_{S}a_{S}g_{S}gaGccgaaagGCGaGucaaGGuCu ccgguc B | 15927 | Zinzyme |
| 253 | HSV+ | CUGCUA G CCGAGU | 7174 | 18768 | a_{S}C_{S}ugc_{S}ggGccgaaagGCGaGucaaGGuCu uagcag B | 15928 | Zinzyme |
| 253 | HCV+ | ACUGCUA GCCGAGAA | 7175 | 18769 | u_{S}a_{S}c_{S}u_{S}cggGccgaaagGCGaGucaaGGuCu uagcagu B | 15929 | Zinzyme |
| 258 | HCV+ | AGCCGA GUAGUGU | 7176 | 18770 | a_{S}C_{S}a_{S}c_{S}uaGccgaaagGCGaGucaaGGuCu ucggcu B | 15930 | Zinzyme |
| 263 | HCV+ | GAGUAGU GUUGGGUC | 7177 | 18771 | g_{S}a_{S}c_{S}c_{S}caaGccgaaagGcGaGucaaGGuCu acuacuc B | 15931 | Zinzyme |
| 268 | HCV+ | UGUUGG GUCGCGA | 7178 | 18772 | u_{S}c_{S}g_{S}c_{S}gaGccgaaagGCGaGucaaGGuCu ccaaca B | 15932 | Zinzyme |
| 268 | HCV+ | GUGUUGG GUCGCGAA | 7179 | 18773 | u_{S}u_{S}c_{S}g_{S}cgaGccgaaagGcGaGucaaGGuCu ccaacac B | 15933 | Zinzyme |
| 271 | HCV+ | UUGGGUC GCGAAAGG | 7180 | 18774 | c_{S}cgu_{S}u_{S}ucgGccgaaagGCGaGucaaGGuCu gacccaa B | 15934 | Zinzyme |
| 283 | HCV+ | AGGCCUU GUGGUACU | 7181 | 18775 | a_{S}g_{S}u_{S}a_{S}ccaGccgaaagGCGaGucaaGGuCu aaggccu B | 15935 | Zinzyme |
| 286 | HCV+ | CCUUGUG GUACUGCC | 7182 | 18776 | g_{S}g_{S}c_{S}a_{S}guaGccgaaagGCGacucaaGGuCu cacaagg B | 15936 | Zinzyme |
| 291 | HCV+ | UGGUACU GCCUGAUA | 7183 | 18777 | u_{S}a_{S}u_{S}C_{S}aggGccgaaagGCGaGucaaGGuCu aguacca B | 15937 | Zinzyme |
| 301 | HCV+ | UGAUAGG GUGCUUGC | 7184 | 18778 | g_{S}C_{S}a_{S}a_{S}gcaGccgaaagGCGaGucaaGGuCu ccuauca B | 15938 | Zinzyme |
| 303 | HCV+ | AUAGGGU GCUUGCGA | 7185 | 18779 | u_{S}c_{S}g_{S}c_{S}aagGccgaaagGCGaGucaaGGuCu acccuau B | 15939 | Zinzyme |
| 60 | HCV+ | ACUACU GUCUUCA | 7186 | 18780 | u_{S}g_{S}a_{S}a_{S}gaGccgaaagGCGaGucaaGGuCu aguagu B | 15940 | Zinzyme |
| 60 | HCV+ | AACUACU GUCUUCAC | 7187 | 18781 | g_{S}u_{S}g_{S}a_{S}agaGccgaaagGCGaGucaaGGuCu aguaguu B | 15941 | Zinzyme |
| 68 | HCV+ | UCUUCAC GCAGAAAG | 7188 | 18782 | c_{S}u_{S}u_{S}u_{S}cugGccgaaagGCGaGucaaGGuCu gugaaga B | 15942 | Zinzyme |
| 75 | HCV+ | CAGAAA GCGUCUA | 7189 | 18783 | u_{S}a_{S}g_{S}a_{S}cgGccgaaagGCGaGucaaGGuCu uuucug B | 15943 | Zinzyme |
| 82 | HCV+ | CGUCUA GCCAUGG | 7190 | 18784 | cgC_{S}a_{S}u_{S}ggGccgaaagGCGaGucaaGGuCu uagacg B | 15944 | Zirizyme |
| 88 | HCV+ | GCCAUG GCGUUAG | 7191 | 18785 | C_{S}u_{S}a_{S}a_{S}cgGccgaaagGCGaGucaacGuCu cauggc B | 15945 | Zinzyme |
| 90 | HCV+ | CAUGGC GUUAGUA | 7192 | 18786 | usascsusaaGccgaaagGCGaGucaaGGuCu gccaug B | 15946 | Zinzyme |
| 90 | HCV+ | CCAUGGC GUUAGUAU | 7193 | 18787 | a_{S}u_{S}a_{S}c_{S}uaaGccgaaagGCGaGucaaGGucu gccaugg B | 15947 | Zinzyme |
| 100 | HCV+ | GUAUGA G UGUCGU | 7194 | 18788 | a_{S}c_{S}g_{S}a_{S}caGccgaaagGCGaGucaaGGuCu ucauac B | 15948 | Zinzyme |
| 107 | HCV+ | UGUCGU GCAGCCU | 7195 | 18789 | a_{S}g_{S}g_{S}C_{S}ugGccgaaagGCGaGucaaGGuCu acgaca B | 15949 | Zinzyme |
| 110 | HCV+ | CGUGCA GCCUCCA | 7196 | 18790 | u_{S}g_{S}g_{S}a_{S}ggGccgaaagGCGaGucaaGGuCu ugcacg B | 15950 | Zinzyme |
| 150 | HCV+ | UGGUCU GCGGAAC | 7197 | 18791 | g_{S}u_{S}u_{S}C_{S}cgGccgaaagGCGaGucaaGGuCu agacca B | 15951 | Zinzyme |
| 159 | HCV+ | GGAACCG GUGAGUAC | 7198 | 18792 | g_{S}u_{S}a_{S}c_{S}ucaGccgaaagGCGaGucaaGGuCu cgguucc B | 15952 | Zinzyme |
| 176 | HCV+ | GGAAUU GCCAGGA | 7199 | 18793 | u_{S}c_{S}c_{S}u_{S}ggGccgaaagGCGaGucaaGGuCu aauucc B | 15953 | Zinzyme |
| 217 | HCV+ | CUCAAU GCCUGGA | 7200 | 18794 | u_{S}C_{S}c_{S}a_{S}ggGccgaaagGCGaGucaaGGuCu auugag B | 15954 | Zinzyme |
| 231 | HCV+ | AUUUGG GCGUGCC | 7201 | 18795 | g_{S}g_{S}c_{S}a_{S}cgGccgaaagGCGaGucaaGGuCu ccaaau B | 15955 | Zinzyme |
| 261 | HCV+ | CGAGUA GUGUUGG | 7202 | 18796 | c_{S}c_{S}a_{S}a_{S}caGccgaaagGCGaGucaaGGuCu uacucg B | 15956 | Zinzyme |
| 261 | HCV+ | CCGAGUA GUGUUGGG | 7203 | 18797 | C_{S}c_{S}C_{S}a_{S}acaGccgaaagGCGaGucaaGGuCu uacucgg B | 15957 | Zinzyrne |
| 263 | HCV+ | AGUAGU GUUGGGU | 7204 | 18798 | a_{S}c_{S}c_{S}c_{S}aaGccgaaagGCGaGucaaGGuCu acuacu B | 15958 | Zinzyrne |
| 271 | HCV+ | UGGGUC GCGAAAG | 7205 | 18799 | C_{S}u_{S}u_{S}u_{S}cgGccgaaagGCGaGucaaGGuCu gaccca B | 15959 | Zinzyme |
| 283 | HCV+ | GGCCUU GUGGUAC | 7206 | 18800 | g_{S}u_{S}a_{S}c_{S}caGccgaaagGCGaGucaaGGuCu aaggcc B | 15960 | Zinzyme |
| 291 | HCV+ | GGUACU GCCUGAU | 7207 | 18801 | a_{S}u_{S}c_{S}a_{S}ggGccgaaagGCGaGucaaGGuCu aguacc B | 15961 | Zinzyme |
| 303 | HCV+ | UAGGGU G CUGCG | 7208 | 18802 | C_{S}g_{S}c_{S}a_{S}agGccgaaagGCGaGucaaGGuCu acccua B | 15962 | Zinzyme |
| 307 | HCV+ | GUGCUU G CGAGUG | 7209 | 18803 | c_{S}a_{S}c_{S}u_{S}cgGccgaaagGCGaGucaaGGuCu aagcac B | 15963 | Zinzyme |
| 323 | HCV+ | CGGGAG G UCUCGU | 7210 | 18804 | a_{S}c_{S}g_{S}a_{S}gaGccgaaagGCGaGucaaGGuCu cucccg B | 15964 | Zinzyme |
| 323 | HCV+ | CCGGGAG G UCUCGUA | 7211 | 18805 | u_{S}a_{S}c_{S}g_{S}agaGccgaaagGCGaGucaaGGuCu cucccgg B | 15965 | Zinzyme |
| 75 | HCV+ | GCAGAAA G CGUCUAG | 7212 | 18806 | c_{S}u_{S}a_{S}g_{S}acgGccgaaagGCGaGucaaGGuCu uuucugc B | 15966 | Zinzyme |
| 143 | HCV+ | GCCAUA G UGGUCU | 7213 | 18807 | a_{S}g_{S}a_{S}C_{S}caGccgaaagGCGaGucaaGGuCu uauggc B | 15967 | Zinzyme |
| 278 | HCV+ | GCGAAAG G CCUUGUG | 7214 | 18808 | c_{S}a_{S}c_{S}a_{S}aggCCC gaaagGCGaGucaaGGucu cuuucgc B | 15968 | Zinzyme |
| 163 | HCV+ | CGGUGA G UACACC | 7215 | 18809 | g_{S}g_{S}u_{S}g_{S}uaCccgaaagGCGaGucaaGGuCu ucaccg B | 15969 | Zinzyme |
| 68 | HCV+ | CUUCAC C CAGAAA | 7216 | 18810 | u_{S}u_{S}u_{S}c_{S}ugCccgaaagGCCaGucaaCGuCu gugaag B | 15970 | Zinzyme |
| 94 | HCV+ | CCGUUA G UAUGAC | 7217 | 18811 | c_{S}u_{S}C_{S}a_{S}uaCccgaaagCCCaCucaaGCuCu uaacgc B | 15971 | Zinzyme |
| 143 | HCV+ | ACCCAUA G UGCUCUC | 7218 | 18812 | c_{S}a_{S}g_{S}a_{S}ccaGccgaaagGCGaCucaaCCuCu uauggcu B | 15972 | Zinzyme |
| 159 | HCV+ | GAACCG G UGAGUA | 7219 | 18813 | u_{S}a_{S}c_{S}u_{S}caCccgaaagGCCaCucaaGGuCu cgguuc B | 15973 | Zinzyme |
| 163 | HCV+ | CCGGUCA G UACACCG | 7220 | 18814 | c_{S}g_{S}g_{S}u_{S}guaCccgaaagCCCaGucaaCGuCu ucaccgg B | 15974 | Zinzyme |
| 249 | HCV+ | CACACU C CUACCC | 7221 | 18815 | g_{S}g_{S}C_{S}u_{S}agCCcgaaagGCGaGucaaGGucu agucuc B | 15975 | Zinzyme |
| 249 | HCV+ | CCAGACU C CUAGCCG | 7222 | 18816 | c_{S}g_{S}g_{S}C_{S}uagGCCgaaagCCCaCUCaaGCUCU agucucg B | 15976 | Zinzyme |
| 278 | HCV+ | CGAAAC C CCUUCU | 7223 | 18817 | a_{S}c_{S}a_{S}a_{S}ggCccgaaagCCGaGucaaGGuCu cuuucg B | 15977 | Zinzyme |
| 286 | HCV+ | CUUCUC C UACUCC | 7224 | 18818 | g_{S}C_{S}a_{S}g_{S}uaCccgaaagCCGaCucaaGCuCu cacaag B | 15978 | Zinzyme |
| 301 | HCV+ | CAUACC C UCCUUC | 7225 | 18819 | c_{S}a_{S}a_{S}g_{S}caCccgaaagCCCaCucaaCCuCu ccuauc B | 15979 | Zinzyme |
| 328 | HCV+ | CCUCUC C UACACC | 7226 | 18820 | g_{S}g_{S}u_{S}C_{S}uaCccgaaagCCCaCucaaCCuCu gagacc B | 15980 | Zinzyme |
| 328 | HCV+ | ACCUCUC C UACACCC | 7227 | 18821 | c_{S}g_{S}g_{S}u_{S}cuaCccgaaagCCCaCucaaCCuCu gagaccu B | 15981 | Zinzyme |
| 335 | HCV+ | UACACC C UCCACC | 7228 | 18822 | g_{S}g_{S}u_{S}g_{S}caCccgaaagCCCaCucaaCCuCu ggucua B | 15982 | Zinzyme |
| 30 | C | UAAACCU C AAACAAA | 7229 | 19108 | u_{S}u_{S}u_{S}c_{S}uuucuCAuCaggccguuaggccCaa Agguuua B | 15983 | Hammerhead |
| 48 | C | CAAACCU A ACACCAA | 7230 | 19109 | u_{S}u_{S}g_{S}g_{S}ugucT3CAuCaggccguuaggccCaa Acguuug B | 15984 | Hammerhead |
| 60 | C | CAACCCU C CCCCACA | 7231 | 19110 | u_{S}g_{S}u_{S}g_{S}ggccUCAuCaggccguuaggccCaa Acgguug B | 15985 | Hammerhead |
| 175 | C | CACCCCU C ACAACCU | 7232 | 19111 | a_{S}g_{S}g_{S}u_{S}ugucuCAuCaggccguuaggccCaa Accgcuc B | 15986 | Hammerhead |
| 374 | C | CUAACCU C AUCCAUA | 7233 | 19112 | u_{S}a_{S}u_{S}c_{S}gaucUCAuCaggccguuaggccCaa Accuuac B | 15987 | Hammerhead |
| 258 | S27 | UCCUCCCUCCAUCUUACCCCUAC | 7234 | 22022 | u_{S}g_{S}g_{S}u_{S}g_{S}g_{S}c_{S}u_{S}c_{S}c_{S}a_{S}u_{S}c_{S}u_{S}u_{S}a_{S}g_{S}c_{S}c_{S}c_{S}u_{S}a_{S}g | 15988 | Antisense |
| 259 | S27 | CCUCCCUCCAUCUUACCCCUACU | 7235 | 22023 | g_{S}g_{S}u_{S}g_{S}g_{S}C_{S}u_{S}C_{S}C_{S}a_{S}u_{S}c_{S}u_{S}u_{S}a_{S}g_{S}C_{S}c_{S}c_{S}u_{S}a_{S}g_{S}u | 15989 | Antisense |
| 260 | S27 | CUCCCUCCAUCUUACCCCUACUC | 7236 | 22024 | g_{S}u_{S}g_{S}g_{S}C_{S}u_{S}c_{S}c_{S}a_{S}u_{S}c_{S}u_{S}u_{S}a_{S}g_{S}C_{S}c_{S}C_{S}u_{S}a_{S}g_{S}u_{S}c | 15990 | Antisense |
| 261 | S27 | UCCCUCCAUCUUACCCCUACUCA | 7237 | 22025 | u_{S}g_{S}g_{S}C_{S}u_{S}C_{S}C_{S}a_{S}u_{S}C_{S}u_{S}u_{S}a_{S}g_{S}C_{S}C_{S}C_{S}u_{S}a_{S}g_{S}u_{S}C_{S}a | 15991 | Antisense |
| 262 | S27 | CCCUCCAUCUUACCCCUACUCAC | 7238 | 22026 | g_{S}g_{S}C_{S}u_{S}C_{S}C_{S}a_{S}u_{S}C_{S}u_{S}u_{S}a_{S}g_{S}C_{S}C_{S}C_{S}u_{S}a_{S}g_{S}u_{S}C_{S}a_{S}c | 15992 | Antisense |
| 263 | S27 | CCUCCAUCUUACCCCUACUCACC | 7239 | 22027 | g_{S}C_{S}u_{S}C_{S}C_{S}a_{S}u_{S}C_{S}u_{S}u_{S}a_{S}g_{S}C_{S}C_{S}C_{S}u_{S}a_{S}g_{S}u_{S}C_{S}a_{S}c_{S}g | 15993 | Antisense |
| 264 | S27 | CUCCAUCUUACCCCUACUCACCC | 7240 | 22028 | C_{S}u_{S}c_{S}c_{S}a_{S}u_{S}C_{S}u_{S}u_{S}a_{S}g_{S}c_{S}C_{S}C_{S}u_{S}a_{S}g_{S}u_{S}C_{S}a_{S}C_{S}g_{S}g | 15994 | Antisense |
| 265 | S27 | UCCAUCUUACCCCUACUCACCCC | 7241 | 22029 | u_{S}C_{S}C_{S}a_{S}u_{S}C_{S}u_{S}u_{S}a_{S}g_{S}C_{S}C_{S}C_{S}u_{S}a_{S}g_{S}u_{S}C_{S}a_{S}C_{S}g_{S}g_{S}c | 15995 | Antisense |
| 266 | S27 | CCAUCUUACCCCUACUCACCCCU | 7242 | 22030 | C_{S}C_{S}a_{S}u_{S}C_{S}u_{S}u_{S}a_{S}g_{S}C_{S}C_{S}c_{S}u_{S}a_{S}g_{S}u_{S}C_{S}a_{S}C_{S}g_{S}g_{S}C_{S}u | 15996 | Antisense |
| 267 | S27 | CAUCUUAGCCCUAGUCACGGCUA | 7243 | 22031 | c_{S}a_{S}u_{S}08u_{S}u_{S}a_{S}g_{S}C_{S}C_{S}C_{S}u_{S}a_{S}g_{S}u_{S}C_{S}a_{S}C_{S}g_{S}g_{S}C_{S}u_{S}a | 15997 | Antisense |
| 268 | S27 | AUCUUAGCCCUAGUCACCGCUAG | 7244 | 22032 | a_{S}u_{S}C_{S}u_{S}u_{S}a_{S}g_{S}06C_{S}c_{S}u_{S}a_{S}g_{S}u_{S}c_{S}a_{S}C_{S}g_{S}g_{S}C_{S}u_{S}a_{S}g | 15998 | Antisense |
| 269 | S27 | UCUUAGCCCUAGUCACGGCUAGC | 7245 | 22033 | u_{S}c_{S}u_{S}u_{S}a_{S}g_{S}C_{S}c_{S}c_{S}u_{S}a_{S}g_{S}u_{S}C_{S}a_{S}c_{S}g_{S}g_{S}C_{S}u_{S}a_{S}g_{S}c | 15999 | Antisense |
| 270 | S27 | CUUAGCCCUAGUCACGGCUAGCU | 7246 | 22034 | C_{S}u_{S}u_{S}a_{S}g_{S}C_{S}C_{S}C_{S}u_{S}a_{S}g_{S}u_{S}C_{S}a_{S}C_{S}g_{S}g_{S}c_{S}u_{S}a_{S}g_{S}C_{S}u | 16000 | Antisense |
| 271 | S27 | UUAGCCCUAGUCACGGCUAGCUG | 7247 | 22035 | u_{S}u_{S}a_{S}g_{S}C_{S}C_{S}C_{S}u_{S}a_{S}g_{S}u_{S}C_{S}a_{S}C_{S}g_{S}g_{S}C_{S}u_{S}a_{S}g_{S}C_{S}u_{S}g | 16001 | Antisense |
| 272 | S27 | UAGCCCUAGUCACGGCUAGCUGU | 7248 | 22036 | u_{S}a_{S}g_{S}C_{S}C_{S}C_{S}u_{S}a_{S}g_{S}u_{S}C_{S}a_{S}C_{S}g_{S}g_{S}C_{S}u_{S}a_{S}g_{S}C_{S}u_{S}g_{S}u | 16002 | Antisense |
| 273 | S27 | AGCCCUAGUCACGGCUAGCUGUG | 7249 | 22037 | a_{S}g_{S}C_{S}C_{S}C_{S}u_{S}a_{S}g_{S}u_{S}C_{S}a_{S}C_{S}g_{S}g_{S}C_{S}u_{S}a_{S}g_{S}C_{S}u_{S}g_{S}u_{S}g | 16003 | Antisense |
| 274 | S27 | GCCCUAGUCACGGCUAGCUGUGA | 7250 | 22038 | g_{S}C_{S}C_{S}C_{S}u_{S}a 5g_{S}u_{S}C_{S}a_{S}C_{S}g_{S}g_{S}C_{S}u_{S}a_{S}g_{S}C_{S}u_{S}g_{S}u_{S}g_{S}a | 16004 | Antisense |
| 275 | S27 | CCCUAGUCACGGCUAGCUGUGAA | 7251 | 22039 | C_{S}C_{S}C_{S}u_{S}a_{S}g_{S}u_{S}C_{S}a_{S}C_{S}g_{S}g_{S}C_{S}u_{S}a_{S}g_{S}C_{S}u_{S}g_{S}u_{S}g_{S}a_{S}a | 16005 | Antisense |
| 276 | S27 | CCUAGUCACGGCUAGCUGUGAAA | 7252 | 22040 | C_{S}C_{S}u_{S}a_{S}g_{S}u_{S}C5a_{S}C_{S}g_{S}g_{S}C5u_{S}a_{S}g_{S}C5u_{S}g_{S}u_{S}g_{S}a_{S}a_{S}a | 16006 | Antisense |
| 277 | S27 | CUAGUCACGGCUAGCUGUGAAAG | 7253 | 22041 | C_{S}u_{S}a_{S}g_{S}u_{S}C_{S}a_{S}C_{S}g_{S}g_{S}C5u_{S}a_{S}g_{S}C_{S}u_{S}g_{S}u_{S}g_{S}a_{S}a_{S}a_{S}g | 16007 | Antisense |
| 278 | S27 | UAGUCACGGCUAGCUGUGAAAGG | 7254 | 22042 | u_{S}a_{S}g_{S}u_{S}C_{S}a_{S}C_{S}g_{S}g_{S}C_{S}u_{S}a_{S}g_{S}C_{S}u_{S}g_{S}u_{S}g_{S}a_{S}a_{S}a_{S}g_{S}g | 16008 | Antisense |
| 279 | S27 | AGUCACGGCUAGCUGUGAAAGGU | 7255 | 22043 | a_{S}g_{S}u_{S}C_{S}a_{S}C_{S}g_{S}g_{S}C5u_{S}a_{S}g_{S}C_{S}u_{S}g_{S}u_{S}g_{S}a_{S}a_{S}a_{S}g_{S}g_{S}u | 16009 | Antisense |
| 280 | S27 | GUCACGGCUAGCUGUGAAAGGUC | 7256 | 22044 | g_{S}u_{S}C_{S}a_{S}C_{S}g_{S}g_{S}C_{S}u_{S}a_{S}g_{S}C_{S}u_{S}g_{S}u_{S}g_{S}a_{S}a_{S}a_{S}g_{S}g_{S}u_{S}c | 16010 | Antisense |
| 281 | S27 | UCACGGCUAGCUGUGAAAGGUCC | 7257 | 22045 | u_{S}C_{S}a_{S}C_{S}g_{S}g_{S}C_{S}u_{S}a_{S}g_{S}C_{S}u_{S}g_{S}u_{S}g_{S}a_{S}a_{S}a_{S}g_{S}g_{S}u_{S}C_{S}c | 16011 | Antisense |
| 282 | S27 | CACGGCUAGCUGUGAAAGGUCCG | 7258 | 22046 | C_{S}a_{S}C_{S}g_{S}g_{S}C_{S}u_{S}a_{S}g_{S}C_{S}u_{S}g_{S}u_{S}g_{S}a_{S}a_{S}a_{S}g_{S}g_{S}u_{S}C_{S}C_{S}g | 16012 | Antisense |
| 283 | S27 | ACGGCUAGCUGUGAAAGGUCCGU | 7259 | 22047 | a_{S}C_{S}g_{S}g_{S}C_{S}u_{S}a_{S}g_{S}C_{S}u_{S}g_{S}u_{S}g_{S}a_{S}a_{S}a_{S}g_{S}g_{S}u_{S}C_{S}C_{S}g_{S}u | 16013 | Antisense |
| 284 | S27 | CGGCUAGCUGUGAAAGGUCCGUG | 7260 | 22048 | C_{S}g_{S}g_{S}C_{S}u_{S}a_{S}g_{S}C6u_{S}g_{S}u_{S}g_{S}a_{S}a_{S}a_{S}g_{S}g_{S}u_{S}C_{S}C_{S}g_{S}u_{S}g | 16014 | Antisense |
| 285 | S27 | GGCUAGCUGUGAAAGGUCCGUGA | 7261 | 22049 | g_{S}g_{S}C_{S}u_{S}a_{S}g_{S}C_{S}u_{S}g_{S}u_{S}g_{S}a_{S}a_{S}a_{S}g_{S}g_{S}u_{S}C_{S}C_{S}g_{S}u_{S}g_{S}a | 16015 | Antisense |
| 286 | S27 | GCUAGCUGUGAAAGGUCCGUGAG | 7262 | 22050 | g_{S}C_{S}u_{S}a_{S}g_{S}C_{S}u_{S}95u_{S}g_{S}a_{S}a_{S}a_{S}g_{S}g_{S}u_{S}C_{S}C_{S}g_{S}u_{S}g_{S}a_{S}g | 16016 | Antisense |
| 287 | S27 | CUAGCUGUGAAAGGUCCGUGAGC | 7263 | 22051 | C_{S}u_{S}a_{S}g_{S}c_{S}u_{S}g_{S}u_{S}g_{S}a_{S}a_{S}a_{S}g_{S}g_{S}u_{S}C_{S}C_{S}g_{S}u_{S}g_{S}a_{S}g_{S}c | 16017 | Antisense |
| 311 | S27 | GCAUGACUGCAGAGAGUGCUGAU | 7264 | 22052 | g_{S}C_{S}a_{S}u_{S}g_{S}a_{S}C_{S}u_{S}g_{S}C_{S}a_{S}g_{S}a_{S}g_{S}a_{S}g_{S}u_{S}g_{S}C_{S}u_{S}g_{S}a_{S}u | 16018 | Antisense |
| 312 | S27 | CAUGACUGCAGAGAGUGCUGAUA | 7265 | 22053 | C_{S}a_{S}u_{S}g_{S}a_{S}C_{S}u_{S}g_{S}05a_{S}95a_{S}g_{S}a_{S}g_{S}u_{S}g_{S}05u_{S}g_{S}a_{S}u_{S}a | 16019 | Antisense |
| 313 | S27 | AUGACUGCAGAGAGUGCUGAUAC | 7266 | 22054 | a_{S}u_{S}g_{S}a_{S}C_{S}u_{S}g_{S}C_{S}a_{S}g_{S}a_{S}g_{S}a_{S}g_{S}u_{S}g_{S}C_{S}u_{S}g_{S}a_{S}u_{S}a_{S}c | 16020 | Antisense |
| 314 | S27 | UGACUGCAGAGAGUGCUGAUACU | 7267 | 22055 | u_{S}g_{S}a_{S}e5u_{S}g_{S}C_{S}a_{S}g_{S}a_{S}g_{S}a_{S}g_{S}u_{S}g_{S}C_{S}u_{S}g_{S}a_{S}u_{S}a_{S}C_{S}u | 16021 | Antisense |
| 315 | S27 | GACUGCAGAGAGUGCUGAUACUG | 7268 | 22056 | g_{S}a_{S}C_{S}u_{S}g_{S}C_{S}a_{S}g_{S}a_{S}g_{S}a_{S}g_{S}u_{S}g_{S}C_{S}u_{S}g_{S}a_{S}u_{S}a_{S}C_{S}u_{S}g | 16022 | Antisense |
| 316 | S27 | ACUGCAGAGAGUGCUGAUACUGG | 7269 | 22057 | a_{S}C_{S}u_{S}g_{S}C_{S}a_{S}g_{S}a_{S}g_{S}a_{S}g_{S}u_{S}g_{S}C_{S}u_{S}g_{S}a_{S}u_{S}a_{S}C_{S}u_{S}g_{S}g | 16023 | Antisense |
| 317 | S27 | CUGCAGAGAGUGCUGAUACUGGC | 7270 | 22058 | C_{S}u_{S}g_{S}C_{S}a_{S}g_{S}a_{S}g_{S}a_{S}g_{S}u_{S}g_{S}C_{S}u_{S}g_{S}a_{S}u_{S}a_{S}C_{S}u_{S}g_{S}g_{S}c | 16024 | Antisense |
| 318 | S27 | UGCAGAGAGUGCUGAUACUGGCC | 7271 | 22059 | u_{S}g_{S}C_{S}a_{S}g_{S}a_{S}g_{S}a_{S}g_{S}u_{S}g_{S}C_{S}u_{S}g_{S}a_{S}u_{S}a_{S}C_{S}u_{S}g_{S}g_{S}C_{S}c | 16025 | Antisense |
| 319 | S27 | GCAGAGAGUGCUGAUACUGGCCU | 727 | 222060 | g_{S}C_{S}a_{S}g_{S}a_{S}g_{S}a_{S}g_{S}u_{S}g_{S}C_{S}u_{S}g_{S}a_{S}u_{S}a_{S}C_{S}u_{S}g_{S}g_{S}C_{S}C_{S}u | 16026 | Antisense |
| 320 | S27 | CAGAGAGUGCUGAUACUGGCCUC | 7273 | 22061 | c_{S}a_{S}g_{S}a_{S}g_{S}a_{S}g_{S}u_{S}g_{S}C_{S}u_{S}g_{S}a_{S}u_{S}a_{S}C_{S}u_{S}g_{S}g_{S}C_{S}C_{S}u_{S}c | 16027 | Antisense |
| 321 | S27 | AGAGAGUGCUGAUACUGGCCUCU | 7274 | 22062 | a_{S}g_{S}a_{S}g_{S}a_{S}95u_{S}g_{S}C_{S}u_{S}g_{S}a_{S}u_{S}a_{S}C_{S}u_{S}g_{S}g_{S}C_{S}C_{S}u_{S}C_{S}u | 16028 | Antisense |
| 322 | S27 | GAGAGUGCUGAUACUGGCCUCUC | 7275 | 22063 | g_{S}a_{S}g_{S}a_{S}g_{S}u_{S}g_{S}C_{S}u_{S}g_{S}a_{S}u_{S}a_{S}C_{S}u_{S}g_{S}g_{S}C_{S}C_{S}u_{S}c_{S}u_{S}c | 16029 | Antisense |
| 157 | HCV+ | CGGAACCGGUGAG | 7276 | 22524 | c_{S}u_{S}C_{S}a_{S}cc cUGAuGaggccguuaggccGaa Iuuccg B | 16030 | Inozyme |
| 167 | HCV+ | GAGUACACCGGAA | 7277 | 22525 | u_{S}u_{S}C_{S}C_{S}gg cuGAuGaggccguuaggccGaa luacuc B | 16031 | Inozyme |
| 139 | HCV+ | GAGAGCCAUAGUG | 7278 | 22526 | c_{S}a_{S}c_{S}u_{S}aucTGAuGaggccguuaggccGaa Icucuc B | 16032 | Inozyme |
| 140 | HCV+ | AGAGCCAUAGUGG | 7279 | 22527 | c_{S}c_{S}a_{S}c_{S}uacuGAuGaggccguuaggccGaa Igcucu B | 16033 | Inozyme |
| 281 | HCV+ | AAGGCCUUGUGGU | 7280 | 22528 | a_{S}c_{S}c_{S}a_{S}cacUGAuGaggccguuaggccGaa Igccuu B | 16034 | Inozyme |
| 130 | HCV+ | CCCUCCCGGGAGA | 7281 | 22529 | u_{S}c_{S}u_{S}c_{S}cccUGAuGaggccguuaggccGaa Igaggg B | 16035 | Inozyme |
| 280 | HCV+ | AAAGGCCUUGUGG | 728 | 222530 | c_{S}c_{S}a_{S}c_{S}aacuGAuGaggccguuaggccGaa Iccuuu B | 16036 | Inozyme |
| 149 | HCV+ | GUGGUCUGCGGAA | 7283 | 22531 | u_{S}u_{S}C_{S}c_{S}gccUGAuGaggccguuaggccGaa laccac B | 16037 | Inozyme |
| 194 | HCV+ | GGGUCCUUUCUUG | 7284 | 22532 | c_{S}a_{S}a_{S}g_{S}aacUGAuGaggccguuaggccGaa Igaccc B | 16038 | Inozyme |
| 255 | HCV+ | GCUAGCCGAGUAG | 7285 | 22533 | c_{S}u_{S}a_{S}c_{S}uccUGAuGaggccguuaggccGaa Icuago B | 16039 | Inozyme |
| 294 | HCV+ | ACUGCCUGAUAGG | 7286 | 22534 | c_{S}c_{S}u_{S}a_{S}ucctlGAuGaggccguuaggccGaa Igcagu B | 16040 | Inozyme |
| 293 | HCV+ | UACUGCCUGAUAG | 7287 | 22535 | c_{S}u_{S}a_{S}u_{S}cacuGAuGaggccguuaggccGaa Icagua B | 16041 | Inozyme |
| 290 | HCV+ | UGGUACUGCCUGA | 7288 | 22536 | u_{S}c_{S}a_{S}g_{S}gccUGAuGaggccguuaggccGaa luacca B | 16042 | Inozyme |
| 169 | HCV+ | GUACACCGGAAUU | 7289 | 22537 | a_{S}a_{S}u_{S}u_{S}cccUGAuGaggccguuaggccGaa luguac B | 16043 | Inozyme |
| 293 | HCV+ | GUACUGCCUGAUAGG | 7290 | 22544 | c_{S}c_{S}u_{S}a_{S}ucacTlGAuGaggccguuaggccGaa Icaguac B | 16044 | Inozyme |
| 294 | HCV+ | UACUGCCUCAUAGGG | 7291 | 22545 | c_{S}c_{S}c_{S}u_{S}auccUGAuGaggccguuaggccGaa Igcagua B | 16045 | Inozyme |
| 281 | HCV+ | AAAGGCCUUGUGGUA | 729 | 222546 | u_{S}a_{S}c_{S}c_{S}acacUGAuGaggccguuaggccGaa Igccuuu B | 16046 | Inozyme |
| 166 | HCV+ | UGAGUACACCGGA | 7293 | 22549 | u_{S}c_{S}c_{S}g_{S}gucUGAUGaggccguuaggccGaa Uacuca B | 16047 | Amberzyme |
| 168 | HCV+ | AGUACACCGGAAU | 7294 | 22550 | a_{S}u_{S}u_{S}c_{S}cgcUGAUGaggccguuaggccGaa Uguacu B | 16048 | Amberzyme |
| 141 | HCV+ | GAGCCAUAGUGGU | 7295 | 22551 | a_{S}c_{S}c_{S}a_{S}cucUGAUGaggccguuaggccGaa Uggcuc B | 16049 | Amberzyme |
| 156 | HCV+ | GCGGAACCGGUGA | 7296 | 22552 | u_{S}c_{S}a_{S}C_{S}cgcuGAUGaggccguuaggccGaa Uuccgc B | 16050 | Amberzyme |
| 155 | HCV+ | UGCGGAACCGGUG | 7297 | 22553 | c_{S}a_{S}C_{S}c_{S}ggcUGAuGaggccguuaggccGaa Uccgca B | 16051 | Amberzyme |
| 289 | HCV+ | GUGGUACUGCCUG | 7298 | 22554 | c_{S}a_{S}g_{S}g_{S}cacUGAtlGaggccguuaggccGaa Uaccac B | 16052 | Arnberzyme |
| 297 | HCV+ | GCCUGAUAGGGUG | 7299 | 22555 | c_{S}a_{S}c_{S}c_{S}cucuGAUGaggccguuaggccGaa Ucaggc B | 16053 | Amberzyme |
| 166 | HCV+ | GUGAGUACACCGGAA | 7300 | 22556 | u_{S}u_{S}c_{S}C_{S}ggucuGAuGaggccguuaggccGaa Uacucac B | 16054 | Amberzyme |
| 141 | HCV+ | AGAGCCAUAGUGGUC | 7301 | 22557 | g_{S}a_{S}C_{S}c_{S}acucUGAUGaggccguuaggccGaa Uggcucu B | 16055 | Amberzyine |
| 156 | HCV+ | UGCGGAACCGGUGAG | 730 | 222558 | c_{S}u_{S}c_{S}a_{S}ccgcUGAUGaggccguuaggccGaa Uuccgca B | 16056 | Amberzyme |
| 155 | HCV+ | CUGCGGAACCGGUGA | 7303 | 22559 | u_{S}c_{S}a_{S}c_{S}cggcUGAUGaggccguuaggccGaa Uccgcag B | 16057 | Amberzyme |
| 289 | HCV+ | UGUGGUACUGCCUGA | 7304 | 22560 | u_{S}c_{S}a_{S}g_{S}gcacUGAUGaggccguuaggccGaa Uaccaca B | 16058 | Amberzyme |
| 297 | HCV+ | UGCCUGAUAGGGUGC | 7305 | 22561 | g_{S}c_{S}a_{S}c_{S}ccucUGAUGaggccguuaggccGaa Ucaggca B | 16059 | Amberzyme |
| 168 | HCV+ | GAGUACACCGGAAUU | 7306 | 22562 | a_{S}agu_{S}u_{S}ccgcUGAuGaggccguuaggccGaa Uguacuc B | 16060 | Amberzyme |
| 166 | HCV− | UCCGGUGUACUCA | 7307 | 22563 | u_{S}g_{S}a_{S}g_{S}uagccgaaaggCgagugaGguCu accgga B | 16061 | Zinzyme |
| 168 | HCV− | ATCCGCUGUACU | 7308 | 22564 | a_{S}g_{S}u_{S}a_{S}cagccgaaaggCgagugaGguCu cggaau B | 16062 | Zinzyme |
| 138 | HCV− | ACUAUGGCUCUCC | 7309 | 22565 | g_{S}g_{S}a_{S}g_{S}aggccgaaaggCgagugaGguCu cauagu B | 16063 | Zinzyme |
| 156 | HCV− | UCACCGGUUCCGC | 7310 | 22566 | g_{S}c_{S}g_{S}g_{S}aagccgaaaggCgagugaGgucu cgguga B | 16064 | Zinzyme |
| 236 | HCV− | GCGGGGGCACGCC | 7311 | 22567 | g_{S}g_{S}c_{S}g_{S}uggccgaaaggCgagugaGguCu ccccgc B | 16065 | Zinzyme |
| 279 | HCV− | CACAAGGCCUUUC | 731 | 222568 | g_{S}a_{S}a_{S}a_{S}gggccgaaaggCgagugaGguCu cuugug B | 16066 | Zinzyme |
| 151 | HCV− | GGUUCCGCAGACC | 7313 | 22569 | g_{S}g_{S}u_{S}c_{S}uggccgaaaggCgagugaGguCu ggaacc B | 16067 | Zinzyme |
| 292 | HCV− | UAUCAGGCAGUAC | 7314 | 22570 | g_{S}u_{S}a_{S}c_{S}uggccgaaaggCgagugaGguCu cugaua B | 16068 | Zinzyme |
| 289 | HCV− | CAGGCAGUACCAC | 7315 | 22571 | g_{S}u_{S}g_{S}g_{S}uagccgaaaggCgagugaGguCu ugccug B | 16069 | Zinzyme |
| 166 | HCV− | UUCCGGUGUACUCAC | 7316 | 22572 | g_{S}u_{S}g_{S}a_{S}guagccgaaaggCgagugaGguCu accggaa B | 16070 | Zinzyme |
| 279 | HCV− | CCACAAGGCCUUUCG | 7317 | 22573 | c_{S}g_{S}a_{S}a_{S}agggccgaaaggCgagugaGguCu cuugugg B | 16071 | Zinzyme |
| 156 | HCV− | CUCACCGGUUCCGCA | 7318 | 22574 | u_{S}g_{S}c_{S}g_{S}gaagccgaaag_{S}CgagugaGguCu cggugag B | 16072 | Zinzyme |
| 138 | HCV− | CACUAUGGCUCUCCC | 7319 | 22575 | g_{S}g_{S}g_{S}a_{S}gaggccgaaaggCgagugaGgucu cauagug B | 16073 | Zinzyme |
| 151 | HCV− | CGGUUCCGCAGACCA | 7320 | 22576 | u_{S}g_{S}g_{S}u_{S}cuggccgaaaggCgagugaGguCu ggaaccg B | 16074 | Zinzyme |
| 292 | HCV− | CUAUCAGGCAGUACC | 7321 | 22577 | g_{S}g_{S}u_{S}a_{S}cuggccgaaaggCgagugaGguCu cugauag B | 16075 | Zinzyme |
| 289 | HCV− | UCAGGCAGUACCACA | 7322 | 22578 | u_{S}g_{S}u_{S}g_{S}guagccgaaaggCgagugaGguCu ugccuga B | 16076 | Zinzyme |
| 168 | HCV− | AAUUCCGGUGUACUC | 7323 | 22579 | g_{S}a_{S}g_{S}u_{S}acagccgaaaggCgagugaGguCu cggaauu B | 16077 | Zinzyme |
| 163 | HCV− | GGUGUACUCACCG | 7324 | 22580 | C_{S}g_{S}g_{S}u_{S}gacuGAUGaggccguuaggccGaa Uacacc B | 16078 | Amberzyme |
| 159 | HCV− | UACUCACCGGUUC | 7325 | 22581 | g_{S}a_{S}a_{S}C_{S}cgcuGAUGaggccguuaggccGaa Ugagua B | 16079 | Amberzyme |
| 140 | HCV− | CCACUAUGGCUCU | 7326 | 22582 | a_{S}g_{S}a_{S}g_{S}cccuGAUGaggccguuaggccGaa Uagugg B | 16080 | Arnberzyme |
| 281 | HCV− | ACCACAAGGCCUU | 7327 | 22583 | a_{S}a_{S}g_{S}g_{S}cccUGAUGaggccguuaggccGaa Uguggu B | 16081 | Amberzyme |
| 233 | HCV− | GGGGCACGCCCAA | 7328 | 22584 | u_{S}u_{S}g_{S}g_{S}gccuGAUGaggccguuaggccGaa Ugcccc B | 16082 | Amberzyrne |
| 143 | HCV− | AGACCACUAUGGC | 7329 | 22585 | g_{S}c_{S}c_{S}a_{S}uacuGAUGaggccguuaggccGaa Uggucu B | 16083 | Arnberzyrne |
| 146 | HCV− | CGCAGACCACUAU | 7330 | 22586 | a_{S}u_{S}a_{S}g_{S}ugcUGAUGaggccguuaggccGaa Ucugcg B | 16084 | Amberzyme |
| 195 | HCV− | CCAAGAAAGGACC | 7331 | 22587 | g_{S}g_{S}u_{S}c_{S}cucUGAuGaggccguuaggccGaa Ucuugg B | 16085 | Amberzyme |
| 194 | HCV− | CAAGAAAGGACCC | 733 | 222588 | g_{S}g_{S}g_{S}u_{S}cccUGAUGaggccguuaggccGaa Uucuug B | 16086 | Amberzyme |
| 283 | HCV− | GUACCACAAGGCC | 7333 | 22589 | g_{S}g_{S}C_{S}C_{S}uucUGAUGaggccguuaggccGaa Ugguac B | 16087 | Atnberzyme |
| 286 | HCV− | GCAGUACCACAAG | 7334 | 22590 | cgu_{S}u_{S}ggugcUGAuGaggccguuaggccGaa Uacugc B | 16088 | Amberzyme |
| 296 | HCV− | ACCCUAUCAGGCA | 7335 | 22591 | u_{S}g_{S}c_{S}c_{S}ugcuCAuGaggccguuaggccGaa Uagggu B | 16089 | Amberzyme |
| 190 | HCV− | AAAGGACCCGGUC | 7336 | 22592 | g_{S}a_{S}c_{S}c_{S}ggcUGAUGaggccguuaggccGaa Uccuuu B | 16090 | Amberzyme |
| 163 | HCV− | CGGUGUACUCACCGC | 7337 | 22593 | C_{S}c_{S}g_{S}g_{S}ugacUGAUCaggccguuaggccCaa Uacaccg B | 16091 | Amberzyme |
| 140 | HCV− | ACCACUAUGGCUCUC | 7338 | 22594 | g_{S}a_{S}g_{S}a_{S}gcccUGAUGaggccguuaggccGaa Uaguggu B | 16092 | Amberzyme |
| 159 | HCV− | GUACUCACCGGUUCC | 7339 | 22595 | g_{S}g_{S}a_{S}a_{S}ccgcuGAUGaggccguuaggccGaa Ugaguac B | 16093 | Amberzyme |
| 233 | HCV− | GGGGGCACGCCCAAA | 7340 | 22596 | u_{S}u_{S}u_{S}g_{S}ggccUGAUGaggccguuaggccGaa Ugccccc B | 16094 | Amberzyme |
| 143 | HCV− | CAGACCACUAUGCCU | 7341 | 22597 | a_{S}g_{S}c_{S}c_{S}auacUGAUcaggccguuaggccCaa Uggucug B | 16095 | Amberzyme |
| 146 | HCV− | CCGCAGACCACUAUG | 734 | 222598 | c_{S}a_{S}u_{S}a_{S}gugcUGAUGaggccguuaggccGaa Ucugcgg B | 16096 | Arnberzyme |
| 195 | HCV− | UCCAAGAAAGGACCC | 7343 | 22599 | g_{S}g_{S}g_{S}u_{S}ccucuGAUGaggccguuaggccGaa Ucuugga B | 16097 | Amberzyme |
| 283 | HCV− | AGUACCACAAGGCCU | 7344 | 22600 | a_{S}g_{S}g_{S}C_{S}cuucUGAUGaggccguuaggccGaa Ugguacu B | 16098 | Amberzyme |
| 281 | HCV− | UACCACAAGCCCUUU | 7345 | 22601 | a_{S}a_{S}a_{S}g_{S}gcccUGAUGaggccguuaggccGaa Uguggua B | 16099 | Arnberzyme |
| 296 | HCV− | CACCCUAUCAGGCAG | 7346 | 22602 | c_{S}u_{S}g_{S}c_{S}cugcUGAuGaggccguuaggccGaa Uagggug B | 16100 | Amberzyme |
| 286 | HCV− | GGCAGUACCACAAGG | 7347 | 22603 | c_{S}c_{S}u_{S}u_{S}gugcUGAUGaggccguuaggccGaa Uacugcc B | 16101 | Amberzyme |
| 7985 | HCV− | UCUCAGU G UCUUCCA | 7348 | 22719 | uggaaga uGAUg gcauGcacuaugc gCg acugaga B | 16102 | G-cleaver |
| 4832 | HCV− | UGUAUAU G CCUCUCC | 7349 | 22720 | ggagagg uGAUg gcauGcacuaugc gCg auauaca B | 16103 | G-cleaver |
| 4153 | HCV− | ACCGUGU G CCUUAGA | 7350 | 22721 | ucuaagg uGAUg gcauGcacuaugc gCg acacggu B | 16104 | 0-cleaver |
| 3200 | HCV− | GUGGAGU G AGGUGGU | 7351 | 22722 | accaccu uGAUg gcauGcacuaugc gCg acuccac B | 16105 | 0-cleaver |
| 1682 | HCV− | ACGAGUU G AACCUGU | 7352 | 22723 | acagguu uGAUg gcauocacuaugc gCg aacucgu B | 16106 | 0-cleaver |
| 896 | HCV+ | CCUGUCU G ACCAUCC | 7353 | 22724 | ggauggu uGAUg gcauocacuaugc gCg agacagg B | 16107 | 0-cleaver |
| 2504 | HCV+ | UCCUGUU G CUUUUCC | 7354 | 22725 | ggaaaag UGAUg gcauGcacuaugc gCg aacagga B | 16108 | 0-cleaver |
| 2651 | HCV+ | UCCUCGU G UUCUUCU | 7355 | 22726 | agaagaa uGAUg gcauGcacuaugc gCg acgagga B | 16109 | 0-cleaver |
| 4094 | HCV+ | ACAAAGU G CUCGUCC | 7356 | 22727 | ggacgag uGAUg gcauGcacuaugc gCg acuuugu B | 16110 | G-cleaver |
| 8970 | HCV+ | GCCACUU G ACCUACC | 7357 | 22728 | gguaggu uGAUg gcauGcacuaugc gCg aaguggc B | 16111 | 0-cleaver |
| 1200 | HCV+ | CUUCCUC G UCUCUCA | 7358 | 22747 | ugagaga gccgaaaggCgagugaGGuCu gaggaag B | 16112 | Zinzyme |
| 1211 | HCV+ | CUCAOCU G UUCACCU | 7359 | 22748 | aggugaa gccgaaaggCgaguga0GuCu agcugag B | 16113 | Zinzyme |
| 2504 | HCV+ | UCCUGUU G CUUUUCC | 7354 | 22749 | ggaaaag gccgaaaggCgagugaGGuCu aacagga B | 16114 | Zinzyme |
| 2651 | HCV+ | UCCUCGU G UUCUUCU | 7355 | 22750 | agaagaa gccgaaaggCgagugaoGuCu acgagga B | 16115 | Zinzyme |
| 8811 | HCV+ | CACUCCA G UCAACUC | 7360 | 22751 | gaguuga gccgaaaggCgagugaoouCu uggagug B | 16116 | Zinzyme |
| 8594 | HCV− | UCOCCGC G UCCUCUU | 7361 | 22752 | aagagga gccgaaaggCgagugaoouCu gcggcga B | 16117 | Zinzyme |
| 7985 | HCV− | UCUCAGU G UCUUCCA | 7348 | 22753 | uggaaga gccgaaaggCgagugaoouCu acugaga B | 16118 | Zinzyme |
| 6611 | HCV− | CCUCCAC G UACUCCU | 7362 | 22754 | aggagua gccgaaaggCgagugaGGuCu guggagg B | 16119 | Zinzyme |
| 5633 | HCV− | UCCACAU G UGCUUCG | 7363 | 22755 | cgaagca gccgaaaggCgagugaoouCu augugga B | 16120 | Zinzyme |
| 821 | HCV− | UCACGCC G UCUUCCA | 7364 | 22756 | uggaaga gccgaaaggCgagugagguCu ggcguga B | 16121 | Zinzyme |
| 870 | HCV+ | CUCUAUC U UCCUCUU | 7365 | 22775 | aagagga CUgAUgAggccguuaggccgAA Iauagag B | 16122 | Inozyme |
| 1210 | HCV+ | UCUCAGC U GUUCACC | 7366 | 22776 | ggugaac CUgAUgAggccguuaggccgAA Icugaga B | 16123 | Inozyme |
| 2642 | HCV+ | UCCUCUC C UUCCUCG | 7367 | 22777 | cgaggaa CUgAUgAggccguuaggccgAA lagagga B | 16124 | Inozyme |
| 5726 | HCV+ | UCACAGC C UCCAUCA | 7368 | 22778 | ugaugga CUgAUgAggccguuaggccgAA Icuguga B | 16125 | Inozyme |
| 8142 | HCV+ | CUCCACC C UUCCUCA | 7369 | 22779 | ugaggaa CUgAUgAggccguuaggccgAA Iguggag B | 16126 | Inozyme |
| 7990 | HCV− | UGGUGUC U CAGUGUC | 7370 | 22780 | gacacug CUgAUgAggccguuaggccgAA lacacca B | 16127 | Inozyme |
| 7813 | HCV− | CUUCGCC U UCAUCUC | 7371 | 22781 | gagauga CUgAUgAggccguuaggccgAA Igcgaag B | 16128 | Inozyme |
| 7137 | HCV− | ACCUCUC U CUCAUCC | 7372 | 22782 | ggaugag CUgAUgAggccguuaggccgAA Iagaggu B | 16129 | Inozyme |
| 6084 | HCV− | UUCAUCC A CUOCACA | 7373 | 22783 | ugugcag CUgAUgAggccguuaggccgAA Igaugaa B | 16130 | Inozyme |
| 2554 | HCV− | CAACAGC A UCAUCCA | 7374 | 22784 | uggauga CUgAUgAggccguuaggccgAA Icuguug B | 16131 | Inozyme |
| 1202 | HCV+ | UCCUCGU C UCUCAAC | 7375 | 22943 | gcugaga CUgAUgAggccguuaggccgAA Acgagga B | 16132 | Hammerhead |
| 1607 | HCV− | CGCACAU U AACAGGA | 7376 | 22944 | uccuguu CU0AUGAggccguuaggccgAA Augugcc B | 16133 | Hammerhead |
| 2639 | HCV+ | CCAUCCU C UCCUUCC | 7377 | 22945 | ggaagga CUgAUgAggccguuaggccgAA Aggaugc B | 16134 | Hammerhead |
| 6610 | HCV+ | GAGGAGU A COUGGAG | 7378 | 22946 | cuccacg CUgAUgAggccguuaggccgAA Acuccuc B | 16135 | Hammerhead |
| 9014 | HCV+ | GCGCAUU U UCACUCC | 7379 | 22947 | ggaguga CUgAUgAggccguuaggccgAA Aaugcgc B | 16136 | Hammerhead |
| 8605 | HCV− | GACUCGU A GGCUCGC | 7380 | 22948 | gcgagcc CUGAUGAggccguuaggccgAA Acgaguc B | 16137 | Hammerhead |
| 7983 | HCV− | UCAGUGU C UUCCAGC | 7381 | 22949 | gcuggaa CUgAUgAggccguuaggccgAA Acacuga B | 16138 | Hammerhead |
| 7136 | HCV− | CCUCUCU C UCAUCCU | 7382 | 22950 | aggauga CUgAUgAggccguuaggccgAA Agagagg B | 16139 | Hammerhead |
| 6609 | HCV− | UCCACGU A CUCCUCA | 7383 | 22951 | ugaggag CUgAUgAggccguuaggccGAA Acgugga B | 16140 | Hammerhead |
| 6292 | HCV− | CGUGCAU A UCCAGUC | 7384 | 22952 | gacugga CUgAUgAggccguuaggccgAA Augcacg B | 16141 | Hammerhead |
| 867 | HCV+ | UUUCUCU A UCUUCCU | 7385 | 22971 | aggaaga GGCTAGCTACAACGA agagaaa B | 16142 | DNAzyme |
| 1200 | HCV+ | CUUCCUC G UCUCUCA | 7358 | 22972 | ugagaga GGCTAGCTACAACGA gaggaag B | 16143 | DNAzyme |
| 1211 | HCV+ | CUCAOCU G UUCACCU | 7359 | 22973 | aggugaa GGCTAGCTACAACGA agcugag B | 16144 | DNAzyme |
| 5730 | HCV+ | AGCCUCC A UCACCAG | 7386 | 22974 | cugguga GGCTAGCTACAACGA ggaggcu B | 16145 | DNAzyme |
| 6533 | HCV+ | UCAACGC A UACACCA | 7387 | 22975 | uggugua GGCTAGCTACAACGA gcguuga B | 16146 | DNAzyme |
| 8594 | HCV− | UCGCCGC G UCCUCUU | 7361 | 22976 | aagagga GGCTAGCTACAACGA gcggcga B | 16147 | DNAzyme |
| 7810 | HCV− | CGCCUUC A UCUCCUU | 7388 | 22977 | aaggaga GGCTAGCTACAACGA gaaggcg B | 16148 | DNAzyme |
| 7133 | HCV− | CUCUCUC A UCCUCCU | 7389 | 22978 | aggagga GGCTAGCTACAACGA gagagag B | 16149 | DNAzyme |
| 6611 | HCV− | CCUCCAC G UACUCCU | 736 | 222979 | aggagua GGCTAGCTACAACGA guggagg B | 16150 | DNAzyme |
| 2300 | HCV− | CCUCCAA A UCACAAC | 7390 | 22980 | guuguga GGCTAGCTACAACGA uuggagg B | 16151 | DNAzyme |
| 195 | HCV+ | GGGUCCU U UCUUGGA | 7148 | 23072 | c_{S}c_{S}a_{S}a_{S}ga cUGAuGaggcgWWagccGaa Aggacc B | 16152 | Hammerhead |
| 195 | HCV+ | GGGUCCU U UCUUGGA | 7148 | 23076 | WWWWWc_{S}c_{S}a_{S}a_{S}ga cUGAuGaggcguuagccGaa Aggacc B | 16153 | Hammerhead |
| 195 | HCV+ | GGGUCCU U UCUUGGA | 7148 | 23077 | WWWc_{S}c_{S}a_{S}a_{S}ga cUGAuGaggcgWWwagccGaa Aggacg B | 16154 | Hammerhead |
| 195 | HCV+ | GGGUCCU U UCUUGGA | 7148 | 23086 | c_{S}c_{S}a_{S}a_{S}ga cuGAuGaggcgWWWagccGaa Aggacc B | 16155 | Hammerhead |

lower ca_{S}e=2+-O-methyl
UPPER CASE=RIBO
B=inverted deoxy abasic
U=2′-deoxy-2′-aming Uridine
C=2′-deoxy-2′-aming Cytidine
U=2′-deoxy-2′-aming Uridine
Z=BRdU (5-brgmg-2′-deoxy Uridine)
W=acyclic galactgse-amine linker
UNDERLINE=deoxy nuclegtide

[0569] TABLE XXI

ANTI HCV AMINO CONTAINING HAMMERHEAD RIBOZYME
AND CONTROL SEQUENCES

| | | | | |
|---|---|---|---|---|
| | | HCV 5′UTR | | Rz Seq |
| pos | RPI# | Site | Core | ID |

| | | | | | |
|---|---|---|---|---|---|
| | | | Ribozyme Sequences (5′-3′) | | |
| 62 | 12257 | HCV-62 | g_{S}c_{S}g_{S}ugaa cUGAUGaggccguuaggccGaa AcaguagB | Active | 15897 |
| 79 | 12258 | HCV-79 | a_{S}u_{S}g_{S}gcua cUGAUGaggccguuaggccGaa AcgcuuuB | Active | 15898 |
| 81 | 12249 | HCV-81 | c_{S}C_{S}a_{S}uggc cUGAUGaggccguuaggccGaa AgacgcuB | Active | 15899 |
| 104 | 12259 | HCV-104 | g_{S}c_{S}u_{S}gcac cUGAUGaggccguuaggccGaa AcacucaB | Active | 15900 |
| 142 | 12250 | HCV-142 | a_{S}g_{S}a_{S}ccac cUGAUGaggccguuaggccGaa AuggcucB | Active | 15901 |
| 148 | 12251 | HCV-148 | u_{S}u9c_{S}cgca cUGAUGaggccguuaggccGaa AccacuaB | Active | 15902 |
| 165 | 12260 | HCV-165 | u_{S}C_{S}c_{S}ggug cUGAUGaggccguuaggccGaa AcucaccB | Active | 15903 |
| 192 | 12261 | HCV-192 | a_{S}a_{S}g_{S}aaag cUGAuGaggccguuaggccGaa AcccgguB | Active | 15904 |
| 195 | 12252 | HCV-195 | u_{S}c_{S}c_{S}aaga cUGAUGaggccguuaggccGaa AggacccB | Active | 15905 |
| 196 | 12262 | HCV-196 | a_{S}ugC_{S}caag cUGAUGaggccguuaggccGaa AaggaccB | Active | 15906 |
| 270 | 12263 | HCV-270 | c_{S}u_{S}u_{S}ucgc cuGAUGaggccguuaggccGaa AcccaacB | Active | 15907 |
| 282 | 12264 | HCV-282 | g_{S}u_{S}a_{S}ccac cUGAUGaggccguuaggccGaa AggccuuB | Active | 15908 |
| 306 | 12265 | HCV-306 | c_{S}a_{S}C_{S}ucgc cUGAuGaggccguua9gccGaa AgcacccB | Active | 15909 |
| 325 | 12253 | HCV-325 | u_{S}c_{S}u_{S}acga cUGAUGaggccguuaggccGaa AccucccB | Active | 15910 |
| 330 | 12254 | HCV-330 | c_{S}a_{S}c_{S}gguc cUGAUGaggccguuaggccGaa AcgagacB | Active | 15911 |
| | | | Control Sequences | | |
| 79 | 13274 | HCV-79AC2 | c_{S}u_{S}u_{S}aggu cUAGUGaggccguuaggccGau AguucucB | Attenuated | 16171 |
| 81 | 13271 | HCV-81AC | u_{S}c_{S}u_{S}gccg cuAGuGaggccguuaggccGau AgugaccB | Attenuated | 16172 |
| 142 | 13270 | HCV-142AC | a_{S}a_{S}c_{S}ccug cUAGUGaggccguuaggccGau AgcucguB | Attenuated | 16173 |
| 192 | 13272 | HCV-192AC | a_{S}g_{S}u_{S}agaa cUAGUGaggccguuaggccGau AgcugccB | Attenuated | 16174 |
| 195 | 13269 | HCV-195AC | gsa_{S}u_{S}ucca cUAGUcaggccguuaggccGau Acgcgac_{S} | Attenuated | 16175 |
| 282 | 13273 | HCV-282AC | g_{S}c_{S}c_{S}auuc cUAGuGaggccguuaggccGau AucuggcB | Attenuated | 16176 |
| 330 | 13268 | 14CV-330AC | c_{S}c_{S}a_{S}ggcu cUAGUGaggccguuaggccGau AaugcgcB | Attenuated | 16177 |
| 195 | 15291 | HCV-195BAC3 | u_{S}c_{S}c_{S}aaga cUAGUGacgccguuaggcgGaa AggacccB | Attenuated | 16178 |
| 195 | 15292 | HCV-195SAC3 | a_{S}g_{S}a_{S}cuac cUAGuGacgccguuaggcgGaa AcccgagS | Attenuated | 16179 |
| 330 | 15294 | HCV-330BAC | c_{S}a_{S}C_{S}gguc cUAGt7GacgccguuaggcgGaa AcgagacB | Attenuated | 16180 |
| 330 | 15295 | HCV-330SAC | g_{S}c_{S}u_{S}ccga cUAGUGacgccguuaggcgGaa AgacacgB | Attenuated | 16181 |

UPPER CASE = RIBO;
lower case = 2′-O-methyl;
B = inverted deoxyabasic;
s = phosphorothioate linkage
U = 2′-deoxy-2′-amino uridine

[0570] TABLE XXII

ANTI HCV SITE 330 ANTISENSE NUCLEIC ACID AND
SCRAMBLED CONTROL SEQUENCES

| | | | |
|---|---|---|---|
| pos | RPI# | Alias | Seq ID # |

| | | | | |
|---|---|---|---|---|
| | | | Antisense Nucleic Acid | |
| 330 | 17501 | HCV.5-330 | GₛTₛGₛC_{S}TₛC_{S}A_{S}TₛGₛA_{S}TₛGₛC_{S}A_{S}C_{S}G_{S}GₛTₛC_{S}T | 15898 |
| | | antisense | | |
| 330 | 17498 | HCV.5-330 | G_{S}T_{S}G_{S}C_{S}T_{S}C_{S}A6T8G_{S}G_{S}T_{S}G5 C_{S}A_{S}C_{S}G_{S}G_{S}T_{S}C_{S}T | 16182 |
| | | antisense | | |
| | | | Control Sequence | |
| 330 | 17499 | HCV.5-330 | T_{S}G_{S}A_{S}TₛC_{S}A_{S}G_{S}G_{S}T_{S}C_{S}T_{S}G_{S}C_{S}T_{S}G_{S}C_{S}G_{S}T_{S}GₛC | 16183 |
| | | scrambled | | |
| 330 | 17502 | HCV.5-330 | T_{S}G_{S}A_{S}T_{S}C_{S}A_{S}G_{S}G_{S}T_{S}C_{S}T_{S}G_{S}C_{S}T_{S}G_{S}C_{S}A_{S}T_{S}G_{S}C | 16184 |
| | | Scrambled | | |

UPPER CASE = Deoxy Nucleotide
s = phosphorothioate

[0571] TABLE XXIII

| IN VITRO CLEAVAGE DATA, ANTI-HCV ENZYMATIC NUCLEIC ACIDS | | | | | | | | |
|---|---|---|---|---|---|---|---|---|
| | | | | | % Substrate | | | |
| Seq ID # | RPI# | Motif | Site (+/−) | Enzymatic Nucleic Acid Sequence | Cleaved in 3 hours | Substrate Sequence | Seq ID # | Substrate RPI# |

| | | | | | | | | |
|---|---|---|---|---|---|---|---|---|
| 16132 | 22943 | Hammerhead | 1190 (+) | gcugaga CUGAUGAggccguuaggccGAA Acgagga B | 89.67 | UCCUCGU C UCUCAGC B | 7391 | 22897 |
| 16133 | 22944 | Hammerhead | 1595 (+) | uccuguu CUGAUGAggccguuaggccGAA Augugcc B | 90.33 | GGCACAU U AACAGGA B | 7392 | 22898 |
| 16134 | 22945 | Hammerhead | 2627 (+) | ggaagga CUGAUGAggccguuaggccGAA Aggaugc B | 82.54 | GCAUCCU C UCCUUCC B | 7393 | 22899 |
| 16135 | 22946 | Hammerhead | 6598 (+) | cuccacg CUGAUGAggccguuaggccGAA Acuccuc B | 78.06 | GAGGAGU A CGUGGAG B | 7394 | 22900 |
| 16136 | 22947 | Hammerhead | 9002 (+) | ggaguga CUGAUGAggccguuaggccGAA Aaugcgc B | 81.88 | GCGCAUU U UCACUCC B | 7395 | 22901 |
| 16137 | 22948 | Hammerhead | 818 (−) | gcgagcc CUGAUGAggccguuaggccGAA Acgaguc B | 88.34 | GACUCGU A GGCUCGC B | 7396 | 22902 |
| 16138 | 22949 | Hammerhead | 1440 (−) | gcuggaa CUGAUGAggccguuaggccGAA Acacuga B | 89.16 | UCAGUGU C UUCCAGC B | 7397 | 22903 |
| 16139 | 22950 | Hammerhead | 2287 (−) | aggauga CUGAUGAggccguuaggccGAA Agagagg B | 83.43 | CCUCUCU C UCAUCCU B | 7398 | 22904 |
| 16140 | 22951 | Hammerhead | 2814 (−) | ugaggag CUGAUGAggccguuaggccGAA Acgugga B | 83.25 | UCCACGU A CUCCUCA B | 7399 | 22905 |
| 16141 | 22952 | Hammerhead | 3131 (−) | gacugga CUGAUGAggccguuaggccGAA Augcacg B | 86.96 | CGUGCAU A UCCAGUC B | 7400 | 22906 |
| 16142 | 22971 | DNAzyme | 855 (+) | aggaaga GGCTAGCTACAACGA agagaaa B | 92.11 | UUUCUCU A UCUUCCU B | 7401 | 22925 |
| 16143 | 22972 | DNAzyme | 1188 (+) | ugagaga GGCTAGCTACAACGA gaggaag B | 86.38 | CUUCCUC G UCUCUCA B | 7402 | 22926 |
| 16144 | 22973 | DNAzyme | 1199 (+) | aggugaa GGCTAGCTACAACGA agcugag B | 83.15 | CUCAGCU G UUCACCU B | 7403 | 22927 |
| 16145 | 22974 | DNAzyme | 5718 (+) | cugguga GGCTAGCTACAACGA ggaggcu B | 57.82 | AGCCUCC A UCACCAG B | 7404 | 22928 |
| 16146 | 22975 | DNAzyme | 6521 (+) | uggugua GGCTAGCTACAACGA gcguuga B | 75.77 | UCAACGC A UACACCA B | 7405 | 22929 |
| 16147 | 22976 | DNAzyme | 829 (−) | aagagga GGCTAGCTACAACGA gcggcga B | 66.06 | UCGCCGC G UCCUCUU B | 7406 | 22930 |
| 16148 | 22977 | DNAzyme | 1613 (−) | aaggaga GGCTAGCTACAACGA gaaggcg B | 71.28 | CGCCUUC A UCUCCUU B | 7407 | 22931 |
| 16149 | 22978 | DNAzyme | 2290 (−) | aggagga GGCTAGCTACAACGA gagagag B | 61.60 | CUCUCUC A UCCUCCU B | 7408 | 22932 |
| 16150 | 22979 | DNAzyme | 2812 (−) | aggagua GGCTAGCTACAACGA guggagg B | 85.53 | CCUCCAC G UACUCCU B | 7409 | 22933 |
| 16151 | 22980 | DNAzyme | 7123 (−) | guuguga GGCTAGCTACAACGA uuggagg B | 34.60 | CCUCCAA A UCACAAC B | 7410 | 22934 |
| 16102 | 22719 | G-cleaver | 1438 (+) | uggaaga uGAUg gcaugcacuaugcgCg acugaga B | 69.88 | UCUCAGU G UCUUCCA B | 7411 | 22813 |
| 16103 | 22720 | G-cleaver | 4591 (+) | ggagagg uGAUg gcaugcacuaugcgCg auauaca B | 77.74 | UGUAUAU G CCUCUCC B | 7412 | 22814 |
| 16104 | 22721 | G-cleaver | 5270 (+) | ucuaagg uGAUg gcaugcacuaugcgCg acacggu B | 47.37 | ACCGUGU G CCUUAGA B | 7413 | 22815 |
| 16105 | 22722 | G-cleaver | 6223 (+) | accaccu uGAUg gcaugcacuaugcgCg acuccac B | 75.84 | GUGGAGU G AGGUGGU B | 7414 | 22816 |
| 16106 | 22723 | G-cleaver | 7741 (+) | acagguu uGAUg gcaugcacuaugcgCg aacucgu B | 61.58 | ACGAGUU G AACCUGU B | 7415 | 22817 |
| 16107 | 22724 | G-cleaver | 884 (−) | ggauggu uGAUg gcaugcacuaugcgCg agacagg B | 65.16 | CCUGUCU G ACCAUCC B | 7416 | 22818 |
| 16108 | 22725 | G-cleaver | 2492 (−) | ggaaaag uGAUg gcaugcacuaugcgCg aacagga B | 94.66 | UCCUGUU G CUUUUCC B | 7417 | 22819 |
| 16109 | 22726 | G-cleaver | 2639 (−) | agaagaa uGAUg gcaugcacuaugcgCg acgagga B | 82.14 | UCCUCGU G UUCUUCU B | 7418 | 22820 |
| 16110 | 22727 | G-cleaver | 4082 (−) | ggacgag uGAUg gcauGcacuaugcgCg acuuugu B | 67.20 | ACAAAGU G CUCGUCG B | 7419 | 22821 |
| 16111 | 22728 | G-cleaver | 8958 (−) | gguaggu uGAUg gcauGcacuaugcgCg aaguggc B | 81.06 | GCCACUU G ACCUACC B | 7420 | 22822 |
| 1611 | 222747 | Zinzyme | 1188 (+) | ugagaga gccgaaaggCgagugaGGuCu gaggaag B | 66.11 | CUUCCUC G UCUCUCA B | 7402 | 22841 |
| 16113 | 22748 | Zinzyme | 1199 (+) | aggugaa gccgaaaggCgagugaGGuCu agcugag B | 80.28 | CUCAGCU G UUCACCU B | 7403 | 22842 |
| 16114 | 22749 | Zinzyme | 2492 (+) | ggaaaag gccgaaaggCgagugaGGuCu aacagga B | 90.80 | UCCUGUU G CUUUUCC B | 7417 | 22843 |
| 16115 | 22750 | Zinzyme | 2639 (+) | agaagaa gccgaaaggCgagugaGGuCu acgagga B | 80.64 | UCCUCGU G UUCUUCU B | 7418 | 22844 |
| 16116 | 22751 | Zinzyme | 8799 (+) | gaguuga gccgaaaggCgagugagGuCu uggagug B | 14.85 | CACUCCA G UCAACUC B | 7421 | 22845 |
| 16117 | 22752 | Zinzyme | 829 (−) | aagagga gccgaaaggCgagugaGGuCu gcggcga B | 27.83 | UCGCCGC G UCCUCUU B | 7406 | 22846 |
| 16118 | 22753 | Zinzyme | 1438 (−) | uggaaga gccgaaaggCgagugaGGuCu acugaga B | 89.39 | UCUCAGU G UCUUCCA B | 7411 | 22847 |
| 16119 | 22754 | Zinzyme | 2812 (−) | aggagua gccgaaaggCgagugaGGuCu guggagg 8 | 50.40 | CCUCCAC G UACUCCU B | 7409 | 22848 |
| 16120 | 22755 | Zinzyme | 3790 (−) | cgaagca gccgaaaggCgagugaGGuCu augugga B | 81.10 | UCCACAU G UGCUUCG B | 7422 | 22849 |
| 16121 | 22756 | Zinzyme | 8602 (−) | uggaaga gccgaaaggCgagugaGGuCu ggcguga B | 73.47 | UCACGCC G UCUUCCA B | 7423 | 22850 |
| 16122 | 22775 | Inozyme | 858 (+) | aagagga CUGAUGAggccguuaggccGAA Iauagag B | 87.74 | CUCUAUC U UCCUCUU B | 7424 | 22869 |
| 16123 | 22776 | Inozyme | 1198 (+) | ggugaac CUGAUGAggccguuaggccGAA Icugaga B | 84.55 | UCUCAGC U GUUCACC B | 7425 | 22870 |
| 16124 | 22777 | Inozyme | 2630 (+) | cgaggaa CUGAUGAggccguuaggccGAA lagagga B | 90.12 | UCCUCUC C UUCCUCG B | 7426 | 22871 |
| 16125 | 22778 | Inozyme | 5714 (+) | ugaugga CUGAUGAggccguuaggccGAA Icuguga B | 83.77 | UCACAGG C UCCAUCA B | 7427 | 22872 |
| 16126 | 22779 | Inozyme | 8130 (+) | ugaggaa CUGAUGAggccguuaggccGAA Iguggag B | 82.22 | CUCCACC C UUCCUCA B | 7428 | 22873 |
| 16127 | 22780 | Inozyme | 1433 (−) | gacacug CUGAUGAggccguuaggccGAA lacacca B | 87.33 | UGGUGUC U CAGUGUC B | 7429 | 22874 |
| 16128 | 22781 | Inozyme | 1610 (−) | gagauga CUGAUGAggccguuaggccGAA Igcgaag B | 70.67 | CUUCGCC U UCAUCUC B | 7430 | 22875 |
| 16129 | 22782 | Inozyme | 2286 (−) | ggaugag CUGAUGAggccguuaggccGAA Iagaggu B | 78.83 | ACCUCUC U CUCAUCC B | 7431 | 22876 |
| 16130 | 22783 | Inozyme | 3339 (−) | ugugcag CUGAUGAggccguuaggccGAA Igaugaa B | 86.93 | UUCAUCC A CUGCACA B | 7432 | 22877 |
| 16131 | 22784 | Inozyme | 6869 (−) | uggauga CUGAUGAggccguuaggccGAA Icuguug B | 90.41 | CAACAGC A UCAUCCA B | 7433 | 22878 |

In vitro cleavage in 50 mM Tris-Cl, pH 8.0, 40 mM Mg₂₊at 37°, using trace substrate, and enzymatic nucleic acid concentration of 500 nM or greater.
UPPER CASE = RIBO
UNDERLINED = DEOXY
lower case = 2′-O-methyl
B = inverted deoxyabasic
C = 2′-amino C
(+/−) = plus strand/minus strand of HCV genome

What we claim is:

1. A short interfering RNA (siRNA) molecule that down-regulates expression of hepatitis B virus (HBV) RNA, wherein said siRNA comprises nucleotide sequence complementary to said HBV RNA or a portion thereof.

2. The siNA molecule of claim 1, wherein said siRNA molecule is double stranded.

3. The siRNA molecule of claim 2, wherein each strand of said siRNA comprises about 21 nucleotides.

4. The siRNA molecule of claim 2, wherein each strand of said siRNA comprises a 3′-nucleotide overhang.

5. The siRNA molecule of claim 4, wherein said 3′-nucleotide overhang comprises two nucleotides.

6. The siRNA molecule of claim 1, wherein said siRNA molecule is single stranded.

7. The siRNA molecule of claim 1, wherein said siRNA molecule comprises one or more chemically modified nucleotides.

8. The siRNA molecule of claim 7, wherein said chemically modified nucleotide is a 2′-O-alkyl nucleotide.

9. The siRNA molecule of claim 8, wherein said 2′-O-alkyl nucleotides is a 2′-O-methyl nucleotide.

10. The siRNA molecule of claim 8, wherein said 2′-O-alkyl nucleotides is a 2′-O-allyl nucleotide.

11. The siRNA molecule of claim 7, wherein said chemically modified nucleotide is a 2′-deoxy-2′-fluoro nucleotide.

12. The siRNA molecule of claim 7, wherein said chemically modified nucleotide is a 2′-deoxy nucleotide.

13. The siRNA molecule of claim 7, wherein said chemically modified nucleotide comprises one or more phosphorothioate internucleotide linkages.

14. The siRNA molecule of claim 7, wherein said chemically modified nucleotide is a 2′-O-alkyl nucleotide, 2′-deoxy-2′-fluoro nucleotide, 2′-deoxy nucleotide, phosphorothioate containing nucleotide, or any combination thereof.

15. The siRNA molecule of claim 7, wherein said siRNA comprises one or more 2′-O-alkyl and one or more 2′-deoxy-2′-fluoro nucleotides.

16. The siRNA molecule of claim 7, wherein said siRNA comprises one or more 2′-deoxy and one or more 2′-deoxy-2′-fluoro nucleotides.

17. The siRNA molecule of claim 1, wherein said siRNA comprises a terminal cap modification.

18. The siRNA molecule of claim 17, wherein said terminal cap modification comprises an inverted abasic moiety.

19. The siRNA molecule of claim 17, wherein said terminal cap modification is at the 3′-end of said siRNA.

20. The siRNA molecule of claim 1, wherein said siRNA is conjugated to a biologically active molecule.

21. The siRNA molecule of claim 20, wherein said siRNA molecule is conjugated to said biologically active molecule via a biodegradable linker.

22. The siRNA molecule of claim 20, wherein said biologically active molecule comprises a vitamin.

23. The siRNA molecule of claim 20, wherein said biologically active molecule comprises an antibody.

24. The siRNA molecule of claim 20, wherein said biologically active molecule comprises a hormone.

The application's sequence listing, which the Patent Office published only in electronic form, follows.

SEQUENCE LISTING (16207 sequences)

SEQ ID NO: 1 - RNA, 20 nt, Hepatitis B virus
cuaucguccccuucuucauc

SEQ ID NO: 2 - RNA, 14 nt, Hepatitis B virus
cuaccguuccggcc

SEQ ID NO: 3 - RNA, 10 nt, Hepatitis B virus
cuucucaucu

SEQ ID NO: 4 - RNA, 14 nt, Hepatitis B virus
cuucccuucaccac

SEQ ID NO: 5 - RNA, 21 nt, Hepatitis B virus
gacucucagaaugucaacgac

SEQ ID NO: 6 - RNA, 20 nt, Hepatitis B virus
cuguaggcauaaauggucug

SEQ ID NO: 7 - RNA, 25 nt, Hepatitis B virus
guucaccagcaccaugcaacuuuuu

SEQ ID NO: 8 - RNA, 21 nt, Hepatitis B virus
uuucacgucugccuaaucauc

SEQ ID NO: 9 - RNA, 12 nt, Hepatitis B virus
auuuggagcuuc

SEQ ID NO: 10 - RNA, 21 nt, Hepatitis B virus
cugacuucuuuccuucuauuc

SEQ ID NO: 11 - RNA, 18 nt, Hepatitis B virus
cucaccauaccgcacuca

SEQ ID NO: 12 - RNA, 16 nt, Hepatitis B virus
ggcaagcuauucugug

SEQ ID NO: 13 - RNA, 18 nt, Hepatitis B virus
ggaaguaauuuggaagac

SEQ ID NO: 14 - RNA, 18 nt, Hepatitis B virus
cagcuaugucaauguuaa

SEQ ID NO: 15 - RNA, 23 nt, Hepatitis B virus
cuaaaaucggccuaaaaucagac

SEQ ID NO: 16 - RNA, 26 nt, Hepatitis B virus
cauuuccugucucacuuuuggaagag

SEQ ID NO: 17 - RNA, 14 nt, Hepatitis B virus
uccugcuuacagac

SEQ ID NO: 18 - RNA, 28 nt, Hepatitis B virus
caacacuuccggaaacuacuguuguuag

SEQ ID NO: 19 - RNA, 23 nt, Hepatitis B virus
cucgccucgcagacgaaggucuc

SEQ ID NO: 20 - RNA, 20 nt, Hepatitis B virus
caaucgccgcgucgcagaag

SEQ ID NO: 21 - RNA, 22 nt, Hepatitis B virus
aucucaaucucgggaaucucaa

SEQ ID NO: 22 - RNA, 21 nt, Hepatitis B virus
auguuaguaucccuuggacuc

SEQ ID NO: 23 - RNA, 22 nt, Hepatitis B virus
cauaaggugggaaacuuuacug

SEQ ID NO: 24 - RNA, 21 nt, Hepatitis B virus
cuguaccuauucuuuaaaucc

SEQ ID NO: 25 - RNA, 17 nt, Hepatitis B virus
cugaguggcaaacuccc

SEQ ID NO: 26 - RNA, 22 nt, Hepatitis B virus
ccaaauaucugcccuuggacaa

SEQ ID NO: 27 - RNA, 23 nt, Hepatitis B virus
auuaaaccauauuauccugaaca

SEQ ID NO: 28 - RNA, 27 nt, Hepatitis B virus
augcaguuaaucauuacuucaaaacua

SEQ ID NO: 29 - RNA, 13 nt, Hepatitis B virus
aaacuaggcauua

SEQ ID NO: 30 - RNA, 24 nt, Hepatitis B virus
aggcgggcauucuauauaagagag

SEQ ID NO: 31 - RNA, 27 nt, Hepatitis B virus
gaaacuacgcgcagcgccucauuuugu

SEQ ID NO: 32 - RNA, 19 nt, Hepatitis B virus
cauuuugugggucaccaua

SEQ ID NO: 33 - RNA, 18 nt, Hepatitis B virus
caagagcuacagcauggg

SEQ ID NO: 34 - RNA, 17 nt, Hepatitis B Virus
ccaccacuuuccaccaa

SEQ ID NO: 35 - RNA, 17 nt, Hepatitis B Virus
caccacuuuccaccaaa

SEQ ID NO: 36 - RNA, 17 nt, Hepatitis B Virus
accacuuuccaccaaac

SEQ ID NO: 37 - RNA, 17 nt, Hepatitis B Virus
accaaacucuucaagau

SEQ ID NO: 38 - RNA, 17 nt, Hepatitis B Virus
caaacucuucaagaucc

SEQ ID NO: 39 - RNA, 17 nt, Hepatitis B Virus
aaacucuucaagauccc

SEQ ID NO: 40 - RNA, 17 nt, Hepatitis B Virus
uucaagaucccagaguc

SEQ ID NO: 41 - RNA, 17 nt, Hepatitis B Virus
cccagagucagggcccu

SEQ ID NO: 42 - RNA, 17 nt, Hepatitis B Virus
ggcccuguacuuuccug

SEQ ID NO: 43 - RNA, 17 nt, Hepatitis B Virus
ccuguacuuuccugcug

SEQ ID NO: 44 - RNA, 17 nt, Hepatitis B Virus
cuguacuuuccugcugg

SEQ ID NO: 45 - RNA, 17 nt, Hepatitis B Virus
uguacuuuccugcuggu

SEQ ID NO: 46 - RNA, 17 nt, Hepatitis B Virus
ugguggcuccaguucag

SEQ ID NO: 47 - RNA, 17 nt, Hepatitis B Virus
gcuccaguucaggaaca

SEQ ID NO: 48 - RNA, 17 nt, Hepatitis B Virus
cuccaguucaggaacag

SEQ ID NO: 49 - RNA, 17 nt, Hepatitis B Virus
gcccugcucagaauacu

SEQ ID NO: 50 - RNA, 17 nt, Hepatitis B Virus
cucagaauacugucucu

SEQ ID NO: 51 - RNA, 17 nt, Hepatitis B Virus
aauacugucucugccau

SEQ ID NO: 52 - RNA, 17 nt, Hepatitis B Virus
uacugucucugccauau

SEQ ID NO: 53 - RNA, 17 nt, Hepatitis B Virus
ucugccauaucgucaau

SEQ ID NO: 54 - RNA, 17 nt, Hepatitis B Virus
ugccauaucgucaaucu

SEQ ID NO: 55 - RNA, 17 nt, Hepatitis B Virus
cauaucgucaaucuuau

SEQ ID NO: 56 - RNA, 17 nt, Hepatitis B Virus
ucgucaaucuuaucgaa

SEQ ID NO: 57 - RNA, 17 nt, Hepatitis B Virus
gucaaucuuaucgaaga

SEQ ID NO: 58 - RNA, 17 nt, Hepatitis B Virus
ucaaucuuaucgaagac

SEQ ID NO: 59 - RNA, 17 nt, Hepatitis B Virus
aaucuuaucgaagacug

SEQ ID NO: 60 - RNA, 17 nt, Hepatitis B Virus
gacccuguaccgaacau

SEQ ID NO: 61 - RNA, 17 nt, Hepatitis B Virus
gagaacaucgcaucagg

SEQ ID NO: 62 - RNA, 17 nt, Hepatitis B Virus
caucgcaucaggacucc

SEQ ID NO: 63 - RNA, 17 nt, Hepatitis B Virus
ucaggacuccuaggacc

SEQ ID NO: 64 - RNA, 17 nt, Hepatitis B Virus
ggacuccuaggaccccu

SEQ ID NO: 65 - RNA, 17 nt, Hepatitis B Virus
ccccugcucguguuaca

SEQ ID NO: 66 - RNA, 17 nt, Hepatitis B Virus
gcucguguuacaggcgg

SEQ ID NO: 67 - RNA, 17 nt, Hepatitis B Virus
cucguguuacaggcggg

SEQ ID NO: 68 - RNA, 17 nt, Hepatitis B Virus
ggcgggguuuuucuugu

SEQ ID NO: 69 - RNA, 17 nt, Hepatitis B Virus
gcgggguuuuucuuguu

SEQ ID NO: 70 - RNA, 17 nt, Hepatitis B Virus
cgggguuuuucuuguug

SEQ ID NO: 71 - RNA, 17 nt, Hepatitis B Virus
gggguuuuucuuguuga

SEQ ID NO: 72 - RNA, 17 nt, Hepatitis B Virus
ggguuuuucuuguugac

SEQ ID NO: 73 - RNA, 17 nt, Hepatitis B Virus
guuuuucuuguugacaa

SEQ ID NO: 74 - RNA, 17 nt, Hepatitis B Virus
uuucuuguugacaaaaa

SEQ ID NO: 75 - RNA, 17 nt, Hepatitis B Virus
acaaaaauccucacaau

SEQ ID NO: 76 - RNA, 17 nt, Hepatitis B Virus
aaaauccucacaauacc

SEQ ID NO: 77 - RNA, 17 nt, Hepatitis B Virus
cucacaauaccacagag

SEQ ID NO: 78 - RNA, 17 nt, Hepatitis B Virus
cacagagucuagacucg

SEQ ID NO: 79 - RNA, 17 nt, Hepatitis B Virus
cagagucuagacucgug

SEQ ID NO: 80 - RNA, 17 nt, Hepatitis B Virus
ucuagacucguggugga

SEQ ID NO: 81 - RNA, 17 nt, Hepatitis B Virus
gguggacuucucucaau

SEQ ID NO: 82 - RNA, 17 nt, Hepatitis B Virus
guggacuucucucaauu

SEQ ID NO: 83 - RNA, 17 nt, Hepatitis B Virus
ggacuucucucaauuuu

SEQ ID NO: 84 - RNA, 17 nt, Hepatitis B Virus
acuucucucaauuuucu

SEQ ID NO: 85 - RNA, 17 nt, Hepatitis B Virus
cucucaauuuucuaggg

SEQ ID NO: 86 - RNA, 17 nt, Hepatitis B Virus
ucucaauuuucuagggg

SEQ ID NO: 87 - RNA, 17 nt, Hepatitis B Virus
cucaauuuucuaggggg

SEQ ID NO: 88 - RNA, 17 nt, Hepatitis B Virus
ucaauuuucuaggggga

SEQ ID NO: 89 - RNA, 17 nt, Hepatitis B Virus
aauuuucuagggggaac

SEQ ID NO: 90 - RNA, 17 nt, Hepatitis B Virus
ccgugugucuuggccaa

SEQ ID NO: 91 - RNA, 17 nt, Hepatitis B Virus
gugugucuuggccaaaa

SEQ ID NO: 92 - RNA, 17 nt, Hepatitis B Virus
gccaaaauucgcagucc

SEQ ID NO: 93 - RNA, 17 nt, Hepatitis B Virus
ccaaaauucgcaguccc

SEQ ID NO: 94 - RNA, 17 nt, Hepatitis B Virus
uucgcagucccaaaucu

SEQ ID NO: 95 - RNA, 17 nt, Hepatitis B Virus
ucccaaaucuccaguca

SEQ ID NO: 96 - RNA, 17 nt, Hepatitis B Virus
ccaaaucuccagucacu

SEQ ID NO: 97 - RNA, 17 nt, Hepatitis B Virus
ucuccagucacucacca

SEQ ID NO: 98 - RNA, 17 nt, Hepatitis B Virus
cagucacucaccaaccu

SEQ ID NO: 99 - RNA, 17 nt, Hepatitis B Virus
caaccuguuguccucca

SEQ ID NO: 100 - RNA, 17 nt, Hepatitis B Virus
ccuguuguccuccaauu

SEQ ID NO: 101 - RNA, 17 nt, Hepatitis B Virus
guuguccuccaauuugu

SEQ ID NO: 102 - RNA, 17 nt, Hepatitis B Virus
ccuccaauuuguccugg

SEQ ID NO: 103 - RNA, 17 nt, Hepatitis B Virus
cuccaauuuguccuggu

SEQ ID NO: 104 - RNA, 17 nt, Hepatitis B Virus
caauuuguccugguuau

SEQ ID NO: 105 - RNA, 17 nt, Hepatitis B Virus
guccugguuaucgcugg

SEQ ID NO: 106 - RNA, 17 nt, Hepatitis B Virus
uccugguuaucgcugga

SEQ ID NO: 107 - RNA, 17 nt, Hepatitis B Virus
cugguuaucgcuggaug

SEQ ID NO: 108 - RNA, 17 nt, Hepatitis B Virus
ggaugugucugcggcgu

SEQ ID NO: 109 - RNA, 17 nt, Hepatitis B Virus
ugcggcguuuuaucauc

SEQ ID NO: 110 - RNA, 17 nt, Hepatitis B Virus
gcggcguuuuaucaucu

SEQ ID NO: 111 - RNA, 17 nt, Hepatitis B Virus
cggcguuuuaucaucuu

SEQ ID NO: 112 - RNA, 17 nt, Hepatitis B Virus
ggcguuuuaucaucuuc

SEQ ID NO: 113 - RNA, 17 nt, Hepatitis B Virus
cguuuuaucaucuuccu

SEQ ID NO: 114 - RNA, 17 nt, Hepatitis B Virus
uuuaucaucuuccucug

SEQ ID NO: 115 - RNA, 17 nt, Hepatitis B Virus
uaucaucuuccucugca

SEQ ID NO: 116 - RNA, 17 nt, Hepatitis B Virus
aucaucuuccucugcau

SEQ ID NO: 117 - RNA, 17 nt, Hepatitis B Virus
aucuuccucugcauccu

SEQ ID NO: 118 - RNA, 17 nt, Hepatitis B Virus
cucugcauccugcugcu

SEQ ID NO: 119 - RNA, 17 nt, Hepatitis B Virus
cugcugcuaugccucau

SEQ ID NO: 120 - RNA, 17 nt, Hepatitis B Virus
cuaugccucaucuucuu

SEQ ID NO: 121 - RNA, 17 nt, Hepatitis B Virus
ugccucaucuucuuguu

SEQ ID NO: 122 - RNA, 17 nt, Hepatitis B Virus
ccucaucuucuuguugg

SEQ ID NO: 123 - RNA, 17 nt, Hepatitis B Virus
cucaucuucuuguuggu

SEQ ID NO: 124 - RNA, 17 nt, Hepatitis B Virus
caucuucuuguugguuc

SEQ ID NO: 125 - RNA, 17 nt, Hepatitis B Virus
cuucuuguugguucuuc

SEQ ID NO: 126 - RNA, 17 nt, Hepatitis B Virus
uuguugguucuucugga

SEQ ID NO: 127 - RNA, 17 nt, Hepatitis B Virus
uguugguucuucuggac

SEQ ID NO: 128 - RNA, 17 nt, Hepatitis B Virus
uugguucuucuggacua

SEQ ID NO: 129 - RNA, 17 nt, Hepatitis B Virus
ugguucuucuggacuau

SEQ ID NO: 130 - RNA, 17 nt, Hepatitis B Virus
ucuggacuaucaaggua

SEQ ID NO: 131 - RNA, 17 nt, Hepatitis B Virus
uggacuaucaagguaug

SEQ ID NO: 132 - RNA, 17 nt, Hepatitis B Virus
aucaagguauguugccc

SEQ ID NO: 133 - RNA, 17 nt, Hepatitis B Virus
agguauguugcccguuu

SEQ ID NO: 134 - RNA, 17 nt, Hepatitis B Virus
uugcccguuuguccucu

SEQ ID NO: 135 - RNA, 17 nt, Hepatitis B Virus
ugcccguuuguccucua

SEQ ID NO: 136 - RNA, 17 nt, Hepatitis B Virus
ccguuuguccucuaauu

SEQ ID NO: 137 - RNA, 17 nt, Hepatitis B Virus
uuuguccucuaauucca

SEQ ID NO: 138 - RNA, 17 nt, Hepatitis B Virus
uguccucuaauuccagg

SEQ ID NO: 139 - RNA, 17 nt, Hepatitis B Virus
ccucuaauuccaggauc

SEQ ID NO: 140 - RNA, 17 nt, Hepatitis B Virus
cucuaauuccaggauca

SEQ ID NO: 141 - RNA, 17 nt, Hepatitis B Virus
uccaggaucaucaacaa

SEQ ID NO: 142 - RNA, 17 nt, Hepatitis B Virus
aggaucaucaacaacca

SEQ ID NO: 143 - RNA, 17 nt, Hepatitis B Virus
gcacaacuccugcucaa

SEQ ID NO: 144 - RNA, 17 nt, Hepatitis B Virus
cuccugcucaaggaacc

SEQ ID NO: 145 - RNA, 17 nt, Hepatitis B Virus
aggaaccucuauguuuc

SEQ ID NO: 146 - RNA, 17 nt, Hepatitis B Virus
gaaccucuauguuuccc

SEQ ID NO: 147 - RNA, 17 nt, Hepatitis B Virus
cucuauguuucccucau

SEQ ID NO: 148 - RNA, 17 nt, Hepatitis B Virus
ucuauguuucccucaug

SEQ ID NO: 149 - RNA, 17 nt, Hepatitis B Virus
cuauguuucccucaugu

SEQ ID NO: 150 - RNA, 17 nt, Hepatitis B Virus
guuucccucauguugcu

SEQ ID NO: 151 - RNA, 17 nt, Hepatitis B Virus
ccucauguugcuguaca

SEQ ID NO: 152 - RNA, 17 nt, Hepatitis B Virus
guugcuguacaaaaccu

SEQ ID NO: 153 - RNA, 17 nt, Hepatitis B Virus
caaaaccuacggacgga

SEQ ID NO: 154 - RNA, 17 nt, Hepatitis B Virus
gcaccuguauucccauc

SEQ ID NO: 155 - RNA, 17 nt, Hepatitis B Virus
accuguauucccauccc

SEQ ID NO: 156 - RNA, 17 nt, Hepatitis B Virus
ccuguauucccauccca

SEQ ID NO: 157 - RNA, 17 nt, Hepatitis B Virus
auucccaucccaucauc

SEQ ID NO: 158 - RNA, 17 nt, Hepatitis B Virus
caucccaucaucuuggg

SEQ ID NO: 159 - RNA, 17 nt, Hepatitis B Virus
cccaucaucuugggcuu

SEQ ID NO: 160 - RNA, 17 nt, Hepatitis B Virus
caucaucuugggcuuuc

SEQ ID NO: 161 - RNA, 17 nt, Hepatitis B Virus
cuugggcuuucgcaaaa

SEQ ID NO: 162 - RNA, 17 nt, Hepatitis B Virus
uugggcuuucgcaaaau

SEQ ID NO: 163 - RNA, 17 nt, Hepatitis B Virus
ugggcuuucgcaaaaua

SEQ ID NO: 164 - RNA, 17 nt, Hepatitis B Virus
cgcaaaauaccuauggg

SEQ ID NO: 165 - RNA, 17 nt, Hepatitis B Virus
aaauaccuaugggagug

SEQ ID NO: 166 - RNA, 17 nt, Hepatitis B Virus
gugggccucaguccguu

SEQ ID NO: 167 - RNA, 17 nt, Hepatitis B Virus
gccucaguccguuucuc

SEQ ID NO: 168 - RNA, 17 nt, Hepatitis B Virus
caguccguuucucuugg

SEQ ID NO: 169 - RNA, 17 nt, Hepatitis B Virus
aguccguuucucuuggc

SEQ ID NO: 170 - RNA, 17 nt, Hepatitis B Virus
guccguuucucuuggcu

SEQ ID NO: 171 - RNA, 17 nt, Hepatitis B Virus
ccguuucucuuggcuca

SEQ ID NO: 172 - RNA, 17 nt, Hepatitis B Virus
guuucucuuggcucagu

SEQ ID NO: 173 - RNA, 17 nt, Hepatitis B Virus
ucuuggcucaguuuacu

SEQ ID NO: 174 - RNA, 17 nt, Hepatitis B Virus
ggcucaguuuacuagug

SEQ ID NO: 175 - RNA, 17 nt, Hepatitis B Virus
gcucaguuuacuagugc

SEQ ID NO: 176 - RNA, 17 nt, Hepatitis B Virus
cucaguuuacuagugcc

SEQ ID NO: 177 - RNA, 17 nt, Hepatitis B Virus
aguuuacuagugccauu

SEQ ID NO: 178 - RNA, 17 nt, Hepatitis B Virus
agugccauuuguucagu

SEQ ID NO: 179 - RNA, 17 nt, Hepatitis B Virus
gugccauuuguucagug

SEQ ID NO: 180 - RNA, 17 nt, Hepatitis B Virus
ccauuuguucagugguu

SEQ ID NO: 181 - RNA, 17 nt, Hepatitis B Virus
cauuuguucagugguuc

SEQ ID NO: 182 - RNA, 17 nt, Hepatitis B Virus
ucagugguucguagggc

SEQ ID NO: 183 - RNA, 17 nt, Hepatitis B Virus
cagugguucguagggcu

SEQ ID NO: 184 - RNA, 17 nt, Hepatitis B Virus
ugguucguagggcuuuc

SEQ ID NO: 185 - RNA, 17 nt, Hepatitis B Virus
guagggcuuucccccac

SEQ ID NO: 186 - RNA, 17 nt, Hepatitis B Virus
uagggcuuucccccacu

SEQ ID NO: 187 - RNA, 17 nt, Hepatitis B Virus
agggcuuucccccacug

SEQ ID NO: 188 - RNA, 17 nt, Hepatitis B Virus
cccacugucuggcuuuc

SEQ ID NO: 189 - RNA, 17 nt, Hepatitis B Virus
gucuggcuuucaguuau

SEQ ID NO: 190 - RNA, 17 nt, Hepatitis B Virus
ucuggcuuucaguuaua

SEQ ID NO: 191 - RNA, 17 nt, Hepatitis B Virus
cuggcuuucaguuauau

SEQ ID NO: 192 - RNA, 17 nt, Hepatitis B Virus
cuuucaguuauauggau

SEQ ID NO: 193 - RNA, 17 nt, Hepatitis B Virus
uuucaguuauauggaug

SEQ ID NO: 194 - RNA, 17 nt, Hepatitis B Virus
ucaguuauauggaugau

SEQ ID NO: 195 - RNA, 17 nt, Hepatitis B Virus
gaugugguuuugggggc

SEQ ID NO: 196 - RNA, 17 nt, Hepatitis B Virus
augugguuuugggggcc

SEQ ID NO: 197 - RNA, 17 nt, Hepatitis B Virus
ugugguuuugggggcca

SEQ ID NO: 198 - RNA, 17 nt, Hepatitis B Virus
ggccaagucuguacaac

SEQ ID NO: 199 - RNA, 17 nt, Hepatitis B Virus
aagucuguacaacaucu

SEQ ID NO: 200 - RNA, 17 nt, Hepatitis B Virus
uacaacaucuugagucc

SEQ ID NO: 201 - RNA, 17 nt, Hepatitis B Virus
caacaucuugagucccu

SEQ ID NO: 202 - RNA, 17 nt, Hepatitis B Virus
ucuugagucccuuuaug

SEQ ID NO: 203 - RNA, 17 nt, Hepatitis B Virus
gagucccuuuaugccgc

SEQ ID NO: 204 - RNA, 17 nt, Hepatitis B Virus
agucccuuuaugccgcu

SEQ ID NO: 205 - RNA, 17 nt, Hepatitis B Virus
gucccuuuaugccgcug

SEQ ID NO: 206 - RNA, 17 nt, Hepatitis B Virus
gccgcuguuaccaauuu

SEQ ID NO: 207 - RNA, 17 nt, Hepatitis B Virus
ccgcuguuaccaauuuu

SEQ ID NO: 208 - RNA, 17 nt, Hepatitis B Virus
uuaccaauuuucuuuug

SEQ ID NO: 209 - RNA, 17 nt, Hepatitis B Virus
uaccaauuuucuuuugu

SEQ ID NO: 210 - RNA, 17 nt, Hepatitis B Virus
accaauuuucuuuuguc

SEQ ID NO: 211 - RNA, 17 nt, Hepatitis B Virus
ccaauuuucuuuugucu

SEQ ID NO: 212 - RNA, 17 nt, Hepatitis B Virus
aauuuucuuuugucuuu

SEQ ID NO: 213 - RNA, 17 nt, Hepatitis B Virus
auuuucuuuugucuuug

SEQ ID NO: 214 - RNA, 17 nt, Hepatitis B Virus
uuuucuuuugucuuugg

SEQ ID NO: 215 - RNA, 17 nt, Hepatitis B Virus
ucuuuugucuuugggua

SEQ ID NO: 216 - RNA, 17 nt, Hepatitis B Virus
uuuugucuuuggguaua

SEQ ID NO: 217 - RNA, 17 nt, Hepatitis B Virus
uuugucuuuggguauac

SEQ ID NO: 218 - RNA, 17 nt, Hepatitis B Virus
cuuuggguauacauuua

SEQ ID NO: 219 - RNA, 17 nt, Hepatitis B Virus
uuggguauacauuuaaa

SEQ ID NO: 220 - RNA, 17 nt, Hepatitis B Virus
guauacauuuaaacccu

SEQ ID NO: 221 - RNA, 17 nt, Hepatitis B Virus
uauacauuuaaacccuc

SEQ ID NO: 222 - RNA, 17 nt, Hepatitis B Virus
auacauuuaaacccuca

SEQ ID NO: 223 - RNA, 17 nt, Hepatitis B Virus
uaaacccucacaaaaca

SEQ ID NO: 224 - RNA, 17 nt, Hepatitis B Virus
auggggauauucccuua

SEQ ID NO: 225 - RNA, 17 nt, Hepatitis B Virus
ggggauauucccuuaac

SEQ ID NO: 226 - RNA, 17 nt, Hepatitis B Virus
gggauauucccuuaacu

SEQ ID NO: 227 - RNA, 17 nt, Hepatitis B Virus
uauucccuuaacuucau

SEQ ID NO: 228 - RNA, 17 nt, Hepatitis B Virus
auucccuuaacuucaug

SEQ ID NO: 229 - RNA, 17 nt, Hepatitis B Virus
ccuuaacuucaugggau

SEQ ID NO: 230 - RNA, 17 nt, Hepatitis B Virus
cuuaacuucaugggaua

SEQ ID NO: 231 - RNA, 17 nt, Hepatitis B Virus
caugggauauguaauug

SEQ ID NO: 232 - RNA, 17 nt, Hepatitis B Virus
ggauauguaauugggag

SEQ ID NO: 233 - RNA, 17 nt, Hepatitis B Virus
uauguaauugggaguug

SEQ ID NO: 234 - RNA, 17 nt, Hepatitis B Virus
uugggaguuggggcaca

SEQ ID NO: 235 - RNA, 17 nt, Hepatitis B Virus
gggcacauugccacagg

SEQ ID NO: 236 - RNA, 17 nt, Hepatitis B Virus
aggaacauauuguacaa

SEQ ID NO: 237 - RNA, 17 nt, Hepatitis B Virus
gaacauauuguacaaaa

SEQ ID NO: 238 - RNA, 17 nt, Hepatitis B Virus
cauauuguacaaaaaau

SEQ ID NO: 239 - RNA, 17 nt, Hepatitis B Virus
caaaaaaucaaaaugug

SEQ ID NO: 240 - RNA, 17 nt, Hepatitis B Virus
aaauguguuuuaggaaa

SEQ ID NO: 241 - RNA, 17 nt, Hepatitis B Virus
aauguguuuuaggaaac

SEQ ID NO: 242 - RNA, 17 nt, Hepatitis B Virus
auguguuuuaggaaacu

SEQ ID NO: 243 - RNA, 17 nt, Hepatitis B Virus
uguguuuuaggaaacuu

SEQ ID NO: 244 - RNA, 17 nt, Hepatitis B Virus
aggaaacuuccuguaaa

SEQ ID NO: 245 - RNA, 17 nt, Hepatitis B Virus
ggaaacuuccuguaaac

SEQ ID NO: 246 - RNA, 17 nt, Hepatitis B Virus
cuuccuguaaacaggcc

SEQ ID NO: 247 - RNA, 17 nt, Hepatitis B Virus
acaggccuauugauugg

SEQ ID NO: 248 - RNA, 17 nt, Hepatitis B Virus
aggccuauugauuggaa

SEQ ID NO: 249 - RNA, 17 nt, Hepatitis B Virus
cuauugauuggaaagua

SEQ ID NO: 250 - RNA, 17 nt, Hepatitis B Virus
uggaaaguaugucaacg

SEQ ID NO: 251 - RNA, 17 nt, Hepatitis B Virus
aaguaugucaacgaauu

SEQ ID NO: 252 - RNA, 17 nt, Hepatitis B Virus
caacgaauugugggucu

SEQ ID NO: 253 - RNA, 17 nt, Hepatitis B Virus
uugugggucuuuugggg

SEQ ID NO: 254 - RNA, 17 nt, Hepatitis B Virus
gugggucuuuugggguu

SEQ ID NO: 255 - RNA, 17 nt, Hepatitis B Virus
ugggucuuuugggguuu

SEQ ID NO: 256 - RNA, 17 nt, Hepatitis B Virus
gggucuuuugggguuug

SEQ ID NO: 257 - RNA, 17 nt, Hepatitis B Virus
uuugggguuugccgccc

SEQ ID NO: 258 - RNA, 17 nt, Hepatitis B Virus
uugggguuugccgcccc

SEQ ID NO: 259 - RNA, 17 nt, Hepatitis B Virus
ccgccccuuucacgcaa

SEQ ID NO: 260 - RNA, 17 nt, Hepatitis B Virus
cgccccuuucacgcaau

SEQ ID NO: 261 - RNA, 17 nt, Hepatitis B Virus
gccccuuucacgcaaug

SEQ ID NO: 262 - RNA, 17 nt, Hepatitis B Virus
auguggauauucugcuu

SEQ ID NO: 263 - RNA, 17 nt, Hepatitis B Virus
guggauauucugcuuua

SEQ ID NO: 264 - RNA, 17 nt, Hepatitis B Virus
uggauauucugcuuuaa

SEQ ID NO: 265 - RNA, 17 nt, Hepatitis B Virus
auucugcuuuaaugccu

SEQ ID NO: 266 - RNA, 17 nt, Hepatitis B Virus
uucugcuuuaaugccuu

SEQ ID NO: 267 - RNA, 17 nt, Hepatitis B Virus
ucugcuuuaaugccuuu

SEQ ID NO: 268 - RNA, 17 nt, Hepatitis B Virus
uaaugccuuuauaugca

SEQ ID NO: 269 - RNA, 17 nt, Hepatitis B Virus
aaugccuuuauaugcau

SEQ ID NO: 270 - RNA, 17 nt, Hepatitis B Virus
augccuuuauaugcaug

SEQ ID NO: 271 - RNA, 17 nt, Hepatitis B Virus
gccuuuauaugcaugca

SEQ ID NO: 272 - RNA, 17 nt, Hepatitis B Virus
gcaugcauacaagcaaa

SEQ ID NO: 273 - RNA, 17 nt, Hepatitis B Virus
aacaggcuuuuacuuuc

SEQ ID NO: 274 - RNA, 17 nt, Hepatitis B Virus
acaggcuuuuacuuucu

SEQ ID NO: 275 - RNA, 17 nt, Hepatitis B Virus
caggcuuuuacuuucuc

SEQ ID NO: 276 - RNA, 17 nt, Hepatitis B Virus
aggcuuuuacuuucucg

SEQ ID NO: 277 - RNA, 17 nt, Hepatitis B Virus
cuuuuacuuucucgcca

SEQ ID NO: 278 - RNA, 17 nt, Hepatitis B Virus
uuuuacuuucucgccaa

SEQ ID NO: 279 - RNA, 17 nt, Hepatitis B Virus
uuuacuuucucgccaac

SEQ ID NO: 280 - RNA, 17 nt, Hepatitis B Virus
uacuuucucgccaacuu

SEQ ID NO: 281 - RNA, 17 nt, Hepatitis B Virus
cgccaacuuacaaggcc

SEQ ID NO: 282 - RNA, 17 nt, Hepatitis B Virus
gccaacuuacaaggccu

SEQ ID NO: 283 - RNA, 17 nt, Hepatitis B Virus
caaggccuuucuaagua

SEQ ID NO: 284 - RNA, 17 nt, Hepatitis B Virus
aaggccuuucuaaguaa

SEQ ID NO: 285 - RNA, 17 nt, Hepatitis B Virus
aggccuuucuaaguaaa

SEQ ID NO: 286 - RNA, 17 nt, Hepatitis B Virus
gccuuucuaaguaaaca

SEQ ID NO: 287 - RNA, 17 nt, Hepatitis B Virus
uucuaaguaaacaguau

SEQ ID NO: 288 - RNA, 17 nt, Hepatitis B Virus
uaaacaguaugugaacc

SEQ ID NO: 289 - RNA, 17 nt, Hepatitis B Virus
gugaaccuuuaccccgu

SEQ ID NO: 290 - RNA, 17 nt, Hepatitis B Virus
ugaaccuuuaccccguu

SEQ ID NO: 291 - RNA, 17 nt, Hepatitis B Virus
gaaccuuuaccccguug

SEQ ID NO: 292 - RNA, 17 nt, Hepatitis B Virus
uaccccguugcucggca

SEQ ID NO: 293 - RNA, 17 nt, Hepatitis B Virus
ccguugcucggcaacgg

SEQ ID NO: 294 - RNA, 17 nt, Hepatitis B Virus
ggccuggucuaugccaa

SEQ ID NO: 295 - RNA, 17 nt, Hepatitis B Virus
ccuggucuaugccaagu

SEQ ID NO: 296 - RNA, 17 nt, Hepatitis B Virus
ccaaguguuugcugacg

SEQ ID NO: 297 - RNA, 17 nt, Hepatitis B Virus
caaguguuugcugacgc

SEQ ID NO: 298 - RNA, 17 nt, Hepatitis B Virus
ccacugguuggggcuug

SEQ ID NO: 299 - RNA, 17 nt, Hepatitis B Virus
uuggggcuuggccauag

SEQ ID NO: 300 - RNA, 17 nt, Hepatitis B Virus
uuggccauaggccauca

SEQ ID NO: 301 - RNA, 17 nt, Hepatitis B Virus
uaggccaucagcgcaug

SEQ ID NO: 302 - RNA, 17 nt, Hepatitis B Virus
uggaaccuuugugucuc

SEQ ID NO: 303 - RNA, 17 nt, Hepatitis B Virus
ggaaccuuugugucucc

SEQ ID NO: 304 - RNA, 17 nt, Hepatitis B Virus
cuuugugucuccucugc

SEQ ID NO: 305 - RNA, 17 nt, Hepatitis B Virus
uugugucuccucugccg

SEQ ID NO: 306 - RNA, 17 nt, Hepatitis B Virus
ugucuccucugccgauc

SEQ ID NO: 307 - RNA, 17 nt, Hepatitis B Virus
cugccgauccauaccgc

SEQ ID NO: 308 - RNA, 17 nt, Hepatitis B Virus
cgauccauaccgcggaa

SEQ ID NO: 309 - RNA, 17 nt, Hepatitis B Virus
gcggaacuccuagccgc

SEQ ID NO: 310 - RNA, 17 nt, Hepatitis B Virus
gaacuccuagccgcuug

SEQ ID NO: 311 - RNA, 17 nt, Hepatitis B Virus
uagccgcuuguuuugcu

SEQ ID NO: 312 - RNA, 17 nt, Hepatitis B Virus
ccgcuuguuuugcucgc

SEQ ID NO: 313 - RNA, 17 nt, Hepatitis B Virus
cgcuuguuuugcucgca

SEQ ID NO: 314 - RNA, 17 nt, Hepatitis B Virus
gcuuguuuugcucgcag

SEQ ID NO: 315 - RNA, 17 nt, Hepatitis B Virus
guuuugcucgcagcagg

SEQ ID NO: 316 - RNA, 17 nt, Hepatitis B Virus
cagcaggucuggggcaa

SEQ ID NO: 317 - RNA, 17 nt, Hepatitis B Virus
gcaaaacucaucgggac

SEQ ID NO: 318 - RNA, 17 nt, Hepatitis B Virus
aaacucaucgggacuga

SEQ ID NO: 319 - RNA, 17 nt, Hepatitis B Virus
cugacaauucugucgug

SEQ ID NO: 320 - RNA, 17 nt, Hepatitis B Virus
ugacaauucugucgugc

SEQ ID NO: 321 - RNA, 17 nt, Hepatitis B Virus
aauucugucgugcucuc

SEQ ID NO: 322 - RNA, 17 nt, Hepatitis B Virus
gucgugcucucccgcaa

SEQ ID NO: 323 - RNA, 17 nt, Hepatitis B Virus
cgugcucucccgcaaau

SEQ ID NO: 324 - RNA, 17 nt, Hepatitis B Virus
ccgcaaauauacaucau

SEQ ID NO: 325 - RNA, 17 nt, Hepatitis B Virus
gcaaauauacaucauuu

SEQ ID NO: 326 - RNA, 17 nt, Hepatitis B Virus
auauacaucauuuccau

SEQ ID NO: 327 - RNA, 17 nt, Hepatitis B Virus
uacaucauuuccauggc

SEQ ID NO: 328 - RNA, 17 nt, Hepatitis B Virus
acaucauuuccauggcu

SEQ ID NO: 329 - RNA, 17 nt, Hepatitis B Virus
caucauuuccauggcug

SEQ ID NO: 330 - RNA, 17 nt, Hepatitis B Virus
uggcugcuaggcugugc

SEQ ID NO: 331 - RNA, 17 nt, Hepatitis B Virus
aacuggauccuacgcgg

SEQ ID NO: 332 - RNA, 17 nt, Hepatitis B Virus
uggauccuacgcgggac

SEQ ID NO: 333 - RNA, 17 nt, Hepatitis B Virus
cgggacguccuuuguuu

SEQ ID NO: 334 - RNA, 17 nt, Hepatitis B Virus
gacguccuuuguuuacg

SEQ ID NO: 335 - RNA, 17 nt, Hepatitis B Virus
acguccuuuguuuacgu

SEQ ID NO: 336 - RNA, 17 nt, Hepatitis B Virus
uccuuuguuuacguccc

SEQ ID NO: 337 - RNA, 17 nt, Hepatitis B Virus
ccuuuguuuacgucccg

SEQ ID NO: 338 - RNA, 17 nt, Hepatitis B Virus
cuuuguuuacgucccgu

SEQ ID NO: 339 - RNA, 17 nt, Hepatitis B Virus
guuuacgucccgucggc

SEQ ID NO: 340 - RNA, 17 nt, Hepatitis B Virus
cgucccgucggcgcuga

SEQ ID NO: 341 - RNA, 17 nt, Hepatitis B Virus
cgcugaaucccgcggac

SEQ ID NO: 342 - RNA, 17 nt, Hepatitis B Virus
cgaccccucccggggcc

SEQ ID NO: 343 - RNA, 17 nt, Hepatitis B Virus
gggccgcuuggggcucu

SEQ ID NO: 344 - RNA, 17 nt, Hepatitis B Virus
uuggggcucuaccgccc

SEQ ID NO: 345 - RNA, 17 nt, Hepatitis B Virus
ggggcucuaccgcccgc

SEQ ID NO: 346 - RNA, 17 nt, Hepatitis B Virus
cgcccgcuucuccgccu

SEQ ID NO: 347 - RNA, 17 nt, Hepatitis B Virus
gcccgcuucuccgccua

SEQ ID NO: 348 - RNA, 17 nt, Hepatitis B Virus
ccgcuucuccgccuauu

SEQ ID NO: 349 - RNA, 17 nt, Hepatitis B Virus
cuccgccuauuguaccg

SEQ ID NO: 350 - RNA, 17 nt, Hepatitis B Virus
ccgccuauuguaccgac

SEQ ID NO: 351 - RNA, 17 nt, Hepatitis B Virus
ccuauuguaccgaccgu

SEQ ID NO: 352 - RNA, 17 nt, Hepatitis B Virus
ccgaccguccacggggc

SEQ ID NO: 353 - RNA, 17 nt, Hepatitis B Virus
gcgcaccucucuuuacg

SEQ ID NO: 354 - RNA, 17 nt, Hepatitis B Virus
gcaccucucuuuacgcg

SEQ ID NO: 355 - RNA, 17 nt, Hepatitis B Virus
accucucuuuacgcgga

SEQ ID NO: 356 - RNA, 17 nt, Hepatitis B Virus
ccucucuuuacgcggac

SEQ ID NO: 357 - RNA, 17 nt, Hepatitis B Virus
cucucuuuacgcggacu

SEQ ID NO: 358 - RNA, 17 nt, Hepatitis B Virus
cgcggacuccccgucug

SEQ ID NO: 359 - RNA, 17 nt, Hepatitis B Virus
cuccccgucugugccuu

SEQ ID NO: 360 - RNA, 17 nt, Hepatitis B Virus
cugugccuucucaucug

SEQ ID NO: 361 - RNA, 17 nt, Hepatitis B Virus
ugugccuucucaucugc

SEQ ID NO: 362 - RNA, 17 nt, Hepatitis B Virus
ugccuucucaucugccg

SEQ ID NO: 363 - RNA, 17 nt, Hepatitis B Virus
cuucucaucugccggac

SEQ ID NO: 364 - RNA, 17 nt, Hepatitis B Virus
ugugcacuucgcuucac

SEQ ID NO: 365 - RNA, 17 nt, Hepatitis B Virus
gugcacuucgcuucacc

SEQ ID NO: 366 - RNA, 17 nt, Hepatitis B Virus
acuucgcuucaccucug

SEQ ID NO: 367 - RNA, 17 nt, Hepatitis B Virus
cuucgcuucaccucugc

SEQ ID NO: 368 - RNA, 17 nt, Hepatitis B Virus
cuucaccucugcacguc

SEQ ID NO: 369 - RNA, 17 nt, Hepatitis B Virus
cugcacgucgcauggag

SEQ ID NO: 370 - RNA, 17 nt, Hepatitis B Virus
cccaaggucuugcauaa

SEQ ID NO: 371 - RNA, 17 nt, Hepatitis B Virus
caaggucuugcauaaga

SEQ ID NO: 372 - RNA, 17 nt, Hepatitis B Virus
ucuugcauaagaggacu

SEQ ID NO: 373 - RNA, 17 nt, Hepatitis B Virus
agaggacucuuggacuu

SEQ ID NO: 374 - RNA, 17 nt, Hepatitis B Virus
aggacucuuggacuuuc

SEQ ID NO: 375 - RNA, 17 nt, Hepatitis B Virus
cuuggacuuucagcaau

SEQ ID NO: 376 - RNA, 17 nt, Hepatitis B Virus
uuggacuuucagcaaug

SEQ ID NO: 377 - RNA, 17 nt, Hepatitis B Virus
uggacuuucagcaaugu

SEQ ID NO: 378 - RNA, 17 nt, Hepatitis B Virus
agcaaugucaacgaccg

SEQ ID NO: 379 - RNA, 17 nt, Hepatitis B Virus
accgaccuugaggcaua

SEQ ID NO: 380 - RNA, 17 nt, Hepatitis B Virus
ugaggcauacuucaaag

SEQ ID NO: 381 - RNA, 17 nt, Hepatitis B Virus
ggcauacuucaaagacu

SEQ ID NO: 382 - RNA, 17 nt, Hepatitis B Virus
gcauacuucaaagacug

SEQ ID NO: 383 - RNA, 17 nt, Hepatitis B Virus
cuguguguuuaaugagu

SEQ ID NO: 384 - RNA, 17 nt, Hepatitis B Virus
uguguguuuaaugagug

SEQ ID NO: 385 - RNA, 17 nt, Hepatitis B Virus
guguguuuaaugagugg

SEQ ID NO: 386 - RNA, 17 nt, Hepatitis B Virus
ggaggaguugggggagg

SEQ ID NO: 387 - RNA, 17 nt, Hepatitis B Virus
gaggagguuagguuaaa

SEQ ID NO: 388 - RNA, 17 nt, Hepatitis B Virus
aggagguuagguuaaag

SEQ ID NO: 389 - RNA, 17 nt, Hepatitis B Virus
gguuagguuaaaggucu

SEQ ID NO: 390 - RNA, 17 nt, Hepatitis B Virus
guuagguuaaaggucuu

SEQ ID NO: 391 - RNA, 17 nt, Hepatitis B Virus
uuaaaggucuuuguacu

SEQ ID NO: 392 - RNA, 17 nt, Hepatitis B Virus
aaaggucuuuguacuag

SEQ ID NO: 393 - RNA, 17 nt, Hepatitis B Virus
aaggucuuuguacuagg

SEQ ID NO: 394 - RNA, 17 nt, Hepatitis B Virus
gucuuuguacuaggagg

SEQ ID NO: 395 - RNA, 17 nt, Hepatitis B Virus
uuuguacuaggaggcug

SEQ ID NO: 396 - RNA, 17 nt, Hepatitis B Virus
gaggcuguaggcauaaa

SEQ ID NO: 397 - RNA, 17 nt, Hepatitis B Virus
guaggcauaaauuggug

SEQ ID NO: 398 - RNA, 17 nt, Hepatitis B Virus
gcauaaauugguguguu

SEQ ID NO: 399 - RNA, 17 nt, Hepatitis B Virus
ugguguguucaccagca

SEQ ID NO: 400 - RNA, 17 nt, Hepatitis B Virus
gguguguucaccagcac

SEQ ID NO: 401 - RNA, 17 nt, Hepatitis B Virus
augcaacuuuuucaccu

SEQ ID NO: 402 - RNA, 17 nt, Hepatitis B Virus
ugcaacuuuuucaccuc

SEQ ID NO: 403 - RNA, 17 nt, Hepatitis B Virus
gcaacuuuuucaccucu

SEQ ID NO: 404 - RNA, 17 nt, Hepatitis B Virus
caacuuuuucaccucug

SEQ ID NO: 405 - RNA, 17 nt, Hepatitis B Virus
aacuuuuucaccucugc

SEQ ID NO: 406 - RNA, 17 nt, Hepatitis B Virus
uuucaccucugccuaau

SEQ ID NO: 407 - RNA, 17 nt, Hepatitis B Virus
cucugccuaaucaucuc

SEQ ID NO: 408 - RNA, 17 nt, Hepatitis B Virus
ugccuaaucaucucaug

SEQ ID NO: 409 - RNA, 17 nt, Hepatitis B Virus
cuaaucaucucauguuc

SEQ ID NO: 410 - RNA, 17 nt, Hepatitis B Virus
aaucaucucauguucau

SEQ ID NO: 411 - RNA, 17 nt, Hepatitis B Virus
ucucauguucauguccu

SEQ ID NO: 412 - RNA, 17 nt, Hepatitis B Virus
cucauguucauguccua

SEQ ID NO: 413 - RNA, 17 nt, Hepatitis B Virus
guucauguccuacuguu

SEQ ID NO: 414 - RNA, 17 nt, Hepatitis B Virus
cauguccuacuguucaa

SEQ ID NO: 415 - RNA, 17 nt, Hepatitis B Virus
ccuacuguucaagccuc

SEQ ID NO: 416 - RNA, 17 nt, Hepatitis B Virus
cuacuguucaagccucc

SEQ ID NO: 417 - RNA, 17 nt, Hepatitis B Virus
ucaagccuccaagcugu

SEQ ID NO: 418 - RNA, 17 nt, Hepatitis B Virus
cugugccuuggguggcu

SEQ ID NO: 419 - RNA, 17 nt, Hepatitis B Virus
ggguggcuuuggggcau

SEQ ID NO: 420 - RNA, 17 nt, Hepatitis B Virus
gguggcuuuggggcaug

SEQ ID NO: 421 - RNA, 17 nt, Hepatitis B Virus
auggacauugacccgua

SEQ ID NO: 422 - RNA, 17 nt, Hepatitis B Virus
ugacccguauaaagaau

SEQ ID NO: 423 - RNA, 17 nt, Hepatitis B Virus
acccguauaaagaauuu

SEQ ID NO: 424 - RNA, 17 nt, Hepatitis B Virus
uaaagaauuuggagcuu

SEQ ID NO: 425 - RNA, 17 nt, Hepatitis B Virus
aaagaauuuggagcuuc

SEQ ID NO: 426 - RNA, 17 nt, Hepatitis B Virus
uuggagcuucuguggag

SEQ ID NO: 427 - RNA, 17 nt, Hepatitis B Virus
uggagcuucuguggagu

SEQ ID NO: 428 - RNA, 17 nt, Hepatitis B Virus
uguggaguuacucucuu

SEQ ID NO: 429 - RNA, 17 nt, Hepatitis B Virus
guggaguuacucucuuu

SEQ ID NO: 430 - RNA, 17 nt, Hepatitis B Virus
gaguuacucucuuuuuu

SEQ ID NO: 431 - RNA, 17 nt, Hepatitis B Virus
guuacucucuuuuuugc

SEQ ID NO: 432 - RNA, 17 nt, Hepatitis B Virus
uacucucuuuuuugccu

SEQ ID NO: 433 - RNA, 17 nt, Hepatitis B Virus
acucucuuuuuugccuu

SEQ ID NO: 434 - RNA, 17 nt, Hepatitis B Virus
cucucuuuuuugccuuc

SEQ ID NO: 435 - RNA, 17 nt, Hepatitis B Virus
ucucuuuuuugccuucu

SEQ ID NO: 436 - RNA, 17 nt, Hepatitis B Virus
cucuuuuuugccuucug

SEQ ID NO: 437 - RNA, 17 nt, Hepatitis B Virus
uuuugccuucugacuuc

SEQ ID NO: 438 - RNA, 17 nt, Hepatitis B Virus
uuugccuucugacuucu

SEQ ID NO: 439 - RNA, 17 nt, Hepatitis B Virus
uucugacuucuuuccuu

SEQ ID NO: 440 - RNA, 17 nt, Hepatitis B Virus
ucugacuucuuuccuuc

SEQ ID NO: 441 - RNA, 17 nt, Hepatitis B Virus
ugacuucuuuccuucua

SEQ ID NO: 442 - RNA, 17 nt, Hepatitis B Virus
gacuucuuuccuucuau

SEQ ID NO: 443 - RNA, 17 nt, Hepatitis B Virus
acuucuuuccuucuauu

SEQ ID NO: 444 - RNA, 17 nt, Hepatitis B Virus
ucuuuccuucuauucga

SEQ ID NO: 445 - RNA, 17 nt, Hepatitis B Virus
cuuuccuucuauucgag

SEQ ID NO: 446 - RNA, 17 nt, Hepatitis B Virus
uuccuucuauucgagau

SEQ ID NO: 447 - RNA, 17 nt, Hepatitis B Virus
ccuucuauucgagaucu

SEQ ID NO: 448 - RNA, 17 nt, Hepatitis B Virus
cuucuauucgagaucuc

SEQ ID NO: 449 - RNA, 17 nt, Hepatitis B Virus
uucgagaucuccucgac

SEQ ID NO: 450 - RNA, 17 nt, Hepatitis B Virus
cgagaucuccucgacac

SEQ ID NO: 451 - RNA, 17 nt, Hepatitis B Virus
gaucuccucgacaccgc

SEQ ID NO: 452 - RNA, 17 nt, Hepatitis B Virus
caccgccucugcucugu

SEQ ID NO: 453 - RNA, 17 nt, Hepatitis B Virus
ccucugcucuguaucgg

SEQ ID NO: 454 - RNA, 17 nt, Hepatitis B Virus
ugcucuguaucgggggg

SEQ ID NO: 455 - RNA, 17 nt, Hepatitis B Virus
cucuguaucggggggcc

SEQ ID NO: 456 - RNA, 17 nt, Hepatitis B Virus
gggggccuuagagucuc

SEQ ID NO: 457 - RNA, 17 nt, Hepatitis B Virus
ggggccuuagagucucc

SEQ ID NO: 458 - RNA, 17 nt, Hepatitis B Virus
cuuagagucuccggaac

SEQ ID NO: 459 - RNA, 17 nt, Hepatitis B Virus
uagagucuccggaacau

SEQ ID NO: 460 - RNA, 17 nt, Hepatitis B Virus
cggaacauuguucaccu

SEQ ID NO: 461 - RNA, 17 nt, Hepatitis B Virus
aacauuguucaccucac

SEQ ID NO: 462 - RNA, 17 nt, Hepatitis B Virus
acauuguucaccucacc

SEQ ID NO: 463 - RNA, 17 nt, Hepatitis B Virus
guucaccucaccauacg

SEQ ID NO: 464 - RNA, 17 nt, Hepatitis B Virus
cucaccauacggcacuc

SEQ ID NO: 465 - RNA, 17 nt, Hepatitis B Virus
acggcacucaggcaagc

SEQ ID NO: 466 - RNA, 17 nt, Hepatitis B Virus
ggcaagcuauucugugu

SEQ ID NO: 467 - RNA, 17 nt, Hepatitis B Virus
caagcuauucuguguug

SEQ ID NO: 468 - RNA, 17 nt, Hepatitis B Virus
aagcuauucuguguugg

SEQ ID NO: 469 - RNA, 17 nt, Hepatitis B Virus
uucuguguuggggugag

SEQ ID NO: 470 - RNA, 17 nt, Hepatitis B Virus
gggugaguugaugaauc

SEQ ID NO: 471 - RNA, 17 nt, Hepatitis B Virus
ugaugaaucuagccacc

SEQ ID NO: 472 - RNA, 17 nt, Hepatitis B Virus
augaaucuagccaccug

SEQ ID NO: 473 - RNA, 17 nt, Hepatitis B Virus
ugggaaguaauuuggaa

SEQ ID NO: 474 - RNA, 17 nt, Hepatitis B Virus
gaaguaauuuggaagau

SEQ ID NO: 475 - RNA, 17 nt, Hepatitis B Virus
aaguaauuuggaagauc

SEQ ID NO: 476 - RNA, 17 nt, Hepatitis B Virus
uggaagauccagcaucc

SEQ ID NO: 477 - RNA, 17 nt, Hepatitis B Virus
uccagcauccagggaau

SEQ ID NO: 478 - RNA, 17 nt, Hepatitis B Virus
cagggaauuaguaguca

SEQ ID NO: 479 - RNA, 17 nt, Hepatitis B Virus
agggaauuaguagucag

SEQ ID NO: 480 - RNA, 17 nt, Hepatitis B Virus
gaauuaguagucagcua

SEQ ID NO: 481 - RNA, 17 nt, Hepatitis B Virus
uuaguagucagcuaugu

SEQ ID NO: 482 - RNA, 17 nt, Hepatitis B Virus
agucagcuaugucaacg

SEQ ID NO: 483 - RNA, 17 nt, Hepatitis B Virus
agcuaugucaacguuaa

SEQ ID NO: 484 - RNA, 17 nt, Hepatitis B Virus
gucaacguuaauauggg

SEQ ID NO: 485 - RNA, 17 nt, Hepatitis B Virus
ucaacguuaauaugggc

SEQ ID NO: 486 - RNA, 17 nt, Hepatitis B Virus
acguuaauaugggccua

SEQ ID NO: 487 - RNA, 17 nt, Hepatitis B Virus
augggccuaaaaaucag

SEQ ID NO: 488 - RNA, 17 nt, Hepatitis B Virus
cuaaaaaucagacaacu

SEQ ID NO: 489 - RNA, 17 nt, Hepatitis B Virus
agacaacuauugugguu

SEQ ID NO: 490 - RNA, 17 nt, Hepatitis B Virus
acaacuauugugguuuc

SEQ ID NO: 491 - RNA, 17 nt, Hepatitis B Virus
auugugguuucacauuu

SEQ ID NO: 492 - RNA, 17 nt, Hepatitis B Virus
uugugguuucacauuuc

SEQ ID NO: 493 - RNA, 17 nt, Hepatitis B Virus
ugugguuucacauuucc

SEQ ID NO: 494 - RNA, 17 nt, Hepatitis B Virus
uuucacauuuccugucu

SEQ ID NO: 495 - RNA, 17 nt, Hepatitis B Virus
uucacauuuccugucuu

SEQ ID NO: 496 - RNA, 17 nt, Hepatitis B Virus
ucacauuuccugucuua

SEQ ID NO: 497 - RNA, 17 nt, Hepatitis B Virus
uuuccugucuuacuuuu

SEQ ID NO: 498 - RNA, 17 nt, Hepatitis B Virus
uccugucuuacuuuugg

SEQ ID NO: 499 - RNA, 17 nt, Hepatitis B Virus
ccugucuuacuuuuggg

SEQ ID NO: 500 - RNA, 17 nt, Hepatitis B Virus
gucuuacuuuugggcga

SEQ ID NO: 501 - RNA, 17 nt, Hepatitis B Virus
ucuuacuuuugggcgag

SEQ ID NO: 502 - RNA, 17 nt, Hepatitis B Virus
cuuacuuuugggcgaga

SEQ ID NO: 503 - RNA, 17 nt, Hepatitis B Virus
gaaacuguucuugaaua

SEQ ID NO: 504 - RNA, 17 nt, Hepatitis B Virus
aaacuguucuugaauau

SEQ ID NO: 505 - RNA, 17 nt, Hepatitis B Virus
acuguucuugaauauuu

SEQ ID NO: 506 - RNA, 17 nt, Hepatitis B Virus
ucuugaauauuuggugu

SEQ ID NO: 507 - RNA, 17 nt, Hepatitis B Virus
uugaauauuuggugucu

SEQ ID NO: 508 - RNA, 17 nt, Hepatitis B Virus
ugaauauuuggugucuu

SEQ ID NO: 509 - RNA, 17 nt, Hepatitis B Virus
uuuggugucuuuuggag

SEQ ID NO: 510 - RNA, 17 nt, Hepatitis B Virus
uggugucuuuuggagug

SEQ ID NO: 511 - RNA, 17 nt, Hepatitis B Virus
ggugucuuuuggagugu

SEQ ID NO: 512 - RNA, 17 nt, Hepatitis B Virus
gugucuuuuggagugug

SEQ ID NO: 513 - RNA, 17 nt, Hepatitis B Virus
guguggauucgcacucc

SEQ ID NO: 514 - RNA, 17 nt, Hepatitis B Virus
uguggauucgcacuccu

SEQ ID NO: 515 - RNA, 17 nt, Hepatitis B Virus
uucgcacuccuccugca

SEQ ID NO: 516 - RNA, 17 nt, Hepatitis B Virus
gcacuccuccugcauau

SEQ ID NO: 517 - RNA, 17 nt, Hepatitis B Virus
uccugcauauagaccac

SEQ ID NO: 518 - RNA, 17 nt, Hepatitis B Virus
cugcauauagaccacca

SEQ ID NO: 519 - RNA, 17 nt, Hepatitis B Virus
augccccuaucuuauca

SEQ ID NO: 520 - RNA, 17 nt, Hepatitis B Virus
gccccuaucuuaucaac

SEQ ID NO: 521 - RNA, 17 nt, Hepatitis B Virus
cccuaucuuaucaacac

SEQ ID NO: 522 - RNA, 17 nt, Hepatitis B Virus
ccuaucuuaucaacacu

SEQ ID NO: 523 - RNA, 17 nt, Hepatitis B Virus
uaucuuaucaacacuuc

SEQ ID NO: 524 - RNA, 17 nt, Hepatitis B Virus
ucaacacuuccggaaac

SEQ ID NO: 525 - RNA, 17 nt, Hepatitis B Virus
caacacuuccggaaacu

SEQ ID NO: 526 - RNA, 17 nt, Hepatitis B Virus
cggaaacuacuguuguu

SEQ ID NO: 527 - RNA, 17 nt, Hepatitis B Virus
acuacuguuguuagacg

SEQ ID NO: 528 - RNA, 17 nt, Hepatitis B Virus
acuguuguuagacgaag

SEQ ID NO: 529 - RNA, 17 nt, Hepatitis B Virus
cuguuguuagacgaaga

SEQ ID NO: 530 - RNA, 17 nt, Hepatitis B Virus
aggcagguccccuagaa

SEQ ID NO: 531 - RNA, 17 nt, Hepatitis B Virus
gguccccuagaagaaga

SEQ ID NO: 532 - RNA, 17 nt, Hepatitis B Virus
gaagaacucccucgccu

SEQ ID NO: 533 - RNA, 17 nt, Hepatitis B Virus
aacucccucgccucgca

SEQ ID NO: 534 - RNA, 17 nt, Hepatitis B Virus
ccucgccucgcagacga

SEQ ID NO: 535 - RNA, 17 nt, Hepatitis B Virus
acgaaggucucaaucgc

SEQ ID NO: 536 - RNA, 17 nt, Hepatitis B Virus
gaaggucucaaucgccg

SEQ ID NO: 537 - RNA, 17 nt, Hepatitis B Virus
gucucaaucgccgcguc

SEQ ID NO: 538 - RNA, 17 nt, Hepatitis B Virus
cgccgcgucgcagaaga

SEQ ID NO: 539 - RNA, 17 nt, Hepatitis B Virus
cagaagaucucaaucuc

SEQ ID NO: 540 - RNA, 17 nt, Hepatitis B Virus
gaagaucucaaucucgg

SEQ ID NO: 541 - RNA, 17 nt, Hepatitis B Virus
aucucaaucucgggaau

SEQ ID NO: 542 - RNA, 17 nt, Hepatitis B Virus
cucaaucucgggaaucu

SEQ ID NO: 543 - RNA, 17 nt, Hepatitis B Virus
ucgggaaucucaauguu

SEQ ID NO: 544 - RNA, 17 nt, Hepatitis B Virus
gggaaucucaauguuag

SEQ ID NO: 545 - RNA, 17 nt, Hepatitis B Virus
cucaauguuaguauucc

SEQ ID NO: 546 - RNA, 17 nt, Hepatitis B Virus
ucaauguuaguauuccu

SEQ ID NO: 547 - RNA, 17 nt, Hepatitis B Virus
auguuaguauuccuugg

SEQ ID NO: 548 - RNA, 17 nt, Hepatitis B Virus
guuaguauuccuuggac

SEQ ID NO: 549 - RNA, 17 nt, Hepatitis B Virus
uuaguauuccuuggaca

SEQ ID NO: 550 - RNA, 17 nt, Hepatitis B Virus
guauuccuuggacacau

SEQ ID NO: 551 - RNA, 17 nt, Hepatitis B Virus
ggacacauaagguggga

SEQ ID NO: 552 - RNA, 17 nt, Hepatitis B Virus
gggaaacuuuacggggc

SEQ ID NO: 553 - RNA, 17 nt, Hepatitis B Virus
ggaaacuuuacggggcu

SEQ ID NO: 554 - RNA, 17 nt, Hepatitis B Virus
gaaacuuuacggggcuu

SEQ ID NO: 555 - RNA, 17 nt, Hepatitis B Virus
acggggcuuuauucuuc

SEQ ID NO: 556 - RNA, 17 nt, Hepatitis B Virus
cggggcuuuauucuucu

SEQ ID NO: 557 - RNA, 17 nt, Hepatitis B Virus
ggggcuuuauucuucua

SEQ ID NO: 558 - RNA, 17 nt, Hepatitis B Virus
ggcuuuauucuucuacg

SEQ ID NO: 559 - RNA, 17 nt, Hepatitis B Virus
gcuuuauucuucuacgg

SEQ ID NO: 560 - RNA, 17 nt, Hepatitis B Virus
uuuauucuucuacggua

SEQ ID NO: 561 - RNA, 17 nt, Hepatitis B Virus
uuauucuucuacgguac

SEQ ID NO: 562 - RNA, 17 nt, Hepatitis B Virus
auucuucuacgguaccu

SEQ ID NO: 563 - RNA, 17 nt, Hepatitis B Virus
ucuacgguaccuugcuu

SEQ ID NO: 564 - RNA, 17 nt, Hepatitis B Virus
cgguaccuugcuuuaau

SEQ ID NO: 565 - RNA, 17 nt, Hepatitis B Virus
accuugcuuuaauccua

SEQ ID NO: 566 - RNA, 17 nt, Hepatitis B Virus
ccuugcuuuaauccuaa

SEQ ID NO: 567 - RNA, 17 nt, Hepatitis B Virus
cuugcuuuaauccuaaa

SEQ ID NO: 568 - RNA, 17 nt, Hepatitis B Virus
gcuuuaauccuaaaugg

SEQ ID NO: 569 - RNA, 17 nt, Hepatitis B Virus
uuaauccuaaauggcaa

SEQ ID NO: 570 - RNA, 17 nt, Hepatitis B Virus
ggcaaacuccuucuuuu

SEQ ID NO: 571 - RNA, 17 nt, Hepatitis B Virus
aaacuccuucuuuuccu

SEQ ID NO: 572 - RNA, 17 nt, Hepatitis B Virus
aacuccuucuuuuccug

SEQ ID NO: 573 - RNA, 17 nt, Hepatitis B Virus
cuccuucuuuuccugac

SEQ ID NO: 574 - RNA, 17 nt, Hepatitis B Virus
uccuucuuuuccugaca

SEQ ID NO: 575 - RNA, 17 nt, Hepatitis B Virus
ccuucuuuuccugacau

SEQ ID NO: 576 - RNA, 17 nt, Hepatitis B Virus
cuucuuuuccugacauu

SEQ ID NO: 577 - RNA, 17 nt, Hepatitis B Virus
ccugacauucauuugca

SEQ ID NO: 578 - RNA, 17 nt, Hepatitis B Virus
cugacauucauuugcag

SEQ ID NO: 579 - RNA, 17 nt, Hepatitis B Virus
acauucauuugcaggag

SEQ ID NO: 580 - RNA, 17 nt, Hepatitis B Virus
cauucauuugcaggagg

SEQ ID NO: 581 - RNA, 17 nt, Hepatitis B Virus
gaggacauuguugauag

SEQ ID NO: 582 - RNA, 17 nt, Hepatitis B Virus
gacauuguugauagaug

SEQ ID NO: 583 - RNA, 17 nt, Hepatitis B Virus
uuguugauagauguaag

SEQ ID NO: 584 - RNA, 17 nt, Hepatitis B Virus
auagauguaagcaauuu

SEQ ID NO: 585 - RNA, 17 nt, Hepatitis B Virus
uaagcaauuuguggggc

SEQ ID NO: 586 - RNA, 17 nt, Hepatitis B Virus
aagcaauuuguggggcc

SEQ ID NO: 587 - RNA, 17 nt, Hepatitis B Virus
gggccccuuacaguaaa

SEQ ID NO: 588 - RNA, 17 nt, Hepatitis B Virus
ggccccuuacaguaaau

SEQ ID NO: 589 - RNA, 17 nt, Hepatitis B Virus
cuuacaguaaaugaaaa

SEQ ID NO: 590 - RNA, 17 nt, Hepatitis B Virus
aggagacuuaaauuaac

SEQ ID NO: 591 - RNA, 17 nt, Hepatitis B Virus
ggagacuuaaauuaacu

SEQ ID NO: 592 - RNA, 17 nt, Hepatitis B Virus
acuuaaauuaacuaugc

SEQ ID NO: 593 - RNA, 17 nt, Hepatitis B Virus
cuuaaauuaacuaugcc

SEQ ID NO: 594 - RNA, 17 nt, Hepatitis B Virus
aauuaacuaugccugcu

SEQ ID NO: 595 - RNA, 17 nt, Hepatitis B Virus
ugccugcuagguuuuau

SEQ ID NO: 596 - RNA, 17 nt, Hepatitis B Virus
ugcuagguuuuauccca

SEQ ID NO: 597 - RNA, 17 nt, Hepatitis B Virus
gcuagguuuuaucccaa

SEQ ID NO: 598 - RNA, 17 nt, Hepatitis B Virus
cuagguuuuaucccaau

SEQ ID NO: 599 - RNA, 17 nt, Hepatitis B Virus
uagguuuuaucccaaug

SEQ ID NO: 600 - RNA, 17 nt, Hepatitis B Virus
gguuuuaucccaauguu

SEQ ID NO: 601 - RNA, 17 nt, Hepatitis B Virus
cccaauguuacuaaaua

SEQ ID NO: 602 - RNA, 17 nt, Hepatitis B Virus
ccaauguuacuaaauau

SEQ ID NO: 603 - RNA, 17 nt, Hepatitis B Virus
auguuacuaaauauuug

SEQ ID NO: 604 - RNA, 17 nt, Hepatitis B Virus
uacuaaauauuugcccu

SEQ ID NO: 605 - RNA, 17 nt, Hepatitis B Virus
cuaaauauuugcccuua

SEQ ID NO: 606 - RNA, 17 nt, Hepatitis B Virus
uaaauauuugcccuuag

SEQ ID NO: 607 - RNA, 17 nt, Hepatitis B Virus
uuugcccuuagauaaag

SEQ ID NO: 608 - RNA, 17 nt, Hepatitis B Virus
uugcccuuagauaaagg

SEQ ID NO: 609 - RNA, 17 nt, Hepatitis B Virus
ccuuagauaaagggauc

SEQ ID NO: 610 - RNA, 17 nt, Hepatitis B Virus
aaagggaucaaaccgua

SEQ ID NO: 611 - RNA, 17 nt, Hepatitis B Virus
caaaccguauuauccag

SEQ ID NO: 612 - RNA, 17 nt, Hepatitis B Virus
aaccguauuauccagag

SEQ ID NO: 613 - RNA, 17 nt, Hepatitis B Virus
accguauuauccagagu

SEQ ID NO: 614 - RNA, 17 nt, Hepatitis B Virus
cguauuauccagaguau

SEQ ID NO: 615 - RNA, 17 nt, Hepatitis B Virus
uccagaguauguaguua

SEQ ID NO: 616 - RNA, 17 nt, Hepatitis B Virus
gaguauguaguuaauca

SEQ ID NO: 617 - RNA, 17 nt, Hepatitis B Virus
uauguaguuaaucauua

SEQ ID NO: 618 - RNA, 17 nt, Hepatitis B Virus
auguaguuaaucauuac

SEQ ID NO: 619 - RNA, 17 nt, Hepatitis B Virus
uaguuaaucauuacuuc

SEQ ID NO: 620 - RNA, 17 nt, Hepatitis B Virus
uuaaucauuacuuccag

SEQ ID NO: 621 - RNA, 17 nt, Hepatitis B Virus
uaaucauuacuuccaga

SEQ ID NO: 622 - RNA, 17 nt, Hepatitis B Virus
ucauuacuuccagacgc

SEQ ID NO: 623 - RNA, 17 nt, Hepatitis B Virus
cauuacuuccagacgcg

SEQ ID NO: 624 - RNA, 17 nt, Hepatitis B Virus
cgcgacauuauuuacac

SEQ ID NO: 625 - RNA, 17 nt, Hepatitis B Virus
gcgacauuauuuacaca

SEQ ID NO: 626 - RNA, 17 nt, Hepatitis B Virus
gacauuauuuacacacu

SEQ ID NO: 627 - RNA, 17 nt, Hepatitis B Virus
acauuauuuacacacuc

SEQ ID NO: 628 - RNA, 17 nt, Hepatitis B Virus
cauuauuuacacacucu

SEQ ID NO: 629 - RNA, 17 nt, Hepatitis B Virus
uacacacucuuuggaag

SEQ ID NO: 630 - RNA, 17 nt, Hepatitis B Virus
cacacucuuuggaaggc

SEQ ID NO: 631 - RNA, 17 nt, Hepatitis B Virus
acacucuuuggaaggcg

SEQ ID NO: 632 - RNA, 17 nt, Hepatitis B Virus
gcggggaucuuauauaa

SEQ ID NO: 633 - RNA, 17 nt, Hepatitis B Virus
ggggaucuuauauaaaa

SEQ ID NO: 634 - RNA, 17 nt, Hepatitis B Virus
gggaucuuauauaaaag

SEQ ID NO: 635 - RNA, 17 nt, Hepatitis B Virus
gaucuuauauaaaagag

SEQ ID NO: 636 - RNA, 17 nt, Hepatitis B Virus
ucuuauauaaaagagag

SEQ ID NO: 637 - RNA, 17 nt, Hepatitis B Virus
aagagaguccacacgua

SEQ ID NO: 638 - RNA, 17 nt, Hepatitis B Virus
ccacacguagcgccuca

SEQ ID NO: 639 - RNA, 17 nt, Hepatitis B Virus
uagcgccucauuuugcg

SEQ ID NO: 640 - RNA, 17 nt, Hepatitis B Virus
cgccucauuuugcgggu

SEQ ID NO: 641 - RNA, 17 nt, Hepatitis B Virus
gccucauuuugcggguc

SEQ ID NO: 642 - RNA, 17 nt, Hepatitis B Virus
ccucauuuugcggguca

SEQ ID NO: 643 - RNA, 17 nt, Hepatitis B Virus
uugcgggucaccauauu

SEQ ID NO: 644 - RNA, 17 nt, Hepatitis B Virus
gucaccauauucuuggg

SEQ ID NO: 645 - RNA, 17 nt, Hepatitis B Virus
caccauauucuugggaa

SEQ ID NO: 646 - RNA, 17 nt, Hepatitis B Virus
accauauucuugggaac

SEQ ID NO: 647 - RNA, 17 nt, Hepatitis B Virus
cauauucuugggaacaa

SEQ ID NO: 648 - RNA, 17 nt, Hepatitis B Virus
aacaagaucuacagcau

SEQ ID NO: 649 - RNA, 17 nt, Hepatitis B Virus
caagaucuacagcaugg

SEQ ID NO: 650 - RNA, 17 nt, Hepatitis B Virus
ugggagguuggucuucc

SEQ ID NO: 651 - RNA, 17 nt, Hepatitis B Virus
agguuggucuuccaaac

SEQ ID NO: 652 - RNA, 17 nt, Hepatitis B Virus
guuggucuuccaaaccu

SEQ ID NO: 653 - RNA, 17 nt, Hepatitis B Virus
uuggucuuccaaaccuc

SEQ ID NO: 654 - RNA, 17 nt, Hepatitis B Virus
ccaaaccucgaaaaggc

SEQ ID NO: 655 - RNA, 17 nt, Hepatitis B Virus
ggacaaaucuuucuguc

SEQ ID NO: 656 - RNA, 17 nt, Hepatitis B Virus
acaaaucuuucuguccc

SEQ ID NO: 657 - RNA, 17 nt, Hepatitis B Virus
caaaucuuucugucccc

SEQ ID NO: 658 - RNA, 17 nt, Hepatitis B Virus
aaaucuuucugucccca

SEQ ID NO: 659 - RNA, 17 nt, Hepatitis B Virus
cuuucuguccccaaucc

SEQ ID NO: 660 - RNA, 17 nt, Hepatitis B Virus
uccccaauccccuggga

SEQ ID NO: 661 - RNA, 17 nt, Hepatitis B Virus
ccugggauucuuccccg

SEQ ID NO: 662 - RNA, 17 nt, Hepatitis B Virus
cugggauucuuccccga

SEQ ID NO: 663 - RNA, 17 nt, Hepatitis B Virus
gggauucuuccccgauc

SEQ ID NO: 664 - RNA, 17 nt, Hepatitis B Virus
ggauucuuccccgauca

SEQ ID NO: 665 - RNA, 17 nt, Hepatitis B Virus
uccccgaucaucaguug

SEQ ID NO: 666 - RNA, 17 nt, Hepatitis B Virus
ccgaucaucaguuggac

SEQ ID NO: 667 - RNA, 17 nt, Hepatitis B Virus
ucaucaguuggacccug

SEQ ID NO: 668 - RNA, 17 nt, Hepatitis B Virus
cccugcauucaaagcca

SEQ ID NO: 669 - RNA, 17 nt, Hepatitis B Virus
ccugcauucaaagccaa

SEQ ID NO: 670 - RNA, 17 nt, Hepatitis B Virus
agccaacucaguaaauc

SEQ ID NO: 671 - RNA, 17 nt, Hepatitis B Virus
aacucaguaaauccaga

SEQ ID NO: 672 - RNA, 17 nt, Hepatitis B Virus
caguaaauccagauugg

SEQ ID NO: 673 - RNA, 17 nt, Hepatitis B Virus
auccagauugggaccuc

SEQ ID NO: 674 - RNA, 17 nt, Hepatitis B Virus
ugggaccucaacccgca

SEQ ID NO: 675 - RNA, 17 nt, Hepatitis B Virus
gggagcauucgggccag

SEQ ID NO: 676 - RNA, 17 nt, Hepatitis B Virus
ggagcauucgggccagg

SEQ ID NO: 677 - RNA, 17 nt, Hepatitis B Virus
gccaggguucaccccuc

SEQ ID NO: 678 - RNA, 17 nt, Hepatitis B Virus
ccaggguucaccccucc

SEQ ID NO: 679 - RNA, 17 nt, Hepatitis B Virus
ucaccccuccccauggg

SEQ ID NO: 680 - RNA, 17 nt, Hepatitis B Virus
gggacuguuggggugga

SEQ ID NO: 681 - RNA, 17 nt, Hepatitis B Virus
ggagcccucacgcucag

SEQ ID NO: 682 - RNA, 17 nt, Hepatitis B Virus
cucacgcucagggccua

SEQ ID NO: 683 - RNA, 17 nt, Hepatitis B Virus
cagggccuacucacaac

SEQ ID NO: 684 - RNA, 17 nt, Hepatitis B Virus
ggccuacucacaacugu

SEQ ID NO: 685 - RNA, 17 nt, Hepatitis B Virus
cagcagcuccuccuccu

SEQ ID NO: 686 - RNA, 17 nt, Hepatitis B Virus
cagcuccuccuccugcc

SEQ ID NO: 687 - RNA, 17 nt, Hepatitis B Virus
cuccuccuccugccucc

SEQ ID NO: 688 - RNA, 17 nt, Hepatitis B Virus
uccugccuccaccaauc

SEQ ID NO: 689 - RNA, 17 nt, Hepatitis B Virus
ccaccaaucggcaguca

SEQ ID NO: 690 - RNA, 17 nt, Hepatitis B Virus
ucggcagucaggaaggc

SEQ ID NO: 691 - RNA, 17 nt, Hepatitis B Virus
ggcagccuacucccuua

SEQ ID NO: 692 - RNA, 17 nt, Hepatitis B Virus
agccuacucccuuaucu

SEQ ID NO: 693 - RNA, 17 nt, Hepatitis B Virus
uacucccuuaucuccac

SEQ ID NO: 694 - RNA, 17 nt, Hepatitis B Virus
acucccuuaucuccacc

SEQ ID NO: 695 - RNA, 17 nt, Hepatitis B Virus
ucccuuaucuccaccuc

SEQ ID NO: 696 - RNA, 17 nt, Hepatitis B Virus
ccuuaucuccaccucua

SEQ ID NO: 697 - RNA, 17 nt, Hepatitis B Virus
cuccaccucuaagggac

SEQ ID NO: 698 - RNA, 17 nt, Hepatitis B Virus
ccaccucuaagggacac

SEQ ID NO: 699 - RNA, 17 nt, Hepatitis B Virus
gggacacucauccucag

SEQ ID NO: 700 - RNA, 17 nt, Hepatitis B Virus
acacucauccucaggcc

SEQ ID NO: 701 - RNA, 17 nt, Hepatitis B Virus
cucauccucaggccaug

SEQ ID NO: 702 - RNA, 17 nt, Hepatitis B Virus
aacuccaccacuuucca

SEQ ID NO: 703 - RNA, 17 nt, Hepatitis B Virus
acuccaccacuuuccac

SEQ ID NO: 704 - RNA, 17 nt, Hepatitis B Virus
uccaccacuuuccacca

SEQ ID NO: 705 - RNA, 17 nt, Hepatitis B Virus
ccacuuuccaccaaacu

SEQ ID NO: 706 - RNA, 17 nt, Hepatitis B Virus
cacuuuccaccaaacuc

SEQ ID NO: 707 - RNA, 17 nt, Hepatitis B Virus
cuuuccaccaaacucuu

SEQ ID NO: 708 - RNA, 17 nt, Hepatitis B Virus
uuuccaccaaacucuuc

SEQ ID NO: 709 - RNA, 17 nt, Hepatitis B Virus
caccaaacucuucaaga

SEQ ID NO: 710 - RNA, 17 nt, Hepatitis B Virus
ccaaacucuucaagauc

SEQ ID NO: 711 - RNA, 17 nt, Hepatitis B Virus
aacucuucaagauccca

SEQ ID NO: 712 - RNA, 17 nt, Hepatitis B Virus
ucaagaucccagaguca

SEQ ID NO: 713 - RNA, 17 nt, Hepatitis B Virus
caagaucccagagucag

SEQ ID NO: 714 - RNA, 17 nt, Hepatitis B Virus
aagaucccagagucagg

SEQ ID NO: 715 - RNA, 17 nt, Hepatitis B Virus
ccagagucagggcccug

SEQ ID NO: 716 - RNA, 17 nt, Hepatitis B Virus
gucagggcccuguacuu

SEQ ID NO: 717 - RNA, 17 nt, Hepatitis B Virus
ucagggcccuguacuuu

SEQ ID NO: 718 - RNA, 17 nt, Hepatitis B Virus
cagggcccuguacuuuc

SEQ ID NO: 719 - RNA, 17 nt, Hepatitis B Virus
cccuguacuuuccugcu

SEQ ID NO: 720 - RNA, 17 nt, Hepatitis B Virus
guacuuuccugcuggug

SEQ ID NO: 721 - RNA, 17 nt, Hepatitis B Virus
uacuuuccugcuggugg

SEQ ID NO: 722 - RNA, 17 nt, Hepatitis B Virus
uuuccugcugguggcuc

SEQ ID NO: 723 - RNA, 17 nt, Hepatitis B Virus
cugguggcuccaguuca

SEQ ID NO: 724 - RNA, 17 nt, Hepatitis B Virus
gguggcuccaguucagg

SEQ ID NO: 725 - RNA, 17 nt, Hepatitis B Virus
guggcuccaguucagga

SEQ ID NO: 726 - RNA, 17 nt, Hepatitis B Virus
uccaguucaggaacagu

SEQ ID NO: 727 - RNA, 17 nt, Hepatitis B Virus
ucaggaacagugagccc

SEQ ID NO: 728 - RNA, 17 nt, Hepatitis B Virus
cagugagcccugcucag

SEQ ID NO: 729 - RNA, 17 nt, Hepatitis B Virus
agugagcccugcucaga

SEQ ID NO: 730 - RNA, 17 nt, Hepatitis B Virus
gugagcccugcucagaa

SEQ ID NO: 731 - RNA, 17 nt, Hepatitis B Virus
agcccugcucagaauac

SEQ ID NO: 732 - RNA, 17 nt, Hepatitis B Virus
cccugcucagaauacug

SEQ ID NO: 733 - RNA, 17 nt, Hepatitis B Virus
cagaauacugucucugc

SEQ ID NO: 734 - RNA, 17 nt, Hepatitis B Virus
auacugucucugccaua

SEQ ID NO: 735 - RNA, 17 nt, Hepatitis B Virus
acugucucugccauauc

SEQ ID NO: 736 - RNA, 17 nt, Hepatitis B Virus
gucucugccauaucguc

SEQ ID NO: 737 - RNA, 17 nt, Hepatitis B Virus
ucucugccauaucguca

SEQ ID NO: 738 - RNA, 17 nt, Hepatitis B Virus
auaucgucaaucuuauc

SEQ ID NO: 739 - RNA, 17 nt, Hepatitis B Virus
cgucaaucuuaucgaag

SEQ ID NO: 740 - RNA, 17 nt, Hepatitis B Virus
ucgaagacuggggaccc

SEQ ID NO: 741 - RNA, 17 nt, Hepatitis B Virus
cuggggacccuguaccg

SEQ ID NO: 742 - RNA, 17 nt, Hepatitis B Virus
uggggacccuguaccga

SEQ ID NO: 743 - RNA, 17 nt, Hepatitis B Virus
ggggacccuguaccgaa

SEQ ID NO: 744 - RNA, 17 nt, Hepatitis B Virus
cccuguaccgaacaugg

SEQ ID NO: 745 - RNA, 17 nt, Hepatitis B Virus
uaccgaacauggagaac

SEQ ID NO: 746 - RNA, 17 nt, Hepatitis B Virus
uggagaacaucgcauca

SEQ ID NO: 747 - RNA, 17 nt, Hepatitis B Virus
aacaucgcaucaggacu

SEQ ID NO: 748 - RNA, 17 nt, Hepatitis B Virus
aucgcaucaggacuccu

SEQ ID NO: 749 - RNA, 17 nt, Hepatitis B Virus
aucaggacuccuaggac

SEQ ID NO: 750 - RNA, 17 nt, Hepatitis B Virus
caggacuccuaggaccc

SEQ ID NO: 751 - RNA, 17 nt, Hepatitis B Virus
aggacuccuaggacccc

SEQ ID NO: 752 - RNA, 17 nt, Hepatitis B Virus
ccuaggaccccugcucg

SEQ ID NO: 753 - RNA, 17 nt, Hepatitis B Virus
cuaggaccccugcucgu

SEQ ID NO: 754 - RNA, 17 nt, Hepatitis B Virus
uaggaccccugcucgug

SEQ ID NO: 755 - RNA, 17 nt, Hepatitis B Virus
aggaccccugcucgugu

SEQ ID NO: 756 - RNA, 17 nt, Hepatitis B Virus
accccugcucguguuac

SEQ ID NO: 757 - RNA, 17 nt, Hepatitis B Virus
cguguuacaggcggggu

SEQ ID NO: 758 - RNA, 17 nt, Hepatitis B Virus
gguuuuucuuguugaca

SEQ ID NO: 759 - RNA, 17 nt, Hepatitis B Virus
uuguugacaaaaauccu

SEQ ID NO: 760 - RNA, 17 nt, Hepatitis B Virus
caaaaauccucacaaua

SEQ ID NO: 761 - RNA, 17 nt, Hepatitis B Virus
aaaaauccucacaauac

SEQ ID NO: 762 - RNA, 17 nt, Hepatitis B Virus
aaauccucacaauacca

SEQ ID NO: 763 - RNA, 17 nt, Hepatitis B Virus
auccucacaauaccaca

SEQ ID NO: 764 - RNA, 17 nt, Hepatitis B Virus
cacaauaccacagaguc

SEQ ID NO: 765 - RNA, 17 nt, Hepatitis B Virus
acaauaccacagagucu

SEQ ID NO: 766 - RNA, 17 nt, Hepatitis B Virus
aauaccacagagucuag

SEQ ID NO: 767 - RNA, 17 nt, Hepatitis B Virus
acagagucuagacucgu

SEQ ID NO: 768 - RNA, 17 nt, Hepatitis B Virus
gucuagacucguggugg

SEQ ID NO: 769 - RNA, 17 nt, Hepatitis B Virus
ugguggacuucucucaa

SEQ ID NO: 770 - RNA, 17 nt, Hepatitis B Virus
uggacuucucucaauuu

SEQ ID NO: 771 - RNA, 17 nt, Hepatitis B Virus
gacuucucucaauuuuc

SEQ ID NO: 772 - RNA, 17 nt, Hepatitis B Virus
cuucucucaauuuucua

SEQ ID NO: 773 - RNA, 17 nt, Hepatitis B Virus
caauuuucuagggggaa

SEQ ID NO: 774 - RNA, 17 nt, Hepatitis B Virus
gggggaacacccgugug

SEQ ID NO: 775 - RNA, 17 nt, Hepatitis B Virus
gggaacacccguguguc

SEQ ID NO: 776 - RNA, 17 nt, Hepatitis B Virus
ggaacacccgugugucu

SEQ ID NO: 777 - RNA, 17 nt, Hepatitis B Virus
cgugugucuuggccaaa

SEQ ID NO: 778 - RNA, 17 nt, Hepatitis B Virus
gucuuggccaaaauucg

SEQ ID NO: 779 - RNA, 17 nt, Hepatitis B Virus
ucuuggccaaaauucgc

SEQ ID NO: 780 - RNA, 17 nt, Hepatitis B Virus
aaauucgcagucccaaa

SEQ ID NO: 781 - RNA, 17 nt, Hepatitis B Virus
ucgcagucccaaaucuc

SEQ ID NO: 782 - RNA, 17 nt, Hepatitis B Virus
cgcagucccaaaucucc

SEQ ID NO: 783 - RNA, 17 nt, Hepatitis B Virus
gcagucccaaaucucca

SEQ ID NO: 784 - RNA, 17 nt, Hepatitis B Virus
cccaaaucuccagucac

SEQ ID NO: 785 - RNA, 17 nt, Hepatitis B Virus
caaaucuccagucacuc

SEQ ID NO: 786 - RNA, 17 nt, Hepatitis B Virus
aaaucuccagucacuca

SEQ ID NO: 787 - RNA, 17 nt, Hepatitis B Virus
cuccagucacucaccaa

SEQ ID NO: 788 - RNA, 17 nt, Hepatitis B Virus
ccagucacucaccaacc

SEQ ID NO: 789 - RNA, 17 nt, Hepatitis B Virus
agucacucaccaaccug

SEQ ID NO: 790 - RNA, 17 nt, Hepatitis B Virus
ucacucaccaaccuguu

SEQ ID NO: 791 - RNA, 17 nt, Hepatitis B Virus
cacucaccaaccuguug

SEQ ID NO: 792 - RNA, 17 nt, Hepatitis B Virus
ucaccaaccuguugucc

SEQ ID NO: 793 - RNA, 17 nt, Hepatitis B Virus
caccaaccuguuguccu

SEQ ID NO: 794 - RNA, 17 nt, Hepatitis B Virus
cuguuguccuccaauuu

SEQ ID NO: 795 - RNA, 17 nt, Hepatitis B Virus
uguuguccuccaauuug

SEQ ID NO: 796 - RNA, 17 nt, Hepatitis B Virus
uuguccuccaauuuguc

SEQ ID NO: 797 - RNA, 17 nt, Hepatitis B Virus
uguccuccaauuugucc

SEQ ID NO: 798 - RNA, 17 nt, Hepatitis B Virus
aauuuguccugguuauc

SEQ ID NO: 799 - RNA, 17 nt, Hepatitis B Virus
auuuguccugguuaucg

SEQ ID NO: 800 - RNA, 17 nt, Hepatitis B Virus
guuaucgcuggaugugu

SEQ ID NO: 801 - RNA, 17 nt, Hepatitis B Virus
gaugugucugcggcguu

SEQ ID NO: 802 - RNA, 17 nt, Hepatitis B Virus
guuuuaucaucuuccuc

SEQ ID NO: 803 - RNA, 17 nt, Hepatitis B Virus
uuaucaucuuccucugc

SEQ ID NO: 804 - RNA, 17 nt, Hepatitis B Virus
ucaucuuccucugcauc

SEQ ID NO: 805 - RNA, 17 nt, Hepatitis B Virus
caucuuccucugcaucc

SEQ ID NO: 806 - RNA, 17 nt, Hepatitis B Virus
ucuuccucugcauccug

SEQ ID NO: 807 - RNA, 17 nt, Hepatitis B Virus
uccucugcauccugcug

SEQ ID NO: 808 - RNA, 17 nt, Hepatitis B Virus
ucugcauccugcugcua

SEQ ID NO: 809 - RNA, 17 nt, Hepatitis B Virus
cugcauccugcugcuau

SEQ ID NO: 810 - RNA, 17 nt, Hepatitis B Virus
cauccugcugcuaugcc

SEQ ID NO: 811 - RNA, 17 nt, Hepatitis B Virus
ccugcugcuaugccuca

SEQ ID NO: 812 - RNA, 17 nt, Hepatitis B Virus
ugcuaugccucaucuuc

SEQ ID NO: 813 - RNA, 17 nt, Hepatitis B Virus
gcuaugccucaucuucu

SEQ ID NO: 814 - RNA, 17 nt, Hepatitis B Virus
uaugccucaucuucuug

SEQ ID NO: 815 - RNA, 17 nt, Hepatitis B Virus
gccucaucuucuuguug

SEQ ID NO: 816 - RNA, 17 nt, Hepatitis B Virus
ucaucuucuuguugguu

SEQ ID NO: 817 - RNA, 17 nt, Hepatitis B Virus
guugguucuucuggacu

SEQ ID NO: 818 - RNA, 17 nt, Hepatitis B Virus
gguucuucuggacuauc

SEQ ID NO: 819 - RNA, 17 nt, Hepatitis B Virus
uucuggacuaucaaggu

SEQ ID NO: 820 - RNA, 17 nt, Hepatitis B Virus
ggacuaucaagguaugu

SEQ ID NO: 821 - RNA, 17 nt, Hepatitis B Virus
uauguugcccguuuguc

SEQ ID NO: 822 - RNA, 17 nt, Hepatitis B Virus
auguugcccguuugucc

SEQ ID NO: 823 - RNA, 17 nt, Hepatitis B Virus
cguuuguccucuaauuc

SEQ ID NO: 824 - RNA, 17 nt, Hepatitis B Virus
guuuguccucuaauucc

SEQ ID NO: 825 - RNA, 17 nt, Hepatitis B Virus
uuguccucuaauuccag

SEQ ID NO: 826 - RNA, 17 nt, Hepatitis B Virus
ucuaauuccaggaucau

SEQ ID NO: 827 - RNA, 17 nt, Hepatitis B Virus
cuaauuccaggaucauc

SEQ ID NO: 828 - RNA, 17 nt, Hepatitis B Virus
ccaggaucaucaacaac

SEQ ID NO: 829 - RNA, 17 nt, Hepatitis B Virus
ggaucaucaacaaccag

SEQ ID NO: 830 - RNA, 17 nt, Hepatitis B Virus
ucaucaacaaccagcac

SEQ ID NO: 831 - RNA, 17 nt, Hepatitis B Virus
ucaacaaccagcaccgg

SEQ ID NO: 832 - RNA, 17 nt, Hepatitis B Virus
caacaaccagcaccgga

SEQ ID NO: 833 - RNA, 17 nt, Hepatitis B Virus
caaccagcaccggacca

SEQ ID NO: 834 - RNA, 17 nt, Hepatitis B Virus
accagcaccggaccaug

SEQ ID NO: 835 - RNA, 17 nt, Hepatitis B Virus
caccggaccaugcaaaa

SEQ ID NO: 836 - RNA, 17 nt, Hepatitis B Virus
accggaccaugcaaaac

SEQ ID NO: 837 - RNA, 17 nt, Hepatitis B Virus
gaccaugcaaaaccugc

SEQ ID NO: 838 - RNA, 17 nt, Hepatitis B Virus
ugcaaaaccugcacaac

SEQ ID NO: 839 - RNA, 17 nt, Hepatitis B Virus
gcaaaaccugcacaacu

SEQ ID NO: 840 - RNA, 17 nt, Hepatitis B Virus
aaaccugcacaacuccu

SEQ ID NO: 841 - RNA, 17 nt, Hepatitis B Virus
accugcacaacuccugc

SEQ ID NO: 842 - RNA, 17 nt, Hepatitis B Virus
ugcacaacuccugcuca

SEQ ID NO: 843 - RNA, 17 nt, Hepatitis B Virus
cacaacuccugcucaag

SEQ ID NO: 844 - RNA, 17 nt, Hepatitis B Virus
acaacuccugcucaagg

SEQ ID NO: 845 - RNA, 17 nt, Hepatitis B Virus
acuccugcucaaggaac

SEQ ID NO: 846 - RNA, 17 nt, Hepatitis B Virus
uccugcucaaggaaccu

SEQ ID NO: 847 - RNA, 17 nt, Hepatitis B Virus
caaggaaccucuauguu

SEQ ID NO: 848 - RNA, 17 nt, Hepatitis B Virus
aaggaaccucuauguuu

SEQ ID NO: 849 - RNA, 17 nt, Hepatitis B Virus
ggaaccucuauguuucc

SEQ ID NO: 850 - RNA, 17 nt, Hepatitis B Virus
uauguuucccucauguu

SEQ ID NO: 851 - RNA, 17 nt, Hepatitis B Virus
auguuucccucauguug

SEQ ID NO: 852 - RNA, 17 nt, Hepatitis B Virus
uguuucccucauguugc

SEQ ID NO: 853 - RNA, 17 nt, Hepatitis B Virus
uuucccucauguugcug

SEQ ID NO: 854 - RNA, 17 nt, Hepatitis B Virus
cauguugcuguacaaaa

SEQ ID NO: 855 - RNA, 17 nt, Hepatitis B Virus
ugcuguacaaaaccuac

SEQ ID NO: 856 - RNA, 17 nt, Hepatitis B Virus
uacaaaaccuacggacg

SEQ ID NO: 857 - RNA, 17 nt, Hepatitis B Virus
acaaaaccuacggacgg

SEQ ID NO: 858 - RNA, 17 nt, Hepatitis B Virus
acggaaacugcaccugu

SEQ ID NO: 859 - RNA, 17 nt, Hepatitis B Virus
gaaacugcaccuguauu

SEQ ID NO: 860 - RNA, 17 nt, Hepatitis B Virus
aacugcaccuguauucc

SEQ ID NO: 861 - RNA, 17 nt, Hepatitis B Virus
acugcaccuguauuccc

SEQ ID NO: 862 - RNA, 17 nt, Hepatitis B Virus
cuguauucccaucccau

SEQ ID NO: 863 - RNA, 17 nt, Hepatitis B Virus
uguauucccaucccauc

SEQ ID NO: 864 - RNA, 17 nt, Hepatitis B Virus
guauucccaucccauca

SEQ ID NO: 865 - RNA, 17 nt, Hepatitis B Virus
uucccaucccaucaucu

SEQ ID NO: 866 - RNA, 17 nt, Hepatitis B Virus
ucccaucccaucaucuu

SEQ ID NO: 867 - RNA, 17 nt, Hepatitis B Virus
cccaucccaucaucuug

SEQ ID NO: 868 - RNA, 17 nt, Hepatitis B Virus
aucccaucaucuugggc

SEQ ID NO: 869 - RNA, 17 nt, Hepatitis B Virus
ccaucaucuugggcuuu

SEQ ID NO: 870 - RNA, 17 nt, Hepatitis B Virus
ucuugggcuuucgcaaa

SEQ ID NO: 871 - RNA, 17 nt, Hepatitis B Virus
gcuuucgcaaaauaccu

SEQ ID NO: 872 - RNA, 17 nt, Hepatitis B Virus
caaaauaccuaugggag

SEQ ID NO: 873 - RNA, 17 nt, Hepatitis B Virus
aaaauaccuaugggagu

SEQ ID NO: 874 - RNA, 17 nt, Hepatitis B Virus
gagugggccucaguccg

SEQ ID NO: 875 - RNA, 17 nt, Hepatitis B Virus
agugggccucaguccgu

SEQ ID NO: 876 - RNA, 17 nt, Hepatitis B Virus
ugggccucaguccguuu

SEQ ID NO: 877 - RNA, 17 nt, Hepatitis B Virus
ccucaguccguuucucu

SEQ ID NO: 878 - RNA, 17 nt, Hepatitis B Virus
uccguuucucuuggcuc

SEQ ID NO: 879 - RNA, 17 nt, Hepatitis B Virus
cguuucucuuggcucag

SEQ ID NO: 880 - RNA, 17 nt, Hepatitis B Virus
cucuuggcucaguuuac

SEQ ID NO: 881 - RNA, 17 nt, Hepatitis B Virus
cuuggcucaguuuacua

SEQ ID NO: 882 - RNA, 17 nt, Hepatitis B Virus
caguuuacuagugccau

SEQ ID NO: 883 - RNA, 17 nt, Hepatitis B Virus
acuagugccauuuguuc

SEQ ID NO: 884 - RNA, 17 nt, Hepatitis B Virus
cuagugccauuuguuca

SEQ ID NO: 885 - RNA, 17 nt, Hepatitis B Virus
auuuguucagugguucg

SEQ ID NO: 886 - RNA, 17 nt, Hepatitis B Virus
cguagggcuuuccccca

SEQ ID NO: 887 - RNA, 17 nt, Hepatitis B Virus
gggcuuucccccacugu

SEQ ID NO: 888 - RNA, 17 nt, Hepatitis B Virus
ggcuuucccccacuguc

SEQ ID NO: 889 - RNA, 17 nt, Hepatitis B Virus
gcuuucccccacugucu

SEQ ID NO: 890 - RNA, 17 nt, Hepatitis B Virus
cuuucccccacugucug

SEQ ID NO: 891 - RNA, 17 nt, Hepatitis B Virus
uuucccccacugucugg

SEQ ID NO: 892 - RNA, 17 nt, Hepatitis B Virus
ucccccacugucuggcu

SEQ ID NO: 893 - RNA, 17 nt, Hepatitis B Virus
ccacugucuggcuuuca

SEQ ID NO: 894 - RNA, 17 nt, Hepatitis B Virus
ugucuggcuuucaguua

SEQ ID NO: 895 - RNA, 17 nt, Hepatitis B Virus
uggcuuucaguuauaug

SEQ ID NO: 896 - RNA, 17 nt, Hepatitis B Virus
uugggggccaagucugu

SEQ ID NO: 897 - RNA, 17 nt, Hepatitis B Virus
ugggggccaagucugua

SEQ ID NO: 898 - RNA, 17 nt, Hepatitis B Virus
gccaagucuguacaaca

SEQ ID NO: 899 - RNA, 17 nt, Hepatitis B Virus
gucuguacaacaucuug

SEQ ID NO: 900 - RNA, 17 nt, Hepatitis B Virus
uguacaacaucuugagu

SEQ ID NO: 901 - RNA, 17 nt, Hepatitis B Virus
acaacaucuugaguccc

SEQ ID NO: 902 - RNA, 17 nt, Hepatitis B Virus
cuugagucccuuuaugc

SEQ ID NO: 903 - RNA, 17 nt, Hepatitis B Virus
uugagucccuuuaugcc

SEQ ID NO: 904 - RNA, 17 nt, Hepatitis B Virus
ugagucccuuuaugccg

SEQ ID NO: 905 - RNA, 17 nt, Hepatitis B Virus
cuuuaugccgcuguuac

SEQ ID NO: 906 - RNA, 17 nt, Hepatitis B Virus
uaugccgcuguuaccaa

SEQ ID NO: 907 - RNA, 17 nt, Hepatitis B Virus
gcuguuaccaauuuucu

SEQ ID NO: 908 - RNA, 17 nt, Hepatitis B Virus
cuguuaccaauuuucuu

SEQ ID NO: 909 - RNA, 17 nt, Hepatitis B Virus
caauuuucuuuugucuu

SEQ ID NO: 910 - RNA, 17 nt, Hepatitis B Virus
cuuuugucuuuggguau

SEQ ID NO: 911 - RNA, 17 nt, Hepatitis B Virus
ggguauacauuuaaacc

SEQ ID NO: 912 - RNA, 17 nt, Hepatitis B Virus
auuuaaacccucacaaa

SEQ ID NO: 913 - RNA, 17 nt, Hepatitis B Virus
uuuaaacccucacaaaa

SEQ ID NO: 914 - RNA, 17 nt, Hepatitis B Virus
uuaaacccucacaaaac

SEQ ID NO: 915 - RNA, 17 nt, Hepatitis B Virus
aaacccucacaaaacaa

SEQ ID NO: 916 - RNA, 17 nt, Hepatitis B Virus
acccucacaaaacaaaa

SEQ ID NO: 917 - RNA, 17 nt, Hepatitis B Virus
cacaaaacaaaaagaug

SEQ ID NO: 918 - RNA, 17 nt, Hepatitis B Virus
ggauauucccuuaacuu

SEQ ID NO: 919 - RNA, 17 nt, Hepatitis B Virus
gauauucccuuaacuuc

SEQ ID NO: 920 - RNA, 17 nt, Hepatitis B Virus
auauucccuuaacuuca

SEQ ID NO: 921 - RNA, 17 nt, Hepatitis B Virus
cccuuaacuucauggga

SEQ ID NO: 922 - RNA, 17 nt, Hepatitis B Virus
uuaacuucaugggauau

SEQ ID NO: 923 - RNA, 17 nt, Hepatitis B Virus
guuggggcacauugcca

SEQ ID NO: 924 - RNA, 17 nt, Hepatitis B Virus
uggggcacauugccaca

SEQ ID NO: 925 - RNA, 17 nt, Hepatitis B Virus
cacauugccacaggaac

SEQ ID NO: 926 - RNA, 17 nt, Hepatitis B Virus
acauugccacaggaaca

SEQ ID NO: 927 - RNA, 17 nt, Hepatitis B Virus
auugccacaggaacaua

SEQ ID NO: 928 - RNA, 17 nt, Hepatitis B Virus
acaggaacauauuguac

SEQ ID NO: 929 - RNA, 17 nt, Hepatitis B Virus
uauuguacaaaaaauca

SEQ ID NO: 930 - RNA, 17 nt, Hepatitis B Virus
aaaaaaucaaaaugugu

SEQ ID NO: 931 - RNA, 17 nt, Hepatitis B Virus
uaggaaacuuccuguaa

SEQ ID NO: 932 - RNA, 17 nt, Hepatitis B Virus
gaaacuuccuguaaaca

SEQ ID NO: 933 - RNA, 17 nt, Hepatitis B Virus
aaacuuccuguaaacag

SEQ ID NO: 934 - RNA, 17 nt, Hepatitis B Virus
cuguaaacaggccuauu

SEQ ID NO: 935 - RNA, 17 nt, Hepatitis B Virus
aaacaggccuauugauu

SEQ ID NO: 936 - RNA, 17 nt, Hepatitis B Virus
aacaggccuauugauug

SEQ ID NO: 937 - RNA, 17 nt, Hepatitis B Virus
aguaugucaacgaauug

SEQ ID NO: 938 - RNA, 17 nt, Hepatitis B Virus
ugugggucuuuuggggu

SEQ ID NO: 939 - RNA, 17 nt, Hepatitis B Virus
ggguuugccgccccuuu

SEQ ID NO: 940 - RNA, 17 nt, Hepatitis B Virus
uuugccgccccuuucac

SEQ ID NO: 941 - RNA, 17 nt, Hepatitis B Virus
uugccgccccuuucacg

SEQ ID NO: 942 - RNA, 17 nt, Hepatitis B Virus
ugccgccccuuucacgc

SEQ ID NO: 943 - RNA, 17 nt, Hepatitis B Virus
gccgccccuuucacgca

SEQ ID NO: 944 - RNA, 17 nt, Hepatitis B Virus
ccccuuucacgcaaugu

SEQ ID NO: 945 - RNA, 17 nt, Hepatitis B Virus
uuucacgcaauguggau

SEQ ID NO: 946 - RNA, 17 nt, Hepatitis B Virus
ggauauucugcuuuaau

SEQ ID NO: 947 - RNA, 17 nt, Hepatitis B Virus
uauucugcuuuaaugcc

SEQ ID NO: 948 - RNA, 17 nt, Hepatitis B Virus
uuuaaugccuuuauaug

SEQ ID NO: 949 - RNA, 17 nt, Hepatitis B Virus
uuaaugccuuuauaugc

SEQ ID NO: 950 - RNA, 17 nt, Hepatitis B Virus
uuauaugcaugcauaca

SEQ ID NO: 951 - RNA, 17 nt, Hepatitis B Virus
augcaugcauacaagca

SEQ ID NO: 952 - RNA, 17 nt, Hepatitis B Virus
augcauacaagcaaaac

SEQ ID NO: 953 - RNA, 17 nt, Hepatitis B Virus
auacaagcaaaacaggc

SEQ ID NO: 954 - RNA, 17 nt, Hepatitis B Virus
agcaaaacaggcuuuua

SEQ ID NO: 955 - RNA, 17 nt, Hepatitis B Virus
aaacaggcuuuuacuuu

SEQ ID NO: 956 - RNA, 17 nt, Hepatitis B Virus
gcuuuuacuuucucgcc

SEQ ID NO: 957 - RNA, 17 nt, Hepatitis B Virus
uuacuuucucgccaacu

SEQ ID NO: 958 - RNA, 17 nt, Hepatitis B Virus
uuucucgccaacuuaca

SEQ ID NO: 959 - RNA, 17 nt, Hepatitis B Virus
uucucgccaacuuacaa

SEQ ID NO: 960 - RNA, 17 nt, Hepatitis B Virus
ucgccaacuuacaaggc

SEQ ID NO: 961 - RNA, 17 nt, Hepatitis B Virus
caacuuacaaggccuuu

SEQ ID NO: 962 - RNA, 17 nt, Hepatitis B Virus
uacaaggccuuucuaag

SEQ ID NO: 963 - RNA, 17 nt, Hepatitis B Virus
acaaggccuuucuaagu

SEQ ID NO: 964 - RNA, 17 nt, Hepatitis B Virus
ggccuuucuaaguaaac

SEQ ID NO: 965 - RNA, 17 nt, Hepatitis B Virus
aaguaaacaguauguga

SEQ ID NO: 966 - RNA, 17 nt, Hepatitis B Virus
augugaaccuuuacccc

SEQ ID NO: 967 - RNA, 17 nt, Hepatitis B Virus
ugugaaccuuuaccccg

SEQ ID NO: 968 - RNA, 17 nt, Hepatitis B Virus
accuuuaccccguugcu

SEQ ID NO: 969 - RNA, 17 nt, Hepatitis B Virus
ccuuuaccccguugcuc

SEQ ID NO: 970 - RNA, 17 nt, Hepatitis B Virus
cuuuaccccguugcucg

SEQ ID NO: 971 - RNA, 17 nt, Hepatitis B Virus
cccguugcucggcaacg

SEQ ID NO: 972 - RNA, 17 nt, Hepatitis B Virus
ugcucggcaacggccug

SEQ ID NO: 973 - RNA, 17 nt, Hepatitis B Virus
gcaacggccuggucuau

SEQ ID NO: 974 - RNA, 17 nt, Hepatitis B Virus
caacggccuggucuaug

SEQ ID NO: 975 - RNA, 17 nt, Hepatitis B Virus
gccuggucuaugccaag

SEQ ID NO: 976 - RNA, 17 nt, Hepatitis B Virus
gucuaugccaaguguuu

SEQ ID NO: 977 - RNA, 17 nt, Hepatitis B Virus
ucuaugccaaguguuug

SEQ ID NO: 978 - RNA, 17 nt, Hepatitis B Virus
guguuugcugacgcaac

SEQ ID NO: 979 - RNA, 17 nt, Hepatitis B Virus
gcugacgcaacccccac

SEQ ID NO: 980 - RNA, 17 nt, Hepatitis B Virus
gacgcaacccccacugg

SEQ ID NO: 981 - RNA, 17 nt, Hepatitis B Virus
acgcaacccccacuggu

SEQ ID NO: 982 - RNA, 17 nt, Hepatitis B Virus
cgcaacccccacugguu

SEQ ID NO: 983 - RNA, 17 nt, Hepatitis B Virus
gcaacccccacugguug

SEQ ID NO: 984 - RNA, 17 nt, Hepatitis B Virus
caacccccacugguugg

SEQ ID NO: 985 - RNA, 17 nt, Hepatitis B Virus
acccccacugguugggg

SEQ ID NO: 986 - RNA, 17 nt, Hepatitis B Virus
guuggggcuuggccaua

SEQ ID NO: 987 - RNA, 17 nt, Hepatitis B Virus
ggcuuggccauaggcca

SEQ ID NO: 988 - RNA, 17 nt, Hepatitis B Virus
gcuuggccauaggccau

SEQ ID NO: 989 - RNA, 17 nt, Hepatitis B Virus
ccauaggccaucagcgc

SEQ ID NO: 990 - RNA, 17 nt, Hepatitis B Virus
cauaggccaucagcgca

SEQ ID NO: 991 - RNA, 17 nt, Hepatitis B Virus
aggccaucagcgcaugc

SEQ ID NO: 992 - RNA, 17 nt, Hepatitis B Virus
aucagcgcaugcgugga

SEQ ID NO: 993 - RNA, 17 nt, Hepatitis B Virus
cguggaaccuuuguguc

SEQ ID NO: 994 - RNA, 17 nt, Hepatitis B Virus
guggaaccuuugugucu

SEQ ID NO: 995 - RNA, 17 nt, Hepatitis B Virus
uuugugucuccucugcc

SEQ ID NO: 996 - RNA, 17 nt, Hepatitis B Virus
ugugucuccucugccga

SEQ ID NO: 997 - RNA, 17 nt, Hepatitis B Virus
gugucuccucugccgau

SEQ ID NO: 998 - RNA, 17 nt, Hepatitis B Virus
gucuccucugccgaucc

SEQ ID NO: 999 - RNA, 17 nt, Hepatitis B Virus
uccucugccgauccaua

SEQ ID NO: 1000 - RNA, 17 nt, Hepatitis B Virus
ugccgauccauaccgcg

SEQ ID NO: 1001 - RNA, 17 nt, Hepatitis B Virus
gccgauccauaccgcgg

SEQ ID NO: 1002 - RNA, 17 nt, Hepatitis B Virus
auccauaccgcggaacu

SEQ ID NO: 1003 - RNA, 17 nt, Hepatitis B Virus
cgcggaacuccuagccg

SEQ ID NO: 1004 - RNA, 17 nt, Hepatitis B Virus
cggaacuccuagccgcu

SEQ ID NO: 1005 - RNA, 17 nt, Hepatitis B Virus
ggaacuccuagccgcuu

SEQ ID NO: 1006 - RNA, 17 nt, Hepatitis B Virus
cuccuagccgcuuguuu

SEQ ID NO: 1007 - RNA, 17 nt, Hepatitis B Virus
cuagccgcuuguuuugc

SEQ ID NO: 1008 - RNA, 17 nt, Hepatitis B Virus
uguuuugcucgcagcag

SEQ ID NO: 1009 - RNA, 17 nt, Hepatitis B Virus
uugcucgcagcaggucu

SEQ ID NO: 1010 - RNA, 17 nt, Hepatitis B Virus
cucgcagcaggucuggg

SEQ ID NO: 1011 - RNA, 17 nt, Hepatitis B Virus
agcaggucuggggcaaa

SEQ ID NO: 1012 - RNA, 17 nt, Hepatitis B Virus
ucuggggcaaaacucau

SEQ ID NO: 1013 - RNA, 17 nt, Hepatitis B Virus
ggcaaaacucaucggga

SEQ ID NO: 1014 - RNA, 17 nt, Hepatitis B Virus
caaaacucaucgggacu

SEQ ID NO: 1015 - RNA, 17 nt, Hepatitis B Virus
aucgggacugacaauuc

SEQ ID NO: 1016 - RNA, 17 nt, Hepatitis B Virus
ggacugacaauucuguc

SEQ ID NO: 1017 - RNA, 17 nt, Hepatitis B Virus
gacaauucugucgugcu

SEQ ID NO: 1018 - RNA, 17 nt, Hepatitis B Virus
ugucgugcucucccgca

SEQ ID NO: 1019 - RNA, 17 nt, Hepatitis B Virus
ucgugcucucccgcaaa

SEQ ID NO: 1020 - RNA, 17 nt, Hepatitis B Virus
gugcucucccgcaaaua

SEQ ID NO: 1021 - RNA, 17 nt, Hepatitis B Virus
ugcucucccgcaaauau

SEQ ID NO: 1022 - RNA, 17 nt, Hepatitis B Virus
ucucccgcaaauauaca

SEQ ID NO: 1023 - RNA, 17 nt, Hepatitis B Virus
aaauauacaucauuucc

SEQ ID NO: 1024 - RNA, 17 nt, Hepatitis B Virus
uauacaucauuuccaug

SEQ ID NO: 1025 - RNA, 17 nt, Hepatitis B Virus
aucauuuccauggcugc

SEQ ID NO: 1026 - RNA, 17 nt, Hepatitis B Virus
ucauuuccauggcugcu

SEQ ID NO: 1027 - RNA, 17 nt, Hepatitis B Virus
uccauggcugcuaggcu

SEQ ID NO: 1028 - RNA, 17 nt, Hepatitis B Virus
auggcugcuaggcugug

SEQ ID NO: 1029 - RNA, 17 nt, Hepatitis B Virus
ugcuaggcugugcugcc

SEQ ID NO: 1030 - RNA, 17 nt, Hepatitis B Virus
ggcugugcugccaacug

SEQ ID NO: 1031 - RNA, 17 nt, Hepatitis B Virus
ugugcugccaacuggau

SEQ ID NO: 1032 - RNA, 17 nt, Hepatitis B Virus
gugcugccaacuggauc

SEQ ID NO: 1033 - RNA, 17 nt, Hepatitis B Virus
cugccaacuggauccua

SEQ ID NO: 1034 - RNA, 17 nt, Hepatitis B Virus
acuggauccuacgcggg

SEQ ID NO: 1035 - RNA, 17 nt, Hepatitis B Virus
cuggauccuacgcggga

SEQ ID NO: 1036 - RNA, 17 nt, Hepatitis B Virus
gggacguccuuuguuua

SEQ ID NO: 1037 - RNA, 17 nt, Hepatitis B Virus
ggacguccuuuguuuac

SEQ ID NO: 1038 - RNA, 17 nt, Hepatitis B Virus
uuuacgucccgucggcg

SEQ ID NO: 1039 - RNA, 17 nt, Hepatitis B Virus
uuacgucccgucggcgc

SEQ ID NO: 1040 - RNA, 17 nt, Hepatitis B Virus
gucggcgcugaaucccg

SEQ ID NO: 1041 - RNA, 17 nt, Hepatitis B Virus
gcugaaucccgcggacg

SEQ ID NO: 1042 - RNA, 17 nt, Hepatitis B Virus
cugaaucccgcggacga

SEQ ID NO: 1043 - RNA, 17 nt, Hepatitis B Virus
cggacgaccccucccgg

SEQ ID NO: 1044 - RNA, 17 nt, Hepatitis B Virus
ggacgaccccucccggg

SEQ ID NO: 1045 - RNA, 17 nt, Hepatitis B Virus
gacgaccccucccgggg

SEQ ID NO: 1046 - RNA, 17 nt, Hepatitis B Virus
acgaccccucccggggc

SEQ ID NO: 1047 - RNA, 17 nt, Hepatitis B Virus
gaccccucccggggccg

SEQ ID NO: 1048 - RNA, 17 nt, Hepatitis B Virus
accccucccggggccgc

SEQ ID NO: 1049 - RNA, 17 nt, Hepatitis B Virus
cccggggccgcuugggg

SEQ ID NO: 1050 - RNA, 17 nt, Hepatitis B Virus
ggggccgcuuggggcuc

SEQ ID NO: 1051 - RNA, 17 nt, Hepatitis B Virus
cuuggggcucuaccgcc

SEQ ID NO: 1052 - RNA, 17 nt, Hepatitis B Virus
uggggcucuaccgcccg

SEQ ID NO: 1053 - RNA, 17 nt, Hepatitis B Virus
ggcucuaccgcccgcuu

SEQ ID NO: 1054 - RNA, 17 nt, Hepatitis B Virus
ucuaccgcccgcuucuc

SEQ ID NO: 1055 - RNA, 17 nt, Hepatitis B Virus
cuaccgcccgcuucucc

SEQ ID NO: 1056 - RNA, 17 nt, Hepatitis B Virus
ccgcccgcuucuccgcc

SEQ ID NO: 1057 - RNA, 17 nt, Hepatitis B Virus
cccgcuucuccgccuau

SEQ ID NO: 1058 - RNA, 17 nt, Hepatitis B Virus
cgcuucuccgccuauug

SEQ ID NO: 1059 - RNA, 17 nt, Hepatitis B Virus
uucuccgccuauuguac

SEQ ID NO: 1060 - RNA, 17 nt, Hepatitis B Virus
ucuccgccuauuguacc

SEQ ID NO: 1061 - RNA, 17 nt, Hepatitis B Virus
uauuguaccgaccgucc

SEQ ID NO: 1062 - RNA, 17 nt, Hepatitis B Virus
guaccgaccguccacgg

SEQ ID NO: 1063 - RNA, 17 nt, Hepatitis B Virus
cgaccguccacggggcg

SEQ ID NO: 1064 - RNA, 17 nt, Hepatitis B Virus
gaccguccacggggcgc

SEQ ID NO: 1065 - RNA, 17 nt, Hepatitis B Virus
cggggcgcaccucucuu

SEQ ID NO: 1066 - RNA, 17 nt, Hepatitis B Virus
gggcgcaccucucuuua

SEQ ID NO: 1067 - RNA, 17 nt, Hepatitis B Virus
ggcgcaccucucuuuac

SEQ ID NO: 1068 - RNA, 17 nt, Hepatitis B Virus
cgcaccucucuuuacgc

SEQ ID NO: 1069 - RNA, 17 nt, Hepatitis B Virus
caccucucuuuacgcgg

SEQ ID NO: 1070 - RNA, 17 nt, Hepatitis B Virus
acgcggacuccccgucu

SEQ ID NO: 1071 - RNA, 17 nt, Hepatitis B Virus
gcggacuccccgucugu

SEQ ID NO: 1072 - RNA, 17 nt, Hepatitis B Virus
cggacuccccgucugug

SEQ ID NO: 1073 - RNA, 17 nt, Hepatitis B Virus
ggacuccccgucugugc

SEQ ID NO: 1074 - RNA, 17 nt, Hepatitis B Virus
uccccgucugugccuuc

SEQ ID NO: 1075 - RNA, 17 nt, Hepatitis B Virus
gucugugccuucucauc

SEQ ID NO: 1076 - RNA, 17 nt, Hepatitis B Virus
ucugugccuucucaucu

SEQ ID NO: 1077 - RNA, 17 nt, Hepatitis B Virus
gugccuucucaucugcc

SEQ ID NO: 1078 - RNA, 17 nt, Hepatitis B Virus
gccuucucaucugccgg

SEQ ID NO: 1079 - RNA, 17 nt, Hepatitis B Virus
uucucaucugccggacc

SEQ ID NO: 1080 - RNA, 17 nt, Hepatitis B Virus
ucaucugccggaccgug

SEQ ID NO: 1081 - RNA, 17 nt, Hepatitis B Virus
ugccggaccgugugcac

SEQ ID NO: 1082 - RNA, 17 nt, Hepatitis B Virus
ccgugugcacuucgcuu

SEQ ID NO: 1083 - RNA, 17 nt, Hepatitis B Virus
gugugcacuucgcuuca

SEQ ID NO: 1084 - RNA, 17 nt, Hepatitis B Virus
cacuucgcuucaccucu

SEQ ID NO: 1085 - RNA, 17 nt, Hepatitis B Virus
uucgcuucaccucugca

SEQ ID NO: 1086 - RNA, 17 nt, Hepatitis B Virus
cgcuucaccucugcacg

SEQ ID NO: 1087 - RNA, 17 nt, Hepatitis B Virus
gcuucaccucugcacgu

SEQ ID NO: 1088 - RNA, 17 nt, Hepatitis B Virus
uucaccucugcacgucg

SEQ ID NO: 1089 - RNA, 17 nt, Hepatitis B Virus
accucugcacgucgcau

SEQ ID NO: 1090 - RNA, 17 nt, Hepatitis B Virus
cacgucgcauggagacc

SEQ ID NO: 1091 - RNA, 17 nt, Hepatitis B Virus
auggagaccaccgugaa

SEQ ID NO: 1092 - RNA, 17 nt, Hepatitis B Virus
uggagaccaccgugaac

SEQ ID NO: 1093 - RNA, 17 nt, Hepatitis B Virus
gagaccaccgugaacgc

SEQ ID NO: 1094 - RNA, 17 nt, Hepatitis B Virus
gugaacgcccacaggaa

SEQ ID NO: 1095 - RNA, 17 nt, Hepatitis B Virus
ugaacgcccacaggaac

SEQ ID NO: 1096 - RNA, 17 nt, Hepatitis B Virus
gaacgcccacaggaacc

SEQ ID NO: 1097 - RNA, 17 nt, Hepatitis B Virus
acgcccacaggaaccug

SEQ ID NO: 1098 - RNA, 17 nt, Hepatitis B Virus
acaggaaccugcccaag

SEQ ID NO: 1099 - RNA, 17 nt, Hepatitis B Virus
caggaaccugcccaagg

SEQ ID NO: 1100 - RNA, 17 nt, Hepatitis B Virus
gaaccugcccaaggucu

SEQ ID NO: 1101 - RNA, 17 nt, Hepatitis B Virus
aaccugcccaaggucuu

SEQ ID NO: 1102 - RNA, 17 nt, Hepatitis B Virus
accugcccaaggucuug

SEQ ID NO: 1103 - RNA, 17 nt, Hepatitis B Virus
ccaaggucuugcauaag

SEQ ID NO: 1104 - RNA, 17 nt, Hepatitis B Virus
ggucuugcauaagagga

SEQ ID NO: 1105 - RNA, 17 nt, Hepatitis B Virus
aagaggacucuuggacu

SEQ ID NO: 1106 - RNA, 17 nt, Hepatitis B Virus
gaggacucuuggacuuu

SEQ ID NO: 1107 - RNA, 17 nt, Hepatitis B Virus
ucuuggacuuucagcaa

SEQ ID NO: 1108 - RNA, 17 nt, Hepatitis B Virus
ggacuuucagcaauguc

SEQ ID NO: 1109 - RNA, 17 nt, Hepatitis B Virus
cuuucagcaaugucaac

SEQ ID NO: 1110 - RNA, 17 nt, Hepatitis B Virus
gcaaugucaacgaccga

SEQ ID NO: 1111 - RNA, 17 nt, Hepatitis B Virus
ucaacgaccgaccuuga

SEQ ID NO: 1112 - RNA, 17 nt, Hepatitis B Virus
cgaccgaccuugaggca

SEQ ID NO: 1113 - RNA, 17 nt, Hepatitis B Virus
gaccgaccuugaggcau

SEQ ID NO: 1114 - RNA, 17 nt, Hepatitis B Virus
cuugaggcauacuucaa

SEQ ID NO: 1115 - RNA, 17 nt, Hepatitis B Virus
aggcauacuucaaagac

SEQ ID NO: 1116 - RNA, 17 nt, Hepatitis B Virus
cauacuucaaagacugu

SEQ ID NO: 1117 - RNA, 17 nt, Hepatitis B Virus
ucaaagacuguguguuu

SEQ ID NO: 1118 - RNA, 17 nt, Hepatitis B Virus
uaaaggucuuuguacua

SEQ ID NO: 1119 - RNA, 17 nt, Hepatitis B Virus
cuuuguacuaggaggcu

SEQ ID NO: 1120 - RNA, 17 nt, Hepatitis B Virus
uaggaggcuguaggcau

SEQ ID NO: 1121 - RNA, 17 nt, Hepatitis B Virus
cuguaggcauaaauugg

SEQ ID NO: 1122 - RNA, 17 nt, Hepatitis B Virus
guguguucaccagcacc

SEQ ID NO: 1123 - RNA, 17 nt, Hepatitis B Virus
guguucaccagcaccau

SEQ ID NO: 1124 - RNA, 17 nt, Hepatitis B Virus
uguucaccagcaccaug

SEQ ID NO: 1125 - RNA, 17 nt, Hepatitis B Virus
ucaccagcaccaugcaa

SEQ ID NO: 1126 - RNA, 17 nt, Hepatitis B Virus
accagcaccaugcaacu

SEQ ID NO: 1127 - RNA, 17 nt, Hepatitis B Virus
ccagcaccaugcaacuu

SEQ ID NO: 1128 - RNA, 17 nt, Hepatitis B Virus
caccaugcaacuuuuuc

SEQ ID NO: 1129 - RNA, 17 nt, Hepatitis B Virus
caugcaacuuuuucacc

SEQ ID NO: 1130 - RNA, 17 nt, Hepatitis B Virus
acuuuuucaccucugcc

SEQ ID NO: 1131 - RNA, 17 nt, Hepatitis B Virus
uuuuucaccucugccua

SEQ ID NO: 1132 - RNA, 17 nt, Hepatitis B Virus
uuuucaccucugccuaa

SEQ ID NO: 1133 - RNA, 17 nt, Hepatitis B Virus
uucaccucugccuaauc

SEQ ID NO: 1134 - RNA, 17 nt, Hepatitis B Virus
accucugccuaaucauc

SEQ ID NO: 1135 - RNA, 17 nt, Hepatitis B Virus
ccucugccuaaucaucu

SEQ ID NO: 1136 - RNA, 17 nt, Hepatitis B Virus
gccuaaucaucucaugu

SEQ ID NO: 1137 - RNA, 17 nt, Hepatitis B Virus
uaaucaucucauguuca

SEQ ID NO: 1138 - RNA, 17 nt, Hepatitis B Virus
aucaucucauguucaug

SEQ ID NO: 1139 - RNA, 17 nt, Hepatitis B Virus
ucauguucauguccuac

SEQ ID NO: 1140 - RNA, 17 nt, Hepatitis B Virus
uucauguccuacuguuc

SEQ ID NO: 1141 - RNA, 17 nt, Hepatitis B Virus
ucauguccuacuguuca

SEQ ID NO: 1142 - RNA, 17 nt, Hepatitis B Virus
uguccuacuguucaagc

SEQ ID NO: 1143 - RNA, 17 nt, Hepatitis B Virus
uacuguucaagccucca

SEQ ID NO: 1144 - RNA, 17 nt, Hepatitis B Virus
guucaagccuccaagcu

SEQ ID NO: 1145 - RNA, 17 nt, Hepatitis B Virus
uucaagccuccaagcug

SEQ ID NO: 1146 - RNA, 17 nt, Hepatitis B Virus
caagccuccaagcugug

SEQ ID NO: 1147 - RNA, 17 nt, Hepatitis B Virus
aagccuccaagcugugc

SEQ ID NO: 1148 - RNA, 17 nt, Hepatitis B Virus
cuccaagcugugccuug

SEQ ID NO: 1149 - RNA, 17 nt, Hepatitis B Virus
agcugugccuugggugg

SEQ ID NO: 1150 - RNA, 17 nt, Hepatitis B Virus
gcugugccuuggguggc

SEQ ID NO: 1151 - RNA, 17 nt, Hepatitis B Virus
uggguggcuuuggggca

SEQ ID NO: 1152 - RNA, 17 nt, Hepatitis B Virus
uuuggggcauggacauu

SEQ ID NO: 1153 - RNA, 17 nt, Hepatitis B Virus
gcauggacauugacccg

SEQ ID NO: 1154 - RNA, 17 nt, Hepatitis B Virus
acauugacccguauaaa

SEQ ID NO: 1155 - RNA, 17 nt, Hepatitis B Virus
cauugacccguauaaag

SEQ ID NO: 1156 - RNA, 17 nt, Hepatitis B Virus
uuuggagcuucugugga

SEQ ID NO: 1157 - RNA, 17 nt, Hepatitis B Virus
ggagcuucuguggaguu

SEQ ID NO: 1158 - RNA, 17 nt, Hepatitis B Virus
ggaguuacucucuuuuu

SEQ ID NO: 1159 - RNA, 17 nt, Hepatitis B Virus
aguuacucucuuuuuug

SEQ ID NO: 1160 - RNA, 17 nt, Hepatitis B Virus
uuacucucuuuuuugcc

SEQ ID NO: 1161 - RNA, 17 nt, Hepatitis B Virus
uuuuuugccuucugacu

SEQ ID NO: 1162 - RNA, 17 nt, Hepatitis B Virus
uuuuugccuucugacuu

SEQ ID NO: 1163 - RNA, 17 nt, Hepatitis B Virus
uugccuucugacuucuu

SEQ ID NO: 1164 - RNA, 17 nt, Hepatitis B Virus
cuucugacuucuuuccu

SEQ ID NO: 1165 - RNA, 17 nt, Hepatitis B Virus
cugacuucuuuccuucu

SEQ ID NO: 1166 - RNA, 17 nt, Hepatitis B Virus
cuucuuuccuucuauuc

SEQ ID NO: 1167 - RNA, 17 nt, Hepatitis B Virus
uucuuuccuucuauucg

SEQ ID NO: 1168 - RNA, 17 nt, Hepatitis B Virus
uuuccuucuauucgaga

SEQ ID NO: 1169 - RNA, 17 nt, Hepatitis B Virus
ucgagaucuccucgaca

SEQ ID NO: 1170 - RNA, 17 nt, Hepatitis B Virus
gagaucuccucgacacc

SEQ ID NO: 1171 - RNA, 17 nt, Hepatitis B Virus
agaucuccucgacaccg

SEQ ID NO: 1172 - RNA, 17 nt, Hepatitis B Virus
uccucgacaccgccucu

SEQ ID NO: 1173 - RNA, 17 nt, Hepatitis B Virus
cucgacaccgccucugc

SEQ ID NO: 1174 - RNA, 17 nt, Hepatitis B Virus
gacaccgccucugcucu

SEQ ID NO: 1175 - RNA, 17 nt, Hepatitis B Virus
acaccgccucugcucug

SEQ ID NO: 1176 - RNA, 17 nt, Hepatitis B Virus
accgccucugcucugua

SEQ ID NO: 1177 - RNA, 17 nt, Hepatitis B Virus
gccucugcucuguaucg

SEQ ID NO: 1178 - RNA, 17 nt, Hepatitis B Virus
cucugcucuguaucggg

SEQ ID NO: 1179 - RNA, 17 nt, Hepatitis B Virus
cggggggccuuagaguc

SEQ ID NO: 1180 - RNA, 17 nt, Hepatitis B Virus
ggggggccuuagagucu

SEQ ID NO: 1181 - RNA, 17 nt, Hepatitis B Virus
uuagagucuccggaaca

SEQ ID NO: 1182 - RNA, 17 nt, Hepatitis B Virus
agagucuccggaacauu

SEQ ID NO: 1183 - RNA, 17 nt, Hepatitis B Virus
uccggaacauuguucac

SEQ ID NO: 1184 - RNA, 17 nt, Hepatitis B Virus
cauuguucaccucacca

SEQ ID NO: 1185 - RNA, 17 nt, Hepatitis B Virus
uuguucaccucaccaua

SEQ ID NO: 1186 - RNA, 17 nt, Hepatitis B Virus
uguucaccucaccauac

SEQ ID NO: 1187 - RNA, 17 nt, Hepatitis B Virus
uucaccucaccauacgg

SEQ ID NO: 1188 - RNA, 17 nt, Hepatitis B Virus
caccucaccauacggca

SEQ ID NO: 1189 - RNA, 17 nt, Hepatitis B Virus
accucaccauacggcac

SEQ ID NO: 1190 - RNA, 17 nt, Hepatitis B Virus
cauacggcacucaggca

SEQ ID NO: 1191 - RNA, 17 nt, Hepatitis B Virus
uacggcacucaggcaag

SEQ ID NO: 1192 - RNA, 17 nt, Hepatitis B Virus
cggcacucaggcaagcu

SEQ ID NO: 1193 - RNA, 17 nt, Hepatitis B Virus
acucaggcaagcuauuc

SEQ ID NO: 1194 - RNA, 17 nt, Hepatitis B Virus
aggcaagcuauucugug

SEQ ID NO: 1195 - RNA, 17 nt, Hepatitis B Virus
agcuauucuguguuggg

SEQ ID NO: 1196 - RNA, 17 nt, Hepatitis B Virus
gaugaaucuagccaccu

SEQ ID NO: 1197 - RNA, 17 nt, Hepatitis B Virus
aaucuagccaccugggu

SEQ ID NO: 1198 - RNA, 17 nt, Hepatitis B Virus
aucuagccaccugggug

SEQ ID NO: 1199 - RNA, 17 nt, Hepatitis B Virus
cuagccaccuggguggg

SEQ ID NO: 1200 - RNA, 17 nt, Hepatitis B Virus
uagccaccuggguggga

SEQ ID NO: 1201 - RNA, 17 nt, Hepatitis B Virus
ggaagauccagcaucca

SEQ ID NO: 1202 - RNA, 17 nt, Hepatitis B Virus
gaagauccagcauccag

SEQ ID NO: 1203 - RNA, 17 nt, Hepatitis B Virus
gauccagcauccaggga

SEQ ID NO: 1204 - RNA, 17 nt, Hepatitis B Virus
ccagcauccagggaauu

SEQ ID NO: 1205 - RNA, 17 nt, Hepatitis B Virus
cagcauccagggaauua

SEQ ID NO: 1206 - RNA, 17 nt, Hepatitis B Virus
uaguagucagcuauguc

SEQ ID NO: 1207 - RNA, 17 nt, Hepatitis B Virus
uagucagcuaugucaac

SEQ ID NO: 1208 - RNA, 17 nt, Hepatitis B Virus
gcuaugucaacguuaau

SEQ ID NO: 1209 - RNA, 17 nt, Hepatitis B Virus
auaugggccuaaaaauc

SEQ ID NO: 1210 - RNA, 17 nt, Hepatitis B Virus
uaugggccuaaaaauca

SEQ ID NO: 1211 - RNA, 17 nt, Hepatitis B Virus
uaaaaaucagacaacua

SEQ ID NO: 1212 - RNA, 17 nt, Hepatitis B Virus
aaucagacaacuauugu

SEQ ID NO: 1213 - RNA, 17 nt, Hepatitis B Virus
cagacaacuauuguggu

SEQ ID NO: 1214 - RNA, 17 nt, Hepatitis B Virus
gugguuucacauuuccu

SEQ ID NO: 1215 - RNA, 17 nt, Hepatitis B Virus
gguuucacauuuccugu

SEQ ID NO: 1216 - RNA, 17 nt, Hepatitis B Virus
cacauuuccugucuuac

SEQ ID NO: 1217 - RNA, 17 nt, Hepatitis B Virus
acauuuccugucuuacu

SEQ ID NO: 1218 - RNA, 17 nt, Hepatitis B Virus
uuccugucuuacuuuug

SEQ ID NO: 1219 - RNA, 17 nt, Hepatitis B Virus
ugucuuacuuuugggcg

SEQ ID NO: 1220 - RNA, 17 nt, Hepatitis B Virus
cgagaaacuguucuuga

SEQ ID NO: 1221 - RNA, 17 nt, Hepatitis B Virus
aacuguucuugaauauu

SEQ ID NO: 1222 - RNA, 17 nt, Hepatitis B Virus
uuggugucuuuuggagu

SEQ ID NO: 1223 - RNA, 17 nt, Hepatitis B Virus
ggauucgcacuccuccu

SEQ ID NO: 1224 - RNA, 17 nt, Hepatitis B Virus
auucgcacuccuccugc

SEQ ID NO: 1225 - RNA, 17 nt, Hepatitis B Virus
ucgcacuccuccugcau

SEQ ID NO: 1226 - RNA, 17 nt, Hepatitis B Virus
cgcacuccuccugcaua

SEQ ID NO: 1227 - RNA, 17 nt, Hepatitis B Virus
cacuccuccugcauaua

SEQ ID NO: 1228 - RNA, 17 nt, Hepatitis B Virus
acuccuccugcauauag

SEQ ID NO: 1229 - RNA, 17 nt, Hepatitis B Virus
ccuccugcauauagacc

SEQ ID NO: 1230 - RNA, 17 nt, Hepatitis B Virus
auauagaccaccaaaug

SEQ ID NO: 1231 - RNA, 17 nt, Hepatitis B Virus
uauagaccaccaaaugc

SEQ ID NO: 1232 - RNA, 17 nt, Hepatitis B Virus
uagaccaccaaaugccc

SEQ ID NO: 1233 - RNA, 17 nt, Hepatitis B Virus
agaccaccaaaugcccc

SEQ ID NO: 1234 - RNA, 17 nt, Hepatitis B Virus
ccaaaugccccuaucuu

SEQ ID NO: 1235 - RNA, 17 nt, Hepatitis B Virus
caaaugccccuaucuua

SEQ ID NO: 1236 - RNA, 17 nt, Hepatitis B Virus
aaaugccccuaucuuau

SEQ ID NO: 1237 - RNA, 17 nt, Hepatitis B Virus
aaugccccuaucuuauc

SEQ ID NO: 1238 - RNA, 17 nt, Hepatitis B Virus
ccccuaucuuaucaaca

SEQ ID NO: 1239 - RNA, 17 nt, Hepatitis B Virus
aucuuaucaacacuucc

SEQ ID NO: 1240 - RNA, 17 nt, Hepatitis B Virus
uuaucaacacuuccgga

SEQ ID NO: 1241 - RNA, 17 nt, Hepatitis B Virus
aucaacacuuccggaaa

SEQ ID NO: 1242 - RNA, 17 nt, Hepatitis B Virus
aacacuuccggaaacua

SEQ ID NO: 1243 - RNA, 17 nt, Hepatitis B Virus
ccggaaacuacuguugu

SEQ ID NO: 1244 - RNA, 17 nt, Hepatitis B Virus
gaaacuacuguuguuag

SEQ ID NO: 1245 - RNA, 17 nt, Hepatitis B Virus
gaagaggcagguccccu

SEQ ID NO: 1246 - RNA, 17 nt, Hepatitis B Virus
ggcagguccccuagaag

SEQ ID NO: 1247 - RNA, 17 nt, Hepatitis B Virus
gcagguccccuagaaga

SEQ ID NO: 1248 - RNA, 17 nt, Hepatitis B Virus
cagguccccuagaagaa

SEQ ID NO: 1249 - RNA, 17 nt, Hepatitis B Virus
agguccccuagaagaag

SEQ ID NO: 1250 - RNA, 17 nt, Hepatitis B Virus
agaagaacucccucgcc

SEQ ID NO: 1251 - RNA, 17 nt, Hepatitis B Virus
aagaacucccucgccuc

SEQ ID NO: 1252 - RNA, 17 nt, Hepatitis B Virus
agaacucccucgccucg

SEQ ID NO: 1253 - RNA, 17 nt, Hepatitis B Virus
gaacucccucgccucgc

SEQ ID NO: 1254 - RNA, 17 nt, Hepatitis B Virus
ucccucgccucgcagac

SEQ ID NO: 1255 - RNA, 17 nt, Hepatitis B Virus
cccucgccucgcagacg

SEQ ID NO: 1256 - RNA, 17 nt, Hepatitis B Virus
cgccucgcagacgaagg

SEQ ID NO: 1257 - RNA, 17 nt, Hepatitis B Virus
cgaaggucucaaucgcc

SEQ ID NO: 1258 - RNA, 17 nt, Hepatitis B Virus
aaggucucaaucgccgc

SEQ ID NO: 1259 - RNA, 17 nt, Hepatitis B Virus
ucaaucgccgcgucgca

SEQ ID NO: 1260 - RNA, 17 nt, Hepatitis B Virus
cgcgucgcagaagaucu

SEQ ID NO: 1261 - RNA, 17 nt, Hepatitis B Virus
agaagaucucaaucucg

SEQ ID NO: 1262 - RNA, 17 nt, Hepatitis B Virus
aagaucucaaucucggg

SEQ ID NO: 1263 - RNA, 17 nt, Hepatitis B Virus
ucucaaucucgggaauc

SEQ ID NO: 1264 - RNA, 17 nt, Hepatitis B Virus
cgggaaucucaauguua

SEQ ID NO: 1265 - RNA, 17 nt, Hepatitis B Virus
ggaaucucaauguuagu

SEQ ID NO: 1266 - RNA, 17 nt, Hepatitis B Virus
uaguauuccuuggacac

SEQ ID NO: 1267 - RNA, 17 nt, Hepatitis B Virus
aguauuccuuggacaca

SEQ ID NO: 1268 - RNA, 17 nt, Hepatitis B Virus
ccuuggacacauaaggu

SEQ ID NO: 1269 - RNA, 17 nt, Hepatitis B Virus
uuggacacauaaggugg

SEQ ID NO: 1270 - RNA, 17 nt, Hepatitis B Virus
ugggaaacuuuacgggg

SEQ ID NO: 1271 - RNA, 17 nt, Hepatitis B Virus
uacggggcuuuauucuu

SEQ ID NO: 1272 - RNA, 17 nt, Hepatitis B Virus
cuuuauucuucuacggu

SEQ ID NO: 1273 - RNA, 17 nt, Hepatitis B Virus
uauucuucuacgguacc

SEQ ID NO: 1274 - RNA, 17 nt, Hepatitis B Virus
uacgguaccuugcuuua

SEQ ID NO: 1275 - RNA, 17 nt, Hepatitis B Virus
acgguaccuugcuuuaa

SEQ ID NO: 1276 - RNA, 17 nt, Hepatitis B Virus
uaccuugcuuuaauccu

SEQ ID NO: 1277 - RNA, 17 nt, Hepatitis B Virus
cuuuaauccuaaauggc

SEQ ID NO: 1278 - RNA, 17 nt, Hepatitis B Virus
uuuaauccuaaauggca

SEQ ID NO: 1279 - RNA, 17 nt, Hepatitis B Virus
uaaauggcaaacuccuu

SEQ ID NO: 1280 - RNA, 17 nt, Hepatitis B Virus
uggcaaacuccuucuuu

SEQ ID NO: 1281 - RNA, 17 nt, Hepatitis B Virus
gcaaacuccuucuuuuc

SEQ ID NO: 1282 - RNA, 17 nt, Hepatitis B Virus
caaacuccuucuuuucc

SEQ ID NO: 1283 - RNA, 17 nt, Hepatitis B Virus
acuccuucuuuuccuga

SEQ ID NO: 1284 - RNA, 17 nt, Hepatitis B Virus
uucuuuuccugacauuc

SEQ ID NO: 1285 - RNA, 17 nt, Hepatitis B Virus
ucuuuuccugacauuca

SEQ ID NO: 1286 - RNA, 17 nt, Hepatitis B Virus
uuccugacauucauuug

SEQ ID NO: 1287 - RNA, 17 nt, Hepatitis B Virus
ugacauucauuugcagg

SEQ ID NO: 1288 - RNA, 17 nt, Hepatitis B Virus
ucauuugcaggaggaca

SEQ ID NO: 1289 - RNA, 17 nt, Hepatitis B Virus
aggaggacauuguugau

SEQ ID NO: 1290 - RNA, 17 nt, Hepatitis B Virus
auguaagcaauuugugg

SEQ ID NO: 1291 - RNA, 17 nt, Hepatitis B Virus
uguggggccccuuacag

SEQ ID NO: 1292 - RNA, 17 nt, Hepatitis B Virus
guggggccccuuacagu

SEQ ID NO: 1293 - RNA, 17 nt, Hepatitis B Virus
uggggccccuuacagua

SEQ ID NO: 1294 - RNA, 17 nt, Hepatitis B Virus
ggggccccuuacaguaa

SEQ ID NO: 1295 - RNA, 17 nt, Hepatitis B Virus
ccccuuacaguaaauga

SEQ ID NO: 1296 - RNA, 17 nt, Hepatitis B Virus
augaaaacaggagacuu

SEQ ID NO: 1297 - RNA, 17 nt, Hepatitis B Virus
caggagacuuaaauuaa

SEQ ID NO: 1298 - RNA, 17 nt, Hepatitis B Virus
aaauuaacuaugccugc

SEQ ID NO: 1299 - RNA, 17 nt, Hepatitis B Virus
aacuaugccugcuaggu

SEQ ID NO: 1300 - RNA, 17 nt, Hepatitis B Virus
acuaugccugcuagguu

SEQ ID NO: 1301 - RNA, 17 nt, Hepatitis B Virus
augccugcuagguuuua

SEQ ID NO: 1302 - RNA, 17 nt, Hepatitis B Virus
guuuuaucccaauguua

SEQ ID NO: 1303 - RNA, 17 nt, Hepatitis B Virus
uuuuaucccaauguuac

SEQ ID NO: 1304 - RNA, 17 nt, Hepatitis B Virus
uuuaucccaauguuacu

SEQ ID NO: 1305 - RNA, 17 nt, Hepatitis B Virus
aauguuacuaaauauuu

SEQ ID NO: 1306 - RNA, 17 nt, Hepatitis B Virus
auauuugcccuuagaua

SEQ ID NO: 1307 - RNA, 17 nt, Hepatitis B Virus
uauuugcccuuagauaa

SEQ ID NO: 1308 - RNA, 17 nt, Hepatitis B Virus
auuugcccuuagauaaa

SEQ ID NO: 1309 - RNA, 17 nt, Hepatitis B Virus
aagggaucaaaccguau

SEQ ID NO: 1310 - RNA, 17 nt, Hepatitis B Virus
gaucaaaccguauuauc

SEQ ID NO: 1311 - RNA, 17 nt, Hepatitis B Virus
guauuauccagaguaug

SEQ ID NO: 1312 - RNA, 17 nt, Hepatitis B Virus
uauuauccagaguaugu

SEQ ID NO: 1313 - RNA, 17 nt, Hepatitis B Virus
aguuaaucauuacuucc

SEQ ID NO: 1314 - RNA, 17 nt, Hepatitis B Virus
aucauuacuuccagacg

SEQ ID NO: 1315 - RNA, 17 nt, Hepatitis B Virus
auuacuuccagacgcga

SEQ ID NO: 1316 - RNA, 17 nt, Hepatitis B Virus
uuacuuccagacgcgac

SEQ ID NO: 1317 - RNA, 17 nt, Hepatitis B Virus
gacgcgacauuauuuac

SEQ ID NO: 1318 - RNA, 17 nt, Hepatitis B Virus
uuauuuacacacucuuu

SEQ ID NO: 1319 - RNA, 17 nt, Hepatitis B Virus
auuuacacacucuuugg

SEQ ID NO: 1320 - RNA, 17 nt, Hepatitis B Virus
uuacacacucuuuggaa

SEQ ID NO: 1321 - RNA, 17 nt, Hepatitis B Virus
acacacucuuuggaagg

SEQ ID NO: 1322 - RNA, 17 nt, Hepatitis B Virus
cggggaucuuauauaaa

SEQ ID NO: 1323 - RNA, 17 nt, Hepatitis B Virus
agagaguccacacguag

SEQ ID NO: 1324 - RNA, 17 nt, Hepatitis B Virus
gagaguccacacguagc

SEQ ID NO: 1325 - RNA, 17 nt, Hepatitis B Virus
gaguccacacguagcgc

SEQ ID NO: 1326 - RNA, 17 nt, Hepatitis B Virus
cguagcgccucauuuug

SEQ ID NO: 1327 - RNA, 17 nt, Hepatitis B Virus
guagcgccucauuuugc

SEQ ID NO: 1328 - RNA, 17 nt, Hepatitis B Virus
agcgccucauuuugcgg

SEQ ID NO: 1329 - RNA, 17 nt, Hepatitis B Virus
ugcgggucaccauauuc

SEQ ID NO: 1330 - RNA, 17 nt, Hepatitis B Virus
cgggucaccauauucuu

SEQ ID NO: 1331 - RNA, 17 nt, Hepatitis B Virus
gggucaccauauucuug

SEQ ID NO: 1332 - RNA, 17 nt, Hepatitis B Virus
ccauauucuugggaaca

SEQ ID NO: 1333 - RNA, 17 nt, Hepatitis B Virus
uugggaacaagaucuac

SEQ ID NO: 1334 - RNA, 17 nt, Hepatitis B Virus
acaagaucuacagcaug

SEQ ID NO: 1335 - RNA, 17 nt, Hepatitis B Virus
agaucuacagcauggga

SEQ ID NO: 1336 - RNA, 17 nt, Hepatitis B Virus
ucuacagcaugggaggu

SEQ ID NO: 1337 - RNA, 17 nt, Hepatitis B Virus
gguuggucuuccaaacc

SEQ ID NO: 1338 - RNA, 17 nt, Hepatitis B Virus
uggucuuccaaaccucg

SEQ ID NO: 1339 - RNA, 17 nt, Hepatitis B Virus
ggucuuccaaaccucga

SEQ ID NO: 1340 - RNA, 17 nt, Hepatitis B Virus
uuccaaaccucgaaaag

SEQ ID NO: 1341 - RNA, 17 nt, Hepatitis B Virus
uccaaaccucgaaaagg

SEQ ID NO: 1342 - RNA, 17 nt, Hepatitis B Virus
gaaaaggcauggggaca

SEQ ID NO: 1343 - RNA, 17 nt, Hepatitis B Virus
auggggacaaaucuuuc

SEQ ID NO: 1344 - RNA, 17 nt, Hepatitis B Virus
gacaaaucuuucugucc

SEQ ID NO: 1345 - RNA, 17 nt, Hepatitis B Virus
aaucuuucuguccccaa

SEQ ID NO: 1346 - RNA, 17 nt, Hepatitis B Virus
uuucuguccccaauccc

SEQ ID NO: 1347 - RNA, 17 nt, Hepatitis B Virus
uucuguccccaaucccc

SEQ ID NO: 1348 - RNA, 17 nt, Hepatitis B Virus
ucuguccccaauccccu

SEQ ID NO: 1349 - RNA, 17 nt, Hepatitis B Virus
cuguccccaauccccug

SEQ ID NO: 1350 - RNA, 17 nt, Hepatitis B Virus
ccccaauccccugggau

SEQ ID NO: 1351 - RNA, 17 nt, Hepatitis B Virus
cccaauccccugggauu

SEQ ID NO: 1352 - RNA, 17 nt, Hepatitis B Virus
ccaauccccugggauuc

SEQ ID NO: 1353 - RNA, 17 nt, Hepatitis B Virus
caauccccugggauucu

SEQ ID NO: 1354 - RNA, 17 nt, Hepatitis B Virus
ugggauucuuccccgau

SEQ ID NO: 1355 - RNA, 17 nt, Hepatitis B Virus
gauucuuccccgaucau

SEQ ID NO: 1356 - RNA, 17 nt, Hepatitis B Virus
auucuuccccgaucauc

SEQ ID NO: 1357 - RNA, 17 nt, Hepatitis B Virus
uucuuccccgaucauca

SEQ ID NO: 1358 - RNA, 17 nt, Hepatitis B Virus
ccccgaucaucaguugg

SEQ ID NO: 1359 - RNA, 17 nt, Hepatitis B Virus
cgaucaucaguuggacc

SEQ ID NO: 1360 - RNA, 17 nt, Hepatitis B Virus
aguuggacccugcauuc

SEQ ID NO: 1361 - RNA, 17 nt, Hepatitis B Virus
guuggacccugcauuca

SEQ ID NO: 1362 - RNA, 17 nt, Hepatitis B Virus
uuggacccugcauucaa

SEQ ID NO: 1363 - RNA, 17 nt, Hepatitis B Virus
gacccugcauucaaagc

SEQ ID NO: 1364 - RNA, 17 nt, Hepatitis B Virus
cugcauucaaagccaac

SEQ ID NO: 1365 - RNA, 17 nt, Hepatitis B Virus
uucaaagccaacucagu

SEQ ID NO: 1366 - RNA, 17 nt, Hepatitis B Virus
ucaaagccaacucagua

SEQ ID NO: 1367 - RNA, 17 nt, Hepatitis B Virus
aagccaacucaguaaau

SEQ ID NO: 1368 - RNA, 17 nt, Hepatitis B Virus
gccaacucaguaaaucc

SEQ ID NO: 1369 - RNA, 17 nt, Hepatitis B Virus
aguaaauccagauuggg

SEQ ID NO: 1370 - RNA, 17 nt, Hepatitis B Virus
guaaauccagauuggga

SEQ ID NO: 1371 - RNA, 17 nt, Hepatitis B Virus
auugggaccucaacccg

SEQ ID NO: 1372 - RNA, 17 nt, Hepatitis B Virus
uugggaccucaacccgc

SEQ ID NO: 1373 - RNA, 17 nt, Hepatitis B Virus
gggaccucaacccgcac

SEQ ID NO: 1374 - RNA, 17 nt, Hepatitis B Virus
accucaacccgcacaag

SEQ ID NO: 1375 - RNA, 17 nt, Hepatitis B Virus
ccucaacccgcacaagg

SEQ ID NO: 1376 - RNA, 17 nt, Hepatitis B Virus
caacccgcacaaggaca

SEQ ID NO: 1377 - RNA, 17 nt, Hepatitis B Virus
acccgcacaaggacaac

SEQ ID NO: 1378 - RNA, 17 nt, Hepatitis B Virus
acaaggacaacuggccg

SEQ ID NO: 1379 - RNA, 17 nt, Hepatitis B Virus
aggacaacuggccggac

SEQ ID NO: 1380 - RNA, 17 nt, Hepatitis B Virus
caacuggccggacgcca

SEQ ID NO: 1381 - RNA, 17 nt, Hepatitis B Virus
ccggacgccaacaaggu

SEQ ID NO: 1382 - RNA, 17 nt, Hepatitis B Virus
cggacgccaacaaggug

SEQ ID NO: 1383 - RNA, 17 nt, Hepatitis B Virus
acgccaacaagguggga

SEQ ID NO: 1384 - RNA, 17 nt, Hepatitis B Virus
gugggagcauucgggcc

SEQ ID NO: 1385 - RNA, 17 nt, Hepatitis B Virus
auucgggccaggguuca

SEQ ID NO: 1386 - RNA, 17 nt, Hepatitis B Virus
uucgggccaggguucac

SEQ ID NO: 1387 - RNA, 17 nt, Hepatitis B Virus
caggguucaccccuccc

SEQ ID NO: 1388 - RNA, 17 nt, Hepatitis B Virus
ggguucaccccucccca

SEQ ID NO: 1389 - RNA, 17 nt, Hepatitis B Virus
gguucaccccuccccau

SEQ ID NO: 1390 - RNA, 17 nt, Hepatitis B Virus
guucaccccuccccaug

SEQ ID NO: 1391 - RNA, 17 nt, Hepatitis B Virus
uucaccccuccccaugg

SEQ ID NO: 1392 - RNA, 17 nt, Hepatitis B Virus
caccccuccccaugggg

SEQ ID NO: 1393 - RNA, 17 nt, Hepatitis B Virus
accccuccccauggggg

SEQ ID NO: 1394 - RNA, 17 nt, Hepatitis B Virus
ccccuccccauggggga

SEQ ID NO: 1395 - RNA, 17 nt, Hepatitis B Virus
cccuccccaugggggac

SEQ ID NO: 1396 - RNA, 17 nt, Hepatitis B Virus
ugggggacuguuggggu

SEQ ID NO: 1397 - RNA, 17 nt, Hepatitis B Virus
gguggagcccucacgcu

SEQ ID NO: 1398 - RNA, 17 nt, Hepatitis B Virus
guggagcccucacgcuc

SEQ ID NO: 1399 - RNA, 17 nt, Hepatitis B Virus
uggagcccucacgcuca

SEQ ID NO: 1400 - RNA, 17 nt, Hepatitis B Virus
gagcccucacgcucagg

SEQ ID NO: 1401 - RNA, 17 nt, Hepatitis B Virus
ccucacgcucagggccu

SEQ ID NO: 1402 - RNA, 17 nt, Hepatitis B Virus
ucacgcucagggccuac

SEQ ID NO: 1403 - RNA, 17 nt, Hepatitis B Virus
cucagggccuacucaca

SEQ ID NO: 1404 - RNA, 17 nt, Hepatitis B Virus
ucagggccuacucacaa

SEQ ID NO: 1405 - RNA, 17 nt, Hepatitis B Virus
gggccuacucacaacug

SEQ ID NO: 1406 - RNA, 17 nt, Hepatitis B Virus
gccuacucacaacugug

SEQ ID NO: 1407 - RNA, 17 nt, Hepatitis B Virus
cuacucacaacugugcc

SEQ ID NO: 1408 - RNA, 17 nt, Hepatitis B Virus
cucacaacugugccagc

SEQ ID NO: 1409 - RNA, 17 nt, Hepatitis B Virus
aacugugccagcagcuc

SEQ ID NO: 1410 - RNA, 17 nt, Hepatitis B Virus
acugugccagcagcucc

SEQ ID NO: 1411 - RNA, 17 nt, Hepatitis B Virus
gugccagcagcuccucc

SEQ ID NO: 1412 - RNA, 17 nt, Hepatitis B Virus
ccagcagcuccuccucc

SEQ ID NO: 1413 - RNA, 17 nt, Hepatitis B Virus
agcagcuccuccuccug

SEQ ID NO: 1414 - RNA, 17 nt, Hepatitis B Virus
gcagcuccuccuccugc

SEQ ID NO: 1415 - RNA, 17 nt, Hepatitis B Virus
agcuccuccuccugccu

SEQ ID NO: 1416 - RNA, 17 nt, Hepatitis B Virus
gcuccuccuccugccuc

SEQ ID NO: 1417 - RNA, 17 nt, Hepatitis B Virus
uccuccuccugccucca

SEQ ID NO: 1418 - RNA, 17 nt, Hepatitis B Virus
ccuccuccugccuccac

SEQ ID NO: 1419 - RNA, 17 nt, Hepatitis B Virus
ccuccugccuccaccaa

SEQ ID NO: 1420 - RNA, 17 nt, Hepatitis B Virus
cuccugccuccaccaau

SEQ ID NO: 1421 - RNA, 17 nt, Hepatitis B Virus
ccugccuccaccaaucg

SEQ ID NO: 1422 - RNA, 17 nt, Hepatitis B Virus
cugccuccaccaaucgg

SEQ ID NO: 1423 - RNA, 17 nt, Hepatitis B Virus
gccuccaccaaucggca

SEQ ID NO: 1424 - RNA, 17 nt, Hepatitis B Virus
ccuccaccaaucggcag

SEQ ID NO: 1425 - RNA, 17 nt, Hepatitis B Virus
caaucggcagucaggaa

SEQ ID NO: 1426 - RNA, 17 nt, Hepatitis B Virus
cggcagucaggaaggca

SEQ ID NO: 1427 - RNA, 17 nt, Hepatitis B Virus
aggaaggcagccuacuc

SEQ ID NO: 1428 - RNA, 17 nt, Hepatitis B Virus
aaggcagccuacucccu

SEQ ID NO: 1429 - RNA, 17 nt, Hepatitis B Virus
aggcagccuacucccuu

SEQ ID NO: 1430 - RNA, 17 nt, Hepatitis B Virus
cagccuacucccuuauc

SEQ ID NO: 1431 - RNA, 17 nt, Hepatitis B Virus
gccuacucccuuaucuc

SEQ ID NO: 1432 - RNA, 17 nt, Hepatitis B Virus
ccuacucccuuaucucc

SEQ ID NO: 1433 - RNA, 17 nt, Hepatitis B Virus
cuacucccuuaucucca

SEQ ID NO: 1434 - RNA, 17 nt, Hepatitis B Virus
cccuuaucuccaccucu

SEQ ID NO: 1435 - RNA, 17 nt, Hepatitis B Virus
cuuaucuccaccucuaa

SEQ ID NO: 1436 - RNA, 17 nt, Hepatitis B Virus
uuaucuccaccucuaag

SEQ ID NO: 1437 - RNA, 17 nt, Hepatitis B Virus
aucuccaccucuaaggg

SEQ ID NO: 1438 - RNA, 17 nt, Hepatitis B Virus
ucuccaccucuaaggga

SEQ ID NO: 1439 - RNA, 17 nt, Hepatitis B Virus
uccaccucuaagggaca

SEQ ID NO: 1440 - RNA, 17 nt, Hepatitis B Virus
uaagggacacucauccu

SEQ ID NO: 1441 - RNA, 17 nt, Hepatitis B Virus
agggacacucauccuca

SEQ ID NO: 1442 - RNA, 17 nt, Hepatitis B Virus
ggacacucauccucagg

SEQ ID NO: 1443 - RNA, 17 nt, Hepatitis B Virus
cacucauccucaggcca

SEQ ID NO: 1444 - RNA, 17 nt, Hepatitis B Virus
acucauccucaggccau

SEQ ID NO: 1445 - RNA, 17 nt, Hepatitis B Virus
ucauccucaggccaugc

SEQ ID NO: 1446 - RNA, 17 nt, Hepatitis B Virus
ccucaggccaugcagug

SEQ ID NO: 1447 - RNA, 17 nt, Hepatitis B Virus
cucaggccaugcagugg

SEQ ID NO: 1448 - RNA, 17 nt, Hepatitis B Virus
acuuuccugcugguggc

SEQ ID NO: 1449 - RNA, 17 nt, Hepatitis B Virus
ggaacagugagcccugc

SEQ ID NO: 1450 - RNA, 17 nt, Hepatitis B Virus
ugagcccugcucagaau

SEQ ID NO: 1451 - RNA, 17 nt, Hepatitis B Virus
cugucucugccauaucg

SEQ ID NO: 1452 - RNA, 17 nt, Hepatitis B Virus
aucuuaucgaagacugg

SEQ ID NO: 1453 - RNA, 17 nt, Hepatitis B Virus
ccuguaccgaacaugga

SEQ ID NO: 1454 - RNA, 17 nt, Hepatitis B Virus
agaacaucgcaucagga

SEQ ID NO: 1455 - RNA, 17 nt, Hepatitis B Virus
ggaccccugcucguguu

SEQ ID NO: 1456 - RNA, 17 nt, Hepatitis B Virus
uucuuguugacaaaaau

SEQ ID NO: 1457 - RNA, 17 nt, Hepatitis B Virus
caaaauucgcaguccca

SEQ ID NO: 1458 - RNA, 17 nt, Hepatitis B Virus
ugguuaucgcuggaugu

SEQ ID NO: 1459 - RNA, 17 nt, Hepatitis B Virus
augugucugcggcguuu

SEQ ID NO: 1460 - RNA, 17 nt, Hepatitis B Virus
cuuccucugcauccugc

SEQ ID NO: 1461 - RNA, 17 nt, Hepatitis B Virus
ugcauccugcugcuaug

SEQ ID NO: 1462 - RNA, 17 nt, Hepatitis B Virus
auccugcugcuaugccu

SEQ ID NO: 1463 - RNA, 17 nt, Hepatitis B Virus
gcugcuaugccucaucu

SEQ ID NO: 1464 - RNA, 17 nt, Hepatitis B Virus
gguauguugcccguuug

SEQ ID NO: 1465 - RNA, 17 nt, Hepatitis B Virus
cggaccaugcaaaaccu

SEQ ID NO: 1466 - RNA, 17 nt, Hepatitis B Virus
caaaaccugcacaacuc

SEQ ID NO: 1467 - RNA, 17 nt, Hepatitis B Virus
caacuccugcucaagga

SEQ ID NO: 1468 - RNA, 17 nt, Hepatitis B Virus
cucauguugcuguacaa

SEQ ID NO: 1469 - RNA, 17 nt, Hepatitis B Virus
cggaaacugcaccugua

SEQ ID NO: 1470 - RNA, 17 nt, Hepatitis B Virus
gggcuuucgcaaaauac

SEQ ID NO: 1471 - RNA, 17 nt, Hepatitis B Virus
uuacuagugccauuugu

SEQ ID NO: 1472 - RNA, 17 nt, Hepatitis B Virus
auauggaugaugugguu

SEQ ID NO: 1473 - RNA, 17 nt, Hepatitis B Virus
aacaucuugagucccuu

SEQ ID NO: 1474 - RNA, 17 nt, Hepatitis B Virus
cccuuuaugccgcuguu

SEQ ID NO: 1475 - RNA, 17 nt, Hepatitis B Virus
uuuaugccgcuguuacc

SEQ ID NO: 1476 - RNA, 17 nt, Hepatitis B Virus
ggcacauugccacagga

SEQ ID NO: 1477 - RNA, 17 nt, Hepatitis B Virus
ggccuauugauuggaaa

SEQ ID NO: 1478 - RNA, 17 nt, Hepatitis B Virus
augucaacgaauugugg

SEQ ID NO: 1479 - RNA, 17 nt, Hepatitis B Virus
ugggguuugccgccccu

SEQ ID NO: 1480 - RNA, 17 nt, Hepatitis B Virus
gguuugccgccccuuuc

SEQ ID NO: 1481 - RNA, 17 nt, Hepatitis B Virus
ccuuucacgcaaugugg

SEQ ID NO: 1482 - RNA, 17 nt, Hepatitis B Virus
gauauucugcuuuaaug

SEQ ID NO: 1483 - RNA, 17 nt, Hepatitis B Virus
gcuuuaaugccuuuaua

SEQ ID NO: 1484 - RNA, 17 nt, Hepatitis B Virus
cuuuauaugcaugcaua

SEQ ID NO: 1485 - RNA, 17 nt, Hepatitis B Virus
auaugcaugcauacaag

SEQ ID NO: 1486 - RNA, 17 nt, Hepatitis B Virus
acuuucucgccaacuua

SEQ ID NO: 1487 - RNA, 17 nt, Hepatitis B Virus
caguaugugaaccuuua

SEQ ID NO: 1488 - RNA, 17 nt, Hepatitis B Virus
accccguugcucggcaa

SEQ ID NO: 1489 - RNA, 17 nt, Hepatitis B Virus
uggucuaugccaagugu

SEQ ID NO: 1490 - RNA, 17 nt, Hepatitis B Virus
aaguguuugcugacgca

SEQ ID NO: 1491 - RNA, 17 nt, Hepatitis B Virus
uguuugcugacgcaacc

SEQ ID NO: 1492 - RNA, 17 nt, Hepatitis B Virus
uugcugacgcaaccccc

SEQ ID NO: 1493 - RNA, 17 nt, Hepatitis B Virus
ccaucagcgcaugcgug

SEQ ID NO: 1494 - RNA, 17 nt, Hepatitis B Virus
cagcgcaugcguggaac

SEQ ID NO: 1495 - RNA, 17 nt, Hepatitis B Virus
ucuccucugccgaucca

SEQ ID NO: 1496 - RNA, 17 nt, Hepatitis B Virus
ccucugccgauccauac

SEQ ID NO: 1497 - RNA, 17 nt, Hepatitis B Virus
uccauaccgcggaacuc

SEQ ID NO: 1498 - RNA, 17 nt, Hepatitis B Virus
uccuagccgcuuguuuu

SEQ ID NO: 1499 - RNA, 17 nt, Hepatitis B Virus
cuuguuuugcucgcagc

SEQ ID NO: 1500 - RNA, 17 nt, Hepatitis B Virus
uuuugcucgcagcaggu

SEQ ID NO: 1501 - RNA, 17 nt, Hepatitis B Virus
ucgggacugacaauucu

SEQ ID NO: 1502 - RNA, 17 nt, Hepatitis B Virus
ucugucgugcucucccg

SEQ ID NO: 1503 - RNA, 17 nt, Hepatitis B Virus
gcucucccgcaaauaua

SEQ ID NO: 1504 - RNA, 17 nt, Hepatitis B Virus
ccauggcugcuaggcug

SEQ ID NO: 1505 - RNA, 17 nt, Hepatitis B Virus
uaggcugugcugccaac

SEQ ID NO: 1506 - RNA, 17 nt, Hepatitis B Virus
gcugugcugccaacugg

SEQ ID NO: 1507 - RNA, 17 nt, Hepatitis B Virus
gauccuacgcgggacgu

SEQ ID NO: 1508 - RNA, 17 nt, Hepatitis B Virus
ccgucggcgcugaaucc

SEQ ID NO: 1509 - RNA, 17 nt, Hepatitis B Virus
ucggcgcugaaucccgc

SEQ ID NO: 1510 - RNA, 17 nt, Hepatitis B Virus
ugaaucccgcggacgac

SEQ ID NO: 1511 - RNA, 17 nt, Hepatitis B Virus
ccgcggacgaccccucc

SEQ ID NO: 1512 - RNA, 17 nt, Hepatitis B Virus
ccggggccgcuuggggc

SEQ ID NO: 1513 - RNA, 17 nt, Hepatitis B Virus
gcucuaccgcccgcuuc

SEQ ID NO: 1514 - RNA, 17 nt, Hepatitis B Virus
uaccgcccgcuucuccg

SEQ ID NO: 1515 - RNA, 17 nt, Hepatitis B Virus
gcuucuccgccuauugu

SEQ ID NO: 1516 - RNA, 17 nt, Hepatitis B Virus
auuguaccgaccgucca

SEQ ID NO: 1517 - RNA, 17 nt, Hepatitis B Virus
cacggggcgcaccucuc

SEQ ID NO: 1518 - RNA, 17 nt, Hepatitis B Virus
cucuuuacgcggacucc

SEQ ID NO: 1519 - RNA, 17 nt, Hepatitis B Virus
ccgucugugccuucuca

SEQ ID NO: 1520 - RNA, 17 nt, Hepatitis B Virus
ucucaucugccggaccg

SEQ ID NO: 1521 - RNA, 17 nt, Hepatitis B Virus
gaccgugugcacuucgc

SEQ ID NO: 1522 - RNA, 17 nt, Hepatitis B Virus
ugcacuucgcuucaccu

SEQ ID NO: 1523 - RNA, 17 nt, Hepatitis B Virus
ucaccucugcacgucgc

SEQ ID NO: 1524 - RNA, 17 nt, Hepatitis B Virus
ugcacgucgcauggaga

SEQ ID NO: 1525 - RNA, 17 nt, Hepatitis B Virus
accaccgugaacgccca

SEQ ID NO: 1526 - RNA, 17 nt, Hepatitis B Virus
ccgugaacgcccacagg

SEQ ID NO: 1527 - RNA, 17 nt, Hepatitis B Virus
aggaaccugcccaaggu

SEQ ID NO: 1528 - RNA, 17 nt, Hepatitis B Virus
aaggucuugcauaagag

SEQ ID NO: 1529 - RNA, 17 nt, Hepatitis B Virus
augucaacgaccgaccu

SEQ ID NO: 1530 - RNA, 17 nt, Hepatitis B Virus
caacgaccgaccuugag

SEQ ID NO: 1531 - RNA, 17 nt, Hepatitis B Virus
ccgaccuugaggcauac

SEQ ID NO: 1532 - RNA, 17 nt, Hepatitis B Virus
uguuuaaugagugggag

SEQ ID NO: 1533 - RNA, 17 nt, Hepatitis B Virus
agcaccaugcaacuuuu

SEQ ID NO: 1534 - RNA, 17 nt, Hepatitis B Virus
ucaccucugccuaauca

SEQ ID NO: 1535 - RNA, 17 nt, Hepatitis B Virus
caagcugugccuugggu

SEQ ID NO: 1536 - RNA, 17 nt, Hepatitis B Virus
uggacauugacccguau

SEQ ID NO: 1537 - RNA, 17 nt, Hepatitis B Virus
ucuuuuuugccuucuga

SEQ ID NO: 1538 - RNA, 17 nt, Hepatitis B Virus
ugccuucugacuucuuu

SEQ ID NO: 1539 - RNA, 17 nt, Hepatitis B Virus
uucuauucgagaucucc

SEQ ID NO: 1540 - RNA, 17 nt, Hepatitis B Virus
aucuccucgacaccgcc

SEQ ID NO: 1541 - RNA, 17 nt, Hepatitis B Virus
ucgacaccgccucugcu

SEQ ID NO: 1542 - RNA, 17 nt, Hepatitis B Virus
ccgccucugcucuguau

SEQ ID NO: 1543 - RNA, 17 nt, Hepatitis B Virus
guuggggugaguugaug

SEQ ID NO: 1544 - RNA, 17 nt, Hepatitis B Virus
ggugaguugaugaaucu

SEQ ID NO: 1545 - RNA, 17 nt, Hepatitis B Virus
gaguugaugaaucuagc

SEQ ID NO: 1546 - RNA, 17 nt, Hepatitis B Virus
uuuugggcgagaaacug

SEQ ID NO: 1547 - RNA, 17 nt, Hepatitis B Virus
cuguucuugaauauuug

SEQ ID NO: 1548 - RNA, 17 nt, Hepatitis B Virus
guggauucgcacuccuc

SEQ ID NO: 1549 - RNA, 17 nt, Hepatitis B Virus
cuccuccugcauauaga

SEQ ID NO: 1550 - RNA, 17 nt, Hepatitis B Virus
caccaaaugccccuauc

SEQ ID NO: 1551 - RNA, 17 nt, Hepatitis B Virus
uguuagacgaagaggca

SEQ ID NO: 1552 - RNA, 17 nt, Hepatitis B Virus
acucccucgccucgcag

SEQ ID NO: 1553 - RNA, 17 nt, Hepatitis B Virus
cucgccucgcagacgaa

SEQ ID NO: 1554 - RNA, 17 nt, Hepatitis B Virus
ucgcagacgaaggucuc

SEQ ID NO: 1555 - RNA, 17 nt, Hepatitis B Virus
ucucaaucgccgcgucg

SEQ ID NO: 1556 - RNA, 17 nt, Hepatitis B Virus
caaucgccgcgucgcag

SEQ ID NO: 1557 - RNA, 17 nt, Hepatitis B Virus
gccgcgucgcagaagau

SEQ ID NO: 1558 - RNA, 17 nt, Hepatitis B Virus
gguaccuugcuuuaauc

SEQ ID NO: 1559 - RNA, 17 nt, Hepatitis B Virus
cuuuuccugacauucau

SEQ ID NO: 1560 - RNA, 17 nt, Hepatitis B Virus
auucauuugcaggagga

SEQ ID NO: 1561 - RNA, 17 nt, Hepatitis B Virus
acauuguugauagaugu

SEQ ID NO: 1562 - RNA, 17 nt, Hepatitis B Virus
caguaaaugaaaacagg

SEQ ID NO: 1563 - RNA, 17 nt, Hepatitis B Virus
uuaacuaugccugcuag

SEQ ID NO: 1564 - RNA, 17 nt, Hepatitis B Virus
cuaugccugcuagguuu

SEQ ID NO: 1565 - RNA, 17 nt, Hepatitis B Virus
aaauauuugcccuuaga

SEQ ID NO: 1566 - RNA, 17 nt, Hepatitis B Virus
uuccagacgcgacauua

SEQ ID NO: 1567 - RNA, 17 nt, Hepatitis B Virus
ccagacgcgacauuauu

SEQ ID NO: 1568 - RNA, 17 nt, Hepatitis B Virus
cacguagcgccucauuu

SEQ ID NO: 1569 - RNA, 17 nt, Hepatitis B Virus
cucauuuugcgggucac

SEQ ID NO: 1570 - RNA, 17 nt, Hepatitis B Virus
caaaccucgaaaaggca

SEQ ID NO: 1571 - RNA, 17 nt, Hepatitis B Virus
ucuuccccgaucaucag

SEQ ID NO: 1572 - RNA, 17 nt, Hepatitis B Virus
uggacccugcauucaaa

SEQ ID NO: 1573 - RNA, 17 nt, Hepatitis B Virus
cucaacccgcacaagga

SEQ ID NO: 1574 - RNA, 17 nt, Hepatitis B Virus
ggccggacgccaacaag

SEQ ID NO: 1575 - RNA, 17 nt, Hepatitis B Virus
gcccucacgcucagggc

SEQ ID NO: 1576 - RNA, 17 nt, Hepatitis B Virus
acaacugugccagcagc

SEQ ID NO: 1577 - RNA, 17 nt, Hepatitis B Virus
cuccuccugccuccacc

SEQ ID NO: 1578 - RNA, 17 nt, Hepatitis B Virus
agggcccuguacuuucc

SEQ ID NO: 1579 - RNA, 17 nt, Hepatitis B Virus
agaauacugucucugcc

SEQ ID NO: 1580 - RNA, 17 nt, Hepatitis B Virus
gggacccuguaccgaac

SEQ ID NO: 1581 - RNA, 17 nt, Hepatitis B Virus
cugcucguguuacaggc

SEQ ID NO: 1582 - RNA, 17 nt, Hepatitis B Virus
uuuuucuuguugacaaa

SEQ ID NO: 1583 - RNA, 17 nt, Hepatitis B Virus
acacccgugugucuugg

SEQ ID NO: 1584 - RNA, 17 nt, Hepatitis B Virus
acccgugugucuuggcc

SEQ ID NO: 1585 - RNA, 17 nt, Hepatitis B Virus
accaaccuguuguccuc

SEQ ID NO: 1586 - RNA, 17 nt, Hepatitis B Virus
aaccuguuguccuccaa

SEQ ID NO: 1587 - RNA, 17 nt, Hepatitis B Virus
uccaauuuguccugguu

SEQ ID NO: 1588 - RNA, 17 nt, Hepatitis B Virus
cgcuggaugugucugcg

SEQ ID NO: 1589 - RNA, 17 nt, Hepatitis B Virus
cuggaugugucugcggc

SEQ ID NO: 1590 - RNA, 17 nt, Hepatitis B Virus
aucuucuuguugguucu

SEQ ID NO: 1591 - RNA, 17 nt, Hepatitis B Virus
caagguauguugcccgu

SEQ ID NO: 1592 - RNA, 17 nt, Hepatitis B Virus
gcccguuuguccucuaa

SEQ ID NO: 1593 - RNA, 17 nt, Hepatitis B Virus
accucuauguuucccuc

SEQ ID NO: 1594 - RNA, 17 nt, Hepatitis B Virus
ucccucauguugcugua

SEQ ID NO: 1595 - RNA, 17 nt, Hepatitis B Virus
auguugcuguacaaaac

SEQ ID NO: 1596 - RNA, 17 nt, Hepatitis B Virus
cugcaccuguauuccca

SEQ ID NO: 1597 - RNA, 17 nt, Hepatitis B Virus
ugccauuuguucagugg

SEQ ID NO: 1598 - RNA, 17 nt, Hepatitis B Virus
cccccacugucuggcuu

SEQ ID NO: 1599 - RNA, 17 nt, Hepatitis B Virus
uggaugaugugguuuug

SEQ ID NO: 1600 - RNA, 17 nt, Hepatitis B Virus
ccaagucuguacaacau

SEQ ID NO: 1601 - RNA, 17 nt, Hepatitis B Virus
augccgcuguuaccaau

SEQ ID NO: 1602 - RNA, 17 nt, Hepatitis B Virus
uuucuuuugucuuuggg

SEQ ID NO: 1603 - RNA, 17 nt, Hepatitis B Virus
ugggauauguaauuggg

SEQ ID NO: 1604 - RNA, 17 nt, Hepatitis B Virus
aacauauuguacaaaaa

SEQ ID NO: 1605 - RNA, 17 nt, Hepatitis B Virus
aucaaaauguguuuuag

SEQ ID NO: 1606 - RNA, 17 nt, Hepatitis B Virus
caaaauguguuuuagga

SEQ ID NO: 1607 - RNA, 17 nt, Hepatitis B Virus
aacuuccuguaaacagg

SEQ ID NO: 1608 - RNA, 17 nt, Hepatitis B Virus
gaaaguaugucaacgaa

SEQ ID NO: 1609 - RNA, 17 nt, Hepatitis B Virus
aacgaauugugggucuu

SEQ ID NO: 1610 - RNA, 17 nt, Hepatitis B Virus
cacgcaauguggauauu

SEQ ID NO: 1611 - RNA, 17 nt, Hepatitis B Virus
aacaguaugugaaccuu

SEQ ID NO: 1612 - RNA, 17 nt, Hepatitis B Virus
ugccaaguguuugcuga

SEQ ID NO: 1613 - RNA, 17 nt, Hepatitis B Virus
gaaccuuugugucuccu

SEQ ID NO: 1614 - RNA, 17 nt, Hepatitis B Virus
accuuugugucuccucu

SEQ ID NO: 1615 - RNA, 17 nt, Hepatitis B Virus
agccgcuuguuuugcuc

SEQ ID NO: 1616 - RNA, 17 nt, Hepatitis B Virus
acaauucugucgugcuc

SEQ ID NO: 1617 - RNA, 17 nt, Hepatitis B Virus
gcuaggcugugcugcca

SEQ ID NO: 1618 - RNA, 17 nt, Hepatitis B Virus
cguccuuuguuuacguc

SEQ ID NO: 1619 - RNA, 17 nt, Hepatitis B Virus
cgccuauuguaccgacc

SEQ ID NO: 1620 - RNA, 17 nt, Hepatitis B Virus
ccccgucugugccuucu

SEQ ID NO: 1621 - RNA, 17 nt, Hepatitis B Virus
cggaccgugugcacuuc

SEQ ID NO: 1622 - RNA, 17 nt, Hepatitis B Virus
ucagcaaugucaacgac

SEQ ID NO: 1623 - RNA, 17 nt, Hepatitis B Virus
caaagacuguguguuua

SEQ ID NO: 1624 - RNA, 17 nt, Hepatitis B Virus
aagacuguguguuuaau

SEQ ID NO: 1625 - RNA, 17 nt, Hepatitis B Virus
gacuguguguuuaauga

SEQ ID NO: 1626 - RNA, 17 nt, Hepatitis B Virus
aggucuuuguacuagga

SEQ ID NO: 1627 - RNA, 17 nt, Hepatitis B Virus
aggaggcuguaggcaua

SEQ ID NO: 1628 - RNA, 17 nt, Hepatitis B Virus
aaauugguguguucacc

SEQ ID NO: 1629 - RNA, 17 nt, Hepatitis B Virus
auugguguguucaccag

SEQ ID NO: 1630 - RNA, 17 nt, Hepatitis B Virus
caucucauguucauguc

SEQ ID NO: 1631 - RNA, 17 nt, Hepatitis B Virus
auguucauguccuacug

SEQ ID NO: 1632 - RNA, 17 nt, Hepatitis B Virus
guccuacuguucaagcc

SEQ ID NO: 1633 - RNA, 17 nt, Hepatitis B Virus
uccaagcugugccuugg

SEQ ID NO: 1634 - RNA, 17 nt, Hepatitis B Virus
gagcuucuguggaguua

SEQ ID NO: 1635 - RNA, 17 nt, Hepatitis B Virus
ucugcucuguaucgggg

SEQ ID NO: 1636 - RNA, 17 nt, Hepatitis B Virus
ggaacauuguucaccuc

SEQ ID NO: 1637 - RNA, 17 nt, Hepatitis B Virus
gcuauucuguguugggg

SEQ ID NO: 1638 - RNA, 17 nt, Hepatitis B Virus
uauucuguguuggggug

SEQ ID NO: 1639 - RNA, 17 nt, Hepatitis B Virus
ucagcuaugucaacguu

SEQ ID NO: 1640 - RNA, 17 nt, Hepatitis B Virus
caacuauugugguuuca

SEQ ID NO: 1641 - RNA, 17 nt, Hepatitis B Virus
cauuuccugucuuacuu

SEQ ID NO: 1642 - RNA, 17 nt, Hepatitis B Virus
gagaaacuguucuugaa

SEQ ID NO: 1643 - RNA, 17 nt, Hepatitis B Virus
uauuuggugucuuuugg

SEQ ID NO: 1644 - RNA, 17 nt, Hepatitis B Virus
uuuggaguguggauucg

SEQ ID NO: 1645 - RNA, 17 nt, Hepatitis B Virus
aaacuacuguuguuaga

SEQ ID NO: 1646 - RNA, 17 nt, Hepatitis B Virus
cuacuguuguuagacga

SEQ ID NO: 1647 - RNA, 17 nt, Hepatitis B Virus
aucucaauguuaguauu

SEQ ID NO: 1648 - RNA, 17 nt, Hepatitis B Virus
aggacauuguugauaga

SEQ ID NO: 1649 - RNA, 17 nt, Hepatitis B Virus
ugauagauguaagcaau

SEQ ID NO: 1650 - RNA, 17 nt, Hepatitis B Virus
agcaauuuguggggccc

SEQ ID NO: 1651 - RNA, 17 nt, Hepatitis B Virus
aucccaauguuacuaaa

SEQ ID NO: 1652 - RNA, 17 nt, Hepatitis B Virus
cagaguauguaguuaau

SEQ ID NO: 1653 - RNA, 17 nt, Hepatitis B Virus
aucuuucuguccccaau

SEQ ID NO: 1654 - RNA, 17 nt, Hepatitis B Virus
gggggacuguuggggug

SEQ ID NO: 1655 - RNA, 17 nt, Hepatitis B Virus
ucacaacugugccagca

SEQ ID NO: 1656 - RNA, 17 nt, Hepatitis B Virus
aucccagagucagggcc

SEQ ID NO: 1657 - RNA, 17 nt, Hepatitis B Virus
gagucagggcccuguac

SEQ ID NO: 1658 - RNA, 17 nt, Hepatitis B Virus
uccugcugguggcucca

SEQ ID NO: 1659 - RNA, 17 nt, Hepatitis B Virus
ugcugguggcuccaguu

SEQ ID NO: 1660 - RNA, 17 nt, Hepatitis B Virus
uggcuccaguucaggaa

SEQ ID NO: 1661 - RNA, 17 nt, Hepatitis B Virus
caggaacagugagcccu

SEQ ID NO: 1662 - RNA, 17 nt, Hepatitis B Virus
aacagugagcccugcuc

SEQ ID NO: 1663 - RNA, 17 nt, Hepatitis B Virus
gccauaucgucaaucuu

SEQ ID NO: 1664 - RNA, 17 nt, Hepatitis B Virus
cccugcucguguuacag

SEQ ID NO: 1665 - RNA, 17 nt, Hepatitis B Virus
uguuacaggcgggguuu

SEQ ID NO: 1666 - RNA, 17 nt, Hepatitis B Virus
caggcgggguuuuucuu

SEQ ID NO: 1667 - RNA, 17 nt, Hepatitis B Virus
accacagagucuagacu

SEQ ID NO: 1668 - RNA, 17 nt, Hepatitis B Virus
cuagacucgugguggac

SEQ ID NO: 1669 - RNA, 17 nt, Hepatitis B Virus
gacucgugguggacuuc

SEQ ID NO: 1670 - RNA, 17 nt, Hepatitis B Virus
gaacacccgugugucuu

SEQ ID NO: 1671 - RNA, 17 nt, Hepatitis B Virus
gugucuuggccaaaauu

SEQ ID NO: 1672 - RNA, 17 nt, Hepatitis B Virus
aauucgcagucccaaau

SEQ ID NO: 1673 - RNA, 17 nt, Hepatitis B Virus
aaucuccagucacucac

SEQ ID NO: 1674 - RNA, 17 nt, Hepatitis B Virus
uuguccugguuaucgcu

SEQ ID NO: 1675 - RNA, 17 nt, Hepatitis B Virus
ugucugcggcguuuuau

SEQ ID NO: 1676 - RNA, 17 nt, Hepatitis B Virus
ucugcggcguuuuauca

SEQ ID NO: 1677 - RNA, 17 nt, Hepatitis B Virus
ucuuguugguucuucug

SEQ ID NO: 1678 - RNA, 17 nt, Hepatitis B Virus
cuaucaagguauguugc

SEQ ID NO: 1679 - RNA, 17 nt, Hepatitis B Virus
uguugcccguuuguccu

SEQ ID NO: 1680 - RNA, 17 nt, Hepatitis B Virus
aacaaccagcaccggac

SEQ ID NO: 1681 - RNA, 17 nt, Hepatitis B Virus
caucuugggcuuucgca

SEQ ID NO: 1682 - RNA, 17 nt, Hepatitis B Virus
cuaugggagugggccuc

SEQ ID NO: 1683 - RNA, 17 nt, Hepatitis B Virus
gggagugggccucaguc

SEQ ID NO: 1684 - RNA, 17 nt, Hepatitis B Virus
gggccucaguccguuuc

SEQ ID NO: 1685 - RNA, 17 nt, Hepatitis B Virus
cucaguccguuucucuu

SEQ ID NO: 1686 - RNA, 17 nt, Hepatitis B Virus
uucucuuggcucaguuu

SEQ ID NO: 1687 - RNA, 17 nt, Hepatitis B Virus
uuggcucaguuuacuag

SEQ ID NO: 1688 - RNA, 17 nt, Hepatitis B Virus
guuuacuagugccauuu

SEQ ID NO: 1689 - RNA, 17 nt, Hepatitis B Virus
uuuguucagugguucgu

SEQ ID NO: 1690 - RNA, 17 nt, Hepatitis B Virus
guucagugguucguagg

SEQ ID NO: 1691 - RNA, 17 nt, Hepatitis B Virus
agugguucguagggcuu

SEQ ID NO: 1692 - RNA, 17 nt, Hepatitis B Virus
uucguagggcuuucccc

SEQ ID NO: 1693 - RNA, 17 nt, Hepatitis B Virus
acugucuggcuuucagu

SEQ ID NO: 1694 - RNA, 17 nt, Hepatitis B Virus
ggcuuucaguuauaugg

SEQ ID NO: 1695 - RNA, 17 nt, Hepatitis B Virus
augaugugguuuugggg

SEQ ID NO: 1696 - RNA, 17 nt, Hepatitis B Virus
uuuugggggccaagucu

SEQ ID NO: 1697 - RNA, 17 nt, Hepatitis B Virus
ggggccaagucuguaca

SEQ ID NO: 1698 - RNA, 17 nt, Hepatitis B Virus
caucuugagucccuuua

SEQ ID NO: 1699 - RNA, 17 nt, Hepatitis B Virus
gucuuuggguauacauu

SEQ ID NO: 1700 - RNA, 17 nt, Hepatitis B Virus
aauugggaguuggggca

SEQ ID NO: 1701 - RNA, 17 nt, Hepatitis B Virus
gaguuggggcacauugc

SEQ ID NO: 1702 - RNA, 17 nt, Hepatitis B Virus
guaaacaggccuauuga

SEQ ID NO: 1703 - RNA, 17 nt, Hepatitis B Virus
auuggaaaguaugucaa

SEQ ID NO: 1704 - RNA, 17 nt, Hepatitis B Virus
aauugugggucuuuugg

SEQ ID NO: 1705 - RNA, 17 nt, Hepatitis B Virus
cuuuugggguuugccgc

SEQ ID NO: 1706 - RNA, 17 nt, Hepatitis B Virus
gcauacaagcaaaacag

SEQ ID NO: 1707 - RNA, 17 nt, Hepatitis B Virus
caaaacaggcuuuuacu

SEQ ID NO: 1708 - RNA, 17 nt, Hepatitis B Virus
cuuacaaggccuuucua

SEQ ID NO: 1709 - RNA, 17 nt, Hepatitis B Virus
cuuucuaaguaaacagu

SEQ ID NO: 1710 - RNA, 17 nt, Hepatitis B Virus
aguaaacaguaugugaa

SEQ ID NO: 1711 - RNA, 17 nt, Hepatitis B Virus
uuuaccccguugcucgg

SEQ ID NO: 1712 - RNA, 17 nt, Hepatitis B Virus
guugcucggcaacggcc

SEQ ID NO: 1713 - RNA, 17 nt, Hepatitis B Virus
cggcaacggccuggucu

SEQ ID NO: 1714 - RNA, 17 nt, Hepatitis B Virus
acggccuggucuaugcc

SEQ ID NO: 1715 - RNA, 17 nt, Hepatitis B Virus
uaugccaaguguuugcu

SEQ ID NO: 1716 - RNA, 17 nt, Hepatitis B Virus
ccccacugguuggggcu

SEQ ID NO: 1717 - RNA, 17 nt, Hepatitis B Virus
ugguuggggcuuggcca

SEQ ID NO: 1718 - RNA, 17 nt, Hepatitis B Virus
ggggcuuggccauaggc

SEQ ID NO: 1719 - RNA, 17 nt, Hepatitis B Virus
ggccauaggccaucagc

SEQ ID NO: 1720 - RNA, 17 nt, Hepatitis B Virus
ggccaucagcgcaugcg

SEQ ID NO: 1721 - RNA, 17 nt, Hepatitis B Virus
gcgcaugcguggaaccu

SEQ ID NO: 1722 - RNA, 17 nt, Hepatitis B Virus
aacuccuagccgcuugu

SEQ ID NO: 1723 - RNA, 17 nt, Hepatitis B Virus
ugcucgcagcaggucug

SEQ ID NO: 1724 - RNA, 17 nt, Hepatitis B Virus
cgcagcaggucuggggc

SEQ ID NO: 1725 - RNA, 17 nt, Hepatitis B Virus
ggucuggggcaaaacuc

SEQ ID NO: 1726 - RNA, 17 nt, Hepatitis B Virus
auucugucgugcucucc

SEQ ID NO: 1727 - RNA, 17 nt, Hepatitis B Virus
uuuccauggcugcuagg

SEQ ID NO: 1728 - RNA, 17 nt, Hepatitis B Virus
gcugcuaggcugugcug

SEQ ID NO: 1729 - RNA, 17 nt, Hepatitis B Virus
cgcgggacguccuuugu

SEQ ID NO: 1730 - RNA, 17 nt, Hepatitis B Virus
uuguuuacgucccgucg

SEQ ID NO: 1731 - RNA, 17 nt, Hepatitis B Virus
uacgucccgucggcgcu

SEQ ID NO: 1732 - RNA, 17 nt, Hepatitis B Virus
ucccgucggcgcugaau

SEQ ID NO: 1733 - RNA, 17 nt, Hepatitis B Virus
cucccggggccgcuugg

SEQ ID NO: 1734 - RNA, 17 nt, Hepatitis B Virus
cgcuuggggcucuaccg

SEQ ID NO: 1735 - RNA, 17 nt, Hepatitis B Virus
uaccgaccguccacggg

SEQ ID NO: 1736 - RNA, 17 nt, Hepatitis B Virus
uccacggggcgcaccuc

SEQ ID NO: 1737 - RNA, 17 nt, Hepatitis B Virus
gacuccccgucugugcc

SEQ ID NO: 1738 - RNA, 17 nt, Hepatitis B Virus
gccggaccgugugcacu

SEQ ID NO: 1739 - RNA, 17 nt, Hepatitis B Virus
cucugcacgucgcaugg

SEQ ID NO: 1740 - RNA, 17 nt, Hepatitis B Virus
agaccaccgugaacgcc

SEQ ID NO: 1741 - RNA, 17 nt, Hepatitis B Virus
ugcccaaggucuugcau

SEQ ID NO: 1742 - RNA, 17 nt, Hepatitis B Virus
gacuuucagcaauguca

SEQ ID NO: 1743 - RNA, 17 nt, Hepatitis B Virus
accuugaggcauacuuc

SEQ ID NO: 1744 - RNA, 17 nt, Hepatitis B Virus
uuuaaugagugggagga

SEQ ID NO: 1745 - RNA, 17 nt, Hepatitis B Virus
ugggaggaguuggggga

SEQ ID NO: 1746 - RNA, 17 nt, Hepatitis B Virus
gggaggagguuagguua

SEQ ID NO: 1747 - RNA, 17 nt, Hepatitis B Virus
gagguuagguuaaaggu

SEQ ID NO: 1748 - RNA, 17 nt, Hepatitis B Virus
gguuaaaggucuuugua

SEQ ID NO: 1749 - RNA, 17 nt, Hepatitis B Virus
acuaggaggcuguaggc

SEQ ID NO: 1750 - RNA, 17 nt, Hepatitis B Virus
ggcuguaggcauaaauu

SEQ ID NO: 1751 - RNA, 17 nt, Hepatitis B Virus
auaaauugguguguuca

SEQ ID NO: 1752 - RNA, 17 nt, Hepatitis B Virus
guucaccagcaccaugc

SEQ ID NO: 1753 - RNA, 17 nt, Hepatitis B Virus
cuguucaagccuccaag

SEQ ID NO: 1754 - RNA, 17 nt, Hepatitis B Virus
gccuccaagcugugccu

SEQ ID NO: 1755 - RNA, 17 nt, Hepatitis B Virus
ugccuuggguggcuuug

SEQ ID NO: 1756 - RNA, 17 nt, Hepatitis B Virus
cuuggguggcuuugggg

SEQ ID NO: 1757 - RNA, 17 nt, Hepatitis B Virus
gcuuuggggcauggaca

SEQ ID NO: 1758 - RNA, 17 nt, Hepatitis B Virus
auugacccguauaaaga

SEQ ID NO: 1759 - RNA, 17 nt, Hepatitis B Virus
aauuuggagcuucugug

SEQ ID NO: 1760 - RNA, 17 nt, Hepatitis B Virus
ucuguggaguuacucuc

SEQ ID NO: 1761 - RNA, 17 nt, Hepatitis B Virus
aucggggggccuuagag

SEQ ID NO: 1762 - RNA, 17 nt, Hepatitis B Virus
gccuuagagucuccgga

SEQ ID NO: 1763 - RNA, 17 nt, Hepatitis B Virus
accauacggcacucagg

SEQ ID NO: 1764 - RNA, 17 nt, Hepatitis B Virus
gcacucaggcaagcuau

SEQ ID NO: 1765 - RNA, 17 nt, Hepatitis B Virus
ucaggcaagcuauucug

SEQ ID NO: 1766 - RNA, 17 nt, Hepatitis B Virus
guguuggggugaguuga

SEQ ID NO: 1767 - RNA, 17 nt, Hepatitis B Virus
uggggugaguugaugaa

SEQ ID NO: 1768 - RNA, 17 nt, Hepatitis B Virus
ugaaucuagccaccugg

SEQ ID NO: 1769 - RNA, 17 nt, Hepatitis B Virus
ccaccugggugggaagu

SEQ ID NO: 1770 - RNA, 17 nt, Hepatitis B Virus
ggugggaaguaauuugg

SEQ ID NO: 1771 - RNA, 17 nt, Hepatitis B Virus
aagauccagcauccagg

SEQ ID NO: 1772 - RNA, 17 nt, Hepatitis B Virus
gggaauuaguagucagc

SEQ ID NO: 1773 - RNA, 17 nt, Hepatitis B Virus
aauuaguagucagcuau

SEQ ID NO: 1774 - RNA, 17 nt, Hepatitis B Virus
aguagucagcuauguca

SEQ ID NO: 1775 - RNA, 17 nt, Hepatitis B Virus
augucaacguuaauaug

SEQ ID NO: 1776 - RNA, 17 nt, Hepatitis B Virus
uaauaugggccuaaaaa

SEQ ID NO: 1777 - RNA, 17 nt, Hepatitis B Virus
cuauugugguuucacau

SEQ ID NO: 1778 - RNA, 17 nt, Hepatitis B Virus
acuuuugggcgagaaac

SEQ ID NO: 1779 - RNA, 17 nt, Hepatitis B Virus
aauauuuggugucuuuu

SEQ ID NO: 1780 - RNA, 17 nt, Hepatitis B Virus
cuuuuggaguguggauu

SEQ ID NO: 1781 - RNA, 17 nt, Hepatitis B Virus
acgaagaggcagguccc

SEQ ID NO: 1782 - RNA, 17 nt, Hepatitis B Virus
agaggcagguccccuag

SEQ ID NO: 1783 - RNA, 17 nt, Hepatitis B Virus
agacgaaggucucaauc

SEQ ID NO: 1784 - RNA, 17 nt, Hepatitis B Virus
aucgccgcgucgcagaa

SEQ ID NO: 1785 - RNA, 17 nt, Hepatitis B Virus
caauguuaguauuccuu

SEQ ID NO: 1786 - RNA, 17 nt, Hepatitis B Virus
cacauaaggugggaaac

SEQ ID NO: 1787 - RNA, 17 nt, Hepatitis B Virus
uuuacggggcuuuauuc

SEQ ID NO: 1788 - RNA, 17 nt, Hepatitis B Virus
cuucuacgguaccuugc

SEQ ID NO: 1789 - RNA, 17 nt, Hepatitis B Virus
ccuaaauggcaaacucc

SEQ ID NO: 1790 - RNA, 17 nt, Hepatitis B Virus
agauguaagcaauuugu

SEQ ID NO: 1791 - RNA, 17 nt, Hepatitis B Virus
uuuguggggccccuuac

SEQ ID NO: 1792 - RNA, 17 nt, Hepatitis B Virus
cccuuacaguaaaugaa

SEQ ID NO: 1793 - RNA, 17 nt, Hepatitis B Virus
ccugcuagguuuuaucc

SEQ ID NO: 1794 - RNA, 17 nt, Hepatitis B Virus
aucaaaccguauuaucc

SEQ ID NO: 1795 - RNA, 17 nt, Hepatitis B Virus
uauccagaguauguagu

SEQ ID NO: 1796 - RNA, 17 nt, Hepatitis B Virus
aguauguaguuaaucau

SEQ ID NO: 1797 - RNA, 17 nt, Hepatitis B Virus
uuuggaaggcggggauc

SEQ ID NO: 1798 - RNA, 17 nt, Hepatitis B Virus
aaaagagaguccacacg

SEQ ID NO: 1799 - RNA, 17 nt, Hepatitis B Virus
guccacacguagcgccu

SEQ ID NO: 1800 - RNA, 17 nt, Hepatitis B Virus
cacacguagcgccucau

SEQ ID NO: 1801 - RNA, 17 nt, Hepatitis B Virus
uuuugcgggucaccaua

SEQ ID NO: 1802 - RNA, 17 nt, Hepatitis B Virus
gaucuacagcaugggag

SEQ ID NO: 1803 - RNA, 17 nt, Hepatitis B Virus
caugggagguuggucuu

SEQ ID NO: 1804 - RNA, 17 nt, Hepatitis B Virus
ggagguuggucuuccaa

SEQ ID NO: 1805 - RNA, 17 nt, Hepatitis B Virus
ucgaaaaggcaugggga

SEQ ID NO: 1806 - RNA, 17 nt, Hepatitis B Virus
gaucaucaguuggaccc

SEQ ID NO: 1807 - RNA, 17 nt, Hepatitis B Virus
cauucaaagccaacuca

SEQ ID NO: 1808 - RNA, 17 nt, Hepatitis B Virus
ccaacucaguaaaucca

SEQ ID NO: 1809 - RNA, 17 nt, Hepatitis B Virus
gacaacuggccggacgc

SEQ ID NO: 1810 - RNA, 17 nt, Hepatitis B Virus
ccaacaaggugggagug

SEQ ID NO: 1811 - RNA, 17 nt, Hepatitis B Virus
aggugggagugggagca

SEQ ID NO: 1812 - RNA, 17 nt, Hepatitis B Virus
gagugggagcauucggg

SEQ ID NO: 1813 - RNA, 17 nt, Hepatitis B Virus
gcauucgggccaggguu

SEQ ID NO: 1814 - RNA, 17 nt, Hepatitis B Virus
gggccaggguucacccc

SEQ ID NO: 1815 - RNA, 17 nt, Hepatitis B Virus
cuguugggguggagccc

SEQ ID NO: 1816 - RNA, 17 nt, Hepatitis B Virus
gggguggagcccucacg

SEQ ID NO: 1817 - RNA, 17 nt, Hepatitis B Virus
cgcucagggccuacuca

SEQ ID NO: 1818 - RNA, 17 nt, Hepatitis B Virus
cugugccagcagcuccu

SEQ ID NO: 1819 - RNA, 17 nt, Hepatitis B Virus
ugccagcagcuccuccu

SEQ ID NO: 1820 - RNA, 17 nt, Hepatitis B Virus
accaaucggcagucagg

SEQ ID NO: 1821 - RNA, 17 nt, Hepatitis B Virus
aaucggcagucaggaag

SEQ ID NO: 1822 - RNA, 17 nt, Hepatitis B Virus
ucaggaaggcagccuac

SEQ ID NO: 1823 - RNA, 17 nt, Hepatitis B Virus
ggaaggcagccuacucc

SEQ ID NO: 1824 - RNA, 17 nt, Hepatitis B Virus
auccucaggccaugcag

SEQ ID NO: 1825 - RNA, 17 nt, Hepatitis B Virus
uccaccaaacucuucaa

SEQ ID NO: 1826 - RNA, 17 nt, Hepatitis B Virus
ucuucaagaucccagag

SEQ ID NO: 1827 - RNA, 17 nt, Hepatitis B Virus
guucaggaacagugagc

SEQ ID NO: 1828 - RNA, 17 nt, Hepatitis B Virus
ugcucagaauacugucu

SEQ ID NO: 1829 - RNA, 17 nt, Hepatitis B Virus
uaucgucaaucuuaucg

SEQ ID NO: 1830 - RNA, 17 nt, Hepatitis B Virus
uaucgaagacuggggac

SEQ ID NO: 1831 - RNA, 17 nt, Hepatitis B Virus
gacuggggacccuguac

SEQ ID NO: 1832 - RNA, 17 nt, Hepatitis B Virus
uguaccgaacauggaga

SEQ ID NO: 1833 - RNA, 17 nt, Hepatitis B Virus
cauggagaacaucgcau

SEQ ID NO: 1834 - RNA, 17 nt, Hepatitis B Virus
gcaucaggacuccuagg

SEQ ID NO: 1835 - RNA, 17 nt, Hepatitis B Virus
cuccuaggaccccugcu

SEQ ID NO: 1836 - RNA, 17 nt, Hepatitis B Virus
ucuuguugacaaaaauc

SEQ ID NO: 1837 - RNA, 17 nt, Hepatitis B Virus
ugacaaaaauccucaca

SEQ ID NO: 1838 - RNA, 17 nt, Hepatitis B Virus
uccucacaauaccacag

SEQ ID NO: 1839 - RNA, 17 nt, Hepatitis B Virus
gagucuagacucguggu

SEQ ID NO: 1840 - RNA, 17 nt, Hepatitis B Virus
cgugguggacuucucuc

SEQ ID NO: 1841 - RNA, 17 nt, Hepatitis B Virus
uucucucaauuuucuag

SEQ ID NO: 1842 - RNA, 17 nt, Hepatitis B Virus
uagggggaacacccgug

SEQ ID NO: 1843 - RNA, 17 nt, Hepatitis B Virus
uggccaaaauucgcagu

SEQ ID NO: 1844 - RNA, 17 nt, Hepatitis B Virus
agucccaaaucuccagu

SEQ ID NO: 1845 - RNA, 17 nt, Hepatitis B Virus
acucaccaaccuguugu

SEQ ID NO: 1846 - RNA, 17 nt, Hepatitis B Virus
guccuccaauuuguccu

SEQ ID NO: 1847 - RNA, 17 nt, Hepatitis B Virus
aucgcuggaugugucug

SEQ ID NO: 1848 - RNA, 17 nt, Hepatitis B Virus
ucuucuggacuaucaag

SEQ ID NO: 1849 - RNA, 17 nt, Hepatitis B Virus
guccucuaauuccagga

SEQ ID NO: 1850 - RNA, 17 nt, Hepatitis B Virus
auuccaggaucaucaac

SEQ ID NO: 1851 - RNA, 17 nt, Hepatitis B Virus
gaucaucaacaaccagc

SEQ ID NO: 1852 - RNA, 17 nt, Hepatitis B Virus
caucaacaaccagcacc

SEQ ID NO: 1853 - RNA, 17 nt, Hepatitis B Virus
agcaccggaccaugcaa

SEQ ID NO: 1854 - RNA, 17 nt, Hepatitis B Virus
caugcaaaaccugcaca

SEQ ID NO: 1855 - RNA, 17 nt, Hepatitis B Virus
ccugcacaacuccugcu

SEQ ID NO: 1856 - RNA, 17 nt, Hepatitis B Virus
cucaaggaaccucuaug

SEQ ID NO: 1857 - RNA, 17 nt, Hepatitis B Virus
uguacaaaaccuacgga

SEQ ID NO: 1858 - RNA, 17 nt, Hepatitis B Virus
accuacggacggaaacu

SEQ ID NO: 1859 - RNA, 17 nt, Hepatitis B Virus
ggacggaaacugcaccu

SEQ ID NO: 1860 - RNA, 17 nt, Hepatitis B Virus
uucgcaaaauaccuaug

SEQ ID NO: 1861 - RNA, 17 nt, Hepatitis B Virus
uuauauggaugaugugg

SEQ ID NO: 1862 - RNA, 17 nt, Hepatitis B Virus
uauggaugaugugguuu

SEQ ID NO: 1863 - RNA, 17 nt, Hepatitis B Virus
ucuguacaacaucuuga

SEQ ID NO: 1864 - RNA, 17 nt, Hepatitis B Virus
uguuaccaauuuucuuu

SEQ ID NO: 1865 - RNA, 17 nt, Hepatitis B Virus
acauuuaaacccucaca

SEQ ID NO: 1866 - RNA, 17 nt, Hepatitis B Virus
cucacaaaacaaaaaga

SEQ ID NO: 1867 - RNA, 17 nt, Hepatitis B Virus
acaaaaagauggggaua

SEQ ID NO: 1868 - RNA, 17 nt, Hepatitis B Virus
agauggggauauucccu

SEQ ID NO: 1869 - RNA, 17 nt, Hepatitis B Virus
uucccuuaacuucaugg

SEQ ID NO: 1870 - RNA, 17 nt, Hepatitis B Virus
uucaugggauauguaau

SEQ ID NO: 1871 - RNA, 17 nt, Hepatitis B Virus
gauauguaauugggagu

SEQ ID NO: 1872 - RNA, 17 nt, Hepatitis B Virus
ccacaggaacauauugu

SEQ ID NO: 1873 - RNA, 17 nt, Hepatitis B Virus
uacaaaaaaucaaaaug

SEQ ID NO: 1874 - RNA, 17 nt, Hepatitis B Virus
aaaucaaaauguguuuu

SEQ ID NO: 1875 - RNA, 17 nt, Hepatitis B Virus
uuuaggaaacuuccugu

SEQ ID NO: 1876 - RNA, 17 nt, Hepatitis B Virus
uccuguaaacaggccua

SEQ ID NO: 1877 - RNA, 17 nt, Hepatitis B Virus
gccuauugauuggaaag

SEQ ID NO: 1878 - RNA, 17 nt, Hepatitis B Virus
guaugucaacgaauugu

SEQ ID NO: 1879 - RNA, 17 nt, Hepatitis B Virus
gucaacgaauugugggu

SEQ ID NO: 1880 - RNA, 17 nt, Hepatitis B Virus
uucacgcaauguggaua

SEQ ID NO: 1881 - RNA, 17 nt, Hepatitis B Virus
caauguggauauucugc

SEQ ID NO: 1882 - RNA, 17 nt, Hepatitis B Virus
cugcuuuaaugccuuua

SEQ ID NO: 1883 - RNA, 17 nt, Hepatitis B Virus
caagcaaaacaggcuuu

SEQ ID NO: 1884 - RNA, 17 nt, Hepatitis B Virus
ucucgccaacuuacaag

SEQ ID NO: 1885 - RNA, 17 nt, Hepatitis B Virus
cuaaguaaacaguaugu

SEQ ID NO: 1886 - RNA, 17 nt, Hepatitis B Virus
guaugugaaccuuuacc

SEQ ID NO: 1887 - RNA, 17 nt, Hepatitis B Virus
gcucggcaacggccugg

SEQ ID NO: 1888 - RNA, 17 nt, Hepatitis B Virus
guuugcugacgcaaccc

SEQ ID NO: 1889 - RNA, 17 nt, Hepatitis B Virus
cugacgcaacccccacu

SEQ ID NO: 1890 - RNA, 17 nt, Hepatitis B Virus
ugcguggaaccuuugug

SEQ ID NO: 1891 - RNA, 17 nt, Hepatitis B Virus
cucugccgauccauacc

SEQ ID NO: 1892 - RNA, 17 nt, Hepatitis B Virus
accgcggaacuccuagc

SEQ ID NO: 1893 - RNA, 17 nt, Hepatitis B Virus
ggggcaaaacucaucgg

SEQ ID NO: 1894 - RNA, 17 nt, Hepatitis B Virus
ucaucgggacugacaau

SEQ ID NO: 1895 - RNA, 17 nt, Hepatitis B Virus
cgggacugacaauucug

SEQ ID NO: 1896 - RNA, 17 nt, Hepatitis B Virus
gacugacaauucugucg

SEQ ID NO: 1897 - RNA, 17 nt, Hepatitis B Virus
ucccgcaaauauacauc

SEQ ID NO: 1898 - RNA, 17 nt, Hepatitis B Virus
ugcugccaacuggaucc

SEQ ID NO: 1899 - RNA, 17 nt, Hepatitis B Virus
ccaacuggauccuacgc

SEQ ID NO: 1900 - RNA, 17 nt, Hepatitis B Virus
uacgcgggacguccuuu

SEQ ID NO: 1901 - RNA, 17 nt, Hepatitis B Virus
ggcgcugaaucccgcgg

SEQ ID NO: 1902 - RNA, 17 nt, Hepatitis B Virus
ucccgcggacgaccccu

SEQ ID NO: 1903 - RNA, 17 nt, Hepatitis B Virus
cgcggacgaccccuccc

SEQ ID NO: 1904 - RNA, 17 nt, Hepatitis B Virus
uuguaccgaccguccac

SEQ ID NO: 1905 - RNA, 17 nt, Hepatitis B Virus
uuacgcggacuccccgu

SEQ ID NO: 1906 - RNA, 17 nt, Hepatitis B Virus
ucugccggaccgugugc

SEQ ID NO: 1907 - RNA, 17 nt, Hepatitis B Virus
gcauggagaccaccgug

SEQ ID NO: 1908 - RNA, 17 nt, Hepatitis B Virus
caccgugaacgcccaca

SEQ ID NO: 1909 - RNA, 17 nt, Hepatitis B Virus
ccacaggaaccugccca

SEQ ID NO: 1910 - RNA, 17 nt, Hepatitis B Virus
auaagaggacucuugga

SEQ ID NO: 1911 - RNA, 17 nt, Hepatitis B Virus
acucuuggacuuucagc

SEQ ID NO: 1912 - RNA, 17 nt, Hepatitis B Virus
uuucagcaaugucaacg

SEQ ID NO: 1913 - RNA, 17 nt, Hepatitis B Virus
caaugucaacgaccgac

SEQ ID NO: 1914 - RNA, 17 nt, Hepatitis B Virus
ugucaacgaccgaccuu

SEQ ID NO: 1915 - RNA, 17 nt, Hepatitis B Virus
aacgaccgaccuugagg

SEQ ID NO: 1916 - RNA, 17 nt, Hepatitis B Virus
cuucaaagacugugugu

SEQ ID NO: 1917 - RNA, 17 nt, Hepatitis B Virus
uguguuuaaugaguggg

SEQ ID NO: 1918 - RNA, 17 nt, Hepatitis B Virus
aggcauaaauuggugug

SEQ ID NO: 1919 - RNA, 17 nt, Hepatitis B Virus
accaugcaacuuuuuca

SEQ ID NO: 1920 - RNA, 17 nt, Hepatitis B Virus
ucugccuaaucaucuca

SEQ ID NO: 1921 - RNA, 17 nt, Hepatitis B Virus
gggcauggacauugacc

SEQ ID NO: 1922 - RNA, 17 nt, Hepatitis B Virus
ggacauugacccguaua

SEQ ID NO: 1923 - RNA, 17 nt, Hepatitis B Virus
uauaaagaauuuggagc

SEQ ID NO: 1924 - RNA, 17 nt, Hepatitis B Virus
gccuucugacuucuuuc

SEQ ID NO: 1925 - RNA, 17 nt, Hepatitis B Virus
uauucgagaucuccucg

SEQ ID NO: 1926 - RNA, 17 nt, Hepatitis B Virus
ucuccucgacaccgccu

SEQ ID NO: 1927 - RNA, 17 nt, Hepatitis B Virus
ucuccggaacauuguuc

SEQ ID NO: 1928 - RNA, 17 nt, Hepatitis B Virus
gugaguugaugaaucua

SEQ ID NO: 1929 - RNA, 17 nt, Hepatitis B Virus
guugaugaaucuagcca

SEQ ID NO: 1930 - RNA, 17 nt, Hepatitis B Virus
gggaaguaauuuggaag

SEQ ID NO: 1931 - RNA, 17 nt, Hepatitis B Virus
uuuggaagauccagcau

SEQ ID NO: 1932 - RNA, 17 nt, Hepatitis B Virus
uccagggaauuaguagu

SEQ ID NO: 1933 - RNA, 17 nt, Hepatitis B Virus
cuaugucaacguuaaua

SEQ ID NO: 1934 - RNA, 17 nt, Hepatitis B Virus
caacguuaauaugggcc

SEQ ID NO: 1935 - RNA, 17 nt, Hepatitis B Virus
gccuaaaaaucagacaa

SEQ ID NO: 1936 - RNA, 17 nt, Hepatitis B Virus
aaaaucagacaacuauu

SEQ ID NO: 1937 - RNA, 17 nt, Hepatitis B Virus
aucagacaacuauugug

SEQ ID NO: 1938 - RNA, 17 nt, Hepatitis B Virus
ggcgagaaacuguucuu

SEQ ID NO: 1939 - RNA, 17 nt, Hepatitis B Virus
guucuugaauauuuggu

SEQ ID NO: 1940 - RNA, 17 nt, Hepatitis B Virus
gaguguggauucgcacu

SEQ ID NO: 1941 - RNA, 17 nt, Hepatitis B Virus
gcauauagaccaccaaa

SEQ ID NO: 1942 - RNA, 17 nt, Hepatitis B Virus
accaccaaaugccccua

SEQ ID NO: 1943 - RNA, 17 nt, Hepatitis B Virus
ucuuaucaacacuuccg

SEQ ID NO: 1944 - RNA, 17 nt, Hepatitis B Virus
uuccggaaacuacuguu

SEQ ID NO: 1945 - RNA, 17 nt, Hepatitis B Virus
guuguuagacgaagagg

SEQ ID NO: 1946 - RNA, 17 nt, Hepatitis B Virus
gaagaagaacucccucg

SEQ ID NO: 1947 - RNA, 17 nt, Hepatitis B Virus
ccucgcagacgaagguc

SEQ ID NO: 1948 - RNA, 17 nt, Hepatitis B Virus
aggucucaaucgccgcg

SEQ ID NO: 1949 - RNA, 17 nt, Hepatitis B Virus
cgcagaagaucucaauc

SEQ ID NO: 1950 - RNA, 17 nt, Hepatitis B Virus
agaucucaaucucggga

SEQ ID NO: 1951 - RNA, 17 nt, Hepatitis B Virus
ucucgggaaucucaaug

SEQ ID NO: 1952 - RNA, 17 nt, Hepatitis B Virus
gaaucucaauguuagua

SEQ ID NO: 1953 - RNA, 17 nt, Hepatitis B Virus
uuccuuggacacauaag

SEQ ID NO: 1954 - RNA, 17 nt, Hepatitis B Virus
ggugggaaacuuuacgg

SEQ ID NO: 1955 - RNA, 17 nt, Hepatitis B Virus
uugcuuuaauccuaaau

SEQ ID NO: 1956 - RNA, 17 nt, Hepatitis B Virus
aauccuaaauggcaaac

SEQ ID NO: 1957 - RNA, 17 nt, Hepatitis B Virus
aauggcaaacuccuucu

SEQ ID NO: 1958 - RNA, 17 nt, Hepatitis B Virus
uuuuccugacauucauu

SEQ ID NO: 1959 - RNA, 17 nt, Hepatitis B Virus
gcaggaggacauuguug

SEQ ID NO: 1960 - RNA, 17 nt, Hepatitis B Virus
cauuguugauagaugua

SEQ ID NO: 1961 - RNA, 17 nt, Hepatitis B Virus
guugauagauguaagca

SEQ ID NO: 1962 - RNA, 17 nt, Hepatitis B Virus
uguaagcaauuuguggg

SEQ ID NO: 1963 - RNA, 17 nt, Hepatitis B Virus
uacaguaaaugaaaaca

SEQ ID NO: 1964 - RNA, 17 nt, Hepatitis B Virus
aaaugaaaacaggagac

SEQ ID NO: 1965 - RNA, 17 nt, Hepatitis B Virus
aacaggagacuuaaauu

SEQ ID NO: 1966 - RNA, 17 nt, Hepatitis B Virus
agacuuaaauuaacuau

SEQ ID NO: 1967 - RNA, 17 nt, Hepatitis B Virus
uuaaauuaacuaugccu

SEQ ID NO: 1968 - RNA, 17 nt, Hepatitis B Virus
uuaucccaauguuacua

SEQ ID NO: 1969 - RNA, 17 nt, Hepatitis B Virus
guuacuaaauauuugcc

SEQ ID NO: 1970 - RNA, 17 nt, Hepatitis B Virus
gcccuuagauaaaggga

SEQ ID NO: 1971 - RNA, 17 nt, Hepatitis B Virus
auaaagggaucaaaccg

SEQ ID NO: 1972 - RNA, 17 nt, Hepatitis B Virus
gggaucaaaccguauua

SEQ ID NO: 1973 - RNA, 17 nt, Hepatitis B Virus
uguaguuaaucauuacu

SEQ ID NO: 1974 - RNA, 17 nt, Hepatitis B Virus
acuuccagacgcgacau

SEQ ID NO: 1975 - RNA, 17 nt, Hepatitis B Virus
cagacgcgacauuauuu

SEQ ID NO: 1976 - RNA, 17 nt, Hepatitis B Virus
aggcggggaucuuauau

SEQ ID NO: 1977 - RNA, 17 nt, Hepatitis B Virus
ucuugggaacaagaucu

SEQ ID NO: 1978 - RNA, 17 nt, Hepatitis B Virus
ggaacaagaucuacagc

SEQ ID NO: 1979 - RNA, 17 nt, Hepatitis B Virus
ucuuccaaaccucgaaa

SEQ ID NO: 1980 - RNA, 17 nt, Hepatitis B Virus
gcauggggacaaaucuu

SEQ ID NO: 1981 - RNA, 17 nt, Hepatitis B Virus
ggggacaaaucuuucug

SEQ ID NO: 1982 - RNA, 17 nt, Hepatitis B Virus
uguccccaauccccugg

SEQ ID NO: 1983 - RNA, 17 nt, Hepatitis B Virus
ccccugggauucuuccc

SEQ ID NO: 1984 - RNA, 17 nt, Hepatitis B Virus
cuuccccgaucaucagu

SEQ ID NO: 1985 - RNA, 17 nt, Hepatitis B Virus
ucaguuggacccugcau

SEQ ID NO: 1986 - RNA, 17 nt, Hepatitis B Virus
caaagccaacucaguaa

SEQ ID NO: 1987 - RNA, 17 nt, Hepatitis B Virus
cucaguaaauccagauu

SEQ ID NO: 1988 - RNA, 17 nt, Hepatitis B Virus
aaauccagauugggacc

SEQ ID NO: 1989 - RNA, 17 nt, Hepatitis B Virus
agauugggaccucaacc

SEQ ID NO: 1990 - RNA, 17 nt, Hepatitis B Virus
ggaccucaacccgcaca

SEQ ID NO: 1991 - RNA, 17 nt, Hepatitis B Virus
gcacaaggacaacuggc

SEQ ID NO: 1992 - RNA, 17 nt, Hepatitis B Virus
caaggacaacuggccgg

SEQ ID NO: 1993 - RNA, 17 nt, Hepatitis B Virus
cuggccggacgccaaca

SEQ ID NO: 1994 - RNA, 17 nt, Hepatitis B Virus
ggacgccaacaaggugg

SEQ ID NO: 1995 - RNA, 17 nt, Hepatitis B Virus
caugggggacuguuggg

SEQ ID NO: 1996 - RNA, 17 nt, Hepatitis B Virus
uacucacaacugugcca

SEQ ID NO: 1997 - RNA, 17 nt, Hepatitis B Virus
cuccaccaaucggcagu

SEQ ID NO: 1998 - RNA, 17 nt, Hepatitis B Virus
ucuaagggacacucauc

SEQ ID NO: 1999 - RNA, 17 nt, Hepatitis B Virus
cucuucaagaucccaga

SEQ ID NO: 2000 - RNA, 17 nt, Hepatitis B Virus
agaucccagagucaggg

SEQ ID NO: 2001 - RNA, 17 nt, Hepatitis B Virus
cagagucagggcccugu

SEQ ID NO: 2002 - RNA, 17 nt, Hepatitis B Virus
agagucagggcccugua

SEQ ID NO: 2003 - RNA, 17 nt, Hepatitis B Virus
uuccugcugguggcucc

SEQ ID NO: 2004 - RNA, 17 nt, Hepatitis B Virus
cugcugguggcuccagu

SEQ ID NO: 2005 - RNA, 17 nt, Hepatitis B Virus
ccaguucaggaacagug

SEQ ID NO: 2006 - RNA, 17 nt, Hepatitis B Virus
caguucaggaacaguga

SEQ ID NO: 2007 - RNA, 17 nt, Hepatitis B Virus
ccugcucagaauacugu

SEQ ID NO: 2008 - RNA, 17 nt, Hepatitis B Virus
uuaucgaagacugggga

SEQ ID NO: 2009 - RNA, 17 nt, Hepatitis B Virus
cgaagacuggggacccu

SEQ ID NO: 2010 - RNA, 17 nt, Hepatitis B Virus
gaagacuggggacccug

SEQ ID NO: 2011 - RNA, 17 nt, Hepatitis B Virus
aagacuggggacccugu

SEQ ID NO: 2012 - RNA, 17 nt, Hepatitis B Virus
agacuggggacccugua

SEQ ID NO: 2013 - RNA, 17 nt, Hepatitis B Virus
ccgaacauggagaacau

SEQ ID NO: 2014 - RNA, 17 nt, Hepatitis B Virus
cgaacauggagaacauc

SEQ ID NO: 2015 - RNA, 17 nt, Hepatitis B Virus
aacauggagaacaucgc

SEQ ID NO: 2016 - RNA, 17 nt, Hepatitis B Virus
ucgcaucaggacuccua

SEQ ID NO: 2017 - RNA, 17 nt, Hepatitis B Virus
cgcaucaggacuccuag

SEQ ID NO: 2018 - RNA, 17 nt, Hepatitis B Virus
gacuccuaggaccccug

SEQ ID NO: 2019 - RNA, 17 nt, Hepatitis B Virus
acuccuaggaccccugc

SEQ ID NO: 2020 - RNA, 17 nt, Hepatitis B Virus
guguuacaggcgggguu

SEQ ID NO: 2021 - RNA, 17 nt, Hepatitis B Virus
uuacaggcgggguuuuu

SEQ ID NO: 2022 - RNA, 17 nt, Hepatitis B Virus
uacaggcgggguuuuuc

SEQ ID NO: 2023 - RNA, 17 nt, Hepatitis B Virus
acaggcgggguuuuucu

SEQ ID NO: 2024 - RNA, 17 nt, Hepatitis B Virus
auaccacagagucuaga

SEQ ID NO: 2025 - RNA, 17 nt, Hepatitis B Virus
agagucuagacucgugg

SEQ ID NO: 2026 - RNA, 17 nt, Hepatitis B Virus
agacucgugguggacuu

SEQ ID NO: 2027 - RNA, 17 nt, Hepatitis B Virus
cucgugguggacuucuc

SEQ ID NO: 2028 - RNA, 17 nt, Hepatitis B Virus
ucgugguggacuucucu

SEQ ID NO: 2029 - RNA, 17 nt, Hepatitis B Virus
auuuucuagggggaaca

SEQ ID NO: 2030 - RNA, 17 nt, Hepatitis B Virus
uuuucuagggggaacac

SEQ ID NO: 2031 - RNA, 17 nt, Hepatitis B Virus
uuucuagggggaacacc

SEQ ID NO: 2032 - RNA, 17 nt, Hepatitis B Virus
uucuagggggaacaccc

SEQ ID NO: 2033 - RNA, 17 nt, Hepatitis B Virus
ucuagggggaacacccg

SEQ ID NO: 2034 - RNA, 17 nt, Hepatitis B Virus
ugugucuuggccaaaau

SEQ ID NO: 2035 - RNA, 17 nt, Hepatitis B Virus
uuuguccugguuaucgc

SEQ ID NO: 2036 - RNA, 17 nt, Hepatitis B Virus
uuaucgcuggauguguc

SEQ ID NO: 2037 - RNA, 17 nt, Hepatitis B Virus
uaucgcuggaugugucu

SEQ ID NO: 2038 - RNA, 17 nt, Hepatitis B Virus
gugucugcggcguuuua

SEQ ID NO: 2039 - RNA, 17 nt, Hepatitis B Virus
uucuuguugguucuucu

SEQ ID NO: 2040 - RNA, 17 nt, Hepatitis B Virus
guucuucuggacuauca

SEQ ID NO: 2041 - RNA, 17 nt, Hepatitis B Virus
uucuucuggacuaucaa

SEQ ID NO: 2042 - RNA, 17 nt, Hepatitis B Virus
acuaucaagguauguug

SEQ ID NO: 2043 - RNA, 17 nt, Hepatitis B Virus
uaauuccaggaucauca

SEQ ID NO: 2044 - RNA, 17 nt, Hepatitis B Virus
aauuccaggaucaucaa

SEQ ID NO: 2045 - RNA, 17 nt, Hepatitis B Virus
ccagcaccggaccaugc

SEQ ID NO: 2046 - RNA, 17 nt, Hepatitis B Virus
cagcaccggaccaugca

SEQ ID NO: 2047 - RNA, 17 nt, Hepatitis B Virus
cugcucaaggaaccucu

SEQ ID NO: 2048 - RNA, 17 nt, Hepatitis B Virus
ugcucaaggaaccucua

SEQ ID NO: 2049 - RNA, 17 nt, Hepatitis B Virus
aaaccuacggacggaaa

SEQ ID NO: 2050 - RNA, 17 nt, Hepatitis B Virus
aaccuacggacggaaac

SEQ ID NO: 2051 - RNA, 17 nt, Hepatitis B Virus
cuacggacggaaacugc

SEQ ID NO: 2052 - RNA, 17 nt, Hepatitis B Virus
uacggacggaaacugca

SEQ ID NO: 2053 - RNA, 17 nt, Hepatitis B Virus
aucaucuugggcuuucg

SEQ ID NO: 2054 - RNA, 17 nt, Hepatitis B Virus
ucaucuugggcuuucgc

SEQ ID NO: 2055 - RNA, 17 nt, Hepatitis B Virus
auaccuaugggaguggg

SEQ ID NO: 2056 - RNA, 17 nt, Hepatitis B Virus
uaccuaugggagugggc

SEQ ID NO: 2057 - RNA, 17 nt, Hepatitis B Virus
accuaugggagugggcc

SEQ ID NO: 2058 - RNA, 17 nt, Hepatitis B Virus
augggagugggccucag

SEQ ID NO: 2059 - RNA, 17 nt, Hepatitis B Virus
ugggagugggccucagu

SEQ ID NO: 2060 - RNA, 17 nt, Hepatitis B Virus
uuucucuuggcucaguu

SEQ ID NO: 2061 - RNA, 17 nt, Hepatitis B Virus
uguucagugguucguag

SEQ ID NO: 2062 - RNA, 17 nt, Hepatitis B Virus
gguucguagggcuuucc

SEQ ID NO: 2063 - RNA, 17 nt, Hepatitis B Virus
guucguagggcuuuccc

SEQ ID NO: 2064 - RNA, 17 nt, Hepatitis B Virus
cacugucuggcuuucag

SEQ ID NO: 2065 - RNA, 17 nt, Hepatitis B Virus
aguuauauggaugaugu

SEQ ID NO: 2066 - RNA, 17 nt, Hepatitis B Virus
guuauauggaugaugug

SEQ ID NO: 2067 - RNA, 17 nt, Hepatitis B Virus
gaugaugugguuuuggg

SEQ ID NO: 2068 - RNA, 17 nt, Hepatitis B Virus
gugguuuugggggccaa

SEQ ID NO: 2069 - RNA, 17 nt, Hepatitis B Virus
ugguuuugggggccaag

SEQ ID NO: 2070 - RNA, 17 nt, Hepatitis B Virus
gguuuugggggccaagu

SEQ ID NO: 2071 - RNA, 17 nt, Hepatitis B Virus
guuuugggggccaaguc

SEQ ID NO: 2072 - RNA, 17 nt, Hepatitis B Virus
uugucuuuggguauaca

SEQ ID NO: 2073 - RNA, 17 nt, Hepatitis B Virus
ugucuuuggguauacau

SEQ ID NO: 2074 - RNA, 17 nt, Hepatitis B Virus
aacaaaaagauggggau

SEQ ID NO: 2075 - RNA, 17 nt, Hepatitis B Virus
aaaaagauggggauauu

SEQ ID NO: 2076 - RNA, 17 nt, Hepatitis B Virus
aaaagauggggauauuc

SEQ ID NO: 2077 - RNA, 17 nt, Hepatitis B Virus
aaagauggggauauucc

SEQ ID NO: 2078 - RNA, 17 nt, Hepatitis B Virus
aagauggggauauuccc

SEQ ID NO: 2079 - RNA, 17 nt, Hepatitis B Virus
aacuucaugggauaugu

SEQ ID NO: 2080 - RNA, 17 nt, Hepatitis B Virus
acuucaugggauaugua

SEQ ID NO: 2081 - RNA, 17 nt, Hepatitis B Virus
cuucaugggauauguaa

SEQ ID NO: 2082 - RNA, 17 nt, Hepatitis B Virus
auguaauugggaguugg

SEQ ID NO: 2083 - RNA, 17 nt, Hepatitis B Virus
uguaauugggaguuggg

SEQ ID NO: 2084 - RNA, 17 nt, Hepatitis B Virus
guaauugggaguugggg

SEQ ID NO: 2085 - RNA, 17 nt, Hepatitis B Virus
ugggaguuggggcacau

SEQ ID NO: 2086 - RNA, 17 nt, Hepatitis B Virus
gggaguuggggcacauu

SEQ ID NO: 2087 - RNA, 17 nt, Hepatitis B Virus
ggaguuggggcacauug

SEQ ID NO: 2088 - RNA, 17 nt, Hepatitis B Virus
uugccacaggaacauau

SEQ ID NO: 2089 - RNA, 17 nt, Hepatitis B Virus
ugccacaggaacauauu

SEQ ID NO: 2090 - RNA, 17 nt, Hepatitis B Virus
guguuuuaggaaacuuc

SEQ ID NO: 2091 - RNA, 17 nt, Hepatitis B Virus
uguuuuaggaaacuucc

SEQ ID NO: 2092 - RNA, 17 nt, Hepatitis B Virus
uguaaacaggccuauug

SEQ ID NO: 2093 - RNA, 17 nt, Hepatitis B Virus
uauugauuggaaaguau

SEQ ID NO: 2094 - RNA, 17 nt, Hepatitis B Virus
auugauuggaaaguaug

SEQ ID NO: 2095 - RNA, 17 nt, Hepatitis B Virus
cgaauugugggucuuuu

SEQ ID NO: 2096 - RNA, 17 nt, Hepatitis B Virus
gaauugugggucuuuug

SEQ ID NO: 2097 - RNA, 17 nt, Hepatitis B Virus
ggucuuuugggguuugc

SEQ ID NO: 2098 - RNA, 17 nt, Hepatitis B Virus
gucuuuugggguuugcc

SEQ ID NO: 2099 - RNA, 17 nt, Hepatitis B Virus
ucuuuugggguuugccg

SEQ ID NO: 2100 - RNA, 17 nt, Hepatitis B Virus
cgcaauguggauauucu

SEQ ID NO: 2101 - RNA, 17 nt, Hepatitis B Virus
gcaauguggauauucug

SEQ ID NO: 2102 - RNA, 17 nt, Hepatitis B Virus
gcaaaacaggcuuuuac

SEQ ID NO: 2103 - RNA, 17 nt, Hepatitis B Virus
acuuacaaggccuuucu

SEQ ID NO: 2104 - RNA, 17 nt, Hepatitis B Virus
cguugcucggcaacggc

SEQ ID NO: 2105 - RNA, 17 nt, Hepatitis B Virus
ucggcaacggccugguc

SEQ ID NO: 2106 - RNA, 17 nt, Hepatitis B Virus
aacggccuggucuaugc

SEQ ID NO: 2107 - RNA, 17 nt, Hepatitis B Virus
cccccacugguuggggc

SEQ ID NO: 2108 - RNA, 17 nt, Hepatitis B Virus
cacugguuggggcuugg

SEQ ID NO: 2109 - RNA, 17 nt, Hepatitis B Virus
acugguuggggcuuggc

SEQ ID NO: 2110 - RNA, 17 nt, Hepatitis B Virus
cugguuggggcuuggcc

SEQ ID NO: 2111 - RNA, 17 nt, Hepatitis B Virus
uggggcuuggccauagg

SEQ ID NO: 2112 - RNA, 17 nt, Hepatitis B Virus
uggccauaggccaucag

SEQ ID NO: 2113 - RNA, 17 nt, Hepatitis B Virus
gcaugcguggaaccuuu

SEQ ID NO: 2114 - RNA, 17 nt, Hepatitis B Virus
caugcguggaaccuuug

SEQ ID NO: 2115 - RNA, 17 nt, Hepatitis B Virus
cauaccgcggaacuccu

SEQ ID NO: 2116 - RNA, 17 nt, Hepatitis B Virus
auaccgcggaacuccua

SEQ ID NO: 2117 - RNA, 17 nt, Hepatitis B Virus
ucgcagcaggucugggg

SEQ ID NO: 2118 - RNA, 17 nt, Hepatitis B Virus
gcaggucuggggcaaaa

SEQ ID NO: 2119 - RNA, 17 nt, Hepatitis B Virus
caggucuggggcaaaac

SEQ ID NO: 2120 - RNA, 17 nt, Hepatitis B Virus
aggucuggggcaaaacu

SEQ ID NO: 2121 - RNA, 17 nt, Hepatitis B Virus
aacucaucgggacugac

SEQ ID NO: 2122 - RNA, 17 nt, Hepatitis B Virus
acucaucgggacugaca

SEQ ID NO: 2123 - RNA, 17 nt, Hepatitis B Virus
cucaucgggacugacaa

SEQ ID NO: 2124 - RNA, 17 nt, Hepatitis B Virus
auuuccauggcugcuag

SEQ ID NO: 2125 - RNA, 17 nt, Hepatitis B Virus
ggcugcuaggcugugcu

SEQ ID NO: 2126 - RNA, 17 nt, Hepatitis B Virus
ugccaacuggauccuac

SEQ ID NO: 2127 - RNA, 17 nt, Hepatitis B Virus
gccaacuggauccuacg

SEQ ID NO: 2128 - RNA, 17 nt, Hepatitis B Virus
uccuacgcgggacgucc

SEQ ID NO: 2129 - RNA, 17 nt, Hepatitis B Virus
ccuacgcgggacguccu

SEQ ID NO: 2130 - RNA, 17 nt, Hepatitis B Virus
cuacgcgggacguccuu

SEQ ID NO: 2131 - RNA, 17 nt, Hepatitis B Virus
gucccgucggcgcugaa

SEQ ID NO: 2132 - RNA, 17 nt, Hepatitis B Virus
aaucccgcggacgaccc

SEQ ID NO: 2133 - RNA, 17 nt, Hepatitis B Virus
aucccgcggacgacccc

SEQ ID NO: 2134 - RNA, 17 nt, Hepatitis B Virus
ccccucccggggccgcu

SEQ ID NO: 2135 - RNA, 17 nt, Hepatitis B Virus
cccucccggggccgcuu

SEQ ID NO: 2136 - RNA, 17 nt, Hepatitis B Virus
ccucccggggccgcuug

SEQ ID NO: 2137 - RNA, 17 nt, Hepatitis B Virus
ggccgcuuggggcucua

SEQ ID NO: 2138 - RNA, 17 nt, Hepatitis B Virus
gccgcuuggggcucuac

SEQ ID NO: 2139 - RNA, 17 nt, Hepatitis B Virus
ccgcuuggggcucuacc

SEQ ID NO: 2140 - RNA, 17 nt, Hepatitis B Virus
ccguccacggggcgcac

SEQ ID NO: 2141 - RNA, 17 nt, Hepatitis B Virus
cguccacggggcgcacc

SEQ ID NO: 2142 - RNA, 17 nt, Hepatitis B Virus
guccacggggcgcaccu

SEQ ID NO: 2143 - RNA, 17 nt, Hepatitis B Virus
cuuuacgcggacucccc

SEQ ID NO: 2144 - RNA, 17 nt, Hepatitis B Virus
uuuacgcggacuccccg

SEQ ID NO: 2145 - RNA, 17 nt, Hepatitis B Virus
caucugccggaccgugu

SEQ ID NO: 2146 - RNA, 17 nt, Hepatitis B Virus
aucugccggaccgugug

SEQ ID NO: 2147 - RNA, 17 nt, Hepatitis B Virus
cgucgcauggagaccac

SEQ ID NO: 2148 - RNA, 17 nt, Hepatitis B Virus
gucgcauggagaccacc

SEQ ID NO: 2149 - RNA, 17 nt, Hepatitis B Virus
cgcauggagaccaccgu

SEQ ID NO: 2150 - RNA, 17 nt, Hepatitis B Virus
cgcccacaggaaccugc

SEQ ID NO: 2151 - RNA, 17 nt, Hepatitis B Virus
gcccacaggaaccugcc

SEQ ID NO: 2152 - RNA, 17 nt, Hepatitis B Virus
cugcccaaggucuugca

SEQ ID NO: 2153 - RNA, 17 nt, Hepatitis B Virus
uugcauaagaggacucu

SEQ ID NO: 2154 - RNA, 17 nt, Hepatitis B Virus
gcauaagaggacucuug

SEQ ID NO: 2155 - RNA, 17 nt, Hepatitis B Virus
cauaagaggacucuugg

SEQ ID NO: 2156 - RNA, 17 nt, Hepatitis B Virus
ggacucuuggacuuuca

SEQ ID NO: 2157 - RNA, 17 nt, Hepatitis B Virus
gacucuuggacuuucag

SEQ ID NO: 2158 - RNA, 17 nt, Hepatitis B Virus
gaccuugaggcauacuu

SEQ ID NO: 2159 - RNA, 17 nt, Hepatitis B Virus
acuucaaagacugugug

SEQ ID NO: 2160 - RNA, 17 nt, Hepatitis B Virus
uaaugagugggaggagu

SEQ ID NO: 2161 - RNA, 17 nt, Hepatitis B Virus
aaugagugggaggaguu

SEQ ID NO: 2162 - RNA, 17 nt, Hepatitis B Virus
augagugggaggaguug

SEQ ID NO: 2163 - RNA, 17 nt, Hepatitis B Virus
gagugggaggaguuggg

SEQ ID NO: 2164 - RNA, 17 nt, Hepatitis B Virus
agugggaggaguugggg

SEQ ID NO: 2165 - RNA, 17 nt, Hepatitis B Virus
gaggaguugggggagga

SEQ ID NO: 2166 - RNA, 17 nt, Hepatitis B Virus
aggaguugggggaggag

SEQ ID NO: 2167 - RNA, 17 nt, Hepatitis B Virus
ggaguugggggaggagg

SEQ ID NO: 2168 - RNA, 17 nt, Hepatitis B Virus
gaguugggggaggaggu

SEQ ID NO: 2169 - RNA, 17 nt, Hepatitis B Virus
aguugggggaggagguu

SEQ ID NO: 2170 - RNA, 17 nt, Hepatitis B Virus
uugggggaggagguuag

SEQ ID NO: 2171 - RNA, 17 nt, Hepatitis B Virus
ugggggaggagguuagg

SEQ ID NO: 2172 - RNA, 17 nt, Hepatitis B Virus
ggggaggagguuagguu

SEQ ID NO: 2173 - RNA, 17 nt, Hepatitis B Virus
ggagguuagguuaaagg

SEQ ID NO: 2174 - RNA, 17 nt, Hepatitis B Virus
agguuaaaggucuuugu

SEQ ID NO: 2175 - RNA, 17 nt, Hepatitis B Virus
uuguacuaggaggcugu

SEQ ID NO: 2176 - RNA, 17 nt, Hepatitis B Virus
uguacuaggaggcugua

SEQ ID NO: 2177 - RNA, 17 nt, Hepatitis B Virus
uacuaggaggcuguagg

SEQ ID NO: 2178 - RNA, 17 nt, Hepatitis B Virus
aggcuguaggcauaaau

SEQ ID NO: 2179 - RNA, 17 nt, Hepatitis B Virus
cauaaauugguguguuc

SEQ ID NO: 2180 - RNA, 17 nt, Hepatitis B Virus
ugugccuuggguggcuu

SEQ ID NO: 2181 - RNA, 17 nt, Hepatitis B Virus
gugccuuggguggcuuu

SEQ ID NO: 2182 - RNA, 17 nt, Hepatitis B Virus
ccuuggguggcuuuggg

SEQ ID NO: 2183 - RNA, 17 nt, Hepatitis B Virus
guggcuuuggggcaugg

SEQ ID NO: 2184 - RNA, 17 nt, Hepatitis B Virus
uggcuuuggggcaugga

SEQ ID NO: 2185 - RNA, 17 nt, Hepatitis B Virus
ggcuuuggggcauggac

SEQ ID NO: 2186 - RNA, 17 nt, Hepatitis B Virus
uggggcauggacauuga

SEQ ID NO: 2187 - RNA, 17 nt, Hepatitis B Virus
ggggcauggacauugac

SEQ ID NO: 2188 - RNA, 17 nt, Hepatitis B Virus
cguauaaagaauuugga

SEQ ID NO: 2189 - RNA, 17 nt, Hepatitis B Virus
aagaauuuggagcuucu

SEQ ID NO: 2190 - RNA, 17 nt, Hepatitis B Virus
agaauuuggagcuucug

SEQ ID NO: 2191 - RNA, 17 nt, Hepatitis B Virus
gcuucuguggaguuacu

SEQ ID NO: 2192 - RNA, 17 nt, Hepatitis B Virus
cuucuguggaguuacuc

SEQ ID NO: 2193 - RNA, 17 nt, Hepatitis B Virus
cuauucgagaucuccuc

SEQ ID NO: 2194 - RNA, 17 nt, Hepatitis B Virus
ucuguaucggggggccu

SEQ ID NO: 2195 - RNA, 17 nt, Hepatitis B Virus
cuguaucggggggccuu

SEQ ID NO: 2196 - RNA, 17 nt, Hepatitis B Virus
uguaucggggggccuua

SEQ ID NO: 2197 - RNA, 17 nt, Hepatitis B Virus
guaucggggggccuuag

SEQ ID NO: 2198 - RNA, 17 nt, Hepatitis B Virus
uaucggggggccuuaga

SEQ ID NO: 2199 - RNA, 17 nt, Hepatitis B Virus
gggccuuagagucuccg

SEQ ID NO: 2200 - RNA, 17 nt, Hepatitis B Virus
gagucuccggaacauug

SEQ ID NO: 2201 - RNA, 17 nt, Hepatitis B Virus
agucuccggaacauugu

SEQ ID NO: 2202 - RNA, 17 nt, Hepatitis B Virus
caccauacggcacucag

SEQ ID NO: 2203 - RNA, 17 nt, Hepatitis B Virus
ggcacucaggcaagcua

SEQ ID NO: 2204 - RNA, 17 nt, Hepatitis B Virus
ucuguguuggggugagu

SEQ ID NO: 2205 - RNA, 17 nt, Hepatitis B Virus
cuguguuggggugaguu

SEQ ID NO: 2206 - RNA, 17 nt, Hepatitis B Virus
uguguuggggugaguug

SEQ ID NO: 2207 - RNA, 17 nt, Hepatitis B Virus
agccaccugggugggaa

SEQ ID NO: 2208 - RNA, 17 nt, Hepatitis B Virus
gccaccugggugggaag

SEQ ID NO: 2209 - RNA, 17 nt, Hepatitis B Virus
accugggugggaaguaa

SEQ ID NO: 2210 - RNA, 17 nt, Hepatitis B Virus
ccugggugggaaguaau

SEQ ID NO: 2211 - RNA, 17 nt, Hepatitis B Virus
cugggugggaaguaauu

SEQ ID NO: 2212 - RNA, 17 nt, Hepatitis B Virus
aguaauuuggaagaucc

SEQ ID NO: 2213 - RNA, 17 nt, Hepatitis B Virus
guaauuuggaagaucca

SEQ ID NO: 2214 - RNA, 17 nt, Hepatitis B Virus
auuuggaagauccagca

SEQ ID NO: 2215 - RNA, 17 nt, Hepatitis B Virus
agcauccagggaauuag

SEQ ID NO: 2216 - RNA, 17 nt, Hepatitis B Virus
gcauccagggaauuagu

SEQ ID NO: 2217 - RNA, 17 nt, Hepatitis B Virus
cauccagggaauuagua

SEQ ID NO: 2218 - RNA, 17 nt, Hepatitis B Virus
guuaauaugggccuaaa

SEQ ID NO: 2219 - RNA, 17 nt, Hepatitis B Virus
uuaauaugggccuaaaa

SEQ ID NO: 2220 - RNA, 17 nt, Hepatitis B Virus
aaaaaucagacaacuau

SEQ ID NO: 2221 - RNA, 17 nt, Hepatitis B Virus
acuauugugguuucaca

SEQ ID NO: 2222 - RNA, 17 nt, Hepatitis B Virus
uuacuuuugggcgagaa

SEQ ID NO: 2223 - RNA, 17 nt, Hepatitis B Virus
uacuuuugggcgagaaa

SEQ ID NO: 2224 - RNA, 17 nt, Hepatitis B Virus
uugggcgagaaacuguu

SEQ ID NO: 2225 - RNA, 17 nt, Hepatitis B Virus
gaauauuuggugucuuu

SEQ ID NO: 2226 - RNA, 17 nt, Hepatitis B Virus
ugucuuuuggagugugg

SEQ ID NO: 2227 - RNA, 17 nt, Hepatitis B Virus
gucuuuuggagugugga

SEQ ID NO: 2228 - RNA, 17 nt, Hepatitis B Virus
uggaguguggauucgca

SEQ ID NO: 2229 - RNA, 17 nt, Hepatitis B Virus
ggaguguggauucgcac

SEQ ID NO: 2230 - RNA, 17 nt, Hepatitis B Virus
ugcauauagaccaccaa

SEQ ID NO: 2231 - RNA, 17 nt, Hepatitis B Virus
acacuuccggaaacuac

SEQ ID NO: 2232 - RNA, 17 nt, Hepatitis B Virus
cacuuccggaaacuacu

SEQ ID NO: 2233 - RNA, 17 nt, Hepatitis B Virus
uguuguuagacgaagag

SEQ ID NO: 2234 - RNA, 17 nt, Hepatitis B Virus
uagacgaagaggcaggu

SEQ ID NO: 2235 - RNA, 17 nt, Hepatitis B Virus
gacgaagaggcaggucc

SEQ ID NO: 2236 - RNA, 17 nt, Hepatitis B Virus
aagaggcagguccccua

SEQ ID NO: 2237 - RNA, 17 nt, Hepatitis B Virus
guccccuagaagaagaa

SEQ ID NO: 2238 - RNA, 17 nt, Hepatitis B Virus
cccuagaagaagaacuc

SEQ ID NO: 2239 - RNA, 17 nt, Hepatitis B Virus
uagaagaagaacucccu

SEQ ID NO: 2240 - RNA, 17 nt, Hepatitis B Virus
gccucgcagacgaaggu

SEQ ID NO: 2241 - RNA, 17 nt, Hepatitis B Virus
cagacgaaggucucaau

SEQ ID NO: 2242 - RNA, 17 nt, Hepatitis B Virus
gcgucgcagaagaucuc

SEQ ID NO: 2243 - RNA, 17 nt, Hepatitis B Virus
ucgcagaagaucucaau

SEQ ID NO: 2244 - RNA, 17 nt, Hepatitis B Virus
ucaaucucgggaaucuc

SEQ ID NO: 2245 - RNA, 17 nt, Hepatitis B Virus
caaucucgggaaucuca

SEQ ID NO: 2246 - RNA, 17 nt, Hepatitis B Virus
aaucucgggaaucucaa

SEQ ID NO: 2247 - RNA, 17 nt, Hepatitis B Virus
uauuccuuggacacaua

SEQ ID NO: 2248 - RNA, 17 nt, Hepatitis B Virus
auuccuuggacacauaa

SEQ ID NO: 2249 - RNA, 17 nt, Hepatitis B Virus
acacauaaggugggaaa

SEQ ID NO: 2250 - RNA, 17 nt, Hepatitis B Virus
cauaaggugggaaacuu

SEQ ID NO: 2251 - RNA, 17 nt, Hepatitis B Virus
auaaggugggaaacuuu

SEQ ID NO: 2252 - RNA, 17 nt, Hepatitis B Virus
uaaggugggaaacuuua

SEQ ID NO: 2253 - RNA, 17 nt, Hepatitis B Virus
aacuuuacggggcuuua

SEQ ID NO: 2254 - RNA, 17 nt, Hepatitis B Virus
acuuuacggggcuuuau

SEQ ID NO: 2255 - RNA, 17 nt, Hepatitis B Virus
cuuuacggggcuuuauu

SEQ ID NO: 2256 - RNA, 17 nt, Hepatitis B Virus
ucuucuacgguaccuug

SEQ ID NO: 2257 - RNA, 17 nt, Hepatitis B Virus
uccuaaauggcaaacuc

SEQ ID NO: 2258 - RNA, 17 nt, Hepatitis B Virus
cauuugcaggaggacau

SEQ ID NO: 2259 - RNA, 17 nt, Hepatitis B Virus
auuugcaggaggacauu

SEQ ID NO: 2260 - RNA, 17 nt, Hepatitis B Virus
uugcaggaggacauugu

SEQ ID NO: 2261 - RNA, 17 nt, Hepatitis B Virus
ugcaggaggacauuguu

SEQ ID NO: 2262 - RNA, 17 nt, Hepatitis B Virus
uguugauagauguaagc

SEQ ID NO: 2263 - RNA, 17 nt, Hepatitis B Virus
caauuuguggggccccu

SEQ ID NO: 2264 - RNA, 17 nt, Hepatitis B Virus
aauuuguggggccccuu

SEQ ID NO: 2265 - RNA, 17 nt, Hepatitis B Virus
auuuguggggccccuua

SEQ ID NO: 2266 - RNA, 17 nt, Hepatitis B Virus
ugaaaacaggagacuua

SEQ ID NO: 2267 - RNA, 17 nt, Hepatitis B Virus
gaaaacaggagacuuaa

SEQ ID NO: 2268 - RNA, 17 nt, Hepatitis B Virus
aaacaggagacuuaaau

SEQ ID NO: 2269 - RNA, 17 nt, Hepatitis B Virus
gccugcuagguuuuauc

SEQ ID NO: 2270 - RNA, 17 nt, Hepatitis B Virus
ugcccuuagauaaaggg

SEQ ID NO: 2271 - RNA, 17 nt, Hepatitis B Virus
uagauaaagggaucaaa

SEQ ID NO: 2272 - RNA, 17 nt, Hepatitis B Virus
agauaaagggaucaaac

SEQ ID NO: 2273 - RNA, 17 nt, Hepatitis B Virus
gauaaagggaucaaacc

SEQ ID NO: 2274 - RNA, 17 nt, Hepatitis B Virus
auuauccagaguaugua

SEQ ID NO: 2275 - RNA, 17 nt, Hepatitis B Virus
uacuuccagacgcgaca

SEQ ID NO: 2276 - RNA, 17 nt, Hepatitis B Virus
cacucuuuggaaggcgg

SEQ ID NO: 2277 - RNA, 17 nt, Hepatitis B Virus
acucuuuggaaggcggg

SEQ ID NO: 2278 - RNA, 17 nt, Hepatitis B Virus
cuuuggaaggcggggau

SEQ ID NO: 2279 - RNA, 17 nt, Hepatitis B Virus
uggaaggcggggaucuu

SEQ ID NO: 2280 - RNA, 17 nt, Hepatitis B Virus
ggaaggcggggaucuua

SEQ ID NO: 2281 - RNA, 17 nt, Hepatitis B Virus
gaaggcggggaucuuau

SEQ ID NO: 2282 - RNA, 17 nt, Hepatitis B Virus
aaggcggggaucuuaua

SEQ ID NO: 2283 - RNA, 17 nt, Hepatitis B Virus
auauaaaagagagucca

SEQ ID NO: 2284 - RNA, 17 nt, Hepatitis B Virus
auaaaagagaguccaca

SEQ ID NO: 2285 - RNA, 17 nt, Hepatitis B Virus
cauuuugcgggucacca

SEQ ID NO: 2286 - RNA, 17 nt, Hepatitis B Virus
auuuugcgggucaccau

SEQ ID NO: 2287 - RNA, 17 nt, Hepatitis B Virus
auauucuugggaacaag

SEQ ID NO: 2288 - RNA, 17 nt, Hepatitis B Virus
uauucuugggaacaaga

SEQ ID NO: 2289 - RNA, 17 nt, Hepatitis B Virus
auucuugggaacaagau

SEQ ID NO: 2290 - RNA, 17 nt, Hepatitis B Virus
gggaacaagaucuacag

SEQ ID NO: 2291 - RNA, 17 nt, Hepatitis B Virus
uacagcaugggagguug

SEQ ID NO: 2292 - RNA, 17 nt, Hepatitis B Virus
acagcaugggagguugg

SEQ ID NO: 2293 - RNA, 17 nt, Hepatitis B Virus
cagcaugggagguuggu

SEQ ID NO: 2294 - RNA, 17 nt, Hepatitis B Virus
gcaugggagguuggucu

SEQ ID NO: 2295 - RNA, 17 nt, Hepatitis B Virus
gggagguuggucuucca

SEQ ID NO: 2296 - RNA, 17 nt, Hepatitis B Virus
cucgaaaaggcaugggg

SEQ ID NO: 2297 - RNA, 17 nt, Hepatitis B Virus
aaaggcauggggacaaa

SEQ ID NO: 2298 - RNA, 17 nt, Hepatitis B Virus
aaggcauggggacaaau

SEQ ID NO: 2299 - RNA, 17 nt, Hepatitis B Virus
aggcauggggacaaauc

SEQ ID NO: 2300 - RNA, 17 nt, Hepatitis B Virus
ggcauggggacaaaucu

SEQ ID NO: 2301 - RNA, 17 nt, Hepatitis B Virus
aauccccugggauucuu

SEQ ID NO: 2302 - RNA, 17 nt, Hepatitis B Virus
auccccugggauucuuc

SEQ ID NO: 2303 - RNA, 17 nt, Hepatitis B Virus
uccccugggauucuucc

SEQ ID NO: 2304 - RNA, 17 nt, Hepatitis B Virus
caucaguuggacccugc

SEQ ID NO: 2305 - RNA, 17 nt, Hepatitis B Virus
aucaguuggacccugca

SEQ ID NO: 2306 - RNA, 17 nt, Hepatitis B Virus
uaaauccagauugggac

SEQ ID NO: 2307 - RNA, 17 nt, Hepatitis B Virus
uccagauugggaccuca

SEQ ID NO: 2308 - RNA, 17 nt, Hepatitis B Virus
ccagauugggaccucaa

SEQ ID NO: 2309 - RNA, 17 nt, Hepatitis B Virus
cagauugggaccucaac

SEQ ID NO: 2310 - RNA, 17 nt, Hepatitis B Virus
ccgcacaaggacaacug

SEQ ID NO: 2311 - RNA, 17 nt, Hepatitis B Virus
cgcacaaggacaacugg

SEQ ID NO: 2312 - RNA, 17 nt, Hepatitis B Virus
ggacaacuggccggacg

SEQ ID NO: 2313 - RNA, 17 nt, Hepatitis B Virus
aacuggccggacgccaa

SEQ ID NO: 2314 - RNA, 17 nt, Hepatitis B Virus
acuggccggacgccaac

SEQ ID NO: 2315 - RNA, 17 nt, Hepatitis B Virus
gccaacaaggugggagu

SEQ ID NO: 2316 - RNA, 17 nt, Hepatitis B Virus
aacaaggugggaguggg

SEQ ID NO: 2317 - RNA, 17 nt, Hepatitis B Virus
acaaggugggaguggga

SEQ ID NO: 2318 - RNA, 17 nt, Hepatitis B Virus
caaggugggagugggag

SEQ ID NO: 2319 - RNA, 17 nt, Hepatitis B Virus
gugggagugggagcauu

SEQ ID NO: 2320 - RNA, 17 nt, Hepatitis B Virus
ugggagugggagcauuc

SEQ ID NO: 2321 - RNA, 17 nt, Hepatitis B Virus
gggagugggagcauucg

SEQ ID NO: 2322 - RNA, 17 nt, Hepatitis B Virus
gagcauucgggccaggg

SEQ ID NO: 2323 - RNA, 17 nt, Hepatitis B Virus
agcauucgggccagggu

SEQ ID NO: 2324 - RNA, 17 nt, Hepatitis B Virus
ucgggccaggguucacc

SEQ ID NO: 2325 - RNA, 17 nt, Hepatitis B Virus
cgggccaggguucaccc

SEQ ID NO: 2326 - RNA, 17 nt, Hepatitis B Virus
cuccccaugggggacug

SEQ ID NO: 2327 - RNA, 17 nt, Hepatitis B Virus
uccccaugggggacugu

SEQ ID NO: 2328 - RNA, 17 nt, Hepatitis B Virus
ccccaugggggacuguu

SEQ ID NO: 2329 - RNA, 17 nt, Hepatitis B Virus
cccaugggggacuguug

SEQ ID NO: 2330 - RNA, 17 nt, Hepatitis B Virus
ccaugggggacuguugg

SEQ ID NO: 2331 - RNA, 17 nt, Hepatitis B Virus
ggacuguugggguggag

SEQ ID NO: 2332 - RNA, 17 nt, Hepatitis B Virus
gacuguugggguggagc

SEQ ID NO: 2333 - RNA, 17 nt, Hepatitis B Virus
acuguugggguggagcc

SEQ ID NO: 2334 - RNA, 17 nt, Hepatitis B Virus
guugggguggagcccuc

SEQ ID NO: 2335 - RNA, 17 nt, Hepatitis B Virus
uugggguggagcccuca

SEQ ID NO: 2336 - RNA, 17 nt, Hepatitis B Virus
cacgcucagggccuacu

SEQ ID NO: 2337 - RNA, 17 nt, Hepatitis B Virus
acgcucagggccuacuc

SEQ ID NO: 2338 - RNA, 17 nt, Hepatitis B Virus
caccaaucggcagucag

SEQ ID NO: 2339 - RNA, 17 nt, Hepatitis B Virus
ggcagucaggaaggcag

SEQ ID NO: 2340 - RNA, 17 nt, Hepatitis B Virus
gcagucaggaaggcagc

SEQ ID NO: 2341 - RNA, 17 nt, Hepatitis B Virus
gucaggaaggcagccua

SEQ ID NO: 2342 - RNA, 17 nt, Hepatitis B Virus
accucuaagggacacuc

SEQ ID NO: 2343 - RNA, 17 nt, Hepatitis B Virus
ccucuaagggacacuca

SEQ ID NO: 2344 - RNA, 17 nt, Hepatitis B Virus
cucuaagggacacucau

SEQ ID NO: 2345 - RNA, 17 nt, Hepatitis B Virus
cauccucaggccaugca

SEQ ID NO: 2346 - RNA, 15 nt, Hepatitis B Virus
ccaaaauucgcaguc

SEQ ID NO: 2347 - RNA, 15 nt, Hepatitis B Virus
cccaaaucuccaguc

SEQ ID NO: 2348 - RNA, 15 nt, Hepatitis B Virus
cuccagucacucacc

SEQ ID NO: 2349 - RNA, 15 nt, Hepatitis B Virus
ucuuccucugcaucc

SEQ ID NO: 2350 - RNA, 15 nt, Hepatitis B Virus
ucuauguuucccuca

SEQ ID NO: 2351 - RNA, 15 nt, Hepatitis B Virus
uuugugucuccucug

SEQ ID NO: 2352 - RNA, 15 nt, Hepatitis B Virus
ccucucuuuacgcgg

SEQ ID NO: 2353 - RNA, 15 nt, Hepatitis B Virus
aggagguuagguuaa

SEQ ID NO: 2354 - RNA, 15 nt, Hepatitis B Virus
auguccuacuguuca

SEQ ID NO: 2355 - RNA, 15 nt, Hepatitis B Virus
uucuucuacgguacc

SEQ ID NO: 2356 - RNA, 15 nt, Hepatitis B Virus
cuccaccacuuucca

SEQ ID NO: 2357 - RNA, 15 nt, Hepatitis B Virus
uccagucacucacca

SEQ ID NO: 2358 - RNA, 15 nt, Hepatitis B Virus
gugucuccucugccg

SEQ ID NO: 2359 - RNA, 15 nt, Hepatitis B Virus
gaccaccaaaugccc

SEQ ID NO: 2360 - RNA, 16 nt, Hepatitis B Virus
ucaccaaccuguuguc

SEQ ID NO: 2361 - RNA, 16 nt, Hepatitis B Virus
ccaaccuguuguccuc

SEQ ID NO: 2362 - RNA, 16 nt, Hepatitis B Virus
uccgccuauuguaccg

SEQ ID NO: 2363 - RNA, 13 nt, Hepatitis B Virus
aauccucacaaua

SEQ ID NO: 2364 - RNA, 13 nt, Hepatitis B Virus
gagucuagacucg

SEQ ID NO: 2365 - RNA, 13 nt, Hepatitis B Virus
uggacuucucuca

SEQ ID NO: 2366 - RNA, 13 nt, Hepatitis B Virus
aauuuucuagggg

SEQ ID NO: 2367 - RNA, 13 nt, Hepatitis B Virus
caaaauucgcagu

SEQ ID NO: 2368 - RNA, 13 nt, Hepatitis B Virus
ggcguuuuaucau

SEQ ID NO: 2369 - RNA, 13 nt, Hepatitis B Virus
uaucaucuuccuc

SEQ ID NO: 2370 - RNA, 13 nt, Hepatitis B Virus
uguauucccaucc

SEQ ID NO: 2371 - RNA, 13 nt, Hepatitis B Virus
uuuguucaguggu

SEQ ID NO: 2372 - RNA, 13 nt, Hepatitis B Virus
ucucuuuacgcgg

SEQ ID NO: 2373 - RNA, 13 nt, Hepatitis B Virus
ucaccucugcacg

SEQ ID NO: 2374 - RNA, 13 nt, Hepatitis B Virus
gcacgucgcaugg

SEQ ID NO: 2375 - RNA, 13 nt, Hepatitis B Virus
ucaccucugccua

SEQ ID NO: 2376 - RNA, 13 nt, Hepatitis B Virus
agaacucccucgc

SEQ ID NO: 2377 - RNA, 13 nt, Hepatitis B Virus
gaagaucucaauc

SEQ ID NO: 2378 - RNA, 13 nt, Hepatitis B Virus
uauucuugggaac

SEQ ID NO: 2379 - RNA, 13 nt, Hepatitis B Virus
ugccucaucuucu

SEQ ID NO: 2380 - RNA, 13 nt, Hepatitis B Virus
uggcucaguuuac

SEQ ID NO: 2381 - RNA, 13 nt, Hepatitis B Virus
guuuacuagugcc

SEQ ID NO: 2382 - RNA, 13 nt, Hepatitis B Virus
uuuaccccguugc

SEQ ID NO: 2383 - RNA, 13 nt, Hepatitis B Virus
gcaacccccacug

SEQ ID NO: 2384 - RNA, 13 nt, Hepatitis B Virus
caacccccacugg

SEQ ID NO: 2385 - RNA, 13 nt, Hepatitis B Virus
cggcgcugaaucc

SEQ ID NO: 2386 - RNA, 13 nt, Hepatitis B Virus
gaaucccgcggac

SEQ ID NO: 2387 - RNA, 13 nt, Hepatitis B Virus
cgcaccucucuuu

SEQ ID NO: 2388 - RNA, 13 nt, Hepatitis B Virus
caccucugcacgu

SEQ ID NO: 2389 - RNA, 13 nt, Hepatitis B Virus
ccgaccuugaggc

SEQ ID NO: 2390 - RNA, 13 nt, Hepatitis B Virus
ggaggcuguaggc

SEQ ID NO: 2391 - RNA, 13 nt, Hepatitis B Virus
uuuuucaccucug

SEQ ID NO: 2392 - RNA, 13 nt, Hepatitis B Virus
gccuccaagcugu

SEQ ID NO: 2393 - RNA, 13 nt, Hepatitis B Virus
ccaagcugugccu

SEQ ID NO: 2394 - RNA, 15 nt, Hepatitis B Virus
uuuuucuuguugaca

SEQ ID NO: 2395 - RNA, 15 nt, Hepatitis B Virus
cuagacucguggugg

SEQ ID NO: 2396 - RNA, 15 nt, Hepatitis B Virus
guggacuucucucaa

SEQ ID NO: 2397 - RNA, 15 nt, Hepatitis B Virus
uggacuucucucaau

SEQ ID NO: 2398 - RNA, 15 nt, Hepatitis B Virus
gacuucucucaauuu

SEQ ID NO: 2399 - RNA, 15 nt, Hepatitis B Virus
cuucucucaauuuuc

SEQ ID NO: 2400 - RNA, 15 nt, Hepatitis B Virus
ucucaauuuucuagg

SEQ ID NO: 2401 - RNA, 15 nt, Hepatitis B Virus
cucaauuuucuaggg

SEQ ID NO: 2402 - RNA, 15 nt, Hepatitis B Virus
ucaauuuucuagggg

SEQ ID NO: 2403 - RNA, 15 nt, Hepatitis B Virus
caaaauucgcagucc

SEQ ID NO: 2404 - RNA, 15 nt, Hepatitis B Virus
gaugugucugcggcg

SEQ ID NO: 2405 - RNA, 15 nt, Hepatitis B Virus
gcggcguuuuaucau

SEQ ID NO: 2406 - RNA, 15 nt, Hepatitis B Virus
uuaucaucuuccucu

SEQ ID NO: 2407 - RNA, 15 nt, Hepatitis B Virus
ugcugcuaugccuca

SEQ ID NO: 2408 - RNA, 15 nt, Hepatitis B Virus
uaugccucaucuucu

SEQ ID NO: 2409 - RNA, 15 nt, Hepatitis B Virus
gcucaguuuacuagu

SEQ ID NO: 2410 - RNA, 15 nt, Hepatitis B Virus
cucaguuuacuagug

SEQ ID NO: 2411 - RNA, 15 nt, Hepatitis B Virus
ucaguuuacuagugc

SEQ ID NO: 2412 - RNA, 15 nt, Hepatitis B Virus
guuuacuagugccau

SEQ ID NO: 2413 - RNA, 15 nt, Hepatitis B Virus
gugccauuuguucag

SEQ ID NO: 2414 - RNA, 15 nt, Hepatitis B Virus
ugccauuuguucagu

SEQ ID NO: 2415 - RNA, 15 nt, Hepatitis B Virus
cgcaccucucuuuac

SEQ ID NO: 2416 - RNA, 15 nt, Hepatitis B Virus
caccucucuuuacgc

SEQ ID NO: 2417 - RNA, 15 nt, Hepatitis B Virus
aggcuguaggcauaa

SEQ ID NO: 2418 - RNA, 15 nt, Hepatitis B Virus
uaggcauaaauuggu

SEQ ID NO: 2419 - RNA, 15 nt, Hepatitis B Virus
caagccuccaagcug

SEQ ID NO: 2420 - RNA, 15 nt, Hepatitis B Virus
ugugccuuggguggc

SEQ ID NO: 2421 - RNA, 15 nt, Hepatitis B Virus
aagaacucccucgcc

SEQ ID NO: 2422 - RNA, 15 nt, Hepatitis B Virus
accauauucuuggga

SEQ ID NO: 2423 - RNA, 15 nt, Hepatitis B Virus
ccauauucuugggaa

SEQ ID NO: 2424 - RNA, 15 nt, Hepatitis B Virus
auauucuugggaaca

SEQ ID NO: 2425 - RNA, 15 nt, Hepatitis B Virus
ucuagacucguggug

SEQ ID NO: 2426 - RNA, 15 nt, Hepatitis B Virus
gguggacuucucuca

SEQ ID NO: 2427 - RNA, 15 nt, Hepatitis B Virus
ggacuucucucaauu

SEQ ID NO: 2428 - RNA, 15 nt, Hepatitis B Virus
acuucucucaauuuu

SEQ ID NO: 2429 - RNA, 15 nt, Hepatitis B Virus
uucucucaauuuucu

SEQ ID NO: 2430 - RNA, 15 nt, Hepatitis B Virus
augugucugcggcgu

SEQ ID NO: 2431 - RNA, 15 nt, Hepatitis B Virus
auccugcugcuaugc

SEQ ID NO: 2432 - RNA, 15 nt, Hepatitis B Virus
cugcugcuaugccuc

SEQ ID NO: 2433 - RNA, 15 nt, Hepatitis B Virus
gcuaugccucaucuu

SEQ ID NO: 2434 - RNA, 15 nt, Hepatitis B Virus
cuaugccucaucuuc

SEQ ID NO: 2435 - RNA, 15 nt, Hepatitis B Virus
augccucaucuucuu

SEQ ID NO: 2436 - RNA, 15 nt, Hepatitis B Virus
uguauucccauccca

SEQ ID NO: 2437 - RNA, 15 nt, Hepatitis B Virus
guauucccaucccau

SEQ ID NO: 2438 - RNA, 15 nt, Hepatitis B Virus
guuucucuuggcuca

SEQ ID NO: 2439 - RNA, 15 nt, Hepatitis B Virus
cuagugccauuuguu

SEQ ID NO: 2440 - RNA, 15 nt, Hepatitis B Virus
uagugccauuuguuc

SEQ ID NO: 2441 - RNA, 15 nt, Hepatitis B Virus
gcuuucccccacugu

SEQ ID NO: 2442 - RNA, 15 nt, Hepatitis B Virus
ccuuuaccccguugc

SEQ ID NO: 2443 - RNA, 15 nt, Hepatitis B Virus
gcaccucucuuuacg

SEQ ID NO: 2444 - RNA, 15 nt, Hepatitis B Virus
accucucuuuacgcg

SEQ ID NO: 2445 - RNA, 15 nt, Hepatitis B Virus
uguaggcauaaauug

SEQ ID NO: 2446 - RNA, 15 nt, Hepatitis B Virus
uuuucaccucugccu

SEQ ID NO: 2447 - RNA, 15 nt, Hepatitis B Virus
uuucaccucugccua

SEQ ID NO: 2448 - RNA, 15 nt, Hepatitis B Virus
uucaagccuccaagc

SEQ ID NO: 2449 - RNA, 15 nt, Hepatitis B Virus
ucaagccuccaagcu

SEQ ID NO: 2450 - RNA, 15 nt, Hepatitis B Virus
aagccuccaagcugu

SEQ ID NO: 2451 - RNA, 15 nt, Hepatitis B Virus
agccuccaagcugug

SEQ ID NO: 2452 - RNA, 15 nt, Hepatitis B Virus
uccaagcugugccuu

SEQ ID NO: 2453 - RNA, 15 nt, Hepatitis B Virus
gaagaacucccucgc

SEQ ID NO: 2454 - RNA, 15 nt, Hepatitis B Virus
agaacucccucgccu

SEQ ID NO: 2455 - RNA, 15 nt, Hepatitis B Virus
gaacucccucgccuc

SEQ ID NO: 2456 - RNA, 15 nt, Hepatitis B Virus
gcgucgcagaagauc

SEQ ID NO: 2457 - RNA, 15 nt, Hepatitis B Virus
cauauucuugggaac

SEQ ID NO: 2458 - RNA, 16 nt, Hepatitis B Virus
gccaaaauucgcaguc

SEQ ID NO: 2459 - RNA, 16 nt, Hepatitis B Virus
aucgcuggaugugucu

SEQ ID NO: 2460 - RNA, 16 nt, Hepatitis B Virus
uugcccguuuguccuc

SEQ ID NO: 2461 - RNA, 16 nt, Hepatitis B Virus
agugccauuuguucag

SEQ ID NO: 2462 - RNA, 16 nt, Hepatitis B Virus
cuccucugccgaucca

SEQ ID NO: 2463 - RNA, 16 nt, Hepatitis B Virus
cuucaccucugcacgu

SEQ ID NO: 2464 - RNA, 16 nt, Hepatitis B Virus
ccuccaagcugugccu

SEQ ID NO: 2465 - RNA, 16 nt, Hepatitis B Virus
uccaagcugugccuug

SEQ ID NO: 2466 - RNA, 16 nt, Hepatitis B Virus
gaacucccucgccucg

SEQ ID NO: 2467 - RNA, 15 nt, Hepatitis B Virus
gcuggaugugucugc

SEQ ID NO: 2468 - RNA, 15 nt, Hepatitis B Virus
cugcggcguuuuauc

SEQ ID NO: 2469 - RNA, 15 nt, Hepatitis B Virus
uccugcugcuaugcc

SEQ ID NO: 2470 - RNA, 15 nt, Hepatitis B Virus
uaugggagugggccu

SEQ ID NO: 2471 - RNA, 15 nt, Hepatitis B Virus
ucguagggcuuuccc

SEQ ID NO: 2472 - RNA, 15 nt, Hepatitis B Virus
cuccucugccgaucc

SEQ ID NO: 2473 - RNA, 15 nt, Hepatitis B Virus
caccucugccuaauc

SEQ ID NO: 2474 - RNA, 15 nt, Hepatitis B Virus
cucccucgccucgca

SEQ ID NO: 2475 - RNA, 15 nt, Hepatitis B Virus
gaccccugcucgugu

SEQ ID NO: 2476 - RNA, 15 nt, Hepatitis B Virus
ugcucguguuacagg

SEQ ID NO: 2477 - RNA, 15 nt, Hepatitis B Virus
aaaauucgcaguccc

SEQ ID NO: 2478 - RNA, 13 nt, Hepatitis B Virus
ggaugugucugcg

SEQ ID NO: 2479 - RNA, 15 nt, Hepatitis B Virus
uggaugugucugcgg

SEQ ID NO: 2480 - RNA, 13 nt, Hepatitis B Virus
gugucugcggcgu

SEQ ID NO: 2481 - RNA, 15 nt, Hepatitis B Virus
gucugcggcguuuua

SEQ ID NO: 2482 - RNA, 13 nt, Hepatitis B Virus
ugcggcguuuuau

SEQ ID NO: 2483 - RNA, 13 nt, Hepatitis B Virus
ugcuaugccucau

SEQ ID NO: 2484 - RNA, 15 nt, Hepatitis B Virus
cugcuaugccucauc

SEQ ID NO: 2485 - RNA, 15 nt, Hepatitis B Virus
guauguugcccguuu

SEQ ID NO: 2486 - RNA, 15 nt, Hepatitis B Virus
cccguuuguccucua

SEQ ID NO: 2487 - RNA, 13 nt, Hepatitis B Virus
augggagugggcc

SEQ ID NO: 2488 - RNA, 15 nt, Hepatitis B Virus
gccauuuguucagug

SEQ ID NO: 2489 - RNA, 15 nt, Hepatitis B Virus
uuguucagugguucg

SEQ ID NO: 2490 - RNA, 13 nt, Hepatitis B Virus
uccucugccgauc

SEQ ID NO: 2491 - RNA, 15 nt, Hepatitis B Virus
cccgucggcgcugaa

SEQ ID NO: 2492 - RNA, 13 nt, Hepatitis B Virus
cacggggcgcacc

SEQ ID NO: 2493 - RNA, 15 nt, Hepatitis B Virus
ccacggggcgcaccu

SEQ ID NO: 2494 - RNA, 15 nt, Hepatitis B Virus
cccgucugugccuuc

SEQ ID NO: 2495 - RNA, 15 nt, Hepatitis B Virus
cgucugugccuucuc

SEQ ID NO: 2496 - RNA, 15 nt, Hepatitis B Virus
gcacuucgcuucacc

SEQ ID NO: 2497 - RNA, 13 nt, Hepatitis B Virus
accucugccuaau

SEQ ID NO: 2498 - RNA, 15 nt, Hepatitis B Virus
accaaaugccccuau

SEQ ID NO: 2499 - RNA, 15 nt, Hepatitis B Virus
ccgcgucgcagaaga

SEQ ID NO: 2500 - RNA, 15 nt, Hepatitis B Virus
ccugcugguggcucc

SEQ ID NO: 2501 - RNA, 13 nt, Hepatitis B Virus
accccugcucgug

SEQ ID NO: 2502 - RNA, 13 nt, Hepatitis B Virus
gcucguguuacag

SEQ ID NO: 2503 - RNA, 15 nt, Hepatitis B Virus
uagacucguggugga

SEQ ID NO: 2504 - RNA, 15 nt, Hepatitis B Virus
acucgugguggacuu

SEQ ID NO: 2505 - RNA, 13 nt, Hepatitis B Virus
aaauucgcagucc

SEQ ID NO: 2506 - RNA, 13 nt, Hepatitis B Virus
cuggaugugucug

SEQ ID NO: 2507 - RNA, 15 nt, Hepatitis B Virus
ugugucugcggcguu

SEQ ID NO: 2508 - RNA, 13 nt, Hepatitis B Virus
ucugcggcguuuu

SEQ ID NO: 2509 - RNA, 13 nt, Hepatitis B Virus
cauccugcugcua

SEQ ID NO: 2510 - RNA, 13 nt, Hepatitis B Virus
ccugcugcuaugc

SEQ ID NO: 2511 - RNA, 13 nt, Hepatitis B Virus
uauguugcccguu

SEQ ID NO: 2512 - RNA, 13 nt, Hepatitis B Virus
ccguuuguccucu

SEQ ID NO: 2513 - RNA, 13 nt, Hepatitis B Virus
ggcucaguuuacu

SEQ ID NO: 2514 - RNA, 15 nt, Hepatitis B Virus
uggcucaguuuacua

SEQ ID NO: 2515 - RNA, 13 nt, Hepatitis B Virus
uuacuagugccau

SEQ ID NO: 2516 - RNA, 15 nt, Hepatitis B Virus
uuuacuagugccauu

SEQ ID NO: 2517 - RNA, 15 nt, Hepatitis B Virus
uacuagugccauuug

SEQ ID NO: 2518 - RNA, 13 nt, Hepatitis B Virus
uguucagugguuc

SEQ ID NO: 2519 - RNA, 13 nt, Hepatitis B Virus
ucagugguucgua

SEQ ID NO: 2520 - RNA, 15 nt, Hepatitis B Virus
uucagugguucguag

SEQ ID NO: 2521 - RNA, 13 nt, Hepatitis B Virus
cguagggcuuucc

SEQ ID NO: 2522 - RNA, 13 nt, Hepatitis B Virus
uugugggucuuuu

SEQ ID NO: 2523 - RNA, 13 nt, Hepatitis B Virus
uuucucgccaacu

SEQ ID NO: 2524 - RNA, 15 nt, Hepatitis B Virus
cuuucucgccaacuu

SEQ ID NO: 2525 - RNA, 15 nt, Hepatitis B Virus
gccaaguguuugcug

SEQ ID NO: 2526 - RNA, 13 nt, Hepatitis B Virus
ccgucggcgcuga

SEQ ID NO: 2527 - RNA, 13 nt, Hepatitis B Virus
gucggcgcugaau

SEQ ID NO: 2528 - RNA, 15 nt, Hepatitis B Virus
cgucggcgcugaauc

SEQ ID NO: 2529 - RNA, 13 nt, Hepatitis B Virus
cuccccgucugug

SEQ ID NO: 2530 - RNA, 13 nt, Hepatitis B Virus
ccgucugugccuu

SEQ ID NO: 2531 - RNA, 13 nt, Hepatitis B Virus
gucugugccuucu

SEQ ID NO: 2532 - RNA, 13 nt, Hepatitis B Virus
ccgugugcacuuc

SEQ ID NO: 2533 - RNA, 13 nt, Hepatitis B Virus
cacuucgcuucac

SEQ ID NO: 2534 - RNA, 13 nt, Hepatitis B Virus
accaccgugaacg

SEQ ID NO: 2535 - RNA, 15 nt, Hepatitis B Virus
uguucaagccuccaa

SEQ ID NO: 2536 - RNA, 15 nt, Hepatitis B Virus
ccaagcugugccuug

SEQ ID NO: 2537 - RNA, 13 nt, Hepatitis B Virus
agcugugccuugg

SEQ ID NO: 2538 - RNA, 15 nt, Hepatitis B Virus
aagcugugccuuggg

SEQ ID NO: 2539 - RNA, 13 nt, Hepatitis B Virus
ccaaaugccccua

SEQ ID NO: 2540 - RNA, 13 nt, Hepatitis B Virus
acuguuguuagac

SEQ ID NO: 2541 - RNA, 13 nt, Hepatitis B Virus
aggcagguccccu

SEQ ID NO: 2542 - RNA, 15 nt, Hepatitis B Virus
gaggcagguccccua

SEQ ID NO: 2543 - RNA, 13 nt, Hepatitis B Virus
ucccucgccucgc

SEQ ID NO: 2544 - RNA, 13 nt, Hepatitis B Virus
cgccucgcagacg

SEQ ID NO: 2545 - RNA, 13 nt, Hepatitis B Virus
cgccgcgucgcag

SEQ ID NO: 2546 - RNA, 13 nt, Hepatitis B Virus
cgcgucgcagaag

SEQ ID NO: 2547 - RNA, 13 nt, Hepatitis B Virus
cauaaggugggaa

SEQ ID NO: 2548 - RNA, 15 nt, Hepatitis B Virus
uaucgcuggaugugu

SEQ ID NO: 2549 - RNA, 15 nt, Hepatitis B Virus
aucgcuggauguguc

SEQ ID NO: 2550 - RNA, 15 nt, Hepatitis B Virus
ugggagugggccuca

SEQ ID NO: 2551 - RNA, 13 nt, Hepatitis B Virus
gggagugggccuc

SEQ ID NO: 2552 - RNA, 15 nt, Hepatitis B Virus
guucagugguucgua

SEQ ID NO: 2553 - RNA, 15 nt, Hepatitis B Virus
uucguagggcuuucc

SEQ ID NO: 2554 - RNA, 13 nt, Hepatitis B Virus
ccacggggcgcac

SEQ ID NO: 2555 - RNA, 13 nt, Hepatitis B Virus
caccgugaacgcc

SEQ ID NO: 2556 - RNA, 13 nt, Hepatitis B Virus
cacucaggcaagc

SEQ ID NO: 2557 - RNA, 15 nt, Hepatitis B Virus
ccuagaagaagaacu

SEQ ID NO: 2558 - RNA, 15 nt, Hepatitis B Virus
auaaggugggaaacu

SEQ ID NO: 2559 - RNA, 13 nt, Hepatitis B Virus
gcugguggcucca

SEQ ID NO: 2560 - RNA, 15 nt, Hepatitis B Virus
gacucgugguggacu

SEQ ID NO: 2561 - RNA, 15 nt, Hepatitis B Virus
ucgugguggacuucu

SEQ ID NO: 2562 - RNA, 13 nt, Hepatitis B Virus
aucgcuggaugug

SEQ ID NO: 2563 - RNA, 13 nt, Hepatitis B Virus
ucgcuggaugugu

SEQ ID NO: 2564 - RNA, 15 nt, Hepatitis B Virus
gggagugggccucag

SEQ ID NO: 2565 - RNA, 15 nt, Hepatitis B Virus
guucguagggcuuuc

SEQ ID NO: 2566 - RNA, 13 nt, Hepatitis B Virus
ucguagggcuuuc

SEQ ID NO: 2567 - RNA, 15 nt, Hepatitis B Virus
uauggaugauguggu

SEQ ID NO: 2568 - RNA, 13 nt, Hepatitis B Virus
cuagaagaagaac

SEQ ID NO: 2569 - RNA, 13 nt, Hepatitis B Virus
gaagaagaacucc

SEQ ID NO: 2570 - RNA, 15 nt, Hepatitis B Virus
cgucgcagaagaucu

SEQ ID NO: 2571 - RNA, 13 nt, Hepatitis B Virus
gcagaagaucuca

SEQ ID NO: 2572 - RNA, 15 nt, Hepatitis B Virus
cgcagaagaucucaa

SEQ ID NO: 2573 - RNA, 13 nt, Hepatitis B Virus
uaaggugggaaac

SEQ ID NO: 2574 - RNA, 15 nt, Hepatitis B Virus
uaaggugggaaacuu

SEQ ID NO: 2575 - RNA, 13 nt, Hepatitis B Virus
aaggugggaaacu

SEQ ID NO: 2576 - RNA, 15 nt, Hepatitis B Virus
ugcacgucgcaugga

SEQ ID NO: 2577 - RNA, 13 nt, Hepatitis B Virus
gugccuugggugg

SEQ ID NO: 2578 - RNA, 13 nt, Hepatitis B virus
uucucucaauuuu

SEQ ID NO: 2579 - RNA, 15 nt, Hepatitis B virus
accuguuguccucca

SEQ ID NO: 2580 - RNA, 15 nt, Hepatitis B virus
ccuuugugucuccuc

SEQ ID NO: 2581 - RNA, 15 nt, Hepatitis B virus
uguucauguccuacu

SEQ ID NO: 2582 - RNA, 15 nt, Hepatitis B virus
gccuucugacuucuu

SEQ ID NO: 2583 - RNA, 15 nt, Hepatitis B virus
uccuccugccuccac

SEQ ID NO: 2584 - RNA, 15 nt, Hepatitis B virus
aucuccagucacuca

SEQ ID NO: 2585 - RNA, 15 nt, Hepatitis B virus
uuccucugcauccug

SEQ ID NO: 2586 - RNA, 15 nt, Hepatitis B virus
ggaggagguuagguu

SEQ ID NO: 2587 - RNA, 15 nt, Hepatitis B virus
aucuuccucugcauc

SEQ ID NO: 2588 - RNA, 15 nt, Hepatitis B virus
ucaucucauguucau

SEQ ID NO: 2589 - RNA, 15 nt, Hepatitis B virus
gcagcuccuccuccu

SEQ ID NO: 2590 - RNA, 15 nt, Hepatitis B virus
gucagcuaugucaac

SEQ ID NO: 2591 - RNA, 15 nt, Hepatitis B virus
ccguauuauccagag

SEQ ID NO: 2592 - RNA, 15 nt, Hepatitis B virus
cugccuaaucaucuc

SEQ ID NO: 2593 - RNA, 15 nt, Hepatitis B virus
uccuccaauuugucc

SEQ ID NO: 2594 - RNA, 17 nt, Artificial Sequence
  Description of Artificial Sequence:  Nucleic Acid
  misc_feature: oligonucleotide substrate
ugggggcgacacuccac

SEQ ID NO: 2595 - RNA, 17 nt, Artificial Sequence
  Description of Artificial Sequence:  Nucleic Acid
  misc_feature: oligonucleotide substrate
ggggcgacacuccacca

SEQ ID NO: 2596 - RNA, 17 nt, Artificial Sequence
  Description of Artificial Sequence:  Nucleic Acid
  misc_feature: oligonucleotide substrate
gacacuccaccauagau

SEQ ID NO: 2597 - RNA, 17 nt, Artificial Sequence
  Description of Artificial Sequence:  Nucleic Acid
  misc_feature: oligonucleotide substrate
acuccaccauagaucac

SEQ ID NO: 2598 - RNA, 17 nt, Artificial Sequence
  Description of Artificial Sequence:  Nucleic Acid
  misc_feature: oligonucleotide substrate
caccauagaucacuccc

SEQ ID NO: 2599 - RNA, 17 nt, Artificial Sequence
  Description of Artificial Sequence:  Nucleic Acid
  misc_feature: oligonucleotide substrate
cauagaucacuccccug

SEQ ID NO: 2600 - RNA, 17 nt, Artificial Sequence
  Description of Artificial Sequence:  Nucleic Acid
  misc_feature: oligonucleotide substrate
acuccccugugaggaac

SEQ ID NO: 2601 - RNA, 17 nt, Artificial Sequence
  Description of Artificial Sequence:  Nucleic Acid
  misc_feature: oligonucleotide substrate
ugugaggaacuacuguc

SEQ ID NO: 2602 - RNA, 17 nt, Artificial Sequence
  Description of Artificial Sequence:  Nucleic Acid
  misc_feature: oligonucleotide substrate
gaggaacuacugucuuc

SEQ ID NO: 2603 - RNA, 17 nt, Artificial Sequence
  Description of Artificial Sequence:  Nucleic Acid
  misc_feature: oligonucleotide substrate
gaacuacugucuucacg

SEQ ID NO: 2604 - RNA, 17 nt, Artificial Sequence
  Description of Artificial Sequence:  Nucleic Acid
  misc_feature: oligonucleotide substrate
cugucuucacgcagaaa

SEQ ID NO: 2605 - RNA, 17 nt, Artificial Sequence
  Description of Artificial Sequence:  Nucleic Acid
  misc_feature: oligonucleotide substrate
gucuucacgcagaaagc

SEQ ID NO: 2606 - RNA, 17 nt, Artificial Sequence
  Description of Artificial Sequence:  Nucleic Acid
  misc_feature: oligonucleotide substrate
cgcagaaagcgucuagc

SEQ ID NO: 2607 - RNA, 17 nt, Artificial Sequence
  Description of Artificial Sequence:  Nucleic Acid
  misc_feature: oligonucleotide substrate
cagaaagcgucuagcca

SEQ ID NO: 2608 - RNA, 17 nt, Artificial Sequence
  Description of Artificial Sequence:  Nucleic Acid
  misc_feature: oligonucleotide substrate
agcgucuagccauggcg

SEQ ID NO: 2609 - RNA, 17 nt, Artificial Sequence
  Description of Artificial Sequence:  Nucleic Acid
  misc_feature: oligonucleotide substrate
gucuagccauggcguua

SEQ ID NO: 2610 - RNA, 17 nt, Artificial Sequence
  Description of Artificial Sequence:  Nucleic Acid
  misc_feature: oligonucleotide substrate
uagccauggcguuagua

SEQ ID NO: 2611 - RNA, 17 nt, Artificial Sequence
  Description of Artificial Sequence:  Nucleic Acid
  misc_feature: oligonucleotide substrate
gccauggcguuaguaug

SEQ ID NO: 2612 - RNA, 17 nt, Artificial Sequence
  Description of Artificial Sequence:  Nucleic Acid
  misc_feature: oligonucleotide substrate
uggcguuaguaugagug

SEQ ID NO: 2613 - RNA, 17 nt, Artificial Sequence
  Description of Artificial Sequence:  Nucleic Acid
  misc_feature: oligonucleotide substrate
gcguuaguaugaguguc

SEQ ID NO: 2614 - RNA, 17 nt, Artificial Sequence
  Description of Artificial Sequence:  Nucleic Acid
  misc_feature: oligonucleotide substrate
uaguaugagugucgugc

SEQ ID NO: 2615 - RNA, 17 nt, Artificial Sequence
  Description of Artificial Sequence:  Nucleic Acid
  misc_feature: oligonucleotide substrate
guaugagugucgugcag

SEQ ID NO: 2616 - RNA, 17 nt, Artificial Sequence
  Description of Artificial Sequence:  Nucleic Acid
  misc_feature: oligonucleotide substrate
ugagugucgugcagccu

SEQ ID NO: 2617 - RNA, 17 nt, Artificial Sequence
  Description of Artificial Sequence:  Nucleic Acid
  misc_feature: oligonucleotide substrate
agugucgugcagccucc

SEQ ID NO: 2618 - RNA, 17 nt, Artificial Sequence
  Description of Artificial Sequence:  Nucleic Acid
  misc_feature: oligonucleotide substrate
gucgugcagccuccagg

SEQ ID NO: 2619 - RNA, 17 nt, Artificial Sequence
  Description of Artificial Sequence:  Nucleic Acid
  misc_feature: oligonucleotide substrate
ccuccaggacccccccu

SEQ ID NO: 2620 - RNA, 17 nt, Artificial Sequence
  Description of Artificial Sequence:  Nucleic Acid
  misc_feature: oligonucleotide substrate
ccgggagagccauagug

SEQ ID NO: 2621 - RNA, 17 nt, Artificial Sequence
  Description of Artificial Sequence:  Nucleic Acid
  misc_feature: oligonucleotide substrate
ggagagccauagugguc

SEQ ID NO: 2622 - RNA, 17 nt, Artificial Sequence
  Description of Artificial Sequence:  Nucleic Acid
  misc_feature: oligonucleotide substrate
gagccauaguggucugc

SEQ ID NO: 2623 - RNA, 17 nt, Artificial Sequence
  Description of Artificial Sequence:  Nucleic Acid
  misc_feature: oligonucleotide substrate
ccauaguggucugcgga

SEQ ID NO: 2624 - RNA, 17 nt, Artificial Sequence
  Description of Artificial Sequence:  Nucleic Acid
  misc_feature: oligonucleotide substrate
aguggucugcggaaccg

SEQ ID NO: 2625 - RNA, 17 nt, Artificial Sequence
  Description of Artificial Sequence:  Nucleic Acid
  misc_feature: oligonucleotide substrate
ucugcggaaccggugag

SEQ ID NO: 2626 - RNA, 17 nt, Artificial Sequence
  Description of Artificial Sequence:  Nucleic Acid
  misc_feature: oligonucleotide substrate
cggaaccggugaguaca

SEQ ID NO: 2627 - RNA, 17 nt, Artificial Sequence
  Description of Artificial Sequence:  Nucleic Acid
  misc_feature: oligonucleotide substrate
accggugaguacaccgg

SEQ ID NO: 2628 - RNA, 17 nt, Artificial Sequence
  Description of Artificial Sequence:  Nucleic Acid
  misc_feature: oligonucleotide substrate
cggugaguacaccggaa

SEQ ID NO: 2629 - RNA, 17 nt, Artificial Sequence
  Description of Artificial Sequence:  Nucleic Acid
  misc_feature: oligonucleotide substrate
gugaguacaccggaauu

SEQ ID NO: 2630 - RNA, 17 nt, Artificial Sequence
  Description of Artificial Sequence:  Nucleic Acid
  misc_feature: oligonucleotide substrate
acaccggaauugccagg

SEQ ID NO: 2631 - RNA, 17 nt, Artificial Sequence
  Description of Artificial Sequence:  Nucleic Acid
  misc_feature: oligonucleotide substrate
ccggaauugccaggacg

SEQ ID NO: 2632 - RNA, 17 nt, Artificial Sequence
  Description of Artificial Sequence:  Nucleic Acid
  misc_feature: oligonucleotide substrate
uugccaggacgaccggg

SEQ ID NO: 2633 - RNA, 17 nt, Artificial Sequence
  Description of Artificial Sequence:  Nucleic Acid
  misc_feature: oligonucleotide substrate
ccaggacgaccgggucc

SEQ ID NO: 2634 - RNA, 17 nt, Artificial Sequence
  Description of Artificial Sequence:  Nucleic Acid
  misc_feature: oligonucleotide substrate
acgaccggguccuuucu

SEQ ID NO: 2635 - RNA, 17 nt, Artificial Sequence
  Description of Artificial Sequence:  Nucleic Acid
  misc_feature: oligonucleotide substrate
uuucuuggaucaacccg

SEQ ID NO: 2636 - RNA, 17 nt, Artificial Sequence
  Description of Artificial Sequence:  Nucleic Acid
  misc_feature: oligonucleotide substrate
uuggaucaacccgcuca

SEQ ID NO: 2637 - RNA, 17 nt, Artificial Sequence
  Description of Artificial Sequence:  Nucleic Acid
  misc_feature: oligonucleotide substrate
aucaacccgcucaaugc

SEQ ID NO: 2638 - RNA, 17 nt, Artificial Sequence
  Description of Artificial Sequence:  Nucleic Acid
  misc_feature: oligonucleotide substrate
cccgcucaaugccugga

SEQ ID NO: 2639 - RNA, 17 nt, Artificial Sequence
  Description of Artificial Sequence:  Nucleic Acid
  misc_feature: oligonucleotide substrate
cgcucaaugccuggaga

SEQ ID NO: 2640 - RNA, 17 nt, Artificial Sequence
  Description of Artificial Sequence:  Nucleic Acid
  misc_feature: oligonucleotide substrate
gccuggagauuugggcg

SEQ ID NO: 2641 - RNA, 17 nt, Artificial Sequence
  Description of Artificial Sequence:  Nucleic Acid
  misc_feature: oligonucleotide substrate
agauuugggcgugcccc

SEQ ID NO: 2642 - RNA, 17 nt, Artificial Sequence
  Description of Artificial Sequence:  Nucleic Acid
  misc_feature: oligonucleotide substrate
auuugggcgugcccccg

SEQ ID NO: 2643 - RNA, 17 nt, Artificial Sequence
  Description of Artificial Sequence:  Nucleic Acid
  misc_feature: oligonucleotide substrate
uugggcgugcccccgcg

SEQ ID NO: 2644 - RNA, 17 nt, Artificial Sequence
  Description of Artificial Sequence:  Nucleic Acid
  misc_feature: oligonucleotide substrate
gugcccccgcgagacug

SEQ ID NO: 2645 - RNA, 17 nt, Artificial Sequence
  Description of Artificial Sequence:  Nucleic Acid
  misc_feature: oligonucleotide substrate
cccgcgagacugcuagc

SEQ ID NO: 2646 - RNA, 17 nt, Artificial Sequence
  Description of Artificial Sequence:  Nucleic Acid
  misc_feature: oligonucleotide substrate
gcgagacugcuagccga

SEQ ID NO: 2647 - RNA, 17 nt, Artificial Sequence
  Description of Artificial Sequence:  Nucleic Acid
  misc_feature: oligonucleotide substrate
gacugcuagccgaguag

SEQ ID NO: 2648 - RNA, 17 nt, Artificial Sequence
  Description of Artificial Sequence:  Nucleic Acid
  misc_feature: oligonucleotide substrate
cuagccgaguaguguug

SEQ ID NO: 2649 - RNA, 17 nt, Artificial Sequence
  Description of Artificial Sequence:  Nucleic Acid
  misc_feature: oligonucleotide substrate
gccgaguaguguugggu

SEQ ID NO: 2650 - RNA, 17 nt, Artificial Sequence
  Description of Artificial Sequence:  Nucleic Acid
  misc_feature: oligonucleotide substrate
cgaguaguguugggucg

SEQ ID NO: 2651 - RNA, 17 nt, Artificial Sequence
  Description of Artificial Sequence:  Nucleic Acid
  misc_feature: oligonucleotide substrate
aguguugggucgcgaaa

SEQ ID NO: 2652 - RNA, 17 nt, Artificial Sequence
  Description of Artificial Sequence:  Nucleic Acid
  misc_feature: oligonucleotide substrate
guugggucgcgaaaggc

SEQ ID NO: 2653 - RNA, 17 nt, Artificial Sequence
  Description of Artificial Sequence:  Nucleic Acid
  misc_feature: oligonucleotide substrate
cgcgaaaggccuugugg

SEQ ID NO: 2654 - RNA, 17 nt, Artificial Sequence
  Description of Artificial Sequence:  Nucleic Acid
  misc_feature: oligonucleotide substrate
aaggccuugugguacug

SEQ ID NO: 2655 - RNA, 17 nt, Artificial Sequence
  Description of Artificial Sequence:  Nucleic Acid
  misc_feature: oligonucleotide substrate
gccuugugguacugccu

SEQ ID NO: 2656 - RNA, 17 nt, Artificial Sequence
  Description of Artificial Sequence:  Nucleic Acid
  misc_feature: oligonucleotide substrate
cuugugguacugccuga

SEQ ID NO: 2657 - RNA, 17 nt, Artificial Sequence
  Description of Artificial Sequence:  Nucleic Acid
  misc_feature: oligonucleotide substrate
gugguacugccugauag

SEQ ID NO: 2658 - RNA, 17 nt, Artificial Sequence
  Description of Artificial Sequence:  Nucleic Acid
  misc_feature: oligonucleotide substrate
acugccugauagggugc

SEQ ID NO: 2659 - RNA, 17 nt, Artificial Sequence
  Description of Artificial Sequence:  Nucleic Acid
  misc_feature: oligonucleotide substrate
cugauagggugcuugcg

SEQ ID NO: 2660 - RNA, 17 nt, Artificial Sequence
  Description of Artificial Sequence:  Nucleic Acid
  misc_feature: oligonucleotide substrate
gauagggugcuugcgag

SEQ ID NO: 2661 - RNA, 17 nt, Artificial Sequence
  Description of Artificial Sequence:  Nucleic Acid
  misc_feature: oligonucleotide substrate
gggugcuugcgagugcc

SEQ ID NO: 2662 - RNA, 17 nt, Artificial Sequence
  Description of Artificial Sequence:  Nucleic Acid
  misc_feature: oligonucleotide substrate
gcuugcgagugccccgg

SEQ ID NO: 2663 - RNA, 17 nt, Artificial Sequence
  Description of Artificial Sequence:  Nucleic Acid
  misc_feature: oligonucleotide substrate
uugcgagugccccggga

SEQ ID NO: 2664 - RNA, 17 nt, Artificial Sequence
  Description of Artificial Sequence:  Nucleic Acid
  misc_feature: oligonucleotide substrate
cccgggaggucucguag

SEQ ID NO: 2665 - RNA, 17 nt, Artificial Sequence
  Description of Artificial Sequence:  Nucleic Acid
  misc_feature: oligonucleotide substrate
gaggucucguagaccgu

SEQ ID NO: 2666 - RNA, 17 nt, Artificial Sequence
  Description of Artificial Sequence:  Nucleic Acid
  misc_feature: oligonucleotide substrate
ucucguagaccgugcac

SEQ ID NO: 2667 - RNA, 17 nt, Artificial Sequence
  Description of Artificial Sequence:  Nucleic Acid
  misc_feature: oligonucleotide substrate
cguagaccgugcaccau

SEQ ID NO: 2668 - RNA, 17 nt, Artificial Sequence
  Description of Artificial Sequence:  Nucleic Acid
  misc_feature: oligonucleotide substrate
uagaccgugcaccauga

SEQ ID NO: 2669 - RNA, 17 nt, Artificial Sequence
  Description of Artificial Sequence:  Nucleic Acid
  misc_feature: oligonucleotide substrate
gaccgugcaccaugagc

SEQ ID NO: 2670 - RNA, 17 nt, Artificial Sequence
  Description of Artificial Sequence:  Nucleic Acid
  misc_feature: oligonucleotide substrate
cgugcaccaugagcacg

SEQ ID NO: 2671 - RNA, 17 nt, Artificial Sequence
  Description of Artificial Sequence:  Nucleic Acid
  misc_feature: oligonucleotide substrate
caccaugagcacgaauc

SEQ ID NO: 2672 - RNA, 17 nt, Artificial Sequence
  Description of Artificial Sequence:  Nucleic Acid
  misc_feature: oligonucleotide substrate
ccaugagcacgaauccu

SEQ ID NO: 2673 - RNA, 17 nt, Artificial Sequence
  Description of Artificial Sequence:  Nucleic Acid
  misc_feature: oligonucleotide substrate
gagcacgaauccuaaac

SEQ ID NO: 2674 - RNA, 17 nt, Artificial Sequence
  Description of Artificial Sequence:  Nucleic Acid
  misc_feature: oligonucleotide substrate
aauccuaaaccucaaag

SEQ ID NO: 2675 - RNA, 17 nt, Artificial Sequence
  Description of Artificial Sequence:  Nucleic Acid
  misc_feature: oligonucleotide substrate
aaagaaaaaccaaacgu

SEQ ID NO: 2676 - RNA, 17 nt, Artificial Sequence
  Description of Artificial Sequence:  Nucleic Acid
  misc_feature: oligonucleotide substrate
aaaaccaaacguaacac

SEQ ID NO: 2677 - RNA, 17 nt, Artificial Sequence
  Description of Artificial Sequence:  Nucleic Acid
  misc_feature: oligonucleotide substrate
aaccaaacguaacacca

SEQ ID NO: 2678 - RNA, 17 nt, Artificial Sequence
  Description of Artificial Sequence:  Nucleic Acid
  misc_feature: oligonucleotide substrate
caaacguaacaccaacc

SEQ ID NO: 2679 - RNA, 17 nt, Artificial Sequence
  Description of Artificial Sequence:  Nucleic Acid
  misc_feature: oligonucleotide substrate
aacguaacaccaaccgc

SEQ ID NO: 2680 - RNA, 17 nt, Artificial Sequence
  Description of Artificial Sequence:  Nucleic Acid
  misc_feature: oligonucleotide substrate
uaacaccaaccgccgcc

SEQ ID NO: 2681 - RNA, 17 nt, Artificial Sequence
  Description of Artificial Sequence:  Nucleic Acid
  misc_feature: oligonucleotide substrate
caccaaccgccgcccac

SEQ ID NO: 2682 - RNA, 17 nt, Artificial Sequence
  Description of Artificial Sequence:  Nucleic Acid
  misc_feature: oligonucleotide substrate
caaccgccgcccacagg

SEQ ID NO: 2683 - RNA, 17 nt, Artificial Sequence
  Description of Artificial Sequence:  Nucleic Acid
  misc_feature: oligonucleotide substrate
cgccgcccacaggacgu

SEQ ID NO: 2684 - RNA, 17 nt, Artificial Sequence
  Description of Artificial Sequence:  Nucleic Acid
  misc_feature: oligonucleotide substrate
cccacaggacgucaagu

SEQ ID NO: 2685 - RNA, 17 nt, Artificial Sequence
  Description of Artificial Sequence:  Nucleic Acid
  misc_feature: oligonucleotide substrate
cacaggacgucaaguuc

SEQ ID NO: 2686 - RNA, 17 nt, Artificial Sequence
  Description of Artificial Sequence:  Nucleic Acid
  misc_feature: oligonucleotide substrate
gacgucaaguucccggg

SEQ ID NO: 2687 - RNA, 17 nt, Artificial Sequence
  Description of Artificial Sequence:  Nucleic Acid
  misc_feature: oligonucleotide substrate
guucccgggcggugguc

SEQ ID NO: 2688 - RNA, 17 nt, Artificial Sequence
  Description of Artificial Sequence:  Nucleic Acid
  misc_feature: oligonucleotide substrate
cccgggcgguggucaga

SEQ ID NO: 2689 - RNA, 17 nt, Artificial Sequence
  Description of Artificial Sequence:  Nucleic Acid
  misc_feature: oligonucleotide substrate
gggcgguggucagaucg

SEQ ID NO: 2690 - RNA, 17 nt, Artificial Sequence
  Description of Artificial Sequence:  Nucleic Acid
  misc_feature: oligonucleotide substrate
guggucagaucguuggu

SEQ ID NO: 2691 - RNA, 17 nt, Artificial Sequence
  Description of Artificial Sequence:  Nucleic Acid
  misc_feature: oligonucleotide substrate
gucagaucguuggugga

SEQ ID NO: 2692 - RNA, 17 nt, Artificial Sequence
  Description of Artificial Sequence:  Nucleic Acid
  misc_feature: oligonucleotide substrate
gaucguugguggaguuu

SEQ ID NO: 2693 - RNA, 17 nt, Artificial Sequence
  Description of Artificial Sequence:  Nucleic Acid
  misc_feature: oligonucleotide substrate
uugguggaguuuaccug

SEQ ID NO: 2694 - RNA, 17 nt, Artificial Sequence
  Description of Artificial Sequence:  Nucleic Acid
  misc_feature: oligonucleotide substrate
uggaguuuaccuguugc

SEQ ID NO: 2695 - RNA, 17 nt, Artificial Sequence
  Description of Artificial Sequence:  Nucleic Acid
  misc_feature: oligonucleotide substrate
guuuaccuguugccgcg

SEQ ID NO: 2696 - RNA, 17 nt, Artificial Sequence
  Description of Artificial Sequence:  Nucleic Acid
  misc_feature: oligonucleotide substrate
uaccuguugccgcgcag

SEQ ID NO: 2697 - RNA, 17 nt, Artificial Sequence
  Description of Artificial Sequence:  Nucleic Acid
  misc_feature: oligonucleotide substrate
cuguugccgcgcagggg

SEQ ID NO: 2698 - RNA, 17 nt, Artificial Sequence
  Description of Artificial Sequence:  Nucleic Acid
  misc_feature: oligonucleotide substrate
guugccgcgcaggggcc

SEQ ID NO: 2699 - RNA, 17 nt, Artificial Sequence
  Description of Artificial Sequence:  Nucleic Acid
  misc_feature: oligonucleotide substrate
gcgcaggggccccaggu

SEQ ID NO: 2700 - RNA, 17 nt, Artificial Sequence
  Description of Artificial Sequence:  Nucleic Acid
  misc_feature: oligonucleotide substrate
ggccccagguugggugu

SEQ ID NO: 2701 - RNA, 17 nt, Artificial Sequence
  Description of Artificial Sequence:  Nucleic Acid
  misc_feature: oligonucleotide substrate
cagguugggugugcgcg

SEQ ID NO: 2702 - RNA, 17 nt, Artificial Sequence
  Description of Artificial Sequence:  Nucleic Acid
  misc_feature: oligonucleotide substrate
gguugggugugcgcgcg

SEQ ID NO: 2703 - RNA, 17 nt, Artificial Sequence
  Description of Artificial Sequence:  Nucleic Acid
  misc_feature: oligonucleotide substrate
uugggugugcgcgcgac

SEQ ID NO: 2704 - RNA, 17 nt, Artificial Sequence
  Description of Artificial Sequence:  Nucleic Acid
  misc_feature: oligonucleotide substrate
gggugugcgcgcgacua

SEQ ID NO: 2705 - RNA, 17 nt, Artificial Sequence
  Description of Artificial Sequence:  Nucleic Acid
  misc_feature: oligonucleotide substrate
gugugcgcgcgacuagg

SEQ ID NO: 2706 - RNA, 17 nt, Artificial Sequence
  Description of Artificial Sequence:  Nucleic Acid
  misc_feature: oligonucleotide substrate
ugcgcgcgacuaggaag

SEQ ID NO: 2707 - RNA, 17 nt, Artificial Sequence
  Description of Artificial Sequence:  Nucleic Acid
  misc_feature: oligonucleotide substrate
cuaggaagacuuccgag

SEQ ID NO: 2708 - RNA, 17 nt, Artificial Sequence
  Description of Artificial Sequence:  Nucleic Acid
  misc_feature: oligonucleotide substrate
acuuccgagcggucgca

SEQ ID NO: 2709 - RNA, 17 nt, Artificial Sequence
  Description of Artificial Sequence:  Nucleic Acid
  misc_feature: oligonucleotide substrate
uccgagcggucgcaacc

SEQ ID NO: 2710 - RNA, 17 nt, Artificial Sequence
  Description of Artificial Sequence:  Nucleic Acid
  misc_feature: oligonucleotide substrate
gagcggucgcaaccucg

SEQ ID NO: 2711 - RNA, 17 nt, Artificial Sequence
  Description of Artificial Sequence:  Nucleic Acid
  misc_feature: oligonucleotide substrate
cggucgcaaccucgugg

SEQ ID NO: 2712 - RNA, 17 nt, Artificial Sequence
  Description of Artificial Sequence:  Nucleic Acid
  misc_feature: oligonucleotide substrate
gcaaccucguggaaggc

SEQ ID NO: 2713 - RNA, 17 nt, Artificial Sequence
  Description of Artificial Sequence:  Nucleic Acid
  misc_feature: oligonucleotide substrate
cguggaaggcgacaacc

SEQ ID NO: 2714 - RNA, 17 nt, Artificial Sequence
  Description of Artificial Sequence:  Nucleic Acid
  misc_feature: oligonucleotide substrate
ggaaggcgacaaccuau

SEQ ID NO: 2715 - RNA, 17 nt, Artificial Sequence
  Description of Artificial Sequence:  Nucleic Acid
  misc_feature: oligonucleotide substrate
aggcgacaaccuauccc

SEQ ID NO: 2716 - RNA, 17 nt, Artificial Sequence
  Description of Artificial Sequence:  Nucleic Acid
  misc_feature: oligonucleotide substrate
gacaaccuauccccaag

SEQ ID NO: 2717 - RNA, 17 nt, Artificial Sequence
  Description of Artificial Sequence:  Nucleic Acid
  misc_feature: oligonucleotide substrate
uccccaaggcucgccgg

SEQ ID NO: 2718 - RNA, 17 nt, Artificial Sequence
  Description of Artificial Sequence:  Nucleic Acid
  misc_feature: oligonucleotide substrate
caaggcucgccggcccg

SEQ ID NO: 2719 - RNA, 17 nt, Artificial Sequence
  Description of Artificial Sequence:  Nucleic Acid
  misc_feature: oligonucleotide substrate
gcucgccggcccgaggg

SEQ ID NO: 2720 - RNA, 17 nt, Artificial Sequence
  Description of Artificial Sequence:  Nucleic Acid
  misc_feature: oligonucleotide substrate
gcccgagggcagggccu

SEQ ID NO: 2721 - RNA, 17 nt, Artificial Sequence
  Description of Artificial Sequence:  Nucleic Acid
  misc_feature: oligonucleotide substrate
agggcagggccugggcu

SEQ ID NO: 2722 - RNA, 17 nt, Artificial Sequence
  Description of Artificial Sequence:  Nucleic Acid
  misc_feature: oligonucleotide substrate
gggccugggcucagccc

SEQ ID NO: 2723 - RNA, 17 nt, Artificial Sequence
  Description of Artificial Sequence:  Nucleic Acid
  misc_feature: oligonucleotide substrate
ugggcucagcccgggua

SEQ ID NO: 2724 - RNA, 17 nt, Artificial Sequence
  Description of Artificial Sequence:  Nucleic Acid
  misc_feature: oligonucleotide substrate
cagcccggguacccuug

SEQ ID NO: 2725 - RNA, 17 nt, Artificial Sequence
  Description of Artificial Sequence:  Nucleic Acid
  misc_feature: oligonucleotide substrate
gcccggguacccuuggc

SEQ ID NO: 2726 - RNA, 17 nt, Artificial Sequence
  Description of Artificial Sequence:  Nucleic Acid
  misc_feature: oligonucleotide substrate
uacccuuggccccucua

SEQ ID NO: 2727 - RNA, 17 nt, Artificial Sequence
  Description of Artificial Sequence:  Nucleic Acid
  misc_feature: oligonucleotide substrate
gccccucuauggcaaug

SEQ ID NO: 2728 - RNA, 17 nt, Artificial Sequence
  Description of Artificial Sequence:  Nucleic Acid
  misc_feature: oligonucleotide substrate
ccucuauggcaaugagg

SEQ ID NO: 2729 - RNA, 17 nt, Artificial Sequence
  Description of Artificial Sequence:  Nucleic Acid
  misc_feature: oligonucleotide substrate
cuauggcaaugagggcu

SEQ ID NO: 2730 - RNA, 17 nt, Artificial Sequence
  Description of Artificial Sequence:  Nucleic Acid
  misc_feature: oligonucleotide substrate
caaugagggcuuagggu

SEQ ID NO: 2731 - RNA, 17 nt, Artificial Sequence
  Description of Artificial Sequence:  Nucleic Acid
  misc_feature: oligonucleotide substrate
ggcuuagggugggcagg

SEQ ID NO: 2732 - RNA, 17 nt, Artificial Sequence
  Description of Artificial Sequence:  Nucleic Acid
  misc_feature: oligonucleotide substrate
uagggugggcaggaugg

SEQ ID NO: 2733 - RNA, 17 nt, Artificial Sequence
  Description of Artificial Sequence:  Nucleic Acid
  misc_feature: oligonucleotide substrate
ugggcaggauggcuccu

SEQ ID NO: 2734 - RNA, 17 nt, Artificial Sequence
  Description of Artificial Sequence:  Nucleic Acid
  misc_feature: oligonucleotide substrate
gcaggauggcuccuguc

SEQ ID NO: 2735 - RNA, 17 nt, Artificial Sequence
  Description of Artificial Sequence:  Nucleic Acid
  misc_feature: oligonucleotide substrate
uggcuccugucaccccg

SEQ ID NO: 2736 - RNA, 17 nt, Artificial Sequence
  Description of Artificial Sequence:  Nucleic Acid
  misc_feature: oligonucleotide substrate
cuccugucaccccgcgg

SEQ ID NO: 2737 - RNA, 17 nt, Artificial Sequence
  Description of Artificial Sequence:  Nucleic Acid
  misc_feature: oligonucleotide substrate
gucaccccgcggcuccc

SEQ ID NO: 2738 - RNA, 17 nt, Artificial Sequence
  Description of Artificial Sequence:  Nucleic Acid
  misc_feature: oligonucleotide substrate
accccgcggcucccggc

SEQ ID NO: 2739 - RNA, 17 nt, Artificial Sequence
  Description of Artificial Sequence:  Nucleic Acid
  misc_feature: oligonucleotide substrate
ggcucccggccuaguug

SEQ ID NO: 2740 - RNA, 17 nt, Artificial Sequence
  Description of Artificial Sequence:  Nucleic Acid
  misc_feature: oligonucleotide substrate
ccggccuaguuggggcc

SEQ ID NO: 2741 - RNA, 17 nt, Artificial Sequence
  Description of Artificial Sequence:  Nucleic Acid
  misc_feature: oligonucleotide substrate
uaguuggggccccacgg

SEQ ID NO: 2742 - RNA, 17 nt, Artificial Sequence
  Description of Artificial Sequence:  Nucleic Acid
  misc_feature: oligonucleotide substrate
ggggccccacggacccc

SEQ ID NO: 2743 - RNA, 17 nt, Artificial Sequence
  Description of Artificial Sequence:  Nucleic Acid
  misc_feature: oligonucleotide substrate
ccccacggacccccggc

SEQ ID NO: 2744 - RNA, 17 nt, Artificial Sequence
  Description of Artificial Sequence:  Nucleic Acid
  misc_feature: oligonucleotide substrate
gacccccggcguagguc

SEQ ID NO: 2745 - RNA, 17 nt, Artificial Sequence
  Description of Artificial Sequence:  Nucleic Acid
  misc_feature: oligonucleotide substrate
cccccggcguaggucgc

SEQ ID NO: 2746 - RNA, 17 nt, Artificial Sequence
  Description of Artificial Sequence:  Nucleic Acid
  misc_feature: oligonucleotide substrate
cggcguaggucgcguaa

SEQ ID NO: 2747 - RNA, 17 nt, Artificial Sequence
  Description of Artificial Sequence:  Nucleic Acid
  misc_feature: oligonucleotide substrate
cguaggucgcguaacuu

SEQ ID NO: 2748 - RNA, 17 nt, Artificial Sequence
  Description of Artificial Sequence:  Nucleic Acid
  misc_feature: oligonucleotide substrate
uaggucgcguaacuugg

SEQ ID NO: 2749 - RNA, 17 nt, Artificial Sequence
  Description of Artificial Sequence:  Nucleic Acid
  misc_feature: oligonucleotide substrate
gucgcguaacuugggua

SEQ ID NO: 2750 - RNA, 17 nt, Artificial Sequence
  Description of Artificial Sequence:  Nucleic Acid
  misc_feature: oligonucleotide substrate
uaacuuggguaagguca

SEQ ID NO: 2751 - RNA, 17 nt, Artificial Sequence
  Description of Artificial Sequence:  Nucleic Acid
  misc_feature: oligonucleotide substrate
uggguaaggucaucgau

SEQ ID NO: 2752 - RNA, 17 nt, Artificial Sequence
  Description of Artificial Sequence:  Nucleic Acid
  misc_feature: oligonucleotide substrate
guaaggucaucgauacc

SEQ ID NO: 2753 - RNA, 17 nt, Artificial Sequence
  Description of Artificial Sequence:  Nucleic Acid
  misc_feature: oligonucleotide substrate
ggucaucgauacccuca

SEQ ID NO: 2754 - RNA, 17 nt, Artificial Sequence
  Description of Artificial Sequence:  Nucleic Acid
  misc_feature: oligonucleotide substrate
ucaucgauacccucaca

SEQ ID NO: 2755 - RNA, 17 nt, Artificial Sequence
  Description of Artificial Sequence:  Nucleic Acid
  misc_feature: oligonucleotide substrate
auacccucacaugcggc

SEQ ID NO: 2756 - RNA, 17 nt, Artificial Sequence
  Description of Artificial Sequence:  Nucleic Acid
  misc_feature: oligonucleotide substrate
acccucacaugcggcuu

SEQ ID NO: 2757 - RNA, 17 nt, Artificial Sequence
  Description of Artificial Sequence:  Nucleic Acid
  misc_feature: oligonucleotide substrate
ccucacaugcggcuucg

SEQ ID NO: 2758 - RNA, 17 nt, Artificial Sequence
  Description of Artificial Sequence:  Nucleic Acid
  misc_feature: oligonucleotide substrate
cacaugcggcuucgccg

SEQ ID NO: 2759 - RNA, 17 nt, Artificial Sequence
  Description of Artificial Sequence:  Nucleic Acid
  misc_feature: oligonucleotide substrate
gcggcuucgccgaccuc

SEQ ID NO: 2760 - RNA, 17 nt, Artificial Sequence
  Description of Artificial Sequence:  Nucleic Acid
  misc_feature: oligonucleotide substrate
cuucgccgaccucaugg

SEQ ID NO: 2761 - RNA, 17 nt, Artificial Sequence
  Description of Artificial Sequence:  Nucleic Acid
  misc_feature: oligonucleotide substrate
ccgaccucaugggguac

SEQ ID NO: 2762 - RNA, 17 nt, Artificial Sequence
  Description of Artificial Sequence:  Nucleic Acid
  misc_feature: oligonucleotide substrate
cucaugggguacauucc

SEQ ID NO: 2763 - RNA, 17 nt, Artificial Sequence
  Description of Artificial Sequence:  Nucleic Acid
  misc_feature: oligonucleotide substrate
caugggguacauuccgc

SEQ ID NO: 2764 - RNA, 17 nt, Artificial Sequence
  Description of Artificial Sequence:  Nucleic Acid
  misc_feature: oligonucleotide substrate
ugggguacauuccgcuc

SEQ ID NO: 2765 - RNA, 17 nt, Artificial Sequence
  Description of Artificial Sequence:  Nucleic Acid
  misc_feature: oligonucleotide substrate
uacauuccgcucgucgg

SEQ ID NO: 2766 - RNA, 17 nt, Artificial Sequence
  Description of Artificial Sequence:  Nucleic Acid
  misc_feature: oligonucleotide substrate
uuccgcucgucggcgcc

SEQ ID NO: 2767 - RNA, 17 nt, Artificial Sequence
  Description of Artificial Sequence:  Nucleic Acid
  misc_feature: oligonucleotide substrate
gcucgucggcgcccccu

SEQ ID NO: 2768 - RNA, 17 nt, Artificial Sequence
  Description of Artificial Sequence:  Nucleic Acid
  misc_feature: oligonucleotide substrate
ucgucggcgcccccuug

SEQ ID NO: 2769 - RNA, 17 nt, Artificial Sequence
  Description of Artificial Sequence:  Nucleic Acid
  misc_feature: oligonucleotide substrate
cuugggaggcacugcca

SEQ ID NO: 2770 - RNA, 17 nt, Artificial Sequence
  Description of Artificial Sequence:  Nucleic Acid
  misc_feature: oligonucleotide substrate
ugggaggcacugccagg

SEQ ID NO: 2771 - RNA, 17 nt, Artificial Sequence
  Description of Artificial Sequence:  Nucleic Acid
  misc_feature: oligonucleotide substrate
gaggcacugccagggcc

SEQ ID NO: 2772 - RNA, 17 nt, Artificial Sequence
  Description of Artificial Sequence:  Nucleic Acid
  misc_feature: oligonucleotide substrate
cugccagggcccuggcg

SEQ ID NO: 2773 - RNA, 17 nt, Artificial Sequence
  Description of Artificial Sequence:  Nucleic Acid
  misc_feature: oligonucleotide substrate
gggcccuggcgcauggc

SEQ ID NO: 2774 - RNA, 17 nt, Artificial Sequence
  Description of Artificial Sequence:  Nucleic Acid
  misc_feature: oligonucleotide substrate
gcccuggcgcauggcgu

SEQ ID NO: 2775 - RNA, 17 nt, Artificial Sequence
  Description of Artificial Sequence:  Nucleic Acid
  misc_feature: oligonucleotide substrate
ccuggcgcauggcgucc

SEQ ID NO: 2776 - RNA, 17 nt, Artificial Sequence
  Description of Artificial Sequence:  Nucleic Acid
  misc_feature: oligonucleotide substrate
ggcgcauggcguccggg

SEQ ID NO: 2777 - RNA, 17 nt, Artificial Sequence
  Description of Artificial Sequence:  Nucleic Acid
  misc_feature: oligonucleotide substrate
cgcauggcguccggguu

SEQ ID NO: 2778 - RNA, 17 nt, Artificial Sequence
  Description of Artificial Sequence:  Nucleic Acid
  misc_feature: oligonucleotide substrate
gcguccggguucuggaa

SEQ ID NO: 2779 - RNA, 17 nt, Artificial Sequence
  Description of Artificial Sequence:  Nucleic Acid
  misc_feature: oligonucleotide substrate
ucuggaagacggcguga

SEQ ID NO: 2780 - RNA, 17 nt, Artificial Sequence
  Description of Artificial Sequence:  Nucleic Acid
  misc_feature: oligonucleotide substrate
ggaagacggcgugaacu

SEQ ID NO: 2781 - RNA, 17 nt, Artificial Sequence
  Description of Artificial Sequence:  Nucleic Acid
  misc_feature: oligonucleotide substrate
aagacggcgugaacuau

SEQ ID NO: 2782 - RNA, 17 nt, Artificial Sequence
  Description of Artificial Sequence:  Nucleic Acid
  misc_feature: oligonucleotide substrate
cggcgugaacuaugcaa

SEQ ID NO: 2783 - RNA, 17 nt, Artificial Sequence
  Description of Artificial Sequence:  Nucleic Acid
  misc_feature: oligonucleotide substrate
cgugaacuaugcaacag

SEQ ID NO: 2784 - RNA, 17 nt, Artificial Sequence
  Description of Artificial Sequence:  Nucleic Acid
  misc_feature: oligonucleotide substrate
ugaacuaugcaacaggg

SEQ ID NO: 2785 - RNA, 17 nt, Artificial Sequence
  Description of Artificial Sequence:  Nucleic Acid
  misc_feature: oligonucleotide substrate
acuaugcaacagggaau

SEQ ID NO: 2786 - RNA, 17 nt, Artificial Sequence
  Description of Artificial Sequence:  Nucleic Acid
  misc_feature: oligonucleotide substrate
aacagggaaucugcccg

SEQ ID NO: 2787 - RNA, 17 nt, Artificial Sequence
  Description of Artificial Sequence:  Nucleic Acid
  misc_feature: oligonucleotide substrate
gggaaucugcccgguug

SEQ ID NO: 2788 - RNA, 17 nt, Artificial Sequence
  Description of Artificial Sequence:  Nucleic Acid
  misc_feature: oligonucleotide substrate
ucugcccgguugcucuu

SEQ ID NO: 2789 - RNA, 17 nt, Artificial Sequence
  Description of Artificial Sequence:  Nucleic Acid
  misc_feature: oligonucleotide substrate
gcccgguugcucuuucu

SEQ ID NO: 2790 - RNA, 17 nt, Artificial Sequence
  Description of Artificial Sequence:  Nucleic Acid
  misc_feature: oligonucleotide substrate
cuuucucuaucuuccuc

SEQ ID NO: 2791 - RNA, 17 nt, Artificial Sequence
  Description of Artificial Sequence:  Nucleic Acid
  misc_feature: oligonucleotide substrate
uccucuuggcucugcug

SEQ ID NO: 2792 - RNA, 17 nt, Artificial Sequence
  Description of Artificial Sequence:  Nucleic Acid
  misc_feature: oligonucleotide substrate
uuggcucugcugcccug

SEQ ID NO: 2793 - RNA, 17 nt, Artificial Sequence
  Description of Artificial Sequence:  Nucleic Acid
  misc_feature: oligonucleotide substrate
gcucugcugcccugucu

SEQ ID NO: 2794 - RNA, 17 nt, Artificial Sequence
  Description of Artificial Sequence:  Nucleic Acid
  misc_feature: oligonucleotide substrate
gcugcccugucugacca

SEQ ID NO: 2795 - RNA, 17 nt, Artificial Sequence
  Description of Artificial Sequence:  Nucleic Acid
  misc_feature: oligonucleotide substrate
ccugucugaccauccca

SEQ ID NO: 2796 - RNA, 17 nt, Artificial Sequence
  Description of Artificial Sequence:  Nucleic Acid
  misc_feature: oligonucleotide substrate
gucugaccaucccagcc

SEQ ID NO: 2797 - RNA, 17 nt, Artificial Sequence
  Description of Artificial Sequence:  Nucleic Acid
  misc_feature: oligonucleotide substrate
ccaucccagccuccgcu

SEQ ID NO: 2798 - RNA, 17 nt, Artificial Sequence
  Description of Artificial Sequence:  Nucleic Acid
  misc_feature: oligonucleotide substrate
cagccuccgcuuaugag

SEQ ID NO: 2799 - RNA, 17 nt, Artificial Sequence
  Description of Artificial Sequence:  Nucleic Acid
  misc_feature: oligonucleotide substrate
cuccgcuuaugaggugu

SEQ ID NO: 2800 - RNA, 17 nt, Artificial Sequence
  Description of Artificial Sequence:  Nucleic Acid
  misc_feature: oligonucleotide substrate
cuuaugaggugugcaac

SEQ ID NO: 2801 - RNA, 17 nt, Artificial Sequence
  Description of Artificial Sequence:  Nucleic Acid
  misc_feature: oligonucleotide substrate
uaugaggugugcaacgc

SEQ ID NO: 2802 - RNA, 17 nt, Artificial Sequence
  Description of Artificial Sequence:  Nucleic Acid
  misc_feature: oligonucleotide substrate
ugaggugugcaacgcgu

SEQ ID NO: 2803 - RNA, 17 nt, Artificial Sequence
  Description of Artificial Sequence:  Nucleic Acid
  misc_feature: oligonucleotide substrate
ggugugcaacgcguccg

SEQ ID NO: 2804 - RNA, 17 nt, Artificial Sequence
  Description of Artificial Sequence:  Nucleic Acid
  misc_feature: oligonucleotide substrate
ugugcaacgcguccggg

SEQ ID NO: 2805 - RNA, 17 nt, Artificial Sequence
  Description of Artificial Sequence:  Nucleic Acid
  misc_feature: oligonucleotide substrate
ugcaacgcguccgggcu

SEQ ID NO: 2806 - RNA, 17 nt, Artificial Sequence
  Description of Artificial Sequence:  Nucleic Acid
  misc_feature: oligonucleotide substrate
gcguccgggcuguacca

SEQ ID NO: 2807 - RNA, 17 nt, Artificial Sequence
  Description of Artificial Sequence:  Nucleic Acid
  misc_feature: oligonucleotide substrate
uccgggcuguaccaugu

SEQ ID NO: 2808 - RNA, 17 nt, Artificial Sequence
  Description of Artificial Sequence:  Nucleic Acid
  misc_feature: oligonucleotide substrate
cgggcuguaccauguca

SEQ ID NO: 2809 - RNA, 17 nt, Artificial Sequence
  Description of Artificial Sequence:  Nucleic Acid
  misc_feature: oligonucleotide substrate
gcuguaccaugucacga

SEQ ID NO: 2810 - RNA, 17 nt, Artificial Sequence
  Description of Artificial Sequence:  Nucleic Acid
  misc_feature: oligonucleotide substrate
uguaccaugucacgaac

SEQ ID NO: 2811 - RNA, 17 nt, Artificial Sequence
  Description of Artificial Sequence:  Nucleic Acid
  misc_feature: oligonucleotide substrate
accaugucacgaacgau

SEQ ID NO: 2812 - RNA, 17 nt, Artificial Sequence
  Description of Artificial Sequence:  Nucleic Acid
  misc_feature: oligonucleotide substrate
ugucacgaacgauugcu

SEQ ID NO: 2813 - RNA, 17 nt, Artificial Sequence
  Description of Artificial Sequence:  Nucleic Acid
  misc_feature: oligonucleotide substrate
cacgaacgauugcucca

SEQ ID NO: 2814 - RNA, 17 nt, Artificial Sequence
  Description of Artificial Sequence:  Nucleic Acid
  misc_feature: oligonucleotide substrate
gaacgauugcuccaacu

SEQ ID NO: 2815 - RNA, 17 nt, Artificial Sequence
  Description of Artificial Sequence:  Nucleic Acid
  misc_feature: oligonucleotide substrate
uugcuccaacucaagca

SEQ ID NO: 2816 - RNA, 17 nt, Artificial Sequence
  Description of Artificial Sequence:  Nucleic Acid
  misc_feature: oligonucleotide substrate
caacucaagcauugugu

SEQ ID NO: 2817 - RNA, 17 nt, Artificial Sequence
  Description of Artificial Sequence:  Nucleic Acid
  misc_feature: oligonucleotide substrate
acucaagcauuguguau

SEQ ID NO: 2818 - RNA, 17 nt, Artificial Sequence
  Description of Artificial Sequence:  Nucleic Acid
  misc_feature: oligonucleotide substrate
caagcauuguguaugag

SEQ ID NO: 2819 - RNA, 17 nt, Artificial Sequence
  Description of Artificial Sequence:  Nucleic Acid
  misc_feature: oligonucleotide substrate
agcauuguguaugaggc

SEQ ID NO: 2820 - RNA, 17 nt, Artificial Sequence
  Description of Artificial Sequence:  Nucleic Acid
  misc_feature: oligonucleotide substrate
cauuguguaugaggcag

SEQ ID NO: 2821 - RNA, 17 nt, Artificial Sequence
  Description of Artificial Sequence:  Nucleic Acid
  misc_feature: oligonucleotide substrate
uguaugaggcagaggac

SEQ ID NO: 2822 - RNA, 17 nt, Artificial Sequence
  Description of Artificial Sequence:  Nucleic Acid
  misc_feature: oligonucleotide substrate
ggcagaggacaugauca

SEQ ID NO: 2823 - RNA, 17 nt, Artificial Sequence
  Description of Artificial Sequence:  Nucleic Acid
  misc_feature: oligonucleotide substrate
cagaggacaugaucaug

SEQ ID NO: 2824 - RNA, 17 nt, Artificial Sequence
  Description of Artificial Sequence:  Nucleic Acid
  misc_feature: oligonucleotide substrate
aggacaugaucaugcac

SEQ ID NO: 2825 - RNA, 17 nt, Artificial Sequence
  Description of Artificial Sequence:  Nucleic Acid
  misc_feature: oligonucleotide substrate
acaugaucaugcacacc

SEQ ID NO: 2826 - RNA, 17 nt, Artificial Sequence
  Description of Artificial Sequence:  Nucleic Acid
  misc_feature: oligonucleotide substrate
augaucaugcacacccc

SEQ ID NO: 2827 - RNA, 17 nt, Artificial Sequence
  Description of Artificial Sequence:  Nucleic Acid
  misc_feature: oligonucleotide substrate
gaucaugcacaccccgg

SEQ ID NO: 2828 - RNA, 17 nt, Artificial Sequence
  Description of Artificial Sequence:  Nucleic Acid
  misc_feature: oligonucleotide substrate
ucaugcacaccccgggg

SEQ ID NO: 2829 - RNA, 17 nt, Artificial Sequence
  Description of Artificial Sequence:  Nucleic Acid
  misc_feature: oligonucleotide substrate
accccggggugcgugcc

SEQ ID NO: 2830 - RNA, 17 nt, Artificial Sequence
  Description of Artificial Sequence:  Nucleic Acid
  misc_feature: oligonucleotide substrate
cccggggugcgugcccu

SEQ ID NO: 2831 - RNA, 17 nt, Artificial Sequence
  Description of Artificial Sequence:  Nucleic Acid
  misc_feature: oligonucleotide substrate
cggggugcgugcccugc

SEQ ID NO: 2832 - RNA, 17 nt, Artificial Sequence
  Description of Artificial Sequence:  Nucleic Acid
  misc_feature: oligonucleotide substrate
gggugcgugcccugcgu

SEQ ID NO: 2833 - RNA, 17 nt, Artificial Sequence
  Description of Artificial Sequence:  Nucleic Acid
  misc_feature: oligonucleotide substrate
cgugcccugcguucggg

SEQ ID NO: 2834 - RNA, 17 nt, Artificial Sequence
  Description of Artificial Sequence:  Nucleic Acid
  misc_feature: oligonucleotide substrate
ugcccugcguucgggag

SEQ ID NO: 2835 - RNA, 17 nt, Artificial Sequence
  Description of Artificial Sequence:  Nucleic Acid
  misc_feature: oligonucleotide substrate
ucgggagaacaacuccu

SEQ ID NO: 2836 - RNA, 17 nt, Artificial Sequence
  Description of Artificial Sequence:  Nucleic Acid
  misc_feature: oligonucleotide substrate
ggagaacaacuccuccc

SEQ ID NO: 2837 - RNA, 17 nt, Artificial Sequence
  Description of Artificial Sequence:  Nucleic Acid
  misc_feature: oligonucleotide substrate
cuccucccgcugcuggg

SEQ ID NO: 2838 - RNA, 17 nt, Artificial Sequence
  Description of Artificial Sequence:  Nucleic Acid
  misc_feature: oligonucleotide substrate
cucccgcugcuggguag

SEQ ID NO: 2839 - RNA, 17 nt, Artificial Sequence
  Description of Artificial Sequence:  Nucleic Acid
  misc_feature: oligonucleotide substrate
gcugcuggguagcgcuc

SEQ ID NO: 2840 - RNA, 17 nt, Artificial Sequence
  Description of Artificial Sequence:  Nucleic Acid
  misc_feature: oligonucleotide substrate
gcuggguagcgcucacu

SEQ ID NO: 2841 - RNA, 17 nt, Artificial Sequence
  Description of Artificial Sequence:  Nucleic Acid
  misc_feature: oligonucleotide substrate
uggguagcgcucacucc

SEQ ID NO: 2842 - RNA, 17 nt, Artificial Sequence
  Description of Artificial Sequence:  Nucleic Acid
  misc_feature: oligonucleotide substrate
uagcgcucacucccacg

SEQ ID NO: 2843 - RNA, 17 nt, Artificial Sequence
  Description of Artificial Sequence:  Nucleic Acid
  misc_feature: oligonucleotide substrate
ucacucccacgcucgcg

SEQ ID NO: 2844 - RNA, 17 nt, Artificial Sequence
  Description of Artificial Sequence:  Nucleic Acid
  misc_feature: oligonucleotide substrate
acucccacgcucgcggc

SEQ ID NO: 2845 - RNA, 17 nt, Artificial Sequence
  Description of Artificial Sequence:  Nucleic Acid
  misc_feature: oligonucleotide substrate
ccacgcucgcggccagg

SEQ ID NO: 2846 - RNA, 17 nt, Artificial Sequence
  Description of Artificial Sequence:  Nucleic Acid
  misc_feature: oligonucleotide substrate
cgcucgcggccaggaau

SEQ ID NO: 2847 - RNA, 17 nt, Artificial Sequence
  Description of Artificial Sequence:  Nucleic Acid
  misc_feature: oligonucleotide substrate
ggccaggaaugccagca

SEQ ID NO: 2848 - RNA, 17 nt, Artificial Sequence
  Description of Artificial Sequence:  Nucleic Acid
  misc_feature: oligonucleotide substrate
ccaggaaugccagcauc

SEQ ID NO: 2849 - RNA, 17 nt, Artificial Sequence
  Description of Artificial Sequence:  Nucleic Acid
  misc_feature: oligonucleotide substrate
gaaugccagcaucccca

SEQ ID NO: 2850 - RNA, 17 nt, Artificial Sequence
  Description of Artificial Sequence:  Nucleic Acid
  misc_feature: oligonucleotide substrate
augccagcauccccacu

SEQ ID NO: 2851 - RNA, 17 nt, Artificial Sequence
  Description of Artificial Sequence:  Nucleic Acid
  misc_feature: oligonucleotide substrate
gcauccccacuacgacg

SEQ ID NO: 2852 - RNA, 17 nt, Artificial Sequence
  Description of Artificial Sequence:  Nucleic Acid
  misc_feature: oligonucleotide substrate
uccccacuacgacgaua

SEQ ID NO: 2853 - RNA, 17 nt, Artificial Sequence
  Description of Artificial Sequence:  Nucleic Acid
  misc_feature: oligonucleotide substrate
ccacuacgacgauacgg

SEQ ID NO: 2854 - RNA, 17 nt, Artificial Sequence
  Description of Artificial Sequence:  Nucleic Acid
  misc_feature: oligonucleotide substrate
cuacgacgauacggcgu

SEQ ID NO: 2855 - RNA, 17 nt, Artificial Sequence
  Description of Artificial Sequence:  Nucleic Acid
  misc_feature: oligonucleotide substrate
acgacgauacggcguca

SEQ ID NO: 2856 - RNA, 17 nt, Artificial Sequence
  Description of Artificial Sequence:  Nucleic Acid
  misc_feature: oligonucleotide substrate
acgauacggcgucacgu

SEQ ID NO: 2857 - RNA, 17 nt, Artificial Sequence
  Description of Artificial Sequence:  Nucleic Acid
  misc_feature: oligonucleotide substrate
gauacggcgucacgucg

SEQ ID NO: 2858 - RNA, 17 nt, Artificial Sequence
  Description of Artificial Sequence:  Nucleic Acid
  misc_feature: oligonucleotide substrate
acggcgucacgucgauu

SEQ ID NO: 2859 - RNA, 17 nt, Artificial Sequence
  Description of Artificial Sequence:  Nucleic Acid
  misc_feature: oligonucleotide substrate
ggcgucacgucgauuug

SEQ ID NO: 2860 - RNA, 17 nt, Artificial Sequence
  Description of Artificial Sequence:  Nucleic Acid
  misc_feature: oligonucleotide substrate
ucacgucgauuugcucg

SEQ ID NO: 2861 - RNA, 17 nt, Artificial Sequence
  Description of Artificial Sequence:  Nucleic Acid
  misc_feature: oligonucleotide substrate
gucgauuugcucguugg

SEQ ID NO: 2862 - RNA, 17 nt, Artificial Sequence
  Description of Artificial Sequence:  Nucleic Acid
  misc_feature: oligonucleotide substrate
auuugcucguuggggcg

SEQ ID NO: 2863 - RNA, 17 nt, Artificial Sequence
  Description of Artificial Sequence:  Nucleic Acid
  misc_feature: oligonucleotide substrate
ucguuggggcggcugcu

SEQ ID NO: 2864 - RNA, 17 nt, Artificial Sequence
  Description of Artificial Sequence:  Nucleic Acid
  misc_feature: oligonucleotide substrate
uuggggcggcugcuuuc

SEQ ID NO: 2865 - RNA, 17 nt, Artificial Sequence
  Description of Artificial Sequence:  Nucleic Acid
  misc_feature: oligonucleotide substrate
gggcggcugcuuucugc

SEQ ID NO: 2866 - RNA, 17 nt, Artificial Sequence
  Description of Artificial Sequence:  Nucleic Acid
  misc_feature: oligonucleotide substrate
ugcuuucugcucugcua

SEQ ID NO: 2867 - RNA, 17 nt, Artificial Sequence
  Description of Artificial Sequence:  Nucleic Acid
  misc_feature: oligonucleotide substrate
ucugcucugcuauguac

SEQ ID NO: 2868 - RNA, 17 nt, Artificial Sequence
  Description of Artificial Sequence:  Nucleic Acid
  misc_feature: oligonucleotide substrate
gcucugcuauguacgug

SEQ ID NO: 2869 - RNA, 17 nt, Artificial Sequence
  Description of Artificial Sequence:  Nucleic Acid
  misc_feature: oligonucleotide substrate
ucugcuauguacguggg

SEQ ID NO: 2870 - RNA, 17 nt, Artificial Sequence
  Description of Artificial Sequence:  Nucleic Acid
  misc_feature: oligonucleotide substrate
ugcuauguacguggggg

SEQ ID NO: 2871 - RNA, 17 nt, Artificial Sequence
  Description of Artificial Sequence:  Nucleic Acid
  misc_feature: oligonucleotide substrate
cuauguacgugggggau

SEQ ID NO: 2872 - RNA, 17 nt, Artificial Sequence
  Description of Artificial Sequence:  Nucleic Acid
  misc_feature: oligonucleotide substrate
cgugggggaucucugcg

SEQ ID NO: 2873 - RNA, 17 nt, Artificial Sequence
  Description of Artificial Sequence:  Nucleic Acid
  misc_feature: oligonucleotide substrate
ggaucucugcggaucug

SEQ ID NO: 2874 - RNA, 17 nt, Artificial Sequence
  Description of Artificial Sequence:  Nucleic Acid
  misc_feature: oligonucleotide substrate
cucugcggaucugucuu

SEQ ID NO: 2875 - RNA, 17 nt, Artificial Sequence
  Description of Artificial Sequence:  Nucleic Acid
  misc_feature: oligonucleotide substrate
gcggaucugucuuccuc

SEQ ID NO: 2876 - RNA, 17 nt, Artificial Sequence
  Description of Artificial Sequence:  Nucleic Acid
  misc_feature: oligonucleotide substrate
ucuuccucgucucucag

SEQ ID NO: 2877 - RNA, 17 nt, Artificial Sequence
  Description of Artificial Sequence:  Nucleic Acid
  misc_feature: oligonucleotide substrate
gucucucagcuguucac

SEQ ID NO: 2878 - RNA, 17 nt, Artificial Sequence
  Description of Artificial Sequence:  Nucleic Acid
  misc_feature: oligonucleotide substrate
ucucagcuguucaccuu

SEQ ID NO: 2879 - RNA, 17 nt, Artificial Sequence
  Description of Artificial Sequence:  Nucleic Acid
  misc_feature: oligonucleotide substrate
agcuguucaccuucucg

SEQ ID NO: 2880 - RNA, 17 nt, Artificial Sequence
  Description of Artificial Sequence:  Nucleic Acid
  misc_feature: oligonucleotide substrate
accuucucgccucgccg

SEQ ID NO: 2881 - RNA, 17 nt, Artificial Sequence
  Description of Artificial Sequence:  Nucleic Acid
  misc_feature: oligonucleotide substrate
cucgccucgccgguaug

SEQ ID NO: 2882 - RNA, 17 nt, Artificial Sequence
  Description of Artificial Sequence:  Nucleic Acid
  misc_feature: oligonucleotide substrate
ccucgccgguaugagac

SEQ ID NO: 2883 - RNA, 17 nt, Artificial Sequence
  Description of Artificial Sequence:  Nucleic Acid
  misc_feature: oligonucleotide substrate
ucgccgguaugagacag

SEQ ID NO: 2884 - RNA, 17 nt, Artificial Sequence
  Description of Artificial Sequence:  Nucleic Acid
  misc_feature: oligonucleotide substrate
gguaugagacaguacag

SEQ ID NO: 2885 - RNA, 17 nt, Artificial Sequence
  Description of Artificial Sequence:  Nucleic Acid
  misc_feature: oligonucleotide substrate
augagacaguacaggac

SEQ ID NO: 2886 - RNA, 17 nt, Artificial Sequence
  Description of Artificial Sequence:  Nucleic Acid
  misc_feature: oligonucleotide substrate
gagacaguacaggacug

SEQ ID NO: 2887 - RNA, 17 nt, Artificial Sequence
  Description of Artificial Sequence:  Nucleic Acid
  misc_feature: oligonucleotide substrate
aguacaggacuguaauu

SEQ ID NO: 2888 - RNA, 17 nt, Artificial Sequence
  Description of Artificial Sequence:  Nucleic Acid
  misc_feature: oligonucleotide substrate
acaggacuguaauugcu

SEQ ID NO: 2889 - RNA, 17 nt, Artificial Sequence
  Description of Artificial Sequence:  Nucleic Acid
  misc_feature: oligonucleotide substrate
ggacuguaauugcucga

SEQ ID NO: 2890 - RNA, 17 nt, Artificial Sequence
  Description of Artificial Sequence:  Nucleic Acid
  misc_feature: oligonucleotide substrate
cuguaauugcucgaucu

SEQ ID NO: 2891 - RNA, 17 nt, Artificial Sequence
  Description of Artificial Sequence:  Nucleic Acid
  misc_feature: oligonucleotide substrate
auugcucgaucuauccc

SEQ ID NO: 2892 - RNA, 17 nt, Artificial Sequence
  Description of Artificial Sequence:  Nucleic Acid
  misc_feature: oligonucleotide substrate
cucgaucuaucccggcc

SEQ ID NO: 2893 - RNA, 17 nt, Artificial Sequence
  Description of Artificial Sequence:  Nucleic Acid
  misc_feature: oligonucleotide substrate
cuaucccggccacguau

SEQ ID NO: 2894 - RNA, 17 nt, Artificial Sequence
  Description of Artificial Sequence:  Nucleic Acid
  misc_feature: oligonucleotide substrate
ucccggccacguaucag

SEQ ID NO: 2895 - RNA, 17 nt, Artificial Sequence
  Description of Artificial Sequence:  Nucleic Acid
  misc_feature: oligonucleotide substrate
ccggccacguaucaggc

SEQ ID NO: 2896 - RNA, 17 nt, Artificial Sequence
  Description of Artificial Sequence:  Nucleic Acid
  misc_feature: oligonucleotide substrate
ggccacguaucaggcca

SEQ ID NO: 2897 - RNA, 17 nt, Artificial Sequence
  Description of Artificial Sequence:  Nucleic Acid
  misc_feature: oligonucleotide substrate
cguaucaggccaucgca

SEQ ID NO: 2898 - RNA, 17 nt, Artificial Sequence
  Description of Artificial Sequence:  Nucleic Acid
  misc_feature: oligonucleotide substrate
aucaggccaucgcaugg

SEQ ID NO: 2899 - RNA, 17 nt, Artificial Sequence
  Description of Artificial Sequence:  Nucleic Acid
  misc_feature: oligonucleotide substrate
aggccaucgcauggcuu

SEQ ID NO: 2900 - RNA, 17 nt, Artificial Sequence
  Description of Artificial Sequence:  Nucleic Acid
  misc_feature: oligonucleotide substrate
gccaucgcauggcuugg

SEQ ID NO: 2901 - RNA, 17 nt, Artificial Sequence
  Description of Artificial Sequence:  Nucleic Acid
  misc_feature: oligonucleotide substrate
aucgcauggcuugggau

SEQ ID NO: 2902 - RNA, 17 nt, Artificial Sequence
  Description of Artificial Sequence:  Nucleic Acid
  misc_feature: oligonucleotide substrate
ggcuugggauaugauga

SEQ ID NO: 2903 - RNA, 17 nt, Artificial Sequence
  Description of Artificial Sequence:  Nucleic Acid
  misc_feature: oligonucleotide substrate
cuugggauaugaugaug

SEQ ID NO: 2904 - RNA, 17 nt, Artificial Sequence
  Description of Artificial Sequence:  Nucleic Acid
  misc_feature: oligonucleotide substrate
gggauaugaugaugaau

SEQ ID NO: 2905 - RNA, 17 nt, Artificial Sequence
  Description of Artificial Sequence:  Nucleic Acid
  misc_feature: oligonucleotide substrate
auaugaugaugaauugg

SEQ ID NO: 2906 - RNA, 17 nt, Artificial Sequence
  Description of Artificial Sequence:  Nucleic Acid
  misc_feature: oligonucleotide substrate
gaugaugaauuggucac

SEQ ID NO: 2907 - RNA, 17 nt, Artificial Sequence
  Description of Artificial Sequence:  Nucleic Acid
  misc_feature: oligonucleotide substrate
augaauuggucaccuac

SEQ ID NO: 2908 - RNA, 17 nt, Artificial Sequence
  Description of Artificial Sequence:  Nucleic Acid
  misc_feature: oligonucleotide substrate
aauuggucaccuacaac

SEQ ID NO: 2909 - RNA, 17 nt, Artificial Sequence
  Description of Artificial Sequence:  Nucleic Acid
  misc_feature: oligonucleotide substrate
ggucaccuacaacagcc

SEQ ID NO: 2910 - RNA, 17 nt, Artificial Sequence
  Description of Artificial Sequence:  Nucleic Acid
  misc_feature: oligonucleotide substrate
caccuacaacagcccua

SEQ ID NO: 2911 - RNA, 17 nt, Artificial Sequence
  Description of Artificial Sequence:  Nucleic Acid
  misc_feature: oligonucleotide substrate
cuacaacagcccuagug

SEQ ID NO: 2912 - RNA, 17 nt, Artificial Sequence
  Description of Artificial Sequence:  Nucleic Acid
  misc_feature: oligonucleotide substrate
cagcccuagugguaucg

SEQ ID NO: 2913 - RNA, 17 nt, Artificial Sequence
  Description of Artificial Sequence:  Nucleic Acid
  misc_feature: oligonucleotide substrate
cccuagugguaucgcag

SEQ ID NO: 2914 - RNA, 17 nt, Artificial Sequence
  Description of Artificial Sequence:  Nucleic Acid
  misc_feature: oligonucleotide substrate
cuagugguaucgcaguu

SEQ ID NO: 2915 - RNA, 17 nt, Artificial Sequence
  Description of Artificial Sequence:  Nucleic Acid
  misc_feature: oligonucleotide substrate
gugguaucgcaguugcu

SEQ ID NO: 2916 - RNA, 17 nt, Artificial Sequence
  Description of Artificial Sequence:  Nucleic Acid
  misc_feature: oligonucleotide substrate
guaucgcaguugcuccg

SEQ ID NO: 2917 - RNA, 17 nt, Artificial Sequence
  Description of Artificial Sequence:  Nucleic Acid
  misc_feature: oligonucleotide substrate
ucgcaguugcuccggau

SEQ ID NO: 2918 - RNA, 17 nt, Artificial Sequence
  Description of Artificial Sequence:  Nucleic Acid
  misc_feature: oligonucleotide substrate
ugcuccggaucccacaa

SEQ ID NO: 2919 - RNA, 17 nt, Artificial Sequence
  Description of Artificial Sequence:  Nucleic Acid
  misc_feature: oligonucleotide substrate
cggaucccacaagccgu

SEQ ID NO: 2920 - RNA, 17 nt, Artificial Sequence
  Description of Artificial Sequence:  Nucleic Acid
  misc_feature: oligonucleotide substrate
ucccacaagccgucgug

SEQ ID NO: 2921 - RNA, 17 nt, Artificial Sequence
  Description of Artificial Sequence:  Nucleic Acid
  misc_feature: oligonucleotide substrate
cacaagccgucguggac

SEQ ID NO: 2922 - RNA, 17 nt, Artificial Sequence
  Description of Artificial Sequence:  Nucleic Acid
  misc_feature: oligonucleotide substrate
aagccgucguggacaug

SEQ ID NO: 2923 - RNA, 17 nt, Artificial Sequence
  Description of Artificial Sequence:  Nucleic Acid
  misc_feature: oligonucleotide substrate
cgucguggacauggugg

SEQ ID NO: 2924 - RNA, 17 nt, Artificial Sequence
  Description of Artificial Sequence:  Nucleic Acid
  misc_feature: oligonucleotide substrate
ucguggacaugguggcg

SEQ ID NO: 2925 - RNA, 17 nt, Artificial Sequence
  Description of Artificial Sequence:  Nucleic Acid
  misc_feature: oligonucleotide substrate
uggacaugguggcgggg

SEQ ID NO: 2926 - RNA, 17 nt, Artificial Sequence
  Description of Artificial Sequence:  Nucleic Acid
  misc_feature: oligonucleotide substrate
acaugguggcgggggcc

SEQ ID NO: 2927 - RNA, 17 nt, Artificial Sequence
  Description of Artificial Sequence:  Nucleic Acid
  misc_feature: oligonucleotide substrate
uggcgggggcccacugg

SEQ ID NO: 2928 - RNA, 17 nt, Artificial Sequence
  Description of Artificial Sequence:  Nucleic Acid
  misc_feature: oligonucleotide substrate
gggggcccacuggggag

SEQ ID NO: 2929 - RNA, 17 nt, Artificial Sequence
  Description of Artificial Sequence:  Nucleic Acid
  misc_feature: oligonucleotide substrate
acuggggaguccuggcg

SEQ ID NO: 2930 - RNA, 17 nt, Artificial Sequence
  Description of Artificial Sequence:  Nucleic Acid
  misc_feature: oligonucleotide substrate
gaguccuggcgggccuu

SEQ ID NO: 2931 - RNA, 17 nt, Artificial Sequence
  Description of Artificial Sequence:  Nucleic Acid
  misc_feature: oligonucleotide substrate
ccuggcgggccuugccu

SEQ ID NO: 2932 - RNA, 17 nt, Artificial Sequence
  Description of Artificial Sequence:  Nucleic Acid
  misc_feature: oligonucleotide substrate
cgggccuugccuauuau

SEQ ID NO: 2933 - RNA, 17 nt, Artificial Sequence
  Description of Artificial Sequence:  Nucleic Acid
  misc_feature: oligonucleotide substrate
ccuugccuauuauucca

SEQ ID NO: 2934 - RNA, 17 nt, Artificial Sequence
  Description of Artificial Sequence:  Nucleic Acid
  misc_feature: oligonucleotide substrate
ugccuauuauuccaugg

SEQ ID NO: 2935 - RNA, 17 nt, Artificial Sequence
  Description of Artificial Sequence:  Nucleic Acid
  misc_feature: oligonucleotide substrate
auuauuccauggugggg

SEQ ID NO: 2936 - RNA, 17 nt, Artificial Sequence
  Description of Artificial Sequence:  Nucleic Acid
  misc_feature: oligonucleotide substrate
auuccaugguggggaac

SEQ ID NO: 2937 - RNA, 17 nt, Artificial Sequence
  Description of Artificial Sequence:  Nucleic Acid
  misc_feature: oligonucleotide substrate
gguggggaacugggcua

SEQ ID NO: 2938 - RNA, 17 nt, Artificial Sequence
  Description of Artificial Sequence:  Nucleic Acid
  misc_feature: oligonucleotide substrate
ggaacugggcuaaggug

SEQ ID NO: 2939 - RNA, 17 nt, Artificial Sequence
  Description of Artificial Sequence:  Nucleic Acid
  misc_feature: oligonucleotide substrate
gggcuaagguguugauu

SEQ ID NO: 2940 - RNA, 17 nt, Artificial Sequence
  Description of Artificial Sequence:  Nucleic Acid
  misc_feature: oligonucleotide substrate
gcuaagguguugauugu

SEQ ID NO: 2941 - RNA, 17 nt, Artificial Sequence
  Description of Artificial Sequence:  Nucleic Acid
  misc_feature: oligonucleotide substrate
agguguugauugugaug

SEQ ID NO: 2942 - RNA, 17 nt, Artificial Sequence
  Description of Artificial Sequence:  Nucleic Acid
  misc_feature: oligonucleotide substrate
uguugauugugaugcua

SEQ ID NO: 2943 - RNA, 17 nt, Artificial Sequence
  Description of Artificial Sequence:  Nucleic Acid
  misc_feature: oligonucleotide substrate
ugauugugaugcuacuc

SEQ ID NO: 2944 - RNA, 17 nt, Artificial Sequence
  Description of Artificial Sequence:  Nucleic Acid
  misc_feature: oligonucleotide substrate
auugugaugcuacucuu

SEQ ID NO: 2945 - RNA, 17 nt, Artificial Sequence
  Description of Artificial Sequence:  Nucleic Acid
  misc_feature: oligonucleotide substrate
gugaugcuacucuuugc

SEQ ID NO: 2946 - RNA, 17 nt, Artificial Sequence
  Description of Artificial Sequence:  Nucleic Acid
  misc_feature: oligonucleotide substrate
uacucuuugccggcguu

SEQ ID NO: 2947 - RNA, 17 nt, Artificial Sequence
  Description of Artificial Sequence:  Nucleic Acid
  misc_feature: oligonucleotide substrate
cuuugccggcguugacg

SEQ ID NO: 2948 - RNA, 17 nt, Artificial Sequence
  Description of Artificial Sequence:  Nucleic Acid
  misc_feature: oligonucleotide substrate
uugccggcguugacggg

SEQ ID NO: 2949 - RNA, 17 nt, Artificial Sequence
  Description of Artificial Sequence:  Nucleic Acid
  misc_feature: oligonucleotide substrate
cggcguugacggggaca

SEQ ID NO: 2950 - RNA, 17 nt, Artificial Sequence
  Description of Artificial Sequence:  Nucleic Acid
  misc_feature: oligonucleotide substrate
ugacggggacaccuaca

SEQ ID NO: 2951 - RNA, 17 nt, Artificial Sequence
  Description of Artificial Sequence:  Nucleic Acid
  misc_feature: oligonucleotide substrate
acggggacaccuacacg

SEQ ID NO: 2952 - RNA, 17 nt, Artificial Sequence
  Description of Artificial Sequence:  Nucleic Acid
  misc_feature: oligonucleotide substrate
ggacaccuacacgacag

SEQ ID NO: 2953 - RNA, 17 nt, Artificial Sequence
  Description of Artificial Sequence:  Nucleic Acid
  misc_feature: oligonucleotide substrate
acaccuacacgacaggg

SEQ ID NO: 2954 - RNA, 17 nt, Artificial Sequence
  Description of Artificial Sequence:  Nucleic Acid
  misc_feature: oligonucleotide substrate
ccuacacgacagggggg

SEQ ID NO: 2955 - RNA, 17 nt, Artificial Sequence
  Description of Artificial Sequence:  Nucleic Acid
  misc_feature: oligonucleotide substrate
cagggggggcgcagggc

SEQ ID NO: 2956 - RNA, 17 nt, Artificial Sequence
  Description of Artificial Sequence:  Nucleic Acid
  misc_feature: oligonucleotide substrate
gggggggcgcagggcca

SEQ ID NO: 2957 - RNA, 17 nt, Artificial Sequence
  Description of Artificial Sequence:  Nucleic Acid
  misc_feature: oligonucleotide substrate
ggcgcagggccacacca

SEQ ID NO: 2958 - RNA, 17 nt, Artificial Sequence
  Description of Artificial Sequence:  Nucleic Acid
  misc_feature: oligonucleotide substrate
gcagggccacaccacua

SEQ ID NO: 2959 - RNA, 17 nt, Artificial Sequence
  Description of Artificial Sequence:  Nucleic Acid
  misc_feature: oligonucleotide substrate
agggccacaccacuagu

SEQ ID NO: 2960 - RNA, 17 nt, Artificial Sequence
  Description of Artificial Sequence:  Nucleic Acid
  misc_feature: oligonucleotide substrate
gccacaccacuaguagg

SEQ ID NO: 2961 - RNA, 17 nt, Artificial Sequence
  Description of Artificial Sequence:  Nucleic Acid
  misc_feature: oligonucleotide substrate
caccacuaguagggugg

SEQ ID NO: 2962 - RNA, 17 nt, Artificial Sequence
  Description of Artificial Sequence:  Nucleic Acid
  misc_feature: oligonucleotide substrate
cuaguaggguggcaucc

SEQ ID NO: 2963 - RNA, 17 nt, Artificial Sequence
  Description of Artificial Sequence:  Nucleic Acid
  misc_feature: oligonucleotide substrate
guaggguggcaucccuc

SEQ ID NO: 2964 - RNA, 17 nt, Artificial Sequence
  Description of Artificial Sequence:  Nucleic Acid
  misc_feature: oligonucleotide substrate
aggguggcaucccucuu

SEQ ID NO: 2965 - RNA, 17 nt, Artificial Sequence
  Description of Artificial Sequence:  Nucleic Acid
  misc_feature: oligonucleotide substrate
cccucuuuacaucugga

SEQ ID NO: 2966 - RNA, 17 nt, Artificial Sequence
  Description of Artificial Sequence:  Nucleic Acid
  misc_feature: oligonucleotide substrate
cucuuuacaucuggagc

SEQ ID NO: 2967 - RNA, 17 nt, Artificial Sequence
  Description of Artificial Sequence:  Nucleic Acid
  misc_feature: oligonucleotide substrate
caucuggagcaucucag

SEQ ID NO: 2968 - RNA, 17 nt, Artificial Sequence
  Description of Artificial Sequence:  Nucleic Acid
  misc_feature: oligonucleotide substrate
ucuggagcaucucagaa

SEQ ID NO: 2969 - RNA, 17 nt, Artificial Sequence
  Description of Artificial Sequence:  Nucleic Acid
  misc_feature: oligonucleotide substrate
aucucagaauauccagc

SEQ ID NO: 2970 - RNA, 17 nt, Artificial Sequence
  Description of Artificial Sequence:  Nucleic Acid
  misc_feature: oligonucleotide substrate
cucagaauauccagcuu

SEQ ID NO: 2971 - RNA, 17 nt, Artificial Sequence
  Description of Artificial Sequence:  Nucleic Acid
  misc_feature: oligonucleotide substrate
aauauccagcuuauuaa

SEQ ID NO: 2972 - RNA, 17 nt, Artificial Sequence
  Description of Artificial Sequence:  Nucleic Acid
  misc_feature: oligonucleotide substrate
uccagcuuauuaacacc

SEQ ID NO: 2973 - RNA, 17 nt, Artificial Sequence
  Description of Artificial Sequence:  Nucleic Acid
  misc_feature: oligonucleotide substrate
gcuuauuaacaccaacg

SEQ ID NO: 2974 - RNA, 17 nt, Artificial Sequence
  Description of Artificial Sequence:  Nucleic Acid
  misc_feature: oligonucleotide substrate
uuauuaacaccaacggc

SEQ ID NO: 2975 - RNA, 17 nt, Artificial Sequence
  Description of Artificial Sequence:  Nucleic Acid
  misc_feature: oligonucleotide substrate
uaacaccaacggcagcu

SEQ ID NO: 2976 - RNA, 17 nt, Artificial Sequence
  Description of Artificial Sequence:  Nucleic Acid
  misc_feature: oligonucleotide substrate
caccaacggcagcuggc

SEQ ID NO: 2977 - RNA, 17 nt, Artificial Sequence
  Description of Artificial Sequence:  Nucleic Acid
  misc_feature: oligonucleotide substrate
caacggcagcuggcaca

SEQ ID NO: 2978 - RNA, 17 nt, Artificial Sequence
  Description of Artificial Sequence:  Nucleic Acid
  misc_feature: oligonucleotide substrate
ggcagcuggcacauuaa

SEQ ID NO: 2979 - RNA, 17 nt, Artificial Sequence
  Description of Artificial Sequence:  Nucleic Acid
  misc_feature: oligonucleotide substrate
cagcuggcacauuaaca

SEQ ID NO: 2980 - RNA, 17 nt, Artificial Sequence
  Description of Artificial Sequence:  Nucleic Acid
  misc_feature: oligonucleotide substrate
gcuggcacauuaacagg

SEQ ID NO: 2981 - RNA, 17 nt, Artificial Sequence
  Description of Artificial Sequence:  Nucleic Acid
  misc_feature: oligonucleotide substrate
gcacauuaacaggacug

SEQ ID NO: 2982 - RNA, 17 nt, Artificial Sequence
  Description of Artificial Sequence:  Nucleic Acid
  misc_feature: oligonucleotide substrate
uuaacaggacugcccug

SEQ ID NO: 2983 - RNA, 17 nt, Artificial Sequence
  Description of Artificial Sequence:  Nucleic Acid
  misc_feature: oligonucleotide substrate
acaggacugcccugaac

SEQ ID NO: 2984 - RNA, 17 nt, Artificial Sequence
  Description of Artificial Sequence:  Nucleic Acid
  misc_feature: oligonucleotide substrate
ugcccugaacugcaaug

SEQ ID NO: 2985 - RNA, 17 nt, Artificial Sequence
  Description of Artificial Sequence:  Nucleic Acid
  misc_feature: oligonucleotide substrate
ccugaacugcaaugacu

SEQ ID NO: 2986 - RNA, 17 nt, Artificial Sequence
  Description of Artificial Sequence:  Nucleic Acid
  misc_feature: oligonucleotide substrate
gaacugcaaugacuccc

SEQ ID NO: 2987 - RNA, 17 nt, Artificial Sequence
  Description of Artificial Sequence:  Nucleic Acid
  misc_feature: oligonucleotide substrate
cugcaaugacucccucc

SEQ ID NO: 2988 - RNA, 17 nt, Artificial Sequence
  Description of Artificial Sequence:  Nucleic Acid
  misc_feature: oligonucleotide substrate
cccuccaaaccggguuc

SEQ ID NO: 2989 - RNA, 17 nt, Artificial Sequence
  Description of Artificial Sequence:  Nucleic Acid
  misc_feature: oligonucleotide substrate
caaaccggguucauugc

SEQ ID NO: 2990 - RNA, 17 nt, Artificial Sequence
  Description of Artificial Sequence:  Nucleic Acid
  misc_feature: oligonucleotide substrate
ccggguucauugcugca

SEQ ID NO: 2991 - RNA, 17 nt, Artificial Sequence
  Description of Artificial Sequence:  Nucleic Acid
  misc_feature: oligonucleotide substrate
gguucauugcugcacug

SEQ ID NO: 2992 - RNA, 17 nt, Artificial Sequence
  Description of Artificial Sequence:  Nucleic Acid
  misc_feature: oligonucleotide substrate
ucauugcugcacuguuc

SEQ ID NO: 2993 - RNA, 17 nt, Artificial Sequence
  Description of Artificial Sequence:  Nucleic Acid
  misc_feature: oligonucleotide substrate
auugcugcacuguucua

SEQ ID NO: 2994 - RNA, 17 nt, Artificial Sequence
  Description of Artificial Sequence:  Nucleic Acid
  misc_feature: oligonucleotide substrate
gcugcacuguucuaugc

SEQ ID NO: 2995 - RNA, 17 nt, Artificial Sequence
  Description of Artificial Sequence:  Nucleic Acid
  misc_feature: oligonucleotide substrate
acuguucuaugcacaca

SEQ ID NO: 2996 - RNA, 17 nt, Artificial Sequence
  Description of Artificial Sequence:  Nucleic Acid
  misc_feature: oligonucleotide substrate
uguucuaugcacacagg

SEQ ID NO: 2997 - RNA, 17 nt, Artificial Sequence
  Description of Artificial Sequence:  Nucleic Acid
  misc_feature: oligonucleotide substrate
uucuaugcacacagguu

SEQ ID NO: 2998 - RNA, 17 nt, Artificial Sequence
  Description of Artificial Sequence:  Nucleic Acid
  misc_feature: oligonucleotide substrate
cuaugcacacagguuca

SEQ ID NO: 2999 - RNA, 17 nt, Artificial Sequence
  Description of Artificial Sequence:  Nucleic Acid
  misc_feature: oligonucleotide substrate
gcacacagguucaacuc

SEQ ID NO: 3000 - RNA, 17 nt, Artificial Sequence
  Description of Artificial Sequence:  Nucleic Acid
  misc_feature: oligonucleotide substrate
cagguucaacucguccg

SEQ ID NO: 3001 - RNA, 17 nt, Artificial Sequence
  Description of Artificial Sequence:  Nucleic Acid
  misc_feature: oligonucleotide substrate
uucaacucguccggaug

SEQ ID NO: 3002 - RNA, 17 nt, Artificial Sequence
  Description of Artificial Sequence:  Nucleic Acid
  misc_feature: oligonucleotide substrate
ucguccggaugcccaca

SEQ ID NO: 3003 - RNA, 17 nt, Artificial Sequence
  Description of Artificial Sequence:  Nucleic Acid
  misc_feature: oligonucleotide substrate
guccggaugcccacagc

SEQ ID NO: 3004 - RNA, 17 nt, Artificial Sequence
  Description of Artificial Sequence:  Nucleic Acid
  misc_feature: oligonucleotide substrate
ggaugcccacagcgcuu

SEQ ID NO: 3005 - RNA, 17 nt, Artificial Sequence
  Description of Artificial Sequence:  Nucleic Acid
  misc_feature: oligonucleotide substrate
ugcccacagcgcuuggc

SEQ ID NO: 3006 - RNA, 17 nt, Artificial Sequence
  Description of Artificial Sequence:  Nucleic Acid
  misc_feature: oligonucleotide substrate
cccacagcgcuuggcca

SEQ ID NO: 3007 - RNA, 17 nt, Artificial Sequence
  Description of Artificial Sequence:  Nucleic Acid
  misc_feature: oligonucleotide substrate
agcgcuuggccagcugc

SEQ ID NO: 3008 - RNA, 17 nt, Artificial Sequence
  Description of Artificial Sequence:  Nucleic Acid
  misc_feature: oligonucleotide substrate
cuuggccagcugccgcu

SEQ ID NO: 3009 - RNA, 17 nt, Artificial Sequence
  Description of Artificial Sequence:  Nucleic Acid
  misc_feature: oligonucleotide substrate
ggccagcugccgcucca

SEQ ID NO: 3010 - RNA, 17 nt, Artificial Sequence
  Description of Artificial Sequence:  Nucleic Acid
  misc_feature: oligonucleotide substrate
cagcugccgcuccauug

SEQ ID NO: 3011 - RNA, 17 nt, Artificial Sequence
  Description of Artificial Sequence:  Nucleic Acid
  misc_feature: oligonucleotide substrate
gccgcuccauugacaag

SEQ ID NO: 3012 - RNA, 17 nt, Artificial Sequence
  Description of Artificial Sequence:  Nucleic Acid
  misc_feature: oligonucleotide substrate
cuccauugacaaguucg

SEQ ID NO: 3013 - RNA, 17 nt, Artificial Sequence
  Description of Artificial Sequence:  Nucleic Acid
  misc_feature: oligonucleotide substrate
auugacaaguucgcuca

SEQ ID NO: 3014 - RNA, 17 nt, Artificial Sequence
  Description of Artificial Sequence:  Nucleic Acid
  misc_feature: oligonucleotide substrate
acaaguucgcucagggg

SEQ ID NO: 3015 - RNA, 17 nt, Artificial Sequence
  Description of Artificial Sequence:  Nucleic Acid
  misc_feature: oligonucleotide substrate
gcucagggguggggucc

SEQ ID NO: 3016 - RNA, 17 nt, Artificial Sequence
  Description of Artificial Sequence:  Nucleic Acid
  misc_feature: oligonucleotide substrate
ggggugggguccuauca

SEQ ID NO: 3017 - RNA, 17 nt, Artificial Sequence
  Description of Artificial Sequence:  Nucleic Acid
  misc_feature: oligonucleotide substrate
gggguccuaucaccuac

SEQ ID NO: 3018 - RNA, 17 nt, Artificial Sequence
  Description of Artificial Sequence:  Nucleic Acid
  misc_feature: oligonucleotide substrate
guccuaucaccuacacc

SEQ ID NO: 3019 - RNA, 17 nt, Artificial Sequence
  Description of Artificial Sequence:  Nucleic Acid
  misc_feature: oligonucleotide substrate
uaucaccuacaccgagg

SEQ ID NO: 3020 - RNA, 17 nt, Artificial Sequence
  Description of Artificial Sequence:  Nucleic Acid
  misc_feature: oligonucleotide substrate
ucaccuacaccgagggc

SEQ ID NO: 3021 - RNA, 17 nt, Artificial Sequence
  Description of Artificial Sequence:  Nucleic Acid
  misc_feature: oligonucleotide substrate
caccgagggccacaacu

SEQ ID NO: 3022 - RNA, 17 nt, Artificial Sequence
  Description of Artificial Sequence:  Nucleic Acid
  misc_feature: oligonucleotide substrate
cgagggccacaacucgg

SEQ ID NO: 3023 - RNA, 17 nt, Artificial Sequence
  Description of Artificial Sequence:  Nucleic Acid
  misc_feature: oligonucleotide substrate
gggccacaacucggacc

SEQ ID NO: 3024 - RNA, 17 nt, Artificial Sequence
  Description of Artificial Sequence:  Nucleic Acid
  misc_feature: oligonucleotide substrate
caacucggaccagaggc

SEQ ID NO: 3025 - RNA, 17 nt, Artificial Sequence
  Description of Artificial Sequence:  Nucleic Acid
  misc_feature: oligonucleotide substrate
gaccagaggcccuauug

SEQ ID NO: 3026 - RNA, 17 nt, Artificial Sequence
  Description of Artificial Sequence:  Nucleic Acid
  misc_feature: oligonucleotide substrate
gaggcccuauugcuggc

SEQ ID NO: 3027 - RNA, 17 nt, Artificial Sequence
  Description of Artificial Sequence:  Nucleic Acid
  misc_feature: oligonucleotide substrate
gcccuauugcuggcacu

SEQ ID NO: 3028 - RNA, 17 nt, Artificial Sequence
  Description of Artificial Sequence:  Nucleic Acid
  misc_feature: oligonucleotide substrate
uauugcuggcacuacgc

SEQ ID NO: 3029 - RNA, 17 nt, Artificial Sequence
  Description of Artificial Sequence:  Nucleic Acid
  misc_feature: oligonucleotide substrate
uugcuggcacuacgcac

SEQ ID NO: 3030 - RNA, 17 nt, Artificial Sequence
  Description of Artificial Sequence:  Nucleic Acid
  misc_feature: oligonucleotide substrate
cuggcacuacgcaccgc

SEQ ID NO: 3031 - RNA, 17 nt, Artificial Sequence
  Description of Artificial Sequence:  Nucleic Acid
  misc_feature: oligonucleotide substrate
ggcacuacgcaccgcgg

SEQ ID NO: 3032 - RNA, 17 nt, Artificial Sequence
  Description of Artificial Sequence:  Nucleic Acid
  misc_feature: oligonucleotide substrate
cacuacgcaccgcggcc

SEQ ID NO: 3033 - RNA, 17 nt, Artificial Sequence
  Description of Artificial Sequence:  Nucleic Acid
  misc_feature: oligonucleotide substrate
uacgcaccgcggccgug

SEQ ID NO: 3034 - RNA, 17 nt, Artificial Sequence
  Description of Artificial Sequence:  Nucleic Acid
  misc_feature: oligonucleotide substrate
gcaccgcggccgugugg

SEQ ID NO: 3035 - RNA, 17 nt, Artificial Sequence
  Description of Artificial Sequence:  Nucleic Acid
  misc_feature: oligonucleotide substrate
ccgcggccgugugguau

SEQ ID NO: 3036 - RNA, 17 nt, Artificial Sequence
  Description of Artificial Sequence:  Nucleic Acid
  misc_feature: oligonucleotide substrate
gcggccgugugguaucg

SEQ ID NO: 3037 - RNA, 17 nt, Artificial Sequence
  Description of Artificial Sequence:  Nucleic Acid
  misc_feature: oligonucleotide substrate
gccgugugguaucguac

SEQ ID NO: 3038 - RNA, 17 nt, Artificial Sequence
  Description of Artificial Sequence:  Nucleic Acid
  misc_feature: oligonucleotide substrate
cgugugguaucguaccc

SEQ ID NO: 3039 - RNA, 17 nt, Artificial Sequence
  Description of Artificial Sequence:  Nucleic Acid
  misc_feature: oligonucleotide substrate
gugguaucguacccgca

SEQ ID NO: 3040 - RNA, 17 nt, Artificial Sequence
  Description of Artificial Sequence:  Nucleic Acid
  misc_feature: oligonucleotide substrate
gguaucguacccgcauc

SEQ ID NO: 3041 - RNA, 17 nt, Artificial Sequence
  Description of Artificial Sequence:  Nucleic Acid
  misc_feature: oligonucleotide substrate
ucguacccgcaucgcag

SEQ ID NO: 3042 - RNA, 17 nt, Artificial Sequence
  Description of Artificial Sequence:  Nucleic Acid
  misc_feature: oligonucleotide substrate
guacccgcaucgcaggu

SEQ ID NO: 3043 - RNA, 17 nt, Artificial Sequence
  Description of Artificial Sequence:  Nucleic Acid
  misc_feature: oligonucleotide substrate
cccgcaucgcagguaug

SEQ ID NO: 3044 - RNA, 17 nt, Artificial Sequence
  Description of Artificial Sequence:  Nucleic Acid
  misc_feature: oligonucleotide substrate
caucgcagguauguggu

SEQ ID NO: 3045 - RNA, 17 nt, Artificial Sequence
  Description of Artificial Sequence:  Nucleic Acid
  misc_feature: oligonucleotide substrate
ucgcagguauguggucc

SEQ ID NO: 3046 - RNA, 17 nt, Artificial Sequence
  Description of Artificial Sequence:  Nucleic Acid
  misc_feature: oligonucleotide substrate
gcagguaugugguccag

SEQ ID NO: 3047 - RNA, 17 nt, Artificial Sequence
  Description of Artificial Sequence:  Nucleic Acid
  misc_feature: oligonucleotide substrate
gguaugugguccagugu

SEQ ID NO: 3048 - RNA, 17 nt, Artificial Sequence
  Description of Artificial Sequence:  Nucleic Acid
  misc_feature: oligonucleotide substrate
gugguccaguguauugc

SEQ ID NO: 3049 - RNA, 17 nt, Artificial Sequence
  Description of Artificial Sequence:  Nucleic Acid
  misc_feature: oligonucleotide substrate
gguccaguguauugcuu

SEQ ID NO: 3050 - RNA, 17 nt, Artificial Sequence
  Description of Artificial Sequence:  Nucleic Acid
  misc_feature: oligonucleotide substrate
uccaguguauugcuuca

SEQ ID NO: 3051 - RNA, 17 nt, Artificial Sequence
  Description of Artificial Sequence:  Nucleic Acid
  misc_feature: oligonucleotide substrate
aguguauugcuucaccc

SEQ ID NO: 3052 - RNA, 17 nt, Artificial Sequence
  Description of Artificial Sequence:  Nucleic Acid
  misc_feature: oligonucleotide substrate
auugcuucaccccaagc

SEQ ID NO: 3053 - RNA, 17 nt, Artificial Sequence
  Description of Artificial Sequence:  Nucleic Acid
  misc_feature: oligonucleotide substrate
caccccaagcccuguug

SEQ ID NO: 3054 - RNA, 17 nt, Artificial Sequence
  Description of Artificial Sequence:  Nucleic Acid
  misc_feature: oligonucleotide substrate
caagcccuguuguggug

SEQ ID NO: 3055 - RNA, 17 nt, Artificial Sequence
  Description of Artificial Sequence:  Nucleic Acid
  misc_feature: oligonucleotide substrate
gcccuguuguggugggg

SEQ ID NO: 3056 - RNA, 17 nt, Artificial Sequence
  Description of Artificial Sequence:  Nucleic Acid
  misc_feature: oligonucleotide substrate
cuguugugguggggacg

SEQ ID NO: 3057 - RNA, 17 nt, Artificial Sequence
  Description of Artificial Sequence:  Nucleic Acid
  misc_feature: oligonucleotide substrate
ugguggggacgaccgac

SEQ ID NO: 3058 - RNA, 17 nt, Artificial Sequence
  Description of Artificial Sequence:  Nucleic Acid
  misc_feature: oligonucleotide substrate
uggggacgaccgaccgu

SEQ ID NO: 3059 - RNA, 17 nt, Artificial Sequence
  Description of Artificial Sequence:  Nucleic Acid
  misc_feature: oligonucleotide substrate
gacgaccgaccguuucg

SEQ ID NO: 3060 - RNA, 17 nt, Artificial Sequence
  Description of Artificial Sequence:  Nucleic Acid
  misc_feature: oligonucleotide substrate
gaccgaccguuucggcg

SEQ ID NO: 3061 - RNA, 17 nt, Artificial Sequence
  Description of Artificial Sequence:  Nucleic Acid
  misc_feature: oligonucleotide substrate
ccguuucggcgccccca

SEQ ID NO: 3062 - RNA, 17 nt, Artificial Sequence
  Description of Artificial Sequence:  Nucleic Acid
  misc_feature: oligonucleotide substrate
guuucggcgcccccacg

SEQ ID NO: 3063 - RNA, 17 nt, Artificial Sequence
  Description of Artificial Sequence:  Nucleic Acid
  misc_feature: oligonucleotide substrate
gcgcccccacguauaac

SEQ ID NO: 3064 - RNA, 17 nt, Artificial Sequence
  Description of Artificial Sequence:  Nucleic Acid
  misc_feature: oligonucleotide substrate
gcccccacguauaacug

SEQ ID NO: 3065 - RNA, 17 nt, Artificial Sequence
  Description of Artificial Sequence:  Nucleic Acid
  misc_feature: oligonucleotide substrate
ccccacguauaacuggg

SEQ ID NO: 3066 - RNA, 17 nt, Artificial Sequence
  Description of Artificial Sequence:  Nucleic Acid
  misc_feature: oligonucleotide substrate
cacguauaacugggggg

SEQ ID NO: 3067 - RNA, 17 nt, Artificial Sequence
  Description of Artificial Sequence:  Nucleic Acid
  misc_feature: oligonucleotide substrate
acuggggggcgaacgag

SEQ ID NO: 3068 - RNA, 17 nt, Artificial Sequence
  Description of Artificial Sequence:  Nucleic Acid
  misc_feature: oligonucleotide substrate
gggggcgaacgagacgg

SEQ ID NO: 3069 - RNA, 17 nt, Artificial Sequence
  Description of Artificial Sequence:  Nucleic Acid
  misc_feature: oligonucleotide substrate
cgaacgagacggacgug

SEQ ID NO: 3070 - RNA, 17 nt, Artificial Sequence
  Description of Artificial Sequence:  Nucleic Acid
  misc_feature: oligonucleotide substrate
cgagacggacgugcugc

SEQ ID NO: 3071 - RNA, 17 nt, Artificial Sequence
  Description of Artificial Sequence:  Nucleic Acid
  misc_feature: oligonucleotide substrate
agacggacgugcugcuc

SEQ ID NO: 3072 - RNA, 17 nt, Artificial Sequence
  Description of Artificial Sequence:  Nucleic Acid
  misc_feature: oligonucleotide substrate
acggacgugcugcuccu

SEQ ID NO: 3073 - RNA, 17 nt, Artificial Sequence
  Description of Artificial Sequence:  Nucleic Acid
  misc_feature: oligonucleotide substrate
gacgugcugcuccucaa

SEQ ID NO: 3074 - RNA, 17 nt, Artificial Sequence
  Description of Artificial Sequence:  Nucleic Acid
  misc_feature: oligonucleotide substrate
gcuccucaacaacacgc

SEQ ID NO: 3075 - RNA, 17 nt, Artificial Sequence
  Description of Artificial Sequence:  Nucleic Acid
  misc_feature: oligonucleotide substrate
ccucaacaacacgcggc

SEQ ID NO: 3076 - RNA, 17 nt, Artificial Sequence
  Description of Artificial Sequence:  Nucleic Acid
  misc_feature: oligonucleotide substrate
ucaacaacacgcggccg

SEQ ID NO: 3077 - RNA, 17 nt, Artificial Sequence
  Description of Artificial Sequence:  Nucleic Acid
  misc_feature: oligonucleotide substrate
aacaacacgcggccgcc

SEQ ID NO: 3078 - RNA, 17 nt, Artificial Sequence
  Description of Artificial Sequence:  Nucleic Acid
  misc_feature: oligonucleotide substrate
aacacgcggccgccgca

SEQ ID NO: 3079 - RNA, 17 nt, Artificial Sequence
  Description of Artificial Sequence:  Nucleic Acid
  misc_feature: oligonucleotide substrate
acgcggccgccgcaagg

SEQ ID NO: 3080 - RNA, 17 nt, Artificial Sequence
  Description of Artificial Sequence:  Nucleic Acid
  misc_feature: oligonucleotide substrate
cggccgccgcaaggcaa

SEQ ID NO: 3081 - RNA, 17 nt, Artificial Sequence
  Description of Artificial Sequence:  Nucleic Acid
  misc_feature: oligonucleotide substrate
gccgcaaggcaacuggu

SEQ ID NO: 3082 - RNA, 17 nt, Artificial Sequence
  Description of Artificial Sequence:  Nucleic Acid
  misc_feature: oligonucleotide substrate
gcaaggcaacugguucg

SEQ ID NO: 3083 - RNA, 17 nt, Artificial Sequence
  Description of Artificial Sequence:  Nucleic Acid
  misc_feature: oligonucleotide substrate
ggcaacugguucggcug

SEQ ID NO: 3084 - RNA, 17 nt, Artificial Sequence
  Description of Artificial Sequence:  Nucleic Acid
  misc_feature: oligonucleotide substrate
cugguucggcugcacau

SEQ ID NO: 3085 - RNA, 17 nt, Artificial Sequence
  Description of Artificial Sequence:  Nucleic Acid
  misc_feature: oligonucleotide substrate
guucggcugcacaugga

SEQ ID NO: 3086 - RNA, 17 nt, Artificial Sequence
  Description of Artificial Sequence:  Nucleic Acid
  misc_feature: oligonucleotide substrate
ucggcugcacauggaug

SEQ ID NO: 3087 - RNA, 17 nt, Artificial Sequence
  Description of Artificial Sequence:  Nucleic Acid
  misc_feature: oligonucleotide substrate
ggcugcacauggaugaa

SEQ ID NO: 3088 - RNA, 17 nt, Artificial Sequence
  Description of Artificial Sequence:  Nucleic Acid
  misc_feature: oligonucleotide substrate
gcacauggaugaauggc

SEQ ID NO: 3089 - RNA, 17 nt, Artificial Sequence
  Description of Artificial Sequence:  Nucleic Acid
  misc_feature: oligonucleotide substrate
auggaugaauggcacug

SEQ ID NO: 3090 - RNA, 17 nt, Artificial Sequence
  Description of Artificial Sequence:  Nucleic Acid
  misc_feature: oligonucleotide substrate
gaugaauggcacugggu

SEQ ID NO: 3091 - RNA, 17 nt, Artificial Sequence
  Description of Artificial Sequence:  Nucleic Acid
  misc_feature: oligonucleotide substrate
ugaauggcacuggguuc

SEQ ID NO: 3092 - RNA, 17 nt, Artificial Sequence
  Description of Artificial Sequence:  Nucleic Acid
  misc_feature: oligonucleotide substrate
ggcacuggguucaccaa

SEQ ID NO: 3093 - RNA, 17 nt, Artificial Sequence
  Description of Artificial Sequence:  Nucleic Acid
  misc_feature: oligonucleotide substrate
cuggguucaccaagacg

SEQ ID NO: 3094 - RNA, 17 nt, Artificial Sequence
  Description of Artificial Sequence:  Nucleic Acid
  misc_feature: oligonucleotide substrate
ucaccaagacgugcggg

SEQ ID NO: 3095 - RNA, 17 nt, Artificial Sequence
  Description of Artificial Sequence:  Nucleic Acid
  misc_feature: oligonucleotide substrate
accaagacgugcggggg

SEQ ID NO: 3096 - RNA, 17 nt, Artificial Sequence
  Description of Artificial Sequence:  Nucleic Acid
  misc_feature: oligonucleotide substrate
caagacgugcgggggcc

SEQ ID NO: 3097 - RNA, 17 nt, Artificial Sequence
  Description of Artificial Sequence:  Nucleic Acid
  misc_feature: oligonucleotide substrate
gugcgggggccccccgu

SEQ ID NO: 3098 - RNA, 17 nt, Artificial Sequence
  Description of Artificial Sequence:  Nucleic Acid
  misc_feature: oligonucleotide substrate
ggccccccgugcaacau

SEQ ID NO: 3099 - RNA, 17 nt, Artificial Sequence
  Description of Artificial Sequence:  Nucleic Acid
  misc_feature: oligonucleotide substrate
ccccccgugcaacaucg

SEQ ID NO: 3100 - RNA, 17 nt, Artificial Sequence
  Description of Artificial Sequence:  Nucleic Acid
  misc_feature: oligonucleotide substrate
cccgugcaacaucgggg

SEQ ID NO: 3101 - RNA, 17 nt, Artificial Sequence
  Description of Artificial Sequence:  Nucleic Acid
  misc_feature: oligonucleotide substrate
cgugcaacaucgggggg

SEQ ID NO: 3102 - RNA, 17 nt, Artificial Sequence
  Description of Artificial Sequence:  Nucleic Acid
  misc_feature: oligonucleotide substrate
ucgggggggccgguaac

SEQ ID NO: 3103 - RNA, 17 nt, Artificial Sequence
  Description of Artificial Sequence:  Nucleic Acid
  misc_feature: oligonucleotide substrate
gggggccgguaacgaca

SEQ ID NO: 3104 - RNA, 17 nt, Artificial Sequence
  Description of Artificial Sequence:  Nucleic Acid
  misc_feature: oligonucleotide substrate
ggccgguaacgacaccu

SEQ ID NO: 3105 - RNA, 17 nt, Artificial Sequence
  Description of Artificial Sequence:  Nucleic Acid
  misc_feature: oligonucleotide substrate
cgguaacgacaccuuaa

SEQ ID NO: 3106 - RNA, 17 nt, Artificial Sequence
  Description of Artificial Sequence:  Nucleic Acid
  misc_feature: oligonucleotide substrate
guaacgacaccuuaacc

SEQ ID NO: 3107 - RNA, 17 nt, Artificial Sequence
  Description of Artificial Sequence:  Nucleic Acid
  misc_feature: oligonucleotide substrate
acaccuuaaccugcccc

SEQ ID NO: 3108 - RNA, 17 nt, Artificial Sequence
  Description of Artificial Sequence:  Nucleic Acid
  misc_feature: oligonucleotide substrate
cuuaaccugccccacgg

SEQ ID NO: 3109 - RNA, 17 nt, Artificial Sequence
  Description of Artificial Sequence:  Nucleic Acid
  misc_feature: oligonucleotide substrate
ccugccccacggacugc

SEQ ID NO: 3110 - RNA, 17 nt, Artificial Sequence
  Description of Artificial Sequence:  Nucleic Acid
  misc_feature: oligonucleotide substrate
ccccacggacugcuucc

SEQ ID NO: 3111 - RNA, 17 nt, Artificial Sequence
  Description of Artificial Sequence:  Nucleic Acid
  misc_feature: oligonucleotide substrate
cacggacugcuuccgga

SEQ ID NO: 3112 - RNA, 17 nt, Artificial Sequence
  Description of Artificial Sequence:  Nucleic Acid
  misc_feature: oligonucleotide substrate
uuccggaagcaccccga

SEQ ID NO: 3113 - RNA, 17 nt, Artificial Sequence
  Description of Artificial Sequence:  Nucleic Acid
  misc_feature: oligonucleotide substrate
ccggaagcaccccgagg

SEQ ID NO: 3114 - RNA, 17 nt, Artificial Sequence
  Description of Artificial Sequence:  Nucleic Acid
  misc_feature: oligonucleotide substrate
accccgaggccacuuac

SEQ ID NO: 3115 - RNA, 17 nt, Artificial Sequence
  Description of Artificial Sequence:  Nucleic Acid
  misc_feature: oligonucleotide substrate
ccgaggccacuuacgca

SEQ ID NO: 3116 - RNA, 17 nt, Artificial Sequence
  Description of Artificial Sequence:  Nucleic Acid
  misc_feature: oligonucleotide substrate
ggccacuuacgcaaagu

SEQ ID NO: 3117 - RNA, 17 nt, Artificial Sequence
  Description of Artificial Sequence:  Nucleic Acid
  misc_feature: oligonucleotide substrate
ccacuuacgcaaagugc

SEQ ID NO: 3118 - RNA, 17 nt, Artificial Sequence
  Description of Artificial Sequence:  Nucleic Acid
  misc_feature: oligonucleotide substrate
uacgcaaagugcgguuc

SEQ ID NO: 3119 - RNA, 17 nt, Artificial Sequence
  Description of Artificial Sequence:  Nucleic Acid
  misc_feature: oligonucleotide substrate
cgcaaagugcgguucgg

SEQ ID NO: 3120 - RNA, 17 nt, Artificial Sequence
  Description of Artificial Sequence:  Nucleic Acid
  misc_feature: oligonucleotide substrate
aaagugcgguucggggc

SEQ ID NO: 3121 - RNA, 17 nt, Artificial Sequence
  Description of Artificial Sequence:  Nucleic Acid
  misc_feature: oligonucleotide substrate
gguucggggccuugguu

SEQ ID NO: 3122 - RNA, 17 nt, Artificial Sequence
  Description of Artificial Sequence:  Nucleic Acid
  misc_feature: oligonucleotide substrate
gggccuugguuaacacc

SEQ ID NO: 3123 - RNA, 17 nt, Artificial Sequence
  Description of Artificial Sequence:  Nucleic Acid
  misc_feature: oligonucleotide substrate
cuugguuaacaccuaga

SEQ ID NO: 3124 - RNA, 17 nt, Artificial Sequence
  Description of Artificial Sequence:  Nucleic Acid
  misc_feature: oligonucleotide substrate
ugguuaacaccuagaug

SEQ ID NO: 3125 - RNA, 17 nt, Artificial Sequence
  Description of Artificial Sequence:  Nucleic Acid
  misc_feature: oligonucleotide substrate
acaccuagaugcauagu

SEQ ID NO: 3126 - RNA, 17 nt, Artificial Sequence
  Description of Artificial Sequence:  Nucleic Acid
  misc_feature: oligonucleotide substrate
accuagaugcauaguug

SEQ ID NO: 3127 - RNA, 17 nt, Artificial Sequence
  Description of Artificial Sequence:  Nucleic Acid
  misc_feature: oligonucleotide substrate
cuagaugcauaguugac

SEQ ID NO: 3128 - RNA, 17 nt, Artificial Sequence
  Description of Artificial Sequence:  Nucleic Acid
  misc_feature: oligonucleotide substrate
gaugcauaguugacuac

SEQ ID NO: 3129 - RNA, 17 nt, Artificial Sequence
  Description of Artificial Sequence:  Nucleic Acid
  misc_feature: oligonucleotide substrate
cauaguugacuacccau

SEQ ID NO: 3130 - RNA, 17 nt, Artificial Sequence
  Description of Artificial Sequence:  Nucleic Acid
  misc_feature: oligonucleotide substrate
aguugacuacccauaca

SEQ ID NO: 3131 - RNA, 17 nt, Artificial Sequence
  Description of Artificial Sequence:  Nucleic Acid
  misc_feature: oligonucleotide substrate
gacuacccauacaggcu

SEQ ID NO: 3132 - RNA, 17 nt, Artificial Sequence
  Description of Artificial Sequence:  Nucleic Acid
  misc_feature: oligonucleotide substrate
cuacccauacaggcuuu

SEQ ID NO: 3133 - RNA, 17 nt, Artificial Sequence
  Description of Artificial Sequence:  Nucleic Acid
  misc_feature: oligonucleotide substrate
ccauacaggcuuuggca

SEQ ID NO: 3134 - RNA, 17 nt, Artificial Sequence
  Description of Artificial Sequence:  Nucleic Acid
  misc_feature: oligonucleotide substrate
aggcuuuggcacuaccc

SEQ ID NO: 3135 - RNA, 17 nt, Artificial Sequence
  Description of Artificial Sequence:  Nucleic Acid
  misc_feature: oligonucleotide substrate
gcuuuggcacuaccccu

SEQ ID NO: 3136 - RNA, 17 nt, Artificial Sequence
  Description of Artificial Sequence:  Nucleic Acid
  misc_feature: oligonucleotide substrate
uuggcacuaccccugca

SEQ ID NO: 3137 - RNA, 17 nt, Artificial Sequence
  Description of Artificial Sequence:  Nucleic Acid
  misc_feature: oligonucleotide substrate
cuaccccugcacuguca

SEQ ID NO: 3138 - RNA, 17 nt, Artificial Sequence
  Description of Artificial Sequence:  Nucleic Acid
  misc_feature: oligonucleotide substrate
accccugcacugucaau

SEQ ID NO: 3139 - RNA, 17 nt, Artificial Sequence
  Description of Artificial Sequence:  Nucleic Acid
  misc_feature: oligonucleotide substrate
ccugcacugucaauuuu

SEQ ID NO: 3140 - RNA, 17 nt, Artificial Sequence
  Description of Artificial Sequence:  Nucleic Acid
  misc_feature: oligonucleotide substrate
cacugucaauuuuucca

SEQ ID NO: 3141 - RNA, 17 nt, Artificial Sequence
  Description of Artificial Sequence:  Nucleic Acid
  misc_feature: oligonucleotide substrate
auuuuuccaucuuuaag

SEQ ID NO: 3142 - RNA, 17 nt, Artificial Sequence
  Description of Artificial Sequence:  Nucleic Acid
  misc_feature: oligonucleotide substrate
ucuuuaagguuaggaug

SEQ ID NO: 3143 - RNA, 17 nt, Artificial Sequence
  Description of Artificial Sequence:  Nucleic Acid
  misc_feature: oligonucleotide substrate
agguuaggauguaugug

SEQ ID NO: 3144 - RNA, 17 nt, Artificial Sequence
  Description of Artificial Sequence:  Nucleic Acid
  misc_feature: oligonucleotide substrate
guuaggauguauguggg

SEQ ID NO: 3145 - RNA, 17 nt, Artificial Sequence
  Description of Artificial Sequence:  Nucleic Acid
  misc_feature: oligonucleotide substrate
uaggauguauguggggg

SEQ ID NO: 3146 - RNA, 17 nt, Artificial Sequence
  Description of Artificial Sequence:  Nucleic Acid
  misc_feature: oligonucleotide substrate
ggauguauguggggggc

SEQ ID NO: 3147 - RNA, 17 nt, Artificial Sequence
  Description of Artificial Sequence:  Nucleic Acid
  misc_feature: oligonucleotide substrate
uguggggggcguggagc

SEQ ID NO: 3148 - RNA, 17 nt, Artificial Sequence
  Description of Artificial Sequence:  Nucleic Acid
  misc_feature: oligonucleotide substrate
uggggggcguggagcac

SEQ ID NO: 3149 - RNA, 17 nt, Artificial Sequence
  Description of Artificial Sequence:  Nucleic Acid
  misc_feature: oligonucleotide substrate
ggcguggagcacaggcu

SEQ ID NO: 3150 - RNA, 17 nt, Artificial Sequence
  Description of Artificial Sequence:  Nucleic Acid
  misc_feature: oligonucleotide substrate
cguggagcacaggcuca

SEQ ID NO: 3151 - RNA, 17 nt, Artificial Sequence
  Description of Artificial Sequence:  Nucleic Acid
  misc_feature: oligonucleotide substrate
gagcacaggcucaccgc

SEQ ID NO: 3152 - RNA, 17 nt, Artificial Sequence
  Description of Artificial Sequence:  Nucleic Acid
  misc_feature: oligonucleotide substrate
acaggcucaccgccgca

SEQ ID NO: 3153 - RNA, 17 nt, Artificial Sequence
  Description of Artificial Sequence:  Nucleic Acid
  misc_feature: oligonucleotide substrate
ggcucaccgccgcaugc

SEQ ID NO: 3154 - RNA, 17 nt, Artificial Sequence
  Description of Artificial Sequence:  Nucleic Acid
  misc_feature: oligonucleotide substrate
ucaccgccgcaugcaau

SEQ ID NO: 3155 - RNA, 17 nt, Artificial Sequence
  Description of Artificial Sequence:  Nucleic Acid
  misc_feature: oligonucleotide substrate
accgccgcaugcaauug

SEQ ID NO: 3156 - RNA, 17 nt, Artificial Sequence
  Description of Artificial Sequence:  Nucleic Acid
  misc_feature: oligonucleotide substrate
cgccgcaugcaauugga

SEQ ID NO: 3157 - RNA, 17 nt, Artificial Sequence
  Description of Artificial Sequence:  Nucleic Acid
  misc_feature: oligonucleotide substrate
cgcaugcaauuggacuc

SEQ ID NO: 3158 - RNA, 17 nt, Artificial Sequence
  Description of Artificial Sequence:  Nucleic Acid
  misc_feature: oligonucleotide substrate
gcaauuggacucgagga

SEQ ID NO: 3159 - RNA, 17 nt, Artificial Sequence
  Description of Artificial Sequence:  Nucleic Acid
  misc_feature: oligonucleotide substrate
cgaggagagcguuguga

SEQ ID NO: 3160 - RNA, 17 nt, Artificial Sequence
  Description of Artificial Sequence:  Nucleic Acid
  misc_feature: oligonucleotide substrate
aggagagcguugugauu

SEQ ID NO: 3161 - RNA, 17 nt, Artificial Sequence
  Description of Artificial Sequence:  Nucleic Acid
  misc_feature: oligonucleotide substrate
agagcguugugauuugg

SEQ ID NO: 3162 - RNA, 17 nt, Artificial Sequence
  Description of Artificial Sequence:  Nucleic Acid
  misc_feature: oligonucleotide substrate
gcguugugauuuggagg

SEQ ID NO: 3163 - RNA, 17 nt, Artificial Sequence
  Description of Artificial Sequence:  Nucleic Acid
  misc_feature: oligonucleotide substrate
uuuggaggacagggaca

SEQ ID NO: 3164 - RNA, 17 nt, Artificial Sequence
  Description of Artificial Sequence:  Nucleic Acid
  misc_feature: oligonucleotide substrate
ggacagggacagaucag

SEQ ID NO: 3165 - RNA, 17 nt, Artificial Sequence
  Description of Artificial Sequence:  Nucleic Acid
  misc_feature: oligonucleotide substrate
agggacagaucagagcu

SEQ ID NO: 3166 - RNA, 17 nt, Artificial Sequence
  Description of Artificial Sequence:  Nucleic Acid
  misc_feature: oligonucleotide substrate
agaucagagcucagccc

SEQ ID NO: 3167 - RNA, 17 nt, Artificial Sequence
  Description of Artificial Sequence:  Nucleic Acid
  misc_feature: oligonucleotide substrate
agagcucagcccgcugc

SEQ ID NO: 3168 - RNA, 17 nt, Artificial Sequence
  Description of Artificial Sequence:  Nucleic Acid
  misc_feature: oligonucleotide substrate
cucagcccgcugcuguu

SEQ ID NO: 3169 - RNA, 17 nt, Artificial Sequence
  Description of Artificial Sequence:  Nucleic Acid
  misc_feature: oligonucleotide substrate
agcccgcugcuguuguc

SEQ ID NO: 3170 - RNA, 17 nt, Artificial Sequence
  Description of Artificial Sequence:  Nucleic Acid
  misc_feature: oligonucleotide substrate
ccgcugcuguuguccac

SEQ ID NO: 3171 - RNA, 17 nt, Artificial Sequence
  Description of Artificial Sequence:  Nucleic Acid
  misc_feature: oligonucleotide substrate
cugcuguuguccacuac

SEQ ID NO: 3172 - RNA, 17 nt, Artificial Sequence
  Description of Artificial Sequence:  Nucleic Acid
  misc_feature: oligonucleotide substrate
uguuguccacuacagag

SEQ ID NO: 3173 - RNA, 17 nt, Artificial Sequence
  Description of Artificial Sequence:  Nucleic Acid
  misc_feature: oligonucleotide substrate
uguccacuacagagugg

SEQ ID NO: 3174 - RNA, 17 nt, Artificial Sequence
  Description of Artificial Sequence:  Nucleic Acid
  misc_feature: oligonucleotide substrate
acuacagaguggcaaau

SEQ ID NO: 3175 - RNA, 17 nt, Artificial Sequence
  Description of Artificial Sequence:  Nucleic Acid
  misc_feature: oligonucleotide substrate
acagaguggcaaauacu

SEQ ID NO: 3176 - RNA, 17 nt, Artificial Sequence
  Description of Artificial Sequence:  Nucleic Acid
  misc_feature: oligonucleotide substrate
aguggcaaauacugccc

SEQ ID NO: 3177 - RNA, 17 nt, Artificial Sequence
  Description of Artificial Sequence:  Nucleic Acid
  misc_feature: oligonucleotide substrate
uggcaaauacugcccug

SEQ ID NO: 3178 - RNA, 17 nt, Artificial Sequence
  Description of Artificial Sequence:  Nucleic Acid
  misc_feature: oligonucleotide substrate
caaauacugcccugcuc

SEQ ID NO: 3179 - RNA, 17 nt, Artificial Sequence
  Description of Artificial Sequence:  Nucleic Acid
  misc_feature: oligonucleotide substrate
acugcccugcuccuuca

SEQ ID NO: 3180 - RNA, 17 nt, Artificial Sequence
  Description of Artificial Sequence:  Nucleic Acid
  misc_feature: oligonucleotide substrate
gcuccuucaccacccua

SEQ ID NO: 3181 - RNA, 17 nt, Artificial Sequence
  Description of Artificial Sequence:  Nucleic Acid
  misc_feature: oligonucleotide substrate
ccuucaccacccuaccg

SEQ ID NO: 3182 - RNA, 17 nt, Artificial Sequence
  Description of Artificial Sequence:  Nucleic Acid
  misc_feature: oligonucleotide substrate
accacccuaccggcucu

SEQ ID NO: 3183 - RNA, 17 nt, Artificial Sequence
  Description of Artificial Sequence:  Nucleic Acid
  misc_feature: oligonucleotide substrate
cccuaccggcucugucc

SEQ ID NO: 3184 - RNA, 17 nt, Artificial Sequence
  Description of Artificial Sequence:  Nucleic Acid
  misc_feature: oligonucleotide substrate
ccggcucuguccacugg

SEQ ID NO: 3185 - RNA, 17 nt, Artificial Sequence
  Description of Artificial Sequence:  Nucleic Acid
  misc_feature: oligonucleotide substrate
cucuguccacugguuug

SEQ ID NO: 3186 - RNA, 17 nt, Artificial Sequence
  Description of Artificial Sequence:  Nucleic Acid
  misc_feature: oligonucleotide substrate
guccacugguuugaucc

SEQ ID NO: 3187 - RNA, 17 nt, Artificial Sequence
  Description of Artificial Sequence:  Nucleic Acid
  misc_feature: oligonucleotide substrate
cugguuugauccaucuc

SEQ ID NO: 3188 - RNA, 17 nt, Artificial Sequence
  Description of Artificial Sequence:  Nucleic Acid
  misc_feature: oligonucleotide substrate
uuugauccaucuccacc

SEQ ID NO: 3189 - RNA, 17 nt, Artificial Sequence
  Description of Artificial Sequence:  Nucleic Acid
  misc_feature: oligonucleotide substrate
ccaucuccaccagaaca

SEQ ID NO: 3190 - RNA, 17 nt, Artificial Sequence
  Description of Artificial Sequence:  Nucleic Acid
  misc_feature: oligonucleotide substrate
ccaccagaacaucgugg

SEQ ID NO: 3191 - RNA, 17 nt, Artificial Sequence
  Description of Artificial Sequence:  Nucleic Acid
  misc_feature: oligonucleotide substrate
accagaacaucguggac

SEQ ID NO: 3192 - RNA, 17 nt, Artificial Sequence
  Description of Artificial Sequence:  Nucleic Acid
  misc_feature: oligonucleotide substrate
agaacaucguggacgug

SEQ ID NO: 3193 - RNA, 17 nt, Artificial Sequence
  Description of Artificial Sequence:  Nucleic Acid
  misc_feature: oligonucleotide substrate
caucguggacgugcaau

SEQ ID NO: 3194 - RNA, 17 nt, Artificial Sequence
  Description of Artificial Sequence:  Nucleic Acid
  misc_feature: oligonucleotide substrate
ucguggacgugcaauac

SEQ ID NO: 3195 - RNA, 17 nt, Artificial Sequence
  Description of Artificial Sequence:  Nucleic Acid
  misc_feature: oligonucleotide substrate
guggacgugcaauaccu

SEQ ID NO: 3196 - RNA, 17 nt, Artificial Sequence
  Description of Artificial Sequence:  Nucleic Acid
  misc_feature: oligonucleotide substrate
gacgugcaauaccugua

SEQ ID NO: 3197 - RNA, 17 nt, Artificial Sequence
  Description of Artificial Sequence:  Nucleic Acid
  misc_feature: oligonucleotide substrate
cgugcaauaccuguacg

SEQ ID NO: 3198 - RNA, 17 nt, Artificial Sequence
  Description of Artificial Sequence:  Nucleic Acid
  misc_feature: oligonucleotide substrate
caauaccuguacggugu

SEQ ID NO: 3199 - RNA, 17 nt, Artificial Sequence
  Description of Artificial Sequence:  Nucleic Acid
  misc_feature: oligonucleotide substrate
auaccuguacgguguag

SEQ ID NO: 3200 - RNA, 17 nt, Artificial Sequence
  Description of Artificial Sequence:  Nucleic Acid
  misc_feature: oligonucleotide substrate
ccuguacgguguagggu

SEQ ID NO: 3201 - RNA, 17 nt, Artificial Sequence
  Description of Artificial Sequence:  Nucleic Acid
  misc_feature: oligonucleotide substrate
uguacgguguaggguca

SEQ ID NO: 3202 - RNA, 17 nt, Artificial Sequence
  Description of Artificial Sequence:  Nucleic Acid
  misc_feature: oligonucleotide substrate
gguguagggucagcggu

SEQ ID NO: 3203 - RNA, 17 nt, Artificial Sequence
  Description of Artificial Sequence:  Nucleic Acid
  misc_feature: oligonucleotide substrate
uagggucagcgguuguc

SEQ ID NO: 3204 - RNA, 17 nt, Artificial Sequence
  Description of Artificial Sequence:  Nucleic Acid
  misc_feature: oligonucleotide substrate
ggucagcgguugucucc

SEQ ID NO: 3205 - RNA, 17 nt, Artificial Sequence
  Description of Artificial Sequence:  Nucleic Acid
  misc_feature: oligonucleotide substrate
cagcgguugucuccuuc

SEQ ID NO: 3206 - RNA, 17 nt, Artificial Sequence
  Description of Artificial Sequence:  Nucleic Acid
  misc_feature: oligonucleotide substrate
ucuccuucgcaaucaaa

SEQ ID NO: 3207 - RNA, 17 nt, Artificial Sequence
  Description of Artificial Sequence:  Nucleic Acid
  misc_feature: oligonucleotide substrate
ccuucgcaaucaaaugg

SEQ ID NO: 3208 - RNA, 17 nt, Artificial Sequence
  Description of Artificial Sequence:  Nucleic Acid
  misc_feature: oligonucleotide substrate
gcaaucaaaugggagua

SEQ ID NO: 3209 - RNA, 17 nt, Artificial Sequence
  Description of Artificial Sequence:  Nucleic Acid
  misc_feature: oligonucleotide substrate
aaaugggaguauguccu

SEQ ID NO: 3210 - RNA, 17 nt, Artificial Sequence
  Description of Artificial Sequence:  Nucleic Acid
  misc_feature: oligonucleotide substrate
augggaguauguccugu

SEQ ID NO: 3211 - RNA, 17 nt, Artificial Sequence
  Description of Artificial Sequence:  Nucleic Acid
  misc_feature: oligonucleotide substrate
gggaguauguccuguug

SEQ ID NO: 3212 - RNA, 17 nt, Artificial Sequence
  Description of Artificial Sequence:  Nucleic Acid
  misc_feature: oligonucleotide substrate
uauguccuguugcuuuu

SEQ ID NO: 3213 - RNA, 17 nt, Artificial Sequence
  Description of Artificial Sequence:  Nucleic Acid
  misc_feature: oligonucleotide substrate
guccuguugcuuuuccu

SEQ ID NO: 3214 - RNA, 17 nt, Artificial Sequence
  Description of Artificial Sequence:  Nucleic Acid
  misc_feature: oligonucleotide substrate
uucuccuggcagacgcg

SEQ ID NO: 3215 - RNA, 17 nt, Artificial Sequence
  Description of Artificial Sequence:  Nucleic Acid
  misc_feature: oligonucleotide substrate
ccuggcagacgcgcgcg

SEQ ID NO: 3216 - RNA, 17 nt, Artificial Sequence
  Description of Artificial Sequence:  Nucleic Acid
  misc_feature: oligonucleotide substrate
uggcagacgcgcgcguc

SEQ ID NO: 3217 - RNA, 17 nt, Artificial Sequence
  Description of Artificial Sequence:  Nucleic Acid
  misc_feature: oligonucleotide substrate
gcagacgcgcgcgucug

SEQ ID NO: 3218 - RNA, 17 nt, Artificial Sequence
  Description of Artificial Sequence:  Nucleic Acid
  misc_feature: oligonucleotide substrate
agacgcgcgcgucugug

SEQ ID NO: 3219 - RNA, 17 nt, Artificial Sequence
  Description of Artificial Sequence:  Nucleic Acid
  misc_feature: oligonucleotide substrate
acgcgcgcgucugugcc

SEQ ID NO: 3220 - RNA, 17 nt, Artificial Sequence
  Description of Artificial Sequence:  Nucleic Acid
  misc_feature: oligonucleotide substrate
gcgcgucugugccuguu

SEQ ID NO: 3221 - RNA, 17 nt, Artificial Sequence
  Description of Artificial Sequence:  Nucleic Acid
  misc_feature: oligonucleotide substrate
gcgucugugccuguuug

SEQ ID NO: 3222 - RNA, 17 nt, Artificial Sequence
  Description of Artificial Sequence:  Nucleic Acid
  misc_feature: oligonucleotide substrate
cugugccuguuugugga

SEQ ID NO: 3223 - RNA, 17 nt, Artificial Sequence
  Description of Artificial Sequence:  Nucleic Acid
  misc_feature: oligonucleotide substrate
gccuguuuguggaugau

SEQ ID NO: 3224 - RNA, 17 nt, Artificial Sequence
  Description of Artificial Sequence:  Nucleic Acid
  misc_feature: oligonucleotide substrate
guuuguggaugaugcug

SEQ ID NO: 3225 - RNA, 17 nt, Artificial Sequence
  Description of Artificial Sequence:  Nucleic Acid
  misc_feature: oligonucleotide substrate
uguggaugaugcuguug

SEQ ID NO: 3226 - RNA, 17 nt, Artificial Sequence
  Description of Artificial Sequence:  Nucleic Acid
  misc_feature: oligonucleotide substrate
uggaugaugcuguuggu

SEQ ID NO: 3227 - RNA, 17 nt, Artificial Sequence
  Description of Artificial Sequence:  Nucleic Acid
  misc_feature: oligonucleotide substrate
augaugcuguugguagc

SEQ ID NO: 3228 - RNA, 17 nt, Artificial Sequence
  Description of Artificial Sequence:  Nucleic Acid
  misc_feature: oligonucleotide substrate
ugcuguugguagcccag

SEQ ID NO: 3229 - RNA, 17 nt, Artificial Sequence
  Description of Artificial Sequence:  Nucleic Acid
  misc_feature: oligonucleotide substrate
uguugguagcccaggcc

SEQ ID NO: 3230 - RNA, 17 nt, Artificial Sequence
  Description of Artificial Sequence:  Nucleic Acid
  misc_feature: oligonucleotide substrate
uagcccaggccgaggcu

SEQ ID NO: 3231 - RNA, 17 nt, Artificial Sequence
  Description of Artificial Sequence:  Nucleic Acid
  misc_feature: oligonucleotide substrate
aggccgaggcugcccua

SEQ ID NO: 3232 - RNA, 17 nt, Artificial Sequence
  Description of Artificial Sequence:  Nucleic Acid
  misc_feature: oligonucleotide substrate
ccgaggcugcccuagag

SEQ ID NO: 3233 - RNA, 17 nt, Artificial Sequence
  Description of Artificial Sequence:  Nucleic Acid
  misc_feature: oligonucleotide substrate
ccuagagaaccuggugg

SEQ ID NO: 3234 - RNA, 17 nt, Artificial Sequence
  Description of Artificial Sequence:  Nucleic Acid
  misc_feature: oligonucleotide substrate
agaaccuggugguccuc

SEQ ID NO: 3235 - RNA, 17 nt, Artificial Sequence
  Description of Artificial Sequence:  Nucleic Acid
  misc_feature: oligonucleotide substrate
accuggugguccucaau

SEQ ID NO: 3236 - RNA, 17 nt, Artificial Sequence
  Description of Artificial Sequence:  Nucleic Acid
  misc_feature: oligonucleotide substrate
gguccucaaugcagcau

SEQ ID NO: 3237 - RNA, 17 nt, Artificial Sequence
  Description of Artificial Sequence:  Nucleic Acid
  misc_feature: oligonucleotide substrate
uccucaaugcagcaucc

SEQ ID NO: 3238 - RNA, 17 nt, Artificial Sequence
  Description of Artificial Sequence:  Nucleic Acid
  misc_feature: oligonucleotide substrate
ucaaugcagcauccuug

SEQ ID NO: 3239 - RNA, 17 nt, Artificial Sequence
  Description of Artificial Sequence:  Nucleic Acid
  misc_feature: oligonucleotide substrate
aaugcagcauccuuggc

SEQ ID NO: 3240 - RNA, 17 nt, Artificial Sequence
  Description of Artificial Sequence:  Nucleic Acid
  misc_feature: oligonucleotide substrate
cauccuuggccggagug

SEQ ID NO: 3241 - RNA, 17 nt, Artificial Sequence
  Description of Artificial Sequence:  Nucleic Acid
  misc_feature: oligonucleotide substrate
uggccggagugcauggc

SEQ ID NO: 3242 - RNA, 17 nt, Artificial Sequence
  Description of Artificial Sequence:  Nucleic Acid
  misc_feature: oligonucleotide substrate
gccggagugcauggcau

SEQ ID NO: 3243 - RNA, 17 nt, Artificial Sequence
  Description of Artificial Sequence:  Nucleic Acid
  misc_feature: oligonucleotide substrate
cggagugcauggcaucc

SEQ ID NO: 3244 - RNA, 17 nt, Artificial Sequence
  Description of Artificial Sequence:  Nucleic Acid
  misc_feature: oligonucleotide substrate
agugcauggcauccucu

SEQ ID NO: 3245 - RNA, 17 nt, Artificial Sequence
  Description of Artificial Sequence:  Nucleic Acid
  misc_feature: oligonucleotide substrate
ugcauggcauccucucc

SEQ ID NO: 3246 - RNA, 17 nt, Artificial Sequence
  Description of Artificial Sequence:  Nucleic Acid
  misc_feature: oligonucleotide substrate
ccuuccucguguucuuc

SEQ ID NO: 3247 - RNA, 17 nt, Artificial Sequence
  Description of Artificial Sequence:  Nucleic Acid
  misc_feature: oligonucleotide substrate
uuccucguguucuucug

SEQ ID NO: 3248 - RNA, 17 nt, Artificial Sequence
  Description of Artificial Sequence:  Nucleic Acid
  misc_feature: oligonucleotide substrate
guucuucugugcugccu

SEQ ID NO: 3249 - RNA, 17 nt, Artificial Sequence
  Description of Artificial Sequence:  Nucleic Acid
  misc_feature: oligonucleotide substrate
ucuucugugcugccugg

SEQ ID NO: 3250 - RNA, 17 nt, Artificial Sequence
  Description of Artificial Sequence:  Nucleic Acid
  misc_feature: oligonucleotide substrate
ucugugcugccugguac

SEQ ID NO: 3251 - RNA, 17 nt, Artificial Sequence
  Description of Artificial Sequence:  Nucleic Acid
  misc_feature: oligonucleotide substrate
gcugccugguacaucaa

SEQ ID NO: 3252 - RNA, 17 nt, Artificial Sequence
  Description of Artificial Sequence:  Nucleic Acid
  misc_feature: oligonucleotide substrate
ugccugguacaucaaag

SEQ ID NO: 3253 - RNA, 17 nt, Artificial Sequence
  Description of Artificial Sequence:  Nucleic Acid
  misc_feature: oligonucleotide substrate
ccugguacaucaaaggc

SEQ ID NO: 3254 - RNA, 17 nt, Artificial Sequence
  Description of Artificial Sequence:  Nucleic Acid
  misc_feature: oligonucleotide substrate
caucaaaggcaagcugg

SEQ ID NO: 3255 - RNA, 17 nt, Artificial Sequence
  Description of Artificial Sequence:  Nucleic Acid
  misc_feature: oligonucleotide substrate
aaaggcaagcugguccc

SEQ ID NO: 3256 - RNA, 17 nt, Artificial Sequence
  Description of Artificial Sequence:  Nucleic Acid
  misc_feature: oligonucleotide substrate
gcaagcuggucccuggg

SEQ ID NO: 3257 - RNA, 17 nt, Artificial Sequence
  Description of Artificial Sequence:  Nucleic Acid
  misc_feature: oligonucleotide substrate
ucccuggggcggcauau

SEQ ID NO: 3258 - RNA, 17 nt, Artificial Sequence
  Description of Artificial Sequence:  Nucleic Acid
  misc_feature: oligonucleotide substrate
cuggggcggcauaugcu

SEQ ID NO: 3259 - RNA, 17 nt, Artificial Sequence
  Description of Artificial Sequence:  Nucleic Acid
  misc_feature: oligonucleotide substrate
ggggcggcauaugcucu

SEQ ID NO: 3260 - RNA, 17 nt, Artificial Sequence
  Description of Artificial Sequence:  Nucleic Acid
  misc_feature: oligonucleotide substrate
ggcggcauaugcucucu

SEQ ID NO: 3261 - RNA, 17 nt, Artificial Sequence
  Description of Artificial Sequence:  Nucleic Acid
  misc_feature: oligonucleotide substrate
cggcauaugcucucuac

SEQ ID NO: 3262 - RNA, 17 nt, Artificial Sequence
  Description of Artificial Sequence:  Nucleic Acid
  misc_feature: oligonucleotide substrate
ugcucucuacggcguau

SEQ ID NO: 3263 - RNA, 17 nt, Artificial Sequence
  Description of Artificial Sequence:  Nucleic Acid
  misc_feature: oligonucleotide substrate
ucucuacggcguauggc

SEQ ID NO: 3264 - RNA, 17 nt, Artificial Sequence
  Description of Artificial Sequence:  Nucleic Acid
  misc_feature: oligonucleotide substrate
ucuacggcguauggccg

SEQ ID NO: 3265 - RNA, 17 nt, Artificial Sequence
  Description of Artificial Sequence:  Nucleic Acid
  misc_feature: oligonucleotide substrate
uacggcguauggccgcu

SEQ ID NO: 3266 - RNA, 17 nt, Artificial Sequence
  Description of Artificial Sequence:  Nucleic Acid
  misc_feature: oligonucleotide substrate
ggcguauggccgcuacu

SEQ ID NO: 3267 - RNA, 17 nt, Artificial Sequence
  Description of Artificial Sequence:  Nucleic Acid
  misc_feature: oligonucleotide substrate
guauggccgcuacuccu

SEQ ID NO: 3268 - RNA, 17 nt, Artificial Sequence
  Description of Artificial Sequence:  Nucleic Acid
  misc_feature: oligonucleotide substrate
uggccgcuacuccugcu

SEQ ID NO: 3269 - RNA, 17 nt, Artificial Sequence
  Description of Artificial Sequence:  Nucleic Acid
  misc_feature: oligonucleotide substrate
cuacuccugcuccugcu

SEQ ID NO: 3270 - RNA, 17 nt, Artificial Sequence
  Description of Artificial Sequence:  Nucleic Acid
  misc_feature: oligonucleotide substrate
cugcuccugcuggcguu

SEQ ID NO: 3271 - RNA, 17 nt, Artificial Sequence
  Description of Artificial Sequence:  Nucleic Acid
  misc_feature: oligonucleotide substrate
uccugcuggcguuacca

SEQ ID NO: 3272 - RNA, 17 nt, Artificial Sequence
  Description of Artificial Sequence:  Nucleic Acid
  misc_feature: oligonucleotide substrate
cugcuggcguuaccacc

SEQ ID NO: 3273 - RNA, 17 nt, Artificial Sequence
  Description of Artificial Sequence:  Nucleic Acid
  misc_feature: oligonucleotide substrate
cuggcguuaccaccacg

SEQ ID NO: 3274 - RNA, 17 nt, Artificial Sequence
  Description of Artificial Sequence:  Nucleic Acid
  misc_feature: oligonucleotide substrate
gcguuaccaccacgggc

SEQ ID NO: 3275 - RNA, 17 nt, Artificial Sequence
  Description of Artificial Sequence:  Nucleic Acid
  misc_feature: oligonucleotide substrate
uuaccaccacgggcgua

SEQ ID NO: 3276 - RNA, 17 nt, Artificial Sequence
  Description of Artificial Sequence:  Nucleic Acid
  misc_feature: oligonucleotide substrate
caccacgggcguacgcc

SEQ ID NO: 3277 - RNA, 17 nt, Artificial Sequence
  Description of Artificial Sequence:  Nucleic Acid
  misc_feature: oligonucleotide substrate
ccacgggcguacgccau

SEQ ID NO: 3278 - RNA, 17 nt, Artificial Sequence
  Description of Artificial Sequence:  Nucleic Acid
  misc_feature: oligonucleotide substrate
acgggcguacgccaugg

SEQ ID NO: 3279 - RNA, 17 nt, Artificial Sequence
  Description of Artificial Sequence:  Nucleic Acid
  misc_feature: oligonucleotide substrate
gggcguacgccauggac

SEQ ID NO: 3280 - RNA, 17 nt, Artificial Sequence
  Description of Artificial Sequence:  Nucleic Acid
  misc_feature: oligonucleotide substrate
cguacgccauggaccgg

SEQ ID NO: 3281 - RNA, 17 nt, Artificial Sequence
  Description of Artificial Sequence:  Nucleic Acid
  misc_feature: oligonucleotide substrate
cgccauggaccgggaga

SEQ ID NO: 3282 - RNA, 17 nt, Artificial Sequence
  Description of Artificial Sequence:  Nucleic Acid
  misc_feature: oligonucleotide substrate
accgggagauggccgca

SEQ ID NO: 3283 - RNA, 17 nt, Artificial Sequence
  Description of Artificial Sequence:  Nucleic Acid
  misc_feature: oligonucleotide substrate
gggagauggccgcaucg

SEQ ID NO: 3284 - RNA, 17 nt, Artificial Sequence
  Description of Artificial Sequence:  Nucleic Acid
  misc_feature: oligonucleotide substrate
agauggccgcaucgugc

SEQ ID NO: 3285 - RNA, 17 nt, Artificial Sequence
  Description of Artificial Sequence:  Nucleic Acid
  misc_feature: oligonucleotide substrate
auggccgcaucgugcgg

SEQ ID NO: 3286 - RNA, 17 nt, Artificial Sequence
  Description of Artificial Sequence:  Nucleic Acid
  misc_feature: oligonucleotide substrate
gccgcaucgugcggagg

SEQ ID NO: 3287 - RNA, 17 nt, Artificial Sequence
  Description of Artificial Sequence:  Nucleic Acid
  misc_feature: oligonucleotide substrate
cgcaucgugcggaggcg

SEQ ID NO: 3288 - RNA, 17 nt, Artificial Sequence
  Description of Artificial Sequence:  Nucleic Acid
  misc_feature: oligonucleotide substrate
gugcggaggcgugguuu

SEQ ID NO: 3289 - RNA, 17 nt, Artificial Sequence
  Description of Artificial Sequence:  Nucleic Acid
  misc_feature: oligonucleotide substrate
gcggaggcgugguuuuu

SEQ ID NO: 3290 - RNA, 17 nt, Artificial Sequence
  Description of Artificial Sequence:  Nucleic Acid
  misc_feature: oligonucleotide substrate
gaggcgugguuuuugua

SEQ ID NO: 3291 - RNA, 17 nt, Artificial Sequence
  Description of Artificial Sequence:  Nucleic Acid
  misc_feature: oligonucleotide substrate
ugguuuuuguaggucua

SEQ ID NO: 3292 - RNA, 17 nt, Artificial Sequence
  Description of Artificial Sequence:  Nucleic Acid
  misc_feature: oligonucleotide substrate
uuuuguaggucuagcac

SEQ ID NO: 3293 - RNA, 17 nt, Artificial Sequence
  Description of Artificial Sequence:  Nucleic Acid
  misc_feature: oligonucleotide substrate
uaggucuagcacucuug

SEQ ID NO: 3294 - RNA, 17 nt, Artificial Sequence
  Description of Artificial Sequence:  Nucleic Acid
  misc_feature: oligonucleotide substrate
ggucuagcacucuugac

SEQ ID NO: 3295 - RNA, 17 nt, Artificial Sequence
  Description of Artificial Sequence:  Nucleic Acid
  misc_feature: oligonucleotide substrate
cacucuugaccuuguca

SEQ ID NO: 3296 - RNA, 17 nt, Artificial Sequence
  Description of Artificial Sequence:  Nucleic Acid
  misc_feature: oligonucleotide substrate
uugaccuugucaccaua

SEQ ID NO: 3297 - RNA, 17 nt, Artificial Sequence
  Description of Artificial Sequence:  Nucleic Acid
  misc_feature: oligonucleotide substrate
accuugucaccauacua

SEQ ID NO: 3298 - RNA, 17 nt, Artificial Sequence
  Description of Artificial Sequence:  Nucleic Acid
  misc_feature: oligonucleotide substrate
uugucaccauacuacaa

SEQ ID NO: 3299 - RNA, 17 nt, Artificial Sequence
  Description of Artificial Sequence:  Nucleic Acid
  misc_feature: oligonucleotide substrate
gucaccauacuacaaag

SEQ ID NO: 3300 - RNA, 17 nt, Artificial Sequence
  Description of Artificial Sequence:  Nucleic Acid
  misc_feature: oligonucleotide substrate
accauacuacaaagugu

SEQ ID NO: 3301 - RNA, 17 nt, Artificial Sequence
  Description of Artificial Sequence:  Nucleic Acid
  misc_feature: oligonucleotide substrate
acuacaaaguguuccuc

SEQ ID NO: 3302 - RNA, 17 nt, Artificial Sequence
  Description of Artificial Sequence:  Nucleic Acid
  misc_feature: oligonucleotide substrate
uacaaaguguuccucgc

SEQ ID NO: 3303 - RNA, 17 nt, Artificial Sequence
  Description of Artificial Sequence:  Nucleic Acid
  misc_feature: oligonucleotide substrate
uguuccucgcuaggcuc

SEQ ID NO: 3304 - RNA, 17 nt, Artificial Sequence
  Description of Artificial Sequence:  Nucleic Acid
  misc_feature: oligonucleotide substrate
cucgcuaggcucauaug

SEQ ID NO: 3305 - RNA, 17 nt, Artificial Sequence
  Description of Artificial Sequence:  Nucleic Acid
  misc_feature: oligonucleotide substrate
cuaggcucauauggugg

SEQ ID NO: 3306 - RNA, 17 nt, Artificial Sequence
  Description of Artificial Sequence:  Nucleic Acid
  misc_feature: oligonucleotide substrate
aggcucauauggugguu

SEQ ID NO: 3307 - RNA, 17 nt, Artificial Sequence
  Description of Artificial Sequence:  Nucleic Acid
  misc_feature: oligonucleotide substrate
cucauauggugguugca

SEQ ID NO: 3308 - RNA, 17 nt, Artificial Sequence
  Description of Artificial Sequence:  Nucleic Acid
  misc_feature: oligonucleotide substrate
auauggugguugcaaua

SEQ ID NO: 3309 - RNA, 17 nt, Artificial Sequence
  Description of Artificial Sequence:  Nucleic Acid
  misc_feature: oligonucleotide substrate
uggugguugcaauaccu

SEQ ID NO: 3310 - RNA, 17 nt, Artificial Sequence
  Description of Artificial Sequence:  Nucleic Acid
  misc_feature: oligonucleotide substrate
ugguugcaauaccuuau

SEQ ID NO: 3311 - RNA, 17 nt, Artificial Sequence
  Description of Artificial Sequence:  Nucleic Acid
  misc_feature: oligonucleotide substrate
guugcaauaccuuauca

SEQ ID NO: 3312 - RNA, 17 nt, Artificial Sequence
  Description of Artificial Sequence:  Nucleic Acid
  misc_feature: oligonucleotide substrate
aauaccuuaucaccaga

SEQ ID NO: 3313 - RNA, 17 nt, Artificial Sequence
  Description of Artificial Sequence:  Nucleic Acid
  misc_feature: oligonucleotide substrate
accuuaucaccagagcc

SEQ ID NO: 3314 - RNA, 17 nt, Artificial Sequence
  Description of Artificial Sequence:  Nucleic Acid
  misc_feature: oligonucleotide substrate
ucaccagagccgaggcg

SEQ ID NO: 3315 - RNA, 17 nt, Artificial Sequence
  Description of Artificial Sequence:  Nucleic Acid
  misc_feature: oligonucleotide substrate
gagccgaggcgcaguug

SEQ ID NO: 3316 - RNA, 17 nt, Artificial Sequence
  Description of Artificial Sequence:  Nucleic Acid
  misc_feature: oligonucleotide substrate
gccgaggcgcaguugca

SEQ ID NO: 3317 - RNA, 17 nt, Artificial Sequence
  Description of Artificial Sequence:  Nucleic Acid
  misc_feature: oligonucleotide substrate
gaggcgcaguugcaagu

SEQ ID NO: 3318 - RNA, 17 nt, Artificial Sequence
  Description of Artificial Sequence:  Nucleic Acid
  misc_feature: oligonucleotide substrate
gcgcaguugcaagugug

SEQ ID NO: 3319 - RNA, 17 nt, Artificial Sequence
  Description of Artificial Sequence:  Nucleic Acid
  misc_feature: oligonucleotide substrate
aguugcaaguguggauc

SEQ ID NO: 3320 - RNA, 17 nt, Artificial Sequence
  Description of Artificial Sequence:  Nucleic Acid
  misc_feature: oligonucleotide substrate
uugcaaguguggauccc

SEQ ID NO: 3321 - RNA, 17 nt, Artificial Sequence
  Description of Artificial Sequence:  Nucleic Acid
  misc_feature: oligonucleotide substrate
aaguguggauccccccc

SEQ ID NO: 3322 - RNA, 17 nt, Artificial Sequence
  Description of Artificial Sequence:  Nucleic Acid
  misc_feature: oligonucleotide substrate
cccccucaacguucggg

SEQ ID NO: 3323 - RNA, 17 nt, Artificial Sequence
  Description of Artificial Sequence:  Nucleic Acid
  misc_feature: oligonucleotide substrate
cccucaacguucggggg

SEQ ID NO: 3324 - RNA, 17 nt, Artificial Sequence
  Description of Artificial Sequence:  Nucleic Acid
  misc_feature: oligonucleotide substrate
cggggggggcgcggugc

SEQ ID NO: 3325 - RNA, 17 nt, Artificial Sequence
  Description of Artificial Sequence:  Nucleic Acid
  misc_feature: oligonucleotide substrate
gggggggcgcggugcca

SEQ ID NO: 3326 - RNA, 17 nt, Artificial Sequence
  Description of Artificial Sequence:  Nucleic Acid
  misc_feature: oligonucleotide substrate
ggggcgcggugccauca

SEQ ID NO: 3327 - RNA, 17 nt, Artificial Sequence
  Description of Artificial Sequence:  Nucleic Acid
  misc_feature: oligonucleotide substrate
ggcgcggugccaucauu

SEQ ID NO: 3328 - RNA, 17 nt, Artificial Sequence
  Description of Artificial Sequence:  Nucleic Acid
  misc_feature: oligonucleotide substrate
gcggugccaucauucuc

SEQ ID NO: 3329 - RNA, 17 nt, Artificial Sequence
  Description of Artificial Sequence:  Nucleic Acid
  misc_feature: oligonucleotide substrate
gugccaucauucuccuc

SEQ ID NO: 3330 - RNA, 17 nt, Artificial Sequence
  Description of Artificial Sequence:  Nucleic Acid
  misc_feature: oligonucleotide substrate
uucuccucacgugugug

SEQ ID NO: 3331 - RNA, 17 nt, Artificial Sequence
  Description of Artificial Sequence:  Nucleic Acid
  misc_feature: oligonucleotide substrate
cuccucacguguguggu

SEQ ID NO: 3332 - RNA, 17 nt, Artificial Sequence
  Description of Artificial Sequence:  Nucleic Acid
  misc_feature: oligonucleotide substrate
ccucacguguguggucc

SEQ ID NO: 3333 - RNA, 17 nt, Artificial Sequence
  Description of Artificial Sequence:  Nucleic Acid
  misc_feature: oligonucleotide substrate
ucacgugugugguccac

SEQ ID NO: 3334 - RNA, 17 nt, Artificial Sequence
  Description of Artificial Sequence:  Nucleic Acid
  misc_feature: oligonucleotide substrate
cgugugugguccaccca

SEQ ID NO: 3335 - RNA, 17 nt, Artificial Sequence
  Description of Artificial Sequence:  Nucleic Acid
  misc_feature: oligonucleotide substrate
ugugguccacccagagc

SEQ ID NO: 3336 - RNA, 17 nt, Artificial Sequence
  Description of Artificial Sequence:  Nucleic Acid
  misc_feature: oligonucleotide substrate
cacccagagcuaaucuu

SEQ ID NO: 3337 - RNA, 17 nt, Artificial Sequence
  Description of Artificial Sequence:  Nucleic Acid
  misc_feature: oligonucleotide substrate
cagagcuaaucuuugac

SEQ ID NO: 3338 - RNA, 17 nt, Artificial Sequence
  Description of Artificial Sequence:  Nucleic Acid
  misc_feature: oligonucleotide substrate
aaucuuugacaucacca

SEQ ID NO: 3339 - RNA, 17 nt, Artificial Sequence
  Description of Artificial Sequence:  Nucleic Acid
  misc_feature: oligonucleotide substrate
ucuuugacaucaccaaa

SEQ ID NO: 3340 - RNA, 17 nt, Artificial Sequence
  Description of Artificial Sequence:  Nucleic Acid
  misc_feature: oligonucleotide substrate
uugacaucaccaaaauu

SEQ ID NO: 3341 - RNA, 17 nt, Artificial Sequence
  Description of Artificial Sequence:  Nucleic Acid
  misc_feature: oligonucleotide substrate
ucaccaaaauuaugcuc

SEQ ID NO: 3342 - RNA, 17 nt, Artificial Sequence
  Description of Artificial Sequence:  Nucleic Acid
  misc_feature: oligonucleotide substrate
ccaaaauuaugcucgcc

SEQ ID NO: 3343 - RNA, 17 nt, Artificial Sequence
  Description of Artificial Sequence:  Nucleic Acid
  misc_feature: oligonucleotide substrate
aaaauuaugcucgccau

SEQ ID NO: 3344 - RNA, 17 nt, Artificial Sequence
  Description of Artificial Sequence:  Nucleic Acid
  misc_feature: oligonucleotide substrate
uuaugcucgccauacuc

SEQ ID NO: 3345 - RNA, 17 nt, Artificial Sequence
  Description of Artificial Sequence:  Nucleic Acid
  misc_feature: oligonucleotide substrate
ugcucgccauacucggc

SEQ ID NO: 3346 - RNA, 17 nt, Artificial Sequence
  Description of Artificial Sequence:  Nucleic Acid
  misc_feature: oligonucleotide substrate
cucgccauacucggccc

SEQ ID NO: 3347 - RNA, 17 nt, Artificial Sequence
  Description of Artificial Sequence:  Nucleic Acid
  misc_feature: oligonucleotide substrate
cauacucggcccgcuca

SEQ ID NO: 3348 - RNA, 17 nt, Artificial Sequence
  Description of Artificial Sequence:  Nucleic Acid
  misc_feature: oligonucleotide substrate
cucggcccgcucauggu

SEQ ID NO: 3349 - RNA, 17 nt, Artificial Sequence
  Description of Artificial Sequence:  Nucleic Acid
  misc_feature: oligonucleotide substrate
gcccgcucauggugcuc

SEQ ID NO: 3350 - RNA, 17 nt, Artificial Sequence
  Description of Artificial Sequence:  Nucleic Acid
  misc_feature: oligonucleotide substrate
cgcucauggugcuccag

SEQ ID NO: 3351 - RNA, 17 nt, Artificial Sequence
  Description of Artificial Sequence:  Nucleic Acid
  misc_feature: oligonucleotide substrate
cucauggugcuccaggc

SEQ ID NO: 3352 - RNA, 17 nt, Artificial Sequence
  Description of Artificial Sequence:  Nucleic Acid
  misc_feature: oligonucleotide substrate
ugcuccaggcugguaua

SEQ ID NO: 3353 - RNA, 17 nt, Artificial Sequence
  Description of Artificial Sequence:  Nucleic Acid
  misc_feature: oligonucleotide substrate
ccaggcugguauagcaa

SEQ ID NO: 3354 - RNA, 17 nt, Artificial Sequence
  Description of Artificial Sequence:  Nucleic Acid
  misc_feature: oligonucleotide substrate
aggcugguauagcaaaa

SEQ ID NO: 3355 - RNA, 17 nt, Artificial Sequence
  Description of Artificial Sequence:  Nucleic Acid
  misc_feature: oligonucleotide substrate
cugguauagcaaaagug

SEQ ID NO: 3356 - RNA, 17 nt, Artificial Sequence
  Description of Artificial Sequence:  Nucleic Acid
  misc_feature: oligonucleotide substrate
uagcaaaagugccggac

SEQ ID NO: 3357 - RNA, 17 nt, Artificial Sequence
  Description of Artificial Sequence:  Nucleic Acid
  misc_feature: oligonucleotide substrate
gcaaaagugccggacuu

SEQ ID NO: 3358 - RNA, 17 nt, Artificial Sequence
  Description of Artificial Sequence:  Nucleic Acid
  misc_feature: oligonucleotide substrate
agugccggacuuugugc

SEQ ID NO: 3359 - RNA, 17 nt, Artificial Sequence
  Description of Artificial Sequence:  Nucleic Acid
  misc_feature: oligonucleotide substrate
cggacuuugugcgggcu

SEQ ID NO: 3360 - RNA, 17 nt, Artificial Sequence
  Description of Artificial Sequence:  Nucleic Acid
  misc_feature: oligonucleotide substrate
gacuuugugcgggcuca

SEQ ID NO: 3361 - RNA, 17 nt, Artificial Sequence
  Description of Artificial Sequence:  Nucleic Acid
  misc_feature: oligonucleotide substrate
uugugcgggcucaaggg

SEQ ID NO: 3362 - RNA, 17 nt, Artificial Sequence
  Description of Artificial Sequence:  Nucleic Acid
  misc_feature: oligonucleotide substrate
cucaaggggucauccgu

SEQ ID NO: 3363 - RNA, 17 nt, Artificial Sequence
  Description of Artificial Sequence:  Nucleic Acid
  misc_feature: oligonucleotide substrate
aaggggucauccgugaa

SEQ ID NO: 3364 - RNA, 17 nt, Artificial Sequence
  Description of Artificial Sequence:  Nucleic Acid
  misc_feature: oligonucleotide substrate
ggucauccgugaaugca

SEQ ID NO: 3365 - RNA, 17 nt, Artificial Sequence
  Description of Artificial Sequence:  Nucleic Acid
  misc_feature: oligonucleotide substrate
auccgugaaugcauuuu

SEQ ID NO: 3366 - RNA, 17 nt, Artificial Sequence
  Description of Artificial Sequence:  Nucleic Acid
  misc_feature: oligonucleotide substrate
ccgugaaugcauuuugg

SEQ ID NO: 3367 - RNA, 17 nt, Artificial Sequence
  Description of Artificial Sequence:  Nucleic Acid
  misc_feature: oligonucleotide substrate
gugaaugcauuuuggug

SEQ ID NO: 3368 - RNA, 17 nt, Artificial Sequence
  Description of Artificial Sequence:  Nucleic Acid
  misc_feature: oligonucleotide substrate
gcauuuuggugcggaaa

SEQ ID NO: 3369 - RNA, 17 nt, Artificial Sequence
  Description of Artificial Sequence:  Nucleic Acid
  misc_feature: oligonucleotide substrate
auuuuggugcggaaagu

SEQ ID NO: 3370 - RNA, 17 nt, Artificial Sequence
  Description of Artificial Sequence:  Nucleic Acid
  misc_feature: oligonucleotide substrate
ugcggaaagucgguggg

SEQ ID NO: 3371 - RNA, 17 nt, Artificial Sequence
  Description of Artificial Sequence:  Nucleic Acid
  misc_feature: oligonucleotide substrate
gaaagucgguggggggc

SEQ ID NO: 3372 - RNA, 17 nt, Artificial Sequence
  Description of Artificial Sequence:  Nucleic Acid
  misc_feature: oligonucleotide substrate
gguggggggcaauaugu

SEQ ID NO: 3373 - RNA, 17 nt, Artificial Sequence
  Description of Artificial Sequence:  Nucleic Acid
  misc_feature: oligonucleotide substrate
ggggggcaauaugucca

SEQ ID NO: 3374 - RNA, 17 nt, Artificial Sequence
  Description of Artificial Sequence:  Nucleic Acid
  misc_feature: oligonucleotide substrate
ggggcaauauguccaaa

SEQ ID NO: 3375 - RNA, 17 nt, Artificial Sequence
  Description of Artificial Sequence:  Nucleic Acid
  misc_feature: oligonucleotide substrate
ggcaauauguccaaaug

SEQ ID NO: 3376 - RNA, 17 nt, Artificial Sequence
  Description of Artificial Sequence:  Nucleic Acid
  misc_feature: oligonucleotide substrate
auguccaaauggccuuc

SEQ ID NO: 3377 - RNA, 17 nt, Artificial Sequence
  Description of Artificial Sequence:  Nucleic Acid
  misc_feature: oligonucleotide substrate
uccaaauggccuucaug

SEQ ID NO: 3378 - RNA, 17 nt, Artificial Sequence
  Description of Artificial Sequence:  Nucleic Acid
  misc_feature: oligonucleotide substrate
uggccuucaugaaguug

SEQ ID NO: 3379 - RNA, 17 nt, Artificial Sequence
  Description of Artificial Sequence:  Nucleic Acid
  misc_feature: oligonucleotide substrate
uucaugaaguuggccga

SEQ ID NO: 3380 - RNA, 17 nt, Artificial Sequence
  Description of Artificial Sequence:  Nucleic Acid
  misc_feature: oligonucleotide substrate
ugaaguuggccgaauug

SEQ ID NO: 3381 - RNA, 17 nt, Artificial Sequence
  Description of Artificial Sequence:  Nucleic Acid
  misc_feature: oligonucleotide substrate
uuggccgaauugaaagg

SEQ ID NO: 3382 - RNA, 17 nt, Artificial Sequence
  Description of Artificial Sequence:  Nucleic Acid
  misc_feature: oligonucleotide substrate
auugaaagguacguccg

SEQ ID NO: 3383 - RNA, 17 nt, Artificial Sequence
  Description of Artificial Sequence:  Nucleic Acid
  misc_feature: oligonucleotide substrate
ugaaagguacguccguc

SEQ ID NO: 3384 - RNA, 17 nt, Artificial Sequence
  Description of Artificial Sequence:  Nucleic Acid
  misc_feature: oligonucleotide substrate
aaagguacguccgucua

SEQ ID NO: 3385 - RNA, 17 nt, Artificial Sequence
  Description of Artificial Sequence:  Nucleic Acid
  misc_feature: oligonucleotide substrate
guacguccgucuaugac

SEQ ID NO: 3386 - RNA, 17 nt, Artificial Sequence
  Description of Artificial Sequence:  Nucleic Acid
  misc_feature: oligonucleotide substrate
guccgucuaugaccacc

SEQ ID NO: 3387 - RNA, 17 nt, Artificial Sequence
  Description of Artificial Sequence:  Nucleic Acid
  misc_feature: oligonucleotide substrate
cgucuaugaccaccuca

SEQ ID NO: 3388 - RNA, 17 nt, Artificial Sequence
  Description of Artificial Sequence:  Nucleic Acid
  misc_feature: oligonucleotide substrate
cuaugaccaccucacuc

SEQ ID NO: 3389 - RNA, 17 nt, Artificial Sequence
  Description of Artificial Sequence:  Nucleic Acid
  misc_feature: oligonucleotide substrate
accaccucacuccacug

SEQ ID NO: 3390 - RNA, 17 nt, Artificial Sequence
  Description of Artificial Sequence:  Nucleic Acid
  misc_feature: oligonucleotide substrate
cucacuccacugcagga

SEQ ID NO: 3391 - RNA, 17 nt, Artificial Sequence
  Description of Artificial Sequence:  Nucleic Acid
  misc_feature: oligonucleotide substrate
acuccacugcaggacug

SEQ ID NO: 3392 - RNA, 17 nt, Artificial Sequence
  Description of Artificial Sequence:  Nucleic Acid
  misc_feature: oligonucleotide substrate
acugcaggacugggccc

SEQ ID NO: 3393 - RNA, 17 nt, Artificial Sequence
  Description of Artificial Sequence:  Nucleic Acid
  misc_feature: oligonucleotide substrate
aggacugggcccacaca

SEQ ID NO: 3394 - RNA, 17 nt, Artificial Sequence
  Description of Artificial Sequence:  Nucleic Acid
  misc_feature: oligonucleotide substrate
cugggcccacacagguc

SEQ ID NO: 3395 - RNA, 17 nt, Artificial Sequence
  Description of Artificial Sequence:  Nucleic Acid
  misc_feature: oligonucleotide substrate
gggcccacacaggucua

SEQ ID NO: 3396 - RNA, 17 nt, Artificial Sequence
  Description of Artificial Sequence:  Nucleic Acid
  misc_feature: oligonucleotide substrate
ccacacaggucuacgag

SEQ ID NO: 3397 - RNA, 17 nt, Artificial Sequence
  Description of Artificial Sequence:  Nucleic Acid
  misc_feature: oligonucleotide substrate
acaggucuacgagaccu

SEQ ID NO: 3398 - RNA, 17 nt, Artificial Sequence
  Description of Artificial Sequence:  Nucleic Acid
  misc_feature: oligonucleotide substrate
ucuacgagaccuggcgg

SEQ ID NO: 3399 - RNA, 17 nt, Artificial Sequence
  Description of Artificial Sequence:  Nucleic Acid
  misc_feature: oligonucleotide substrate
gagaccuggcgguagcg

SEQ ID NO: 3400 - RNA, 17 nt, Artificial Sequence
  Description of Artificial Sequence:  Nucleic Acid
  misc_feature: oligonucleotide substrate
accuggcgguagcgguc

SEQ ID NO: 3401 - RNA, 17 nt, Artificial Sequence
  Description of Artificial Sequence:  Nucleic Acid
  misc_feature: oligonucleotide substrate
uggcgguagcggucgag

SEQ ID NO: 3402 - RNA, 17 nt, Artificial Sequence
  Description of Artificial Sequence:  Nucleic Acid
  misc_feature: oligonucleotide substrate
cgguagcggucgagccc

SEQ ID NO: 3403 - RNA, 17 nt, Artificial Sequence
  Description of Artificial Sequence:  Nucleic Acid
  misc_feature: oligonucleotide substrate
gcggucgagcccgucgu

SEQ ID NO: 3404 - RNA, 17 nt, Artificial Sequence
  Description of Artificial Sequence:  Nucleic Acid
  misc_feature: oligonucleotide substrate
ucgagcccgucgucuuc

SEQ ID NO: 3405 - RNA, 17 nt, Artificial Sequence
  Description of Artificial Sequence:  Nucleic Acid
  misc_feature: oligonucleotide substrate
agcccgucgucuucucc

SEQ ID NO: 3406 - RNA, 17 nt, Artificial Sequence
  Description of Artificial Sequence:  Nucleic Acid
  misc_feature: oligonucleotide substrate
cuucuccgacauggaaa

SEQ ID NO: 3407 - RNA, 17 nt, Artificial Sequence
  Description of Artificial Sequence:  Nucleic Acid
  misc_feature: oligonucleotide substrate
ucuccgacauggaaauc

SEQ ID NO: 3408 - RNA, 17 nt, Artificial Sequence
  Description of Artificial Sequence:  Nucleic Acid
  misc_feature: oligonucleotide substrate
acauggaaaucaagauc

SEQ ID NO: 3409 - RNA, 17 nt, Artificial Sequence
  Description of Artificial Sequence:  Nucleic Acid
  misc_feature: oligonucleotide substrate
aaaucaagaucaucacc

SEQ ID NO: 3410 - RNA, 17 nt, Artificial Sequence
  Description of Artificial Sequence:  Nucleic Acid
  misc_feature: oligonucleotide substrate
ucaagaucaucaccugg

SEQ ID NO: 3411 - RNA, 17 nt, Artificial Sequence
  Description of Artificial Sequence:  Nucleic Acid
  misc_feature: oligonucleotide substrate
agaucaucaccuggggg

SEQ ID NO: 3412 - RNA, 17 nt, Artificial Sequence
  Description of Artificial Sequence:  Nucleic Acid
  misc_feature: oligonucleotide substrate
ggggggagacaccgcgg

SEQ ID NO: 3413 - RNA, 17 nt, Artificial Sequence
  Description of Artificial Sequence:  Nucleic Acid
  misc_feature: oligonucleotide substrate
ggggagacaccgcggcg

SEQ ID NO: 3414 - RNA, 17 nt, Artificial Sequence
  Description of Artificial Sequence:  Nucleic Acid
  misc_feature: oligonucleotide substrate
gagacaccgcggcgugu

SEQ ID NO: 3415 - RNA, 17 nt, Artificial Sequence
  Description of Artificial Sequence:  Nucleic Acid
  misc_feature: oligonucleotide substrate
acaccgcggcguguggg

SEQ ID NO: 3416 - RNA, 17 nt, Artificial Sequence
  Description of Artificial Sequence:  Nucleic Acid
  misc_feature: oligonucleotide substrate
accgcggcgugugggga

SEQ ID NO: 3417 - RNA, 17 nt, Artificial Sequence
  Description of Artificial Sequence:  Nucleic Acid
  misc_feature: oligonucleotide substrate
cgcggcguguggggaca

SEQ ID NO: 3418 - RNA, 17 nt, Artificial Sequence
  Description of Artificial Sequence:  Nucleic Acid
  misc_feature: oligonucleotide substrate
guguggggacaucauua

SEQ ID NO: 3419 - RNA, 17 nt, Artificial Sequence
  Description of Artificial Sequence:  Nucleic Acid
  misc_feature: oligonucleotide substrate
guggggacaucauuaug

SEQ ID NO: 3420 - RNA, 17 nt, Artificial Sequence
  Description of Artificial Sequence:  Nucleic Acid
  misc_feature: oligonucleotide substrate
gggacaucauuaugggu

SEQ ID NO: 3421 - RNA, 17 nt, Artificial Sequence
  Description of Artificial Sequence:  Nucleic Acid
  misc_feature: oligonucleotide substrate
acaucauuaugggucua

SEQ ID NO: 3422 - RNA, 17 nt, Artificial Sequence
  Description of Artificial Sequence:  Nucleic Acid
  misc_feature: oligonucleotide substrate
cauuaugggucuaccug

SEQ ID NO: 3423 - RNA, 17 nt, Artificial Sequence
  Description of Artificial Sequence:  Nucleic Acid
  misc_feature: oligonucleotide substrate
augggucuaccugucuc

SEQ ID NO: 3424 - RNA, 17 nt, Artificial Sequence
  Description of Artificial Sequence:  Nucleic Acid
  misc_feature: oligonucleotide substrate
gucuaccugucuccgcc

SEQ ID NO: 3425 - RNA, 17 nt, Artificial Sequence
  Description of Artificial Sequence:  Nucleic Acid
  misc_feature: oligonucleotide substrate
cugucuccgcccgaagg

SEQ ID NO: 3426 - RNA, 17 nt, Artificial Sequence
  Description of Artificial Sequence:  Nucleic Acid
  misc_feature: oligonucleotide substrate
ggagggagauacuccua

SEQ ID NO: 3427 - RNA, 17 nt, Artificial Sequence
  Description of Artificial Sequence:  Nucleic Acid
  misc_feature: oligonucleotide substrate
agggagauacuccuagg

SEQ ID NO: 3428 - RNA, 17 nt, Artificial Sequence
  Description of Artificial Sequence:  Nucleic Acid
  misc_feature: oligonucleotide substrate
cuccuaggaccagccga

SEQ ID NO: 3429 - RNA, 17 nt, Artificial Sequence
  Description of Artificial Sequence:  Nucleic Acid
  misc_feature: oligonucleotide substrate
uaggaccagccgacagu

SEQ ID NO: 3430 - RNA, 17 nt, Artificial Sequence
  Description of Artificial Sequence:  Nucleic Acid
  misc_feature: oligonucleotide substrate
accagccgacagucuug

SEQ ID NO: 3431 - RNA, 17 nt, Artificial Sequence
  Description of Artificial Sequence:  Nucleic Acid
  misc_feature: oligonucleotide substrate
agccgacagucuugagg

SEQ ID NO: 3432 - RNA, 17 nt, Artificial Sequence
  Description of Artificial Sequence:  Nucleic Acid
  misc_feature: oligonucleotide substrate
cuugaggggcaggggug

SEQ ID NO: 3433 - RNA, 17 nt, Artificial Sequence
  Description of Artificial Sequence:  Nucleic Acid
  misc_feature: oligonucleotide substrate
gggcagggguggcgacu

SEQ ID NO: 3434 - RNA, 17 nt, Artificial Sequence
  Description of Artificial Sequence:  Nucleic Acid
  misc_feature: oligonucleotide substrate
cagggguggcgacuccu

SEQ ID NO: 3435 - RNA, 17 nt, Artificial Sequence
  Description of Artificial Sequence:  Nucleic Acid
  misc_feature: oligonucleotide substrate
ggguggcgacuccucgc

SEQ ID NO: 3436 - RNA, 17 nt, Artificial Sequence
  Description of Artificial Sequence:  Nucleic Acid
  misc_feature: oligonucleotide substrate
gacuccucgcgcccauu

SEQ ID NO: 3437 - RNA, 17 nt, Artificial Sequence
  Description of Artificial Sequence:  Nucleic Acid
  misc_feature: oligonucleotide substrate
cuccucgcgcccauuac

SEQ ID NO: 3438 - RNA, 17 nt, Artificial Sequence
  Description of Artificial Sequence:  Nucleic Acid
  misc_feature: oligonucleotide substrate
ucgcgcccauuacggcc

SEQ ID NO: 3439 - RNA, 17 nt, Artificial Sequence
  Description of Artificial Sequence:  Nucleic Acid
  misc_feature: oligonucleotide substrate
cgcccauuacggccuac

SEQ ID NO: 3440 - RNA, 17 nt, Artificial Sequence
  Description of Artificial Sequence:  Nucleic Acid
  misc_feature: oligonucleotide substrate
ccauuacggccuacucc

SEQ ID NO: 3441 - RNA, 17 nt, Artificial Sequence
  Description of Artificial Sequence:  Nucleic Acid
  misc_feature: oligonucleotide substrate
uacggccuacucccaac

SEQ ID NO: 3442 - RNA, 17 nt, Artificial Sequence
  Description of Artificial Sequence:  Nucleic Acid
  misc_feature: oligonucleotide substrate
uacucccaacagacgcg

SEQ ID NO: 3443 - RNA, 17 nt, Artificial Sequence
  Description of Artificial Sequence:  Nucleic Acid
  misc_feature: oligonucleotide substrate
cccaacagacgcggggc

SEQ ID NO: 3444 - RNA, 17 nt, Artificial Sequence
  Description of Artificial Sequence:  Nucleic Acid
  misc_feature: oligonucleotide substrate
caacagacgcggggccu

SEQ ID NO: 3445 - RNA, 17 nt, Artificial Sequence
  Description of Artificial Sequence:  Nucleic Acid
  misc_feature: oligonucleotide substrate
gacgcggggccuguuug

SEQ ID NO: 3446 - RNA, 17 nt, Artificial Sequence
  Description of Artificial Sequence:  Nucleic Acid
  misc_feature: oligonucleotide substrate
cggggccuguuuggcug

SEQ ID NO: 3447 - RNA, 17 nt, Artificial Sequence
  Description of Artificial Sequence:  Nucleic Acid
  misc_feature: oligonucleotide substrate
ccuguuuggcugcauua

SEQ ID NO: 3448 - RNA, 17 nt, Artificial Sequence
  Description of Artificial Sequence:  Nucleic Acid
  misc_feature: oligonucleotide substrate
guuuggcugcauuauca

SEQ ID NO: 3449 - RNA, 17 nt, Artificial Sequence
  Description of Artificial Sequence:  Nucleic Acid
  misc_feature: oligonucleotide substrate
uuggcugcauuaucacc

SEQ ID NO: 3450 - RNA, 17 nt, Artificial Sequence
  Description of Artificial Sequence:  Nucleic Acid
  misc_feature: oligonucleotide substrate
gcugcauuaucaccagc

SEQ ID NO: 3451 - RNA, 17 nt, Artificial Sequence
  Description of Artificial Sequence:  Nucleic Acid
  misc_feature: oligonucleotide substrate
gcauuaucaccagccuc

SEQ ID NO: 3452 - RNA, 17 nt, Artificial Sequence
  Description of Artificial Sequence:  Nucleic Acid
  misc_feature: oligonucleotide substrate
uaucaccagccucacgg

SEQ ID NO: 3453 - RNA, 17 nt, Artificial Sequence
  Description of Artificial Sequence:  Nucleic Acid
  misc_feature: oligonucleotide substrate
ccagccucacgggccgg

SEQ ID NO: 3454 - RNA, 17 nt, Artificial Sequence
  Description of Artificial Sequence:  Nucleic Acid
  misc_feature: oligonucleotide substrate
ccucacgggccgggaca

SEQ ID NO: 3455 - RNA, 17 nt, Artificial Sequence
  Description of Artificial Sequence:  Nucleic Acid
  misc_feature: oligonucleotide substrate
gggccgggacaagaacc

SEQ ID NO: 3456 - RNA, 17 nt, Artificial Sequence
  Description of Artificial Sequence:  Nucleic Acid
  misc_feature: oligonucleotide substrate
ggacaagaaccaagucg

SEQ ID NO: 3457 - RNA, 17 nt, Artificial Sequence
  Description of Artificial Sequence:  Nucleic Acid
  misc_feature: oligonucleotide substrate
agaaccaagucgagggg

SEQ ID NO: 3458 - RNA, 17 nt, Artificial Sequence
  Description of Artificial Sequence:  Nucleic Acid
  misc_feature: oligonucleotide substrate
agggggaaguucaagug

SEQ ID NO: 3459 - RNA, 17 nt, Artificial Sequence
  Description of Artificial Sequence:  Nucleic Acid
  misc_feature: oligonucleotide substrate
aaguucaagugguuucc

SEQ ID NO: 3460 - RNA, 17 nt, Artificial Sequence
  Description of Artificial Sequence:  Nucleic Acid
  misc_feature: oligonucleotide substrate
uucaagugguuuccacc

SEQ ID NO: 3461 - RNA, 17 nt, Artificial Sequence
  Description of Artificial Sequence:  Nucleic Acid
  misc_feature: oligonucleotide substrate
ugguuuccaccgcgacg

SEQ ID NO: 3462 - RNA, 17 nt, Artificial Sequence
  Description of Artificial Sequence:  Nucleic Acid
  misc_feature: oligonucleotide substrate
uuuccaccgcgacgcag

SEQ ID NO: 3463 - RNA, 17 nt, Artificial Sequence
  Description of Artificial Sequence:  Nucleic Acid
  misc_feature: oligonucleotide substrate
ccaccgcgacgcagucu

SEQ ID NO: 3464 - RNA, 17 nt, Artificial Sequence
  Description of Artificial Sequence:  Nucleic Acid
  misc_feature: oligonucleotide substrate
accgcgacgcagucuuu

SEQ ID NO: 3465 - RNA, 17 nt, Artificial Sequence
  Description of Artificial Sequence:  Nucleic Acid
  misc_feature: oligonucleotide substrate
gcgacgcagucuuuccu

SEQ ID NO: 3466 - RNA, 17 nt, Artificial Sequence
  Description of Artificial Sequence:  Nucleic Acid
  misc_feature: oligonucleotide substrate
cuuuccuagcgaccugc

SEQ ID NO: 3467 - RNA, 17 nt, Artificial Sequence
  Description of Artificial Sequence:  Nucleic Acid
  misc_feature: oligonucleotide substrate
uccuagcgaccugcguc

SEQ ID NO: 3468 - RNA, 17 nt, Artificial Sequence
  Description of Artificial Sequence:  Nucleic Acid
  misc_feature: oligonucleotide substrate
agcgaccugcgucaacg

SEQ ID NO: 3469 - RNA, 17 nt, Artificial Sequence
  Description of Artificial Sequence:  Nucleic Acid
  misc_feature: oligonucleotide substrate
cgaccugcgucaacggc

SEQ ID NO: 3470 - RNA, 17 nt, Artificial Sequence
  Description of Artificial Sequence:  Nucleic Acid
  misc_feature: oligonucleotide substrate
cugcgucaacggcgugu

SEQ ID NO: 3471 - RNA, 17 nt, Artificial Sequence
  Description of Artificial Sequence:  Nucleic Acid
  misc_feature: oligonucleotide substrate
cgucaacggcgugugcu

SEQ ID NO: 3472 - RNA, 17 nt, Artificial Sequence
  Description of Artificial Sequence:  Nucleic Acid
  misc_feature: oligonucleotide substrate
ucaacggcgugugcugg

SEQ ID NO: 3473 - RNA, 17 nt, Artificial Sequence
  Description of Artificial Sequence:  Nucleic Acid
  misc_feature: oligonucleotide substrate
aacggcgugugcuggac

SEQ ID NO: 3474 - RNA, 17 nt, Artificial Sequence
  Description of Artificial Sequence:  Nucleic Acid
  misc_feature: oligonucleotide substrate
cggcgugugcuggacug

SEQ ID NO: 3475 - RNA, 17 nt, Artificial Sequence
  Description of Artificial Sequence:  Nucleic Acid
  misc_feature: oligonucleotide substrate
ugugcuggacugucuac

SEQ ID NO: 3476 - RNA, 17 nt, Artificial Sequence
  Description of Artificial Sequence:  Nucleic Acid
  misc_feature: oligonucleotide substrate
gcuggacugucuaccac

SEQ ID NO: 3477 - RNA, 17 nt, Artificial Sequence
  Description of Artificial Sequence:  Nucleic Acid
  misc_feature: oligonucleotide substrate
gacugucuaccacggcg

SEQ ID NO: 3478 - RNA, 17 nt, Artificial Sequence
  Description of Artificial Sequence:  Nucleic Acid
  misc_feature: oligonucleotide substrate
ugucuaccacggcgccg

SEQ ID NO: 3479 - RNA, 17 nt, Artificial Sequence
  Description of Artificial Sequence:  Nucleic Acid
  misc_feature: oligonucleotide substrate
cuaccacggcgccggcu

SEQ ID NO: 3480 - RNA, 17 nt, Artificial Sequence
  Description of Artificial Sequence:  Nucleic Acid
  misc_feature: oligonucleotide substrate
accacggcgccggcuca

SEQ ID NO: 3481 - RNA, 17 nt, Artificial Sequence
  Description of Artificial Sequence:  Nucleic Acid
  misc_feature: oligonucleotide substrate
cggcgccggcucaaaga

SEQ ID NO: 3482 - RNA, 17 nt, Artificial Sequence
  Description of Artificial Sequence:  Nucleic Acid
  misc_feature: oligonucleotide substrate
gcucaaagacccuagcc

SEQ ID NO: 3483 - RNA, 17 nt, Artificial Sequence
  Description of Artificial Sequence:  Nucleic Acid
  misc_feature: oligonucleotide substrate
agacccuagccggccca

SEQ ID NO: 3484 - RNA, 17 nt, Artificial Sequence
  Description of Artificial Sequence:  Nucleic Acid
  misc_feature: oligonucleotide substrate
ccuagccggcccaaagg

SEQ ID NO: 3485 - RNA, 17 nt, Artificial Sequence
  Description of Artificial Sequence:  Nucleic Acid
  misc_feature: oligonucleotide substrate
cccaaaggguccaauca

SEQ ID NO: 3486 - RNA, 17 nt, Artificial Sequence
  Description of Artificial Sequence:  Nucleic Acid
  misc_feature: oligonucleotide substrate
aggguccaaucacccaa

SEQ ID NO: 3487 - RNA, 17 nt, Artificial Sequence
  Description of Artificial Sequence:  Nucleic Acid
  misc_feature: oligonucleotide substrate
guccaaucacccaaaug

SEQ ID NO: 3488 - RNA, 17 nt, Artificial Sequence
  Description of Artificial Sequence:  Nucleic Acid
  misc_feature: oligonucleotide substrate
ucacccaaauguacacc

SEQ ID NO: 3489 - RNA, 17 nt, Artificial Sequence
  Description of Artificial Sequence:  Nucleic Acid
  misc_feature: oligonucleotide substrate
acccaaauguacaccaa

SEQ ID NO: 3490 - RNA, 17 nt, Artificial Sequence
  Description of Artificial Sequence:  Nucleic Acid
  misc_feature: oligonucleotide substrate
ccaaauguacaccaaug

SEQ ID NO: 3491 - RNA, 17 nt, Artificial Sequence
  Description of Artificial Sequence:  Nucleic Acid
  misc_feature: oligonucleotide substrate
aaauguacaccaaugua

SEQ ID NO: 3492 - RNA, 17 nt, Artificial Sequence
  Description of Artificial Sequence:  Nucleic Acid
  misc_feature: oligonucleotide substrate
guacaccaauguagacc

SEQ ID NO: 3493 - RNA, 17 nt, Artificial Sequence
  Description of Artificial Sequence:  Nucleic Acid
  misc_feature: oligonucleotide substrate
acaccaauguagaccag

SEQ ID NO: 3494 - RNA, 17 nt, Artificial Sequence
  Description of Artificial Sequence:  Nucleic Acid
  misc_feature: oligonucleotide substrate
caauguagaccaggacc

SEQ ID NO: 3495 - RNA, 17 nt, Artificial Sequence
  Description of Artificial Sequence:  Nucleic Acid
  misc_feature: oligonucleotide substrate
agaccaggaccucgucg

SEQ ID NO: 3496 - RNA, 17 nt, Artificial Sequence
  Description of Artificial Sequence:  Nucleic Acid
  misc_feature: oligonucleotide substrate
aggaccucgucggaugg

SEQ ID NO: 3497 - RNA, 17 nt, Artificial Sequence
  Description of Artificial Sequence:  Nucleic Acid
  misc_feature: oligonucleotide substrate
cucgucggauggccggc

SEQ ID NO: 3498 - RNA, 17 nt, Artificial Sequence
  Description of Artificial Sequence:  Nucleic Acid
  misc_feature: oligonucleotide substrate
gucggauggccggcgcc

SEQ ID NO: 3499 - RNA, 17 nt, Artificial Sequence
  Description of Artificial Sequence:  Nucleic Acid
  misc_feature: oligonucleotide substrate
gauggccggcgcccccc

SEQ ID NO: 3500 - RNA, 17 nt, Artificial Sequence
  Description of Artificial Sequence:  Nucleic Acid
  misc_feature: oligonucleotide substrate
uggccggcgccccccgg

SEQ ID NO: 3501 - RNA, 17 nt, Artificial Sequence
  Description of Artificial Sequence:  Nucleic Acid
  misc_feature: oligonucleotide substrate
cccccggagcgcggucc

SEQ ID NO: 3502 - RNA, 17 nt, Artificial Sequence
  Description of Artificial Sequence:  Nucleic Acid
  misc_feature: oligonucleotide substrate
cccggagcgcgguccuu

SEQ ID NO: 3503 - RNA, 17 nt, Artificial Sequence
  Description of Artificial Sequence:  Nucleic Acid
  misc_feature: oligonucleotide substrate
ggagcgcgguccuugac

SEQ ID NO: 3504 - RNA, 17 nt, Artificial Sequence
  Description of Artificial Sequence:  Nucleic Acid
  misc_feature: oligonucleotide substrate
gguccuugacaccaugc

SEQ ID NO: 3505 - RNA, 17 nt, Artificial Sequence
  Description of Artificial Sequence:  Nucleic Acid
  misc_feature: oligonucleotide substrate
uccuugacaccaugcac

SEQ ID NO: 3506 - RNA, 17 nt, Artificial Sequence
  Description of Artificial Sequence:  Nucleic Acid
  misc_feature: oligonucleotide substrate
uugacaccaugcaccug

SEQ ID NO: 3507 - RNA, 17 nt, Artificial Sequence
  Description of Artificial Sequence:  Nucleic Acid
  misc_feature: oligonucleotide substrate
gacaccaugcaccugcg

SEQ ID NO: 3508 - RNA, 17 nt, Artificial Sequence
  Description of Artificial Sequence:  Nucleic Acid
  misc_feature: oligonucleotide substrate
caccaugcaccugcggc

SEQ ID NO: 3509 - RNA, 17 nt, Artificial Sequence
  Description of Artificial Sequence:  Nucleic Acid
  misc_feature: oligonucleotide substrate
augcaccugcggcggcu

SEQ ID NO: 3510 - RNA, 17 nt, Artificial Sequence
  Description of Artificial Sequence:  Nucleic Acid
  misc_feature: oligonucleotide substrate
caccugcggcggcucgg

SEQ ID NO: 3511 - RNA, 17 nt, Artificial Sequence
  Description of Artificial Sequence:  Nucleic Acid
  misc_feature: oligonucleotide substrate
cugcggcggcucggacc

SEQ ID NO: 3512 - RNA, 17 nt, Artificial Sequence
  Description of Artificial Sequence:  Nucleic Acid
  misc_feature: oligonucleotide substrate
cggcucggaccuuuacu

SEQ ID NO: 3513 - RNA, 17 nt, Artificial Sequence
  Description of Artificial Sequence:  Nucleic Acid
  misc_feature: oligonucleotide substrate
ggaccuuuacuugguca

SEQ ID NO: 3514 - RNA, 17 nt, Artificial Sequence
  Description of Artificial Sequence:  Nucleic Acid
  misc_feature: oligonucleotide substrate
uuuacuuggucacgaga

SEQ ID NO: 3515 - RNA, 17 nt, Artificial Sequence
  Description of Artificial Sequence:  Nucleic Acid
  misc_feature: oligonucleotide substrate
acuuggucacgagacac

SEQ ID NO: 3516 - RNA, 17 nt, Artificial Sequence
  Description of Artificial Sequence:  Nucleic Acid
  misc_feature: oligonucleotide substrate
gucacgagacacgcuga

SEQ ID NO: 3517 - RNA, 17 nt, Artificial Sequence
  Description of Artificial Sequence:  Nucleic Acid
  misc_feature: oligonucleotide substrate
cacgagacacgcugaug

SEQ ID NO: 3518 - RNA, 17 nt, Artificial Sequence
  Description of Artificial Sequence:  Nucleic Acid
  misc_feature: oligonucleotide substrate
cgagacacgcugauguc

SEQ ID NO: 3519 - RNA, 17 nt, Artificial Sequence
  Description of Artificial Sequence:  Nucleic Acid
  misc_feature: oligonucleotide substrate
acacgcugaugucauuc

SEQ ID NO: 3520 - RNA, 17 nt, Artificial Sequence
  Description of Artificial Sequence:  Nucleic Acid
  misc_feature: oligonucleotide substrate
acgcugaugucauuccg

SEQ ID NO: 3521 - RNA, 17 nt, Artificial Sequence
  Description of Artificial Sequence:  Nucleic Acid
  misc_feature: oligonucleotide substrate
cugaugucauuccggug

SEQ ID NO: 3522 - RNA, 17 nt, Artificial Sequence
  Description of Artificial Sequence:  Nucleic Acid
  misc_feature: oligonucleotide substrate
ucauuccggugcgccgg

SEQ ID NO: 3523 - RNA, 17 nt, Artificial Sequence
  Description of Artificial Sequence:  Nucleic Acid
  misc_feature: oligonucleotide substrate
auuccggugcgccggcg

SEQ ID NO: 3524 - RNA, 17 nt, Artificial Sequence
  Description of Artificial Sequence:  Nucleic Acid
  misc_feature: oligonucleotide substrate
uccggugcgccggcggg

SEQ ID NO: 3525 - RNA, 17 nt, Artificial Sequence
  Description of Artificial Sequence:  Nucleic Acid
  misc_feature: oligonucleotide substrate
gugcgccggcgggguga

SEQ ID NO: 3526 - RNA, 17 nt, Artificial Sequence
  Description of Artificial Sequence:  Nucleic Acid
  misc_feature: oligonucleotide substrate
ccggcggggugacagca

SEQ ID NO: 3527 - RNA, 17 nt, Artificial Sequence
  Description of Artificial Sequence:  Nucleic Acid
  misc_feature: oligonucleotide substrate
gcggggugacagcaggg

SEQ ID NO: 3528 - RNA, 17 nt, Artificial Sequence
  Description of Artificial Sequence:  Nucleic Acid
  misc_feature: oligonucleotide substrate
gggugacagcaggggga

SEQ ID NO: 3529 - RNA, 17 nt, Artificial Sequence
  Description of Artificial Sequence:  Nucleic Acid
  misc_feature: oligonucleotide substrate
cagggggagcuuacuau

SEQ ID NO: 3530 - RNA, 17 nt, Artificial Sequence
  Description of Artificial Sequence:  Nucleic Acid
  misc_feature: oligonucleotide substrate
gggagcuuacuaucccc

SEQ ID NO: 3531 - RNA, 17 nt, Artificial Sequence
  Description of Artificial Sequence:  Nucleic Acid
  misc_feature: oligonucleotide substrate
agcuuacuaucccccag

SEQ ID NO: 3532 - RNA, 17 nt, Artificial Sequence
  Description of Artificial Sequence:  Nucleic Acid
  misc_feature: oligonucleotide substrate
ucccccaggcccaucuc

SEQ ID NO: 3533 - RNA, 17 nt, Artificial Sequence
  Description of Artificial Sequence:  Nucleic Acid
  misc_feature: oligonucleotide substrate
ccaggcccaucuccuac

SEQ ID NO: 3534 - RNA, 17 nt, Artificial Sequence
  Description of Artificial Sequence:  Nucleic Acid
  misc_feature: oligonucleotide substrate
caucuccuacuugaagg

SEQ ID NO: 3535 - RNA, 17 nt, Artificial Sequence
  Description of Artificial Sequence:  Nucleic Acid
  misc_feature: oligonucleotide substrate
cuugaagggcuccucgg

SEQ ID NO: 3536 - RNA, 17 nt, Artificial Sequence
  Description of Artificial Sequence:  Nucleic Acid
  misc_feature: oligonucleotide substrate
cuccucgggcgguccac

SEQ ID NO: 3537 - RNA, 17 nt, Artificial Sequence
  Description of Artificial Sequence:  Nucleic Acid
  misc_feature: oligonucleotide substrate
cucgggcgguccacugc

SEQ ID NO: 3538 - RNA, 17 nt, Artificial Sequence
  Description of Artificial Sequence:  Nucleic Acid
  misc_feature: oligonucleotide substrate
ggcgguccacugcucug

SEQ ID NO: 3539 - RNA, 17 nt, Artificial Sequence
  Description of Artificial Sequence:  Nucleic Acid
  misc_feature: oligonucleotide substrate
gguccacugcucugccc

SEQ ID NO: 3540 - RNA, 17 nt, Artificial Sequence
  Description of Artificial Sequence:  Nucleic Acid
  misc_feature: oligonucleotide substrate
acugcucugcccuucgg

SEQ ID NO: 3541 - RNA, 17 nt, Artificial Sequence
  Description of Artificial Sequence:  Nucleic Acid
  misc_feature: oligonucleotide substrate
ccuucggggcacguugu

SEQ ID NO: 3542 - RNA, 17 nt, Artificial Sequence
  Description of Artificial Sequence:  Nucleic Acid
  misc_feature: oligonucleotide substrate
uucggggcacguugugg

SEQ ID NO: 3543 - RNA, 17 nt, Artificial Sequence
  Description of Artificial Sequence:  Nucleic Acid
  misc_feature: oligonucleotide substrate
cggggcacguugugggc

SEQ ID NO: 3544 - RNA, 17 nt, Artificial Sequence
  Description of Artificial Sequence:  Nucleic Acid
  misc_feature: oligonucleotide substrate
ggcacguugugggcauc

SEQ ID NO: 3545 - RNA, 17 nt, Artificial Sequence
  Description of Artificial Sequence:  Nucleic Acid
  misc_feature: oligonucleotide substrate
cguugugggcaucuucc

SEQ ID NO: 3546 - RNA, 17 nt, Artificial Sequence
  Description of Artificial Sequence:  Nucleic Acid
  misc_feature: oligonucleotide substrate
uugugggcaucuuccgg

SEQ ID NO: 3547 - RNA, 17 nt, Artificial Sequence
  Description of Artificial Sequence:  Nucleic Acid
  misc_feature: oligonucleotide substrate
ucuuccgggcugcugug

SEQ ID NO: 3548 - RNA, 17 nt, Artificial Sequence
  Description of Artificial Sequence:  Nucleic Acid
  misc_feature: oligonucleotide substrate
uccgggcugcugugugc

SEQ ID NO: 3549 - RNA, 17 nt, Artificial Sequence
  Description of Artificial Sequence:  Nucleic Acid
  misc_feature: oligonucleotide substrate
gggcugcugugugcacc

SEQ ID NO: 3550 - RNA, 17 nt, Artificial Sequence
  Description of Artificial Sequence:  Nucleic Acid
  misc_feature: oligonucleotide substrate
gcugcugugugcacccg

SEQ ID NO: 3551 - RNA, 17 nt, Artificial Sequence
  Description of Artificial Sequence:  Nucleic Acid
  misc_feature: oligonucleotide substrate
ugcugugugcacccggg

SEQ ID NO: 3552 - RNA, 17 nt, Artificial Sequence
  Description of Artificial Sequence:  Nucleic Acid
  misc_feature: oligonucleotide substrate
cugugugcacccggggg

SEQ ID NO: 3553 - RNA, 17 nt, Artificial Sequence
  Description of Artificial Sequence:  Nucleic Acid
  misc_feature: oligonucleotide substrate
cccgggggguugcgaag

SEQ ID NO: 3554 - RNA, 17 nt, Artificial Sequence
  Description of Artificial Sequence:  Nucleic Acid
  misc_feature: oligonucleotide substrate
gggggguugcgaaggcg

SEQ ID NO: 3555 - RNA, 17 nt, Artificial Sequence
  Description of Artificial Sequence:  Nucleic Acid
  misc_feature: oligonucleotide substrate
uugcgaaggcgguggac

SEQ ID NO: 3556 - RNA, 17 nt, Artificial Sequence
  Description of Artificial Sequence:  Nucleic Acid
  misc_feature: oligonucleotide substrate
cgaaggcgguggacuuu

SEQ ID NO: 3557 - RNA, 17 nt, Artificial Sequence
  Description of Artificial Sequence:  Nucleic Acid
  misc_feature: oligonucleotide substrate
ggcgguggacuuuguac

SEQ ID NO: 3558 - RNA, 17 nt, Artificial Sequence
  Description of Artificial Sequence:  Nucleic Acid
  misc_feature: oligonucleotide substrate
uggacuuuguacccguu

SEQ ID NO: 3559 - RNA, 17 nt, Artificial Sequence
  Description of Artificial Sequence:  Nucleic Acid
  misc_feature: oligonucleotide substrate
gacuuuguacccguuga

SEQ ID NO: 3560 - RNA, 17 nt, Artificial Sequence
  Description of Artificial Sequence:  Nucleic Acid
  misc_feature: oligonucleotide substrate
uuguacccguugagucu

SEQ ID NO: 3561 - RNA, 17 nt, Artificial Sequence
  Description of Artificial Sequence:  Nucleic Acid
  misc_feature: oligonucleotide substrate
cccguugagucuaugga

SEQ ID NO: 3562 - RNA, 17 nt, Artificial Sequence
  Description of Artificial Sequence:  Nucleic Acid
  misc_feature: oligonucleotide substrate
uugagucuauggaaacu

SEQ ID NO: 3563 - RNA, 17 nt, Artificial Sequence
  Description of Artificial Sequence:  Nucleic Acid
  misc_feature: oligonucleotide substrate
cuauggaaacuaccaug

SEQ ID NO: 3564 - RNA, 17 nt, Artificial Sequence
  Description of Artificial Sequence:  Nucleic Acid
  misc_feature: oligonucleotide substrate
uggaaacuaccaugcgg

SEQ ID NO: 3565 - RNA, 17 nt, Artificial Sequence
  Description of Artificial Sequence:  Nucleic Acid
  misc_feature: oligonucleotide substrate
aaacuaccaugcggucc

SEQ ID NO: 3566 - RNA, 17 nt, Artificial Sequence
  Description of Artificial Sequence:  Nucleic Acid
  misc_feature: oligonucleotide substrate
acuaccaugcggucccc

SEQ ID NO: 3567 - RNA, 17 nt, Artificial Sequence
  Description of Artificial Sequence:  Nucleic Acid
  misc_feature: oligonucleotide substrate
accaugcgguccccggu

SEQ ID NO: 3568 - RNA, 17 nt, Artificial Sequence
  Description of Artificial Sequence:  Nucleic Acid
  misc_feature: oligonucleotide substrate
gguccccggucuucacg

SEQ ID NO: 3569 - RNA, 17 nt, Artificial Sequence
  Description of Artificial Sequence:  Nucleic Acid
  misc_feature: oligonucleotide substrate
cggucuucacggacaac

SEQ ID NO: 3570 - RNA, 17 nt, Artificial Sequence
  Description of Artificial Sequence:  Nucleic Acid
  misc_feature: oligonucleotide substrate
cuucacggacaacucgu

SEQ ID NO: 3571 - RNA, 17 nt, Artificial Sequence
  Description of Artificial Sequence:  Nucleic Acid
  misc_feature: oligonucleotide substrate
cacggacaacucguccc

SEQ ID NO: 3572 - RNA, 17 nt, Artificial Sequence
  Description of Artificial Sequence:  Nucleic Acid
  misc_feature: oligonucleotide substrate
gacaacucguccccccc

SEQ ID NO: 3573 - RNA, 17 nt, Artificial Sequence
  Description of Artificial Sequence:  Nucleic Acid
  misc_feature: oligonucleotide substrate
cccccccagccguaccg

SEQ ID NO: 3574 - RNA, 17 nt, Artificial Sequence
  Description of Artificial Sequence:  Nucleic Acid
  misc_feature: oligonucleotide substrate
ccccagccguaccgcag

SEQ ID NO: 3575 - RNA, 17 nt, Artificial Sequence
  Description of Artificial Sequence:  Nucleic Acid
  misc_feature: oligonucleotide substrate
ccagccguaccgcagac

SEQ ID NO: 3576 - RNA, 17 nt, Artificial Sequence
  Description of Artificial Sequence:  Nucleic Acid
  misc_feature: oligonucleotide substrate
gccguaccgcagacauu

SEQ ID NO: 3577 - RNA, 17 nt, Artificial Sequence
  Description of Artificial Sequence:  Nucleic Acid
  misc_feature: oligonucleotide substrate
uaccgcagacauuccaa

SEQ ID NO: 3578 - RNA, 17 nt, Artificial Sequence
  Description of Artificial Sequence:  Nucleic Acid
  misc_feature: oligonucleotide substrate
ccgcagacauuccaagu

SEQ ID NO: 3579 - RNA, 17 nt, Artificial Sequence
  Description of Artificial Sequence:  Nucleic Acid
  misc_feature: oligonucleotide substrate
cauuccaaguggcccac

SEQ ID NO: 3580 - RNA, 17 nt, Artificial Sequence
  Description of Artificial Sequence:  Nucleic Acid
  misc_feature: oligonucleotide substrate
uccaaguggcccaccua

SEQ ID NO: 3581 - RNA, 17 nt, Artificial Sequence
  Description of Artificial Sequence:  Nucleic Acid
  misc_feature: oligonucleotide substrate
aguggcccaccuacacg

SEQ ID NO: 3582 - RNA, 17 nt, Artificial Sequence
  Description of Artificial Sequence:  Nucleic Acid
  misc_feature: oligonucleotide substrate
gcccaccuacacgcucc

SEQ ID NO: 3583 - RNA, 17 nt, Artificial Sequence
  Description of Artificial Sequence:  Nucleic Acid
  misc_feature: oligonucleotide substrate
ccaccuacacgcuccca

SEQ ID NO: 3584 - RNA, 17 nt, Artificial Sequence
  Description of Artificial Sequence:  Nucleic Acid
  misc_feature: oligonucleotide substrate
accuacacgcucccacu

SEQ ID NO: 3585 - RNA, 17 nt, Artificial Sequence
  Description of Artificial Sequence:  Nucleic Acid
  misc_feature: oligonucleotide substrate
acgcucccacuggcagc

SEQ ID NO: 3586 - RNA, 17 nt, Artificial Sequence
  Description of Artificial Sequence:  Nucleic Acid
  misc_feature: oligonucleotide substrate
ucccacuggcagcggca

SEQ ID NO: 3587 - RNA, 17 nt, Artificial Sequence
  Description of Artificial Sequence:  Nucleic Acid
  misc_feature: oligonucleotide substrate
cacuggcagcggcaaga

SEQ ID NO: 3588 - RNA, 17 nt, Artificial Sequence
  Description of Artificial Sequence:  Nucleic Acid
  misc_feature: oligonucleotide substrate
uggcagcggcaagagca

SEQ ID NO: 3589 - RNA, 17 nt, Artificial Sequence
  Description of Artificial Sequence:  Nucleic Acid
  misc_feature: oligonucleotide substrate
cggcaagagcacuaagg

SEQ ID NO: 3590 - RNA, 17 nt, Artificial Sequence
  Description of Artificial Sequence:  Nucleic Acid
  misc_feature: oligonucleotide substrate
gcaagagcacuaaggua

SEQ ID NO: 3591 - RNA, 17 nt, Artificial Sequence
  Description of Artificial Sequence:  Nucleic Acid
  misc_feature: oligonucleotide substrate
gcacuaagguaccggcu

SEQ ID NO: 3592 - RNA, 17 nt, Artificial Sequence
  Description of Artificial Sequence:  Nucleic Acid
  misc_feature: oligonucleotide substrate
acuaagguaccggcugc

SEQ ID NO: 3593 - RNA, 17 nt, Artificial Sequence
  Description of Artificial Sequence:  Nucleic Acid
  misc_feature: oligonucleotide substrate
agguaccggcugcauau

SEQ ID NO: 3594 - RNA, 17 nt, Artificial Sequence
  Description of Artificial Sequence:  Nucleic Acid
  misc_feature: oligonucleotide substrate
uaccggcugcauaugca

SEQ ID NO: 3595 - RNA, 17 nt, Artificial Sequence
  Description of Artificial Sequence:  Nucleic Acid
  misc_feature: oligonucleotide substrate
ccggcugcauaugcagc

SEQ ID NO: 3596 - RNA, 17 nt, Artificial Sequence
  Description of Artificial Sequence:  Nucleic Acid
  misc_feature: oligonucleotide substrate
ggcugcauaugcagccc

SEQ ID NO: 3597 - RNA, 17 nt, Artificial Sequence
  Description of Artificial Sequence:  Nucleic Acid
  misc_feature: oligonucleotide substrate
cugcauaugcagcccaa

SEQ ID NO: 3598 - RNA, 17 nt, Artificial Sequence
  Description of Artificial Sequence:  Nucleic Acid
  misc_feature: oligonucleotide substrate
cauaugcagcccaaggg

SEQ ID NO: 3599 - RNA, 17 nt, Artificial Sequence
  Description of Artificial Sequence:  Nucleic Acid
  misc_feature: oligonucleotide substrate
gcccaaggguacaaagu

SEQ ID NO: 3600 - RNA, 17 nt, Artificial Sequence
  Description of Artificial Sequence:  Nucleic Acid
  misc_feature: oligonucleotide substrate
ccaaggguacaaagugc

SEQ ID NO: 3601 - RNA, 17 nt, Artificial Sequence
  Description of Artificial Sequence:  Nucleic Acid
  misc_feature: oligonucleotide substrate
gguacaaagugcucguc

SEQ ID NO: 3602 - RNA, 17 nt, Artificial Sequence
  Description of Artificial Sequence:  Nucleic Acid
  misc_feature: oligonucleotide substrate
uacaaagugcucguccu

SEQ ID NO: 3603 - RNA, 17 nt, Artificial Sequence
  Description of Artificial Sequence:  Nucleic Acid
  misc_feature: oligonucleotide substrate
aagugcucguccuaaau

SEQ ID NO: 3604 - RNA, 17 nt, Artificial Sequence
  Description of Artificial Sequence:  Nucleic Acid
  misc_feature: oligonucleotide substrate
cguccuaaauccguccg

SEQ ID NO: 3605 - RNA, 17 nt, Artificial Sequence
  Description of Artificial Sequence:  Nucleic Acid
  misc_feature: oligonucleotide substrate
cuaaauccguccguuac

SEQ ID NO: 3606 - RNA, 17 nt, Artificial Sequence
  Description of Artificial Sequence:  Nucleic Acid
  misc_feature: oligonucleotide substrate
auccguccguuaccgcc

SEQ ID NO: 3607 - RNA, 17 nt, Artificial Sequence
  Description of Artificial Sequence:  Nucleic Acid
  misc_feature: oligonucleotide substrate
cguccguuaccgccacc

SEQ ID NO: 3608 - RNA, 17 nt, Artificial Sequence
  Description of Artificial Sequence:  Nucleic Acid
  misc_feature: oligonucleotide substrate
ccguuaccgccaccuua

SEQ ID NO: 3609 - RNA, 17 nt, Artificial Sequence
  Description of Artificial Sequence:  Nucleic Acid
  misc_feature: oligonucleotide substrate
uuaccgccaccuuaggg

SEQ ID NO: 3610 - RNA, 17 nt, Artificial Sequence
  Description of Artificial Sequence:  Nucleic Acid
  misc_feature: oligonucleotide substrate
accuuaggguuuggggc

SEQ ID NO: 3611 - RNA, 17 nt, Artificial Sequence
  Description of Artificial Sequence:  Nucleic Acid
  misc_feature: oligonucleotide substrate
gguuuggggcguauaug

SEQ ID NO: 3612 - RNA, 17 nt, Artificial Sequence
  Description of Artificial Sequence:  Nucleic Acid
  misc_feature: oligonucleotide substrate
uuuggggcguauauguc

SEQ ID NO: 3613 - RNA, 17 nt, Artificial Sequence
  Description of Artificial Sequence:  Nucleic Acid
  misc_feature: oligonucleotide substrate
uggggcguauaugucua

SEQ ID NO: 3614 - RNA, 17 nt, Artificial Sequence
  Description of Artificial Sequence:  Nucleic Acid
  misc_feature: oligonucleotide substrate
gggcguauaugucuaag

SEQ ID NO: 3615 - RNA, 17 nt, Artificial Sequence
  Description of Artificial Sequence:  Nucleic Acid
  misc_feature: oligonucleotide substrate
gcguauaugucuaaggc

SEQ ID NO: 3616 - RNA, 17 nt, Artificial Sequence
  Description of Artificial Sequence:  Nucleic Acid
  misc_feature: oligonucleotide substrate
ugucuaaggcacacggu

SEQ ID NO: 3617 - RNA, 17 nt, Artificial Sequence
  Description of Artificial Sequence:  Nucleic Acid
  misc_feature: oligonucleotide substrate
ucuaaggcacacggugu

SEQ ID NO: 3618 - RNA, 17 nt, Artificial Sequence
  Description of Artificial Sequence:  Nucleic Acid
  misc_feature: oligonucleotide substrate
uaaggcacacggugucg

SEQ ID NO: 3619 - RNA, 17 nt, Artificial Sequence
  Description of Artificial Sequence:  Nucleic Acid
  misc_feature: oligonucleotide substrate
ggcacacggugucgauc

SEQ ID NO: 3620 - RNA, 17 nt, Artificial Sequence
  Description of Artificial Sequence:  Nucleic Acid
  misc_feature: oligonucleotide substrate
cacacggugucgauccu

SEQ ID NO: 3621 - RNA, 17 nt, Artificial Sequence
  Description of Artificial Sequence:  Nucleic Acid
  misc_feature: oligonucleotide substrate
cggugucgauccuaaca

SEQ ID NO: 3622 - RNA, 17 nt, Artificial Sequence
  Description of Artificial Sequence:  Nucleic Acid
  misc_feature: oligonucleotide substrate
cgauccuaacaucagaa

SEQ ID NO: 3623 - RNA, 17 nt, Artificial Sequence
  Description of Artificial Sequence:  Nucleic Acid
  misc_feature: oligonucleotide substrate
auccuaacaucagaacu

SEQ ID NO: 3624 - RNA, 17 nt, Artificial Sequence
  Description of Artificial Sequence:  Nucleic Acid
  misc_feature: oligonucleotide substrate
acaucagaacuggggua

SEQ ID NO: 3625 - RNA, 17 nt, Artificial Sequence
  Description of Artificial Sequence:  Nucleic Acid
  misc_feature: oligonucleotide substrate
gaacugggguaaggacc

SEQ ID NO: 3626 - RNA, 17 nt, Artificial Sequence
  Description of Artificial Sequence:  Nucleic Acid
  misc_feature: oligonucleotide substrate
ggguaaggaccaucacc

SEQ ID NO: 3627 - RNA, 17 nt, Artificial Sequence
  Description of Artificial Sequence:  Nucleic Acid
  misc_feature: oligonucleotide substrate
uaaggaccaucaccacg

SEQ ID NO: 3628 - RNA, 17 nt, Artificial Sequence
  Description of Artificial Sequence:  Nucleic Acid
  misc_feature: oligonucleotide substrate
ggaccaucaccacgggc

SEQ ID NO: 3629 - RNA, 17 nt, Artificial Sequence
  Description of Artificial Sequence:  Nucleic Acid
  misc_feature: oligonucleotide substrate
ccaucaccacgggcgcc

SEQ ID NO: 3630 - RNA, 17 nt, Artificial Sequence
  Description of Artificial Sequence:  Nucleic Acid
  misc_feature: oligonucleotide substrate
caccacgggcgccccca

SEQ ID NO: 3631 - RNA, 17 nt, Artificial Sequence
  Description of Artificial Sequence:  Nucleic Acid
  misc_feature: oligonucleotide substrate
ccacgggcgcccccauc

SEQ ID NO: 3632 - RNA, 17 nt, Artificial Sequence
  Description of Artificial Sequence:  Nucleic Acid
  misc_feature: oligonucleotide substrate
gcgcccccaucacguac

SEQ ID NO: 3633 - RNA, 17 nt, Artificial Sequence
  Description of Artificial Sequence:  Nucleic Acid
  misc_feature: oligonucleotide substrate
cccccaucacguacucc

SEQ ID NO: 3634 - RNA, 17 nt, Artificial Sequence
  Description of Artificial Sequence:  Nucleic Acid
  misc_feature: oligonucleotide substrate
cccaucacguacuccac

SEQ ID NO: 3635 - RNA, 17 nt, Artificial Sequence
  Description of Artificial Sequence:  Nucleic Acid
  misc_feature: oligonucleotide substrate
caucacguacuccaccu

SEQ ID NO: 3636 - RNA, 17 nt, Artificial Sequence
  Description of Artificial Sequence:  Nucleic Acid
  misc_feature: oligonucleotide substrate
cguacuccaccuauggc

SEQ ID NO: 3637 - RNA, 17 nt, Artificial Sequence
  Description of Artificial Sequence:  Nucleic Acid
  misc_feature: oligonucleotide substrate
cuccaccuauggcaagu

SEQ ID NO: 3638 - RNA, 17 nt, Artificial Sequence
  Description of Artificial Sequence:  Nucleic Acid
  misc_feature: oligonucleotide substrate
caccuauggcaaguucc

SEQ ID NO: 3639 - RNA, 17 nt, Artificial Sequence
  Description of Artificial Sequence:  Nucleic Acid
  misc_feature: oligonucleotide substrate
uauggcaaguuccuugc

SEQ ID NO: 3640 - RNA, 17 nt, Artificial Sequence
  Description of Artificial Sequence:  Nucleic Acid
  misc_feature: oligonucleotide substrate
aguuccuugccgacggu

SEQ ID NO: 3641 - RNA, 17 nt, Artificial Sequence
  Description of Artificial Sequence:  Nucleic Acid
  misc_feature: oligonucleotide substrate
ccuugccgacggugguu

SEQ ID NO: 3642 - RNA, 17 nt, Artificial Sequence
  Description of Artificial Sequence:  Nucleic Acid
  misc_feature: oligonucleotide substrate
ugccgacggugguugcu

SEQ ID NO: 3643 - RNA, 17 nt, Artificial Sequence
  Description of Artificial Sequence:  Nucleic Acid
  misc_feature: oligonucleotide substrate
cgacggugguugcucug

SEQ ID NO: 3644 - RNA, 17 nt, Artificial Sequence
  Description of Artificial Sequence:  Nucleic Acid
  misc_feature: oligonucleotide substrate
cggugguugcucugggg

SEQ ID NO: 3645 - RNA, 17 nt, Artificial Sequence
  Description of Artificial Sequence:  Nucleic Acid
  misc_feature: oligonucleotide substrate
cucugggggcgccuaug

SEQ ID NO: 3646 - RNA, 17 nt, Artificial Sequence
  Description of Artificial Sequence:  Nucleic Acid
  misc_feature: oligonucleotide substrate
cugggggcgccuaugac

SEQ ID NO: 3647 - RNA, 17 nt, Artificial Sequence
  Description of Artificial Sequence:  Nucleic Acid
  misc_feature: oligonucleotide substrate
gggcgccuaugacauca

SEQ ID NO: 3648 - RNA, 17 nt, Artificial Sequence
  Description of Artificial Sequence:  Nucleic Acid
  misc_feature: oligonucleotide substrate
cgccuaugacaucauaa

SEQ ID NO: 3649 - RNA, 17 nt, Artificial Sequence
  Description of Artificial Sequence:  Nucleic Acid
  misc_feature: oligonucleotide substrate
ccuaugacaucauaaug

SEQ ID NO: 3650 - RNA, 17 nt, Artificial Sequence
  Description of Artificial Sequence:  Nucleic Acid
  misc_feature: oligonucleotide substrate
augacaucauaaugugu

SEQ ID NO: 3651 - RNA, 17 nt, Artificial Sequence
  Description of Artificial Sequence:  Nucleic Acid
  misc_feature: oligonucleotide substrate
acaucauaaugugugau

SEQ ID NO: 3652 - RNA, 17 nt, Artificial Sequence
  Description of Artificial Sequence:  Nucleic Acid
  misc_feature: oligonucleotide substrate
aucauaaugugugauga

SEQ ID NO: 3653 - RNA, 17 nt, Artificial Sequence
  Description of Artificial Sequence:  Nucleic Acid
  misc_feature: oligonucleotide substrate
cauaaugugugaugagu

SEQ ID NO: 3654 - RNA, 17 nt, Artificial Sequence
  Description of Artificial Sequence:  Nucleic Acid
  misc_feature: oligonucleotide substrate
aaugugugaugagugcc

SEQ ID NO: 3655 - RNA, 17 nt, Artificial Sequence
  Description of Artificial Sequence:  Nucleic Acid
  misc_feature: oligonucleotide substrate
ugugaugagugccacuc

SEQ ID NO: 3656 - RNA, 17 nt, Artificial Sequence
  Description of Artificial Sequence:  Nucleic Acid
  misc_feature: oligonucleotide substrate
ugaugagugccacucaa

SEQ ID NO: 3657 - RNA, 17 nt, Artificial Sequence
  Description of Artificial Sequence:  Nucleic Acid
  misc_feature: oligonucleotide substrate
ugagugccacucaauug

SEQ ID NO: 3658 - RNA, 17 nt, Artificial Sequence
  Description of Artificial Sequence:  Nucleic Acid
  misc_feature: oligonucleotide substrate
gccacucaauugacucg

SEQ ID NO: 3659 - RNA, 17 nt, Artificial Sequence
  Description of Artificial Sequence:  Nucleic Acid
  misc_feature: oligonucleotide substrate
cucaauugacucgacuu

SEQ ID NO: 3660 - RNA, 17 nt, Artificial Sequence
  Description of Artificial Sequence:  Nucleic Acid
  misc_feature: oligonucleotide substrate
uugacucgacuuccauu

SEQ ID NO: 3661 - RNA, 17 nt, Artificial Sequence
  Description of Artificial Sequence:  Nucleic Acid
  misc_feature: oligonucleotide substrate
cgacuuccauuuugggc

SEQ ID NO: 3662 - RNA, 17 nt, Artificial Sequence
  Description of Artificial Sequence:  Nucleic Acid
  misc_feature: oligonucleotide substrate
cauuuugggcaucggca

SEQ ID NO: 3663 - RNA, 17 nt, Artificial Sequence
  Description of Artificial Sequence:  Nucleic Acid
  misc_feature: oligonucleotide substrate
uuuugggcaucggcaca

SEQ ID NO: 3664 - RNA, 17 nt, Artificial Sequence
  Description of Artificial Sequence:  Nucleic Acid
  misc_feature: oligonucleotide substrate
gggcaucggcacagucc

SEQ ID NO: 3665 - RNA, 17 nt, Artificial Sequence
  Description of Artificial Sequence:  Nucleic Acid
  misc_feature: oligonucleotide substrate
gcaucggcacaguccug

SEQ ID NO: 3666 - RNA, 17 nt, Artificial Sequence
  Description of Artificial Sequence:  Nucleic Acid
  misc_feature: oligonucleotide substrate
ucggcacaguccuggac

SEQ ID NO: 3667 - RNA, 17 nt, Artificial Sequence
  Description of Artificial Sequence:  Nucleic Acid
  misc_feature: oligonucleotide substrate
aguccuggaccaagcgg

SEQ ID NO: 3668 - RNA, 17 nt, Artificial Sequence
  Description of Artificial Sequence:  Nucleic Acid
  misc_feature: oligonucleotide substrate
uggaccaagcggagacg

SEQ ID NO: 3669 - RNA, 17 nt, Artificial Sequence
  Description of Artificial Sequence:  Nucleic Acid
  misc_feature: oligonucleotide substrate
aagcggagacggcugga

SEQ ID NO: 3670 - RNA, 17 nt, Artificial Sequence
  Description of Artificial Sequence:  Nucleic Acid
  misc_feature: oligonucleotide substrate
cggagacggcuggagcg

SEQ ID NO: 3671 - RNA, 17 nt, Artificial Sequence
  Description of Artificial Sequence:  Nucleic Acid
  misc_feature: oligonucleotide substrate
cggcuggagcgcggcuc

SEQ ID NO: 3672 - RNA, 17 nt, Artificial Sequence
  Description of Artificial Sequence:  Nucleic Acid
  misc_feature: oligonucleotide substrate
gcuggagcgcggcucgu

SEQ ID NO: 3673 - RNA, 17 nt, Artificial Sequence
  Description of Artificial Sequence:  Nucleic Acid
  misc_feature: oligonucleotide substrate
ggagcgcggcucgucgu

SEQ ID NO: 3674 - RNA, 17 nt, Artificial Sequence
  Description of Artificial Sequence:  Nucleic Acid
  misc_feature: oligonucleotide substrate
cgcggcucgucgugcuc

SEQ ID NO: 3675 - RNA, 17 nt, Artificial Sequence
  Description of Artificial Sequence:  Nucleic Acid
  misc_feature: oligonucleotide substrate
ggcucgucgugcucgcc

SEQ ID NO: 3676 - RNA, 17 nt, Artificial Sequence
  Description of Artificial Sequence:  Nucleic Acid
  misc_feature: oligonucleotide substrate
cucgucgugcucgccac

SEQ ID NO: 3677 - RNA, 17 nt, Artificial Sequence
  Description of Artificial Sequence:  Nucleic Acid
  misc_feature: oligonucleotide substrate
ucgugcucgccaccgcu

SEQ ID NO: 3678 - RNA, 17 nt, Artificial Sequence
  Description of Artificial Sequence:  Nucleic Acid
  misc_feature: oligonucleotide substrate
ugcucgccaccgcuacg

SEQ ID NO: 3679 - RNA, 17 nt, Artificial Sequence
  Description of Artificial Sequence:  Nucleic Acid
  misc_feature: oligonucleotide substrate
ucgccaccgcuacgccu

SEQ ID NO: 3680 - RNA, 17 nt, Artificial Sequence
  Description of Artificial Sequence:  Nucleic Acid
  misc_feature: oligonucleotide substrate
ccaccgcuacgccuccg

SEQ ID NO: 3681 - RNA, 17 nt, Artificial Sequence
  Description of Artificial Sequence:  Nucleic Acid
  misc_feature: oligonucleotide substrate
accgcuacgccuccggg

SEQ ID NO: 3682 - RNA, 17 nt, Artificial Sequence
  Description of Artificial Sequence:  Nucleic Acid
  misc_feature: oligonucleotide substrate
ccuccgggaucggucac

SEQ ID NO: 3683 - RNA, 17 nt, Artificial Sequence
  Description of Artificial Sequence:  Nucleic Acid
  misc_feature: oligonucleotide substrate
cgggaucggucaccgug

SEQ ID NO: 3684 - RNA, 17 nt, Artificial Sequence
  Description of Artificial Sequence:  Nucleic Acid
  misc_feature: oligonucleotide substrate
gaucggucaccgugcca

SEQ ID NO: 3685 - RNA, 17 nt, Artificial Sequence
  Description of Artificial Sequence:  Nucleic Acid
  misc_feature: oligonucleotide substrate
cggucaccgugccacau

SEQ ID NO: 3686 - RNA, 17 nt, Artificial Sequence
  Description of Artificial Sequence:  Nucleic Acid
  misc_feature: oligonucleotide substrate
gucaccgugccacaucc

SEQ ID NO: 3687 - RNA, 17 nt, Artificial Sequence
  Description of Artificial Sequence:  Nucleic Acid
  misc_feature: oligonucleotide substrate
accgugccacaucccaa

SEQ ID NO: 3688 - RNA, 17 nt, Artificial Sequence
  Description of Artificial Sequence:  Nucleic Acid
  misc_feature: oligonucleotide substrate
cgugccacaucccaaca

SEQ ID NO: 3689 - RNA, 17 nt, Artificial Sequence
  Description of Artificial Sequence:  Nucleic Acid
  misc_feature: oligonucleotide substrate
acaucccaacaucgagg

SEQ ID NO: 3690 - RNA, 17 nt, Artificial Sequence
  Description of Artificial Sequence:  Nucleic Acid
  misc_feature: oligonucleotide substrate
aucccaacaucgaggag

SEQ ID NO: 3691 - RNA, 17 nt, Artificial Sequence
  Description of Artificial Sequence:  Nucleic Acid
  misc_feature: oligonucleotide substrate
ucgaggagauagccuug

SEQ ID NO: 3692 - RNA, 17 nt, Artificial Sequence
  Description of Artificial Sequence:  Nucleic Acid
  misc_feature: oligonucleotide substrate
aggagauagccuugucc

SEQ ID NO: 3693 - RNA, 17 nt, Artificial Sequence
  Description of Artificial Sequence:  Nucleic Acid
  misc_feature: oligonucleotide substrate
auagccuuguccaacac

SEQ ID NO: 3694 - RNA, 17 nt, Artificial Sequence
  Description of Artificial Sequence:  Nucleic Acid
  misc_feature: oligonucleotide substrate
cuuguccaacaccggag

SEQ ID NO: 3695 - RNA, 17 nt, Artificial Sequence
  Description of Artificial Sequence:  Nucleic Acid
  misc_feature: oligonucleotide substrate
uguccaacaccggagag

SEQ ID NO: 3696 - RNA, 17 nt, Artificial Sequence
  Description of Artificial Sequence:  Nucleic Acid
  misc_feature: oligonucleotide substrate
ccggagagauccccuuc

SEQ ID NO: 3697 - RNA, 17 nt, Artificial Sequence
  Description of Artificial Sequence:  Nucleic Acid
  misc_feature: oligonucleotide substrate
ccccuucuauggcaaag

SEQ ID NO: 3698 - RNA, 17 nt, Artificial Sequence
  Description of Artificial Sequence:  Nucleic Acid
  misc_feature: oligonucleotide substrate
cuucuauggcaaagcca

SEQ ID NO: 3699 - RNA, 17 nt, Artificial Sequence
  Description of Artificial Sequence:  Nucleic Acid
  misc_feature: oligonucleotide substrate
auggcaaagccaucccc

SEQ ID NO: 3700 - RNA, 17 nt, Artificial Sequence
  Description of Artificial Sequence:  Nucleic Acid
  misc_feature: oligonucleotide substrate
gcaaagccauccccauc

SEQ ID NO: 3701 - RNA, 17 nt, Artificial Sequence
  Description of Artificial Sequence:  Nucleic Acid
  misc_feature: oligonucleotide substrate
ccauccccaucgagacc

SEQ ID NO: 3702 - RNA, 17 nt, Artificial Sequence
  Description of Artificial Sequence:  Nucleic Acid
  misc_feature: oligonucleotide substrate
ccaucgagaccaucaaa

SEQ ID NO: 3703 - RNA, 17 nt, Artificial Sequence
  Description of Artificial Sequence:  Nucleic Acid
  misc_feature: oligonucleotide substrate
ucgagaccaucaaaggg

SEQ ID NO: 3704 - RNA, 17 nt, Artificial Sequence
  Description of Artificial Sequence:  Nucleic Acid
  misc_feature: oligonucleotide substrate
ggggggaggcaucucau

SEQ ID NO: 3705 - RNA, 17 nt, Artificial Sequence
  Description of Artificial Sequence:  Nucleic Acid
  misc_feature: oligonucleotide substrate
ggggaggcaucucaucu

SEQ ID NO: 3706 - RNA, 17 nt, Artificial Sequence
  Description of Artificial Sequence:  Nucleic Acid
  misc_feature: oligonucleotide substrate
ggcaucucaucuucugc

SEQ ID NO: 3707 - RNA, 17 nt, Artificial Sequence
  Description of Artificial Sequence:  Nucleic Acid
  misc_feature: oligonucleotide substrate
caucuucugccauucca

SEQ ID NO: 3708 - RNA, 17 nt, Artificial Sequence
  Description of Artificial Sequence:  Nucleic Acid
  misc_feature: oligonucleotide substrate
cuucugccauuccaaga

SEQ ID NO: 3709 - RNA, 17 nt, Artificial Sequence
  Description of Artificial Sequence:  Nucleic Acid
  misc_feature: oligonucleotide substrate
aagaagaaaugugacga

SEQ ID NO: 3710 - RNA, 17 nt, Artificial Sequence
  Description of Artificial Sequence:  Nucleic Acid
  misc_feature: oligonucleotide substrate
gaagaaaugugacgagc

SEQ ID NO: 3711 - RNA, 17 nt, Artificial Sequence
  Description of Artificial Sequence:  Nucleic Acid
  misc_feature: oligonucleotide substrate
gaaaugugacgagcucg

SEQ ID NO: 3712 - RNA, 17 nt, Artificial Sequence
  Description of Artificial Sequence:  Nucleic Acid
  misc_feature: oligonucleotide substrate
ugugacgagcucgcugc

SEQ ID NO: 3713 - RNA, 17 nt, Artificial Sequence
  Description of Artificial Sequence:  Nucleic Acid
  misc_feature: oligonucleotide substrate
acgagcucgcugcaaag

SEQ ID NO: 3714 - RNA, 17 nt, Artificial Sequence
  Description of Artificial Sequence:  Nucleic Acid
  misc_feature: oligonucleotide substrate
agcucgcugcaaagcug

SEQ ID NO: 3715 - RNA, 17 nt, Artificial Sequence
  Description of Artificial Sequence:  Nucleic Acid
  misc_feature: oligonucleotide substrate
gcugcaaagcugucggg

SEQ ID NO: 3716 - RNA, 17 nt, Artificial Sequence
  Description of Artificial Sequence:  Nucleic Acid
  misc_feature: oligonucleotide substrate
gcaaagcugucgggccu

SEQ ID NO: 3717 - RNA, 17 nt, Artificial Sequence
  Description of Artificial Sequence:  Nucleic Acid
  misc_feature: oligonucleotide substrate
gcugucgggccucggac

SEQ ID NO: 3718 - RNA, 17 nt, Artificial Sequence
  Description of Artificial Sequence:  Nucleic Acid
  misc_feature: oligonucleotide substrate
ggccucggacuuaacgc

SEQ ID NO: 3719 - RNA, 17 nt, Artificial Sequence
  Description of Artificial Sequence:  Nucleic Acid
  misc_feature: oligonucleotide substrate
cggacuuaacgcuguag

SEQ ID NO: 3720 - RNA, 17 nt, Artificial Sequence
  Description of Artificial Sequence:  Nucleic Acid
  misc_feature: oligonucleotide substrate
gacuuaacgcuguagcg

SEQ ID NO: 3721 - RNA, 17 nt, Artificial Sequence
  Description of Artificial Sequence:  Nucleic Acid
  misc_feature: oligonucleotide substrate
uuaacgcuguagcguau

SEQ ID NO: 3722 - RNA, 17 nt, Artificial Sequence
  Description of Artificial Sequence:  Nucleic Acid
  misc_feature: oligonucleotide substrate
acgcuguagcguauuac

SEQ ID NO: 3723 - RNA, 17 nt, Artificial Sequence
  Description of Artificial Sequence:  Nucleic Acid
  misc_feature: oligonucleotide substrate
gcuguagcguauuaccg

SEQ ID NO: 3724 - RNA, 17 nt, Artificial Sequence
  Description of Artificial Sequence:  Nucleic Acid
  misc_feature: oligonucleotide substrate
uguagcguauuaccggg

SEQ ID NO: 3725 - RNA, 17 nt, Artificial Sequence
  Description of Artificial Sequence:  Nucleic Acid
  misc_feature: oligonucleotide substrate
agcguauuaccgggguc

SEQ ID NO: 3726 - RNA, 17 nt, Artificial Sequence
  Description of Artificial Sequence:  Nucleic Acid
  misc_feature: oligonucleotide substrate
uuaccggggucucgacg

SEQ ID NO: 3727 - RNA, 17 nt, Artificial Sequence
  Description of Artificial Sequence:  Nucleic Acid
  misc_feature: oligonucleotide substrate
gggucucgacguguccg

SEQ ID NO: 3728 - RNA, 17 nt, Artificial Sequence
  Description of Artificial Sequence:  Nucleic Acid
  misc_feature: oligonucleotide substrate
gucucgacguguccguc

SEQ ID NO: 3729 - RNA, 17 nt, Artificial Sequence
  Description of Artificial Sequence:  Nucleic Acid
  misc_feature: oligonucleotide substrate
cucgacguguccgucau

SEQ ID NO: 3730 - RNA, 17 nt, Artificial Sequence
  Description of Artificial Sequence:  Nucleic Acid
  misc_feature: oligonucleotide substrate
acguguccgucauaccg

SEQ ID NO: 3731 - RNA, 17 nt, Artificial Sequence
  Description of Artificial Sequence:  Nucleic Acid
  misc_feature: oligonucleotide substrate
uguccgucauaccggcc

SEQ ID NO: 3732 - RNA, 17 nt, Artificial Sequence
  Description of Artificial Sequence:  Nucleic Acid
  misc_feature: oligonucleotide substrate
uccgucauaccggccag

SEQ ID NO: 3733 - RNA, 17 nt, Artificial Sequence
  Description of Artificial Sequence:  Nucleic Acid
  misc_feature: oligonucleotide substrate
ucauaccggccagcggg

SEQ ID NO: 3734 - RNA, 17 nt, Artificial Sequence
  Description of Artificial Sequence:  Nucleic Acid
  misc_feature: oligonucleotide substrate
accggccagcggggacg

SEQ ID NO: 3735 - RNA, 17 nt, Artificial Sequence
  Description of Artificial Sequence:  Nucleic Acid
  misc_feature: oligonucleotide substrate
cagcggggacgucguug

SEQ ID NO: 3736 - RNA, 17 nt, Artificial Sequence
  Description of Artificial Sequence:  Nucleic Acid
  misc_feature: oligonucleotide substrate
gcggggacgucguuguc

SEQ ID NO: 3737 - RNA, 17 nt, Artificial Sequence
  Description of Artificial Sequence:  Nucleic Acid
  misc_feature: oligonucleotide substrate
gggacgucguugucgug

SEQ ID NO: 3738 - RNA, 17 nt, Artificial Sequence
  Description of Artificial Sequence:  Nucleic Acid
  misc_feature: oligonucleotide substrate
acgucguugucguggca

SEQ ID NO: 3739 - RNA, 17 nt, Artificial Sequence
  Description of Artificial Sequence:  Nucleic Acid
  misc_feature: oligonucleotide substrate
ucguugucguggcaaca

SEQ ID NO: 3740 - RNA, 17 nt, Artificial Sequence
  Description of Artificial Sequence:  Nucleic Acid
  misc_feature: oligonucleotide substrate
uugucguggcaacagac

SEQ ID NO: 3741 - RNA, 17 nt, Artificial Sequence
  Description of Artificial Sequence:  Nucleic Acid
  misc_feature: oligonucleotide substrate
ucguggcaacagacgcu

SEQ ID NO: 3742 - RNA, 17 nt, Artificial Sequence
  Description of Artificial Sequence:  Nucleic Acid
  misc_feature: oligonucleotide substrate
ggcaacagacgcucuaa

SEQ ID NO: 3743 - RNA, 17 nt, Artificial Sequence
  Description of Artificial Sequence:  Nucleic Acid
  misc_feature: oligonucleotide substrate
caacagacgcucuaaug

SEQ ID NO: 3744 - RNA, 17 nt, Artificial Sequence
  Description of Artificial Sequence:  Nucleic Acid
  misc_feature: oligonucleotide substrate
acgcucuaaugacgggc

SEQ ID NO: 3745 - RNA, 17 nt, Artificial Sequence
  Description of Artificial Sequence:  Nucleic Acid
  misc_feature: oligonucleotide substrate
cucuaaugacgggcuau

SEQ ID NO: 3746 - RNA, 17 nt, Artificial Sequence
  Description of Artificial Sequence:  Nucleic Acid
  misc_feature: oligonucleotide substrate
aaugacgggcuauaccg

SEQ ID NO: 3747 - RNA, 17 nt, Artificial Sequence
  Description of Artificial Sequence:  Nucleic Acid
  misc_feature: oligonucleotide substrate
gacgggcuauaccggcg

SEQ ID NO: 3748 - RNA, 17 nt, Artificial Sequence
  Description of Artificial Sequence:  Nucleic Acid
  misc_feature: oligonucleotide substrate
cgggcuauaccggcgau

SEQ ID NO: 3749 - RNA, 17 nt, Artificial Sequence
  Description of Artificial Sequence:  Nucleic Acid
  misc_feature: oligonucleotide substrate
cuauaccggcgauuuug

SEQ ID NO: 3750 - RNA, 17 nt, Artificial Sequence
  Description of Artificial Sequence:  Nucleic Acid
  misc_feature: oligonucleotide substrate
uaccggcgauuuugacu

SEQ ID NO: 3751 - RNA, 17 nt, Artificial Sequence
  Description of Artificial Sequence:  Nucleic Acid
  misc_feature: oligonucleotide substrate
cgauuuugacucgguga

SEQ ID NO: 3752 - RNA, 17 nt, Artificial Sequence
  Description of Artificial Sequence:  Nucleic Acid
  misc_feature: oligonucleotide substrate
uugacucggugaucgac

SEQ ID NO: 3753 - RNA, 17 nt, Artificial Sequence
  Description of Artificial Sequence:  Nucleic Acid
  misc_feature: oligonucleotide substrate
acucggugaucgacugu

SEQ ID NO: 3754 - RNA, 17 nt, Artificial Sequence
  Description of Artificial Sequence:  Nucleic Acid
  misc_feature: oligonucleotide substrate
ggugaucgacuguaaua

SEQ ID NO: 3755 - RNA, 17 nt, Artificial Sequence
  Description of Artificial Sequence:  Nucleic Acid
  misc_feature: oligonucleotide substrate
gaucgacuguaauacau

SEQ ID NO: 3756 - RNA, 17 nt, Artificial Sequence
  Description of Artificial Sequence:  Nucleic Acid
  misc_feature: oligonucleotide substrate
cgacuguaauacaugug

SEQ ID NO: 3757 - RNA, 17 nt, Artificial Sequence
  Description of Artificial Sequence:  Nucleic Acid
  misc_feature: oligonucleotide substrate
acuguaauacauguguc

SEQ ID NO: 3758 - RNA, 17 nt, Artificial Sequence
  Description of Artificial Sequence:  Nucleic Acid
  misc_feature: oligonucleotide substrate
uguaauacaugugucac

SEQ ID NO: 3759 - RNA, 17 nt, Artificial Sequence
  Description of Artificial Sequence:  Nucleic Acid
  misc_feature: oligonucleotide substrate
uaauacaugugucaccc

SEQ ID NO: 3760 - RNA, 17 nt, Artificial Sequence
  Description of Artificial Sequence:  Nucleic Acid
  misc_feature: oligonucleotide substrate
auacaugugucacccaa

SEQ ID NO: 3761 - RNA, 17 nt, Artificial Sequence
  Description of Artificial Sequence:  Nucleic Acid
  misc_feature: oligonucleotide substrate
caugugucacccaaaca

SEQ ID NO: 3762 - RNA, 17 nt, Artificial Sequence
  Description of Artificial Sequence:  Nucleic Acid
  misc_feature: oligonucleotide substrate
ucacccaaacagucgac

SEQ ID NO: 3763 - RNA, 17 nt, Artificial Sequence
  Description of Artificial Sequence:  Nucleic Acid
  misc_feature: oligonucleotide substrate
cccaaacagucgacuuc

SEQ ID NO: 3764 - RNA, 17 nt, Artificial Sequence
  Description of Artificial Sequence:  Nucleic Acid
  misc_feature: oligonucleotide substrate
aacagucgacuucagcu

SEQ ID NO: 3765 - RNA, 17 nt, Artificial Sequence
  Description of Artificial Sequence:  Nucleic Acid
  misc_feature: oligonucleotide substrate
cgacuucagcuuggacc

SEQ ID NO: 3766 - RNA, 17 nt, Artificial Sequence
  Description of Artificial Sequence:  Nucleic Acid
  misc_feature: oligonucleotide substrate
cagcuuggacccuaccu

SEQ ID NO: 3767 - RNA, 17 nt, Artificial Sequence
  Description of Artificial Sequence:  Nucleic Acid
  misc_feature: oligonucleotide substrate
uggacccuaccuucacc

SEQ ID NO: 3768 - RNA, 17 nt, Artificial Sequence
  Description of Artificial Sequence:  Nucleic Acid
  misc_feature: oligonucleotide substrate
cuaccuucaccauugag

SEQ ID NO: 3769 - RNA, 17 nt, Artificial Sequence
  Description of Artificial Sequence:  Nucleic Acid
  misc_feature: oligonucleotide substrate
ccuucaccauugagacg

SEQ ID NO: 3770 - RNA, 17 nt, Artificial Sequence
  Description of Artificial Sequence:  Nucleic Acid
  misc_feature: oligonucleotide substrate
ccauugagacgacgacc

SEQ ID NO: 3771 - RNA, 17 nt, Artificial Sequence
  Description of Artificial Sequence:  Nucleic Acid
  misc_feature: oligonucleotide substrate
uugagacgacgaccgug

SEQ ID NO: 3772 - RNA, 17 nt, Artificial Sequence
  Description of Artificial Sequence:  Nucleic Acid
  misc_feature: oligonucleotide substrate
agacgacgaccgugccc

SEQ ID NO: 3773 - RNA, 17 nt, Artificial Sequence
  Description of Artificial Sequence:  Nucleic Acid
  misc_feature: oligonucleotide substrate
cgacgaccgugccccaa

SEQ ID NO: 3774 - RNA, 17 nt, Artificial Sequence
  Description of Artificial Sequence:  Nucleic Acid
  misc_feature: oligonucleotide substrate
acgaccgugccccaaga

SEQ ID NO: 3775 - RNA, 17 nt, Artificial Sequence
  Description of Artificial Sequence:  Nucleic Acid
  misc_feature: oligonucleotide substrate
gccccaagacgcagugu

SEQ ID NO: 3776 - RNA, 17 nt, Artificial Sequence
  Description of Artificial Sequence:  Nucleic Acid
  misc_feature: oligonucleotide substrate
cccaagacgcagugucc

SEQ ID NO: 3777 - RNA, 17 nt, Artificial Sequence
  Description of Artificial Sequence:  Nucleic Acid
  misc_feature: oligonucleotide substrate
aagacgcagugucccgc

SEQ ID NO: 3778 - RNA, 17 nt, Artificial Sequence
  Description of Artificial Sequence:  Nucleic Acid
  misc_feature: oligonucleotide substrate
gacgcagugucccgcuc

SEQ ID NO: 3779 - RNA, 17 nt, Artificial Sequence
  Description of Artificial Sequence:  Nucleic Acid
  misc_feature: oligonucleotide substrate
agugucccgcucgcaga

SEQ ID NO: 3780 - RNA, 17 nt, Artificial Sequence
  Description of Artificial Sequence:  Nucleic Acid
  misc_feature: oligonucleotide substrate
ucccgcucgcagaggcg

SEQ ID NO: 3781 - RNA, 17 nt, Artificial Sequence
  Description of Artificial Sequence:  Nucleic Acid
  misc_feature: oligonucleotide substrate
ucgcagaggcgagguag

SEQ ID NO: 3782 - RNA, 17 nt, Artificial Sequence
  Description of Artificial Sequence:  Nucleic Acid
  misc_feature: oligonucleotide substrate
gaggcgagguaggaccg

SEQ ID NO: 3783 - RNA, 17 nt, Artificial Sequence
  Description of Artificial Sequence:  Nucleic Acid
  misc_feature: oligonucleotide substrate
gagguaggaccgguagg

SEQ ID NO: 3784 - RNA, 17 nt, Artificial Sequence
  Description of Artificial Sequence:  Nucleic Acid
  misc_feature: oligonucleotide substrate
uaggaccgguaggggca

SEQ ID NO: 3785 - RNA, 17 nt, Artificial Sequence
  Description of Artificial Sequence:  Nucleic Acid
  misc_feature: oligonucleotide substrate
cgguaggggcaggagag

SEQ ID NO: 3786 - RNA, 17 nt, Artificial Sequence
  Description of Artificial Sequence:  Nucleic Acid
  misc_feature: oligonucleotide substrate
caggagaggcauauaca

SEQ ID NO: 3787 - RNA, 17 nt, Artificial Sequence
  Description of Artificial Sequence:  Nucleic Acid
  misc_feature: oligonucleotide substrate
ggagaggcauauacagg

SEQ ID NO: 3788 - RNA, 17 nt, Artificial Sequence
  Description of Artificial Sequence:  Nucleic Acid
  misc_feature: oligonucleotide substrate
agaggcauauacagguu

SEQ ID NO: 3789 - RNA, 17 nt, Artificial Sequence
  Description of Artificial Sequence:  Nucleic Acid
  misc_feature: oligonucleotide substrate
aggcauauacagguuug

SEQ ID NO: 3790 - RNA, 17 nt, Artificial Sequence
  Description of Artificial Sequence:  Nucleic Acid
  misc_feature: oligonucleotide substrate
auauacagguuugugac

SEQ ID NO: 3791 - RNA, 17 nt, Artificial Sequence
  Description of Artificial Sequence:  Nucleic Acid
  misc_feature: oligonucleotide substrate
acagguuugugacucca

SEQ ID NO: 3792 - RNA, 17 nt, Artificial Sequence
  Description of Artificial Sequence:  Nucleic Acid
  misc_feature: oligonucleotide substrate
gguuugugacuccagga

SEQ ID NO: 3793 - RNA, 17 nt, Artificial Sequence
  Description of Artificial Sequence:  Nucleic Acid
  misc_feature: oligonucleotide substrate
ccaggagagcggccuuc

SEQ ID NO: 3794 - RNA, 17 nt, Artificial Sequence
  Description of Artificial Sequence:  Nucleic Acid
  misc_feature: oligonucleotide substrate
ggagagcggccuucggg

SEQ ID NO: 3795 - RNA, 17 nt, Artificial Sequence
  Description of Artificial Sequence:  Nucleic Acid
  misc_feature: oligonucleotide substrate
gccuucgggcauguucg

SEQ ID NO: 3796 - RNA, 17 nt, Artificial Sequence
  Description of Artificial Sequence:  Nucleic Acid
  misc_feature: oligonucleotide substrate
cuucgggcauguucgac

SEQ ID NO: 3797 - RNA, 17 nt, Artificial Sequence
  Description of Artificial Sequence:  Nucleic Acid
  misc_feature: oligonucleotide substrate
ucgggcauguucgacuc

SEQ ID NO: 3798 - RNA, 17 nt, Artificial Sequence
  Description of Artificial Sequence:  Nucleic Acid
  misc_feature: oligonucleotide substrate
cauguucgacuccucgg

SEQ ID NO: 3799 - RNA, 17 nt, Artificial Sequence
  Description of Artificial Sequence:  Nucleic Acid
  misc_feature: oligonucleotide substrate
acuccucgguccugugu

SEQ ID NO: 3800 - RNA, 17 nt, Artificial Sequence
  Description of Artificial Sequence:  Nucleic Acid
  misc_feature: oligonucleotide substrate
ucgguccugugugagug

SEQ ID NO: 3801 - RNA, 17 nt, Artificial Sequence
  Description of Artificial Sequence:  Nucleic Acid
  misc_feature: oligonucleotide substrate
gguccugugugagugcu

SEQ ID NO: 3802 - RNA, 17 nt, Artificial Sequence
  Description of Artificial Sequence:  Nucleic Acid
  misc_feature: oligonucleotide substrate
cugugugagugcuauga

SEQ ID NO: 3803 - RNA, 17 nt, Artificial Sequence
  Description of Artificial Sequence:  Nucleic Acid
  misc_feature: oligonucleotide substrate
gugugagugcuaugacg

SEQ ID NO: 3804 - RNA, 17 nt, Artificial Sequence
  Description of Artificial Sequence:  Nucleic Acid
  misc_feature: oligonucleotide substrate
ugagugcuaugacgcgg

SEQ ID NO: 3805 - RNA, 17 nt, Artificial Sequence
  Description of Artificial Sequence:  Nucleic Acid
  misc_feature: oligonucleotide substrate
gugcuaugacgcgggau

SEQ ID NO: 3806 - RNA, 17 nt, Artificial Sequence
  Description of Artificial Sequence:  Nucleic Acid
  misc_feature: oligonucleotide substrate
gcuaugacgcgggaugu

SEQ ID NO: 3807 - RNA, 17 nt, Artificial Sequence
  Description of Artificial Sequence:  Nucleic Acid
  misc_feature: oligonucleotide substrate
gacgcgggaugugcuug

SEQ ID NO: 3808 - RNA, 17 nt, Artificial Sequence
  Description of Artificial Sequence:  Nucleic Acid
  misc_feature: oligonucleotide substrate
cgcgggaugugcuuggu

SEQ ID NO: 3809 - RNA, 17 nt, Artificial Sequence
  Description of Artificial Sequence:  Nucleic Acid
  misc_feature: oligonucleotide substrate
cgggaugugcuugguac

SEQ ID NO: 3810 - RNA, 17 nt, Artificial Sequence
  Description of Artificial Sequence:  Nucleic Acid
  misc_feature: oligonucleotide substrate
ugugcuugguacgagcu

SEQ ID NO: 3811 - RNA, 17 nt, Artificial Sequence
  Description of Artificial Sequence:  Nucleic Acid
  misc_feature: oligonucleotide substrate
ugcuugguacgagcuca

SEQ ID NO: 3812 - RNA, 17 nt, Artificial Sequence
  Description of Artificial Sequence:  Nucleic Acid
  misc_feature: oligonucleotide substrate
ugguacgagcucacgcc

SEQ ID NO: 3813 - RNA, 17 nt, Artificial Sequence
  Description of Artificial Sequence:  Nucleic Acid
  misc_feature: oligonucleotide substrate
acgagcucacgcccgcc

SEQ ID NO: 3814 - RNA, 17 nt, Artificial Sequence
  Description of Artificial Sequence:  Nucleic Acid
  misc_feature: oligonucleotide substrate
gagcucacgcccgccga

SEQ ID NO: 3815 - RNA, 17 nt, Artificial Sequence
  Description of Artificial Sequence:  Nucleic Acid
  misc_feature: oligonucleotide substrate
ucacgcccgccgagacc

SEQ ID NO: 3816 - RNA, 17 nt, Artificial Sequence
  Description of Artificial Sequence:  Nucleic Acid
  misc_feature: oligonucleotide substrate
ccgccgagaccuccguu

SEQ ID NO: 3817 - RNA, 17 nt, Artificial Sequence
  Description of Artificial Sequence:  Nucleic Acid
  misc_feature: oligonucleotide substrate
agaccuccguuagguug

SEQ ID NO: 3818 - RNA, 17 nt, Artificial Sequence
  Description of Artificial Sequence:  Nucleic Acid
  misc_feature: oligonucleotide substrate
uccguuagguugcgggc

SEQ ID NO: 3819 - RNA, 17 nt, Artificial Sequence
  Description of Artificial Sequence:  Nucleic Acid
  misc_feature: oligonucleotide substrate
guuagguugcgggcuua

SEQ ID NO: 3820 - RNA, 17 nt, Artificial Sequence
  Description of Artificial Sequence:  Nucleic Acid
  misc_feature: oligonucleotide substrate
gguugcgggcuuaccua

SEQ ID NO: 3821 - RNA, 17 nt, Artificial Sequence
  Description of Artificial Sequence:  Nucleic Acid
  misc_feature: oligonucleotide substrate
gcgggcuuaccuaaaua

SEQ ID NO: 3822 - RNA, 17 nt, Artificial Sequence
  Description of Artificial Sequence:  Nucleic Acid
  misc_feature: oligonucleotide substrate
uuaccuaaauacaccag

SEQ ID NO: 3823 - RNA, 17 nt, Artificial Sequence
  Description of Artificial Sequence:  Nucleic Acid
  misc_feature: oligonucleotide substrate
accuaaauacaccaggg

SEQ ID NO: 3824 - RNA, 17 nt, Artificial Sequence
  Description of Artificial Sequence:  Nucleic Acid
  misc_feature: oligonucleotide substrate
cuaaauacaccaggguu

SEQ ID NO: 3825 - RNA, 17 nt, Artificial Sequence
  Description of Artificial Sequence:  Nucleic Acid
  misc_feature: oligonucleotide substrate
acaccaggguugcccuu

SEQ ID NO: 3826 - RNA, 17 nt, Artificial Sequence
  Description of Artificial Sequence:  Nucleic Acid
  misc_feature: oligonucleotide substrate
ccaggguugcccuucug

SEQ ID NO: 3827 - RNA, 17 nt, Artificial Sequence
  Description of Artificial Sequence:  Nucleic Acid
  misc_feature: oligonucleotide substrate
gcccuucugccaggacc

SEQ ID NO: 3828 - RNA, 17 nt, Artificial Sequence
  Description of Artificial Sequence:  Nucleic Acid
  misc_feature: oligonucleotide substrate
cugccaggaccaucugg

SEQ ID NO: 3829 - RNA, 17 nt, Artificial Sequence
  Description of Artificial Sequence:  Nucleic Acid
  misc_feature: oligonucleotide substrate
ccaggaccaucuggagu

SEQ ID NO: 3830 - RNA, 17 nt, Artificial Sequence
  Description of Artificial Sequence:  Nucleic Acid
  misc_feature: oligonucleotide substrate
caucuggaguucuggga

SEQ ID NO: 3831 - RNA, 17 nt, Artificial Sequence
  Description of Artificial Sequence:  Nucleic Acid
  misc_feature: oligonucleotide substrate
cugggagggugucuuca

SEQ ID NO: 3832 - RNA, 17 nt, Artificial Sequence
  Description of Artificial Sequence:  Nucleic Acid
  misc_feature: oligonucleotide substrate
gggagggugucuucaca

SEQ ID NO: 3833 - RNA, 17 nt, Artificial Sequence
  Description of Artificial Sequence:  Nucleic Acid
  misc_feature: oligonucleotide substrate
gugucuucacaggccuc

SEQ ID NO: 3834 - RNA, 17 nt, Artificial Sequence
  Description of Artificial Sequence:  Nucleic Acid
  misc_feature: oligonucleotide substrate
cuucacaggccucaccc

SEQ ID NO: 3835 - RNA, 17 nt, Artificial Sequence
  Description of Artificial Sequence:  Nucleic Acid
  misc_feature: oligonucleotide substrate
caggccucacccacaua

SEQ ID NO: 3836 - RNA, 17 nt, Artificial Sequence
  Description of Artificial Sequence:  Nucleic Acid
  misc_feature: oligonucleotide substrate
ccucacccacauagaug

SEQ ID NO: 3837 - RNA, 17 nt, Artificial Sequence
  Description of Artificial Sequence:  Nucleic Acid
  misc_feature: oligonucleotide substrate
ucacccacauagaugcc

SEQ ID NO: 3838 - RNA, 17 nt, Artificial Sequence
  Description of Artificial Sequence:  Nucleic Acid
  misc_feature: oligonucleotide substrate
ccacauagaugcccacu

SEQ ID NO: 3839 - RNA, 17 nt, Artificial Sequence
  Description of Artificial Sequence:  Nucleic Acid
  misc_feature: oligonucleotide substrate
acauagaugcccacuuc

SEQ ID NO: 3840 - RNA, 17 nt, Artificial Sequence
  Description of Artificial Sequence:  Nucleic Acid
  misc_feature: oligonucleotide substrate
agaugcccacuucuugu

SEQ ID NO: 3841 - RNA, 17 nt, Artificial Sequence
  Description of Artificial Sequence:  Nucleic Acid
  misc_feature: oligonucleotide substrate
cacuucuugucccagac

SEQ ID NO: 3842 - RNA, 17 nt, Artificial Sequence
  Description of Artificial Sequence:  Nucleic Acid
  misc_feature: oligonucleotide substrate
ugucccagaccaagcag

SEQ ID NO: 3843 - RNA, 17 nt, Artificial Sequence
  Description of Artificial Sequence:  Nucleic Acid
  misc_feature: oligonucleotide substrate
cagaccaagcaggcagg

SEQ ID NO: 3844 - RNA, 17 nt, Artificial Sequence
  Description of Artificial Sequence:  Nucleic Acid
  misc_feature: oligonucleotide substrate
ccaagcaggcaggagaa

SEQ ID NO: 3845 - RNA, 17 nt, Artificial Sequence
  Description of Artificial Sequence:  Nucleic Acid
  misc_feature: oligonucleotide substrate
aggagaaaaccuccccu

SEQ ID NO: 3846 - RNA, 17 nt, Artificial Sequence
  Description of Artificial Sequence:  Nucleic Acid
  misc_feature: oligonucleotide substrate
ccuccccuaccugguag

SEQ ID NO: 3847 - RNA, 17 nt, Artificial Sequence
  Description of Artificial Sequence:  Nucleic Acid
  misc_feature: oligonucleotide substrate
ccuaccugguagcauac

SEQ ID NO: 3848 - RNA, 17 nt, Artificial Sequence
  Description of Artificial Sequence:  Nucleic Acid
  misc_feature: oligonucleotide substrate
accugguagcauaccaa

SEQ ID NO: 3849 - RNA, 17 nt, Artificial Sequence
  Description of Artificial Sequence:  Nucleic Acid
  misc_feature: oligonucleotide substrate
cugguagcauaccaagc

SEQ ID NO: 3850 - RNA, 17 nt, Artificial Sequence
  Description of Artificial Sequence:  Nucleic Acid
  misc_feature: oligonucleotide substrate
gguagcauaccaagcca

SEQ ID NO: 3851 - RNA, 17 nt, Artificial Sequence
  Description of Artificial Sequence:  Nucleic Acid
  misc_feature: oligonucleotide substrate
cauaccaagccacagug

SEQ ID NO: 3852 - RNA, 17 nt, Artificial Sequence
  Description of Artificial Sequence:  Nucleic Acid
  misc_feature: oligonucleotide substrate
accaagccacagugugc

SEQ ID NO: 3853 - RNA, 17 nt, Artificial Sequence
  Description of Artificial Sequence:  Nucleic Acid
  misc_feature: oligonucleotide substrate
aagccacagugugcgcc

SEQ ID NO: 3854 - RNA, 17 nt, Artificial Sequence
  Description of Artificial Sequence:  Nucleic Acid
  misc_feature: oligonucleotide substrate
gccacagugugcgccag

SEQ ID NO: 3855 - RNA, 17 nt, Artificial Sequence
  Description of Artificial Sequence:  Nucleic Acid
  misc_feature: oligonucleotide substrate
cacagugugcgccaggg

SEQ ID NO: 3856 - RNA, 17 nt, Artificial Sequence
  Description of Artificial Sequence:  Nucleic Acid
  misc_feature: oligonucleotide substrate
cagugugcgccagggcu

SEQ ID NO: 3857 - RNA, 17 nt, Artificial Sequence
  Description of Artificial Sequence:  Nucleic Acid
  misc_feature: oligonucleotide substrate
gcgccagggcucaggcu

SEQ ID NO: 3858 - RNA, 17 nt, Artificial Sequence
  Description of Artificial Sequence:  Nucleic Acid
  misc_feature: oligonucleotide substrate
gggcucaggcuccaccc

SEQ ID NO: 3859 - RNA, 17 nt, Artificial Sequence
  Description of Artificial Sequence:  Nucleic Acid
  misc_feature: oligonucleotide substrate
caggcuccacccccauc

SEQ ID NO: 3860 - RNA, 17 nt, Artificial Sequence
  Description of Artificial Sequence:  Nucleic Acid
  misc_feature: oligonucleotide substrate
ccacccccaucguggga

SEQ ID NO: 3861 - RNA, 17 nt, Artificial Sequence
  Description of Artificial Sequence:  Nucleic Acid
  misc_feature: oligonucleotide substrate
cccccaucgugggauca

SEQ ID NO: 3862 - RNA, 17 nt, Artificial Sequence
  Description of Artificial Sequence:  Nucleic Acid
  misc_feature: oligonucleotide substrate
aucgugggaucaaaugu

SEQ ID NO: 3863 - RNA, 17 nt, Artificial Sequence
  Description of Artificial Sequence:  Nucleic Acid
  misc_feature: oligonucleotide substrate
gggaucaaauguggaag

SEQ ID NO: 3864 - RNA, 17 nt, Artificial Sequence
  Description of Artificial Sequence:  Nucleic Acid
  misc_feature: oligonucleotide substrate
gaucaaauguggaagug

SEQ ID NO: 3865 - RNA, 17 nt, Artificial Sequence
  Description of Artificial Sequence:  Nucleic Acid
  misc_feature: oligonucleotide substrate
auguggaagugucucac

SEQ ID NO: 3866 - RNA, 17 nt, Artificial Sequence
  Description of Artificial Sequence:  Nucleic Acid
  misc_feature: oligonucleotide substrate
guggaagugucucacac

SEQ ID NO: 3867 - RNA, 17 nt, Artificial Sequence
  Description of Artificial Sequence:  Nucleic Acid
  misc_feature: oligonucleotide substrate
agugucucacacggcua

SEQ ID NO: 3868 - RNA, 17 nt, Artificial Sequence
  Description of Artificial Sequence:  Nucleic Acid
  misc_feature: oligonucleotide substrate
ugucucacacggcuaaa

SEQ ID NO: 3869 - RNA, 17 nt, Artificial Sequence
  Description of Artificial Sequence:  Nucleic Acid
  misc_feature: oligonucleotide substrate
cucacacggcuaaagcc

SEQ ID NO: 3870 - RNA, 17 nt, Artificial Sequence
  Description of Artificial Sequence:  Nucleic Acid
  misc_feature: oligonucleotide substrate
cggcuaaagccuacgcu

SEQ ID NO: 3871 - RNA, 17 nt, Artificial Sequence
  Description of Artificial Sequence:  Nucleic Acid
  misc_feature: oligonucleotide substrate
uaaagccuacgcuacac

SEQ ID NO: 3872 - RNA, 17 nt, Artificial Sequence
  Description of Artificial Sequence:  Nucleic Acid
  misc_feature: oligonucleotide substrate
aagccuacgcuacacgg

SEQ ID NO: 3873 - RNA, 17 nt, Artificial Sequence
  Description of Artificial Sequence:  Nucleic Acid
  misc_feature: oligonucleotide substrate
ccuacgcuacacgggcc

SEQ ID NO: 3874 - RNA, 17 nt, Artificial Sequence
  Description of Artificial Sequence:  Nucleic Acid
  misc_feature: oligonucleotide substrate
uacgcuacacgggccaa

SEQ ID NO: 3875 - RNA, 17 nt, Artificial Sequence
  Description of Artificial Sequence:  Nucleic Acid
  misc_feature: oligonucleotide substrate
cuacacgggccaacacc

SEQ ID NO: 3876 - RNA, 17 nt, Artificial Sequence
  Description of Artificial Sequence:  Nucleic Acid
  misc_feature: oligonucleotide substrate
acgggccaacaccccug

SEQ ID NO: 3877 - RNA, 17 nt, Artificial Sequence
  Description of Artificial Sequence:  Nucleic Acid
  misc_feature: oligonucleotide substrate
gggccaacaccccugcu

SEQ ID NO: 3878 - RNA, 17 nt, Artificial Sequence
  Description of Artificial Sequence:  Nucleic Acid
  misc_feature: oligonucleotide substrate
acaccccugcuguauag

SEQ ID NO: 3879 - RNA, 17 nt, Artificial Sequence
  Description of Artificial Sequence:  Nucleic Acid
  misc_feature: oligonucleotide substrate
ccccugcuguauaggcu

SEQ ID NO: 3880 - RNA, 17 nt, Artificial Sequence
  Description of Artificial Sequence:  Nucleic Acid
  misc_feature: oligonucleotide substrate
ccugcuguauaggcuag

SEQ ID NO: 3881 - RNA, 17 nt, Artificial Sequence
  Description of Artificial Sequence:  Nucleic Acid
  misc_feature: oligonucleotide substrate
cuguauaggcuaggagc

SEQ ID NO: 3882 - RNA, 17 nt, Artificial Sequence
  Description of Artificial Sequence:  Nucleic Acid
  misc_feature: oligonucleotide substrate
ggcuaggagccguccaa

SEQ ID NO: 3883 - RNA, 17 nt, Artificial Sequence
  Description of Artificial Sequence:  Nucleic Acid
  misc_feature: oligonucleotide substrate
uaggagccguccaaaau

SEQ ID NO: 3884 - RNA, 17 nt, Artificial Sequence
  Description of Artificial Sequence:  Nucleic Acid
  misc_feature: oligonucleotide substrate
cguccaaaaugauguca

SEQ ID NO: 3885 - RNA, 17 nt, Artificial Sequence
  Description of Artificial Sequence:  Nucleic Acid
  misc_feature: oligonucleotide substrate
ccaaaaugaugucaccc

SEQ ID NO: 3886 - RNA, 17 nt, Artificial Sequence
  Description of Artificial Sequence:  Nucleic Acid
  misc_feature: oligonucleotide substrate
aaaaugaugucacccuc

SEQ ID NO: 3887 - RNA, 17 nt, Artificial Sequence
  Description of Artificial Sequence:  Nucleic Acid
  misc_feature: oligonucleotide substrate
augaugucacccucaca

SEQ ID NO: 3888 - RNA, 17 nt, Artificial Sequence
  Description of Artificial Sequence:  Nucleic Acid
  misc_feature: oligonucleotide substrate
ucacccucacacacccc

SEQ ID NO: 3889 - RNA, 17 nt, Artificial Sequence
  Description of Artificial Sequence:  Nucleic Acid
  misc_feature: oligonucleotide substrate
acccucacacaccccau

SEQ ID NO: 3890 - RNA, 17 nt, Artificial Sequence
  Description of Artificial Sequence:  Nucleic Acid
  misc_feature: oligonucleotide substrate
ccucacacaccccauaa

SEQ ID NO: 3891 - RNA, 17 nt, Artificial Sequence
  Description of Artificial Sequence:  Nucleic Acid
  misc_feature: oligonucleotide substrate
cacaccccauaaccaaa

SEQ ID NO: 3892 - RNA, 17 nt, Artificial Sequence
  Description of Artificial Sequence:  Nucleic Acid
  misc_feature: oligonucleotide substrate
accccauaaccaaauac

SEQ ID NO: 3893 - RNA, 17 nt, Artificial Sequence
  Description of Artificial Sequence:  Nucleic Acid
  misc_feature: oligonucleotide substrate
auaaccaaauacaucau

SEQ ID NO: 3894 - RNA, 17 nt, Artificial Sequence
  Description of Artificial Sequence:  Nucleic Acid
  misc_feature: oligonucleotide substrate
aaccaaauacaucauga

SEQ ID NO: 3895 - RNA, 17 nt, Artificial Sequence
  Description of Artificial Sequence:  Nucleic Acid
  misc_feature: oligonucleotide substrate
ccaaauacaucaugaca

SEQ ID NO: 3896 - RNA, 17 nt, Artificial Sequence
  Description of Artificial Sequence:  Nucleic Acid
  misc_feature: oligonucleotide substrate
aauacaucaugacaugc

SEQ ID NO: 3897 - RNA, 17 nt, Artificial Sequence
  Description of Artificial Sequence:  Nucleic Acid
  misc_feature: oligonucleotide substrate
acaucaugacaugcaug

SEQ ID NO: 3898 - RNA, 17 nt, Artificial Sequence
  Description of Artificial Sequence:  Nucleic Acid
  misc_feature: oligonucleotide substrate
aucaugacaugcauguc

SEQ ID NO: 3899 - RNA, 17 nt, Artificial Sequence
  Description of Artificial Sequence:  Nucleic Acid
  misc_feature: oligonucleotide substrate
caugacaugcaugucgg

SEQ ID NO: 3900 - RNA, 17 nt, Artificial Sequence
  Description of Artificial Sequence:  Nucleic Acid
  misc_feature: oligonucleotide substrate
ugacaugcaugucggcu

SEQ ID NO: 3901 - RNA, 17 nt, Artificial Sequence
  Description of Artificial Sequence:  Nucleic Acid
  misc_feature: oligonucleotide substrate
acaugcaugucggcuga

SEQ ID NO: 3902 - RNA, 17 nt, Artificial Sequence
  Description of Artificial Sequence:  Nucleic Acid
  misc_feature: oligonucleotide substrate
gcaugucggcugaccug

SEQ ID NO: 3903 - RNA, 17 nt, Artificial Sequence
  Description of Artificial Sequence:  Nucleic Acid
  misc_feature: oligonucleotide substrate
gucggcugaccuggagg

SEQ ID NO: 3904 - RNA, 17 nt, Artificial Sequence
  Description of Artificial Sequence:  Nucleic Acid
  misc_feature: oligonucleotide substrate
accuggaggucgucacc

SEQ ID NO: 3905 - RNA, 17 nt, Artificial Sequence
  Description of Artificial Sequence:  Nucleic Acid
  misc_feature: oligonucleotide substrate
uggaggucgucaccagc

SEQ ID NO: 3906 - RNA, 17 nt, Artificial Sequence
  Description of Artificial Sequence:  Nucleic Acid
  misc_feature: oligonucleotide substrate
aggucgucaccagcacc

SEQ ID NO: 3907 - RNA, 17 nt, Artificial Sequence
  Description of Artificial Sequence:  Nucleic Acid
  misc_feature: oligonucleotide substrate
cgucaccagcaccuggg

SEQ ID NO: 3908 - RNA, 17 nt, Artificial Sequence
  Description of Artificial Sequence:  Nucleic Acid
  misc_feature: oligonucleotide substrate
ucaccagcaccugggug

SEQ ID NO: 3909 - RNA, 17 nt, Artificial Sequence
  Description of Artificial Sequence:  Nucleic Acid
  misc_feature: oligonucleotide substrate
gcaccugggugcuagua

SEQ ID NO: 3910 - RNA, 17 nt, Artificial Sequence
  Description of Artificial Sequence:  Nucleic Acid
  misc_feature: oligonucleotide substrate
accugggugcuaguagg

SEQ ID NO: 3911 - RNA, 17 nt, Artificial Sequence
  Description of Artificial Sequence:  Nucleic Acid
  misc_feature: oligonucleotide substrate
gggugcuaguagguggc

SEQ ID NO: 3912 - RNA, 17 nt, Artificial Sequence
  Description of Artificial Sequence:  Nucleic Acid
  misc_feature: oligonucleotide substrate
gcuaguagguggcgucc

SEQ ID NO: 3913 - RNA, 17 nt, Artificial Sequence
  Description of Artificial Sequence:  Nucleic Acid
  misc_feature: oligonucleotide substrate
aguagguggcguccugg

SEQ ID NO: 3914 - RNA, 17 nt, Artificial Sequence
  Description of Artificial Sequence:  Nucleic Acid
  misc_feature: oligonucleotide substrate
uagguggcguccuggca

SEQ ID NO: 3915 - RNA, 17 nt, Artificial Sequence
  Description of Artificial Sequence:  Nucleic Acid
  misc_feature: oligonucleotide substrate
gcguccuggcagcucug

SEQ ID NO: 3916 - RNA, 17 nt, Artificial Sequence
  Description of Artificial Sequence:  Nucleic Acid
  misc_feature: oligonucleotide substrate
uccuggcagcucugacc

SEQ ID NO: 3917 - RNA, 17 nt, Artificial Sequence
  Description of Artificial Sequence:  Nucleic Acid
  misc_feature: oligonucleotide substrate
cagcucugaccgcguau

SEQ ID NO: 3918 - RNA, 17 nt, Artificial Sequence
  Description of Artificial Sequence:  Nucleic Acid
  misc_feature: oligonucleotide substrate
cucugaccgcguauugc

SEQ ID NO: 3919 - RNA, 17 nt, Artificial Sequence
  Description of Artificial Sequence:  Nucleic Acid
  misc_feature: oligonucleotide substrate
cugaccgcguauugccu

SEQ ID NO: 3920 - RNA, 17 nt, Artificial Sequence
  Description of Artificial Sequence:  Nucleic Acid
  misc_feature: oligonucleotide substrate
gaccgcguauugccuga

SEQ ID NO: 3921 - RNA, 17 nt, Artificial Sequence
  Description of Artificial Sequence:  Nucleic Acid
  misc_feature: oligonucleotide substrate
cgcguauugccugacga

SEQ ID NO: 3922 - RNA, 17 nt, Artificial Sequence
  Description of Artificial Sequence:  Nucleic Acid
  misc_feature: oligonucleotide substrate
auugccugacgacaggc

SEQ ID NO: 3923 - RNA, 17 nt, Artificial Sequence
  Description of Artificial Sequence:  Nucleic Acid
  misc_feature: oligonucleotide substrate
gccugacgacaggcagc

SEQ ID NO: 3924 - RNA, 17 nt, Artificial Sequence
  Description of Artificial Sequence:  Nucleic Acid
  misc_feature: oligonucleotide substrate
gacgacaggcagcgugg

SEQ ID NO: 3925 - RNA, 17 nt, Artificial Sequence
  Description of Artificial Sequence:  Nucleic Acid
  misc_feature: oligonucleotide substrate
gacaggcagcgugguca

SEQ ID NO: 3926 - RNA, 17 nt, Artificial Sequence
  Description of Artificial Sequence:  Nucleic Acid
  misc_feature: oligonucleotide substrate
caggcagcguggucauu

SEQ ID NO: 3927 - RNA, 17 nt, Artificial Sequence
  Description of Artificial Sequence:  Nucleic Acid
  misc_feature: oligonucleotide substrate
gcagcguggucauugug

SEQ ID NO: 3928 - RNA, 17 nt, Artificial Sequence
  Description of Artificial Sequence:  Nucleic Acid
  misc_feature: oligonucleotide substrate
gcguggucauugugggc

SEQ ID NO: 3929 - RNA, 17 nt, Artificial Sequence
  Description of Artificial Sequence:  Nucleic Acid
  misc_feature: oligonucleotide substrate
uggucauugugggcaga

SEQ ID NO: 3930 - RNA, 17 nt, Artificial Sequence
  Description of Artificial Sequence:  Nucleic Acid
  misc_feature: oligonucleotide substrate
cauugugggcagaauca

SEQ ID NO: 3931 - RNA, 17 nt, Artificial Sequence
  Description of Artificial Sequence:  Nucleic Acid
  misc_feature: oligonucleotide substrate
ugggcagaaucaucuug

SEQ ID NO: 3932 - RNA, 17 nt, Artificial Sequence
  Description of Artificial Sequence:  Nucleic Acid
  misc_feature: oligonucleotide substrate
gcagaaucaucuugucc

SEQ ID NO: 3933 - RNA, 17 nt, Artificial Sequence
  Description of Artificial Sequence:  Nucleic Acid
  misc_feature: oligonucleotide substrate
aucaucuuguccgggaa

SEQ ID NO: 3934 - RNA, 17 nt, Artificial Sequence
  Description of Artificial Sequence:  Nucleic Acid
  misc_feature: oligonucleotide substrate
uccgggaagccggcugu

SEQ ID NO: 3935 - RNA, 17 nt, Artificial Sequence
  Description of Artificial Sequence:  Nucleic Acid
  misc_feature: oligonucleotide substrate
ggaagccggcuguuauc

SEQ ID NO: 3936 - RNA, 17 nt, Artificial Sequence
  Description of Artificial Sequence:  Nucleic Acid
  misc_feature: oligonucleotide substrate
agccggcuguuaucccc

SEQ ID NO: 3937 - RNA, 17 nt, Artificial Sequence
  Description of Artificial Sequence:  Nucleic Acid
  misc_feature: oligonucleotide substrate
cggcuguuauccccgac

SEQ ID NO: 3938 - RNA, 17 nt, Artificial Sequence
  Description of Artificial Sequence:  Nucleic Acid
  misc_feature: oligonucleotide substrate
uauccccgacagggagg

SEQ ID NO: 3939 - RNA, 17 nt, Artificial Sequence
  Description of Artificial Sequence:  Nucleic Acid
  misc_feature: oligonucleotide substrate
acagggaggcucucuac

SEQ ID NO: 3940 - RNA, 17 nt, Artificial Sequence
  Description of Artificial Sequence:  Nucleic Acid
  misc_feature: oligonucleotide substrate
ggcucucuaccaggagu

SEQ ID NO: 3941 - RNA, 17 nt, Artificial Sequence
  Description of Artificial Sequence:  Nucleic Acid
  misc_feature: oligonucleotide substrate
uaccaggaguucgauga

SEQ ID NO: 3942 - RNA, 17 nt, Artificial Sequence
  Description of Artificial Sequence:  Nucleic Acid
  misc_feature: oligonucleotide substrate
ggaguucgaugagaugg

SEQ ID NO: 3943 - RNA, 17 nt, Artificial Sequence
  Description of Artificial Sequence:  Nucleic Acid
  misc_feature: oligonucleotide substrate
ucgaugagauggaggag

SEQ ID NO: 3944 - RNA, 17 nt, Artificial Sequence
  Description of Artificial Sequence:  Nucleic Acid
  misc_feature: oligonucleotide substrate
auggaggagugugccuc

SEQ ID NO: 3945 - RNA, 17 nt, Artificial Sequence
  Description of Artificial Sequence:  Nucleic Acid
  misc_feature: oligonucleotide substrate
ggaggagugugccucac

SEQ ID NO: 3946 - RNA, 17 nt, Artificial Sequence
  Description of Artificial Sequence:  Nucleic Acid
  misc_feature: oligonucleotide substrate
aggagugugccucacac

SEQ ID NO: 3947 - RNA, 17 nt, Artificial Sequence
  Description of Artificial Sequence:  Nucleic Acid
  misc_feature: oligonucleotide substrate
ugugccucacaccuccc

SEQ ID NO: 3948 - RNA, 17 nt, Artificial Sequence
  Description of Artificial Sequence:  Nucleic Acid
  misc_feature: oligonucleotide substrate
ugccucacaccucccuu

SEQ ID NO: 3949 - RNA, 17 nt, Artificial Sequence
  Description of Artificial Sequence:  Nucleic Acid
  misc_feature: oligonucleotide substrate
ccucccuuacaucgaac

SEQ ID NO: 3950 - RNA, 17 nt, Artificial Sequence
  Description of Artificial Sequence:  Nucleic Acid
  misc_feature: oligonucleotide substrate
ucccuuacaucgaacag

SEQ ID NO: 3951 - RNA, 17 nt, Artificial Sequence
  Description of Artificial Sequence:  Nucleic Acid
  misc_feature: oligonucleotide substrate
uacaucgaacaggggau

SEQ ID NO: 3952 - RNA, 17 nt, Artificial Sequence
  Description of Artificial Sequence:  Nucleic Acid
  misc_feature: oligonucleotide substrate
aacaggggaugcagcuc

SEQ ID NO: 3953 - RNA, 17 nt, Artificial Sequence
  Description of Artificial Sequence:  Nucleic Acid
  misc_feature: oligonucleotide substrate
caggggaugcagcucgc

SEQ ID NO: 3954 - RNA, 17 nt, Artificial Sequence
  Description of Artificial Sequence:  Nucleic Acid
  misc_feature: oligonucleotide substrate
gggaugcagcucgccga

SEQ ID NO: 3955 - RNA, 17 nt, Artificial Sequence
  Description of Artificial Sequence:  Nucleic Acid
  misc_feature: oligonucleotide substrate
ugcagcucgccgagcag

SEQ ID NO: 3956 - RNA, 17 nt, Artificial Sequence
  Description of Artificial Sequence:  Nucleic Acid
  misc_feature: oligonucleotide substrate
cucgccgagcaguucaa

SEQ ID NO: 3957 - RNA, 17 nt, Artificial Sequence
  Description of Artificial Sequence:  Nucleic Acid
  misc_feature: oligonucleotide substrate
gccgagcaguucaagca

SEQ ID NO: 3958 - RNA, 17 nt, Artificial Sequence
  Description of Artificial Sequence:  Nucleic Acid
  misc_feature: oligonucleotide substrate
caguucaagcagaaggc

SEQ ID NO: 3959 - RNA, 17 nt, Artificial Sequence
  Description of Artificial Sequence:  Nucleic Acid
  misc_feature: oligonucleotide substrate
agcagaaggcgcucgga

SEQ ID NO: 3960 - RNA, 17 nt, Artificial Sequence
  Description of Artificial Sequence:  Nucleic Acid
  misc_feature: oligonucleotide substrate
cagaaggcgcucggauu

SEQ ID NO: 3961 - RNA, 17 nt, Artificial Sequence
  Description of Artificial Sequence:  Nucleic Acid
  misc_feature: oligonucleotide substrate
gcgcucggauugcugca

SEQ ID NO: 3962 - RNA, 17 nt, Artificial Sequence
  Description of Artificial Sequence:  Nucleic Acid
  misc_feature: oligonucleotide substrate
cucggauugcugcaaac

SEQ ID NO: 3963 - RNA, 17 nt, Artificial Sequence
  Description of Artificial Sequence:  Nucleic Acid
  misc_feature: oligonucleotide substrate
ggauugcugcaaacagc

SEQ ID NO: 3964 - RNA, 17 nt, Artificial Sequence
  Description of Artificial Sequence:  Nucleic Acid
  misc_feature: oligonucleotide substrate
ugcugcaaacagccacc

SEQ ID NO: 3965 - RNA, 17 nt, Artificial Sequence
  Description of Artificial Sequence:  Nucleic Acid
  misc_feature: oligonucleotide substrate
ugcaaacagccaccaac

SEQ ID NO: 3966 - RNA, 17 nt, Artificial Sequence
  Description of Artificial Sequence:  Nucleic Acid
  misc_feature: oligonucleotide substrate
aaacagccaccaaccaa

SEQ ID NO: 3967 - RNA, 17 nt, Artificial Sequence
  Description of Artificial Sequence:  Nucleic Acid
  misc_feature: oligonucleotide substrate
agccaccaaccaagcgg

SEQ ID NO: 3968 - RNA, 17 nt, Artificial Sequence
  Description of Artificial Sequence:  Nucleic Acid
  misc_feature: oligonucleotide substrate
ccaaccaagcggaggcu

SEQ ID NO: 3969 - RNA, 17 nt, Artificial Sequence
  Description of Artificial Sequence:  Nucleic Acid
  misc_feature: oligonucleotide substrate
aagcggaggcugcugcu

SEQ ID NO: 3970 - RNA, 17 nt, Artificial Sequence
  Description of Artificial Sequence:  Nucleic Acid
  misc_feature: oligonucleotide substrate
cggaggcugcugcuccc

SEQ ID NO: 3971 - RNA, 17 nt, Artificial Sequence
  Description of Artificial Sequence:  Nucleic Acid
  misc_feature: oligonucleotide substrate
aggcugcugcucccgug

SEQ ID NO: 3972 - RNA, 17 nt, Artificial Sequence
  Description of Artificial Sequence:  Nucleic Acid
  misc_feature: oligonucleotide substrate
cugcucccgugguggaa

SEQ ID NO: 3973 - RNA, 17 nt, Artificial Sequence
  Description of Artificial Sequence:  Nucleic Acid
  misc_feature: oligonucleotide substrate
cucccgugguggaaucc

SEQ ID NO: 3974 - RNA, 17 nt, Artificial Sequence
  Description of Artificial Sequence:  Nucleic Acid
  misc_feature: oligonucleotide substrate
gugguggaauccaagug

SEQ ID NO: 3975 - RNA, 17 nt, Artificial Sequence
  Description of Artificial Sequence:  Nucleic Acid
  misc_feature: oligonucleotide substrate
gaauccaaguggcgagc

SEQ ID NO: 3976 - RNA, 17 nt, Artificial Sequence
  Description of Artificial Sequence:  Nucleic Acid
  misc_feature: oligonucleotide substrate
uccaaguggcgagcccu

SEQ ID NO: 3977 - RNA, 17 nt, Artificial Sequence
  Description of Artificial Sequence:  Nucleic Acid
  misc_feature: oligonucleotide substrate
aguggcgagcccuugag

SEQ ID NO: 3978 - RNA, 17 nt, Artificial Sequence
  Description of Artificial Sequence:  Nucleic Acid
  misc_feature: oligonucleotide substrate
cccuugaggcuuucugg

SEQ ID NO: 3979 - RNA, 17 nt, Artificial Sequence
  Description of Artificial Sequence:  Nucleic Acid
  misc_feature: oligonucleotide substrate
cuuucugggcgaagcac

SEQ ID NO: 3980 - RNA, 17 nt, Artificial Sequence
  Description of Artificial Sequence:  Nucleic Acid
  misc_feature: oligonucleotide substrate
ugggcgaagcacaugug

SEQ ID NO: 3981 - RNA, 17 nt, Artificial Sequence
  Description of Artificial Sequence:  Nucleic Acid
  misc_feature: oligonucleotide substrate
ggcgaagcacaugugga

SEQ ID NO: 3982 - RNA, 17 nt, Artificial Sequence
  Description of Artificial Sequence:  Nucleic Acid
  misc_feature: oligonucleotide substrate
cgaagcacauguggaau

SEQ ID NO: 3983 - RNA, 17 nt, Artificial Sequence
  Description of Artificial Sequence:  Nucleic Acid
  misc_feature: oligonucleotide substrate
aagcacauguggaauuu

SEQ ID NO: 3984 - RNA, 17 nt, Artificial Sequence
  Description of Artificial Sequence:  Nucleic Acid
  misc_feature: oligonucleotide substrate
cauguggaauuucauca

SEQ ID NO: 3985 - RNA, 17 nt, Artificial Sequence
  Description of Artificial Sequence:  Nucleic Acid
  misc_feature: oligonucleotide substrate
ggaauuucaucagcggg

SEQ ID NO: 3986 - RNA, 17 nt, Artificial Sequence
  Description of Artificial Sequence:  Nucleic Acid
  misc_feature: oligonucleotide substrate
uuucaucagcgggauac

SEQ ID NO: 3987 - RNA, 17 nt, Artificial Sequence
  Description of Artificial Sequence:  Nucleic Acid
  misc_feature: oligonucleotide substrate
ucagcgggauacaguac

SEQ ID NO: 3988 - RNA, 17 nt, Artificial Sequence
  Description of Artificial Sequence:  Nucleic Acid
  misc_feature: oligonucleotide substrate
agcgggauacaguaccu

SEQ ID NO: 3989 - RNA, 17 nt, Artificial Sequence
  Description of Artificial Sequence:  Nucleic Acid
  misc_feature: oligonucleotide substrate
gggauacaguaccuagc

SEQ ID NO: 3990 - RNA, 17 nt, Artificial Sequence
  Description of Artificial Sequence:  Nucleic Acid
  misc_feature: oligonucleotide substrate
gauacaguaccuagcag

SEQ ID NO: 3991 - RNA, 17 nt, Artificial Sequence
  Description of Artificial Sequence:  Nucleic Acid
  misc_feature: oligonucleotide substrate
aguaccuagcaggcuug

SEQ ID NO: 3992 - RNA, 17 nt, Artificial Sequence
  Description of Artificial Sequence:  Nucleic Acid
  misc_feature: oligonucleotide substrate
ccuagcaggcuugucca

SEQ ID NO: 3993 - RNA, 17 nt, Artificial Sequence
  Description of Artificial Sequence:  Nucleic Acid
  misc_feature: oligonucleotide substrate
gcaggcuuguccacucu

SEQ ID NO: 3994 - RNA, 17 nt, Artificial Sequence
  Description of Artificial Sequence:  Nucleic Acid
  misc_feature: oligonucleotide substrate
gcuuguccacucugccu

SEQ ID NO: 3995 - RNA, 17 nt, Artificial Sequence
  Description of Artificial Sequence:  Nucleic Acid
  misc_feature: oligonucleotide substrate
uccacucugccugggaa

SEQ ID NO: 3996 - RNA, 17 nt, Artificial Sequence
  Description of Artificial Sequence:  Nucleic Acid
  misc_feature: oligonucleotide substrate
gccugggaaccccgcga

SEQ ID NO: 3997 - RNA, 17 nt, Artificial Sequence
  Description of Artificial Sequence:  Nucleic Acid
  misc_feature: oligonucleotide substrate
ggaaccccgcgauagca

SEQ ID NO: 3998 - RNA, 17 nt, Artificial Sequence
  Description of Artificial Sequence:  Nucleic Acid
  misc_feature: oligonucleotide substrate
accccgcgauagcauca

SEQ ID NO: 3999 - RNA, 17 nt, Artificial Sequence
  Description of Artificial Sequence:  Nucleic Acid
  misc_feature: oligonucleotide substrate
ccgcgauagcaucauug

SEQ ID NO: 4000 - RNA, 17 nt, Artificial Sequence
  Description of Artificial Sequence:  Nucleic Acid
  misc_feature: oligonucleotide substrate
gcgauagcaucauugau

SEQ ID NO: 4001 - RNA, 17 nt, Artificial Sequence
  Description of Artificial Sequence:  Nucleic Acid
  misc_feature: oligonucleotide substrate
auagcaucauugauggc

SEQ ID NO: 4002 - RNA, 17 nt, Artificial Sequence
  Description of Artificial Sequence:  Nucleic Acid
  misc_feature: oligonucleotide substrate
caucauugauggcauuc

SEQ ID NO: 4003 - RNA, 17 nt, Artificial Sequence
  Description of Artificial Sequence:  Nucleic Acid
  misc_feature: oligonucleotide substrate
cauugauggcauucaca

SEQ ID NO: 4004 - RNA, 17 nt, Artificial Sequence
  Description of Artificial Sequence:  Nucleic Acid
  misc_feature: oligonucleotide substrate
uugauggcauucacagc

SEQ ID NO: 4005 - RNA, 17 nt, Artificial Sequence
  Description of Artificial Sequence:  Nucleic Acid
  misc_feature: oligonucleotide substrate
uggcauucacagccucc

SEQ ID NO: 4006 - RNA, 17 nt, Artificial Sequence
  Description of Artificial Sequence:  Nucleic Acid
  misc_feature: oligonucleotide substrate
cauucacagccuccauc

SEQ ID NO: 4007 - RNA, 17 nt, Artificial Sequence
  Description of Artificial Sequence:  Nucleic Acid
  misc_feature: oligonucleotide substrate
cagccuccaucaccagc

SEQ ID NO: 4008 - RNA, 17 nt, Artificial Sequence
  Description of Artificial Sequence:  Nucleic Acid
  misc_feature: oligonucleotide substrate
ccuccaucaccagcccg

SEQ ID NO: 4009 - RNA, 17 nt, Artificial Sequence
  Description of Artificial Sequence:  Nucleic Acid
  misc_feature: oligonucleotide substrate
caucaccagcccgcuca

SEQ ID NO: 4010 - RNA, 17 nt, Artificial Sequence
  Description of Artificial Sequence:  Nucleic Acid
  misc_feature: oligonucleotide substrate
accagcccgcucaccac

SEQ ID NO: 4011 - RNA, 17 nt, Artificial Sequence
  Description of Artificial Sequence:  Nucleic Acid
  misc_feature: oligonucleotide substrate
gcccgcucaccacccaa

SEQ ID NO: 4012 - RNA, 17 nt, Artificial Sequence
  Description of Artificial Sequence:  Nucleic Acid
  misc_feature: oligonucleotide substrate
cgcucaccacccaaagc

SEQ ID NO: 4013 - RNA, 17 nt, Artificial Sequence
  Description of Artificial Sequence:  Nucleic Acid
  misc_feature: oligonucleotide substrate
cacccaaagcacccucc

SEQ ID NO: 4014 - RNA, 17 nt, Artificial Sequence
  Description of Artificial Sequence:  Nucleic Acid
  misc_feature: oligonucleotide substrate
cccaaagcacccuccug

SEQ ID NO: 4015 - RNA, 17 nt, Artificial Sequence
  Description of Artificial Sequence:  Nucleic Acid
  misc_feature: oligonucleotide substrate
acccuccuguucaacau

SEQ ID NO: 4016 - RNA, 17 nt, Artificial Sequence
  Description of Artificial Sequence:  Nucleic Acid
  misc_feature: oligonucleotide substrate
ccuguucaacaucuugg

SEQ ID NO: 4017 - RNA, 17 nt, Artificial Sequence
  Description of Artificial Sequence:  Nucleic Acid
  misc_feature: oligonucleotide substrate
uguucaacaucuuggga

SEQ ID NO: 4018 - RNA, 17 nt, Artificial Sequence
  Description of Artificial Sequence:  Nucleic Acid
  misc_feature: oligonucleotide substrate
uugggaggguggguggc

SEQ ID NO: 4019 - RNA, 17 nt, Artificial Sequence
  Description of Artificial Sequence:  Nucleic Acid
  misc_feature: oligonucleotide substrate
gaggguggguggccgcc

SEQ ID NO: 4020 - RNA, 17 nt, Artificial Sequence
  Description of Artificial Sequence:  Nucleic Acid
  misc_feature: oligonucleotide substrate
gguggguggccgcccaa

SEQ ID NO: 4021 - RNA, 17 nt, Artificial Sequence
  Description of Artificial Sequence:  Nucleic Acid
  misc_feature: oligonucleotide substrate
ggguggccgcccaacuc

SEQ ID NO: 4022 - RNA, 17 nt, Artificial Sequence
  Description of Artificial Sequence:  Nucleic Acid
  misc_feature: oligonucleotide substrate
gccgcccaacucgcucc

SEQ ID NO: 4023 - RNA, 17 nt, Artificial Sequence
  Description of Artificial Sequence:  Nucleic Acid
  misc_feature: oligonucleotide substrate
cccaacucgcucccccc

SEQ ID NO: 4024 - RNA, 17 nt, Artificial Sequence
  Description of Artificial Sequence:  Nucleic Acid
  misc_feature: oligonucleotide substrate
cccccagagccguuucg

SEQ ID NO: 4025 - RNA, 17 nt, Artificial Sequence
  Description of Artificial Sequence:  Nucleic Acid
  misc_feature: oligonucleotide substrate
ccagagccguuucggcc

SEQ ID NO: 4026 - RNA, 17 nt, Artificial Sequence
  Description of Artificial Sequence:  Nucleic Acid
  misc_feature: oligonucleotide substrate
ccguuucggccuucgug

SEQ ID NO: 4027 - RNA, 17 nt, Artificial Sequence
  Description of Artificial Sequence:  Nucleic Acid
  misc_feature: oligonucleotide substrate
cggccuucgugggcgcc

SEQ ID NO: 4028 - RNA, 17 nt, Artificial Sequence
  Description of Artificial Sequence:  Nucleic Acid
  misc_feature: oligonucleotide substrate
cuucgugggcgccggca

SEQ ID NO: 4029 - RNA, 17 nt, Artificial Sequence
  Description of Artificial Sequence:  Nucleic Acid
  misc_feature: oligonucleotide substrate
ucgugggcgccggcauc

SEQ ID NO: 4030 - RNA, 17 nt, Artificial Sequence
  Description of Artificial Sequence:  Nucleic Acid
  misc_feature: oligonucleotide substrate
gggcgccggcaucgcug

SEQ ID NO: 4031 - RNA, 17 nt, Artificial Sequence
  Description of Artificial Sequence:  Nucleic Acid
  misc_feature: oligonucleotide substrate
gcgccggcaucgcuggc

SEQ ID NO: 4032 - RNA, 17 nt, Artificial Sequence
  Description of Artificial Sequence:  Nucleic Acid
  misc_feature: oligonucleotide substrate
ccggcaucgcuggcgcg

SEQ ID NO: 4033 - RNA, 17 nt, Artificial Sequence
  Description of Artificial Sequence:  Nucleic Acid
  misc_feature: oligonucleotide substrate
caucgcuggcgcggcug

SEQ ID NO: 4034 - RNA, 17 nt, Artificial Sequence
  Description of Artificial Sequence:  Nucleic Acid
  misc_feature: oligonucleotide substrate
ucgcuggcgcggcuguu

SEQ ID NO: 4035 - RNA, 17 nt, Artificial Sequence
  Description of Artificial Sequence:  Nucleic Acid
  misc_feature: oligonucleotide substrate
cuggcgcggcuguuggc

SEQ ID NO: 4036 - RNA, 17 nt, Artificial Sequence
  Description of Artificial Sequence:  Nucleic Acid
  misc_feature: oligonucleotide substrate
gcgcggcuguuggcagc

SEQ ID NO: 4037 - RNA, 17 nt, Artificial Sequence
  Description of Artificial Sequence:  Nucleic Acid
  misc_feature: oligonucleotide substrate
ggcuguuggcagcauag

SEQ ID NO: 4038 - RNA, 17 nt, Artificial Sequence
  Description of Artificial Sequence:  Nucleic Acid
  misc_feature: oligonucleotide substrate
uguuggcagcauaggcc

SEQ ID NO: 4039 - RNA, 17 nt, Artificial Sequence
  Description of Artificial Sequence:  Nucleic Acid
  misc_feature: oligonucleotide substrate
uuggcagcauaggccuu

SEQ ID NO: 4040 - RNA, 17 nt, Artificial Sequence
  Description of Artificial Sequence:  Nucleic Acid
  misc_feature: oligonucleotide substrate
cagcauaggccuuggga

SEQ ID NO: 4041 - RNA, 17 nt, Artificial Sequence
  Description of Artificial Sequence:  Nucleic Acid
  misc_feature: oligonucleotide substrate
uugggaaggugcuugua

SEQ ID NO: 4042 - RNA, 17 nt, Artificial Sequence
  Description of Artificial Sequence:  Nucleic Acid
  misc_feature: oligonucleotide substrate
gggaaggugcuuguaga

SEQ ID NO: 4043 - RNA, 17 nt, Artificial Sequence
  Description of Artificial Sequence:  Nucleic Acid
  misc_feature: oligonucleotide substrate
aggugcuuguagacauu

SEQ ID NO: 4044 - RNA, 17 nt, Artificial Sequence
  Description of Artificial Sequence:  Nucleic Acid
  misc_feature: oligonucleotide substrate
gcuuguagacauucugg

SEQ ID NO: 4045 - RNA, 17 nt, Artificial Sequence
  Description of Artificial Sequence:  Nucleic Acid
  misc_feature: oligonucleotide substrate
uuguagacauucuggcg

SEQ ID NO: 4046 - RNA, 17 nt, Artificial Sequence
  Description of Artificial Sequence:  Nucleic Acid
  misc_feature: oligonucleotide substrate
acauucuggcgggcuau

SEQ ID NO: 4047 - RNA, 17 nt, Artificial Sequence
  Description of Artificial Sequence:  Nucleic Acid
  misc_feature: oligonucleotide substrate
ucuggcgggcuauggag

SEQ ID NO: 4048 - RNA, 17 nt, Artificial Sequence
  Description of Artificial Sequence:  Nucleic Acid
  misc_feature: oligonucleotide substrate
ggcgggcuauggagcag

SEQ ID NO: 4049 - RNA, 17 nt, Artificial Sequence
  Description of Artificial Sequence:  Nucleic Acid
  misc_feature: oligonucleotide substrate
gcuauggagcaggagug

SEQ ID NO: 4050 - RNA, 17 nt, Artificial Sequence
  Description of Artificial Sequence:  Nucleic Acid
  misc_feature: oligonucleotide substrate
gagcaggaguggcgggu

SEQ ID NO: 4051 - RNA, 17 nt, Artificial Sequence
  Description of Artificial Sequence:  Nucleic Acid
  misc_feature: oligonucleotide substrate
caggaguggcgggugcu

SEQ ID NO: 4052 - RNA, 17 nt, Artificial Sequence
  Description of Artificial Sequence:  Nucleic Acid
  misc_feature: oligonucleotide substrate
aguggcgggugcucucg

SEQ ID NO: 4053 - RNA, 17 nt, Artificial Sequence
  Description of Artificial Sequence:  Nucleic Acid
  misc_feature: oligonucleotide substrate
uggcgggugcucucgug

SEQ ID NO: 4054 - RNA, 17 nt, Artificial Sequence
  Description of Artificial Sequence:  Nucleic Acid
  misc_feature: oligonucleotide substrate
gugcucucguggccuuc

SEQ ID NO: 4055 - RNA, 17 nt, Artificial Sequence
  Description of Artificial Sequence:  Nucleic Acid
  misc_feature: oligonucleotide substrate
cucucguggccuucaag

SEQ ID NO: 4056 - RNA, 17 nt, Artificial Sequence
  Description of Artificial Sequence:  Nucleic Acid
  misc_feature: oligonucleotide substrate
ccuucaaggucaugagc

SEQ ID NO: 4057 - RNA, 17 nt, Artificial Sequence
  Description of Artificial Sequence:  Nucleic Acid
  misc_feature: oligonucleotide substrate
ucaaggucaugagcggg

SEQ ID NO: 4058 - RNA, 17 nt, Artificial Sequence
  Description of Artificial Sequence:  Nucleic Acid
  misc_feature: oligonucleotide substrate
ggucaugagcggggaga

SEQ ID NO: 4059 - RNA, 17 nt, Artificial Sequence
  Description of Artificial Sequence:  Nucleic Acid
  misc_feature: oligonucleotide substrate
gcggggagaugccuucu

SEQ ID NO: 4060 - RNA, 17 nt, Artificial Sequence
  Description of Artificial Sequence:  Nucleic Acid
  misc_feature: oligonucleotide substrate
ggggagaugccuucuac

SEQ ID NO: 4061 - RNA, 17 nt, Artificial Sequence
  Description of Artificial Sequence:  Nucleic Acid
  misc_feature: oligonucleotide substrate
ugccuucuaccgaggac

SEQ ID NO: 4062 - RNA, 17 nt, Artificial Sequence
  Description of Artificial Sequence:  Nucleic Acid
  misc_feature: oligonucleotide substrate
uaccgaggaccugguca

SEQ ID NO: 4063 - RNA, 17 nt, Artificial Sequence
  Description of Artificial Sequence:  Nucleic Acid
  misc_feature: oligonucleotide substrate
aggaccuggucaacuua

SEQ ID NO: 4064 - RNA, 17 nt, Artificial Sequence
  Description of Artificial Sequence:  Nucleic Acid
  misc_feature: oligonucleotide substrate
ccuggucaacuuacucc

SEQ ID NO: 4065 - RNA, 17 nt, Artificial Sequence
  Description of Artificial Sequence:  Nucleic Acid
  misc_feature: oligonucleotide substrate
gucaacuuacucccugc

SEQ ID NO: 4066 - RNA, 17 nt, Artificial Sequence
  Description of Artificial Sequence:  Nucleic Acid
  misc_feature: oligonucleotide substrate
uacucccugccauccuc

SEQ ID NO: 4067 - RNA, 17 nt, Artificial Sequence
  Description of Artificial Sequence:  Nucleic Acid
  misc_feature: oligonucleotide substrate
ucccugccauccucucu

SEQ ID NO: 4068 - RNA, 17 nt, Artificial Sequence
  Description of Artificial Sequence:  Nucleic Acid
  misc_feature: oligonucleotide substrate
cucuccuggcgcccugg

SEQ ID NO: 4069 - RNA, 17 nt, Artificial Sequence
  Description of Artificial Sequence:  Nucleic Acid
  misc_feature: oligonucleotide substrate
cuccuggcgcccugguc

SEQ ID NO: 4070 - RNA, 17 nt, Artificial Sequence
  Description of Artificial Sequence:  Nucleic Acid
  misc_feature: oligonucleotide substrate
gcgcccuggucgucggg

SEQ ID NO: 4071 - RNA, 17 nt, Artificial Sequence
  Description of Artificial Sequence:  Nucleic Acid
  misc_feature: oligonucleotide substrate
cccuggucgucggggug

SEQ ID NO: 4072 - RNA, 17 nt, Artificial Sequence
  Description of Artificial Sequence:  Nucleic Acid
  misc_feature: oligonucleotide substrate
ucgucgggguggugugc

SEQ ID NO: 4073 - RNA, 17 nt, Artificial Sequence
  Description of Artificial Sequence:  Nucleic Acid
  misc_feature: oligonucleotide substrate
ucgggguggugugcgca

SEQ ID NO: 4074 - RNA, 17 nt, Artificial Sequence
  Description of Artificial Sequence:  Nucleic Acid
  misc_feature: oligonucleotide substrate
gggguggugugcgcagc

SEQ ID NO: 4075 - RNA, 17 nt, Artificial Sequence
  Description of Artificial Sequence:  Nucleic Acid
  misc_feature: oligonucleotide substrate
gguggugugcgcagcga

SEQ ID NO: 4076 - RNA, 17 nt, Artificial Sequence
  Description of Artificial Sequence:  Nucleic Acid
  misc_feature: oligonucleotide substrate
uggugugcgcagcgaua

SEQ ID NO: 4077 - RNA, 17 nt, Artificial Sequence
  Description of Artificial Sequence:  Nucleic Acid
  misc_feature: oligonucleotide substrate
ugugcgcagcgauacug

SEQ ID NO: 4078 - RNA, 17 nt, Artificial Sequence
  Description of Artificial Sequence:  Nucleic Acid
  misc_feature: oligonucleotide substrate
gcgcagcgauacugcgu

SEQ ID NO: 4079 - RNA, 17 nt, Artificial Sequence
  Description of Artificial Sequence:  Nucleic Acid
  misc_feature: oligonucleotide substrate
gcagcgauacugcgucg

SEQ ID NO: 4080 - RNA, 17 nt, Artificial Sequence
  Description of Artificial Sequence:  Nucleic Acid
  misc_feature: oligonucleotide substrate
gcgauacugcgucggca

SEQ ID NO: 4081 - RNA, 17 nt, Artificial Sequence
  Description of Artificial Sequence:  Nucleic Acid
  misc_feature: oligonucleotide substrate
gauacugcgucggcaug

SEQ ID NO: 4082 - RNA, 17 nt, Artificial Sequence
  Description of Artificial Sequence:  Nucleic Acid
  misc_feature: oligonucleotide substrate
cugcgucggcauguggg

SEQ ID NO: 4083 - RNA, 17 nt, Artificial Sequence
  Description of Artificial Sequence:  Nucleic Acid
  misc_feature: oligonucleotide substrate
gcgucggcaugugggcc

SEQ ID NO: 4084 - RNA, 17 nt, Artificial Sequence
  Description of Artificial Sequence:  Nucleic Acid
  misc_feature: oligonucleotide substrate
gucggcaugugggccca

SEQ ID NO: 4085 - RNA, 17 nt, Artificial Sequence
  Description of Artificial Sequence:  Nucleic Acid
  misc_feature: oligonucleotide substrate
gcaugugggcccaggag

SEQ ID NO: 4086 - RNA, 17 nt, Artificial Sequence
  Description of Artificial Sequence:  Nucleic Acid
  misc_feature: oligonucleotide substrate
aggagagggcgcugugc

SEQ ID NO: 4087 - RNA, 17 nt, Artificial Sequence
  Description of Artificial Sequence:  Nucleic Acid
  misc_feature: oligonucleotide substrate
gagagggcgcugugcag

SEQ ID NO: 4088 - RNA, 17 nt, Artificial Sequence
  Description of Artificial Sequence:  Nucleic Acid
  misc_feature: oligonucleotide substrate
agggcgcugugcagugg

SEQ ID NO: 4089 - RNA, 17 nt, Artificial Sequence
  Description of Artificial Sequence:  Nucleic Acid
  misc_feature: oligonucleotide substrate
ggcgcugugcaguggau

SEQ ID NO: 4090 - RNA, 17 nt, Artificial Sequence
  Description of Artificial Sequence:  Nucleic Acid
  misc_feature: oligonucleotide substrate
gcugugcaguggaugaa

SEQ ID NO: 4091 - RNA, 17 nt, Artificial Sequence
  Description of Artificial Sequence:  Nucleic Acid
  misc_feature: oligonucleotide substrate
ugcaguggaugaaucgg

SEQ ID NO: 4092 - RNA, 17 nt, Artificial Sequence
  Description of Artificial Sequence:  Nucleic Acid
  misc_feature: oligonucleotide substrate
guggaugaaucggcuga

SEQ ID NO: 4093 - RNA, 17 nt, Artificial Sequence
  Description of Artificial Sequence:  Nucleic Acid
  misc_feature: oligonucleotide substrate
augaaucggcugauagc

SEQ ID NO: 4094 - RNA, 17 nt, Artificial Sequence
  Description of Artificial Sequence:  Nucleic Acid
  misc_feature: oligonucleotide substrate
aucggcugauagcguuc

SEQ ID NO: 4095 - RNA, 17 nt, Artificial Sequence
  Description of Artificial Sequence:  Nucleic Acid
  misc_feature: oligonucleotide substrate
ggcugauagcguucgcu

SEQ ID NO: 4096 - RNA, 17 nt, Artificial Sequence
  Description of Artificial Sequence:  Nucleic Acid
  misc_feature: oligonucleotide substrate
cugauagcguucgcuuc

SEQ ID NO: 4097 - RNA, 17 nt, Artificial Sequence
  Description of Artificial Sequence:  Nucleic Acid
  misc_feature: oligonucleotide substrate
uagcguucgcuucgcgg

SEQ ID NO: 4098 - RNA, 17 nt, Artificial Sequence
  Description of Artificial Sequence:  Nucleic Acid
  misc_feature: oligonucleotide substrate
uucgcuucgcggggcaa

SEQ ID NO: 4099 - RNA, 17 nt, Artificial Sequence
  Description of Artificial Sequence:  Nucleic Acid
  misc_feature: oligonucleotide substrate
uucgcggggcaaccaug

SEQ ID NO: 4100 - RNA, 17 nt, Artificial Sequence
  Description of Artificial Sequence:  Nucleic Acid
  misc_feature: oligonucleotide substrate
gcggggcaaccaugucu

SEQ ID NO: 4101 - RNA, 17 nt, Artificial Sequence
  Description of Artificial Sequence:  Nucleic Acid
  misc_feature: oligonucleotide substrate
gggcaaccaugucuccc

SEQ ID NO: 4102 - RNA, 17 nt, Artificial Sequence
  Description of Artificial Sequence:  Nucleic Acid
  misc_feature: oligonucleotide substrate
gcaaccaugucuccccc

SEQ ID NO: 4103 - RNA, 17 nt, Artificial Sequence
  Description of Artificial Sequence:  Nucleic Acid
  misc_feature: oligonucleotide substrate
ucucccccacgcacuau

SEQ ID NO: 4104 - RNA, 17 nt, Artificial Sequence
  Description of Artificial Sequence:  Nucleic Acid
  misc_feature: oligonucleotide substrate
ucccccacgcacuaugu

SEQ ID NO: 4105 - RNA, 17 nt, Artificial Sequence
  Description of Artificial Sequence:  Nucleic Acid
  misc_feature: oligonucleotide substrate
ccccacgcacuaugugc

SEQ ID NO: 4106 - RNA, 17 nt, Artificial Sequence
  Description of Artificial Sequence:  Nucleic Acid
  misc_feature: oligonucleotide substrate
cacgcacuaugugccug

SEQ ID NO: 4107 - RNA, 17 nt, Artificial Sequence
  Description of Artificial Sequence:  Nucleic Acid
  misc_feature: oligonucleotide substrate
cgcacuaugugccugag

SEQ ID NO: 4108 - RNA, 17 nt, Artificial Sequence
  Description of Artificial Sequence:  Nucleic Acid
  misc_feature: oligonucleotide substrate
cacuaugugccugagag

SEQ ID NO: 4109 - RNA, 17 nt, Artificial Sequence
  Description of Artificial Sequence:  Nucleic Acid
  misc_feature: oligonucleotide substrate
gccugagagcgacgcag

SEQ ID NO: 4110 - RNA, 17 nt, Artificial Sequence
  Description of Artificial Sequence:  Nucleic Acid
  misc_feature: oligonucleotide substrate
ugagagcgacgcagcgg

SEQ ID NO: 4111 - RNA, 17 nt, Artificial Sequence
  Description of Artificial Sequence:  Nucleic Acid
  misc_feature: oligonucleotide substrate
agagcgacgcagcggcg

SEQ ID NO: 4112 - RNA, 17 nt, Artificial Sequence
  Description of Artificial Sequence:  Nucleic Acid
  misc_feature: oligonucleotide substrate
gcgacgcagcggcgcgc

SEQ ID NO: 4113 - RNA, 17 nt, Artificial Sequence
  Description of Artificial Sequence:  Nucleic Acid
  misc_feature: oligonucleotide substrate
acgcagcggcgcgcguc

SEQ ID NO: 4114 - RNA, 17 nt, Artificial Sequence
  Description of Artificial Sequence:  Nucleic Acid
  misc_feature: oligonucleotide substrate
gcagcggcgcgcgucac

SEQ ID NO: 4115 - RNA, 17 nt, Artificial Sequence
  Description of Artificial Sequence:  Nucleic Acid
  misc_feature: oligonucleotide substrate
agcggcgcgcgucacac

SEQ ID NO: 4116 - RNA, 17 nt, Artificial Sequence
  Description of Artificial Sequence:  Nucleic Acid
  misc_feature: oligonucleotide substrate
cggcgcgcgucacacaa

SEQ ID NO: 4117 - RNA, 17 nt, Artificial Sequence
  Description of Artificial Sequence:  Nucleic Acid
  misc_feature: oligonucleotide substrate
cgcgcgucacacaaauc

SEQ ID NO: 4118 - RNA, 17 nt, Artificial Sequence
  Description of Artificial Sequence:  Nucleic Acid
  misc_feature: oligonucleotide substrate
cgcgucacacaaauccu

SEQ ID NO: 4119 - RNA, 17 nt, Artificial Sequence
  Description of Artificial Sequence:  Nucleic Acid
  misc_feature: oligonucleotide substrate
ucacacaaauccucucc

SEQ ID NO: 4120 - RNA, 17 nt, Artificial Sequence
  Description of Artificial Sequence:  Nucleic Acid
  misc_feature: oligonucleotide substrate
ccucuccagccucacca

SEQ ID NO: 4121 - RNA, 17 nt, Artificial Sequence
  Description of Artificial Sequence:  Nucleic Acid
  misc_feature: oligonucleotide substrate
ccagccucaccaucacu

SEQ ID NO: 4122 - RNA, 17 nt, Artificial Sequence
  Description of Artificial Sequence:  Nucleic Acid
  misc_feature: oligonucleotide substrate
gccucaccaucacucag

SEQ ID NO: 4123 - RNA, 17 nt, Artificial Sequence
  Description of Artificial Sequence:  Nucleic Acid
  misc_feature: oligonucleotide substrate
ucaccaucacucagcug

SEQ ID NO: 4124 - RNA, 17 nt, Artificial Sequence
  Description of Artificial Sequence:  Nucleic Acid
  misc_feature: oligonucleotide substrate
aucacucagcugcugag

SEQ ID NO: 4125 - RNA, 17 nt, Artificial Sequence
  Description of Artificial Sequence:  Nucleic Acid
  misc_feature: oligonucleotide substrate
acucagcugcugaggag

SEQ ID NO: 4126 - RNA, 17 nt, Artificial Sequence
  Description of Artificial Sequence:  Nucleic Acid
  misc_feature: oligonucleotide substrate
cugaggaggcuccauca

SEQ ID NO: 4127 - RNA, 17 nt, Artificial Sequence
  Description of Artificial Sequence:  Nucleic Acid
  misc_feature: oligonucleotide substrate
gaggcuccaucagugga

SEQ ID NO: 4128 - RNA, 17 nt, Artificial Sequence
  Description of Artificial Sequence:  Nucleic Acid
  misc_feature: oligonucleotide substrate
cuccaucaguggaucaa

SEQ ID NO: 4129 - RNA, 17 nt, Artificial Sequence
  Description of Artificial Sequence:  Nucleic Acid
  misc_feature: oligonucleotide substrate
aucaguggaucaaugag

SEQ ID NO: 4130 - RNA, 17 nt, Artificial Sequence
  Description of Artificial Sequence:  Nucleic Acid
  misc_feature: oligonucleotide substrate
guggaucaaugaggacu

SEQ ID NO: 4131 - RNA, 17 nt, Artificial Sequence
  Description of Artificial Sequence:  Nucleic Acid
  misc_feature: oligonucleotide substrate
caaugaggacugcucca

SEQ ID NO: 4132 - RNA, 17 nt, Artificial Sequence
  Description of Artificial Sequence:  Nucleic Acid
  misc_feature: oligonucleotide substrate
ugaggacugcuccacgc

SEQ ID NO: 4133 - RNA, 17 nt, Artificial Sequence
  Description of Artificial Sequence:  Nucleic Acid
  misc_feature: oligonucleotide substrate
acugcuccacgccaugu

SEQ ID NO: 4134 - RNA, 17 nt, Artificial Sequence
  Description of Artificial Sequence:  Nucleic Acid
  misc_feature: oligonucleotide substrate
ugcuccacgccauguuc

SEQ ID NO: 4135 - RNA, 17 nt, Artificial Sequence
  Description of Artificial Sequence:  Nucleic Acid
  misc_feature: oligonucleotide substrate
uccacgccauguuccgg

SEQ ID NO: 4136 - RNA, 17 nt, Artificial Sequence
  Description of Artificial Sequence:  Nucleic Acid
  misc_feature: oligonucleotide substrate
cacgccauguuccggcu

SEQ ID NO: 4137 - RNA, 17 nt, Artificial Sequence
  Description of Artificial Sequence:  Nucleic Acid
  misc_feature: oligonucleotide substrate
auguuccggcucguggc

SEQ ID NO: 4138 - RNA, 17 nt, Artificial Sequence
  Description of Artificial Sequence:  Nucleic Acid
  misc_feature: oligonucleotide substrate
uccggcucguggcuaag

SEQ ID NO: 4139 - RNA, 17 nt, Artificial Sequence
  Description of Artificial Sequence:  Nucleic Acid
  misc_feature: oligonucleotide substrate
ggcucguggcuaaggga

SEQ ID NO: 4140 - RNA, 17 nt, Artificial Sequence
  Description of Artificial Sequence:  Nucleic Acid
  misc_feature: oligonucleotide substrate
gcuaagggauguuuggg

SEQ ID NO: 4141 - RNA, 17 nt, Artificial Sequence
  Description of Artificial Sequence:  Nucleic Acid
  misc_feature: oligonucleotide substrate
uaagggauguuugggac

SEQ ID NO: 4142 - RNA, 17 nt, Artificial Sequence
  Description of Artificial Sequence:  Nucleic Acid
  misc_feature: oligonucleotide substrate
uguuugggacuggauau

SEQ ID NO: 4143 - RNA, 17 nt, Artificial Sequence
  Description of Artificial Sequence:  Nucleic Acid
  misc_feature: oligonucleotide substrate
gggacuggauaugcacg

SEQ ID NO: 4144 - RNA, 17 nt, Artificial Sequence
  Description of Artificial Sequence:  Nucleic Acid
  misc_feature: oligonucleotide substrate
gacuggauaugcacggu

SEQ ID NO: 4145 - RNA, 17 nt, Artificial Sequence
  Description of Artificial Sequence:  Nucleic Acid
  misc_feature: oligonucleotide substrate
cuggauaugcacggugu

SEQ ID NO: 4146 - RNA, 17 nt, Artificial Sequence
  Description of Artificial Sequence:  Nucleic Acid
  misc_feature: oligonucleotide substrate
ggauaugcacgguguug

SEQ ID NO: 4147 - RNA, 17 nt, Artificial Sequence
  Description of Artificial Sequence:  Nucleic Acid
  misc_feature: oligonucleotide substrate
uaugcacgguguugacu

SEQ ID NO: 4148 - RNA, 17 nt, Artificial Sequence
  Description of Artificial Sequence:  Nucleic Acid
  misc_feature: oligonucleotide substrate
ugcacgguguugacuga

SEQ ID NO: 4149 - RNA, 17 nt, Artificial Sequence
  Description of Artificial Sequence:  Nucleic Acid
  misc_feature: oligonucleotide substrate
cgguguugacugacuuc

SEQ ID NO: 4150 - RNA, 17 nt, Artificial Sequence
  Description of Artificial Sequence:  Nucleic Acid
  misc_feature: oligonucleotide substrate
guugacugacuucaaga

SEQ ID NO: 4151 - RNA, 17 nt, Artificial Sequence
  Description of Artificial Sequence:  Nucleic Acid
  misc_feature: oligonucleotide substrate
acuucaagaccuggcuu

SEQ ID NO: 4152 - RNA, 17 nt, Artificial Sequence
  Description of Artificial Sequence:  Nucleic Acid
  misc_feature: oligonucleotide substrate
aagaccuggcuucaguc

SEQ ID NO: 4153 - RNA, 17 nt, Artificial Sequence
  Description of Artificial Sequence:  Nucleic Acid
  misc_feature: oligonucleotide substrate
uggcuucaguccaagcu

SEQ ID NO: 4154 - RNA, 17 nt, Artificial Sequence
  Description of Artificial Sequence:  Nucleic Acid
  misc_feature: oligonucleotide substrate
caguccaagcuccugcc

SEQ ID NO: 4155 - RNA, 17 nt, Artificial Sequence
  Description of Artificial Sequence:  Nucleic Acid
  misc_feature: oligonucleotide substrate
aagcuccugccgcgguu

SEQ ID NO: 4156 - RNA, 17 nt, Artificial Sequence
  Description of Artificial Sequence:  Nucleic Acid
  misc_feature: oligonucleotide substrate
cuccugccgcgguugcc

SEQ ID NO: 4157 - RNA, 17 nt, Artificial Sequence
  Description of Artificial Sequence:  Nucleic Acid
  misc_feature: oligonucleotide substrate
cugccgcgguugccggg

SEQ ID NO: 4158 - RNA, 17 nt, Artificial Sequence
  Description of Artificial Sequence:  Nucleic Acid
  misc_feature: oligonucleotide substrate
ccgcgguugccgggagu

SEQ ID NO: 4159 - RNA, 17 nt, Artificial Sequence
  Description of Artificial Sequence:  Nucleic Acid
  misc_feature: oligonucleotide substrate
ugccgggagucccuuuc

SEQ ID NO: 4160 - RNA, 17 nt, Artificial Sequence
  Description of Artificial Sequence:  Nucleic Acid
  misc_feature: oligonucleotide substrate
uucuucucaugccaacg

SEQ ID NO: 4161 - RNA, 17 nt, Artificial Sequence
  Description of Artificial Sequence:  Nucleic Acid
  misc_feature: oligonucleotide substrate
cuucucaugccaacgug

SEQ ID NO: 4162 - RNA, 17 nt, Artificial Sequence
  Description of Artificial Sequence:  Nucleic Acid
  misc_feature: oligonucleotide substrate
ucaugccaacgugggua

SEQ ID NO: 4163 - RNA, 17 nt, Artificial Sequence
  Description of Artificial Sequence:  Nucleic Acid
  misc_feature: oligonucleotide substrate
augccaacguggguaca

SEQ ID NO: 4164 - RNA, 17 nt, Artificial Sequence
  Description of Artificial Sequence:  Nucleic Acid
  misc_feature: oligonucleotide substrate
caacguggguacagggg

SEQ ID NO: 4165 - RNA, 17 nt, Artificial Sequence
  Description of Artificial Sequence:  Nucleic Acid
  misc_feature: oligonucleotide substrate
acguggguacagggggg

SEQ ID NO: 4166 - RNA, 17 nt, Artificial Sequence
  Description of Artificial Sequence:  Nucleic Acid
  misc_feature: oligonucleotide substrate
acaggggggucuggcgg

SEQ ID NO: 4167 - RNA, 17 nt, Artificial Sequence
  Description of Artificial Sequence:  Nucleic Acid
  misc_feature: oligonucleotide substrate
ggggucuggcggggaga

SEQ ID NO: 4168 - RNA, 17 nt, Artificial Sequence
  Description of Artificial Sequence:  Nucleic Acid
  misc_feature: oligonucleotide substrate
gcggggagacgguauca

SEQ ID NO: 4169 - RNA, 17 nt, Artificial Sequence
  Description of Artificial Sequence:  Nucleic Acid
  misc_feature: oligonucleotide substrate
gggagacgguaucaugc

SEQ ID NO: 4170 - RNA, 17 nt, Artificial Sequence
  Description of Artificial Sequence:  Nucleic Acid
  misc_feature: oligonucleotide substrate
gagacgguaucaugcaa

SEQ ID NO: 4171 - RNA, 17 nt, Artificial Sequence
  Description of Artificial Sequence:  Nucleic Acid
  misc_feature: oligonucleotide substrate
acgguaucaugcaaacc

SEQ ID NO: 4172 - RNA, 17 nt, Artificial Sequence
  Description of Artificial Sequence:  Nucleic Acid
  misc_feature: oligonucleotide substrate
gguaucaugcaaaccac

SEQ ID NO: 4173 - RNA, 17 nt, Artificial Sequence
  Description of Artificial Sequence:  Nucleic Acid
  misc_feature: oligonucleotide substrate
ucaugcaaaccaccugc

SEQ ID NO: 4174 - RNA, 17 nt, Artificial Sequence
  Description of Artificial Sequence:  Nucleic Acid
  misc_feature: oligonucleotide substrate
ugcaaaccaccugccca

SEQ ID NO: 4175 - RNA, 17 nt, Artificial Sequence
  Description of Artificial Sequence:  Nucleic Acid
  misc_feature: oligonucleotide substrate
aaccaccugcccaugcg

SEQ ID NO: 4176 - RNA, 17 nt, Artificial Sequence
  Description of Artificial Sequence:  Nucleic Acid
  misc_feature: oligonucleotide substrate
accugcccaugcggagc

SEQ ID NO: 4177 - RNA, 17 nt, Artificial Sequence
  Description of Artificial Sequence:  Nucleic Acid
  misc_feature: oligonucleotide substrate
cugcccaugcggagcgc

SEQ ID NO: 4178 - RNA, 17 nt, Artificial Sequence
  Description of Artificial Sequence:  Nucleic Acid
  misc_feature: oligonucleotide substrate
caugcggagcgcagauc

SEQ ID NO: 4179 - RNA, 17 nt, Artificial Sequence
  Description of Artificial Sequence:  Nucleic Acid
  misc_feature: oligonucleotide substrate
ugcggagcgcagaucac

SEQ ID NO: 4180 - RNA, 17 nt, Artificial Sequence
  Description of Artificial Sequence:  Nucleic Acid
  misc_feature: oligonucleotide substrate
gagcgcagaucacugga

SEQ ID NO: 4181 - RNA, 17 nt, Artificial Sequence
  Description of Artificial Sequence:  Nucleic Acid
  misc_feature: oligonucleotide substrate
cgcagaucacuggacau

SEQ ID NO: 4182 - RNA, 17 nt, Artificial Sequence
  Description of Artificial Sequence:  Nucleic Acid
  misc_feature: oligonucleotide substrate
aucacuggacaugucaa

SEQ ID NO: 4183 - RNA, 17 nt, Artificial Sequence
  Description of Artificial Sequence:  Nucleic Acid
  misc_feature: oligonucleotide substrate
cacuggacaugucaaga

SEQ ID NO: 4184 - RNA, 17 nt, Artificial Sequence
  Description of Artificial Sequence:  Nucleic Acid
  misc_feature: oligonucleotide substrate
cuggacaugucaagaac

SEQ ID NO: 4185 - RNA, 17 nt, Artificial Sequence
  Description of Artificial Sequence:  Nucleic Acid
  misc_feature: oligonucleotide substrate
ugucaagaacgguucca

SEQ ID NO: 4186 - RNA, 17 nt, Artificial Sequence
  Description of Artificial Sequence:  Nucleic Acid
  misc_feature: oligonucleotide substrate
caagaacgguuccauga

SEQ ID NO: 4187 - RNA, 17 nt, Artificial Sequence
  Description of Artificial Sequence:  Nucleic Acid
  misc_feature: oligonucleotide substrate
acgguuccaugaggauc

SEQ ID NO: 4188 - RNA, 17 nt, Artificial Sequence
  Description of Artificial Sequence:  Nucleic Acid
  misc_feature: oligonucleotide substrate
ccaugaggaucgucggg

SEQ ID NO: 4189 - RNA, 17 nt, Artificial Sequence
  Description of Artificial Sequence:  Nucleic Acid
  misc_feature: oligonucleotide substrate
ugaggaucgucgggccu

SEQ ID NO: 4190 - RNA, 17 nt, Artificial Sequence
  Description of Artificial Sequence:  Nucleic Acid
  misc_feature: oligonucleotide substrate
aucgucgggccuaagac

SEQ ID NO: 4191 - RNA, 17 nt, Artificial Sequence
  Description of Artificial Sequence:  Nucleic Acid
  misc_feature: oligonucleotide substrate
ggccuaagaccuguagc

SEQ ID NO: 4192 - RNA, 17 nt, Artificial Sequence
  Description of Artificial Sequence:  Nucleic Acid
  misc_feature: oligonucleotide substrate
uaagaccuguagcaaca

SEQ ID NO: 4193 - RNA, 17 nt, Artificial Sequence
  Description of Artificial Sequence:  Nucleic Acid
  misc_feature: oligonucleotide substrate
gaccuguagcaacacgu

SEQ ID NO: 4194 - RNA, 17 nt, Artificial Sequence
  Description of Artificial Sequence:  Nucleic Acid
  misc_feature: oligonucleotide substrate
cuguagcaacacguggc

SEQ ID NO: 4195 - RNA, 17 nt, Artificial Sequence
  Description of Artificial Sequence:  Nucleic Acid
  misc_feature: oligonucleotide substrate
guagcaacacguggcau

SEQ ID NO: 4196 - RNA, 17 nt, Artificial Sequence
  Description of Artificial Sequence:  Nucleic Acid
  misc_feature: oligonucleotide substrate
agcaacacguggcaugg

SEQ ID NO: 4197 - RNA, 17 nt, Artificial Sequence
  Description of Artificial Sequence:  Nucleic Acid
  misc_feature: oligonucleotide substrate
aacacguggcauggaac

SEQ ID NO: 4198 - RNA, 17 nt, Artificial Sequence
  Description of Artificial Sequence:  Nucleic Acid
  misc_feature: oligonucleotide substrate
cacguggcauggaacau

SEQ ID NO: 4199 - RNA, 17 nt, Artificial Sequence
  Description of Artificial Sequence:  Nucleic Acid
  misc_feature: oligonucleotide substrate
ggcauggaacauucccc

SEQ ID NO: 4200 - RNA, 17 nt, Artificial Sequence
  Description of Artificial Sequence:  Nucleic Acid
  misc_feature: oligonucleotide substrate
cauggaacauuccccau

SEQ ID NO: 4201 - RNA, 17 nt, Artificial Sequence
  Description of Artificial Sequence:  Nucleic Acid
  misc_feature: oligonucleotide substrate
cauuccccaucaacgca

SEQ ID NO: 4202 - RNA, 17 nt, Artificial Sequence
  Description of Artificial Sequence:  Nucleic Acid
  misc_feature: oligonucleotide substrate
ccccaucaacgcauaca

SEQ ID NO: 4203 - RNA, 17 nt, Artificial Sequence
  Description of Artificial Sequence:  Nucleic Acid
  misc_feature: oligonucleotide substrate
ccaucaacgcauacacc

SEQ ID NO: 4204 - RNA, 17 nt, Artificial Sequence
  Description of Artificial Sequence:  Nucleic Acid
  misc_feature: oligonucleotide substrate
aucaacgcauacaccac

SEQ ID NO: 4205 - RNA, 17 nt, Artificial Sequence
  Description of Artificial Sequence:  Nucleic Acid
  misc_feature: oligonucleotide substrate
caacgcauacaccacgg

SEQ ID NO: 4206 - RNA, 17 nt, Artificial Sequence
  Description of Artificial Sequence:  Nucleic Acid
  misc_feature: oligonucleotide substrate
acgcauacaccacgggc

SEQ ID NO: 4207 - RNA, 17 nt, Artificial Sequence
  Description of Artificial Sequence:  Nucleic Acid
  misc_feature: oligonucleotide substrate
cauacaccacgggcccc

SEQ ID NO: 4208 - RNA, 17 nt, Artificial Sequence
  Description of Artificial Sequence:  Nucleic Acid
  misc_feature: oligonucleotide substrate
caccacgggccccugca

SEQ ID NO: 4209 - RNA, 17 nt, Artificial Sequence
  Description of Artificial Sequence:  Nucleic Acid
  misc_feature: oligonucleotide substrate
gggccccugcacacccu

SEQ ID NO: 4210 - RNA, 17 nt, Artificial Sequence
  Description of Artificial Sequence:  Nucleic Acid
  misc_feature: oligonucleotide substrate
gccccugcacacccucc

SEQ ID NO: 4211 - RNA, 17 nt, Artificial Sequence
  Description of Artificial Sequence:  Nucleic Acid
  misc_feature: oligonucleotide substrate
cccugcacacccucccc

SEQ ID NO: 4212 - RNA, 17 nt, Artificial Sequence
  Description of Artificial Sequence:  Nucleic Acid
  misc_feature: oligonucleotide substrate
ccuccccggcgccaaac

SEQ ID NO: 4213 - RNA, 17 nt, Artificial Sequence
  Description of Artificial Sequence:  Nucleic Acid
  misc_feature: oligonucleotide substrate
uccccggcgccaaacua

SEQ ID NO: 4214 - RNA, 17 nt, Artificial Sequence
  Description of Artificial Sequence:  Nucleic Acid
  misc_feature: oligonucleotide substrate
ggcgccaaacuauucua

SEQ ID NO: 4215 - RNA, 17 nt, Artificial Sequence
  Description of Artificial Sequence:  Nucleic Acid
  misc_feature: oligonucleotide substrate
gccaaacuauucuaggg

SEQ ID NO: 4216 - RNA, 17 nt, Artificial Sequence
  Description of Artificial Sequence:  Nucleic Acid
  misc_feature: oligonucleotide substrate
auucuagggcgcuaugg

SEQ ID NO: 4217 - RNA, 17 nt, Artificial Sequence
  Description of Artificial Sequence:  Nucleic Acid
  misc_feature: oligonucleotide substrate
ucuagggcgcuauggcg

SEQ ID NO: 4218 - RNA, 17 nt, Artificial Sequence
  Description of Artificial Sequence:  Nucleic Acid
  misc_feature: oligonucleotide substrate
agggcgcuauggcgggu

SEQ ID NO: 4219 - RNA, 17 nt, Artificial Sequence
  Description of Artificial Sequence:  Nucleic Acid
  misc_feature: oligonucleotide substrate
gcgcuauggcggguggc

SEQ ID NO: 4220 - RNA, 17 nt, Artificial Sequence
  Description of Artificial Sequence:  Nucleic Acid
  misc_feature: oligonucleotide substrate
uauggcggguggccgcu

SEQ ID NO: 4221 - RNA, 17 nt, Artificial Sequence
  Description of Artificial Sequence:  Nucleic Acid
  misc_feature: oligonucleotide substrate
ggcggguggccgcugag

SEQ ID NO: 4222 - RNA, 17 nt, Artificial Sequence
  Description of Artificial Sequence:  Nucleic Acid
  misc_feature: oligonucleotide substrate
ggguggccgcugaggag

SEQ ID NO: 4223 - RNA, 17 nt, Artificial Sequence
  Description of Artificial Sequence:  Nucleic Acid
  misc_feature: oligonucleotide substrate
gcugaggaguacgugga

SEQ ID NO: 4224 - RNA, 17 nt, Artificial Sequence
  Description of Artificial Sequence:  Nucleic Acid
  misc_feature: oligonucleotide substrate
ugaggaguacguggagg

SEQ ID NO: 4225 - RNA, 17 nt, Artificial Sequence
  Description of Artificial Sequence:  Nucleic Acid
  misc_feature: oligonucleotide substrate
aggaguacguggagguu

SEQ ID NO: 4226 - RNA, 17 nt, Artificial Sequence
  Description of Artificial Sequence:  Nucleic Acid
  misc_feature: oligonucleotide substrate
acguggagguuacgcgg

SEQ ID NO: 4227 - RNA, 17 nt, Artificial Sequence
  Description of Artificial Sequence:  Nucleic Acid
  misc_feature: oligonucleotide substrate
uggagguuacgcgggug

SEQ ID NO: 4228 - RNA, 17 nt, Artificial Sequence
  Description of Artificial Sequence:  Nucleic Acid
  misc_feature: oligonucleotide substrate
gagguuacgcggguggg

SEQ ID NO: 4229 - RNA, 17 nt, Artificial Sequence
  Description of Artificial Sequence:  Nucleic Acid
  misc_feature: oligonucleotide substrate
uuacgcgggugggggau

SEQ ID NO: 4230 - RNA, 17 nt, Artificial Sequence
  Description of Artificial Sequence:  Nucleic Acid
  misc_feature: oligonucleotide substrate
ggugggggauuuccacu

SEQ ID NO: 4231 - RNA, 17 nt, Artificial Sequence
  Description of Artificial Sequence:  Nucleic Acid
  misc_feature: oligonucleotide substrate
ggauuuccacuacguga

SEQ ID NO: 4232 - RNA, 17 nt, Artificial Sequence
  Description of Artificial Sequence:  Nucleic Acid
  misc_feature: oligonucleotide substrate
uuuccacuacgugacgg

SEQ ID NO: 4233 - RNA, 17 nt, Artificial Sequence
  Description of Artificial Sequence:  Nucleic Acid
  misc_feature: oligonucleotide substrate
uccacuacgugacgggc

SEQ ID NO: 4234 - RNA, 17 nt, Artificial Sequence
  Description of Artificial Sequence:  Nucleic Acid
  misc_feature: oligonucleotide substrate
acuacgugacgggcaug

SEQ ID NO: 4235 - RNA, 17 nt, Artificial Sequence
  Description of Artificial Sequence:  Nucleic Acid
  misc_feature: oligonucleotide substrate
cgugacgggcaugacca

SEQ ID NO: 4236 - RNA, 17 nt, Artificial Sequence
  Description of Artificial Sequence:  Nucleic Acid
  misc_feature: oligonucleotide substrate
ugacgggcaugaccacu

SEQ ID NO: 4237 - RNA, 17 nt, Artificial Sequence
  Description of Artificial Sequence:  Nucleic Acid
  misc_feature: oligonucleotide substrate
cgggcaugaccacugac

SEQ ID NO: 4238 - RNA, 17 nt, Artificial Sequence
  Description of Artificial Sequence:  Nucleic Acid
  misc_feature: oligonucleotide substrate
gcaugaccacugacaac

SEQ ID NO: 4239 - RNA, 17 nt, Artificial Sequence
  Description of Artificial Sequence:  Nucleic Acid
  misc_feature: oligonucleotide substrate
gaccacugacaacguaa

SEQ ID NO: 4240 - RNA, 17 nt, Artificial Sequence
  Description of Artificial Sequence:  Nucleic Acid
  misc_feature: oligonucleotide substrate
cacugacaacguaaaau

SEQ ID NO: 4241 - RNA, 17 nt, Artificial Sequence
  Description of Artificial Sequence:  Nucleic Acid
  misc_feature: oligonucleotide substrate
cugacaacguaaaaugc

SEQ ID NO: 4242 - RNA, 17 nt, Artificial Sequence
  Description of Artificial Sequence:  Nucleic Acid
  misc_feature: oligonucleotide substrate
aacguaaaaugcccgug

SEQ ID NO: 4243 - RNA, 17 nt, Artificial Sequence
  Description of Artificial Sequence:  Nucleic Acid
  misc_feature: oligonucleotide substrate
cguaaaaugcccgugcc

SEQ ID NO: 4244 - RNA, 17 nt, Artificial Sequence
  Description of Artificial Sequence:  Nucleic Acid
  misc_feature: oligonucleotide substrate
aaaugcccgugccaggu

SEQ ID NO: 4245 - RNA, 17 nt, Artificial Sequence
  Description of Artificial Sequence:  Nucleic Acid
  misc_feature: oligonucleotide substrate
augcccgugccagguuc

SEQ ID NO: 4246 - RNA, 17 nt, Artificial Sequence
  Description of Artificial Sequence:  Nucleic Acid
  misc_feature: oligonucleotide substrate
cgugccagguuccgccc

SEQ ID NO: 4247 - RNA, 17 nt, Artificial Sequence
  Description of Artificial Sequence:  Nucleic Acid
  misc_feature: oligonucleotide substrate
cagguuccgccccccga

SEQ ID NO: 4248 - RNA, 17 nt, Artificial Sequence
  Description of Artificial Sequence:  Nucleic Acid
  misc_feature: oligonucleotide substrate
ccccccgaauucuucac

SEQ ID NO: 4249 - RNA, 17 nt, Artificial Sequence
  Description of Artificial Sequence:  Nucleic Acid
  misc_feature: oligonucleotide substrate
aauucuucacggaagug

SEQ ID NO: 4250 - RNA, 17 nt, Artificial Sequence
  Description of Artificial Sequence:  Nucleic Acid
  misc_feature: oligonucleotide substrate
ucacggaaguggauggg

SEQ ID NO: 4251 - RNA, 17 nt, Artificial Sequence
  Description of Artificial Sequence:  Nucleic Acid
  misc_feature: oligonucleotide substrate
ggaaguggaugggguac

SEQ ID NO: 4252 - RNA, 17 nt, Artificial Sequence
  Description of Artificial Sequence:  Nucleic Acid
  misc_feature: oligonucleotide substrate
uggaugggguacgccug

SEQ ID NO: 4253 - RNA, 17 nt, Artificial Sequence
  Description of Artificial Sequence:  Nucleic Acid
  misc_feature: oligonucleotide substrate
gaugggguacgccugca

SEQ ID NO: 4254 - RNA, 17 nt, Artificial Sequence
  Description of Artificial Sequence:  Nucleic Acid
  misc_feature: oligonucleotide substrate
ugggguacgccugcaca

SEQ ID NO: 4255 - RNA, 17 nt, Artificial Sequence
  Description of Artificial Sequence:  Nucleic Acid
  misc_feature: oligonucleotide substrate
guacgccugcacagaaa

SEQ ID NO: 4256 - RNA, 17 nt, Artificial Sequence
  Description of Artificial Sequence:  Nucleic Acid
  misc_feature: oligonucleotide substrate
acgccugcacagaaacg

SEQ ID NO: 4257 - RNA, 17 nt, Artificial Sequence
  Description of Artificial Sequence:  Nucleic Acid
  misc_feature: oligonucleotide substrate
gcacagaaacgcuccgg

SEQ ID NO: 4258 - RNA, 17 nt, Artificial Sequence
  Description of Artificial Sequence:  Nucleic Acid
  misc_feature: oligonucleotide substrate
acagaaacgcuccggcg

SEQ ID NO: 4259 - RNA, 17 nt, Artificial Sequence
  Description of Artificial Sequence:  Nucleic Acid
  misc_feature: oligonucleotide substrate
acgcuccggcgugugga

SEQ ID NO: 4260 - RNA, 17 nt, Artificial Sequence
  Description of Artificial Sequence:  Nucleic Acid
  misc_feature: oligonucleotide substrate
gcuccggcguguggacc

SEQ ID NO: 4261 - RNA, 17 nt, Artificial Sequence
  Description of Artificial Sequence:  Nucleic Acid
  misc_feature: oligonucleotide substrate
uccggcguguggaccuc

SEQ ID NO: 4262 - RNA, 17 nt, Artificial Sequence
  Description of Artificial Sequence:  Nucleic Acid
  misc_feature: oligonucleotide substrate
gcguguggaccucuccu

SEQ ID NO: 4263 - RNA, 17 nt, Artificial Sequence
  Description of Artificial Sequence:  Nucleic Acid
  misc_feature: oligonucleotide substrate
ccucuccuacgggagga

SEQ ID NO: 4264 - RNA, 17 nt, Artificial Sequence
  Description of Artificial Sequence:  Nucleic Acid
  misc_feature: oligonucleotide substrate
gggaggaggucacauuc

SEQ ID NO: 4265 - RNA, 17 nt, Artificial Sequence
  Description of Artificial Sequence:  Nucleic Acid
  misc_feature: oligonucleotide substrate
aggaggucacauuccag

SEQ ID NO: 4266 - RNA, 17 nt, Artificial Sequence
  Description of Artificial Sequence:  Nucleic Acid
  misc_feature: oligonucleotide substrate
gaggucacauuccaggu

SEQ ID NO: 4267 - RNA, 17 nt, Artificial Sequence
  Description of Artificial Sequence:  Nucleic Acid
  misc_feature: oligonucleotide substrate
cauuccaggucgggcuc

SEQ ID NO: 4268 - RNA, 17 nt, Artificial Sequence
  Description of Artificial Sequence:  Nucleic Acid
  misc_feature: oligonucleotide substrate
caggucgggcucaacca

SEQ ID NO: 4269 - RNA, 17 nt, Artificial Sequence
  Description of Artificial Sequence:  Nucleic Acid
  misc_feature: oligonucleotide substrate
cgggcucaaccaauacc

SEQ ID NO: 4270 - RNA, 17 nt, Artificial Sequence
  Description of Artificial Sequence:  Nucleic Acid
  misc_feature: oligonucleotide substrate
cucaaccaauaccuggu

SEQ ID NO: 4271 - RNA, 17 nt, Artificial Sequence
  Description of Artificial Sequence:  Nucleic Acid
  misc_feature: oligonucleotide substrate
caaccaauaccugguug

SEQ ID NO: 4272 - RNA, 17 nt, Artificial Sequence
  Description of Artificial Sequence:  Nucleic Acid
  misc_feature: oligonucleotide substrate
aauaccugguuggguca

SEQ ID NO: 4273 - RNA, 17 nt, Artificial Sequence
  Description of Artificial Sequence:  Nucleic Acid
  misc_feature: oligonucleotide substrate
cugguugggucacagcu

SEQ ID NO: 4274 - RNA, 17 nt, Artificial Sequence
  Description of Artificial Sequence:  Nucleic Acid
  misc_feature: oligonucleotide substrate
guugggucacagcuccc

SEQ ID NO: 4275 - RNA, 17 nt, Artificial Sequence
  Description of Artificial Sequence:  Nucleic Acid
  misc_feature: oligonucleotide substrate
gggucacagcucccaug

SEQ ID NO: 4276 - RNA, 17 nt, Artificial Sequence
  Description of Artificial Sequence:  Nucleic Acid
  misc_feature: oligonucleotide substrate
cagcucccaugcgagcc

SEQ ID NO: 4277 - RNA, 17 nt, Artificial Sequence
  Description of Artificial Sequence:  Nucleic Acid
  misc_feature: oligonucleotide substrate
gcucccaugcgagcccg

SEQ ID NO: 4278 - RNA, 17 nt, Artificial Sequence
  Description of Artificial Sequence:  Nucleic Acid
  misc_feature: oligonucleotide substrate
ccaugcgagcccgaacc

SEQ ID NO: 4279 - RNA, 17 nt, Artificial Sequence
  Description of Artificial Sequence:  Nucleic Acid
  misc_feature: oligonucleotide substrate
gagcccgaaccggaugu

SEQ ID NO: 4280 - RNA, 17 nt, Artificial Sequence
  Description of Artificial Sequence:  Nucleic Acid
  misc_feature: oligonucleotide substrate
cgaaccggauguagcag

SEQ ID NO: 4281 - RNA, 17 nt, Artificial Sequence
  Description of Artificial Sequence:  Nucleic Acid
  misc_feature: oligonucleotide substrate
aaccggauguagcagug

SEQ ID NO: 4282 - RNA, 17 nt, Artificial Sequence
  Description of Artificial Sequence:  Nucleic Acid
  misc_feature: oligonucleotide substrate
cggauguagcagugcuc

SEQ ID NO: 4283 - RNA, 17 nt, Artificial Sequence
  Description of Artificial Sequence:  Nucleic Acid
  misc_feature: oligonucleotide substrate
auguagcagugcucacg

SEQ ID NO: 4284 - RNA, 17 nt, Artificial Sequence
  Description of Artificial Sequence:  Nucleic Acid
  misc_feature: oligonucleotide substrate
guagcagugcucacguc

SEQ ID NO: 4285 - RNA, 17 nt, Artificial Sequence
  Description of Artificial Sequence:  Nucleic Acid
  misc_feature: oligonucleotide substrate
cagugcucacguccaug

SEQ ID NO: 4286 - RNA, 17 nt, Artificial Sequence
  Description of Artificial Sequence:  Nucleic Acid
  misc_feature: oligonucleotide substrate
gugcucacguccaugcu

SEQ ID NO: 4287 - RNA, 17 nt, Artificial Sequence
  Description of Artificial Sequence:  Nucleic Acid
  misc_feature: oligonucleotide substrate
ucacguccaugcucacc

SEQ ID NO: 4288 - RNA, 17 nt, Artificial Sequence
  Description of Artificial Sequence:  Nucleic Acid
  misc_feature: oligonucleotide substrate
acguccaugcucaccga

SEQ ID NO: 4289 - RNA, 17 nt, Artificial Sequence
  Description of Artificial Sequence:  Nucleic Acid
  misc_feature: oligonucleotide substrate
ccaugcucaccgacccc

SEQ ID NO: 4290 - RNA, 17 nt, Artificial Sequence
  Description of Artificial Sequence:  Nucleic Acid
  misc_feature: oligonucleotide substrate
gcucaccgaccccuccc

SEQ ID NO: 4291 - RNA, 17 nt, Artificial Sequence
  Description of Artificial Sequence:  Nucleic Acid
  misc_feature: oligonucleotide substrate
ccccucccacauuacag

SEQ ID NO: 4292 - RNA, 17 nt, Artificial Sequence
  Description of Artificial Sequence:  Nucleic Acid
  misc_feature: oligonucleotide substrate
ccucccacauuacagga

SEQ ID NO: 4293 - RNA, 17 nt, Artificial Sequence
  Description of Artificial Sequence:  Nucleic Acid
  misc_feature: oligonucleotide substrate
cccacauuacaggagag

SEQ ID NO: 4294 - RNA, 17 nt, Artificial Sequence
  Description of Artificial Sequence:  Nucleic Acid
  misc_feature: oligonucleotide substrate
caggagagacggcuaag

SEQ ID NO: 4295 - RNA, 17 nt, Artificial Sequence
  Description of Artificial Sequence:  Nucleic Acid
  misc_feature: oligonucleotide substrate
gagagacggcuaagcgu

SEQ ID NO: 4296 - RNA, 17 nt, Artificial Sequence
  Description of Artificial Sequence:  Nucleic Acid
  misc_feature: oligonucleotide substrate
acggcuaagcguaggcu

SEQ ID NO: 4297 - RNA, 17 nt, Artificial Sequence
  Description of Artificial Sequence:  Nucleic Acid
  misc_feature: oligonucleotide substrate
ggcuaagcguaggcugg

SEQ ID NO: 4298 - RNA, 17 nt, Artificial Sequence
  Description of Artificial Sequence:  Nucleic Acid
  misc_feature: oligonucleotide substrate
aagcguaggcuggccag

SEQ ID NO: 4299 - RNA, 17 nt, Artificial Sequence
  Description of Artificial Sequence:  Nucleic Acid
  misc_feature: oligonucleotide substrate
guaggcuggccaggggg

SEQ ID NO: 4300 - RNA, 17 nt, Artificial Sequence
  Description of Artificial Sequence:  Nucleic Acid
  misc_feature: oligonucleotide substrate
gccagggggucuccccc

SEQ ID NO: 4301 - RNA, 17 nt, Artificial Sequence
  Description of Artificial Sequence:  Nucleic Acid
  misc_feature: oligonucleotide substrate
ccuccuuggccagcucc

SEQ ID NO: 4302 - RNA, 17 nt, Artificial Sequence
  Description of Artificial Sequence:  Nucleic Acid
  misc_feature: oligonucleotide substrate
cuuggccagcuccucag

SEQ ID NO: 4303 - RNA, 17 nt, Artificial Sequence
  Description of Artificial Sequence:  Nucleic Acid
  misc_feature: oligonucleotide substrate
gcuccucagcuagccag

SEQ ID NO: 4304 - RNA, 17 nt, Artificial Sequence
  Description of Artificial Sequence:  Nucleic Acid
  misc_feature: oligonucleotide substrate
cucagcuagccagcugu

SEQ ID NO: 4305 - RNA, 17 nt, Artificial Sequence
  Description of Artificial Sequence:  Nucleic Acid
  misc_feature: oligonucleotide substrate
gcuagccagcugucugc

SEQ ID NO: 4306 - RNA, 17 nt, Artificial Sequence
  Description of Artificial Sequence:  Nucleic Acid
  misc_feature: oligonucleotide substrate
agccagcugucugcgcc

SEQ ID NO: 4307 - RNA, 17 nt, Artificial Sequence
  Description of Artificial Sequence:  Nucleic Acid
  misc_feature: oligonucleotide substrate
agcugucugcgccuucu

SEQ ID NO: 4308 - RNA, 17 nt, Artificial Sequence
  Description of Artificial Sequence:  Nucleic Acid
  misc_feature: oligonucleotide substrate
cugucugcgccuucuuc

SEQ ID NO: 4309 - RNA, 17 nt, Artificial Sequence
  Description of Artificial Sequence:  Nucleic Acid
  misc_feature: oligonucleotide substrate
cuucgaaggcgacauac

SEQ ID NO: 4310 - RNA, 17 nt, Artificial Sequence
  Description of Artificial Sequence:  Nucleic Acid
  misc_feature: oligonucleotide substrate
cgaaggcgacauacauu

SEQ ID NO: 4311 - RNA, 17 nt, Artificial Sequence
  Description of Artificial Sequence:  Nucleic Acid
  misc_feature: oligonucleotide substrate
aaggcgacauacauuac

SEQ ID NO: 4312 - RNA, 17 nt, Artificial Sequence
  Description of Artificial Sequence:  Nucleic Acid
  misc_feature: oligonucleotide substrate
ggcgacauacauuaccc

SEQ ID NO: 4313 - RNA, 17 nt, Artificial Sequence
  Description of Artificial Sequence:  Nucleic Acid
  misc_feature: oligonucleotide substrate
cgacauacauuacccaa

SEQ ID NO: 4314 - RNA, 17 nt, Artificial Sequence
  Description of Artificial Sequence:  Nucleic Acid
  misc_feature: oligonucleotide substrate
cauacauuacccaauau

SEQ ID NO: 4315 - RNA, 17 nt, Artificial Sequence
  Description of Artificial Sequence:  Nucleic Acid
  misc_feature: oligonucleotide substrate
auuacccaauaugacuc

SEQ ID NO: 4316 - RNA, 17 nt, Artificial Sequence
  Description of Artificial Sequence:  Nucleic Acid
  misc_feature: oligonucleotide substrate
uacccaauaugacuccc

SEQ ID NO: 4317 - RNA, 17 nt, Artificial Sequence
  Description of Artificial Sequence:  Nucleic Acid
  misc_feature: oligonucleotide substrate
ccaauaugacuccccag

SEQ ID NO: 4318 - RNA, 17 nt, Artificial Sequence
  Description of Artificial Sequence:  Nucleic Acid
  misc_feature: oligonucleotide substrate
cuccccagacuuugacc

SEQ ID NO: 4319 - RNA, 17 nt, Artificial Sequence
  Description of Artificial Sequence:  Nucleic Acid
  misc_feature: oligonucleotide substrate
agacuuugaccucaucg

SEQ ID NO: 4320 - RNA, 17 nt, Artificial Sequence
  Description of Artificial Sequence:  Nucleic Acid
  misc_feature: oligonucleotide substrate
uugaccucaucgaggcc

SEQ ID NO: 4321 - RNA, 17 nt, Artificial Sequence
  Description of Artificial Sequence:  Nucleic Acid
  misc_feature: oligonucleotide substrate
ucaucgaggccaaccuc

SEQ ID NO: 4322 - RNA, 17 nt, Artificial Sequence
  Description of Artificial Sequence:  Nucleic Acid
  misc_feature: oligonucleotide substrate
cgaggccaaccuccugu

SEQ ID NO: 4323 - RNA, 17 nt, Artificial Sequence
  Description of Artificial Sequence:  Nucleic Acid
  misc_feature: oligonucleotide substrate
aaccuccuguggcggca

SEQ ID NO: 4324 - RNA, 17 nt, Artificial Sequence
  Description of Artificial Sequence:  Nucleic Acid
  misc_feature: oligonucleotide substrate
cuccuguggcggcagga

SEQ ID NO: 4325 - RNA, 17 nt, Artificial Sequence
  Description of Artificial Sequence:  Nucleic Acid
  misc_feature: oligonucleotide substrate
cuguggcggcaggagau

SEQ ID NO: 4326 - RNA, 17 nt, Artificial Sequence
  Description of Artificial Sequence:  Nucleic Acid
  misc_feature: oligonucleotide substrate
ggcaggagaugggcggu

SEQ ID NO: 4327 - RNA, 17 nt, Artificial Sequence
  Description of Artificial Sequence:  Nucleic Acid
  misc_feature: oligonucleotide substrate
ggagaugggcgguaaca

SEQ ID NO: 4328 - RNA, 17 nt, Artificial Sequence
  Description of Artificial Sequence:  Nucleic Acid
  misc_feature: oligonucleotide substrate
gaugggcgguaacauca

SEQ ID NO: 4329 - RNA, 17 nt, Artificial Sequence
  Description of Artificial Sequence:  Nucleic Acid
  misc_feature: oligonucleotide substrate
gggcgguaacaucacuc

SEQ ID NO: 4330 - RNA, 17 nt, Artificial Sequence
  Description of Artificial Sequence:  Nucleic Acid
  misc_feature: oligonucleotide substrate
gcgguaacaucacucgc

SEQ ID NO: 4331 - RNA, 17 nt, Artificial Sequence
  Description of Artificial Sequence:  Nucleic Acid
  misc_feature: oligonucleotide substrate
guaacaucacucgcgug

SEQ ID NO: 4332 - RNA, 17 nt, Artificial Sequence
  Description of Artificial Sequence:  Nucleic Acid
  misc_feature: oligonucleotide substrate
caucacucgcguggagu

SEQ ID NO: 4333 - RNA, 17 nt, Artificial Sequence
  Description of Artificial Sequence:  Nucleic Acid
  misc_feature: oligonucleotide substrate
ucacucgcguggaguca

SEQ ID NO: 4334 - RNA, 17 nt, Artificial Sequence
  Description of Artificial Sequence:  Nucleic Acid
  misc_feature: oligonucleotide substrate
cgcguggagucagagaa

SEQ ID NO: 4335 - RNA, 17 nt, Artificial Sequence
  Description of Artificial Sequence:  Nucleic Acid
  misc_feature: oligonucleotide substrate
gucagagaauaagguag

SEQ ID NO: 4336 - RNA, 17 nt, Artificial Sequence
  Description of Artificial Sequence:  Nucleic Acid
  misc_feature: oligonucleotide substrate
agaauaagguaguuacc

SEQ ID NO: 4337 - RNA, 17 nt, Artificial Sequence
  Description of Artificial Sequence:  Nucleic Acid
  misc_feature: oligonucleotide substrate
auaagguaguuacccug

SEQ ID NO: 4338 - RNA, 17 nt, Artificial Sequence
  Description of Artificial Sequence:  Nucleic Acid
  misc_feature: oligonucleotide substrate
agguaguuacccuggac

SEQ ID NO: 4339 - RNA, 17 nt, Artificial Sequence
  Description of Artificial Sequence:  Nucleic Acid
  misc_feature: oligonucleotide substrate
uacccuggacucuuuug

SEQ ID NO: 4340 - RNA, 17 nt, Artificial Sequence
  Description of Artificial Sequence:  Nucleic Acid
  misc_feature: oligonucleotide substrate
cucuuuugacccgcuuc

SEQ ID NO: 4341 - RNA, 17 nt, Artificial Sequence
  Description of Artificial Sequence:  Nucleic Acid
  misc_feature: oligonucleotide substrate
uuugacccgcuucgagc

SEQ ID NO: 4342 - RNA, 17 nt, Artificial Sequence
  Description of Artificial Sequence:  Nucleic Acid
  misc_feature: oligonucleotide substrate
cgcuucgagcggaggag

SEQ ID NO: 4343 - RNA, 17 nt, Artificial Sequence
  Description of Artificial Sequence:  Nucleic Acid
  misc_feature: oligonucleotide substrate
ggaggaggaugagagag

SEQ ID NO: 4344 - RNA, 17 nt, Artificial Sequence
  Description of Artificial Sequence:  Nucleic Acid
  misc_feature: oligonucleotide substrate
agagagagguguccauu

SEQ ID NO: 4345 - RNA, 17 nt, Artificial Sequence
  Description of Artificial Sequence:  Nucleic Acid
  misc_feature: oligonucleotide substrate
agagagguguccauucc

SEQ ID NO: 4346 - RNA, 17 nt, Artificial Sequence
  Description of Artificial Sequence:  Nucleic Acid
  misc_feature: oligonucleotide substrate
agguguccauuccggcg

SEQ ID NO: 4347 - RNA, 17 nt, Artificial Sequence
  Description of Artificial Sequence:  Nucleic Acid
  misc_feature: oligonucleotide substrate
ccauuccggcggagauc

SEQ ID NO: 4348 - RNA, 17 nt, Artificial Sequence
  Description of Artificial Sequence:  Nucleic Acid
  misc_feature: oligonucleotide substrate
cggcggagauccugcgg

SEQ ID NO: 4349 - RNA, 17 nt, Artificial Sequence
  Description of Artificial Sequence:  Nucleic Acid
  misc_feature: oligonucleotide substrate
gagauccugcggaaauc

SEQ ID NO: 4350 - RNA, 17 nt, Artificial Sequence
  Description of Artificial Sequence:  Nucleic Acid
  misc_feature: oligonucleotide substrate
cugcggaaauccaagaa

SEQ ID NO: 4351 - RNA, 17 nt, Artificial Sequence
  Description of Artificial Sequence:  Nucleic Acid
  misc_feature: oligonucleotide substrate
uccaagaaguuuccuuc

SEQ ID NO: 4352 - RNA, 17 nt, Artificial Sequence
  Description of Artificial Sequence:  Nucleic Acid
  misc_feature: oligonucleotide substrate
uuccuucagcguuaccc

SEQ ID NO: 4353 - RNA, 17 nt, Artificial Sequence
  Description of Artificial Sequence:  Nucleic Acid
  misc_feature: oligonucleotide substrate
ccuucagcguuacccau

SEQ ID NO: 4354 - RNA, 17 nt, Artificial Sequence
  Description of Artificial Sequence:  Nucleic Acid
  misc_feature: oligonucleotide substrate
ucagcguuacccauaug

SEQ ID NO: 4355 - RNA, 17 nt, Artificial Sequence
  Description of Artificial Sequence:  Nucleic Acid
  misc_feature: oligonucleotide substrate
cguuacccauaugggca

SEQ ID NO: 4356 - RNA, 17 nt, Artificial Sequence
  Description of Artificial Sequence:  Nucleic Acid
  misc_feature: oligonucleotide substrate
uuacccauaugggcacg

SEQ ID NO: 4357 - RNA, 17 nt, Artificial Sequence
  Description of Artificial Sequence:  Nucleic Acid
  misc_feature: oligonucleotide substrate
ccauaugggcacgcccg

SEQ ID NO: 4358 - RNA, 17 nt, Artificial Sequence
  Description of Artificial Sequence:  Nucleic Acid
  misc_feature: oligonucleotide substrate
auaugggcacgcccgga

SEQ ID NO: 4359 - RNA, 17 nt, Artificial Sequence
  Description of Artificial Sequence:  Nucleic Acid
  misc_feature: oligonucleotide substrate
augggcacgcccggauu

SEQ ID NO: 4360 - RNA, 17 nt, Artificial Sequence
  Description of Artificial Sequence:  Nucleic Acid
  misc_feature: oligonucleotide substrate
acgcccggauuacaacc

SEQ ID NO: 4361 - RNA, 17 nt, Artificial Sequence
  Description of Artificial Sequence:  Nucleic Acid
  misc_feature: oligonucleotide substrate
cccggauuacaacccuc

SEQ ID NO: 4362 - RNA, 17 nt, Artificial Sequence
  Description of Artificial Sequence:  Nucleic Acid
  misc_feature: oligonucleotide substrate
ggauuacaacccuccac

SEQ ID NO: 4363 - RNA, 17 nt, Artificial Sequence
  Description of Artificial Sequence:  Nucleic Acid
  misc_feature: oligonucleotide substrate
aacccuccacuacuaga

SEQ ID NO: 4364 - RNA, 17 nt, Artificial Sequence
  Description of Artificial Sequence:  Nucleic Acid
  misc_feature: oligonucleotide substrate
ccuccacuacuagagcc

SEQ ID NO: 4365 - RNA, 17 nt, Artificial Sequence
  Description of Artificial Sequence:  Nucleic Acid
  misc_feature: oligonucleotide substrate
cuacuagagcccuggaa

SEQ ID NO: 4366 - RNA, 17 nt, Artificial Sequence
  Description of Artificial Sequence:  Nucleic Acid
  misc_feature: oligonucleotide substrate
cuggaaagacccagacu

SEQ ID NO: 4367 - RNA, 17 nt, Artificial Sequence
  Description of Artificial Sequence:  Nucleic Acid
  misc_feature: oligonucleotide substrate
agacccagacuacgucc

SEQ ID NO: 4368 - RNA, 17 nt, Artificial Sequence
  Description of Artificial Sequence:  Nucleic Acid
  misc_feature: oligonucleotide substrate
cccagacuacgucccuc

SEQ ID NO: 4369 - RNA, 17 nt, Artificial Sequence
  Description of Artificial Sequence:  Nucleic Acid
  misc_feature: oligonucleotide substrate
cagacuacgucccuccg

SEQ ID NO: 4370 - RNA, 17 nt, Artificial Sequence
  Description of Artificial Sequence:  Nucleic Acid
  misc_feature: oligonucleotide substrate
ucccuccggugguacac

SEQ ID NO: 4371 - RNA, 17 nt, Artificial Sequence
  Description of Artificial Sequence:  Nucleic Acid
  misc_feature: oligonucleotide substrate
cuccggugguacacggg

SEQ ID NO: 4372 - RNA, 17 nt, Artificial Sequence
  Description of Artificial Sequence:  Nucleic Acid
  misc_feature: oligonucleotide substrate
ccggugguacacgggug

SEQ ID NO: 4373 - RNA, 17 nt, Artificial Sequence
  Description of Artificial Sequence:  Nucleic Acid
  misc_feature: oligonucleotide substrate
ggugguacacgggugcc

SEQ ID NO: 4374 - RNA, 17 nt, Artificial Sequence
  Description of Artificial Sequence:  Nucleic Acid
  misc_feature: oligonucleotide substrate
guacacgggugcccauu

SEQ ID NO: 4375 - RNA, 17 nt, Artificial Sequence
  Description of Artificial Sequence:  Nucleic Acid
  misc_feature: oligonucleotide substrate
acacgggugcccauugc

SEQ ID NO: 4376 - RNA, 17 nt, Artificial Sequence
  Description of Artificial Sequence:  Nucleic Acid
  misc_feature: oligonucleotide substrate
gggugcccauugccacc

SEQ ID NO: 4377 - RNA, 17 nt, Artificial Sequence
  Description of Artificial Sequence:  Nucleic Acid
  misc_feature: oligonucleotide substrate
ugcccauugccaccugc

SEQ ID NO: 4378 - RNA, 17 nt, Artificial Sequence
  Description of Artificial Sequence:  Nucleic Acid
  misc_feature: oligonucleotide substrate
ccauugccaccugccaa

SEQ ID NO: 4379 - RNA, 17 nt, Artificial Sequence
  Description of Artificial Sequence:  Nucleic Acid
  misc_feature: oligonucleotide substrate
ugccaccugccaaggcc

SEQ ID NO: 4380 - RNA, 17 nt, Artificial Sequence
  Description of Artificial Sequence:  Nucleic Acid
  misc_feature: oligonucleotide substrate
cugccaaggccccucca

SEQ ID NO: 4381 - RNA, 17 nt, Artificial Sequence
  Description of Artificial Sequence:  Nucleic Acid
  misc_feature: oligonucleotide substrate
ccccuccaauaccaccu

SEQ ID NO: 4382 - RNA, 17 nt, Artificial Sequence
  Description of Artificial Sequence:  Nucleic Acid
  misc_feature: oligonucleotide substrate
ccuccaauaccaccucc

SEQ ID NO: 4383 - RNA, 17 nt, Artificial Sequence
  Description of Artificial Sequence:  Nucleic Acid
  misc_feature: oligonucleotide substrate
ccaauaccaccuccacg

SEQ ID NO: 4384 - RNA, 17 nt, Artificial Sequence
  Description of Artificial Sequence:  Nucleic Acid
  misc_feature: oligonucleotide substrate
ccaccuccacggaggaa

SEQ ID NO: 4385 - RNA, 17 nt, Artificial Sequence
  Description of Artificial Sequence:  Nucleic Acid
  misc_feature: oligonucleotide substrate
ggaagaggacgguuguu

SEQ ID NO: 4386 - RNA, 17 nt, Artificial Sequence
  Description of Artificial Sequence:  Nucleic Acid
  misc_feature: oligonucleotide substrate
agaggacgguuguucug

SEQ ID NO: 4387 - RNA, 17 nt, Artificial Sequence
  Description of Artificial Sequence:  Nucleic Acid
  misc_feature: oligonucleotide substrate
ggacgguuguucugaca

SEQ ID NO: 4388 - RNA, 17 nt, Artificial Sequence
  Description of Artificial Sequence:  Nucleic Acid
  misc_feature: oligonucleotide substrate
uuguucugacagagucc

SEQ ID NO: 4389 - RNA, 17 nt, Artificial Sequence
  Description of Artificial Sequence:  Nucleic Acid
  misc_feature: oligonucleotide substrate
cugacagaguccaccgu

SEQ ID NO: 4390 - RNA, 17 nt, Artificial Sequence
  Description of Artificial Sequence:  Nucleic Acid
  misc_feature: oligonucleotide substrate
cagaguccaccgugucu

SEQ ID NO: 4391 - RNA, 17 nt, Artificial Sequence
  Description of Artificial Sequence:  Nucleic Acid
  misc_feature: oligonucleotide substrate
aguccaccgugucuucu

SEQ ID NO: 4392 - RNA, 17 nt, Artificial Sequence
  Description of Artificial Sequence:  Nucleic Acid
  misc_feature: oligonucleotide substrate
uccaccgugucuucugc

SEQ ID NO: 4393 - RNA, 17 nt, Artificial Sequence
  Description of Artificial Sequence:  Nucleic Acid
  misc_feature: oligonucleotide substrate
ugucuucugccuuggcg

SEQ ID NO: 4394 - RNA, 17 nt, Artificial Sequence
  Description of Artificial Sequence:  Nucleic Acid
  misc_feature: oligonucleotide substrate
cugccuuggcggagcuc

SEQ ID NO: 4395 - RNA, 17 nt, Artificial Sequence
  Description of Artificial Sequence:  Nucleic Acid
  misc_feature: oligonucleotide substrate
uuggcggagcucgccac

SEQ ID NO: 4396 - RNA, 17 nt, Artificial Sequence
  Description of Artificial Sequence:  Nucleic Acid
  misc_feature: oligonucleotide substrate
cggagcucgccacaaag

SEQ ID NO: 4397 - RNA, 17 nt, Artificial Sequence
  Description of Artificial Sequence:  Nucleic Acid
  misc_feature: oligonucleotide substrate
agcucgccacaaagacc

SEQ ID NO: 4398 - RNA, 17 nt, Artificial Sequence
  Description of Artificial Sequence:  Nucleic Acid
  misc_feature: oligonucleotide substrate
ccacaaagaccuucggc

SEQ ID NO: 4399 - RNA, 17 nt, Artificial Sequence
  Description of Artificial Sequence:  Nucleic Acid
  misc_feature: oligonucleotide substrate
gaccuucggcagcucug

SEQ ID NO: 4400 - RNA, 17 nt, Artificial Sequence
  Description of Artificial Sequence:  Nucleic Acid
  misc_feature: oligonucleotide substrate
cuucggcagcucugaau

SEQ ID NO: 4401 - RNA, 17 nt, Artificial Sequence
  Description of Artificial Sequence:  Nucleic Acid
  misc_feature: oligonucleotide substrate
agcucugaaucaucggc

SEQ ID NO: 4402 - RNA, 17 nt, Artificial Sequence
  Description of Artificial Sequence:  Nucleic Acid
  misc_feature: oligonucleotide substrate
ucugaaucaucggccgc

SEQ ID NO: 4403 - RNA, 17 nt, Artificial Sequence
  Description of Artificial Sequence:  Nucleic Acid
  misc_feature: oligonucleotide substrate
aaucaucggccgcugau

SEQ ID NO: 4404 - RNA, 17 nt, Artificial Sequence
  Description of Artificial Sequence:  Nucleic Acid
  misc_feature: oligonucleotide substrate
caucggccgcugauaga

SEQ ID NO: 4405 - RNA, 17 nt, Artificial Sequence
  Description of Artificial Sequence:  Nucleic Acid
  misc_feature: oligonucleotide substrate
ggccgcugauagaggua

SEQ ID NO: 4406 - RNA, 17 nt, Artificial Sequence
  Description of Artificial Sequence:  Nucleic Acid
  misc_feature: oligonucleotide substrate
ugauagagguacggcaa

SEQ ID NO: 4407 - RNA, 17 nt, Artificial Sequence
  Description of Artificial Sequence:  Nucleic Acid
  misc_feature: oligonucleotide substrate
auagagguacggcaacc

SEQ ID NO: 4408 - RNA, 17 nt, Artificial Sequence
  Description of Artificial Sequence:  Nucleic Acid
  misc_feature: oligonucleotide substrate
gagguacggcaaccgcc

SEQ ID NO: 4409 - RNA, 17 nt, Artificial Sequence
  Description of Artificial Sequence:  Nucleic Acid
  misc_feature: oligonucleotide substrate
guacggcaaccgccccc

SEQ ID NO: 4410 - RNA, 17 nt, Artificial Sequence
  Description of Artificial Sequence:  Nucleic Acid
  misc_feature: oligonucleotide substrate
cggcaaccgcccccccc

SEQ ID NO: 4411 - RNA, 17 nt, Artificial Sequence
  Description of Artificial Sequence:  Nucleic Acid
  misc_feature: oligonucleotide substrate
cccccccgaccagaccu

SEQ ID NO: 4412 - RNA, 17 nt, Artificial Sequence
  Description of Artificial Sequence:  Nucleic Acid
  misc_feature: oligonucleotide substrate
ccgaccagaccuccaau

SEQ ID NO: 4413 - RNA, 17 nt, Artificial Sequence
  Description of Artificial Sequence:  Nucleic Acid
  misc_feature: oligonucleotide substrate
gaccuccaaugacggug

SEQ ID NO: 4414 - RNA, 17 nt, Artificial Sequence
  Description of Artificial Sequence:  Nucleic Acid
  misc_feature: oligonucleotide substrate
cuccaaugacggugacg

SEQ ID NO: 4415 - RNA, 17 nt, Artificial Sequence
  Description of Artificial Sequence:  Nucleic Acid
  misc_feature: oligonucleotide substrate
caaugacggugacgcag

SEQ ID NO: 4416 - RNA, 17 nt, Artificial Sequence
  Description of Artificial Sequence:  Nucleic Acid
  misc_feature: oligonucleotide substrate
ugacggugacgcaggau

SEQ ID NO: 4417 - RNA, 17 nt, Artificial Sequence
  Description of Artificial Sequence:  Nucleic Acid
  misc_feature: oligonucleotide substrate
acggugacgcaggaucc

SEQ ID NO: 4418 - RNA, 17 nt, Artificial Sequence
  Description of Artificial Sequence:  Nucleic Acid
  misc_feature: oligonucleotide substrate
gacgcaggauccgacgu

SEQ ID NO: 4419 - RNA, 17 nt, Artificial Sequence
  Description of Artificial Sequence:  Nucleic Acid
  misc_feature: oligonucleotide substrate
aggauccgacguugagu

SEQ ID NO: 4420 - RNA, 17 nt, Artificial Sequence
  Description of Artificial Sequence:  Nucleic Acid
  misc_feature: oligonucleotide substrate
gauccgacguugagucg

SEQ ID NO: 4421 - RNA, 17 nt, Artificial Sequence
  Description of Artificial Sequence:  Nucleic Acid
  misc_feature: oligonucleotide substrate
gacguugagucguacuc

SEQ ID NO: 4422 - RNA, 17 nt, Artificial Sequence
  Description of Artificial Sequence:  Nucleic Acid
  misc_feature: oligonucleotide substrate
guugagucguacuccuc

SEQ ID NO: 4423 - RNA, 17 nt, Artificial Sequence
  Description of Artificial Sequence:  Nucleic Acid
  misc_feature: oligonucleotide substrate
ugagucguacuccucua

SEQ ID NO: 4424 - RNA, 17 nt, Artificial Sequence
  Description of Artificial Sequence:  Nucleic Acid
  misc_feature: oligonucleotide substrate
acuccucuaugcccccc

SEQ ID NO: 4425 - RNA, 17 nt, Artificial Sequence
  Description of Artificial Sequence:  Nucleic Acid
  misc_feature: oligonucleotide substrate
uccucuaugcccccccu

SEQ ID NO: 4426 - RNA, 17 nt, Artificial Sequence
  Description of Artificial Sequence:  Nucleic Acid
  misc_feature: oligonucleotide substrate
gagggggagccggggga

SEQ ID NO: 4427 - RNA, 17 nt, Artificial Sequence
  Description of Artificial Sequence:  Nucleic Acid
  misc_feature: oligonucleotide substrate
gccgggggaucccgauc

SEQ ID NO: 4428 - RNA, 17 nt, Artificial Sequence
  Description of Artificial Sequence:  Nucleic Acid
  misc_feature: oligonucleotide substrate
ggaucccgaucucagcg

SEQ ID NO: 4429 - RNA, 17 nt, Artificial Sequence
  Description of Artificial Sequence:  Nucleic Acid
  misc_feature: oligonucleotide substrate
cgaucucagcgacgggu

SEQ ID NO: 4430 - RNA, 17 nt, Artificial Sequence
  Description of Artificial Sequence:  Nucleic Acid
  misc_feature: oligonucleotide substrate
ucucagcgacgggucuu

SEQ ID NO: 4431 - RNA, 17 nt, Artificial Sequence
  Description of Artificial Sequence:  Nucleic Acid
  misc_feature: oligonucleotide substrate
agcgacgggucuugguc

SEQ ID NO: 4432 - RNA, 17 nt, Artificial Sequence
  Description of Artificial Sequence:  Nucleic Acid
  misc_feature: oligonucleotide substrate
gggucuuggucuaccgu

SEQ ID NO: 4433 - RNA, 17 nt, Artificial Sequence
  Description of Artificial Sequence:  Nucleic Acid
  misc_feature: oligonucleotide substrate
cuuggucuaccgugagc

SEQ ID NO: 4434 - RNA, 17 nt, Artificial Sequence
  Description of Artificial Sequence:  Nucleic Acid
  misc_feature: oligonucleotide substrate
ggucuaccgugagcgaa

SEQ ID NO: 4435 - RNA, 17 nt, Artificial Sequence
  Description of Artificial Sequence:  Nucleic Acid
  misc_feature: oligonucleotide substrate
uaccgugagcgaagagg

SEQ ID NO: 4436 - RNA, 17 nt, Artificial Sequence
  Description of Artificial Sequence:  Nucleic Acid
  misc_feature: oligonucleotide substrate
gcgaagaggcuggcgag

SEQ ID NO: 4437 - RNA, 17 nt, Artificial Sequence
  Description of Artificial Sequence:  Nucleic Acid
  misc_feature: oligonucleotide substrate
agaggcuggcgaggaug

SEQ ID NO: 4438 - RNA, 17 nt, Artificial Sequence
  Description of Artificial Sequence:  Nucleic Acid
  misc_feature: oligonucleotide substrate
uggcgaggaugucgucu

SEQ ID NO: 4439 - RNA, 17 nt, Artificial Sequence
  Description of Artificial Sequence:  Nucleic Acid
  misc_feature: oligonucleotide substrate
gcgaggaugucgucugc

SEQ ID NO: 4440 - RNA, 17 nt, Artificial Sequence
  Description of Artificial Sequence:  Nucleic Acid
  misc_feature: oligonucleotide substrate
aggaugucgucugcugc

SEQ ID NO: 4441 - RNA, 17 nt, Artificial Sequence
  Description of Artificial Sequence:  Nucleic Acid
  misc_feature: oligonucleotide substrate
ugucgucugcugcucga

SEQ ID NO: 4442 - RNA, 17 nt, Artificial Sequence
  Description of Artificial Sequence:  Nucleic Acid
  misc_feature: oligonucleotide substrate
cgucugcugcucgaugu

SEQ ID NO: 4443 - RNA, 17 nt, Artificial Sequence
  Description of Artificial Sequence:  Nucleic Acid
  misc_feature: oligonucleotide substrate
gcugcucgauguccuac

SEQ ID NO: 4444 - RNA, 17 nt, Artificial Sequence
  Description of Artificial Sequence:  Nucleic Acid
  misc_feature: oligonucleotide substrate
ugcucgauguccuacac

SEQ ID NO: 4445 - RNA, 17 nt, Artificial Sequence
  Description of Artificial Sequence:  Nucleic Acid
  misc_feature: oligonucleotide substrate
gauguccuacacaugga

SEQ ID NO: 4446 - RNA, 17 nt, Artificial Sequence
  Description of Artificial Sequence:  Nucleic Acid
  misc_feature: oligonucleotide substrate
uguccuacacauggacg

SEQ ID NO: 4447 - RNA, 17 nt, Artificial Sequence
  Description of Artificial Sequence:  Nucleic Acid
  misc_feature: oligonucleotide substrate
uccuacacauggacggg

SEQ ID NO: 4448 - RNA, 17 nt, Artificial Sequence
  Description of Artificial Sequence:  Nucleic Acid
  misc_feature: oligonucleotide substrate
acacauggacgggcgcc

SEQ ID NO: 4449 - RNA, 17 nt, Artificial Sequence
  Description of Artificial Sequence:  Nucleic Acid
  misc_feature: oligonucleotide substrate
auggacgggcgcccuga

SEQ ID NO: 4450 - RNA, 17 nt, Artificial Sequence
  Description of Artificial Sequence:  Nucleic Acid
  misc_feature: oligonucleotide substrate
ggacgggcgcccugauc

SEQ ID NO: 4451 - RNA, 17 nt, Artificial Sequence
  Description of Artificial Sequence:  Nucleic Acid
  misc_feature: oligonucleotide substrate
gcgcccugaucacgcca

SEQ ID NO: 4452 - RNA, 17 nt, Artificial Sequence
  Description of Artificial Sequence:  Nucleic Acid
  misc_feature: oligonucleotide substrate
cccugaucacgccaugc

SEQ ID NO: 4453 - RNA, 17 nt, Artificial Sequence
  Description of Artificial Sequence:  Nucleic Acid
  misc_feature: oligonucleotide substrate
cugaucacgccaugcgc

SEQ ID NO: 4454 - RNA, 17 nt, Artificial Sequence
  Description of Artificial Sequence:  Nucleic Acid
  misc_feature: oligonucleotide substrate
aucacgccaugcgcugc

SEQ ID NO: 4455 - RNA, 17 nt, Artificial Sequence
  Description of Artificial Sequence:  Nucleic Acid
  misc_feature: oligonucleotide substrate
cacgccaugcgcugcgg

SEQ ID NO: 4456 - RNA, 17 nt, Artificial Sequence
  Description of Artificial Sequence:  Nucleic Acid
  misc_feature: oligonucleotide substrate
cgccaugcgcugcggag

SEQ ID NO: 4457 - RNA, 17 nt, Artificial Sequence
  Description of Artificial Sequence:  Nucleic Acid
  misc_feature: oligonucleotide substrate
caugcgcugcggaggaa

SEQ ID NO: 4458 - RNA, 17 nt, Artificial Sequence
  Description of Artificial Sequence:  Nucleic Acid
  misc_feature: oligonucleotide substrate
ggaggaaagcaaguugc

SEQ ID NO: 4459 - RNA, 17 nt, Artificial Sequence
  Description of Artificial Sequence:  Nucleic Acid
  misc_feature: oligonucleotide substrate
gaaagcaaguugcccau

SEQ ID NO: 4460 - RNA, 17 nt, Artificial Sequence
  Description of Artificial Sequence:  Nucleic Acid
  misc_feature: oligonucleotide substrate
agcaaguugcccaucaa

SEQ ID NO: 4461 - RNA, 17 nt, Artificial Sequence
  Description of Artificial Sequence:  Nucleic Acid
  misc_feature: oligonucleotide substrate
aguugcccaucaacgcg

SEQ ID NO: 4462 - RNA, 17 nt, Artificial Sequence
  Description of Artificial Sequence:  Nucleic Acid
  misc_feature: oligonucleotide substrate
gcccaucaacgcguuga

SEQ ID NO: 4463 - RNA, 17 nt, Artificial Sequence
  Description of Artificial Sequence:  Nucleic Acid
  misc_feature: oligonucleotide substrate
ccaucaacgcguugagc

SEQ ID NO: 4464 - RNA, 17 nt, Artificial Sequence
  Description of Artificial Sequence:  Nucleic Acid
  misc_feature: oligonucleotide substrate
aucaacgcguugagcaa

SEQ ID NO: 4465 - RNA, 17 nt, Artificial Sequence
  Description of Artificial Sequence:  Nucleic Acid
  misc_feature: oligonucleotide substrate
cgcguugagcaacucuu

SEQ ID NO: 4466 - RNA, 17 nt, Artificial Sequence
  Description of Artificial Sequence:  Nucleic Acid
  misc_feature: oligonucleotide substrate
guugagcaacucuuugc

SEQ ID NO: 4467 - RNA, 17 nt, Artificial Sequence
  Description of Artificial Sequence:  Nucleic Acid
  misc_feature: oligonucleotide substrate
aacucuuugcugcguca

SEQ ID NO: 4468 - RNA, 17 nt, Artificial Sequence
  Description of Artificial Sequence:  Nucleic Acid
  misc_feature: oligonucleotide substrate
ucuuugcugcgucacca

SEQ ID NO: 4469 - RNA, 17 nt, Artificial Sequence
  Description of Artificial Sequence:  Nucleic Acid
  misc_feature: oligonucleotide substrate
uuugcugcgucaccaca

SEQ ID NO: 4470 - RNA, 17 nt, Artificial Sequence
  Description of Artificial Sequence:  Nucleic Acid
  misc_feature: oligonucleotide substrate
gcugcgucaccacaaca

SEQ ID NO: 4471 - RNA, 17 nt, Artificial Sequence
  Description of Artificial Sequence:  Nucleic Acid
  misc_feature: oligonucleotide substrate
gcgucaccacaacaugg

SEQ ID NO: 4472 - RNA, 17 nt, Artificial Sequence
  Description of Artificial Sequence:  Nucleic Acid
  misc_feature: oligonucleotide substrate
ucaccacaacauggucu

SEQ ID NO: 4473 - RNA, 17 nt, Artificial Sequence
  Description of Artificial Sequence:  Nucleic Acid
  misc_feature: oligonucleotide substrate
accacaacauggucuac

SEQ ID NO: 4474 - RNA, 17 nt, Artificial Sequence
  Description of Artificial Sequence:  Nucleic Acid
  misc_feature: oligonucleotide substrate
acaacauggucuacgcu

SEQ ID NO: 4475 - RNA, 17 nt, Artificial Sequence
  Description of Artificial Sequence:  Nucleic Acid
  misc_feature: oligonucleotide substrate
cauggucuacgcuacaa

SEQ ID NO: 4476 - RNA, 17 nt, Artificial Sequence
  Description of Artificial Sequence:  Nucleic Acid
  misc_feature: oligonucleotide substrate
uggucuacgcuacaaca

SEQ ID NO: 4477 - RNA, 17 nt, Artificial Sequence
  Description of Artificial Sequence:  Nucleic Acid
  misc_feature: oligonucleotide substrate
ucuacgcuacaacaucu

SEQ ID NO: 4478 - RNA, 17 nt, Artificial Sequence
  Description of Artificial Sequence:  Nucleic Acid
  misc_feature: oligonucleotide substrate
acgcuacaacaucucgc

SEQ ID NO: 4479 - RNA, 17 nt, Artificial Sequence
  Description of Artificial Sequence:  Nucleic Acid
  misc_feature: oligonucleotide substrate
gcuacaacaucucgcag

SEQ ID NO: 4480 - RNA, 17 nt, Artificial Sequence
  Description of Artificial Sequence:  Nucleic Acid
  misc_feature: oligonucleotide substrate
aacaucucgcagcgcaa

SEQ ID NO: 4481 - RNA, 17 nt, Artificial Sequence
  Description of Artificial Sequence:  Nucleic Acid
  misc_feature: oligonucleotide substrate
aucucgcagcgcaagcc

SEQ ID NO: 4482 - RNA, 17 nt, Artificial Sequence
  Description of Artificial Sequence:  Nucleic Acid
  misc_feature: oligonucleotide substrate
cucgcagcgcaagccag

SEQ ID NO: 4483 - RNA, 17 nt, Artificial Sequence
  Description of Artificial Sequence:  Nucleic Acid
  misc_feature: oligonucleotide substrate
cagcgcaagccagcggc

SEQ ID NO: 4484 - RNA, 17 nt, Artificial Sequence
  Description of Artificial Sequence:  Nucleic Acid
  misc_feature: oligonucleotide substrate
gcaagccagcggcagaa

SEQ ID NO: 4485 - RNA, 17 nt, Artificial Sequence
  Description of Artificial Sequence:  Nucleic Acid
  misc_feature: oligonucleotide substrate
agccagcggcagaagaa

SEQ ID NO: 4486 - RNA, 17 nt, Artificial Sequence
  Description of Artificial Sequence:  Nucleic Acid
  misc_feature: oligonucleotide substrate
agaagaaggucaccuuu

SEQ ID NO: 4487 - RNA, 17 nt, Artificial Sequence
  Description of Artificial Sequence:  Nucleic Acid
  misc_feature: oligonucleotide substrate
agaaggucaccuuugac

SEQ ID NO: 4488 - RNA, 17 nt, Artificial Sequence
  Description of Artificial Sequence:  Nucleic Acid
  misc_feature: oligonucleotide substrate
caccuuugacagacugc

SEQ ID NO: 4489 - RNA, 17 nt, Artificial Sequence
  Description of Artificial Sequence:  Nucleic Acid
  misc_feature: oligonucleotide substrate
uuugacagacugcaagu

SEQ ID NO: 4490 - RNA, 17 nt, Artificial Sequence
  Description of Artificial Sequence:  Nucleic Acid
  misc_feature: oligonucleotide substrate
gacagacugcaaguccu

SEQ ID NO: 4491 - RNA, 17 nt, Artificial Sequence
  Description of Artificial Sequence:  Nucleic Acid
  misc_feature: oligonucleotide substrate
gacugcaaguccuggac

SEQ ID NO: 4492 - RNA, 17 nt, Artificial Sequence
  Description of Artificial Sequence:  Nucleic Acid
  misc_feature: oligonucleotide substrate
aguccuggacgaccacu

SEQ ID NO: 4493 - RNA, 17 nt, Artificial Sequence
  Description of Artificial Sequence:  Nucleic Acid
  misc_feature: oligonucleotide substrate
ccuggacgaccacuacc

SEQ ID NO: 4494 - RNA, 17 nt, Artificial Sequence
  Description of Artificial Sequence:  Nucleic Acid
  misc_feature: oligonucleotide substrate
ggacgaccacuaccggg

SEQ ID NO: 4495 - RNA, 17 nt, Artificial Sequence
  Description of Artificial Sequence:  Nucleic Acid
  misc_feature: oligonucleotide substrate
cgaccacuaccgggacg

SEQ ID NO: 4496 - RNA, 17 nt, Artificial Sequence
  Description of Artificial Sequence:  Nucleic Acid
  misc_feature: oligonucleotide substrate
cuaccgggacgugcuca

SEQ ID NO: 4497 - RNA, 17 nt, Artificial Sequence
  Description of Artificial Sequence:  Nucleic Acid
  misc_feature: oligonucleotide substrate
accgggacgugcucaag

SEQ ID NO: 4498 - RNA, 17 nt, Artificial Sequence
  Description of Artificial Sequence:  Nucleic Acid
  misc_feature: oligonucleotide substrate
cgggacgugcucaagga

SEQ ID NO: 4499 - RNA, 17 nt, Artificial Sequence
  Description of Artificial Sequence:  Nucleic Acid
  misc_feature: oligonucleotide substrate
ucaaggagaugaaggcg

SEQ ID NO: 4500 - RNA, 17 nt, Artificial Sequence
  Description of Artificial Sequence:  Nucleic Acid
  misc_feature: oligonucleotide substrate
agaugaaggcgaaggcg

SEQ ID NO: 4501 - RNA, 17 nt, Artificial Sequence
  Description of Artificial Sequence:  Nucleic Acid
  misc_feature: oligonucleotide substrate
aggcgaaggcguccaca

SEQ ID NO: 4502 - RNA, 17 nt, Artificial Sequence
  Description of Artificial Sequence:  Nucleic Acid
  misc_feature: oligonucleotide substrate
gcgaaggcguccacagu

SEQ ID NO: 4503 - RNA, 17 nt, Artificial Sequence
  Description of Artificial Sequence:  Nucleic Acid
  misc_feature: oligonucleotide substrate
aggcguccacaguuaag

SEQ ID NO: 4504 - RNA, 17 nt, Artificial Sequence
  Description of Artificial Sequence:  Nucleic Acid
  misc_feature: oligonucleotide substrate
cguccacaguuaaggcu

SEQ ID NO: 4505 - RNA, 17 nt, Artificial Sequence
  Description of Artificial Sequence:  Nucleic Acid
  misc_feature: oligonucleotide substrate
caguuaaggcuaaacuu

SEQ ID NO: 4506 - RNA, 17 nt, Artificial Sequence
  Description of Artificial Sequence:  Nucleic Acid
  misc_feature: oligonucleotide substrate
aaggcuaaacuucuauc

SEQ ID NO: 4507 - RNA, 17 nt, Artificial Sequence
  Description of Artificial Sequence:  Nucleic Acid
  misc_feature: oligonucleotide substrate
aaacuucuauccguaga

SEQ ID NO: 4508 - RNA, 17 nt, Artificial Sequence
  Description of Artificial Sequence:  Nucleic Acid
  misc_feature: oligonucleotide substrate
uucuauccguagaggaa

SEQ ID NO: 4509 - RNA, 17 nt, Artificial Sequence
  Description of Artificial Sequence:  Nucleic Acid
  misc_feature: oligonucleotide substrate
uagaggaagccugcaga

SEQ ID NO: 4510 - RNA, 17 nt, Artificial Sequence
  Description of Artificial Sequence:  Nucleic Acid
  misc_feature: oligonucleotide substrate
ggaagccugcagacuga

SEQ ID NO: 4511 - RNA, 17 nt, Artificial Sequence
  Description of Artificial Sequence:  Nucleic Acid
  misc_feature: oligonucleotide substrate
gccugcagacugacgcc

SEQ ID NO: 4512 - RNA, 17 nt, Artificial Sequence
  Description of Artificial Sequence:  Nucleic Acid
  misc_feature: oligonucleotide substrate
gcagacugacgccccca

SEQ ID NO: 4513 - RNA, 17 nt, Artificial Sequence
  Description of Artificial Sequence:  Nucleic Acid
  misc_feature: oligonucleotide substrate
agacugacgcccccaca

SEQ ID NO: 4514 - RNA, 17 nt, Artificial Sequence
  Description of Artificial Sequence:  Nucleic Acid
  misc_feature: oligonucleotide substrate
acgcccccacauucggc

SEQ ID NO: 4515 - RNA, 17 nt, Artificial Sequence
  Description of Artificial Sequence:  Nucleic Acid
  misc_feature: oligonucleotide substrate
gcccccacauucggcca

SEQ ID NO: 4516 - RNA, 17 nt, Artificial Sequence
  Description of Artificial Sequence:  Nucleic Acid
  misc_feature: oligonucleotide substrate
cacauucggccaggucc

SEQ ID NO: 4517 - RNA, 17 nt, Artificial Sequence
  Description of Artificial Sequence:  Nucleic Acid
  misc_feature: oligonucleotide substrate
ucggccagguccaaauu

SEQ ID NO: 4518 - RNA, 17 nt, Artificial Sequence
  Description of Artificial Sequence:  Nucleic Acid
  misc_feature: oligonucleotide substrate
agguccaaauuugguua

SEQ ID NO: 4519 - RNA, 17 nt, Artificial Sequence
  Description of Artificial Sequence:  Nucleic Acid
  misc_feature: oligonucleotide substrate
caaauuugguuaugggg

SEQ ID NO: 4520 - RNA, 17 nt, Artificial Sequence
  Description of Artificial Sequence:  Nucleic Acid
  misc_feature: oligonucleotide substrate
auuugguuauggggcaa

SEQ ID NO: 4521 - RNA, 17 nt, Artificial Sequence
  Description of Artificial Sequence:  Nucleic Acid
  misc_feature: oligonucleotide substrate
guuauggggcaaaggac

SEQ ID NO: 4522 - RNA, 17 nt, Artificial Sequence
  Description of Artificial Sequence:  Nucleic Acid
  misc_feature: oligonucleotide substrate
ggcaaaggacguccgga

SEQ ID NO: 4523 - RNA, 17 nt, Artificial Sequence
  Description of Artificial Sequence:  Nucleic Acid
  misc_feature: oligonucleotide substrate
caaaggacguccggaac

SEQ ID NO: 4524 - RNA, 17 nt, Artificial Sequence
  Description of Artificial Sequence:  Nucleic Acid
  misc_feature: oligonucleotide substrate
cguccggaaccuaucca

SEQ ID NO: 4525 - RNA, 17 nt, Artificial Sequence
  Description of Artificial Sequence:  Nucleic Acid
  misc_feature: oligonucleotide substrate
cggaaccuauccagcgg

SEQ ID NO: 4526 - RNA, 17 nt, Artificial Sequence
  Description of Artificial Sequence:  Nucleic Acid
  misc_feature: oligonucleotide substrate
ccuauccagcggggccg

SEQ ID NO: 4527 - RNA, 17 nt, Artificial Sequence
  Description of Artificial Sequence:  Nucleic Acid
  misc_feature: oligonucleotide substrate
ccagcggggccgucaac

SEQ ID NO: 4528 - RNA, 17 nt, Artificial Sequence
  Description of Artificial Sequence:  Nucleic Acid
  misc_feature: oligonucleotide substrate
gcggggccgucaaccac

SEQ ID NO: 4529 - RNA, 17 nt, Artificial Sequence
  Description of Artificial Sequence:  Nucleic Acid
  misc_feature: oligonucleotide substrate
ggccgucaaccacaucc

SEQ ID NO: 4530 - RNA, 17 nt, Artificial Sequence
  Description of Artificial Sequence:  Nucleic Acid
  misc_feature: oligonucleotide substrate
cgucaaccacauccgcu

SEQ ID NO: 4531 - RNA, 17 nt, Artificial Sequence
  Description of Artificial Sequence:  Nucleic Acid
  misc_feature: oligonucleotide substrate
ucaaccacauccgcucc

SEQ ID NO: 4532 - RNA, 17 nt, Artificial Sequence
  Description of Artificial Sequence:  Nucleic Acid
  misc_feature: oligonucleotide substrate
ccacauccgcuccgugu

SEQ ID NO: 4533 - RNA, 17 nt, Artificial Sequence
  Description of Artificial Sequence:  Nucleic Acid
  misc_feature: oligonucleotide substrate
uccgcuccguguggaag

SEQ ID NO: 4534 - RNA, 17 nt, Artificial Sequence
  Description of Artificial Sequence:  Nucleic Acid
  misc_feature: oligonucleotide substrate
cgcuccguguggaagga

SEQ ID NO: 4535 - RNA, 17 nt, Artificial Sequence
  Description of Artificial Sequence:  Nucleic Acid
  misc_feature: oligonucleotide substrate
guggaaggacuugcugg

SEQ ID NO: 4536 - RNA, 17 nt, Artificial Sequence
  Description of Artificial Sequence:  Nucleic Acid
  misc_feature: oligonucleotide substrate
aaggacuugcuggaaga

SEQ ID NO: 4537 - RNA, 17 nt, Artificial Sequence
  Description of Artificial Sequence:  Nucleic Acid
  misc_feature: oligonucleotide substrate
gcuggaagacacugaga

SEQ ID NO: 4538 - RNA, 17 nt, Artificial Sequence
  Description of Artificial Sequence:  Nucleic Acid
  misc_feature: oligonucleotide substrate
uggaagacacugagaca

SEQ ID NO: 4539 - RNA, 17 nt, Artificial Sequence
  Description of Artificial Sequence:  Nucleic Acid
  misc_feature: oligonucleotide substrate
acacugagacaccaauu

SEQ ID NO: 4540 - RNA, 17 nt, Artificial Sequence
  Description of Artificial Sequence:  Nucleic Acid
  misc_feature: oligonucleotide substrate
acugagacaccaauuga

SEQ ID NO: 4541 - RNA, 17 nt, Artificial Sequence
  Description of Artificial Sequence:  Nucleic Acid
  misc_feature: oligonucleotide substrate
agacaccaauugauacc

SEQ ID NO: 4542 - RNA, 17 nt, Artificial Sequence
  Description of Artificial Sequence:  Nucleic Acid
  misc_feature: oligonucleotide substrate
accaauugauaccacca

SEQ ID NO: 4543 - RNA, 17 nt, Artificial Sequence
  Description of Artificial Sequence:  Nucleic Acid
  misc_feature: oligonucleotide substrate
caauugauaccaccauc

SEQ ID NO: 4544 - RNA, 17 nt, Artificial Sequence
  Description of Artificial Sequence:  Nucleic Acid
  misc_feature: oligonucleotide substrate
uugauaccaccaucaug

SEQ ID NO: 4545 - RNA, 17 nt, Artificial Sequence
  Description of Artificial Sequence:  Nucleic Acid
  misc_feature: oligonucleotide substrate
auaccaccaucauggca

SEQ ID NO: 4546 - RNA, 17 nt, Artificial Sequence
  Description of Artificial Sequence:  Nucleic Acid
  misc_feature: oligonucleotide substrate
ccaccaucauggcaaaa

SEQ ID NO: 4547 - RNA, 17 nt, Artificial Sequence
  Description of Artificial Sequence:  Nucleic Acid
  misc_feature: oligonucleotide substrate
ccaucauggcaaaaaau

SEQ ID NO: 4548 - RNA, 17 nt, Artificial Sequence
  Description of Artificial Sequence:  Nucleic Acid
  misc_feature: oligonucleotide substrate
ggcaaaaaaugagguuu

SEQ ID NO: 4549 - RNA, 17 nt, Artificial Sequence
  Description of Artificial Sequence:  Nucleic Acid
  misc_feature: oligonucleotide substrate
aaaaugagguuuucugc

SEQ ID NO: 4550 - RNA, 17 nt, Artificial Sequence
  Description of Artificial Sequence:  Nucleic Acid
  misc_feature: oligonucleotide substrate
gguuuucugcguccaac

SEQ ID NO: 4551 - RNA, 17 nt, Artificial Sequence
  Description of Artificial Sequence:  Nucleic Acid
  misc_feature: oligonucleotide substrate
uuuucugcguccaacca

SEQ ID NO: 4552 - RNA, 17 nt, Artificial Sequence
  Description of Artificial Sequence:  Nucleic Acid
  misc_feature: oligonucleotide substrate
ugcguccaaccagagaa

SEQ ID NO: 4553 - RNA, 17 nt, Artificial Sequence
  Description of Artificial Sequence:  Nucleic Acid
  misc_feature: oligonucleotide substrate
gaaaggaggccgcaagc

SEQ ID NO: 4554 - RNA, 17 nt, Artificial Sequence
  Description of Artificial Sequence:  Nucleic Acid
  misc_feature: oligonucleotide substrate
aggaggccgcaagccag

SEQ ID NO: 4555 - RNA, 17 nt, Artificial Sequence
  Description of Artificial Sequence:  Nucleic Acid
  misc_feature: oligonucleotide substrate
ggccgcaagccagcucg

SEQ ID NO: 4556 - RNA, 17 nt, Artificial Sequence
  Description of Artificial Sequence:  Nucleic Acid
  misc_feature: oligonucleotide substrate
gcaagccagcucgccuu

SEQ ID NO: 4557 - RNA, 17 nt, Artificial Sequence
  Description of Artificial Sequence:  Nucleic Acid
  misc_feature: oligonucleotide substrate
gccagcucgccuuaucg

SEQ ID NO: 4558 - RNA, 17 nt, Artificial Sequence
  Description of Artificial Sequence:  Nucleic Acid
  misc_feature: oligonucleotide substrate
cucgccuuaucguguuc

SEQ ID NO: 4559 - RNA, 17 nt, Artificial Sequence
  Description of Artificial Sequence:  Nucleic Acid
  misc_feature: oligonucleotide substrate
gccuuaucguguuccca

SEQ ID NO: 4560 - RNA, 17 nt, Artificial Sequence
  Description of Artificial Sequence:  Nucleic Acid
  misc_feature: oligonucleotide substrate
cuuaucguguucccaga

SEQ ID NO: 4561 - RNA, 17 nt, Artificial Sequence
  Description of Artificial Sequence:  Nucleic Acid
  misc_feature: oligonucleotide substrate
guucccagacuuggggg

SEQ ID NO: 4562 - RNA, 17 nt, Artificial Sequence
  Description of Artificial Sequence:  Nucleic Acid
  misc_feature: oligonucleotide substrate
acuuggggguucgugug

SEQ ID NO: 4563 - RNA, 17 nt, Artificial Sequence
  Description of Artificial Sequence:  Nucleic Acid
  misc_feature: oligonucleotide substrate
ggggguucgugugugcg

SEQ ID NO: 4564 - RNA, 17 nt, Artificial Sequence
  Description of Artificial Sequence:  Nucleic Acid
  misc_feature: oligonucleotide substrate
ggguucgugugugcgag

SEQ ID NO: 4565 - RNA, 17 nt, Artificial Sequence
  Description of Artificial Sequence:  Nucleic Acid
  misc_feature: oligonucleotide substrate
guucgugugugcgagaa

SEQ ID NO: 4566 - RNA, 17 nt, Artificial Sequence
  Description of Artificial Sequence:  Nucleic Acid
  misc_feature: oligonucleotide substrate
ucgugugugcgagaaaa

SEQ ID NO: 4567 - RNA, 17 nt, Artificial Sequence
  Description of Artificial Sequence:  Nucleic Acid
  misc_feature: oligonucleotide substrate
gcgagaaaauggcccuu

SEQ ID NO: 4568 - RNA, 17 nt, Artificial Sequence
  Description of Artificial Sequence:  Nucleic Acid
  misc_feature: oligonucleotide substrate
agaaaauggcccuuuac

SEQ ID NO: 4569 - RNA, 17 nt, Artificial Sequence
  Description of Artificial Sequence:  Nucleic Acid
  misc_feature: oligonucleotide substrate
ggcccuuuacgacgugg

SEQ ID NO: 4570 - RNA, 17 nt, Artificial Sequence
  Description of Artificial Sequence:  Nucleic Acid
  misc_feature: oligonucleotide substrate
ccuuuacgacguggucu

SEQ ID NO: 4571 - RNA, 17 nt, Artificial Sequence
  Description of Artificial Sequence:  Nucleic Acid
  misc_feature: oligonucleotide substrate
uuuacgacguggucucc

SEQ ID NO: 4572 - RNA, 17 nt, Artificial Sequence
  Description of Artificial Sequence:  Nucleic Acid
  misc_feature: oligonucleotide substrate
acgacguggucuccacc

SEQ ID NO: 4573 - RNA, 17 nt, Artificial Sequence
  Description of Artificial Sequence:  Nucleic Acid
  misc_feature: oligonucleotide substrate
uggucuccacccuuccu

SEQ ID NO: 4574 - RNA, 17 nt, Artificial Sequence
  Description of Artificial Sequence:  Nucleic Acid
  misc_feature: oligonucleotide substrate
uuccucaggccgugaug

SEQ ID NO: 4575 - RNA, 17 nt, Artificial Sequence
  Description of Artificial Sequence:  Nucleic Acid
  misc_feature: oligonucleotide substrate
cucaggccgugaugggc

SEQ ID NO: 4576 - RNA, 17 nt, Artificial Sequence
  Description of Artificial Sequence:  Nucleic Acid
  misc_feature: oligonucleotide substrate
aggccgugaugggcucu

SEQ ID NO: 4577 - RNA, 17 nt, Artificial Sequence
  Description of Artificial Sequence:  Nucleic Acid
  misc_feature: oligonucleotide substrate
cgugaugggcucuucau

SEQ ID NO: 4578 - RNA, 17 nt, Artificial Sequence
  Description of Artificial Sequence:  Nucleic Acid
  misc_feature: oligonucleotide substrate
ggcucuucauacggauu

SEQ ID NO: 4579 - RNA, 17 nt, Artificial Sequence
  Description of Artificial Sequence:  Nucleic Acid
  misc_feature: oligonucleotide substrate
cucuucauacggauucc

SEQ ID NO: 4580 - RNA, 17 nt, Artificial Sequence
  Description of Artificial Sequence:  Nucleic Acid
  misc_feature: oligonucleotide substrate
ucauacggauuccagua

SEQ ID NO: 4581 - RNA, 17 nt, Artificial Sequence
  Description of Artificial Sequence:  Nucleic Acid
  misc_feature: oligonucleotide substrate
ggauuccaguacucucc

SEQ ID NO: 4582 - RNA, 17 nt, Artificial Sequence
  Description of Artificial Sequence:  Nucleic Acid
  misc_feature: oligonucleotide substrate
auuccaguacucuccug

SEQ ID NO: 4583 - RNA, 17 nt, Artificial Sequence
  Description of Artificial Sequence:  Nucleic Acid
  misc_feature: oligonucleotide substrate
ucuccugggcagcgggu

SEQ ID NO: 4584 - RNA, 17 nt, Artificial Sequence
  Description of Artificial Sequence:  Nucleic Acid
  misc_feature: oligonucleotide substrate
ccugggcagcggguuga

SEQ ID NO: 4585 - RNA, 17 nt, Artificial Sequence
  Description of Artificial Sequence:  Nucleic Acid
  misc_feature: oligonucleotide substrate
ggcagcggguugaguuc

SEQ ID NO: 4586 - RNA, 17 nt, Artificial Sequence
  Description of Artificial Sequence:  Nucleic Acid
  misc_feature: oligonucleotide substrate
cggguugaguuccuggu

SEQ ID NO: 4587 - RNA, 17 nt, Artificial Sequence
  Description of Artificial Sequence:  Nucleic Acid
  misc_feature: oligonucleotide substrate
aguuccuggugaaugcc

SEQ ID NO: 4588 - RNA, 17 nt, Artificial Sequence
  Description of Artificial Sequence:  Nucleic Acid
  misc_feature: oligonucleotide substrate
ccuggugaaugccugga

SEQ ID NO: 4589 - RNA, 17 nt, Artificial Sequence
  Description of Artificial Sequence:  Nucleic Acid
  misc_feature: oligonucleotide substrate
uggugaaugccuggaaa

SEQ ID NO: 4590 - RNA, 17 nt, Artificial Sequence
  Description of Artificial Sequence:  Nucleic Acid
  misc_feature: oligonucleotide substrate
gccuggaaaucaaagaa

SEQ ID NO: 4591 - RNA, 17 nt, Artificial Sequence
  Description of Artificial Sequence:  Nucleic Acid
  misc_feature: oligonucleotide substrate
ucaaagaaaugcccuau

SEQ ID NO: 4592 - RNA, 17 nt, Artificial Sequence
  Description of Artificial Sequence:  Nucleic Acid
  misc_feature: oligonucleotide substrate
aaagaaaugcccuaugg

SEQ ID NO: 4593 - RNA, 17 nt, Artificial Sequence
  Description of Artificial Sequence:  Nucleic Acid
  misc_feature: oligonucleotide substrate
aaugcccuaugggcuuu

SEQ ID NO: 4594 - RNA, 17 nt, Artificial Sequence
  Description of Artificial Sequence:  Nucleic Acid
  misc_feature: oligonucleotide substrate
cccuaugggcuuugcau

SEQ ID NO: 4595 - RNA, 17 nt, Artificial Sequence
  Description of Artificial Sequence:  Nucleic Acid
  misc_feature: oligonucleotide substrate
ugggcuuugcauaugac

SEQ ID NO: 4596 - RNA, 17 nt, Artificial Sequence
  Description of Artificial Sequence:  Nucleic Acid
  misc_feature: oligonucleotide substrate
ggcuuugcauaugacac

SEQ ID NO: 4597 - RNA, 17 nt, Artificial Sequence
  Description of Artificial Sequence:  Nucleic Acid
  misc_feature: oligonucleotide substrate
cuuugcauaugacaccc

SEQ ID NO: 4598 - RNA, 17 nt, Artificial Sequence
  Description of Artificial Sequence:  Nucleic Acid
  misc_feature: oligonucleotide substrate
ugcauaugacacccgcu

SEQ ID NO: 4599 - RNA, 17 nt, Artificial Sequence
  Description of Artificial Sequence:  Nucleic Acid
  misc_feature: oligonucleotide substrate
cauaugacacccgcugu

SEQ ID NO: 4600 - RNA, 17 nt, Artificial Sequence
  Description of Artificial Sequence:  Nucleic Acid
  misc_feature: oligonucleotide substrate
ugacacccgcuguuucg

SEQ ID NO: 4601 - RNA, 17 nt, Artificial Sequence
  Description of Artificial Sequence:  Nucleic Acid
  misc_feature: oligonucleotide substrate
cacccgcuguuucgacu

SEQ ID NO: 4602 - RNA, 17 nt, Artificial Sequence
  Description of Artificial Sequence:  Nucleic Acid
  misc_feature: oligonucleotide substrate
cuguuucgacucaacag

SEQ ID NO: 4603 - RNA, 17 nt, Artificial Sequence
  Description of Artificial Sequence:  Nucleic Acid
  misc_feature: oligonucleotide substrate
ucgacucaacagucacc

SEQ ID NO: 4604 - RNA, 17 nt, Artificial Sequence
  Description of Artificial Sequence:  Nucleic Acid
  misc_feature: oligonucleotide substrate
acucaacagucaccgag

SEQ ID NO: 4605 - RNA, 17 nt, Artificial Sequence
  Description of Artificial Sequence:  Nucleic Acid
  misc_feature: oligonucleotide substrate
caacagucaccgagagu

SEQ ID NO: 4606 - RNA, 17 nt, Artificial Sequence
  Description of Artificial Sequence:  Nucleic Acid
  misc_feature: oligonucleotide substrate
caccgagagugacaucc

SEQ ID NO: 4607 - RNA, 17 nt, Artificial Sequence
  Description of Artificial Sequence:  Nucleic Acid
  misc_feature: oligonucleotide substrate
cgagagugacauccgug

SEQ ID NO: 4608 - RNA, 17 nt, Artificial Sequence
  Description of Artificial Sequence:  Nucleic Acid
  misc_feature: oligonucleotide substrate
agagugacauccguguc

SEQ ID NO: 4609 - RNA, 17 nt, Artificial Sequence
  Description of Artificial Sequence:  Nucleic Acid
  misc_feature: oligonucleotide substrate
ugacauccgugucgagg

SEQ ID NO: 4610 - RNA, 17 nt, Artificial Sequence
  Description of Artificial Sequence:  Nucleic Acid
  misc_feature: oligonucleotide substrate
acauccgugucgaggag

SEQ ID NO: 4611 - RNA, 17 nt, Artificial Sequence
  Description of Artificial Sequence:  Nucleic Acid
  misc_feature: oligonucleotide substrate
gucgaggagucaauuua

SEQ ID NO: 4612 - RNA, 17 nt, Artificial Sequence
  Description of Artificial Sequence:  Nucleic Acid
  misc_feature: oligonucleotide substrate
aggagucaauuuaccaa

SEQ ID NO: 4613 - RNA, 17 nt, Artificial Sequence
  Description of Artificial Sequence:  Nucleic Acid
  misc_feature: oligonucleotide substrate
gucaauuuaccaauguu

SEQ ID NO: 4614 - RNA, 17 nt, Artificial Sequence
  Description of Artificial Sequence:  Nucleic Acid
  misc_feature: oligonucleotide substrate
auuuaccaauguuguga

SEQ ID NO: 4615 - RNA, 17 nt, Artificial Sequence
  Description of Artificial Sequence:  Nucleic Acid
  misc_feature: oligonucleotide substrate
uuaccaauguugugacu

SEQ ID NO: 4616 - RNA, 17 nt, Artificial Sequence
  Description of Artificial Sequence:  Nucleic Acid
  misc_feature: oligonucleotide substrate
ccaauguugugacuugg

SEQ ID NO: 4617 - RNA, 17 nt, Artificial Sequence
  Description of Artificial Sequence:  Nucleic Acid
  misc_feature: oligonucleotide substrate
auguugugacuuggccc

SEQ ID NO: 4618 - RNA, 17 nt, Artificial Sequence
  Description of Artificial Sequence:  Nucleic Acid
  misc_feature: oligonucleotide substrate
gugacuuggcccccgaa

SEQ ID NO: 4619 - RNA, 17 nt, Artificial Sequence
  Description of Artificial Sequence:  Nucleic Acid
  misc_feature: oligonucleotide substrate
cccccgaagccagacag

SEQ ID NO: 4620 - RNA, 17 nt, Artificial Sequence
  Description of Artificial Sequence:  Nucleic Acid
  misc_feature: oligonucleotide substrate
gaagccagacaggccau

SEQ ID NO: 4621 - RNA, 17 nt, Artificial Sequence
  Description of Artificial Sequence:  Nucleic Acid
  misc_feature: oligonucleotide substrate
ccagacaggccauaagg

SEQ ID NO: 4622 - RNA, 17 nt, Artificial Sequence
  Description of Artificial Sequence:  Nucleic Acid
  misc_feature: oligonucleotide substrate
gacaggccauaaggucg

SEQ ID NO: 4623 - RNA, 17 nt, Artificial Sequence
  Description of Artificial Sequence:  Nucleic Acid
  misc_feature: oligonucleotide substrate
gccauaaggucgcucac

SEQ ID NO: 4624 - RNA, 17 nt, Artificial Sequence
  Description of Artificial Sequence:  Nucleic Acid
  misc_feature: oligonucleotide substrate
auaaggucgcucacaga

SEQ ID NO: 4625 - RNA, 17 nt, Artificial Sequence
  Description of Artificial Sequence:  Nucleic Acid
  misc_feature: oligonucleotide substrate
ggucgcucacagagcgg

SEQ ID NO: 4626 - RNA, 17 nt, Artificial Sequence
  Description of Artificial Sequence:  Nucleic Acid
  misc_feature: oligonucleotide substrate
cucacagagcggcuuua

SEQ ID NO: 4627 - RNA, 17 nt, Artificial Sequence
  Description of Artificial Sequence:  Nucleic Acid
  misc_feature: oligonucleotide substrate
acagagcggcuuuauau

SEQ ID NO: 4628 - RNA, 17 nt, Artificial Sequence
  Description of Artificial Sequence:  Nucleic Acid
  misc_feature: oligonucleotide substrate
gcggcuuuauaucgggg

SEQ ID NO: 4629 - RNA, 17 nt, Artificial Sequence
  Description of Artificial Sequence:  Nucleic Acid
  misc_feature: oligonucleotide substrate
ggcuuuauaucgggggu

SEQ ID NO: 4630 - RNA, 17 nt, Artificial Sequence
  Description of Artificial Sequence:  Nucleic Acid
  misc_feature: oligonucleotide substrate
uaucggggguccucuga

SEQ ID NO: 4631 - RNA, 17 nt, Artificial Sequence
  Description of Artificial Sequence:  Nucleic Acid
  misc_feature: oligonucleotide substrate
guccucugacuaauuca

SEQ ID NO: 4632 - RNA, 17 nt, Artificial Sequence
  Description of Artificial Sequence:  Nucleic Acid
  misc_feature: oligonucleotide substrate
ucugacuaauucaaaag

SEQ ID NO: 4633 - RNA, 17 nt, Artificial Sequence
  Description of Artificial Sequence:  Nucleic Acid
  misc_feature: oligonucleotide substrate
ucaaaagggcagaacug

SEQ ID NO: 4634 - RNA, 17 nt, Artificial Sequence
  Description of Artificial Sequence:  Nucleic Acid
  misc_feature: oligonucleotide substrate
agggcagaacugcgguu

SEQ ID NO: 4635 - RNA, 17 nt, Artificial Sequence
  Description of Artificial Sequence:  Nucleic Acid
  misc_feature: oligonucleotide substrate
gcagaacugcgguuauc

SEQ ID NO: 4636 - RNA, 17 nt, Artificial Sequence
  Description of Artificial Sequence:  Nucleic Acid
  misc_feature: oligonucleotide substrate
gaacugcgguuaucgcc

SEQ ID NO: 4637 - RNA, 17 nt, Artificial Sequence
  Description of Artificial Sequence:  Nucleic Acid
  misc_feature: oligonucleotide substrate
cugcgguuaucgccggu

SEQ ID NO: 4638 - RNA, 17 nt, Artificial Sequence
  Description of Artificial Sequence:  Nucleic Acid
  misc_feature: oligonucleotide substrate
cgguuaucgccggugcc

SEQ ID NO: 4639 - RNA, 17 nt, Artificial Sequence
  Description of Artificial Sequence:  Nucleic Acid
  misc_feature: oligonucleotide substrate
uaucgccggugccgcgc

SEQ ID NO: 4640 - RNA, 17 nt, Artificial Sequence
  Description of Artificial Sequence:  Nucleic Acid
  misc_feature: oligonucleotide substrate
ucgccggugccgcgcga

SEQ ID NO: 4641 - RNA, 17 nt, Artificial Sequence
  Description of Artificial Sequence:  Nucleic Acid
  misc_feature: oligonucleotide substrate
ccggugccgcgcgagcg

SEQ ID NO: 4642 - RNA, 17 nt, Artificial Sequence
  Description of Artificial Sequence:  Nucleic Acid
  misc_feature: oligonucleotide substrate
ggugccgcgcgagcggc

SEQ ID NO: 4643 - RNA, 17 nt, Artificial Sequence
  Description of Artificial Sequence:  Nucleic Acid
  misc_feature: oligonucleotide substrate
ccgcgcgagcggcgugc

SEQ ID NO: 4644 - RNA, 17 nt, Artificial Sequence
  Description of Artificial Sequence:  Nucleic Acid
  misc_feature: oligonucleotide substrate
cgcgagcggcgugcuga

SEQ ID NO: 4645 - RNA, 17 nt, Artificial Sequence
  Description of Artificial Sequence:  Nucleic Acid
  misc_feature: oligonucleotide substrate
cgagcggcgugcugacg

SEQ ID NO: 4646 - RNA, 17 nt, Artificial Sequence
  Description of Artificial Sequence:  Nucleic Acid
  misc_feature: oligonucleotide substrate
agcggcgugcugacgac

SEQ ID NO: 4647 - RNA, 17 nt, Artificial Sequence
  Description of Artificial Sequence:  Nucleic Acid
  misc_feature: oligonucleotide substrate
gcgugcugacgaccagc

SEQ ID NO: 4648 - RNA, 17 nt, Artificial Sequence
  Description of Artificial Sequence:  Nucleic Acid
  misc_feature: oligonucleotide substrate
ugcugacgaccagcugu

SEQ ID NO: 4649 - RNA, 17 nt, Artificial Sequence
  Description of Artificial Sequence:  Nucleic Acid
  misc_feature: oligonucleotide substrate
gacgaccagcuguggua

SEQ ID NO: 4650 - RNA, 17 nt, Artificial Sequence
  Description of Artificial Sequence:  Nucleic Acid
  misc_feature: oligonucleotide substrate
gaccagcugugguaaua

SEQ ID NO: 4651 - RNA, 17 nt, Artificial Sequence
  Description of Artificial Sequence:  Nucleic Acid
  misc_feature: oligonucleotide substrate
cagcugugguaauaccc

SEQ ID NO: 4652 - RNA, 17 nt, Artificial Sequence
  Description of Artificial Sequence:  Nucleic Acid
  misc_feature: oligonucleotide substrate
cugugguaauacccuca

SEQ ID NO: 4653 - RNA, 17 nt, Artificial Sequence
  Description of Artificial Sequence:  Nucleic Acid
  misc_feature: oligonucleotide substrate
gugguaauacccucaca

SEQ ID NO: 4654 - RNA, 17 nt, Artificial Sequence
  Description of Artificial Sequence:  Nucleic Acid
  misc_feature: oligonucleotide substrate
auacccucacauguuac

SEQ ID NO: 4655 - RNA, 17 nt, Artificial Sequence
  Description of Artificial Sequence:  Nucleic Acid
  misc_feature: oligonucleotide substrate
acccucacauguuacuu

SEQ ID NO: 4656 - RNA, 17 nt, Artificial Sequence
  Description of Artificial Sequence:  Nucleic Acid
  misc_feature: oligonucleotide substrate
ccucacauguuacuuga

SEQ ID NO: 4657 - RNA, 17 nt, Artificial Sequence
  Description of Artificial Sequence:  Nucleic Acid
  misc_feature: oligonucleotide substrate
cacauguuacuugaaag

SEQ ID NO: 4658 - RNA, 17 nt, Artificial Sequence
  Description of Artificial Sequence:  Nucleic Acid
  misc_feature: oligonucleotide substrate
acuugaaagccucugcg

SEQ ID NO: 4659 - RNA, 17 nt, Artificial Sequence
  Description of Artificial Sequence:  Nucleic Acid
  misc_feature: oligonucleotide substrate
aagccucugcggccugu

SEQ ID NO: 4660 - RNA, 17 nt, Artificial Sequence
  Description of Artificial Sequence:  Nucleic Acid
  misc_feature: oligonucleotide substrate
ccucugcggccugucga

SEQ ID NO: 4661 - RNA, 17 nt, Artificial Sequence
  Description of Artificial Sequence:  Nucleic Acid
  misc_feature: oligonucleotide substrate
ugcggccugucgagcug

SEQ ID NO: 4662 - RNA, 17 nt, Artificial Sequence
  Description of Artificial Sequence:  Nucleic Acid
  misc_feature: oligonucleotide substrate
ccugucgagcugcgaag

SEQ ID NO: 4663 - RNA, 17 nt, Artificial Sequence
  Description of Artificial Sequence:  Nucleic Acid
  misc_feature: oligonucleotide substrate
gucgagcugcgaagcuc

SEQ ID NO: 4664 - RNA, 17 nt, Artificial Sequence
  Description of Artificial Sequence:  Nucleic Acid
  misc_feature: oligonucleotide substrate
gcugcgaagcuccagga

SEQ ID NO: 4665 - RNA, 17 nt, Artificial Sequence
  Description of Artificial Sequence:  Nucleic Acid
  misc_feature: oligonucleotide substrate
gcuccaggacugcacga

SEQ ID NO: 4666 - RNA, 17 nt, Artificial Sequence
  Description of Artificial Sequence:  Nucleic Acid
  misc_feature: oligonucleotide substrate
ccaggacugcacgaugc

SEQ ID NO: 4667 - RNA, 17 nt, Artificial Sequence
  Description of Artificial Sequence:  Nucleic Acid
  misc_feature: oligonucleotide substrate
aggacugcacgaugcuc

SEQ ID NO: 4668 - RNA, 17 nt, Artificial Sequence
  Description of Artificial Sequence:  Nucleic Acid
  misc_feature: oligonucleotide substrate
acugcacgaugcucgug

SEQ ID NO: 4669 - RNA, 17 nt, Artificial Sequence
  Description of Artificial Sequence:  Nucleic Acid
  misc_feature: oligonucleotide substrate
ugcacgaugcucgugug

SEQ ID NO: 4670 - RNA, 17 nt, Artificial Sequence
  Description of Artificial Sequence:  Nucleic Acid
  misc_feature: oligonucleotide substrate
cgaugcucgugugugga

SEQ ID NO: 4671 - RNA, 17 nt, Artificial Sequence
  Description of Artificial Sequence:  Nucleic Acid
  misc_feature: oligonucleotide substrate
augcucguguguggaga

SEQ ID NO: 4672 - RNA, 17 nt, Artificial Sequence
  Description of Artificial Sequence:  Nucleic Acid
  misc_feature: oligonucleotide substrate
gcucguguguggagacg

SEQ ID NO: 4673 - RNA, 17 nt, Artificial Sequence
  Description of Artificial Sequence:  Nucleic Acid
  misc_feature: oligonucleotide substrate
guguggagacgaccugg

SEQ ID NO: 4674 - RNA, 17 nt, Artificial Sequence
  Description of Artificial Sequence:  Nucleic Acid
  misc_feature: oligonucleotide substrate
uggagacgaccuggucg

SEQ ID NO: 4675 - RNA, 17 nt, Artificial Sequence
  Description of Artificial Sequence:  Nucleic Acid
  misc_feature: oligonucleotide substrate
acgaccuggucguuauc

SEQ ID NO: 4676 - RNA, 17 nt, Artificial Sequence
  Description of Artificial Sequence:  Nucleic Acid
  misc_feature: oligonucleotide substrate
accuggucguuaucugu

SEQ ID NO: 4677 - RNA, 17 nt, Artificial Sequence
  Description of Artificial Sequence:  Nucleic Acid
  misc_feature: oligonucleotide substrate
uggucguuaucugugaa

SEQ ID NO: 4678 - RNA, 17 nt, Artificial Sequence
  Description of Artificial Sequence:  Nucleic Acid
  misc_feature: oligonucleotide substrate
cguuaucugugaaagug

SEQ ID NO: 4679 - RNA, 17 nt, Artificial Sequence
  Description of Artificial Sequence:  Nucleic Acid
  misc_feature: oligonucleotide substrate
cugugaaagugcgggga

SEQ ID NO: 4680 - RNA, 17 nt, Artificial Sequence
  Description of Artificial Sequence:  Nucleic Acid
  misc_feature: oligonucleotide substrate
gugaaagugcggggacc

SEQ ID NO: 4681 - RNA, 17 nt, Artificial Sequence
  Description of Artificial Sequence:  Nucleic Acid
  misc_feature: oligonucleotide substrate
gugcggggacccaagag

SEQ ID NO: 4682 - RNA, 17 nt, Artificial Sequence
  Description of Artificial Sequence:  Nucleic Acid
  misc_feature: oligonucleotide substrate
ccaagaggacgcggcga

SEQ ID NO: 4683 - RNA, 17 nt, Artificial Sequence
  Description of Artificial Sequence:  Nucleic Acid
  misc_feature: oligonucleotide substrate
aagaggacgcggcgagc

SEQ ID NO: 4684 - RNA, 17 nt, Artificial Sequence
  Description of Artificial Sequence:  Nucleic Acid
  misc_feature: oligonucleotide substrate
aggacgcggcgagccua

SEQ ID NO: 4685 - RNA, 17 nt, Artificial Sequence
  Description of Artificial Sequence:  Nucleic Acid
  misc_feature: oligonucleotide substrate
cgcggcgagccuacgag

SEQ ID NO: 4686 - RNA, 17 nt, Artificial Sequence
  Description of Artificial Sequence:  Nucleic Acid
  misc_feature: oligonucleotide substrate
gcgagccuacgagucuu

SEQ ID NO: 4687 - RNA, 17 nt, Artificial Sequence
  Description of Artificial Sequence:  Nucleic Acid
  misc_feature: oligonucleotide substrate
gccuacgagucuucacg

SEQ ID NO: 4688 - RNA, 17 nt, Artificial Sequence
  Description of Artificial Sequence:  Nucleic Acid
  misc_feature: oligonucleotide substrate
gagucuucacggaggcu

SEQ ID NO: 4689 - RNA, 17 nt, Artificial Sequence
  Description of Artificial Sequence:  Nucleic Acid
  misc_feature: oligonucleotide substrate
ucacggaggcuaugacu

SEQ ID NO: 4690 - RNA, 17 nt, Artificial Sequence
  Description of Artificial Sequence:  Nucleic Acid
  misc_feature: oligonucleotide substrate
cggaggcuaugacuagg

SEQ ID NO: 4691 - RNA, 17 nt, Artificial Sequence
  Description of Artificial Sequence:  Nucleic Acid
  misc_feature: oligonucleotide substrate
aggcuaugacuagguac

SEQ ID NO: 4692 - RNA, 17 nt, Artificial Sequence
  Description of Artificial Sequence:  Nucleic Acid
  misc_feature: oligonucleotide substrate
augacuagguacucugc

SEQ ID NO: 4693 - RNA, 17 nt, Artificial Sequence
  Description of Artificial Sequence:  Nucleic Acid
  misc_feature: oligonucleotide substrate
gacuagguacucugccc

SEQ ID NO: 4694 - RNA, 17 nt, Artificial Sequence
  Description of Artificial Sequence:  Nucleic Acid
  misc_feature: oligonucleotide substrate
gguacucugcccccccc

SEQ ID NO: 4695 - RNA, 17 nt, Artificial Sequence
  Description of Artificial Sequence:  Nucleic Acid
  misc_feature: oligonucleotide substrate
ccccggggacccgcccc

SEQ ID NO: 4696 - RNA, 17 nt, Artificial Sequence
  Description of Artificial Sequence:  Nucleic Acid
  misc_feature: oligonucleotide substrate
ggggacccgccccaacc

SEQ ID NO: 4697 - RNA, 17 nt, Artificial Sequence
  Description of Artificial Sequence:  Nucleic Acid
  misc_feature: oligonucleotide substrate
ccgccccaaccggaaua

SEQ ID NO: 4698 - RNA, 17 nt, Artificial Sequence
  Description of Artificial Sequence:  Nucleic Acid
  misc_feature: oligonucleotide substrate
caaccggaauacgacuu

SEQ ID NO: 4699 - RNA, 17 nt, Artificial Sequence
  Description of Artificial Sequence:  Nucleic Acid
  misc_feature: oligonucleotide substrate
accggaauacgacuugg

SEQ ID NO: 4700 - RNA, 17 nt, Artificial Sequence
  Description of Artificial Sequence:  Nucleic Acid
  misc_feature: oligonucleotide substrate
ggaauacgacuuggagu

SEQ ID NO: 4701 - RNA, 17 nt, Artificial Sequence
  Description of Artificial Sequence:  Nucleic Acid
  misc_feature: oligonucleotide substrate
gacuuggaguugauaac

SEQ ID NO: 4702 - RNA, 17 nt, Artificial Sequence
  Description of Artificial Sequence:  Nucleic Acid
  misc_feature: oligonucleotide substrate
uggaguugauaacauca

SEQ ID NO: 4703 - RNA, 17 nt, Artificial Sequence
  Description of Artificial Sequence:  Nucleic Acid
  misc_feature: oligonucleotide substrate
aguugauaacaucaugc

SEQ ID NO: 4704 - RNA, 17 nt, Artificial Sequence
  Description of Artificial Sequence:  Nucleic Acid
  misc_feature: oligonucleotide substrate
uugauaacaucaugcuc

SEQ ID NO: 4705 - RNA, 17 nt, Artificial Sequence
  Description of Artificial Sequence:  Nucleic Acid
  misc_feature: oligonucleotide substrate
auaacaucaugcuccuc

SEQ ID NO: 4706 - RNA, 17 nt, Artificial Sequence
  Description of Artificial Sequence:  Nucleic Acid
  misc_feature: oligonucleotide substrate
aacaucaugcuccucca

SEQ ID NO: 4707 - RNA, 17 nt, Artificial Sequence
  Description of Artificial Sequence:  Nucleic Acid
  misc_feature: oligonucleotide substrate
cuccuccaacguaucag

SEQ ID NO: 4708 - RNA, 17 nt, Artificial Sequence
  Description of Artificial Sequence:  Nucleic Acid
  misc_feature: oligonucleotide substrate
ccuccaacguaucaguu

SEQ ID NO: 4709 - RNA, 17 nt, Artificial Sequence
  Description of Artificial Sequence:  Nucleic Acid
  misc_feature: oligonucleotide substrate
uccaacguaucaguugc

SEQ ID NO: 4710 - RNA, 17 nt, Artificial Sequence
  Description of Artificial Sequence:  Nucleic Acid
  misc_feature: oligonucleotide substrate
acguaucaguugcacac

SEQ ID NO: 4711 - RNA, 17 nt, Artificial Sequence
  Description of Artificial Sequence:  Nucleic Acid
  misc_feature: oligonucleotide substrate
uaucaguugcacacgau

SEQ ID NO: 4712 - RNA, 17 nt, Artificial Sequence
  Description of Artificial Sequence:  Nucleic Acid
  misc_feature: oligonucleotide substrate
ucaguugcacacgaugc

SEQ ID NO: 4713 - RNA, 17 nt, Artificial Sequence
  Description of Artificial Sequence:  Nucleic Acid
  misc_feature: oligonucleotide substrate
aguugcacacgaugcau

SEQ ID NO: 4714 - RNA, 17 nt, Artificial Sequence
  Description of Artificial Sequence:  Nucleic Acid
  misc_feature: oligonucleotide substrate
ugcacacgaugcaucug

SEQ ID NO: 4715 - RNA, 17 nt, Artificial Sequence
  Description of Artificial Sequence:  Nucleic Acid
  misc_feature: oligonucleotide substrate
cacacgaugcaucuggc

SEQ ID NO: 4716 - RNA, 17 nt, Artificial Sequence
  Description of Artificial Sequence:  Nucleic Acid
  misc_feature: oligonucleotide substrate
cacgaugcaucuggcaa

SEQ ID NO: 4717 - RNA, 17 nt, Artificial Sequence
  Description of Artificial Sequence:  Nucleic Acid
  misc_feature: oligonucleotide substrate
ugcaucuggcaaaaggg

SEQ ID NO: 4718 - RNA, 17 nt, Artificial Sequence
  Description of Artificial Sequence:  Nucleic Acid
  misc_feature: oligonucleotide substrate
gcaaaaggguguacuac

SEQ ID NO: 4719 - RNA, 17 nt, Artificial Sequence
  Description of Artificial Sequence:  Nucleic Acid
  misc_feature: oligonucleotide substrate
aaaaggguguacuaccu

SEQ ID NO: 4720 - RNA, 17 nt, Artificial Sequence
  Description of Artificial Sequence:  Nucleic Acid
  misc_feature: oligonucleotide substrate
aaggguguacuaccuca

SEQ ID NO: 4721 - RNA, 17 nt, Artificial Sequence
  Description of Artificial Sequence:  Nucleic Acid
  misc_feature: oligonucleotide substrate
gguguacuaccucaccc

SEQ ID NO: 4722 - RNA, 17 nt, Artificial Sequence
  Description of Artificial Sequence:  Nucleic Acid
  misc_feature: oligonucleotide substrate
acuaccucacccgugac

SEQ ID NO: 4723 - RNA, 17 nt, Artificial Sequence
  Description of Artificial Sequence:  Nucleic Acid
  misc_feature: oligonucleotide substrate
ccucacccgugacccca

SEQ ID NO: 4724 - RNA, 17 nt, Artificial Sequence
  Description of Artificial Sequence:  Nucleic Acid
  misc_feature: oligonucleotide substrate
cacccgugaccccacca

SEQ ID NO: 4725 - RNA, 17 nt, Artificial Sequence
  Description of Artificial Sequence:  Nucleic Acid
  misc_feature: oligonucleotide substrate
gugaccccaccaccccc

SEQ ID NO: 4726 - RNA, 17 nt, Artificial Sequence
  Description of Artificial Sequence:  Nucleic Acid
  misc_feature: oligonucleotide substrate
accccaccaccccccuu

SEQ ID NO: 4727 - RNA, 17 nt, Artificial Sequence
  Description of Artificial Sequence:  Nucleic Acid
  misc_feature: oligonucleotide substrate
ccccccuugcgcgggcu

SEQ ID NO: 4728 - RNA, 17 nt, Artificial Sequence
  Description of Artificial Sequence:  Nucleic Acid
  misc_feature: oligonucleotide substrate
ccccuugcgcgggcugc

SEQ ID NO: 4729 - RNA, 17 nt, Artificial Sequence
  Description of Artificial Sequence:  Nucleic Acid
  misc_feature: oligonucleotide substrate
uugcgcgggcugcgugg

SEQ ID NO: 4730 - RNA, 17 nt, Artificial Sequence
  Description of Artificial Sequence:  Nucleic Acid
  misc_feature: oligonucleotide substrate
cgcgggcugcgugggag

SEQ ID NO: 4731 - RNA, 17 nt, Artificial Sequence
  Description of Artificial Sequence:  Nucleic Acid
  misc_feature: oligonucleotide substrate
cgggcugcgugggagac

SEQ ID NO: 4732 - RNA, 17 nt, Artificial Sequence
  Description of Artificial Sequence:  Nucleic Acid
  misc_feature: oligonucleotide substrate
cgugggagacagcuaga

SEQ ID NO: 4733 - RNA, 17 nt, Artificial Sequence
  Description of Artificial Sequence:  Nucleic Acid
  misc_feature: oligonucleotide substrate
gggagacagcuagaagc

SEQ ID NO: 4734 - RNA, 17 nt, Artificial Sequence
  Description of Artificial Sequence:  Nucleic Acid
  misc_feature: oligonucleotide substrate
agcuagaagcacuccag

SEQ ID NO: 4735 - RNA, 17 nt, Artificial Sequence
  Description of Artificial Sequence:  Nucleic Acid
  misc_feature: oligonucleotide substrate
cuagaagcacuccaguc

SEQ ID NO: 4736 - RNA, 17 nt, Artificial Sequence
  Description of Artificial Sequence:  Nucleic Acid
  misc_feature: oligonucleotide substrate
gcacuccagucaacucc

SEQ ID NO: 4737 - RNA, 17 nt, Artificial Sequence
  Description of Artificial Sequence:  Nucleic Acid
  misc_feature: oligonucleotide substrate
uccagucaacuccuggc

SEQ ID NO: 4738 - RNA, 17 nt, Artificial Sequence
  Description of Artificial Sequence:  Nucleic Acid
  misc_feature: oligonucleotide substrate
aacuccuggcuaggcaa

SEQ ID NO: 4739 - RNA, 17 nt, Artificial Sequence
  Description of Artificial Sequence:  Nucleic Acid
  misc_feature: oligonucleotide substrate
cuggcuaggcaacauca

SEQ ID NO: 4740 - RNA, 17 nt, Artificial Sequence
  Description of Artificial Sequence:  Nucleic Acid
  misc_feature: oligonucleotide substrate
gcuaggcaacaucauca

SEQ ID NO: 4741 - RNA, 17 nt, Artificial Sequence
  Description of Artificial Sequence:  Nucleic Acid
  misc_feature: oligonucleotide substrate
uaggcaacaucaucaug

SEQ ID NO: 4742 - RNA, 17 nt, Artificial Sequence
  Description of Artificial Sequence:  Nucleic Acid
  misc_feature: oligonucleotide substrate
gcaacaucaucauguuu

SEQ ID NO: 4743 - RNA, 17 nt, Artificial Sequence
  Description of Artificial Sequence:  Nucleic Acid
  misc_feature: oligonucleotide substrate
acaucaucauguuugca

SEQ ID NO: 4744 - RNA, 17 nt, Artificial Sequence
  Description of Artificial Sequence:  Nucleic Acid
  misc_feature: oligonucleotide substrate
aucaucauguuugcacc

SEQ ID NO: 4745 - RNA, 17 nt, Artificial Sequence
  Description of Artificial Sequence:  Nucleic Acid
  misc_feature: oligonucleotide substrate
ucauguuugcacccacu

SEQ ID NO: 4746 - RNA, 17 nt, Artificial Sequence
  Description of Artificial Sequence:  Nucleic Acid
  misc_feature: oligonucleotide substrate
auguuugcacccacucu

SEQ ID NO: 4747 - RNA, 17 nt, Artificial Sequence
  Description of Artificial Sequence:  Nucleic Acid
  misc_feature: oligonucleotide substrate
uugcacccacucuaugg

SEQ ID NO: 4748 - RNA, 17 nt, Artificial Sequence
  Description of Artificial Sequence:  Nucleic Acid
  misc_feature: oligonucleotide substrate
cccacucuauggguaag

SEQ ID NO: 4749 - RNA, 17 nt, Artificial Sequence
  Description of Artificial Sequence:  Nucleic Acid
  misc_feature: oligonucleotide substrate
cucuauggguaaggaug

SEQ ID NO: 4750 - RNA, 17 nt, Artificial Sequence
  Description of Artificial Sequence:  Nucleic Acid
  misc_feature: oligonucleotide substrate
ggguaaggaugauucug

SEQ ID NO: 4751 - RNA, 17 nt, Artificial Sequence
  Description of Artificial Sequence:  Nucleic Acid
  misc_feature: oligonucleotide substrate
uaaggaugauucugaug

SEQ ID NO: 4752 - RNA, 17 nt, Artificial Sequence
  Description of Artificial Sequence:  Nucleic Acid
  misc_feature: oligonucleotide substrate
ugauucugaugacucac

SEQ ID NO: 4753 - RNA, 17 nt, Artificial Sequence
  Description of Artificial Sequence:  Nucleic Acid
  misc_feature: oligonucleotide substrate
uucugaugacucacuuc

SEQ ID NO: 4754 - RNA, 17 nt, Artificial Sequence
  Description of Artificial Sequence:  Nucleic Acid
  misc_feature: oligonucleotide substrate
gaugacucacuucuucu

SEQ ID NO: 4755 - RNA, 17 nt, Artificial Sequence
  Description of Artificial Sequence:  Nucleic Acid
  misc_feature: oligonucleotide substrate
ucuucuccauccuucua

SEQ ID NO: 4756 - RNA, 17 nt, Artificial Sequence
  Description of Artificial Sequence:  Nucleic Acid
  misc_feature: oligonucleotide substrate
uccuucuagcccaggag

SEQ ID NO: 4757 - RNA, 17 nt, Artificial Sequence
  Description of Artificial Sequence:  Nucleic Acid
  misc_feature: oligonucleotide substrate
gcccaggagcaacuuga

SEQ ID NO: 4758 - RNA, 17 nt, Artificial Sequence
  Description of Artificial Sequence:  Nucleic Acid
  misc_feature: oligonucleotide substrate
caggagcaacuugagaa

SEQ ID NO: 4759 - RNA, 17 nt, Artificial Sequence
  Description of Artificial Sequence:  Nucleic Acid
  misc_feature: oligonucleotide substrate
uugagaaagcccuagac

SEQ ID NO: 4760 - RNA, 17 nt, Artificial Sequence
  Description of Artificial Sequence:  Nucleic Acid
  misc_feature: oligonucleotide substrate
agcccuagacugccaga

SEQ ID NO: 4761 - RNA, 17 nt, Artificial Sequence
  Description of Artificial Sequence:  Nucleic Acid
  misc_feature: oligonucleotide substrate
ccuagacugccagaucu

SEQ ID NO: 4762 - RNA, 17 nt, Artificial Sequence
  Description of Artificial Sequence:  Nucleic Acid
  misc_feature: oligonucleotide substrate
acugccagaucuacggg

SEQ ID NO: 4763 - RNA, 17 nt, Artificial Sequence
  Description of Artificial Sequence:  Nucleic Acid
  misc_feature: oligonucleotide substrate
ccagaucuacggggcuu

SEQ ID NO: 4764 - RNA, 17 nt, Artificial Sequence
  Description of Artificial Sequence:  Nucleic Acid
  misc_feature: oligonucleotide substrate
ucuacggggcuuguuac

SEQ ID NO: 4765 - RNA, 17 nt, Artificial Sequence
  Description of Artificial Sequence:  Nucleic Acid
  misc_feature: oligonucleotide substrate
cggggcuuguuacucca

SEQ ID NO: 4766 - RNA, 17 nt, Artificial Sequence
  Description of Artificial Sequence:  Nucleic Acid
  misc_feature: oligonucleotide substrate
ggcuuguuacuccauug

SEQ ID NO: 4767 - RNA, 17 nt, Artificial Sequence
  Description of Artificial Sequence:  Nucleic Acid
  misc_feature: oligonucleotide substrate
guuacuccauugagcca

SEQ ID NO: 4768 - RNA, 17 nt, Artificial Sequence
  Description of Artificial Sequence:  Nucleic Acid
  misc_feature: oligonucleotide substrate
uccauugagccacuuga

SEQ ID NO: 4769 - RNA, 17 nt, Artificial Sequence
  Description of Artificial Sequence:  Nucleic Acid
  misc_feature: oligonucleotide substrate
auugagccacuugaccu

SEQ ID NO: 4770 - RNA, 17 nt, Artificial Sequence
  Description of Artificial Sequence:  Nucleic Acid
  misc_feature: oligonucleotide substrate
gccacuugaccuaccuc

SEQ ID NO: 4771 - RNA, 17 nt, Artificial Sequence
  Description of Artificial Sequence:  Nucleic Acid
  misc_feature: oligonucleotide substrate
cuugaccuaccucagau

SEQ ID NO: 4772 - RNA, 17 nt, Artificial Sequence
  Description of Artificial Sequence:  Nucleic Acid
  misc_feature: oligonucleotide substrate
uaccucagaucauucag

SEQ ID NO: 4773 - RNA, 17 nt, Artificial Sequence
  Description of Artificial Sequence:  Nucleic Acid
  misc_feature: oligonucleotide substrate
cucagaucauucagcga

SEQ ID NO: 4774 - RNA, 17 nt, Artificial Sequence
  Description of Artificial Sequence:  Nucleic Acid
  misc_feature: oligonucleotide substrate
aucauucagcgacucca

SEQ ID NO: 4775 - RNA, 17 nt, Artificial Sequence
  Description of Artificial Sequence:  Nucleic Acid
  misc_feature: oligonucleotide substrate
auucagcgacuccaugg

SEQ ID NO: 4776 - RNA, 17 nt, Artificial Sequence
  Description of Artificial Sequence:  Nucleic Acid
  misc_feature: oligonucleotide substrate
gcgacuccauggucuua

SEQ ID NO: 4777 - RNA, 17 nt, Artificial Sequence
  Description of Artificial Sequence:  Nucleic Acid
  misc_feature: oligonucleotide substrate
acuccauggucuuagcg

SEQ ID NO: 4778 - RNA, 17 nt, Artificial Sequence
  Description of Artificial Sequence:  Nucleic Acid
  misc_feature: oligonucleotide substrate
uggucuuagcgcauuuu

SEQ ID NO: 4779 - RNA, 17 nt, Artificial Sequence
  Description of Artificial Sequence:  Nucleic Acid
  misc_feature: oligonucleotide substrate
gucuuagcgcauuuuca

SEQ ID NO: 4780 - RNA, 17 nt, Artificial Sequence
  Description of Artificial Sequence:  Nucleic Acid
  misc_feature: oligonucleotide substrate
cuuagcgcauuuucacu

SEQ ID NO: 4781 - RNA, 17 nt, Artificial Sequence
  Description of Artificial Sequence:  Nucleic Acid
  misc_feature: oligonucleotide substrate
gcauuuucacuccauag

SEQ ID NO: 4782 - RNA, 17 nt, Artificial Sequence
  Description of Artificial Sequence:  Nucleic Acid
  misc_feature: oligonucleotide substrate
uucacuccauaguuacu

SEQ ID NO: 4783 - RNA, 17 nt, Artificial Sequence
  Description of Artificial Sequence:  Nucleic Acid
  misc_feature: oligonucleotide substrate
acuccauaguuacuccc

SEQ ID NO: 4784 - RNA, 17 nt, Artificial Sequence
  Description of Artificial Sequence:  Nucleic Acid
  misc_feature: oligonucleotide substrate
ccauaguuacuccccag

SEQ ID NO: 4785 - RNA, 17 nt, Artificial Sequence
  Description of Artificial Sequence:  Nucleic Acid
  misc_feature: oligonucleotide substrate
cuccccaggugaaauca

SEQ ID NO: 4786 - RNA, 17 nt, Artificial Sequence
  Description of Artificial Sequence:  Nucleic Acid
  misc_feature: oligonucleotide substrate
caggugaaaucaauagg

SEQ ID NO: 4787 - RNA, 17 nt, Artificial Sequence
  Description of Artificial Sequence:  Nucleic Acid
  misc_feature: oligonucleotide substrate
ugaaaucaauagggugg

SEQ ID NO: 4788 - RNA, 17 nt, Artificial Sequence
  Description of Artificial Sequence:  Nucleic Acid
  misc_feature: oligonucleotide substrate
ucaauaggguggcauca

SEQ ID NO: 4789 - RNA, 17 nt, Artificial Sequence
  Description of Artificial Sequence:  Nucleic Acid
  misc_feature: oligonucleotide substrate
auaggguggcaucaugc

SEQ ID NO: 4790 - RNA, 17 nt, Artificial Sequence
  Description of Artificial Sequence:  Nucleic Acid
  misc_feature: oligonucleotide substrate
aggguggcaucaugccu

SEQ ID NO: 4791 - RNA, 17 nt, Artificial Sequence
  Description of Artificial Sequence:  Nucleic Acid
  misc_feature: oligonucleotide substrate
guggcaucaugccucag

SEQ ID NO: 4792 - RNA, 17 nt, Artificial Sequence
  Description of Artificial Sequence:  Nucleic Acid
  misc_feature: oligonucleotide substrate
ggcaucaugccucagga

SEQ ID NO: 4793 - RNA, 17 nt, Artificial Sequence
  Description of Artificial Sequence:  Nucleic Acid
  misc_feature: oligonucleotide substrate
cucaggaaacuuggggu

SEQ ID NO: 4794 - RNA, 17 nt, Artificial Sequence
  Description of Artificial Sequence:  Nucleic Acid
  misc_feature: oligonucleotide substrate
aacuugggguaccaccc

SEQ ID NO: 4795 - RNA, 17 nt, Artificial Sequence
  Description of Artificial Sequence:  Nucleic Acid
  misc_feature: oligonucleotide substrate
cuugggguaccacccuu

SEQ ID NO: 4796 - RNA, 17 nt, Artificial Sequence
  Description of Artificial Sequence:  Nucleic Acid
  misc_feature: oligonucleotide substrate
gggguaccacccuugcg

SEQ ID NO: 4797 - RNA, 17 nt, Artificial Sequence
  Description of Artificial Sequence:  Nucleic Acid
  misc_feature: oligonucleotide substrate
ccacccuugcgaaccug

SEQ ID NO: 4798 - RNA, 17 nt, Artificial Sequence
  Description of Artificial Sequence:  Nucleic Acid
  misc_feature: oligonucleotide substrate
ccuugcgaaccuggaga

SEQ ID NO: 4799 - RNA, 17 nt, Artificial Sequence
  Description of Artificial Sequence:  Nucleic Acid
  misc_feature: oligonucleotide substrate
accuggagacaucgggc

SEQ ID NO: 4800 - RNA, 17 nt, Artificial Sequence
  Description of Artificial Sequence:  Nucleic Acid
  misc_feature: oligonucleotide substrate
cuggagacaucgggcca

SEQ ID NO: 4801 - RNA, 17 nt, Artificial Sequence
  Description of Artificial Sequence:  Nucleic Acid
  misc_feature: oligonucleotide substrate
gacaucgggccagaagu

SEQ ID NO: 4802 - RNA, 17 nt, Artificial Sequence
  Description of Artificial Sequence:  Nucleic Acid
  misc_feature: oligonucleotide substrate
ggccagaaguguucgcg

SEQ ID NO: 4803 - RNA, 17 nt, Artificial Sequence
  Description of Artificial Sequence:  Nucleic Acid
  misc_feature: oligonucleotide substrate
ccagaaguguucgcgcu

SEQ ID NO: 4804 - RNA, 17 nt, Artificial Sequence
  Description of Artificial Sequence:  Nucleic Acid
  misc_feature: oligonucleotide substrate
aaguguucgcgcuaagc

SEQ ID NO: 4805 - RNA, 17 nt, Artificial Sequence
  Description of Artificial Sequence:  Nucleic Acid
  misc_feature: oligonucleotide substrate
guguucgcgcuaagcua

SEQ ID NO: 4806 - RNA, 17 nt, Artificial Sequence
  Description of Artificial Sequence:  Nucleic Acid
  misc_feature: oligonucleotide substrate
cgcgcuaagcuacuguc

SEQ ID NO: 4807 - RNA, 17 nt, Artificial Sequence
  Description of Artificial Sequence:  Nucleic Acid
  misc_feature: oligonucleotide substrate
gcuaagcuacuguccca

SEQ ID NO: 4808 - RNA, 17 nt, Artificial Sequence
  Description of Artificial Sequence:  Nucleic Acid
  misc_feature: oligonucleotide substrate
aagcuacugucccaggg

SEQ ID NO: 4809 - RNA, 17 nt, Artificial Sequence
  Description of Artificial Sequence:  Nucleic Acid
  misc_feature: oligonucleotide substrate
gggggagggccgccacc

SEQ ID NO: 4810 - RNA, 17 nt, Artificial Sequence
  Description of Artificial Sequence:  Nucleic Acid
  misc_feature: oligonucleotide substrate
ggagggccgccaccugu

SEQ ID NO: 4811 - RNA, 17 nt, Artificial Sequence
  Description of Artificial Sequence:  Nucleic Acid
  misc_feature: oligonucleotide substrate
gggccgccaccuguggc

SEQ ID NO: 4812 - RNA, 17 nt, Artificial Sequence
  Description of Artificial Sequence:  Nucleic Acid
  misc_feature: oligonucleotide substrate
cgccaccuguggcaggu

SEQ ID NO: 4813 - RNA, 17 nt, Artificial Sequence
  Description of Artificial Sequence:  Nucleic Acid
  misc_feature: oligonucleotide substrate
caccuguggcagguacc

SEQ ID NO: 4814 - RNA, 17 nt, Artificial Sequence
  Description of Artificial Sequence:  Nucleic Acid
  misc_feature: oligonucleotide substrate
uguggcagguaccucuu

SEQ ID NO: 4815 - RNA, 17 nt, Artificial Sequence
  Description of Artificial Sequence:  Nucleic Acid
  misc_feature: oligonucleotide substrate
uggcagguaccucuuca

SEQ ID NO: 4816 - RNA, 17 nt, Artificial Sequence
  Description of Artificial Sequence:  Nucleic Acid
  misc_feature: oligonucleotide substrate
ccucuucaacugggcag

SEQ ID NO: 4817 - RNA, 17 nt, Artificial Sequence
  Description of Artificial Sequence:  Nucleic Acid
  misc_feature: oligonucleotide substrate
ucaacugggcaguaaag

SEQ ID NO: 4818 - RNA, 17 nt, Artificial Sequence
  Description of Artificial Sequence:  Nucleic Acid
  misc_feature: oligonucleotide substrate
acugggcaguaaagacc

SEQ ID NO: 4819 - RNA, 17 nt, Artificial Sequence
  Description of Artificial Sequence:  Nucleic Acid
  misc_feature: oligonucleotide substrate
caguaaagaccaaacuc

SEQ ID NO: 4820 - RNA, 17 nt, Artificial Sequence
  Description of Artificial Sequence:  Nucleic Acid
  misc_feature: oligonucleotide substrate
aagaccaaacucaaacu

SEQ ID NO: 4821 - RNA, 17 nt, Artificial Sequence
  Description of Artificial Sequence:  Nucleic Acid
  misc_feature: oligonucleotide substrate
aaacucaaacucacucc

SEQ ID NO: 4822 - RNA, 17 nt, Artificial Sequence
  Description of Artificial Sequence:  Nucleic Acid
  misc_feature: oligonucleotide substrate
ucaaacucacuccaauc

SEQ ID NO: 4823 - RNA, 17 nt, Artificial Sequence
  Description of Artificial Sequence:  Nucleic Acid
  misc_feature: oligonucleotide substrate
ucacuccaaucccagcu

SEQ ID NO: 4824 - RNA, 17 nt, Artificial Sequence
  Description of Artificial Sequence:  Nucleic Acid
  misc_feature: oligonucleotide substrate
caaucccagcugcgucu

SEQ ID NO: 4825 - RNA, 17 nt, Artificial Sequence
  Description of Artificial Sequence:  Nucleic Acid
  misc_feature: oligonucleotide substrate
ucccagcugcgucucag

SEQ ID NO: 4826 - RNA, 17 nt, Artificial Sequence
  Description of Artificial Sequence:  Nucleic Acid
  misc_feature: oligonucleotide substrate
ccagcugcgucucaguu

SEQ ID NO: 4827 - RNA, 17 nt, Artificial Sequence
  Description of Artificial Sequence:  Nucleic Acid
  misc_feature: oligonucleotide substrate
gcgucucaguuggacuu

SEQ ID NO: 4828 - RNA, 17 nt, Artificial Sequence
  Description of Artificial Sequence:  Nucleic Acid
  misc_feature: oligonucleotide substrate
ucaguuggacuugucca

SEQ ID NO: 4829 - RNA, 17 nt, Artificial Sequence
  Description of Artificial Sequence:  Nucleic Acid
  misc_feature: oligonucleotide substrate
uuggacuuguccaacug

SEQ ID NO: 4830 - RNA, 17 nt, Artificial Sequence
  Description of Artificial Sequence:  Nucleic Acid
  misc_feature: oligonucleotide substrate
cuuguccaacugguucg

SEQ ID NO: 4831 - RNA, 17 nt, Artificial Sequence
  Description of Artificial Sequence:  Nucleic Acid
  misc_feature: oligonucleotide substrate
uccaacugguucguugc

SEQ ID NO: 4832 - RNA, 17 nt, Artificial Sequence
  Description of Artificial Sequence:  Nucleic Acid
  misc_feature: oligonucleotide substrate
acugguucguugcuggc

SEQ ID NO: 4833 - RNA, 17 nt, Artificial Sequence
  Description of Artificial Sequence:  Nucleic Acid
  misc_feature: oligonucleotide substrate
gguucguugcuggcuac

SEQ ID NO: 4834 - RNA, 17 nt, Artificial Sequence
  Description of Artificial Sequence:  Nucleic Acid
  misc_feature: oligonucleotide substrate
cguugcuggcuacagcg

SEQ ID NO: 4835 - RNA, 17 nt, Artificial Sequence
  Description of Artificial Sequence:  Nucleic Acid
  misc_feature: oligonucleotide substrate
ugcuggcuacagcgggg

SEQ ID NO: 4836 - RNA, 17 nt, Artificial Sequence
  Description of Artificial Sequence:  Nucleic Acid
  misc_feature: oligonucleotide substrate
uggcuacagcgggggag

SEQ ID NO: 4837 - RNA, 17 nt, Artificial Sequence
  Description of Artificial Sequence:  Nucleic Acid
  misc_feature: oligonucleotide substrate
cgggggagacguguauc

SEQ ID NO: 4838 - RNA, 17 nt, Artificial Sequence
  Description of Artificial Sequence:  Nucleic Acid
  misc_feature: oligonucleotide substrate
ggggagacguguaucac

SEQ ID NO: 4839 - RNA, 17 nt, Artificial Sequence
  Description of Artificial Sequence:  Nucleic Acid
  misc_feature: oligonucleotide substrate
ggagacguguaucacag

SEQ ID NO: 4840 - RNA, 17 nt, Artificial Sequence
  Description of Artificial Sequence:  Nucleic Acid
  misc_feature: oligonucleotide substrate
agacguguaucacagcc

SEQ ID NO: 4841 - RNA, 17 nt, Artificial Sequence
  Description of Artificial Sequence:  Nucleic Acid
  misc_feature: oligonucleotide substrate
cguguaucacagccugu

SEQ ID NO: 4842 - RNA, 17 nt, Artificial Sequence
  Description of Artificial Sequence:  Nucleic Acid
  misc_feature: oligonucleotide substrate
guaucacagccugucuc

SEQ ID NO: 4843 - RNA, 17 nt, Artificial Sequence
  Description of Artificial Sequence:  Nucleic Acid
  misc_feature: oligonucleotide substrate
cacagccugucucgugc

SEQ ID NO: 4844 - RNA, 17 nt, Artificial Sequence
  Description of Artificial Sequence:  Nucleic Acid
  misc_feature: oligonucleotide substrate
ccugucucgugcccgac

SEQ ID NO: 4845 - RNA, 17 nt, Artificial Sequence
  Description of Artificial Sequence:  Nucleic Acid
  misc_feature: oligonucleotide substrate
ugucucgugcccgaccc

SEQ ID NO: 4846 - RNA, 17 nt, Artificial Sequence
  Description of Artificial Sequence:  Nucleic Acid
  misc_feature: oligonucleotide substrate
cgugcccgaccccgcug

SEQ ID NO: 4847 - RNA, 17 nt, Artificial Sequence
  Description of Artificial Sequence:  Nucleic Acid
  misc_feature: oligonucleotide substrate
ccgaccccgcugguuca

SEQ ID NO: 4848 - RNA, 17 nt, Artificial Sequence
  Description of Artificial Sequence:  Nucleic Acid
  misc_feature: oligonucleotide substrate
ccccgcugguucaugcu

SEQ ID NO: 4849 - RNA, 17 nt, Artificial Sequence
  Description of Artificial Sequence:  Nucleic Acid
  misc_feature: oligonucleotide substrate
gcugguucaugcuuugc

SEQ ID NO: 4850 - RNA, 17 nt, Artificial Sequence
  Description of Artificial Sequence:  Nucleic Acid
  misc_feature: oligonucleotide substrate
ugguucaugcuuugccu

SEQ ID NO: 4851 - RNA, 17 nt, Artificial Sequence
  Description of Artificial Sequence:  Nucleic Acid
  misc_feature: oligonucleotide substrate
caugcuuugccuacucc

SEQ ID NO: 4852 - RNA, 17 nt, Artificial Sequence
  Description of Artificial Sequence:  Nucleic Acid
  misc_feature: oligonucleotide substrate
cuuugccuacuccuacu

SEQ ID NO: 4853 - RNA, 17 nt, Artificial Sequence
  Description of Artificial Sequence:  Nucleic Acid
  misc_feature: oligonucleotide substrate
cuacuccuacucuccgu

SEQ ID NO: 4854 - RNA, 17 nt, Artificial Sequence
  Description of Artificial Sequence:  Nucleic Acid
  misc_feature: oligonucleotide substrate
uacucuccguaggggua

SEQ ID NO: 4855 - RNA, 17 nt, Artificial Sequence
  Description of Artificial Sequence:  Nucleic Acid
  misc_feature: oligonucleotide substrate
ccguagggguaggcauc

SEQ ID NO: 4856 - RNA, 17 nt, Artificial Sequence
  Description of Artificial Sequence:  Nucleic Acid
  misc_feature: oligonucleotide substrate
agggguaggcaucuacc

SEQ ID NO: 4857 - RNA, 17 nt, Artificial Sequence
  Description of Artificial Sequence:  Nucleic Acid
  misc_feature: oligonucleotide substrate
ggguaggcaucuaccug

SEQ ID NO: 4858 - RNA, 17 nt, Artificial Sequence
  Description of Artificial Sequence:  Nucleic Acid
  misc_feature: oligonucleotide substrate
aggcaucuaccugcucc

SEQ ID NO: 4859 - RNA, 17 nt, Artificial Sequence
  Description of Artificial Sequence:  Nucleic Acid
  misc_feature: oligonucleotide substrate
aucuaccugcuccccaa

SEQ ID NO: 4860 - RNA, 17 nt, Artificial Sequence
  Description of Artificial Sequence:  Nucleic Acid
  misc_feature: oligonucleotide substrate
gcuccccaaccgaugaa

SEQ ID NO: 4861 - RNA, 17 nt, Artificial Sequence
  Description of Artificial Sequence:  Nucleic Acid
  misc_feature: oligonucleotide substrate
cccaaccgaugaacagg

SEQ ID NO: 4862 - RNA, 17 nt, Artificial Sequence
  Description of Artificial Sequence:  Nucleic Acid
  misc_feature: oligonucleotide substrate
accgaugaacagggagc

SEQ ID NO: 4863 - RNA, 17 nt, Artificial Sequence
  Description of Artificial Sequence:  Nucleic Acid
  misc_feature: oligonucleotide substrate
aacagggagcuaaacac

SEQ ID NO: 4864 - RNA, 17 nt, Artificial Sequence
  Description of Artificial Sequence:  Nucleic Acid
  misc_feature: oligonucleotide substrate
ggagcuaaacacuccag

SEQ ID NO: 4865 - RNA, 17 nt, Artificial Sequence
  Description of Artificial Sequence:  Nucleic Acid
  misc_feature: oligonucleotide substrate
agcuaaacacuccaggc

SEQ ID NO: 4866 - RNA, 17 nt, Artificial Sequence
  Description of Artificial Sequence:  Nucleic Acid
  misc_feature: oligonucleotide substrate
cacuccaggccaauagg

SEQ ID NO: 4867 - RNA, 17 nt, Artificial Sequence
  Description of Artificial Sequence:  Nucleic Acid
  misc_feature: oligonucleotide substrate
ccaggccaauaggccau

SEQ ID NO: 4868 - RNA, 17 nt, Artificial Sequence
  Description of Artificial Sequence:  Nucleic Acid
  misc_feature: oligonucleotide substrate
gccaauaggccaucccg

SEQ ID NO: 4869 - RNA, 17 nt, Artificial Sequence
  Description of Artificial Sequence:  Nucleic Acid
  misc_feature: oligonucleotide substrate
aauaggccaucccguuu

SEQ ID NO: 4870 - RNA, 17 nt, Artificial Sequence
  Description of Artificial Sequence:  Nucleic Acid
  misc_feature: oligonucleotide substrate
gccaucccguuuuuuuu

SEQ ID NO: 4871 - RNA, 17 nt, Artificial Sequence
  Description of Artificial Sequence:  Nucleic Acid
  misc_feature: oligonucleotide substrate
aaaaaaaaacgggaugg

SEQ ID NO: 4872 - RNA, 17 nt, Artificial Sequence
  Description of Artificial Sequence:  Nucleic Acid
  misc_feature: oligonucleotide substrate
aaaacgggauggccuau

SEQ ID NO: 4873 - RNA, 17 nt, Artificial Sequence
  Description of Artificial Sequence:  Nucleic Acid
  misc_feature: oligonucleotide substrate
acgggauggccuauugg

SEQ ID NO: 4874 - RNA, 17 nt, Artificial Sequence
  Description of Artificial Sequence:  Nucleic Acid
  misc_feature: oligonucleotide substrate
gauggccuauuggccug

SEQ ID NO: 4875 - RNA, 17 nt, Artificial Sequence
  Description of Artificial Sequence:  Nucleic Acid
  misc_feature: oligonucleotide substrate
gccuauuggccuggagu

SEQ ID NO: 4876 - RNA, 17 nt, Artificial Sequence
  Description of Artificial Sequence:  Nucleic Acid
  misc_feature: oligonucleotide substrate
ggccuggaguguuuagc

SEQ ID NO: 4877 - RNA, 17 nt, Artificial Sequence
  Description of Artificial Sequence:  Nucleic Acid
  misc_feature: oligonucleotide substrate
ccuggaguguuuagcuc

SEQ ID NO: 4878 - RNA, 17 nt, Artificial Sequence
  Description of Artificial Sequence:  Nucleic Acid
  misc_feature: oligonucleotide substrate
aguguuuagcucccugu

SEQ ID NO: 4879 - RNA, 17 nt, Artificial Sequence
  Description of Artificial Sequence:  Nucleic Acid
  misc_feature: oligonucleotide substrate
agcucccuguucaucgg

SEQ ID NO: 4880 - RNA, 17 nt, Artificial Sequence
  Description of Artificial Sequence:  Nucleic Acid
  misc_feature: oligonucleotide substrate
cccuguucaucgguugg

SEQ ID NO: 4881 - RNA, 17 nt, Artificial Sequence
  Description of Artificial Sequence:  Nucleic Acid
  misc_feature: oligonucleotide substrate
guucaucgguuggggag

SEQ ID NO: 4882 - RNA, 17 nt, Artificial Sequence
  Description of Artificial Sequence:  Nucleic Acid
  misc_feature: oligonucleotide substrate
guuggggagcagguaga

SEQ ID NO: 4883 - RNA, 17 nt, Artificial Sequence
  Description of Artificial Sequence:  Nucleic Acid
  misc_feature: oligonucleotide substrate
gggagcagguagaugcc

SEQ ID NO: 4884 - RNA, 17 nt, Artificial Sequence
  Description of Artificial Sequence:  Nucleic Acid
  misc_feature: oligonucleotide substrate
gcagguagaugccuacc

SEQ ID NO: 4885 - RNA, 17 nt, Artificial Sequence
  Description of Artificial Sequence:  Nucleic Acid
  misc_feature: oligonucleotide substrate
agguagaugccuacccc

SEQ ID NO: 4886 - RNA, 17 nt, Artificial Sequence
  Description of Artificial Sequence:  Nucleic Acid
  misc_feature: oligonucleotide substrate
agaugccuaccccuacg

SEQ ID NO: 4887 - RNA, 17 nt, Artificial Sequence
  Description of Artificial Sequence:  Nucleic Acid
  misc_feature: oligonucleotide substrate
cuaccccuacggagagu

SEQ ID NO: 4888 - RNA, 17 nt, Artificial Sequence
  Description of Artificial Sequence:  Nucleic Acid
  misc_feature: oligonucleotide substrate
uacggagaguaggagua

SEQ ID NO: 4889 - RNA, 17 nt, Artificial Sequence
  Description of Artificial Sequence:  Nucleic Acid
  misc_feature: oligonucleotide substrate
gaguaggaguaggcaaa

SEQ ID NO: 4890 - RNA, 17 nt, Artificial Sequence
  Description of Artificial Sequence:  Nucleic Acid
  misc_feature: oligonucleotide substrate
aggaguaggcaaagcau

SEQ ID NO: 4891 - RNA, 17 nt, Artificial Sequence
  Description of Artificial Sequence:  Nucleic Acid
  misc_feature: oligonucleotide substrate
uaggcaaagcaugaacc

SEQ ID NO: 4892 - RNA, 17 nt, Artificial Sequence
  Description of Artificial Sequence:  Nucleic Acid
  misc_feature: oligonucleotide substrate
ggcaaagcaugaaccag

SEQ ID NO: 4893 - RNA, 17 nt, Artificial Sequence
  Description of Artificial Sequence:  Nucleic Acid
  misc_feature: oligonucleotide substrate
aagcaugaaccagcggg

SEQ ID NO: 4894 - RNA, 17 nt, Artificial Sequence
  Description of Artificial Sequence:  Nucleic Acid
  misc_feature: oligonucleotide substrate
augaaccagcggggucg

SEQ ID NO: 4895 - RNA, 17 nt, Artificial Sequence
  Description of Artificial Sequence:  Nucleic Acid
  misc_feature: oligonucleotide substrate
ccagcggggucgggcac

SEQ ID NO: 4896 - RNA, 17 nt, Artificial Sequence
  Description of Artificial Sequence:  Nucleic Acid
  misc_feature: oligonucleotide substrate
ggggucgggcacgagac

SEQ ID NO: 4897 - RNA, 17 nt, Artificial Sequence
  Description of Artificial Sequence:  Nucleic Acid
  misc_feature: oligonucleotide substrate
ggucgggcacgagacag

SEQ ID NO: 4898 - RNA, 17 nt, Artificial Sequence
  Description of Artificial Sequence:  Nucleic Acid
  misc_feature: oligonucleotide substrate
ggcacgagacaggcugu

SEQ ID NO: 4899 - RNA, 17 nt, Artificial Sequence
  Description of Artificial Sequence:  Nucleic Acid
  misc_feature: oligonucleotide substrate
cgagacaggcugugaua

SEQ ID NO: 4900 - RNA, 17 nt, Artificial Sequence
  Description of Artificial Sequence:  Nucleic Acid
  misc_feature: oligonucleotide substrate
gacaggcugugauacac

SEQ ID NO: 4901 - RNA, 17 nt, Artificial Sequence
  Description of Artificial Sequence:  Nucleic Acid
  misc_feature: oligonucleotide substrate
aggcugugauacacguc

SEQ ID NO: 4902 - RNA, 17 nt, Artificial Sequence
  Description of Artificial Sequence:  Nucleic Acid
  misc_feature: oligonucleotide substrate
gcugugauacacgucuc

SEQ ID NO: 4903 - RNA, 17 nt, Artificial Sequence
  Description of Artificial Sequence:  Nucleic Acid
  misc_feature: oligonucleotide substrate
ugugauacacgucuccc

SEQ ID NO: 4904 - RNA, 17 nt, Artificial Sequence
  Description of Artificial Sequence:  Nucleic Acid
  misc_feature: oligonucleotide substrate
ugauacacgucuccccc

SEQ ID NO: 4905 - RNA, 17 nt, Artificial Sequence
  Description of Artificial Sequence:  Nucleic Acid
  misc_feature: oligonucleotide substrate
ucucccccgcuguagcc

SEQ ID NO: 4906 - RNA, 17 nt, Artificial Sequence
  Description of Artificial Sequence:  Nucleic Acid
  misc_feature: oligonucleotide substrate
cccccgcuguagccagc

SEQ ID NO: 4907 - RNA, 17 nt, Artificial Sequence
  Description of Artificial Sequence:  Nucleic Acid
  misc_feature: oligonucleotide substrate
ccgcuguagccagcaac

SEQ ID NO: 4908 - RNA, 17 nt, Artificial Sequence
  Description of Artificial Sequence:  Nucleic Acid
  misc_feature: oligonucleotide substrate
uguagccagcaacgaac

SEQ ID NO: 4909 - RNA, 17 nt, Artificial Sequence
  Description of Artificial Sequence:  Nucleic Acid
  misc_feature: oligonucleotide substrate
agccagcaacgaaccag

SEQ ID NO: 4910 - RNA, 17 nt, Artificial Sequence
  Description of Artificial Sequence:  Nucleic Acid
  misc_feature: oligonucleotide substrate
agcaacgaaccaguugg

SEQ ID NO: 4911 - RNA, 17 nt, Artificial Sequence
  Description of Artificial Sequence:  Nucleic Acid
  misc_feature: oligonucleotide substrate
acgaaccaguuggacaa

SEQ ID NO: 4912 - RNA, 17 nt, Artificial Sequence
  Description of Artificial Sequence:  Nucleic Acid
  misc_feature: oligonucleotide substrate
ccaguuggacaagucca

SEQ ID NO: 4913 - RNA, 17 nt, Artificial Sequence
  Description of Artificial Sequence:  Nucleic Acid
  misc_feature: oligonucleotide substrate
uuggacaaguccaacug

SEQ ID NO: 4914 - RNA, 17 nt, Artificial Sequence
  Description of Artificial Sequence:  Nucleic Acid
  misc_feature: oligonucleotide substrate
caaguccaacugagacg

SEQ ID NO: 4915 - RNA, 17 nt, Artificial Sequence
  Description of Artificial Sequence:  Nucleic Acid
  misc_feature: oligonucleotide substrate
caacugagacgcagcug

SEQ ID NO: 4916 - RNA, 17 nt, Artificial Sequence
  Description of Artificial Sequence:  Nucleic Acid
  misc_feature: oligonucleotide substrate
acugagacgcagcuggg

SEQ ID NO: 4917 - RNA, 17 nt, Artificial Sequence
  Description of Artificial Sequence:  Nucleic Acid
  misc_feature: oligonucleotide substrate
gagacgcagcugggauu

SEQ ID NO: 4918 - RNA, 17 nt, Artificial Sequence
  Description of Artificial Sequence:  Nucleic Acid
  misc_feature: oligonucleotide substrate
cagcugggauuggagug

SEQ ID NO: 4919 - RNA, 17 nt, Artificial Sequence
  Description of Artificial Sequence:  Nucleic Acid
  misc_feature: oligonucleotide substrate
ggauuggagugaguuug

SEQ ID NO: 4920 - RNA, 17 nt, Artificial Sequence
  Description of Artificial Sequence:  Nucleic Acid
  misc_feature: oligonucleotide substrate
uggagugaguuugaguu

SEQ ID NO: 4921 - RNA, 17 nt, Artificial Sequence
  Description of Artificial Sequence:  Nucleic Acid
  misc_feature: oligonucleotide substrate
gaguuugaguuuggucu

SEQ ID NO: 4922 - RNA, 17 nt, Artificial Sequence
  Description of Artificial Sequence:  Nucleic Acid
  misc_feature: oligonucleotide substrate
ugaguuuggucuuuacu

SEQ ID NO: 4923 - RNA, 17 nt, Artificial Sequence
  Description of Artificial Sequence:  Nucleic Acid
  misc_feature: oligonucleotide substrate
uggucuuuacugcccag

SEQ ID NO: 4924 - RNA, 17 nt, Artificial Sequence
  Description of Artificial Sequence:  Nucleic Acid
  misc_feature: oligonucleotide substrate
ucuuuacugcccaguug

SEQ ID NO: 4925 - RNA, 17 nt, Artificial Sequence
  Description of Artificial Sequence:  Nucleic Acid
  misc_feature: oligonucleotide substrate
acugcccaguugaagag

SEQ ID NO: 4926 - RNA, 17 nt, Artificial Sequence
  Description of Artificial Sequence:  Nucleic Acid
  misc_feature: oligonucleotide substrate
uugaagagguaccugcc

SEQ ID NO: 4927 - RNA, 17 nt, Artificial Sequence
  Description of Artificial Sequence:  Nucleic Acid
  misc_feature: oligonucleotide substrate
gaagagguaccugccac

SEQ ID NO: 4928 - RNA, 17 nt, Artificial Sequence
  Description of Artificial Sequence:  Nucleic Acid
  misc_feature: oligonucleotide substrate
agguaccugccacaggu

SEQ ID NO: 4929 - RNA, 17 nt, Artificial Sequence
  Description of Artificial Sequence:  Nucleic Acid
  misc_feature: oligonucleotide substrate
uaccugccacagguggc

SEQ ID NO: 4930 - RNA, 17 nt, Artificial Sequence
  Description of Artificial Sequence:  Nucleic Acid
  misc_feature: oligonucleotide substrate
ugccacagguggcggcc

SEQ ID NO: 4931 - RNA, 17 nt, Artificial Sequence
  Description of Artificial Sequence:  Nucleic Acid
  misc_feature: oligonucleotide substrate
cacagguggcggcccuc

SEQ ID NO: 4932 - RNA, 17 nt, Artificial Sequence
  Description of Artificial Sequence:  Nucleic Acid
  misc_feature: oligonucleotide substrate
agguggcggcccucccc

SEQ ID NO: 4933 - RNA, 17 nt, Artificial Sequence
  Description of Artificial Sequence:  Nucleic Acid
  misc_feature: oligonucleotide substrate
ccccugggacaguagcu

SEQ ID NO: 4934 - RNA, 17 nt, Artificial Sequence
  Description of Artificial Sequence:  Nucleic Acid
  misc_feature: oligonucleotide substrate
cugggacaguagcuuag

SEQ ID NO: 4935 - RNA, 17 nt, Artificial Sequence
  Description of Artificial Sequence:  Nucleic Acid
  misc_feature: oligonucleotide substrate
ggacaguagcuuagcgc

SEQ ID NO: 4936 - RNA, 17 nt, Artificial Sequence
  Description of Artificial Sequence:  Nucleic Acid
  misc_feature: oligonucleotide substrate
guagcuuagcgcgaaca

SEQ ID NO: 4937 - RNA, 17 nt, Artificial Sequence
  Description of Artificial Sequence:  Nucleic Acid
  misc_feature: oligonucleotide substrate
agcuuagcgcgaacacu

SEQ ID NO: 4938 - RNA, 17 nt, Artificial Sequence
  Description of Artificial Sequence:  Nucleic Acid
  misc_feature: oligonucleotide substrate
uagcgcgaacacuucug

SEQ ID NO: 4939 - RNA, 17 nt, Artificial Sequence
  Description of Artificial Sequence:  Nucleic Acid
  misc_feature: oligonucleotide substrate
gcgcgaacacuucuggc

SEQ ID NO: 4940 - RNA, 17 nt, Artificial Sequence
  Description of Artificial Sequence:  Nucleic Acid
  misc_feature: oligonucleotide substrate
cacuucuggcccgaugu

SEQ ID NO: 4941 - RNA, 17 nt, Artificial Sequence
  Description of Artificial Sequence:  Nucleic Acid
  misc_feature: oligonucleotide substrate
cuggcccgaugucucca

SEQ ID NO: 4942 - RNA, 17 nt, Artificial Sequence
  Description of Artificial Sequence:  Nucleic Acid
  misc_feature: oligonucleotide substrate
ggcccgaugucuccagg

SEQ ID NO: 4943 - RNA, 17 nt, Artificial Sequence
  Description of Artificial Sequence:  Nucleic Acid
  misc_feature: oligonucleotide substrate
gucuccagguucgcaag

SEQ ID NO: 4944 - RNA, 17 nt, Artificial Sequence
  Description of Artificial Sequence:  Nucleic Acid
  misc_feature: oligonucleotide substrate
ccagguucgcaagggug

SEQ ID NO: 4945 - RNA, 17 nt, Artificial Sequence
  Description of Artificial Sequence:  Nucleic Acid
  misc_feature: oligonucleotide substrate
ucgcaagggugguaccc

SEQ ID NO: 4946 - RNA, 17 nt, Artificial Sequence
  Description of Artificial Sequence:  Nucleic Acid
  misc_feature: oligonucleotide substrate
caagggugguaccccaa

SEQ ID NO: 4947 - RNA, 17 nt, Artificial Sequence
  Description of Artificial Sequence:  Nucleic Acid
  misc_feature: oligonucleotide substrate
agggugguaccccaagu

SEQ ID NO: 4948 - RNA, 17 nt, Artificial Sequence
  Description of Artificial Sequence:  Nucleic Acid
  misc_feature: oligonucleotide substrate
uaccccaaguuuccuga

SEQ ID NO: 4949 - RNA, 17 nt, Artificial Sequence
  Description of Artificial Sequence:  Nucleic Acid
  misc_feature: oligonucleotide substrate
uuccugaggcaugaugc

SEQ ID NO: 4950 - RNA, 17 nt, Artificial Sequence
  Description of Artificial Sequence:  Nucleic Acid
  misc_feature: oligonucleotide substrate
ccugaggcaugaugcca

SEQ ID NO: 4951 - RNA, 17 nt, Artificial Sequence
  Description of Artificial Sequence:  Nucleic Acid
  misc_feature: oligonucleotide substrate
gaggcaugaugccaccc

SEQ ID NO: 4952 - RNA, 17 nt, Artificial Sequence
  Description of Artificial Sequence:  Nucleic Acid
  misc_feature: oligonucleotide substrate
ggcaugaugccacccua

SEQ ID NO: 4953 - RNA, 17 nt, Artificial Sequence
  Description of Artificial Sequence:  Nucleic Acid
  misc_feature: oligonucleotide substrate
augaugccacccuauug

SEQ ID NO: 4954 - RNA, 17 nt, Artificial Sequence
  Description of Artificial Sequence:  Nucleic Acid
  misc_feature: oligonucleotide substrate
gccacccuauugauuuc

SEQ ID NO: 4955 - RNA, 17 nt, Artificial Sequence
  Description of Artificial Sequence:  Nucleic Acid
  misc_feature: oligonucleotide substrate
cccuauugauuucaccu

SEQ ID NO: 4956 - RNA, 17 nt, Artificial Sequence
  Description of Artificial Sequence:  Nucleic Acid
  misc_feature: oligonucleotide substrate
uugauuucaccugggga

SEQ ID NO: 4957 - RNA, 17 nt, Artificial Sequence
  Description of Artificial Sequence:  Nucleic Acid
  misc_feature: oligonucleotide substrate
ccuggggaguaacuaug

SEQ ID NO: 4958 - RNA, 17 nt, Artificial Sequence
  Description of Artificial Sequence:  Nucleic Acid
  misc_feature: oligonucleotide substrate
ggggaguaacuauggag

SEQ ID NO: 4959 - RNA, 17 nt, Artificial Sequence
  Description of Artificial Sequence:  Nucleic Acid
  misc_feature: oligonucleotide substrate
gaguaacuauggaguga

SEQ ID NO: 4960 - RNA, 17 nt, Artificial Sequence
  Description of Artificial Sequence:  Nucleic Acid
  misc_feature: oligonucleotide substrate
acuauggagugaaaaug

SEQ ID NO: 4961 - RNA, 17 nt, Artificial Sequence
  Description of Artificial Sequence:  Nucleic Acid
  misc_feature: oligonucleotide substrate
gagugaaaaugcgcuaa

SEQ ID NO: 4962 - RNA, 17 nt, Artificial Sequence
  Description of Artificial Sequence:  Nucleic Acid
  misc_feature: oligonucleotide substrate
gugaaaaugcgcuaaga

SEQ ID NO: 4963 - RNA, 17 nt, Artificial Sequence
  Description of Artificial Sequence:  Nucleic Acid
  misc_feature: oligonucleotide substrate
gaaaaugcgcuaagacc

SEQ ID NO: 4964 - RNA, 17 nt, Artificial Sequence
  Description of Artificial Sequence:  Nucleic Acid
  misc_feature: oligonucleotide substrate
gcgcuaagaccauggag

SEQ ID NO: 4965 - RNA, 17 nt, Artificial Sequence
  Description of Artificial Sequence:  Nucleic Acid
  misc_feature: oligonucleotide substrate
cuaagaccauggagucg

SEQ ID NO: 4966 - RNA, 17 nt, Artificial Sequence
  Description of Artificial Sequence:  Nucleic Acid
  misc_feature: oligonucleotide substrate
accauggagucgcugaa

SEQ ID NO: 4967 - RNA, 17 nt, Artificial Sequence
  Description of Artificial Sequence:  Nucleic Acid
  misc_feature: oligonucleotide substrate
auggagucgcugaauga

SEQ ID NO: 4968 - RNA, 17 nt, Artificial Sequence
  Description of Artificial Sequence:  Nucleic Acid
  misc_feature: oligonucleotide substrate
gucgcugaaugaucuga

SEQ ID NO: 4969 - RNA, 17 nt, Artificial Sequence
  Description of Artificial Sequence:  Nucleic Acid
  misc_feature: oligonucleotide substrate
gcugaaugaucugaggu

SEQ ID NO: 4970 - RNA, 17 nt, Artificial Sequence
  Description of Artificial Sequence:  Nucleic Acid
  misc_feature: oligonucleotide substrate
gaucugagguaggucaa

SEQ ID NO: 4971 - RNA, 17 nt, Artificial Sequence
  Description of Artificial Sequence:  Nucleic Acid
  misc_feature: oligonucleotide substrate
ugagguaggucaagugg

SEQ ID NO: 4972 - RNA, 17 nt, Artificial Sequence
  Description of Artificial Sequence:  Nucleic Acid
  misc_feature: oligonucleotide substrate
uaggucaaguggcucaa

SEQ ID NO: 4973 - RNA, 17 nt, Artificial Sequence
  Description of Artificial Sequence:  Nucleic Acid
  misc_feature: oligonucleotide substrate
gucaaguggcucaaugg

SEQ ID NO: 4974 - RNA, 17 nt, Artificial Sequence
  Description of Artificial Sequence:  Nucleic Acid
  misc_feature: oligonucleotide substrate
guggcucaauggaguaa

SEQ ID NO: 4975 - RNA, 17 nt, Artificial Sequence
  Description of Artificial Sequence:  Nucleic Acid
  misc_feature: oligonucleotide substrate
ucaauggaguaacaagc

SEQ ID NO: 4976 - RNA, 17 nt, Artificial Sequence
  Description of Artificial Sequence:  Nucleic Acid
  misc_feature: oligonucleotide substrate
auggaguaacaagcccc

SEQ ID NO: 4977 - RNA, 17 nt, Artificial Sequence
  Description of Artificial Sequence:  Nucleic Acid
  misc_feature: oligonucleotide substrate
aguaacaagccccguag

SEQ ID NO: 4978 - RNA, 17 nt, Artificial Sequence
  Description of Artificial Sequence:  Nucleic Acid
  misc_feature: oligonucleotide substrate
caagccccguagaucug

SEQ ID NO: 4979 - RNA, 17 nt, Artificial Sequence
  Description of Artificial Sequence:  Nucleic Acid
  misc_feature: oligonucleotide substrate
ccccguagaucuggcag

SEQ ID NO: 4980 - RNA, 17 nt, Artificial Sequence
  Description of Artificial Sequence:  Nucleic Acid
  misc_feature: oligonucleotide substrate
uagaucuggcagucuag

SEQ ID NO: 4981 - RNA, 17 nt, Artificial Sequence
  Description of Artificial Sequence:  Nucleic Acid
  misc_feature: oligonucleotide substrate
aucuggcagucuagggc

SEQ ID NO: 4982 - RNA, 17 nt, Artificial Sequence
  Description of Artificial Sequence:  Nucleic Acid
  misc_feature: oligonucleotide substrate
agucuagggcuuucuca

SEQ ID NO: 4983 - RNA, 17 nt, Artificial Sequence
  Description of Artificial Sequence:  Nucleic Acid
  misc_feature: oligonucleotide substrate
uuucucaaguugcuccu

SEQ ID NO: 4984 - RNA, 17 nt, Artificial Sequence
  Description of Artificial Sequence:  Nucleic Acid
  misc_feature: oligonucleotide substrate
cucaaguugcuccuggg

SEQ ID NO: 4985 - RNA, 17 nt, Artificial Sequence
  Description of Artificial Sequence:  Nucleic Acid
  misc_feature: oligonucleotide substrate
gcuccugggcuagaagg

SEQ ID NO: 4986 - RNA, 17 nt, Artificial Sequence
  Description of Artificial Sequence:  Nucleic Acid
  misc_feature: oligonucleotide substrate
cuagaaggauggagaag

SEQ ID NO: 4987 - RNA, 17 nt, Artificial Sequence
  Description of Artificial Sequence:  Nucleic Acid
  misc_feature: oligonucleotide substrate
gagaagaagugagucau

SEQ ID NO: 4988 - RNA, 17 nt, Artificial Sequence
  Description of Artificial Sequence:  Nucleic Acid
  misc_feature: oligonucleotide substrate
agaagugagucaucaga

SEQ ID NO: 4989 - RNA, 17 nt, Artificial Sequence
  Description of Artificial Sequence:  Nucleic Acid
  misc_feature: oligonucleotide substrate
agugagucaucagaauc

SEQ ID NO: 4990 - RNA, 17 nt, Artificial Sequence
  Description of Artificial Sequence:  Nucleic Acid
  misc_feature: oligonucleotide substrate
ucaucagaaucauccuu

SEQ ID NO: 4991 - RNA, 17 nt, Artificial Sequence
  Description of Artificial Sequence:  Nucleic Acid
  misc_feature: oligonucleotide substrate
ucagaaucauccuuacc

SEQ ID NO: 4992 - RNA, 17 nt, Artificial Sequence
  Description of Artificial Sequence:  Nucleic Acid
  misc_feature: oligonucleotide substrate
ucauccuuacccauaga

SEQ ID NO: 4993 - RNA, 17 nt, Artificial Sequence
  Description of Artificial Sequence:  Nucleic Acid
  misc_feature: oligonucleotide substrate
ccuuacccauagagugg

SEQ ID NO: 4994 - RNA, 17 nt, Artificial Sequence
  Description of Artificial Sequence:  Nucleic Acid
  misc_feature: oligonucleotide substrate
cccauagagugggugca

SEQ ID NO: 4995 - RNA, 17 nt, Artificial Sequence
  Description of Artificial Sequence:  Nucleic Acid
  misc_feature: oligonucleotide substrate
uagagugggugcaaaca

SEQ ID NO: 4996 - RNA, 17 nt, Artificial Sequence
  Description of Artificial Sequence:  Nucleic Acid
  misc_feature: oligonucleotide substrate
gagugggugcaaacaug

SEQ ID NO: 4997 - RNA, 17 nt, Artificial Sequence
  Description of Artificial Sequence:  Nucleic Acid
  misc_feature: oligonucleotide substrate
gggugcaaacaugauga

SEQ ID NO: 4998 - RNA, 17 nt, Artificial Sequence
  Description of Artificial Sequence:  Nucleic Acid
  misc_feature: oligonucleotide substrate
gugcaaacaugaugaug

SEQ ID NO: 4999 - RNA, 17 nt, Artificial Sequence
  Description of Artificial Sequence:  Nucleic Acid
  misc_feature: oligonucleotide substrate
caaacaugaugauguug

SEQ ID NO: 5000 - RNA, 17 nt, Artificial Sequence
  Description of Artificial Sequence:  Nucleic Acid
  misc_feature: oligonucleotide substrate
acaugaugauguugccu

SEQ ID NO: 5001 - RNA, 17 nt, Artificial Sequence
  Description of Artificial Sequence:  Nucleic Acid
  misc_feature: oligonucleotide substrate
augaugauguugccuag

SEQ ID NO: 5002 - RNA, 17 nt, Artificial Sequence
  Description of Artificial Sequence:  Nucleic Acid
  misc_feature: oligonucleotide substrate
augauguugccuagcca

SEQ ID NO: 5003 - RNA, 17 nt, Artificial Sequence
  Description of Artificial Sequence:  Nucleic Acid
  misc_feature: oligonucleotide substrate
guugccuagccaggagu

SEQ ID NO: 5004 - RNA, 17 nt, Artificial Sequence
  Description of Artificial Sequence:  Nucleic Acid
  misc_feature: oligonucleotide substrate
agccaggaguugacugg

SEQ ID NO: 5005 - RNA, 17 nt, Artificial Sequence
  Description of Artificial Sequence:  Nucleic Acid
  misc_feature: oligonucleotide substrate
aggaguugacuggagug

SEQ ID NO: 5006 - RNA, 17 nt, Artificial Sequence
  Description of Artificial Sequence:  Nucleic Acid
  misc_feature: oligonucleotide substrate
ugacuggagugcuucua

SEQ ID NO: 5007 - RNA, 17 nt, Artificial Sequence
  Description of Artificial Sequence:  Nucleic Acid
  misc_feature: oligonucleotide substrate
acuggagugcuucuagc

SEQ ID NO: 5008 - RNA, 17 nt, Artificial Sequence
  Description of Artificial Sequence:  Nucleic Acid
  misc_feature: oligonucleotide substrate
ugcuucuagcugucucc

SEQ ID NO: 5009 - RNA, 17 nt, Artificial Sequence
  Description of Artificial Sequence:  Nucleic Acid
  misc_feature: oligonucleotide substrate
uucuagcugucucccac

SEQ ID NO: 5010 - RNA, 17 nt, Artificial Sequence
  Description of Artificial Sequence:  Nucleic Acid
  misc_feature: oligonucleotide substrate
ugucucccacgcagccc

SEQ ID NO: 5011 - RNA, 17 nt, Artificial Sequence
  Description of Artificial Sequence:  Nucleic Acid
  misc_feature: oligonucleotide substrate
ucucccacgcagcccgc

SEQ ID NO: 5012 - RNA, 17 nt, Artificial Sequence
  Description of Artificial Sequence:  Nucleic Acid
  misc_feature: oligonucleotide substrate
cccacgcagcccgcgca

SEQ ID NO: 5013 - RNA, 17 nt, Artificial Sequence
  Description of Artificial Sequence:  Nucleic Acid
  misc_feature: oligonucleotide substrate
cgcagcccgcgcaaggg

SEQ ID NO: 5014 - RNA, 17 nt, Artificial Sequence
  Description of Artificial Sequence:  Nucleic Acid
  misc_feature: oligonucleotide substrate
cagcccgcgcaaggggg

SEQ ID NO: 5015 - RNA, 17 nt, Artificial Sequence
  Description of Artificial Sequence:  Nucleic Acid
  misc_feature: oligonucleotide substrate
caagggggguggugggg

SEQ ID NO: 5016 - RNA, 17 nt, Artificial Sequence
  Description of Artificial Sequence:  Nucleic Acid
  misc_feature: oligonucleotide substrate
gggggguggugggguca

SEQ ID NO: 5017 - RNA, 17 nt, Artificial Sequence
  Description of Artificial Sequence:  Nucleic Acid
  misc_feature: oligonucleotide substrate
gugguggggucacgggu

SEQ ID NO: 5018 - RNA, 17 nt, Artificial Sequence
  Description of Artificial Sequence:  Nucleic Acid
  misc_feature: oligonucleotide substrate
guggggucacgggugag

SEQ ID NO: 5019 - RNA, 17 nt, Artificial Sequence
  Description of Artificial Sequence:  Nucleic Acid
  misc_feature: oligonucleotide substrate
ggucacgggugagguag

SEQ ID NO: 5020 - RNA, 17 nt, Artificial Sequence
  Description of Artificial Sequence:  Nucleic Acid
  misc_feature: oligonucleotide substrate
cgggugagguaguacac

SEQ ID NO: 5021 - RNA, 17 nt, Artificial Sequence
  Description of Artificial Sequence:  Nucleic Acid
  misc_feature: oligonucleotide substrate
gugagguaguacacccu

SEQ ID NO: 5022 - RNA, 17 nt, Artificial Sequence
  Description of Artificial Sequence:  Nucleic Acid
  misc_feature: oligonucleotide substrate
gagguaguacacccuuu

SEQ ID NO: 5023 - RNA, 17 nt, Artificial Sequence
  Description of Artificial Sequence:  Nucleic Acid
  misc_feature: oligonucleotide substrate
gguaguacacccuuuug

SEQ ID NO: 5024 - RNA, 17 nt, Artificial Sequence
  Description of Artificial Sequence:  Nucleic Acid
  misc_feature: oligonucleotide substrate
acccuuuugccagaugc

SEQ ID NO: 5025 - RNA, 17 nt, Artificial Sequence
  Description of Artificial Sequence:  Nucleic Acid
  misc_feature: oligonucleotide substrate
uuugccagaugcaucgu

SEQ ID NO: 5026 - RNA, 17 nt, Artificial Sequence
  Description of Artificial Sequence:  Nucleic Acid
  misc_feature: oligonucleotide substrate
ugccagaugcaucgugu

SEQ ID NO: 5027 - RNA, 17 nt, Artificial Sequence
  Description of Artificial Sequence:  Nucleic Acid
  misc_feature: oligonucleotide substrate
ccagaugcaucgugugc

SEQ ID NO: 5028 - RNA, 17 nt, Artificial Sequence
  Description of Artificial Sequence:  Nucleic Acid
  misc_feature: oligonucleotide substrate
gaugcaucgugugcaac

SEQ ID NO: 5029 - RNA, 17 nt, Artificial Sequence
  Description of Artificial Sequence:  Nucleic Acid
  misc_feature: oligonucleotide substrate
ugcaucgugugcaacug

SEQ ID NO: 5030 - RNA, 17 nt, Artificial Sequence
  Description of Artificial Sequence:  Nucleic Acid
  misc_feature: oligonucleotide substrate
caucgugugcaacugau

SEQ ID NO: 5031 - RNA, 17 nt, Artificial Sequence
  Description of Artificial Sequence:  Nucleic Acid
  misc_feature: oligonucleotide substrate
cgugugcaacugauacg

SEQ ID NO: 5032 - RNA, 17 nt, Artificial Sequence
  Description of Artificial Sequence:  Nucleic Acid
  misc_feature: oligonucleotide substrate
ugcaacugauacguugg

SEQ ID NO: 5033 - RNA, 17 nt, Artificial Sequence
  Description of Artificial Sequence:  Nucleic Acid
  misc_feature: oligonucleotide substrate
caacugauacguuggag

SEQ ID NO: 5034 - RNA, 17 nt, Artificial Sequence
  Description of Artificial Sequence:  Nucleic Acid
  misc_feature: oligonucleotide substrate
acugauacguuggagga

SEQ ID NO: 5035 - RNA, 17 nt, Artificial Sequence
  Description of Artificial Sequence:  Nucleic Acid
  misc_feature: oligonucleotide substrate
uuggaggagcaugaugu

SEQ ID NO: 5036 - RNA, 17 nt, Artificial Sequence
  Description of Artificial Sequence:  Nucleic Acid
  misc_feature: oligonucleotide substrate
ggaggagcaugauguua

SEQ ID NO: 5037 - RNA, 17 nt, Artificial Sequence
  Description of Artificial Sequence:  Nucleic Acid
  misc_feature: oligonucleotide substrate
ggagcaugauguuauca

SEQ ID NO: 5038 - RNA, 17 nt, Artificial Sequence
  Description of Artificial Sequence:  Nucleic Acid
  misc_feature: oligonucleotide substrate
agcaugauguuaucaac

SEQ ID NO: 5039 - RNA, 17 nt, Artificial Sequence
  Description of Artificial Sequence:  Nucleic Acid
  misc_feature: oligonucleotide substrate
augauguuaucaacucc

SEQ ID NO: 5040 - RNA, 17 nt, Artificial Sequence
  Description of Artificial Sequence:  Nucleic Acid
  misc_feature: oligonucleotide substrate
uguuaucaacuccaagu

SEQ ID NO: 5041 - RNA, 17 nt, Artificial Sequence
  Description of Artificial Sequence:  Nucleic Acid
  misc_feature: oligonucleotide substrate
aacuccaagucguauuc

SEQ ID NO: 5042 - RNA, 17 nt, Artificial Sequence
  Description of Artificial Sequence:  Nucleic Acid
  misc_feature: oligonucleotide substrate
uccaagucguauuccgg

SEQ ID NO: 5043 - RNA, 17 nt, Artificial Sequence
  Description of Artificial Sequence:  Nucleic Acid
  misc_feature: oligonucleotide substrate
caagucguauuccgguu

SEQ ID NO: 5044 - RNA, 17 nt, Artificial Sequence
  Description of Artificial Sequence:  Nucleic Acid
  misc_feature: oligonucleotide substrate
guauuccgguuggggcg

SEQ ID NO: 5045 - RNA, 17 nt, Artificial Sequence
  Description of Artificial Sequence:  Nucleic Acid
  misc_feature: oligonucleotide substrate
cgguuggggcggguccc

SEQ ID NO: 5046 - RNA, 17 nt, Artificial Sequence
  Description of Artificial Sequence:  Nucleic Acid
  misc_feature: oligonucleotide substrate
uggggcggguccccggg

SEQ ID NO: 5047 - RNA, 17 nt, Artificial Sequence
  Description of Artificial Sequence:  Nucleic Acid
  misc_feature: oligonucleotide substrate
cggggggggcagaguac

SEQ ID NO: 5048 - RNA, 17 nt, Artificial Sequence
  Description of Artificial Sequence:  Nucleic Acid
  misc_feature: oligonucleotide substrate
ggggcagaguaccuagu

SEQ ID NO: 5049 - RNA, 17 nt, Artificial Sequence
  Description of Artificial Sequence:  Nucleic Acid
  misc_feature: oligonucleotide substrate
ggcagaguaccuaguca

SEQ ID NO: 5050 - RNA, 17 nt, Artificial Sequence
  Description of Artificial Sequence:  Nucleic Acid
  misc_feature: oligonucleotide substrate
aguaccuagucauagcc

SEQ ID NO: 5051 - RNA, 17 nt, Artificial Sequence
  Description of Artificial Sequence:  Nucleic Acid
  misc_feature: oligonucleotide substrate
accuagucauagccucc

SEQ ID NO: 5052 - RNA, 17 nt, Artificial Sequence
  Description of Artificial Sequence:  Nucleic Acid
  misc_feature: oligonucleotide substrate
uagucauagccuccgug

SEQ ID NO: 5053 - RNA, 17 nt, Artificial Sequence
  Description of Artificial Sequence:  Nucleic Acid
  misc_feature: oligonucleotide substrate
uagccuccgugaagacu

SEQ ID NO: 5054 - RNA, 17 nt, Artificial Sequence
  Description of Artificial Sequence:  Nucleic Acid
  misc_feature: oligonucleotide substrate
ccgugaagacucguagg

SEQ ID NO: 5055 - RNA, 17 nt, Artificial Sequence
  Description of Artificial Sequence:  Nucleic Acid
  misc_feature: oligonucleotide substrate
gaagacucguaggcucg

SEQ ID NO: 5056 - RNA, 17 nt, Artificial Sequence
  Description of Artificial Sequence:  Nucleic Acid
  misc_feature: oligonucleotide substrate
acucguaggcucgccgc

SEQ ID NO: 5057 - RNA, 17 nt, Artificial Sequence
  Description of Artificial Sequence:  Nucleic Acid
  misc_feature: oligonucleotide substrate
guaggcucgccgcgucc

SEQ ID NO: 5058 - RNA, 17 nt, Artificial Sequence
  Description of Artificial Sequence:  Nucleic Acid
  misc_feature: oligonucleotide substrate
ggcucgccgcguccucu

SEQ ID NO: 5059 - RNA, 17 nt, Artificial Sequence
  Description of Artificial Sequence:  Nucleic Acid
  misc_feature: oligonucleotide substrate
cucgccgcguccucuug

SEQ ID NO: 5060 - RNA, 17 nt, Artificial Sequence
  Description of Artificial Sequence:  Nucleic Acid
  misc_feature: oligonucleotide substrate
ccucuuggguccccgca

SEQ ID NO: 5061 - RNA, 17 nt, Artificial Sequence
  Description of Artificial Sequence:  Nucleic Acid
  misc_feature: oligonucleotide substrate
ggguccccgcacuuuca

SEQ ID NO: 5062 - RNA, 17 nt, Artificial Sequence
  Description of Artificial Sequence:  Nucleic Acid
  misc_feature: oligonucleotide substrate
guccccgcacuuucaca

SEQ ID NO: 5063 - RNA, 17 nt, Artificial Sequence
  Description of Artificial Sequence:  Nucleic Acid
  misc_feature: oligonucleotide substrate
gcacuuucacagauaac

SEQ ID NO: 5064 - RNA, 17 nt, Artificial Sequence
  Description of Artificial Sequence:  Nucleic Acid
  misc_feature: oligonucleotide substrate
uuucacagauaacgacc

SEQ ID NO: 5065 - RNA, 17 nt, Artificial Sequence
  Description of Artificial Sequence:  Nucleic Acid
  misc_feature: oligonucleotide substrate
cacagauaacgaccagg

SEQ ID NO: 5066 - RNA, 17 nt, Artificial Sequence
  Description of Artificial Sequence:  Nucleic Acid
  misc_feature: oligonucleotide substrate
agauaacgaccaggucg

SEQ ID NO: 5067 - RNA, 17 nt, Artificial Sequence
  Description of Artificial Sequence:  Nucleic Acid
  misc_feature: oligonucleotide substrate
acgaccaggucgucucc

SEQ ID NO: 5068 - RNA, 17 nt, Artificial Sequence
  Description of Artificial Sequence:  Nucleic Acid
  misc_feature: oligonucleotide substrate
accaggucgucuccaca

SEQ ID NO: 5069 - RNA, 17 nt, Artificial Sequence
  Description of Artificial Sequence:  Nucleic Acid
  misc_feature: oligonucleotide substrate
ucgucuccacacacgag

SEQ ID NO: 5070 - RNA, 17 nt, Artificial Sequence
  Description of Artificial Sequence:  Nucleic Acid
  misc_feature: oligonucleotide substrate
gucuccacacacgagca

SEQ ID NO: 5071 - RNA, 17 nt, Artificial Sequence
  Description of Artificial Sequence:  Nucleic Acid
  misc_feature: oligonucleotide substrate
cuccacacacgagcauc

SEQ ID NO: 5072 - RNA, 17 nt, Artificial Sequence
  Description of Artificial Sequence:  Nucleic Acid
  misc_feature: oligonucleotide substrate
acacacgagcaucgugc

SEQ ID NO: 5073 - RNA, 17 nt, Artificial Sequence
  Description of Artificial Sequence:  Nucleic Acid
  misc_feature: oligonucleotide substrate
acacgagcaucgugcag

SEQ ID NO: 5074 - RNA, 17 nt, Artificial Sequence
  Description of Artificial Sequence:  Nucleic Acid
  misc_feature: oligonucleotide substrate
cgagcaucgugcagucc

SEQ ID NO: 5075 - RNA, 17 nt, Artificial Sequence
  Description of Artificial Sequence:  Nucleic Acid
  misc_feature: oligonucleotide substrate
agcaucgugcaguccug

SEQ ID NO: 5076 - RNA, 17 nt, Artificial Sequence
  Description of Artificial Sequence:  Nucleic Acid
  misc_feature: oligonucleotide substrate
aucgugcaguccuggag

SEQ ID NO: 5077 - RNA, 17 nt, Artificial Sequence
  Description of Artificial Sequence:  Nucleic Acid
  misc_feature: oligonucleotide substrate
guccuggagcuucgcag

SEQ ID NO: 5078 - RNA, 17 nt, Artificial Sequence
  Description of Artificial Sequence:  Nucleic Acid
  misc_feature: oligonucleotide substrate
ggagcuucgcagcucga

SEQ ID NO: 5079 - RNA, 17 nt, Artificial Sequence
  Description of Artificial Sequence:  Nucleic Acid
  misc_feature: oligonucleotide substrate
gcuucgcagcucgacag

SEQ ID NO: 5080 - RNA, 17 nt, Artificial Sequence
  Description of Artificial Sequence:  Nucleic Acid
  misc_feature: oligonucleotide substrate
gcagcucgacaggccgc

SEQ ID NO: 5081 - RNA, 17 nt, Artificial Sequence
  Description of Artificial Sequence:  Nucleic Acid
  misc_feature: oligonucleotide substrate
cucgacaggccgcagag

SEQ ID NO: 5082 - RNA, 17 nt, Artificial Sequence
  Description of Artificial Sequence:  Nucleic Acid
  misc_feature: oligonucleotide substrate
gacaggccgcagaggcu

SEQ ID NO: 5083 - RNA, 17 nt, Artificial Sequence
  Description of Artificial Sequence:  Nucleic Acid
  misc_feature: oligonucleotide substrate
ccgcagaggcuuucaag

SEQ ID NO: 5084 - RNA, 17 nt, Artificial Sequence
  Description of Artificial Sequence:  Nucleic Acid
  misc_feature: oligonucleotide substrate
gcuuucaaguaacaugu

SEQ ID NO: 5085 - RNA, 17 nt, Artificial Sequence
  Description of Artificial Sequence:  Nucleic Acid
  misc_feature: oligonucleotide substrate
uucaaguaacaugugag

SEQ ID NO: 5086 - RNA, 17 nt, Artificial Sequence
  Description of Artificial Sequence:  Nucleic Acid
  misc_feature: oligonucleotide substrate
caaguaacaugugaggg

SEQ ID NO: 5087 - RNA, 17 nt, Artificial Sequence
  Description of Artificial Sequence:  Nucleic Acid
  misc_feature: oligonucleotide substrate
aguaacaugugagggua

SEQ ID NO: 5088 - RNA, 17 nt, Artificial Sequence
  Description of Artificial Sequence:  Nucleic Acid
  misc_feature: oligonucleotide substrate
augugaggguauuacca

SEQ ID NO: 5089 - RNA, 17 nt, Artificial Sequence
  Description of Artificial Sequence:  Nucleic Acid
  misc_feature: oligonucleotide substrate
gugaggguauuaccaca

SEQ ID NO: 5090 - RNA, 17 nt, Artificial Sequence
  Description of Artificial Sequence:  Nucleic Acid
  misc_feature: oligonucleotide substrate
aggguauuaccacagcu

SEQ ID NO: 5091 - RNA, 17 nt, Artificial Sequence
  Description of Artificial Sequence:  Nucleic Acid
  misc_feature: oligonucleotide substrate
guauuaccacagcuggu

SEQ ID NO: 5092 - RNA, 17 nt, Artificial Sequence
  Description of Artificial Sequence:  Nucleic Acid
  misc_feature: oligonucleotide substrate
uuaccacagcuggucgu

SEQ ID NO: 5093 - RNA, 17 nt, Artificial Sequence
  Description of Artificial Sequence:  Nucleic Acid
  misc_feature: oligonucleotide substrate
cacagcuggucgucagc

SEQ ID NO: 5094 - RNA, 17 nt, Artificial Sequence
  Description of Artificial Sequence:  Nucleic Acid
  misc_feature: oligonucleotide substrate
agcuggucgucagcacg

SEQ ID NO: 5095 - RNA, 17 nt, Artificial Sequence
  Description of Artificial Sequence:  Nucleic Acid
  misc_feature: oligonucleotide substrate
ggucgucagcacgccgc

SEQ ID NO: 5096 - RNA, 17 nt, Artificial Sequence
  Description of Artificial Sequence:  Nucleic Acid
  misc_feature: oligonucleotide substrate
ucgucagcacgccgcuc

SEQ ID NO: 5097 - RNA, 17 nt, Artificial Sequence
  Description of Artificial Sequence:  Nucleic Acid
  misc_feature: oligonucleotide substrate
gucagcacgccgcucgc

SEQ ID NO: 5098 - RNA, 17 nt, Artificial Sequence
  Description of Artificial Sequence:  Nucleic Acid
  misc_feature: oligonucleotide substrate
agcacgccgcucgcgcg

SEQ ID NO: 5099 - RNA, 17 nt, Artificial Sequence
  Description of Artificial Sequence:  Nucleic Acid
  misc_feature: oligonucleotide substrate
cgccgcucgcgcggcac

SEQ ID NO: 5100 - RNA, 17 nt, Artificial Sequence
  Description of Artificial Sequence:  Nucleic Acid
  misc_feature: oligonucleotide substrate
ccgcucgcgcggcaccg

SEQ ID NO: 5101 - RNA, 17 nt, Artificial Sequence
  Description of Artificial Sequence:  Nucleic Acid
  misc_feature: oligonucleotide substrate
cucgcgcggcaccggcg

SEQ ID NO: 5102 - RNA, 17 nt, Artificial Sequence
  Description of Artificial Sequence:  Nucleic Acid
  misc_feature: oligonucleotide substrate
cgcgcggcaccggcgau

SEQ ID NO: 5103 - RNA, 17 nt, Artificial Sequence
  Description of Artificial Sequence:  Nucleic Acid
  misc_feature: oligonucleotide substrate
cggcaccggcgauaacc

SEQ ID NO: 5104 - RNA, 17 nt, Artificial Sequence
  Description of Artificial Sequence:  Nucleic Acid
  misc_feature: oligonucleotide substrate
caccggcgauaaccgca

SEQ ID NO: 5105 - RNA, 17 nt, Artificial Sequence
  Description of Artificial Sequence:  Nucleic Acid
  misc_feature: oligonucleotide substrate
cggcgauaaccgcaguu

SEQ ID NO: 5106 - RNA, 17 nt, Artificial Sequence
  Description of Artificial Sequence:  Nucleic Acid
  misc_feature: oligonucleotide substrate
cgauaaccgcaguucug

SEQ ID NO: 5107 - RNA, 17 nt, Artificial Sequence
  Description of Artificial Sequence:  Nucleic Acid
  misc_feature: oligonucleotide substrate
uaaccgcaguucugccc

SEQ ID NO: 5108 - RNA, 17 nt, Artificial Sequence
  Description of Artificial Sequence:  Nucleic Acid
  misc_feature: oligonucleotide substrate
gcaguucugcccuuuug

SEQ ID NO: 5109 - RNA, 17 nt, Artificial Sequence
  Description of Artificial Sequence:  Nucleic Acid
  misc_feature: oligonucleotide substrate
ccuuuugaauuagucag

SEQ ID NO: 5110 - RNA, 17 nt, Artificial Sequence
  Description of Artificial Sequence:  Nucleic Acid
  misc_feature: oligonucleotide substrate
uugaauuagucagagga

SEQ ID NO: 5111 - RNA, 17 nt, Artificial Sequence
  Description of Artificial Sequence:  Nucleic Acid
  misc_feature: oligonucleotide substrate
gucagaggacccccgau

SEQ ID NO: 5112 - RNA, 17 nt, Artificial Sequence
  Description of Artificial Sequence:  Nucleic Acid
  misc_feature: oligonucleotide substrate
gacccccgauauaaagc

SEQ ID NO: 5113 - RNA, 17 nt, Artificial Sequence
  Description of Artificial Sequence:  Nucleic Acid
  misc_feature: oligonucleotide substrate
cccccgauauaaagccg

SEQ ID NO: 5114 - RNA, 17 nt, Artificial Sequence
  Description of Artificial Sequence:  Nucleic Acid
  misc_feature: oligonucleotide substrate
gauauaaagccgcucug

SEQ ID NO: 5115 - RNA, 17 nt, Artificial Sequence
  Description of Artificial Sequence:  Nucleic Acid
  misc_feature: oligonucleotide substrate
auaaagccgcucuguga

SEQ ID NO: 5116 - RNA, 17 nt, Artificial Sequence
  Description of Artificial Sequence:  Nucleic Acid
  misc_feature: oligonucleotide substrate
gccgcucugugagcgac

SEQ ID NO: 5117 - RNA, 17 nt, Artificial Sequence
  Description of Artificial Sequence:  Nucleic Acid
  misc_feature: oligonucleotide substrate
cucugugagcgaccuua

SEQ ID NO: 5118 - RNA, 17 nt, Artificial Sequence
  Description of Artificial Sequence:  Nucleic Acid
  misc_feature: oligonucleotide substrate
ugugagcgaccuuaugg

SEQ ID NO: 5119 - RNA, 17 nt, Artificial Sequence
  Description of Artificial Sequence:  Nucleic Acid
  misc_feature: oligonucleotide substrate
gcgaccuuauggccugu

SEQ ID NO: 5120 - RNA, 17 nt, Artificial Sequence
  Description of Artificial Sequence:  Nucleic Acid
  misc_feature: oligonucleotide substrate
accuuauggccugucug

SEQ ID NO: 5121 - RNA, 17 nt, Artificial Sequence
  Description of Artificial Sequence:  Nucleic Acid
  misc_feature: oligonucleotide substrate
uauggccugucuggcuu

SEQ ID NO: 5122 - RNA, 17 nt, Artificial Sequence
  Description of Artificial Sequence:  Nucleic Acid
  misc_feature: oligonucleotide substrate
ccugucuggcuucgggg

SEQ ID NO: 5123 - RNA, 17 nt, Artificial Sequence
  Description of Artificial Sequence:  Nucleic Acid
  misc_feature: oligonucleotide substrate
cuucgggggccaaguca

SEQ ID NO: 5124 - RNA, 17 nt, Artificial Sequence
  Description of Artificial Sequence:  Nucleic Acid
  misc_feature: oligonucleotide substrate
ggggccaagucacaaca

SEQ ID NO: 5125 - RNA, 17 nt, Artificial Sequence
  Description of Artificial Sequence:  Nucleic Acid
  misc_feature: oligonucleotide substrate
gccaagucacaacauug

SEQ ID NO: 5126 - RNA, 17 nt, Artificial Sequence
  Description of Artificial Sequence:  Nucleic Acid
  misc_feature: oligonucleotide substrate
aagucacaacauuggua

SEQ ID NO: 5127 - RNA, 17 nt, Artificial Sequence
  Description of Artificial Sequence:  Nucleic Acid
  misc_feature: oligonucleotide substrate
gucacaacauugguaaa

SEQ ID NO: 5128 - RNA, 17 nt, Artificial Sequence
  Description of Artificial Sequence:  Nucleic Acid
  misc_feature: oligonucleotide substrate
caacauugguaaauuga

SEQ ID NO: 5129 - RNA, 17 nt, Artificial Sequence
  Description of Artificial Sequence:  Nucleic Acid
  misc_feature: oligonucleotide substrate
auugguaaauugacucc

SEQ ID NO: 5130 - RNA, 17 nt, Artificial Sequence
  Description of Artificial Sequence:  Nucleic Acid
  misc_feature: oligonucleotide substrate
guaaauugacuccucga

SEQ ID NO: 5131 - RNA, 17 nt, Artificial Sequence
  Description of Artificial Sequence:  Nucleic Acid
  misc_feature: oligonucleotide substrate
acuccucgacacggaug

SEQ ID NO: 5132 - RNA, 17 nt, Artificial Sequence
  Description of Artificial Sequence:  Nucleic Acid
  misc_feature: oligonucleotide substrate
uccucgacacggauguc

SEQ ID NO: 5133 - RNA, 17 nt, Artificial Sequence
  Description of Artificial Sequence:  Nucleic Acid
  misc_feature: oligonucleotide substrate
cgacacggaugucacuc

SEQ ID NO: 5134 - RNA, 17 nt, Artificial Sequence
  Description of Artificial Sequence:  Nucleic Acid
  misc_feature: oligonucleotide substrate
acacggaugucacucuc

SEQ ID NO: 5135 - RNA, 17 nt, Artificial Sequence
  Description of Artificial Sequence:  Nucleic Acid
  misc_feature: oligonucleotide substrate
cggaugucacucucggu

SEQ ID NO: 5136 - RNA, 17 nt, Artificial Sequence
  Description of Artificial Sequence:  Nucleic Acid
  misc_feature: oligonucleotide substrate
cacucucggugacuguu

SEQ ID NO: 5137 - RNA, 17 nt, Artificial Sequence
  Description of Artificial Sequence:  Nucleic Acid
  misc_feature: oligonucleotide substrate
ucucggugacuguugag

SEQ ID NO: 5138 - RNA, 17 nt, Artificial Sequence
  Description of Artificial Sequence:  Nucleic Acid
  misc_feature: oligonucleotide substrate
cggugacuguugagucg

SEQ ID NO: 5139 - RNA, 17 nt, Artificial Sequence
  Description of Artificial Sequence:  Nucleic Acid
  misc_feature: oligonucleotide substrate
acuguugagucgaaaca

SEQ ID NO: 5140 - RNA, 17 nt, Artificial Sequence
  Description of Artificial Sequence:  Nucleic Acid
  misc_feature: oligonucleotide substrate
gagucgaaacagcgggu

SEQ ID NO: 5141 - RNA, 17 nt, Artificial Sequence
  Description of Artificial Sequence:  Nucleic Acid
  misc_feature: oligonucleotide substrate
ucgaaacagcggguguc

SEQ ID NO: 5142 - RNA, 17 nt, Artificial Sequence
  Description of Artificial Sequence:  Nucleic Acid
  misc_feature: oligonucleotide substrate
aacagcgggugucauau

SEQ ID NO: 5143 - RNA, 17 nt, Artificial Sequence
  Description of Artificial Sequence:  Nucleic Acid
  misc_feature: oligonucleotide substrate
cagcgggugucauaugc

SEQ ID NO: 5144 - RNA, 17 nt, Artificial Sequence
  Description of Artificial Sequence:  Nucleic Acid
  misc_feature: oligonucleotide substrate
cgggugucauaugcaaa

SEQ ID NO: 5145 - RNA, 17 nt, Artificial Sequence
  Description of Artificial Sequence:  Nucleic Acid
  misc_feature: oligonucleotide substrate
ggugucauaugcaaagc

SEQ ID NO: 5146 - RNA, 17 nt, Artificial Sequence
  Description of Artificial Sequence:  Nucleic Acid
  misc_feature: oligonucleotide substrate
ugucauaugcaaagccc

SEQ ID NO: 5147 - RNA, 17 nt, Artificial Sequence
  Description of Artificial Sequence:  Nucleic Acid
  misc_feature: oligonucleotide substrate
uaugcaaagcccauagg

SEQ ID NO: 5148 - RNA, 17 nt, Artificial Sequence
  Description of Artificial Sequence:  Nucleic Acid
  misc_feature: oligonucleotide substrate
caaagcccauagggcau

SEQ ID NO: 5149 - RNA, 17 nt, Artificial Sequence
  Description of Artificial Sequence:  Nucleic Acid
  misc_feature: oligonucleotide substrate
cccauagggcauuucuu

SEQ ID NO: 5150 - RNA, 17 nt, Artificial Sequence
  Description of Artificial Sequence:  Nucleic Acid
  misc_feature: oligonucleotide substrate
cauagggcauuucuuug

SEQ ID NO: 5151 - RNA, 17 nt, Artificial Sequence
  Description of Artificial Sequence:  Nucleic Acid
  misc_feature: oligonucleotide substrate
uuucuuugauuuccagg

SEQ ID NO: 5152 - RNA, 17 nt, Artificial Sequence
  Description of Artificial Sequence:  Nucleic Acid
  misc_feature: oligonucleotide substrate
auuuccaggcauucacc

SEQ ID NO: 5153 - RNA, 17 nt, Artificial Sequence
  Description of Artificial Sequence:  Nucleic Acid
  misc_feature: oligonucleotide substrate
uuccaggcauucaccag

SEQ ID NO: 5154 - RNA, 17 nt, Artificial Sequence
  Description of Artificial Sequence:  Nucleic Acid
  misc_feature: oligonucleotide substrate
aggcauucaccaggaac

SEQ ID NO: 5155 - RNA, 17 nt, Artificial Sequence
  Description of Artificial Sequence:  Nucleic Acid
  misc_feature: oligonucleotide substrate
caccaggaacucaaccc

SEQ ID NO: 5156 - RNA, 17 nt, Artificial Sequence
  Description of Artificial Sequence:  Nucleic Acid
  misc_feature: oligonucleotide substrate
ggaacucaacccgcugc

SEQ ID NO: 5157 - RNA, 17 nt, Artificial Sequence
  Description of Artificial Sequence:  Nucleic Acid
  misc_feature: oligonucleotide substrate
cucaacccgcugcccag

SEQ ID NO: 5158 - RNA, 17 nt, Artificial Sequence
  Description of Artificial Sequence:  Nucleic Acid
  misc_feature: oligonucleotide substrate
aacccgcugcccaggag

SEQ ID NO: 5159 - RNA, 17 nt, Artificial Sequence
  Description of Artificial Sequence:  Nucleic Acid
  misc_feature: oligonucleotide substrate
ccaggagaguacuggaa

SEQ ID NO: 5160 - RNA, 17 nt, Artificial Sequence
  Description of Artificial Sequence:  Nucleic Acid
  misc_feature: oligonucleotide substrate
aggagaguacuggaauc

SEQ ID NO: 5161 - RNA, 17 nt, Artificial Sequence
  Description of Artificial Sequence:  Nucleic Acid
  misc_feature: oligonucleotide substrate
guacuggaauccguaug

SEQ ID NO: 5162 - RNA, 17 nt, Artificial Sequence
  Description of Artificial Sequence:  Nucleic Acid
  misc_feature: oligonucleotide substrate
uggaauccguaugaaga

SEQ ID NO: 5163 - RNA, 17 nt, Artificial Sequence
  Description of Artificial Sequence:  Nucleic Acid
  misc_feature: oligonucleotide substrate
gaauccguaugaagagc

SEQ ID NO: 5164 - RNA, 17 nt, Artificial Sequence
  Description of Artificial Sequence:  Nucleic Acid
  misc_feature: oligonucleotide substrate
uaugaagagcccaucac

SEQ ID NO: 5165 - RNA, 17 nt, Artificial Sequence
  Description of Artificial Sequence:  Nucleic Acid
  misc_feature: oligonucleotide substrate
aagagcccaucacggcc

SEQ ID NO: 5166 - RNA, 17 nt, Artificial Sequence
  Description of Artificial Sequence:  Nucleic Acid
  misc_feature: oligonucleotide substrate
agcccaucacggccuga

SEQ ID NO: 5167 - RNA, 17 nt, Artificial Sequence
  Description of Artificial Sequence:  Nucleic Acid
  misc_feature: oligonucleotide substrate
ccaucacggccugagga

SEQ ID NO: 5168 - RNA, 17 nt, Artificial Sequence
  Description of Artificial Sequence:  Nucleic Acid
  misc_feature: oligonucleotide substrate
gaggaaggguggagacc

SEQ ID NO: 5169 - RNA, 17 nt, Artificial Sequence
  Description of Artificial Sequence:  Nucleic Acid
  misc_feature: oligonucleotide substrate
ggguggagaccacgucg

SEQ ID NO: 5170 - RNA, 17 nt, Artificial Sequence
  Description of Artificial Sequence:  Nucleic Acid
  misc_feature: oligonucleotide substrate
uggagaccacgucguaa

SEQ ID NO: 5171 - RNA, 17 nt, Artificial Sequence
  Description of Artificial Sequence:  Nucleic Acid
  misc_feature: oligonucleotide substrate
gagaccacgucguaaag

SEQ ID NO: 5172 - RNA, 17 nt, Artificial Sequence
  Description of Artificial Sequence:  Nucleic Acid
  misc_feature: oligonucleotide substrate
accacgucguaaagggc

SEQ ID NO: 5173 - RNA, 17 nt, Artificial Sequence
  Description of Artificial Sequence:  Nucleic Acid
  misc_feature: oligonucleotide substrate
cguaaagggccauuuuc

SEQ ID NO: 5174 - RNA, 17 nt, Artificial Sequence
  Description of Artificial Sequence:  Nucleic Acid
  misc_feature: oligonucleotide substrate
aaagggccauuuucucg

SEQ ID NO: 5175 - RNA, 17 nt, Artificial Sequence
  Description of Artificial Sequence:  Nucleic Acid
  misc_feature: oligonucleotide substrate
auuuucucgcacacacg

SEQ ID NO: 5176 - RNA, 17 nt, Artificial Sequence
  Description of Artificial Sequence:  Nucleic Acid
  misc_feature: oligonucleotide substrate
uuucucgcacacacgaa

SEQ ID NO: 5177 - RNA, 17 nt, Artificial Sequence
  Description of Artificial Sequence:  Nucleic Acid
  misc_feature: oligonucleotide substrate
ucucgcacacacgaacc

SEQ ID NO: 5178 - RNA, 17 nt, Artificial Sequence
  Description of Artificial Sequence:  Nucleic Acid
  misc_feature: oligonucleotide substrate
ucgcacacacgaacccc

SEQ ID NO: 5179 - RNA, 17 nt, Artificial Sequence
  Description of Artificial Sequence:  Nucleic Acid
  misc_feature: oligonucleotide substrate
acacacgaacccccaag

SEQ ID NO: 5180 - RNA, 17 nt, Artificial Sequence
  Description of Artificial Sequence:  Nucleic Acid
  misc_feature: oligonucleotide substrate
acccccaagucugggaa

SEQ ID NO: 5181 - RNA, 17 nt, Artificial Sequence
  Description of Artificial Sequence:  Nucleic Acid
  misc_feature: oligonucleotide substrate
gucugggaacacgauaa

SEQ ID NO: 5182 - RNA, 17 nt, Artificial Sequence
  Description of Artificial Sequence:  Nucleic Acid
  misc_feature: oligonucleotide substrate
cugggaacacgauaagg

SEQ ID NO: 5183 - RNA, 17 nt, Artificial Sequence
  Description of Artificial Sequence:  Nucleic Acid
  misc_feature: oligonucleotide substrate
ggaacacgauaaggcga

SEQ ID NO: 5184 - RNA, 17 nt, Artificial Sequence
  Description of Artificial Sequence:  Nucleic Acid
  misc_feature: oligonucleotide substrate
acgauaaggcgagcugg

SEQ ID NO: 5185 - RNA, 17 nt, Artificial Sequence
  Description of Artificial Sequence:  Nucleic Acid
  misc_feature: oligonucleotide substrate
uaaggcgagcuggcuug

SEQ ID NO: 5186 - RNA, 17 nt, Artificial Sequence
  Description of Artificial Sequence:  Nucleic Acid
  misc_feature: oligonucleotide substrate
gcgagcuggcuugcggc

SEQ ID NO: 5187 - RNA, 17 nt, Artificial Sequence
  Description of Artificial Sequence:  Nucleic Acid
  misc_feature: oligonucleotide substrate
gcuggcuugcggccucc

SEQ ID NO: 5188 - RNA, 17 nt, Artificial Sequence
  Description of Artificial Sequence:  Nucleic Acid
  misc_feature: oligonucleotide substrate
ggcuugcggccuccuuu

SEQ ID NO: 5189 - RNA, 17 nt, Artificial Sequence
  Description of Artificial Sequence:  Nucleic Acid
  misc_feature: oligonucleotide substrate
uuucucugguuggacgc

SEQ ID NO: 5190 - RNA, 17 nt, Artificial Sequence
  Description of Artificial Sequence:  Nucleic Acid
  misc_feature: oligonucleotide substrate
cugguuggacgcagaaa

SEQ ID NO: 5191 - RNA, 17 nt, Artificial Sequence
  Description of Artificial Sequence:  Nucleic Acid
  misc_feature: oligonucleotide substrate
gguuggacgcagaaaac

SEQ ID NO: 5192 - RNA, 17 nt, Artificial Sequence
  Description of Artificial Sequence:  Nucleic Acid
  misc_feature: oligonucleotide substrate
cgcagaaaaccucauuu

SEQ ID NO: 5193 - RNA, 17 nt, Artificial Sequence
  Description of Artificial Sequence:  Nucleic Acid
  misc_feature: oligonucleotide substrate
aaaaccucauuuuuugc

SEQ ID NO: 5194 - RNA, 17 nt, Artificial Sequence
  Description of Artificial Sequence:  Nucleic Acid
  misc_feature: oligonucleotide substrate
cauuuuuugccaugaug

SEQ ID NO: 5195 - RNA, 17 nt, Artificial Sequence
  Description of Artificial Sequence:  Nucleic Acid
  misc_feature: oligonucleotide substrate
uuuuugccaugauggug

SEQ ID NO: 5196 - RNA, 17 nt, Artificial Sequence
  Description of Artificial Sequence:  Nucleic Acid
  misc_feature: oligonucleotide substrate
uugccaugaugguggua

SEQ ID NO: 5197 - RNA, 17 nt, Artificial Sequence
  Description of Artificial Sequence:  Nucleic Acid
  misc_feature: oligonucleotide substrate
ccaugauggugguauca

SEQ ID NO: 5198 - RNA, 17 nt, Artificial Sequence
  Description of Artificial Sequence:  Nucleic Acid
  misc_feature: oligonucleotide substrate
ugauggugguaucaauu

SEQ ID NO: 5199 - RNA, 17 nt, Artificial Sequence
  Description of Artificial Sequence:  Nucleic Acid
  misc_feature: oligonucleotide substrate
auggugguaucaauugg

SEQ ID NO: 5200 - RNA, 17 nt, Artificial Sequence
  Description of Artificial Sequence:  Nucleic Acid
  misc_feature: oligonucleotide substrate
ugguaucaauugguguc

SEQ ID NO: 5201 - RNA, 17 nt, Artificial Sequence
  Description of Artificial Sequence:  Nucleic Acid
  misc_feature: oligonucleotide substrate
aucaauuggugucucag

SEQ ID NO: 5202 - RNA, 17 nt, Artificial Sequence
  Description of Artificial Sequence:  Nucleic Acid
  misc_feature: oligonucleotide substrate
caauuggugucucagug

SEQ ID NO: 5203 - RNA, 17 nt, Artificial Sequence
  Description of Artificial Sequence:  Nucleic Acid
  misc_feature: oligonucleotide substrate
gugucucagugucuucc

SEQ ID NO: 5204 - RNA, 17 nt, Artificial Sequence
  Description of Artificial Sequence:  Nucleic Acid
  misc_feature: oligonucleotide substrate
gucucagugucuuccag

SEQ ID NO: 5205 - RNA, 17 nt, Artificial Sequence
  Description of Artificial Sequence:  Nucleic Acid
  misc_feature: oligonucleotide substrate
gucuuccagcaaguccu

SEQ ID NO: 5206 - RNA, 17 nt, Artificial Sequence
  Description of Artificial Sequence:  Nucleic Acid
  misc_feature: oligonucleotide substrate
uccagcaaguccuucca

SEQ ID NO: 5207 - RNA, 17 nt, Artificial Sequence
  Description of Artificial Sequence:  Nucleic Acid
  misc_feature: oligonucleotide substrate
guccuuccacacggagc

SEQ ID NO: 5208 - RNA, 17 nt, Artificial Sequence
  Description of Artificial Sequence:  Nucleic Acid
  misc_feature: oligonucleotide substrate
ccuuccacacggagcgg

SEQ ID NO: 5209 - RNA, 17 nt, Artificial Sequence
  Description of Artificial Sequence:  Nucleic Acid
  misc_feature: oligonucleotide substrate
cacacggagcggaugug

SEQ ID NO: 5210 - RNA, 17 nt, Artificial Sequence
  Description of Artificial Sequence:  Nucleic Acid
  misc_feature: oligonucleotide substrate
cggagcggaugugguug

SEQ ID NO: 5211 - RNA, 17 nt, Artificial Sequence
  Description of Artificial Sequence:  Nucleic Acid
  misc_feature: oligonucleotide substrate
gagcggaugugguugac

SEQ ID NO: 5212 - RNA, 17 nt, Artificial Sequence
  Description of Artificial Sequence:  Nucleic Acid
  misc_feature: oligonucleotide substrate
cggaugugguugacggc

SEQ ID NO: 5213 - RNA, 17 nt, Artificial Sequence
  Description of Artificial Sequence:  Nucleic Acid
  misc_feature: oligonucleotide substrate
ugugguugacggccccg

SEQ ID NO: 5214 - RNA, 17 nt, Artificial Sequence
  Description of Artificial Sequence:  Nucleic Acid
  misc_feature: oligonucleotide substrate
gguugacggccccgcug

SEQ ID NO: 5215 - RNA, 17 nt, Artificial Sequence
  Description of Artificial Sequence:  Nucleic Acid
  misc_feature: oligonucleotide substrate
acggccccgcuggauag

SEQ ID NO: 5216 - RNA, 17 nt, Artificial Sequence
  Description of Artificial Sequence:  Nucleic Acid
  misc_feature: oligonucleotide substrate
cccgcuggauagguucc

SEQ ID NO: 5217 - RNA, 17 nt, Artificial Sequence
  Description of Artificial Sequence:  Nucleic Acid
  misc_feature: oligonucleotide substrate
cuggauagguuccggac

SEQ ID NO: 5218 - RNA, 17 nt, Artificial Sequence
  Description of Artificial Sequence:  Nucleic Acid
  misc_feature: oligonucleotide substrate
gguuccggacguccuuu

SEQ ID NO: 5219 - RNA, 17 nt, Artificial Sequence
  Description of Artificial Sequence:  Nucleic Acid
  misc_feature: oligonucleotide substrate
uuccggacguccuuugc

SEQ ID NO: 5220 - RNA, 17 nt, Artificial Sequence
  Description of Artificial Sequence:  Nucleic Acid
  misc_feature: oligonucleotide substrate
cguccuuugccccauaa

SEQ ID NO: 5221 - RNA, 17 nt, Artificial Sequence
  Description of Artificial Sequence:  Nucleic Acid
  misc_feature: oligonucleotide substrate
uuugccccauaaccaaa

SEQ ID NO: 5222 - RNA, 17 nt, Artificial Sequence
  Description of Artificial Sequence:  Nucleic Acid
  misc_feature: oligonucleotide substrate
gccccauaaccaaauuu

SEQ ID NO: 5223 - RNA, 17 nt, Artificial Sequence
  Description of Artificial Sequence:  Nucleic Acid
  misc_feature: oligonucleotide substrate
auaaccaaauuuggacc

SEQ ID NO: 5224 - RNA, 17 nt, Artificial Sequence
  Description of Artificial Sequence:  Nucleic Acid
  misc_feature: oligonucleotide substrate
aaauuuggaccuggccg

SEQ ID NO: 5225 - RNA, 17 nt, Artificial Sequence
  Description of Artificial Sequence:  Nucleic Acid
  misc_feature: oligonucleotide substrate
uggaccuggccgaaugu

SEQ ID NO: 5226 - RNA, 17 nt, Artificial Sequence
  Description of Artificial Sequence:  Nucleic Acid
  misc_feature: oligonucleotide substrate
cuggccgaauguggggg

SEQ ID NO: 5227 - RNA, 17 nt, Artificial Sequence
  Description of Artificial Sequence:  Nucleic Acid
  misc_feature: oligonucleotide substrate
ggccgaaugugggggcg

SEQ ID NO: 5228 - RNA, 17 nt, Artificial Sequence
  Description of Artificial Sequence:  Nucleic Acid
  misc_feature: oligonucleotide substrate
augugggggcgucaguc

SEQ ID NO: 5229 - RNA, 17 nt, Artificial Sequence
  Description of Artificial Sequence:  Nucleic Acid
  misc_feature: oligonucleotide substrate
gugggggcgucagucug

SEQ ID NO: 5230 - RNA, 17 nt, Artificial Sequence
  Description of Artificial Sequence:  Nucleic Acid
  misc_feature: oligonucleotide substrate
gggcgucagucugcagg

SEQ ID NO: 5231 - RNA, 17 nt, Artificial Sequence
  Description of Artificial Sequence:  Nucleic Acid
  misc_feature: oligonucleotide substrate
gucagucugcaggcuuc

SEQ ID NO: 5232 - RNA, 17 nt, Artificial Sequence
  Description of Artificial Sequence:  Nucleic Acid
  misc_feature: oligonucleotide substrate
gucugcaggcuuccucu

SEQ ID NO: 5233 - RNA, 17 nt, Artificial Sequence
  Description of Artificial Sequence:  Nucleic Acid
  misc_feature: oligonucleotide substrate
cuuccucuacggauaga

SEQ ID NO: 5234 - RNA, 17 nt, Artificial Sequence
  Description of Artificial Sequence:  Nucleic Acid
  misc_feature: oligonucleotide substrate
cucuacggauagaaguu

SEQ ID NO: 5235 - RNA, 17 nt, Artificial Sequence
  Description of Artificial Sequence:  Nucleic Acid
  misc_feature: oligonucleotide substrate
ggauagaaguuuagccu

SEQ ID NO: 5236 - RNA, 17 nt, Artificial Sequence
  Description of Artificial Sequence:  Nucleic Acid
  misc_feature: oligonucleotide substrate
gaaguuuagccuuaacu

SEQ ID NO: 5237 - RNA, 17 nt, Artificial Sequence
  Description of Artificial Sequence:  Nucleic Acid
  misc_feature: oligonucleotide substrate
uagccuuaacuguggac

SEQ ID NO: 5238 - RNA, 17 nt, Artificial Sequence
  Description of Artificial Sequence:  Nucleic Acid
  misc_feature: oligonucleotide substrate
ccuuaacuguggacgcc

SEQ ID NO: 5239 - RNA, 17 nt, Artificial Sequence
  Description of Artificial Sequence:  Nucleic Acid
  misc_feature: oligonucleotide substrate
aacuguggacgccuucg

SEQ ID NO: 5240 - RNA, 17 nt, Artificial Sequence
  Description of Artificial Sequence:  Nucleic Acid
  misc_feature: oligonucleotide substrate
cuguggacgccuucgcc

SEQ ID NO: 5241 - RNA, 17 nt, Artificial Sequence
  Description of Artificial Sequence:  Nucleic Acid
  misc_feature: oligonucleotide substrate
acgccuucgccuucauc

SEQ ID NO: 5242 - RNA, 17 nt, Artificial Sequence
  Description of Artificial Sequence:  Nucleic Acid
  misc_feature: oligonucleotide substrate
ucgccuucaucuccuug

SEQ ID NO: 5243 - RNA, 17 nt, Artificial Sequence
  Description of Artificial Sequence:  Nucleic Acid
  misc_feature: oligonucleotide substrate
cuccuugagcacguccc

SEQ ID NO: 5244 - RNA, 17 nt, Artificial Sequence
  Description of Artificial Sequence:  Nucleic Acid
  misc_feature: oligonucleotide substrate
ccuugagcacgucccgg

SEQ ID NO: 5245 - RNA, 17 nt, Artificial Sequence
  Description of Artificial Sequence:  Nucleic Acid
  misc_feature: oligonucleotide substrate
uugagcacgucccggua

SEQ ID NO: 5246 - RNA, 17 nt, Artificial Sequence
  Description of Artificial Sequence:  Nucleic Acid
  misc_feature: oligonucleotide substrate
acgucccgguagugguc

SEQ ID NO: 5247 - RNA, 17 nt, Artificial Sequence
  Description of Artificial Sequence:  Nucleic Acid
  misc_feature: oligonucleotide substrate
ucccgguaguggucguc

SEQ ID NO: 5248 - RNA, 17 nt, Artificial Sequence
  Description of Artificial Sequence:  Nucleic Acid
  misc_feature: oligonucleotide substrate
cgguaguggucguccag

SEQ ID NO: 5249 - RNA, 17 nt, Artificial Sequence
  Description of Artificial Sequence:  Nucleic Acid
  misc_feature: oligonucleotide substrate
uaguggucguccaggac

SEQ ID NO: 5250 - RNA, 17 nt, Artificial Sequence
  Description of Artificial Sequence:  Nucleic Acid
  misc_feature: oligonucleotide substrate
cguccaggacuugcagu

SEQ ID NO: 5251 - RNA, 17 nt, Artificial Sequence
  Description of Artificial Sequence:  Nucleic Acid
  misc_feature: oligonucleotide substrate
caggacuugcagucugu

SEQ ID NO: 5252 - RNA, 17 nt, Artificial Sequence
  Description of Artificial Sequence:  Nucleic Acid
  misc_feature: oligonucleotide substrate
gacuugcagucugucaa

SEQ ID NO: 5253 - RNA, 17 nt, Artificial Sequence
  Description of Artificial Sequence:  Nucleic Acid
  misc_feature: oligonucleotide substrate
ugcagucugucaaaggu

SEQ ID NO: 5254 - RNA, 17 nt, Artificial Sequence
  Description of Artificial Sequence:  Nucleic Acid
  misc_feature: oligonucleotide substrate
ugucaaaggugaccuuc

SEQ ID NO: 5255 - RNA, 17 nt, Artificial Sequence
  Description of Artificial Sequence:  Nucleic Acid
  misc_feature: oligonucleotide substrate
caaaggugaccuucuuc

SEQ ID NO: 5256 - RNA, 17 nt, Artificial Sequence
  Description of Artificial Sequence:  Nucleic Acid
  misc_feature: oligonucleotide substrate
cuucuucugccgcuggc

SEQ ID NO: 5257 - RNA, 17 nt, Artificial Sequence
  Description of Artificial Sequence:  Nucleic Acid
  misc_feature: oligonucleotide substrate
cuucugccgcuggcuug

SEQ ID NO: 5258 - RNA, 17 nt, Artificial Sequence
  Description of Artificial Sequence:  Nucleic Acid
  misc_feature: oligonucleotide substrate
ugccgcuggcuugcgcu

SEQ ID NO: 5259 - RNA, 17 nt, Artificial Sequence
  Description of Artificial Sequence:  Nucleic Acid
  misc_feature: oligonucleotide substrate
gcuggcuugcgcugcga

SEQ ID NO: 5260 - RNA, 17 nt, Artificial Sequence
  Description of Artificial Sequence:  Nucleic Acid
  misc_feature: oligonucleotide substrate
uggcuugcgcugcgaga

SEQ ID NO: 5261 - RNA, 17 nt, Artificial Sequence
  Description of Artificial Sequence:  Nucleic Acid
  misc_feature: oligonucleotide substrate
cuugcgcugcgagaugu

SEQ ID NO: 5262 - RNA, 17 nt, Artificial Sequence
  Description of Artificial Sequence:  Nucleic Acid
  misc_feature: oligonucleotide substrate
gcugcgagauguuguag

SEQ ID NO: 5263 - RNA, 17 nt, Artificial Sequence
  Description of Artificial Sequence:  Nucleic Acid
  misc_feature: oligonucleotide substrate
ugcgagauguuguagcg

SEQ ID NO: 5264 - RNA, 17 nt, Artificial Sequence
  Description of Artificial Sequence:  Nucleic Acid
  misc_feature: oligonucleotide substrate
gagauguuguagcguag

SEQ ID NO: 5265 - RNA, 17 nt, Artificial Sequence
  Description of Artificial Sequence:  Nucleic Acid
  misc_feature: oligonucleotide substrate
auguuguagcguagacc

SEQ ID NO: 5266 - RNA, 17 nt, Artificial Sequence
  Description of Artificial Sequence:  Nucleic Acid
  misc_feature: oligonucleotide substrate
guuguagcguagaccau

SEQ ID NO: 5267 - RNA, 17 nt, Artificial Sequence
  Description of Artificial Sequence:  Nucleic Acid
  misc_feature: oligonucleotide substrate
uagcguagaccauguug

SEQ ID NO: 5268 - RNA, 17 nt, Artificial Sequence
  Description of Artificial Sequence:  Nucleic Acid
  misc_feature: oligonucleotide substrate
cguagaccauguugugg

SEQ ID NO: 5269 - RNA, 17 nt, Artificial Sequence
  Description of Artificial Sequence:  Nucleic Acid
  misc_feature: oligonucleotide substrate
uagaccauguuguggug

SEQ ID NO: 5270 - RNA, 17 nt, Artificial Sequence
  Description of Artificial Sequence:  Nucleic Acid
  misc_feature: oligonucleotide substrate
accauguuguggugacg

SEQ ID NO: 5271 - RNA, 17 nt, Artificial Sequence
  Description of Artificial Sequence:  Nucleic Acid
  misc_feature: oligonucleotide substrate
auguuguggugacgcag

SEQ ID NO: 5272 - RNA, 17 nt, Artificial Sequence
  Description of Artificial Sequence:  Nucleic Acid
  misc_feature: oligonucleotide substrate
uuguggugacgcagcaa

SEQ ID NO: 5273 - RNA, 17 nt, Artificial Sequence
  Description of Artificial Sequence:  Nucleic Acid
  misc_feature: oligonucleotide substrate
guggugacgcagcaaag

SEQ ID NO: 5274 - RNA, 17 nt, Artificial Sequence
  Description of Artificial Sequence:  Nucleic Acid
  misc_feature: oligonucleotide substrate
gugacgcagcaaagagu

SEQ ID NO: 5275 - RNA, 17 nt, Artificial Sequence
  Description of Artificial Sequence:  Nucleic Acid
  misc_feature: oligonucleotide substrate
agcaaagaguugcucaa

SEQ ID NO: 5276 - RNA, 17 nt, Artificial Sequence
  Description of Artificial Sequence:  Nucleic Acid
  misc_feature: oligonucleotide substrate
aaagaguugcucaacgc

SEQ ID NO: 5277 - RNA, 17 nt, Artificial Sequence
  Description of Artificial Sequence:  Nucleic Acid
  misc_feature: oligonucleotide substrate
guugcucaacgcguuga

SEQ ID NO: 5278 - RNA, 17 nt, Artificial Sequence
  Description of Artificial Sequence:  Nucleic Acid
  misc_feature: oligonucleotide substrate
ugcucaacgcguugaug

SEQ ID NO: 5279 - RNA, 17 nt, Artificial Sequence
  Description of Artificial Sequence:  Nucleic Acid
  misc_feature: oligonucleotide substrate
cucaacgcguugauggg

SEQ ID NO: 5280 - RNA, 17 nt, Artificial Sequence
  Description of Artificial Sequence:  Nucleic Acid
  misc_feature: oligonucleotide substrate
acgcguugaugggcaac

SEQ ID NO: 5281 - RNA, 17 nt, Artificial Sequence
  Description of Artificial Sequence:  Nucleic Acid
  misc_feature: oligonucleotide substrate
guugaugggcaacuugc

SEQ ID NO: 5282 - RNA, 17 nt, Artificial Sequence
  Description of Artificial Sequence:  Nucleic Acid
  misc_feature: oligonucleotide substrate
gaugggcaacuugcuuu

SEQ ID NO: 5283 - RNA, 17 nt, Artificial Sequence
  Description of Artificial Sequence:  Nucleic Acid
  misc_feature: oligonucleotide substrate
ggcaacuugcuuuccuc

SEQ ID NO: 5284 - RNA, 17 nt, Artificial Sequence
  Description of Artificial Sequence:  Nucleic Acid
  misc_feature: oligonucleotide substrate
uuuccuccgcagcgcau

SEQ ID NO: 5285 - RNA, 17 nt, Artificial Sequence
  Description of Artificial Sequence:  Nucleic Acid
  misc_feature: oligonucleotide substrate
ccuccgcagcgcauggc

SEQ ID NO: 5286 - RNA, 17 nt, Artificial Sequence
  Description of Artificial Sequence:  Nucleic Acid
  misc_feature: oligonucleotide substrate
uccgcagcgcauggcgu

SEQ ID NO: 5287 - RNA, 17 nt, Artificial Sequence
  Description of Artificial Sequence:  Nucleic Acid
  misc_feature: oligonucleotide substrate
cgcagcgcauggcguga

SEQ ID NO: 5288 - RNA, 17 nt, Artificial Sequence
  Description of Artificial Sequence:  Nucleic Acid
  misc_feature: oligonucleotide substrate
agcgcauggcgugauca

SEQ ID NO: 5289 - RNA, 17 nt, Artificial Sequence
  Description of Artificial Sequence:  Nucleic Acid
  misc_feature: oligonucleotide substrate
cgcauggcgugaucagg

SEQ ID NO: 5290 - RNA, 17 nt, Artificial Sequence
  Description of Artificial Sequence:  Nucleic Acid
  misc_feature: oligonucleotide substrate
auggcgugaucagggcg

SEQ ID NO: 5291 - RNA, 17 nt, Artificial Sequence
  Description of Artificial Sequence:  Nucleic Acid
  misc_feature: oligonucleotide substrate
ugaucagggcgcccguc

SEQ ID NO: 5292 - RNA, 17 nt, Artificial Sequence
  Description of Artificial Sequence:  Nucleic Acid
  misc_feature: oligonucleotide substrate
aucagggcgcccgucca

SEQ ID NO: 5293 - RNA, 17 nt, Artificial Sequence
  Description of Artificial Sequence:  Nucleic Acid
  misc_feature: oligonucleotide substrate
gggcgcccguccaugug

SEQ ID NO: 5294 - RNA, 17 nt, Artificial Sequence
  Description of Artificial Sequence:  Nucleic Acid
  misc_feature: oligonucleotide substrate
gcccguccauguguagg

SEQ ID NO: 5295 - RNA, 17 nt, Artificial Sequence
  Description of Artificial Sequence:  Nucleic Acid
  misc_feature: oligonucleotide substrate
ccguccauguguaggac

SEQ ID NO: 5296 - RNA, 17 nt, Artificial Sequence
  Description of Artificial Sequence:  Nucleic Acid
  misc_feature: oligonucleotide substrate
guccauguguaggacau

SEQ ID NO: 5297 - RNA, 17 nt, Artificial Sequence
  Description of Artificial Sequence:  Nucleic Acid
  misc_feature: oligonucleotide substrate
uguguaggacaucgagc

SEQ ID NO: 5298 - RNA, 17 nt, Artificial Sequence
  Description of Artificial Sequence:  Nucleic Acid
  misc_feature: oligonucleotide substrate
uguaggacaucgagcag

SEQ ID NO: 5299 - RNA, 17 nt, Artificial Sequence
  Description of Artificial Sequence:  Nucleic Acid
  misc_feature: oligonucleotide substrate
gacaucgagcagcagac

SEQ ID NO: 5300 - RNA, 17 nt, Artificial Sequence
  Description of Artificial Sequence:  Nucleic Acid
  misc_feature: oligonucleotide substrate
aucgagcagcagacgac

SEQ ID NO: 5301 - RNA, 17 nt, Artificial Sequence
  Description of Artificial Sequence:  Nucleic Acid
  misc_feature: oligonucleotide substrate
agcagcagacgacaucc

SEQ ID NO: 5302 - RNA, 17 nt, Artificial Sequence
  Description of Artificial Sequence:  Nucleic Acid
  misc_feature: oligonucleotide substrate
agcagacgacauccucg

SEQ ID NO: 5303 - RNA, 17 nt, Artificial Sequence
  Description of Artificial Sequence:  Nucleic Acid
  misc_feature: oligonucleotide substrate
cagacgacauccucgcc

SEQ ID NO: 5304 - RNA, 17 nt, Artificial Sequence
  Description of Artificial Sequence:  Nucleic Acid
  misc_feature: oligonucleotide substrate
acauccucgccagccuc

SEQ ID NO: 5305 - RNA, 17 nt, Artificial Sequence
  Description of Artificial Sequence:  Nucleic Acid
  misc_feature: oligonucleotide substrate
ccucgccagccucuucg

SEQ ID NO: 5306 - RNA, 17 nt, Artificial Sequence
  Description of Artificial Sequence:  Nucleic Acid
  misc_feature: oligonucleotide substrate
gccucuucgcucacggu

SEQ ID NO: 5307 - RNA, 17 nt, Artificial Sequence
  Description of Artificial Sequence:  Nucleic Acid
  misc_feature: oligonucleotide substrate
cuucgcucacgguagac

SEQ ID NO: 5308 - RNA, 17 nt, Artificial Sequence
  Description of Artificial Sequence:  Nucleic Acid
  misc_feature: oligonucleotide substrate
cgcucacgguagaccaa

SEQ ID NO: 5309 - RNA, 17 nt, Artificial Sequence
  Description of Artificial Sequence:  Nucleic Acid
  misc_feature: oligonucleotide substrate
cacgguagaccaagacc

SEQ ID NO: 5310 - RNA, 17 nt, Artificial Sequence
  Description of Artificial Sequence:  Nucleic Acid
  misc_feature: oligonucleotide substrate
agaccaagacccgucgc

SEQ ID NO: 5311 - RNA, 17 nt, Artificial Sequence
  Description of Artificial Sequence:  Nucleic Acid
  misc_feature: oligonucleotide substrate
caagacccgucgcugag

SEQ ID NO: 5312 - RNA, 17 nt, Artificial Sequence
  Description of Artificial Sequence:  Nucleic Acid
  misc_feature: oligonucleotide substrate
gacccgucgcugagauc

SEQ ID NO: 5313 - RNA, 17 nt, Artificial Sequence
  Description of Artificial Sequence:  Nucleic Acid
  misc_feature: oligonucleotide substrate
ucgcugagaucgggauc

SEQ ID NO: 5314 - RNA, 17 nt, Artificial Sequence
  Description of Artificial Sequence:  Nucleic Acid
  misc_feature: oligonucleotide substrate
agaucgggaucccccgg

SEQ ID NO: 5315 - RNA, 17 nt, Artificial Sequence
  Description of Artificial Sequence:  Nucleic Acid
  misc_feature: oligonucleotide substrate
aucccccggcucccccu

SEQ ID NO: 5316 - RNA, 17 nt, Artificial Sequence
  Description of Artificial Sequence:  Nucleic Acid
  misc_feature: oligonucleotide substrate
aagggggggcauagagg

SEQ ID NO: 5317 - RNA, 17 nt, Artificial Sequence
  Description of Artificial Sequence:  Nucleic Acid
  misc_feature: oligonucleotide substrate
gggggggcauagaggag

SEQ ID NO: 5318 - RNA, 17 nt, Artificial Sequence
  Description of Artificial Sequence:  Nucleic Acid
  misc_feature: oligonucleotide substrate
auagaggaguacgacuc

SEQ ID NO: 5319 - RNA, 17 nt, Artificial Sequence
  Description of Artificial Sequence:  Nucleic Acid
  misc_feature: oligonucleotide substrate
agaggaguacgacucaa

SEQ ID NO: 5320 - RNA, 17 nt, Artificial Sequence
  Description of Artificial Sequence:  Nucleic Acid
  misc_feature: oligonucleotide substrate
ggaguacgacucaacgu

SEQ ID NO: 5321 - RNA, 17 nt, Artificial Sequence
  Description of Artificial Sequence:  Nucleic Acid
  misc_feature: oligonucleotide substrate
acgacucaacgucggau

SEQ ID NO: 5322 - RNA, 17 nt, Artificial Sequence
  Description of Artificial Sequence:  Nucleic Acid
  misc_feature: oligonucleotide substrate
gacucaacgucggaucc

SEQ ID NO: 5323 - RNA, 17 nt, Artificial Sequence
  Description of Artificial Sequence:  Nucleic Acid
  misc_feature: oligonucleotide substrate
aacgucggauccugcgu

SEQ ID NO: 5324 - RNA, 17 nt, Artificial Sequence
  Description of Artificial Sequence:  Nucleic Acid
  misc_feature: oligonucleotide substrate
cggauccugcgucaccg

SEQ ID NO: 5325 - RNA, 17 nt, Artificial Sequence
  Description of Artificial Sequence:  Nucleic Acid
  misc_feature: oligonucleotide substrate
gauccugcgucaccguc

SEQ ID NO: 5326 - RNA, 17 nt, Artificial Sequence
  Description of Artificial Sequence:  Nucleic Acid
  misc_feature: oligonucleotide substrate
ccugcgucaccgucauu

SEQ ID NO: 5327 - RNA, 17 nt, Artificial Sequence
  Description of Artificial Sequence:  Nucleic Acid
  misc_feature: oligonucleotide substrate
gcgucaccgucauugga

SEQ ID NO: 5328 - RNA, 17 nt, Artificial Sequence
  Description of Artificial Sequence:  Nucleic Acid
  misc_feature: oligonucleotide substrate
ucaccgucauuggaggu

SEQ ID NO: 5329 - RNA, 17 nt, Artificial Sequence
  Description of Artificial Sequence:  Nucleic Acid
  misc_feature: oligonucleotide substrate
cauuggaggucuggucg

SEQ ID NO: 5330 - RNA, 17 nt, Artificial Sequence
  Description of Artificial Sequence:  Nucleic Acid
  misc_feature: oligonucleotide substrate
gaggucuggucgggggg

SEQ ID NO: 5331 - RNA, 17 nt, Artificial Sequence
  Description of Artificial Sequence:  Nucleic Acid
  misc_feature: oligonucleotide substrate
cggggggggcgguugcc

SEQ ID NO: 5332 - RNA, 17 nt, Artificial Sequence
  Description of Artificial Sequence:  Nucleic Acid
  misc_feature: oligonucleotide substrate
ggggggcgguugccgua

SEQ ID NO: 5333 - RNA, 17 nt, Artificial Sequence
  Description of Artificial Sequence:  Nucleic Acid
  misc_feature: oligonucleotide substrate
gggcgguugccguaccu

SEQ ID NO: 5334 - RNA, 17 nt, Artificial Sequence
  Description of Artificial Sequence:  Nucleic Acid
  misc_feature: oligonucleotide substrate
cgguugccguaccucua

SEQ ID NO: 5335 - RNA, 17 nt, Artificial Sequence
  Description of Artificial Sequence:  Nucleic Acid
  misc_feature: oligonucleotide substrate
guugccguaccucuauc

SEQ ID NO: 5336 - RNA, 17 nt, Artificial Sequence
  Description of Artificial Sequence:  Nucleic Acid
  misc_feature: oligonucleotide substrate
guaccucuaucagcggc

SEQ ID NO: 5337 - RNA, 17 nt, Artificial Sequence
  Description of Artificial Sequence:  Nucleic Acid
  misc_feature: oligonucleotide substrate
cucuaucagcggccgau

SEQ ID NO: 5338 - RNA, 17 nt, Artificial Sequence
  Description of Artificial Sequence:  Nucleic Acid
  misc_feature: oligonucleotide substrate
uaucagcggccgaugau

SEQ ID NO: 5339 - RNA, 17 nt, Artificial Sequence
  Description of Artificial Sequence:  Nucleic Acid
  misc_feature: oligonucleotide substrate
agcggccgaugauucag

SEQ ID NO: 5340 - RNA, 17 nt, Artificial Sequence
  Description of Artificial Sequence:  Nucleic Acid
  misc_feature: oligonucleotide substrate
ggccgaugauucagagc

SEQ ID NO: 5341 - RNA, 17 nt, Artificial Sequence
  Description of Artificial Sequence:  Nucleic Acid
  misc_feature: oligonucleotide substrate
gauucagagcugccgaa

SEQ ID NO: 5342 - RNA, 17 nt, Artificial Sequence
  Description of Artificial Sequence:  Nucleic Acid
  misc_feature: oligonucleotide substrate
ucagagcugccgaaggu

SEQ ID NO: 5343 - RNA, 17 nt, Artificial Sequence
  Description of Artificial Sequence:  Nucleic Acid
  misc_feature: oligonucleotide substrate
ugccgaaggucuuugug

SEQ ID NO: 5344 - RNA, 17 nt, Artificial Sequence
  Description of Artificial Sequence:  Nucleic Acid
  misc_feature: oligonucleotide substrate
aggucuuuguggcgagc

SEQ ID NO: 5345 - RNA, 17 nt, Artificial Sequence
  Description of Artificial Sequence:  Nucleic Acid
  misc_feature: oligonucleotide substrate
ucuuuguggcgagcucc

SEQ ID NO: 5346 - RNA, 17 nt, Artificial Sequence
  Description of Artificial Sequence:  Nucleic Acid
  misc_feature: oligonucleotide substrate
uguggcgagcuccgcca

SEQ ID NO: 5347 - RNA, 17 nt, Artificial Sequence
  Description of Artificial Sequence:  Nucleic Acid
  misc_feature: oligonucleotide substrate
cgagcuccgccaaggca

SEQ ID NO: 5348 - RNA, 17 nt, Artificial Sequence
  Description of Artificial Sequence:  Nucleic Acid
  misc_feature: oligonucleotide substrate
ccgccaaggcagaagac

SEQ ID NO: 5349 - RNA, 17 nt, Artificial Sequence
  Description of Artificial Sequence:  Nucleic Acid
  misc_feature: oligonucleotide substrate
ggcagaagacacggugg

SEQ ID NO: 5350 - RNA, 17 nt, Artificial Sequence
  Description of Artificial Sequence:  Nucleic Acid
  misc_feature: oligonucleotide substrate
cagaagacacgguggac

SEQ ID NO: 5351 - RNA, 17 nt, Artificial Sequence
  Description of Artificial Sequence:  Nucleic Acid
  misc_feature: oligonucleotide substrate
aagacacgguggacucu

SEQ ID NO: 5352 - RNA, 17 nt, Artificial Sequence
  Description of Artificial Sequence:  Nucleic Acid
  misc_feature: oligonucleotide substrate
cacgguggacucuguca

SEQ ID NO: 5353 - RNA, 17 nt, Artificial Sequence
  Description of Artificial Sequence:  Nucleic Acid
  misc_feature: oligonucleotide substrate
uggacucugucagaaca

SEQ ID NO: 5354 - RNA, 17 nt, Artificial Sequence
  Description of Artificial Sequence:  Nucleic Acid
  misc_feature: oligonucleotide substrate
cugucagaacaaccguc

SEQ ID NO: 5355 - RNA, 17 nt, Artificial Sequence
  Description of Artificial Sequence:  Nucleic Acid
  misc_feature: oligonucleotide substrate
ucagaacaaccguccuc

SEQ ID NO: 5356 - RNA, 17 nt, Artificial Sequence
  Description of Artificial Sequence:  Nucleic Acid
  misc_feature: oligonucleotide substrate
gaacaaccguccucuuc

SEQ ID NO: 5357 - RNA, 17 nt, Artificial Sequence
  Description of Artificial Sequence:  Nucleic Acid
  misc_feature: oligonucleotide substrate
cuuccuccguggaggug

SEQ ID NO: 5358 - RNA, 17 nt, Artificial Sequence
  Description of Artificial Sequence:  Nucleic Acid
  misc_feature: oligonucleotide substrate
ccguggaggugguauug

SEQ ID NO: 5359 - RNA, 17 nt, Artificial Sequence
  Description of Artificial Sequence:  Nucleic Acid
  misc_feature: oligonucleotide substrate
uggaggugguauuggag

SEQ ID NO: 5360 - RNA, 17 nt, Artificial Sequence
  Description of Artificial Sequence:  Nucleic Acid
  misc_feature: oligonucleotide substrate
gaggugguauuggaggg

SEQ ID NO: 5361 - RNA, 17 nt, Artificial Sequence
  Description of Artificial Sequence:  Nucleic Acid
  misc_feature: oligonucleotide substrate
uuggaggggccuuggca

SEQ ID NO: 5362 - RNA, 17 nt, Artificial Sequence
  Description of Artificial Sequence:  Nucleic Acid
  misc_feature: oligonucleotide substrate
gggccuuggcagguggc

SEQ ID NO: 5363 - RNA, 17 nt, Artificial Sequence
  Description of Artificial Sequence:  Nucleic Acid
  misc_feature: oligonucleotide substrate
cuuggcagguggcaaug

SEQ ID NO: 5364 - RNA, 17 nt, Artificial Sequence
  Description of Artificial Sequence:  Nucleic Acid
  misc_feature: oligonucleotide substrate
ggcagguggcaaugggc

SEQ ID NO: 5365 - RNA, 17 nt, Artificial Sequence
  Description of Artificial Sequence:  Nucleic Acid
  misc_feature: oligonucleotide substrate
agguggcaaugggcacc

SEQ ID NO: 5366 - RNA, 17 nt, Artificial Sequence
  Description of Artificial Sequence:  Nucleic Acid
  misc_feature: oligonucleotide substrate
ggcaaugggcacccgug

SEQ ID NO: 5367 - RNA, 17 nt, Artificial Sequence
  Description of Artificial Sequence:  Nucleic Acid
  misc_feature: oligonucleotide substrate
caaugggcacccgugua

SEQ ID NO: 5368 - RNA, 17 nt, Artificial Sequence
  Description of Artificial Sequence:  Nucleic Acid
  misc_feature: oligonucleotide substrate
gggcacccguguaccac

SEQ ID NO: 5369 - RNA, 17 nt, Artificial Sequence
  Description of Artificial Sequence:  Nucleic Acid
  misc_feature: oligonucleotide substrate
gcacccguguaccaccg

SEQ ID NO: 5370 - RNA, 17 nt, Artificial Sequence
  Description of Artificial Sequence:  Nucleic Acid
  misc_feature: oligonucleotide substrate
acccguguaccaccgga

SEQ ID NO: 5371 - RNA, 17 nt, Artificial Sequence
  Description of Artificial Sequence:  Nucleic Acid
  misc_feature: oligonucleotide substrate
cguguaccaccggaggg

SEQ ID NO: 5372 - RNA, 17 nt, Artificial Sequence
  Description of Artificial Sequence:  Nucleic Acid
  misc_feature: oligonucleotide substrate
ccggagggacguagucu

SEQ ID NO: 5373 - RNA, 17 nt, Artificial Sequence
  Description of Artificial Sequence:  Nucleic Acid
  misc_feature: oligonucleotide substrate
ggagggacguagucugg

SEQ ID NO: 5374 - RNA, 17 nt, Artificial Sequence
  Description of Artificial Sequence:  Nucleic Acid
  misc_feature: oligonucleotide substrate
gggacguagucuggguc

SEQ ID NO: 5375 - RNA, 17 nt, Artificial Sequence
  Description of Artificial Sequence:  Nucleic Acid
  misc_feature: oligonucleotide substrate
uagucugggucuuucca

SEQ ID NO: 5376 - RNA, 17 nt, Artificial Sequence
  Description of Artificial Sequence:  Nucleic Acid
  misc_feature: oligonucleotide substrate
uuuccagggcucuagua

SEQ ID NO: 5377 - RNA, 17 nt, Artificial Sequence
  Description of Artificial Sequence:  Nucleic Acid
  misc_feature: oligonucleotide substrate
gggcucuaguaguggag

SEQ ID NO: 5378 - RNA, 17 nt, Artificial Sequence
  Description of Artificial Sequence:  Nucleic Acid
  misc_feature: oligonucleotide substrate
cucuaguaguggagggu

SEQ ID NO: 5379 - RNA, 17 nt, Artificial Sequence
  Description of Artificial Sequence:  Nucleic Acid
  misc_feature: oligonucleotide substrate
aguggaggguuguaauc

SEQ ID NO: 5380 - RNA, 17 nt, Artificial Sequence
  Description of Artificial Sequence:  Nucleic Acid
  misc_feature: oligonucleotide substrate
ggaggguuguaauccgg

SEQ ID NO: 5381 - RNA, 17 nt, Artificial Sequence
  Description of Artificial Sequence:  Nucleic Acid
  misc_feature: oligonucleotide substrate
ggguuguaauccgggcg

SEQ ID NO: 5382 - RNA, 17 nt, Artificial Sequence
  Description of Artificial Sequence:  Nucleic Acid
  misc_feature: oligonucleotide substrate
uaauccgggcgugccca

SEQ ID NO: 5383 - RNA, 17 nt, Artificial Sequence
  Description of Artificial Sequence:  Nucleic Acid
  misc_feature: oligonucleotide substrate
auccgggcgugcccaua

SEQ ID NO: 5384 - RNA, 17 nt, Artificial Sequence
  Description of Artificial Sequence:  Nucleic Acid
  misc_feature: oligonucleotide substrate
ccgggcgugcccauaug

SEQ ID NO: 5385 - RNA, 17 nt, Artificial Sequence
  Description of Artificial Sequence:  Nucleic Acid
  misc_feature: oligonucleotide substrate
gcgugcccauaugggua

SEQ ID NO: 5386 - RNA, 17 nt, Artificial Sequence
  Description of Artificial Sequence:  Nucleic Acid
  misc_feature: oligonucleotide substrate
gugcccauauggguaac

SEQ ID NO: 5387 - RNA, 17 nt, Artificial Sequence
  Description of Artificial Sequence:  Nucleic Acid
  misc_feature: oligonucleotide substrate
ccauauggguaacgcug

SEQ ID NO: 5388 - RNA, 17 nt, Artificial Sequence
  Description of Artificial Sequence:  Nucleic Acid
  misc_feature: oligonucleotide substrate
uauggguaacgcugaag

SEQ ID NO: 5389 - RNA, 17 nt, Artificial Sequence
  Description of Artificial Sequence:  Nucleic Acid
  misc_feature: oligonucleotide substrate
uggguaacgcugaagga

SEQ ID NO: 5390 - RNA, 17 nt, Artificial Sequence
  Description of Artificial Sequence:  Nucleic Acid
  misc_feature: oligonucleotide substrate
ugaaggaaacuucuugg

SEQ ID NO: 5391 - RNA, 17 nt, Artificial Sequence
  Description of Artificial Sequence:  Nucleic Acid
  misc_feature: oligonucleotide substrate
cuucuuggauuuccgca

SEQ ID NO: 5392 - RNA, 17 nt, Artificial Sequence
  Description of Artificial Sequence:  Nucleic Acid
  misc_feature: oligonucleotide substrate
ggauuuccgcaggaucu

SEQ ID NO: 5393 - RNA, 17 nt, Artificial Sequence
  Description of Artificial Sequence:  Nucleic Acid
  misc_feature: oligonucleotide substrate
uccgcaggaucuccgcc

SEQ ID NO: 5394 - RNA, 17 nt, Artificial Sequence
  Description of Artificial Sequence:  Nucleic Acid
  misc_feature: oligonucleotide substrate
ggaucuccgccggaaug

SEQ ID NO: 5395 - RNA, 17 nt, Artificial Sequence
  Description of Artificial Sequence:  Nucleic Acid
  misc_feature: oligonucleotide substrate
ccgccggaauggacacc

SEQ ID NO: 5396 - RNA, 17 nt, Artificial Sequence
  Description of Artificial Sequence:  Nucleic Acid
  misc_feature: oligonucleotide substrate
cggaauggacaccucuc

SEQ ID NO: 5397 - RNA, 17 nt, Artificial Sequence
  Description of Artificial Sequence:  Nucleic Acid
  misc_feature: oligonucleotide substrate
gaauggacaccucucuc

SEQ ID NO: 5398 - RNA, 17 nt, Artificial Sequence
  Description of Artificial Sequence:  Nucleic Acid
  misc_feature: oligonucleotide substrate
ucucucucauccuccuc

SEQ ID NO: 5399 - RNA, 17 nt, Artificial Sequence
  Description of Artificial Sequence:  Nucleic Acid
  misc_feature: oligonucleotide substrate
ccuccuccgcucgaagc

SEQ ID NO: 5400 - RNA, 17 nt, Artificial Sequence
  Description of Artificial Sequence:  Nucleic Acid
  misc_feature: oligonucleotide substrate
cgcucgaagcgggucaa

SEQ ID NO: 5401 - RNA, 17 nt, Artificial Sequence
  Description of Artificial Sequence:  Nucleic Acid
  misc_feature: oligonucleotide substrate
cgaagcgggucaaaaga

SEQ ID NO: 5402 - RNA, 17 nt, Artificial Sequence
  Description of Artificial Sequence:  Nucleic Acid
  misc_feature: oligonucleotide substrate
ucaaaagaguccagggu

SEQ ID NO: 5403 - RNA, 17 nt, Artificial Sequence
  Description of Artificial Sequence:  Nucleic Acid
  misc_feature: oligonucleotide substrate
aguccaggguaacuacc

SEQ ID NO: 5404 - RNA, 17 nt, Artificial Sequence
  Description of Artificial Sequence:  Nucleic Acid
  misc_feature: oligonucleotide substrate
ccaggguaacuaccuua

SEQ ID NO: 5405 - RNA, 17 nt, Artificial Sequence
  Description of Artificial Sequence:  Nucleic Acid
  misc_feature: oligonucleotide substrate
ggguaacuaccuuauuc

SEQ ID NO: 5406 - RNA, 17 nt, Artificial Sequence
  Description of Artificial Sequence:  Nucleic Acid
  misc_feature: oligonucleotide substrate
acuaccuuauucucuga

SEQ ID NO: 5407 - RNA, 17 nt, Artificial Sequence
  Description of Artificial Sequence:  Nucleic Acid
  misc_feature: oligonucleotide substrate
auucucugacuccacgc

SEQ ID NO: 5408 - RNA, 17 nt, Artificial Sequence
  Description of Artificial Sequence:  Nucleic Acid
  misc_feature: oligonucleotide substrate
cugacuccacgcgagug

SEQ ID NO: 5409 - RNA, 17 nt, Artificial Sequence
  Description of Artificial Sequence:  Nucleic Acid
  misc_feature: oligonucleotide substrate
gacuccacgcgagugau

SEQ ID NO: 5410 - RNA, 17 nt, Artificial Sequence
  Description of Artificial Sequence:  Nucleic Acid
  misc_feature: oligonucleotide substrate
ccacgcgagugauguua

SEQ ID NO: 5411 - RNA, 17 nt, Artificial Sequence
  Description of Artificial Sequence:  Nucleic Acid
  misc_feature: oligonucleotide substrate
cgcgagugauguuaccg

SEQ ID NO: 5412 - RNA, 17 nt, Artificial Sequence
  Description of Artificial Sequence:  Nucleic Acid
  misc_feature: oligonucleotide substrate
cgagugauguuaccgcc

SEQ ID NO: 5413 - RNA, 17 nt, Artificial Sequence
  Description of Artificial Sequence:  Nucleic Acid
  misc_feature: oligonucleotide substrate
gugauguuaccgcccau

SEQ ID NO: 5414 - RNA, 17 nt, Artificial Sequence
  Description of Artificial Sequence:  Nucleic Acid
  misc_feature: oligonucleotide substrate
auguuaccgcccaucuc

SEQ ID NO: 5415 - RNA, 17 nt, Artificial Sequence
  Description of Artificial Sequence:  Nucleic Acid
  misc_feature: oligonucleotide substrate
uaccgcccaucuccugc

SEQ ID NO: 5416 - RNA, 17 nt, Artificial Sequence
  Description of Artificial Sequence:  Nucleic Acid
  misc_feature: oligonucleotide substrate
caucuccugccgccaca

SEQ ID NO: 5417 - RNA, 17 nt, Artificial Sequence
  Description of Artificial Sequence:  Nucleic Acid
  misc_feature: oligonucleotide substrate
cuccugccgccacagga

SEQ ID NO: 5418 - RNA, 17 nt, Artificial Sequence
  Description of Artificial Sequence:  Nucleic Acid
  misc_feature: oligonucleotide substrate
cugccgccacaggaggu

SEQ ID NO: 5419 - RNA, 17 nt, Artificial Sequence
  Description of Artificial Sequence:  Nucleic Acid
  misc_feature: oligonucleotide substrate
cacaggagguuggccuc

SEQ ID NO: 5420 - RNA, 17 nt, Artificial Sequence
  Description of Artificial Sequence:  Nucleic Acid
  misc_feature: oligonucleotide substrate
ggagguuggccucgaug

SEQ ID NO: 5421 - RNA, 17 nt, Artificial Sequence
  Description of Artificial Sequence:  Nucleic Acid
  misc_feature: oligonucleotide substrate
uggccucgaugagguca

SEQ ID NO: 5422 - RNA, 17 nt, Artificial Sequence
  Description of Artificial Sequence:  Nucleic Acid
  misc_feature: oligonucleotide substrate
ucgaugaggucaaaguc

SEQ ID NO: 5423 - RNA, 17 nt, Artificial Sequence
  Description of Artificial Sequence:  Nucleic Acid
  misc_feature: oligonucleotide substrate
aggucaaagucugggga

SEQ ID NO: 5424 - RNA, 17 nt, Artificial Sequence
  Description of Artificial Sequence:  Nucleic Acid
  misc_feature: oligonucleotide substrate
ucuggggagucauauug

SEQ ID NO: 5425 - RNA, 17 nt, Artificial Sequence
  Description of Artificial Sequence:  Nucleic Acid
  misc_feature: oligonucleotide substrate
ggggagucauauugggu

SEQ ID NO: 5426 - RNA, 17 nt, Artificial Sequence
  Description of Artificial Sequence:  Nucleic Acid
  misc_feature: oligonucleotide substrate
ggagucauauuggguaa

SEQ ID NO: 5427 - RNA, 17 nt, Artificial Sequence
  Description of Artificial Sequence:  Nucleic Acid
  misc_feature: oligonucleotide substrate
cauauuggguaauguau

SEQ ID NO: 5428 - RNA, 17 nt, Artificial Sequence
  Description of Artificial Sequence:  Nucleic Acid
  misc_feature: oligonucleotide substrate
auuggguaauguauguc

SEQ ID NO: 5429 - RNA, 17 nt, Artificial Sequence
  Description of Artificial Sequence:  Nucleic Acid
  misc_feature: oligonucleotide substrate
uggguaauguaugucgc

SEQ ID NO: 5430 - RNA, 17 nt, Artificial Sequence
  Description of Artificial Sequence:  Nucleic Acid
  misc_feature: oligonucleotide substrate
gguaauguaugucgccu

SEQ ID NO: 5431 - RNA, 17 nt, Artificial Sequence
  Description of Artificial Sequence:  Nucleic Acid
  misc_feature: oligonucleotide substrate
uaauguaugucgccuuc

SEQ ID NO: 5432 - RNA, 17 nt, Artificial Sequence
  Description of Artificial Sequence:  Nucleic Acid
  misc_feature: oligonucleotide substrate
uguaugucgccuucgaa

SEQ ID NO: 5433 - RNA, 17 nt, Artificial Sequence
  Description of Artificial Sequence:  Nucleic Acid
  misc_feature: oligonucleotide substrate
cgaagaaggcgcagaca

SEQ ID NO: 5434 - RNA, 17 nt, Artificial Sequence
  Description of Artificial Sequence:  Nucleic Acid
  misc_feature: oligonucleotide substrate
aagaaggcgcagacagc

SEQ ID NO: 5435 - RNA, 17 nt, Artificial Sequence
  Description of Artificial Sequence:  Nucleic Acid
  misc_feature: oligonucleotide substrate
aggcgcagacagcuggc

SEQ ID NO: 5436 - RNA, 17 nt, Artificial Sequence
  Description of Artificial Sequence:  Nucleic Acid
  misc_feature: oligonucleotide substrate
cgcagacagcuggcuag

SEQ ID NO: 5437 - RNA, 17 nt, Artificial Sequence
  Description of Artificial Sequence:  Nucleic Acid
  misc_feature: oligonucleotide substrate
gacagcuggcuagcuga

SEQ ID NO: 5438 - RNA, 17 nt, Artificial Sequence
  Description of Artificial Sequence:  Nucleic Acid
  misc_feature: oligonucleotide substrate
gcuggcuagcugaggag

SEQ ID NO: 5439 - RNA, 17 nt, Artificial Sequence
  Description of Artificial Sequence:  Nucleic Acid
  misc_feature: oligonucleotide substrate
gcugaggagcuggccaa

SEQ ID NO: 5440 - RNA, 17 nt, Artificial Sequence
  Description of Artificial Sequence:  Nucleic Acid
  misc_feature: oligonucleotide substrate
aggagcuggccaaggag

SEQ ID NO: 5441 - RNA, 17 nt, Artificial Sequence
  Description of Artificial Sequence:  Nucleic Acid
  misc_feature: oligonucleotide substrate
ggggggagacccccugg

SEQ ID NO: 5442 - RNA, 17 nt, Artificial Sequence
  Description of Artificial Sequence:  Nucleic Acid
  misc_feature: oligonucleotide substrate
acccccuggccagccua

SEQ ID NO: 5443 - RNA, 17 nt, Artificial Sequence
  Description of Artificial Sequence:  Nucleic Acid
  misc_feature: oligonucleotide substrate
ccuggccagccuacgcu

SEQ ID NO: 5444 - RNA, 17 nt, Artificial Sequence
  Description of Artificial Sequence:  Nucleic Acid
  misc_feature: oligonucleotide substrate
gccagccuacgcuuagc

SEQ ID NO: 5445 - RNA, 17 nt, Artificial Sequence
  Description of Artificial Sequence:  Nucleic Acid
  misc_feature: oligonucleotide substrate
cagccuacgcuuagccg

SEQ ID NO: 5446 - RNA, 17 nt, Artificial Sequence
  Description of Artificial Sequence:  Nucleic Acid
  misc_feature: oligonucleotide substrate
uacgcuuagccgucucu

SEQ ID NO: 5447 - RNA, 17 nt, Artificial Sequence
  Description of Artificial Sequence:  Nucleic Acid
  misc_feature: oligonucleotide substrate
gcuuagccgucucuccu

SEQ ID NO: 5448 - RNA, 17 nt, Artificial Sequence
  Description of Artificial Sequence:  Nucleic Acid
  misc_feature: oligonucleotide substrate
ucucuccuguaaugugg

SEQ ID NO: 5449 - RNA, 17 nt, Artificial Sequence
  Description of Artificial Sequence:  Nucleic Acid
  misc_feature: oligonucleotide substrate
cuccuguaaugugggag

SEQ ID NO: 5450 - RNA, 17 nt, Artificial Sequence
  Description of Artificial Sequence:  Nucleic Acid
  misc_feature: oligonucleotide substrate
ccuguaaugugggaggg

SEQ ID NO: 5451 - RNA, 17 nt, Artificial Sequence
  Description of Artificial Sequence:  Nucleic Acid
  misc_feature: oligonucleotide substrate
ugggaggggucggugag

SEQ ID NO: 5452 - RNA, 17 nt, Artificial Sequence
  Description of Artificial Sequence:  Nucleic Acid
  misc_feature: oligonucleotide substrate
aggggucggugagcaug

SEQ ID NO: 5453 - RNA, 17 nt, Artificial Sequence
  Description of Artificial Sequence:  Nucleic Acid
  misc_feature: oligonucleotide substrate
gucggugagcauggacg

SEQ ID NO: 5454 - RNA, 17 nt, Artificial Sequence
  Description of Artificial Sequence:  Nucleic Acid
  misc_feature: oligonucleotide substrate
cggugagcauggacgug

SEQ ID NO: 5455 - RNA, 17 nt, Artificial Sequence
  Description of Artificial Sequence:  Nucleic Acid
  misc_feature: oligonucleotide substrate
gagcauggacgugagca

SEQ ID NO: 5456 - RNA, 17 nt, Artificial Sequence
  Description of Artificial Sequence:  Nucleic Acid
  misc_feature: oligonucleotide substrate
gcauggacgugagcacu

SEQ ID NO: 5457 - RNA, 17 nt, Artificial Sequence
  Description of Artificial Sequence:  Nucleic Acid
  misc_feature: oligonucleotide substrate
ggacgugagcacugcua

SEQ ID NO: 5458 - RNA, 17 nt, Artificial Sequence
  Description of Artificial Sequence:  Nucleic Acid
  misc_feature: oligonucleotide substrate
acgugagcacugcuaca

SEQ ID NO: 5459 - RNA, 17 nt, Artificial Sequence
  Description of Artificial Sequence:  Nucleic Acid
  misc_feature: oligonucleotide substrate
ugagcacugcuacaucc

SEQ ID NO: 5460 - RNA, 17 nt, Artificial Sequence
  Description of Artificial Sequence:  Nucleic Acid
  misc_feature: oligonucleotide substrate
gcacugcuacauccggu

SEQ ID NO: 5461 - RNA, 17 nt, Artificial Sequence
  Description of Artificial Sequence:  Nucleic Acid
  misc_feature: oligonucleotide substrate
acugcuacauccgguuc

SEQ ID NO: 5462 - RNA, 17 nt, Artificial Sequence
  Description of Artificial Sequence:  Nucleic Acid
  misc_feature: oligonucleotide substrate
uacauccgguucgggcu

SEQ ID NO: 5463 - RNA, 17 nt, Artificial Sequence
  Description of Artificial Sequence:  Nucleic Acid
  misc_feature: oligonucleotide substrate
cgguucgggcucgcaug

SEQ ID NO: 5464 - RNA, 17 nt, Artificial Sequence
  Description of Artificial Sequence:  Nucleic Acid
  misc_feature: oligonucleotide substrate
ucgggcucgcaugggag

SEQ ID NO: 5465 - RNA, 17 nt, Artificial Sequence
  Description of Artificial Sequence:  Nucleic Acid
  misc_feature: oligonucleotide substrate
gggcucgcaugggagcu

SEQ ID NO: 5466 - RNA, 17 nt, Artificial Sequence
  Description of Artificial Sequence:  Nucleic Acid
  misc_feature: oligonucleotide substrate
gcaugggagcugugacc

SEQ ID NO: 5467 - RNA, 17 nt, Artificial Sequence
  Description of Artificial Sequence:  Nucleic Acid
  misc_feature: oligonucleotide substrate
ugggagcugugacccaa

SEQ ID NO: 5468 - RNA, 17 nt, Artificial Sequence
  Description of Artificial Sequence:  Nucleic Acid
  misc_feature: oligonucleotide substrate
gagcugugacccaacca

SEQ ID NO: 5469 - RNA, 17 nt, Artificial Sequence
  Description of Artificial Sequence:  Nucleic Acid
  misc_feature: oligonucleotide substrate
gugacccaaccagguau

SEQ ID NO: 5470 - RNA, 17 nt, Artificial Sequence
  Description of Artificial Sequence:  Nucleic Acid
  misc_feature: oligonucleotide substrate
ccaaccagguauugguu

SEQ ID NO: 5471 - RNA, 17 nt, Artificial Sequence
  Description of Artificial Sequence:  Nucleic Acid
  misc_feature: oligonucleotide substrate
aaccagguauugguuga

SEQ ID NO: 5472 - RNA, 17 nt, Artificial Sequence
  Description of Artificial Sequence:  Nucleic Acid
  misc_feature: oligonucleotide substrate
agguauugguugagccc

SEQ ID NO: 5473 - RNA, 17 nt, Artificial Sequence
  Description of Artificial Sequence:  Nucleic Acid
  misc_feature: oligonucleotide substrate
uugguugagcccgaccu

SEQ ID NO: 5474 - RNA, 17 nt, Artificial Sequence
  Description of Artificial Sequence:  Nucleic Acid
  misc_feature: oligonucleotide substrate
ugagcccgaccuggaau

SEQ ID NO: 5475 - RNA, 17 nt, Artificial Sequence
  Description of Artificial Sequence:  Nucleic Acid
  misc_feature: oligonucleotide substrate
gaccuggaaugugaccu

SEQ ID NO: 5476 - RNA, 17 nt, Artificial Sequence
  Description of Artificial Sequence:  Nucleic Acid
  misc_feature: oligonucleotide substrate
ccuggaaugugaccucc

SEQ ID NO: 5477 - RNA, 17 nt, Artificial Sequence
  Description of Artificial Sequence:  Nucleic Acid
  misc_feature: oligonucleotide substrate
ggaaugugaccuccucc

SEQ ID NO: 5478 - RNA, 17 nt, Artificial Sequence
  Description of Artificial Sequence:  Nucleic Acid
  misc_feature: oligonucleotide substrate
cuccucccguaggagag

SEQ ID NO: 5479 - RNA, 17 nt, Artificial Sequence
  Description of Artificial Sequence:  Nucleic Acid
  misc_feature: oligonucleotide substrate
uaggagagguccacacg

SEQ ID NO: 5480 - RNA, 17 nt, Artificial Sequence
  Description of Artificial Sequence:  Nucleic Acid
  misc_feature: oligonucleotide substrate
agagguccacacgccgg

SEQ ID NO: 5481 - RNA, 17 nt, Artificial Sequence
  Description of Artificial Sequence:  Nucleic Acid
  misc_feature: oligonucleotide substrate
agguccacacgccggag

SEQ ID NO: 5482 - RNA, 17 nt, Artificial Sequence
  Description of Artificial Sequence:  Nucleic Acid
  misc_feature: oligonucleotide substrate
guccacacgccggagcg

SEQ ID NO: 5483 - RNA, 17 nt, Artificial Sequence
  Description of Artificial Sequence:  Nucleic Acid
  misc_feature: oligonucleotide substrate
acgccggagcguuucug

SEQ ID NO: 5484 - RNA, 17 nt, Artificial Sequence
  Description of Artificial Sequence:  Nucleic Acid
  misc_feature: oligonucleotide substrate
gccggagcguuucugug

SEQ ID NO: 5485 - RNA, 17 nt, Artificial Sequence
  Description of Artificial Sequence:  Nucleic Acid
  misc_feature: oligonucleotide substrate
gcguuucugugcaggcg

SEQ ID NO: 5486 - RNA, 17 nt, Artificial Sequence
  Description of Artificial Sequence:  Nucleic Acid
  misc_feature: oligonucleotide substrate
guuucugugcaggcgua

SEQ ID NO: 5487 - RNA, 17 nt, Artificial Sequence
  Description of Artificial Sequence:  Nucleic Acid
  misc_feature: oligonucleotide substrate
cugugcaggcguacccc

SEQ ID NO: 5488 - RNA, 17 nt, Artificial Sequence
  Description of Artificial Sequence:  Nucleic Acid
  misc_feature: oligonucleotide substrate
gugcaggcguaccccau

SEQ ID NO: 5489 - RNA, 17 nt, Artificial Sequence
  Description of Artificial Sequence:  Nucleic Acid
  misc_feature: oligonucleotide substrate
gcaggcguaccccaucc

SEQ ID NO: 5490 - RNA, 17 nt, Artificial Sequence
  Description of Artificial Sequence:  Nucleic Acid
  misc_feature: oligonucleotide substrate
cguaccccauccacuuc

SEQ ID NO: 5491 - RNA, 17 nt, Artificial Sequence
  Description of Artificial Sequence:  Nucleic Acid
  misc_feature: oligonucleotide substrate
ccccauccacuuccgug

SEQ ID NO: 5492 - RNA, 17 nt, Artificial Sequence
  Description of Artificial Sequence:  Nucleic Acid
  misc_feature: oligonucleotide substrate
ccacuuccgugaagaau

SEQ ID NO: 5493 - RNA, 17 nt, Artificial Sequence
  Description of Artificial Sequence:  Nucleic Acid
  misc_feature: oligonucleotide substrate
cgugaagaauucggggg

SEQ ID NO: 5494 - RNA, 17 nt, Artificial Sequence
  Description of Artificial Sequence:  Nucleic Acid
  misc_feature: oligonucleotide substrate
uucggggggcggaaccu

SEQ ID NO: 5495 - RNA, 17 nt, Artificial Sequence
  Description of Artificial Sequence:  Nucleic Acid
  misc_feature: oligonucleotide substrate
ggggcggaaccuggcac

SEQ ID NO: 5496 - RNA, 17 nt, Artificial Sequence
  Description of Artificial Sequence:  Nucleic Acid
  misc_feature: oligonucleotide substrate
ggaaccuggcacgggca

SEQ ID NO: 5497 - RNA, 17 nt, Artificial Sequence
  Description of Artificial Sequence:  Nucleic Acid
  misc_feature: oligonucleotide substrate
aaccuggcacgggcauu

SEQ ID NO: 5498 - RNA, 17 nt, Artificial Sequence
  Description of Artificial Sequence:  Nucleic Acid
  misc_feature: oligonucleotide substrate
uggcacgggcauuuuac

SEQ ID NO: 5499 - RNA, 17 nt, Artificial Sequence
  Description of Artificial Sequence:  Nucleic Acid
  misc_feature: oligonucleotide substrate
gcacgggcauuuuacgu

SEQ ID NO: 5500 - RNA, 17 nt, Artificial Sequence
  Description of Artificial Sequence:  Nucleic Acid
  misc_feature: oligonucleotide substrate
ggcauuuuacguuguca

SEQ ID NO: 5501 - RNA, 17 nt, Artificial Sequence
  Description of Artificial Sequence:  Nucleic Acid
  misc_feature: oligonucleotide substrate
cauuuuacguugucagu

SEQ ID NO: 5502 - RNA, 17 nt, Artificial Sequence
  Description of Artificial Sequence:  Nucleic Acid
  misc_feature: oligonucleotide substrate
uuuacguugucaguggu

SEQ ID NO: 5503 - RNA, 17 nt, Artificial Sequence
  Description of Artificial Sequence:  Nucleic Acid
  misc_feature: oligonucleotide substrate
cguugucaguggucaug

SEQ ID NO: 5504 - RNA, 17 nt, Artificial Sequence
  Description of Artificial Sequence:  Nucleic Acid
  misc_feature: oligonucleotide substrate
ugucaguggucaugccc

SEQ ID NO: 5505 - RNA, 17 nt, Artificial Sequence
  Description of Artificial Sequence:  Nucleic Acid
  misc_feature: oligonucleotide substrate
caguggucaugcccguc

SEQ ID NO: 5506 - RNA, 17 nt, Artificial Sequence
  Description of Artificial Sequence:  Nucleic Acid
  misc_feature: oligonucleotide substrate
guggucaugcccgucac

SEQ ID NO: 5507 - RNA, 17 nt, Artificial Sequence
  Description of Artificial Sequence:  Nucleic Acid
  misc_feature: oligonucleotide substrate
ucaugcccgucacguag

SEQ ID NO: 5508 - RNA, 17 nt, Artificial Sequence
  Description of Artificial Sequence:  Nucleic Acid
  misc_feature: oligonucleotide substrate
ugcccgucacguagugg

SEQ ID NO: 5509 - RNA, 17 nt, Artificial Sequence
  Description of Artificial Sequence:  Nucleic Acid
  misc_feature: oligonucleotide substrate
cccgucacguaguggaa

SEQ ID NO: 5510 - RNA, 17 nt, Artificial Sequence
  Description of Artificial Sequence:  Nucleic Acid
  misc_feature: oligonucleotide substrate
gucacguaguggaaauc

SEQ ID NO: 5511 - RNA, 17 nt, Artificial Sequence
  Description of Artificial Sequence:  Nucleic Acid
  misc_feature: oligonucleotide substrate
uaguggaaaucccccac

SEQ ID NO: 5512 - RNA, 17 nt, Artificial Sequence
  Description of Artificial Sequence:  Nucleic Acid
  misc_feature: oligonucleotide substrate
aaucccccacccgcgua

SEQ ID NO: 5513 - RNA, 17 nt, Artificial Sequence
  Description of Artificial Sequence:  Nucleic Acid
  misc_feature: oligonucleotide substrate
ccccacccgcguaaccu

SEQ ID NO: 5514 - RNA, 17 nt, Artificial Sequence
  Description of Artificial Sequence:  Nucleic Acid
  misc_feature: oligonucleotide substrate
ccacccgcguaaccucc

SEQ ID NO: 5515 - RNA, 17 nt, Artificial Sequence
  Description of Artificial Sequence:  Nucleic Acid
  misc_feature: oligonucleotide substrate
cccgcguaaccuccacg

SEQ ID NO: 5516 - RNA, 17 nt, Artificial Sequence
  Description of Artificial Sequence:  Nucleic Acid
  misc_feature: oligonucleotide substrate
uaaccuccacguacucc

SEQ ID NO: 5517 - RNA, 17 nt, Artificial Sequence
  Description of Artificial Sequence:  Nucleic Acid
  misc_feature: oligonucleotide substrate
accuccacguacuccuc

SEQ ID NO: 5518 - RNA, 17 nt, Artificial Sequence
  Description of Artificial Sequence:  Nucleic Acid
  misc_feature: oligonucleotide substrate
cuccacguacuccucag

SEQ ID NO: 5519 - RNA, 17 nt, Artificial Sequence
  Description of Artificial Sequence:  Nucleic Acid
  misc_feature: oligonucleotide substrate
acuccucagcggccacc

SEQ ID NO: 5520 - RNA, 17 nt, Artificial Sequence
  Description of Artificial Sequence:  Nucleic Acid
  misc_feature: oligonucleotide substrate
ccucagcggccacccgc

SEQ ID NO: 5521 - RNA, 17 nt, Artificial Sequence
  Description of Artificial Sequence:  Nucleic Acid
  misc_feature: oligonucleotide substrate
cagcggccacccgccau

SEQ ID NO: 5522 - RNA, 17 nt, Artificial Sequence
  Description of Artificial Sequence:  Nucleic Acid
  misc_feature: oligonucleotide substrate
ggccacccgccauagcg

SEQ ID NO: 5523 - RNA, 17 nt, Artificial Sequence
  Description of Artificial Sequence:  Nucleic Acid
  misc_feature: oligonucleotide substrate
cacccgccauagcgccc

SEQ ID NO: 5524 - RNA, 17 nt, Artificial Sequence
  Description of Artificial Sequence:  Nucleic Acid
  misc_feature: oligonucleotide substrate
ccgccauagcgcccuag

SEQ ID NO: 5525 - RNA, 17 nt, Artificial Sequence
  Description of Artificial Sequence:  Nucleic Acid
  misc_feature: oligonucleotide substrate
gccauagcgcccuagaa

SEQ ID NO: 5526 - RNA, 17 nt, Artificial Sequence
  Description of Artificial Sequence:  Nucleic Acid
  misc_feature: oligonucleotide substrate
gcccuagaauaguuugg

SEQ ID NO: 5527 - RNA, 17 nt, Artificial Sequence
  Description of Artificial Sequence:  Nucleic Acid
  misc_feature: oligonucleotide substrate
cuagaauaguuuggcgc

SEQ ID NO: 5528 - RNA, 17 nt, Artificial Sequence
  Description of Artificial Sequence:  Nucleic Acid
  misc_feature: oligonucleotide substrate
auaguuuggcgccgggg

SEQ ID NO: 5529 - RNA, 17 nt, Artificial Sequence
  Description of Artificial Sequence:  Nucleic Acid
  misc_feature: oligonucleotide substrate
aguuuggcgccggggag

SEQ ID NO: 5530 - RNA, 17 nt, Artificial Sequence
  Description of Artificial Sequence:  Nucleic Acid
  misc_feature: oligonucleotide substrate
cggggagggugugcagg

SEQ ID NO: 5531 - RNA, 17 nt, Artificial Sequence
  Description of Artificial Sequence:  Nucleic Acid
  misc_feature: oligonucleotide substrate
gggagggugugcagggg

SEQ ID NO: 5532 - RNA, 17 nt, Artificial Sequence
  Description of Artificial Sequence:  Nucleic Acid
  misc_feature: oligonucleotide substrate
gagggugugcaggggcc

SEQ ID NO: 5533 - RNA, 17 nt, Artificial Sequence
  Description of Artificial Sequence:  Nucleic Acid
  misc_feature: oligonucleotide substrate
gugcaggggcccguggu

SEQ ID NO: 5534 - RNA, 17 nt, Artificial Sequence
  Description of Artificial Sequence:  Nucleic Acid
  misc_feature: oligonucleotide substrate
aggggcccgugguguau

SEQ ID NO: 5535 - RNA, 17 nt, Artificial Sequence
  Description of Artificial Sequence:  Nucleic Acid
  misc_feature: oligonucleotide substrate
ggcccgugguguaugcg

SEQ ID NO: 5536 - RNA, 17 nt, Artificial Sequence
  Description of Artificial Sequence:  Nucleic Acid
  misc_feature: oligonucleotide substrate
cccgugguguaugcguu

SEQ ID NO: 5537 - RNA, 17 nt, Artificial Sequence
  Description of Artificial Sequence:  Nucleic Acid
  misc_feature: oligonucleotide substrate
cgugguguaugcguuga

SEQ ID NO: 5538 - RNA, 17 nt, Artificial Sequence
  Description of Artificial Sequence:  Nucleic Acid
  misc_feature: oligonucleotide substrate
ugguguaugcguugaug

SEQ ID NO: 5539 - RNA, 17 nt, Artificial Sequence
  Description of Artificial Sequence:  Nucleic Acid
  misc_feature: oligonucleotide substrate
guguaugcguugauggg

SEQ ID NO: 5540 - RNA, 17 nt, Artificial Sequence
  Description of Artificial Sequence:  Nucleic Acid
  misc_feature: oligonucleotide substrate
augcguugauggggaau

SEQ ID NO: 5541 - RNA, 17 nt, Artificial Sequence
  Description of Artificial Sequence:  Nucleic Acid
  misc_feature: oligonucleotide substrate
gauggggaauguuccau

SEQ ID NO: 5542 - RNA, 17 nt, Artificial Sequence
  Description of Artificial Sequence:  Nucleic Acid
  misc_feature: oligonucleotide substrate
uggggaauguuccaugc

SEQ ID NO: 5543 - RNA, 17 nt, Artificial Sequence
  Description of Artificial Sequence:  Nucleic Acid
  misc_feature: oligonucleotide substrate
aauguuccaugccacgu

SEQ ID NO: 5544 - RNA, 17 nt, Artificial Sequence
  Description of Artificial Sequence:  Nucleic Acid
  misc_feature: oligonucleotide substrate
uguuccaugccacgugu

SEQ ID NO: 5545 - RNA, 17 nt, Artificial Sequence
  Description of Artificial Sequence:  Nucleic Acid
  misc_feature: oligonucleotide substrate
uccaugccacguguugc

SEQ ID NO: 5546 - RNA, 17 nt, Artificial Sequence
  Description of Artificial Sequence:  Nucleic Acid
  misc_feature: oligonucleotide substrate
caugccacguguugcua

SEQ ID NO: 5547 - RNA, 17 nt, Artificial Sequence
  Description of Artificial Sequence:  Nucleic Acid
  misc_feature: oligonucleotide substrate
ugccacguguugcuaca

SEQ ID NO: 5548 - RNA, 17 nt, Artificial Sequence
  Description of Artificial Sequence:  Nucleic Acid
  misc_feature: oligonucleotide substrate
cacguguugcuacaggu

SEQ ID NO: 5549 - RNA, 17 nt, Artificial Sequence
  Description of Artificial Sequence:  Nucleic Acid
  misc_feature: oligonucleotide substrate
guguugcuacaggucuu

SEQ ID NO: 5550 - RNA, 17 nt, Artificial Sequence
  Description of Artificial Sequence:  Nucleic Acid
  misc_feature: oligonucleotide substrate
ugcuacaggucuuaggc

SEQ ID NO: 5551 - RNA, 17 nt, Artificial Sequence
  Description of Artificial Sequence:  Nucleic Acid
  misc_feature: oligonucleotide substrate
ggucuuaggcccgacga

SEQ ID NO: 5552 - RNA, 17 nt, Artificial Sequence
  Description of Artificial Sequence:  Nucleic Acid
  misc_feature: oligonucleotide substrate
uaggcccgacgauccuc

SEQ ID NO: 5553 - RNA, 17 nt, Artificial Sequence
  Description of Artificial Sequence:  Nucleic Acid
  misc_feature: oligonucleotide substrate
gcccgacgauccucaug

SEQ ID NO: 5554 - RNA, 17 nt, Artificial Sequence
  Description of Artificial Sequence:  Nucleic Acid
  misc_feature: oligonucleotide substrate
cgauccucauggaaccg

SEQ ID NO: 5555 - RNA, 17 nt, Artificial Sequence
  Description of Artificial Sequence:  Nucleic Acid
  misc_feature: oligonucleotide substrate
cucauggaaccguucuu

SEQ ID NO: 5556 - RNA, 17 nt, Artificial Sequence
  Description of Artificial Sequence:  Nucleic Acid
  misc_feature: oligonucleotide substrate
auggaaccguucuugac

SEQ ID NO: 5557 - RNA, 17 nt, Artificial Sequence
  Description of Artificial Sequence:  Nucleic Acid
  misc_feature: oligonucleotide substrate
cguucuugacaugucca

SEQ ID NO: 5558 - RNA, 17 nt, Artificial Sequence
  Description of Artificial Sequence:  Nucleic Acid
  misc_feature: oligonucleotide substrate
uucuugacauguccagu

SEQ ID NO: 5559 - RNA, 17 nt, Artificial Sequence
  Description of Artificial Sequence:  Nucleic Acid
  misc_feature: oligonucleotide substrate
cuugacauguccaguga

SEQ ID NO: 5560 - RNA, 17 nt, Artificial Sequence
  Description of Artificial Sequence:  Nucleic Acid
  misc_feature: oligonucleotide substrate
cauguccagugaucugc

SEQ ID NO: 5561 - RNA, 17 nt, Artificial Sequence
  Description of Artificial Sequence:  Nucleic Acid
  misc_feature: oligonucleotide substrate
guccagugaucugcgcu

SEQ ID NO: 5562 - RNA, 17 nt, Artificial Sequence
  Description of Artificial Sequence:  Nucleic Acid
  misc_feature: oligonucleotide substrate
agugaucugcgcuccgc

SEQ ID NO: 5563 - RNA, 17 nt, Artificial Sequence
  Description of Artificial Sequence:  Nucleic Acid
  misc_feature: oligonucleotide substrate
ugaucugcgcuccgcau

SEQ ID NO: 5564 - RNA, 17 nt, Artificial Sequence
  Description of Artificial Sequence:  Nucleic Acid
  misc_feature: oligonucleotide substrate
ugcgcuccgcaugggca

SEQ ID NO: 5565 - RNA, 17 nt, Artificial Sequence
  Description of Artificial Sequence:  Nucleic Acid
  misc_feature: oligonucleotide substrate
cgcuccgcaugggcagg

SEQ ID NO: 5566 - RNA, 17 nt, Artificial Sequence
  Description of Artificial Sequence:  Nucleic Acid
  misc_feature: oligonucleotide substrate
ccgcaugggcagguggu

SEQ ID NO: 5567 - RNA, 17 nt, Artificial Sequence
  Description of Artificial Sequence:  Nucleic Acid
  misc_feature: oligonucleotide substrate
augggcaggugguuugc

SEQ ID NO: 5568 - RNA, 17 nt, Artificial Sequence
  Description of Artificial Sequence:  Nucleic Acid
  misc_feature: oligonucleotide substrate
ggcaggugguuugcaug

SEQ ID NO: 5569 - RNA, 17 nt, Artificial Sequence
  Description of Artificial Sequence:  Nucleic Acid
  misc_feature: oligonucleotide substrate
ggugguuugcaugauac

SEQ ID NO: 5570 - RNA, 17 nt, Artificial Sequence
  Description of Artificial Sequence:  Nucleic Acid
  misc_feature: oligonucleotide substrate
ugguuugcaugauaccg

SEQ ID NO: 5571 - RNA, 17 nt, Artificial Sequence
  Description of Artificial Sequence:  Nucleic Acid
  misc_feature: oligonucleotide substrate
uuugcaugauaccgucu

SEQ ID NO: 5572 - RNA, 17 nt, Artificial Sequence
  Description of Artificial Sequence:  Nucleic Acid
  misc_feature: oligonucleotide substrate
ugcaugauaccgucucc

SEQ ID NO: 5573 - RNA, 17 nt, Artificial Sequence
  Description of Artificial Sequence:  Nucleic Acid
  misc_feature: oligonucleotide substrate
augauaccgucuccccg

SEQ ID NO: 5574 - RNA, 17 nt, Artificial Sequence
  Description of Artificial Sequence:  Nucleic Acid
  misc_feature: oligonucleotide substrate
gucuccccgccagaccc

SEQ ID NO: 5575 - RNA, 17 nt, Artificial Sequence
  Description of Artificial Sequence:  Nucleic Acid
  misc_feature: oligonucleotide substrate
cccgccagaccccccug

SEQ ID NO: 5576 - RNA, 17 nt, Artificial Sequence
  Description of Artificial Sequence:  Nucleic Acid
  misc_feature: oligonucleotide substrate
accccccuguacccacg

SEQ ID NO: 5577 - RNA, 17 nt, Artificial Sequence
  Description of Artificial Sequence:  Nucleic Acid
  misc_feature: oligonucleotide substrate
cccccuguacccacguu

SEQ ID NO: 5578 - RNA, 17 nt, Artificial Sequence
  Description of Artificial Sequence:  Nucleic Acid
  misc_feature: oligonucleotide substrate
cuguacccacguuggca

SEQ ID NO: 5579 - RNA, 17 nt, Artificial Sequence
  Description of Artificial Sequence:  Nucleic Acid
  misc_feature: oligonucleotide substrate
guacccacguuggcaug

SEQ ID NO: 5580 - RNA, 17 nt, Artificial Sequence
  Description of Artificial Sequence:  Nucleic Acid
  misc_feature: oligonucleotide substrate
ccacguuggcaugagaa

SEQ ID NO: 5581 - RNA, 17 nt, Artificial Sequence
  Description of Artificial Sequence:  Nucleic Acid
  misc_feature: oligonucleotide substrate
acguuggcaugagaaga

SEQ ID NO: 5582 - RNA, 17 nt, Artificial Sequence
  Description of Artificial Sequence:  Nucleic Acid
  misc_feature: oligonucleotide substrate
agaaagggacucccggc

SEQ ID NO: 5583 - RNA, 17 nt, Artificial Sequence
  Description of Artificial Sequence:  Nucleic Acid
  misc_feature: oligonucleotide substrate
gacucccggcaaccgcg

SEQ ID NO: 5584 - RNA, 17 nt, Artificial Sequence
  Description of Artificial Sequence:  Nucleic Acid
  misc_feature: oligonucleotide substrate
ucccggcaaccgcggca

SEQ ID NO: 5585 - RNA, 17 nt, Artificial Sequence
  Description of Artificial Sequence:  Nucleic Acid
  misc_feature: oligonucleotide substrate
cggcaaccgcggcagga

SEQ ID NO: 5586 - RNA, 17 nt, Artificial Sequence
  Description of Artificial Sequence:  Nucleic Acid
  misc_feature: oligonucleotide substrate
caaccgcggcaggagcu

SEQ ID NO: 5587 - RNA, 17 nt, Artificial Sequence
  Description of Artificial Sequence:  Nucleic Acid
  misc_feature: oligonucleotide substrate
cggcaggagcuuggacu

SEQ ID NO: 5588 - RNA, 17 nt, Artificial Sequence
  Description of Artificial Sequence:  Nucleic Acid
  misc_feature: oligonucleotide substrate
gagcuuggacugaagcc

SEQ ID NO: 5589 - RNA, 17 nt, Artificial Sequence
  Description of Artificial Sequence:  Nucleic Acid
  misc_feature: oligonucleotide substrate
ggacugaagccaggucu

SEQ ID NO: 5590 - RNA, 17 nt, Artificial Sequence
  Description of Artificial Sequence:  Nucleic Acid
  misc_feature: oligonucleotide substrate
gaagccaggucuugaag

SEQ ID NO: 5591 - RNA, 17 nt, Artificial Sequence
  Description of Artificial Sequence:  Nucleic Acid
  misc_feature: oligonucleotide substrate
gucuugaagucagucaa

SEQ ID NO: 5592 - RNA, 17 nt, Artificial Sequence
  Description of Artificial Sequence:  Nucleic Acid
  misc_feature: oligonucleotide substrate
ugaagucagucaacacc

SEQ ID NO: 5593 - RNA, 17 nt, Artificial Sequence
  Description of Artificial Sequence:  Nucleic Acid
  misc_feature: oligonucleotide substrate
gucagucaacaccgugc

SEQ ID NO: 5594 - RNA, 17 nt, Artificial Sequence
  Description of Artificial Sequence:  Nucleic Acid
  misc_feature: oligonucleotide substrate
cagucaacaccgugcau

SEQ ID NO: 5595 - RNA, 17 nt, Artificial Sequence
  Description of Artificial Sequence:  Nucleic Acid
  misc_feature: oligonucleotide substrate
ucaacaccgugcauauc

SEQ ID NO: 5596 - RNA, 17 nt, Artificial Sequence
  Description of Artificial Sequence:  Nucleic Acid
  misc_feature: oligonucleotide substrate
aacaccgugcauaucca

SEQ ID NO: 5597 - RNA, 17 nt, Artificial Sequence
  Description of Artificial Sequence:  Nucleic Acid
  misc_feature: oligonucleotide substrate
caccgugcauauccagu

SEQ ID NO: 5598 - RNA, 17 nt, Artificial Sequence
  Description of Artificial Sequence:  Nucleic Acid
  misc_feature: oligonucleotide substrate
ccgugcauauccagucc

SEQ ID NO: 5599 - RNA, 17 nt, Artificial Sequence
  Description of Artificial Sequence:  Nucleic Acid
  misc_feature: oligonucleotide substrate
cauauccagucccaaac

SEQ ID NO: 5600 - RNA, 17 nt, Artificial Sequence
  Description of Artificial Sequence:  Nucleic Acid
  misc_feature: oligonucleotide substrate
agucccaaacaucccuu

SEQ ID NO: 5601 - RNA, 17 nt, Artificial Sequence
  Description of Artificial Sequence:  Nucleic Acid
  misc_feature: oligonucleotide substrate
ucccaaacaucccuuag

SEQ ID NO: 5602 - RNA, 17 nt, Artificial Sequence
  Description of Artificial Sequence:  Nucleic Acid
  misc_feature: oligonucleotide substrate
aucccuuagccacgagc

SEQ ID NO: 5603 - RNA, 17 nt, Artificial Sequence
  Description of Artificial Sequence:  Nucleic Acid
  misc_feature: oligonucleotide substrate
ccuuagccacgagccgg

SEQ ID NO: 5604 - RNA, 17 nt, Artificial Sequence
  Description of Artificial Sequence:  Nucleic Acid
  misc_feature: oligonucleotide substrate
agccacgagccggaaca

SEQ ID NO: 5605 - RNA, 17 nt, Artificial Sequence
  Description of Artificial Sequence:  Nucleic Acid
  misc_feature: oligonucleotide substrate
gagccggaacauggcgu

SEQ ID NO: 5606 - RNA, 17 nt, Artificial Sequence
  Description of Artificial Sequence:  Nucleic Acid
  misc_feature: oligonucleotide substrate
gccggaacauggcgugg

SEQ ID NO: 5607 - RNA, 17 nt, Artificial Sequence
  Description of Artificial Sequence:  Nucleic Acid
  misc_feature: oligonucleotide substrate
ggaacauggcguggagc

SEQ ID NO: 5608 - RNA, 17 nt, Artificial Sequence
  Description of Artificial Sequence:  Nucleic Acid
  misc_feature: oligonucleotide substrate
aacauggcguggagcag

SEQ ID NO: 5609 - RNA, 17 nt, Artificial Sequence
  Description of Artificial Sequence:  Nucleic Acid
  misc_feature: oligonucleotide substrate
ggcguggagcaguccuc

SEQ ID NO: 5610 - RNA, 17 nt, Artificial Sequence
  Description of Artificial Sequence:  Nucleic Acid
  misc_feature: oligonucleotide substrate
guggagcaguccucauu

SEQ ID NO: 5611 - RNA, 17 nt, Artificial Sequence
  Description of Artificial Sequence:  Nucleic Acid
  misc_feature: oligonucleotide substrate
caguccucauugaucca

SEQ ID NO: 5612 - RNA, 17 nt, Artificial Sequence
  Description of Artificial Sequence:  Nucleic Acid
  misc_feature: oligonucleotide substrate
ccucauugauccacuga

SEQ ID NO: 5613 - RNA, 17 nt, Artificial Sequence
  Description of Artificial Sequence:  Nucleic Acid
  misc_feature: oligonucleotide substrate
auugauccacugaugga

SEQ ID NO: 5614 - RNA, 17 nt, Artificial Sequence
  Description of Artificial Sequence:  Nucleic Acid
  misc_feature: oligonucleotide substrate
auccacugauggagccu

SEQ ID NO: 5615 - RNA, 17 nt, Artificial Sequence
  Description of Artificial Sequence:  Nucleic Acid
  misc_feature: oligonucleotide substrate
cugauggagccuccuca

SEQ ID NO: 5616 - RNA, 17 nt, Artificial Sequence
  Description of Artificial Sequence:  Nucleic Acid
  misc_feature: oligonucleotide substrate
ccuccucagcagcugag

SEQ ID NO: 5617 - RNA, 17 nt, Artificial Sequence
  Description of Artificial Sequence:  Nucleic Acid
  misc_feature: oligonucleotide substrate
ccucagcagcugaguga

SEQ ID NO: 5618 - RNA, 17 nt, Artificial Sequence
  Description of Artificial Sequence:  Nucleic Acid
  misc_feature: oligonucleotide substrate
gcagcugagugauggug

SEQ ID NO: 5619 - RNA, 17 nt, Artificial Sequence
  Description of Artificial Sequence:  Nucleic Acid
  misc_feature: oligonucleotide substrate
gcugagugauggugagg

SEQ ID NO: 5620 - RNA, 17 nt, Artificial Sequence
  Description of Artificial Sequence:  Nucleic Acid
  misc_feature: oligonucleotide substrate
gagugauggugaggcug

SEQ ID NO: 5621 - RNA, 17 nt, Artificial Sequence
  Description of Artificial Sequence:  Nucleic Acid
  misc_feature: oligonucleotide substrate
auggugaggcuggagag

SEQ ID NO: 5622 - RNA, 17 nt, Artificial Sequence
  Description of Artificial Sequence:  Nucleic Acid
  misc_feature: oligonucleotide substrate
uggagaggauuugugug

SEQ ID NO: 5623 - RNA, 17 nt, Artificial Sequence
  Description of Artificial Sequence:  Nucleic Acid
  misc_feature: oligonucleotide substrate
gaggauuugugugacgc

SEQ ID NO: 5624 - RNA, 17 nt, Artificial Sequence
  Description of Artificial Sequence:  Nucleic Acid
  misc_feature: oligonucleotide substrate
ggauuugugugacgcgc

SEQ ID NO: 5625 - RNA, 17 nt, Artificial Sequence
  Description of Artificial Sequence:  Nucleic Acid
  misc_feature: oligonucleotide substrate
uuugugugacgcgcgcc

SEQ ID NO: 5626 - RNA, 17 nt, Artificial Sequence
  Description of Artificial Sequence:  Nucleic Acid
  misc_feature: oligonucleotide substrate
ugugugacgcgcgccgc

SEQ ID NO: 5627 - RNA, 17 nt, Artificial Sequence
  Description of Artificial Sequence:  Nucleic Acid
  misc_feature: oligonucleotide substrate
ugugacgcgcgccgcug

SEQ ID NO: 5628 - RNA, 17 nt, Artificial Sequence
  Description of Artificial Sequence:  Nucleic Acid
  misc_feature: oligonucleotide substrate
ugacgcgcgccgcugcg

SEQ ID NO: 5629 - RNA, 17 nt, Artificial Sequence
  Description of Artificial Sequence:  Nucleic Acid
  misc_feature: oligonucleotide substrate
cgcgcgccgcugcgucg

SEQ ID NO: 5630 - RNA, 17 nt, Artificial Sequence
  Description of Artificial Sequence:  Nucleic Acid
  misc_feature: oligonucleotide substrate
gcgccgcugcgucgcuc

SEQ ID NO: 5631 - RNA, 17 nt, Artificial Sequence
  Description of Artificial Sequence:  Nucleic Acid
  misc_feature: oligonucleotide substrate
gccgcugcgucgcucuc

SEQ ID NO: 5632 - RNA, 17 nt, Artificial Sequence
  Description of Artificial Sequence:  Nucleic Acid
  misc_feature: oligonucleotide substrate
gcugcgucgcucucagg

SEQ ID NO: 5633 - RNA, 17 nt, Artificial Sequence
  Description of Artificial Sequence:  Nucleic Acid
  misc_feature: oligonucleotide substrate
gcucucaggcacauagu

SEQ ID NO: 5634 - RNA, 17 nt, Artificial Sequence
  Description of Artificial Sequence:  Nucleic Acid
  misc_feature: oligonucleotide substrate
ucucaggcacauagugc

SEQ ID NO: 5635 - RNA, 17 nt, Artificial Sequence
  Description of Artificial Sequence:  Nucleic Acid
  misc_feature: oligonucleotide substrate
ucaggcacauagugcgu

SEQ ID NO: 5636 - RNA, 17 nt, Artificial Sequence
  Description of Artificial Sequence:  Nucleic Acid
  misc_feature: oligonucleotide substrate
ggcacauagugcguggg

SEQ ID NO: 5637 - RNA, 17 nt, Artificial Sequence
  Description of Artificial Sequence:  Nucleic Acid
  misc_feature: oligonucleotide substrate
cacauagugcguggggg

SEQ ID NO: 5638 - RNA, 17 nt, Artificial Sequence
  Description of Artificial Sequence:  Nucleic Acid
  misc_feature: oligonucleotide substrate
cauagugcgugggggag

SEQ ID NO: 5639 - RNA, 17 nt, Artificial Sequence
  Description of Artificial Sequence:  Nucleic Acid
  misc_feature: oligonucleotide substrate
ugggggagacaugguug

SEQ ID NO: 5640 - RNA, 17 nt, Artificial Sequence
  Description of Artificial Sequence:  Nucleic Acid
  misc_feature: oligonucleotide substrate
ggggagacaugguugcc

SEQ ID NO: 5641 - RNA, 17 nt, Artificial Sequence
  Description of Artificial Sequence:  Nucleic Acid
  misc_feature: oligonucleotide substrate
gagacaugguugccccg

SEQ ID NO: 5642 - RNA, 17 nt, Artificial Sequence
  Description of Artificial Sequence:  Nucleic Acid
  misc_feature: oligonucleotide substrate
acaugguugccccgcga

SEQ ID NO: 5643 - RNA, 17 nt, Artificial Sequence
  Description of Artificial Sequence:  Nucleic Acid
  misc_feature: oligonucleotide substrate
guugccccgcgaagcga

SEQ ID NO: 5644 - RNA, 17 nt, Artificial Sequence
  Description of Artificial Sequence:  Nucleic Acid
  misc_feature: oligonucleotide substrate
cccgcgaagcgaacgcu

SEQ ID NO: 5645 - RNA, 17 nt, Artificial Sequence
  Description of Artificial Sequence:  Nucleic Acid
  misc_feature: oligonucleotide substrate
cgaagcgaacgcuauca

SEQ ID NO: 5646 - RNA, 17 nt, Artificial Sequence
  Description of Artificial Sequence:  Nucleic Acid
  misc_feature: oligonucleotide substrate
aagcgaacgcuaucagc

SEQ ID NO: 5647 - RNA, 17 nt, Artificial Sequence
  Description of Artificial Sequence:  Nucleic Acid
  misc_feature: oligonucleotide substrate
cgaacgcuaucagccga

SEQ ID NO: 5648 - RNA, 17 nt, Artificial Sequence
  Description of Artificial Sequence:  Nucleic Acid
  misc_feature: oligonucleotide substrate
cgcuaucagccgauuca

SEQ ID NO: 5649 - RNA, 17 nt, Artificial Sequence
  Description of Artificial Sequence:  Nucleic Acid
  misc_feature: oligonucleotide substrate
aucagccgauucaucca

SEQ ID NO: 5650 - RNA, 17 nt, Artificial Sequence
  Description of Artificial Sequence:  Nucleic Acid
  misc_feature: oligonucleotide substrate
gccgauucauccacugc

SEQ ID NO: 5651 - RNA, 17 nt, Artificial Sequence
  Description of Artificial Sequence:  Nucleic Acid
  misc_feature: oligonucleotide substrate
auucauccacugcacag

SEQ ID NO: 5652 - RNA, 17 nt, Artificial Sequence
  Description of Artificial Sequence:  Nucleic Acid
  misc_feature: oligonucleotide substrate
cauccacugcacagcgc

SEQ ID NO: 5653 - RNA, 17 nt, Artificial Sequence
  Description of Artificial Sequence:  Nucleic Acid
  misc_feature: oligonucleotide substrate
uccacugcacagcgccc

SEQ ID NO: 5654 - RNA, 17 nt, Artificial Sequence
  Description of Artificial Sequence:  Nucleic Acid
  misc_feature: oligonucleotide substrate
acugcacagcgcccucu

SEQ ID NO: 5655 - RNA, 17 nt, Artificial Sequence
  Description of Artificial Sequence:  Nucleic Acid
  misc_feature: oligonucleotide substrate
ugcacagcgcccucucc

SEQ ID NO: 5656 - RNA, 17 nt, Artificial Sequence
  Description of Artificial Sequence:  Nucleic Acid
  misc_feature: oligonucleotide substrate
ucuccugggcccacaug

SEQ ID NO: 5657 - RNA, 17 nt, Artificial Sequence
  Description of Artificial Sequence:  Nucleic Acid
  misc_feature: oligonucleotide substrate
cugggcccacaugccga

SEQ ID NO: 5658 - RNA, 17 nt, Artificial Sequence
  Description of Artificial Sequence:  Nucleic Acid
  misc_feature: oligonucleotide substrate
gggcccacaugccgacg

SEQ ID NO: 5659 - RNA, 17 nt, Artificial Sequence
  Description of Artificial Sequence:  Nucleic Acid
  misc_feature: oligonucleotide substrate
gcccacaugccgacgca

SEQ ID NO: 5660 - RNA, 17 nt, Artificial Sequence
  Description of Artificial Sequence:  Nucleic Acid
  misc_feature: oligonucleotide substrate
acaugccgacgcaguau

SEQ ID NO: 5661 - RNA, 17 nt, Artificial Sequence
  Description of Artificial Sequence:  Nucleic Acid
  misc_feature: oligonucleotide substrate
augccgacgcaguaucg

SEQ ID NO: 5662 - RNA, 17 nt, Artificial Sequence
  Description of Artificial Sequence:  Nucleic Acid
  misc_feature: oligonucleotide substrate
ccgacgcaguaucgcug

SEQ ID NO: 5663 - RNA, 17 nt, Artificial Sequence
  Description of Artificial Sequence:  Nucleic Acid
  misc_feature: oligonucleotide substrate
gacgcaguaucgcugcg

SEQ ID NO: 5664 - RNA, 17 nt, Artificial Sequence
  Description of Artificial Sequence:  Nucleic Acid
  misc_feature: oligonucleotide substrate
gcaguaucgcugcgcac

SEQ ID NO: 5665 - RNA, 17 nt, Artificial Sequence
  Description of Artificial Sequence:  Nucleic Acid
  misc_feature: oligonucleotide substrate
guaucgcugcgcacacc

SEQ ID NO: 5666 - RNA, 17 nt, Artificial Sequence
  Description of Artificial Sequence:  Nucleic Acid
  misc_feature: oligonucleotide substrate
aucgcugcgcacaccac

SEQ ID NO: 5667 - RNA, 17 nt, Artificial Sequence
  Description of Artificial Sequence:  Nucleic Acid
  misc_feature: oligonucleotide substrate
cgcugcgcacaccaccc

SEQ ID NO: 5668 - RNA, 17 nt, Artificial Sequence
  Description of Artificial Sequence:  Nucleic Acid
  misc_feature: oligonucleotide substrate
cugcgcacaccaccccg

SEQ ID NO: 5669 - RNA, 17 nt, Artificial Sequence
  Description of Artificial Sequence:  Nucleic Acid
  misc_feature: oligonucleotide substrate
cgcacaccaccccgacg

SEQ ID NO: 5670 - RNA, 17 nt, Artificial Sequence
  Description of Artificial Sequence:  Nucleic Acid
  misc_feature: oligonucleotide substrate
ccaccccgacgaccagg

SEQ ID NO: 5671 - RNA, 17 nt, Artificial Sequence
  Description of Artificial Sequence:  Nucleic Acid
  misc_feature: oligonucleotide substrate
ccccgacgaccagggcg

SEQ ID NO: 5672 - RNA, 17 nt, Artificial Sequence
  Description of Artificial Sequence:  Nucleic Acid
  misc_feature: oligonucleotide substrate
cgaccagggcgccagga

SEQ ID NO: 5673 - RNA, 17 nt, Artificial Sequence
  Description of Artificial Sequence:  Nucleic Acid
  misc_feature: oligonucleotide substrate
accagggcgccaggaga

SEQ ID NO: 5674 - RNA, 17 nt, Artificial Sequence
  Description of Artificial Sequence:  Nucleic Acid
  misc_feature: oligonucleotide substrate
gagagaggauggcaggg

SEQ ID NO: 5675 - RNA, 17 nt, Artificial Sequence
  Description of Artificial Sequence:  Nucleic Acid
  misc_feature: oligonucleotide substrate
agaggauggcagggagu

SEQ ID NO: 5676 - RNA, 17 nt, Artificial Sequence
  Description of Artificial Sequence:  Nucleic Acid
  misc_feature: oligonucleotide substrate
ggcagggaguaaguuga

SEQ ID NO: 5677 - RNA, 17 nt, Artificial Sequence
  Description of Artificial Sequence:  Nucleic Acid
  misc_feature: oligonucleotide substrate
gggaguaaguugaccag

SEQ ID NO: 5678 - RNA, 17 nt, Artificial Sequence
  Description of Artificial Sequence:  Nucleic Acid
  misc_feature: oligonucleotide substrate
guaaguugaccaggucc

SEQ ID NO: 5679 - RNA, 17 nt, Artificial Sequence
  Description of Artificial Sequence:  Nucleic Acid
  misc_feature: oligonucleotide substrate
uugaccagguccucggu

SEQ ID NO: 5680 - RNA, 17 nt, Artificial Sequence
  Description of Artificial Sequence:  Nucleic Acid
  misc_feature: oligonucleotide substrate
gguccucgguagaaggc

SEQ ID NO: 5681 - RNA, 17 nt, Artificial Sequence
  Description of Artificial Sequence:  Nucleic Acid
  misc_feature: oligonucleotide substrate
gguagaaggcaucuccc

SEQ ID NO: 5682 - RNA, 17 nt, Artificial Sequence
  Description of Artificial Sequence:  Nucleic Acid
  misc_feature: oligonucleotide substrate
uagaaggcaucuccccg

SEQ ID NO: 5683 - RNA, 17 nt, Artificial Sequence
  Description of Artificial Sequence:  Nucleic Acid
  misc_feature: oligonucleotide substrate
aucuccccgcucaugac

SEQ ID NO: 5684 - RNA, 17 nt, Artificial Sequence
  Description of Artificial Sequence:  Nucleic Acid
  misc_feature: oligonucleotide substrate
ccccgcucaugaccuug

SEQ ID NO: 5685 - RNA, 17 nt, Artificial Sequence
  Description of Artificial Sequence:  Nucleic Acid
  misc_feature: oligonucleotide substrate
cgcucaugaccuugaag

SEQ ID NO: 5686 - RNA, 17 nt, Artificial Sequence
  Description of Artificial Sequence:  Nucleic Acid
  misc_feature: oligonucleotide substrate
ccuugaaggccacgaga

SEQ ID NO: 5687 - RNA, 17 nt, Artificial Sequence
  Description of Artificial Sequence:  Nucleic Acid
  misc_feature: oligonucleotide substrate
ugaaggccacgagagca

SEQ ID NO: 5688 - RNA, 17 nt, Artificial Sequence
  Description of Artificial Sequence:  Nucleic Acid
  misc_feature: oligonucleotide substrate
ccacgagagcacccgcc

SEQ ID NO: 5689 - RNA, 17 nt, Artificial Sequence
  Description of Artificial Sequence:  Nucleic Acid
  misc_feature: oligonucleotide substrate
acgagagcacccgccac

SEQ ID NO: 5690 - RNA, 17 nt, Artificial Sequence
  Description of Artificial Sequence:  Nucleic Acid
  misc_feature: oligonucleotide substrate
gagcacccgccacuccu

SEQ ID NO: 5691 - RNA, 17 nt, Artificial Sequence
  Description of Artificial Sequence:  Nucleic Acid
  misc_feature: oligonucleotide substrate
cacccgccacuccugcu

SEQ ID NO: 5692 - RNA, 17 nt, Artificial Sequence
  Description of Artificial Sequence:  Nucleic Acid
  misc_feature: oligonucleotide substrate
ccacuccugcuccauag

SEQ ID NO: 5693 - RNA, 17 nt, Artificial Sequence
  Description of Artificial Sequence:  Nucleic Acid
  misc_feature: oligonucleotide substrate
ccugcuccauagcccgc

SEQ ID NO: 5694 - RNA, 17 nt, Artificial Sequence
  Description of Artificial Sequence:  Nucleic Acid
  misc_feature: oligonucleotide substrate
gcuccauagcccgccag

SEQ ID NO: 5695 - RNA, 17 nt, Artificial Sequence
  Description of Artificial Sequence:  Nucleic Acid
  misc_feature: oligonucleotide substrate
cauagcccgccagaaug

SEQ ID NO: 5696 - RNA, 17 nt, Artificial Sequence
  Description of Artificial Sequence:  Nucleic Acid
  misc_feature: oligonucleotide substrate
ccgccagaaugucuaca

SEQ ID NO: 5697 - RNA, 17 nt, Artificial Sequence
  Description of Artificial Sequence:  Nucleic Acid
  misc_feature: oligonucleotide substrate
gccagaaugucuacaag

SEQ ID NO: 5698 - RNA, 17 nt, Artificial Sequence
  Description of Artificial Sequence:  Nucleic Acid
  misc_feature: oligonucleotide substrate
gaaugucuacaagcacc

SEQ ID NO: 5699 - RNA, 17 nt, Artificial Sequence
  Description of Artificial Sequence:  Nucleic Acid
  misc_feature: oligonucleotide substrate
gucuacaagcaccuucc

SEQ ID NO: 5700 - RNA, 17 nt, Artificial Sequence
  Description of Artificial Sequence:  Nucleic Acid
  misc_feature: oligonucleotide substrate
cuacaagcaccuuccca

SEQ ID NO: 5701 - RNA, 17 nt, Artificial Sequence
  Description of Artificial Sequence:  Nucleic Acid
  misc_feature: oligonucleotide substrate
uucccaaggccuaugcu

SEQ ID NO: 5702 - RNA, 17 nt, Artificial Sequence
  Description of Artificial Sequence:  Nucleic Acid
  misc_feature: oligonucleotide substrate
caaggccuaugcugcca

SEQ ID NO: 5703 - RNA, 17 nt, Artificial Sequence
  Description of Artificial Sequence:  Nucleic Acid
  misc_feature: oligonucleotide substrate
aggccuaugcugccaac

SEQ ID NO: 5704 - RNA, 17 nt, Artificial Sequence
  Description of Artificial Sequence:  Nucleic Acid
  misc_feature: oligonucleotide substrate
ccuaugcugccaacagc

SEQ ID NO: 5705 - RNA, 17 nt, Artificial Sequence
  Description of Artificial Sequence:  Nucleic Acid
  misc_feature: oligonucleotide substrate
ugcugccaacagccgcg

SEQ ID NO: 5706 - RNA, 17 nt, Artificial Sequence
  Description of Artificial Sequence:  Nucleic Acid
  misc_feature: oligonucleotide substrate
ugccaacagccgcgcca

SEQ ID NO: 5707 - RNA, 17 nt, Artificial Sequence
  Description of Artificial Sequence:  Nucleic Acid
  misc_feature: oligonucleotide substrate
caacagccgcgccagcg

SEQ ID NO: 5708 - RNA, 17 nt, Artificial Sequence
  Description of Artificial Sequence:  Nucleic Acid
  misc_feature: oligonucleotide substrate
acagccgcgccagcgau

SEQ ID NO: 5709 - RNA, 17 nt, Artificial Sequence
  Description of Artificial Sequence:  Nucleic Acid
  misc_feature: oligonucleotide substrate
ccgcgccagcgaugccg

SEQ ID NO: 5710 - RNA, 17 nt, Artificial Sequence
  Description of Artificial Sequence:  Nucleic Acid
  misc_feature: oligonucleotide substrate
cgccagcgaugccggcg

SEQ ID NO: 5711 - RNA, 17 nt, Artificial Sequence
  Description of Artificial Sequence:  Nucleic Acid
  misc_feature: oligonucleotide substrate
ccagcgaugccggcgcc

SEQ ID NO: 5712 - RNA, 17 nt, Artificial Sequence
  Description of Artificial Sequence:  Nucleic Acid
  misc_feature: oligonucleotide substrate
cgaugccggcgcccacg

SEQ ID NO: 5713 - RNA, 17 nt, Artificial Sequence
  Description of Artificial Sequence:  Nucleic Acid
  misc_feature: oligonucleotide substrate
augccggcgcccacgaa

SEQ ID NO: 5714 - RNA, 17 nt, Artificial Sequence
  Description of Artificial Sequence:  Nucleic Acid
  misc_feature: oligonucleotide substrate
cggcgcccacgaaggcc

SEQ ID NO: 5715 - RNA, 17 nt, Artificial Sequence
  Description of Artificial Sequence:  Nucleic Acid
  misc_feature: oligonucleotide substrate
ccacgaaggccgaaacg

SEQ ID NO: 5716 - RNA, 17 nt, Artificial Sequence
  Description of Artificial Sequence:  Nucleic Acid
  misc_feature: oligonucleotide substrate
aggccgaaacggcucug

SEQ ID NO: 5717 - RNA, 17 nt, Artificial Sequence
  Description of Artificial Sequence:  Nucleic Acid
  misc_feature: oligonucleotide substrate
ccgaaacggcucugggg

SEQ ID NO: 5718 - RNA, 17 nt, Artificial Sequence
  Description of Artificial Sequence:  Nucleic Acid
  misc_feature: oligonucleotide substrate
uggggggagcgaguugg

SEQ ID NO: 5719 - RNA, 17 nt, Artificial Sequence
  Description of Artificial Sequence:  Nucleic Acid
  misc_feature: oligonucleotide substrate
gggagcgaguugggcgg

SEQ ID NO: 5720 - RNA, 17 nt, Artificial Sequence
  Description of Artificial Sequence:  Nucleic Acid
  misc_feature: oligonucleotide substrate
cgaguugggcggccacc

SEQ ID NO: 5721 - RNA, 17 nt, Artificial Sequence
  Description of Artificial Sequence:  Nucleic Acid
  misc_feature: oligonucleotide substrate
guugggcggccacccac

SEQ ID NO: 5722 - RNA, 17 nt, Artificial Sequence
  Description of Artificial Sequence:  Nucleic Acid
  misc_feature: oligonucleotide substrate
gggcggccacccacccu

SEQ ID NO: 5723 - RNA, 17 nt, Artificial Sequence
  Description of Artificial Sequence:  Nucleic Acid
  misc_feature: oligonucleotide substrate
ggccacccacccuccca

SEQ ID NO: 5724 - RNA, 17 nt, Artificial Sequence
  Description of Artificial Sequence:  Nucleic Acid
  misc_feature: oligonucleotide substrate
cucccaagauguugaac

SEQ ID NO: 5725 - RNA, 17 nt, Artificial Sequence
  Description of Artificial Sequence:  Nucleic Acid
  misc_feature: oligonucleotide substrate
cccaagauguugaacag

SEQ ID NO: 5726 - RNA, 17 nt, Artificial Sequence
  Description of Artificial Sequence:  Nucleic Acid
  misc_feature: oligonucleotide substrate
gauguugaacaggaggg

SEQ ID NO: 5727 - RNA, 17 nt, Artificial Sequence
  Description of Artificial Sequence:  Nucleic Acid
  misc_feature: oligonucleotide substrate
acaggagggugcuuugg

SEQ ID NO: 5728 - RNA, 17 nt, Artificial Sequence
  Description of Artificial Sequence:  Nucleic Acid
  misc_feature: oligonucleotide substrate
aggagggugcuuugggu

SEQ ID NO: 5729 - RNA, 17 nt, Artificial Sequence
  Description of Artificial Sequence:  Nucleic Acid
  misc_feature: oligonucleotide substrate
ugcuuuggguggugagc

SEQ ID NO: 5730 - RNA, 17 nt, Artificial Sequence
  Description of Artificial Sequence:  Nucleic Acid
  misc_feature: oligonucleotide substrate
uuuggguggugagcggg

SEQ ID NO: 5731 - RNA, 17 nt, Artificial Sequence
  Description of Artificial Sequence:  Nucleic Acid
  misc_feature: oligonucleotide substrate
gguggugagcgggcugg

SEQ ID NO: 5732 - RNA, 17 nt, Artificial Sequence
  Description of Artificial Sequence:  Nucleic Acid
  misc_feature: oligonucleotide substrate
gugagcgggcuggugau

SEQ ID NO: 5733 - RNA, 17 nt, Artificial Sequence
  Description of Artificial Sequence:  Nucleic Acid
  misc_feature: oligonucleotide substrate
gcgggcuggugauggag

SEQ ID NO: 5734 - RNA, 17 nt, Artificial Sequence
  Description of Artificial Sequence:  Nucleic Acid
  misc_feature: oligonucleotide substrate
ggcuggugauggaggcu

SEQ ID NO: 5735 - RNA, 17 nt, Artificial Sequence
  Description of Artificial Sequence:  Nucleic Acid
  misc_feature: oligonucleotide substrate
ugauggaggcugugaau

SEQ ID NO: 5736 - RNA, 17 nt, Artificial Sequence
  Description of Artificial Sequence:  Nucleic Acid
  misc_feature: oligonucleotide substrate
uggaggcugugaaugcc

SEQ ID NO: 5737 - RNA, 17 nt, Artificial Sequence
  Description of Artificial Sequence:  Nucleic Acid
  misc_feature: oligonucleotide substrate
ggcugugaaugccauca

SEQ ID NO: 5738 - RNA, 17 nt, Artificial Sequence
  Description of Artificial Sequence:  Nucleic Acid
  misc_feature: oligonucleotide substrate
cugugaaugccaucaau

SEQ ID NO: 5739 - RNA, 17 nt, Artificial Sequence
  Description of Artificial Sequence:  Nucleic Acid
  misc_feature: oligonucleotide substrate
ugaaugccaucaaugau

SEQ ID NO: 5740 - RNA, 17 nt, Artificial Sequence
  Description of Artificial Sequence:  Nucleic Acid
  misc_feature: oligonucleotide substrate
ugccaucaaugaugcua

SEQ ID NO: 5741 - RNA, 17 nt, Artificial Sequence
  Description of Artificial Sequence:  Nucleic Acid
  misc_feature: oligonucleotide substrate
caucaaugaugcuaucg

SEQ ID NO: 5742 - RNA, 17 nt, Artificial Sequence
  Description of Artificial Sequence:  Nucleic Acid
  misc_feature: oligonucleotide substrate
ucaaugaugcuaucgcg

SEQ ID NO: 5743 - RNA, 17 nt, Artificial Sequence
  Description of Artificial Sequence:  Nucleic Acid
  misc_feature: oligonucleotide substrate
augaugcuaucgcgggg

SEQ ID NO: 5744 - RNA, 17 nt, Artificial Sequence
  Description of Artificial Sequence:  Nucleic Acid
  misc_feature: oligonucleotide substrate
augcuaucgcgggguuc

SEQ ID NO: 5745 - RNA, 17 nt, Artificial Sequence
  Description of Artificial Sequence:  Nucleic Acid
  misc_feature: oligonucleotide substrate
aucgcgggguucccagg

SEQ ID NO: 5746 - RNA, 17 nt, Artificial Sequence
  Description of Artificial Sequence:  Nucleic Acid
  misc_feature: oligonucleotide substrate
guucccaggcagagugg

SEQ ID NO: 5747 - RNA, 17 nt, Artificial Sequence
  Description of Artificial Sequence:  Nucleic Acid
  misc_feature: oligonucleotide substrate
caggcagaguggacaag

SEQ ID NO: 5748 - RNA, 17 nt, Artificial Sequence
  Description of Artificial Sequence:  Nucleic Acid
  misc_feature: oligonucleotide substrate
cagaguggacaagccug

SEQ ID NO: 5749 - RNA, 17 nt, Artificial Sequence
  Description of Artificial Sequence:  Nucleic Acid
  misc_feature: oligonucleotide substrate
guggacaagccugcuag

SEQ ID NO: 5750 - RNA, 17 nt, Artificial Sequence
  Description of Artificial Sequence:  Nucleic Acid
  misc_feature: oligonucleotide substrate
acaagccugcuagguac

SEQ ID NO: 5751 - RNA, 17 nt, Artificial Sequence
  Description of Artificial Sequence:  Nucleic Acid
  misc_feature: oligonucleotide substrate
ccugcuagguacuguau

SEQ ID NO: 5752 - RNA, 17 nt, Artificial Sequence
  Description of Artificial Sequence:  Nucleic Acid
  misc_feature: oligonucleotide substrate
ugcuagguacuguaucc

SEQ ID NO: 5753 - RNA, 17 nt, Artificial Sequence
  Description of Artificial Sequence:  Nucleic Acid
  misc_feature: oligonucleotide substrate
uagguacuguaucccgc

SEQ ID NO: 5754 - RNA, 17 nt, Artificial Sequence
  Description of Artificial Sequence:  Nucleic Acid
  misc_feature: oligonucleotide substrate
gguacuguaucccgcug

SEQ ID NO: 5755 - RNA, 17 nt, Artificial Sequence
  Description of Artificial Sequence:  Nucleic Acid
  misc_feature: oligonucleotide substrate
uguaucccgcugaugaa

SEQ ID NO: 5756 - RNA, 17 nt, Artificial Sequence
  Description of Artificial Sequence:  Nucleic Acid
  misc_feature: oligonucleotide substrate
ucccgcugaugaaauuc

SEQ ID NO: 5757 - RNA, 17 nt, Artificial Sequence
  Description of Artificial Sequence:  Nucleic Acid
  misc_feature: oligonucleotide substrate
cugaugaaauuccacau

SEQ ID NO: 5758 - RNA, 17 nt, Artificial Sequence
  Description of Artificial Sequence:  Nucleic Acid
  misc_feature: oligonucleotide substrate
gaaauuccacaugugcu

SEQ ID NO: 5759 - RNA, 17 nt, Artificial Sequence
  Description of Artificial Sequence:  Nucleic Acid
  misc_feature: oligonucleotide substrate
aauuccacaugugcuuc

SEQ ID NO: 5760 - RNA, 17 nt, Artificial Sequence
  Description of Artificial Sequence:  Nucleic Acid
  misc_feature: oligonucleotide substrate
uuccacaugugcuucgc

SEQ ID NO: 5761 - RNA, 17 nt, Artificial Sequence
  Description of Artificial Sequence:  Nucleic Acid
  misc_feature: oligonucleotide substrate
ccacaugugcuucgccc

SEQ ID NO: 5762 - RNA, 17 nt, Artificial Sequence
  Description of Artificial Sequence:  Nucleic Acid
  misc_feature: oligonucleotide substrate
ugugcuucgcccagaaa

SEQ ID NO: 5763 - RNA, 17 nt, Artificial Sequence
  Description of Artificial Sequence:  Nucleic Acid
  misc_feature: oligonucleotide substrate
cccagaaagccucaagg

SEQ ID NO: 5764 - RNA, 17 nt, Artificial Sequence
  Description of Artificial Sequence:  Nucleic Acid
  misc_feature: oligonucleotide substrate
ccucaagggcucgccac

SEQ ID NO: 5765 - RNA, 17 nt, Artificial Sequence
  Description of Artificial Sequence:  Nucleic Acid
  misc_feature: oligonucleotide substrate
aagggcucgccacuugg

SEQ ID NO: 5766 - RNA, 17 nt, Artificial Sequence
  Description of Artificial Sequence:  Nucleic Acid
  misc_feature: oligonucleotide substrate
ggcucgccacuuggauu

SEQ ID NO: 5767 - RNA, 17 nt, Artificial Sequence
  Description of Artificial Sequence:  Nucleic Acid
  misc_feature: oligonucleotide substrate
ccacuuggauuccacca

SEQ ID NO: 5768 - RNA, 17 nt, Artificial Sequence
  Description of Artificial Sequence:  Nucleic Acid
  misc_feature: oligonucleotide substrate
uggauuccaccacggga

SEQ ID NO: 5769 - RNA, 17 nt, Artificial Sequence
  Description of Artificial Sequence:  Nucleic Acid
  misc_feature: oligonucleotide substrate
auuccaccacgggagca

SEQ ID NO: 5770 - RNA, 17 nt, Artificial Sequence
  Description of Artificial Sequence:  Nucleic Acid
  misc_feature: oligonucleotide substrate
ccacgggagcagcagcc

SEQ ID NO: 5771 - RNA, 17 nt, Artificial Sequence
  Description of Artificial Sequence:  Nucleic Acid
  misc_feature: oligonucleotide substrate
cgggagcagcagccucc

SEQ ID NO: 5772 - RNA, 17 nt, Artificial Sequence
  Description of Artificial Sequence:  Nucleic Acid
  misc_feature: oligonucleotide substrate
gagcagcagccuccgcu

SEQ ID NO: 5773 - RNA, 17 nt, Artificial Sequence
  Description of Artificial Sequence:  Nucleic Acid
  misc_feature: oligonucleotide substrate
cagccuccgcuugguug

SEQ ID NO: 5774 - RNA, 17 nt, Artificial Sequence
  Description of Artificial Sequence:  Nucleic Acid
  misc_feature: oligonucleotide substrate
uccgcuugguugguggc

SEQ ID NO: 5775 - RNA, 17 nt, Artificial Sequence
  Description of Artificial Sequence:  Nucleic Acid
  misc_feature: oligonucleotide substrate
cuugguugguggcuguu

SEQ ID NO: 5776 - RNA, 17 nt, Artificial Sequence
  Description of Artificial Sequence:  Nucleic Acid
  misc_feature: oligonucleotide substrate
gguugguggcuguuugc

SEQ ID NO: 5777 - RNA, 17 nt, Artificial Sequence
  Description of Artificial Sequence:  Nucleic Acid
  misc_feature: oligonucleotide substrate
ugguggcuguuugcagc

SEQ ID NO: 5778 - RNA, 17 nt, Artificial Sequence
  Description of Artificial Sequence:  Nucleic Acid
  misc_feature: oligonucleotide substrate
ggcuguuugcagcaauc

SEQ ID NO: 5779 - RNA, 17 nt, Artificial Sequence
  Description of Artificial Sequence:  Nucleic Acid
  misc_feature: oligonucleotide substrate
uguuugcagcaauccga

SEQ ID NO: 5780 - RNA, 17 nt, Artificial Sequence
  Description of Artificial Sequence:  Nucleic Acid
  misc_feature: oligonucleotide substrate
uugcagcaauccgagcg

SEQ ID NO: 5781 - RNA, 17 nt, Artificial Sequence
  Description of Artificial Sequence:  Nucleic Acid
  misc_feature: oligonucleotide substrate
caauccgagcgccuucu

SEQ ID NO: 5782 - RNA, 17 nt, Artificial Sequence
  Description of Artificial Sequence:  Nucleic Acid
  misc_feature: oligonucleotide substrate
auccgagcgccuucugc

SEQ ID NO: 5783 - RNA, 17 nt, Artificial Sequence
  Description of Artificial Sequence:  Nucleic Acid
  misc_feature: oligonucleotide substrate
cgccuucugcuugaacu

SEQ ID NO: 5784 - RNA, 17 nt, Artificial Sequence
  Description of Artificial Sequence:  Nucleic Acid
  misc_feature: oligonucleotide substrate
cugcuugaacugcucgg

SEQ ID NO: 5785 - RNA, 17 nt, Artificial Sequence
  Description of Artificial Sequence:  Nucleic Acid
  misc_feature: oligonucleotide substrate
cuugaacugcucggcga

SEQ ID NO: 5786 - RNA, 17 nt, Artificial Sequence
  Description of Artificial Sequence:  Nucleic Acid
  misc_feature: oligonucleotide substrate
acugcucggcgagcugc

SEQ ID NO: 5787 - RNA, 17 nt, Artificial Sequence
  Description of Artificial Sequence:  Nucleic Acid
  misc_feature: oligonucleotide substrate
cucggcgagcugcaucc

SEQ ID NO: 5788 - RNA, 17 nt, Artificial Sequence
  Description of Artificial Sequence:  Nucleic Acid
  misc_feature: oligonucleotide substrate
ggcgagcugcauccccu

SEQ ID NO: 5789 - RNA, 17 nt, Artificial Sequence
  Description of Artificial Sequence:  Nucleic Acid
  misc_feature: oligonucleotide substrate
cgagcugcauccccugu

SEQ ID NO: 5790 - RNA, 17 nt, Artificial Sequence
  Description of Artificial Sequence:  Nucleic Acid
  misc_feature: oligonucleotide substrate
cauccccuguucgaugu

SEQ ID NO: 5791 - RNA, 17 nt, Artificial Sequence
  Description of Artificial Sequence:  Nucleic Acid
  misc_feature: oligonucleotide substrate
ccuguucgauguaaggg

SEQ ID NO: 5792 - RNA, 17 nt, Artificial Sequence
  Description of Artificial Sequence:  Nucleic Acid
  misc_feature: oligonucleotide substrate
uguucgauguaagggag

SEQ ID NO: 5793 - RNA, 17 nt, Artificial Sequence
  Description of Artificial Sequence:  Nucleic Acid
  misc_feature: oligonucleotide substrate
uaagggaggugugaggc

SEQ ID NO: 5794 - RNA, 17 nt, Artificial Sequence
  Description of Artificial Sequence:  Nucleic Acid
  misc_feature: oligonucleotide substrate
agggaggugugaggcac

SEQ ID NO: 5795 - RNA, 17 nt, Artificial Sequence
  Description of Artificial Sequence:  Nucleic Acid
  misc_feature: oligonucleotide substrate
ggugugaggcacacucc

SEQ ID NO: 5796 - RNA, 17 nt, Artificial Sequence
  Description of Artificial Sequence:  Nucleic Acid
  misc_feature: oligonucleotide substrate
ugugaggcacacuccuc

SEQ ID NO: 5797 - RNA, 17 nt, Artificial Sequence
  Description of Artificial Sequence:  Nucleic Acid
  misc_feature: oligonucleotide substrate
ugaggcacacuccucca

SEQ ID NO: 5798 - RNA, 17 nt, Artificial Sequence
  Description of Artificial Sequence:  Nucleic Acid
  misc_feature: oligonucleotide substrate
acuccuccaucucaucg

SEQ ID NO: 5799 - RNA, 17 nt, Artificial Sequence
  Description of Artificial Sequence:  Nucleic Acid
  misc_feature: oligonucleotide substrate
uccaucucaucgaacuc

SEQ ID NO: 5800 - RNA, 17 nt, Artificial Sequence
  Description of Artificial Sequence:  Nucleic Acid
  misc_feature: oligonucleotide substrate
cucaucgaacuccuggu

SEQ ID NO: 5801 - RNA, 17 nt, Artificial Sequence
  Description of Artificial Sequence:  Nucleic Acid
  misc_feature: oligonucleotide substrate
aacuccugguagagagc

SEQ ID NO: 5802 - RNA, 17 nt, Artificial Sequence
  Description of Artificial Sequence:  Nucleic Acid
  misc_feature: oligonucleotide substrate
gguagagagccucccug

SEQ ID NO: 5803 - RNA, 17 nt, Artificial Sequence
  Description of Artificial Sequence:  Nucleic Acid
  misc_feature: oligonucleotide substrate
gccucccugucggggau

SEQ ID NO: 5804 - RNA, 17 nt, Artificial Sequence
  Description of Artificial Sequence:  Nucleic Acid
  misc_feature: oligonucleotide substrate
ugucggggauaacagcc

SEQ ID NO: 5805 - RNA, 17 nt, Artificial Sequence
  Description of Artificial Sequence:  Nucleic Acid
  misc_feature: oligonucleotide substrate
cggggauaacagccggc

SEQ ID NO: 5806 - RNA, 17 nt, Artificial Sequence
  Description of Artificial Sequence:  Nucleic Acid
  misc_feature: oligonucleotide substrate
ggauaacagccggcuuc

SEQ ID NO: 5807 - RNA, 17 nt, Artificial Sequence
  Description of Artificial Sequence:  Nucleic Acid
  misc_feature: oligonucleotide substrate
aacagccggcuucccgg

SEQ ID NO: 5808 - RNA, 17 nt, Artificial Sequence
  Description of Artificial Sequence:  Nucleic Acid
  misc_feature: oligonucleotide substrate
cuucccggacaagauga

SEQ ID NO: 5809 - RNA, 17 nt, Artificial Sequence
  Description of Artificial Sequence:  Nucleic Acid
  misc_feature: oligonucleotide substrate
cggacaagaugauucug

SEQ ID NO: 5810 - RNA, 17 nt, Artificial Sequence
  Description of Artificial Sequence:  Nucleic Acid
  misc_feature: oligonucleotide substrate
acaagaugauucugccc

SEQ ID NO: 5811 - RNA, 17 nt, Artificial Sequence
  Description of Artificial Sequence:  Nucleic Acid
  misc_feature: oligonucleotide substrate
augauucugcccacaau

SEQ ID NO: 5812 - RNA, 17 nt, Artificial Sequence
  Description of Artificial Sequence:  Nucleic Acid
  misc_feature: oligonucleotide substrate
uucugcccacaaugacc

SEQ ID NO: 5813 - RNA, 17 nt, Artificial Sequence
  Description of Artificial Sequence:  Nucleic Acid
  misc_feature: oligonucleotide substrate
ugcccacaaugaccacg

SEQ ID NO: 5814 - RNA, 17 nt, Artificial Sequence
  Description of Artificial Sequence:  Nucleic Acid
  misc_feature: oligonucleotide substrate
ccacaaugaccacgcug

SEQ ID NO: 5815 - RNA, 17 nt, Artificial Sequence
  Description of Artificial Sequence:  Nucleic Acid
  misc_feature: oligonucleotide substrate
caaugaccacgcugccu

SEQ ID NO: 5816 - RNA, 17 nt, Artificial Sequence
  Description of Artificial Sequence:  Nucleic Acid
  misc_feature: oligonucleotide substrate
augaccacgcugccugu

SEQ ID NO: 5817 - RNA, 17 nt, Artificial Sequence
  Description of Artificial Sequence:  Nucleic Acid
  misc_feature: oligonucleotide substrate
accacgcugccugucgu

SEQ ID NO: 5818 - RNA, 17 nt, Artificial Sequence
  Description of Artificial Sequence:  Nucleic Acid
  misc_feature: oligonucleotide substrate
cgcugccugucgucagg

SEQ ID NO: 5819 - RNA, 17 nt, Artificial Sequence
  Description of Artificial Sequence:  Nucleic Acid
  misc_feature: oligonucleotide substrate
ugccugucgucaggcaa

SEQ ID NO: 5820 - RNA, 17 nt, Artificial Sequence
  Description of Artificial Sequence:  Nucleic Acid
  misc_feature: oligonucleotide substrate
gucgucaggcaauacgc

SEQ ID NO: 5821 - RNA, 17 nt, Artificial Sequence
  Description of Artificial Sequence:  Nucleic Acid
  misc_feature: oligonucleotide substrate
gucaggcaauacgcggu

SEQ ID NO: 5822 - RNA, 17 nt, Artificial Sequence
  Description of Artificial Sequence:  Nucleic Acid
  misc_feature: oligonucleotide substrate
caggcaauacgcgguca

SEQ ID NO: 5823 - RNA, 17 nt, Artificial Sequence
  Description of Artificial Sequence:  Nucleic Acid
  misc_feature: oligonucleotide substrate
ggcaauacgcggucaga

SEQ ID NO: 5824 - RNA, 17 nt, Artificial Sequence
  Description of Artificial Sequence:  Nucleic Acid
  misc_feature: oligonucleotide substrate
aauacgcggucagagcu

SEQ ID NO: 5825 - RNA, 17 nt, Artificial Sequence
  Description of Artificial Sequence:  Nucleic Acid
  misc_feature: oligonucleotide substrate
cggucagagcugccagg

SEQ ID NO: 5826 - RNA, 17 nt, Artificial Sequence
  Description of Artificial Sequence:  Nucleic Acid
  misc_feature: oligonucleotide substrate
ucagagcugccaggacg

SEQ ID NO: 5827 - RNA, 17 nt, Artificial Sequence
  Description of Artificial Sequence:  Nucleic Acid
  misc_feature: oligonucleotide substrate
cugccaggacgccaccu

SEQ ID NO: 5828 - RNA, 17 nt, Artificial Sequence
  Description of Artificial Sequence:  Nucleic Acid
  misc_feature: oligonucleotide substrate
gccaggacgccaccuac

SEQ ID NO: 5829 - RNA, 17 nt, Artificial Sequence
  Description of Artificial Sequence:  Nucleic Acid
  misc_feature: oligonucleotide substrate
aggacgccaccuacuag

SEQ ID NO: 5830 - RNA, 17 nt, Artificial Sequence
  Description of Artificial Sequence:  Nucleic Acid
  misc_feature: oligonucleotide substrate
cgccaccuacuagcacc

SEQ ID NO: 5831 - RNA, 17 nt, Artificial Sequence
  Description of Artificial Sequence:  Nucleic Acid
  misc_feature: oligonucleotide substrate
accuacuagcacccagg

SEQ ID NO: 5832 - RNA, 17 nt, Artificial Sequence
  Description of Artificial Sequence:  Nucleic Acid
  misc_feature: oligonucleotide substrate
cuacuagcacccaggug

SEQ ID NO: 5833 - RNA, 17 nt, Artificial Sequence
  Description of Artificial Sequence:  Nucleic Acid
  misc_feature: oligonucleotide substrate
gcacccaggugcuggug

SEQ ID NO: 5834 - RNA, 17 nt, Artificial Sequence
  Description of Artificial Sequence:  Nucleic Acid
  misc_feature: oligonucleotide substrate
acccaggugcuggugac

SEQ ID NO: 5835 - RNA, 17 nt, Artificial Sequence
  Description of Artificial Sequence:  Nucleic Acid
  misc_feature: oligonucleotide substrate
aggugcuggugacgacc

SEQ ID NO: 5836 - RNA, 17 nt, Artificial Sequence
  Description of Artificial Sequence:  Nucleic Acid
  misc_feature: oligonucleotide substrate
ugcuggugacgaccucc

SEQ ID NO: 5837 - RNA, 17 nt, Artificial Sequence
  Description of Artificial Sequence:  Nucleic Acid
  misc_feature: oligonucleotide substrate
uggugacgaccuccagg

SEQ ID NO: 5838 - RNA, 17 nt, Artificial Sequence
  Description of Artificial Sequence:  Nucleic Acid
  misc_feature: oligonucleotide substrate
accuccaggucagccga

SEQ ID NO: 5839 - RNA, 17 nt, Artificial Sequence
  Description of Artificial Sequence:  Nucleic Acid
  misc_feature: oligonucleotide substrate
ccaggucagccgacaug

SEQ ID NO: 5840 - RNA, 17 nt, Artificial Sequence
  Description of Artificial Sequence:  Nucleic Acid
  misc_feature: oligonucleotide substrate
gucagccgacaugcaug

SEQ ID NO: 5841 - RNA, 17 nt, Artificial Sequence
  Description of Artificial Sequence:  Nucleic Acid
  misc_feature: oligonucleotide substrate
cagccgacaugcauguc

SEQ ID NO: 5842 - RNA, 17 nt, Artificial Sequence
  Description of Artificial Sequence:  Nucleic Acid
  misc_feature: oligonucleotide substrate
gccgacaugcaugucau

SEQ ID NO: 5843 - RNA, 17 nt, Artificial Sequence
  Description of Artificial Sequence:  Nucleic Acid
  misc_feature: oligonucleotide substrate
cgacaugcaugucauga

SEQ ID NO: 5844 - RNA, 17 nt, Artificial Sequence
  Description of Artificial Sequence:  Nucleic Acid
  misc_feature: oligonucleotide substrate
acaugcaugucaugaug

SEQ ID NO: 5845 - RNA, 17 nt, Artificial Sequence
  Description of Artificial Sequence:  Nucleic Acid
  misc_feature: oligonucleotide substrate
ugcaugucaugauguau

SEQ ID NO: 5846 - RNA, 17 nt, Artificial Sequence
  Description of Artificial Sequence:  Nucleic Acid
  misc_feature: oligonucleotide substrate
augucaugauguauuug

SEQ ID NO: 5847 - RNA, 17 nt, Artificial Sequence
  Description of Artificial Sequence:  Nucleic Acid
  misc_feature: oligonucleotide substrate
gucaugauguauuuggu

SEQ ID NO: 5848 - RNA, 17 nt, Artificial Sequence
  Description of Artificial Sequence:  Nucleic Acid
  misc_feature: oligonucleotide substrate
caugauguauuugguua

SEQ ID NO: 5849 - RNA, 17 nt, Artificial Sequence
  Description of Artificial Sequence:  Nucleic Acid
  misc_feature: oligonucleotide substrate
uguauuugguuaugggg

SEQ ID NO: 5850 - RNA, 17 nt, Artificial Sequence
  Description of Artificial Sequence:  Nucleic Acid
  misc_feature: oligonucleotide substrate
auuugguuauggggugu

SEQ ID NO: 5851 - RNA, 17 nt, Artificial Sequence
  Description of Artificial Sequence:  Nucleic Acid
  misc_feature: oligonucleotide substrate
guuauggggugugugag

SEQ ID NO: 5852 - RNA, 17 nt, Artificial Sequence
  Description of Artificial Sequence:  Nucleic Acid
  misc_feature: oligonucleotide substrate
uauggggugugugaggg

SEQ ID NO: 5853 - RNA, 17 nt, Artificial Sequence
  Description of Artificial Sequence:  Nucleic Acid
  misc_feature: oligonucleotide substrate
uggggugugugagggug

SEQ ID NO: 5854 - RNA, 17 nt, Artificial Sequence
  Description of Artificial Sequence:  Nucleic Acid
  misc_feature: oligonucleotide substrate
gugugagggugacauca

SEQ ID NO: 5855 - RNA, 17 nt, Artificial Sequence
  Description of Artificial Sequence:  Nucleic Acid
  misc_feature: oligonucleotide substrate
ugagggugacaucauuu

SEQ ID NO: 5856 - RNA, 17 nt, Artificial Sequence
  Description of Artificial Sequence:  Nucleic Acid
  misc_feature: oligonucleotide substrate
agggugacaucauuuug

SEQ ID NO: 5857 - RNA, 17 nt, Artificial Sequence
  Description of Artificial Sequence:  Nucleic Acid
  misc_feature: oligonucleotide substrate
gugacaucauuuuggac

SEQ ID NO: 5858 - RNA, 17 nt, Artificial Sequence
  Description of Artificial Sequence:  Nucleic Acid
  misc_feature: oligonucleotide substrate
cauuuuggacggcuccu

SEQ ID NO: 5859 - RNA, 17 nt, Artificial Sequence
  Description of Artificial Sequence:  Nucleic Acid
  misc_feature: oligonucleotide substrate
uuuggacggcuccuagc

SEQ ID NO: 5860 - RNA, 17 nt, Artificial Sequence
  Description of Artificial Sequence:  Nucleic Acid
  misc_feature: oligonucleotide substrate
ggcuccuagccuauaca

SEQ ID NO: 5861 - RNA, 17 nt, Artificial Sequence
  Description of Artificial Sequence:  Nucleic Acid
  misc_feature: oligonucleotide substrate
ccuagccuauacagcag

SEQ ID NO: 5862 - RNA, 17 nt, Artificial Sequence
  Description of Artificial Sequence:  Nucleic Acid
  misc_feature: oligonucleotide substrate
uagccuauacagcaggg

SEQ ID NO: 5863 - RNA, 17 nt, Artificial Sequence
  Description of Artificial Sequence:  Nucleic Acid
  misc_feature: oligonucleotide substrate
ccuauacagcaggggug

SEQ ID NO: 5864 - RNA, 17 nt, Artificial Sequence
  Description of Artificial Sequence:  Nucleic Acid
  misc_feature: oligonucleotide substrate
cagcagggguguuggcc

SEQ ID NO: 5865 - RNA, 17 nt, Artificial Sequence
  Description of Artificial Sequence:  Nucleic Acid
  misc_feature: oligonucleotide substrate
gcagggguguuggcccg

SEQ ID NO: 5866 - RNA, 17 nt, Artificial Sequence
  Description of Artificial Sequence:  Nucleic Acid
  misc_feature: oligonucleotide substrate
ggguguuggcccgugua

SEQ ID NO: 5867 - RNA, 17 nt, Artificial Sequence
  Description of Artificial Sequence:  Nucleic Acid
  misc_feature: oligonucleotide substrate
guuggcccguguagcgu

SEQ ID NO: 5868 - RNA, 17 nt, Artificial Sequence
  Description of Artificial Sequence:  Nucleic Acid
  misc_feature: oligonucleotide substrate
uggcccguguagcguag

SEQ ID NO: 5869 - RNA, 17 nt, Artificial Sequence
  Description of Artificial Sequence:  Nucleic Acid
  misc_feature: oligonucleotide substrate
cccguguagcguaggcu

SEQ ID NO: 5870 - RNA, 17 nt, Artificial Sequence
  Description of Artificial Sequence:  Nucleic Acid
  misc_feature: oligonucleotide substrate
cguguagcguaggcuuu

SEQ ID NO: 5871 - RNA, 17 nt, Artificial Sequence
  Description of Artificial Sequence:  Nucleic Acid
  misc_feature: oligonucleotide substrate
uagcguaggcuuuagcc

SEQ ID NO: 5872 - RNA, 17 nt, Artificial Sequence
  Description of Artificial Sequence:  Nucleic Acid
  misc_feature: oligonucleotide substrate
aggcuuuagccguguga

SEQ ID NO: 5873 - RNA, 17 nt, Artificial Sequence
  Description of Artificial Sequence:  Nucleic Acid
  misc_feature: oligonucleotide substrate
cuuuagccgugugagac

SEQ ID NO: 5874 - RNA, 17 nt, Artificial Sequence
  Description of Artificial Sequence:  Nucleic Acid
  misc_feature: oligonucleotide substrate
uuagccgugugagacac

SEQ ID NO: 5875 - RNA, 17 nt, Artificial Sequence
  Description of Artificial Sequence:  Nucleic Acid
  misc_feature: oligonucleotide substrate
cgugugagacacuucca

SEQ ID NO: 5876 - RNA, 17 nt, Artificial Sequence
  Description of Artificial Sequence:  Nucleic Acid
  misc_feature: oligonucleotide substrate
ugugagacacuuccaca

SEQ ID NO: 5877 - RNA, 17 nt, Artificial Sequence
  Description of Artificial Sequence:  Nucleic Acid
  misc_feature: oligonucleotide substrate
acacuuccacauuugau

SEQ ID NO: 5878 - RNA, 17 nt, Artificial Sequence
  Description of Artificial Sequence:  Nucleic Acid
  misc_feature: oligonucleotide substrate
acuuccacauuugaucc

SEQ ID NO: 5879 - RNA, 17 nt, Artificial Sequence
  Description of Artificial Sequence:  Nucleic Acid
  misc_feature: oligonucleotide substrate
cacauuugaucccacga

SEQ ID NO: 5880 - RNA, 17 nt, Artificial Sequence
  Description of Artificial Sequence:  Nucleic Acid
  misc_feature: oligonucleotide substrate
uugaucccacgaugggg

SEQ ID NO: 5881 - RNA, 17 nt, Artificial Sequence
  Description of Artificial Sequence:  Nucleic Acid
  misc_feature: oligonucleotide substrate
aucccacgaugggggug

SEQ ID NO: 5882 - RNA, 17 nt, Artificial Sequence
  Description of Artificial Sequence:  Nucleic Acid
  misc_feature: oligonucleotide substrate
cgauggggguggagccu

SEQ ID NO: 5883 - RNA, 17 nt, Artificial Sequence
  Description of Artificial Sequence:  Nucleic Acid
  misc_feature: oligonucleotide substrate
gggguggagccugagcc

SEQ ID NO: 5884 - RNA, 17 nt, Artificial Sequence
  Description of Artificial Sequence:  Nucleic Acid
  misc_feature: oligonucleotide substrate
gagccugagcccuggcg

SEQ ID NO: 5885 - RNA, 17 nt, Artificial Sequence
  Description of Artificial Sequence:  Nucleic Acid
  misc_feature: oligonucleotide substrate
gagcccuggcgcacacu

SEQ ID NO: 5886 - RNA, 17 nt, Artificial Sequence
  Description of Artificial Sequence:  Nucleic Acid
  misc_feature: oligonucleotide substrate
gcccuggcgcacacugu

SEQ ID NO: 5887 - RNA, 17 nt, Artificial Sequence
  Description of Artificial Sequence:  Nucleic Acid
  misc_feature: oligonucleotide substrate
ccuggcgcacacugugg

SEQ ID NO: 5888 - RNA, 17 nt, Artificial Sequence
  Description of Artificial Sequence:  Nucleic Acid
  misc_feature: oligonucleotide substrate
uggcgcacacuguggcu

SEQ ID NO: 5889 - RNA, 17 nt, Artificial Sequence
  Description of Artificial Sequence:  Nucleic Acid
  misc_feature: oligonucleotide substrate
cgcacacuguggcuugg

SEQ ID NO: 5890 - RNA, 17 nt, Artificial Sequence
  Description of Artificial Sequence:  Nucleic Acid
  misc_feature: oligonucleotide substrate
acacuguggcuugguau

SEQ ID NO: 5891 - RNA, 17 nt, Artificial Sequence
  Description of Artificial Sequence:  Nucleic Acid
  misc_feature: oligonucleotide substrate
guggcuugguaugcuac

SEQ ID NO: 5892 - RNA, 17 nt, Artificial Sequence
  Description of Artificial Sequence:  Nucleic Acid
  misc_feature: oligonucleotide substrate
ggcuugguaugcuacca

SEQ ID NO: 5893 - RNA, 17 nt, Artificial Sequence
  Description of Artificial Sequence:  Nucleic Acid
  misc_feature: oligonucleotide substrate
cuugguaugcuaccagg

SEQ ID NO: 5894 - RNA, 17 nt, Artificial Sequence
  Description of Artificial Sequence:  Nucleic Acid
  misc_feature: oligonucleotide substrate
gguaugcuaccagguag

SEQ ID NO: 5895 - RNA, 17 nt, Artificial Sequence
  Description of Artificial Sequence:  Nucleic Acid
  misc_feature: oligonucleotide substrate
gcuaccagguaggggag

SEQ ID NO: 5896 - RNA, 17 nt, Artificial Sequence
  Description of Artificial Sequence:  Nucleic Acid
  misc_feature: oligonucleotide substrate
uaggggagguuuucucc

SEQ ID NO: 5897 - RNA, 17 nt, Artificial Sequence
  Description of Artificial Sequence:  Nucleic Acid
  misc_feature: oligonucleotide substrate
uuucuccugccugcuug

SEQ ID NO: 5898 - RNA, 17 nt, Artificial Sequence
  Description of Artificial Sequence:  Nucleic Acid
  misc_feature: oligonucleotide substrate
uccugccugcuuggucu

SEQ ID NO: 5899 - RNA, 17 nt, Artificial Sequence
  Description of Artificial Sequence:  Nucleic Acid
  misc_feature: oligonucleotide substrate
ccugcuuggucugggac

SEQ ID NO: 5900 - RNA, 17 nt, Artificial Sequence
  Description of Artificial Sequence:  Nucleic Acid
  misc_feature: oligonucleotide substrate
ggucugggacaagaagu

SEQ ID NO: 5901 - RNA, 17 nt, Artificial Sequence
  Description of Artificial Sequence:  Nucleic Acid
  misc_feature: oligonucleotide substrate
gacaagaagugggcauc

SEQ ID NO: 5902 - RNA, 17 nt, Artificial Sequence
  Description of Artificial Sequence:  Nucleic Acid
  misc_feature: oligonucleotide substrate
agaagugggcaucuaug

SEQ ID NO: 5903 - RNA, 17 nt, Artificial Sequence
  Description of Artificial Sequence:  Nucleic Acid
  misc_feature: oligonucleotide substrate
aagugggcaucuaugug

SEQ ID NO: 5904 - RNA, 17 nt, Artificial Sequence
  Description of Artificial Sequence:  Nucleic Acid
  misc_feature: oligonucleotide substrate
gggcaucuaugugggug

SEQ ID NO: 5905 - RNA, 17 nt, Artificial Sequence
  Description of Artificial Sequence:  Nucleic Acid
  misc_feature: oligonucleotide substrate
gcaucuaugugggugag

SEQ ID NO: 5906 - RNA, 17 nt, Artificial Sequence
  Description of Artificial Sequence:  Nucleic Acid
  misc_feature: oligonucleotide substrate
cuaugugggugaggccu

SEQ ID NO: 5907 - RNA, 17 nt, Artificial Sequence
  Description of Artificial Sequence:  Nucleic Acid
  misc_feature: oligonucleotide substrate
ugggugaggccugugaa

SEQ ID NO: 5908 - RNA, 17 nt, Artificial Sequence
  Description of Artificial Sequence:  Nucleic Acid
  misc_feature: oligonucleotide substrate
ugaggccugugaagaca

SEQ ID NO: 5909 - RNA, 17 nt, Artificial Sequence
  Description of Artificial Sequence:  Nucleic Acid
  misc_feature: oligonucleotide substrate
cugugaagacacccucc

SEQ ID NO: 5910 - RNA, 17 nt, Artificial Sequence
  Description of Artificial Sequence:  Nucleic Acid
  misc_feature: oligonucleotide substrate
gugaagacacccuccca

SEQ ID NO: 5911 - RNA, 17 nt, Artificial Sequence
  Description of Artificial Sequence:  Nucleic Acid
  misc_feature: oligonucleotide substrate
cucccagaacuccagau

SEQ ID NO: 5912 - RNA, 17 nt, Artificial Sequence
  Description of Artificial Sequence:  Nucleic Acid
  misc_feature: oligonucleotide substrate
aacuccagaugguccug

SEQ ID NO: 5913 - RNA, 17 nt, Artificial Sequence
  Description of Artificial Sequence:  Nucleic Acid
  misc_feature: oligonucleotide substrate
uccagaugguccuggca

SEQ ID NO: 5914 - RNA, 17 nt, Artificial Sequence
  Description of Artificial Sequence:  Nucleic Acid
  misc_feature: oligonucleotide substrate
ugguccuggcagaaggg

SEQ ID NO: 5915 - RNA, 17 nt, Artificial Sequence
  Description of Artificial Sequence:  Nucleic Acid
  misc_feature: oligonucleotide substrate
gcagaagggcaacccug

SEQ ID NO: 5916 - RNA, 17 nt, Artificial Sequence
  Description of Artificial Sequence:  Nucleic Acid
  misc_feature: oligonucleotide substrate
gaagggcaacccuggug

SEQ ID NO: 5917 - RNA, 17 nt, Artificial Sequence
  Description of Artificial Sequence:  Nucleic Acid
  misc_feature: oligonucleotide substrate
caacccugguguauuua

SEQ ID NO: 5918 - RNA, 17 nt, Artificial Sequence
  Description of Artificial Sequence:  Nucleic Acid
  misc_feature: oligonucleotide substrate
acccugguguauuuagg

SEQ ID NO: 5919 - RNA, 17 nt, Artificial Sequence
  Description of Artificial Sequence:  Nucleic Acid
  misc_feature: oligonucleotide substrate
ccugguguauuuaggua

SEQ ID NO: 5920 - RNA, 17 nt, Artificial Sequence
  Description of Artificial Sequence:  Nucleic Acid
  misc_feature: oligonucleotide substrate
guauuuagguaagcccg

SEQ ID NO: 5921 - RNA, 17 nt, Artificial Sequence
  Description of Artificial Sequence:  Nucleic Acid
  misc_feature: oligonucleotide substrate
uuagguaagcccgcaac

SEQ ID NO: 5922 - RNA, 17 nt, Artificial Sequence
  Description of Artificial Sequence:  Nucleic Acid
  misc_feature: oligonucleotide substrate
guaagcccgcaaccuaa

SEQ ID NO: 5923 - RNA, 17 nt, Artificial Sequence
  Description of Artificial Sequence:  Nucleic Acid
  misc_feature: oligonucleotide substrate
agcccgcaaccuaacgg

SEQ ID NO: 5924 - RNA, 17 nt, Artificial Sequence
  Description of Artificial Sequence:  Nucleic Acid
  misc_feature: oligonucleotide substrate
gcaaccuaacggagguc

SEQ ID NO: 5925 - RNA, 17 nt, Artificial Sequence
  Description of Artificial Sequence:  Nucleic Acid
  misc_feature: oligonucleotide substrate
uaacggaggucucggcg

SEQ ID NO: 5926 - RNA, 17 nt, Artificial Sequence
  Description of Artificial Sequence:  Nucleic Acid
  misc_feature: oligonucleotide substrate
aggucucggcgggcgug

SEQ ID NO: 5927 - RNA, 17 nt, Artificial Sequence
  Description of Artificial Sequence:  Nucleic Acid
  misc_feature: oligonucleotide substrate
cucggcgggcgugagcu

SEQ ID NO: 5928 - RNA, 17 nt, Artificial Sequence
  Description of Artificial Sequence:  Nucleic Acid
  misc_feature: oligonucleotide substrate
cggcgggcgugagcucg

SEQ ID NO: 5929 - RNA, 17 nt, Artificial Sequence
  Description of Artificial Sequence:  Nucleic Acid
  misc_feature: oligonucleotide substrate
gggcgugagcucguacc

SEQ ID NO: 5930 - RNA, 17 nt, Artificial Sequence
  Description of Artificial Sequence:  Nucleic Acid
  misc_feature: oligonucleotide substrate
gugagcucguaccaagc

SEQ ID NO: 5931 - RNA, 17 nt, Artificial Sequence
  Description of Artificial Sequence:  Nucleic Acid
  misc_feature: oligonucleotide substrate
gagcucguaccaagcac

SEQ ID NO: 5932 - RNA, 17 nt, Artificial Sequence
  Description of Artificial Sequence:  Nucleic Acid
  misc_feature: oligonucleotide substrate
cguaccaagcacauccc

SEQ ID NO: 5933 - RNA, 17 nt, Artificial Sequence
  Description of Artificial Sequence:  Nucleic Acid
  misc_feature: oligonucleotide substrate
uaccaagcacaucccgc

SEQ ID NO: 5934 - RNA, 17 nt, Artificial Sequence
  Description of Artificial Sequence:  Nucleic Acid
  misc_feature: oligonucleotide substrate
ccaagcacaucccgcgu

SEQ ID NO: 5935 - RNA, 17 nt, Artificial Sequence
  Description of Artificial Sequence:  Nucleic Acid
  misc_feature: oligonucleotide substrate
cacaucccgcgucauag

SEQ ID NO: 5936 - RNA, 17 nt, Artificial Sequence
  Description of Artificial Sequence:  Nucleic Acid
  misc_feature: oligonucleotide substrate
caucccgcgucauagca

SEQ ID NO: 5937 - RNA, 17 nt, Artificial Sequence
  Description of Artificial Sequence:  Nucleic Acid
  misc_feature: oligonucleotide substrate
cccgcgucauagcacuc

SEQ ID NO: 5938 - RNA, 17 nt, Artificial Sequence
  Description of Artificial Sequence:  Nucleic Acid
  misc_feature: oligonucleotide substrate
gcgucauagcacucaca

SEQ ID NO: 5939 - RNA, 17 nt, Artificial Sequence
  Description of Artificial Sequence:  Nucleic Acid
  misc_feature: oligonucleotide substrate
gucauagcacucacaca

SEQ ID NO: 5940 - RNA, 17 nt, Artificial Sequence
  Description of Artificial Sequence:  Nucleic Acid
  misc_feature: oligonucleotide substrate
uagcacucacacaggac

SEQ ID NO: 5941 - RNA, 17 nt, Artificial Sequence
  Description of Artificial Sequence:  Nucleic Acid
  misc_feature: oligonucleotide substrate
gcacucacacaggaccg

SEQ ID NO: 5942 - RNA, 17 nt, Artificial Sequence
  Description of Artificial Sequence:  Nucleic Acid
  misc_feature: oligonucleotide substrate
cacacaggaccgaggag

SEQ ID NO: 5943 - RNA, 17 nt, Artificial Sequence
  Description of Artificial Sequence:  Nucleic Acid
  misc_feature: oligonucleotide substrate
accgaggagucgaacau

SEQ ID NO: 5944 - RNA, 17 nt, Artificial Sequence
  Description of Artificial Sequence:  Nucleic Acid
  misc_feature: oligonucleotide substrate
ggagucgaacaugcccg

SEQ ID NO: 5945 - RNA, 17 nt, Artificial Sequence
  Description of Artificial Sequence:  Nucleic Acid
  misc_feature: oligonucleotide substrate
agucgaacaugcccgaa

SEQ ID NO: 5946 - RNA, 17 nt, Artificial Sequence
  Description of Artificial Sequence:  Nucleic Acid
  misc_feature: oligonucleotide substrate
ucgaacaugcccgaagg

SEQ ID NO: 5947 - RNA, 17 nt, Artificial Sequence
  Description of Artificial Sequence:  Nucleic Acid
  misc_feature: oligonucleotide substrate
gcccgaaggccgcucuc

SEQ ID NO: 5948 - RNA, 17 nt, Artificial Sequence
  Description of Artificial Sequence:  Nucleic Acid
  misc_feature: oligonucleotide substrate
cgaaggccgcucuccug

SEQ ID NO: 5949 - RNA, 17 nt, Artificial Sequence
  Description of Artificial Sequence:  Nucleic Acid
  misc_feature: oligonucleotide substrate
cuccuggagucacaaac

SEQ ID NO: 5950 - RNA, 17 nt, Artificial Sequence
  Description of Artificial Sequence:  Nucleic Acid
  misc_feature: oligonucleotide substrate
cuggagucacaaaccug

SEQ ID NO: 5951 - RNA, 17 nt, Artificial Sequence
  Description of Artificial Sequence:  Nucleic Acid
  misc_feature: oligonucleotide substrate
agucacaaaccuguaua

SEQ ID NO: 5952 - RNA, 17 nt, Artificial Sequence
  Description of Artificial Sequence:  Nucleic Acid
  misc_feature: oligonucleotide substrate
acaaaccuguauaugcc

SEQ ID NO: 5953 - RNA, 17 nt, Artificial Sequence
  Description of Artificial Sequence:  Nucleic Acid
  misc_feature: oligonucleotide substrate
aaaccuguauaugccuc

SEQ ID NO: 5954 - RNA, 17 nt, Artificial Sequence
  Description of Artificial Sequence:  Nucleic Acid
  misc_feature: oligonucleotide substrate
accuguauaugccucuc

SEQ ID NO: 5955 - RNA, 17 nt, Artificial Sequence
  Description of Artificial Sequence:  Nucleic Acid
  misc_feature: oligonucleotide substrate
cuguauaugccucuccu

SEQ ID NO: 5956 - RNA, 17 nt, Artificial Sequence
  Description of Artificial Sequence:  Nucleic Acid
  misc_feature: oligonucleotide substrate
ccucuccugccccuacc

SEQ ID NO: 5957 - RNA, 17 nt, Artificial Sequence
  Description of Artificial Sequence:  Nucleic Acid
  misc_feature: oligonucleotide substrate
cugccccuaccgguccu

SEQ ID NO: 5958 - RNA, 17 nt, Artificial Sequence
  Description of Artificial Sequence:  Nucleic Acid
  misc_feature: oligonucleotide substrate
cccuaccgguccuaccu

SEQ ID NO: 5959 - RNA, 17 nt, Artificial Sequence
  Description of Artificial Sequence:  Nucleic Acid
  misc_feature: oligonucleotide substrate
ccgguccuaccucgccu

SEQ ID NO: 5960 - RNA, 17 nt, Artificial Sequence
  Description of Artificial Sequence:  Nucleic Acid
  misc_feature: oligonucleotide substrate
ccuaccucgccucugcg

SEQ ID NO: 5961 - RNA, 17 nt, Artificial Sequence
  Description of Artificial Sequence:  Nucleic Acid
  misc_feature: oligonucleotide substrate
ucgccucugcgagcggg

SEQ ID NO: 5962 - RNA, 17 nt, Artificial Sequence
  Description of Artificial Sequence:  Nucleic Acid
  misc_feature: oligonucleotide substrate
cucugcgagcgggacac

SEQ ID NO: 5963 - RNA, 17 nt, Artificial Sequence
  Description of Artificial Sequence:  Nucleic Acid
  misc_feature: oligonucleotide substrate
cgagcgggacacugcgu

SEQ ID NO: 5964 - RNA, 17 nt, Artificial Sequence
  Description of Artificial Sequence:  Nucleic Acid
  misc_feature: oligonucleotide substrate
agcgggacacugcgucu

SEQ ID NO: 5965 - RNA, 17 nt, Artificial Sequence
  Description of Artificial Sequence:  Nucleic Acid
  misc_feature: oligonucleotide substrate
gggacacugcgucuugg

SEQ ID NO: 5966 - RNA, 17 nt, Artificial Sequence
  Description of Artificial Sequence:  Nucleic Acid
  misc_feature: oligonucleotide substrate
gacacugcgucuugggg

SEQ ID NO: 5967 - RNA, 17 nt, Artificial Sequence
  Description of Artificial Sequence:  Nucleic Acid
  misc_feature: oligonucleotide substrate
gucuuggggcacggucg

SEQ ID NO: 5968 - RNA, 17 nt, Artificial Sequence
  Description of Artificial Sequence:  Nucleic Acid
  misc_feature: oligonucleotide substrate
cuuggggcacggucguc

SEQ ID NO: 5969 - RNA, 17 nt, Artificial Sequence
  Description of Artificial Sequence:  Nucleic Acid
  misc_feature: oligonucleotide substrate
ggggcacggucgucguc

SEQ ID NO: 5970 - RNA, 17 nt, Artificial Sequence
  Description of Artificial Sequence:  Nucleic Acid
  misc_feature: oligonucleotide substrate
gcacggucgucgucuca

SEQ ID NO: 5971 - RNA, 17 nt, Artificial Sequence
  Description of Artificial Sequence:  Nucleic Acid
  misc_feature: oligonucleotide substrate
cggucgucgucucaaug

SEQ ID NO: 5972 - RNA, 17 nt, Artificial Sequence
  Description of Artificial Sequence:  Nucleic Acid
  misc_feature: oligonucleotide substrate
ucgucucaauggugaag

SEQ ID NO: 5973 - RNA, 17 nt, Artificial Sequence
  Description of Artificial Sequence:  Nucleic Acid
  misc_feature: oligonucleotide substrate
ucucaauggugaaggua

SEQ ID NO: 5974 - RNA, 17 nt, Artificial Sequence
  Description of Artificial Sequence:  Nucleic Acid
  misc_feature: oligonucleotide substrate
uggugaagguagggucc

SEQ ID NO: 5975 - RNA, 17 nt, Artificial Sequence
  Description of Artificial Sequence:  Nucleic Acid
  misc_feature: oligonucleotide substrate
aagguaggguccaagcu

SEQ ID NO: 5976 - RNA, 17 nt, Artificial Sequence
  Description of Artificial Sequence:  Nucleic Acid
  misc_feature: oligonucleotide substrate
ggguccaagcugaaguc

SEQ ID NO: 5977 - RNA, 17 nt, Artificial Sequence
  Description of Artificial Sequence:  Nucleic Acid
  misc_feature: oligonucleotide substrate
aagcugaagucgacugu

SEQ ID NO: 5978 - RNA, 17 nt, Artificial Sequence
  Description of Artificial Sequence:  Nucleic Acid
  misc_feature: oligonucleotide substrate
ugaagucgacuguuugg

SEQ ID NO: 5979 - RNA, 17 nt, Artificial Sequence
  Description of Artificial Sequence:  Nucleic Acid
  misc_feature: oligonucleotide substrate
agucgacuguuugggug

SEQ ID NO: 5980 - RNA, 17 nt, Artificial Sequence
  Description of Artificial Sequence:  Nucleic Acid
  misc_feature: oligonucleotide substrate
cuguuugggugacacau

SEQ ID NO: 5981 - RNA, 17 nt, Artificial Sequence
  Description of Artificial Sequence:  Nucleic Acid
  misc_feature: oligonucleotide substrate
uuugggugacacaugua

SEQ ID NO: 5982 - RNA, 17 nt, Artificial Sequence
  Description of Artificial Sequence:  Nucleic Acid
  misc_feature: oligonucleotide substrate
ugggugacacauguauu

SEQ ID NO: 5983 - RNA, 17 nt, Artificial Sequence
  Description of Artificial Sequence:  Nucleic Acid
  misc_feature: oligonucleotide substrate
ggugacacauguauuac

SEQ ID NO: 5984 - RNA, 17 nt, Artificial Sequence
  Description of Artificial Sequence:  Nucleic Acid
  misc_feature: oligonucleotide substrate
ugacacauguauuacag

SEQ ID NO: 5985 - RNA, 17 nt, Artificial Sequence
  Description of Artificial Sequence:  Nucleic Acid
  misc_feature: oligonucleotide substrate
acacauguauuacaguc

SEQ ID NO: 5986 - RNA, 17 nt, Artificial Sequence
  Description of Artificial Sequence:  Nucleic Acid
  misc_feature: oligonucleotide substrate
cauguauuacagucgau

SEQ ID NO: 5987 - RNA, 17 nt, Artificial Sequence
  Description of Artificial Sequence:  Nucleic Acid
  misc_feature: oligonucleotide substrate
guauuacagucgaucac

SEQ ID NO: 5988 - RNA, 17 nt, Artificial Sequence
  Description of Artificial Sequence:  Nucleic Acid
  misc_feature: oligonucleotide substrate
uacagucgaucaccgag

SEQ ID NO: 5989 - RNA, 17 nt, Artificial Sequence
  Description of Artificial Sequence:  Nucleic Acid
  misc_feature: oligonucleotide substrate
agucgaucaccgaguca

SEQ ID NO: 5990 - RNA, 17 nt, Artificial Sequence
  Description of Artificial Sequence:  Nucleic Acid
  misc_feature: oligonucleotide substrate
aucaccgagucaaaauc

SEQ ID NO: 5991 - RNA, 17 nt, Artificial Sequence
  Description of Artificial Sequence:  Nucleic Acid
  misc_feature: oligonucleotide substrate
gagucaaaaucgccggu

SEQ ID NO: 5992 - RNA, 17 nt, Artificial Sequence
  Description of Artificial Sequence:  Nucleic Acid
  misc_feature: oligonucleotide substrate
ucaaaaucgccgguaua

SEQ ID NO: 5993 - RNA, 17 nt, Artificial Sequence
  Description of Artificial Sequence:  Nucleic Acid
  misc_feature: oligonucleotide substrate
aaucgccgguauagccc

SEQ ID NO: 5994 - RNA, 17 nt, Artificial Sequence
  Description of Artificial Sequence:  Nucleic Acid
  misc_feature: oligonucleotide substrate
ucgccgguauagcccgu

SEQ ID NO: 5995 - RNA, 17 nt, Artificial Sequence
  Description of Artificial Sequence:  Nucleic Acid
  misc_feature: oligonucleotide substrate
ccgguauagcccgucau

SEQ ID NO: 5996 - RNA, 17 nt, Artificial Sequence
  Description of Artificial Sequence:  Nucleic Acid
  misc_feature: oligonucleotide substrate
uauagcccgucauuaga

SEQ ID NO: 5997 - RNA, 17 nt, Artificial Sequence
  Description of Artificial Sequence:  Nucleic Acid
  misc_feature: oligonucleotide substrate
agcccgucauuagagcg

SEQ ID NO: 5998 - RNA, 17 nt, Artificial Sequence
  Description of Artificial Sequence:  Nucleic Acid
  misc_feature: oligonucleotide substrate
ucauuagagcgucuguu

SEQ ID NO: 5999 - RNA, 17 nt, Artificial Sequence
  Description of Artificial Sequence:  Nucleic Acid
  misc_feature: oligonucleotide substrate
auuagagcgucuguugc

SEQ ID NO: 6000 - RNA, 17 nt, Artificial Sequence
  Description of Artificial Sequence:  Nucleic Acid
  misc_feature: oligonucleotide substrate
gagcgucuguugccacg

SEQ ID NO: 6001 - RNA, 17 nt, Artificial Sequence
  Description of Artificial Sequence:  Nucleic Acid
  misc_feature: oligonucleotide substrate
cgucuguugccacgaca

SEQ ID NO: 6002 - RNA, 17 nt, Artificial Sequence
  Description of Artificial Sequence:  Nucleic Acid
  misc_feature: oligonucleotide substrate
cuguugccacgacaacg

SEQ ID NO: 6003 - RNA, 17 nt, Artificial Sequence
  Description of Artificial Sequence:  Nucleic Acid
  misc_feature: oligonucleotide substrate
uugccacgacaacgacg

SEQ ID NO: 6004 - RNA, 17 nt, Artificial Sequence
  Description of Artificial Sequence:  Nucleic Acid
  misc_feature: oligonucleotide substrate
ccacgacaacgacgucc

SEQ ID NO: 6005 - RNA, 17 nt, Artificial Sequence
  Description of Artificial Sequence:  Nucleic Acid
  misc_feature: oligonucleotide substrate
cgacaacgacguccccg

SEQ ID NO: 6006 - RNA, 17 nt, Artificial Sequence
  Description of Artificial Sequence:  Nucleic Acid
  misc_feature: oligonucleotide substrate
acaacgacguccccgcu

SEQ ID NO: 6007 - RNA, 17 nt, Artificial Sequence
  Description of Artificial Sequence:  Nucleic Acid
  misc_feature: oligonucleotide substrate
acguccccgcuggccgg

SEQ ID NO: 6008 - RNA, 17 nt, Artificial Sequence
  Description of Artificial Sequence:  Nucleic Acid
  misc_feature: oligonucleotide substrate
ccccgcuggccgguaug

SEQ ID NO: 6009 - RNA, 17 nt, Artificial Sequence
  Description of Artificial Sequence:  Nucleic Acid
  misc_feature: oligonucleotide substrate
gcuggccgguaugacgg

SEQ ID NO: 6010 - RNA, 17 nt, Artificial Sequence
  Description of Artificial Sequence:  Nucleic Acid
  misc_feature: oligonucleotide substrate
uggccgguaugacggac

SEQ ID NO: 6011 - RNA, 17 nt, Artificial Sequence
  Description of Artificial Sequence:  Nucleic Acid
  misc_feature: oligonucleotide substrate
ccgguaugacggacacg

SEQ ID NO: 6012 - RNA, 17 nt, Artificial Sequence
  Description of Artificial Sequence:  Nucleic Acid
  misc_feature: oligonucleotide substrate
uaugacggacacgucga

SEQ ID NO: 6013 - RNA, 17 nt, Artificial Sequence
  Description of Artificial Sequence:  Nucleic Acid
  misc_feature: oligonucleotide substrate
ugacggacacgucgaga

SEQ ID NO: 6014 - RNA, 17 nt, Artificial Sequence
  Description of Artificial Sequence:  Nucleic Acid
  misc_feature: oligonucleotide substrate
acggacacgucgagacc

SEQ ID NO: 6015 - RNA, 17 nt, Artificial Sequence
  Description of Artificial Sequence:  Nucleic Acid
  misc_feature: oligonucleotide substrate
acgucgagaccccggua

SEQ ID NO: 6016 - RNA, 17 nt, Artificial Sequence
  Description of Artificial Sequence:  Nucleic Acid
  misc_feature: oligonucleotide substrate
agaccccgguaauacgc

SEQ ID NO: 6017 - RNA, 17 nt, Artificial Sequence
  Description of Artificial Sequence:  Nucleic Acid
  misc_feature: oligonucleotide substrate
ccccgguaauacgcuac

SEQ ID NO: 6018 - RNA, 17 nt, Artificial Sequence
  Description of Artificial Sequence:  Nucleic Acid
  misc_feature: oligonucleotide substrate
ccgguaauacgcuacag

SEQ ID NO: 6019 - RNA, 17 nt, Artificial Sequence
  Description of Artificial Sequence:  Nucleic Acid
  misc_feature: oligonucleotide substrate
gguaauacgcuacagcg

SEQ ID NO: 6020 - RNA, 17 nt, Artificial Sequence
  Description of Artificial Sequence:  Nucleic Acid
  misc_feature: oligonucleotide substrate
aauacgcuacagcguua

SEQ ID NO: 6021 - RNA, 17 nt, Artificial Sequence
  Description of Artificial Sequence:  Nucleic Acid
  misc_feature: oligonucleotide substrate
acgcuacagcguuaagu

SEQ ID NO: 6022 - RNA, 17 nt, Artificial Sequence
  Description of Artificial Sequence:  Nucleic Acid
  misc_feature: oligonucleotide substrate
gcuacagcguuaagucc

SEQ ID NO: 6023 - RNA, 17 nt, Artificial Sequence
  Description of Artificial Sequence:  Nucleic Acid
  misc_feature: oligonucleotide substrate
agcguuaaguccgaggc

SEQ ID NO: 6024 - RNA, 17 nt, Artificial Sequence
  Description of Artificial Sequence:  Nucleic Acid
  misc_feature: oligonucleotide substrate
aguccgaggcccgacag

SEQ ID NO: 6025 - RNA, 17 nt, Artificial Sequence
  Description of Artificial Sequence:  Nucleic Acid
  misc_feature: oligonucleotide substrate
gaggcccgacagcuuug

SEQ ID NO: 6026 - RNA, 17 nt, Artificial Sequence
  Description of Artificial Sequence:  Nucleic Acid
  misc_feature: oligonucleotide substrate
gcccgacagcuuugcag

SEQ ID NO: 6027 - RNA, 17 nt, Artificial Sequence
  Description of Artificial Sequence:  Nucleic Acid
  misc_feature: oligonucleotide substrate
acagcuuugcagcgagc

SEQ ID NO: 6028 - RNA, 17 nt, Artificial Sequence
  Description of Artificial Sequence:  Nucleic Acid
  misc_feature: oligonucleotide substrate
gcuuugcagcgagcucg

SEQ ID NO: 6029 - RNA, 17 nt, Artificial Sequence
  Description of Artificial Sequence:  Nucleic Acid
  misc_feature: oligonucleotide substrate
ugcagcgagcucgucac

SEQ ID NO: 6030 - RNA, 17 nt, Artificial Sequence
  Description of Artificial Sequence:  Nucleic Acid
  misc_feature: oligonucleotide substrate
gcgagcucgucacauuu

SEQ ID NO: 6031 - RNA, 17 nt, Artificial Sequence
  Description of Artificial Sequence:  Nucleic Acid
  misc_feature: oligonucleotide substrate
agcucgucacauuucuu

SEQ ID NO: 6032 - RNA, 17 nt, Artificial Sequence
  Description of Artificial Sequence:  Nucleic Acid
  misc_feature: oligonucleotide substrate
cucgucacauuucuucu

SEQ ID NO: 6033 - RNA, 17 nt, Artificial Sequence
  Description of Artificial Sequence:  Nucleic Acid
  misc_feature: oligonucleotide substrate
uucuuggaauggcagaa

SEQ ID NO: 6034 - RNA, 17 nt, Artificial Sequence
  Description of Artificial Sequence:  Nucleic Acid
  misc_feature: oligonucleotide substrate
uuggaauggcagaagau

SEQ ID NO: 6035 - RNA, 17 nt, Artificial Sequence
  Description of Artificial Sequence:  Nucleic Acid
  misc_feature: oligonucleotide substrate
ggcagaagaugagaugc

SEQ ID NO: 6036 - RNA, 17 nt, Artificial Sequence
  Description of Artificial Sequence:  Nucleic Acid
  misc_feature: oligonucleotide substrate
aagaugagaugccuccc

SEQ ID NO: 6037 - RNA, 17 nt, Artificial Sequence
  Description of Artificial Sequence:  Nucleic Acid
  misc_feature: oligonucleotide substrate
gaugagaugccuccccc

SEQ ID NO: 6038 - RNA, 17 nt, Artificial Sequence
  Description of Artificial Sequence:  Nucleic Acid
  misc_feature: oligonucleotide substrate
ccccuuugauggucucg

SEQ ID NO: 6039 - RNA, 17 nt, Artificial Sequence
  Description of Artificial Sequence:  Nucleic Acid
  misc_feature: oligonucleotide substrate
cuuugauggucucgaug

SEQ ID NO: 6040 - RNA, 17 nt, Artificial Sequence
  Description of Artificial Sequence:  Nucleic Acid
  misc_feature: oligonucleotide substrate
uggucucgauggggaug

SEQ ID NO: 6041 - RNA, 17 nt, Artificial Sequence
  Description of Artificial Sequence:  Nucleic Acid
  misc_feature: oligonucleotide substrate
cgauggggauggcuuug

SEQ ID NO: 6042 - RNA, 17 nt, Artificial Sequence
  Description of Artificial Sequence:  Nucleic Acid
  misc_feature: oligonucleotide substrate
uggggauggcuuugcca

SEQ ID NO: 6043 - RNA, 17 nt, Artificial Sequence
  Description of Artificial Sequence:  Nucleic Acid
  misc_feature: oligonucleotide substrate
auggcuuugccauagaa

SEQ ID NO: 6044 - RNA, 17 nt, Artificial Sequence
  Description of Artificial Sequence:  Nucleic Acid
  misc_feature: oligonucleotide substrate
gcuuugccauagaaggg

SEQ ID NO: 6045 - RNA, 17 nt, Artificial Sequence
  Description of Artificial Sequence:  Nucleic Acid
  misc_feature: oligonucleotide substrate
agaaggggaucucuccg

SEQ ID NO: 6046 - RNA, 17 nt, Artificial Sequence
  Description of Artificial Sequence:  Nucleic Acid
  misc_feature: oligonucleotide substrate
ucucuccgguguuggac

SEQ ID NO: 6047 - RNA, 17 nt, Artificial Sequence
  Description of Artificial Sequence:  Nucleic Acid
  misc_feature: oligonucleotide substrate
ucuccgguguuggacaa

SEQ ID NO: 6048 - RNA, 17 nt, Artificial Sequence
  Description of Artificial Sequence:  Nucleic Acid
  misc_feature: oligonucleotide substrate
gguguuggacaaggcua

SEQ ID NO: 6049 - RNA, 17 nt, Artificial Sequence
  Description of Artificial Sequence:  Nucleic Acid
  misc_feature: oligonucleotide substrate
uggacaaggcuaucucc

SEQ ID NO: 6050 - RNA, 17 nt, Artificial Sequence
  Description of Artificial Sequence:  Nucleic Acid
  misc_feature: oligonucleotide substrate
acaaggcuaucuccucg

SEQ ID NO: 6051 - RNA, 17 nt, Artificial Sequence
  Description of Artificial Sequence:  Nucleic Acid
  misc_feature: oligonucleotide substrate
ucuccucgauguuggga

SEQ ID NO: 6052 - RNA, 17 nt, Artificial Sequence
  Description of Artificial Sequence:  Nucleic Acid
  misc_feature: oligonucleotide substrate
uccucgauguugggaug

SEQ ID NO: 6053 - RNA, 17 nt, Artificial Sequence
  Description of Artificial Sequence:  Nucleic Acid
  misc_feature: oligonucleotide substrate
auguugggauguggcac

SEQ ID NO: 6054 - RNA, 17 nt, Artificial Sequence
  Description of Artificial Sequence:  Nucleic Acid
  misc_feature: oligonucleotide substrate
guugggauguggcacgg

SEQ ID NO: 6055 - RNA, 17 nt, Artificial Sequence
  Description of Artificial Sequence:  Nucleic Acid
  misc_feature: oligonucleotide substrate
gggauguggcacgguga

SEQ ID NO: 6056 - RNA, 17 nt, Artificial Sequence
  Description of Artificial Sequence:  Nucleic Acid
  misc_feature: oligonucleotide substrate
gauguggcacggugacc

SEQ ID NO: 6057 - RNA, 17 nt, Artificial Sequence
  Description of Artificial Sequence:  Nucleic Acid
  misc_feature: oligonucleotide substrate
guggcacggugaccgau

SEQ ID NO: 6058 - RNA, 17 nt, Artificial Sequence
  Description of Artificial Sequence:  Nucleic Acid
  misc_feature: oligonucleotide substrate
gcacggugaccgauccc

SEQ ID NO: 6059 - RNA, 17 nt, Artificial Sequence
  Description of Artificial Sequence:  Nucleic Acid
  misc_feature: oligonucleotide substrate
ggugaccgaucccggag

SEQ ID NO: 6060 - RNA, 17 nt, Artificial Sequence
  Description of Artificial Sequence:  Nucleic Acid
  misc_feature: oligonucleotide substrate
ucccggaggcguagcgg

SEQ ID NO: 6061 - RNA, 17 nt, Artificial Sequence
  Description of Artificial Sequence:  Nucleic Acid
  misc_feature: oligonucleotide substrate
ccggaggcguagcggug

SEQ ID NO: 6062 - RNA, 17 nt, Artificial Sequence
  Description of Artificial Sequence:  Nucleic Acid
  misc_feature: oligonucleotide substrate
gaggcguagcgguggcg

SEQ ID NO: 6063 - RNA, 17 nt, Artificial Sequence
  Description of Artificial Sequence:  Nucleic Acid
  misc_feature: oligonucleotide substrate
gcguagcgguggcgagc

SEQ ID NO: 6064 - RNA, 17 nt, Artificial Sequence
  Description of Artificial Sequence:  Nucleic Acid
  misc_feature: oligonucleotide substrate
uagcgguggcgagcacg

SEQ ID NO: 6065 - RNA, 17 nt, Artificial Sequence
  Description of Artificial Sequence:  Nucleic Acid
  misc_feature: oligonucleotide substrate
gguggcgagcacgacga

SEQ ID NO: 6066 - RNA, 17 nt, Artificial Sequence
  Description of Artificial Sequence:  Nucleic Acid
  misc_feature: oligonucleotide substrate
uggcgagcacgacgagc

SEQ ID NO: 6067 - RNA, 17 nt, Artificial Sequence
  Description of Artificial Sequence:  Nucleic Acid
  misc_feature: oligonucleotide substrate
cgagcacgacgagccgc

SEQ ID NO: 6068 - RNA, 17 nt, Artificial Sequence
  Description of Artificial Sequence:  Nucleic Acid
  misc_feature: oligonucleotide substrate
cacgacgagccgcgcuc

SEQ ID NO: 6069 - RNA, 17 nt, Artificial Sequence
  Description of Artificial Sequence:  Nucleic Acid
  misc_feature: oligonucleotide substrate
gacgagccgcgcuccag

SEQ ID NO: 6070 - RNA, 17 nt, Artificial Sequence
  Description of Artificial Sequence:  Nucleic Acid
  misc_feature: oligonucleotide substrate
cgagccgcgcuccagcc

SEQ ID NO: 6071 - RNA, 17 nt, Artificial Sequence
  Description of Artificial Sequence:  Nucleic Acid
  misc_feature: oligonucleotide substrate
gcgcuccagccgucucc

SEQ ID NO: 6072 - RNA, 17 nt, Artificial Sequence
  Description of Artificial Sequence:  Nucleic Acid
  misc_feature: oligonucleotide substrate
cuccagccgucuccgcu

SEQ ID NO: 6073 - RNA, 17 nt, Artificial Sequence
  Description of Artificial Sequence:  Nucleic Acid
  misc_feature: oligonucleotide substrate
ccgucuccgcuuggucc

SEQ ID NO: 6074 - RNA, 17 nt, Artificial Sequence
  Description of Artificial Sequence:  Nucleic Acid
  misc_feature: oligonucleotide substrate
uccgcuugguccaggac

SEQ ID NO: 6075 - RNA, 17 nt, Artificial Sequence
  Description of Artificial Sequence:  Nucleic Acid
  misc_feature: oligonucleotide substrate
gguccaggacugugccg

SEQ ID NO: 6076 - RNA, 17 nt, Artificial Sequence
  Description of Artificial Sequence:  Nucleic Acid
  misc_feature: oligonucleotide substrate
ccaggacugugccgaug

SEQ ID NO: 6077 - RNA, 17 nt, Artificial Sequence
  Description of Artificial Sequence:  Nucleic Acid
  misc_feature: oligonucleotide substrate
aggacugugccgaugcc

SEQ ID NO: 6078 - RNA, 17 nt, Artificial Sequence
  Description of Artificial Sequence:  Nucleic Acid
  misc_feature: oligonucleotide substrate
cugugccgaugcccaaa

SEQ ID NO: 6079 - RNA, 17 nt, Artificial Sequence
  Description of Artificial Sequence:  Nucleic Acid
  misc_feature: oligonucleotide substrate
gugccgaugcccaaaau

SEQ ID NO: 6080 - RNA, 17 nt, Artificial Sequence
  Description of Artificial Sequence:  Nucleic Acid
  misc_feature: oligonucleotide substrate
ugcccaaaauggaaguc

SEQ ID NO: 6081 - RNA, 17 nt, Artificial Sequence
  Description of Artificial Sequence:  Nucleic Acid
  misc_feature: oligonucleotide substrate
aaauggaagucgaguca

SEQ ID NO: 6082 - RNA, 17 nt, Artificial Sequence
  Description of Artificial Sequence:  Nucleic Acid
  misc_feature: oligonucleotide substrate
gaagucgagucaauuga

SEQ ID NO: 6083 - RNA, 17 nt, Artificial Sequence
  Description of Artificial Sequence:  Nucleic Acid
  misc_feature: oligonucleotide substrate
ucgagucaauugagugg

SEQ ID NO: 6084 - RNA, 17 nt, Artificial Sequence
  Description of Artificial Sequence:  Nucleic Acid
  misc_feature: oligonucleotide substrate
ucaauugaguggcacuc

SEQ ID NO: 6085 - RNA, 17 nt, Artificial Sequence
  Description of Artificial Sequence:  Nucleic Acid
  misc_feature: oligonucleotide substrate
auugaguggcacucauc

SEQ ID NO: 6086 - RNA, 17 nt, Artificial Sequence
  Description of Artificial Sequence:  Nucleic Acid
  misc_feature: oligonucleotide substrate
ugaguggcacucaucac

SEQ ID NO: 6087 - RNA, 17 nt, Artificial Sequence
  Description of Artificial Sequence:  Nucleic Acid
  misc_feature: oligonucleotide substrate
uggcacucaucacacau

SEQ ID NO: 6088 - RNA, 17 nt, Artificial Sequence
  Description of Artificial Sequence:  Nucleic Acid
  misc_feature: oligonucleotide substrate
cacucaucacacauuau

SEQ ID NO: 6089 - RNA, 17 nt, Artificial Sequence
  Description of Artificial Sequence:  Nucleic Acid
  misc_feature: oligonucleotide substrate
cucaucacacauuauga

SEQ ID NO: 6090 - RNA, 17 nt, Artificial Sequence
  Description of Artificial Sequence:  Nucleic Acid
  misc_feature: oligonucleotide substrate
caucacacauuaugaug

SEQ ID NO: 6091 - RNA, 17 nt, Artificial Sequence
  Description of Artificial Sequence:  Nucleic Acid
  misc_feature: oligonucleotide substrate
cacacauuaugauguca

SEQ ID NO: 6092 - RNA, 17 nt, Artificial Sequence
  Description of Artificial Sequence:  Nucleic Acid
  misc_feature: oligonucleotide substrate
acauuaugaugucauag

SEQ ID NO: 6093 - RNA, 17 nt, Artificial Sequence
  Description of Artificial Sequence:  Nucleic Acid
  misc_feature: oligonucleotide substrate
auuaugaugucauaggc

SEQ ID NO: 6094 - RNA, 17 nt, Artificial Sequence
  Description of Artificial Sequence:  Nucleic Acid
  misc_feature: oligonucleotide substrate
augaugucauaggcgcc

SEQ ID NO: 6095 - RNA, 17 nt, Artificial Sequence
  Description of Artificial Sequence:  Nucleic Acid
  misc_feature: oligonucleotide substrate
ugucauaggcgccccca

SEQ ID NO: 6096 - RNA, 17 nt, Artificial Sequence
  Description of Artificial Sequence:  Nucleic Acid
  misc_feature: oligonucleotide substrate
ucauaggcgcccccaga

SEQ ID NO: 6097 - RNA, 17 nt, Artificial Sequence
  Description of Artificial Sequence:  Nucleic Acid
  misc_feature: oligonucleotide substrate
cccccagagcaaccacc

SEQ ID NO: 6098 - RNA, 17 nt, Artificial Sequence
  Description of Artificial Sequence:  Nucleic Acid
  misc_feature: oligonucleotide substrate
ccagagcaaccaccguc

SEQ ID NO: 6099 - RNA, 17 nt, Artificial Sequence
  Description of Artificial Sequence:  Nucleic Acid
  misc_feature: oligonucleotide substrate
gagcaaccaccgucggc

SEQ ID NO: 6100 - RNA, 17 nt, Artificial Sequence
  Description of Artificial Sequence:  Nucleic Acid
  misc_feature: oligonucleotide substrate
caaccaccgucggcaag

SEQ ID NO: 6101 - RNA, 17 nt, Artificial Sequence
  Description of Artificial Sequence:  Nucleic Acid
  misc_feature: oligonucleotide substrate
caccgucggcaaggaac

SEQ ID NO: 6102 - RNA, 17 nt, Artificial Sequence
  Description of Artificial Sequence:  Nucleic Acid
  misc_feature: oligonucleotide substrate
ggcaaggaacuugccau

SEQ ID NO: 6103 - RNA, 17 nt, Artificial Sequence
  Description of Artificial Sequence:  Nucleic Acid
  misc_feature: oligonucleotide substrate
aggaacuugccauaggu

SEQ ID NO: 6104 - RNA, 17 nt, Artificial Sequence
  Description of Artificial Sequence:  Nucleic Acid
  misc_feature: oligonucleotide substrate
aacuugccauaggugga

SEQ ID NO: 6105 - RNA, 17 nt, Artificial Sequence
  Description of Artificial Sequence:  Nucleic Acid
  misc_feature: oligonucleotide substrate
ugccauagguggaguac

SEQ ID NO: 6106 - RNA, 17 nt, Artificial Sequence
  Description of Artificial Sequence:  Nucleic Acid
  misc_feature: oligonucleotide substrate
uagguggaguacgugau

SEQ ID NO: 6107 - RNA, 17 nt, Artificial Sequence
  Description of Artificial Sequence:  Nucleic Acid
  misc_feature: oligonucleotide substrate
gguggaguacgugaugg

SEQ ID NO: 6108 - RNA, 17 nt, Artificial Sequence
  Description of Artificial Sequence:  Nucleic Acid
  misc_feature: oligonucleotide substrate
uggaguacgugaugggg

SEQ ID NO: 6109 - RNA, 17 nt, Artificial Sequence
  Description of Artificial Sequence:  Nucleic Acid
  misc_feature: oligonucleotide substrate
aguacgugaugggggcg

SEQ ID NO: 6110 - RNA, 17 nt, Artificial Sequence
  Description of Artificial Sequence:  Nucleic Acid
  misc_feature: oligonucleotide substrate
ugaugggggcgcccgug

SEQ ID NO: 6111 - RNA, 17 nt, Artificial Sequence
  Description of Artificial Sequence:  Nucleic Acid
  misc_feature: oligonucleotide substrate
augggggcgcccguggu

SEQ ID NO: 6112 - RNA, 17 nt, Artificial Sequence
  Description of Artificial Sequence:  Nucleic Acid
  misc_feature: oligonucleotide substrate
gggcgcccguggugaug

SEQ ID NO: 6113 - RNA, 17 nt, Artificial Sequence
  Description of Artificial Sequence:  Nucleic Acid
  misc_feature: oligonucleotide substrate
cgcccguggugaugguc

SEQ ID NO: 6114 - RNA, 17 nt, Artificial Sequence
  Description of Artificial Sequence:  Nucleic Acid
  misc_feature: oligonucleotide substrate
ccguggugaugguccuu

SEQ ID NO: 6115 - RNA, 17 nt, Artificial Sequence
  Description of Artificial Sequence:  Nucleic Acid
  misc_feature: oligonucleotide substrate
uggugaugguccuuacc

SEQ ID NO: 6116 - RNA, 17 nt, Artificial Sequence
  Description of Artificial Sequence:  Nucleic Acid
  misc_feature: oligonucleotide substrate
ugguccuuaccccaguu

SEQ ID NO: 6117 - RNA, 17 nt, Artificial Sequence
  Description of Artificial Sequence:  Nucleic Acid
  misc_feature: oligonucleotide substrate
uuaccccaguucugaug

SEQ ID NO: 6118 - RNA, 17 nt, Artificial Sequence
  Description of Artificial Sequence:  Nucleic Acid
  misc_feature: oligonucleotide substrate
caguucugauguuagga

SEQ ID NO: 6119 - RNA, 17 nt, Artificial Sequence
  Description of Artificial Sequence:  Nucleic Acid
  misc_feature: oligonucleotide substrate
guucugauguuaggauc

SEQ ID NO: 6120 - RNA, 17 nt, Artificial Sequence
  Description of Artificial Sequence:  Nucleic Acid
  misc_feature: oligonucleotide substrate
auguuaggaucgacacc

SEQ ID NO: 6121 - RNA, 17 nt, Artificial Sequence
  Description of Artificial Sequence:  Nucleic Acid
  misc_feature: oligonucleotide substrate
uaggaucgacaccgugu

SEQ ID NO: 6122 - RNA, 17 nt, Artificial Sequence
  Description of Artificial Sequence:  Nucleic Acid
  misc_feature: oligonucleotide substrate
ggaucgacaccgugugc

SEQ ID NO: 6123 - RNA, 17 nt, Artificial Sequence
  Description of Artificial Sequence:  Nucleic Acid
  misc_feature: oligonucleotide substrate
ucgacaccgugugccuu

SEQ ID NO: 6124 - RNA, 17 nt, Artificial Sequence
  Description of Artificial Sequence:  Nucleic Acid
  misc_feature: oligonucleotide substrate
gacaccgugugccuuag

SEQ ID NO: 6125 - RNA, 17 nt, Artificial Sequence
  Description of Artificial Sequence:  Nucleic Acid
  misc_feature: oligonucleotide substrate
caccgugugccuuagac

SEQ ID NO: 6126 - RNA, 17 nt, Artificial Sequence
  Description of Artificial Sequence:  Nucleic Acid
  misc_feature: oligonucleotide substrate
ugccuuagacauauacg

SEQ ID NO: 6127 - RNA, 17 nt, Artificial Sequence
  Description of Artificial Sequence:  Nucleic Acid
  misc_feature: oligonucleotide substrate
ccuuagacauauacgcc

SEQ ID NO: 6128 - RNA, 17 nt, Artificial Sequence
  Description of Artificial Sequence:  Nucleic Acid
  misc_feature: oligonucleotide substrate
uuagacauauacgcccc

SEQ ID NO: 6129 - RNA, 17 nt, Artificial Sequence
  Description of Artificial Sequence:  Nucleic Acid
  misc_feature: oligonucleotide substrate
agacauauacgccccaa

SEQ ID NO: 6130 - RNA, 17 nt, Artificial Sequence
  Description of Artificial Sequence:  Nucleic Acid
  misc_feature: oligonucleotide substrate
acauauacgccccaaac

SEQ ID NO: 6131 - RNA, 17 nt, Artificial Sequence
  Description of Artificial Sequence:  Nucleic Acid
  misc_feature: oligonucleotide substrate
cgccccaaacccuaagg

SEQ ID NO: 6132 - RNA, 17 nt, Artificial Sequence
  Description of Artificial Sequence:  Nucleic Acid
  misc_feature: oligonucleotide substrate
acccuaagguggcggua

SEQ ID NO: 6133 - RNA, 17 nt, Artificial Sequence
  Description of Artificial Sequence:  Nucleic Acid
  misc_feature: oligonucleotide substrate
cuaagguggcgguaacg

SEQ ID NO: 6134 - RNA, 17 nt, Artificial Sequence
  Description of Artificial Sequence:  Nucleic Acid
  misc_feature: oligonucleotide substrate
agguggcgguaacggac

SEQ ID NO: 6135 - RNA, 17 nt, Artificial Sequence
  Description of Artificial Sequence:  Nucleic Acid
  misc_feature: oligonucleotide substrate
uggcgguaacggacgga

SEQ ID NO: 6136 - RNA, 17 nt, Artificial Sequence
  Description of Artificial Sequence:  Nucleic Acid
  misc_feature: oligonucleotide substrate
gguaacggacggauuua

SEQ ID NO: 6137 - RNA, 17 nt, Artificial Sequence
  Description of Artificial Sequence:  Nucleic Acid
  misc_feature: oligonucleotide substrate
acggacggauuuaggac

SEQ ID NO: 6138 - RNA, 17 nt, Artificial Sequence
  Description of Artificial Sequence:  Nucleic Acid
  misc_feature: oligonucleotide substrate
gauuuaggacgagcacu

SEQ ID NO: 6139 - RNA, 17 nt, Artificial Sequence
  Description of Artificial Sequence:  Nucleic Acid
  misc_feature: oligonucleotide substrate
uaggacgagcacuuugu

SEQ ID NO: 6140 - RNA, 17 nt, Artificial Sequence
  Description of Artificial Sequence:  Nucleic Acid
  misc_feature: oligonucleotide substrate
ggacgagcacuuuguac

SEQ ID NO: 6141 - RNA, 17 nt, Artificial Sequence
  Description of Artificial Sequence:  Nucleic Acid
  misc_feature: oligonucleotide substrate
agcacuuuguacccuug

SEQ ID NO: 6142 - RNA, 17 nt, Artificial Sequence
  Description of Artificial Sequence:  Nucleic Acid
  misc_feature: oligonucleotide substrate
cacuuuguacccuuggg

SEQ ID NO: 6143 - RNA, 17 nt, Artificial Sequence
  Description of Artificial Sequence:  Nucleic Acid
  misc_feature: oligonucleotide substrate
acccuugggcugcauau

SEQ ID NO: 6144 - RNA, 17 nt, Artificial Sequence
  Description of Artificial Sequence:  Nucleic Acid
  misc_feature: oligonucleotide substrate
cuugggcugcauaugca

SEQ ID NO: 6145 - RNA, 17 nt, Artificial Sequence
  Description of Artificial Sequence:  Nucleic Acid
  misc_feature: oligonucleotide substrate
ugggcugcauaugcagc

SEQ ID NO: 6146 - RNA, 17 nt, Artificial Sequence
  Description of Artificial Sequence:  Nucleic Acid
  misc_feature: oligonucleotide substrate
ggcugcauaugcagccg

SEQ ID NO: 6147 - RNA, 17 nt, Artificial Sequence
  Description of Artificial Sequence:  Nucleic Acid
  misc_feature: oligonucleotide substrate
cugcauaugcagccggu

SEQ ID NO: 6148 - RNA, 17 nt, Artificial Sequence
  Description of Artificial Sequence:  Nucleic Acid
  misc_feature: oligonucleotide substrate
cauaugcagccgguacc

SEQ ID NO: 6149 - RNA, 17 nt, Artificial Sequence
  Description of Artificial Sequence:  Nucleic Acid
  misc_feature: oligonucleotide substrate
ugcagccgguaccuuag

SEQ ID NO: 6150 - RNA, 17 nt, Artificial Sequence
  Description of Artificial Sequence:  Nucleic Acid
  misc_feature: oligonucleotide substrate
cagccgguaccuuagug

SEQ ID NO: 6151 - RNA, 17 nt, Artificial Sequence
  Description of Artificial Sequence:  Nucleic Acid
  misc_feature: oligonucleotide substrate
guaccuuagugcucuug

SEQ ID NO: 6152 - RNA, 17 nt, Artificial Sequence
  Description of Artificial Sequence:  Nucleic Acid
  misc_feature: oligonucleotide substrate
accuuagugcucuugcc

SEQ ID NO: 6153 - RNA, 17 nt, Artificial Sequence
  Description of Artificial Sequence:  Nucleic Acid
  misc_feature: oligonucleotide substrate
gugcucuugccgcugcc

SEQ ID NO: 6154 - RNA, 17 nt, Artificial Sequence
  Description of Artificial Sequence:  Nucleic Acid
  misc_feature: oligonucleotide substrate
cucuugccgcugccagu

SEQ ID NO: 6155 - RNA, 17 nt, Artificial Sequence
  Description of Artificial Sequence:  Nucleic Acid
  misc_feature: oligonucleotide substrate
uugccgcugccaguggg

SEQ ID NO: 6156 - RNA, 17 nt, Artificial Sequence
  Description of Artificial Sequence:  Nucleic Acid
  misc_feature: oligonucleotide substrate
cgcugccagugggagcg

SEQ ID NO: 6157 - RNA, 17 nt, Artificial Sequence
  Description of Artificial Sequence:  Nucleic Acid
  misc_feature: oligonucleotide substrate
cagugggagcguguagg

SEQ ID NO: 6158 - RNA, 17 nt, Artificial Sequence
  Description of Artificial Sequence:  Nucleic Acid
  misc_feature: oligonucleotide substrate
gugggagcguguaggug

SEQ ID NO: 6159 - RNA, 17 nt, Artificial Sequence
  Description of Artificial Sequence:  Nucleic Acid
  misc_feature: oligonucleotide substrate
gggagcguguagguggg

SEQ ID NO: 6160 - RNA, 17 nt, Artificial Sequence
  Description of Artificial Sequence:  Nucleic Acid
  misc_feature: oligonucleotide substrate
gcguguaggugggccac

SEQ ID NO: 6161 - RNA, 17 nt, Artificial Sequence
  Description of Artificial Sequence:  Nucleic Acid
  misc_feature: oligonucleotide substrate
guaggugggccacuugg

SEQ ID NO: 6162 - RNA, 17 nt, Artificial Sequence
  Description of Artificial Sequence:  Nucleic Acid
  misc_feature: oligonucleotide substrate
ggugggccacuuggaau

SEQ ID NO: 6163 - RNA, 17 nt, Artificial Sequence
  Description of Artificial Sequence:  Nucleic Acid
  misc_feature: oligonucleotide substrate
cacuuggaaugucugcg

SEQ ID NO: 6164 - RNA, 17 nt, Artificial Sequence
  Description of Artificial Sequence:  Nucleic Acid
  misc_feature: oligonucleotide substrate
cuuggaaugucugcggu

SEQ ID NO: 6165 - RNA, 17 nt, Artificial Sequence
  Description of Artificial Sequence:  Nucleic Acid
  misc_feature: oligonucleotide substrate
gaaugucugcgguacgg

SEQ ID NO: 6166 - RNA, 17 nt, Artificial Sequence
  Description of Artificial Sequence:  Nucleic Acid
  misc_feature: oligonucleotide substrate
ugucugcgguacggcug

SEQ ID NO: 6167 - RNA, 17 nt, Artificial Sequence
  Description of Artificial Sequence:  Nucleic Acid
  misc_feature: oligonucleotide substrate
ucugcgguacggcuggg

SEQ ID NO: 6168 - RNA, 17 nt, Artificial Sequence
  Description of Artificial Sequence:  Nucleic Acid
  misc_feature: oligonucleotide substrate
gcgguacggcugggggg

SEQ ID NO: 6169 - RNA, 17 nt, Artificial Sequence
  Description of Artificial Sequence:  Nucleic Acid
  misc_feature: oligonucleotide substrate
ugggggggacgaguugu

SEQ ID NO: 6170 - RNA, 17 nt, Artificial Sequence
  Description of Artificial Sequence:  Nucleic Acid
  misc_feature: oligonucleotide substrate
ggggacgaguuguccgu

SEQ ID NO: 6171 - RNA, 17 nt, Artificial Sequence
  Description of Artificial Sequence:  Nucleic Acid
  misc_feature: oligonucleotide substrate
gacgaguuguccgugaa

SEQ ID NO: 6172 - RNA, 17 nt, Artificial Sequence
  Description of Artificial Sequence:  Nucleic Acid
  misc_feature: oligonucleotide substrate
aguuguccgugaagacc

SEQ ID NO: 6173 - RNA, 17 nt, Artificial Sequence
  Description of Artificial Sequence:  Nucleic Acid
  misc_feature: oligonucleotide substrate
ccgugaagaccggggac

SEQ ID NO: 6174 - RNA, 17 nt, Artificial Sequence
  Description of Artificial Sequence:  Nucleic Acid
  misc_feature: oligonucleotide substrate
gaccggggaccgcaugg

SEQ ID NO: 6175 - RNA, 17 nt, Artificial Sequence
  Description of Artificial Sequence:  Nucleic Acid
  misc_feature: oligonucleotide substrate
cggggaccgcaugguag

SEQ ID NO: 6176 - RNA, 17 nt, Artificial Sequence
  Description of Artificial Sequence:  Nucleic Acid
  misc_feature: oligonucleotide substrate
gggaccgcaugguaguu

SEQ ID NO: 6177 - RNA, 17 nt, Artificial Sequence
  Description of Artificial Sequence:  Nucleic Acid
  misc_feature: oligonucleotide substrate
accgcaugguaguuucc

SEQ ID NO: 6178 - RNA, 17 nt, Artificial Sequence
  Description of Artificial Sequence:  Nucleic Acid
  misc_feature: oligonucleotide substrate
gcaugguaguuuccaua

SEQ ID NO: 6179 - RNA, 17 nt, Artificial Sequence
  Description of Artificial Sequence:  Nucleic Acid
  misc_feature: oligonucleotide substrate
uaguuuccauagacuca

SEQ ID NO: 6180 - RNA, 17 nt, Artificial Sequence
  Description of Artificial Sequence:  Nucleic Acid
  misc_feature: oligonucleotide substrate
uuccauagacucaacgg

SEQ ID NO: 6181 - RNA, 17 nt, Artificial Sequence
  Description of Artificial Sequence:  Nucleic Acid
  misc_feature: oligonucleotide substrate
uagacucaacggguaca

SEQ ID NO: 6182 - RNA, 17 nt, Artificial Sequence
  Description of Artificial Sequence:  Nucleic Acid
  misc_feature: oligonucleotide substrate
cucaacggguacaaagu

SEQ ID NO: 6183 - RNA, 17 nt, Artificial Sequence
  Description of Artificial Sequence:  Nucleic Acid
  misc_feature: oligonucleotide substrate
caacggguacaaagucc

SEQ ID NO: 6184 - RNA, 17 nt, Artificial Sequence
  Description of Artificial Sequence:  Nucleic Acid
  misc_feature: oligonucleotide substrate
gguacaaaguccaccgc

SEQ ID NO: 6185 - RNA, 17 nt, Artificial Sequence
  Description of Artificial Sequence:  Nucleic Acid
  misc_feature: oligonucleotide substrate
caaaguccaccgccuuc

SEQ ID NO: 6186 - RNA, 17 nt, Artificial Sequence
  Description of Artificial Sequence:  Nucleic Acid
  misc_feature: oligonucleotide substrate
aguccaccgccuucgca

SEQ ID NO: 6187 - RNA, 17 nt, Artificial Sequence
  Description of Artificial Sequence:  Nucleic Acid
  misc_feature: oligonucleotide substrate
ccgccuucgcaaccccc

SEQ ID NO: 6188 - RNA, 17 nt, Artificial Sequence
  Description of Artificial Sequence:  Nucleic Acid
  misc_feature: oligonucleotide substrate
ccuucgcaaccccccgg

SEQ ID NO: 6189 - RNA, 17 nt, Artificial Sequence
  Description of Artificial Sequence:  Nucleic Acid
  misc_feature: oligonucleotide substrate
ccccccgggugcacaca

SEQ ID NO: 6190 - RNA, 17 nt, Artificial Sequence
  Description of Artificial Sequence:  Nucleic Acid
  misc_feature: oligonucleotide substrate
ccccgggugcacacagc

SEQ ID NO: 6191 - RNA, 17 nt, Artificial Sequence
  Description of Artificial Sequence:  Nucleic Acid
  misc_feature: oligonucleotide substrate
ccgggugcacacagcag

SEQ ID NO: 6192 - RNA, 17 nt, Artificial Sequence
  Description of Artificial Sequence:  Nucleic Acid
  misc_feature: oligonucleotide substrate
gggugcacacagcagcc

SEQ ID NO: 6193 - RNA, 17 nt, Artificial Sequence
  Description of Artificial Sequence:  Nucleic Acid
  misc_feature: oligonucleotide substrate
ugcacacagcagcccgg

SEQ ID NO: 6194 - RNA, 17 nt, Artificial Sequence
  Description of Artificial Sequence:  Nucleic Acid
  misc_feature: oligonucleotide substrate
acacagcagcccggaag

SEQ ID NO: 6195 - RNA, 17 nt, Artificial Sequence
  Description of Artificial Sequence:  Nucleic Acid
  misc_feature: oligonucleotide substrate
cccggaagaugcccaca

SEQ ID NO: 6196 - RNA, 17 nt, Artificial Sequence
  Description of Artificial Sequence:  Nucleic Acid
  misc_feature: oligonucleotide substrate
cggaagaugcccacaac

SEQ ID NO: 6197 - RNA, 17 nt, Artificial Sequence
  Description of Artificial Sequence:  Nucleic Acid
  misc_feature: oligonucleotide substrate
agaugcccacaacgugc

SEQ ID NO: 6198 - RNA, 17 nt, Artificial Sequence
  Description of Artificial Sequence:  Nucleic Acid
  misc_feature: oligonucleotide substrate
ugcccacaacgugcccc

SEQ ID NO: 6199 - RNA, 17 nt, Artificial Sequence
  Description of Artificial Sequence:  Nucleic Acid
  misc_feature: oligonucleotide substrate
cccacaacgugccccga

SEQ ID NO: 6200 - RNA, 17 nt, Artificial Sequence
  Description of Artificial Sequence:  Nucleic Acid
  misc_feature: oligonucleotide substrate
cacaacgugccccgaag

SEQ ID NO: 6201 - RNA, 17 nt, Artificial Sequence
  Description of Artificial Sequence:  Nucleic Acid
  misc_feature: oligonucleotide substrate
cccgaagggcagagcag

SEQ ID NO: 6202 - RNA, 17 nt, Artificial Sequence
  Description of Artificial Sequence:  Nucleic Acid
  misc_feature: oligonucleotide substrate
agggcagagcaguggac

SEQ ID NO: 6203 - RNA, 17 nt, Artificial Sequence
  Description of Artificial Sequence:  Nucleic Acid
  misc_feature: oligonucleotide substrate
gcagagcaguggaccgc

SEQ ID NO: 6204 - RNA, 17 nt, Artificial Sequence
  Description of Artificial Sequence:  Nucleic Acid
  misc_feature: oligonucleotide substrate
agcaguggaccgcccga

SEQ ID NO: 6205 - RNA, 17 nt, Artificial Sequence
  Description of Artificial Sequence:  Nucleic Acid
  misc_feature: oligonucleotide substrate
aguggaccgcccgagga

SEQ ID NO: 6206 - RNA, 17 nt, Artificial Sequence
  Description of Artificial Sequence:  Nucleic Acid
  misc_feature: oligonucleotide substrate
cccgaggagcccuucaa

SEQ ID NO: 6207 - RNA, 17 nt, Artificial Sequence
  Description of Artificial Sequence:  Nucleic Acid
  misc_feature: oligonucleotide substrate
cccuucaaguaggagau

SEQ ID NO: 6208 - RNA, 17 nt, Artificial Sequence
  Description of Artificial Sequence:  Nucleic Acid
  misc_feature: oligonucleotide substrate
aguaggagaugggccug

SEQ ID NO: 6209 - RNA, 17 nt, Artificial Sequence
  Description of Artificial Sequence:  Nucleic Acid
  misc_feature: oligonucleotide substrate
ggagaugggccuggggg

SEQ ID NO: 6210 - RNA, 17 nt, Artificial Sequence
  Description of Artificial Sequence:  Nucleic Acid
  misc_feature: oligonucleotide substrate
ccugggggauaguaagc

SEQ ID NO: 6211 - RNA, 17 nt, Artificial Sequence
  Description of Artificial Sequence:  Nucleic Acid
  misc_feature: oligonucleotide substrate
gggggauaguaagcucc

SEQ ID NO: 6212 - RNA, 17 nt, Artificial Sequence
  Description of Artificial Sequence:  Nucleic Acid
  misc_feature: oligonucleotide substrate
gauaguaagcucccccu

SEQ ID NO: 6213 - RNA, 17 nt, Artificial Sequence
  Description of Artificial Sequence:  Nucleic Acid
  misc_feature: oligonucleotide substrate
cucccccugcugucacc

SEQ ID NO: 6214 - RNA, 17 nt, Artificial Sequence
  Description of Artificial Sequence:  Nucleic Acid
  misc_feature: oligonucleotide substrate
ccccugcugucaccccg

SEQ ID NO: 6215 - RNA, 17 nt, Artificial Sequence
  Description of Artificial Sequence:  Nucleic Acid
  misc_feature: oligonucleotide substrate
cugcugucaccccgccg

SEQ ID NO: 6216 - RNA, 17 nt, Artificial Sequence
  Description of Artificial Sequence:  Nucleic Acid
  misc_feature: oligonucleotide substrate
gucaccccgccggcgca

SEQ ID NO: 6217 - RNA, 17 nt, Artificial Sequence
  Description of Artificial Sequence:  Nucleic Acid
  misc_feature: oligonucleotide substrate
ccccgccggcgcaccgg

SEQ ID NO: 6218 - RNA, 17 nt, Artificial Sequence
  Description of Artificial Sequence:  Nucleic Acid
  misc_feature: oligonucleotide substrate
ccgccggcgcaccggaa

SEQ ID NO: 6219 - RNA, 17 nt, Artificial Sequence
  Description of Artificial Sequence:  Nucleic Acid
  misc_feature: oligonucleotide substrate
gccggcgcaccggaaug

SEQ ID NO: 6220 - RNA, 17 nt, Artificial Sequence
  Description of Artificial Sequence:  Nucleic Acid
  misc_feature: oligonucleotide substrate
gcaccggaaugacauca

SEQ ID NO: 6221 - RNA, 17 nt, Artificial Sequence
  Description of Artificial Sequence:  Nucleic Acid
  misc_feature: oligonucleotide substrate
ccggaaugacaucagcg

SEQ ID NO: 6222 - RNA, 17 nt, Artificial Sequence
  Description of Artificial Sequence:  Nucleic Acid
  misc_feature: oligonucleotide substrate
ggaaugacaucagcgug

SEQ ID NO: 6223 - RNA, 17 nt, Artificial Sequence
  Description of Artificial Sequence:  Nucleic Acid
  misc_feature: oligonucleotide substrate
ugacaucagcgugucuc

SEQ ID NO: 6224 - RNA, 17 nt, Artificial Sequence
  Description of Artificial Sequence:  Nucleic Acid
  misc_feature: oligonucleotide substrate
acaucagcgugucucgu

SEQ ID NO: 6225 - RNA, 17 nt, Artificial Sequence
  Description of Artificial Sequence:  Nucleic Acid
  misc_feature: oligonucleotide substrate
aucagcgugucucguga

SEQ ID NO: 6226 - RNA, 17 nt, Artificial Sequence
  Description of Artificial Sequence:  Nucleic Acid
  misc_feature: oligonucleotide substrate
cgugucucgugaccaag

SEQ ID NO: 6227 - RNA, 17 nt, Artificial Sequence
  Description of Artificial Sequence:  Nucleic Acid
  misc_feature: oligonucleotide substrate
gucucgugaccaaguaa

SEQ ID NO: 6228 - RNA, 17 nt, Artificial Sequence
  Description of Artificial Sequence:  Nucleic Acid
  misc_feature: oligonucleotide substrate
gugaccaaguaaagguc

SEQ ID NO: 6229 - RNA, 17 nt, Artificial Sequence
  Description of Artificial Sequence:  Nucleic Acid
  misc_feature: oligonucleotide substrate
aaguaaagguccgagcc

SEQ ID NO: 6230 - RNA, 17 nt, Artificial Sequence
  Description of Artificial Sequence:  Nucleic Acid
  misc_feature: oligonucleotide substrate
agguccgagccgccgca

SEQ ID NO: 6231 - RNA, 17 nt, Artificial Sequence
  Description of Artificial Sequence:  Nucleic Acid
  misc_feature: oligonucleotide substrate
uccgagccgccgcaggu

SEQ ID NO: 6232 - RNA, 17 nt, Artificial Sequence
  Description of Artificial Sequence:  Nucleic Acid
  misc_feature: oligonucleotide substrate
gagccgccgcaggugca

SEQ ID NO: 6233 - RNA, 17 nt, Artificial Sequence
  Description of Artificial Sequence:  Nucleic Acid
  misc_feature: oligonucleotide substrate
cgccgcaggugcauggu

SEQ ID NO: 6234 - RNA, 17 nt, Artificial Sequence
  Description of Artificial Sequence:  Nucleic Acid
  misc_feature: oligonucleotide substrate
ccgcaggugcauggugu

SEQ ID NO: 6235 - RNA, 17 nt, Artificial Sequence
  Description of Artificial Sequence:  Nucleic Acid
  misc_feature: oligonucleotide substrate
gcaggugcaugguguca

SEQ ID NO: 6236 - RNA, 17 nt, Artificial Sequence
  Description of Artificial Sequence:  Nucleic Acid
  misc_feature: oligonucleotide substrate
ggugcauggugucaagg

SEQ ID NO: 6237 - RNA, 17 nt, Artificial Sequence
  Description of Artificial Sequence:  Nucleic Acid
  misc_feature: oligonucleotide substrate
ugcauggugucaaggac

SEQ ID NO: 6238 - RNA, 17 nt, Artificial Sequence
  Description of Artificial Sequence:  Nucleic Acid
  misc_feature: oligonucleotide substrate
ugucaaggaccgcgcuc

SEQ ID NO: 6239 - RNA, 17 nt, Artificial Sequence
  Description of Artificial Sequence:  Nucleic Acid
  misc_feature: oligonucleotide substrate
caaggaccgcgcuccgg

SEQ ID NO: 6240 - RNA, 17 nt, Artificial Sequence
  Description of Artificial Sequence:  Nucleic Acid
  misc_feature: oligonucleotide substrate
aggaccgcgcuccgggg

SEQ ID NO: 6241 - RNA, 17 nt, Artificial Sequence
  Description of Artificial Sequence:  Nucleic Acid
  misc_feature: oligonucleotide substrate
uccggggggcgccggcc

SEQ ID NO: 6242 - RNA, 17 nt, Artificial Sequence
  Description of Artificial Sequence:  Nucleic Acid
  misc_feature: oligonucleotide substrate
cggggggcgccggccau

SEQ ID NO: 6243 - RNA, 17 nt, Artificial Sequence
  Description of Artificial Sequence:  Nucleic Acid
  misc_feature: oligonucleotide substrate
gggcgccggccauccga

SEQ ID NO: 6244 - RNA, 17 nt, Artificial Sequence
  Description of Artificial Sequence:  Nucleic Acid
  misc_feature: oligonucleotide substrate
cgccggccauccgacga

SEQ ID NO: 6245 - RNA, 17 nt, Artificial Sequence
  Description of Artificial Sequence:  Nucleic Acid
  misc_feature: oligonucleotide substrate
gccauccgacgaggucc

SEQ ID NO: 6246 - RNA, 17 nt, Artificial Sequence
  Description of Artificial Sequence:  Nucleic Acid
  misc_feature: oligonucleotide substrate
ccgacgagguccugguc

SEQ ID NO: 6247 - RNA, 17 nt, Artificial Sequence
  Description of Artificial Sequence:  Nucleic Acid
  misc_feature: oligonucleotide substrate
agguccuggucuacauu

SEQ ID NO: 6248 - RNA, 17 nt, Artificial Sequence
  Description of Artificial Sequence:  Nucleic Acid
  misc_feature: oligonucleotide substrate
ccuggucuacauuggug

SEQ ID NO: 6249 - RNA, 17 nt, Artificial Sequence
  Description of Artificial Sequence:  Nucleic Acid
  misc_feature: oligonucleotide substrate
uggucuacauuggugua

SEQ ID NO: 6250 - RNA, 17 nt, Artificial Sequence
  Description of Artificial Sequence:  Nucleic Acid
  misc_feature: oligonucleotide substrate
cuacauugguguacauu

SEQ ID NO: 6251 - RNA, 17 nt, Artificial Sequence
  Description of Artificial Sequence:  Nucleic Acid
  misc_feature: oligonucleotide substrate
acauugguguacauuug

SEQ ID NO: 6252 - RNA, 17 nt, Artificial Sequence
  Description of Artificial Sequence:  Nucleic Acid
  misc_feature: oligonucleotide substrate
auugguguacauuuggg

SEQ ID NO: 6253 - RNA, 17 nt, Artificial Sequence
  Description of Artificial Sequence:  Nucleic Acid
  misc_feature: oligonucleotide substrate
ugguguacauuugggug

SEQ ID NO: 6254 - RNA, 17 nt, Artificial Sequence
  Description of Artificial Sequence:  Nucleic Acid
  misc_feature: oligonucleotide substrate
acauuugggugauugga

SEQ ID NO: 6255 - RNA, 17 nt, Artificial Sequence
  Description of Artificial Sequence:  Nucleic Acid
  misc_feature: oligonucleotide substrate
uuugggugauuggaccc

SEQ ID NO: 6256 - RNA, 17 nt, Artificial Sequence
  Description of Artificial Sequence:  Nucleic Acid
  misc_feature: oligonucleotide substrate
gugauuggacccuuugg

SEQ ID NO: 6257 - RNA, 17 nt, Artificial Sequence
  Description of Artificial Sequence:  Nucleic Acid
  misc_feature: oligonucleotide substrate
cccuuugggccggcuag

SEQ ID NO: 6258 - RNA, 17 nt, Artificial Sequence
  Description of Artificial Sequence:  Nucleic Acid
  misc_feature: oligonucleotide substrate
uugggccggcuaggguc

SEQ ID NO: 6259 - RNA, 17 nt, Artificial Sequence
  Description of Artificial Sequence:  Nucleic Acid
  misc_feature: oligonucleotide substrate
cggcuagggucuuugag

SEQ ID NO: 6260 - RNA, 17 nt, Artificial Sequence
  Description of Artificial Sequence:  Nucleic Acid
  misc_feature: oligonucleotide substrate
gucuuugagccggcgcc

SEQ ID NO: 6261 - RNA, 17 nt, Artificial Sequence
  Description of Artificial Sequence:  Nucleic Acid
  misc_feature: oligonucleotide substrate
uugagccggcgccgugg

SEQ ID NO: 6262 - RNA, 17 nt, Artificial Sequence
  Description of Artificial Sequence:  Nucleic Acid
  misc_feature: oligonucleotide substrate
gagccggcgccguggua

SEQ ID NO: 6263 - RNA, 17 nt, Artificial Sequence
  Description of Artificial Sequence:  Nucleic Acid
  misc_feature: oligonucleotide substrate
ccggcgccgugguagac

SEQ ID NO: 6264 - RNA, 17 nt, Artificial Sequence
  Description of Artificial Sequence:  Nucleic Acid
  misc_feature: oligonucleotide substrate
gcgccgugguagacagu

SEQ ID NO: 6265 - RNA, 17 nt, Artificial Sequence
  Description of Artificial Sequence:  Nucleic Acid
  misc_feature: oligonucleotide substrate
cgugguagacaguccag

SEQ ID NO: 6266 - RNA, 17 nt, Artificial Sequence
  Description of Artificial Sequence:  Nucleic Acid
  misc_feature: oligonucleotide substrate
gguagacaguccagcac

SEQ ID NO: 6267 - RNA, 17 nt, Artificial Sequence
  Description of Artificial Sequence:  Nucleic Acid
  misc_feature: oligonucleotide substrate
acaguccagcacacgcc

SEQ ID NO: 6268 - RNA, 17 nt, Artificial Sequence
  Description of Artificial Sequence:  Nucleic Acid
  misc_feature: oligonucleotide substrate
aguccagcacacgccgu

SEQ ID NO: 6269 - RNA, 17 nt, Artificial Sequence
  Description of Artificial Sequence:  Nucleic Acid
  misc_feature: oligonucleotide substrate
uccagcacacgccguug

SEQ ID NO: 6270 - RNA, 17 nt, Artificial Sequence
  Description of Artificial Sequence:  Nucleic Acid
  misc_feature: oligonucleotide substrate
cagcacacgccguugac

SEQ ID NO: 6271 - RNA, 17 nt, Artificial Sequence
  Description of Artificial Sequence:  Nucleic Acid
  misc_feature: oligonucleotide substrate
cacacgccguugacgca

SEQ ID NO: 6272 - RNA, 17 nt, Artificial Sequence
  Description of Artificial Sequence:  Nucleic Acid
  misc_feature: oligonucleotide substrate
cgccguugacgcagguc

SEQ ID NO: 6273 - RNA, 17 nt, Artificial Sequence
  Description of Artificial Sequence:  Nucleic Acid
  misc_feature: oligonucleotide substrate
ccguugacgcaggucgc

SEQ ID NO: 6274 - RNA, 17 nt, Artificial Sequence
  Description of Artificial Sequence:  Nucleic Acid
  misc_feature: oligonucleotide substrate
ugacgcaggucgcuagg

SEQ ID NO: 6275 - RNA, 17 nt, Artificial Sequence
  Description of Artificial Sequence:  Nucleic Acid
  misc_feature: oligonucleotide substrate
cgcaggucgcuaggaaa

SEQ ID NO: 6276 - RNA, 17 nt, Artificial Sequence
  Description of Artificial Sequence:  Nucleic Acid
  misc_feature: oligonucleotide substrate
uaggaaagacugcgucg

SEQ ID NO: 6277 - RNA, 17 nt, Artificial Sequence
  Description of Artificial Sequence:  Nucleic Acid
  misc_feature: oligonucleotide substrate
gaaagacugcgucgcgg

SEQ ID NO: 6278 - RNA, 17 nt, Artificial Sequence
  Description of Artificial Sequence:  Nucleic Acid
  misc_feature: oligonucleotide substrate
aagacugcgucgcggug

SEQ ID NO: 6279 - RNA, 17 nt, Artificial Sequence
  Description of Artificial Sequence:  Nucleic Acid
  misc_feature: oligonucleotide substrate
acugcgucgcgguggaa

SEQ ID NO: 6280 - RNA, 17 nt, Artificial Sequence
  Description of Artificial Sequence:  Nucleic Acid
  misc_feature: oligonucleotide substrate
gcgucgcgguggaaacc

SEQ ID NO: 6281 - RNA, 17 nt, Artificial Sequence
  Description of Artificial Sequence:  Nucleic Acid
  misc_feature: oligonucleotide substrate
cgguggaaaccacuuga

SEQ ID NO: 6282 - RNA, 17 nt, Artificial Sequence
  Description of Artificial Sequence:  Nucleic Acid
  misc_feature: oligonucleotide substrate
uggaaaccacuugaacu

SEQ ID NO: 6283 - RNA, 17 nt, Artificial Sequence
  Description of Artificial Sequence:  Nucleic Acid
  misc_feature: oligonucleotide substrate
ccacuugaacuuccccc

SEQ ID NO: 6284 - RNA, 17 nt, Artificial Sequence
  Description of Artificial Sequence:  Nucleic Acid
  misc_feature: oligonucleotide substrate
cccccucgacuugguuc

SEQ ID NO: 6285 - RNA, 17 nt, Artificial Sequence
  Description of Artificial Sequence:  Nucleic Acid
  misc_feature: oligonucleotide substrate
ucgacuugguucuuguc

SEQ ID NO: 6286 - RNA, 17 nt, Artificial Sequence
  Description of Artificial Sequence:  Nucleic Acid
  misc_feature: oligonucleotide substrate
ugguucuugucccggcc

SEQ ID NO: 6287 - RNA, 17 nt, Artificial Sequence
  Description of Artificial Sequence:  Nucleic Acid
  misc_feature: oligonucleotide substrate
uugucccggcccgugag

SEQ ID NO: 6288 - RNA, 17 nt, Artificial Sequence
  Description of Artificial Sequence:  Nucleic Acid
  misc_feature: oligonucleotide substrate
cccggcccgugaggcug

SEQ ID NO: 6289 - RNA, 17 nt, Artificial Sequence
  Description of Artificial Sequence:  Nucleic Acid
  misc_feature: oligonucleotide substrate
cccgugaggcuggugau

SEQ ID NO: 6290 - RNA, 17 nt, Artificial Sequence
  Description of Artificial Sequence:  Nucleic Acid
  misc_feature: oligonucleotide substrate
ugaggcuggugauaaug

SEQ ID NO: 6291 - RNA, 17 nt, Artificial Sequence
  Description of Artificial Sequence:  Nucleic Acid
  misc_feature: oligonucleotide substrate
ggcuggugauaaugcag

SEQ ID NO: 6292 - RNA, 17 nt, Artificial Sequence
  Description of Artificial Sequence:  Nucleic Acid
  misc_feature: oligonucleotide substrate
uggugauaaugcagcca

SEQ ID NO: 6293 - RNA, 17 nt, Artificial Sequence
  Description of Artificial Sequence:  Nucleic Acid
  misc_feature: oligonucleotide substrate
gugauaaugcagccaaa

SEQ ID NO: 6294 - RNA, 17 nt, Artificial Sequence
  Description of Artificial Sequence:  Nucleic Acid
  misc_feature: oligonucleotide substrate
auaaugcagccaaacag

SEQ ID NO: 6295 - RNA, 17 nt, Artificial Sequence
  Description of Artificial Sequence:  Nucleic Acid
  misc_feature: oligonucleotide substrate
gcagccaaacaggcccc

SEQ ID NO: 6296 - RNA, 17 nt, Artificial Sequence
  Description of Artificial Sequence:  Nucleic Acid
  misc_feature: oligonucleotide substrate
ccaaacaggccccgcgu

SEQ ID NO: 6297 - RNA, 17 nt, Artificial Sequence
  Description of Artificial Sequence:  Nucleic Acid
  misc_feature: oligonucleotide substrate
caggccccgcgucuguu

SEQ ID NO: 6298 - RNA, 17 nt, Artificial Sequence
  Description of Artificial Sequence:  Nucleic Acid
  misc_feature: oligonucleotide substrate
ggccccgcgucuguugg

SEQ ID NO: 6299 - RNA, 17 nt, Artificial Sequence
  Description of Artificial Sequence:  Nucleic Acid
  misc_feature: oligonucleotide substrate
ccgcgucuguugggagu

SEQ ID NO: 6300 - RNA, 17 nt, Artificial Sequence
  Description of Artificial Sequence:  Nucleic Acid
  misc_feature: oligonucleotide substrate
uguugggaguaggccgu

SEQ ID NO: 6301 - RNA, 17 nt, Artificial Sequence
  Description of Artificial Sequence:  Nucleic Acid
  misc_feature: oligonucleotide substrate
gggaguaggccguaaug

SEQ ID NO: 6302 - RNA, 17 nt, Artificial Sequence
  Description of Artificial Sequence:  Nucleic Acid
  misc_feature: oligonucleotide substrate
aguaggccguaaugggc

SEQ ID NO: 6303 - RNA, 17 nt, Artificial Sequence
  Description of Artificial Sequence:  Nucleic Acid
  misc_feature: oligonucleotide substrate
aggccguaaugggcgcg

SEQ ID NO: 6304 - RNA, 17 nt, Artificial Sequence
  Description of Artificial Sequence:  Nucleic Acid
  misc_feature: oligonucleotide substrate
cguaaugggcgcgagga

SEQ ID NO: 6305 - RNA, 17 nt, Artificial Sequence
  Description of Artificial Sequence:  Nucleic Acid
  misc_feature: oligonucleotide substrate
uaaugggcgcgaggagu

SEQ ID NO: 6306 - RNA, 17 nt, Artificial Sequence
  Description of Artificial Sequence:  Nucleic Acid
  misc_feature: oligonucleotide substrate
cgcgaggagucgccacc

SEQ ID NO: 6307 - RNA, 17 nt, Artificial Sequence
  Description of Artificial Sequence:  Nucleic Acid
  misc_feature: oligonucleotide substrate
gaggagucgccaccccu

SEQ ID NO: 6308 - RNA, 17 nt, Artificial Sequence
  Description of Artificial Sequence:  Nucleic Acid
  misc_feature: oligonucleotide substrate
gagucgccaccccugcc

SEQ ID NO: 6309 - RNA, 17 nt, Artificial Sequence
  Description of Artificial Sequence:  Nucleic Acid
  misc_feature: oligonucleotide substrate
ccaccccugccccucaa

SEQ ID NO: 6310 - RNA, 17 nt, Artificial Sequence
  Description of Artificial Sequence:  Nucleic Acid
  misc_feature: oligonucleotide substrate
cccucaagacugucggc

SEQ ID NO: 6311 - RNA, 17 nt, Artificial Sequence
  Description of Artificial Sequence:  Nucleic Acid
  misc_feature: oligonucleotide substrate
ucaagacugucggcugg

SEQ ID NO: 6312 - RNA, 17 nt, Artificial Sequence
  Description of Artificial Sequence:  Nucleic Acid
  misc_feature: oligonucleotide substrate
gacugucggcugguccu

SEQ ID NO: 6313 - RNA, 17 nt, Artificial Sequence
  Description of Artificial Sequence:  Nucleic Acid
  misc_feature: oligonucleotide substrate
gucggcugguccuagga

SEQ ID NO: 6314 - RNA, 17 nt, Artificial Sequence
  Description of Artificial Sequence:  Nucleic Acid
  misc_feature: oligonucleotide substrate
uccuaggaguaucuccc

SEQ ID NO: 6315 - RNA, 17 nt, Artificial Sequence
  Description of Artificial Sequence:  Nucleic Acid
  misc_feature: oligonucleotide substrate
cuaggaguaucucccuc

SEQ ID NO: 6316 - RNA, 17 nt, Artificial Sequence
  Description of Artificial Sequence:  Nucleic Acid
  misc_feature: oligonucleotide substrate
cccuucgggcggagaca

SEQ ID NO: 6317 - RNA, 17 nt, Artificial Sequence
  Description of Artificial Sequence:  Nucleic Acid
  misc_feature: oligonucleotide substrate
gggcggagacagguaga

SEQ ID NO: 6318 - RNA, 17 nt, Artificial Sequence
  Description of Artificial Sequence:  Nucleic Acid
  misc_feature: oligonucleotide substrate
ggagacagguagaccca

SEQ ID NO: 6319 - RNA, 17 nt, Artificial Sequence
  Description of Artificial Sequence:  Nucleic Acid
  misc_feature: oligonucleotide substrate
acagguagacccauaau

SEQ ID NO: 6320 - RNA, 17 nt, Artificial Sequence
  Description of Artificial Sequence:  Nucleic Acid
  misc_feature: oligonucleotide substrate
guagacccauaaugaug

SEQ ID NO: 6321 - RNA, 17 nt, Artificial Sequence
  Description of Artificial Sequence:  Nucleic Acid
  misc_feature: oligonucleotide substrate
gacccauaaugaugucc

SEQ ID NO: 6322 - RNA, 17 nt, Artificial Sequence
  Description of Artificial Sequence:  Nucleic Acid
  misc_feature: oligonucleotide substrate
ccauaaugaugucccca

SEQ ID NO: 6323 - RNA, 17 nt, Artificial Sequence
  Description of Artificial Sequence:  Nucleic Acid
  misc_feature: oligonucleotide substrate
auaaugauguccccaca

SEQ ID NO: 6324 - RNA, 17 nt, Artificial Sequence
  Description of Artificial Sequence:  Nucleic Acid
  misc_feature: oligonucleotide substrate
auguccccacacgccgc

SEQ ID NO: 6325 - RNA, 17 nt, Artificial Sequence
  Description of Artificial Sequence:  Nucleic Acid
  misc_feature: oligonucleotide substrate
guccccacacgccgcgg

SEQ ID NO: 6326 - RNA, 17 nt, Artificial Sequence
  Description of Artificial Sequence:  Nucleic Acid
  misc_feature: oligonucleotide substrate
ccccacacgccgcggug

SEQ ID NO: 6327 - RNA, 17 nt, Artificial Sequence
  Description of Artificial Sequence:  Nucleic Acid
  misc_feature: oligonucleotide substrate
cacacgccgcggugucu

SEQ ID NO: 6328 - RNA, 17 nt, Artificial Sequence
  Description of Artificial Sequence:  Nucleic Acid
  misc_feature: oligonucleotide substrate
acgccgcggugucuccc

SEQ ID NO: 6329 - RNA, 17 nt, Artificial Sequence
  Description of Artificial Sequence:  Nucleic Acid
  misc_feature: oligonucleotide substrate
gccgcggugucuccccc

SEQ ID NO: 6330 - RNA, 17 nt, Artificial Sequence
  Description of Artificial Sequence:  Nucleic Acid
  misc_feature: oligonucleotide substrate
ccccccaggugaugauc

SEQ ID NO: 6331 - RNA, 17 nt, Artificial Sequence
  Description of Artificial Sequence:  Nucleic Acid
  misc_feature: oligonucleotide substrate
cccaggugaugaucuug

SEQ ID NO: 6332 - RNA, 17 nt, Artificial Sequence
  Description of Artificial Sequence:  Nucleic Acid
  misc_feature: oligonucleotide substrate
aggugaugaucuugauu

SEQ ID NO: 6333 - RNA, 17 nt, Artificial Sequence
  Description of Artificial Sequence:  Nucleic Acid
  misc_feature: oligonucleotide substrate
ugaucuugauuuccaug

SEQ ID NO: 6334 - RNA, 17 nt, Artificial Sequence
  Description of Artificial Sequence:  Nucleic Acid
  misc_feature: oligonucleotide substrate
ugauuuccaugucggag

SEQ ID NO: 6335 - RNA, 17 nt, Artificial Sequence
  Description of Artificial Sequence:  Nucleic Acid
  misc_feature: oligonucleotide substrate
auuuccaugucggagaa

SEQ ID NO: 6336 - RNA, 17 nt, Artificial Sequence
  Description of Artificial Sequence:  Nucleic Acid
  misc_feature: oligonucleotide substrate
cggagaagacgacgggc

SEQ ID NO: 6337 - RNA, 17 nt, Artificial Sequence
  Description of Artificial Sequence:  Nucleic Acid
  misc_feature: oligonucleotide substrate
agaagacgacgggcucg

SEQ ID NO: 6338 - RNA, 17 nt, Artificial Sequence
  Description of Artificial Sequence:  Nucleic Acid
  misc_feature: oligonucleotide substrate
gacgacgggcucgaccg

SEQ ID NO: 6339 - RNA, 17 nt, Artificial Sequence
  Description of Artificial Sequence:  Nucleic Acid
  misc_feature: oligonucleotide substrate
cgggcucgaccgcuacc

SEQ ID NO: 6340 - RNA, 17 nt, Artificial Sequence
  Description of Artificial Sequence:  Nucleic Acid
  misc_feature: oligonucleotide substrate
gcucgaccgcuaccgcc

SEQ ID NO: 6341 - RNA, 17 nt, Artificial Sequence
  Description of Artificial Sequence:  Nucleic Acid
  misc_feature: oligonucleotide substrate
cgaccgcuaccgccagg

SEQ ID NO: 6342 - RNA, 17 nt, Artificial Sequence
  Description of Artificial Sequence:  Nucleic Acid
  misc_feature: oligonucleotide substrate
ccgcuaccgccaggucu

SEQ ID NO: 6343 - RNA, 17 nt, Artificial Sequence
  Description of Artificial Sequence:  Nucleic Acid
  misc_feature: oligonucleotide substrate
accgccaggucucguag

SEQ ID NO: 6344 - RNA, 17 nt, Artificial Sequence
  Description of Artificial Sequence:  Nucleic Acid
  misc_feature: oligonucleotide substrate
caggucucguagaccug

SEQ ID NO: 6345 - RNA, 17 nt, Artificial Sequence
  Description of Artificial Sequence:  Nucleic Acid
  misc_feature: oligonucleotide substrate
ucucguagaccugugug

SEQ ID NO: 6346 - RNA, 17 nt, Artificial Sequence
  Description of Artificial Sequence:  Nucleic Acid
  misc_feature: oligonucleotide substrate
guagaccugugugggcc

SEQ ID NO: 6347 - RNA, 17 nt, Artificial Sequence
  Description of Artificial Sequence:  Nucleic Acid
  misc_feature: oligonucleotide substrate
agaccugugugggccca

SEQ ID NO: 6348 - RNA, 17 nt, Artificial Sequence
  Description of Artificial Sequence:  Nucleic Acid
  misc_feature: oligonucleotide substrate
cugugugggcccagucc

SEQ ID NO: 6349 - RNA, 17 nt, Artificial Sequence
  Description of Artificial Sequence:  Nucleic Acid
  misc_feature: oligonucleotide substrate
ugggcccaguccugcag

SEQ ID NO: 6350 - RNA, 17 nt, Artificial Sequence
  Description of Artificial Sequence:  Nucleic Acid
  misc_feature: oligonucleotide substrate
ccaguccugcaguggag

SEQ ID NO: 6351 - RNA, 17 nt, Artificial Sequence
  Description of Artificial Sequence:  Nucleic Acid
  misc_feature: oligonucleotide substrate
guccugcaguggaguga

SEQ ID NO: 6352 - RNA, 17 nt, Artificial Sequence
  Description of Artificial Sequence:  Nucleic Acid
  misc_feature: oligonucleotide substrate
gcaguggagugaggugg

SEQ ID NO: 6353 - RNA, 17 nt, Artificial Sequence
  Description of Artificial Sequence:  Nucleic Acid
  misc_feature: oligonucleotide substrate
ggagugagguggucaua

SEQ ID NO: 6354 - RNA, 17 nt, Artificial Sequence
  Description of Artificial Sequence:  Nucleic Acid
  misc_feature: oligonucleotide substrate
gugagguggucauagac

SEQ ID NO: 6355 - RNA, 17 nt, Artificial Sequence
  Description of Artificial Sequence:  Nucleic Acid
  misc_feature: oligonucleotide substrate
agguggucauagacgga

SEQ ID NO: 6356 - RNA, 17 nt, Artificial Sequence
  Description of Artificial Sequence:  Nucleic Acid
  misc_feature: oligonucleotide substrate
ggucauagacggacgua

SEQ ID NO: 6357 - RNA, 17 nt, Artificial Sequence
  Description of Artificial Sequence:  Nucleic Acid
  misc_feature: oligonucleotide substrate
auagacggacguaccuu

SEQ ID NO: 6358 - RNA, 17 nt, Artificial Sequence
  Description of Artificial Sequence:  Nucleic Acid
  misc_feature: oligonucleotide substrate
agacggacguaccuuuc

SEQ ID NO: 6359 - RNA, 17 nt, Artificial Sequence
  Description of Artificial Sequence:  Nucleic Acid
  misc_feature: oligonucleotide substrate
acggacguaccuuucaa

SEQ ID NO: 6360 - RNA, 17 nt, Artificial Sequence
  Description of Artificial Sequence:  Nucleic Acid
  misc_feature: oligonucleotide substrate
accuuucaauucggcca

SEQ ID NO: 6361 - RNA, 17 nt, Artificial Sequence
  Description of Artificial Sequence:  Nucleic Acid
  misc_feature: oligonucleotide substrate
ucaauucggccaacuuc

SEQ ID NO: 6362 - RNA, 17 nt, Artificial Sequence
  Description of Artificial Sequence:  Nucleic Acid
  misc_feature: oligonucleotide substrate
uucggccaacuucauga

SEQ ID NO: 6363 - RNA, 17 nt, Artificial Sequence
  Description of Artificial Sequence:  Nucleic Acid
  misc_feature: oligonucleotide substrate
ccaacuucaugaaggcc

SEQ ID NO: 6364 - RNA, 17 nt, Artificial Sequence
  Description of Artificial Sequence:  Nucleic Acid
  misc_feature: oligonucleotide substrate
ucaugaaggccauuugg

SEQ ID NO: 6365 - RNA, 17 nt, Artificial Sequence
  Description of Artificial Sequence:  Nucleic Acid
  misc_feature: oligonucleotide substrate
ugaaggccauuuggaca

SEQ ID NO: 6366 - RNA, 17 nt, Artificial Sequence
  Description of Artificial Sequence:  Nucleic Acid
  misc_feature: oligonucleotide substrate
ccauuuggacauauugc

SEQ ID NO: 6367 - RNA, 17 nt, Artificial Sequence
  Description of Artificial Sequence:  Nucleic Acid
  misc_feature: oligonucleotide substrate
auuuggacauauugccc

SEQ ID NO: 6368 - RNA, 17 nt, Artificial Sequence
  Description of Artificial Sequence:  Nucleic Acid
  misc_feature: oligonucleotide substrate
uuggacauauugccccc

SEQ ID NO: 6369 - RNA, 17 nt, Artificial Sequence
  Description of Artificial Sequence:  Nucleic Acid
  misc_feature: oligonucleotide substrate
gacauauugccccccac

SEQ ID NO: 6370 - RNA, 17 nt, Artificial Sequence
  Description of Artificial Sequence:  Nucleic Acid
  misc_feature: oligonucleotide substrate
ugccccccaccgacuuu

SEQ ID NO: 6371 - RNA, 17 nt, Artificial Sequence
  Description of Artificial Sequence:  Nucleic Acid
  misc_feature: oligonucleotide substrate
ccccaccgacuuuccgc

SEQ ID NO: 6372 - RNA, 17 nt, Artificial Sequence
  Description of Artificial Sequence:  Nucleic Acid
  misc_feature: oligonucleotide substrate
gacuuuccgcaccaaaa

SEQ ID NO: 6373 - RNA, 17 nt, Artificial Sequence
  Description of Artificial Sequence:  Nucleic Acid
  misc_feature: oligonucleotide substrate
cuuuccgcaccaaaaug

SEQ ID NO: 6374 - RNA, 17 nt, Artificial Sequence
  Description of Artificial Sequence:  Nucleic Acid
  misc_feature: oligonucleotide substrate
gcaccaaaaugcauuca

SEQ ID NO: 6375 - RNA, 17 nt, Artificial Sequence
  Description of Artificial Sequence:  Nucleic Acid
  misc_feature: oligonucleotide substrate
accaaaaugcauucacg

SEQ ID NO: 6376 - RNA, 17 nt, Artificial Sequence
  Description of Artificial Sequence:  Nucleic Acid
  misc_feature: oligonucleotide substrate
caaaaugcauucacgga

SEQ ID NO: 6377 - RNA, 17 nt, Artificial Sequence
  Description of Artificial Sequence:  Nucleic Acid
  misc_feature: oligonucleotide substrate
augcauucacggaugac

SEQ ID NO: 6378 - RNA, 17 nt, Artificial Sequence
  Description of Artificial Sequence:  Nucleic Acid
  misc_feature: oligonucleotide substrate
auucacggaugaccccu

SEQ ID NO: 6379 - RNA, 17 nt, Artificial Sequence
  Description of Artificial Sequence:  Nucleic Acid
  misc_feature: oligonucleotide substrate
cacggaugaccccuuga

SEQ ID NO: 6380 - RNA, 17 nt, Artificial Sequence
  Description of Artificial Sequence:  Nucleic Acid
  misc_feature: oligonucleotide substrate
ccccuugagcccgcaca

SEQ ID NO: 6381 - RNA, 17 nt, Artificial Sequence
  Description of Artificial Sequence:  Nucleic Acid
  misc_feature: oligonucleotide substrate
uugagcccgcacaaagu

SEQ ID NO: 6382 - RNA, 17 nt, Artificial Sequence
  Description of Artificial Sequence:  Nucleic Acid
  misc_feature: oligonucleotide substrate
gagcccgcacaaagucc

SEQ ID NO: 6383 - RNA, 17 nt, Artificial Sequence
  Description of Artificial Sequence:  Nucleic Acid
  misc_feature: oligonucleotide substrate
cgcacaaaguccggcac

SEQ ID NO: 6384 - RNA, 17 nt, Artificial Sequence
  Description of Artificial Sequence:  Nucleic Acid
  misc_feature: oligonucleotide substrate
aaaguccggcacuuuug

SEQ ID NO: 6385 - RNA, 17 nt, Artificial Sequence
  Description of Artificial Sequence:  Nucleic Acid
  misc_feature: oligonucleotide substrate
aguccggcacuuuugcu

SEQ ID NO: 6386 - RNA, 17 nt, Artificial Sequence
  Description of Artificial Sequence:  Nucleic Acid
  misc_feature: oligonucleotide substrate
gcacuuuugcuauacca

SEQ ID NO: 6387 - RNA, 17 nt, Artificial Sequence
  Description of Artificial Sequence:  Nucleic Acid
  misc_feature: oligonucleotide substrate
cuuuugcuauaccagcc

SEQ ID NO: 6388 - RNA, 17 nt, Artificial Sequence
  Description of Artificial Sequence:  Nucleic Acid
  misc_feature: oligonucleotide substrate
uuugcuauaccagccug

SEQ ID NO: 6389 - RNA, 17 nt, Artificial Sequence
  Description of Artificial Sequence:  Nucleic Acid
  misc_feature: oligonucleotide substrate
cuauaccagccuggagc

SEQ ID NO: 6390 - RNA, 17 nt, Artificial Sequence
  Description of Artificial Sequence:  Nucleic Acid
  misc_feature: oligonucleotide substrate
agccuggagcaccauga

SEQ ID NO: 6391 - RNA, 17 nt, Artificial Sequence
  Description of Artificial Sequence:  Nucleic Acid
  misc_feature: oligonucleotide substrate
ccuggagcaccaugagc

SEQ ID NO: 6392 - RNA, 17 nt, Artificial Sequence
  Description of Artificial Sequence:  Nucleic Acid
  misc_feature: oligonucleotide substrate
ggagcaccaugagcggg

SEQ ID NO: 6393 - RNA, 17 nt, Artificial Sequence
  Description of Artificial Sequence:  Nucleic Acid
  misc_feature: oligonucleotide substrate
caccaugagcgggccga

SEQ ID NO: 6394 - RNA, 17 nt, Artificial Sequence
  Description of Artificial Sequence:  Nucleic Acid
  misc_feature: oligonucleotide substrate
augagcgggccgaguau

SEQ ID NO: 6395 - RNA, 17 nt, Artificial Sequence
  Description of Artificial Sequence:  Nucleic Acid
  misc_feature: oligonucleotide substrate
cgggccgaguauggcga

SEQ ID NO: 6396 - RNA, 17 nt, Artificial Sequence
  Description of Artificial Sequence:  Nucleic Acid
  misc_feature: oligonucleotide substrate
ggccgaguauggcgagc

SEQ ID NO: 6397 - RNA, 17 nt, Artificial Sequence
  Description of Artificial Sequence:  Nucleic Acid
  misc_feature: oligonucleotide substrate
cgaguauggcgagcaua

SEQ ID NO: 6398 - RNA, 17 nt, Artificial Sequence
  Description of Artificial Sequence:  Nucleic Acid
  misc_feature: oligonucleotide substrate
uauggcgagcauaauuu

SEQ ID NO: 6399 - RNA, 17 nt, Artificial Sequence
  Description of Artificial Sequence:  Nucleic Acid
  misc_feature: oligonucleotide substrate
uggcgagcauaauuuug

SEQ ID NO: 6400 - RNA, 17 nt, Artificial Sequence
  Description of Artificial Sequence:  Nucleic Acid
  misc_feature: oligonucleotide substrate
cgagcauaauuuuggug

SEQ ID NO: 6401 - RNA, 17 nt, Artificial Sequence
  Description of Artificial Sequence:  Nucleic Acid
  misc_feature: oligonucleotide substrate
uaauuuuggugauguca

SEQ ID NO: 6402 - RNA, 17 nt, Artificial Sequence
  Description of Artificial Sequence:  Nucleic Acid
  misc_feature: oligonucleotide substrate
uuuuggugaugucaaag

SEQ ID NO: 6403 - RNA, 17 nt, Artificial Sequence
  Description of Artificial Sequence:  Nucleic Acid
  misc_feature: oligonucleotide substrate
uuggugaugucaaagau

SEQ ID NO: 6404 - RNA, 17 nt, Artificial Sequence
  Description of Artificial Sequence:  Nucleic Acid
  misc_feature: oligonucleotide substrate
ugucaaagauuagcucu

SEQ ID NO: 6405 - RNA, 17 nt, Artificial Sequence
  Description of Artificial Sequence:  Nucleic Acid
  misc_feature: oligonucleotide substrate
aaagauuagcucugggu

SEQ ID NO: 6406 - RNA, 17 nt, Artificial Sequence
  Description of Artificial Sequence:  Nucleic Acid
  misc_feature: oligonucleotide substrate
agcucuggguggaccac

SEQ ID NO: 6407 - RNA, 17 nt, Artificial Sequence
  Description of Artificial Sequence:  Nucleic Acid
  misc_feature: oligonucleotide substrate
cuggguggaccacacac

SEQ ID NO: 6408 - RNA, 17 nt, Artificial Sequence
  Description of Artificial Sequence:  Nucleic Acid
  misc_feature: oligonucleotide substrate
gguggaccacacacgug

SEQ ID NO: 6409 - RNA, 17 nt, Artificial Sequence
  Description of Artificial Sequence:  Nucleic Acid
  misc_feature: oligonucleotide substrate
uggaccacacacgugag

SEQ ID NO: 6410 - RNA, 17 nt, Artificial Sequence
  Description of Artificial Sequence:  Nucleic Acid
  misc_feature: oligonucleotide substrate
gaccacacacgugagga

SEQ ID NO: 6411 - RNA, 17 nt, Artificial Sequence
  Description of Artificial Sequence:  Nucleic Acid
  misc_feature: oligonucleotide substrate
ccacacacgugaggaga

SEQ ID NO: 6412 - RNA, 17 nt, Artificial Sequence
  Description of Artificial Sequence:  Nucleic Acid
  misc_feature: oligonucleotide substrate
ugaggagaaugauggca

SEQ ID NO: 6413 - RNA, 17 nt, Artificial Sequence
  Description of Artificial Sequence:  Nucleic Acid
  misc_feature: oligonucleotide substrate
ggagaaugauggcaccg

SEQ ID NO: 6414 - RNA, 17 nt, Artificial Sequence
  Description of Artificial Sequence:  Nucleic Acid
  misc_feature: oligonucleotide substrate
gaaugauggcaccgcgc

SEQ ID NO: 6415 - RNA, 17 nt, Artificial Sequence
  Description of Artificial Sequence:  Nucleic Acid
  misc_feature: oligonucleotide substrate
augauggcaccgcgccc

SEQ ID NO: 6416 - RNA, 17 nt, Artificial Sequence
  Description of Artificial Sequence:  Nucleic Acid
  misc_feature: oligonucleotide substrate
auggcaccgcgcccccc

SEQ ID NO: 6417 - RNA, 17 nt, Artificial Sequence
  Description of Artificial Sequence:  Nucleic Acid
  misc_feature: oligonucleotide substrate
ggcaccgcgcccccccc

SEQ ID NO: 6418 - RNA, 17 nt, Artificial Sequence
  Description of Artificial Sequence:  Nucleic Acid
  misc_feature: oligonucleotide substrate
ccccccgaacguugagg

SEQ ID NO: 6419 - RNA, 17 nt, Artificial Sequence
  Description of Artificial Sequence:  Nucleic Acid
  misc_feature: oligonucleotide substrate
ccccgaacguugagggg

SEQ ID NO: 6420 - RNA, 17 nt, Artificial Sequence
  Description of Artificial Sequence:  Nucleic Acid
  misc_feature: oligonucleotide substrate
ggggggggauccacacu

SEQ ID NO: 6421 - RNA, 17 nt, Artificial Sequence
  Description of Artificial Sequence:  Nucleic Acid
  misc_feature: oligonucleotide substrate
ggggauccacacuugca

SEQ ID NO: 6422 - RNA, 17 nt, Artificial Sequence
  Description of Artificial Sequence:  Nucleic Acid
  misc_feature: oligonucleotide substrate
ggauccacacuugcaac

SEQ ID NO: 6423 - RNA, 17 nt, Artificial Sequence
  Description of Artificial Sequence:  Nucleic Acid
  misc_feature: oligonucleotide substrate
ccacacuugcaacugcg

SEQ ID NO: 6424 - RNA, 17 nt, Artificial Sequence
  Description of Artificial Sequence:  Nucleic Acid
  misc_feature: oligonucleotide substrate
cacuugcaacugcgccu

SEQ ID NO: 6425 - RNA, 17 nt, Artificial Sequence
  Description of Artificial Sequence:  Nucleic Acid
  misc_feature: oligonucleotide substrate
uugcaacugcgccucgg

SEQ ID NO: 6426 - RNA, 17 nt, Artificial Sequence
  Description of Artificial Sequence:  Nucleic Acid
  misc_feature: oligonucleotide substrate
gcaacugcgccucggcu

SEQ ID NO: 6427 - RNA, 17 nt, Artificial Sequence
  Description of Artificial Sequence:  Nucleic Acid
  misc_feature: oligonucleotide substrate
gcgccucggcucuggug

SEQ ID NO: 6428 - RNA, 17 nt, Artificial Sequence
  Description of Artificial Sequence:  Nucleic Acid
  misc_feature: oligonucleotide substrate
cggcucuggugauaagg

SEQ ID NO: 6429 - RNA, 17 nt, Artificial Sequence
  Description of Artificial Sequence:  Nucleic Acid
  misc_feature: oligonucleotide substrate
cucuggugauaagguau

SEQ ID NO: 6430 - RNA, 17 nt, Artificial Sequence
  Description of Artificial Sequence:  Nucleic Acid
  misc_feature: oligonucleotide substrate
gugauaagguauugcaa

SEQ ID NO: 6431 - RNA, 17 nt, Artificial Sequence
  Description of Artificial Sequence:  Nucleic Acid
  misc_feature: oligonucleotide substrate
gauaagguauugcaacc

SEQ ID NO: 6432 - RNA, 17 nt, Artificial Sequence
  Description of Artificial Sequence:  Nucleic Acid
  misc_feature: oligonucleotide substrate
aagguauugcaaccacc

SEQ ID NO: 6433 - RNA, 17 nt, Artificial Sequence
  Description of Artificial Sequence:  Nucleic Acid
  misc_feature: oligonucleotide substrate
guauugcaaccaccaua

SEQ ID NO: 6434 - RNA, 17 nt, Artificial Sequence
  Description of Artificial Sequence:  Nucleic Acid
  misc_feature: oligonucleotide substrate
uugcaaccaccauauga

SEQ ID NO: 6435 - RNA, 17 nt, Artificial Sequence
  Description of Artificial Sequence:  Nucleic Acid
  misc_feature: oligonucleotide substrate
caaccaccauaugagcc

SEQ ID NO: 6436 - RNA, 17 nt, Artificial Sequence
  Description of Artificial Sequence:  Nucleic Acid
  misc_feature: oligonucleotide substrate
accaccauaugagccua

SEQ ID NO: 6437 - RNA, 17 nt, Artificial Sequence
  Description of Artificial Sequence:  Nucleic Acid
  misc_feature: oligonucleotide substrate
ccauaugagccuagcga

SEQ ID NO: 6438 - RNA, 17 nt, Artificial Sequence
  Description of Artificial Sequence:  Nucleic Acid
  misc_feature: oligonucleotide substrate
ugagccuagcgaggaac

SEQ ID NO: 6439 - RNA, 17 nt, Artificial Sequence
  Description of Artificial Sequence:  Nucleic Acid
  misc_feature: oligonucleotide substrate
agcgaggaacacuuugu

SEQ ID NO: 6440 - RNA, 17 nt, Artificial Sequence
  Description of Artificial Sequence:  Nucleic Acid
  misc_feature: oligonucleotide substrate
cgaggaacacuuuguag

SEQ ID NO: 6441 - RNA, 17 nt, Artificial Sequence
  Description of Artificial Sequence:  Nucleic Acid
  misc_feature: oligonucleotide substrate
aacacuuuguaguaugg

SEQ ID NO: 6442 - RNA, 17 nt, Artificial Sequence
  Description of Artificial Sequence:  Nucleic Acid
  misc_feature: oligonucleotide substrate
acuuuguaguaugguga

SEQ ID NO: 6443 - RNA, 17 nt, Artificial Sequence
  Description of Artificial Sequence:  Nucleic Acid
  misc_feature: oligonucleotide substrate
uuuguaguauggugaca

SEQ ID NO: 6444 - RNA, 17 nt, Artificial Sequence
  Description of Artificial Sequence:  Nucleic Acid
  misc_feature: oligonucleotide substrate
guaguauggugacaagg

SEQ ID NO: 6445 - RNA, 17 nt, Artificial Sequence
  Description of Artificial Sequence:  Nucleic Acid
  misc_feature: oligonucleotide substrate
guauggugacaagguca

SEQ ID NO: 6446 - RNA, 17 nt, Artificial Sequence
  Description of Artificial Sequence:  Nucleic Acid
  misc_feature: oligonucleotide substrate
gugacaaggucaagagu

SEQ ID NO: 6447 - RNA, 17 nt, Artificial Sequence
  Description of Artificial Sequence:  Nucleic Acid
  misc_feature: oligonucleotide substrate
ggucaagagugcuagac

SEQ ID NO: 6448 - RNA, 17 nt, Artificial Sequence
  Description of Artificial Sequence:  Nucleic Acid
  misc_feature: oligonucleotide substrate
ucaagagugcuagaccu

SEQ ID NO: 6449 - RNA, 17 nt, Artificial Sequence
  Description of Artificial Sequence:  Nucleic Acid
  misc_feature: oligonucleotide substrate
agugcuagaccuacaaa

SEQ ID NO: 6450 - RNA, 17 nt, Artificial Sequence
  Description of Artificial Sequence:  Nucleic Acid
  misc_feature: oligonucleotide substrate
cuagaccuacaaaaacc

SEQ ID NO: 6451 - RNA, 17 nt, Artificial Sequence
  Description of Artificial Sequence:  Nucleic Acid
  misc_feature: oligonucleotide substrate
cuacaaaaaccacgccu

SEQ ID NO: 6452 - RNA, 17 nt, Artificial Sequence
  Description of Artificial Sequence:  Nucleic Acid
  misc_feature: oligonucleotide substrate
caaaaaccacgccuccg

SEQ ID NO: 6453 - RNA, 17 nt, Artificial Sequence
  Description of Artificial Sequence:  Nucleic Acid
  misc_feature: oligonucleotide substrate
aaaaccacgccuccgca

SEQ ID NO: 6454 - RNA, 17 nt, Artificial Sequence
  Description of Artificial Sequence:  Nucleic Acid
  misc_feature: oligonucleotide substrate
acgccuccgcacgaugc

SEQ ID NO: 6455 - RNA, 17 nt, Artificial Sequence
  Description of Artificial Sequence:  Nucleic Acid
  misc_feature: oligonucleotide substrate
gccuccgcacgaugcgg

SEQ ID NO: 6456 - RNA, 17 nt, Artificial Sequence
  Description of Artificial Sequence:  Nucleic Acid
  misc_feature: oligonucleotide substrate
uccgcacgaugcggcca

SEQ ID NO: 6457 - RNA, 17 nt, Artificial Sequence
  Description of Artificial Sequence:  Nucleic Acid
  misc_feature: oligonucleotide substrate
cgcacgaugcggccauc

SEQ ID NO: 6458 - RNA, 17 nt, Artificial Sequence
  Description of Artificial Sequence:  Nucleic Acid
  misc_feature: oligonucleotide substrate
acgaugcggccaucucc

SEQ ID NO: 6459 - RNA, 17 nt, Artificial Sequence
  Description of Artificial Sequence:  Nucleic Acid
  misc_feature: oligonucleotide substrate
augcggccaucucccgg

SEQ ID NO: 6460 - RNA, 17 nt, Artificial Sequence
  Description of Artificial Sequence:  Nucleic Acid
  misc_feature: oligonucleotide substrate
aucucccgguccauggc

SEQ ID NO: 6461 - RNA, 17 nt, Artificial Sequence
  Description of Artificial Sequence:  Nucleic Acid
  misc_feature: oligonucleotide substrate
cccgguccauggcguac

SEQ ID NO: 6462 - RNA, 17 nt, Artificial Sequence
  Description of Artificial Sequence:  Nucleic Acid
  misc_feature: oligonucleotide substrate
gguccauggcguacgcc

SEQ ID NO: 6463 - RNA, 17 nt, Artificial Sequence
  Description of Artificial Sequence:  Nucleic Acid
  misc_feature: oligonucleotide substrate
uccauggcguacgcccg

SEQ ID NO: 6464 - RNA, 17 nt, Artificial Sequence
  Description of Artificial Sequence:  Nucleic Acid
  misc_feature: oligonucleotide substrate
cauggcguacgcccgug

SEQ ID NO: 6465 - RNA, 17 nt, Artificial Sequence
  Description of Artificial Sequence:  Nucleic Acid
  misc_feature: oligonucleotide substrate
uggcguacgcccguggu

SEQ ID NO: 6466 - RNA, 17 nt, Artificial Sequence
  Description of Artificial Sequence:  Nucleic Acid
  misc_feature: oligonucleotide substrate
guacgcccgugguggua

SEQ ID NO: 6467 - RNA, 17 nt, Artificial Sequence
  Description of Artificial Sequence:  Nucleic Acid
  misc_feature: oligonucleotide substrate
cgcccguggugguaacg

SEQ ID NO: 6468 - RNA, 17 nt, Artificial Sequence
  Description of Artificial Sequence:  Nucleic Acid
  misc_feature: oligonucleotide substrate
ccguggugguaacgcca

SEQ ID NO: 6469 - RNA, 17 nt, Artificial Sequence
  Description of Artificial Sequence:  Nucleic Acid
  misc_feature: oligonucleotide substrate
uggugguaacgccagca

SEQ ID NO: 6470 - RNA, 17 nt, Artificial Sequence
  Description of Artificial Sequence:  Nucleic Acid
  misc_feature: oligonucleotide substrate
gugguaacgccagcagg

SEQ ID NO: 6471 - RNA, 17 nt, Artificial Sequence
  Description of Artificial Sequence:  Nucleic Acid
  misc_feature: oligonucleotide substrate
uaacgccagcaggagca

SEQ ID NO: 6472 - RNA, 17 nt, Artificial Sequence
  Description of Artificial Sequence:  Nucleic Acid
  misc_feature: oligonucleotide substrate
cagcaggagcaggagua

SEQ ID NO: 6473 - RNA, 17 nt, Artificial Sequence
  Description of Artificial Sequence:  Nucleic Acid
  misc_feature: oligonucleotide substrate
gagcaggaguagcggcc

SEQ ID NO: 6474 - RNA, 17 nt, Artificial Sequence
  Description of Artificial Sequence:  Nucleic Acid
  misc_feature: oligonucleotide substrate
caggaguagcggccaua

SEQ ID NO: 6475 - RNA, 17 nt, Artificial Sequence
  Description of Artificial Sequence:  Nucleic Acid
  misc_feature: oligonucleotide substrate
gaguagcggccauacgc

SEQ ID NO: 6476 - RNA, 17 nt, Artificial Sequence
  Description of Artificial Sequence:  Nucleic Acid
  misc_feature: oligonucleotide substrate
uagcggccauacgccgu

SEQ ID NO: 6477 - RNA, 17 nt, Artificial Sequence
  Description of Artificial Sequence:  Nucleic Acid
  misc_feature: oligonucleotide substrate
gcggccauacgccguag

SEQ ID NO: 6478 - RNA, 17 nt, Artificial Sequence
  Description of Artificial Sequence:  Nucleic Acid
  misc_feature: oligonucleotide substrate
ggccauacgccguagag

SEQ ID NO: 6479 - RNA, 17 nt, Artificial Sequence
  Description of Artificial Sequence:  Nucleic Acid
  misc_feature: oligonucleotide substrate
cauacgccguagagagc

SEQ ID NO: 6480 - RNA, 17 nt, Artificial Sequence
  Description of Artificial Sequence:  Nucleic Acid
  misc_feature: oligonucleotide substrate
cguagagagcauaugcc

SEQ ID NO: 6481 - RNA, 17 nt, Artificial Sequence
  Description of Artificial Sequence:  Nucleic Acid
  misc_feature: oligonucleotide substrate
uagagagcauaugccgc

SEQ ID NO: 6482 - RNA, 17 nt, Artificial Sequence
  Description of Artificial Sequence:  Nucleic Acid
  misc_feature: oligonucleotide substrate
gagagcauaugccgccc

SEQ ID NO: 6483 - RNA, 17 nt, Artificial Sequence
  Description of Artificial Sequence:  Nucleic Acid
  misc_feature: oligonucleotide substrate
gagcauaugccgcccca

SEQ ID NO: 6484 - RNA, 17 nt, Artificial Sequence
  Description of Artificial Sequence:  Nucleic Acid
  misc_feature: oligonucleotide substrate
cauaugccgccccaggg

SEQ ID NO: 6485 - RNA, 17 nt, Artificial Sequence
  Description of Artificial Sequence:  Nucleic Acid
  misc_feature: oligonucleotide substrate
ccccagggaccagcuug

SEQ ID NO: 6486 - RNA, 17 nt, Artificial Sequence
  Description of Artificial Sequence:  Nucleic Acid
  misc_feature: oligonucleotide substrate
agggaccagcuugccuu

SEQ ID NO: 6487 - RNA, 17 nt, Artificial Sequence
  Description of Artificial Sequence:  Nucleic Acid
  misc_feature: oligonucleotide substrate
accagcuugccuuugau

SEQ ID NO: 6488 - RNA, 17 nt, Artificial Sequence
  Description of Artificial Sequence:  Nucleic Acid
  misc_feature: oligonucleotide substrate
ugccuuugauguaccag

SEQ ID NO: 6489 - RNA, 17 nt, Artificial Sequence
  Description of Artificial Sequence:  Nucleic Acid
  misc_feature: oligonucleotide substrate
ccuuugauguaccaggc

SEQ ID NO: 6490 - RNA, 17 nt, Artificial Sequence
  Description of Artificial Sequence:  Nucleic Acid
  misc_feature: oligonucleotide substrate
uuugauguaccaggcag

SEQ ID NO: 6491 - RNA, 17 nt, Artificial Sequence
  Description of Artificial Sequence:  Nucleic Acid
  misc_feature: oligonucleotide substrate
uguaccaggcagcacag

SEQ ID NO: 6492 - RNA, 17 nt, Artificial Sequence
  Description of Artificial Sequence:  Nucleic Acid
  misc_feature: oligonucleotide substrate
accaggcagcacagaag

SEQ ID NO: 6493 - RNA, 17 nt, Artificial Sequence
  Description of Artificial Sequence:  Nucleic Acid
  misc_feature: oligonucleotide substrate
caggcagcacagaagaa

SEQ ID NO: 6494 - RNA, 17 nt, Artificial Sequence
  Description of Artificial Sequence:  Nucleic Acid
  misc_feature: oligonucleotide substrate
acagaagaacacgagga

SEQ ID NO: 6495 - RNA, 17 nt, Artificial Sequence
  Description of Artificial Sequence:  Nucleic Acid
  misc_feature: oligonucleotide substrate
agaagaacacgaggaag

SEQ ID NO: 6496 - RNA, 17 nt, Artificial Sequence
  Description of Artificial Sequence:  Nucleic Acid
  misc_feature: oligonucleotide substrate
aggagaggaugccaugc

SEQ ID NO: 6497 - RNA, 17 nt, Artificial Sequence
  Description of Artificial Sequence:  Nucleic Acid
  misc_feature: oligonucleotide substrate
gagaggaugccaugcac

SEQ ID NO: 6498 - RNA, 17 nt, Artificial Sequence
  Description of Artificial Sequence:  Nucleic Acid
  misc_feature: oligonucleotide substrate
aggaugccaugcacucc

SEQ ID NO: 6499 - RNA, 17 nt, Artificial Sequence
  Description of Artificial Sequence:  Nucleic Acid
  misc_feature: oligonucleotide substrate
gaugccaugcacuccgg

SEQ ID NO: 6500 - RNA, 17 nt, Artificial Sequence
  Description of Artificial Sequence:  Nucleic Acid
  misc_feature: oligonucleotide substrate
ugccaugcacuccggcc

SEQ ID NO: 6501 - RNA, 17 nt, Artificial Sequence
  Description of Artificial Sequence:  Nucleic Acid
  misc_feature: oligonucleotide substrate
gcacuccggccaaggau

SEQ ID NO: 6502 - RNA, 17 nt, Artificial Sequence
  Description of Artificial Sequence:  Nucleic Acid
  misc_feature: oligonucleotide substrate
ggccaaggaugcugcau

SEQ ID NO: 6503 - RNA, 17 nt, Artificial Sequence
  Description of Artificial Sequence:  Nucleic Acid
  misc_feature: oligonucleotide substrate
ccaaggaugcugcauug

SEQ ID NO: 6504 - RNA, 17 nt, Artificial Sequence
  Description of Artificial Sequence:  Nucleic Acid
  misc_feature: oligonucleotide substrate
aggaugcugcauugagg

SEQ ID NO: 6505 - RNA, 17 nt, Artificial Sequence
  Description of Artificial Sequence:  Nucleic Acid
  misc_feature: oligonucleotide substrate
gaugcugcauugaggac

SEQ ID NO: 6506 - RNA, 17 nt, Artificial Sequence
  Description of Artificial Sequence:  Nucleic Acid
  misc_feature: oligonucleotide substrate
cauugaggaccaccagg

SEQ ID NO: 6507 - RNA, 17 nt, Artificial Sequence
  Description of Artificial Sequence:  Nucleic Acid
  misc_feature: oligonucleotide substrate
ugaggaccaccagguuc

SEQ ID NO: 6508 - RNA, 17 nt, Artificial Sequence
  Description of Artificial Sequence:  Nucleic Acid
  misc_feature: oligonucleotide substrate
accaccagguucucuag

SEQ ID NO: 6509 - RNA, 17 nt, Artificial Sequence
  Description of Artificial Sequence:  Nucleic Acid
  misc_feature: oligonucleotide substrate
ucucuagggcagccucg

SEQ ID NO: 6510 - RNA, 17 nt, Artificial Sequence
  Description of Artificial Sequence:  Nucleic Acid
  misc_feature: oligonucleotide substrate
cuagggcagccucggcc

SEQ ID NO: 6511 - RNA, 17 nt, Artificial Sequence
  Description of Artificial Sequence:  Nucleic Acid
  misc_feature: oligonucleotide substrate
cagccucggccugggcu

SEQ ID NO: 6512 - RNA, 17 nt, Artificial Sequence
  Description of Artificial Sequence:  Nucleic Acid
  misc_feature: oligonucleotide substrate
cggccugggcuaccaac

SEQ ID NO: 6513 - RNA, 17 nt, Artificial Sequence
  Description of Artificial Sequence:  Nucleic Acid
  misc_feature: oligonucleotide substrate
ccugggcuaccaacagc

SEQ ID NO: 6514 - RNA, 17 nt, Artificial Sequence
  Description of Artificial Sequence:  Nucleic Acid
  misc_feature: oligonucleotide substrate
ggcuaccaacagcauca

SEQ ID NO: 6515 - RNA, 17 nt, Artificial Sequence
  Description of Artificial Sequence:  Nucleic Acid
  misc_feature: oligonucleotide substrate
uaccaacagcaucaucc

SEQ ID NO: 6516 - RNA, 17 nt, Artificial Sequence
  Description of Artificial Sequence:  Nucleic Acid
  misc_feature: oligonucleotide substrate
ccaacagcaucauccac

SEQ ID NO: 6517 - RNA, 17 nt, Artificial Sequence
  Description of Artificial Sequence:  Nucleic Acid
  misc_feature: oligonucleotide substrate
acagcaucauccacaaa

SEQ ID NO: 6518 - RNA, 17 nt, Artificial Sequence
  Description of Artificial Sequence:  Nucleic Acid
  misc_feature: oligonucleotide substrate
caucauccacaaacagg

SEQ ID NO: 6519 - RNA, 17 nt, Artificial Sequence
  Description of Artificial Sequence:  Nucleic Acid
  misc_feature: oligonucleotide substrate
auccacaaacaggcaca

SEQ ID NO: 6520 - RNA, 17 nt, Artificial Sequence
  Description of Artificial Sequence:  Nucleic Acid
  misc_feature: oligonucleotide substrate
acaaacaggcacagacg

SEQ ID NO: 6521 - RNA, 17 nt, Artificial Sequence
  Description of Artificial Sequence:  Nucleic Acid
  misc_feature: oligonucleotide substrate
aaacaggcacagacgcg

SEQ ID NO: 6522 - RNA, 17 nt, Artificial Sequence
  Description of Artificial Sequence:  Nucleic Acid
  misc_feature: oligonucleotide substrate
aggcacagacgcgcgcg

SEQ ID NO: 6523 - RNA, 17 nt, Artificial Sequence
  Description of Artificial Sequence:  Nucleic Acid
  misc_feature: oligonucleotide substrate
gcacagacgcgcgcguc

SEQ ID NO: 6524 - RNA, 17 nt, Artificial Sequence
  Description of Artificial Sequence:  Nucleic Acid
  misc_feature: oligonucleotide substrate
acagacgcgcgcgucug

SEQ ID NO: 6525 - RNA, 17 nt, Artificial Sequence
  Description of Artificial Sequence:  Nucleic Acid
  misc_feature: oligonucleotide substrate
agacgcgcgcgucugcc

SEQ ID NO: 6526 - RNA, 17 nt, Artificial Sequence
  Description of Artificial Sequence:  Nucleic Acid
  misc_feature: oligonucleotide substrate
acgcgcgcgucugccag

SEQ ID NO: 6527 - RNA, 17 nt, Artificial Sequence
  Description of Artificial Sequence:  Nucleic Acid
  misc_feature: oligonucleotide substrate
gcgcgucugccaggaga

SEQ ID NO: 6528 - RNA, 17 nt, Artificial Sequence
  Description of Artificial Sequence:  Nucleic Acid
  misc_feature: oligonucleotide substrate
aaggaaaagcaacagga

SEQ ID NO: 6529 - RNA, 17 nt, Artificial Sequence
  Description of Artificial Sequence:  Nucleic Acid
  misc_feature: oligonucleotide substrate
gaaaagcaacaggacau

SEQ ID NO: 6530 - RNA, 17 nt, Artificial Sequence
  Description of Artificial Sequence:  Nucleic Acid
  misc_feature: oligonucleotide substrate
gcaacaggacauacucc

SEQ ID NO: 6531 - RNA, 17 nt, Artificial Sequence
  Description of Artificial Sequence:  Nucleic Acid
  misc_feature: oligonucleotide substrate
aacaggacauacuccca

SEQ ID NO: 6532 - RNA, 17 nt, Artificial Sequence
  Description of Artificial Sequence:  Nucleic Acid
  misc_feature: oligonucleotide substrate
caggacauacucccauu

SEQ ID NO: 6533 - RNA, 17 nt, Artificial Sequence
  Description of Artificial Sequence:  Nucleic Acid
  misc_feature: oligonucleotide substrate
auacucccauuugauug

SEQ ID NO: 6534 - RNA, 17 nt, Artificial Sequence
  Description of Artificial Sequence:  Nucleic Acid
  misc_feature: oligonucleotide substrate
cccauuugauugcgaag

SEQ ID NO: 6535 - RNA, 17 nt, Artificial Sequence
  Description of Artificial Sequence:  Nucleic Acid
  misc_feature: oligonucleotide substrate
auuugauugcgaaggag

SEQ ID NO: 6536 - RNA, 17 nt, Artificial Sequence
  Description of Artificial Sequence:  Nucleic Acid
  misc_feature: oligonucleotide substrate
cgaaggagacaaccgcu

SEQ ID NO: 6537 - RNA, 17 nt, Artificial Sequence
  Description of Artificial Sequence:  Nucleic Acid
  misc_feature: oligonucleotide substrate
aggagacaaccgcugac

SEQ ID NO: 6538 - RNA, 17 nt, Artificial Sequence
  Description of Artificial Sequence:  Nucleic Acid
  misc_feature: oligonucleotide substrate
agacaaccgcugacccu

SEQ ID NO: 6539 - RNA, 17 nt, Artificial Sequence
  Description of Artificial Sequence:  Nucleic Acid
  misc_feature: oligonucleotide substrate
aaccgcugacccuacac

SEQ ID NO: 6540 - RNA, 17 nt, Artificial Sequence
  Description of Artificial Sequence:  Nucleic Acid
  misc_feature: oligonucleotide substrate
cugacccuacaccguac

SEQ ID NO: 6541 - RNA, 17 nt, Artificial Sequence
  Description of Artificial Sequence:  Nucleic Acid
  misc_feature: oligonucleotide substrate
gacccuacaccguacag

SEQ ID NO: 6542 - RNA, 17 nt, Artificial Sequence
  Description of Artificial Sequence:  Nucleic Acid
  misc_feature: oligonucleotide substrate
ccuacaccguacaggua

SEQ ID NO: 6543 - RNA, 17 nt, Artificial Sequence
  Description of Artificial Sequence:  Nucleic Acid
  misc_feature: oligonucleotide substrate
uacaccguacagguauu

SEQ ID NO: 6544 - RNA, 17 nt, Artificial Sequence
  Description of Artificial Sequence:  Nucleic Acid
  misc_feature: oligonucleotide substrate
ccguacagguauugcac

SEQ ID NO: 6545 - RNA, 17 nt, Artificial Sequence
  Description of Artificial Sequence:  Nucleic Acid
  misc_feature: oligonucleotide substrate
guacagguauugcacgu

SEQ ID NO: 6546 - RNA, 17 nt, Artificial Sequence
  Description of Artificial Sequence:  Nucleic Acid
  misc_feature: oligonucleotide substrate
cagguauugcacgucca

SEQ ID NO: 6547 - RNA, 17 nt, Artificial Sequence
  Description of Artificial Sequence:  Nucleic Acid
  misc_feature: oligonucleotide substrate
gguauugcacguccacg

SEQ ID NO: 6548 - RNA, 17 nt, Artificial Sequence
  Description of Artificial Sequence:  Nucleic Acid
  misc_feature: oligonucleotide substrate
uauugcacguccacgau

SEQ ID NO: 6549 - RNA, 17 nt, Artificial Sequence
  Description of Artificial Sequence:  Nucleic Acid
  misc_feature: oligonucleotide substrate
gcacguccacgauguuc

SEQ ID NO: 6550 - RNA, 17 nt, Artificial Sequence
  Description of Artificial Sequence:  Nucleic Acid
  misc_feature: oligonucleotide substrate
cguccacgauguucugg

SEQ ID NO: 6551 - RNA, 17 nt, Artificial Sequence
  Description of Artificial Sequence:  Nucleic Acid
  misc_feature: oligonucleotide substrate
uccacgauguucuggug

SEQ ID NO: 6552 - RNA, 17 nt, Artificial Sequence
  Description of Artificial Sequence:  Nucleic Acid
  misc_feature: oligonucleotide substrate
auguucugguggagaug

SEQ ID NO: 6553 - RNA, 17 nt, Artificial Sequence
  Description of Artificial Sequence:  Nucleic Acid
  misc_feature: oligonucleotide substrate
ugguggagauggaucaa

SEQ ID NO: 6554 - RNA, 17 nt, Artificial Sequence
  Description of Artificial Sequence:  Nucleic Acid
  misc_feature: oligonucleotide substrate
ggagauggaucaaacca

SEQ ID NO: 6555 - RNA, 17 nt, Artificial Sequence
  Description of Artificial Sequence:  Nucleic Acid
  misc_feature: oligonucleotide substrate
uggaucaaaccagugga

SEQ ID NO: 6556 - RNA, 17 nt, Artificial Sequence
  Description of Artificial Sequence:  Nucleic Acid
  misc_feature: oligonucleotide substrate
ucaaaccaguggacaga

SEQ ID NO: 6557 - RNA, 17 nt, Artificial Sequence
  Description of Artificial Sequence:  Nucleic Acid
  misc_feature: oligonucleotide substrate
accaguggacagagccg

SEQ ID NO: 6558 - RNA, 17 nt, Artificial Sequence
  Description of Artificial Sequence:  Nucleic Acid
  misc_feature: oligonucleotide substrate
uggacagagccgguagg

SEQ ID NO: 6559 - RNA, 17 nt, Artificial Sequence
  Description of Artificial Sequence:  Nucleic Acid
  misc_feature: oligonucleotide substrate
cagagccgguagggugg

SEQ ID NO: 6560 - RNA, 17 nt, Artificial Sequence
  Description of Artificial Sequence:  Nucleic Acid
  misc_feature: oligonucleotide substrate
ccgguaggguggugaag

SEQ ID NO: 6561 - RNA, 17 nt, Artificial Sequence
  Description of Artificial Sequence:  Nucleic Acid
  misc_feature: oligonucleotide substrate
guaggguggugaaggag

SEQ ID NO: 6562 - RNA, 17 nt, Artificial Sequence
  Description of Artificial Sequence:  Nucleic Acid
  misc_feature: oligonucleotide substrate
gugaaggagcagggcag

SEQ ID NO: 6563 - RNA, 17 nt, Artificial Sequence
  Description of Artificial Sequence:  Nucleic Acid
  misc_feature: oligonucleotide substrate
ggagcagggcaguauuu

SEQ ID NO: 6564 - RNA, 17 nt, Artificial Sequence
  Description of Artificial Sequence:  Nucleic Acid
  misc_feature: oligonucleotide substrate
gcagggcaguauuugcc

SEQ ID NO: 6565 - RNA, 17 nt, Artificial Sequence
  Description of Artificial Sequence:  Nucleic Acid
  misc_feature: oligonucleotide substrate
agggcaguauuugccac

SEQ ID NO: 6566 - RNA, 17 nt, Artificial Sequence
  Description of Artificial Sequence:  Nucleic Acid
  misc_feature: oligonucleotide substrate
caguauuugccacucug

SEQ ID NO: 6567 - RNA, 17 nt, Artificial Sequence
  Description of Artificial Sequence:  Nucleic Acid
  misc_feature: oligonucleotide substrate
uauuugccacucuguag

SEQ ID NO: 6568 - RNA, 17 nt, Artificial Sequence
  Description of Artificial Sequence:  Nucleic Acid
  misc_feature: oligonucleotide substrate
gccacucuguaguggac

SEQ ID NO: 6569 - RNA, 17 nt, Artificial Sequence
  Description of Artificial Sequence:  Nucleic Acid
  misc_feature: oligonucleotide substrate
acucuguaguggacaac

SEQ ID NO: 6570 - RNA, 17 nt, Artificial Sequence
  Description of Artificial Sequence:  Nucleic Acid
  misc_feature: oligonucleotide substrate
uguaguggacaacagca

SEQ ID NO: 6571 - RNA, 17 nt, Artificial Sequence
  Description of Artificial Sequence:  Nucleic Acid
  misc_feature: oligonucleotide substrate
aguggacaacagcagcg

SEQ ID NO: 6572 - RNA, 17 nt, Artificial Sequence
  Description of Artificial Sequence:  Nucleic Acid
  misc_feature: oligonucleotide substrate
ggacaacagcagcgggc

SEQ ID NO: 6573 - RNA, 17 nt, Artificial Sequence
  Description of Artificial Sequence:  Nucleic Acid
  misc_feature: oligonucleotide substrate
caacagcagcgggcuga

SEQ ID NO: 6574 - RNA, 17 nt, Artificial Sequence
  Description of Artificial Sequence:  Nucleic Acid
  misc_feature: oligonucleotide substrate
agcagcgggcugagcuc

SEQ ID NO: 6575 - RNA, 17 nt, Artificial Sequence
  Description of Artificial Sequence:  Nucleic Acid
  misc_feature: oligonucleotide substrate
cgggcugagcucugauc

SEQ ID NO: 6576 - RNA, 17 nt, Artificial Sequence
  Description of Artificial Sequence:  Nucleic Acid
  misc_feature: oligonucleotide substrate
gagcucugaucuguccc

SEQ ID NO: 6577 - RNA, 17 nt, Artificial Sequence
  Description of Artificial Sequence:  Nucleic Acid
  misc_feature: oligonucleotide substrate
ucugaucugucccuguc

SEQ ID NO: 6578 - RNA, 17 nt, Artificial Sequence
  Description of Artificial Sequence:  Nucleic Acid
  misc_feature: oligonucleotide substrate
cugucccuguccuccaa

SEQ ID NO: 6579 - RNA, 17 nt, Artificial Sequence
  Description of Artificial Sequence:  Nucleic Acid
  misc_feature: oligonucleotide substrate
uccuccaaaucacaacg

SEQ ID NO: 6580 - RNA, 17 nt, Artificial Sequence
  Description of Artificial Sequence:  Nucleic Acid
  misc_feature: oligonucleotide substrate
uccaaaucacaacgcuc

SEQ ID NO: 6581 - RNA, 17 nt, Artificial Sequence
  Description of Artificial Sequence:  Nucleic Acid
  misc_feature: oligonucleotide substrate
aaaucacaacgcucucc

SEQ ID NO: 6582 - RNA, 17 nt, Artificial Sequence
  Description of Artificial Sequence:  Nucleic Acid
  misc_feature: oligonucleotide substrate
aucacaacgcucuccuc

SEQ ID NO: 6583 - RNA, 17 nt, Artificial Sequence
  Description of Artificial Sequence:  Nucleic Acid
  misc_feature: oligonucleotide substrate
cuccucgaguccaauug

SEQ ID NO: 6584 - RNA, 17 nt, Artificial Sequence
  Description of Artificial Sequence:  Nucleic Acid
  misc_feature: oligonucleotide substrate
cgaguccaauugcaugc

SEQ ID NO: 6585 - RNA, 17 nt, Artificial Sequence
  Description of Artificial Sequence:  Nucleic Acid
  misc_feature: oligonucleotide substrate
guccaauugcaugcggc

SEQ ID NO: 6586 - RNA, 17 nt, Artificial Sequence
  Description of Artificial Sequence:  Nucleic Acid
  misc_feature: oligonucleotide substrate
ccaauugcaugcggcgg

SEQ ID NO: 6587 - RNA, 17 nt, Artificial Sequence
  Description of Artificial Sequence:  Nucleic Acid
  misc_feature: oligonucleotide substrate
aauugcaugcggcggug

SEQ ID NO: 6588 - RNA, 17 nt, Artificial Sequence
  Description of Artificial Sequence:  Nucleic Acid
  misc_feature: oligonucleotide substrate
ugcaugcggcggugagc

SEQ ID NO: 6589 - RNA, 17 nt, Artificial Sequence
  Description of Artificial Sequence:  Nucleic Acid
  misc_feature: oligonucleotide substrate
augcggcggugagccug

SEQ ID NO: 6590 - RNA, 17 nt, Artificial Sequence
  Description of Artificial Sequence:  Nucleic Acid
  misc_feature: oligonucleotide substrate
ggcggugagccugugcu

SEQ ID NO: 6591 - RNA, 17 nt, Artificial Sequence
  Description of Artificial Sequence:  Nucleic Acid
  misc_feature: oligonucleotide substrate
gugagccugugcuccac

SEQ ID NO: 6592 - RNA, 17 nt, Artificial Sequence
  Description of Artificial Sequence:  Nucleic Acid
  misc_feature: oligonucleotide substrate
gagccugugcuccacgc

SEQ ID NO: 6593 - RNA, 17 nt, Artificial Sequence
  Description of Artificial Sequence:  Nucleic Acid
  misc_feature: oligonucleotide substrate
ugugcuccacgcccccc

SEQ ID NO: 6594 - RNA, 17 nt, Artificial Sequence
  Description of Artificial Sequence:  Nucleic Acid
  misc_feature: oligonucleotide substrate
ugcuccacgccccccac

SEQ ID NO: 6595 - RNA, 17 nt, Artificial Sequence
  Description of Artificial Sequence:  Nucleic Acid
  misc_feature: oligonucleotide substrate
cgccccccacauacauc

SEQ ID NO: 6596 - RNA, 17 nt, Artificial Sequence
  Description of Artificial Sequence:  Nucleic Acid
  misc_feature: oligonucleotide substrate
ccccccacauacauccu

SEQ ID NO: 6597 - RNA, 17 nt, Artificial Sequence
  Description of Artificial Sequence:  Nucleic Acid
  misc_feature: oligonucleotide substrate
ccccacauacauccuaa

SEQ ID NO: 6598 - RNA, 17 nt, Artificial Sequence
  Description of Artificial Sequence:  Nucleic Acid
  misc_feature: oligonucleotide substrate
ccacauacauccuaacc

SEQ ID NO: 6599 - RNA, 17 nt, Artificial Sequence
  Description of Artificial Sequence:  Nucleic Acid
  misc_feature: oligonucleotide substrate
acauccuaaccuuaaag

SEQ ID NO: 6600 - RNA, 17 nt, Artificial Sequence
  Description of Artificial Sequence:  Nucleic Acid
  misc_feature: oligonucleotide substrate
ccuuaaagauggaaaaa

SEQ ID NO: 6601 - RNA, 17 nt, Artificial Sequence
  Description of Artificial Sequence:  Nucleic Acid
  misc_feature: oligonucleotide substrate
auggaaaaauugacagu

SEQ ID NO: 6602 - RNA, 17 nt, Artificial Sequence
  Description of Artificial Sequence:  Nucleic Acid
  misc_feature: oligonucleotide substrate
aaaaauugacagugcag

SEQ ID NO: 6603 - RNA, 17 nt, Artificial Sequence
  Description of Artificial Sequence:  Nucleic Acid
  misc_feature: oligonucleotide substrate
aauugacagugcagggg

SEQ ID NO: 6604 - RNA, 17 nt, Artificial Sequence
  Description of Artificial Sequence:  Nucleic Acid
  misc_feature: oligonucleotide substrate
uugacagugcaggggua

SEQ ID NO: 6605 - RNA, 17 nt, Artificial Sequence
  Description of Artificial Sequence:  Nucleic Acid
  misc_feature: oligonucleotide substrate
gugcagggguagugcca

SEQ ID NO: 6606 - RNA, 17 nt, Artificial Sequence
  Description of Artificial Sequence:  Nucleic Acid
  misc_feature: oligonucleotide substrate
cagggguagugccaaag

SEQ ID NO: 6607 - RNA, 17 nt, Artificial Sequence
  Description of Artificial Sequence:  Nucleic Acid
  misc_feature: oligonucleotide substrate
gggguagugccaaagcc

SEQ ID NO: 6608 - RNA, 17 nt, Artificial Sequence
  Description of Artificial Sequence:  Nucleic Acid
  misc_feature: oligonucleotide substrate
gugccaaagccuguaug

SEQ ID NO: 6609 - RNA, 17 nt, Artificial Sequence
  Description of Artificial Sequence:  Nucleic Acid
  misc_feature: oligonucleotide substrate
caaagccuguaugggua

SEQ ID NO: 6610 - RNA, 17 nt, Artificial Sequence
  Description of Artificial Sequence:  Nucleic Acid
  misc_feature: oligonucleotide substrate
aagccuguauggguagu

SEQ ID NO: 6611 - RNA, 17 nt, Artificial Sequence
  Description of Artificial Sequence:  Nucleic Acid
  misc_feature: oligonucleotide substrate
cuguauggguagucaac

SEQ ID NO: 6612 - RNA, 17 nt, Artificial Sequence
  Description of Artificial Sequence:  Nucleic Acid
  misc_feature: oligonucleotide substrate
uauggguagucaacuau

SEQ ID NO: 6613 - RNA, 17 nt, Artificial Sequence
  Description of Artificial Sequence:  Nucleic Acid
  misc_feature: oligonucleotide substrate
gguagucaacuaugcau

SEQ ID NO: 6614 - RNA, 17 nt, Artificial Sequence
  Description of Artificial Sequence:  Nucleic Acid
  misc_feature: oligonucleotide substrate
agucaacuaugcaucua

SEQ ID NO: 6615 - RNA, 17 nt, Artificial Sequence
  Description of Artificial Sequence:  Nucleic Acid
  misc_feature: oligonucleotide substrate
ucaacuaugcaucuagg

SEQ ID NO: 6616 - RNA, 17 nt, Artificial Sequence
  Description of Artificial Sequence:  Nucleic Acid
  misc_feature: oligonucleotide substrate
aacuaugcaucuaggug

SEQ ID NO: 6617 - RNA, 17 nt, Artificial Sequence
  Description of Artificial Sequence:  Nucleic Acid
  misc_feature: oligonucleotide substrate
gcaucuagguguuaacc

SEQ ID NO: 6618 - RNA, 17 nt, Artificial Sequence
  Description of Artificial Sequence:  Nucleic Acid
  misc_feature: oligonucleotide substrate
aucuagguguuaaccaa

SEQ ID NO: 6619 - RNA, 17 nt, Artificial Sequence
  Description of Artificial Sequence:  Nucleic Acid
  misc_feature: oligonucleotide substrate
agguguuaaccaaggcc

SEQ ID NO: 6620 - RNA, 17 nt, Artificial Sequence
  Description of Artificial Sequence:  Nucleic Acid
  misc_feature: oligonucleotide substrate
uaaccaaggccccgaac

SEQ ID NO: 6621 - RNA, 17 nt, Artificial Sequence
  Description of Artificial Sequence:  Nucleic Acid
  misc_feature: oligonucleotide substrate
ggccccgaaccgcacuu

SEQ ID NO: 6622 - RNA, 17 nt, Artificial Sequence
  Description of Artificial Sequence:  Nucleic Acid
  misc_feature: oligonucleotide substrate
cccgaaccgcacuuugc

SEQ ID NO: 6623 - RNA, 17 nt, Artificial Sequence
  Description of Artificial Sequence:  Nucleic Acid
  misc_feature: oligonucleotide substrate
cgaaccgcacuuugcgu

SEQ ID NO: 6624 - RNA, 17 nt, Artificial Sequence
  Description of Artificial Sequence:  Nucleic Acid
  misc_feature: oligonucleotide substrate
cgcacuuugcguaagug

SEQ ID NO: 6625 - RNA, 17 nt, Artificial Sequence
  Description of Artificial Sequence:  Nucleic Acid
  misc_feature: oligonucleotide substrate
cacuuugcguaaguggc

SEQ ID NO: 6626 - RNA, 17 nt, Artificial Sequence
  Description of Artificial Sequence:  Nucleic Acid
  misc_feature: oligonucleotide substrate
uugcguaaguggccucg

SEQ ID NO: 6627 - RNA, 17 nt, Artificial Sequence
  Description of Artificial Sequence:  Nucleic Acid
  misc_feature: oligonucleotide substrate
cguaaguggccucgggg

SEQ ID NO: 6628 - RNA, 17 nt, Artificial Sequence
  Description of Artificial Sequence:  Nucleic Acid
  misc_feature: oligonucleotide substrate
gccucggggugcuuccg

SEQ ID NO: 6629 - RNA, 17 nt, Artificial Sequence
  Description of Artificial Sequence:  Nucleic Acid
  misc_feature: oligonucleotide substrate
cucggggugcuuccgga

SEQ ID NO: 6630 - RNA, 17 nt, Artificial Sequence
  Description of Artificial Sequence:  Nucleic Acid
  misc_feature: oligonucleotide substrate
uuccggaagcaguccgu

SEQ ID NO: 6631 - RNA, 17 nt, Artificial Sequence
  Description of Artificial Sequence:  Nucleic Acid
  misc_feature: oligonucleotide substrate
cggaagcaguccguggg

SEQ ID NO: 6632 - RNA, 17 nt, Artificial Sequence
  Description of Artificial Sequence:  Nucleic Acid
  misc_feature: oligonucleotide substrate
agcaguccguggggcag

SEQ ID NO: 6633 - RNA, 17 nt, Artificial Sequence
  Description of Artificial Sequence:  Nucleic Acid
  misc_feature: oligonucleotide substrate
uccguggggcagguuaa

SEQ ID NO: 6634 - RNA, 17 nt, Artificial Sequence
  Description of Artificial Sequence:  Nucleic Acid
  misc_feature: oligonucleotide substrate
uggggcagguuaaggug

SEQ ID NO: 6635 - RNA, 17 nt, Artificial Sequence
  Description of Artificial Sequence:  Nucleic Acid
  misc_feature: oligonucleotide substrate
agguuaaggugucguua

SEQ ID NO: 6636 - RNA, 17 nt, Artificial Sequence
  Description of Artificial Sequence:  Nucleic Acid
  misc_feature: oligonucleotide substrate
guuaaggugucguuacc

SEQ ID NO: 6637 - RNA, 17 nt, Artificial Sequence
  Description of Artificial Sequence:  Nucleic Acid
  misc_feature: oligonucleotide substrate
aaggugucguuaccggc

SEQ ID NO: 6638 - RNA, 17 nt, Artificial Sequence
  Description of Artificial Sequence:  Nucleic Acid
  misc_feature: oligonucleotide substrate
gugucguuaccggcccc

SEQ ID NO: 6639 - RNA, 17 nt, Artificial Sequence
  Description of Artificial Sequence:  Nucleic Acid
  misc_feature: oligonucleotide substrate
cguuaccggcccccccg

SEQ ID NO: 6640 - RNA, 17 nt, Artificial Sequence
  Description of Artificial Sequence:  Nucleic Acid
  misc_feature: oligonucleotide substrate
cccccccgauguugcac

SEQ ID NO: 6641 - RNA, 17 nt, Artificial Sequence
  Description of Artificial Sequence:  Nucleic Acid
  misc_feature: oligonucleotide substrate
cccccgauguugcacgg

SEQ ID NO: 6642 - RNA, 17 nt, Artificial Sequence
  Description of Artificial Sequence:  Nucleic Acid
  misc_feature: oligonucleotide substrate
ccgauguugcacggggg

SEQ ID NO: 6643 - RNA, 17 nt, Artificial Sequence
  Description of Artificial Sequence:  Nucleic Acid
  misc_feature: oligonucleotide substrate
gauguugcacggggggc

SEQ ID NO: 6644 - RNA, 17 nt, Artificial Sequence
  Description of Artificial Sequence:  Nucleic Acid
  misc_feature: oligonucleotide substrate
cacggggggcccccgca

SEQ ID NO: 6645 - RNA, 17 nt, Artificial Sequence
  Description of Artificial Sequence:  Nucleic Acid
  misc_feature: oligonucleotide substrate
gggcccccgcacgucuu

SEQ ID NO: 6646 - RNA, 17 nt, Artificial Sequence
  Description of Artificial Sequence:  Nucleic Acid
  misc_feature: oligonucleotide substrate
gcccccgcacgucuugg

SEQ ID NO: 6647 - RNA, 17 nt, Artificial Sequence
  Description of Artificial Sequence:  Nucleic Acid
  misc_feature: oligonucleotide substrate
ccccgcacgucuuggug

SEQ ID NO: 6648 - RNA, 17 nt, Artificial Sequence
  Description of Artificial Sequence:  Nucleic Acid
  misc_feature: oligonucleotide substrate
acgucuuggugaaccca

SEQ ID NO: 6649 - RNA, 17 nt, Artificial Sequence
  Description of Artificial Sequence:  Nucleic Acid
  misc_feature: oligonucleotide substrate
cuuggugaacccagugc

SEQ ID NO: 6650 - RNA, 17 nt, Artificial Sequence
  Description of Artificial Sequence:  Nucleic Acid
  misc_feature: oligonucleotide substrate
ugaacccagugccauuc

SEQ ID NO: 6651 - RNA, 17 nt, Artificial Sequence
  Description of Artificial Sequence:  Nucleic Acid
  misc_feature: oligonucleotide substrate
aacccagugccauucau

SEQ ID NO: 6652 - RNA, 17 nt, Artificial Sequence
  Description of Artificial Sequence:  Nucleic Acid
  misc_feature: oligonucleotide substrate
ccagugccauucaucca

SEQ ID NO: 6653 - RNA, 17 nt, Artificial Sequence
  Description of Artificial Sequence:  Nucleic Acid
  misc_feature: oligonucleotide substrate
ugccauucauccaugug

SEQ ID NO: 6654 - RNA, 17 nt, Artificial Sequence
  Description of Artificial Sequence:  Nucleic Acid
  misc_feature: oligonucleotide substrate
auucauccaugugcagc

SEQ ID NO: 6655 - RNA, 17 nt, Artificial Sequence
  Description of Artificial Sequence:  Nucleic Acid
  misc_feature: oligonucleotide substrate
ucauccaugugcagccg

SEQ ID NO: 6656 - RNA, 17 nt, Artificial Sequence
  Description of Artificial Sequence:  Nucleic Acid
  misc_feature: oligonucleotide substrate
auccaugugcagccgaa

SEQ ID NO: 6657 - RNA, 17 nt, Artificial Sequence
  Description of Artificial Sequence:  Nucleic Acid
  misc_feature: oligonucleotide substrate
caugugcagccgaacca

SEQ ID NO: 6658 - RNA, 17 nt, Artificial Sequence
  Description of Artificial Sequence:  Nucleic Acid
  misc_feature: oligonucleotide substrate
gcagccgaaccaguugc

SEQ ID NO: 6659 - RNA, 17 nt, Artificial Sequence
  Description of Artificial Sequence:  Nucleic Acid
  misc_feature: oligonucleotide substrate
ccgaaccaguugccuug

SEQ ID NO: 6660 - RNA, 17 nt, Artificial Sequence
  Description of Artificial Sequence:  Nucleic Acid
  misc_feature: oligonucleotide substrate
aaccaguugccuugcgg

SEQ ID NO: 6661 - RNA, 17 nt, Artificial Sequence
  Description of Artificial Sequence:  Nucleic Acid
  misc_feature: oligonucleotide substrate
guugccuugcggcggcc

SEQ ID NO: 6662 - RNA, 17 nt, Artificial Sequence
  Description of Artificial Sequence:  Nucleic Acid
  misc_feature: oligonucleotide substrate
gccuugcggcggccgcg

SEQ ID NO: 6663 - RNA, 17 nt, Artificial Sequence
  Description of Artificial Sequence:  Nucleic Acid
  misc_feature: oligonucleotide substrate
uugcggcggccgcgugu

SEQ ID NO: 6664 - RNA, 17 nt, Artificial Sequence
  Description of Artificial Sequence:  Nucleic Acid
  misc_feature: oligonucleotide substrate
cggcggccgcguguugu

SEQ ID NO: 6665 - RNA, 17 nt, Artificial Sequence
  Description of Artificial Sequence:  Nucleic Acid
  misc_feature: oligonucleotide substrate
gcggccgcguguuguug

SEQ ID NO: 6666 - RNA, 17 nt, Artificial Sequence
  Description of Artificial Sequence:  Nucleic Acid
  misc_feature: oligonucleotide substrate
ggccgcguguuguugag

SEQ ID NO: 6667 - RNA, 17 nt, Artificial Sequence
  Description of Artificial Sequence:  Nucleic Acid
  misc_feature: oligonucleotide substrate
cgcguguuguugaggag

SEQ ID NO: 6668 - RNA, 17 nt, Artificial Sequence
  Description of Artificial Sequence:  Nucleic Acid
  misc_feature: oligonucleotide substrate
guugaggagcagcacgu

SEQ ID NO: 6669 - RNA, 17 nt, Artificial Sequence
  Description of Artificial Sequence:  Nucleic Acid
  misc_feature: oligonucleotide substrate
gaggagcagcacguccg

SEQ ID NO: 6670 - RNA, 17 nt, Artificial Sequence
  Description of Artificial Sequence:  Nucleic Acid
  misc_feature: oligonucleotide substrate
ggagcagcacguccguc

SEQ ID NO: 6671 - RNA, 17 nt, Artificial Sequence
  Description of Artificial Sequence:  Nucleic Acid
  misc_feature: oligonucleotide substrate
agcagcacguccgucuc

SEQ ID NO: 6672 - RNA, 17 nt, Artificial Sequence
  Description of Artificial Sequence:  Nucleic Acid
  misc_feature: oligonucleotide substrate
gcacguccgucucguuc

SEQ ID NO: 6673 - RNA, 17 nt, Artificial Sequence
  Description of Artificial Sequence:  Nucleic Acid
  misc_feature: oligonucleotide substrate
uccgucucguucgcccc

SEQ ID NO: 6674 - RNA, 17 nt, Artificial Sequence
  Description of Artificial Sequence:  Nucleic Acid
  misc_feature: oligonucleotide substrate
ucucguucgccccccag

SEQ ID NO: 6675 - RNA, 17 nt, Artificial Sequence
  Description of Artificial Sequence:  Nucleic Acid
  misc_feature: oligonucleotide substrate
gccccccaguuauacgu

SEQ ID NO: 6676 - RNA, 17 nt, Artificial Sequence
  Description of Artificial Sequence:  Nucleic Acid
  misc_feature: oligonucleotide substrate
ccccaguuauacguggg

SEQ ID NO: 6677 - RNA, 17 nt, Artificial Sequence
  Description of Artificial Sequence:  Nucleic Acid
  misc_feature: oligonucleotide substrate
ccaguuauacguggggg

SEQ ID NO: 6678 - RNA, 17 nt, Artificial Sequence
  Description of Artificial Sequence:  Nucleic Acid
  misc_feature: oligonucleotide substrate
aguuauacgugggggcg

SEQ ID NO: 6679 - RNA, 17 nt, Artificial Sequence
  Description of Artificial Sequence:  Nucleic Acid
  misc_feature: oligonucleotide substrate
acgugggggcgccgaaa

SEQ ID NO: 6680 - RNA, 17 nt, Artificial Sequence
  Description of Artificial Sequence:  Nucleic Acid
  misc_feature: oligonucleotide substrate
gugggggcgccgaaacg

SEQ ID NO: 6681 - RNA, 17 nt, Artificial Sequence
  Description of Artificial Sequence:  Nucleic Acid
  misc_feature: oligonucleotide substrate
gcgccgaaacggucggu

SEQ ID NO: 6682 - RNA, 17 nt, Artificial Sequence
  Description of Artificial Sequence:  Nucleic Acid
  misc_feature: oligonucleotide substrate
ccgaaacggucggucgu

SEQ ID NO: 6683 - RNA, 17 nt, Artificial Sequence
  Description of Artificial Sequence:  Nucleic Acid
  misc_feature: oligonucleotide substrate
aacggucggucgucccc

SEQ ID NO: 6684 - RNA, 17 nt, Artificial Sequence
  Description of Artificial Sequence:  Nucleic Acid
  misc_feature: oligonucleotide substrate
ggucggucguccccacc

SEQ ID NO: 6685 - RNA, 17 nt, Artificial Sequence
  Description of Artificial Sequence:  Nucleic Acid
  misc_feature: oligonucleotide substrate
ucguccccaccacaaca

SEQ ID NO: 6686 - RNA, 17 nt, Artificial Sequence
  Description of Artificial Sequence:  Nucleic Acid
  misc_feature: oligonucleotide substrate
uccccaccacaacaggg

SEQ ID NO: 6687 - RNA, 17 nt, Artificial Sequence
  Description of Artificial Sequence:  Nucleic Acid
  misc_feature: oligonucleotide substrate
ccaccacaacagggcuu

SEQ ID NO: 6688 - RNA, 17 nt, Artificial Sequence
  Description of Artificial Sequence:  Nucleic Acid
  misc_feature: oligonucleotide substrate
acaacagggcuuggggu

SEQ ID NO: 6689 - RNA, 17 nt, Artificial Sequence
  Description of Artificial Sequence:  Nucleic Acid
  misc_feature: oligonucleotide substrate
ggcuuggggugaagcaa

SEQ ID NO: 6690 - RNA, 17 nt, Artificial Sequence
  Description of Artificial Sequence:  Nucleic Acid
  misc_feature: oligonucleotide substrate
ggggugaagcaauacac

SEQ ID NO: 6691 - RNA, 17 nt, Artificial Sequence
  Description of Artificial Sequence:  Nucleic Acid
  misc_feature: oligonucleotide substrate
gugaagcaauacacugg

SEQ ID NO: 6692 - RNA, 17 nt, Artificial Sequence
  Description of Artificial Sequence:  Nucleic Acid
  misc_feature: oligonucleotide substrate
gaagcaauacacuggac

SEQ ID NO: 6693 - RNA, 17 nt, Artificial Sequence
  Description of Artificial Sequence:  Nucleic Acid
  misc_feature: oligonucleotide substrate
agcaauacacuggacca

SEQ ID NO: 6694 - RNA, 17 nt, Artificial Sequence
  Description of Artificial Sequence:  Nucleic Acid
  misc_feature: oligonucleotide substrate
uacacuggaccacauac

SEQ ID NO: 6695 - RNA, 17 nt, Artificial Sequence
  Description of Artificial Sequence:  Nucleic Acid
  misc_feature: oligonucleotide substrate
acuggaccacauaccug

SEQ ID NO: 6696 - RNA, 17 nt, Artificial Sequence
  Description of Artificial Sequence:  Nucleic Acid
  misc_feature: oligonucleotide substrate
uggaccacauaccugcg

SEQ ID NO: 6697 - RNA, 17 nt, Artificial Sequence
  Description of Artificial Sequence:  Nucleic Acid
  misc_feature: oligonucleotide substrate
gaccacauaccugcgau

SEQ ID NO: 6698 - RNA, 17 nt, Artificial Sequence
  Description of Artificial Sequence:  Nucleic Acid
  misc_feature: oligonucleotide substrate
acauaccugcgaugcgg

SEQ ID NO: 6699 - RNA, 17 nt, Artificial Sequence
  Description of Artificial Sequence:  Nucleic Acid
  misc_feature: oligonucleotide substrate
uaccugcgaugcgggua

SEQ ID NO: 6700 - RNA, 17 nt, Artificial Sequence
  Description of Artificial Sequence:  Nucleic Acid
  misc_feature: oligonucleotide substrate
ccugcgaugcggguacg

SEQ ID NO: 6701 - RNA, 17 nt, Artificial Sequence
  Description of Artificial Sequence:  Nucleic Acid
  misc_feature: oligonucleotide substrate
cgaugcggguacgauac

SEQ ID NO: 6702 - RNA, 17 nt, Artificial Sequence
  Description of Artificial Sequence:  Nucleic Acid
  misc_feature: oligonucleotide substrate
augcggguacgauacca

SEQ ID NO: 6703 - RNA, 17 nt, Artificial Sequence
  Description of Artificial Sequence:  Nucleic Acid
  misc_feature: oligonucleotide substrate
cggguacgauaccacac

SEQ ID NO: 6704 - RNA, 17 nt, Artificial Sequence
  Description of Artificial Sequence:  Nucleic Acid
  misc_feature: oligonucleotide substrate
gguacgauaccacacgg

SEQ ID NO: 6705 - RNA, 17 nt, Artificial Sequence
  Description of Artificial Sequence:  Nucleic Acid
  misc_feature: oligonucleotide substrate
acgauaccacacggccg

SEQ ID NO: 6706 - RNA, 17 nt, Artificial Sequence
  Description of Artificial Sequence:  Nucleic Acid
  misc_feature: oligonucleotide substrate
gauaccacacggccgcg

SEQ ID NO: 6707 - RNA, 17 nt, Artificial Sequence
  Description of Artificial Sequence:  Nucleic Acid
  misc_feature: oligonucleotide substrate
accacacggccgcggug

SEQ ID NO: 6708 - RNA, 17 nt, Artificial Sequence
  Description of Artificial Sequence:  Nucleic Acid
  misc_feature: oligonucleotide substrate
acacggccgcggugcgu

SEQ ID NO: 6709 - RNA, 17 nt, Artificial Sequence
  Description of Artificial Sequence:  Nucleic Acid
  misc_feature: oligonucleotide substrate
cggccgcggugcguagu

SEQ ID NO: 6710 - RNA, 17 nt, Artificial Sequence
  Description of Artificial Sequence:  Nucleic Acid
  misc_feature: oligonucleotide substrate
gccgcggugcguagugc

SEQ ID NO: 6711 - RNA, 17 nt, Artificial Sequence
  Description of Artificial Sequence:  Nucleic Acid
  misc_feature: oligonucleotide substrate
cgcggugcguagugcca

SEQ ID NO: 6712 - RNA, 17 nt, Artificial Sequence
  Description of Artificial Sequence:  Nucleic Acid
  misc_feature: oligonucleotide substrate
ggugcguagugccagca

SEQ ID NO: 6713 - RNA, 17 nt, Artificial Sequence
  Description of Artificial Sequence:  Nucleic Acid
  misc_feature: oligonucleotide substrate
ugcguagugccagcaau

SEQ ID NO: 6714 - RNA, 17 nt, Artificial Sequence
  Description of Artificial Sequence:  Nucleic Acid
  misc_feature: oligonucleotide substrate
uagugccagcaauaggg

SEQ ID NO: 6715 - RNA, 17 nt, Artificial Sequence
  Description of Artificial Sequence:  Nucleic Acid
  misc_feature: oligonucleotide substrate
ugccagcaauagggccu

SEQ ID NO: 6716 - RNA, 17 nt, Artificial Sequence
  Description of Artificial Sequence:  Nucleic Acid
  misc_feature: oligonucleotide substrate
gcaauagggccucuggu

SEQ ID NO: 6717 - RNA, 17 nt, Artificial Sequence
  Description of Artificial Sequence:  Nucleic Acid
  misc_feature: oligonucleotide substrate
ggccucugguccgaguu

SEQ ID NO: 6718 - RNA, 17 nt, Artificial Sequence
  Description of Artificial Sequence:  Nucleic Acid
  misc_feature: oligonucleotide substrate
ugguccgaguuguggcc

SEQ ID NO: 6719 - RNA, 17 nt, Artificial Sequence
  Description of Artificial Sequence:  Nucleic Acid
  misc_feature: oligonucleotide substrate
uccgaguuguggcccuc

SEQ ID NO: 6720 - RNA, 17 nt, Artificial Sequence
  Description of Artificial Sequence:  Nucleic Acid
  misc_feature: oligonucleotide substrate
gaguuguggcccucggu

SEQ ID NO: 6721 - RNA, 17 nt, Artificial Sequence
  Description of Artificial Sequence:  Nucleic Acid
  misc_feature: oligonucleotide substrate
ggcccucgguguaggug

SEQ ID NO: 6722 - RNA, 17 nt, Artificial Sequence
  Description of Artificial Sequence:  Nucleic Acid
  misc_feature: oligonucleotide substrate
cccucgguguaggugau

SEQ ID NO: 6723 - RNA, 17 nt, Artificial Sequence
  Description of Artificial Sequence:  Nucleic Acid
  misc_feature: oligonucleotide substrate
cgguguaggugauagga

SEQ ID NO: 6724 - RNA, 17 nt, Artificial Sequence
  Description of Artificial Sequence:  Nucleic Acid
  misc_feature: oligonucleotide substrate
uguaggugauaggaccc

SEQ ID NO: 6725 - RNA, 17 nt, Artificial Sequence
  Description of Artificial Sequence:  Nucleic Acid
  misc_feature: oligonucleotide substrate
gugauaggaccccaccc

SEQ ID NO: 6726 - RNA, 17 nt, Artificial Sequence
  Description of Artificial Sequence:  Nucleic Acid
  misc_feature: oligonucleotide substrate
aggaccccaccccugag

SEQ ID NO: 6727 - RNA, 17 nt, Artificial Sequence
  Description of Artificial Sequence:  Nucleic Acid
  misc_feature: oligonucleotide substrate
accccugagcgaacuug

SEQ ID NO: 6728 - RNA, 17 nt, Artificial Sequence
  Description of Artificial Sequence:  Nucleic Acid
  misc_feature: oligonucleotide substrate
cugagcgaacuugucaa

SEQ ID NO: 6729 - RNA, 17 nt, Artificial Sequence
  Description of Artificial Sequence:  Nucleic Acid
  misc_feature: oligonucleotide substrate
gcgaacuugucaaugga

SEQ ID NO: 6730 - RNA, 17 nt, Artificial Sequence
  Description of Artificial Sequence:  Nucleic Acid
  misc_feature: oligonucleotide substrate
acuugucaauggagcgg

SEQ ID NO: 6731 - RNA, 17 nt, Artificial Sequence
  Description of Artificial Sequence:  Nucleic Acid
  misc_feature: oligonucleotide substrate
ucaauggagcggcagcu

SEQ ID NO: 6732 - RNA, 17 nt, Artificial Sequence
  Description of Artificial Sequence:  Nucleic Acid
  misc_feature: oligonucleotide substrate
auggagcggcagcuggc

SEQ ID NO: 6733 - RNA, 17 nt, Artificial Sequence
  Description of Artificial Sequence:  Nucleic Acid
  misc_feature: oligonucleotide substrate
gagcggcagcuggccaa

SEQ ID NO: 6734 - RNA, 17 nt, Artificial Sequence
  Description of Artificial Sequence:  Nucleic Acid
  misc_feature: oligonucleotide substrate
ggcagcuggccaagcgc

SEQ ID NO: 6735 - RNA, 17 nt, Artificial Sequence
  Description of Artificial Sequence:  Nucleic Acid
  misc_feature: oligonucleotide substrate
cuggccaagcgcugugg

SEQ ID NO: 6736 - RNA, 17 nt, Artificial Sequence
  Description of Artificial Sequence:  Nucleic Acid
  misc_feature: oligonucleotide substrate
ggccaagcgcugugggc

SEQ ID NO: 6737 - RNA, 17 nt, Artificial Sequence
  Description of Artificial Sequence:  Nucleic Acid
  misc_feature: oligonucleotide substrate
caagcgcugugggcauc

SEQ ID NO: 6738 - RNA, 17 nt, Artificial Sequence
  Description of Artificial Sequence:  Nucleic Acid
  misc_feature: oligonucleotide substrate
cgcugugggcauccgga

SEQ ID NO: 6739 - RNA, 17 nt, Artificial Sequence
  Description of Artificial Sequence:  Nucleic Acid
  misc_feature: oligonucleotide substrate
cugugggcauccggacg

SEQ ID NO: 6740 - RNA, 17 nt, Artificial Sequence
  Description of Artificial Sequence:  Nucleic Acid
  misc_feature: oligonucleotide substrate
gcauccggacgaguuga

SEQ ID NO: 6741 - RNA, 17 nt, Artificial Sequence
  Description of Artificial Sequence:  Nucleic Acid
  misc_feature: oligonucleotide substrate
ccggacgaguugaaccu

SEQ ID NO: 6742 - RNA, 17 nt, Artificial Sequence
  Description of Artificial Sequence:  Nucleic Acid
  misc_feature: oligonucleotide substrate
cgaguugaaccugugug

SEQ ID NO: 6743 - RNA, 17 nt, Artificial Sequence
  Description of Artificial Sequence:  Nucleic Acid
  misc_feature: oligonucleotide substrate
uugaaccugugugcaua

SEQ ID NO: 6744 - RNA, 17 nt, Artificial Sequence
  Description of Artificial Sequence:  Nucleic Acid
  misc_feature: oligonucleotide substrate
gaaccugugugcauaga

SEQ ID NO: 6745 - RNA, 17 nt, Artificial Sequence
  Description of Artificial Sequence:  Nucleic Acid
  misc_feature: oligonucleotide substrate
accugugugcauagaac

SEQ ID NO: 6746 - RNA, 17 nt, Artificial Sequence
  Description of Artificial Sequence:  Nucleic Acid
  misc_feature: oligonucleotide substrate
cugugugcauagaacag

SEQ ID NO: 6747 - RNA, 17 nt, Artificial Sequence
  Description of Artificial Sequence:  Nucleic Acid
  misc_feature: oligonucleotide substrate
ugcauagaacagugcag

SEQ ID NO: 6748 - RNA, 17 nt, Artificial Sequence
  Description of Artificial Sequence:  Nucleic Acid
  misc_feature: oligonucleotide substrate
auagaacagugcagcaa

SEQ ID NO: 6749 - RNA, 17 nt, Artificial Sequence
  Description of Artificial Sequence:  Nucleic Acid
  misc_feature: oligonucleotide substrate
agaacagugcagcaaug

SEQ ID NO: 6750 - RNA, 17 nt, Artificial Sequence
  Description of Artificial Sequence:  Nucleic Acid
  misc_feature: oligonucleotide substrate
acagugcagcaaugaac

SEQ ID NO: 6751 - RNA, 17 nt, Artificial Sequence
  Description of Artificial Sequence:  Nucleic Acid
  misc_feature: oligonucleotide substrate
gugcagcaaugaacccg

SEQ ID NO: 6752 - RNA, 17 nt, Artificial Sequence
  Description of Artificial Sequence:  Nucleic Acid
  misc_feature: oligonucleotide substrate
agcaaugaacccgguuu

SEQ ID NO: 6753 - RNA, 17 nt, Artificial Sequence
  Description of Artificial Sequence:  Nucleic Acid
  misc_feature: oligonucleotide substrate
ugaacccgguuuggagg

SEQ ID NO: 6754 - RNA, 17 nt, Artificial Sequence
  Description of Artificial Sequence:  Nucleic Acid
  misc_feature: oligonucleotide substrate
uggagggagucauugca

SEQ ID NO: 6755 - RNA, 17 nt, Artificial Sequence
  Description of Artificial Sequence:  Nucleic Acid
  misc_feature: oligonucleotide substrate
agggagucauugcaguu

SEQ ID NO: 6756 - RNA, 17 nt, Artificial Sequence
  Description of Artificial Sequence:  Nucleic Acid
  misc_feature: oligonucleotide substrate
gagucauugcaguucag

SEQ ID NO: 6757 - RNA, 17 nt, Artificial Sequence
  Description of Artificial Sequence:  Nucleic Acid
  misc_feature: oligonucleotide substrate
ucauugcaguucagggc

SEQ ID NO: 6758 - RNA, 17 nt, Artificial Sequence
  Description of Artificial Sequence:  Nucleic Acid
  misc_feature: oligonucleotide substrate
aguucagggcaguccug

SEQ ID NO: 6759 - RNA, 17 nt, Artificial Sequence
  Description of Artificial Sequence:  Nucleic Acid
  misc_feature: oligonucleotide substrate
ucagggcaguccuguua

SEQ ID NO: 6760 - RNA, 17 nt, Artificial Sequence
  Description of Artificial Sequence:  Nucleic Acid
  misc_feature: oligonucleotide substrate
gcaguccuguuaaugug

SEQ ID NO: 6761 - RNA, 17 nt, Artificial Sequence
  Description of Artificial Sequence:  Nucleic Acid
  misc_feature: oligonucleotide substrate
uccuguuaaugugccag

SEQ ID NO: 6762 - RNA, 17 nt, Artificial Sequence
  Description of Artificial Sequence:  Nucleic Acid
  misc_feature: oligonucleotide substrate
cuguuaaugugccagcu

SEQ ID NO: 6763 - RNA, 17 nt, Artificial Sequence
  Description of Artificial Sequence:  Nucleic Acid
  misc_feature: oligonucleotide substrate
guuaaugugccagcugc

SEQ ID NO: 6764 - RNA, 17 nt, Artificial Sequence
  Description of Artificial Sequence:  Nucleic Acid
  misc_feature: oligonucleotide substrate
augugccagcugccguu

SEQ ID NO: 6765 - RNA, 17 nt, Artificial Sequence
  Description of Artificial Sequence:  Nucleic Acid
  misc_feature: oligonucleotide substrate
ugccagcugccguuggu

SEQ ID NO: 6766 - RNA, 17 nt, Artificial Sequence
  Description of Artificial Sequence:  Nucleic Acid
  misc_feature: oligonucleotide substrate
cagcugccguugguguu

SEQ ID NO: 6767 - RNA, 17 nt, Artificial Sequence
  Description of Artificial Sequence:  Nucleic Acid
  misc_feature: oligonucleotide substrate
ugccguugguguuaaua

SEQ ID NO: 6768 - RNA, 17 nt, Artificial Sequence
  Description of Artificial Sequence:  Nucleic Acid
  misc_feature: oligonucleotide substrate
ccguugguguuaauaag

SEQ ID NO: 6769 - RNA, 17 nt, Artificial Sequence
  Description of Artificial Sequence:  Nucleic Acid
  misc_feature: oligonucleotide substrate
ugguguuaauaagcugg

SEQ ID NO: 6770 - RNA, 17 nt, Artificial Sequence
  Description of Artificial Sequence:  Nucleic Acid
  misc_feature: oligonucleotide substrate
guuaauaagcuggauau

SEQ ID NO: 6771 - RNA, 17 nt, Artificial Sequence
  Description of Artificial Sequence:  Nucleic Acid
  misc_feature: oligonucleotide substrate
uaagcuggauauucuga

SEQ ID NO: 6772 - RNA, 17 nt, Artificial Sequence
  Description of Artificial Sequence:  Nucleic Acid
  misc_feature: oligonucleotide substrate
agcuggauauucugaga

SEQ ID NO: 6773 - RNA, 17 nt, Artificial Sequence
  Description of Artificial Sequence:  Nucleic Acid
  misc_feature: oligonucleotide substrate
auucugagaugcuccag

SEQ ID NO: 6774 - RNA, 17 nt, Artificial Sequence
  Description of Artificial Sequence:  Nucleic Acid
  misc_feature: oligonucleotide substrate
ucugagaugcuccagau

SEQ ID NO: 6775 - RNA, 17 nt, Artificial Sequence
  Description of Artificial Sequence:  Nucleic Acid
  misc_feature: oligonucleotide substrate
ugcuccagauguaaaga

SEQ ID NO: 6776 - RNA, 17 nt, Artificial Sequence
  Description of Artificial Sequence:  Nucleic Acid
  misc_feature: oligonucleotide substrate
cuccagauguaaagagg

SEQ ID NO: 6777 - RNA, 17 nt, Artificial Sequence
  Description of Artificial Sequence:  Nucleic Acid
  misc_feature: oligonucleotide substrate
aaagagggaugccaccc

SEQ ID NO: 6778 - RNA, 17 nt, Artificial Sequence
  Description of Artificial Sequence:  Nucleic Acid
  misc_feature: oligonucleotide substrate
agagggaugccacccua

SEQ ID NO: 6779 - RNA, 17 nt, Artificial Sequence
  Description of Artificial Sequence:  Nucleic Acid
  misc_feature: oligonucleotide substrate
gggaugccacccuacua

SEQ ID NO: 6780 - RNA, 17 nt, Artificial Sequence
  Description of Artificial Sequence:  Nucleic Acid
  misc_feature: oligonucleotide substrate
gccacccuacuaguggu

SEQ ID NO: 6781 - RNA, 17 nt, Artificial Sequence
  Description of Artificial Sequence:  Nucleic Acid
  misc_feature: oligonucleotide substrate
cccuacuaguggugugg

SEQ ID NO: 6782 - RNA, 17 nt, Artificial Sequence
  Description of Artificial Sequence:  Nucleic Acid
  misc_feature: oligonucleotide substrate
uacuagugguguggccc

SEQ ID NO: 6783 - RNA, 17 nt, Artificial Sequence
  Description of Artificial Sequence:  Nucleic Acid
  misc_feature: oligonucleotide substrate
cuagugguguggcccug

SEQ ID NO: 6784 - RNA, 17 nt, Artificial Sequence
  Description of Artificial Sequence:  Nucleic Acid
  misc_feature: oligonucleotide substrate
gugguguggcccugcgc

SEQ ID NO: 6785 - RNA, 17 nt, Artificial Sequence
  Description of Artificial Sequence:  Nucleic Acid
  misc_feature: oligonucleotide substrate
guggcccugcgcccccc

SEQ ID NO: 6786 - RNA, 17 nt, Artificial Sequence
  Description of Artificial Sequence:  Nucleic Acid
  misc_feature: oligonucleotide substrate
ggcccugcgcccccccu

SEQ ID NO: 6787 - RNA, 17 nt, Artificial Sequence
  Description of Artificial Sequence:  Nucleic Acid
  misc_feature: oligonucleotide substrate
cccccccugucguguag

SEQ ID NO: 6788 - RNA, 17 nt, Artificial Sequence
  Description of Artificial Sequence:  Nucleic Acid
  misc_feature: oligonucleotide substrate
ccccugucguguaggug

SEQ ID NO: 6789 - RNA, 17 nt, Artificial Sequence
  Description of Artificial Sequence:  Nucleic Acid
  misc_feature: oligonucleotide substrate
ccugucguguagguguc

SEQ ID NO: 6790 - RNA, 17 nt, Artificial Sequence
  Description of Artificial Sequence:  Nucleic Acid
  misc_feature: oligonucleotide substrate
ucguguagguguccccg

SEQ ID NO: 6791 - RNA, 17 nt, Artificial Sequence
  Description of Artificial Sequence:  Nucleic Acid
  misc_feature: oligonucleotide substrate
guguagguguccccguc

SEQ ID NO: 6792 - RNA, 17 nt, Artificial Sequence
  Description of Artificial Sequence:  Nucleic Acid
  misc_feature: oligonucleotide substrate
guguccccgucaacgcc

SEQ ID NO: 6793 - RNA, 17 nt, Artificial Sequence
  Description of Artificial Sequence:  Nucleic Acid
  misc_feature: oligonucleotide substrate
ccccgucaacgccggca

SEQ ID NO: 6794 - RNA, 17 nt, Artificial Sequence
  Description of Artificial Sequence:  Nucleic Acid
  misc_feature: oligonucleotide substrate
ccgucaacgccggcaaa

SEQ ID NO: 6795 - RNA, 17 nt, Artificial Sequence
  Description of Artificial Sequence:  Nucleic Acid
  misc_feature: oligonucleotide substrate
caacgccggcaaagagu

SEQ ID NO: 6796 - RNA, 17 nt, Artificial Sequence
  Description of Artificial Sequence:  Nucleic Acid
  misc_feature: oligonucleotide substrate
ggcaaagaguagcauca

SEQ ID NO: 6797 - RNA, 17 nt, Artificial Sequence
  Description of Artificial Sequence:  Nucleic Acid
  misc_feature: oligonucleotide substrate
aaagaguagcaucacaa

SEQ ID NO: 6798 - RNA, 17 nt, Artificial Sequence
  Description of Artificial Sequence:  Nucleic Acid
  misc_feature: oligonucleotide substrate
agaguagcaucacaauc

SEQ ID NO: 6799 - RNA, 17 nt, Artificial Sequence
  Description of Artificial Sequence:  Nucleic Acid
  misc_feature: oligonucleotide substrate
guagcaucacaaucaac

SEQ ID NO: 6800 - RNA, 17 nt, Artificial Sequence
  Description of Artificial Sequence:  Nucleic Acid
  misc_feature: oligonucleotide substrate
gcaucacaaucaacacc

SEQ ID NO: 6801 - RNA, 17 nt, Artificial Sequence
  Description of Artificial Sequence:  Nucleic Acid
  misc_feature: oligonucleotide substrate
cacaaucaacaccuuag

SEQ ID NO: 6802 - RNA, 17 nt, Artificial Sequence
  Description of Artificial Sequence:  Nucleic Acid
  misc_feature: oligonucleotide substrate
caaucaacaccuuagcc

SEQ ID NO: 6803 - RNA, 17 nt, Artificial Sequence
  Description of Artificial Sequence:  Nucleic Acid
  misc_feature: oligonucleotide substrate
acaccuuagcccaguuc

SEQ ID NO: 6804 - RNA, 17 nt, Artificial Sequence
  Description of Artificial Sequence:  Nucleic Acid
  misc_feature: oligonucleotide substrate
uuagcccaguuccccac

SEQ ID NO: 6805 - RNA, 17 nt, Artificial Sequence
  Description of Artificial Sequence:  Nucleic Acid
  misc_feature: oligonucleotide substrate
aguuccccaccauggaa

SEQ ID NO: 6806 - RNA, 17 nt, Artificial Sequence
  Description of Artificial Sequence:  Nucleic Acid
  misc_feature: oligonucleotide substrate
uccccaccauggaauaa

SEQ ID NO: 6807 - RNA, 17 nt, Artificial Sequence
  Description of Artificial Sequence:  Nucleic Acid
  misc_feature: oligonucleotide substrate
accauggaauaauaggc

SEQ ID NO: 6808 - RNA, 17 nt, Artificial Sequence
  Description of Artificial Sequence:  Nucleic Acid
  misc_feature: oligonucleotide substrate
auggaauaauaggcaag

SEQ ID NO: 6809 - RNA, 17 nt, Artificial Sequence
  Description of Artificial Sequence:  Nucleic Acid
  misc_feature: oligonucleotide substrate
aauaauaggcaaggccc

SEQ ID NO: 6810 - RNA, 17 nt, Artificial Sequence
  Description of Artificial Sequence:  Nucleic Acid
  misc_feature: oligonucleotide substrate
uaggcaaggcccgccag

SEQ ID NO: 6811 - RNA, 17 nt, Artificial Sequence
  Description of Artificial Sequence:  Nucleic Acid
  misc_feature: oligonucleotide substrate
caaggcccgccaggacu

SEQ ID NO: 6812 - RNA, 17 nt, Artificial Sequence
  Description of Artificial Sequence:  Nucleic Acid
  misc_feature: oligonucleotide substrate
ccgccaggacuccccag

SEQ ID NO: 6813 - RNA, 17 nt, Artificial Sequence
  Description of Artificial Sequence:  Nucleic Acid
  misc_feature: oligonucleotide substrate
acuccccagugggcccc

SEQ ID NO: 6814 - RNA, 17 nt, Artificial Sequence
  Description of Artificial Sequence:  Nucleic Acid
  misc_feature: oligonucleotide substrate
cccagugggcccccgcc

SEQ ID NO: 6815 - RNA, 17 nt, Artificial Sequence
  Description of Artificial Sequence:  Nucleic Acid
  misc_feature: oligonucleotide substrate
gggcccccgccaccaug

SEQ ID NO: 6816 - RNA, 17 nt, Artificial Sequence
  Description of Artificial Sequence:  Nucleic Acid
  misc_feature: oligonucleotide substrate
cccccgccaccaugucc

SEQ ID NO: 6817 - RNA, 17 nt, Artificial Sequence
  Description of Artificial Sequence:  Nucleic Acid
  misc_feature: oligonucleotide substrate
ccgccaccauguccacg

SEQ ID NO: 6818 - RNA, 17 nt, Artificial Sequence
  Description of Artificial Sequence:  Nucleic Acid
  misc_feature: oligonucleotide substrate
gccaccauguccacgac

SEQ ID NO: 6819 - RNA, 17 nt, Artificial Sequence
  Description of Artificial Sequence:  Nucleic Acid
  misc_feature: oligonucleotide substrate
ccauguccacgacggcu

SEQ ID NO: 6820 - RNA, 17 nt, Artificial Sequence
  Description of Artificial Sequence:  Nucleic Acid
  misc_feature: oligonucleotide substrate
uguccacgacggcuugu

SEQ ID NO: 6821 - RNA, 17 nt, Artificial Sequence
  Description of Artificial Sequence:  Nucleic Acid
  misc_feature: oligonucleotide substrate
ccacgacggcuuguggg

SEQ ID NO: 6822 - RNA, 17 nt, Artificial Sequence
  Description of Artificial Sequence:  Nucleic Acid
  misc_feature: oligonucleotide substrate
gacggcuugugggaucc

SEQ ID NO: 6823 - RNA, 17 nt, Artificial Sequence
  Description of Artificial Sequence:  Nucleic Acid
  misc_feature: oligonucleotide substrate
cuugugggauccggagc

SEQ ID NO: 6824 - RNA, 17 nt, Artificial Sequence
  Description of Artificial Sequence:  Nucleic Acid
  misc_feature: oligonucleotide substrate
gauccggagcaacugcg

SEQ ID NO: 6825 - RNA, 17 nt, Artificial Sequence
  Description of Artificial Sequence:  Nucleic Acid
  misc_feature: oligonucleotide substrate
ccggagcaacugcgaua

SEQ ID NO: 6826 - RNA, 17 nt, Artificial Sequence
  Description of Artificial Sequence:  Nucleic Acid
  misc_feature: oligonucleotide substrate
gagcaacugcgauacca

SEQ ID NO: 6827 - RNA, 17 nt, Artificial Sequence
  Description of Artificial Sequence:  Nucleic Acid
  misc_feature: oligonucleotide substrate
caacugcgauaccacua

SEQ ID NO: 6828 - RNA, 17 nt, Artificial Sequence
  Description of Artificial Sequence:  Nucleic Acid
  misc_feature: oligonucleotide substrate
acugcgauaccacuagg

SEQ ID NO: 6829 - RNA, 17 nt, Artificial Sequence
  Description of Artificial Sequence:  Nucleic Acid
  misc_feature: oligonucleotide substrate
gcgauaccacuagggcu

SEQ ID NO: 6830 - RNA, 17 nt, Artificial Sequence
  Description of Artificial Sequence:  Nucleic Acid
  misc_feature: oligonucleotide substrate
ccacuagggcuguugua

SEQ ID NO: 6831 - RNA, 17 nt, Artificial Sequence
  Description of Artificial Sequence:  Nucleic Acid
  misc_feature: oligonucleotide substrate
cuagggcuguuguaggu

SEQ ID NO: 6832 - RNA, 17 nt, Artificial Sequence
  Description of Artificial Sequence:  Nucleic Acid
  misc_feature: oligonucleotide substrate
gggcuguuguaggugac

SEQ ID NO: 6833 - RNA, 17 nt, Artificial Sequence
  Description of Artificial Sequence:  Nucleic Acid
  misc_feature: oligonucleotide substrate
uguuguaggugaccaau

SEQ ID NO: 6834 - RNA, 17 nt, Artificial Sequence
  Description of Artificial Sequence:  Nucleic Acid
  misc_feature: oligonucleotide substrate
uguaggugaccaauuca

SEQ ID NO: 6835 - RNA, 17 nt, Artificial Sequence
  Description of Artificial Sequence:  Nucleic Acid
  misc_feature: oligonucleotide substrate
ggugaccaauucaucau

SEQ ID NO: 6836 - RNA, 17 nt, Artificial Sequence
  Description of Artificial Sequence:  Nucleic Acid
  misc_feature: oligonucleotide substrate
accaauucaucaucaua

SEQ ID NO: 6837 - RNA, 17 nt, Artificial Sequence
  Description of Artificial Sequence:  Nucleic Acid
  misc_feature: oligonucleotide substrate
aauucaucaucauaucc

SEQ ID NO: 6838 - RNA, 17 nt, Artificial Sequence
  Description of Artificial Sequence:  Nucleic Acid
  misc_feature: oligonucleotide substrate
ucaucaucauaucccaa

SEQ ID NO: 6839 - RNA, 17 nt, Artificial Sequence
  Description of Artificial Sequence:  Nucleic Acid
  misc_feature: oligonucleotide substrate
aucaucauaucccaagc

SEQ ID NO: 6840 - RNA, 17 nt, Artificial Sequence
  Description of Artificial Sequence:  Nucleic Acid
  misc_feature: oligonucleotide substrate
uaucccaagccaugcga

SEQ ID NO: 6841 - RNA, 17 nt, Artificial Sequence
  Description of Artificial Sequence:  Nucleic Acid
  misc_feature: oligonucleotide substrate
cccaagccaugcgaugg

SEQ ID NO: 6842 - RNA, 17 nt, Artificial Sequence
  Description of Artificial Sequence:  Nucleic Acid
  misc_feature: oligonucleotide substrate
caagccaugcgauggcc

SEQ ID NO: 6843 - RNA, 17 nt, Artificial Sequence
  Description of Artificial Sequence:  Nucleic Acid
  misc_feature: oligonucleotide substrate
gccaugcgauggccuga

SEQ ID NO: 6844 - RNA, 17 nt, Artificial Sequence
  Description of Artificial Sequence:  Nucleic Acid
  misc_feature: oligonucleotide substrate
augcgauggccugauac

SEQ ID NO: 6845 - RNA, 17 nt, Artificial Sequence
  Description of Artificial Sequence:  Nucleic Acid
  misc_feature: oligonucleotide substrate
auggccugauacguggc

SEQ ID NO: 6846 - RNA, 17 nt, Artificial Sequence
  Description of Artificial Sequence:  Nucleic Acid
  misc_feature: oligonucleotide substrate
ggccugauacguggccg

SEQ ID NO: 6847 - RNA, 17 nt, Artificial Sequence
  Description of Artificial Sequence:  Nucleic Acid
  misc_feature: oligonucleotide substrate
ccugauacguggccggg

SEQ ID NO: 6848 - RNA, 17 nt, Artificial Sequence
  Description of Artificial Sequence:  Nucleic Acid
  misc_feature: oligonucleotide substrate
gauacguggccgggaua

SEQ ID NO: 6849 - RNA, 17 nt, Artificial Sequence
  Description of Artificial Sequence:  Nucleic Acid
  misc_feature: oligonucleotide substrate
uggccgggauagaucga

SEQ ID NO: 6850 - RNA, 17 nt, Artificial Sequence
  Description of Artificial Sequence:  Nucleic Acid
  misc_feature: oligonucleotide substrate
cgggauagaucgagcaa

SEQ ID NO: 6851 - RNA, 17 nt, Artificial Sequence
  Description of Artificial Sequence:  Nucleic Acid
  misc_feature: oligonucleotide substrate
uagaucgagcaauuaca

SEQ ID NO: 6852 - RNA, 17 nt, Artificial Sequence
  Description of Artificial Sequence:  Nucleic Acid
  misc_feature: oligonucleotide substrate
aucgagcaauuacaguc

SEQ ID NO: 6853 - RNA, 17 nt, Artificial Sequence
  Description of Artificial Sequence:  Nucleic Acid
  misc_feature: oligonucleotide substrate
gagcaauuacaguccug

SEQ ID NO: 6854 - RNA, 17 nt, Artificial Sequence
  Description of Artificial Sequence:  Nucleic Acid
  misc_feature: oligonucleotide substrate
caauuacaguccuguac

SEQ ID NO: 6855 - RNA, 17 nt, Artificial Sequence
  Description of Artificial Sequence:  Nucleic Acid
  misc_feature: oligonucleotide substrate
acaguccuguacugucu

SEQ ID NO: 6856 - RNA, 17 nt, Artificial Sequence
  Description of Artificial Sequence:  Nucleic Acid
  misc_feature: oligonucleotide substrate
aguccuguacugucuca

SEQ ID NO: 6857 - RNA, 17 nt, Artificial Sequence
  Description of Artificial Sequence:  Nucleic Acid
  misc_feature: oligonucleotide substrate
ccuguacugucucauac

SEQ ID NO: 6858 - RNA, 17 nt, Artificial Sequence
  Description of Artificial Sequence:  Nucleic Acid
  misc_feature: oligonucleotide substrate
acugucucauaccggcg

SEQ ID NO: 6859 - RNA, 17 nt, Artificial Sequence
  Description of Artificial Sequence:  Nucleic Acid
  misc_feature: oligonucleotide substrate
ugucucauaccggcgag

SEQ ID NO: 6860 - RNA, 17 nt, Artificial Sequence
  Description of Artificial Sequence:  Nucleic Acid
  misc_feature: oligonucleotide substrate
ucauaccggcgaggcga

SEQ ID NO: 6861 - RNA, 17 nt, Artificial Sequence
  Description of Artificial Sequence:  Nucleic Acid
  misc_feature: oligonucleotide substrate
ccggcgaggcgagaagg

SEQ ID NO: 6862 - RNA, 17 nt, Artificial Sequence
  Description of Artificial Sequence:  Nucleic Acid
  misc_feature: oligonucleotide substrate
gcgagaaggugaacagc

SEQ ID NO: 6863 - RNA, 17 nt, Artificial Sequence
  Description of Artificial Sequence:  Nucleic Acid
  misc_feature: oligonucleotide substrate
gaaggugaacagcugag

SEQ ID NO: 6864 - RNA, 17 nt, Artificial Sequence
  Description of Artificial Sequence:  Nucleic Acid
  misc_feature: oligonucleotide substrate
ggugaacagcugagaga

SEQ ID NO: 6865 - RNA, 17 nt, Artificial Sequence
  Description of Artificial Sequence:  Nucleic Acid
  misc_feature: oligonucleotide substrate
gcugagagacgaggaag

SEQ ID NO: 6866 - RNA, 17 nt, Artificial Sequence
  Description of Artificial Sequence:  Nucleic Acid
  misc_feature: oligonucleotide substrate
cgaggaagacagauccg

SEQ ID NO: 6867 - RNA, 17 nt, Artificial Sequence
  Description of Artificial Sequence:  Nucleic Acid
  misc_feature: oligonucleotide substrate
gaagacagauccgcaga

SEQ ID NO: 6868 - RNA, 17 nt, Artificial Sequence
  Description of Artificial Sequence:  Nucleic Acid
  misc_feature: oligonucleotide substrate
acagauccgcagagauc

SEQ ID NO: 6869 - RNA, 17 nt, Artificial Sequence
  Description of Artificial Sequence:  Nucleic Acid
  misc_feature: oligonucleotide substrate
ccgcagagaucccccac

SEQ ID NO: 6870 - RNA, 17 nt, Artificial Sequence
  Description of Artificial Sequence:  Nucleic Acid
  misc_feature: oligonucleotide substrate
gaucccccacguacaua

SEQ ID NO: 6871 - RNA, 17 nt, Artificial Sequence
  Description of Artificial Sequence:  Nucleic Acid
  misc_feature: oligonucleotide substrate
ucccccacguacauagc

SEQ ID NO: 6872 - RNA, 17 nt, Artificial Sequence
  Description of Artificial Sequence:  Nucleic Acid
  misc_feature: oligonucleotide substrate
ccccacguacauagcag

SEQ ID NO: 6873 - RNA, 17 nt, Artificial Sequence
  Description of Artificial Sequence:  Nucleic Acid
  misc_feature: oligonucleotide substrate
ccacguacauagcagag

SEQ ID NO: 6874 - RNA, 17 nt, Artificial Sequence
  Description of Artificial Sequence:  Nucleic Acid
  misc_feature: oligonucleotide substrate
cguacauagcagagcag

SEQ ID NO: 6875 - RNA, 17 nt, Artificial Sequence
  Description of Artificial Sequence:  Nucleic Acid
  misc_feature: oligonucleotide substrate
auagcagagcagaaagc

SEQ ID NO: 6876 - RNA, 17 nt, Artificial Sequence
  Description of Artificial Sequence:  Nucleic Acid
  misc_feature: oligonucleotide substrate
agcagaaagcagccgcc

SEQ ID NO: 6877 - RNA, 17 nt, Artificial Sequence
  Description of Artificial Sequence:  Nucleic Acid
  misc_feature: oligonucleotide substrate
agaaagcagccgcccca

SEQ ID NO: 6878 - RNA, 17 nt, Artificial Sequence
  Description of Artificial Sequence:  Nucleic Acid
  misc_feature: oligonucleotide substrate
aagcagccgccccaacg

SEQ ID NO: 6879 - RNA, 17 nt, Artificial Sequence
  Description of Artificial Sequence:  Nucleic Acid
  misc_feature: oligonucleotide substrate
ccgccccaacgagcaaa

SEQ ID NO: 6880 - RNA, 17 nt, Artificial Sequence
  Description of Artificial Sequence:  Nucleic Acid
  misc_feature: oligonucleotide substrate
cccaacgagcaaaucga

SEQ ID NO: 6881 - RNA, 17 nt, Artificial Sequence
  Description of Artificial Sequence:  Nucleic Acid
  misc_feature: oligonucleotide substrate
acgagcaaaucgacgug

SEQ ID NO: 6882 - RNA, 17 nt, Artificial Sequence
  Description of Artificial Sequence:  Nucleic Acid
  misc_feature: oligonucleotide substrate
gcaaaucgacgugacgc

SEQ ID NO: 6883 - RNA, 17 nt, Artificial Sequence
  Description of Artificial Sequence:  Nucleic Acid
  misc_feature: oligonucleotide substrate
aaaucgacgugacgccg

SEQ ID NO: 6884 - RNA, 17 nt, Artificial Sequence
  Description of Artificial Sequence:  Nucleic Acid
  misc_feature: oligonucleotide substrate
ucgacgugacgccguau

SEQ ID NO: 6885 - RNA, 17 nt, Artificial Sequence
  Description of Artificial Sequence:  Nucleic Acid
  misc_feature: oligonucleotide substrate
gacgugacgccguaucg

SEQ ID NO: 6886 - RNA, 17 nt, Artificial Sequence
  Description of Artificial Sequence:  Nucleic Acid
  misc_feature: oligonucleotide substrate
gugacgccguaucgucg

SEQ ID NO: 6887 - RNA, 17 nt, Artificial Sequence
  Description of Artificial Sequence:  Nucleic Acid
  misc_feature: oligonucleotide substrate
gacgccguaucgucgua

SEQ ID NO: 6888 - RNA, 17 nt, Artificial Sequence
  Description of Artificial Sequence:  Nucleic Acid
  misc_feature: oligonucleotide substrate
gccguaucgucguagug

SEQ ID NO: 6889 - RNA, 17 nt, Artificial Sequence
  Description of Artificial Sequence:  Nucleic Acid
  misc_feature: oligonucleotide substrate
guaucgucguagugggg

SEQ ID NO: 6890 - RNA, 17 nt, Artificial Sequence
  Description of Artificial Sequence:  Nucleic Acid
  misc_feature: oligonucleotide substrate
ucgucguaguggggaug

SEQ ID NO: 6891 - RNA, 17 nt, Artificial Sequence
  Description of Artificial Sequence:  Nucleic Acid
  misc_feature: oligonucleotide substrate
uaguggggaugcuggca

SEQ ID NO: 6892 - RNA, 17 nt, Artificial Sequence
  Description of Artificial Sequence:  Nucleic Acid
  misc_feature: oligonucleotide substrate
guggggaugcuggcauu

SEQ ID NO: 6893 - RNA, 17 nt, Artificial Sequence
  Description of Artificial Sequence:  Nucleic Acid
  misc_feature: oligonucleotide substrate
ggaugcuggcauuccug

SEQ ID NO: 6894 - RNA, 17 nt, Artificial Sequence
  Description of Artificial Sequence:  Nucleic Acid
  misc_feature: oligonucleotide substrate
augcuggcauuccuggc

SEQ ID NO: 6895 - RNA, 17 nt, Artificial Sequence
  Description of Artificial Sequence:  Nucleic Acid
  misc_feature: oligonucleotide substrate
cauuccuggccgcgagc

SEQ ID NO: 6896 - RNA, 17 nt, Artificial Sequence
  Description of Artificial Sequence:  Nucleic Acid
  misc_feature: oligonucleotide substrate
uccuggccgcgagcgug

SEQ ID NO: 6897 - RNA, 17 nt, Artificial Sequence
  Description of Artificial Sequence:  Nucleic Acid
  misc_feature: oligonucleotide substrate
ggccgcgagcgugggag

SEQ ID NO: 6898 - RNA, 17 nt, Artificial Sequence
  Description of Artificial Sequence:  Nucleic Acid
  misc_feature: oligonucleotide substrate
ccgcgagcgugggagug

SEQ ID NO: 6899 - RNA, 17 nt, Artificial Sequence
  Description of Artificial Sequence:  Nucleic Acid
  misc_feature: oligonucleotide substrate
gcgugggagugagcgcu

SEQ ID NO: 6900 - RNA, 17 nt, Artificial Sequence
  Description of Artificial Sequence:  Nucleic Acid
  misc_feature: oligonucleotide substrate
gggagugagcgcuaccc

SEQ ID NO: 6901 - RNA, 17 nt, Artificial Sequence
  Description of Artificial Sequence:  Nucleic Acid
  misc_feature: oligonucleotide substrate
gagugagcgcuacccag

SEQ ID NO: 6902 - RNA, 17 nt, Artificial Sequence
  Description of Artificial Sequence:  Nucleic Acid
  misc_feature: oligonucleotide substrate
ugagcgcuacccagcag

SEQ ID NO: 6903 - RNA, 17 nt, Artificial Sequence
  Description of Artificial Sequence:  Nucleic Acid
  misc_feature: oligonucleotide substrate
gcuacccagcagcggga

SEQ ID NO: 6904 - RNA, 17 nt, Artificial Sequence
  Description of Artificial Sequence:  Nucleic Acid
  misc_feature: oligonucleotide substrate
acccagcagcgggagga

SEQ ID NO: 6905 - RNA, 17 nt, Artificial Sequence
  Description of Artificial Sequence:  Nucleic Acid
  misc_feature: oligonucleotide substrate
cgggaggaguuguucuc

SEQ ID NO: 6906 - RNA, 17 nt, Artificial Sequence
  Description of Artificial Sequence:  Nucleic Acid
  misc_feature: oligonucleotide substrate
gaggaguuguucucccg

SEQ ID NO: 6907 - RNA, 17 nt, Artificial Sequence
  Description of Artificial Sequence:  Nucleic Acid
  misc_feature: oligonucleotide substrate
ucucccgaacgcagggc

SEQ ID NO: 6908 - RNA, 17 nt, Artificial Sequence
  Description of Artificial Sequence:  Nucleic Acid
  misc_feature: oligonucleotide substrate
ucccgaacgcagggcac

SEQ ID NO: 6909 - RNA, 17 nt, Artificial Sequence
  Description of Artificial Sequence:  Nucleic Acid
  misc_feature: oligonucleotide substrate
aacgcagggcacgcacc

SEQ ID NO: 6910 - RNA, 17 nt, Artificial Sequence
  Description of Artificial Sequence:  Nucleic Acid
  misc_feature: oligonucleotide substrate
cgcagggcacgcacccc

SEQ ID NO: 6911 - RNA, 17 nt, Artificial Sequence
  Description of Artificial Sequence:  Nucleic Acid
  misc_feature: oligonucleotide substrate
cagggcacgcaccccgg

SEQ ID NO: 6912 - RNA, 17 nt, Artificial Sequence
  Description of Artificial Sequence:  Nucleic Acid
  misc_feature: oligonucleotide substrate
gggcacgcaccccgggg

SEQ ID NO: 6913 - RNA, 17 nt, Artificial Sequence
  Description of Artificial Sequence:  Nucleic Acid
  misc_feature: oligonucleotide substrate
accccggggugugcaug

SEQ ID NO: 6914 - RNA, 17 nt, Artificial Sequence
  Description of Artificial Sequence:  Nucleic Acid
  misc_feature: oligonucleotide substrate
cccggggugugcaugau

SEQ ID NO: 6915 - RNA, 17 nt, Artificial Sequence
  Description of Artificial Sequence:  Nucleic Acid
  misc_feature: oligonucleotide substrate
cggggugugcaugauca

SEQ ID NO: 6916 - RNA, 17 nt, Artificial Sequence
  Description of Artificial Sequence:  Nucleic Acid
  misc_feature: oligonucleotide substrate
gggugugcaugaucaug

SEQ ID NO: 6917 - RNA, 17 nt, Artificial Sequence
  Description of Artificial Sequence:  Nucleic Acid
  misc_feature: oligonucleotide substrate
ugugcaugaucaugucc

SEQ ID NO: 6918 - RNA, 17 nt, Artificial Sequence
  Description of Artificial Sequence:  Nucleic Acid
  misc_feature: oligonucleotide substrate
gcaugaucauguccucu

SEQ ID NO: 6919 - RNA, 17 nt, Artificial Sequence
  Description of Artificial Sequence:  Nucleic Acid
  misc_feature: oligonucleotide substrate
augaucauguccucugc

SEQ ID NO: 6920 - RNA, 17 nt, Artificial Sequence
  Description of Artificial Sequence:  Nucleic Acid
  misc_feature: oligonucleotide substrate
uguccucugccucauac

SEQ ID NO: 6921 - RNA, 17 nt, Artificial Sequence
  Description of Artificial Sequence:  Nucleic Acid
  misc_feature: oligonucleotide substrate
ucugccucauacacaau

SEQ ID NO: 6922 - RNA, 17 nt, Artificial Sequence
  Description of Artificial Sequence:  Nucleic Acid
  misc_feature: oligonucleotide substrate
ugccucauacacaaugc

SEQ ID NO: 6923 - RNA, 17 nt, Artificial Sequence
  Description of Artificial Sequence:  Nucleic Acid
  misc_feature: oligonucleotide substrate
ccucauacacaaugcuu

SEQ ID NO: 6924 - RNA, 17 nt, Artificial Sequence
  Description of Artificial Sequence:  Nucleic Acid
  misc_feature: oligonucleotide substrate
cauacacaaugcuugag

SEQ ID NO: 6925 - RNA, 17 nt, Artificial Sequence
  Description of Artificial Sequence:  Nucleic Acid
  misc_feature: oligonucleotide substrate
uacacaaugcuugaguu

SEQ ID NO: 6926 - RNA, 17 nt, Artificial Sequence
  Description of Artificial Sequence:  Nucleic Acid
  misc_feature: oligonucleotide substrate
augcuugaguuggagca

SEQ ID NO: 6927 - RNA, 17 nt, Artificial Sequence
  Description of Artificial Sequence:  Nucleic Acid
  misc_feature: oligonucleotide substrate
gaguuggagcaaucguu

SEQ ID NO: 6928 - RNA, 17 nt, Artificial Sequence
  Description of Artificial Sequence:  Nucleic Acid
  misc_feature: oligonucleotide substrate
uuggagcaaucguucgu

SEQ ID NO: 6929 - RNA, 17 nt, Artificial Sequence
  Description of Artificial Sequence:  Nucleic Acid
  misc_feature: oligonucleotide substrate
gagcaaucguucgugac

SEQ ID NO: 6930 - RNA, 17 nt, Artificial Sequence
  Description of Artificial Sequence:  Nucleic Acid
  misc_feature: oligonucleotide substrate
aaucguucgugacaugg

SEQ ID NO: 6931 - RNA, 17 nt, Artificial Sequence
  Description of Artificial Sequence:  Nucleic Acid
  misc_feature: oligonucleotide substrate
cguucgugacaugguac

SEQ ID NO: 6932 - RNA, 17 nt, Artificial Sequence
  Description of Artificial Sequence:  Nucleic Acid
  misc_feature: oligonucleotide substrate
uucgugacaugguacag

SEQ ID NO: 6933 - RNA, 17 nt, Artificial Sequence
  Description of Artificial Sequence:  Nucleic Acid
  misc_feature: oligonucleotide substrate
gugacaugguacagccc

SEQ ID NO: 6934 - RNA, 17 nt, Artificial Sequence
  Description of Artificial Sequence:  Nucleic Acid
  misc_feature: oligonucleotide substrate
gacaugguacagcccgg

SEQ ID NO: 6935 - RNA, 17 nt, Artificial Sequence
  Description of Artificial Sequence:  Nucleic Acid
  misc_feature: oligonucleotide substrate
augguacagcccggacg

SEQ ID NO: 6936 - RNA, 17 nt, Artificial Sequence
  Description of Artificial Sequence:  Nucleic Acid
  misc_feature: oligonucleotide substrate
cagcccggacgcguugc

SEQ ID NO: 6937 - RNA, 17 nt, Artificial Sequence
  Description of Artificial Sequence:  Nucleic Acid
  misc_feature: oligonucleotide substrate
gcccggacgcguugcac

SEQ ID NO: 6938 - RNA, 17 nt, Artificial Sequence
  Description of Artificial Sequence:  Nucleic Acid
  misc_feature: oligonucleotide substrate
ccggacgcguugcacac

SEQ ID NO: 6939 - RNA, 17 nt, Artificial Sequence
  Description of Artificial Sequence:  Nucleic Acid
  misc_feature: oligonucleotide substrate
gacgcguugcacaccuc

SEQ ID NO: 6940 - RNA, 17 nt, Artificial Sequence
  Description of Artificial Sequence:  Nucleic Acid
  misc_feature: oligonucleotide substrate
cgcguugcacaccucau

SEQ ID NO: 6941 - RNA, 17 nt, Artificial Sequence
  Description of Artificial Sequence:  Nucleic Acid
  misc_feature: oligonucleotide substrate
cguugcacaccucauaa

SEQ ID NO: 6942 - RNA, 17 nt, Artificial Sequence
  Description of Artificial Sequence:  Nucleic Acid
  misc_feature: oligonucleotide substrate
cacaccucauaagcgga

SEQ ID NO: 6943 - RNA, 17 nt, Artificial Sequence
  Description of Artificial Sequence:  Nucleic Acid
  misc_feature: oligonucleotide substrate
ccucauaagcggaggcu

SEQ ID NO: 6944 - RNA, 17 nt, Artificial Sequence
  Description of Artificial Sequence:  Nucleic Acid
  misc_feature: oligonucleotide substrate
aagcggaggcugggaug

SEQ ID NO: 6945 - RNA, 17 nt, Artificial Sequence
  Description of Artificial Sequence:  Nucleic Acid
  misc_feature: oligonucleotide substrate
aggcugggauggucaga

SEQ ID NO: 6946 - RNA, 17 nt, Artificial Sequence
  Description of Artificial Sequence:  Nucleic Acid
  misc_feature: oligonucleotide substrate
cugggauggucagacag

SEQ ID NO: 6947 - RNA, 17 nt, Artificial Sequence
  Description of Artificial Sequence:  Nucleic Acid
  misc_feature: oligonucleotide substrate
auggucagacagggcag

SEQ ID NO: 6948 - RNA, 17 nt, Artificial Sequence
  Description of Artificial Sequence:  Nucleic Acid
  misc_feature: oligonucleotide substrate
cagacagggcagcagag

SEQ ID NO: 6949 - RNA, 17 nt, Artificial Sequence
  Description of Artificial Sequence:  Nucleic Acid
  misc_feature: oligonucleotide substrate
acagggcagcagagcca

SEQ ID NO: 6950 - RNA, 17 nt, Artificial Sequence
  Description of Artificial Sequence:  Nucleic Acid
  misc_feature: oligonucleotide substrate
gcagcagagccaagagg

SEQ ID NO: 6951 - RNA, 17 nt, Artificial Sequence
  Description of Artificial Sequence:  Nucleic Acid
  misc_feature: oligonucleotide substrate
agaggaagauagagaaa

SEQ ID NO: 6952 - RNA, 17 nt, Artificial Sequence
  Description of Artificial Sequence:  Nucleic Acid
  misc_feature: oligonucleotide substrate
gagaaagagcaaccggg

SEQ ID NO: 6953 - RNA, 17 nt, Artificial Sequence
  Description of Artificial Sequence:  Nucleic Acid
  misc_feature: oligonucleotide substrate
aaagagcaaccgggcag

SEQ ID NO: 6954 - RNA, 17 nt, Artificial Sequence
  Description of Artificial Sequence:  Nucleic Acid
  misc_feature: oligonucleotide substrate
gcaaccgggcagauucc

SEQ ID NO: 6955 - RNA, 17 nt, Artificial Sequence
  Description of Artificial Sequence:  Nucleic Acid
  misc_feature: oligonucleotide substrate
ccgggcagauucccugu

SEQ ID NO: 6956 - RNA, 17 nt, Artificial Sequence
  Description of Artificial Sequence:  Nucleic Acid
  misc_feature: oligonucleotide substrate
gauucccuguugcauag

SEQ ID NO: 6957 - RNA, 17 nt, Artificial Sequence
  Description of Artificial Sequence:  Nucleic Acid
  misc_feature: oligonucleotide substrate
ucccuguugcauaguuc

SEQ ID NO: 6958 - RNA, 17 nt, Artificial Sequence
  Description of Artificial Sequence:  Nucleic Acid
  misc_feature: oligonucleotide substrate
ccuguugcauaguucac

SEQ ID NO: 6959 - RNA, 17 nt, Artificial Sequence
  Description of Artificial Sequence:  Nucleic Acid
  misc_feature: oligonucleotide substrate
guugcauaguucacgcc

SEQ ID NO: 6960 - RNA, 17 nt, Artificial Sequence
  Description of Artificial Sequence:  Nucleic Acid
  misc_feature: oligonucleotide substrate
cauaguucacgccgucu

SEQ ID NO: 6961 - RNA, 17 nt, Artificial Sequence
  Description of Artificial Sequence:  Nucleic Acid
  misc_feature: oligonucleotide substrate
uaguucacgccgucuuc

SEQ ID NO: 6962 - RNA, 17 nt, Artificial Sequence
  Description of Artificial Sequence:  Nucleic Acid
  misc_feature: oligonucleotide substrate
uucacgccgucuuccag

SEQ ID NO: 6963 - RNA, 17 nt, Artificial Sequence
  Description of Artificial Sequence:  Nucleic Acid
  misc_feature: oligonucleotide substrate
cuuccagaacccggacg

SEQ ID NO: 6964 - RNA, 17 nt, Artificial Sequence
  Description of Artificial Sequence:  Nucleic Acid
  misc_feature: oligonucleotide substrate
gaacccggacgccaugc

SEQ ID NO: 6965 - RNA, 17 nt, Artificial Sequence
  Description of Artificial Sequence:  Nucleic Acid
  misc_feature: oligonucleotide substrate
acccggacgccaugcgc

SEQ ID NO: 6966 - RNA, 17 nt, Artificial Sequence
  Description of Artificial Sequence:  Nucleic Acid
  misc_feature: oligonucleotide substrate
cggacgccaugcgccag

SEQ ID NO: 6967 - RNA, 17 nt, Artificial Sequence
  Description of Artificial Sequence:  Nucleic Acid
  misc_feature: oligonucleotide substrate
gacgccaugcgccaggg

SEQ ID NO: 6968 - RNA, 17 nt, Artificial Sequence
  Description of Artificial Sequence:  Nucleic Acid
  misc_feature: oligonucleotide substrate
cgccaugcgccagggcc

SEQ ID NO: 6969 - RNA, 17 nt, Artificial Sequence
  Description of Artificial Sequence:  Nucleic Acid
  misc_feature: oligonucleotide substrate
gcgccagggcccuggca

SEQ ID NO: 6970 - RNA, 17 nt, Artificial Sequence
  Description of Artificial Sequence:  Nucleic Acid
  misc_feature: oligonucleotide substrate
gggcccuggcagugccu

SEQ ID NO: 6971 - RNA, 17 nt, Artificial Sequence
  Description of Artificial Sequence:  Nucleic Acid
  misc_feature: oligonucleotide substrate
cccuggcagugccuccc

SEQ ID NO: 6972 - RNA, 17 nt, Artificial Sequence
  Description of Artificial Sequence:  Nucleic Acid
  misc_feature: oligonucleotide substrate
cuggcagugccucccaa

SEQ ID NO: 6973 - RNA, 17 nt, Artificial Sequence
  Description of Artificial Sequence:  Nucleic Acid
  misc_feature: oligonucleotide substrate
ccaagggggcgccgacg

SEQ ID NO: 6974 - RNA, 17 nt, Artificial Sequence
  Description of Artificial Sequence:  Nucleic Acid
  misc_feature: oligonucleotide substrate
aagggggcgccgacgag

SEQ ID NO: 6975 - RNA, 17 nt, Artificial Sequence
  Description of Artificial Sequence:  Nucleic Acid
  misc_feature: oligonucleotide substrate
gggcgccgacgagcgga

SEQ ID NO: 6976 - RNA, 17 nt, Artificial Sequence
  Description of Artificial Sequence:  Nucleic Acid
  misc_feature: oligonucleotide substrate
gccgacgagcggaaugu

SEQ ID NO: 6977 - RNA, 17 nt, Artificial Sequence
  Description of Artificial Sequence:  Nucleic Acid
  misc_feature: oligonucleotide substrate
cgagcggaauguacccc

SEQ ID NO: 6978 - RNA, 17 nt, Artificial Sequence
  Description of Artificial Sequence:  Nucleic Acid
  misc_feature: oligonucleotide substrate
agcggaauguaccccau

SEQ ID NO: 6979 - RNA, 17 nt, Artificial Sequence
  Description of Artificial Sequence:  Nucleic Acid
  misc_feature: oligonucleotide substrate
cggaauguaccccauga

SEQ ID NO: 6980 - RNA, 17 nt, Artificial Sequence
  Description of Artificial Sequence:  Nucleic Acid
  misc_feature: oligonucleotide substrate
uguaccccaugaggucg

SEQ ID NO: 6981 - RNA, 17 nt, Artificial Sequence
  Description of Artificial Sequence:  Nucleic Acid
  misc_feature: oligonucleotide substrate
cccaugaggucggcgaa

SEQ ID NO: 6982 - RNA, 17 nt, Artificial Sequence
  Description of Artificial Sequence:  Nucleic Acid
  misc_feature: oligonucleotide substrate
ugaggucggcgaagccg

SEQ ID NO: 6983 - RNA, 17 nt, Artificial Sequence
  Description of Artificial Sequence:  Nucleic Acid
  misc_feature: oligonucleotide substrate
ucggcgaagccgcaugu

SEQ ID NO: 6984 - RNA, 17 nt, Artificial Sequence
  Description of Artificial Sequence:  Nucleic Acid
  misc_feature: oligonucleotide substrate
gcgaagccgcaugugag

SEQ ID NO: 6985 - RNA, 17 nt, Artificial Sequence
  Description of Artificial Sequence:  Nucleic Acid
  misc_feature: oligonucleotide substrate
gaagccgcaugugaggg

SEQ ID NO: 6986 - RNA, 17 nt, Artificial Sequence
  Description of Artificial Sequence:  Nucleic Acid
  misc_feature: oligonucleotide substrate
agccgcaugugagggua

SEQ ID NO: 6987 - RNA, 17 nt, Artificial Sequence
  Description of Artificial Sequence:  Nucleic Acid
  misc_feature: oligonucleotide substrate
augugaggguaucgaug

SEQ ID NO: 6988 - RNA, 17 nt, Artificial Sequence
  Description of Artificial Sequence:  Nucleic Acid
  misc_feature: oligonucleotide substrate
gugaggguaucgaugac

SEQ ID NO: 6989 - RNA, 17 nt, Artificial Sequence
  Description of Artificial Sequence:  Nucleic Acid
  misc_feature: oligonucleotide substrate
ggguaucgaugaccuua

SEQ ID NO: 6990 - RNA, 17 nt, Artificial Sequence
  Description of Artificial Sequence:  Nucleic Acid
  misc_feature: oligonucleotide substrate
uaucgaugaccuuaccc

SEQ ID NO: 6991 - RNA, 17 nt, Artificial Sequence
  Description of Artificial Sequence:  Nucleic Acid
  misc_feature: oligonucleotide substrate
augaccuuacccaaguu

SEQ ID NO: 6992 - RNA, 17 nt, Artificial Sequence
  Description of Artificial Sequence:  Nucleic Acid
  misc_feature: oligonucleotide substrate
uuacccaaguuacgcga

SEQ ID NO: 6993 - RNA, 17 nt, Artificial Sequence
  Description of Artificial Sequence:  Nucleic Acid
  misc_feature: oligonucleotide substrate
cccaaguuacgcgaccu

SEQ ID NO: 6994 - RNA, 17 nt, Artificial Sequence
  Description of Artificial Sequence:  Nucleic Acid
  misc_feature: oligonucleotide substrate
caaguuacgcgaccuac

SEQ ID NO: 6995 - RNA, 17 nt, Artificial Sequence
  Description of Artificial Sequence:  Nucleic Acid
  misc_feature: oligonucleotide substrate
guuacgcgaccuacgcc

SEQ ID NO: 6996 - RNA, 17 nt, Artificial Sequence
  Description of Artificial Sequence:  Nucleic Acid
  misc_feature: oligonucleotide substrate
cgcgaccuacgccgggg

SEQ ID NO: 6997 - RNA, 17 nt, Artificial Sequence
  Description of Artificial Sequence:  Nucleic Acid
  misc_feature: oligonucleotide substrate
cgaccuacgccgggggu

SEQ ID NO: 6998 - RNA, 17 nt, Artificial Sequence
  Description of Artificial Sequence:  Nucleic Acid
  misc_feature: oligonucleotide substrate
cgccggggguccguggg

SEQ ID NO: 6999 - RNA, 17 nt, Artificial Sequence
  Description of Artificial Sequence:  Nucleic Acid
  misc_feature: oligonucleotide substrate
ggggguccguggggccc

SEQ ID NO: 7000 - RNA, 17 nt, Artificial Sequence
  Description of Artificial Sequence:  Nucleic Acid
  misc_feature: oligonucleotide substrate
uccguggggccccaacu

SEQ ID NO: 7001 - RNA, 17 nt, Artificial Sequence
  Description of Artificial Sequence:  Nucleic Acid
  misc_feature: oligonucleotide substrate
gggccccaacuaggccg

SEQ ID NO: 7002 - RNA, 17 nt, Artificial Sequence
  Description of Artificial Sequence:  Nucleic Acid
  misc_feature: oligonucleotide substrate
ccaacuaggccgggagc

SEQ ID NO: 7003 - RNA, 17 nt, Artificial Sequence
  Description of Artificial Sequence:  Nucleic Acid
  misc_feature: oligonucleotide substrate
ggccgggagccgcgggg

SEQ ID NO: 7004 - RNA, 17 nt, Artificial Sequence
  Description of Artificial Sequence:  Nucleic Acid
  misc_feature: oligonucleotide substrate
cgggagccgcgggguga

SEQ ID NO: 7005 - RNA, 17 nt, Artificial Sequence
  Description of Artificial Sequence:  Nucleic Acid
  misc_feature: oligonucleotide substrate
gccgcggggugacagga

SEQ ID NO: 7006 - RNA, 17 nt, Artificial Sequence
  Description of Artificial Sequence:  Nucleic Acid
  misc_feature: oligonucleotide substrate
gcggggugacaggagcc

SEQ ID NO: 7007 - RNA, 17 nt, Artificial Sequence
  Description of Artificial Sequence:  Nucleic Acid
  misc_feature: oligonucleotide substrate
ugacaggagccauccug

SEQ ID NO: 7008 - RNA, 17 nt, Artificial Sequence
  Description of Artificial Sequence:  Nucleic Acid
  misc_feature: oligonucleotide substrate
caggagccauccugccc

SEQ ID NO: 7009 - RNA, 17 nt, Artificial Sequence
  Description of Artificial Sequence:  Nucleic Acid
  misc_feature: oligonucleotide substrate
gccauccugcccacccu

SEQ ID NO: 7010 - RNA, 17 nt, Artificial Sequence
  Description of Artificial Sequence:  Nucleic Acid
  misc_feature: oligonucleotide substrate
uccugcccacccuaagc

SEQ ID NO: 7011 - RNA, 17 nt, Artificial Sequence
  Description of Artificial Sequence:  Nucleic Acid
  misc_feature: oligonucleotide substrate
cacccuaagcccucauu

SEQ ID NO: 7012 - RNA, 17 nt, Artificial Sequence
  Description of Artificial Sequence:  Nucleic Acid
  misc_feature: oligonucleotide substrate
aagcccucauugccaua

SEQ ID NO: 7013 - RNA, 17 nt, Artificial Sequence
  Description of Artificial Sequence:  Nucleic Acid
  misc_feature: oligonucleotide substrate
cccucauugccauagag

SEQ ID NO: 7014 - RNA, 17 nt, Artificial Sequence
  Description of Artificial Sequence:  Nucleic Acid
  misc_feature: oligonucleotide substrate
ucauugccauagagggg

SEQ ID NO: 7015 - RNA, 17 nt, Artificial Sequence
  Description of Artificial Sequence:  Nucleic Acid
  misc_feature: oligonucleotide substrate
auagaggggccaagggu

SEQ ID NO: 7016 - RNA, 17 nt, Artificial Sequence
  Description of Artificial Sequence:  Nucleic Acid
  misc_feature: oligonucleotide substrate
ggccaaggguacccggg

SEQ ID NO: 7017 - RNA, 17 nt, Artificial Sequence
  Description of Artificial Sequence:  Nucleic Acid
  misc_feature: oligonucleotide substrate
ccaaggguacccgggcu

SEQ ID NO: 7018 - RNA, 17 nt, Artificial Sequence
  Description of Artificial Sequence:  Nucleic Acid
  misc_feature: oligonucleotide substrate
guacccgggcugagccc

SEQ ID NO: 7019 - RNA, 17 nt, Artificial Sequence
  Description of Artificial Sequence:  Nucleic Acid
  misc_feature: oligonucleotide substrate
cgggcugagcccaggcc

SEQ ID NO: 7020 - RNA, 17 nt, Artificial Sequence
  Description of Artificial Sequence:  Nucleic Acid
  misc_feature: oligonucleotide substrate
gagcccaggcccugccc

SEQ ID NO: 7021 - RNA, 17 nt, Artificial Sequence
  Description of Artificial Sequence:  Nucleic Acid
  misc_feature: oligonucleotide substrate
caggcccugcccucggg

SEQ ID NO: 7022 - RNA, 17 nt, Artificial Sequence
  Description of Artificial Sequence:  Nucleic Acid
  misc_feature: oligonucleotide substrate
gcccucgggccggcgag

SEQ ID NO: 7023 - RNA, 17 nt, Artificial Sequence
  Description of Artificial Sequence:  Nucleic Acid
  misc_feature: oligonucleotide substrate
ucgggccggcgagccuu

SEQ ID NO: 7024 - RNA, 17 nt, Artificial Sequence
  Description of Artificial Sequence:  Nucleic Acid
  misc_feature: oligonucleotide substrate
gccggcgagccuugggg

SEQ ID NO: 7025 - RNA, 17 nt, Artificial Sequence
  Description of Artificial Sequence:  Nucleic Acid
  misc_feature: oligonucleotide substrate
ccuuggggauagguugu

SEQ ID NO: 7026 - RNA, 17 nt, Artificial Sequence
  Description of Artificial Sequence:  Nucleic Acid
  misc_feature: oligonucleotide substrate
ggggauagguugucgcc

SEQ ID NO: 7027 - RNA, 17 nt, Artificial Sequence
  Description of Artificial Sequence:  Nucleic Acid
  misc_feature: oligonucleotide substrate
gauagguugucgccuuc

SEQ ID NO: 7028 - RNA, 17 nt, Artificial Sequence
  Description of Artificial Sequence:  Nucleic Acid
  misc_feature: oligonucleotide substrate
agguugucgccuuccac

SEQ ID NO: 7029 - RNA, 17 nt, Artificial Sequence
  Description of Artificial Sequence:  Nucleic Acid
  misc_feature: oligonucleotide substrate
cgccuuccacgagguug

SEQ ID NO: 7030 - RNA, 17 nt, Artificial Sequence
  Description of Artificial Sequence:  Nucleic Acid
  misc_feature: oligonucleotide substrate
uccacgagguugcgacc

SEQ ID NO: 7031 - RNA, 17 nt, Artificial Sequence
  Description of Artificial Sequence:  Nucleic Acid
  misc_feature: oligonucleotide substrate
acgagguugcgaccgcu

SEQ ID NO: 7032 - RNA, 17 nt, Artificial Sequence
  Description of Artificial Sequence:  Nucleic Acid
  misc_feature: oligonucleotide substrate
agguugcgaccgcucgg

SEQ ID NO: 7033 - RNA, 17 nt, Artificial Sequence
  Description of Artificial Sequence:  Nucleic Acid
  misc_feature: oligonucleotide substrate
uugcgaccgcucggaag

SEQ ID NO: 7034 - RNA, 17 nt, Artificial Sequence
  Description of Artificial Sequence:  Nucleic Acid
  misc_feature: oligonucleotide substrate
gcucggaagucuuccua

SEQ ID NO: 7035 - RNA, 17 nt, Artificial Sequence
  Description of Artificial Sequence:  Nucleic Acid
  misc_feature: oligonucleotide substrate
ucuuccuagucgcgcgc

SEQ ID NO: 7036 - RNA, 17 nt, Artificial Sequence
  Description of Artificial Sequence:  Nucleic Acid
  misc_feature: oligonucleotide substrate
uccuagucgcgcgcaca

SEQ ID NO: 7037 - RNA, 17 nt, Artificial Sequence
  Description of Artificial Sequence:  Nucleic Acid
  misc_feature: oligonucleotide substrate
cuagucgcgcgcacacc

SEQ ID NO: 7038 - RNA, 17 nt, Artificial Sequence
  Description of Artificial Sequence:  Nucleic Acid
  misc_feature: oligonucleotide substrate
agucgcgcgcacaccca

SEQ ID NO: 7039 - RNA, 17 nt, Artificial Sequence
  Description of Artificial Sequence:  Nucleic Acid
  misc_feature: oligonucleotide substrate
ucgcgcgcacacccaac

SEQ ID NO: 7040 - RNA, 17 nt, Artificial Sequence
  Description of Artificial Sequence:  Nucleic Acid
  misc_feature: oligonucleotide substrate
gcgcgcacacccaaccu

SEQ ID NO: 7041 - RNA, 17 nt, Artificial Sequence
  Description of Artificial Sequence:  Nucleic Acid
  misc_feature: oligonucleotide substrate
cacacccaaccuggggc

SEQ ID NO: 7042 - RNA, 17 nt, Artificial Sequence
  Description of Artificial Sequence:  Nucleic Acid
  misc_feature: oligonucleotide substrate
aaccuggggccccugcg

SEQ ID NO: 7043 - RNA, 17 nt, Artificial Sequence
  Description of Artificial Sequence:  Nucleic Acid
  misc_feature: oligonucleotide substrate
gggccccugcgcggcaa

SEQ ID NO: 7044 - RNA, 17 nt, Artificial Sequence
  Description of Artificial Sequence:  Nucleic Acid
  misc_feature: oligonucleotide substrate
gccccugcgcggcaaca

SEQ ID NO: 7045 - RNA, 17 nt, Artificial Sequence
  Description of Artificial Sequence:  Nucleic Acid
  misc_feature: oligonucleotide substrate
ccugcgcggcaacaggu

SEQ ID NO: 7046 - RNA, 17 nt, Artificial Sequence
  Description of Artificial Sequence:  Nucleic Acid
  misc_feature: oligonucleotide substrate
gcgcggcaacagguaaa

SEQ ID NO: 7047 - RNA, 17 nt, Artificial Sequence
  Description of Artificial Sequence:  Nucleic Acid
  misc_feature: oligonucleotide substrate
ggcaacagguaaacucc

SEQ ID NO: 7048 - RNA, 17 nt, Artificial Sequence
  Description of Artificial Sequence:  Nucleic Acid
  misc_feature: oligonucleotide substrate
acagguaaacuccacca

SEQ ID NO: 7049 - RNA, 17 nt, Artificial Sequence
  Description of Artificial Sequence:  Nucleic Acid
  misc_feature: oligonucleotide substrate
uaaacuccaccaacgau

SEQ ID NO: 7050 - RNA, 17 nt, Artificial Sequence
  Description of Artificial Sequence:  Nucleic Acid
  misc_feature: oligonucleotide substrate
cuccaccaacgaucuga

SEQ ID NO: 7051 - RNA, 17 nt, Artificial Sequence
  Description of Artificial Sequence:  Nucleic Acid
  misc_feature: oligonucleotide substrate
caccaacgaucugacca

SEQ ID NO: 7052 - RNA, 17 nt, Artificial Sequence
  Description of Artificial Sequence:  Nucleic Acid
  misc_feature: oligonucleotide substrate
acgaucugaccaccgcc

SEQ ID NO: 7053 - RNA, 17 nt, Artificial Sequence
  Description of Artificial Sequence:  Nucleic Acid
  misc_feature: oligonucleotide substrate
aucugaccaccgcccgg

SEQ ID NO: 7054 - RNA, 17 nt, Artificial Sequence
  Description of Artificial Sequence:  Nucleic Acid
  misc_feature: oligonucleotide substrate
ugaccaccgcccgggaa

SEQ ID NO: 7055 - RNA, 17 nt, Artificial Sequence
  Description of Artificial Sequence:  Nucleic Acid
  misc_feature: oligonucleotide substrate
gcccgggaacuugacgu

SEQ ID NO: 7056 - RNA, 17 nt, Artificial Sequence
  Description of Artificial Sequence:  Nucleic Acid
  misc_feature: oligonucleotide substrate
ggaacuugacguccugu

SEQ ID NO: 7057 - RNA, 17 nt, Artificial Sequence
  Description of Artificial Sequence:  Nucleic Acid
  misc_feature: oligonucleotide substrate
aacuugacguccugugg

SEQ ID NO: 7058 - RNA, 17 nt, Artificial Sequence
  Description of Artificial Sequence:  Nucleic Acid
  misc_feature: oligonucleotide substrate
gacguccugugggcggc

SEQ ID NO: 7059 - RNA, 17 nt, Artificial Sequence
  Description of Artificial Sequence:  Nucleic Acid
  misc_feature: oligonucleotide substrate
uccugugggcggcgguu

SEQ ID NO: 7060 - RNA, 17 nt, Artificial Sequence
  Description of Artificial Sequence:  Nucleic Acid
  misc_feature: oligonucleotide substrate
ugugggcggcgguuggu

SEQ ID NO: 7061 - RNA, 17 nt, Artificial Sequence
  Description of Artificial Sequence:  Nucleic Acid
  misc_feature: oligonucleotide substrate
gggcggcgguugguguu

SEQ ID NO: 7062 - RNA, 17 nt, Artificial Sequence
  Description of Artificial Sequence:  Nucleic Acid
  misc_feature: oligonucleotide substrate
ggcgguugguguuacgu

SEQ ID NO: 7063 - RNA, 17 nt, Artificial Sequence
  Description of Artificial Sequence:  Nucleic Acid
  misc_feature: oligonucleotide substrate
cgguugguguuacguuu

SEQ ID NO: 7064 - RNA, 17 nt, Artificial Sequence
  Description of Artificial Sequence:  Nucleic Acid
  misc_feature: oligonucleotide substrate
uugguguuacguuuggu

SEQ ID NO: 7065 - RNA, 17 nt, Artificial Sequence
  Description of Artificial Sequence:  Nucleic Acid
  misc_feature: oligonucleotide substrate
gguguuacguuugguuu

SEQ ID NO: 7066 - RNA, 17 nt, Artificial Sequence
  Description of Artificial Sequence:  Nucleic Acid
  misc_feature: oligonucleotide substrate
uacguuugguuuuucuu

SEQ ID NO: 7067 - RNA, 17 nt, Artificial Sequence
  Description of Artificial Sequence:  Nucleic Acid
  misc_feature: oligonucleotide substrate
ucuuugagguuuaggau

SEQ ID NO: 7068 - RNA, 17 nt, Artificial Sequence
  Description of Artificial Sequence:  Nucleic Acid
  misc_feature: oligonucleotide substrate
gguuuaggauucgugcu

SEQ ID NO: 7069 - RNA, 17 nt, Artificial Sequence
  Description of Artificial Sequence:  Nucleic Acid
  misc_feature: oligonucleotide substrate
uaggauucgugcucaug

SEQ ID NO: 7070 - RNA, 17 nt, Artificial Sequence
  Description of Artificial Sequence:  Nucleic Acid
  misc_feature: oligonucleotide substrate
ggauucgugcucauggu

SEQ ID NO: 7071 - RNA, 17 nt, Artificial Sequence
  Description of Artificial Sequence:  Nucleic Acid
  misc_feature: oligonucleotide substrate
ucgugcucauggugcac

SEQ ID NO: 7072 - RNA, 17 nt, Artificial Sequence
  Description of Artificial Sequence:  Nucleic Acid
  misc_feature: oligonucleotide substrate
ugcucauggugcacggu

SEQ ID NO: 7073 - RNA, 17 nt, Artificial Sequence
  Description of Artificial Sequence:  Nucleic Acid
  misc_feature: oligonucleotide substrate
cucauggugcacggucu

SEQ ID NO: 7074 - RNA, 17 nt, Artificial Sequence
  Description of Artificial Sequence:  Nucleic Acid
  misc_feature: oligonucleotide substrate
cauggugcacggucuac

SEQ ID NO: 7075 - RNA, 17 nt, Artificial Sequence
  Description of Artificial Sequence:  Nucleic Acid
  misc_feature: oligonucleotide substrate
ggugcacggucuacgag

SEQ ID NO: 7076 - RNA, 17 nt, Artificial Sequence
  Description of Artificial Sequence:  Nucleic Acid
  misc_feature: oligonucleotide substrate
cacggucuacgagaccu

SEQ ID NO: 7077 - RNA, 17 nt, Artificial Sequence
  Description of Artificial Sequence:  Nucleic Acid
  misc_feature: oligonucleotide substrate
ucuacgagaccucccgg

SEQ ID NO: 7078 - RNA, 17 nt, Artificial Sequence
  Description of Artificial Sequence:  Nucleic Acid
  misc_feature: oligonucleotide substrate
cucccggggcacucgca

SEQ ID NO: 7079 - RNA, 17 nt, Artificial Sequence
  Description of Artificial Sequence:  Nucleic Acid
  misc_feature: oligonucleotide substrate
cccggggcacucgcaag

SEQ ID NO: 7080 - RNA, 17 nt, Artificial Sequence
  Description of Artificial Sequence:  Nucleic Acid
  misc_feature: oligonucleotide substrate
gggcacucgcaagcacc

SEQ ID NO: 7081 - RNA, 17 nt, Artificial Sequence
  Description of Artificial Sequence:  Nucleic Acid
  misc_feature: oligonucleotide substrate
acucgcaagcacccuau

SEQ ID NO: 7082 - RNA, 17 nt, Artificial Sequence
  Description of Artificial Sequence:  Nucleic Acid
  misc_feature: oligonucleotide substrate
ucgcaagcacccuauca

SEQ ID NO: 7083 - RNA, 17 nt, Artificial Sequence
  Description of Artificial Sequence:  Nucleic Acid
  misc_feature: oligonucleotide substrate
agcacccuaucaggcag

SEQ ID NO: 7084 - RNA, 17 nt, Artificial Sequence
  Description of Artificial Sequence:  Nucleic Acid
  misc_feature: oligonucleotide substrate
ccuaucaggcaguacca

SEQ ID NO: 7085 - RNA, 17 nt, Artificial Sequence
  Description of Artificial Sequence:  Nucleic Acid
  misc_feature: oligonucleotide substrate
aucaggcaguaccacaa

SEQ ID NO: 7086 - RNA, 17 nt, Artificial Sequence
  Description of Artificial Sequence:  Nucleic Acid
  misc_feature: oligonucleotide substrate
caggcaguaccacaagg

SEQ ID NO: 7087 - RNA, 17 nt, Artificial Sequence
  Description of Artificial Sequence:  Nucleic Acid
  misc_feature: oligonucleotide substrate
gcaguaccacaaggccu

SEQ ID NO: 7088 - RNA, 17 nt, Artificial Sequence
  Description of Artificial Sequence:  Nucleic Acid
  misc_feature: oligonucleotide substrate
accacaaggccuuucgc

SEQ ID NO: 7089 - RNA, 17 nt, Artificial Sequence
  Description of Artificial Sequence:  Nucleic Acid
  misc_feature: oligonucleotide substrate
ggccuuucgcgacccaa

SEQ ID NO: 7090 - RNA, 17 nt, Artificial Sequence
  Description of Artificial Sequence:  Nucleic Acid
  misc_feature: oligonucleotide substrate
cuuucgcgacccaacac

SEQ ID NO: 7091 - RNA, 17 nt, Artificial Sequence
  Description of Artificial Sequence:  Nucleic Acid
  misc_feature: oligonucleotide substrate
gcgacccaacacuacuc

SEQ ID NO: 7092 - RNA, 17 nt, Artificial Sequence
  Description of Artificial Sequence:  Nucleic Acid
  misc_feature: oligonucleotide substrate
gacccaacacuacucgg

SEQ ID NO: 7093 - RNA, 17 nt, Artificial Sequence
  Description of Artificial Sequence:  Nucleic Acid
  misc_feature: oligonucleotide substrate
ccaacacuacucggcua

SEQ ID NO: 7094 - RNA, 17 nt, Artificial Sequence
  Description of Artificial Sequence:  Nucleic Acid
  misc_feature: oligonucleotide substrate
acuacucggcuagcagu

SEQ ID NO: 7095 - RNA, 17 nt, Artificial Sequence
  Description of Artificial Sequence:  Nucleic Acid
  misc_feature: oligonucleotide substrate
cucggcuagcagucucg

SEQ ID NO: 7096 - RNA, 17 nt, Artificial Sequence
  Description of Artificial Sequence:  Nucleic Acid
  misc_feature: oligonucleotide substrate
ggcuagcagucucgcgg

SEQ ID NO: 7097 - RNA, 17 nt, Artificial Sequence
  Description of Artificial Sequence:  Nucleic Acid
  misc_feature: oligonucleotide substrate
gcagucucgcgggggca

SEQ ID NO: 7098 - RNA, 17 nt, Artificial Sequence
  Description of Artificial Sequence:  Nucleic Acid
  misc_feature: oligonucleotide substrate
ucgcgggggcacgccca

SEQ ID NO: 7099 - RNA, 17 nt, Artificial Sequence
  Description of Artificial Sequence:  Nucleic Acid
  misc_feature: oligonucleotide substrate
gcgggggcacgcccaaa

SEQ ID NO: 7100 - RNA, 17 nt, Artificial Sequence
  Description of Artificial Sequence:  Nucleic Acid
  misc_feature: oligonucleotide substrate
gggggcacgcccaaauc

SEQ ID NO: 7101 - RNA, 17 nt, Artificial Sequence
  Description of Artificial Sequence:  Nucleic Acid
  misc_feature: oligonucleotide substrate
acgcccaaaucuccagg

SEQ ID NO: 7102 - RNA, 17 nt, Artificial Sequence
  Description of Artificial Sequence:  Nucleic Acid
  misc_feature: oligonucleotide substrate
aucuccaggcauugagc

SEQ ID NO: 7103 - RNA, 17 nt, Artificial Sequence
  Description of Artificial Sequence:  Nucleic Acid
  misc_feature: oligonucleotide substrate
cuccaggcauugagcgg

SEQ ID NO: 7104 - RNA, 17 nt, Artificial Sequence
  Description of Artificial Sequence:  Nucleic Acid
  misc_feature: oligonucleotide substrate
ggcauugagcggguuga

SEQ ID NO: 7105 - RNA, 17 nt, Artificial Sequence
  Description of Artificial Sequence:  Nucleic Acid
  misc_feature: oligonucleotide substrate
uugagcggguugaucca

SEQ ID NO: 7106 - RNA, 17 nt, Artificial Sequence
  Description of Artificial Sequence:  Nucleic Acid
  misc_feature: oligonucleotide substrate
gcggguugauccaagaa

SEQ ID NO: 7107 - RNA, 17 nt, Artificial Sequence
  Description of Artificial Sequence:  Nucleic Acid
  misc_feature: oligonucleotide substrate
aagaaaggacccggucg

SEQ ID NO: 7108 - RNA, 17 nt, Artificial Sequence
  Description of Artificial Sequence:  Nucleic Acid
  misc_feature: oligonucleotide substrate
aggacccggucguccug

SEQ ID NO: 7109 - RNA, 17 nt, Artificial Sequence
  Description of Artificial Sequence:  Nucleic Acid
  misc_feature: oligonucleotide substrate
acccggucguccuggca

SEQ ID NO: 7110 - RNA, 17 nt, Artificial Sequence
  Description of Artificial Sequence:  Nucleic Acid
  misc_feature: oligonucleotide substrate
ucguccuggcaauuccg

SEQ ID NO: 7111 - RNA, 17 nt, Artificial Sequence
  Description of Artificial Sequence:  Nucleic Acid
  misc_feature: oligonucleotide substrate
uccuggcaauuccggug

SEQ ID NO: 7112 - RNA, 17 nt, Artificial Sequence
  Description of Artificial Sequence:  Nucleic Acid
  misc_feature: oligonucleotide substrate
caauuccgguguacuca

SEQ ID NO: 7113 - RNA, 17 nt, Artificial Sequence
  Description of Artificial Sequence:  Nucleic Acid
  misc_feature: oligonucleotide substrate
auuccgguguacucacc

SEQ ID NO: 7114 - RNA, 17 nt, Artificial Sequence
  Description of Artificial Sequence:  Nucleic Acid
  misc_feature: oligonucleotide substrate
uccgguguacucaccgg

SEQ ID NO: 7115 - RNA, 17 nt, Artificial Sequence
  Description of Artificial Sequence:  Nucleic Acid
  misc_feature: oligonucleotide substrate
guguacucaccgguucc

SEQ ID NO: 7116 - RNA, 17 nt, Artificial Sequence
  Description of Artificial Sequence:  Nucleic Acid
  misc_feature: oligonucleotide substrate
acucaccgguuccgcag

SEQ ID NO: 7117 - RNA, 17 nt, Artificial Sequence
  Description of Artificial Sequence:  Nucleic Acid
  misc_feature: oligonucleotide substrate
ccgguuccgcagaccac

SEQ ID NO: 7118 - RNA, 17 nt, Artificial Sequence
  Description of Artificial Sequence:  Nucleic Acid
  misc_feature: oligonucleotide substrate
uuccgcagaccacuaug

SEQ ID NO: 7119 - RNA, 17 nt, Artificial Sequence
  Description of Artificial Sequence:  Nucleic Acid
  misc_feature: oligonucleotide substrate
cgcagaccacuauggcu

SEQ ID NO: 7120 - RNA, 17 nt, Artificial Sequence
  Description of Artificial Sequence:  Nucleic Acid
  misc_feature: oligonucleotide substrate
agaccacuauggcucuc

SEQ ID NO: 7121 - RNA, 17 nt, Artificial Sequence
  Description of Artificial Sequence:  Nucleic Acid
  misc_feature: oligonucleotide substrate
ccacuauggcucucccg

SEQ ID NO: 7122 - RNA, 17 nt, Artificial Sequence
  Description of Artificial Sequence:  Nucleic Acid
  misc_feature: oligonucleotide substrate
gaggggggguccuggag

SEQ ID NO: 7123 - RNA, 17 nt, Artificial Sequence
  Description of Artificial Sequence:  Nucleic Acid
  misc_feature: oligonucleotide substrate
uccuggaggcugcacga

SEQ ID NO: 7124 - RNA, 17 nt, Artificial Sequence
  Description of Artificial Sequence:  Nucleic Acid
  misc_feature: oligonucleotide substrate
uggaggcugcacgacac

SEQ ID NO: 7125 - RNA, 17 nt, Artificial Sequence
  Description of Artificial Sequence:  Nucleic Acid
  misc_feature: oligonucleotide substrate
gaggcugcacgacacuc

SEQ ID NO: 7126 - RNA, 17 nt, Artificial Sequence
  Description of Artificial Sequence:  Nucleic Acid
  misc_feature: oligonucleotide substrate
gcugcacgacacucaua

SEQ ID NO: 7127 - RNA, 17 nt, Artificial Sequence
  Description of Artificial Sequence:  Nucleic Acid
  misc_feature: oligonucleotide substrate
ugcacgacacucauacu

SEQ ID NO: 7128 - RNA, 17 nt, Artificial Sequence
  Description of Artificial Sequence:  Nucleic Acid
  misc_feature: oligonucleotide substrate
cgacacucauacuaacg

SEQ ID NO: 7129 - RNA, 17 nt, Artificial Sequence
  Description of Artificial Sequence:  Nucleic Acid
  misc_feature: oligonucleotide substrate
acacucauacuaacgcc

SEQ ID NO: 7130 - RNA, 17 nt, Artificial Sequence
  Description of Artificial Sequence:  Nucleic Acid
  misc_feature: oligonucleotide substrate
ucauacuaacgccaugg

SEQ ID NO: 7131 - RNA, 17 nt, Artificial Sequence
  Description of Artificial Sequence:  Nucleic Acid
  misc_feature: oligonucleotide substrate
auacuaacgccauggcu

SEQ ID NO: 7132 - RNA, 17 nt, Artificial Sequence
  Description of Artificial Sequence:  Nucleic Acid
  misc_feature: oligonucleotide substrate
cuaacgccauggcuaga

SEQ ID NO: 7133 - RNA, 17 nt, Artificial Sequence
  Description of Artificial Sequence:  Nucleic Acid
  misc_feature: oligonucleotide substrate
acgccauggcuagacgc

SEQ ID NO: 7134 - RNA, 17 nt, Artificial Sequence
  Description of Artificial Sequence:  Nucleic Acid
  misc_feature: oligonucleotide substrate
auggcuagacgcuuucu

SEQ ID NO: 7135 - RNA, 17 nt, Artificial Sequence
  Description of Artificial Sequence:  Nucleic Acid
  misc_feature: oligonucleotide substrate
ggcuagacgcuuucugc

SEQ ID NO: 7136 - RNA, 17 nt, Artificial Sequence
  Description of Artificial Sequence:  Nucleic Acid
  misc_feature: oligonucleotide substrate
cgcuuucugcgugaaga

SEQ ID NO: 7137 - RNA, 17 nt, Artificial Sequence
  Description of Artificial Sequence:  Nucleic Acid
  misc_feature: oligonucleotide substrate
cuuucugcgugaagaca

SEQ ID NO: 7138 - RNA, 17 nt, Artificial Sequence
  Description of Artificial Sequence:  Nucleic Acid
  misc_feature: oligonucleotide substrate
gcgugaagacaguaguu

SEQ ID NO: 7139 - RNA, 17 nt, Artificial Sequence
  Description of Artificial Sequence:  Nucleic Acid
  misc_feature: oligonucleotide substrate
ugaagacaguaguuccu

SEQ ID NO: 7140 - RNA, 17 nt, Artificial Sequence
  Description of Artificial Sequence:  Nucleic Acid
  misc_feature: oligonucleotide substrate
agacaguaguuccucac

SEQ ID NO: 7141 - RNA, 17 nt, Artificial Sequence
  Description of Artificial Sequence:  Nucleic Acid
  misc_feature: oligonucleotide substrate
aguuccucacaggggag

SEQ ID NO: 7142 - RNA, 17 nt, Artificial Sequence
  Description of Artificial Sequence:  Nucleic Acid
  misc_feature: oligonucleotide substrate
acaggggagugaucuau

SEQ ID NO: 7143 - RNA, 17 nt, Artificial Sequence
  Description of Artificial Sequence:  Nucleic Acid
  misc_feature: oligonucleotide substrate
ggggagugaucuauggu

SEQ ID NO: 7144 - RNA, 17 nt, Artificial Sequence
  Description of Artificial Sequence:  Nucleic Acid
  misc_feature: oligonucleotide substrate
agugaucuaugguggag

SEQ ID NO: 7145 - RNA, 17 nt, Artificial Sequence
  Description of Artificial Sequence:  Nucleic Acid
  misc_feature: oligonucleotide substrate
gaucuaugguggagugu

SEQ ID NO: 7146 - RNA, 17 nt, Artificial Sequence
  Description of Artificial Sequence:  Nucleic Acid
  misc_feature: oligonucleotide substrate
augguggagugucgccc

SEQ ID NO: 7147 - RNA, 17 nt, Artificial Sequence
  Description of Artificial Sequence:  Nucleic Acid
  misc_feature: oligonucleotide substrate
gguggagugucgccccc

SEQ ID NO: 7148 - RNA, 15 nt, Artificial Sequence
  Description of Artificial Sequence:  Nucleic Acid
  misc_feature: oligonucleotide substrate
ggguccuuucuugga

SEQ ID NO: 7149 - RNA, 20 nt, Artificial Sequence
  Description of Artificial Sequence:  Nucleic Acid
  misc_feature: oligonucleotide substrate
agaccgugcaucaugagcac

SEQ ID NO: 7150 - RNA, 15 nt, Artificial Sequence
  Description of Artificial Sequence:  Nucleic Acid
  misc_feature: oligonucleotide substrate
gcgucuagccauggc

SEQ ID NO: 7151 - RNA, 15 nt, Artificial Sequence
  Description of Artificial Sequence:  Nucleic Acid
  misc_feature: oligonucleotide substrate
aguaugagugucgug

SEQ ID NO: 7152 - RNA, 15 nt, Artificial Sequence
  Description of Artificial Sequence:  Nucleic Acid
  misc_feature: oligonucleotide substrate
uaugagugucgugca

SEQ ID NO: 7153 - RNA, 15 nt, Artificial Sequence
  Description of Artificial Sequence:  Nucleic Acid
  misc_feature: oligonucleotide substrate
gagugucgugcagcc

SEQ ID NO: 7154 - RNA, 15 nt, Artificial Sequence
  Description of Artificial Sequence:  Nucleic Acid
  misc_feature: oligonucleotide substrate
gugucgugcagccuc

SEQ ID NO: 7155 - RNA, 15 nt, Artificial Sequence
  Description of Artificial Sequence:  Nucleic Acid
  misc_feature: oligonucleotide substrate
cauaguggucugcgg

SEQ ID NO: 7156 - RNA, 15 nt, Artificial Sequence
  Description of Artificial Sequence:  Nucleic Acid
  misc_feature: oligonucleotide substrate
cgaccggguccuuuc

SEQ ID NO: 7157 - RNA, 15 nt, Artificial Sequence
  Description of Artificial Sequence:  Nucleic Acid
  misc_feature: oligonucleotide substrate
gcucaaugccuggag

SEQ ID NO: 7158 - RNA, 15 nt, Artificial Sequence
  Description of Artificial Sequence:  Nucleic Acid
  misc_feature: oligonucleotide substrate
gauuugggcgugccc

SEQ ID NO: 7159 - RNA, 15 nt, Artificial Sequence
  Description of Artificial Sequence:  Nucleic Acid
  misc_feature: oligonucleotide substrate
uagccgaguaguguu

SEQ ID NO: 7160 - RNA, 15 nt, Artificial Sequence
  Description of Artificial Sequence:  Nucleic Acid
  misc_feature: oligonucleotide substrate
ggugcuugcgagugc

SEQ ID NO: 7161 - RNA, 13 nt, Artificial Sequence
  Description of Artificial Sequence:  Nucleic Acid
  misc_feature: oligonucleotide substrate
gaaagcgucuagc

SEQ ID NO: 7162 - RNA, 15 nt, Artificial Sequence
  Description of Artificial Sequence:  Nucleic Acid
  misc_feature: oligonucleotide substrate
agaaagcgucuagcc

SEQ ID NO: 7163 - RNA, 15 nt, Artificial Sequence
  Description of Artificial Sequence:  Nucleic Acid
  misc_feature: oligonucleotide substrate
agccauggcguuagu

SEQ ID NO: 7164 - RNA, 15 nt, Artificial Sequence
  Description of Artificial Sequence:  Nucleic Acid
  misc_feature: oligonucleotide substrate
ggcguuaguaugagu

SEQ ID NO: 7165 - RNA, 13 nt, Artificial Sequence
  Description of Artificial Sequence:  Nucleic Acid
  misc_feature: oligonucleotide substrate
augagugucgugc

SEQ ID NO: 7166 - RNA, 13 nt, Artificial Sequence
  Description of Artificial Sequence:  Nucleic Acid
  misc_feature: oligonucleotide substrate
agugucgugcagc

SEQ ID NO: 7167 - RNA, 15 nt, Artificial Sequence
  Description of Artificial Sequence:  Nucleic Acid
  misc_feature: oligonucleotide substrate
ucgugcagccuccag

SEQ ID NO: 7168 - RNA, 13 nt, Artificial Sequence
  Description of Artificial Sequence:  Nucleic Acid
  misc_feature: oligonucleotide substrate
gggagagccauag

SEQ ID NO: 7169 - RNA, 15 nt, Artificial Sequence
  Description of Artificial Sequence:  Nucleic Acid
  misc_feature: oligonucleotide substrate
cgggagagccauagu

SEQ ID NO: 7170 - RNA, 13 nt, Artificial Sequence
  Description of Artificial Sequence:  Nucleic Acid
  misc_feature: oligonucleotide substrate
auaguggucugcg

SEQ ID NO: 7171 - RNA, 15 nt, Artificial Sequence
  Description of Artificial Sequence:  Nucleic Acid
  misc_feature: oligonucleotide substrate
guggucugcggaacc

SEQ ID NO: 7172 - RNA, 15 nt, Artificial Sequence
  Description of Artificial Sequence:  Nucleic Acid
  misc_feature: oligonucleotide substrate
cggaauugccaggac

SEQ ID NO: 7173 - RNA, 13 nt, Artificial Sequence
  Description of Artificial Sequence:  Nucleic Acid
  misc_feature: oligonucleotide substrate
gaccggguccuuu

SEQ ID NO: 7174 - RNA, 13 nt, Artificial Sequence
  Description of Artificial Sequence:  Nucleic Acid
  misc_feature: oligonucleotide substrate
cugcuagccgagu

SEQ ID NO: 7175 - RNA, 15 nt, Artificial Sequence
  Description of Artificial Sequence:  Nucleic Acid
  misc_feature: oligonucleotide substrate
acugcuagccgagua

SEQ ID NO: 7176 - RNA, 13 nt, Artificial Sequence
  Description of Artificial Sequence:  Nucleic Acid
  misc_feature: oligonucleotide substrate
agccgaguagugu

SEQ ID NO: 7177 - RNA, 15 nt, Artificial Sequence
  Description of Artificial Sequence:  Nucleic Acid
  misc_feature: oligonucleotide substrate
gaguaguguuggguc

SEQ ID NO: 7178 - RNA, 13 nt, Artificial Sequence
  Description of Artificial Sequence:  Nucleic Acid
  misc_feature: oligonucleotide substrate
uguugggucgcga

SEQ ID NO: 7179 - RNA, 15 nt, Artificial Sequence
  Description of Artificial Sequence:  Nucleic Acid
  misc_feature: oligonucleotide substrate
guguugggucgcgaa

SEQ ID NO: 7180 - RNA, 15 nt, Artificial Sequence
  Description of Artificial Sequence:  Nucleic Acid
  misc_feature: oligonucleotide substrate
uugggucgcgaaagg

SEQ ID NO: 7181 - RNA, 15 nt, Artificial Sequence
  Description of Artificial Sequence:  Nucleic Acid
  misc_feature: oligonucleotide substrate
aggccuugugguacu

SEQ ID NO: 7182 - RNA, 15 nt, Artificial Sequence
  Description of Artificial Sequence:  Nucleic Acid
  misc_feature: oligonucleotide substrate
ccuugugguacugcc

SEQ ID NO: 7183 - RNA, 15 nt, Artificial Sequence
  Description of Artificial Sequence:  Nucleic Acid
  misc_feature: oligonucleotide substrate
ugguacugccugaua

SEQ ID NO: 7184 - RNA, 15 nt, Artificial Sequence
  Description of Artificial Sequence:  Nucleic Acid
  misc_feature: oligonucleotide substrate
ugauagggugcuugc

SEQ ID NO: 7185 - RNA, 15 nt, Artificial Sequence
  Description of Artificial Sequence:  Nucleic Acid
  misc_feature: oligonucleotide substrate
auagggugcuugcga

SEQ ID NO: 7186 - RNA, 13 nt, Artificial Sequence
  Description of Artificial Sequence:  Nucleic Acid
  misc_feature: oligonucleotide substrate
acuacugucuuca

SEQ ID NO: 7187 - RNA, 15 nt, Artificial Sequence
  Description of Artificial Sequence:  Nucleic Acid
  misc_feature: oligonucleotide substrate
aacuacugucuucac

SEQ ID NO: 7188 - RNA, 15 nt, Artificial Sequence
  Description of Artificial Sequence:  Nucleic Acid
  misc_feature: oligonucleotide substrate
ucuucacgcagaaag

SEQ ID NO: 7189 - RNA, 13 nt, Artificial Sequence
  Description of Artificial Sequence:  Nucleic Acid
  misc_feature: oligonucleotide substrate
cagaaagcgucua

SEQ ID NO: 7190 - RNA, 13 nt, Artificial Sequence
  Description of Artificial Sequence:  Nucleic Acid
  misc_feature: oligonucleotide substrate
cgucuagccaugg

SEQ ID NO: 7191 - RNA, 13 nt, Artificial Sequence
  Description of Artificial Sequence:  Nucleic Acid
  misc_feature: oligonucleotide substrate
gccauggcguuag

SEQ ID NO: 7192 - RNA, 13 nt, Artificial Sequence
  Description of Artificial Sequence:  Nucleic Acid
  misc_feature: oligonucleotide substrate
cauggcguuagua

SEQ ID NO: 7193 - RNA, 15 nt, Artificial Sequence
  Description of Artificial Sequence:  Nucleic Acid
  misc_feature: oligonucleotide substrate
ccauggcguuaguau

SEQ ID NO: 7194 - RNA, 13 nt, Artificial Sequence
  Description of Artificial Sequence:  Nucleic Acid
  misc_feature: oligonucleotide substrate
guaugagugucgu

SEQ ID NO: 7195 - RNA, 13 nt, Artificial Sequence
  Description of Artificial Sequence:  Nucleic Acid
  misc_feature: oligonucleotide substrate
ugucgugcagccu

SEQ ID NO: 7196 - RNA, 13 nt, Artificial Sequence
  Description of Artificial Sequence:  Nucleic Acid
  misc_feature: oligonucleotide substrate
cgugcagccucca

SEQ ID NO: 7197 - RNA, 13 nt, Artificial Sequence
  Description of Artificial Sequence:  Nucleic Acid
  misc_feature: oligonucleotide substrate
uggucugcggaac

SEQ ID NO: 7198 - RNA, 15 nt, Artificial Sequence
  Description of Artificial Sequence:  Nucleic Acid
  misc_feature: oligonucleotide substrate
ggaaccggugaguac

SEQ ID NO: 7199 - RNA, 13 nt, Artificial Sequence
  Description of Artificial Sequence:  Nucleic Acid
  misc_feature: oligonucleotide substrate
ggaauugccagga

SEQ ID NO: 7200 - RNA, 13 nt, Artificial Sequence
  Description of Artificial Sequence:  Nucleic Acid
  misc_feature: oligonucleotide substrate
cucaaugccugga

SEQ ID NO: 7201 - RNA, 13 nt, Artificial Sequence
  Description of Artificial Sequence:  Nucleic Acid
  misc_feature: oligonucleotide substrate
auuugggcgugcc

SEQ ID NO: 7202 - RNA, 13 nt, Artificial Sequence
  Description of Artificial Sequence:  Nucleic Acid
  misc_feature: oligonucleotide substrate
cgaguaguguugg

SEQ ID NO: 7203 - RNA, 15 nt, Artificial Sequence
  Description of Artificial Sequence:  Nucleic Acid
  misc_feature: oligonucleotide substrate
ccgaguaguguuggg

SEQ ID NO: 7204 - RNA, 13 nt, Artificial Sequence
  Description of Artificial Sequence:  Nucleic Acid
  misc_feature: oligonucleotide substrate
aguaguguugggu

SEQ ID NO: 7205 - RNA, 13 nt, Artificial Sequence
  Description of Artificial Sequence:  Nucleic Acid
  misc_feature: oligonucleotide substrate
ugggucgcgaaag

SEQ ID NO: 7206 - RNA, 13 nt, Artificial Sequence
  Description of Artificial Sequence:  Nucleic Acid
  misc_feature: oligonucleotide substrate
ggccuugugguac

SEQ ID NO: 7207 - RNA, 13 nt, Artificial Sequence
  Description of Artificial Sequence:  Nucleic Acid
  misc_feature: oligonucleotide substrate
gguacugccugau

SEQ ID NO: 7208 - RNA, 13 nt, Artificial Sequence
  Description of Artificial Sequence:  Nucleic Acid
  misc_feature: oligonucleotide substrate
uagggugcuugcg

SEQ ID NO: 7209 - RNA, 13 nt, Artificial Sequence
  Description of Artificial Sequence:  Nucleic Acid
  misc_feature: oligonucleotide substrate
gugcuugcgagug

SEQ ID NO: 7210 - RNA, 13 nt, Artificial Sequence
  Description of Artificial Sequence:  Nucleic Acid
  misc_feature: oligonucleotide substrate
cgggaggucucgu

SEQ ID NO: 7211 - RNA, 15 nt, Artificial Sequence
  Description of Artificial Sequence:  Nucleic Acid
  misc_feature: oligonucleotide substrate
ccgggaggucucgua

SEQ ID NO: 7212 - RNA, 15 nt, Artificial Sequence
  Description of Artificial Sequence:  Nucleic Acid
  misc_feature: oligonucleotide substrate
gcagaaagcgucuag

SEQ ID NO: 7213 - RNA, 13 nt, Artificial Sequence
  Description of Artificial Sequence:  Nucleic Acid
  misc_feature: oligonucleotide substrate
gccauaguggucu

SEQ ID NO: 7214 - RNA, 15 nt, Artificial Sequence
  Description of Artificial Sequence:  Nucleic Acid
  misc_feature: oligonucleotide substrate
gcgaaaggccuugug

SEQ ID NO: 7215 - RNA, 13 nt, Artificial Sequence
  Description of Artificial Sequence:  Nucleic Acid
  misc_feature: oligonucleotide substrate
cggugaguacacc

SEQ ID NO: 7216 - RNA, 13 nt, Artificial Sequence
  Description of Artificial Sequence:  Nucleic Acid
  misc_feature: oligonucleotide substrate
cuucacgcagaaa

SEQ ID NO: 7217 - RNA, 13 nt, Artificial Sequence
  Description of Artificial Sequence:  Nucleic Acid
  misc_feature: oligonucleotide substrate
gcguuaguaugag

SEQ ID NO: 7218 - RNA, 15 nt, Artificial Sequence
  Description of Artificial Sequence:  Nucleic Acid
  misc_feature: oligonucleotide substrate
agccauaguggucug

SEQ ID NO: 7219 - RNA, 13 nt, Artificial Sequence
  Description of Artificial Sequence:  Nucleic Acid
  misc_feature: oligonucleotide substrate
gaaccggugagua

SEQ ID NO: 7220 - RNA, 15 nt, Artificial Sequence
  Description of Artificial Sequence:  Nucleic Acid
  misc_feature: oligonucleotide substrate
ccggugaguacaccg

SEQ ID NO: 7221 - RNA, 13 nt, Artificial Sequence
  Description of Artificial Sequence:  Nucleic Acid
  misc_feature: oligonucleotide substrate
gagacugcuagcc

SEQ ID NO: 7222 - RNA, 15 nt, Artificial Sequence
  Description of Artificial Sequence:  Nucleic Acid
  misc_feature: oligonucleotide substrate
cgagacugcuagccg

SEQ ID NO: 7223 - RNA, 13 nt, Artificial Sequence
  Description of Artificial Sequence:  Nucleic Acid
  misc_feature: oligonucleotide substrate
cgaaaggccuugu

SEQ ID NO: 7224 - RNA, 13 nt, Artificial Sequence
  Description of Artificial Sequence:  Nucleic Acid
  misc_feature: oligonucleotide substrate
cuugugguacugc

SEQ ID NO: 7225 - RNA, 13 nt, Artificial Sequence
  Description of Artificial Sequence:  Nucleic Acid
  misc_feature: oligonucleotide substrate
gauagggugcuug

SEQ ID NO: 7226 - RNA, 13 nt, Artificial Sequence
  Description of Artificial Sequence:  Nucleic Acid
  misc_feature: oligonucleotide substrate
ggucucguagacc

SEQ ID NO: 7227 - RNA, 15 nt, Artificial Sequence
  Description of Artificial Sequence:  Nucleic Acid
  misc_feature: oligonucleotide substrate
aggucucguagaccg

SEQ ID NO: 7228 - RNA, 13 nt, Artificial Sequence
  Description of Artificial Sequence:  Nucleic Acid
  misc_feature: oligonucleotide substrate
uagaccgugcacc

SEQ ID NO: 7229 - RNA, 15 nt, Artificial Sequence
  Description of Artificial Sequence:  Nucleic Acid
  misc_feature: oligonucleotide substrate
uaaaccucaaagaaa

SEQ ID NO: 7230 - RNA, 15 nt, Artificial Sequence
  Description of Artificial Sequence:  Nucleic Acid
  misc_feature: oligonucleotide substrate
caaacguaacaccaa

SEQ ID NO: 7231 - RNA, 15 nt, Artificial Sequence
  Description of Artificial Sequence:  Nucleic Acid
  misc_feature: oligonucleotide substrate
caaccgucgcccaca

SEQ ID NO: 7232 - RNA, 15 nt, Artificial Sequence
  Description of Artificial Sequence:  Nucleic Acid
  misc_feature: oligonucleotide substrate
gagcggucacaaccu

SEQ ID NO: 7233 - RNA, 15 nt, Artificial Sequence
  Description of Artificial Sequence:  Nucleic Acid
  misc_feature: oligonucleotide substrate
guaaggucaucgaua

SEQ ID NO: 7234 - RNA, 23 nt, Artificial Sequence
  Description of Artificial Sequence:  Nucleic Acid
  misc_feature: oligonucleotide substrate
ugguggcuccaucuuagcccuag

SEQ ID NO: 7235 - RNA, 23 nt, Artificial Sequence
  Description of Artificial Sequence:  Nucleic Acid
  misc_feature: oligonucleotide substrate
gguggcuccaucuuagcccuagu

SEQ ID NO: 7236 - RNA, 23 nt, Artificial Sequence
  Description of Artificial Sequence:  Nucleic Acid
  misc_feature: oligonucleotide substrate
guggcuccaucuuagcccuaguc

SEQ ID NO: 7237 - RNA, 23 nt, Artificial Sequence
  Description of Artificial Sequence:  Nucleic Acid
  misc_feature: oligonucleotide substrate
uggcuccaucuuagcccuaguca

SEQ ID NO: 7238 - RNA, 23 nt, Artificial Sequence
  Description of Artificial Sequence:  Nucleic Acid
  misc_feature: oligonucleotide substrate
ggcuccaucuuagcccuagucac

SEQ ID NO: 7239 - RNA, 23 nt, Artificial Sequence
  Description of Artificial Sequence:  Nucleic Acid
  misc_feature: oligonucleotide substrate
gcuccaucuuagcccuagucacg

SEQ ID NO: 7240 - RNA, 23 nt, Artificial Sequence
  Description of Artificial Sequence:  Nucleic Acid
  misc_feature: oligonucleotide substrate
cuccaucuuagcccuagucacgg

SEQ ID NO: 7241 - RNA, 23 nt, Artificial Sequence
  Description of Artificial Sequence:  Nucleic Acid
  misc_feature: oligonucleotide substrate
uccaucuuagcccuagucacggc

SEQ ID NO: 7242 - RNA, 23 nt, Artificial Sequence
  Description of Artificial Sequence:  Nucleic Acid
  misc_feature: oligonucleotide substrate
ccaucuuagcccuagucacggcu

SEQ ID NO: 7243 - RNA, 23 nt, Artificial Sequence
  Description of Artificial Sequence:  Nucleic Acid
  misc_feature: oligonucleotide substrate
caucuuagcccuagucacggcua

SEQ ID NO: 7244 - RNA, 23 nt, Artificial Sequence
  Description of Artificial Sequence:  Nucleic Acid
  misc_feature: oligonucleotide substrate
aucuuagcccuagucacggcuag

SEQ ID NO: 7245 - RNA, 23 nt, Artificial Sequence
  Description of Artificial Sequence:  Nucleic Acid
  misc_feature: oligonucleotide substrate
ucuuagcccuagucacggcuagc

SEQ ID NO: 7246 - RNA, 23 nt, Artificial Sequence
  Description of Artificial Sequence:  Nucleic Acid
  misc_feature: oligonucleotide substrate
cuuagcccuagucacggcuagcu

SEQ ID NO: 7247 - RNA, 23 nt, Artificial Sequence
  Description of Artificial Sequence:  Nucleic Acid
  misc_feature: oligonucleotide substrate
uuagcccuagucacggcuagcug

SEQ ID NO: 7248 - RNA, 23 nt, Artificial Sequence
  Description of Artificial Sequence:  Nucleic Acid
  misc_feature: oligonucleotide substrate
uagcccuagucacggcuagcugu

SEQ ID NO: 7249 - RNA, 23 nt, Artificial Sequence
  Description of Artificial Sequence:  Nucleic Acid
  misc_feature: oligonucleotide substrate
agcccuagucacggcuagcugug

SEQ ID NO: 7250 - RNA, 23 nt, Artificial Sequence
  Description of Artificial Sequence:  Nucleic Acid
  misc_feature: oligonucleotide substrate
gcccuagucacggcuagcuguga

SEQ ID NO: 7251 - RNA, 23 nt, Artificial Sequence
  Description of Artificial Sequence:  Nucleic Acid
  misc_feature: oligonucleotide substrate
cccuagucacggcuagcugugaa

SEQ ID NO: 7252 - RNA, 23 nt, Artificial Sequence
  Description of Artificial Sequence:  Nucleic Acid
  misc_feature: oligonucleotide substrate
ccuagucacggcuagcugugaaa

SEQ ID NO: 7253 - RNA, 23 nt, Artificial Sequence
  Description of Artificial Sequence:  Nucleic Acid
  misc_feature: oligonucleotide substrate
cuagucacggcuagcugugaaag

SEQ ID NO: 7254 - RNA, 23 nt, Artificial Sequence
  Description of Artificial Sequence:  Nucleic Acid
  misc_feature: oligonucleotide substrate
uagucacggcuagcugugaaagg

SEQ ID NO: 7255 - RNA, 23 nt, Artificial Sequence
  Description of Artificial Sequence:  Nucleic Acid
  misc_feature: oligonucleotide substrate
agucacggcuagcugugaaaggu

SEQ ID NO: 7256 - RNA, 23 nt, Artificial Sequence
  Description of Artificial Sequence:  Nucleic Acid
  misc_feature: oligonucleotide substrate
gucacggcuagcugugaaagguc

SEQ ID NO: 7257 - RNA, 23 nt, Artificial Sequence
  Description of Artificial Sequence:  Nucleic Acid
  misc_feature: oligonucleotide substrate
ucacggcuagcugugaaaggucc

SEQ ID NO: 7258 - RNA, 23 nt, Artificial Sequence
  Description of Artificial Sequence:  Nucleic Acid
  misc_feature: oligonucleotide substrate
cacggcuagcugugaaagguccg

SEQ ID NO: 7259 - RNA, 23 nt, Artificial Sequence
  Description of Artificial Sequence:  Nucleic Acid
  misc_feature: oligonucleotide substrate
acggcuagcugugaaagguccgu

SEQ ID NO: 7260 - RNA, 23 nt, Artificial Sequence
  Description of Artificial Sequence:  Nucleic Acid
  misc_feature: oligonucleotide substrate
cggcuagcugugaaagguccgug

SEQ ID NO: 7261 - RNA, 23 nt, Artificial Sequence
  Description of Artificial Sequence:  Nucleic Acid
  misc_feature: oligonucleotide substrate
ggcuagcugugaaagguccguga

SEQ ID NO: 7262 - RNA, 23 nt, Artificial Sequence
  Description of Artificial Sequence:  Nucleic Acid
  misc_feature: oligonucleotide substrate
gcuagcugugaaagguccgugag

SEQ ID NO: 7263 - RNA, 23 nt, Artificial Sequence
  Description of Artificial Sequence:  Nucleic Acid
  misc_feature: oligonucleotide substrate
cuagcugugaaagguccgugagc

SEQ ID NO: 7264 - RNA, 23 nt, Artificial Sequence
  Description of Artificial Sequence:  Nucleic Acid
  misc_feature: oligonucleotide substrate
gcaugacugcagagagugcugau

SEQ ID NO: 7265 - RNA, 23 nt, Artificial Sequence
  Description of Artificial Sequence:  Nucleic Acid
  misc_feature: oligonucleotide substrate
caugacugcagagagugcugaua

SEQ ID NO: 7266 - RNA, 23 nt, Artificial Sequence
  Description of Artificial Sequence:  Nucleic Acid
  misc_feature: oligonucleotide substrate
augacugcagagagugcugauac

SEQ ID NO: 7267 - RNA, 23 nt, Artificial Sequence
  Description of Artificial Sequence:  Nucleic Acid
  misc_feature: oligonucleotide substrate
ugacugcagagagugcugauacu

SEQ ID NO: 7268 - RNA, 23 nt, Artificial Sequence
  Description of Artificial Sequence:  Nucleic Acid
  misc_feature: oligonucleotide substrate
gacugcagagagugcugauacug

SEQ ID NO: 7269 - RNA, 23 nt, Artificial Sequence
  Description of Artificial Sequence:  Nucleic Acid
  misc_feature: oligonucleotide substrate
acugcagagagugcugauacugg

SEQ ID NO: 7270 - RNA, 23 nt, Artificial Sequence
  Description of Artificial Sequence:  Nucleic Acid
  misc_feature: oligonucleotide substrate
cugcagagagugcugauacuggc

SEQ ID NO: 7271 - RNA, 23 nt, Artificial Sequence
  Description of Artificial Sequence:  Nucleic Acid
  misc_feature: oligonucleotide substrate
ugcagagagugcugauacuggcc

SEQ ID NO: 7272 - RNA, 23 nt, Artificial Sequence
  Description of Artificial Sequence:  Nucleic Acid
  misc_feature: oligonucleotide substrate
gcagagagugcugauacuggccu

SEQ ID NO: 7273 - RNA, 23 nt, Artificial Sequence
  Description of Artificial Sequence:  Nucleic Acid
  misc_feature: oligonucleotide substrate
cagagagugcugauacuggccuc

SEQ ID NO: 7274 - RNA, 23 nt, Artificial Sequence
  Description of Artificial Sequence:  Nucleic Acid
  misc_feature: oligonucleotide substrate
agagagugcugauacuggccucu

SEQ ID NO: 7275 - RNA, 23 nt, Artificial Sequence
  Description of Artificial Sequence:  Nucleic Acid
  misc_feature: oligonucleotide substrate
gagagugcugauacuggccucuc

SEQ ID NO: 7276 - RNA, 13 nt, Artificial Sequence
  Description of Artificial Sequence:  Nucleic Acid
  misc_feature: oligonucleotide substrate
cggaaccggugag

SEQ ID NO: 7277 - RNA, 13 nt, Artificial Sequence
  Description of Artificial Sequence:  Nucleic Acid
  misc_feature: oligonucleotide substrate
gaguacaccggaa

SEQ ID NO: 7278 - RNA, 13 nt, Artificial Sequence
  Description of Artificial Sequence:  Nucleic Acid
  misc_feature: oligonucleotide substrate
gagagccauagug

SEQ ID NO: 7279 - RNA, 13 nt, Artificial Sequence
  Description of Artificial Sequence:  Nucleic Acid
  misc_feature: oligonucleotide substrate
agagccauagugg

SEQ ID NO: 7280 - RNA, 13 nt, Artificial Sequence
  Description of Artificial Sequence:  Nucleic Acid
  misc_feature: oligonucleotide substrate
aaggccuuguggu

SEQ ID NO: 7281 - RNA, 13 nt, Artificial Sequence
  Description of Artificial Sequence:  Nucleic Acid
  misc_feature: oligonucleotide substrate
cccucccgggaga

SEQ ID NO: 7282 - RNA, 13 nt, Artificial Sequence
  Description of Artificial Sequence:  Nucleic Acid
  misc_feature: oligonucleotide substrate
aaaggccuugugg

SEQ ID NO: 7283 - RNA, 13 nt, Artificial Sequence
  Description of Artificial Sequence:  Nucleic Acid
  misc_feature: oligonucleotide substrate
guggucugcggaa

SEQ ID NO: 7284 - RNA, 13 nt, Artificial Sequence
  Description of Artificial Sequence:  Nucleic Acid
  misc_feature: oligonucleotide substrate
ggguccuuucuug

SEQ ID NO: 7285 - RNA, 13 nt, Artificial Sequence
  Description of Artificial Sequence:  Nucleic Acid
  misc_feature: oligonucleotide substrate
gcuagccgaguag

SEQ ID NO: 7286 - RNA, 13 nt, Artificial Sequence
  Description of Artificial Sequence:  Nucleic Acid
  misc_feature: oligonucleotide substrate
acugccugauagg

SEQ ID NO: 7287 - RNA, 13 nt, Artificial Sequence
  Description of Artificial Sequence:  Nucleic Acid
  misc_feature: oligonucleotide substrate
uacugccugauag

SEQ ID NO: 7288 - RNA, 13 nt, Artificial Sequence
  Description of Artificial Sequence:  Nucleic Acid
  misc_feature: oligonucleotide substrate
ugguacugccuga

SEQ ID NO: 7289 - RNA, 13 nt, Artificial Sequence
  Description of Artificial Sequence:  Nucleic Acid
  misc_feature: oligonucleotide substrate
guacaccggaauu

SEQ ID NO: 7290 - RNA, 15 nt, Artificial Sequence
  Description of Artificial Sequence:  Nucleic Acid
  misc_feature: oligonucleotide substrate
guacugccugauagg

SEQ ID NO: 7291 - RNA, 15 nt, Artificial Sequence
  Description of Artificial Sequence:  Nucleic Acid
  misc_feature: oligonucleotide substrate
uacugccugauaggg

SEQ ID NO: 7292 - RNA, 15 nt, Artificial Sequence
  Description of Artificial Sequence:  Nucleic Acid
  misc_feature: oligonucleotide substrate
aaaggccuuguggua

SEQ ID NO: 7293 - RNA, 13 nt, Artificial Sequence
  Description of Artificial Sequence:  Nucleic Acid
  misc_feature: oligonucleotide substrate
ugaguacaccgga

SEQ ID NO: 7294 - RNA, 13 nt, Artificial Sequence
  Description of Artificial Sequence:  Nucleic Acid
  misc_feature: oligonucleotide substrate
aguacaccggaau

SEQ ID NO: 7295 - RNA, 13 nt, Artificial Sequence
  Description of Artificial Sequence:  Nucleic Acid
  misc_feature: oligonucleotide substrate
gagccauaguggu

SEQ ID NO: 7296 - RNA, 13 nt, Artificial Sequence
  Description of Artificial Sequence:  Nucleic Acid
  misc_feature: oligonucleotide substrate
gcggaaccgguga

SEQ ID NO: 7297 - RNA, 13 nt, Artificial Sequence
  Description of Artificial Sequence:  Nucleic Acid
  misc_feature: oligonucleotide substrate
ugcggaaccggug

SEQ ID NO: 7298 - RNA, 13 nt, Artificial Sequence
  Description of Artificial Sequence:  Nucleic Acid
  misc_feature: oligonucleotide substrate
gugguacugccug

SEQ ID NO: 7299 - RNA, 13 nt, Artificial Sequence
  Description of Artificial Sequence:  Nucleic Acid
  misc_feature: oligonucleotide substrate
gccugauagggug

SEQ ID NO: 7300 - RNA, 15 nt, Artificial Sequence
  Description of Artificial Sequence:  Nucleic Acid
  misc_feature: oligonucleotide substrate
gugaguacaccggaa

SEQ ID NO: 7301 - RNA, 15 nt, Artificial Sequence
  Description of Artificial Sequence:  Nucleic Acid
  misc_feature: oligonucleotide substrate
agagccauagugguc

SEQ ID NO: 7302 - RNA, 15 nt, Artificial Sequence
  Description of Artificial Sequence:  Nucleic Acid
  misc_feature: oligonucleotide substrate
ugcggaaccggugag

SEQ ID NO: 7303 - RNA, 15 nt, Artificial Sequence
  Description of Artificial Sequence:  Nucleic Acid
  misc_feature: oligonucleotide substrate
cugcggaaccgguga

SEQ ID NO: 7304 - RNA, 15 nt, Artificial Sequence
  Description of Artificial Sequence:  Nucleic Acid
  misc_feature: oligonucleotide substrate
ugugguacugccuga

SEQ ID NO: 7305 - RNA, 15 nt, Artificial Sequence
  Description of Artificial Sequence:  Nucleic Acid
  misc_feature: oligonucleotide substrate
ugccugauagggugc

SEQ ID NO: 7306 - RNA, 15 nt, Artificial Sequence
  Description of Artificial Sequence:  Nucleic Acid
  misc_feature: oligonucleotide substrate
gaguacaccggaauu

SEQ ID NO: 7307 - RNA, 13 nt, Artificial Sequence
  Description of Artificial Sequence:  Nucleic Acid
  misc_feature: oligonucleotide substrate
uccgguguacuca

SEQ ID NO: 7308 - RNA, 13 nt, Artificial Sequence
  Description of Artificial Sequence:  Nucleic Acid
  misc_feature: oligonucleotide substrate
auuccgguguacu

SEQ ID NO: 7309 - RNA, 13 nt, Artificial Sequence
  Description of Artificial Sequence:  Nucleic Acid
  misc_feature: oligonucleotide substrate
acuauggcucucc

SEQ ID NO: 7310 - RNA, 13 nt, Artificial Sequence
  Description of Artificial Sequence:  Nucleic Acid
  misc_feature: oligonucleotide substrate
ucaccgguuccgc

SEQ ID NO: 7311 - RNA, 13 nt, Artificial Sequence
  Description of Artificial Sequence:  Nucleic Acid
  misc_feature: oligonucleotide substrate
gcgggggcacgcc

SEQ ID NO: 7312 - RNA, 13 nt, Artificial Sequence
  Description of Artificial Sequence:  Nucleic Acid
  misc_feature: oligonucleotide substrate
cacaaggccuuuc

SEQ ID NO: 7313 - RNA, 13 nt, Artificial Sequence
  Description of Artificial Sequence:  Nucleic Acid
  misc_feature: oligonucleotide substrate
gguuccgcagacc

SEQ ID NO: 7314 - RNA, 13 nt, Artificial Sequence
  Description of Artificial Sequence:  Nucleic Acid
  misc_feature: oligonucleotide substrate
uaucaggcaguac

SEQ ID NO: 7315 - RNA, 13 nt, Artificial Sequence
  Description of Artificial Sequence:  Nucleic Acid
  misc_feature: oligonucleotide substrate
caggcaguaccac

SEQ ID NO: 7316 - RNA, 15 nt, Artificial Sequence
  Description of Artificial Sequence:  Nucleic Acid
  misc_feature: oligonucleotide substrate
uuccgguguacucac

SEQ ID NO: 7317 - RNA, 15 nt, Artificial Sequence
  Description of Artificial Sequence:  Nucleic Acid
  misc_feature: oligonucleotide substrate
ccacaaggccuuucg

SEQ ID NO: 7318 - RNA, 15 nt, Artificial Sequence
  Description of Artificial Sequence:  Nucleic Acid
  misc_feature: oligonucleotide substrate
cucaccgguuccgca

SEQ ID NO: 7319 - RNA, 15 nt, Artificial Sequence
  Description of Artificial Sequence:  Nucleic Acid
  misc_feature: oligonucleotide substrate
cacuauggcucuccc

SEQ ID NO: 7320 - RNA, 15 nt, Artificial Sequence
  Description of Artificial Sequence:  Nucleic Acid
  misc_feature: oligonucleotide substrate
cgguuccgcagacca

SEQ ID NO: 7321 - RNA, 15 nt, Artificial Sequence
  Description of Artificial Sequence:  Nucleic Acid
  misc_feature: oligonucleotide substrate
cuaucaggcaguacc

SEQ ID NO: 7322 - RNA, 15 nt, Artificial Sequence
  Description of Artificial Sequence:  Nucleic Acid
  misc_feature: oligonucleotide substrate
ucaggcaguaccaca

SEQ ID NO: 7323 - RNA, 15 nt, Artificial Sequence
  Description of Artificial Sequence:  Nucleic Acid
  misc_feature: oligonucleotide substrate
aauuccgguguacuc

SEQ ID NO: 7324 - RNA, 13 nt, Artificial Sequence
  Description of Artificial Sequence:  Nucleic Acid
  misc_feature: oligonucleotide substrate
gguguacucaccg

SEQ ID NO: 7325 - RNA, 13 nt, Artificial Sequence
  Description of Artificial Sequence:  Nucleic Acid
  misc_feature: oligonucleotide substrate
uacucaccgguuc

SEQ ID NO: 7326 - RNA, 13 nt, Artificial Sequence
  Description of Artificial Sequence:  Nucleic Acid
  misc_feature: oligonucleotide substrate
ccacuauggcucu

SEQ ID NO: 7327 - RNA, 13 nt, Artificial Sequence
  Description of Artificial Sequence:  Nucleic Acid
  misc_feature: oligonucleotide substrate
accacaaggccuu

SEQ ID NO: 7328 - RNA, 13 nt, Artificial Sequence
  Description of Artificial Sequence:  Nucleic Acid
  misc_feature: oligonucleotide substrate
ggggcacgcccaa

SEQ ID NO: 7329 - RNA, 13 nt, Artificial Sequence
  Description of Artificial Sequence:  Nucleic Acid
  misc_feature: oligonucleotide substrate
agaccacuauggc

SEQ ID NO: 7330 - RNA, 13 nt, Artificial Sequence
  Description of Artificial Sequence:  Nucleic Acid
  misc_feature: oligonucleotide substrate
cgcagaccacuau

SEQ ID NO: 7331 - RNA, 13 nt, Artificial Sequence
  Description of Artificial Sequence:  Nucleic Acid
  misc_feature: oligonucleotide substrate
ccaagaaaggacc

SEQ ID NO: 7332 - RNA, 13 nt, Artificial Sequence
  Description of Artificial Sequence:  Nucleic Acid
  misc_feature: oligonucleotide substrate
caagaaaggaccc

SEQ ID NO: 7333 - RNA, 13 nt, Artificial Sequence
  Description of Artificial Sequence:  Nucleic Acid
  misc_feature: oligonucleotide substrate
guaccacaaggcc

SEQ ID NO: 7334 - RNA, 13 nt, Artificial Sequence
  Description of Artificial Sequence:  Nucleic Acid
  misc_feature: oligonucleotide substrate
gcaguaccacaag

SEQ ID NO: 7335 - RNA, 13 nt, Artificial Sequence
  Description of Artificial Sequence:  Nucleic Acid
  misc_feature: oligonucleotide substrate
acccuaucaggca

SEQ ID NO: 7336 - RNA, 13 nt, Artificial Sequence
  Description of Artificial Sequence:  Nucleic Acid
  misc_feature: oligonucleotide substrate
aaaggacccgguc

SEQ ID NO: 7337 - RNA, 15 nt, Artificial Sequence
  Description of Artificial Sequence:  Nucleic Acid
  misc_feature: oligonucleotide substrate
cgguguacucaccgg

SEQ ID NO: 7338 - RNA, 15 nt, Artificial Sequence
  Description of Artificial Sequence:  Nucleic Acid
  misc_feature: oligonucleotide substrate
accacuauggcucuc

SEQ ID NO: 7339 - RNA, 15 nt, Artificial Sequence
  Description of Artificial Sequence:  Nucleic Acid
  misc_feature: oligonucleotide substrate
guacucaccgguucc

SEQ ID NO: 7340 - RNA, 15 nt, Artificial Sequence
  Description of Artificial Sequence:  Nucleic Acid
  misc_feature: oligonucleotide substrate
gggggcacgcccaaa

SEQ ID NO: 7341 - RNA, 15 nt, Artificial Sequence
  Description of Artificial Sequence:  Nucleic Acid
  misc_feature: oligonucleotide substrate
cagaccacuauggcu

SEQ ID NO: 7342 - RNA, 15 nt, Artificial Sequence
  Description of Artificial Sequence:  Nucleic Acid
  misc_feature: oligonucleotide substrate
ccgcagaccacuaug

SEQ ID NO: 7343 - RNA, 15 nt, Artificial Sequence
  Description of Artificial Sequence:  Nucleic Acid
  misc_feature: oligonucleotide substrate
uccaagaaaggaccc

SEQ ID NO: 7344 - RNA, 15 nt, Artificial Sequence
  Description of Artificial Sequence:  Nucleic Acid
  misc_feature: oligonucleotide substrate
aguaccacaaggccu

SEQ ID NO: 7345 - RNA, 15 nt, Artificial Sequence
  Description of Artificial Sequence:  Nucleic Acid
  misc_feature: oligonucleotide substrate
uaccacaaggccuuu

SEQ ID NO: 7346 - RNA, 15 nt, Artificial Sequence
  Description of Artificial Sequence:  Nucleic Acid
  misc_feature: oligonucleotide substrate
cacccuaucaggcag

SEQ ID NO: 7347 - RNA, 15 nt, Artificial Sequence
  Description of Artificial Sequence:  Nucleic Acid
  misc_feature: oligonucleotide substrate
ggcaguaccacaagg

SEQ ID NO: 7348 - RNA, 15 nt, Artificial Sequence
  Description of Artificial Sequence:  Nucleic Acid
  misc_feature: oligonucleotide substrate
ucucagugucuucca

SEQ ID NO: 7349 - RNA, 15 nt, Artificial Sequence
  Description of Artificial Sequence:  Nucleic Acid
  misc_feature: oligonucleotide substrate
uguauaugccucucc

SEQ ID NO: 7350 - RNA, 15 nt, Artificial Sequence
  Description of Artificial Sequence:  Nucleic Acid
  misc_feature: oligonucleotide substrate
accgugugccuuaga

SEQ ID NO: 7351 - RNA, 15 nt, Artificial Sequence
  Description of Artificial Sequence:  Nucleic Acid
  misc_feature: oligonucleotide substrate
guggagugagguggu

SEQ ID NO: 7352 - RNA, 15 nt, Artificial Sequence
  Description of Artificial Sequence:  Nucleic Acid
  misc_feature: oligonucleotide substrate
acgaguugaaccugu

SEQ ID NO: 7353 - RNA, 15 nt, Artificial Sequence
  Description of Artificial Sequence:  Nucleic Acid
  misc_feature: oligonucleotide substrate
ccugucugaccaucc

SEQ ID NO: 7354 - RNA, 15 nt, Artificial Sequence
  Description of Artificial Sequence:  Nucleic Acid
  misc_feature: oligonucleotide substrate
uccuguugcuuuucc

SEQ ID NO: 7355 - RNA, 15 nt, Artificial Sequence
  Description of Artificial Sequence:  Nucleic Acid
  misc_feature: oligonucleotide substrate
uccucguguucuucu

SEQ ID NO: 7356 - RNA, 15 nt, Artificial Sequence
  Description of Artificial Sequence:  Nucleic Acid
  misc_feature: oligonucleotide substrate
acaaagugcucgucc

SEQ ID NO: 7357 - RNA, 15 nt, Artificial Sequence
  Description of Artificial Sequence:  Nucleic Acid
  misc_feature: oligonucleotide substrate
gccacuugaccuacc

SEQ ID NO: 7358 - RNA, 15 nt, Artificial Sequence
  Description of Artificial Sequence:  Nucleic Acid
  misc_feature: oligonucleotide substrate
cuuccucgucucuca

SEQ ID NO: 7359 - RNA, 15 nt, Artificial Sequence
  Description of Artificial Sequence:  Nucleic Acid
  misc_feature: oligonucleotide substrate
cucagcuguucaccu

SEQ ID NO: 7360 - RNA, 15 nt, Artificial Sequence
  Description of Artificial Sequence:  Nucleic Acid
  misc_feature: oligonucleotide substrate
cacuccagucaacuc

SEQ ID NO: 7361 - RNA, 15 nt, Artificial Sequence
  Description of Artificial Sequence:  Nucleic Acid
  misc_feature: oligonucleotide substrate
ucgccgcguccucuu

SEQ ID NO: 7362 - RNA, 15 nt, Artificial Sequence
  Description of Artificial Sequence:  Nucleic Acid
  misc_feature: oligonucleotide substrate
ccuccacguacuccu

SEQ ID NO: 7363 - RNA, 15 nt, Artificial Sequence
  Description of Artificial Sequence:  Nucleic Acid
  misc_feature: oligonucleotide substrate
uccacaugugcuucg

SEQ ID NO: 7364 - RNA, 15 nt, Artificial Sequence
  Description of Artificial Sequence:  Nucleic Acid
  misc_feature: oligonucleotide substrate
ucacgccgucuucca

SEQ ID NO: 7365 - RNA, 15 nt, Artificial Sequence
  Description of Artificial Sequence:  Nucleic Acid
  misc_feature: oligonucleotide substrate
cucuaucuuccucuu

SEQ ID NO: 7366 - RNA, 15 nt, Artificial Sequence
  Description of Artificial Sequence:  Nucleic Acid
  misc_feature: oligonucleotide substrate
ucucagcuguucacc

SEQ ID NO: 7367 - RNA, 15 nt, Artificial Sequence
  Description of Artificial Sequence:  Nucleic Acid
  misc_feature: oligonucleotide substrate
uccucuccuuccucg

SEQ ID NO: 7368 - RNA, 15 nt, Artificial Sequence
  Description of Artificial Sequence:  Nucleic Acid
  misc_feature: oligonucleotide substrate
ucacagccuccauca

SEQ ID NO: 7369 - RNA, 15 nt, Artificial Sequence
  Description of Artificial Sequence:  Nucleic Acid
  misc_feature: oligonucleotide substrate
cuccacccuuccuca

SEQ ID NO: 7370 - RNA, 15 nt, Artificial Sequence
  Description of Artificial Sequence:  Nucleic Acid
  misc_feature: oligonucleotide substrate
uggugucucaguguc

SEQ ID NO: 7371 - RNA, 15 nt, Artificial Sequence
  Description of Artificial Sequence:  Nucleic Acid
  misc_feature: oligonucleotide substrate
cuucgccuucaucuc

SEQ ID NO: 7372 - RNA, 15 nt, Artificial Sequence
  Description of Artificial Sequence:  Nucleic Acid
  misc_feature: oligonucleotide substrate
accucucucucaucc

SEQ ID NO: 7373 - RNA, 15 nt, Artificial Sequence
  Description of Artificial Sequence:  Nucleic Acid
  misc_feature: oligonucleotide substrate
uucauccacugcaca

SEQ ID NO: 7374 - RNA, 15 nt, Artificial Sequence
  Description of Artificial Sequence:  Nucleic Acid
  misc_feature: oligonucleotide substrate
caacagcaucaucca

SEQ ID NO: 7375 - RNA, 15 nt, Artificial Sequence
  Description of Artificial Sequence:  Nucleic Acid
  misc_feature: oligonucleotide substrate
uccucgucucucagc

SEQ ID NO: 7376 - RNA, 15 nt, Artificial Sequence
  Description of Artificial Sequence:  Nucleic Acid
  misc_feature: oligonucleotide substrate
ggcacauuaacagga

SEQ ID NO: 7377 - RNA, 15 nt, Artificial Sequence
  Description of Artificial Sequence:  Nucleic Acid
  misc_feature: oligonucleotide substrate
gcauccucuccuucc

SEQ ID NO: 7378 - RNA, 15 nt, Artificial Sequence
  Description of Artificial Sequence:  Nucleic Acid
  misc_feature: oligonucleotide substrate
gaggaguacguggag

SEQ ID NO: 7379 - RNA, 15 nt, Artificial Sequence
  Description of Artificial Sequence:  Nucleic Acid
  misc_feature: oligonucleotide substrate
gcgcauuuucacucc

SEQ ID NO: 7380 - RNA, 15 nt, Artificial Sequence
  Description of Artificial Sequence:  Nucleic Acid
  misc_feature: oligonucleotide substrate
gacucguaggcucgc

SEQ ID NO: 7381 - RNA, 15 nt, Artificial Sequence
  Description of Artificial Sequence:  Nucleic Acid
  misc_feature: oligonucleotide substrate
ucagugucuuccagc

SEQ ID NO: 7382 - RNA, 15 nt, Artificial Sequence
  Description of Artificial Sequence:  Nucleic Acid
  misc_feature: oligonucleotide substrate
ccucucucucauccu

SEQ ID NO: 7383 - RNA, 15 nt, Artificial Sequence
  Description of Artificial Sequence:  Nucleic Acid
  misc_feature: oligonucleotide substrate
uccacguacuccuca

SEQ ID NO: 7384 - RNA, 15 nt, Artificial Sequence
  Description of Artificial Sequence:  Nucleic Acid
  misc_feature: oligonucleotide substrate
cgugcauauccaguc

SEQ ID NO: 7385 - RNA, 15 nt, Artificial Sequence
  Description of Artificial Sequence:  Nucleic Acid
  misc_feature: oligonucleotide substrate
uuucucuaucuuccu

SEQ ID NO: 7386 - RNA, 15 nt, Artificial Sequence
  Description of Artificial Sequence:  Nucleic Acid
  misc_feature: oligonucleotide substrate
agccuccaucaccag

SEQ ID NO: 7387 - RNA, 15 nt, Artificial Sequence
  Description of Artificial Sequence:  Nucleic Acid
  misc_feature: oligonucleotide substrate
ucaacgcauacacca

SEQ ID NO: 7388 - RNA, 15 nt, Artificial Sequence
  Description of Artificial Sequence:  Nucleic Acid
  misc_feature: oligonucleotide substrate
cgccuucaucuccuu

SEQ ID NO: 7389 - RNA, 15 nt, Artificial Sequence
  Description of Artificial Sequence:  Nucleic Acid
  misc_feature: oligonucleotide substrate
cucucucauccuccu

SEQ ID NO: 7390 - RNA, 15 nt, Artificial Sequence
  Description of Artificial Sequence:  Nucleic Acid
  misc_feature: oligonucleotide substrate
ccuccaaaucacaac

SEQ ID NO: 7391 - RNA, 16 nt, Artificial Sequence
  Description of Artificial Sequence:  Nucleic Acid
  misc_feature (16)..(16): n is inverted deoxyabasic
uccucgucucucagcn

SEQ ID NO: 7392 - RNA, 16 nt, Artificial Sequence
  Description of Artificial Sequence:  Nucleic Acid
  misc_feature (16)..(16): n is inverted deoxyabasic
ggcacauuaacaggan

SEQ ID NO: 7393 - RNA, 16 nt, Artificial Sequence
  Description of Artificial Sequence:  Nucleic Acid
  misc_feature (16)..(16): n is inverted deoxyabasic
gcauccucuccuuccn

SEQ ID NO: 7394 - RNA, 16 nt, Artificial Sequence
  Description of Artificial Sequence:  Nucleic Acid
  misc_feature (16)..(16): n is inverted deoxyabasic
gaggaguacguggagn

SEQ ID NO: 7395 - RNA, 16 nt, Artificial Sequence
  Description of Artificial Sequence:  Nucleic Acid
  misc_feature (16)..(16): n is inverted deoxyabasic
gcgcauuuucacuccn

SEQ ID NO: 7396 - RNA, 16 nt, Artificial Sequence
  Description of Artificial Sequence:  Nucleic Acid
  misc_feature (16)..(16): n is inverted deoxyabasic
gacucguaggcucgcn

SEQ ID NO: 7397 - RNA, 16 nt, Artificial Sequence
  Description of Artificial Sequence:  Nucleic Acid
  misc_feature (16)..(16): n is inverted deoxyabasic
ucagugucuuccagcn

SEQ ID NO: 7398 - RNA, 16 nt, Artificial Sequence
  Description of Artificial Sequence:  Nucleic Acid
  misc_feature (16)..(16): n is inverted deoxyabasic
ccucucucucauccun

SEQ ID NO: 7399 - RNA, 16 nt, Artificial Sequence
  Description of Artificial Sequence:  Nucleic Acid
  misc_feature (16)..(16): n is inverted deoxyabasic
uccacguacuccucan

SEQ ID NO: 7400 - RNA, 16 nt, Artificial Sequence
  Description of Artificial Sequence:  Nucleic Acid
  misc_feature (16)..(16): n is inverted deoxyabasic
cgugcauauccagucn

SEQ ID NO: 7401 - RNA, 16 nt, Artificial Sequence
  Description of Artificial Sequence:  Nucleic Acid
  misc_feature (16)..(16): n is inverted deoxyabasic
uuucucuaucuuccun

SEQ ID NO: 7402 - RNA, 16 nt, Artificial Sequence
  Description of Artificial Sequence:  Nucleic Acid
  misc_feature (16)..(16): n is inverted deoxyabasic
cuuccucgucucucan

SEQ ID NO: 7403 - RNA, 16 nt, Artificial Sequence
  Description of Artificial Sequence:  Nucleic Acid
  misc_feature (16)..(16): n is inverted deoxyabasic
cucagcuguucaccun

SEQ ID NO: 7404 - RNA, 16 nt, Artificial Sequence
  Description of Artificial Sequence:  Nucleic Acid
  misc_feature (16)..(16): n is inverted deoxyabasic
agccuccaucaccagn

SEQ ID NO: 7405 - RNA, 16 nt, Artificial Sequence
  Description of Artificial Sequence:  Nucleic Acid
  misc_feature (16)..(16): n is inverted deoxyabasic
ucaacgcauacaccan

SEQ ID NO: 7406 - RNA, 16 nt, Artificial Sequence
  Description of Artificial Sequence:  Nucleic Acid
  misc_feature (16)..(16): n is inverted deoxyabasic
ucgccgcguccucuun

SEQ ID NO: 7407 - RNA, 16 nt, Artificial Sequence
  Description of Artificial Sequence:  Nucleic Acid
  misc_feature (16)..(16): n is inverted deoxyabasic
cgccuucaucuccuun

SEQ ID NO: 7408 - RNA, 16 nt, Artificial Sequence
  Description of Artificial Sequence:  Nucleic Acid
  misc_feature (16)..(16): n is inverted deoxyabasic
cucucucauccuccun

SEQ ID NO: 7409 - RNA, 16 nt, Artificial Sequence
  Description of Artificial Sequence:  Nucleic Acid
  misc_feature (16)..(16): n is inverted deoxyabasic
ccuccacguacuccun

SEQ ID NO: 7410 - RNA, 16 nt, Artificial Sequence
  Description of Artificial Sequence:  Nucleic Acid
  misc_feature (16)..(16): n is inverted deoxyabasic
ccuccaaaucacaacn

SEQ ID NO: 7411 - RNA, 16 nt, Artificial Sequence
  Description of Artificial Sequence:  Nucleic Acid
  misc_feature (16)..(16): n is inverted deoxyabasic
ucucagugucuuccan

SEQ ID NO: 7412 - RNA, 16 nt, Artificial Sequence
  Description of Artificial Sequence:  Nucleic Acid
  misc_feature (16)..(16): n is inverted deoxyabasic
uguauaugccucuccn

SEQ ID NO: 7413 - RNA, 16 nt, Artificial Sequence
  Description of Artificial Sequence:  Nucleic Acid
  misc_feature (16)..(16): n is inverted deoxyabasic
accgugugccuuagan

SEQ ID NO: 7414 - RNA, 16 nt, Artificial Sequence
  Description of Artificial Sequence:  Nucleic Acid
  misc_feature (16)..(16): n is inverted deoxyabasic
guggagugagguggun

SEQ ID NO: 7415 - RNA, 16 nt, Artificial Sequence
  Description of Artificial Sequence:  Nucleic Acid
  misc_feature (16)..(16): n is inverted deoxyabasic
acgaguugaaccugun

SEQ ID NO: 7416 - RNA, 16 nt, Artificial Sequence
  Description of Artificial Sequence:  Nucleic Acid
  misc_feature (16)..(16): n is inverted deoxyabasic
ccugucugaccauccn

SEQ ID NO: 7417 - RNA, 16 nt, Artificial Sequence
  Description of Artificial Sequence:  Nucleic Acid
  misc_feature (16)..(16): n is inverted deoxyabasic
uccuguugcuuuuccn

SEQ ID NO: 7418 - RNA, 16 nt, Artificial Sequence
  Description of Artificial Sequence:  Nucleic Acid
  misc_feature (16)..(16): n is inverted deoxyabasic
uccucguguucuucun

SEQ ID NO: 7419 - RNA, 16 nt, Artificial Sequence
  Description of Artificial Sequence:  Nucleic Acid
  misc_feature (16)..(16): n is inverted deoxyabasic
acaaagugcucguccn

SEQ ID NO: 7420 - RNA, 16 nt, Artificial Sequence
  Description of Artificial Sequence:  Nucleic Acid
  misc_feature (16)..(16): n is inverted deoxyabasic
gccacuugaccuaccn

SEQ ID NO: 7421 - RNA, 16 nt, Artificial Sequence
  Description of Artificial Sequence:  Nucleic Acid
  misc_feature (16)..(16): n is inverted deoxyabasic
cacuccagucaacucn

SEQ ID NO: 7422 - RNA, 16 nt, Artificial Sequence
  Description of Artificial Sequence:  Nucleic Acid
  misc_feature (16)..(16): n is inverted deoxyabasic
uccacaugugcuucgn

SEQ ID NO: 7423 - RNA, 16 nt, Artificial Sequence
  Description of Artificial Sequence:  Nucleic Acid
  misc_feature (16)..(16): n is inverted deoxyabasic
ucacgccgucuuccan

SEQ ID NO: 7424 - RNA, 16 nt, Artificial Sequence
  Description of Artificial Sequence:  Nucleic Acid
  misc_feature (16)..(16): n is inverted deoxyabasic
cucuaucuuccucuun

SEQ ID NO: 7425 - RNA, 16 nt, Artificial Sequence
  Description of Artificial Sequence:  Nucleic Acid
  misc_feature (16)..(16): n is inverted deoxyabasic
ucucagcuguucaccn

SEQ ID NO: 7426 - RNA, 16 nt, Artificial Sequence
  Description of Artificial Sequence:  Nucleic Acid
  misc_feature (16)..(16): n is inverted deoxyabasic
uccucuccuuccucgn

SEQ ID NO: 7427 - RNA, 16 nt, Artificial Sequence
  Description of Artificial Sequence:  Nucleic Acid
  misc_feature (16)..(16): n is inverted deoxyabasic
ucacagccuccaucan

SEQ ID NO: 7428 - RNA, 16 nt, Artificial Sequence
  Description of Artificial Sequence:  Nucleic Acid
  misc_feature (16)..(16): n is inverted deoxyabasic
cuccacccuuccucan

SEQ ID NO: 7429 - RNA, 16 nt, Artificial Sequence
  Description of Artificial Sequence:  Nucleic Acid
  misc_feature (16)..(16): n is inverted deoxyabasic
uggugucucagugucn

SEQ ID NO: 7430 - RNA, 16 nt, Artificial Sequence
  Description of Artificial Sequence:  Nucleic Acid
  misc_feature (16)..(16): n is inverted deoxyabasic
cuucgccuucaucucn

SEQ ID NO: 7431 - RNA, 16 nt, Artificial Sequence
  Description of Artificial Sequence:  Nucleic Acid
  misc_feature (16)..(16): n is inverted deoxyabasic
accucucucucauccn

SEQ ID NO: 7432 - RNA, 16 nt, Artificial Sequence
  Description of Artificial Sequence:  Nucleic Acid
  misc_feature (16)..(16): n is inverted deoxyabasic
uucauccacugcacan

SEQ ID NO: 7433 - RNA, 16 nt, Artificial Sequence
  Description of Artificial Sequence:  Nucleic Acid
  misc_feature (16)..(16): n is inverted deoxyabasic
caacagcaucauccan

SEQ ID NO: 7434 - RNA, 38 nt, Artificial Sequence
  Description of Artificial Sequence:  Enzymatic Nucleic Acid
uugguggacugaugaggccguuaggccgaaaguggugg

SEQ ID NO: 7435 - RNA, 38 nt, Artificial Sequence
  Description of Artificial Sequence:  Enzymatic Nucleic Acid
uuugguggcugaugaggccguuaggccgaaaaguggug

SEQ ID NO: 7436 - RNA, 38 nt, Artificial Sequence
  Description of Artificial Sequence:  Enzymatic Nucleic Acid
guuuggugcugaugaggccguuaggccgaaaaaguggu

SEQ ID NO: 7437 - RNA, 38 nt, Artificial Sequence
  Description of Artificial Sequence:  Enzymatic Nucleic Acid
aucuugaacugaugaggccguuaggccgaaaguuuggu

SEQ ID NO: 7438 - RNA, 38 nt, Artificial Sequence
  Description of Artificial Sequence:  Enzymatic Nucleic Acid
ggaucuugcugaugaggccguuaggccgaaagaguuug

SEQ ID NO: 7439 - RNA, 38 nt, Artificial Sequence
  Description of Artificial Sequence:  Enzymatic Nucleic Acid
gggaucuucugaugaggccguuaggccgaaaagaguuu

SEQ ID NO: 7440 - RNA, 38 nt, Artificial Sequence
  Description of Artificial Sequence:  Enzymatic Nucleic Acid
gacucuggcugaugaggccguuaggccgaaaucuugaa

SEQ ID NO: 7441 - RNA, 38 nt, Artificial Sequence
  Description of Artificial Sequence:  Enzymatic Nucleic Acid
agggcccucugaugaggccguuaggccgaaacucuggg

SEQ ID NO: 7442 - RNA, 38 nt, Artificial Sequence
  Description of Artificial Sequence:  Enzymatic Nucleic Acid
caggaaagcugaugaggccguuaggccgaaacagggcc

SEQ ID NO: 7443 - RNA, 38 nt, Artificial Sequence
  Description of Artificial Sequence:  Enzymatic Nucleic Acid
cagcaggacugaugaggccguuaggccgaaaguacagg

SEQ ID NO: 7444 - RNA, 38 nt, Artificial Sequence
  Description of Artificial Sequence:  Enzymatic Nucleic Acid
ccagcaggcugaugaggccguuaggccgaaaaguacag

SEQ ID NO: 7445 - RNA, 38 nt, Artificial Sequence
  Description of Artificial Sequence:  Enzymatic Nucleic Acid
accagcagcugaugaggccguuaggccgaaaaaguaca

SEQ ID NO: 7446 - RNA, 38 nt, Artificial Sequence
  Description of Artificial Sequence:  Enzymatic Nucleic Acid
cugaacugcugaugaggccguuaggccgaaagccacca

SEQ ID NO: 7447 - RNA, 38 nt, Artificial Sequence
  Description of Artificial Sequence:  Enzymatic Nucleic Acid
uguuccugcugaugaggccguuaggccgaaacuggagc

SEQ ID NO: 7448 - RNA, 38 nt, Artificial Sequence
  Description of Artificial Sequence:  Enzymatic Nucleic Acid
cuguuccucugaugaggccguuaggccgaaaacuggag

SEQ ID NO: 7449 - RNA, 38 nt, Artificial Sequence
  Description of Artificial Sequence:  Enzymatic Nucleic Acid
aguauucucugaugaggccguuaggccgaaagcagggc

SEQ ID NO: 7450 - RNA, 38 nt, Artificial Sequence
  Description of Artificial Sequence:  Enzymatic Nucleic Acid
agagacagcugaugaggccguuaggccgaaauucugag

SEQ ID NO: 7451 - RNA, 38 nt, Artificial Sequence
  Description of Artificial Sequence:  Enzymatic Nucleic Acid
auggcagacugaugaggccguuaggccgaaacaguauu

SEQ ID NO: 7452 - RNA, 38 nt, Artificial Sequence
  Description of Artificial Sequence:  Enzymatic Nucleic Acid
auauggcacugaugaggccguuaggccgaaagacagua

SEQ ID NO: 7453 - RNA, 38 nt, Artificial Sequence
  Description of Artificial Sequence:  Enzymatic Nucleic Acid
auugacgacugaugaggccguuaggccgaaauggcaga

SEQ ID NO: 7454 - RNA, 38 nt, Artificial Sequence
  Description of Artificial Sequence:  Enzymatic Nucleic Acid
agauugaccugaugaggccguuaggccgaaauauggca

SEQ ID NO: 7455 - RNA, 38 nt, Artificial Sequence
  Description of Artificial Sequence:  Enzymatic Nucleic Acid
auaagauucugaugaggccguuaggccgaaacgauaug

SEQ ID NO: 7456 - RNA, 38 nt, Artificial Sequence
  Description of Artificial Sequence:  Enzymatic Nucleic Acid
uucgauaacugaugaggccguuaggccgaaauugacga

SEQ ID NO: 7457 - RNA, 38 nt, Artificial Sequence
  Description of Artificial Sequence:  Enzymatic Nucleic Acid
ucuucgaucugaugaggccguuaggccgaaagauugac

SEQ ID NO: 7458 - RNA, 38 nt, Artificial Sequence
  Description of Artificial Sequence:  Enzymatic Nucleic Acid
gucuucgacugaugaggccguuaggccgaaaagauuga

SEQ ID NO: 7459 - RNA, 38 nt, Artificial Sequence
  Description of Artificial Sequence:  Enzymatic Nucleic Acid
cagucuuccugaugaggccguuaggccgaaauaagauu

SEQ ID NO: 7460 - RNA, 38 nt, Artificial Sequence
  Description of Artificial Sequence:  Enzymatic Nucleic Acid
auguucggcugaugaggccguuaggccgaaacaggguc

SEQ ID NO: 7461 - RNA, 38 nt, Artificial Sequence
  Description of Artificial Sequence:  Enzymatic Nucleic Acid
ccugaugccugaugaggccguuaggccgaaauguucuc

SEQ ID NO: 7462 - RNA, 38 nt, Artificial Sequence
  Description of Artificial Sequence:  Enzymatic Nucleic Acid
ggaguccucugaugaggccguuaggccgaaaugcgaug

SEQ ID NO: 7463 - RNA, 38 nt, Artificial Sequence
  Description of Artificial Sequence:  Enzymatic Nucleic Acid
gguccuagcugaugaggccguuaggccgaaaguccuga

SEQ ID NO: 7464 - RNA, 38 nt, Artificial Sequence
  Description of Artificial Sequence:  Enzymatic Nucleic Acid
aggggucccugaugaggccguuaggccgaaaggagucc

SEQ ID NO: 7465 - RNA, 38 nt, Artificial Sequence
  Description of Artificial Sequence:  Enzymatic Nucleic Acid
uguaacaccugaugaggccguuaggccgaaagcagggg

SEQ ID NO: 7466 - RNA, 38 nt, Artificial Sequence
  Description of Artificial Sequence:  Enzymatic Nucleic Acid
ccgccugucugaugaggccguuaggccgaaacacgagc

SEQ ID NO: 7467 - RNA, 38 nt, Artificial Sequence
  Description of Artificial Sequence:  Enzymatic Nucleic Acid
cccgccugcugaugaggccguuaggccgaaaacacgag

SEQ ID NO: 7468 - RNA, 38 nt, Artificial Sequence
  Description of Artificial Sequence:  Enzymatic Nucleic Acid
acaagaaacugaugaggccguuaggccgaaaccccgcc

SEQ ID NO: 7469 - RNA, 38 nt, Artificial Sequence
  Description of Artificial Sequence:  Enzymatic Nucleic Acid
aacaagaacugaugaggccguuaggccgaaaaccccgc

SEQ ID NO: 7470 - RNA, 38 nt, Artificial Sequence
  Description of Artificial Sequence:  Enzymatic Nucleic Acid
caacaagacugaugaggccguuaggccgaaaaaccccg

SEQ ID NO: 7471 - RNA, 38 nt, Artificial Sequence
  Description of Artificial Sequence:  Enzymatic Nucleic Acid
ucaacaagcugaugaggccguuaggccgaaaaaacccc

SEQ ID NO: 7472 - RNA, 38 nt, Artificial Sequence
  Description of Artificial Sequence:  Enzymatic Nucleic Acid
gucaacaacugaugaggccguuaggccgaaaaaaaccc

SEQ ID NO: 7473 - RNA, 38 nt, Artificial Sequence
  Description of Artificial Sequence:  Enzymatic Nucleic Acid
uugucaaccugaugaggccguuaggccgaaagaaaaac

SEQ ID NO: 7474 - RNA, 38 nt, Artificial Sequence
  Description of Artificial Sequence:  Enzymatic Nucleic Acid
uuuuuguccugaugaggccguuaggccgaaacaagaaa

SEQ ID NO: 7475 - RNA, 38 nt, Artificial Sequence
  Description of Artificial Sequence:  Enzymatic Nucleic Acid
auugugagcugaugaggccguuaggccgaaauuuuugu

SEQ ID NO: 7476 - RNA, 38 nt, Artificial Sequence
  Description of Artificial Sequence:  Enzymatic Nucleic Acid
gguauugucugaugaggccguuaggccgaaaggauuuu

SEQ ID NO: 7477 - RNA, 38 nt, Artificial Sequence
  Description of Artificial Sequence:  Enzymatic Nucleic Acid
cucuguggcugaugaggccguuaggccgaaauugugag

SEQ ID NO: 7478 - RNA, 38 nt, Artificial Sequence
  Description of Artificial Sequence:  Enzymatic Nucleic Acid
cgagucuacugaugaggccguuaggccgaaacucugug

SEQ ID NO: 7479 - RNA, 38 nt, Artificial Sequence
  Description of Artificial Sequence:  Enzymatic Nucleic Acid
cacgaguccugaugaggccguuaggccgaaagacucug

SEQ ID NO: 7480 - RNA, 38 nt, Artificial Sequence
  Description of Artificial Sequence:  Enzymatic Nucleic Acid
uccaccaccugaugaggccguuaggccgaaagucuaga

SEQ ID NO: 7481 - RNA, 38 nt, Artificial Sequence
  Description of Artificial Sequence:  Enzymatic Nucleic Acid
auugagagcugaugaggccguuaggccgaaaguccacc

SEQ ID NO: 7482 - RNA, 38 nt, Artificial Sequence
  Description of Artificial Sequence:  Enzymatic Nucleic Acid
aauugagacugaugaggccguuaggccgaaaaguccac

SEQ ID NO: 7483 - RNA, 38 nt, Artificial Sequence
  Description of Artificial Sequence:  Enzymatic Nucleic Acid
aaaauugacugaugaggccguuaggccgaaagaagucc

SEQ ID NO: 7484 - RNA, 38 nt, Artificial Sequence
  Description of Artificial Sequence:  Enzymatic Nucleic Acid
agaaaauucugaugaggccguuaggccgaaagagaagu

SEQ ID NO: 7485 - RNA, 38 nt, Artificial Sequence
  Description of Artificial Sequence:  Enzymatic Nucleic Acid
cccuagaacugaugaggccguuaggccgaaauugagag

SEQ ID NO: 7486 - RNA, 38 nt, Artificial Sequence
  Description of Artificial Sequence:  Enzymatic Nucleic Acid
ccccuagacugaugaggccguuaggccgaaaauugaga

SEQ ID NO: 7487 - RNA, 38 nt, Artificial Sequence
  Description of Artificial Sequence:  Enzymatic Nucleic Acid
cccccuagcugaugaggccguuaggccgaaaaauugag

SEQ ID NO: 7488 - RNA, 38 nt, Artificial Sequence
  Description of Artificial Sequence:  Enzymatic Nucleic Acid
ucccccuacugaugaggccguuaggccgaaaaaauuga

SEQ ID NO: 7489 - RNA, 38 nt, Artificial Sequence
  Description of Artificial Sequence:  Enzymatic Nucleic Acid
guuccccccugaugaggccguuaggccgaaagaaaauu

SEQ ID NO: 7490 - RNA, 38 nt, Artificial Sequence
  Description of Artificial Sequence:  Enzymatic Nucleic Acid
uuggccaacugaugaggccguuaggccgaaacacacgg

SEQ ID NO: 7491 - RNA, 38 nt, Artificial Sequence
  Description of Artificial Sequence:  Enzymatic Nucleic Acid
uuuuggcccugaugaggccguuaggccgaaagacacac

SEQ ID NO: 7492 - RNA, 38 nt, Artificial Sequence
  Description of Artificial Sequence:  Enzymatic Nucleic Acid
ggacugcgcugaugaggccguuaggccgaaauuuuggc

SEQ ID NO: 7493 - RNA, 38 nt, Artificial Sequence
  Description of Artificial Sequence:  Enzymatic Nucleic Acid
gggacugccugaugaggccguuaggccgaaaauuuugg

SEQ ID NO: 7494 - RNA, 38 nt, Artificial Sequence
  Description of Artificial Sequence:  Enzymatic Nucleic Acid
agauuuggcugaugaggccguuaggccgaaacugcgaa

SEQ ID NO: 7495 - RNA, 38 nt, Artificial Sequence
  Description of Artificial Sequence:  Enzymatic Nucleic Acid
ugacuggacugaugaggccguuaggccgaaauuuggga

SEQ ID NO: 7496 - RNA, 38 nt, Artificial Sequence
  Description of Artificial Sequence:  Enzymatic Nucleic Acid
agugacugcugaugaggccguuaggccgaaagauuugg

SEQ ID NO: 7497 - RNA, 38 nt, Artificial Sequence
  Description of Artificial Sequence:  Enzymatic Nucleic Acid
uggugagucugaugaggccguuaggccgaaacuggaga

SEQ ID NO: 7498 - RNA, 38 nt, Artificial Sequence
  Description of Artificial Sequence:  Enzymatic Nucleic Acid
agguuggucugaugaggccguuaggccgaaagugacug

SEQ ID NO: 7499 - RNA, 38 nt, Artificial Sequence
  Description of Artificial Sequence:  Enzymatic Nucleic Acid
uggaggaccugaugaggccguuaggccgaaacagguug

SEQ ID NO: 7500 - RNA, 38 nt, Artificial Sequence
  Description of Artificial Sequence:  Enzymatic Nucleic Acid
aauuggagcugaugaggccguuaggccgaaacaacagg

SEQ ID NO: 7501 - RNA, 38 nt, Artificial Sequence
  Description of Artificial Sequence:  Enzymatic Nucleic Acid
acaaauugcugaugaggccguuaggccgaaaggacaac

SEQ ID NO: 7502 - RNA, 38 nt, Artificial Sequence
  Description of Artificial Sequence:  Enzymatic Nucleic Acid
ccaggacacugaugaggccguuaggccgaaauuggagg

SEQ ID NO: 7503 - RNA, 38 nt, Artificial Sequence
  Description of Artificial Sequence:  Enzymatic Nucleic Acid
accaggaccugaugaggccguuaggccgaaaauuggag

SEQ ID NO: 7504 - RNA, 38 nt, Artificial Sequence
  Description of Artificial Sequence:  Enzymatic Nucleic Acid
auaaccagcugaugaggccguuaggccgaaacaaauug

SEQ ID NO: 7505 - RNA, 38 nt, Artificial Sequence
  Description of Artificial Sequence:  Enzymatic Nucleic Acid
ccagcgaucugaugaggccguuaggccgaaaccaggac

SEQ ID NO: 7506 - RNA, 38 nt, Artificial Sequence
  Description of Artificial Sequence:  Enzymatic Nucleic Acid
uccagcgacugaugaggccguuaggccgaaaaccagga

SEQ ID NO: 7507 - RNA, 38 nt, Artificial Sequence
  Description of Artificial Sequence:  Enzymatic Nucleic Acid
cauccagccugaugaggccguuaggccgaaauaaccag

SEQ ID NO: 7508 - RNA, 38 nt, Artificial Sequence
  Description of Artificial Sequence:  Enzymatic Nucleic Acid
acgccgcacugaugaggccguuaggccgaaacacaucc

SEQ ID NO: 7509 - RNA, 38 nt, Artificial Sequence
  Description of Artificial Sequence:  Enzymatic Nucleic Acid
gaugauaacugaugaggccguuaggccgaaacgccgca

SEQ ID NO: 7510 - RNA, 38 nt, Artificial Sequence
  Description of Artificial Sequence:  Enzymatic Nucleic Acid
agaugauacugaugaggccguuaggccgaaaacgccgc

SEQ ID NO: 7511 - RNA, 38 nt, Artificial Sequence
  Description of Artificial Sequence:  Enzymatic Nucleic Acid
aagaugaucugaugaggccguuaggccgaaaaacgccg

SEQ ID NO: 7512 - RNA, 38 nt, Artificial Sequence
  Description of Artificial Sequence:  Enzymatic Nucleic Acid
gaagaugacugaugaggccguuaggccgaaaaaacgcc

SEQ ID NO: 7513 - RNA, 38 nt, Artificial Sequence
  Description of Artificial Sequence:  Enzymatic Nucleic Acid
aggaagaucugaugaggccguuaggccgaaauaaaacg

SEQ ID NO: 7514 - RNA, 38 nt, Artificial Sequence
  Description of Artificial Sequence:  Enzymatic Nucleic Acid
cagaggaacugaugaggccguuaggccgaaaugauaaa

SEQ ID NO: 7515 - RNA, 38 nt, Artificial Sequence
  Description of Artificial Sequence:  Enzymatic Nucleic Acid
ugcagaggcugaugaggccguuaggccgaaagaugaua

SEQ ID NO: 7516 - RNA, 38 nt, Artificial Sequence
  Description of Artificial Sequence:  Enzymatic Nucleic Acid
augcagagcugaugaggccguuaggccgaaaagaugau

SEQ ID NO: 7517 - RNA, 38 nt, Artificial Sequence
  Description of Artificial Sequence:  Enzymatic Nucleic Acid
aggaugcacugaugaggccguuaggccgaaaggaagau

SEQ ID NO: 7518 - RNA, 38 nt, Artificial Sequence
  Description of Artificial Sequence:  Enzymatic Nucleic Acid
agcagcagcugaugaggccguuaggccgaaaugcagag

SEQ ID NO: 7519 - RNA, 38 nt, Artificial Sequence
  Description of Artificial Sequence:  Enzymatic Nucleic Acid
augaggcacugaugaggccguuaggccgaaagcagcag

SEQ ID NO: 7520 - RNA, 38 nt, Artificial Sequence
  Description of Artificial Sequence:  Enzymatic Nucleic Acid
aagaagaucugaugaggccguuaggccgaaaggcauag

SEQ ID NO: 7521 - RNA, 38 nt, Artificial Sequence
  Description of Artificial Sequence:  Enzymatic Nucleic Acid
aacaagaacugaugaggccguuaggccgaaaugaggca

SEQ ID NO: 7522 - RNA, 38 nt, Artificial Sequence
  Description of Artificial Sequence:  Enzymatic Nucleic Acid
ccaacaagcugaugaggccguuaggccgaaagaugagg

SEQ ID NO: 7523 - RNA, 38 nt, Artificial Sequence
  Description of Artificial Sequence:  Enzymatic Nucleic Acid
accaacaacugaugaggccguuaggccgaaaagaugag

SEQ ID NO: 7524 - RNA, 38 nt, Artificial Sequence
  Description of Artificial Sequence:  Enzymatic Nucleic Acid
gaaccaaccugaugaggccguuaggccgaaagaagaug

SEQ ID NO: 7525 - RNA, 38 nt, Artificial Sequence
  Description of Artificial Sequence:  Enzymatic Nucleic Acid
gaagaacccugaugaggccguuaggccgaaacaagaag

SEQ ID NO: 7526 - RNA, 38 nt, Artificial Sequence
  Description of Artificial Sequence:  Enzymatic Nucleic Acid
uccagaagcugaugaggccguuaggccgaaaccaacaa

SEQ ID NO: 7527 - RNA, 38 nt, Artificial Sequence
  Description of Artificial Sequence:  Enzymatic Nucleic Acid
guccagaacugaugaggccguuaggccgaaaaccaaca

SEQ ID NO: 7528 - RNA, 38 nt, Artificial Sequence
  Description of Artificial Sequence:  Enzymatic Nucleic Acid
uaguccagcugaugaggccguuaggccgaaagaaccaa

SEQ ID NO: 7529 - RNA, 38 nt, Artificial Sequence
  Description of Artificial Sequence:  Enzymatic Nucleic Acid
auaguccacugaugaggccguuaggccgaaaagaacca

SEQ ID NO: 7530 - RNA, 38 nt, Artificial Sequence
  Description of Artificial Sequence:  Enzymatic Nucleic Acid
uaccuugacugaugaggccguuaggccgaaaguccaga

SEQ ID NO: 7531 - RNA, 38 nt, Artificial Sequence
  Description of Artificial Sequence:  Enzymatic Nucleic Acid
cauaccuucugaugaggccguuaggccgaaauagucca

SEQ ID NO: 7532 - RNA, 38 nt, Artificial Sequence
  Description of Artificial Sequence:  Enzymatic Nucleic Acid
gggcaacacugaugaggccguuaggccgaaaccuugau

SEQ ID NO: 7533 - RNA, 38 nt, Artificial Sequence
  Description of Artificial Sequence:  Enzymatic Nucleic Acid
aaacgggccugaugaggccguuaggccgaaacauaccu

SEQ ID NO: 7534 - RNA, 38 nt, Artificial Sequence
  Description of Artificial Sequence:  Enzymatic Nucleic Acid
agaggacacugaugaggccguuaggccgaaacgggcaa

SEQ ID NO: 7535 - RNA, 38 nt, Artificial Sequence
  Description of Artificial Sequence:  Enzymatic Nucleic Acid
uagaggaccugaugaggccguuaggccgaaaacgggca

SEQ ID NO: 7536 - RNA, 38 nt, Artificial Sequence
  Description of Artificial Sequence:  Enzymatic Nucleic Acid
aauuagagcugaugaggccguuaggccgaaacaaacgg

SEQ ID NO: 7537 - RNA, 38 nt, Artificial Sequence
  Description of Artificial Sequence:  Enzymatic Nucleic Acid
uggaauuacugaugaggccguuaggccgaaaggacaaa

SEQ ID NO: 7538 - RNA, 38 nt, Artificial Sequence
  Description of Artificial Sequence:  Enzymatic Nucleic Acid
ccuggaaucugaugaggccguuaggccgaaagaggaca

SEQ ID NO: 7539 - RNA, 38 nt, Artificial Sequence
  Description of Artificial Sequence:  Enzymatic Nucleic Acid
gauccuggcugaugaggccguuaggccgaaauuagagg

SEQ ID NO: 7540 - RNA, 38 nt, Artificial Sequence
  Description of Artificial Sequence:  Enzymatic Nucleic Acid
ugauccugcugaugaggccguuaggccgaaaauuagag

SEQ ID NO: 7541 - RNA, 38 nt, Artificial Sequence
  Description of Artificial Sequence:  Enzymatic Nucleic Acid
uuguugaucugaugaggccguuaggccgaaauccugga

SEQ ID NO: 7542 - RNA, 38 nt, Artificial Sequence
  Description of Artificial Sequence:  Enzymatic Nucleic Acid
ugguuguucugaugaggccguuaggccgaaaugauccu

SEQ ID NO: 7543 - RNA, 38 nt, Artificial Sequence
  Description of Artificial Sequence:  Enzymatic Nucleic Acid
uugagcagcugaugaggccguuaggccgaaaguugugc

SEQ ID NO: 7544 - RNA, 38 nt, Artificial Sequence
  Description of Artificial Sequence:  Enzymatic Nucleic Acid
gguuccuucugaugaggccguuaggccgaaagcaggag

SEQ ID NO: 7545 - RNA, 38 nt, Artificial Sequence
  Description of Artificial Sequence:  Enzymatic Nucleic Acid
gaaacauacugaugaggccguuaggccgaaagguuccu

SEQ ID NO: 7546 - RNA, 38 nt, Artificial Sequence
  Description of Artificial Sequence:  Enzymatic Nucleic Acid
gggaaacacugaugaggccguuaggccgaaagagguuc

SEQ ID NO: 7547 - RNA, 38 nt, Artificial Sequence
  Description of Artificial Sequence:  Enzymatic Nucleic Acid
augagggacugaugaggccguuaggccgaaacauagag

SEQ ID NO: 7548 - RNA, 38 nt, Artificial Sequence
  Description of Artificial Sequence:  Enzymatic Nucleic Acid
caugagggcugaugaggccguuaggccgaaaacauaga

SEQ ID NO: 7549 - RNA, 38 nt, Artificial Sequence
  Description of Artificial Sequence:  Enzymatic Nucleic Acid
acaugaggcugaugaggccguuaggccgaaaaacauag

SEQ ID NO: 7550 - RNA, 38 nt, Artificial Sequence
  Description of Artificial Sequence:  Enzymatic Nucleic Acid
agcaacaucugaugaggccguuaggccgaaagggaaac

SEQ ID NO: 7551 - RNA, 38 nt, Artificial Sequence
  Description of Artificial Sequence:  Enzymatic Nucleic Acid
uguacagccugaugaggccguuaggccgaaacaugagg

SEQ ID NO: 7552 - RNA, 38 nt, Artificial Sequence
  Description of Artificial Sequence:  Enzymatic Nucleic Acid
agguuuugcugaugaggccguuaggccgaaacagcaac

SEQ ID NO: 7553 - RNA, 38 nt, Artificial Sequence
  Description of Artificial Sequence:  Enzymatic Nucleic Acid
uccguccgcugaugaggccguuaggccgaaagguuuug

SEQ ID NO: 7554 - RNA, 38 nt, Artificial Sequence
  Description of Artificial Sequence:  Enzymatic Nucleic Acid
gaugggaacugaugaggccguuaggccgaaacaggugc

SEQ ID NO: 7555 - RNA, 38 nt, Artificial Sequence
  Description of Artificial Sequence:  Enzymatic Nucleic Acid
gggaugggcugaugaggccguuaggccgaaauacaggu

SEQ ID NO: 7556 - RNA, 38 nt, Artificial Sequence
  Description of Artificial Sequence:  Enzymatic Nucleic Acid
ugggauggcugaugaggccguuaggccgaaaauacagg

SEQ ID NO: 7557 - RNA, 38 nt, Artificial Sequence
  Description of Artificial Sequence:  Enzymatic Nucleic Acid
gaugauggcugaugaggccguuaggccgaaaugggaau

SEQ ID NO: 7558 - RNA, 38 nt, Artificial Sequence
  Description of Artificial Sequence:  Enzymatic Nucleic Acid
cccaagaucugaugaggccguuaggccgaaaugggaug

SEQ ID NO: 7559 - RNA, 38 nt, Artificial Sequence
  Description of Artificial Sequence:  Enzymatic Nucleic Acid
aagcccaacugaugaggccguuaggccgaaaugauggg

SEQ ID NO: 7560 - RNA, 38 nt, Artificial Sequence
  Description of Artificial Sequence:  Enzymatic Nucleic Acid
gaaagccccugaugaggccguuaggccgaaagaugaug

SEQ ID NO: 7561 - RNA, 38 nt, Artificial Sequence
  Description of Artificial Sequence:  Enzymatic Nucleic Acid
uuuugcgacugaugaggccguuaggccgaaagcccaag

SEQ ID NO: 7562 - RNA, 38 nt, Artificial Sequence
  Description of Artificial Sequence:  Enzymatic Nucleic Acid
auuuugcgcugaugaggccguuaggccgaaaagcccaa

SEQ ID NO: 7563 - RNA, 38 nt, Artificial Sequence
  Description of Artificial Sequence:  Enzymatic Nucleic Acid
uauuuugccugaugaggccguuaggccgaaaaagccca

SEQ ID NO: 7564 - RNA, 38 nt, Artificial Sequence
  Description of Artificial Sequence:  Enzymatic Nucleic Acid
cccauaggcugaugaggccguuaggccgaaauuuugcg

SEQ ID NO: 7565 - RNA, 38 nt, Artificial Sequence
  Description of Artificial Sequence:  Enzymatic Nucleic Acid
cacucccacugaugaggccguuaggccgaaagguauuu

SEQ ID NO: 7566 - RNA, 38 nt, Artificial Sequence
  Description of Artificial Sequence:  Enzymatic Nucleic Acid
aacggacucugaugaggccguuaggccgaaaggcccac

SEQ ID NO: 7567 - RNA, 38 nt, Artificial Sequence
  Description of Artificial Sequence:  Enzymatic Nucleic Acid
gagaaacgcugaugaggccguuaggccgaaacugaggc

SEQ ID NO: 7568 - RNA, 38 nt, Artificial Sequence
  Description of Artificial Sequence:  Enzymatic Nucleic Acid
ccaagagacugaugaggccguuaggccgaaacggacug

SEQ ID NO: 7569 - RNA, 38 nt, Artificial Sequence
  Description of Artificial Sequence:  Enzymatic Nucleic Acid
gccaagagcugaugaggccguuaggccgaaaacggacu

SEQ ID NO: 7570 - RNA, 38 nt, Artificial Sequence
  Description of Artificial Sequence:  Enzymatic Nucleic Acid
agccaagacugaugaggccguuaggccgaaaaacggac

SEQ ID NO: 7571 - RNA, 38 nt, Artificial Sequence
  Description of Artificial Sequence:  Enzymatic Nucleic Acid
ugagccaacugaugaggccguuaggccgaaagaaacgg

SEQ ID NO: 7572 - RNA, 38 nt, Artificial Sequence
  Description of Artificial Sequence:  Enzymatic Nucleic Acid
acugagcccugaugaggccguuaggccgaaagagaaac

SEQ ID NO: 7573 - RNA, 38 nt, Artificial Sequence
  Description of Artificial Sequence:  Enzymatic Nucleic Acid
aguaaacucugaugaggccguuaggccgaaagccaaga

SEQ ID NO: 7574 - RNA, 38 nt, Artificial Sequence
  Description of Artificial Sequence:  Enzymatic Nucleic Acid
cacuaguacugaugaggccguuaggccgaaacugagcc

SEQ ID NO: 7575 - RNA, 38 nt, Artificial Sequence
  Description of Artificial Sequence:  Enzymatic Nucleic Acid
gcacuagucugaugaggccguuaggccgaaaacugagc

SEQ ID NO: 7576 - RNA, 38 nt, Artificial Sequence
  Description of Artificial Sequence:  Enzymatic Nucleic Acid
ggcacuagcugaugaggccguuaggccgaaaaacugag

SEQ ID NO: 7577 - RNA, 38 nt, Artificial Sequence
  Description of Artificial Sequence:  Enzymatic Nucleic Acid
aauggcaccugaugaggccguuaggccgaaaguaaacu

SEQ ID NO: 7578 - RNA, 38 nt, Artificial Sequence
  Description of Artificial Sequence:  Enzymatic Nucleic Acid
acugaacacugaugaggccguuaggccgaaauggcacu

SEQ ID NO: 7579 - RNA, 38 nt, Artificial Sequence
  Description of Artificial Sequence:  Enzymatic Nucleic Acid
cacugaaccugaugaggccguuaggccgaaaauggcac

SEQ ID NO: 7580 - RNA, 38 nt, Artificial Sequence
  Description of Artificial Sequence:  Enzymatic Nucleic Acid
aaccacugcugaugaggccguuaggccgaaacaaaugg

SEQ ID NO: 7581 - RNA, 38 nt, Artificial Sequence
  Description of Artificial Sequence:  Enzymatic Nucleic Acid
gaaccacucugaugaggccguuaggccgaaaacaaaug

SEQ ID NO: 7582 - RNA, 38 nt, Artificial Sequence
  Description of Artificial Sequence:  Enzymatic Nucleic Acid
gcccuacgcugaugaggccguuaggccgaaaccacuga

SEQ ID NO: 7583 - RNA, 38 nt, Artificial Sequence
  Description of Artificial Sequence:  Enzymatic Nucleic Acid
agcccuaccugaugaggccguuaggccgaaaaccacug

SEQ ID NO: 7584 - RNA, 38 nt, Artificial Sequence
  Description of Artificial Sequence:  Enzymatic Nucleic Acid
gaaagccccugaugaggccguuaggccgaaacgaacca

SEQ ID NO: 7585 - RNA, 38 nt, Artificial Sequence
  Description of Artificial Sequence:  Enzymatic Nucleic Acid
gugggggacugaugaggccguuaggccgaaagcccuac

SEQ ID NO: 7586 - RNA, 38 nt, Artificial Sequence
  Description of Artificial Sequence:  Enzymatic Nucleic Acid
agugggggcugaugaggccguuaggccgaaaagcccua

SEQ ID NO: 7587 - RNA, 38 nt, Artificial Sequence
  Description of Artificial Sequence:  Enzymatic Nucleic Acid
caguggggcugaugaggccguuaggccgaaaaagcccu

SEQ ID NO: 7588 - RNA, 38 nt, Artificial Sequence
  Description of Artificial Sequence:  Enzymatic Nucleic Acid
gaaagccacugaugaggccguuaggccgaaacaguggg

SEQ ID NO: 7589 - RNA, 38 nt, Artificial Sequence
  Description of Artificial Sequence:  Enzymatic Nucleic Acid
auaacugacugaugaggccguuaggccgaaagccagac

SEQ ID NO: 7590 - RNA, 38 nt, Artificial Sequence
  Description of Artificial Sequence:  Enzymatic Nucleic Acid
uauaacugcugaugaggccguuaggccgaaaagccaga

SEQ ID NO: 7591 - RNA, 38 nt, Artificial Sequence
  Description of Artificial Sequence:  Enzymatic Nucleic Acid
auauaacucugaugaggccguuaggccgaaaaagccag

SEQ ID NO: 7592 - RNA, 38 nt, Artificial Sequence
  Description of Artificial Sequence:  Enzymatic Nucleic Acid
auccauaucugaugaggccguuaggccgaaacugaaag

SEQ ID NO: 7593 - RNA, 38 nt, Artificial Sequence
  Description of Artificial Sequence:  Enzymatic Nucleic Acid
cauccauacugaugaggccguuaggccgaaaacugaaa

SEQ ID NO: 7594 - RNA, 38 nt, Artificial Sequence
  Description of Artificial Sequence:  Enzymatic Nucleic Acid
aucauccacugaugaggccguuaggccgaaauaacuga

SEQ ID NO: 7595 - RNA, 38 nt, Artificial Sequence
  Description of Artificial Sequence:  Enzymatic Nucleic Acid
gcccccaacugaugaggccguuaggccgaaaccacauc

SEQ ID NO: 7596 - RNA, 38 nt, Artificial Sequence
  Description of Artificial Sequence:  Enzymatic Nucleic Acid
ggcccccacugaugaggccguuaggccgaaaaccacau

SEQ ID NO: 7597 - RNA, 38 nt, Artificial Sequence
  Description of Artificial Sequence:  Enzymatic Nucleic Acid
uggccccccugaugaggccguuaggccgaaaaaccaca

SEQ ID NO: 7598 - RNA, 38 nt, Artificial Sequence
  Description of Artificial Sequence:  Enzymatic Nucleic Acid
guuguacacugaugaggccguuaggccgaaacuuggcc

SEQ ID NO: 7599 - RNA, 38 nt, Artificial Sequence
  Description of Artificial Sequence:  Enzymatic Nucleic Acid
agauguugcugaugaggccguuaggccgaaacagacuu

SEQ ID NO: 7600 - RNA, 38 nt, Artificial Sequence
  Description of Artificial Sequence:  Enzymatic Nucleic Acid
ggacucaacugaugaggccguuaggccgaaauguugua

SEQ ID NO: 7601 - RNA, 38 nt, Artificial Sequence
  Description of Artificial Sequence:  Enzymatic Nucleic Acid
agggacuccugaugaggccguuaggccgaaagauguug

SEQ ID NO: 7602 - RNA, 38 nt, Artificial Sequence
  Description of Artificial Sequence:  Enzymatic Nucleic Acid
cauaaaggcugaugaggccguuaggccgaaacucaaga

SEQ ID NO: 7603 - RNA, 38 nt, Artificial Sequence
  Description of Artificial Sequence:  Enzymatic Nucleic Acid
gcggcauacugaugaggccguuaggccgaaagggacuc

SEQ ID NO: 7604 - RNA, 38 nt, Artificial Sequence
  Description of Artificial Sequence:  Enzymatic Nucleic Acid
agcggcaucugaugaggccguuaggccgaaaagggacu

SEQ ID NO: 7605 - RNA, 38 nt, Artificial Sequence
  Description of Artificial Sequence:  Enzymatic Nucleic Acid
cagcggcacugaugaggccguuaggccgaaaaagggac

SEQ ID NO: 7606 - RNA, 38 nt, Artificial Sequence
  Description of Artificial Sequence:  Enzymatic Nucleic Acid
aaauuggucugaugaggccguuaggccgaaacagcggc

SEQ ID NO: 7607 - RNA, 38 nt, Artificial Sequence
  Description of Artificial Sequence:  Enzymatic Nucleic Acid
aaaauuggcugaugaggccguuaggccgaaaacagcgg

SEQ ID NO: 7608 - RNA, 38 nt, Artificial Sequence
  Description of Artificial Sequence:  Enzymatic Nucleic Acid
caaaagaacugaugaggccguuaggccgaaauugguaa

SEQ ID NO: 7609 - RNA, 38 nt, Artificial Sequence
  Description of Artificial Sequence:  Enzymatic Nucleic Acid
acaaaagacugaugaggccguuaggccgaaaauuggua

SEQ ID NO: 7610 - RNA, 38 nt, Artificial Sequence
  Description of Artificial Sequence:  Enzymatic Nucleic Acid
gacaaaagcugaugaggccguuaggccgaaaaauuggu

SEQ ID NO: 7611 - RNA, 38 nt, Artificial Sequence
  Description of Artificial Sequence:  Enzymatic Nucleic Acid
agacaaaacugaugaggccguuaggccgaaaaaauugg

SEQ ID NO: 7612 - RNA, 38 nt, Artificial Sequence
  Description of Artificial Sequence:  Enzymatic Nucleic Acid
aaagacaacugaugaggccguuaggccgaaagaaaauu

SEQ ID NO: 7613 - RNA, 38 nt, Artificial Sequence
  Description of Artificial Sequence:  Enzymatic Nucleic Acid
caaagacacugaugaggccguuaggccgaaaagaaaau

SEQ ID NO: 7614 - RNA, 38 nt, Artificial Sequence
  Description of Artificial Sequence:  Enzymatic Nucleic Acid
ccaaagaccugaugaggccguuaggccgaaaaagaaaa

SEQ ID NO: 7615 - RNA, 38 nt, Artificial Sequence
  Description of Artificial Sequence:  Enzymatic Nucleic Acid
uacccaaacugaugaggccguuaggccgaaacaaaaga

SEQ ID NO: 7616 - RNA, 38 nt, Artificial Sequence
  Description of Artificial Sequence:  Enzymatic Nucleic Acid
uauacccacugaugaggccguuaggccgaaagacaaaa

SEQ ID NO: 7617 - RNA, 38 nt, Artificial Sequence
  Description of Artificial Sequence:  Enzymatic Nucleic Acid
guauaccccugaugaggccguuaggccgaaaagacaaa

SEQ ID NO: 7618 - RNA, 38 nt, Artificial Sequence
  Description of Artificial Sequence:  Enzymatic Nucleic Acid
uaaauguacugaugaggccguuaggccgaaacccaaag

SEQ ID NO: 7619 - RNA, 38 nt, Artificial Sequence
  Description of Artificial Sequence:  Enzymatic Nucleic Acid
uuuaaaugcugaugaggccguuaggccgaaauacccaa

SEQ ID NO: 7620 - RNA, 38 nt, Artificial Sequence
  Description of Artificial Sequence:  Enzymatic Nucleic Acid
aggguuuacugaugaggccguuaggccgaaauguauac

SEQ ID NO: 7621 - RNA, 38 nt, Artificial Sequence
  Description of Artificial Sequence:  Enzymatic Nucleic Acid
gaggguuucugaugaggccguuaggccgaaaauguaua

SEQ ID NO: 7622 - RNA, 38 nt, Artificial Sequence
  Description of Artificial Sequence:  Enzymatic Nucleic Acid
ugaggguucugaugaggccguuaggccgaaaaauguau

SEQ ID NO: 7623 - RNA, 38 nt, Artificial Sequence
  Description of Artificial Sequence:  Enzymatic Nucleic Acid
uguuuugucugaugaggccguuaggccgaaaggguuua

SEQ ID NO: 7624 - RNA, 38 nt, Artificial Sequence
  Description of Artificial Sequence:  Enzymatic Nucleic Acid
uaagggaacugaugaggccguuaggccgaaauccccau

SEQ ID NO: 7625 - RNA, 38 nt, Artificial Sequence
  Description of Artificial Sequence:  Enzymatic Nucleic Acid
guuaagggcugaugaggccguuaggccgaaauaucccc

SEQ ID NO: 7626 - RNA, 38 nt, Artificial Sequence
  Description of Artificial Sequence:  Enzymatic Nucleic Acid
aguuaaggcugaugaggccguuaggccgaaaauauccc

SEQ ID NO: 7627 - RNA, 38 nt, Artificial Sequence
  Description of Artificial Sequence:  Enzymatic Nucleic Acid
augaaguucugaugaggccguuaggccgaaagggaaua

SEQ ID NO: 7628 - RNA, 38 nt, Artificial Sequence
  Description of Artificial Sequence:  Enzymatic Nucleic Acid
caugaagucugaugaggccguuaggccgaaaagggaau

SEQ ID NO: 7629 - RNA, 38 nt, Artificial Sequence
  Description of Artificial Sequence:  Enzymatic Nucleic Acid
aucccaugcugaugaggccguuaggccgaaaguuaagg

SEQ ID NO: 7630 - RNA, 38 nt, Artificial Sequence
  Description of Artificial Sequence:  Enzymatic Nucleic Acid
uaucccaucugaugaggccguuaggccgaaaaguuaag

SEQ ID NO: 7631 - RNA, 38 nt, Artificial Sequence
  Description of Artificial Sequence:  Enzymatic Nucleic Acid
caauuacacugaugaggccguuaggccgaaaucccaug

SEQ ID NO: 7632 - RNA, 38 nt, Artificial Sequence
  Description of Artificial Sequence:  Enzymatic Nucleic Acid
cucccaaucugaugaggccguuaggccgaaacauaucc

SEQ ID NO: 7633 - RNA, 38 nt, Artificial Sequence
  Description of Artificial Sequence:  Enzymatic Nucleic Acid
caacuccccugaugaggccguuaggccgaaauuacaua

SEQ ID NO: 7634 - RNA, 38 nt, Artificial Sequence
  Description of Artificial Sequence:  Enzymatic Nucleic Acid
ugugcccccugaugaggccguuaggccgaaacucccaa

SEQ ID NO: 7635 - RNA, 38 nt, Artificial Sequence
  Description of Artificial Sequence:  Enzymatic Nucleic Acid
ccuguggccugaugaggccguuaggccgaaaugugccc

SEQ ID NO: 7636 - RNA, 38 nt, Artificial Sequence
  Description of Artificial Sequence:  Enzymatic Nucleic Acid
uuguacaacugaugaggccguuaggccgaaauguuccu

SEQ ID NO: 7637 - RNA, 38 nt, Artificial Sequence
  Description of Artificial Sequence:  Enzymatic Nucleic Acid
uuuuguaccugaugaggccguuaggccgaaauauguuc

SEQ ID NO: 7638 - RNA, 38 nt, Artificial Sequence
  Description of Artificial Sequence:  Enzymatic Nucleic Acid
auuuuuugcugaugaggccguuaggccgaaacaauaug

SEQ ID NO: 7639 - RNA, 38 nt, Artificial Sequence
  Description of Artificial Sequence:  Enzymatic Nucleic Acid
cacauuuucugaugaggccguuaggccgaaauuuuuug

SEQ ID NO: 7640 - RNA, 38 nt, Artificial Sequence
  Description of Artificial Sequence:  Enzymatic Nucleic Acid
uuuccuaacugaugaggccguuaggccgaaacacauuu

SEQ ID NO: 7641 - RNA, 38 nt, Artificial Sequence
  Description of Artificial Sequence:  Enzymatic Nucleic Acid
guuuccuacugaugaggccguuaggccgaaaacacauu

SEQ ID NO: 7642 - RNA, 38 nt, Artificial Sequence
  Description of Artificial Sequence:  Enzymatic Nucleic Acid
aguuuccucugaugaggccguuaggccgaaaaacacau

SEQ ID NO: 7643 - RNA, 38 nt, Artificial Sequence
  Description of Artificial Sequence:  Enzymatic Nucleic Acid
aaguuucccugaugaggccguuaggccgaaaaaacaca

SEQ ID NO: 7644 - RNA, 38 nt, Artificial Sequence
  Description of Artificial Sequence:  Enzymatic Nucleic Acid
uuuacaggcugaugaggccguuaggccgaaaguuuccu

SEQ ID NO: 7645 - RNA, 38 nt, Artificial Sequence
  Description of Artificial Sequence:  Enzymatic Nucleic Acid
guuuacagcugaugaggccguuaggccgaaaaguuucc

SEQ ID NO: 7646 - RNA, 38 nt, Artificial Sequence
  Description of Artificial Sequence:  Enzymatic Nucleic Acid
ggccuguucugaugaggccguuaggccgaaacaggaag

SEQ ID NO: 7647 - RNA, 38 nt, Artificial Sequence
  Description of Artificial Sequence:  Enzymatic Nucleic Acid
ccaaucaacugaugaggccguuaggccgaaaggccugu

SEQ ID NO: 7648 - RNA, 38 nt, Artificial Sequence
  Description of Artificial Sequence:  Enzymatic Nucleic Acid
uuccaauccugaugaggccguuaggccgaaauaggccu

SEQ ID NO: 7649 - RNA, 38 nt, Artificial Sequence
  Description of Artificial Sequence:  Enzymatic Nucleic Acid
uacuuucccugaugaggccguuaggccgaaaucaauag

SEQ ID NO: 7650 - RNA, 38 nt, Artificial Sequence
  Description of Artificial Sequence:  Enzymatic Nucleic Acid
cguugacacugaugaggccguuaggccgaaacuuucca

SEQ ID NO: 7651 - RNA, 38 nt, Artificial Sequence
  Description of Artificial Sequence:  Enzymatic Nucleic Acid
aauucguucugaugaggccguuaggccgaaacauacuu

SEQ ID NO: 7652 - RNA, 38 nt, Artificial Sequence
  Description of Artificial Sequence:  Enzymatic Nucleic Acid
agacccaccugaugaggccguuaggccgaaauucguug

SEQ ID NO: 7653 - RNA, 38 nt, Artificial Sequence
  Description of Artificial Sequence:  Enzymatic Nucleic Acid
ccccaaaacugaugaggccguuaggccgaaacccacaa

SEQ ID NO: 7654 - RNA, 38 nt, Artificial Sequence
  Description of Artificial Sequence:  Enzymatic Nucleic Acid
aaccccaacugaugaggccguuaggccgaaagacccac

SEQ ID NO: 7655 - RNA, 38 nt, Artificial Sequence
  Description of Artificial Sequence:  Enzymatic Nucleic Acid
aaaccccacugaugaggccguuaggccgaaaagaccca

SEQ ID NO: 7656 - RNA, 38 nt, Artificial Sequence
  Description of Artificial Sequence:  Enzymatic Nucleic Acid
caaacccccugaugaggccguuaggccgaaaaagaccc

SEQ ID NO: 7657 - RNA, 38 nt, Artificial Sequence
  Description of Artificial Sequence:  Enzymatic Nucleic Acid
gggcggcacugaugaggccguuaggccgaaaccccaaa

SEQ ID NO: 7658 - RNA, 38 nt, Artificial Sequence
  Description of Artificial Sequence:  Enzymatic Nucleic Acid
ggggcggccugaugaggccguuaggccgaaaaccccaa

SEQ ID NO: 7659 - RNA, 38 nt, Artificial Sequence
  Description of Artificial Sequence:  Enzymatic Nucleic Acid
uugcgugacugaugaggccguuaggccgaaaggggcgg

SEQ ID NO: 7660 - RNA, 38 nt, Artificial Sequence
  Description of Artificial Sequence:  Enzymatic Nucleic Acid
auugcgugcugaugaggccguuaggccgaaaaggggcg

SEQ ID NO: 7661 - RNA, 38 nt, Artificial Sequence
  Description of Artificial Sequence:  Enzymatic Nucleic Acid
cauugcgucugaugaggccguuaggccgaaaaaggggc

SEQ ID NO: 7662 - RNA, 38 nt, Artificial Sequence
  Description of Artificial Sequence:  Enzymatic Nucleic Acid
aagcagaacugaugaggccguuaggccgaaauccacau

SEQ ID NO: 7663 - RNA, 38 nt, Artificial Sequence
  Description of Artificial Sequence:  Enzymatic Nucleic Acid
uaaagcagcugaugaggccguuaggccgaaauauccac

SEQ ID NO: 7664 - RNA, 38 nt, Artificial Sequence
  Description of Artificial Sequence:  Enzymatic Nucleic Acid
uuaaagcacugaugaggccguuaggccgaaaauaucca

SEQ ID NO: 7665 - RNA, 38 nt, Artificial Sequence
  Description of Artificial Sequence:  Enzymatic Nucleic Acid
aggcauuacugaugaggccguuaggccgaaagcagaau

SEQ ID NO: 7666 - RNA, 38 nt, Artificial Sequence
  Description of Artificial Sequence:  Enzymatic Nucleic Acid
aaggcauucugaugaggccguuaggccgaaaagcagaa

SEQ ID NO: 7667 - RNA, 38 nt, Artificial Sequence
  Description of Artificial Sequence:  Enzymatic Nucleic Acid
aaaggcaucugaugaggccguuaggccgaaaaagcaga

SEQ ID NO: 7668 - RNA, 38 nt, Artificial Sequence
  Description of Artificial Sequence:  Enzymatic Nucleic Acid
ugcauauacugaugaggccguuaggccgaaaggcauua

SEQ ID NO: 7669 - RNA, 38 nt, Artificial Sequence
  Description of Artificial Sequence:  Enzymatic Nucleic Acid
augcauaucugaugaggccguuaggccgaaaaggcauu

SEQ ID NO: 7670 - RNA, 38 nt, Artificial Sequence
  Description of Artificial Sequence:  Enzymatic Nucleic Acid
caugcauacugaugaggccguuaggccgaaaaaggcau

SEQ ID NO: 7671 - RNA, 38 nt, Artificial Sequence
  Description of Artificial Sequence:  Enzymatic Nucleic Acid
ugcaugcacugaugaggccguuaggccgaaauaaaggc

SEQ ID NO: 7672 - RNA, 38 nt, Artificial Sequence
  Description of Artificial Sequence:  Enzymatic Nucleic Acid
uuugcuugcugaugaggccguuaggccgaaaugcaugc

SEQ ID NO: 7673 - RNA, 38 nt, Artificial Sequence
  Description of Artificial Sequence:  Enzymatic Nucleic Acid
gaaaguaacugaugaggccguuaggccgaaagccuguu

SEQ ID NO: 7674 - RNA, 38 nt, Artificial Sequence
  Description of Artificial Sequence:  Enzymatic Nucleic Acid
agaaaguacugaugaggccguuaggccgaaaagccugu

SEQ ID NO: 7675 - RNA, 38 nt, Artificial Sequence
  Description of Artificial Sequence:  Enzymatic Nucleic Acid
gagaaagucugaugaggccguuaggccgaaaaagccug

SEQ ID NO: 7676 - RNA, 38 nt, Artificial Sequence
  Description of Artificial Sequence:  Enzymatic Nucleic Acid
cgagaaagcugaugaggccguuaggccgaaaaaagccu

SEQ ID NO: 7677 - RNA, 38 nt, Artificial Sequence
  Description of Artificial Sequence:  Enzymatic Nucleic Acid
uggcgagacugaugaggccguuaggccgaaaguaaaag

SEQ ID NO: 7678 - RNA, 38 nt, Artificial Sequence
  Description of Artificial Sequence:  Enzymatic Nucleic Acid
uuggcgagcugaugaggccguuaggccgaaaaguaaaa

SEQ ID NO: 7679 - RNA, 38 nt, Artificial Sequence
  Description of Artificial Sequence:  Enzymatic Nucleic Acid
guuggcgacugaugaggccguuaggccgaaaaaguaaa

SEQ ID NO: 7680 - RNA, 38 nt, Artificial Sequence
  Description of Artificial Sequence:  Enzymatic Nucleic Acid
aaguuggccugaugaggccguuaggccgaaagaaagua

SEQ ID NO: 7681 - RNA, 38 nt, Artificial Sequence
  Description of Artificial Sequence:  Enzymatic Nucleic Acid
ggccuugucugaugaggccguuaggccgaaaguuggcg

SEQ ID NO: 7682 - RNA, 38 nt, Artificial Sequence
  Description of Artificial Sequence:  Enzymatic Nucleic Acid
aggccuugcugaugaggccguuaggccgaaaaguuggc

SEQ ID NO: 7683 - RNA, 38 nt, Artificial Sequence
  Description of Artificial Sequence:  Enzymatic Nucleic Acid
uacuuagacugaugaggccguuaggccgaaaggccuug

SEQ ID NO: 7684 - RNA, 38 nt, Artificial Sequence
  Description of Artificial Sequence:  Enzymatic Nucleic Acid
uuacuuagcugaugaggccguuaggccgaaaaggccuu

SEQ ID NO: 7685 - RNA, 38 nt, Artificial Sequence
  Description of Artificial Sequence:  Enzymatic Nucleic Acid
uuuacuuacugaugaggccguuaggccgaaaaaggccu

SEQ ID NO: 7686 - RNA, 38 nt, Artificial Sequence
  Description of Artificial Sequence:  Enzymatic Nucleic Acid
uguuuacucugaugaggccguuaggccgaaagaaaggc

SEQ ID NO: 7687 - RNA, 38 nt, Artificial Sequence
  Description of Artificial Sequence:  Enzymatic Nucleic Acid
auacuguucugaugaggccguuaggccgaaacuuagaa

SEQ ID NO: 7688 - RNA, 38 nt, Artificial Sequence
  Description of Artificial Sequence:  Enzymatic Nucleic Acid
gguucacacugaugaggccguuaggccgaaacuguuua

SEQ ID NO: 7689 - RNA, 38 nt, Artificial Sequence
  Description of Artificial Sequence:  Enzymatic Nucleic Acid
acgggguacugaugaggccguuaggccgaaagguucac

SEQ ID NO: 7690 - RNA, 38 nt, Artificial Sequence
  Description of Artificial Sequence:  Enzymatic Nucleic Acid
aacggggucugaugaggccguuaggccgaaaagguuca

SEQ ID NO: 7691 - RNA, 38 nt, Artificial Sequence
  Description of Artificial Sequence:  Enzymatic Nucleic Acid
caacggggcugaugaggccguuaggccgaaaaagguuc

SEQ ID NO: 7692 - RNA, 38 nt, Artificial Sequence
  Description of Artificial Sequence:  Enzymatic Nucleic Acid
ugccgagccugaugaggccguuaggccgaaacggggua

SEQ ID NO: 7693 - RNA, 38 nt, Artificial Sequence
  Description of Artificial Sequence:  Enzymatic Nucleic Acid
ccguugcccugaugaggccguuaggccgaaagcaacgg

SEQ ID NO: 7694 - RNA, 38 nt, Artificial Sequence
  Description of Artificial Sequence:  Enzymatic Nucleic Acid
uuggcauacugaugaggccguuaggccgaaaccaggcc

SEQ ID NO: 7695 - RNA, 38 nt, Artificial Sequence
  Description of Artificial Sequence:  Enzymatic Nucleic Acid
acuuggcacugaugaggccguuaggccgaaagaccagg

SEQ ID NO: 7696 - RNA, 38 nt, Artificial Sequence
  Description of Artificial Sequence:  Enzymatic Nucleic Acid
cgucagcacugaugaggccguuaggccgaaacacuugg

SEQ ID NO: 7697 - RNA, 38 nt, Artificial Sequence
  Description of Artificial Sequence:  Enzymatic Nucleic Acid
gcgucagccugaugaggccguuaggccgaaaacacuug

SEQ ID NO: 7698 - RNA, 38 nt, Artificial Sequence
  Description of Artificial Sequence:  Enzymatic Nucleic Acid
caagcccccugaugaggccguuaggccgaaaccagugg

SEQ ID NO: 7699 - RNA, 38 nt, Artificial Sequence
  Description of Artificial Sequence:  Enzymatic Nucleic Acid
cuauggcccugaugaggccguuaggccgaaagccccaa

SEQ ID NO: 7700 - RNA, 38 nt, Artificial Sequence
  Description of Artificial Sequence:  Enzymatic Nucleic Acid
ugauggcccugaugaggccguuaggccgaaauggccaa

SEQ ID NO: 7701 - RNA, 38 nt, Artificial Sequence
  Description of Artificial Sequence:  Enzymatic Nucleic Acid
caugcgcucugaugaggccguuaggccgaaauggccua

SEQ ID NO: 7702 - RNA, 38 nt, Artificial Sequence
  Description of Artificial Sequence:  Enzymatic Nucleic Acid
gagacacacugaugaggccguuaggccgaaagguucca

SEQ ID NO: 7703 - RNA, 38 nt, Artificial Sequence
  Description of Artificial Sequence:  Enzymatic Nucleic Acid
ggagacaccugaugaggccguuaggccgaaaagguucc

SEQ ID NO: 7704 - RNA, 38 nt, Artificial Sequence
  Description of Artificial Sequence:  Enzymatic Nucleic Acid
gcagaggacugaugaggccguuaggccgaaacacaaag

SEQ ID NO: 7705 - RNA, 38 nt, Artificial Sequence
  Description of Artificial Sequence:  Enzymatic Nucleic Acid
cggcagagcugaugaggccguuaggccgaaagacacaa

SEQ ID NO: 7706 - RNA, 38 nt, Artificial Sequence
  Description of Artificial Sequence:  Enzymatic Nucleic Acid
gaucggcacugaugaggccguuaggccgaaaggagaca

SEQ ID NO: 7707 - RNA, 38 nt, Artificial Sequence
  Description of Artificial Sequence:  Enzymatic Nucleic Acid
gcgguaugcugaugaggccguuaggccgaaaucggcag

SEQ ID NO: 7708 - RNA, 38 nt, Artificial Sequence
  Description of Artificial Sequence:  Enzymatic Nucleic Acid
uuccgcggcugaugaggccguuaggccgaaauggaucg

SEQ ID NO: 7709 - RNA, 38 nt, Artificial Sequence
  Description of Artificial Sequence:  Enzymatic Nucleic Acid
gcggcuagcugaugaggccguuaggccgaaaguuccgc

SEQ ID NO: 7710 - RNA, 38 nt, Artificial Sequence
  Description of Artificial Sequence:  Enzymatic Nucleic Acid
caagcggccugaugaggccguuaggccgaaaggaguuc

SEQ ID NO: 7711 - RNA, 38 nt, Artificial Sequence
  Description of Artificial Sequence:  Enzymatic Nucleic Acid
agcaaaaccugaugaggccguuaggccgaaagcggcua

SEQ ID NO: 7712 - RNA, 38 nt, Artificial Sequence
  Description of Artificial Sequence:  Enzymatic Nucleic Acid
gcgagcaacugaugaggccguuaggccgaaacaagcgg

SEQ ID NO: 7713 - RNA, 38 nt, Artificial Sequence
  Description of Artificial Sequence:  Enzymatic Nucleic Acid
ugcgagcacugaugaggccguuaggccgaaaacaagcg

SEQ ID NO: 7714 - RNA, 38 nt, Artificial Sequence
  Description of Artificial Sequence:  Enzymatic Nucleic Acid
cugcgagccugaugaggccguuaggccgaaaaacaagc

SEQ ID NO: 7715 - RNA, 38 nt, Artificial Sequence
  Description of Artificial Sequence:  Enzymatic Nucleic Acid
ccugcugccugaugaggccguuaggccgaaagcaaaac

SEQ ID NO: 7716 - RNA, 38 nt, Artificial Sequence
  Description of Artificial Sequence:  Enzymatic Nucleic Acid
uugccccacugaugaggccguuaggccgaaaccugcug

SEQ ID NO: 7717 - RNA, 38 nt, Artificial Sequence
  Description of Artificial Sequence:  Enzymatic Nucleic Acid
gucccgaucugaugaggccguuaggccgaaaguuuugc

SEQ ID NO: 7718 - RNA, 38 nt, Artificial Sequence
  Description of Artificial Sequence:  Enzymatic Nucleic Acid
ucaguccccugaugaggccguuaggccgaaaugaguuu

SEQ ID NO: 7719 - RNA, 38 nt, Artificial Sequence
  Description of Artificial Sequence:  Enzymatic Nucleic Acid
cacgacagcugaugaggccguuaggccgaaauugucag

SEQ ID NO: 7720 - RNA, 38 nt, Artificial Sequence
  Description of Artificial Sequence:  Enzymatic Nucleic Acid
gcacgacacugaugaggccguuaggccgaaaauuguca

SEQ ID NO: 7721 - RNA, 38 nt, Artificial Sequence
  Description of Artificial Sequence:  Enzymatic Nucleic Acid
gagagcaccugaugaggccguuaggccgaaacagaauu

SEQ ID NO: 7722 - RNA, 38 nt, Artificial Sequence
  Description of Artificial Sequence:  Enzymatic Nucleic Acid
uugcgggacugaugaggccguuaggccgaaagcacgac

SEQ ID NO: 7723 - RNA, 38 nt, Artificial Sequence
  Description of Artificial Sequence:  Enzymatic Nucleic Acid
auuugcggcugaugaggccguuaggccgaaagagcacg

SEQ ID NO: 7724 - RNA, 38 nt, Artificial Sequence
  Description of Artificial Sequence:  Enzymatic Nucleic Acid
augauguacugaugaggccguuaggccgaaauuugcgg

SEQ ID NO: 7725 - RNA, 38 nt, Artificial Sequence
  Description of Artificial Sequence:  Enzymatic Nucleic Acid
aaaugaugcugaugaggccguuaggccgaaauauuugc

SEQ ID NO: 7726 - RNA, 38 nt, Artificial Sequence
  Description of Artificial Sequence:  Enzymatic Nucleic Acid
auggaaaucugaugaggccguuaggccgaaauguauau

SEQ ID NO: 7727 - RNA, 38 nt, Artificial Sequence
  Description of Artificial Sequence:  Enzymatic Nucleic Acid
gccauggacugaugaggccguuaggccgaaaugaugua

SEQ ID NO: 7728 - RNA, 38 nt, Artificial Sequence
  Description of Artificial Sequence:  Enzymatic Nucleic Acid
agccauggcugaugaggccguuaggccgaaaaugaugu

SEQ ID NO: 7729 - RNA, 38 nt, Artificial Sequence
  Description of Artificial Sequence:  Enzymatic Nucleic Acid
cagccaugcugaugaggccguuaggccgaaaaaugaug

SEQ ID NO: 7730 - RNA, 38 nt, Artificial Sequence
  Description of Artificial Sequence:  Enzymatic Nucleic Acid
gcacagcccugaugaggccguuaggccgaaagcagcca

SEQ ID NO: 7731 - RNA, 38 nt, Artificial Sequence
  Description of Artificial Sequence:  Enzymatic Nucleic Acid
ccgcguagcugaugaggccguuaggccgaaauccaguu

SEQ ID NO: 7732 - RNA, 38 nt, Artificial Sequence
  Description of Artificial Sequence:  Enzymatic Nucleic Acid
gucccgcgcugaugaggccguuaggccgaaaggaucca

SEQ ID NO: 7733 - RNA, 38 nt, Artificial Sequence
  Description of Artificial Sequence:  Enzymatic Nucleic Acid
aaacaaagcugaugaggccguuaggccgaaacgucccg

SEQ ID NO: 7734 - RNA, 38 nt, Artificial Sequence
  Description of Artificial Sequence:  Enzymatic Nucleic Acid
cguaaacacugaugaggccguuaggccgaaaggacguc

SEQ ID NO: 7735 - RNA, 38 nt, Artificial Sequence
  Description of Artificial Sequence:  Enzymatic Nucleic Acid
acguaaaccugaugaggccguuaggccgaaaaggacgu

SEQ ID NO: 7736 - RNA, 38 nt, Artificial Sequence
  Description of Artificial Sequence:  Enzymatic Nucleic Acid
gggacguacugaugaggccguuaggccgaaacaaagga

SEQ ID NO: 7737 - RNA, 38 nt, Artificial Sequence
  Description of Artificial Sequence:  Enzymatic Nucleic Acid
cgggacgucugaugaggccguuaggccgaaaacaaagg

SEQ ID NO: 7738 - RNA, 38 nt, Artificial Sequence
  Description of Artificial Sequence:  Enzymatic Nucleic Acid
acgggacgcugaugaggccguuaggccgaaaaacaaag

SEQ ID NO: 7739 - RNA, 38 nt, Artificial Sequence
  Description of Artificial Sequence:  Enzymatic Nucleic Acid
gccgacggcugaugaggccguuaggccgaaacguaaac

SEQ ID NO: 7740 - RNA, 38 nt, Artificial Sequence
  Description of Artificial Sequence:  Enzymatic Nucleic Acid
ucagcgcccugaugaggccguuaggccgaaacgggacg

SEQ ID NO: 7741 - RNA, 38 nt, Artificial Sequence
  Description of Artificial Sequence:  Enzymatic Nucleic Acid
guccgcggcugaugaggccguuaggccgaaauucagcg

SEQ ID NO: 7742 - RNA, 38 nt, Artificial Sequence
  Description of Artificial Sequence:  Enzymatic Nucleic Acid
ggccccggcugaugaggccguuaggccgaaaggggucg

SEQ ID NO: 7743 - RNA, 38 nt, Artificial Sequence
  Description of Artificial Sequence:  Enzymatic Nucleic Acid
agagcccccugaugaggccguuaggccgaaagcggccc

SEQ ID NO: 7744 - RNA, 38 nt, Artificial Sequence
  Description of Artificial Sequence:  Enzymatic Nucleic Acid
gggcgguacugaugaggccguuaggccgaaagccccaa

SEQ ID NO: 7745 - RNA, 38 nt, Artificial Sequence
  Description of Artificial Sequence:  Enzymatic Nucleic Acid
gcgggcggcugaugaggccguuaggccgaaagagcccc

SEQ ID NO: 7746 - RNA, 38 nt, Artificial Sequence
  Description of Artificial Sequence:  Enzymatic Nucleic Acid
aggcggagcugaugaggccguuaggccgaaagcgggcg

SEQ ID NO: 7747 - RNA, 38 nt, Artificial Sequence
  Description of Artificial Sequence:  Enzymatic Nucleic Acid
uaggcggacugaugaggccguuaggccgaaaagcgggc

SEQ ID NO: 7748 - RNA, 38 nt, Artificial Sequence
  Description of Artificial Sequence:  Enzymatic Nucleic Acid
aauaggcgcugaugaggccguuaggccgaaagaagcgg

SEQ ID NO: 7749 - RNA, 38 nt, Artificial Sequence
  Description of Artificial Sequence:  Enzymatic Nucleic Acid
cgguacaacugaugaggccguuaggccgaaaggcggag

SEQ ID NO: 7750 - RNA, 38 nt, Artificial Sequence
  Description of Artificial Sequence:  Enzymatic Nucleic Acid
gucgguaccugaugaggccguuaggccgaaauaggcgg

SEQ ID NO: 7751 - RNA, 38 nt, Artificial Sequence
  Description of Artificial Sequence:  Enzymatic Nucleic Acid
acggucggcugaugaggccguuaggccgaaacaauagg

SEQ ID NO: 7752 - RNA, 38 nt, Artificial Sequence
  Description of Artificial Sequence:  Enzymatic Nucleic Acid
gccccgugcugaugaggccguuaggccgaaacggucgg

SEQ ID NO: 7753 - RNA, 38 nt, Artificial Sequence
  Description of Artificial Sequence:  Enzymatic Nucleic Acid
cguaaagacugaugaggccguuaggccgaaaggugcgc

SEQ ID NO: 7754 - RNA, 38 nt, Artificial Sequence
  Description of Artificial Sequence:  Enzymatic Nucleic Acid
cgcguaaacugaugaggccguuaggccgaaagaggugc

SEQ ID NO: 7755 - RNA, 38 nt, Artificial Sequence
  Description of Artificial Sequence:  Enzymatic Nucleic Acid
uccgcguacugaugaggccguuaggccgaaagagaggu

SEQ ID NO: 7756 - RNA, 38 nt, Artificial Sequence
  Description of Artificial Sequence:  Enzymatic Nucleic Acid
guccgcgucugaugaggccguuaggccgaaaagagagg

SEQ ID NO: 7757 - RNA, 38 nt, Artificial Sequence
  Description of Artificial Sequence:  Enzymatic Nucleic Acid
aguccgcgcugaugaggccguuaggccgaaaaagagag

SEQ ID NO: 7758 - RNA, 38 nt, Artificial Sequence
  Description of Artificial Sequence:  Enzymatic Nucleic Acid
cagacgggcugaugaggccguuaggccgaaaguccgcg

SEQ ID NO: 7759 - RNA, 38 nt, Artificial Sequence
  Description of Artificial Sequence:  Enzymatic Nucleic Acid
aaggcacacugaugaggccguuaggccgaaacggggag

SEQ ID NO: 7760 - RNA, 38 nt, Artificial Sequence
  Description of Artificial Sequence:  Enzymatic Nucleic Acid
cagaugagcugaugaggccguuaggccgaaaggcacag

SEQ ID NO: 7761 - RNA, 38 nt, Artificial Sequence
  Description of Artificial Sequence:  Enzymatic Nucleic Acid
gcagaugacugaugaggccguuaggccgaaaaggcaca

SEQ ID NO: 7762 - RNA, 38 nt, Artificial Sequence
  Description of Artificial Sequence:  Enzymatic Nucleic Acid
cggcagaucugaugaggccguuaggccgaaagaaggca

SEQ ID NO: 7763 - RNA, 38 nt, Artificial Sequence
  Description of Artificial Sequence:  Enzymatic Nucleic Acid
guccggcacugaugaggccguuaggccgaaaugagaag

SEQ ID NO: 7764 - RNA, 38 nt, Artificial Sequence
  Description of Artificial Sequence:  Enzymatic Nucleic Acid
gugaagcgcugaugaggccguuaggccgaaagugcaca

SEQ ID NO: 7765 - RNA, 38 nt, Artificial Sequence
  Description of Artificial Sequence:  Enzymatic Nucleic Acid
ggugaagccugaugaggccguuaggccgaaaagugcac

SEQ ID NO: 7766 - RNA, 38 nt, Artificial Sequence
  Description of Artificial Sequence:  Enzymatic Nucleic Acid
cagaggugcugaugaggccguuaggccgaaagcgaagu

SEQ ID NO: 7767 - RNA, 38 nt, Artificial Sequence
  Description of Artificial Sequence:  Enzymatic Nucleic Acid
gcagaggucugaugaggccguuaggccgaaaagcgaag

SEQ ID NO: 7768 - RNA, 38 nt, Artificial Sequence
  Description of Artificial Sequence:  Enzymatic Nucleic Acid
gacgugcacugaugaggccguuaggccgaaaggugaag

SEQ ID NO: 7769 - RNA, 38 nt, Artificial Sequence
  Description of Artificial Sequence:  Enzymatic Nucleic Acid
cuccaugccugaugaggccguuaggccgaaacgugcag

SEQ ID NO: 7770 - RNA, 38 nt, Artificial Sequence
  Description of Artificial Sequence:  Enzymatic Nucleic Acid
uuaugcaacugaugaggccguuaggccgaaaccuuggg

SEQ ID NO: 7771 - RNA, 38 nt, Artificial Sequence
  Description of Artificial Sequence:  Enzymatic Nucleic Acid
ucuuaugccugaugaggccguuaggccgaaagaccuug

SEQ ID NO: 7772 - RNA, 38 nt, Artificial Sequence
  Description of Artificial Sequence:  Enzymatic Nucleic Acid
aguccucucugaugaggccguuaggccgaaaugcaaga

SEQ ID NO: 7773 - RNA, 38 nt, Artificial Sequence
  Description of Artificial Sequence:  Enzymatic Nucleic Acid
aaguccaacugaugaggccguuaggccgaaaguccucu

SEQ ID NO: 7774 - RNA, 38 nt, Artificial Sequence
  Description of Artificial Sequence:  Enzymatic Nucleic Acid
gaaagucccugaugaggccguuaggccgaaagaguccu

SEQ ID NO: 7775 - RNA, 38 nt, Artificial Sequence
  Description of Artificial Sequence:  Enzymatic Nucleic Acid
auugcugacugaugaggccguuaggccgaaaguccaag

SEQ ID NO: 7776 - RNA, 38 nt, Artificial Sequence
  Description of Artificial Sequence:  Enzymatic Nucleic Acid
cauugcugcugaugaggccguuaggccgaaaaguccaa

SEQ ID NO: 7777 - RNA, 38 nt, Artificial Sequence
  Description of Artificial Sequence:  Enzymatic Nucleic Acid
acauugcucugaugaggccguuaggccgaaaaagucca

SEQ ID NO: 7778 - RNA, 38 nt, Artificial Sequence
  Description of Artificial Sequence:  Enzymatic Nucleic Acid
cggucguucugaugaggccguuaggccgaaacauugcu

SEQ ID NO: 7779 - RNA, 38 nt, Artificial Sequence
  Description of Artificial Sequence:  Enzymatic Nucleic Acid
uaugccuccugaugaggccguuaggccgaaaggucggu

SEQ ID NO: 7780 - RNA, 38 nt, Artificial Sequence
  Description of Artificial Sequence:  Enzymatic Nucleic Acid
cuuugaagcugaugaggccguuaggccgaaaugccuca

SEQ ID NO: 7781 - RNA, 38 nt, Artificial Sequence
  Description of Artificial Sequence:  Enzymatic Nucleic Acid
agucuuugcugaugaggccguuaggccgaaaguaugcc

SEQ ID NO: 7782 - RNA, 38 nt, Artificial Sequence
  Description of Artificial Sequence:  Enzymatic Nucleic Acid
cagucuuucugaugaggccguuaggccgaaaaguaugc

SEQ ID NO: 7783 - RNA, 38 nt, Artificial Sequence
  Description of Artificial Sequence:  Enzymatic Nucleic Acid
acucauuacugaugaggccguuaggccgaaacacacag

SEQ ID NO: 7784 - RNA, 38 nt, Artificial Sequence
  Description of Artificial Sequence:  Enzymatic Nucleic Acid
cacucauucugaugaggccguuaggccgaaaacacaca

SEQ ID NO: 7785 - RNA, 38 nt, Artificial Sequence
  Description of Artificial Sequence:  Enzymatic Nucleic Acid
ccacucaucugaugaggccguuaggccgaaaaacacac

SEQ ID NO: 7786 - RNA, 38 nt, Artificial Sequence
  Description of Artificial Sequence:  Enzymatic Nucleic Acid
ccuccccccugaugaggccguuaggccgaaacuccucc

SEQ ID NO: 7787 - RNA, 38 nt, Artificial Sequence
  Description of Artificial Sequence:  Enzymatic Nucleic Acid
uuuaaccucugaugaggccguuaggccgaaaccuccuc

SEQ ID NO: 7788 - RNA, 38 nt, Artificial Sequence
  Description of Artificial Sequence:  Enzymatic Nucleic Acid
cuuuaacccugaugaggccguuaggccgaaaaccuccu

SEQ ID NO: 7789 - RNA, 38 nt, Artificial Sequence
  Description of Artificial Sequence:  Enzymatic Nucleic Acid
agaccuuucugaugaggccguuaggccgaaaccuaacc

SEQ ID NO: 7790 - RNA, 38 nt, Artificial Sequence
  Description of Artificial Sequence:  Enzymatic Nucleic Acid
aagaccuucugaugaggccguuaggccgaaaaccuaac

SEQ ID NO: 7791 - RNA, 38 nt, Artificial Sequence
  Description of Artificial Sequence:  Enzymatic Nucleic Acid
aguacaaacugaugaggccguuaggccgaaaccuuuaa

SEQ ID NO: 7792 - RNA, 38 nt, Artificial Sequence
  Description of Artificial Sequence:  Enzymatic Nucleic Acid
cuaguacacugaugaggccguuaggccgaaagaccuuu

SEQ ID NO: 7793 - RNA, 38 nt, Artificial Sequence
  Description of Artificial Sequence:  Enzymatic Nucleic Acid
ccuaguaccugaugaggccguuaggccgaaaagaccuu

SEQ ID NO: 7794 - RNA, 38 nt, Artificial Sequence
  Description of Artificial Sequence:  Enzymatic Nucleic Acid
ccuccuagcugaugaggccguuaggccgaaacaaagac

SEQ ID NO: 7795 - RNA, 38 nt, Artificial Sequence
  Description of Artificial Sequence:  Enzymatic Nucleic Acid
cagccucccugaugaggccguuaggccgaaaguacaaa

SEQ ID NO: 7796 - RNA, 38 nt, Artificial Sequence
  Description of Artificial Sequence:  Enzymatic Nucleic Acid
uuuaugcccugaugaggccguuaggccgaaacagccuc

SEQ ID NO: 7797 - RNA, 38 nt, Artificial Sequence
  Description of Artificial Sequence:  Enzymatic Nucleic Acid
caccaauucugaugaggccguuaggccgaaaugccuac

SEQ ID NO: 7798 - RNA, 38 nt, Artificial Sequence
  Description of Artificial Sequence:  Enzymatic Nucleic Acid
aacacacccugaugaggccguuaggccgaaauuuaugc

SEQ ID NO: 7799 - RNA, 38 nt, Artificial Sequence
  Description of Artificial Sequence:  Enzymatic Nucleic Acid
ugcuggugcugaugaggccguuaggccgaaacacacca

SEQ ID NO: 7800 - RNA, 38 nt, Artificial Sequence
  Description of Artificial Sequence:  Enzymatic Nucleic Acid
gugcuggucugaugaggccguuaggccgaaaacacacc

SEQ ID NO: 7801 - RNA, 38 nt, Artificial Sequence
  Description of Artificial Sequence:  Enzymatic Nucleic Acid
aggugaaacugaugaggccguuaggccgaaaguugcau

SEQ ID NO: 7802 - RNA, 38 nt, Artificial Sequence
  Description of Artificial Sequence:  Enzymatic Nucleic Acid
gaggugaacugaugaggccguuaggccgaaaaguugca

SEQ ID NO: 7803 - RNA, 38 nt, Artificial Sequence
  Description of Artificial Sequence:  Enzymatic Nucleic Acid
agaggugacugaugaggccguuaggccgaaaaaguugc

SEQ ID NO: 7804 - RNA, 38 nt, Artificial Sequence
  Description of Artificial Sequence:  Enzymatic Nucleic Acid
cagaggugcugaugaggccguuaggccgaaaaaaguug

SEQ ID NO: 7805 - RNA, 38 nt, Artificial Sequence
  Description of Artificial Sequence:  Enzymatic Nucleic Acid
gcagaggucugaugaggccguuaggccgaaaaaaaguu

SEQ ID NO: 7806 - RNA, 38 nt, Artificial Sequence
  Description of Artificial Sequence:  Enzymatic Nucleic Acid
auuaggcacugaugaggccguuaggccgaaaggugaaa

SEQ ID NO: 7807 - RNA, 38 nt, Artificial Sequence
  Description of Artificial Sequence:  Enzymatic Nucleic Acid
gagaugaucugaugaggccguuaggccgaaaggcagag

SEQ ID NO: 7808 - RNA, 38 nt, Artificial Sequence
  Description of Artificial Sequence:  Enzymatic Nucleic Acid
caugagaucugaugaggccguuaggccgaaauuaggca

SEQ ID NO: 7809 - RNA, 38 nt, Artificial Sequence
  Description of Artificial Sequence:  Enzymatic Nucleic Acid
gaacaugacugaugaggccguuaggccgaaaugauuag

SEQ ID NO: 7810 - RNA, 38 nt, Artificial Sequence
  Description of Artificial Sequence:  Enzymatic Nucleic Acid
augaacaucugaugaggccguuaggccgaaagaugauu

SEQ ID NO: 7811 - RNA, 38 nt, Artificial Sequence
  Description of Artificial Sequence:  Enzymatic Nucleic Acid
aggacaugcugaugaggccguuaggccgaaacaugaga

SEQ ID NO: 7812 - RNA, 38 nt, Artificial Sequence
  Description of Artificial Sequence:  Enzymatic Nucleic Acid
uaggacaucugaugaggccguuaggccgaaaacaugag

SEQ ID NO: 7813 - RNA, 38 nt, Artificial Sequence
  Description of Artificial Sequence:  Enzymatic Nucleic Acid
aacaguagcugaugaggccguuaggccgaaacaugaac

SEQ ID NO: 7814 - RNA, 38 nt, Artificial Sequence
  Description of Artificial Sequence:  Enzymatic Nucleic Acid
uugaacagcugaugaggccguuaggccgaaaggacaug

SEQ ID NO: 7815 - RNA, 38 nt, Artificial Sequence
  Description of Artificial Sequence:  Enzymatic Nucleic Acid
gaggcuugcugaugaggccguuaggccgaaacaguagg

SEQ ID NO: 7816 - RNA, 38 nt, Artificial Sequence
  Description of Artificial Sequence:  Enzymatic Nucleic Acid
ggaggcuucugaugaggccguuaggccgaaaacaguag

SEQ ID NO: 7817 - RNA, 38 nt, Artificial Sequence
  Description of Artificial Sequence:  Enzymatic Nucleic Acid
acagcuugcugaugaggccguuaggccgaaaggcuuga

SEQ ID NO: 7818 - RNA, 38 nt, Artificial Sequence
  Description of Artificial Sequence:  Enzymatic Nucleic Acid
agccaccccugaugaggccguuaggccgaaaggcacag

SEQ ID NO: 7819 - RNA, 38 nt, Artificial Sequence
  Description of Artificial Sequence:  Enzymatic Nucleic Acid
augccccacugaugaggccguuaggccgaaagccaccc

SEQ ID NO: 7820 - RNA, 38 nt, Artificial Sequence
  Description of Artificial Sequence:  Enzymatic Nucleic Acid
caugcccccugaugaggccguuaggccgaaaagccacc

SEQ ID NO: 7821 - RNA, 38 nt, Artificial Sequence
  Description of Artificial Sequence:  Enzymatic Nucleic Acid
uacggguccugaugaggccguuaggccgaaauguccau

SEQ ID NO: 7822 - RNA, 38 nt, Artificial Sequence
  Description of Artificial Sequence:  Enzymatic Nucleic Acid
auucuuuacugaugaggccguuaggccgaaacggguca

SEQ ID NO: 7823 - RNA, 38 nt, Artificial Sequence
  Description of Artificial Sequence:  Enzymatic Nucleic Acid
aaauucuucugaugaggccguuaggccgaaauacgggu

SEQ ID NO: 7824 - RNA, 38 nt, Artificial Sequence
  Description of Artificial Sequence:  Enzymatic Nucleic Acid
aagcuccacugaugaggccguuaggccgaaauucuuua

SEQ ID NO: 7825 - RNA, 38 nt, Artificial Sequence
  Description of Artificial Sequence:  Enzymatic Nucleic Acid
gaagcucccugaugaggccguuaggccgaaaauucuuu

SEQ ID NO: 7826 - RNA, 38 nt, Artificial Sequence
  Description of Artificial Sequence:  Enzymatic Nucleic Acid
cuccacagcugaugaggccguuaggccgaaagcuccaa

SEQ ID NO: 7827 - RNA, 38 nt, Artificial Sequence
  Description of Artificial Sequence:  Enzymatic Nucleic Acid
acuccacacugaugaggccguuaggccgaaaagcucca

SEQ ID NO: 7828 - RNA, 38 nt, Artificial Sequence
  Description of Artificial Sequence:  Enzymatic Nucleic Acid
aagagagucugaugaggccguuaggccgaaacuccaca

SEQ ID NO: 7829 - RNA, 38 nt, Artificial Sequence
  Description of Artificial Sequence:  Enzymatic Nucleic Acid
aaagagagcugaugaggccguuaggccgaaaacuccac

SEQ ID NO: 7830 - RNA, 38 nt, Artificial Sequence
  Description of Artificial Sequence:  Enzymatic Nucleic Acid
aaaaaagacugaugaggccguuaggccgaaaguaacuc

SEQ ID NO: 7831 - RNA, 38 nt, Artificial Sequence
  Description of Artificial Sequence:  Enzymatic Nucleic Acid
gcaaaaaacugaugaggccguuaggccgaaagaguaac

SEQ ID NO: 7832 - RNA, 38 nt, Artificial Sequence
  Description of Artificial Sequence:  Enzymatic Nucleic Acid
aggcaaaacugaugaggccguuaggccgaaagagagua

SEQ ID NO: 7833 - RNA, 38 nt, Artificial Sequence
  Description of Artificial Sequence:  Enzymatic Nucleic Acid
aaggcaaacugaugaggccguuaggccgaaaagagagu

SEQ ID NO: 7834 - RNA, 38 nt, Artificial Sequence
  Description of Artificial Sequence:  Enzymatic Nucleic Acid
gaaggcaacugaugaggccguuaggccgaaaaagagag

SEQ ID NO: 7835 - RNA, 38 nt, Artificial Sequence
  Description of Artificial Sequence:  Enzymatic Nucleic Acid
agaaggcacugaugaggccguuaggccgaaaaaagaga

SEQ ID NO: 7836 - RNA, 38 nt, Artificial Sequence
  Description of Artificial Sequence:  Enzymatic Nucleic Acid
cagaaggccugaugaggccguuaggccgaaaaaaagag

SEQ ID NO: 7837 - RNA, 38 nt, Artificial Sequence
  Description of Artificial Sequence:  Enzymatic Nucleic Acid
gaagucagcugaugaggccguuaggccgaaaggcaaaa

SEQ ID NO: 7838 - RNA, 38 nt, Artificial Sequence
  Description of Artificial Sequence:  Enzymatic Nucleic Acid
agaagucacugaugaggccguuaggccgaaaaggcaaa

SEQ ID NO: 7839 - RNA, 38 nt, Artificial Sequence
  Description of Artificial Sequence:  Enzymatic Nucleic Acid
aaggaaagcugaugaggccguuaggccgaaagucagaa

SEQ ID NO: 7840 - RNA, 38 nt, Artificial Sequence
  Description of Artificial Sequence:  Enzymatic Nucleic Acid
gaaggaaacugaugaggccguuaggccgaaaagucaga

SEQ ID NO: 7841 - RNA, 38 nt, Artificial Sequence
  Description of Artificial Sequence:  Enzymatic Nucleic Acid
uagaaggacugaugaggccguuaggccgaaagaaguca

SEQ ID NO: 7842 - RNA, 38 nt, Artificial Sequence
  Description of Artificial Sequence:  Enzymatic Nucleic Acid
auagaaggcugaugaggccguuaggccgaaaagaaguc

SEQ ID NO: 7843 - RNA, 38 nt, Artificial Sequence
  Description of Artificial Sequence:  Enzymatic Nucleic Acid
aauagaagcugaugaggccguuaggccgaaaaagaagu

SEQ ID NO: 7844 - RNA, 38 nt, Artificial Sequence
  Description of Artificial Sequence:  Enzymatic Nucleic Acid
ucgaauagcugaugaggccguuaggccgaaaggaaaga

SEQ ID NO: 7845 - RNA, 38 nt, Artificial Sequence
  Description of Artificial Sequence:  Enzymatic Nucleic Acid
cucgaauacugaugaggccguuaggccgaaaaggaaag

SEQ ID NO: 7846 - RNA, 38 nt, Artificial Sequence
  Description of Artificial Sequence:  Enzymatic Nucleic Acid
aucucgaacugaugaggccguuaggccgaaagaaggaa

SEQ ID NO: 7847 - RNA, 38 nt, Artificial Sequence
  Description of Artificial Sequence:  Enzymatic Nucleic Acid
agaucucgcugaugaggccguuaggccgaaauagaagg

SEQ ID NO: 7848 - RNA, 38 nt, Artificial Sequence
  Description of Artificial Sequence:  Enzymatic Nucleic Acid
gagaucuccugaugaggccguuaggccgaaaauagaag

SEQ ID NO: 7849 - RNA, 38 nt, Artificial Sequence
  Description of Artificial Sequence:  Enzymatic Nucleic Acid
gucgaggacugaugaggccguuaggccgaaaucucgaa

SEQ ID NO: 7850 - RNA, 38 nt, Artificial Sequence
  Description of Artificial Sequence:  Enzymatic Nucleic Acid
gugucgagcugaugaggccguuaggccgaaagaucucg

SEQ ID NO: 7851 - RNA, 38 nt, Artificial Sequence
  Description of Artificial Sequence:  Enzymatic Nucleic Acid
gcgguguccugaugaggccguuaggccgaaaggagauc

SEQ ID NO: 7852 - RNA, 38 nt, Artificial Sequence
  Description of Artificial Sequence:  Enzymatic Nucleic Acid
acagagcacugaugaggccguuaggccgaaaggcggug

SEQ ID NO: 7853 - RNA, 38 nt, Artificial Sequence
  Description of Artificial Sequence:  Enzymatic Nucleic Acid
ccgauacacugaugaggccguuaggccgaaagcagagg

SEQ ID NO: 7854 - RNA, 38 nt, Artificial Sequence
  Description of Artificial Sequence:  Enzymatic Nucleic Acid
ccccccgacugaugaggccguuaggccgaaacagagca

SEQ ID NO: 7855 - RNA, 38 nt, Artificial Sequence
  Description of Artificial Sequence:  Enzymatic Nucleic Acid
ggcccccccugaugaggccguuaggccgaaauacagag

SEQ ID NO: 7856 - RNA, 38 nt, Artificial Sequence
  Description of Artificial Sequence:  Enzymatic Nucleic Acid
gagacucucugaugaggccguuaggccgaaaggccccc

SEQ ID NO: 7857 - RNA, 38 nt, Artificial Sequence
  Description of Artificial Sequence:  Enzymatic Nucleic Acid
ggagacuccugaugaggccguuaggccgaaaaggcccc

SEQ ID NO: 7858 - RNA, 38 nt, Artificial Sequence
  Description of Artificial Sequence:  Enzymatic Nucleic Acid
guuccggacugaugaggccguuaggccgaaacucuaag

SEQ ID NO: 7859 - RNA, 38 nt, Artificial Sequence
  Description of Artificial Sequence:  Enzymatic Nucleic Acid
auguuccgcugaugaggccguuaggccgaaagacucua

SEQ ID NO: 7860 - RNA, 38 nt, Artificial Sequence
  Description of Artificial Sequence:  Enzymatic Nucleic Acid
aggugaaccugaugaggccguuaggccgaaauguuccg

SEQ ID NO: 7861 - RNA, 38 nt, Artificial Sequence
  Description of Artificial Sequence:  Enzymatic Nucleic Acid
gugaggugcugaugaggccguuaggccgaaacaauguu

SEQ ID NO: 7862 - RNA, 38 nt, Artificial Sequence
  Description of Artificial Sequence:  Enzymatic Nucleic Acid
ggugaggucugaugaggccguuaggccgaaaacaaugu

SEQ ID NO: 7863 - RNA, 38 nt, Artificial Sequence
  Description of Artificial Sequence:  Enzymatic Nucleic Acid
cguauggucugaugaggccguuaggccgaaaggugaac

SEQ ID NO: 7864 - RNA, 38 nt, Artificial Sequence
  Description of Artificial Sequence:  Enzymatic Nucleic Acid
gagugccgcugaugaggccguuaggccgaaauggugag

SEQ ID NO: 7865 - RNA, 38 nt, Artificial Sequence
  Description of Artificial Sequence:  Enzymatic Nucleic Acid
gcuugccucugaugaggccguuaggccgaaagugccgu

SEQ ID NO: 7866 - RNA, 38 nt, Artificial Sequence
  Description of Artificial Sequence:  Enzymatic Nucleic Acid
acacagaacugaugaggccguuaggccgaaagcuugcc

SEQ ID NO: 7867 - RNA, 38 nt, Artificial Sequence
  Description of Artificial Sequence:  Enzymatic Nucleic Acid
caacacagcugaugaggccguuaggccgaaauagcuug

SEQ ID NO: 7868 - RNA, 38 nt, Artificial Sequence
  Description of Artificial Sequence:  Enzymatic Nucleic Acid
ccaacacacugaugaggccguuaggccgaaaauagcuu

SEQ ID NO: 7869 - RNA, 38 nt, Artificial Sequence
  Description of Artificial Sequence:  Enzymatic Nucleic Acid
cucacccccugaugaggccguuaggccgaaacacagaa

SEQ ID NO: 7870 - RNA, 38 nt, Artificial Sequence
  Description of Artificial Sequence:  Enzymatic Nucleic Acid
gauucauccugaugaggccguuaggccgaaacucaccc

SEQ ID NO: 7871 - RNA, 38 nt, Artificial Sequence
  Description of Artificial Sequence:  Enzymatic Nucleic Acid
gguggcuacugaugaggccguuaggccgaaauucauca

SEQ ID NO: 7872 - RNA, 38 nt, Artificial Sequence
  Description of Artificial Sequence:  Enzymatic Nucleic Acid
cagguggccugaugaggccguuaggccgaaagauucau

SEQ ID NO: 7873 - RNA, 38 nt, Artificial Sequence
  Description of Artificial Sequence:  Enzymatic Nucleic Acid
uuccaaaucugaugaggccguuaggccgaaacuuccca

SEQ ID NO: 7874 - RNA, 38 nt, Artificial Sequence
  Description of Artificial Sequence:  Enzymatic Nucleic Acid
aucuuccacugaugaggccguuaggccgaaauuacuuc

SEQ ID NO: 7875 - RNA, 38 nt, Artificial Sequence
  Description of Artificial Sequence:  Enzymatic Nucleic Acid
gaucuucccugaugaggccguuaggccgaaaauuacuu

SEQ ID NO: 7876 - RNA, 38 nt, Artificial Sequence
  Description of Artificial Sequence:  Enzymatic Nucleic Acid
ggaugcugcugaugaggccguuaggccgaaaucuucca

SEQ ID NO: 7877 - RNA, 38 nt, Artificial Sequence
  Description of Artificial Sequence:  Enzymatic Nucleic Acid
auucccugcugaugaggccguuaggccgaaaugcugga

SEQ ID NO: 7878 - RNA, 38 nt, Artificial Sequence
  Description of Artificial Sequence:  Enzymatic Nucleic Acid
ugacuacucugaugaggccguuaggccgaaauucccug

SEQ ID NO: 7879 - RNA, 38 nt, Artificial Sequence
  Description of Artificial Sequence:  Enzymatic Nucleic Acid
cugacuaccugaugaggccguuaggccgaaaauucccu

SEQ ID NO: 7880 - RNA, 38 nt, Artificial Sequence
  Description of Artificial Sequence:  Enzymatic Nucleic Acid
uagcugaccugaugaggccguuaggccgaaacuaauuc

SEQ ID NO: 7881 - RNA, 38 nt, Artificial Sequence
  Description of Artificial Sequence:  Enzymatic Nucleic Acid
acauagcucugaugaggccguuaggccgaaacuacuaa

SEQ ID NO: 7882 - RNA, 38 nt, Artificial Sequence
  Description of Artificial Sequence:  Enzymatic Nucleic Acid
cguugacacugaugaggccguuaggccgaaagcugacu

SEQ ID NO: 7883 - RNA, 38 nt, Artificial Sequence
  Description of Artificial Sequence:  Enzymatic Nucleic Acid
uuaacguucugaugaggccguuaggccgaaacauagcu

SEQ ID NO: 7884 - RNA, 38 nt, Artificial Sequence
  Description of Artificial Sequence:  Enzymatic Nucleic Acid
cccauauucugaugaggccguuaggccgaaacguugac

SEQ ID NO: 7885 - RNA, 38 nt, Artificial Sequence
  Description of Artificial Sequence:  Enzymatic Nucleic Acid
gcccauaucugaugaggccguuaggccgaaaacguuga

SEQ ID NO: 7886 - RNA, 38 nt, Artificial Sequence
  Description of Artificial Sequence:  Enzymatic Nucleic Acid
uaggcccacugaugaggccguuaggccgaaauuaacgu

SEQ ID NO: 7887 - RNA, 38 nt, Artificial Sequence
  Description of Artificial Sequence:  Enzymatic Nucleic Acid
cugauuuucugaugaggccguuaggccgaaaggcccau

SEQ ID NO: 7888 - RNA, 38 nt, Artificial Sequence
  Description of Artificial Sequence:  Enzymatic Nucleic Acid
aguugucucugaugaggccguuaggccgaaauuuuuag

SEQ ID NO: 7889 - RNA, 38 nt, Artificial Sequence
  Description of Artificial Sequence:  Enzymatic Nucleic Acid
aaccacaacugaugaggccguuaggccgaaaguugucu

SEQ ID NO: 7890 - RNA, 38 nt, Artificial Sequence
  Description of Artificial Sequence:  Enzymatic Nucleic Acid
gaaaccaccugaugaggccguuaggccgaaauaguugu

SEQ ID NO: 7891 - RNA, 38 nt, Artificial Sequence
  Description of Artificial Sequence:  Enzymatic Nucleic Acid
aaaugugacugaugaggccguuaggccgaaaccacaau

SEQ ID NO: 7892 - RNA, 38 nt, Artificial Sequence
  Description of Artificial Sequence:  Enzymatic Nucleic Acid
gaaaugugcugaugaggccguuaggccgaaaaccacaa

SEQ ID NO: 7893 - RNA, 38 nt, Artificial Sequence
  Description of Artificial Sequence:  Enzymatic Nucleic Acid
ggaaaugucugaugaggccguuaggccgaaaaaccaca

SEQ ID NO: 7894 - RNA, 38 nt, Artificial Sequence
  Description of Artificial Sequence:  Enzymatic Nucleic Acid
agacaggacugaugaggccguuaggccgaaaugugaaa

SEQ ID NO: 7895 - RNA, 38 nt, Artificial Sequence
  Description of Artificial Sequence:  Enzymatic Nucleic Acid
aagacaggcugaugaggccguuaggccgaaaaugugaa

SEQ ID NO: 7896 - RNA, 38 nt, Artificial Sequence
  Description of Artificial Sequence:  Enzymatic Nucleic Acid
uaagacagcugaugaggccguuaggccgaaaaauguga

SEQ ID NO: 7897 - RNA, 38 nt, Artificial Sequence
  Description of Artificial Sequence:  Enzymatic Nucleic Acid
aaaaguaacugaugaggccguuaggccgaaacaggaaa

SEQ ID NO: 7898 - RNA, 38 nt, Artificial Sequence
  Description of Artificial Sequence:  Enzymatic Nucleic Acid
ccaaaagucugaugaggccguuaggccgaaagacagga

SEQ ID NO: 7899 - RNA, 38 nt, Artificial Sequence
  Description of Artificial Sequence:  Enzymatic Nucleic Acid
cccaaaagcugaugaggccguuaggccgaaaagacagg

SEQ ID NO: 7900 - RNA, 38 nt, Artificial Sequence
  Description of Artificial Sequence:  Enzymatic Nucleic Acid
ucgcccaacugaugaggccguuaggccgaaaguaagac

SEQ ID NO: 7901 - RNA, 38 nt, Artificial Sequence
  Description of Artificial Sequence:  Enzymatic Nucleic Acid
cucgcccacugaugaggccguuaggccgaaaaguaaga

SEQ ID NO: 7902 - RNA, 38 nt, Artificial Sequence
  Description of Artificial Sequence:  Enzymatic Nucleic Acid
ucucgccccugaugaggccguuaggccgaaaaaguaag

SEQ ID NO: 7903 - RNA, 38 nt, Artificial Sequence
  Description of Artificial Sequence:  Enzymatic Nucleic Acid
uauucaagcugaugaggccguuaggccgaaacaguuuc

SEQ ID NO: 7904 - RNA, 38 nt, Artificial Sequence
  Description of Artificial Sequence:  Enzymatic Nucleic Acid
auauucaacugaugaggccguuaggccgaaaacaguuu

SEQ ID NO: 7905 - RNA, 38 nt, Artificial Sequence
  Description of Artificial Sequence:  Enzymatic Nucleic Acid
aaauauuccugaugaggccguuaggccgaaagaacagu

SEQ ID NO: 7906 - RNA, 38 nt, Artificial Sequence
  Description of Artificial Sequence:  Enzymatic Nucleic Acid
acaccaaacugaugaggccguuaggccgaaauucaaga

SEQ ID NO: 7907 - RNA, 38 nt, Artificial Sequence
  Description of Artificial Sequence:  Enzymatic Nucleic Acid
agacaccacugaugaggccguuaggccgaaauauucaa

SEQ ID NO: 7908 - RNA, 38 nt, Artificial Sequence
  Description of Artificial Sequence:  Enzymatic Nucleic Acid
aagacacccugaugaggccguuaggccgaaaauauuca

SEQ ID NO: 7909 - RNA, 38 nt, Artificial Sequence
  Description of Artificial Sequence:  Enzymatic Nucleic Acid
cuccaaaacugaugaggccguuaggccgaaacaccaaa

SEQ ID NO: 7910 - RNA, 38 nt, Artificial Sequence
  Description of Artificial Sequence:  Enzymatic Nucleic Acid
cacuccaacugaugaggccguuaggccgaaagacacca

SEQ ID NO: 7911 - RNA, 38 nt, Artificial Sequence
  Description of Artificial Sequence:  Enzymatic Nucleic Acid
acacuccacugaugaggccguuaggccgaaaagacacc

SEQ ID NO: 7912 - RNA, 38 nt, Artificial Sequence
  Description of Artificial Sequence:  Enzymatic Nucleic Acid
cacacucccugaugaggccguuaggccgaaaaagacac

SEQ ID NO: 7913 - RNA, 38 nt, Artificial Sequence
  Description of Artificial Sequence:  Enzymatic Nucleic Acid
ggagugcgcugaugaggccguuaggccgaaauccacac

SEQ ID NO: 7914 - RNA, 38 nt, Artificial Sequence
  Description of Artificial Sequence:  Enzymatic Nucleic Acid
aggagugccugaugaggccguuaggccgaaaauccaca

SEQ ID NO: 7915 - RNA, 38 nt, Artificial Sequence
  Description of Artificial Sequence:  Enzymatic Nucleic Acid
ugcaggagcugaugaggccguuaggccgaaagugcgaa

SEQ ID NO: 7916 - RNA, 38 nt, Artificial Sequence
  Description of Artificial Sequence:  Enzymatic Nucleic Acid
auaugcagcugaugaggccguuaggccgaaaggagugc

SEQ ID NO: 7917 - RNA, 38 nt, Artificial Sequence
  Description of Artificial Sequence:  Enzymatic Nucleic Acid
guggucuacugaugaggccguuaggccgaaaugcagga

SEQ ID NO: 7918 - RNA, 38 nt, Artificial Sequence
  Description of Artificial Sequence:  Enzymatic Nucleic Acid
uggugguccugaugaggccguuaggccgaaauaugcag

SEQ ID NO: 7919 - RNA, 38 nt, Artificial Sequence
  Description of Artificial Sequence:  Enzymatic Nucleic Acid
ugauaagacugaugaggccguuaggccgaaaggggcau

SEQ ID NO: 7920 - RNA, 38 nt, Artificial Sequence
  Description of Artificial Sequence:  Enzymatic Nucleic Acid
guugauaacugaugaggccguuaggccgaaauaggggc

SEQ ID NO: 7921 - RNA, 38 nt, Artificial Sequence
  Description of Artificial Sequence:  Enzymatic Nucleic Acid
guguugaucugaugaggccguuaggccgaaagauaggg

SEQ ID NO: 7922 - RNA, 38 nt, Artificial Sequence
  Description of Artificial Sequence:  Enzymatic Nucleic Acid
aguguugacugaugaggccguuaggccgaaaagauagg

SEQ ID NO: 7923 - RNA, 38 nt, Artificial Sequence
  Description of Artificial Sequence:  Enzymatic Nucleic Acid
gaaguguucugaugaggccguuaggccgaaauaagaua

SEQ ID NO: 7924 - RNA, 38 nt, Artificial Sequence
  Description of Artificial Sequence:  Enzymatic Nucleic Acid
guuuccggcugaugaggccguuaggccgaaaguguuga

SEQ ID NO: 7925 - RNA, 38 nt, Artificial Sequence
  Description of Artificial Sequence:  Enzymatic Nucleic Acid
aguuuccgcugaugaggccguuaggccgaaaaguguug

SEQ ID NO: 7926 - RNA, 38 nt, Artificial Sequence
  Description of Artificial Sequence:  Enzymatic Nucleic Acid
aacaacagcugaugaggccguuaggccgaaaguuuccg

SEQ ID NO: 7927 - RNA, 38 nt, Artificial Sequence
  Description of Artificial Sequence:  Enzymatic Nucleic Acid
cgucuaaccugaugaggccguuaggccgaaacaguagu

SEQ ID NO: 7928 - RNA, 38 nt, Artificial Sequence
  Description of Artificial Sequence:  Enzymatic Nucleic Acid
cuucgucucugaugaggccguuaggccgaaacaacagu

SEQ ID NO: 7929 - RNA, 38 nt, Artificial Sequence
  Description of Artificial Sequence:  Enzymatic Nucleic Acid
ucuucguccugaugaggccguuaggccgaaaacaacag

SEQ ID NO: 7930 - RNA, 38 nt, Artificial Sequence
  Description of Artificial Sequence:  Enzymatic Nucleic Acid
uucuagggcugaugaggccguuaggccgaaaccugccu

SEQ ID NO: 7931 - RNA, 38 nt, Artificial Sequence
  Description of Artificial Sequence:  Enzymatic Nucleic Acid
ucuucuuccugaugaggccguuaggccgaaaggggacc

SEQ ID NO: 7932 - RNA, 38 nt, Artificial Sequence
  Description of Artificial Sequence:  Enzymatic Nucleic Acid
aggcgaggcugaugaggccguuaggccgaaaguucuuc

SEQ ID NO: 7933 - RNA, 38 nt, Artificial Sequence
  Description of Artificial Sequence:  Enzymatic Nucleic Acid
ugcgaggccugaugaggccguuaggccgaaagggaguu

SEQ ID NO: 7934 - RNA, 38 nt, Artificial Sequence
  Description of Artificial Sequence:  Enzymatic Nucleic Acid
ucgucugccugaugaggccguuaggccgaaaggcgagg

SEQ ID NO: 7935 - RNA, 38 nt, Artificial Sequence
  Description of Artificial Sequence:  Enzymatic Nucleic Acid
gcgauugacugaugaggccguuaggccgaaaccuucgu

SEQ ID NO: 7936 - RNA, 38 nt, Artificial Sequence
  Description of Artificial Sequence:  Enzymatic Nucleic Acid
cggcgauucugaugaggccguuaggccgaaagaccuuc

SEQ ID NO: 7937 - RNA, 38 nt, Artificial Sequence
  Description of Artificial Sequence:  Enzymatic Nucleic Acid
gacgcggccugaugaggccguuaggccgaaauugagac

SEQ ID NO: 7938 - RNA, 38 nt, Artificial Sequence
  Description of Artificial Sequence:  Enzymatic Nucleic Acid
ucuucugccugaugaggccguuaggccgaaacgcggcg

SEQ ID NO: 7939 - RNA, 38 nt, Artificial Sequence
  Description of Artificial Sequence:  Enzymatic Nucleic Acid
gagauugacugaugaggccguuaggccgaaaucuucug

SEQ ID NO: 7940 - RNA, 38 nt, Artificial Sequence
  Description of Artificial Sequence:  Enzymatic Nucleic Acid
ccgagauucugaugaggccguuaggccgaaagaucuuc

SEQ ID NO: 7941 - RNA, 38 nt, Artificial Sequence
  Description of Artificial Sequence:  Enzymatic Nucleic Acid
auucccgacugaugaggccguuaggccgaaauugagau

SEQ ID NO: 7942 - RNA, 38 nt, Artificial Sequence
  Description of Artificial Sequence:  Enzymatic Nucleic Acid
agauuccccugaugaggccguuaggccgaaagauugag

SEQ ID NO: 7943 - RNA, 38 nt, Artificial Sequence
  Description of Artificial Sequence:  Enzymatic Nucleic Acid
aacauugacugaugaggccguuaggccgaaauucccga

SEQ ID NO: 7944 - RNA, 38 nt, Artificial Sequence
  Description of Artificial Sequence:  Enzymatic Nucleic Acid
cuaacauucugaugaggccguuaggccgaaagauuccc

SEQ ID NO: 7945 - RNA, 38 nt, Artificial Sequence
  Description of Artificial Sequence:  Enzymatic Nucleic Acid
ggaauacucugaugaggccguuaggccgaaacauugag

SEQ ID NO: 7946 - RNA, 38 nt, Artificial Sequence
  Description of Artificial Sequence:  Enzymatic Nucleic Acid
aggaauaccugaugaggccguuaggccgaaaacauuga

SEQ ID NO: 7947 - RNA, 38 nt, Artificial Sequence
  Description of Artificial Sequence:  Enzymatic Nucleic Acid
ccaaggaacugaugaggccguuaggccgaaacuaacau

SEQ ID NO: 7948 - RNA, 38 nt, Artificial Sequence
  Description of Artificial Sequence:  Enzymatic Nucleic Acid
guccaaggcugaugaggccguuaggccgaaauacuaac

SEQ ID NO: 7949 - RNA, 38 nt, Artificial Sequence
  Description of Artificial Sequence:  Enzymatic Nucleic Acid
uguccaagcugaugaggccguuaggccgaaaauacuaa

SEQ ID NO: 7950 - RNA, 38 nt, Artificial Sequence
  Description of Artificial Sequence:  Enzymatic Nucleic Acid
augugucccugaugaggccguuaggccgaaaggaauac

SEQ ID NO: 7951 - RNA, 38 nt, Artificial Sequence
  Description of Artificial Sequence:  Enzymatic Nucleic Acid
ucccaccucugaugaggccguuaggccgaaaugugucc

SEQ ID NO: 7952 - RNA, 38 nt, Artificial Sequence
  Description of Artificial Sequence:  Enzymatic Nucleic Acid
gccccguacugaugaggccguuaggccgaaaguuuccc

SEQ ID NO: 7953 - RNA, 38 nt, Artificial Sequence
  Description of Artificial Sequence:  Enzymatic Nucleic Acid
agccccgucugaugaggccguuaggccgaaaaguuucc

SEQ ID NO: 7954 - RNA, 38 nt, Artificial Sequence
  Description of Artificial Sequence:  Enzymatic Nucleic Acid
aagccccgcugaugaggccguuaggccgaaaaaguuuc

SEQ ID NO: 7955 - RNA, 38 nt, Artificial Sequence
  Description of Artificial Sequence:  Enzymatic Nucleic Acid
gaagaauacugaugaggccguuaggccgaaagccccgu

SEQ ID NO: 7956 - RNA, 38 nt, Artificial Sequence
  Description of Artificial Sequence:  Enzymatic Nucleic Acid
agaagaaucugaugaggccguuaggccgaaaagccccg

SEQ ID NO: 7957 - RNA, 38 nt, Artificial Sequence
  Description of Artificial Sequence:  Enzymatic Nucleic Acid
uagaagaacugaugaggccguuaggccgaaaaagcccc

SEQ ID NO: 7958 - RNA, 38 nt, Artificial Sequence
  Description of Artificial Sequence:  Enzymatic Nucleic Acid
cguagaagcugaugaggccguuaggccgaaauaaagcc

SEQ ID NO: 7959 - RNA, 38 nt, Artificial Sequence
  Description of Artificial Sequence:  Enzymatic Nucleic Acid
ccguagaacugaugaggccguuaggccgaaaauaaagc

SEQ ID NO: 7960 - RNA, 38 nt, Artificial Sequence
  Description of Artificial Sequence:  Enzymatic Nucleic Acid
uaccguagcugaugaggccguuaggccgaaagaauaaa

SEQ ID NO: 7961 - RNA, 38 nt, Artificial Sequence
  Description of Artificial Sequence:  Enzymatic Nucleic Acid
guaccguacugaugaggccguuaggccgaaaagaauaa

SEQ ID NO: 7962 - RNA, 38 nt, Artificial Sequence
  Description of Artificial Sequence:  Enzymatic Nucleic Acid
agguaccgcugaugaggccguuaggccgaaagaagaau

SEQ ID NO: 7963 - RNA, 38 nt, Artificial Sequence
  Description of Artificial Sequence:  Enzymatic Nucleic Acid
aagcaaggcugaugaggccguuaggccgaaaccguaga

SEQ ID NO: 7964 - RNA, 38 nt, Artificial Sequence
  Description of Artificial Sequence:  Enzymatic Nucleic Acid
auuaaagccugaugaggccguuaggccgaaagguaccg

SEQ ID NO: 7965 - RNA, 38 nt, Artificial Sequence
  Description of Artificial Sequence:  Enzymatic Nucleic Acid
uaggauuacugaugaggccguuaggccgaaagcaaggu

SEQ ID NO: 7966 - RNA, 38 nt, Artificial Sequence
  Description of Artificial Sequence:  Enzymatic Nucleic Acid
uuaggauucugaugaggccguuaggccgaaaagcaagg

SEQ ID NO: 7967 - RNA, 38 nt, Artificial Sequence
  Description of Artificial Sequence:  Enzymatic Nucleic Acid
uuuaggaucugaugaggccguuaggccgaaaaagcaag

SEQ ID NO: 7968 - RNA, 38 nt, Artificial Sequence
  Description of Artificial Sequence:  Enzymatic Nucleic Acid
ccauuuagcugaugaggccguuaggccgaaauuaaagc

SEQ ID NO: 7969 - RNA, 38 nt, Artificial Sequence
  Description of Artificial Sequence:  Enzymatic Nucleic Acid
uugccauucugaugaggccguuaggccgaaaggauuaa

SEQ ID NO: 7970 - RNA, 38 nt, Artificial Sequence
  Description of Artificial Sequence:  Enzymatic Nucleic Acid
aaaagaagcugaugaggccguuaggccgaaaguuugcc

SEQ ID NO: 7971 - RNA, 38 nt, Artificial Sequence
  Description of Artificial Sequence:  Enzymatic Nucleic Acid
aggaaaagcugaugaggccguuaggccgaaaggaguuu

SEQ ID NO: 7972 - RNA, 38 nt, Artificial Sequence
  Description of Artificial Sequence:  Enzymatic Nucleic Acid
caggaaaacugaugaggccguuaggccgaaaaggaguu

SEQ ID NO: 7973 - RNA, 38 nt, Artificial Sequence
  Description of Artificial Sequence:  Enzymatic Nucleic Acid
gucaggaacugaugaggccguuaggccgaaagaaggag

SEQ ID NO: 7974 - RNA, 38 nt, Artificial Sequence
  Description of Artificial Sequence:  Enzymatic Nucleic Acid
ugucaggacugaugaggccguuaggccgaaaagaagga

SEQ ID NO: 7975 - RNA, 38 nt, Artificial Sequence
  Description of Artificial Sequence:  Enzymatic Nucleic Acid
augucaggcugaugaggccguuaggccgaaaaagaagg

SEQ ID NO: 7976 - RNA, 38 nt, Artificial Sequence
  Description of Artificial Sequence:  Enzymatic Nucleic Acid
aaugucagcugaugaggccguuaggccgaaaaaagaag

SEQ ID NO: 7977 - RNA, 38 nt, Artificial Sequence
  Description of Artificial Sequence:  Enzymatic Nucleic Acid
ugcaaaugcugaugaggccguuaggccgaaaugucagg

SEQ ID NO: 7978 - RNA, 38 nt, Artificial Sequence
  Description of Artificial Sequence:  Enzymatic Nucleic Acid
cugcaaaucugaugaggccguuaggccgaaaaugucag

SEQ ID NO: 7979 - RNA, 38 nt, Artificial Sequence
  Description of Artificial Sequence:  Enzymatic Nucleic Acid
cuccugcacugaugaggccguuaggccgaaaugaaugu

SEQ ID NO: 7980 - RNA, 38 nt, Artificial Sequence
  Description of Artificial Sequence:  Enzymatic Nucleic Acid
ccuccugccugaugaggccguuaggccgaaaaugaaug

SEQ ID NO: 7981 - RNA, 38 nt, Artificial Sequence
  Description of Artificial Sequence:  Enzymatic Nucleic Acid
cuaucaaccugaugaggccguuaggccgaaauguccuc

SEQ ID NO: 7982 - RNA, 38 nt, Artificial Sequence
  Description of Artificial Sequence:  Enzymatic Nucleic Acid
caucuauccugaugaggccguuaggccgaaacaauguc

SEQ ID NO: 7983 - RNA, 38 nt, Artificial Sequence
  Description of Artificial Sequence:  Enzymatic Nucleic Acid
cuuacauccugaugaggccguuaggccgaaaucaacaa

SEQ ID NO: 7984 - RNA, 38 nt, Artificial Sequence
  Description of Artificial Sequence:  Enzymatic Nucleic Acid
aaauugcucugaugaggccguuaggccgaaacaucuau

SEQ ID NO: 7985 - RNA, 38 nt, Artificial Sequence
  Description of Artificial Sequence:  Enzymatic Nucleic Acid
gccccacacugaugaggccguuaggccgaaauugcuua

SEQ ID NO: 7986 - RNA, 38 nt, Artificial Sequence
  Description of Artificial Sequence:  Enzymatic Nucleic Acid
ggccccaccugaugaggccguuaggccgaaaauugcuu

SEQ ID NO: 7987 - RNA, 38 nt, Artificial Sequence
  Description of Artificial Sequence:  Enzymatic Nucleic Acid
uuuacugucugaugaggccguuaggccgaaaggggccc

SEQ ID NO: 7988 - RNA, 38 nt, Artificial Sequence
  Description of Artificial Sequence:  Enzymatic Nucleic Acid
auuuacugcugaugaggccguuaggccgaaaaggggcc

SEQ ID NO: 7989 - RNA, 38 nt, Artificial Sequence
  Description of Artificial Sequence:  Enzymatic Nucleic Acid
uuuucauucugaugaggccguuaggccgaaacuguaag

SEQ ID NO: 7990 - RNA, 38 nt, Artificial Sequence
  Description of Artificial Sequence:  Enzymatic Nucleic Acid
guuaauuucugaugaggccguuaggccgaaagucuccu

SEQ ID NO: 7991 - RNA, 38 nt, Artificial Sequence
  Description of Artificial Sequence:  Enzymatic Nucleic Acid
aguuaauucugaugaggccguuaggccgaaaagucucc

SEQ ID NO: 7992 - RNA, 38 nt, Artificial Sequence
  Description of Artificial Sequence:  Enzymatic Nucleic Acid
gcauaguucugaugaggccguuaggccgaaauuuaagu

SEQ ID NO: 7993 - RNA, 38 nt, Artificial Sequence
  Description of Artificial Sequence:  Enzymatic Nucleic Acid
ggcauagucugaugaggccguuaggccgaaaauuuaag

SEQ ID NO: 7994 - RNA, 38 nt, Artificial Sequence
  Description of Artificial Sequence:  Enzymatic Nucleic Acid
agcaggcacugaugaggccguuaggccgaaaguuaauu

SEQ ID NO: 7995 - RNA, 38 nt, Artificial Sequence
  Description of Artificial Sequence:  Enzymatic Nucleic Acid
auaaaacccugaugaggccguuaggccgaaagcaggca

SEQ ID NO: 7996 - RNA, 38 nt, Artificial Sequence
  Description of Artificial Sequence:  Enzymatic Nucleic Acid
ugggauaacugaugaggccguuaggccgaaaccuagca

SEQ ID NO: 7997 - RNA, 38 nt, Artificial Sequence
  Description of Artificial Sequence:  Enzymatic Nucleic Acid
uugggauacugaugaggccguuaggccgaaaaccuagc

SEQ ID NO: 7998 - RNA, 38 nt, Artificial Sequence
  Description of Artificial Sequence:  Enzymatic Nucleic Acid
auugggaucugaugaggccguuaggccgaaaaaccuag

SEQ ID NO: 7999 - RNA, 38 nt, Artificial Sequence
  Description of Artificial Sequence:  Enzymatic Nucleic Acid
cauugggacugaugaggccguuaggccgaaaaaaccua

SEQ ID NO: 8000 - RNA, 38 nt, Artificial Sequence
  Description of Artificial Sequence:  Enzymatic Nucleic Acid
aacauuggcugaugaggccguuaggccgaaauaaaacc

SEQ ID NO: 8001 - RNA, 38 nt, Artificial Sequence
  Description of Artificial Sequence:  Enzymatic Nucleic Acid
uauuuagucugaugaggccguuaggccgaaacauuggg

SEQ ID NO: 8002 - RNA, 38 nt, Artificial Sequence
  Description of Artificial Sequence:  Enzymatic Nucleic Acid
auauuuagcugaugaggccguuaggccgaaaacauugg

SEQ ID NO: 8003 - RNA, 38 nt, Artificial Sequence
  Description of Artificial Sequence:  Enzymatic Nucleic Acid
caaauauucugaugaggccguuaggccgaaaguaacau

SEQ ID NO: 8004 - RNA, 38 nt, Artificial Sequence
  Description of Artificial Sequence:  Enzymatic Nucleic Acid
agggcaaacugaugaggccguuaggccgaaauuuagua

SEQ ID NO: 8005 - RNA, 38 nt, Artificial Sequence
  Description of Artificial Sequence:  Enzymatic Nucleic Acid
uaagggcacugaugaggccguuaggccgaaauauuuag

SEQ ID NO: 8006 - RNA, 38 nt, Artificial Sequence
  Description of Artificial Sequence:  Enzymatic Nucleic Acid
cuaagggccugaugaggccguuaggccgaaaauauuua

SEQ ID NO: 8007 - RNA, 38 nt, Artificial Sequence
  Description of Artificial Sequence:  Enzymatic Nucleic Acid
cuuuaucucugaugaggccguuaggccgaaagggcaaa

SEQ ID NO: 8008 - RNA, 38 nt, Artificial Sequence
  Description of Artificial Sequence:  Enzymatic Nucleic Acid
ccuuuauccugaugaggccguuaggccgaaaagggcaa

SEQ ID NO: 8009 - RNA, 38 nt, Artificial Sequence
  Description of Artificial Sequence:  Enzymatic Nucleic Acid
gaucccuucugaugaggccguuaggccgaaaucuaagg

SEQ ID NO: 8010 - RNA, 38 nt, Artificial Sequence
  Description of Artificial Sequence:  Enzymatic Nucleic Acid
uacgguuucugaugaggccguuaggccgaaaucccuuu

SEQ ID NO: 8011 - RNA, 38 nt, Artificial Sequence
  Description of Artificial Sequence:  Enzymatic Nucleic Acid
cuggauaacugaugaggccguuaggccgaaacgguuug

SEQ ID NO: 8012 - RNA, 38 nt, Artificial Sequence
  Description of Artificial Sequence:  Enzymatic Nucleic Acid
cucuggaucugaugaggccguuaggccgaaauacgguu

SEQ ID NO: 8013 - RNA, 38 nt, Artificial Sequence
  Description of Artificial Sequence:  Enzymatic Nucleic Acid
acucuggacugaugaggccguuaggccgaaaauacggu

SEQ ID NO: 8014 - RNA, 38 nt, Artificial Sequence
  Description of Artificial Sequence:  Enzymatic Nucleic Acid
auacucugcugaugaggccguuaggccgaaauaauacg

SEQ ID NO: 8015 - RNA, 38 nt, Artificial Sequence
  Description of Artificial Sequence:  Enzymatic Nucleic Acid
uaacuacacugaugaggccguuaggccgaaacucugga

SEQ ID NO: 8016 - RNA, 38 nt, Artificial Sequence
  Description of Artificial Sequence:  Enzymatic Nucleic Acid
ugauuaaccugaugaggccguuaggccgaaacauacuc

SEQ ID NO: 8017 - RNA, 38 nt, Artificial Sequence
  Description of Artificial Sequence:  Enzymatic Nucleic Acid
uaaugauucugaugaggccguuaggccgaaacuacaua

SEQ ID NO: 8018 - RNA, 38 nt, Artificial Sequence
  Description of Artificial Sequence:  Enzymatic Nucleic Acid
guaaugaucugaugaggccguuaggccgaaaacuacau

SEQ ID NO: 8019 - RNA, 38 nt, Artificial Sequence
  Description of Artificial Sequence:  Enzymatic Nucleic Acid
gaaguaaucugaugaggccguuaggccgaaauuaacua

SEQ ID NO: 8020 - RNA, 38 nt, Artificial Sequence
  Description of Artificial Sequence:  Enzymatic Nucleic Acid
cuggaagucugaugaggccguuaggccgaaaugauuaa

SEQ ID NO: 8021 - RNA, 38 nt, Artificial Sequence
  Description of Artificial Sequence:  Enzymatic Nucleic Acid
ucuggaagcugaugaggccguuaggccgaaaaugauua

SEQ ID NO: 8022 - RNA, 38 nt, Artificial Sequence
  Description of Artificial Sequence:  Enzymatic Nucleic Acid
gcgucuggcugaugaggccguuaggccgaaaguaauga

SEQ ID NO: 8023 - RNA, 38 nt, Artificial Sequence
  Description of Artificial Sequence:  Enzymatic Nucleic Acid
cgcgucugcugaugaggccguuaggccgaaaaguaaug

SEQ ID NO: 8024 - RNA, 38 nt, Artificial Sequence
  Description of Artificial Sequence:  Enzymatic Nucleic Acid
guguaaaucugaugaggccguuaggccgaaaugucgcg

SEQ ID NO: 8025 - RNA, 38 nt, Artificial Sequence
  Description of Artificial Sequence:  Enzymatic Nucleic Acid
uguguaaacugaugaggccguuaggccgaaaaugucgc

SEQ ID NO: 8026 - RNA, 38 nt, Artificial Sequence
  Description of Artificial Sequence:  Enzymatic Nucleic Acid
aguguguacugaugaggccguuaggccgaaauaauguc

SEQ ID NO: 8027 - RNA, 38 nt, Artificial Sequence
  Description of Artificial Sequence:  Enzymatic Nucleic Acid
gagugugucugaugaggccguuaggccgaaaauaaugu

SEQ ID NO: 8028 - RNA, 38 nt, Artificial Sequence
  Description of Artificial Sequence:  Enzymatic Nucleic Acid
agagugugcugaugaggccguuaggccgaaaaauaaug

SEQ ID NO: 8029 - RNA, 38 nt, Artificial Sequence
  Description of Artificial Sequence:  Enzymatic Nucleic Acid
cuuccaaacugaugaggccguuaggccgaaagugugua

SEQ ID NO: 8030 - RNA, 38 nt, Artificial Sequence
  Description of Artificial Sequence:  Enzymatic Nucleic Acid
gccuuccacugaugaggccguuaggccgaaagagugug

SEQ ID NO: 8031 - RNA, 38 nt, Artificial Sequence
  Description of Artificial Sequence:  Enzymatic Nucleic Acid
cgccuucccugaugaggccguuaggccgaaaagagugu

SEQ ID NO: 8032 - RNA, 38 nt, Artificial Sequence
  Description of Artificial Sequence:  Enzymatic Nucleic Acid
uuauauaacugaugaggccguuaggccgaaauccccgc

SEQ ID NO: 8033 - RNA, 38 nt, Artificial Sequence
  Description of Artificial Sequence:  Enzymatic Nucleic Acid
uuuuauaucugaugaggccguuaggccgaaagaucccc

SEQ ID NO: 8034 - RNA, 38 nt, Artificial Sequence
  Description of Artificial Sequence:  Enzymatic Nucleic Acid
cuuuuauacugaugaggccguuaggccgaaaagauccc

SEQ ID NO: 8035 - RNA, 38 nt, Artificial Sequence
  Description of Artificial Sequence:  Enzymatic Nucleic Acid
cucuuuuacugaugaggccguuaggccgaaauaagauc

SEQ ID NO: 8036 - RNA, 38 nt, Artificial Sequence
  Description of Artificial Sequence:  Enzymatic Nucleic Acid
cucucuuucugaugaggccguuaggccgaaauauaaga

SEQ ID NO: 8037 - RNA, 38 nt, Artificial Sequence
  Description of Artificial Sequence:  Enzymatic Nucleic Acid
uacgugugcugaugaggccguuaggccgaaacucucuu

SEQ ID NO: 8038 - RNA, 38 nt, Artificial Sequence
  Description of Artificial Sequence:  Enzymatic Nucleic Acid
ugaggcgccugaugaggccguuaggccgaaacgugugg

SEQ ID NO: 8039 - RNA, 38 nt, Artificial Sequence
  Description of Artificial Sequence:  Enzymatic Nucleic Acid
cgcaaaaucugaugaggccguuaggccgaaaggcgcua

SEQ ID NO: 8040 - RNA, 38 nt, Artificial Sequence
  Description of Artificial Sequence:  Enzymatic Nucleic Acid
acccgcaacugaugaggccguuaggccgaaaugaggcg

SEQ ID NO: 8041 - RNA, 38 nt, Artificial Sequence
  Description of Artificial Sequence:  Enzymatic Nucleic Acid
gacccgcacugaugaggccguuaggccgaaaaugaggc

SEQ ID NO: 8042 - RNA, 38 nt, Artificial Sequence
  Description of Artificial Sequence:  Enzymatic Nucleic Acid
ugacccgccugaugaggccguuaggccgaaaaaugagg

SEQ ID NO: 8043 - RNA, 38 nt, Artificial Sequence
  Description of Artificial Sequence:  Enzymatic Nucleic Acid
aauauggucugaugaggccguuaggccgaaacccgcaa

SEQ ID NO: 8044 - RNA, 38 nt, Artificial Sequence
  Description of Artificial Sequence:  Enzymatic Nucleic Acid
cccaagaacugaugaggccguuaggccgaaauggugac

SEQ ID NO: 8045 - RNA, 38 nt, Artificial Sequence
  Description of Artificial Sequence:  Enzymatic Nucleic Acid
uucccaagcugaugaggccguuaggccgaaauauggug

SEQ ID NO: 8046 - RNA, 38 nt, Artificial Sequence
  Description of Artificial Sequence:  Enzymatic Nucleic Acid
guucccaacugaugaggccguuaggccgaaaauauggu

SEQ ID NO: 8047 - RNA, 38 nt, Artificial Sequence
  Description of Artificial Sequence:  Enzymatic Nucleic Acid
uuguuccccugaugaggccguuaggccgaaagaauaug

SEQ ID NO: 8048 - RNA, 38 nt, Artificial Sequence
  Description of Artificial Sequence:  Enzymatic Nucleic Acid
augcuguacugaugaggccguuaggccgaaaucuuguu

SEQ ID NO: 8049 - RNA, 38 nt, Artificial Sequence
  Description of Artificial Sequence:  Enzymatic Nucleic Acid
ccaugcugcugaugaggccguuaggccgaaagaucuug

SEQ ID NO: 8050 - RNA, 38 nt, Artificial Sequence
  Description of Artificial Sequence:  Enzymatic Nucleic Acid
ggaagacccugaugaggccguuaggccgaaaccuccca

SEQ ID NO: 8051 - RNA, 38 nt, Artificial Sequence
  Description of Artificial Sequence:  Enzymatic Nucleic Acid
guuuggaacugaugaggccguuaggccgaaaccaaccu

SEQ ID NO: 8052 - RNA, 38 nt, Artificial Sequence
  Description of Artificial Sequence:  Enzymatic Nucleic Acid
agguuuggcugaugaggccguuaggccgaaagaccaac

SEQ ID NO: 8053 - RNA, 38 nt, Artificial Sequence
  Description of Artificial Sequence:  Enzymatic Nucleic Acid
gagguuugcugaugaggccguuaggccgaaaagaccaa

SEQ ID NO: 8054 - RNA, 38 nt, Artificial Sequence
  Description of Artificial Sequence:  Enzymatic Nucleic Acid
gccuuuuccugaugaggccguuaggccgaaagguuugg

SEQ ID NO: 8055 - RNA, 38 nt, Artificial Sequence
  Description of Artificial Sequence:  Enzymatic Nucleic Acid
gacagaaacugaugaggccguuaggccgaaauuugucc

SEQ ID NO: 8056 - RNA, 38 nt, Artificial Sequence
  Description of Artificial Sequence:  Enzymatic Nucleic Acid
gggacagacugaugaggccguuaggccgaaagauuugu

SEQ ID NO: 8057 - RNA, 38 nt, Artificial Sequence
  Description of Artificial Sequence:  Enzymatic Nucleic Acid
ggggacagcugaugaggccguuaggccgaaaagauuug

SEQ ID NO: 8058 - RNA, 38 nt, Artificial Sequence
  Description of Artificial Sequence:  Enzymatic Nucleic Acid
uggggacacugaugaggccguuaggccgaaaaagauuu

SEQ ID NO: 8059 - RNA, 38 nt, Artificial Sequence
  Description of Artificial Sequence:  Enzymatic Nucleic Acid
ggauugggcugaugaggccguuaggccgaaacagaaag

SEQ ID NO: 8060 - RNA, 38 nt, Artificial Sequence
  Description of Artificial Sequence:  Enzymatic Nucleic Acid
ucccagggcugaugaggccguuaggccgaaauugggga

SEQ ID NO: 8061 - RNA, 38 nt, Artificial Sequence
  Description of Artificial Sequence:  Enzymatic Nucleic Acid
cggggaagcugaugaggccguuaggccgaaaucccagg

SEQ ID NO: 8062 - RNA, 38 nt, Artificial Sequence
  Description of Artificial Sequence:  Enzymatic Nucleic Acid
ucggggaacugaugaggccguuaggccgaaaaucccag

SEQ ID NO: 8063 - RNA, 38 nt, Artificial Sequence
  Description of Artificial Sequence:  Enzymatic Nucleic Acid
gaucggggcugaugaggccguuaggccgaaagaauccc

SEQ ID NO: 8064 - RNA, 38 nt, Artificial Sequence
  Description of Artificial Sequence:  Enzymatic Nucleic Acid
ugaucgggcugaugaggccguuaggccgaaaagaaucc

SEQ ID NO: 8065 - RNA, 38 nt, Artificial Sequence
  Description of Artificial Sequence:  Enzymatic Nucleic Acid
caacugaucugaugaggccguuaggccgaaaucgggga

SEQ ID NO: 8066 - RNA, 38 nt, Artificial Sequence
  Description of Artificial Sequence:  Enzymatic Nucleic Acid
guccaacucugaugaggccguuaggccgaaaugaucgg

SEQ ID NO: 8067 - RNA, 38 nt, Artificial Sequence
  Description of Artificial Sequence:  Enzymatic Nucleic Acid
cagggucccugaugaggccguuaggccgaaacugauga

SEQ ID NO: 8068 - RNA, 38 nt, Artificial Sequence
  Description of Artificial Sequence:  Enzymatic Nucleic Acid
uggcuuugcugaugaggccguuaggccgaaaugcaggg

SEQ ID NO: 8069 - RNA, 38 nt, Artificial Sequence
  Description of Artificial Sequence:  Enzymatic Nucleic Acid
uuggcuuucugaugaggccguuaggccgaaaaugcagg

SEQ ID NO: 8070 - RNA, 38 nt, Artificial Sequence
  Description of Artificial Sequence:  Enzymatic Nucleic Acid
gauuuacucugaugaggccguuaggccgaaaguuggcu

SEQ ID NO: 8071 - RNA, 38 nt, Artificial Sequence
  Description of Artificial Sequence:  Enzymatic Nucleic Acid
ucuggauucugaugaggccguuaggccgaaacugaguu

SEQ ID NO: 8072 - RNA, 38 nt, Artificial Sequence
  Description of Artificial Sequence:  Enzymatic Nucleic Acid
ccaaucugcugaugaggccguuaggccgaaauuuacug

SEQ ID NO: 8073 - RNA, 38 nt, Artificial Sequence
  Description of Artificial Sequence:  Enzymatic Nucleic Acid
gagguccccugaugaggccguuaggccgaaaucuggau

SEQ ID NO: 8074 - RNA, 38 nt, Artificial Sequence
  Description of Artificial Sequence:  Enzymatic Nucleic Acid
ugcggguucugaugaggccguuaggccgaaagguccca

SEQ ID NO: 8075 - RNA, 38 nt, Artificial Sequence
  Description of Artificial Sequence:  Enzymatic Nucleic Acid
cuggcccgcugaugaggccguuaggccgaaaugcuccc

SEQ ID NO: 8076 - RNA, 38 nt, Artificial Sequence
  Description of Artificial Sequence:  Enzymatic Nucleic Acid
ccuggccccugaugaggccguuaggccgaaaaugcucc

SEQ ID NO: 8077 - RNA, 38 nt, Artificial Sequence
  Description of Artificial Sequence:  Enzymatic Nucleic Acid
gaggggugcugaugaggccguuaggccgaaacccuggc

SEQ ID NO: 8078 - RNA, 38 nt, Artificial Sequence
  Description of Artificial Sequence:  Enzymatic Nucleic Acid
ggaggggucugaugaggccguuaggccgaaaacccugg

SEQ ID NO: 8079 - RNA, 38 nt, Artificial Sequence
  Description of Artificial Sequence:  Enzymatic Nucleic Acid
cccaugggcugaugaggccguuaggccgaaagggguga

SEQ ID NO: 8080 - RNA, 38 nt, Artificial Sequence
  Description of Artificial Sequence:  Enzymatic Nucleic Acid
uccacccccugaugaggccguuaggccgaaacaguccc

SEQ ID NO: 8081 - RNA, 38 nt, Artificial Sequence
  Description of Artificial Sequence:  Enzymatic Nucleic Acid
cugagcgucugaugaggccguuaggccgaaagggcucc

SEQ ID NO: 8082 - RNA, 38 nt, Artificial Sequence
  Description of Artificial Sequence:  Enzymatic Nucleic Acid
uaggcccucugaugaggccguuaggccgaaagcgugag

SEQ ID NO: 8083 - RNA, 38 nt, Artificial Sequence
  Description of Artificial Sequence:  Enzymatic Nucleic Acid
guugugagcugaugaggccguuaggccgaaaggcccug

SEQ ID NO: 8084 - RNA, 38 nt, Artificial Sequence
  Description of Artificial Sequence:  Enzymatic Nucleic Acid
acaguugucugaugaggccguuaggccgaaaguaggcc

SEQ ID NO: 8085 - RNA, 38 nt, Artificial Sequence
  Description of Artificial Sequence:  Enzymatic Nucleic Acid
aggaggagcugaugaggccguuaggccgaaagcugcug

SEQ ID NO: 8086 - RNA, 38 nt, Artificial Sequence
  Description of Artificial Sequence:  Enzymatic Nucleic Acid
ggcaggagcugaugaggccguuaggccgaaaggagcug

SEQ ID NO: 8087 - RNA, 38 nt, Artificial Sequence
  Description of Artificial Sequence:  Enzymatic Nucleic Acid
ggaggcagcugaugaggccguuaggccgaaaggaggag

SEQ ID NO: 8088 - RNA, 38 nt, Artificial Sequence
  Description of Artificial Sequence:  Enzymatic Nucleic Acid
gauuggugcugaugaggccguuaggccgaaaggcagga

SEQ ID NO: 8089 - RNA, 38 nt, Artificial Sequence
  Description of Artificial Sequence:  Enzymatic Nucleic Acid
ugacugcccugaugaggccguuaggccgaaauuggugg

SEQ ID NO: 8090 - RNA, 38 nt, Artificial Sequence
  Description of Artificial Sequence:  Enzymatic Nucleic Acid
gccuuccucugaugaggccguuaggccgaaacugccga

SEQ ID NO: 8091 - RNA, 38 nt, Artificial Sequence
  Description of Artificial Sequence:  Enzymatic Nucleic Acid
uaagggagcugaugaggccguuaggccgaaaggcugcc

SEQ ID NO: 8092 - RNA, 38 nt, Artificial Sequence
  Description of Artificial Sequence:  Enzymatic Nucleic Acid
agauaaggcugaugaggccguuaggccgaaaguaggcu

SEQ ID NO: 8093 - RNA, 38 nt, Artificial Sequence
  Description of Artificial Sequence:  Enzymatic Nucleic Acid
guggagaucugaugaggccguuaggccgaaagggagua

SEQ ID NO: 8094 - RNA, 38 nt, Artificial Sequence
  Description of Artificial Sequence:  Enzymatic Nucleic Acid
gguggagacugaugaggccguuaggccgaaaagggagu

SEQ ID NO: 8095 - RNA, 38 nt, Artificial Sequence
  Description of Artificial Sequence:  Enzymatic Nucleic Acid
gagguggacugaugaggccguuaggccgaaauaaggga

SEQ ID NO: 8096 - RNA, 38 nt, Artificial Sequence
  Description of Artificial Sequence:  Enzymatic Nucleic Acid
uagaggugcugaugaggccguuaggccgaaagauaagg

SEQ ID NO: 8097 - RNA, 38 nt, Artificial Sequence
  Description of Artificial Sequence:  Enzymatic Nucleic Acid
gucccuuacugaugaggccguuaggccgaaagguggag

SEQ ID NO: 8098 - RNA, 38 nt, Artificial Sequence
  Description of Artificial Sequence:  Enzymatic Nucleic Acid
gugucccucugaugaggccguuaggccgaaagaggugg

SEQ ID NO: 8099 - RNA, 38 nt, Artificial Sequence
  Description of Artificial Sequence:  Enzymatic Nucleic Acid
cugaggaucugaugaggccguuaggccgaaaguguccc

SEQ ID NO: 8100 - RNA, 38 nt, Artificial Sequence
  Description of Artificial Sequence:  Enzymatic Nucleic Acid
ggccugagcugaugaggccguuaggccgaaaugagugu

SEQ ID NO: 8101 - RNA, 38 nt, Artificial Sequence
  Description of Artificial Sequence:  Enzymatic Nucleic Acid
cauggccucugaugaggccguuaggccgaaaggaugag

SEQ ID NO: 8102 - RNA, 38 nt, Artificial Sequence
  Description of Artificial Sequence:  Enzymatic Nucleic Acid
  misc_feature (31)..(31): n stands for inosine
uggaaagucugaugaggccguuaggccgaanuggaguu

SEQ ID NO: 8103 - RNA, 38 nt, Artificial Sequence
  Description of Artificial Sequence:  Enzymatic Nucleic Acid
  misc_feature (31)..(31): n stands for inosine
guggaaagcugaugaggccguuaggccgaanguggagu

SEQ ID NO: 8104 - RNA, 38 nt, Artificial Sequence
  Description of Artificial Sequence:  Enzymatic Nucleic Acid
  misc_feature (31)..(31): n stands for inosine
ugguggaacugaugaggccguuaggccgaanuggugga

SEQ ID NO: 8105 - RNA, 38 nt, Artificial Sequence
  Description of Artificial Sequence:  Enzymatic Nucleic Acid
  misc_feature (31)..(31): n stands for inosine
aguuuggucugaugaggccguuaggccgaanaaagugg

SEQ ID NO: 8106 - RNA, 38 nt, Artificial Sequence
  Description of Artificial Sequence:  Enzymatic Nucleic Acid
  misc_feature (31)..(31): n stands for inosine
gaguuuggcugaugaggccguuaggccgaangaaagug

SEQ ID NO: 8107 - RNA, 38 nt, Artificial Sequence
  Description of Artificial Sequence:  Enzymatic Nucleic Acid
  misc_feature (31)..(31): n stands for inosine
aagaguuucugaugaggccguuaggccgaanuggaaag

SEQ ID NO: 8108 - RNA, 38 nt, Artificial Sequence
  Description of Artificial Sequence:  Enzymatic Nucleic Acid
  misc_feature (31)..(31): n stands for inosine
gaagaguucugaugaggccguuaggccgaanguggaaa

SEQ ID NO: 8109 - RNA, 38 nt, Artificial Sequence
  Description of Artificial Sequence:  Enzymatic Nucleic Acid
  misc_feature (31)..(31): n stands for inosine
ucuugaagcugaugaggccguuaggccgaanuuuggug

SEQ ID NO: 8110 - RNA, 38 nt, Artificial Sequence
  Description of Artificial Sequence:  Enzymatic Nucleic Acid
  misc_feature (31)..(31): n stands for inosine
gaucuugacugaugaggccguuaggccgaanaguuugg

SEQ ID NO: 8111 - RNA, 38 nt, Artificial Sequence
  Description of Artificial Sequence:  Enzymatic Nucleic Acid
  misc_feature (31)..(31): n stands for inosine
ugggaucucugaugaggccguuaggccgaanaagaguu

SEQ ID NO: 8112 - RNA, 38 nt, Artificial Sequence
  Description of Artificial Sequence:  Enzymatic Nucleic Acid
  misc_feature (31)..(31): n stands for inosine
ugacucugcugaugaggccguuaggccgaanaucuuga

SEQ ID NO: 8113 - RNA, 38 nt, Artificial Sequence
  Description of Artificial Sequence:  Enzymatic Nucleic Acid
  misc_feature (31)..(31): n stands for inosine
cugacucucugaugaggccguuaggccgaangaucuug

SEQ ID NO: 8114 - RNA, 38 nt, Artificial Sequence
  Description of Artificial Sequence:  Enzymatic Nucleic Acid
  misc_feature (31)..(31): n stands for inosine
ccugacuccugaugaggccguuaggccgaanggaucuu

SEQ ID NO: 8115 - RNA, 38 nt, Artificial Sequence
  Description of Artificial Sequence:  Enzymatic Nucleic Acid
  misc_feature (31)..(31): n stands for inosine
cagggccccugaugaggccguuaggccgaanacucugg

SEQ ID NO: 8116 - RNA, 38 nt, Artificial Sequence
  Description of Artificial Sequence:  Enzymatic Nucleic Acid
  misc_feature (31)..(31): n stands for inosine
aaguacagcugaugaggccguuaggccgaancccugac

SEQ ID NO: 8117 - RNA, 38 nt, Artificial Sequence
  Description of Artificial Sequence:  Enzymatic Nucleic Acid
  misc_feature (31)..(31): n stands for inosine
aaaguacacugaugaggccguuaggccgaangcccuga

SEQ ID NO: 8118 - RNA, 38 nt, Artificial Sequence
  Description of Artificial Sequence:  Enzymatic Nucleic Acid
  misc_feature (31)..(31): n stands for inosine
gaaaguaccugaugaggccguuaggccgaanggcccug

SEQ ID NO: 8119 - RNA, 38 nt, Artificial Sequence
  Description of Artificial Sequence:  Enzymatic Nucleic Acid
  misc_feature (31)..(31): n stands for inosine
agcaggaacugaugaggccguuaggccgaanuacaggg

SEQ ID NO: 8120 - RNA, 38 nt, Artificial Sequence
  Description of Artificial Sequence:  Enzymatic Nucleic Acid
  misc_feature (31)..(31): n stands for inosine
caccagcacugaugaggccguuaggccgaanaaaguac

SEQ ID NO: 8121 - RNA, 38 nt, Artificial Sequence
  Description of Artificial Sequence:  Enzymatic Nucleic Acid
  misc_feature (31)..(31): n stands for inosine
ccaccagccugaugaggccguuaggccgaangaaagua

SEQ ID NO: 8122 - RNA, 38 nt, Artificial Sequence
  Description of Artificial Sequence:  Enzymatic Nucleic Acid
  misc_feature (31)..(31): n stands for inosine
gagccacccugaugaggccguuaggccgaancaggaaa

SEQ ID NO: 8123 - RNA, 38 nt, Artificial Sequence
  Description of Artificial Sequence:  Enzymatic Nucleic Acid
  misc_feature (31)..(31): n stands for inosine
ugaacuggcugaugaggccguuaggccgaanccaccag

SEQ ID NO: 8124 - RNA, 38 nt, Artificial Sequence
  Description of Artificial Sequence:  Enzymatic Nucleic Acid
  misc_feature (31)..(31): n stands for inosine
ccugaacucugaugaggccguuaggccgaanagccacc

SEQ ID NO: 8125 - RNA, 38 nt, Artificial Sequence
  Description of Artificial Sequence:  Enzymatic Nucleic Acid
  misc_feature (31)..(31): n stands for inosine
uccugaaccugaugaggccguuaggccgaangagccac

SEQ ID NO: 8126 - RNA, 38 nt, Artificial Sequence
  Description of Artificial Sequence:  Enzymatic Nucleic Acid
  misc_feature (31)..(31): n stands for inosine
acuguucccugaugaggccguuaggccgaanaacugga

SEQ ID NO: 8127 - RNA, 38 nt, Artificial Sequence
  Description of Artificial Sequence:  Enzymatic Nucleic Acid
  misc_feature (31)..(31): n stands for inosine
gggcucaccugaugaggccguuaggccgaanuuccuga

SEQ ID NO: 8128 - RNA, 38 nt, Artificial Sequence
  Description of Artificial Sequence:  Enzymatic Nucleic Acid
  misc_feature (31)..(31): n stands for inosine
cugagcagcugaugaggccguuaggccgaancucacug

SEQ ID NO: 8129 - RNA, 38 nt, Artificial Sequence
  Description of Artificial Sequence:  Enzymatic Nucleic Acid
  misc_feature (31)..(31): n stands for inosine
ucugagcacugaugaggccguuaggccgaangcucacu

SEQ ID NO: 8130 - RNA, 38 nt, Artificial Sequence
  Description of Artificial Sequence:  Enzymatic Nucleic Acid
  misc_feature (31)..(31): n stands for inosine
uucugagccugaugaggccguuaggccgaanggcucac

SEQ ID NO: 8131 - RNA, 38 nt, Artificial Sequence
  Description of Artificial Sequence:  Enzymatic Nucleic Acid
  misc_feature (31)..(31): n stands for inosine
guauucugcugaugaggccguuaggccgaancagggcu

SEQ ID NO: 8132 - RNA, 38 nt, Artificial Sequence
  Description of Artificial Sequence:  Enzymatic Nucleic Acid
  misc_feature (31)..(31): n stands for inosine
caguauuccugaugaggccguuaggccgaanagcaggg

SEQ ID NO: 8133 - RNA, 38 nt, Artificial Sequence
  Description of Artificial Sequence:  Enzymatic Nucleic Acid
  misc_feature (31)..(31): n stands for inosine
gcagagaccugaugaggccguuaggccgaanuauucug

SEQ ID NO: 8134 - RNA, 38 nt, Artificial Sequence
  Description of Artificial Sequence:  Enzymatic Nucleic Acid
  misc_feature (31)..(31): n stands for inosine
uauggcagcugaugaggccguuaggccgaanacaguau

SEQ ID NO: 8135 - RNA, 38 nt, Artificial Sequence
  Description of Artificial Sequence:  Enzymatic Nucleic Acid
  misc_feature (31)..(31): n stands for inosine
gauauggccugaugaggccguuaggccgaanagacagu

SEQ ID NO: 8136 - RNA, 38 nt, Artificial Sequence
  Description of Artificial Sequence:  Enzymatic Nucleic Acid
  misc_feature (31)..(31): n stands for inosine
gacgauaucugaugaggccguuaggccgaancagagac

SEQ ID NO: 8137 - RNA, 38 nt, Artificial Sequence
  Description of Artificial Sequence:  Enzymatic Nucleic Acid
  misc_feature (31)..(31): n stands for inosine
ugacgauacugaugaggccguuaggccgaangcagaga

SEQ ID NO: 8138 - RNA, 38 nt, Artificial Sequence
  Description of Artificial Sequence:  Enzymatic Nucleic Acid
  misc_feature (31)..(31): n stands for inosine
gauaagaucugaugaggccguuaggccgaanacgauau

SEQ ID NO: 8139 - RNA, 38 nt, Artificial Sequence
  Description of Artificial Sequence:  Enzymatic Nucleic Acid
  misc_feature (31)..(31): n stands for inosine
cuucgauacugaugaggccguuaggccgaanauugacg

SEQ ID NO: 8140 - RNA, 38 nt, Artificial Sequence
  Description of Artificial Sequence:  Enzymatic Nucleic Acid
  misc_feature (31)..(31): n stands for inosine
gggucccccugaugaggccguuaggccgaanucuucga

SEQ ID NO: 8141 - RNA, 38 nt, Artificial Sequence
  Description of Artificial Sequence:  Enzymatic Nucleic Acid
  misc_feature (31)..(31): n stands for inosine
cgguacagcugaugaggccguuaggccgaanuccccag

SEQ ID NO: 8142 - RNA, 38 nt, Artificial Sequence
  Description of Artificial Sequence:  Enzymatic Nucleic Acid
  misc_feature (31)..(31): n stands for inosine
ucgguacacugaugaggccguuaggccgaangucccca

SEQ ID NO: 8143 - RNA, 38 nt, Artificial Sequence
  Description of Artificial Sequence:  Enzymatic Nucleic Acid
  misc_feature (31)..(31): n stands for inosine
uucgguaccugaugaggccguuaggccgaanggucccc

SEQ ID NO: 8144 - RNA, 38 nt, Artificial Sequence
  Description of Artificial Sequence:  Enzymatic Nucleic Acid
  misc_feature (31)..(31): n stands for inosine
ccauguuccugaugaggccguuaggccgaanuacaggg

SEQ ID NO: 8145 - RNA, 38 nt, Artificial Sequence
  Description of Artificial Sequence:  Enzymatic Nucleic Acid
  misc_feature (31)..(31): n stands for inosine
guucuccacugaugaggccguuaggccgaanuucggua

SEQ ID NO: 8146 - RNA, 38 nt, Artificial Sequence
  Description of Artificial Sequence:  Enzymatic Nucleic Acid
  misc_feature (31)..(31): n stands for inosine
ugaugcgacugaugaggccguuaggccgaanuucucca

SEQ ID NO: 8147 - RNA, 38 nt, Artificial Sequence
  Description of Artificial Sequence:  Enzymatic Nucleic Acid
  misc_feature (31)..(31): n stands for inosine
aguccugacugaugaggccguuaggccgaancgauguu

SEQ ID NO: 8148 - RNA, 38 nt, Artificial Sequence
  Description of Artificial Sequence:  Enzymatic Nucleic Acid
  misc_feature (31)..(31): n stands for inosine
aggagucccugaugaggccguuaggccgaanaugcgau

SEQ ID NO: 8149 - RNA, 38 nt, Artificial Sequence
  Description of Artificial Sequence:  Enzymatic Nucleic Acid
  misc_feature (31)..(31): n stands for inosine
guccuaggcugaugaggccguuaggccgaanuccugau

SEQ ID NO: 8150 - RNA, 38 nt, Artificial Sequence
  Description of Artificial Sequence:  Enzymatic Nucleic Acid
  misc_feature (31)..(31): n stands for inosine
ggguccuacugaugaggccguuaggccgaanaguccug

SEQ ID NO: 8151 - RNA, 38 nt, Artificial Sequence
  Description of Artificial Sequence:  Enzymatic Nucleic Acid
  misc_feature (31)..(31): n stands for inosine
gggguccucugaugaggccguuaggccgaangaguccu

SEQ ID NO: 8152 - RNA, 38 nt, Artificial Sequence
  Description of Artificial Sequence:  Enzymatic Nucleic Acid
  misc_feature (31)..(31): n stands for inosine
cgagcaggcugaugaggccguuaggccgaanuccuagg

SEQ ID NO: 8153 - RNA, 38 nt, Artificial Sequence
  Description of Artificial Sequence:  Enzymatic Nucleic Acid
  misc_feature (31)..(31): n stands for inosine
acgagcagcugaugaggccguuaggccgaanguccuag

SEQ ID NO: 8154 - RNA, 38 nt, Artificial Sequence
  Description of Artificial Sequence:  Enzymatic Nucleic Acid
  misc_feature (31)..(31): n stands for inosine
cacgagcacugaugaggccguuaggccgaangguccua

SEQ ID NO: 8155 - RNA, 38 nt, Artificial Sequence
  Description of Artificial Sequence:  Enzymatic Nucleic Acid
  misc_feature (31)..(31): n stands for inosine
acacgagccugaugaggccguuaggccgaanggguccu

SEQ ID NO: 8156 - RNA, 38 nt, Artificial Sequence
  Description of Artificial Sequence:  Enzymatic Nucleic Acid
  misc_feature (31)..(31): n stands for inosine
guaacacgcugaugaggccguuaggccgaancaggggu

SEQ ID NO: 8157 - RNA, 38 nt, Artificial Sequence
  Description of Artificial Sequence:  Enzymatic Nucleic Acid
  misc_feature (31)..(31): n stands for inosine
accccgcccugaugaggccguuaggccgaanuaacacg

SEQ ID NO: 8158 - RNA, 38 nt, Artificial Sequence
  Description of Artificial Sequence:  Enzymatic Nucleic Acid
  misc_feature (31)..(31): n stands for inosine
ugucaacacugaugaggccguuaggccgaanaaaaacc

SEQ ID NO: 8159 - RNA, 38 nt, Artificial Sequence
  Description of Artificial Sequence:  Enzymatic Nucleic Acid
  misc_feature (31)..(31): n stands for inosine
aggauuuucugaugaggccguuaggccgaanucaacaa

SEQ ID NO: 8160 - RNA, 38 nt, Artificial Sequence
  Description of Artificial Sequence:  Enzymatic Nucleic Acid
  misc_feature (31)..(31): n stands for inosine
uauugugacugaugaggccguuaggccgaanauuuuug

SEQ ID NO: 8161 - RNA, 38 nt, Artificial Sequence
  Description of Artificial Sequence:  Enzymatic Nucleic Acid
  misc_feature (31)..(31): n stands for inosine
guauugugcugaugaggccguuaggccgaangauuuuu

SEQ ID NO: 8162 - RNA, 38 nt, Artificial Sequence
  Description of Artificial Sequence:  Enzymatic Nucleic Acid
  misc_feature (31)..(31): n stands for inosine
ugguauugcugaugaggccguuaggccgaanaggauuu

SEQ ID NO: 8163 - RNA, 38 nt, Artificial Sequence
  Description of Artificial Sequence:  Enzymatic Nucleic Acid
  misc_feature (31)..(31): n stands for inosine
ugugguaucugaugaggccguuaggccgaanugaggau

SEQ ID NO: 8164 - RNA, 38 nt, Artificial Sequence
  Description of Artificial Sequence:  Enzymatic Nucleic Acid
  misc_feature (31)..(31): n stands for inosine
gacucugucugaugaggccguuaggccgaanuauugug

SEQ ID NO: 8165 - RNA, 38 nt, Artificial Sequence
  Description of Artificial Sequence:  Enzymatic Nucleic Acid
  misc_feature (31)..(31): n stands for inosine
agacucugcugaugaggccguuaggccgaanguauugu

SEQ ID NO: 8166 - RNA, 38 nt, Artificial Sequence
  Description of Artificial Sequence:  Enzymatic Nucleic Acid
  misc_feature (31)..(31): n stands for inosine
cuagacuccugaugaggccguuaggccgaanugguauu

SEQ ID NO: 8167 - RNA, 38 nt, Artificial Sequence
  Description of Artificial Sequence:  Enzymatic Nucleic Acid
  misc_feature (31)..(31): n stands for inosine
acgagucucugaugaggccguuaggccgaanacucugu

SEQ ID NO: 8168 - RNA, 38 nt, Artificial Sequence
  Description of Artificial Sequence:  Enzymatic Nucleic Acid
  misc_feature (31)..(31): n stands for inosine
ccaccacgcugaugaggccguuaggccgaanucuagac

SEQ ID NO: 8169 - RNA, 38 nt, Artificial Sequence
  Description of Artificial Sequence:  Enzymatic Nucleic Acid
  misc_feature (31)..(31): n stands for inosine
uugagagacugaugaggccguuaggccgaanuccacca

SEQ ID NO: 8170 - RNA, 38 nt, Artificial Sequence
  Description of Artificial Sequence:  Enzymatic Nucleic Acid
  misc_feature (31)..(31): n stands for inosine
aaauugagcugaugaggccguuaggccgaanaagucca

SEQ ID NO: 8171 - RNA, 38 nt, Artificial Sequence
  Description of Artificial Sequence:  Enzymatic Nucleic Acid
  misc_feature (31)..(31): n stands for inosine
gaaaauugcugaugaggccguuaggccgaanagaaguc

SEQ ID NO: 8172 - RNA, 38 nt, Artificial Sequence
  Description of Artificial Sequence:  Enzymatic Nucleic Acid
  misc_feature (31)..(31): n stands for inosine
uagaaaaucugaugaggccguuaggccgaanagagaag

SEQ ID NO: 8173 - RNA, 38 nt, Artificial Sequence
  Description of Artificial Sequence:  Enzymatic Nucleic Acid
  misc_feature (31)..(31): n stands for inosine
uucccccucugaugaggccguuaggccgaanaaaauug

SEQ ID NO: 8174 - RNA, 38 nt, Artificial Sequence
  Description of Artificial Sequence:  Enzymatic Nucleic Acid
  misc_feature (31)..(31): n stands for inosine
cacacgggcugaugaggccguuaggccgaanuuccccc

SEQ ID NO: 8175 - RNA, 38 nt, Artificial Sequence
  Description of Artificial Sequence:  Enzymatic Nucleic Acid
  misc_feature (31)..(31): n stands for inosine
gacacacgcugaugaggccguuaggccgaanuguuccc

SEQ ID NO: 8176 - RNA, 38 nt, Artificial Sequence
  Description of Artificial Sequence:  Enzymatic Nucleic Acid
  misc_feature (31)..(31): n stands for inosine
agacacaccugaugaggccguuaggccgaanguguucc

SEQ ID NO: 8177 - RNA, 38 nt, Artificial Sequence
  Description of Artificial Sequence:  Enzymatic Nucleic Acid
  misc_feature (31)..(31): n stands for inosine
uuuggccacugaugaggccguuaggccgaanacacacg

SEQ ID NO: 8178 - RNA, 38 nt, Artificial Sequence
  Description of Artificial Sequence:  Enzymatic Nucleic Acid
  misc_feature (31)..(31): n stands for inosine
cgaauuuucugaugaggccguuaggccgaanccaagac

SEQ ID NO: 8179 - RNA, 38 nt, Artificial Sequence
  Description of Artificial Sequence:  Enzymatic Nucleic Acid
  misc_feature (31)..(31): n stands for inosine
gcgaauuucugaugaggccguuaggccgaangccaaga

SEQ ID NO: 8180 - RNA, 38 nt, Artificial Sequence
  Description of Artificial Sequence:  Enzymatic Nucleic Acid
  misc_feature (31)..(31): n stands for inosine
uuugggaccugaugaggccguuaggccgaancgaauuu

SEQ ID NO: 8181 - RNA, 38 nt, Artificial Sequence
  Description of Artificial Sequence:  Enzymatic Nucleic Acid
  misc_feature (31)..(31): n stands for inosine
gagauuugcugaugaggccguuaggccgaanacugcga

SEQ ID NO: 8182 - RNA, 38 nt, Artificial Sequence
  Description of Artificial Sequence:  Enzymatic Nucleic Acid
  misc_feature (31)..(31): n stands for inosine
ggagauuucugaugaggccguuaggccgaangacugcg

SEQ ID NO: 8183 - RNA, 38 nt, Artificial Sequence
  Description of Artificial Sequence:  Enzymatic Nucleic Acid
  misc_feature (31)..(31): n stands for inosine
uggagauucugaugaggccguuaggccgaanggacugc

SEQ ID NO: 8184 - RNA, 38 nt, Artificial Sequence
  Description of Artificial Sequence:  Enzymatic Nucleic Acid
  misc_feature (31)..(31): n stands for inosine
gugacuggcugaugaggccguuaggccgaanauuuggg

SEQ ID NO: 8185 - RNA, 38 nt, Artificial Sequence
  Description of Artificial Sequence:  Enzymatic Nucleic Acid
  misc_feature (31)..(31): n stands for inosine
gagugacucugaugaggccguuaggccgaanagauuug

SEQ ID NO: 8186 - RNA, 38 nt, Artificial Sequence
  Description of Artificial Sequence:  Enzymatic Nucleic Acid
  misc_feature (31)..(31): n stands for inosine
ugagugaccugaugaggccguuaggccgaangagauuu

SEQ ID NO: 8187 - RNA, 38 nt, Artificial Sequence
  Description of Artificial Sequence:  Enzymatic Nucleic Acid
  misc_feature (31)..(31): n stands for inosine
uuggugagcugaugaggccguuaggccgaanacuggag

SEQ ID NO: 8188 - RNA, 38 nt, Artificial Sequence
  Description of Artificial Sequence:  Enzymatic Nucleic Acid
  misc_feature (31)..(31): n stands for inosine
gguuggugcugaugaggccguuaggccgaanugacugg

SEQ ID NO: 8189 - RNA, 38 nt, Artificial Sequence
  Description of Artificial Sequence:  Enzymatic Nucleic Acid
  misc_feature (31)..(31): n stands for inosine
cagguuggcugaugaggccguuaggccgaanagugacu

SEQ ID NO: 8190 - RNA, 38 nt, Artificial Sequence
  Description of Artificial Sequence:  Enzymatic Nucleic Acid
  misc_feature (31)..(31): n stands for inosine
aacagguucugaugaggccguuaggccgaanugaguga

SEQ ID NO: 8191 - RNA, 38 nt, Artificial Sequence
  Description of Artificial Sequence:  Enzymatic Nucleic Acid
  misc_feature (31)..(31): n stands for inosine
caacaggucugaugaggccguuaggccgaangugagug

SEQ ID NO: 8192 - RNA, 38 nt, Artificial Sequence
  Description of Artificial Sequence:  Enzymatic Nucleic Acid
  misc_feature (31)..(31): n stands for inosine
ggacaacacugaugaggccguuaggccgaanuugguga

SEQ ID NO: 8193 - RNA, 38 nt, Artificial Sequence
  Description of Artificial Sequence:  Enzymatic Nucleic Acid
  misc_feature (31)..(31): n stands for inosine
aggacaaccugaugaggccguuaggccgaanguuggug

SEQ ID NO: 8194 - RNA, 38 nt, Artificial Sequence
  Description of Artificial Sequence:  Enzymatic Nucleic Acid
  misc_feature (31)..(31): n stands for inosine
aaauuggacugaugaggccguuaggccgaanacaacag

SEQ ID NO: 8195 - RNA, 38 nt, Artificial Sequence
  Description of Artificial Sequence:  Enzymatic Nucleic Acid
  misc_feature (31)..(31): n stands for inosine
caaauuggcugaugaggccguuaggccgaangacaaca

SEQ ID NO: 8196 - RNA, 38 nt, Artificial Sequence
  Description of Artificial Sequence:  Enzymatic Nucleic Acid
  misc_feature (31)..(31): n stands for inosine
gacaaauucugaugaggccguuaggccgaanaggacaa

SEQ ID NO: 8197 - RNA, 38 nt, Artificial Sequence
  Description of Artificial Sequence:  Enzymatic Nucleic Acid
  misc_feature (31)..(31): n stands for inosine
ggacaaaucugaugaggccguuaggccgaangaggaca

SEQ ID NO: 8198 - RNA, 38 nt, Artificial Sequence
  Description of Artificial Sequence:  Enzymatic Nucleic Acid
  misc_feature (31)..(31): n stands for inosine
gauaaccacugaugaggccguuaggccgaanacaaauu

SEQ ID NO: 8199 - RNA, 38 nt, Artificial Sequence
  Description of Artificial Sequence:  Enzymatic Nucleic Acid
  misc_feature (31)..(31): n stands for inosine
cgauaacccugaugaggccguuaggccgaangacaaau

SEQ ID NO: 8200 - RNA, 38 nt, Artificial Sequence
  Description of Artificial Sequence:  Enzymatic Nucleic Acid
  misc_feature (31)..(31): n stands for inosine
acacaucccugaugaggccguuaggccgaancgauaac

SEQ ID NO: 8201 - RNA, 38 nt, Artificial Sequence
  Description of Artificial Sequence:  Enzymatic Nucleic Acid
  misc_feature (31)..(31): n stands for inosine
aacgccgccugaugaggccguuaggccgaanacacauc

SEQ ID NO: 8202 - RNA, 38 nt, Artificial Sequence
  Description of Artificial Sequence:  Enzymatic Nucleic Acid
  misc_feature (31)..(31): n stands for inosine
gaggaagacugaugaggccguuaggccgaanauaaaac

SEQ ID NO: 8203 - RNA, 38 nt, Artificial Sequence
  Description of Artificial Sequence:  Enzymatic Nucleic Acid
  misc_feature (31)..(31): n stands for inosine
gcagaggacugaugaggccguuaggccgaanaugauaa

SEQ ID NO: 8204 - RNA, 38 nt, Artificial Sequence
  Description of Artificial Sequence:  Enzymatic Nucleic Acid
  misc_feature (31)..(31): n stands for inosine
gaugcagacugaugaggccguuaggccgaanaagauga

SEQ ID NO: 8205 - RNA, 38 nt, Artificial Sequence
  Description of Artificial Sequence:  Enzymatic Nucleic Acid
  misc_feature (31)..(31): n stands for inosine
ggaugcagcugaugaggccguuaggccgaangaagaug

SEQ ID NO: 8206 - RNA, 38 nt, Artificial Sequence
  Description of Artificial Sequence:  Enzymatic Nucleic Acid
  misc_feature (31)..(31): n stands for inosine
caggaugccugaugaggccguuaggccgaanaggaaga

SEQ ID NO: 8207 - RNA, 38 nt, Artificial Sequence
  Description of Artificial Sequence:  Enzymatic Nucleic Acid
  misc_feature (31)..(31): n stands for inosine
cagcaggacugaugaggccguuaggccgaancagagga

SEQ ID NO: 8208 - RNA, 38 nt, Artificial Sequence
  Description of Artificial Sequence:  Enzymatic Nucleic Acid
  misc_feature (31)..(31): n stands for inosine
uagcagcacugaugaggccguuaggccgaanaugcaga

SEQ ID NO: 8209 - RNA, 38 nt, Artificial Sequence
  Description of Artificial Sequence:  Enzymatic Nucleic Acid
  misc_feature (31)..(31): n stands for inosine
auagcagccugaugaggccguuaggccgaangaugcag

SEQ ID NO: 8210 - RNA, 38 nt, Artificial Sequence
  Description of Artificial Sequence:  Enzymatic Nucleic Acid
  misc_feature (31)..(31): n stands for inosine
ggcauagccugaugaggccguuaggccgaancaggaug

SEQ ID NO: 8211 - RNA, 38 nt, Artificial Sequence
  Description of Artificial Sequence:  Enzymatic Nucleic Acid
  misc_feature (31)..(31): n stands for inosine
ugaggcaucugaugaggccguuaggccgaancagcagg

SEQ ID NO: 8212 - RNA, 38 nt, Artificial Sequence
  Description of Artificial Sequence:  Enzymatic Nucleic Acid
  misc_feature (31)..(31): n stands for inosine
gaagaugacugaugaggccguuaggccgaancauagca

SEQ ID NO: 8213 - RNA, 38 nt, Artificial Sequence
  Description of Artificial Sequence:  Enzymatic Nucleic Acid
  misc_feature (31)..(31): n stands for inosine
agaagaugcugaugaggccguuaggccgaangcauagc

SEQ ID NO: 8214 - RNA, 38 nt, Artificial Sequence
  Description of Artificial Sequence:  Enzymatic Nucleic Acid
  misc_feature (31)..(31): n stands for inosine
caagaagacugaugaggccguuaggccgaanaggcaua

SEQ ID NO: 8215 - RNA, 38 nt, Artificial Sequence
  Description of Artificial Sequence:  Enzymatic Nucleic Acid
  misc_feature (31)..(31): n stands for inosine
caacaagacugaugaggccguuaggccgaanaugaggc

SEQ ID NO: 8216 - RNA, 38 nt, Artificial Sequence
  Description of Artificial Sequence:  Enzymatic Nucleic Acid
  misc_feature (31)..(31): n stands for inosine
aaccaacacugaugaggccguuaggccgaanaagauga

SEQ ID NO: 8217 - RNA, 38 nt, Artificial Sequence
  Description of Artificial Sequence:  Enzymatic Nucleic Acid
  misc_feature (31)..(31): n stands for inosine
aguccagacugaugaggccguuaggccgaanaaccaac

SEQ ID NO: 8218 - RNA, 38 nt, Artificial Sequence
  Description of Artificial Sequence:  Enzymatic Nucleic Acid
  misc_feature (31)..(31): n stands for inosine
gauagucccugaugaggccguuaggccgaanaagaacc

SEQ ID NO: 8219 - RNA, 38 nt, Artificial Sequence
  Description of Artificial Sequence:  Enzymatic Nucleic Acid
  misc_feature (31)..(31): n stands for inosine
accuugaucugaugaggccguuaggccgaanuccagaa

SEQ ID NO: 8220 - RNA, 38 nt, Artificial Sequence
  Description of Artificial Sequence:  Enzymatic Nucleic Acid
  misc_feature (31)..(31): n stands for inosine
acauaccucugaugaggccguuaggccgaanauagucc

SEQ ID NO: 8221 - RNA, 38 nt, Artificial Sequence
  Description of Artificial Sequence:  Enzymatic Nucleic Acid
  misc_feature (31)..(31): n stands for inosine
gacaaacgcugaugaggccguuaggccgaancaacaua

SEQ ID NO: 8222 - RNA, 38 nt, Artificial Sequence
  Description of Artificial Sequence:  Enzymatic Nucleic Acid
  misc_feature (31)..(31): n stands for inosine
ggacaaaccugaugaggccguuaggccgaangcaacau

SEQ ID NO: 8223 - RNA, 38 nt, Artificial Sequence
  Description of Artificial Sequence:  Enzymatic Nucleic Acid
  misc_feature (31)..(31): n stands for inosine
gaauuagacugaugaggccguuaggccgaanacaaacg

SEQ ID NO: 8224 - RNA, 38 nt, Artificial Sequence
  Description of Artificial Sequence:  Enzymatic Nucleic Acid
  misc_feature (31)..(31): n stands for inosine
ggaauuagcugaugaggccguuaggccgaangacaaac

SEQ ID NO: 8225 - RNA, 38 nt, Artificial Sequence
  Description of Artificial Sequence:  Enzymatic Nucleic Acid
  misc_feature (31)..(31): n stands for inosine
cuggaauucugaugaggccguuaggccgaanaggacaa

SEQ ID NO: 8226 - RNA, 38 nt, Artificial Sequence
  Description of Artificial Sequence:  Enzymatic Nucleic Acid
  misc_feature (31)..(31): n stands for inosine
augauccucugaugaggccguuaggccgaanaauuaga

SEQ ID NO: 8227 - RNA, 38 nt, Artificial Sequence
  Description of Artificial Sequence:  Enzymatic Nucleic Acid
  misc_feature (31)..(31): n stands for inosine
gaugaucccugaugaggccguuaggccgaangaauuag

SEQ ID NO: 8228 - RNA, 38 nt, Artificial Sequence
  Description of Artificial Sequence:  Enzymatic Nucleic Acid
  misc_feature (31)..(31): n stands for inosine
guuguugacugaugaggccguuaggccgaanauccugg

SEQ ID NO: 8229 - RNA, 38 nt, Artificial Sequence
  Description of Artificial Sequence:  Enzymatic Nucleic Acid
  misc_feature (31)..(31): n stands for inosine
cugguugucugaugaggccguuaggccgaanaugaucc

SEQ ID NO: 8230 - RNA, 38 nt, Artificial Sequence
  Description of Artificial Sequence:  Enzymatic Nucleic Acid
  misc_feature (31)..(31): n stands for inosine
gugcuggucugaugaggccguuaggccgaanuugauga

SEQ ID NO: 8231 - RNA, 38 nt, Artificial Sequence
  Description of Artificial Sequence:  Enzymatic Nucleic Acid
  misc_feature (31)..(31): n stands for inosine
ccggugcucugaugaggccguuaggccgaanuuguuga

SEQ ID NO: 8232 - RNA, 38 nt, Artificial Sequence
  Description of Artificial Sequence:  Enzymatic Nucleic Acid
  misc_feature (31)..(31): n stands for inosine
uccggugccugaugaggccguuaggccgaanguuguug

SEQ ID NO: 8233 - RNA, 38 nt, Artificial Sequence
  Description of Artificial Sequence:  Enzymatic Nucleic Acid
  misc_feature (31)..(31): n stands for inosine
ugguccggcugaugaggccguuaggccgaancugguug

SEQ ID NO: 8234 - RNA, 38 nt, Artificial Sequence
  Description of Artificial Sequence:  Enzymatic Nucleic Acid
  misc_feature (31)..(31): n stands for inosine
cauggucccugaugaggccguuaggccgaanugcuggu

SEQ ID NO: 8235 - RNA, 38 nt, Artificial Sequence
  Description of Artificial Sequence:  Enzymatic Nucleic Acid
  misc_feature (31)..(31): n stands for inosine
uuuugcaucugaugaggccguuaggccgaanuccggug

SEQ ID NO: 8236 - RNA, 38 nt, Artificial Sequence
  Description of Artificial Sequence:  Enzymatic Nucleic Acid
  misc_feature (31)..(31): n stands for inosine
guuuugcacugaugaggccguuaggccgaanguccggu

SEQ ID NO: 8237 - RNA, 38 nt, Artificial Sequence
  Description of Artificial Sequence:  Enzymatic Nucleic Acid
  misc_feature (31)..(31): n stands for inosine
gcagguuucugaugaggccguuaggccgaancaugguc

SEQ ID NO: 8238 - RNA, 38 nt, Artificial Sequence
  Description of Artificial Sequence:  Enzymatic Nucleic Acid
  misc_feature (31)..(31): n stands for inosine
guugugcacugaugaggccguuaggccgaanuuuugca

SEQ ID NO: 8239 - RNA, 38 nt, Artificial Sequence
  Description of Artificial Sequence:  Enzymatic Nucleic Acid
  misc_feature (31)..(31): n stands for inosine
aguugugccugaugaggccguuaggccgaanguuuugc

SEQ ID NO: 8240 - RNA, 38 nt, Artificial Sequence
  Description of Artificial Sequence:  Enzymatic Nucleic Acid
  misc_feature (31)..(31): n stands for inosine
aggaguugcugaugaggccguuaggccgaancagguuu

SEQ ID NO: 8241 - RNA, 38 nt, Artificial Sequence
  Description of Artificial Sequence:  Enzymatic Nucleic Acid
  misc_feature (31)..(31): n stands for inosine
gcaggagucugaugaggccguuaggccgaanugcaggu

SEQ ID NO: 8242 - RNA, 38 nt, Artificial Sequence
  Description of Artificial Sequence:  Enzymatic Nucleic Acid
  misc_feature (31)..(31): n stands for inosine
ugagcaggcugaugaggccguuaggccgaanuugugca

SEQ ID NO: 8243 - RNA, 38 nt, Artificial Sequence
  Description of Artificial Sequence:  Enzymatic Nucleic Acid
  misc_feature (31)..(31): n stands for inosine
cuugagcacugaugaggccguuaggccgaanaguugug

SEQ ID NO: 8244 - RNA, 38 nt, Artificial Sequence
  Description of Artificial Sequence:  Enzymatic Nucleic Acid
  misc_feature (31)..(31): n stands for inosine
ccuugagccugaugaggccguuaggccgaangaguugu

SEQ ID NO: 8245 - RNA, 38 nt, Artificial Sequence
  Description of Artificial Sequence:  Enzymatic Nucleic Acid
  misc_feature (31)..(31): n stands for inosine
guuccuugcugaugaggccguuaggccgaancaggagu

SEQ ID NO: 8246 - RNA, 38 nt, Artificial Sequence
  Description of Artificial Sequence:  Enzymatic Nucleic Acid
  misc_feature (31)..(31): n stands for inosine
agguuccucugaugaggccguuaggccgaanagcagga

SEQ ID NO: 8247 - RNA, 38 nt, Artificial Sequence
  Description of Artificial Sequence:  Enzymatic Nucleic Acid
  misc_feature (31)..(31): n stands for inosine
aacauagacugaugaggccguuaggccgaanuuccuug

SEQ ID NO: 8248 - RNA, 38 nt, Artificial Sequence
  Description of Artificial Sequence:  Enzymatic Nucleic Acid
  misc_feature (31)..(31): n stands for inosine
aaacauagcugaugaggccguuaggccgaanguuccuu

SEQ ID NO: 8249 - RNA, 38 nt, Artificial Sequence
  Description of Artificial Sequence:  Enzymatic Nucleic Acid
  misc_feature (31)..(31): n stands for inosine
ggaaacaucugaugaggccguuaggccgaanagguucc

SEQ ID NO: 8250 - RNA, 38 nt, Artificial Sequence
  Description of Artificial Sequence:  Enzymatic Nucleic Acid
  misc_feature (31)..(31): n stands for inosine
aacaugagcugaugaggccguuaggccgaanaaacaua

SEQ ID NO: 8251 - RNA, 38 nt, Artificial Sequence
  Description of Artificial Sequence:  Enzymatic Nucleic Acid
  misc_feature (31)..(31): n stands for inosine
caacaugacugaugaggccguuaggccgaangaaacau

SEQ ID NO: 8252 - RNA, 38 nt, Artificial Sequence
  Description of Artificial Sequence:  Enzymatic Nucleic Acid
  misc_feature (31)..(31): n stands for inosine
gcaacaugcugaugaggccguuaggccgaanggaaaca

SEQ ID NO: 8253 - RNA, 38 nt, Artificial Sequence
  Description of Artificial Sequence:  Enzymatic Nucleic Acid
  misc_feature (31)..(31): n stands for inosine
cagcaacacugaugaggccguuaggccgaanagggaaa

SEQ ID NO: 8254 - RNA, 38 nt, Artificial Sequence
  Description of Artificial Sequence:  Enzymatic Nucleic Acid
  misc_feature (31)..(31): n stands for inosine
uuuuguaccugaugaggccguuaggccgaancaacaug

SEQ ID NO: 8255 - RNA, 38 nt, Artificial Sequence
  Description of Artificial Sequence:  Enzymatic Nucleic Acid
  misc_feature (31)..(31): n stands for inosine
guagguuucugaugaggccguuaggccgaanuacagca

SEQ ID NO: 8256 - RNA, 38 nt, Artificial Sequence
  Description of Artificial Sequence:  Enzymatic Nucleic Acid
  misc_feature (31)..(31): n stands for inosine
cguccguacugaugaggccguuaggccgaanuuuugua

SEQ ID NO: 8257 - RNA, 38 nt, Artificial Sequence
  Description of Artificial Sequence:  Enzymatic Nucleic Acid
  misc_feature (31)..(31): n stands for inosine
ccguccgucugaugaggccguuaggccgaanguuuugu

SEQ ID NO: 8258 - RNA, 38 nt, Artificial Sequence
  Description of Artificial Sequence:  Enzymatic Nucleic Acid
  misc_feature (31)..(31): n stands for inosine
acaggugccugaugaggccguuaggccgaanuuuccgu

SEQ ID NO: 8259 - RNA, 38 nt, Artificial Sequence
  Description of Artificial Sequence:  Enzymatic Nucleic Acid
  misc_feature (31)..(31): n stands for inosine
aauacaggcugaugaggccguuaggccgaancaguuuc

SEQ ID NO: 8260 - RNA, 38 nt, Artificial Sequence
  Description of Artificial Sequence:  Enzymatic Nucleic Acid
  misc_feature (31)..(31): n stands for inosine
ggaauacacugaugaggccguuaggccgaanugcaguu

SEQ ID NO: 8261 - RNA, 38 nt, Artificial Sequence
  Description of Artificial Sequence:  Enzymatic Nucleic Acid
  misc_feature (31)..(31): n stands for inosine
gggaauaccugaugaggccguuaggccgaangugcagu

SEQ ID NO: 8262 - RNA, 38 nt, Artificial Sequence
  Description of Artificial Sequence:  Enzymatic Nucleic Acid
  misc_feature (31)..(31): n stands for inosine
augggaugcugaugaggccguuaggccgaanaauacag

SEQ ID NO: 8263 - RNA, 38 nt, Artificial Sequence
  Description of Artificial Sequence:  Enzymatic Nucleic Acid
  misc_feature (31)..(31): n stands for inosine
gaugggaucugaugaggccguuaggccgaangaauaca

SEQ ID NO: 8264 - RNA, 38 nt, Artificial Sequence
  Description of Artificial Sequence:  Enzymatic Nucleic Acid
  misc_feature (31)..(31): n stands for inosine
ugaugggacugaugaggccguuaggccgaanggaauac

SEQ ID NO: 8265 - RNA, 38 nt, Artificial Sequence
  Description of Artificial Sequence:  Enzymatic Nucleic Acid
  misc_feature (31)..(31): n stands for inosine
agaugaugcugaugaggccguuaggccgaanaugggaa

SEQ ID NO: 8266 - RNA, 38 nt, Artificial Sequence
  Description of Artificial Sequence:  Enzymatic Nucleic Acid
  misc_feature (31)..(31): n stands for inosine
aagaugaucugaugaggccguuaggccgaangauggga

SEQ ID NO: 8267 - RNA, 38 nt, Artificial Sequence
  Description of Artificial Sequence:  Enzymatic Nucleic Acid
  misc_feature (31)..(31): n stands for inosine
caagaugacugaugaggccguuaggccgaanggauggg

SEQ ID NO: 8268 - RNA, 38 nt, Artificial Sequence
  Description of Artificial Sequence:  Enzymatic Nucleic Acid
  misc_feature (31)..(31): n stands for inosine
gcccaagacugaugaggccguuaggccgaanaugggau

SEQ ID NO: 8269 - RNA, 38 nt, Artificial Sequence
  Description of Artificial Sequence:  Enzymatic Nucleic Acid
  misc_feature (31)..(31): n stands for inosine
aaagcccacugaugaggccguuaggccgaanaugaugg

SEQ ID NO: 8270 - RNA, 38 nt, Artificial Sequence
  Description of Artificial Sequence:  Enzymatic Nucleic Acid
  misc_feature (31)..(31): n stands for inosine
uuugcgaacugaugaggccguuaggccgaancccaaga

SEQ ID NO: 8271 - RNA, 38 nt, Artificial Sequence
  Description of Artificial Sequence:  Enzymatic Nucleic Acid
  misc_feature (31)..(31): n stands for inosine
agguauuucugaugaggccguuaggccgaancgaaagc

SEQ ID NO: 8272 - RNA, 38 nt, Artificial Sequence
  Description of Artificial Sequence:  Enzymatic Nucleic Acid
  misc_feature (31)..(31): n stands for inosine
cucccauacugaugaggccguuaggccgaanuauuuug

SEQ ID NO: 8273 - RNA, 38 nt, Artificial Sequence
  Description of Artificial Sequence:  Enzymatic Nucleic Acid
  misc_feature (31)..(31): n stands for inosine
acucccaucugaugaggccguuaggccgaanguauuuu

SEQ ID NO: 8274 - RNA, 38 nt, Artificial Sequence
  Description of Artificial Sequence:  Enzymatic Nucleic Acid
  misc_feature (31)..(31): n stands for inosine
cggacugacugaugaggccguuaggccgaancccacuc

SEQ ID NO: 8275 - RNA, 38 nt, Artificial Sequence
  Description of Artificial Sequence:  Enzymatic Nucleic Acid
  misc_feature (31)..(31): n stands for inosine
acggacugcugaugaggccguuaggccgaangcccacu

SEQ ID NO: 8276 - RNA, 38 nt, Artificial Sequence
  Description of Artificial Sequence:  Enzymatic Nucleic Acid
  misc_feature (31)..(31): n stands for inosine
aaacggaccugaugaggccguuaggccgaanaggccca

SEQ ID NO: 8277 - RNA, 38 nt, Artificial Sequence
  Description of Artificial Sequence:  Enzymatic Nucleic Acid
  misc_feature (31)..(31): n stands for inosine
agagaaaccugaugaggccguuaggccgaanacugagg

SEQ ID NO: 8278 - RNA, 38 nt, Artificial Sequence
  Description of Artificial Sequence:  Enzymatic Nucleic Acid
  misc_feature (31)..(31): n stands for inosine
gagccaagcugaugaggccguuaggccgaanaaacgga

SEQ ID NO: 8279 - RNA, 38 nt, Artificial Sequence
  Description of Artificial Sequence:  Enzymatic Nucleic Acid
  misc_feature (31)..(31): n stands for inosine
cugagccacugaugaggccguuaggccgaanagaaacg

SEQ ID NO: 8280 - RNA, 38 nt, Artificial Sequence
  Description of Artificial Sequence:  Enzymatic Nucleic Acid
  misc_feature (31)..(31): n stands for inosine
guaaacugcugaugaggccguuaggccgaanccaagag

SEQ ID NO: 8281 - RNA, 38 nt, Artificial Sequence
  Description of Artificial Sequence:  Enzymatic Nucleic Acid
  misc_feature (31)..(31): n stands for inosine
uaguaaaccugaugaggccguuaggccgaanagccaag

SEQ ID NO: 8282 - RNA, 38 nt, Artificial Sequence
  Description of Artificial Sequence:  Enzymatic Nucleic Acid
  misc_feature (31)..(31): n stands for inosine
auggcacucugaugaggccguuaggccgaanuaaacug

SEQ ID NO: 8283 - RNA, 38 nt, Artificial Sequence
  Description of Artificial Sequence:  Enzymatic Nucleic Acid
  misc_feature (31)..(31): n stands for inosine
gaacaaaucugaugaggccguuaggccgaancacuagu

SEQ ID NO: 8284 - RNA, 38 nt, Artificial Sequence
  Description of Artificial Sequence:  Enzymatic Nucleic Acid
  misc_feature (31)..(31): n stands for inosine
ugaacaaacugaugaggccguuaggccgaangcacuag

SEQ ID NO: 8285 - RNA, 38 nt, Artificial Sequence
  Description of Artificial Sequence:  Enzymatic Nucleic Acid
  misc_feature (31)..(31): n stands for inosine
cgaaccaccugaugaggccguuaggccgaanaacaaau

SEQ ID NO: 8286 - RNA, 38 nt, Artificial Sequence
  Description of Artificial Sequence:  Enzymatic Nucleic Acid
  misc_feature (31)..(31): n stands for inosine
ugggggaacugaugaggccguuaggccgaancccuacg

SEQ ID NO: 8287 - RNA, 38 nt, Artificial Sequence
  Description of Artificial Sequence:  Enzymatic Nucleic Acid
  misc_feature (31)..(31): n stands for inosine
acagugggcugaugaggccguuaggccgaanaaagccc

SEQ ID NO: 8288 - RNA, 38 nt, Artificial Sequence
  Description of Artificial Sequence:  Enzymatic Nucleic Acid
  misc_feature (31)..(31): n stands for inosine
gacaguggcugaugaggccguuaggccgaangaaagcc

SEQ ID NO: 8289 - RNA, 38 nt, Artificial Sequence
  Description of Artificial Sequence:  Enzymatic Nucleic Acid
  misc_feature (31)..(31): n stands for inosine
agacagugcugaugaggccguuaggccgaanggaaagc

SEQ ID NO: 8290 - RNA, 38 nt, Artificial Sequence
  Description of Artificial Sequence:  Enzymatic Nucleic Acid
  misc_feature (31)..(31): n stands for inosine
cagacagucugaugaggccguuaggccgaangggaaag

SEQ ID NO: 8291 - RNA, 38 nt, Artificial Sequence
  Description of Artificial Sequence:  Enzymatic Nucleic Acid
  misc_feature (31)..(31): n stands for inosine
ccagacagcugaugaggccguuaggccgaanggggaaa

SEQ ID NO: 8292 - RNA, 38 nt, Artificial Sequence
  Description of Artificial Sequence:  Enzymatic Nucleic Acid
  misc_feature (31)..(31): n stands for inosine
agccagaccugaugaggccguuaggccgaanuggggga

SEQ ID NO: 8293 - RNA, 38 nt, Artificial Sequence
  Description of Artificial Sequence:  Enzymatic Nucleic Acid
  misc_feature (31)..(31): n stands for inosine
ugaaagcccugaugaggccguuaggccgaanacagugg

SEQ ID NO: 8294 - RNA, 38 nt, Artificial Sequence
  Description of Artificial Sequence:  Enzymatic Nucleic Acid
  misc_feature (31)..(31): n stands for inosine
uaacugaacugaugaggccguuaggccgaanccagaca

SEQ ID NO: 8295 - RNA, 38 nt, Artificial Sequence
  Description of Artificial Sequence:  Enzymatic Nucleic Acid
  misc_feature (31)..(31): n stands for inosine
cauauaaccugaugaggccguuaggccgaanaaagcca

SEQ ID NO: 8296 - RNA, 38 nt, Artificial Sequence
  Description of Artificial Sequence:  Enzymatic Nucleic Acid
  misc_feature (31)..(31): n stands for inosine
acagacuucugaugaggccguuaggccgaancccccaa

SEQ ID NO: 8297 - RNA, 38 nt, Artificial Sequence
  Description of Artificial Sequence:  Enzymatic Nucleic Acid
  misc_feature (31)..(31): n stands for inosine
uacagacucugaugaggccguuaggccgaangccccca

SEQ ID NO: 8298 - RNA, 38 nt, Artificial Sequence
  Description of Artificial Sequence:  Enzymatic Nucleic Acid
  misc_feature (31)..(31): n stands for inosine
uguuguaccugaugaggccguuaggccgaanacuuggc

SEQ ID NO: 8299 - RNA, 38 nt, Artificial Sequence
  Description of Artificial Sequence:  Enzymatic Nucleic Acid
  misc_feature (31)..(31): n stands for inosine
caagaugucugaugaggccguuaggccgaanuacagac

SEQ ID NO: 8300 - RNA, 38 nt, Artificial Sequence
  Description of Artificial Sequence:  Enzymatic Nucleic Acid
  misc_feature (31)..(31): n stands for inosine
acucaagacugaugaggccguuaggccgaanuuguaca

SEQ ID NO: 8301 - RNA, 38 nt, Artificial Sequence
  Description of Artificial Sequence:  Enzymatic Nucleic Acid
  misc_feature (31)..(31): n stands for inosine
gggacucacugaugaggccguuaggccgaanauguugu

SEQ ID NO: 8302 - RNA, 38 nt, Artificial Sequence
  Description of Artificial Sequence:  Enzymatic Nucleic Acid
  misc_feature (31)..(31): n stands for inosine
gcauaaagcugaugaggccguuaggccgaanacucaag

SEQ ID NO: 8303 - RNA, 38 nt, Artificial Sequence
  Description of Artificial Sequence:  Enzymatic Nucleic Acid
  misc_feature (31)..(31): n stands for inosine
ggcauaaacugaugaggccguuaggccgaangacucaa

SEQ ID NO: 8304 - RNA, 38 nt, Artificial Sequence
  Description of Artificial Sequence:  Enzymatic Nucleic Acid
  misc_feature (31)..(31): n stands for inosine
cggcauaacugaugaggccguuaggccgaanggacuca

SEQ ID NO: 8305 - RNA, 38 nt, Artificial Sequence
  Description of Artificial Sequence:  Enzymatic Nucleic Acid
  misc_feature (31)..(31): n stands for inosine
guaacagccugaugaggccguuaggccgaancauaaag

SEQ ID NO: 8306 - RNA, 38 nt, Artificial Sequence
  Description of Artificial Sequence:  Enzymatic Nucleic Acid
  misc_feature (31)..(31): n stands for inosine
uugguaaccugaugaggccguuaggccgaancggcaua

SEQ ID NO: 8307 - RNA, 38 nt, Artificial Sequence
  Description of Artificial Sequence:  Enzymatic Nucleic Acid
  misc_feature (31)..(31): n stands for inosine
agaaaauucugaugaggccguuaggccgaanuaacagc

SEQ ID NO: 8308 - RNA, 38 nt, Artificial Sequence
  Description of Artificial Sequence:  Enzymatic Nucleic Acid
  misc_feature (31)..(31): n stands for inosine
aagaaaaucugaugaggccguuaggccgaanguaacag

SEQ ID NO: 8309 - RNA, 38 nt, Artificial Sequence
  Description of Artificial Sequence:  Enzymatic Nucleic Acid
  misc_feature (31)..(31): n stands for inosine
aagacaaacugaugaggccguuaggccgaanaaaauug

SEQ ID NO: 8310 - RNA, 38 nt, Artificial Sequence
  Description of Artificial Sequence:  Enzymatic Nucleic Acid
  misc_feature (31)..(31): n stands for inosine
auacccaacugaugaggccguuaggccgaanacaaaag

SEQ ID NO: 8311 - RNA, 38 nt, Artificial Sequence
  Description of Artificial Sequence:  Enzymatic Nucleic Acid
  misc_feature (31)..(31): n stands for inosine
gguuuaaacugaugaggccguuaggccgaanuauaccc

SEQ ID NO: 8312 - RNA, 38 nt, Artificial Sequence
  Description of Artificial Sequence:  Enzymatic Nucleic Acid
  misc_feature (31)..(31): n stands for inosine
uuugugagcugaugaggccguuaggccgaanuuuaaau

SEQ ID NO: 8313 - RNA, 38 nt, Artificial Sequence
  Description of Artificial Sequence:  Enzymatic Nucleic Acid
  misc_feature (31)..(31): n stands for inosine
uuuugugacugaugaggccguuaggccgaanguuuaaa

SEQ ID NO: 8314 - RNA, 38 nt, Artificial Sequence
  Description of Artificial Sequence:  Enzymatic Nucleic Acid
  misc_feature (31)..(31): n stands for inosine
guuuugugcugaugaggccguuaggccgaangguuuaa

SEQ ID NO: 8315 - RNA, 38 nt, Artificial Sequence
  Description of Artificial Sequence:  Enzymatic Nucleic Acid
  misc_feature (31)..(31): n stands for inosine
uuguuuugcugaugaggccguuaggccgaanaggguuu

SEQ ID NO: 8316 - RNA, 38 nt, Artificial Sequence
  Description of Artificial Sequence:  Enzymatic Nucleic Acid
  misc_feature (31)..(31): n stands for inosine
uuuuguuucugaugaggccguuaggccgaanugagggu

SEQ ID NO: 8317 - RNA, 38 nt, Artificial Sequence
  Description of Artificial Sequence:  Enzymatic Nucleic Acid
  misc_feature (31)..(31): n stands for inosine
caucuuuucugaugaggccguuaggccgaanuuuugug

SEQ ID NO: 8318 - RNA, 38 nt, Artificial Sequence
  Description of Artificial Sequence:  Enzymatic Nucleic Acid
  misc_feature (31)..(31): n stands for inosine
aaguuaagcugaugaggccguuaggccgaanaauaucc

SEQ ID NO: 8319 - RNA, 38 nt, Artificial Sequence
  Description of Artificial Sequence:  Enzymatic Nucleic Acid
  misc_feature (31)..(31): n stands for inosine
gaaguuaacugaugaggccguuaggccgaangaauauc

SEQ ID NO: 8320 - RNA, 38 nt, Artificial Sequence
  Description of Artificial Sequence:  Enzymatic Nucleic Acid
  misc_feature (31)..(31): n stands for inosine
ugaaguuacugaugaggccguuaggccgaanggaauau

SEQ ID NO: 8321 - RNA, 38 nt, Artificial Sequence
  Description of Artificial Sequence:  Enzymatic Nucleic Acid
  misc_feature (31)..(31): n stands for inosine
ucccaugacugaugaggccguuaggccgaanuuaaggg

SEQ ID NO: 8322 - RNA, 38 nt, Artificial Sequence
  Description of Artificial Sequence:  Enzymatic Nucleic Acid
  misc_feature (31)..(31): n stands for inosine
auaucccacugaugaggccguuaggccgaanaaguuaa

SEQ ID NO: 8323 - RNA, 38 nt, Artificial Sequence
  Description of Artificial Sequence:  Enzymatic Nucleic Acid
  misc_feature (31)..(31): n stands for inosine
uggcaaugcugaugaggccguuaggccgaanccccaac

SEQ ID NO: 8324 - RNA, 38 nt, Artificial Sequence
  Description of Artificial Sequence:  Enzymatic Nucleic Acid
  misc_feature (31)..(31): n stands for inosine
uguggcaacugaugaggccguuaggccgaanugcccca

SEQ ID NO: 8325 - RNA, 38 nt, Artificial Sequence
  Description of Artificial Sequence:  Enzymatic Nucleic Acid
  misc_feature (31)..(31): n stands for inosine
guuccugucugaugaggccguuaggccgaancaaugug

SEQ ID NO: 8326 - RNA, 38 nt, Artificial Sequence
  Description of Artificial Sequence:  Enzymatic Nucleic Acid
  misc_feature (31)..(31): n stands for inosine
uguuccugcugaugaggccguuaggccgaangcaaugu

SEQ ID NO: 8327 - RNA, 38 nt, Artificial Sequence
  Description of Artificial Sequence:  Enzymatic Nucleic Acid
  misc_feature (31)..(31): n stands for inosine
uauguucccugaugaggccguuaggccgaanuggcaau

SEQ ID NO: 8328 - RNA, 38 nt, Artificial Sequence
  Description of Artificial Sequence:  Enzymatic Nucleic Acid
  misc_feature (31)..(31): n stands for inosine
guacaauacugaugaggccguuaggccgaanuuccugu

SEQ ID NO: 8329 - RNA, 38 nt, Artificial Sequence
  Description of Artificial Sequence:  Enzymatic Nucleic Acid
  misc_feature (31)..(31): n stands for inosine
ugauuuuucugaugaggccguuaggccgaanuacaaua

SEQ ID NO: 8330 - RNA, 38 nt, Artificial Sequence
  Description of Artificial Sequence:  Enzymatic Nucleic Acid
  misc_feature (31)..(31): n stands for inosine
acacauuucugaugaggccguuaggccgaanauuuuuu

SEQ ID NO: 8331 - RNA, 38 nt, Artificial Sequence
  Description of Artificial Sequence:  Enzymatic Nucleic Acid
  misc_feature (31)..(31): n stands for inosine
uuacaggacugaugaggccguuaggccgaanuuuccua

SEQ ID NO: 8332 - RNA, 38 nt, Artificial Sequence
  Description of Artificial Sequence:  Enzymatic Nucleic Acid
  misc_feature (31)..(31): n stands for inosine
uguuuacacugaugaggccguuaggccgaanaaguuuc

SEQ ID NO: 8333 - RNA, 38 nt, Artificial Sequence
  Description of Artificial Sequence:  Enzymatic Nucleic Acid
  misc_feature (31)..(31): n stands for inosine
cuguuuaccugaugaggccguuaggccgaangaaguuu

SEQ ID NO: 8334 - RNA, 38 nt, Artificial Sequence
  Description of Artificial Sequence:  Enzymatic Nucleic Acid
  misc_feature (31)..(31): n stands for inosine
aauaggcccugaugaggccguuaggccgaanuuuacag

SEQ ID NO: 8335 - RNA, 38 nt, Artificial Sequence
  Description of Artificial Sequence:  Enzymatic Nucleic Acid
  misc_feature (31)..(31): n stands for inosine
aaucaauacugaugaggccguuaggccgaanccuguuu

SEQ ID NO: 8336 - RNA, 38 nt, Artificial Sequence
  Description of Artificial Sequence:  Enzymatic Nucleic Acid
  misc_feature (31)..(31): n stands for inosine
caaucaaucugaugaggccguuaggccgaangccuguu

SEQ ID NO: 8337 - RNA, 38 nt, Artificial Sequence
  Description of Artificial Sequence:  Enzymatic Nucleic Acid
  misc_feature (31)..(31): n stands for inosine
caauucgucugaugaggccguuaggccgaanacauacu

SEQ ID NO: 8338 - RNA, 38 nt, Artificial Sequence
  Description of Artificial Sequence:  Enzymatic Nucleic Acid
  misc_feature (31)..(31): n stands for inosine
accccaaacugaugaggccguuaggccgaanacccaca

SEQ ID NO: 8339 - RNA, 38 nt, Artificial Sequence
  Description of Artificial Sequence:  Enzymatic Nucleic Acid
  misc_feature (31)..(31): n stands for inosine
aaaggggccugaugaggccguuaggccgaancaaaccc

SEQ ID NO: 8340 - RNA, 38 nt, Artificial Sequence
  Description of Artificial Sequence:  Enzymatic Nucleic Acid
  misc_feature (31)..(31): n stands for inosine
gugaaaggcugaugaggccguuaggccgaancggcaaa

SEQ ID NO: 8341 - RNA, 38 nt, Artificial Sequence
  Description of Artificial Sequence:  Enzymatic Nucleic Acid
  misc_feature (31)..(31): n stands for inosine
cgugaaagcugaugaggccguuaggccgaangcggcaa

SEQ ID NO: 8342 - RNA, 38 nt, Artificial Sequence
  Description of Artificial Sequence:  Enzymatic Nucleic Acid
  misc_feature (31)..(31): n stands for inosine
gcgugaaacugaugaggccguuaggccgaanggcggca

SEQ ID NO: 8343 - RNA, 38 nt, Artificial Sequence
  Description of Artificial Sequence:  Enzymatic Nucleic Acid
  misc_feature (31)..(31): n stands for inosine
ugcgugaacugaugaggccguuaggccgaangggcggc

SEQ ID NO: 8344 - RNA, 38 nt, Artificial Sequence
  Description of Artificial Sequence:  Enzymatic Nucleic Acid
  misc_feature (31)..(31): n stands for inosine
acauugcgcugaugaggccguuaggccgaanaaagggg

SEQ ID NO: 8345 - RNA, 38 nt, Artificial Sequence
  Description of Artificial Sequence:  Enzymatic Nucleic Acid
  misc_feature (31)..(31): n stands for inosine
auccacaucugaugaggccguuaggccgaancgugaaa

SEQ ID NO: 8346 - RNA, 38 nt, Artificial Sequence
  Description of Artificial Sequence:  Enzymatic Nucleic Acid
  misc_feature (31)..(31): n stands for inosine
auuaaagccugaugaggccguuaggccgaanaauaucc

SEQ ID NO: 8347 - RNA, 38 nt, Artificial Sequence
  Description of Artificial Sequence:  Enzymatic Nucleic Acid
  misc_feature (31)..(31): n stands for inosine
ggcauuaacugaugaggccguuaggccgaancagaaua

SEQ ID NO: 8348 - RNA, 38 nt, Artificial Sequence
  Description of Artificial Sequence:  Enzymatic Nucleic Acid
  misc_feature (31)..(31): n stands for inosine
cauauaaacugaugaggccguuaggccgaancauuaaa

SEQ ID NO: 8349 - RNA, 38 nt, Artificial Sequence
  Description of Artificial Sequence:  Enzymatic Nucleic Acid
  misc_feature (31)..(31): n stands for inosine
gcauauaacugaugaggccguuaggccgaangcauuaa

SEQ ID NO: 8350 - RNA, 38 nt, Artificial Sequence
  Description of Artificial Sequence:  Enzymatic Nucleic Acid
  misc_feature (31)..(31): n stands for inosine
uguaugcacugaugaggccguuaggccgaancauauaa

SEQ ID NO: 8351 - RNA, 38 nt, Artificial Sequence
  Description of Artificial Sequence:  Enzymatic Nucleic Acid
  misc_feature (31)..(31): n stands for inosine
ugcuuguacugaugaggccguuaggccgaancaugcau

SEQ ID NO: 8352 - RNA, 38 nt, Artificial Sequence
  Description of Artificial Sequence:  Enzymatic Nucleic Acid
  misc_feature (31)..(31): n stands for inosine
guuuugcucugaugaggccguuaggccgaanuaugcau

SEQ ID NO: 8353 - RNA, 38 nt, Artificial Sequence
  Description of Artificial Sequence:  Enzymatic Nucleic Acid
  misc_feature (31)..(31): n stands for inosine
gccuguuucugaugaggccguuaggccgaancuuguau

SEQ ID NO: 8354 - RNA, 38 nt, Artificial Sequence
  Description of Artificial Sequence:  Enzymatic Nucleic Acid
  misc_feature (31)..(31): n stands for inosine
uaaaagcccugaugaggccguuaggccgaanuuuugcu

SEQ ID NO: 8355 - RNA, 38 nt, Artificial Sequence
  Description of Artificial Sequence:  Enzymatic Nucleic Acid
  misc_feature (31)..(31): n stands for inosine
aaaguaaacugaugaggccguuaggccgaanccuguuu

SEQ ID NO: 8356 - RNA, 38 nt, Artificial Sequence
  Description of Artificial Sequence:  Enzymatic Nucleic Acid
  misc_feature (31)..(31): n stands for inosine
ggcgagaacugaugaggccguuaggccgaanuaaaagc

SEQ ID NO: 8357 - RNA, 38 nt, Artificial Sequence
  Description of Artificial Sequence:  Enzymatic Nucleic Acid
  misc_feature (31)..(31): n stands for inosine
aguuggcgcugaugaggccguuaggccgaanaaaguaa

SEQ ID NO: 8358 - RNA, 38 nt, Artificial Sequence
  Description of Artificial Sequence:  Enzymatic Nucleic Acid
  misc_feature (31)..(31): n stands for inosine
uguaaguucugaugaggccguuaggccgaancgagaaa

SEQ ID NO: 8359 - RNA, 38 nt, Artificial Sequence
  Description of Artificial Sequence:  Enzymatic Nucleic Acid
  misc_feature (31)..(31): n stands for inosine
uuguaagucugaugaggccguuaggccgaangcgagaa

SEQ ID NO: 8360 - RNA, 38 nt, Artificial Sequence
  Description of Artificial Sequence:  Enzymatic Nucleic Acid
  misc_feature (31)..(31): n stands for inosine
gccuuguacugaugaggccguuaggccgaanuuggcga

SEQ ID NO: 8361 - RNA, 38 nt, Artificial Sequence
  Description of Artificial Sequence:  Enzymatic Nucleic Acid
  misc_feature (31)..(31): n stands for inosine
aaaggccucugaugaggccguuaggccgaanuaaguug

SEQ ID NO: 8362 - RNA, 38 nt, Artificial Sequence
  Description of Artificial Sequence:  Enzymatic Nucleic Acid
  misc_feature (31)..(31): n stands for inosine
cuuagaaacugaugaggccguuaggccgaanccuugua

SEQ ID NO: 8363 - RNA, 38 nt, Artificial Sequence
  Description of Artificial Sequence:  Enzymatic Nucleic Acid
  misc_feature (31)..(31): n stands for inosine
acuuagaacugaugaggccguuaggccgaangccuugu

SEQ ID NO: 8364 - RNA, 38 nt, Artificial Sequence
  Description of Artificial Sequence:  Enzymatic Nucleic Acid
  misc_feature (31)..(31): n stands for inosine
guuuacuucugaugaggccguuaggccgaanaaaggcc

SEQ ID NO: 8365 - RNA, 38 nt, Artificial Sequence
  Description of Artificial Sequence:  Enzymatic Nucleic Acid
  misc_feature (31)..(31): n stands for inosine
ucacauaccugaugaggccguuaggccgaanuuuacuu

SEQ ID NO: 8366 - RNA, 38 nt, Artificial Sequence
  Description of Artificial Sequence:  Enzymatic Nucleic Acid
  misc_feature (31)..(31): n stands for inosine
gggguaaacugaugaggccguuaggccgaanuucacau

SEQ ID NO: 8367 - RNA, 38 nt, Artificial Sequence
  Description of Artificial Sequence:  Enzymatic Nucleic Acid
  misc_feature (31)..(31): n stands for inosine
cgggguaacugaugaggccguuaggccgaanguucaca

SEQ ID NO: 8368 - RNA, 38 nt, Artificial Sequence
  Description of Artificial Sequence:  Enzymatic Nucleic Acid
  misc_feature (31)..(31): n stands for inosine
agcaacggcugaugaggccguuaggccgaanuaaaggu

SEQ ID NO: 8369 - RNA, 38 nt, Artificial Sequence
  Description of Artificial Sequence:  Enzymatic Nucleic Acid
  misc_feature (31)..(31): n stands for inosine
gagcaacgcugaugaggccguuaggccgaanguaaagg

SEQ ID NO: 8370 - RNA, 38 nt, Artificial Sequence
  Description of Artificial Sequence:  Enzymatic Nucleic Acid
  misc_feature (31)..(31): n stands for inosine
cgagcaaccugaugaggccguuaggccgaangguaaag

SEQ ID NO: 8371 - RNA, 38 nt, Artificial Sequence
  Description of Artificial Sequence:  Enzymatic Nucleic Acid
  misc_feature (31)..(31): n stands for inosine
cguugccgcugaugaggccguuaggccgaancaacggg

SEQ ID NO: 8372 - RNA, 38 nt, Artificial Sequence
  Description of Artificial Sequence:  Enzymatic Nucleic Acid
  misc_feature (31)..(31): n stands for inosine
caggccgucugaugaggccguuaggccgaanccgagca

SEQ ID NO: 8373 - RNA, 38 nt, Artificial Sequence
  Description of Artificial Sequence:  Enzymatic Nucleic Acid
  misc_feature (31)..(31): n stands for inosine
auagaccacugaugaggccguuaggccgaanccguugc

SEQ ID NO: 8374 - RNA, 38 nt, Artificial Sequence
  Description of Artificial Sequence:  Enzymatic Nucleic Acid
  misc_feature (31)..(31): n stands for inosine
cauagacccugaugaggccguuaggccgaangccguug

SEQ ID NO: 8375 - RNA, 38 nt, Artificial Sequence
  Description of Artificial Sequence:  Enzymatic Nucleic Acid
  misc_feature (31)..(31): n stands for inosine
cuuggcaucugaugaggccguuaggccgaanaccaggc

SEQ ID NO: 8376 - RNA, 38 nt, Artificial Sequence
  Description of Artificial Sequence:  Enzymatic Nucleic Acid
  misc_feature (31)..(31): n stands for inosine
aaacacuucugaugaggccguuaggccgaancauagac

SEQ ID NO: 8377 - RNA, 38 nt, Artificial Sequence
  Description of Artificial Sequence:  Enzymatic Nucleic Acid
  misc_feature (31)..(31): n stands for inosine
caaacacucugaugaggccguuaggccgaangcauaga

SEQ ID NO: 8378 - RNA, 38 nt, Artificial Sequence
  Description of Artificial Sequence:  Enzymatic Nucleic Acid
  misc_feature (31)..(31): n stands for inosine
guugcguccugaugaggccguuaggccgaancaaacac

SEQ ID NO: 8379 - RNA, 38 nt, Artificial Sequence
  Description of Artificial Sequence:  Enzymatic Nucleic Acid
  misc_feature (31)..(31): n stands for inosine
gugggggucugaugaggccguuaggccgaancgucagc

SEQ ID NO: 8380 - RNA, 38 nt, Artificial Sequence
  Description of Artificial Sequence:  Enzymatic Nucleic Acid
  misc_feature (31)..(31): n stands for inosine
ccagugggcugaugaggccguuaggccgaanuugcguc

SEQ ID NO: 8381 - RNA, 38 nt, Artificial Sequence
  Description of Artificial Sequence:  Enzymatic Nucleic Acid
  misc_feature (31)..(31): n stands for inosine
accaguggcugaugaggccguuaggccgaanguugcgu

SEQ ID NO: 8382 - RNA, 38 nt, Artificial Sequence
  Description of Artificial Sequence:  Enzymatic Nucleic Acid
  misc_feature (31)..(31): n stands for inosine
aaccagugcugaugaggccguuaggccgaangguugcg

SEQ ID NO: 8383 - RNA, 38 nt, Artificial Sequence
  Description of Artificial Sequence:  Enzymatic Nucleic Acid
  misc_feature (31)..(31): n stands for inosine
caaccagucugaugaggccguuaggccgaanggguugc

SEQ ID NO: 8384 - RNA, 38 nt, Artificial Sequence
  Description of Artificial Sequence:  Enzymatic Nucleic Acid
  misc_feature (31)..(31): n stands for inosine
ccaaccagcugaugaggccguuaggccgaangggguug

SEQ ID NO: 8385 - RNA, 38 nt, Artificial Sequence
  Description of Artificial Sequence:  Enzymatic Nucleic Acid
  misc_feature (31)..(31): n stands for inosine
ccccaacccugaugaggccguuaggccgaanugggggu

SEQ ID NO: 8386 - RNA, 38 nt, Artificial Sequence
  Description of Artificial Sequence:  Enzymatic Nucleic Acid
  misc_feature (31)..(31): n stands for inosine
uauggccacugaugaggccguuaggccgaanccccaac

SEQ ID NO: 8387 - RNA, 38 nt, Artificial Sequence
  Description of Artificial Sequence:  Enzymatic Nucleic Acid
  misc_feature (31)..(31): n stands for inosine
uggccuaucugaugaggccguuaggccgaanccaagcc

SEQ ID NO: 8388 - RNA, 38 nt, Artificial Sequence
  Description of Artificial Sequence:  Enzymatic Nucleic Acid
  misc_feature (31)..(31): n stands for inosine
auggccuacugaugaggccguuaggccgaangccaagc

SEQ ID NO: 8389 - RNA, 38 nt, Artificial Sequence
  Description of Artificial Sequence:  Enzymatic Nucleic Acid
  misc_feature (31)..(31): n stands for inosine
gcgcugaucugaugaggccguuaggccgaanccuaugg

SEQ ID NO: 8390 - RNA, 38 nt, Artificial Sequence
  Description of Artificial Sequence:  Enzymatic Nucleic Acid
  misc_feature (31)..(31): n stands for inosine
ugcgcugacugaugaggccguuaggccgaangccuaug

SEQ ID NO: 8391 - RNA, 38 nt, Artificial Sequence
  Description of Artificial Sequence:  Enzymatic Nucleic Acid
  misc_feature (31)..(31): n stands for inosine
gcaugcgccugaugaggccguuaggccgaanauggccu

SEQ ID NO: 8392 - RNA, 38 nt, Artificial Sequence
  Description of Artificial Sequence:  Enzymatic Nucleic Acid
  misc_feature (31)..(31): n stands for inosine
uccacgcacugaugaggccguuaggccgaancgcugau

SEQ ID NO: 8393 - RNA, 38 nt, Artificial Sequence
  Description of Artificial Sequence:  Enzymatic Nucleic Acid
  misc_feature (31)..(31): n stands for inosine
gacacaaacugaugaggccguuaggccgaanuuccacg

SEQ ID NO: 8394 - RNA, 38 nt, Artificial Sequence
  Description of Artificial Sequence:  Enzymatic Nucleic Acid
  misc_feature (31)..(31): n stands for inosine
agacacaacugaugaggccguuaggccgaanguuccac

SEQ ID NO: 8395 - RNA, 38 nt, Artificial Sequence
  Description of Artificial Sequence:  Enzymatic Nucleic Acid
  misc_feature (31)..(31): n stands for inosine
ggcagaggcugaugaggccguuaggccgaanacacaaa

SEQ ID NO: 8396 - RNA, 38 nt, Artificial Sequence
  Description of Artificial Sequence:  Enzymatic Nucleic Acid
  misc_feature (31)..(31): n stands for inosine
ucggcagacugaugaggccguuaggccgaanagacaca

SEQ ID NO: 8397 - RNA, 38 nt, Artificial Sequence
  Description of Artificial Sequence:  Enzymatic Nucleic Acid
  misc_feature (31)..(31): n stands for inosine
aucggcagcugaugaggccguuaggccgaangagacac

SEQ ID NO: 8398 - RNA, 38 nt, Artificial Sequence
  Description of Artificial Sequence:  Enzymatic Nucleic Acid
  misc_feature (31)..(31): n stands for inosine
ggaucggccugaugaggccguuaggccgaanaggagac

SEQ ID NO: 8399 - RNA, 38 nt, Artificial Sequence
  Description of Artificial Sequence:  Enzymatic Nucleic Acid
  misc_feature (31)..(31): n stands for inosine
uauggauccugaugaggccguuaggccgaancagagga

SEQ ID NO: 8400 - RNA, 38 nt, Artificial Sequence
  Description of Artificial Sequence:  Enzymatic Nucleic Acid
  misc_feature (31)..(31): n stands for inosine
cgcgguaucugaugaggccguuaggccgaanaucggca

SEQ ID NO: 8401 - RNA, 38 nt, Artificial Sequence
  Description of Artificial Sequence:  Enzymatic Nucleic Acid
  misc_feature (31)..(31): n stands for inosine
ccgcgguacugaugaggccguuaggccgaangaucggc

SEQ ID NO: 8402 - RNA, 38 nt, Artificial Sequence
  Description of Artificial Sequence:  Enzymatic Nucleic Acid
  misc_feature (31)..(31): n stands for inosine
aguuccgccugaugaggccguuaggccgaanuauggau

SEQ ID NO: 8403 - RNA, 38 nt, Artificial Sequence
  Description of Artificial Sequence:  Enzymatic Nucleic Acid
  misc_feature (31)..(31): n stands for inosine
cggcuaggcugaugaggccguuaggccgaanuuccgcg

SEQ ID NO: 8404 - RNA, 38 nt, Artificial Sequence
  Description of Artificial Sequence:  Enzymatic Nucleic Acid
  misc_feature (31)..(31): n stands for inosine
agcggcuacugaugaggccguuaggccgaanaguuccg

SEQ ID NO: 8405 - RNA, 38 nt, Artificial Sequence
  Description of Artificial Sequence:  Enzymatic Nucleic Acid
  misc_feature (31)..(31): n stands for inosine
aagcggcucugaugaggccguuaggccgaangaguucc

SEQ ID NO: 8406 - RNA, 38 nt, Artificial Sequence
  Description of Artificial Sequence:  Enzymatic Nucleic Acid
  misc_feature (31)..(31): n stands for inosine
aaacaagccugaugaggccguuaggccgaancuaggag

SEQ ID NO: 8407 - RNA, 38 nt, Artificial Sequence
  Description of Artificial Sequence:  Enzymatic Nucleic Acid
  misc_feature (31)..(31): n stands for inosine
gcaaaacacugaugaggccguuaggccgaancggcuag

SEQ ID NO: 8408 - RNA, 38 nt, Artificial Sequence
  Description of Artificial Sequence:  Enzymatic Nucleic Acid
  misc_feature (31)..(31): n stands for inosine
cugcugcgcugaugaggccguuaggccgaancaaaaca

SEQ ID NO: 8409 - RNA, 38 nt, Artificial Sequence
  Description of Artificial Sequence:  Enzymatic Nucleic Acid
  misc_feature (31)..(31): n stands for inosine
agaccugccugaugaggccguuaggccgaancgagcaa

SEQ ID NO: 8410 - RNA, 38 nt, Artificial Sequence
  Description of Artificial Sequence:  Enzymatic Nucleic Acid
  misc_feature (31)..(31): n stands for inosine
cccagacccugaugaggccguuaggccgaancugcgag

SEQ ID NO: 8411 - RNA, 38 nt, Artificial Sequence
  Description of Artificial Sequence:  Enzymatic Nucleic Acid
  misc_feature (31)..(31): n stands for inosine
uuugcccccugaugaggccguuaggccgaanaccugcu

SEQ ID NO: 8412 - RNA, 38 nt, Artificial Sequence
  Description of Artificial Sequence:  Enzymatic Nucleic Acid
  misc_feature (31)..(31): n stands for inosine
augaguuucugaugaggccguuaggccgaanccccaga

SEQ ID NO: 8413 - RNA, 38 nt, Artificial Sequence
  Description of Artificial Sequence:  Enzymatic Nucleic Acid
  misc_feature (31)..(31): n stands for inosine
ucccgaugcugaugaggccguuaggccgaanuuuugcc

SEQ ID NO: 8414 - RNA, 38 nt, Artificial Sequence
  Description of Artificial Sequence:  Enzymatic Nucleic Acid
  misc_feature (31)..(31): n stands for inosine
agucccgacugaugaggccguuaggccgaanaguuuug

SEQ ID NO: 8415 - RNA, 38 nt, Artificial Sequence
  Description of Artificial Sequence:  Enzymatic Nucleic Acid
  misc_feature (31)..(31): n stands for inosine
gaauuguccugaugaggccguuaggccgaanucccgau

SEQ ID NO: 8416 - RNA, 38 nt, Artificial Sequence
  Description of Artificial Sequence:  Enzymatic Nucleic Acid
  misc_feature (31)..(31): n stands for inosine
gacagaaucugaugaggccguuaggccgaanucagucc

SEQ ID NO: 8417 - RNA, 38 nt, Artificial Sequence
  Description of Artificial Sequence:  Enzymatic Nucleic Acid
  misc_feature (31)..(31): n stands for inosine
agcacgaccugaugaggccguuaggccgaanaauuguc

SEQ ID NO: 8418 - RNA, 38 nt, Artificial Sequence
  Description of Artificial Sequence:  Enzymatic Nucleic Acid
  misc_feature (31)..(31): n stands for inosine
ugcgggagcugaugaggccguuaggccgaancacgaca

SEQ ID NO: 8419 - RNA, 38 nt, Artificial Sequence
  Description of Artificial Sequence:  Enzymatic Nucleic Acid
  misc_feature (31)..(31): n stands for inosine
uuugcgggcugaugaggccguuaggccgaanagcacga

SEQ ID NO: 8420 - RNA, 38 nt, Artificial Sequence
  Description of Artificial Sequence:  Enzymatic Nucleic Acid
  misc_feature (31)..(31): n stands for inosine
uauuugcgcugaugaggccguuaggccgaanagagcac

SEQ ID NO: 8421 - RNA, 38 nt, Artificial Sequence
  Description of Artificial Sequence:  Enzymatic Nucleic Acid
  misc_feature (31)..(31): n stands for inosine
auauuugccugaugaggccguuaggccgaangagagca

SEQ ID NO: 8422 - RNA, 38 nt, Artificial Sequence
  Description of Artificial Sequence:  Enzymatic Nucleic Acid
  misc_feature (31)..(31): n stands for inosine
uguauauucugaugaggccguuaggccgaancgggaga

SEQ ID NO: 8423 - RNA, 38 nt, Artificial Sequence
  Description of Artificial Sequence:  Enzymatic Nucleic Acid
  misc_feature (31)..(31): n stands for inosine
ggaaaugacugaugaggccguuaggccgaanuauauuu

SEQ ID NO: 8424 - RNA, 38 nt, Artificial Sequence
  Description of Artificial Sequence:  Enzymatic Nucleic Acid
  misc_feature (31)..(31): n stands for inosine
cauggaaacugaugaggccguuaggccgaanauguaua

SEQ ID NO: 8425 - RNA, 38 nt, Artificial Sequence
  Description of Artificial Sequence:  Enzymatic Nucleic Acid
  misc_feature (31)..(31): n stands for inosine
gcagccaucugaugaggccguuaggccgaanaaaugau

SEQ ID NO: 8426 - RNA, 38 nt, Artificial Sequence
  Description of Artificial Sequence:  Enzymatic Nucleic Acid
  misc_feature (31)..(31): n stands for inosine
agcagccacugaugaggccguuaggccgaangaaauga

SEQ ID NO: 8427 - RNA, 38 nt, Artificial Sequence
  Description of Artificial Sequence:  Enzymatic Nucleic Acid
  misc_feature (31)..(31): n stands for inosine
agccuagccugaugaggccguuaggccgaanccaugga

SEQ ID NO: 8428 - RNA, 38 nt, Artificial Sequence
  Description of Artificial Sequence:  Enzymatic Nucleic Acid
  misc_feature (31)..(31): n stands for inosine
cacagccucugaugaggccguuaggccgaancagccau

SEQ ID NO: 8429 - RNA, 38 nt, Artificial Sequence
  Description of Artificial Sequence:  Enzymatic Nucleic Acid
  misc_feature (31)..(31): n stands for inosine
ggcagcaccugaugaggccguuaggccgaanccuagca

SEQ ID NO: 8430 - RNA, 38 nt, Artificial Sequence
  Description of Artificial Sequence:  Enzymatic Nucleic Acid
  misc_feature (31)..(31): n stands for inosine
caguuggccugaugaggccguuaggccgaancacagcc

SEQ ID NO: 8431 - RNA, 38 nt, Artificial Sequence
  Description of Artificial Sequence:  Enzymatic Nucleic Acid
  misc_feature (31)..(31): n stands for inosine
auccaguucugaugaggccguuaggccgaancagcaca

SEQ ID NO: 8432 - RNA, 38 nt, Artificial Sequence
  Description of Artificial Sequence:  Enzymatic Nucleic Acid
  misc_feature (31)..(31): n stands for inosine
gauccagucugaugaggccguuaggccgaangcagcac

SEQ ID NO: 8433 - RNA, 38 nt, Artificial Sequence
  Description of Artificial Sequence:  Enzymatic Nucleic Acid
  misc_feature (31)..(31): n stands for inosine
uaggaucccugaugaggccguuaggccgaanuuggcag

SEQ ID NO: 8434 - RNA, 38 nt, Artificial Sequence
  Description of Artificial Sequence:  Enzymatic Nucleic Acid
  misc_feature (31)..(31): n stands for inosine
cccgcguacugaugaggccguuaggccgaanauccagu

SEQ ID NO: 8435 - RNA, 38 nt, Artificial Sequence
  Description of Artificial Sequence:  Enzymatic Nucleic Acid
  misc_feature (31)..(31): n stands for inosine
ucccgcgucugaugaggccguuaggccgaangauccag

SEQ ID NO: 8436 - RNA, 38 nt, Artificial Sequence
  Description of Artificial Sequence:  Enzymatic Nucleic Acid
  misc_feature (31)..(31): n stands for inosine
uaaacaaacugaugaggccguuaggccgaanacguccc

SEQ ID NO: 8437 - RNA, 38 nt, Artificial Sequence
  Description of Artificial Sequence:  Enzymatic Nucleic Acid
  misc_feature (31)..(31): n stands for inosine
guaaacaacugaugaggccguuaggccgaangacgucc

SEQ ID NO: 8438 - RNA, 38 nt, Artificial Sequence
  Description of Artificial Sequence:  Enzymatic Nucleic Acid
  misc_feature (31)..(31): n stands for inosine
cgccgacgcugaugaggccguuaggccgaanacguaaa

SEQ ID NO: 8439 - RNA, 38 nt, Artificial Sequence
  Description of Artificial Sequence:  Enzymatic Nucleic Acid
  misc_feature (31)..(31): n stands for inosine
gcgccgaccugaugaggccguuaggccgaangacguaa

SEQ ID NO: 8440 - RNA, 38 nt, Artificial Sequence
  Description of Artificial Sequence:  Enzymatic Nucleic Acid
  misc_feature (31)..(31): n stands for inosine
cgggauuccugaugaggccguuaggccgaancgccgac

SEQ ID NO: 8441 - RNA, 38 nt, Artificial Sequence
  Description of Artificial Sequence:  Enzymatic Nucleic Acid
  misc_feature (31)..(31): n stands for inosine
cguccgcgcugaugaggccguuaggccgaanauucagc

SEQ ID NO: 8442 - RNA, 38 nt, Artificial Sequence
  Description of Artificial Sequence:  Enzymatic Nucleic Acid
  misc_feature (31)..(31): n stands for inosine
ucguccgccugaugaggccguuaggccgaangauucag

SEQ ID NO: 8443 - RNA, 38 nt, Artificial Sequence
  Description of Artificial Sequence:  Enzymatic Nucleic Acid
  misc_feature (31)..(31): n stands for inosine
ccgggaggcugaugaggccguuaggccgaanucguccg

SEQ ID NO: 8444 - RNA, 38 nt, Artificial Sequence
  Description of Artificial Sequence:  Enzymatic Nucleic Acid
  misc_feature (31)..(31): n stands for inosine
cccgggagcugaugaggccguuaggccgaangucgucc

SEQ ID NO: 8445 - RNA, 38 nt, Artificial Sequence
  Description of Artificial Sequence:  Enzymatic Nucleic Acid
  misc_feature (31)..(31): n stands for inosine
ccccgggacugaugaggccguuaggccgaanggucguc

SEQ ID NO: 8446 - RNA, 38 nt, Artificial Sequence
  Description of Artificial Sequence:  Enzymatic Nucleic Acid
  misc_feature (31)..(31): n stands for inosine
gccccgggcugaugaggccguuaggccgaangggucgu

SEQ ID NO: 8447 - RNA, 38 nt, Artificial Sequence
  Description of Artificial Sequence:  Enzymatic Nucleic Acid
  misc_feature (31)..(31): n stands for inosine
cggccccgcugaugaggccguuaggccgaanagggguc

SEQ ID NO: 8448 - RNA, 38 nt, Artificial Sequence
  Description of Artificial Sequence:  Enzymatic Nucleic Acid
  misc_feature (31)..(31): n stands for inosine
gcggcccccugaugaggccguuaggccgaangaggggu

SEQ ID NO: 8449 - RNA, 38 nt, Artificial Sequence
  Description of Artificial Sequence:  Enzymatic Nucleic Acid
  misc_feature (31)..(31): n stands for inosine
ccccaagccugaugaggccguuaggccgaanccccggg

SEQ ID NO: 8450 - RNA, 38 nt, Artificial Sequence
  Description of Artificial Sequence:  Enzymatic Nucleic Acid
  misc_feature (31)..(31): n stands for inosine
gagccccacugaugaggccguuaggccgaancggcccc

SEQ ID NO: 8451 - RNA, 38 nt, Artificial Sequence
  Description of Artificial Sequence:  Enzymatic Nucleic Acid
  misc_feature (31)..(31): n stands for inosine
ggcgguagcugaugaggccguuaggccgaanccccaag

SEQ ID NO: 8452 - RNA, 38 nt, Artificial Sequence
  Description of Artificial Sequence:  Enzymatic Nucleic Acid
  misc_feature (31)..(31): n stands for inosine
cgggcggucugaugaggccguuaggccgaanagcccca

SEQ ID NO: 8453 - RNA, 38 nt, Artificial Sequence
  Description of Artificial Sequence:  Enzymatic Nucleic Acid
  misc_feature (31)..(31): n stands for inosine
aagcgggccugaugaggccguuaggccgaanuagagcc

SEQ ID NO: 8454 - RNA, 38 nt, Artificial Sequence
  Description of Artificial Sequence:  Enzymatic Nucleic Acid
  misc_feature (31)..(31): n stands for inosine
gagaagcgcugaugaggccguuaggccgaancgguaga

SEQ ID NO: 8455 - RNA, 38 nt, Artificial Sequence
  Description of Artificial Sequence:  Enzymatic Nucleic Acid
  misc_feature (31)..(31): n stands for inosine
ggagaagccugaugaggccguuaggccgaangcgguag

SEQ ID NO: 8456 - RNA, 38 nt, Artificial Sequence
  Description of Artificial Sequence:  Enzymatic Nucleic Acid
  misc_feature (31)..(31): n stands for inosine
ggcggagacugaugaggccguuaggccgaancgggcgg

SEQ ID NO: 8457 - RNA, 38 nt, Artificial Sequence
  Description of Artificial Sequence:  Enzymatic Nucleic Acid
  misc_feature (31)..(31): n stands for inosine
auaggcggcugaugaggccguuaggccgaanaagcggg

SEQ ID NO: 8458 - RNA, 38 nt, Artificial Sequence
  Description of Artificial Sequence:  Enzymatic Nucleic Acid
  misc_feature (31)..(31): n stands for inosine
caauaggccugaugaggccguuaggccgaanagaagcg

SEQ ID NO: 8459 - RNA, 38 nt, Artificial Sequence
  Description of Artificial Sequence:  Enzymatic Nucleic Acid
  misc_feature (31)..(31): n stands for inosine
guacaauacugaugaggccguuaggccgaancggagaa

SEQ ID NO: 8460 - RNA, 38 nt, Artificial Sequence
  Description of Artificial Sequence:  Enzymatic Nucleic Acid
  misc_feature (31)..(31): n stands for inosine
gguacaaucugaugaggccguuaggccgaangcggaga

SEQ ID NO: 8461 - RNA, 38 nt, Artificial Sequence
  Description of Artificial Sequence:  Enzymatic Nucleic Acid
  misc_feature (31)..(31): n stands for inosine
ggacgguccugaugaggccguuaggccgaanuacaaua

SEQ ID NO: 8462 - RNA, 38 nt, Artificial Sequence
  Description of Artificial Sequence:  Enzymatic Nucleic Acid
  misc_feature (31)..(31): n stands for inosine
ccguggaccugaugaggccguuaggccgaanucgguac

SEQ ID NO: 8463 - RNA, 38 nt, Artificial Sequence
  Description of Artificial Sequence:  Enzymatic Nucleic Acid
  misc_feature (31)..(31): n stands for inosine
cgccccgucugaugaggccguuaggccgaanacggucg

SEQ ID NO: 8464 - RNA, 38 nt, Artificial Sequence
  Description of Artificial Sequence:  Enzymatic Nucleic Acid
  misc_feature (31)..(31): n stands for inosine
gcgccccgcugaugaggccguuaggccgaangacgguc

SEQ ID NO: 8465 - RNA, 38 nt, Artificial Sequence
  Description of Artificial Sequence:  Enzymatic Nucleic Acid
  misc_feature (31)..(31): n stands for inosine
aagagaggcugaugaggccguuaggccgaancgccccg

SEQ ID NO: 8466 - RNA, 38 nt, Artificial Sequence
  Description of Artificial Sequence:  Enzymatic Nucleic Acid
  misc_feature (31)..(31): n stands for inosine
uaaagagacugaugaggccguuaggccgaanugcgccc

SEQ ID NO: 8467 - RNA, 38 nt, Artificial Sequence
  Description of Artificial Sequence:  Enzymatic Nucleic Acid
  misc_feature (31)..(31): n stands for inosine
guaaagagcugaugaggccguuaggccgaangugcgcc

SEQ ID NO: 8468 - RNA, 38 nt, Artificial Sequence
  Description of Artificial Sequence:  Enzymatic Nucleic Acid
  misc_feature (31)..(31): n stands for inosine
gcguaaagcugaugaggccguuaggccgaanaggugcg

SEQ ID NO: 8469 - RNA, 38 nt, Artificial Sequence
  Description of Artificial Sequence:  Enzymatic Nucleic Acid
  misc_feature (31)..(31): n stands for inosine
ccgcguaacugaugaggccguuaggccgaanagaggug

SEQ ID NO: 8470 - RNA, 38 nt, Artificial Sequence
  Description of Artificial Sequence:  Enzymatic Nucleic Acid
  misc_feature (31)..(31): n stands for inosine
agacggggcugaugaggccguuaggccgaanuccgcgu

SEQ ID NO: 8471 - RNA, 38 nt, Artificial Sequence
  Description of Artificial Sequence:  Enzymatic Nucleic Acid
  misc_feature (31)..(31): n stands for inosine
acagacggcugaugaggccguuaggccgaanaguccgc

SEQ ID NO: 8472 - RNA, 38 nt, Artificial Sequence
  Description of Artificial Sequence:  Enzymatic Nucleic Acid
  misc_feature (31)..(31): n stands for inosine
cacagacgcugaugaggccguuaggccgaangaguccg

SEQ ID NO: 8473 - RNA, 38 nt, Artificial Sequence
  Description of Artificial Sequence:  Enzymatic Nucleic Acid
  misc_feature (31)..(31): n stands for inosine
gcacagaccugaugaggccguuaggccgaanggagucc

SEQ ID NO: 8474 - RNA, 38 nt, Artificial Sequence
  Description of Artificial Sequence:  Enzymatic Nucleic Acid
  misc_feature (31)..(31): n stands for inosine
gaaggcaccugaugaggccguuaggccgaanacgggga

SEQ ID NO: 8475 - RNA, 38 nt, Artificial Sequence
  Description of Artificial Sequence:  Enzymatic Nucleic Acid
  misc_feature (31)..(31): n stands for inosine
gaugagaacugaugaggccguuaggccgaancacagac

SEQ ID NO: 8476 - RNA, 38 nt, Artificial Sequence
  Description of Artificial Sequence:  Enzymatic Nucleic Acid
  misc_feature (31)..(31): n stands for inosine
agaugagacugaugaggccguuaggccgaangcacaga

SEQ ID NO: 8477 - RNA, 38 nt, Artificial Sequence
  Description of Artificial Sequence:  Enzymatic Nucleic Acid
  misc_feature (31)..(31): n stands for inosine
ggcagaugcugaugaggccguuaggccgaanaaggcac

SEQ ID NO: 8478 - RNA, 38 nt, Artificial Sequence
  Description of Artificial Sequence:  Enzymatic Nucleic Acid
  misc_feature (31)..(31): n stands for inosine
ccggcagacugaugaggccguuaggccgaanagaaggc

SEQ ID NO: 8479 - RNA, 38 nt, Artificial Sequence
  Description of Artificial Sequence:  Enzymatic Nucleic Acid
  misc_feature (31)..(31): n stands for inosine
gguccggccugaugaggccguuaggccgaanaugagaa

SEQ ID NO: 8480 - RNA, 38 nt, Artificial Sequence
  Description of Artificial Sequence:  Enzymatic Nucleic Acid
  misc_feature (31)..(31): n stands for inosine
cacggucccugaugaggccguuaggccgaancagauga

SEQ ID NO: 8481 - RNA, 38 nt, Artificial Sequence
  Description of Artificial Sequence:  Enzymatic Nucleic Acid
  misc_feature (31)..(31): n stands for inosine
gugcacaccugaugaggccguuaggccgaanuccggca

SEQ ID NO: 8482 - RNA, 38 nt, Artificial Sequence
  Description of Artificial Sequence:  Enzymatic Nucleic Acid
  misc_feature (31)..(31): n stands for inosine
aagcgaagcugaugaggccguuaggccgaancacacgg

SEQ ID NO: 8483 - RNA, 38 nt, Artificial Sequence
  Description of Artificial Sequence:  Enzymatic Nucleic Acid
  misc_feature (31)..(31): n stands for inosine
ugaagcgacugaugaggccguuaggccgaanugcacac

SEQ ID NO: 8484 - RNA, 38 nt, Artificial Sequence
  Description of Artificial Sequence:  Enzymatic Nucleic Acid
  misc_feature (31)..(31): n stands for inosine
agaggugacugaugaggccguuaggccgaancgaagug

SEQ ID NO: 8485 - RNA, 38 nt, Artificial Sequence
  Description of Artificial Sequence:  Enzymatic Nucleic Acid
  misc_feature (31)..(31): n stands for inosine
ugcagaggcugaugaggccguuaggccgaanaagcgaa

SEQ ID NO: 8486 - RNA, 38 nt, Artificial Sequence
  Description of Artificial Sequence:  Enzymatic Nucleic Acid
  misc_feature (31)..(31): n stands for inosine
cgugcagacugaugaggccguuaggccgaanugaagcg

SEQ ID NO: 8487 - RNA, 38 nt, Artificial Sequence
  Description of Artificial Sequence:  Enzymatic Nucleic Acid
  misc_feature (31)..(31): n stands for inosine
acgugcagcugaugaggccguuaggccgaangugaagc

SEQ ID NO: 8488 - RNA, 38 nt, Artificial Sequence
  Description of Artificial Sequence:  Enzymatic Nucleic Acid
  misc_feature (31)..(31): n stands for inosine
cgacgugccugaugaggccguuaggccgaanaggugaa

SEQ ID NO: 8489 - RNA, 38 nt, Artificial Sequence
  Description of Artificial Sequence:  Enzymatic Nucleic Acid
  misc_feature (31)..(31): n stands for inosine
augcgacgcugaugaggccguuaggccgaancagaggu

SEQ ID NO: 8490 - RNA, 38 nt, Artificial Sequence
  Description of Artificial Sequence:  Enzymatic Nucleic Acid
  misc_feature (31)..(31): n stands for inosine
ggucuccacugaugaggccguuaggccgaancgacgug

SEQ ID NO: 8491 - RNA, 38 nt, Artificial Sequence
  Description of Artificial Sequence:  Enzymatic Nucleic Acid
  misc_feature (31)..(31): n stands for inosine
uucacggucugaugaggccguuaggccgaanucuccau

SEQ ID NO: 8492 - RNA, 38 nt, Artificial Sequence
  Description of Artificial Sequence:  Enzymatic Nucleic Acid
  misc_feature (31)..(31): n stands for inosine
guucacggcugaugaggccguuaggccgaangucucca

SEQ ID NO: 8493 - RNA, 38 nt, Artificial Sequence
  Description of Artificial Sequence:  Enzymatic Nucleic Acid
  misc_feature (31)..(31): n stands for inosine
gcguucaccugaugaggccguuaggccgaanuggucuc

SEQ ID NO: 8494 - RNA, 38 nt, Artificial Sequence
  Description of Artificial Sequence:  Enzymatic Nucleic Acid
  misc_feature (31)..(31): n stands for inosine
uuccugugcugaugaggccguuaggccgaancguucac

SEQ ID NO: 8495 - RNA, 38 nt, Artificial Sequence
  Description of Artificial Sequence:  Enzymatic Nucleic Acid
  misc_feature (31)..(31): n stands for inosine
guuccugucugaugaggccguuaggccgaangcguuca

SEQ ID NO: 8496 - RNA, 38 nt, Artificial Sequence
  Description of Artificial Sequence:  Enzymatic Nucleic Acid
  misc_feature (31)..(31): n stands for inosine
gguuccugcugaugaggccguuaggccgaanggcguuc

SEQ ID NO: 8497 - RNA, 38 nt, Artificial Sequence
  Description of Artificial Sequence:  Enzymatic Nucleic Acid
  misc_feature (31)..(31): n stands for inosine
cagguucccugaugaggccguuaggccgaanugggcgu

SEQ ID NO: 8498 - RNA, 38 nt, Artificial Sequence
  Description of Artificial Sequence:  Enzymatic Nucleic Acid
  misc_feature (31)..(31): n stands for inosine
cuugggcacugaugaggccguuaggccgaanuuccugu

SEQ ID NO: 8499 - RNA, 38 nt, Artificial Sequence
  Description of Artificial Sequence:  Enzymatic Nucleic Acid
  misc_feature (31)..(31): n stands for inosine
ccuugggccugaugaggccguuaggccgaanguuccug

SEQ ID NO: 8500 - RNA, 38 nt, Artificial Sequence
  Description of Artificial Sequence:  Enzymatic Nucleic Acid
  misc_feature (31)..(31): n stands for inosine
agaccuugcugaugaggccguuaggccgaancagguuc

SEQ ID NO: 8501 - RNA, 38 nt, Artificial Sequence
  Description of Artificial Sequence:  Enzymatic Nucleic Acid
  misc_feature (31)..(31): n stands for inosine
aagaccuucugaugaggccguuaggccgaangcagguu

SEQ ID NO: 8502 - RNA, 38 nt, Artificial Sequence
  Description of Artificial Sequence:  Enzymatic Nucleic Acid
  misc_feature (31)..(31): n stands for inosine
caagaccucugaugaggccguuaggccgaanggcaggu

SEQ ID NO: 8503 - RNA, 38 nt, Artificial Sequence
  Description of Artificial Sequence:  Enzymatic Nucleic Acid
  misc_feature (31)..(31): n stands for inosine
cuuaugcacugaugaggccguuaggccgaanaccuugg

SEQ ID NO: 8504 - RNA, 38 nt, Artificial Sequence
  Description of Artificial Sequence:  Enzymatic Nucleic Acid
  misc_feature (31)..(31): n stands for inosine
uccucuuacugaugaggccguuaggccgaancaagacc

SEQ ID NO: 8505 - RNA, 38 nt, Artificial Sequence
  Description of Artificial Sequence:  Enzymatic Nucleic Acid
  misc_feature (31)..(31): n stands for inosine
aguccaagcugaugaggccguuaggccgaanuccucuu

SEQ ID NO: 8506 - RNA, 38 nt, Artificial Sequence
  Description of Artificial Sequence:  Enzymatic Nucleic Acid
  misc_feature (31)..(31): n stands for inosine
aaaguccacugaugaggccguuaggccgaanaguccuc

SEQ ID NO: 8507 - RNA, 38 nt, Artificial Sequence
  Description of Artificial Sequence:  Enzymatic Nucleic Acid
  misc_feature (31)..(31): n stands for inosine
uugcugaacugaugaggccguuaggccgaanuccaaga

SEQ ID NO: 8508 - RNA, 38 nt, Artificial Sequence
  Description of Artificial Sequence:  Enzymatic Nucleic Acid
  misc_feature (31)..(31): n stands for inosine
gacauugccugaugaggccguuaggccgaanaaagucc

SEQ ID NO: 8509 - RNA, 38 nt, Artificial Sequence
  Description of Artificial Sequence:  Enzymatic Nucleic Acid
  misc_feature (31)..(31): n stands for inosine
guugacaucugaugaggccguuaggccgaancugaaag

SEQ ID NO: 8510 - RNA, 38 nt, Artificial Sequence
  Description of Artificial Sequence:  Enzymatic Nucleic Acid
  misc_feature (31)..(31): n stands for inosine
ucggucgucugaugaggccguuaggccgaanacauugc

SEQ ID NO: 8511 - RNA, 38 nt, Artificial Sequence
  Description of Artificial Sequence:  Enzymatic Nucleic Acid
  misc_feature (31)..(31): n stands for inosine
ucaagguccugaugaggccguuaggccgaanucguuga

SEQ ID NO: 8512 - RNA, 38 nt, Artificial Sequence
  Description of Artificial Sequence:  Enzymatic Nucleic Acid
  misc_feature (31)..(31): n stands for inosine
ugccucaacugaugaggccguuaggccgaanucggucg

SEQ ID NO: 8513 - RNA, 38 nt, Artificial Sequence
  Description of Artificial Sequence:  Enzymatic Nucleic Acid
  misc_feature (31)..(31): n stands for inosine
augccucacugaugaggccguuaggccgaangucgguc

SEQ ID NO: 8514 - RNA, 38 nt, Artificial Sequence
  Description of Artificial Sequence:  Enzymatic Nucleic Acid
  misc_feature (31)..(31): n stands for inosine
uugaaguacugaugaggccguuaggccgaanccucaag

SEQ ID NO: 8515 - RNA, 38 nt, Artificial Sequence
  Description of Artificial Sequence:  Enzymatic Nucleic Acid
  misc_feature (31)..(31): n stands for inosine
gucuuugacugaugaggccguuaggccgaanuaugccu

SEQ ID NO: 8516 - RNA, 38 nt, Artificial Sequence
  Description of Artificial Sequence:  Enzymatic Nucleic Acid
  misc_feature (31)..(31): n stands for inosine
acagucuucugaugaggccguuaggccgaanaaguaug

SEQ ID NO: 8517 - RNA, 38 nt, Artificial Sequence
  Description of Artificial Sequence:  Enzymatic Nucleic Acid
  misc_feature (31)..(31): n stands for inosine
aaacacaccugaugaggccguuaggccgaanucuuuga

SEQ ID NO: 8518 - RNA, 38 nt, Artificial Sequence
  Description of Artificial Sequence:  Enzymatic Nucleic Acid
  misc_feature (31)..(31): n stands for inosine
uaguacaacugaugaggccguuaggccgaanaccuuua

SEQ ID NO: 8519 - RNA, 38 nt, Artificial Sequence
  Description of Artificial Sequence:  Enzymatic Nucleic Acid
  misc_feature (31)..(31): n stands for inosine
agccuccucugaugaggccguuaggccgaanuacaaag

SEQ ID NO: 8520 - RNA, 38 nt, Artificial Sequence
  Description of Artificial Sequence:  Enzymatic Nucleic Acid
  misc_feature (31)..(31): n stands for inosine
augccuaccugaugaggccguuaggccgaanccuccua

SEQ ID NO: 8521 - RNA, 38 nt, Artificial Sequence
  Description of Artificial Sequence:  Enzymatic Nucleic Acid
  misc_feature (31)..(31): n stands for inosine
ccaauuuacugaugaggccguuaggccgaanccuacag

SEQ ID NO: 8522 - RNA, 38 nt, Artificial Sequence
  Description of Artificial Sequence:  Enzymatic Nucleic Acid
  misc_feature (31)..(31): n stands for inosine
ggugcuggcugaugaggccguuaggccgaanaacacac

SEQ ID NO: 8523 - RNA, 38 nt, Artificial Sequence
  Description of Artificial Sequence:  Enzymatic Nucleic Acid
  misc_feature (31)..(31): n stands for inosine
auggugcucugaugaggccguuaggccgaanugaacac

SEQ ID NO: 8524 - RNA, 38 nt, Artificial Sequence
  Description of Artificial Sequence:  Enzymatic Nucleic Acid
  misc_feature (31)..(31): n stands for inosine
cauggugccugaugaggccguuaggccgaangugaaca

SEQ ID NO: 8525 - RNA, 38 nt, Artificial Sequence
  Description of Artificial Sequence:  Enzymatic Nucleic Acid
  misc_feature (31)..(31): n stands for inosine
uugcauggcugaugaggccguuaggccgaancugguga

SEQ ID NO: 8526 - RNA, 38 nt, Artificial Sequence
  Description of Artificial Sequence:  Enzymatic Nucleic Acid
  misc_feature (31)..(31): n stands for inosine
aguugcaucugaugaggccguuaggccgaanugcuggu

SEQ ID NO: 8527 - RNA, 38 nt, Artificial Sequence
  Description of Artificial Sequence:  Enzymatic Nucleic Acid
  misc_feature (31)..(31): n stands for inosine
aaguugcacugaugaggccguuaggccgaangugcugg

SEQ ID NO: 8528 - RNA, 38 nt, Artificial Sequence
  Description of Artificial Sequence:  Enzymatic Nucleic Acid
  misc_feature (31)..(31): n stands for inosine
gaaaaagucugaugaggccguuaggccgaancauggug

SEQ ID NO: 8529 - RNA, 38 nt, Artificial Sequence
  Description of Artificial Sequence:  Enzymatic Nucleic Acid
  misc_feature (31)..(31): n stands for inosine
ggugaaaacugaugaggccguuaggccgaanuugcaug

SEQ ID NO: 8530 - RNA, 38 nt, Artificial Sequence
  Description of Artificial Sequence:  Enzymatic Nucleic Acid
  misc_feature (31)..(31): n stands for inosine
ggcagaggcugaugaggccguuaggccgaanaaaaagu

SEQ ID NO: 8531 - RNA, 38 nt, Artificial Sequence
  Description of Artificial Sequence:  Enzymatic Nucleic Acid
  misc_feature (31)..(31): n stands for inosine
uaggcagacugaugaggccguuaggccgaanugaaaaa

SEQ ID NO: 8532 - RNA, 38 nt, Artificial Sequence
  Description of Artificial Sequence:  Enzymatic Nucleic Acid
  misc_feature (31)..(31): n stands for inosine
uuaggcagcugaugaggccguuaggccgaangugaaaa

SEQ ID NO: 8533 - RNA, 38 nt, Artificial Sequence
  Description of Artificial Sequence:  Enzymatic Nucleic Acid
  misc_feature (31)..(31): n stands for inosine
gauuaggccugaugaggccguuaggccgaanaggugaa

SEQ ID NO: 8534 - RNA, 38 nt, Artificial Sequence
  Description of Artificial Sequence:  Enzymatic Nucleic Acid
  misc_feature (31)..(31): n stands for inosine
gaugauuacugaugaggccguuaggccgaancagaggu

SEQ ID NO: 8535 - RNA, 38 nt, Artificial Sequence
  Description of Artificial Sequence:  Enzymatic Nucleic Acid
  misc_feature (31)..(31): n stands for inosine
agaugauucugaugaggccguuaggccgaangcagagg

SEQ ID NO: 8536 - RNA, 38 nt, Artificial Sequence
  Description of Artificial Sequence:  Enzymatic Nucleic Acid
  misc_feature (31)..(31): n stands for inosine
acaugagacugaugaggccguuaggccgaanauuaggc

SEQ ID NO: 8537 - RNA, 38 nt, Artificial Sequence
  Description of Artificial Sequence:  Enzymatic Nucleic Acid
  misc_feature (31)..(31): n stands for inosine
ugaacaugcugaugaggccguuaggccgaanaugauua

SEQ ID NO: 8538 - RNA, 38 nt, Artificial Sequence
  Description of Artificial Sequence:  Enzymatic Nucleic Acid
  misc_feature (31)..(31): n stands for inosine
caugaacacugaugaggccguuaggccgaanagaugau

SEQ ID NO: 8539 - RNA, 38 nt, Artificial Sequence
  Description of Artificial Sequence:  Enzymatic Nucleic Acid
  misc_feature (31)..(31): n stands for inosine
guaggacacugaugaggccguuaggccgaanaacauga

SEQ ID NO: 8540 - RNA, 38 nt, Artificial Sequence
  Description of Artificial Sequence:  Enzymatic Nucleic Acid
  misc_feature (31)..(31): n stands for inosine
gaacaguacugaugaggccguuaggccgaanacaugaa

SEQ ID NO: 8541 - RNA, 38 nt, Artificial Sequence
  Description of Artificial Sequence:  Enzymatic Nucleic Acid
  misc_feature (31)..(31): n stands for inosine
ugaacagucugaugaggccguuaggccgaangacauga

SEQ ID NO: 8542 - RNA, 38 nt, Artificial Sequence
  Description of Artificial Sequence:  Enzymatic Nucleic Acid
  misc_feature (31)..(31): n stands for inosine
gcuugaaccugaugaggccguuaggccgaanuaggaca

SEQ ID NO: 8543 - RNA, 38 nt, Artificial Sequence
  Description of Artificial Sequence:  Enzymatic Nucleic Acid
  misc_feature (31)..(31): n stands for inosine
uggaggcucugaugaggccguuaggccgaanaacagua

SEQ ID NO: 8544 - RNA, 38 nt, Artificial Sequence
  Description of Artificial Sequence:  Enzymatic Nucleic Acid
  misc_feature (31)..(31): n stands for inosine
agcuuggacugaugaggccguuaggccgaancuugaac

SEQ ID NO: 8545 - RNA, 38 nt, Artificial Sequence
  Description of Artificial Sequence:  Enzymatic Nucleic Acid
  misc_feature (31)..(31): n stands for inosine
cagcuuggcugaugaggccguuaggccgaangcuugaa

SEQ ID NO: 8546 - RNA, 38 nt, Artificial Sequence
  Description of Artificial Sequence:  Enzymatic Nucleic Acid
  misc_feature (31)..(31): n stands for inosine
cacagcuucugaugaggccguuaggccgaanaggcuug

SEQ ID NO: 8547 - RNA, 38 nt, Artificial Sequence
  Description of Artificial Sequence:  Enzymatic Nucleic Acid
  misc_feature (31)..(31): n stands for inosine
gcacagcucugaugaggccguuaggccgaangaggcuu

SEQ ID NO: 8548 - RNA, 38 nt, Artificial Sequence
  Description of Artificial Sequence:  Enzymatic Nucleic Acid
  misc_feature (31)..(31): n stands for inosine
caaggcaccugaugaggccguuaggccgaancuuggag

SEQ ID NO: 8549 - RNA, 38 nt, Artificial Sequence
  Description of Artificial Sequence:  Enzymatic Nucleic Acid
  misc_feature (31)..(31): n stands for inosine
ccacccaacugaugaggccguuaggccgaancacagcu

SEQ ID NO: 8550 - RNA, 38 nt, Artificial Sequence
  Description of Artificial Sequence:  Enzymatic Nucleic Acid
  misc_feature (31)..(31): n stands for inosine
gccacccacugaugaggccguuaggccgaangcacagc

SEQ ID NO: 8551 - RNA, 38 nt, Artificial Sequence
  Description of Artificial Sequence:  Enzymatic Nucleic Acid
  misc_feature (31)..(31): n stands for inosine
ugccccaacugaugaggccguuaggccgaanccaccca

SEQ ID NO: 8552 - RNA, 38 nt, Artificial Sequence
  Description of Artificial Sequence:  Enzymatic Nucleic Acid
  misc_feature (31)..(31): n stands for inosine
aauguccacugaugaggccguuaggccgaanccccaaa

SEQ ID NO: 8553 - RNA, 38 nt, Artificial Sequence
  Description of Artificial Sequence:  Enzymatic Nucleic Acid
  misc_feature (31)..(31): n stands for inosine
cgggucaacugaugaggccguuaggccgaanuccaugc

SEQ ID NO: 8554 - RNA, 38 nt, Artificial Sequence
  Description of Artificial Sequence:  Enzymatic Nucleic Acid
  misc_feature (31)..(31): n stands for inosine
uuuauacgcugaugaggccguuaggccgaanucaaugu

SEQ ID NO: 8555 - RNA, 38 nt, Artificial Sequence
  Description of Artificial Sequence:  Enzymatic Nucleic Acid
  misc_feature (31)..(31): n stands for inosine
cuuuauaccugaugaggccguuaggccgaangucaaug

SEQ ID NO: 8556 - RNA, 38 nt, Artificial Sequence
  Description of Artificial Sequence:  Enzymatic Nucleic Acid
  misc_feature (31)..(31): n stands for inosine
uccacagacugaugaggccguuaggccgaancuccaaa

SEQ ID NO: 8557 - RNA, 38 nt, Artificial Sequence
  Description of Artificial Sequence:  Enzymatic Nucleic Acid
  misc_feature (31)..(31): n stands for inosine
aacuccaccugaugaggccguuaggccgaanaagcucc

SEQ ID NO: 8558 - RNA, 38 nt, Artificial Sequence
  Description of Artificial Sequence:  Enzymatic Nucleic Acid
  misc_feature (31)..(31): n stands for inosine
aaaaagagcugaugaggccguuaggccgaanuaacucc

SEQ ID NO: 8559 - RNA, 38 nt, Artificial Sequence
  Description of Artificial Sequence:  Enzymatic Nucleic Acid
  misc_feature (31)..(31): n stands for inosine
caaaaaagcugaugaggccguuaggccgaanaguaacu

SEQ ID NO: 8560 - RNA, 38 nt, Artificial Sequence
  Description of Artificial Sequence:  Enzymatic Nucleic Acid
  misc_feature (31)..(31): n stands for inosine
ggcaaaaacugaugaggccguuaggccgaanagaguaa

SEQ ID NO: 8561 - RNA, 38 nt, Artificial Sequence
  Description of Artificial Sequence:  Enzymatic Nucleic Acid
  misc_feature (31)..(31): n stands for inosine
agucagaacugaugaggccguuaggccgaancaaaaaa

SEQ ID NO: 8562 - RNA, 38 nt, Artificial Sequence
  Description of Artificial Sequence:  Enzymatic Nucleic Acid
  misc_feature (31)..(31): n stands for inosine
aagucagacugaugaggccguuaggccgaangcaaaaa

SEQ ID NO: 8563 - RNA, 38 nt, Artificial Sequence
  Description of Artificial Sequence:  Enzymatic Nucleic Acid
  misc_feature (31)..(31): n stands for inosine
aagaaguccugaugaggccguuaggccgaanaaggcaa

SEQ ID NO: 8564 - RNA, 38 nt, Artificial Sequence
  Description of Artificial Sequence:  Enzymatic Nucleic Acid
  misc_feature (31)..(31): n stands for inosine
aggaaagacugaugaggccguuaggccgaanucagaag

SEQ ID NO: 8565 - RNA, 38 nt, Artificial Sequence
  Description of Artificial Sequence:  Enzymatic Nucleic Acid
  misc_feature (31)..(31): n stands for inosine
agaaggaacugaugaggccguuaggccgaanaagucag

SEQ ID NO: 8566 - RNA, 38 nt, Artificial Sequence
  Description of Artificial Sequence:  Enzymatic Nucleic Acid
  misc_feature (31)..(31): n stands for inosine
gaauagaacugaugaggccguuaggccgaanaaagaag

SEQ ID NO: 8567 - RNA, 38 nt, Artificial Sequence
  Description of Artificial Sequence:  Enzymatic Nucleic Acid
  misc_feature (31)..(31): n stands for inosine
cgaauagacugaugaggccguuaggccgaangaaagaa

SEQ ID NO: 8568 - RNA, 38 nt, Artificial Sequence
  Description of Artificial Sequence:  Enzymatic Nucleic Acid
  misc_feature (31)..(31): n stands for inosine
ucucgaaucugaugaggccguuaggccgaanaaggaaa

SEQ ID NO: 8569 - RNA, 38 nt, Artificial Sequence
  Description of Artificial Sequence:  Enzymatic Nucleic Acid
  misc_feature (31)..(31): n stands for inosine
ugucgaggcugaugaggccguuaggccgaanaucucga

SEQ ID NO: 8570 - RNA, 38 nt, Artificial Sequence
  Description of Artificial Sequence:  Enzymatic Nucleic Acid
  misc_feature (31)..(31): n stands for inosine
ggugucgacugaugaggccguuaggccgaanagaucuc

SEQ ID NO: 8571 - RNA, 38 nt, Artificial Sequence
  Description of Artificial Sequence:  Enzymatic Nucleic Acid
  misc_feature (31)..(31): n stands for inosine
cggugucgcugaugaggccguuaggccgaangagaucu

SEQ ID NO: 8572 - RNA, 38 nt, Artificial Sequence
  Description of Artificial Sequence:  Enzymatic Nucleic Acid
  misc_feature (31)..(31): n stands for inosine
agaggcggcugaugaggccguuaggccgaanucgagga

SEQ ID NO: 8573 - RNA, 38 nt, Artificial Sequence
  Description of Artificial Sequence:  Enzymatic Nucleic Acid
  misc_feature (31)..(31): n stands for inosine
gcagaggccugaugaggccguuaggccgaanugucgag

SEQ ID NO: 8574 - RNA, 38 nt, Artificial Sequence
  Description of Artificial Sequence:  Enzymatic Nucleic Acid
  misc_feature (31)..(31): n stands for inosine
agagcagacugaugaggccguuaggccgaancgguguc

SEQ ID NO: 8575 - RNA, 38 nt, Artificial Sequence
  Description of Artificial Sequence:  Enzymatic Nucleic Acid
  misc_feature (31)..(31): n stands for inosine
cagagcagcugaugaggccguuaggccgaangcggugu

SEQ ID NO: 8576 - RNA, 38 nt, Artificial Sequence
  Description of Artificial Sequence:  Enzymatic Nucleic Acid
  misc_feature (31)..(31): n stands for inosine
uacagagccugaugaggccguuaggccgaanaggcggu

SEQ ID NO: 8577 - RNA, 38 nt, Artificial Sequence
  Description of Artificial Sequence:  Enzymatic Nucleic Acid
  misc_feature (31)..(31): n stands for inosine
cgauacagcugaugaggccguuaggccgaancagaggc

SEQ ID NO: 8578 - RNA, 38 nt, Artificial Sequence
  Description of Artificial Sequence:  Enzymatic Nucleic Acid
  misc_feature (31)..(31): n stands for inosine
cccgauaccugaugaggccguuaggccgaanagcagag

SEQ ID NO: 8579 - RNA, 38 nt, Artificial Sequence
  Description of Artificial Sequence:  Enzymatic Nucleic Acid
  misc_feature (31)..(31): n stands for inosine
gacucuaacugaugaggccguuaggccgaanccccccg

SEQ ID NO: 8580 - RNA, 38 nt, Artificial Sequence
  Description of Artificial Sequence:  Enzymatic Nucleic Acid
  misc_feature (31)..(31): n stands for inosine
agacucuacugaugaggccguuaggccgaangcccccc

SEQ ID NO: 8581 - RNA, 38 nt, Artificial Sequence
  Description of Artificial Sequence:  Enzymatic Nucleic Acid
  misc_feature (31)..(31): n stands for inosine
uguuccggcugaugaggccguuaggccgaanacucuaa

SEQ ID NO: 8582 - RNA, 38 nt, Artificial Sequence
  Description of Artificial Sequence:  Enzymatic Nucleic Acid
  misc_feature (31)..(31): n stands for inosine
aauguucccugaugaggccguuaggccgaanagacucu

SEQ ID NO: 8583 - RNA, 38 nt, Artificial Sequence
  Description of Artificial Sequence:  Enzymatic Nucleic Acid
  misc_feature (31)..(31): n stands for inosine
gugaacaacugaugaggccguuaggccgaanuuccgga

SEQ ID NO: 8584 - RNA, 38 nt, Artificial Sequence
  Description of Artificial Sequence:  Enzymatic Nucleic Acid
  misc_feature (31)..(31): n stands for inosine
uggugaggcugaugaggccguuaggccgaanaacaaug

SEQ ID NO: 8585 - RNA, 38 nt, Artificial Sequence
  Description of Artificial Sequence:  Enzymatic Nucleic Acid
  misc_feature (31)..(31): n stands for inosine
uauggugacugaugaggccguuaggccgaanugaacaa

SEQ ID NO: 8586 - RNA, 38 nt, Artificial Sequence
  Description of Artificial Sequence:  Enzymatic Nucleic Acid
  misc_feature (31)..(31): n stands for inosine
guauggugcugaugaggccguuaggccgaangugaaca

SEQ ID NO: 8587 - RNA, 38 nt, Artificial Sequence
  Description of Artificial Sequence:  Enzymatic Nucleic Acid
  misc_feature (31)..(31): n stands for inosine
ccguauggcugaugaggccguuaggccgaanaggugaa

SEQ ID NO: 8588 - RNA, 38 nt, Artificial Sequence
  Description of Artificial Sequence:  Enzymatic Nucleic Acid
  misc_feature (31)..(31): n stands for inosine
ugccguaucugaugaggccguuaggccgaanugaggug

SEQ ID NO: 8589 - RNA, 38 nt, Artificial Sequence
  Description of Artificial Sequence:  Enzymatic Nucleic Acid
  misc_feature (31)..(31): n stands for inosine
gugccguacugaugaggccguuaggccgaangugaggu

SEQ ID NO: 8590 - RNA, 38 nt, Artificial Sequence
  Description of Artificial Sequence:  Enzymatic Nucleic Acid
  misc_feature (31)..(31): n stands for inosine
ugccugagcugaugaggccguuaggccgaanccguaug

SEQ ID NO: 8591 - RNA, 38 nt, Artificial Sequence
  Description of Artificial Sequence:  Enzymatic Nucleic Acid
  misc_feature (31)..(31): n stands for inosine
cuugccugcugaugaggccguuaggccgaanugccgua

SEQ ID NO: 8592 - RNA, 38 nt, Artificial Sequence
  Description of Artificial Sequence:  Enzymatic Nucleic Acid
  misc_feature (31)..(31): n stands for inosine
agcuugcccugaugaggccguuaggccgaanagugccg

SEQ ID NO: 8593 - RNA, 38 nt, Artificial Sequence
  Description of Artificial Sequence:  Enzymatic Nucleic Acid
  misc_feature (31)..(31): n stands for inosine
gaauagcucugaugaggccguuaggccgaanccugagu

SEQ ID NO: 8594 - RNA, 38 nt, Artificial Sequence
  Description of Artificial Sequence:  Enzymatic Nucleic Acid
  misc_feature (31)..(31): n stands for inosine
cacagaaucugaugaggccguuaggccgaancuugccu

SEQ ID NO: 8595 - RNA, 38 nt, Artificial Sequence
  Description of Artificial Sequence:  Enzymatic Nucleic Acid
  misc_feature (31)..(31): n stands for inosine
cccaacaccugaugaggccguuaggccgaanaauagcu

SEQ ID NO: 8596 - RNA, 38 nt, Artificial Sequence
  Description of Artificial Sequence:  Enzymatic Nucleic Acid
  misc_feature (31)..(31): n stands for inosine
agguggcucugaugaggccguuaggccgaanauucauc

SEQ ID NO: 8597 - RNA, 38 nt, Artificial Sequence
  Description of Artificial Sequence:  Enzymatic Nucleic Acid
  misc_feature (31)..(31): n stands for inosine
acccaggucugaugaggccguuaggccgaancuagauu

SEQ ID NO: 8598 - RNA, 38 nt, Artificial Sequence
  Description of Artificial Sequence:  Enzymatic Nucleic Acid
  misc_feature (31)..(31): n stands for inosine
cacccaggcugaugaggccguuaggccgaangcuagau

SEQ ID NO: 8599 - RNA, 38 nt, Artificial Sequence
  Description of Artificial Sequence:  Enzymatic Nucleic Acid
  misc_feature (31)..(31): n stands for inosine
cccacccacugaugaggccguuaggccgaanuggcuag

SEQ ID NO: 8600 - RNA, 38 nt, Artificial Sequence
  Description of Artificial Sequence:  Enzymatic Nucleic Acid
  misc_feature (31)..(31): n stands for inosine
ucccaccccugaugaggccguuaggccgaanguggcua

SEQ ID NO: 8601 - RNA, 38 nt, Artificial Sequence
  Description of Artificial Sequence:  Enzymatic Nucleic Acid
  misc_feature (31)..(31): n stands for inosine
uggaugcucugaugaggccguuaggccgaanaucuucc

SEQ ID NO: 8602 - RNA, 38 nt, Artificial Sequence
  Description of Artificial Sequence:  Enzymatic Nucleic Acid
  misc_feature (31)..(31): n stands for inosine
cuggaugccugaugaggccguuaggccgaangaucuuc

SEQ ID NO: 8603 - RNA, 38 nt, Artificial Sequence
  Description of Artificial Sequence:  Enzymatic Nucleic Acid
  misc_feature (31)..(31): n stands for inosine
ucccuggacugaugaggccguuaggccgaancuggauc

SEQ ID NO: 8604 - RNA, 38 nt, Artificial Sequence
  Description of Artificial Sequence:  Enzymatic Nucleic Acid
  misc_feature (31)..(31): n stands for inosine
aauucccucugaugaggccguuaggccgaanaugcugg

SEQ ID NO: 8605 - RNA, 38 nt, Artificial Sequence
  Description of Artificial Sequence:  Enzymatic Nucleic Acid
  misc_feature (31)..(31): n stands for inosine
uaauuccccugaugaggccguuaggccgaangaugcug

SEQ ID NO: 8606 - RNA, 38 nt, Artificial Sequence
  Description of Artificial Sequence:  Enzymatic Nucleic Acid
  misc_feature (31)..(31): n stands for inosine
gacauagccugaugaggccguuaggccgaanacuacua

SEQ ID NO: 8607 - RNA, 38 nt, Artificial Sequence
  Description of Artificial Sequence:  Enzymatic Nucleic Acid
  misc_feature (31)..(31): n stands for inosine
guugacaucugaugaggccguuaggccgaancugacua

SEQ ID NO: 8608 - RNA, 38 nt, Artificial Sequence
  Description of Artificial Sequence:  Enzymatic Nucleic Acid
  misc_feature (31)..(31): n stands for inosine
auuaacgucugaugaggccguuaggccgaanacauagc

SEQ ID NO: 8609 - RNA, 38 nt, Artificial Sequence
  Description of Artificial Sequence:  Enzymatic Nucleic Acid
  misc_feature (31)..(31): n stands for inosine
gauuuuuacugaugaggccguuaggccgaancccauau

SEQ ID NO: 8610 - RNA, 38 nt, Artificial Sequence
  Description of Artificial Sequence:  Enzymatic Nucleic Acid
  misc_feature (31)..(31): n stands for inosine
ugauuuuucugaugaggccguuaggccgaangcccaua

SEQ ID NO: 8611 - RNA, 38 nt, Artificial Sequence
  Description of Artificial Sequence:  Enzymatic Nucleic Acid
  misc_feature (31)..(31): n stands for inosine
uaguuguccugaugaggccguuaggccgaanauuuuua

SEQ ID NO: 8612 - RNA, 38 nt, Artificial Sequence
  Description of Artificial Sequence:  Enzymatic Nucleic Acid
  misc_feature (31)..(31): n stands for inosine
acaauagucugaugaggccguuaggccgaanucugauu

SEQ ID NO: 8613 - RNA, 38 nt, Artificial Sequence
  Description of Artificial Sequence:  Enzymatic Nucleic Acid
  misc_feature (31)..(31): n stands for inosine
accacaaucugaugaggccguuaggccgaanuugucug

SEQ ID NO: 8614 - RNA, 38 nt, Artificial Sequence
  Description of Artificial Sequence:  Enzymatic Nucleic Acid
  misc_feature (31)..(31): n stands for inosine
aggaaaugcugaugaggccguuaggccgaanaaaccac

SEQ ID NO: 8615 - RNA, 38 nt, Artificial Sequence
  Description of Artificial Sequence:  Enzymatic Nucleic Acid
  misc_feature (31)..(31): n stands for inosine
acaggaaacugaugaggccguuaggccgaanugaaacc

SEQ ID NO: 8616 - RNA, 38 nt, Artificial Sequence
  Description of Artificial Sequence:  Enzymatic Nucleic Acid
  misc_feature (31)..(31): n stands for inosine
guaagacacugaugaggccguuaggccgaanaaaugug

SEQ ID NO: 8617 - RNA, 38 nt, Artificial Sequence
  Description of Artificial Sequence:  Enzymatic Nucleic Acid
  misc_feature (31)..(31): n stands for inosine
aguaagaccugaugaggccguuaggccgaangaaaugu

SEQ ID NO: 8618 - RNA, 38 nt, Artificial Sequence
  Description of Artificial Sequence:  Enzymatic Nucleic Acid
  misc_feature (31)..(31): n stands for inosine
caaaaguacugaugaggccguuaggccgaanacaggaa

SEQ ID NO: 8619 - RNA, 38 nt, Artificial Sequence
  Description of Artificial Sequence:  Enzymatic Nucleic Acid
  misc_feature (31)..(31): n stands for inosine
cgcccaaacugaugaggccguuaggccgaanuaagaca

SEQ ID NO: 8620 - RNA, 38 nt, Artificial Sequence
  Description of Artificial Sequence:  Enzymatic Nucleic Acid
  misc_feature (31)..(31): n stands for inosine
ucaagaaccugaugaggccguuaggccgaanuuucucg

SEQ ID NO: 8621 - RNA, 38 nt, Artificial Sequence
  Description of Artificial Sequence:  Enzymatic Nucleic Acid
  misc_feature (31)..(31): n stands for inosine
aauauucacugaugaggccguuaggccgaanaacaguu

SEQ ID NO: 8622 - RNA, 38 nt, Artificial Sequence
  Description of Artificial Sequence:  Enzymatic Nucleic Acid
  misc_feature (31)..(31): n stands for inosine
acuccaaacugaugaggccguuaggccgaanacaccaa

SEQ ID NO: 8623 - RNA, 38 nt, Artificial Sequence
  Description of Artificial Sequence:  Enzymatic Nucleic Acid
  misc_feature (31)..(31): n stands for inosine
aggaggagcugaugaggccguuaggccgaancgaaucc

SEQ ID NO: 8624 - RNA, 38 nt, Artificial Sequence
  Description of Artificial Sequence:  Enzymatic Nucleic Acid
  misc_feature (31)..(31): n stands for inosine
gcaggaggcugaugaggccguuaggccgaanugcgaau

SEQ ID NO: 8625 - RNA, 38 nt, Artificial Sequence
  Description of Artificial Sequence:  Enzymatic Nucleic Acid
  misc_feature (31)..(31): n stands for inosine
augcaggacugaugaggccguuaggccgaanagugcga

SEQ ID NO: 8626 - RNA, 38 nt, Artificial Sequence
  Description of Artificial Sequence:  Enzymatic Nucleic Acid
  misc_feature (31)..(31): n stands for inosine
uaugcaggcugaugaggccguuaggccgaangagugcg

SEQ ID NO: 8627 - RNA, 38 nt, Artificial Sequence
  Description of Artificial Sequence:  Enzymatic Nucleic Acid
  misc_feature (31)..(31): n stands for inosine
uauaugcacugaugaggccguuaggccgaanaggagug

SEQ ID NO: 8628 - RNA, 38 nt, Artificial Sequence
  Description of Artificial Sequence:  Enzymatic Nucleic Acid
  misc_feature (31)..(31): n stands for inosine
cuauaugccugaugaggccguuaggccgaangaggagu

SEQ ID NO: 8629 - RNA, 38 nt, Artificial Sequence
  Description of Artificial Sequence:  Enzymatic Nucleic Acid
  misc_feature (31)..(31): n stands for inosine
ggucuauacugaugaggccguuaggccgaancaggagg

SEQ ID NO: 8630 - RNA, 38 nt, Artificial Sequence
  Description of Artificial Sequence:  Enzymatic Nucleic Acid
  misc_feature (31)..(31): n stands for inosine
cauuuggucugaugaggccguuaggccgaanucuauau

SEQ ID NO: 8631 - RNA, 38 nt, Artificial Sequence
  Description of Artificial Sequence:  Enzymatic Nucleic Acid
  misc_feature (31)..(31): n stands for inosine
gcauuuggcugaugaggccguuaggccgaangucuaua

SEQ ID NO: 8632 - RNA, 38 nt, Artificial Sequence
  Description of Artificial Sequence:  Enzymatic Nucleic Acid
  misc_feature (31)..(31): n stands for inosine
gggcauuucugaugaggccguuaggccgaanuggucua

SEQ ID NO: 8633 - RNA, 38 nt, Artificial Sequence
  Description of Artificial Sequence:  Enzymatic Nucleic Acid
  misc_feature (31)..(31): n stands for inosine
ggggcauucugaugaggccguuaggccgaanguggucu

SEQ ID NO: 8634 - RNA, 38 nt, Artificial Sequence
  Description of Artificial Sequence:  Enzymatic Nucleic Acid
  misc_feature (31)..(31): n stands for inosine
aagauaggcugaugaggccguuaggccgaancauuugg

SEQ ID NO: 8635 - RNA, 38 nt, Artificial Sequence
  Description of Artificial Sequence:  Enzymatic Nucleic Acid
  misc_feature (31)..(31): n stands for inosine
uaagauagcugaugaggccguuaggccgaangcauuug

SEQ ID NO: 8636 - RNA, 38 nt, Artificial Sequence
  Description of Artificial Sequence:  Enzymatic Nucleic Acid
  misc_feature (31)..(31): n stands for inosine
auaagauacugaugaggccguuaggccgaanggcauuu

SEQ ID NO: 8637 - RNA, 38 nt, Artificial Sequence
  Description of Artificial Sequence:  Enzymatic Nucleic Acid
  misc_feature (31)..(31): n stands for inosine
gauaagaucugaugaggccguuaggccgaangggcauu

SEQ ID NO: 8638 - RNA, 38 nt, Artificial Sequence
  Description of Artificial Sequence:  Enzymatic Nucleic Acid
  misc_feature (31)..(31): n stands for inosine
uguugauacugaugaggccguuaggccgaanauagggg

SEQ ID NO: 8639 - RNA, 38 nt, Artificial Sequence
  Description of Artificial Sequence:  Enzymatic Nucleic Acid
  misc_feature (31)..(31): n stands for inosine
ggaagugucugaugaggccguuaggccgaanauaagau

SEQ ID NO: 8640 - RNA, 38 nt, Artificial Sequence
  Description of Artificial Sequence:  Enzymatic Nucleic Acid
  misc_feature (31)..(31): n stands for inosine
uccggaagcugaugaggccguuaggccgaanuugauaa

SEQ ID NO: 8641 - RNA, 38 nt, Artificial Sequence
  Description of Artificial Sequence:  Enzymatic Nucleic Acid
  misc_feature (31)..(31): n stands for inosine
uuuccggacugaugaggccguuaggccgaanuguugau

SEQ ID NO: 8642 - RNA, 38 nt, Artificial Sequence
  Description of Artificial Sequence:  Enzymatic Nucleic Acid
  misc_feature (31)..(31): n stands for inosine
uaguuucccugaugaggccguuaggccgaanaaguguu

SEQ ID NO: 8643 - RNA, 38 nt, Artificial Sequence
  Description of Artificial Sequence:  Enzymatic Nucleic Acid
  misc_feature (31)..(31): n stands for inosine
acaacagucugaugaggccguuaggccgaanuuuccgg

SEQ ID NO: 8644 - RNA, 38 nt, Artificial Sequence
  Description of Artificial Sequence:  Enzymatic Nucleic Acid
  misc_feature (31)..(31): n stands for inosine
cuaacaaccugaugaggccguuaggccgaanuaguuuc

SEQ ID NO: 8645 - RNA, 38 nt, Artificial Sequence
  Description of Artificial Sequence:  Enzymatic Nucleic Acid
  misc_feature (31)..(31): n stands for inosine
aggggacccugaugaggccguuaggccgaanccucuuc

SEQ ID NO: 8646 - RNA, 38 nt, Artificial Sequence
  Description of Artificial Sequence:  Enzymatic Nucleic Acid
  misc_feature (31)..(31): n stands for inosine
cuucuaggcugaugaggccguuaggccgaanaccugcc

SEQ ID NO: 8647 - RNA, 38 nt, Artificial Sequence
  Description of Artificial Sequence:  Enzymatic Nucleic Acid
  misc_feature (31)..(31): n stands for inosine
ucuucuagcugaugaggccguuaggccgaangaccugc

SEQ ID NO: 8648 - RNA, 38 nt, Artificial Sequence
  Description of Artificial Sequence:  Enzymatic Nucleic Acid
  misc_feature (31)..(31): n stands for inosine
uucuucuacugaugaggccguuaggccgaanggaccug

SEQ ID NO: 8649 - RNA, 38 nt, Artificial Sequence
  Description of Artificial Sequence:  Enzymatic Nucleic Acid
  misc_feature (31)..(31): n stands for inosine
cuucuucucugaugaggccguuaggccgaangggaccu

SEQ ID NO: 8650 - RNA, 38 nt, Artificial Sequence
  Description of Artificial Sequence:  Enzymatic Nucleic Acid
  misc_feature (31)..(31): n stands for inosine
ggcgagggcugaugaggccguuaggccgaanuucuucu

SEQ ID NO: 8651 - RNA, 38 nt, Artificial Sequence
  Description of Artificial Sequence:  Enzymatic Nucleic Acid
  misc_feature (31)..(31): n stands for inosine
gaggcgagcugaugaggccguuaggccgaanaguucuu

SEQ ID NO: 8652 - RNA, 38 nt, Artificial Sequence
  Description of Artificial Sequence:  Enzymatic Nucleic Acid
  misc_feature (31)..(31): n stands for inosine
cgaggcgacugaugaggccguuaggccgaangaguucu

SEQ ID NO: 8653 - RNA, 38 nt, Artificial Sequence
  Description of Artificial Sequence:  Enzymatic Nucleic Acid
  misc_feature (31)..(31): n stands for inosine
gcgaggcgcugaugaggccguuaggccgaanggaguuc

SEQ ID NO: 8654 - RNA, 38 nt, Artificial Sequence
  Description of Artificial Sequence:  Enzymatic Nucleic Acid
  misc_feature (31)..(31): n stands for inosine
gucugcgacugaugaggccguuaggccgaancgaggga

SEQ ID NO: 8655 - RNA, 38 nt, Artificial Sequence
  Description of Artificial Sequence:  Enzymatic Nucleic Acid
  misc_feature (31)..(31): n stands for inosine
cgucugcgcugaugaggccguuaggccgaangcgaggg

SEQ ID NO: 8656 - RNA, 38 nt, Artificial Sequence
  Description of Artificial Sequence:  Enzymatic Nucleic Acid
  misc_feature (31)..(31): n stands for inosine
ccuucguccugaugaggccguuaggccgaancgaggcg

SEQ ID NO: 8657 - RNA, 38 nt, Artificial Sequence
  Description of Artificial Sequence:  Enzymatic Nucleic Acid
  misc_feature (31)..(31): n stands for inosine
ggcgauugcugaugaggccguuaggccgaanaccuucg

SEQ ID NO: 8658 - RNA, 38 nt, Artificial Sequence
  Description of Artificial Sequence:  Enzymatic Nucleic Acid
  misc_feature (31)..(31): n stands for inosine
gcggcgaucugaugaggccguuaggccgaanagaccuu

SEQ ID NO: 8659 - RNA, 38 nt, Artificial Sequence
  Description of Artificial Sequence:  Enzymatic Nucleic Acid
  misc_feature (31)..(31): n stands for inosine
ugcgacgccugaugaggccguuaggccgaancgauuga

SEQ ID NO: 8660 - RNA, 38 nt, Artificial Sequence
  Description of Artificial Sequence:  Enzymatic Nucleic Acid
  misc_feature (31)..(31): n stands for inosine
agaucuuccugaugaggccguuaggccgaancgacgcg

SEQ ID NO: 8661 - RNA, 38 nt, Artificial Sequence
  Description of Artificial Sequence:  Enzymatic Nucleic Acid
  misc_feature (31)..(31): n stands for inosine
cgagauugcugaugaggccguuaggccgaanaucuucu

SEQ ID NO: 8662 - RNA, 38 nt, Artificial Sequence
  Description of Artificial Sequence:  Enzymatic Nucleic Acid
  misc_feature (31)..(31): n stands for inosine
cccgagaucugaugaggccguuaggccgaanagaucuu

SEQ ID NO: 8663 - RNA, 38 nt, Artificial Sequence
  Description of Artificial Sequence:  Enzymatic Nucleic Acid
  misc_feature (31)..(31): n stands for inosine
gauucccgcugaugaggccguuaggccgaanauugaga

SEQ ID NO: 8664 - RNA, 38 nt, Artificial Sequence
  Description of Artificial Sequence:  Enzymatic Nucleic Acid
  misc_feature (31)..(31): n stands for inosine
uaacauugcugaugaggccguuaggccgaanauucccg

SEQ ID NO: 8665 - RNA, 38 nt, Artificial Sequence
  Description of Artificial Sequence:  Enzymatic Nucleic Acid
  misc_feature (31)..(31): n stands for inosine
acuaacaucugaugaggccguuaggccgaanagauucc

SEQ ID NO: 8666 - RNA, 38 nt, Artificial Sequence
  Description of Artificial Sequence:  Enzymatic Nucleic Acid
  misc_feature (31)..(31): n stands for inosine
guguccaacugaugaggccguuaggccgaanaauacua

SEQ ID NO: 8667 - RNA, 38 nt, Artificial Sequence
  Description of Artificial Sequence:  Enzymatic Nucleic Acid
  misc_feature (31)..(31): n stands for inosine
uguguccacugaugaggccguuaggccgaangaauacu

SEQ ID NO: 8668 - RNA, 38 nt, Artificial Sequence
  Description of Artificial Sequence:  Enzymatic Nucleic Acid
  misc_feature (31)..(31): n stands for inosine
accuuaugcugaugaggccguuaggccgaanuccaagg

SEQ ID NO: 8669 - RNA, 38 nt, Artificial Sequence
  Description of Artificial Sequence:  Enzymatic Nucleic Acid
  misc_feature (31)..(31): n stands for inosine
ccaccuuacugaugaggccguuaggccgaanuguccaa

SEQ ID NO: 8670 - RNA, 38 nt, Artificial Sequence
  Description of Artificial Sequence:  Enzymatic Nucleic Acid
  misc_feature (31)..(31): n stands for inosine
ccccguaacugaugaggccguuaggccgaanuuuccca

SEQ ID NO: 8671 - RNA, 38 nt, Artificial Sequence
  Description of Artificial Sequence:  Enzymatic Nucleic Acid
  misc_feature (31)..(31): n stands for inosine
aagaauaacugaugaggccguuaggccgaanccccgua

SEQ ID NO: 8672 - RNA, 38 nt, Artificial Sequence
  Description of Artificial Sequence:  Enzymatic Nucleic Acid
  misc_feature (31)..(31): n stands for inosine
accguagacugaugaggccguuaggccgaanaauaaag

SEQ ID NO: 8673 - RNA, 38 nt, Artificial Sequence
  Description of Artificial Sequence:  Enzymatic Nucleic Acid
  misc_feature (31)..(31): n stands for inosine
gguaccgucugaugaggccguuaggccgaanaagaaua

SEQ ID NO: 8674 - RNA, 38 nt, Artificial Sequence
  Description of Artificial Sequence:  Enzymatic Nucleic Acid
  misc_feature (31)..(31): n stands for inosine
uaaagcaacugaugaggccguuaggccgaanuaccgua

SEQ ID NO: 8675 - RNA, 38 nt, Artificial Sequence
  Description of Artificial Sequence:  Enzymatic Nucleic Acid
  misc_feature (31)..(31): n stands for inosine
uuaaagcacugaugaggccguuaggccgaanguaccgu

SEQ ID NO: 8676 - RNA, 38 nt, Artificial Sequence
  Description of Artificial Sequence:  Enzymatic Nucleic Acid
  misc_feature (31)..(31): n stands for inosine
aggauuaacugaugaggccguuaggccgaancaaggua

SEQ ID NO: 8677 - RNA, 38 nt, Artificial Sequence
  Description of Artificial Sequence:  Enzymatic Nucleic Acid
  misc_feature (31)..(31): n stands for inosine
gccauuuacugaugaggccguuaggccgaanauuaaag

SEQ ID NO: 8678 - RNA, 38 nt, Artificial Sequence
  Description of Artificial Sequence:  Enzymatic Nucleic Acid
  misc_feature (31)..(31): n stands for inosine
ugccauuucugaugaggccguuaggccgaangauuaaa

SEQ ID NO: 8679 - RNA, 38 nt, Artificial Sequence
  Description of Artificial Sequence:  Enzymatic Nucleic Acid
  misc_feature (31)..(31): n stands for inosine
aaggaguucugaugaggccguuaggccgaanccauuua

SEQ ID NO: 8680 - RNA, 38 nt, Artificial Sequence
  Description of Artificial Sequence:  Enzymatic Nucleic Acid
  misc_feature (31)..(31): n stands for inosine
aaagaaggcugaugaggccguuaggccgaanuuugcca

SEQ ID NO: 8681 - RNA, 38 nt, Artificial Sequence
  Description of Artificial Sequence:  Enzymatic Nucleic Acid
  misc_feature (31)..(31): n stands for inosine
gaaaagaacugaugaggccguuaggccgaanaguuugc

SEQ ID NO: 8682 - RNA, 38 nt, Artificial Sequence
  Description of Artificial Sequence:  Enzymatic Nucleic Acid
  misc_feature (31)..(31): n stands for inosine
ggaaaagacugaugaggccguuaggccgaangaguuug

SEQ ID NO: 8683 - RNA, 38 nt, Artificial Sequence
  Description of Artificial Sequence:  Enzymatic Nucleic Acid
  misc_feature (31)..(31): n stands for inosine
ucaggaaacugaugaggccguuaggccgaanaaggagu

SEQ ID NO: 8684 - RNA, 38 nt, Artificial Sequence
  Description of Artificial Sequence:  Enzymatic Nucleic Acid
  misc_feature (31)..(31): n stands for inosine
gaaugucacugaugaggccguuaggccgaanaaaagaa

SEQ ID NO: 8685 - RNA, 38 nt, Artificial Sequence
  Description of Artificial Sequence:  Enzymatic Nucleic Acid
  misc_feature (31)..(31): n stands for inosine
ugaauguccugaugaggccguuaggccgaangaaaaga

SEQ ID NO: 8686 - RNA, 38 nt, Artificial Sequence
  Description of Artificial Sequence:  Enzymatic Nucleic Acid
  misc_feature (31)..(31): n stands for inosine
caaaugaacugaugaggccguuaggccgaanucaggaa

SEQ ID NO: 8687 - RNA, 38 nt, Artificial Sequence
  Description of Artificial Sequence:  Enzymatic Nucleic Acid
  misc_feature (31)..(31): n stands for inosine
ccugcaaacugaugaggccguuaggccgaanaauguca

SEQ ID NO: 8688 - RNA, 38 nt, Artificial Sequence
  Description of Artificial Sequence:  Enzymatic Nucleic Acid
  misc_feature (31)..(31): n stands for inosine
uguccucccugaugaggccguuaggccgaancaaauga

SEQ ID NO: 8689 - RNA, 38 nt, Artificial Sequence
  Description of Artificial Sequence:  Enzymatic Nucleic Acid
  misc_feature (31)..(31): n stands for inosine
aucaacaacugaugaggccguuaggccgaanuccuccu

SEQ ID NO: 8690 - RNA, 38 nt, Artificial Sequence
  Description of Artificial Sequence:  Enzymatic Nucleic Acid
  misc_feature (31)..(31): n stands for inosine
ccacaaaucugaugaggccguuaggccgaancuuacau

SEQ ID NO: 8691 - RNA, 38 nt, Artificial Sequence
  Description of Artificial Sequence:  Enzymatic Nucleic Acid
  misc_feature (31)..(31): n stands for inosine
cuguaaggcugaugaggccguuaggccgaanccccaca

SEQ ID NO: 8692 - RNA, 38 nt, Artificial Sequence
  Description of Artificial Sequence:  Enzymatic Nucleic Acid
  misc_feature (31)..(31): n stands for inosine
acuguaagcugaugaggccguuaggccgaangccccac

SEQ ID NO: 8693 - RNA, 38 nt, Artificial Sequence
  Description of Artificial Sequence:  Enzymatic Nucleic Acid
  misc_feature (31)..(31): n stands for inosine
uacuguaacugaugaggccguuaggccgaanggcccca

SEQ ID NO: 8694 - RNA, 38 nt, Artificial Sequence
  Description of Artificial Sequence:  Enzymatic Nucleic Acid
  misc_feature (31)..(31): n stands for inosine
uuacuguacugaugaggccguuaggccgaangggcccc

SEQ ID NO: 8695 - RNA, 38 nt, Artificial Sequence
  Description of Artificial Sequence:  Enzymatic Nucleic Acid
  misc_feature (31)..(31): n stands for inosine
ucauuuaccugaugaggccguuaggccgaanuaagggg

SEQ ID NO: 8696 - RNA, 38 nt, Artificial Sequence
  Description of Artificial Sequence:  Enzymatic Nucleic Acid
  misc_feature (31)..(31): n stands for inosine
aagucucccugaugaggccguuaggccgaanuuuucau

SEQ ID NO: 8697 - RNA, 38 nt, Artificial Sequence
  Description of Artificial Sequence:  Enzymatic Nucleic Acid
  misc_feature (31)..(31): n stands for inosine
uuaauuuacugaugaggccguuaggccgaanucuccug

SEQ ID NO: 8698 - RNA, 38 nt, Artificial Sequence
  Description of Artificial Sequence:  Enzymatic Nucleic Acid
  misc_feature (31)..(31): n stands for inosine
gcaggcaucugaugaggccguuaggccgaanuuaauuu

SEQ ID NO: 8699 - RNA, 38 nt, Artificial Sequence
  Description of Artificial Sequence:  Enzymatic Nucleic Acid
  misc_feature (31)..(31): n stands for inosine
accuagcacugaugaggccguuaggccgaancauaguu

SEQ ID NO: 8700 - RNA, 38 nt, Artificial Sequence
  Description of Artificial Sequence:  Enzymatic Nucleic Acid
  misc_feature (31)..(31): n stands for inosine
aaccuagccugaugaggccguuaggccgaangcauagu

SEQ ID NO: 8701 - RNA, 38 nt, Artificial Sequence
  Description of Artificial Sequence:  Enzymatic Nucleic Acid
  misc_feature (31)..(31): n stands for inosine
uaaaaccucugaugaggccguuaggccgaancaggcau

SEQ ID NO: 8702 - RNA, 38 nt, Artificial Sequence
  Description of Artificial Sequence:  Enzymatic Nucleic Acid
  misc_feature (31)..(31): n stands for inosine
uaacauugcugaugaggccguuaggccgaanauaaaac

SEQ ID NO: 8703 - RNA, 38 nt, Artificial Sequence
  Description of Artificial Sequence:  Enzymatic Nucleic Acid
  misc_feature (31)..(31): n stands for inosine
guaacauucugaugaggccguuaggccgaangauaaaa

SEQ ID NO: 8704 - RNA, 38 nt, Artificial Sequence
  Description of Artificial Sequence:  Enzymatic Nucleic Acid
  misc_feature (31)..(31): n stands for inosine
aguaacaucugaugaggccguuaggccgaanggauaaa

SEQ ID NO: 8705 - RNA, 38 nt, Artificial Sequence
  Description of Artificial Sequence:  Enzymatic Nucleic Acid
  misc_feature (31)..(31): n stands for inosine
aaauauuucugaugaggccguuaggccgaanuaacauu

SEQ ID NO: 8706 - RNA, 38 nt, Artificial Sequence
  Description of Artificial Sequence:  Enzymatic Nucleic Acid
  misc_feature (31)..(31): n stands for inosine
uaucuaagcugaugaggccguuaggccgaancaaauau

SEQ ID NO: 8707 - RNA, 38 nt, Artificial Sequence
  Description of Artificial Sequence:  Enzymatic Nucleic Acid
  misc_feature (31)..(31): n stands for inosine
uuaucuaacugaugaggccguuaggccgaangcaaaua

SEQ ID NO: 8708 - RNA, 38 nt, Artificial Sequence
  Description of Artificial Sequence:  Enzymatic Nucleic Acid
  misc_feature (31)..(31): n stands for inosine
uuuaucuacugaugaggccguuaggccgaanggcaaau

SEQ ID NO: 8709 - RNA, 38 nt, Artificial Sequence
  Description of Artificial Sequence:  Enzymatic Nucleic Acid
  misc_feature (31)..(31): n stands for inosine
auacgguucugaugaggccguuaggccgaanaucccuu

SEQ ID NO: 8710 - RNA, 38 nt, Artificial Sequence
  Description of Artificial Sequence:  Enzymatic Nucleic Acid
  misc_feature (31)..(31): n stands for inosine
gauaauaccugaugaggccguuaggccgaanuuugauc

SEQ ID NO: 8711 - RNA, 38 nt, Artificial Sequence
  Description of Artificial Sequence:  Enzymatic Nucleic Acid
  misc_feature (31)..(31): n stands for inosine
cauacucucugaugaggccguuaggccgaanauaauac

SEQ ID NO: 8712 - RNA, 38 nt, Artificial Sequence
  Description of Artificial Sequence:  Enzymatic Nucleic Acid
  misc_feature (31)..(31): n stands for inosine
acauacuccugaugaggccguuaggccgaangauaaua

SEQ ID NO: 8713 - RNA, 38 nt, Artificial Sequence
  Description of Artificial Sequence:  Enzymatic Nucleic Acid
  misc_feature (31)..(31): n stands for inosine
ggaaguaacugaugaggccguuaggccgaanauuaacu

SEQ ID NO: 8714 - RNA, 38 nt, Artificial Sequence
  Description of Artificial Sequence:  Enzymatic Nucleic Acid
  misc_feature (31)..(31): n stands for inosine
cgucuggacugaugaggccguuaggccgaanuaaugau

SEQ ID NO: 8715 - RNA, 38 nt, Artificial Sequence
  Description of Artificial Sequence:  Enzymatic Nucleic Acid
  misc_feature (31)..(31): n stands for inosine
ucgcgucucugaugaggccguuaggccgaanaaguaau

SEQ ID NO: 8716 - RNA, 38 nt, Artificial Sequence
  Description of Artificial Sequence:  Enzymatic Nucleic Acid
  misc_feature (31)..(31): n stands for inosine
gucgcguccugaugaggccguuaggccgaangaaguaa

SEQ ID NO: 8717 - RNA, 38 nt, Artificial Sequence
  Description of Artificial Sequence:  Enzymatic Nucleic Acid
  misc_feature (31)..(31): n stands for inosine
guaaauaacugaugaggccguuaggccgaanucgcguc

SEQ ID NO: 8718 - RNA, 38 nt, Artificial Sequence
  Description of Artificial Sequence:  Enzymatic Nucleic Acid
  misc_feature (31)..(31): n stands for inosine
aaagagugcugaugaggccguuaggccgaanuaaauaa

SEQ ID NO: 8719 - RNA, 38 nt, Artificial Sequence
  Description of Artificial Sequence:  Enzymatic Nucleic Acid
  misc_feature (31)..(31): n stands for inosine
ccaaagagcugaugaggccguuaggccgaanuguaaau

SEQ ID NO: 8720 - RNA, 38 nt, Artificial Sequence
  Description of Artificial Sequence:  Enzymatic Nucleic Acid
  misc_feature (31)..(31): n stands for inosine
uuccaaagcugaugaggccguuaggccgaanuguguaa

SEQ ID NO: 8721 - RNA, 38 nt, Artificial Sequence
  Description of Artificial Sequence:  Enzymatic Nucleic Acid
  misc_feature (31)..(31): n stands for inosine
ccuuccaacugaugaggccguuaggccgaanagugugu

SEQ ID NO: 8722 - RNA, 38 nt, Artificial Sequence
  Description of Artificial Sequence:  Enzymatic Nucleic Acid
  misc_feature (31)..(31): n stands for inosine
uuuauauacugaugaggccguuaggccgaanauccccg

SEQ ID NO: 8723 - RNA, 38 nt, Artificial Sequence
  Description of Artificial Sequence:  Enzymatic Nucleic Acid
  misc_feature (31)..(31): n stands for inosine
cuacgugucugaugaggccguuaggccgaanacucucu

SEQ ID NO: 8724 - RNA, 38 nt, Artificial Sequence
  Description of Artificial Sequence:  Enzymatic Nucleic Acid
  misc_feature (31)..(31): n stands for inosine
gcuacgugcugaugaggccguuaggccgaangacucuc

SEQ ID NO: 8725 - RNA, 38 nt, Artificial Sequence
  Description of Artificial Sequence:  Enzymatic Nucleic Acid
  misc_feature (31)..(31): n stands for inosine
gcgcuacgcugaugaggccguuaggccgaanuggacuc

SEQ ID NO: 8726 - RNA, 38 nt, Artificial Sequence
  Description of Artificial Sequence:  Enzymatic Nucleic Acid
  misc_feature (31)..(31): n stands for inosine
caaaaugacugaugaggccguuaggccgaancgcuacg

SEQ ID NO: 8727 - RNA, 38 nt, Artificial Sequence
  Description of Artificial Sequence:  Enzymatic Nucleic Acid
  misc_feature (31)..(31): n stands for inosine
gcaaaaugcugaugaggccguuaggccgaangcgcuac

SEQ ID NO: 8728 - RNA, 38 nt, Artificial Sequence
  Description of Artificial Sequence:  Enzymatic Nucleic Acid
  misc_feature (31)..(31): n stands for inosine
ccgcaaaacugaugaggccguuaggccgaanaggcgcu

SEQ ID NO: 8729 - RNA, 38 nt, Artificial Sequence
  Description of Artificial Sequence:  Enzymatic Nucleic Acid
  misc_feature (31)..(31): n stands for inosine
gaauauggcugaugaggccguuaggccgaanacccgca

SEQ ID NO: 8730 - RNA, 38 nt, Artificial Sequence
  Description of Artificial Sequence:  Enzymatic Nucleic Acid
  misc_feature (31)..(31): n stands for inosine
aagaauaucugaugaggccguuaggccgaanugacccg

SEQ ID NO: 8731 - RNA, 38 nt, Artificial Sequence
  Description of Artificial Sequence:  Enzymatic Nucleic Acid
  misc_feature (31)..(31): n stands for inosine
caagaauacugaugaggccguuaggccgaangugaccc

SEQ ID NO: 8732 - RNA, 38 nt, Artificial Sequence
  Description of Artificial Sequence:  Enzymatic Nucleic Acid
  misc_feature (31)..(31): n stands for inosine
uguucccacugaugaggccguuaggccgaanaauaugg

SEQ ID NO: 8733 - RNA, 38 nt, Artificial Sequence
  Description of Artificial Sequence:  Enzymatic Nucleic Acid
  misc_feature (31)..(31): n stands for inosine
guagaucucugaugaggccguuaggccgaanuucccaa

SEQ ID NO: 8734 - RNA, 38 nt, Artificial Sequence
  Description of Artificial Sequence:  Enzymatic Nucleic Acid
  misc_feature (31)..(31): n stands for inosine
caugcugucugaugaggccguuaggccgaanaucuugu

SEQ ID NO: 8735 - RNA, 38 nt, Artificial Sequence
  Description of Artificial Sequence:  Enzymatic Nucleic Acid
  misc_feature (31)..(31): n stands for inosine
ucccaugccugaugaggccguuaggccgaanuagaucu

SEQ ID NO: 8736 - RNA, 38 nt, Artificial Sequence
  Description of Artificial Sequence:  Enzymatic Nucleic Acid
  misc_feature (31)..(31): n stands for inosine
accucccacugaugaggccguuaggccgaancuguaga

SEQ ID NO: 8737 - RNA, 38 nt, Artificial Sequence
  Description of Artificial Sequence:  Enzymatic Nucleic Acid
  misc_feature (31)..(31): n stands for inosine
gguuuggacugaugaggccguuaggccgaanaccaacc

SEQ ID NO: 8738 - RNA, 38 nt, Artificial Sequence
  Description of Artificial Sequence:  Enzymatic Nucleic Acid
  misc_feature (31)..(31): n stands for inosine
cgagguuucugaugaggccguuaggccgaanaagacca

SEQ ID NO: 8739 - RNA, 38 nt, Artificial Sequence
  Description of Artificial Sequence:  Enzymatic Nucleic Acid
  misc_feature (31)..(31): n stands for inosine
ucgagguucugaugaggccguuaggccgaangaagacc

SEQ ID NO: 8740 - RNA, 38 nt, Artificial Sequence
  Description of Artificial Sequence:  Enzymatic Nucleic Acid
  misc_feature (31)..(31): n stands for inosine
cuuuucgacugaugaggccguuaggccgaanuuuggaa

SEQ ID NO: 8741 - RNA, 38 nt, Artificial Sequence
  Description of Artificial Sequence:  Enzymatic Nucleic Acid
  misc_feature (31)..(31): n stands for inosine
ccuuuucgcugaugaggccguuaggccgaanguuugga

SEQ ID NO: 8742 - RNA, 38 nt, Artificial Sequence
  Description of Artificial Sequence:  Enzymatic Nucleic Acid
  misc_feature (31)..(31): n stands for inosine
uguccccacugaugaggccguuaggccgaanccuuuuc

SEQ ID NO: 8743 - RNA, 38 nt, Artificial Sequence
  Description of Artificial Sequence:  Enzymatic Nucleic Acid
  misc_feature (31)..(31): n stands for inosine
gaaagauucugaugaggccguuaggccgaanuccccau

SEQ ID NO: 8744 - RNA, 38 nt, Artificial Sequence
  Description of Artificial Sequence:  Enzymatic Nucleic Acid
  misc_feature (31)..(31): n stands for inosine
ggacagaacugaugaggccguuaggccgaanauuuguc

SEQ ID NO: 8745 - RNA, 38 nt, Artificial Sequence
  Description of Artificial Sequence:  Enzymatic Nucleic Acid
  misc_feature (31)..(31): n stands for inosine
uuggggaccugaugaggccguuaggccgaanaaagauu

SEQ ID NO: 8746 - RNA, 38 nt, Artificial Sequence
  Description of Artificial Sequence:  Enzymatic Nucleic Acid
  misc_feature (31)..(31): n stands for inosine
gggauuggcugaugaggccguuaggccgaanacagaaa

SEQ ID NO: 8747 - RNA, 38 nt, Artificial Sequence
  Description of Artificial Sequence:  Enzymatic Nucleic Acid
  misc_feature (31)..(31): n stands for inosine
ggggauugcugaugaggccguuaggccgaangacagaa

SEQ ID NO: 8748 - RNA, 38 nt, Artificial Sequence
  Description of Artificial Sequence:  Enzymatic Nucleic Acid
  misc_feature (31)..(31): n stands for inosine
aggggauucugaugaggccguuaggccgaanggacaga

SEQ ID NO: 8749 - RNA, 38 nt, Artificial Sequence
  Description of Artificial Sequence:  Enzymatic Nucleic Acid
  misc_feature (31)..(31): n stands for inosine
caggggaucugaugaggccguuaggccgaangggacag

SEQ ID NO: 8750 - RNA, 38 nt, Artificial Sequence
  Description of Artificial Sequence:  Enzymatic Nucleic Acid
  misc_feature (31)..(31): n stands for inosine
aucccaggcugaugaggccguuaggccgaanauugggg

SEQ ID NO: 8751 - RNA, 38 nt, Artificial Sequence
  Description of Artificial Sequence:  Enzymatic Nucleic Acid
  misc_feature (31)..(31): n stands for inosine
aaucccagcugaugaggccguuaggccgaangauuggg

SEQ ID NO: 8752 - RNA, 38 nt, Artificial Sequence
  Description of Artificial Sequence:  Enzymatic Nucleic Acid
  misc_feature (31)..(31): n stands for inosine
gaaucccacugaugaggccguuaggccgaanggauugg

SEQ ID NO: 8753 - RNA, 38 nt, Artificial Sequence
  Description of Artificial Sequence:  Enzymatic Nucleic Acid
  misc_feature (31)..(31): n stands for inosine
agaauccccugaugaggccguuaggccgaangggauug

SEQ ID NO: 8754 - RNA, 38 nt, Artificial Sequence
  Description of Artificial Sequence:  Enzymatic Nucleic Acid
  misc_feature (31)..(31): n stands for inosine
aucggggacugaugaggccguuaggccgaanaauccca

SEQ ID NO: 8755 - RNA, 38 nt, Artificial Sequence
  Description of Artificial Sequence:  Enzymatic Nucleic Acid
  misc_feature (31)..(31): n stands for inosine
augaucggcugaugaggccguuaggccgaanaagaauc

SEQ ID NO: 8756 - RNA, 38 nt, Artificial Sequence
  Description of Artificial Sequence:  Enzymatic Nucleic Acid
  misc_feature (31)..(31): n stands for inosine
gaugaucgcugaugaggccguuaggccgaangaagaau

SEQ ID NO: 8757 - RNA, 38 nt, Artificial Sequence
  Description of Artificial Sequence:  Enzymatic Nucleic Acid
  misc_feature (31)..(31): n stands for inosine
ugaugauccugaugaggccguuaggccgaanggaagaa

SEQ ID NO: 8758 - RNA, 38 nt, Artificial Sequence
  Description of Artificial Sequence:  Enzymatic Nucleic Acid
  misc_feature (31)..(31): n stands for inosine
ccaacugacugaugaggccguuaggccgaanaucgggg

SEQ ID NO: 8759 - RNA, 38 nt, Artificial Sequence
  Description of Artificial Sequence:  Enzymatic Nucleic Acid
  misc_feature (31)..(31): n stands for inosine
gguccaaccugaugaggccguuaggccgaanaugaucg

SEQ ID NO: 8760 - RNA, 38 nt, Artificial Sequence
  Description of Artificial Sequence:  Enzymatic Nucleic Acid
  misc_feature (31)..(31): n stands for inosine
gaaugcagcugaugaggccguuaggccgaanuccaacu

SEQ ID NO: 8761 - RNA, 38 nt, Artificial Sequence
  Description of Artificial Sequence:  Enzymatic Nucleic Acid
  misc_feature (31)..(31): n stands for inosine
ugaaugcacugaugaggccguuaggccgaanguccaac

SEQ ID NO: 8762 - RNA, 38 nt, Artificial Sequence
  Description of Artificial Sequence:  Enzymatic Nucleic Acid
  misc_feature (31)..(31): n stands for inosine
uugaaugccugaugaggccguuaggccgaangguccaa

SEQ ID NO: 8763 - RNA, 38 nt, Artificial Sequence
  Description of Artificial Sequence:  Enzymatic Nucleic Acid
  misc_feature (31)..(31): n stands for inosine
gcuuugaacugaugaggccguuaggccgaancaggguc

SEQ ID NO: 8764 - RNA, 38 nt, Artificial Sequence
  Description of Artificial Sequence:  Enzymatic Nucleic Acid
  misc_feature (31)..(31): n stands for inosine
guuggcuucugaugaggccguuaggccgaanaaugcag

SEQ ID NO: 8765 - RNA, 38 nt, Artificial Sequence
  Description of Artificial Sequence:  Enzymatic Nucleic Acid
  misc_feature (31)..(31): n stands for inosine
acugaguucugaugaggccguuaggccgaancuuugaa

SEQ ID NO: 8766 - RNA, 38 nt, Artificial Sequence
  Description of Artificial Sequence:  Enzymatic Nucleic Acid
  misc_feature (31)..(31): n stands for inosine
uacugagucugaugaggccguuaggccgaangcuuuga

SEQ ID NO: 8767 - RNA, 38 nt, Artificial Sequence
  Description of Artificial Sequence:  Enzymatic Nucleic Acid
  misc_feature (31)..(31): n stands for inosine
auuuacugcugaugaggccguuaggccgaanuuggcuu

SEQ ID NO: 8768 - RNA, 38 nt, Artificial Sequence
  Description of Artificial Sequence:  Enzymatic Nucleic Acid
  misc_feature (31)..(31): n stands for inosine
ggauuuaccugaugaggccguuaggccgaanaguuggc

SEQ ID NO: 8769 - RNA, 38 nt, Artificial Sequence
  Description of Artificial Sequence:  Enzymatic Nucleic Acid
  misc_feature (31)..(31): n stands for inosine
cccaaucucugaugaggccguuaggccgaanauuuacu

SEQ ID NO: 8770 - RNA, 38 nt, Artificial Sequence
  Description of Artificial Sequence:  Enzymatic Nucleic Acid
  misc_feature (31)..(31): n stands for inosine
ucccaauccugaugaggccguuaggccgaangauuuac

SEQ ID NO: 8771 - RNA, 38 nt, Artificial Sequence
  Description of Artificial Sequence:  Enzymatic Nucleic Acid
  misc_feature (31)..(31): n stands for inosine
cggguugacugaugaggccguuaggccgaanucccaau

SEQ ID NO: 8772 - RNA, 38 nt, Artificial Sequence
  Description of Artificial Sequence:  Enzymatic Nucleic Acid
  misc_feature (31)..(31): n stands for inosine
gcggguugcugaugaggccguuaggccgaangucccaa

SEQ ID NO: 8773 - RNA, 38 nt, Artificial Sequence
  Description of Artificial Sequence:  Enzymatic Nucleic Acid
  misc_feature (31)..(31): n stands for inosine
gugcgggucugaugaggccguuaggccgaanagguccc

SEQ ID NO: 8774 - RNA, 38 nt, Artificial Sequence
  Description of Artificial Sequence:  Enzymatic Nucleic Acid
  misc_feature (31)..(31): n stands for inosine
cuugugcgcugaugaggccguuaggccgaanuugaggu

SEQ ID NO: 8775 - RNA, 38 nt, Artificial Sequence
  Description of Artificial Sequence:  Enzymatic Nucleic Acid
  misc_feature (31)..(31): n stands for inosine
ccuugugccugaugaggccguuaggccgaanguugagg

SEQ ID NO: 8776 - RNA, 38 nt, Artificial Sequence
  Description of Artificial Sequence:  Enzymatic Nucleic Acid
  misc_feature (31)..(31): n stands for inosine
uguccuugcugaugaggccguuaggccgaancggguug

SEQ ID NO: 8777 - RNA, 38 nt, Artificial Sequence
  Description of Artificial Sequence:  Enzymatic Nucleic Acid
  misc_feature (31)..(31): n stands for inosine
guuguccucugaugaggccguuaggccgaanugcgggu

SEQ ID NO: 8778 - RNA, 38 nt, Artificial Sequence
  Description of Artificial Sequence:  Enzymatic Nucleic Acid
  misc_feature (31)..(31): n stands for inosine
cggccagucugaugaggccguuaggccgaanuccuugu

SEQ ID NO: 8779 - RNA, 38 nt, Artificial Sequence
  Description of Artificial Sequence:  Enzymatic Nucleic Acid
  misc_feature (31)..(31): n stands for inosine
guccggcccugaugaggccguuaggccgaanuuguccu

SEQ ID NO: 8780 - RNA, 38 nt, Artificial Sequence
  Description of Artificial Sequence:  Enzymatic Nucleic Acid
  misc_feature (31)..(31): n stands for inosine
uggcgucccugaugaggccguuaggccgaanccaguug

SEQ ID NO: 8781 - RNA, 38 nt, Artificial Sequence
  Description of Artificial Sequence:  Enzymatic Nucleic Acid
  misc_feature (31)..(31): n stands for inosine
accuuguucugaugaggccguuaggccgaancguccgg

SEQ ID NO: 8782 - RNA, 38 nt, Artificial Sequence
  Description of Artificial Sequence:  Enzymatic Nucleic Acid
  misc_feature (31)..(31): n stands for inosine
caccuugucugaugaggccguuaggccgaangcguccg

SEQ ID NO: 8783 - RNA, 38 nt, Artificial Sequence
  Description of Artificial Sequence:  Enzymatic Nucleic Acid
  misc_feature (31)..(31): n stands for inosine
ucccaccucugaugaggccguuaggccgaanuuggcgu

SEQ ID NO: 8784 - RNA, 38 nt, Artificial Sequence
  Description of Artificial Sequence:  Enzymatic Nucleic Acid
  misc_feature (31)..(31): n stands for inosine
ggcccgaacugaugaggccguuaggccgaancucccac

SEQ ID NO: 8785 - RNA, 38 nt, Artificial Sequence
  Description of Artificial Sequence:  Enzymatic Nucleic Acid
  misc_feature (31)..(31): n stands for inosine
ugaacccucugaugaggccguuaggccgaancccgaau

SEQ ID NO: 8786 - RNA, 38 nt, Artificial Sequence
  Description of Artificial Sequence:  Enzymatic Nucleic Acid
  misc_feature (31)..(31): n stands for inosine
gugaaccccugaugaggccguuaggccgaangcccgaa

SEQ ID NO: 8787 - RNA, 38 nt, Artificial Sequence
  Description of Artificial Sequence:  Enzymatic Nucleic Acid
  misc_feature (31)..(31): n stands for inosine
gggaggggcugaugaggccguuaggccgaanaacccug

SEQ ID NO: 8788 - RNA, 38 nt, Artificial Sequence
  Description of Artificial Sequence:  Enzymatic Nucleic Acid
  misc_feature (31)..(31): n stands for inosine
uggggaggcugaugaggccguuaggccgaanugaaccc

SEQ ID NO: 8789 - RNA, 38 nt, Artificial Sequence
  Description of Artificial Sequence:  Enzymatic Nucleic Acid
  misc_feature (31)..(31): n stands for inosine
auggggagcugaugaggccguuaggccgaangugaacc

SEQ ID NO: 8790 - RNA, 38 nt, Artificial Sequence
  Description of Artificial Sequence:  Enzymatic Nucleic Acid
  misc_feature (31)..(31): n stands for inosine
cauggggacugaugaggccguuaggccgaanggugaac

SEQ ID NO: 8791 - RNA, 38 nt, Artificial Sequence
  Description of Artificial Sequence:  Enzymatic Nucleic Acid
  misc_feature (31)..(31): n stands for inosine
ccauggggcugaugaggccguuaggccgaangggugaa

SEQ ID NO: 8792 - RNA, 38 nt, Artificial Sequence
  Description of Artificial Sequence:  Enzymatic Nucleic Acid
  misc_feature (31)..(31): n stands for inosine
ccccauggcugaugaggccguuaggccgaanaggggug

SEQ ID NO: 8793 - RNA, 38 nt, Artificial Sequence
  Description of Artificial Sequence:  Enzymatic Nucleic Acid
  misc_feature (31)..(31): n stands for inosine
cccccaugcugaugaggccguuaggccgaangaggggu

SEQ ID NO: 8794 - RNA, 38 nt, Artificial Sequence
  Description of Artificial Sequence:  Enzymatic Nucleic Acid
  misc_feature (31)..(31): n stands for inosine
ucccccaucugaugaggccguuaggccgaanggagggg

SEQ ID NO: 8795 - RNA, 38 nt, Artificial Sequence
  Description of Artificial Sequence:  Enzymatic Nucleic Acid
  misc_feature (31)..(31): n stands for inosine
gucccccacugaugaggccguuaggccgaangggaggg

SEQ ID NO: 8796 - RNA, 38 nt, Artificial Sequence
  Description of Artificial Sequence:  Enzymatic Nucleic Acid
  misc_feature (31)..(31): n stands for inosine
accccaaccugaugaggccguuaggccgaanuccccca

SEQ ID NO: 8797 - RNA, 38 nt, Artificial Sequence
  Description of Artificial Sequence:  Enzymatic Nucleic Acid
  misc_feature (31)..(31): n stands for inosine
agcgugagcugaugaggccguuaggccgaancuccacc

SEQ ID NO: 8798 - RNA, 38 nt, Artificial Sequence
  Description of Artificial Sequence:  Enzymatic Nucleic Acid
  misc_feature (31)..(31): n stands for inosine
gagcgugacugaugaggccguuaggccgaangcuccac

SEQ ID NO: 8799 - RNA, 38 nt, Artificial Sequence
  Description of Artificial Sequence:  Enzymatic Nucleic Acid
  misc_feature (31)..(31): n stands for inosine
ugagcgugcugaugaggccguuaggccgaanggcucca

SEQ ID NO: 8800 - RNA, 38 nt, Artificial Sequence
  Description of Artificial Sequence:  Enzymatic Nucleic Acid
  misc_feature (31)..(31): n stands for inosine
ccugagcgcugaugaggccguuaggccgaanagggcuc

SEQ ID NO: 8801 - RNA, 38 nt, Artificial Sequence
  Description of Artificial Sequence:  Enzymatic Nucleic Acid
  misc_feature (31)..(31): n stands for inosine
aggcccugcugaugaggccguuaggccgaancgugagg

SEQ ID NO: 8802 - RNA, 38 nt, Artificial Sequence
  Description of Artificial Sequence:  Enzymatic Nucleic Acid
  misc_feature (31)..(31): n stands for inosine
guaggccccugaugaggccguuaggccgaanagcguga

SEQ ID NO: 8803 - RNA, 38 nt, Artificial Sequence
  Description of Artificial Sequence:  Enzymatic Nucleic Acid
  misc_feature (31)..(31): n stands for inosine
ugugaguacugaugaggccguuaggccgaancccugag

SEQ ID NO: 8804 - RNA, 38 nt, Artificial Sequence
  Description of Artificial Sequence:  Enzymatic Nucleic Acid
  misc_feature (31)..(31): n stands for inosine
uugugagucugaugaggccguuaggccgaangcccuga

SEQ ID NO: 8805 - RNA, 38 nt, Artificial Sequence
  Description of Artificial Sequence:  Enzymatic Nucleic Acid
  misc_feature (31)..(31): n stands for inosine
caguugugcugaugaggccguuaggccgaanuaggccc

SEQ ID NO: 8806 - RNA, 38 nt, Artificial Sequence
  Description of Artificial Sequence:  Enzymatic Nucleic Acid
  misc_feature (31)..(31): n stands for inosine
cacaguugcugaugaggccguuaggccgaanaguaggc

SEQ ID NO: 8807 - RNA, 38 nt, Artificial Sequence
  Description of Artificial Sequence:  Enzymatic Nucleic Acid
  misc_feature (31)..(31): n stands for inosine
ggcacagucugaugaggccguuaggccgaanugaguag

SEQ ID NO: 8808 - RNA, 38 nt, Artificial Sequence
  Description of Artificial Sequence:  Enzymatic Nucleic Acid
  misc_feature (31)..(31): n stands for inosine
gcuggcaccugaugaggccguuaggccgaanuugugag

SEQ ID NO: 8809 - RNA, 38 nt, Artificial Sequence
  Description of Artificial Sequence:  Enzymatic Nucleic Acid
  misc_feature (31)..(31): n stands for inosine
gagcugcucugaugaggccguuaggccgaancacaguu

SEQ ID NO: 8810 - RNA, 38 nt, Artificial Sequence
  Description of Artificial Sequence:  Enzymatic Nucleic Acid
  misc_feature (31)..(31): n stands for inosine
ggagcugccugaugaggccguuaggccgaangcacagu

SEQ ID NO: 8811 - RNA, 38 nt, Artificial Sequence
  Description of Artificial Sequence:  Enzymatic Nucleic Acid
  misc_feature (31)..(31): n stands for inosine
ggaggagccugaugaggccguuaggccgaancuggcac

SEQ ID NO: 8812 - RNA, 38 nt, Artificial Sequence
  Description of Artificial Sequence:  Enzymatic Nucleic Acid
  misc_feature (31)..(31): n stands for inosine
ggaggaggcugaugaggccguuaggccgaancugcugg

SEQ ID NO: 8813 - RNA, 38 nt, Artificial Sequence
  Description of Artificial Sequence:  Enzymatic Nucleic Acid
  misc_feature (31)..(31): n stands for inosine
caggaggacugaugaggccguuaggccgaanagcugcu

SEQ ID NO: 8814 - RNA, 38 nt, Artificial Sequence
  Description of Artificial Sequence:  Enzymatic Nucleic Acid
  misc_feature (31)..(31): n stands for inosine
gcaggaggcugaugaggccguuaggccgaangagcugc

SEQ ID NO: 8815 - RNA, 38 nt, Artificial Sequence
  Description of Artificial Sequence:  Enzymatic Nucleic Acid
  misc_feature (31)..(31): n stands for inosine
aggcaggacugaugaggccguuaggccgaanaggagcu

SEQ ID NO: 8816 - RNA, 38 nt, Artificial Sequence
  Description of Artificial Sequence:  Enzymatic Nucleic Acid
  misc_feature (31)..(31): n stands for inosine
gaggcaggcugaugaggccguuaggccgaangaggagc

SEQ ID NO: 8817 - RNA, 38 nt, Artificial Sequence
  Description of Artificial Sequence:  Enzymatic Nucleic Acid
  misc_feature (31)..(31): n stands for inosine
uggaggcacugaugaggccguuaggccgaanaggagga

SEQ ID NO: 8818 - RNA, 38 nt, Artificial Sequence
  Description of Artificial Sequence:  Enzymatic Nucleic Acid
  misc_feature (31)..(31): n stands for inosine
guggaggccugaugaggccguuaggccgaangaggagg

SEQ ID NO: 8819 - RNA, 38 nt, Artificial Sequence
  Description of Artificial Sequence:  Enzymatic Nucleic Acid
  misc_feature (31)..(31): n stands for inosine
uugguggacugaugaggccguuaggccgaancaggagg

SEQ ID NO: 8820 - RNA, 38 nt, Artificial Sequence
  Description of Artificial Sequence:  Enzymatic Nucleic Acid
  misc_feature (31)..(31): n stands for inosine
auugguggcugaugaggccguuaggccgaangcaggag

SEQ ID NO: 8821 - RNA, 38 nt, Artificial Sequence
  Description of Artificial Sequence:  Enzymatic Nucleic Acid
  misc_feature (31)..(31): n stands for inosine
cgauuggucugaugaggccguuaggccgaanaggcagg

SEQ ID NO: 8822 - RNA, 38 nt, Artificial Sequence
  Description of Artificial Sequence:  Enzymatic Nucleic Acid
  misc_feature (31)..(31): n stands for inosine
ccgauuggcugaugaggccguuaggccgaangaggcag

SEQ ID NO: 8823 - RNA, 38 nt, Artificial Sequence
  Description of Artificial Sequence:  Enzymatic Nucleic Acid
  misc_feature (31)..(31): n stands for inosine
ugccgauucugaugaggccguuaggccgaanuggaggc

SEQ ID NO: 8824 - RNA, 38 nt, Artificial Sequence
  Description of Artificial Sequence:  Enzymatic Nucleic Acid
  misc_feature (31)..(31): n stands for inosine
cugccgaucugaugaggccguuaggccgaanguggagg

SEQ ID NO: 8825 - RNA, 38 nt, Artificial Sequence
  Description of Artificial Sequence:  Enzymatic Nucleic Acid
  misc_feature (31)..(31): n stands for inosine
uuccugaccugaugaggccguuaggccgaanccgauug

SEQ ID NO: 8826 - RNA, 38 nt, Artificial Sequence
  Description of Artificial Sequence:  Enzymatic Nucleic Acid
  misc_feature (31)..(31): n stands for inosine
ugccuucccugaugaggccguuaggccgaanacugccg

SEQ ID NO: 8827 - RNA, 38 nt, Artificial Sequence
  Description of Artificial Sequence:  Enzymatic Nucleic Acid
  misc_feature (31)..(31): n stands for inosine
gaguaggccugaugaggccguuaggccgaanccuuccu

SEQ ID NO: 8828 - RNA, 38 nt, Artificial Sequence
  Description of Artificial Sequence:  Enzymatic Nucleic Acid
  misc_feature (31)..(31): n stands for inosine
agggaguacugaugaggccguuaggccgaancugccuu

SEQ ID NO: 8829 - RNA, 38 nt, Artificial Sequence
  Description of Artificial Sequence:  Enzymatic Nucleic Acid
  misc_feature (31)..(31): n stands for inosine
aagggagucugaugaggccguuaggccgaangcugccu

SEQ ID NO: 8830 - RNA, 38 nt, Artificial Sequence
  Description of Artificial Sequence:  Enzymatic Nucleic Acid
  misc_feature (31)..(31): n stands for inosine
gauaagggcugaugaggccguuaggccgaanuaggcug

SEQ ID NO: 8831 - RNA, 38 nt, Artificial Sequence
  Description of Artificial Sequence:  Enzymatic Nucleic Acid
  misc_feature (31)..(31): n stands for inosine
gagauaagcugaugaggccguuaggccgaanaguaggc

SEQ ID NO: 8832 - RNA, 38 nt, Artificial Sequence
  Description of Artificial Sequence:  Enzymatic Nucleic Acid
  misc_feature (31)..(31): n stands for inosine
ggagauaacugaugaggccguuaggccgaangaguagg

SEQ ID NO: 8833 - RNA, 38 nt, Artificial Sequence
  Description of Artificial Sequence:  Enzymatic Nucleic Acid
  misc_feature (31)..(31): n stands for inosine
uggagauacugaugaggccguuaggccgaanggaguag

SEQ ID NO: 8834 - RNA, 38 nt, Artificial Sequence
  Description of Artificial Sequence:  Enzymatic Nucleic Acid
  misc_feature (31)..(31): n stands for inosine
agagguggcugaugaggccguuaggccgaanauaaggg

SEQ ID NO: 8835 - RNA, 38 nt, Artificial Sequence
  Description of Artificial Sequence:  Enzymatic Nucleic Acid
  misc_feature (31)..(31): n stands for inosine
uuagaggucugaugaggccguuaggccgaanagauaag

SEQ ID NO: 8836 - RNA, 38 nt, Artificial Sequence
  Description of Artificial Sequence:  Enzymatic Nucleic Acid
  misc_feature (31)..(31): n stands for inosine
cuuagaggcugaugaggccguuaggccgaangagauaa

SEQ ID NO: 8837 - RNA, 38 nt, Artificial Sequence
  Description of Artificial Sequence:  Enzymatic Nucleic Acid
  misc_feature (31)..(31): n stands for inosine
cccuuagacugaugaggccguuaggccgaanuggagau

SEQ ID NO: 8838 - RNA, 38 nt, Artificial Sequence
  Description of Artificial Sequence:  Enzymatic Nucleic Acid
  misc_feature (31)..(31): n stands for inosine
ucccuuagcugaugaggccguuaggccgaanguggaga

SEQ ID NO: 8839 - RNA, 38 nt, Artificial Sequence
  Description of Artificial Sequence:  Enzymatic Nucleic Acid
  misc_feature (31)..(31): n stands for inosine
ugucccuucugaugaggccguuaggccgaanaggugga

SEQ ID NO: 8840 - RNA, 38 nt, Artificial Sequence
  Description of Artificial Sequence:  Enzymatic Nucleic Acid
  misc_feature (31)..(31): n stands for inosine
aggaugagcugaugaggccguuaggccgaanucccuua

SEQ ID NO: 8841 - RNA, 38 nt, Artificial Sequence
  Description of Artificial Sequence:  Enzymatic Nucleic Acid
  misc_feature (31)..(31): n stands for inosine
ugaggaugcugaugaggccguuaggccgaanugucccu

SEQ ID NO: 8842 - RNA, 38 nt, Artificial Sequence
  Description of Artificial Sequence:  Enzymatic Nucleic Acid
  misc_feature (31)..(31): n stands for inosine
ccugaggacugaugaggccguuaggccgaanagugucc

SEQ ID NO: 8843 - RNA, 38 nt, Artificial Sequence
  Description of Artificial Sequence:  Enzymatic Nucleic Acid
  misc_feature (31)..(31): n stands for inosine
uggccugacugaugaggccguuaggccgaanaugagug

SEQ ID NO: 8844 - RNA, 38 nt, Artificial Sequence
  Description of Artificial Sequence:  Enzymatic Nucleic Acid
  misc_feature (31)..(31): n stands for inosine
auggccugcugaugaggccguuaggccgaangaugagu

SEQ ID NO: 8845 - RNA, 38 nt, Artificial Sequence
  Description of Artificial Sequence:  Enzymatic Nucleic Acid
  misc_feature (31)..(31): n stands for inosine
gcauggcccugaugaggccguuaggccgaanaggauga

SEQ ID NO: 8846 - RNA, 38 nt, Artificial Sequence
  Description of Artificial Sequence:  Enzymatic Nucleic Acid
  misc_feature (31)..(31): n stands for inosine
cacugcaucugaugaggccguuaggccgaanccugagg

SEQ ID NO: 8847 - RNA, 38 nt, Artificial Sequence
  Description of Artificial Sequence:  Enzymatic Nucleic Acid
  misc_feature (31)..(31): n stands for inosine
ccacugcacugaugaggccguuaggccgaangccugag

SEQ ID NO: 8848 - RNA, 37 nt, Artificial Sequence
  Description of Artificial Sequence:  Enzymatic Nucleic Acid
gccaccagugauggcaugcacuaugcgcgaggaaagu

SEQ ID NO: 8849 - RNA, 37 nt, Artificial Sequence
  Description of Artificial Sequence:  Enzymatic Nucleic Acid
gcagggcuugauggcaugcacuaugcgcgacuguucc

SEQ ID NO: 8850 - RNA, 37 nt, Artificial Sequence
  Description of Artificial Sequence:  Enzymatic Nucleic Acid
auucugagugauggcaugcacuaugcgcgagggcuca

SEQ ID NO: 8851 - RNA, 37 nt, Artificial Sequence
  Description of Artificial Sequence:  Enzymatic Nucleic Acid
cgauauggugauggcaugcacuaugcgcgagagacag

SEQ ID NO: 8852 - RNA, 37 nt, Artificial Sequence
  Description of Artificial Sequence:  Enzymatic Nucleic Acid
ccagucuuugauggcaugcacuaugcgcggauaagau

SEQ ID NO: 8853 - RNA, 37 nt, Artificial Sequence
  Description of Artificial Sequence:  Enzymatic Nucleic Acid
uccauguuugauggcaugcacuaugcgcggguacagg

SEQ ID NO: 8854 - RNA, 37 nt, Artificial Sequence
  Description of Artificial Sequence:  Enzymatic Nucleic Acid
uccugaugugauggcaugcacuaugcgcggauguucu

SEQ ID NO: 8855 - RNA, 37 nt, Artificial Sequence
  Description of Artificial Sequence:  Enzymatic Nucleic Acid
aacacgagugauggcaugcacuaugcgcgaggggucc

SEQ ID NO: 8856 - RNA, 37 nt, Artificial Sequence
  Description of Artificial Sequence:  Enzymatic Nucleic Acid
auuuuuguugauggcaugcacuaugcgcgaacaagaa

SEQ ID NO: 8857 - RNA, 37 nt, Artificial Sequence
  Description of Artificial Sequence:  Enzymatic Nucleic Acid
ugggacugugauggcaugcacuaugcgcggaauuuug

SEQ ID NO: 8858 - RNA, 37 nt, Artificial Sequence
  Description of Artificial Sequence:  Enzymatic Nucleic Acid
acauccagugauggcaugcacuaugcgcggauaacca

SEQ ID NO: 8859 - RNA, 37 nt, Artificial Sequence
  Description of Artificial Sequence:  Enzymatic Nucleic Acid
aaacgccgugauggcaugcacuaugcgcgagacacau

SEQ ID NO: 8860 - RNA, 37 nt, Artificial Sequence
  Description of Artificial Sequence:  Enzymatic Nucleic Acid
gcaggaugugauggcaugcacuaugcgcgagaggaag

SEQ ID NO: 8861 - RNA, 37 nt, Artificial Sequence
  Description of Artificial Sequence:  Enzymatic Nucleic Acid
cauagcagugauggcaugcacuaugcgcgaggaugca

SEQ ID NO: 8862 - RNA, 37 nt, Artificial Sequence
  Description of Artificial Sequence:  Enzymatic Nucleic Acid
aggcauagugauggcaugcacuaugcgcgagcaggau

SEQ ID NO: 8863 - RNA, 37 nt, Artificial Sequence
  Description of Artificial Sequence:  Enzymatic Nucleic Acid
agaugaggugauggcaugcacuaugcgcgauagcagc

SEQ ID NO: 8864 - RNA, 37 nt, Artificial Sequence
  Description of Artificial Sequence:  Enzymatic Nucleic Acid
caaacgggugauggcaugcacuaugcgcgaacauacc

SEQ ID NO: 8865 - RNA, 37 nt, Artificial Sequence
  Description of Artificial Sequence:  Enzymatic Nucleic Acid
agguuuugugauggcaugcacuaugcgcgaugguccg

SEQ ID NO: 8866 - RNA, 37 nt, Artificial Sequence
  Description of Artificial Sequence:  Enzymatic Nucleic Acid
gaguugugugauggcaugcacuaugcgcgagguuuug

SEQ ID NO: 8867 - RNA, 37 nt, Artificial Sequence
  Description of Artificial Sequence:  Enzymatic Nucleic Acid
uccuugagugauggcaugcacuaugcgcgaggaguug

SEQ ID NO: 8868 - RNA, 37 nt, Artificial Sequence
  Description of Artificial Sequence:  Enzymatic Nucleic Acid
uuguacagugauggcaugcacuaugcgcgaacaugag

SEQ ID NO: 8869 - RNA, 37 nt, Artificial Sequence
  Description of Artificial Sequence:  Enzymatic Nucleic Acid
uacaggugugauggcaugcacuaugcgcgaguuuccg

SEQ ID NO: 8870 - RNA, 37 nt, Artificial Sequence
  Description of Artificial Sequence:  Enzymatic Nucleic Acid
guauuuugugauggcaugcacuaugcgcggaaagccc

SEQ ID NO: 8871 - RNA, 37 nt, Artificial Sequence
  Description of Artificial Sequence:  Enzymatic Nucleic Acid
acaaauggugauggcaugcacuaugcgcgacuaguaa

SEQ ID NO: 8872 - RNA, 37 nt, Artificial Sequence
  Description of Artificial Sequence:  Enzymatic Nucleic Acid
aaccacauugauggcaugcacuaugcgcgauccauau

SEQ ID NO: 8873 - RNA, 37 nt, Artificial Sequence
  Description of Artificial Sequence:  Enzymatic Nucleic Acid
aagggacuugauggcaugcacuaugcgcgaagauguu

SEQ ID NO: 8874 - RNA, 37 nt, Artificial Sequence
  Description of Artificial Sequence:  Enzymatic Nucleic Acid
aacagcggugauggcaugcacuaugcgcgauaaaggg

SEQ ID NO: 8875 - RNA, 37 nt, Artificial Sequence
  Description of Artificial Sequence:  Enzymatic Nucleic Acid
gguaacagugauggcaugcacuaugcgcgggcauaaa

SEQ ID NO: 8876 - RNA, 37 nt, Artificial Sequence
  Description of Artificial Sequence:  Enzymatic Nucleic Acid
uccuguggugauggcaugcacuaugcgcgaaugugcc

SEQ ID NO: 8877 - RNA, 37 nt, Artificial Sequence
  Description of Artificial Sequence:  Enzymatic Nucleic Acid
uuuccaauugauggcaugcacuaugcgcgaauaggcc

SEQ ID NO: 8878 - RNA, 37 nt, Artificial Sequence
  Description of Artificial Sequence:  Enzymatic Nucleic Acid
ccacaauuugauggcaugcacuaugcgcgguugacau

SEQ ID NO: 8879 - RNA, 37 nt, Artificial Sequence
  Description of Artificial Sequence:  Enzymatic Nucleic Acid
aggggcggugauggcaugcacuaugcgcgaaacccca

SEQ ID NO: 8880 - RNA, 37 nt, Artificial Sequence
  Description of Artificial Sequence:  Enzymatic Nucleic Acid
gaaaggggugauggcaugcacuaugcgcgggcaaacc

SEQ ID NO: 8881 - RNA, 37 nt, Artificial Sequence
  Description of Artificial Sequence:  Enzymatic Nucleic Acid
ccacauugugauggcaugcacuaugcgcggugaaagg

SEQ ID NO: 8882 - RNA, 37 nt, Artificial Sequence
  Description of Artificial Sequence:  Enzymatic Nucleic Acid
cauuaaagugauggcaugcacuaugcgcgagaauauc

SEQ ID NO: 8883 - RNA, 37 nt, Artificial Sequence
  Description of Artificial Sequence:  Enzymatic Nucleic Acid
uauaaaggugauggcaugcacuaugcgcgauuaaagc

SEQ ID NO: 8884 - RNA, 37 nt, Artificial Sequence
  Description of Artificial Sequence:  Enzymatic Nucleic Acid
uaugcaugugauggcaugcacuaugcgcgauauaaag

SEQ ID NO: 8885 - RNA, 37 nt, Artificial Sequence
  Description of Artificial Sequence:  Enzymatic Nucleic Acid
cuuguaugugauggcaugcacuaugcgcgaugcauau

SEQ ID NO: 8886 - RNA, 37 nt, Artificial Sequence
  Description of Artificial Sequence:  Enzymatic Nucleic Acid
uaaguuggugauggcaugcacuaugcgcggagaaagu

SEQ ID NO: 8887 - RNA, 37 nt, Artificial Sequence
  Description of Artificial Sequence:  Enzymatic Nucleic Acid
uaaagguuugauggcaugcacuaugcgcgacauacug

SEQ ID NO: 8888 - RNA, 37 nt, Artificial Sequence
  Description of Artificial Sequence:  Enzymatic Nucleic Acid
uugccgagugauggcaugcacuaugcgcgaacggggu

SEQ ID NO: 8889 - RNA, 37 nt, Artificial Sequence
  Description of Artificial Sequence:  Enzymatic Nucleic Acid
acacuuggugauggcaugcacuaugcgcgauagacca

SEQ ID NO: 8890 - RNA, 37 nt, Artificial Sequence
  Description of Artificial Sequence:  Enzymatic Nucleic Acid
ugcgucagugauggcaugcacuaugcgcgaaacacuu

SEQ ID NO: 8891 - RNA, 37 nt, Artificial Sequence
  Description of Artificial Sequence:  Enzymatic Nucleic Acid
gguugcguugauggcaugcacuaugcgcgagcaaaca

SEQ ID NO: 8892 - RNA, 37 nt, Artificial Sequence
  Description of Artificial Sequence:  Enzymatic Nucleic Acid
ggggguugugauggcaugcacuaugcgcggucagcaa

SEQ ID NO: 8893 - RNA, 37 nt, Artificial Sequence
  Description of Artificial Sequence:  Enzymatic Nucleic Acid
cacgcaugugauggcaugcacuaugcgcggcugaugg

SEQ ID NO: 8894 - RNA, 37 nt, Artificial Sequence
  Description of Artificial Sequence:  Enzymatic Nucleic Acid
guuccacgugauggcaugcacuaugcgcgaugcgcug

SEQ ID NO: 8895 - RNA, 37 nt, Artificial Sequence
  Description of Artificial Sequence:  Enzymatic Nucleic Acid
uggaucggugauggcaugcacuaugcgcgagaggaga

SEQ ID NO: 8896 - RNA, 37 nt, Artificial Sequence
  Description of Artificial Sequence:  Enzymatic Nucleic Acid
guauggauugauggcaugcacuaugcgcgggcagagg

SEQ ID NO: 8897 - RNA, 37 nt, Artificial Sequence
  Description of Artificial Sequence:  Enzymatic Nucleic Acid
gaguuccgugauggcaugcacuaugcgcggguaugga

SEQ ID NO: 8898 - RNA, 37 nt, Artificial Sequence
  Description of Artificial Sequence:  Enzymatic Nucleic Acid
aaaacaagugauggcaugcacuaugcgcgggcuagga

SEQ ID NO: 8899 - RNA, 37 nt, Artificial Sequence
  Description of Artificial Sequence:  Enzymatic Nucleic Acid
gcugcgagugauggcaugcacuaugcgcgaaaacaag

SEQ ID NO: 8900 - RNA, 37 nt, Artificial Sequence
  Description of Artificial Sequence:  Enzymatic Nucleic Acid
accugcugugauggcaugcacuaugcgcggagcaaaa

SEQ ID NO: 8901 - RNA, 37 nt, Artificial Sequence
  Description of Artificial Sequence:  Enzymatic Nucleic Acid
agaauuguugauggcaugcacuaugcgcgagucccga

SEQ ID NO: 8902 - RNA, 37 nt, Artificial Sequence
  Description of Artificial Sequence:  Enzymatic Nucleic Acid
cgggagagugauggcaugcacuaugcgcgacgacaga

SEQ ID NO: 8903 - RNA, 37 nt, Artificial Sequence
  Description of Artificial Sequence:  Enzymatic Nucleic Acid
uauauuugugauggcaugcacuaugcgcggggagagc

SEQ ID NO: 8904 - RNA, 37 nt, Artificial Sequence
  Description of Artificial Sequence:  Enzymatic Nucleic Acid
cagccuagugauggcaugcacuaugcgcgagccaugg

SEQ ID NO: 8905 - RNA, 37 nt, Artificial Sequence
  Description of Artificial Sequence:  Enzymatic Nucleic Acid
guuggcagugauggcaugcacuaugcgcgacagccua

SEQ ID NO: 8906 - RNA, 37 nt, Artificial Sequence
  Description of Artificial Sequence:  Enzymatic Nucleic Acid
ccaguuggugauggcaugcacuaugcgcgagcacagc

SEQ ID NO: 8907 - RNA, 37 nt, Artificial Sequence
  Description of Artificial Sequence:  Enzymatic Nucleic Acid
acgucccgugauggcaugcacuaugcgcgguaggauc

SEQ ID NO: 8908 - RNA, 37 nt, Artificial Sequence
  Description of Artificial Sequence:  Enzymatic Nucleic Acid
ggauucagugauggcaugcacuaugcgcggccgacgg

SEQ ID NO: 8909 - RNA, 37 nt, Artificial Sequence
  Description of Artificial Sequence:  Enzymatic Nucleic Acid
gcgggauuugauggcaugcacuaugcgcgagcgccga

SEQ ID NO: 8910 - RNA, 37 nt, Artificial Sequence
  Description of Artificial Sequence:  Enzymatic Nucleic Acid
gucguccgugauggcaugcacuaugcgcggggauuca

SEQ ID NO: 8911 - RNA, 37 nt, Artificial Sequence
  Description of Artificial Sequence:  Enzymatic Nucleic Acid
ggagggguugauggcaugcacuaugcgcgguccgcgg

SEQ ID NO: 8912 - RNA, 37 nt, Artificial Sequence
  Description of Artificial Sequence:  Enzymatic Nucleic Acid
gccccaagugauggcaugcacuaugcgcgggccccgg

SEQ ID NO: 8913 - RNA, 37 nt, Artificial Sequence
  Description of Artificial Sequence:  Enzymatic Nucleic Acid
gaagcgggugauggcaugcacuaugcgcggguagagc

SEQ ID NO: 8914 - RNA, 37 nt, Artificial Sequence
  Description of Artificial Sequence:  Enzymatic Nucleic Acid
cggagaagugauggcaugcacuaugcgcggggcggua

SEQ ID NO: 8915 - RNA, 37 nt, Artificial Sequence
  Description of Artificial Sequence:  Enzymatic Nucleic Acid
acaauaggugauggcaugcacuaugcgcgggagaagc

SEQ ID NO: 8916 - RNA, 37 nt, Artificial Sequence
  Description of Artificial Sequence:  Enzymatic Nucleic Acid
uggacgguugauggcaugcacuaugcgcggguacaau

SEQ ID NO: 8917 - RNA, 37 nt, Artificial Sequence
  Description of Artificial Sequence:  Enzymatic Nucleic Acid
gagaggugugauggcaugcacuaugcgcggccccgug

SEQ ID NO: 8918 - RNA, 37 nt, Artificial Sequence
  Description of Artificial Sequence:  Enzymatic Nucleic Acid
ggaguccgugauggcaugcacuaugcgcgguaaagag

SEQ ID NO: 8919 - RNA, 37 nt, Artificial Sequence
  Description of Artificial Sequence:  Enzymatic Nucleic Acid
ugagaaggugauggcaugcacuaugcgcgacagacgg

SEQ ID NO: 8920 - RNA, 37 nt, Artificial Sequence
  Description of Artificial Sequence:  Enzymatic Nucleic Acid
cgguccggugauggcaugcacuaugcgcgagaugaga

SEQ ID NO: 8921 - RNA, 37 nt, Artificial Sequence
  Description of Artificial Sequence:  Enzymatic Nucleic Acid
gcgaagugugauggcaugcacuaugcgcgacacgguc

SEQ ID NO: 8922 - RNA, 37 nt, Artificial Sequence
  Description of Artificial Sequence:  Enzymatic Nucleic Acid
aggugaagugauggcaugcacuaugcgcggaagugca

SEQ ID NO: 8923 - RNA, 37 nt, Artificial Sequence
  Description of Artificial Sequence:  Enzymatic Nucleic Acid
gcgacgugugauggcaugcacuaugcgcgagagguga

SEQ ID NO: 8924 - RNA, 37 nt, Artificial Sequence
  Description of Artificial Sequence:  Enzymatic Nucleic Acid
ucuccaugugauggcaugcacuaugcgcggacgugca

SEQ ID NO: 8925 - RNA, 37 nt, Artificial Sequence
  Description of Artificial Sequence:  Enzymatic Nucleic Acid
ugggcguuugauggcaugcacuaugcgcgacgguggu

SEQ ID NO: 8926 - RNA, 37 nt, Artificial Sequence
  Description of Artificial Sequence:  Enzymatic Nucleic Acid
ccugugggugauggcaugcacuaugcgcgguucacgg

SEQ ID NO: 8927 - RNA, 37 nt, Artificial Sequence
  Description of Artificial Sequence:  Enzymatic Nucleic Acid
accuugggugauggcaugcacuaugcgcgagguuccu

SEQ ID NO: 8928 - RNA, 37 nt, Artificial Sequence
  Description of Artificial Sequence:  Enzymatic Nucleic Acid
cucuuaugugauggcaugcacuaugcgcgaagaccuu

SEQ ID NO: 8929 - RNA, 37 nt, Artificial Sequence
  Description of Artificial Sequence:  Enzymatic Nucleic Acid
aggucgguugauggcaugcacuaugcgcgguugacau

SEQ ID NO: 8930 - RNA, 37 nt, Artificial Sequence
  Description of Artificial Sequence:  Enzymatic Nucleic Acid
cucaagguugauggcaugcacuaugcgcgggucguug

SEQ ID NO: 8931 - RNA, 37 nt, Artificial Sequence
  Description of Artificial Sequence:  Enzymatic Nucleic Acid
guaugccuugauggcaugcacuaugcgcgaaggucgg

SEQ ID NO: 8932 - RNA, 37 nt, Artificial Sequence
  Description of Artificial Sequence:  Enzymatic Nucleic Acid
cucccacuugauggcaugcacuaugcgcgauuaaaca

SEQ ID NO: 8933 - RNA, 37 nt, Artificial Sequence
  Description of Artificial Sequence:  Enzymatic Nucleic Acid
aaaaguugugauggcaugcacuaugcgcgauggugcu

SEQ ID NO: 8934 - RNA, 37 nt, Artificial Sequence
  Description of Artificial Sequence:  Enzymatic Nucleic Acid
ugauuaggugauggcaugcacuaugcgcgagagguga

SEQ ID NO: 8935 - RNA, 37 nt, Artificial Sequence
  Description of Artificial Sequence:  Enzymatic Nucleic Acid
acccaaggugauggcaugcacuaugcgcgacagcuug

SEQ ID NO: 8936 - RNA, 37 nt, Artificial Sequence
  Description of Artificial Sequence:  Enzymatic Nucleic Acid
auacggguugauggcaugcacuaugcgcgaaugucca

SEQ ID NO: 8937 - RNA, 37 nt, Artificial Sequence
  Description of Artificial Sequence:  Enzymatic Nucleic Acid
ucagaaggugauggcaugcacuaugcgcgaaaaaaga

SEQ ID NO: 8938 - RNA, 37 nt, Artificial Sequence
  Description of Artificial Sequence:  Enzymatic Nucleic Acid
aaagaaguugauggcaugcacuaugcgcgagaaggca

SEQ ID NO: 8939 - RNA, 37 nt, Artificial Sequence
  Description of Artificial Sequence:  Enzymatic Nucleic Acid
ggagaucuugauggcaugcacuaugcgcggaauagaa

SEQ ID NO: 8940 - RNA, 37 nt, Artificial Sequence
  Description of Artificial Sequence:  Enzymatic Nucleic Acid
ggcgguguugauggcaugcacuaugcgcggaggagau

SEQ ID NO: 8941 - RNA, 37 nt, Artificial Sequence
  Description of Artificial Sequence:  Enzymatic Nucleic Acid
agcagaggugauggcaugcacuaugcgcgggugucga

SEQ ID NO: 8942 - RNA, 37 nt, Artificial Sequence
  Description of Artificial Sequence:  Enzymatic Nucleic Acid
auacagagugauggcaugcacuaugcgcgagaggcgg

SEQ ID NO: 8943 - RNA, 37 nt, Artificial Sequence
  Description of Artificial Sequence:  Enzymatic Nucleic Acid
caucaacuugauggcaugcacuaugcgcgaccccaac

SEQ ID NO: 8944 - RNA, 37 nt, Artificial Sequence
  Description of Artificial Sequence:  Enzymatic Nucleic Acid
agauucauugauggcaugcacuaugcgcgaacucacc

SEQ ID NO: 8945 - RNA, 37 nt, Artificial Sequence
  Description of Artificial Sequence:  Enzymatic Nucleic Acid
gcuagauuugauggcaugcacuaugcgcgaucaacuc

SEQ ID NO: 8946 - RNA, 37 nt, Artificial Sequence
  Description of Artificial Sequence:  Enzymatic Nucleic Acid
caguuucuugauggcaugcacuaugcgcggcccaaaa

SEQ ID NO: 8947 - RNA, 37 nt, Artificial Sequence
  Description of Artificial Sequence:  Enzymatic Nucleic Acid
caaauauuugauggcaugcacuaugcgcgaagaacag

SEQ ID NO: 8948 - RNA, 37 nt, Artificial Sequence
  Description of Artificial Sequence:  Enzymatic Nucleic Acid
gaggagugugauggcaugcacuaugcgcggaauccac

SEQ ID NO: 8949 - RNA, 37 nt, Artificial Sequence
  Description of Artificial Sequence:  Enzymatic Nucleic Acid
ucuauaugugauggcaugcacuaugcgcgaggaggag

SEQ ID NO: 8950 - RNA, 37 nt, Artificial Sequence
  Description of Artificial Sequence:  Enzymatic Nucleic Acid
gauaggggugauggcaugcacuaugcgcgauuuggug

SEQ ID NO: 8951 - RNA, 37 nt, Artificial Sequence
  Description of Artificial Sequence:  Enzymatic Nucleic Acid
ugccucuuugauggcaugcacuaugcgcggucuaaca

SEQ ID NO: 8952 - RNA, 37 nt, Artificial Sequence
  Description of Artificial Sequence:  Enzymatic Nucleic Acid
cugcgaggugauggcaugcacuaugcgcggagggagu

SEQ ID NO: 8953 - RNA, 37 nt, Artificial Sequence
  Description of Artificial Sequence:  Enzymatic Nucleic Acid
uucgucugugauggcaugcacuaugcgcggaggcgag

SEQ ID NO: 8954 - RNA, 37 nt, Artificial Sequence
  Description of Artificial Sequence:  Enzymatic Nucleic Acid
gagaccuuugauggcaugcacuaugcgcggucugcga

SEQ ID NO: 8955 - RNA, 37 nt, Artificial Sequence
  Description of Artificial Sequence:  Enzymatic Nucleic Acid
cgacgcggugauggcaugcacuaugcgcggauugaga

SEQ ID NO: 8956 - RNA, 37 nt, Artificial Sequence
  Description of Artificial Sequence:  Enzymatic Nucleic Acid
cugcgacgugauggcaugcacuaugcgcgggcgauug

SEQ ID NO: 8957 - RNA, 37 nt, Artificial Sequence
  Description of Artificial Sequence:  Enzymatic Nucleic Acid
aucuucugugauggcaugcacuaugcgcggacgcggc

SEQ ID NO: 8958 - RNA, 37 nt, Artificial Sequence
  Description of Artificial Sequence:  Enzymatic Nucleic Acid
gauuaaagugauggcaugcacuaugcgcgaagguacc

SEQ ID NO: 8959 - RNA, 37 nt, Artificial Sequence
  Description of Artificial Sequence:  Enzymatic Nucleic Acid
augaauguugauggcaugcacuaugcgcgaggaaaag

SEQ ID NO: 8960 - RNA, 37 nt, Artificial Sequence
  Description of Artificial Sequence:  Enzymatic Nucleic Acid
uccuccugugauggcaugcacuaugcgcgaaaugaau

SEQ ID NO: 8961 - RNA, 37 nt, Artificial Sequence
  Description of Artificial Sequence:  Enzymatic Nucleic Acid
acaucuauugauggcaugcacuaugcgcgaacaaugu

SEQ ID NO: 8962 - RNA, 37 nt, Artificial Sequence
  Description of Artificial Sequence:  Enzymatic Nucleic Acid
ccuguuuuugauggcaugcacuaugcgcgauuuacug

SEQ ID NO: 8963 - RNA, 37 nt, Artificial Sequence
  Description of Artificial Sequence:  Enzymatic Nucleic Acid
cuagcaggugauggcaugcacuaugcgcgauaguuaa

SEQ ID NO: 8964 - RNA, 37 nt, Artificial Sequence
  Description of Artificial Sequence:  Enzymatic Nucleic Acid
aaaccuagugauggcaugcacuaugcgcgaggcauag

SEQ ID NO: 8965 - RNA, 37 nt, Artificial Sequence
  Description of Artificial Sequence:  Enzymatic Nucleic Acid
ucuaagggugauggcaugcacuaugcgcgaaauauuu

SEQ ID NO: 8966 - RNA, 37 nt, Artificial Sequence
  Description of Artificial Sequence:  Enzymatic Nucleic Acid
uaaugucgugauggcaugcacuaugcgcggucuggaa

SEQ ID NO: 8967 - RNA, 37 nt, Artificial Sequence
  Description of Artificial Sequence:  Enzymatic Nucleic Acid
aauaauguugauggcaugcacuaugcgcggcgucugg

SEQ ID NO: 8968 - RNA, 37 nt, Artificial Sequence
  Description of Artificial Sequence:  Enzymatic Nucleic Acid
aaaugaggugauggcaugcacuaugcgcggcuacgug

SEQ ID NO: 8969 - RNA, 37 nt, Artificial Sequence
  Description of Artificial Sequence:  Enzymatic Nucleic Acid
gugacccgugauggcaugcacuaugcgcgaaaaugag

SEQ ID NO: 8970 - RNA, 37 nt, Artificial Sequence
  Description of Artificial Sequence:  Enzymatic Nucleic Acid
ugccuuuuugauggcaugcacuaugcgcggagguuug

SEQ ID NO: 8971 - RNA, 37 nt, Artificial Sequence
  Description of Artificial Sequence:  Enzymatic Nucleic Acid
cugaugauugauggcaugcacuaugcgcgggggaaga

SEQ ID NO: 8972 - RNA, 37 nt, Artificial Sequence
  Description of Artificial Sequence:  Enzymatic Nucleic Acid
uuugaaugugauggcaugcacuaugcgcgagggucca

SEQ ID NO: 8973 - RNA, 37 nt, Artificial Sequence
  Description of Artificial Sequence:  Enzymatic Nucleic Acid
uccuugugugauggcaugcacuaugcgcgggguugag

SEQ ID NO: 8974 - RNA, 37 nt, Artificial Sequence
  Description of Artificial Sequence:  Enzymatic Nucleic Acid
cuuguuggugauggcaugcacuaugcgcgguccggcc

SEQ ID NO: 8975 - RNA, 37 nt, Artificial Sequence
  Description of Artificial Sequence:  Enzymatic Nucleic Acid
gcccugagugauggcaugcacuaugcgcggugagggc

SEQ ID NO: 8976 - RNA, 37 nt, Artificial Sequence
  Description of Artificial Sequence:  Enzymatic Nucleic Acid
gcugcuggugauggcaugcacuaugcgcgacaguugu

SEQ ID NO: 8977 - RNA, 37 nt, Artificial Sequence
  Description of Artificial Sequence:  Enzymatic Nucleic Acid
gguggaggugauggcaugcacuaugcgcgaggaggag

SEQ ID NO: 8978 - RNA, 37 nt, Artificial Sequence
  Description of Artificial Sequence:  Enzymatic Nucleic Acid
ggaaaguaugauggcaugcacuaugcgcgagggcccu

SEQ ID NO: 8979 - RNA, 37 nt, Artificial Sequence
  Description of Artificial Sequence:  Enzymatic Nucleic Acid
ggcagagaugauggcaugcacuaugcgcgaguauucu

SEQ ID NO: 8980 - RNA, 37 nt, Artificial Sequence
  Description of Artificial Sequence:  Enzymatic Nucleic Acid
guucgguaugauggcaugcacuaugcgcgaggguccc

SEQ ID NO: 8981 - RNA, 37 nt, Artificial Sequence
  Description of Artificial Sequence:  Enzymatic Nucleic Acid
gccuguaaugauggcaugcacuaugcgcgacgagcag

SEQ ID NO: 8982 - RNA, 37 nt, Artificial Sequence
  Description of Artificial Sequence:  Enzymatic Nucleic Acid
uuugucaaugauggcaugcacuaugcgcgaagaaaaa

SEQ ID NO: 8983 - RNA, 37 nt, Artificial Sequence
  Description of Artificial Sequence:  Enzymatic Nucleic Acid
ccaagacaugauggcaugcacuaugcgcgacgggugu

SEQ ID NO: 8984 - RNA, 37 nt, Artificial Sequence
  Description of Artificial Sequence:  Enzymatic Nucleic Acid
ggccaagaugauggcaugcacuaugcgcgacacgggu

SEQ ID NO: 8985 - RNA, 37 nt, Artificial Sequence
  Description of Artificial Sequence:  Enzymatic Nucleic Acid
gaggacaaugauggcaugcacuaugcgcgagguuggu

SEQ ID NO: 8986 - RNA, 37 nt, Artificial Sequence
  Description of Artificial Sequence:  Enzymatic Nucleic Acid
uuggaggaugauggcaugcacuaugcgcgaacagguu

SEQ ID NO: 8987 - RNA, 37 nt, Artificial Sequence
  Description of Artificial Sequence:  Enzymatic Nucleic Acid
aaccaggaugauggcaugcacuaugcgcgaaauugga

SEQ ID NO: 8988 - RNA, 37 nt, Artificial Sequence
  Description of Artificial Sequence:  Enzymatic Nucleic Acid
cgcagacaugauggcaugcacuaugcgcgauccagcg

SEQ ID NO: 8989 - RNA, 37 nt, Artificial Sequence
  Description of Artificial Sequence:  Enzymatic Nucleic Acid
gccgcagaugauggcaugcacuaugcgcgacauccag

SEQ ID NO: 8990 - RNA, 37 nt, Artificial Sequence
  Description of Artificial Sequence:  Enzymatic Nucleic Acid
agaaccaaugauggcaugcacuaugcgcgaagaagau

SEQ ID NO: 8991 - RNA, 37 nt, Artificial Sequence
  Description of Artificial Sequence:  Enzymatic Nucleic Acid
acgggcaaugauggcaugcacuaugcgcgauaccuug

SEQ ID NO: 8992 - RNA, 37 nt, Artificial Sequence
  Description of Artificial Sequence:  Enzymatic Nucleic Acid
uuagaggaugauggcaugcacuaugcgcgaaacgggc

SEQ ID NO: 8993 - RNA, 37 nt, Artificial Sequence
  Description of Artificial Sequence:  Enzymatic Nucleic Acid
gagggaaaugauggcaugcacuaugcgcgauagaggu

SEQ ID NO: 8994 - RNA, 37 nt, Artificial Sequence
  Description of Artificial Sequence:  Enzymatic Nucleic Acid
uacagcaaugauggcaugcacuaugcgcgaugaggga

SEQ ID NO: 8995 - RNA, 37 nt, Artificial Sequence
  Description of Artificial Sequence:  Enzymatic Nucleic Acid
guuuuguaugauggcaugcacuaugcgcgagcaacau

SEQ ID NO: 8996 - RNA, 37 nt, Artificial Sequence
  Description of Artificial Sequence:  Enzymatic Nucleic Acid
ugggaauaugauggcaugcacuaugcgcgaggugcag

SEQ ID NO: 8997 - RNA, 37 nt, Artificial Sequence
  Description of Artificial Sequence:  Enzymatic Nucleic Acid
ccacugaaugauggcaugcacuaugcgcgaaauggca

SEQ ID NO: 8998 - RNA, 37 nt, Artificial Sequence
  Description of Artificial Sequence:  Enzymatic Nucleic Acid
aagccagaugauggcaugcacuaugcgcgaguggggg

SEQ ID NO: 8999 - RNA, 37 nt, Artificial Sequence
  Description of Artificial Sequence:  Enzymatic Nucleic Acid
caaaaccaugauggcaugcacuaugcgcgaucaucca

SEQ ID NO: 9000 - RNA, 37 nt, Artificial Sequence
  Description of Artificial Sequence:  Enzymatic Nucleic Acid
auguuguaugauggcaugcacuaugcgcgagacuugg

SEQ ID NO: 9001 - RNA, 37 nt, Artificial Sequence
  Description of Artificial Sequence:  Enzymatic Nucleic Acid
auugguaaugauggcaugcacuaugcgcgagcggcau

SEQ ID NO: 9002 - RNA, 37 nt, Artificial Sequence
  Description of Artificial Sequence:  Enzymatic Nucleic Acid
cccaaagaugauggcaugcacuaugcgcgaaaagaaa

SEQ ID NO: 9003 - RNA, 37 nt, Artificial Sequence
  Description of Artificial Sequence:  Enzymatic Nucleic Acid
cccaauuaugauggcaugcacuaugcgcgauauccca

SEQ ID NO: 9004 - RNA, 37 nt, Artificial Sequence
  Description of Artificial Sequence:  Enzymatic Nucleic Acid
uuuuuguaugauggcaugcacuaugcgcgaauauguu

SEQ ID NO: 9005 - RNA, 37 nt, Artificial Sequence
  Description of Artificial Sequence:  Enzymatic Nucleic Acid
cuaaaacaugauggcaugcacuaugcgcgauuuugau

SEQ ID NO: 9006 - RNA, 37 nt, Artificial Sequence
  Description of Artificial Sequence:  Enzymatic Nucleic Acid
uccuaaaaugauggcaugcacuaugcgcgacauuuug

SEQ ID NO: 9007 - RNA, 37 nt, Artificial Sequence
  Description of Artificial Sequence:  Enzymatic Nucleic Acid
ccuguuuaugauggcaugcacuaugcgcgaggaaguu

SEQ ID NO: 9008 - RNA, 37 nt, Artificial Sequence
  Description of Artificial Sequence:  Enzymatic Nucleic Acid
uucguugaugauggcaugcacuaugcgcgauacuuuc

SEQ ID NO: 9009 - RNA, 37 nt, Artificial Sequence
  Description of Artificial Sequence:  Enzymatic Nucleic Acid
aagacccaugauggcaugcacuaugcgcgaauucguu

SEQ ID NO: 9010 - RNA, 37 nt, Artificial Sequence
  Description of Artificial Sequence:  Enzymatic Nucleic Acid
aauauccaugauggcaugcacuaugcgcgauugcgug

SEQ ID NO: 9011 - RNA, 37 nt, Artificial Sequence
  Description of Artificial Sequence:  Enzymatic Nucleic Acid
aagguucaugauggcaugcacuaugcgcgauacuguu

SEQ ID NO: 9012 - RNA, 37 nt, Artificial Sequence
  Description of Artificial Sequence:  Enzymatic Nucleic Acid
ucagcaaaugauggcaugcacuaugcgcgacuuggca

SEQ ID NO: 9013 - RNA, 37 nt, Artificial Sequence
  Description of Artificial Sequence:  Enzymatic Nucleic Acid
aggagacaugauggcaugcacuaugcgcgaaagguuc

SEQ ID NO: 9014 - RNA, 37 nt, Artificial Sequence
  Description of Artificial Sequence:  Enzymatic Nucleic Acid
agaggagaugauggcaugcacuaugcgcgacaaaggu

SEQ ID NO: 9015 - RNA, 37 nt, Artificial Sequence
  Description of Artificial Sequence:  Enzymatic Nucleic Acid
gagcaaaaugauggcaugcacuaugcgcgaagcggcu

SEQ ID NO: 9016 - RNA, 37 nt, Artificial Sequence
  Description of Artificial Sequence:  Enzymatic Nucleic Acid
gagcacgaugauggcaugcacuaugcgcgagaauugu

SEQ ID NO: 9017 - RNA, 37 nt, Artificial Sequence
  Description of Artificial Sequence:  Enzymatic Nucleic Acid
uggcagcaugauggcaugcacuaugcgcgagccuagc

SEQ ID NO: 9018 - RNA, 37 nt, Artificial Sequence
  Description of Artificial Sequence:  Enzymatic Nucleic Acid
gacguaaaugauggcaugcacuaugcgcgaaaggacg

SEQ ID NO: 9019 - RNA, 37 nt, Artificial Sequence
  Description of Artificial Sequence:  Enzymatic Nucleic Acid
ggucgguaugauggcaugcacuaugcgcgaauaggcg

SEQ ID NO: 9020 - RNA, 37 nt, Artificial Sequence
  Description of Artificial Sequence:  Enzymatic Nucleic Acid
agaaggcaugauggcaugcacuaugcgcgagacgggg

SEQ ID NO: 9021 - RNA, 37 nt, Artificial Sequence
  Description of Artificial Sequence:  Enzymatic Nucleic Acid
gaagugcaugauggcaugcacuaugcgcgacgguccg

SEQ ID NO: 9022 - RNA, 37 nt, Artificial Sequence
  Description of Artificial Sequence:  Enzymatic Nucleic Acid
gucguugaugauggcaugcacuaugcgcgauugcuga

SEQ ID NO: 9023 - RNA, 37 nt, Artificial Sequence
  Description of Artificial Sequence:  Enzymatic Nucleic Acid
uaaacacaugauggcaugcacuaugcgcgagucuuug

SEQ ID NO: 9024 - RNA, 37 nt, Artificial Sequence
  Description of Artificial Sequence:  Enzymatic Nucleic Acid
auuaaacaugauggcaugcacuaugcgcgacagucuu

SEQ ID NO: 9025 - RNA, 37 nt, Artificial Sequence
  Description of Artificial Sequence:  Enzymatic Nucleic Acid
ucauuaaaugauggcaugcacuaugcgcgacacaguc

SEQ ID NO: 9026 - RNA, 37 nt, Artificial Sequence
  Description of Artificial Sequence:  Enzymatic Nucleic Acid
uccuaguaugauggcaugcacuaugcgcgaaagaccu

SEQ ID NO: 9027 - RNA, 37 nt, Artificial Sequence
  Description of Artificial Sequence:  Enzymatic Nucleic Acid
uaugccuaugauggcaugcacuaugcgcgagccuccu

SEQ ID NO: 9028 - RNA, 37 nt, Artificial Sequence
  Description of Artificial Sequence:  Enzymatic Nucleic Acid
ggugaacaugauggcaugcacuaugcgcgaccaauuu

SEQ ID NO: 9029 - RNA, 37 nt, Artificial Sequence
  Description of Artificial Sequence:  Enzymatic Nucleic Acid
cuggugaaugauggcaugcacuaugcgcgacaccaau

SEQ ID NO: 9030 - RNA, 37 nt, Artificial Sequence
  Description of Artificial Sequence:  Enzymatic Nucleic Acid
gacaugaaugauggcaugcacuaugcgcgaugagaug

SEQ ID NO: 9031 - RNA, 37 nt, Artificial Sequence
  Description of Artificial Sequence:  Enzymatic Nucleic Acid
caguaggaugauggcaugcacuaugcgcgaugaacau

SEQ ID NO: 9032 - RNA, 37 nt, Artificial Sequence
  Description of Artificial Sequence:  Enzymatic Nucleic Acid
ggcuugaaugauggcaugcacuaugcgcgaguaggac

SEQ ID NO: 9033 - RNA, 37 nt, Artificial Sequence
  Description of Artificial Sequence:  Enzymatic Nucleic Acid
ccaaggcaugauggcaugcacuaugcgcgagcuugga

SEQ ID NO: 9034 - RNA, 37 nt, Artificial Sequence
  Description of Artificial Sequence:  Enzymatic Nucleic Acid
uaacuccaugauggcaugcacuaugcgcgagaagcuc

SEQ ID NO: 9035 - RNA, 37 nt, Artificial Sequence
  Description of Artificial Sequence:  Enzymatic Nucleic Acid
ccccgauaugauggcaugcacuaugcgcgagagcaga

SEQ ID NO: 9036 - RNA, 37 nt, Artificial Sequence
  Description of Artificial Sequence:  Enzymatic Nucleic Acid
gaggugaaugauggcaugcacuaugcgcgaauguucc

SEQ ID NO: 9037 - RNA, 37 nt, Artificial Sequence
  Description of Artificial Sequence:  Enzymatic Nucleic Acid
ccccaacaugauggcaugcacuaugcgcgagaauagc

SEQ ID NO: 9038 - RNA, 37 nt, Artificial Sequence
  Description of Artificial Sequence:  Enzymatic Nucleic Acid
caccccaaugauggcaugcacuaugcgcgacagaaua

SEQ ID NO: 9039 - RNA, 37 nt, Artificial Sequence
  Description of Artificial Sequence:  Enzymatic Nucleic Acid
aacguugaugauggcaugcacuaugcgcgauagcuga

SEQ ID NO: 9040 - RNA, 37 nt, Artificial Sequence
  Description of Artificial Sequence:  Enzymatic Nucleic Acid
ugaaaccaugauggcaugcacuaugcgcgaauaguug

SEQ ID NO: 9041 - RNA, 37 nt, Artificial Sequence
  Description of Artificial Sequence:  Enzymatic Nucleic Acid
aaguaagaugauggcaugcacuaugcgcgaggaaaug

SEQ ID NO: 9042 - RNA, 37 nt, Artificial Sequence
  Description of Artificial Sequence:  Enzymatic Nucleic Acid
uucaagaaugauggcaugcacuaugcgcgaguuucuc

SEQ ID NO: 9043 - RNA, 37 nt, Artificial Sequence
  Description of Artificial Sequence:  Enzymatic Nucleic Acid
ccaaaagaugauggcaugcacuaugcgcgaccaaaua

SEQ ID NO: 9044 - RNA, 37 nt, Artificial Sequence
  Description of Artificial Sequence:  Enzymatic Nucleic Acid
cgaauccaugauggcaugcacuaugcgcgacuccaaa

SEQ ID NO: 9045 - RNA, 37 nt, Artificial Sequence
  Description of Artificial Sequence:  Enzymatic Nucleic Acid
ucuaacaaugauggcaugcacuaugcgcgaguaguuu

SEQ ID NO: 9046 - RNA, 37 nt, Artificial Sequence
  Description of Artificial Sequence:  Enzymatic Nucleic Acid
ucgucuaaugauggcaugcacuaugcgcgaacaguag

SEQ ID NO: 9047 - RNA, 37 nt, Artificial Sequence
  Description of Artificial Sequence:  Enzymatic Nucleic Acid
aauacuaaugauggcaugcacuaugcgcgauugagau

SEQ ID NO: 9048 - RNA, 37 nt, Artificial Sequence
  Description of Artificial Sequence:  Enzymatic Nucleic Acid
ucuaucaaugauggcaugcacuaugcgcgaauguccu

SEQ ID NO: 9049 - RNA, 37 nt, Artificial Sequence
  Description of Artificial Sequence:  Enzymatic Nucleic Acid
auugcuuaugauggcaugcacuaugcgcgaucuauca

SEQ ID NO: 9050 - RNA, 37 nt, Artificial Sequence
  Description of Artificial Sequence:  Enzymatic Nucleic Acid
gggccccaugauggcaugcacuaugcgcgaaauugcu

SEQ ID NO: 9051 - RNA, 37 nt, Artificial Sequence
  Description of Artificial Sequence:  Enzymatic Nucleic Acid
uuuaguaaugauggcaugcacuaugcgcgauugggau

SEQ ID NO: 9052 - RNA, 37 nt, Artificial Sequence
  Description of Artificial Sequence:  Enzymatic Nucleic Acid
auuaacuaugauggcaugcacuaugcgcgauacucug

SEQ ID NO: 9053 - RNA, 37 nt, Artificial Sequence
  Description of Artificial Sequence:  Enzymatic Nucleic Acid
auuggggaugauggcaugcacuaugcgcgagaaagau

SEQ ID NO: 9054 - RNA, 37 nt, Artificial Sequence
  Description of Artificial Sequence:  Enzymatic Nucleic Acid
caccccaaugauggcaugcacuaugcgcgaguccccc

SEQ ID NO: 9055 - RNA, 37 nt, Artificial Sequence
  Description of Artificial Sequence:  Enzymatic Nucleic Acid
ugcuggcaugauggcaugcacuaugcgcgaguuguga

SEQ ID NO: 9056 - RNA, 38 nt, Artificial Sequence
  Description of Artificial Sequence:  Enzymatic Nucleic Acid
  misc_feature (11)..(16): Phosphorothioate 3'-Internucleotide Linkage
  misc_feature (20)..(20): Phosphorothioate 3'-Internucleotide Linkage
  misc_feature (22)..(22): Phosphorothioate 3'-Internucleotide Linkage
  misc_feature (24)..(25): Phosphorothioate 3'-Internucleotide Linkage
  misc_feature (28)..(28): Phosphorothioate 3'-Internucleotide Linkage
  misc_feature (30)..(30): Phosphorothioate 3'-Internucleotide Linkage
gccaccaggccgaaaggcgagucaaggucuaggaaagu

SEQ ID NO: 9057 - RNA, 38 nt, Artificial Sequence
  Description of Artificial Sequence:  Enzymatic Nucleic Acid
  misc_feature (11)..(16): Phosphorothioate 3'-Internucleotide Linkage
  misc_feature (20)..(20): Phosphorothioate 3'-Internucleotide Linkage
  misc_feature (22)..(22): Phosphorothioate 3'-Internucleotide Linkage
  misc_feature (24)..(25): Phosphorothioate 3'-Internucleotide Linkage
  misc_feature (28)..(28): Phosphorothioate 3'-Internucleotide Linkage
  misc_feature (30)..(30): Phosphorothioate 3'-Internucleotide Linkage
auucugaggccgaaaggcgagucaaggucuagggcuca

SEQ ID NO: 9058 - RNA, 38 nt, Artificial Sequence
  Description of Artificial Sequence:  Enzymatic Nucleic Acid
  misc_feature (11)..(16): Phosphorothioate 3'-Internucleotide Linkage
  misc_feature (20)..(20): Phosphorothioate 3'-Internucleotide Linkage
  misc_feature (22)..(22): Phosphorothioate 3'-Internucleotide Linkage
  misc_feature (24)..(25): Phosphorothioate 3'-Internucleotide Linkage
  misc_feature (28)..(28): Phosphorothioate 3'-Internucleotide Linkage
  misc_feature (30)..(30): Phosphorothioate 3'-Internucleotide Linkage
cgauaugggccgaaaggcgagucaaggucuagagacag

SEQ ID NO: 9059 - RNA, 38 nt, Artificial Sequence
  Description of Artificial Sequence:  Enzymatic Nucleic Acid
  misc_feature (11)..(16): Phosphorothioate 3'-Internucleotide Linkage
  misc_feature (20)..(20): Phosphorothioate 3'-Internucleotide Linkage
  misc_feature (22)..(22): Phosphorothioate 3'-Internucleotide Linkage
  misc_feature (24)..(25): Phosphorothioate 3'-Internucleotide Linkage
  misc_feature (28)..(28): Phosphorothioate 3'-Internucleotide Linkage
  misc_feature (30)..(30): Phosphorothioate 3'-Internucleotide Linkage
uccugauggccgaaaggcgagucaaggucugauguucu

SEQ ID NO: 9060 - RNA, 38 nt, Artificial Sequence
  Description of Artificial Sequence:  Enzymatic Nucleic Acid
  misc_feature (11)..(16): Phosphorothioate 3'-Internucleotide Linkage
  misc_feature (20)..(20): Phosphorothioate 3'-Internucleotide Linkage
  misc_feature (22)..(22): Phosphorothioate 3'-Internucleotide Linkage
  misc_feature (24)..(25): Phosphorothioate 3'-Internucleotide Linkage
  misc_feature (28)..(28): Phosphorothioate 3'-Internucleotide Linkage
  misc_feature (30)..(30): Phosphorothioate 3'-Internucleotide Linkage
aacacgaggccgaaaggcgagucaaggucuaggggucc

SEQ ID NO: 9061 - RNA, 38 nt, Artificial Sequence
  Description of Artificial Sequence:  Enzymatic Nucleic Acid
  misc_feature (11)..(16): Phosphorothioate 3'-Internucleotide Linkage
  misc_feature (20)..(20): Phosphorothioate 3'-Internucleotide Linkage
  misc_feature (22)..(22): Phosphorothioate 3'-Internucleotide Linkage
  misc_feature (24)..(25): Phosphorothioate 3'-Internucleotide Linkage
  misc_feature (28)..(28): Phosphorothioate 3'-Internucleotide Linkage
  misc_feature (30)..(30): Phosphorothioate 3'-Internucleotide Linkage
ugggacuggccgaaaggcgagucaaggucugaauuuug

SEQ ID NO: 9062 - RNA, 38 nt, Artificial Sequence
  Description of Artificial Sequence:  Enzymatic Nucleic Acid
  misc_feature (11)..(16): Phosphorothioate 3'-Internucleotide Linkage
  misc_feature (20)..(20): Phosphorothioate 3'-Internucleotide Linkage
  misc_feature (22)..(22): Phosphorothioate 3'-Internucleotide Linkage
  misc_feature (24)..(25): Phosphorothioate 3'-Internucleotide Linkage
  misc_feature (28)..(28): Phosphorothioate 3'-Internucleotide Linkage
  misc_feature (30)..(30): Phosphorothioate 3'-Internucleotide Linkage
acauccaggccgaaaggcgagucaaggucugauaacca

SEQ ID NO: 9063 - RNA, 38 nt, Artificial Sequence
  Description of Artificial Sequence:  Enzymatic Nucleic Acid
  misc_feature (11)..(16): Phosphorothioate 3'-Internucleotide Linkage
  misc_feature (20)..(20): Phosphorothioate 3'-Internucleotide Linkage
  misc_feature (22)..(22): Phosphorothioate 3'-Internucleotide Linkage
  misc_feature (24)..(25): Phosphorothioate 3'-Internucleotide Linkage
  misc_feature (28)..(28): Phosphorothioate 3'-Internucleotide Linkage
  misc_feature (30)..(30): Phosphorothioate 3'-Internucleotide Linkage
aaacgccggccgaaaggcgagucaaggucuagacacau

SEQ ID NO: 9064 - RNA, 38 nt, Artificial Sequence
  Description of Artificial Sequence:  Enzymatic Nucleic Acid
  misc_feature (11)..(16): Phosphorothioate 3'-Internucleotide Linkage
  misc_feature (20)..(20): Phosphorothioate 3'-Internucleotide Linkage
  misc_feature (22)..(22): Phosphorothioate 3'-Internucleotide Linkage
  misc_feature (24)..(25): Phosphorothioate 3'-Internucleotide Linkage
  misc_feature (28)..(28): Phosphorothioate 3'-Internucleotide Linkage
  misc_feature (30)..(30): Phosphorothioate 3'-Internucleotide Linkage
gcaggauggccgaaaggcgagucaaggucuagaggaag

SEQ ID NO: 9065 - RNA, 38 nt, Artificial Sequence
  Description of Artificial Sequence:  Enzymatic Nucleic Acid
  misc_feature (11)..(16): Phosphorothioate 3'-Internucleotide Linkage
  misc_feature (20)..(20): Phosphorothioate 3'-Internucleotide Linkage
  misc_feature (22)..(22): Phosphorothioate 3'-Internucleotide Linkage
  misc_feature (24)..(25): Phosphorothioate 3'-Internucleotide Linkage
  misc_feature (28)..(28): Phosphorothioate 3'-Internucleotide Linkage
  misc_feature (30)..(30): Phosphorothioate 3'-Internucleotide Linkage
cauagcaggccgaaaggcgagucaaggucuaggaugca

SEQ ID NO: 9066 - RNA, 38 nt, Artificial Sequence
  Description of Artificial Sequence:  Enzymatic Nucleic Acid
  misc_feature (11)..(16): Phosphorothioate 3'-Internucleotide Linkage
  misc_feature (20)..(20): Phosphorothioate 3'-Internucleotide Linkage
  misc_feature (22)..(22): Phosphorothioate 3'-Internucleotide Linkage
  misc_feature (24)..(25): Phosphorothioate 3'-Internucleotide Linkage
  misc_feature (28)..(28): Phosphorothioate 3'-Internucleotide Linkage
  misc_feature (30)..(30): Phosphorothioate 3'-Internucleotide Linkage
aggcauaggccgaaaggcgagucaaggucuagcaggau

SEQ ID NO: 9067 - RNA, 38 nt, Artificial Sequence
  Description of Artificial Sequence:  Enzymatic Nucleic Acid
  misc_feature (11)..(16): Phosphorothioate 3'-Internucleotide Linkage
  misc_feature (20)..(20): Phosphorothioate 3'-Internucleotide Linkage
  misc_feature (22)..(22): Phosphorothioate 3'-Internucleotide Linkage
  misc_feature (24)..(25): Phosphorothioate 3'-Internucleotide Linkage
  misc_feature (28)..(28): Phosphorothioate 3'-Internucleotide Linkage
  misc_feature (30)..(30): Phosphorothioate 3'-Internucleotide Linkage
agaugagggccgaaaggcgagucaaggucuauagcagc

SEQ ID NO: 9068 - RNA, 38 nt, Artificial Sequence
  Description of Artificial Sequence:  Enzymatic Nucleic Acid
  misc_feature (11)..(16): Phosphorothioate 3'-Internucleotide Linkage
  misc_feature (20)..(20): Phosphorothioate 3'-Internucleotide Linkage
  misc_feature (22)..(22): Phosphorothioate 3'-Internucleotide Linkage
  misc_feature (24)..(25): Phosphorothioate 3'-Internucleotide Linkage
  misc_feature (28)..(28): Phosphorothioate 3'-Internucleotide Linkage
  misc_feature (30)..(30): Phosphorothioate 3'-Internucleotide Linkage
caaacggggccgaaaggcgagucaaggucuaacauacc

SEQ ID NO: 9069 - RNA, 38 nt, Artificial Sequence
  Description of Artificial Sequence:  Enzymatic Nucleic Acid
  misc_feature (11)..(16): Phosphorothioate 3'-Internucleotide Linkage
  misc_feature (20)..(20): Phosphorothioate 3'-Internucleotide Linkage
  misc_feature (22)..(22): Phosphorothioate 3'-Internucleotide Linkage
  misc_feature (24)..(25): Phosphorothioate 3'-Internucleotide Linkage
  misc_feature (28)..(28): Phosphorothioate 3'-Internucleotide Linkage
  misc_feature (30)..(30): Phosphorothioate 3'-Internucleotide Linkage
agguuuuggccgaaaggcgagucaaggucuaugguccg

SEQ ID NO: 9070 - RNA, 38 nt, Artificial Sequence
  Description of Artificial Sequence:  Enzymatic Nucleic Acid
  misc_feature (11)..(16): Phosphorothioate 3'-Internucleotide Linkage
  misc_feature (20)..(20): Phosphorothioate 3'-Internucleotide Linkage
  misc_feature (22)..(22): Phosphorothioate 3'-Internucleotide Linkage
  misc_feature (24)..(25): Phosphorothioate 3'-Internucleotide Linkage
  misc_feature (28)..(28): Phosphorothioate 3'-Internucleotide Linkage
  misc_feature (30)..(30): Phosphorothioate 3'-Internucleotide Linkage
gaguuguggccgaaaggcgagucaaggucuagguuuug

SEQ ID NO: 9071 - RNA, 38 nt, Artificial Sequence
  Description of Artificial Sequence:  Enzymatic Nucleic Acid
  misc_feature (11)..(16): Phosphorothioate 3'-Internucleotide Linkage
  misc_feature (20)..(20): Phosphorothioate 3'-Internucleotide Linkage
  misc_feature (22)..(22): Phosphorothioate 3'-Internucleotide Linkage
  misc_feature (24)..(25): Phosphorothioate 3'-Internucleotide Linkage
  misc_feature (28)..(28): Phosphorothioate 3'-Internucleotide Linkage
  misc_feature (30)..(30): Phosphorothioate 3'-Internucleotide Linkage
uccuugaggccgaaaggcgagucaaggucuaggaguug

SEQ ID NO: 9072 - RNA, 38 nt, Artificial Sequence
  Description of Artificial Sequence:  Enzymatic Nucleic Acid
  misc_feature (11)..(16): Phosphorothioate 3'-Internucleotide Linkage
  misc_feature (20)..(20): Phosphorothioate 3'-Internucleotide Linkage
  misc_feature (22)..(22): Phosphorothioate 3'-Internucleotide Linkage
  misc_feature (24)..(25): Phosphorothioate 3'-Internucleotide Linkage
  misc_feature (28)..(28): Phosphorothioate 3'-Internucleotide Linkage
  misc_feature (30)..(30): Phosphorothioate 3'-Internucleotide Linkage
uuguacaggccgaaaggcgagucaaggucuaacaugag

SEQ ID NO: 9073 - RNA, 38 nt, Artificial Sequence
  Description of Artificial Sequence:  Enzymatic Nucleic Acid
  misc_feature (11)..(16): Phosphorothioate 3'-Internucleotide Linkage
  misc_feature (20)..(20): Phosphorothioate 3'-Internucleotide Linkage
  misc_feature (22)..(22): Phosphorothioate 3'-Internucleotide Linkage
  misc_feature (24)..(25): Phosphorothioate 3'-Internucleotide Linkage
  misc_feature (28)..(28): Phosphorothioate 3'-Internucleotide Linkage
  misc_feature (30)..(30): Phosphorothioate 3'-Internucleotide Linkage
uacagguggccgaaaggcgagucaaggucuaguuuccg

SEQ ID NO: 9074 - RNA, 38 nt, Artificial Sequence
  Description of Artificial Sequence:  Enzymatic Nucleic Acid
  misc_feature (11)..(16): Phosphorothioate 3'-Internucleotide Linkage
  misc_feature (20)..(20): Phosphorothioate 3'-Internucleotide Linkage
  misc_feature (22)..(22): Phosphorothioate 3'-Internucleotide Linkage
  misc_feature (24)..(25): Phosphorothioate 3'-Internucleotide Linkage
  misc_feature (28)..(28): Phosphorothioate 3'-Internucleotide Linkage
  misc_feature (30)..(30): Phosphorothioate 3'-Internucleotide Linkage
guauuuuggccgaaaggcgagucaaggucugaaagccc

SEQ ID NO: 9075 - RNA, 38 nt, Artificial Sequence
  Description of Artificial Sequence:  Enzymatic Nucleic Acid
  misc_feature (11)..(16): Phosphorothioate 3'-Internucleotide Linkage
  misc_feature (20)..(20): Phosphorothioate 3'-Internucleotide Linkage
  misc_feature (22)..(22): Phosphorothioate 3'-Internucleotide Linkage
  misc_feature (24)..(25): Phosphorothioate 3'-Internucleotide Linkage
  misc_feature (28)..(28): Phosphorothioate 3'-Internucleotide Linkage
  misc_feature (30)..(30): Phosphorothioate 3'-Internucleotide Linkage
acaaaugggccgaaaggcgagucaaggucuacuaguaa

SEQ ID NO: 9076 - RNA, 38 nt, Artificial Sequence
  Description of Artificial Sequence:  Enzymatic Nucleic Acid
  misc_feature (11)..(16): Phosphorothioate 3'-Internucleotide Linkage
  misc_feature (20)..(20): Phosphorothioate 3'-Internucleotide Linkage
  misc_feature (22)..(22): Phosphorothioate 3'-Internucleotide Linkage
  misc_feature (24)..(25): Phosphorothioate 3'-Internucleotide Linkage
  misc_feature (28)..(28): Phosphorothioate 3'-Internucleotide Linkage
  misc_feature (30)..(30): Phosphorothioate 3'-Internucleotide Linkage
aacagcgggccgaaaggcgagucaaggucuauaaaggg

SEQ ID NO: 9077 - RNA, 38 nt, Artificial Sequence
  Description of Artificial Sequence:  Enzymatic Nucleic Acid
  misc_feature (11)..(16): Phosphorothioate 3'-Internucleotide Linkage
  misc_feature (20)..(20): Phosphorothioate 3'-Internucleotide Linkage
  misc_feature (22)..(22): Phosphorothioate 3'-Internucleotide Linkage
  misc_feature (24)..(25): Phosphorothioate 3'-Internucleotide Linkage
  misc_feature (28)..(28): Phosphorothioate 3'-Internucleotide Linkage
  misc_feature (30)..(30): Phosphorothioate 3'-Internucleotide Linkage
gguaacaggccgaaaggcgagucaaggucuggcauaaa

SEQ ID NO: 9078 - RNA, 38 nt, Artificial Sequence
  Description of Artificial Sequence:  Enzymatic Nucleic Acid
  misc_feature (11)..(16): Phosphorothioate 3'-Internucleotide Linkage
  misc_feature (20)..(20): Phosphorothioate 3'-Internucleotide Linkage
  misc_feature (22)..(22): Phosphorothioate 3'-Internucleotide Linkage
  misc_feature (24)..(25): Phosphorothioate 3'-Internucleotide Linkage
  misc_feature (28)..(28): Phosphorothioate 3'-Internucleotide Linkage
  misc_feature (30)..(30): Phosphorothioate 3'-Internucleotide Linkage
uccugugggccgaaaggcgagucaaggucuaaugugcc

SEQ ID NO: 9079 - RNA, 38 nt, Artificial Sequence
  Description of Artificial Sequence:  Enzymatic Nucleic Acid
  misc_feature (11)..(16): Phosphorothioate 3'-Internucleotide Linkage
  misc_feature (20)..(20): Phosphorothioate 3'-Internucleotide Linkage
  misc_feature (22)..(22): Phosphorothioate 3'-Internucleotide Linkage
  misc_feature (24)..(25): Phosphorothioate 3'-Internucleotide Linkage
  misc_feature (28)..(28): Phosphorothioate 3'-Internucleotide Linkage
  misc_feature (30)..(30): Phosphorothioate 3'-Internucleotide Linkage
aggggcgggccgaaaggcgagucaaggucuaaacccca

SEQ ID NO: 9080 - RNA, 38 nt, Artificial Sequence
  Description of Artificial Sequence:  Enzymatic Nucleic Acid
  misc_feature (11)..(16): Phosphorothioate 3'-Internucleotide Linkage
  misc_feature (20)..(20): Phosphorothioate 3'-Internucleotide Linkage
  misc_feature (22)..(22): Phosphorothioate 3'-Internucleotide Linkage
  misc_feature (24)..(25): Phosphorothioate 3'-Internucleotide Linkage
  misc_feature (28)..(28): Phosphorothioate 3'-Internucleotide Linkage
  misc_feature (30)..(30): Phosphorothioate 3'-Internucleotide Linkage
gaaagggggccgaaaggcgagucaaggucuggcaaacc

SEQ ID NO: 9081 - RNA, 38 nt, Artificial Sequence
  Description of Artificial Sequence:  Enzymatic Nucleic Acid
  misc_feature (11)..(16): Phosphorothioate 3'-Internucleotide Linkage
  misc_feature (20)..(20): Phosphorothioate 3'-Internucleotide Linkage
  misc_feature (22)..(22): Phosphorothioate 3'-Internucleotide Linkage
  misc_feature (24)..(25): Phosphorothioate 3'-Internucleotide Linkage
  misc_feature (28)..(28): Phosphorothioate 3'-Internucleotide Linkage
  misc_feature (30)..(30): Phosphorothioate 3'-Internucleotide Linkage
ccacauuggccgaaaggcgagucaaggucugugaaagg

SEQ ID NO: 9082 - RNA, 38 nt, Artificial Sequence
  Description of Artificial Sequence:  Enzymatic Nucleic Acid
  misc_feature (11)..(16): Phosphorothioate 3'-Internucleotide Linkage
  misc_feature (20)..(20): Phosphorothioate 3'-Internucleotide Linkage
  misc_feature (22)..(22): Phosphorothioate 3'-Internucleotide Linkage
  misc_feature (24)..(25): Phosphorothioate 3'-Internucleotide Linkage
  misc_feature (28)..(28): Phosphorothioate 3'-Internucleotide Linkage
  misc_feature (30)..(30): Phosphorothioate 3'-Internucleotide Linkage
cauuaaaggccgaaaggcgagucaaggucuagaauauc

SEQ ID NO: 9083 - RNA, 38 nt, Artificial Sequence
  Description of Artificial Sequence:  Enzymatic Nucleic Acid
  misc_feature (11)..(16): Phosphorothioate 3'-Internucleotide Linkage
  misc_feature (20)..(20): Phosphorothioate 3'-Internucleotide Linkage
  misc_feature (22)..(22): Phosphorothioate 3'-Internucleotide Linkage
  misc_feature (24)..(25): Phosphorothioate 3'-Internucleotide Linkage
  misc_feature (28)..(28): Phosphorothioate 3'-Internucleotide Linkage
  misc_feature (30)..(30): Phosphorothioate 3'-Internucleotide Linkage
uauaaagggccgaaaggcgagucaaggucuauuaaagc

SEQ ID NO: 9084 - RNA, 38 nt, Artificial Sequence
  Description of Artificial Sequence:  Enzymatic Nucleic Acid
  misc_feature (11)..(16): Phosphorothioate 3'-Internucleotide Linkage
  misc_feature (20)..(20): Phosphorothioate 3'-Internucleotide Linkage
  misc_feature (22)..(22): Phosphorothioate 3'-Internucleotide Linkage
  misc_feature (24)..(25): Phosphorothioate 3'-Internucleotide Linkage
  misc_feature (28)..(28): Phosphorothioate 3'-Internucleotide Linkage
  misc_feature (30)..(30): Phosphorothioate 3'-Internucleotide Linkage
uaugcauggccgaaaggcgagucaaggucuauauaaag

SEQ ID NO: 9085 - RNA, 38 nt, Artificial Sequence
  Description of Artificial Sequence:  Enzymatic Nucleic Acid
  misc_feature (11)..(16): Phosphorothioate 3'-Internucleotide Linkage
  misc_feature (20)..(20): Phosphorothioate 3'-Internucleotide Linkage
  misc_feature (22)..(22): Phosphorothioate 3'-Internucleotide Linkage
  misc_feature (24)..(25): Phosphorothioate 3'-Internucleotide Linkage
  misc_feature (28)..(28): Phosphorothioate 3'-Internucleotide Linkage
  misc_feature (30)..(30): Phosphorothioate 3'-Internucleotide Linkage
cuuguauggccgaaaggcgagucaaggucuaugcauau

SEQ ID NO: 9086 - RNA, 38 nt, Artificial Sequence
  Description of Artificial Sequence:  Enzymatic Nucleic Acid
  misc_feature (11)..(16): Phosphorothioate 3'-Internucleotide Linkage
  misc_feature (20)..(20): Phosphorothioate 3'-Internucleotide Linkage
  misc_feature (22)..(22): Phosphorothioate 3'-Internucleotide Linkage
  misc_feature (24)..(25): Phosphorothioate 3'-Internucleotide Linkage
  misc_feature (28)..(28): Phosphorothioate 3'-Internucleotide Linkage
  misc_feature (30)..(30): Phosphorothioate 3'-Internucleotide Linkage
uaaguugggccgaaaggcgagucaaggucugagaaagu

SEQ ID NO: 9087 - RNA, 38 nt, Artificial Sequence
  Description of Artificial Sequence:  Enzymatic Nucleic Acid
  misc_feature (11)..(16): Phosphorothioate 3'-Internucleotide Linkage
  misc_feature (20)..(20): Phosphorothioate 3'-Internucleotide Linkage
  misc_feature (22)..(22): Phosphorothioate 3'-Internucleotide Linkage
  misc_feature (24)..(25): Phosphorothioate 3'-Internucleotide Linkage
  misc_feature (28)..(28): Phosphorothioate 3'-Internucleotide Linkage
  misc_feature (30)..(30): Phosphorothioate 3'-Internucleotide Linkage
uugccgaggccgaaaggcgagucaaggucuaacggggu

SEQ ID NO: 9088 - RNA, 38 nt, Artificial Sequence
  Description of Artificial Sequence:  Enzymatic Nucleic Acid
  misc_feature (11)..(16): Phosphorothioate 3'-Internucleotide Linkage
  misc_feature (20)..(20): Phosphorothioate 3'-Internucleotide Linkage
  misc_feature (22)..(22): Phosphorothioate 3'-Internucleotide Linkage
  misc_feature (24)..(25): Phosphorothioate 3'-Internucleotide Linkage
  misc_feature (28)..(28): Phosphorothioate 3'-Internucleotide Linkage
  misc_feature (30)..(30): Phosphorothioate 3'-Internucleotide Linkage
acacuugggccgaaaggcgagucaaggucuauagacca

SEQ ID NO: 9089 - RNA, 38 nt, Artificial Sequence
  Description of Artificial Sequence:  Enzymatic Nucleic Acid
  misc_feature (11)..(16): Phosphorothioate 3'-Internucleotide Linkage
  misc_feature (20)..(20): Phosphorothioate 3'-Internucleotide Linkage
  misc_feature (22)..(22): Phosphorothioate 3'-Internucleotide Linkage
  misc_feature (24)..(25): Phosphorothioate 3'-Internucleotide Linkage
  misc_feature (28)..(28): Phosphorothioate 3'-Internucleotide Linkage
  misc_feature (30)..(30): Phosphorothioate 3'-Internucleotide Linkage
ugcgucaggccgaaaggcgagucaaggucuaaacacuu

SEQ ID NO: 9090 - RNA, 38 nt, Artificial Sequence
  Description of Artificial Sequence:  Enzymatic Nucleic Acid
  misc_feature (11)..(16): Phosphorothioate 3'-Internucleotide Linkage
  misc_feature (20)..(20): Phosphorothioate 3'-Internucleotide Linkage
  misc_feature (22)..(22): Phosphorothioate 3'-Internucleotide Linkage
  misc_feature (24)..(25): Phosphorothioate 3'-Internucleotide Linkage
  misc_feature (28)..(28): Phosphorothioate 3'-Internucleotide Linkage
  misc_feature (30)..(30): Phosphorothioate 3'-Internucleotide Linkage
ggggguuggccgaaaggcgagucaaggucugucagcaa

SEQ ID NO: 9091 - RNA, 38 nt, Artificial Sequence
  Description of Artificial Sequence:  Enzymatic Nucleic Acid
  misc_feature (11)..(16): Phosphorothioate 3'-Internucleotide Linkage
  misc_feature (20)..(20): Phosphorothioate 3'-Internucleotide Linkage
  misc_feature (22)..(22): Phosphorothioate 3'-Internucleotide Linkage
  misc_feature (24)..(25): Phosphorothioate 3'-Internucleotide Linkage
  misc_feature (28)..(28): Phosphorothioate 3'-Internucleotide Linkage
  misc_feature (30)..(30): Phosphorothioate 3'-Internucleotide Linkage
cacgcauggccgaaaggcgagucaaggucugcugaugg

SEQ ID NO: 9092 - RNA, 38 nt, Artificial Sequence
  Description of Artificial Sequence:  Enzymatic Nucleic Acid
  misc_feature (11)..(16): Phosphorothioate 3'-Internucleotide Linkage
  misc_feature (20)..(20): Phosphorothioate 3'-Internucleotide Linkage
  misc_feature (22)..(22): Phosphorothioate 3'-Internucleotide Linkage
  misc_feature (24)..(25): Phosphorothioate 3'-Internucleotide Linkage
  misc_feature (28)..(28): Phosphorothioate 3'-Internucleotide Linkage
  misc_feature (30)..(30): Phosphorothioate 3'-Internucleotide Linkage
guuccacggccgaaaggcgagucaaggucuaugcgcug

SEQ ID NO: 9093 - RNA, 38 nt, Artificial Sequence
  Description of Artificial Sequence:  Enzymatic Nucleic Acid
  misc_feature (11)..(16): Phosphorothioate 3'-Internucleotide Linkage
  misc_feature (20)..(20): Phosphorothioate 3'-Internucleotide Linkage
  misc_feature (22)..(22): Phosphorothioate 3'-Internucleotide Linkage
  misc_feature (24)..(25): Phosphorothioate 3'-Internucleotide Linkage
  misc_feature (28)..(28): Phosphorothioate 3'-Internucleotide Linkage
  misc_feature (30)..(30): Phosphorothioate 3'-Internucleotide Linkage
uggaucgggccgaaaggcgagucaaggucuagaggaga

SEQ ID NO: 9094 - RNA, 38 nt, Artificial Sequence
  Description of Artificial Sequence:  Enzymatic Nucleic Acid
  misc_feature (11)..(16): Phosphorothioate 3'-Internucleotide Linkage
  misc_feature (20)..(20): Phosphorothioate 3'-Internucleotide Linkage
  misc_feature (22)..(22): Phosphorothioate 3'-Internucleotide Linkage
  misc_feature (24)..(25): Phosphorothioate 3'-Internucleotide Linkage
  misc_feature (28)..(28): Phosphorothioate 3'-Internucleotide Linkage
  misc_feature (30)..(30): Phosphorothioate 3'-Internucleotide Linkage
gaguuccggccgaaaggcgagucaaggucugguaugga

SEQ ID NO: 9095 - RNA, 38 nt, Artificial Sequence
  Description of Artificial Sequence:  Enzymatic Nucleic Acid
  misc_feature (11)..(16): Phosphorothioate 3'-Internucleotide Linkage
  misc_feature (20)..(20): Phosphorothioate 3'-Internucleotide Linkage
  misc_feature (22)..(22): Phosphorothioate 3'-Internucleotide Linkage
  misc_feature (24)..(25): Phosphorothioate 3'-Internucleotide Linkage
  misc_feature (28)..(28): Phosphorothioate 3'-Internucleotide Linkage
  misc_feature (30)..(30): Phosphorothioate 3'-Internucleotide Linkage
aaaacaaggccgaaaggcgagucaaggucuggcuagga

SEQ ID NO: 9096 - RNA, 38 nt, Artificial Sequence
  Description of Artificial Sequence:  Enzymatic Nucleic Acid
  misc_feature (11)..(16): Phosphorothioate 3'-Internucleotide Linkage
  misc_feature (20)..(20): Phosphorothioate 3'-Internucleotide Linkage
  misc_feature (22)..(22): Phosphorothioate 3'-Internucleotide Linkage
  misc_feature (24)..(25): Phosphorothioate 3'-Internucleotide Linkage
  misc_feature (28)..(28): Phosphorothioate 3'-Internucleotide Linkage
  misc_feature (30)..(30): Phosphorothioate 3'-Internucleotide Linkage
gcugcgaggccgaaaggcgagucaaggucuaaaacaag

SEQ ID NO: 9097 - RNA, 38 nt, Artificial Sequence
  Description of Artificial Sequence:  Enzymatic Nucleic Acid
  misc_feature (11)..(16): Phosphorothioate 3'-Internucleotide Linkage
  misc_feature (20)..(20): Phosphorothioate 3'-Internucleotide Linkage
  misc_feature (22)..(22): Phosphorothioate 3'-Internucleotide Linkage
  misc_feature (24)..(25): Phosphorothioate 3'-Internucleotide Linkage
  misc_feature (28)..(28): Phosphorothioate 3'-Internucleotide Linkage
  misc_feature (30)..(30): Phosphorothioate 3'-Internucleotide Linkage
accugcuggccgaaaggcgagucaaggucugagcaaaa

SEQ ID NO: 9098 - RNA, 38 nt, Artificial Sequence
  Description of Artificial Sequence:  Enzymatic Nucleic Acid
  misc_feature (11)..(16): Phosphorothioate 3'-Internucleotide Linkage
  misc_feature (20)..(20): Phosphorothioate 3'-Internucleotide Linkage
  misc_feature (22)..(22): Phosphorothioate 3'-Internucleotide Linkage
  misc_feature (24)..(25): Phosphorothioate 3'-Internucleotide Linkage
  misc_feature (28)..(28): Phosphorothioate 3'-Internucleotide Linkage
  misc_feature (30)..(30): Phosphorothioate 3'-Internucleotide Linkage
cgggagaggccgaaaggcgagucaaggucuacgacaga

SEQ ID NO: 9099 - RNA, 38 nt, Artificial Sequence
  Description of Artificial Sequence:  Enzymatic Nucleic Acid
  misc_feature (11)..(16): Phosphorothioate 3'-Internucleotide Linkage
  misc_feature (20)..(20): Phosphorothioate 3'-Internucleotide Linkage
  misc_feature (22)..(22): Phosphorothioate 3'-Internucleotide Linkage
  misc_feature (24)..(25): Phosphorothioate 3'-Internucleotide Linkage
  misc_feature (28)..(28): Phosphorothioate 3'-Internucleotide Linkage
  misc_feature (30)..(30): Phosphorothioate 3'-Internucleotide Linkage
uauauuuggccgaaaggcgagucaaggucugggagagc

SEQ ID NO: 9100 - RNA, 38 nt, Artificial Sequence
  Description of Artificial Sequence:  Enzymatic Nucleic Acid
  misc_feature (11)..(16): Phosphorothioate 3'-Internucleotide Linkage
  misc_feature (20)..(20): Phosphorothioate 3'-Internucleotide Linkage
  misc_feature (22)..(22): Phosphorothioate 3'-Internucleotide Linkage
  misc_feature (24)..(25): Phosphorothioate 3'-Internucleotide Linkage
  misc_feature (28)..(28): Phosphorothioate 3'-Internucleotide Linkage
  misc_feature (30)..(30): Phosphorothioate 3'-Internucleotide Linkage
cagccuaggccgaaaggcgagucaaggucuagccaugg

SEQ ID NO: 9101 - RNA, 38 nt, Artificial Sequence
  Description of Artificial Sequence:  Enzymatic Nucleic Acid
  misc_feature (11)..(16): Phosphorothioate 3'-Internucleotide Linkage
  misc_feature (20)..(20): Phosphorothioate 3'-Internucleotide Linkage
  misc_feature (22)..(22): Phosphorothioate 3'-Internucleotide Linkage
  misc_feature (24)..(25): Phosphorothioate 3'-Internucleotide Linkage
  misc_feature (28)..(28): Phosphorothioate 3'-Internucleotide Linkage
  misc_feature (30)..(30): Phosphorothioate 3'-Internucleotide Linkage
guuggcaggccgaaaggcgagucaaggucuacagccua

SEQ ID NO: 9102 - RNA, 38 nt, Artificial Sequence
  Description of Artificial Sequence:  Enzymatic Nucleic Acid
  misc_feature (11)..(16): Phosphorothioate 3'-Internucleotide Linkage
  misc_feature (20)..(20): Phosphorothioate 3'-Internucleotide Linkage
  misc_feature (22)..(22): Phosphorothioate 3'-Internucleotide Linkage
  misc_feature (24)..(25): Phosphorothioate 3'-Internucleotide Linkage
  misc_feature (28)..(28): Phosphorothioate 3'-Internucleotide Linkage
  misc_feature (30)..(30): Phosphorothioate 3'-Internucleotide Linkage
ccaguugggccgaaaggcgagucaaggucuagcacagc

SEQ ID NO: 9103 - RNA, 38 nt, Artificial Sequence
  Description of Artificial Sequence:  Enzymatic Nucleic Acid
  misc_feature (11)..(16): Phosphorothioate 3'-Internucleotide Linkage
  misc_feature (20)..(20): Phosphorothioate 3'-Internucleotide Linkage
  misc_feature (22)..(22): Phosphorothioate 3'-Internucleotide Linkage
  misc_feature (24)..(25): Phosphorothioate 3'-Internucleotide Linkage
  misc_feature (28)..(28): Phosphorothioate 3'-Internucleotide Linkage
  misc_feature (30)..(30): Phosphorothioate 3'-Internucleotide Linkage
acgucccggccgaaaggcgagucaaggucuguaggauc

SEQ ID NO: 9104 - RNA, 38 nt, Artificial Sequence
  Description of Artificial Sequence:  Enzymatic Nucleic Acid
  misc_feature (11)..(16): Phosphorothioate 3'-Internucleotide Linkage
  misc_feature (20)..(20): Phosphorothioate 3'-Internucleotide Linkage
  misc_feature (22)..(22): Phosphorothioate 3'-Internucleotide Linkage
  misc_feature (24)..(25): Phosphorothioate 3'-Internucleotide Linkage
  misc_feature (28)..(28): Phosphorothioate 3'-Internucleotide Linkage
  misc_feature (30)..(30): Phosphorothioate 3'-Internucleotide Linkage
ggauucaggccgaaaggcgagucaaggucugccgacgg

SEQ ID NO: 9105 - RNA, 38 nt, Artificial Sequence
  Description of Artificial Sequence:  Enzymatic Nucleic Acid
  misc_feature (11)..(16): Phosphorothioate 3'-Internucleotide Linkage
  misc_feature (20)..(20): Phosphorothioate 3'-Internucleotide Linkage
  misc_feature (22)..(22): Phosphorothioate 3'-Internucleotide Linkage
  misc_feature (24)..(25): Phosphorothioate 3'-Internucleotide Linkage
  misc_feature (28)..(28): Phosphorothioate 3'-Internucleotide Linkage
  misc_feature (30)..(30): Phosphorothioate 3'-Internucleotide Linkage
gucguccggccgaaaggcgagucaaggucugggauuca

SEQ ID NO: 9106 - RNA, 38 nt, Artificial Sequence
  Description of Artificial Sequence:  Enzymatic Nucleic Acid
  misc_feature (11)..(16): Phosphorothioate 3'-Internucleotide Linkage
  misc_feature (20)..(20): Phosphorothioate 3'-Internucleotide Linkage
  misc_feature (22)..(22): Phosphorothioate 3'-Internucleotide Linkage
  misc_feature (24)..(25): Phosphorothioate 3'-Internucleotide Linkage
  misc_feature (28)..(28): Phosphorothioate 3'-Internucleotide Linkage
  misc_feature (30)..(30): Phosphorothioate 3'-Internucleotide Linkage
gccccaaggccgaaaggcgagucaaggucuggccccgg

SEQ ID NO: 9107 - RNA, 38 nt, Artificial Sequence
  Description of Artificial Sequence:  Enzymatic Nucleic Acid
  misc_feature (11)..(16): Phosphorothioate 3'-Internucleotide Linkage
  misc_feature (20)..(20): Phosphorothioate 3'-Internucleotide Linkage
  misc_feature (22)..(22): Phosphorothioate 3'-Internucleotide Linkage
  misc_feature (24)..(25): Phosphorothioate 3'-Internucleotide Linkage
  misc_feature (28)..(28): Phosphorothioate 3'-Internucleotide Linkage
  misc_feature (30)..(30): Phosphorothioate 3'-Internucleotide Linkage
gaagcggggccgaaaggcgagucaaggucugguagagc

SEQ ID NO: 9108 - RNA, 38 nt, Artificial Sequence
  Description of Artificial Sequence:  Enzymatic Nucleic Acid
  misc_feature (11)..(16): Phosphorothioate 3'-Internucleotide Linkage
  misc_feature (20)..(20): Phosphorothioate 3'-Internucleotide Linkage
  misc_feature (22)..(22): Phosphorothioate 3'-Internucleotide Linkage
  misc_feature (24)..(25): Phosphorothioate 3'-Internucleotide Linkage
  misc_feature (28)..(28): Phosphorothioate 3'-Internucleotide Linkage
  misc_feature (30)..(30): Phosphorothioate 3'-Internucleotide Linkage
cggagaaggccgaaaggcgagucaaggucugggcggua

SEQ ID NO: 9109 - RNA, 38 nt, Artificial Sequence
  Description of Artificial Sequence:  Enzymatic Nucleic Acid
  misc_feature (11)..(16): Phosphorothioate 3'-Internucleotide Linkage
  misc_feature (20)..(20): Phosphorothioate 3'-Internucleotide Linkage
  misc_feature (22)..(22): Phosphorothioate 3'-Internucleotide Linkage
  misc_feature (24)..(25): Phosphorothioate 3'-Internucleotide Linkage
  misc_feature (28)..(28): Phosphorothioate 3'-Internucleotide Linkage
  misc_feature (30)..(30): Phosphorothioate 3'-Internucleotide Linkage
acaauagggccgaaaggcgagucaaggucuggagaagc

SEQ ID NO: 9110 - RNA, 38 nt, Artificial Sequence
  Description of Artificial Sequence:  Enzymatic Nucleic Acid
  misc_feature (11)..(16): Phosphorothioate 3'-Internucleotide Linkage
  misc_feature (20)..(20): Phosphorothioate 3'-Internucleotide Linkage
  misc_feature (22)..(22): Phosphorothioate 3'-Internucleotide Linkage
  misc_feature (24)..(25): Phosphorothioate 3'-Internucleotide Linkage
  misc_feature (28)..(28): Phosphorothioate 3'-Internucleotide Linkage
  misc_feature (30)..(30): Phosphorothioate 3'-Internucleotide Linkage
gagagguggccgaaaggcgagucaaggucugccccgug

SEQ ID NO: 9111 - RNA, 38 nt, Artificial Sequence
  Description of Artificial Sequence:  Enzymatic Nucleic Acid
  misc_feature (11)..(16): Phosphorothioate 3'-Internucleotide Linkage
  misc_feature (20)..(20): Phosphorothioate 3'-Internucleotide Linkage
  misc_feature (22)..(22): Phosphorothioate 3'-Internucleotide Linkage
  misc_feature (24)..(25): Phosphorothioate 3'-Internucleotide Linkage
  misc_feature (28)..(28): Phosphorothioate 3'-Internucleotide Linkage
  misc_feature (30)..(30): Phosphorothioate 3'-Internucleotide Linkage
ggaguccggccgaaaggcgagucaaggucuguaaagag

SEQ ID NO: 9112 - RNA, 38 nt, Artificial Sequence
  Description of Artificial Sequence:  Enzymatic Nucleic Acid
  misc_feature (11)..(16): Phosphorothioate 3'-Internucleotide Linkage
  misc_feature (20)..(20): Phosphorothioate 3'-Internucleotide Linkage
  misc_feature (22)..(22): Phosphorothioate 3'-Internucleotide Linkage
  misc_feature (24)..(25): Phosphorothioate 3'-Internucleotide Linkage
  misc_feature (28)..(28): Phosphorothioate 3'-Internucleotide Linkage
  misc_feature (30)..(30): Phosphorothioate 3'-Internucleotide Linkage
ugagaagggccgaaaggcgagucaaggucuacagacgg

SEQ ID NO: 9113 - RNA, 38 nt, Artificial Sequence
  Description of Artificial Sequence:  Enzymatic Nucleic Acid
  misc_feature (11)..(16): Phosphorothioate 3'-Internucleotide Linkage
  misc_feature (20)..(20): Phosphorothioate 3'-Internucleotide Linkage
  misc_feature (22)..(22): Phosphorothioate 3'-Internucleotide Linkage
  misc_feature (24)..(25): Phosphorothioate 3'-Internucleotide Linkage
  misc_feature (28)..(28): Phosphorothioate 3'-Internucleotide Linkage
  misc_feature (30)..(30): Phosphorothioate 3'-Internucleotide Linkage
cgguccgggccgaaaggcgagucaaggucuagaugaga

SEQ ID NO: 9114 - RNA, 38 nt, Artificial Sequence
  Description of Artificial Sequence:  Enzymatic Nucleic Acid
  misc_feature (11)..(16): Phosphorothioate 3'-Internucleotide Linkage
  misc_feature (20)..(20): Phosphorothioate 3'-Internucleotide Linkage
  misc_feature (22)..(22): Phosphorothioate 3'-Internucleotide Linkage
  misc_feature (24)..(25): Phosphorothioate 3'-Internucleotide Linkage
  misc_feature (28)..(28): Phosphorothioate 3'-Internucleotide Linkage
  misc_feature (30)..(30): Phosphorothioate 3'-Internucleotide Linkage
gcgaaguggccgaaaggcgagucaaggucuacacgguc

SEQ ID NO: 9115 - RNA, 38 nt, Artificial Sequence
  Description of Artificial Sequence:  Enzymatic Nucleic Acid
  misc_feature (11)..(16): Phosphorothioate 3'-Internucleotide Linkage
  misc_feature (20)..(20): Phosphorothioate 3'-Internucleotide Linkage
  misc_feature (22)..(22): Phosphorothioate 3'-Internucleotide Linkage
  misc_feature (24)..(25): Phosphorothioate 3'-Internucleotide Linkage
  misc_feature (28)..(28): Phosphorothioate 3'-Internucleotide Linkage
  misc_feature (30)..(30): Phosphorothioate 3'-Internucleotide Linkage
aggugaaggccgaaaggcgagucaaggucugaagugca

SEQ ID NO: 9116 - RNA, 38 nt, Artificial Sequence
  Description of Artificial Sequence:  Enzymatic Nucleic Acid
  misc_feature (11)..(16): Phosphorothioate 3'-Internucleotide Linkage
  misc_feature (20)..(20): Phosphorothioate 3'-Internucleotide Linkage
  misc_feature (22)..(22): Phosphorothioate 3'-Internucleotide Linkage
  misc_feature (24)..(25): Phosphorothioate 3'-Internucleotide Linkage
  misc_feature (28)..(28): Phosphorothioate 3'-Internucleotide Linkage
  misc_feature (30)..(30): Phosphorothioate 3'-Internucleotide Linkage
gcgacguggccgaaaggcgagucaaggucuagagguga

SEQ ID NO: 9117 - RNA, 38 nt, Artificial Sequence
  Description of Artificial Sequence:  Enzymatic Nucleic Acid
  misc_feature (11)..(16): Phosphorothioate 3'-Internucleotide Linkage
  misc_feature (20)..(20): Phosphorothioate 3'-Internucleotide Linkage
  misc_feature (22)..(22): Phosphorothioate 3'-Internucleotide Linkage
  misc_feature (24)..(25): Phosphorothioate 3'-Internucleotide Linkage
  misc_feature (28)..(28): Phosphorothioate 3'-Internucleotide Linkage
  misc_feature (30)..(30): Phosphorothioate 3'-Internucleotide Linkage
ucuccauggccgaaaggcgagucaaggucugacgugca

SEQ ID NO: 9118 - RNA, 38 nt, Artificial Sequence
  Description of Artificial Sequence:  Enzymatic Nucleic Acid
  misc_feature (11)..(16): Phosphorothioate 3'-Internucleotide Linkage
  misc_feature (20)..(20): Phosphorothioate 3'-Internucleotide Linkage
  misc_feature (22)..(22): Phosphorothioate 3'-Internucleotide Linkage
  misc_feature (24)..(25): Phosphorothioate 3'-Internucleotide Linkage
  misc_feature (28)..(28): Phosphorothioate 3'-Internucleotide Linkage
  misc_feature (30)..(30): Phosphorothioate 3'-Internucleotide Linkage
ccuguggggccgaaaggcgagucaaggucuguucacgg

SEQ ID NO: 9119 - RNA, 38 nt, Artificial Sequence
  Description of Artificial Sequence:  Enzymatic Nucleic Acid
  misc_feature (11)..(16): Phosphorothioate 3'-Internucleotide Linkage
  misc_feature (20)..(20): Phosphorothioate 3'-Internucleotide Linkage
  misc_feature (22)..(22): Phosphorothioate 3'-Internucleotide Linkage
  misc_feature (24)..(25): Phosphorothioate 3'-Internucleotide Linkage
  misc_feature (28)..(28): Phosphorothioate 3'-Internucleotide Linkage
  misc_feature (30)..(30): Phosphorothioate 3'-Internucleotide Linkage
accuuggggccgaaaggcgagucaaggucuagguuccu

SEQ ID NO: 9120 - RNA, 38 nt, Artificial Sequence
  Description of Artificial Sequence:  Enzymatic Nucleic Acid
  misc_feature (11)..(16): Phosphorothioate 3'-Internucleotide Linkage
  misc_feature (20)..(20): Phosphorothioate 3'-Internucleotide Linkage
  misc_feature (22)..(22): Phosphorothioate 3'-Internucleotide Linkage
  misc_feature (24)..(25): Phosphorothioate 3'-Internucleotide Linkage
  misc_feature (28)..(28): Phosphorothioate 3'-Internucleotide Linkage
  misc_feature (30)..(30): Phosphorothioate 3'-Internucleotide Linkage
cucuuauggccgaaaggcgagucaaggucuaagaccuu

SEQ ID NO: 9121 - RNA, 38 nt, Artificial Sequence
  Description of Artificial Sequence:  Enzymatic Nucleic Acid
  misc_feature (11)..(16): Phosphorothioate 3'-Internucleotide Linkage
  misc_feature (20)..(20): Phosphorothioate 3'-Internucleotide Linkage
  misc_feature (22)..(22): Phosphorothioate 3'-Internucleotide Linkage
  misc_feature (24)..(25): Phosphorothioate 3'-Internucleotide Linkage
  misc_feature (28)..(28): Phosphorothioate 3'-Internucleotide Linkage
  misc_feature (30)..(30): Phosphorothioate 3'-Internucleotide Linkage
aaaaguuggccgaaaggcgagucaaggucuauggugcu

SEQ ID NO: 9122 - RNA, 38 nt, Artificial Sequence
  Description of Artificial Sequence:  Enzymatic Nucleic Acid
  misc_feature (11)..(16): Phosphorothioate 3'-Internucleotide Linkage
  misc_feature (20)..(20): Phosphorothioate 3'-Internucleotide Linkage
  misc_feature (22)..(22): Phosphorothioate 3'-Internucleotide Linkage
  misc_feature (24)..(25): Phosphorothioate 3'-Internucleotide Linkage
  misc_feature (28)..(28): Phosphorothioate 3'-Internucleotide Linkage
  misc_feature (30)..(30): Phosphorothioate 3'-Internucleotide Linkage
ugauuagggccgaaaggcgagucaaggucuagagguga

SEQ ID NO: 9123 - RNA, 38 nt, Artificial Sequence
  Description of Artificial Sequence:  Enzymatic Nucleic Acid
  misc_feature (11)..(16): Phosphorothioate 3'-Internucleotide Linkage
  misc_feature (20)..(20): Phosphorothioate 3'-Internucleotide Linkage
  misc_feature (22)..(22): Phosphorothioate 3'-Internucleotide Linkage
  misc_feature (24)..(25): Phosphorothioate 3'-Internucleotide Linkage
  misc_feature (28)..(28): Phosphorothioate 3'-Internucleotide Linkage
  misc_feature (30)..(30): Phosphorothioate 3'-Internucleotide Linkage
acccaagggccgaaaggcgagucaaggucuacagcuug

SEQ ID NO: 9124 - RNA, 38 nt, Artificial Sequence
  Description of Artificial Sequence:  Enzymatic Nucleic Acid
  misc_feature (11)..(16): Phosphorothioate 3'-Internucleotide Linkage
  misc_feature (20)..(20): Phosphorothioate 3'-Internucleotide Linkage
  misc_feature (22)..(22): Phosphorothioate 3'-Internucleotide Linkage
  misc_feature (24)..(25): Phosphorothioate 3'-Internucleotide Linkage
  misc_feature (28)..(28): Phosphorothioate 3'-Internucleotide Linkage
  misc_feature (30)..(30): Phosphorothioate 3'-Internucleotide Linkage
ucagaagggccgaaaggcgagucaaggucuaaaaaaga

SEQ ID NO: 9125 - RNA, 38 nt, Artificial Sequence
  Description of Artificial Sequence:  Enzymatic Nucleic Acid
  misc_feature (11)..(16): Phosphorothioate 3'-Internucleotide Linkage
  misc_feature (20)..(20): Phosphorothioate 3'-Internucleotide Linkage
  misc_feature (22)..(22): Phosphorothioate 3'-Internucleotide Linkage
  misc_feature (24)..(25): Phosphorothioate 3'-Internucleotide Linkage
  misc_feature (28)..(28): Phosphorothioate 3'-Internucleotide Linkage
  misc_feature (30)..(30): Phosphorothioate 3'-Internucleotide Linkage
agcagagggccgaaaggcgagucaaggucuggugucga

SEQ ID NO: 9126 - RNA, 38 nt, Artificial Sequence
  Description of Artificial Sequence:  Enzymatic Nucleic Acid
  misc_feature (11)..(16): Phosphorothioate 3'-Internucleotide Linkage
  misc_feature (20)..(20): Phosphorothioate 3'-Internucleotide Linkage
  misc_feature (22)..(22): Phosphorothioate 3'-Internucleotide Linkage
  misc_feature (24)..(25): Phosphorothioate 3'-Internucleotide Linkage
  misc_feature (28)..(28): Phosphorothioate 3'-Internucleotide Linkage
  misc_feature (30)..(30): Phosphorothioate 3'-Internucleotide Linkage
auacagaggccgaaaggcgagucaaggucuagaggcgg

SEQ ID NO: 9127 - RNA, 38 nt, Artificial Sequence
  Description of Artificial Sequence:  Enzymatic Nucleic Acid
  misc_feature (11)..(16): Phosphorothioate 3'-Internucleotide Linkage
  misc_feature (20)..(20): Phosphorothioate 3'-Internucleotide Linkage
  misc_feature (22)..(22): Phosphorothioate 3'-Internucleotide Linkage
  misc_feature (24)..(25): Phosphorothioate 3'-Internucleotide Linkage
  misc_feature (28)..(28): Phosphorothioate 3'-Internucleotide Linkage
  misc_feature (30)..(30): Phosphorothioate 3'-Internucleotide Linkage
gaggaguggccgaaaggcgagucaaggucugaauccac

SEQ ID NO: 9128 - RNA, 38 nt, Artificial Sequence
  Description of Artificial Sequence:  Enzymatic Nucleic Acid
  misc_feature (11)..(16): Phosphorothioate 3'-Internucleotide Linkage
  misc_feature (20)..(20): Phosphorothioate 3'-Internucleotide Linkage
  misc_feature (22)..(22): Phosphorothioate 3'-Internucleotide Linkage
  misc_feature (24)..(25): Phosphorothioate 3'-Internucleotide Linkage
  misc_feature (28)..(28): Phosphorothioate 3'-Internucleotide Linkage
  misc_feature (30)..(30): Phosphorothioate 3'-Internucleotide Linkage
ucuauauggccgaaaggcgagucaaggucuaggaggag

SEQ ID NO: 9129 - RNA, 38 nt, Artificial Sequence
  Description of Artificial Sequence:  Enzymatic Nucleic Acid
  misc_feature (11)..(16): Phosphorothioate 3'-Internucleotide Linkage
  misc_feature (20)..(20): Phosphorothioate 3'-Internucleotide Linkage
  misc_feature (22)..(22): Phosphorothioate 3'-Internucleotide Linkage
  misc_feature (24)..(25): Phosphorothioate 3'-Internucleotide Linkage
  misc_feature (28)..(28): Phosphorothioate 3'-Internucleotide Linkage
  misc_feature (30)..(30): Phosphorothioate 3'-Internucleotide Linkage
gauagggggccgaaaggcgagucaaggucuauuuggug

SEQ ID NO: 9130 - RNA, 38 nt, Artificial Sequence
  Description of Artificial Sequence:  Enzymatic Nucleic Acid
  misc_feature (11)..(16): Phosphorothioate 3'-Internucleotide Linkage
  misc_feature (20)..(20): Phosphorothioate 3'-Internucleotide Linkage
  misc_feature (22)..(22): Phosphorothioate 3'-Internucleotide Linkage
  misc_feature (24)..(25): Phosphorothioate 3'-Internucleotide Linkage
  misc_feature (28)..(28): Phosphorothioate 3'-Internucleotide Linkage
  misc_feature (30)..(30): Phosphorothioate 3'-Internucleotide Linkage
cugcgagggccgaaaggcgagucaaggucugagggagu

SEQ ID NO: 9131 - RNA, 38 nt, Artificial Sequence
  Description of Artificial Sequence:  Enzymatic Nucleic Acid
  misc_feature (11)..(16): Phosphorothioate 3'-Internucleotide Linkage
  misc_feature (20)..(20): Phosphorothioate 3'-Internucleotide Linkage
  misc_feature (22)..(22): Phosphorothioate 3'-Internucleotide Linkage
  misc_feature (24)..(25): Phosphorothioate 3'-Internucleotide Linkage
  misc_feature (28)..(28): Phosphorothioate 3'-Internucleotide Linkage
  misc_feature (30)..(30): Phosphorothioate 3'-Internucleotide Linkage
uucgucuggccgaaaggcgagucaaggucugaggcgag

SEQ ID NO: 9132 - RNA, 38 nt, Artificial Sequence
  Description of Artificial Sequence:  Enzymatic Nucleic Acid
  misc_feature (11)..(16): Phosphorothioate 3'-Internucleotide Linkage
  misc_feature (20)..(20): Phosphorothioate 3'-Internucleotide Linkage
  misc_feature (22)..(22): Phosphorothioate 3'-Internucleotide Linkage
  misc_feature (24)..(25): Phosphorothioate 3'-Internucleotide Linkage
  misc_feature (28)..(28): Phosphorothioate 3'-Internucleotide Linkage
  misc_feature (30)..(30): Phosphorothioate 3'-Internucleotide Linkage
cgacgcgggccgaaaggcgagucaaggucugauugaga

SEQ ID NO: 9133 - RNA, 38 nt, Artificial Sequence
  Description of Artificial Sequence:  Enzymatic Nucleic Acid
  misc_feature (11)..(16): Phosphorothioate 3'-Internucleotide Linkage
  misc_feature (20)..(20): Phosphorothioate 3'-Internucleotide Linkage
  misc_feature (22)..(22): Phosphorothioate 3'-Internucleotide Linkage
  misc_feature (24)..(25): Phosphorothioate 3'-Internucleotide Linkage
  misc_feature (28)..(28): Phosphorothioate 3'-Internucleotide Linkage
  misc_feature (30)..(30): Phosphorothioate 3'-Internucleotide Linkage
cugcgacggccgaaaggcgagucaaggucuggcgauug

SEQ ID NO: 9134 - RNA, 38 nt, Artificial Sequence
  Description of Artificial Sequence:  Enzymatic Nucleic Acid
  misc_feature (11)..(16): Phosphorothioate 3'-Internucleotide Linkage
  misc_feature (20)..(20): Phosphorothioate 3'-Internucleotide Linkage
  misc_feature (22)..(22): Phosphorothioate 3'-Internucleotide Linkage
  misc_feature (24)..(25): Phosphorothioate 3'-Internucleotide Linkage
  misc_feature (28)..(28): Phosphorothioate 3'-Internucleotide Linkage
  misc_feature (30)..(30): Phosphorothioate 3'-Internucleotide Linkage
aucuucuggccgaaaggcgagucaaggucugacgcggc

SEQ ID NO: 9135 - RNA, 38 nt, Artificial Sequence
  Description of Artificial Sequence:  Enzymatic Nucleic Acid
  misc_feature (11)..(16): Phosphorothioate 3'-Internucleotide Linkage
  misc_feature (20)..(20): Phosphorothioate 3'-Internucleotide Linkage
  misc_feature (22)..(22): Phosphorothioate 3'-Internucleotide Linkage
  misc_feature (24)..(25): Phosphorothioate 3'-Internucleotide Linkage
  misc_feature (28)..(28): Phosphorothioate 3'-Internucleotide Linkage
  misc_feature (30)..(30): Phosphorothioate 3'-Internucleotide Linkage
gauuaaaggccgaaaggcgagucaaggucuaagguacc

SEQ ID NO: 9136 - RNA, 38 nt, Artificial Sequence
  Description of Artificial Sequence:  Enzymatic Nucleic Acid
  misc_feature (11)..(16): Phosphorothioate 3'-Internucleotide Linkage
  misc_feature (20)..(20): Phosphorothioate 3'-Internucleotide Linkage
  misc_feature (22)..(22): Phosphorothioate 3'-Internucleotide Linkage
  misc_feature (24)..(25): Phosphorothioate 3'-Internucleotide Linkage
  misc_feature (28)..(28): Phosphorothioate 3'-Internucleotide Linkage
  misc_feature (30)..(30): Phosphorothioate 3'-Internucleotide Linkage
uccuccuggccgaaaggcgagucaaggucuaaaugaau

SEQ ID NO: 9137 - RNA, 38 nt, Artificial Sequence
  Description of Artificial Sequence:  Enzymatic Nucleic Acid
  misc_feature (11)..(16): Phosphorothioate 3'-Internucleotide Linkage
  misc_feature (20)..(20): Phosphorothioate 3'-Internucleotide Linkage
  misc_feature (22)..(22): Phosphorothioate 3'-Internucleotide Linkage
  misc_feature (24)..(25): Phosphorothioate 3'-Internucleotide Linkage
  misc_feature (28)..(28): Phosphorothioate 3'-Internucleotide Linkage
  misc_feature (30)..(30): Phosphorothioate 3'-Internucleotide Linkage
cuagcagggccgaaaggcgagucaaggucuauaguuaa

SEQ ID NO: 9138 - RNA, 38 nt, Artificial Sequence
  Description of Artificial Sequence:  Enzymatic Nucleic Acid
  misc_feature (11)..(16): Phosphorothioate 3'-Internucleotide Linkage
  misc_feature (20)..(20): Phosphorothioate 3'-Internucleotide Linkage
  misc_feature (22)..(22): Phosphorothioate 3'-Internucleotide Linkage
  misc_feature (24)..(25): Phosphorothioate 3'-Internucleotide Linkage
  misc_feature (28)..(28): Phosphorothioate 3'-Internucleotide Linkage
  misc_feature (30)..(30): Phosphorothioate 3'-Internucleotide Linkage
aaaccuaggccgaaaggcgagucaaggucuaggcauag

SEQ ID NO: 9139 - RNA, 38 nt, Artificial Sequence
  Description of Artificial Sequence:  Enzymatic Nucleic Acid
  misc_feature (11)..(16): Phosphorothioate 3'-Internucleotide Linkage
  misc_feature (20)..(20): Phosphorothioate 3'-Internucleotide Linkage
  misc_feature (22)..(22): Phosphorothioate 3'-Internucleotide Linkage
  misc_feature (24)..(25): Phosphorothioate 3'-Internucleotide Linkage
  misc_feature (28)..(28): Phosphorothioate 3'-Internucleotide Linkage
  misc_feature (30)..(30): Phosphorothioate 3'-Internucleotide Linkage
ucuaaggggccgaaaggcgagucaaggucuaaauauuu

SEQ ID NO: 9140 - RNA, 38 nt, Artificial Sequence
  Description of Artificial Sequence:  Enzymatic Nucleic Acid
  misc_feature (11)..(16): Phosphorothioate 3'-Internucleotide Linkage
  misc_feature (20)..(20): Phosphorothioate 3'-Internucleotide Linkage
  misc_feature (22)..(22): Phosphorothioate 3'-Internucleotide Linkage
  misc_feature (24)..(25): Phosphorothioate 3'-Internucleotide Linkage
  misc_feature (28)..(28): Phosphorothioate 3'-Internucleotide Linkage
  misc_feature (30)..(30): Phosphorothioate 3'-Internucleotide Linkage
uaaugucggccgaaaggcgagucaaggucugucuggaa

SEQ ID NO: 9141 - RNA, 38 nt, Artificial Sequence
  Description of Artificial Sequence:  Enzymatic Nucleic Acid
  misc_feature (11)..(16): Phosphorothioate 3'-Internucleotide Linkage
  misc_feature (20)..(20): Phosphorothioate 3'-Internucleotide Linkage
  misc_feature (22)..(22): Phosphorothioate 3'-Internucleotide Linkage
  misc_feature (24)..(25): Phosphorothioate 3'-Internucleotide Linkage
  misc_feature (28)..(28): Phosphorothioate 3'-Internucleotide Linkage
  misc_feature (30)..(30): Phosphorothioate 3'-Internucleotide Linkage
aaaugagggccgaaaggcgagucaaggucugcuacgug

SEQ ID NO: 9142 - RNA, 38 nt, Artificial Sequence
  Description of Artificial Sequence:  Enzymatic Nucleic Acid
  misc_feature (11)..(16): Phosphorothioate 3'-Internucleotide Linkage
  misc_feature (20)..(20): Phosphorothioate 3'-Internucleotide Linkage
  misc_feature (22)..(22): Phosphorothioate 3'-Internucleotide Linkage
  misc_feature (24)..(25): Phosphorothioate 3'-Internucleotide Linkage
  misc_feature (28)..(28): Phosphorothioate 3'-Internucleotide Linkage
  misc_feature (30)..(30): Phosphorothioate 3'-Internucleotide Linkage
gugacccggccgaaaggcgagucaaggucuaaaaugag

SEQ ID NO: 9143 - RNA, 38 nt, Artificial Sequence
  Description of Artificial Sequence:  Enzymatic Nucleic Acid
  misc_feature (11)..(16): Phosphorothioate 3'-Internucleotide Linkage
  misc_feature (20)..(20): Phosphorothioate 3'-Internucleotide Linkage
  misc_feature (22)..(22): Phosphorothioate 3'-Internucleotide Linkage
  misc_feature (24)..(25): Phosphorothioate 3'-Internucleotide Linkage
  misc_feature (28)..(28): Phosphorothioate 3'-Internucleotide Linkage
  misc_feature (30)..(30): Phosphorothioate 3'-Internucleotide Linkage
uuugaauggccgaaaggcgagucaaggucuagggucca

SEQ ID NO: 9144 - RNA, 38 nt, Artificial Sequence
  Description of Artificial Sequence:  Enzymatic Nucleic Acid
  misc_feature (11)..(16): Phosphorothioate 3'-Internucleotide Linkage
  misc_feature (20)..(20): Phosphorothioate 3'-Internucleotide Linkage
  misc_feature (22)..(22): Phosphorothioate 3'-Internucleotide Linkage
  misc_feature (24)..(25): Phosphorothioate 3'-Internucleotide Linkage
  misc_feature (28)..(28): Phosphorothioate 3'-Internucleotide Linkage
  misc_feature (30)..(30): Phosphorothioate 3'-Internucleotide Linkage
uccuuguggccgaaaggcgagucaaggucuggguugag

SEQ ID NO: 9145 - RNA, 38 nt, Artificial Sequence
  Description of Artificial Sequence:  Enzymatic Nucleic Acid
  misc_feature (11)..(16): Phosphorothioate 3'-Internucleotide Linkage
  misc_feature (20)..(20): Phosphorothioate 3'-Internucleotide Linkage
  misc_feature (22)..(22): Phosphorothioate 3'-Internucleotide Linkage
  misc_feature (24)..(25): Phosphorothioate 3'-Internucleotide Linkage
  misc_feature (28)..(28): Phosphorothioate 3'-Internucleotide Linkage
  misc_feature (30)..(30): Phosphorothioate 3'-Internucleotide Linkage
cuuguugggccgaaaggcgagucaaggucuguccggcc

SEQ ID NO: 9146 - RNA, 38 nt, Artificial Sequence
  Description of Artificial Sequence:  Enzymatic Nucleic Acid
  misc_feature (11)..(16): Phosphorothioate 3'-Internucleotide Linkage
  misc_feature (20)..(20): Phosphorothioate 3'-Internucleotide Linkage
  misc_feature (22)..(22): Phosphorothioate 3'-Internucleotide Linkage
  misc_feature (24)..(25): Phosphorothioate 3'-Internucleotide Linkage
  misc_feature (28)..(28): Phosphorothioate 3'-Internucleotide Linkage
  misc_feature (30)..(30): Phosphorothioate 3'-Internucleotide Linkage
gcccugaggccgaaaggcgagucaaggucugugagggc

SEQ ID NO: 9147 - RNA, 38 nt, Artificial Sequence
  Description of Artificial Sequence:  Enzymatic Nucleic Acid
  misc_feature (11)..(16): Phosphorothioate 3'-Internucleotide Linkage
  misc_feature (20)..(20): Phosphorothioate 3'-Internucleotide Linkage
  misc_feature (22)..(22): Phosphorothioate 3'-Internucleotide Linkage
  misc_feature (24)..(25): Phosphorothioate 3'-Internucleotide Linkage
  misc_feature (28)..(28): Phosphorothioate 3'-Internucleotide Linkage
  misc_feature (30)..(30): Phosphorothioate 3'-Internucleotide Linkage
gcugcugggccgaaaggcgagucaaggucuacaguugu

SEQ ID NO: 9148 - RNA, 38 nt, Artificial Sequence
  Description of Artificial Sequence:  Enzymatic Nucleic Acid
  misc_feature (11)..(16): Phosphorothioate 3'-Internucleotide Linkage
  misc_feature (20)..(20): Phosphorothioate 3'-Internucleotide Linkage
  misc_feature (22)..(22): Phosphorothioate 3'-Internucleotide Linkage
  misc_feature (24)..(25): Phosphorothioate 3'-Internucleotide Linkage
  misc_feature (28)..(28): Phosphorothioate 3'-Internucleotide Linkage
  misc_feature (30)..(30): Phosphorothioate 3'-Internucleotide Linkage
gguggagggccgaaaggcgagucaaggucuaggaggag

SEQ ID NO: 9149 - RNA, 38 nt, Artificial Sequence
  Description of Artificial Sequence:  Enzymatic Nucleic Acid
  misc_feature (11)..(16): Phosphorothioate 3'-Internucleotide Linkage
  misc_feature (20)..(20): Phosphorothioate 3'-Internucleotide Linkage
  misc_feature (22)..(22): Phosphorothioate 3'-Internucleotide Linkage
  misc_feature (24)..(25): Phosphorothioate 3'-Internucleotide Linkage
  misc_feature (28)..(28): Phosphorothioate 3'-Internucleotide Linkage
  misc_feature (30)..(30): Phosphorothioate 3'-Internucleotide Linkage
ggaaaguagccgaaaggcgagucaaggucuagggcccu

SEQ ID NO: 9150 - RNA, 38 nt, Artificial Sequence
  Description of Artificial Sequence:  Enzymatic Nucleic Acid
  misc_feature (11)..(16): Phosphorothioate 3'-Internucleotide Linkage
  misc_feature (20)..(20): Phosphorothioate 3'-Internucleotide Linkage
  misc_feature (22)..(22): Phosphorothioate 3'-Internucleotide Linkage
  misc_feature (24)..(25): Phosphorothioate 3'-Internucleotide Linkage
  misc_feature (28)..(28): Phosphorothioate 3'-Internucleotide Linkage
  misc_feature (30)..(30): Phosphorothioate 3'-Internucleotide Linkage
ggcagagagccgaaaggcgagucaaggucuaguauucu

SEQ ID NO: 9151 - RNA, 38 nt, Artificial Sequence
  Description of Artificial Sequence:  Enzymatic Nucleic Acid
  misc_feature (11)..(16): Phosphorothioate 3'-Internucleotide Linkage
  misc_feature (20)..(20): Phosphorothioate 3'-Internucleotide Linkage
  misc_feature (22)..(22): Phosphorothioate 3'-Internucleotide Linkage
  misc_feature (24)..(25): Phosphorothioate 3'-Internucleotide Linkage
  misc_feature (28)..(28): Phosphorothioate 3'-Internucleotide Linkage
  misc_feature (30)..(30): Phosphorothioate 3'-Internucleotide Linkage
guucgguagccgaaaggcgagucaaggucuaggguccc

SEQ ID NO: 9152 - RNA, 38 nt, Artificial Sequence
  Description of Artificial Sequence:  Enzymatic Nucleic Acid
  misc_feature (11)..(16): Phosphorothioate 3'-Internucleotide Linkage
  misc_feature (20)..(20): Phosphorothioate 3'-Internucleotide Linkage
  misc_feature (22)..(22): Phosphorothioate 3'-Internucleotide Linkage
  misc_feature (24)..(25): Phosphorothioate 3'-Internucleotide Linkage
  misc_feature (28)..(28): Phosphorothioate 3'-Internucleotide Linkage
  misc_feature (30)..(30): Phosphorothioate 3'-Internucleotide Linkage
gccuguaagccgaaaggcgagucaaggucuacgagcag

SEQ ID NO: 9153 - RNA, 38 nt, Artificial Sequence
  Description of Artificial Sequence:  Enzymatic Nucleic Acid
  misc_feature (11)..(16): Phosphorothioate 3'-Internucleotide Linkage
  misc_feature (20)..(20): Phosphorothioate 3'-Internucleotide Linkage
  misc_feature (22)..(22): Phosphorothioate 3'-Internucleotide Linkage
  misc_feature (24)..(25): Phosphorothioate 3'-Internucleotide Linkage
  misc_feature (28)..(28): Phosphorothioate 3'-Internucleotide Linkage
  misc_feature (30)..(30): Phosphorothioate 3'-Internucleotide Linkage
uuugucaagccgaaaggcgagucaaggucuaagaaaaa

SEQ ID NO: 9154 - RNA, 38 nt, Artificial Sequence
  Description of Artificial Sequence:  Enzymatic Nucleic Acid
  misc_feature (11)..(16): Phosphorothioate 3'-Internucleotide Linkage
  misc_feature (20)..(20): Phosphorothioate 3'-Internucleotide Linkage
  misc_feature (22)..(22): Phosphorothioate 3'-Internucleotide Linkage
  misc_feature (24)..(25): Phosphorothioate 3'-Internucleotide Linkage
  misc_feature (28)..(28): Phosphorothioate 3'-Internucleotide Linkage
  misc_feature (30)..(30): Phosphorothioate 3'-Internucleotide Linkage
ccaagacagccgaaaggcgagucaaggucuacgggugu

SEQ ID NO: 9155 - RNA, 38 nt, Artificial Sequence
  Description of Artificial Sequence:  Enzymatic Nucleic Acid
  misc_feature (11)..(16): Phosphorothioate 3'-Internucleotide Linkage
  misc_feature (20)..(20): Phosphorothioate 3'-Internucleotide Linkage
  misc_feature (22)..(22): Phosphorothioate 3'-Internucleotide Linkage
  misc_feature (24)..(25): Phosphorothioate 3'-Internucleotide Linkage
  misc_feature (28)..(28): Phosphorothioate 3'-Internucleotide Linkage
  misc_feature (30)..(30): Phosphorothioate 3'-Internucleotide Linkage
ggccaagagccgaaaggcgagucaaggucuacacgggu

SEQ ID NO: 9156 - RNA, 38 nt, Artificial Sequence
  Description of Artificial Sequence:  Enzymatic Nucleic Acid
  misc_feature (11)..(16): Phosphorothioate 3'-Internucleotide Linkage
  misc_feature (20)..(20): Phosphorothioate 3'-Internucleotide Linkage
  misc_feature (22)..(22): Phosphorothioate 3'-Internucleotide Linkage
  misc_feature (24)..(25): Phosphorothioate 3'-Internucleotide Linkage
  misc_feature (28)..(28): Phosphorothioate 3'-Internucleotide Linkage
  misc_feature (30)..(30): Phosphorothioate 3'-Internucleotide Linkage
gaggacaagccgaaaggcgagucaaggucuagguuggu

SEQ ID NO: 9157 - RNA, 38 nt, Artificial Sequence
  Description of Artificial Sequence:  Enzymatic Nucleic Acid
  misc_feature (11)..(16): Phosphorothioate 3'-Internucleotide Linkage
  misc_feature (20)..(20): Phosphorothioate 3'-Internucleotide Linkage
  misc_feature (22)..(22): Phosphorothioate 3'-Internucleotide Linkage
  misc_feature (24)..(25): Phosphorothioate 3'-Internucleotide Linkage
  misc_feature (28)..(28): Phosphorothioate 3'-Internucleotide Linkage
  misc_feature (30)..(30): Phosphorothioate 3'-Internucleotide Linkage
uuggaggagccgaaaggcgagucaaggucuaacagguu

SEQ ID NO: 9158 - RNA, 38 nt, Artificial Sequence
  Description of Artificial Sequence:  Enzymatic Nucleic Acid
  misc_feature (11)..(16): Phosphorothioate 3'-Internucleotide Linkage
  misc_feature (20)..(20): Phosphorothioate 3'-Internucleotide Linkage
  misc_feature (22)..(22): Phosphorothioate 3'-Internucleotide Linkage
  misc_feature (24)..(25): Phosphorothioate 3'-Internucleotide Linkage
  misc_feature (28)..(28): Phosphorothioate 3'-Internucleotide Linkage
  misc_feature (30)..(30): Phosphorothioate 3'-Internucleotide Linkage
aaccaggagccgaaaggcgagucaaggucuaaauugga

SEQ ID NO: 9159 - RNA, 38 nt, Artificial Sequence
  Description of Artificial Sequence:  Enzymatic Nucleic Acid
  misc_feature (11)..(16): Phosphorothioate 3'-Internucleotide Linkage
  misc_feature (20)..(20): Phosphorothioate 3'-Internucleotide Linkage
  misc_feature (22)..(22): Phosphorothioate 3'-Internucleotide Linkage
  misc_feature (24)..(25): Phosphorothioate 3'-Internucleotide Linkage
  misc_feature (28)..(28): Phosphorothioate 3'-Internucleotide Linkage
  misc_feature (30)..(30): Phosphorothioate 3'-Internucleotide Linkage
cgcagacagccgaaaggcgagucaaggucuauccagcg

SEQ ID NO: 9160 - RNA, 38 nt, Artificial Sequence
  Description of Artificial Sequence:  Enzymatic Nucleic Acid
  misc_feature (11)..(16): Phosphorothioate 3'-Internucleotide Linkage
  misc_feature (20)..(20): Phosphorothioate 3'-Internucleotide Linkage
  misc_feature (22)..(22): Phosphorothioate 3'-Internucleotide Linkage
  misc_feature (24)..(25): Phosphorothioate 3'-Internucleotide Linkage
  misc_feature (28)..(28): Phosphorothioate 3'-Internucleotide Linkage
  misc_feature (30)..(30): Phosphorothioate 3'-Internucleotide Linkage
gccgcagagccgaaaggcgagucaaggucuacauccag

SEQ ID NO: 9161 - RNA, 38 nt, Artificial Sequence
  Description of Artificial Sequence:  Enzymatic Nucleic Acid
  misc_feature (11)..(16): Phosphorothioate 3'-Internucleotide Linkage
  misc_feature (20)..(20): Phosphorothioate 3'-Internucleotide Linkage
  misc_feature (22)..(22): Phosphorothioate 3'-Internucleotide Linkage
  misc_feature (24)..(25): Phosphorothioate 3'-Internucleotide Linkage
  misc_feature (28)..(28): Phosphorothioate 3'-Internucleotide Linkage
  misc_feature (30)..(30): Phosphorothioate 3'-Internucleotide Linkage
agaaccaagccgaaaggcgagucaaggucuaagaagau

SEQ ID NO: 9162 - RNA, 38 nt, Artificial Sequence
  Description of Artificial Sequence:  Enzymatic Nucleic Acid
  misc_feature (11)..(16): Phosphorothioate 3'-Internucleotide Linkage
  misc_feature (20)..(20): Phosphorothioate 3'-Internucleotide Linkage
  misc_feature (22)..(22): Phosphorothioate 3'-Internucleotide Linkage
  misc_feature (24)..(25): Phosphorothioate 3'-Internucleotide Linkage
  misc_feature (28)..(28): Phosphorothioate 3'-Internucleotide Linkage
  misc_feature (30)..(30): Phosphorothioate 3'-Internucleotide Linkage
acgggcaagccgaaaggcgagucaaggucuauaccuug

SEQ ID NO: 9163 - RNA, 38 nt, Artificial Sequence
  Description of Artificial Sequence:  Enzymatic Nucleic Acid
  misc_feature (11)..(16): Phosphorothioate 3'-Internucleotide Linkage
  misc_feature (20)..(20): Phosphorothioate 3'-Internucleotide Linkage
  misc_feature (22)..(22): Phosphorothioate 3'-Internucleotide Linkage
  misc_feature (24)..(25): Phosphorothioate 3'-Internucleotide Linkage
  misc_feature (28)..(28): Phosphorothioate 3'-Internucleotide Linkage
  misc_feature (30)..(30): Phosphorothioate 3'-Internucleotide Linkage
uuagaggagccgaaaggcgagucaaggucuaaacgggc

SEQ ID NO: 9164 - RNA, 38 nt, Artificial Sequence
  Description of Artificial Sequence:  Enzymatic Nucleic Acid
  misc_feature (11)..(16): Phosphorothioate 3'-Internucleotide Linkage
  misc_feature (20)..(20): Phosphorothioate 3'-Internucleotide Linkage
  misc_feature (22)..(22): Phosphorothioate 3'-Internucleotide Linkage
  misc_feature (24)..(25): Phosphorothioate 3'-Internucleotide Linkage
  misc_feature (28)..(28): Phosphorothioate 3'-Internucleotide Linkage
  misc_feature (30)..(30): Phosphorothioate 3'-Internucleotide Linkage
gagggaaagccgaaaggcgagucaaggucuauagaggu

SEQ ID NO: 9165 - RNA, 38 nt, Artificial Sequence
  Description of Artificial Sequence:  Enzymatic Nucleic Acid
  misc_feature (11)..(16): Phosphorothioate 3'-Internucleotide Linkage
  misc_feature (20)..(20): Phosphorothioate 3'-Internucleotide Linkage
  misc_feature (22)..(22): Phosphorothioate 3'-Internucleotide Linkage
  misc_feature (24)..(25): Phosphorothioate 3'-Internucleotide Linkage
  misc_feature (28)..(28): Phosphorothioate 3'-Internucleotide Linkage
  misc_feature (30)..(30): Phosphorothioate 3'-Internucleotide Linkage
uacagcaagccgaaaggcgagucaaggucuaugaggga

SEQ ID NO: 9166 - RNA, 38 nt, Artificial Sequence
  Description of Artificial Sequence:  Enzymatic Nucleic Acid
  misc_feature (11)..(16): Phosphorothioate 3'-Internucleotide Linkage
  misc_feature (20)..(20): Phosphorothioate 3'-Internucleotide Linkage
  misc_feature (22)..(22): Phosphorothioate 3'-Internucleotide Linkage
  misc_feature (24)..(25): Phosphorothioate 3'-Internucleotide Linkage
  misc_feature (28)..(28): Phosphorothioate 3'-Internucleotide Linkage
  misc_feature (30)..(30): Phosphorothioate 3'-Internucleotide Linkage
guuuuguagccgaaaggcgagucaaggucuagcaacau

SEQ ID NO: 9167 - RNA, 38 nt, Artificial Sequence
  Description of Artificial Sequence:  Enzymatic Nucleic Acid
  misc_feature (11)..(16): Phosphorothioate 3'-Internucleotide Linkage
  misc_feature (20)..(20): Phosphorothioate 3'-Internucleotide Linkage
  misc_feature (22)..(22): Phosphorothioate 3'-Internucleotide Linkage
  misc_feature (24)..(25): Phosphorothioate 3'-Internucleotide Linkage
  misc_feature (28)..(28): Phosphorothioate 3'-Internucleotide Linkage
  misc_feature (30)..(30): Phosphorothioate 3'-Internucleotide Linkage
ugggaauagccgaaaggcgagucaaggucuaggugcag

SEQ ID NO: 9168 - RNA, 38 nt, Artificial Sequence
  Description of Artificial Sequence:  Enzymatic Nucleic Acid
  misc_feature (11)..(16): Phosphorothioate 3'-Internucleotide Linkage
  misc_feature (20)..(20): Phosphorothioate 3'-Internucleotide Linkage
  misc_feature (22)..(22): Phosphorothioate 3'-Internucleotide Linkage
  misc_feature (24)..(25): Phosphorothioate 3'-Internucleotide Linkage
  misc_feature (28)..(28): Phosphorothioate 3'-Internucleotide Linkage
  misc_feature (30)..(30): Phosphorothioate 3'-Internucleotide Linkage
ccacugaagccgaaaggcgagucaaggucuaaauggca

SEQ ID NO: 9169 - RNA, 38 nt, Artificial Sequence
  Description of Artificial Sequence:  Enzymatic Nucleic Acid
  misc_feature (11)..(16): Phosphorothioate 3'-Internucleotide Linkage
  misc_feature (20)..(20): Phosphorothioate 3'-Internucleotide Linkage
  misc_feature (22)..(22): Phosphorothioate 3'-Internucleotide Linkage
  misc_feature (24)..(25): Phosphorothioate 3'-Internucleotide Linkage
  misc_feature (28)..(28): Phosphorothioate 3'-Internucleotide Linkage
  misc_feature (30)..(30): Phosphorothioate 3'-Internucleotide Linkage
aagccagagccgaaaggcgagucaaggucuaguggggg

SEQ ID NO: 9170 - RNA, 38 nt, Artificial Sequence
  Description of Artificial Sequence:  Enzymatic Nucleic Acid
  misc_feature (11)..(16): Phosphorothioate 3'-Internucleotide Linkage
  misc_feature (20)..(20): Phosphorothioate 3'-Internucleotide Linkage
  misc_feature (22)..(22): Phosphorothioate 3'-Internucleotide Linkage
  misc_feature (24)..(25): Phosphorothioate 3'-Internucleotide Linkage
  misc_feature (28)..(28): Phosphorothioate 3'-Internucleotide Linkage
  misc_feature (30)..(30): Phosphorothioate 3'-Internucleotide Linkage
caaaaccagccgaaaggcgagucaaggucuaucaucca

SEQ ID NO: 9171 - RNA, 38 nt, Artificial Sequence
  Description of Artificial Sequence:  Enzymatic Nucleic Acid
  misc_feature (11)..(16): Phosphorothioate 3'-Internucleotide Linkage
  misc_feature (20)..(20): Phosphorothioate 3'-Internucleotide Linkage
  misc_feature (22)..(22): Phosphorothioate 3'-Internucleotide Linkage
  misc_feature (24)..(25): Phosphorothioate 3'-Internucleotide Linkage
  misc_feature (28)..(28): Phosphorothioate 3'-Internucleotide Linkage
  misc_feature (30)..(30): Phosphorothioate 3'-Internucleotide Linkage
auguuguagccgaaaggcgagucaaggucuagacuugg

SEQ ID NO: 9172 - RNA, 38 nt, Artificial Sequence
  Description of Artificial Sequence:  Enzymatic Nucleic Acid
  misc_feature (11)..(16): Phosphorothioate 3'-Internucleotide Linkage
  misc_feature (20)..(20): Phosphorothioate 3'-Internucleotide Linkage
  misc_feature (22)..(22): Phosphorothioate 3'-Internucleotide Linkage
  misc_feature (24)..(25): Phosphorothioate 3'-Internucleotide Linkage
  misc_feature (28)..(28): Phosphorothioate 3'-Internucleotide Linkage
  misc_feature (30)..(30): Phosphorothioate 3'-Internucleotide Linkage
auugguaagccgaaaggcgagucaaggucuagcggcau

SEQ ID NO: 9173 - RNA, 38 nt, Artificial Sequence
  Description of Artificial Sequence:  Enzymatic Nucleic Acid
  misc_feature (11)..(16): Phosphorothioate 3'-Internucleotide Linkage
  misc_feature (20)..(20): Phosphorothioate 3'-Internucleotide Linkage
  misc_feature (22)..(22): Phosphorothioate 3'-Internucleotide Linkage
  misc_feature (24)..(25): Phosphorothioate 3'-Internucleotide Linkage
  misc_feature (28)..(28): Phosphorothioate 3'-Internucleotide Linkage
  misc_feature (30)..(30): Phosphorothioate 3'-Internucleotide Linkage
cccaaagagccgaaaggcgagucaaggucuaaaagaaa

SEQ ID NO: 9174 - RNA, 38 nt, Artificial Sequence
  Description of Artificial Sequence:  Enzymatic Nucleic Acid
  misc_feature (11)..(16): Phosphorothioate 3'-Internucleotide Linkage
  misc_feature (20)..(20): Phosphorothioate 3'-Internucleotide Linkage
  misc_feature (22)..(22): Phosphorothioate 3'-Internucleotide Linkage
  misc_feature (24)..(25): Phosphorothioate 3'-Internucleotide Linkage
  misc_feature (28)..(28): Phosphorothioate 3'-Internucleotide Linkage
  misc_feature (30)..(30): Phosphorothioate 3'-Internucleotide Linkage
cccaauuagccgaaaggcgagucaaggucuauauccca

SEQ ID NO: 9175 - RNA, 38 nt, Artificial Sequence
  Description of Artificial Sequence:  Enzymatic Nucleic Acid
  misc_feature (11)..(16): Phosphorothioate 3'-Internucleotide Linkage
  misc_feature (20)..(20): Phosphorothioate 3'-Internucleotide Linkage
  misc_feature (22)..(22): Phosphorothioate 3'-Internucleotide Linkage
  misc_feature (24)..(25): Phosphorothioate 3'-Internucleotide Linkage
  misc_feature (28)..(28): Phosphorothioate 3'-Internucleotide Linkage
  misc_feature (30)..(30): Phosphorothioate 3'-Internucleotide Linkage
uuuuuguagccgaaaggcgagucaaggucuaauauguu

SEQ ID NO: 9176 - RNA, 38 nt, Artificial Sequence
  Description of Artificial Sequence:  Enzymatic Nucleic Acid
  misc_feature (11)..(16): Phosphorothioate 3'-Internucleotide Linkage
  misc_feature (20)..(20): Phosphorothioate 3'-Internucleotide Linkage
  misc_feature (22)..(22): Phosphorothioate 3'-Internucleotide Linkage
  misc_feature (24)..(25): Phosphorothioate 3'-Internucleotide Linkage
  misc_feature (28)..(28): Phosphorothioate 3'-Internucleotide Linkage
  misc_feature (30)..(30): Phosphorothioate 3'-Internucleotide Linkage
cuaaaacagccgaaaggcgagucaaggucuauuuugau

SEQ ID NO: 9177 - RNA, 38 nt, Artificial Sequence
  Description of Artificial Sequence:  Enzymatic Nucleic Acid
  misc_feature (11)..(16): Phosphorothioate 3'-Internucleotide Linkage
  misc_feature (20)..(20): Phosphorothioate 3'-Internucleotide Linkage
  misc_feature (22)..(22): Phosphorothioate 3'-Internucleotide Linkage
  misc_feature (24)..(25): Phosphorothioate 3'-Internucleotide Linkage
  misc_feature (28)..(28): Phosphorothioate 3'-Internucleotide Linkage
  misc_feature (30)..(30): Phosphorothioate 3'-Internucleotide Linkage
uccuaaaagccgaaaggcgagucaaggucuacauuuug

SEQ ID NO: 9178 - RNA, 38 nt, Artificial Sequence
  Description of Artificial Sequence:  Enzymatic Nucleic Acid
  misc_feature (11)..(16): Phosphorothioate 3'-Internucleotide Linkage
  misc_feature (20)..(20): Phosphorothioate 3'-Internucleotide Linkage
  misc_feature (22)..(22): Phosphorothioate 3'-Internucleotide Linkage
  misc_feature (24)..(25): Phosphorothioate 3'-Internucleotide Linkage
  misc_feature (28)..(28): Phosphorothioate 3'-Internucleotide Linkage
  misc_feature (30)..(30): Phosphorothioate 3'-Internucleotide Linkage
ccuguuuagccgaaaggcgagucaaggucuaggaaguu

SEQ ID NO: 9179 - RNA, 38 nt, Artificial Sequence
  Description of Artificial Sequence:  Enzymatic Nucleic Acid
  misc_feature (11)..(16): Phosphorothioate 3'-Internucleotide Linkage
  misc_feature (20)..(20): Phosphorothioate 3'-Internucleotide Linkage
  misc_feature (22)..(22): Phosphorothioate 3'-Internucleotide Linkage
  misc_feature (24)..(25): Phosphorothioate 3'-Internucleotide Linkage
  misc_feature (28)..(28): Phosphorothioate 3'-Internucleotide Linkage
  misc_feature (30)..(30): Phosphorothioate 3'-Internucleotide Linkage
uucguugagccgaaaggcgagucaaggucuauacuuuc

SEQ ID NO: 9180 - RNA, 38 nt, Artificial Sequence
  Description of Artificial Sequence:  Enzymatic Nucleic Acid
  misc_feature (11)..(16): Phosphorothioate 3'-Internucleotide Linkage
  misc_feature (20)..(20): Phosphorothioate 3'-Internucleotide Linkage
  misc_feature (22)..(22): Phosphorothioate 3'-Internucleotide Linkage
  misc_feature (24)..(25): Phosphorothioate 3'-Internucleotide Linkage
  misc_feature (28)..(28): Phosphorothioate 3'-Internucleotide Linkage
  misc_feature (30)..(30): Phosphorothioate 3'-Internucleotide Linkage
aagacccagccgaaaggcgagucaaggucuaauucguu

SEQ ID NO: 9181 - RNA, 38 nt, Artificial Sequence
  Description of Artificial Sequence:  Enzymatic Nucleic Acid
  misc_feature (11)..(16): Phosphorothioate 3'-Internucleotide Linkage
  misc_feature (20)..(20): Phosphorothioate 3'-Internucleotide Linkage
  misc_feature (22)..(22): Phosphorothioate 3'-Internucleotide Linkage
  misc_feature (24)..(25): Phosphorothioate 3'-Internucleotide Linkage
  misc_feature (28)..(28): Phosphorothioate 3'-Internucleotide Linkage
  misc_feature (30)..(30): Phosphorothioate 3'-Internucleotide Linkage
aauauccagccgaaaggcgagucaaggucuauugcgug

SEQ ID NO: 9182 - RNA, 38 nt, Artificial Sequence
  Description of Artificial Sequence:  Enzymatic Nucleic Acid
  misc_feature (11)..(16): Phosphorothioate 3'-Internucleotide Linkage
  misc_feature (20)..(20): Phosphorothioate 3'-Internucleotide Linkage
  misc_feature (22)..(22): Phosphorothioate 3'-Internucleotide Linkage
  misc_feature (24)..(25): Phosphorothioate 3'-Internucleotide Linkage
  misc_feature (28)..(28): Phosphorothioate 3'-Internucleotide Linkage
  misc_feature (30)..(30): Phosphorothioate 3'-Internucleotide Linkage
aagguucagccgaaaggcgagucaaggucuauacuguu

SEQ ID NO: 9183 - RNA, 38 nt, Artificial Sequence
  Description of Artificial Sequence:  Enzymatic Nucleic Acid
  misc_feature (11)..(16): Phosphorothioate 3'-Internucleotide Linkage
  misc_feature (20)..(20): Phosphorothioate 3'-Internucleotide Linkage
  misc_feature (22)..(22): Phosphorothioate 3'-Internucleotide Linkage
  misc_feature (24)..(25): Phosphorothioate 3'-Internucleotide Linkage
  misc_feature (28)..(28): Phosphorothioate 3'-Internucleotide Linkage
  misc_feature (30)..(30): Phosphorothioate 3'-Internucleotide Linkage
ucagcaaagccgaaaggcgagucaaggucuacuuggca

SEQ ID NO: 9184 - RNA, 38 nt, Artificial Sequence
  Description of Artificial Sequence:  Enzymatic Nucleic Acid
  misc_feature (11)..(16): Phosphorothioate 3'-Internucleotide Linkage
  misc_feature (20)..(20): Phosphorothioate 3'-Internucleotide Linkage
  misc_feature (22)..(22): Phosphorothioate 3'-Internucleotide Linkage
  misc_feature (24)..(25): Phosphorothioate 3'-Internucleotide Linkage
  misc_feature (28)..(28): Phosphorothioate 3'-Internucleotide Linkage
  misc_feature (30)..(30): Phosphorothioate 3'-Internucleotide Linkage
aggagacagccgaaaggcgagucaaggucuaaagguuc

SEQ ID NO: 9185 - RNA, 38 nt, Artificial Sequence
  Description of Artificial Sequence:  Enzymatic Nucleic Acid
  misc_feature (11)..(16): Phosphorothioate 3'-Internucleotide Linkage
  misc_feature (20)..(20): Phosphorothioate 3'-Internucleotide Linkage
  misc_feature (22)..(22): Phosphorothioate 3'-Internucleotide Linkage
  misc_feature (24)..(25): Phosphorothioate 3'-Internucleotide Linkage
  misc_feature (28)..(28): Phosphorothioate 3'-Internucleotide Linkage
  misc_feature (30)..(30): Phosphorothioate 3'-Internucleotide Linkage
agaggagagccgaaaggcgagucaaggucuacaaaggu

SEQ ID NO: 9186 - RNA, 38 nt, Artificial Sequence
  Description of Artificial Sequence:  Enzymatic Nucleic Acid
  misc_feature (11)..(16): Phosphorothioate 3'-Internucleotide Linkage
  misc_feature (20)..(20): Phosphorothioate 3'-Internucleotide Linkage
  misc_feature (22)..(22): Phosphorothioate 3'-Internucleotide Linkage
  misc_feature (24)..(25): Phosphorothioate 3'-Internucleotide Linkage
  misc_feature (28)..(28): Phosphorothioate 3'-Internucleotide Linkage
  misc_feature (30)..(30): Phosphorothioate 3'-Internucleotide Linkage
gagcaaaagccgaaaggcgagucaaggucuaagcggcu

SEQ ID NO: 9187 - RNA, 38 nt, Artificial Sequence
  Description of Artificial Sequence:  Enzymatic Nucleic Acid
  misc_feature (11)..(16): Phosphorothioate 3'-Internucleotide Linkage
  misc_feature (20)..(20): Phosphorothioate 3'-Internucleotide Linkage
  misc_feature (22)..(22): Phosphorothioate 3'-Internucleotide Linkage
  misc_feature (24)..(25): Phosphorothioate 3'-Internucleotide Linkage
  misc_feature (28)..(28): Phosphorothioate 3'-Internucleotide Linkage
  misc_feature (30)..(30): Phosphorothioate 3'-Internucleotide Linkage
gagcacgagccgaaaggcgagucaaggucuagaauugu

SEQ ID NO: 9188 - RNA, 38 nt, Artificial Sequence
  Description of Artificial Sequence:  Enzymatic Nucleic Acid
  misc_feature (11)..(16): Phosphorothioate 3'-Internucleotide Linkage
  misc_feature (20)..(20): Phosphorothioate 3'-Internucleotide Linkage
  misc_feature (22)..(22): Phosphorothioate 3'-Internucleotide Linkage
  misc_feature (24)..(25): Phosphorothioate 3'-Internucleotide Linkage
  misc_feature (28)..(28): Phosphorothioate 3'-Internucleotide Linkage
  misc_feature (30)..(30): Phosphorothioate 3'-Internucleotide Linkage
uggcagcagccgaaaggcgagucaaggucuagccuagc

SEQ ID NO: 9189 - RNA, 38 nt, Artificial Sequence
  Description of Artificial Sequence:  Enzymatic Nucleic Acid
  misc_feature (11)..(16): Phosphorothioate 3'-Internucleotide Linkage
  misc_feature (20)..(20): Phosphorothioate 3'-Internucleotide Linkage
  misc_feature (22)..(22): Phosphorothioate 3'-Internucleotide Linkage
  misc_feature (24)..(25): Phosphorothioate 3'-Internucleotide Linkage
  misc_feature (28)..(28): Phosphorothioate 3'-Internucleotide Linkage
  misc_feature (30)..(30): Phosphorothioate 3'-Internucleotide Linkage
gacguaaagccgaaaggcgagucaaggucuaaaggacg

SEQ ID NO: 9190 - RNA, 38 nt, Artificial Sequence
  Description of Artificial Sequence:  Enzymatic Nucleic Acid
  misc_feature (11)..(16): Phosphorothioate 3'-Internucleotide Linkage
  misc_feature (20)..(20): Phosphorothioate 3'-Internucleotide Linkage
  misc_feature (22)..(22): Phosphorothioate 3'-Internucleotide Linkage
  misc_feature (24)..(25): Phosphorothioate 3'-Internucleotide Linkage
  misc_feature (28)..(28): Phosphorothioate 3'-Internucleotide Linkage
  misc_feature (30)..(30): Phosphorothioate 3'-Internucleotide Linkage
ggucgguagccgaaaggcgagucaaggucuaauaggcg

SEQ ID NO: 9191 - RNA, 38 nt, Artificial Sequence
  Description of Artificial Sequence:  Enzymatic Nucleic Acid
  misc_feature (11)..(16): Phosphorothioate 3'-Internucleotide Linkage
  misc_feature (20)..(20): Phosphorothioate 3'-Internucleotide Linkage
  misc_feature (22)..(22): Phosphorothioate 3'-Internucleotide Linkage
  misc_feature (24)..(25): Phosphorothioate 3'-Internucleotide Linkage
  misc_feature (28)..(28): Phosphorothioate 3'-Internucleotide Linkage
  misc_feature (30)..(30): Phosphorothioate 3'-Internucleotide Linkage
agaaggcagccgaaaggcgagucaaggucuagacgggg

SEQ ID NO: 9192 - RNA, 38 nt, Artificial Sequence
  Description of Artificial Sequence:  Enzymatic Nucleic Acid
  misc_feature (11)..(16): Phosphorothioate 3'-Internucleotide Linkage
  misc_feature (20)..(20): Phosphorothioate 3'-Internucleotide Linkage
  misc_feature (22)..(22): Phosphorothioate 3'-Internucleotide Linkage
  misc_feature (24)..(25): Phosphorothioate 3'-Internucleotide Linkage
  misc_feature (28)..(28): Phosphorothioate 3'-Internucleotide Linkage
  misc_feature (30)..(30): Phosphorothioate 3'-Internucleotide Linkage
gaagugcagccgaaaggcgagucaaggucuacgguccg

SEQ ID NO: 9193 - RNA, 38 nt, Artificial Sequence
  Description of Artificial Sequence:  Enzymatic Nucleic Acid
  misc_feature (11)..(16): Phosphorothioate 3'-Internucleotide Linkage
  misc_feature (20)..(20): Phosphorothioate 3'-Internucleotide Linkage
  misc_feature (22)..(22): Phosphorothioate 3'-Internucleotide Linkage
  misc_feature (24)..(25): Phosphorothioate 3'-Internucleotide Linkage
  misc_feature (28)..(28): Phosphorothioate 3'-Internucleotide Linkage
  misc_feature (30)..(30): Phosphorothioate 3'-Internucleotide Linkage
gucguugagccgaaaggcgagucaaggucuauugcuga

SEQ ID NO: 9194 - RNA, 38 nt, Artificial Sequence
  Description of Artificial Sequence:  Enzymatic Nucleic Acid
  misc_feature (11)..(16): Phosphorothioate 3'-Internucleotide Linkage
  misc_feature (20)..(20): Phosphorothioate 3'-Internucleotide Linkage
  misc_feature (22)..(22): Phosphorothioate 3'-Internucleotide Linkage
  misc_feature (24)..(25): Phosphorothioate 3'-Internucleotide Linkage
  misc_feature (28)..(28): Phosphorothioate 3'-Internucleotide Linkage
  misc_feature (30)..(30): Phosphorothioate 3'-Internucleotide Linkage
uaaacacagccgaaaggcgagucaaggucuagucuuug

SEQ ID NO: 9195 - RNA, 38 nt, Artificial Sequence
  Description of Artificial Sequence:  Enzymatic Nucleic Acid
  misc_feature (11)..(16): Phosphorothioate 3'-Internucleotide Linkage
  misc_feature (20)..(20): Phosphorothioate 3'-Internucleotide Linkage
  misc_feature (22)..(22): Phosphorothioate 3'-Internucleotide Linkage
  misc_feature (24)..(25): Phosphorothioate 3'-Internucleotide Linkage
  misc_feature (28)..(28): Phosphorothioate 3'-Internucleotide Linkage
  misc_feature (30)..(30): Phosphorothioate 3'-Internucleotide Linkage
auuaaacagccgaaaggcgagucaaggucuacagucuu

SEQ ID NO: 9196 - RNA, 38 nt, Artificial Sequence
  Description of Artificial Sequence:  Enzymatic Nucleic Acid
  misc_feature (11)..(16): Phosphorothioate 3'-Internucleotide Linkage
  misc_feature (20)..(20): Phosphorothioate 3'-Internucleotide Linkage
  misc_feature (22)..(22): Phosphorothioate 3'-Internucleotide Linkage
  misc_feature (24)..(25): Phosphorothioate 3'-Internucleotide Linkage
  misc_feature (28)..(28): Phosphorothioate 3'-Internucleotide Linkage
  misc_feature (30)..(30): Phosphorothioate 3'-Internucleotide Linkage
ucauuaaagccgaaaggcgagucaaggucuacacaguc

SEQ ID NO: 9197 - RNA, 38 nt, Artificial Sequence
  Description of Artificial Sequence:  Enzymatic Nucleic Acid
  misc_feature (11)..(16): Phosphorothioate 3'-Internucleotide Linkage
  misc_feature (20)..(20): Phosphorothioate 3'-Internucleotide Linkage
  misc_feature (22)..(22): Phosphorothioate 3'-Internucleotide Linkage
  misc_feature (24)..(25): Phosphorothioate 3'-Internucleotide Linkage
  misc_feature (28)..(28): Phosphorothioate 3'-Internucleotide Linkage
  misc_feature (30)..(30): Phosphorothioate 3'-Internucleotide Linkage
uccuaguagccgaaaggcgagucaaggucuaaagaccu

SEQ ID NO: 9198 - RNA, 38 nt, Artificial Sequence
  Description of Artificial Sequence:  Enzymatic Nucleic Acid
  misc_feature (11)..(16): Phosphorothioate 3'-Internucleotide Linkage
  misc_feature (20)..(20): Phosphorothioate 3'-Internucleotide Linkage
  misc_feature (22)..(22): Phosphorothioate 3'-Internucleotide Linkage
  misc_feature (24)..(25): Phosphorothioate 3'-Internucleotide Linkage
  misc_feature (28)..(28): Phosphorothioate 3'-Internucleotide Linkage
  misc_feature (30)..(30): Phosphorothioate 3'-Internucleotide Linkage
uaugccuagccgaaaggcgagucaaggucuagccuccu

SEQ ID NO: 9199 - RNA, 38 nt, Artificial Sequence
  Description of Artificial Sequence:  Enzymatic Nucleic Acid
  misc_feature (11)..(16): Phosphorothioate 3'-Internucleotide Linkage
  misc_feature (20)..(20): Phosphorothioate 3'-Internucleotide Linkage
  misc_feature (22)..(22): Phosphorothioate 3'-Internucleotide Linkage
  misc_feature (24)..(25): Phosphorothioate 3'-Internucleotide Linkage
  misc_feature (28)..(28): Phosphorothioate 3'-Internucleotide Linkage
  misc_feature (30)..(30): Phosphorothioate 3'-Internucleotide Linkage
ggugaacagccgaaaggcgagucaaggucuaccaauuu

SEQ ID NO: 9200 - RNA, 38 nt, Artificial Sequence
  Description of Artificial Sequence:  Enzymatic Nucleic Acid
  misc_feature (11)..(16): Phosphorothioate 3'-Internucleotide Linkage
  misc_feature (20)..(20): Phosphorothioate 3'-Internucleotide Linkage
  misc_feature (22)..(22): Phosphorothioate 3'-Internucleotide Linkage
  misc_feature (24)..(25): Phosphorothioate 3'-Internucleotide Linkage
  misc_feature (28)..(28): Phosphorothioate 3'-Internucleotide Linkage
  misc_feature (30)..(30): Phosphorothioate 3'-Internucleotide Linkage
cuggugaagccgaaaggcgagucaaggucuacaccaau

SEQ ID NO: 9201 - RNA, 38 nt, Artificial Sequence
  Description of Artificial Sequence:  Enzymatic Nucleic Acid
  misc_feature (11)..(16): Phosphorothioate 3'-Internucleotide Linkage
  misc_feature (20)..(20): Phosphorothioate 3'-Internucleotide Linkage
  misc_feature (22)..(22): Phosphorothioate 3'-Internucleotide Linkage
  misc_feature (24)..(25): Phosphorothioate 3'-Internucleotide Linkage
  misc_feature (28)..(28): Phosphorothioate 3'-Internucleotide Linkage
  misc_feature (30)..(30): Phosphorothioate 3'-Internucleotide Linkage
gacaugaagccgaaaggcgagucaaggucuaugagaug

SEQ ID NO: 9202 - RNA, 38 nt, Artificial Sequence
  Description of Artificial Sequence:  Enzymatic Nucleic Acid
  misc_feature (11)..(16): Phosphorothioate 3'-Internucleotide Linkage
  misc_feature (20)..(20): Phosphorothioate 3'-Internucleotide Linkage
  misc_feature (22)..(22): Phosphorothioate 3'-Internucleotide Linkage
  misc_feature (24)..(25): Phosphorothioate 3'-Internucleotide Linkage
  misc_feature (28)..(28): Phosphorothioate 3'-Internucleotide Linkage
  misc_feature (30)..(30): Phosphorothioate 3'-Internucleotide Linkage
caguaggagccgaaaggcgagucaaggucuaugaacau

SEQ ID NO: 9203 - RNA, 38 nt, Artificial Sequence
  Description of Artificial Sequence:  Enzymatic Nucleic Acid
  misc_feature (11)..(16): Phosphorothioate 3'-Internucleotide Linkage
  misc_feature (20)..(20): Phosphorothioate 3'-Internucleotide Linkage
  misc_feature (22)..(22): Phosphorothioate 3'-Internucleotide Linkage
  misc_feature (24)..(25): Phosphorothioate 3'-Internucleotide Linkage
  misc_feature (28)..(28): Phosphorothioate 3'-Internucleotide Linkage
  misc_feature (30)..(30): Phosphorothioate 3'-Internucleotide Linkage
ggcuugaagccgaaaggcgagucaaggucuaguaggac

SEQ ID NO: 9204 - RNA, 38 nt, Artificial Sequence
  Description of Artificial Sequence:  Enzymatic Nucleic Acid
  misc_feature (11)..(16): Phosphorothioate 3'-Internucleotide Linkage
  misc_feature (20)..(20): Phosphorothioate 3'-Internucleotide Linkage
  misc_feature (22)..(22): Phosphorothioate 3'-Internucleotide Linkage
  misc_feature (24)..(25): Phosphorothioate 3'-Internucleotide Linkage
  misc_feature (28)..(28): Phosphorothioate 3'-Internucleotide Linkage
  misc_feature (30)..(30): Phosphorothioate 3'-Internucleotide Linkage
ccaaggcagccgaaaggcgagucaaggucuagcuugga

SEQ ID NO: 9205 - RNA, 38 nt, Artificial Sequence
  Description of Artificial Sequence:  Enzymatic Nucleic Acid
  misc_feature (11)..(16): Phosphorothioate 3'-Internucleotide Linkage
  misc_feature (20)..(20): Phosphorothioate 3'-Internucleotide Linkage
  misc_feature (22)..(22): Phosphorothioate 3'-Internucleotide Linkage
  misc_feature (24)..(25): Phosphorothioate 3'-Internucleotide Linkage
  misc_feature (28)..(28): Phosphorothioate 3'-Internucleotide Linkage
  misc_feature (30)..(30): Phosphorothioate 3'-Internucleotide Linkage
uaacuccagccgaaaggcgagucaaggucuagaagcuc

SEQ ID NO: 9206 - RNA, 38 nt, Artificial Sequence
  Description of Artificial Sequence:  Enzymatic Nucleic Acid
  misc_feature (11)..(16): Phosphorothioate 3'-Internucleotide Linkage
  misc_feature (20)..(20): Phosphorothioate 3'-Internucleotide Linkage
  misc_feature (22)..(22): Phosphorothioate 3'-Internucleotide Linkage
  misc_feature (24)..(25): Phosphorothioate 3'-Internucleotide Linkage
  misc_feature (28)..(28): Phosphorothioate 3'-Internucleotide Linkage
  misc_feature (30)..(30): Phosphorothioate 3'-Internucleotide Linkage
ccccgauagccgaaaggcgagucaaggucuagagcaga

SEQ ID NO: 9207 - RNA, 38 nt, Artificial Sequence
  Description of Artificial Sequence:  Enzymatic Nucleic Acid
  misc_feature (11)..(16): Phosphorothioate 3'-Internucleotide Linkage
  misc_feature (20)..(20): Phosphorothioate 3'-Internucleotide Linkage
  misc_feature (22)..(22): Phosphorothioate 3'-Internucleotide Linkage
  misc_feature (24)..(25): Phosphorothioate 3'-Internucleotide Linkage
  misc_feature (28)..(28): Phosphorothioate 3'-Internucleotide Linkage
  misc_feature (30)..(30): Phosphorothioate 3'-Internucleotide Linkage
gaggugaagccgaaaggcgagucaaggucuaauguucc

SEQ ID NO: 9208 - RNA, 38 nt, Artificial Sequence
  Description of Artificial Sequence:  Enzymatic Nucleic Acid
  misc_feature (11)..(16): Phosphorothioate 3'-Internucleotide Linkage
  misc_feature (20)..(20): Phosphorothioate 3'-Internucleotide Linkage
  misc_feature (22)..(22): Phosphorothioate 3'-Internucleotide Linkage
  misc_feature (24)..(25): Phosphorothioate 3'-Internucleotide Linkage
  misc_feature (28)..(28): Phosphorothioate 3'-Internucleotide Linkage
  misc_feature (30)..(30): Phosphorothioate 3'-Internucleotide Linkage
ccccaacagccgaaaggcgagucaaggucuagaauagc

SEQ ID NO: 9209 - RNA, 38 nt, Artificial Sequence
  Description of Artificial Sequence:  Enzymatic Nucleic Acid
  misc_feature (11)..(16): Phosphorothioate 3'-Internucleotide Linkage
  misc_feature (20)..(20): Phosphorothioate 3'-Internucleotide Linkage
  misc_feature (22)..(22): Phosphorothioate 3'-Internucleotide Linkage
  misc_feature (24)..(25): Phosphorothioate 3'-Internucleotide Linkage
  misc_feature (28)..(28): Phosphorothioate 3'-Internucleotide Linkage
  misc_feature (30)..(30): Phosphorothioate 3'-Internucleotide Linkage
caccccaagccgaaaggcgagucaaggucuacagaaua

SEQ ID NO: 9210 - RNA, 38 nt, Artificial Sequence
  Description of Artificial Sequence:  Enzymatic Nucleic Acid
  misc_feature (11)..(16): Phosphorothioate 3'-Internucleotide Linkage
  misc_feature (20)..(20): Phosphorothioate 3'-Internucleotide Linkage
  misc_feature (22)..(22): Phosphorothioate 3'-Internucleotide Linkage
  misc_feature (24)..(25): Phosphorothioate 3'-Internucleotide Linkage
  misc_feature (28)..(28): Phosphorothioate 3'-Internucleotide Linkage
  misc_feature (30)..(30): Phosphorothioate 3'-Internucleotide Linkage
aacguugagccgaaaggcgagucaaggucuauagcuga

SEQ ID NO: 9211 - RNA, 38 nt, Artificial Sequence
  Description of Artificial Sequence:  Enzymatic Nucleic Acid
  misc_feature (11)..(16): Phosphorothioate 3'-Internucleotide Linkage
  misc_feature (20)..(20): Phosphorothioate 3'-Internucleotide Linkage
  misc_feature (22)..(22): Phosphorothioate 3'-Internucleotide Linkage
  misc_feature (24)..(25): Phosphorothioate 3'-Internucleotide Linkage
  misc_feature (28)..(28): Phosphorothioate 3'-Internucleotide Linkage
  misc_feature (30)..(30): Phosphorothioate 3'-Internucleotide Linkage
ugaaaccagccgaaaggcgagucaaggucuaauaguug

SEQ ID NO: 9212 - RNA, 38 nt, Artificial Sequence
  Description of Artificial Sequence:  Enzymatic Nucleic Acid
  misc_feature (11)..(16): Phosphorothioate 3'-Internucleotide Linkage
  misc_feature (20)..(20): Phosphorothioate 3'-Internucleotide Linkage
  misc_feature (22)..(22): Phosphorothioate 3'-Internucleotide Linkage
  misc_feature (24)..(25): Phosphorothioate 3'-Internucleotide Linkage
  misc_feature (28)..(28): Phosphorothioate 3'-Internucleotide Linkage
  misc_feature (30)..(30): Phosphorothioate 3'-Internucleotide Linkage
aaguaagagccgaaaggcgagucaaggucuaggaaaug

SEQ ID NO: 9213 - RNA, 38 nt, Artificial Sequence
  Description of Artificial Sequence:  Enzymatic Nucleic Acid
  misc_feature (11)..(16): Phosphorothioate 3'-Internucleotide Linkage
  misc_feature (20)..(20): Phosphorothioate 3'-Internucleotide Linkage
  misc_feature (22)..(22): Phosphorothioate 3'-Internucleotide Linkage
  misc_feature (24)..(25): Phosphorothioate 3'-Internucleotide Linkage
  misc_feature (28)..(28): Phosphorothioate 3'-Internucleotide Linkage
  misc_feature (30)..(30): Phosphorothioate 3'-Internucleotide Linkage
uucaagaagccgaaaggcgagucaaggucuaguuucuc

SEQ ID NO: 9214 - RNA, 38 nt, Artificial Sequence
  Description of Artificial Sequence:  Enzymatic Nucleic Acid
  misc_feature (11)..(16): Phosphorothioate 3'-Internucleotide Linkage
  misc_feature (20)..(20): Phosphorothioate 3'-Internucleotide Linkage
  misc_feature (22)..(22): Phosphorothioate 3'-Internucleotide Linkage
  misc_feature (24)..(25): Phosphorothioate 3'-Internucleotide Linkage
  misc_feature (28)..(28): Phosphorothioate 3'-Internucleotide Linkage
  misc_feature (30)..(30): Phosphorothioate 3'-Internucleotide Linkage
ccaaaagagccgaaaggcgagucaaggucuaccaaaua

SEQ ID NO: 9215 - RNA, 38 nt, Artificial Sequence
  Description of Artificial Sequence:  Enzymatic Nucleic Acid
  misc_feature (11)..(16): Phosphorothioate 3'-Internucleotide Linkage
  misc_feature (20)..(20): Phosphorothioate 3'-Internucleotide Linkage
  misc_feature (22)..(22): Phosphorothioate 3'-Internucleotide Linkage
  misc_feature (24)..(25): Phosphorothioate 3'-Internucleotide Linkage
  misc_feature (28)..(28): Phosphorothioate 3'-Internucleotide Linkage
  misc_feature (30)..(30): Phosphorothioate 3'-Internucleotide Linkage
cgaauccagccgaaaggcgagucaaggucuacuccaaa

SEQ ID NO: 9216 - RNA, 38 nt, Artificial Sequence
  Description of Artificial Sequence:  Enzymatic Nucleic Acid
  misc_feature (11)..(16): Phosphorothioate 3'-Internucleotide Linkage
  misc_feature (20)..(20): Phosphorothioate 3'-Internucleotide Linkage
  misc_feature (22)..(22): Phosphorothioate 3'-Internucleotide Linkage
  misc_feature (24)..(25): Phosphorothioate 3'-Internucleotide Linkage
  misc_feature (28)..(28): Phosphorothioate 3'-Internucleotide Linkage
  misc_feature (30)..(30): Phosphorothioate 3'-Internucleotide Linkage
ucuaacaagccgaaaggcgagucaaggucuaguaguuu

SEQ ID NO: 9217 - RNA, 38 nt, Artificial Sequence
  Description of Artificial Sequence:  Enzymatic Nucleic Acid
  misc_feature (11)..(16): Phosphorothioate 3'-Internucleotide Linkage
  misc_feature (20)..(20): Phosphorothioate 3'-Internucleotide Linkage
  misc_feature (22)..(22): Phosphorothioate 3'-Internucleotide Linkage
  misc_feature (24)..(25): Phosphorothioate 3'-Internucleotide Linkage
  misc_feature (28)..(28): Phosphorothioate 3'-Internucleotide Linkage
  misc_feature (30)..(30): Phosphorothioate 3'-Internucleotide Linkage
ucgucuaagccgaaaggcgagucaaggucuaacaguag

SEQ ID NO: 9218 - RNA, 38 nt, Artificial Sequence
  Description of Artificial Sequence:  Enzymatic Nucleic Acid
  misc_feature (11)..(16): Phosphorothioate 3'-Internucleotide Linkage
  misc_feature (20)..(20): Phosphorothioate 3'-Internucleotide Linkage
  misc_feature (22)..(22): Phosphorothioate 3'-Internucleotide Linkage
  misc_feature (24)..(25): Phosphorothioate 3'-Internucleotide Linkage
  misc_feature (28)..(28): Phosphorothioate 3'-Internucleotide Linkage
  misc_feature (30)..(30): Phosphorothioate 3'-Internucleotide Linkage
aauacuaagccgaaaggcgagucaaggucuauugagau

SEQ ID NO: 9219 - RNA, 38 nt, Artificial Sequence
  Description of Artificial Sequence:  Enzymatic Nucleic Acid
  misc_feature (11)..(16): Phosphorothioate 3'-Internucleotide Linkage
  misc_feature (20)..(20): Phosphorothioate 3'-Internucleotide Linkage
  misc_feature (22)..(22): Phosphorothioate 3'-Internucleotide Linkage
  misc_feature (24)..(25): Phosphorothioate 3'-Internucleotide Linkage
  misc_feature (28)..(28): Phosphorothioate 3'-Internucleotide Linkage
  misc_feature (30)..(30): Phosphorothioate 3'-Internucleotide Linkage
ucuaucaagccgaaaggcgagucaaggucuaauguccu

SEQ ID NO: 9220 - RNA, 38 nt, Artificial Sequence
  Description of Artificial Sequence:  Enzymatic Nucleic Acid
  misc_feature (11)..(16): Phosphorothioate 3'-Internucleotide Linkage
  misc_feature (20)..(20): Phosphorothioate 3'-Internucleotide Linkage
  misc_feature (22)..(22): Phosphorothioate 3'-Internucleotide Linkage
  misc_feature (24)..(25): Phosphorothioate 3'-Internucleotide Linkage
  misc_feature (28)..(28): Phosphorothioate 3'-Internucleotide Linkage
  misc_feature (30)..(30): Phosphorothioate 3'-Internucleotide Linkage
auugcuuagccgaaaggcgagucaaggucuaucuauca

SEQ ID NO: 9221 - RNA, 38 nt, Artificial Sequence
  Description of Artificial Sequence:  Enzymatic Nucleic Acid
  misc_feature (11)..(16): Phosphorothioate 3'-Internucleotide Linkage
  misc_feature (20)..(20): Phosphorothioate 3'-Internucleotide Linkage
  misc_feature (22)..(22): Phosphorothioate 3'-Internucleotide Linkage
  misc_feature (24)..(25): Phosphorothioate 3'-Internucleotide Linkage
  misc_feature (28)..(28): Phosphorothioate 3'-Internucleotide Linkage
  misc_feature (30)..(30): Phosphorothioate 3'-Internucleotide Linkage
gggccccagccgaaaggcgagucaaggucuaaauugcu

SEQ ID NO: 9222 - RNA, 38 nt, Artificial Sequence
  Description of Artificial Sequence:  Enzymatic Nucleic Acid
  misc_feature (11)..(16): Phosphorothioate 3'-Internucleotide Linkage
  misc_feature (20)..(20): Phosphorothioate 3'-Internucleotide Linkage
  misc_feature (22)..(22): Phosphorothioate 3'-Internucleotide Linkage
  misc_feature (24)..(25): Phosphorothioate 3'-Internucleotide Linkage
  misc_feature (28)..(28): Phosphorothioate 3'-Internucleotide Linkage
  misc_feature (30)..(30): Phosphorothioate 3'-Internucleotide Linkage
uuuaguaagccgaaaggcgagucaaggucuauugggau

SEQ ID NO: 9223 - RNA, 38 nt, Artificial Sequence
  Description of Artificial Sequence:  Enzymatic Nucleic Acid
  misc_feature (11)..(16): Phosphorothioate 3'-Internucleotide Linkage
  misc_feature (20)..(20): Phosphorothioate 3'-Internucleotide Linkage
  misc_feature (22)..(22): Phosphorothioate 3'-Internucleotide Linkage
  misc_feature (24)..(25): Phosphorothioate 3'-Internucleotide Linkage
  misc_feature (28)..(28): Phosphorothioate 3'-Internucleotide Linkage
  misc_feature (30)..(30): Phosphorothioate 3'-Internucleotide Linkage
auuaacuagccgaaaggcgagucaaggucuauacucug

SEQ ID NO: 9224 - RNA, 38 nt, Artificial Sequence
  Description of Artificial Sequence:  Enzymatic Nucleic Acid
  misc_feature (11)..(16): Phosphorothioate 3'-Internucleotide Linkage
  misc_feature (20)..(20): Phosphorothioate 3'-Internucleotide Linkage
  misc_feature (22)..(22): Phosphorothioate 3'-Internucleotide Linkage
  misc_feature (24)..(25): Phosphorothioate 3'-Internucleotide Linkage
  misc_feature (28)..(28): Phosphorothioate 3'-Internucleotide Linkage
  misc_feature (30)..(30): Phosphorothioate 3'-Internucleotide Linkage
auuggggagccgaaaggcgagucaaggucuagaaagau

SEQ ID NO: 9225 - RNA, 38 nt, Artificial Sequence
  Description of Artificial Sequence:  Enzymatic Nucleic Acid
  misc_feature (11)..(16): Phosphorothioate 3'-Internucleotide Linkage
  misc_feature (20)..(20): Phosphorothioate 3'-Internucleotide Linkage
  misc_feature (22)..(22): Phosphorothioate 3'-Internucleotide Linkage
  misc_feature (24)..(25): Phosphorothioate 3'-Internucleotide Linkage
  misc_feature (28)..(28): Phosphorothioate 3'-Internucleotide Linkage
  misc_feature (30)..(30): Phosphorothioate 3'-Internucleotide Linkage
caccccaagccgaaaggcgagucaaggucuaguccccc

SEQ ID NO: 9226 - RNA, 38 nt, Artificial Sequence
  Description of Artificial Sequence:  Enzymatic Nucleic Acid
  misc_feature (11)..(16): Phosphorothioate 3'-Internucleotide Linkage
  misc_feature (20)..(20): Phosphorothioate 3'-Internucleotide Linkage
  misc_feature (22)..(22): Phosphorothioate 3'-Internucleotide Linkage
  misc_feature (24)..(25): Phosphorothioate 3'-Internucleotide Linkage
  misc_feature (28)..(28): Phosphorothioate 3'-Internucleotide Linkage
  misc_feature (30)..(30): Phosphorothioate 3'-Internucleotide Linkage
ugcuggcagccgaaaggcgagucaaggucuaguuguga

SEQ ID NO: 9227 - RNA, 38 nt, Artificial Sequence
  Description of Artificial Sequence:  Enzymatic Nucleic Acid
  misc_feature (11)..(16): Phosphorothioate 3'-Internucleotide Linkage
  misc_feature (20)..(20): Phosphorothioate 3'-Internucleotide Linkage
  misc_feature (22)..(22): Phosphorothioate 3'-Internucleotide Linkage
  misc_feature (24)..(25): Phosphorothioate 3'-Internucleotide Linkage
  misc_feature (28)..(28): Phosphorothioate 3'-Internucleotide Linkage
  misc_feature (30)..(30): Phosphorothioate 3'-Internucleotide Linkage
ggcccugagccgaaaggcgagucaaggucuucugggau

SEQ ID NO: 9228 - RNA, 38 nt, Artificial Sequence
  Description of Artificial Sequence:  Enzymatic Nucleic Acid
  misc_feature (11)..(16): Phosphorothioate 3'-Internucleotide Linkage
  misc_feature (20)..(20): Phosphorothioate 3'-Internucleotide Linkage
  misc_feature (22)..(22): Phosphorothioate 3'-Internucleotide Linkage
  misc_feature (24)..(25): Phosphorothioate 3'-Internucleotide Linkage
  misc_feature (28)..(28): Phosphorothioate 3'-Internucleotide Linkage
  misc_feature (30)..(30): Phosphorothioate 3'-Internucleotide Linkage
guacaggggccgaaaggcgagucaaggucuccugacuc

SEQ ID NO: 9229 - RNA, 38 nt, Artificial Sequence
  Description of Artificial Sequence:  Enzymatic Nucleic Acid
  misc_feature (11)..(16): Phosphorothioate 3'-Internucleotide Linkage
  misc_feature (20)..(20): Phosphorothioate 3'-Internucleotide Linkage
  misc_feature (22)..(22): Phosphorothioate 3'-Internucleotide Linkage
  misc_feature (24)..(25): Phosphorothioate 3'-Internucleotide Linkage
  misc_feature (28)..(28): Phosphorothioate 3'-Internucleotide Linkage
  misc_feature (30)..(30): Phosphorothioate 3'-Internucleotide Linkage
uggagccagccgaaaggcgagucaaggucucagcagga

SEQ ID NO: 9230 - RNA, 38 nt, Artificial Sequence
  Description of Artificial Sequence:  Enzymatic Nucleic Acid
  misc_feature (11)..(16): Phosphorothioate 3'-Internucleotide Linkage
  misc_feature (20)..(20): Phosphorothioate 3'-Internucleotide Linkage
  misc_feature (22)..(22): Phosphorothioate 3'-Internucleotide Linkage
  misc_feature (24)..(25): Phosphorothioate 3'-Internucleotide Linkage
  misc_feature (28)..(28): Phosphorothioate 3'-Internucleotide Linkage
  misc_feature (30)..(30): Phosphorothioate 3'-Internucleotide Linkage
aacuggaggccgaaaggcgagucaaggucucaccagca

SEQ ID NO: 9231 - RNA, 38 nt, Artificial Sequence
  Description of Artificial Sequence:  Enzymatic Nucleic Acid
  misc_feature (11)..(16): Phosphorothioate 3'-Internucleotide Linkage
  misc_feature (20)..(20): Phosphorothioate 3'-Internucleotide Linkage
  misc_feature (22)..(22): Phosphorothioate 3'-Internucleotide Linkage
  misc_feature (24)..(25): Phosphorothioate 3'-Internucleotide Linkage
  misc_feature (28)..(28): Phosphorothioate 3'-Internucleotide Linkage
  misc_feature (30)..(30): Phosphorothioate 3'-Internucleotide Linkage
uuccugaagccgaaaggcgagucaaggucuuggagcca

SEQ ID NO: 9232 - RNA, 38 nt, Artificial Sequence
  Description of Artificial Sequence:  Enzymatic Nucleic Acid
  misc_feature (11)..(16): Phosphorothioate 3'-Internucleotide Linkage
  misc_feature (20)..(20): Phosphorothioate 3'-Internucleotide Linkage
  misc_feature (22)..(22): Phosphorothioate 3'-Internucleotide Linkage
  misc_feature (24)..(25): Phosphorothioate 3'-Internucleotide Linkage
  misc_feature (28)..(28): Phosphorothioate 3'-Internucleotide Linkage
  misc_feature (30)..(30): Phosphorothioate 3'-Internucleotide Linkage
agggcucagccgaaaggcgagucaaggucuuguuccug

SEQ ID NO: 9233 - RNA, 38 nt, Artificial Sequence
  Description of Artificial Sequence:  Enzymatic Nucleic Acid
  misc_feature (11)..(16): Phosphorothioate 3'-Internucleotide Linkage
  misc_feature (20)..(20): Phosphorothioate 3'-Internucleotide Linkage
  misc_feature (22)..(22): Phosphorothioate 3'-Internucleotide Linkage
  misc_feature (24)..(25): Phosphorothioate 3'-Internucleotide Linkage
  misc_feature (28)..(28): Phosphorothioate 3'-Internucleotide Linkage
  misc_feature (30)..(30): Phosphorothioate 3'-Internucleotide Linkage
gagcaggggccgaaaggcgagucaaggucuucacuguu

SEQ ID NO: 9234 - RNA, 38 nt, Artificial Sequence
  Description of Artificial Sequence:  Enzymatic Nucleic Acid
  misc_feature (11)..(16): Phosphorothioate 3'-Internucleotide Linkage
  misc_feature (20)..(20): Phosphorothioate 3'-Internucleotide Linkage
  misc_feature (22)..(22): Phosphorothioate 3'-Internucleotide Linkage
  misc_feature (24)..(25): Phosphorothioate 3'-Internucleotide Linkage
  misc_feature (28)..(28): Phosphorothioate 3'-Internucleotide Linkage
  misc_feature (30)..(30): Phosphorothioate 3'-Internucleotide Linkage
aagauugagccgaaaggcgagucaaggucugauauggc

SEQ ID NO: 9235 - RNA, 38 nt, Artificial Sequence
  Description of Artificial Sequence:  Enzymatic Nucleic Acid
  misc_feature (11)..(16): Phosphorothioate 3'-Internucleotide Linkage
  misc_feature (20)..(20): Phosphorothioate 3'-Internucleotide Linkage
  misc_feature (22)..(22): Phosphorothioate 3'-Internucleotide Linkage
  misc_feature (24)..(25): Phosphorothioate 3'-Internucleotide Linkage
  misc_feature (28)..(28): Phosphorothioate 3'-Internucleotide Linkage
  misc_feature (30)..(30): Phosphorothioate 3'-Internucleotide Linkage
cuguaacagccgaaaggcgagucaaggucugagcaggg

SEQ ID NO: 9236 - RNA, 38 nt, Artificial Sequence
  Description of Artificial Sequence:  Enzymatic Nucleic Acid
  misc_feature (11)..(16): Phosphorothioate 3'-Internucleotide Linkage
  misc_feature (20)..(20): Phosphorothioate 3'-Internucleotide Linkage
  misc_feature (22)..(22): Phosphorothioate 3'-Internucleotide Linkage
  misc_feature (24)..(25): Phosphorothioate 3'-Internucleotide Linkage
  misc_feature (28)..(28): Phosphorothioate 3'-Internucleotide Linkage
  misc_feature (30)..(30): Phosphorothioate 3'-Internucleotide Linkage
aaaccccggccgaaaggcgagucaaggucucuguaaca

SEQ ID NO: 9237 - RNA, 38 nt, Artificial Sequence
  Description of Artificial Sequence:  Enzymatic Nucleic Acid
  misc_feature (11)..(16): Phosphorothioate 3'-Internucleotide Linkage
  misc_feature (20)..(20): Phosphorothioate 3'-Internucleotide Linkage
  misc_feature (22)..(22): Phosphorothioate 3'-Internucleotide Linkage
  misc_feature (24)..(25): Phosphorothioate 3'-Internucleotide Linkage
  misc_feature (28)..(28): Phosphorothioate 3'-Internucleotide Linkage
  misc_feature (30)..(30): Phosphorothioate 3'-Internucleotide Linkage
aagaaaaagccgaaaggcgagucaaggucucccgccug

SEQ ID NO: 9238 - RNA, 38 nt, Artificial Sequence
  Description of Artificial Sequence:  Enzymatic Nucleic Acid
  misc_feature (11)..(16): Phosphorothioate 3'-Internucleotide Linkage
  misc_feature (20)..(20): Phosphorothioate 3'-Internucleotide Linkage
  misc_feature (22)..(22): Phosphorothioate 3'-Internucleotide Linkage
  misc_feature (24)..(25): Phosphorothioate 3'-Internucleotide Linkage
  misc_feature (28)..(28): Phosphorothioate 3'-Internucleotide Linkage
  misc_feature (30)..(30): Phosphorothioate 3'-Internucleotide Linkage
agucuagagccgaaaggcgagucaaggucuucuguggu

SEQ ID NO: 9239 - RNA, 38 nt, Artificial Sequence
  Description of Artificial Sequence:  Enzymatic Nucleic Acid
  misc_feature (11)..(16): Phosphorothioate 3'-Internucleotide Linkage
  misc_feature (20)..(20): Phosphorothioate 3'-Internucleotide Linkage
  misc_feature (22)..(22): Phosphorothioate 3'-Internucleotide Linkage
  misc_feature (24)..(25): Phosphorothioate 3'-Internucleotide Linkage
  misc_feature (28)..(28): Phosphorothioate 3'-Internucleotide Linkage
  misc_feature (30)..(30): Phosphorothioate 3'-Internucleotide Linkage
guccaccagccgaaaggcgagucaaggucugagucuag

SEQ ID NO: 9240 - RNA, 38 nt, Artificial Sequence
  Description of Artificial Sequence:  Enzymatic Nucleic Acid
  misc_feature (11)..(16): Phosphorothioate 3'-Internucleotide Linkage
  misc_feature (20)..(20): Phosphorothioate 3'-Internucleotide Linkage
  misc_feature (22)..(22): Phosphorothioate 3'-Internucleotide Linkage
  misc_feature (24)..(25): Phosphorothioate 3'-Internucleotide Linkage
  misc_feature (28)..(28): Phosphorothioate 3'-Internucleotide Linkage
  misc_feature (30)..(30): Phosphorothioate 3'-Internucleotide Linkage
gaaguccagccgaaaggcgagucaaggucucacgaguc

SEQ ID NO: 9241 - RNA, 38 nt, Artificial Sequence
  Description of Artificial Sequence:  Enzymatic Nucleic Acid
  misc_feature (11)..(16): Phosphorothioate 3'-Internucleotide Linkage
  misc_feature (20)..(20): Phosphorothioate 3'-Internucleotide Linkage
  misc_feature (22)..(22): Phosphorothioate 3'-Internucleotide Linkage
  misc_feature (24)..(25): Phosphorothioate 3'-Internucleotide Linkage
  misc_feature (28)..(28): Phosphorothioate 3'-Internucleotide Linkage
  misc_feature (30)..(30): Phosphorothioate 3'-Internucleotide Linkage
aagacacagccgaaaggcgagucaaggucuggguguuc

SEQ ID NO: 9242 - RNA, 38 nt, Artificial Sequence
  Description of Artificial Sequence:  Enzymatic Nucleic Acid
  misc_feature (11)..(16): Phosphorothioate 3'-Internucleotide Linkage
  misc_feature (20)..(20): Phosphorothioate 3'-Internucleotide Linkage
  misc_feature (22)..(22): Phosphorothioate 3'-Internucleotide Linkage
  misc_feature (24)..(25): Phosphorothioate 3'-Internucleotide Linkage
  misc_feature (28)..(28): Phosphorothioate 3'-Internucleotide Linkage
  misc_feature (30)..(30): Phosphorothioate 3'-Internucleotide Linkage
aauuuugggccgaaaggcgagucaaggucucaagacac

SEQ ID NO: 9243 - RNA, 38 nt, Artificial Sequence
  Description of Artificial Sequence:  Enzymatic Nucleic Acid
  misc_feature (11)..(16): Phosphorothioate 3'-Internucleotide Linkage
  misc_feature (20)..(20): Phosphorothioate 3'-Internucleotide Linkage
  misc_feature (22)..(22): Phosphorothioate 3'-Internucleotide Linkage
  misc_feature (24)..(25): Phosphorothioate 3'-Internucleotide Linkage
  misc_feature (28)..(28): Phosphorothioate 3'-Internucleotide Linkage
  misc_feature (30)..(30): Phosphorothioate 3'-Internucleotide Linkage
auuugggagccgaaaggcgagucaaggucuugcgaauu

SEQ ID NO: 9244 - RNA, 38 nt, Artificial Sequence
  Description of Artificial Sequence:  Enzymatic Nucleic Acid
  misc_feature (11)..(16): Phosphorothioate 3'-Internucleotide Linkage
  misc_feature (20)..(20): Phosphorothioate 3'-Internucleotide Linkage
  misc_feature (22)..(22): Phosphorothioate 3'-Internucleotide Linkage
  misc_feature (24)..(25): Phosphorothioate 3'-Internucleotide Linkage
  misc_feature (28)..(28): Phosphorothioate 3'-Internucleotide Linkage
  misc_feature (30)..(30): Phosphorothioate 3'-Internucleotide Linkage
gugagugagccgaaaggcgagucaaggucuuggagauu

SEQ ID NO: 9245 - RNA, 38 nt, Artificial Sequence
  Description of Artificial Sequence:  Enzymatic Nucleic Acid
  misc_feature (11)..(16): Phosphorothioate 3'-Internucleotide Linkage
  misc_feature (20)..(20): Phosphorothioate 3'-Internucleotide Linkage
  misc_feature (22)..(22): Phosphorothioate 3'-Internucleotide Linkage
  misc_feature (24)..(25): Phosphorothioate 3'-Internucleotide Linkage
  misc_feature (28)..(28): Phosphorothioate 3'-Internucleotide Linkage
  misc_feature (30)..(30): Phosphorothioate 3'-Internucleotide Linkage
agcgauaagccgaaaggcgagucaaggucucaggacaa

SEQ ID NO: 9246 - RNA, 38 nt, Artificial Sequence
  Description of Artificial Sequence:  Enzymatic Nucleic Acid
  misc_feature (11)..(16): Phosphorothioate 3'-Internucleotide Linkage
  misc_feature (20)..(20): Phosphorothioate 3'-Internucleotide Linkage
  misc_feature (22)..(22): Phosphorothioate 3'-Internucleotide Linkage
  misc_feature (24)..(25): Phosphorothioate 3'-Internucleotide Linkage
  misc_feature (28)..(28): Phosphorothioate 3'-Internucleotide Linkage
  misc_feature (30)..(30): Phosphorothioate 3'-Internucleotide Linkage
auaaaacggccgaaaggcgagucaaggucucgcagaca

SEQ ID NO: 9247 - RNA, 38 nt, Artificial Sequence
  Description of Artificial Sequence:  Enzymatic Nucleic Acid
  misc_feature (11)..(16): Phosphorothioate 3'-Internucleotide Linkage
  misc_feature (20)..(20): Phosphorothioate 3'-Internucleotide Linkage
  misc_feature (22)..(22): Phosphorothioate 3'-Internucleotide Linkage
  misc_feature (24)..(25): Phosphorothioate 3'-Internucleotide Linkage
  misc_feature (28)..(28): Phosphorothioate 3'-Internucleotide Linkage
  misc_feature (30)..(30): Phosphorothioate 3'-Internucleotide Linkage
ugauaaaagccgaaaggcgagucaaggucugccgcaga

SEQ ID NO: 9248 - RNA, 38 nt, Artificial Sequence
  Description of Artificial Sequence:  Enzymatic Nucleic Acid
  misc_feature (11)..(16): Phosphorothioate 3'-Internucleotide Linkage
  misc_feature (20)..(20): Phosphorothioate 3'-Internucleotide Linkage
  misc_feature (22)..(22): Phosphorothioate 3'-Internucleotide Linkage
  misc_feature (24)..(25): Phosphorothioate 3'-Internucleotide Linkage
  misc_feature (28)..(28): Phosphorothioate 3'-Internucleotide Linkage
  misc_feature (30)..(30): Phosphorothioate 3'-Internucleotide Linkage
cagaagaagccgaaaggcgagucaaggucucaacaaga

SEQ ID NO: 9249 - RNA, 38 nt, Artificial Sequence
  Description of Artificial Sequence:  Enzymatic Nucleic Acid
  misc_feature (11)..(16): Phosphorothioate 3'-Internucleotide Linkage
  misc_feature (20)..(20): Phosphorothioate 3'-Internucleotide Linkage
  misc_feature (22)..(22): Phosphorothioate 3'-Internucleotide Linkage
  misc_feature (24)..(25): Phosphorothioate 3'-Internucleotide Linkage
  misc_feature (28)..(28): Phosphorothioate 3'-Internucleotide Linkage
  misc_feature (30)..(30): Phosphorothioate 3'-Internucleotide Linkage
gcaacauagccgaaaggcgagucaaggucucuugauag

SEQ ID NO: 9250 - RNA, 38 nt, Artificial Sequence
  Description of Artificial Sequence:  Enzymatic Nucleic Acid
  misc_feature (11)..(16): Phosphorothioate 3'-Internucleotide Linkage
  misc_feature (20)..(20): Phosphorothioate 3'-Internucleotide Linkage
  misc_feature (22)..(22): Phosphorothioate 3'-Internucleotide Linkage
  misc_feature (24)..(25): Phosphorothioate 3'-Internucleotide Linkage
  misc_feature (28)..(28): Phosphorothioate 3'-Internucleotide Linkage
  misc_feature (30)..(30): Phosphorothioate 3'-Internucleotide Linkage
aggacaaagccgaaaggcgagucaaggucugggcaaca

SEQ ID NO: 9251 - RNA, 38 nt, Artificial Sequence
  Description of Artificial Sequence:  Enzymatic Nucleic Acid
  misc_feature (11)..(16): Phosphorothioate 3'-Internucleotide Linkage
  misc_feature (20)..(20): Phosphorothioate 3'-Internucleotide Linkage
  misc_feature (22)..(22): Phosphorothioate 3'-Internucleotide Linkage
  misc_feature (24)..(25): Phosphorothioate 3'-Internucleotide Linkage
  misc_feature (28)..(28): Phosphorothioate 3'-Internucleotide Linkage
  misc_feature (30)..(30): Phosphorothioate 3'-Internucleotide Linkage
guccgguggccgaaaggcgagucaaggucuugguuguu

SEQ ID NO: 9252 - RNA, 38 nt, Artificial Sequence
  Description of Artificial Sequence:  Enzymatic Nucleic Acid
  misc_feature (11)..(16): Phosphorothioate 3'-Internucleotide Linkage
  misc_feature (20)..(20): Phosphorothioate 3'-Internucleotide Linkage
  misc_feature (22)..(22): Phosphorothioate 3'-Internucleotide Linkage
  misc_feature (24)..(25): Phosphorothioate 3'-Internucleotide Linkage
  misc_feature (28)..(28): Phosphorothioate 3'-Internucleotide Linkage
  misc_feature (30)..(30): Phosphorothioate 3'-Internucleotide Linkage
ugcgaaaggccgaaaggcgagucaaggucuccaagaug

SEQ ID NO: 9253 - RNA, 38 nt, Artificial Sequence
  Description of Artificial Sequence:  Enzymatic Nucleic Acid
  misc_feature (11)..(16): Phosphorothioate 3'-Internucleotide Linkage
  misc_feature (20)..(20): Phosphorothioate 3'-Internucleotide Linkage
  misc_feature (22)..(22): Phosphorothioate 3'-Internucleotide Linkage
  misc_feature (24)..(25): Phosphorothioate 3'-Internucleotide Linkage
  misc_feature (28)..(28): Phosphorothioate 3'-Internucleotide Linkage
  misc_feature (30)..(30): Phosphorothioate 3'-Internucleotide Linkage
gaggcccagccgaaaggcgagucaaggucuucccauag

SEQ ID NO: 9254 - RNA, 38 nt, Artificial Sequence
  Description of Artificial Sequence:  Enzymatic Nucleic Acid
  misc_feature (11)..(16): Phosphorothioate 3'-Internucleotide Linkage
  misc_feature (20)..(20): Phosphorothioate 3'-Internucleotide Linkage
  misc_feature (22)..(22): Phosphorothioate 3'-Internucleotide Linkage
  misc_feature (24)..(25): Phosphorothioate 3'-Internucleotide Linkage
  misc_feature (28)..(28): Phosphorothioate 3'-Internucleotide Linkage
  misc_feature (30)..(30): Phosphorothioate 3'-Internucleotide Linkage
gacugagggccgaaaggcgagucaaggucuccacuccc

SEQ ID NO: 9255 - RNA, 38 nt, Artificial Sequence
  Description of Artificial Sequence:  Enzymatic Nucleic Acid
  misc_feature (11)..(16): Phosphorothioate 3'-Internucleotide Linkage
  misc_feature (20)..(20): Phosphorothioate 3'-Internucleotide Linkage
  misc_feature (22)..(22): Phosphorothioate 3'-Internucleotide Linkage
  misc_feature (24)..(25): Phosphorothioate 3'-Internucleotide Linkage
  misc_feature (28)..(28): Phosphorothioate 3'-Internucleotide Linkage
  misc_feature (30)..(30): Phosphorothioate 3'-Internucleotide Linkage
gaaacggagccgaaaggcgagucaaggucuugaggccc

SEQ ID NO: 9256 - RNA, 38 nt, Artificial Sequence
  Description of Artificial Sequence:  Enzymatic Nucleic Acid
  misc_feature (11)..(16): Phosphorothioate 3'-Internucleotide Linkage
  misc_feature (20)..(20): Phosphorothioate 3'-Internucleotide Linkage
  misc_feature (22)..(22): Phosphorothioate 3'-Internucleotide Linkage
  misc_feature (24)..(25): Phosphorothioate 3'-Internucleotide Linkage
  misc_feature (28)..(28): Phosphorothioate 3'-Internucleotide Linkage
  misc_feature (30)..(30): Phosphorothioate 3'-Internucleotide Linkage
aagagaaagccgaaaggcgagucaaggucuggacugag

SEQ ID NO: 9257 - RNA, 38 nt, Artificial Sequence
  Description of Artificial Sequence:  Enzymatic Nucleic Acid
  misc_feature (11)..(16): Phosphorothioate 3'-Internucleotide Linkage
  misc_feature (20)..(20): Phosphorothioate 3'-Internucleotide Linkage
  misc_feature (22)..(22): Phosphorothioate 3'-Internucleotide Linkage
  misc_feature (24)..(25): Phosphorothioate 3'-Internucleotide Linkage
  misc_feature (28)..(28): Phosphorothioate 3'-Internucleotide Linkage
  misc_feature (30)..(30): Phosphorothioate 3'-Internucleotide Linkage
aaacugaggccgaaaggcgagucaaggucucaagagaa

SEQ ID NO: 9258 - RNA, 38 nt, Artificial Sequence
  Description of Artificial Sequence:  Enzymatic Nucleic Acid
  misc_feature (11)..(16): Phosphorothioate 3'-Internucleotide Linkage
  misc_feature (20)..(20): Phosphorothioate 3'-Internucleotide Linkage
  misc_feature (22)..(22): Phosphorothioate 3'-Internucleotide Linkage
  misc_feature (24)..(25): Phosphorothioate 3'-Internucleotide Linkage
  misc_feature (28)..(28): Phosphorothioate 3'-Internucleotide Linkage
  misc_feature (30)..(30): Phosphorothioate 3'-Internucleotide Linkage
cuaguaaagccgaaaggcgagucaaggucuugagccaa

SEQ ID NO: 9259 - RNA, 38 nt, Artificial Sequence
  Description of Artificial Sequence:  Enzymatic Nucleic Acid
  misc_feature (11)..(16): Phosphorothioate 3'-Internucleotide Linkage
  misc_feature (20)..(20): Phosphorothioate 3'-Internucleotide Linkage
  misc_feature (22)..(22): Phosphorothioate 3'-Internucleotide Linkage
  misc_feature (24)..(25): Phosphorothioate 3'-Internucleotide Linkage
  misc_feature (28)..(28): Phosphorothioate 3'-Internucleotide Linkage
  misc_feature (30)..(30): Phosphorothioate 3'-Internucleotide Linkage
aaauggcagccgaaaggcgagucaaggucuuaguaaac

SEQ ID NO: 9260 - RNA, 38 nt, Artificial Sequence
  Description of Artificial Sequence:  Enzymatic Nucleic Acid
  misc_feature (11)..(16): Phosphorothioate 3'-Internucleotide Linkage
  misc_feature (20)..(20): Phosphorothioate 3'-Internucleotide Linkage
  misc_feature (22)..(22): Phosphorothioate 3'-Internucleotide Linkage
  misc_feature (24)..(25): Phosphorothioate 3'-Internucleotide Linkage
  misc_feature (28)..(28): Phosphorothioate 3'-Internucleotide Linkage
  misc_feature (30)..(30): Phosphorothioate 3'-Internucleotide Linkage
acgaaccagccgaaaggcgagucaaggucuugaacaaa

SEQ ID NO: 9261 - RNA, 38 nt, Artificial Sequence
  Description of Artificial Sequence:  Enzymatic Nucleic Acid
  misc_feature (11)..(16): Phosphorothioate 3'-Internucleotide Linkage
  misc_feature (20)..(20): Phosphorothioate 3'-Internucleotide Linkage
  misc_feature (22)..(22): Phosphorothioate 3'-Internucleotide Linkage
  misc_feature (24)..(25): Phosphorothioate 3'-Internucleotide Linkage
  misc_feature (28)..(28): Phosphorothioate 3'-Internucleotide Linkage
  misc_feature (30)..(30): Phosphorothioate 3'-Internucleotide Linkage
ccuacgaagccgaaaggcgagucaaggucucacugaac

SEQ ID NO: 9262 - RNA, 38 nt, Artificial Sequence
  Description of Artificial Sequence:  Enzymatic Nucleic Acid
  misc_feature (11)..(16): Phosphorothioate 3'-Internucleotide Linkage
  misc_feature (20)..(20): Phosphorothioate 3'-Internucleotide Linkage
  misc_feature (22)..(22): Phosphorothioate 3'-Internucleotide Linkage
  misc_feature (24)..(25): Phosphorothioate 3'-Internucleotide Linkage
  misc_feature (28)..(28): Phosphorothioate 3'-Internucleotide Linkage
  misc_feature (30)..(30): Phosphorothioate 3'-Internucleotide Linkage
aagcccuagccgaaaggcgagucaaggucugaaccacu

SEQ ID NO: 9263 - RNA, 38 nt, Artificial Sequence
  Description of Artificial Sequence:  Enzymatic Nucleic Acid
  misc_feature (11)..(16): Phosphorothioate 3'-Internucleotide Linkage
  misc_feature (20)..(20): Phosphorothioate 3'-Internucleotide Linkage
  misc_feature (22)..(22): Phosphorothioate 3'-Internucleotide Linkage
  misc_feature (24)..(25): Phosphorothioate 3'-Internucleotide Linkage
  misc_feature (28)..(28): Phosphorothioate 3'-Internucleotide Linkage
  misc_feature (30)..(30): Phosphorothioate 3'-Internucleotide Linkage
ggggaaaggccgaaaggcgagucaaggucuccuacgaa

SEQ ID NO: 9264 - RNA, 38 nt, Artificial Sequence
  Description of Artificial Sequence:  Enzymatic Nucleic Acid
  misc_feature (11)..(16): Phosphorothioate 3'-Internucleotide Linkage
  misc_feature (20)..(20): Phosphorothioate 3'-Internucleotide Linkage
  misc_feature (22)..(22): Phosphorothioate 3'-Internucleotide Linkage
  misc_feature (24)..(25): Phosphorothioate 3'-Internucleotide Linkage
  misc_feature (28)..(28): Phosphorothioate 3'-Internucleotide Linkage
  misc_feature (30)..(30): Phosphorothioate 3'-Internucleotide Linkage
acugaaaggccgaaaggcgagucaaggucucagacagu

SEQ ID NO: 9265 - RNA, 38 nt, Artificial Sequence
  Description of Artificial Sequence:  Enzymatic Nucleic Acid
  misc_feature (11)..(16): Phosphorothioate 3'-Internucleotide Linkage
  misc_feature (20)..(20): Phosphorothioate 3'-Internucleotide Linkage
  misc_feature (22)..(22): Phosphorothioate 3'-Internucleotide Linkage
  misc_feature (24)..(25): Phosphorothioate 3'-Internucleotide Linkage
  misc_feature (28)..(28): Phosphorothioate 3'-Internucleotide Linkage
  misc_feature (30)..(30): Phosphorothioate 3'-Internucleotide Linkage
ccauauaagccgaaaggcgagucaaggucuugaaagcc

SEQ ID NO: 9266 - RNA, 38 nt, Artificial Sequence
  Description of Artificial Sequence:  Enzymatic Nucleic Acid
  misc_feature (11)..(16): Phosphorothioate 3'-Internucleotide Linkage
  misc_feature (20)..(20): Phosphorothioate 3'-Internucleotide Linkage
  misc_feature (22)..(22): Phosphorothioate 3'-Internucleotide Linkage
  misc_feature (24)..(25): Phosphorothioate 3'-Internucleotide Linkage
  misc_feature (28)..(28): Phosphorothioate 3'-Internucleotide Linkage
  misc_feature (30)..(30): Phosphorothioate 3'-Internucleotide Linkage
ccccaaaagccgaaaggcgagucaaggucucacaucau

SEQ ID NO: 9267 - RNA, 38 nt, Artificial Sequence
  Description of Artificial Sequence:  Enzymatic Nucleic Acid
  misc_feature (11)..(16): Phosphorothioate 3'-Internucleotide Linkage
  misc_feature (20)..(20): Phosphorothioate 3'-Internucleotide Linkage
  misc_feature (22)..(22): Phosphorothioate 3'-Internucleotide Linkage
  misc_feature (24)..(25): Phosphorothioate 3'-Internucleotide Linkage
  misc_feature (28)..(28): Phosphorothioate 3'-Internucleotide Linkage
  misc_feature (30)..(30): Phosphorothioate 3'-Internucleotide Linkage
agacuugggccgaaaggcgagucaaggucuccccaaaa

SEQ ID NO: 9268 - RNA, 38 nt, Artificial Sequence
  Description of Artificial Sequence:  Enzymatic Nucleic Acid
  misc_feature (11)..(16): Phosphorothioate 3'-Internucleotide Linkage
  misc_feature (20)..(20): Phosphorothioate 3'-Internucleotide Linkage
  misc_feature (22)..(22): Phosphorothioate 3'-Internucleotide Linkage
  misc_feature (24)..(25): Phosphorothioate 3'-Internucleotide Linkage
  misc_feature (28)..(28): Phosphorothioate 3'-Internucleotide Linkage
  misc_feature (30)..(30): Phosphorothioate 3'-Internucleotide Linkage
uguacagagccgaaaggcgagucaaggucuuuggcccc

SEQ ID NO: 9269 - RNA, 38 nt, Artificial Sequence
  Description of Artificial Sequence:  Enzymatic Nucleic Acid
  misc_feature (11)..(16): Phosphorothioate 3'-Internucleotide Linkage
  misc_feature (20)..(20): Phosphorothioate 3'-Internucleotide Linkage
  misc_feature (22)..(22): Phosphorothioate 3'-Internucleotide Linkage
  misc_feature (24)..(25): Phosphorothioate 3'-Internucleotide Linkage
  misc_feature (28)..(28): Phosphorothioate 3'-Internucleotide Linkage
  misc_feature (30)..(30): Phosphorothioate 3'-Internucleotide Linkage
uaaagggagccgaaaggcgagucaaggucuucaagaug

SEQ ID NO: 9270 - RNA, 38 nt, Artificial Sequence
  Description of Artificial Sequence:  Enzymatic Nucleic Acid
  misc_feature (11)..(16): Phosphorothioate 3'-Internucleotide Linkage
  misc_feature (20)..(20): Phosphorothioate 3'-Internucleotide Linkage
  misc_feature (22)..(22): Phosphorothioate 3'-Internucleotide Linkage
  misc_feature (24)..(25): Phosphorothioate 3'-Internucleotide Linkage
  misc_feature (28)..(28): Phosphorothioate 3'-Internucleotide Linkage
  misc_feature (30)..(30): Phosphorothioate 3'-Internucleotide Linkage
aauguauagccgaaaggcgagucaaggucuccaaagac

SEQ ID NO: 9271 - RNA, 38 nt, Artificial Sequence
  Description of Artificial Sequence:  Enzymatic Nucleic Acid
  misc_feature (11)..(16): Phosphorothioate 3'-Internucleotide Linkage
  misc_feature (20)..(20): Phosphorothioate 3'-Internucleotide Linkage
  misc_feature (22)..(22): Phosphorothioate 3'-Internucleotide Linkage
  misc_feature (24)..(25): Phosphorothioate 3'-Internucleotide Linkage
  misc_feature (28)..(28): Phosphorothioate 3'-Internucleotide Linkage
  misc_feature (30)..(30): Phosphorothioate 3'-Internucleotide Linkage
ugccccaagccgaaaggcgagucaaggucuucccaauu

SEQ ID NO: 9272 - RNA, 38 nt, Artificial Sequence
  Description of Artificial Sequence:  Enzymatic Nucleic Acid
  misc_feature (11)..(16): Phosphorothioate 3'-Internucleotide Linkage
  misc_feature (20)..(20): Phosphorothioate 3'-Internucleotide Linkage
  misc_feature (22)..(22): Phosphorothioate 3'-Internucleotide Linkage
  misc_feature (24)..(25): Phosphorothioate 3'-Internucleotide Linkage
  misc_feature (28)..(28): Phosphorothioate 3'-Internucleotide Linkage
  misc_feature (30)..(30): Phosphorothioate 3'-Internucleotide Linkage
gcaauguggccgaaaggcgagucaaggucucccaacuc

SEQ ID NO: 9273 - RNA, 38 nt, Artificial Sequence
  Description of Artificial Sequence:  Enzymatic Nucleic Acid
  misc_feature (11)..(16): Phosphorothioate 3'-Internucleotide Linkage
  misc_feature (20)..(20): Phosphorothioate 3'-Internucleotide Linkage
  misc_feature (22)..(22): Phosphorothioate 3'-Internucleotide Linkage
  misc_feature (24)..(25): Phosphorothioate 3'-Internucleotide Linkage
  misc_feature (28)..(28): Phosphorothioate 3'-Internucleotide Linkage
  misc_feature (30)..(30): Phosphorothioate 3'-Internucleotide Linkage
ucaauagggccgaaaggcgagucaaggucucuguuuac

SEQ ID NO: 9274 - RNA, 38 nt, Artificial Sequence
  Description of Artificial Sequence:  Enzymatic Nucleic Acid
  misc_feature (11)..(16): Phosphorothioate 3'-Internucleotide Linkage
  misc_feature (20)..(20): Phosphorothioate 3'-Internucleotide Linkage
  misc_feature (22)..(22): Phosphorothioate 3'-Internucleotide Linkage
  misc_feature (24)..(25): Phosphorothioate 3'-Internucleotide Linkage
  misc_feature (28)..(28): Phosphorothioate 3'-Internucleotide Linkage
  misc_feature (30)..(30): Phosphorothioate 3'-Internucleotide Linkage
uugacauagccgaaaggcgagucaaggucuuuuccaau

SEQ ID NO: 9275 - RNA, 38 nt, Artificial Sequence
  Description of Artificial Sequence:  Enzymatic Nucleic Acid
  misc_feature (11)..(16): Phosphorothioate 3'-Internucleotide Linkage
  misc_feature (20)..(20): Phosphorothioate 3'-Internucleotide Linkage
  misc_feature (22)..(22): Phosphorothioate 3'-Internucleotide Linkage
  misc_feature (24)..(25): Phosphorothioate 3'-Internucleotide Linkage
  misc_feature (28)..(28): Phosphorothioate 3'-Internucleotide Linkage
  misc_feature (30)..(30): Phosphorothioate 3'-Internucleotide Linkage
ccaaaagagccgaaaggcgagucaaggucuccacaauu

SEQ ID NO: 9276 - RNA, 38 nt, Artificial Sequence
  Description of Artificial Sequence:  Enzymatic Nucleic Acid
  misc_feature (11)..(16): Phosphorothioate 3'-Internucleotide Linkage
  misc_feature (20)..(20): Phosphorothioate 3'-Internucleotide Linkage
  misc_feature (22)..(22): Phosphorothioate 3'-Internucleotide Linkage
  misc_feature (24)..(25): Phosphorothioate 3'-Internucleotide Linkage
  misc_feature (28)..(28): Phosphorothioate 3'-Internucleotide Linkage
  misc_feature (30)..(30): Phosphorothioate 3'-Internucleotide Linkage
gcggcaaagccgaaaggcgagucaaggucucccaaaag

SEQ ID NO: 9277 - RNA, 38 nt, Artificial Sequence
  Description of Artificial Sequence:  Enzymatic Nucleic Acid
  misc_feature (11)..(16): Phosphorothioate 3'-Internucleotide Linkage
  misc_feature (20)..(20): Phosphorothioate 3'-Internucleotide Linkage
  misc_feature (22)..(22): Phosphorothioate 3'-Internucleotide Linkage
  misc_feature (24)..(25): Phosphorothioate 3'-Internucleotide Linkage
  misc_feature (28)..(28): Phosphorothioate 3'-Internucleotide Linkage
  misc_feature (30)..(30): Phosphorothioate 3'-Internucleotide Linkage
cuguuuuggccgaaaggcgagucaaggucuuuguaugc

SEQ ID NO: 9278 - RNA, 38 nt, Artificial Sequence
  Description of Artificial Sequence:  Enzymatic Nucleic Acid
  misc_feature (11)..(16): Phosphorothioate 3'-Internucleotide Linkage
  misc_feature (20)..(20): Phosphorothioate 3'-Internucleotide Linkage
  misc_feature (22)..(22): Phosphorothioate 3'-Internucleotide Linkage
  misc_feature (24)..(25): Phosphorothioate 3'-Internucleotide Linkage
  misc_feature (28)..(28): Phosphorothioate 3'-Internucleotide Linkage
  misc_feature (30)..(30): Phosphorothioate 3'-Internucleotide Linkage
aguaaaaggccgaaaggcgagucaaggucucuguuuug

SEQ ID NO: 9279 - RNA, 38 nt, Artificial Sequence
  Description of Artificial Sequence:  Enzymatic Nucleic Acid
  misc_feature (11)..(16): Phosphorothioate 3'-Internucleotide Linkage
  misc_feature (20)..(20): Phosphorothioate 3'-Internucleotide Linkage
  misc_feature (22)..(22): Phosphorothioate 3'-Internucleotide Linkage
  misc_feature (24)..(25): Phosphorothioate 3'-Internucleotide Linkage
  misc_feature (28)..(28): Phosphorothioate 3'-Internucleotide Linkage
  misc_feature (30)..(30): Phosphorothioate 3'-Internucleotide Linkage
uagaaagggccgaaaggcgagucaaggucucuuguaag

SEQ ID NO: 9280 - RNA, 38 nt, Artificial Sequence
  Description of Artificial Sequence:  Enzymatic Nucleic Acid
  misc_feature (11)..(16): Phosphorothioate 3'-Internucleotide Linkage
  misc_feature (20)..(20): Phosphorothioate 3'-Internucleotide Linkage
  misc_feature (22)..(22): Phosphorothioate 3'-Internucleotide Linkage
  misc_feature (24)..(25): Phosphorothioate 3'-Internucleotide Linkage
  misc_feature (28)..(28): Phosphorothioate 3'-Internucleotide Linkage
  misc_feature (30)..(30): Phosphorothioate 3'-Internucleotide Linkage
acuguuuagccgaaaggcgagucaaggucuuuagaaag

SEQ ID NO: 9281 - RNA, 38 nt, Artificial Sequence
  Description of Artificial Sequence:  Enzymatic Nucleic Acid
  misc_feature (11)..(16): Phosphorothioate 3'-Internucleotide Linkage
  misc_feature (20)..(20): Phosphorothioate 3'-Internucleotide Linkage
  misc_feature (22)..(22): Phosphorothioate 3'-Internucleotide Linkage
  misc_feature (24)..(25): Phosphorothioate 3'-Internucleotide Linkage
  misc_feature (28)..(28): Phosphorothioate 3'-Internucleotide Linkage
  misc_feature (30)..(30): Phosphorothioate 3'-Internucleotide Linkage
uucacauagccgaaaggcgagucaaggucuuguuuacu

SEQ ID NO: 9282 - RNA, 38 nt, Artificial Sequence
  Description of Artificial Sequence:  Enzymatic Nucleic Acid
  misc_feature (11)..(16): Phosphorothioate 3'-Internucleotide Linkage
  misc_feature (20)..(20): Phosphorothioate 3'-Internucleotide Linkage
  misc_feature (22)..(22): Phosphorothioate 3'-Internucleotide Linkage
  misc_feature (24)..(25): Phosphorothioate 3'-Internucleotide Linkage
  misc_feature (28)..(28): Phosphorothioate 3'-Internucleotide Linkage
  misc_feature (30)..(30): Phosphorothioate 3'-Internucleotide Linkage
ccgagcaagccgaaaggcgagucaaggucugggguaaa

SEQ ID NO: 9283 - RNA, 38 nt, Artificial Sequence
  Description of Artificial Sequence:  Enzymatic Nucleic Acid
  misc_feature (11)..(16): Phosphorothioate 3'-Internucleotide Linkage
  misc_feature (20)..(20): Phosphorothioate 3'-Internucleotide Linkage
  misc_feature (22)..(22): Phosphorothioate 3'-Internucleotide Linkage
  misc_feature (24)..(25): Phosphorothioate 3'-Internucleotide Linkage
  misc_feature (28)..(28): Phosphorothioate 3'-Internucleotide Linkage
  misc_feature (30)..(30): Phosphorothioate 3'-Internucleotide Linkage
ggccguuggccgaaaggcgagucaaggucucgagcaac

SEQ ID NO: 9284 - RNA, 38 nt, Artificial Sequence
  Description of Artificial Sequence:  Enzymatic Nucleic Acid
  misc_feature (11)..(16): Phosphorothioate 3'-Internucleotide Linkage
  misc_feature (20)..(20): Phosphorothioate 3'-Internucleotide Linkage
  misc_feature (22)..(22): Phosphorothioate 3'-Internucleotide Linkage
  misc_feature (24)..(25): Phosphorothioate 3'-Internucleotide Linkage
  misc_feature (28)..(28): Phosphorothioate 3'-Internucleotide Linkage
  misc_feature (30)..(30): Phosphorothioate 3'-Internucleotide Linkage
agaccagggccgaaaggcgagucaaggucucguugccg

SEQ ID NO: 9285 - RNA, 38 nt, Artificial Sequence
  Description of Artificial Sequence:  Enzymatic Nucleic Acid
  misc_feature (11)..(16): Phosphorothioate 3'-Internucleotide Linkage
  misc_feature (20)..(20): Phosphorothioate 3'-Internucleotide Linkage
  misc_feature (22)..(22): Phosphorothioate 3'-Internucleotide Linkage
  misc_feature (24)..(25): Phosphorothioate 3'-Internucleotide Linkage
  misc_feature (28)..(28): Phosphorothioate 3'-Internucleotide Linkage
  misc_feature (30)..(30): Phosphorothioate 3'-Internucleotide Linkage
ggcauagagccgaaaggcgagucaaggucucaggccgu

SEQ ID NO: 9286 - RNA, 38 nt, Artificial Sequence
  Description of Artificial Sequence:  Enzymatic Nucleic Acid
  misc_feature (11)..(16): Phosphorothioate 3'-Internucleotide Linkage
  misc_feature (20)..(20): Phosphorothioate 3'-Internucleotide Linkage
  misc_feature (22)..(22): Phosphorothioate 3'-Internucleotide Linkage
  misc_feature (24)..(25): Phosphorothioate 3'-Internucleotide Linkage
  misc_feature (28)..(28): Phosphorothioate 3'-Internucleotide Linkage
  misc_feature (30)..(30): Phosphorothioate 3'-Internucleotide Linkage
agcaaacagccgaaaggcgagucaaggucuuuggcaua

SEQ ID NO: 9287 - RNA, 38 nt, Artificial Sequence
  Description of Artificial Sequence:  Enzymatic Nucleic Acid
  misc_feature (11)..(16): Phosphorothioate 3'-Internucleotide Linkage
  misc_feature (20)..(20): Phosphorothioate 3'-Internucleotide Linkage
  misc_feature (22)..(22): Phosphorothioate 3'-Internucleotide Linkage
  misc_feature (24)..(25): Phosphorothioate 3'-Internucleotide Linkage
  misc_feature (28)..(28): Phosphorothioate 3'-Internucleotide Linkage
  misc_feature (30)..(30): Phosphorothioate 3'-Internucleotide Linkage
agccccaagccgaaaggcgagucaaggucucagugggg

SEQ ID NO: 9288 - RNA, 38 nt, Artificial Sequence
  Description of Artificial Sequence:  Enzymatic Nucleic Acid
  misc_feature (11)..(16): Phosphorothioate 3'-Internucleotide Linkage
  misc_feature (20)..(20): Phosphorothioate 3'-Internucleotide Linkage
  misc_feature (22)..(22): Phosphorothioate 3'-Internucleotide Linkage
  misc_feature (24)..(25): Phosphorothioate 3'-Internucleotide Linkage
  misc_feature (28)..(28): Phosphorothioate 3'-Internucleotide Linkage
  misc_feature (30)..(30): Phosphorothioate 3'-Internucleotide Linkage
uggccaaggccgaaaggcgagucaaggucucccaacca

SEQ ID NO: 9289 - RNA, 38 nt, Artificial Sequence
  Description of Artificial Sequence:  Enzymatic Nucleic Acid
  misc_feature (11)..(16): Phosphorothioate 3'-Internucleotide Linkage
  misc_feature (20)..(20): Phosphorothioate 3'-Internucleotide Linkage
  misc_feature (22)..(22): Phosphorothioate 3'-Internucleotide Linkage
  misc_feature (24)..(25): Phosphorothioate 3'-Internucleotide Linkage
  misc_feature (28)..(28): Phosphorothioate 3'-Internucleotide Linkage
  misc_feature (30)..(30): Phosphorothioate 3'-Internucleotide Linkage
gccuaugggccgaaaggcgagucaaggucucaagcccc

SEQ ID NO: 9290 - RNA, 38 nt, Artificial Sequence
  Description of Artificial Sequence:  Enzymatic Nucleic Acid
  misc_feature (11)..(16): Phosphorothioate 3'-Internucleotide Linkage
  misc_feature (20)..(20): Phosphorothioate 3'-Internucleotide Linkage
  misc_feature (22)..(22): Phosphorothioate 3'-Internucleotide Linkage
  misc_feature (24)..(25): Phosphorothioate 3'-Internucleotide Linkage
  misc_feature (28)..(28): Phosphorothioate 3'-Internucleotide Linkage
  misc_feature (30)..(30): Phosphorothioate 3'-Internucleotide Linkage
gcugaugggccgaaaggcgagucaaggucucuauggcc

SEQ ID NO: 9291 - RNA, 38 nt, Artificial Sequence
  Description of Artificial Sequence:  Enzymatic Nucleic Acid
  misc_feature (11)..(16): Phosphorothioate 3'-Internucleotide Linkage
  misc_feature (20)..(20): Phosphorothioate 3'-Internucleotide Linkage
  misc_feature (22)..(22): Phosphorothioate 3'-Internucleotide Linkage
  misc_feature (24)..(25): Phosphorothioate 3'-Internucleotide Linkage
  misc_feature (28)..(28): Phosphorothioate 3'-Internucleotide Linkage
  misc_feature (30)..(30): Phosphorothioate 3'-Internucleotide Linkage
cgcaugcggccgaaaggcgagucaaggucuugauggcc

SEQ ID NO: 9292 - RNA, 38 nt, Artificial Sequence
  Description of Artificial Sequence:  Enzymatic Nucleic Acid
  misc_feature (11)..(16): Phosphorothioate 3'-Internucleotide Linkage
  misc_feature (20)..(20): Phosphorothioate 3'-Internucleotide Linkage
  misc_feature (22)..(22): Phosphorothioate 3'-Internucleotide Linkage
  misc_feature (24)..(25): Phosphorothioate 3'-Internucleotide Linkage
  misc_feature (28)..(28): Phosphorothioate 3'-Internucleotide Linkage
  misc_feature (30)..(30): Phosphorothioate 3'-Internucleotide Linkage
agguuccagccgaaaggcgagucaaggucugcaugcgc

SEQ ID NO: 9293 - RNA, 38 nt, Artificial Sequence
  Description of Artificial Sequence:  Enzymatic Nucleic Acid
  misc_feature (11)..(16): Phosphorothioate 3'-Internucleotide Linkage
  misc_feature (20)..(20): Phosphorothioate 3'-Internucleotide Linkage
  misc_feature (22)..(22): Phosphorothioate 3'-Internucleotide Linkage
  misc_feature (24)..(25): Phosphorothioate 3'-Internucleotide Linkage
  misc_feature (28)..(28): Phosphorothioate 3'-Internucleotide Linkage
  misc_feature (30)..(30): Phosphorothioate 3'-Internucleotide Linkage
acaagcgggccgaaaggcgagucaaggucuuaggaguu

SEQ ID NO: 9294 - RNA, 38 nt, Artificial Sequence
  Description of Artificial Sequence:  Enzymatic Nucleic Acid
  misc_feature (11)..(16): Phosphorothioate 3'-Internucleotide Linkage
  misc_feature (20)..(20): Phosphorothioate 3'-Internucleotide Linkage
  misc_feature (22)..(22): Phosphorothioate 3'-Internucleotide Linkage
  misc_feature (24)..(25): Phosphorothioate 3'-Internucleotide Linkage
  misc_feature (28)..(28): Phosphorothioate 3'-Internucleotide Linkage
  misc_feature (30)..(30): Phosphorothioate 3'-Internucleotide Linkage
cagaccuggccgaaaggcgagucaaggucuugcgagca

SEQ ID NO: 9295 - RNA, 38 nt, Artificial Sequence
  Description of Artificial Sequence:  Enzymatic Nucleic Acid
  misc_feature (11)..(16): Phosphorothioate 3'-Internucleotide Linkage
  misc_feature (20)..(20): Phosphorothioate 3'-Internucleotide Linkage
  misc_feature (22)..(22): Phosphorothioate 3'-Internucleotide Linkage
  misc_feature (24)..(25): Phosphorothioate 3'-Internucleotide Linkage
  misc_feature (28)..(28): Phosphorothioate 3'-Internucleotide Linkage
  misc_feature (30)..(30): Phosphorothioate 3'-Internucleotide Linkage
gccccagagccgaaaggcgagucaaggucucugcugcg

SEQ ID NO: 9296 - RNA, 38 nt, Artificial Sequence
  Description of Artificial Sequence:  Enzymatic Nucleic Acid
  misc_feature (11)..(16): Phosphorothioate 3'-Internucleotide Linkage
  misc_feature (20)..(20): Phosphorothioate 3'-Internucleotide Linkage
  misc_feature (22)..(22): Phosphorothioate 3'-Internucleotide Linkage
  misc_feature (24)..(25): Phosphorothioate 3'-Internucleotide Linkage
  misc_feature (28)..(28): Phosphorothioate 3'-Internucleotide Linkage
  misc_feature (30)..(30): Phosphorothioate 3'-Internucleotide Linkage
gaguuuuggccgaaaggcgagucaaggucucccagacc

SEQ ID NO: 9297 - RNA, 38 nt, Artificial Sequence
  Description of Artificial Sequence:  Enzymatic Nucleic Acid
  misc_feature (11)..(16): Phosphorothioate 3'-Internucleotide Linkage
  misc_feature (20)..(20): Phosphorothioate 3'-Internucleotide Linkage
  misc_feature (22)..(22): Phosphorothioate 3'-Internucleotide Linkage
  misc_feature (24)..(25): Phosphorothioate 3'-Internucleotide Linkage
  misc_feature (28)..(28): Phosphorothioate 3'-Internucleotide Linkage
  misc_feature (30)..(30): Phosphorothioate 3'-Internucleotide Linkage
ggagagcagccgaaaggcgagucaaggucugacagaau

SEQ ID NO: 9298 - RNA, 38 nt, Artificial Sequence
  Description of Artificial Sequence:  Enzymatic Nucleic Acid
  misc_feature (11)..(16): Phosphorothioate 3'-Internucleotide Linkage
  misc_feature (20)..(20): Phosphorothioate 3'-Internucleotide Linkage
  misc_feature (22)..(22): Phosphorothioate 3'-Internucleotide Linkage
  misc_feature (24)..(25): Phosphorothioate 3'-Internucleotide Linkage
  misc_feature (28)..(28): Phosphorothioate 3'-Internucleotide Linkage
  misc_feature (30)..(30): Phosphorothioate 3'-Internucleotide Linkage
ccuagcaggccgaaaggcgagucaaggucucauggaaa

SEQ ID NO: 9299 - RNA, 38 nt, Artificial Sequence
  Description of Artificial Sequence:  Enzymatic Nucleic Acid
  misc_feature (11)..(16): Phosphorothioate 3'-Internucleotide Linkage
  misc_feature (20)..(20): Phosphorothioate 3'-Internucleotide Linkage
  misc_feature (22)..(22): Phosphorothioate 3'-Internucleotide Linkage
  misc_feature (24)..(25): Phosphorothioate 3'-Internucleotide Linkage
  misc_feature (28)..(28): Phosphorothioate 3'-Internucleotide Linkage
  misc_feature (30)..(30): Phosphorothioate 3'-Internucleotide Linkage
cagcacaggccgaaaggcgagucaaggucucuagcagc

SEQ ID NO: 9300 - RNA, 38 nt, Artificial Sequence
  Description of Artificial Sequence:  Enzymatic Nucleic Acid
  misc_feature (11)..(16): Phosphorothioate 3'-Internucleotide Linkage
  misc_feature (20)..(20): Phosphorothioate 3'-Internucleotide Linkage
  misc_feature (22)..(22): Phosphorothioate 3'-Internucleotide Linkage
  misc_feature (24)..(25): Phosphorothioate 3'-Internucleotide Linkage
  misc_feature (28)..(28): Phosphorothioate 3'-Internucleotide Linkage
  misc_feature (30)..(30): Phosphorothioate 3'-Internucleotide Linkage
acaaaggagccgaaaggcgagucaaggucugucccgcg

SEQ ID NO: 9301 - RNA, 38 nt, Artificial Sequence
  Description of Artificial Sequence:  Enzymatic Nucleic Acid
  misc_feature (11)..(16): Phosphorothioate 3'-Internucleotide Linkage
  misc_feature (20)..(20): Phosphorothioate 3'-Internucleotide Linkage
  misc_feature (22)..(22): Phosphorothioate 3'-Internucleotide Linkage
  misc_feature (24)..(25): Phosphorothioate 3'-Internucleotide Linkage
  misc_feature (28)..(28): Phosphorothioate 3'-Internucleotide Linkage
  misc_feature (30)..(30): Phosphorothioate 3'-Internucleotide Linkage
cgacgggagccgaaaggcgagucaaggucuguaaacaa

SEQ ID NO: 9302 - RNA, 38 nt, Artificial Sequence
  Description of Artificial Sequence:  Enzymatic Nucleic Acid
  misc_feature (11)..(16): Phosphorothioate 3'-Internucleotide Linkage
  misc_feature (20)..(20): Phosphorothioate 3'-Internucleotide Linkage
  misc_feature (22)..(22): Phosphorothioate 3'-Internucleotide Linkage
  misc_feature (24)..(25): Phosphorothioate 3'-Internucleotide Linkage
  misc_feature (28)..(28): Phosphorothioate 3'-Internucleotide Linkage
  misc_feature (30)..(30): Phosphorothioate 3'-Internucleotide Linkage
agcgccgagccgaaaggcgagucaaggucugggacgua

SEQ ID NO: 9303 - RNA, 38 nt, Artificial Sequence
  Description of Artificial Sequence:  Enzymatic Nucleic Acid
  misc_feature (11)..(16): Phosphorothioate 3'-Internucleotide Linkage
  misc_feature (20)..(20): Phosphorothioate 3'-Internucleotide Linkage
  misc_feature (22)..(22): Phosphorothioate 3'-Internucleotide Linkage
  misc_feature (24)..(25): Phosphorothioate 3'-Internucleotide Linkage
  misc_feature (28)..(28): Phosphorothioate 3'-Internucleotide Linkage
  misc_feature (30)..(30): Phosphorothioate 3'-Internucleotide Linkage
auucagcggccgaaaggcgagucaaggucucgacggga

SEQ ID NO: 9304 - RNA, 38 nt, Artificial Sequence
  Description of Artificial Sequence:  Enzymatic Nucleic Acid
  misc_feature (11)..(16): Phosphorothioate 3'-Internucleotide Linkage
  misc_feature (20)..(20): Phosphorothioate 3'-Internucleotide Linkage
  misc_feature (22)..(22): Phosphorothioate 3'-Internucleotide Linkage
  misc_feature (24)..(25): Phosphorothioate 3'-Internucleotide Linkage
  misc_feature (28)..(28): Phosphorothioate 3'-Internucleotide Linkage
  misc_feature (30)..(30): Phosphorothioate 3'-Internucleotide Linkage
ccaagcgggccgaaaggcgagucaaggucucccgggag

SEQ ID NO: 9305 - RNA, 38 nt, Artificial Sequence
  Description of Artificial Sequence:  Enzymatic Nucleic Acid
  misc_feature (11)..(16): Phosphorothioate 3'-Internucleotide Linkage
  misc_feature (20)..(20): Phosphorothioate 3'-Internucleotide Linkage
  misc_feature (22)..(22): Phosphorothioate 3'-Internucleotide Linkage
  misc_feature (24)..(25): Phosphorothioate 3'-Internucleotide Linkage
  misc_feature (28)..(28): Phosphorothioate 3'-Internucleotide Linkage
  misc_feature (30)..(30): Phosphorothioate 3'-Internucleotide Linkage
cgguagaggccgaaaggcgagucaaggucucccaagcg

SEQ ID NO: 9306 - RNA, 38 nt, Artificial Sequence
  Description of Artificial Sequence:  Enzymatic Nucleic Acid
  misc_feature (11)..(16): Phosphorothioate 3'-Internucleotide Linkage
  misc_feature (20)..(20): Phosphorothioate 3'-Internucleotide Linkage
  misc_feature (22)..(22): Phosphorothioate 3'-Internucleotide Linkage
  misc_feature (24)..(25): Phosphorothioate 3'-Internucleotide Linkage
  misc_feature (28)..(28): Phosphorothioate 3'-Internucleotide Linkage
  misc_feature (30)..(30): Phosphorothioate 3'-Internucleotide Linkage
cccguggagccgaaaggcgagucaaggucuggucggua

SEQ ID NO: 9307 - RNA, 38 nt, Artificial Sequence
  Description of Artificial Sequence:  Enzymatic Nucleic Acid
  misc_feature (11)..(16): Phosphorothioate 3'-Internucleotide Linkage
  misc_feature (20)..(20): Phosphorothioate 3'-Internucleotide Linkage
  misc_feature (22)..(22): Phosphorothioate 3'-Internucleotide Linkage
  misc_feature (24)..(25): Phosphorothioate 3'-Internucleotide Linkage
  misc_feature (28)..(28): Phosphorothioate 3'-Internucleotide Linkage
  misc_feature (30)..(30): Phosphorothioate 3'-Internucleotide Linkage
gaggugcggccgaaaggcgagucaaggucucccgugga

SEQ ID NO: 9308 - RNA, 38 nt, Artificial Sequence
  Description of Artificial Sequence:  Enzymatic Nucleic Acid
  misc_feature (11)..(16): Phosphorothioate 3'-Internucleotide Linkage
  misc_feature (20)..(20): Phosphorothioate 3'-Internucleotide Linkage
  misc_feature (22)..(22): Phosphorothioate 3'-Internucleotide Linkage
  misc_feature (24)..(25): Phosphorothioate 3'-Internucleotide Linkage
  misc_feature (28)..(28): Phosphorothioate 3'-Internucleotide Linkage
  misc_feature (30)..(30): Phosphorothioate 3'-Internucleotide Linkage
ggcacagagccgaaaggcgagucaaggucuggggaguc

SEQ ID NO: 9309 - RNA, 38 nt, Artificial Sequence
  Description of Artificial Sequence:  Enzymatic Nucleic Acid
  misc_feature (11)..(16): Phosphorothioate 3'-Internucleotide Linkage
  misc_feature (20)..(20): Phosphorothioate 3'-Internucleotide Linkage
  misc_feature (22)..(22): Phosphorothioate 3'-Internucleotide Linkage
  misc_feature (24)..(25): Phosphorothioate 3'-Internucleotide Linkage
  misc_feature (28)..(28): Phosphorothioate 3'-Internucleotide Linkage
  misc_feature (30)..(30): Phosphorothioate 3'-Internucleotide Linkage
agugcacagccgaaaggcgagucaaggucugguccggc

SEQ ID NO: 9310 - RNA, 38 nt, Artificial Sequence
  Description of Artificial Sequence:  Enzymatic Nucleic Acid
  misc_feature (11)..(16): Phosphorothioate 3'-Internucleotide Linkage
  misc_feature (20)..(20): Phosphorothioate 3'-Internucleotide Linkage
  misc_feature (22)..(22): Phosphorothioate 3'-Internucleotide Linkage
  misc_feature (24)..(25): Phosphorothioate 3'-Internucleotide Linkage
  misc_feature (28)..(28): Phosphorothioate 3'-Internucleotide Linkage
  misc_feature (30)..(30): Phosphorothioate 3'-Internucleotide Linkage
ccaugcgagccgaaaggcgagucaaggucugugcagag

SEQ ID NO: 9311 - RNA, 38 nt, Artificial Sequence
  Description of Artificial Sequence:  Enzymatic Nucleic Acid
  misc_feature (11)..(16): Phosphorothioate 3'-Internucleotide Linkage
  misc_feature (20)..(20): Phosphorothioate 3'-Internucleotide Linkage
  misc_feature (22)..(22): Phosphorothioate 3'-Internucleotide Linkage
  misc_feature (24)..(25): Phosphorothioate 3'-Internucleotide Linkage
  misc_feature (28)..(28): Phosphorothioate 3'-Internucleotide Linkage
  misc_feature (30)..(30): Phosphorothioate 3'-Internucleotide Linkage
ggcguucagccgaaaggcgagucaaggucugguggucu

SEQ ID NO: 9312 - RNA, 38 nt, Artificial Sequence
  Description of Artificial Sequence:  Enzymatic Nucleic Acid
  misc_feature (11)..(16): Phosphorothioate 3'-Internucleotide Linkage
  misc_feature (20)..(20): Phosphorothioate 3'-Internucleotide Linkage
  misc_feature (22)..(22): Phosphorothioate 3'-Internucleotide Linkage
  misc_feature (24)..(25): Phosphorothioate 3'-Internucleotide Linkage
  misc_feature (28)..(28): Phosphorothioate 3'-Internucleotide Linkage
  misc_feature (30)..(30): Phosphorothioate 3'-Internucleotide Linkage
augcaagagccgaaaggcgagucaaggucucuugggca

SEQ ID NO: 9313 - RNA, 38 nt, Artificial Sequence
  Description of Artificial Sequence:  Enzymatic Nucleic Acid
  misc_feature (11)..(16): Phosphorothioate 3'-Internucleotide Linkage
  misc_feature (20)..(20): Phosphorothioate 3'-Internucleotide Linkage
  misc_feature (22)..(22): Phosphorothioate 3'-Internucleotide Linkage
  misc_feature (24)..(25): Phosphorothioate 3'-Internucleotide Linkage
  misc_feature (28)..(28): Phosphorothioate 3'-Internucleotide Linkage
  misc_feature (30)..(30): Phosphorothioate 3'-Internucleotide Linkage
ugacauuggccgaaaggcgagucaaggucuugaaaguc

SEQ ID NO: 9314 - RNA, 38 nt, Artificial Sequence
  Description of Artificial Sequence:  Enzymatic Nucleic Acid
  misc_feature (11)..(16): Phosphorothioate 3'-Internucleotide Linkage
  misc_feature (20)..(20): Phosphorothioate 3'-Internucleotide Linkage
  misc_feature (22)..(22): Phosphorothioate 3'-Internucleotide Linkage
  misc_feature (24)..(25): Phosphorothioate 3'-Internucleotide Linkage
  misc_feature (28)..(28): Phosphorothioate 3'-Internucleotide Linkage
  misc_feature (30)..(30): Phosphorothioate 3'-Internucleotide Linkage
gaaguauggccgaaaggcgagucaaggucucucaaggu

SEQ ID NO: 9315 - RNA, 38 nt, Artificial Sequence
  Description of Artificial Sequence:  Enzymatic Nucleic Acid
  misc_feature (11)..(16): Phosphorothioate 3'-Internucleotide Linkage
  misc_feature (20)..(20): Phosphorothioate 3'-Internucleotide Linkage
  misc_feature (22)..(22): Phosphorothioate 3'-Internucleotide Linkage
  misc_feature (24)..(25): Phosphorothioate 3'-Internucleotide Linkage
  misc_feature (28)..(28): Phosphorothioate 3'-Internucleotide Linkage
  misc_feature (30)..(30): Phosphorothioate 3'-Internucleotide Linkage
uccucccagccgaaaggcgagucaaggucuucauuaaa

SEQ ID NO: 9316 - RNA, 38 nt, Artificial Sequence
  Description of Artificial Sequence:  Enzymatic Nucleic Acid
  misc_feature (11)..(16): Phosphorothioate 3'-Internucleotide Linkage
  misc_feature (20)..(20): Phosphorothioate 3'-Internucleotide Linkage
  misc_feature (22)..(22): Phosphorothioate 3'-Internucleotide Linkage
  misc_feature (24)..(25): Phosphorothioate 3'-Internucleotide Linkage
  misc_feature (28)..(28): Phosphorothioate 3'-Internucleotide Linkage
  misc_feature (30)..(30): Phosphorothioate 3'-Internucleotide Linkage
ucccccaagccgaaaggcgagucaaggucuuccuccca

SEQ ID NO: 9317 - RNA, 38 nt, Artificial Sequence
  Description of Artificial Sequence:  Enzymatic Nucleic Acid
  misc_feature (11)..(16): Phosphorothioate 3'-Internucleotide Linkage
  misc_feature (20)..(20): Phosphorothioate 3'-Internucleotide Linkage
  misc_feature (22)..(22): Phosphorothioate 3'-Internucleotide Linkage
  misc_feature (24)..(25): Phosphorothioate 3'-Internucleotide Linkage
  misc_feature (28)..(28): Phosphorothioate 3'-Internucleotide Linkage
  misc_feature (30)..(30): Phosphorothioate 3'-Internucleotide Linkage
uaaccuaagccgaaaggcgagucaaggucucuccuccc

SEQ ID NO: 9318 - RNA, 38 nt, Artificial Sequence
  Description of Artificial Sequence:  Enzymatic Nucleic Acid
  misc_feature (11)..(16): Phosphorothioate 3'-Internucleotide Linkage
  misc_feature (20)..(20): Phosphorothioate 3'-Internucleotide Linkage
  misc_feature (22)..(22): Phosphorothioate 3'-Internucleotide Linkage
  misc_feature (24)..(25): Phosphorothioate 3'-Internucleotide Linkage
  misc_feature (28)..(28): Phosphorothioate 3'-Internucleotide Linkage
  misc_feature (30)..(30): Phosphorothioate 3'-Internucleotide Linkage
accuuuaagccgaaaggcgagucaaggucucuaaccuc

SEQ ID NO: 9319 - RNA, 38 nt, Artificial Sequence
  Description of Artificial Sequence:  Enzymatic Nucleic Acid
  misc_feature (11)..(16): Phosphorothioate 3'-Internucleotide Linkage
  misc_feature (20)..(20): Phosphorothioate 3'-Internucleotide Linkage
  misc_feature (22)..(22): Phosphorothioate 3'-Internucleotide Linkage
  misc_feature (24)..(25): Phosphorothioate 3'-Internucleotide Linkage
  misc_feature (28)..(28): Phosphorothioate 3'-Internucleotide Linkage
  misc_feature (30)..(30): Phosphorothioate 3'-Internucleotide Linkage
uacaaagagccgaaaggcgagucaaggucucuuuaacc

SEQ ID NO: 9320 - RNA, 38 nt, Artificial Sequence
  Description of Artificial Sequence:  Enzymatic Nucleic Acid
  misc_feature (11)..(16): Phosphorothioate 3'-Internucleotide Linkage
  misc_feature (20)..(20): Phosphorothioate 3'-Internucleotide Linkage
  misc_feature (22)..(22): Phosphorothioate 3'-Internucleotide Linkage
  misc_feature (24)..(25): Phosphorothioate 3'-Internucleotide Linkage
  misc_feature (28)..(28): Phosphorothioate 3'-Internucleotide Linkage
  misc_feature (30)..(30): Phosphorothioate 3'-Internucleotide Linkage
gccuacaggccgaaaggcgagucaaggucucuccuagu

SEQ ID NO: 9321 - RNA, 38 nt, Artificial Sequence
  Description of Artificial Sequence:  Enzymatic Nucleic Acid
  misc_feature (11)..(16): Phosphorothioate 3'-Internucleotide Linkage
  misc_feature (20)..(20): Phosphorothioate 3'-Internucleotide Linkage
  misc_feature (22)..(22): Phosphorothioate 3'-Internucleotide Linkage
  misc_feature (24)..(25): Phosphorothioate 3'-Internucleotide Linkage
  misc_feature (28)..(28): Phosphorothioate 3'-Internucleotide Linkage
  misc_feature (30)..(30): Phosphorothioate 3'-Internucleotide Linkage
aauuuauggccgaaaggcgagucaaggucucuacagcc

SEQ ID NO: 9322 - RNA, 38 nt, Artificial Sequence
  Description of Artificial Sequence:  Enzymatic Nucleic Acid
  misc_feature (11)..(16): Phosphorothioate 3'-Internucleotide Linkage
  misc_feature (20)..(20): Phosphorothioate 3'-Internucleotide Linkage
  misc_feature (22)..(22): Phosphorothioate 3'-Internucleotide Linkage
  misc_feature (24)..(25): Phosphorothioate 3'-Internucleotide Linkage
  misc_feature (28)..(28): Phosphorothioate 3'-Internucleotide Linkage
  misc_feature (30)..(30): Phosphorothioate 3'-Internucleotide Linkage
ugaacacagccgaaaggcgagucaaggucucaauuuau

SEQ ID NO: 9323 - RNA, 38 nt, Artificial Sequence
  Description of Artificial Sequence:  Enzymatic Nucleic Acid
  misc_feature (11)..(16): Phosphorothioate 3'-Internucleotide Linkage
  misc_feature (20)..(20): Phosphorothioate 3'-Internucleotide Linkage
  misc_feature (22)..(22): Phosphorothioate 3'-Internucleotide Linkage
  misc_feature (24)..(25): Phosphorothioate 3'-Internucleotide Linkage
  misc_feature (28)..(28): Phosphorothioate 3'-Internucleotide Linkage
  misc_feature (30)..(30): Phosphorothioate 3'-Internucleotide Linkage
gcaugguggccgaaaggcgagucaaggucuuggugaac

SEQ ID NO: 9324 - RNA, 38 nt, Artificial Sequence
  Description of Artificial Sequence:  Enzymatic Nucleic Acid
  misc_feature (11)..(16): Phosphorothioate 3'-Internucleotide Linkage
  misc_feature (20)..(20): Phosphorothioate 3'-Internucleotide Linkage
  misc_feature (22)..(22): Phosphorothioate 3'-Internucleotide Linkage
  misc_feature (24)..(25): Phosphorothioate 3'-Internucleotide Linkage
  misc_feature (28)..(28): Phosphorothioate 3'-Internucleotide Linkage
  misc_feature (30)..(30): Phosphorothioate 3'-Internucleotide Linkage
cuuggagggccgaaaggcgagucaaggucuuugaacag

SEQ ID NO: 9325 - RNA, 38 nt, Artificial Sequence
  Description of Artificial Sequence:  Enzymatic Nucleic Acid
  misc_feature (11)..(16): Phosphorothioate 3'-Internucleotide Linkage
  misc_feature (20)..(20): Phosphorothioate 3'-Internucleotide Linkage
  misc_feature (22)..(22): Phosphorothioate 3'-Internucleotide Linkage
  misc_feature (24)..(25): Phosphorothioate 3'-Internucleotide Linkage
  misc_feature (28)..(28): Phosphorothioate 3'-Internucleotide Linkage
  misc_feature (30)..(30): Phosphorothioate 3'-Internucleotide Linkage
aggcacaggccgaaaggcgagucaaggucuuuggaggc

SEQ ID NO: 9326 - RNA, 38 nt, Artificial Sequence
  Description of Artificial Sequence:  Enzymatic Nucleic Acid
  misc_feature (11)..(16): Phosphorothioate 3'-Internucleotide Linkage
  misc_feature (20)..(20): Phosphorothioate 3'-Internucleotide Linkage
  misc_feature (22)..(22): Phosphorothioate 3'-Internucleotide Linkage
  misc_feature (24)..(25): Phosphorothioate 3'-Internucleotide Linkage
  misc_feature (28)..(28): Phosphorothioate 3'-Internucleotide Linkage
  misc_feature (30)..(30): Phosphorothioate 3'-Internucleotide Linkage
caaagccagccgaaaggcgagucaaggucuccaaggca

SEQ ID NO: 9327 - RNA, 38 nt, Artificial Sequence
  Description of Artificial Sequence:  Enzymatic Nucleic Acid
  misc_feature (11)..(16): Phosphorothioate 3'-Internucleotide Linkage
  misc_feature (20)..(20): Phosphorothioate 3'-Internucleotide Linkage
  misc_feature (22)..(22): Phosphorothioate 3'-Internucleotide Linkage
  misc_feature (24)..(25): Phosphorothioate 3'-Internucleotide Linkage
  misc_feature (28)..(28): Phosphorothioate 3'-Internucleotide Linkage
  misc_feature (30)..(30): Phosphorothioate 3'-Internucleotide Linkage
ccccaaaggccgaaaggcgagucaaggucucacccaag

SEQ ID NO: 9328 - RNA, 38 nt, Artificial Sequence
  Description of Artificial Sequence:  Enzymatic Nucleic Acid
  misc_feature (11)..(16): Phosphorothioate 3'-Internucleotide Linkage
  misc_feature (20)..(20): Phosphorothioate 3'-Internucleotide Linkage
  misc_feature (22)..(22): Phosphorothioate 3'-Internucleotide Linkage
  misc_feature (24)..(25): Phosphorothioate 3'-Internucleotide Linkage
  misc_feature (28)..(28): Phosphorothioate 3'-Internucleotide Linkage
  misc_feature (30)..(30): Phosphorothioate 3'-Internucleotide Linkage
uguccauggccgaaaggcgagucaaggucucccaaagc

SEQ ID NO: 9329 - RNA, 38 nt, Artificial Sequence
  Description of Artificial Sequence:  Enzymatic Nucleic Acid
  misc_feature (11)..(16): Phosphorothioate 3'-Internucleotide Linkage
  misc_feature (20)..(20): Phosphorothioate 3'-Internucleotide Linkage
  misc_feature (22)..(22): Phosphorothioate 3'-Internucleotide Linkage
  misc_feature (24)..(25): Phosphorothioate 3'-Internucleotide Linkage
  misc_feature (28)..(28): Phosphorothioate 3'-Internucleotide Linkage
  misc_feature (30)..(30): Phosphorothioate 3'-Internucleotide Linkage
ucuuuauagccgaaaggcgagucaaggucugggucaau

SEQ ID NO: 9330 - RNA, 38 nt, Artificial Sequence
  Description of Artificial Sequence:  Enzymatic Nucleic Acid
  misc_feature (11)..(16): Phosphorothioate 3'-Internucleotide Linkage
  misc_feature (20)..(20): Phosphorothioate 3'-Internucleotide Linkage
  misc_feature (22)..(22): Phosphorothioate 3'-Internucleotide Linkage
  misc_feature (24)..(25): Phosphorothioate 3'-Internucleotide Linkage
  misc_feature (28)..(28): Phosphorothioate 3'-Internucleotide Linkage
  misc_feature (30)..(30): Phosphorothioate 3'-Internucleotide Linkage
cacagaaggccgaaaggcgagucaaggucuuccaaauu

SEQ ID NO: 9331 - RNA, 38 nt, Artificial Sequence
  Description of Artificial Sequence:  Enzymatic Nucleic Acid
  misc_feature (11)..(16): Phosphorothioate 3'-Internucleotide Linkage
  misc_feature (20)..(20): Phosphorothioate 3'-Internucleotide Linkage
  misc_feature (22)..(22): Phosphorothioate 3'-Internucleotide Linkage
  misc_feature (24)..(25): Phosphorothioate 3'-Internucleotide Linkage
  misc_feature (28)..(28): Phosphorothioate 3'-Internucleotide Linkage
  misc_feature (30)..(30): Phosphorothioate 3'-Internucleotide Linkage
gagaguaagccgaaaggcgagucaaggucuuccacaga

SEQ ID NO: 9332 - RNA, 38 nt, Artificial Sequence
  Description of Artificial Sequence:  Enzymatic Nucleic Acid
  misc_feature (11)..(16): Phosphorothioate 3'-Internucleotide Linkage
  misc_feature (20)..(20): Phosphorothioate 3'-Internucleotide Linkage
  misc_feature (22)..(22): Phosphorothioate 3'-Internucleotide Linkage
  misc_feature (24)..(25): Phosphorothioate 3'-Internucleotide Linkage
  misc_feature (28)..(28): Phosphorothioate 3'-Internucleotide Linkage
  misc_feature (30)..(30): Phosphorothioate 3'-Internucleotide Linkage
cucuaagggccgaaaggcgagucaaggucucccccgau

SEQ ID NO: 9333 - RNA, 38 nt, Artificial Sequence
  Description of Artificial Sequence:  Enzymatic Nucleic Acid
  misc_feature (11)..(16): Phosphorothioate 3'-Internucleotide Linkage
  misc_feature (20)..(20): Phosphorothioate 3'-Internucleotide Linkage
  misc_feature (22)..(22): Phosphorothioate 3'-Internucleotide Linkage
  misc_feature (24)..(25): Phosphorothioate 3'-Internucleotide Linkage
  misc_feature (28)..(28): Phosphorothioate 3'-Internucleotide Linkage
  misc_feature (30)..(30): Phosphorothioate 3'-Internucleotide Linkage
uccggagagccgaaaggcgagucaaggucuucuaaggc

SEQ ID NO: 9334 - RNA, 38 nt, Artificial Sequence
  Description of Artificial Sequence:  Enzymatic Nucleic Acid
  misc_feature (11)..(16): Phosphorothioate 3'-Internucleotide Linkage
  misc_feature (20)..(20): Phosphorothioate 3'-Internucleotide Linkage
  misc_feature (22)..(22): Phosphorothioate 3'-Internucleotide Linkage
  misc_feature (24)..(25): Phosphorothioate 3'-Internucleotide Linkage
  misc_feature (28)..(28): Phosphorothioate 3'-Internucleotide Linkage
  misc_feature (30)..(30): Phosphorothioate 3'-Internucleotide Linkage
ccugaguggccgaaaggcgagucaaggucucguauggu

SEQ ID NO: 9335 - RNA, 38 nt, Artificial Sequence
  Description of Artificial Sequence:  Enzymatic Nucleic Acid
  misc_feature (11)..(16): Phosphorothioate 3'-Internucleotide Linkage
  misc_feature (20)..(20): Phosphorothioate 3'-Internucleotide Linkage
  misc_feature (22)..(22): Phosphorothioate 3'-Internucleotide Linkage
  misc_feature (24)..(25): Phosphorothioate 3'-Internucleotide Linkage
  misc_feature (28)..(28): Phosphorothioate 3'-Internucleotide Linkage
  misc_feature (30)..(30): Phosphorothioate 3'-Internucleotide Linkage
auagcuuggccgaaaggcgagucaaggucucugagugc

SEQ ID NO: 9336 - RNA, 38 nt, Artificial Sequence
  Description of Artificial Sequence:  Enzymatic Nucleic Acid
  misc_feature (11)..(16): Phosphorothioate 3'-Internucleotide Linkage
  misc_feature (20)..(20): Phosphorothioate 3'-Internucleotide Linkage
  misc_feature (22)..(22): Phosphorothioate 3'-Internucleotide Linkage
  misc_feature (24)..(25): Phosphorothioate 3'-Internucleotide Linkage
  misc_feature (28)..(28): Phosphorothioate 3'-Internucleotide Linkage
  misc_feature (30)..(30): Phosphorothioate 3'-Internucleotide Linkage
cagaauaggccgaaaggcgagucaaggucuuugccuga

SEQ ID NO: 9337 - RNA, 38 nt, Artificial Sequence
  Description of Artificial Sequence:  Enzymatic Nucleic Acid
  misc_feature (11)..(16): Phosphorothioate 3'-Internucleotide Linkage
  misc_feature (20)..(20): Phosphorothioate 3'-Internucleotide Linkage
  misc_feature (22)..(22): Phosphorothioate 3'-Internucleotide Linkage
  misc_feature (24)..(25): Phosphorothioate 3'-Internucleotide Linkage
  misc_feature (28)..(28): Phosphorothioate 3'-Internucleotide Linkage
  misc_feature (30)..(30): Phosphorothioate 3'-Internucleotide Linkage
ucaacucagccgaaaggcgagucaaggucucccaacac

SEQ ID NO: 9338 - RNA, 38 nt, Artificial Sequence
  Description of Artificial Sequence:  Enzymatic Nucleic Acid
  misc_feature (11)..(16): Phosphorothioate 3'-Internucleotide Linkage
  misc_feature (20)..(20): Phosphorothioate 3'-Internucleotide Linkage
  misc_feature (22)..(22): Phosphorothioate 3'-Internucleotide Linkage
  misc_feature (24)..(25): Phosphorothioate 3'-Internucleotide Linkage
  misc_feature (28)..(28): Phosphorothioate 3'-Internucleotide Linkage
  misc_feature (30)..(30): Phosphorothioate 3'-Internucleotide Linkage
uucaucaagccgaaaggcgagucaaggucuucacccca

SEQ ID NO: 9339 - RNA, 38 nt, Artificial Sequence
  Description of Artificial Sequence:  Enzymatic Nucleic Acid
  misc_feature (11)..(16): Phosphorothioate 3'-Internucleotide Linkage
  misc_feature (20)..(20): Phosphorothioate 3'-Internucleotide Linkage
  misc_feature (22)..(22): Phosphorothioate 3'-Internucleotide Linkage
  misc_feature (24)..(25): Phosphorothioate 3'-Internucleotide Linkage
  misc_feature (28)..(28): Phosphorothioate 3'-Internucleotide Linkage
  misc_feature (30)..(30): Phosphorothioate 3'-Internucleotide Linkage
ccaggugggccgaaaggcgagucaaggucuuagauuca

SEQ ID NO: 9340 - RNA, 38 nt, Artificial Sequence
  Description of Artificial Sequence:  Enzymatic Nucleic Acid
  misc_feature (11)..(16): Phosphorothioate 3'-Internucleotide Linkage
  misc_feature (20)..(20): Phosphorothioate 3'-Internucleotide Linkage
  misc_feature (22)..(22): Phosphorothioate 3'-Internucleotide Linkage
  misc_feature (24)..(25): Phosphorothioate 3'-Internucleotide Linkage
  misc_feature (28)..(28): Phosphorothioate 3'-Internucleotide Linkage
  misc_feature (30)..(30): Phosphorothioate 3'-Internucleotide Linkage
acuucccagccgaaaggcgagucaaggucuccaggugg

SEQ ID NO: 9341 - RNA, 38 nt, Artificial Sequence
  Description of Artificial Sequence:  Enzymatic Nucleic Acid
  misc_feature (11)..(16): Phosphorothioate 3'-Internucleotide Linkage
  misc_feature (20)..(20): Phosphorothioate 3'-Internucleotide Linkage
  misc_feature (22)..(22): Phosphorothioate 3'-Internucleotide Linkage
  misc_feature (24)..(25): Phosphorothioate 3'-Internucleotide Linkage
  misc_feature (28)..(28): Phosphorothioate 3'-Internucleotide Linkage
  misc_feature (30)..(30): Phosphorothioate 3'-Internucleotide Linkage
ccaaauuagccgaaaggcgagucaaggucuuucccacc

SEQ ID NO: 9342 - RNA, 38 nt, Artificial Sequence
  Description of Artificial Sequence:  Enzymatic Nucleic Acid
  misc_feature (11)..(16): Phosphorothioate 3'-Internucleotide Linkage
  misc_feature (20)..(20): Phosphorothioate 3'-Internucleotide Linkage
  misc_feature (22)..(22): Phosphorothioate 3'-Internucleotide Linkage
  misc_feature (24)..(25): Phosphorothioate 3'-Internucleotide Linkage
  misc_feature (28)..(28): Phosphorothioate 3'-Internucleotide Linkage
  misc_feature (30)..(30): Phosphorothioate 3'-Internucleotide Linkage
ccuggauggccgaaaggcgagucaaggucuuggaucuu

SEQ ID NO: 9343 - RNA, 38 nt, Artificial Sequence
  Description of Artificial Sequence:  Enzymatic Nucleic Acid
  misc_feature (11)..(16): Phosphorothioate 3'-Internucleotide Linkage
  misc_feature (20)..(20): Phosphorothioate 3'-Internucleotide Linkage
  misc_feature (22)..(22): Phosphorothioate 3'-Internucleotide Linkage
  misc_feature (24)..(25): Phosphorothioate 3'-Internucleotide Linkage
  misc_feature (28)..(28): Phosphorothioate 3'-Internucleotide Linkage
  misc_feature (30)..(30): Phosphorothioate 3'-Internucleotide Linkage
gcugacuagccgaaaggcgagucaaggucuuaauuccc

SEQ ID NO: 9344 - RNA, 38 nt, Artificial Sequence
  Description of Artificial Sequence:  Enzymatic Nucleic Acid
  misc_feature (11)..(16): Phosphorothioate 3'-Internucleotide Linkage
  misc_feature (20)..(20): Phosphorothioate 3'-Internucleotide Linkage
  misc_feature (22)..(22): Phosphorothioate 3'-Internucleotide Linkage
  misc_feature (24)..(25): Phosphorothioate 3'-Internucleotide Linkage
  misc_feature (28)..(28): Phosphorothioate 3'-Internucleotide Linkage
  misc_feature (30)..(30): Phosphorothioate 3'-Internucleotide Linkage
auagcugagccgaaaggcgagucaaggucuuacuaauu

SEQ ID NO: 9345 - RNA, 38 nt, Artificial Sequence
  Description of Artificial Sequence:  Enzymatic Nucleic Acid
  misc_feature (11)..(16): Phosphorothioate 3'-Internucleotide Linkage
  misc_feature (20)..(20): Phosphorothioate 3'-Internucleotide Linkage
  misc_feature (22)..(22): Phosphorothioate 3'-Internucleotide Linkage
  misc_feature (24)..(25): Phosphorothioate 3'-Internucleotide Linkage
  misc_feature (28)..(28): Phosphorothioate 3'-Internucleotide Linkage
  misc_feature (30)..(30): Phosphorothioate 3'-Internucleotide Linkage
ugacauaggccgaaaggcgagucaaggucuugacuacu

SEQ ID NO: 9346 - RNA, 38 nt, Artificial Sequence
  Description of Artificial Sequence:  Enzymatic Nucleic Acid
  misc_feature (11)..(16): Phosphorothioate 3'-Internucleotide Linkage
  misc_feature (20)..(20): Phosphorothioate 3'-Internucleotide Linkage
  misc_feature (22)..(22): Phosphorothioate 3'-Internucleotide Linkage
  misc_feature (24)..(25): Phosphorothioate 3'-Internucleotide Linkage
  misc_feature (28)..(28): Phosphorothioate 3'-Internucleotide Linkage
  misc_feature (30)..(30): Phosphorothioate 3'-Internucleotide Linkage
cauauuaagccgaaaggcgagucaaggucuguugacau

SEQ ID NO: 9347 - RNA, 38 nt, Artificial Sequence
  Description of Artificial Sequence:  Enzymatic Nucleic Acid
  misc_feature (11)..(16): Phosphorothioate 3'-Internucleotide Linkage
  misc_feature (20)..(20): Phosphorothioate 3'-Internucleotide Linkage
  misc_feature (22)..(22): Phosphorothioate 3'-Internucleotide Linkage
  misc_feature (24)..(25): Phosphorothioate 3'-Internucleotide Linkage
  misc_feature (28)..(28): Phosphorothioate 3'-Internucleotide Linkage
  misc_feature (30)..(30): Phosphorothioate 3'-Internucleotide Linkage
uuuuuagggccgaaaggcgagucaaggucuccauauua

SEQ ID NO: 9348 - RNA, 38 nt, Artificial Sequence
  Description of Artificial Sequence:  Enzymatic Nucleic Acid
  misc_feature (11)..(16): Phosphorothioate 3'-Internucleotide Linkage
  misc_feature (20)..(20): Phosphorothioate 3'-Internucleotide Linkage
  misc_feature (22)..(22): Phosphorothioate 3'-Internucleotide Linkage
  misc_feature (24)..(25): Phosphorothioate 3'-Internucleotide Linkage
  misc_feature (28)..(28): Phosphorothioate 3'-Internucleotide Linkage
  misc_feature (30)..(30): Phosphorothioate 3'-Internucleotide Linkage
augugaaagccgaaaggcgagucaaggucucacaauag

SEQ ID NO: 9349 - RNA, 38 nt, Artificial Sequence
  Description of Artificial Sequence:  Enzymatic Nucleic Acid
  misc_feature (11)..(16): Phosphorothioate 3'-Internucleotide Linkage
  misc_feature (20)..(20): Phosphorothioate 3'-Internucleotide Linkage
  misc_feature (22)..(22): Phosphorothioate 3'-Internucleotide Linkage
  misc_feature (24)..(25): Phosphorothioate 3'-Internucleotide Linkage
  misc_feature (28)..(28): Phosphorothioate 3'-Internucleotide Linkage
  misc_feature (30)..(30): Phosphorothioate 3'-Internucleotide Linkage
guuucucggccgaaaggcgagucaaggucuccaaaagu

SEQ ID NO: 9350 - RNA, 38 nt, Artificial Sequence
  Description of Artificial Sequence:  Enzymatic Nucleic Acid
  misc_feature (11)..(16): Phosphorothioate 3'-Internucleotide Linkage
  misc_feature (20)..(20): Phosphorothioate 3'-Internucleotide Linkage
  misc_feature (22)..(22): Phosphorothioate 3'-Internucleotide Linkage
  misc_feature (24)..(25): Phosphorothioate 3'-Internucleotide Linkage
  misc_feature (28)..(28): Phosphorothioate 3'-Internucleotide Linkage
  misc_feature (30)..(30): Phosphorothioate 3'-Internucleotide Linkage
aaaagacagccgaaaggcgagucaaggucucaaauauu

SEQ ID NO: 9351 - RNA, 38 nt, Artificial Sequence
  Description of Artificial Sequence:  Enzymatic Nucleic Acid
  misc_feature (11)..(16): Phosphorothioate 3'-Internucleotide Linkage
  misc_feature (20)..(20): Phosphorothioate 3'-Internucleotide Linkage
  misc_feature (22)..(22): Phosphorothioate 3'-Internucleotide Linkage
  misc_feature (24)..(25): Phosphorothioate 3'-Internucleotide Linkage
  misc_feature (28)..(28): Phosphorothioate 3'-Internucleotide Linkage
  misc_feature (30)..(30): Phosphorothioate 3'-Internucleotide Linkage
aauccacagccgaaaggcgagucaaggucuuccaaaag

SEQ ID NO: 9352 - RNA, 38 nt, Artificial Sequence
  Description of Artificial Sequence:  Enzymatic Nucleic Acid
  misc_feature (11)..(16): Phosphorothioate 3'-Internucleotide Linkage
  misc_feature (20)..(20): Phosphorothioate 3'-Internucleotide Linkage
  misc_feature (22)..(22): Phosphorothioate 3'-Internucleotide Linkage
  misc_feature (24)..(25): Phosphorothioate 3'-Internucleotide Linkage
  misc_feature (28)..(28): Phosphorothioate 3'-Internucleotide Linkage
  misc_feature (30)..(30): Phosphorothioate 3'-Internucleotide Linkage
gggaccuggccgaaaggcgagucaaggucucucuucgu

SEQ ID NO: 9353 - RNA, 38 nt, Artificial Sequence
  Description of Artificial Sequence:  Enzymatic Nucleic Acid
  misc_feature (11)..(16): Phosphorothioate 3'-Internucleotide Linkage
  misc_feature (20)..(20): Phosphorothioate 3'-Internucleotide Linkage
  misc_feature (22)..(22): Phosphorothioate 3'-Internucleotide Linkage
  misc_feature (24)..(25): Phosphorothioate 3'-Internucleotide Linkage
  misc_feature (28)..(28): Phosphorothioate 3'-Internucleotide Linkage
  misc_feature (30)..(30): Phosphorothioate 3'-Internucleotide Linkage
cuaggggagccgaaaggcgagucaaggucucugccucu

SEQ ID NO: 9354 - RNA, 38 nt, Artificial Sequence
  Description of Artificial Sequence:  Enzymatic Nucleic Acid
  misc_feature (11)..(16): Phosphorothioate 3'-Internucleotide Linkage
  misc_feature (20)..(20): Phosphorothioate 3'-Internucleotide Linkage
  misc_feature (22)..(22): Phosphorothioate 3'-Internucleotide Linkage
  misc_feature (24)..(25): Phosphorothioate 3'-Internucleotide Linkage
  misc_feature (28)..(28): Phosphorothioate 3'-Internucleotide Linkage
  misc_feature (30)..(30): Phosphorothioate 3'-Internucleotide Linkage
gauugagagccgaaaggcgagucaaggucucuucgucu

SEQ ID NO: 9355 - RNA, 38 nt, Artificial Sequence
  Description of Artificial Sequence:  Enzymatic Nucleic Acid
  misc_feature (11)..(16): Phosphorothioate 3'-Internucleotide Linkage
  misc_feature (20)..(20): Phosphorothioate 3'-Internucleotide Linkage
  misc_feature (22)..(22): Phosphorothioate 3'-Internucleotide Linkage
  misc_feature (24)..(25): Phosphorothioate 3'-Internucleotide Linkage
  misc_feature (28)..(28): Phosphorothioate 3'-Internucleotide Linkage
  misc_feature (30)..(30): Phosphorothioate 3'-Internucleotide Linkage
uucugcgagccgaaaggcgagucaaggucugcggcgau

SEQ ID NO: 9356 - RNA, 38 nt, Artificial Sequence
  Description of Artificial Sequence:  Enzymatic Nucleic Acid
  misc_feature (11)..(16): Phosphorothioate 3'-Internucleotide Linkage
  misc_feature (20)..(20): Phosphorothioate 3'-Internucleotide Linkage
  misc_feature (22)..(22): Phosphorothioate 3'-Internucleotide Linkage
  misc_feature (24)..(25): Phosphorothioate 3'-Internucleotide Linkage
  misc_feature (28)..(28): Phosphorothioate 3'-Internucleotide Linkage
  misc_feature (30)..(30): Phosphorothioate 3'-Internucleotide Linkage
aaggaauagccgaaaggcgagucaaggucuuaacauug

SEQ ID NO: 9357 - RNA, 38 nt, Artificial Sequence
  Description of Artificial Sequence:  Enzymatic Nucleic Acid
  misc_feature (11)..(16): Phosphorothioate 3'-Internucleotide Linkage
  misc_feature (20)..(20): Phosphorothioate 3'-Internucleotide Linkage
  misc_feature (22)..(22): Phosphorothioate 3'-Internucleotide Linkage
  misc_feature (24)..(25): Phosphorothioate 3'-Internucleotide Linkage
  misc_feature (28)..(28): Phosphorothioate 3'-Internucleotide Linkage
  misc_feature (30)..(30): Phosphorothioate 3'-Internucleotide Linkage
guuucccagccgaaaggcgagucaaggucucuuaugug

SEQ ID NO: 9358 - RNA, 38 nt, Artificial Sequence
  Description of Artificial Sequence:  Enzymatic Nucleic Acid
  misc_feature (11)..(16): Phosphorothioate 3'-Internucleotide Linkage
  misc_feature (20)..(20): Phosphorothioate 3'-Internucleotide Linkage
  misc_feature (22)..(22): Phosphorothioate 3'-Internucleotide Linkage
  misc_feature (24)..(25): Phosphorothioate 3'-Internucleotide Linkage
  misc_feature (28)..(28): Phosphorothioate 3'-Internucleotide Linkage
  misc_feature (30)..(30): Phosphorothioate 3'-Internucleotide Linkage
gaauaaaggccgaaaggcgagucaaggucucccguaaa

SEQ ID NO: 9359 - RNA, 38 nt, Artificial Sequence
  Description of Artificial Sequence:  Enzymatic Nucleic Acid
  misc_feature (11)..(16): Phosphorothioate 3'-Internucleotide Linkage
  misc_feature (20)..(20): Phosphorothioate 3'-Internucleotide Linkage
  misc_feature (22)..(22): Phosphorothioate 3'-Internucleotide Linkage
  misc_feature (24)..(25): Phosphorothioate 3'-Internucleotide Linkage
  misc_feature (28)..(28): Phosphorothioate 3'-Internucleotide Linkage
  misc_feature (30)..(30): Phosphorothioate 3'-Internucleotide Linkage
gcaagguagccgaaaggcgagucaaggucucguagaag

SEQ ID NO: 9360 - RNA, 38 nt, Artificial Sequence
  Description of Artificial Sequence:  Enzymatic Nucleic Acid
  misc_feature (11)..(16): Phosphorothioate 3'-Internucleotide Linkage
  misc_feature (20)..(20): Phosphorothioate 3'-Internucleotide Linkage
  misc_feature (22)..(22): Phosphorothioate 3'-Internucleotide Linkage
  misc_feature (24)..(25): Phosphorothioate 3'-Internucleotide Linkage
  misc_feature (28)..(28): Phosphorothioate 3'-Internucleotide Linkage
  misc_feature (30)..(30): Phosphorothioate 3'-Internucleotide Linkage
ggaguuuggccgaaaggcgagucaaggucucauuuagg

SEQ ID NO: 9361 - RNA, 38 nt, Artificial Sequence
  Description of Artificial Sequence:  Enzymatic Nucleic Acid
  misc_feature (11)..(16): Phosphorothioate 3'-Internucleotide Linkage
  misc_feature (20)..(20): Phosphorothioate 3'-Internucleotide Linkage
  misc_feature (22)..(22): Phosphorothioate 3'-Internucleotide Linkage
  misc_feature (24)..(25): Phosphorothioate 3'-Internucleotide Linkage
  misc_feature (28)..(28): Phosphorothioate 3'-Internucleotide Linkage
  misc_feature (30)..(30): Phosphorothioate 3'-Internucleotide Linkage
acaaauuggccgaaaggcgagucaaggucuuuacaucu

SEQ ID NO: 9362 - RNA, 38 nt, Artificial Sequence
  Description of Artificial Sequence:  Enzymatic Nucleic Acid
  misc_feature (11)..(16): Phosphorothioate 3'-Internucleotide Linkage
  misc_feature (20)..(20): Phosphorothioate 3'-Internucleotide Linkage
  misc_feature (22)..(22): Phosphorothioate 3'-Internucleotide Linkage
  misc_feature (24)..(25): Phosphorothioate 3'-Internucleotide Linkage
  misc_feature (28)..(28): Phosphorothioate 3'-Internucleotide Linkage
  misc_feature (30)..(30): Phosphorothioate 3'-Internucleotide Linkage
guaagggggccgaaaggcgagucaaggucucccacaaa

SEQ ID NO: 9363 - RNA, 38 nt, Artificial Sequence
  Description of Artificial Sequence:  Enzymatic Nucleic Acid
  misc_feature (11)..(16): Phosphorothioate 3'-Internucleotide Linkage
  misc_feature (20)..(20): Phosphorothioate 3'-Internucleotide Linkage
  misc_feature (22)..(22): Phosphorothioate 3'-Internucleotide Linkage
  misc_feature (24)..(25): Phosphorothioate 3'-Internucleotide Linkage
  misc_feature (28)..(28): Phosphorothioate 3'-Internucleotide Linkage
  misc_feature (30)..(30): Phosphorothioate 3'-Internucleotide Linkage
uucauuuagccgaaaggcgagucaaggucuuguaaggg

SEQ ID NO: 9364 - RNA, 38 nt, Artificial Sequence
  Description of Artificial Sequence:  Enzymatic Nucleic Acid
  misc_feature (11)..(16): Phosphorothioate 3'-Internucleotide Linkage
  misc_feature (20)..(20): Phosphorothioate 3'-Internucleotide Linkage
  misc_feature (22)..(22): Phosphorothioate 3'-Internucleotide Linkage
  misc_feature (24)..(25): Phosphorothioate 3'-Internucleotide Linkage
  misc_feature (28)..(28): Phosphorothioate 3'-Internucleotide Linkage
  misc_feature (30)..(30): Phosphorothioate 3'-Internucleotide Linkage
ggauaaaagccgaaaggcgagucaaggucucuagcagg

SEQ ID NO: 9365 - RNA, 38 nt, Artificial Sequence
  Description of Artificial Sequence:  Enzymatic Nucleic Acid
  misc_feature (11)..(16): Phosphorothioate 3'-Internucleotide Linkage
  misc_feature (20)..(20): Phosphorothioate 3'-Internucleotide Linkage
  misc_feature (22)..(22): Phosphorothioate 3'-Internucleotide Linkage
  misc_feature (24)..(25): Phosphorothioate 3'-Internucleotide Linkage
  misc_feature (28)..(28): Phosphorothioate 3'-Internucleotide Linkage
  misc_feature (30)..(30): Phosphorothioate 3'-Internucleotide Linkage
ggauaauagccgaaaggcgagucaaggucugguuugau

SEQ ID NO: 9366 - RNA, 38 nt, Artificial Sequence
  Description of Artificial Sequence:  Enzymatic Nucleic Acid
  misc_feature (11)..(16): Phosphorothioate 3'-Internucleotide Linkage
  misc_feature (20)..(20): Phosphorothioate 3'-Internucleotide Linkage
  misc_feature (22)..(22): Phosphorothioate 3'-Internucleotide Linkage
  misc_feature (24)..(25): Phosphorothioate 3'-Internucleotide Linkage
  misc_feature (28)..(28): Phosphorothioate 3'-Internucleotide Linkage
  misc_feature (30)..(30): Phosphorothioate 3'-Internucleotide Linkage
acuacauagccgaaaggcgagucaaggucuucuggaua

SEQ ID NO: 9367 - RNA, 38 nt, Artificial Sequence
  Description of Artificial Sequence:  Enzymatic Nucleic Acid
  misc_feature (11)..(16): Phosphorothioate 3'-Internucleotide Linkage
  misc_feature (20)..(20): Phosphorothioate 3'-Internucleotide Linkage
  misc_feature (22)..(22): Phosphorothioate 3'-Internucleotide Linkage
  misc_feature (24)..(25): Phosphorothioate 3'-Internucleotide Linkage
  misc_feature (28)..(28): Phosphorothioate 3'-Internucleotide Linkage
  misc_feature (30)..(30): Phosphorothioate 3'-Internucleotide Linkage
augauuaagccgaaaggcgagucaaggucuuacauacu

SEQ ID NO: 9368 - RNA, 38 nt, Artificial Sequence
  Description of Artificial Sequence:  Enzymatic Nucleic Acid
  misc_feature (11)..(16): Phosphorothioate 3'-Internucleotide Linkage
  misc_feature (20)..(20): Phosphorothioate 3'-Internucleotide Linkage
  misc_feature (22)..(22): Phosphorothioate 3'-Internucleotide Linkage
  misc_feature (24)..(25): Phosphorothioate 3'-Internucleotide Linkage
  misc_feature (28)..(28): Phosphorothioate 3'-Internucleotide Linkage
  misc_feature (30)..(30): Phosphorothioate 3'-Internucleotide Linkage
gauccccggccgaaaggcgagucaaggucucuuccaaa

SEQ ID NO: 9369 - RNA, 38 nt, Artificial Sequence
  Description of Artificial Sequence:  Enzymatic Nucleic Acid
  misc_feature (11)..(16): Phosphorothioate 3'-Internucleotide Linkage
  misc_feature (20)..(20): Phosphorothioate 3'-Internucleotide Linkage
  misc_feature (22)..(22): Phosphorothioate 3'-Internucleotide Linkage
  misc_feature (24)..(25): Phosphorothioate 3'-Internucleotide Linkage
  misc_feature (28)..(28): Phosphorothioate 3'-Internucleotide Linkage
  misc_feature (30)..(30): Phosphorothioate 3'-Internucleotide Linkage
cguguggagccgaaaggcgagucaaggucuucucuuuu

SEQ ID NO: 9370 - RNA, 38 nt, Artificial Sequence
  Description of Artificial Sequence:  Enzymatic Nucleic Acid
  misc_feature (11)..(16): Phosphorothioate 3'-Internucleotide Linkage
  misc_feature (20)..(20): Phosphorothioate 3'-Internucleotide Linkage
  misc_feature (22)..(22): Phosphorothioate 3'-Internucleotide Linkage
  misc_feature (24)..(25): Phosphorothioate 3'-Internucleotide Linkage
  misc_feature (28)..(28): Phosphorothioate 3'-Internucleotide Linkage
  misc_feature (30)..(30): Phosphorothioate 3'-Internucleotide Linkage
aggcgcuagccgaaaggcgagucaaggucuguguggac

SEQ ID NO: 9371 - RNA, 38 nt, Artificial Sequence
  Description of Artificial Sequence:  Enzymatic Nucleic Acid
  misc_feature (11)..(16): Phosphorothioate 3'-Internucleotide Linkage
  misc_feature (20)..(20): Phosphorothioate 3'-Internucleotide Linkage
  misc_feature (22)..(22): Phosphorothioate 3'-Internucleotide Linkage
  misc_feature (24)..(25): Phosphorothioate 3'-Internucleotide Linkage
  misc_feature (28)..(28): Phosphorothioate 3'-Internucleotide Linkage
  misc_feature (30)..(30): Phosphorothioate 3'-Internucleotide Linkage
augaggcggccgaaaggcgagucaaggucuuacgugug

SEQ ID NO: 9372 - RNA, 38 nt, Artificial Sequence
  Description of Artificial Sequence:  Enzymatic Nucleic Acid
  misc_feature (11)..(16): Phosphorothioate 3'-Internucleotide Linkage
  misc_feature (20)..(20): Phosphorothioate 3'-Internucleotide Linkage
  misc_feature (22)..(22): Phosphorothioate 3'-Internucleotide Linkage
  misc_feature (24)..(25): Phosphorothioate 3'-Internucleotide Linkage
  misc_feature (28)..(28): Phosphorothioate 3'-Internucleotide Linkage
  misc_feature (30)..(30): Phosphorothioate 3'-Internucleotide Linkage
uauggugagccgaaaggcgagucaaggucuccgcaaaa

SEQ ID NO: 9373 - RNA, 38 nt, Artificial Sequence
  Description of Artificial Sequence:  Enzymatic Nucleic Acid
  misc_feature (11)..(16): Phosphorothioate 3'-Internucleotide Linkage
  misc_feature (20)..(20): Phosphorothioate 3'-Internucleotide Linkage
  misc_feature (22)..(22): Phosphorothioate 3'-Internucleotide Linkage
  misc_feature (24)..(25): Phosphorothioate 3'-Internucleotide Linkage
  misc_feature (28)..(28): Phosphorothioate 3'-Internucleotide Linkage
  misc_feature (30)..(30): Phosphorothioate 3'-Internucleotide Linkage
cucccauggccgaaaggcgagucaaggucuuguagauc

SEQ ID NO: 9374 - RNA, 38 nt, Artificial Sequence
  Description of Artificial Sequence:  Enzymatic Nucleic Acid
  misc_feature (11)..(16): Phosphorothioate 3'-Internucleotide Linkage
  misc_feature (20)..(20): Phosphorothioate 3'-Internucleotide Linkage
  misc_feature (22)..(22): Phosphorothioate 3'-Internucleotide Linkage
  misc_feature (24)..(25): Phosphorothioate 3'-Internucleotide Linkage
  misc_feature (28)..(28): Phosphorothioate 3'-Internucleotide Linkage
  misc_feature (30)..(30): Phosphorothioate 3'-Internucleotide Linkage
aagaccaagccgaaaggcgagucaaggucucucccaug

SEQ ID NO: 9375 - RNA, 38 nt, Artificial Sequence
  Description of Artificial Sequence:  Enzymatic Nucleic Acid
  misc_feature (11)..(16): Phosphorothioate 3'-Internucleotide Linkage
  misc_feature (20)..(20): Phosphorothioate 3'-Internucleotide Linkage
  misc_feature (22)..(22): Phosphorothioate 3'-Internucleotide Linkage
  misc_feature (24)..(25): Phosphorothioate 3'-Internucleotide Linkage
  misc_feature (28)..(28): Phosphorothioate 3'-Internucleotide Linkage
  misc_feature (30)..(30): Phosphorothioate 3'-Internucleotide Linkage
uuggaagagccgaaaggcgagucaaggucucaaccucc

SEQ ID NO: 9376 - RNA, 38 nt, Artificial Sequence
  Description of Artificial Sequence:  Enzymatic Nucleic Acid
  misc_feature (11)..(16): Phosphorothioate 3'-Internucleotide Linkage
  misc_feature (20)..(20): Phosphorothioate 3'-Internucleotide Linkage
  misc_feature (22)..(22): Phosphorothioate 3'-Internucleotide Linkage
  misc_feature (24)..(25): Phosphorothioate 3'-Internucleotide Linkage
  misc_feature (28)..(28): Phosphorothioate 3'-Internucleotide Linkage
  misc_feature (30)..(30): Phosphorothioate 3'-Internucleotide Linkage
uccccauggccgaaaggcgagucaaggucucuuuucga

SEQ ID NO: 9377 - RNA, 38 nt, Artificial Sequence
  Description of Artificial Sequence:  Enzymatic Nucleic Acid
  misc_feature (11)..(16): Phosphorothioate 3'-Internucleotide Linkage
  misc_feature (20)..(20): Phosphorothioate 3'-Internucleotide Linkage
  misc_feature (22)..(22): Phosphorothioate 3'-Internucleotide Linkage
  misc_feature (24)..(25): Phosphorothioate 3'-Internucleotide Linkage
  misc_feature (28)..(28): Phosphorothioate 3'-Internucleotide Linkage
  misc_feature (30)..(30): Phosphorothioate 3'-Internucleotide Linkage
ggguccaagccgaaaggcgagucaaggucuugaugauc

SEQ ID NO: 9378 - RNA, 38 nt, Artificial Sequence
  Description of Artificial Sequence:  Enzymatic Nucleic Acid
  misc_feature (11)..(16): Phosphorothioate 3'-Internucleotide Linkage
  misc_feature (20)..(20): Phosphorothioate 3'-Internucleotide Linkage
  misc_feature (22)..(22): Phosphorothioate 3'-Internucleotide Linkage
  misc_feature (24)..(25): Phosphorothioate 3'-Internucleotide Linkage
  misc_feature (28)..(28): Phosphorothioate 3'-Internucleotide Linkage
  misc_feature (30)..(30): Phosphorothioate 3'-Internucleotide Linkage
ugaguugggccgaaaggcgagucaaggucuuuugaaug

SEQ ID NO: 9379 - RNA, 38 nt, Artificial Sequence
  Description of Artificial Sequence:  Enzymatic Nucleic Acid
  misc_feature (11)..(16): Phosphorothioate 3'-Internucleotide Linkage
  misc_feature (20)..(20): Phosphorothioate 3'-Internucleotide Linkage
  misc_feature (22)..(22): Phosphorothioate 3'-Internucleotide Linkage
  misc_feature (24)..(25): Phosphorothioate 3'-Internucleotide Linkage
  misc_feature (28)..(28): Phosphorothioate 3'-Internucleotide Linkage
  misc_feature (30)..(30): Phosphorothioate 3'-Internucleotide Linkage
uggauuuagccgaaaggcgagucaaggucuugaguugg

SEQ ID NO: 9380 - RNA, 38 nt, Artificial Sequence
  Description of Artificial Sequence:  Enzymatic Nucleic Acid
  misc_feature (11)..(16): Phosphorothioate 3'-Internucleotide Linkage
  misc_feature (20)..(20): Phosphorothioate 3'-Internucleotide Linkage
  misc_feature (22)..(22): Phosphorothioate 3'-Internucleotide Linkage
  misc_feature (24)..(25): Phosphorothioate 3'-Internucleotide Linkage
  misc_feature (28)..(28): Phosphorothioate 3'-Internucleotide Linkage
  misc_feature (30)..(30): Phosphorothioate 3'-Internucleotide Linkage
gcguccgggccgaaaggcgagucaaggucucaguuguc

SEQ ID NO: 9381 - RNA, 38 nt, Artificial Sequence
  Description of Artificial Sequence:  Enzymatic Nucleic Acid
  misc_feature (11)..(16): Phosphorothioate 3'-Internucleotide Linkage
  misc_feature (20)..(20): Phosphorothioate 3'-Internucleotide Linkage
  misc_feature (22)..(22): Phosphorothioate 3'-Internucleotide Linkage
  misc_feature (24)..(25): Phosphorothioate 3'-Internucleotide Linkage
  misc_feature (28)..(28): Phosphorothioate 3'-Internucleotide Linkage
  misc_feature (30)..(30): Phosphorothioate 3'-Internucleotide Linkage
cacucccagccgaaaggcgagucaaggucucuuguugg

SEQ ID NO: 9382 - RNA, 38 nt, Artificial Sequence
  Description of Artificial Sequence:  Enzymatic Nucleic Acid
  misc_feature (11)..(16): Phosphorothioate 3'-Internucleotide Linkage
  misc_feature (20)..(20): Phosphorothioate 3'-Internucleotide Linkage
  misc_feature (22)..(22): Phosphorothioate 3'-Internucleotide Linkage
  misc_feature (24)..(25): Phosphorothioate 3'-Internucleotide Linkage
  misc_feature (28)..(28): Phosphorothioate 3'-Internucleotide Linkage
  misc_feature (30)..(30): Phosphorothioate 3'-Internucleotide Linkage
ugcucccagccgaaaggcgagucaaggucuucccaccu

SEQ ID NO: 9383 - RNA, 38 nt, Artificial Sequence
  Description of Artificial Sequence:  Enzymatic Nucleic Acid
  misc_feature (11)..(16): Phosphorothioate 3'-Internucleotide Linkage
  misc_feature (20)..(20): Phosphorothioate 3'-Internucleotide Linkage
  misc_feature (22)..(22): Phosphorothioate 3'-Internucleotide Linkage
  misc_feature (24)..(25): Phosphorothioate 3'-Internucleotide Linkage
  misc_feature (28)..(28): Phosphorothioate 3'-Internucleotide Linkage
  misc_feature (30)..(30): Phosphorothioate 3'-Internucleotide Linkage
cccgaauggccgaaaggcgagucaaggucuucccacuc

SEQ ID NO: 9384 - RNA, 38 nt, Artificial Sequence
  Description of Artificial Sequence:  Enzymatic Nucleic Acid
  misc_feature (11)..(16): Phosphorothioate 3'-Internucleotide Linkage
  misc_feature (20)..(20): Phosphorothioate 3'-Internucleotide Linkage
  misc_feature (22)..(22): Phosphorothioate 3'-Internucleotide Linkage
  misc_feature (24)..(25): Phosphorothioate 3'-Internucleotide Linkage
  misc_feature (28)..(28): Phosphorothioate 3'-Internucleotide Linkage
  misc_feature (30)..(30): Phosphorothioate 3'-Internucleotide Linkage
aacccugggccgaaaggcgagucaaggucuccgaaugc

SEQ ID NO: 9385 - RNA, 38 nt, Artificial Sequence
  Description of Artificial Sequence:  Enzymatic Nucleic Acid
  misc_feature (11)..(16): Phosphorothioate 3'-Internucleotide Linkage
  misc_feature (20)..(20): Phosphorothioate 3'-Internucleotide Linkage
  misc_feature (22)..(22): Phosphorothioate 3'-Internucleotide Linkage
  misc_feature (24)..(25): Phosphorothioate 3'-Internucleotide Linkage
  misc_feature (28)..(28): Phosphorothioate 3'-Internucleotide Linkage
  misc_feature (30)..(30): Phosphorothioate 3'-Internucleotide Linkage
ggggugaagccgaaaggcgagucaaggucuccuggccc

SEQ ID NO: 9386 - RNA, 38 nt, Artificial Sequence
  Description of Artificial Sequence:  Enzymatic Nucleic Acid
  misc_feature (11)..(16): Phosphorothioate 3'-Internucleotide Linkage
  misc_feature (20)..(20): Phosphorothioate 3'-Internucleotide Linkage
  misc_feature (22)..(22): Phosphorothioate 3'-Internucleotide Linkage
  misc_feature (24)..(25): Phosphorothioate 3'-Internucleotide Linkage
  misc_feature (28)..(28): Phosphorothioate 3'-Internucleotide Linkage
  misc_feature (30)..(30): Phosphorothioate 3'-Internucleotide Linkage
gggcuccagccgaaaggcgagucaaggucucccaacag

SEQ ID NO: 9387 - RNA, 38 nt, Artificial Sequence
  Description of Artificial Sequence:  Enzymatic Nucleic Acid
  misc_feature (11)..(16): Phosphorothioate 3'-Internucleotide Linkage
  misc_feature (20)..(20): Phosphorothioate 3'-Internucleotide Linkage
  misc_feature (22)..(22): Phosphorothioate 3'-Internucleotide Linkage
  misc_feature (24)..(25): Phosphorothioate 3'-Internucleotide Linkage
  misc_feature (28)..(28): Phosphorothioate 3'-Internucleotide Linkage
  misc_feature (30)..(30): Phosphorothioate 3'-Internucleotide Linkage
cgugaggggccgaaaggcgagucaaggucuuccacccc

SEQ ID NO: 9388 - RNA, 38 nt, Artificial Sequence
  Description of Artificial Sequence:  Enzymatic Nucleic Acid
  misc_feature (11)..(16): Phosphorothioate 3'-Internucleotide Linkage
  misc_feature (20)..(20): Phosphorothioate 3'-Internucleotide Linkage
  misc_feature (22)..(22): Phosphorothioate 3'-Internucleotide Linkage
  misc_feature (24)..(25): Phosphorothioate 3'-Internucleotide Linkage
  misc_feature (28)..(28): Phosphorothioate 3'-Internucleotide Linkage
  misc_feature (30)..(30): Phosphorothioate 3'-Internucleotide Linkage
ugaguagggccgaaaggcgagucaaggucuccugagcg

SEQ ID NO: 9389 - RNA, 38 nt, Artificial Sequence
  Description of Artificial Sequence:  Enzymatic Nucleic Acid
  misc_feature (11)..(16): Phosphorothioate 3'-Internucleotide Linkage
  misc_feature (20)..(20): Phosphorothioate 3'-Internucleotide Linkage
  misc_feature (22)..(22): Phosphorothioate 3'-Internucleotide Linkage
  misc_feature (24)..(25): Phosphorothioate 3'-Internucleotide Linkage
  misc_feature (28)..(28): Phosphorothioate 3'-Internucleotide Linkage
  misc_feature (30)..(30): Phosphorothioate 3'-Internucleotide Linkage
aggagcuggccgaaaggcgagucaaggucuuggcacag

SEQ ID NO: 9390 - RNA, 38 nt, Artificial Sequence
  Description of Artificial Sequence:  Enzymatic Nucleic Acid
  misc_feature (11)..(16): Phosphorothioate 3'-Internucleotide Linkage
  misc_feature (20)..(20): Phosphorothioate 3'-Internucleotide Linkage
  misc_feature (22)..(22): Phosphorothioate 3'-Internucleotide Linkage
  misc_feature (24)..(25): Phosphorothioate 3'-Internucleotide Linkage
  misc_feature (28)..(28): Phosphorothioate 3'-Internucleotide Linkage
  misc_feature (30)..(30): Phosphorothioate 3'-Internucleotide Linkage
aggaggaggccgaaaggcgagucaaggucuugcuggca

SEQ ID NO: 9391 - RNA, 38 nt, Artificial Sequence
  Description of Artificial Sequence:  Enzymatic Nucleic Acid
  misc_feature (11)..(16): Phosphorothioate 3'-Internucleotide Linkage
  misc_feature (20)..(20): Phosphorothioate 3'-Internucleotide Linkage
  misc_feature (22)..(22): Phosphorothioate 3'-Internucleotide Linkage
  misc_feature (24)..(25): Phosphorothioate 3'-Internucleotide Linkage
  misc_feature (28)..(28): Phosphorothioate 3'-Internucleotide Linkage
  misc_feature (30)..(30): Phosphorothioate 3'-Internucleotide Linkage
ccugacuggccgaaaggcgagucaaggucucgauuggu

SEQ ID NO: 9392 - RNA, 38 nt, Artificial Sequence
  Description of Artificial Sequence:  Enzymatic Nucleic Acid
  misc_feature (11)..(16): Phosphorothioate 3'-Internucleotide Linkage
  misc_feature (20)..(20): Phosphorothioate 3'-Internucleotide Linkage
  misc_feature (22)..(22): Phosphorothioate 3'-Internucleotide Linkage
  misc_feature (24)..(25): Phosphorothioate 3'-Internucleotide Linkage
  misc_feature (28)..(28): Phosphorothioate 3'-Internucleotide Linkage
  misc_feature (30)..(30): Phosphorothioate 3'-Internucleotide Linkage
cuuccugagccgaaaggcgagucaaggucuugccgauu

SEQ ID NO: 9393 - RNA, 38 nt, Artificial Sequence
  Description of Artificial Sequence:  Enzymatic Nucleic Acid
  misc_feature (11)..(16): Phosphorothioate 3'-Internucleotide Linkage
  misc_feature (20)..(20): Phosphorothioate 3'-Internucleotide Linkage
  misc_feature (22)..(22): Phosphorothioate 3'-Internucleotide Linkage
  misc_feature (24)..(25): Phosphorothioate 3'-Internucleotide Linkage
  misc_feature (28)..(28): Phosphorothioate 3'-Internucleotide Linkage
  misc_feature (30)..(30): Phosphorothioate 3'-Internucleotide Linkage
guaggcuggccgaaaggcgagucaaggucucuuccuga

SEQ ID NO: 9394 - RNA, 38 nt, Artificial Sequence
  Description of Artificial Sequence:  Enzymatic Nucleic Acid
  misc_feature (11)..(16): Phosphorothioate 3'-Internucleotide Linkage
  misc_feature (20)..(20): Phosphorothioate 3'-Internucleotide Linkage
  misc_feature (22)..(22): Phosphorothioate 3'-Internucleotide Linkage
  misc_feature (24)..(25): Phosphorothioate 3'-Internucleotide Linkage
  misc_feature (28)..(28): Phosphorothioate 3'-Internucleotide Linkage
  misc_feature (30)..(30): Phosphorothioate 3'-Internucleotide Linkage
ggaguagggccgaaaggcgagucaaggucuugccuucc

SEQ ID NO: 9395 - RNA, 38 nt, Artificial Sequence
  Description of Artificial Sequence:  Enzymatic Nucleic Acid
  misc_feature (11)..(16): Phosphorothioate 3'-Internucleotide Linkage
  misc_feature (20)..(20): Phosphorothioate 3'-Internucleotide Linkage
  misc_feature (22)..(22): Phosphorothioate 3'-Internucleotide Linkage
  misc_feature (24)..(25): Phosphorothioate 3'-Internucleotide Linkage
  misc_feature (28)..(28): Phosphorothioate 3'-Internucleotide Linkage
  misc_feature (30)..(30): Phosphorothioate 3'-Internucleotide Linkage
cugcaugggccgaaaggcgagucaaggucucugaggau

SEQ ID NO: 9396 - DNA, 31 bp, Artificial Sequence
  Description of Artificial Sequence:  Enzymatic Nucleic Acid
tggtccggggctagctacaacgagctggttg

SEQ ID NO: 9397 - DNA, 31 bp, Artificial Sequence
  Description of Artificial Sequence:  Enzymatic Nucleic Acid
ggttcctgggctagctacaacgagggcgttc

SEQ ID NO: 9398 - DNA, 31 bp, Artificial Sequence
  Description of Artificial Sequence:  Enzymatic Nucleic Acid
tgtccttgggctagctacaacgagcgggttg

SEQ ID NO: 9399 - DNA, 31 bp, Artificial Sequence
  Description of Artificial Sequence:  Enzymatic Nucleic Acid
gccaccagggctagctacaacgaaggaaagt

SEQ ID NO: 9400 - DNA, 31 bp, Artificial Sequence
  Description of Artificial Sequence:  Enzymatic Nucleic Acid
attctgagggctagctacaacgaagggctca

SEQ ID NO: 9401 - DNA, 31 bp, Artificial Sequence
  Description of Artificial Sequence:  Enzymatic Nucleic Acid
cgatatggggctagctacaacgaagagacag

SEQ ID NO: 9402 - DNA, 31 bp, Artificial Sequence
  Description of Artificial Sequence:  Enzymatic Nucleic Acid
tcctgatgggctagctacaacgagatgttct

SEQ ID NO: 9403 - DNA, 31 bp, Artificial Sequence
  Description of Artificial Sequence:  Enzymatic Nucleic Acid
aacacgagggctagctacaacgaaggggtcc

SEQ ID NO: 9404 - DNA, 31 bp, Artificial Sequence
  Description of Artificial Sequence:  Enzymatic Nucleic Acid
tgggactgggctagctacaacgagaattttg

SEQ ID NO: 9405 - DNA, 31 bp, Artificial Sequence
  Description of Artificial Sequence:  Enzymatic Nucleic Acid
acatccagggctagctacaacgagataacca

SEQ ID NO: 9406 - DNA, 31 bp, Artificial Sequence
  Description of Artificial Sequence:  Enzymatic Nucleic Acid
aaacgccgggctagctacaacgaagacacat

SEQ ID NO: 9407 - DNA, 31 bp, Artificial Sequence
  Description of Artificial Sequence:  Enzymatic Nucleic Acid
gcaggatgggctagctacaacgaagaggaag

SEQ ID NO: 9408 - DNA, 31 bp, Artificial Sequence
  Description of Artificial Sequence:  Enzymatic Nucleic Acid
catagcagggctagctacaacgaaggatgca

SEQ ID NO: 9409 - DNA, 31 bp, Artificial Sequence
  Description of Artificial Sequence:  Enzymatic Nucleic Acid
aggcatagggctagctacaacgaagcaggat

SEQ ID NO: 9410 - DNA, 31 bp, Artificial Sequence
  Description of Artificial Sequence:  Enzymatic Nucleic Acid
agatgaggggctagctacaacgaatagcagc

SEQ ID NO: 9411 - DNA, 31 bp, Artificial Sequence
  Description of Artificial Sequence:  Enzymatic Nucleic Acid
caaacgggggctagctacaacgaaacatacc

SEQ ID NO: 9412 - DNA, 31 bp, Artificial Sequence
  Description of Artificial Sequence:  Enzymatic Nucleic Acid
aggttttgggctagctacaacgaatggtccg

SEQ ID NO: 9413 - DNA, 31 bp, Artificial Sequence
  Description of Artificial Sequence:  Enzymatic Nucleic Acid
gagttgtgggctagctacaacgaaggttttg

SEQ ID NO: 9414 - DNA, 31 bp, Artificial Sequence
  Description of Artificial Sequence:  Enzymatic Nucleic Acid
tccttgagggctagctacaacgaaggagttg

SEQ ID NO: 9415 - DNA, 31 bp, Artificial Sequence
  Description of Artificial Sequence:  Enzymatic Nucleic Acid
ttgtacagggctagctacaacgaaacatgag

SEQ ID NO: 9416 - DNA, 31 bp, Artificial Sequence
  Description of Artificial Sequence:  Enzymatic Nucleic Acid
tacaggtgggctagctacaacgaagtttccg

SEQ ID NO: 9417 - DNA, 31 bp, Artificial Sequence
  Description of Artificial Sequence:  Enzymatic Nucleic Acid
gtattttgggctagctacaacgagaaagccc

SEQ ID NO: 9418 - DNA, 31 bp, Artificial Sequence
  Description of Artificial Sequence:  Enzymatic Nucleic Acid
acaaatggggctagctacaacgaactagtaa

SEQ ID NO: 9419 - DNA, 31 bp, Artificial Sequence
  Description of Artificial Sequence:  Enzymatic Nucleic Acid
aacagcggggctagctacaacgaataaaggg

SEQ ID NO: 9420 - DNA, 31 bp, Artificial Sequence
  Description of Artificial Sequence:  Enzymatic Nucleic Acid
ggtaacagggctagctacaacgaggcataaa

SEQ ID NO: 9421 - DNA, 31 bp, Artificial Sequence
  Description of Artificial Sequence:  Enzymatic Nucleic Acid
tcctgtggggctagctacaacgaaatgtgcc

SEQ ID NO: 9422 - DNA, 31 bp, Artificial Sequence
  Description of Artificial Sequence:  Enzymatic Nucleic Acid
aggggcggggctagctacaacgaaaacccca

SEQ ID NO: 9423 - DNA, 31 bp, Artificial Sequence
  Description of Artificial Sequence:  Enzymatic Nucleic Acid
gaaaggggggctagctacaacgaggcaaacc

SEQ ID NO: 9424 - DNA, 31 bp, Artificial Sequence
  Description of Artificial Sequence:  Enzymatic Nucleic Acid
ccacattgggctagctacaacgagtgaaagg

SEQ ID NO: 9425 - DNA, 31 bp, Artificial Sequence
  Description of Artificial Sequence:  Enzymatic Nucleic Acid
cattaaagggctagctacaacgaagaatatc

SEQ ID NO: 9426 - DNA, 31 bp, Artificial Sequence
  Description of Artificial Sequence:  Enzymatic Nucleic Acid
tataaaggggctagctacaacgaattaaagc

SEQ ID NO: 9427 - DNA, 31 bp, Artificial Sequence
  Description of Artificial Sequence:  Enzymatic Nucleic Acid
tatgcatgggctagctacaacgaatataaag

SEQ ID NO: 9428 - DNA, 31 bp, Artificial Sequence
  Description of Artificial Sequence:  Enzymatic Nucleic Acid
cttgtatgggctagctacaacgaatgcatat

SEQ ID NO: 9429 - DNA, 31 bp, Artificial Sequence
  Description of Artificial Sequence:  Enzymatic Nucleic Acid
taagttggggctagctacaacgagagaaagt

SEQ ID NO: 9430 - DNA, 31 bp, Artificial Sequence
  Description of Artificial Sequence:  Enzymatic Nucleic Acid
ttgccgagggctagctacaacgaaacggggt

SEQ ID NO: 9431 - DNA, 31 bp, Artificial Sequence
  Description of Artificial Sequence:  Enzymatic Nucleic Acid
acacttggggctagctacaacgaatagacca

SEQ ID NO: 9432 - DNA, 31 bp, Artificial Sequence
  Description of Artificial Sequence:  Enzymatic Nucleic Acid
tgcgtcagggctagctacaacgaaaacactt

SEQ ID NO: 9433 - DNA, 31 bp, Artificial Sequence
  Description of Artificial Sequence:  Enzymatic Nucleic Acid
gggggttgggctagctacaacgagtcagcaa

SEQ ID NO: 9434 - DNA, 31 bp, Artificial Sequence
  Description of Artificial Sequence:  Enzymatic Nucleic Acid
cacgcatgggctagctacaacgagctgatgg

SEQ ID NO: 9435 - DNA, 31 bp, Artificial Sequence
  Description of Artificial Sequence:  Enzymatic Nucleic Acid
gttccacgggctagctacaacgaatgcgctg

SEQ ID NO: 9436 - DNA, 31 bp, Artificial Sequence
  Description of Artificial Sequence:  Enzymatic Nucleic Acid
tggatcggggctagctacaacgaagaggaga

SEQ ID NO: 9437 - DNA, 31 bp, Artificial Sequence
  Description of Artificial Sequence:  Enzymatic Nucleic Acid
gagttccgggctagctacaacgaggtatgga

SEQ ID NO: 9438 - DNA, 31 bp, Artificial Sequence
  Description of Artificial Sequence:  Enzymatic Nucleic Acid
aaaacaagggctagctacaacgaggctagga

SEQ ID NO: 9439 - DNA, 31 bp, Artificial Sequence
  Description of Artificial Sequence:  Enzymatic Nucleic Acid
gctgcgagggctagctacaacgaaaaacaag

SEQ ID NO: 9440 - DNA, 31 bp, Artificial Sequence
  Description of Artificial Sequence:  Enzymatic Nucleic Acid
acctgctgggctagctacaacgagagcaaaa

SEQ ID NO: 9441 - DNA, 31 bp, Artificial Sequence
  Description of Artificial Sequence:  Enzymatic Nucleic Acid
cgggagagggctagctacaacgaacgacaga

SEQ ID NO: 9442 - DNA, 31 bp, Artificial Sequence
  Description of Artificial Sequence:  Enzymatic Nucleic Acid
tatatttgggctagctacaacgagggagagc

SEQ ID NO: 9443 - DNA, 31 bp, Artificial Sequence
  Description of Artificial Sequence:  Enzymatic Nucleic Acid
cagcctagggctagctacaacgaagccatgg

SEQ ID NO: 9444 - DNA, 31 bp, Artificial Sequence
  Description of Artificial Sequence:  Enzymatic Nucleic Acid
gttggcagggctagctacaacgaacagccta

SEQ ID NO: 9445 - DNA, 31 bp, Artificial Sequence
  Description of Artificial Sequence:  Enzymatic Nucleic Acid
ccagttggggctagctacaacgaagcacagc

SEQ ID NO: 9446 - DNA, 31 bp, Artificial Sequence
  Description of Artificial Sequence:  Enzymatic Nucleic Acid
acgtcccgggctagctacaacgagtaggatc

SEQ ID NO: 9447 - DNA, 31 bp, Artificial Sequence
  Description of Artificial Sequence:  Enzymatic Nucleic Acid
ggattcagggctagctacaacgagccgacgg

SEQ ID NO: 9448 - DNA, 31 bp, Artificial Sequence
  Description of Artificial Sequence:  Enzymatic Nucleic Acid
gtcgtccgggctagctacaacgagggattca

SEQ ID NO: 9449 - DNA, 31 bp, Artificial Sequence
  Description of Artificial Sequence:  Enzymatic Nucleic Acid
gccccaagggctagctacaacgaggccccgg

SEQ ID NO: 9450 - DNA, 31 bp, Artificial Sequence
  Description of Artificial Sequence:  Enzymatic Nucleic Acid
gaagcgggggctagctacaacgaggtagagc

SEQ ID NO: 9451 - DNA, 31 bp, Artificial Sequence
  Description of Artificial Sequence:  Enzymatic Nucleic Acid
cggagaagggctagctacaacgagggcggta

SEQ ID NO: 9452 - DNA, 31 bp, Artificial Sequence
  Description of Artificial Sequence:  Enzymatic Nucleic Acid
acaataggggctagctacaacgaggagaagc

SEQ ID NO: 9453 - DNA, 31 bp, Artificial Sequence
  Description of Artificial Sequence:  Enzymatic Nucleic Acid
gagaggtgggctagctacaacgagccccgtg

SEQ ID NO: 9454 - DNA, 31 bp, Artificial Sequence
  Description of Artificial Sequence:  Enzymatic Nucleic Acid
ggagtccgggctagctacaacgagtaaagag

SEQ ID NO: 9455 - DNA, 31 bp, Artificial Sequence
  Description of Artificial Sequence:  Enzymatic Nucleic Acid
tgagaaggggctagctacaacgaacagacgg

SEQ ID NO: 9456 - DNA, 31 bp, Artificial Sequence
  Description of Artificial Sequence:  Enzymatic Nucleic Acid
cggtccggggctagctacaacgaagatgaga

SEQ ID NO: 9457 - DNA, 31 bp, Artificial Sequence
  Description of Artificial Sequence:  Enzymatic Nucleic Acid
gcgaagtgggctagctacaacgaacacggtc

SEQ ID NO: 9458 - DNA, 31 bp, Artificial Sequence
  Description of Artificial Sequence:  Enzymatic Nucleic Acid
aggtgaagggctagctacaacgagaagtgca

SEQ ID NO: 9459 - DNA, 31 bp, Artificial Sequence
  Description of Artificial Sequence:  Enzymatic Nucleic Acid
gcgacgtgggctagctacaacgaagaggtga

SEQ ID NO: 9460 - DNA, 31 bp, Artificial Sequence
  Description of Artificial Sequence:  Enzymatic Nucleic Acid
tctccatgggctagctacaacgagacgtgca

SEQ ID NO: 9461 - DNA, 31 bp, Artificial Sequence
  Description of Artificial Sequence:  Enzymatic Nucleic Acid
cctgtgggggctagctacaacgagttcacgg

SEQ ID NO: 9462 - DNA, 31 bp, Artificial Sequence
  Description of Artificial Sequence:  Enzymatic Nucleic Acid
accttgggggctagctacaacgaaggttcct

SEQ ID NO: 9463 - DNA, 31 bp, Artificial Sequence
  Description of Artificial Sequence:  Enzymatic Nucleic Acid
ctcttatgggctagctacaacgaaagacctt

SEQ ID NO: 9464 - DNA, 31 bp, Artificial Sequence
  Description of Artificial Sequence:  Enzymatic Nucleic Acid
aaaagttgggctagctacaacgaatggtgct

SEQ ID NO: 9465 - DNA, 31 bp, Artificial Sequence
  Description of Artificial Sequence:  Enzymatic Nucleic Acid
tgattaggggctagctacaacgaagaggtga

SEQ ID NO: 9466 - DNA, 31 bp, Artificial Sequence
  Description of Artificial Sequence:  Enzymatic Nucleic Acid
acccaaggggctagctacaacgaacagcttg

SEQ ID NO: 9467 - DNA, 31 bp, Artificial Sequence
  Description of Artificial Sequence:  Enzymatic Nucleic Acid
tcagaaggggctagctacaacgaaaaaaaga

SEQ ID NO: 9468 - DNA, 31 bp, Artificial Sequence
  Description of Artificial Sequence:  Enzymatic Nucleic Acid
agcagaggggctagctacaacgaggtgtcga

SEQ ID NO: 9469 - DNA, 31 bp, Artificial Sequence
  Description of Artificial Sequence:  Enzymatic Nucleic Acid
atacagagggctagctacaacgaagaggcgg

SEQ ID NO: 9470 - DNA, 31 bp, Artificial Sequence
  Description of Artificial Sequence:  Enzymatic Nucleic Acid
gaggagtgggctagctacaacgagaatccac

SEQ ID NO: 9471 - DNA, 31 bp, Artificial Sequence
  Description of Artificial Sequence:  Enzymatic Nucleic Acid
tctatatgggctagctacaacgaaggaggag

SEQ ID NO: 9472 - DNA, 31 bp, Artificial Sequence
  Description of Artificial Sequence:  Enzymatic Nucleic Acid
gataggggggctagctacaacgaatttggtg

SEQ ID NO: 9473 - DNA, 31 bp, Artificial Sequence
  Description of Artificial Sequence:  Enzymatic Nucleic Acid
ctgcgaggggctagctacaacgagagggagt

SEQ ID NO: 9474 - DNA, 31 bp, Artificial Sequence
  Description of Artificial Sequence:  Enzymatic Nucleic Acid
ttcgtctgggctagctacaacgagaggcgag

SEQ ID NO: 9475 - DNA, 31 bp, Artificial Sequence
  Description of Artificial Sequence:  Enzymatic Nucleic Acid
cgacgcggggctagctacaacgagattgaga

SEQ ID NO: 9476 - DNA, 31 bp, Artificial Sequence
  Description of Artificial Sequence:  Enzymatic Nucleic Acid
ctgcgacgggctagctacaacgaggcgattg

SEQ ID NO: 9477 - DNA, 31 bp, Artificial Sequence
  Description of Artificial Sequence:  Enzymatic Nucleic Acid
atcttctgggctagctacaacgagacgcggc

SEQ ID NO: 9478 - DNA, 31 bp, Artificial Sequence
  Description of Artificial Sequence:  Enzymatic Nucleic Acid
gattaaagggctagctacaacgaaaggtacc

SEQ ID NO: 9479 - DNA, 31 bp, Artificial Sequence
  Description of Artificial Sequence:  Enzymatic Nucleic Acid
tcctcctgggctagctacaacgaaaatgaat

SEQ ID NO: 9480 - DNA, 31 bp, Artificial Sequence
  Description of Artificial Sequence:  Enzymatic Nucleic Acid
ctagcaggggctagctacaacgaatagttaa

SEQ ID NO: 9481 - DNA, 31 bp, Artificial Sequence
  Description of Artificial Sequence:  Enzymatic Nucleic Acid
aaacctagggctagctacaacgaaggcatag

SEQ ID NO: 9482 - DNA, 31 bp, Artificial Sequence
  Description of Artificial Sequence:  Enzymatic Nucleic Acid
tctaagggggctagctacaacgaaaatattt

SEQ ID NO: 9483 - DNA, 31 bp, Artificial Sequence
  Description of Artificial Sequence:  Enzymatic Nucleic Acid
taatgtcgggctagctacaacgagtctggaa

SEQ ID NO: 9484 - DNA, 31 bp, Artificial Sequence
  Description of Artificial Sequence:  Enzymatic Nucleic Acid
aaatgaggggctagctacaacgagctacgtg

SEQ ID NO: 9485 - DNA, 31 bp, Artificial Sequence
  Description of Artificial Sequence:  Enzymatic Nucleic Acid
gtgacccgggctagctacaacgaaaaatgag

SEQ ID NO: 9486 - DNA, 31 bp, Artificial Sequence
  Description of Artificial Sequence:  Enzymatic Nucleic Acid
tttgaatgggctagctacaacgaagggtcca

SEQ ID NO: 9487 - DNA, 31 bp, Artificial Sequence
  Description of Artificial Sequence:  Enzymatic Nucleic Acid
tccttgtgggctagctacaacgagggttgag

SEQ ID NO: 9488 - DNA, 31 bp, Artificial Sequence
  Description of Artificial Sequence:  Enzymatic Nucleic Acid
cttgttggggctagctacaacgagtccggcc

SEQ ID NO: 9489 - DNA, 31 bp, Artificial Sequence
  Description of Artificial Sequence:  Enzymatic Nucleic Acid
gccctgagggctagctacaacgagtgagggc

SEQ ID NO: 9490 - DNA, 31 bp, Artificial Sequence
  Description of Artificial Sequence:  Enzymatic Nucleic Acid
gctgctggggctagctacaacgaacagttgt

SEQ ID NO: 9491 - DNA, 31 bp, Artificial Sequence
  Description of Artificial Sequence:  Enzymatic Nucleic Acid
ggtggaggggctagctacaacgaaggaggag

SEQ ID NO: 9492 - DNA, 31 bp, Artificial Sequence
  Description of Artificial Sequence:  Enzymatic Nucleic Acid
ggaaagtaggctagctacaacgaagggccct

SEQ ID NO: 9493 - DNA, 31 bp, Artificial Sequence
  Description of Artificial Sequence:  Enzymatic Nucleic Acid
ggcagagaggctagctacaacgaagtattct

SEQ ID NO: 9494 - DNA, 31 bp, Artificial Sequence
  Description of Artificial Sequence:  Enzymatic Nucleic Acid
gttcggtaggctagctacaacgaagggtccc

SEQ ID NO: 9495 - DNA, 31 bp, Artificial Sequence
  Description of Artificial Sequence:  Enzymatic Nucleic Acid
gcctgtaaggctagctacaacgaacgagcag

SEQ ID NO: 9496 - DNA, 31 bp, Artificial Sequence
  Description of Artificial Sequence:  Enzymatic Nucleic Acid
tttgtcaaggctagctacaacgaaagaaaaa

SEQ ID NO: 9497 - DNA, 31 bp, Artificial Sequence
  Description of Artificial Sequence:  Enzymatic Nucleic Acid
ccaagacaggctagctacaacgaacgggtgt

SEQ ID NO: 9498 - DNA, 31 bp, Artificial Sequence
  Description of Artificial Sequence:  Enzymatic Nucleic Acid
ggccaagaggctagctacaacgaacacgggt

SEQ ID NO: 9499 - DNA, 31 bp, Artificial Sequence
  Description of Artificial Sequence:  Enzymatic Nucleic Acid
gaggacaaggctagctacaacgaaggttggt

SEQ ID NO: 9500 - DNA, 31 bp, Artificial Sequence
  Description of Artificial Sequence:  Enzymatic Nucleic Acid
ttggaggaggctagctacaacgaaacaggtt

SEQ ID NO: 9501 - DNA, 31 bp, Artificial Sequence
  Description of Artificial Sequence:  Enzymatic Nucleic Acid
aaccaggaggctagctacaacgaaaattgga

SEQ ID NO: 9502 - DNA, 31 bp, Artificial Sequence
  Description of Artificial Sequence:  Enzymatic Nucleic Acid
cgcagacaggctagctacaacgaatccagcg

SEQ ID NO: 9503 - DNA, 31 bp, Artificial Sequence
  Description of Artificial Sequence:  Enzymatic Nucleic Acid
gccgcagaggctagctacaacgaacatccag

SEQ ID NO: 9504 - DNA, 31 bp, Artificial Sequence
  Description of Artificial Sequence:  Enzymatic Nucleic Acid
agaaccaaggctagctacaacgaaagaagat

SEQ ID NO: 9505 - DNA, 31 bp, Artificial Sequence
  Description of Artificial Sequence:  Enzymatic Nucleic Acid
acgggcaaggctagctacaacgaataccttg

SEQ ID NO: 9506 - DNA, 31 bp, Artificial Sequence
  Description of Artificial Sequence:  Enzymatic Nucleic Acid
ttagaggaggctagctacaacgaaaacgggc

SEQ ID NO: 9507 - DNA, 31 bp, Artificial Sequence
  Description of Artificial Sequence:  Enzymatic Nucleic Acid
gagggaaaggctagctacaacgaatagaggt

SEQ ID NO: 9508 - DNA, 31 bp, Artificial Sequence
  Description of Artificial Sequence:  Enzymatic Nucleic Acid
tacagcaaggctagctacaacgaatgaggga

SEQ ID NO: 9509 - DNA, 31 bp, Artificial Sequence
  Description of Artificial Sequence:  Enzymatic Nucleic Acid
gttttgtaggctagctacaacgaagcaacat

SEQ ID NO: 9510 - DNA, 31 bp, Artificial Sequence
  Description of Artificial Sequence:  Enzymatic Nucleic Acid
tgggaataggctagctacaacgaaggtgcag

SEQ ID NO: 9511 - DNA, 31 bp, Artificial Sequence
  Description of Artificial Sequence:  Enzymatic Nucleic Acid
ccactgaaggctagctacaacgaaaatggca

SEQ ID NO: 9512 - DNA, 31 bp, Artificial Sequence
  Description of Artificial Sequence:  Enzymatic Nucleic Acid
aagccagaggctagctacaacgaagtggggg

SEQ ID NO: 9513 - DNA, 31 bp, Artificial Sequence
  Description of Artificial Sequence:  Enzymatic Nucleic Acid
caaaaccaggctagctacaacgaatcatcca

SEQ ID NO: 9514 - DNA, 31 bp, Artificial Sequence
  Description of Artificial Sequence:  Enzymatic Nucleic Acid
atgttgtaggctagctacaacgaagacttgg

SEQ ID NO: 9515 - DNA, 31 bp, Artificial Sequence
  Description of Artificial Sequence:  Enzymatic Nucleic Acid
attggtaaggctagctacaacgaagcggcat

SEQ ID NO: 9516 - DNA, 31 bp, Artificial Sequence
  Description of Artificial Sequence:  Enzymatic Nucleic Acid
cccaaagaggctagctacaacgaaaaagaaa

SEQ ID NO: 9517 - DNA, 31 bp, Artificial Sequence
  Description of Artificial Sequence:  Enzymatic Nucleic Acid
cccaattaggctagctacaacgaatatccca

SEQ ID NO: 9518 - DNA, 31 bp, Artificial Sequence
  Description of Artificial Sequence:  Enzymatic Nucleic Acid
tttttgtaggctagctacaacgaaatatgtt

SEQ ID NO: 9519 - DNA, 31 bp, Artificial Sequence
  Description of Artificial Sequence:  Enzymatic Nucleic Acid
ctaaaacaggctagctacaacgaattttgat

SEQ ID NO: 9520 - DNA, 31 bp, Artificial Sequence
  Description of Artificial Sequence:  Enzymatic Nucleic Acid
tcctaaaaggctagctacaacgaacattttg

SEQ ID NO: 9521 - DNA, 31 bp, Artificial Sequence
  Description of Artificial Sequence:  Enzymatic Nucleic Acid
cctgtttaggctagctacaacgaaggaagtt

SEQ ID NO: 9522 - DNA, 31 bp, Artificial Sequence
  Description of Artificial Sequence:  Enzymatic Nucleic Acid
ttcgttgaggctagctacaacgaatactttc

SEQ ID NO: 9523 - DNA, 31 bp, Artificial Sequence
  Description of Artificial Sequence:  Enzymatic Nucleic Acid
aagacccaggctagctacaacgaaattcgtt

SEQ ID NO: 9524 - DNA, 31 bp, Artificial Sequence
  Description of Artificial Sequence:  Enzymatic Nucleic Acid
aatatccaggctagctacaacgaattgcgtg

SEQ ID NO: 9525 - DNA, 31 bp, Artificial Sequence
  Description of Artificial Sequence:  Enzymatic Nucleic Acid
aaggttcaggctagctacaacgaatactgtt

SEQ ID NO: 9526 - DNA, 31 bp, Artificial Sequence
  Description of Artificial Sequence:  Enzymatic Nucleic Acid
tcagcaaaggctagctacaacgaacttggca

SEQ ID NO: 9527 - DNA, 31 bp, Artificial Sequence
  Description of Artificial Sequence:  Enzymatic Nucleic Acid
aggagacaggctagctacaacgaaaaggttc

SEQ ID NO: 9528 - DNA, 31 bp, Artificial Sequence
  Description of Artificial Sequence:  Enzymatic Nucleic Acid
agaggagaggctagctacaacgaacaaaggt

SEQ ID NO: 9529 - DNA, 31 bp, Artificial Sequence
  Description of Artificial Sequence:  Enzymatic Nucleic Acid
gagcaaaaggctagctacaacgaaagcggct

SEQ ID NO: 9530 - DNA, 31 bp, Artificial Sequence
  Description of Artificial Sequence:  Enzymatic Nucleic Acid
gagcacgaggctagctacaacgaagaattgt

SEQ ID NO: 9531 - DNA, 31 bp, Artificial Sequence
  Description of Artificial Sequence:  Enzymatic Nucleic Acid
tggcagcaggctagctacaacgaagcctagc

SEQ ID NO: 9532 - DNA, 31 bp, Artificial Sequence
  Description of Artificial Sequence:  Enzymatic Nucleic Acid
gacgtaaaggctagctacaacgaaaaggacg

SEQ ID NO: 9533 - DNA, 31 bp, Artificial Sequence
  Description of Artificial Sequence:  Enzymatic Nucleic Acid
ggtcggtaggctagctacaacgaaataggcg

SEQ ID NO: 9534 - DNA, 31 bp, Artificial Sequence
  Description of Artificial Sequence:  Enzymatic Nucleic Acid
agaaggcaggctagctacaacgaagacgggg

SEQ ID NO: 9535 - DNA, 31 bp, Artificial Sequence
  Description of Artificial Sequence:  Enzymatic Nucleic Acid
gaagtgcaggctagctacaacgaacggtccg

SEQ ID NO: 9536 - DNA, 31 bp, Artificial Sequence
  Description of Artificial Sequence:  Enzymatic Nucleic Acid
gtcgttgaggctagctacaacgaattgctga

SEQ ID NO: 9537 - DNA, 31 bp, Artificial Sequence
  Description of Artificial Sequence:  Enzymatic Nucleic Acid
taaacacaggctagctacaacgaagtctttg

SEQ ID NO: 9538 - DNA, 31 bp, Artificial Sequence
  Description of Artificial Sequence:  Enzymatic Nucleic Acid
attaaacaggctagctacaacgaacagtctt

SEQ ID NO: 9539 - DNA, 31 bp, Artificial Sequence
  Description of Artificial Sequence:  Enzymatic Nucleic Acid
tcattaaaggctagctacaacgaacacagtc

SEQ ID NO: 9540 - DNA, 31 bp, Artificial Sequence
  Description of Artificial Sequence:  Enzymatic Nucleic Acid
tcctagtaggctagctacaacgaaaagacct

SEQ ID NO: 9541 - DNA, 31 bp, Artificial Sequence
  Description of Artificial Sequence:  Enzymatic Nucleic Acid
tatgcctaggctagctacaacgaagcctcct

SEQ ID NO: 9542 - DNA, 31 bp, Artificial Sequence
  Description of Artificial Sequence:  Enzymatic Nucleic Acid
ggtgaacaggctagctacaacgaaccaattt

SEQ ID NO: 9543 - DNA, 31 bp, Artificial Sequence
  Description of Artificial Sequence:  Enzymatic Nucleic Acid
ctggtgaaggctagctacaacgaacaccaat

SEQ ID NO: 9544 - DNA, 31 bp, Artificial Sequence
  Description of Artificial Sequence:  Enzymatic Nucleic Acid
gacatgaaggctagctacaacgaatgagatg

SEQ ID NO: 9545 - DNA, 31 bp, Artificial Sequence
  Description of Artificial Sequence:  Enzymatic Nucleic Acid
cagtaggaggctagctacaacgaatgaacat

SEQ ID NO: 9546 - DNA, 31 bp, Artificial Sequence
  Description of Artificial Sequence:  Enzymatic Nucleic Acid
ggcttgaaggctagctacaacgaagtaggac

SEQ ID NO: 9547 - DNA, 31 bp, Artificial Sequence
  Description of Artificial Sequence:  Enzymatic Nucleic Acid
ccaaggcaggctagctacaacgaagcttgga

SEQ ID NO: 9548 - DNA, 31 bp, Artificial Sequence
  Description of Artificial Sequence:  Enzymatic Nucleic Acid
taactccaggctagctacaacgaagaagctc

SEQ ID NO: 9549 - DNA, 31 bp, Artificial Sequence
  Description of Artificial Sequence:  Enzymatic Nucleic Acid
ccccgataggctagctacaacgaagagcaga

SEQ ID NO: 9550 - DNA, 31 bp, Artificial Sequence
  Description of Artificial Sequence:  Enzymatic Nucleic Acid
gaggtgaaggctagctacaacgaaatgttcc

SEQ ID NO: 9551 - DNA, 31 bp, Artificial Sequence
  Description of Artificial Sequence:  Enzymatic Nucleic Acid
ccccaacaggctagctacaacgaagaatagc

SEQ ID NO: 9552 - DNA, 31 bp, Artificial Sequence
  Description of Artificial Sequence:  Enzymatic Nucleic Acid
caccccaaggctagctacaacgaacagaata

SEQ ID NO: 9553 - DNA, 31 bp, Artificial Sequence
  Description of Artificial Sequence:  Enzymatic Nucleic Acid
aacgttgaggctagctacaacgaatagctga

SEQ ID NO: 9554 - DNA, 31 bp, Artificial Sequence
  Description of Artificial Sequence:  Enzymatic Nucleic Acid
tgaaaccaggctagctacaacgaaatagttg

SEQ ID NO: 9555 - DNA, 31 bp, Artificial Sequence
  Description of Artificial Sequence:  Enzymatic Nucleic Acid
aagtaagaggctagctacaacgaaggaaatg

SEQ ID NO: 9556 - DNA, 31 bp, Artificial Sequence
  Description of Artificial Sequence:  Enzymatic Nucleic Acid
ttcaagaaggctagctacaacgaagtttctc

SEQ ID NO: 9557 - DNA, 31 bp, Artificial Sequence
  Description of Artificial Sequence:  Enzymatic Nucleic Acid
ccaaaagaggctagctacaacgaaccaaata

SEQ ID NO: 9558 - DNA, 31 bp, Artificial Sequence
  Description of Artificial Sequence:  Enzymatic Nucleic Acid
cgaatccaggctagctacaacgaactccaaa

SEQ ID NO: 9559 - DNA, 31 bp, Artificial Sequence
  Description of Artificial Sequence:  Enzymatic Nucleic Acid
tctaacaaggctagctacaacgaagtagttt

SEQ ID NO: 9560 - DNA, 31 bp, Artificial Sequence
  Description of Artificial Sequence:  Enzymatic Nucleic Acid
tcgtctaaggctagctacaacgaaacagtag

SEQ ID NO: 9561 - DNA, 31 bp, Artificial Sequence
  Description of Artificial Sequence:  Enzymatic Nucleic Acid
aatactaaggctagctacaacgaattgagat

SEQ ID NO: 9562 - DNA, 31 bp, Artificial Sequence
  Description of Artificial Sequence:  Enzymatic Nucleic Acid
tctatcaaggctagctacaacgaaatgtcct

SEQ ID NO: 9563 - DNA, 31 bp, Artificial Sequence
  Description of Artificial Sequence:  Enzymatic Nucleic Acid
attgcttaggctagctacaacgaatctatca

SEQ ID NO: 9564 - DNA, 31 bp, Artificial Sequence
  Description of Artificial Sequence:  Enzymatic Nucleic Acid
gggccccaggctagctacaacgaaaattgct

SEQ ID NO: 9565 - DNA, 31 bp, Artificial Sequence
  Description of Artificial Sequence:  Enzymatic Nucleic Acid
tttagtaaggctagctacaacgaattgggat

SEQ ID NO: 9566 - DNA, 31 bp, Artificial Sequence
  Description of Artificial Sequence:  Enzymatic Nucleic Acid
attaactaggctagctacaacgaatactctg

SEQ ID NO: 9567 - DNA, 31 bp, Artificial Sequence
  Description of Artificial Sequence:  Enzymatic Nucleic Acid
attggggaggctagctacaacgaagaaagat

SEQ ID NO: 9568 - DNA, 31 bp, Artificial Sequence
  Description of Artificial Sequence:  Enzymatic Nucleic Acid
caccccaaggctagctacaacgaagtccccc

SEQ ID NO: 9569 - DNA, 31 bp, Artificial Sequence
  Description of Artificial Sequence:  Enzymatic Nucleic Acid
tgctggcaggctagctacaacgaagttgtga

SEQ ID NO: 9570 - DNA, 31 bp, Artificial Sequence
  Description of Artificial Sequence:  Enzymatic Nucleic Acid
ggccctgaggctagctacaacgatctgggat

SEQ ID NO: 9571 - DNA, 31 bp, Artificial Sequence
  Description of Artificial Sequence:  Enzymatic Nucleic Acid
gtacagggggctagctacaacgacctgactc

SEQ ID NO: 9572 - DNA, 31 bp, Artificial Sequence
  Description of Artificial Sequence:  Enzymatic Nucleic Acid
tggagccaggctagctacaacgacagcagga

SEQ ID NO: 9573 - DNA, 31 bp, Artificial Sequence
  Description of Artificial Sequence:  Enzymatic Nucleic Acid
aactggagggctagctacaacgacaccagca

SEQ ID NO: 9574 - DNA, 31 bp, Artificial Sequence
  Description of Artificial Sequence:  Enzymatic Nucleic Acid
ttcctgaaggctagctacaacgatggagcca

SEQ ID NO: 9575 - DNA, 31 bp, Artificial Sequence
  Description of Artificial Sequence:  Enzymatic Nucleic Acid
agggctcaggctagctacaacgatgttcctg

SEQ ID NO: 9576 - DNA, 31 bp, Artificial Sequence
  Description of Artificial Sequence:  Enzymatic Nucleic Acid
gagcagggggctagctacaacgatcactgtt

SEQ ID NO: 9577 - DNA, 31 bp, Artificial Sequence
  Description of Artificial Sequence:  Enzymatic Nucleic Acid
aagattgaggctagctacaacgagatatggc

SEQ ID NO: 9578 - DNA, 31 bp, Artificial Sequence
  Description of Artificial Sequence:  Enzymatic Nucleic Acid
ctgtaacaggctagctacaacgagagcaggg

SEQ ID NO: 9579 - DNA, 31 bp, Artificial Sequence
  Description of Artificial Sequence:  Enzymatic Nucleic Acid
aaaccccgggctagctacaacgactgtaaca

SEQ ID NO: 9580 - DNA, 31 bp, Artificial Sequence
  Description of Artificial Sequence:  Enzymatic Nucleic Acid
aagaaaaaggctagctacaacgacccgcctg

SEQ ID NO: 9581 - DNA, 31 bp, Artificial Sequence
  Description of Artificial Sequence:  Enzymatic Nucleic Acid
agtctagaggctagctacaacgatctgtggt

SEQ ID NO: 9582 - DNA, 31 bp, Artificial Sequence
  Description of Artificial Sequence:  Enzymatic Nucleic Acid
gtccaccaggctagctacaacgagagtctag

SEQ ID NO: 9583 - DNA, 31 bp, Artificial Sequence
  Description of Artificial Sequence:  Enzymatic Nucleic Acid
gaagtccaggctagctacaacgacacgagtc

SEQ ID NO: 9584 - DNA, 31 bp, Artificial Sequence
  Description of Artificial Sequence:  Enzymatic Nucleic Acid
aagacacaggctagctacaacgagggtgttc

SEQ ID NO: 9585 - DNA, 31 bp, Artificial Sequence
  Description of Artificial Sequence:  Enzymatic Nucleic Acid
aattttggggctagctacaacgacaagacac

SEQ ID NO: 9586 - DNA, 31 bp, Artificial Sequence
  Description of Artificial Sequence:  Enzymatic Nucleic Acid
atttgggaggctagctacaacgatgcgaatt

SEQ ID NO: 9587 - DNA, 31 bp, Artificial Sequence
  Description of Artificial Sequence:  Enzymatic Nucleic Acid
gtgagtgaggctagctacaacgatggagatt

SEQ ID NO: 9588 - DNA, 31 bp, Artificial Sequence
  Description of Artificial Sequence:  Enzymatic Nucleic Acid
agcgataaggctagctacaacgacaggacaa

SEQ ID NO: 9589 - DNA, 31 bp, Artificial Sequence
  Description of Artificial Sequence:  Enzymatic Nucleic Acid
ataaaacgggctagctacaacgacgcagaca

SEQ ID NO: 9590 - DNA, 31 bp, Artificial Sequence
  Description of Artificial Sequence:  Enzymatic Nucleic Acid
tgataaaaggctagctacaacgagccgcaga

SEQ ID NO: 9591 - DNA, 31 bp, Artificial Sequence
  Description of Artificial Sequence:  Enzymatic Nucleic Acid
cagaagaaggctagctacaacgacaacaaga

SEQ ID NO: 9592 - DNA, 31 bp, Artificial Sequence
  Description of Artificial Sequence:  Enzymatic Nucleic Acid
gcaacataggctagctacaacgacttgatag

SEQ ID NO: 9593 - DNA, 31 bp, Artificial Sequence
  Description of Artificial Sequence:  Enzymatic Nucleic Acid
aggacaaaggctagctacaacgagggcaaca

SEQ ID NO: 9594 - DNA, 31 bp, Artificial Sequence
  Description of Artificial Sequence:  Enzymatic Nucleic Acid
gtccggtgggctagctacaacgatggttgtt

SEQ ID NO: 9595 - DNA, 31 bp, Artificial Sequence
  Description of Artificial Sequence:  Enzymatic Nucleic Acid
tgcgaaagggctagctacaacgaccaagatg

SEQ ID NO: 9596 - DNA, 31 bp, Artificial Sequence
  Description of Artificial Sequence:  Enzymatic Nucleic Acid
gaggcccaggctagctacaacgatcccatag

SEQ ID NO: 9597 - DNA, 31 bp, Artificial Sequence
  Description of Artificial Sequence:  Enzymatic Nucleic Acid
gactgaggggctagctacaacgaccactccc

SEQ ID NO: 9598 - DNA, 31 bp, Artificial Sequence
  Description of Artificial Sequence:  Enzymatic Nucleic Acid
gaaacggaggctagctacaacgatgaggccc

SEQ ID NO: 9599 - DNA, 31 bp, Artificial Sequence
  Description of Artificial Sequence:  Enzymatic Nucleic Acid
aagagaaaggctagctacaacgaggactgag

SEQ ID NO: 9600 - DNA, 31 bp, Artificial Sequence
  Description of Artificial Sequence:  Enzymatic Nucleic Acid
aaactgagggctagctacaacgacaagagaa

SEQ ID NO: 9601 - DNA, 31 bp, Artificial Sequence
  Description of Artificial Sequence:  Enzymatic Nucleic Acid
ctagtaaaggctagctacaacgatgagccaa

SEQ ID NO: 9602 - DNA, 31 bp, Artificial Sequence
  Description of Artificial Sequence:  Enzymatic Nucleic Acid
aaatggcaggctagctacaacgatagtaaac

SEQ ID NO: 9603 - DNA, 31 bp, Artificial Sequence
  Description of Artificial Sequence:  Enzymatic Nucleic Acid
acgaaccaggctagctacaacgatgaacaaa

SEQ ID NO: 9604 - DNA, 31 bp, Artificial Sequence
  Description of Artificial Sequence:  Enzymatic Nucleic Acid
cctacgaaggctagctacaacgacactgaac

SEQ ID NO: 9605 - DNA, 31 bp, Artificial Sequence
  Description of Artificial Sequence:  Enzymatic Nucleic Acid
aagccctaggctagctacaacgagaaccact

SEQ ID NO: 9606 - DNA, 31 bp, Artificial Sequence
  Description of Artificial Sequence:  Enzymatic Nucleic Acid
ggggaaagggctagctacaacgacctacgaa

SEQ ID NO: 9607 - DNA, 31 bp, Artificial Sequence
  Description of Artificial Sequence:  Enzymatic Nucleic Acid
actgaaagggctagctacaacgacagacagt

SEQ ID NO: 9608 - DNA, 31 bp, Artificial Sequence
  Description of Artificial Sequence:  Enzymatic Nucleic Acid
ccatataaggctagctacaacgatgaaagcc

SEQ ID NO: 9609 - DNA, 31 bp, Artificial Sequence
  Description of Artificial Sequence:  Enzymatic Nucleic Acid
ccccaaaaggctagctacaacgacacatcat

SEQ ID NO: 9610 - DNA, 31 bp, Artificial Sequence
  Description of Artificial Sequence:  Enzymatic Nucleic Acid
agacttggggctagctacaacgaccccaaaa

SEQ ID NO: 9611 - DNA, 31 bp, Artificial Sequence
  Description of Artificial Sequence:  Enzymatic Nucleic Acid
tgtacagaggctagctacaacgattggcccc

SEQ ID NO: 9612 - DNA, 31 bp, Artificial Sequence
  Description of Artificial Sequence:  Enzymatic Nucleic Acid
taaagggaggctagctacaacgatcaagatg

SEQ ID NO: 9613 - DNA, 31 bp, Artificial Sequence
  Description of Artificial Sequence:  Enzymatic Nucleic Acid
aatgtataggctagctacaacgaccaaagac

SEQ ID NO: 9614 - DNA, 31 bp, Artificial Sequence
  Description of Artificial Sequence:  Enzymatic Nucleic Acid
tgccccaaggctagctacaacgatcccaatt

SEQ ID NO: 9615 - DNA, 31 bp, Artificial Sequence
  Description of Artificial Sequence:  Enzymatic Nucleic Acid
gcaatgtgggctagctacaacgacccaactc

SEQ ID NO: 9616 - DNA, 31 bp, Artificial Sequence
  Description of Artificial Sequence:  Enzymatic Nucleic Acid
tcaataggggctagctacaacgactgtttac

SEQ ID NO: 9617 - DNA, 31 bp, Artificial Sequence
  Description of Artificial Sequence:  Enzymatic Nucleic Acid
ttgacataggctagctacaacgatttccaat

SEQ ID NO: 9618 - DNA, 31 bp, Artificial Sequence
  Description of Artificial Sequence:  Enzymatic Nucleic Acid
ccaaaagaggctagctacaacgaccacaatt

SEQ ID NO: 9619 - DNA, 31 bp, Artificial Sequence
  Description of Artificial Sequence:  Enzymatic Nucleic Acid
gcggcaaaggctagctacaacgacccaaaag

SEQ ID NO: 9620 - DNA, 31 bp, Artificial Sequence
  Description of Artificial Sequence:  Enzymatic Nucleic Acid
ctgttttgggctagctacaacgattgtatgc

SEQ ID NO: 9621 - DNA, 31 bp, Artificial Sequence
  Description of Artificial Sequence:  Enzymatic Nucleic Acid
agtaaaagggctagctacaacgactgttttg

SEQ ID NO: 9622 - DNA, 31 bp, Artificial Sequence
  Description of Artificial Sequence:  Enzymatic Nucleic Acid
tagaaaggggctagctacaacgacttgtaag

SEQ ID NO: 9623 - DNA, 31 bp, Artificial Sequence
  Description of Artificial Sequence:  Enzymatic Nucleic Acid
actgtttaggctagctacaacgattagaaag

SEQ ID NO: 9624 - DNA, 31 bp, Artificial Sequence
  Description of Artificial Sequence:  Enzymatic Nucleic Acid
ttcacataggctagctacaacgatgtttact

SEQ ID NO: 9625 - DNA, 31 bp, Artificial Sequence
  Description of Artificial Sequence:  Enzymatic Nucleic Acid
ccgagcaaggctagctacaacgaggggtaaa

SEQ ID NO: 9626 - DNA, 31 bp, Artificial Sequence
  Description of Artificial Sequence:  Enzymatic Nucleic Acid
ggccgttgggctagctacaacgacgagcaac

SEQ ID NO: 9627 - DNA, 31 bp, Artificial Sequence
  Description of Artificial Sequence:  Enzymatic Nucleic Acid
agaccaggggctagctacaacgacgttgccg

SEQ ID NO: 9628 - DNA, 31 bp, Artificial Sequence
  Description of Artificial Sequence:  Enzymatic Nucleic Acid
ggcatagaggctagctacaacgacaggccgt

SEQ ID NO: 9629 - DNA, 31 bp, Artificial Sequence
  Description of Artificial Sequence:  Enzymatic Nucleic Acid
agcaaacaggctagctacaacgattggcata

SEQ ID NO: 9630 - DNA, 31 bp, Artificial Sequence
  Description of Artificial Sequence:  Enzymatic Nucleic Acid
agccccaaggctagctacaacgacagtgggg

SEQ ID NO: 9631 - DNA, 31 bp, Artificial Sequence
  Description of Artificial Sequence:  Enzymatic Nucleic Acid
tggccaagggctagctacaacgacccaacca

SEQ ID NO: 9632 - DNA, 31 bp, Artificial Sequence
  Description of Artificial Sequence:  Enzymatic Nucleic Acid
gcctatggggctagctacaacgacaagcccc

SEQ ID NO: 9633 - DNA, 31 bp, Artificial Sequence
  Description of Artificial Sequence:  Enzymatic Nucleic Acid
gctgatggggctagctacaacgactatggcc

SEQ ID NO: 9634 - DNA, 31 bp, Artificial Sequence
  Description of Artificial Sequence:  Enzymatic Nucleic Acid
cgcatgcgggctagctacaacgatgatggcc

SEQ ID NO: 9635 - DNA, 31 bp, Artificial Sequence
  Description of Artificial Sequence:  Enzymatic Nucleic Acid
aggttccaggctagctacaacgagcatgcgc

SEQ ID NO: 9636 - DNA, 31 bp, Artificial Sequence
  Description of Artificial Sequence:  Enzymatic Nucleic Acid
acaagcggggctagctacaacgataggagtt

SEQ ID NO: 9637 - DNA, 31 bp, Artificial Sequence
  Description of Artificial Sequence:  Enzymatic Nucleic Acid
cagacctgggctagctacaacgatgcgagca

SEQ ID NO: 9638 - DNA, 31 bp, Artificial Sequence
  Description of Artificial Sequence:  Enzymatic Nucleic Acid
gccccagaggctagctacaacgactgctgcg

SEQ ID NO: 9639 - DNA, 31 bp, Artificial Sequence
  Description of Artificial Sequence:  Enzymatic Nucleic Acid
gagttttgggctagctacaacgacccagacc

SEQ ID NO: 9640 - DNA, 31 bp, Artificial Sequence
  Description of Artificial Sequence:  Enzymatic Nucleic Acid
ggagagcaggctagctacaacgagacagaat

SEQ ID NO: 9641 - DNA, 31 bp, Artificial Sequence
  Description of Artificial Sequence:  Enzymatic Nucleic Acid
cctagcagggctagctacaacgacatggaaa

SEQ ID NO: 9642 - DNA, 31 bp, Artificial Sequence
  Description of Artificial Sequence:  Enzymatic Nucleic Acid
cagcacagggctagctacaacgactagcagc

SEQ ID NO: 9643 - DNA, 31 bp, Artificial Sequence
  Description of Artificial Sequence:  Enzymatic Nucleic Acid
acaaaggaggctagctacaacgagtcccgcg

SEQ ID NO: 9644 - DNA, 31 bp, Artificial Sequence
  Description of Artificial Sequence:  Enzymatic Nucleic Acid
cgacgggaggctagctacaacgagtaaacaa

SEQ ID NO: 9645 - DNA, 31 bp, Artificial Sequence
  Description of Artificial Sequence:  Enzymatic Nucleic Acid
agcgccgaggctagctacaacgagggacgta

SEQ ID NO: 9646 - DNA, 31 bp, Artificial Sequence
  Description of Artificial Sequence:  Enzymatic Nucleic Acid
attcagcgggctagctacaacgacgacggga

SEQ ID NO: 9647 - DNA, 31 bp, Artificial Sequence
  Description of Artificial Sequence:  Enzymatic Nucleic Acid
ccaagcggggctagctacaacgacccgggag

SEQ ID NO: 9648 - DNA, 31 bp, Artificial Sequence
  Description of Artificial Sequence:  Enzymatic Nucleic Acid
cggtagagggctagctacaacgacccaagcg

SEQ ID NO: 9649 - DNA, 31 bp, Artificial Sequence
  Description of Artificial Sequence:  Enzymatic Nucleic Acid
cccgtggaggctagctacaacgaggtcggta

SEQ ID NO: 9650 - DNA, 31 bp, Artificial Sequence
  Description of Artificial Sequence:  Enzymatic Nucleic Acid
gaggtgcgggctagctacaacgacccgtgga

SEQ ID NO: 9651 - DNA, 31 bp, Artificial Sequence
  Description of Artificial Sequence:  Enzymatic Nucleic Acid
ggcacagaggctagctacaacgaggggagtc

SEQ ID NO: 9652 - DNA, 31 bp, Artificial Sequence
  Description of Artificial Sequence:  Enzymatic Nucleic Acid
agtgcacaggctagctacaacgaggtccggc

SEQ ID NO: 9653 - DNA, 31 bp, Artificial Sequence
  Description of Artificial Sequence:  Enzymatic Nucleic Acid
ccatgcgaggctagctacaacgagtgcagag

SEQ ID NO: 9654 - DNA, 31 bp, Artificial Sequence
  Description of Artificial Sequence:  Enzymatic Nucleic Acid
ggcgttcaggctagctacaacgaggtggtct

SEQ ID NO: 9655 - DNA, 31 bp, Artificial Sequence
  Description of Artificial Sequence:  Enzymatic Nucleic Acid
atgcaagaggctagctacaacgacttgggca

SEQ ID NO: 9656 - DNA, 31 bp, Artificial Sequence
  Description of Artificial Sequence:  Enzymatic Nucleic Acid
tgacattgggctagctacaacgatgaaagtc

SEQ ID NO: 9657 - DNA, 31 bp, Artificial Sequence
  Description of Artificial Sequence:  Enzymatic Nucleic Acid
gaagtatgggctagctacaacgactcaaggt

SEQ ID NO: 9658 - DNA, 31 bp, Artificial Sequence
  Description of Artificial Sequence:  Enzymatic Nucleic Acid
tcctcccaggctagctacaacgatcattaaa

SEQ ID NO: 9659 - DNA, 31 bp, Artificial Sequence
  Description of Artificial Sequence:  Enzymatic Nucleic Acid
tcccccaaggctagctacaacgatcctccca

SEQ ID NO: 9660 - DNA, 31 bp, Artificial Sequence
  Description of Artificial Sequence:  Enzymatic Nucleic Acid
taacctaaggctagctacaacgactcctccc

SEQ ID NO: 9661 - DNA, 31 bp, Artificial Sequence
  Description of Artificial Sequence:  Enzymatic Nucleic Acid
acctttaaggctagctacaacgactaacctc

SEQ ID NO: 9662 - DNA, 31 bp, Artificial Sequence
  Description of Artificial Sequence:  Enzymatic Nucleic Acid
tacaaagaggctagctacaacgactttaacc

SEQ ID NO: 9663 - DNA, 31 bp, Artificial Sequence
  Description of Artificial Sequence:  Enzymatic Nucleic Acid
gcctacagggctagctacaacgactcctagt

SEQ ID NO: 9664 - DNA, 31 bp, Artificial Sequence
  Description of Artificial Sequence:  Enzymatic Nucleic Acid
aatttatgggctagctacaacgactacagcc

SEQ ID NO: 9665 - DNA, 31 bp, Artificial Sequence
  Description of Artificial Sequence:  Enzymatic Nucleic Acid
tgaacacaggctagctacaacgacaatttat

SEQ ID NO: 9666 - DNA, 31 bp, Artificial Sequence
  Description of Artificial Sequence:  Enzymatic Nucleic Acid
gcatggtgggctagctacaacgatggtgaac

SEQ ID NO: 9667 - DNA, 31 bp, Artificial Sequence
  Description of Artificial Sequence:  Enzymatic Nucleic Acid
cttggaggggctagctacaacgattgaacag

SEQ ID NO: 9668 - DNA, 31 bp, Artificial Sequence
  Description of Artificial Sequence:  Enzymatic Nucleic Acid
aggcacagggctagctacaacgattggaggc

SEQ ID NO: 9669 - DNA, 31 bp, Artificial Sequence
  Description of Artificial Sequence:  Enzymatic Nucleic Acid
caaagccaggctagctacaacgaccaaggca

SEQ ID NO: 9670 - DNA, 31 bp, Artificial Sequence
  Description of Artificial Sequence:  Enzymatic Nucleic Acid
ccccaaagggctagctacaacgacacccaag

SEQ ID NO: 9671 - DNA, 31 bp, Artificial Sequence
  Description of Artificial Sequence:  Enzymatic Nucleic Acid
tgtccatgggctagctacaacgacccaaagc

SEQ ID NO: 9672 - DNA, 31 bp, Artificial Sequence
  Description of Artificial Sequence:  Enzymatic Nucleic Acid
tctttataggctagctacaacgagggtcaat

SEQ ID NO: 9673 - DNA, 31 bp, Artificial Sequence
  Description of Artificial Sequence:  Enzymatic Nucleic Acid
cacagaagggctagctacaacgatccaaatt

SEQ ID NO: 9674 - DNA, 31 bp, Artificial Sequence
  Description of Artificial Sequence:  Enzymatic Nucleic Acid
gagagtaaggctagctacaacgatccacaga

SEQ ID NO: 9675 - DNA, 31 bp, Artificial Sequence
  Description of Artificial Sequence:  Enzymatic Nucleic Acid
ctctaaggggctagctacaacgacccccgat

SEQ ID NO: 9676 - DNA, 31 bp, Artificial Sequence
  Description of Artificial Sequence:  Enzymatic Nucleic Acid
tccggagaggctagctacaacgatctaaggc

SEQ ID NO: 9677 - DNA, 31 bp, Artificial Sequence
  Description of Artificial Sequence:  Enzymatic Nucleic Acid
cctgagtgggctagctacaacgacgtatggt

SEQ ID NO: 9678 - DNA, 31 bp, Artificial Sequence
  Description of Artificial Sequence:  Enzymatic Nucleic Acid
atagcttgggctagctacaacgactgagtgc

SEQ ID NO: 9679 - DNA, 31 bp, Artificial Sequence
  Description of Artificial Sequence:  Enzymatic Nucleic Acid
cagaatagggctagctacaacgattgcctga

SEQ ID NO: 9680 - DNA, 31 bp, Artificial Sequence
  Description of Artificial Sequence:  Enzymatic Nucleic Acid
tcaactcaggctagctacaacgacccaacac

SEQ ID NO: 9681 - DNA, 31 bp, Artificial Sequence
  Description of Artificial Sequence:  Enzymatic Nucleic Acid
ttcatcaaggctagctacaacgatcacccca

SEQ ID NO: 9682 - DNA, 31 bp, Artificial Sequence
  Description of Artificial Sequence:  Enzymatic Nucleic Acid
ccaggtggggctagctacaacgatagattca

SEQ ID NO: 9683 - DNA, 31 bp, Artificial Sequence
  Description of Artificial Sequence:  Enzymatic Nucleic Acid
acttcccaggctagctacaacgaccaggtgg

SEQ ID NO: 9684 - DNA, 31 bp, Artificial Sequence
  Description of Artificial Sequence:  Enzymatic Nucleic Acid
ccaaattaggctagctacaacgattcccacc

SEQ ID NO: 9685 - DNA, 31 bp, Artificial Sequence
  Description of Artificial Sequence:  Enzymatic Nucleic Acid
cctggatgggctagctacaacgatggatctt

SEQ ID NO: 9686 - DNA, 31 bp, Artificial Sequence
  Description of Artificial Sequence:  Enzymatic Nucleic Acid
gctgactaggctagctacaacgataattccc

SEQ ID NO: 9687 - DNA, 31 bp, Artificial Sequence
  Description of Artificial Sequence:  Enzymatic Nucleic Acid
atagctgaggctagctacaacgatactaatt

SEQ ID NO: 9688 - DNA, 31 bp, Artificial Sequence
  Description of Artificial Sequence:  Enzymatic Nucleic Acid
tgacatagggctagctacaacgatgactact

SEQ ID NO: 9689 - DNA, 31 bp, Artificial Sequence
  Description of Artificial Sequence:  Enzymatic Nucleic Acid
catattaaggctagctacaacgagttgacat

SEQ ID NO: 9690 - DNA, 31 bp, Artificial Sequence
  Description of Artificial Sequence:  Enzymatic Nucleic Acid
tttttaggggctagctacaacgaccatatta

SEQ ID NO: 9691 - DNA, 31 bp, Artificial Sequence
  Description of Artificial Sequence:  Enzymatic Nucleic Acid
atgtgaaaggctagctacaacgacacaatag

SEQ ID NO: 9692 - DNA, 31 bp, Artificial Sequence
  Description of Artificial Sequence:  Enzymatic Nucleic Acid
gtttctcgggctagctacaacgaccaaaagt

SEQ ID NO: 9693 - DNA, 31 bp, Artificial Sequence
  Description of Artificial Sequence:  Enzymatic Nucleic Acid
aaaagacaggctagctacaacgacaaatatt

SEQ ID NO: 9694 - DNA, 31 bp, Artificial Sequence
  Description of Artificial Sequence:  Enzymatic Nucleic Acid
aatccacaggctagctacaacgatccaaaag

SEQ ID NO: 9695 - DNA, 31 bp, Artificial Sequence
  Description of Artificial Sequence:  Enzymatic Nucleic Acid
gggacctgggctagctacaacgactcttcgt

SEQ ID NO: 9696 - DNA, 31 bp, Artificial Sequence
  Description of Artificial Sequence:  Enzymatic Nucleic Acid
ctaggggaggctagctacaacgactgcctct

SEQ ID NO: 9697 - DNA, 31 bp, Artificial Sequence
  Description of Artificial Sequence:  Enzymatic Nucleic Acid
gattgagaggctagctacaacgacttcgtct

SEQ ID NO: 9698 - DNA, 31 bp, Artificial Sequence
  Description of Artificial Sequence:  Enzymatic Nucleic Acid
ttctgcgaggctagctacaacgagcggcgat

SEQ ID NO: 9699 - DNA, 31 bp, Artificial Sequence
  Description of Artificial Sequence:  Enzymatic Nucleic Acid
aaggaataggctagctacaacgataacattg

SEQ ID NO: 9700 - DNA, 31 bp, Artificial Sequence
  Description of Artificial Sequence:  Enzymatic Nucleic Acid
gtttcccaggctagctacaacgacttatgtg

SEQ ID NO: 9701 - DNA, 31 bp, Artificial Sequence
  Description of Artificial Sequence:  Enzymatic Nucleic Acid
gaataaagggctagctacaacgacccgtaaa

SEQ ID NO: 9702 - DNA, 31 bp, Artificial Sequence
  Description of Artificial Sequence:  Enzymatic Nucleic Acid
gcaaggtaggctagctacaacgacgtagaag

SEQ ID NO: 9703 - DNA, 31 bp, Artificial Sequence
  Description of Artificial Sequence:  Enzymatic Nucleic Acid
ggagtttgggctagctacaacgacatttagg

SEQ ID NO: 9704 - DNA, 31 bp, Artificial Sequence
  Description of Artificial Sequence:  Enzymatic Nucleic Acid
acaaattgggctagctacaacgattacatct

SEQ ID NO: 9705 - DNA, 31 bp, Artificial Sequence
  Description of Artificial Sequence:  Enzymatic Nucleic Acid
gtaaggggggctagctacaacgacccacaaa

SEQ ID NO: 9706 - DNA, 31 bp, Artificial Sequence
  Description of Artificial Sequence:  Enzymatic Nucleic Acid
ttcatttaggctagctacaacgatgtaaggg

SEQ ID NO: 9707 - DNA, 31 bp, Artificial Sequence
  Description of Artificial Sequence:  Enzymatic Nucleic Acid
ggataaaaggctagctacaacgactagcagg

SEQ ID NO: 9708 - DNA, 31 bp, Artificial Sequence
  Description of Artificial Sequence:  Enzymatic Nucleic Acid
ggataataggctagctacaacgaggtttgat

SEQ ID NO: 9709 - DNA, 31 bp, Artificial Sequence
  Description of Artificial Sequence:  Enzymatic Nucleic Acid
actacataggctagctacaacgatctggata

SEQ ID NO: 9710 - DNA, 31 bp, Artificial Sequence
  Description of Artificial Sequence:  Enzymatic Nucleic Acid
atgattaaggctagctacaacgatacatact

SEQ ID NO: 9711 - DNA, 31 bp, Artificial Sequence
  Description of Artificial Sequence:  Enzymatic Nucleic Acid
gatccccgggctagctacaacgacttccaaa

SEQ ID NO: 9712 - DNA, 31 bp, Artificial Sequence
  Description of Artificial Sequence:  Enzymatic Nucleic Acid
cgtgtggaggctagctacaacgatctctttt

SEQ ID NO: 9713 - DNA, 31 bp, Artificial Sequence
  Description of Artificial Sequence:  Enzymatic Nucleic Acid
aggcgctaggctagctacaacgagtgtggac

SEQ ID NO: 9714 - DNA, 31 bp, Artificial Sequence
  Description of Artificial Sequence:  Enzymatic Nucleic Acid
atgaggcgggctagctacaacgatacgtgtg

SEQ ID NO: 9715 - DNA, 31 bp, Artificial Sequence
  Description of Artificial Sequence:  Enzymatic Nucleic Acid
tatggtgaggctagctacaacgaccgcaaaa

SEQ ID NO: 9716 - DNA, 31 bp, Artificial Sequence
  Description of Artificial Sequence:  Enzymatic Nucleic Acid
ctcccatgggctagctacaacgatgtagatc

SEQ ID NO: 9717 - DNA, 31 bp, Artificial Sequence
  Description of Artificial Sequence:  Enzymatic Nucleic Acid
aagaccaaggctagctacaacgactcccatg

SEQ ID NO: 9718 - DNA, 31 bp, Artificial Sequence
  Description of Artificial Sequence:  Enzymatic Nucleic Acid
ttggaagaggctagctacaacgacaacctcc

SEQ ID NO: 9719 - DNA, 31 bp, Artificial Sequence
  Description of Artificial Sequence:  Enzymatic Nucleic Acid
tccccatgggctagctacaacgacttttcga

SEQ ID NO: 9720 - DNA, 31 bp, Artificial Sequence
  Description of Artificial Sequence:  Enzymatic Nucleic Acid
gggtccaaggctagctacaacgatgatgatc

SEQ ID NO: 9721 - DNA, 31 bp, Artificial Sequence
  Description of Artificial Sequence:  Enzymatic Nucleic Acid
tgagttggggctagctacaacgatttgaatg

SEQ ID NO: 9722 - DNA, 31 bp, Artificial Sequence
  Description of Artificial Sequence:  Enzymatic Nucleic Acid
tggatttaggctagctacaacgatgagttgg

SEQ ID NO: 9723 - DNA, 31 bp, Artificial Sequence
  Description of Artificial Sequence:  Enzymatic Nucleic Acid
gcgtccggggctagctacaacgacagttgtc

SEQ ID NO: 9724 - DNA, 31 bp, Artificial Sequence
  Description of Artificial Sequence:  Enzymatic Nucleic Acid
cactcccaggctagctacaacgacttgttgg

SEQ ID NO: 9725 - DNA, 31 bp, Artificial Sequence
  Description of Artificial Sequence:  Enzymatic Nucleic Acid
tgctcccaggctagctacaacgatcccacct

SEQ ID NO: 9726 - DNA, 31 bp, Artificial Sequence
  Description of Artificial Sequence:  Enzymatic Nucleic Acid
cccgaatgggctagctacaacgatcccactc

SEQ ID NO: 9727 - DNA, 31 bp, Artificial Sequence
  Description of Artificial Sequence:  Enzymatic Nucleic Acid
aaccctggggctagctacaacgaccgaatgc

SEQ ID NO: 9728 - DNA, 31 bp, Artificial Sequence
  Description of Artificial Sequence:  Enzymatic Nucleic Acid
ggggtgaaggctagctacaacgacctggccc

SEQ ID NO: 9729 - DNA, 31 bp, Artificial Sequence
  Description of Artificial Sequence:  Enzymatic Nucleic Acid
gggctccaggctagctacaacgacccaacag

SEQ ID NO: 9730 - DNA, 31 bp, Artificial Sequence
  Description of Artificial Sequence:  Enzymatic Nucleic Acid
cgtgagggggctagctacaacgatccacccc

SEQ ID NO: 9731 - DNA, 31 bp, Artificial Sequence
  Description of Artificial Sequence:  Enzymatic Nucleic Acid
tgagtaggggctagctacaacgacctgagcg

SEQ ID NO: 9732 - DNA, 31 bp, Artificial Sequence
  Description of Artificial Sequence:  Enzymatic Nucleic Acid
aggagctgggctagctacaacgatggcacag

SEQ ID NO: 9733 - DNA, 31 bp, Artificial Sequence
  Description of Artificial Sequence:  Enzymatic Nucleic Acid
aggaggagggctagctacaacgatgctggca

SEQ ID NO: 9734 - DNA, 31 bp, Artificial Sequence
  Description of Artificial Sequence:  Enzymatic Nucleic Acid
cctgactgggctagctacaacgacgattggt

SEQ ID NO: 9735 - DNA, 31 bp, Artificial Sequence
  Description of Artificial Sequence:  Enzymatic Nucleic Acid
cttcctgaggctagctacaacgatgccgatt

SEQ ID NO: 9736 - DNA, 31 bp, Artificial Sequence
  Description of Artificial Sequence:  Enzymatic Nucleic Acid
gtaggctgggctagctacaacgacttcctga

SEQ ID NO: 9737 - DNA, 31 bp, Artificial Sequence
  Description of Artificial Sequence:  Enzymatic Nucleic Acid
ggagtaggggctagctacaacgatgccttcc

SEQ ID NO: 9738 - DNA, 31 bp, Artificial Sequence
  Description of Artificial Sequence:  Enzymatic Nucleic Acid
ctgcatggggctagctacaacgactgaggat

SEQ ID NO: 9739 - DNA, 31 bp, Artificial Sequence
  Description of Artificial Sequence:  Enzymatic Nucleic Acid
gtggaaagggctagctacaacgaggtggagt

SEQ ID NO: 9740 - DNA, 31 bp, Artificial Sequence
  Description of Artificial Sequence:  Enzymatic Nucleic Acid
gagtttggggctagctacaacgaggaaagtg

SEQ ID NO: 9741 - DNA, 31 bp, Artificial Sequence
  Description of Artificial Sequence:  Enzymatic Nucleic Acid
ttgaagagggctagctacaacgattggtgga

SEQ ID NO: 9742 - DNA, 31 bp, Artificial Sequence
  Description of Artificial Sequence:  Enzymatic Nucleic Acid
ctctgggaggctagctacaacgacttgaaga

SEQ ID NO: 9743 - DNA, 31 bp, Artificial Sequence
  Description of Artificial Sequence:  Enzymatic Nucleic Acid
caggaaagggctagctacaacgaacagggcc

SEQ ID NO: 9744 - DNA, 31 bp, Artificial Sequence
  Description of Artificial Sequence:  Enzymatic Nucleic Acid
gctcactgggctagctacaacgatcctgaac

SEQ ID NO: 9745 - DNA, 31 bp, Artificial Sequence
  Description of Artificial Sequence:  Enzymatic Nucleic Acid
agacagtaggctagctacaacgatctgagca

SEQ ID NO: 9746 - DNA, 31 bp, Artificial Sequence
  Description of Artificial Sequence:  Enzymatic Nucleic Acid
agagacagggctagctacaacgaattctgag

SEQ ID NO: 9747 - DNA, 31 bp, Artificial Sequence
  Description of Artificial Sequence:  Enzymatic Nucleic Acid
tgacgataggctagctacaacgaggcagaga

SEQ ID NO: 9748 - DNA, 31 bp, Artificial Sequence
  Description of Artificial Sequence:  Enzymatic Nucleic Acid
attgacgaggctagctacaacgaatggcaga

SEQ ID NO: 9749 - DNA, 31 bp, Artificial Sequence
  Description of Artificial Sequence:  Enzymatic Nucleic Acid
cgataagaggctagctacaacgatgacgata

SEQ ID NO: 9750 - DNA, 31 bp, Artificial Sequence
  Description of Artificial Sequence:  Enzymatic Nucleic Acid
gtcttcgaggctagctacaacgaaagattga

SEQ ID NO: 9751 - DNA, 31 bp, Artificial Sequence
  Description of Artificial Sequence:  Enzymatic Nucleic Acid
gtccccagggctagctacaacgacttcgata

SEQ ID NO: 9752 - DNA, 31 bp, Artificial Sequence
  Description of Artificial Sequence:  Enzymatic Nucleic Acid
gtacagggggctagctacaacgaccccagtc

SEQ ID NO: 9753 - DNA, 31 bp, Artificial Sequence
  Description of Artificial Sequence:  Enzymatic Nucleic Acid
atgttcggggctagctacaacgaacagggtc

SEQ ID NO: 9754 - DNA, 31 bp, Artificial Sequence
  Description of Artificial Sequence:  Enzymatic Nucleic Acid
tctccatgggctagctacaacgatcggtaca

SEQ ID NO: 9755 - DNA, 31 bp, Artificial Sequence
  Description of Artificial Sequence:  Enzymatic Nucleic Acid
gttctccaggctagctacaacgagttcggta

SEQ ID NO: 9756 - DNA, 31 bp, Artificial Sequence
  Description of Artificial Sequence:  Enzymatic Nucleic Acid
atgcgatgggctagctacaacgatctccatg

SEQ ID NO: 9757 - DNA, 31 bp, Artificial Sequence
  Description of Artificial Sequence:  Enzymatic Nucleic Acid
tgatgcgaggctagctacaacgagttctcca

SEQ ID NO: 9758 - DNA, 31 bp, Artificial Sequence
  Description of Artificial Sequence:  Enzymatic Nucleic Acid
agtcctgaggctagctacaacgagcgatgtt

SEQ ID NO: 9759 - DNA, 31 bp, Artificial Sequence
  Description of Artificial Sequence:  Enzymatic Nucleic Acid
cctaggagggctagctacaacgacctgatgc

SEQ ID NO: 9760 - DNA, 31 bp, Artificial Sequence
  Description of Artificial Sequence:  Enzymatic Nucleic Acid
agcaggggggctagctacaacgacctaggag

SEQ ID NO: 9761 - DNA, 31 bp, Artificial Sequence
  Description of Artificial Sequence:  Enzymatic Nucleic Acid
cccgcctgggctagctacaacgaaacacgag

SEQ ID NO: 9762 - DNA, 31 bp, Artificial Sequence
  Description of Artificial Sequence:  Enzymatic Nucleic Acid
gatttttgggctagctacaacgacaacaaga

SEQ ID NO: 9763 - DNA, 31 bp, Artificial Sequence
  Description of Artificial Sequence:  Enzymatic Nucleic Acid
tgtgaggaggctagctacaacgattttgtca

SEQ ID NO: 9764 - DNA, 31 bp, Artificial Sequence
  Description of Artificial Sequence:  Enzymatic Nucleic Acid
tggtattgggctagctacaacgagaggattt

SEQ ID NO: 9765 - DNA, 31 bp, Artificial Sequence
  Description of Artificial Sequence:  Enzymatic Nucleic Acid
ctgtggtaggctagctacaacgatgtgagga

SEQ ID NO: 9766 - DNA, 31 bp, Artificial Sequence
  Description of Artificial Sequence:  Enzymatic Nucleic Acid
ctctgtggggctagctacaacgaattgtgag

SEQ ID NO: 9767 - DNA, 31 bp, Artificial Sequence
  Description of Artificial Sequence:  Enzymatic Nucleic Acid
agactctgggctagctacaacgaggtattgt

SEQ ID NO: 9768 - DNA, 31 bp, Artificial Sequence
  Description of Artificial Sequence:  Enzymatic Nucleic Acid
accacgagggctagctacaacgactagactc

SEQ ID NO: 9769 - DNA, 31 bp, Artificial Sequence
  Description of Artificial Sequence:  Enzymatic Nucleic Acid
gagagaagggctagctacaacgaccaccacg

SEQ ID NO: 9770 - DNA, 31 bp, Artificial Sequence
  Description of Artificial Sequence:  Enzymatic Nucleic Acid
ctagaaaaggctagctacaacgatgagagaa

SEQ ID NO: 9771 - DNA, 31 bp, Artificial Sequence
  Description of Artificial Sequence:  Enzymatic Nucleic Acid
cacgggtgggctagctacaacgatcccccta

SEQ ID NO: 9772 - DNA, 31 bp, Artificial Sequence
  Description of Artificial Sequence:  Enzymatic Nucleic Acid
cacacgggggctagctacaacgagttccccc

SEQ ID NO: 9773 - DNA, 31 bp, Artificial Sequence
  Description of Artificial Sequence:  Enzymatic Nucleic Acid
actgcgaaggctagctacaacgatttggcca

SEQ ID NO: 9774 - DNA, 31 bp, Artificial Sequence
  Description of Artificial Sequence:  Enzymatic Nucleic Acid
actggagaggctagctacaacgattgggact

SEQ ID NO: 9775 - DNA, 31 bp, Artificial Sequence
  Description of Artificial Sequence:  Enzymatic Nucleic Acid
ttggtgagggctagctacaacgagactggag

SEQ ID NO: 9776 - DNA, 31 bp, Artificial Sequence
  Description of Artificial Sequence:  Enzymatic Nucleic Acid
caggttggggctagctacaacgagagtgact

SEQ ID NO: 9777 - DNA, 31 bp, Artificial Sequence
  Description of Artificial Sequence:  Enzymatic Nucleic Acid
acaacaggggctagctacaacgatggtgagt

SEQ ID NO: 9778 - DNA, 31 bp, Artificial Sequence
  Description of Artificial Sequence:  Enzymatic Nucleic Acid
aggacaaaggctagctacaacgatggaggac

SEQ ID NO: 9779 - DNA, 31 bp, Artificial Sequence
  Description of Artificial Sequence:  Enzymatic Nucleic Acid
tccagcgaggctagctacaacgaaaccagga

SEQ ID NO: 9780 - DNA, 31 bp, Artificial Sequence
  Description of Artificial Sequence:  Enzymatic Nucleic Acid
cagacacaggctagctacaacgaccagcgat

SEQ ID NO: 9781 - DNA, 31 bp, Artificial Sequence
  Description of Artificial Sequence:  Enzymatic Nucleic Acid
gaagatgaggctagctacaacgaaaaacgcc

SEQ ID NO: 9782 - DNA, 31 bp, Artificial Sequence
  Description of Artificial Sequence:  Enzymatic Nucleic Acid
gaggaagaggctagctacaacgagataaaac

SEQ ID NO: 9783 - DNA, 31 bp, Artificial Sequence
  Description of Artificial Sequence:  Enzymatic Nucleic Acid
cagcaggaggctagctacaacgagcagagga

SEQ ID NO: 9784 - DNA, 31 bp, Artificial Sequence
  Description of Artificial Sequence:  Enzymatic Nucleic Acid
atgaggcaggctagctacaacgaagcagcag

SEQ ID NO: 9785 - DNA, 31 bp, Artificial Sequence
  Description of Artificial Sequence:  Enzymatic Nucleic Acid
caagaagaggctagctacaacgagaggcata

SEQ ID NO: 9786 - DNA, 31 bp, Artificial Sequence
  Description of Artificial Sequence:  Enzymatic Nucleic Acid
cttgatagggctagctacaacgaccagaaga

SEQ ID NO: 9787 - DNA, 31 bp, Artificial Sequence
  Description of Artificial Sequence:  Enzymatic Nucleic Acid
taccttgaggctagctacaacgaagtccaga

SEQ ID NO: 9788 - DNA, 31 bp, Artificial Sequence
  Description of Artificial Sequence:  Enzymatic Nucleic Acid
gggcaacaggctagctacaacgaaccttgat

SEQ ID NO: 9789 - DNA, 31 bp, Artificial Sequence
  Description of Artificial Sequence:  Enzymatic Nucleic Acid
tcctggaaggctagctacaacgatagaggac

SEQ ID NO: 9790 - DNA, 31 bp, Artificial Sequence
  Description of Artificial Sequence:  Enzymatic Nucleic Acid
gttgatgaggctagctacaacgacctggaat

SEQ ID NO: 9791 - DNA, 31 bp, Artificial Sequence
  Description of Artificial Sequence:  Enzymatic Nucleic Acid
gttgttgaggctagctacaacgagatcctgg

SEQ ID NO: 9792 - DNA, 31 bp, Artificial Sequence
  Description of Artificial Sequence:  Enzymatic Nucleic Acid
gctggttgggctagctacaacgatgatgatc

SEQ ID NO: 9793 - DNA, 31 bp, Artificial Sequence
  Description of Artificial Sequence:  Enzymatic Nucleic Acid
ggtgctggggctagctacaacgatgttgatg

SEQ ID NO: 9794 - DNA, 31 bp, Artificial Sequence
  Description of Artificial Sequence:  Enzymatic Nucleic Acid
ttgcatggggctagctacaacgaccggtgct

SEQ ID NO: 9795 - DNA, 31 bp, Artificial Sequence
  Description of Artificial Sequence:  Enzymatic Nucleic Acid
gttttgcaggctagctacaacgaggtccggt

SEQ ID NO: 9796 - DNA, 31 bp, Artificial Sequence
  Description of Artificial Sequence:  Enzymatic Nucleic Acid
tgtgcaggggctagctacaacgatttgcatg

SEQ ID NO: 9797 - DNA, 31 bp, Artificial Sequence
  Description of Artificial Sequence:  Enzymatic Nucleic Acid
aggagttgggctagctacaacgagcaggttt

SEQ ID NO: 9798 - DNA, 31 bp, Artificial Sequence
  Description of Artificial Sequence:  Enzymatic Nucleic Acid
agcaggagggctagctacaacgatgtgcagg

SEQ ID NO: 9799 - DNA, 31 bp, Artificial Sequence
  Description of Artificial Sequence:  Enzymatic Nucleic Acid
catagaggggctagctacaacgatccttgag

SEQ ID NO: 9800 - DNA, 31 bp, Artificial Sequence
  Description of Artificial Sequence:  Enzymatic Nucleic Acid
gggaaacaggctagctacaacgaagaggttc

SEQ ID NO: 9801 - DNA, 31 bp, Artificial Sequence
  Description of Artificial Sequence:  Enzymatic Nucleic Acid
cagcaacaggctagctacaacgagagggaaa

SEQ ID NO: 9802 - DNA, 31 bp, Artificial Sequence
  Description of Artificial Sequence:  Enzymatic Nucleic Acid
aggttttgggctagctacaacgaacagcaac

SEQ ID NO: 9803 - DNA, 31 bp, Artificial Sequence
  Description of Artificial Sequence:  Enzymatic Nucleic Acid
tccgtaggggctagctacaacgatttgtaca

SEQ ID NO: 9804 - DNA, 31 bp, Artificial Sequence
  Description of Artificial Sequence:  Enzymatic Nucleic Acid
tccgtccgggctagctacaacgaaggttttg

SEQ ID NO: 9805 - DNA, 31 bp, Artificial Sequence
  Description of Artificial Sequence:  Enzymatic Nucleic Acid
agtttccgggctagctacaacgaccgtaggt

SEQ ID NO: 9806 - DNA, 31 bp, Artificial Sequence
  Description of Artificial Sequence:  Enzymatic Nucleic Acid
aggtgcagggctagctacaacgattccgtcc

SEQ ID NO: 9807 - DNA, 31 bp, Artificial Sequence
  Description of Artificial Sequence:  Enzymatic Nucleic Acid
aatacaggggctagctacaacgagcagtttc

SEQ ID NO: 9808 - DNA, 31 bp, Artificial Sequence
  Description of Artificial Sequence:  Enzymatic Nucleic Acid
gatgggaaggctagctacaacgaacaggtgc

SEQ ID NO: 9809 - DNA, 31 bp, Artificial Sequence
  Description of Artificial Sequence:  Enzymatic Nucleic Acid
tgatgggaggctagctacaacgagggaatac

SEQ ID NO: 9810 - DNA, 31 bp, Artificial Sequence
  Description of Artificial Sequence:  Enzymatic Nucleic Acid
caagatgaggctagctacaacgagggatggg

SEQ ID NO: 9811 - DNA, 31 bp, Artificial Sequence
  Description of Artificial Sequence:  Enzymatic Nucleic Acid
gcccaagaggctagctacaacgagatgggat

SEQ ID NO: 9812 - DNA, 31 bp, Artificial Sequence
  Description of Artificial Sequence:  Enzymatic Nucleic Acid
cataggtaggctagctacaacgatttgcgaa

SEQ ID NO: 9813 - DNA, 31 bp, Artificial Sequence
  Description of Artificial Sequence:  Enzymatic Nucleic Acid
cccataggggctagctacaacgaattttgcg

SEQ ID NO: 9814 - DNA, 31 bp, Artificial Sequence
  Description of Artificial Sequence:  Enzymatic Nucleic Acid
cactcccaggctagctacaacgaaggtattt

SEQ ID NO: 9815 - DNA, 31 bp, Artificial Sequence
  Description of Artificial Sequence:  Enzymatic Nucleic Acid
ggcactagggctagctacaacgaaaactgag

SEQ ID NO: 9816 - DNA, 31 bp, Artificial Sequence
  Description of Artificial Sequence:  Enzymatic Nucleic Acid
tgaacaaaggctagctacaacgaggcactag

SEQ ID NO: 9817 - DNA, 31 bp, Artificial Sequence
  Description of Artificial Sequence:  Enzymatic Nucleic Acid
ccagacagggctagctacaacgagggggaaa

SEQ ID NO: 9818 - DNA, 31 bp, Artificial Sequence
  Description of Artificial Sequence:  Enzymatic Nucleic Acid
catccataggctagctacaacgaaactgaaa

SEQ ID NO: 9819 - DNA, 31 bp, Artificial Sequence
  Description of Artificial Sequence:  Enzymatic Nucleic Acid
atcatccaggctagctacaacgaataactga

SEQ ID NO: 9820 - DNA, 31 bp, Artificial Sequence
  Description of Artificial Sequence:  Enzymatic Nucleic Acid
ccacatcaggctagctacaacgaccatataa

SEQ ID NO: 9821 - DNA, 31 bp, Artificial Sequence
  Description of Artificial Sequence:  Enzymatic Nucleic Acid
aaaccacaggctagctacaacgacatccata

SEQ ID NO: 9822 - DNA, 31 bp, Artificial Sequence
  Description of Artificial Sequence:  Enzymatic Nucleic Acid
agatgttgggctagctacaacgaacagactt

SEQ ID NO: 9823 - DNA, 31 bp, Artificial Sequence
  Description of Artificial Sequence:  Enzymatic Nucleic Acid
tcaagatgggctagctacaacgatgtacaga

SEQ ID NO: 9824 - DNA, 31 bp, Artificial Sequence
  Description of Artificial Sequence:  Enzymatic Nucleic Acid
actcaagaggctagctacaacgagttgtaca

SEQ ID NO: 9825 - DNA, 31 bp, Artificial Sequence
  Description of Artificial Sequence:  Enzymatic Nucleic Acid
cagcggcaggctagctacaacgaaaagggac

SEQ ID NO: 9826 - DNA, 31 bp, Artificial Sequence
  Description of Artificial Sequence:  Enzymatic Nucleic Acid
aaaattggggctagctacaacgaaacagcgg

SEQ ID NO: 9827 - DNA, 31 bp, Artificial Sequence
  Description of Artificial Sequence:  Enzymatic Nucleic Acid
aaagaaaaggctagctacaacgatggtaaca

SEQ ID NO: 9828 - DNA, 31 bp, Artificial Sequence
  Description of Artificial Sequence:  Enzymatic Nucleic Acid
taaatgtaggctagctacaacgaacccaaag

SEQ ID NO: 9829 - DNA, 31 bp, Artificial Sequence
  Description of Artificial Sequence:  Enzymatic Nucleic Acid
tttaaatgggctagctacaacgaatacccaa

SEQ ID NO: 9830 - DNA, 31 bp, Artificial Sequence
  Description of Artificial Sequence:  Enzymatic Nucleic Acid
ggtttaaaggctagctacaacgagtataccc

SEQ ID NO: 9831 - DNA, 31 bp, Artificial Sequence
  Description of Artificial Sequence:  Enzymatic Nucleic Acid
tgtgagggggctagctacaacgattaaatgt

SEQ ID NO: 9832 - DNA, 31 bp, Artificial Sequence
  Description of Artificial Sequence:  Enzymatic Nucleic Acid
ttgttttgggctagctacaacgagagggttt

SEQ ID NO: 9833 - DNA, 31 bp, Artificial Sequence
  Description of Artificial Sequence:  Enzymatic Nucleic Acid
tctttttgggctagctacaacgatttgtgag

SEQ ID NO: 9834 - DNA, 31 bp, Artificial Sequence
  Description of Artificial Sequence:  Enzymatic Nucleic Acid
tatccccaggctagctacaacgactttttgt

SEQ ID NO: 9835 - DNA, 31 bp, Artificial Sequence
  Description of Artificial Sequence:  Enzymatic Nucleic Acid
agggaataggctagctacaacgaccccatct

SEQ ID NO: 9836 - DNA, 31 bp, Artificial Sequence
  Description of Artificial Sequence:  Enzymatic Nucleic Acid
taagggaaggctagctacaacgaatccccat

SEQ ID NO: 9837 - DNA, 31 bp, Artificial Sequence
  Description of Artificial Sequence:  Enzymatic Nucleic Acid
ccatgaagggctagctacaacgataagggaa

SEQ ID NO: 9838 - DNA, 31 bp, Artificial Sequence
  Description of Artificial Sequence:  Enzymatic Nucleic Acid
atatcccaggctagctacaacgagaagttaa

SEQ ID NO: 9839 - DNA, 31 bp, Artificial Sequence
  Description of Artificial Sequence:  Enzymatic Nucleic Acid
attacataggctagctacaacgacccatgaa

SEQ ID NO: 9840 - DNA, 31 bp, Artificial Sequence
  Description of Artificial Sequence:  Enzymatic Nucleic Acid
caattacaggctagctacaacgaatcccatg

SEQ ID NO: 9841 - DNA, 31 bp, Artificial Sequence
  Description of Artificial Sequence:  Enzymatic Nucleic Acid
actcccaaggctagctacaacgatacatatc

SEQ ID NO: 9842 - DNA, 31 bp, Artificial Sequence
  Description of Artificial Sequence:  Enzymatic Nucleic Acid
tggcaatgggctagctacaacgagccccaac

SEQ ID NO: 9843 - DNA, 31 bp, Artificial Sequence
  Description of Artificial Sequence:  Enzymatic Nucleic Acid
tgtggcaaggctagctacaacgagtgcccca

SEQ ID NO: 9844 - DNA, 31 bp, Artificial Sequence
  Description of Artificial Sequence:  Enzymatic Nucleic Acid
tgttcctgggctagctacaacgaggcaatgt

SEQ ID NO: 9845 - DNA, 31 bp, Artificial Sequence
  Description of Artificial Sequence:  Enzymatic Nucleic Acid
acaatatgggctagctacaacgatcctgtgg

SEQ ID NO: 9846 - DNA, 31 bp, Artificial Sequence
  Description of Artificial Sequence:  Enzymatic Nucleic Acid
gtacaataggctagctacaacgagttcctgt

SEQ ID NO: 9847 - DNA, 31 bp, Artificial Sequence
  Description of Artificial Sequence:  Enzymatic Nucleic Acid
ttgtacaaggctagctacaacgaatgttcct

SEQ ID NO: 9848 - DNA, 31 bp, Artificial Sequence
  Description of Artificial Sequence:  Enzymatic Nucleic Acid
attttttgggctagctacaacgaacaatatg

SEQ ID NO: 9849 - DNA, 31 bp, Artificial Sequence
  Description of Artificial Sequence:  Enzymatic Nucleic Acid
cattttgaggctagctacaacgatttttgta

SEQ ID NO: 9850 - DNA, 31 bp, Artificial Sequence
  Description of Artificial Sequence:  Enzymatic Nucleic Acid
aaaacacaggctagctacaacgatttgattt

SEQ ID NO: 9851 - DNA, 31 bp, Artificial Sequence
  Description of Artificial Sequence:  Enzymatic Nucleic Acid
acaggaagggctagctacaacgattcctaaa

SEQ ID NO: 9852 - DNA, 31 bp, Artificial Sequence
  Description of Artificial Sequence:  Enzymatic Nucleic Acid
taggcctgggctagctacaacgattacagga

SEQ ID NO: 9853 - DNA, 31 bp, Artificial Sequence
  Description of Artificial Sequence:  Enzymatic Nucleic Acid
ccaatcaaggctagctacaacgaaggcctgt

SEQ ID NO: 9854 - DNA, 31 bp, Artificial Sequence
  Description of Artificial Sequence:  Enzymatic Nucleic Acid
ctttccaaggctagctacaacgacaataggc

SEQ ID NO: 9855 - DNA, 31 bp, Artificial Sequence
  Description of Artificial Sequence:  Enzymatic Nucleic Acid
cgttgacaggctagctacaacgaactttcca

SEQ ID NO: 9856 - DNA, 31 bp, Artificial Sequence
  Description of Artificial Sequence:  Enzymatic Nucleic Acid
acaattcgggctagctacaacgatgacatac

SEQ ID NO: 9857 - DNA, 31 bp, Artificial Sequence
  Description of Artificial Sequence:  Enzymatic Nucleic Acid
acccacaaggctagctacaacgatcgttgac

SEQ ID NO: 9858 - DNA, 31 bp, Artificial Sequence
  Description of Artificial Sequence:  Enzymatic Nucleic Acid
acattgcgggctagctacaacgagaaagggg

SEQ ID NO: 9859 - DNA, 31 bp, Artificial Sequence
  Description of Artificial Sequence:  Enzymatic Nucleic Acid
tatccacaggctagctacaacgatgcgtgaa

SEQ ID NO: 9860 - DNA, 31 bp, Artificial Sequence
  Description of Artificial Sequence:  Enzymatic Nucleic Acid
gcagaataggctagctacaacgaccacattg

SEQ ID NO: 9861 - DNA, 31 bp, Artificial Sequence
  Description of Artificial Sequence:  Enzymatic Nucleic Acid
aagcagaaggctagctacaacgaatccacat

SEQ ID NO: 9862 - DNA, 31 bp, Artificial Sequence
  Description of Artificial Sequence:  Enzymatic Nucleic Acid
taaaggcaggctagctacaacgataaagcag

SEQ ID NO: 9863 - DNA, 31 bp, Artificial Sequence
  Description of Artificial Sequence:  Enzymatic Nucleic Acid
catgcataggctagctacaacgaaaaggcat

SEQ ID NO: 9864 - DNA, 31 bp, Artificial Sequence
  Description of Artificial Sequence:  Enzymatic Nucleic Acid
tgcatgcaggctagctacaacgaataaaggc

SEQ ID NO: 9865 - DNA, 31 bp, Artificial Sequence
  Description of Artificial Sequence:  Enzymatic Nucleic Acid
tgtatgcaggctagctacaacgagcatataa

SEQ ID NO: 9866 - DNA, 31 bp, Artificial Sequence
  Description of Artificial Sequence:  Enzymatic Nucleic Acid
tgcttgtaggctagctacaacgagcatgcat

SEQ ID NO: 9867 - DNA, 31 bp, Artificial Sequence
  Description of Artificial Sequence:  Enzymatic Nucleic Acid
tttgcttgggctagctacaacgaatgcatgc

SEQ ID NO: 9868 - DNA, 31 bp, Artificial Sequence
  Description of Artificial Sequence:  Enzymatic Nucleic Acid
aaagcctgggctagctacaacgatttgcttg

SEQ ID NO: 9869 - DNA, 31 bp, Artificial Sequence
  Description of Artificial Sequence:  Enzymatic Nucleic Acid
cgagaaagggctagctacaacgaaaaagcct

SEQ ID NO: 9870 - DNA, 31 bp, Artificial Sequence
  Description of Artificial Sequence:  Enzymatic Nucleic Acid
cttgtaagggctagctacaacgatggcgaga

SEQ ID NO: 9871 - DNA, 31 bp, Artificial Sequence
  Description of Artificial Sequence:  Enzymatic Nucleic Acid
aggccttgggctagctacaacgaaagttggc

SEQ ID NO: 9872 - DNA, 31 bp, Artificial Sequence
  Description of Artificial Sequence:  Enzymatic Nucleic Acid
acatactgggctagctacaacgattacttag

SEQ ID NO: 9873 - DNA, 31 bp, Artificial Sequence
  Description of Artificial Sequence:  Enzymatic Nucleic Acid
ggttcacaggctagctacaacgaactgttta

SEQ ID NO: 9874 - DNA, 31 bp, Artificial Sequence
  Description of Artificial Sequence:  Enzymatic Nucleic Acid
ggtaaaggggctagctacaacgatcacatac

SEQ ID NO: 9875 - DNA, 31 bp, Artificial Sequence
  Description of Artificial Sequence:  Enzymatic Nucleic Acid
caacggggggctagctacaacgaaaaggttc

SEQ ID NO: 9876 - DNA, 31 bp, Artificial Sequence
  Description of Artificial Sequence:  Enzymatic Nucleic Acid
ccaggccgggctagctacaacgatgccgagc

SEQ ID NO: 9877 - DNA, 31 bp, Artificial Sequence
  Description of Artificial Sequence:  Enzymatic Nucleic Acid
acttggcaggctagctacaacgaagaccagg

SEQ ID NO: 9878 - DNA, 31 bp, Artificial Sequence
  Description of Artificial Sequence:  Enzymatic Nucleic Acid
gggttgcgggctagctacaacgacagcaaac

SEQ ID NO: 9879 - DNA, 31 bp, Artificial Sequence
  Description of Artificial Sequence:  Enzymatic Nucleic Acid
agtgggggggctagctacaacgatgcgtcag

SEQ ID NO: 9880 - DNA, 31 bp, Artificial Sequence
  Description of Artificial Sequence:  Enzymatic Nucleic Acid
ccaaccagggctagctacaacgagggggttg

SEQ ID NO: 9881 - DNA, 31 bp, Artificial Sequence
  Description of Artificial Sequence:  Enzymatic Nucleic Acid
atggcctaggctagctacaacgaggccaagc

SEQ ID NO: 9882 - DNA, 31 bp, Artificial Sequence
  Description of Artificial Sequence:  Enzymatic Nucleic Acid
tgcgctgaggctagctacaacgaggcctatg

SEQ ID NO: 9883 - DNA, 31 bp, Artificial Sequence
  Description of Artificial Sequence:  Enzymatic Nucleic Acid
tccacgcaggctagctacaacgagcgctgat

SEQ ID NO: 9884 - DNA, 31 bp, Artificial Sequence
  Description of Artificial Sequence:  Enzymatic Nucleic Acid
cacaaaggggctagctacaacgatccacgca

SEQ ID NO: 9885 - DNA, 31 bp, Artificial Sequence
  Description of Artificial Sequence:  Enzymatic Nucleic Acid
ggtatggaggctagctacaacgacggcagag

SEQ ID NO: 9886 - DNA, 31 bp, Artificial Sequence
  Description of Artificial Sequence:  Enzymatic Nucleic Acid
ccgcggtaggctagctacaacgaggatcggc

SEQ ID NO: 9887 - DNA, 31 bp, Artificial Sequence
  Description of Artificial Sequence:  Enzymatic Nucleic Acid
ttccgcggggctagctacaacgaatggatcg

SEQ ID NO: 9888 - DNA, 31 bp, Artificial Sequence
  Description of Artificial Sequence:  Enzymatic Nucleic Acid
gctaggagggctagctacaacgatccgcggt

SEQ ID NO: 9889 - DNA, 31 bp, Artificial Sequence
  Description of Artificial Sequence:  Enzymatic Nucleic Acid
ccgatgagggctagctacaacgatttgcccc

SEQ ID NO: 9890 - DNA, 31 bp, Artificial Sequence
  Description of Artificial Sequence:  Enzymatic Nucleic Acid
agtcccgaggctagctacaacgagagttttg

SEQ ID NO: 9891 - DNA, 31 bp, Artificial Sequence
  Description of Artificial Sequence:  Enzymatic Nucleic Acid
attgtcagggctagctacaacgacccgatga

SEQ ID NO: 9892 - DNA, 31 bp, Artificial Sequence
  Description of Artificial Sequence:  Enzymatic Nucleic Acid
cagaattgggctagctacaacgacagtcccg

SEQ ID NO: 9893 - DNA, 31 bp, Artificial Sequence
  Description of Artificial Sequence:  Enzymatic Nucleic Acid
cgacagaaggctagctacaacgatgtcagtc

SEQ ID NO: 9894 - DNA, 31 bp, Artificial Sequence
  Description of Artificial Sequence:  Enzymatic Nucleic Acid
gatgtataggctagctacaacgattgcggga

SEQ ID NO: 9895 - DNA, 31 bp, Artificial Sequence
  Description of Artificial Sequence:  Enzymatic Nucleic Acid
atgatgtaggctagctacaacgaatttgcgg

SEQ ID NO: 9896 - DNA, 31 bp, Artificial Sequence
  Description of Artificial Sequence:  Enzymatic Nucleic Acid
aaatgatgggctagctacaacgaatatttgc

SEQ ID NO: 9897 - DNA, 31 bp, Artificial Sequence
  Description of Artificial Sequence:  Enzymatic Nucleic Acid
ggaaatgaggctagctacaacgagtatattt

SEQ ID NO: 9898 - DNA, 31 bp, Artificial Sequence
  Description of Artificial Sequence:  Enzymatic Nucleic Acid
catggaaaggctagctacaacgagatgtata

SEQ ID NO: 9899 - DNA, 31 bp, Artificial Sequence
  Description of Artificial Sequence:  Enzymatic Nucleic Acid
agcagccaggctagctacaacgaggaaatga

SEQ ID NO: 9900 - DNA, 31 bp, Artificial Sequence
  Description of Artificial Sequence:  Enzymatic Nucleic Acid
ggatccagggctagctacaacgatggcagca

SEQ ID NO: 9901 - DNA, 31 bp, Artificial Sequence
  Description of Artificial Sequence:  Enzymatic Nucleic Acid
gcgtaggaggctagctacaacgaccagttgg

SEQ ID NO: 9902 - DNA, 31 bp, Artificial Sequence
  Description of Artificial Sequence:  Enzymatic Nucleic Acid
gtcccgcgggctagctacaacgaaggatcca

SEQ ID NO: 9903 - DNA, 31 bp, Artificial Sequence
  Description of Artificial Sequence:  Enzymatic Nucleic Acid
aaaggacgggctagctacaacgacccgcgta

SEQ ID NO: 9904 - DNA, 31 bp, Artificial Sequence
  Description of Artificial Sequence:  Enzymatic Nucleic Acid
acgggacgggctagctacaacgaaaacaaag

SEQ ID NO: 9905 - DNA, 31 bp, Artificial Sequence
  Description of Artificial Sequence:  Enzymatic Nucleic Acid
ccgcgggaggctagctacaacgatcagcgcc

SEQ ID NO: 9906 - DNA, 31 bp, Artificial Sequence
  Description of Artificial Sequence:  Enzymatic Nucleic Acid
aggggtcgggctagctacaacgaccgcggga

SEQ ID NO: 9907 - DNA, 31 bp, Artificial Sequence
  Description of Artificial Sequence:  Enzymatic Nucleic Acid
gggaggggggctagctacaacgacgtccgcg

SEQ ID NO: 9908 - DNA, 31 bp, Artificial Sequence
  Description of Artificial Sequence:  Enzymatic Nucleic Acid
gcgggcggggctagctacaacgaagagcccc

SEQ ID NO: 9909 - DNA, 31 bp, Artificial Sequence
  Description of Artificial Sequence:  Enzymatic Nucleic Acid
cggtacaaggctagctacaacgaaggcggag

SEQ ID NO: 9910 - DNA, 31 bp, Artificial Sequence
  Description of Artificial Sequence:  Enzymatic Nucleic Acid
acggtcggggctagctacaacgaacaatagg

SEQ ID NO: 9911 - DNA, 31 bp, Artificial Sequence
  Description of Artificial Sequence:  Enzymatic Nucleic Acid
gtggacggggctagctacaacgacggtacaa

SEQ ID NO: 9912 - DNA, 31 bp, Artificial Sequence
  Description of Artificial Sequence:  Enzymatic Nucleic Acid
gcgccccgggctagctacaacgaggacggtc

SEQ ID NO: 9913 - DNA, 31 bp, Artificial Sequence
  Description of Artificial Sequence:  Enzymatic Nucleic Acid
aagagaggggctagctacaacgagcgccccg

SEQ ID NO: 9914 - DNA, 31 bp, Artificial Sequence
  Description of Artificial Sequence:  Enzymatic Nucleic Acid
agtccgcgggctagctacaacgaaaagagag

SEQ ID NO: 9915 - DNA, 31 bp, Artificial Sequence
  Description of Artificial Sequence:  Enzymatic Nucleic Acid
acggggagggctagctacaacgaccgcgtaa

SEQ ID NO: 9916 - DNA, 31 bp, Artificial Sequence
  Description of Artificial Sequence:  Enzymatic Nucleic Acid
ccggcagaggctagctacaacgagagaaggc

SEQ ID NO: 9917 - DNA, 31 bp, Artificial Sequence
  Description of Artificial Sequence:  Enzymatic Nucleic Acid
gcacacggggctagctacaacgaccggcaga

SEQ ID NO: 9918 - DNA, 31 bp, Artificial Sequence
  Description of Artificial Sequence:  Enzymatic Nucleic Acid
aagcgaagggctagctacaacgagcacacgg

SEQ ID NO: 9919 - DNA, 31 bp, Artificial Sequence
  Description of Artificial Sequence:  Enzymatic Nucleic Acid
tgcagaggggctagctacaacgagaagcgaa

SEQ ID NO: 9920 - DNA, 31 bp, Artificial Sequence
  Description of Artificial Sequence:  Enzymatic Nucleic Acid
atgcgacgggctagctacaacgagcagaggt

SEQ ID NO: 9921 - DNA, 31 bp, Artificial Sequence
  Description of Artificial Sequence:  Enzymatic Nucleic Acid
ggtctccaggctagctacaacgagcgacgtg

SEQ ID NO: 9922 - DNA, 31 bp, Artificial Sequence
  Description of Artificial Sequence:  Enzymatic Nucleic Acid
cacggtggggctagctacaacgactccatgc

SEQ ID NO: 9923 - DNA, 31 bp, Artificial Sequence
  Description of Artificial Sequence:  Enzymatic Nucleic Acid
gttcacggggctagctacaacgaggtctcca

SEQ ID NO: 9924 - DNA, 31 bp, Artificial Sequence
  Description of Artificial Sequence:  Enzymatic Nucleic Acid
tgtgggcgggctagctacaacgatcacggtg

SEQ ID NO: 9925 - DNA, 31 bp, Artificial Sequence
  Description of Artificial Sequence:  Enzymatic Nucleic Acid
tgggcaggggctagctacaacgatcctgtgg

SEQ ID NO: 9926 - DNA, 31 bp, Artificial Sequence
  Description of Artificial Sequence:  Enzymatic Nucleic Acid
tcctcttaggctagctacaacgagcaagacc

SEQ ID NO: 9927 - DNA, 31 bp, Artificial Sequence
  Description of Artificial Sequence:  Enzymatic Nucleic Acid
tccaagagggctagctacaacgacctcttat

SEQ ID NO: 9928 - DNA, 31 bp, Artificial Sequence
  Description of Artificial Sequence:  Enzymatic Nucleic Acid
gctgaaagggctagctacaacgaccaagagt

SEQ ID NO: 9929 - DNA, 31 bp, Artificial Sequence
  Description of Artificial Sequence:  Enzymatic Nucleic Acid
cgttgacaggctagctacaacgatgctgaaa

SEQ ID NO: 9930 - DNA, 31 bp, Artificial Sequence
  Description of Artificial Sequence:  Enzymatic Nucleic Acid
gtcggtcgggctagctacaacgatgacattg

SEQ ID NO: 9931 - DNA, 31 bp, Artificial Sequence
  Description of Artificial Sequence:  Enzymatic Nucleic Acid
aaggtcggggctagctacaacgacgttgaca

SEQ ID NO: 9932 - DNA, 31 bp, Artificial Sequence
  Description of Artificial Sequence:  Enzymatic Nucleic Acid
cctcaaggggctagctacaacgacggtcgtt

SEQ ID NO: 9933 - DNA, 31 bp, Artificial Sequence
  Description of Artificial Sequence:  Enzymatic Nucleic Acid
ttgaagtaggctagctacaacgagcctcaag

SEQ ID NO: 9934 - DNA, 31 bp, Artificial Sequence
  Description of Artificial Sequence:  Enzymatic Nucleic Acid
ctttgaagggctagctacaacgaatgcctca

SEQ ID NO: 9935 - DNA, 31 bp, Artificial Sequence
  Description of Artificial Sequence:  Enzymatic Nucleic Acid
acacacagggctagctacaacgactttgaag

SEQ ID NO: 9936 - DNA, 31 bp, Artificial Sequence
  Description of Artificial Sequence:  Enzymatic Nucleic Acid
cccactcaggctagctacaacgataaacaca

SEQ ID NO: 9937 - DNA, 31 bp, Artificial Sequence
  Description of Artificial Sequence:  Enzymatic Nucleic Acid
cctcctagggctagctacaacgaacaaagac

SEQ ID NO: 9938 - DNA, 31 bp, Artificial Sequence
  Description of Artificial Sequence:  Enzymatic Nucleic Acid
ccaatttaggctagctacaacgagcctacag

SEQ ID NO: 9939 - DNA, 31 bp, Artificial Sequence
  Description of Artificial Sequence:  Enzymatic Nucleic Acid
cacaccaaggctagctacaacgattatgcct

SEQ ID NO: 9940 - DNA, 31 bp, Artificial Sequence
  Description of Artificial Sequence:  Enzymatic Nucleic Acid
ggtgctggggctagctacaacgagaacacac

SEQ ID NO: 9941 - DNA, 31 bp, Artificial Sequence
  Description of Artificial Sequence:  Enzymatic Nucleic Acid
ttgcatggggctagctacaacgagctggtga

SEQ ID NO: 9942 - DNA, 31 bp, Artificial Sequence
  Description of Artificial Sequence:  Enzymatic Nucleic Acid
aagttgcaggctagctacaacgaggtgctgg

SEQ ID NO: 9943 - DNA, 31 bp, Artificial Sequence
  Description of Artificial Sequence:  Enzymatic Nucleic Acid
tgaaaaagggctagctacaacgatgcatggt

SEQ ID NO: 9944 - DNA, 31 bp, Artificial Sequence
  Description of Artificial Sequence:  Enzymatic Nucleic Acid
ggcagaggggctagctacaacgagaaaaagt

SEQ ID NO: 9945 - DNA, 31 bp, Artificial Sequence
  Description of Artificial Sequence:  Enzymatic Nucleic Acid
tgagatgaggctagctacaacgataggcaga

SEQ ID NO: 9946 - DNA, 31 bp, Artificial Sequence
  Description of Artificial Sequence:  Enzymatic Nucleic Acid
acatgagaggctagctacaacgagattaggc

SEQ ID NO: 9947 - DNA, 31 bp, Artificial Sequence
  Description of Artificial Sequence:  Enzymatic Nucleic Acid
catgaacaggctagctacaacgagagatgat

SEQ ID NO: 9948 - DNA, 31 bp, Artificial Sequence
  Description of Artificial Sequence:  Enzymatic Nucleic Acid
gtaggacaggctagctacaacgagaacatga

SEQ ID NO: 9949 - DNA, 31 bp, Artificial Sequence
  Description of Artificial Sequence:  Enzymatic Nucleic Acid
ttgaacagggctagctacaacgaaggacatg

SEQ ID NO: 9950 - DNA, 31 bp, Artificial Sequence
  Description of Artificial Sequence:  Enzymatic Nucleic Acid
aatgtccaggctagctacaacgagccccaaa

SEQ ID NO: 9951 - DNA, 31 bp, Artificial Sequence
  Description of Artificial Sequence:  Enzymatic Nucleic Acid
ggtcaatgggctagctacaacgaccatgccc

SEQ ID NO: 9952 - DNA, 31 bp, Artificial Sequence
  Description of Artificial Sequence:  Enzymatic Nucleic Acid
cgggtcaaggctagctacaacgagtccatgc

SEQ ID NO: 9953 - DNA, 31 bp, Artificial Sequence
  Description of Artificial Sequence:  Enzymatic Nucleic Acid
tatacgggggctagctacaacgacaatgtcc

SEQ ID NO: 9954 - DNA, 31 bp, Artificial Sequence
  Description of Artificial Sequence:  Enzymatic Nucleic Acid
attctttaggctagctacaacgaacgggtca

SEQ ID NO: 9955 - DNA, 31 bp, Artificial Sequence
  Description of Artificial Sequence:  Enzymatic Nucleic Acid
gctccaaaggctagctacaacgatctttata

SEQ ID NO: 9956 - DNA, 31 bp, Artificial Sequence
  Description of Artificial Sequence:  Enzymatic Nucleic Acid
aaagagagggctagctacaacgaaactccac

SEQ ID NO: 9957 - DNA, 31 bp, Artificial Sequence
  Description of Artificial Sequence:  Enzymatic Nucleic Acid
gaaagaagggctagctacaacgacagaaggc

SEQ ID NO: 9958 - DNA, 31 bp, Artificial Sequence
  Description of Artificial Sequence:  Enzymatic Nucleic Acid
atctcgaaggctagctacaacgaagaaggaa

SEQ ID NO: 9959 - DNA, 31 bp, Artificial Sequence
  Description of Artificial Sequence:  Enzymatic Nucleic Acid
cgaggagaggctagctacaacgactcgaata

SEQ ID NO: 9960 - DNA, 31 bp, Artificial Sequence
  Description of Artificial Sequence:  Enzymatic Nucleic Acid
aggcggtgggctagctacaacgacgaggaga

SEQ ID NO: 9961 - DNA, 31 bp, Artificial Sequence
  Description of Artificial Sequence:  Enzymatic Nucleic Acid
agaggcggggctagctacaacgagtcgagga

SEQ ID NO: 9962 - DNA, 31 bp, Artificial Sequence
  Description of Artificial Sequence:  Enzymatic Nucleic Acid
ccccccgaggctagctacaacgaacagagca

SEQ ID NO: 9963 - DNA, 31 bp, Artificial Sequence
  Description of Artificial Sequence:  Enzymatic Nucleic Acid
gaacaatgggctagctacaacgatccggaga

SEQ ID NO: 9964 - DNA, 31 bp, Artificial Sequence
  Description of Artificial Sequence:  Enzymatic Nucleic Acid
gtgaacaaggctagctacaacgagttccgga

SEQ ID NO: 9965 - DNA, 31 bp, Artificial Sequence
  Description of Artificial Sequence:  Enzymatic Nucleic Acid
tggtgaggggctagctacaacgagaacaatg

SEQ ID NO: 9966 - DNA, 31 bp, Artificial Sequence
  Description of Artificial Sequence:  Enzymatic Nucleic Acid
ccgtatggggctagctacaacgagaggtgaa

SEQ ID NO: 9967 - DNA, 31 bp, Artificial Sequence
  Description of Artificial Sequence:  Enzymatic Nucleic Acid
gtgccgtaggctagctacaacgaggtgaggt

SEQ ID NO: 9968 - DNA, 31 bp, Artificial Sequence
  Description of Artificial Sequence:  Enzymatic Nucleic Acid
gagtgccgggctagctacaacgaatggtgag

SEQ ID NO: 9969 - DNA, 31 bp, Artificial Sequence
  Description of Artificial Sequence:  Enzymatic Nucleic Acid
tgcctgagggctagctacaacgagccgtatg

SEQ ID NO: 9970 - DNA, 31 bp, Artificial Sequence
  Description of Artificial Sequence:  Enzymatic Nucleic Acid
acacagaaggctagctacaacgaagcttgcc

SEQ ID NO: 9971 - DNA, 31 bp, Artificial Sequence
  Description of Artificial Sequence:  Enzymatic Nucleic Acid
tagattcaggctagctacaacgacaactcac

SEQ ID NO: 9972 - DNA, 31 bp, Artificial Sequence
  Description of Artificial Sequence:  Enzymatic Nucleic Acid
tggctagaggctagctacaacgatcatcaac

SEQ ID NO: 9973 - DNA, 31 bp, Artificial Sequence
  Description of Artificial Sequence:  Enzymatic Nucleic Acid
cacccaggggctagctacaacgaggctagat

SEQ ID NO: 9974 - DNA, 31 bp, Artificial Sequence
  Description of Artificial Sequence:  Enzymatic Nucleic Acid
cttccaaaggctagctacaacgatacttccc

SEQ ID NO: 9975 - DNA, 31 bp, Artificial Sequence
  Description of Artificial Sequence:  Enzymatic Nucleic Acid
atgctggaggctagctacaacgacttccaaa

SEQ ID NO: 9976 - DNA, 31 bp, Artificial Sequence
  Description of Artificial Sequence:  Enzymatic Nucleic Acid
tccctggaggctagctacaacgagctggatc

SEQ ID NO: 9977 - DNA, 31 bp, Artificial Sequence
  Description of Artificial Sequence:  Enzymatic Nucleic Acid
actactaaggctagctacaacgatccctgga

SEQ ID NO: 9978 - DNA, 31 bp, Artificial Sequence
  Description of Artificial Sequence:  Enzymatic Nucleic Acid
cgttgacaggctagctacaacgaagctgact

SEQ ID NO: 9979 - DNA, 31 bp, Artificial Sequence
  Description of Artificial Sequence:  Enzymatic Nucleic Acid
tattaacgggctagctacaacgatgacatag

SEQ ID NO: 9980 - DNA, 31 bp, Artificial Sequence
  Description of Artificial Sequence:  Enzymatic Nucleic Acid
ggcccataggctagctacaacgataacgttg

SEQ ID NO: 9981 - DNA, 31 bp, Artificial Sequence
  Description of Artificial Sequence:  Enzymatic Nucleic Acid
taggcccaggctagctacaacgaattaacgt

SEQ ID NO: 9982 - DNA, 31 bp, Artificial Sequence
  Description of Artificial Sequence:  Enzymatic Nucleic Acid
ttgtctgaggctagctacaacgattttaggc

SEQ ID NO: 9983 - DNA, 31 bp, Artificial Sequence
  Description of Artificial Sequence:  Enzymatic Nucleic Acid
aatagttgggctagctacaacgactgatttt

SEQ ID NO: 9984 - DNA, 31 bp, Artificial Sequence
  Description of Artificial Sequence:  Enzymatic Nucleic Acid
cacaatagggctagctacaacgatgtctgat

SEQ ID NO: 9985 - DNA, 31 bp, Artificial Sequence
  Description of Artificial Sequence:  Enzymatic Nucleic Acid
aaccacaaggctagctacaacgaagttgtct

SEQ ID NO: 9986 - DNA, 31 bp, Artificial Sequence
  Description of Artificial Sequence:  Enzymatic Nucleic Acid
aggaaatgggctagctacaacgagaaaccac

SEQ ID NO: 9987 - DNA, 31 bp, Artificial Sequence
  Description of Artificial Sequence:  Enzymatic Nucleic Acid
acaggaaaggctagctacaacgagtgaaacc

SEQ ID NO: 9988 - DNA, 31 bp, Artificial Sequence
  Description of Artificial Sequence:  Enzymatic Nucleic Acid
cccaaaagggctagctacaacgaaagacagg

SEQ ID NO: 9989 - DNA, 31 bp, Artificial Sequence
  Description of Artificial Sequence:  Enzymatic Nucleic Acid
aagaacagggctagctacaacgattctcgcc

SEQ ID NO: 9990 - DNA, 31 bp, Artificial Sequence
  Description of Artificial Sequence:  Enzymatic Nucleic Acid
accaaataggctagctacaacgatcaagaac

SEQ ID NO: 9991 - DNA, 31 bp, Artificial Sequence
  Description of Artificial Sequence:  Enzymatic Nucleic Acid
acaccaaaggctagctacaacgaattcaaga

SEQ ID NO: 9992 - DNA, 31 bp, Artificial Sequence
  Description of Artificial Sequence:  Enzymatic Nucleic Acid
agtgcgaaggctagctacaacgaccacactc

SEQ ID NO: 9993 - DNA, 31 bp, Artificial Sequence
  Description of Artificial Sequence:  Enzymatic Nucleic Acid
aggaggagggctagctacaacgagcgaatcc

SEQ ID NO: 9994 - DNA, 31 bp, Artificial Sequence
  Description of Artificial Sequence:  Enzymatic Nucleic Acid
ggtctataggctagctacaacgagcaggagg

SEQ ID NO: 9995 - DNA, 31 bp, Artificial Sequence
  Description of Artificial Sequence:  Enzymatic Nucleic Acid
gtggtctaggctagctacaacgaatgcagga

SEQ ID NO: 9996 - DNA, 31 bp, Artificial Sequence
  Description of Artificial Sequence:  Enzymatic Nucleic Acid
tttggtggggctagctacaacgactatatgc

SEQ ID NO: 9997 - DNA, 31 bp, Artificial Sequence
  Description of Artificial Sequence:  Enzymatic Nucleic Acid
gcatttggggctagctacaacgaggtctata

SEQ ID NO: 9998 - DNA, 31 bp, Artificial Sequence
  Description of Artificial Sequence:  Enzymatic Nucleic Acid
taggggcaggctagctacaacgattggtggt

SEQ ID NO: 9999 - DNA, 31 bp, Artificial Sequence
  Description of Artificial Sequence:  Enzymatic Nucleic Acid
tgataagaggctagctacaacgaaggggcat

SEQ ID NO: 10000 - DNA, 31 bp, Artificial Sequence
  Description of Artificial Sequence:  Enzymatic Nucleic Acid
agtgttgaggctagctacaacgaaagatagg

SEQ ID NO: 10001 - DNA, 31 bp, Artificial Sequence
  Description of Artificial Sequence:  Enzymatic Nucleic Acid
cggaagtgggctagctacaacgatgataaga

SEQ ID NO: 10002 - DNA, 31 bp, Artificial Sequence
  Description of Artificial Sequence:  Enzymatic Nucleic Acid
tccggaagggctagctacaacgagttgataa

SEQ ID NO: 10003 - DNA, 31 bp, Artificial Sequence
  Description of Artificial Sequence:  Enzymatic Nucleic Acid
aacagtagggctagctacaacgattccggaa

SEQ ID NO: 10004 - DNA, 31 bp, Artificial Sequence
  Description of Artificial Sequence:  Enzymatic Nucleic Acid
aacaacagggctagctacaacgaagtttccg

SEQ ID NO: 10005 - DNA, 31 bp, Artificial Sequence
  Description of Artificial Sequence:  Enzymatic Nucleic Acid
cctcttcgggctagctacaacgactaacaac

SEQ ID NO: 10006 - DNA, 31 bp, Artificial Sequence
  Description of Artificial Sequence:  Enzymatic Nucleic Acid
cgagggagggctagctacaacgatcttcttc

SEQ ID NO: 10007 - DNA, 31 bp, Artificial Sequence
  Description of Artificial Sequence:  Enzymatic Nucleic Acid
gaccttcgggctagctacaacgactgcgagg

SEQ ID NO: 10008 - DNA, 31 bp, Artificial Sequence
  Description of Artificial Sequence:  Enzymatic Nucleic Acid
cgcggcgaggctagctacaacgatgagacct

SEQ ID NO: 10009 - DNA, 31 bp, Artificial Sequence
  Description of Artificial Sequence:  Enzymatic Nucleic Acid
gattgagaggctagctacaacgacttctgcg

SEQ ID NO: 10010 - DNA, 31 bp, Artificial Sequence
  Description of Artificial Sequence:  Enzymatic Nucleic Acid
tcccgagaggctagctacaacgatgagatct

SEQ ID NO: 10011 - DNA, 31 bp, Artificial Sequence
  Description of Artificial Sequence:  Enzymatic Nucleic Acid
cattgagaggctagctacaacgatcccgaga

SEQ ID NO: 10012 - DNA, 31 bp, Artificial Sequence
  Description of Artificial Sequence:  Enzymatic Nucleic Acid
tactaacaggctagctacaacgatgagattc

SEQ ID NO: 10013 - DNA, 31 bp, Artificial Sequence
  Description of Artificial Sequence:  Enzymatic Nucleic Acid
ccaaggaaggctagctacaacgaactaacat

SEQ ID NO: 10014 - DNA, 31 bp, Artificial Sequence
  Description of Artificial Sequence:  Enzymatic Nucleic Acid
cttatgtgggctagctacaacgaccaaggaa

SEQ ID NO: 10015 - DNA, 31 bp, Artificial Sequence
  Description of Artificial Sequence:  Enzymatic Nucleic Acid
accttatgggctagctacaacgagtccaagg

SEQ ID NO: 10016 - DNA, 31 bp, Artificial Sequence
  Description of Artificial Sequence:  Enzymatic Nucleic Acid
ccaccttaggctagctacaacgagtgtccaa

SEQ ID NO: 10017 - DNA, 31 bp, Artificial Sequence
  Description of Artificial Sequence:  Enzymatic Nucleic Acid
ccgtaaagggctagctacaacgattcccacc

SEQ ID NO: 10018 - DNA, 31 bp, Artificial Sequence
  Description of Artificial Sequence:  Enzymatic Nucleic Acid
aagccccgggctagctacaacgaaaagtttc

SEQ ID NO: 10019 - DNA, 31 bp, Artificial Sequence
  Description of Artificial Sequence:  Enzymatic Nucleic Acid
tagaagaaggctagctacaacgaaaagcccc

SEQ ID NO: 10020 - DNA, 31 bp, Artificial Sequence
  Description of Artificial Sequence:  Enzymatic Nucleic Acid
aggtaccgggctagctacaacgaagaagaat

SEQ ID NO: 10021 - DNA, 31 bp, Artificial Sequence
  Description of Artificial Sequence:  Enzymatic Nucleic Acid
aagcaaggggctagctacaacgaaccgtaga

SEQ ID NO: 10022 - DNA, 31 bp, Artificial Sequence
  Description of Artificial Sequence:  Enzymatic Nucleic Acid
atttaggaggctagctacaacgataaagcaa

SEQ ID NO: 10023 - DNA, 31 bp, Artificial Sequence
  Description of Artificial Sequence:  Enzymatic Nucleic Acid
gtttgccaggctagctacaacgattaggatt

SEQ ID NO: 10024 - DNA, 31 bp, Artificial Sequence
  Description of Artificial Sequence:  Enzymatic Nucleic Acid
agaaggagggctagctacaacgattgccatt

SEQ ID NO: 10025 - DNA, 31 bp, Artificial Sequence
  Description of Artificial Sequence:  Enzymatic Nucleic Acid
aatgaatgggctagctacaacgacaggaaaa

SEQ ID NO: 10026 - DNA, 31 bp, Artificial Sequence
  Description of Artificial Sequence:  Enzymatic Nucleic Acid
caaatgaaggctagctacaacgagtcaggaa

SEQ ID NO: 10027 - DNA, 31 bp, Artificial Sequence
  Description of Artificial Sequence:  Enzymatic Nucleic Acid
cctgcaaaggctagctacaacgagaatgtca

SEQ ID NO: 10028 - DNA, 31 bp, Artificial Sequence
  Description of Artificial Sequence:  Enzymatic Nucleic Acid
caacaatgggctagctacaacgacctcctgc

SEQ ID NO: 10029 - DNA, 31 bp, Artificial Sequence
  Description of Artificial Sequence:  Enzymatic Nucleic Acid
atcaacaaggctagctacaacgagtcctcct

SEQ ID NO: 10030 - DNA, 31 bp, Artificial Sequence
  Description of Artificial Sequence:  Enzymatic Nucleic Acid
tacatctaggctagctacaacgacaacaatg

SEQ ID NO: 10031 - DNA, 31 bp, Artificial Sequence
  Description of Artificial Sequence:  Enzymatic Nucleic Acid
tgcttacaggctagctacaacgactatcaac

SEQ ID NO: 10032 - DNA, 31 bp, Artificial Sequence
  Description of Artificial Sequence:  Enzymatic Nucleic Acid
cccacaaaggctagctacaacgatgcttaca

SEQ ID NO: 10033 - DNA, 31 bp, Artificial Sequence
  Description of Artificial Sequence:  Enzymatic Nucleic Acid
atttactgggctagctacaacgaaaggggcc

SEQ ID NO: 10034 - DNA, 31 bp, Artificial Sequence
  Description of Artificial Sequence:  Enzymatic Nucleic Acid
tgttttcaggctagctacaacgattactgta

SEQ ID NO: 10035 - DNA, 31 bp, Artificial Sequence
  Description of Artificial Sequence:  Enzymatic Nucleic Acid
gtctcctgggctagctacaacgatttcattt

SEQ ID NO: 10036 - DNA, 31 bp, Artificial Sequence
  Description of Artificial Sequence:  Enzymatic Nucleic Acid
aatttaagggctagctacaacgactcctgtt

SEQ ID NO: 10037 - DNA, 31 bp, Artificial Sequence
  Description of Artificial Sequence:  Enzymatic Nucleic Acid
atagttaaggctagctacaacgattaagtct

SEQ ID NO: 10038 - DNA, 31 bp, Artificial Sequence
  Description of Artificial Sequence:  Enzymatic Nucleic Acid
aggcatagggctagctacaacgataatttaa

SEQ ID NO: 10039 - DNA, 31 bp, Artificial Sequence
  Description of Artificial Sequence:  Enzymatic Nucleic Acid
agcaggcaggctagctacaacgaagttaatt

SEQ ID NO: 10040 - DNA, 31 bp, Artificial Sequence
  Description of Artificial Sequence:  Enzymatic Nucleic Acid
cattgggaggctagctacaacgaaaaaccta

SEQ ID NO: 10041 - DNA, 31 bp, Artificial Sequence
  Description of Artificial Sequence:  Enzymatic Nucleic Acid
tagtaacaggctagctacaacgatgggataa

SEQ ID NO: 10042 - DNA, 31 bp, Artificial Sequence
  Description of Artificial Sequence:  Enzymatic Nucleic Acid
atatttagggctagctacaacgaaacattgg

SEQ ID NO: 10043 - DNA, 31 bp, Artificial Sequence
  Description of Artificial Sequence:  Enzymatic Nucleic Acid
ggcaaataggctagctacaacgattagtaac

SEQ ID NO: 10044 - DNA, 31 bp, Artificial Sequence
  Description of Artificial Sequence:  Enzymatic Nucleic Acid
agggcaaaggctagctacaacgaatttagta

SEQ ID NO: 10045 - DNA, 31 bp, Artificial Sequence
  Description of Artificial Sequence:  Enzymatic Nucleic Acid
tccctttaggctagctacaacgactaagggc

SEQ ID NO: 10046 - DNA, 31 bp, Artificial Sequence
  Description of Artificial Sequence:  Enzymatic Nucleic Acid
cggtttgaggctagctacaacgaccctttat

SEQ ID NO: 10047 - DNA, 31 bp, Artificial Sequence
  Description of Artificial Sequence:  Enzymatic Nucleic Acid
taatacggggctagctacaacgattgatccc

SEQ ID NO: 10048 - DNA, 31 bp, Artificial Sequence
  Description of Artificial Sequence:  Enzymatic Nucleic Acid
ctggataaggctagctacaacgaacggtttg

SEQ ID NO: 10049 - DNA, 31 bp, Artificial Sequence
  Description of Artificial Sequence:  Enzymatic Nucleic Acid
actctggaggctagctacaacgaaatacggt

SEQ ID NO: 10050 - DNA, 31 bp, Artificial Sequence
  Description of Artificial Sequence:  Enzymatic Nucleic Acid
taactacaggctagctacaacgaactctgga

SEQ ID NO: 10051 - DNA, 31 bp, Artificial Sequence
  Description of Artificial Sequence:  Enzymatic Nucleic Acid
agtaatgaggctagctacaacgataactaca

SEQ ID NO: 10052 - DNA, 31 bp, Artificial Sequence
  Description of Artificial Sequence:  Enzymatic Nucleic Acid
ggaagtaaggctagctacaacgagattaact

SEQ ID NO: 10053 - DNA, 31 bp, Artificial Sequence
  Description of Artificial Sequence:  Enzymatic Nucleic Acid
tctggaagggctagctacaacgaaatgatta

SEQ ID NO: 10054 - DNA, 31 bp, Artificial Sequence
  Description of Artificial Sequence:  Enzymatic Nucleic Acid
atgtcgcgggctagctacaacgactggaagt

SEQ ID NO: 10055 - DNA, 31 bp, Artificial Sequence
  Description of Artificial Sequence:  Enzymatic Nucleic Acid
aaataatgggctagctacaacgacgcgtctg

SEQ ID NO: 10056 - DNA, 31 bp, Artificial Sequence
  Description of Artificial Sequence:  Enzymatic Nucleic Acid
gtaaataaggctagctacaacgagtcgcgtc

SEQ ID NO: 10057 - DNA, 31 bp, Artificial Sequence
  Description of Artificial Sequence:  Enzymatic Nucleic Acid
tgtgtaaaggctagctacaacgaaatgtcgc

SEQ ID NO: 10058 - DNA, 31 bp, Artificial Sequence
  Description of Artificial Sequence:  Enzymatic Nucleic Acid
agagtgtgggctagctacaacgaaaataatg

SEQ ID NO: 10059 - DNA, 31 bp, Artificial Sequence
  Description of Artificial Sequence:  Enzymatic Nucleic Acid
aaagagtgggctagctacaacgagtaaataa

SEQ ID NO: 10060 - DNA, 31 bp, Artificial Sequence
  Description of Artificial Sequence:  Enzymatic Nucleic Acid
ccaaagagggctagctacaacgagtgtaaat

SEQ ID NO: 10061 - DNA, 31 bp, Artificial Sequence
  Description of Artificial Sequence:  Enzymatic Nucleic Acid
atataagaggctagctacaacgaccccgcct

SEQ ID NO: 10062 - DNA, 31 bp, Artificial Sequence
  Description of Artificial Sequence:  Enzymatic Nucleic Acid
cttttataggctagctacaacgaaagatccc

SEQ ID NO: 10063 - DNA, 31 bp, Artificial Sequence
  Description of Artificial Sequence:  Enzymatic Nucleic Acid
ctcttttaggctagctacaacgaataagatc

SEQ ID NO: 10064 - DNA, 31 bp, Artificial Sequence
  Description of Artificial Sequence:  Enzymatic Nucleic Acid
gctacgtgggctagctacaacgaggactctc

SEQ ID NO: 10065 - DNA, 31 bp, Artificial Sequence
  Description of Artificial Sequence:  Enzymatic Nucleic Acid
gcgctacgggctagctacaacgagtggactc

SEQ ID NO: 10066 - DNA, 31 bp, Artificial Sequence
  Description of Artificial Sequence:  Enzymatic Nucleic Acid
ccgcaaaaggctagctacaacgagaggcgct

SEQ ID NO: 10067 - DNA, 31 bp, Artificial Sequence
  Description of Artificial Sequence:  Enzymatic Nucleic Acid
gaatatggggctagctacaacgagacccgca

SEQ ID NO: 10068 - DNA, 31 bp, Artificial Sequence
  Description of Artificial Sequence:  Enzymatic Nucleic Acid
caagaataggctagctacaacgaggtgaccc

SEQ ID NO: 10069 - DNA, 31 bp, Artificial Sequence
  Description of Artificial Sequence:  Enzymatic Nucleic Acid
cccaagaaggctagctacaacgaatggtgac

SEQ ID NO: 10070 - DNA, 31 bp, Artificial Sequence
  Description of Artificial Sequence:  Enzymatic Nucleic Acid
agatcttgggctagctacaacgatcccaaga

SEQ ID NO: 10071 - DNA, 31 bp, Artificial Sequence
  Description of Artificial Sequence:  Enzymatic Nucleic Acid
gctgtagaggctagctacaacgacttgttcc

SEQ ID NO: 10072 - DNA, 31 bp, Artificial Sequence
  Description of Artificial Sequence:  Enzymatic Nucleic Acid
ccatgctgggctagctacaacgaagatcttg

SEQ ID NO: 10073 - DNA, 31 bp, Artificial Sequence
  Description of Artificial Sequence:  Enzymatic Nucleic Acid
acctcccaggctagctacaacgagctgtaga

SEQ ID NO: 10074 - DNA, 31 bp, Artificial Sequence
  Description of Artificial Sequence:  Enzymatic Nucleic Acid
tttcgaggggctagctacaacgattggaaga

SEQ ID NO: 10075 - DNA, 31 bp, Artificial Sequence
  Description of Artificial Sequence:  Enzymatic Nucleic Acid
tgtccccaggctagctacaacgagccttttc

SEQ ID NO: 10076 - DNA, 31 bp, Artificial Sequence
  Description of Artificial Sequence:  Enzymatic Nucleic Acid
aagatttgggctagctacaacgaccccatgc

SEQ ID NO: 10077 - DNA, 31 bp, Artificial Sequence
  Description of Artificial Sequence:  Enzymatic Nucleic Acid
cagaaagaggctagctacaacgattgtcccc

SEQ ID NO: 10078 - DNA, 31 bp, Artificial Sequence
  Description of Artificial Sequence:  Enzymatic Nucleic Acid
ccaggggaggctagctacaacgatggggaca

SEQ ID NO: 10079 - DNA, 31 bp, Artificial Sequence
  Description of Artificial Sequence:  Enzymatic Nucleic Acid
gggaagaaggctagctacaacgacccagggg

SEQ ID NO: 10080 - DNA, 31 bp, Artificial Sequence
  Description of Artificial Sequence:  Enzymatic Nucleic Acid
actgatgaggctagctacaacgacggggaag

SEQ ID NO: 10081 - DNA, 31 bp, Artificial Sequence
  Description of Artificial Sequence:  Enzymatic Nucleic Acid
ccaactgaggctagctacaacgagatcgggg

SEQ ID NO: 10082 - DNA, 31 bp, Artificial Sequence
  Description of Artificial Sequence:  Enzymatic Nucleic Acid
atgcagggggctagctacaacgaccaactga

SEQ ID NO: 10083 - DNA, 31 bp, Artificial Sequence
  Description of Artificial Sequence:  Enzymatic Nucleic Acid
gctttgaaggctagctacaacgagcagggtc

SEQ ID NO: 10084 - DNA, 31 bp, Artificial Sequence
  Description of Artificial Sequence:  Enzymatic Nucleic Acid
ttactgagggctagctacaacgatggctttg

SEQ ID NO: 10085 - DNA, 31 bp, Artificial Sequence
  Description of Artificial Sequence:  Enzymatic Nucleic Acid
aatctggaggctagctacaacgattactgag

SEQ ID NO: 10086 - DNA, 31 bp, Artificial Sequence
  Description of Artificial Sequence:  Enzymatic Nucleic Acid
ggtcccaaggctagctacaacgactggattt

SEQ ID NO: 10087 - DNA, 31 bp, Artificial Sequence
  Description of Artificial Sequence:  Enzymatic Nucleic Acid
ggttgaggggctagctacaacgacccaatct

SEQ ID NO: 10088 - DNA, 31 bp, Artificial Sequence
  Description of Artificial Sequence:  Enzymatic Nucleic Acid
tgtgcgggggctagctacaacgatgaggtcc

SEQ ID NO: 10089 - DNA, 31 bp, Artificial Sequence
  Description of Artificial Sequence:  Enzymatic Nucleic Acid
gccagttgggctagctacaacgaccttgtgc

SEQ ID NO: 10090 - DNA, 31 bp, Artificial Sequence
  Description of Artificial Sequence:  Enzymatic Nucleic Acid
ccggccagggctagctacaacgatgtccttg

SEQ ID NO: 10091 - DNA, 31 bp, Artificial Sequence
  Description of Artificial Sequence:  Enzymatic Nucleic Acid
tgttggcgggctagctacaacgaccggccag

SEQ ID NO: 10092 - DNA, 31 bp, Artificial Sequence
  Description of Artificial Sequence:  Enzymatic Nucleic Acid
ccaccttgggctagctacaacgatggcgtcc

SEQ ID NO: 10093 - DNA, 31 bp, Artificial Sequence
  Description of Artificial Sequence:  Enzymatic Nucleic Acid
ggcccgaaggctagctacaacgagctcccac

SEQ ID NO: 10094 - DNA, 31 bp, Artificial Sequence
  Description of Artificial Sequence:  Enzymatic Nucleic Acid
gggaggggggctagctacaacgagaaccctg

SEQ ID NO: 10095 - DNA, 31 bp, Artificial Sequence
  Description of Artificial Sequence:  Enzymatic Nucleic Acid
gtcccccaggctagctacaacgaggggaggg

SEQ ID NO: 10096 - DNA, 31 bp, Artificial Sequence
  Description of Artificial Sequence:  Enzymatic Nucleic Acid
cccaacagggctagctacaacgacccccatg

SEQ ID NO: 10097 - DNA, 31 bp, Artificial Sequence
  Description of Artificial Sequence:  Enzymatic Nucleic Acid
cctgagcgggctagctacaacgagagggctc

SEQ ID NO: 10098 - DNA, 31 bp, Artificial Sequence
  Description of Artificial Sequence:  Enzymatic Nucleic Acid
gttgtgagggctagctacaacgaaggccctg

SEQ ID NO: 10099 - DNA, 31 bp, Artificial Sequence
  Description of Artificial Sequence:  Enzymatic Nucleic Acid
cacagttgggctagctacaacgagagtaggc

SEQ ID NO: 10100 - DNA, 31 bp, Artificial Sequence
  Description of Artificial Sequence:  Enzymatic Nucleic Acid
tggcacagggctagctacaacgatgtgagta

SEQ ID NO: 10101 - DNA, 31 bp, Artificial Sequence
  Description of Artificial Sequence:  Enzymatic Nucleic Acid
ccgattggggctagctacaacgaggaggcag

SEQ ID NO: 10102 - DNA, 31 bp, Artificial Sequence
  Description of Artificial Sequence:  Enzymatic Nucleic Acid
actgccgaggctagctacaacgatggtggag

SEQ ID NO: 10103 - DNA, 31 bp, Artificial Sequence
  Description of Artificial Sequence:  Enzymatic Nucleic Acid
taagggagggctagctacaacgaaggctgcc

SEQ ID NO: 10104 - DNA, 31 bp, Artificial Sequence
  Description of Artificial Sequence:  Enzymatic Nucleic Acid
ggtggagaggctagctacaacgaaagggagt

SEQ ID NO: 10105 - DNA, 31 bp, Artificial Sequence
  Description of Artificial Sequence:  Enzymatic Nucleic Acid
cttagaggggctagctacaacgaggagataa

SEQ ID NO: 10106 - DNA, 31 bp, Artificial Sequence
  Description of Artificial Sequence:  Enzymatic Nucleic Acid
gatgagtgggctagctacaacgacccttaga

SEQ ID NO: 10107 - DNA, 31 bp, Artificial Sequence
  Description of Artificial Sequence:  Enzymatic Nucleic Acid
aggatgagggctagctacaacgagtccctta

SEQ ID NO: 10108 - DNA, 31 bp, Artificial Sequence
  Description of Artificial Sequence:  Enzymatic Nucleic Acid
cctgaggaggctagctacaacgagagtgtcc

SEQ ID NO: 10109 - DNA, 31 bp, Artificial Sequence
  Description of Artificial Sequence:  Enzymatic Nucleic Acid
ccactgcaggctagctacaacgaggcctgag

SEQ ID NO: 10110 - RNA, 48 nt, Artificial Sequence
  Description of Artificial Sequence:  Enzymatic Nucleic Acid
gccaccagggaggaaacucccuucaaggacaucguccgggaggaaagu

SEQ ID NO: 10111 - RNA, 48 nt, Artificial Sequence
  Description of Artificial Sequence:  Enzymatic Nucleic Acid
gcagggcuggaggaaacucccuucaaggacaucguccgggacuguucc

SEQ ID NO: 10112 - RNA, 48 nt, Artificial Sequence
  Description of Artificial Sequence:  Enzymatic Nucleic Acid
auucugagggaggaaacucccuucaaggacaucguccgggagggcuca

SEQ ID NO: 10113 - RNA, 48 nt, Artificial Sequence
  Description of Artificial Sequence:  Enzymatic Nucleic Acid
cgauauggggaggaaacucccuucaaggacaucguccgggagagacag

SEQ ID NO: 10114 - RNA, 48 nt, Artificial Sequence
  Description of Artificial Sequence:  Enzymatic Nucleic Acid
ccagucuuggaggaaacucccuucaaggacaucguccggggauaagau

SEQ ID NO: 10115 - RNA, 48 nt, Artificial Sequence
  Description of Artificial Sequence:  Enzymatic Nucleic Acid
uccauguuggaggaaacucccuucaaggacaucguccggggguacagg

SEQ ID NO: 10116 - RNA, 48 nt, Artificial Sequence
  Description of Artificial Sequence:  Enzymatic Nucleic Acid
uccugaugggaggaaacucccuucaaggacaucguccggggauguucu

SEQ ID NO: 10117 - RNA, 48 nt, Artificial Sequence
  Description of Artificial Sequence:  Enzymatic Nucleic Acid
aacacgagggaggaaacucccuucaaggacaucguccgggaggggucc

SEQ ID NO: 10118 - RNA, 48 nt, Artificial Sequence
  Description of Artificial Sequence:  Enzymatic Nucleic Acid
auuuuuguggaggaaacucccuucaaggacaucguccgggaacaagaa

SEQ ID NO: 10119 - RNA, 48 nt, Artificial Sequence
  Description of Artificial Sequence:  Enzymatic Nucleic Acid
ugggacugggaggaaacucccuucaaggacaucguccggggaauuuug

SEQ ID NO: 10120 - RNA, 48 nt, Artificial Sequence
  Description of Artificial Sequence:  Enzymatic Nucleic Acid
acauccagggaggaaacucccuucaaggacaucguccggggauaacca

SEQ ID NO: 10121 - RNA, 48 nt, Artificial Sequence
  Description of Artificial Sequence:  Enzymatic Nucleic Acid
aaacgccgggaggaaacucccuucaaggacaucguccgggagacacau

SEQ ID NO: 10122 - RNA, 48 nt, Artificial Sequence
  Description of Artificial Sequence:  Enzymatic Nucleic Acid
gcaggaugggaggaaacucccuucaaggacaucguccgggagaggaag

SEQ ID NO: 10123 - RNA, 48 nt, Artificial Sequence
  Description of Artificial Sequence:  Enzymatic Nucleic Acid
cauagcagggaggaaacucccuucaaggacaucguccgggaggaugca

SEQ ID NO: 10124 - RNA, 48 nt, Artificial Sequence
  Description of Artificial Sequence:  Enzymatic Nucleic Acid
aggcauagggaggaaacucccuucaaggacaucguccgggagcaggau

SEQ ID NO: 10125 - RNA, 48 nt, Artificial Sequence
  Description of Artificial Sequence:  Enzymatic Nucleic Acid
agaugaggggaggaaacucccuucaaggacaucguccgggauagcagc

SEQ ID NO: 10126 - RNA, 48 nt, Artificial Sequence
  Description of Artificial Sequence:  Enzymatic Nucleic Acid
caaacgggggaggaaacucccuucaaggacaucguccgggaacauacc

SEQ ID NO: 10127 - RNA, 48 nt, Artificial Sequence
  Description of Artificial Sequence:  Enzymatic Nucleic Acid
agguuuugggaggaaacucccuucaaggacaucguccgggaugguccg

SEQ ID NO: 10128 - RNA, 48 nt, Artificial Sequence
  Description of Artificial Sequence:  Enzymatic Nucleic Acid
gaguugugggaggaaacucccuucaaggacaucguccgggagguuuug

SEQ ID NO: 10129 - RNA, 48 nt, Artificial Sequence
  Description of Artificial Sequence:  Enzymatic Nucleic Acid
uccuugagggaggaaacucccuucaaggacaucguccgggaggaguug

SEQ ID NO: 10130 - RNA, 48 nt, Artificial Sequence
  Description of Artificial Sequence:  Enzymatic Nucleic Acid
uuguacagggaggaaacucccuucaaggacaucguccgggaacaugag

SEQ ID NO: 10131 - RNA, 48 nt, Artificial Sequence
  Description of Artificial Sequence:  Enzymatic Nucleic Acid
uacaggugggaggaaacucccuucaaggacaucguccgggaguuuccg

SEQ ID NO: 10132 - RNA, 48 nt, Artificial Sequence
  Description of Artificial Sequence:  Enzymatic Nucleic Acid
guauuuugggaggaaacucccuucaaggacaucguccggggaaagccc

SEQ ID NO: 10133 - RNA, 48 nt, Artificial Sequence
  Description of Artificial Sequence:  Enzymatic Nucleic Acid
acaaauggggaggaaacucccuucaaggacaucguccgggacuaguaa

SEQ ID NO: 10134 - RNA, 48 nt, Artificial Sequence
  Description of Artificial Sequence:  Enzymatic Nucleic Acid
aaccacauggaggaaacucccuucaaggacaucguccgggauccauau

SEQ ID NO: 10135 - RNA, 48 nt, Artificial Sequence
  Description of Artificial Sequence:  Enzymatic Nucleic Acid
aagggacuggaggaaacucccuucaaggacaucguccgggaagauguu

SEQ ID NO: 10136 - RNA, 48 nt, Artificial Sequence
  Description of Artificial Sequence:  Enzymatic Nucleic Acid
aacagcggggaggaaacucccuucaaggacaucguccgggauaaaggg

SEQ ID NO: 10137 - RNA, 48 nt, Artificial Sequence
  Description of Artificial Sequence:  Enzymatic Nucleic Acid
gguaacagggaggaaacucccuucaaggacaucguccgggggcauaaa

SEQ ID NO: 10138 - RNA, 48 nt, Artificial Sequence
  Description of Artificial Sequence:  Enzymatic Nucleic Acid
uccuguggggaggaaacucccuucaaggacaucguccgggaaugugcc

SEQ ID NO: 10139 - RNA, 48 nt, Artificial Sequence
  Description of Artificial Sequence:  Enzymatic Nucleic Acid
uuuccaauggaggaaacucccuucaaggacaucguccgggaauaggcc

SEQ ID NO: 10140 - RNA, 48 nt, Artificial Sequence
  Description of Artificial Sequence:  Enzymatic Nucleic Acid
ccacaauuggaggaaacucccuucaaggacaucguccgggguugacau

SEQ ID NO: 10141 - RNA, 48 nt, Artificial Sequence
  Description of Artificial Sequence:  Enzymatic Nucleic Acid
aggggcggggaggaaacucccuucaaggacaucguccgggaaacccca

SEQ ID NO: 10142 - RNA, 48 nt, Artificial Sequence
  Description of Artificial Sequence:  Enzymatic Nucleic Acid
gaaaggggggaggaaacucccuucaaggacaucguccgggggcaaacc

SEQ ID NO: 10143 - RNA, 48 nt, Artificial Sequence
  Description of Artificial Sequence:  Enzymatic Nucleic Acid
ccacauugggaggaaacucccuucaaggacaucguccggggugaaagg

SEQ ID NO: 10144 - RNA, 48 nt, Artificial Sequence
  Description of Artificial Sequence:  Enzymatic Nucleic Acid
cauuaaagggaggaaacucccuucaaggacaucguccgggagaauauc

SEQ ID NO: 10145 - RNA, 48 nt, Artificial Sequence
  Description of Artificial Sequence:  Enzymatic Nucleic Acid
uauaaaggggaggaaacucccuucaaggacaucguccgggauuaaagc

SEQ ID NO: 10146 - RNA, 48 nt, Artificial Sequence
  Description of Artificial Sequence:  Enzymatic Nucleic Acid
uaugcaugggaggaaacucccuucaaggacaucguccgggauauaaag

SEQ ID NO: 10147 - RNA, 48 nt, Artificial Sequence
  Description of Artificial Sequence:  Enzymatic Nucleic Acid
cuuguaugggaggaaacucccuucaaggacaucguccgggaugcauau

SEQ ID NO: 10148 - RNA, 48 nt, Artificial Sequence
  Description of Artificial Sequence:  Enzymatic Nucleic Acid
uaaguuggggaggaaacucccuucaaggacaucguccggggagaaagu

SEQ ID NO: 10149 - RNA, 48 nt, Artificial Sequence
  Description of Artificial Sequence:  Enzymatic Nucleic Acid
uaaagguuggaggaaacucccuucaaggacaucguccgggacauacug

SEQ ID NO: 10150 - RNA, 48 nt, Artificial Sequence
  Description of Artificial Sequence:  Enzymatic Nucleic Acid
uugccgagggaggaaacucccuucaaggacaucguccgggaacggggu

SEQ ID NO: 10151 - RNA, 48 nt, Artificial Sequence
  Description of Artificial Sequence:  Enzymatic Nucleic Acid
acacuuggggaggaaacucccuucaaggacaucguccgggauagacca

SEQ ID NO: 10152 - RNA, 48 nt, Artificial Sequence
  Description of Artificial Sequence:  Enzymatic Nucleic Acid
ugcgucagggaggaaacucccuucaaggacaucguccgggaaacacuu

SEQ ID NO: 10153 - RNA, 48 nt, Artificial Sequence
  Description of Artificial Sequence:  Enzymatic Nucleic Acid
gguugcguggaggaaacucccuucaaggacaucguccgggagcaaaca

SEQ ID NO: 10154 - RNA, 48 nt, Artificial Sequence
  Description of Artificial Sequence:  Enzymatic Nucleic Acid
ggggguugggaggaaacucccuucaaggacaucguccggggucagcaa

SEQ ID NO: 10155 - RNA, 48 nt, Artificial Sequence
  Description of Artificial Sequence:  Enzymatic Nucleic Acid
cacgcaugggaggaaacucccuucaaggacaucguccggggcugaugg

SEQ ID NO: 10156 - RNA, 48 nt, Artificial Sequence
  Description of Artificial Sequence:  Enzymatic Nucleic Acid
guuccacgggaggaaacucccuucaaggacaucguccgggaugcgcug

SEQ ID NO: 10157 - RNA, 48 nt, Artificial Sequence
  Description of Artificial Sequence:  Enzymatic Nucleic Acid
uggaucggggaggaaacucccuucaaggacaucguccgggagaggaga

SEQ ID NO: 10158 - RNA, 48 nt, Artificial Sequence
  Description of Artificial Sequence:  Enzymatic Nucleic Acid
guauggauggaggaaacucccuucaaggacaucguccgggggcagagg

SEQ ID NO: 10159 - RNA, 48 nt, Artificial Sequence
  Description of Artificial Sequence:  Enzymatic Nucleic Acid
gaguuccgggaggaaacucccuucaaggacaucguccggggguaugga

SEQ ID NO: 10160 - RNA, 48 nt, Artificial Sequence
  Description of Artificial Sequence:  Enzymatic Nucleic Acid
aaaacaagggaggaaacucccuucaaggacaucguccgggggcuagga

SEQ ID NO: 10161 - RNA, 48 nt, Artificial Sequence
  Description of Artificial Sequence:  Enzymatic Nucleic Acid
gcugcgagggaggaaacucccuucaaggacaucguccgggaaaacaag

SEQ ID NO: 10162 - RNA, 48 nt, Artificial Sequence
  Description of Artificial Sequence:  Enzymatic Nucleic Acid
accugcugggaggaaacucccuucaaggacaucguccggggagcaaaa

SEQ ID NO: 10163 - RNA, 48 nt, Artificial Sequence
  Description of Artificial Sequence:  Enzymatic Nucleic Acid
agaauuguggaggaaacucccuucaaggacaucguccgggagucccga

SEQ ID NO: 10164 - RNA, 48 nt, Artificial Sequence
  Description of Artificial Sequence:  Enzymatic Nucleic Acid
cgggagagggaggaaacucccuucaaggacaucguccgggacgacaga

SEQ ID NO: 10165 - RNA, 48 nt, Artificial Sequence
  Description of Artificial Sequence:  Enzymatic Nucleic Acid
uauauuugggaggaaacucccuucaaggacaucguccggggggagagc

SEQ ID NO: 10166 - RNA, 48 nt, Artificial Sequence
  Description of Artificial Sequence:  Enzymatic Nucleic Acid
cagccuagggaggaaacucccuucaaggacaucguccgggagccaugg

SEQ ID NO: 10167 - RNA, 48 nt, Artificial Sequence
  Description of Artificial Sequence:  Enzymatic Nucleic Acid
guuggcagggaggaaacucccuucaaggacaucguccgggacagccua

SEQ ID NO: 10168 - RNA, 48 nt, Artificial Sequence
  Description of Artificial Sequence:  Enzymatic Nucleic Acid
ccaguuggggaggaaacucccuucaaggacaucguccgggagcacagc

SEQ ID NO: 10169 - RNA, 48 nt, Artificial Sequence
  Description of Artificial Sequence:  Enzymatic Nucleic Acid
acgucccgggaggaaacucccuucaaggacaucguccgggguaggauc

SEQ ID NO: 10170 - RNA, 48 nt, Artificial Sequence
  Description of Artificial Sequence:  Enzymatic Nucleic Acid
ggauucagggaggaaacucccuucaaggacaucguccggggccgacgg

SEQ ID NO: 10171 - RNA, 48 nt, Artificial Sequence
  Description of Artificial Sequence:  Enzymatic Nucleic Acid
gcgggauuggaggaaacucccuucaaggacaucguccgggagcgccga

SEQ ID NO: 10172 - RNA, 48 nt, Artificial Sequence
  Description of Artificial Sequence:  Enzymatic Nucleic Acid
gucguccgggaggaaacucccuucaaggacaucguccggggggauuca

SEQ ID NO: 10173 - RNA, 48 nt, Artificial Sequence
  Description of Artificial Sequence:  Enzymatic Nucleic Acid
ggagggguggaggaaacucccuucaaggacaucguccgggguccgcgg

SEQ ID NO: 10174 - RNA, 48 nt, Artificial Sequence
  Description of Artificial Sequence:  Enzymatic Nucleic Acid
gccccaagggaggaaacucccuucaaggacaucguccgggggccccgg

SEQ ID NO: 10175 - RNA, 48 nt, Artificial Sequence
  Description of Artificial Sequence:  Enzymatic Nucleic Acid
gaagcgggggaggaaacucccuucaaggacaucguccggggguagagc

SEQ ID NO: 10176 - RNA, 48 nt, Artificial Sequence
  Description of Artificial Sequence:  Enzymatic Nucleic Acid
cggagaagggaggaaacucccuucaaggacaucguccggggggcggua

SEQ ID NO: 10177 - RNA, 48 nt, Artificial Sequence
  Description of Artificial Sequence:  Enzymatic Nucleic Acid
acaauaggggaggaaacucccuucaaggacaucguccgggggagaagc

SEQ ID NO: 10178 - RNA, 48 nt, Artificial Sequence
  Description of Artificial Sequence:  Enzymatic Nucleic Acid
uggacgguggaggaaacucccuucaaggacaucguccggggguacaau

SEQ ID NO: 10179 - RNA, 48 nt, Artificial Sequence
  Description of Artificial Sequence:  Enzymatic Nucleic Acid
gagaggugggaggaaacucccuucaaggacaucguccggggccccgug

SEQ ID NO: 10180 - RNA, 48 nt, Artificial Sequence
  Description of Artificial Sequence:  Enzymatic Nucleic Acid
ggaguccgggaggaaacucccuucaaggacaucguccgggguaaagag

SEQ ID NO: 10181 - RNA, 48 nt, Artificial Sequence
  Description of Artificial Sequence:  Enzymatic Nucleic Acid
ugagaaggggaggaaacucccuucaaggacaucguccgggacagacgg

SEQ ID NO: 10182 - RNA, 48 nt, Artificial Sequence
  Description of Artificial Sequence:  Enzymatic Nucleic Acid
cgguccggggaggaaacucccuucaaggacaucguccgggagaugaga

SEQ ID NO: 10183 - RNA, 48 nt, Artificial Sequence
  Description of Artificial Sequence:  Enzymatic Nucleic Acid
gcgaagugggaggaaacucccuucaaggacaucguccgggacacgguc

SEQ ID NO: 10184 - RNA, 48 nt, Artificial Sequence
  Description of Artificial Sequence:  Enzymatic Nucleic Acid
aggugaagggaggaaacucccuucaaggacaucguccggggaagugca

SEQ ID NO: 10185 - RNA, 48 nt, Artificial Sequence
  Description of Artificial Sequence:  Enzymatic Nucleic Acid
gcgacgugggaggaaacucccuucaaggacaucguccgggagagguga

SEQ ID NO: 10186 - RNA, 48 nt, Artificial Sequence
  Description of Artificial Sequence:  Enzymatic Nucleic Acid
ucuccaugggaggaaacucccuucaaggacaucguccggggacgugca

SEQ ID NO: 10187 - RNA, 48 nt, Artificial Sequence
  Description of Artificial Sequence:  Enzymatic Nucleic Acid
ugggcguuggaggaaacucccuucaaggacaucguccgggacgguggu

SEQ ID NO: 10188 - RNA, 48 nt, Artificial Sequence
  Description of Artificial Sequence:  Enzymatic Nucleic Acid
ccugugggggaggaaacucccuucaaggacaucguccgggguucacgg

SEQ ID NO: 10189 - RNA, 48 nt, Artificial Sequence
  Description of Artificial Sequence:  Enzymatic Nucleic Acid
accuugggggaggaaacucccuucaaggacaucguccgggagguuccu

SEQ ID NO: 10190 - RNA, 48 nt, Artificial Sequence
  Description of Artificial Sequence:  Enzymatic Nucleic Acid
cucuuaugggaggaaacucccuucaaggacaucguccgggaagaccuu

SEQ ID NO: 10191 - RNA, 48 nt, Artificial Sequence
  Description of Artificial Sequence:  Enzymatic Nucleic Acid
aggucgguggaggaaacucccuucaaggacaucguccgggguugacau

SEQ ID NO: 10192 - RNA, 48 nt, Artificial Sequence
  Description of Artificial Sequence:  Enzymatic Nucleic Acid
cucaagguggaggaaacucccuucaaggacaucguccgggggucguug

SEQ ID NO: 10193 - RNA, 48 nt, Artificial Sequence
  Description of Artificial Sequence:  Enzymatic Nucleic Acid
guaugccuggaggaaacucccuucaaggacaucguccgggaaggucgg

SEQ ID NO: 10194 - RNA, 48 nt, Artificial Sequence
  Description of Artificial Sequence:  Enzymatic Nucleic Acid
cucccacuggaggaaacucccuucaaggacaucguccgggauuaaaca

SEQ ID NO: 10195 - RNA, 48 nt, Artificial Sequence
  Description of Artificial Sequence:  Enzymatic Nucleic Acid
aaaaguugggaggaaacucccuucaaggacaucguccgggauggugcu

SEQ ID NO: 10196 - RNA, 48 nt, Artificial Sequence
  Description of Artificial Sequence:  Enzymatic Nucleic Acid
ugauuaggggaggaaacucccuucaaggacaucguccgggagagguga

SEQ ID NO: 10197 - RNA, 48 nt, Artificial Sequence
  Description of Artificial Sequence:  Enzymatic Nucleic Acid
acccaaggggaggaaacucccuucaaggacaucguccgggacagcuug

SEQ ID NO: 10198 - RNA, 48 nt, Artificial Sequence
  Description of Artificial Sequence:  Enzymatic Nucleic Acid
auacggguggaggaaacucccuucaaggacaucguccgggaaugucca

SEQ ID NO: 10199 - RNA, 48 nt, Artificial Sequence
  Description of Artificial Sequence:  Enzymatic Nucleic Acid
ucagaaggggaggaaacucccuucaaggacaucguccgggaaaaaaga

SEQ ID NO: 10200 - RNA, 48 nt, Artificial Sequence
  Description of Artificial Sequence:  Enzymatic Nucleic Acid
aaagaaguggaggaaacucccuucaaggacaucguccgggagaaggca

SEQ ID NO: 10201 - RNA, 48 nt, Artificial Sequence
  Description of Artificial Sequence:  Enzymatic Nucleic Acid
ggagaucuggaggaaacucccuucaaggacaucguccggggaauagaa

SEQ ID NO: 10202 - RNA, 48 nt, Artificial Sequence
  Description of Artificial Sequence:  Enzymatic Nucleic Acid
ggcgguguggaggaaacucccuucaaggacaucguccggggaggagau

SEQ ID NO: 10203 - RNA, 48 nt, Artificial Sequence
  Description of Artificial Sequence:  Enzymatic Nucleic Acid
agcagaggggaggaaacucccuucaaggacaucguccgggggugucga

SEQ ID NO: 10204 - RNA, 48 nt, Artificial Sequence
  Description of Artificial Sequence:  Enzymatic Nucleic Acid
auacagagggaggaaacucccuucaaggacaucguccgggagaggcgg

SEQ ID NO: 10205 - RNA, 48 nt, Artificial Sequence
  Description of Artificial Sequence:  Enzymatic Nucleic Acid
caucaacuggaggaaacucccuucaaggacaucguccgggaccccaac

SEQ ID NO: 10206 - RNA, 48 nt, Artificial Sequence
  Description of Artificial Sequence:  Enzymatic Nucleic Acid
agauucauggaggaaacucccuucaaggacaucguccgggaacucacc

SEQ ID NO: 10207 - RNA, 48 nt, Artificial Sequence
  Description of Artificial Sequence:  Enzymatic Nucleic Acid
gcuagauuggaggaaacucccuucaaggacaucguccgggaucaacuc

SEQ ID NO: 10208 - RNA, 48 nt, Artificial Sequence
  Description of Artificial Sequence:  Enzymatic Nucleic Acid
caguuucuggaggaaacucccuucaaggacaucguccggggcccaaaa

SEQ ID NO: 10209 - RNA, 48 nt, Artificial Sequence
  Description of Artificial Sequence:  Enzymatic Nucleic Acid
caaauauuggaggaaacucccuucaaggacaucguccgggaagaacag

SEQ ID NO: 10210 - RNA, 48 nt, Artificial Sequence
  Description of Artificial Sequence:  Enzymatic Nucleic Acid
gaggagugggaggaaacucccuucaaggacaucguccggggaauccac

SEQ ID NO: 10211 - RNA, 48 nt, Artificial Sequence
  Description of Artificial Sequence:  Enzymatic Nucleic Acid
ucuauaugggaggaaacucccuucaaggacaucguccgggaggaggag

SEQ ID NO: 10212 - RNA, 48 nt, Artificial Sequence
  Description of Artificial Sequence:  Enzymatic Nucleic Acid
gauaggggggaggaaacucccuucaaggacaucguccgggauuuggug

SEQ ID NO: 10213 - RNA, 48 nt, Artificial Sequence
  Description of Artificial Sequence:  Enzymatic Nucleic Acid
ugccucuuggaggaaacucccuucaaggacaucguccggggucuaaca

SEQ ID NO: 10214 - RNA, 48 nt, Artificial Sequence
  Description of Artificial Sequence:  Enzymatic Nucleic Acid
cugcgaggggaggaaacucccuucaaggacaucguccggggagggagu

SEQ ID NO: 10215 - RNA, 48 nt, Artificial Sequence
  Description of Artificial Sequence:  Enzymatic Nucleic Acid
uucgucugggaggaaacucccuucaaggacaucguccggggaggcgag

SEQ ID NO: 10216 - RNA, 48 nt, Artificial Sequence
  Description of Artificial Sequence:  Enzymatic Nucleic Acid
gagaccuuggaggaaacucccuucaaggacaucguccggggucugcga

SEQ ID NO: 10217 - RNA, 48 nt, Artificial Sequence
  Description of Artificial Sequence:  Enzymatic Nucleic Acid
cgacgcggggaggaaacucccuucaaggacaucguccggggauugaga

SEQ ID NO: 10218 - RNA, 48 nt, Artificial Sequence
  Description of Artificial Sequence:  Enzymatic Nucleic Acid
cugcgacgggaggaaacucccuucaaggacaucguccgggggcgauug

SEQ ID NO: 10219 - RNA, 48 nt, Artificial Sequence
  Description of Artificial Sequence:  Enzymatic Nucleic Acid
aucuucugggaggaaacucccuucaaggacaucguccggggacgcggc

SEQ ID NO: 10220 - RNA, 48 nt, Artificial Sequence
  Description of Artificial Sequence:  Enzymatic Nucleic Acid
gauuaaagggaggaaacucccuucaaggacaucguccgggaagguacc

SEQ ID NO: 10221 - RNA, 48 nt, Artificial Sequence
  Description of Artificial Sequence:  Enzymatic Nucleic Acid
augaauguggaggaaacucccuucaaggacaucguccgggaggaaaag

SEQ ID NO: 10222 - RNA, 48 nt, Artificial Sequence
  Description of Artificial Sequence:  Enzymatic Nucleic Acid
uccuccugggaggaaacucccuucaaggacaucguccgggaaaugaau

SEQ ID NO: 10223 - RNA, 48 nt, Artificial Sequence
  Description of Artificial Sequence:  Enzymatic Nucleic Acid
acaucuauggaggaaacucccuucaaggacaucguccgggaacaaugu

SEQ ID NO: 10224 - RNA, 48 nt, Artificial Sequence
  Description of Artificial Sequence:  Enzymatic Nucleic Acid
ccuguuuuggaggaaacucccuucaaggacaucguccgggauuuacug

SEQ ID NO: 10225 - RNA, 48 nt, Artificial Sequence
  Description of Artificial Sequence:  Enzymatic Nucleic Acid
cuagcaggggaggaaacucccuucaaggacaucguccgggauaguuaa

SEQ ID NO: 10226 - RNA, 48 nt, Artificial Sequence
  Description of Artificial Sequence:  Enzymatic Nucleic Acid
aaaccuagggaggaaacucccuucaaggacaucguccgggaggcauag

SEQ ID NO: 10227 - RNA, 48 nt, Artificial Sequence
  Description of Artificial Sequence:  Enzymatic Nucleic Acid
ucuaagggggaggaaacucccuucaaggacaucguccgggaaauauuu

SEQ ID NO: 10228 - RNA, 48 nt, Artificial Sequence
  Description of Artificial Sequence:  Enzymatic Nucleic Acid
uaaugucgggaggaaacucccuucaaggacaucguccggggucuggaa

SEQ ID NO: 10229 - RNA, 48 nt, Artificial Sequence
  Description of Artificial Sequence:  Enzymatic Nucleic Acid
aauaauguggaggaaacucccuucaaggacaucguccggggcgucugg

SEQ ID NO: 10230 - RNA, 48 nt, Artificial Sequence
  Description of Artificial Sequence:  Enzymatic Nucleic Acid
aaaugaggggaggaaacucccuucaaggacaucguccggggcuacgug

SEQ ID NO: 10231 - RNA, 48 nt, Artificial Sequence
  Description of Artificial Sequence:  Enzymatic Nucleic Acid
gugacccgggaggaaacucccuucaaggacaucguccgggaaaaugag

SEQ ID NO: 10232 - RNA, 48 nt, Artificial Sequence
  Description of Artificial Sequence:  Enzymatic Nucleic Acid
ugccuuuuggaggaaacucccuucaaggacaucguccggggagguuug

SEQ ID NO: 10233 - RNA, 48 nt, Artificial Sequence
  Description of Artificial Sequence:  Enzymatic Nucleic Acid
cugaugauggaggaaacucccuucaaggacaucguccgggggggaaga

SEQ ID NO: 10234 - RNA, 48 nt, Artificial Sequence
  Description of Artificial Sequence:  Enzymatic Nucleic Acid
uuugaaugggaggaaacucccuucaaggacaucguccgggagggucca

SEQ ID NO: 10235 - RNA, 48 nt, Artificial Sequence
  Description of Artificial Sequence:  Enzymatic Nucleic Acid
uccuugugggaggaaacucccuucaaggacaucguccgggggguugag

SEQ ID NO: 10236 - RNA, 48 nt, Artificial Sequence
  Description of Artificial Sequence:  Enzymatic Nucleic Acid
cuuguuggggaggaaacucccuucaaggacaucguccgggguccggcc

SEQ ID NO: 10237 - RNA, 48 nt, Artificial Sequence
  Description of Artificial Sequence:  Enzymatic Nucleic Acid
gcccugagggaggaaacucccuucaaggacaucguccggggugagggc

SEQ ID NO: 10238 - RNA, 48 nt, Artificial Sequence
  Description of Artificial Sequence:  Enzymatic Nucleic Acid
gcugcuggggaggaaacucccuucaaggacaucguccgggacaguugu

SEQ ID NO: 10239 - RNA, 48 nt, Artificial Sequence
  Description of Artificial Sequence:  Enzymatic Nucleic Acid
gguggaggggaggaaacucccuucaaggacaucguccgggaggaggag

SEQ ID NO: 10240 - RNA, 48 nt, Artificial Sequence
  Description of Artificial Sequence:  Enzymatic Nucleic Acid
ggaaaguaggaggaaacucccuucaaggacaucguccgggagggcccu

SEQ ID NO: 10241 - RNA, 48 nt, Artificial Sequence
  Description of Artificial Sequence:  Enzymatic Nucleic Acid
ggcagagaggaggaaacucccuucaaggacaucguccgggaguauucu

SEQ ID NO: 10242 - RNA, 48 nt, Artificial Sequence
  Description of Artificial Sequence:  Enzymatic Nucleic Acid
guucgguaggaggaaacucccuucaaggacaucguccgggaggguccc

SEQ ID NO: 10243 - RNA, 48 nt, Artificial Sequence
  Description of Artificial Sequence:  Enzymatic Nucleic Acid
gccuguaaggaggaaacucccuucaaggacaucguccgggacgagcag

SEQ ID NO: 10244 - RNA, 48 nt, Artificial Sequence
  Description of Artificial Sequence:  Enzymatic Nucleic Acid
uuugucaaggaggaaacucccuucaaggacaucguccgggaagaaaaa

SEQ ID NO: 10245 - RNA, 48 nt, Artificial Sequence
  Description of Artificial Sequence:  Enzymatic Nucleic Acid
ccaagacaggaggaaacucccuucaaggacaucguccgggacgggugu

SEQ ID NO: 10246 - RNA, 48 nt, Artificial Sequence
  Description of Artificial Sequence:  Enzymatic Nucleic Acid
ggccaagaggaggaaacucccuucaaggacaucguccgggacacgggu

SEQ ID NO: 10247 - RNA, 48 nt, Artificial Sequence
  Description of Artificial Sequence:  Enzymatic Nucleic Acid
gaggacaaggaggaaacucccuucaaggacaucguccgggagguuggu

SEQ ID NO: 10248 - RNA, 48 nt, Artificial Sequence
  Description of Artificial Sequence:  Enzymatic Nucleic Acid
uuggaggaggaggaaacucccuucaaggacaucguccgggaacagguu

SEQ ID NO: 10249 - RNA, 48 nt, Artificial Sequence
  Description of Artificial Sequence:  Enzymatic Nucleic Acid
aaccaggaggaggaaacucccuucaaggacaucguccgggaaauugga

SEQ ID NO: 10250 - RNA, 48 nt, Artificial Sequence
  Description of Artificial Sequence:  Enzymatic Nucleic Acid
cgcagacaggaggaaacucccuucaaggacaucguccgggauccagcg

SEQ ID NO: 10251 - RNA, 48 nt, Artificial Sequence
  Description of Artificial Sequence:  Enzymatic Nucleic Acid
gccgcagaggaggaaacucccuucaaggacaucguccgggacauccag

SEQ ID NO: 10252 - RNA, 48 nt, Artificial Sequence
  Description of Artificial Sequence:  Enzymatic Nucleic Acid
agaaccaaggaggaaacucccuucaaggacaucguccgggaagaagau

SEQ ID NO: 10253 - RNA, 48 nt, Artificial Sequence
  Description of Artificial Sequence:  Enzymatic Nucleic Acid
acgggcaaggaggaaacucccuucaaggacaucguccgggauaccuug

SEQ ID NO: 10254 - RNA, 48 nt, Artificial Sequence
  Description of Artificial Sequence:  Enzymatic Nucleic Acid
uuagaggaggaggaaacucccuucaaggacaucguccgggaaacgggc

SEQ ID NO: 10255 - RNA, 48 nt, Artificial Sequence
  Description of Artificial Sequence:  Enzymatic Nucleic Acid
gagggaaaggaggaaacucccuucaaggacaucguccgggauagaggu

SEQ ID NO: 10256 - RNA, 48 nt, Artificial Sequence
  Description of Artificial Sequence:  Enzymatic Nucleic Acid
uacagcaaggaggaaacucccuucaaggacaucguccgggaugaggga

SEQ ID NO: 10257 - RNA, 48 nt, Artificial Sequence
  Description of Artificial Sequence:  Enzymatic Nucleic Acid
guuuuguaggaggaaacucccuucaaggacaucguccgggagcaacau

SEQ ID NO: 10258 - RNA, 48 nt, Artificial Sequence
  Description of Artificial Sequence:  Enzymatic Nucleic Acid
ugggaauaggaggaaacucccuucaaggacaucguccgggaggugcag

SEQ ID NO: 10259 - RNA, 48 nt, Artificial Sequence
  Description of Artificial Sequence:  Enzymatic Nucleic Acid
ccacugaaggaggaaacucccuucaaggacaucguccgggaaauggca

SEQ ID NO: 10260 - RNA, 48 nt, Artificial Sequence
  Description of Artificial Sequence:  Enzymatic Nucleic Acid
aagccagaggaggaaacucccuucaaggacaucguccgggaguggggg

SEQ ID NO: 10261 - RNA, 48 nt, Artificial Sequence
  Description of Artificial Sequence:  Enzymatic Nucleic Acid
caaaaccaggaggaaacucccuucaaggacaucguccgggaucaucca

SEQ ID NO: 10262 - RNA, 48 nt, Artificial Sequence
  Description of Artificial Sequence:  Enzymatic Nucleic Acid
auguuguaggaggaaacucccuucaaggacaucguccgggagacuugg

SEQ ID NO: 10263 - RNA, 48 nt, Artificial Sequence
  Description of Artificial Sequence:  Enzymatic Nucleic Acid
auugguaaggaggaaacucccuucaaggacaucguccgggagcggcau

SEQ ID NO: 10264 - RNA, 48 nt, Artificial Sequence
  Description of Artificial Sequence:  Enzymatic Nucleic Acid
cccaaagaggaggaaacucccuucaaggacaucguccgggaaaagaaa

SEQ ID NO: 10265 - RNA, 48 nt, Artificial Sequence
  Description of Artificial Sequence:  Enzymatic Nucleic Acid
cccaauuaggaggaaacucccuucaaggacaucguccgggauauccca

SEQ ID NO: 10266 - RNA, 48 nt, Artificial Sequence
  Description of Artificial Sequence:  Enzymatic Nucleic Acid
uuuuuguaggaggaaacucccuucaaggacaucguccgggaauauguu

SEQ ID NO: 10267 - RNA, 48 nt, Artificial Sequence
  Description of Artificial Sequence:  Enzymatic Nucleic Acid
cuaaaacaggaggaaacucccuucaaggacaucguccgggauuuugau

SEQ ID NO: 10268 - RNA, 48 nt, Artificial Sequence
  Description of Artificial Sequence:  Enzymatic Nucleic Acid
uccuaaaaggaggaaacucccuucaaggacaucguccgggacauuuug

SEQ ID NO: 10269 - RNA, 48 nt, Artificial Sequence
  Description of Artificial Sequence:  Enzymatic Nucleic Acid
ccuguuuaggaggaaacucccuucaaggacaucguccgggaggaaguu

SEQ ID NO: 10270 - RNA, 48 nt, Artificial Sequence
  Description of Artificial Sequence:  Enzymatic Nucleic Acid
uucguugaggaggaaacucccuucaaggacaucguccgggauacuuuc

SEQ ID NO: 10271 - RNA, 48 nt, Artificial Sequence
  Description of Artificial Sequence:  Enzymatic Nucleic Acid
aagacccaggaggaaacucccuucaaggacaucguccgggaauucguu

SEQ ID NO: 10272 - RNA, 48 nt, Artificial Sequence
  Description of Artificial Sequence:  Enzymatic Nucleic Acid
aauauccaggaggaaacucccuucaaggacaucguccgggauugcgug

SEQ ID NO: 10273 - RNA, 48 nt, Artificial Sequence
  Description of Artificial Sequence:  Enzymatic Nucleic Acid
aagguucaggaggaaacucccuucaaggacaucguccgggauacuguu

SEQ ID NO: 10274 - RNA, 48 nt, Artificial Sequence
  Description of Artificial Sequence:  Enzymatic Nucleic Acid
ucagcaaaggaggaaacucccuucaaggacaucguccgggacuuggca

SEQ ID NO: 10275 - RNA, 48 nt, Artificial Sequence
  Description of Artificial Sequence:  Enzymatic Nucleic Acid
aggagacaggaggaaacucccuucaaggacaucguccgggaaagguuc

SEQ ID NO: 10276 - RNA, 48 nt, Artificial Sequence
  Description of Artificial Sequence:  Enzymatic Nucleic Acid
agaggagaggaggaaacucccuucaaggacaucguccgggacaaaggu

SEQ ID NO: 10277 - RNA, 48 nt, Artificial Sequence
  Description of Artificial Sequence:  Enzymatic Nucleic Acid
gagcaaaaggaggaaacucccuucaaggacaucguccgggaagcggcu

SEQ ID NO: 10278 - RNA, 48 nt, Artificial Sequence
  Description of Artificial Sequence:  Enzymatic Nucleic Acid
gagcacgaggaggaaacucccuucaaggacaucguccgggagaauugu

SEQ ID NO: 10279 - RNA, 48 nt, Artificial Sequence
  Description of Artificial Sequence:  Enzymatic Nucleic Acid
uggcagcaggaggaaacucccuucaaggacaucguccgggagccuagc

SEQ ID NO: 10280 - RNA, 48 nt, Artificial Sequence
  Description of Artificial Sequence:  Enzymatic Nucleic Acid
gacguaaaggaggaaacucccuucaaggacaucguccgggaaaggacg

SEQ ID NO: 10281 - RNA, 48 nt, Artificial Sequence
  Description of Artificial Sequence:  Enzymatic Nucleic Acid
ggucgguaggaggaaacucccuucaaggacaucguccgggaauaggcg

SEQ ID NO: 10282 - RNA, 48 nt, Artificial Sequence
  Description of Artificial Sequence:  Enzymatic Nucleic Acid
agaaggcaggaggaaacucccuucaaggacaucguccgggagacgggg

SEQ ID NO: 10283 - RNA, 48 nt, Artificial Sequence
  Description of Artificial Sequence:  Enzymatic Nucleic Acid
gaagugcaggaggaaacucccuucaaggacaucguccgggacgguccg

SEQ ID NO: 10284 - RNA, 48 nt, Artificial Sequence
  Description of Artificial Sequence:  Enzymatic Nucleic Acid
gucguugaggaggaaacucccuucaaggacaucguccgggauugcuga

SEQ ID NO: 10285 - RNA, 48 nt, Artificial Sequence
  Description of Artificial Sequence:  Enzymatic Nucleic Acid
uaaacacaggaggaaacucccuucaaggacaucguccgggagucuuug

SEQ ID NO: 10286 - RNA, 48 nt, Artificial Sequence
  Description of Artificial Sequence:  Enzymatic Nucleic Acid
auuaaacaggaggaaacucccuucaaggacaucguccgggacagucuu

SEQ ID NO: 10287 - RNA, 48 nt, Artificial Sequence
  Description of Artificial Sequence:  Enzymatic Nucleic Acid
ucauuaaaggaggaaacucccuucaaggacaucguccgggacacaguc

SEQ ID NO: 10288 - RNA, 48 nt, Artificial Sequence
  Description of Artificial Sequence:  Enzymatic Nucleic Acid
uccuaguaggaggaaacucccuucaaggacaucguccgggaaagaccu

SEQ ID NO: 10289 - RNA, 48 nt, Artificial Sequence
  Description of Artificial Sequence:  Enzymatic Nucleic Acid
uaugccuaggaggaaacucccuucaaggacaucguccgggagccuccu

SEQ ID NO: 10290 - RNA, 48 nt, Artificial Sequence
  Description of Artificial Sequence:  Enzymatic Nucleic Acid
ggugaacaggaggaaacucccuucaaggacaucguccgggaccaauuu

SEQ ID NO: 10291 - RNA, 48 nt, Artificial Sequence
  Description of Artificial Sequence:  Enzymatic Nucleic Acid
cuggugaaggaggaaacucccuucaaggacaucguccgggacaccaau

SEQ ID NO: 10292 - RNA, 48 nt, Artificial Sequence
  Description of Artificial Sequence:  Enzymatic Nucleic Acid
gacaugaaggaggaaacucccuucaaggacaucguccgggaugagaug

SEQ ID NO: 10293 - RNA, 48 nt, Artificial Sequence
  Description of Artificial Sequence:  Enzymatic Nucleic Acid
caguaggaggaggaaacucccuucaaggacaucguccgggaugaacau

SEQ ID NO: 10294 - RNA, 48 nt, Artificial Sequence
  Description of Artificial Sequence:  Enzymatic Nucleic Acid
ggcuugaaggaggaaacucccuucaaggacaucguccgggaguaggac

SEQ ID NO: 10295 - RNA, 48 nt, Artificial Sequence
  Description of Artificial Sequence:  Enzymatic Nucleic Acid
ccaaggcaggaggaaacucccuucaaggacaucguccgggagcuugga

SEQ ID NO: 10296 - RNA, 48 nt, Artificial Sequence
  Description of Artificial Sequence:  Enzymatic Nucleic Acid
uaacuccaggaggaaacucccuucaaggacaucguccgggagaagcuc

SEQ ID NO: 10297 - RNA, 48 nt, Artificial Sequence
  Description of Artificial Sequence:  Enzymatic Nucleic Acid
ccccgauaggaggaaacucccuucaaggacaucguccgggagagcaga

SEQ ID NO: 10298 - RNA, 48 nt, Artificial Sequence
  Description of Artificial Sequence:  Enzymatic Nucleic Acid
gaggugaaggaggaaacucccuucaaggacaucguccgggaauguucc

SEQ ID NO: 10299 - RNA, 48 nt, Artificial Sequence
  Description of Artificial Sequence:  Enzymatic Nucleic Acid
ccccaacaggaggaaacucccuucaaggacaucguccgggagaauagc

SEQ ID NO: 10300 - RNA, 48 nt, Artificial Sequence
  Description of Artificial Sequence:  Enzymatic Nucleic Acid
caccccaaggaggaaacucccuucaaggacaucguccgggacagaaua

SEQ ID NO: 10301 - RNA, 48 nt, Artificial Sequence
  Description of Artificial Sequence:  Enzymatic Nucleic Acid
aacguugaggaggaaacucccuucaaggacaucguccgggauagcuga

SEQ ID NO: 10302 - RNA, 48 nt, Artificial Sequence
  Description of Artificial Sequence:  Enzymatic Nucleic Acid
ugaaaccaggaggaaacucccuucaaggacaucguccgggaauaguug

SEQ ID NO: 10303 - RNA, 48 nt, Artificial Sequence
  Description of Artificial Sequence:  Enzymatic Nucleic Acid
aaguaagaggaggaaacucccuucaaggacaucguccgggaggaaaug

SEQ ID NO: 10304 - RNA, 48 nt, Artificial Sequence
  Description of Artificial Sequence:  Enzymatic Nucleic Acid
uucaagaaggaggaaacucccuucaaggacaucguccgggaguuucuc

SEQ ID NO: 10305 - RNA, 48 nt, Artificial Sequence
  Description of Artificial Sequence:  Enzymatic Nucleic Acid
ccaaaagaggaggaaacucccuucaaggacaucguccgggaccaaaua

SEQ ID NO: 10306 - RNA, 48 nt, Artificial Sequence
  Description of Artificial Sequence:  Enzymatic Nucleic Acid
cgaauccaggaggaaacucccuucaaggacaucguccgggacuccaaa

SEQ ID NO: 10307 - RNA, 48 nt, Artificial Sequence
  Description of Artificial Sequence:  Enzymatic Nucleic Acid
ucuaacaaggaggaaacucccuucaaggacaucguccgggaguaguuu

SEQ ID NO: 10308 - RNA, 48 nt, Artificial Sequence
  Description of Artificial Sequence:  Enzymatic Nucleic Acid
ucgucuaaggaggaaacucccuucaaggacaucguccgggaacaguag

SEQ ID NO: 10309 - RNA, 48 nt, Artificial Sequence
  Description of Artificial Sequence:  Enzymatic Nucleic Acid
aauacuaaggaggaaacucccuucaaggacaucguccgggauugagau

SEQ ID NO: 10310 - RNA, 48 nt, Artificial Sequence
  Description of Artificial Sequence:  Enzymatic Nucleic Acid
ucuaucaaggaggaaacucccuucaaggacaucguccgggaauguccu

SEQ ID NO: 10311 - RNA, 48 nt, Artificial Sequence
  Description of Artificial Sequence:  Enzymatic Nucleic Acid
auugcuuaggaggaaacucccuucaaggacaucguccgggaucuauca

SEQ ID NO: 10312 - RNA, 48 nt, Artificial Sequence
  Description of Artificial Sequence:  Enzymatic Nucleic Acid
gggccccaggaggaaacucccuucaaggacaucguccgggaaauugcu

SEQ ID NO: 10313 - RNA, 48 nt, Artificial Sequence
  Description of Artificial Sequence:  Enzymatic Nucleic Acid
uuuaguaaggaggaaacucccuucaaggacaucguccgggauugggau

SEQ ID NO: 10314 - RNA, 48 nt, Artificial Sequence
  Description of Artificial Sequence:  Enzymatic Nucleic Acid
auuaacuaggaggaaacucccuucaaggacaucguccgggauacucug

SEQ ID NO: 10315 - RNA, 48 nt, Artificial Sequence
  Description of Artificial Sequence:  Enzymatic Nucleic Acid
auuggggaggaggaaacucccuucaaggacaucguccgggagaaagau

SEQ ID NO: 10316 - RNA, 48 nt, Artificial Sequence
  Description of Artificial Sequence:  Enzymatic Nucleic Acid
caccccaaggaggaaacucccuucaaggacaucguccgggaguccccc

SEQ ID NO: 10317 - RNA, 48 nt, Artificial Sequence
  Description of Artificial Sequence:  Enzymatic Nucleic Acid
ugcuggcaggaggaaacucccuucaaggacaucguccgggaguuguga

SEQ ID NO: 10318 - RNA, 48 nt, Artificial Sequence
  Description of Artificial Sequence:  Enzymatic Nucleic Acid
ggcccugaggaggaaacucccuucaaggacaucguccgggucugggau

SEQ ID NO: 10319 - RNA, 48 nt, Artificial Sequence
  Description of Artificial Sequence:  Enzymatic Nucleic Acid
guacagggggaggaaacucccuucaaggacaucguccgggccugacuc

SEQ ID NO: 10320 - RNA, 48 nt, Artificial Sequence
  Description of Artificial Sequence:  Enzymatic Nucleic Acid
uggagccaggaggaaacucccuucaaggacaucguccgggcagcagga

SEQ ID NO: 10321 - RNA, 48 nt, Artificial Sequence
  Description of Artificial Sequence:  Enzymatic Nucleic Acid
aacuggagggaggaaacucccuucaaggacaucguccgggcaccagca

SEQ ID NO: 10322 - RNA, 48 nt, Artificial Sequence
  Description of Artificial Sequence:  Enzymatic Nucleic Acid
uuccugaaggaggaaacucccuucaaggacaucguccggguggagcca

SEQ ID NO: 10323 - RNA, 48 nt, Artificial Sequence
  Description of Artificial Sequence:  Enzymatic Nucleic Acid
agggcucaggaggaaacucccuucaaggacaucguccggguguuccug

SEQ ID NO: 10324 - RNA, 48 nt, Artificial Sequence
  Description of Artificial Sequence:  Enzymatic Nucleic Acid
gagcagggggaggaaacucccuucaaggacaucguccgggucacuguu

SEQ ID NO: 10325 - RNA, 48 nt, Artificial Sequence
  Description of Artificial Sequence:  Enzymatic Nucleic Acid
aagauugaggaggaaacucccuucaaggacaucguccggggauauggc

SEQ ID NO: 10326 - RNA, 48 nt, Artificial Sequence
  Description of Artificial Sequence:  Enzymatic Nucleic Acid
cuguaacaggaggaaacucccuucaaggacaucguccggggagcaggg

SEQ ID NO: 10327 - RNA, 48 nt, Artificial Sequence
  Description of Artificial Sequence:  Enzymatic Nucleic Acid
aaaccccgggaggaaacucccuucaaggacaucguccgggcuguaaca

SEQ ID NO: 10328 - RNA, 48 nt, Artificial Sequence
  Description of Artificial Sequence:  Enzymatic Nucleic Acid
aagaaaaaggaggaaacucccuucaaggacaucguccgggcccgccug

SEQ ID NO: 10329 - RNA, 48 nt, Artificial Sequence
  Description of Artificial Sequence:  Enzymatic Nucleic Acid
agucuagaggaggaaacucccuucaaggacaucguccgggucuguggu

SEQ ID NO: 10330 - RNA, 48 nt, Artificial Sequence
  Description of Artificial Sequence:  Enzymatic Nucleic Acid
guccaccaggaggaaacucccuucaaggacaucguccggggagucuag

SEQ ID NO: 10331 - RNA, 48 nt, Artificial Sequence
  Description of Artificial Sequence:  Enzymatic Nucleic Acid
gaaguccaggaggaaacucccuucaaggacaucguccgggcacgaguc

SEQ ID NO: 10332 - RNA, 48 nt, Artificial Sequence
  Description of Artificial Sequence:  Enzymatic Nucleic Acid
aagacacaggaggaaacucccuucaaggacaucguccgggggguguuc

SEQ ID NO: 10333 - RNA, 48 nt, Artificial Sequence
  Description of Artificial Sequence:  Enzymatic Nucleic Acid
aauuuuggggaggaaacucccuucaaggacaucguccgggcaagacac

SEQ ID NO: 10334 - RNA, 48 nt, Artificial Sequence
  Description of Artificial Sequence:  Enzymatic Nucleic Acid
auuugggaggaggaaacucccuucaaggacaucguccgggugcgaauu

SEQ ID NO: 10335 - RNA, 48 nt, Artificial Sequence
  Description of Artificial Sequence:  Enzymatic Nucleic Acid
gugagugaggaggaaacucccuucaaggacaucguccggguggagauu

SEQ ID NO: 10336 - RNA, 48 nt, Artificial Sequence
  Description of Artificial Sequence:  Enzymatic Nucleic Acid
agcgauaaggaggaaacucccuucaaggacaucguccgggcaggacaa

SEQ ID NO: 10337 - RNA, 48 nt, Artificial Sequence
  Description of Artificial Sequence:  Enzymatic Nucleic Acid
auaaaacgggaggaaacucccuucaaggacaucguccgggcgcagaca

SEQ ID NO: 10338 - RNA, 48 nt, Artificial Sequence
  Description of Artificial Sequence:  Enzymatic Nucleic Acid
ugauaaaaggaggaaacucccuucaaggacaucguccggggccgcaga

SEQ ID NO: 10339 - RNA, 48 nt, Artificial Sequence
  Description of Artificial Sequence:  Enzymatic Nucleic Acid
cagaagaaggaggaaacucccuucaaggacaucguccgggcaacaaga

SEQ ID NO: 10340 - RNA, 48 nt, Artificial Sequence
  Description of Artificial Sequence:  Enzymatic Nucleic Acid
gcaacauaggaggaaacucccuucaaggacaucguccgggcuugauag

SEQ ID NO: 10341 - RNA, 48 nt, Artificial Sequence
  Description of Artificial Sequence:  Enzymatic Nucleic Acid
aggacaaaggaggaaacucccuucaaggacaucguccggggggcaaca

SEQ ID NO: 10342 - RNA, 48 nt, Artificial Sequence
  Description of Artificial Sequence:  Enzymatic Nucleic Acid
guccggugggaggaaacucccuucaaggacaucguccgggugguuguu

SEQ ID NO: 10343 - RNA, 48 nt, Artificial Sequence
  Description of Artificial Sequence:  Enzymatic Nucleic Acid
ugcgaaagggaggaaacucccuucaaggacaucguccgggccaagaug

SEQ ID NO: 10344 - RNA, 48 nt, Artificial Sequence
  Description of Artificial Sequence:  Enzymatic Nucleic Acid
gaggcccaggaggaaacucccuucaaggacaucguccgggucccauag

SEQ ID NO: 10345 - RNA, 48 nt, Artificial Sequence
  Description of Artificial Sequence:  Enzymatic Nucleic Acid
gacugaggggaggaaacucccuucaaggacaucguccgggccacuccc

SEQ ID NO: 10346 - RNA, 48 nt, Artificial Sequence
  Description of Artificial Sequence:  Enzymatic Nucleic Acid
gaaacggaggaggaaacucccuucaaggacaucguccgggugaggccc

SEQ ID NO: 10347 - RNA, 48 nt, Artificial Sequence
  Description of Artificial Sequence:  Enzymatic Nucleic Acid
aagagaaaggaggaaacucccuucaaggacaucguccgggggacugag

SEQ ID NO: 10348 - RNA, 48 nt, Artificial Sequence
  Description of Artificial Sequence:  Enzymatic Nucleic Acid
aaacugagggaggaaacucccuucaaggacaucguccgggcaagagaa

SEQ ID NO: 10349 - RNA, 48 nt, Artificial Sequence
  Description of Artificial Sequence:  Enzymatic Nucleic Acid
cuaguaaaggaggaaacucccuucaaggacaucguccgggugagccaa

SEQ ID NO: 10350 - RNA, 48 nt, Artificial Sequence
  Description of Artificial Sequence:  Enzymatic Nucleic Acid
aaauggcaggaggaaacucccuucaaggacaucguccggguaguaaac

SEQ ID NO: 10351 - RNA, 48 nt, Artificial Sequence
  Description of Artificial Sequence:  Enzymatic Nucleic Acid
acgaaccaggaggaaacucccuucaaggacaucguccgggugaacaaa

SEQ ID NO: 10352 - RNA, 48 nt, Artificial Sequence
  Description of Artificial Sequence:  Enzymatic Nucleic Acid
ccuacgaaggaggaaacucccuucaaggacaucguccgggcacugaac

SEQ ID NO: 10353 - RNA, 48 nt, Artificial Sequence
  Description of Artificial Sequence:  Enzymatic Nucleic Acid
aagcccuaggaggaaacucccuucaaggacaucguccggggaaccacu

SEQ ID NO: 10354 - RNA, 48 nt, Artificial Sequence
  Description of Artificial Sequence:  Enzymatic Nucleic Acid
ggggaaagggaggaaacucccuucaaggacaucguccgggccuacgaa

SEQ ID NO: 10355 - RNA, 48 nt, Artificial Sequence
  Description of Artificial Sequence:  Enzymatic Nucleic Acid
acugaaagggaggaaacucccuucaaggacaucguccgggcagacagu

SEQ ID NO: 10356 - RNA, 48 nt, Artificial Sequence
  Description of Artificial Sequence:  Enzymatic Nucleic Acid
ccauauaaggaggaaacucccuucaaggacaucguccgggugaaagcc

SEQ ID NO: 10357 - RNA, 48 nt, Artificial Sequence
  Description of Artificial Sequence:  Enzymatic Nucleic Acid
ccccaaaaggaggaaacucccuucaaggacaucguccgggcacaucau

SEQ ID NO: 10358 - RNA, 48 nt, Artificial Sequence
  Description of Artificial Sequence:  Enzymatic Nucleic Acid
agacuuggggaggaaacucccuucaaggacaucguccgggccccaaaa

SEQ ID NO: 10359 - RNA, 48 nt, Artificial Sequence
  Description of Artificial Sequence:  Enzymatic Nucleic Acid
uguacagaggaggaaacucccuucaaggacaucguccggguuggcccc

SEQ ID NO: 10360 - RNA, 48 nt, Artificial Sequence
  Description of Artificial Sequence:  Enzymatic Nucleic Acid
uaaagggaggaggaaacucccuucaaggacaucguccgggucaagaug

SEQ ID NO: 10361 - RNA, 48 nt, Artificial Sequence
  Description of Artificial Sequence:  Enzymatic Nucleic Acid
aauguauaggaggaaacucccuucaaggacaucguccgggccaaagac

SEQ ID NO: 10362 - RNA, 48 nt, Artificial Sequence
  Description of Artificial Sequence:  Enzymatic Nucleic Acid
ugccccaaggaggaaacucccuucaaggacaucguccgggucccaauu

SEQ ID NO: 10363 - RNA, 48 nt, Artificial Sequence
  Description of Artificial Sequence:  Enzymatic Nucleic Acid
gcaaugugggaggaaacucccuucaaggacaucguccgggcccaacuc

SEQ ID NO: 10364 - RNA, 48 nt, Artificial Sequence
  Description of Artificial Sequence:  Enzymatic Nucleic Acid
ucaauaggggaggaaacucccuucaaggacaucguccgggcuguuuac

SEQ ID NO: 10365 - RNA, 48 nt, Artificial Sequence
  Description of Artificial Sequence:  Enzymatic Nucleic Acid
uugacauaggaggaaacucccuucaaggacaucguccggguuuccaau

SEQ ID NO: 10366 - RNA, 48 nt, Artificial Sequence
  Description of Artificial Sequence:  Enzymatic Nucleic Acid
ccaaaagaggaggaaacucccuucaaggacaucguccgggccacaauu

SEQ ID NO: 10367 - RNA, 48 nt, Artificial Sequence
  Description of Artificial Sequence:  Enzymatic Nucleic Acid
gcggcaaaggaggaaacucccuucaaggacaucguccgggcccaaaag

SEQ ID NO: 10368 - RNA, 48 nt, Artificial Sequence
  Description of Artificial Sequence:  Enzymatic Nucleic Acid
cuguuuugggaggaaacucccuucaaggacaucguccggguuguaugc

SEQ ID NO: 10369 - RNA, 48 nt, Artificial Sequence
  Description of Artificial Sequence:  Enzymatic Nucleic Acid
aguaaaagggaggaaacucccuucaaggacaucguccgggcuguuuug

SEQ ID NO: 10370 - RNA, 48 nt, Artificial Sequence
  Description of Artificial Sequence:  Enzymatic Nucleic Acid
uagaaaggggaggaaacucccuucaaggacaucguccgggcuuguaag

SEQ ID NO: 10371 - RNA, 48 nt, Artificial Sequence
  Description of Artificial Sequence:  Enzymatic Nucleic Acid
acuguuuaggaggaaacucccuucaaggacaucguccggguuagaaag

SEQ ID NO: 10372 - RNA, 48 nt, Artificial Sequence
  Description of Artificial Sequence:  Enzymatic Nucleic Acid
uucacauaggaggaaacucccuucaaggacaucguccggguguuuacu

SEQ ID NO: 10373 - RNA, 48 nt, Artificial Sequence
  Description of Artificial Sequence:  Enzymatic Nucleic Acid
ccgagcaaggaggaaacucccuucaaggacaucguccggggggguaaa

SEQ ID NO: 10374 - RNA, 48 nt, Artificial Sequence
  Description of Artificial Sequence:  Enzymatic Nucleic Acid
ggccguugggaggaaacucccuucaaggacaucguccgggcgagcaac

SEQ ID NO: 10375 - RNA, 48 nt, Artificial Sequence
  Description of Artificial Sequence:  Enzymatic Nucleic Acid
agaccaggggaggaaacucccuucaaggacaucguccgggcguugccg

SEQ ID NO: 10376 - RNA, 48 nt, Artificial Sequence
  Description of Artificial Sequence:  Enzymatic Nucleic Acid
ggcauagaggaggaaacucccuucaaggacaucguccgggcaggccgu

SEQ ID NO: 10377 - RNA, 48 nt, Artificial Sequence
  Description of Artificial Sequence:  Enzymatic Nucleic Acid
agcaaacaggaggaaacucccuucaaggacaucguccggguuggcaua

SEQ ID NO: 10378 - RNA, 48 nt, Artificial Sequence
  Description of Artificial Sequence:  Enzymatic Nucleic Acid
agccccaaggaggaaacucccuucaaggacaucguccgggcagugggg

SEQ ID NO: 10379 - RNA, 48 nt, Artificial Sequence
  Description of Artificial Sequence:  Enzymatic Nucleic Acid
uggccaagggaggaaacucccuucaaggacaucguccgggcccaacca

SEQ ID NO: 10380 - RNA, 48 nt, Artificial Sequence
  Description of Artificial Sequence:  Enzymatic Nucleic Acid
gccuauggggaggaaacucccuucaaggacaucguccgggcaagcccc

SEQ ID NO: 10381 - RNA, 48 nt, Artificial Sequence
  Description of Artificial Sequence:  Enzymatic Nucleic Acid
gcugauggggaggaaacucccuucaaggacaucguccgggcuauggcc

SEQ ID NO: 10382 - RNA, 48 nt, Artificial Sequence
  Description of Artificial Sequence:  Enzymatic Nucleic Acid
cgcaugcgggaggaaacucccuucaaggacaucguccgggugauggcc

SEQ ID NO: 10383 - RNA, 48 nt, Artificial Sequence
  Description of Artificial Sequence:  Enzymatic Nucleic Acid
agguuccaggaggaaacucccuucaaggacaucguccggggcaugcgc

SEQ ID NO: 10384 - RNA, 48 nt, Artificial Sequence
  Description of Artificial Sequence:  Enzymatic Nucleic Acid
acaagcggggaggaaacucccuucaaggacaucguccggguaggaguu

SEQ ID NO: 10385 - RNA, 48 nt, Artificial Sequence
  Description of Artificial Sequence:  Enzymatic Nucleic Acid
cagaccugggaggaaacucccuucaaggacaucguccgggugcgagca

SEQ ID NO: 10386 - RNA, 48 nt, Artificial Sequence
  Description of Artificial Sequence:  Enzymatic Nucleic Acid
gccccagaggaggaaacucccuucaaggacaucguccgggcugcugcg

SEQ ID NO: 10387 - RNA, 48 nt, Artificial Sequence
  Description of Artificial Sequence:  Enzymatic Nucleic Acid
gaguuuugggaggaaacucccuucaaggacaucguccgggcccagacc

SEQ ID NO: 10388 - RNA, 48 nt, Artificial Sequence
  Description of Artificial Sequence:  Enzymatic Nucleic Acid
ggagagcaggaggaaacucccuucaaggacaucguccggggacagaau

SEQ ID NO: 10389 - RNA, 48 nt, Artificial Sequence
  Description of Artificial Sequence:  Enzymatic Nucleic Acid
ccuagcagggaggaaacucccuucaaggacaucguccgggcauggaaa

SEQ ID NO: 10390 - RNA, 48 nt, Artificial Sequence
  Description of Artificial Sequence:  Enzymatic Nucleic Acid
cagcacagggaggaaacucccuucaaggacaucguccgggcuagcagc

SEQ ID NO: 10391 - RNA, 48 nt, Artificial Sequence
  Description of Artificial Sequence:  Enzymatic Nucleic Acid
acaaaggaggaggaaacucccuucaaggacaucguccggggucccgcg

SEQ ID NO: 10392 - RNA, 48 nt, Artificial Sequence
  Description of Artificial Sequence:  Enzymatic Nucleic Acid
cgacgggaggaggaaacucccuucaaggacaucguccgggguaaacaa

SEQ ID NO: 10393 - RNA, 48 nt, Artificial Sequence
  Description of Artificial Sequence:  Enzymatic Nucleic Acid
agcgccgaggaggaaacucccuucaaggacaucguccggggggacgua

SEQ ID NO: 10394 - RNA, 48 nt, Artificial Sequence
  Description of Artificial Sequence:  Enzymatic Nucleic Acid
auucagcgggaggaaacucccuucaaggacaucguccgggcgacggga

SEQ ID NO: 10395 - RNA, 48 nt, Artificial Sequence
  Description of Artificial Sequence:  Enzymatic Nucleic Acid
ccaagcggggaggaaacucccuucaaggacaucguccgggcccgggag

SEQ ID NO: 10396 - RNA, 48 nt, Artificial Sequence
  Description of Artificial Sequence:  Enzymatic Nucleic Acid
cgguagagggaggaaacucccuucaaggacaucguccgggcccaagcg

SEQ ID NO: 10397 - RNA, 48 nt, Artificial Sequence
  Description of Artificial Sequence:  Enzymatic Nucleic Acid
cccguggaggaggaaacucccuucaaggacaucguccgggggucggua

SEQ ID NO: 10398 - RNA, 48 nt, Artificial Sequence
  Description of Artificial Sequence:  Enzymatic Nucleic Acid
gaggugcgggaggaaacucccuucaaggacaucguccgggcccgugga

SEQ ID NO: 10399 - RNA, 48 nt, Artificial Sequence
  Description of Artificial Sequence:  Enzymatic Nucleic Acid
ggcacagaggaggaaacucccuucaaggacaucguccgggggggaguc

SEQ ID NO: 10400 - RNA, 48 nt, Artificial Sequence
  Description of Artificial Sequence:  Enzymatic Nucleic Acid
agugcacaggaggaaacucccuucaaggacaucguccggggguccggc

SEQ ID NO: 10401 - RNA, 48 nt, Artificial Sequence
  Description of Artificial Sequence:  Enzymatic Nucleic Acid
ccaugcgaggaggaaacucccuucaaggacaucguccggggugcagag

SEQ ID NO: 10402 - RNA, 48 nt, Artificial Sequence
  Description of Artificial Sequence:  Enzymatic Nucleic Acid
ggcguucaggaggaaacucccuucaaggacaucguccggggguggucu

SEQ ID NO: 10403 - RNA, 48 nt, Artificial Sequence
  Description of Artificial Sequence:  Enzymatic Nucleic Acid
augcaagaggaggaaacucccuucaaggacaucguccgggcuugggca

SEQ ID NO: 10404 - RNA, 48 nt, Artificial Sequence
  Description of Artificial Sequence:  Enzymatic Nucleic Acid
ugacauugggaggaaacucccuucaaggacaucguccgggugaaaguc

SEQ ID NO: 10405 - RNA, 48 nt, Artificial Sequence
  Description of Artificial Sequence:  Enzymatic Nucleic Acid
gaaguaugggaggaaacucccuucaaggacaucguccgggcucaaggu

SEQ ID NO: 10406 - RNA, 48 nt, Artificial Sequence
  Description of Artificial Sequence:  Enzymatic Nucleic Acid
uccucccaggaggaaacucccuucaaggacaucguccgggucauuaaa

SEQ ID NO: 10407 - RNA, 48 nt, Artificial Sequence
  Description of Artificial Sequence:  Enzymatic Nucleic Acid
ucccccaaggaggaaacucccuucaaggacaucguccggguccuccca

SEQ ID NO: 10408 - RNA, 48 nt, Artificial Sequence
  Description of Artificial Sequence:  Enzymatic Nucleic Acid
uaaccuaaggaggaaacucccuucaaggacaucguccgggcuccuccc

SEQ ID NO: 10409 - RNA, 48 nt, Artificial Sequence
  Description of Artificial Sequence:  Enzymatic Nucleic Acid
accuuuaaggaggaaacucccuucaaggacaucguccgggcuaaccuc

SEQ ID NO: 10410 - RNA, 48 nt, Artificial Sequence
  Description of Artificial Sequence:  Enzymatic Nucleic Acid
uacaaagaggaggaaacucccuucaaggacaucguccgggcuuuaacc

SEQ ID NO: 10411 - RNA, 48 nt, Artificial Sequence
  Description of Artificial Sequence:  Enzymatic Nucleic Acid
gccuacagggaggaaacucccuucaaggacaucguccgggcuccuagu

SEQ ID NO: 10412 - RNA, 48 nt, Artificial Sequence
  Description of Artificial Sequence:  Enzymatic Nucleic Acid
aauuuaugggaggaaacucccuucaaggacaucguccgggcuacagcc

SEQ ID NO: 10413 - RNA, 48 nt, Artificial Sequence
  Description of Artificial Sequence:  Enzymatic Nucleic Acid
ugaacacaggaggaaacucccuucaaggacaucguccgggcaauuuau

SEQ ID NO: 10414 - RNA, 48 nt, Artificial Sequence
  Description of Artificial Sequence:  Enzymatic Nucleic Acid
gcauggugggaggaaacucccuucaaggacaucguccggguggugaac

SEQ ID NO: 10415 - RNA, 48 nt, Artificial Sequence
  Description of Artificial Sequence:  Enzymatic Nucleic Acid
cuuggaggggaggaaacucccuucaaggacaucguccggguugaacag

SEQ ID NO: 10416 - RNA, 48 nt, Artificial Sequence
  Description of Artificial Sequence:  Enzymatic Nucleic Acid
aggcacagggaggaaacucccuucaaggacaucguccggguuggaggc

SEQ ID NO: 10417 - RNA, 48 nt, Artificial Sequence
  Description of Artificial Sequence:  Enzymatic Nucleic Acid
caaagccaggaggaaacucccuucaaggacaucguccgggccaaggca

SEQ ID NO: 10418 - RNA, 48 nt, Artificial Sequence
  Description of Artificial Sequence:  Enzymatic Nucleic Acid
ccccaaagggaggaaacucccuucaaggacaucguccgggcacccaag

SEQ ID NO: 10419 - RNA, 48 nt, Artificial Sequence
  Description of Artificial Sequence:  Enzymatic Nucleic Acid
uguccaugggaggaaacucccuucaaggacaucguccgggcccaaagc

SEQ ID NO: 10420 - RNA, 48 nt, Artificial Sequence
  Description of Artificial Sequence:  Enzymatic Nucleic Acid
ucuuuauaggaggaaacucccuucaaggacaucguccggggggucaau

SEQ ID NO: 10421 - RNA, 48 nt, Artificial Sequence
  Description of Artificial Sequence:  Enzymatic Nucleic Acid
cacagaagggaggaaacucccuucaaggacaucguccggguccaaauu

SEQ ID NO: 10422 - RNA, 48 nt, Artificial Sequence
  Description of Artificial Sequence:  Enzymatic Nucleic Acid
gagaguaaggaggaaacucccuucaaggacaucguccggguccacaga

SEQ ID NO: 10423 - RNA, 48 nt, Artificial Sequence
  Description of Artificial Sequence:  Enzymatic Nucleic Acid
cucuaaggggaggaaacucccuucaaggacaucguccgggcccccgau

SEQ ID NO: 10424 - RNA, 48 nt, Artificial Sequence
  Description of Artificial Sequence:  Enzymatic Nucleic Acid
uccggagaggaggaaacucccuucaaggacaucguccgggucuaaggc

SEQ ID NO: 10425 - RNA, 48 nt, Artificial Sequence
  Description of Artificial Sequence:  Enzymatic Nucleic Acid
ccugagugggaggaaacucccuucaaggacaucguccgggcguauggu

SEQ ID NO: 10426 - RNA, 48 nt, Artificial Sequence
  Description of Artificial Sequence:  Enzymatic Nucleic Acid
auagcuugggaggaaacucccuucaaggacaucguccgggcugagugc

SEQ ID NO: 10427 - RNA, 48 nt, Artificial Sequence
  Description of Artificial Sequence:  Enzymatic Nucleic Acid
cagaauagggaggaaacucccuucaaggacaucguccggguugccuga

SEQ ID NO: 10428 - RNA, 48 nt, Artificial Sequence
  Description of Artificial Sequence:  Enzymatic Nucleic Acid
ucaacucaggaggaaacucccuucaaggacaucguccgggcccaacac

SEQ ID NO: 10429 - RNA, 48 nt, Artificial Sequence
  Description of Artificial Sequence:  Enzymatic Nucleic Acid
uucaucaaggaggaaacucccuucaaggacaucguccgggucacccca

SEQ ID NO: 10430 - RNA, 48 nt, Artificial Sequence
  Description of Artificial Sequence:  Enzymatic Nucleic Acid
ccagguggggaggaaacucccuucaaggacaucguccggguagauuca

SEQ ID NO: 10431 - RNA, 48 nt, Artificial Sequence
  Description of Artificial Sequence:  Enzymatic Nucleic Acid
acuucccaggaggaaacucccuucaaggacaucguccgggccaggugg

SEQ ID NO: 10432 - RNA, 48 nt, Artificial Sequence
  Description of Artificial Sequence:  Enzymatic Nucleic Acid
ccaaauuaggaggaaacucccuucaaggacaucguccggguucccacc

SEQ ID NO: 10433 - RNA, 48 nt, Artificial Sequence
  Description of Artificial Sequence:  Enzymatic Nucleic Acid
ccuggaugggaggaaacucccuucaaggacaucguccggguggaucuu

SEQ ID NO: 10434 - RNA, 48 nt, Artificial Sequence
  Description of Artificial Sequence:  Enzymatic Nucleic Acid
gcugacuaggaggaaacucccuucaaggacaucguccggguaauuccc

SEQ ID NO: 10435 - RNA, 48 nt, Artificial Sequence
  Description of Artificial Sequence:  Enzymatic Nucleic Acid
auagcugaggaggaaacucccuucaaggacaucguccggguacuaauu

SEQ ID NO: 10436 - RNA, 48 nt, Artificial Sequence
  Description of Artificial Sequence:  Enzymatic Nucleic Acid
ugacauagggaggaaacucccuucaaggacaucguccgggugacuacu

SEQ ID NO: 10437 - RNA, 48 nt, Artificial Sequence
  Description of Artificial Sequence:  Enzymatic Nucleic Acid
cauauuaaggaggaaacucccuucaaggacaucguccgggguugacau

SEQ ID NO: 10438 - RNA, 48 nt, Artificial Sequence
  Description of Artificial Sequence:  Enzymatic Nucleic Acid
uuuuuaggggaggaaacucccuucaaggacaucguccgggccauauua

SEQ ID NO: 10439 - RNA, 48 nt, Artificial Sequence
  Description of Artificial Sequence:  Enzymatic Nucleic Acid
augugaaaggaggaaacucccuucaaggacaucguccgggcacaauag

SEQ ID NO: 10440 - RNA, 48 nt, Artificial Sequence
  Description of Artificial Sequence:  Enzymatic Nucleic Acid
guuucucgggaggaaacucccuucaaggacaucguccgggccaaaagu

SEQ ID NO: 10441 - RNA, 48 nt, Artificial Sequence
  Description of Artificial Sequence:  Enzymatic Nucleic Acid
aaaagacaggaggaaacucccuucaaggacaucguccgggcaaauauu

SEQ ID NO: 10442 - RNA, 48 nt, Artificial Sequence
  Description of Artificial Sequence:  Enzymatic Nucleic Acid
aauccacaggaggaaacucccuucaaggacaucguccggguccaaaag

SEQ ID NO: 10443 - RNA, 48 nt, Artificial Sequence
  Description of Artificial Sequence:  Enzymatic Nucleic Acid
gggaccugggaggaaacucccuucaaggacaucguccgggcucuucgu

SEQ ID NO: 10444 - RNA, 48 nt, Artificial Sequence
  Description of Artificial Sequence:  Enzymatic Nucleic Acid
cuaggggaggaggaaacucccuucaaggacaucguccgggcugccucu

SEQ ID NO: 10445 - RNA, 48 nt, Artificial Sequence
  Description of Artificial Sequence:  Enzymatic Nucleic Acid
gauugagaggaggaaacucccuucaaggacaucguccgggcuucgucu

SEQ ID NO: 10446 - RNA, 48 nt, Artificial Sequence
  Description of Artificial Sequence:  Enzymatic Nucleic Acid
uucugcgaggaggaaacucccuucaaggacaucguccggggcggcgau

SEQ ID NO: 10447 - RNA, 48 nt, Artificial Sequence
  Description of Artificial Sequence:  Enzymatic Nucleic Acid
aaggaauaggaggaaacucccuucaaggacaucguccggguaacauug

SEQ ID NO: 10448 - RNA, 48 nt, Artificial Sequence
  Description of Artificial Sequence:  Enzymatic Nucleic Acid
guuucccaggaggaaacucccuucaaggacaucguccgggcuuaugug

SEQ ID NO: 10449 - RNA, 48 nt, Artificial Sequence
  Description of Artificial Sequence:  Enzymatic Nucleic Acid
gaauaaagggaggaaacucccuucaaggacaucguccgggcccguaaa

SEQ ID NO: 10450 - RNA, 48 nt, Artificial Sequence
  Description of Artificial Sequence:  Enzymatic Nucleic Acid
gcaagguaggaggaaacucccuucaaggacaucguccgggcguagaag

SEQ ID NO: 10451 - RNA, 48 nt, Artificial Sequence
  Description of Artificial Sequence:  Enzymatic Nucleic Acid
ggaguuugggaggaaacucccuucaaggacaucguccgggcauuuagg

SEQ ID NO: 10452 - RNA, 48 nt, Artificial Sequence
  Description of Artificial Sequence:  Enzymatic Nucleic Acid
acaaauugggaggaaacucccuucaaggacaucguccggguuacaucu

SEQ ID NO: 10453 - RNA, 48 nt, Artificial Sequence
  Description of Artificial Sequence:  Enzymatic Nucleic Acid
guaaggggggaggaaacucccuucaaggacaucguccgggcccacaaa

SEQ ID NO: 10454 - RNA, 48 nt, Artificial Sequence
  Description of Artificial Sequence:  Enzymatic Nucleic Acid
uucauuuaggaggaaacucccuucaaggacaucguccggguguaaggg

SEQ ID NO: 10455 - RNA, 48 nt, Artificial Sequence
  Description of Artificial Sequence:  Enzymatic Nucleic Acid
ggauaaaaggaggaaacucccuucaaggacaucguccgggcuagcagg

SEQ ID NO: 10456 - RNA, 48 nt, Artificial Sequence
  Description of Artificial Sequence:  Enzymatic Nucleic Acid
ggauaauaggaggaaacucccuucaaggacaucguccggggguuugau

SEQ ID NO: 10457 - RNA, 48 nt, Artificial Sequence
  Description of Artificial Sequence:  Enzymatic Nucleic Acid
acuacauaggaggaaacucccuucaaggacaucguccgggucuggaua

SEQ ID NO: 10458 - RNA, 48 nt, Artificial Sequence
  Description of Artificial Sequence:  Enzymatic Nucleic Acid
augauuaaggaggaaacucccuucaaggacaucguccggguacauacu

SEQ ID NO: 10459 - RNA, 48 nt, Artificial Sequence
  Description of Artificial Sequence:  Enzymatic Nucleic Acid
gauccccgggaggaaacucccuucaaggacaucguccgggcuuccaaa

SEQ ID NO: 10460 - RNA, 48 nt, Artificial Sequence
  Description of Artificial Sequence:  Enzymatic Nucleic Acid
cguguggaggaggaaacucccuucaaggacaucguccgggucucuuuu

SEQ ID NO: 10461 - RNA, 48 nt, Artificial Sequence
  Description of Artificial Sequence:  Enzymatic Nucleic Acid
aggcgcuaggaggaaacucccuucaaggacaucguccgggguguggac

SEQ ID NO: 10462 - RNA, 48 nt, Artificial Sequence
  Description of Artificial Sequence:  Enzymatic Nucleic Acid
augaggcgggaggaaacucccuucaaggacaucguccggguacgugug

SEQ ID NO: 10463 - RNA, 48 nt, Artificial Sequence
  Description of Artificial Sequence:  Enzymatic Nucleic Acid
uauggugaggaggaaacucccuucaaggacaucguccgggccgcaaaa

SEQ ID NO: 10464 - RNA, 48 nt, Artificial Sequence
  Description of Artificial Sequence:  Enzymatic Nucleic Acid
cucccaugggaggaaacucccuucaaggacaucguccggguguagauc

SEQ ID NO: 10465 - RNA, 48 nt, Artificial Sequence
  Description of Artificial Sequence:  Enzymatic Nucleic Acid
aagaccaaggaggaaacucccuucaaggacaucguccgggcucccaug

SEQ ID NO: 10466 - RNA, 48 nt, Artificial Sequence
  Description of Artificial Sequence:  Enzymatic Nucleic Acid
uuggaagaggaggaaacucccuucaaggacaucguccgggcaaccucc

SEQ ID NO: 10467 - RNA, 48 nt, Artificial Sequence
  Description of Artificial Sequence:  Enzymatic Nucleic Acid
uccccaugggaggaaacucccuucaaggacaucguccgggcuuuucga

SEQ ID NO: 10468 - RNA, 48 nt, Artificial Sequence
  Description of Artificial Sequence:  Enzymatic Nucleic Acid
ggguccaaggaggaaacucccuucaaggacaucguccgggugaugauc

SEQ ID NO: 10469 - RNA, 48 nt, Artificial Sequence
  Description of Artificial Sequence:  Enzymatic Nucleic Acid
ugaguuggggaggaaacucccuucaaggacaucguccggguuugaaug

SEQ ID NO: 10470 - RNA, 48 nt, Artificial Sequence
  Description of Artificial Sequence:  Enzymatic Nucleic Acid
uggauuuaggaggaaacucccuucaaggacaucguccgggugaguugg

SEQ ID NO: 10471 - RNA, 48 nt, Artificial Sequence
  Description of Artificial Sequence:  Enzymatic Nucleic Acid
gcguccggggaggaaacucccuucaaggacaucguccgggcaguuguc

SEQ ID NO: 10472 - RNA, 48 nt, Artificial Sequence
  Description of Artificial Sequence:  Enzymatic Nucleic Acid
cacucccaggaggaaacucccuucaaggacaucguccgggcuuguugg

SEQ ID NO: 10473 - RNA, 48 nt, Artificial Sequence
  Description of Artificial Sequence:  Enzymatic Nucleic Acid
ugcucccaggaggaaacucccuucaaggacaucguccgggucccaccu

SEQ ID NO: 10474 - RNA, 48 nt, Artificial Sequence
  Description of Artificial Sequence:  Enzymatic Nucleic Acid
cccgaaugggaggaaacucccuucaaggacaucguccgggucccacuc

SEQ ID NO: 10475 - RNA, 48 nt, Artificial Sequence
  Description of Artificial Sequence:  Enzymatic Nucleic Acid
aacccuggggaggaaacucccuucaaggacaucguccgggccgaaugc

SEQ ID NO: 10476 - RNA, 48 nt, Artificial Sequence
  Description of Artificial Sequence:  Enzymatic Nucleic Acid
ggggugaaggaggaaacucccuucaaggacaucguccgggccuggccc

SEQ ID NO: 10477 - RNA, 48 nt, Artificial Sequence
  Description of Artificial Sequence:  Enzymatic Nucleic Acid
gggcuccaggaggaaacucccuucaaggacaucguccgggcccaacag

SEQ ID NO: 10478 - RNA, 48 nt, Artificial Sequence
  Description of Artificial Sequence:  Enzymatic Nucleic Acid
cgugagggggaggaaacucccuucaaggacaucguccggguccacccc

SEQ ID NO: 10479 - RNA, 48 nt, Artificial Sequence
  Description of Artificial Sequence:  Enzymatic Nucleic Acid
ugaguaggggaggaaacucccuucaaggacaucguccgggccugagcg

SEQ ID NO: 10480 - RNA, 48 nt, Artificial Sequence
  Description of Artificial Sequence:  Enzymatic Nucleic Acid
aggagcugggaggaaacucccuucaaggacaucguccggguggcacag

SEQ ID NO: 10481 - RNA, 48 nt, Artificial Sequence
  Description of Artificial Sequence:  Enzymatic Nucleic Acid
aggaggagggaggaaacucccuucaaggacaucguccgggugcuggca

SEQ ID NO: 10482 - RNA, 48 nt, Artificial Sequence
  Description of Artificial Sequence:  Enzymatic Nucleic Acid
ccugacugggaggaaacucccuucaaggacaucguccgggcgauuggu

SEQ ID NO: 10483 - RNA, 48 nt, Artificial Sequence
  Description of Artificial Sequence:  Enzymatic Nucleic Acid
cuuccugaggaggaaacucccuucaaggacaucguccgggugccgauu

SEQ ID NO: 10484 - RNA, 48 nt, Artificial Sequence
  Description of Artificial Sequence:  Enzymatic Nucleic Acid
guaggcugggaggaaacucccuucaaggacaucguccgggcuuccuga

SEQ ID NO: 10485 - RNA, 48 nt, Artificial Sequence
  Description of Artificial Sequence:  Enzymatic Nucleic Acid
ggaguaggggaggaaacucccuucaaggacaucguccgggugccuucc

SEQ ID NO: 10486 - RNA, 48 nt, Artificial Sequence
  Description of Artificial Sequence:  Enzymatic Nucleic Acid
cugcauggggaggaaacucccuucaaggacaucguccgggcugaggau

SEQ ID NO: 10487 - RNA, 48 nt, Artificial Sequence
  Description of Artificial Sequence:  Enzymatic Nucleic Acid
ucugggauggaggaaacucccuucaaggacaucguccggguugaagag

SEQ ID NO: 10488 - RNA, 48 nt, Artificial Sequence
  Description of Artificial Sequence:  Enzymatic Nucleic Acid
cccugacuggaggaaacucccuucaaggacaucguccgggugggaucu

SEQ ID NO: 10489 - RNA, 48 nt, Artificial Sequence
  Description of Artificial Sequence:  Enzymatic Nucleic Acid
acagggccggaggaaacucccuucaaggacaucguccgggugacucug

SEQ ID NO: 10490 - RNA, 48 nt, Artificial Sequence
  Description of Artificial Sequence:  Enzymatic Nucleic Acid
uacagggcggaggaaacucccuucaaggacaucguccgggcugacucu

SEQ ID NO: 10491 - RNA, 48 nt, Artificial Sequence
  Description of Artificial Sequence:  Enzymatic Nucleic Acid
ggagccacggaggaaacucccuucaaggacaucguccgggagcaggaa

SEQ ID NO: 10492 - RNA, 48 nt, Artificial Sequence
  Description of Artificial Sequence:  Enzymatic Nucleic Acid
acuggagcggaggaaacucccuucaaggacaucguccgggaccagcag

SEQ ID NO: 10493 - RNA, 48 nt, Artificial Sequence
  Description of Artificial Sequence:  Enzymatic Nucleic Acid
cacuguucggaggaaacucccuucaaggacaucguccgggugaacugg

SEQ ID NO: 10494 - RNA, 48 nt, Artificial Sequence
  Description of Artificial Sequence:  Enzymatic Nucleic Acid
ucacuguuggaggaaacucccuucaaggacaucguccgggcugaacug

SEQ ID NO: 10495 - RNA, 48 nt, Artificial Sequence
  Description of Artificial Sequence:  Enzymatic Nucleic Acid
acaguauuggaggaaacucccuucaaggacaucguccgggugagcagg

SEQ ID NO: 10496 - RNA, 48 nt, Artificial Sequence
  Description of Artificial Sequence:  Enzymatic Nucleic Acid
uccccaguggaggaaacucccuucaaggacaucguccggguucgauaa

SEQ ID NO: 10497 - RNA, 48 nt, Artificial Sequence
  Description of Artificial Sequence:  Enzymatic Nucleic Acid
agggucccggaggaaacucccuucaaggacaucguccgggagucuucg

SEQ ID NO: 10498 - RNA, 48 nt, Artificial Sequence
  Description of Artificial Sequence:  Enzymatic Nucleic Acid
caggguccggaggaaacucccuucaaggacaucguccgggcagucuuc

SEQ ID NO: 10499 - RNA, 48 nt, Artificial Sequence
  Description of Artificial Sequence:  Enzymatic Nucleic Acid
acagggucggaggaaacucccuucaaggacaucguccgggccagucuu

SEQ ID NO: 10500 - RNA, 48 nt, Artificial Sequence
  Description of Artificial Sequence:  Enzymatic Nucleic Acid
uacaggguggaggaaacucccuucaaggacaucguccgggcccagucu

SEQ ID NO: 10501 - RNA, 48 nt, Artificial Sequence
  Description of Artificial Sequence:  Enzymatic Nucleic Acid
auguucucggaggaaacucccuucaaggacaucguccgggauguucgg

SEQ ID NO: 10502 - RNA, 48 nt, Artificial Sequence
  Description of Artificial Sequence:  Enzymatic Nucleic Acid
gauguucuggaggaaacucccuucaaggacaucguccgggcauguucg

SEQ ID NO: 10503 - RNA, 48 nt, Artificial Sequence
  Description of Artificial Sequence:  Enzymatic Nucleic Acid
gcgauguuggaggaaacucccuucaaggacaucguccggguccauguu

SEQ ID NO: 10504 - RNA, 48 nt, Artificial Sequence
  Description of Artificial Sequence:  Enzymatic Nucleic Acid
uaggagucggaggaaacucccuucaaggacaucguccgggugaugcga

SEQ ID NO: 10505 - RNA, 48 nt, Artificial Sequence
  Description of Artificial Sequence:  Enzymatic Nucleic Acid
cuaggaguggaggaaacucccuucaaggacaucguccgggcugaugcg

SEQ ID NO: 10506 - RNA, 48 nt, Artificial Sequence
  Description of Artificial Sequence:  Enzymatic Nucleic Acid
caggggucggaggaaacucccuucaaggacaucguccggguaggaguc

SEQ ID NO: 10507 - RNA, 48 nt, Artificial Sequence
  Description of Artificial Sequence:  Enzymatic Nucleic Acid
gcagggguggaggaaacucccuucaaggacaucguccgggcuaggagu

SEQ ID NO: 10508 - RNA, 48 nt, Artificial Sequence
  Description of Artificial Sequence:  Enzymatic Nucleic Acid
aaccccgcggaggaaacucccuucaaggacaucguccggguguaacac

SEQ ID NO: 10509 - RNA, 48 nt, Artificial Sequence
  Description of Artificial Sequence:  Enzymatic Nucleic Acid
aaaaacccggaggaaacucccuucaaggacaucguccggggccuguaa

SEQ ID NO: 10510 - RNA, 48 nt, Artificial Sequence
  Description of Artificial Sequence:  Enzymatic Nucleic Acid
gaaaaaccggaggaaacucccuucaaggacaucguccgggcgccugua

SEQ ID NO: 10511 - RNA, 48 nt, Artificial Sequence
  Description of Artificial Sequence:  Enzymatic Nucleic Acid
agaaaaacggaggaaacucccuucaaggacaucguccgggccgccugu

SEQ ID NO: 10512 - RNA, 48 nt, Artificial Sequence
  Description of Artificial Sequence:  Enzymatic Nucleic Acid
ucuagacuggaggaaacucccuucaaggacaucguccgggugugguau

SEQ ID NO: 10513 - RNA, 48 nt, Artificial Sequence
  Description of Artificial Sequence:  Enzymatic Nucleic Acid
ccacgaguggaggaaacucccuucaaggacaucguccggguagacucu

SEQ ID NO: 10514 - RNA, 48 nt, Artificial Sequence
  Description of Artificial Sequence:  Enzymatic Nucleic Acid
aaguccacggaggaaacucccuucaaggacaucguccgggacgagucu

SEQ ID NO: 10515 - RNA, 48 nt, Artificial Sequence
  Description of Artificial Sequence:  Enzymatic Nucleic Acid
gagaagucggaggaaacucccuucaaggacaucguccgggaccacgag

SEQ ID NO: 10516 - RNA, 48 nt, Artificial Sequence
  Description of Artificial Sequence:  Enzymatic Nucleic Acid
agagaaguggaggaaacucccuucaaggacaucguccgggcaccacga

SEQ ID NO: 10517 - RNA, 48 nt, Artificial Sequence
  Description of Artificial Sequence:  Enzymatic Nucleic Acid
uguuccccggaggaaacucccuucaaggacaucguccggguagaaaau

SEQ ID NO: 10518 - RNA, 48 nt, Artificial Sequence
  Description of Artificial Sequence:  Enzymatic Nucleic Acid
guguucccggaggaaacucccuucaaggacaucguccgggcuagaaaa

SEQ ID NO: 10519 - RNA, 48 nt, Artificial Sequence
  Description of Artificial Sequence:  Enzymatic Nucleic Acid
gguguuccggaggaaacucccuucaaggacaucguccgggccuagaaa

SEQ ID NO: 10520 - RNA, 48 nt, Artificial Sequence
  Description of Artificial Sequence:  Enzymatic Nucleic Acid
ggguguucggaggaaacucccuucaaggacaucguccgggcccuagaa

SEQ ID NO: 10521 - RNA, 48 nt, Artificial Sequence
  Description of Artificial Sequence:  Enzymatic Nucleic Acid
cggguguuggaggaaacucccuucaaggacaucguccgggccccuaga

SEQ ID NO: 10522 - RNA, 48 nt, Artificial Sequence
  Description of Artificial Sequence:  Enzymatic Nucleic Acid
auuuuggcggaggaaacucccuucaaggacaucguccgggaagacaca

SEQ ID NO: 10523 - RNA, 48 nt, Artificial Sequence
  Description of Artificial Sequence:  Enzymatic Nucleic Acid
gcgauaacggaggaaacucccuucaaggacaucguccgggaggacaaa

SEQ ID NO: 10524 - RNA, 48 nt, Artificial Sequence
  Description of Artificial Sequence:  Enzymatic Nucleic Acid
gacacaucggaggaaacucccuucaaggacaucguccgggagcgauaa

SEQ ID NO: 10525 - RNA, 48 nt, Artificial Sequence
  Description of Artificial Sequence:  Enzymatic Nucleic Acid
agacacauggaggaaacucccuucaaggacaucguccgggcagcgaua

SEQ ID NO: 10526 - RNA, 48 nt, Artificial Sequence
  Description of Artificial Sequence:  Enzymatic Nucleic Acid
uaaaacgcggaggaaacucccuucaaggacaucguccggggcagacac

SEQ ID NO: 10527 - RNA, 48 nt, Artificial Sequence
  Description of Artificial Sequence:  Enzymatic Nucleic Acid
agaagaacggaggaaacucccuucaaggacaucguccgggaacaagaa

SEQ ID NO: 10528 - RNA, 48 nt, Artificial Sequence
  Description of Artificial Sequence:  Enzymatic Nucleic Acid
ugauagucggaggaaacucccuucaaggacaucguccgggagaagaac

SEQ ID NO: 10529 - RNA, 48 nt, Artificial Sequence
  Description of Artificial Sequence:  Enzymatic Nucleic Acid
uugauaguggaggaaacucccuucaaggacaucguccgggcagaagaa

SEQ ID NO: 10530 - RNA, 48 nt, Artificial Sequence
  Description of Artificial Sequence:  Enzymatic Nucleic Acid
caacauacggaggaaacucccuucaaggacaucguccggguugauagu

SEQ ID NO: 10531 - RNA, 48 nt, Artificial Sequence
  Description of Artificial Sequence:  Enzymatic Nucleic Acid
ugaugaucggaggaaacucccuucaaggacaucguccggguggaauua

SEQ ID NO: 10532 - RNA, 48 nt, Artificial Sequence
  Description of Artificial Sequence:  Enzymatic Nucleic Acid
uugaugauggaggaaacucccuucaaggacaucguccgggcuggaauu

SEQ ID NO: 10533 - RNA, 48 nt, Artificial Sequence
  Description of Artificial Sequence:  Enzymatic Nucleic Acid
gcauggucggaggaaacucccuucaaggacaucguccgggggugcugg

SEQ ID NO: 10534 - RNA, 48 nt, Artificial Sequence
  Description of Artificial Sequence:  Enzymatic Nucleic Acid
ugcaugguggaggaaacucccuucaaggacaucguccgggcggugcug

SEQ ID NO: 10535 - RNA, 48 nt, Artificial Sequence
  Description of Artificial Sequence:  Enzymatic Nucleic Acid
agagguucggaggaaacucccuucaaggacaucguccggguugagcag

SEQ ID NO: 10536 - RNA, 48 nt, Artificial Sequence
  Description of Artificial Sequence:  Enzymatic Nucleic Acid
uagagguuggaggaaacucccuucaaggacaucguccgggcuugagca

SEQ ID NO: 10537 - RNA, 48 nt, Artificial Sequence
  Description of Artificial Sequence:  Enzymatic Nucleic Acid
uuuccgucggaggaaacucccuucaaggacaucguccgggguagguuu

SEQ ID NO: 10538 - RNA, 48 nt, Artificial Sequence
  Description of Artificial Sequence:  Enzymatic Nucleic Acid
guuuccguggaggaaacucccuucaaggacaucguccgggcguagguu

SEQ ID NO: 10539 - RNA, 48 nt, Artificial Sequence
  Description of Artificial Sequence:  Enzymatic Nucleic Acid
gcaguuucggaggaaacucccuucaaggacaucguccgggguccguag

SEQ ID NO: 10540 - RNA, 48 nt, Artificial Sequence
  Description of Artificial Sequence:  Enzymatic Nucleic Acid
ugcaguuuggaggaaacucccuucaaggacaucguccgggcguccgua

SEQ ID NO: 10541 - RNA, 48 nt, Artificial Sequence
  Description of Artificial Sequence:  Enzymatic Nucleic Acid
cgaaagccggaggaaacucccuucaaggacaucguccgggaagaugau

SEQ ID NO: 10542 - RNA, 48 nt, Artificial Sequence
  Description of Artificial Sequence:  Enzymatic Nucleic Acid
gcgaaagcggaggaaacucccuucaaggacaucguccgggcaagauga

SEQ ID NO: 10543 - RNA, 48 nt, Artificial Sequence
  Description of Artificial Sequence:  Enzymatic Nucleic Acid
cccacuccggaggaaacucccuucaaggacaucguccgggauagguau

SEQ ID NO: 10544 - RNA, 48 nt, Artificial Sequence
  Description of Artificial Sequence:  Enzymatic Nucleic Acid
gcccacucggaggaaacucccuucaaggacaucguccgggcauaggua

SEQ ID NO: 10545 - RNA, 48 nt, Artificial Sequence
  Description of Artificial Sequence:  Enzymatic Nucleic Acid
ggcccacuggaggaaacucccuucaaggacaucguccgggccauaggu

SEQ ID NO: 10546 - RNA, 48 nt, Artificial Sequence
  Description of Artificial Sequence:  Enzymatic Nucleic Acid
cugaggccggaggaaacucccuucaaggacaucguccgggacucccau

SEQ ID NO: 10547 - RNA, 48 nt, Artificial Sequence
  Description of Artificial Sequence:  Enzymatic Nucleic Acid
acugaggcggaggaaacucccuucaaggacaucguccgggcacuccca

SEQ ID NO: 10548 - RNA, 48 nt, Artificial Sequence
  Description of Artificial Sequence:  Enzymatic Nucleic Acid
aacugagcggaggaaacucccuucaaggacaucguccgggaagagaaa

SEQ ID NO: 10549 - RNA, 48 nt, Artificial Sequence
  Description of Artificial Sequence:  Enzymatic Nucleic Acid
cuacgaacggaggaaacucccuucaaggacaucguccgggacugaaca

SEQ ID NO: 10550 - RNA, 48 nt, Artificial Sequence
  Description of Artificial Sequence:  Enzymatic Nucleic Acid
ggaaagccggaggaaacucccuucaaggacaucguccggguacgaacc

SEQ ID NO: 10551 - RNA, 48 nt, Artificial Sequence
  Description of Artificial Sequence:  Enzymatic Nucleic Acid
gggaaagcggaggaaacucccuucaaggacaucguccgggcuacgaac

SEQ ID NO: 10552 - RNA, 48 nt, Artificial Sequence
  Description of Artificial Sequence:  Enzymatic Nucleic Acid
cugaaagcggaggaaacucccuucaaggacaucguccgggagacagug

SEQ ID NO: 10553 - RNA, 48 nt, Artificial Sequence
  Description of Artificial Sequence:  Enzymatic Nucleic Acid
acaucaucggaggaaacucccuucaaggacaucguccgggauauaacu

SEQ ID NO: 10554 - RNA, 48 nt, Artificial Sequence
  Description of Artificial Sequence:  Enzymatic Nucleic Acid
cacaucauggaggaaacucccuucaaggacaucguccgggcauauaac

SEQ ID NO: 10555 - RNA, 48 nt, Artificial Sequence
  Description of Artificial Sequence:  Enzymatic Nucleic Acid
cccaaaacggaggaaacucccuucaaggacaucguccgggacaucauc

SEQ ID NO: 10556 - RNA, 48 nt, Artificial Sequence
  Description of Artificial Sequence:  Enzymatic Nucleic Acid
uuggccccggaggaaacucccuucaaggacaucguccgggaaaaccac

SEQ ID NO: 10557 - RNA, 48 nt, Artificial Sequence
  Description of Artificial Sequence:  Enzymatic Nucleic Acid
cuuggcccggaggaaacucccuucaaggacaucguccgggcaaaacca

SEQ ID NO: 10558 - RNA, 48 nt, Artificial Sequence
  Description of Artificial Sequence:  Enzymatic Nucleic Acid
acuuggccggaggaaacucccuucaaggacaucguccgggccaaaacc

SEQ ID NO: 10559 - RNA, 48 nt, Artificial Sequence
  Description of Artificial Sequence:  Enzymatic Nucleic Acid
gacuuggcggaggaaacucccuucaaggacaucguccgggcccaaaac

SEQ ID NO: 10560 - RNA, 48 nt, Artificial Sequence
  Description of Artificial Sequence:  Enzymatic Nucleic Acid
uguauaccggaggaaacucccuucaaggacaucguccgggaaagacaa

SEQ ID NO: 10561 - RNA, 48 nt, Artificial Sequence
  Description of Artificial Sequence:  Enzymatic Nucleic Acid
auguauacggaggaaacucccuucaaggacaucguccgggcaaagaca

SEQ ID NO: 10562 - RNA, 48 nt, Artificial Sequence
  Description of Artificial Sequence:  Enzymatic Nucleic Acid
auccccauggaggaaacucccuucaaggacaucguccggguuuuuguu

SEQ ID NO: 10563 - RNA, 48 nt, Artificial Sequence
  Description of Artificial Sequence:  Enzymatic Nucleic Acid
aauaucccggaggaaacucccuucaaggacaucguccgggaucuuuuu

SEQ ID NO: 10564 - RNA, 48 nt, Artificial Sequence
  Description of Artificial Sequence:  Enzymatic Nucleic Acid
gaauauccggaggaaacucccuucaaggacaucguccgggcaucuuuu

SEQ ID NO: 10565 - RNA, 48 nt, Artificial Sequence
  Description of Artificial Sequence:  Enzymatic Nucleic Acid
ggaauaucggaggaaacucccuucaaggacaucguccgggccaucuuu

SEQ ID NO: 10566 - RNA, 48 nt, Artificial Sequence
  Description of Artificial Sequence:  Enzymatic Nucleic Acid
gggaauauggaggaaacucccuucaaggacaucguccgggcccaucuu

SEQ ID NO: 10567 - RNA, 48 nt, Artificial Sequence
  Description of Artificial Sequence:  Enzymatic Nucleic Acid
acauauccggaggaaacucccuucaaggacaucguccgggaugaaguu

SEQ ID NO: 10568 - RNA, 48 nt, Artificial Sequence
  Description of Artificial Sequence:  Enzymatic Nucleic Acid
uacauaucggaggaaacucccuucaaggacaucguccgggcaugaagu

SEQ ID NO: 10569 - RNA, 48 nt, Artificial Sequence
  Description of Artificial Sequence:  Enzymatic Nucleic Acid
uuacauauggaggaaacucccuucaaggacaucguccgggccaugaag

SEQ ID NO: 10570 - RNA, 48 nt, Artificial Sequence
  Description of Artificial Sequence:  Enzymatic Nucleic Acid
ccaacuccggaggaaacucccuucaaggacaucguccgggaauuacau

SEQ ID NO: 10571 - RNA, 48 nt, Artificial Sequence
  Description of Artificial Sequence:  Enzymatic Nucleic Acid
cccaacucggaggaaacucccuucaaggacaucguccgggcaauuaca

SEQ ID NO: 10572 - RNA, 48 nt, Artificial Sequence
  Description of Artificial Sequence:  Enzymatic Nucleic Acid
ccccaacuggaggaaacucccuucaaggacaucguccgggccaauuac

SEQ ID NO: 10573 - RNA, 48 nt, Artificial Sequence
  Description of Artificial Sequence:  Enzymatic Nucleic Acid
augugcccggaggaaacucccuucaaggacaucguccgggaacuccca

SEQ ID NO: 10574 - RNA, 48 nt, Artificial Sequence
  Description of Artificial Sequence:  Enzymatic Nucleic Acid
aaugugccggaggaaacucccuucaaggacaucguccgggcaacuccc

SEQ ID NO: 10575 - RNA, 48 nt, Artificial Sequence
  Description of Artificial Sequence:  Enzymatic Nucleic Acid
caaugugcggaggaaacucccuucaaggacaucguccgggccaacucc

SEQ ID NO: 10576 - RNA, 48 nt, Artificial Sequence
  Description of Artificial Sequence:  Enzymatic Nucleic Acid
auauguucggaggaaacucccuucaaggacaucguccggguguggcaa

SEQ ID NO: 10577 - RNA, 48 nt, Artificial Sequence
  Description of Artificial Sequence:  Enzymatic Nucleic Acid
aauauguuggaggaaacucccuucaaggacaucguccgggcuguggca

SEQ ID NO: 10578 - RNA, 48 nt, Artificial Sequence
  Description of Artificial Sequence:  Enzymatic Nucleic Acid
gaaguuucggaggaaacucccuucaaggacaucguccggguaaaacac

SEQ ID NO: 10579 - RNA, 48 nt, Artificial Sequence
  Description of Artificial Sequence:  Enzymatic Nucleic Acid
ggaaguuuggaggaaacucccuucaaggacaucguccgggcuaaaaca

SEQ ID NO: 10580 - RNA, 48 nt, Artificial Sequence
  Description of Artificial Sequence:  Enzymatic Nucleic Acid
caauaggcggaggaaacucccuucaaggacaucguccggguguuuaca

SEQ ID NO: 10581 - RNA, 48 nt, Artificial Sequence
  Description of Artificial Sequence:  Enzymatic Nucleic Acid
auacuuucggaggaaacucccuucaaggacaucguccgggaaucaaua

SEQ ID NO: 10582 - RNA, 48 nt, Artificial Sequence
  Description of Artificial Sequence:  Enzymatic Nucleic Acid
cauacuuuggaggaaacucccuucaaggacaucguccgggcaaucaau

SEQ ID NO: 10583 - RNA, 48 nt, Artificial Sequence
  Description of Artificial Sequence:  Enzymatic Nucleic Acid
aaaagaccggaggaaacucccuucaaggacaucguccgggacaauucg

SEQ ID NO: 10584 - RNA, 48 nt, Artificial Sequence
  Description of Artificial Sequence:  Enzymatic Nucleic Acid
caaaagacggaggaaacucccuucaaggacaucguccgggcacaauuc

SEQ ID NO: 10585 - RNA, 48 nt, Artificial Sequence
  Description of Artificial Sequence:  Enzymatic Nucleic Acid
gcaaacccggaggaaacucccuucaaggacaucguccgggaaaagacc

SEQ ID NO: 10586 - RNA, 48 nt, Artificial Sequence
  Description of Artificial Sequence:  Enzymatic Nucleic Acid
ggcaaaccggaggaaacucccuucaaggacaucguccgggcaaaagac

SEQ ID NO: 10587 - RNA, 48 nt, Artificial Sequence
  Description of Artificial Sequence:  Enzymatic Nucleic Acid
cggcaaacggaggaaacucccuucaaggacaucguccgggccaaaaga

SEQ ID NO: 10588 - RNA, 48 nt, Artificial Sequence
  Description of Artificial Sequence:  Enzymatic Nucleic Acid
agaauaucggaggaaacucccuucaaggacaucguccgggacauugcg

SEQ ID NO: 10589 - RNA, 48 nt, Artificial Sequence
  Description of Artificial Sequence:  Enzymatic Nucleic Acid
cagaauauggaggaaacucccuucaaggacaucguccgggcacauugc

SEQ ID NO: 10590 - RNA, 48 nt, Artificial Sequence
  Description of Artificial Sequence:  Enzymatic Nucleic Acid
guaaaagcggaggaaacucccuucaaggacaucguccggguguuuugc

SEQ ID NO: 10591 - RNA, 48 nt, Artificial Sequence
  Description of Artificial Sequence:  Enzymatic Nucleic Acid
agaaaggcggaggaaacucccuucaaggacaucguccggguuguaagu

SEQ ID NO: 10592 - RNA, 48 nt, Artificial Sequence
  Description of Artificial Sequence:  Enzymatic Nucleic Acid
gccguugcggaggaaacucccuucaaggacaucguccggggagcaacg

SEQ ID NO: 10593 - RNA, 48 nt, Artificial Sequence
  Description of Artificial Sequence:  Enzymatic Nucleic Acid
gaccaggcggaggaaacucccuucaaggacaucguccgggguugccga

SEQ ID NO: 10594 - RNA, 48 nt, Artificial Sequence
  Description of Artificial Sequence:  Enzymatic Nucleic Acid
gcauagacggaggaaacucccuucaaggacaucguccgggaggccguu

SEQ ID NO: 10595 - RNA, 48 nt, Artificial Sequence
  Description of Artificial Sequence:  Enzymatic Nucleic Acid
gccccaacggaggaaacucccuucaaggacaucguccgggaguggggg

SEQ ID NO: 10596 - RNA, 48 nt, Artificial Sequence
  Description of Artificial Sequence:  Enzymatic Nucleic Acid
ccaagcccggaggaaacucccuucaaggacaucguccgggaaccagug

SEQ ID NO: 10597 - RNA, 48 nt, Artificial Sequence
  Description of Artificial Sequence:  Enzymatic Nucleic Acid
gccaagccggaggaaacucccuucaaggacaucguccgggcaaccagu

SEQ ID NO: 10598 - RNA, 48 nt, Artificial Sequence
  Description of Artificial Sequence:  Enzymatic Nucleic Acid
ggccaagcggaggaaacucccuucaaggacaucguccgggccaaccag

SEQ ID NO: 10599 - RNA, 48 nt, Artificial Sequence
  Description of Artificial Sequence:  Enzymatic Nucleic Acid
ccuauggcggaggaaacucccuucaaggacaucguccgggaagcccca

SEQ ID NO: 10600 - RNA, 48 nt, Artificial Sequence
  Description of Artificial Sequence:  Enzymatic Nucleic Acid
cugauggcggaggaaacucccuucaaggacaucguccggguauggcca

SEQ ID NO: 10601 - RNA, 48 nt, Artificial Sequence
  Description of Artificial Sequence:  Enzymatic Nucleic Acid
aaagguucggaggaaacucccuucaaggacaucguccgggacgcaugc

SEQ ID NO: 10602 - RNA, 48 nt, Artificial Sequence
  Description of Artificial Sequence:  Enzymatic Nucleic Acid
caaagguuggaggaaacucccuucaaggacaucguccgggcacgcaug

SEQ ID NO: 10603 - RNA, 48 nt, Artificial Sequence
  Description of Artificial Sequence:  Enzymatic Nucleic Acid
aggaguucggaggaaacucccuucaaggacaucguccggggcgguaug

SEQ ID NO: 10604 - RNA, 48 nt, Artificial Sequence
  Description of Artificial Sequence:  Enzymatic Nucleic Acid
uaggaguuggaggaaacucccuucaaggacaucguccgggcgcgguau

SEQ ID NO: 10605 - RNA, 48 nt, Artificial Sequence
  Description of Artificial Sequence:  Enzymatic Nucleic Acid
ccccagacggaggaaacucccuucaaggacaucguccgggugcugcga

SEQ ID NO: 10606 - RNA, 48 nt, Artificial Sequence
  Description of Artificial Sequence:  Enzymatic Nucleic Acid
uuuugcccggaggaaacucccuucaaggacaucguccgggagaccugc

SEQ ID NO: 10607 - RNA, 48 nt, Artificial Sequence
  Description of Artificial Sequence:  Enzymatic Nucleic Acid
guuuugccggaggaaacucccuucaaggacaucguccgggcagaccug

SEQ ID NO: 10608 - RNA, 48 nt, Artificial Sequence
  Description of Artificial Sequence:  Enzymatic Nucleic Acid
aguuuugcggaggaaacucccuucaaggacaucguccgggccagaccu

SEQ ID NO: 10609 - RNA, 48 nt, Artificial Sequence
  Description of Artificial Sequence:  Enzymatic Nucleic Acid
gucaguccggaggaaacucccuucaaggacaucguccggggaugaguu

SEQ ID NO: 10610 - RNA, 48 nt, Artificial Sequence
  Description of Artificial Sequence:  Enzymatic Nucleic Acid
ugucagucggaggaaacucccuucaaggacaucguccgggcgaugagu

SEQ ID NO: 10611 - RNA, 48 nt, Artificial Sequence
  Description of Artificial Sequence:  Enzymatic Nucleic Acid
uugucaguggaggaaacucccuucaaggacaucguccgggccgaugag

SEQ ID NO: 10612 - RNA, 48 nt, Artificial Sequence
  Description of Artificial Sequence:  Enzymatic Nucleic Acid
cuagcagcggaggaaacucccuucaaggacaucguccgggauggaaau

SEQ ID NO: 10613 - RNA, 48 nt, Artificial Sequence
  Description of Artificial Sequence:  Enzymatic Nucleic Acid
agcacagcggaggaaacucccuucaaggacaucguccggguagcagcc

SEQ ID NO: 10614 - RNA, 48 nt, Artificial Sequence
  Description of Artificial Sequence:  Enzymatic Nucleic Acid
guaggaucggaggaaacucccuucaaggacaucguccgggaguuggca

SEQ ID NO: 10615 - RNA, 48 nt, Artificial Sequence
  Description of Artificial Sequence:  Enzymatic Nucleic Acid
cguaggauggaggaaacucccuucaaggacaucguccgggcaguuggc

SEQ ID NO: 10616 - RNA, 48 nt, Artificial Sequence
  Description of Artificial Sequence:  Enzymatic Nucleic Acid
ggacguccggaggaaacucccuucaaggacaucguccggggcguagga

SEQ ID NO: 10617 - RNA, 48 nt, Artificial Sequence
  Description of Artificial Sequence:  Enzymatic Nucleic Acid
aggacgucggaggaaacucccuucaaggacaucguccgggcgcguagg

SEQ ID NO: 10618 - RNA, 48 nt, Artificial Sequence
  Description of Artificial Sequence:  Enzymatic Nucleic Acid
aaggacguggaggaaacucccuucaaggacaucguccgggccgcguag

SEQ ID NO: 10619 - RNA, 48 nt, Artificial Sequence
  Description of Artificial Sequence:  Enzymatic Nucleic Acid
uucagcgcggaggaaacucccuucaaggacaucguccggggacgggac

SEQ ID NO: 10620 - RNA, 48 nt, Artificial Sequence
  Description of Artificial Sequence:  Enzymatic Nucleic Acid
gggucgucggaggaaacucccuucaaggacaucguccggggcgggauu

SEQ ID NO: 10621 - RNA, 48 nt, Artificial Sequence
  Description of Artificial Sequence:  Enzymatic Nucleic Acid
ggggucguggaggaaacucccuucaaggacaucguccgggcgcgggau

SEQ ID NO: 10622 - RNA, 48 nt, Artificial Sequence
  Description of Artificial Sequence:  Enzymatic Nucleic Acid
agcggcccggaggaaacucccuucaaggacaucguccggggggagggg

SEQ ID NO: 10623 - RNA, 48 nt, Artificial Sequence
  Description of Artificial Sequence:  Enzymatic Nucleic Acid
aagcggccggaggaaacucccuucaaggacaucguccgggcgggaggg

SEQ ID NO: 10624 - RNA, 48 nt, Artificial Sequence
  Description of Artificial Sequence:  Enzymatic Nucleic Acid
caagcggcggaggaaacucccuucaaggacaucguccgggccgggagg

SEQ ID NO: 10625 - RNA, 48 nt, Artificial Sequence
  Description of Artificial Sequence:  Enzymatic Nucleic Acid
uagagcccggaggaaacucccuucaaggacaucguccgggaagcggcc

SEQ ID NO: 10626 - RNA, 48 nt, Artificial Sequence
  Description of Artificial Sequence:  Enzymatic Nucleic Acid
guagagccggaggaaacucccuucaaggacaucguccgggcaagcggc

SEQ ID NO: 10627 - RNA, 48 nt, Artificial Sequence
  Description of Artificial Sequence:  Enzymatic Nucleic Acid
gguagagcggaggaaacucccuucaaggacaucguccgggccaagcgg

SEQ ID NO: 10628 - RNA, 48 nt, Artificial Sequence
  Description of Artificial Sequence:  Enzymatic Nucleic Acid
gugcgcccggaggaaacucccuucaaggacaucguccgggguggacgg

SEQ ID NO: 10629 - RNA, 48 nt, Artificial Sequence
  Description of Artificial Sequence:  Enzymatic Nucleic Acid
ggugcgccggaggaaacucccuucaaggacaucguccgggcguggacg

SEQ ID NO: 10630 - RNA, 48 nt, Artificial Sequence
  Description of Artificial Sequence:  Enzymatic Nucleic Acid
aggugcgcggaggaaacucccuucaaggacaucguccgggccguggac

SEQ ID NO: 10631 - RNA, 48 nt, Artificial Sequence
  Description of Artificial Sequence:  Enzymatic Nucleic Acid
ggggagucggaggaaacucccuucaaggacaucguccggggcguaaag

SEQ ID NO: 10632 - RNA, 48 nt, Artificial Sequence
  Description of Artificial Sequence:  Enzymatic Nucleic Acid
cggggaguggaggaaacucccuucaaggacaucguccgggcgcguaaa

SEQ ID NO: 10633 - RNA, 48 nt, Artificial Sequence
  Description of Artificial Sequence:  Enzymatic Nucleic Acid
acacggucggaggaaacucccuucaaggacaucguccgggggcagaug

SEQ ID NO: 10634 - RNA, 48 nt, Artificial Sequence
  Description of Artificial Sequence:  Enzymatic Nucleic Acid
cacacgguggaggaaacucccuucaaggacaucguccgggcggcagau

SEQ ID NO: 10635 - RNA, 48 nt, Artificial Sequence
  Description of Artificial Sequence:  Enzymatic Nucleic Acid
guggucucggaggaaacucccuucaaggacaucguccgggaugcgacg

SEQ ID NO: 10636 - RNA, 48 nt, Artificial Sequence
  Description of Artificial Sequence:  Enzymatic Nucleic Acid
gguggucuggaggaaacucccuucaaggacaucguccgggcaugcgac

SEQ ID NO: 10637 - RNA, 48 nt, Artificial Sequence
  Description of Artificial Sequence:  Enzymatic Nucleic Acid
acggugguggaggaaacucccuucaaggacaucguccggguccaugcg

SEQ ID NO: 10638 - RNA, 48 nt, Artificial Sequence
  Description of Artificial Sequence:  Enzymatic Nucleic Acid
gcagguucggaggaaacucccuucaaggacaucguccgggugugggcg

SEQ ID NO: 10639 - RNA, 48 nt, Artificial Sequence
  Description of Artificial Sequence:  Enzymatic Nucleic Acid
ggcagguuggaggaaacucccuucaaggacaucguccgggcugugggc

SEQ ID NO: 10640 - RNA, 48 nt, Artificial Sequence
  Description of Artificial Sequence:  Enzymatic Nucleic Acid
ugcaagacggaggaaacucccuucaaggacaucguccggguugggcag

SEQ ID NO: 10641 - RNA, 48 nt, Artificial Sequence
  Description of Artificial Sequence:  Enzymatic Nucleic Acid
agaguccuggaggaaacucccuucaaggacaucguccggguuaugcaa

SEQ ID NO: 10642 - RNA, 48 nt, Artificial Sequence
  Description of Artificial Sequence:  Enzymatic Nucleic Acid
caagagucggaggaaacucccuucaaggacaucguccgggucuuaugc

SEQ ID NO: 10643 - RNA, 48 nt, Artificial Sequence
  Description of Artificial Sequence:  Enzymatic Nucleic Acid
ccaagaguggaggaaacucccuucaaggacaucguccgggcucuuaug

SEQ ID NO: 10644 - RNA, 48 nt, Artificial Sequence
  Description of Artificial Sequence:  Enzymatic Nucleic Acid
ugaaagucggaggaaacucccuucaaggacaucguccgggaagagucc

SEQ ID NO: 10645 - RNA, 48 nt, Artificial Sequence
  Description of Artificial Sequence:  Enzymatic Nucleic Acid
cugaaaguggaggaaacucccuucaaggacaucguccgggcaagaguc

SEQ ID NO: 10646 - RNA, 48 nt, Artificial Sequence
  Description of Artificial Sequence:  Enzymatic Nucleic Acid
aaguaugcggaggaaacucccuucaaggacaucguccgggucaagguc

SEQ ID NO: 10647 - RNA, 48 nt, Artificial Sequence
  Description of Artificial Sequence:  Enzymatic Nucleic Acid
cacacaguggaggaaacucccuucaaggacaucguccggguuugaagu

SEQ ID NO: 10648 - RNA, 48 nt, Artificial Sequence
  Description of Artificial Sequence:  Enzymatic Nucleic Acid
acuccuccggaggaaacucccuucaaggacaucguccgggacucauua

SEQ ID NO: 10649 - RNA, 48 nt, Artificial Sequence
  Description of Artificial Sequence:  Enzymatic Nucleic Acid
aacuccucggaggaaacucccuucaaggacaucguccgggcacucauu

SEQ ID NO: 10650 - RNA, 48 nt, Artificial Sequence
  Description of Artificial Sequence:  Enzymatic Nucleic Acid
caacuccuggaggaaacucccuucaaggacaucguccgggccacucau

SEQ ID NO: 10651 - RNA, 48 nt, Artificial Sequence
  Description of Artificial Sequence:  Enzymatic Nucleic Acid
cccaacucggaggaaacucccuucaaggacaucguccgggucccacuc

SEQ ID NO: 10652 - RNA, 48 nt, Artificial Sequence
  Description of Artificial Sequence:  Enzymatic Nucleic Acid
ccccaacuggaggaaacucccuucaaggacaucguccgggcucccacu

SEQ ID NO: 10653 - RNA, 48 nt, Artificial Sequence
  Description of Artificial Sequence:  Enzymatic Nucleic Acid
uccuccccggaggaaacucccuucaaggacaucguccgggaacuccuc

SEQ ID NO: 10654 - RNA, 48 nt, Artificial Sequence
  Description of Artificial Sequence:  Enzymatic Nucleic Acid
cuccucccggaggaaacucccuucaaggacaucguccgggcaacuccu

SEQ ID NO: 10655 - RNA, 48 nt, Artificial Sequence
  Description of Artificial Sequence:  Enzymatic Nucleic Acid
ccuccuccggaggaaacucccuucaaggacaucguccgggccaacucc

SEQ ID NO: 10656 - RNA, 48 nt, Artificial Sequence
  Description of Artificial Sequence:  Enzymatic Nucleic Acid
accuccucggaggaaacucccuucaaggacaucguccgggcccaacuc

SEQ ID NO: 10657 - RNA, 48 nt, Artificial Sequence
  Description of Artificial Sequence:  Enzymatic Nucleic Acid
aaccuccuggaggaaacucccuucaaggacaucguccgggccccaacu

SEQ ID NO: 10658 - RNA, 48 nt, Artificial Sequence
  Description of Artificial Sequence:  Enzymatic Nucleic Acid
cuaaccucggaggaaacucccuucaaggacaucguccgggucccccaa

SEQ ID NO: 10659 - RNA, 48 nt, Artificial Sequence
  Description of Artificial Sequence:  Enzymatic Nucleic Acid
ccuaaccuggaggaaacucccuucaaggacaucguccgggcuccccca

SEQ ID NO: 10660 - RNA, 48 nt, Artificial Sequence
  Description of Artificial Sequence:  Enzymatic Nucleic Acid
aaccuaacggaggaaacucccuucaaggacaucguccggguccucccc

SEQ ID NO: 10661 - RNA, 48 nt, Artificial Sequence
  Description of Artificial Sequence:  Enzymatic Nucleic Acid
ccuuuaacggaggaaacucccuucaaggacaucguccggguaaccucc

SEQ ID NO: 10662 - RNA, 48 nt, Artificial Sequence
  Description of Artificial Sequence:  Enzymatic Nucleic Acid
acaaagacggaggaaacucccuucaaggacaucguccggguuuaaccu

SEQ ID NO: 10663 - RNA, 48 nt, Artificial Sequence
  Description of Artificial Sequence:  Enzymatic Nucleic Acid
acagccucggaggaaacucccuucaaggacaucguccggguaguacaa

SEQ ID NO: 10664 - RNA, 48 nt, Artificial Sequence
  Description of Artificial Sequence:  Enzymatic Nucleic Acid
uacagccuggaggaaacucccuucaaggacaucguccgggcuaguaca

SEQ ID NO: 10665 - RNA, 48 nt, Artificial Sequence
  Description of Artificial Sequence:  Enzymatic Nucleic Acid
ccuacagcggaggaaacucccuucaaggacaucguccggguccuagua

SEQ ID NO: 10666 - RNA, 48 nt, Artificial Sequence
  Description of Artificial Sequence:  Enzymatic Nucleic Acid
auuuaugcggaggaaacucccuucaaggacaucguccggguacagccu

SEQ ID NO: 10667 - RNA, 48 nt, Artificial Sequence
  Description of Artificial Sequence:  Enzymatic Nucleic Acid
gaacacacggaggaaacucccuucaaggacaucguccgggaauuuaug

SEQ ID NO: 10668 - RNA, 48 nt, Artificial Sequence
  Description of Artificial Sequence:  Enzymatic Nucleic Acid
aagccaccggaggaaacucccuucaaggacaucguccgggaaggcaca

SEQ ID NO: 10669 - RNA, 48 nt, Artificial Sequence
  Description of Artificial Sequence:  Enzymatic Nucleic Acid
aaagccacggaggaaacucccuucaaggacaucguccgggcaaggcac

SEQ ID NO: 10670 - RNA, 48 nt, Artificial Sequence
  Description of Artificial Sequence:  Enzymatic Nucleic Acid
cccaaagcggaggaaacucccuucaaggacaucguccgggacccaagg

SEQ ID NO: 10671 - RNA, 48 nt, Artificial Sequence
  Description of Artificial Sequence:  Enzymatic Nucleic Acid
ccaugcccggaggaaacucccuucaaggacaucguccgggaaagccac

SEQ ID NO: 10672 - RNA, 48 nt, Artificial Sequence
  Description of Artificial Sequence:  Enzymatic Nucleic Acid
uccaugccggaggaaacucccuucaaggacaucguccgggcaaagcca

SEQ ID NO: 10673 - RNA, 48 nt, Artificial Sequence
  Description of Artificial Sequence:  Enzymatic Nucleic Acid
guccaugcggaggaaacucccuucaaggacaucguccgggccaaagcc

SEQ ID NO: 10674 - RNA, 48 nt, Artificial Sequence
  Description of Artificial Sequence:  Enzymatic Nucleic Acid
ucaaugucggaggaaacucccuucaaggacaucguccgggaugcccca

SEQ ID NO: 10675 - RNA, 48 nt, Artificial Sequence
  Description of Artificial Sequence:  Enzymatic Nucleic Acid
gucaauguggaggaaacucccuucaaggacaucguccgggcaugcccc

SEQ ID NO: 10676 - RNA, 48 nt, Artificial Sequence
  Description of Artificial Sequence:  Enzymatic Nucleic Acid
uccaaauuggaggaaacucccuucaaggacaucguccggguuuauacg

SEQ ID NO: 10677 - RNA, 48 nt, Artificial Sequence
  Description of Artificial Sequence:  Enzymatic Nucleic Acid
agaagcucggaggaaacucccuucaaggacaucguccgggaaauucuu

SEQ ID NO: 10678 - RNA, 48 nt, Artificial Sequence
  Description of Artificial Sequence:  Enzymatic Nucleic Acid
cagaagcuggaggaaacucccuucaaggacaucguccgggcaaauucu

SEQ ID NO: 10679 - RNA, 48 nt, Artificial Sequence
  Description of Artificial Sequence:  Enzymatic Nucleic Acid
aguaacucggaggaaacucccuucaaggacaucguccgggacagaagc

SEQ ID NO: 10680 - RNA, 48 nt, Artificial Sequence
  Description of Artificial Sequence:  Enzymatic Nucleic Acid
gaguaacuggaggaaacucccuucaaggacaucguccgggcacagaag

SEQ ID NO: 10681 - RNA, 48 nt, Artificial Sequence
  Description of Artificial Sequence:  Enzymatic Nucleic Acid
gaggagauggaggaaacucccuucaaggacaucguccgggucgaauag

SEQ ID NO: 10682 - RNA, 48 nt, Artificial Sequence
  Description of Artificial Sequence:  Enzymatic Nucleic Acid
aggcccccggaggaaacucccuucaaggacaucguccggggauacaga

SEQ ID NO: 10683 - RNA, 48 nt, Artificial Sequence
  Description of Artificial Sequence:  Enzymatic Nucleic Acid
aaggccccggaggaaacucccuucaaggacaucguccgggcgauacag

SEQ ID NO: 10684 - RNA, 48 nt, Artificial Sequence
  Description of Artificial Sequence:  Enzymatic Nucleic Acid
uaaggcccggaggaaacucccuucaaggacaucguccgggccgauaca

SEQ ID NO: 10685 - RNA, 48 nt, Artificial Sequence
  Description of Artificial Sequence:  Enzymatic Nucleic Acid
cuaaggccggaggaaacucccuucaaggacaucguccgggcccgauac

SEQ ID NO: 10686 - RNA, 48 nt, Artificial Sequence
  Description of Artificial Sequence:  Enzymatic Nucleic Acid
ucuaaggcggaggaaacucccuucaaggacaucguccgggccccgaua

SEQ ID NO: 10687 - RNA, 48 nt, Artificial Sequence
  Description of Artificial Sequence:  Enzymatic Nucleic Acid
cggagacuggaggaaacucccuucaaggacaucguccggguaaggccc

SEQ ID NO: 10688 - RNA, 48 nt, Artificial Sequence
  Description of Artificial Sequence:  Enzymatic Nucleic Acid
caauguucggaggaaacucccuucaaggacaucguccgggggagacuc

SEQ ID NO: 10689 - RNA, 48 nt, Artificial Sequence
  Description of Artificial Sequence:  Enzymatic Nucleic Acid
acaauguuggaggaaacucccuucaaggacaucguccgggcggagacu

SEQ ID NO: 10690 - RNA, 48 nt, Artificial Sequence
  Description of Artificial Sequence:  Enzymatic Nucleic Acid
cugagugcggaggaaacucccuucaaggacaucguccgggguauggug

SEQ ID NO: 10691 - RNA, 48 nt, Artificial Sequence
  Description of Artificial Sequence:  Enzymatic Nucleic Acid
uagcuugcggaggaaacucccuucaaggacaucguccgggugagugcc

SEQ ID NO: 10692 - RNA, 48 nt, Artificial Sequence
  Description of Artificial Sequence:  Enzymatic Nucleic Acid
acucacccggaggaaacucccuucaaggacaucguccgggaacacaga

SEQ ID NO: 10693 - RNA, 48 nt, Artificial Sequence
  Description of Artificial Sequence:  Enzymatic Nucleic Acid
aacucaccggaggaaacucccuucaaggacaucguccgggcaacacag

SEQ ID NO: 10694 - RNA, 48 nt, Artificial Sequence
  Description of Artificial Sequence:  Enzymatic Nucleic Acid
caacucacggaggaaacucccuucaaggacaucguccgggccaacaca

SEQ ID NO: 10695 - RNA, 48 nt, Artificial Sequence
  Description of Artificial Sequence:  Enzymatic Nucleic Acid
uucccaccggaggaaacucccuucaaggacaucguccgggagguggcu

SEQ ID NO: 10696 - RNA, 48 nt, Artificial Sequence
  Description of Artificial Sequence:  Enzymatic Nucleic Acid
cuucccacggaggaaacucccuucaaggacaucguccgggcagguggc

SEQ ID NO: 10697 - RNA, 48 nt, Artificial Sequence
  Description of Artificial Sequence:  Enzymatic Nucleic Acid
uuacuuccggaggaaacucccuucaaggacaucguccgggacccaggu

SEQ ID NO: 10698 - RNA, 48 nt, Artificial Sequence
  Description of Artificial Sequence:  Enzymatic Nucleic Acid
auuacuucggaggaaacucccuucaaggacaucguccgggcacccagg

SEQ ID NO: 10699 - RNA, 48 nt, Artificial Sequence
  Description of Artificial Sequence:  Enzymatic Nucleic Acid
aauuacuuggaggaaacucccuucaaggacaucguccgggccacccag

SEQ ID NO: 10700 - RNA, 48 nt, Artificial Sequence
  Description of Artificial Sequence:  Enzymatic Nucleic Acid
ggaucuucggaggaaacucccuucaaggacaucguccgggaaauuacu

SEQ ID NO: 10701 - RNA, 48 nt, Artificial Sequence
  Description of Artificial Sequence:  Enzymatic Nucleic Acid
uggaucuuggaggaaacucccuucaaggacaucguccgggcaaauuac

SEQ ID NO: 10702 - RNA, 48 nt, Artificial Sequence
  Description of Artificial Sequence:  Enzymatic Nucleic Acid
ugcuggauggaggaaacucccuucaaggacaucguccggguuccaaau

SEQ ID NO: 10703 - RNA, 48 nt, Artificial Sequence
  Description of Artificial Sequence:  Enzymatic Nucleic Acid
cuaauuccggaggaaacucccuucaaggacaucguccggguggaugcu

SEQ ID NO: 10704 - RNA, 48 nt, Artificial Sequence
  Description of Artificial Sequence:  Enzymatic Nucleic Acid
acuaauucggaggaaacucccuucaaggacaucguccgggcuggaugc

SEQ ID NO: 10705 - RNA, 48 nt, Artificial Sequence
  Description of Artificial Sequence:  Enzymatic Nucleic Acid
uacuaauuggaggaaacucccuucaaggacaucguccgggccuggaug

SEQ ID NO: 10706 - RNA, 48 nt, Artificial Sequence
  Description of Artificial Sequence:  Enzymatic Nucleic Acid
uuuaggccggaggaaacucccuucaaggacaucguccgggauauuaac

SEQ ID NO: 10707 - RNA, 48 nt, Artificial Sequence
  Description of Artificial Sequence:  Enzymatic Nucleic Acid
uuuuaggcggaggaaacucccuucaaggacaucguccgggcauauuaa

SEQ ID NO: 10708 - RNA, 48 nt, Artificial Sequence
  Description of Artificial Sequence:  Enzymatic Nucleic Acid
auaguuguggaggaaacucccuucaaggacaucguccgggugauuuuu

SEQ ID NO: 10709 - RNA, 48 nt, Artificial Sequence
  Description of Artificial Sequence:  Enzymatic Nucleic Acid
ugugaaacggaggaaacucccuucaaggacaucguccgggacaauagu

SEQ ID NO: 10710 - RNA, 48 nt, Artificial Sequence
  Description of Artificial Sequence:  Enzymatic Nucleic Acid
uucucgccggaggaaacucccuucaaggacaucguccgggaaaaguaa

SEQ ID NO: 10711 - RNA, 48 nt, Artificial Sequence
  Description of Artificial Sequence:  Enzymatic Nucleic Acid
uuucucgcggaggaaacucccuucaaggacaucguccgggcaaaagua

SEQ ID NO: 10712 - RNA, 48 nt, Artificial Sequence
  Description of Artificial Sequence:  Enzymatic Nucleic Acid
aacaguuuggaggaaacucccuucaaggacaucguccgggucgcccaa

SEQ ID NO: 10713 - RNA, 48 nt, Artificial Sequence
  Description of Artificial Sequence:  Enzymatic Nucleic Acid
aaagacacggaggaaacucccuucaaggacaucguccgggaaauauuc

SEQ ID NO: 10714 - RNA, 48 nt, Artificial Sequence
  Description of Artificial Sequence:  Enzymatic Nucleic Acid
ccacacucggaggaaacucccuucaaggacaucguccgggaaaagaca

SEQ ID NO: 10715 - RNA, 48 nt, Artificial Sequence
  Description of Artificial Sequence:  Enzymatic Nucleic Acid
uccacacuggaggaaacucccuucaaggacaucguccgggcaaaagac

SEQ ID NO: 10716 - RNA, 48 nt, Artificial Sequence
  Description of Artificial Sequence:  Enzymatic Nucleic Acid
ugcgaaucggaggaaacucccuucaaggacaucguccgggacacucca

SEQ ID NO: 10717 - RNA, 48 nt, Artificial Sequence
  Description of Artificial Sequence:  Enzymatic Nucleic Acid
gugcgaauggaggaaacucccuucaaggacaucguccgggcacacucc

SEQ ID NO: 10718 - RNA, 48 nt, Artificial Sequence
  Description of Artificial Sequence:  Enzymatic Nucleic Acid
uuggugguggaggaaacucccuucaaggacaucguccggguauaugca

SEQ ID NO: 10719 - RNA, 48 nt, Artificial Sequence
  Description of Artificial Sequence:  Enzymatic Nucleic Acid
guaguuucggaggaaacucccuucaaggacaucguccgggggaagugu

SEQ ID NO: 10720 - RNA, 48 nt, Artificial Sequence
  Description of Artificial Sequence:  Enzymatic Nucleic Acid
aguaguuuggaggaaacucccuucaaggacaucguccgggcggaagug

SEQ ID NO: 10721 - RNA, 48 nt, Artificial Sequence
  Description of Artificial Sequence:  Enzymatic Nucleic Acid
cucuucguggaggaaacucccuucaaggacaucguccggguaacaaca

SEQ ID NO: 10722 - RNA, 48 nt, Artificial Sequence
  Description of Artificial Sequence:  Enzymatic Nucleic Acid
accugccuggaggaaacucccuucaaggacaucguccggguucgucua

SEQ ID NO: 10723 - RNA, 48 nt, Artificial Sequence
  Description of Artificial Sequence:  Enzymatic Nucleic Acid
ggaccugcggaggaaacucccuucaaggacaucguccgggucuucguc

SEQ ID NO: 10724 - RNA, 48 nt, Artificial Sequence
  Description of Artificial Sequence:  Enzymatic Nucleic Acid
uaggggacggaggaaacucccuucaaggacaucguccgggugccucuu

SEQ ID NO: 10725 - RNA, 48 nt, Artificial Sequence
  Description of Artificial Sequence:  Enzymatic Nucleic Acid
uucuucuuggaggaaacucccuucaaggacaucguccggguaggggac

SEQ ID NO: 10726 - RNA, 48 nt, Artificial Sequence
  Description of Artificial Sequence:  Enzymatic Nucleic Acid
gaguucuuggaggaaacucccuucaaggacaucguccggguucuaggg

SEQ ID NO: 10727 - RNA, 48 nt, Artificial Sequence
  Description of Artificial Sequence:  Enzymatic Nucleic Acid
agggaguuggaggaaacucccuucaaggacaucguccggguucuucua

SEQ ID NO: 10728 - RNA, 48 nt, Artificial Sequence
  Description of Artificial Sequence:  Enzymatic Nucleic Acid
accuucguggaggaaacucccuucaaggacaucguccgggugcgaggc

SEQ ID NO: 10729 - RNA, 48 nt, Artificial Sequence
  Description of Artificial Sequence:  Enzymatic Nucleic Acid
auugagacggaggaaacucccuucaaggacaucguccggguucgucug

SEQ ID NO: 10730 - RNA, 48 nt, Artificial Sequence
  Description of Artificial Sequence:  Enzymatic Nucleic Acid
gagaucuuggaggaaacucccuucaaggacaucguccgggugcgacgc

SEQ ID NO: 10731 - RNA, 48 nt, Artificial Sequence
  Description of Artificial Sequence:  Enzymatic Nucleic Acid
auugagauggaggaaacucccuucaaggacaucguccggguucugcga

SEQ ID NO: 10732 - RNA, 48 nt, Artificial Sequence
  Description of Artificial Sequence:  Enzymatic Nucleic Acid
gagauuccggaggaaacucccuucaaggacaucguccggggagauuga

SEQ ID NO: 10733 - RNA, 48 nt, Artificial Sequence
  Description of Artificial Sequence:  Enzymatic Nucleic Acid
ugagauucggaggaaacucccuucaaggacaucguccgggcgagauug

SEQ ID NO: 10734 - RNA, 48 nt, Artificial Sequence
  Description of Artificial Sequence:  Enzymatic Nucleic Acid
uugagauuggaggaaacucccuucaaggacaucguccgggccgagauu

SEQ ID NO: 10735 - RNA, 48 nt, Artificial Sequence
  Description of Artificial Sequence:  Enzymatic Nucleic Acid
uaugugucggaggaaacucccuucaaggacaucguccgggaaggaaua

SEQ ID NO: 10736 - RNA, 48 nt, Artificial Sequence
  Description of Artificial Sequence:  Enzymatic Nucleic Acid
uuauguguggaggaaacucccuucaaggacaucguccgggcaaggaau

SEQ ID NO: 10737 - RNA, 48 nt, Artificial Sequence
  Description of Artificial Sequence:  Enzymatic Nucleic Acid
uuucccacggaggaaacucccuucaaggacaucguccggguuaugugu

SEQ ID NO: 10738 - RNA, 48 nt, Artificial Sequence
  Description of Artificial Sequence:  Enzymatic Nucleic Acid
aaguuuccggaggaaacucccuucaaggacaucguccgggaccuuaug

SEQ ID NO: 10739 - RNA, 48 nt, Artificial Sequence
  Description of Artificial Sequence:  Enzymatic Nucleic Acid
aaaguuucggaggaaacucccuucaaggacaucguccgggcaccuuau

SEQ ID NO: 10740 - RNA, 48 nt, Artificial Sequence
  Description of Artificial Sequence:  Enzymatic Nucleic Acid
uaaaguuuggaggaaacucccuucaaggacaucguccgggccaccuua

SEQ ID NO: 10741 - RNA, 48 nt, Artificial Sequence
  Description of Artificial Sequence:  Enzymatic Nucleic Acid
uaaagcccggaggaaacucccuucaaggacaucguccgggguaaaguu

SEQ ID NO: 10742 - RNA, 48 nt, Artificial Sequence
  Description of Artificial Sequence:  Enzymatic Nucleic Acid
auaaagccggaggaaacucccuucaaggacaucguccgggcguaaagu

SEQ ID NO: 10743 - RNA, 48 nt, Artificial Sequence
  Description of Artificial Sequence:  Enzymatic Nucleic Acid
aauaaagcggaggaaacucccuucaaggacaucguccgggccguaaag

SEQ ID NO: 10744 - RNA, 48 nt, Artificial Sequence
  Description of Artificial Sequence:  Enzymatic Nucleic Acid
caagguacggaggaaacucccuucaaggacaucguccgggguagaaga

SEQ ID NO: 10745 - RNA, 48 nt, Artificial Sequence
  Description of Artificial Sequence:  Enzymatic Nucleic Acid
gaguuugcggaggaaacucccuucaaggacaucguccgggauuuagga

SEQ ID NO: 10746 - RNA, 48 nt, Artificial Sequence
  Description of Artificial Sequence:  Enzymatic Nucleic Acid
auguccucggaggaaacucccuucaaggacaucguccgggugcaaaug

SEQ ID NO: 10747 - RNA, 48 nt, Artificial Sequence
  Description of Artificial Sequence:  Enzymatic Nucleic Acid
aauguccuggaggaaacucccuucaaggacaucguccgggcugcaaau

SEQ ID NO: 10748 - RNA, 48 nt, Artificial Sequence
  Description of Artificial Sequence:  Enzymatic Nucleic Acid
acaaugucggaggaaacucccuucaaggacaucguccggguccugcaa

SEQ ID NO: 10749 - RNA, 48 nt, Artificial Sequence
  Description of Artificial Sequence:  Enzymatic Nucleic Acid
aacaauguggaggaaacucccuucaaggacaucguccgggcuccugca

SEQ ID NO: 10750 - RNA, 48 nt, Artificial Sequence
  Description of Artificial Sequence:  Enzymatic Nucleic Acid
gcuuacauggaggaaacucccuucaaggacaucguccggguaucaaca

SEQ ID NO: 10751 - RNA, 48 nt, Artificial Sequence
  Description of Artificial Sequence:  Enzymatic Nucleic Acid
aggggcccggaggaaacucccuucaaggacaucguccgggacaaauug

SEQ ID NO: 10752 - RNA, 48 nt, Artificial Sequence
  Description of Artificial Sequence:  Enzymatic Nucleic Acid
aaggggccggaggaaacucccuucaaggacaucguccgggcacaaauu

SEQ ID NO: 10753 - RNA, 48 nt, Artificial Sequence
  Description of Artificial Sequence:  Enzymatic Nucleic Acid
uaaggggcggaggaaacucccuucaaggacaucguccgggccacaaau

SEQ ID NO: 10754 - RNA, 48 nt, Artificial Sequence
  Description of Artificial Sequence:  Enzymatic Nucleic Acid
uaagucucggaggaaacucccuucaaggacaucguccggguguuuuca

SEQ ID NO: 10755 - RNA, 48 nt, Artificial Sequence
  Description of Artificial Sequence:  Enzymatic Nucleic Acid
uuaagucuggaggaaacucccuucaaggacaucguccgggcuguuuuc

SEQ ID NO: 10756 - RNA, 48 nt, Artificial Sequence
  Description of Artificial Sequence:  Enzymatic Nucleic Acid
auuuaaguggaggaaacucccuucaaggacaucguccggguccuguuu

SEQ ID NO: 10757 - RNA, 48 nt, Artificial Sequence
  Description of Artificial Sequence:  Enzymatic Nucleic Acid
gauaaaacggaggaaacucccuucaaggacaucguccggguagcaggc

SEQ ID NO: 10758 - RNA, 48 nt, Artificial Sequence
  Description of Artificial Sequence:  Enzymatic Nucleic Acid
cccuuuauggaggaaacucccuucaaggacaucguccggguaagggca

SEQ ID NO: 10759 - RNA, 48 nt, Artificial Sequence
  Description of Artificial Sequence:  Enzymatic Nucleic Acid
uuugauccggaggaaacucccuucaaggacaucguccggguuuaucua

SEQ ID NO: 10760 - RNA, 48 nt, Artificial Sequence
  Description of Artificial Sequence:  Enzymatic Nucleic Acid
guuugaucggaggaaacucccuucaaggacaucguccgggcuuuaucu

SEQ ID NO: 10761 - RNA, 48 nt, Artificial Sequence
  Description of Artificial Sequence:  Enzymatic Nucleic Acid
gguuugauggaggaaacucccuucaaggacaucguccgggccuuuauc

SEQ ID NO: 10762 - RNA, 48 nt, Artificial Sequence
  Description of Artificial Sequence:  Enzymatic Nucleic Acid
uacauacuggaggaaacucccuucaaggacaucguccggguggauaau

SEQ ID NO: 10763 - RNA, 48 nt, Artificial Sequence
  Description of Artificial Sequence:  Enzymatic Nucleic Acid
ugucgcguggaggaaacucccuucaaggacaucguccggguggaagua

SEQ ID NO: 10764 - RNA, 48 nt, Artificial Sequence
  Description of Artificial Sequence:  Enzymatic Nucleic Acid
ccgccuucggaggaaacucccuucaaggacaucguccgggaaagagug

SEQ ID NO: 10765 - RNA, 48 nt, Artificial Sequence
  Description of Artificial Sequence:  Enzymatic Nucleic Acid
cccgccuuggaggaaacucccuucaaggacaucguccgggcaaagagu

SEQ ID NO: 10766 - RNA, 48 nt, Artificial Sequence
  Description of Artificial Sequence:  Enzymatic Nucleic Acid
auccccgcggaggaaacucccuucaaggacaucguccggguuccaaag

SEQ ID NO: 10767 - RNA, 48 nt, Artificial Sequence
  Description of Artificial Sequence:  Enzymatic Nucleic Acid
aagaucccggaggaaacucccuucaaggacaucguccggggccuucca

SEQ ID NO: 10768 - RNA, 48 nt, Artificial Sequence
  Description of Artificial Sequence:  Enzymatic Nucleic Acid
uaagauccggaggaaacucccuucaaggacaucguccgggcgccuucc

SEQ ID NO: 10769 - RNA, 48 nt, Artificial Sequence
  Description of Artificial Sequence:  Enzymatic Nucleic Acid
auaagaucggaggaaacucccuucaaggacaucguccgggccgccuuc

SEQ ID NO: 10770 - RNA, 48 nt, Artificial Sequence
  Description of Artificial Sequence:  Enzymatic Nucleic Acid
uauaagauggaggaaacucccuucaaggacaucguccgggcccgccuu

SEQ ID NO: 10771 - RNA, 48 nt, Artificial Sequence
  Description of Artificial Sequence:  Enzymatic Nucleic Acid
uggacucuggaggaaacucccuucaaggacaucguccggguuuuauau

SEQ ID NO: 10772 - RNA, 48 nt, Artificial Sequence
  Description of Artificial Sequence:  Enzymatic Nucleic Acid
uguggacuggaggaaacucccuucaaggacaucguccgggucuuuuau

SEQ ID NO: 10773 - RNA, 48 nt, Artificial Sequence
  Description of Artificial Sequence:  Enzymatic Nucleic Acid
uggugaccggaggaaacucccuucaaggacaucguccggggcaaaaug

SEQ ID NO: 10774 - RNA, 48 nt, Artificial Sequence
  Description of Artificial Sequence:  Enzymatic Nucleic Acid
auggugacggaggaaacucccuucaaggacaucguccgggcgcaaaau

SEQ ID NO: 10775 - RNA, 48 nt, Artificial Sequence
  Description of Artificial Sequence:  Enzymatic Nucleic Acid
cuuguuccggaggaaacucccuucaaggacaucguccgggaagaauau

SEQ ID NO: 10776 - RNA, 48 nt, Artificial Sequence
  Description of Artificial Sequence:  Enzymatic Nucleic Acid
ucuuguucggaggaaacucccuucaaggacaucguccgggcaagaaua

SEQ ID NO: 10777 - RNA, 48 nt, Artificial Sequence
  Description of Artificial Sequence:  Enzymatic Nucleic Acid
aucuuguuggaggaaacucccuucaaggacaucguccgggccaagaau

SEQ ID NO: 10778 - RNA, 48 nt, Artificial Sequence
  Description of Artificial Sequence:  Enzymatic Nucleic Acid
cuguagauggaggaaacucccuucaaggacaucguccggguuguuccc

SEQ ID NO: 10779 - RNA, 48 nt, Artificial Sequence
  Description of Artificial Sequence:  Enzymatic Nucleic Acid
caaccuccggaggaaacucccuucaaggacaucguccgggaugcugua

SEQ ID NO: 10780 - RNA, 48 nt, Artificial Sequence
  Description of Artificial Sequence:  Enzymatic Nucleic Acid
ccaaccucggaggaaacucccuucaaggacaucguccgggcaugcugu

SEQ ID NO: 10781 - RNA, 48 nt, Artificial Sequence
  Description of Artificial Sequence:  Enzymatic Nucleic Acid
accaaccuggaggaaacucccuucaaggacaucguccgggccaugcug

SEQ ID NO: 10782 - RNA, 48 nt, Artificial Sequence
  Description of Artificial Sequence:  Enzymatic Nucleic Acid
agaccaacggaggaaacucccuucaaggacaucguccgggucccaugc

SEQ ID NO: 10783 - RNA, 48 nt, Artificial Sequence
  Description of Artificial Sequence:  Enzymatic Nucleic Acid
uggaagacggaggaaacucccuucaaggacaucguccgggaaccuccc

SEQ ID NO: 10784 - RNA, 48 nt, Artificial Sequence
  Description of Artificial Sequence:  Enzymatic Nucleic Acid
ccccaugcggaggaaacucccuucaaggacaucguccggguuuucgag

SEQ ID NO: 10785 - RNA, 48 nt, Artificial Sequence
  Description of Artificial Sequence:  Enzymatic Nucleic Acid
uuugucccggaggaaacucccuucaaggacaucguccgggaugccuuu

SEQ ID NO: 10786 - RNA, 48 nt, Artificial Sequence
  Description of Artificial Sequence:  Enzymatic Nucleic Acid
auuuguccggaggaaacucccuucaaggacaucguccgggcaugccuu

SEQ ID NO: 10787 - RNA, 48 nt, Artificial Sequence
  Description of Artificial Sequence:  Enzymatic Nucleic Acid
gauuugucggaggaaacucccuucaaggacaucguccgggccaugccu

SEQ ID NO: 10788 - RNA, 48 nt, Artificial Sequence
  Description of Artificial Sequence:  Enzymatic Nucleic Acid
agauuuguggaggaaacucccuucaaggacaucguccgggcccaugcc

SEQ ID NO: 10789 - RNA, 48 nt, Artificial Sequence
  Description of Artificial Sequence:  Enzymatic Nucleic Acid
aagaauccggaggaaacucccuucaaggacaucguccgggaggggauu

SEQ ID NO: 10790 - RNA, 48 nt, Artificial Sequence
  Description of Artificial Sequence:  Enzymatic Nucleic Acid
gaagaaucggaggaaacucccuucaaggacaucguccgggcaggggau

SEQ ID NO: 10791 - RNA, 48 nt, Artificial Sequence
  Description of Artificial Sequence:  Enzymatic Nucleic Acid
ggaagaauggaggaaacucccuucaaggacaucguccgggccagggga

SEQ ID NO: 10792 - RNA, 48 nt, Artificial Sequence
  Description of Artificial Sequence:  Enzymatic Nucleic Acid
gcagggucggaggaaacucccuucaaggacaucguccgggaacugaug

SEQ ID NO: 10793 - RNA, 48 nt, Artificial Sequence
  Description of Artificial Sequence:  Enzymatic Nucleic Acid
ugcaggguggaggaaacucccuucaaggacaucguccgggcaacugau

SEQ ID NO: 10794 - RNA, 48 nt, Artificial Sequence
  Description of Artificial Sequence:  Enzymatic Nucleic Acid
gucccaauggaggaaacucccuucaaggacaucguccggguggauuua

SEQ ID NO: 10795 - RNA, 48 nt, Artificial Sequence
  Description of Artificial Sequence:  Enzymatic Nucleic Acid
ugagguccggaggaaacucccuucaaggacaucguccgggaaucugga

SEQ ID NO: 10796 - RNA, 48 nt, Artificial Sequence
  Description of Artificial Sequence:  Enzymatic Nucleic Acid
uugaggucggaggaaacucccuucaaggacaucguccgggcaaucugg

SEQ ID NO: 10797 - RNA, 48 nt, Artificial Sequence
  Description of Artificial Sequence:  Enzymatic Nucleic Acid
guugagguggaggaaacucccuucaaggacaucguccgggccaaucug

SEQ ID NO: 10798 - RNA, 48 nt, Artificial Sequence
  Description of Artificial Sequence:  Enzymatic Nucleic Acid
caguugucggaggaaacucccuucaaggacaucguccggguugugcgg

SEQ ID NO: 10799 - RNA, 48 nt, Artificial Sequence
  Description of Artificial Sequence:  Enzymatic Nucleic Acid
ccaguuguggaggaaacucccuucaaggacaucguccgggcuugugcg

SEQ ID NO: 10800 - RNA, 48 nt, Artificial Sequence
  Description of Artificial Sequence:  Enzymatic Nucleic Acid
cguccggcggaggaaacucccuucaaggacaucguccgggaguugucc

SEQ ID NO: 10801 - RNA, 48 nt, Artificial Sequence
  Description of Artificial Sequence:  Enzymatic Nucleic Acid
uuggcgucggaggaaacucccuucaaggacaucguccgggggccaguu

SEQ ID NO: 10802 - RNA, 48 nt, Artificial Sequence
  Description of Artificial Sequence:  Enzymatic Nucleic Acid
guuggcguggaggaaacucccuucaaggacaucguccgggcggccagu

SEQ ID NO: 10803 - RNA, 48 nt, Artificial Sequence
  Description of Artificial Sequence:  Enzymatic Nucleic Acid
acucccacggaggaaacucccuucaaggacaucguccggguuguuggc

SEQ ID NO: 10804 - RNA, 48 nt, Artificial Sequence
  Description of Artificial Sequence:  Enzymatic Nucleic Acid
cccacuccggaggaaacucccuucaaggacaucguccgggaccuuguu

SEQ ID NO: 10805 - RNA, 48 nt, Artificial Sequence
  Description of Artificial Sequence:  Enzymatic Nucleic Acid
ucccacucggaggaaacucccuucaaggacaucguccgggcaccuugu

SEQ ID NO: 10806 - RNA, 48 nt, Artificial Sequence
  Description of Artificial Sequence:  Enzymatic Nucleic Acid
cucccacuggaggaaacucccuucaaggacaucguccgggccaccuug

SEQ ID NO: 10807 - RNA, 48 nt, Artificial Sequence
  Description of Artificial Sequence:  Enzymatic Nucleic Acid
aaugcuccggaggaaacucccuucaaggacaucguccgggacucccac

SEQ ID NO: 10808 - RNA, 48 nt, Artificial Sequence
  Description of Artificial Sequence:  Enzymatic Nucleic Acid
gaaugcucggaggaaacucccuucaaggacaucguccgggcacuccca

SEQ ID NO: 10809 - RNA, 48 nt, Artificial Sequence
  Description of Artificial Sequence:  Enzymatic Nucleic Acid
cgaaugcuggaggaaacucccuucaaggacaucguccgggccacuccc

SEQ ID NO: 10810 - RNA, 48 nt, Artificial Sequence
  Description of Artificial Sequence:  Enzymatic Nucleic Acid
cccuggccggaggaaacucccuucaaggacaucguccggggaaugcuc

SEQ ID NO: 10811 - RNA, 48 nt, Artificial Sequence
  Description of Artificial Sequence:  Enzymatic Nucleic Acid
acccuggcggaggaaacucccuucaaggacaucguccgggcgaaugcu

SEQ ID NO: 10812 - RNA, 48 nt, Artificial Sequence
  Description of Artificial Sequence:  Enzymatic Nucleic Acid
ggugaaccggaggaaacucccuucaaggacaucguccggguggcccga

SEQ ID NO: 10813 - RNA, 48 nt, Artificial Sequence
  Description of Artificial Sequence:  Enzymatic Nucleic Acid
gggugaacggaggaaacucccuucaaggacaucguccgggcuggcccg

SEQ ID NO: 10814 - RNA, 48 nt, Artificial Sequence
  Description of Artificial Sequence:  Enzymatic Nucleic Acid
caguccccggaggaaacucccuucaaggacaucguccgggauggggag

SEQ ID NO: 10815 - RNA, 48 nt, Artificial Sequence
  Description of Artificial Sequence:  Enzymatic Nucleic Acid
acagucccggaggaaacucccuucaaggacaucguccgggcaugggga

SEQ ID NO: 10816 - RNA, 48 nt, Artificial Sequence
  Description of Artificial Sequence:  Enzymatic Nucleic Acid
aacaguccggaggaaacucccuucaaggacaucguccgggccaugggg

SEQ ID NO: 10817 - RNA, 48 nt, Artificial Sequence
  Description of Artificial Sequence:  Enzymatic Nucleic Acid
caacagucggaggaaacucccuucaaggacaucguccgggcccauggg

SEQ ID NO: 10818 - RNA, 48 nt, Artificial Sequence
  Description of Artificial Sequence:  Enzymatic Nucleic Acid
ccaacaguggaggaaacucccuucaaggacaucguccgggccccaugg

SEQ ID NO: 10819 - RNA, 48 nt, Artificial Sequence
  Description of Artificial Sequence:  Enzymatic Nucleic Acid
cuccacccggaggaaacucccuucaaggacaucguccgggaacagucc

SEQ ID NO: 10820 - RNA, 48 nt, Artificial Sequence
  Description of Artificial Sequence:  Enzymatic Nucleic Acid
gcuccaccggaggaaacucccuucaaggacaucguccgggcaacaguc

SEQ ID NO: 10821 - RNA, 48 nt, Artificial Sequence
  Description of Artificial Sequence:  Enzymatic Nucleic Acid
ggcuccacggaggaaacucccuucaaggacaucguccgggccaacagu

SEQ ID NO: 10822 - RNA, 48 nt, Artificial Sequence
  Description of Artificial Sequence:  Enzymatic Nucleic Acid
gagggcucggaggaaacucccuucaaggacaucguccgggaccccaac

SEQ ID NO: 10823 - RNA, 48 nt, Artificial Sequence
  Description of Artificial Sequence:  Enzymatic Nucleic Acid
ugagggcuggaggaaacucccuucaaggacaucguccgggcaccccaa

SEQ ID NO: 10824 - RNA, 48 nt, Artificial Sequence
  Description of Artificial Sequence:  Enzymatic Nucleic Acid
aguaggccggaggaaacucccuucaaggacaucguccgggugagcgug

SEQ ID NO: 10825 - RNA, 48 nt, Artificial Sequence
  Description of Artificial Sequence:  Enzymatic Nucleic Acid
gaguaggcggaggaaacucccuucaaggacaucguccgggcugagcgu

SEQ ID NO: 10826 - RNA, 48 nt, Artificial Sequence
  Description of Artificial Sequence:  Enzymatic Nucleic Acid
cugacugcggaggaaacucccuucaaggacaucguccggggauuggug

SEQ ID NO: 10827 - RNA, 48 nt, Artificial Sequence
  Description of Artificial Sequence:  Enzymatic Nucleic Acid
cugccuucggaggaaacucccuucaaggacaucguccgggugacugcc

SEQ ID NO: 10828 - RNA, 48 nt, Artificial Sequence
  Description of Artificial Sequence:  Enzymatic Nucleic Acid
gcugccuuggaggaaacucccuucaaggacaucguccgggcugacugc

SEQ ID NO: 10829 - RNA, 48 nt, Artificial Sequence
  Description of Artificial Sequence:  Enzymatic Nucleic Acid
uaggcugcggaggaaacucccuucaaggacaucguccggguuccugac

SEQ ID NO: 10830 - RNA, 48 nt, Artificial Sequence
  Description of Artificial Sequence:  Enzymatic Nucleic Acid
gaguguccggaggaaacucccuucaaggacaucguccggguuagaggu

SEQ ID NO: 10831 - RNA, 48 nt, Artificial Sequence
  Description of Artificial Sequence:  Enzymatic Nucleic Acid
ugagugucggaggaaacucccuucaaggacaucguccgggcuuagagg

SEQ ID NO: 10832 - RNA, 48 nt, Artificial Sequence
  Description of Artificial Sequence:  Enzymatic Nucleic Acid
augaguguggaggaaacucccuucaaggacaucguccgggccuuagag

SEQ ID NO: 10833 - RNA, 48 nt, Artificial Sequence
  Description of Artificial Sequence:  Enzymatic Nucleic Acid
ugcauggcggaggaaacucccuucaaggacaucguccgggugaggaug

SEQ ID NO: 10834 - RNA, 37 nt, Artificial Sequence
  Description of Artificial Sequence:  Enzymatic Nucleic Acid
  misc_feature (37)..(37): n stands for inverted deoxyabasic derivative
gacugcgcugaugaggccguuaggccgaaauuuuggn

SEQ ID NO: 10835 - RNA, 37 nt, Artificial Sequence
  Description of Artificial Sequence:  Enzymatic Nucleic Acid
  misc_feature (37)..(37): n stands for inverted deoxyabasic derivative
gacuggacugaugaggccguuaggccgaaauuugggn

SEQ ID NO: 10836 - RNA, 37 nt, Artificial Sequence
  Description of Artificial Sequence:  Enzymatic Nucleic Acid
  misc_feature (37)..(37): n stands for inverted deoxyabasic derivative
ggugagucugaugaggccguuaggccgaaacuggagn

SEQ ID NO: 10837 - RNA, 37 nt, Artificial Sequence
  Description of Artificial Sequence:  Enzymatic Nucleic Acid
  misc_feature (37)..(37): n stands for inverted deoxyabasic derivative
ggaugcacugaugaggccguuaggccgaaaggaagan

SEQ ID NO: 10838 - RNA, 37 nt, Artificial Sequence
  Description of Artificial Sequence:  Enzymatic Nucleic Acid
  misc_feature (37)..(37): n stands for inverted deoxyabasic derivative
ugagggacugaugaggccguuaggccgaaacauagan

SEQ ID NO: 10839 - RNA, 37 nt, Artificial Sequence
  Description of Artificial Sequence:  Enzymatic Nucleic Acid
  misc_feature (37)..(37): n stands for inverted deoxyabasic derivative
cagaggacugaugaggccguuaggccgaaacacaaan

SEQ ID NO: 10840 - RNA, 37 nt, Artificial Sequence
  Description of Artificial Sequence:  Enzymatic Nucleic Acid
  misc_feature (37)..(37): n stands for inverted deoxyabasic derivative
ccgcguacugaugaggccguuaggccgaaagagaggn

SEQ ID NO: 10841 - RNA, 37 nt, Artificial Sequence
  Description of Artificial Sequence:  Enzymatic Nucleic Acid
  misc_feature (37)..(37): n stands for inverted deoxyabasic derivative
uuaaccucugaugaggccguuaggccgaaaccuccun

SEQ ID NO: 10842 - RNA, 37 nt, Artificial Sequence
  Description of Artificial Sequence:  Enzymatic Nucleic Acid
  misc_feature (37)..(37): n stands for inverted deoxyabasic derivative
ugaacagcugaugaggccguuaggccgaaaggacaun

SEQ ID NO: 10843 - RNA, 37 nt, Artificial Sequence
  Description of Artificial Sequence:  Enzymatic Nucleic Acid
  misc_feature (37)..(37): n stands for inverted deoxyabasic derivative
gguaccgcugaugaggccguuaggccgaaagaagaan

SEQ ID NO: 10844 - RNA, 37 nt, Artificial Sequence
  Description of Artificial Sequence:  Enzymatic Nucleic Acid
  misc_feature (37)..(37): n stands for inverted deoxyabasic derivative
uggaaagcugaugaggccguuaggccgaagguggagn

SEQ ID NO: 10845 - RNA, 37 nt, Artificial Sequence
  Description of Artificial Sequence:  Enzymatic Nucleic Acid
  misc_feature (37)..(37): n stands for inverted deoxyabasic derivative
uggugagcugaugaggccguuaggccgaagacuggan

SEQ ID NO: 10846 - RNA, 37 nt, Artificial Sequence
  Description of Artificial Sequence:  Enzymatic Nucleic Acid
  misc_feature (37)..(37): n stands for inverted deoxyabasic derivative
cggcagacugaugaggccguuaggccgaagagacacn

SEQ ID NO: 10847 - RNA, 37 nt, Artificial Sequence
  Description of Artificial Sequence:  Enzymatic Nucleic Acid
  misc_feature (37)..(37): n stands for inverted deoxyabasic derivative
gggcauucugaugaggccguuaggccgaagguggucn

SEQ ID NO: 10848 - RNA, 37 nt, Artificial Sequence
  Description of Artificial Sequence:  Enzymatic Nucleic Acid
  misc_feature (37)..(37): n stands for inverted deoxyabasic derivative
gacaaugauggcaugcacuaugcgcgagguuggugan

SEQ ID NO: 10849 - RNA, 37 nt, Artificial Sequence
  Description of Artificial Sequence:  Enzymatic Nucleic Acid
  misc_feature (37)..(37): n stands for inverted deoxyabasic derivative
gaggaugauggcaugcacuaugcgcgaacagguuggn

SEQ ID NO: 10850 - RNA, 37 nt, Artificial Sequence
  Description of Artificial Sequence:  Enzymatic Nucleic Acid
  misc_feature (37)..(37): n stands for inverted deoxyabasic derivative
cgguaugauggcaugcacuaugcgcgaauaggcggan

SEQ ID NO: 10851 - RNA, 35 nt, Artificial Sequence
  Description of Artificial Sequence:  Enzymatic Nucleic Acid
  misc_feature (1)..(4): Phosphorothioate 3'-Internucleotide Linkage
  misc_feature (1)..(7): 2'-O-Methyl
  misc_feature (11)..(11): 2'-O-Methyl
  misc_feature (13)..(25): 2'-O-Methyl
  misc_feature (27)..(28): 2'-O-Methyl
  misc_feature (30)..(34): 2'-O-Methyl
  misc_feature (8)..(8): 2'-deoxy-2'-C-Allyl
  misc_feature (29)..(29): n stands for inosine
  misc_feature (35)..(35): n stands for inverted deoxyabasic derivative
uauugucugaugaggccguuaggccgaaaggauun

SEQ ID NO: 10852 - RNA, 35 nt, Artificial Sequence
  Description of Artificial Sequence:  Enzymatic Nucleic Acid
  misc_feature (1)..(4): Phosphorothioate 3'-Internucleotide Linkage
  misc_feature (1)..(7): 2'-O-Methyl
  misc_feature (11)..(11): 2'-O-Methyl
  misc_feature (13)..(25): 2'-O-Methyl
  misc_feature (27)..(28): 2'-O-Methyl
  misc_feature (30)..(34): 2'-O-Methyl
  misc_feature (8)..(8): 2'-deoxy-2'-C-Allyl
  misc_feature (29)..(29): n stands for inosine
  misc_feature (35)..(35): n stands for inverted deoxyabasic derivative
cgaguccugaugaggccguuaggccgaaagacucn

SEQ ID NO: 10853 - RNA, 35 nt, Artificial Sequence
  Description of Artificial Sequence:  Enzymatic Nucleic Acid
  misc_feature (1)..(4): Phosphorothioate 3'-Internucleotide Linkage
  misc_feature (1)..(7): 2'-O-Methyl
  misc_feature (11)..(11): 2'-O-Methyl
  misc_feature (13)..(25): 2'-O-Methyl
  misc_feature (27)..(28): 2'-O-Methyl
  misc_feature (30)..(34): 2'-O-Methyl
  misc_feature (8)..(8): 2'-deoxy-2'-C-Allyl
  misc_feature (29)..(29): n stands for inosine
  misc_feature (35)..(35): n stands for inverted deoxyabasic derivative
ugagagcugaugaggccguuaggccgaaaguccan

SEQ ID NO: 10854 - RNA, 35 nt, Artificial Sequence
  Description of Artificial Sequence:  Enzymatic Nucleic Acid
  misc_feature (1)..(4): Phosphorothioate 3'-Internucleotide Linkage
  misc_feature (1)..(7): 2'-O-Methyl
  misc_feature (11)..(11): 2'-O-Methyl
  misc_feature (13)..(25): 2'-O-Methyl
  misc_feature (27)..(28): 2'-O-Methyl
  misc_feature (30)..(34): 2'-O-Methyl
  misc_feature (8)..(8): 2'-deoxy-2'-C-Allyl
  misc_feature (29)..(29): n stands for inosine
  misc_feature (35)..(35): n stands for inverted deoxyabasic derivative
ccccuacugaugaggccguuaggccgaaaaaauun

SEQ ID NO: 10855 - RNA, 35 nt, Artificial Sequence
  Description of Artificial Sequence:  Enzymatic Nucleic Acid
  misc_feature (1)..(4): Phosphorothioate 3'-Internucleotide Linkage
  misc_feature (1)..(7): 2'-O-Methyl
  misc_feature (11)..(11): 2'-O-Methyl
  misc_feature (13)..(25): 2'-O-Methyl
  misc_feature (27)..(28): 2'-O-Methyl
  misc_feature (30)..(34): 2'-O-Methyl
  misc_feature (8)..(8): 2'-deoxy-2'-C-Allyl
  misc_feature (29)..(29): n stands for inosine
  misc_feature (35)..(35): n stands for inverted deoxyabasic derivative
acugcgcugaugaggccguuaggccgaaauuuugn

SEQ ID NO: 10856 - RNA, 35 nt, Artificial Sequence
  Description of Artificial Sequence:  Enzymatic Nucleic Acid
  misc_feature (1)..(4): Phosphorothioate 3'-Internucleotide Linkage
  misc_feature (1)..(7): 2'-O-Methyl
  misc_feature (11)..(11): 2'-O-Methyl
  misc_feature (13)..(25): 2'-O-Methyl
  misc_feature (27)..(28): 2'-O-Methyl
  misc_feature (30)..(34): 2'-O-Methyl
  misc_feature (8)..(8): 2'-deoxy-2'-C-Allyl
  misc_feature (29)..(29): n stands for inosine
  misc_feature (35)..(35): n stands for inverted deoxyabasic derivative
augauacugaugaggccguuaggccgaaaacgccn

SEQ ID NO: 10857 - RNA, 35 nt, Artificial Sequence
  Description of Artificial Sequence:  Enzymatic Nucleic Acid
  misc_feature (1)..(4): Phosphorothioate 3'-Internucleotide Linkage
  misc_feature (1)..(7): 2'-O-Methyl
  misc_feature (11)..(11): 2'-O-Methyl
  misc_feature (13)..(25): 2'-O-Methyl
  misc_feature (27)..(28): 2'-O-Methyl
  misc_feature (30)..(34): 2'-O-Methyl
  misc_feature (8)..(8): 2'-deoxy-2'-C-Allyl
  misc_feature (29)..(29): n stands for inosine
  misc_feature (35)..(35): n stands for inverted deoxyabasic derivative
gaggaacugaugaggccguuaggccgaaaugauan

SEQ ID NO: 10858 - RNA, 35 nt, Artificial Sequence
  Description of Artificial Sequence:  Enzymatic Nucleic Acid
  misc_feature (1)..(4): Phosphorothioate 3'-Internucleotide Linkage
  misc_feature (1)..(7): 2'-O-Methyl
  misc_feature (11)..(11): 2'-O-Methyl
  misc_feature (13)..(25): 2'-O-Methyl
  misc_feature (27)..(28): 2'-O-Methyl
  misc_feature (30)..(34): 2'-O-Methyl
  misc_feature (8)..(8): 2'-deoxy-2'-C-Allyl
  misc_feature (29)..(29): n stands for inosine
  misc_feature (35)..(35): n stands for inverted deoxyabasic derivative
ggauggcugaugaggccguuaggccgaaaauacan

SEQ ID NO: 10859 - RNA, 35 nt, Artificial Sequence
  Description of Artificial Sequence:  Enzymatic Nucleic Acid
  misc_feature (1)..(4): Phosphorothioate 3'-Internucleotide Linkage
  misc_feature (1)..(7): 2'-O-Methyl
  misc_feature (11)..(11): 2'-O-Methyl
  misc_feature (13)..(25): 2'-O-Methyl
  misc_feature (27)..(28): 2'-O-Methyl
  misc_feature (30)..(34): 2'-O-Methyl
  misc_feature (8)..(8): 2'-deoxy-2'-C-Allyl
  misc_feature (29)..(29): n stands for inosine
  misc_feature (35)..(35): n stands for inverted deoxyabasic derivative
accacucugaugaggccguuaggccgaaaacaaan

SEQ ID NO: 10860 - RNA, 35 nt, Artificial Sequence
  Description of Artificial Sequence:  Enzymatic Nucleic Acid
  misc_feature (1)..(4): Phosphorothioate 3'-Internucleotide Linkage
  misc_feature (1)..(7): 2'-O-Methyl
  misc_feature (11)..(11): 2'-O-Methyl
  misc_feature (13)..(25): 2'-O-Methyl
  misc_feature (27)..(28): 2'-O-Methyl
  misc_feature (30)..(34): 2'-O-Methyl
  misc_feature (8)..(8): 2'-deoxy-2'-C-Allyl
  misc_feature (29)..(29): n stands for inosine
  misc_feature (35)..(35): n stands for inverted deoxyabasic derivative
ccgcgucugaugaggccguuaggccgaaaagagan

SEQ ID NO: 10861 - RNA, 35 nt, Artificial Sequence
  Description of Artificial Sequence:  Enzymatic Nucleic Acid
  misc_feature (1)..(4): Phosphorothioate 3'-Internucleotide Linkage
  misc_feature (1)..(7): 2'-O-Methyl
  misc_feature (11)..(11): 2'-O-Methyl
  misc_feature (13)..(25): 2'-O-Methyl
  misc_feature (27)..(28): 2'-O-Methyl
  misc_feature (30)..(34): 2'-O-Methyl
  misc_feature (8)..(8): 2'-deoxy-2'-C-Allyl
  misc_feature (29)..(29): n stands for inosine
  misc_feature (35)..(35): n stands for inverted deoxyabasic derivative
cgugcacugaugaggccguuaggccgaaaggugan

SEQ ID NO: 10862 - RNA, 35 nt, Artificial Sequence
  Description of Artificial Sequence:  Enzymatic Nucleic Acid
  misc_feature (1)..(4): Phosphorothioate 3'-Internucleotide Linkage
  misc_feature (1)..(7): 2'-O-Methyl
  misc_feature (11)..(11): 2'-O-Methyl
  misc_feature (13)..(25): 2'-O-Methyl
  misc_feature (27)..(28): 2'-O-Methyl
  misc_feature (30)..(34): 2'-O-Methyl
  misc_feature (8)..(8): 2'-deoxy-2'-C-Allyl
  misc_feature (29)..(29): n stands for inosine
  misc_feature (35)..(35): n stands for inverted deoxyabasic derivative
ccaugccugaugaggccguuaggccgaaacgugcn

SEQ ID NO: 10863 - RNA, 35 nt, Artificial Sequence
  Description of Artificial Sequence:  Enzymatic Nucleic Acid
  misc_feature (1)..(4): Phosphorothioate 3'-Internucleotide Linkage
  misc_feature (1)..(7): 2'-O-Methyl
  misc_feature (11)..(11): 2'-O-Methyl
  misc_feature (13)..(25): 2'-O-Methyl
  misc_feature (27)..(28): 2'-O-Methyl
  misc_feature (30)..(34): 2'-O-Methyl
  misc_feature (8)..(8): 2'-deoxy-2'-C-Allyl
  misc_feature (29)..(29): n stands for inosine
  misc_feature (35)..(35): n stands for inverted deoxyabasic derivative
uaggcacugaugaggccguuaggccgaaaggugan

SEQ ID NO: 10864 - RNA, 35 nt, Artificial Sequence
  Description of Artificial Sequence:  Enzymatic Nucleic Acid
  misc_feature (1)..(4): Phosphorothioate 3'-Internucleotide Linkage
  misc_feature (1)..(7): 2'-O-Methyl
  misc_feature (11)..(11): 2'-O-Methyl
  misc_feature (13)..(25): 2'-O-Methyl
  misc_feature (27)..(28): 2'-O-Methyl
  misc_feature (30)..(34): 2'-O-Methyl
  misc_feature (8)..(8): 2'-deoxy-2'-C-Allyl
  misc_feature (29)..(29): n stands for inosine
  misc_feature (35)..(35): n stands for inverted deoxyabasic derivative
gcgaggcugaugaggccguuaggccgaaaguucun

SEQ ID NO: 10865 - RNA, 35 nt, Artificial Sequence
  Description of Artificial Sequence:  Enzymatic Nucleic Acid
  misc_feature (1)..(4): Phosphorothioate 3'-Internucleotide Linkage
  misc_feature (1)..(7): 2'-O-Methyl
  misc_feature (11)..(11): 2'-O-Methyl
  misc_feature (13)..(25): 2'-O-Methyl
  misc_feature (27)..(28): 2'-O-Methyl
  misc_feature (30)..(34): 2'-O-Methyl
  misc_feature (8)..(8): 2'-deoxy-2'-C-Allyl
  misc_feature (29)..(29): n stands for inosine
  misc_feature (35)..(35): n stands for inverted deoxyabasic derivative
gauugacugaugaggccguuaggccgaaaucuucn

SEQ ID NO: 10866 - RNA, 35 nt, Artificial Sequence
  Description of Artificial Sequence:  Enzymatic Nucleic Acid
  misc_feature (1)..(4): Phosphorothioate 3'-Internucleotide Linkage
  misc_feature (1)..(7): 2'-O-Methyl
  misc_feature (11)..(11): 2'-O-Methyl
  misc_feature (13)..(25): 2'-O-Methyl
  misc_feature (27)..(28): 2'-O-Methyl
  misc_feature (30)..(34): 2'-O-Methyl
  misc_feature (8)..(8): 2'-deoxy-2'-C-Allyl
  misc_feature (29)..(29): n stands for inosine
  misc_feature (35)..(35): n stands for inverted deoxyabasic derivative
guuccccugaugaggccguuaggccgaaagaauan

SEQ ID NO: 10867 - RNA, 35 nt, Artificial Sequence
  Description of Artificial Sequence:  Enzymatic Nucleic Acid
  misc_feature (1)..(4): Phosphorothioate 3'-Internucleotide Linkage
  misc_feature (1)..(7): 2'-O-Methyl
  misc_feature (11)..(11): 2'-O-Methyl
  misc_feature (13)..(25): 2'-O-Methyl
  misc_feature (27)..(28): 2'-O-Methyl
  misc_feature (30)..(34): 2'-O-Methyl
  misc_feature (8)..(8): 2'-deoxy-2'-C-Allyl
  misc_feature (29)..(29): n stands for inosine
  misc_feature (35)..(35): n stands for inverted deoxyabasic derivative
agaagacugaugaggccguuaggccgaanaggcan

SEQ ID NO: 10868 - RNA, 35 nt, Artificial Sequence
  Description of Artificial Sequence:  Enzymatic Nucleic Acid
  misc_feature (1)..(4): Phosphorothioate 3'-Internucleotide Linkage
  misc_feature (1)..(7): 2'-O-Methyl
  misc_feature (11)..(11): 2'-O-Methyl
  misc_feature (13)..(25): 2'-O-Methyl
  misc_feature (27)..(28): 2'-O-Methyl
  misc_feature (30)..(34): 2'-O-Methyl
  misc_feature (8)..(8): 2'-deoxy-2'-C-Allyl
  misc_feature (29)..(29): n stands for inosine
  misc_feature (35)..(35): n stands for inverted deoxyabasic derivative
guaaaccugaugaggccguuaggccgaanagccan

SEQ ID NO: 10869 - RNA, 35 nt, Artificial Sequence
  Description of Artificial Sequence:  Enzymatic Nucleic Acid
  misc_feature (1)..(4): Phosphorothioate 3'-Internucleotide Linkage
  misc_feature (1)..(7): 2'-O-Methyl
  misc_feature (11)..(11): 2'-O-Methyl
  misc_feature (13)..(25): 2'-O-Methyl
  misc_feature (27)..(28): 2'-O-Methyl
  misc_feature (30)..(34): 2'-O-Methyl
  misc_feature (8)..(8): 2'-deoxy-2'-C-Allyl
  misc_feature (29)..(29): n stands for inosine
  misc_feature (35)..(35): n stands for inverted deoxyabasic derivative
ggcacucugaugaggccguuaggccgaanuaaacn

SEQ ID NO: 10870 - RNA, 35 nt, Artificial Sequence
  Description of Artificial Sequence:  Enzymatic Nucleic Acid
  misc_feature (1)..(4): Phosphorothioate 3'-Internucleotide Linkage
  misc_feature (1)..(7): 2'-O-Methyl
  misc_feature (11)..(11): 2'-O-Methyl
  misc_feature (13)..(25): 2'-O-Methyl
  misc_feature (27)..(28): 2'-O-Methyl
  misc_feature (30)..(34): 2'-O-Methyl
  misc_feature (8)..(8): 2'-deoxy-2'-C-Allyl
  misc_feature (29)..(29): n stands for inosine
  misc_feature (35)..(35): n stands for inverted deoxyabasic derivative
gcaacgcugaugaggccguuaggccgaanguaaan

SEQ ID NO: 10871 - RNA, 35 nt, Artificial Sequence
  Description of Artificial Sequence:  Enzymatic Nucleic Acid
  misc_feature (1)..(4): Phosphorothioate 3'-Internucleotide Linkage
  misc_feature (1)..(7): 2'-O-Methyl
  misc_feature (11)..(11): 2'-O-Methyl
  misc_feature (13)..(25): 2'-O-Methyl
  misc_feature (27)..(28): 2'-O-Methyl
  misc_feature (30)..(34): 2'-O-Methyl
  misc_feature (8)..(8): 2'-deoxy-2'-C-Allyl
  misc_feature (29)..(29): n stands for inosine
  misc_feature (35)..(35): n stands for inverted deoxyabasic derivative
caguggcugaugaggccguuaggccgaanguugcn

SEQ ID NO: 10872 - RNA, 35 nt, Artificial Sequence
  Description of Artificial Sequence:  Enzymatic Nucleic Acid
  misc_feature (1)..(4): Phosphorothioate 3'-Internucleotide Linkage
  misc_feature (1)..(7): 2'-O-Methyl
  misc_feature (11)..(11): 2'-O-Methyl
  misc_feature (13)..(25): 2'-O-Methyl
  misc_feature (27)..(28): 2'-O-Methyl
  misc_feature (30)..(34): 2'-O-Methyl
  misc_feature (8)..(8): 2'-deoxy-2'-C-Allyl
  misc_feature (29)..(29): n stands for inosine
  misc_feature (35)..(35): n stands for inverted deoxyabasic derivative
ccagugcugaugaggccguuaggccgaangguugn

SEQ ID NO: 10873 - RNA, 35 nt, Artificial Sequence
  Description of Artificial Sequence:  Enzymatic Nucleic Acid
  misc_feature (1)..(4): Phosphorothioate 3'-Internucleotide Linkage
  misc_feature (1)..(7): 2'-O-Methyl
  misc_feature (11)..(11): 2'-O-Methyl
  misc_feature (13)..(25): 2'-O-Methyl
  misc_feature (27)..(28): 2'-O-Methyl
  misc_feature (30)..(34): 2'-O-Methyl
  misc_feature (8)..(8): 2'-deoxy-2'-C-Allyl
  misc_feature (29)..(29): n stands for inosine
  misc_feature (35)..(35): n stands for inverted deoxyabasic derivative
ggauuccugaugaggccguuaggccgaancgccgn

SEQ ID NO: 10874 - RNA, 35 nt, Artificial Sequence
  Description of Artificial Sequence:  Enzymatic Nucleic Acid
  misc_feature (1)..(4): Phosphorothioate 3'-Internucleotide Linkage
  misc_feature (1)..(7): 2'-O-Methyl
  misc_feature (11)..(11): 2'-O-Methyl
  misc_feature (13)..(25): 2'-O-Methyl
  misc_feature (27)..(28): 2'-O-Methyl
  misc_feature (30)..(34): 2'-O-Methyl
  misc_feature (8)..(8): 2'-deoxy-2'-C-Allyl
  misc_feature (29)..(29): n stands for inosine
  misc_feature (35)..(35): n stands for inverted deoxyabasic derivative
guccgccugaugaggccguuaggccgaangauucn

SEQ ID NO: 10875 - RNA, 35 nt, Artificial Sequence
  Description of Artificial Sequence:  Enzymatic Nucleic Acid
  misc_feature (1)..(4): Phosphorothioate 3'-Internucleotide Linkage
  misc_feature (1)..(7): 2'-O-Methyl
  misc_feature (11)..(11): 2'-O-Methyl
  misc_feature (13)..(25): 2'-O-Methyl
  misc_feature (27)..(28): 2'-O-Methyl
  misc_feature (30)..(34): 2'-O-Methyl
  misc_feature (8)..(8): 2'-deoxy-2'-C-Allyl
  misc_feature (29)..(29): n stands for inosine
  misc_feature (35)..(35): n stands for inverted deoxyabasic derivative
aaagagcugaugaggccguuaggccgaangugcgn

SEQ ID NO: 10876 - RNA, 35 nt, Artificial Sequence
  Description of Artificial Sequence:  Enzymatic Nucleic Acid
  misc_feature (1)..(4): Phosphorothioate 3'-Internucleotide Linkage
  misc_feature (1)..(7): 2'-O-Methyl
  misc_feature (11)..(11): 2'-O-Methyl
  misc_feature (13)..(25): 2'-O-Methyl
  misc_feature (27)..(28): 2'-O-Methyl
  misc_feature (30)..(34): 2'-O-Methyl
  misc_feature (8)..(8): 2'-deoxy-2'-C-Allyl
  misc_feature (29)..(29): n stands for inosine
  misc_feature (35)..(35): n stands for inverted deoxyabasic derivative
acgugccugaugaggccguuaggccgaanaggugn

SEQ ID NO: 10877 - RNA, 35 nt, Artificial Sequence
  Description of Artificial Sequence:  Enzymatic Nucleic Acid
  misc_feature (1)..(4): Phosphorothioate 3'-Internucleotide Linkage
  misc_feature (1)..(7): 2'-O-Methyl
  misc_feature (11)..(11): 2'-O-Methyl
  misc_feature (13)..(25): 2'-O-Methyl
  misc_feature (27)..(28): 2'-O-Methyl
  misc_feature (30)..(34): 2'-O-Methyl
  misc_feature (8)..(8): 2'-deoxy-2'-C-Allyl
  misc_feature (29)..(29): n stands for inosine
  misc_feature (35)..(35): n stands for inverted deoxyabasic derivative
gccucacugaugaggccguuaggccgaangucggn

SEQ ID NO: 10878 - RNA, 35 nt, Artificial Sequence
  Description of Artificial Sequence:  Enzymatic Nucleic Acid
  misc_feature (1)..(4): Phosphorothioate 3'-Internucleotide Linkage
  misc_feature (1)..(7): 2'-O-Methyl
  misc_feature (11)..(11): 2'-O-Methyl
  misc_feature (13)..(25): 2'-O-Methyl
  misc_feature (27)..(28): 2'-O-Methyl
  misc_feature (30)..(34): 2'-O-Methyl
  misc_feature (8)..(8): 2'-deoxy-2'-C-Allyl
  misc_feature (29)..(29): n stands for inosine
  misc_feature (35)..(35): n stands for inverted deoxyabasic derivative
gccuaccugaugaggccguuaggccgaanccuccn

SEQ ID NO: 10879 - RNA, 35 nt, Artificial Sequence
  Description of Artificial Sequence:  Enzymatic Nucleic Acid
  misc_feature (1)..(4): Phosphorothioate 3'-Internucleotide Linkage
  misc_feature (1)..(7): 2'-O-Methyl
  misc_feature (11)..(11): 2'-O-Methyl
  misc_feature (13)..(25): 2'-O-Methyl
  misc_feature (27)..(28): 2'-O-Methyl
  misc_feature (30)..(34): 2'-O-Methyl
  misc_feature (8)..(8): 2'-deoxy-2'-C-Allyl
  misc_feature (29)..(29): n stands for inosine
  misc_feature (35)..(35): n stands for inverted deoxyabasic derivative
cagaggcugaugaggccguuaggccgaanaaaaan

SEQ ID NO: 10880 - RNA, 35 nt, Artificial Sequence
  Description of Artificial Sequence:  Enzymatic Nucleic Acid
  misc_feature (1)..(4): Phosphorothioate 3'-Internucleotide Linkage
  misc_feature (1)..(7): 2'-O-Methyl
  misc_feature (11)..(11): 2'-O-Methyl
  misc_feature (13)..(25): 2'-O-Methyl
  misc_feature (27)..(28): 2'-O-Methyl
  misc_feature (30)..(34): 2'-O-Methyl
  misc_feature (8)..(8): 2'-deoxy-2'-C-Allyl
  misc_feature (29)..(29): n stands for inosine
  misc_feature (35)..(35): n stands for inverted deoxyabasic derivative
acagcucugaugaggccguuaggccgaangaggcn

SEQ ID NO: 10881 - RNA, 35 nt, Artificial Sequence
  Description of Artificial Sequence:  Enzymatic Nucleic Acid
  misc_feature (1)..(4): Phosphorothioate 3'-Internucleotide Linkage
  misc_feature (1)..(7): 2'-O-Methyl
  misc_feature (11)..(11): 2'-O-Methyl
  misc_feature (13)..(25): 2'-O-Methyl
  misc_feature (27)..(28): 2'-O-Methyl
  misc_feature (30)..(34): 2'-O-Methyl
  misc_feature (8)..(8): 2'-deoxy-2'-C-Allyl
  misc_feature (29)..(29): n stands for inosine
  misc_feature (35)..(35): n stands for inverted deoxyabasic derivative
aggcaccugaugaggccguuaggccgaancuuggn

SEQ ID NO: 10882 - RNA, 37 nt, Artificial Artificial Sequence
  Description of Artificial Sequence:  Enzymatic Nucleic Acid
  misc_feature (1)..(4): Phosphorothioate 3'-Internucleotide Linkage
  misc_feature (1)..(8): 2'-O-Methyl
  misc_feature (12)..(12): 2'-O-Methyl
  misc_feature (14)..(26): 2'-O-Methyl
  misc_feature (28)..(29): 2'-O-Methyl
  misc_feature (31)..(36): 2'-O-Methyl
  misc_feature (9)..(9): 2'-deoxy-2'-C-Allyl
  misc_feature (37)..(37): n stands for inverted deoxyabasic derivative
ugucaaccugaugaggccguuaggccgaaagaaaaan

SEQ ID NO: 10883 - RNA, 37 nt, Artificial Artificial Sequence
  Description of Artificial Sequence:  Enzymatic Nucleic Acid
  misc_feature (1)..(4): Phosphorothioate 3'-Internucleotide Linkage
  misc_feature (1)..(8): 2'-O-Methyl
  misc_feature (12)..(12): 2'-O-Methyl
  misc_feature (14)..(26): 2'-O-Methyl
  misc_feature (28)..(29): 2'-O-Methyl
  misc_feature (31)..(36): 2'-O-Methyl
  misc_feature (9)..(9): 2'-deoxy-2'-C-Allyl
  misc_feature (37)..(37): n stands for inverted deoxyabasic derivative
ccaccaccugaugaggccguuaggccgaaagucuagn

SEQ ID NO: 10884 - RNA, 37 nt, Artificial Artificial Sequence
  Description of Artificial Sequence:  Enzymatic Nucleic Acid
  misc_feature (1)..(4): Phosphorothioate 3'-Internucleotide Linkage
  misc_feature (1)..(8): 2'-O-Methyl
  misc_feature (12)..(12): 2'-O-Methyl
  misc_feature (14)..(26): 2'-O-Methyl
  misc_feature (28)..(29): 2'-O-Methyl
  misc_feature (31)..(36): 2'-O-Methyl
  misc_feature (9)..(9): 2'-deoxy-2'-C-Allyl
  misc_feature (37)..(37): n stands for inverted deoxyabasic derivative
uugagagcugaugaggccguuaggccgaaaguccacn

SEQ ID NO: 10885 - RNA, 37 nt, Artificial Artificial Sequence
  Description of Artificial Sequence:  Enzymatic Nucleic Acid
  misc_feature (1)..(4): Phosphorothioate 3'-Internucleotide Linkage
  misc_feature (1)..(8): 2'-O-Methyl
  misc_feature (12)..(12): 2'-O-Methyl
  misc_feature (14)..(26): 2'-O-Methyl
  misc_feature (28)..(29): 2'-O-Methyl
  misc_feature (31)..(36): 2'-O-Methyl
  misc_feature (9)..(9): 2'-deoxy-2'-C-Allyl
  misc_feature (37)..(37): n stands for inverted deoxyabasic derivative
auugagacugaugaggccguuaggccgaaaaguccan

SEQ ID NO: 10886 - RNA, 37 nt, Artificial Artificial Sequence
  Description of Artificial Sequence:  Enzymatic Nucleic Acid
  misc_feature (1)..(4): Phosphorothioate 3'-Internucleotide Linkage
  misc_feature (1)..(8): 2'-O-Methyl
  misc_feature (12)..(12): 2'-O-Methyl
  misc_feature (14)..(26): 2'-O-Methyl
  misc_feature (28)..(29): 2'-O-Methyl
  misc_feature (31)..(36): 2'-O-Methyl
  misc_feature (9)..(9): 2'-deoxy-2'-C-Allyl
  misc_feature (37)..(37): n stands for inverted deoxyabasic derivative
aaauugacugaugaggccguuaggccgaaagaagucn

SEQ ID NO: 10887 - RNA, 37 nt, Artificial Artificial Sequence
  Description of Artificial Sequence:  Enzymatic Nucleic Acid
  misc_feature (1)..(4): Phosphorothioate 3'-Internucleotide Linkage
  misc_feature (1)..(8): 2'-O-Methyl
  misc_feature (12)..(12): 2'-O-Methyl
  misc_feature (14)..(26): 2'-O-Methyl
  misc_feature (28)..(29): 2'-O-Methyl
  misc_feature (31)..(36): 2'-O-Methyl
  misc_feature (9)..(9): 2'-deoxy-2'-C-Allyl
  misc_feature (37)..(37): n stands for inverted deoxyabasic derivative
gaaaauucugaugaggccguuaggccgaaagagaagn

SEQ ID NO: 10888 - RNA, 37 nt, Artificial Artificial Sequence
  Description of Artificial Sequence:  Enzymatic Nucleic Acid
  misc_feature (1)..(4): Phosphorothioate 3'-Internucleotide Linkage
  misc_feature (1)..(8): 2'-O-Methyl
  misc_feature (12)..(12): 2'-O-Methyl
  misc_feature (14)..(26): 2'-O-Methyl
  misc_feature (28)..(29): 2'-O-Methyl
  misc_feature (31)..(36): 2'-O-Methyl
  misc_feature (9)..(9): 2'-deoxy-2'-C-Allyl
  misc_feature (37)..(37): n stands for inverted deoxyabasic derivative
ccuagaacugaugaggccguuaggccgaaauugagan

SEQ ID NO: 10889 - RNA, 37 nt, Artificial Artificial Sequence
  Description of Artificial Sequence:  Enzymatic Nucleic Acid
  misc_feature (1)..(4): Phosphorothioate 3'-Internucleotide Linkage
  misc_feature (1)..(8): 2'-O-Methyl
  misc_feature (12)..(12): 2'-O-Methyl
  misc_feature (14)..(26): 2'-O-Methyl
  misc_feature (28)..(29): 2'-O-Methyl
  misc_feature (31)..(36): 2'-O-Methyl
  misc_feature (9)..(9): 2'-deoxy-2'-C-Allyl
  misc_feature (37)..(37): n stands for inverted deoxyabasic derivative
cccuagacugaugaggccguuaggccgaaaauugagn

SEQ ID NO: 10890 - RNA, 37 nt, Artificial Artificial Sequence
  Description of Artificial Sequence:  Enzymatic Nucleic Acid
  misc_feature (1)..(4): Phosphorothioate 3'-Internucleotide Linkage
  misc_feature (1)..(8): 2'-O-Methyl
  misc_feature (12)..(12): 2'-O-Methyl
  misc_feature (14)..(26): 2'-O-Methyl
  misc_feature (28)..(29): 2'-O-Methyl
  misc_feature (31)..(36): 2'-O-Methyl
  misc_feature (9)..(9): 2'-deoxy-2'-C-Allyl
  misc_feature (37)..(37): n stands for inverted deoxyabasic derivative
ccccuagcugaugaggccguuaggccgaaaaauugan

SEQ ID NO: 10891 - RNA, 37 nt, Artificial Artificial Sequence
  Description of Artificial Sequence:  Enzymatic Nucleic Acid
  misc_feature (1)..(4): Phosphorothioate 3'-Internucleotide Linkage
  misc_feature (1)..(8): 2'-O-Methyl
  misc_feature (12)..(12): 2'-O-Methyl
  misc_feature (14)..(26): 2'-O-Methyl
  misc_feature (28)..(29): 2'-O-Methyl
  misc_feature (31)..(36): 2'-O-Methyl
  misc_feature (9)..(9): 2'-deoxy-2'-C-Allyl
  misc_feature (37)..(37): n stands for inverted deoxyabasic derivative
ggacugccugaugaggccguuaggccgaaaauuuugn

SEQ ID NO: 10892 - RNA, 37 nt, Artificial Artificial Sequence
  Description of Artificial Sequence:  Enzymatic Nucleic Acid
  misc_feature (1)..(4): Phosphorothioate 3'-Internucleotide Linkage
  misc_feature (1)..(8): 2'-O-Methyl
  misc_feature (12)..(12): 2'-O-Methyl
  misc_feature (14)..(26): 2'-O-Methyl
  misc_feature (28)..(29): 2'-O-Methyl
  misc_feature (31)..(36): 2'-O-Methyl
  misc_feature (9)..(9): 2'-deoxy-2'-C-Allyl
  misc_feature (37)..(37): n stands for inverted deoxyabasic derivative
cgccgcacugaugaggccguuaggccgaaacacaucn

SEQ ID NO: 10893 - RNA, 37 nt, Artificial Artificial Sequence
  Description of Artificial Sequence:  Enzymatic Nucleic Acid
  misc_feature (1)..(4): Phosphorothioate 3'-Internucleotide Linkage
  misc_feature (1)..(8): 2'-O-Methyl
  misc_feature (12)..(12): 2'-O-Methyl
  misc_feature (14)..(26): 2'-O-Methyl
  misc_feature (28)..(29): 2'-O-Methyl
  misc_feature (31)..(36): 2'-O-Methyl
  misc_feature (9)..(9): 2'-deoxy-2'-C-Allyl
  misc_feature (37)..(37): n stands for inverted deoxyabasic derivative
augauaacugaugaggccguuaggccgaaacgccgcn

SEQ ID NO: 10894 - RNA, 37 nt, Artificial Artificial Sequence
  Description of Artificial Sequence:  Enzymatic Nucleic Acid
  misc_feature (1)..(4): Phosphorothioate 3'-Internucleotide Linkage
  misc_feature (1)..(8): 2'-O-Methyl
  misc_feature (12)..(12): 2'-O-Methyl
  misc_feature (14)..(26): 2'-O-Methyl
  misc_feature (28)..(29): 2'-O-Methyl
  misc_feature (31)..(36): 2'-O-Methyl
  misc_feature (9)..(9): 2'-deoxy-2'-C-Allyl
  misc_feature (37)..(37): n stands for inverted deoxyabasic derivative
agaggaacugaugaggccguuaggccgaaaugauaan

SEQ ID NO: 10895 - RNA, 37 nt, Artificial Artificial Sequence
  Description of Artificial Sequence:  Enzymatic Nucleic Acid
  misc_feature (1)..(4): Phosphorothioate 3'-Internucleotide Linkage
  misc_feature (1)..(8): 2'-O-Methyl
  misc_feature (12)..(12): 2'-O-Methyl
  misc_feature (14)..(26): 2'-O-Methyl
  misc_feature (28)..(29): 2'-O-Methyl
  misc_feature (31)..(36): 2'-O-Methyl
  misc_feature (9)..(9): 2'-deoxy-2'-C-Allyl
  misc_feature (37)..(37): n stands for inverted deoxyabasic derivative
ugaggcacugaugaggccguuaggccgaaagcagcan

SEQ ID NO: 10896 - RNA, 37 nt, Artificial Artificial Sequence
  Description of Artificial Sequence:  Enzymatic Nucleic Acid
  misc_feature (1)..(4): Phosphorothioate 3'-Internucleotide Linkage
  misc_feature (1)..(8): 2'-O-Methyl
  misc_feature (12)..(12): 2'-O-Methyl
  misc_feature (14)..(26): 2'-O-Methyl
  misc_feature (28)..(29): 2'-O-Methyl
  misc_feature (31)..(36): 2'-O-Methyl
  misc_feature (9)..(9): 2'-deoxy-2'-C-Allyl
  misc_feature (37)..(37): n stands for inverted deoxyabasic derivative
agaagaucugaugaggccguuaggccgaaaggcauan

SEQ ID NO: 10897 - RNA, 37 nt, Artificial Artificial Sequence
  Description of Artificial Sequence:  Enzymatic Nucleic Acid
  misc_feature (1)..(4): Phosphorothioate 3'-Internucleotide Linkage
  misc_feature (1)..(8): 2'-O-Methyl
  misc_feature (12)..(12): 2'-O-Methyl
  misc_feature (14)..(26): 2'-O-Methyl
  misc_feature (28)..(29): 2'-O-Methyl
  misc_feature (31)..(36): 2'-O-Methyl
  misc_feature (9)..(9): 2'-deoxy-2'-C-Allyl
  misc_feature (37)..(37): n stands for inverted deoxyabasic derivative
acuaguacugaugaggccguuaggccgaaacugagcn

SEQ ID NO: 10898 - RNA, 37 nt, Artificial Artificial Sequence
  Description of Artificial Sequence:  Enzymatic Nucleic Acid
  misc_feature (1)..(4): Phosphorothioate 3'-Internucleotide Linkage
  misc_feature (1)..(8): 2'-O-Methyl
  misc_feature (12)..(12): 2'-O-Methyl
  misc_feature (14)..(26): 2'-O-Methyl
  misc_feature (28)..(29): 2'-O-Methyl
  misc_feature (31)..(36): 2'-O-Methyl
  misc_feature (9)..(9): 2'-deoxy-2'-C-Allyl
  misc_feature (37)..(37): n stands for inverted deoxyabasic derivative
cacuagucugaugaggccguuaggccgaaaacugagn

SEQ ID NO: 10899 - RNA, 37 nt, Artificial Artificial Sequence
  Description of Artificial Sequence:  Enzymatic Nucleic Acid
  misc_feature (1)..(4): Phosphorothioate 3'-Internucleotide Linkage
  misc_feature (1)..(8): 2'-O-Methyl
  misc_feature (12)..(12): 2'-O-Methyl
  misc_feature (14)..(26): 2'-O-Methyl
  misc_feature (28)..(29): 2'-O-Methyl
  misc_feature (31)..(36): 2'-O-Methyl
  misc_feature (9)..(9): 2'-deoxy-2'-C-Allyl
  misc_feature (37)..(37): n stands for inverted deoxyabasic derivative
gcacuagcugaugaggccguuaggccgaaaaacugan

SEQ ID NO: 10900 - RNA, 37 nt, Artificial Artificial Sequence
  Description of Artificial Sequence:  Enzymatic Nucleic Acid
  misc_feature (1)..(4): Phosphorothioate 3'-Internucleotide Linkage
  misc_feature (1)..(8): 2'-O-Methyl
  misc_feature (12)..(12): 2'-O-Methyl
  misc_feature (14)..(26): 2'-O-Methyl
  misc_feature (28)..(29): 2'-O-Methyl
  misc_feature (31)..(36): 2'-O-Methyl
  misc_feature (9)..(9): 2'-deoxy-2'-C-Allyl
  misc_feature (37)..(37): n stands for inverted deoxyabasic derivative
auggcaccugaugaggccguuaggccgaaaguaaacn

SEQ ID NO: 10901 - RNA, 37 nt, Artificial Artificial Sequence
  Description of Artificial Sequence:  Enzymatic Nucleic Acid
  misc_feature (1)..(4): Phosphorothioate 3'-Internucleotide Linkage
  misc_feature (1)..(8): 2'-O-Methyl
  misc_feature (12)..(12): 2'-O-Methyl
  misc_feature (14)..(26): 2'-O-Methyl
  misc_feature (28)..(29): 2'-O-Methyl
  misc_feature (31)..(36): 2'-O-Methyl
  misc_feature (9)..(9): 2'-deoxy-2'-C-Allyl
  misc_feature (37)..(37): n stands for inverted deoxyabasic derivative
cugaacacugaugaggccguuaggccgaaauggcacn

SEQ ID NO: 10902 - RNA, 37 nt, Artificial Artificial Sequence
  Description of Artificial Sequence:  Enzymatic Nucleic Acid
  misc_feature (1)..(4): Phosphorothioate 3'-Internucleotide Linkage
  misc_feature (1)..(8): 2'-O-Methyl
  misc_feature (12)..(12): 2'-O-Methyl
  misc_feature (14)..(26): 2'-O-Methyl
  misc_feature (28)..(29): 2'-O-Methyl
  misc_feature (31)..(36): 2'-O-Methyl
  misc_feature (9)..(9): 2'-deoxy-2'-C-Allyl
  misc_feature (37)..(37): n stands for inverted deoxyabasic derivative
acugaaccugaugaggccguuaggccgaaaauggcan

SEQ ID NO: 10903 - RNA, 37 nt, Artificial Artificial Sequence
  Description of Artificial Sequence:  Enzymatic Nucleic Acid
  misc_feature (1)..(4): Phosphorothioate 3'-Internucleotide Linkage
  misc_feature (1)..(8): 2'-O-Methyl
  misc_feature (12)..(12): 2'-O-Methyl
  misc_feature (14)..(26): 2'-O-Methyl
  misc_feature (28)..(29): 2'-O-Methyl
  misc_feature (31)..(36): 2'-O-Methyl
  misc_feature (9)..(9): 2'-deoxy-2'-C-Allyl
  misc_feature (37)..(37): n stands for inverted deoxyabasic derivative
guaaagacugaugaggccguuaggccgaaaggugcgn

SEQ ID NO: 10904 - RNA, 37 nt, Artificial Artificial Sequence
  Description of Artificial Sequence:  Enzymatic Nucleic Acid
  misc_feature (1)..(4): Phosphorothioate 3'-Internucleotide Linkage
  misc_feature (1)..(8): 2'-O-Methyl
  misc_feature (12)..(12): 2'-O-Methyl
  misc_feature (14)..(26): 2'-O-Methyl
  misc_feature (28)..(29): 2'-O-Methyl
  misc_feature (31)..(36): 2'-O-Methyl
  misc_feature (9)..(9): 2'-deoxy-2'-C-Allyl
  misc_feature (37)..(37): n stands for inverted deoxyabasic derivative
gcguaaacugaugaggccguuaggccgaaagaggugn

SEQ ID NO: 10905 - RNA, 37 nt, Artificial Artificial Sequence; identical to SEQ ID NO: 10840
  Description of Artificial Sequence:  Enzymatic Nucleic Acid
  misc_feature (1)..(4): Phosphorothioate 3'-Internucleotide Linkage
  misc_feature (1)..(8): 2'-O-Methyl
  misc_feature (12)..(12): 2'-O-Methyl
  misc_feature (14)..(26): 2'-O-Methyl
  misc_feature (28)..(29): 2'-O-Methyl
  misc_feature (31)..(36): 2'-O-Methyl
  misc_feature (9)..(9): 2'-deoxy-2'-C-Allyl
  misc_feature (37)..(37): n stands for inverted deoxyabasic derivative

SEQ ID NO: 10906 - RNA, 37 nt, Artificial Artificial Sequence
  Description of Artificial Sequence:  Enzymatic Nucleic Acid
  misc_feature (1)..(4): Phosphorothioate 3'-Internucleotide Linkage
  misc_feature (1)..(8): 2'-O-Methyl
  misc_feature (12)..(12): 2'-O-Methyl
  misc_feature (14)..(26): 2'-O-Methyl
  misc_feature (28)..(29): 2'-O-Methyl
  misc_feature (31)..(36): 2'-O-Methyl
  misc_feature (9)..(9): 2'-deoxy-2'-C-Allyl
  misc_feature (37)..(37): n stands for inverted deoxyabasic derivative
uuaugcccugaugaggccguuaggccgaaacagccun

SEQ ID NO: 10907 - RNA, 37 nt, Artificial Artificial Sequence
  Description of Artificial Sequence:  Enzymatic Nucleic Acid
  misc_feature (1)..(4): Phosphorothioate 3'-Internucleotide Linkage
  misc_feature (1)..(8): 2'-O-Methyl
  misc_feature (12)..(12): 2'-O-Methyl
  misc_feature (14)..(26): 2'-O-Methyl
  misc_feature (28)..(29): 2'-O-Methyl
  misc_feature (31)..(36): 2'-O-Methyl
  misc_feature (9)..(9): 2'-deoxy-2'-C-Allyl
  misc_feature (37)..(37): n stands for inverted deoxyabasic derivative
accaauucugaugaggccguuaggccgaaaugccuan

SEQ ID NO: 10908 - RNA, 37 nt, Artificial Artificial Sequence
  Description of Artificial Sequence:  Enzymatic Nucleic Acid
  misc_feature (1)..(4): Phosphorothioate 3'-Internucleotide Linkage
  misc_feature (1)..(8): 2'-O-Methyl
  misc_feature (12)..(12): 2'-O-Methyl
  misc_feature (14)..(26): 2'-O-Methyl
  misc_feature (28)..(29): 2'-O-Methyl
  misc_feature (31)..(36): 2'-O-Methyl
  misc_feature (9)..(9): 2'-deoxy-2'-C-Allyl
  misc_feature (37)..(37): n stands for inverted deoxyabasic derivative
cagcuugcugaugaggccguuaggccgaaaggcuugn

SEQ ID NO: 10909 - RNA, 37 nt, Artificial Artificial Sequence
  Description of Artificial Sequence:  Enzymatic Nucleic Acid
  misc_feature (1)..(4): Phosphorothioate 3'-Internucleotide Linkage
  misc_feature (1)..(8): 2'-O-Methyl
  misc_feature (12)..(12): 2'-O-Methyl
  misc_feature (14)..(26): 2'-O-Methyl
  misc_feature (28)..(29): 2'-O-Methyl
  misc_feature (31)..(36): 2'-O-Methyl
  misc_feature (9)..(9): 2'-deoxy-2'-C-Allyl
  misc_feature (37)..(37): n stands for inverted deoxyabasic derivative
gccaccccugaugaggccguuaggccgaaaggcacan

SEQ ID NO: 10910 - RNA, 37 nt, Artificial Artificial Sequence
  Description of Artificial Sequence:  Enzymatic Nucleic Acid
  misc_feature (1)..(4): Phosphorothioate 3'-Internucleotide Linkage
  misc_feature (1)..(8): 2'-O-Methyl
  misc_feature (12)..(12): 2'-O-Methyl
  misc_feature (14)..(26): 2'-O-Methyl
  misc_feature (28)..(29): 2'-O-Methyl
  misc_feature (31)..(36): 2'-O-Methyl
  misc_feature (9)..(9): 2'-deoxy-2'-C-Allyl
  misc_feature (37)..(37): n stands for inverted deoxyabasic derivative
ggcgaggcugaugaggccguuaggccgaaaguucuun

SEQ ID NO: 10911 - RNA, 37 nt, Artificial Artificial Sequence
  Description of Artificial Sequence:  Enzymatic Nucleic Acid
  misc_feature (1)..(4): Phosphorothioate 3'-Internucleotide Linkage
  misc_feature (1)..(8): 2'-O-Methyl
  misc_feature (12)..(12): 2'-O-Methyl
  misc_feature (14)..(26): 2'-O-Methyl
  misc_feature (28)..(29): 2'-O-Methyl
  misc_feature (31)..(36): 2'-O-Methyl
  misc_feature (9)..(9): 2'-deoxy-2'-C-Allyl
  misc_feature (37)..(37): n stands for inverted deoxyabasic derivative
ucccaagcugaugaggccguuaggccgaaauauggun

SEQ ID NO: 10912 - RNA, 37 nt, Artificial Artificial Sequence
  Description of Artificial Sequence:  Enzymatic Nucleic Acid
  misc_feature (1)..(4): Phosphorothioate 3'-Internucleotide Linkage
  misc_feature (1)..(8): 2'-O-Methyl
  misc_feature (12)..(12): 2'-O-Methyl
  misc_feature (14)..(26): 2'-O-Methyl
  misc_feature (28)..(29): 2'-O-Methyl
  misc_feature (31)..(36): 2'-O-Methyl
  misc_feature (9)..(9): 2'-deoxy-2'-C-Allyl
  misc_feature (37)..(37): n stands for inverted deoxyabasic derivative
uucccaacugaugaggccguuaggccgaaaauauggn

SEQ ID NO: 10913 - RNA, 37 nt, Artificial Artificial Sequence
  Description of Artificial Sequence:  Enzymatic Nucleic Acid
  misc_feature (1)..(4): Phosphorothioate 3'-Internucleotide Linkage
  misc_feature (1)..(8): 2'-O-Methyl
  misc_feature (12)..(12): 2'-O-Methyl
  misc_feature (14)..(26): 2'-O-Methyl
  misc_feature (28)..(29): 2'-O-Methyl
  misc_feature (31)..(36): 2'-O-Methyl
  misc_feature (9)..(9): 2'-deoxy-2'-C-Allyl
  misc_feature (37)..(37): n stands for inverted deoxyabasic derivative
uguuccccugaugaggccguuaggccgaaagaauaun

SEQ ID NO: 10914 - RNA, 37 nt, Artificial Artificial Sequence
  Description of Artificial Sequence:  Enzymatic Nucleic Acid
  misc_feature (1)..(4): Phosphorothioate 3'-Internucleotide Linkage
  misc_feature (1)..(8): 2'-O-Methyl
  misc_feature (12)..(12): 2'-O-Methyl
  misc_feature (14)..(26): 2'-O-Methyl
  misc_feature (28)..(29): 2'-O-Methyl
  misc_feature (31)..(36): 2'-O-Methyl
  misc_feature (9)..(9): 2'-deoxy-2'-C-Allyl
  misc_feature (37)..(37): n stands for inverted deoxyabasic derivative
caccacgcugaugaggccguuaggccgaanucuagan

SEQ ID NO: 10915 - RNA, 37 nt, Artificial Artificial Sequence
  Description of Artificial Sequence:  Enzymatic Nucleic Acid
  misc_feature (1)..(4): Phosphorothioate 3'-Internucleotide Linkage
  misc_feature (1)..(8): 2'-O-Methyl
  misc_feature (12)..(12): 2'-O-Methyl
  misc_feature (14)..(26): 2'-O-Methyl
  misc_feature (28)..(29): 2'-O-Methyl
  misc_feature (31)..(36): 2'-O-Methyl
  misc_feature (9)..(9): 2'-deoxy-2'-C-Allyl
  misc_feature (37)..(37): n stands for inverted deoxyabasic derivative
ugagagacugaugaggccguuaggccgaanuccaccn

SEQ ID NO: 10916 - RNA, 37 nt, Artificial Artificial Sequence
  Description of Artificial Sequence:  Enzymatic Nucleic Acid
  misc_feature (1)..(4): Phosphorothioate 3'-Internucleotide Linkage
  misc_feature (1)..(8): 2'-O-Methyl
  misc_feature (12)..(12): 2'-O-Methyl
  misc_feature (14)..(26): 2'-O-Methyl
  misc_feature (28)..(29): 2'-O-Methyl
  misc_feature (31)..(36): 2'-O-Methyl
  misc_feature (9)..(9): 2'-deoxy-2'-C-Allyl
  misc_feature (37)..(37): n stands for inverted deoxyabasic derivative
aauugagcugaugaggccguuaggccgaanaaguccn

SEQ ID NO: 10917 - RNA, 37 nt, Artificial Artificial Sequence
  Description of Artificial Sequence:  Enzymatic Nucleic Acid
  misc_feature (1)..(4): Phosphorothioate 3'-Internucleotide Linkage
  misc_feature (1)..(8): 2'-O-Methyl
  misc_feature (12)..(12): 2'-O-Methyl
  misc_feature (14)..(26): 2'-O-Methyl
  misc_feature (28)..(29): 2'-O-Methyl
  misc_feature (31)..(36): 2'-O-Methyl
  misc_feature (9)..(9): 2'-deoxy-2'-C-Allyl
  misc_feature (37)..(37): n stands for inverted deoxyabasic derivative
aaaauugcugaugaggccguuaggccgaanagaagun

SEQ ID NO: 10918 - RNA, 37 nt, Artificial Artificial Sequence
  Description of Artificial Sequence:  Enzymatic Nucleic Acid
  misc_feature (1)..(4): Phosphorothioate 3'-Internucleotide Linkage
  misc_feature (1)..(8): 2'-O-Methyl
  misc_feature (12)..(12): 2'-O-Methyl
  misc_feature (14)..(26): 2'-O-Methyl
  misc_feature (28)..(29): 2'-O-Methyl
  misc_feature (31)..(36): 2'-O-Methyl
  misc_feature (9)..(9): 2'-deoxy-2'-C-Allyl
  misc_feature (37)..(37): n stands for inverted deoxyabasic derivative
agaaaaucugaugaggccguuaggccgaanagagaan

SEQ ID NO: 10919 - RNA, 37 nt, Artificial Artificial Sequence
  Description of Artificial Sequence:  Enzymatic Nucleic Acid
  misc_feature (1)..(4): Phosphorothioate 3'-Internucleotide Linkage
  misc_feature (1)..(8): 2'-O-Methyl
  misc_feature (12)..(12): 2'-O-Methyl
  misc_feature (14)..(26): 2'-O-Methyl
  misc_feature (28)..(29): 2'-O-Methyl
  misc_feature (31)..(36): 2'-O-Methyl
  misc_feature (9)..(9): 2'-deoxy-2'-C-Allyl
  misc_feature (37)..(37): n stands for inverted deoxyabasic derivative
acgccgccugaugaggccguuaggccgaanacacaun

SEQ ID NO: 10920 - RNA, 37 nt, Artificial Artificial Sequence
  Description of Artificial Sequence:  Enzymatic Nucleic Acid
  misc_feature (1)..(4): Phosphorothioate 3'-Internucleotide Linkage
  misc_feature (1)..(8): 2'-O-Methyl
  misc_feature (12)..(12): 2'-O-Methyl
  misc_feature (14)..(26): 2'-O-Methyl
  misc_feature (28)..(29): 2'-O-Methyl
  misc_feature (31)..(36): 2'-O-Methyl
  misc_feature (9)..(9): 2'-deoxy-2'-C-Allyl
  misc_feature (37)..(37): n stands for inverted deoxyabasic derivative
gcauagccugaugaggccguuaggccgaancaggaun

SEQ ID NO: 10921 - RNA, 37 nt, Artificial Artificial Sequence
  Description of Artificial Sequence:  Enzymatic Nucleic Acid
  misc_feature (1)..(4): Phosphorothioate 3'-Internucleotide Linkage
  misc_feature (1)..(8): 2'-O-Methyl
  misc_feature (12)..(12): 2'-O-Methyl
  misc_feature (14)..(26): 2'-O-Methyl
  misc_feature (28)..(29): 2'-O-Methyl
  misc_feature (31)..(36): 2'-O-Methyl
  misc_feature (9)..(9): 2'-deoxy-2'-C-Allyl
  misc_feature (37)..(37): n stands for inverted deoxyabasic derivative
gaggcaucugaugaggccguuaggccgaancagcagn

SEQ ID NO: 10922 - RNA, 37 nt, Artificial Artificial Sequence
  Description of Artificial Sequence:  Enzymatic Nucleic Acid
  misc_feature (1)..(4): Phosphorothioate 3'-Internucleotide Linkage
  misc_feature (1)..(8): 2'-O-Methyl
  misc_feature (12)..(12): 2'-O-Methyl
  misc_feature (14)..(26): 2'-O-Methyl
  misc_feature (28)..(29): 2'-O-Methyl
  misc_feature (31)..(36): 2'-O-Methyl
  misc_feature (9)..(9): 2'-deoxy-2'-C-Allyl
  misc_feature (37)..(37): n stands for inverted deoxyabasic derivative
aagaugacugaugaggccguuaggccgaancauagcn

SEQ ID NO: 10923 - RNA, 37 nt, Artificial Artificial Sequence
  Description of Artificial Sequence:  Enzymatic Nucleic Acid
  misc_feature (1)..(4): Phosphorothioate 3'-Internucleotide Linkage
  misc_feature (1)..(8): 2'-O-Methyl
  misc_feature (12)..(12): 2'-O-Methyl
  misc_feature (14)..(26): 2'-O-Methyl
  misc_feature (28)..(29): 2'-O-Methyl
  misc_feature (31)..(36): 2'-O-Methyl
  misc_feature (9)..(9): 2'-deoxy-2'-C-Allyl
  misc_feature (37)..(37): n stands for inverted deoxyabasic derivative
gaagaugcugaugaggccguuaggccgaangcauagn

SEQ ID NO: 10924 - RNA, 37 nt, Artificial Artificial Sequence
  Description of Artificial Sequence:  Enzymatic Nucleic Acid
  misc_feature (1)..(4): Phosphorothioate 3'-Internucleotide Linkage
  misc_feature (1)..(8): 2'-O-Methyl
  misc_feature (12)..(12): 2'-O-Methyl
  misc_feature (14)..(26): 2'-O-Methyl
  misc_feature (28)..(29): 2'-O-Methyl
  misc_feature (31)..(36): 2'-O-Methyl
  misc_feature (9)..(9): 2'-deoxy-2'-C-Allyl
  misc_feature (37)..(37): n stands for inverted deoxyabasic derivative
aagaagacugaugaggccguuaggccgaanaggcaun

SEQ ID NO: 10925 - RNA, 37 nt, Artificial Artificial Sequence
  Description of Artificial Sequence:  Enzymatic Nucleic Acid
  misc_feature (1)..(4): Phosphorothioate 3'-Internucleotide Linkage
  misc_feature (1)..(8): 2'-O-Methyl
  misc_feature (12)..(12): 2'-O-Methyl
  misc_feature (14)..(26): 2'-O-Methyl
  misc_feature (28)..(29): 2'-O-Methyl
  misc_feature (31)..(36): 2'-O-Methyl
  misc_feature (9)..(9): 2'-deoxy-2'-C-Allyl
  misc_feature (37)..(37): n stands for inverted deoxyabasic derivative
ugggaugcugaugaggccguuaggccgaanaauacan

SEQ ID NO: 10926 - RNA, 37 nt, Artificial Artificial Sequence
  Description of Artificial Sequence:  Enzymatic Nucleic Acid
  misc_feature (1)..(4): Phosphorothioate 3'-Internucleotide Linkage
  misc_feature (1)..(8): 2'-O-Methyl
  misc_feature (12)..(12): 2'-O-Methyl
  misc_feature (14)..(26): 2'-O-Methyl
  misc_feature (28)..(29): 2'-O-Methyl
  misc_feature (31)..(36): 2'-O-Methyl
  misc_feature (9)..(9): 2'-deoxy-2'-C-Allyl
  misc_feature (37)..(37): n stands for inverted deoxyabasic derivative
augggaucugaugaggccguuaggccgaangaauacn

SEQ ID NO: 10927 - RNA, 37 nt, Artificial Artificial Sequence
  Description of Artificial Sequence:  Enzymatic Nucleic Acid
  misc_feature (1)..(4): Phosphorothioate 3'-Internucleotide Linkage
  misc_feature (1)..(8): 2'-O-Methyl
  misc_feature (12)..(12): 2'-O-Methyl
  misc_feature (14)..(26): 2'-O-Methyl
  misc_feature (28)..(29): 2'-O-Methyl
  misc_feature (31)..(36): 2'-O-Methyl
  misc_feature (9)..(9): 2'-deoxy-2'-C-Allyl
  misc_feature (37)..(37): n stands for inverted deoxyabasic derivative
ugagccacugaugaggccguuaggccgaanagaaacn

SEQ ID NO: 10928 - RNA, 37 nt, Artificial Artificial Sequence
  Description of Artificial Sequence:  Enzymatic Nucleic Acid
  misc_feature (1)..(4): Phosphorothioate 3'-Internucleotide Linkage
  misc_feature (1)..(8): 2'-O-Methyl
  misc_feature (12)..(12): 2'-O-Methyl
  misc_feature (14)..(26): 2'-O-Methyl
  misc_feature (28)..(29): 2'-O-Methyl
  misc_feature (31)..(36): 2'-O-Methyl
  misc_feature (9)..(9): 2'-deoxy-2'-C-Allyl
  misc_feature (37)..(37): n stands for inverted deoxyabasic derivative
aacaaaucugaugaggccguuaggccgaancacuagn

SEQ ID NO: 10929 - RNA, 37 nt, Artificial Artificial Sequence
  Description of Artificial Sequence:  Enzymatic Nucleic Acid
  misc_feature (1)..(4): Phosphorothioate 3'-Internucleotide Linkage
  misc_feature (1)..(8): 2'-O-Methyl
  misc_feature (12)..(12): 2'-O-Methyl
  misc_feature (14)..(26): 2'-O-Methyl
  misc_feature (28)..(29): 2'-O-Methyl
  misc_feature (31)..(36): 2'-O-Methyl
  misc_feature (9)..(9): 2'-deoxy-2'-C-Allyl
  misc_feature (37)..(37): n stands for inverted deoxyabasic derivative
gaacaaacugaugaggccguuaggccgaangcacuan

SEQ ID NO: 10930 - RNA, 37 nt, Artificial Artificial Sequence
  Description of Artificial Sequence:  Enzymatic Nucleic Acid
  misc_feature (1)..(4): Phosphorothioate 3'-Internucleotide Linkage
  misc_feature (1)..(8): 2'-O-Methyl
  misc_feature (12)..(12): 2'-O-Methyl
  misc_feature (14)..(26): 2'-O-Methyl
  misc_feature (28)..(29): 2'-O-Methyl
  misc_feature (31)..(36): 2'-O-Methyl
  misc_feature (9)..(9): 2'-deoxy-2'-C-Allyl
  misc_feature (37)..(37): n stands for inverted deoxyabasic derivative
acaguggcugaugaggccguuaggccgaangaaagcn

SEQ ID NO: 10931 - RNA, 37 nt, Artificial Artificial Sequence
  Description of Artificial Sequence:  Enzymatic Nucleic Acid
  misc_feature (1)..(4): Phosphorothioate 3'-Internucleotide Linkage
  misc_feature (1)..(8): 2'-O-Methyl
  misc_feature (12)..(12): 2'-O-Methyl
  misc_feature (14)..(26): 2'-O-Methyl
  misc_feature (28)..(29): 2'-O-Methyl
  misc_feature (31)..(36): 2'-O-Methyl
  misc_feature (9)..(9): 2'-deoxy-2'-C-Allyl
  misc_feature (37)..(37): n stands for inverted deoxyabasic derivative
gcaacggcugaugaggccguuaggccgaanuaaaggn

SEQ ID NO: 10932 - RNA, 37 nt, Artificial Artificial Sequence
  Description of Artificial Sequence:  Enzymatic Nucleic Acid
  misc_feature (1)..(4): Phosphorothioate 3'-Internucleotide Linkage
  misc_feature (1)..(8): 2'-O-Methyl
  misc_feature (12)..(12): 2'-O-Methyl
  misc_feature (14)..(26): 2'-O-Methyl
  misc_feature (28)..(29): 2'-O-Methyl
  misc_feature (31)..(36): 2'-O-Methyl
  misc_feature (9)..(9): 2'-deoxy-2'-C-Allyl
  misc_feature (37)..(37): n stands for inverted deoxyabasic derivative
cguaaagcugaugaggccguuaggccgaanaggugcn

SEQ ID NO: 10933 - RNA, 37 nt, Artificial Artificial Sequence
  Description of Artificial Sequence:  Enzymatic Nucleic Acid
  misc_feature (1)..(4): Phosphorothioate 3'-Internucleotide Linkage
  misc_feature (1)..(8): 2'-O-Methyl
  misc_feature (12)..(12): 2'-O-Methyl
  misc_feature (14)..(26): 2'-O-Methyl
  misc_feature (28)..(29): 2'-O-Methyl
  misc_feature (31)..(36): 2'-O-Methyl
  misc_feature (9)..(9): 2'-deoxy-2'-C-Allyl
  misc_feature (37)..(37): n stands for inverted deoxyabasic derivative
cgcguaacugaugaggccguuaggccgaanagaggun

SEQ ID NO: 10934 - RNA, 37 nt, Artificial Artificial Sequence
  Description of Artificial Sequence:  Enzymatic Nucleic Acid
  misc_feature (1)..(4): Phosphorothioate 3'-Internucleotide Linkage
  misc_feature (1)..(8): 2'-O-Methyl
  misc_feature (12)..(12): 2'-O-Methyl
  misc_feature (14)..(26): 2'-O-Methyl
  misc_feature (28)..(29): 2'-O-Methyl
  misc_feature (31)..(36): 2'-O-Methyl
  misc_feature (9)..(9): 2'-deoxy-2'-C-Allyl
  misc_feature (37)..(37): n stands for inverted deoxyabasic derivative
caauuuacugaugaggccguuaggccgaanccuacan

SEQ ID NO: 10935 - RNA, 37 nt, Artificial Artificial Sequence
  Description of Artificial Sequence:  Enzymatic Nucleic Acid
  misc_feature (1)..(4): Phosphorothioate 3'-Internucleotide Linkage
  misc_feature (1)..(8): 2'-O-Methyl
  misc_feature (12)..(12): 2'-O-Methyl
  misc_feature (14)..(26): 2'-O-Methyl
  misc_feature (28)..(29): 2'-O-Methyl
  misc_feature (31)..(36): 2'-O-Methyl
  misc_feature (9)..(9): 2'-deoxy-2'-C-Allyl
  misc_feature (37)..(37): n stands for inverted deoxyabasic derivative
aggcagacugaugaggccguuaggccgaanugaaaan

SEQ ID NO: 10936 - RNA, 37 nt, Artificial Artificial Sequence
  Description of Artificial Sequence:  Enzymatic Nucleic Acid
  misc_feature (1)..(4): Phosphorothioate 3'-Internucleotide Linkage
  misc_feature (1)..(8): 2'-O-Methyl
  misc_feature (12)..(12): 2'-O-Methyl
  misc_feature (14)..(26): 2'-O-Methyl
  misc_feature (28)..(29): 2'-O-Methyl
  misc_feature (31)..(36): 2'-O-Methyl
  misc_feature (9)..(9): 2'-deoxy-2'-C-Allyl
  misc_feature (37)..(37): n stands for inverted deoxyabasic derivative
uaggcagcugaugaggccguuaggccgaangugaaan

SEQ ID NO: 10937 - RNA, 37 nt, Artificial Artificial Sequence
  Description of Artificial Sequence:  Enzymatic Nucleic Acid
  misc_feature (1)..(4): Phosphorothioate 3'-Internucleotide Linkage
  misc_feature (1)..(8): 2'-O-Methyl
  misc_feature (12)..(12): 2'-O-Methyl
  misc_feature (14)..(26): 2'-O-Methyl
  misc_feature (28)..(29): 2'-O-Methyl
  misc_feature (31)..(36): 2'-O-Methyl
  misc_feature (9)..(9): 2'-deoxy-2'-C-Allyl
  misc_feature (37)..(37): n stands for inverted deoxyabasic derivative
gcuuggacugaugaggccguuaggccgaancuugaan

SEQ ID NO: 10938 - RNA, 37 nt, Artificial Artificial Sequence
  Description of Artificial Sequence:  Enzymatic Nucleic Acid
  misc_feature (1)..(4): Phosphorothioate 3'-Internucleotide Linkage
  misc_feature (1)..(8): 2'-O-Methyl
  misc_feature (12)..(12): 2'-O-Methyl
  misc_feature (14)..(26): 2'-O-Methyl
  misc_feature (28)..(29): 2'-O-Methyl
  misc_feature (31)..(36): 2'-O-Methyl
  misc_feature (9)..(9): 2'-deoxy-2'-C-Allyl
  misc_feature (37)..(37): n stands for inverted deoxyabasic derivative
agcuuggcugaugaggccguuaggccgaangcuugan

SEQ ID NO: 10939 - RNA, 37 nt, Artificial Artificial Sequence
  Description of Artificial Sequence:  Enzymatic Nucleic Acid
  misc_feature (1)..(4): Phosphorothioate 3'-Internucleotide Linkage
  misc_feature (1)..(8): 2'-O-Methyl
  misc_feature (12)..(12): 2'-O-Methyl
  misc_feature (14)..(26): 2'-O-Methyl
  misc_feature (28)..(29): 2'-O-Methyl
  misc_feature (31)..(36): 2'-O-Methyl
  misc_feature (9)..(9): 2'-deoxy-2'-C-Allyl
  misc_feature (37)..(37): n stands for inverted deoxyabasic derivative
acagcuucugaugaggccguuaggccgaanaggcuun

SEQ ID NO: 10940 - RNA, 37 nt, Artificial Artificial Sequence
  Description of Artificial Sequence:  Enzymatic Nucleic Acid
  misc_feature (1)..(4): Phosphorothioate 3'-Internucleotide Linkage
  misc_feature (1)..(8): 2'-O-Methyl
  misc_feature (12)..(12): 2'-O-Methyl
  misc_feature (14)..(26): 2'-O-Methyl
  misc_feature (28)..(29): 2'-O-Methyl
  misc_feature (31)..(36): 2'-O-Methyl
  misc_feature (9)..(9): 2'-deoxy-2'-C-Allyl
  misc_feature (37)..(37): n stands for inverted deoxyabasic derivative
cacagcucugaugaggccguuaggccgaangaggcun

SEQ ID NO: 10941 - RNA, 37 nt, Artificial Artificial Sequence
  Description of Artificial Sequence:  Enzymatic Nucleic Acid
  misc_feature (1)..(4): Phosphorothioate 3'-Internucleotide Linkage
  misc_feature (1)..(8): 2'-O-Methyl
  misc_feature (12)..(12): 2'-O-Methyl
  misc_feature (14)..(26): 2'-O-Methyl
  misc_feature (28)..(29): 2'-O-Methyl
  misc_feature (31)..(36): 2'-O-Methyl
  misc_feature (9)..(9): 2'-deoxy-2'-C-Allyl
  misc_feature (37)..(37): n stands for inverted deoxyabasic derivative
aaggcaccugaugaggccguuaggccgaancuuggan

SEQ ID NO: 10942 - RNA, 37 nt, Artificial Artificial Sequence
  Description of Artificial Sequence:  Enzymatic Nucleic Acid
  misc_feature (1)..(4): Phosphorothioate 3'-Internucleotide Linkage
  misc_feature (1)..(8): 2'-O-Methyl
  misc_feature (12)..(12): 2'-O-Methyl
  misc_feature (14)..(26): 2'-O-Methyl
  misc_feature (28)..(29): 2'-O-Methyl
  misc_feature (31)..(36): 2'-O-Methyl
  misc_feature (9)..(9): 2'-deoxy-2'-C-Allyl
  misc_feature (37)..(37): n stands for inverted deoxyabasic derivative
gcgagggcugaugaggccguuaggccgaanuucuucn

SEQ ID NO: 10943 - RNA, 37 nt, Artificial Artificial Sequence
  Description of Artificial Sequence:  Enzymatic Nucleic Acid
  misc_feature (1)..(4): Phosphorothioate 3'-Internucleotide Linkage
  misc_feature (1)..(8): 2'-O-Methyl
  misc_feature (12)..(12): 2'-O-Methyl
  misc_feature (14)..(26): 2'-O-Methyl
  misc_feature (28)..(29): 2'-O-Methyl
  misc_feature (31)..(36): 2'-O-Methyl
  misc_feature (9)..(9): 2'-deoxy-2'-C-Allyl
  misc_feature (37)..(37): n stands for inverted deoxyabasic derivative
aggcgagcugaugaggccguuaggccgaanaguucun

SEQ ID NO: 10944 - RNA, 37 nt, Artificial Artificial Sequence
  Description of Artificial Sequence:  Enzymatic Nucleic Acid
  misc_feature (1)..(4): Phosphorothioate 3'-Internucleotide Linkage
  misc_feature (1)..(8): 2'-O-Methyl
  misc_feature (12)..(12): 2'-O-Methyl
  misc_feature (14)..(26): 2'-O-Methyl
  misc_feature (28)..(29): 2'-O-Methyl
  misc_feature (31)..(36): 2'-O-Methyl
  misc_feature (9)..(9): 2'-deoxy-2'-C-Allyl
  misc_feature (37)..(37): n stands for inverted deoxyabasic derivative
gaggcgacugaugaggccguuaggccgaangaguucn

SEQ ID NO: 10945 - RNA, 37 nt, Artificial Artificial Sequence
  Description of Artificial Sequence:  Enzymatic Nucleic Acid
  misc_feature (1)..(4): Phosphorothioate 3'-Internucleotide Linkage
  misc_feature (1)..(8): 2'-O-Methyl
  misc_feature (12)..(12): 2'-O-Methyl
  misc_feature (14)..(26): 2'-O-Methyl
  misc_feature (28)..(29): 2'-O-Methyl
  misc_feature (31)..(36): 2'-O-Methyl
  misc_feature (9)..(9): 2'-deoxy-2'-C-Allyl
  misc_feature (37)..(37): n stands for inverted deoxyabasic derivative
gaucuuccugaugaggccguuaggccgaancgacgcn

SEQ ID NO: 10946 - RNA, 37 nt, Artificial Artificial Sequence
  Description of Artificial Sequence:  Enzymatic Nucleic Acid
  misc_feature (1)..(4): Phosphorothioate 3'-Internucleotide Linkage
  misc_feature (1)..(8): 2'-O-Methyl
  misc_feature (12)..(12): 2'-O-Methyl
  misc_feature (14)..(26): 2'-O-Methyl
  misc_feature (28)..(29): 2'-O-Methyl
  misc_feature (31)..(36): 2'-O-Methyl
  misc_feature (9)..(9): 2'-deoxy-2'-C-Allyl
  misc_feature (37)..(37): n stands for inverted deoxyabasic derivative
guucccacugaugaggccguuaggccgaanaauaugn

SEQ ID NO: 10947 - RNA, 35 nt, Artificial Sequence; identical to SEQ ID NO: 10851
  Description of Artificial Sequence:  Enzymatic Nucleic Acid
  misc_feature (1)..(4): Phosphorothioate 3'-Internucleotide Linkage
  misc_feature (1)..(7): 2'-O-Methyl
  misc_feature (13)..(25): 2'-O-Methyl
  misc_feature (27)..(28): 2'-O-Methyl
  misc_feature (30)..(34): 2'-O-Methyl
  misc_feature (8)..(8): 2'-deoxy-2'-amino
  misc_feature (11)..(11): 2'-deoxy-2'-amino
  misc_feature (29)..(29): n stands for inosine
  misc_feature (35)..(35): n stands for inverted deoxyabasic derivative

SEQ ID NO: 10948 - RNA, 35 nt, Artificial Sequence; identical to SEQ ID NO: 10852
  Description of Artificial Sequence:  Enzymatic Nucleic Acid
  misc_feature (1)..(4): Phosphorothioate 3'-Internucleotide Linkage
  misc_feature (1)..(7): 2'-O-Methyl
  misc_feature (13)..(25): 2'-O-Methyl
  misc_feature (27)..(28): 2'-O-Methyl
  misc_feature (30)..(34): 2'-O-Methyl
  misc_feature (8)..(8): 2'-deoxy-2'-amino
  misc_feature (11)..(11): 2'-deoxy-2'-amino
  misc_feature (29)..(29): n stands for inosine
  misc_feature (35)..(35): n stands for inverted deoxyabasic derivative

SEQ ID NO: 10949 - RNA, 35 nt, Artificial Sequence; identical to SEQ ID NO: 10853
  Description of Artificial Sequence:  Enzymatic Nucleic Acid
  misc_feature (1)..(4): Phosphorothioate 3'-Internucleotide Linkage
  misc_feature (1)..(7): 2'-O-Methyl
  misc_feature (13)..(25): 2'-O-Methyl
  misc_feature (27)..(28): 2'-O-Methyl
  misc_feature (30)..(34): 2'-O-Methyl
  misc_feature (8)..(8): 2'-deoxy-2'-amino
  misc_feature (11)..(11): 2'-deoxy-2'-amino
  misc_feature (29)..(29): n stands for inosine
  misc_feature (35)..(35): n stands for inverted deoxyabasic derivative

SEQ ID NO: 10950 - RNA, 35 nt, Artificial Sequence; identical to SEQ ID NO: 10854
  Description of Artificial Sequence:  Enzymatic Nucleic Acid
  misc_feature (1)..(4): Phosphorothioate 3'-Internucleotide Linkage
  misc_feature (1)..(7): 2'-O-Methyl
  misc_feature (13)..(25): 2'-O-Methyl
  misc_feature (27)..(28): 2'-O-Methyl
  misc_feature (30)..(34): 2'-O-Methyl
  misc_feature (8)..(8): 2'-deoxy-2'-amino
  misc_feature (11)..(11): 2'-deoxy-2'-amino
  misc_feature (29)..(29): n stands for inosine
  misc_feature (35)..(35): n stands for inverted deoxyabasic derivative

SEQ ID NO: 10951 - RNA, 35 nt, Artificial Sequence; identical to SEQ ID NO: 10855
  Description of Artificial Sequence:  Enzymatic Nucleic Acid
  misc_feature (1)..(4): Phosphorothioate 3'-Internucleotide Linkage
  misc_feature (1)..(7): 2'-O-Methyl
  misc_feature (13)..(25): 2'-O-Methyl
  misc_feature (27)..(28): 2'-O-Methyl
  misc_feature (30)..(34): 2'-O-Methyl
  misc_feature (8)..(8): 2'-deoxy-2'-amino
  misc_feature (11)..(11): 2'-deoxy-2'-amino
  misc_feature (29)..(29): n stands for inosine
  misc_feature (35)..(35): n stands for inverted deoxyabasic derivative

SEQ ID NO: 10952 - RNA, 35 nt, Artificial Sequence; identical to SEQ ID NO: 10856
  Description of Artificial Sequence:  Enzymatic Nucleic Acid
  misc_feature (1)..(4): Phosphorothioate 3'-Internucleotide Linkage
  misc_feature (1)..(7): 2'-O-Methyl
  misc_feature (13)..(25): 2'-O-Methyl
  misc_feature (27)..(28): 2'-O-Methyl
  misc_feature (30)..(34): 2'-O-Methyl
  misc_feature (8)..(8): 2'-deoxy-2'-amino
  misc_feature (11)..(11): 2'-deoxy-2'-amino
  misc_feature (29)..(29): n stands for inosine
  misc_feature (35)..(35): n stands for inverted deoxyabasic derivative

SEQ ID NO: 10953 - RNA, 35 nt, Artificial Sequence; identical to SEQ ID NO: 10857
  Description of Artificial Sequence:  Enzymatic Nucleic Acid
  misc_feature (1)..(4): Phosphorothioate 3'-Internucleotide Linkage
  misc_feature (1)..(7): 2'-O-Methyl
  misc_feature (13)..(25): 2'-O-Methyl
  misc_feature (27)..(28): 2'-O-Methyl
  misc_feature (30)..(34): 2'-O-Methyl
  misc_feature (8)..(8): 2'-deoxy-2'-amino
  misc_feature (11)..(11): 2'-deoxy-2'-amino
  misc_feature (29)..(29): n stands for inosine
  misc_feature (35)..(35): n stands for inverted deoxyabasic derivative

SEQ ID NO: 10954 - RNA, 35 nt, Artificial Sequence; identical to SEQ ID NO: 10858
  Description of Artificial Sequence:  Enzymatic Nucleic Acid
  misc_feature (1)..(4): Phosphorothioate 3'-Internucleotide Linkage
  misc_feature (1)..(7): 2'-O-Methyl
  misc_feature (13)..(25): 2'-O-Methyl
  misc_feature (27)..(28): 2'-O-Methyl
  misc_feature (30)..(34): 2'-O-Methyl
  misc_feature (8)..(8): 2'-deoxy-2'-amino
  misc_feature (11)..(11): 2'-deoxy-2'-amino
  misc_feature (29)..(29): n stands for inosine
  misc_feature (35)..(35): n stands for inverted deoxyabasic derivative

SEQ ID NO: 10955 - RNA, 35 nt, Artificial Sequence; identical to SEQ ID NO: 10859
  Description of Artificial Sequence:  Enzymatic Nucleic Acid
  misc_feature (1)..(4): Phosphorothioate 3'-Internucleotide Linkage
  misc_feature (1)..(7): 2'-O-Methyl
  misc_feature (13)..(25): 2'-O-Methyl
  misc_feature (27)..(28): 2'-O-Methyl
  misc_feature (30)..(34): 2'-O-Methyl
  misc_feature (8)..(8): 2'-deoxy-2'-amino
  misc_feature (11)..(11): 2'-deoxy-2'-amino
  misc_feature (29)..(29): n stands for inosine
  misc_feature (35)..(35): n stands for inverted deoxyabasic derivative

SEQ ID NO: 10956 - RNA, 35 nt, Artificial Sequence; identical to SEQ ID NO: 10860
  Description of Artificial Sequence:  Enzymatic Nucleic Acid
  misc_feature (1)..(4): Phosphorothioate 3'-Internucleotide Linkage
  misc_feature (1)..(7): 2'-O-Methyl
  misc_feature (13)..(25): 2'-O-Methyl
  misc_feature (27)..(28): 2'-O-Methyl
  misc_feature (30)..(34): 2'-O-Methyl
  misc_feature (8)..(8): 2'-deoxy-2'-amino
  misc_feature (11)..(11): 2'-deoxy-2'-amino
  misc_feature (29)..(29): n stands for inosine
  misc_feature (35)..(35): n stands for inverted deoxyabasic derivative

SEQ ID NO: 10957 - RNA, 35 nt, Artificial Sequence; identical to SEQ ID NO: 10861
  Description of Artificial Sequence:  Enzymatic Nucleic Acid
  misc_feature (1)..(4): Phosphorothioate 3'-Internucleotide Linkage
  misc_feature (1)..(7): 2'-O-Methyl
  misc_feature (13)..(25): 2'-O-Methyl
  misc_feature (27)..(28): 2'-O-Methyl
  misc_feature (30)..(34): 2'-O-Methyl
  misc_feature (8)..(8): 2'-deoxy-2'-amino
  misc_feature (11)..(11): 2'-deoxy-2'-amino
  misc_feature (29)..(29): n stands for inosine
  misc_feature (35)..(35): n stands for inverted deoxyabasic derivative

SEQ ID NO: 10958 - RNA, 35 nt, Artificial Sequence; identical to SEQ ID NO: 10862
  Description of Artificial Sequence:  Enzymatic Nucleic Acid
  misc_feature (1)..(4): Phosphorothioate 3'-Internucleotide Linkage
  misc_feature (1)..(7): 2'-O-Methyl
  misc_feature (13)..(25): 2'-O-Methyl
  misc_feature (27)..(28): 2'-O-Methyl
  misc_feature (30)..(34): 2'-O-Methyl
  misc_feature (8)..(8): 2'-deoxy-2'-amino
  misc_feature (11)..(11): 2'-deoxy-2'-amino
  misc_feature (29)..(29): n stands for inosine
  misc_feature (35)..(35): n stands for inverted deoxyabasic derivative

SEQ ID NO: 10959 - RNA, 35 nt, Artificial Sequence; identical to SEQ ID NO: 10863
  Description of Artificial Sequence:  Enzymatic Nucleic Acid
  misc_feature (1)..(4): Phosphorothioate 3'-Internucleotide Linkage
  misc_feature (1)..(7): 2'-O-Methyl
  misc_feature (13)..(25): 2'-O-Methyl
  misc_feature (27)..(28): 2'-O-Methyl
  misc_feature (30)..(34): 2'-O-Methyl
  misc_feature (8)..(8): 2'-deoxy-2'-amino
  misc_feature (11)..(11): 2'-deoxy-2'-amino
  misc_feature (29)..(29): n stands for inosine
  misc_feature (35)..(35): n stands for inverted deoxyabasic derivative

SEQ ID NO: 10960 - RNA, 35 nt, Artificial Sequence; identical to SEQ ID NO: 10864
  Description of Artificial Sequence:  Enzymatic Nucleic Acid
  misc_feature (1)..(4): Phosphorothioate 3'-Internucleotide Linkage
  misc_feature (1)..(7): 2'-O-Methyl
  misc_feature (13)..(25): 2'-O-Methyl
  misc_feature (27)..(28): 2'-O-Methyl
  misc_feature (30)..(34): 2'-O-Methyl
  misc_feature (8)..(8): 2'-deoxy-2'-amino
  misc_feature (11)..(11): 2'-deoxy-2'-amino
  misc_feature (29)..(29): n stands for inosine
  misc_feature (35)..(35): n stands for inverted deoxyabasic derivative

SEQ ID NO: 10961 - RNA, 35 nt, Artificial Sequence; identical to SEQ ID NO: 10865
  Description of Artificial Sequence:  Enzymatic Nucleic Acid
  misc_feature (1)..(4): Phosphorothioate 3'-Internucleotide Linkage
  misc_feature (1)..(7): 2'-O-Methyl
  misc_feature (13)..(25): 2'-O-Methyl
  misc_feature (27)..(28): 2'-O-Methyl
  misc_feature (30)..(34): 2'-O-Methyl
  misc_feature (8)..(8): 2'-deoxy-2'-amino
  misc_feature (11)..(11): 2'-deoxy-2'-amino
  misc_feature (29)..(29): n stands for inosine
  misc_feature (35)..(35): n stands for inverted deoxyabasic derivative

SEQ ID NO: 10962 - RNA, 35 nt, Artificial Sequence; identical to SEQ ID NO: 10866
  Description of Artificial Sequence:  Enzymatic Nucleic Acid
  misc_feature (1)..(4): Phosphorothioate 3'-Internucleotide Linkage
  misc_feature (1)..(7): 2'-O-Methyl
  misc_feature (13)..(25): 2'-O-Methyl
  misc_feature (27)..(28): 2'-O-Methyl
  misc_feature (30)..(34): 2'-O-Methyl
  misc_feature (8)..(8): 2'-deoxy-2'-amino
  misc_feature (11)..(11): 2'-deoxy-2'-amino
  misc_feature (29)..(29): n stands for inosine
  misc_feature (35)..(35): n stands for inverted deoxyabasic derivative

SEQ ID NO: 10963 - RNA, 35 nt, Artificial Sequence; identical to SEQ ID NO: 10867
  Description of Artificial Sequence:  Enzymatic Nucleic Acid
  misc_feature (1)..(4): Phosphorothioate 3'-Internucleotide Linkage
  misc_feature (1)..(7): 2'-O-Methyl
  misc_feature (13)..(25): 2'-O-Methyl
  misc_feature (27)..(28): 2'-O-Methyl
  misc_feature (30)..(34): 2'-O-Methyl
  misc_feature (8)..(8): 2'-deoxy-2'-amino
  misc_feature (11)..(11): 2'-deoxy-2'-amino
  misc_feature (29)..(29): n stands for inosine
  misc_feature (35)..(35): n stands for inverted deoxyabasic derivative

SEQ ID NO: 10964 - RNA, 35 nt, Artificial Sequence; identical to SEQ ID NO: 10868
  Description of Artificial Sequence:  Enzymatic Nucleic Acid
  misc_feature (1)..(4): Phosphorothioate 3'-Internucleotide Linkage
  misc_feature (1)..(7): 2'-O-Methyl
  misc_feature (13)..(25): 2'-O-Methyl
  misc_feature (27)..(28): 2'-O-Methyl
  misc_feature (30)..(34): 2'-O-Methyl
  misc_feature (8)..(8): 2'-deoxy-2'-amino
  misc_feature (11)..(11): 2'-deoxy-2'-amino
  misc_feature (29)..(29): n stands for inosine
  misc_feature (35)..(35): n stands for inverted deoxyabasic derivative

SEQ ID NO: 10965 - RNA, 35 nt, Artificial Sequence; identical to SEQ ID NO: 10869
  Description of Artificial Sequence:  Enzymatic Nucleic Acid
  misc_feature (1)..(4): Phosphorothioate 3'-Internucleotide Linkage
  misc_feature (1)..(7): 2'-O-Methyl
  misc_feature (13)..(25): 2'-O-Methyl
  misc_feature (27)..(28): 2'-O-Methyl
  misc_feature (30)..(34): 2'-O-Methyl
  misc_feature (8)..(8): 2'-deoxy-2'-amino
  misc_feature (11)..(11): 2'-deoxy-2'-amino
  misc_feature (29)..(29): n stands for inosine
  misc_feature (35)..(35): n stands for inverted deoxyabasic derivative

SEQ ID NO: 10966 - RNA, 35 nt, Artificial Sequence; identical to SEQ ID NO: 10870
  Description of Artificial Sequence:  Enzymatic Nucleic Acid
  misc_feature (1)..(4): Phosphorothioate 3'-Internucleotide Linkage
  misc_feature (1)..(7): 2'-O-Methyl
  misc_feature (13)..(25): 2'-O-Methyl
  misc_feature (27)..(28): 2'-O-Methyl
  misc_feature (30)..(34): 2'-O-Methyl
  misc_feature (8)..(8): 2'-deoxy-2'-amino
  misc_feature (11)..(11): 2'-deoxy-2'-amino
  misc_feature (29)..(29): n stands for inosine
  misc_feature (35)..(35): n stands for inverted deoxyabasic derivative

SEQ ID NO: 10967 - RNA, 35 nt, Artificial Sequence; identical to SEQ ID NO: 10871
  Description of Artificial Sequence:  Enzymatic Nucleic Acid
  misc_feature (1)..(4): Phosphorothioate 3'-Internucleotide Linkage
  misc_feature (1)..(7): 2'-O-Methyl
  misc_feature (13)..(25): 2'-O-Methyl
  misc_feature (27)..(28): 2'-O-Methyl
  misc_feature (30)..(34): 2'-O-Methyl
  misc_feature (8)..(8): 2'-deoxy-2'-amino
  misc_feature (11)..(11): 2'-deoxy-2'-amino
  misc_feature (29)..(29): n stands for inosine
  misc_feature (35)..(35): n stands for inverted deoxyabasic derivative

SEQ ID NO: 10968 - RNA, 35 nt, Artificial Sequence; identical to SEQ ID NO: 10872
  Description of Artificial Sequence:  Enzymatic Nucleic Acid
  misc_feature (1)..(4): Phosphorothioate 3'-Internucleotide Linkage
  misc_feature (1)..(7): 2'-O-Methyl
  misc_feature (13)..(25): 2'-O-Methyl
  misc_feature (27)..(28): 2'-O-Methyl
  misc_feature (30)..(34): 2'-O-Methyl
  misc_feature (8)..(8): 2'-deoxy-2'-amino
  misc_feature (11)..(11): 2'-deoxy-2'-amino
  misc_feature (29)..(29): n stands for inosine
  misc_feature (35)..(35): n stands for inverted deoxyabasic derivative

SEQ ID NO: 10969 - RNA, 35 nt, Artificial Sequence; identical to SEQ ID NO: 10873
  Description of Artificial Sequence:  Enzymatic Nucleic Acid
  misc_feature (1)..(4): Phosphorothioate 3'-Internucleotide Linkage
  misc_feature (1)..(7): 2'-O-Methyl
  misc_feature (13)..(25): 2'-O-Methyl
  misc_feature (27)..(28): 2'-O-Methyl
  misc_feature (30)..(34): 2'-O-Methyl
  misc_feature (8)..(8): 2'-deoxy-2'-amino
  misc_feature (11)..(11): 2'-deoxy-2'-amino
  misc_feature (29)..(29): n stands for inosine
  misc_feature (35)..(35): n stands for inverted deoxyabasic derivative

SEQ ID NO: 10970 - RNA, 35 nt, Artificial Sequence; identical to SEQ ID NO: 10874
  Description of Artificial Sequence:  Enzymatic Nucleic Acid
  misc_feature (1)..(4): Phosphorothioate 3'-Internucleotide Linkage
  misc_feature (1)..(7): 2'-O-Methyl
  misc_feature (13)..(25): 2'-O-Methyl
  misc_feature (27)..(28): 2'-O-Methyl
  misc_feature (30)..(34): 2'-O-Methyl
  misc_feature (8)..(8): 2'-deoxy-2'-amino
  misc_feature (11)..(11): 2'-deoxy-2'-amino
  misc_feature (29)..(29): n stands for inosine
  misc_feature (35)..(35): n stands for inverted deoxyabasic derivative

SEQ ID NO: 10971 - RNA, 35 nt, Artificial Sequence; identical to SEQ ID NO: 10875
  Description of Artificial Sequence:  Enzymatic Nucleic Acid
  misc_feature (1)..(4): Phosphorothioate 3'-Internucleotide Linkage
  misc_feature (1)..(7): 2'-O-Methyl
  misc_feature (13)..(25): 2'-O-Methyl
  misc_feature (27)..(28): 2'-O-Methyl
  misc_feature (30)..(34): 2'-O-Methyl
  misc_feature (8)..(8): 2'-deoxy-2'-amino
  misc_feature (11)..(11): 2'-deoxy-2'-amino
  misc_feature (29)..(29): n stands for inosine
  misc_feature (35)..(35): n stands for inverted deoxyabasic derivative

SEQ ID NO: 10972 - RNA, 35 nt, Artificial Sequence; identical to SEQ ID NO: 10876
  Description of Artificial Sequence:  Enzymatic Nucleic Acid
  misc_feature (1)..(4): Phosphorothioate 3'-Internucleotide Linkage
  misc_feature (1)..(7): 2'-O-Methyl
  misc_feature (13)..(25): 2'-O-Methyl
  misc_feature (27)..(28): 2'-O-Methyl
  misc_feature (30)..(34): 2'-O-Methyl
  misc_feature (8)..(8): 2'-deoxy-2'-amino
  misc_feature (11)..(11): 2'-deoxy-2'-amino
  misc_feature (29)..(29): n stands for inosine
  misc_feature (35)..(35): n stands for inverted deoxyabasic derivative

SEQ ID NO: 10973 - RNA, 35 nt, Artificial Sequence; identical to SEQ ID NO: 10877
  Description of Artificial Sequence:  Enzymatic Nucleic Acid
  misc_feature (1)..(4): Phosphorothioate 3'-Internucleotide Linkage
  misc_feature (1)..(7): 2'-O-Methyl
  misc_feature (13)..(25): 2'-O-Methyl
  misc_feature (27)..(28): 2'-O-Methyl
  misc_feature (30)..(34): 2'-O-Methyl
  misc_feature (8)..(8): 2'-deoxy-2'-amino
  misc_feature (11)..(11): 2'-deoxy-2'-amino
  misc_feature (29)..(29): n stands for inosine
  misc_feature (35)..(35): n stands for inverted deoxyabasic derivative

SEQ ID NO: 10974 - RNA, 35 nt, Artificial Sequence; identical to SEQ ID NO: 10878
  Description of Artificial Sequence:  Enzymatic Nucleic Acid
  misc_feature (1)..(4): Phosphorothioate 3'-Internucleotide Linkage
  misc_feature (1)..(7): 2'-O-Methyl
  misc_feature (13)..(25): 2'-O-Methyl
  misc_feature (27)..(28): 2'-O-Methyl
  misc_feature (30)..(34): 2'-O-Methyl
  misc_feature (8)..(8): 2'-deoxy-2'-amino
  misc_feature (11)..(11): 2'-deoxy-2'-amino
  misc_feature (29)..(29): n stands for inosine
  misc_feature (35)..(35): n stands for inverted deoxyabasic derivative

SEQ ID NO: 10975 - RNA, 35 nt, Artificial Sequence; identical to SEQ ID NO: 10879
  Description of Artificial Sequence:  Enzymatic Nucleic Acid
  misc_feature (1)..(4): Phosphorothioate 3'-Internucleotide Linkage
  misc_feature (1)..(7): 2'-O-Methyl
  misc_feature (13)..(25): 2'-O-Methyl
  misc_feature (27)..(28): 2'-O-Methyl
  misc_feature (30)..(34): 2'-O-Methyl
  misc_feature (8)..(8): 2'-deoxy-2'-amino
  misc_feature (11)..(11): 2'-deoxy-2'-amino
  misc_feature (29)..(29): n stands for inosine
  misc_feature (35)..(35): n stands for inverted deoxyabasic derivative

SEQ ID NO: 10976 - RNA, 35 nt, Artificial Sequence; identical to SEQ ID NO: 10880
  Description of Artificial Sequence:  Enzymatic Nucleic Acid
  misc_feature (1)..(4): Phosphorothioate 3'-Internucleotide Linkage
  misc_feature (1)..(7): 2'-O-Methyl
  misc_feature (13)..(25): 2'-O-Methyl
  misc_feature (27)..(28): 2'-O-Methyl
  misc_feature (30)..(34): 2'-O-Methyl
  misc_feature (8)..(8): 2'-deoxy-2'-amino
  misc_feature (11)..(11): 2'-deoxy-2'-amino
  misc_feature (29)..(29): n stands for inosine
  misc_feature (35)..(35): n stands for inverted deoxyabasic derivative

SEQ ID NO: 10977 - RNA, 35 nt, Artificial Sequence; identical to SEQ ID NO: 10881
  Description of Artificial Sequence:  Enzymatic Nucleic Acid
  misc_feature (1)..(4): Phosphorothioate 3'-Internucleotide Linkage
  misc_feature (1)..(7): 2'-O-Methyl
  misc_feature (13)..(25): 2'-O-Methyl
  misc_feature (27)..(28): 2'-O-Methyl
  misc_feature (30)..(34): 2'-O-Methyl
  misc_feature (8)..(8): 2'-deoxy-2'-amino
  misc_feature (11)..(11): 2'-deoxy-2'-amino
  misc_feature (29)..(29): n stands for inosine
  misc_feature (35)..(35): n stands for inverted deoxyabasic derivative

SEQ ID NO: 10978 - RNA, 37 nt, Artificial Sequence; identical to SEQ ID NO: 10882
  Description of Artificial Sequence:  Enzymatic Nucleic Acid
  misc_feature (1)..(4): Phosphorothioate 3'-Internucleotide Linkage
  misc_feature (1)..(8): 2'-O-Methyl
  misc_feature (14)..(26): 2'-O-Methyl
  misc_feature (28)..(29): 2'-O-Methyl
  misc_feature (31)..(36): 2'-O-Methyl
  misc_feature (9)..(9): 2'-deoxy-2'-amino

SEQ ID NO: 10979 - RNA, 37 nt, Artificial Sequence; identical to SEQ ID NO: 10883
  Description of Artificial Sequence:  Enzymatic Nucleic Acid
  misc_feature (1)..(4): Phosphorothioate 3'-Internucleotide Linkage
  misc_feature (1)..(8): 2'-O-Methyl
  misc_feature (14)..(26): 2'-O-Methyl
  misc_feature (28)..(29): 2'-O-Methyl
  misc_feature (31)..(36): 2'-O-Methyl
  misc_feature (9)..(9): 2'-deoxy-2'-amino
  misc_feature (12)..(12): 2'-deoxy-2'-amino
  misc_feature (37)..(37): n stands for inverted deoxyabasic derivative

SEQ ID NO: 10980 - RNA, 37 nt, Artificial Sequence; identical to SEQ ID NO: 10884
  Description of Artificial Sequence:  Enzymatic Nucleic Acid
  misc_feature (1)..(4): Phosphorothioate 3'-Internucleotide Linkage
  misc_feature (1)..(8): 2'-O-Methyl
  misc_feature (14)..(26): 2'-O-Methyl
  misc_feature (28)..(29): 2'-O-Methyl
  misc_feature (31)..(36): 2'-O-Methyl
  misc_feature (9)..(9): 2'-deoxy-2'-amino
  misc_feature (12)..(12): 2'-deoxy-2'-amino
  misc_feature (37)..(37): n stands for inverted deoxyabasic derivative

SEQ ID NO: 10981 - RNA, 37 nt, Artificial Sequence; identical to SEQ ID NO: 10885
  Description of Artificial Sequence:  Enzymatic Nucleic Acid
  misc_feature (1)..(4): Phosphorothioate 3'-Internucleotide Linkage
  misc_feature (1)..(8): 2'-O-Methyl
  misc_feature (14)..(26): 2'-O-Methyl
  misc_feature (28)..(29): 2'-O-Methyl
  misc_feature (31)..(36): 2'-O-Methyl
  misc_feature (9)..(9): 2'-deoxy-2'-amino
  misc_feature (12)..(12): 2'-deoxy-2'-amino
  misc_feature (37)..(37): n stands for inverted deoxyabasic derivative

SEQ ID NO: 10982 - RNA, 37 nt, Artificial Sequence; identical to SEQ ID NO: 10886
  Description of Artificial Sequence:  Enzymatic Nucleic Acid
  misc_feature (1)..(4): Phosphorothioate 3'-Internucleotide Linkage
  misc_feature (1)..(8): 2'-O-Methyl
  misc_feature (14)..(26): 2'-O-Methyl
  misc_feature (28)..(29): 2'-O-Methyl
  misc_feature (31)..(36): 2'-O-Methyl
  misc_feature (9)..(9): 2'-deoxy-2'-amino
  misc_feature (12)..(12): 2'-deoxy-2'-amino
  misc_feature (37)..(37): n stands for inverted deoxyabasic derivative

SEQ ID NO: 10983 - RNA, 37 nt, Artificial Sequence; identical to SEQ ID NO: 10887
  Description of Artificial Sequence:  Enzymatic Nucleic Acid
  misc_feature (1)..(4): Phosphorothioate 3'-Internucleotide Linkage
  misc_feature (1)..(8): 2'-O-Methyl
  misc_feature (14)..(26): 2'-O-Methyl
  misc_feature (28)..(29): 2'-O-Methyl
  misc_feature (31)..(36): 2'-O-Methyl
  misc_feature (9)..(9): 2'-deoxy-2'-amino
  misc_feature (12)..(12): 2'-deoxy-2'-amino
  misc_feature (37)..(37): n stands for inverted deoxyabasic derivative

SEQ ID NO: 10984 - RNA, 37 nt, Artificial Sequence; identical to SEQ ID NO: 10888
  Description of Artificial Sequence:  Enzymatic Nucleic Acid
  misc_feature (1)..(4): Phosphorothioate 3'-Internucleotide Linkage
  misc_feature (1)..(8): 2'-O-Methyl
  misc_feature (14)..(26): 2'-O-Methyl
  misc_feature (28)..(29): 2'-O-Methyl
  misc_feature (31)..(36): 2'-O-Methyl
  misc_feature (9)..(9): 2'-deoxy-2'-amino
  misc_feature (12)..(12): 2'-deoxy-2'-amino
  misc_feature (37)..(37): n stands for inverted deoxyabasic derivative

SEQ ID NO: 10985 - RNA, 37 nt, Artificial Sequence; identical to SEQ ID NO: 10889
  Description of Artificial Sequence:  Enzymatic Nucleic Acid
  misc_feature (1)..(4): Phosphorothioate 3'-Internucleotide Linkage
  misc_feature (1)..(8): 2'-O-Methyl
  misc_feature (14)..(26): 2'-O-Methyl
  misc_feature (28)..(29): 2'-O-Methyl
  misc_feature (31)..(36): 2'-O-Methyl
  misc_feature (9)..(9): 2'-deoxy-2'-amino
  misc_feature (12)..(12): 2'-deoxy-2'-amino
  misc_feature (37)..(37): n stands for inverted deoxyabasic derivative

SEQ ID NO: 10986 - RNA, 37 nt, Artificial Sequence; identical to SEQ ID NO: 10890
  Description of Artificial Sequence:  Enzymatic Nucleic Acid
  misc_feature (1)..(4): Phosphorothioate 3'-Internucleotide Linkage
  misc_feature (1)..(8): 2'-O-Methyl
  misc_feature (14)..(26): 2'-O-Methyl
  misc_feature (28)..(29): 2'-O-Methyl
  misc_feature (31)..(36): 2'-O-Methyl
  misc_feature (9)..(9): 2'-deoxy-2'-amino
  misc_feature (12)..(12): 2'-deoxy-2'-amino
  misc_feature (37)..(37): n stands for inverted deoxyabasic derivative

SEQ ID NO: 10987 - RNA, 37 nt, Artificial Sequence; identical to SEQ ID NO: 10891
  Description of Artificial Sequence:  Enzymatic Nucleic Acid
  misc_feature (1)..(4): Phosphorothioate 3'-Internucleotide Linkage
  misc_feature (1)..(8): 2'-O-Methyl
  misc_feature (14)..(26): 2'-O-Methyl
  misc_feature (28)..(29): 2'-O-Methyl
  misc_feature (31)..(36): 2'-O-Methyl
  misc_feature (9)..(9): 2'-deoxy-2'-amino
  misc_feature (12)..(12): 2'-deoxy-2'-amino
  misc_feature (37)..(37): n stands for inverted deoxyabasic derivative

SEQ ID NO: 10988 - RNA, 37 nt, Artificial Sequence; identical to SEQ ID NO: 10892
  Description of Artificial Sequence:  Enzymatic Nucleic Acid
  misc_feature (1)..(4): Phosphorothioate 3'-Internucleotide Linkage
  misc_feature (1)..(8): 2'-O-Methyl
  misc_feature (14)..(26): 2'-O-Methyl
  misc_feature (28)..(29): 2'-O-Methyl
  misc_feature (31)..(36): 2'-O-Methyl
  misc_feature (9)..(9): 2'-deoxy-2'-amino
  misc_feature (12)..(12): 2'-deoxy-2'-amino
  misc_feature (37)..(37): n stands for inverted deoxyabasic derivative

SEQ ID NO: 10989 - RNA, 37 nt, Artificial Sequence; identical to SEQ ID NO: 10893
  Description of Artificial Sequence:  Enzymatic Nucleic Acid
  misc_feature (1)..(4): Phosphorothioate 3'-Internucleotide Linkage
  misc_feature (1)..(8): 2'-O-Methyl
  misc_feature (14)..(26): 2'-O-Methyl
  misc_feature (28)..(29): 2'-O-Methyl
  misc_feature (31)..(36): 2'-O-Methyl
  misc_feature (9)..(9): 2'-deoxy-2'-amino
  misc_feature (12)..(12): 2'-deoxy-2'-amino
  misc_feature (37)..(37): n stands for inverted deoxyabasic derivative

SEQ ID NO: 10990 - RNA, 37 nt, Artificial Sequence; identical to SEQ ID NO: 10894
  Description of Artificial Sequence:  Enzymatic Nucleic Acid
  misc_feature (1)..(4): Phosphorothioate 3'-Internucleotide Linkage
  misc_feature (1)..(8): 2'-O-Methyl
  misc_feature (14)..(26): 2'-O-Methyl
  misc_feature (28)..(29): 2'-O-Methyl
  misc_feature (31)..(36): 2'-O-Methyl
  misc_feature (9)..(9): 2'-deoxy-2'-amino
  misc_feature (12)..(12): 2'-deoxy-2'-amino
  misc_feature (37)..(37): n stands for inverted deoxyabasic derivative

SEQ ID NO: 10991 - RNA, 37 nt, Artificial Sequence; identical to SEQ ID NO: 10895
  Description of Artificial Sequence:  Enzymatic Nucleic Acid
  misc_feature (1)..(4): Phosphorothioate 3'-Internucleotide Linkage
  misc_feature (1)..(8): 2'-O-Methyl
  misc_feature (14)..(26): 2'-O-Methyl
  misc_feature (28)..(29): 2'-O-Methyl
  misc_feature (31)..(36): 2'-O-Methyl
  misc_feature (9)..(9): 2'-deoxy-2'-amino
  misc_feature (12)..(12): 2'-deoxy-2'-amino
  misc_feature (37)..(37): n stands for inverted deoxyabasic derivative

SEQ ID NO: 10992 - RNA, 37 nt, Artificial Sequence; identical to SEQ ID NO: 10896
  Description of Artificial Sequence:  Enzymatic Nucleic Acid
  misc_feature (1)..(4): Phosphorothioate 3'-Internucleotide Linkage
  misc_feature (1)..(8): 2'-O-Methyl
  misc_feature (14)..(26): 2'-O-Methyl
  misc_feature (28)..(29): 2'-O-Methyl
  misc_feature (31)..(36): 2'-O-Methyl
  misc_feature (9)..(9): 2'-deoxy-2'-amino
  misc_feature (12)..(12): 2'-deoxy-2'-amino
  misc_feature (37)..(37): n stands for inverted deoxyabasic derivative

SEQ ID NO: 10993 - RNA, 37 nt, Artificial Sequence; identical to SEQ ID NO: 10897
  Description of Artificial Sequence:  Enzymatic Nucleic Acid
  misc_feature (1)..(4): Phosphorothioate 3'-Internucleotide Linkage
  misc_feature (1)..(8): 2'-O-Methyl
  misc_feature (14)..(26): 2'-O-Methyl
  misc_feature (28)..(29): 2'-O-Methyl
  misc_feature (31)..(36): 2'-O-Methyl
  misc_feature (9)..(9): 2'-deoxy-2'-amino
  misc_feature (12)..(12): 2'-deoxy-2'-amino
  misc_feature (37)..(37): n stands for inverted deoxyabasic derivative

SEQ ID NO: 10994 - RNA, 37 nt, Artificial Sequence; identical to SEQ ID NO: 10898
  Description of Artificial Sequence:  Enzymatic Nucleic Acid
  misc_feature (1)..(4): Phosphorothioate 3'-Internucleotide Linkage
  misc_feature (1)..(8): 2'-O-Methyl
  misc_feature (14)..(26): 2'-O-Methyl
  misc_feature (28)..(29): 2'-O-Methyl
  misc_feature (31)..(36): 2'-O-Methyl
  misc_feature (9)..(9): 2'-deoxy-2'-amino
  misc_feature (12)..(12): 2'-deoxy-2'-amino
  misc_feature (37)..(37): n stands for inverted deoxyabasic derivative

SEQ ID NO: 10995 - RNA, 37 nt, Artificial Sequence; identical to SEQ ID NO: 10899
  Description of Artificial Sequence:  Enzymatic Nucleic Acid
  misc_feature (1)..(4): Phosphorothioate 3'-Internucleotide Linkage
  misc_feature (1)..(8): 2'-O-Methyl
  misc_feature (14)..(26): 2'-O-Methyl
  misc_feature (28)..(29): 2'-O-Methyl
  misc_feature (31)..(36): 2'-O-Methyl
  misc_feature (9)..(9): 2'-deoxy-2'-amino
  misc_feature (12)..(12): 2'-deoxy-2'-amino
  misc_feature (37)..(37): n stands for inverted deoxyabasic derivative

SEQ ID NO: 10996 - RNA, 37 nt, Artificial Sequence; identical to SEQ ID NO: 10900
  Description of Artificial Sequence:  Enzymatic Nucleic Acid
  misc_feature (1)..(4): Phosphorothioate 3'-Internucleotide Linkage
  misc_feature (1)..(8): 2'-O-Methyl
  misc_feature (14)..(26): 2'-O-Methyl
  misc_feature (28)..(29): 2'-O-Methyl
  misc_feature (31)..(36): 2'-O-Methyl
  misc_feature (9)..(9): 2'-deoxy-2'-amino
  misc_feature (12)..(12): 2'-deoxy-2'-amino
  misc_feature (37)..(37): n stands for inverted deoxyabasic derivative

SEQ ID NO: 10997 - RNA, 37 nt, Artificial Sequence; identical to SEQ ID NO: 10901
  Description of Artificial Sequence:  Enzymatic Nucleic Acid
  misc_feature (1)..(4): Phosphorothioate 3'-Internucleotide Linkage
  misc_feature (1)..(8): 2'-O-Methyl
  misc_feature (14)..(26): 2'-O-Methyl
  misc_feature (28)..(29): 2'-O-Methyl
  misc_feature (31)..(36): 2'-O-Methyl
  misc_feature (9)..(9): 2'-deoxy-2'-amino
  misc_feature (12)..(12): 2'-deoxy-2'-amino
  misc_feature (37)..(37): n stands for inverted deoxyabasic derivative

SEQ ID NO: 10998 - RNA, 37 nt, Artificial Sequence; identical to SEQ ID NO: 10902
  Description of Artificial Sequence:  Enzymatic Nucleic Acid
  misc_feature (1)..(4): Phosphorothioate 3'-Internucleotide Linkage
  misc_feature (1)..(8): 2'-O-Methyl
  misc_feature (14)..(26): 2'-O-Methyl
  misc_feature (28)..(29): 2'-O-Methyl
  misc_feature (31)..(36): 2'-O-Methyl
  misc_feature (9)..(9): 2'-deoxy-2'-amino
  misc_feature (12)..(12): 2'-deoxy-2'-amino
  misc_feature (37)..(37): n stands for inverted deoxyabasic derivative

SEQ ID NO: 10999 - RNA, 37 nt, Artificial Sequence; identical to SEQ ID NO: 10903
  Description of Artificial Sequence:  Enzymatic Nucleic Acid
  misc_feature (1)..(4): Phosphorothioate 3'-Internucleotide Linkage
  misc_feature (1)..(8): 2'-O-Methyl
  misc_feature (14)..(26): 2'-O-Methyl
  misc_feature (28)..(29): 2'-O-Methyl
  misc_feature (31)..(36): 2'-O-Methyl
  misc_feature (9)..(9): 2'-deoxy-2'-amino
  misc_feature (12)..(12): 2'-deoxy-2'-amino
  misc_feature (37)..(37): n stands for inverted deoxyabasic derivative

SEQ ID NO: 11000 - RNA, 37 nt, Artificial Sequence; identical to SEQ ID NO: 10904
  Description of Artificial Sequence:  Enzymatic Nucleic Acid
  misc_feature (1)..(4): Phosphorothioate 3'-Internucleotide Linkage
  misc_feature (1)..(8): 2'-O-Methyl
  misc_feature (14)..(26): 2'-O-Methyl
  misc_feature (28)..(29): 2'-O-Methyl
  misc_feature (31)..(36): 2'-O-Methyl
  misc_feature (9)..(9): 2'-deoxy-2'-amino
  misc_feature (12)..(12): 2'-deoxy-2'-amino
  misc_feature (37)..(37): n stands for inverted deoxyabasic derivative

SEQ ID NO: 11001 - RNA, 37 nt, Artificial Sequence; identical to SEQ ID NO: 10840
  Description of Artificial Sequence:  Enzymatic Nucleic Acid
  misc_feature (1)..(4): Phosphorothioate 3'-Internucleotide Linkage
  misc_feature (1)..(8): 2'-O-Methyl
  misc_feature (14)..(26): 2'-O-Methyl
  misc_feature (28)..(29): 2'-O-Methyl
  misc_feature (31)..(36): 2'-O-Methyl
  misc_feature (9)..(9): 2'-deoxy-2'-amino
  misc_feature (12)..(12): 2'-deoxy-2'-amino
  misc_feature (37)..(37): n stands for inverted deoxyabasic derivative

SEQ ID NO: 11002 - RNA, 37 nt, Artificial Sequence; identical to SEQ ID NO: 10906
  Description of Artificial Sequence:  Enzymatic Nucleic Acid
  misc_feature (1)..(4): Phosphorothioate 3'-Internucleotide Linkage
  misc_feature (1)..(8): 2'-O-Methyl
  misc_feature (14)..(26): 2'-O-Methyl
  misc_feature (28)..(29): 2'-O-Methyl
  misc_feature (31)..(36): 2'-O-Methyl
  misc_feature (9)..(9): 2'-deoxy-2'-amino
  misc_feature (12)..(12): 2'-deoxy-2'-amino
  misc_feature (37)..(37): n stands for inverted deoxyabasic derivative

SEQ ID NO: 11003 - RNA, 37 nt, Artificial Sequence; identical to SEQ ID NO: 10907
  Description of Artificial Sequence:  Enzymatic Nucleic Acid
  misc_feature (1)..(4): Phosphorothioate 3'-Internucleotide Linkage
  misc_feature (1)..(8): 2'-O-Methyl
  misc_feature (14)..(26): 2'-O-Methyl
  misc_feature (28)..(29): 2'-O-Methyl
  misc_feature (31)..(36): 2'-O-Methyl
  misc_feature (9)..(9): 2'-deoxy-2'-amino
  misc_feature (12)..(12): 2'-deoxy-2'-amino
  misc_feature (37)..(37): n stands for inverted deoxyabasic derivative

SEQ ID NO: 11004 - RNA, 37 nt, Artificial Sequence; identical to SEQ ID NO: 10908
  Description of Artificial Sequence:  Enzymatic Nucleic Acid
  misc_feature (1)..(4): Phosphorothioate 3'-Internucleotide Linkage
  misc_feature (1)..(8): 2'-O-Methyl
  misc_feature (14)..(26): 2'-O-Methyl
  misc_feature (28)..(29): 2'-O-Methyl
  misc_feature (31)..(36): 2'-O-Methyl
  misc_feature (9)..(9): 2'-deoxy-2'-amino
  misc_feature (12)..(12): 2'-deoxy-2'-amino
  misc_feature (37)..(37): n stands for inverted deoxyabasic derivative

SEQ ID NO: 11005 - RNA, 37 nt, Artificial Sequence; identical to SEQ ID NO: 10909
  Description of Artificial Sequence:  Enzymatic Nucleic Acid
  misc_feature (1)..(4): Phosphorothioate 3'-Internucleotide Linkage
  misc_feature (1)..(8): 2'-O-Methyl
  misc_feature (14)..(26): 2'-O-Methyl
  misc_feature (28)..(29): 2'-O-Methyl
  misc_feature (31)..(36): 2'-O-Methyl
  misc_feature (9)..(9): 2'-deoxy-2'-amino
  misc_feature (12)..(12): 2'-deoxy-2'-amino
  misc_feature (37)..(37): n stands for inverted deoxyabasic derivative

SEQ ID NO: 11006 - RNA, 37 nt, Artificial Sequence; identical to SEQ ID NO: 10910
  Description of Artificial Sequence:  Enzymatic Nucleic Acid
  misc_feature (1)..(4): Phosphorothioate 3'-Internucleotide Linkage
  misc_feature (1)..(8): 2'-O-Methyl
  misc_feature (14)..(26): 2'-O-Methyl
  misc_feature (28)..(29): 2'-O-Methyl
  misc_feature (31)..(36): 2'-O-Methyl
  misc_feature (9)..(9): 2'-deoxy-2'-amino
  misc_feature (12)..(12): 2'-deoxy-2'-amino
  misc_feature (37)..(37): n stands for inverted deoxyabasic derivative

SEQ ID NO: 11007 - RNA, 37 nt, Artificial Sequence; identical to SEQ ID NO: 10911
  Description of Artificial Sequence:  Enzymatic Nucleic Acid
  misc_feature (1)..(4): Phosphorothioate 3'-Internucleotide Linkage
  misc_feature (1)..(8): 2'-O-Methyl
  misc_feature (14)..(26): 2'-O-Methyl
  misc_feature (28)..(29): 2'-O-Methyl
  misc_feature (31)..(36): 2'-O-Methyl
  misc_feature (9)..(9): 2'-deoxy-2'-amino
  misc_feature (12)..(12): 2'-deoxy-2'-amino
  misc_feature (37)..(37): n stands for inverted deoxyabasic derivative

SEQ ID NO: 11008 - RNA, 37 nt, Artificial Sequence; identical to SEQ ID NO: 10912
  Description of Artificial Sequence:  Enzymatic Nucleic Acid
  misc_feature (1)..(4): Phosphorothioate 3'-Internucleotide Linkage
  misc_feature (1)..(8): 2'-O-Methyl
  misc_feature (14)..(26): 2'-O-Methyl
  misc_feature (28)..(29): 2'-O-Methyl
  misc_feature (31)..(36): 2'-O-Methyl
  misc_feature (9)..(9): 2'-deoxy-2'-amino
  misc_feature (12)..(12): 2'-deoxy-2'-amino
  misc_feature (37)..(37): n stands for inverted deoxyabasic derivative

SEQ ID NO: 11009 - RNA, 37 nt, Artificial Sequence; identical to SEQ ID NO: 10913
  Description of Artificial Sequence:  Enzymatic Nucleic Acid
  misc_feature (1)..(4): Phosphorothioate 3'-Internucleotide Linkage
  misc_feature (1)..(8): 2'-O-Methyl
  misc_feature (14)..(26): 2'-O-Methyl
  misc_feature (28)..(29): 2'-O-Methyl
  misc_feature (31)..(36): 2'-O-Methyl
  misc_feature (9)..(9): 2'-deoxy-2'-amino
  misc_feature (12)..(12): 2'-deoxy-2'-amino
  misc_feature (37)..(37): n stands for inverted deoxyabasic derivative

SEQ ID NO: 11010 - RNA, 37 nt, Artificial Sequence; identical to SEQ ID NO: 10914
  Description of Artificial Sequence:  Enzymatic Nucleic Acid
  misc_feature (1)..(4): Phosphorothioate 3'-Internucleotide Linkage
  misc_feature (1)..(8): 2'-O-Methyl
  misc_feature (14)..(26): 2'-O-Methyl
  misc_feature (28)..(29): 2'-O-Methyl
  misc_feature (31)..(36): 2'-O-Methyl
  misc_feature (9)..(9): 2'-deoxy-2'-amino
  misc_feature (12)..(12): 2'-deoxy-2'-amino
  misc_feature (30)..(30): n stands for inosine
  misc_feature (37)..(37): n stands for inverted deoxyabasic derivative

SEQ ID NO: 11011 - RNA, 37 nt, Artificial Sequence; identical to SEQ ID NO: 10915
  Description of Artificial Sequence:  Enzymatic Nucleic Acid
  misc_feature (1)..(4): Phosphorothioate 3'-Internucleotide Linkage
  misc_feature (1)..(8): 2'-O-Methyl
  misc_feature (14)..(26): 2'-O-Methyl
  misc_feature (28)..(29): 2'-O-Methyl
  misc_feature (31)..(36): 2'-O-Methyl
  misc_feature (9)..(9): 2'-deoxy-2'-amino
  misc_feature (12)..(12): 2'-deoxy-2'-amino
  misc_feature (30)..(30): n stands for inosine
  misc_feature (37)..(37): n stands for inverted deoxyabasic derivative

SEQ ID NO: 11012 - RNA, 37 nt, Artificial Sequence; identical to SEQ ID NO: 10916
  Description of Artificial Sequence:  Enzymatic Nucleic Acid
  misc_feature (1)..(4): Phosphorothioate 3'-Internucleotide Linkage
  misc_feature (1)..(8): 2'-O-Methyl
  misc_feature (14)..(26): 2'-O-Methyl
  misc_feature (28)..(29): 2'-O-Methyl
  misc_feature (31)..(36): 2'-O-Methyl
  misc_feature (9)..(9): 2'-deoxy-2'-amino
  misc_feature (12)..(12): 2'-deoxy-2'-amino
  misc_feature (30)..(30): n stands for inosine
  misc_feature (37)..(37): n stands for inverted deoxyabasic derivative

SEQ ID NO: 11013 - RNA, 37 nt, Artificial Sequence; identical to SEQ ID NO: 10917
  Description of Artificial Sequence:  Enzymatic Nucleic Acid
  misc_feature (1)..(4): Phosphorothioate 3'-Internucleotide Linkage
  misc_feature (1)..(8): 2'-O-Methyl
  misc_feature (14)..(26): 2'-O-Methyl
  misc_feature (28)..(29): 2'-O-Methyl
  misc_feature (31)..(36): 2'-O-Methyl
  misc_feature (9)..(9): 2'-deoxy-2'-amino
  misc_feature (12)..(12): 2'-deoxy-2'-amino
  misc_feature (30)..(30): n stands for inosine
  misc_feature (37)..(37): n stands for inverted deoxyabasic derivative

SEQ ID NO: 11014 - RNA, 37 nt, Artificial Sequence; identical to SEQ ID NO: 10918
  Description of Artificial Sequence:  Enzymatic Nucleic Acid
  misc_feature (1)..(4): Phosphorothioate 3'-Internucleotide Linkage
  misc_feature (1)..(8): 2'-O-Methyl
  misc_feature (14)..(26): 2'-O-Methyl
  misc_feature (28)..(29): 2'-O-Methyl
  misc_feature (31)..(36): 2'-O-Methyl
  misc_feature (9)..(9): 2'-deoxy-2'-amino
  misc_feature (12)..(12): 2'-deoxy-2'-amino
  misc_feature (30)..(30): n stands for inosine
  misc_feature (37)..(37): n stands for inverted deoxyabasic derivative

SEQ ID NO: 11015 - RNA, 37 nt, Artificial Sequence; identical to SEQ ID NO: 10919
  Description of Artificial Sequence:  Enzymatic Nucleic Acid
  misc_feature (1)..(4): Phosphorothioate 3'-Internucleotide Linkage
  misc_feature (1)..(8): 2'-O-Methyl
  misc_feature (14)..(26): 2'-O-Methyl
  misc_feature (28)..(29): 2'-O-Methyl
  misc_feature (31)..(36): 2'-O-Methyl
  misc_feature (9)..(9): 2'-deoxy-2'-amino
  misc_feature (12)..(12): 2'-deoxy-2'-amino
  misc_feature (30)..(30): n stands for inosine
  misc_feature (37)..(37): n stands for inverted deoxyabasic derivative

SEQ ID NO: 11016 - RNA, 37 nt, Artificial Sequence; identical to SEQ ID NO: 10920
  Description of Artificial Sequence:  Enzymatic Nucleic Acid
  misc_feature (1)..(4): Phosphorothioate 3'-Internucleotide Linkage
  misc_feature (1)..(8): 2'-O-Methyl
  misc_feature (14)..(26): 2'-O-Methyl
  misc_feature (28)..(29): 2'-O-Methyl
  misc_feature (31)..(36): 2'-O-Methyl
  misc_feature (9)..(9): 2'-deoxy-2'-amino
  misc_feature (12)..(12): 2'-deoxy-2'-amino
  misc_feature (30)..(30): n stands for inosine
  misc_feature (37)..(37): n stands for inverted deoxyabasic derivative

SEQ ID NO: 11017 - RNA, 37 nt, Artificial Sequence; identical to SEQ ID NO: 10921
  Description of Artificial Sequence:  Enzymatic Nucleic Acid
  misc_feature (1)..(4): Phosphorothioate 3'-Internucleotide Linkage
  misc_feature (1)..(8): 2'-O-Methyl
  misc_feature (14)..(26): 2'-O-Methyl
  misc_feature (28)..(29): 2'-O-Methyl
  misc_feature (31)..(36): 2'-O-Methyl
  misc_feature (9)..(9): 2'-deoxy-2'-amino
  misc_feature (12)..(12): 2'-deoxy-2'-amino
  misc_feature (30)..(30): n stands for inosine
  misc_feature (37)..(37): n stands for inverted deoxyabasic derivative

SEQ ID NO: 11018 - RNA, 37 nt, Artificial Sequence; identical to SEQ ID NO: 10922
  Description of Artificial Sequence:  Enzymatic Nucleic Acid
  misc_feature (1)..(4): Phosphorothioate 3'-Internucleotide Linkage
  misc_feature (1)..(8): 2'-O-Methyl
  misc_feature (14)..(26): 2'-O-Methyl
  misc_feature (28)..(29): 2'-O-Methyl
  misc_feature (31)..(36): 2'-O-Methyl
  misc_feature (9)..(9): 2'-deoxy-2'-amino
  misc_feature (12)..(12): 2'-deoxy-2'-amino
  misc_feature (30)..(30): n stands for inosine
  misc_feature (37)..(37): n stands for inverted deoxyabasic derivative

SEQ ID NO: 11019 - RNA, 37 nt, Artificial Sequence; identical to SEQ ID NO: 10923
  Description of Artificial Sequence:  Enzymatic Nucleic Acid
  misc_feature (1)..(4): Phosphorothioate 3'-Internucleotide Linkage
  misc_feature (1)..(8): 2'-O-Methyl
  misc_feature (14)..(26): 2'-O-Methyl
  misc_feature (28)..(29): 2'-O-Methyl
  misc_feature (31)..(36): 2'-O-Methyl
  misc_feature (9)..(9): 2'-deoxy-2'-amino
  misc_feature (12)..(12): 2'-deoxy-2'-amino
  misc_feature (30)..(30): n stands for inosine
  misc_feature (37)..(37): n stands for inverted deoxyabasic derivative

SEQ ID NO: 11020 - RNA, 37 nt, Artificial Sequence; identical to SEQ ID NO: 10924
  Description of Artificial Sequence:  Enzymatic Nucleic Acid
  misc_feature (1)..(4): Phosphorothioate 3'-Internucleotide Linkage
  misc_feature (1)..(8): 2'-O-Methyl
  misc_feature (14)..(26): 2'-O-Methyl
  misc_feature (28)..(29): 2'-O-Methyl
  misc_feature (31)..(36): 2'-O-Methyl
  misc_feature (9)..(9): 2'-deoxy-2'-amino
  misc_feature (12)..(12): 2'-deoxy-2'-amino
  misc_feature (30)..(30): n stands for inosine
  misc_feature (37)..(37): n stands for inverted deoxyabasic derivative

SEQ ID NO: 11021 - RNA, 37 nt, Artificial Sequence; identical to SEQ ID NO: 10925
  Description of Artificial Sequence:  Enzymatic Nucleic Acid
  misc_feature (1)..(4): Phosphorothioate 3'-Internucleotide Linkage
  misc_feature (1)..(8): 2'-O-Methyl
  misc_feature (14)..(26): 2'-O-Methyl
  misc_feature (28)..(29): 2'-O-Methyl
  misc_feature (31)..(36): 2'-O-Methyl
  misc_feature (9)..(9): 2'-deoxy-2'-amino
  misc_feature (12)..(12): 2'-deoxy-2'-amino
  misc_feature (30)..(30): n stands for inosine
  misc_feature (37)..(37): n stands for inverted deoxyabasic derivative

SEQ ID NO: 11022 - RNA, 37 nt, Artificial Sequence; identical to SEQ ID NO: 10926
  Description of Artificial Sequence:  Enzymatic Nucleic Acid
  misc_feature (1)..(4): Phosphorothioate 3'-Internucleotide Linkage
  misc_feature (1)..(8): 2'-O-Methyl
  misc_feature (14)..(26): 2'-O-Methyl
  misc_feature (28)..(29): 2'-O-Methyl
  misc_feature (31)..(36): 2'-O-Methyl
  misc_feature (9)..(9): 2'-deoxy-2'-amino
  misc_feature (12)..(12): 2'-deoxy-2'-amino
  misc_feature (30)..(30): n stands for inosine
  misc_feature (37)..(37): n stands for inverted deoxyabasic derivative

SEQ ID NO: 11023 - RNA, 37 nt, Artificial Sequence; identical to SEQ ID NO: 10927
  Description of Artificial Sequence:  Enzymatic Nucleic Acid
  misc_feature (1)..(4): Phosphorothioate 3'-Internucleotide Linkage
  misc_feature (1)..(8): 2'-O-Methyl
  misc_feature (14)..(26): 2'-O-Methyl
  misc_feature (28)..(29): 2'-O-Methyl
  misc_feature (31)..(36): 2'-O-Methyl
  misc_feature (9)..(9): 2'-deoxy-2'-amino
  misc_feature (12)..(12): 2'-deoxy-2'-amino
  misc_feature (30)..(30): n stands for inosine
  misc_feature (37)..(37): n stands for inverted deoxyabasic derivative

SEQ ID NO: 11024 - RNA, 37 nt, Artificial Sequence; identical to SEQ ID NO: 10928
  Description of Artificial Sequence:  Enzymatic Nucleic Acid
  misc_feature (1)..(4): Phosphorothioate 3'-Internucleotide Linkage
  misc_feature (1)..(8): 2'-O-Methyl
  misc_feature (14)..(26): 2'-O-Methyl
  misc_feature (28)..(29): 2'-O-Methyl
  misc_feature (31)..(36): 2'-O-Methyl
  misc_feature (9)..(9): 2'-deoxy-2'-amino
  misc_feature (12)..(12): 2'-deoxy-2'-amino
  misc_feature (30)..(30): n stands for inosine
  misc_feature (37)..(37): n stands for inverted deoxyabasic derivative

SEQ ID NO: 11025 - RNA, 37 nt, Artificial Sequence; identical to SEQ ID NO: 10929
  Description of Artificial Sequence:  Enzymatic Nucleic Acid
  misc_feature (1)..(4): Phosphorothioate 3'-Internucleotide Linkage
  misc_feature (1)..(8): 2'-O-Methyl
  misc_feature (14)..(26): 2'-O-Methyl
  misc_feature (28)..(29): 2'-O-Methyl
  misc_feature (31)..(36): 2'-O-Methyl
  misc_feature (9)..(9): 2'-deoxy-2'-amino
  misc_feature (12)..(12): 2'-deoxy-2'-amino
  misc_feature (30)..(30): n stands for inosine
  misc_feature (37)..(37): n stands for inverted deoxyabasic derivative

SEQ ID NO: 11026 - RNA, 37 nt, Artificial Sequence; identical to SEQ ID NO: 10930
  Description of Artificial Sequence:  Enzymatic Nucleic Acid
  misc_feature (1)..(4): Phosphorothioate 3'-Internucleotide Linkage
  misc_feature (1)..(8): 2'-O-Methyl
  misc_feature (14)..(26): 2'-O-Methyl
  misc_feature (28)..(29): 2'-O-Methyl
  misc_feature (31)..(36): 2'-O-Methyl
  misc_feature (9)..(9): 2'-deoxy-2'-amino
  misc_feature (12)..(12): 2'-deoxy-2'-amino
  misc_feature (30)..(30): n stands for inosine
  misc_feature (37)..(37): n stands for inverted deoxyabasic derivative

SEQ ID NO: 11027 - RNA, 37 nt, Artificial Sequence; identical to SEQ ID NO: 10931
  Description of Artificial Sequence:  Enzymatic Nucleic Acid
  misc_feature (1)..(4): Phosphorothioate 3'-Internucleotide Linkage
  misc_feature (1)..(8): 2'-O-Methyl
  misc_feature (14)..(26): 2'-O-Methyl
  misc_feature (28)..(29): 2'-O-Methyl
  misc_feature (31)..(36): 2'-O-Methyl
  misc_feature (9)..(9): 2'-deoxy-2'-amino
  misc_feature (12)..(12): 2'-deoxy-2'-amino
  misc_feature (30)..(30): n stands for inosine
  misc_feature (37)..(37): n stands for inverted deoxyabasic derivative

SEQ ID NO: 11028 - RNA, 37 nt, Artificial Sequence; identical to SEQ ID NO: 10932
  Description of Artificial Sequence:  Enzymatic Nucleic Acid
  misc_feature (1)..(4): Phosphorothioate 3'-Internucleotide Linkage
  misc_feature (1)..(8): 2'-O-Methyl
  misc_feature (14)..(26): 2'-O-Methyl
  misc_feature (28)..(29): 2'-O-Methyl
  misc_feature (31)..(36): 2'-O-Methyl
  misc_feature (9)..(9): 2'-deoxy-2'-amino
  misc_feature (12)..(12): 2'-deoxy-2'-amino
  misc_feature (30)..(30): n stands for inosine
  misc_feature (37)..(37): n stands for inverted deoxyabasic derivative

SEQ ID NO: 11029 - RNA, 37 nt, Artificial Sequence; identical to SEQ ID NO: 10933
  Description of Artificial Sequence:  Enzymatic Nucleic Acid
  misc_feature (1)..(4): Phosphorothioate 3'-Internucleotide Linkage
  misc_feature (1)..(8): 2'-O-Methyl
  misc_feature (14)..(26): 2'-O-Methyl
  misc_feature (28)..(29): 2'-O-Methyl
  misc_feature (31)..(36): 2'-O-Methyl
  misc_feature (9)..(9): 2'-deoxy-2'-amino
  misc_feature (12)..(12): 2'-deoxy-2'-amino
  misc_feature (30)..(30): n stands for inosine
  misc_feature (37)..(37): n stands for inverted deoxyabasic derivative

SEQ ID NO: 11030 - RNA, 37 nt, Artificial Sequence; identical to SEQ ID NO: 10934
  Description of Artificial Sequence:  Enzymatic Nucleic Acid
  misc_feature (1)..(4): Phosphorothioate 3'-Internucleotide Linkage
  misc_feature (1)..(8): 2'-O-Methyl
  misc_feature (14)..(26): 2'-O-Methyl
  misc_feature (28)..(29): 2'-O-Methyl
  misc_feature (31)..(36): 2'-O-Methyl
  misc_feature (9)..(9): 2'-deoxy-2'-amino
  misc_feature (12)..(12): 2'-deoxy-2'-amino
  misc_feature (30)..(30): n stands for inosine
  misc_feature (37)..(37): n stands for inverted deoxyabasic derivative

SEQ ID NO: 11031 - RNA, 37 nt, Artificial Sequence; identical to SEQ ID NO: 10935
  Description of Artificial Sequence:  Enzymatic Nucleic Acid
  misc_feature (1)..(4): Phosphorothioate 3'-Internucleotide Linkage
  misc_feature (1)..(8): 2'-O-Methyl
  misc_feature (14)..(26): 2'-O-Methyl
  misc_feature (28)..(29): 2'-O-Methyl
  misc_feature (31)..(36): 2'-O-Methyl
  misc_feature (9)..(9): 2'-deoxy-2'-amino
  misc_feature (12)..(12): 2'-deoxy-2'-amino
  misc_feature (30)..(30): n stands for inosine
  misc_feature (37)..(37): n stands for inverted deoxyabasic derivative

SEQ ID NO: 11032 - RNA, 37 nt, Artificial Sequence; identical to SEQ ID NO: 10936
  Description of Artificial Sequence:  Enzymatic Nucleic Acid
  misc_feature (1)..(4): Phosphorothioate 3'-Internucleotide Linkage
  misc_feature (1)..(8): 2'-O-Methyl
  misc_feature (14)..(26): 2'-O-Methyl
  misc_feature (28)..(29): 2'-O-Methyl
  misc_feature (31)..(36): 2'-O-Methyl
  misc_feature (9)..(9): 2'-deoxy-2'-amino
  misc_feature (12)..(12): 2'-deoxy-2'-amino
  misc_feature (30)..(30): n stands for inosine
  misc_feature (37)..(37): n stands for inverted deoxyabasic derivative

SEQ ID NO: 11033 - RNA, 37 nt, Artificial Sequence; identical to SEQ ID NO: 10937
  Description of Artificial Sequence:  Enzymatic Nucleic Acid
  misc_feature (1)..(4): Phosphorothioate 3'-Internucleotide Linkage
  misc_feature (1)..(8): 2'-O-Methyl
  misc_feature (14)..(26): 2'-O-Methyl
  misc_feature (28)..(29): 2'-O-Methyl
  misc_feature (31)..(36): 2'-O-Methyl
  misc_feature (9)..(9): 2'-deoxy-2'-amino
  misc_feature (12)..(12): 2'-deoxy-2'-amino
  misc_feature (30)..(30): n stands for inosine
  misc_feature (37)..(37): n stands for inverted deoxyabasic derivative

SEQ ID NO: 11034 - RNA, 37 nt, Artificial Sequence; identical to SEQ ID NO: 10938
  Description of Artificial Sequence:  Enzymatic Nucleic Acid
  misc_feature (1)..(4): Phosphorothioate 3'-Internucleotide Linkage
  misc_feature (1)..(8): 2'-O-Methyl
  misc_feature (14)..(26): 2'-O-Methyl
  misc_feature (28)..(29): 2'-O-Methyl
  misc_feature (31)..(36): 2'-O-Methyl
  misc_feature (9)..(9): 2'-deoxy-2'-amino
  misc_feature (12)..(12): 2'-deoxy-2'-amino
  misc_feature (30)..(30): n stands for inosine
  misc_feature (37)..(37): n stands for inverted deoxyabasic derivative

SEQ ID NO: 11035 - RNA, 37 nt, Artificial Sequence; identical to SEQ ID NO: 10939
  Description of Artificial Sequence:  Enzymatic Nucleic Acid
  misc_feature (1)..(4): Phosphorothioate 3'-Internucleotide Linkage
  misc_feature (1)..(8): 2'-O-Methyl
  misc_feature (14)..(26): 2'-O-Methyl
  misc_feature (28)..(29): 2'-O-Methyl
  misc_feature (31)..(36): 2'-O-Methyl
  misc_feature (9)..(9): 2'-deoxy-2'-amino
  misc_feature (12)..(12): 2'-deoxy-2'-amino
  misc_feature (30)..(30): n stands for inosine
  misc_feature (37)..(37): n stands for inverted deoxyabasic derivative

SEQ ID NO: 11036 - RNA, 37 nt, Artificial Sequence; identical to SEQ ID NO: 10940
  Description of Artificial Sequence:  Enzymatic Nucleic Acid
  misc_feature (1)..(4): Phosphorothioate 3'-Internucleotide Linkage
  misc_feature (1)..(8): 2'-O-Methyl
  misc_feature (14)..(26): 2'-O-Methyl
  misc_feature (28)..(29): 2'-O-Methyl
  misc_feature (31)..(36): 2'-O-Methyl
  misc_feature (9)..(9): 2'-deoxy-2'-amino
  misc_feature (12)..(12): 2'-deoxy-2'-amino
  misc_feature (30)..(30): n stands for inosine
  misc_feature (37)..(37): n stands for inverted deoxyabasic derivative

SEQ ID NO: 11037 - RNA, 37 nt, Artificial Sequence; identical to SEQ ID NO: 10941
  Description of Artificial Sequence:  Enzymatic Nucleic Acid
  misc_feature (1)..(4): Phosphorothioate 3'-Internucleotide Linkage
  misc_feature (1)..(8): 2'-O-Methyl
  misc_feature (14)..(26): 2'-O-Methyl
  misc_feature (28)..(29): 2'-O-Methyl
  misc_feature (31)..(36): 2'-O-Methyl
  misc_feature (9)..(9): 2'-deoxy-2'-amino
  misc_feature (12)..(12): 2'-deoxy-2'-amino
  misc_feature (30)..(30): n stands for inosine
  misc_feature (37)..(37): n stands for inverted deoxyabasic derivative

SEQ ID NO: 11038 - RNA, 37 nt, Artificial Sequence; identical to SEQ ID NO: 10942
  Description of Artificial Sequence:  Enzymatic Nucleic Acid
  misc_feature (1)..(4): Phosphorothioate 3'-Internucleotide Linkage
  misc_feature (1)..(8): 2'-O-Methyl
  misc_feature (14)..(26): 2'-O-Methyl
  misc_feature (28)..(29): 2'-O-Methyl
  misc_feature (31)..(36): 2'-O-Methyl
  misc_feature (9)..(9): 2'-deoxy-2'-amino
  misc_feature (12)..(12): 2'-deoxy-2'-amino
  misc_feature (30)..(30): n stands for inosine
  misc_feature (37)..(37): n stands for inverted deoxyabasic derivative

SEQ ID NO: 11039 - RNA, 37 nt, Artificial Sequence; identical to SEQ ID NO: 10943
  Description of Artificial Sequence:  Enzymatic Nucleic Acid
  misc_feature (1)..(4): Phosphorothioate 3'-Internucleotide Linkage
  misc_feature (1)..(8): 2'-O-Methyl
  misc_feature (14)..(26): 2'-O-Methyl
  misc_feature (28)..(29): 2'-O-Methyl
  misc_feature (31)..(36): 2'-O-Methyl
  misc_feature (9)..(9): 2'-deoxy-2'-amino
  misc_feature (12)..(12): 2'-deoxy-2'-amino
  misc_feature (30)..(30): n stands for inosine
  misc_feature (37)..(37): n stands for inverted deoxyabasic derivative

SEQ ID NO: 11040 - RNA, 37 nt, Artificial Sequence; identical to SEQ ID NO: 10944
  Description of Artificial Sequence:  Enzymatic Nucleic Acid
  misc_feature (1)..(4): Phosphorothioate 3'-Internucleotide Linkage
  misc_feature (1)..(8): 2'-O-Methyl
  misc_feature (14)..(26): 2'-O-Methyl
  misc_feature (28)..(29): 2'-O-Methyl
  misc_feature (31)..(36): 2'-O-Methyl
  misc_feature (9)..(9): 2'-deoxy-2'-amino
  misc_feature (12)..(12): 2'-deoxy-2'-amino
  misc_feature (30)..(30): n stands for inosine
  misc_feature (37)..(37): n stands for inverted deoxyabasic derivative

SEQ ID NO: 11041 - RNA, 37 nt, Artificial Sequence; identical to SEQ ID NO: 10945
  Description of Artificial Sequence:  Enzymatic Nucleic Acid
  misc_feature (1)..(4): Phosphorothioate 3'-Internucleotide Linkage
  misc_feature (1)..(8): 2'-O-Methyl
  misc_feature (14)..(26): 2'-O-Methyl
  misc_feature (28)..(29): 2'-O-Methyl
  misc_feature (31)..(36): 2'-O-Methyl
  misc_feature (9)..(9): 2'-deoxy-2'-amino
  misc_feature (12)..(12): 2'-deoxy-2'-amino
  misc_feature (30)..(30): n stands for inosine
  misc_feature (37)..(37): n stands for inverted deoxyabasic derivative

SEQ ID NO: 11042 - RNA, 37 nt, Artificial Sequence; identical to SEQ ID NO: 10946
  Description of Artificial Sequence:  Enzymatic Nucleic Acid
  misc_feature (1)..(4): Phosphorothioate 3'-Internucleotide Linkage
  misc_feature (1)..(8): 2'-O-Methyl
  misc_feature (14)..(26): 2'-O-Methyl
  misc_feature (28)..(29): 2'-O-Methyl
  misc_feature (31)..(36): 2'-O-Methyl
  misc_feature (9)..(9): 2'-deoxy-2'-amino
  misc_feature (12)..(12): 2'-deoxy-2'-amino
  misc_feature (30)..(30): n stands for inosine
  misc_feature (37)..(37): n stands for inverted deoxyabasic derivative

SEQ ID NO: 11043 - RNA, 36 nt, Artificial Sequence
  Description of Artificial Sequence:  Enzymatic Nucleic Acid
  misc_feature (1)..(3): Phosphorothioate 3'-Internucleotide Linkage
  misc_feature (8)..(8): Phosphorothioate 3'-Internucleotide Linkage
  misc_feature (1)..(5): 2'-O-Methyl
  misc_feature (9)..(13): 2'-O-Methyl
  misc_feature (15)..(35): 2'-O-Methyl
  misc_feature (36)..(36): n stands for inverted deoxyabasic derivative
gacgugauggcaugcacuaugcgcggaauuuuggcn

SEQ ID NO: 11044 - RNA, 36 nt, Artificial Sequence
  Description of Artificial Sequence:  Enzymatic Nucleic Acid
  misc_feature (1)..(3): Phosphorothioate 3'-Internucleotide Linkage
  misc_feature (8)..(8): Phosphorothioate 3'-Internucleotide Linkage
  misc_feature (1)..(5): 2'-O-Methyl
  misc_feature (9)..(13): 2'-O-Methyl
  misc_feature (15)..(35): 2'-O-Methyl
  misc_feature (36)..(36): n stands for inverted deoxyabasic derivative
agaaugauggcaugcacuaugcgcgauccagcgaun

SEQ ID NO: 11045 - RNA, 36 nt, Artificial Sequence
  Description of Artificial Sequence:  Enzymatic Nucleic Acid
  misc_feature (1)..(3): Phosphorothioate 3'-Internucleotide Linkage
  misc_feature (8)..(8): Phosphorothioate 3'-Internucleotide Linkage
  misc_feature (1)..(5): 2'-O-Methyl
  misc_feature (9)..(13): 2'-O-Methyl
  misc_feature (15)..(35): 2'-O-Methyl
  misc_feature (36)..(36): n stands for inverted deoxyabasic derivative
gagaugauggcaugcacuaugcgcgaaacgggcaan

SEQ ID NO: 11046 - RNA, 36 nt, Artificial Sequence
  Description of Artificial Sequence:  Enzymatic Nucleic Acid
  misc_feature (1)..(3): Phosphorothioate 3'-Internucleotide Linkage
  misc_feature (8)..(8): Phosphorothioate 3'-Internucleotide Linkage
  misc_feature (1)..(5): 2'-O-Methyl
  misc_feature (9)..(13): 2'-O-Methyl
  misc_feature (15)..(35): 2'-O-Methyl
  misc_feature (36)..(36): n stands for inverted deoxyabasic derivative
cugaugauggcaugcacuaugcgcgaaauggcacun

SEQ ID NO: 11047 - RNA, 36 nt, Artificial Sequence
  Description of Artificial Sequence:  Enzymatic Nucleic Acid
  misc_feature (1)..(3): Phosphorothioate 3'-Internucleotide Linkage
  misc_feature (8)..(8): Phosphorothioate 3'-Internucleotide Linkage
  misc_feature (1)..(5): 2'-O-Methyl
  misc_feature (9)..(13): 2'-O-Methyl
  misc_feature (15)..(35): 2'-O-Methyl
  misc_feature (36)..(36): n stands for inverted deoxyabasic derivative
ugguugauggcaugcacuaugcgcgggcagaggagn

SEQ ID NO: 11048 - RNA, 36 nt, Artificial Sequence
  Description of Artificial Sequence:  Enzymatic Nucleic Acid
  misc_feature (1)..(3): Phosphorothioate 3'-Internucleotide Linkage
  misc_feature (8)..(8): Phosphorothioate 3'-Internucleotide Linkage
  misc_feature (1)..(5): 2'-O-Methyl
  misc_feature (9)..(13): 2'-O-Methyl
  misc_feature (15)..(35): 2'-O-Methyl
  misc_feature (36)..(36): n stands for inverted deoxyabasic derivative
acggugauggcaugcacuaugcgcgagaggugaagn

SEQ ID NO: 11049 - RNA, 36 nt, Artificial Sequence
  Description of Artificial Sequence:  Enzymatic Nucleic Acid
  misc_feature (1)..(3): Phosphorothioate 3'-Internucleotide Linkage
  misc_feature (8)..(8): Phosphorothioate 3'-Internucleotide Linkage
  misc_feature (1)..(5): 2'-O-Methyl
  misc_feature (9)..(13): 2'-O-Methyl
  misc_feature (15)..(35): 2'-O-Methyl
  misc_feature (36)..(36): n stands for inverted deoxyabasic derivative
aggaugauggcaugcacuaugcgcgagcuuggaggn

SEQ ID NO: 11050 - RNA, 36 nt, Artificial Sequence
  Description of Artificial Sequence:  Enzymatic Nucleic Acid
  misc_feature (1)..(3): Phosphorothioate 3'-Internucleotide Linkage
  misc_feature (8)..(8): Phosphorothioate 3'-Internucleotide Linkage
  misc_feature (1)..(5): 2'-O-Methyl
  misc_feature (9)..(13): 2'-O-Methyl
  misc_feature (15)..(35): 2'-O-Methyl
  misc_feature (36)..(36): n stands for inverted deoxyabasic derivative
caagugauggcaugcacuaugcgcgacagcuuggan

SEQ ID NO: 11051 - RNA, 36 nt, Artificial Sequence
  Description of Artificial Sequence:  Enzymatic Nucleic Acid
  misc_feature (1)..(3): Phosphorothioate 3'-Internucleotide Linkage
  misc_feature (8)..(8): Phosphorothioate 3'-Internucleotide Linkage
  misc_feature (1)..(5): 2'-O-Methyl
  misc_feature (9)..(13): 2'-O-Methyl
  misc_feature (15)..(35): 2'-O-Methyl
  misc_feature (36)..(36): n stands for inverted deoxyabasic derivative
cgagugauggcaugcacuaugcgcggagggaguucn

SEQ ID NO: 11052 - RNA, 36 nt, Artificial Sequence
  Description of Artificial Sequence:  Enzymatic Nucleic Acid
  misc_feature (1)..(4): Phosphorothioate 3'-Internucleotide Linkage
  misc_feature (1)..(7): 2'-O-Methyl
  misc_feature (9)..(15): 2'-O-Methyl
  misc_feature (19)..(19): 2'-O-Methyl
  misc_feature (21)..(23): 2'-O-Methyl
  misc_feature (26)..(26): 2'-O-Methyl
  misc_feature (28)..(35): 2'-O-Methyl
  misc_feature (17)..(17): 2'-deoxy-2'-amino
  misc_feature (27)..(27): 2'-deoxy-2'-amino
  misc_feature (36)..(36): n stands for inverted deoxyabasic derivative
gcagacagccgaaaggcgagugaggucuauccagcn

SEQ ID NO: 11053 - RNA, 36 nt, Artificial Sequence
  Description of Artificial Sequence:  Enzymatic Nucleic Acid
  misc_feature (1)..(4): Phosphorothioate 3'-Internucleotide Linkage
  misc_feature (1)..(7): 2'-O-Methyl
  misc_feature (9)..(15): 2'-O-Methyl
  misc_feature (19)..(19): 2'-O-Methyl
  misc_feature (21)..(23): 2'-O-Methyl
  misc_feature (26)..(26): 2'-O-Methyl
  misc_feature (28)..(35): 2'-O-Methyl
  misc_feature (17)..(17): 2'-deoxy-2'-amino
  misc_feature (27)..(27): 2'-deoxy-2'-amino
  misc_feature (36)..(36): n stands for inverted deoxyabasic derivative
gauaaaagccgaaaggcgagugaggucugccgcagn

SEQ ID NO: 11054 - RNA, 36 nt, Artificial Sequence
  Description of Artificial Sequence:  Enzymatic Nucleic Acid
  misc_feature (1)..(4): Phosphorothioate 3'-Internucleotide Linkage
  misc_feature (1)..(7): 2'-O-Methyl
  misc_feature (9)..(15): 2'-O-Methyl
  misc_feature (19)..(19): 2'-O-Methyl
  misc_feature (21)..(23): 2'-O-Methyl
  misc_feature (26)..(26): 2'-O-Methyl
  misc_feature (28)..(35): 2'-O-Methyl
  misc_feature (17)..(17): 2'-deoxy-2'-amino
  misc_feature (27)..(27): 2'-deoxy-2'-amino
  misc_feature (36)..(36): n stands for inverted deoxyabasic derivative
ggcauaggccgaaaggcgagugaggucuagcaggan

SEQ ID NO: 11055 - RNA, 36 nt, Artificial Sequence
  Description of Artificial Sequence:  Enzymatic Nucleic Acid
  misc_feature (1)..(4): Phosphorothioate 3'-Internucleotide Linkage
  misc_feature (1)..(7): 2'-O-Methyl
  misc_feature (9)..(15): 2'-O-Methyl
  misc_feature (19)..(19): 2'-O-Methyl
  misc_feature (21)..(23): 2'-O-Methyl
  misc_feature (26)..(26): 2'-O-Methyl
  misc_feature (28)..(35): 2'-O-Methyl
  misc_feature (17)..(17): 2'-deoxy-2'-amino
  misc_feature (27)..(27): 2'-deoxy-2'-amino
  misc_feature (36)..(36): n stands for inverted deoxyabasic derivative
aggcccagccgaaaggcgagugaggucuucccauan

SEQ ID NO: 11056 - RNA, 36 nt, Artificial Sequence
  Description of Artificial Sequence:  Enzymatic Nucleic Acid
  misc_feature (1)..(4): Phosphorothioate 3'-Internucleotide Linkage
  misc_feature (1)..(7): 2'-O-Methyl
  misc_feature (9)..(15): 2'-O-Methyl
  misc_feature (19)..(19): 2'-O-Methyl
  misc_feature (21)..(23): 2'-O-Methyl
  misc_feature (26)..(26): 2'-O-Methyl
  misc_feature (28)..(35): 2'-O-Methyl
  misc_feature (17)..(17): 2'-deoxy-2'-amino
  misc_feature (27)..(27): 2'-deoxy-2'-amino
  misc_feature (36)..(36): n stands for inverted deoxyabasic derivative
gggaaaggccgaaaggcgagugaggucuccuacgan

SEQ ID NO: 11057 - RNA, 36 nt, Artificial Sequence
  Description of Artificial Sequence:  Enzymatic Nucleic Acid
  misc_feature (1)..(4): Phosphorothioate 3'-Internucleotide Linkage
  misc_feature (1)..(7): 2'-O-Methyl
  misc_feature (9)..(15): 2'-O-Methyl
  misc_feature (19)..(19): 2'-O-Methyl
  misc_feature (21)..(23): 2'-O-Methyl
  misc_feature (26)..(26): 2'-O-Methyl
  misc_feature (28)..(35): 2'-O-Methyl
  misc_feature (17)..(17): 2'-deoxy-2'-amino
  misc_feature (27)..(27): 2'-deoxy-2'-amino
  misc_feature (36)..(36): n stands for inverted deoxyabasic derivative
ggaucgggccgaaaggcgagugaggucuagaggagn

SEQ ID NO: 11058 - RNA, 36 nt, Artificial Sequence
  Description of Artificial Sequence:  Enzymatic Nucleic Acid
  misc_feature (1)..(4): Phosphorothioate 3'-Internucleotide Linkage
  misc_feature (1)..(7): 2'-O-Methyl
  misc_feature (9)..(15): 2'-O-Methyl
  misc_feature (19)..(19): 2'-O-Methyl
  misc_feature (21)..(23): 2'-O-Methyl
  misc_feature (26)..(26): 2'-O-Methyl
  misc_feature (28)..(35): 2'-O-Methyl
  misc_feature (17)..(17): 2'-deoxy-2'-amino
  misc_feature (27)..(27): 2'-deoxy-2'-amino
  misc_feature (36)..(36): n stands for inverted deoxyabasic derivative
gauuagggccgaaaggcgagugaggucuagaggugn

SEQ ID NO: 11059 - RNA, 36 nt, Artificial Sequence
  Description of Artificial Sequence:  Enzymatic Nucleic Acid
  misc_feature (1)..(4): Phosphorothioate 3'-Internucleotide Linkage
  misc_feature (1)..(7): 2'-O-Methyl
  misc_feature (9)..(15): 2'-O-Methyl
  misc_feature (19)..(19): 2'-O-Methyl
  misc_feature (21)..(23): 2'-O-Methyl
  misc_feature (26)..(26): 2'-O-Methyl
  misc_feature (28)..(35): 2'-O-Methyl
  misc_feature (17)..(17): 2'-deoxy-2'-amino
  misc_feature (27)..(27): 2'-deoxy-2'-amino
  misc_feature (36)..(36): n stands for inverted deoxyabasic derivative
ugcgagggccgaaaggcgagugaggucugagggagn

SEQ ID NO: 11060 - RNA, 36 nt, Artificial Sequence
  Description of Artificial Sequence:  Enzymatic Nucleic Acid
  misc_feature (1)..(4): Phosphorothioate 3'-Internucleotide Linkage
  misc_feature (1)..(7): 2'-O-Methyl
  misc_feature (9)..(15): 2'-O-Methyl
  misc_feature (19)..(19): 2'-O-Methyl
  misc_feature (21)..(23): 2'-O-Methyl
  misc_feature (26)..(26): 2'-O-Methyl
  misc_feature (28)..(35): 2'-O-Methyl
  misc_feature (17)..(17): 2'-deoxy-2'-amino
  misc_feature (27)..(27): 2'-deoxy-2'-amino
  misc_feature (36)..(36): n stands for inverted deoxyabasic derivative
acacgaggccgaaaggcgagugaggucuaggggucn

SEQ ID NO: 11061 - RNA, 36 nt, Artificial Sequence
  Description of Artificial Sequence:  Enzymatic Nucleic Acid
  misc_feature (1)..(4): Phosphorothioate 3'-Internucleotide Linkage
  misc_feature (1)..(7): 2'-O-Methyl
  misc_feature (9)..(15): 2'-O-Methyl
  misc_feature (19)..(19): 2'-O-Methyl
  misc_feature (21)..(23): 2'-O-Methyl
  misc_feature (26)..(26): 2'-O-Methyl
  misc_feature (28)..(35): 2'-O-Methyl
  misc_feature (17)..(17): 2'-deoxy-2'-amino
  misc_feature (27)..(27): 2'-deoxy-2'-amino
  misc_feature (36)..(36): n stands for inverted deoxyabasic derivative
ccuguaagccgaaaggcgagugaggucuacgagcan

SEQ ID NO: 11062 - RNA, 36 nt, Artificial Sequence
  Description of Artificial Sequence:  Enzymatic Nucleic Acid
  misc_feature (1)..(4): Phosphorothioate 3'-Internucleotide Linkage
  misc_feature (1)..(7): 2'-O-Methyl
  misc_feature (9)..(15): 2'-O-Methyl
  misc_feature (19)..(19): 2'-O-Methyl
  misc_feature (21)..(23): 2'-O-Methyl
  misc_feature (26)..(26): 2'-O-Methyl
  misc_feature (28)..(35): 2'-O-Methyl
  misc_feature (17)..(17): 2'-deoxy-2'-amino
  misc_feature (27)..(27): 2'-deoxy-2'-amino
  misc_feature (36)..(36): n stands for inverted deoxyabasic derivative
gggacuggccgaaaggcgagugaggucugaauuuun

SEQ ID NO: 11063 - RNA, 34 nt, Artificial Sequence
  Description of Artificial Sequence:  Enzymatic Nucleic Acid
  misc_feature (1)..(4): Phosphorothioate 3'-Internucleotide Linkage
  misc_feature (1)..(6): 2'-O-Methyl
  misc_feature (8)..(14): 2'-O-Methyl
  misc_feature (18)..(18): 2'-O-Methyl
  misc_feature (20)..(22): 2'-O-Methyl
  misc_feature (25)..(25): 2'-O-Methyl
  misc_feature (27)..(33): 2'-O-Methyl
  misc_feature (16)..(16): 2'-deoxy-2'-amino
  misc_feature (26)..(26): 2'-deoxy-2'-amino
  misc_feature (34)..(34): n stands for inverted deoxyabasic derivative
cgcagagccgaaaggcgagugaggucuacauccn

SEQ ID NO: 11064 - RNA, 36 nt, Artificial Sequence
  Description of Artificial Sequence:  Enzymatic Nucleic Acid
  misc_feature (1)..(4): Phosphorothioate 3'-Internucleotide Linkage
  misc_feature (1)..(7): 2'-O-Methyl
  misc_feature (9)..(15): 2'-O-Methyl
  misc_feature (19)..(19): 2'-O-Methyl
  misc_feature (21)..(23): 2'-O-Methyl
  misc_feature (26)..(26): 2'-O-Methyl
  misc_feature (28)..(35): 2'-O-Methyl
  misc_feature (17)..(17): 2'-deoxy-2'-amino
  misc_feature (27)..(27): 2'-deoxy-2'-amino
  misc_feature (36)..(36): n stands for inverted deoxyabasic derivative
ccgcagagccgaaaggcgagugaggucuacauccan

SEQ ID NO: 11065 - RNA, 34 nt, Artificial Sequence
  Description of Artificial Sequence:  Enzymatic Nucleic Acid
  misc_feature (1)..(4): Phosphorothioate 3'-Internucleotide Linkage
  misc_feature (1)..(6): 2'-O-Methyl
  misc_feature (8)..(14): 2'-O-Methyl
  misc_feature (18)..(18): 2'-O-Methyl
  misc_feature (20)..(22): 2'-O-Methyl
  misc_feature (25)..(25): 2'-O-Methyl
  misc_feature (27)..(33): 2'-O-Methyl
  misc_feature (16)..(16): 2'-deoxy-2'-amino
  misc_feature (26)..(26): 2'-deoxy-2'-amino
  misc_feature (34)..(34): n stands for inverted deoxyabasic derivative
acgccggccgaaaggcgagugaggucuagacacn

SEQ ID NO: 11066 - RNA, 36 nt, Artificial Sequence
  Description of Artificial Sequence:  Enzymatic Nucleic Acid
  misc_feature (1)..(4): Phosphorothioate 3'-Internucleotide Linkage
  misc_feature (1)..(7): 2'-O-Methyl
  misc_feature (9)..(15): 2'-O-Methyl
  misc_feature (19)..(19): 2'-O-Methyl
  misc_feature (21)..(23): 2'-O-Methyl
  misc_feature (26)..(26): 2'-O-Methyl
  misc_feature (28)..(35): 2'-O-Methyl
  misc_feature (17)..(17): 2'-deoxy-2'-amino
  misc_feature (27)..(27): 2'-deoxy-2'-amino
  misc_feature (36)..(36): n stands for inverted deoxyabasic derivative
uaaaacggccgaaaggcgagugaggucucgcagacn

SEQ ID NO: 11067 - RNA, 34 nt, Artificial Sequence
  Description of Artificial Sequence:  Enzymatic Nucleic Acid
  misc_feature (1)..(4): Phosphorothioate 3'-Internucleotide Linkage
  misc_feature (1)..(6): 2'-O-Methyl
  misc_feature (8)..(14): 2'-O-Methyl
  misc_feature (18)..(18): 2'-O-Methyl
  misc_feature (20)..(22): 2'-O-Methyl
  misc_feature (25)..(25): 2'-O-Methyl
  misc_feature (27)..(33): 2'-O-Methyl
  misc_feature (16)..(16): 2'-deoxy-2'-amino
  misc_feature (26)..(26): 2'-deoxy-2'-amino
  misc_feature (34)..(34): n stands for inverted deoxyabasic derivative
auaaaagccgaaaggcgagugaggucugccgcan

SEQ ID NO: 11068 - RNA, 34 nt, Artificial Sequence
  Description of Artificial Sequence:  Enzymatic Nucleic Acid
  misc_feature (1)..(4): Phosphorothioate 3'-Internucleotide Linkage
  misc_feature (1)..(6): 2'-O-Methyl
  misc_feature (8)..(14): 2'-O-Methyl
  misc_feature (18)..(18): 2'-O-Methyl
  misc_feature (20)..(22): 2'-O-Methyl
  misc_feature (25)..(25): 2'-O-Methyl
  misc_feature (27)..(33): 2'-O-Methyl
  misc_feature (16)..(16): 2'-deoxy-2'-amino
  misc_feature (26)..(26): 2'-deoxy-2'-amino
  misc_feature (34)..(34): n stands for inverted deoxyabasic derivative
augagggccgaaaggcgagugaggucuauagcan

SEQ ID NO: 11069 - RNA, 36 nt, Artificial Sequence
  Description of Artificial Sequence:  Enzymatic Nucleic Acid
  misc_feature (1)..(4): Phosphorothioate 3'-Internucleotide Linkage
  misc_feature (1)..(7): 2'-O-Methyl
  misc_feature (9)..(15): 2'-O-Methyl
  misc_feature (19)..(19): 2'-O-Methyl
  misc_feature (21)..(23): 2'-O-Methyl
  misc_feature (26)..(26): 2'-O-Methyl
  misc_feature (28)..(35): 2'-O-Methyl
  misc_feature (17)..(17): 2'-deoxy-2'-amino
  misc_feature (27)..(27): 2'-deoxy-2'-amino
  misc_feature (36)..(36): n stands for inverted deoxyabasic derivative
gaugagggccgaaaggcgagugaggucuauagcagn

SEQ ID NO: 11070 - RNA, 36 nt, Artificial Sequence
  Description of Artificial Sequence:  Enzymatic Nucleic Acid
  misc_feature (1)..(4): Phosphorothioate 3'-Internucleotide Linkage
  misc_feature (1)..(7): 2'-O-Methyl
  misc_feature (9)..(15): 2'-O-Methyl
  misc_feature (19)..(19): 2'-O-Methyl
  misc_feature (21)..(23): 2'-O-Methyl
  misc_feature (26)..(26): 2'-O-Methyl
  misc_feature (28)..(35): 2'-O-Methyl
  misc_feature (17)..(17): 2'-deoxy-2'-amino
  misc_feature (27)..(27): 2'-deoxy-2'-amino
  misc_feature (36)..(36): n stands for inverted deoxyabasic derivative
aaacggggccgaaaggcgagugaggucuaacauacn

SEQ ID NO: 11071 - RNA, 36 nt, Artificial Sequence
  Description of Artificial Sequence:  Enzymatic Nucleic Acid
  misc_feature (1)..(4): Phosphorothioate 3'-Internucleotide Linkage
  misc_feature (1)..(7): 2'-O-Methyl
  misc_feature (9)..(15): 2'-O-Methyl
  misc_feature (19)..(19): 2'-O-Methyl
  misc_feature (21)..(23): 2'-O-Methyl
  misc_feature (26)..(26): 2'-O-Methyl
  misc_feature (28)..(35): 2'-O-Methyl
  misc_feature (17)..(17): 2'-deoxy-2'-amino
  misc_feature (27)..(27): 2'-deoxy-2'-amino
  misc_feature (36)..(36): n stands for inverted deoxyabasic derivative
uagaggagccgaaaggcgagugaggucuaaacgggn

SEQ ID NO: 11072 - RNA, 34 nt, Artificial Sequence
  Description of Artificial Sequence:  Enzymatic Nucleic Acid
  misc_feature (1)..(4): Phosphorothioate 3'-Internucleotide Linkage
  misc_feature (1)..(6): 2'-O-Methyl
  misc_feature (8)..(14): 2'-O-Methyl
  misc_feature (18)..(18): 2'-O-Methyl
  misc_feature (20)..(22): 2'-O-Methyl
  misc_feature (25)..(25): 2'-O-Methyl
  misc_feature (27)..(33): 2'-O-Methyl
  misc_feature (16)..(16): 2'-deoxy-2'-amino
  misc_feature (26)..(26): 2'-deoxy-2'-amino
  misc_feature (34)..(34): n stands for inverted deoxyabasic derivative
ggcccagccgaaaggcgagugaggucuucccaun

SEQ ID NO: 11073 - RNA, 36 nt, Artificial Sequence
  Description of Artificial Sequence:  Enzymatic Nucleic Acid
  misc_feature (1)..(4): Phosphorothioate 3'-Internucleotide Linkage
  misc_feature (1)..(7): 2'-O-Methyl
  misc_feature (9)..(15): 2'-O-Methyl
  misc_feature (19)..(19): 2'-O-Methyl
  misc_feature (21)..(23): 2'-O-Methyl
  misc_feature (26)..(26): 2'-O-Methyl
  misc_feature (28)..(35): 2'-O-Methyl
  misc_feature (17)..(17): 2'-deoxy-2'-amino
  misc_feature (27)..(27): 2'-deoxy-2'-amino
  misc_feature (36)..(36): n stands for inverted deoxyabasic derivative
cacugaagccgaaaggcgagugaggucuaaauggcn

SEQ ID NO: 11074 - RNA, 36 nt, Artificial Sequence
  Description of Artificial Sequence:  Enzymatic Nucleic Acid
  misc_feature (1)..(4): Phosphorothioate 3'-Internucleotide Linkage
  misc_feature (1)..(7): 2'-O-Methyl
  misc_feature (9)..(15): 2'-O-Methyl
  misc_feature (19)..(19): 2'-O-Methyl
  misc_feature (21)..(23): 2'-O-Methyl
  misc_feature (26)..(26): 2'-O-Methyl
  misc_feature (28)..(35): 2'-O-Methyl
  misc_feature (17)..(17): 2'-deoxy-2'-amino
  misc_feature (27)..(27): 2'-deoxy-2'-amino
  misc_feature (36)..(36): n stands for inverted deoxyabasic derivative
cgaaccagccgaaaggcgagugaggucuugaacaan

SEQ ID NO: 11075 - RNA, 34 nt, Artificial Sequence
  Description of Artificial Sequence:  Enzymatic Nucleic Acid
  misc_feature (1)..(4): Phosphorothioate 3'-Internucleotide Linkage
  misc_feature (1)..(6): 2'-O-Methyl
  misc_feature (8)..(14): 2'-O-Methyl
  misc_feature (18)..(18): 2'-O-Methyl
  misc_feature (20)..(22): 2'-O-Methyl
  misc_feature (25)..(25): 2'-O-Methyl
  misc_feature (27)..(33): 2'-O-Methyl
  misc_feature (16)..(16): 2'-deoxy-2'-amino
  misc_feature (26)..(26): 2'-deoxy-2'-amino
  misc_feature (34)..(34): n stands for inverted deoxyabasic derivative
gaucgggccgaaaggcgagugaggucuagaggan

SEQ ID NO: 11076 - RNA, 36 nt, Artificial Sequence
  Description of Artificial Sequence:  Enzymatic Nucleic Acid
  misc_feature (1)..(4): Phosphorothioate 3'-Internucleotide Linkage
  misc_feature (1)..(7): 2'-O-Methyl
  misc_feature (9)..(15): 2'-O-Methyl
  misc_feature (19)..(19): 2'-O-Methyl
  misc_feature (21)..(23): 2'-O-Methyl
  misc_feature (26)..(26): 2'-O-Methyl
  misc_feature (28)..(35): 2'-O-Methyl
  misc_feature (17)..(17): 2'-deoxy-2'-amino
  misc_feature (27)..(27): 2'-deoxy-2'-amino
  misc_feature (36)..(36): n stands for inverted deoxyabasic derivative
uucagcggccgaaaggcgagugaggucucgacgggn

SEQ ID NO: 11077 - RNA, 34 nt, Artificial Sequence
  Description of Artificial Sequence:  Enzymatic Nucleic Acid
  misc_feature (1)..(4): Phosphorothioate 3'-Internucleotide Linkage
  misc_feature (1)..(6): 2'-O-Methyl
  misc_feature (8)..(14): 2'-O-Methyl
  misc_feature (18)..(18): 2'-O-Methyl
  misc_feature (20)..(22): 2'-O-Methyl
  misc_feature (25)..(25): 2'-O-Methyl
  misc_feature (27)..(33): 2'-O-Methyl
  misc_feature (16)..(16): 2'-deoxy-2'-amino
  misc_feature (26)..(26): 2'-deoxy-2'-amino
  misc_feature (34)..(34): n stands for inverted deoxyabasic derivative
ggugcggccgaaaggcgagugaggucucccgugn

SEQ ID NO: 11078 - RNA, 36 nt, Artificial Sequence
  Description of Artificial Sequence:  Enzymatic Nucleic Acid
  misc_feature (1)..(4): Phosphorothioate 3'-Internucleotide Linkage
  misc_feature (1)..(7): 2'-O-Methyl
  misc_feature (9)..(15): 2'-O-Methyl
  misc_feature (19)..(19): 2'-O-Methyl
  misc_feature (21)..(23): 2'-O-Methyl
  misc_feature (26)..(26): 2'-O-Methyl
  misc_feature (28)..(35): 2'-O-Methyl
  misc_feature (17)..(17): 2'-deoxy-2'-amino
  misc_feature (27)..(27): 2'-deoxy-2'-amino
  misc_feature (36)..(36): n stands for inverted deoxyabasic derivative
aggugcggccgaaaggcgagugaggucucccguggn

SEQ ID NO: 11079 - RNA, 36 nt, Artificial Sequence
  Description of Artificial Sequence:  Enzymatic Nucleic Acid
  misc_feature (1)..(4): Phosphorothioate 3'-Internucleotide Linkage
  misc_feature (1)..(7): 2'-O-Methyl
  misc_feature (9)..(15): 2'-O-Methyl
  misc_feature (19)..(19): 2'-O-Methyl
  misc_feature (21)..(23): 2'-O-Methyl
  misc_feature (26)..(26): 2'-O-Methyl
  misc_feature (28)..(35): 2'-O-Methyl
  misc_feature (17)..(17): 2'-deoxy-2'-amino
  misc_feature (27)..(27): 2'-deoxy-2'-amino
  misc_feature (36)..(36): n stands for inverted deoxyabasic derivative
gaaggcagccgaaaggcgagugaggucuagacgggn

SEQ ID NO: 11080 - RNA, 36 nt, Artificial Sequence
  Description of Artificial Sequence:  Enzymatic Nucleic Acid
  misc_feature (1)..(4): Phosphorothioate 3'-Internucleotide Linkage
  misc_feature (1)..(7): 2'-O-Methyl
  misc_feature (9)..(15): 2'-O-Methyl
  misc_feature (19)..(19): 2'-O-Methyl
  misc_feature (21)..(23): 2'-O-Methyl
  misc_feature (26)..(26): 2'-O-Methyl
  misc_feature (28)..(35): 2'-O-Methyl
  misc_feature (17)..(17): 2'-deoxy-2'-amino
  misc_feature (27)..(27): 2'-deoxy-2'-amino
  misc_feature (36)..(36): n stands for inverted deoxyabasic derivative
gagaagggccgaaaggcgagugaggucuacagacgn

SEQ ID NO: 11081 - RNA, 36 nt, Artificial Sequence
  Description of Artificial Sequence:  Enzymatic Nucleic Acid
  misc_feature (1)..(4): Phosphorothioate 3'-Internucleotide Linkage
  misc_feature (1)..(7): 2'-O-Methyl
  misc_feature (9)..(15): 2'-O-Methyl
  misc_feature (19)..(19): 2'-O-Methyl
  misc_feature (21)..(23): 2'-O-Methyl
  misc_feature (26)..(26): 2'-O-Methyl
  misc_feature (28)..(35): 2'-O-Methyl
  misc_feature (17)..(17): 2'-deoxy-2'-amino
  misc_feature (27)..(27): 2'-deoxy-2'-amino
  misc_feature (36)..(36): n stands for inverted deoxyabasic derivative
ggugaaggccgaaaggcgagugaggucugaagugcn

SEQ ID NO: 11082 - RNA, 34 nt, Artificial Sequence
  Description of Artificial Sequence:  Enzymatic Nucleic Acid
  misc_feature (1)..(4): Phosphorothioate 3'-Internucleotide Linkage
  misc_feature (1)..(6): 2'-O-Methyl
  misc_feature (8)..(14): 2'-O-Methyl
  misc_feature (18)..(18): 2'-O-Methyl
  misc_feature (20)..(22): 2'-O-Methyl
  misc_feature (25)..(25): 2'-O-Methyl
  misc_feature (27)..(33): 2'-O-Methyl
  misc_feature (16)..(16): 2'-deoxy-2'-amino
  misc_feature (26)..(26): 2'-deoxy-2'-amino
  misc_feature (34)..(34): n stands for inverted deoxyabasic derivative
auuagggccgaaaggcgagugaggucuagaggun

SEQ ID NO: 11083 - RNA, 36 nt, Artificial Sequence
  Description of Artificial Sequence:  Enzymatic Nucleic Acid
  misc_feature (1)..(4): Phosphorothioate 3'-Internucleotide Linkage
  misc_feature (1)..(7): 2'-O-Methyl
  misc_feature (9)..(15): 2'-O-Methyl
  misc_feature (19)..(19): 2'-O-Methyl
  misc_feature (21)..(23): 2'-O-Methyl
  misc_feature (26)..(26): 2'-O-Methyl
  misc_feature (28)..(35): 2'-O-Methyl
  misc_feature (17)..(17): 2'-deoxy-2'-amino
  misc_feature (27)..(27): 2'-deoxy-2'-amino
  misc_feature (36)..(36): n stands for inverted deoxyabasic derivative
auagggggccgaaaggcgagugaggucuauuuggun

SEQ ID NO: 11084 - RNA, 36 nt, Artificial Sequence
  Description of Artificial Sequence:  Enzymatic Nucleic Acid
  misc_feature (1)..(4): Phosphorothioate 3'-Internucleotide Linkage
  misc_feature (1)..(7): 2'-O-Methyl
  misc_feature (9)..(15): 2'-O-Methyl
  misc_feature (19)..(19): 2'-O-Methyl
  misc_feature (21)..(23): 2'-O-Methyl
  misc_feature (26)..(26): 2'-O-Methyl
  misc_feature (28)..(35): 2'-O-Methyl
  misc_feature (17)..(17): 2'-deoxy-2'-amino
  misc_feature (27)..(27): 2'-deoxy-2'-amino
  misc_feature (36)..(36): n stands for inverted deoxyabasic derivative
ucuucuggccgaaaggcgagugaggucugacgcggn

SEQ ID NO: 11085 - RNA, 36 nt, Artificial Sequence
  Description of Artificial Sequence:  Enzymatic Nucleic Acid
  misc_feature (1)..(4): Phosphorothioate 3'-Internucleotide Linkage
  misc_feature (1)..(7): 2'-O-Methyl
  misc_feature (9)..(15): 2'-O-Methyl
  misc_feature (19)..(19): 2'-O-Methyl
  misc_feature (21)..(23): 2'-O-Methyl
  misc_feature (26)..(26): 2'-O-Methyl
  misc_feature (28)..(35): 2'-O-Methyl
  misc_feature (17)..(17): 2'-deoxy-2'-amino
  misc_feature (27)..(27): 2'-deoxy-2'-amino
  misc_feature (36)..(36): n stands for inverted deoxyabasic derivative
ggagccagccgaaaggcgagugaggucucagcaggn

SEQ ID NO: 11086 - RNA, 34 nt, Artificial Sequence
  Description of Artificial Sequence:  Enzymatic Nucleic Acid
  misc_feature (1)..(4): Phosphorothioate 3'-Internucleotide Linkage
  misc_feature (1)..(6): 2'-O-Methyl
  misc_feature (8)..(14): 2'-O-Methyl
  misc_feature (18)..(18): 2'-O-Methyl
  misc_feature (20)..(22): 2'-O-Methyl
  misc_feature (25)..(25): 2'-O-Methyl
  misc_feature (27)..(33): 2'-O-Methyl
  misc_feature (16)..(16): 2'-deoxy-2'-amino
  misc_feature (26)..(26): 2'-deoxy-2'-amino
  misc_feature (34)..(34): n stands for inverted deoxyabasic derivative
cacgaggccgaaaggcgagugaggucuaggggun

SEQ ID NO: 11087 - RNA, 34 nt, Artificial Sequence
  Description of Artificial Sequence:  Enzymatic Nucleic Acid
  misc_feature (1)..(4): Phosphorothioate 3'-Internucleotide Linkage
  misc_feature (1)..(6): 2'-O-Methyl
  misc_feature (8)..(14): 2'-O-Methyl
  misc_feature (18)..(18): 2'-O-Methyl
  misc_feature (20)..(22): 2'-O-Methyl
  misc_feature (25)..(25): 2'-O-Methyl
  misc_feature (27)..(33): 2'-O-Methyl
  misc_feature (16)..(16): 2'-deoxy-2'-amino
  misc_feature (26)..(26): 2'-deoxy-2'-amino
  misc_feature (34)..(34): n stands for inverted deoxyabasic derivative
cuguaagccgaaaggcgagugaggucuacgagcn

SEQ ID NO: 11088 - RNA, 36 nt, Artificial Sequence
  Description of Artificial Sequence:  Enzymatic Nucleic Acid
  misc_feature (1)..(4): Phosphorothioate 3'-Internucleotide Linkage
  misc_feature (1)..(7): 2'-O-Methyl
  misc_feature (9)..(15): 2'-O-Methyl
  misc_feature (19)..(19): 2'-O-Methyl
  misc_feature (21)..(23): 2'-O-Methyl
  misc_feature (26)..(26): 2'-O-Methyl
  misc_feature (28)..(35): 2'-O-Methyl
  misc_feature (17)..(17): 2'-deoxy-2'-amino
  misc_feature (27)..(27): 2'-deoxy-2'-amino
  misc_feature (36)..(36): n stands for inverted deoxyabasic derivative
uccaccagccgaaaggcgagugaggucugagucuan

SEQ ID NO: 11089 - RNA, 36 nt, Artificial Sequence
  Description of Artificial Sequence:  Enzymatic Nucleic Acid
  misc_feature (1)..(4): Phosphorothioate 3'-Internucleotide Linkage
  misc_feature (1)..(7): 2'-O-Methyl
  misc_feature (9)..(15): 2'-O-Methyl
  misc_feature (19)..(19): 2'-O-Methyl
  misc_feature (21)..(23): 2'-O-Methyl
  misc_feature (26)..(26): 2'-O-Methyl
  misc_feature (28)..(35): 2'-O-Methyl
  misc_feature (17)..(17): 2'-deoxy-2'-amino
  misc_feature (27)..(27): 2'-deoxy-2'-amino
  misc_feature (36)..(36): n stands for inverted deoxyabasic derivative
aaguccagccgaaaggcgagugaggucucacgagun

SEQ ID NO: 11090 - RNA, 34 nt, Artificial Sequence
  Description of Artificial Sequence:  Enzymatic Nucleic Acid
  misc_feature (1)..(4): Phosphorothioate 3'-Internucleotide Linkage
  misc_feature (1)..(6): 2'-O-Methyl
  misc_feature (8)..(14): 2'-O-Methyl
  misc_feature (18)..(18): 2'-O-Methyl
  misc_feature (20)..(22): 2'-O-Methyl
  misc_feature (25)..(25): 2'-O-Methyl
  misc_feature (27)..(33): 2'-O-Methyl
  misc_feature (16)..(16): 2'-deoxy-2'-amino
  misc_feature (26)..(26): 2'-deoxy-2'-amino
  misc_feature (34)..(34): n stands for inverted deoxyabasic derivative
ggacuggccgaaaggcgagugaggucugaauuun

SEQ ID NO: 11091 - RNA, 34 nt, Artificial Sequence
  Description of Artificial Sequence:  Enzymatic Nucleic Acid
  misc_feature (1)..(4): Phosphorothioate 3'-Internucleotide Linkage
  misc_feature (1)..(6): 2'-O-Methyl
  misc_feature (8)..(14): 2'-O-Methyl
  misc_feature (18)..(18): 2'-O-Methyl
  misc_feature (20)..(22): 2'-O-Methyl
  misc_feature (25)..(25): 2'-O-Methyl
  misc_feature (27)..(33): 2'-O-Methyl
  misc_feature (16)..(16): 2'-deoxy-2'-amino
  misc_feature (26)..(26): 2'-deoxy-2'-amino
  misc_feature (34)..(34): n stands for inverted deoxyabasic derivative
cagacagccgaaaggcgagugaggucuauccagn

SEQ ID NO: 11092 - RNA, 36 nt, Artificial Sequence
  Description of Artificial Sequence:  Enzymatic Nucleic Acid
  misc_feature (1)..(4): Phosphorothioate 3'-Internucleotide Linkage
  misc_feature (1)..(7): 2'-O-Methyl
  misc_feature (9)..(15): 2'-O-Methyl
  misc_feature (19)..(19): 2'-O-Methyl
  misc_feature (21)..(23): 2'-O-Methyl
  misc_feature (26)..(26): 2'-O-Methyl
  misc_feature (28)..(35): 2'-O-Methyl
  misc_feature (17)..(17): 2'-deoxy-2'-amino
  misc_feature (27)..(27): 2'-deoxy-2'-amino
  misc_feature (36)..(36): n stands for inverted deoxyabasic derivative
aacgccggccgaaaggcgagugaggucuagacacan

SEQ ID NO: 11093 - RNA, 34 nt, Artificial Sequence
  Description of Artificial Sequence:  Enzymatic Nucleic Acid
  misc_feature (1)..(4): Phosphorothioate 3'-Internucleotide Linkage
  misc_feature (1)..(6): 2'-O-Methyl
  misc_feature (8)..(14): 2'-O-Methyl
  misc_feature (18)..(18): 2'-O-Methyl
  misc_feature (20)..(22): 2'-O-Methyl
  misc_feature (25)..(25): 2'-O-Methyl
  misc_feature (27)..(33): 2'-O-Methyl
  misc_feature (16)..(16): 2'-deoxy-2'-amino
  misc_feature (26)..(26): 2'-deoxy-2'-amino
  misc_feature (34)..(34): n stands for inverted deoxyabasic derivative
aaaacggccgaaaggcgagugaggucucgcagan

SEQ ID NO: 11094 - RNA, 34 nt, Artificial Sequence
  Description of Artificial Sequence:  Enzymatic Nucleic Acid
  misc_feature (1)..(4): Phosphorothioate 3'-Internucleotide Linkage
  misc_feature (1)..(6): 2'-O-Methyl
  misc_feature (8)..(14): 2'-O-Methyl
  misc_feature (18)..(18): 2'-O-Methyl
  misc_feature (20)..(22): 2'-O-Methyl
  misc_feature (25)..(25): 2'-O-Methyl
  misc_feature (27)..(33): 2'-O-Methyl
  misc_feature (16)..(16): 2'-deoxy-2'-amino
  misc_feature (26)..(26): 2'-deoxy-2'-amino
  misc_feature (34)..(34): n stands for inverted deoxyabasic derivative
uagcaggccgaaaggcgagugaggucuaggaugn

SEQ ID NO: 11095 - RNA, 34 nt, Artificial Sequence
  Description of Artificial Sequence:  Enzymatic Nucleic Acid
  misc_feature (1)..(4): Phosphorothioate 3'-Internucleotide Linkage
  misc_feature (1)..(6): 2'-O-Methyl
  misc_feature (8)..(14): 2'-O-Methyl
  misc_feature (18)..(18): 2'-O-Methyl
  misc_feature (20)..(22): 2'-O-Methyl
  misc_feature (25)..(25): 2'-O-Methyl
  misc_feature (27)..(33): 2'-O-Methyl
  misc_feature (16)..(16): 2'-deoxy-2'-amino
  misc_feature (26)..(26): 2'-deoxy-2'-amino
  misc_feature (34)..(34): n stands for inverted deoxyabasic derivative
gcauaggccgaaaggcgagugaggucuagcaggn

SEQ ID NO: 11096 - RNA, 34 nt, Artificial Sequence
  Description of Artificial Sequence:  Enzymatic Nucleic Acid
  misc_feature (1)..(4): Phosphorothioate 3'-Internucleotide Linkage
  misc_feature (1)..(6): 2'-O-Methyl
  misc_feature (8)..(14): 2'-O-Methyl
  misc_feature (18)..(18): 2'-O-Methyl
  misc_feature (20)..(22): 2'-O-Methyl
  misc_feature (25)..(25): 2'-O-Methyl
  misc_feature (27)..(33): 2'-O-Methyl
  misc_feature (16)..(16): 2'-deoxy-2'-amino
  misc_feature (26)..(26): 2'-deoxy-2'-amino
  misc_feature (34)..(34): n stands for inverted deoxyabasic derivative
aacggggccgaaaggcgagugaggucuaacauan

SEQ ID NO: 11097 - RNA, 34 nt, Artificial Sequence
  Description of Artificial Sequence:  Enzymatic Nucleic Acid
  misc_feature (1)..(4): Phosphorothioate 3'-Internucleotide Linkage
  misc_feature (1)..(6): 2'-O-Methyl
  misc_feature (8)..(14): 2'-O-Methyl
  misc_feature (18)..(18): 2'-O-Methyl
  misc_feature (20)..(22): 2'-O-Methyl
  misc_feature (25)..(25): 2'-O-Methyl
  misc_feature (27)..(33): 2'-O-Methyl
  misc_feature (16)..(16): 2'-deoxy-2'-amino
  misc_feature (26)..(26): 2'-deoxy-2'-amino
  misc_feature (34)..(34): n stands for inverted deoxyabasic derivative
agaggagccgaaaggcgagugaggucuaaacggn

SEQ ID NO: 11098 - RNA, 34 nt, Artificial Sequence
  Description of Artificial Sequence:  Enzymatic Nucleic Acid
  misc_feature (1)..(4): Phosphorothioate 3'-Internucleotide Linkage
  misc_feature (1)..(6): 2'-O-Methyl
  misc_feature (8)..(14): 2'-O-Methyl
  misc_feature (18)..(18): 2'-O-Methyl
  misc_feature (20)..(22): 2'-O-Methyl
  misc_feature (25)..(25): 2'-O-Methyl
  misc_feature (27)..(33): 2'-O-Methyl
  misc_feature (16)..(16): 2'-deoxy-2'-amino
  misc_feature (26)..(26): 2'-deoxy-2'-amino
  misc_feature (34)..(34): n stands for inverted deoxyabasic derivative
aguaaagccgaaaggcgagugaggucuugagccn

SEQ ID NO: 11099 - RNA, 36 nt, Artificial Sequence
  Description of Artificial Sequence:  Enzymatic Nucleic Acid
  misc_feature (1)..(4): Phosphorothioate 3'-Internucleotide Linkage
  misc_feature (1)..(7): 2'-O-Methyl
  misc_feature (9)..(15): 2'-O-Methyl
  misc_feature (19)..(19): 2'-O-Methyl
  misc_feature (21)..(23): 2'-O-Methyl
  misc_feature (26)..(26): 2'-O-Methyl
  misc_feature (28)..(35): 2'-O-Methyl
  misc_feature (17)..(17): 2'-deoxy-2'-amino
  misc_feature (27)..(27): 2'-deoxy-2'-amino
  misc_feature (36)..(36): n stands for inverted deoxyabasic derivative
uaguaaagccgaaaggcgagugaggucuugagccan

SEQ ID NO: 11100 - RNA, 34 nt, Artificial Sequence
  Description of Artificial Sequence:  Enzymatic Nucleic Acid
  misc_feature (1)..(4): Phosphorothioate 3'-Internucleotide Linkage
  misc_feature (1)..(6): 2'-O-Methyl
  misc_feature (8)..(14): 2'-O-Methyl
  misc_feature (18)..(18): 2'-O-Methyl
  misc_feature (20)..(22): 2'-O-Methyl
  misc_feature (25)..(25): 2'-O-Methyl
  misc_feature (27)..(33): 2'-O-Methyl
  misc_feature (16)..(16): 2'-deoxy-2'-amino
  misc_feature (26)..(26): 2'-deoxy-2'-amino
  misc_feature (34)..(34): n stands for inverted deoxyabasic derivative
auggcagccgaaaggcgagugaggucuuaguaan

SEQ ID NO: 11101 - RNA, 36 nt, Artificial Sequence
  Description of Artificial Sequence:  Enzymatic Nucleic Acid
  misc_feature (1)..(4): Phosphorothioate 3'-Internucleotide Linkage
  misc_feature (1)..(7): 2'-O-Methyl
  misc_feature (9)..(15): 2'-O-Methyl
  misc_feature (19)..(19): 2'-O-Methyl
  misc_feature (21)..(23): 2'-O-Methyl
  misc_feature (26)..(26): 2'-O-Methyl
  misc_feature (28)..(35): 2'-O-Methyl
  misc_feature (17)..(17): 2'-deoxy-2'-amino
  misc_feature (27)..(27): 2'-deoxy-2'-amino
  misc_feature (36)..(36): n stands for inverted deoxyabasic derivative
aauggcagccgaaaggcgagugaggucuuaguaaan

SEQ ID NO: 11102 - RNA, 36 nt, Artificial Sequence
  Description of Artificial Sequence:  Enzymatic Nucleic Acid
  misc_feature (1)..(4): Phosphorothioate 3'-Internucleotide Linkage
  misc_feature (1)..(7): 2'-O-Methyl
  misc_feature (9)..(15): 2'-O-Methyl
  misc_feature (19)..(19): 2'-O-Methyl
  misc_feature (21)..(23): 2'-O-Methyl
  misc_feature (26)..(26): 2'-O-Methyl
  misc_feature (28)..(35): 2'-O-Methyl
  misc_feature (17)..(17): 2'-deoxy-2'-amino
  misc_feature (27)..(27): 2'-deoxy-2'-amino
  misc_feature (36)..(36): n stands for inverted deoxyabasic derivative
caaaugggccgaaaggcgagugaggucuacuaguan

SEQ ID NO: 11103 - RNA, 34 nt, Artificial Sequence
  Description of Artificial Sequence:  Enzymatic Nucleic Acid
  misc_feature (1)..(4): Phosphorothioate 3'-Internucleotide Linkage
  misc_feature (1)..(6): 2'-O-Methyl
  misc_feature (8)..(14): 2'-O-Methyl
  misc_feature (18)..(18): 2'-O-Methyl
  misc_feature (20)..(22): 2'-O-Methyl
  misc_feature (25)..(25): 2'-O-Methyl
  misc_feature (27)..(33): 2'-O-Methyl
  misc_feature (16)..(16): 2'-deoxy-2'-amino
  misc_feature (26)..(26): 2'-deoxy-2'-amino
  misc_feature (34)..(34): n stands for inverted deoxyabasic derivative
gaaccagccgaaaggcgagugaggucuugaacan

SEQ ID NO: 11104 - RNA, 34 nt, Artificial Sequence
  Description of Artificial Sequence:  Enzymatic Nucleic Acid
  misc_feature (1)..(4): Phosphorothioate 3'-Internucleotide Linkage
  misc_feature (1)..(6): 2'-O-Methyl
  misc_feature (8)..(14): 2'-O-Methyl
  misc_feature (18)..(18): 2'-O-Methyl
  misc_feature (20)..(22): 2'-O-Methyl
  misc_feature (25)..(25): 2'-O-Methyl
  misc_feature (27)..(33): 2'-O-Methyl
  misc_feature (16)..(16): 2'-deoxy-2'-amino
  misc_feature (26)..(26): 2'-deoxy-2'-amino
  misc_feature (34)..(34): n stands for inverted deoxyabasic derivative
uacgaagccgaaaggcgagugaggucucacugan

SEQ ID NO: 11105 - RNA, 36 nt, Artificial Sequence
  Description of Artificial Sequence:  Enzymatic Nucleic Acid
  misc_feature (1)..(4): Phosphorothioate 3'-Internucleotide Linkage
  misc_feature (1)..(7): 2'-O-Methyl
  misc_feature (9)..(15): 2'-O-Methyl
  misc_feature (19)..(19): 2'-O-Methyl
  misc_feature (21)..(23): 2'-O-Methyl
  misc_feature (26)..(26): 2'-O-Methyl
  misc_feature (28)..(35): 2'-O-Methyl
  misc_feature (17)..(17): 2'-deoxy-2'-amino
  misc_feature (27)..(27): 2'-deoxy-2'-amino
  misc_feature (36)..(36): n stands for inverted deoxyabasic derivative
cuacgaagccgaaaggcgagugaggucucacugaan

SEQ ID NO: 11106 - RNA, 34 nt, Artificial Sequence
  Description of Artificial Sequence:  Enzymatic Nucleic Acid
  misc_feature (1)..(4): Phosphorothioate 3'-Internucleotide Linkage
  misc_feature (1)..(6): 2'-O-Methyl
  misc_feature (8)..(14): 2'-O-Methyl
  misc_feature (18)..(18): 2'-O-Methyl
  misc_feature (20)..(22): 2'-O-Methyl
  misc_feature (25)..(25): 2'-O-Methyl
  misc_feature (27)..(33): 2'-O-Methyl
  misc_feature (16)..(16): 2'-deoxy-2'-amino
  misc_feature (26)..(26): 2'-deoxy-2'-amino
  misc_feature (34)..(34): n stands for inverted deoxyabasic derivative
ggaaaggccgaaaggcgagugaggucuccuacgn

SEQ ID NO: 11107 - RNA, 34 nt, Artificial Sequence
  Description of Artificial Sequence:  Enzymatic Nucleic Acid
  misc_feature (1)..(4): Phosphorothioate 3'-Internucleotide Linkage
  misc_feature (1)..(6): 2'-O-Methyl
  misc_feature (8)..(14): 2'-O-Methyl
  misc_feature (18)..(18): 2'-O-Methyl
  misc_feature (20)..(22): 2'-O-Methyl
  misc_feature (25)..(25): 2'-O-Methyl
  misc_feature (27)..(33): 2'-O-Methyl
  misc_feature (16)..(16): 2'-deoxy-2'-amino
  misc_feature (26)..(26): 2'-deoxy-2'-amino
  misc_feature (34)..(34): n stands for inverted deoxyabasic derivative
aaaagagccgaaaggcgagugaggucuccacaan

SEQ ID NO: 11108 - RNA, 34 nt, Artificial Sequence
  Description of Artificial Sequence:  Enzymatic Nucleic Acid
  misc_feature (1)..(4): Phosphorothioate 3'-Internucleotide Linkage
  misc_feature (1)..(6): 2'-O-Methyl
  misc_feature (8)..(14): 2'-O-Methyl
  misc_feature (18)..(18): 2'-O-Methyl
  misc_feature (20)..(22): 2'-O-Methyl
  misc_feature (25)..(25): 2'-O-Methyl
  misc_feature (27)..(33): 2'-O-Methyl
  misc_feature (16)..(16): 2'-deoxy-2'-amino
  misc_feature (26)..(26): 2'-deoxy-2'-amino
  misc_feature (34)..(34): n stands for inverted deoxyabasic derivative
aguugggccgaaaggcgagugaggucugagaaan

SEQ ID NO: 11109 - RNA, 36 nt, Artificial Sequence
  Description of Artificial Sequence:  Enzymatic Nucleic Acid
  misc_feature (1)..(4): Phosphorothioate 3'-Internucleotide Linkage
  misc_feature (1)..(7): 2'-O-Methyl
  misc_feature (9)..(15): 2'-O-Methyl
  misc_feature (19)..(19): 2'-O-Methyl
  misc_feature (21)..(23): 2'-O-Methyl
  misc_feature (26)..(26): 2'-O-Methyl
  misc_feature (28)..(35): 2'-O-Methyl
  misc_feature (17)..(17): 2'-deoxy-2'-amino
  misc_feature (27)..(27): 2'-deoxy-2'-amino
  misc_feature (36)..(36): n stands for inverted deoxyabasic derivative
aaguugggccgaaaggcgagugaggucugagaaagn

SEQ ID NO: 11110 - RNA, 36 nt, Artificial Sequence
  Description of Artificial Sequence:  Enzymatic Nucleic Acid
  misc_feature (1)..(4): Phosphorothioate 3'-Internucleotide Linkage
  misc_feature (1)..(7): 2'-O-Methyl
  misc_feature (9)..(15): 2'-O-Methyl
  misc_feature (19)..(19): 2'-O-Methyl
  misc_feature (21)..(23): 2'-O-Methyl
  misc_feature (26)..(26): 2'-O-Methyl
  misc_feature (28)..(35): 2'-O-Methyl
  misc_feature (17)..(17): 2'-deoxy-2'-amino
  misc_feature (27)..(27): 2'-deoxy-2'-amino
  misc_feature (36)..(36): n stands for inverted deoxyabasic derivative
cagcaaagccgaaaggcgagugaggucuacuuggcn

SEQ ID NO: 11111 - RNA, 34 nt, Artificial Sequence
  Description of Artificial Sequence:  Enzymatic Nucleic Acid
  misc_feature (1)..(4): Phosphorothioate 3'-Internucleotide Linkage
  misc_feature (1)..(6): 2'-O-Methyl
  misc_feature (8)..(14): 2'-O-Methyl
  misc_feature (18)..(18): 2'-O-Methyl
  misc_feature (20)..(22): 2'-O-Methyl
  misc_feature (25)..(25): 2'-O-Methyl
  misc_feature (27)..(33): 2'-O-Methyl
  misc_feature (16)..(16): 2'-deoxy-2'-amino
  misc_feature (26)..(26): 2'-deoxy-2'-amino
  misc_feature (34)..(34): n stands for inverted deoxyabasic derivative
ucagcggccgaaaggcgagugaggucucgacggn

SEQ ID NO: 11112 - RNA, 34 nt, Artificial Sequence
  Description of Artificial Sequence:  Enzymatic Nucleic Acid
  misc_feature (1)..(4): Phosphorothioate 3'-Internucleotide Linkage
  misc_feature (1)..(6): 2'-O-Methyl
  misc_feature (8)..(14): 2'-O-Methyl
  misc_feature (18)..(18): 2'-O-Methyl
  misc_feature (20)..(22): 2'-O-Methyl
  misc_feature (25)..(25): 2'-O-Methyl
  misc_feature (27)..(33): 2'-O-Methyl
  misc_feature (16)..(16): 2'-deoxy-2'-amino
  misc_feature (26)..(26): 2'-deoxy-2'-amino
  misc_feature (34)..(34): n stands for inverted deoxyabasic derivative
auucaggccgaaaggcgagugaggucugccgacn

SEQ ID NO: 11113 - RNA, 36 nt, Artificial Sequence
  Description of Artificial Sequence:  Enzymatic Nucleic Acid
  misc_feature (1)..(4): Phosphorothioate 3'-Internucleotide Linkage
  misc_feature (1)..(7): 2'-O-Methyl
  misc_feature (9)..(15): 2'-O-Methyl
  misc_feature (19)..(19): 2'-O-Methyl
  misc_feature (21)..(23): 2'-O-Methyl
  misc_feature (26)..(26): 2'-O-Methyl
  misc_feature (28)..(35): 2'-O-Methyl
  misc_feature (17)..(17): 2'-deoxy-2'-amino
  misc_feature (27)..(27): 2'-deoxy-2'-amino
  misc_feature (36)..(36): n stands for inverted deoxyabasic derivative
gauucaggccgaaaggcgagugaggucugccgacgn

SEQ ID NO: 11114 - RNA, 34 nt, Artificial Sequence
  Description of Artificial Sequence:  Enzymatic Nucleic Acid
  misc_feature (1)..(4): Phosphorothioate 3'-Internucleotide Linkage
  misc_feature (1)..(6): 2'-O-Methyl
  misc_feature (8)..(14): 2'-O-Methyl
  misc_feature (18)..(18): 2'-O-Methyl
  misc_feature (20)..(22): 2'-O-Methyl
  misc_feature (25)..(25): 2'-O-Methyl
  misc_feature (27)..(33): 2'-O-Methyl
  misc_feature (16)..(16): 2'-deoxy-2'-amino
  misc_feature (26)..(26): 2'-deoxy-2'-amino
  misc_feature (34)..(34): n stands for inverted deoxyabasic derivative
cacagagccgaaaggcgagugaggucuggggagn

SEQ ID NO: 11115 - RNA, 34 nt, Artificial Sequence
  Description of Artificial Sequence:  Enzymatic Nucleic Acid
  misc_feature (1)..(4): Phosphorothioate 3'-Internucleotide Linkage
  misc_feature (1)..(6): 2'-O-Methyl
  misc_feature (8)..(14): 2'-O-Methyl
  misc_feature (18)..(18): 2'-O-Methyl
  misc_feature (20)..(22): 2'-O-Methyl
  misc_feature (25)..(25): 2'-O-Methyl
  misc_feature (27)..(33): 2'-O-Methyl
  misc_feature (16)..(16): 2'-deoxy-2'-amino
  misc_feature (26)..(26): 2'-deoxy-2'-amino
  misc_feature (34)..(34): n stands for inverted deoxyabasic derivative
aaggcagccgaaaggcgagugaggucuagacggn

SEQ ID NO: 11116 - RNA, 34 nt, Artificial Sequence
  Description of Artificial Sequence:  Enzymatic Nucleic Acid
  misc_feature (1)..(4): Phosphorothioate 3'-Internucleotide Linkage
  misc_feature (1)..(6): 2'-O-Methyl
  misc_feature (8)..(14): 2'-O-Methyl
  misc_feature (18)..(18): 2'-O-Methyl
  misc_feature (20)..(22): 2'-O-Methyl
  misc_feature (25)..(25): 2'-O-Methyl
  misc_feature (27)..(33): 2'-O-Methyl
  misc_feature (16)..(16): 2'-deoxy-2'-amino
  misc_feature (26)..(26): 2'-deoxy-2'-amino
  misc_feature (34)..(34): n stands for inverted deoxyabasic derivative
agaagggccgaaaggcgagugaggucuacagacn

SEQ ID NO: 11117 - RNA, 34 nt, Artificial Sequence
  Description of Artificial Sequence:  Enzymatic Nucleic Acid
  misc_feature (1)..(4): Phosphorothioate 3'-Internucleotide Linkage
  misc_feature (1)..(6): 2'-O-Methyl
  misc_feature (8)..(14): 2'-O-Methyl
  misc_feature (18)..(18): 2'-O-Methyl
  misc_feature (20)..(22): 2'-O-Methyl
  misc_feature (25)..(25): 2'-O-Methyl
  misc_feature (27)..(33): 2'-O-Methyl
  misc_feature (16)..(16): 2'-deoxy-2'-amino
  misc_feature (26)..(26): 2'-deoxy-2'-amino
  misc_feature (34)..(34): n stands for inverted deoxyabasic derivative
gaaguggccgaaaggcgagugaggucuacacggn

SEQ ID NO: 11118 - RNA, 34 nt, Artificial Sequence
  Description of Artificial Sequence:  Enzymatic Nucleic Acid
  misc_feature (1)..(4): Phosphorothioate 3'-Internucleotide Linkage
  misc_feature (1)..(6): 2'-O-Methyl
  misc_feature (8)..(14): 2'-O-Methyl
  misc_feature (18)..(18): 2'-O-Methyl
  misc_feature (20)..(22): 2'-O-Methyl
  misc_feature (25)..(25): 2'-O-Methyl
  misc_feature (27)..(33): 2'-O-Methyl
  misc_feature (16)..(16): 2'-deoxy-2'-amino
  misc_feature (26)..(26): 2'-deoxy-2'-amino
  misc_feature (34)..(34): n stands for inverted deoxyabasic derivative
gugaaggccgaaaggcgagugaggucugaagugn

SEQ ID NO: 11119 - RNA, 34 nt, Artificial Sequence
  Description of Artificial Sequence:  Enzymatic Nucleic Acid
  misc_feature (1)..(4): Phosphorothioate 3'-Internucleotide Linkage
  misc_feature (1)..(6): 2'-O-Methyl
  misc_feature (8)..(14): 2'-O-Methyl
  misc_feature (18)..(18): 2'-O-Methyl
  misc_feature (20)..(22): 2'-O-Methyl
  misc_feature (25)..(25): 2'-O-Methyl
  misc_feature (27)..(33): 2'-O-Methyl
  misc_feature (16)..(16): 2'-deoxy-2'-amino
  misc_feature (26)..(26): 2'-deoxy-2'-amino
  misc_feature (34)..(34): n stands for inverted deoxyabasic derivative
cguucagccgaaaggcgagugaggucugguggun

SEQ ID NO: 11120 - RNA, 36 nt, Artificial Sequence
  Description of Artificial Sequence:  Enzymatic Nucleic Acid
  misc_feature (1)..(4): Phosphorothioate 3'-Internucleotide Linkage
  misc_feature (1)..(7): 2'-O-Methyl
  misc_feature (9)..(15): 2'-O-Methyl
  misc_feature (19)..(19): 2'-O-Methyl
  misc_feature (21)..(23): 2'-O-Methyl
  misc_feature (26)..(26): 2'-O-Methyl
  misc_feature (28)..(35): 2'-O-Methyl
  misc_feature (17)..(17): 2'-deoxy-2'-amino
  misc_feature (27)..(27): 2'-deoxy-2'-amino
  misc_feature (36)..(36): n stands for inverted deoxyabasic derivative
uuggagggccgaaaggcgagugaggucuuugaacan

SEQ ID NO: 11121 - RNA, 36 nt, Artificial Sequence
  Description of Artificial Sequence:  Enzymatic Nucleic Acid
  misc_feature (1)..(4): Phosphorothioate 3'-Internucleotide Linkage
  misc_feature (1)..(7): 2'-O-Methyl
  misc_feature (9)..(15): 2'-O-Methyl
  misc_feature (19)..(19): 2'-O-Methyl
  misc_feature (21)..(23): 2'-O-Methyl
  misc_feature (26)..(26): 2'-O-Methyl
  misc_feature (28)..(35): 2'-O-Methyl
  misc_feature (17)..(17): 2'-deoxy-2'-amino
  misc_feature (27)..(27): 2'-deoxy-2'-amino
  misc_feature (36)..(36): n stands for inverted deoxyabasic derivative
caaggcagccgaaaggcgagugaggucuagcuuggn

SEQ ID NO: 11122 - RNA, 34 nt, Artificial Sequence
  Description of Artificial Sequence:  Enzymatic Nucleic Acid
  misc_feature (1)..(4): Phosphorothioate 3'-Internucleotide Linkage
  misc_feature (1)..(6): 2'-O-Methyl
  misc_feature (8)..(14): 2'-O-Methyl
  misc_feature (18)..(18): 2'-O-Methyl
  misc_feature (20)..(22): 2'-O-Methyl
  misc_feature (25)..(25): 2'-O-Methyl
  misc_feature (27)..(33): 2'-O-Methyl
  misc_feature (16)..(16): 2'-deoxy-2'-amino
  misc_feature (26)..(26): 2'-deoxy-2'-amino
  misc_feature (34)..(34): n stands for inverted deoxyabasic derivative
ccaagggccgaaaggcgagugaggucuacagcun

SEQ ID NO: 11123 - RNA, 36 nt, Artificial Sequence
  Description of Artificial Sequence:  Enzymatic Nucleic Acid
  misc_feature (1)..(4): Phosphorothioate 3'-Internucleotide Linkage
  misc_feature (1)..(7): 2'-O-Methyl
  misc_feature (9)..(15): 2'-O-Methyl
  misc_feature (19)..(19): 2'-O-Methyl
  misc_feature (21)..(23): 2'-O-Methyl
  misc_feature (26)..(26): 2'-O-Methyl
  misc_feature (28)..(35): 2'-O-Methyl
  misc_feature (17)..(17): 2'-deoxy-2'-amino
  misc_feature (27)..(27): 2'-deoxy-2'-amino
  misc_feature (36)..(36): n stands for inverted deoxyabasic derivative
cccaagggccgaaaggcgagugaggucuacagcuun

SEQ ID NO: 11124 - RNA, 34 nt, Artificial Sequence
  Description of Artificial Sequence:  Enzymatic Nucleic Acid
  misc_feature (1)..(4): Phosphorothioate 3'-Internucleotide Linkage
  misc_feature (1)..(6): 2'-O-Methyl
  misc_feature (8)..(14): 2'-O-Methyl
  misc_feature (18)..(18): 2'-O-Methyl
  misc_feature (20)..(22): 2'-O-Methyl
  misc_feature (25)..(25): 2'-O-Methyl
  misc_feature (27)..(33): 2'-O-Methyl
  misc_feature (16)..(16): 2'-deoxy-2'-amino
  misc_feature (26)..(26): 2'-deoxy-2'-amino
  misc_feature (34)..(34): n stands for inverted deoxyabasic derivative
uagggggccgaaaggcgagugaggucuauuuggn

SEQ ID NO: 11125 - RNA, 34 nt, Artificial Sequence
  Description of Artificial Sequence:  Enzymatic Nucleic Acid
  misc_feature (1)..(4): Phosphorothioate 3'-Internucleotide Linkage
  misc_feature (1)..(6): 2'-O-Methyl
  misc_feature (8)..(14): 2'-O-Methyl
  misc_feature (18)..(18): 2'-O-Methyl
  misc_feature (20)..(22): 2'-O-Methyl
  misc_feature (25)..(25): 2'-O-Methyl
  misc_feature (27)..(33): 2'-O-Methyl
  misc_feature (16)..(16): 2'-deoxy-2'-amino
  misc_feature (26)..(26): 2'-deoxy-2'-amino
  misc_feature (34)..(34): n stands for inverted deoxyabasic derivative
gucuaagccgaaaggcgagugaggucuaacagun

SEQ ID NO: 11126 - RNA, 34 nt, Artificial Sequence
  Description of Artificial Sequence:  Enzymatic Nucleic Acid
  misc_feature (1)..(4): Phosphorothioate 3'-Internucleotide Linkage
  misc_feature (1)..(6): 2'-O-Methyl
  misc_feature (8)..(14): 2'-O-Methyl
  misc_feature (18)..(18): 2'-O-Methyl
  misc_feature (20)..(22): 2'-O-Methyl
  misc_feature (25)..(25): 2'-O-Methyl
  misc_feature (27)..(33): 2'-O-Methyl
  misc_feature (16)..(16): 2'-deoxy-2'-amino
  misc_feature (26)..(26): 2'-deoxy-2'-amino
  misc_feature (34)..(34): n stands for inverted deoxyabasic derivative
aggggagccgaaaggcgagugaggucucugccun

SEQ ID NO: 11127 - RNA, 36 nt, Artificial Sequence
  Description of Artificial Sequence:  Enzymatic Nucleic Acid
  misc_feature (1)..(4): Phosphorothioate 3'-Internucleotide Linkage
  misc_feature (1)..(7): 2'-O-Methyl
  misc_feature (9)..(15): 2'-O-Methyl
  misc_feature (19)..(19): 2'-O-Methyl
  misc_feature (21)..(23): 2'-O-Methyl
  misc_feature (26)..(26): 2'-O-Methyl
  misc_feature (28)..(35): 2'-O-Methyl
  misc_feature (17)..(17): 2'-deoxy-2'-amino
  misc_feature (27)..(27): 2'-deoxy-2'-amino
  misc_feature (36)..(36): n stands for inverted deoxyabasic derivative
uaggggagccgaaaggcgagugaggucucugccucn

SEQ ID NO: 11128 - RNA, 34 nt, Artificial Sequence
  Description of Artificial Sequence:  Enzymatic Nucleic Acid
  misc_feature (1)..(4): Phosphorothioate 3'-Internucleotide Linkage
  misc_feature (1)..(6): 2'-O-Methyl
  misc_feature (8)..(14): 2'-O-Methyl
  misc_feature (18)..(18): 2'-O-Methyl
  misc_feature (20)..(22): 2'-O-Methyl
  misc_feature (25)..(25): 2'-O-Methyl
  misc_feature (27)..(33): 2'-O-Methyl
  misc_feature (16)..(16): 2'-deoxy-2'-amino
  misc_feature (26)..(26): 2'-deoxy-2'-amino
  misc_feature (34)..(34): n stands for inverted deoxyabasic derivative
gcgagggccgaaaggcgagugaggucugagggan

SEQ ID NO: 11129 - RNA, 34 nt, Artificial Sequence
  Description of Artificial Sequence:  Enzymatic Nucleic Acid
  misc_feature (1)..(4): Phosphorothioate 3'-Internucleotide Linkage
  misc_feature (1)..(6): 2'-O-Methyl
  misc_feature (8)..(14): 2'-O-Methyl
  misc_feature (18)..(18): 2'-O-Methyl
  misc_feature (20)..(22): 2'-O-Methyl
  misc_feature (25)..(25): 2'-O-Methyl
  misc_feature (27)..(33): 2'-O-Methyl
  misc_feature (16)..(16): 2'-deoxy-2'-amino
  misc_feature (26)..(26): 2'-deoxy-2'-amino
  misc_feature (34)..(34): n stands for inverted deoxyabasic derivative
cgucuggccgaaaggcgagugaggucugaggcgn

SEQ ID NO: 11130 - RNA, 34 nt, Artificial Sequence
  Description of Artificial Sequence:  Enzymatic Nucleic Acid
  misc_feature (1)..(4): Phosphorothioate 3'-Internucleotide Linkage
  misc_feature (1)..(6): 2'-O-Methyl
  misc_feature (8)..(14): 2'-O-Methyl
  misc_feature (18)..(18): 2'-O-Methyl
  misc_feature (20)..(22): 2'-O-Methyl
  misc_feature (25)..(25): 2'-O-Methyl
  misc_feature (27)..(33): 2'-O-Methyl
  misc_feature (16)..(16): 2'-deoxy-2'-amino
  misc_feature (26)..(26): 2'-deoxy-2'-amino
  misc_feature (34)..(34): n stands for inverted deoxyabasic derivative
cugcgagccgaaaggcgagugaggucugcggcgn

SEQ ID NO: 11131 - RNA, 34 nt, Artificial Sequence
  Description of Artificial Sequence:  Enzymatic Nucleic Acid
  misc_feature (1)..(4): Phosphorothioate 3'-Internucleotide Linkage
  misc_feature (1)..(6): 2'-O-Methyl
  misc_feature (8)..(14): 2'-O-Methyl
  misc_feature (18)..(18): 2'-O-Methyl
  misc_feature (20)..(22): 2'-O-Methyl
  misc_feature (25)..(25): 2'-O-Methyl
  misc_feature (27)..(33): 2'-O-Methyl
  misc_feature (16)..(16): 2'-deoxy-2'-amino
  misc_feature (26)..(26): 2'-deoxy-2'-amino
  misc_feature (34)..(34): n stands for inverted deoxyabasic derivative
cuucuggccgaaaggcgagugaggucugacgcgn

SEQ ID NO: 11132 - RNA, 34 nt, Artificial Sequence
  Description of Artificial Sequence:  Enzymatic Nucleic Acid
  misc_feature (1)..(4): Phosphorothioate 3'-Internucleotide Linkage
  misc_feature (1)..(6): 2'-O-Methyl
  misc_feature (8)..(14): 2'-O-Methyl
  misc_feature (18)..(18): 2'-O-Methyl
  misc_feature (20)..(22): 2'-O-Methyl
  misc_feature (25)..(25): 2'-O-Methyl
  misc_feature (27)..(33): 2'-O-Methyl
  misc_feature (16)..(16): 2'-deoxy-2'-amino
  misc_feature (26)..(26): 2'-deoxy-2'-amino
  misc_feature (34)..(34): n stands for inverted deoxyabasic derivative
uucccagccgaaaggcgagugaggucucuuaugn

SEQ ID NO: 11133 - RNA, 38 nt, Artificial Sequence
  Description of Artificial Sequence:  Enzymatic Nucleic Acid
  misc_feature (1)..(4): Phosphorothioate 3'-Internucleotide Linkage
  misc_feature (1)..(10): 2'-O-Methyl
  misc_feature (12)..(13): 2'-O-Methyl
  misc_feature (19)..(23): 2'-O-Methyl
  misc_feature (25)..(26): 2'-O-Methyl
  misc_feature (31)..(37): 2'-O-Methyl
  misc_feature (11)..(11): n stands for hexaethylene glycol spacer
  misc_feature (24)..(24): n stands for hexaethylene glycol spacer
  misc_feature (14)..(18): 2'-deoxy-2'-amino
  misc_feature (27)..(27): 2'-deoxy-2'-amino
  misc_feature (38)..(38): n stands for inverted deoxyabasic derivative
gcagacagganucccuucaagganuccgggauccagcn

SEQ ID NO: 11134 - RNA, 38 nt, Artificial Sequence
  Description of Artificial Sequence:  Enzymatic Nucleic Acid
  misc_feature (1)..(4): Phosphorothioate 3'-Internucleotide Linkage
  misc_feature (1)..(10): 2'-O-Methyl
  misc_feature (12)..(13): 2'-O-Methyl
  misc_feature (19)..(23): 2'-O-Methyl
  misc_feature (25)..(26): 2'-O-Methyl
  misc_feature (31)..(37): 2'-O-Methyl
  misc_feature (11)..(11): n stands for hexaethylene glycol spacer
  misc_feature (24)..(24): n stands for hexaethylene glycol spacer
  misc_feature (14)..(18): 2'-deoxy-2'-amino
  misc_feature (27)..(27): 2'-deoxy-2'-amino
  misc_feature (38)..(38): n stands for inverted deoxyabasic derivative
aggcccagganucccuucaagganuccgggucccauan

SEQ ID NO: 11135 - RNA, 38 nt, Artificial Sequence
  Description of Artificial Sequence:  Enzymatic Nucleic Acid
  misc_feature (1)..(4): Phosphorothioate 3'-Internucleotide Linkage
  misc_feature (1)..(10): 2'-O-Methyl
  misc_feature (12)..(13): 2'-O-Methyl
  misc_feature (19)..(23): 2'-O-Methyl
  misc_feature (25)..(26): 2'-O-Methyl
  misc_feature (31)..(37): 2'-O-Methyl
  misc_feature (11)..(11): n stands for hexaethylene glycol spacer
  misc_feature (24)..(24): n stands for hexaethylene glycol spacer
  misc_feature (14)..(18): 2'-deoxy-2'-amino
  misc_feature (27)..(27): 2'-deoxy-2'-amino
  misc_feature (38)..(38): n stands for inverted deoxyabasic derivative
ccuguaagganucccuucaagganuccgggacgagcan

SEQ ID NO: 11136 - RNA, 38 nt, Artificial Sequence
  Description of Artificial Sequence:  Enzymatic Nucleic Acid
  misc_feature (1)..(4): Phosphorothioate 3'-Internucleotide Linkage
  misc_feature (1)..(10): 2'-O-Methyl
  misc_feature (12)..(13): 2'-O-Methyl
  misc_feature (19)..(23): 2'-O-Methyl
  misc_feature (25)..(26): 2'-O-Methyl
  misc_feature (31)..(37): 2'-O-Methyl
  misc_feature (11)..(11): n stands for hexaethylene glycol spacer
  misc_feature (24)..(24): n stands for hexaethylene glycol spacer
  misc_feature (14)..(18): 2'-deoxy-2'-amino
  misc_feature (27)..(27): 2'-deoxy-2'-amino
  misc_feature (38)..(38): n stands for inverted deoxyabasic derivative
acacaucgganucccuucaagganuccgggagcgauan

SEQ ID NO: 11137 - RNA, 38 nt, Artificial Sequence
  Description of Artificial Sequence:  Enzymatic Nucleic Acid
  misc_feature (1)..(4): Phosphorothioate 3'-Internucleotide Linkage
  misc_feature (1)..(10): 2'-O-Methyl
  misc_feature (12)..(13): 2'-O-Methyl
  misc_feature (19)..(23): 2'-O-Methyl
  misc_feature (25)..(26): 2'-O-Methyl
  misc_feature (31)..(37): 2'-O-Methyl
  misc_feature (11)..(11): n stands for hexaethylene glycol spacer
  misc_feature (24)..(24): n stands for hexaethylene glycol spacer
  misc_feature (14)..(18): 2'-deoxy-2'-amino
  misc_feature (27)..(27): 2'-deoxy-2'-amino
  misc_feature (38)..(38): n stands for inverted deoxyabasic derivative
gacacaugganucccuucaagganuccgggcagcgaun

SEQ ID NO: 11138 - RNA, 38 nt, Artificial Sequence
  Description of Artificial Sequence:  Enzymatic Nucleic Acid
  misc_feature (1)..(4): Phosphorothioate 3'-Internucleotide Linkage
  misc_feature (1)..(10): 2'-O-Methyl
  misc_feature (12)..(13): 2'-O-Methyl
  misc_feature (19)..(23): 2'-O-Methyl
  misc_feature (25)..(26): 2'-O-Methyl
  misc_feature (31)..(37): 2'-O-Methyl
  misc_feature (11)..(11): n stands for hexaethylene glycol spacer
  misc_feature (24)..(24): n stands for hexaethylene glycol spacer
  misc_feature (14)..(18): 2'-deoxy-2'-amino
  misc_feature (27)..(27): 2'-deoxy-2'-amino
  misc_feature (38)..(38): n stands for inverted deoxyabasic derivative
ccgcagagganucccuucaagganuccgggacauccan

SEQ ID NO: 11139 - RNA, 36 nt, Artificial Sequence
  Description of Artificial Sequence:  Enzymatic Nucleic Acid
  misc_feature (1)..(4): Phosphorothioate 3'-Internucleotide Linkage
  misc_feature (1)..(9): 2'-O-Methyl
  misc_feature (11)..(12): 2'-O-Methyl
  misc_feature (18)..(22): 2'-O-Methyl
  misc_feature (24)..(25): 2'-O-Methyl
  misc_feature (30)..(35): 2'-O-Methyl
  misc_feature (10)..(10): n stands for hexaethylene glycol spacer
  misc_feature (23)..(23): n stands for hexaethylene glycol spacer
  misc_feature (13)..(17): 2'-deoxy-2'-amino
  misc_feature (26)..(26): 2'-deoxy-2'-amino
  misc_feature (36)..(36): n stands for inverted deoxyabasic derivative
cgcagagganucccuucaagganuccgggacauccn

SEQ ID NO: 11140 - RNA, 36 nt, Artificial Sequence
  Description of Artificial Sequence:  Enzymatic Nucleic Acid
  misc_feature (1)..(4): Phosphorothioate 3'-Internucleotide Linkage
  misc_feature (1)..(9): 2'-O-Methyl
  misc_feature (11)..(12): 2'-O-Methyl
  misc_feature (18)..(22): 2'-O-Methyl
  misc_feature (24)..(25): 2'-O-Methyl
  misc_feature (30)..(35): 2'-O-Methyl
  misc_feature (10)..(10): n stands for hexaethylene glycol spacer
  misc_feature (23)..(23): n stands for hexaethylene glycol spacer
  misc_feature (13)..(17): 2'-deoxy-2'-amino
  misc_feature (26)..(26): 2'-deoxy-2'-amino
  misc_feature (36)..(36): n stands for inverted deoxyabasic derivative
ggcccagganucccuucaagganuccgggucccaun

SEQ ID NO: 11141 - RNA, 38 nt, Artificial Sequence
  Description of Artificial Sequence:  Enzymatic Nucleic Acid
  misc_feature (1)..(4): Phosphorothioate 3'-Internucleotide Linkage
  misc_feature (1)..(10): 2'-O-Methyl
  misc_feature (12)..(13): 2'-O-Methyl
  misc_feature (19)..(23): 2'-O-Methyl
  misc_feature (25)..(26): 2'-O-Methyl
  misc_feature (31)..(37): 2'-O-Methyl
  misc_feature (11)..(11): n stands for hexaethylene glycol spacer
  misc_feature (24)..(24): n stands for hexaethylene glycol spacer
  misc_feature (14)..(18): 2'-deoxy-2'-amino
  misc_feature (27)..(27): 2'-deoxy-2'-amino
  misc_feature (38)..(38): n stands for inverted deoxyabasic derivative
ugaggccgganucccuucaagganuccgggacucccan

SEQ ID NO: 11142 - RNA, 36 nt, Artificial Sequence
  Description of Artificial Sequence:  Enzymatic Nucleic Acid
  misc_feature (1)..(4): Phosphorothioate 3'-Internucleotide Linkage
  misc_feature (1)..(9): 2'-O-Methyl
  misc_feature (11)..(12): 2'-O-Methyl
  misc_feature (18)..(22): 2'-O-Methyl
  misc_feature (24)..(25): 2'-O-Methyl
  misc_feature (30)..(35): 2'-O-Methyl
  misc_feature (10)..(10): n stands for hexaethylene glycol spacer
  misc_feature (23)..(23): n stands for hexaethylene glycol spacer
  misc_feature (13)..(17): 2'-deoxy-2'-amino
  misc_feature (26)..(26): 2'-deoxy-2'-amino
  misc_feature (36)..(36): n stands for inverted deoxyabasic derivative
gaggccgganucccuucaagganuccgggacucccn

SEQ ID NO: 11143 - RNA, 38 nt, Artificial Sequence
  Description of Artificial Sequence:  Enzymatic Nucleic Acid
  misc_feature (1)..(4): Phosphorothioate 3'-Internucleotide Linkage
  misc_feature (1)..(10): 2'-O-Methyl
  misc_feature (12)..(13): 2'-O-Methyl
  misc_feature (19)..(23): 2'-O-Methyl
  misc_feature (25)..(26): 2'-O-Methyl
  misc_feature (31)..(37): 2'-O-Methyl
  misc_feature (11)..(11): n stands for hexaethylene glycol spacer
  misc_feature (24)..(24): n stands for hexaethylene glycol spacer
  misc_feature (14)..(18): 2'-deoxy-2'-amino
  misc_feature (27)..(27): 2'-deoxy-2'-amino
  misc_feature (38)..(38): n stands for inverted deoxyabasic derivative
cacugaagganucccuucaagganuccgggaaauggcn

SEQ ID NO: 11144 - RNA, 38 nt, Artificial Sequence
  Description of Artificial Sequence:  Enzymatic Nucleic Acid
  misc_feature (1)..(4): Phosphorothioate 3'-Internucleotide Linkage
  misc_feature (1)..(10): 2'-O-Methyl
  misc_feature (12)..(13): 2'-O-Methyl
  misc_feature (19)..(23): 2'-O-Methyl
  misc_feature (25)..(26): 2'-O-Methyl
  misc_feature (31)..(37): 2'-O-Methyl
  misc_feature (11)..(11): n stands for hexaethylene glycol spacer
  misc_feature (24)..(24): n stands for hexaethylene glycol spacer
  misc_feature (14)..(18): 2'-deoxy-2'-amino
  misc_feature (27)..(27): 2'-deoxy-2'-amino
  misc_feature (38)..(38): n stands for inverted deoxyabasic derivative
cgaaccagganucccuucaagganuccgggugaacaan

SEQ ID NO: 11145 - RNA, 38 nt, Artificial Sequence
  Description of Artificial Sequence:  Enzymatic Nucleic Acid
  misc_feature (1)..(4): Phosphorothioate 3'-Internucleotide Linkage
  misc_feature (1)..(10): 2'-O-Methyl
  misc_feature (12)..(13): 2'-O-Methyl
  misc_feature (19)..(23): 2'-O-Methyl
  misc_feature (25)..(26): 2'-O-Methyl
  misc_feature (31)..(37): 2'-O-Methyl
  misc_feature (11)..(11): n stands for hexaethylene glycol spacer
  misc_feature (24)..(24): n stands for hexaethylene glycol spacer
  misc_feature (14)..(18): 2'-deoxy-2'-amino
  misc_feature (27)..(27): 2'-deoxy-2'-amino
  misc_feature (38)..(38): n stands for inverted deoxyabasic derivative
uacgaacgganucccuucaagganuccgggacugaacn

SEQ ID NO: 11146 - RNA, 38 nt, Artificial Sequence
  Description of Artificial Sequence:  Enzymatic Nucleic Acid
  misc_feature (1)..(4): Phosphorothioate 3'-Internucleotide Linkage
  misc_feature (1)..(10): 2'-O-Methyl
  misc_feature (12)..(13): 2'-O-Methyl
  misc_feature (19)..(23): 2'-O-Methyl
  misc_feature (25)..(26): 2'-O-Methyl
  misc_feature (31)..(37): 2'-O-Methyl
  misc_feature (11)..(11): n stands for hexaethylene glycol spacer
  misc_feature (24)..(24): n stands for hexaethylene glycol spacer
  misc_feature (14)..(18): 2'-deoxy-2'-amino
  misc_feature (27)..(27): 2'-deoxy-2'-amino
  misc_feature (38)..(38): n stands for inverted deoxyabasic derivative
ggaaagcgganucccuucaagganuccgggcuacgaan

SEQ ID NO: 11147 - RNA, 36 nt, Artificial Sequence
  Description of Artificial Sequence:  Enzymatic Nucleic Acid
  misc_feature (1)..(4): Phosphorothioate 3'-Internucleotide Linkage
  misc_feature (1)..(9): 2'-O-Methyl
  misc_feature (11)..(12): 2'-O-Methyl
  misc_feature (18)..(22): 2'-O-Methyl
  misc_feature (24)..(25): 2'-O-Methyl
  misc_feature (30)..(35): 2'-O-Methyl
  misc_feature (10)..(10): n stands for hexaethylene glycol spacer
  misc_feature (23)..(23): n stands for hexaethylene glycol spacer
  misc_feature (13)..(17): 2'-deoxy-2'-amino
  misc_feature (26)..(26): 2'-deoxy-2'-amino
  misc_feature (36)..(36): n stands for inverted deoxyabasic derivative
gugcgcgganucccuucaagganuccgggccguggn

SEQ ID NO: 11148 - RNA, 36 nt, Artificial Sequence
  Description of Artificial Sequence:  Enzymatic Nucleic Acid
  misc_feature (1)..(4): Phosphorothioate 3'-Internucleotide Linkage
  misc_feature (1)..(9): 2'-O-Methyl
  misc_feature (11)..(12): 2'-O-Methyl
  misc_feature (18)..(22): 2'-O-Methyl
  misc_feature (24)..(25): 2'-O-Methyl
  misc_feature (30)..(35): 2'-O-Methyl
  misc_feature (10)..(10): n stands for hexaethylene glycol spacer
  misc_feature (23)..(23): n stands for hexaethylene glycol spacer
  misc_feature (13)..(17): 2'-deoxy-2'-amino
  misc_feature (26)..(26): 2'-deoxy-2'-amino
  misc_feature (36)..(36): n stands for inverted deoxyabasic derivative
ggcguugganucccuucaagganuccgggacggugn

SEQ ID NO: 11149 - RNA, 36 nt, Artificial Sequence
  Description of Artificial Sequence:  Enzymatic Nucleic Acid
  misc_feature (1)..(4): Phosphorothioate 3'-Internucleotide Linkage
  misc_feature (1)..(9): 2'-O-Methyl
  misc_feature (11)..(12): 2'-O-Methyl
  misc_feature (18)..(22): 2'-O-Methyl
  misc_feature (24)..(25): 2'-O-Methyl
  misc_feature (30)..(35): 2'-O-Methyl
  misc_feature (10)..(10): n stands for hexaethylene glycol spacer
  misc_feature (23)..(23): n stands for hexaethylene glycol spacer
  misc_feature (13)..(17): 2'-deoxy-2'-amino
  misc_feature (26)..(26): 2'-deoxy-2'-amino
  misc_feature (36)..(36): n stands for inverted deoxyabasic derivative
gcuugcgganucccuucaagganuccgggugagugn

SEQ ID NO: 11150 - RNA, 38 nt, Artificial Sequence
  Description of Artificial Sequence:  Enzymatic Nucleic Acid
  misc_feature (1)..(4): Phosphorothioate 3'-Internucleotide Linkage
  misc_feature (1)..(10): 2'-O-Methyl
  misc_feature (12)..(13): 2'-O-Methyl
  misc_feature (19)..(23): 2'-O-Methyl
  misc_feature (25)..(26): 2'-O-Methyl
  misc_feature (31)..(37): 2'-O-Methyl
  misc_feature (11)..(11): n stands for hexaethylene glycol spacer
  misc_feature (24)..(24): n stands for hexaethylene glycol spacer
  misc_feature (14)..(18): 2'-deoxy-2'-amino
  misc_feature (27)..(27): 2'-deoxy-2'-amino
  misc_feature (38)..(38): n stands for inverted deoxyabasic derivative
aguucuugganucccuucaagganuccggguucuaggn

SEQ ID NO: 11151 - RNA, 38 nt, Artificial Sequence
  Description of Artificial Sequence:  Enzymatic Nucleic Acid
  misc_feature (1)..(4): Phosphorothioate 3'-Internucleotide Linkage
  misc_feature (1)..(10): 2'-O-Methyl
  misc_feature (12)..(13): 2'-O-Methyl
  misc_feature (19)..(23): 2'-O-Methyl
  misc_feature (25)..(26): 2'-O-Methyl
  misc_feature (31)..(37): 2'-O-Methyl
  misc_feature (11)..(11): n stands for hexaethylene glycol spacer
  misc_feature (24)..(24): n stands for hexaethylene glycol spacer
  misc_feature (14)..(18): 2'-deoxy-2'-amino
  misc_feature (27)..(27): 2'-deoxy-2'-amino
  misc_feature (38)..(38): n stands for inverted deoxyabasic derivative
aguuuccgganucccuucaagganuccgggaccuuaun

SEQ ID NO: 11152 - RNA, 38 nt, Artificial Sequence
  Description of Artificial Sequence:  Enzymatic Nucleic Acid
  misc_feature (1)..(4): Phosphorothioate 3'-Internucleotide Linkage
  misc_feature (1)..(10): 2'-O-Methyl
  misc_feature (12)..(13): 2'-O-Methyl
  misc_feature (19)..(23): 2'-O-Methyl
  misc_feature (25)..(26): 2'-O-Methyl
  misc_feature (31)..(37): 2'-O-Methyl
  misc_feature (11)..(11): n stands for hexaethylene glycol spacer
  misc_feature (24)..(24): n stands for hexaethylene glycol spacer
  misc_feature (14)..(18): 2'-deoxy-2'-amino
  misc_feature (27)..(27): 2'-deoxy-2'-amino
  misc_feature (38)..(38): n stands for inverted deoxyabasic derivative
ggagccagganucccuucaagganuccgggcagcaggn

SEQ ID NO: 11153 - RNA, 36 nt, Artificial Sequence
  Description of Artificial Sequence:  Enzymatic Nucleic Acid
  misc_feature (1)..(4): Phosphorothioate 3'-Internucleotide Linkage
  misc_feature (1)..(9): 2'-O-Methyl
  misc_feature (11)..(12): 2'-O-Methyl
  misc_feature (18)..(22): 2'-O-Methyl
  misc_feature (24)..(25): 2'-O-Methyl
  misc_feature (30)..(35): 2'-O-Methyl
  misc_feature (10)..(10): n stands for hexaethylene glycol spacer
  misc_feature (23)..(23): n stands for hexaethylene glycol spacer
  misc_feature (13)..(17): 2'-deoxy-2'-amino
  misc_feature (26)..(26): 2'-deoxy-2'-amino
  misc_feature (36)..(36): n stands for inverted deoxyabasic derivative
uggagcgganucccuucaagganuccgggaccagcn

SEQ ID NO: 11154 - RNA, 36 nt, Artificial Sequence
  Description of Artificial Sequence:  Enzymatic Nucleic Acid
  misc_feature (1)..(4): Phosphorothioate 3'-Internucleotide Linkage
  misc_feature (1)..(9): 2'-O-Methyl
  misc_feature (11)..(12): 2'-O-Methyl
  misc_feature (18)..(22): 2'-O-Methyl
  misc_feature (24)..(25): 2'-O-Methyl
  misc_feature (30)..(35): 2'-O-Methyl
  misc_feature (10)..(10): n stands for hexaethylene glycol spacer
  misc_feature (23)..(23): n stands for hexaethylene glycol spacer
  misc_feature (13)..(17): 2'-deoxy-2'-amino
  misc_feature (26)..(26): 2'-deoxy-2'-amino
  misc_feature (36)..(36): n stands for inverted deoxyabasic derivative
cuguaagganucccuucaagganuccgggacgagcn

SEQ ID NO: 11155 - RNA, 38 nt, Artificial Sequence
  Description of Artificial Sequence:  Enzymatic Nucleic Acid
  misc_feature (1)..(4): Phosphorothioate 3'-Internucleotide Linkage
  misc_feature (1)..(10): 2'-O-Methyl
  misc_feature (12)..(13): 2'-O-Methyl
  misc_feature (19)..(23): 2'-O-Methyl
  misc_feature (25)..(26): 2'-O-Methyl
  misc_feature (31)..(37): 2'-O-Methyl
  misc_feature (11)..(11): n stands for hexaethylene glycol spacer
  misc_feature (24)..(24): n stands for hexaethylene glycol spacer
  misc_feature (14)..(18): 2'-deoxy-2'-amino
  misc_feature (27)..(27): 2'-deoxy-2'-amino
  misc_feature (38)..(38): n stands for inverted deoxyabasic derivative
aguccacgganucccuucaagganuccgggacgagucn

SEQ ID NO: 11156 - RNA, 38 nt, Artificial Sequence
  Description of Artificial Sequence:  Enzymatic Nucleic Acid
  misc_feature (1)..(4): Phosphorothioate 3'-Internucleotide Linkage
  misc_feature (1)..(10): 2'-O-Methyl
  misc_feature (12)..(13): 2'-O-Methyl
  misc_feature (19)..(23): 2'-O-Methyl
  misc_feature (25)..(26): 2'-O-Methyl
  misc_feature (31)..(37): 2'-O-Methyl
  misc_feature (11)..(11): n stands for hexaethylene glycol spacer
  misc_feature (24)..(24): n stands for hexaethylene glycol spacer
  misc_feature (14)..(18): 2'-deoxy-2'-amino
  misc_feature (27)..(27): 2'-deoxy-2'-amino
  misc_feature (38)..(38): n stands for inverted deoxyabasic derivative
agaagucgganucccuucaagganuccgggaccacgan

SEQ ID NO: 11157 - RNA, 36 nt, Artificial Sequence
  Description of Artificial Sequence:  Enzymatic Nucleic Acid
  misc_feature (1)..(4): Phosphorothioate 3'-Internucleotide Linkage
  misc_feature (1)..(9): 2'-O-Methyl
  misc_feature (11)..(12): 2'-O-Methyl
  misc_feature (18)..(22): 2'-O-Methyl
  misc_feature (24)..(25): 2'-O-Methyl
  misc_feature (30)..(35): 2'-O-Methyl
  misc_feature (10)..(10): n stands for hexaethylene glycol spacer
  misc_feature (23)..(23): n stands for hexaethylene glycol spacer
  misc_feature (13)..(17): 2'-deoxy-2'-amino
  misc_feature (26)..(26): 2'-deoxy-2'-amino
  misc_feature (36)..(36): n stands for inverted deoxyabasic derivative
cacaucgganucccuucaagganuccgggagcgaun

SEQ ID NO: 11158 - RNA, 36 nt, Artificial Sequence
  Description of Artificial Sequence:  Enzymatic Nucleic Acid
  misc_feature (1)..(4): Phosphorothioate 3'-Internucleotide Linkage
  misc_feature (1)..(9): 2'-O-Methyl
  misc_feature (11)..(12): 2'-O-Methyl
  misc_feature (18)..(22): 2'-O-Methyl
  misc_feature (24)..(25): 2'-O-Methyl
  misc_feature (30)..(35): 2'-O-Methyl
  misc_feature (10)..(10): n stands for hexaethylene glycol spacer
  misc_feature (23)..(23): n stands for hexaethylene glycol spacer
  misc_feature (13)..(17): 2'-deoxy-2'-amino
  misc_feature (26)..(26): 2'-deoxy-2'-amino
  misc_feature (36)..(36): n stands for inverted deoxyabasic derivative
acacaugganucccuucaagganuccgggcagcgan

SEQ ID NO: 11159 - RNA, 36 nt, Artificial Sequence
  Description of Artificial Sequence:  Enzymatic Nucleic Acid
  misc_feature (1)..(4): Phosphorothioate 3'-Internucleotide Linkage
  misc_feature (1)..(9): 2'-O-Methyl
  misc_feature (11)..(12): 2'-O-Methyl
  misc_feature (18)..(22): 2'-O-Methyl
  misc_feature (24)..(25): 2'-O-Methyl
  misc_feature (30)..(35): 2'-O-Methyl
  misc_feature (10)..(10): n stands for hexaethylene glycol spacer
  misc_feature (23)..(23): n stands for hexaethylene glycol spacer
  misc_feature (13)..(17): 2'-deoxy-2'-amino
  misc_feature (26)..(26): 2'-deoxy-2'-amino
  misc_feature (36)..(36): n stands for inverted deoxyabasic derivative
agaggagganucccuucaagganuccgggaaacggn

SEQ ID NO: 11160 - RNA, 38 nt, Artificial Sequence
  Description of Artificial Sequence:  Enzymatic Nucleic Acid
  misc_feature (1)..(4): Phosphorothioate 3'-Internucleotide Linkage
  misc_feature (1)..(10): 2'-O-Methyl
  misc_feature (12)..(13): 2'-O-Methyl
  misc_feature (19)..(23): 2'-O-Methyl
  misc_feature (25)..(26): 2'-O-Methyl
  misc_feature (31)..(37): 2'-O-Methyl
  misc_feature (11)..(11): n stands for hexaethylene glycol spacer
  misc_feature (24)..(24): n stands for hexaethylene glycol spacer
  misc_feature (14)..(18): 2'-deoxy-2'-amino
  misc_feature (27)..(27): 2'-deoxy-2'-amino
  misc_feature (38)..(38): n stands for inverted deoxyabasic derivative
cugaggcgganucccuucaagganuccgggcacucccn

SEQ ID NO: 11161 - RNA, 38 nt, Artificial Sequence
  Description of Artificial Sequence:  Enzymatic Nucleic Acid
  misc_feature (1)..(4): Phosphorothioate 3'-Internucleotide Linkage
  misc_feature (1)..(10): 2'-O-Methyl
  misc_feature (12)..(13): 2'-O-Methyl
  misc_feature (19)..(23): 2'-O-Methyl
  misc_feature (25)..(26): 2'-O-Methyl
  misc_feature (31)..(37): 2'-O-Methyl
  misc_feature (11)..(11): n stands for hexaethylene glycol spacer
  misc_feature (24)..(24): n stands for hexaethylene glycol spacer
  misc_feature (14)..(18): 2'-deoxy-2'-amino
  misc_feature (27)..(27): 2'-deoxy-2'-amino
  misc_feature (38)..(38): n stands for inverted deoxyabasic derivative
uaguaaagganucccuucaagganuccgggugagccan

SEQ ID NO: 11162 - RNA, 38 nt, Artificial Sequence
  Description of Artificial Sequence:  Enzymatic Nucleic Acid
  misc_feature (1)..(4): Phosphorothioate 3'-Internucleotide Linkage
  misc_feature (1)..(10): 2'-O-Methyl
  misc_feature (12)..(13): 2'-O-Methyl
  misc_feature (19)..(23): 2'-O-Methyl
  misc_feature (25)..(26): 2'-O-Methyl
  misc_feature (31)..(37): 2'-O-Methyl
  misc_feature (11)..(11): n stands for hexaethylene glycol spacer
  misc_feature (24)..(24): n stands for hexaethylene glycol spacer
  misc_feature (14)..(18): 2'-deoxy-2'-amino
  misc_feature (27)..(27): 2'-deoxy-2'-amino
  misc_feature (38)..(38): n stands for inverted deoxyabasic derivative
aauggcagganucccuucaagganuccggguaguaaan

SEQ ID NO: 11163 - RNA, 38 nt, Artificial Sequence
  Description of Artificial Sequence:  Enzymatic Nucleic Acid
  misc_feature (1)..(4): Phosphorothioate 3'-Internucleotide Linkage
  misc_feature (1)..(10): 2'-O-Methyl
  misc_feature (12)..(13): 2'-O-Methyl
  misc_feature (19)..(23): 2'-O-Methyl
  misc_feature (25)..(26): 2'-O-Methyl
  misc_feature (31)..(37): 2'-O-Methyl
  misc_feature (11)..(11): n stands for hexaethylene glycol spacer
  misc_feature (24)..(24): n stands for hexaethylene glycol spacer
  misc_feature (14)..(18): 2'-deoxy-2'-amino
  misc_feature (27)..(27): 2'-deoxy-2'-amino
  misc_feature (38)..(38): n stands for inverted deoxyabasic derivative
cuacgaagganucccuucaagganuccgggcacugaan

SEQ ID NO: 11164 - RNA, 38 nt, Artificial Sequence
  Description of Artificial Sequence:  Enzymatic Nucleic Acid
  misc_feature (1)..(4): Phosphorothioate 3'-Internucleotide Linkage
  misc_feature (1)..(10): 2'-O-Methyl
  misc_feature (12)..(13): 2'-O-Methyl
  misc_feature (19)..(23): 2'-O-Methyl
  misc_feature (25)..(26): 2'-O-Methyl
  misc_feature (31)..(37): 2'-O-Methyl
  misc_feature (11)..(11): n stands for hexaethylene glycol spacer
  misc_feature (24)..(24): n stands for hexaethylene glycol spacer
  misc_feature (14)..(18): 2'-deoxy-2'-amino
  misc_feature (27)..(27): 2'-deoxy-2'-amino
  misc_feature (38)..(38): n stands for inverted deoxyabasic derivative
gaaagccgganucccuucaagganuccggguacgaacn

SEQ ID NO: 11165 - RNA, 36 nt, Artificial Sequence
  Description of Artificial Sequence:  Enzymatic Nucleic Acid
  misc_feature (1)..(4): Phosphorothioate 3'-Internucleotide Linkage
  misc_feature (1)..(9): 2'-O-Methyl
  misc_feature (11)..(12): 2'-O-Methyl
  misc_feature (18)..(22): 2'-O-Methyl
  misc_feature (24)..(25): 2'-O-Methyl
  misc_feature (30)..(35): 2'-O-Methyl
  misc_feature (10)..(10): n stands for hexaethylene glycol spacer
  misc_feature (23)..(23): n stands for hexaethylene glycol spacer
  misc_feature (13)..(17): 2'-deoxy-2'-amino
  misc_feature (26)..(26): 2'-deoxy-2'-amino
  misc_feature (36)..(36): n stands for inverted deoxyabasic derivative
gaaagcgganucccuucaagganuccgggcuacgan

SEQ ID NO: 11166 - RNA, 38 nt, Artificial Sequence
  Description of Artificial Sequence:  Enzymatic Nucleic Acid
  misc_feature (1)..(4): Phosphorothioate 3'-Internucleotide Linkage
  misc_feature (1)..(10): 2'-O-Methyl
  misc_feature (12)..(13): 2'-O-Methyl
  misc_feature (19)..(23): 2'-O-Methyl
  misc_feature (25)..(26): 2'-O-Methyl
  misc_feature (31)..(37): 2'-O-Methyl
  misc_feature (11)..(11): n stands for hexaethylene glycol spacer
  misc_feature (24)..(24): n stands for hexaethylene glycol spacer
  misc_feature (14)..(18): 2'-deoxy-2'-amino
  misc_feature (27)..(27): 2'-deoxy-2'-amino
  misc_feature (38)..(38): n stands for inverted deoxyabasic derivative
accacaugganucccuucaagganuccgggauccauan

SEQ ID NO: 11167 - RNA, 36 nt, Artificial Sequence
  Description of Artificial Sequence:  Enzymatic Nucleic Acid
  misc_feature (1)..(4): Phosphorothioate 3'-Internucleotide Linkage
  misc_feature (1)..(9): 2'-O-Methyl
  misc_feature (11)..(12): 2'-O-Methyl
  misc_feature (18)..(22): 2'-O-Methyl
  misc_feature (24)..(25): 2'-O-Methyl
  misc_feature (30)..(35): 2'-O-Methyl
  misc_feature (10)..(10): n stands for hexaethylene glycol spacer
  misc_feature (23)..(23): n stands for hexaethylene glycol spacer
  misc_feature (13)..(17): 2'-deoxy-2'-amino
  misc_feature (26)..(26): 2'-deoxy-2'-amino
  misc_feature (36)..(36): n stands for inverted deoxyabasic derivative
aaggcagganucccuucaagganuccgggagacggn

SEQ ID NO: 11168 - RNA, 38 nt, Artificial Sequence
  Description of Artificial Sequence:  Enzymatic Nucleic Acid
  misc_feature (1)..(4): Phosphorothioate 3'-Internucleotide Linkage
  misc_feature (1)..(10): 2'-O-Methyl
  misc_feature (12)..(13): 2'-O-Methyl
  misc_feature (19)..(23): 2'-O-Methyl
  misc_feature (25)..(26): 2'-O-Methyl
  misc_feature (31)..(37): 2'-O-Methyl
  misc_feature (11)..(11): n stands for hexaethylene glycol spacer
  misc_feature (24)..(24): n stands for hexaethylene glycol spacer
  misc_feature (14)..(18): 2'-deoxy-2'-amino
  misc_feature (27)..(27): 2'-deoxy-2'-amino
  misc_feature (38)..(38): n stands for inverted deoxyabasic derivative
caaggcagganucccuucaagganuccgggagcuuggn

SEQ ID NO: 11169 - RNA, 36 nt, Artificial Sequence
  Description of Artificial Sequence:  Enzymatic Nucleic Acid
  misc_feature (1)..(4): Phosphorothioate 3'-Internucleotide Linkage
  misc_feature (1)..(9): 2'-O-Methyl
  misc_feature (11)..(12): 2'-O-Methyl
  misc_feature (18)..(22): 2'-O-Methyl
  misc_feature (24)..(25): 2'-O-Methyl
  misc_feature (30)..(35): 2'-O-Methyl
  misc_feature (10)..(10): n stands for hexaethylene glycol spacer
  misc_feature (23)..(23): n stands for hexaethylene glycol spacer
  misc_feature (13)..(17): 2'-deoxy-2'-amino
  misc_feature (26)..(26): 2'-deoxy-2'-amino
  misc_feature (36)..(36): n stands for inverted deoxyabasic derivative
gucuaagganucccuucaagganuccgggaacagun

SEQ ID NO: 11170 - RNA, 36 nt, Artificial Sequence
  Description of Artificial Sequence:  Enzymatic Nucleic Acid
  misc_feature (1)..(4): Phosphorothioate 3'-Internucleotide Linkage
  misc_feature (1)..(9): 2'-O-Methyl
  misc_feature (11)..(12): 2'-O-Methyl
  misc_feature (18)..(22): 2'-O-Methyl
  misc_feature (24)..(25): 2'-O-Methyl
  misc_feature (30)..(35): 2'-O-Methyl
  misc_feature (10)..(10): n stands for hexaethylene glycol spacer
  misc_feature (23)..(23): n stands for hexaethylene glycol spacer
  misc_feature (13)..(17): 2'-deoxy-2'-amino
  misc_feature (26)..(26): 2'-deoxy-2'-amino
  misc_feature (36)..(36): n stands for inverted deoxyabasic derivative
guucuugganucccuucaagganuccggguucuagn

SEQ ID NO: 11171 - RNA, 36 nt, Artificial Sequence
  Description of Artificial Sequence:  Enzymatic Nucleic Acid
  misc_feature (1)..(4): Phosphorothioate 3'-Internucleotide Linkage
  misc_feature (1)..(9): 2'-O-Methyl
  misc_feature (11)..(12): 2'-O-Methyl
  misc_feature (18)..(22): 2'-O-Methyl
  misc_feature (24)..(25): 2'-O-Methyl
  misc_feature (30)..(35): 2'-O-Methyl
  misc_feature (10)..(10): n stands for hexaethylene glycol spacer
  misc_feature (23)..(23): n stands for hexaethylene glycol spacer
  misc_feature (13)..(17): 2'-deoxy-2'-amino
  misc_feature (26)..(26): 2'-deoxy-2'-amino
  misc_feature (36)..(36): n stands for inverted deoxyabasic derivative
ggaguugganucccuucaagganuccggguucuucn

SEQ ID NO: 11172 - RNA, 38 nt, Artificial Sequence
  Description of Artificial Sequence:  Enzymatic Nucleic Acid
  misc_feature (1)..(4): Phosphorothioate 3'-Internucleotide Linkage
  misc_feature (1)..(10): 2'-O-Methyl
  misc_feature (12)..(13): 2'-O-Methyl
  misc_feature (19)..(23): 2'-O-Methyl
  misc_feature (25)..(26): 2'-O-Methyl
  misc_feature (31)..(37): 2'-O-Methyl
  misc_feature (11)..(11): n stands for hexaethylene glycol spacer
  misc_feature (24)..(24): n stands for hexaethylene glycol spacer
  misc_feature (14)..(18): 2'-deoxy-2'-amino
  misc_feature (27)..(27): 2'-deoxy-2'-amino
  misc_feature (38)..(38): n stands for inverted deoxyabasic derivative
agaucuugganucccuucaagganuccgggugcgacgn

SEQ ID NO: 11173 - RNA, 36 nt, Artificial Sequence
  Description of Artificial Sequence:  Enzymatic Nucleic Acid
  misc_feature (1)..(4): Phosphorothioate 3'-Internucleotide Linkage
  misc_feature (1)..(9): 2'-O-Methyl
  misc_feature (11)..(12): 2'-O-Methyl
  misc_feature (18)..(22): 2'-O-Methyl
  misc_feature (24)..(25): 2'-O-Methyl
  misc_feature (30)..(35): 2'-O-Methyl
  misc_feature (10)..(10): n stands for hexaethylene glycol spacer
  misc_feature (23)..(23): n stands for hexaethylene glycol spacer
  misc_feature (13)..(17): 2'-deoxy-2'-amino
  misc_feature (26)..(26): 2'-deoxy-2'-amino
  misc_feature (36)..(36): n stands for inverted deoxyabasic derivative
ugagaugganucccuucaagganuccggguucugcn

SEQ ID NO: 11174 - RNA, 38 nt, Artificial Sequence
  Description of Artificial Sequence:  Enzymatic Nucleic Acid
  misc_feature (1)..(4): Phosphorothioate 3'-Internucleotide Linkage
  misc_feature (1)..(10): 2'-O-Methyl
  misc_feature (12)..(13): 2'-O-Methyl
  misc_feature (19)..(23): 2'-O-Methyl
  misc_feature (25)..(26): 2'-O-Methyl
  misc_feature (31)..(37): 2'-O-Methyl
  misc_feature (11)..(11): n stands for hexaethylene glycol spacer
  misc_feature (24)..(24): n stands for hexaethylene glycol spacer
  misc_feature (14)..(18): 2'-deoxy-2'-amino
  misc_feature (27)..(27): 2'-deoxy-2'-amino
  misc_feature (38)..(38): n stands for inverted deoxyabasic derivative
uugagaugganucccuucaagganuccggguucugcgn

SEQ ID NO: 11175 - RNA, 36 nt, Artificial Sequence
  Description of Artificial Sequence:  Enzymatic Nucleic Acid
  misc_feature (1)..(4): Phosphorothioate 3'-Internucleotide Linkage
  misc_feature (1)..(9): 2'-O-Methyl
  misc_feature (11)..(12): 2'-O-Methyl
  misc_feature (18)..(22): 2'-O-Methyl
  misc_feature (24)..(25): 2'-O-Methyl
  misc_feature (30)..(35): 2'-O-Methyl
  misc_feature (10)..(10): n stands for hexaethylene glycol spacer
  misc_feature (23)..(23): n stands for hexaethylene glycol spacer
  misc_feature (13)..(17): 2'-deoxy-2'-amino
  misc_feature (26)..(26): 2'-deoxy-2'-amino
  misc_feature (36)..(36): n stands for inverted deoxyabasic derivative
guuuccgganucccuucaagganuccgggaccuuan

SEQ ID NO: 11176 - RNA, 38 nt, Artificial Sequence
  Description of Artificial Sequence:  Enzymatic Nucleic Acid
  misc_feature (1)..(4): Phosphorothioate 3'-Internucleotide Linkage
  misc_feature (1)..(10): 2'-O-Methyl
  misc_feature (12)..(13): 2'-O-Methyl
  misc_feature (19)..(23): 2'-O-Methyl
  misc_feature (25)..(26): 2'-O-Methyl
  misc_feature (31)..(37): 2'-O-Methyl
  misc_feature (11)..(11): n stands for hexaethylene glycol spacer
  misc_feature (24)..(24): n stands for hexaethylene glycol spacer
  misc_feature (14)..(18): 2'-deoxy-2'-amino
  misc_feature (27)..(27): 2'-deoxy-2'-amino
  misc_feature (38)..(38): n stands for inverted deoxyabasic derivative
aaguuucgganucccuucaagganuccgggcaccuuan

SEQ ID NO: 11177 - RNA, 36 nt, Artificial Sequence
  Description of Artificial Sequence:  Enzymatic Nucleic Acid
  misc_feature (1)..(4): Phosphorothioate 3'-Internucleotide Linkage
  misc_feature (1)..(9): 2'-O-Methyl
  misc_feature (11)..(12): 2'-O-Methyl
  misc_feature (18)..(22): 2'-O-Methyl
  misc_feature (24)..(25): 2'-O-Methyl
  misc_feature (30)..(35): 2'-O-Methyl
  misc_feature (10)..(10): n stands for hexaethylene glycol spacer
  misc_feature (23)..(23): n stands for hexaethylene glycol spacer
  misc_feature (13)..(17): 2'-deoxy-2'-amino
  misc_feature (26)..(26): 2'-deoxy-2'-amino
  misc_feature (36)..(36): n stands for inverted deoxyabasic derivative
aguuucgganucccuucaagganuccgggcaccuun

SEQ ID NO: 11178 - RNA, 37 nt, Artificial Sequence
  Description of Artificial Sequence:  Enzymatic Nucleic Acid
  misc_feature (1)..(4): Phosphorothioate 3'-Internucleotide Linkage
  misc_feature (1)..(8): 2'-O-Methyl
  misc_feature (12)..(12): 2'-O-Methyl
  misc_feature (14)..(26): 2'-O-Methyl
  misc_feature (28)..(29): 2'-O-Methyl
  misc_feature (31)..(36): 2'-O-Methyl
  misc_feature (9)..(9): 2'-deoxy-2'-C-Allyl
  misc_feature (37)..(37): n stands for inverted deoxyabasic derivative
uccaugccugaugaggccguuaggccgaaacgugcan

SEQ ID NO: 11179 - RNA, 35 nt, Artificial Sequence
  Description of Artificial Sequence:  Enzymatic Nucleic Acid
  misc_feature (1)..(4): Phosphorothioate 3'-Internucleotide Linkage
  misc_feature (1)..(7): 2'-O-Methyl
  misc_feature (11)..(11): 2'-O-Methyl
  misc_feature (13)..(25): 2'-O-Methyl
  misc_feature (27)..(28): 2'-O-Methyl
  misc_feature (30)..(34): 2'-O-Methyl
  misc_feature (8)..(8): 2'-deoxy-2'-C-Allyl
  misc_feature (35)..(35): n stands for inverted deoxyabasic derivative
ccaccccugaugaggccguuaggccgaaaggcacn

SEQ ID NO: 11180 - RNA, 33 nt, Artificial Sequence
  Description of Artificial Sequence:  Enzymatic Nucleic Acid
  misc_feature (1)..(4): Phosphorothioate 3'-Internucleotide Linkage
  misc_feature (1)..(7): 2'-O-Methyl
  misc_feature (11)..(11): 2'-O-Methyl
  misc_feature (13)..(23): 2'-O-Methyl
  misc_feature (25)..(26): 2'-O-Methyl
  misc_feature (28)..(32): 2'-O-Methyl
  misc_feature (8)..(8): 2'-deoxy-2'-C-Allyl
  misc_feature (33)..(33): n stands for inverted deoxyabasic derivative
ccaugccugaugaggcguuagccgaaacgugcn

SEQ ID NO: 11181 - RNA, 35 nt, Artificial Sequence
  Description of Artificial Sequence:  Enzymatic Nucleic Acid
  misc_feature (1)..(4): Phosphorothioate 3'-Internucleotide Linkage
  misc_feature (1)..(8): 2'-O-Methyl
  misc_feature (12)..(12): 2'-O-Methyl
  misc_feature (14)..(24): 2'-O-Methyl
  misc_feature (26)..(27): 2'-O-Methyl
  misc_feature (29)..(34): 2'-O-Methyl
  misc_feature (9)..(9): 2'-deoxy-2'-C-Allyl
  misc_feature (35)..(35): n stands for inverted deoxyabasic derivative
uccaugccugaugaggcguuagccgaaacgugcan

SEQ ID NO: 11182 - RNA, 33 nt, Artificial Sequence
  Description of Artificial Sequence:  Enzymatic Nucleic Acid
  misc_feature (1)..(4): Phosphorothioate 3'-Internucleotide Linkage
  misc_feature (1)..(7): 2'-O-Methyl
  misc_feature (11)..(11): 2'-O-Methyl
  misc_feature (13)..(23): 2'-O-Methyl
  misc_feature (25)..(26): 2'-O-Methyl
  misc_feature (28)..(32): 2'-O-Methyl
  misc_feature (8)..(8): 2'-deoxy-2'-C-Allyl
  misc_feature (33)..(33): n stands for inverted deoxyabasic derivative
ccaccccugaugaggcguuagccgaaaggcacn

SEQ ID NO: 11183 - RNA, 35 nt, Artificial Sequence
  Description of Artificial Sequence:  Enzymatic Nucleic Acid
  misc_feature (1)..(4): Phosphorothioate 3'-Internucleotide Linkage
  misc_feature (1)..(8): 2'-O-Methyl
  misc_feature (12)..(12): 2'-O-Methyl
  misc_feature (14)..(24): 2'-O-Methyl
  misc_feature (26)..(27): 2'-O-Methyl
  misc_feature (29)..(34): 2'-O-Methyl
  misc_feature (9)..(9): 2'-deoxy-2'-C-Allyl
  misc_feature (35)..(35): n stands for inverted deoxyabasic derivative
gccaccccugaugaggcguuagccgaaaggcacan

SEQ ID NO: 11184 - RNA, 37 nt, Artificial Sequence; identical to SEQ ID NO: 10834
  Description of Artificial Sequence:  Enzymatic Nucleic Acid
  misc_feature (1)..(7): 2'-O-Methyl
  misc_feature (15)..(26): 2'-O-Methyl
  misc_feature (31)..(36): 2'-O-Methyl
  misc_feature (37)..(37): n stands for inverted deoxyabasic derivative

SEQ ID NO: 11185 - RNA, 37 nt, Artificial Sequence; identical to SEQ ID NO: 10837
  Description of Artificial Sequence:  Enzymatic Nucleic Acid
  misc_feature (1)..(7): 2'-O-Methyl
  misc_feature (15)..(26): 2'-O-Methyl
  misc_feature (31)..(36): 2'-O-Methyl
  misc_feature (37)..(37): n stands for inverted deoxyabasic derivative

SEQ ID NO: 11186 - RNA, 37 nt, Artificial Sequence; identical to SEQ ID NO: 10841
  Description of Artificial Sequence:  Enzymatic Nucleic Acid
  misc_feature (1)..(7): 2'-O-Methyl
  misc_feature (15)..(26): 2'-O-Methyl
  misc_feature (31)..(36): 2'-O-Methyl
  misc_feature (37)..(37): n stands for inverted deoxyabasic derivative

SEQ ID NO: 11187 - RNA, 37 nt, Artificial Sequence
  Description of Artificial Sequence:  Enzymatic Nucleic Acid
  misc_feature (1)..(7): 2'-O-Methyl
  misc_feature (15)..(26): 2'-O-Methyl
  misc_feature (31)..(36): 2'-O-Methyl
  misc_feature (30)..(30): n stands for inosine
  misc_feature (37)..(37): n stands for inverted deoxyabasic derivative
uggaaagcugaugaggccguuaggccgaanguggagn

SEQ ID NO: 11188 - RNA, 37 nt, Artificial Sequence
  Description of Artificial Sequence:  Enzymatic Nucleic Acid
  misc_feature (1)..(7): 2'-O-Methyl
  misc_feature (15)..(26): 2'-O-Methyl
  misc_feature (31)..(36): 2'-O-Methyl
  misc_feature (30)..(30): n stands for inosine
  misc_feature (37)..(37): n stands for inverted deoxyabasic derivative
uggugagcugaugaggccguuaggccgaanacuggan

SEQ ID NO: 11189 - RNA, 35 nt, Artificial Sequence
  Description of Artificial Sequence:  Enzymatic Nucleic Acid
  misc_feature (1)..(4): Phosphorothioate 3'-Internucleotide Linkage
  misc_feature (1)..(8): 2'-O-Methyl
  misc_feature (12)..(12): 2'-O-Methyl
  misc_feature (14)..(24): 2'-O-Methyl
  misc_feature (26)..(27): 2'-O-Methyl
  misc_feature (29)..(34): 2'-O-Methyl
  misc_feature (9)..(9): 2'-deoxy-2'-C-Allyl
  misc_feature (35)..(35): n stands for inverted deoxyabasic derivative
gaaaauucugaugagccguuaggcgaaagagaagn

SEQ ID NO: 11190 - RNA, 37 nt, Artificial Sequence; identical to SEQ ID NO: 10887
  Description of Artificial Sequence:  Enzymatic Nucleic Acid
  misc_feature (1)..(4): Phosphorothioate 3'-Internucleotide Linkage
  misc_feature (1)..(8): 2'-O-Methyl
  misc_feature (14)..(26): 2'-O-Methyl
  misc_feature (28)..(29): 2'-O-Methyl
  misc_feature (31)..(36): 2'-O-Methyl
  misc_feature (9)..(9): 2'-deoxy-2'-amino
  misc_feature (12)..(12): 2'-deoxy-2'-amino
  misc_feature (37)..(37): n stands for inverted deoxyabasic derivative

SEQ ID NO: 11191 - RNA, 35 nt, Artificial Sequence
  Description of Artificial Sequence:  Enzymatic Nucleic Acid
  misc_feature (1)..(4): Phosphorothioate 3'-Internucleotide Linkage
  misc_feature (1)..(8): 2'-O-Methyl
  misc_feature (12)..(12): 2'-O-Methyl
  misc_feature (14)..(24): 2'-O-Methyl
  misc_feature (26)..(27): 2'-O-Methyl
  misc_feature (29)..(34): 2'-O-Methyl
  misc_feature (9)..(9): 2'-deoxy-2'-C-Allyl
  misc_feature (35)..(35): n stands for inverted deoxyabasic derivative
gaaaauucugaugagccgaaaggcgaaagagaagn

SEQ ID NO: 11192 - RNA, 37 nt, Artificial Sequence
  Description of Artificial Sequence:  Enzymatic Nucleic Acid
  misc_feature (1)..(4): Phosphorothioate 3'-Internucleotide Linkage
  misc_feature (1)..(8): 2'-O-Methyl
  misc_feature (12)..(12): 2'-O-Methyl
  misc_feature (14)..(26): 2'-O-Methyl
  misc_feature (28)..(29): 2'-O-Methyl
  misc_feature (31)..(36): 2'-O-Methyl
  misc_feature (9)..(9): 2'-deoxy-2'-C-Allyl
  misc_feature (37)..(37): n stands for inverted deoxyabasic derivative
gaaaauucugaugaggccgaaaggccgaaagagaagn

SEQ ID NO: 11193 - RNA, 33 nt, Artificial Sequence
  Description of Artificial Sequence:  Enzymatic Nucleic Acid
  misc_feature (1)..(4): Phosphorothioate 3'-Internucleotide Linkage
  misc_feature (1)..(7): 2'-O-Methyl
  misc_feature (11)..(11): 2'-O-Methyl
  misc_feature (13)..(23): 2'-O-Methyl
  misc_feature (25)..(26): 2'-O-Methyl
  misc_feature (28)..(32): 2'-O-Methyl
  misc_feature (8)..(8): 2'-deoxy-2'-C-Allyl
  misc_feature (33)..(33): n stands for inverted deoxyabasic derivative
aaaauucugaugagccguuaggcgaaagagaan

SEQ ID NO: 11194 - RNA, 33 nt, Artificial Sequence
  Description of Artificial Sequence:  Enzymatic Nucleic Acid
  misc_feature (1)..(4): Phosphorothioate 3'-Internucleotide Linkage
  misc_feature (1)..(7): 2'-O-Methyl
  misc_feature (11)..(11): 2'-O-Methyl
  misc_feature (13)..(23): 2'-O-Methyl
  misc_feature (25)..(26): 2'-O-Methyl
  misc_feature (28)..(32): 2'-O-Methyl
  misc_feature (8)..(8): 2'-deoxy-2'-C-Allyl
  misc_feature (33)..(33): n stands for inverted deoxyabasic derivative
aaaauucugaugagccgaaaggcgaaagagaan

SEQ ID NO: 11195 - RNA, 35 nt, Artificial Sequence
  Description of Artificial Sequence:  Enzymatic Nucleic Acid
  misc_feature (1)..(4): Phosphorothioate 3'-Internucleotide Linkage
  misc_feature (1)..(7): 2'-O-Methyl
  misc_feature (11)..(11): 2'-O-Methyl
  misc_feature (13)..(25): 2'-O-Methyl
  misc_feature (27)..(28): 2'-O-Methyl
  misc_feature (30)..(34): 2'-O-Methyl
  misc_feature (8)..(8): 2'-deoxy-2'-C-Allyl
  misc_feature (35)..(35): n stands for inverted deoxyabasic derivative
aaaauucugaugaggccgaaaggccgaaagagaan

SEQ ID NO: 11196 - RNA, 36 nt, Artificial Sequence
  Description of Artificial Sequence:  Enzymatic Nucleic Acid
  misc_feature (1)..(8): 2'-O-Methyl
  misc_feature (12)..(16): 2'-O-Methyl
  misc_feature (18)..(26): 2'-O-Methyl
  misc_feature (28)..(35): 2'-O-Methyl
  misc_feature (36)..(36): n stands for inverted deoxyabasic derivative
uggaggaugauggcaugcacuaugcgcgaacaggun

SEQ ID NO: 11197 - RNA, 36 nt, Artificial Sequence
  Description of Artificial Sequence:  Enzymatic Nucleic Acid
  misc_feature (1)..(8): 2'-O-Methyl
  misc_feature (12)..(16): 2'-O-Methyl
  misc_feature (18)..(26): 2'-O-Methyl
  misc_feature (28)..(35): 2'-O-Methyl
  misc_feature (36)..(36): n stands for inverted deoxyabasic derivative
gaggagaugauggcaugcacuaugcgcgacaaaggn

SEQ ID NO: 11198 - RNA, 36 nt, Artificial Sequence
  Description of Artificial Sequence:  Enzymatic Nucleic Acid
  misc_feature (1)..(8): 2'-O-Methyl
  misc_feature (12)..(16): 2'-O-Methyl
  misc_feature (18)..(26): 2'-O-Methyl
  misc_feature (28)..(35): 2'-O-Methyl
  misc_feature (36)..(36): n stands for inverted deoxyabasic derivative
aguaggaugauggcaugcacuaugcgcgaugaacan

SEQ ID NO: 11199 - RNA, 36 nt, Artificial Sequence
  Description of Artificial Sequence:  Enzymatic Nucleic Acid
  misc_feature (1)..(8): 2'-O-Methyl
  misc_feature (12)..(16): 2'-O-Methyl
  misc_feature (18)..(26): 2'-O-Methyl
  misc_feature (28)..(35): 2'-O-Methyl
  misc_feature (36)..(36): n stands for inverted deoxyabasic derivative
aagaaguugauggcaugcacuaugcgcgagaaggcn

SEQ ID NO: 11200 - RNA, 36 nt, Artificial Sequence
  Description of Artificial Sequence:  Enzymatic Nucleic Acid
  misc_feature (1)..(8): 2'-O-Methyl
  misc_feature (12)..(16): 2'-O-Methyl
  misc_feature (18)..(26): 2'-O-Methyl
  misc_feature (28)..(35): 2'-O-Methyl
  misc_feature (36)..(36): n stands for inverted deoxyabasic derivative
guggaggugauggcaugcacuaugcgcgaggaggan

SEQ ID NO: 11201 - RNA, 36 nt, Artificial Sequence
  Description of Artificial Sequence:  Enzymatic Nucleic Acid
  misc_feature (1)..(16): 2'-O-Methyl
  misc_feature (18)..(23): 2'-O-Methyl
  misc_feature (26)..(26): 2'-O-Methyl
  misc_feature (28)..(35): 2'-O-Methyl
  misc_feature (17)..(17): 2'-deoxy-2'-amino
  misc_feature (27)..(27): 2'-deoxy-2'-amino
  misc_feature (36)..(36): n stands for inverted deoxyabasic derivative
ugagugagccgaaaggcgagugaggucuuggagaun

SEQ ID NO: 11202 - RNA, 36 nt, Artificial Sequence
  Description of Artificial Sequence:  Enzymatic Nucleic Acid
  misc_feature (1)..(16): 2'-O-Methyl
  misc_feature (18)..(23): 2'-O-Methyl
  misc_feature (26)..(26): 2'-O-Methyl
  misc_feature (28)..(35): 2'-O-Methyl
  misc_feature (17)..(17): 2'-deoxy-2'-amino
  misc_feature (27)..(27): 2'-deoxy-2'-amino
  misc_feature (36)..(36): n stands for inverted deoxyabasic derivative
uggaggagccgaaaggcgagugaggucuaacaggun

SEQ ID NO: 11203 - RNA, 36 nt, Artificial Sequence
  Description of Artificial Sequence:  Enzymatic Nucleic Acid
  misc_feature (1)..(16): 2'-O-Methyl
  misc_feature (18)..(23): 2'-O-Methyl
  misc_feature (26)..(26): 2'-O-Methyl
  misc_feature (28)..(35): 2'-O-Methyl
  misc_feature (17)..(17): 2'-deoxy-2'-amino
  misc_feature (27)..(27): 2'-deoxy-2'-amino
  misc_feature (36)..(36): n stands for inverted deoxyabasic derivative
caggauggccgaaaggcgagugaggucuagaggaan

SEQ ID NO: 11204 - RNA, 36 nt, Artificial Sequence
  Description of Artificial Sequence:  Enzymatic Nucleic Acid
  misc_feature (1)..(16): 2'-O-Methyl
  misc_feature (18)..(23): 2'-O-Methyl
  misc_feature (26)..(26): 2'-O-Methyl
  misc_feature (28)..(35): 2'-O-Methyl
  misc_feature (17)..(17): 2'-deoxy-2'-amino
  misc_feature (27)..(27): 2'-deoxy-2'-amino
  misc_feature (36)..(36): n stands for inverted deoxyabasic derivative
gaggagagccgaaaggcgagugaggucuacaaaggn

SEQ ID NO: 11205 - RNA, 36 nt, Artificial Sequence
  Description of Artificial Sequence:  Enzymatic Nucleic Acid
  misc_feature (1)..(16): 2'-O-Methyl
  misc_feature (18)..(23): 2'-O-Methyl
  misc_feature (26)..(26): 2'-O-Methyl
  misc_feature (28)..(35): 2'-O-Methyl
  misc_feature (17)..(17): 2'-deoxy-2'-amino
  misc_feature (27)..(27): 2'-deoxy-2'-amino
  misc_feature (36)..(36): n stands for inverted deoxyabasic derivative
aaccuaagccgaaaggcgagugaggucucuccuccn

SEQ ID NO: 11206 - RNA, 37 nt, Artificial Sequence
  Description of Artificial Sequence:  Enzymatic Nucleic Acid
  misc_feature (1)..(7): 2'-O-Methyl
  misc_feature (15)..(26): 2'-O-Methyl
  misc_feature (31)..(36): 2'-O-Methyl
  misc_feature (30)..(30): n stands for inosine
  misc_feature (37)..(37): n stands for inverted deoxyabasic derivative
gaugcagcugaugaggccguuaggccgaangaagaun

SEQ ID NO: 11207 - RNA, 37 nt, Artificial Sequence
  Description of Artificial Sequence:  Enzymatic Nucleic Acid
  misc_feature (1)..(7): 2'-O-Methyl
  misc_feature (15)..(26): 2'-O-Methyl
  misc_feature (31)..(36): 2'-O-Methyl
  misc_feature (30)..(30): n stands for inosine
  misc_feature (37)..(37): n stands for inverted deoxyabasic derivative
augaacacugaugaggccguuaggccgaanagaugan

SEQ ID NO: 11208 - RNA, 37 nt, Artificial Sequence
  Description of Artificial Sequence:  Enzymatic Nucleic Acid
  misc_feature (1)..(7): 2'-O-Methyl
  misc_feature (15)..(26): 2'-O-Methyl
  misc_feature (31)..(36): 2'-O-Methyl
  misc_feature (30)..(30): n stands for inosine
  misc_feature (37)..(37): n stands for inverted deoxyabasic derivative
aggaggacugaugaggccguuaggccgaanagcugcn

SEQ ID NO: 11209 - RNA, 37 nt, Artificial Sequence
  Description of Artificial Sequence:  Enzymatic Nucleic Acid
  misc_feature (1)..(7): 2'-O-Methyl
  misc_feature (15)..(26): 2'-O-Methyl
  misc_feature (31)..(36): 2'-O-Methyl
  misc_feature (37)..(37): n stands for inverted deoxyabasic derivative
guugacacugaugaggccguuaggccgaaagcugacn

SEQ ID NO: 11210 - RNA, 37 nt, Artificial Sequence
  Description of Artificial Sequence:  Enzymatic Nucleic Acid
  misc_feature (1)..(7): 2'-O-Methyl
  misc_feature (15)..(26): 2'-O-Methyl
  misc_feature (31)..(36): 2'-O-Methyl
  misc_feature (37)..(37): n stands for inverted deoxyabasic derivative
cucuggacugaugaggccguuaggccgaaaauacggn

SEQ ID NO: 11211 - DNA, 30 bp, Artificial Sequence
  Description of Artificial Sequence:  Enzymatic Nucleic Acid
  misc_feature (1)..(7): 2'-O-Methyl
  misc_feature (23)..(29): 2'-O-Methyl
  misc_feature (30)..(30): n stands for inverted deoxyabasic derivative
uggaggaggctagctacaacgaaacaggun

SEQ ID NO: 11212 - DNA, 30 bp, Artificial Sequence
  Description of Artificial Sequence:  Enzymatic Nucleic Acid
  misc_feature (1)..(7): 2'-O-Methyl
  misc_feature (23)..(29): 2'-O-Methyl
  misc_feature (30)..(30): n stands for inverted deoxyabasic derivative
ugagugaggctagctacaacgauggagaun

SEQ ID NO: 11213 - DNA, 30 bp, Artificial Sequence
  Description of Artificial Sequence:  Enzymatic Nucleic Acid
  misc_feature (1)..(7): 2'-O-Methyl
  misc_feature (23)..(29): 2'-O-Methyl
  misc_feature (30)..(30): n stands for inverted deoxyabasic derivative
gagaugaggctagctacaacgauaggcagn

SEQ ID NO: 11214 - DNA, 30 bp, Artificial Sequence
  Description of Artificial Sequence:  Enzymatic Nucleic Acid
  misc_feature (1)..(7): 2'-O-Methyl
  misc_feature (23)..(29): 2'-O-Methyl
  misc_feature (30)..(30): n stands for inverted deoxyabasic derivative
ggacaaaggctagctacaacgauggaggan

SEQ ID NO: 11215 - DNA, 30 bp, Artificial Sequence
  Description of Artificial Sequence:  Enzymatic Nucleic Acid
  misc_feature (1)..(7): 2'-O-Methyl
  misc_feature (23)..(29): 2'-O-Methyl
  misc_feature (30)..(30): n stands for inverted deoxyabasic derivative
gaggagaggctagctacaacgaacaaaggn

SEQ ID NO: 11216 - RNA, 4 nt, Artificial Sequence
  Description of Artificial Sequence:  HBV Decoy Nucleic Acid
auuc

SEQ ID NO: 11217 - RNA, 4 nt, Artificial Sequence
  Description of Artificial Sequence:  HBV Decoy Nucleic Acid
cauu

SEQ ID NO: 11218 - RNA, 4 nt, Artificial Sequence
  Description of Artificial Sequence:  HBV Decoy Nucleic Acid
ucau

SEQ ID NO: 11219 - RNA, 4 nt, Artificial Sequence
  Description of Artificial Sequence:  HBV Decoy Nucleic Acid
uuca

SEQ ID NO: 11220 - RNA, 5 nt, Artificial Sequence
  Description of Artificial Sequence:  HBV Decoy Nucleic Acid
auuca

SEQ ID NO: 11221 - RNA, 5 nt, Artificial Sequence
  Description of Artificial Sequence:  HBV Decoy Nucleic Acid
cauuc

SEQ ID NO: 11222 - RNA, 5 nt, Artificial Sequence
  Description of Artificial Sequence:  HBV Decoy Nucleic Acid
ucauu

SEQ ID NO: 11223 - RNA, 5 nt, Artificial Sequence
  Description of Artificial Sequence:  HBV Decoy Nucleic Acid
uucau

SEQ ID NO: 11224 - RNA, 6 nt, Artificial Sequence
  Description of Artificial Sequence:  HBV Decoy Nucleic Acid
auucau

SEQ ID NO: 11225 - RNA, 6 nt, Artificial Sequence
  Description of Artificial Sequence:  HBV Decoy Nucleic Acid
cauuca

SEQ ID NO: 11226 - RNA, 6 nt, Artificial Sequence
  Description of Artificial Sequence:  HBV Decoy Nucleic Acid
ucauuc

SEQ ID NO: 11227 - RNA, 6 nt, Artificial Sequence
  Description of Artificial Sequence:  HBV Decoy Nucleic Acid
uucauu

SEQ ID NO: 11228 - RNA, 7 nt, Artificial Sequence
  Description of Artificial Sequence:  HBV Decoy Nucleic Acid
auucauu

SEQ ID NO: 11229 - RNA, 7 nt, Artificial Sequence
  Description of Artificial Sequence:  HBV Decoy Nucleic Acid
cauucau

SEQ ID NO: 11230 - RNA, 7 nt, Artificial Sequence
  Description of Artificial Sequence:  HBV Decoy Nucleic Acid
ucauuca

SEQ ID NO: 11231 - RNA, 7 nt, Artificial Sequence
  Description of Artificial Sequence:  HBV Decoy Nucleic Acid
uucauuc

SEQ ID NO: 11232 - RNA, 8 nt, Artificial Sequence
  Description of Artificial Sequence:  HBV Decoy Nucleic Acid
auucauuc

SEQ ID NO: 11233 - RNA, 8 nt, Artificial Sequence
  Description of Artificial Sequence:  HBV Decoy Nucleic Acid
cauucauu

SEQ ID NO: 11234 - RNA, 8 nt, Artificial Sequence
  Description of Artificial Sequence:  HBV Decoy Nucleic Acid
ucauucau

SEQ ID NO: 11235 - RNA, 8 nt, Artificial Sequence
  Description of Artificial Sequence:  HBV Decoy Nucleic Acid
uucauuca

SEQ ID NO: 11236 - RNA, 9 nt, Artificial Sequence
  Description of Artificial Sequence:  HBV Decoy Nucleic Acid
auucauuca

SEQ ID NO: 11237 - RNA, 9 nt, Artificial Sequence
  Description of Artificial Sequence:  HBV Decoy Nucleic Acid
cauucauuc

SEQ ID NO: 11238 - RNA, 9 nt, Artificial Sequence
  Description of Artificial Sequence:  HBV Decoy Nucleic Acid
ucauucauu

SEQ ID NO: 11239 - RNA, 9 nt, Artificial Sequence
  Description of Artificial Sequence:  HBV Decoy Nucleic Acid
uucauucau

SEQ ID NO: 11240 - RNA, 10 nt, Artificial Sequence
  Description of Artificial Sequence:  HBV Decoy Nucleic Acid
auucauucau

SEQ ID NO: 11241 - RNA, 10 nt, Artificial Sequence
  Description of Artificial Sequence:  HBV Decoy Nucleic Acid
cauucauuca

SEQ ID NO: 11242 - RNA, 10 nt, Artificial Sequence
  Description of Artificial Sequence:  HBV Decoy Nucleic Acid
ucauucauuc

SEQ ID NO: 11243 - RNA, 10 nt, Artificial Sequence
  Description of Artificial Sequence:  HBV Decoy Nucleic Acid
uucauucauu

SEQ ID NO: 11244 - RNA, 11 nt, Artificial Sequence
  Description of Artificial Sequence:  HBV Decoy Nucleic Acid
auucauucauu

SEQ ID NO: 11245 - RNA, 11 nt, Artificial Sequence
  Description of Artificial Sequence:  HBV Decoy Nucleic Acid
cauucauucau

SEQ ID NO: 11246 - RNA, 11 nt, Artificial Sequence
  Description of Artificial Sequence:  HBV Decoy Nucleic Acid
ucauucauuca

SEQ ID NO: 11247 - RNA, 11 nt, Artificial Sequence
  Description of Artificial Sequence:  HBV Decoy Nucleic Acid
uucauucauuc

SEQ ID NO: 11248 - RNA, 12 nt, Artificial Sequence
  Description of Artificial Sequence:  HBV Decoy Nucleic Acid
auucauucauuc

SEQ ID NO: 11249 - RNA, 12 nt, Artificial Sequence
  Description of Artificial Sequence:  HBV Decoy Nucleic Acid
cauucauucauu

SEQ ID NO: 11250 - RNA, 12 nt, Artificial Sequence
  Description of Artificial Sequence:  HBV Decoy Nucleic Acid
ucauucauucau

SEQ ID NO: 11251 - RNA, 12 nt, Artificial Sequence
  Description of Artificial Sequence:  HBV Decoy Nucleic Acid
uucauucauuca

SEQ ID NO: 11252 - RNA, 13 nt, Artificial Sequence
  Description of Artificial Sequence:  HBV Decoy Nucleic Acid
auucauucauuca

SEQ ID NO: 11253 - RNA, 13 nt, Artificial Sequence
  Description of Artificial Sequence:  HBV Decoy Nucleic Acid
cauucauucauuc

SEQ ID NO: 11254 - RNA, 13 nt, Artificial Sequence
  Description of Artificial Sequence:  HBV Decoy Nucleic Acid
ucauucauucauu

SEQ ID NO: 11255 - RNA, 13 nt, Artificial Sequence
  Description of Artificial Sequence:  HBV Decoy Nucleic Acid
uucauucauucau

SEQ ID NO: 11256 - RNA, 14 nt, Artificial Sequence
  Description of Artificial Sequence:  HBV Decoy Nucleic Acid
auucauucauucau

SEQ ID NO: 11257 - RNA, 14 nt, Artificial Sequence
  Description of Artificial Sequence:  HBV Decoy Nucleic Acid
cauucauucauuca

SEQ ID NO: 11258 - RNA, 14 nt, Artificial Sequence
  Description of Artificial Sequence:  HBV Decoy Nucleic Acid
ucauucauucauuc

SEQ ID NO: 11259 - RNA, 14 nt, Artificial Sequence
  Description of Artificial Sequence:  HBV Decoy Nucleic Acid
uucauucauucauu

SEQ ID NO: 11260 - RNA, 15 nt, Artificial Sequence
  Description of Artificial Sequence:  HBV Decoy Nucleic Acid
auucauucauucauu

SEQ ID NO: 11261 - RNA, 15 nt, Artificial Sequence
  Description of Artificial Sequence:  HBV Decoy Nucleic Acid
cauucauucauucau

SEQ ID NO: 11262 - RNA, 15 nt, Artificial Sequence
  Description of Artificial Sequence:  HBV Decoy Nucleic Acid
ucauucauucauuca

SEQ ID NO: 11263 - RNA, 15 nt, Artificial Sequence
  Description of Artificial Sequence:  HBV Decoy Nucleic Acid
uucauucauucauuc

SEQ ID NO: 11264 - RNA, 16 nt, Artificial Sequence
  Description of Artificial Sequence:  HBV Decoy Nucleic Acid
auucauucauucauuc

SEQ ID NO: 11265 - RNA, 16 nt, Artificial Sequence
  Description of Artificial Sequence:  HBV Decoy Nucleic Acid
cauucauucauucauu

SEQ ID NO: 11266 - RNA, 16 nt, Artificial Sequence
  Description of Artificial Sequence:  HBV Decoy Nucleic Acid
ucauucauucauucau

SEQ ID NO: 11267 - RNA, 16 nt, Artificial Sequence
  Description of Artificial Sequence:  HBV Decoy Nucleic Acid
uucauucauucauuca

SEQ ID NO: 11268 - RNA, 17 nt, Artificial Sequence
  Description of Artificial Sequence:  HBV Decoy Nucleic Acid
auucauucauucauuca

SEQ ID NO: 11269 - RNA, 17 nt, Artificial Sequence
  Description of Artificial Sequence:  HBV Decoy Nucleic Acid
cauucauucauucauuc

SEQ ID NO: 11270 - RNA, 17 nt, Artificial Sequence
  Description of Artificial Sequence:  HBV Decoy Nucleic Acid
ucauucauucauucauu

SEQ ID NO: 11271 - RNA, 17 nt, Artificial Sequence
  Description of Artificial Sequence:  HBV Decoy Nucleic Acid
uucauucauucauucau

SEQ ID NO: 11272 - RNA, 18 nt, Artificial Sequence
  Description of Artificial Sequence:  HBV Decoy Nucleic Acid
auucauucauucauucau

SEQ ID NO: 11273 - RNA, 18 nt, Artificial Sequence
  Description of Artificial Sequence:  HBV Decoy Nucleic Acid
cauucauucauucauuca

SEQ ID NO: 11274 - RNA, 18 nt, Artificial Sequence
  Description of Artificial Sequence:  HBV Decoy Nucleic Acid
ucauucauucauucauuc

SEQ ID NO: 11275 - RNA, 18 nt, Artificial Sequence
  Description of Artificial Sequence:  HBV Decoy Nucleic Acid
uucauucauucauucauu

SEQ ID NO: 11276 - RNA, 19 nt, Artificial Sequence
  Description of Artificial Sequence:  HBV Decoy Nucleic Acid
auucauucauucauucauu

SEQ ID NO: 11277 - RNA, 19 nt, Artificial Sequence
  Description of Artificial Sequence:  HBV Decoy Nucleic Acid
cauucauucauucauucau

SEQ ID NO: 11278 - RNA, 19 nt, Artificial Sequence
  Description of Artificial Sequence:  HBV Decoy Nucleic Acid
ucauucauucauucauuca

SEQ ID NO: 11279 - RNA, 19 nt, Artificial Sequence
  Description of Artificial Sequence:  HBV Decoy Nucleic Acid
uucauucauucauucauuc

SEQ ID NO: 11280 - RNA, 20 nt, Artificial Sequence
  Description of Artificial Sequence:  HBV Decoy Nucleic Acid
auucauucauucauucauuc

SEQ ID NO: 11281 - RNA, 20 nt, Artificial Sequence
  Description of Artificial Sequence:  HBV Decoy Nucleic Acid
cauucauucauucauucauu

SEQ ID NO: 11282 - RNA, 20 nt, Artificial Sequence
  Description of Artificial Sequence:  HBV Decoy Nucleic Acid
ucauucauucauucauucau

SEQ ID NO: 11283 - RNA, 20 nt, Artificial Sequence
  Description of Artificial Sequence:  HBV Decoy Nucleic Acid
uucauucauucauucauuca

SEQ ID NO: 11284 - RNA, 21 nt, Artificial Sequence
  Description of Artificial Sequence:  HBV Decoy Nucleic Acid
auucauucauucauucauuca

SEQ ID NO: 11285 - RNA, 21 nt, Artificial Sequence
  Description of Artificial Sequence:  HBV Decoy Nucleic Acid
cauucauucauucauucauuc

SEQ ID NO: 11286 - RNA, 21 nt, Artificial Sequence
  Description of Artificial Sequence:  HBV Decoy Nucleic Acid
ucauucauucauucauucauu

SEQ ID NO: 11287 - RNA, 21 nt, Artificial Sequence
  Description of Artificial Sequence:  HBV Decoy Nucleic Acid
uucauucauucauucauucau

SEQ ID NO: 11288 - RNA, 22 nt, Artificial Sequence
  Description of Artificial Sequence:  HBV Decoy Nucleic Acid
cauucauucauucauucauuca

SEQ ID NO: 11289 - RNA, 22 nt, Artificial Sequence
  Description of Artificial Sequence:  HBV Decoy Nucleic Acid
ucauucauucauucauucauuc

SEQ ID NO: 11290 - RNA, 22 nt, Artificial Sequence
  Description of Artificial Sequence:  HBV Decoy Nucleic Acid
uucauucauucauucauucauu

SEQ ID NO: 11291 - RNA, 23 nt, Artificial Sequence
  Description of Artificial Sequence:  HBV Decoy Nucleic Acid
ucauucauucauucauucauuca

SEQ ID NO: 11292 - RNA, 23 nt, Artificial Sequence
  Description of Artificial Sequence:  HBV Decoy Nucleic Acid
uucauucauucauucauucauuc

SEQ ID NO: 11293 - RNA, 24 nt, Artificial Sequence
  Description of Artificial Sequence:  HBV Decoy Nucleic Acid
uucauucauucauucauucauuca

SEQ ID NO: 11294 - RNA, 12 nt, Artificial Sequence
  Description of Artificial Sequence:  HBV Decoy Nucleic Acid
  misc_feature (1)..(11): Phosphorothioate 3'-Internucleotide Linkage
  misc_feature (1)..(11): 2'-O-Allyl
  misc_feature (12)..(12): n stands for inverted deoxyabasic derivative
gcagaggugaan

SEQ ID NO: 11295 - RNA, 12 nt, Artificial Sequence
  Description of Artificial Sequence:  HBV Decoy Nucleic Acid
  misc_feature (1)..(11): Phosphorothioate 3'-Internucleotide Linkage
  misc_feature (1)..(11): 2'-O-Allyl
  misc_feature (12)..(12): n stands for inverted deoxyabasic derivative
aaguggagacgn

SEQ ID NO: 11296 - RNA, 5 nt, Artificial Sequence
  Description of Artificial Sequence:  HBV Decoy Nucleic Acid
  misc_feature (1)..(4): Phosphorothioate 3'-Internucleotide Linkage
  misc_feature (1)..(4): 2'-O-Allyl
  misc_feature (5)..(5): n stands for inverted deoxyabasic derivative
uucan

SEQ ID NO: 11297 - RNA, 5 nt, Artificial Sequence
  Description of Artificial Sequence:  HBV Decoy Nucleic Acid
  misc_feature (1)..(4): Phosphorothioate 3'-Internucleotide Linkage
  misc_feature (1)..(4): 2'-O-Allyl
  misc_feature (5)..(5): n stands for inverted deoxyabasic derivative
acuun

SEQ ID NO: 11298 - RNA, 9 nt, Artificial Sequence
  Description of Artificial Sequence:  HBV Decoy Nucleic Acid
  misc_feature (1)..(8): Phosphorothioate 3'-Internucleotide Linkage
  misc_feature (1)..(8): 2'-O-Allyl
  misc_feature (9)..(9): n stands for inverted deoxyabasic derivative
uucauucan

SEQ ID NO: 11299 - RNA, 9 nt, Artificial Sequence
  Description of Artificial Sequence:  HBV Decoy Nucleic Acid
  misc_feature (1)..(8): Phosphorothioate 3'-Internucleotide Linkage
  misc_feature (1)..(8): 2'-O-Allyl
  misc_feature (9)..(9): n stands for inverted deoxyabasic derivative
acuuacuun

SEQ ID NO: 11300 - RNA, 13 nt, Artificial Sequence
  Description of Artificial Sequence:  HBV Decoy Nucleic Acid
  misc_feature (1)..(12): Phosphorothioate 3'-Internucleotide Linkage
  misc_feature (1)..(12): 2'-O-Allyl
  misc_feature (13)..(13): n stands for inverted deoxyabasic derivative
uucauucauucan

SEQ ID NO: 11301 - RNA, 13 nt, Artificial Sequence
  Description of Artificial Sequence:  HBV Decoy Nucleic Acid
  misc_feature (1)..(12): Phosphorothioate 3'-Internucleotide Linkage
  misc_feature (1)..(12): 2'-O-Allyl
  misc_feature (13)..(13): n stands for inverted deoxyabasic derivative
acuuacuuacuun

SEQ ID NO: 11302 - RNA, 17 nt, Artificial Sequence
  Description of Artificial Sequence:  HBV Decoy Nucleic Acid
  misc_feature (1)..(16): Phosphorothioate 3'-Internucleotide Linkage
  misc_feature (1)..(16): 2'-O-Allyl
  misc_feature (17)..(17): n stands for inverted deoxyabasic derivative
uucauucauucauucan

SEQ ID NO: 11303 - RNA, 17 nt, Artificial Sequence
  Description of Artificial Sequence:  HBV Decoy Nucleic Acid
  misc_feature (1)..(16): Phosphorothioate 3'-Internucleotide Linkage
  misc_feature (1)..(16): 2'-O-Allyl
  misc_feature (17)..(17): n stands for inverted deoxyabasic derivative
acuuacuuacuuacuun

SEQ ID NO: 11304 - RNA, 5 nt, Artificial Sequence
  Description of Artificial Sequence:  HBV Decoy Nucleic Acid
  misc_feature (1)..(4): Phosphorothioate 3'-Internucleotide Linkage
  misc_feature (1)..(4): 2'-O-Allyl
  misc_feature (5)..(5): n stands for inverted deoxyabasic derivative
ugaan

SEQ ID NO: 11305 - RNA, 5 nt, Artificial Sequence
  Description of Artificial Sequence:  HBV Decoy Nucleic Acid
  misc_feature (1)..(4): Phosphorothioate 3'-Internucleotide Linkage
  misc_feature (1)..(4): 2'-O-Allyl
  misc_feature (5)..(5): n stands for inverted deoxyabasic derivative
aagun

SEQ ID NO: 11306 - RNA, 8 nt, Artificial Sequence
  Description of Artificial Sequence:  HBV Decoy Nucleic Acid
  misc_feature (1)..(7): Phosphorothioate 3'-Internucleotide Linkage
  misc_feature (1)..(7): 2'-O-Allyl
  misc_feature (8)..(8): n stands for inverted deoxyabasic derivative
gcuugaan

SEQ ID NO: 11307 - RNA, 8 nt, Artificial Sequence
  Description of Artificial Sequence:  HBV Decoy Nucleic Acid
  misc_feature (1)..(7): Phosphorothioate 3'-Internucleotide Linkage
  misc_feature (1)..(7): 2'-O-Allyl
  misc_feature (8)..(8): n stands for inverted deoxyabasic derivative
aaguucgn

SEQ ID NO: 11308 - RNA, 12 nt, Artificial Sequence
  Description of Artificial Sequence:  HBV Decoy Nucleic Acid
  misc_feature (1)..(10): Phosphorothioate 3'-Internucleotide Linkage
  misc_feature (1)..(11): 2'-O-Allyl
  misc_feature (12)..(12): n stands for inverted deoxyabasic derivative
ggaggcuugaan

SEQ ID NO: 11309 - RNA, 12 nt, Artificial Sequence
  Description of Artificial Sequence:  HBV Decoy Nucleic Acid
  misc_feature (1)..(11): Phosphorothioate 3'-Internucleotide Linkage
  misc_feature (1)..(11): 2'-O-Allyl
  misc_feature (12)..(12): n stands for inverted deoxyabasic derivative
aaguucggaggn

SEQ ID NO: 11310 - RNA, 37 nt, Artificial Sequence
  Description of Artificial Sequence:  Enzymatic Nucleic Acid
  misc_feature (1)..(4): Phosphorothioate 3'-Internucleotide Linkage
  misc_feature (1)..(8): 2'-O-Methyl
  misc_feature (12)..(12): 2'-O-Methyl
  misc_feature (14)..(26): 2'-O-Methyl
  misc_feature (28)..(29): 2'-O-Methyl
  misc_feature (31)..(36): 2'-O-Methyl
  misc_feature (9)..(9): 2'-deoxy-2'-C-Allyl
  misc_feature (37)..(37): n stands for inverted deoxyabasic derivative
aaugaggcuagugacgccguuaggcggaaaaaugaan

SEQ ID NO: 11311 - RNA, 5 nt, Artificial Sequence
  Description of Artificial Sequence:  HBV Decoy Nucleic Acid
  misc_feature (1)..(4): 2'-O-Methyl
  misc_feature (5)..(5): n stands for inverted deoxyabasic derivative
ugaan

SEQ ID NO: 11312 - RNA, 5 nt, Artificial Sequence
  Description of Artificial Sequence:  HBV Decoy Nucleic Acid
  misc_feature (1)..(4): 2'-O-Methyl
  misc_feature (5)..(5): n stands for inverted deoxyabasic derivative
aagun

SEQ ID NO: 11313 - RNA, 12 nt, Artificial Sequence
  Description of Artificial Sequence:  HBV Decoy Nucleic Acid
  misc_feature (1)..(11): 2'-O-Methyl
  misc_feature (12)..(12): n stands for inverted deoxyabasic derivative
ggaggcuugaan

SEQ ID NO: 11314 - RNA, 12 nt, Artificial Sequence
  Description of Artificial Sequence:  HBV Decoy Nucleic Acid
  misc_feature (1)..(11): 2'-O-Methyl
  misc_feature (12)..(12): n stands for inverted deoxyabasic derivative
aaguucggaggn

SEQ ID NO: 11315 - RNA, 8 nt, Artificial Sequence
  Description of Artificial Sequence:  HBV Decoy Nucleic Acid
  misc_feature (1)..(7): 2'-O-Methyl
  misc_feature (8)..(8): n stands for inverted deoxyabasic derivative
gcuugaan

SEQ ID NO: 11316 - RNA, 8 nt, Artificial Sequence
  Description of Artificial Sequence:  HBV Decoy Nucleic Acid
  misc_feature (1)..(7): 2'-O-Methyl
  misc_feature (8)..(8): n stands for inverted deoxyabasic derivative
aaguucgn

SEQ ID NO: 11317 - RNA, 12 nt, Artificial Sequence
  Description of Artificial Sequence:  HBV Decoy Nucleic Acid
  misc_feature (1)..(11): 2'-O-Methyl
  misc_feature (12)..(12): n stands for inverted deoxyabasic derivative
gcagaggugaan

SEQ ID NO: 11318 - RNA, 12 nt, Artificial Sequence
  Description of Artificial Sequence:  HBV Decoy Nucleic Acid
  misc_feature (1)..(11): 2'-O-Methyl
  misc_feature (12)..(12): n stands for inverted deoxyabasic derivative
aaguggagacgn

SEQ ID NO: 11319 - RNA, 5 nt, Artificial Sequence
  Description of Artificial Sequence:  HBV Decoy Nucleic Acid
  misc_feature (1)..(4): 2'-O-Methyl
  misc_feature (5)..(5): n stands for inverted deoxyabasic derivative
uucan

SEQ ID NO: 11320 - RNA, 5 nt, Artificial Sequence
  Description of Artificial Sequence:  HBV Decoy Nucleic Acid
  misc_feature (1)..(4): 2'-O-Methyl
  misc_feature (5)..(5): n stands for inverted deoxyabasic derivative
acuun

SEQ ID NO: 11321 - RNA, 9 nt, Artificial Sequence
  Description of Artificial Sequence:  HBV Decoy Nucleic Acid
  misc_feature (1)..(8): 2'-O-Methyl
  misc_feature (9)..(9): n stands for inverted deoxyabasic derivative
uucauucan

SEQ ID NO: 11322 - RNA, 9 nt, Artificial Sequence
  Description of Artificial Sequence:  HBV Decoy Nucleic Acid
  misc_feature (1)..(8): 2'-O-Methyl
  misc_feature (9)..(9): n stands for inverted deoxyabasic derivative
acuuacuun

SEQ ID NO: 11323 - RNA, 13 nt, Artificial Sequence
  Description of Artificial Sequence:  HBV Decoy Nucleic Acid
  misc_feature (1)..(12): 2'-O-Methyl
  misc_feature (13)..(13): n stands for inverted deoxyabasic derivative
uucauucauucan

SEQ ID NO: 11324 - RNA, 13 nt, Artificial Sequence
  Description of Artificial Sequence:  HBV Decoy Nucleic Acid
  misc_feature (1)..(12): 2'-O-Methyl
  misc_feature (13)..(13): n stands for inverted deoxyabasic derivative
acuuacuuacuun

SEQ ID NO: 11325 - RNA, 17 nt, Artificial Sequence
  Description of Artificial Sequence:  HBV Decoy Nucleic Acid
  misc_feature (1)..(16): 2'-O-Methyl
  misc_feature (17)..(17): n stands for inverted deoxyabasic derivative
uucauucauucauucan

SEQ ID NO: 11326 - RNA, 17 nt, Artificial Sequence
  Description of Artificial Sequence:  HBV Decoy Nucleic Acid
  misc_feature (1)..(16): 2'-O-Methyl
  misc_feature (17)..(17): n stands for inverted deoxyabasic derivative
acuuacuuacuuacuun

SEQ ID NO: 11327 - RNA, 18 nt, Artificial Sequence
  Description of Artificial Sequence:  HBV DNA Binding Nucleic Acid
  misc_feature (1)..(1): n stands for inverted deoxyabasic derivative
  misc_feature (18)..(18): n stands for inverted deoxyabasic derivative
  misc_feature (2)..(16): Phosphorothioate 3'-Internucleotide Linkage
  misc_feature (2)..(17): 2'-O-Methyl
nuuucuaaguaaacagun

SEQ ID NO: 11328 - RNA, 18 nt, Artificial Sequence
  Description of Artificial Sequence:  HBV DNA Binding Nucleic Acid
  misc_feature (1)..(1): n stands for inverted deoxyabasic derivative
  misc_feature (18)..(18): n stands for inverted deoxyabasic derivative
  misc_feature (2)..(16): Phosphorothioate 3'-Internucleotide Linkage
  misc_feature (2)..(17): 2'-O-Methyl
nacuguuuacuuagaaan

SEQ ID NO: 11329 - RNA, 18 nt, Artificial Sequence
  Description of Artificial Sequence:  HBV DNA Binding Nucleic Acid
  misc_feature (1)..(1): n stands for inverted deoxyabasic derivative
  misc_feature (18)..(18): n stands for inverted deoxyabasic derivative
  misc_feature (2)..(16): Phosphorothioate 3'-Internucleotide Linkage
  misc_feature (2)..(17): 2'-O-Methyl
naaguaacucuauguuan

SEQ ID NO: 11330 - RNA, 20 nt, Artificial Sequence
  Description of Artificial Sequence:  HBV DNA Binding Nucleic Acid
  misc_feature (1)..(1): n stands for inverted deoxyabasic derivative
  misc_feature (20)..(20): n stands for inverted deoxyabasic derivative
  misc_feature (2)..(18): Phosphorothioate 3'-Internucleotide Linkage
  misc_feature (2)..(19): 2'-O-Methyl
nuacaugaaccuuuaccccn

SEQ ID NO: 11331 - RNA, 19 nt, Artificial Sequence
  Description of Artificial Sequence:  HBV DNA Binding Nucleic Acid
  misc_feature (1)..(1): n stands for inverted deoxyabasic derivative
  misc_feature (19)..(19): n stands for inverted deoxyabasic derivative
  misc_feature (2)..(17): Phosphorothioate 3'-Internucleotide Linkage
  misc_feature (2)..(18): 2'-O-Methyl
nggguaaagguucauguan

SEQ ID NO: 11332 - RNA, 20 nt, Artificial Sequence
  Description of Artificial Sequence:  HBV DNA Binding Nucleic Acid
  misc_feature (1)..(1): n stands for inverted deoxyabasic derivative
  misc_feature (20)..(20): n stands for inverted deoxyabasic derivative
  misc_feature (2)..(18): Phosphorothioate 3'-Internucleotide Linkage
  misc_feature (2)..(19): 2'-O-Methyl
naccuaucgccuacucuaan

SEQ ID NO: 11333 - RNA, 19 nt, Artificial Sequence
  Description of Artificial Sequence:  HBV DNA Binding Nucleic Acid
  misc_feature (1)..(1): n stands for inverted deoxyabasic derivative
  misc_feature (19)..(19): n stands for inverted deoxyabasic derivative
  misc_feature (2)..(17): Phosphorothioate 3'-Internucleotide Linkage
  misc_feature (2)..(18): 2'-O-Methyl
nugauagcggaugagauun

SEQ ID NO: 11334 - RNA, 13 nt, Artificial Sequence
  Description of Artificial Sequence:  HBV DNA Binding Nucleic Acid
  misc_feature (1)..(1): n stands for inverted deoxyabasic derivative
  misc_feature (13)..(13): n stands for inverted deoxyabasic derivative
  misc_feature (2)..(11): Phosphorothioate 3'-Internucleotide Linkage
  misc_feature (2)..(12): 2'-O-Methyl
nuucaccucugcn

SEQ ID NO: 11335 - RNA, 18 nt, Artificial Sequence
  Description of Artificial Sequence:  HBV DNA Binding Nucleic Acid
  misc_feature (1)..(1): n stands for inverted deoxyabasic derivative
  misc_feature (18)..(18): n stands for inverted deoxyabasic derivative
  misc_feature (2)..(16): Phosphorothioate 3'-Internucleotide Linkage
  misc_feature (2)..(17): 2'-O-Allyl
nuuucuaaguaaacagun

SEQ ID NO: 11336 - RNA, 18 nt, Artificial Sequence
  Description of Artificial Sequence:  HBV DNA Binding Nucleic Acid
  misc_feature (1)..(1): n stands for inverted deoxyabasic derivative
  misc_feature (18)..(18): n stands for inverted deoxyabasic derivative
  misc_feature (2)..(16): Phosphorothioate 3'-Internucleotide Linkage
  misc_feature (2)..(17): 2'-O-Allyl
nacuguuuacuuagaaan

SEQ ID NO: 11337 - RNA, 18 nt, Artificial Sequence
  Description of Artificial Sequence:  HBV DNA Binding Nucleic Acid
  misc_feature (1)..(1): n stands for inverted deoxyabasic derivative
  misc_feature (18)..(18): n stands for inverted deoxyabasic derivative
  misc_feature (2)..(16): Phosphorothioate 3'-Internucleotide Linkage
  misc_feature (2)..(17): 2'-O-Allyl
naaguaacucuauguuan

SEQ ID NO: 11338 - RNA, 20 nt, Artificial Sequence
  Description of Artificial Sequence:  HBV DNA Binding Nucleic Acid
  misc_feature (1)..(1): n stands for inverted deoxyabasic derivative
  misc_feature (20)..(20): n stands for inverted deoxyabasic derivative
  misc_feature (2)..(18): Phosphorothioate 3'-Internucleotide Linkage
  misc_feature (2)..(19): 2'-O-Allyl
nuacaugaaccuuuaccccn

SEQ ID NO: 11339 - RNA, 19 nt, Artificial Sequence
  Description of Artificial Sequence:  HBV DNA Binding Nucleic Acid
  misc_feature (1)..(1): n stands for inverted deoxyabasic derivative
  misc_feature (19)..(19): n stands for inverted deoxyabasic derivative
  misc_feature (2)..(17): Phosphorothioate 3'-Internucleotide Linkage
  misc_feature (2)..(18): 2'-O-Allyl
nggguaaagguucauguan

SEQ ID NO: 11340 - RNA, 20 nt, Artificial Sequence
  Description of Artificial Sequence:  HBV DNA Binding Nucleic Acid
  misc_feature (1)..(1): n stands for inverted deoxyabasic derivative
  misc_feature (20)..(20): n stands for inverted deoxyabasic derivative
  misc_feature (2)..(18): Phosphorothioate 3'-Internucleotide Linkage
  misc_feature (2)..(19): 2'-O-Allyl
naccuaucgccuacucuaan

SEQ ID NO: 11341 - RNA, 19 nt, Artificial Sequence
  Description of Artificial Sequence:  HBV DNA Binding Nucleic Acid
  misc_feature (1)..(1): n stands for inverted deoxyabasic derivative
  misc_feature (19)..(19): n stands for inverted deoxyabasic derivative
  misc_feature (2)..(17): Phosphorothioate 3'-Internucleotide Linkage
  misc_feature (2)..(18): 2'-O-Allyl
nugauagcggaugagauun

SEQ ID NO: 11342 - RNA, 13 nt, Artificial Sequence
  Description of Artificial Sequence:  HBV DNA Binding Nucleic Acid
  misc_feature (1)..(1): n stands for inverted deoxyabasic derivative
  misc_feature (13)..(13): n stands for inverted deoxyabasic derivative
  misc_feature (2)..(11): Phosphorothioate 3'-Internucleotide Linkage
  misc_feature (2)..(12): 2'-O-Allyl
nuucaccucugcn

SEQ ID NO: 11343 - DNA, 31 bp, Artificial Sequence
  Description of Artificial Sequence:  Nucleic Acid
  misc_feature: DNAzyme
gtggagtgggctagctacaacgacgccccca

SEQ ID NO: 11344 - DNA, 31 bp, Artificial Sequence
  Description of Artificial Sequence:  Nucleic Acid
  misc_feature: DNAzyme
tggtggagggctagctacaacgagtcgcccc

SEQ ID NO: 11345 - DNA, 31 bp, Artificial Sequence
  Description of Artificial Sequence:  Nucleic Acid
  misc_feature: DNAzyme
atctatggggctagctacaacgaggagtgtc

SEQ ID NO: 11346 - DNA, 31 bp, Artificial Sequence
  Description of Artificial Sequence:  Nucleic Acid
  misc_feature: DNAzyme
gtgatctaggctagctacaacgaggtggagt

SEQ ID NO: 11347 - DNA, 31 bp, Artificial Sequence
  Description of Artificial Sequence:  Nucleic Acid
  misc_feature: DNAzyme
gggagtgaggctagctacaacgactatggtg

SEQ ID NO: 11348 - DNA, 31 bp, Artificial Sequence
  Description of Artificial Sequence:  Nucleic Acid
  misc_feature: DNAzyme
caggggagggctagctacaacgagatctatg

SEQ ID NO: 11349 - DNA, 31 bp, Artificial Sequence
  Description of Artificial Sequence:  Nucleic Acid
  misc_feature: DNAzyme
gttcctcaggctagctacaacgaaggggagt

SEQ ID NO: 11350 - DNA, 31 bp, Artificial Sequence
  Description of Artificial Sequence:  Nucleic Acid
  misc_feature: DNAzyme
gacagtagggctagctacaacgatcctcaca

SEQ ID NO: 11351 - DNA, 31 bp, Artificial Sequence
  Description of Artificial Sequence:  Nucleic Acid
  misc_feature: DNAzyme
gaagacagggctagctacaacgaagttcctc

SEQ ID NO: 11352 - DNA, 31 bp, Artificial Sequence
  Description of Artificial Sequence:  Nucleic Acid
  misc_feature: DNAzyme
cgtgaagaggctagctacaacgaagtagttc

SEQ ID NO: 11353 - DNA, 31 bp, Artificial Sequence
  Description of Artificial Sequence:  Nucleic Acid
  misc_feature: DNAzyme
tttctgcgggctagctacaacgagaagacag

SEQ ID NO: 11354 - DNA, 31 bp, Artificial Sequence
  Description of Artificial Sequence:  Nucleic Acid
  misc_feature: DNAzyme
gctttctgggctagctacaacgagtgaagac

SEQ ID NO: 11355 - DNA, 31 bp, Artificial Sequence
  Description of Artificial Sequence:  Nucleic Acid
  misc_feature: DNAzyme
gctagacgggctagctacaacgatttctgcg

SEQ ID NO: 11356 - DNA, 31 bp, Artificial Sequence
  Description of Artificial Sequence:  Nucleic Acid
  misc_feature: DNAzyme
tggctagaggctagctacaacgagctttctg

SEQ ID NO: 11357 - DNA, 31 bp, Artificial Sequence
  Description of Artificial Sequence:  Nucleic Acid
  misc_feature: DNAzyme
cgccatggggctagctacaacgatagacgct

SEQ ID NO: 11358 - DNA, 31 bp, Artificial Sequence
  Description of Artificial Sequence:  Nucleic Acid
  misc_feature: DNAzyme
taacgccaggctagctacaacgaggctagac

SEQ ID NO: 11359 - DNA, 31 bp, Artificial Sequence
  Description of Artificial Sequence:  Nucleic Acid
  misc_feature: DNAzyme
tactaacgggctagctacaacgacatggcta

SEQ ID NO: 11360 - DNA, 31 bp, Artificial Sequence
  Description of Artificial Sequence:  Nucleic Acid
  misc_feature: DNAzyme
catactaaggctagctacaacgagccatggc

SEQ ID NO: 11361 - DNA, 31 bp, Artificial Sequence
  Description of Artificial Sequence:  Nucleic Acid
  misc_feature: DNAzyme
cactcataggctagctacaacgataacgcca

SEQ ID NO: 11362 - DNA, 31 bp, Artificial Sequence
  Description of Artificial Sequence:  Nucleic Acid
  misc_feature: DNAzyme
gacactcaggctagctacaacgaactaacgc

SEQ ID NO: 11363 - DNA, 31 bp, Artificial Sequence
  Description of Artificial Sequence:  Nucleic Acid
  misc_feature: DNAzyme
gcacgacaggctagctacaacgatcatacta

SEQ ID NO: 11364 - DNA, 31 bp, Artificial Sequence
  Description of Artificial Sequence:  Nucleic Acid
  misc_feature: DNAzyme
ctgcacgaggctagctacaacgaactcatac

SEQ ID NO: 11365 - DNA, 31 bp, Artificial Sequence
  Description of Artificial Sequence:  Nucleic Acid
  misc_feature: DNAzyme
aggctgcaggctagctacaacgagacactca

SEQ ID NO: 11366 - DNA, 31 bp, Artificial Sequence
  Description of Artificial Sequence:  Nucleic Acid
  misc_feature: DNAzyme
ggaggctgggctagctacaacgaacgacact

SEQ ID NO: 11367 - DNA, 31 bp, Artificial Sequence
  Description of Artificial Sequence:  Nucleic Acid
  misc_feature: DNAzyme
cctggaggggctagctacaacgatgcacgac

SEQ ID NO: 11368 - DNA, 31 bp, Artificial Sequence
  Description of Artificial Sequence:  Nucleic Acid
  misc_feature: DNAzyme
agggggggggctagctacaacgacctggagg

SEQ ID NO: 11369 - DNA, 31 bp, Artificial Sequence
  Description of Artificial Sequence:  Nucleic Acid
  misc_feature: DNAzyme
cactatggggctagctacaacgatctcccgg

SEQ ID NO: 11370 - DNA, 31 bp, Artificial Sequence
  Description of Artificial Sequence:  Nucleic Acid
  misc_feature: DNAzyme
gaccactaggctagctacaacgaggctctcc

SEQ ID NO: 11371 - DNA, 31 bp, Artificial Sequence
  Description of Artificial Sequence:  Nucleic Acid
  misc_feature: DNAzyme
gcagaccaggctagctacaacgatatggctc

SEQ ID NO: 11372 - DNA, 31 bp, Artificial Sequence
  Description of Artificial Sequence:  Nucleic Acid
  misc_feature: DNAzyme
tccgcagaggctagctacaacgacactatgg

SEQ ID NO: 11373 - DNA, 31 bp, Artificial Sequence
  Description of Artificial Sequence:  Nucleic Acid
  misc_feature: DNAzyme
cggttccgggctagctacaacgaagaccact

SEQ ID NO: 11374 - DNA, 31 bp, Artificial Sequence
  Description of Artificial Sequence:  Nucleic Acid
  misc_feature: DNAzyme
ctcaccggggctagctacaacgatccgcaga

SEQ ID NO: 11375 - DNA, 31 bp, Artificial Sequence
  Description of Artificial Sequence:  Nucleic Acid
  misc_feature: DNAzyme
tgtactcaggctagctacaacgacggttccg

SEQ ID NO: 11376 - DNA, 31 bp, Artificial Sequence
  Description of Artificial Sequence:  Nucleic Acid
  misc_feature: DNAzyme
ccggtgtaggctagctacaacgatcaccggt

SEQ ID NO: 11377 - DNA, 31 bp, Artificial Sequence
  Description of Artificial Sequence:  Nucleic Acid
  misc_feature: DNAzyme
ttccggtgggctagctacaacgaactcaccg

SEQ ID NO: 11378 - DNA, 31 bp, Artificial Sequence
  Description of Artificial Sequence:  Nucleic Acid
  misc_feature: DNAzyme
aattccggggctagctacaacgagtactcac

SEQ ID NO: 11379 - DNA, 31 bp, Artificial Sequence
  Description of Artificial Sequence:  Nucleic Acid
  misc_feature: DNAzyme
cctggcaaggctagctacaacgatccggtgt

SEQ ID NO: 11380 - DNA, 31 bp, Artificial Sequence
  Description of Artificial Sequence:  Nucleic Acid
  misc_feature: DNAzyme
cgtcctggggctagctacaacgaaattccgg

SEQ ID NO: 11381 - DNA, 31 bp, Artificial Sequence
  Description of Artificial Sequence:  Nucleic Acid
  misc_feature: DNAzyme
cccggtcgggctagctacaacgacctggcaa

SEQ ID NO: 11382 - DNA, 31 bp, Artificial Sequence
  Description of Artificial Sequence:  Nucleic Acid
  misc_feature: DNAzyme
ggacccggggctagctacaacgacgtcctgg

SEQ ID NO: 11383 - DNA, 31 bp, Artificial Sequence
  Description of Artificial Sequence:  Nucleic Acid
  misc_feature: DNAzyme
agaaaggaggctagctacaacgaccggtcgt

SEQ ID NO: 11384 - DNA, 31 bp, Artificial Sequence
  Description of Artificial Sequence:  Nucleic Acid
  misc_feature: DNAzyme
cgggttgaggctagctacaacgaccaagaaa

SEQ ID NO: 11385 - DNA, 31 bp, Artificial Sequence
  Description of Artificial Sequence:  Nucleic Acid
  misc_feature: DNAzyme
tgagcgggggctagctacaacgatgatccaa

SEQ ID NO: 11386 - DNA, 31 bp, Artificial Sequence
  Description of Artificial Sequence:  Nucleic Acid
  misc_feature: DNAzyme
gcattgagggctagctacaacgagggttgat

SEQ ID NO: 11387 - DNA, 31 bp, Artificial Sequence
  Description of Artificial Sequence:  Nucleic Acid
  misc_feature: DNAzyme
tccaggcaggctagctacaacgatgagcggg

SEQ ID NO: 11388 - DNA, 31 bp, Artificial Sequence
  Description of Artificial Sequence:  Nucleic Acid
  misc_feature: DNAzyme
tctccaggggctagctacaacgaattgagcg

SEQ ID NO: 11389 - DNA, 31 bp, Artificial Sequence
  Description of Artificial Sequence:  Nucleic Acid
  misc_feature: DNAzyme
cgcccaaaggctagctacaacgactccaggc

SEQ ID NO: 11390 - DNA, 31 bp, Artificial Sequence
  Description of Artificial Sequence:  Nucleic Acid
  misc_feature: DNAzyme
ggggcacgggctagctacaacgaccaaatct

SEQ ID NO: 11391 - DNA, 31 bp, Artificial Sequence
  Description of Artificial Sequence:  Nucleic Acid
  misc_feature: DNAzyme
cgggggcaggctagctacaacgagcccaaat

SEQ ID NO: 11392 - DNA, 31 bp, Artificial Sequence
  Description of Artificial Sequence:  Nucleic Acid
  misc_feature: DNAzyme
cgcgggggggctagctacaacgaacgcccaa

SEQ ID NO: 11393 - DNA, 31 bp, Artificial Sequence
  Description of Artificial Sequence:  Nucleic Acid
  misc_feature: DNAzyme
cagtctcgggctagctacaacgagggggcac

SEQ ID NO: 11394 - DNA, 31 bp, Artificial Sequence
  Description of Artificial Sequence:  Nucleic Acid
  misc_feature: DNAzyme
gctagcagggctagctacaacgactcgcggg

SEQ ID NO: 11395 - DNA, 31 bp, Artificial Sequence
  Description of Artificial Sequence:  Nucleic Acid
  misc_feature: DNAzyme
tcggctagggctagctacaacgaagtctcgc

SEQ ID NO: 11396 - DNA, 31 bp, Artificial Sequence
  Description of Artificial Sequence:  Nucleic Acid
  misc_feature: DNAzyme
ctactcggggctagctacaacgatagcagtc

SEQ ID NO: 11397 - DNA, 31 bp, Artificial Sequence
  Description of Artificial Sequence:  Nucleic Acid
  misc_feature: DNAzyme
caacactaggctagctacaacgatcggctag

SEQ ID NO: 11398 - DNA, 31 bp, Artificial Sequence
  Description of Artificial Sequence:  Nucleic Acid
  misc_feature: DNAzyme
acccaacaggctagctacaacgatactcggc

SEQ ID NO: 11399 - DNA, 31 bp, Artificial Sequence
  Description of Artificial Sequence:  Nucleic Acid
  misc_feature: DNAzyme
cgacccaaggctagctacaacgaactactcg

SEQ ID NO: 11400 - DNA, 31 bp, Artificial Sequence
  Description of Artificial Sequence:  Nucleic Acid
  misc_feature: DNAzyme
tttcgcgaggctagctacaacgaccaacact

SEQ ID NO: 11401 - DNA, 31 bp, Artificial Sequence
  Description of Artificial Sequence:  Nucleic Acid
  misc_feature: DNAzyme
gcctttcgggctagctacaacgagacccaac

SEQ ID NO: 11402 - DNA, 31 bp, Artificial Sequence
  Description of Artificial Sequence:  Nucleic Acid
  misc_feature: DNAzyme
ccacaaggggctagctacaacgactttcgcg

SEQ ID NO: 11403 - DNA, 31 bp, Artificial Sequence
  Description of Artificial Sequence:  Nucleic Acid
  misc_feature: DNAzyme
cagtaccaggctagctacaacgaaaggcctt

SEQ ID NO: 11404 - DNA, 31 bp, Artificial Sequence
  Description of Artificial Sequence:  Nucleic Acid
  misc_feature: DNAzyme
aggcagtaggctagctacaacgacacaaggc

SEQ ID NO: 11405 - DNA, 31 bp, Artificial Sequence
  Description of Artificial Sequence:  Nucleic Acid
  misc_feature: DNAzyme
tcaggcagggctagctacaacgaaccacaag

SEQ ID NO: 11406 - DNA, 31 bp, Artificial Sequence
  Description of Artificial Sequence:  Nucleic Acid
  misc_feature: DNAzyme
ctatcaggggctagctacaacgaagtaccac

SEQ ID NO: 11407 - DNA, 31 bp, Artificial Sequence
  Description of Artificial Sequence:  Nucleic Acid
  misc_feature: DNAzyme
gcaccctaggctagctacaacgacaggcagt

SEQ ID NO: 11408 - DNA, 31 bp, Artificial Sequence
  Description of Artificial Sequence:  Nucleic Acid
  misc_feature: DNAzyme
cgcaagcaggctagctacaacgacctatcag

SEQ ID NO: 11409 - DNA, 31 bp, Artificial Sequence
  Description of Artificial Sequence:  Nucleic Acid
  misc_feature: DNAzyme
ctcgcaagggctagctacaacgaaccctatc

SEQ ID NO: 11410 - DNA, 31 bp, Artificial Sequence
  Description of Artificial Sequence:  Nucleic Acid
  misc_feature: DNAzyme
ggcactcgggctagctacaacgaaagcaccc

SEQ ID NO: 11411 - DNA, 31 bp, Artificial Sequence
  Description of Artificial Sequence:  Nucleic Acid
  misc_feature: DNAzyme
ccggggcaggctagctacaacgatcgcaagc

SEQ ID NO: 11412 - DNA, 31 bp, Artificial Sequence
  Description of Artificial Sequence:  Nucleic Acid
  misc_feature: DNAzyme
tcccggggggctagctacaacgaactcgcaa

SEQ ID NO: 11413 - DNA, 31 bp, Artificial Sequence
  Description of Artificial Sequence:  Nucleic Acid
  misc_feature: DNAzyme
ctacgagaggctagctacaacgactcccggg

SEQ ID NO: 11414 - DNA, 31 bp, Artificial Sequence
  Description of Artificial Sequence:  Nucleic Acid
  misc_feature: DNAzyme
acggtctaggctagctacaacgagagacctc

SEQ ID NO: 11415 - DNA, 31 bp, Artificial Sequence
  Description of Artificial Sequence:  Nucleic Acid
  misc_feature: DNAzyme
gtgcacggggctagctacaacgactacgaga

SEQ ID NO: 11416 - DNA, 31 bp, Artificial Sequence
  Description of Artificial Sequence:  Nucleic Acid
  misc_feature: DNAzyme
atggtgcaggctagctacaacgaggtctacg

SEQ ID NO: 11417 - DNA, 31 bp, Artificial Sequence
  Description of Artificial Sequence:  Nucleic Acid
  misc_feature: DNAzyme
tcatggtgggctagctacaacgaacggtcta

SEQ ID NO: 11418 - DNA, 31 bp, Artificial Sequence
  Description of Artificial Sequence:  Nucleic Acid
  misc_feature: DNAzyme
gctcatggggctagctacaacgagcacggtc

SEQ ID NO: 11419 - DNA, 31 bp, Artificial Sequence
  Description of Artificial Sequence:  Nucleic Acid
  misc_feature: DNAzyme
cgtgctcaggctagctacaacgaggtgcacg

SEQ ID NO: 11420 - DNA, 31 bp, Artificial Sequence
  Description of Artificial Sequence:  Nucleic Acid
  misc_feature: DNAzyme
gattcgtgggctagctacaacgatcatggtg

SEQ ID NO: 11421 - DNA, 31 bp, Artificial Sequence
  Description of Artificial Sequence:  Nucleic Acid
  misc_feature: DNAzyme
aggattcgggctagctacaacgagctcatgg

SEQ ID NO: 11422 - DNA, 31 bp, Artificial Sequence
  Description of Artificial Sequence:  Nucleic Acid
  misc_feature: DNAzyme
gtttaggaggctagctacaacgatcgtgctc

SEQ ID NO: 11423 - DNA, 31 bp, Artificial Sequence
  Description of Artificial Sequence:  Nucleic Acid
  misc_feature: DNAzyme
ctttgaggggctagctacaacgattaggatt

SEQ ID NO: 11424 - DNA, 31 bp, Artificial Sequence
  Description of Artificial Sequence:  Nucleic Acid
  misc_feature: DNAzyme
acgtttggggctagctacaacgattttcttt

SEQ ID NO: 11425 - DNA, 31 bp, Artificial Sequence
  Description of Artificial Sequence:  Nucleic Acid
  misc_feature: DNAzyme
gtgttacgggctagctacaacgattggtttt

SEQ ID NO: 11426 - DNA, 31 bp, Artificial Sequence
  Description of Artificial Sequence:  Nucleic Acid
  misc_feature: DNAzyme
tggtgttaggctagctacaacgagtttggtt

SEQ ID NO: 11427 - DNA, 31 bp, Artificial Sequence
  Description of Artificial Sequence:  Nucleic Acid
  misc_feature: DNAzyme
ggttggtgggctagctacaacgatacgtttg

SEQ ID NO: 11428 - DNA, 31 bp, Artificial Sequence
  Description of Artificial Sequence:  Nucleic Acid
  misc_feature: DNAzyme
gcggttggggctagctacaacgagttacgtt

SEQ ID NO: 11429 - DNA, 31 bp, Artificial Sequence
  Description of Artificial Sequence:  Nucleic Acid
  misc_feature: DNAzyme
ggcggcggggctagctacaacgatggtgtta

SEQ ID NO: 11430 - DNA, 31 bp, Artificial Sequence
  Description of Artificial Sequence:  Nucleic Acid
  misc_feature: DNAzyme
gtgggcggggctagctacaacgaggttggtg

SEQ ID NO: 11431 - DNA, 31 bp, Artificial Sequence
  Description of Artificial Sequence:  Nucleic Acid
  misc_feature: DNAzyme
cctgtgggggctagctacaacgaggcggttg

SEQ ID NO: 11432 - DNA, 31 bp, Artificial Sequence
  Description of Artificial Sequence:  Nucleic Acid
  misc_feature: DNAzyme
acgtcctgggctagctacaacgagggcggcg

SEQ ID NO: 11433 - DNA, 31 bp, Artificial Sequence
  Description of Artificial Sequence:  Nucleic Acid
  misc_feature: DNAzyme
acttgacgggctagctacaacgacctgtggg

SEQ ID NO: 11434 - DNA, 31 bp, Artificial Sequence
  Description of Artificial Sequence:  Nucleic Acid
  misc_feature: DNAzyme
gaacttgaggctagctacaacgagtcctgtg

SEQ ID NO: 11435 - DNA, 31 bp, Artificial Sequence
  Description of Artificial Sequence:  Nucleic Acid
  misc_feature: DNAzyme
cccgggaaggctagctacaacgattgacgtc

SEQ ID NO: 11436 - DNA, 31 bp, Artificial Sequence
  Description of Artificial Sequence:  Nucleic Acid
  misc_feature: DNAzyme
gaccaccgggctagctacaacgaccgggaac

SEQ ID NO: 11437 - DNA, 31 bp, Artificial Sequence
  Description of Artificial Sequence:  Nucleic Acid
  misc_feature: DNAzyme
tctgaccaggctagctacaacgacgcccggg

SEQ ID NO: 11438 - DNA, 31 bp, Artificial Sequence
  Description of Artificial Sequence:  Nucleic Acid
  misc_feature: DNAzyme
cgatctgaggctagctacaacgacaccgccc

SEQ ID NO: 11439 - DNA, 31 bp, Artificial Sequence
  Description of Artificial Sequence:  Nucleic Acid
  misc_feature: DNAzyme
accaacgaggctagctacaacgactgaccac

SEQ ID NO: 11440 - DNA, 31 bp, Artificial Sequence
  Description of Artificial Sequence:  Nucleic Acid
  misc_feature: DNAzyme
tccaccaaggctagctacaacgagatctgac

SEQ ID NO: 11441 - DNA, 31 bp, Artificial Sequence
  Description of Artificial Sequence:  Nucleic Acid
  misc_feature: DNAzyme
aaactccaggctagctacaacgacaacgatc

SEQ ID NO: 11442 - DNA, 31 bp, Artificial Sequence
  Description of Artificial Sequence:  Nucleic Acid
  misc_feature: DNAzyme
caggtaaaggctagctacaacgatccaccaa

SEQ ID NO: 11443 - DNA, 31 bp, Artificial Sequence
  Description of Artificial Sequence:  Nucleic Acid
  misc_feature: DNAzyme
gcaacaggggctagctacaacgaaaactcca

SEQ ID NO: 11444 - DNA, 31 bp, Artificial Sequence
  Description of Artificial Sequence:  Nucleic Acid
  misc_feature: DNAzyme
cgcggcaaggctagctacaacgaaggtaaac

SEQ ID NO: 11445 - DNA, 31 bp, Artificial Sequence
  Description of Artificial Sequence:  Nucleic Acid
  misc_feature: DNAzyme
ctgcgcggggctagctacaacgaaacaggta

SEQ ID NO: 11446 - DNA, 31 bp, Artificial Sequence
  Description of Artificial Sequence:  Nucleic Acid
  misc_feature: DNAzyme
cccctgcgggctagctacaacgaggcaacag

SEQ ID NO: 11447 - DNA, 31 bp, Artificial Sequence
  Description of Artificial Sequence:  Nucleic Acid
  misc_feature: DNAzyme
ggcccctgggctagctacaacgagcggcaac

SEQ ID NO: 11448 - DNA, 31 bp, Artificial Sequence
  Description of Artificial Sequence:  Nucleic Acid
  misc_feature: DNAzyme
acctggggggctagctacaacgaccctgcgc

SEQ ID NO: 11449 - DNA, 31 bp, Artificial Sequence
  Description of Artificial Sequence:  Nucleic Acid
  misc_feature: DNAzyme
acacccaaggctagctacaacgactggggcc

SEQ ID NO: 11450 - DNA, 31 bp, Artificial Sequence
  Description of Artificial Sequence:  Nucleic Acid
  misc_feature: DNAzyme
cgcgcacaggctagctacaacgaccaacctg

SEQ ID NO: 11451 - DNA, 31 bp, Artificial Sequence
  Description of Artificial Sequence:  Nucleic Acid
  misc_feature: DNAzyme
cgcgcgcaggctagctacaacgaacccaacc

SEQ ID NO: 11452 - DNA, 31 bp, Artificial Sequence
  Description of Artificial Sequence:  Nucleic Acid
  misc_feature: DNAzyme
gtcgcgcgggctagctacaacgaacacccaa

SEQ ID NO: 11453 - DNA, 31 bp, Artificial Sequence
  Description of Artificial Sequence:  Nucleic Acid
  misc_feature: DNAzyme
tagtcgcgggctagctacaacgagcacaccc

SEQ ID NO: 11454 - DNA, 31 bp, Artificial Sequence
  Description of Artificial Sequence:  Nucleic Acid
  misc_feature: DNAzyme
cctagtcgggctagctacaacgagcgcacac

SEQ ID NO: 11455 - DNA, 31 bp, Artificial Sequence
  Description of Artificial Sequence:  Nucleic Acid
  misc_feature: DNAzyme
cttcctagggctagctacaacgacgcgcgca

SEQ ID NO: 11456 - DNA, 31 bp, Artificial Sequence
  Description of Artificial Sequence:  Nucleic Acid
  misc_feature: DNAzyme
ctcggaagggctagctacaacgacttcctag

SEQ ID NO: 11457 - DNA, 31 bp, Artificial Sequence
  Description of Artificial Sequence:  Nucleic Acid
  misc_feature: DNAzyme
tgcgaccgggctagctacaacgatcggaagt

SEQ ID NO: 11458 - DNA, 31 bp, Artificial Sequence
  Description of Artificial Sequence:  Nucleic Acid
  misc_feature: DNAzyme
ggttgcgaggctagctacaacgacgctcgga

SEQ ID NO: 11459 - DNA, 31 bp, Artificial Sequence
  Description of Artificial Sequence:  Nucleic Acid
  misc_feature: DNAzyme
cgaggttgggctagctacaacgagaccgctc

SEQ ID NO: 11460 - DNA, 31 bp, Artificial Sequence
  Description of Artificial Sequence:  Nucleic Acid
  misc_feature: DNAzyme
ccacgaggggctagctacaacgatgcgaccg

SEQ ID NO: 11461 - DNA, 31 bp, Artificial Sequence
  Description of Artificial Sequence:  Nucleic Acid
  misc_feature: DNAzyme
gccttccaggctagctacaacgagaggttgc

SEQ ID NO: 11462 - DNA, 31 bp, Artificial Sequence
  Description of Artificial Sequence:  Nucleic Acid
  misc_feature: DNAzyme
ggttgtcgggctagctacaacgacttccacg

SEQ ID NO: 11463 - DNA, 31 bp, Artificial Sequence
  Description of Artificial Sequence:  Nucleic Acid
  misc_feature: DNAzyme
ataggttgggctagctacaacgacgccttcc

SEQ ID NO: 11464 - DNA, 31 bp, Artificial Sequence
  Description of Artificial Sequence:  Nucleic Acid
  misc_feature: DNAzyme
gggataggggctagctacaacgatgtcgcct

SEQ ID NO: 11465 - DNA, 31 bp, Artificial Sequence
  Description of Artificial Sequence:  Nucleic Acid
  misc_feature: DNAzyme
cttggggaggctagctacaacgaaggttgtc

SEQ ID NO: 11466 - DNA, 31 bp, Artificial Sequence
  Description of Artificial Sequence:  Nucleic Acid
  misc_feature: DNAzyme
ccggcgagggctagctacaacgacttgggga

SEQ ID NO: 11467 - DNA, 31 bp, Artificial Sequence
  Description of Artificial Sequence:  Nucleic Acid
  misc_feature: DNAzyme
cgggccggggctagctacaacgagagccttg

SEQ ID NO: 11468 - DNA, 31 bp, Artificial Sequence
  Description of Artificial Sequence:  Nucleic Acid
  misc_feature: DNAzyme
ccctcgggggctagctacaacgacggcgagc

SEQ ID NO: 11469 - DNA, 31 bp, Artificial Sequence
  Description of Artificial Sequence:  Nucleic Acid
  misc_feature: DNAzyme
aggccctgggctagctacaacgacctcgggc

SEQ ID NO: 11470 - DNA, 31 bp, Artificial Sequence
  Description of Artificial Sequence:  Nucleic Acid
  misc_feature: DNAzyme
agcccaggggctagctacaacgacctgccct

SEQ ID NO: 11471 - DNA, 31 bp, Artificial Sequence
  Description of Artificial Sequence:  Nucleic Acid
  misc_feature: DNAzyme
gggctgagggctagctacaacgaccaggccc

SEQ ID NO: 11472 - DNA, 31 bp, Artificial Sequence
  Description of Artificial Sequence:  Nucleic Acid
  misc_feature: DNAzyme
tacccgggggctagctacaacgatgagccca

SEQ ID NO: 11473 - DNA, 31 bp, Artificial Sequence
  Description of Artificial Sequence:  Nucleic Acid
  misc_feature: DNAzyme
caagggtaggctagctacaacgaccgggctg

SEQ ID NO: 11474 - DNA, 31 bp, Artificial Sequence
  Description of Artificial Sequence:  Nucleic Acid
  misc_feature: DNAzyme
gccaagggggctagctacaacgaacccgggc

SEQ ID NO: 11475 - DNA, 31 bp, Artificial Sequence
  Description of Artificial Sequence:  Nucleic Acid
  misc_feature: DNAzyme
tagaggggggctagctacaacgacaagggta

SEQ ID NO: 11476 - DNA, 31 bp, Artificial Sequence
  Description of Artificial Sequence:  Nucleic Acid
  misc_feature: DNAzyme
cattgccaggctagctacaacgaagaggggc

SEQ ID NO: 11477 - DNA, 31 bp, Artificial Sequence
  Description of Artificial Sequence:  Nucleic Acid
  misc_feature: DNAzyme
cctcattgggctagctacaacgacatagagg

SEQ ID NO: 11478 - DNA, 31 bp, Artificial Sequence
  Description of Artificial Sequence:  Nucleic Acid
  misc_feature: DNAzyme
agccctcaggctagctacaacgatgccatag

SEQ ID NO: 11479 - DNA, 31 bp, Artificial Sequence
  Description of Artificial Sequence:  Nucleic Acid
  misc_feature: DNAzyme
accctaagggctagctacaacgacctcattg

SEQ ID NO: 11480 - DNA, 31 bp, Artificial Sequence
  Description of Artificial Sequence:  Nucleic Acid
  misc_feature: DNAzyme
cctgcccaggctagctacaacgacctaagcc

SEQ ID NO: 11481 - DNA, 31 bp, Artificial Sequence
  Description of Artificial Sequence:  Nucleic Acid
  misc_feature: DNAzyme
ccatcctgggctagctacaacgaccacccta

SEQ ID NO: 11482 - DNA, 31 bp, Artificial Sequence
  Description of Artificial Sequence:  Nucleic Acid
  misc_feature: DNAzyme
aggagccaggctagctacaacgacctgccca

SEQ ID NO: 11483 - DNA, 31 bp, Artificial Sequence
  Description of Artificial Sequence:  Nucleic Acid
  misc_feature: DNAzyme
gacaggagggctagctacaacgacatcctgc

SEQ ID NO: 11484 - DNA, 31 bp, Artificial Sequence
  Description of Artificial Sequence:  Nucleic Acid
  misc_feature: DNAzyme
cggggtgaggctagctacaacgaaggagcca

SEQ ID NO: 11485 - DNA, 31 bp, Artificial Sequence
  Description of Artificial Sequence:  Nucleic Acid
  misc_feature: DNAzyme
ccgcggggggctagctacaacgagacaggag

SEQ ID NO: 11486 - DNA, 31 bp, Artificial Sequence
  Description of Artificial Sequence:  Nucleic Acid
  misc_feature: DNAzyme
gggagccgggctagctacaacgaggggtgac

SEQ ID NO: 11487 - DNA, 31 bp, Artificial Sequence
  Description of Artificial Sequence:  Nucleic Acid
  misc_feature: DNAzyme
gccgggagggctagctacaacgacgcggggt

SEQ ID NO: 11488 - DNA, 31 bp, Artificial Sequence
  Description of Artificial Sequence:  Nucleic Acid
  misc_feature: DNAzyme
caactaggggctagctacaacgacgggagcc

SEQ ID NO: 11489 - DNA, 31 bp, Artificial Sequence
  Description of Artificial Sequence:  Nucleic Acid
  misc_feature: DNAzyme
ggccccaaggctagctacaacgataggccgg

SEQ ID NO: 11490 - DNA, 31 bp, Artificial Sequence
  Description of Artificial Sequence:  Nucleic Acid
  misc_feature: DNAzyme
ccgtggggggctagctacaacgacccaacta

SEQ ID NO: 11491 - DNA, 31 bp, Artificial Sequence
  Description of Artificial Sequence:  Nucleic Acid
  misc_feature: DNAzyme
ggggtccgggctagctacaacgaggggcccc

SEQ ID NO: 11492 - DNA, 31 bp, Artificial Sequence
  Description of Artificial Sequence:  Nucleic Acid
  misc_feature: DNAzyme
gccgggggggctagctacaacgaccgtgggg

SEQ ID NO: 11493 - DNA, 31 bp, Artificial Sequence
  Description of Artificial Sequence:  Nucleic Acid
  misc_feature: DNAzyme
gacctacgggctagctacaacgacgggggtc

SEQ ID NO: 11494 - DNA, 31 bp, Artificial Sequence
  Description of Artificial Sequence:  Nucleic Acid
  misc_feature: DNAzyme
gcgacctaggctagctacaacgagccggggg

SEQ ID NO: 11495 - DNA, 31 bp, Artificial Sequence
  Description of Artificial Sequence:  Nucleic Acid
  misc_feature: DNAzyme
ttacgcgaggctagctacaacgactacgccg

SEQ ID NO: 11496 - DNA, 31 bp, Artificial Sequence
  Description of Artificial Sequence:  Nucleic Acid
  misc_feature: DNAzyme
aagttacgggctagctacaacgagacctacg

SEQ ID NO: 11497 - DNA, 31 bp, Artificial Sequence
  Description of Artificial Sequence:  Nucleic Acid
  misc_feature: DNAzyme
ccaagttaggctagctacaacgagcgaccta

SEQ ID NO: 11498 - DNA, 31 bp, Artificial Sequence
  Description of Artificial Sequence:  Nucleic Acid
  misc_feature: DNAzyme
tacccaagggctagctacaacgatacgcgac

SEQ ID NO: 11499 - DNA, 31 bp, Artificial Sequence
  Description of Artificial Sequence:  Nucleic Acid
  misc_feature: DNAzyme
tgaccttaggctagctacaacgaccaagtta

SEQ ID NO: 11500 - DNA, 31 bp, Artificial Sequence
  Description of Artificial Sequence:  Nucleic Acid
  misc_feature: DNAzyme
atcgatgaggctagctacaacgacttaccca

SEQ ID NO: 11501 - DNA, 31 bp, Artificial Sequence
  Description of Artificial Sequence:  Nucleic Acid
  misc_feature: DNAzyme
ggtatcgaggctagctacaacgagaccttac

SEQ ID NO: 11502 - DNA, 31 bp, Artificial Sequence
  Description of Artificial Sequence:  Nucleic Acid
  misc_feature: DNAzyme
tgagggtaggctagctacaacgacgatgacc

SEQ ID NO: 11503 - DNA, 31 bp, Artificial Sequence
  Description of Artificial Sequence:  Nucleic Acid
  misc_feature: DNAzyme
tgtgagggggctagctacaacgaatcgatga

SEQ ID NO: 11504 - DNA, 31 bp, Artificial Sequence
  Description of Artificial Sequence:  Nucleic Acid
  misc_feature: DNAzyme
gccgcatgggctagctacaacgagagggtat

SEQ ID NO: 11505 - DNA, 31 bp, Artificial Sequence
  Description of Artificial Sequence:  Nucleic Acid
  misc_feature: DNAzyme
aagccgcaggctagctacaacgagtgagggt

SEQ ID NO: 11506 - DNA, 31 bp, Artificial Sequence
  Description of Artificial Sequence:  Nucleic Acid
  misc_feature: DNAzyme
cgaagccgggctagctacaacgaatgtgagg

SEQ ID NO: 11507 - DNA, 31 bp, Artificial Sequence
  Description of Artificial Sequence:  Nucleic Acid
  misc_feature: DNAzyme
cggcgaagggctagctacaacgacgcatgtg

SEQ ID NO: 11508 - DNA, 31 bp, Artificial Sequence
  Description of Artificial Sequence:  Nucleic Acid
  misc_feature: DNAzyme
gaggtcggggctagctacaacgagaagccgc

SEQ ID NO: 11509 - DNA, 31 bp, Artificial Sequence
  Description of Artificial Sequence:  Nucleic Acid
  misc_feature: DNAzyme
ccatgaggggctagctacaacgacggcgaag

SEQ ID NO: 11510 - DNA, 31 bp, Artificial Sequence
  Description of Artificial Sequence:  Nucleic Acid
  misc_feature: DNAzyme
gtaccccaggctagctacaacgagaggtcgg

SEQ ID NO: 11511 - DNA, 31 bp, Artificial Sequence
  Description of Artificial Sequence:  Nucleic Acid
  misc_feature: DNAzyme
ggaatgtaggctagctacaacgacccatgag

SEQ ID NO: 11512 - DNA, 31 bp, Artificial Sequence
  Description of Artificial Sequence:  Nucleic Acid
  misc_feature: DNAzyme
gcggaatgggctagctacaacgaaccccatg

SEQ ID NO: 11513 - DNA, 31 bp, Artificial Sequence
  Description of Artificial Sequence:  Nucleic Acid
  misc_feature: DNAzyme
gagcggaaggctagctacaacgagtacccca

SEQ ID NO: 11514 - DNA, 31 bp, Artificial Sequence
  Description of Artificial Sequence:  Nucleic Acid
  misc_feature: DNAzyme
ccgacgagggctagctacaacgaggaatgta

SEQ ID NO: 11515 - DNA, 31 bp, Artificial Sequence
  Description of Artificial Sequence:  Nucleic Acid
  misc_feature: DNAzyme
ggcgccgaggctagctacaacgagagcggaa

SEQ ID NO: 11516 - DNA, 31 bp, Artificial Sequence
  Description of Artificial Sequence:  Nucleic Acid
  misc_feature: DNAzyme
agggggcgggctagctacaacgacgacgagc

SEQ ID NO: 11517 - DNA, 31 bp, Artificial Sequence
  Description of Artificial Sequence:  Nucleic Acid
  misc_feature: DNAzyme
caagggggggctagctacaacgagccgacga

SEQ ID NO: 11518 - DNA, 31 bp, Artificial Sequence
  Description of Artificial Sequence:  Nucleic Acid
  misc_feature: DNAzyme
tggcagtgggctagctacaacgactcccaag

SEQ ID NO: 11519 - DNA, 31 bp, Artificial Sequence
  Description of Artificial Sequence:  Nucleic Acid
  misc_feature: DNAzyme
cctggcagggctagctacaacgagcctccca

SEQ ID NO: 11520 - DNA, 31 bp, Artificial Sequence
  Description of Artificial Sequence:  Nucleic Acid
  misc_feature: DNAzyme
ggccctggggctagctacaacgaagtgcctc

SEQ ID NO: 11521 - DNA, 31 bp, Artificial Sequence
  Description of Artificial Sequence:  Nucleic Acid
  misc_feature: DNAzyme
cgccagggggctagctacaacgacctggcag

SEQ ID NO: 11522 - DNA, 31 bp, Artificial Sequence
  Description of Artificial Sequence:  Nucleic Acid
  misc_feature: DNAzyme
gccatgcgggctagctacaacgacagggccc

SEQ ID NO: 11523 - DNA, 31 bp, Artificial Sequence
  Description of Artificial Sequence:  Nucleic Acid
  misc_feature: DNAzyme
acgccatgggctagctacaacgagccagggc

SEQ ID NO: 11524 - DNA, 31 bp, Artificial Sequence
  Description of Artificial Sequence:  Nucleic Acid
  misc_feature: DNAzyme
ggacgccaggctagctacaacgagcgccagg

SEQ ID NO: 11525 - DNA, 31 bp, Artificial Sequence
  Description of Artificial Sequence:  Nucleic Acid
  misc_feature: DNAzyme
cccggacgggctagctacaacgacatgcgcc

SEQ ID NO: 11526 - DNA, 31 bp, Artificial Sequence
  Description of Artificial Sequence:  Nucleic Acid
  misc_feature: DNAzyme
aacccggaggctagctacaacgagccatgcg

SEQ ID NO: 11527 - DNA, 31 bp, Artificial Sequence
  Description of Artificial Sequence:  Nucleic Acid
  misc_feature: DNAzyme
ttccagaaggctagctacaacgaccggacgc

SEQ ID NO: 11528 - DNA, 31 bp, Artificial Sequence
  Description of Artificial Sequence:  Nucleic Acid
  misc_feature: DNAzyme
tcacgccgggctagctacaacgacttccaga

SEQ ID NO: 11529 - DNA, 31 bp, Artificial Sequence
  Description of Artificial Sequence:  Nucleic Acid
  misc_feature: DNAzyme
agttcacgggctagctacaacgacgtcttcc

SEQ ID NO: 11530 - DNA, 31 bp, Artificial Sequence
  Description of Artificial Sequence:  Nucleic Acid
  misc_feature: DNAzyme
atagttcaggctagctacaacgagccgtctt

SEQ ID NO: 11531 - DNA, 31 bp, Artificial Sequence
  Description of Artificial Sequence:  Nucleic Acid
  misc_feature: DNAzyme
ttgcatagggctagctacaacgatcacgccg

SEQ ID NO: 11532 - DNA, 31 bp, Artificial Sequence
  Description of Artificial Sequence:  Nucleic Acid
  misc_feature: DNAzyme
ctgttgcaggctagctacaacgaagttcacg

SEQ ID NO: 11533 - DNA, 31 bp, Artificial Sequence
  Description of Artificial Sequence:  Nucleic Acid
  misc_feature: DNAzyme
ccctgttgggctagctacaacgaatagttca

SEQ ID NO: 11534 - DNA, 31 bp, Artificial Sequence
  Description of Artificial Sequence:  Nucleic Acid
  misc_feature: DNAzyme
attccctgggctagctacaacgatgcatagt

SEQ ID NO: 11535 - DNA, 31 bp, Artificial Sequence
  Description of Artificial Sequence:  Nucleic Acid
  misc_feature: DNAzyme
cgggcagaggctagctacaacgatccctgtt

SEQ ID NO: 11536 - DNA, 31 bp, Artificial Sequence
  Description of Artificial Sequence:  Nucleic Acid
  misc_feature: DNAzyme
caaccgggggctagctacaacgaagattccc

SEQ ID NO: 11537 - DNA, 31 bp, Artificial Sequence
  Description of Artificial Sequence:  Nucleic Acid
  misc_feature: DNAzyme
aagagcaaggctagctacaacgacgggcaga

SEQ ID NO: 11538 - DNA, 31 bp, Artificial Sequence
  Description of Artificial Sequence:  Nucleic Acid
  misc_feature: DNAzyme
agaaagagggctagctacaacgaaaccgggc

SEQ ID NO: 11539 - DNA, 31 bp, Artificial Sequence
  Description of Artificial Sequence:  Nucleic Acid
  misc_feature: DNAzyme
gaggaagaggctagctacaacgaagagaaag

SEQ ID NO: 11540 - DNA, 31 bp, Artificial Sequence
  Description of Artificial Sequence:  Nucleic Acid
  misc_feature: DNAzyme
cagcagagggctagctacaacgacaagagga

SEQ ID NO: 11541 - DNA, 31 bp, Artificial Sequence
  Description of Artificial Sequence:  Nucleic Acid
  misc_feature: DNAzyme
cagggcagggctagctacaacgaagagccaa

SEQ ID NO: 11542 - DNA, 31 bp, Artificial Sequence
  Description of Artificial Sequence:  Nucleic Acid
  misc_feature: DNAzyme
agacagggggctagctacaacgaagcagagc

SEQ ID NO: 11543 - DNA, 31 bp, Artificial Sequence
  Description of Artificial Sequence:  Nucleic Acid
  misc_feature: DNAzyme
tggtcagaggctagctacaacgaagggcagc

SEQ ID NO: 11544 - DNA, 31 bp, Artificial Sequence
  Description of Artificial Sequence:  Nucleic Acid
  misc_feature: DNAzyme
tgggatggggctagctacaacgacagacagg

SEQ ID NO: 11545 - DNA, 31 bp, Artificial Sequence
  Description of Artificial Sequence:  Nucleic Acid
  misc_feature: DNAzyme
ggctgggaggctagctacaacgaggtcagac

SEQ ID NO: 11546 - DNA, 31 bp, Artificial Sequence
  Description of Artificial Sequence:  Nucleic Acid
  misc_feature: DNAzyme
agcggaggggctagctacaacgatgggatgg

SEQ ID NO: 11547 - DNA, 31 bp, Artificial Sequence
  Description of Artificial Sequence:  Nucleic Acid
  misc_feature: DNAzyme
ctcataagggctagctacaacgaggaggctg

SEQ ID NO: 11548 - DNA, 31 bp, Artificial Sequence
  Description of Artificial Sequence:  Nucleic Acid
  misc_feature: DNAzyme
acacctcaggctagctacaacgaaagcggag

SEQ ID NO: 11549 - DNA, 31 bp, Artificial Sequence
  Description of Artificial Sequence:  Nucleic Acid
  misc_feature: DNAzyme
gttgcacaggctagctacaacgactcataag

SEQ ID NO: 11550 - DNA, 31 bp, Artificial Sequence
  Description of Artificial Sequence:  Nucleic Acid
  misc_feature: DNAzyme
gcgttgcaggctagctacaacgaacctcata

SEQ ID NO: 11551 - DNA, 31 bp, Artificial Sequence
  Description of Artificial Sequence:  Nucleic Acid
  misc_feature: DNAzyme
acgcgttgggctagctacaacgaacacctca

SEQ ID NO: 11552 - DNA, 31 bp, Artificial Sequence
  Description of Artificial Sequence:  Nucleic Acid
  misc_feature: DNAzyme
cggacgcgggctagctacaacgatgcacacc

SEQ ID NO: 11553 - DNA, 31 bp, Artificial Sequence
  Description of Artificial Sequence:  Nucleic Acid
  misc_feature: DNAzyme
cccggacgggctagctacaacgagttgcaca

SEQ ID NO: 11554 - DNA, 31 bp, Artificial Sequence
  Description of Artificial Sequence:  Nucleic Acid
  misc_feature: DNAzyme
agcccggaggctagctacaacgagcgttgca

SEQ ID NO: 11555 - DNA, 31 bp, Artificial Sequence
  Description of Artificial Sequence:  Nucleic Acid
  misc_feature: DNAzyme
tggtacagggctagctacaacgaccggacgc

SEQ ID NO: 11556 - DNA, 31 bp, Artificial Sequence
  Description of Artificial Sequence:  Nucleic Acid
  misc_feature: DNAzyme
acatggtaggctagctacaacgaagcccgga

SEQ ID NO: 11557 - DNA, 31 bp, Artificial Sequence
  Description of Artificial Sequence:  Nucleic Acid
  misc_feature: DNAzyme
tgacatggggctagctacaacgaacagcccg

SEQ ID NO: 11558 - DNA, 31 bp, Artificial Sequence
  Description of Artificial Sequence:  Nucleic Acid
  misc_feature: DNAzyme
tcgtgacaggctagctacaacgaggtacagc

SEQ ID NO: 11559 - DNA, 31 bp, Artificial Sequence
  Description of Artificial Sequence:  Nucleic Acid
  misc_feature: DNAzyme
gttcgtgaggctagctacaacgaatggtaca

SEQ ID NO: 11560 - DNA, 31 bp, Artificial Sequence
  Description of Artificial Sequence:  Nucleic Acid
  misc_feature: DNAzyme
atcgttcgggctagctacaacgagacatggt

SEQ ID NO: 11561 - DNA, 31 bp, Artificial Sequence
  Description of Artificial Sequence:  Nucleic Acid
  misc_feature: DNAzyme
agcaatcgggctagctacaacgatcgtgaca

SEQ ID NO: 11562 - DNA, 31 bp, Artificial Sequence
  Description of Artificial Sequence:  Nucleic Acid
  misc_feature: DNAzyme
tggagcaaggctagctacaacgacgttcgtg

SEQ ID NO: 11563 - DNA, 31 bp, Artificial Sequence
  Description of Artificial Sequence:  Nucleic Acid
  misc_feature: DNAzyme
agttggagggctagctacaacgaaatcgttc

SEQ ID NO: 11564 - DNA, 31 bp, Artificial Sequence
  Description of Artificial Sequence:  Nucleic Acid
  misc_feature: DNAzyme
tgcttgagggctagctacaacgatggagcaa

SEQ ID NO: 11565 - DNA, 31 bp, Artificial Sequence
  Description of Artificial Sequence:  Nucleic Acid
  misc_feature: DNAzyme
acacaatgggctagctacaacgattgagttg

SEQ ID NO: 11566 - DNA, 31 bp, Artificial Sequence
  Description of Artificial Sequence:  Nucleic Acid
  misc_feature: DNAzyme
atacacaaggctagctacaacgagcttgagt

SEQ ID NO: 11567 - DNA, 31 bp, Artificial Sequence
  Description of Artificial Sequence:  Nucleic Acid
  misc_feature: DNAzyme
ctcatacaggctagctacaacgaaatgcttg

SEQ ID NO: 11568 - DNA, 31 bp, Artificial Sequence
  Description of Artificial Sequence:  Nucleic Acid
  misc_feature: DNAzyme
gcctcataggctagctacaacgaacaatgct

SEQ ID NO: 11569 - DNA, 31 bp, Artificial Sequence
  Description of Artificial Sequence:  Nucleic Acid
  misc_feature: DNAzyme
ctgcctcaggctagctacaacgaacacaatg

SEQ ID NO: 11570 - DNA, 31 bp, Artificial Sequence
  Description of Artificial Sequence:  Nucleic Acid
  misc_feature: DNAzyme
gtcctctgggctagctacaacgactcataca

SEQ ID NO: 11571 - DNA, 31 bp, Artificial Sequence
  Description of Artificial Sequence:  Nucleic Acid
  misc_feature: DNAzyme
tgatcatgggctagctacaacgacctctgcc

SEQ ID NO: 11572 - DNA, 31 bp, Artificial Sequence
  Description of Artificial Sequence:  Nucleic Acid
  misc_feature: DNAzyme
catgatcaggctagctacaacgagtcctctg

SEQ ID NO: 11573 - DNA, 31 bp, Artificial Sequence
  Description of Artificial Sequence:  Nucleic Acid
  misc_feature: DNAzyme
gtgcatgaggctagctacaacgacatgtcct

SEQ ID NO: 11574 - DNA, 31 bp, Artificial Sequence
  Description of Artificial Sequence:  Nucleic Acid
  misc_feature: DNAzyme
ggtgtgcaggctagctacaacgagatcatgt

SEQ ID NO: 11575 - DNA, 31 bp, Artificial Sequence
  Description of Artificial Sequence:  Nucleic Acid
  misc_feature: DNAzyme
ggggtgtgggctagctacaacgaatgatcat

SEQ ID NO: 11576 - DNA, 31 bp, Artificial Sequence
  Description of Artificial Sequence:  Nucleic Acid
  misc_feature: DNAzyme
ccggggtgggctagctacaacgagcatgatc

SEQ ID NO: 11577 - DNA, 31 bp, Artificial Sequence
  Description of Artificial Sequence:  Nucleic Acid
  misc_feature: DNAzyme
ccccggggggctagctacaacgagtgcatga

SEQ ID NO: 11578 - DNA, 31 bp, Artificial Sequence
  Description of Artificial Sequence:  Nucleic Acid
  misc_feature: DNAzyme
ggcacgcaggctagctacaacgacccggggt

SEQ ID NO: 11579 - DNA, 31 bp, Artificial Sequence
  Description of Artificial Sequence:  Nucleic Acid
  misc_feature: DNAzyme
agggcacgggctagctacaacgaaccccggg

SEQ ID NO: 11580 - DNA, 31 bp, Artificial Sequence
  Description of Artificial Sequence:  Nucleic Acid
  misc_feature: DNAzyme
gcagggcaggctagctacaacgagcaccccg

SEQ ID NO: 11581 - DNA, 31 bp, Artificial Sequence
  Description of Artificial Sequence:  Nucleic Acid
  misc_feature: DNAzyme
acgcagggggctagctacaacgaacgcaccc

SEQ ID NO: 11582 - DNA, 31 bp, Artificial Sequence
  Description of Artificial Sequence:  Nucleic Acid
  misc_feature: DNAzyme
cccgaacgggctagctacaacgaagggcacg

SEQ ID NO: 11583 - DNA, 31 bp, Artificial Sequence
  Description of Artificial Sequence:  Nucleic Acid
  misc_feature: DNAzyme
ctcccgaaggctagctacaacgagcagggca

SEQ ID NO: 11584 - DNA, 31 bp, Artificial Sequence
  Description of Artificial Sequence:  Nucleic Acid
  misc_feature: DNAzyme
aggagttgggctagctacaacgatctcccga

SEQ ID NO: 11585 - DNA, 31 bp, Artificial Sequence
  Description of Artificial Sequence:  Nucleic Acid
  misc_feature: DNAzyme
gggaggagggctagctacaacgatgttctcc

SEQ ID NO: 11586 - DNA, 31 bp, Artificial Sequence
  Description of Artificial Sequence:  Nucleic Acid
  misc_feature: DNAzyme
cccagcagggctagctacaacgagggaggag

SEQ ID NO: 11587 - DNA, 31 bp, Artificial Sequence
  Description of Artificial Sequence:  Nucleic Acid
  misc_feature: DNAzyme
ctacccagggctagctacaacgaagcgggag

SEQ ID NO: 11588 - DNA, 31 bp, Artificial Sequence
  Description of Artificial Sequence:  Nucleic Acid
  misc_feature: DNAzyme
gagcgctaggctagctacaacgaccagcagc

SEQ ID NO: 11589 - DNA, 31 bp, Artificial Sequence
  Description of Artificial Sequence:  Nucleic Acid
  misc_feature: DNAzyme
agtgagcgggctagctacaacgatacccagc

SEQ ID NO: 11590 - DNA, 31 bp, Artificial Sequence
  Description of Artificial Sequence:  Nucleic Acid
  misc_feature: DNAzyme
ggagtgagggctagctacaacgagctaccca

SEQ ID NO: 11591 - DNA, 31 bp, Artificial Sequence
  Description of Artificial Sequence:  Nucleic Acid
  misc_feature: DNAzyme
cgtgggagggctagctacaacgagagcgcta

SEQ ID NO: 11592 - DNA, 31 bp, Artificial Sequence
  Description of Artificial Sequence:  Nucleic Acid
  misc_feature: DNAzyme
cgcgagcgggctagctacaacgagggagtga

SEQ ID NO: 11593 - DNA, 31 bp, Artificial Sequence
  Description of Artificial Sequence:  Nucleic Acid
  misc_feature: DNAzyme
gccgcgagggctagctacaacgagtgggagt

SEQ ID NO: 11594 - DNA, 31 bp, Artificial Sequence
  Description of Artificial Sequence:  Nucleic Acid
  misc_feature: DNAzyme
cctggccgggctagctacaacgagagcgtgg

SEQ ID NO: 11595 - DNA, 31 bp, Artificial Sequence
  Description of Artificial Sequence:  Nucleic Acid
  misc_feature: DNAzyme
attcctggggctagctacaacgacgcgagcg

SEQ ID NO: 11596 - DNA, 31 bp, Artificial Sequence
  Description of Artificial Sequence:  Nucleic Acid
  misc_feature: DNAzyme
tgctggcaggctagctacaacgatcctggcc

SEQ ID NO: 11597 - DNA, 31 bp, Artificial Sequence
  Description of Artificial Sequence:  Nucleic Acid
  misc_feature: DNAzyme
gatgctggggctagctacaacgaattcctgg

SEQ ID NO: 11598 - DNA, 31 bp, Artificial Sequence
  Description of Artificial Sequence:  Nucleic Acid
  misc_feature: DNAzyme
tggggatgggctagctacaacgatggcattc

SEQ ID NO: 11599 - DNA, 31 bp, Artificial Sequence
  Description of Artificial Sequence:  Nucleic Acid
  misc_feature: DNAzyme
agtggggaggctagctacaacgagctggcat

SEQ ID NO: 11600 - DNA, 31 bp, Artificial Sequence
  Description of Artificial Sequence:  Nucleic Acid
  misc_feature: DNAzyme
cgtcgtagggctagctacaacgaggggatgc

SEQ ID NO: 11601 - DNA, 31 bp, Artificial Sequence
  Description of Artificial Sequence:  Nucleic Acid
  misc_feature: DNAzyme
tatcgtcgggctagctacaacgaagtgggga

SEQ ID NO: 11602 - DNA, 31 bp, Artificial Sequence
  Description of Artificial Sequence:  Nucleic Acid
  misc_feature: DNAzyme
ccgtatcgggctagctacaacgacgtagtgg

SEQ ID NO: 11603 - DNA, 31 bp, Artificial Sequence
  Description of Artificial Sequence:  Nucleic Acid
  misc_feature: DNAzyme
acgccgtaggctagctacaacgacgtcgtag

SEQ ID NO: 11604 - DNA, 31 bp, Artificial Sequence
  Description of Artificial Sequence:  Nucleic Acid
  misc_feature: DNAzyme
tgacgccgggctagctacaacgaatcgtcgt

SEQ ID NO: 11605 - DNA, 31 bp, Artificial Sequence
  Description of Artificial Sequence:  Nucleic Acid
  misc_feature: DNAzyme
acgtgacgggctagctacaacgacgtatcgt

SEQ ID NO: 11606 - DNA, 31 bp, Artificial Sequence
  Description of Artificial Sequence:  Nucleic Acid
  misc_feature: DNAzyme
cgacgtgaggctagctacaacgagccgtatc

SEQ ID NO: 11607 - DNA, 31 bp, Artificial Sequence
  Description of Artificial Sequence:  Nucleic Acid
  misc_feature: DNAzyme
aatcgacgggctagctacaacgagacgccgt

SEQ ID NO: 11608 - DNA, 31 bp, Artificial Sequence
  Description of Artificial Sequence:  Nucleic Acid
  misc_feature: DNAzyme
caaatcgaggctagctacaacgagtgacgcc

SEQ ID NO: 11609 - DNA, 31 bp, Artificial Sequence
  Description of Artificial Sequence:  Nucleic Acid
  misc_feature: DNAzyme
cgagcaaaggctagctacaacgacgacgtga

SEQ ID NO: 11610 - DNA, 31 bp, Artificial Sequence
  Description of Artificial Sequence:  Nucleic Acid
  misc_feature: DNAzyme
ccaacgagggctagctacaacgaaaatcgac

SEQ ID NO: 11611 - DNA, 31 bp, Artificial Sequence
  Description of Artificial Sequence:  Nucleic Acid
  misc_feature: DNAzyme
cgccccaaggctagctacaacgagagcaaat

SEQ ID NO: 11612 - DNA, 31 bp, Artificial Sequence
  Description of Artificial Sequence:  Nucleic Acid
  misc_feature: DNAzyme
agcagccgggctagctacaacgacccaacga

SEQ ID NO: 11613 - DNA, 31 bp, Artificial Sequence
  Description of Artificial Sequence:  Nucleic Acid
  misc_feature: DNAzyme
gaaagcagggctagctacaacgacgccccaa

SEQ ID NO: 11614 - DNA, 31 bp, Artificial Sequence
  Description of Artificial Sequence:  Nucleic Acid
  misc_feature: DNAzyme
gcagaaagggctagctacaacgaagccgccc

SEQ ID NO: 11615 - DNA, 31 bp, Artificial Sequence
  Description of Artificial Sequence:  Nucleic Acid
  misc_feature: DNAzyme
tagcagagggctagctacaacgaagaaagca

SEQ ID NO: 11616 - DNA, 31 bp, Artificial Sequence
  Description of Artificial Sequence:  Nucleic Acid
  misc_feature: DNAzyme
gtacatagggctagctacaacgaagagcaga

SEQ ID NO: 11617 - DNA, 31 bp, Artificial Sequence
  Description of Artificial Sequence:  Nucleic Acid
  misc_feature: DNAzyme
cacgtacaggctagctacaacgaagcagagc

SEQ ID NO: 11618 - DNA, 31 bp, Artificial Sequence
  Description of Artificial Sequence:  Nucleic Acid
  misc_feature: DNAzyme
cccacgtaggctagctacaacgaatagcaga

SEQ ID NO: 11619 - DNA, 31 bp, Artificial Sequence
  Description of Artificial Sequence:  Nucleic Acid
  misc_feature: DNAzyme
cccccacgggctagctacaacgaacatagca

SEQ ID NO: 11620 - DNA, 31 bp, Artificial Sequence
  Description of Artificial Sequence:  Nucleic Acid
  misc_feature: DNAzyme
atcccccaggctagctacaacgagtacatag

SEQ ID NO: 11621 - DNA, 31 bp, Artificial Sequence
  Description of Artificial Sequence:  Nucleic Acid
  misc_feature: DNAzyme
cgcagagaggctagctacaacgacccccacg

SEQ ID NO: 11622 - DNA, 31 bp, Artificial Sequence
  Description of Artificial Sequence:  Nucleic Acid
  misc_feature: DNAzyme
cagatccgggctagctacaacgaagagatcc

SEQ ID NO: 11623 - DNA, 31 bp, Artificial Sequence
  Description of Artificial Sequence:  Nucleic Acid
  misc_feature: DNAzyme
aagacagaggctagctacaacgaccgcagag

SEQ ID NO: 11624 - DNA, 31 bp, Artificial Sequence
  Description of Artificial Sequence:  Nucleic Acid
  misc_feature: DNAzyme
gaggaagaggctagctacaacgaagatccgc

SEQ ID NO: 11625 - DNA, 31 bp, Artificial Sequence
  Description of Artificial Sequence:  Nucleic Acid
  misc_feature: DNAzyme
ctgagagaggctagctacaacgagaggaaga

SEQ ID NO: 11626 - DNA, 31 bp, Artificial Sequence
  Description of Artificial Sequence:  Nucleic Acid
  misc_feature: DNAzyme
gtgaacagggctagctacaacgatgagagac

SEQ ID NO: 11627 - DNA, 31 bp, Artificial Sequence
  Description of Artificial Sequence:  Nucleic Acid
  misc_feature: DNAzyme
aaggtgaaggctagctacaacgaagctgaga

SEQ ID NO: 11628 - DNA, 31 bp, Artificial Sequence
  Description of Artificial Sequence:  Nucleic Acid
  misc_feature: DNAzyme
cgagaaggggctagctacaacgagaacagct

SEQ ID NO: 11629 - DNA, 31 bp, Artificial Sequence
  Description of Artificial Sequence:  Nucleic Acid
  misc_feature: DNAzyme
cggcgaggggctagctacaacgagagaaggt

SEQ ID NO: 11630 - DNA, 31 bp, Artificial Sequence
  Description of Artificial Sequence:  Nucleic Acid
  misc_feature: DNAzyme
cataccggggctagctacaacgagaggcgag

SEQ ID NO: 11631 - DNA, 31 bp, Artificial Sequence
  Description of Artificial Sequence:  Nucleic Acid
  misc_feature: DNAzyme
gtctcataggctagctacaacgacggcgagg

SEQ ID NO: 11632 - DNA, 31 bp, Artificial Sequence
  Description of Artificial Sequence:  Nucleic Acid
  misc_feature: DNAzyme
ctgtctcaggctagctacaacgaaccggcga

SEQ ID NO: 11633 - DNA, 31 bp, Artificial Sequence
  Description of Artificial Sequence:  Nucleic Acid
  misc_feature: DNAzyme
ctgtactgggctagctacaacgactcatacc

SEQ ID NO: 11634 - DNA, 31 bp, Artificial Sequence
  Description of Artificial Sequence:  Nucleic Acid
  misc_feature: DNAzyme
gtcctgtaggctagctacaacgatgtctcat

SEQ ID NO: 11635 - DNA, 31 bp, Artificial Sequence
  Description of Artificial Sequence:  Nucleic Acid
  misc_feature: DNAzyme
cagtcctgggctagctacaacgaactgtctc

SEQ ID NO: 11636 - DNA, 31 bp, Artificial Sequence
  Description of Artificial Sequence:  Nucleic Acid
  misc_feature: DNAzyme
aattacagggctagctacaacgacctgtact

SEQ ID NO: 11637 - DNA, 31 bp, Artificial Sequence
  Description of Artificial Sequence:  Nucleic Acid
  misc_feature: DNAzyme
agcaattaggctagctacaacgaagtcctgt

SEQ ID NO: 11638 - DNA, 31 bp, Artificial Sequence
  Description of Artificial Sequence:  Nucleic Acid
  misc_feature: DNAzyme
tcgagcaaggctagctacaacgatacagtcc

SEQ ID NO: 11639 - DNA, 31 bp, Artificial Sequence
  Description of Artificial Sequence:  Nucleic Acid
  misc_feature: DNAzyme
agatcgagggctagctacaacgaaattacag

SEQ ID NO: 11640 - DNA, 31 bp, Artificial Sequence
  Description of Artificial Sequence:  Nucleic Acid
  misc_feature: DNAzyme
gggatagaggctagctacaacgacgagcaat

SEQ ID NO: 11641 - DNA, 31 bp, Artificial Sequence
  Description of Artificial Sequence:  Nucleic Acid
  misc_feature: DNAzyme
ggccgggaggctagctacaacgaagatcgag

SEQ ID NO: 11642 - DNA, 31 bp, Artificial Sequence
  Description of Artificial Sequence:  Nucleic Acid
  misc_feature: DNAzyme
atacgtggggctagctacaacgacgggatag

SEQ ID NO: 11643 - DNA, 31 bp, Artificial Sequence
  Description of Artificial Sequence:  Nucleic Acid
  misc_feature: DNAzyme
ctgatacgggctagctacaacgaggccggga

SEQ ID NO: 11644 - DNA, 31 bp, Artificial Sequence
  Description of Artificial Sequence:  Nucleic Acid
  misc_feature: DNAzyme
gcctgataggctagctacaacgagtggccgg

SEQ ID NO: 11645 - DNA, 31 bp, Artificial Sequence
  Description of Artificial Sequence:  Nucleic Acid
  misc_feature: DNAzyme
tggcctgaggctagctacaacgaacgtggcc

SEQ ID NO: 11646 - DNA, 31 bp, Artificial Sequence
  Description of Artificial Sequence:  Nucleic Acid
  misc_feature: DNAzyme
tgcgatggggctagctacaacgactgatacg

SEQ ID NO: 11647 - DNA, 31 bp, Artificial Sequence
  Description of Artificial Sequence:  Nucleic Acid
  misc_feature: DNAzyme
ccatgcgaggctagctacaacgaggcctgat

SEQ ID NO: 11648 - DNA, 31 bp, Artificial Sequence
  Description of Artificial Sequence:  Nucleic Acid
  misc_feature: DNAzyme
aagccatgggctagctacaacgagatggcct

SEQ ID NO: 11649 - DNA, 31 bp, Artificial Sequence
  Description of Artificial Sequence:  Nucleic Acid
  misc_feature: DNAzyme
ccaagccaggctagctacaacgagcgatggc

SEQ ID NO: 11650 - DNA, 31 bp, Artificial Sequence
  Description of Artificial Sequence:  Nucleic Acid
  misc_feature: DNAzyme
atcccaagggctagctacaacgacatgcgat

SEQ ID NO: 11651 - DNA, 31 bp, Artificial Sequence
  Description of Artificial Sequence:  Nucleic Acid
  misc_feature: DNAzyme
tcatcataggctagctacaacgacccaagcc

SEQ ID NO: 11652 - DNA, 31 bp, Artificial Sequence
  Description of Artificial Sequence:  Nucleic Acid
  misc_feature: DNAzyme
catcatcaggctagctacaacgaatcccaag

SEQ ID NO: 11653 - DNA, 31 bp, Artificial Sequence
  Description of Artificial Sequence:  Nucleic Acid
  misc_feature: DNAzyme
attcatcaggctagctacaacgacatatccc

SEQ ID NO: 11654 - DNA, 31 bp, Artificial Sequence
  Description of Artificial Sequence:  Nucleic Acid
  misc_feature: DNAzyme
ccaattcaggctagctacaacgacatcatat

SEQ ID NO: 11655 - DNA, 31 bp, Artificial Sequence
  Description of Artificial Sequence:  Nucleic Acid
  misc_feature: DNAzyme
gtgaccaaggctagctacaacgatcatcatc

SEQ ID NO: 11656 - DNA, 31 bp, Artificial Sequence
  Description of Artificial Sequence:  Nucleic Acid
  misc_feature: DNAzyme
gtaggtgaggctagctacaacgacaattcat

SEQ ID NO: 11657 - DNA, 31 bp, Artificial Sequence
  Description of Artificial Sequence:  Nucleic Acid
  misc_feature: DNAzyme
gttgtaggggctagctacaacgagaccaatt

SEQ ID NO: 11658 - DNA, 31 bp, Artificial Sequence
  Description of Artificial Sequence:  Nucleic Acid
  misc_feature: DNAzyme
ggctgttgggctagctacaacgaaggtgacc

SEQ ID NO: 11659 - DNA, 31 bp, Artificial Sequence
  Description of Artificial Sequence:  Nucleic Acid
  misc_feature: DNAzyme
tagggctgggctagctacaacgatgtaggtg

SEQ ID NO: 11660 - DNA, 31 bp, Artificial Sequence
  Description of Artificial Sequence:  Nucleic Acid
  misc_feature: DNAzyme
cactagggggctagctacaacgatgttgtag

SEQ ID NO: 11661 - DNA, 31 bp, Artificial Sequence
  Description of Artificial Sequence:  Nucleic Acid
  misc_feature: DNAzyme
cgataccaggctagctacaacgatagggctg

SEQ ID NO: 11662 - DNA, 31 bp, Artificial Sequence
  Description of Artificial Sequence:  Nucleic Acid
  misc_feature: DNAzyme
ctgcgataggctagctacaacgacactaggg

SEQ ID NO: 11663 - DNA, 31 bp, Artificial Sequence
  Description of Artificial Sequence:  Nucleic Acid
  misc_feature: DNAzyme
aactgcgaggctagctacaacgaaccactag

SEQ ID NO: 11664 - DNA, 31 bp, Artificial Sequence
  Description of Artificial Sequence:  Nucleic Acid
  misc_feature: DNAzyme
agcaactgggctagctacaacgagataccac

SEQ ID NO: 11665 - DNA, 31 bp, Artificial Sequence
  Description of Artificial Sequence:  Nucleic Acid
  misc_feature: DNAzyme
cggagcaaggctagctacaacgatgcgatac

SEQ ID NO: 11666 - DNA, 31 bp, Artificial Sequence
  Description of Artificial Sequence:  Nucleic Acid
  misc_feature: DNAzyme
atccggagggctagctacaacgaaactgcga

SEQ ID NO: 11667 - DNA, 31 bp, Artificial Sequence
  Description of Artificial Sequence:  Nucleic Acid
  misc_feature: DNAzyme
ttgtgggaggctagctacaacgaccggagca

SEQ ID NO: 11668 - DNA, 31 bp, Artificial Sequence
  Description of Artificial Sequence:  Nucleic Acid
  misc_feature: DNAzyme
acggcttgggctagctacaacgagggatccg

SEQ ID NO: 11669 - DNA, 31 bp, Artificial Sequence
  Description of Artificial Sequence:  Nucleic Acid
  misc_feature: DNAzyme
cacgacggggctagctacaacgattgtggga

SEQ ID NO: 11670 - DNA, 31 bp, Artificial Sequence
  Description of Artificial Sequence:  Nucleic Acid
  misc_feature: DNAzyme
gtccacgaggctagctacaacgaggcttgtg

SEQ ID NO: 11671 - DNA, 31 bp, Artificial Sequence
  Description of Artificial Sequence:  Nucleic Acid
  misc_feature: DNAzyme
catgtccaggctagctacaacgagacggctt

SEQ ID NO: 11672 - DNA, 31 bp, Artificial Sequence
  Description of Artificial Sequence:  Nucleic Acid
  misc_feature: DNAzyme
ccaccatgggctagctacaacgaccacgacg

SEQ ID NO: 11673 - DNA, 31 bp, Artificial Sequence
  Description of Artificial Sequence:  Nucleic Acid
  misc_feature: DNAzyme
cgccaccaggctagctacaacgagtccacga

SEQ ID NO: 11674 - DNA, 31 bp, Artificial Sequence
  Description of Artificial Sequence:  Nucleic Acid
  misc_feature: DNAzyme
ccccgccaggctagctacaacgacatgtcca

SEQ ID NO: 11675 - DNA, 31 bp, Artificial Sequence
  Description of Artificial Sequence:  Nucleic Acid
  misc_feature: DNAzyme
ggcccccgggctagctacaacgacaccatgt

SEQ ID NO: 11676 - DNA, 31 bp, Artificial Sequence
  Description of Artificial Sequence:  Nucleic Acid
  misc_feature: DNAzyme
ccagtgggggctagctacaacgaccccgcca

SEQ ID NO: 11677 - DNA, 31 bp, Artificial Sequence
  Description of Artificial Sequence:  Nucleic Acid
  misc_feature: DNAzyme
ctccccagggctagctacaacgagggccccc

SEQ ID NO: 11678 - DNA, 31 bp, Artificial Sequence
  Description of Artificial Sequence:  Nucleic Acid
  misc_feature: DNAzyme
cgccaggaggctagctacaacgatccccagt

SEQ ID NO: 11679 - DNA, 31 bp, Artificial Sequence
  Description of Artificial Sequence:  Nucleic Acid
  misc_feature: DNAzyme
aaggcccgggctagctacaacgacaggactc

SEQ ID NO: 11680 - DNA, 31 bp, Artificial Sequence
  Description of Artificial Sequence:  Nucleic Acid
  misc_feature: DNAzyme
aggcaaggggctagctacaacgaccgccagg

SEQ ID NO: 11681 - DNA, 31 bp, Artificial Sequence
  Description of Artificial Sequence:  Nucleic Acid
  misc_feature: DNAzyme
ataataggggctagctacaacgaaaggcccg

SEQ ID NO: 11682 - DNA, 31 bp, Artificial Sequence
  Description of Artificial Sequence:  Nucleic Acid
  misc_feature: DNAzyme
tggaataaggctagctacaacgaaggcaagg

SEQ ID NO: 11683 - DNA, 31 bp, Artificial Sequence
  Description of Artificial Sequence:  Nucleic Acid
  misc_feature: DNAzyme
ccatggaaggctagctacaacgaaataggca

SEQ ID NO: 11684 - DNA, 31 bp, Artificial Sequence
  Description of Artificial Sequence:  Nucleic Acid
  misc_feature: DNAzyme
ccccaccaggctagctacaacgaggaataat

SEQ ID NO: 11685 - DNA, 31 bp, Artificial Sequence
  Description of Artificial Sequence:  Nucleic Acid
  misc_feature: DNAzyme
gttccccaggctagctacaacgacatggaat

SEQ ID NO: 11686 - DNA, 31 bp, Artificial Sequence
  Description of Artificial Sequence:  Nucleic Acid
  misc_feature: DNAzyme
tagcccagggctagctacaacgatccccacc

SEQ ID NO: 11687 - DNA, 31 bp, Artificial Sequence
  Description of Artificial Sequence:  Nucleic Acid
  misc_feature: DNAzyme
caccttagggctagctacaacgaccagttcc

SEQ ID NO: 11688 - DNA, 31 bp, Artificial Sequence
  Description of Artificial Sequence:  Nucleic Acid
  misc_feature: DNAzyme
aatcaacaggctagctacaacgacttagccc

SEQ ID NO: 11689 - DNA, 31 bp, Artificial Sequence
  Description of Artificial Sequence:  Nucleic Acid
  misc_feature: DNAzyme
acaatcaaggctagctacaacgaaccttagc

SEQ ID NO: 11690 - DNA, 31 bp, Artificial Sequence
  Description of Artificial Sequence:  Nucleic Acid
  misc_feature: DNAzyme
catcacaaggctagctacaacgacaacacct

SEQ ID NO: 11691 - DNA, 31 bp, Artificial Sequence
  Description of Artificial Sequence:  Nucleic Acid
  misc_feature: DNAzyme
tagcatcaggctagctacaacgaaatcaaca

SEQ ID NO: 11692 - DNA, 31 bp, Artificial Sequence
  Description of Artificial Sequence:  Nucleic Acid
  misc_feature: DNAzyme
gagtagcaggctagctacaacgacacaatca

SEQ ID NO: 11693 - DNA, 31 bp, Artificial Sequence
  Description of Artificial Sequence:  Nucleic Acid
  misc_feature: DNAzyme
aagagtagggctagctacaacgaatcacaat

SEQ ID NO: 11694 - DNA, 31 bp, Artificial Sequence
  Description of Artificial Sequence:  Nucleic Acid
  misc_feature: DNAzyme
gcaaagagggctagctacaacgaagcatcac

SEQ ID NO: 11695 - DNA, 31 bp, Artificial Sequence
  Description of Artificial Sequence:  Nucleic Acid
  misc_feature: DNAzyme
aacgccggggctagctacaacgaaaagagta

SEQ ID NO: 11696 - DNA, 31 bp, Artificial Sequence
  Description of Artificial Sequence:  Nucleic Acid
  misc_feature: DNAzyme
cgtcaacgggctagctacaacgacggcaaag

SEQ ID NO: 11697 - DNA, 31 bp, Artificial Sequence
  Description of Artificial Sequence:  Nucleic Acid
  misc_feature: DNAzyme
cccgtcaaggctagctacaacgagccggcaa

SEQ ID NO: 11698 - DNA, 31 bp, Artificial Sequence
  Description of Artificial Sequence:  Nucleic Acid
  misc_feature: DNAzyme
tgtccccgggctagctacaacgacaacgccg

SEQ ID NO: 11699 - DNA, 31 bp, Artificial Sequence
  Description of Artificial Sequence:  Nucleic Acid
  misc_feature: DNAzyme
tgtaggtgggctagctacaacgaccccgtca

SEQ ID NO: 11700 - DNA, 31 bp, Artificial Sequence
  Description of Artificial Sequence:  Nucleic Acid
  misc_feature: DNAzyme
cgtgtaggggctagctacaacgagtccccgt

SEQ ID NO: 11701 - DNA, 31 bp, Artificial Sequence
  Description of Artificial Sequence:  Nucleic Acid
  misc_feature: DNAzyme
ctgtcgtgggctagctacaacgaaggtgtcc

SEQ ID NO: 11702 - DNA, 31 bp, Artificial Sequence
  Description of Artificial Sequence:  Nucleic Acid
  misc_feature: DNAzyme
ccctgtcgggctagctacaacgagtaggtgt

SEQ ID NO: 11703 - DNA, 31 bp, Artificial Sequence
  Description of Artificial Sequence:  Nucleic Acid
  misc_feature: DNAzyme
cccccctgggctagctacaacgacgtgtagg

SEQ ID NO: 11704 - DNA, 31 bp, Artificial Sequence
  Description of Artificial Sequence:  Nucleic Acid
  misc_feature: DNAzyme
gccctgcgggctagctacaacgacccccctg

SEQ ID NO: 11705 - DNA, 31 bp, Artificial Sequence
  Description of Artificial Sequence:  Nucleic Acid
  misc_feature: DNAzyme
tggccctgggctagctacaacgagccccccc

SEQ ID NO: 11706 - DNA, 31 bp, Artificial Sequence
  Description of Artificial Sequence:  Nucleic Acid
  misc_feature: DNAzyme
tggtgtggggctagctacaacgacctgcgcc

SEQ ID NO: 11707 - DNA, 31 bp, Artificial Sequence
  Description of Artificial Sequence:  Nucleic Acid
  misc_feature: DNAzyme
tagtggtgggctagctacaacgaggccctgc

SEQ ID NO: 11708 - DNA, 31 bp, Artificial Sequence
  Description of Artificial Sequence:  Nucleic Acid
  misc_feature: DNAzyme
actagtggggctagctacaacgagtggccct

SEQ ID NO: 11709 - DNA, 31 bp, Artificial Sequence
  Description of Artificial Sequence:  Nucleic Acid
  misc_feature: DNAzyme
cctactagggctagctacaacgaggtgtggc

SEQ ID NO: 11710 - DNA, 31 bp, Artificial Sequence
  Description of Artificial Sequence:  Nucleic Acid
  misc_feature: DNAzyme
ccaccctaggctagctacaacgatagtggtg

SEQ ID NO: 11711 - DNA, 31 bp, Artificial Sequence
  Description of Artificial Sequence:  Nucleic Acid
  misc_feature: DNAzyme
ggatgccaggctagctacaacgacctactag

SEQ ID NO: 11712 - DNA, 31 bp, Artificial Sequence
  Description of Artificial Sequence:  Nucleic Acid
  misc_feature: DNAzyme
gagggatgggctagctacaacgacaccctac

SEQ ID NO: 11713 - DNA, 31 bp, Artificial Sequence
  Description of Artificial Sequence:  Nucleic Acid
  misc_feature: DNAzyme
aagagggaggctagctacaacgagccaccct

SEQ ID NO: 11714 - DNA, 31 bp, Artificial Sequence
  Description of Artificial Sequence:  Nucleic Acid
  misc_feature: DNAzyme
tccagatgggctagctacaacgaaaagaggg

SEQ ID NO: 11715 - DNA, 31 bp, Artificial Sequence
  Description of Artificial Sequence:  Nucleic Acid
  misc_feature: DNAzyme
gctccagaggctagctacaacgagtaaagag

SEQ ID NO: 11716 - DNA, 31 bp, Artificial Sequence
  Description of Artificial Sequence:  Nucleic Acid
  misc_feature: DNAzyme
ctgagatgggctagctacaacgatccagatg

SEQ ID NO: 11717 - DNA, 31 bp, Artificial Sequence
  Description of Artificial Sequence:  Nucleic Acid
  misc_feature: DNAzyme
ttctgagaggctagctacaacgagctccaga

SEQ ID NO: 11718 - DNA, 31 bp, Artificial Sequence
  Description of Artificial Sequence:  Nucleic Acid
  misc_feature: DNAzyme
gctggataggctagctacaacgatctgagat

SEQ ID NO: 11719 - DNA, 31 bp, Artificial Sequence
  Description of Artificial Sequence:  Nucleic Acid
  misc_feature: DNAzyme
aagctggaggctagctacaacgaattctgag

SEQ ID NO: 11720 - DNA, 31 bp, Artificial Sequence
  Description of Artificial Sequence:  Nucleic Acid
  misc_feature: DNAzyme
ttaataagggctagctacaacgatggatatt

SEQ ID NO: 11721 - DNA, 31 bp, Artificial Sequence
  Description of Artificial Sequence:  Nucleic Acid
  misc_feature: DNAzyme
ggtgttaaggctagctacaacgaaagctgga

SEQ ID NO: 11722 - DNA, 31 bp, Artificial Sequence
  Description of Artificial Sequence:  Nucleic Acid
  misc_feature: DNAzyme
cgttggtgggctagctacaacgataataagc

SEQ ID NO: 11723 - DNA, 31 bp, Artificial Sequence
  Description of Artificial Sequence:  Nucleic Acid
  misc_feature: DNAzyme
gccgttggggctagctacaacgagttaataa

SEQ ID NO: 11724 - DNA, 31 bp, Artificial Sequence
  Description of Artificial Sequence:  Nucleic Acid
  misc_feature: DNAzyme
agctgccgggctagctacaacgatggtgtta

SEQ ID NO: 11725 - DNA, 31 bp, Artificial Sequence
  Description of Artificial Sequence:  Nucleic Acid
  misc_feature: DNAzyme
gccagctgggctagctacaacgacgttggtg

SEQ ID NO: 11726 - DNA, 31 bp, Artificial Sequence
  Description of Artificial Sequence:  Nucleic Acid
  misc_feature: DNAzyme
tgtgccagggctagctacaacgatgccgttg

SEQ ID NO: 11727 - DNA, 31 bp, Artificial Sequence
  Description of Artificial Sequence:  Nucleic Acid
  misc_feature: DNAzyme
ttaatgtgggctagctacaacgacagctgcc

SEQ ID NO: 11728 - DNA, 31 bp, Artificial Sequence
  Description of Artificial Sequence:  Nucleic Acid
  misc_feature: DNAzyme
tgttaatgggctagctacaacgagccagctg

SEQ ID NO: 11729 - DNA, 31 bp, Artificial Sequence
  Description of Artificial Sequence:  Nucleic Acid
  misc_feature: DNAzyme
cctgttaaggctagctacaacgagtgccagc

SEQ ID NO: 11730 - DNA, 31 bp, Artificial Sequence
  Description of Artificial Sequence:  Nucleic Acid
  misc_feature: DNAzyme
cagtcctgggctagctacaacgataatgtgc

SEQ ID NO: 11731 - DNA, 31 bp, Artificial Sequence
  Description of Artificial Sequence:  Nucleic Acid
  misc_feature: DNAzyme
cagggcagggctagctacaacgacctgttaa

SEQ ID NO: 11732 - DNA, 31 bp, Artificial Sequence
  Description of Artificial Sequence:  Nucleic Acid
  misc_feature: DNAzyme
gttcagggggctagctacaacgaagtcctgt

SEQ ID NO: 11733 - DNA, 31 bp, Artificial Sequence
  Description of Artificial Sequence:  Nucleic Acid
  misc_feature: DNAzyme
cattgcagggctagctacaacgatcagggca

SEQ ID NO: 11734 - DNA, 31 bp, Artificial Sequence
  Description of Artificial Sequence:  Nucleic Acid
  misc_feature: DNAzyme
agtcattgggctagctacaacgaagttcagg

SEQ ID NO: 11735 - DNA, 31 bp, Artificial Sequence
  Description of Artificial Sequence:  Nucleic Acid
  misc_feature: DNAzyme
gggagtcaggctagctacaacgatgcagttc

SEQ ID NO: 11736 - DNA, 31 bp, Artificial Sequence
  Description of Artificial Sequence:  Nucleic Acid
  misc_feature: DNAzyme
ggagggagggctagctacaacgacattgcag

SEQ ID NO: 11737 - DNA, 31 bp, Artificial Sequence
  Description of Artificial Sequence:  Nucleic Acid
  misc_feature: DNAzyme
gaacccggggctagctacaacgattggaggg

SEQ ID NO: 11738 - DNA, 31 bp, Artificial Sequence
  Description of Artificial Sequence:  Nucleic Acid
  misc_feature: DNAzyme
gcaatgaaggctagctacaacgaccggtttg

SEQ ID NO: 11739 - DNA, 31 bp, Artificial Sequence
  Description of Artificial Sequence:  Nucleic Acid
  misc_feature: DNAzyme
tgcagcaaggctagctacaacgagaacccgg

SEQ ID NO: 11740 - DNA, 31 bp, Artificial Sequence
  Description of Artificial Sequence:  Nucleic Acid
  misc_feature: DNAzyme
cagtgcagggctagctacaacgaaatgaacc

SEQ ID NO: 11741 - DNA, 31 bp, Artificial Sequence
  Description of Artificial Sequence:  Nucleic Acid
  misc_feature: DNAzyme
gaacagtgggctagctacaacgaagcaatga

SEQ ID NO: 11742 - DNA, 31 bp, Artificial Sequence
  Description of Artificial Sequence:  Nucleic Acid
  misc_feature: DNAzyme
tagaacagggctagctacaacgagcagcaat

SEQ ID NO: 11743 - DNA, 31 bp, Artificial Sequence
  Description of Artificial Sequence:  Nucleic Acid
  misc_feature: DNAzyme
gcatagaaggctagctacaacgaagtgcagc

SEQ ID NO: 11744 - DNA, 31 bp, Artificial Sequence
  Description of Artificial Sequence:  Nucleic Acid
  misc_feature: DNAzyme
tgtgtgcaggctagctacaacgaagaacagt

SEQ ID NO: 11745 - DNA, 31 bp, Artificial Sequence
  Description of Artificial Sequence:  Nucleic Acid
  misc_feature: DNAzyme
cctgtgtgggctagctacaacgaatagaaca

SEQ ID NO: 11746 - DNA, 31 bp, Artificial Sequence
  Description of Artificial Sequence:  Nucleic Acid
  misc_feature: DNAzyme
aacctgtgggctagctacaacgagcatagaa

SEQ ID NO: 11747 - DNA, 31 bp, Artificial Sequence
  Description of Artificial Sequence:  Nucleic Acid
  misc_feature: DNAzyme
tgaacctgggctagctacaacgagtgcatag

SEQ ID NO: 11748 - DNA, 31 bp, Artificial Sequence
  Description of Artificial Sequence:  Nucleic Acid
  misc_feature: DNAzyme
gagttgaaggctagctacaacgactgtgtgc

SEQ ID NO: 11749 - DNA, 31 bp, Artificial Sequence
  Description of Artificial Sequence:  Nucleic Acid
  misc_feature: DNAzyme
cggacgagggctagctacaacgatgaacctg

SEQ ID NO: 11750 - DNA, 31 bp, Artificial Sequence
  Description of Artificial Sequence:  Nucleic Acid
  misc_feature: DNAzyme
catccggaggctagctacaacgagagttgaa

SEQ ID NO: 11751 - DNA, 31 bp, Artificial Sequence
  Description of Artificial Sequence:  Nucleic Acid
  misc_feature: DNAzyme
tgtgggcaggctagctacaacgaccggacga

SEQ ID NO: 11752 - DNA, 31 bp, Artificial Sequence
  Description of Artificial Sequence:  Nucleic Acid
  misc_feature: DNAzyme
gctgtgggggctagctacaacgaatccggac

SEQ ID NO: 11753 - DNA, 31 bp, Artificial Sequence
  Description of Artificial Sequence:  Nucleic Acid
  misc_feature: DNAzyme
aagcgctgggctagctacaacgagggcatcc

SEQ ID NO: 11754 - DNA, 31 bp, Artificial Sequence
  Description of Artificial Sequence:  Nucleic Acid
  misc_feature: DNAzyme
gccaagcgggctagctacaacgatgtgggca

SEQ ID NO: 11755 - DNA, 31 bp, Artificial Sequence
  Description of Artificial Sequence:  Nucleic Acid
  misc_feature: DNAzyme
tggccaagggctagctacaacgagctgtggg

SEQ ID NO: 11756 - DNA, 31 bp, Artificial Sequence
  Description of Artificial Sequence:  Nucleic Acid
  misc_feature: DNAzyme
gcagctggggctagctacaacgacaagcgct

SEQ ID NO: 11757 - DNA, 31 bp, Artificial Sequence
  Description of Artificial Sequence:  Nucleic Acid
  misc_feature: DNAzyme
agcggcagggctagctacaacgatggccaag

SEQ ID NO: 11758 - DNA, 31 bp, Artificial Sequence
  Description of Artificial Sequence:  Nucleic Acid
  misc_feature: DNAzyme
tggagcggggctagctacaacgaagctggcc

SEQ ID NO: 11759 - DNA, 31 bp, Artificial Sequence
  Description of Artificial Sequence:  Nucleic Acid
  misc_feature: DNAzyme
caatggagggctagctacaacgaggcagctg

SEQ ID NO: 11760 - DNA, 31 bp, Artificial Sequence
  Description of Artificial Sequence:  Nucleic Acid
  misc_feature: DNAzyme
cttgtcaaggctagctacaacgaggagcggc

SEQ ID NO: 11761 - DNA, 31 bp, Artificial Sequence
  Description of Artificial Sequence:  Nucleic Acid
  misc_feature: DNAzyme
cgaacttgggctagctacaacgacaatggag

SEQ ID NO: 11762 - DNA, 31 bp, Artificial Sequence
  Description of Artificial Sequence:  Nucleic Acid
  misc_feature: DNAzyme
tgagcgaaggctagctacaacgattgtcaat

SEQ ID NO: 11763 - DNA, 31 bp, Artificial Sequence
  Description of Artificial Sequence:  Nucleic Acid
  misc_feature: DNAzyme
cccctgagggctagctacaacgagaacttgt

SEQ ID NO: 11764 - DNA, 31 bp, Artificial Sequence
  Description of Artificial Sequence:  Nucleic Acid
  misc_feature: DNAzyme
ggaccccaggctagctacaacgaccctgagc

SEQ ID NO: 11765 - DNA, 31 bp, Artificial Sequence
  Description of Artificial Sequence:  Nucleic Acid
  misc_feature: DNAzyme
tgataggaggctagctacaacgacccacccc

SEQ ID NO: 11766 - DNA, 31 bp, Artificial Sequence
  Description of Artificial Sequence:  Nucleic Acid
  misc_feature: DNAzyme
gtaggtgaggctagctacaacgaaggacccc

SEQ ID NO: 11767 - DNA, 31 bp, Artificial Sequence
  Description of Artificial Sequence:  Nucleic Acid
  misc_feature: DNAzyme
ggtgtaggggctagctacaacgagataggac

SEQ ID NO: 11768 - DNA, 31 bp, Artificial Sequence
  Description of Artificial Sequence:  Nucleic Acid
  misc_feature: DNAzyme
cctcggtgggctagctacaacgaaggtgata

SEQ ID NO: 11769 - DNA, 31 bp, Artificial Sequence
  Description of Artificial Sequence:  Nucleic Acid
  misc_feature: DNAzyme
gccctcggggctagctacaacgagtaggtga

SEQ ID NO: 11770 - DNA, 31 bp, Artificial Sequence
  Description of Artificial Sequence:  Nucleic Acid
  misc_feature: DNAzyme
agttgtggggctagctacaacgacctcggtg

SEQ ID NO: 11771 - DNA, 31 bp, Artificial Sequence
  Description of Artificial Sequence:  Nucleic Acid
  misc_feature: DNAzyme
ccgagttgggctagctacaacgaggccctcg

SEQ ID NO: 11772 - DNA, 31 bp, Artificial Sequence
  Description of Artificial Sequence:  Nucleic Acid
  misc_feature: DNAzyme
ggtccgagggctagctacaacgatgtggccc

SEQ ID NO: 11773 - DNA, 31 bp, Artificial Sequence
  Description of Artificial Sequence:  Nucleic Acid
  misc_feature: DNAzyme
gcctctggggctagctacaacgaccgagttg

SEQ ID NO: 11774 - DNA, 31 bp, Artificial Sequence
  Description of Artificial Sequence:  Nucleic Acid
  misc_feature: DNAzyme
caatagggggctagctacaacgactctggtc

SEQ ID NO: 11775 - DNA, 31 bp, Artificial Sequence
  Description of Artificial Sequence:  Nucleic Acid
  misc_feature: DNAzyme
gccagcaaggctagctacaacgaagggcctc

SEQ ID NO: 11776 - DNA, 31 bp, Artificial Sequence
  Description of Artificial Sequence:  Nucleic Acid
  misc_feature: DNAzyme
agtgccagggctagctacaacgaaatagggc

SEQ ID NO: 11777 - DNA, 31 bp, Artificial Sequence
  Description of Artificial Sequence:  Nucleic Acid
  misc_feature: DNAzyme
gcgtagtgggctagctacaacgacagcaata

SEQ ID NO: 11778 - DNA, 31 bp, Artificial Sequence
  Description of Artificial Sequence:  Nucleic Acid
  misc_feature: DNAzyme
gtgcgtagggctagctacaacgagccagcaa

SEQ ID NO: 11779 - DNA, 31 bp, Artificial Sequence
  Description of Artificial Sequence:  Nucleic Acid
  misc_feature: DNAzyme
gcggtgcgggctagctacaacgaagtgccag

SEQ ID NO: 11780 - DNA, 31 bp, Artificial Sequence
  Description of Artificial Sequence:  Nucleic Acid
  misc_feature: DNAzyme
ccgcggtgggctagctacaacgagtagtgcc

SEQ ID NO: 11781 - DNA, 31 bp, Artificial Sequence
  Description of Artificial Sequence:  Nucleic Acid
  misc_feature: DNAzyme
ggccgcggggctagctacaacgagcgtagtg

SEQ ID NO: 11782 - DNA, 31 bp, Artificial Sequence
  Description of Artificial Sequence:  Nucleic Acid
  misc_feature: DNAzyme
cacggccgggctagctacaacgaggtgcgta

SEQ ID NO: 11783 - DNA, 31 bp, Artificial Sequence
  Description of Artificial Sequence:  Nucleic Acid
  misc_feature: DNAzyme
ccacacggggctagctacaacgacgcggtgc

SEQ ID NO: 11784 - DNA, 31 bp, Artificial Sequence
  Description of Artificial Sequence:  Nucleic Acid
  misc_feature: DNAzyme
ataccacaggctagctacaacgaggccgcgg

SEQ ID NO: 11785 - DNA, 31 bp, Artificial Sequence
  Description of Artificial Sequence:  Nucleic Acid
  misc_feature: DNAzyme
cgataccaggctagctacaacgaacggccgc

SEQ ID NO: 11786 - DNA, 31 bp, Artificial Sequence
  Description of Artificial Sequence:  Nucleic Acid
  misc_feature: DNAzyme
gtacgataggctagctacaacgacacacggc

SEQ ID NO: 11787 - DNA, 31 bp, Artificial Sequence
  Description of Artificial Sequence:  Nucleic Acid
  misc_feature: DNAzyme
gggtacgaggctagctacaacgaaccacacg

SEQ ID NO: 11788 - DNA, 31 bp, Artificial Sequence
  Description of Artificial Sequence:  Nucleic Acid
  misc_feature: DNAzyme
tgcgggtaggctagctacaacgagataccac

SEQ ID NO: 11789 - DNA, 31 bp, Artificial Sequence
  Description of Artificial Sequence:  Nucleic Acid
  misc_feature: DNAzyme
gatgcgggggctagctacaacgaacgatacc

SEQ ID NO: 11790 - DNA, 31 bp, Artificial Sequence
  Description of Artificial Sequence:  Nucleic Acid
  misc_feature: DNAzyme
ctgcgatgggctagctacaacgagggtacga

SEQ ID NO: 11791 - DNA, 31 bp, Artificial Sequence
  Description of Artificial Sequence:  Nucleic Acid
  misc_feature: DNAzyme
acctgcgaggctagctacaacgagcgggtac

SEQ ID NO: 11792 - DNA, 31 bp, Artificial Sequence
  Description of Artificial Sequence:  Nucleic Acid
  misc_feature: DNAzyme
catacctgggctagctacaacgagatgcggg

SEQ ID NO: 11793 - DNA, 31 bp, Artificial Sequence
  Description of Artificial Sequence:  Nucleic Acid
  misc_feature: DNAzyme
accacataggctagctacaacgactgcgatg

SEQ ID NO: 11794 - DNA, 31 bp, Artificial Sequence
  Description of Artificial Sequence:  Nucleic Acid
  misc_feature: DNAzyme
ggaccacaggctagctacaacgaacctgcga

SEQ ID NO: 11795 - DNA, 31 bp, Artificial Sequence
  Description of Artificial Sequence:  Nucleic Acid
  misc_feature: DNAzyme
ctggaccaggctagctacaacgaatacctgc

SEQ ID NO: 11796 - DNA, 31 bp, Artificial Sequence
  Description of Artificial Sequence:  Nucleic Acid
  misc_feature: DNAzyme
acactggaggctagctacaacgacacatacc

SEQ ID NO: 11797 - DNA, 31 bp, Artificial Sequence
  Description of Artificial Sequence:  Nucleic Acid
  misc_feature: DNAzyme
gcaatacaggctagctacaacgatggaccac

SEQ ID NO: 11798 - DNA, 31 bp, Artificial Sequence
  Description of Artificial Sequence:  Nucleic Acid
  misc_feature: DNAzyme
aagcaataggctagctacaacgaactggacc

SEQ ID NO: 11799 - DNA, 31 bp, Artificial Sequence
  Description of Artificial Sequence:  Nucleic Acid
  misc_feature: DNAzyme
tgaagcaaggctagctacaacgaacactgga

SEQ ID NO: 11800 - DNA, 31 bp, Artificial Sequence
  Description of Artificial Sequence:  Nucleic Acid
  misc_feature: DNAzyme
gggtgaagggctagctacaacgaaatacact

SEQ ID NO: 11801 - DNA, 31 bp, Artificial Sequence
  Description of Artificial Sequence:  Nucleic Acid
  misc_feature: DNAzyme
gcttggggggctagctacaacgagaagcaat

SEQ ID NO: 11802 - DNA, 31 bp, Artificial Sequence
  Description of Artificial Sequence:  Nucleic Acid
  misc_feature: DNAzyme
caacagggggctagctacaacgattggggtg

SEQ ID NO: 11803 - DNA, 31 bp, Artificial Sequence
  Description of Artificial Sequence:  Nucleic Acid
  misc_feature: DNAzyme
caccacaaggctagctacaacgaagggcttg

SEQ ID NO: 11804 - DNA, 31 bp, Artificial Sequence
  Description of Artificial Sequence:  Nucleic Acid
  misc_feature: DNAzyme
ccccaccaggctagctacaacgaaacagggc

SEQ ID NO: 11805 - DNA, 31 bp, Artificial Sequence
  Description of Artificial Sequence:  Nucleic Acid
  misc_feature: DNAzyme
cgtccccaggctagctacaacgacacaacag

SEQ ID NO: 11806 - DNA, 31 bp, Artificial Sequence
  Description of Artificial Sequence:  Nucleic Acid
  misc_feature: DNAzyme
gtcggtcgggctagctacaacgaccccacca

SEQ ID NO: 11807 - DNA, 31 bp, Artificial Sequence
  Description of Artificial Sequence:  Nucleic Acid
  misc_feature: DNAzyme
acggtcggggctagctacaacgacgtcccca

SEQ ID NO: 11808 - DNA, 31 bp, Artificial Sequence
  Description of Artificial Sequence:  Nucleic Acid
  misc_feature: DNAzyme
cgaaacggggctagctacaacgacggtcgtc

SEQ ID NO: 11809 - DNA, 31 bp, Artificial Sequence
  Description of Artificial Sequence:  Nucleic Acid
  misc_feature: DNAzyme
cgccgaaaggctagctacaacgaggtcggtc

SEQ ID NO: 11810 - DNA, 31 bp, Artificial Sequence
  Description of Artificial Sequence:  Nucleic Acid
  misc_feature: DNAzyme
tgggggcgggctagctacaacgacgaaacgg

SEQ ID NO: 11811 - DNA, 31 bp, Artificial Sequence
  Description of Artificial Sequence:  Nucleic Acid
  misc_feature: DNAzyme
cgtgggggggctagctacaacgagccgaaac

SEQ ID NO: 11812 - DNA, 31 bp, Artificial Sequence
  Description of Artificial Sequence:  Nucleic Acid
  misc_feature: DNAzyme
gttatacgggctagctacaacgagggggcgc

SEQ ID NO: 11813 - DNA, 31 bp, Artificial Sequence
  Description of Artificial Sequence:  Nucleic Acid
  misc_feature: DNAzyme
cagttataggctagctacaacgagtgggggc

SEQ ID NO: 11814 - DNA, 31 bp, Artificial Sequence
  Description of Artificial Sequence:  Nucleic Acid
  misc_feature: DNAzyme
cccagttaggctagctacaacgaacgtgggg

SEQ ID NO: 11815 - DNA, 31 bp, Artificial Sequence
  Description of Artificial Sequence:  Nucleic Acid
  misc_feature: DNAzyme
ccccccagggctagctacaacgatatacgtg

SEQ ID NO: 11816 - DNA, 31 bp, Artificial Sequence
  Description of Artificial Sequence:  Nucleic Acid
  misc_feature: DNAzyme
ctcgttcgggctagctacaacgacccccagt

SEQ ID NO: 11817 - DNA, 31 bp, Artificial Sequence
  Description of Artificial Sequence:  Nucleic Acid
  misc_feature: DNAzyme
ccgtctcgggctagctacaacgatcgccccc

SEQ ID NO: 11818 - DNA, 31 bp, Artificial Sequence
  Description of Artificial Sequence:  Nucleic Acid
  misc_feature: DNAzyme
cacgtccgggctagctacaacgactcgttcg

SEQ ID NO: 11819 - DNA, 31 bp, Artificial Sequence
  Description of Artificial Sequence:  Nucleic Acid
  misc_feature: DNAzyme
gcagcacgggctagctacaacgaccgtctcg

SEQ ID NO: 11820 - DNA, 31 bp, Artificial Sequence
  Description of Artificial Sequence:  Nucleic Acid
  misc_feature: DNAzyme
gagcagcaggctagctacaacgagtccgtct

SEQ ID NO: 11821 - DNA, 31 bp, Artificial Sequence
  Description of Artificial Sequence:  Nucleic Acid
  misc_feature: DNAzyme
aggagcagggctagctacaacgaacgtccgt

SEQ ID NO: 11822 - DNA, 31 bp, Artificial Sequence
  Description of Artificial Sequence:  Nucleic Acid
  misc_feature: DNAzyme
ttgaggagggctagctacaacgaagcacgtc

SEQ ID NO: 11823 - DNA, 31 bp, Artificial Sequence
  Description of Artificial Sequence:  Nucleic Acid
  misc_feature: DNAzyme
gcgtgttgggctagctacaacgatgaggagc

SEQ ID NO: 11824 - DNA, 31 bp, Artificial Sequence
  Description of Artificial Sequence:  Nucleic Acid
  misc_feature: DNAzyme
gccgcgtgggctagctacaacgatgttgagg

SEQ ID NO: 11825 - DNA, 31 bp, Artificial Sequence
  Description of Artificial Sequence:  Nucleic Acid
  misc_feature: DNAzyme
cggccgcgggctagctacaacgagttgttga

SEQ ID NO: 11826 - DNA, 31 bp, Artificial Sequence
  Description of Artificial Sequence:  Nucleic Acid
  misc_feature: DNAzyme
ggcggccgggctagctacaacgagtgttgtt

SEQ ID NO: 11827 - DNA, 31 bp, Artificial Sequence
  Description of Artificial Sequence:  Nucleic Acid
  misc_feature: DNAzyme
tgcggcggggctagctacaacgacgcgtgtt

SEQ ID NO: 11828 - DNA, 31 bp, Artificial Sequence
  Description of Artificial Sequence:  Nucleic Acid
  misc_feature: DNAzyme
ccttgcggggctagctacaacgaggccgcgt

SEQ ID NO: 11829 - DNA, 31 bp, Artificial Sequence
  Description of Artificial Sequence:  Nucleic Acid
  misc_feature: DNAzyme
ttgccttgggctagctacaacgaggcggccg

SEQ ID NO: 11830 - DNA, 31 bp, Artificial Sequence
  Description of Artificial Sequence:  Nucleic Acid
  misc_feature: DNAzyme
accagttgggctagctacaacgacttgcggc

SEQ ID NO: 11831 - DNA, 31 bp, Artificial Sequence
  Description of Artificial Sequence:  Nucleic Acid
  misc_feature: DNAzyme
cgaaccagggctagctacaacgatgccttgc

SEQ ID NO: 11832 - DNA, 31 bp, Artificial Sequence
  Description of Artificial Sequence:  Nucleic Acid
  misc_feature: DNAzyme
cagccgaaggctagctacaacgacagttgcc

SEQ ID NO: 11833 - DNA, 31 bp, Artificial Sequence
  Description of Artificial Sequence:  Nucleic Acid
  misc_feature: DNAzyme
atgtgcagggctagctacaacgacgaaccag

SEQ ID NO: 11834 - DNA, 31 bp, Artificial Sequence
  Description of Artificial Sequence:  Nucleic Acid
  misc_feature: DNAzyme
tccatgtgggctagctacaacgaagccgaac

SEQ ID NO: 11835 - DNA, 31 bp, Artificial Sequence
  Description of Artificial Sequence:  Nucleic Acid
  misc_feature: DNAzyme
catccatgggctagctacaacgagcagccga

SEQ ID NO: 11836 - DNA, 31 bp, Artificial Sequence
  Description of Artificial Sequence:  Nucleic Acid
  misc_feature: DNAzyme
ttcatccaggctagctacaacgagtgcagcc

SEQ ID NO: 11837 - DNA, 31 bp, Artificial Sequence
  Description of Artificial Sequence:  Nucleic Acid
  misc_feature: DNAzyme
gccattcaggctagctacaacgaccatgtgc

SEQ ID NO: 11838 - DNA, 31 bp, Artificial Sequence
  Description of Artificial Sequence:  Nucleic Acid
  misc_feature: DNAzyme
cagtgccaggctagctacaacgatcatccat

SEQ ID NO: 11839 - DNA, 31 bp, Artificial Sequence
  Description of Artificial Sequence:  Nucleic Acid
  misc_feature: DNAzyme
acccagtgggctagctacaacgacattcatc

SEQ ID NO: 11840 - DNA, 31 bp, Artificial Sequence
  Description of Artificial Sequence:  Nucleic Acid
  misc_feature: DNAzyme
gaacccagggctagctacaacgagccattca

SEQ ID NO: 11841 - DNA, 31 bp, Artificial Sequence
  Description of Artificial Sequence:  Nucleic Acid
  misc_feature: DNAzyme
ttggtgaaggctagctacaacgaccagtgcc

SEQ ID NO: 11842 - DNA, 31 bp, Artificial Sequence
  Description of Artificial Sequence:  Nucleic Acid
  misc_feature: DNAzyme
cgtcttggggctagctacaacgagaacccag

SEQ ID NO: 11843 - DNA, 31 bp, Artificial Sequence
  Description of Artificial Sequence:  Nucleic Acid
  misc_feature: DNAzyme
cccgcacgggctagctacaacgacttggtga

SEQ ID NO: 11844 - DNA, 31 bp, Artificial Sequence
  Description of Artificial Sequence:  Nucleic Acid
  misc_feature: DNAzyme
cccccgcaggctagctacaacgagtcttggt

SEQ ID NO: 11845 - DNA, 31 bp, Artificial Sequence
  Description of Artificial Sequence:  Nucleic Acid
  misc_feature: DNAzyme
ggcccccgggctagctacaacgaacgtcttg

SEQ ID NO: 11846 - DNA, 31 bp, Artificial Sequence
  Description of Artificial Sequence:  Nucleic Acid
  misc_feature: DNAzyme
acggggggggctagctacaacgaccccgcac

SEQ ID NO: 11847 - DNA, 31 bp, Artificial Sequence
  Description of Artificial Sequence:  Nucleic Acid
  misc_feature: DNAzyme
atgttgcaggctagctacaacgaggggggcc

SEQ ID NO: 11848 - DNA, 31 bp, Artificial Sequence
  Description of Artificial Sequence:  Nucleic Acid
  misc_feature: DNAzyme
cgatgttgggctagctacaacgaacgggggg

SEQ ID NO: 11849 - DNA, 31 bp, Artificial Sequence
  Description of Artificial Sequence:  Nucleic Acid
  misc_feature: DNAzyme
ccccgatgggctagctacaacgatgcacggg

SEQ ID NO: 11850 - DNA, 31 bp, Artificial Sequence
  Description of Artificial Sequence:  Nucleic Acid
  misc_feature: DNAzyme
ccccccgaggctagctacaacgagttgcacg

SEQ ID NO: 11851 - DNA, 31 bp, Artificial Sequence
  Description of Artificial Sequence:  Nucleic Acid
  misc_feature: DNAzyme
gttaccggggctagctacaacgaccccccga

SEQ ID NO: 11852 - DNA, 31 bp, Artificial Sequence
  Description of Artificial Sequence:  Nucleic Acid
  misc_feature: DNAzyme
tgtcgttaggctagctacaacgacggccccc

SEQ ID NO: 11853 - DNA, 31 bp, Artificial Sequence
  Description of Artificial Sequence:  Nucleic Acid
  misc_feature: DNAzyme
aggtgtcgggctagctacaacgataccggcc

SEQ ID NO: 11854 - DNA, 31 bp, Artificial Sequence
  Description of Artificial Sequence:  Nucleic Acid
  misc_feature: DNAzyme
ttaaggtgggctagctacaacgacgttaccg

SEQ ID NO: 11855 - DNA, 31 bp, Artificial Sequence
  Description of Artificial Sequence:  Nucleic Acid
  misc_feature: DNAzyme
ggttaaggggctagctacaacgagtcgttac

SEQ ID NO: 11856 - DNA, 31 bp, Artificial Sequence
  Description of Artificial Sequence:  Nucleic Acid
  misc_feature: DNAzyme
ggggcaggggctagctacaacgataaggtgt

SEQ ID NO: 11857 - DNA, 31 bp, Artificial Sequence
  Description of Artificial Sequence:  Nucleic Acid
  misc_feature: DNAzyme
ccgtggggggctagctacaacgaaggttaag

SEQ ID NO: 11858 - DNA, 31 bp, Artificial Sequence
  Description of Artificial Sequence:  Nucleic Acid
  misc_feature: DNAzyme
gcagtccgggctagctacaacgaggggcagg

SEQ ID NO: 11859 - DNA, 31 bp, Artificial Sequence
  Description of Artificial Sequence:  Nucleic Acid
  misc_feature: DNAzyme
ggaagcagggctagctacaacgaccgtgggg

SEQ ID NO: 11860 - DNA, 31 bp, Artificial Sequence
  Description of Artificial Sequence:  Nucleic Acid
  misc_feature: DNAzyme
tccggaagggctagctacaacgaagtccgtg

SEQ ID NO: 11861 - DNA, 31 bp, Artificial Sequence
  Description of Artificial Sequence:  Nucleic Acid
  misc_feature: DNAzyme
tcggggtgggctagctacaacgattccggaa

SEQ ID NO: 11862 - DNA, 31 bp, Artificial Sequence
  Description of Artificial Sequence:  Nucleic Acid
  misc_feature: DNAzyme
cctcggggggctagctacaacgagcttccgg

SEQ ID NO: 11863 - DNA, 31 bp, Artificial Sequence
  Description of Artificial Sequence:  Nucleic Acid
  misc_feature: DNAzyme
gtaagtggggctagctacaacgactcggggt

SEQ ID NO: 11864 - DNA, 31 bp, Artificial Sequence
  Description of Artificial Sequence:  Nucleic Acid
  misc_feature: DNAzyme
tgcgtaagggctagctacaacgaggcctcgg

SEQ ID NO: 11865 - DNA, 31 bp, Artificial Sequence
  Description of Artificial Sequence:  Nucleic Acid
  misc_feature: DNAzyme
actttgcgggctagctacaacgaaagtggcc

SEQ ID NO: 11866 - DNA, 31 bp, Artificial Sequence
  Description of Artificial Sequence:  Nucleic Acid
  misc_feature: DNAzyme
gcactttgggctagctacaacgagtaagtgg

SEQ ID NO: 11867 - DNA, 31 bp, Artificial Sequence
  Description of Artificial Sequence:  Nucleic Acid
  misc_feature: DNAzyme
gaaccgcaggctagctacaacgatttgcgta

SEQ ID NO: 11868 - DNA, 31 bp, Artificial Sequence
  Description of Artificial Sequence:  Nucleic Acid
  misc_feature: DNAzyme
ccgaaccgggctagctacaacgaactttgcg

SEQ ID NO: 11869 - DNA, 31 bp, Artificial Sequence
  Description of Artificial Sequence:  Nucleic Acid
  misc_feature: DNAzyme
gccccgaaggctagctacaacgacgcacttt

SEQ ID NO: 11870 - DNA, 31 bp, Artificial Sequence
  Description of Artificial Sequence:  Nucleic Acid
  misc_feature: DNAzyme
aaccaaggggctagctacaacgacccgaacc

SEQ ID NO: 11871 - DNA, 31 bp, Artificial Sequence
  Description of Artificial Sequence:  Nucleic Acid
  misc_feature: DNAzyme
ggtgttaaggctagctacaacgacaaggccc

SEQ ID NO: 11872 - DNA, 31 bp, Artificial Sequence
  Description of Artificial Sequence:  Nucleic Acid
  misc_feature: DNAzyme
tctaggtgggctagctacaacgataaccaag

SEQ ID NO: 11873 - DNA, 31 bp, Artificial Sequence
  Description of Artificial Sequence:  Nucleic Acid
  misc_feature: DNAzyme
catctaggggctagctacaacgagttaacca

SEQ ID NO: 11874 - DNA, 31 bp, Artificial Sequence
  Description of Artificial Sequence:  Nucleic Acid
  misc_feature: DNAzyme
actatgcaggctagctacaacgactaggtgt

SEQ ID NO: 11875 - DNA, 31 bp, Artificial Sequence
  Description of Artificial Sequence:  Nucleic Acid
  misc_feature: DNAzyme
caactatgggctagctacaacgaatctaggt

SEQ ID NO: 11876 - DNA, 31 bp, Artificial Sequence
  Description of Artificial Sequence:  Nucleic Acid
  misc_feature: DNAzyme
gtcaactaggctagctacaacgagcatctag

SEQ ID NO: 11877 - DNA, 31 bp, Artificial Sequence
  Description of Artificial Sequence:  Nucleic Acid
  misc_feature: DNAzyme
gtagtcaaggctagctacaacgatatgcatc

SEQ ID NO: 11878 - DNA, 31 bp, Artificial Sequence
  Description of Artificial Sequence:  Nucleic Acid
  misc_feature: DNAzyme
atgggtagggctagctacaacgacaactatg

SEQ ID NO: 11879 - DNA, 31 bp, Artificial Sequence
  Description of Artificial Sequence:  Nucleic Acid
  misc_feature: DNAzyme
tgtatgggggctagctacaacgaagtcaact

SEQ ID NO: 11880 - DNA, 31 bp, Artificial Sequence
  Description of Artificial Sequence:  Nucleic Acid
  misc_feature: DNAzyme
agcctgtaggctagctacaacgagggtagtc

SEQ ID NO: 11881 - DNA, 31 bp, Artificial Sequence
  Description of Artificial Sequence:  Nucleic Acid
  misc_feature: DNAzyme
aaagcctgggctagctacaacgaatgggtag

SEQ ID NO: 11882 - DNA, 31 bp, Artificial Sequence
  Description of Artificial Sequence:  Nucleic Acid
  misc_feature: DNAzyme
tgccaaagggctagctacaacgactgtatgg

SEQ ID NO: 11883 - DNA, 31 bp, Artificial Sequence
  Description of Artificial Sequence:  Nucleic Acid
  misc_feature: DNAzyme
gggtagtgggctagctacaacgacaaagcct

SEQ ID NO: 11884 - DNA, 31 bp, Artificial Sequence
  Description of Artificial Sequence:  Nucleic Acid
  misc_feature: DNAzyme
aggggtagggctagctacaacgagccaaagc

SEQ ID NO: 11885 - DNA, 31 bp, Artificial Sequence
  Description of Artificial Sequence:  Nucleic Acid
  misc_feature: DNAzyme
tgcaggggggctagctacaacgaagtgccaa

SEQ ID NO: 11886 - DNA, 31 bp, Artificial Sequence
  Description of Artificial Sequence:  Nucleic Acid
  misc_feature: DNAzyme
tgacagtgggctagctacaacgaaggggtag

SEQ ID NO: 11887 - DNA, 31 bp, Artificial Sequence
  Description of Artificial Sequence:  Nucleic Acid
  misc_feature: DNAzyme
attgacagggctagctacaacgagcaggggt

SEQ ID NO: 11888 - DNA, 31 bp, Artificial Sequence
  Description of Artificial Sequence:  Nucleic Acid
  misc_feature: DNAzyme
aaaattgaggctagctacaacgaagtgcagg

SEQ ID NO: 11889 - DNA, 31 bp, Artificial Sequence
  Description of Artificial Sequence:  Nucleic Acid
  misc_feature: DNAzyme
tggaaaaaggctagctacaacgatgacagtg

SEQ ID NO: 11890 - DNA, 31 bp, Artificial Sequence
  Description of Artificial Sequence:  Nucleic Acid
  misc_feature: DNAzyme
cttaaagaggctagctacaacgaggaaaaat

SEQ ID NO: 11891 - DNA, 31 bp, Artificial Sequence
  Description of Artificial Sequence:  Nucleic Acid
  misc_feature: DNAzyme
catcctaaggctagctacaacgacttaaaga

SEQ ID NO: 11892 - DNA, 31 bp, Artificial Sequence
  Description of Artificial Sequence:  Nucleic Acid
  misc_feature: DNAzyme
cacatacaggctagctacaacgacctaacct

SEQ ID NO: 11893 - DNA, 31 bp, Artificial Sequence
  Description of Artificial Sequence:  Nucleic Acid
  misc_feature: DNAzyme
cccacataggctagctacaacgaatcctaac

SEQ ID NO: 11894 - DNA, 31 bp, Artificial Sequence
  Description of Artificial Sequence:  Nucleic Acid
  misc_feature: DNAzyme
cccccacaggctagctacaacgaacatccta

SEQ ID NO: 11895 - DNA, 31 bp, Artificial Sequence
  Description of Artificial Sequence:  Nucleic Acid
  misc_feature: DNAzyme
gccccccaggctagctacaacgaatacatcc

SEQ ID NO: 11896 - DNA, 31 bp, Artificial Sequence
  Description of Artificial Sequence:  Nucleic Acid
  misc_feature: DNAzyme
gctccacgggctagctacaacgacccccaca

SEQ ID NO: 11897 - DNA, 31 bp, Artificial Sequence
  Description of Artificial Sequence:  Nucleic Acid
  misc_feature: DNAzyme
gtgctccaggctagctacaacgagcccccca

SEQ ID NO: 11898 - DNA, 31 bp, Artificial Sequence
  Description of Artificial Sequence:  Nucleic Acid
  misc_feature: DNAzyme
agcctgtgggctagctacaacgatccacgcc

SEQ ID NO: 11899 - DNA, 31 bp, Artificial Sequence
  Description of Artificial Sequence:  Nucleic Acid
  misc_feature: DNAzyme
tgagcctgggctagctacaacgagctccacg

SEQ ID NO: 11900 - DNA, 31 bp, Artificial Sequence
  Description of Artificial Sequence:  Nucleic Acid
  misc_feature: DNAzyme
gcggtgagggctagctacaacgactgtgctc

SEQ ID NO: 11901 - DNA, 31 bp, Artificial Sequence
  Description of Artificial Sequence:  Nucleic Acid
  misc_feature: DNAzyme
tgcggcggggctagctacaacgagagcctgt

SEQ ID NO: 11902 - DNA, 31 bp, Artificial Sequence
  Description of Artificial Sequence:  Nucleic Acid
  misc_feature: DNAzyme
gcatgcggggctagctacaacgaggtgagcc

SEQ ID NO: 11903 - DNA, 31 bp, Artificial Sequence
  Description of Artificial Sequence:  Nucleic Acid
  misc_feature: DNAzyme
attgcatgggctagctacaacgaggcggtga

SEQ ID NO: 11904 - DNA, 31 bp, Artificial Sequence
  Description of Artificial Sequence:  Nucleic Acid
  misc_feature: DNAzyme
caattgcaggctagctacaacgagcggcggt

SEQ ID NO: 11905 - DNA, 31 bp, Artificial Sequence
  Description of Artificial Sequence:  Nucleic Acid
  misc_feature: DNAzyme
tccaattgggctagctacaacgaatgcggcg

SEQ ID NO: 11906 - DNA, 31 bp, Artificial Sequence
  Description of Artificial Sequence:  Nucleic Acid
  misc_feature: DNAzyme
gagtccaaggctagctacaacgatgcatgcg

SEQ ID NO: 11907 - DNA, 31 bp, Artificial Sequence
  Description of Artificial Sequence:  Nucleic Acid
  misc_feature: DNAzyme
tcctcgagggctagctacaacgaccaattgc

SEQ ID NO: 11908 - DNA, 31 bp, Artificial Sequence
  Description of Artificial Sequence:  Nucleic Acid
  misc_feature: DNAzyme
tcacaacgggctagctacaacgatctcctcg

SEQ ID NO: 11909 - DNA, 31 bp, Artificial Sequence
  Description of Artificial Sequence:  Nucleic Acid
  misc_feature: DNAzyme
aatcacaaggctagctacaacgagctctcct

SEQ ID NO: 11910 - DNA, 31 bp, Artificial Sequence
  Description of Artificial Sequence:  Nucleic Acid
  misc_feature: DNAzyme
ccaaatcaggctagctacaacgaaacgctct

SEQ ID NO: 11911 - DNA, 31 bp, Artificial Sequence
  Description of Artificial Sequence:  Nucleic Acid
  misc_feature: DNAzyme
cctccaaaggctagctacaacgacacaacgc

SEQ ID NO: 11912 - DNA, 31 bp, Artificial Sequence
  Description of Artificial Sequence:  Nucleic Acid
  misc_feature: DNAzyme
tgtccctgggctagctacaacgacctccaaa

SEQ ID NO: 11913 - DNA, 31 bp, Artificial Sequence
  Description of Artificial Sequence:  Nucleic Acid
  misc_feature: DNAzyme
ctgatctgggctagctacaacgaccctgtcc

SEQ ID NO: 11914 - DNA, 31 bp, Artificial Sequence
  Description of Artificial Sequence:  Nucleic Acid
  misc_feature: DNAzyme
agctctgaggctagctacaacgactgtccct

SEQ ID NO: 11915 - DNA, 31 bp, Artificial Sequence
  Description of Artificial Sequence:  Nucleic Acid
  misc_feature: DNAzyme
gggctgagggctagctacaacgatctgatct

SEQ ID NO: 11916 - DNA, 31 bp, Artificial Sequence
  Description of Artificial Sequence:  Nucleic Acid
  misc_feature: DNAzyme
gcagcgggggctagctacaacgatgagctct

SEQ ID NO: 11917 - DNA, 31 bp, Artificial Sequence
  Description of Artificial Sequence:  Nucleic Acid
  misc_feature: DNAzyme
aacagcagggctagctacaacgagggctgag

SEQ ID NO: 11918 - DNA, 31 bp, Artificial Sequence
  Description of Artificial Sequence:  Nucleic Acid
  misc_feature: DNAzyme
gacaacagggctagctacaacgaagcgggct

SEQ ID NO: 11919 - DNA, 31 bp, Artificial Sequence
  Description of Artificial Sequence:  Nucleic Acid
  misc_feature: DNAzyme
gtggacaaggctagctacaacgaagcagcgg

SEQ ID NO: 11920 - DNA, 31 bp, Artificial Sequence
  Description of Artificial Sequence:  Nucleic Acid
  misc_feature: DNAzyme
gtagtggaggctagctacaacgaaacagcag

SEQ ID NO: 11921 - DNA, 31 bp, Artificial Sequence
  Description of Artificial Sequence:  Nucleic Acid
  misc_feature: DNAzyme
ctctgtagggctagctacaacgaggacaaca

SEQ ID NO: 11922 - DNA, 31 bp, Artificial Sequence
  Description of Artificial Sequence:  Nucleic Acid
  misc_feature: DNAzyme
ccactctgggctagctacaacgaagtggaca

SEQ ID NO: 11923 - DNA, 31 bp, Artificial Sequence
  Description of Artificial Sequence:  Nucleic Acid
  misc_feature: DNAzyme
atttgccaggctagctacaacgatctgtagt

SEQ ID NO: 11924 - DNA, 31 bp, Artificial Sequence
  Description of Artificial Sequence:  Nucleic Acid
  misc_feature: DNAzyme
agtatttgggctagctacaacgacactctgt

SEQ ID NO: 11925 - DNA, 31 bp, Artificial Sequence
  Description of Artificial Sequence:  Nucleic Acid
  misc_feature: DNAzyme
gggcagtaggctagctacaacgattgccact

SEQ ID NO: 11926 - DNA, 31 bp, Artificial Sequence
  Description of Artificial Sequence:  Nucleic Acid
  misc_feature: DNAzyme
cagggcagggctagctacaacgaatttgcca

SEQ ID NO: 11927 - DNA, 31 bp, Artificial Sequence
  Description of Artificial Sequence:  Nucleic Acid
  misc_feature: DNAzyme
gagcagggggctagctacaacgaagtatttg

SEQ ID NO: 11928 - DNA, 31 bp, Artificial Sequence
  Description of Artificial Sequence:  Nucleic Acid
  misc_feature: DNAzyme
tgaaggagggctagctacaacgaagggcagt

SEQ ID NO: 11929 - DNA, 31 bp, Artificial Sequence
  Description of Artificial Sequence:  Nucleic Acid
  misc_feature: DNAzyme
tagggtggggctagctacaacgagaaggagc

SEQ ID NO: 11930 - DNA, 31 bp, Artificial Sequence
  Description of Artificial Sequence:  Nucleic Acid
  misc_feature: DNAzyme
cggtagggggctagctacaacgaggtgaagg

SEQ ID NO: 11931 - DNA, 31 bp, Artificial Sequence
  Description of Artificial Sequence:  Nucleic Acid
  misc_feature: DNAzyme
agagccggggctagctacaacgaagggtggt

SEQ ID NO: 11932 - DNA, 31 bp, Artificial Sequence
  Description of Artificial Sequence:  Nucleic Acid
  misc_feature: DNAzyme
ggacagagggctagctacaacgacggtaggg

SEQ ID NO: 11933 - DNA, 31 bp, Artificial Sequence
  Description of Artificial Sequence:  Nucleic Acid
  misc_feature: DNAzyme
ccagtggaggctagctacaacgaagagccgg

SEQ ID NO: 11934 - DNA, 31 bp, Artificial Sequence
  Description of Artificial Sequence:  Nucleic Acid
  misc_feature: DNAzyme
caaaccagggctagctacaacgaggacagag

SEQ ID NO: 11935 - DNA, 31 bp, Artificial Sequence
  Description of Artificial Sequence:  Nucleic Acid
  misc_feature: DNAzyme
ggatcaaaggctagctacaacgacagtggac

SEQ ID NO: 11936 - DNA, 31 bp, Artificial Sequence
  Description of Artificial Sequence:  Nucleic Acid
  misc_feature: DNAzyme
gagatggaggctagctacaacgacaaaccag

SEQ ID NO: 11937 - DNA, 31 bp, Artificial Sequence
  Description of Artificial Sequence:  Nucleic Acid
  misc_feature: DNAzyme
ggtggagaggctagctacaacgaggatcaaa

SEQ ID NO: 11938 - DNA, 31 bp, Artificial Sequence
  Description of Artificial Sequence:  Nucleic Acid
  misc_feature: DNAzyme
tgttctggggctagctacaacgaggagatgg

SEQ ID NO: 11939 - DNA, 31 bp, Artificial Sequence
  Description of Artificial Sequence:  Nucleic Acid
  misc_feature: DNAzyme
ccacgatgggctagctacaacgatctggtgg

SEQ ID NO: 11940 - DNA, 31 bp, Artificial Sequence
  Description of Artificial Sequence:  Nucleic Acid
  misc_feature: DNAzyme
gtccacgaggctagctacaacgagttctggt

SEQ ID NO: 11941 - DNA, 31 bp, Artificial Sequence
  Description of Artificial Sequence:  Nucleic Acid
  misc_feature: DNAzyme
cacgtccaggctagctacaacgagatgttct

SEQ ID NO: 11942 - DNA, 31 bp, Artificial Sequence
  Description of Artificial Sequence:  Nucleic Acid
  misc_feature: DNAzyme
attgcacgggctagctacaacgaccacgatg

SEQ ID NO: 11943 - DNA, 31 bp, Artificial Sequence
  Description of Artificial Sequence:  Nucleic Acid
  misc_feature: DNAzyme
gtattgcaggctagctacaacgagtccacga

SEQ ID NO: 11944 - DNA, 31 bp, Artificial Sequence
  Description of Artificial Sequence:  Nucleic Acid
  misc_feature: DNAzyme
aggtattgggctagctacaacgaacgtccac

SEQ ID NO: 11945 - DNA, 31 bp, Artificial Sequence
  Description of Artificial Sequence:  Nucleic Acid
  misc_feature: DNAzyme
tacaggtaggctagctacaacgatgcacgtc

SEQ ID NO: 11946 - DNA, 31 bp, Artificial Sequence
  Description of Artificial Sequence:  Nucleic Acid
  misc_feature: DNAzyme
cgtacaggggctagctacaacgaattgcacg

SEQ ID NO: 11947 - DNA, 31 bp, Artificial Sequence
  Description of Artificial Sequence:  Nucleic Acid
  misc_feature: DNAzyme
acaccgtaggctagctacaacgaaggtattg

SEQ ID NO: 11948 - DNA, 31 bp, Artificial Sequence
  Description of Artificial Sequence:  Nucleic Acid
  misc_feature: DNAzyme
ctacaccgggctagctacaacgaacaggtat

SEQ ID NO: 11949 - DNA, 31 bp, Artificial Sequence
  Description of Artificial Sequence:  Nucleic Acid
  misc_feature: DNAzyme
accctacaggctagctacaacgacgtacagg

SEQ ID NO: 11950 - DNA, 31 bp, Artificial Sequence
  Description of Artificial Sequence:  Nucleic Acid
  misc_feature: DNAzyme
tgaccctaggctagctacaacgaaccgtaca

SEQ ID NO: 11951 - DNA, 31 bp, Artificial Sequence
  Description of Artificial Sequence:  Nucleic Acid
  misc_feature: DNAzyme
accgctgaggctagctacaacgacctacacc

SEQ ID NO: 11952 - DNA, 31 bp, Artificial Sequence
  Description of Artificial Sequence:  Nucleic Acid
  misc_feature: DNAzyme
gacaaccgggctagctacaacgatgacccta

SEQ ID NO: 11953 - DNA, 31 bp, Artificial Sequence
  Description of Artificial Sequence:  Nucleic Acid
  misc_feature: DNAzyme
ggagacaaggctagctacaacgacgctgacc

SEQ ID NO: 11954 - DNA, 31 bp, Artificial Sequence
  Description of Artificial Sequence:  Nucleic Acid
  misc_feature: DNAzyme
gaaggagaggctagctacaacgaaaccgctg

SEQ ID NO: 11955 - DNA, 31 bp, Artificial Sequence
  Description of Artificial Sequence:  Nucleic Acid
  misc_feature: DNAzyme
tttgattgggctagctacaacgagaaggaga

SEQ ID NO: 11956 - DNA, 31 bp, Artificial Sequence
  Description of Artificial Sequence:  Nucleic Acid
  misc_feature: DNAzyme
ccatttgaggctagctacaacgatgcgaagg

SEQ ID NO: 11957 - DNA, 31 bp, Artificial Sequence
  Description of Artificial Sequence:  Nucleic Acid
  misc_feature: DNAzyme
tactcccaggctagctacaacgattgattgc

SEQ ID NO: 11958 - DNA, 31 bp, Artificial Sequence
  Description of Artificial Sequence:  Nucleic Acid
  misc_feature: DNAzyme
aggacataggctagctacaacgatcccattt

SEQ ID NO: 11959 - DNA, 31 bp, Artificial Sequence
  Description of Artificial Sequence:  Nucleic Acid
  misc_feature: DNAzyme
acaggacaggctagctacaacgaactcccat

SEQ ID NO: 11960 - DNA, 31 bp, Artificial Sequence
  Description of Artificial Sequence:  Nucleic Acid
  misc_feature: DNAzyme
caacaggaggctagctacaacgaatactccc

SEQ ID NO: 11961 - DNA, 31 bp, Artificial Sequence
  Description of Artificial Sequence:  Nucleic Acid
  misc_feature: DNAzyme
aaaagcaaggctagctacaacgaaggacata

SEQ ID NO: 11962 - DNA, 31 bp, Artificial Sequence
  Description of Artificial Sequence:  Nucleic Acid
  misc_feature: DNAzyme
aggaaaagggctagctacaacgaaacaggac

SEQ ID NO: 11963 - DNA, 31 bp, Artificial Sequence
  Description of Artificial Sequence:  Nucleic Acid
  misc_feature: DNAzyme
cgcgtctgggctagctacaacgacaggagaa

SEQ ID NO: 11964 - DNA, 31 bp, Artificial Sequence
  Description of Artificial Sequence:  Nucleic Acid
  misc_feature: DNAzyme
cgcgcgcgggctagctacaacgactgccagg

SEQ ID NO: 11965 - DNA, 31 bp, Artificial Sequence
  Description of Artificial Sequence:  Nucleic Acid
  misc_feature: DNAzyme
gacgcgcgggctagctacaacgagtctgcca

SEQ ID NO: 11966 - DNA, 31 bp, Artificial Sequence
  Description of Artificial Sequence:  Nucleic Acid
  misc_feature: DNAzyme
cagacgcgggctagctacaacgagcgtctgc

SEQ ID NO: 11967 - DNA, 31 bp, Artificial Sequence
  Description of Artificial Sequence:  Nucleic Acid
  misc_feature: DNAzyme
cacagacgggctagctacaacgagcgcgtct

SEQ ID NO: 11968 - DNA, 31 bp, Artificial Sequence
  Description of Artificial Sequence:  Nucleic Acid
  misc_feature: DNAzyme
ggcacagaggctagctacaacgagcgcgcgt

SEQ ID NO: 11969 - DNA, 31 bp, Artificial Sequence
  Description of Artificial Sequence:  Nucleic Acid
  misc_feature: DNAzyme
aacaggcaggctagctacaacgaagacgcgc

SEQ ID NO: 11970 - DNA, 31 bp, Artificial Sequence
  Description of Artificial Sequence:  Nucleic Acid
  misc_feature: DNAzyme
caaacaggggctagctacaacgaacagacgc

SEQ ID NO: 11971 - DNA, 31 bp, Artificial Sequence
  Description of Artificial Sequence:  Nucleic Acid
  misc_feature: DNAzyme
tccacaaaggctagctacaacgaaggcacag

SEQ ID NO: 11972 - DNA, 31 bp, Artificial Sequence
  Description of Artificial Sequence:  Nucleic Acid
  misc_feature: DNAzyme
atcatccaggctagctacaacgaaaacaggc

SEQ ID NO: 11973 - DNA, 31 bp, Artificial Sequence
  Description of Artificial Sequence:  Nucleic Acid
  misc_feature: DNAzyme
cagcatcaggctagctacaacgaccacaaac

SEQ ID NO: 11974 - DNA, 31 bp, Artificial Sequence
  Description of Artificial Sequence:  Nucleic Acid
  misc_feature: DNAzyme
caacagcaggctagctacaacgacatccaca

SEQ ID NO: 11975 - DNA, 31 bp, Artificial Sequence
  Description of Artificial Sequence:  Nucleic Acid
  misc_feature: DNAzyme
accaacagggctagctacaacgaatcatcca

SEQ ID NO: 11976 - DNA, 31 bp, Artificial Sequence
  Description of Artificial Sequence:  Nucleic Acid
  misc_feature: DNAzyme
gctaccaaggctagctacaacgaagcatcat

SEQ ID NO: 11977 - DNA, 31 bp, Artificial Sequence
  Description of Artificial Sequence:  Nucleic Acid
  misc_feature: DNAzyme
ctgggctaggctagctacaacgacaacagca

SEQ ID NO: 11978 - DNA, 31 bp, Artificial Sequence
  Description of Artificial Sequence:  Nucleic Acid
  misc_feature: DNAzyme
ggcctgggggctagctacaacgataccaaca

SEQ ID NO: 11979 - DNA, 31 bp, Artificial Sequence
  Description of Artificial Sequence:  Nucleic Acid
  misc_feature: DNAzyme
agcctcggggctagctacaacgactgggcta

SEQ ID NO: 11980 - DNA, 31 bp, Artificial Sequence
  Description of Artificial Sequence:  Nucleic Acid
  misc_feature: DNAzyme
tagggcagggctagctacaacgactcggcct

SEQ ID NO: 11981 - DNA, 31 bp, Artificial Sequence
  Description of Artificial Sequence:  Nucleic Acid
  misc_feature: DNAzyme
ctctagggggctagctacaacgaagcctcgg

SEQ ID NO: 11982 - DNA, 31 bp, Artificial Sequence
  Description of Artificial Sequence:  Nucleic Acid
  misc_feature: DNAzyme
ccaccaggggctagctacaacgatctctagg

SEQ ID NO: 11983 - DNA, 31 bp, Artificial Sequence
  Description of Artificial Sequence:  Nucleic Acid
  misc_feature: DNAzyme
gaggaccaggctagctacaacgacaggttct

SEQ ID NO: 11984 - DNA, 31 bp, Artificial Sequence
  Description of Artificial Sequence:  Nucleic Acid
  misc_feature: DNAzyme
attgaggaggctagctacaacgacaccaggt

SEQ ID NO: 11985 - DNA, 31 bp, Artificial Sequence
  Description of Artificial Sequence:  Nucleic Acid
  misc_feature: DNAzyme
atgctgcaggctagctacaacgatgaggacc

SEQ ID NO: 11986 - DNA, 31 bp, Artificial Sequence
  Description of Artificial Sequence:  Nucleic Acid
  misc_feature: DNAzyme
ggatgctgggctagctacaacgaattgagga

SEQ ID NO: 11987 - DNA, 31 bp, Artificial Sequence
  Description of Artificial Sequence:  Nucleic Acid
  misc_feature: DNAzyme
caaggatgggctagctacaacgatgcattga

SEQ ID NO: 11988 - DNA, 31 bp, Artificial Sequence
  Description of Artificial Sequence:  Nucleic Acid
  misc_feature: DNAzyme
gccaaggaggctagctacaacgagctgcatt

SEQ ID NO: 11989 - DNA, 31 bp, Artificial Sequence
  Description of Artificial Sequence:  Nucleic Acid
  misc_feature: DNAzyme
cactccggggctagctacaacgacaaggatg

SEQ ID NO: 11990 - DNA, 31 bp, Artificial Sequence
  Description of Artificial Sequence:  Nucleic Acid
  misc_feature: DNAzyme
gccatgcaggctagctacaacgatccggcca

SEQ ID NO: 11991 - DNA, 31 bp, Artificial Sequence
  Description of Artificial Sequence:  Nucleic Acid
  misc_feature: DNAzyme
atgccatgggctagctacaacgaactccggc

SEQ ID NO: 11992 - DNA, 31 bp, Artificial Sequence
  Description of Artificial Sequence:  Nucleic Acid
  misc_feature: DNAzyme
ggatgccaggctagctacaacgagcactccg

SEQ ID NO: 11993 - DNA, 31 bp, Artificial Sequence
  Description of Artificial Sequence:  Nucleic Acid
  misc_feature: DNAzyme
agaggatgggctagctacaacgacatgcact

SEQ ID NO: 11994 - DNA, 31 bp, Artificial Sequence
  Description of Artificial Sequence:  Nucleic Acid
  misc_feature: DNAzyme
ggagaggaggctagctacaacgagccatgca

SEQ ID NO: 11995 - DNA, 31 bp, Artificial Sequence
  Description of Artificial Sequence:  Nucleic Acid
  misc_feature: DNAzyme
gaagaacaggctagctacaacgagaggaagg

SEQ ID NO: 11996 - DNA, 31 bp, Artificial Sequence
  Description of Artificial Sequence:  Nucleic Acid
  misc_feature: DNAzyme
cagaagaaggctagctacaacgaacgaggaa

SEQ ID NO: 11997 - DNA, 31 bp, Artificial Sequence
  Description of Artificial Sequence:  Nucleic Acid
  misc_feature: DNAzyme
aggcagcaggctagctacaacgaagaagaac

SEQ ID NO: 11998 - DNA, 31 bp, Artificial Sequence
  Description of Artificial Sequence:  Nucleic Acid
  misc_feature: DNAzyme
ccaggcagggctagctacaacgaacagaaga

SEQ ID NO: 11999 - DNA, 31 bp, Artificial Sequence
  Description of Artificial Sequence:  Nucleic Acid
  misc_feature: DNAzyme
gtaccaggggctagctacaacgaagcacaga

SEQ ID NO: 12000 - DNA, 31 bp, Artificial Sequence
  Description of Artificial Sequence:  Nucleic Acid
  misc_feature: DNAzyme
ttgatgtaggctagctacaacgacaggcagc

SEQ ID NO: 12001 - DNA, 31 bp, Artificial Sequence
  Description of Artificial Sequence:  Nucleic Acid
  misc_feature: DNAzyme
ctttgatgggctagctacaacgaaccaggca

SEQ ID NO: 12002 - DNA, 31 bp, Artificial Sequence
  Description of Artificial Sequence:  Nucleic Acid
  misc_feature: DNAzyme
gcctttgaggctagctacaacgagtaccagg

SEQ ID NO: 12003 - DNA, 31 bp, Artificial Sequence
  Description of Artificial Sequence:  Nucleic Acid
  misc_feature: DNAzyme
ccagcttgggctagctacaacgactttgatg

SEQ ID NO: 12004 - DNA, 31 bp, Artificial Sequence
  Description of Artificial Sequence:  Nucleic Acid
  misc_feature: DNAzyme
gggaccagggctagctacaacgattgccttt

SEQ ID NO: 12005 - DNA, 31 bp, Artificial Sequence
  Description of Artificial Sequence:  Nucleic Acid
  misc_feature: DNAzyme
cccagggaggctagctacaacgacagcttgc

SEQ ID NO: 12006 - DNA, 31 bp, Artificial Sequence
  Description of Artificial Sequence:  Nucleic Acid
  misc_feature: DNAzyme
atatgccgggctagctacaacgacccaggga

SEQ ID NO: 12007 - DNA, 31 bp, Artificial Sequence
  Description of Artificial Sequence:  Nucleic Acid
  misc_feature: DNAzyme
agcatatgggctagctacaacgacgccccag

SEQ ID NO: 12008 - DNA, 31 bp, Artificial Sequence
  Description of Artificial Sequence:  Nucleic Acid
  misc_feature: DNAzyme
agagcataggctagctacaacgagccgcccc

SEQ ID NO: 12009 - DNA, 31 bp, Artificial Sequence
  Description of Artificial Sequence:  Nucleic Acid
  misc_feature: DNAzyme
agagagcaggctagctacaacgaatgccgcc

SEQ ID NO: 12010 - DNA, 31 bp, Artificial Sequence
  Description of Artificial Sequence:  Nucleic Acid
  misc_feature: DNAzyme
gtagagagggctagctacaacgaatatgccg

SEQ ID NO: 12011 - DNA, 31 bp, Artificial Sequence
  Description of Artificial Sequence:  Nucleic Acid
  misc_feature: DNAzyme
atacgccgggctagctacaacgaagagagca

SEQ ID NO: 12012 - DNA, 31 bp, Artificial Sequence
  Description of Artificial Sequence:  Nucleic Acid
  misc_feature: DNAzyme
gccatacgggctagctacaacgacgtagaga

SEQ ID NO: 12013 - DNA, 31 bp, Artificial Sequence
  Description of Artificial Sequence:  Nucleic Acid
  misc_feature: DNAzyme
cggccataggctagctacaacgagccgtaga

SEQ ID NO: 12014 - DNA, 31 bp, Artificial Sequence
  Description of Artificial Sequence:  Nucleic Acid
  misc_feature: DNAzyme
agcggccaggctagctacaacgaacgccgta

SEQ ID NO: 12015 - DNA, 31 bp, Artificial Sequence
  Description of Artificial Sequence:  Nucleic Acid
  misc_feature: DNAzyme
agtagcggggctagctacaacgacatacgcc

SEQ ID NO: 12016 - DNA, 31 bp, Artificial Sequence
  Description of Artificial Sequence:  Nucleic Acid
  misc_feature: DNAzyme
aggagtagggctagctacaacgaggccatac

SEQ ID NO: 12017 - DNA, 31 bp, Artificial Sequence
  Description of Artificial Sequence:  Nucleic Acid
  misc_feature: DNAzyme
agcaggagggctagctacaacgaagcggcca

SEQ ID NO: 12018 - DNA, 31 bp, Artificial Sequence
  Description of Artificial Sequence:  Nucleic Acid
  misc_feature: DNAzyme
agcaggagggctagctacaacgaaggagtag

SEQ ID NO: 12019 - DNA, 31 bp, Artificial Sequence
  Description of Artificial Sequence:  Nucleic Acid
  misc_feature: DNAzyme
aacgccagggctagctacaacgaaggagcag

SEQ ID NO: 12020 - DNA, 31 bp, Artificial Sequence
  Description of Artificial Sequence:  Nucleic Acid
  misc_feature: DNAzyme
tggtaacgggctagctacaacgacagcagga

SEQ ID NO: 12021 - DNA, 31 bp, Artificial Sequence
  Description of Artificial Sequence:  Nucleic Acid
  misc_feature: DNAzyme
ggtggtaaggctagctacaacgagccagcag

SEQ ID NO: 12022 - DNA, 31 bp, Artificial Sequence
  Description of Artificial Sequence:  Nucleic Acid
  misc_feature: DNAzyme
cgtggtggggctagctacaacgaaacgccag

SEQ ID NO: 12023 - DNA, 31 bp, Artificial Sequence
  Description of Artificial Sequence:  Nucleic Acid
  misc_feature: DNAzyme
gcccgtggggctagctacaacgaggtaacgc

SEQ ID NO: 12024 - DNA, 31 bp, Artificial Sequence
  Description of Artificial Sequence:  Nucleic Acid
  misc_feature: DNAzyme
tacgcccgggctagctacaacgaggtggtaa

SEQ ID NO: 12025 - DNA, 31 bp, Artificial Sequence
  Description of Artificial Sequence:  Nucleic Acid
  misc_feature: DNAzyme
ggcgtacgggctagctacaacgaccgtggtg

SEQ ID NO: 12026 - DNA, 31 bp, Artificial Sequence
  Description of Artificial Sequence:  Nucleic Acid
  misc_feature: DNAzyme
atggcgtaggctagctacaacgagcccgtgg

SEQ ID NO: 12027 - DNA, 31 bp, Artificial Sequence
  Description of Artificial Sequence:  Nucleic Acid
  misc_feature: DNAzyme
ccatggcgggctagctacaacgaacgcccgt

SEQ ID NO: 12028 - DNA, 31 bp, Artificial Sequence
  Description of Artificial Sequence:  Nucleic Acid
  misc_feature: DNAzyme
gtccatggggctagctacaacgagtacgccc

SEQ ID NO: 12029 - DNA, 31 bp, Artificial Sequence
  Description of Artificial Sequence:  Nucleic Acid
  misc_feature: DNAzyme
ccggtccaggctagctacaacgaggcgtacg

SEQ ID NO: 12030 - DNA, 31 bp, Artificial Sequence
  Description of Artificial Sequence:  Nucleic Acid
  misc_feature: DNAzyme
tctcccggggctagctacaacgaccatggcg

SEQ ID NO: 12031 - DNA, 31 bp, Artificial Sequence
  Description of Artificial Sequence:  Nucleic Acid
  misc_feature: DNAzyme
tgcggccaggctagctacaacgactcccggt

SEQ ID NO: 12032 - DNA, 31 bp, Artificial Sequence
  Description of Artificial Sequence:  Nucleic Acid
  misc_feature: DNAzyme
cgatgcggggctagctacaacgacatctccc

SEQ ID NO: 12033 - DNA, 31 bp, Artificial Sequence
  Description of Artificial Sequence:  Nucleic Acid
  misc_feature: DNAzyme
gcacgatgggctagctacaacgaggccatct

SEQ ID NO: 12034 - DNA, 31 bp, Artificial Sequence
  Description of Artificial Sequence:  Nucleic Acid
  misc_feature: DNAzyme
ccgcacgaggctagctacaacgagcggccat

SEQ ID NO: 12035 - DNA, 31 bp, Artificial Sequence
  Description of Artificial Sequence:  Nucleic Acid
  misc_feature: DNAzyme
cctccgcaggctagctacaacgagatgcggc

SEQ ID NO: 12036 - DNA, 31 bp, Artificial Sequence
  Description of Artificial Sequence:  Nucleic Acid
  misc_feature: DNAzyme
cgcctccgggctagctacaacgaacgatgcg

SEQ ID NO: 12037 - DNA, 31 bp, Artificial Sequence
  Description of Artificial Sequence:  Nucleic Acid
  misc_feature: DNAzyme
aaaccacgggctagctacaacgactccgcac

SEQ ID NO: 12038 - DNA, 31 bp, Artificial Sequence
  Description of Artificial Sequence:  Nucleic Acid
  misc_feature: DNAzyme
aaaaaccaggctagctacaacgagcctccgc

SEQ ID NO: 12039 - DNA, 31 bp, Artificial Sequence
  Description of Artificial Sequence:  Nucleic Acid
  misc_feature: DNAzyme
tacaaaaaggctagctacaacgacacgcctc

SEQ ID NO: 12040 - DNA, 31 bp, Artificial Sequence
  Description of Artificial Sequence:  Nucleic Acid
  misc_feature: DNAzyme
tagacctaggctagctacaacgaaaaaacca

SEQ ID NO: 12041 - DNA, 31 bp, Artificial Sequence
  Description of Artificial Sequence:  Nucleic Acid
  misc_feature: DNAzyme
gtgctagaggctagctacaacgactacaaaa

SEQ ID NO: 12042 - DNA, 31 bp, Artificial Sequence
  Description of Artificial Sequence:  Nucleic Acid
  misc_feature: DNAzyme
caagagtgggctagctacaacgatagaccta

SEQ ID NO: 12043 - DNA, 31 bp, Artificial Sequence
  Description of Artificial Sequence:  Nucleic Acid
  misc_feature: DNAzyme
gtcaagagggctagctacaacgagctagacc

SEQ ID NO: 12044 - DNA, 31 bp, Artificial Sequence
  Description of Artificial Sequence:  Nucleic Acid
  misc_feature: DNAzyme
tgacaaggggctagctacaacgacaagagtg

SEQ ID NO: 12045 - DNA, 31 bp, Artificial Sequence
  Description of Artificial Sequence:  Nucleic Acid
  misc_feature: DNAzyme
tatggtgaggctagctacaacgaaaggtcaa

SEQ ID NO: 12046 - DNA, 31 bp, Artificial Sequence
  Description of Artificial Sequence:  Nucleic Acid
  misc_feature: DNAzyme
tagtatggggctagctacaacgagacaaggt

SEQ ID NO: 12047 - DNA, 31 bp, Artificial Sequence
  Description of Artificial Sequence:  Nucleic Acid
  misc_feature: DNAzyme
ttgtagtaggctagctacaacgaggtgacaa

SEQ ID NO: 12048 - DNA, 31 bp, Artificial Sequence
  Description of Artificial Sequence:  Nucleic Acid
  misc_feature: DNAzyme
ctttgtagggctagctacaacgaatggtgac

SEQ ID NO: 12049 - DNA, 31 bp, Artificial Sequence
  Description of Artificial Sequence:  Nucleic Acid
  misc_feature: DNAzyme
acactttgggctagctacaacgaagtatggt

SEQ ID NO: 12050 - DNA, 31 bp, Artificial Sequence
  Description of Artificial Sequence:  Nucleic Acid
  misc_feature: DNAzyme
gaggaacaggctagctacaacgatttgtagt

SEQ ID NO: 12051 - DNA, 31 bp, Artificial Sequence
  Description of Artificial Sequence:  Nucleic Acid
  misc_feature: DNAzyme
gcgaggaaggctagctacaacgaactttgta

SEQ ID NO: 12052 - DNA, 31 bp, Artificial Sequence
  Description of Artificial Sequence:  Nucleic Acid
  misc_feature: DNAzyme
gagcctagggctagctacaacgagaggaaca

SEQ ID NO: 12053 - DNA, 31 bp, Artificial Sequence
  Description of Artificial Sequence:  Nucleic Acid
  misc_feature: DNAzyme
catatgagggctagctacaacgactagcgag

SEQ ID NO: 12054 - DNA, 31 bp, Artificial Sequence
  Description of Artificial Sequence:  Nucleic Acid
  misc_feature: DNAzyme
ccaccataggctagctacaacgagagcctag

SEQ ID NO: 12055 - DNA, 31 bp, Artificial Sequence
  Description of Artificial Sequence:  Nucleic Acid
  misc_feature: DNAzyme
aaccaccaggctagctacaacgaatgagcct

SEQ ID NO: 12056 - DNA, 31 bp, Artificial Sequence
  Description of Artificial Sequence:  Nucleic Acid
  misc_feature: DNAzyme
tgcaaccaggctagctacaacgacatatgag

SEQ ID NO: 12057 - DNA, 31 bp, Artificial Sequence
  Description of Artificial Sequence:  Nucleic Acid
  misc_feature: DNAzyme
tattgcaaggctagctacaacgacaccatat

SEQ ID NO: 12058 - DNA, 31 bp, Artificial Sequence
  Description of Artificial Sequence:  Nucleic Acid
  misc_feature: DNAzyme
aggtattgggctagctacaacgaaaccacca

SEQ ID NO: 12059 - DNA, 31 bp, Artificial Sequence
  Description of Artificial Sequence:  Nucleic Acid
  misc_feature: DNAzyme
ataaggtaggctagctacaacgatgcaacca

SEQ ID NO: 12060 - DNA, 31 bp, Artificial Sequence
  Description of Artificial Sequence:  Nucleic Acid
  misc_feature: DNAzyme
tgataaggggctagctacaacgaattgcaac

SEQ ID NO: 12061 - DNA, 31 bp, Artificial Sequence
  Description of Artificial Sequence:  Nucleic Acid
  misc_feature: DNAzyme
tctggtgaggctagctacaacgaaaggtatt

SEQ ID NO: 12062 - DNA, 31 bp, Artificial Sequence
  Description of Artificial Sequence:  Nucleic Acid
  misc_feature: DNAzyme
ggctctggggctagctacaacgagataaggt

SEQ ID NO: 12063 - DNA, 31 bp, Artificial Sequence
  Description of Artificial Sequence:  Nucleic Acid
  misc_feature: DNAzyme
cgcctcggggctagctacaacgatctggtga

SEQ ID NO: 12064 - DNA, 31 bp, Artificial Sequence
  Description of Artificial Sequence:  Nucleic Acid
  misc_feature: DNAzyme
caactgcgggctagctacaacgactcggctc

SEQ ID NO: 12065 - DNA, 31 bp, Artificial Sequence
  Description of Artificial Sequence:  Nucleic Acid
  misc_feature: DNAzyme
tgcaactgggctagctacaacgagcctcggc

SEQ ID NO: 12066 - DNA, 31 bp, Artificial Sequence
  Description of Artificial Sequence:  Nucleic Acid
  misc_feature: DNAzyme
acttgcaaggctagctacaacgatgcgcctc

SEQ ID NO: 12067 - DNA, 31 bp, Artificial Sequence
  Description of Artificial Sequence:  Nucleic Acid
  misc_feature: DNAzyme
cacacttgggctagctacaacgaaactgcgc

SEQ ID NO: 12068 - DNA, 31 bp, Artificial Sequence
  Description of Artificial Sequence:  Nucleic Acid
  misc_feature: DNAzyme
gatccacaggctagctacaacgattgcaact

SEQ ID NO: 12069 - DNA, 31 bp, Artificial Sequence
  Description of Artificial Sequence:  Nucleic Acid
  misc_feature: DNAzyme
gggatccaggctagctacaacgaacttgcaa

SEQ ID NO: 12070 - DNA, 31 bp, Artificial Sequence
  Description of Artificial Sequence:  Nucleic Acid
  misc_feature: DNAzyme
gggggggaggctagctacaacgaccacactt

SEQ ID NO: 12071 - DNA, 31 bp, Artificial Sequence
  Description of Artificial Sequence:  Nucleic Acid
  misc_feature: DNAzyme
cccgaacgggctagctacaacgatgaggggg

SEQ ID NO: 12072 - DNA, 31 bp, Artificial Sequence
  Description of Artificial Sequence:  Nucleic Acid
  misc_feature: DNAzyme
cccccgaaggctagctacaacgagttgaggg

SEQ ID NO: 12073 - DNA, 31 bp, Artificial Sequence
  Description of Artificial Sequence:  Nucleic Acid
  misc_feature: DNAzyme
gcaccgcgggctagctacaacgacccccccg

SEQ ID NO: 12074 - DNA, 31 bp, Artificial Sequence
  Description of Artificial Sequence:  Nucleic Acid
  misc_feature: DNAzyme
tggcaccgggctagctacaacgagccccccc

SEQ ID NO: 12075 - DNA, 31 bp, Artificial Sequence
  Description of Artificial Sequence:  Nucleic Acid
  misc_feature: DNAzyme
tgatggcaggctagctacaacgacgcgcccc

SEQ ID NO: 12076 - DNA, 31 bp, Artificial Sequence
  Description of Artificial Sequence:  Nucleic Acid
  misc_feature: DNAzyme
aatgatggggctagctacaacgaaccgcgcc

SEQ ID NO: 12077 - DNA, 31 bp, Artificial Sequence
  Description of Artificial Sequence:  Nucleic Acid
  misc_feature: DNAzyme
gagaatgaggctagctacaacgaggcaccgc

SEQ ID NO: 12078 - DNA, 31 bp, Artificial Sequence
  Description of Artificial Sequence:  Nucleic Acid
  misc_feature: DNAzyme
gaggagaaggctagctacaacgagatggcac

SEQ ID NO: 12079 - DNA, 31 bp, Artificial Sequence
  Description of Artificial Sequence:  Nucleic Acid
  misc_feature: DNAzyme
cacacacgggctagctacaacgagaggagaa

SEQ ID NO: 12080 - DNA, 31 bp, Artificial Sequence
  Description of Artificial Sequence:  Nucleic Acid
  misc_feature: DNAzyme
accacacaggctagctacaacgagtgaggag

SEQ ID NO: 12081 - DNA, 31 bp, Artificial Sequence
  Description of Artificial Sequence:  Nucleic Acid
  misc_feature: DNAzyme
ggaccacaggctagctacaacgaacgtgagg

SEQ ID NO: 12082 - DNA, 31 bp, Artificial Sequence
  Description of Artificial Sequence:  Nucleic Acid
  misc_feature: DNAzyme
gtggaccaggctagctacaacgaacacgtga

SEQ ID NO: 12083 - DNA, 31 bp, Artificial Sequence
  Description of Artificial Sequence:  Nucleic Acid
  misc_feature: DNAzyme
tgggtggaggctagctacaacgacacacacg

SEQ ID NO: 12084 - DNA, 31 bp, Artificial Sequence
  Description of Artificial Sequence:  Nucleic Acid
  misc_feature: DNAzyme
gctctgggggctagctacaacgaggaccaca

SEQ ID NO: 12085 - DNA, 31 bp, Artificial Sequence
  Description of Artificial Sequence:  Nucleic Acid
  misc_feature: DNAzyme
aagattagggctagctacaacgatctgggtg

SEQ ID NO: 12086 - DNA, 31 bp, Artificial Sequence
  Description of Artificial Sequence:  Nucleic Acid
  misc_feature: DNAzyme
gtcaaagaggctagctacaacgatagctctg

SEQ ID NO: 12087 - DNA, 31 bp, Artificial Sequence
  Description of Artificial Sequence:  Nucleic Acid
  misc_feature: DNAzyme
tggtgatgggctagctacaacgacaaagatt

SEQ ID NO: 12088 - DNA, 31 bp, Artificial Sequence
  Description of Artificial Sequence:  Nucleic Acid
  misc_feature: DNAzyme
tttggtgaggctagctacaacgagtcaaaga

SEQ ID NO: 12089 - DNA, 31 bp, Artificial Sequence
  Description of Artificial Sequence:  Nucleic Acid
  misc_feature: DNAzyme
aattttggggctagctacaacgagatgtcaa

SEQ ID NO: 12090 - DNA, 31 bp, Artificial Sequence
  Description of Artificial Sequence:  Nucleic Acid
  misc_feature: DNAzyme
gagcataaggctagctacaacgatttggtga

SEQ ID NO: 12091 - DNA, 31 bp, Artificial Sequence
  Description of Artificial Sequence:  Nucleic Acid
  misc_feature: DNAzyme
ggcgagcaggctagctacaacgaaattttgg

SEQ ID NO: 12092 - DNA, 31 bp, Artificial Sequence
  Description of Artificial Sequence:  Nucleic Acid
  misc_feature: DNAzyme
atggcgagggctagctacaacgaataatttt

SEQ ID NO: 12093 - DNA, 31 bp, Artificial Sequence
  Description of Artificial Sequence:  Nucleic Acid
  misc_feature: DNAzyme
gagtatggggctagctacaacgagagcataa

SEQ ID NO: 12094 - DNA, 31 bp, Artificial Sequence
  Description of Artificial Sequence:  Nucleic Acid
  misc_feature: DNAzyme
gccgagtaggctagctacaacgaggcgagca

SEQ ID NO: 12095 - DNA, 31 bp, Artificial Sequence
  Description of Artificial Sequence:  Nucleic Acid
  misc_feature: DNAzyme
gggccgagggctagctacaacgaatggcgag

SEQ ID NO: 12096 - DNA, 31 bp, Artificial Sequence
  Description of Artificial Sequence:  Nucleic Acid
  misc_feature: DNAzyme
tgagcgggggctagctacaacgacgagtatg

SEQ ID NO: 12097 - DNA, 31 bp, Artificial Sequence
  Description of Artificial Sequence:  Nucleic Acid
  misc_feature: DNAzyme
accatgagggctagctacaacgagggccgag

SEQ ID NO: 12098 - DNA, 31 bp, Artificial Sequence
  Description of Artificial Sequence:  Nucleic Acid
  misc_feature: DNAzyme
gagcaccaggctagctacaacgagagcgggc

SEQ ID NO: 12099 - DNA, 31 bp, Artificial Sequence
  Description of Artificial Sequence:  Nucleic Acid
  misc_feature: DNAzyme
ctggagcaggctagctacaacgacatgagcg

SEQ ID NO: 12100 - DNA, 31 bp, Artificial Sequence
  Description of Artificial Sequence:  Nucleic Acid
  misc_feature: DNAzyme
gcctggagggctagctacaacgaaccatgag

SEQ ID NO: 12101 - DNA, 31 bp, Artificial Sequence
  Description of Artificial Sequence:  Nucleic Acid
  misc_feature: DNAzyme
tataccagggctagctacaacgactggagca

SEQ ID NO: 12102 - DNA, 31 bp, Artificial Sequence
  Description of Artificial Sequence:  Nucleic Acid
  misc_feature: DNAzyme
ttgctataggctagctacaacgacagcctgg

SEQ ID NO: 12103 - DNA, 31 bp, Artificial Sequence
  Description of Artificial Sequence:  Nucleic Acid
  misc_feature: DNAzyme
ttttgctaggctagctacaacgaaccagcct

SEQ ID NO: 12104 - DNA, 31 bp, Artificial Sequence
  Description of Artificial Sequence:  Nucleic Acid
  misc_feature: DNAzyme
cacttttgggctagctacaacgatataccag

SEQ ID NO: 12105 - DNA, 31 bp, Artificial Sequence
  Description of Artificial Sequence:  Nucleic Acid
  misc_feature: DNAzyme
gtccggcaggctagctacaacgattttgcta

SEQ ID NO: 12106 - DNA, 31 bp, Artificial Sequence
  Description of Artificial Sequence:  Nucleic Acid
  misc_feature: DNAzyme
aagtccggggctagctacaacgaacttttgc

SEQ ID NO: 12107 - DNA, 31 bp, Artificial Sequence
  Description of Artificial Sequence:  Nucleic Acid
  misc_feature: DNAzyme
gcacaaagggctagctacaacgaccggcact

SEQ ID NO: 12108 - DNA, 31 bp, Artificial Sequence
  Description of Artificial Sequence:  Nucleic Acid
  misc_feature: DNAzyme
agcccgcaggctagctacaacgaaaagtccg

SEQ ID NO: 12109 - DNA, 31 bp, Artificial Sequence
  Description of Artificial Sequence:  Nucleic Acid
  misc_feature: DNAzyme
tgagcccgggctagctacaacgaacaaagtc

SEQ ID NO: 12110 - DNA, 31 bp, Artificial Sequence
  Description of Artificial Sequence:  Nucleic Acid
  misc_feature: DNAzyme
cccttgagggctagctacaacgaccgcacaa

SEQ ID NO: 12111 - DNA, 31 bp, Artificial Sequence
  Description of Artificial Sequence:  Nucleic Acid
  misc_feature: DNAzyme
acggatgaggctagctacaacgacccttgag

SEQ ID NO: 12112 - DNA, 31 bp, Artificial Sequence
  Description of Artificial Sequence:  Nucleic Acid
  misc_feature: DNAzyme
ttcacggaggctagctacaacgagacccctt

SEQ ID NO: 12113 - DNA, 31 bp, Artificial Sequence
  Description of Artificial Sequence:  Nucleic Acid
  misc_feature: DNAzyme
tgcattcaggctagctacaacgaggatgacc

SEQ ID NO: 12114 - DNA, 31 bp, Artificial Sequence
  Description of Artificial Sequence:  Nucleic Acid
  misc_feature: DNAzyme
aaaatgcaggctagctacaacgatcacggat

SEQ ID NO: 12115 - DNA, 31 bp, Artificial Sequence
  Description of Artificial Sequence:  Nucleic Acid
  misc_feature: DNAzyme
ccaaaatgggctagctacaacgaattcacgg

SEQ ID NO: 12116 - DNA, 31 bp, Artificial Sequence
  Description of Artificial Sequence:  Nucleic Acid
  misc_feature: DNAzyme
caccaaaaggctagctacaacgagcattcac

SEQ ID NO: 12117 - DNA, 31 bp, Artificial Sequence
  Description of Artificial Sequence:  Nucleic Acid
  misc_feature: DNAzyme
tttccgcaggctagctacaacgacaaaatgc

SEQ ID NO: 12118 - DNA, 31 bp, Artificial Sequence
  Description of Artificial Sequence:  Nucleic Acid
  misc_feature: DNAzyme
actttccgggctagctacaacgaaccaaaat

SEQ ID NO: 12119 - DNA, 31 bp, Artificial Sequence
  Description of Artificial Sequence:  Nucleic Acid
  misc_feature: DNAzyme
cccaccgaggctagctacaacgatttccgca

SEQ ID NO: 12120 - DNA, 31 bp, Artificial Sequence
  Description of Artificial Sequence:  Nucleic Acid
  misc_feature: DNAzyme
gccccccaggctagctacaacgacgactttc

SEQ ID NO: 12121 - DNA, 31 bp, Artificial Sequence
  Description of Artificial Sequence:  Nucleic Acid
  misc_feature: DNAzyme
acatattgggctagctacaacgacccccacc

SEQ ID NO: 12122 - DNA, 31 bp, Artificial Sequence
  Description of Artificial Sequence:  Nucleic Acid
  misc_feature: DNAzyme
tggacataggctagctacaacgatgcccccc

SEQ ID NO: 12123 - DNA, 31 bp, Artificial Sequence
  Description of Artificial Sequence:  Nucleic Acid
  misc_feature: DNAzyme
tttggacaggctagctacaacgaattgcccc

SEQ ID NO: 12124 - DNA, 31 bp, Artificial Sequence
  Description of Artificial Sequence:  Nucleic Acid
  misc_feature: DNAzyme
catttggaggctagctacaacgaatattgcc

SEQ ID NO: 12125 - DNA, 31 bp, Artificial Sequence
  Description of Artificial Sequence:  Nucleic Acid
  misc_feature: DNAzyme
gaaggccaggctagctacaacgattggacat

SEQ ID NO: 12126 - DNA, 31 bp, Artificial Sequence
  Description of Artificial Sequence:  Nucleic Acid
  misc_feature: DNAzyme
catgaaggggctagctacaacgacatttgga

SEQ ID NO: 12127 - DNA, 31 bp, Artificial Sequence
  Description of Artificial Sequence:  Nucleic Acid
  misc_feature: DNAzyme
caacttcaggctagctacaacgagaaggcca

SEQ ID NO: 12128 - DNA, 31 bp, Artificial Sequence
  Description of Artificial Sequence:  Nucleic Acid
  misc_feature: DNAzyme
tcggccaaggctagctacaacgattcatgaa

SEQ ID NO: 12129 - DNA, 31 bp, Artificial Sequence
  Description of Artificial Sequence:  Nucleic Acid
  misc_feature: DNAzyme
caattcggggctagctacaacgacaacttca

SEQ ID NO: 12130 - DNA, 31 bp, Artificial Sequence
  Description of Artificial Sequence:  Nucleic Acid
  misc_feature: DNAzyme
cctttcaaggctagctacaacgatcggccaa

SEQ ID NO: 12131 - DNA, 31 bp, Artificial Sequence
  Description of Artificial Sequence:  Nucleic Acid
  misc_feature: DNAzyme
cggacgtaggctagctacaacgactttcaat

SEQ ID NO: 12132 - DNA, 31 bp, Artificial Sequence
  Description of Artificial Sequence:  Nucleic Acid
  misc_feature: DNAzyme
gacggacgggctagctacaacgaacctttca

SEQ ID NO: 12133 - DNA, 31 bp, Artificial Sequence
  Description of Artificial Sequence:  Nucleic Acid
  misc_feature: DNAzyme
tagacggaggctagctacaacgagtaccttt

SEQ ID NO: 12134 - DNA, 31 bp, Artificial Sequence
  Description of Artificial Sequence:  Nucleic Acid
  misc_feature: DNAzyme
gtcatagaggctagctacaacgaggacgtac

SEQ ID NO: 12135 - DNA, 31 bp, Artificial Sequence
  Description of Artificial Sequence:  Nucleic Acid
  misc_feature: DNAzyme
ggtggtcaggctagctacaacgaagacggac

SEQ ID NO: 12136 - DNA, 31 bp, Artificial Sequence
  Description of Artificial Sequence:  Nucleic Acid
  misc_feature: DNAzyme
tgaggtggggctagctacaacgacatagacg

SEQ ID NO: 12137 - DNA, 31 bp, Artificial Sequence
  Description of Artificial Sequence:  Nucleic Acid
  misc_feature: DNAzyme
gagtgaggggctagctacaacgaggtcatag

SEQ ID NO: 12138 - DNA, 31 bp, Artificial Sequence
  Description of Artificial Sequence:  Nucleic Acid
  misc_feature: DNAzyme
cagtggagggctagctacaacgagaggtggt

SEQ ID NO: 12139 - DNA, 31 bp, Artificial Sequence
  Description of Artificial Sequence:  Nucleic Acid
  misc_feature: DNAzyme
tcctgcagggctagctacaacgaggagtgag

SEQ ID NO: 12140 - DNA, 31 bp, Artificial Sequence
  Description of Artificial Sequence:  Nucleic Acid
  misc_feature: DNAzyme
cagtcctgggctagctacaacgaagtggagt

SEQ ID NO: 12141 - DNA, 31 bp, Artificial Sequence
  Description of Artificial Sequence:  Nucleic Acid
  misc_feature: DNAzyme
gggcccagggctagctacaacgacctgcagt

SEQ ID NO: 12142 - DNA, 31 bp, Artificial Sequence
  Description of Artificial Sequence:  Nucleic Acid
  misc_feature: DNAzyme
tgtgtgggggctagctacaacgaccagtcct

SEQ ID NO: 12143 - DNA, 31 bp, Artificial Sequence
  Description of Artificial Sequence:  Nucleic Acid
  misc_feature: DNAzyme
gacctgtgggctagctacaacgagggcccag

SEQ ID NO: 12144 - DNA, 31 bp, Artificial Sequence
  Description of Artificial Sequence:  Nucleic Acid
  misc_feature: DNAzyme
tagacctgggctagctacaacgagtgggccc

SEQ ID NO: 12145 - DNA, 31 bp, Artificial Sequence
  Description of Artificial Sequence:  Nucleic Acid
  misc_feature: DNAzyme
ctcgtagaggctagctacaacgactgtgtgg

SEQ ID NO: 12146 - DNA, 31 bp, Artificial Sequence
  Description of Artificial Sequence:  Nucleic Acid
  misc_feature: DNAzyme
aggtctcgggctagctacaacgaagacctgt

SEQ ID NO: 12147 - DNA, 31 bp, Artificial Sequence
  Description of Artificial Sequence:  Nucleic Acid
  misc_feature: DNAzyme
ccgccaggggctagctacaacgactcgtaga

SEQ ID NO: 12148 - DNA, 31 bp, Artificial Sequence
  Description of Artificial Sequence:  Nucleic Acid
  misc_feature: DNAzyme
cgctaccgggctagctacaacgacaggtctc

SEQ ID NO: 12149 - DNA, 31 bp, Artificial Sequence
  Description of Artificial Sequence:  Nucleic Acid
  misc_feature: DNAzyme
gaccgctaggctagctacaacgacgccaggt

SEQ ID NO: 12150 - DNA, 31 bp, Artificial Sequence
  Description of Artificial Sequence:  Nucleic Acid
  misc_feature: DNAzyme
ctcgaccgggctagctacaacgataccgcca

SEQ ID NO: 12151 - DNA, 31 bp, Artificial Sequence
  Description of Artificial Sequence:  Nucleic Acid
  misc_feature: DNAzyme
gggctcgaggctagctacaacgacgctaccg

SEQ ID NO: 12152 - DNA, 31 bp, Artificial Sequence
  Description of Artificial Sequence:  Nucleic Acid
  misc_feature: DNAzyme
acgacgggggctagctacaacgatcgaccgc

SEQ ID NO: 12153 - DNA, 31 bp, Artificial Sequence
  Description of Artificial Sequence:  Nucleic Acid
  misc_feature: DNAzyme
gaagacgaggctagctacaacgagggctcga

SEQ ID NO: 12154 - DNA, 31 bp, Artificial Sequence
  Description of Artificial Sequence:  Nucleic Acid
  misc_feature: DNAzyme
ggagaagaggctagctacaacgagacgggct

SEQ ID NO: 12155 - DNA, 31 bp, Artificial Sequence
  Description of Artificial Sequence:  Nucleic Acid
  misc_feature: DNAzyme
tttccatgggctagctacaacgacggagaag

SEQ ID NO: 12156 - DNA, 31 bp, Artificial Sequence
  Description of Artificial Sequence:  Nucleic Acid
  misc_feature: DNAzyme
gatttccaggctagctacaacgagtcggaga

SEQ ID NO: 12157 - DNA, 31 bp, Artificial Sequence
  Description of Artificial Sequence:  Nucleic Acid
  misc_feature: DNAzyme
gatcttgaggctagctacaacgattccatgt

SEQ ID NO: 12158 - DNA, 31 bp, Artificial Sequence
  Description of Artificial Sequence:  Nucleic Acid
  misc_feature: DNAzyme
ggtgatgaggctagctacaacgacttgattt

SEQ ID NO: 12159 - DNA, 31 bp, Artificial Sequence
  Description of Artificial Sequence:  Nucleic Acid
  misc_feature: DNAzyme
ccaggtgaggctagctacaacgagatcttga

SEQ ID NO: 12160 - DNA, 31 bp, Artificial Sequence
  Description of Artificial Sequence:  Nucleic Acid
  misc_feature: DNAzyme
cccccaggggctagctacaacgagatgatct

SEQ ID NO: 12161 - DNA, 31 bp, Artificial Sequence
  Description of Artificial Sequence:  Nucleic Acid
  misc_feature: DNAzyme
ccgcggtgggctagctacaacgactcccccc

SEQ ID NO: 12162 - DNA, 31 bp, Artificial Sequence
  Description of Artificial Sequence:  Nucleic Acid
  misc_feature: DNAzyme
cgccgcggggctagctacaacgagtctcccc

SEQ ID NO: 12163 - DNA, 31 bp, Artificial Sequence
  Description of Artificial Sequence:  Nucleic Acid
  misc_feature: DNAzyme
acacgccgggctagctacaacgaggtgtctc

SEQ ID NO: 12164 - DNA, 31 bp, Artificial Sequence
  Description of Artificial Sequence:  Nucleic Acid
  misc_feature: DNAzyme
cccacacgggctagctacaacgacgcggtgt

SEQ ID NO: 12165 - DNA, 31 bp, Artificial Sequence
  Description of Artificial Sequence:  Nucleic Acid
  misc_feature: DNAzyme
tccccacaggctagctacaacgagccgcggt

SEQ ID NO: 12166 - DNA, 31 bp, Artificial Sequence
  Description of Artificial Sequence:  Nucleic Acid
  misc_feature: DNAzyme
tgtccccaggctagctacaacgaacgccgcg

SEQ ID NO: 12167 - DNA, 31 bp, Artificial Sequence
  Description of Artificial Sequence:  Nucleic Acid
  misc_feature: DNAzyme
taatgatgggctagctacaacgaccccacac

SEQ ID NO: 12168 - DNA, 31 bp, Artificial Sequence
  Description of Artificial Sequence:  Nucleic Acid
  misc_feature: DNAzyme
cataatgaggctagctacaacgagtccccac

SEQ ID NO: 12169 - DNA, 31 bp, Artificial Sequence
  Description of Artificial Sequence:  Nucleic Acid
  misc_feature: DNAzyme
acccataaggctagctacaacgagatgtccc

SEQ ID NO: 12170 - DNA, 31 bp, Artificial Sequence
  Description of Artificial Sequence:  Nucleic Acid
  misc_feature: DNAzyme
tagacccaggctagctacaacgaaatgatgt

SEQ ID NO: 12171 - DNA, 31 bp, Artificial Sequence
  Description of Artificial Sequence:  Nucleic Acid
  misc_feature: DNAzyme
caggtagaggctagctacaacgaccataatg

SEQ ID NO: 12172 - DNA, 31 bp, Artificial Sequence
  Description of Artificial Sequence:  Nucleic Acid
  misc_feature: DNAzyme
gagacaggggctagctacaacgaagacccat

SEQ ID NO: 12173 - DNA, 31 bp, Artificial Sequence
  Description of Artificial Sequence:  Nucleic Acid
  misc_feature: DNAzyme
ggcggagaggctagctacaacgaaggtagac

SEQ ID NO: 12174 - DNA, 31 bp, Artificial Sequence
  Description of Artificial Sequence:  Nucleic Acid
  misc_feature: DNAzyme
ccttcgggggctagctacaacgaggagacag

SEQ ID NO: 12175 - DNA, 31 bp, Artificial Sequence
  Description of Artificial Sequence:  Nucleic Acid
  misc_feature: DNAzyme
taggagtaggctagctacaacgactccctcc

SEQ ID NO: 12176 - DNA, 31 bp, Artificial Sequence
  Description of Artificial Sequence:  Nucleic Acid
  misc_feature: DNAzyme
cctaggagggctagctacaacgaatctccct

SEQ ID NO: 12177 - DNA, 31 bp, Artificial Sequence
  Description of Artificial Sequence:  Nucleic Acid
  misc_feature: DNAzyme
tcggctggggctagctacaacgacctaggag

SEQ ID NO: 12178 - DNA, 31 bp, Artificial Sequence
  Description of Artificial Sequence:  Nucleic Acid
  misc_feature: DNAzyme
actgtcggggctagctacaacgatggtccta

SEQ ID NO: 12179 - DNA, 31 bp, Artificial Sequence
  Description of Artificial Sequence:  Nucleic Acid
  misc_feature: DNAzyme
caagactgggctagctacaacgacggctggt

SEQ ID NO: 12180 - DNA, 31 bp, Artificial Sequence
  Description of Artificial Sequence:  Nucleic Acid
  misc_feature: DNAzyme
cctcaagaggctagctacaacgatgtcggct

SEQ ID NO: 12181 - DNA, 31 bp, Artificial Sequence
  Description of Artificial Sequence:  Nucleic Acid
  misc_feature: DNAzyme
cacccctgggctagctacaacgaccctcaag

SEQ ID NO: 12182 - DNA, 31 bp, Artificial Sequence
  Description of Artificial Sequence:  Nucleic Acid
  misc_feature: DNAzyme
agtcgccaggctagctacaacgaccctgccc

SEQ ID NO: 12183 - DNA, 31 bp, Artificial Sequence
  Description of Artificial Sequence:  Nucleic Acid
  misc_feature: DNAzyme
aggagtcgggctagctacaacgacacccctg

SEQ ID NO: 12184 - DNA, 31 bp, Artificial Sequence
  Description of Artificial Sequence:  Nucleic Acid
  misc_feature: DNAzyme
gcgaggagggctagctacaacgacgccaccc

SEQ ID NO: 12185 - DNA, 31 bp, Artificial Sequence
  Description of Artificial Sequence:  Nucleic Acid
  misc_feature: DNAzyme
aatgggcgggctagctacaacgagaggagtc

SEQ ID NO: 12186 - DNA, 31 bp, Artificial Sequence
  Description of Artificial Sequence:  Nucleic Acid
  misc_feature: DNAzyme
gtaatgggggctagctacaacgagcgaggag

SEQ ID NO: 12187 - DNA, 31 bp, Artificial Sequence
  Description of Artificial Sequence:  Nucleic Acid
  misc_feature: DNAzyme
ggccgtaaggctagctacaacgagggcgcga

SEQ ID NO: 12188 - DNA, 31 bp, Artificial Sequence
  Description of Artificial Sequence:  Nucleic Acid
  misc_feature: DNAzyme
gtaggccgggctagctacaacgaaatgggcg

SEQ ID NO: 12189 - DNA, 31 bp, Artificial Sequence
  Description of Artificial Sequence:  Nucleic Acid
  misc_feature: DNAzyme
ggagtaggggctagctacaacgacgtaatgg

SEQ ID NO: 12190 - DNA, 31 bp, Artificial Sequence
  Description of Artificial Sequence:  Nucleic Acid
  misc_feature: DNAzyme
gttgggagggctagctacaacgaaggccgta

SEQ ID NO: 12191 - DNA, 31 bp, Artificial Sequence
  Description of Artificial Sequence:  Nucleic Acid
  misc_feature: DNAzyme
cgcgtctgggctagctacaacgatgggagta

SEQ ID NO: 12192 - DNA, 31 bp, Artificial Sequence
  Description of Artificial Sequence:  Nucleic Acid
  misc_feature: DNAzyme
gccccgcgggctagctacaacgactgttggg

SEQ ID NO: 12193 - DNA, 31 bp, Artificial Sequence
  Description of Artificial Sequence:  Nucleic Acid
  misc_feature: DNAzyme
aggccccgggctagctacaacgagtctgttg

SEQ ID NO: 12194 - DNA, 31 bp, Artificial Sequence
  Description of Artificial Sequence:  Nucleic Acid
  misc_feature: DNAzyme
caaacaggggctagctacaacgacccgcgtc

SEQ ID NO: 12195 - DNA, 31 bp, Artificial Sequence
  Description of Artificial Sequence:  Nucleic Acid
  misc_feature: DNAzyme
cagccaaaggctagctacaacgaaggccccg

SEQ ID NO: 12196 - DNA, 31 bp, Artificial Sequence
  Description of Artificial Sequence:  Nucleic Acid
  misc_feature: DNAzyme
taatgcagggctagctacaacgacaaacagg

SEQ ID NO: 12197 - DNA, 31 bp, Artificial Sequence
  Description of Artificial Sequence:  Nucleic Acid
  misc_feature: DNAzyme
tgataatgggctagctacaacgaagccaaac

SEQ ID NO: 12198 - DNA, 31 bp, Artificial Sequence
  Description of Artificial Sequence:  Nucleic Acid
  misc_feature: DNAzyme
ggtgataaggctagctacaacgagcagccaa

SEQ ID NO: 12199 - DNA, 31 bp, Artificial Sequence
  Description of Artificial Sequence:  Nucleic Acid
  misc_feature: DNAzyme
gctggtgaggctagctacaacgaaatgcagc

SEQ ID NO: 12200 - DNA, 31 bp, Artificial Sequence
  Description of Artificial Sequence:  Nucleic Acid
  misc_feature: DNAzyme
gaggctggggctagctacaacgagataatgc

SEQ ID NO: 12201 - DNA, 31 bp, Artificial Sequence
  Description of Artificial Sequence:  Nucleic Acid
  misc_feature: DNAzyme
ccgtgaggggctagctacaacgatggtgata

SEQ ID NO: 12202 - DNA, 31 bp, Artificial Sequence
  Description of Artificial Sequence:  Nucleic Acid
  misc_feature: DNAzyme
ccggcccgggctagctacaacgagaggctgg

SEQ ID NO: 12203 - DNA, 31 bp, Artificial Sequence
  Description of Artificial Sequence:  Nucleic Acid
  misc_feature: DNAzyme
tgtcccggggctagctacaacgaccgtgagg

SEQ ID NO: 12204 - DNA, 31 bp, Artificial Sequence
  Description of Artificial Sequence:  Nucleic Acid
  misc_feature: DNAzyme
ggttcttgggctagctacaacgacccggccc

SEQ ID NO: 12205 - DNA, 31 bp, Artificial Sequence
  Description of Artificial Sequence:  Nucleic Acid
  misc_feature: DNAzyme
cgacttggggctagctacaacgatcttgtcc

SEQ ID NO: 12206 - DNA, 31 bp, Artificial Sequence
  Description of Artificial Sequence:  Nucleic Acid
  misc_feature: DNAzyme
cccctcgaggctagctacaacgattggttct

SEQ ID NO: 12207 - DNA, 31 bp, Artificial Sequence
  Description of Artificial Sequence:  Nucleic Acid
  misc_feature: DNAzyme
cacttgaaggctagctacaacgattccccct

SEQ ID NO: 12208 - DNA, 31 bp, Artificial Sequence
  Description of Artificial Sequence:  Nucleic Acid
  misc_feature: DNAzyme
ggaaaccaggctagctacaacgattgaactt

SEQ ID NO: 12209 - DNA, 31 bp, Artificial Sequence
  Description of Artificial Sequence:  Nucleic Acid
  misc_feature: DNAzyme
ggtggaaaggctagctacaacgacacttgaa

SEQ ID NO: 12210 - DNA, 31 bp, Artificial Sequence
  Description of Artificial Sequence:  Nucleic Acid
  misc_feature: DNAzyme
cgtcgcggggctagctacaacgaggaaacca

SEQ ID NO: 12211 - DNA, 31 bp, Artificial Sequence
  Description of Artificial Sequence:  Nucleic Acid
  misc_feature: DNAzyme
ctgcgtcgggctagctacaacgaggtggaaa

SEQ ID NO: 12212 - DNA, 31 bp, Artificial Sequence
  Description of Artificial Sequence:  Nucleic Acid
  misc_feature: DNAzyme
agactgcgggctagctacaacgacgcggtgg

SEQ ID NO: 12213 - DNA, 31 bp, Artificial Sequence
  Description of Artificial Sequence:  Nucleic Acid
  misc_feature: DNAzyme
aaagactgggctagctacaacgagtcgcggt

SEQ ID NO: 12214 - DNA, 31 bp, Artificial Sequence
  Description of Artificial Sequence:  Nucleic Acid
  misc_feature: DNAzyme
aggaaagaggctagctacaacgatgcgtcgc

SEQ ID NO: 12215 - DNA, 31 bp, Artificial Sequence
  Description of Artificial Sequence:  Nucleic Acid
  misc_feature: DNAzyme
gcaggtcgggctagctacaacgataggaaag

SEQ ID NO: 12216 - DNA, 31 bp, Artificial Sequence
  Description of Artificial Sequence:  Nucleic Acid
  misc_feature: DNAzyme
gacgcaggggctagctacaacgacgctagga

SEQ ID NO: 12217 - DNA, 31 bp, Artificial Sequence
  Description of Artificial Sequence:  Nucleic Acid
  misc_feature: DNAzyme
cgttgacgggctagctacaacgaaggtcgct

SEQ ID NO: 12218 - DNA, 31 bp, Artificial Sequence
  Description of Artificial Sequence:  Nucleic Acid
  misc_feature: DNAzyme
gccgttgaggctagctacaacgagcaggtcg

SEQ ID NO: 12219 - DNA, 31 bp, Artificial Sequence
  Description of Artificial Sequence:  Nucleic Acid
  misc_feature: DNAzyme
acacgccgggctagctacaacgatgacgcag

SEQ ID NO: 12220 - DNA, 31 bp, Artificial Sequence
  Description of Artificial Sequence:  Nucleic Acid
  misc_feature: DNAzyme
agcacacgggctagctacaacgacgttgacg

SEQ ID NO: 12221 - DNA, 31 bp, Artificial Sequence
  Description of Artificial Sequence:  Nucleic Acid
  misc_feature: DNAzyme
ccagcacaggctagctacaacgagccgttga

SEQ ID NO: 12222 - DNA, 31 bp, Artificial Sequence
  Description of Artificial Sequence:  Nucleic Acid
  misc_feature: DNAzyme
gtccagcaggctagctacaacgaacgccgtt

SEQ ID NO: 12223 - DNA, 31 bp, Artificial Sequence
  Description of Artificial Sequence:  Nucleic Acid
  misc_feature: DNAzyme
cagtccagggctagctacaacgaacacgccg

SEQ ID NO: 12224 - DNA, 31 bp, Artificial Sequence
  Description of Artificial Sequence:  Nucleic Acid
  misc_feature: DNAzyme
gtagacagggctagctacaacgaccagcaca

SEQ ID NO: 12225 - DNA, 31 bp, Artificial Sequence
  Description of Artificial Sequence:  Nucleic Acid
  misc_feature: DNAzyme
gtggtagaggctagctacaacgaagtccagc

SEQ ID NO: 12226 - DNA, 31 bp, Artificial Sequence
  Description of Artificial Sequence:  Nucleic Acid
  misc_feature: DNAzyme
cgccgtggggctagctacaacgaagacagtc

SEQ ID NO: 12227 - DNA, 31 bp, Artificial Sequence
  Description of Artificial Sequence:  Nucleic Acid
  misc_feature: DNAzyme
cggcgccgggctagctacaacgaggtagaca

SEQ ID NO: 12228 - DNA, 31 bp, Artificial Sequence
  Description of Artificial Sequence:  Nucleic Acid
  misc_feature: DNAzyme
agccggcgggctagctacaacgacgtggtag

SEQ ID NO: 12229 - DNA, 31 bp, Artificial Sequence
  Description of Artificial Sequence:  Nucleic Acid
  misc_feature: DNAzyme
tgagccggggctagctacaacgagccgtggt

SEQ ID NO: 12230 - DNA, 31 bp, Artificial Sequence
  Description of Artificial Sequence:  Nucleic Acid
  misc_feature: DNAzyme
tctttgagggctagctacaacgacggcgccg

SEQ ID NO: 12231 - DNA, 31 bp, Artificial Sequence
  Description of Artificial Sequence:  Nucleic Acid
  misc_feature: DNAzyme
ggctagggggctagctacaacgactttgagc

SEQ ID NO: 12232 - DNA, 31 bp, Artificial Sequence
  Description of Artificial Sequence:  Nucleic Acid
  misc_feature: DNAzyme
tgggccggggctagctacaacgatagggtct

SEQ ID NO: 12233 - DNA, 31 bp, Artificial Sequence
  Description of Artificial Sequence:  Nucleic Acid
  misc_feature: DNAzyme
cctttgggggctagctacaacgacggctagg

SEQ ID NO: 12234 - DNA, 31 bp, Artificial Sequence
  Description of Artificial Sequence:  Nucleic Acid
  misc_feature: DNAzyme
tgattggaggctagctacaacgacctttggg

SEQ ID NO: 12235 - DNA, 31 bp, Artificial Sequence
  Description of Artificial Sequence:  Nucleic Acid
  misc_feature: DNAzyme
ttgggtgaggctagctacaacgatggaccct

SEQ ID NO: 12236 - DNA, 31 bp, Artificial Sequence
  Description of Artificial Sequence:  Nucleic Acid
  misc_feature: DNAzyme
catttgggggctagctacaacgagattggac

SEQ ID NO: 12237 - DNA, 31 bp, Artificial Sequence
  Description of Artificial Sequence:  Nucleic Acid
  misc_feature: DNAzyme
ggtgtacaggctagctacaacgattgggtga

SEQ ID NO: 12238 - DNA, 31 bp, Artificial Sequence
  Description of Artificial Sequence:  Nucleic Acid
  misc_feature: DNAzyme
ttggtgtaggctagctacaacgaatttgggt

SEQ ID NO: 12239 - DNA, 31 bp, Artificial Sequence
  Description of Artificial Sequence:  Nucleic Acid
  misc_feature: DNAzyme
cattggtgggctagctacaacgaacatttgg

SEQ ID NO: 12240 - DNA, 31 bp, Artificial Sequence
  Description of Artificial Sequence:  Nucleic Acid
  misc_feature: DNAzyme
tacattggggctagctacaacgagtacattt

SEQ ID NO: 12241 - DNA, 31 bp, Artificial Sequence
  Description of Artificial Sequence:  Nucleic Acid
  misc_feature: DNAzyme
ggtctacaggctagctacaacgatggtgtac

SEQ ID NO: 12242 - DNA, 31 bp, Artificial Sequence
  Description of Artificial Sequence:  Nucleic Acid
  misc_feature: DNAzyme
ctggtctaggctagctacaacgaattggtgt

SEQ ID NO: 12243 - DNA, 31 bp, Artificial Sequence
  Description of Artificial Sequence:  Nucleic Acid
  misc_feature: DNAzyme
ggtcctggggctagctacaacgactacattg

SEQ ID NO: 12244 - DNA, 31 bp, Artificial Sequence
  Description of Artificial Sequence:  Nucleic Acid
  misc_feature: DNAzyme
cgacgaggggctagctacaacgacctggtct

SEQ ID NO: 12245 - DNA, 31 bp, Artificial Sequence
  Description of Artificial Sequence:  Nucleic Acid
  misc_feature: DNAzyme
ccatccgaggctagctacaacgagaggtcct

SEQ ID NO: 12246 - DNA, 31 bp, Artificial Sequence
  Description of Artificial Sequence:  Nucleic Acid
  misc_feature: DNAzyme
gccggccaggctagctacaacgaccgacgag

SEQ ID NO: 12247 - DNA, 31 bp, Artificial Sequence
  Description of Artificial Sequence:  Nucleic Acid
  misc_feature: DNAzyme
ggcgccggggctagctacaacgacatccgac

SEQ ID NO: 12248 - DNA, 31 bp, Artificial Sequence
  Description of Artificial Sequence:  Nucleic Acid
  misc_feature: DNAzyme
ggggggcgggctagctacaacgacggccatc

SEQ ID NO: 12249 - DNA, 31 bp, Artificial Sequence
  Description of Artificial Sequence:  Nucleic Acid
  misc_feature: DNAzyme
ccggggggggctagctacaacgagccggcca

SEQ ID NO: 12250 - DNA, 31 bp, Artificial Sequence
  Description of Artificial Sequence:  Nucleic Acid
  misc_feature: DNAzyme
ggaccgcgggctagctacaacgatccggggg

SEQ ID NO: 12251 - DNA, 31 bp, Artificial Sequence
  Description of Artificial Sequence:  Nucleic Acid
  misc_feature: DNAzyme
aaggaccgggctagctacaacgagctccggg

SEQ ID NO: 12252 - DNA, 31 bp, Artificial Sequence
  Description of Artificial Sequence:  Nucleic Acid
  misc_feature: DNAzyme
gtcaaggaggctagctacaacgacgcgctcc

SEQ ID NO: 12253 - DNA, 31 bp, Artificial Sequence
  Description of Artificial Sequence:  Nucleic Acid
  misc_feature: DNAzyme
gcatggtgggctagctacaacgacaaggacc

SEQ ID NO: 12254 - DNA, 31 bp, Artificial Sequence
  Description of Artificial Sequence:  Nucleic Acid
  misc_feature: DNAzyme
gtgcatggggctagctacaacgagtcaagga

SEQ ID NO: 12255 - DNA, 31 bp, Artificial Sequence
  Description of Artificial Sequence:  Nucleic Acid
  misc_feature: DNAzyme
caggtgcaggctagctacaacgaggtgtcaa

SEQ ID NO: 12256 - DNA, 31 bp, Artificial Sequence
  Description of Artificial Sequence:  Nucleic Acid
  misc_feature: DNAzyme
cgcaggtgggctagctacaacgaatggtgtc

SEQ ID NO: 12257 - DNA, 31 bp, Artificial Sequence
  Description of Artificial Sequence:  Nucleic Acid
  misc_feature: DNAzyme
gccgcaggggctagctacaacgagcatggtg

SEQ ID NO: 12258 - DNA, 31 bp, Artificial Sequence
  Description of Artificial Sequence:  Nucleic Acid
  misc_feature: DNAzyme
agccgccgggctagctacaacgaaggtgcat

SEQ ID NO: 12259 - DNA, 31 bp, Artificial Sequence
  Description of Artificial Sequence:  Nucleic Acid
  misc_feature: DNAzyme
ccgagccgggctagctacaacgacgcaggtg

SEQ ID NO: 12260 - DNA, 31 bp, Artificial Sequence
  Description of Artificial Sequence:  Nucleic Acid
  misc_feature: DNAzyme
ggtccgagggctagctacaacgacgccgcag

SEQ ID NO: 12261 - DNA, 31 bp, Artificial Sequence
  Description of Artificial Sequence:  Nucleic Acid
  misc_feature: DNAzyme
agtaaaggggctagctacaacgaccgagccg

SEQ ID NO: 12262 - DNA, 31 bp, Artificial Sequence
  Description of Artificial Sequence:  Nucleic Acid
  misc_feature: DNAzyme
tgaccaagggctagctacaacgaaaaggtcc

SEQ ID NO: 12263 - DNA, 31 bp, Artificial Sequence
  Description of Artificial Sequence:  Nucleic Acid
  misc_feature: DNAzyme
tctcgtgaggctagctacaacgacaagtaaa

SEQ ID NO: 12264 - DNA, 31 bp, Artificial Sequence
  Description of Artificial Sequence:  Nucleic Acid
  misc_feature: DNAzyme
gtgtctcgggctagctacaacgagaccaagt

SEQ ID NO: 12265 - DNA, 31 bp, Artificial Sequence
  Description of Artificial Sequence:  Nucleic Acid
  misc_feature: DNAzyme
tcagcgtgggctagctacaacgactcgtgac

SEQ ID NO: 12266 - DNA, 31 bp, Artificial Sequence
  Description of Artificial Sequence:  Nucleic Acid
  misc_feature: DNAzyme
catcagcgggctagctacaacgagtctcgtg

SEQ ID NO: 12267 - DNA, 31 bp, Artificial Sequence
  Description of Artificial Sequence:  Nucleic Acid
  misc_feature: DNAzyme
gacatcagggctagctacaacgagtgtctcg

SEQ ID NO: 12268 - DNA, 31 bp, Artificial Sequence
  Description of Artificial Sequence:  Nucleic Acid
  misc_feature: DNAzyme
gaatgacaggctagctacaacgacagcgtgt

SEQ ID NO: 12269 - DNA, 31 bp, Artificial Sequence
  Description of Artificial Sequence:  Nucleic Acid
  misc_feature: DNAzyme
cggaatgaggctagctacaacgaatcagcgt

SEQ ID NO: 12270 - DNA, 31 bp, Artificial Sequence
  Description of Artificial Sequence:  Nucleic Acid
  misc_feature: DNAzyme
caccggaaggctagctacaacgagacatcag

SEQ ID NO: 12271 - DNA, 31 bp, Artificial Sequence
  Description of Artificial Sequence:  Nucleic Acid
  misc_feature: DNAzyme
ccggcgcaggctagctacaacgacggaatga

SEQ ID NO: 12272 - DNA, 31 bp, Artificial Sequence
  Description of Artificial Sequence:  Nucleic Acid
  misc_feature: DNAzyme
cgccggcgggctagctacaacgaaccggaat

SEQ ID NO: 12273 - DNA, 31 bp, Artificial Sequence
  Description of Artificial Sequence:  Nucleic Acid
  misc_feature: DNAzyme
cccgccggggctagctacaacgagcaccgga

SEQ ID NO: 12274 - DNA, 31 bp, Artificial Sequence
  Description of Artificial Sequence:  Nucleic Acid
  misc_feature: DNAzyme
tcaccccgggctagctacaacgacggcgcac

SEQ ID NO: 12275 - DNA, 31 bp, Artificial Sequence
  Description of Artificial Sequence:  Nucleic Acid
  misc_feature: DNAzyme
tgctgtcaggctagctacaacgacccgccgg

SEQ ID NO: 12276 - DNA, 31 bp, Artificial Sequence
  Description of Artificial Sequence:  Nucleic Acid
  misc_feature: DNAzyme
ccctgctgggctagctacaacgacaccccgc

SEQ ID NO: 12277 - DNA, 31 bp, Artificial Sequence
  Description of Artificial Sequence:  Nucleic Acid
  misc_feature: DNAzyme
tccccctgggctagctacaacgatgtcaccc

SEQ ID NO: 12278 - DNA, 31 bp, Artificial Sequence
  Description of Artificial Sequence:  Nucleic Acid
  misc_feature: DNAzyme
atagtaagggctagctacaacgatccccctg

SEQ ID NO: 12279 - DNA, 31 bp, Artificial Sequence
  Description of Artificial Sequence:  Nucleic Acid
  misc_feature: DNAzyme
ggggatagggctagctacaacgaaagctccc

SEQ ID NO: 12280 - DNA, 31 bp, Artificial Sequence
  Description of Artificial Sequence:  Nucleic Acid
  misc_feature: DNAzyme
ctgggggaggctagctacaacgaagtaagct

SEQ ID NO: 12281 - DNA, 31 bp, Artificial Sequence
  Description of Artificial Sequence:  Nucleic Acid
  misc_feature: DNAzyme
gagatgggggctagctacaacgactggggga

SEQ ID NO: 12282 - DNA, 31 bp, Artificial Sequence
  Description of Artificial Sequence:  Nucleic Acid
  misc_feature: DNAzyme
gtaggagaggctagctacaacgagggcctgg

SEQ ID NO: 12283 - DNA, 31 bp, Artificial Sequence
  Description of Artificial Sequence:  Nucleic Acid
  misc_feature: DNAzyme
ccttcaagggctagctacaacgaaggagatg

SEQ ID NO: 12284 - DNA, 31 bp, Artificial Sequence
  Description of Artificial Sequence:  Nucleic Acid
  misc_feature: DNAzyme
ccgaggagggctagctacaacgaccttcaag

SEQ ID NO: 12285 - DNA, 31 bp, Artificial Sequence
  Description of Artificial Sequence:  Nucleic Acid
  misc_feature: DNAzyme
gtggaccgggctagctacaacgaccgaggag

SEQ ID NO: 12286 - DNA, 31 bp, Artificial Sequence
  Description of Artificial Sequence:  Nucleic Acid
  misc_feature: DNAzyme
gcagtggaggctagctacaacgacgcccgag

SEQ ID NO: 12287 - DNA, 31 bp, Artificial Sequence
  Description of Artificial Sequence:  Nucleic Acid
  misc_feature: DNAzyme
cagagcagggctagctacaacgaggaccgcc

SEQ ID NO: 12288 - DNA, 31 bp, Artificial Sequence
  Description of Artificial Sequence:  Nucleic Acid
  misc_feature: DNAzyme
gggcagagggctagctacaacgaagtggacc

SEQ ID NO: 12289 - DNA, 31 bp, Artificial Sequence
  Description of Artificial Sequence:  Nucleic Acid
  misc_feature: DNAzyme
ccgaagggggctagctacaacgaagagcagt

SEQ ID NO: 12290 - DNA, 31 bp, Artificial Sequence
  Description of Artificial Sequence:  Nucleic Acid
  misc_feature: DNAzyme
acaacgtgggctagctacaacgacccgaagg

SEQ ID NO: 12291 - DNA, 31 bp, Artificial Sequence
  Description of Artificial Sequence:  Nucleic Acid
  misc_feature: DNAzyme
ccacaacgggctagctacaacgagccccgaa

SEQ ID NO: 12292 - DNA, 31 bp, Artificial Sequence
  Description of Artificial Sequence:  Nucleic Acid
  misc_feature: DNAzyme
gcccacaaggctagctacaacgagtgccccg

SEQ ID NO: 12293 - DNA, 31 bp, Artificial Sequence
  Description of Artificial Sequence:  Nucleic Acid
  misc_feature: DNAzyme
gatgcccaggctagctacaacgaaacgtgcc

SEQ ID NO: 12294 - DNA, 31 bp, Artificial Sequence
  Description of Artificial Sequence:  Nucleic Acid
  misc_feature: DNAzyme
ggaagatgggctagctacaacgaccacaacg

SEQ ID NO: 12295 - DNA, 31 bp, Artificial Sequence
  Description of Artificial Sequence:  Nucleic Acid
  misc_feature: DNAzyme
ccggaagaggctagctacaacgagcccacaa

SEQ ID NO: 12296 - DNA, 31 bp, Artificial Sequence
  Description of Artificial Sequence:  Nucleic Acid
  misc_feature: DNAzyme
cacagcagggctagctacaacgaccggaaga

SEQ ID NO: 12297 - DNA, 31 bp, Artificial Sequence
  Description of Artificial Sequence:  Nucleic Acid
  misc_feature: DNAzyme
gcacacagggctagctacaacgaagcccgga

SEQ ID NO: 12298 - DNA, 31 bp, Artificial Sequence
  Description of Artificial Sequence:  Nucleic Acid
  misc_feature: DNAzyme
ggtgcacaggctagctacaacgaagcagccc

SEQ ID NO: 12299 - DNA, 31 bp, Artificial Sequence
  Description of Artificial Sequence:  Nucleic Acid
  misc_feature: DNAzyme
cgggtgcaggctagctacaacgaacagcagc

SEQ ID NO: 12300 - DNA, 31 bp, Artificial Sequence
  Description of Artificial Sequence:  Nucleic Acid
  misc_feature: DNAzyme
cccgggtgggctagctacaacgaacacagca

SEQ ID NO: 12301 - DNA, 31 bp, Artificial Sequence
  Description of Artificial Sequence:  Nucleic Acid
  misc_feature: DNAzyme
cccccgggggctagctacaacgagcacacag

SEQ ID NO: 12302 - DNA, 31 bp, Artificial Sequence
  Description of Artificial Sequence:  Nucleic Acid
  misc_feature: DNAzyme
cttcgcaaggctagctacaacgacccccggg

SEQ ID NO: 12303 - DNA, 31 bp, Artificial Sequence
  Description of Artificial Sequence:  Nucleic Acid
  misc_feature: DNAzyme
cgccttcgggctagctacaacgaaacccccc

SEQ ID NO: 12304 - DNA, 31 bp, Artificial Sequence
  Description of Artificial Sequence:  Nucleic Acid
  misc_feature: DNAzyme
gtccaccgggctagctacaacgacttcgcaa

SEQ ID NO: 12305 - DNA, 31 bp, Artificial Sequence
  Description of Artificial Sequence:  Nucleic Acid
  misc_feature: DNAzyme
aaagtccaggctagctacaacgacgccttcg

SEQ ID NO: 12306 - DNA, 31 bp, Artificial Sequence
  Description of Artificial Sequence:  Nucleic Acid
  misc_feature: DNAzyme
gtacaaagggctagctacaacgaccaccgcc

SEQ ID NO: 12307 - DNA, 31 bp, Artificial Sequence
  Description of Artificial Sequence:  Nucleic Acid
  misc_feature: DNAzyme
aacgggtaggctagctacaacgaaaagtcca

SEQ ID NO: 12308 - DNA, 31 bp, Artificial Sequence
  Description of Artificial Sequence:  Nucleic Acid
  misc_feature: DNAzyme
tcaacgggggctagctacaacgaacaaagtc

SEQ ID NO: 12309 - DNA, 31 bp, Artificial Sequence
  Description of Artificial Sequence:  Nucleic Acid
  misc_feature: DNAzyme
agactcaaggctagctacaacgagggtacaa

SEQ ID NO: 12310 - DNA, 31 bp, Artificial Sequence
  Description of Artificial Sequence:  Nucleic Acid
  misc_feature: DNAzyme
tccatagaggctagctacaacgatcaacggg

SEQ ID NO: 12311 - DNA, 31 bp, Artificial Sequence
  Description of Artificial Sequence:  Nucleic Acid
  misc_feature: DNAzyme
agtttccaggctagctacaacgaagactcaa

SEQ ID NO: 12312 - DNA, 31 bp, Artificial Sequence
  Description of Artificial Sequence:  Nucleic Acid
  misc_feature: DNAzyme
catggtagggctagctacaacgattccatag

SEQ ID NO: 12313 - DNA, 31 bp, Artificial Sequence
  Description of Artificial Sequence:  Nucleic Acid
  misc_feature: DNAzyme
ccgcatggggctagctacaacgaagtttcca

SEQ ID NO: 12314 - DNA, 31 bp, Artificial Sequence
  Description of Artificial Sequence:  Nucleic Acid
  misc_feature: DNAzyme
ggaccgcaggctagctacaacgaggtagttt

SEQ ID NO: 12315 - DNA, 31 bp, Artificial Sequence
  Description of Artificial Sequence:  Nucleic Acid
  misc_feature: DNAzyme
ggggaccgggctagctacaacgaatggtagt

SEQ ID NO: 12316 - DNA, 31 bp, Artificial Sequence
  Description of Artificial Sequence:  Nucleic Acid
  misc_feature: DNAzyme
accggggaggctagctacaacgacgcatggt

SEQ ID NO: 12317 - DNA, 31 bp, Artificial Sequence
  Description of Artificial Sequence:  Nucleic Acid
  misc_feature: DNAzyme
cgtgaagaggctagctacaacgacggggacc

SEQ ID NO: 12318 - DNA, 31 bp, Artificial Sequence
  Description of Artificial Sequence:  Nucleic Acid
  misc_feature: DNAzyme
gttgtccgggctagctacaacgagaagaccg

SEQ ID NO: 12319 - DNA, 31 bp, Artificial Sequence
  Description of Artificial Sequence:  Nucleic Acid
  misc_feature: DNAzyme
acgagttgggctagctacaacgaccgtgaag

SEQ ID NO: 12320 - DNA, 31 bp, Artificial Sequence
  Description of Artificial Sequence:  Nucleic Acid
  misc_feature: DNAzyme
gggacgagggctagctacaacgatgtccgtg

SEQ ID NO: 12321 - DNA, 31 bp, Artificial Sequence
  Description of Artificial Sequence:  Nucleic Acid
  misc_feature: DNAzyme
gggggggaggctagctacaacgagagttgtc

SEQ ID NO: 12322 - DNA, 31 bp, Artificial Sequence
  Description of Artificial Sequence:  Nucleic Acid
  misc_feature: DNAzyme
cggtacggggctagctacaacgatggggggg

SEQ ID NO: 12323 - DNA, 31 bp, Artificial Sequence
  Description of Artificial Sequence:  Nucleic Acid
  misc_feature: DNAzyme
ctgcggtaggctagctacaacgaggctgggg

SEQ ID NO: 12324 - DNA, 31 bp, Artificial Sequence
  Description of Artificial Sequence:  Nucleic Acid
  misc_feature: DNAzyme
gtctgcggggctagctacaacgaacggctgg

SEQ ID NO: 12325 - DNA, 31 bp, Artificial Sequence
  Description of Artificial Sequence:  Nucleic Acid
  misc_feature: DNAzyme
aatgtctgggctagctacaacgaggtacggc

SEQ ID NO: 12326 - DNA, 31 bp, Artificial Sequence
  Description of Artificial Sequence:  Nucleic Acid
  misc_feature: DNAzyme
ttggaatgggctagctacaacgactgcggta

SEQ ID NO: 12327 - DNA, 31 bp, Artificial Sequence
  Description of Artificial Sequence:  Nucleic Acid
  misc_feature: DNAzyme
acttggaaggctagctacaacgagtctgcgg

SEQ ID NO: 12328 - DNA, 31 bp, Artificial Sequence
  Description of Artificial Sequence:  Nucleic Acid
  misc_feature: DNAzyme
gtgggccaggctagctacaacgattggaatg

SEQ ID NO: 12329 - DNA, 31 bp, Artificial Sequence
  Description of Artificial Sequence:  Nucleic Acid
  misc_feature: DNAzyme
taggtgggggctagctacaacgacacttgga

SEQ ID NO: 12330 - DNA, 31 bp, Artificial Sequence
  Description of Artificial Sequence:  Nucleic Acid
  misc_feature: DNAzyme
cgtgtaggggctagctacaacgagggccact

SEQ ID NO: 12331 - DNA, 31 bp, Artificial Sequence
  Description of Artificial Sequence:  Nucleic Acid
  misc_feature: DNAzyme
ggagcgtgggctagctacaacgaaggtgggc

SEQ ID NO: 12332 - DNA, 31 bp, Artificial Sequence
  Description of Artificial Sequence:  Nucleic Acid
  misc_feature: DNAzyme
tgggagcgggctagctacaacgagtaggtgg

SEQ ID NO: 12333 - DNA, 31 bp, Artificial Sequence
  Description of Artificial Sequence:  Nucleic Acid
  misc_feature: DNAzyme
agtgggagggctagctacaacgagtgtaggt

SEQ ID NO: 12334 - DNA, 31 bp, Artificial Sequence
  Description of Artificial Sequence:  Nucleic Acid
  misc_feature: DNAzyme
gctgccagggctagctacaacgagggagcgt

SEQ ID NO: 12335 - DNA, 31 bp, Artificial Sequence
  Description of Artificial Sequence:  Nucleic Acid
  misc_feature: DNAzyme
tgccgctgggctagctacaacgacagtggga

SEQ ID NO: 12336 - DNA, 31 bp, Artificial Sequence
  Description of Artificial Sequence:  Nucleic Acid
  misc_feature: DNAzyme
tcttgccgggctagctacaacgatgccagtg

SEQ ID NO: 12337 - DNA, 31 bp, Artificial Sequence
  Description of Artificial Sequence:  Nucleic Acid
  misc_feature: DNAzyme
tgctcttgggctagctacaacgacgctgcca

SEQ ID NO: 12338 - DNA, 31 bp, Artificial Sequence
  Description of Artificial Sequence:  Nucleic Acid
  misc_feature: DNAzyme
ccttagtgggctagctacaacgatcttgccg

SEQ ID NO: 12339 - DNA, 31 bp, Artificial Sequence
  Description of Artificial Sequence:  Nucleic Acid
  misc_feature: DNAzyme
taccttagggctagctacaacgagctcttgc

SEQ ID NO: 12340 - DNA, 31 bp, Artificial Sequence
  Description of Artificial Sequence:  Nucleic Acid
  misc_feature: DNAzyme
agccggtaggctagctacaacgacttagtgc

SEQ ID NO: 12341 - DNA, 31 bp, Artificial Sequence
  Description of Artificial Sequence:  Nucleic Acid
  misc_feature: DNAzyme
gcagccggggctagctacaacgaaccttagt

SEQ ID NO: 12342 - DNA, 31 bp, Artificial Sequence
  Description of Artificial Sequence:  Nucleic Acid
  misc_feature: DNAzyme
atatgcagggctagctacaacgacggtacct

SEQ ID NO: 12343 - DNA, 31 bp, Artificial Sequence
  Description of Artificial Sequence:  Nucleic Acid
  misc_feature: DNAzyme
tgcatatgggctagctacaacgaagccggta

SEQ ID NO: 12344 - DNA, 31 bp, Artificial Sequence
  Description of Artificial Sequence:  Nucleic Acid
  misc_feature: DNAzyme
gctgcataggctagctacaacgagcagccgg

SEQ ID NO: 12345 - DNA, 31 bp, Artificial Sequence
  Description of Artificial Sequence:  Nucleic Acid
  misc_feature: DNAzyme
gggctgcaggctagctacaacgaatgcagcc

SEQ ID NO: 12346 - DNA, 31 bp, Artificial Sequence
  Description of Artificial Sequence:  Nucleic Acid
  misc_feature: DNAzyme
ttgggctgggctagctacaacgaatatgcag

SEQ ID NO: 12347 - DNA, 31 bp, Artificial Sequence
  Description of Artificial Sequence:  Nucleic Acid
  misc_feature: DNAzyme
cccttgggggctagctacaacgatgcatatg

SEQ ID NO: 12348 - DNA, 31 bp, Artificial Sequence
  Description of Artificial Sequence:  Nucleic Acid
  misc_feature: DNAzyme
actttgtaggctagctacaacgaccttgggc

SEQ ID NO: 12349 - DNA, 31 bp, Artificial Sequence
  Description of Artificial Sequence:  Nucleic Acid
  misc_feature: DNAzyme
gcactttgggctagctacaacgaacccttgg

SEQ ID NO: 12350 - DNA, 31 bp, Artificial Sequence
  Description of Artificial Sequence:  Nucleic Acid
  misc_feature: DNAzyme
gacgagcaggctagctacaacgatttgtacc

SEQ ID NO: 12351 - DNA, 31 bp, Artificial Sequence
  Description of Artificial Sequence:  Nucleic Acid
  misc_feature: DNAzyme
aggacgagggctagctacaacgaactttgta

SEQ ID NO: 12352 - DNA, 31 bp, Artificial Sequence
  Description of Artificial Sequence:  Nucleic Acid
  misc_feature: DNAzyme
atttaggaggctagctacaacgagagcactt

SEQ ID NO: 12353 - DNA, 31 bp, Artificial Sequence
  Description of Artificial Sequence:  Nucleic Acid
  misc_feature: DNAzyme
cggacggaggctagctacaacgattaggacg

SEQ ID NO: 12354 - DNA, 31 bp, Artificial Sequence
  Description of Artificial Sequence:  Nucleic Acid
  misc_feature: DNAzyme
gtaacggaggctagctacaacgaggatttag

SEQ ID NO: 12355 - DNA, 31 bp, Artificial Sequence
  Description of Artificial Sequence:  Nucleic Acid
  misc_feature: DNAzyme
ggcggtaaggctagctacaacgaggacggat

SEQ ID NO: 12356 - DNA, 31 bp, Artificial Sequence
  Description of Artificial Sequence:  Nucleic Acid
  misc_feature: DNAzyme
ggtggcggggctagctacaacgaaacggacg

SEQ ID NO: 12357 - DNA, 31 bp, Artificial Sequence
  Description of Artificial Sequence:  Nucleic Acid
  misc_feature: DNAzyme
taaggtggggctagctacaacgaggtaacgg

SEQ ID NO: 12358 - DNA, 31 bp, Artificial Sequence
  Description of Artificial Sequence:  Nucleic Acid
  misc_feature: DNAzyme
ccctaaggggctagctacaacgaggcggtaa

SEQ ID NO: 12359 - DNA, 31 bp, Artificial Sequence
  Description of Artificial Sequence:  Nucleic Acid
  misc_feature: DNAzyme
gccccaaaggctagctacaacgacctaaggt

SEQ ID NO: 12360 - DNA, 31 bp, Artificial Sequence
  Description of Artificial Sequence:  Nucleic Acid
  misc_feature: DNAzyme
catatacgggctagctacaacgacccaaacc

SEQ ID NO: 12361 - DNA, 31 bp, Artificial Sequence
  Description of Artificial Sequence:  Nucleic Acid
  misc_feature: DNAzyme
gacatataggctagctacaacgagccccaaa

SEQ ID NO: 12362 - DNA, 31 bp, Artificial Sequence
  Description of Artificial Sequence:  Nucleic Acid
  misc_feature: DNAzyme
tagacataggctagctacaacgaacgcccca

SEQ ID NO: 12363 - DNA, 31 bp, Artificial Sequence
  Description of Artificial Sequence:  Nucleic Acid
  misc_feature: DNAzyme
cttagacaggctagctacaacgaatacgccc

SEQ ID NO: 12364 - DNA, 31 bp, Artificial Sequence
  Description of Artificial Sequence:  Nucleic Acid
  misc_feature: DNAzyme
gccttagaggctagctacaacgaatatacgc

SEQ ID NO: 12365 - DNA, 31 bp, Artificial Sequence
  Description of Artificial Sequence:  Nucleic Acid
  misc_feature: DNAzyme
accgtgtgggctagctacaacgacttagaca

SEQ ID NO: 12366 - DNA, 31 bp, Artificial Sequence
  Description of Artificial Sequence:  Nucleic Acid
  misc_feature: DNAzyme
acaccgtgggctagctacaacgagccttaga

SEQ ID NO: 12367 - DNA, 31 bp, Artificial Sequence
  Description of Artificial Sequence:  Nucleic Acid
  misc_feature: DNAzyme
cgacaccgggctagctacaacgagtgcctta

SEQ ID NO: 12368 - DNA, 31 bp, Artificial Sequence
  Description of Artificial Sequence:  Nucleic Acid
  misc_feature: DNAzyme
gatcgacaggctagctacaacgacgtgtgcc

SEQ ID NO: 12369 - DNA, 31 bp, Artificial Sequence
  Description of Artificial Sequence:  Nucleic Acid
  misc_feature: DNAzyme
aggatcgaggctagctacaacgaaccgtgtg

SEQ ID NO: 12370 - DNA, 31 bp, Artificial Sequence
  Description of Artificial Sequence:  Nucleic Acid
  misc_feature: DNAzyme
tgttaggaggctagctacaacgacgacaccg

SEQ ID NO: 12371 - DNA, 31 bp, Artificial Sequence
  Description of Artificial Sequence:  Nucleic Acid
  misc_feature: DNAzyme
ttctgatgggctagctacaacgataggatcg

SEQ ID NO: 12372 - DNA, 31 bp, Artificial Sequence
  Description of Artificial Sequence:  Nucleic Acid
  misc_feature: DNAzyme
agttctgaggctagctacaacgagttaggat

SEQ ID NO: 12373 - DNA, 31 bp, Artificial Sequence
  Description of Artificial Sequence:  Nucleic Acid
  misc_feature: DNAzyme
taccccagggctagctacaacgatctgatgt

SEQ ID NO: 12374 - DNA, 31 bp, Artificial Sequence
  Description of Artificial Sequence:  Nucleic Acid
  misc_feature: DNAzyme
ggtccttaggctagctacaacgacccagttc

SEQ ID NO: 12375 - DNA, 31 bp, Artificial Sequence
  Description of Artificial Sequence:  Nucleic Acid
  misc_feature: DNAzyme
ggtgatggggctagctacaacgaccttaccc

SEQ ID NO: 12376 - DNA, 31 bp, Artificial Sequence
  Description of Artificial Sequence:  Nucleic Acid
  misc_feature: DNAzyme
cgtggtgaggctagctacaacgaggtcctta

SEQ ID NO: 12377 - DNA, 31 bp, Artificial Sequence
  Description of Artificial Sequence:  Nucleic Acid
  misc_feature: DNAzyme
gcccgtggggctagctacaacgagatggtcc

SEQ ID NO: 12378 - DNA, 31 bp, Artificial Sequence
  Description of Artificial Sequence:  Nucleic Acid
  misc_feature: DNAzyme
ggcgcccgggctagctacaacgaggtgatgg

SEQ ID NO: 12379 - DNA, 31 bp, Artificial Sequence
  Description of Artificial Sequence:  Nucleic Acid
  misc_feature: DNAzyme
tgggggcgggctagctacaacgaccgtggtg

SEQ ID NO: 12380 - DNA, 31 bp, Artificial Sequence
  Description of Artificial Sequence:  Nucleic Acid
  misc_feature: DNAzyme
gatgggggggctagctacaacgagcccgtgg

SEQ ID NO: 12381 - DNA, 31 bp, Artificial Sequence
  Description of Artificial Sequence:  Nucleic Acid
  misc_feature: DNAzyme
gtacgtgaggctagctacaacgagggggcgc

SEQ ID NO: 12382 - DNA, 31 bp, Artificial Sequence
  Description of Artificial Sequence:  Nucleic Acid
  misc_feature: DNAzyme
ggagtacgggctagctacaacgagatggggg

SEQ ID NO: 12383 - DNA, 31 bp, Artificial Sequence
  Description of Artificial Sequence:  Nucleic Acid
  misc_feature: DNAzyme
gtggagtaggctagctacaacgagtgatggg

SEQ ID NO: 12384 - DNA, 31 bp, Artificial Sequence
  Description of Artificial Sequence:  Nucleic Acid
  misc_feature: DNAzyme
aggtggagggctagctacaacgaacgtgatg

SEQ ID NO: 12385 - DNA, 31 bp, Artificial Sequence
  Description of Artificial Sequence:  Nucleic Acid
  misc_feature: DNAzyme
gccataggggctagctacaacgaggagtacg

SEQ ID NO: 12386 - DNA, 31 bp, Artificial Sequence
  Description of Artificial Sequence:  Nucleic Acid
  misc_feature: DNAzyme
acttgccaggctagctacaacgaaggtggag

SEQ ID NO: 12387 - DNA, 31 bp, Artificial Sequence
  Description of Artificial Sequence:  Nucleic Acid
  misc_feature: DNAzyme
ggaacttgggctagctacaacgacataggtg

SEQ ID NO: 12388 - DNA, 31 bp, Artificial Sequence
  Description of Artificial Sequence:  Nucleic Acid
  misc_feature: DNAzyme
gcaaggaaggctagctacaacgattgccata

SEQ ID NO: 12389 - DNA, 31 bp, Artificial Sequence
  Description of Artificial Sequence:  Nucleic Acid
  misc_feature: DNAzyme
accgtcggggctagctacaacgaaaggaact

SEQ ID NO: 12390 - DNA, 31 bp, Artificial Sequence
  Description of Artificial Sequence:  Nucleic Acid
  misc_feature: DNAzyme
aaccaccgggctagctacaacgacggcaagg

SEQ ID NO: 12391 - DNA, 31 bp, Artificial Sequence
  Description of Artificial Sequence:  Nucleic Acid
  misc_feature: DNAzyme
agcaaccaggctagctacaacgacgtcggca

SEQ ID NO: 12392 - DNA, 31 bp, Artificial Sequence
  Description of Artificial Sequence:  Nucleic Acid
  misc_feature: DNAzyme
cagagcaaggctagctacaacgacaccgtcg

SEQ ID NO: 12393 - DNA, 31 bp, Artificial Sequence
  Description of Artificial Sequence:  Nucleic Acid
  misc_feature: DNAzyme
ccccagagggctagctacaacgaaaccaccg

SEQ ID NO: 12394 - DNA, 31 bp, Artificial Sequence
  Description of Artificial Sequence:  Nucleic Acid
  misc_feature: DNAzyme
cataggcgggctagctacaacgaccccagag

SEQ ID NO: 12395 - DNA, 31 bp, Artificial Sequence
  Description of Artificial Sequence:  Nucleic Acid
  misc_feature: DNAzyme
gtcataggggctagctacaacgagcccccag

SEQ ID NO: 12396 - DNA, 31 bp, Artificial Sequence
  Description of Artificial Sequence:  Nucleic Acid
  misc_feature: DNAzyme
tgatgtcaggctagctacaacgaaggcgccc

SEQ ID NO: 12397 - DNA, 31 bp, Artificial Sequence
  Description of Artificial Sequence:  Nucleic Acid
  misc_feature: DNAzyme
ttatgatgggctagctacaacgacataggcg

SEQ ID NO: 12398 - DNA, 31 bp, Artificial Sequence
  Description of Artificial Sequence:  Nucleic Acid
  misc_feature: DNAzyme
cattatgaggctagctacaacgagtcatagg

SEQ ID NO: 12399 - DNA, 31 bp, Artificial Sequence
  Description of Artificial Sequence:  Nucleic Acid
  misc_feature: DNAzyme
acacattaggctagctacaacgagatgtcat

SEQ ID NO: 12400 - DNA, 31 bp, Artificial Sequence
  Description of Artificial Sequence:  Nucleic Acid
  misc_feature: DNAzyme
atcacacaggctagctacaacgatatgatgt

SEQ ID NO: 12401 - DNA, 31 bp, Artificial Sequence
  Description of Artificial Sequence:  Nucleic Acid
  misc_feature: DNAzyme
tcatcacaggctagctacaacgaattatgat

SEQ ID NO: 12402 - DNA, 31 bp, Artificial Sequence
  Description of Artificial Sequence:  Nucleic Acid
  misc_feature: DNAzyme
actcatcaggctagctacaacgaacattatg

SEQ ID NO: 12403 - DNA, 31 bp, Artificial Sequence
  Description of Artificial Sequence:  Nucleic Acid
  misc_feature: DNAzyme
ggcactcaggctagctacaacgacacacatt

SEQ ID NO: 12404 - DNA, 31 bp, Artificial Sequence
  Description of Artificial Sequence:  Nucleic Acid
  misc_feature: DNAzyme
gagtggcaggctagctacaacgatcatcaca

SEQ ID NO: 12405 - DNA, 31 bp, Artificial Sequence
  Description of Artificial Sequence:  Nucleic Acid
  misc_feature: DNAzyme
ttgagtggggctagctacaacgaactcatca

SEQ ID NO: 12406 - DNA, 31 bp, Artificial Sequence
  Description of Artificial Sequence:  Nucleic Acid
  misc_feature: DNAzyme
caattgagggctagctacaacgaggcactca

SEQ ID NO: 12407 - DNA, 31 bp, Artificial Sequence
  Description of Artificial Sequence:  Nucleic Acid
  misc_feature: DNAzyme
cgagtcaaggctagctacaacgatgagtggc

SEQ ID NO: 12408 - DNA, 31 bp, Artificial Sequence
  Description of Artificial Sequence:  Nucleic Acid
  misc_feature: DNAzyme
aagtcgagggctagctacaacgacaattgag

SEQ ID NO: 12409 - DNA, 31 bp, Artificial Sequence
  Description of Artificial Sequence:  Nucleic Acid
  misc_feature: DNAzyme
aatggaagggctagctacaacgacgagtcaa

SEQ ID NO: 12410 - DNA, 31 bp, Artificial Sequence
  Description of Artificial Sequence:  Nucleic Acid
  misc_feature: DNAzyme
gcccaaaaggctagctacaacgaggaagtcg

SEQ ID NO: 12411 - DNA, 31 bp, Artificial Sequence
  Description of Artificial Sequence:  Nucleic Acid
  misc_feature: DNAzyme
tgccgatgggctagctacaacgaccaaaatg

SEQ ID NO: 12412 - DNA, 31 bp, Artificial Sequence
  Description of Artificial Sequence:  Nucleic Acid
  misc_feature: DNAzyme
tgtgccgaggctagctacaacgagcccaaaa

SEQ ID NO: 12413 - DNA, 31 bp, Artificial Sequence
  Description of Artificial Sequence:  Nucleic Acid
  misc_feature: DNAzyme
ggactgtgggctagctacaacgacgatgccc

SEQ ID NO: 12414 - DNA, 31 bp, Artificial Sequence
  Description of Artificial Sequence:  Nucleic Acid
  misc_feature: DNAzyme
caggactgggctagctacaacgagccgatgc

SEQ ID NO: 12415 - DNA, 31 bp, Artificial Sequence
  Description of Artificial Sequence:  Nucleic Acid
  misc_feature: DNAzyme
gtccaggaggctagctacaacgatgtgccga

SEQ ID NO: 12416 - DNA, 31 bp, Artificial Sequence
  Description of Artificial Sequence:  Nucleic Acid
  misc_feature: DNAzyme
ccgcttggggctagctacaacgaccaggact

SEQ ID NO: 12417 - DNA, 31 bp, Artificial Sequence
  Description of Artificial Sequence:  Nucleic Acid
  misc_feature: DNAzyme
cgtctccgggctagctacaacgattggtcca

SEQ ID NO: 12418 - DNA, 31 bp, Artificial Sequence
  Description of Artificial Sequence:  Nucleic Acid
  misc_feature: DNAzyme
tccagccgggctagctacaacgactccgctt

SEQ ID NO: 12419 - DNA, 31 bp, Artificial Sequence
  Description of Artificial Sequence:  Nucleic Acid
  misc_feature: DNAzyme
cgctccagggctagctacaacgacgtctccg

SEQ ID NO: 12420 - DNA, 31 bp, Artificial Sequence
  Description of Artificial Sequence:  Nucleic Acid
  misc_feature: DNAzyme
gagccgcgggctagctacaacgatccagccg

SEQ ID NO: 12421 - DNA, 31 bp, Artificial Sequence
  Description of Artificial Sequence:  Nucleic Acid
  misc_feature: DNAzyme
acgagccgggctagctacaacgagctccagc

SEQ ID NO: 12422 - DNA, 31 bp, Artificial Sequence
  Description of Artificial Sequence:  Nucleic Acid
  misc_feature: DNAzyme
acgacgagggctagctacaacgacgcgctcc

SEQ ID NO: 12423 - DNA, 31 bp, Artificial Sequence
  Description of Artificial Sequence:  Nucleic Acid
  misc_feature: DNAzyme
gagcacgaggctagctacaacgagagccgcg

SEQ ID NO: 12424 - DNA, 31 bp, Artificial Sequence
  Description of Artificial Sequence:  Nucleic Acid
  misc_feature: DNAzyme
ggcgagcaggctagctacaacgagacgagcc

SEQ ID NO: 12425 - DNA, 31 bp, Artificial Sequence
  Description of Artificial Sequence:  Nucleic Acid
  misc_feature: DNAzyme
gtggcgagggctagctacaacgaacgacgag

SEQ ID NO: 12426 - DNA, 31 bp, Artificial Sequence
  Description of Artificial Sequence:  Nucleic Acid
  misc_feature: DNAzyme
agcggtggggctagctacaacgagagcacga

SEQ ID NO: 12427 - DNA, 31 bp, Artificial Sequence
  Description of Artificial Sequence:  Nucleic Acid
  misc_feature: DNAzyme
cgtagcggggctagctacaacgaggcgagca

SEQ ID NO: 12428 - DNA, 31 bp, Artificial Sequence
  Description of Artificial Sequence:  Nucleic Acid
  misc_feature: DNAzyme
aggcgtagggctagctacaacgaggtggcga

SEQ ID NO: 12429 - DNA, 31 bp, Artificial Sequence
  Description of Artificial Sequence:  Nucleic Acid
  misc_feature: DNAzyme
cggaggcgggctagctacaacgaagcggtgg

SEQ ID NO: 12430 - DNA, 31 bp, Artificial Sequence
  Description of Artificial Sequence:  Nucleic Acid
  misc_feature: DNAzyme
cccggaggggctagctacaacgagtagcggt

SEQ ID NO: 12431 - DNA, 31 bp, Artificial Sequence
  Description of Artificial Sequence:  Nucleic Acid
  misc_feature: DNAzyme
gtgaccgaggctagctacaacgacccggagg

SEQ ID NO: 12432 - DNA, 31 bp, Artificial Sequence
  Description of Artificial Sequence:  Nucleic Acid
  misc_feature: DNAzyme
cacggtgaggctagctacaacgacgatcccg

SEQ ID NO: 12433 - DNA, 31 bp, Artificial Sequence
  Description of Artificial Sequence:  Nucleic Acid
  misc_feature: DNAzyme
tggcacggggctagctacaacgagaccgatc

SEQ ID NO: 12434 - DNA, 31 bp, Artificial Sequence
  Description of Artificial Sequence:  Nucleic Acid
  misc_feature: DNAzyme
atgtggcaggctagctacaacgaggtgaccg

SEQ ID NO: 12435 - DNA, 31 bp, Artificial Sequence
  Description of Artificial Sequence:  Nucleic Acid
  misc_feature: DNAzyme
ggatgtggggctagctacaacgaacggtgac

SEQ ID NO: 12436 - DNA, 31 bp, Artificial Sequence
  Description of Artificial Sequence:  Nucleic Acid
  misc_feature: DNAzyme
ttgggatgggctagctacaacgaggcacggt

SEQ ID NO: 12437 - DNA, 31 bp, Artificial Sequence
  Description of Artificial Sequence:  Nucleic Acid
  misc_feature: DNAzyme
tgttgggaggctagctacaacgagtggcacg

SEQ ID NO: 12438 - DNA, 31 bp, Artificial Sequence
  Description of Artificial Sequence:  Nucleic Acid
  misc_feature: DNAzyme
cctcgatgggctagctacaacgatgggatgt

SEQ ID NO: 12439 - DNA, 31 bp, Artificial Sequence
  Description of Artificial Sequence:  Nucleic Acid
  misc_feature: DNAzyme
ctcctcgaggctagctacaacgagttgggat

SEQ ID NO: 12440 - DNA, 31 bp, Artificial Sequence
  Description of Artificial Sequence:  Nucleic Acid
  misc_feature: DNAzyme
caaggctaggctagctacaacgactcctcga

SEQ ID NO: 12441 - DNA, 31 bp, Artificial Sequence
  Description of Artificial Sequence:  Nucleic Acid
  misc_feature: DNAzyme
ggacaaggggctagctacaacgatatctcct

SEQ ID NO: 12442 - DNA, 31 bp, Artificial Sequence
  Description of Artificial Sequence:  Nucleic Acid
  misc_feature: DNAzyme
gtgttggaggctagctacaacgaaaggctat

SEQ ID NO: 12443 - DNA, 31 bp, Artificial Sequence
  Description of Artificial Sequence:  Nucleic Acid
  misc_feature: DNAzyme
ctccggtgggctagctacaacgatggacaag

SEQ ID NO: 12444 - DNA, 31 bp, Artificial Sequence
  Description of Artificial Sequence:  Nucleic Acid
  misc_feature: DNAzyme
ctctccggggctagctacaacgagttggaca

SEQ ID NO: 12445 - DNA, 31 bp, Artificial Sequence
  Description of Artificial Sequence:  Nucleic Acid
  misc_feature: DNAzyme
gaaggggaggctagctacaacgactctccgg

SEQ ID NO: 12446 - DNA, 31 bp, Artificial Sequence
  Description of Artificial Sequence:  Nucleic Acid
  misc_feature: DNAzyme
ctttgccaggctagctacaacgaagaagggg

SEQ ID NO: 12447 - DNA, 31 bp, Artificial Sequence
  Description of Artificial Sequence:  Nucleic Acid
  misc_feature: DNAzyme
tggctttgggctagctacaacgacatagaag

SEQ ID NO: 12448 - DNA, 31 bp, Artificial Sequence
  Description of Artificial Sequence:  Nucleic Acid
  misc_feature: DNAzyme
ggggatggggctagctacaacgatttgccat

SEQ ID NO: 12449 - DNA, 31 bp, Artificial Sequence
  Description of Artificial Sequence:  Nucleic Acid
  misc_feature: DNAzyme
gatggggaggctagctacaacgaggctttgc

SEQ ID NO: 12450 - DNA, 31 bp, Artificial Sequence
  Description of Artificial Sequence:  Nucleic Acid
  misc_feature: DNAzyme
ggtctcgaggctagctacaacgaggggatgg

SEQ ID NO: 12451 - DNA, 31 bp, Artificial Sequence
  Description of Artificial Sequence:  Nucleic Acid
  misc_feature: DNAzyme
tttgatggggctagctacaacgactcgatgg

SEQ ID NO: 12452 - DNA, 31 bp, Artificial Sequence
  Description of Artificial Sequence:  Nucleic Acid
  misc_feature: DNAzyme
ccctttgaggctagctacaacgaggtctcga

SEQ ID NO: 12453 - DNA, 31 bp, Artificial Sequence
  Description of Artificial Sequence:  Nucleic Acid
  misc_feature: DNAzyme
atgagatgggctagctacaacgactcccccc

SEQ ID NO: 12454 - DNA, 31 bp, Artificial Sequence
  Description of Artificial Sequence:  Nucleic Acid
  misc_feature: DNAzyme
agatgagaggctagctacaacgagcctcccc

SEQ ID NO: 12455 - DNA, 31 bp, Artificial Sequence
  Description of Artificial Sequence:  Nucleic Acid
  misc_feature: DNAzyme
gcagaagaggctagctacaacgagagatgcc

SEQ ID NO: 12456 - DNA, 31 bp, Artificial Sequence
  Description of Artificial Sequence:  Nucleic Acid
  misc_feature: DNAzyme
tggaatggggctagctacaacgaagaagatg

SEQ ID NO: 12457 - DNA, 31 bp, Artificial Sequence
  Description of Artificial Sequence:  Nucleic Acid
  misc_feature: DNAzyme
tcttggaaggctagctacaacgaggcagaag

SEQ ID NO: 12458 - DNA, 31 bp, Artificial Sequence
  Description of Artificial Sequence:  Nucleic Acid
  misc_feature: DNAzyme
tcgtcacaggctagctacaacgattcttctt

SEQ ID NO: 12459 - DNA, 31 bp, Artificial Sequence
  Description of Artificial Sequence:  Nucleic Acid
  misc_feature: DNAzyme
gctcgtcaggctagctacaacgaatttcttc

SEQ ID NO: 12460 - DNA, 31 bp, Artificial Sequence
  Description of Artificial Sequence:  Nucleic Acid
  misc_feature: DNAzyme
cgagctcgggctagctacaacgacacatttc

SEQ ID NO: 12461 - DNA, 31 bp, Artificial Sequence
  Description of Artificial Sequence:  Nucleic Acid
  misc_feature: DNAzyme
gcagcgagggctagctacaacgatcgtcaca

SEQ ID NO: 12462 - DNA, 31 bp, Artificial Sequence
  Description of Artificial Sequence:  Nucleic Acid
  misc_feature: DNAzyme
ctttgcagggctagctacaacgagagctcgt

SEQ ID NO: 12463 - DNA, 31 bp, Artificial Sequence
  Description of Artificial Sequence:  Nucleic Acid
  misc_feature: DNAzyme
cagctttgggctagctacaacgaagcgagct

SEQ ID NO: 12464 - DNA, 31 bp, Artificial Sequence
  Description of Artificial Sequence:  Nucleic Acid
  misc_feature: DNAzyme
cccgacagggctagctacaacgatttgcagc

SEQ ID NO: 12465 - DNA, 31 bp, Artificial Sequence
  Description of Artificial Sequence:  Nucleic Acid
  misc_feature: DNAzyme
aggcccgaggctagctacaacgaagctttgc

SEQ ID NO: 12466 - DNA, 31 bp, Artificial Sequence
  Description of Artificial Sequence:  Nucleic Acid
  misc_feature: DNAzyme
gtccgaggggctagctacaacgaccgacagc

SEQ ID NO: 12467 - DNA, 31 bp, Artificial Sequence
  Description of Artificial Sequence:  Nucleic Acid
  misc_feature: DNAzyme
gcgttaagggctagctacaacgaccgaggcc

SEQ ID NO: 12468 - DNA, 31 bp, Artificial Sequence
  Description of Artificial Sequence:  Nucleic Acid
  misc_feature: DNAzyme
ctacagcgggctagctacaacgataagtccg

SEQ ID NO: 12469 - DNA, 31 bp, Artificial Sequence
  Description of Artificial Sequence:  Nucleic Acid
  misc_feature: DNAzyme
cgctacagggctagctacaacgagttaagtc

SEQ ID NO: 12470 - DNA, 31 bp, Artificial Sequence
  Description of Artificial Sequence:  Nucleic Acid
  misc_feature: DNAzyme
atacgctaggctagctacaacgaagcgttaa

SEQ ID NO: 12471 - DNA, 31 bp, Artificial Sequence
  Description of Artificial Sequence:  Nucleic Acid
  misc_feature: DNAzyme
gtaatacgggctagctacaacgatacagcgt

SEQ ID NO: 12472 - DNA, 31 bp, Artificial Sequence
  Description of Artificial Sequence:  Nucleic Acid
  misc_feature: DNAzyme
cggtaataggctagctacaacgagctacagc

SEQ ID NO: 12473 - DNA, 31 bp, Artificial Sequence
  Description of Artificial Sequence:  Nucleic Acid
  misc_feature: DNAzyme
cccggtaaggctagctacaacgaacgctaca

SEQ ID NO: 12474 - DNA, 31 bp, Artificial Sequence
  Description of Artificial Sequence:  Nucleic Acid
  misc_feature: DNAzyme
gaccccggggctagctacaacgaaatacgct

SEQ ID NO: 12475 - DNA, 31 bp, Artificial Sequence
  Description of Artificial Sequence:  Nucleic Acid
  misc_feature: DNAzyme
cgtcgagaggctagctacaacgacccggtaa

SEQ ID NO: 12476 - DNA, 31 bp, Artificial Sequence
  Description of Artificial Sequence:  Nucleic Acid
  misc_feature: DNAzyme
cggacacgggctagctacaacgacgagaccc

SEQ ID NO: 12477 - DNA, 31 bp, Artificial Sequence
  Description of Artificial Sequence:  Nucleic Acid
  misc_feature: DNAzyme
gacggacaggctagctacaacgagtcgagac

(The sequence listing continues in the following parts.)
